(19) United States
(12) Patent Application Publication
(10) Pub. No.: US 2026/0015631 A1
(43) Pub. Date: Jan. 15, 2026

(54) TYPE I-D CRISPR-ASSOCIATED TRANSPOSASE AND TYROSINE RECOMBINASE TRANSPOSON SYSTEMS

(71) Applicants: The Broad Institute, Inc., Cambridge, MA (US); Massachusetts Institute of Technology, Cambridge, MA (US)

(72) Inventors: Guilhem Faure, Cambridge, MA (US); Makoto Saito, Cambridge, MA (US); Feng Zhang, Cambridge, MA (US)

(21) Appl. No.: 19/287,917

(22) Filed: Aug. 1, 2025

Related U.S. Application Data
(63) Continuation of application No. PCT/US2024/013963, filed on Feb. 1, 2024.
(60) Provisional application No. 63/442,710, filed on Feb. 1, 2023.

(51) Int. Cl. C12N 15/90; C12N 9/12; C12N 9/22; C12N 15/11

(52) U.S. Cl. CPC C12N 15/907; C12N 9/1241; C12N 9/226; C12N 15/11; C12N 15/902; C12N 2310/20; C12N 2800/90

(57) ABSTRACT

The invention provides for systems and methods for inserting large polynucleotides into precise locations in a target polynucleotide. In one aspect, the systems comprise an engineered Type I-D/Tn7 CRISPR-associated transposase system (CAST) comprising a Tn7-like transposase linked to or otherwise capable of associating with a Type I-D CRISPR-Cas complex (Tn7-CAST I-D). In another aspect, the systems comprise a Tn7-like transposase comprising a modular target site selection protein, called TnsF, that may be engineered to reprogram the Tn7-like transposase to facilitate insertion at different sites in a target polynucleotide. In another aspect, the systems comprise a transposon system comprising a tyrosine recombinase which provides for scar-less insertion of large donor sequences into target polynucleotides. Also provided are methods for modifying target polynucleotides using the systems; polynucleotides encoding the systems; delivery systems for delivering the components of the systems; and cells and biological products modified by or modified to include the systems.

### CROSS-REFERENCE TO RELATED APPLICATIONS

[0001] This application is a continuation application of PCT/US2024/013963, filed Feb. 1, 2024, which claims the benefit of U.S. Provisional Application No. 63/442,710, filed Feb. 1, 2023. The entire contents of the above-identified applications are hereby fully incorporated herein by reference.

### STATEMENT REGARDING FEDERALLY SPONSORED RESEARCH

[0002] This invention was made with government support under Grant No. (s) HG009761 awarded by the National Institutes of Health. The government has certain rights in the invention.

### SEQUENCE LISTING

[0003] The contents of the electronic sequence listing (BROD-5710US_ST26.xml, size is 10,707,377 bytes and it was created on Aug. 7, 2025) is herein incorporated by reference in its entirety.

### TECHNICAL FIELD

[0004] The subject matter disclosed herein is generally directed to systems, methods and compositions used for targeted gene modification, targeted insertion, perturbation of gene transcripts, and nucleic acid editing. Novel nucleic acid targeting systems comprise components of Clustered Regularly Interspaced Short Palindromic Repeats (CRISPR) systems and transposable elements.

### BACKGROUND

[0005] Recent advances in genome sequencing techniques and analysis methods have significantly accelerated the ability to catalog and map genetic factors associated with a diverse range of biological functions and diseases. Precise genome targeting technologies are needed to enable systematic reverse engineering of causal genetic variations by allowing selective perturbation of individual genetic elements, as well as to advance synthetic biology, biotechnological, and medical applications. Although genome-editing techniques such as designer zinc fingers, transcription activator-like effectors (TALEs), or homing meganucleases are available for producing targeted genome perturbations, there remains a need for new genome engineering technologies that employ novel strategies and molecular mechanisms and are affordable, easy to set up, scalable, and amenable to targeting multiple positions within the eukaryotic genome. This would provide a major resource for new applications in genome engineering and biotechnology.

[0006] The CRISPR-Cas systems of bacterial and archaeal adaptive immunity show extreme diversity of protein composition, genomic loci architecture, and system function. Systems comprising CRISPR-like components are widespread and continue to be discovered. Novel multi-subunit effector complexes and single-subunit effector modules may be developed as powerful genome engineering tools.

[0007] Citation or identification of any document in this application is not an admission that such a document is available as prior art to the present invention.

### SUMMARY OF THE INVENTION

[0008] The present disclosure provides an engineered system comprising one or more Type I-D Cas proteins; one or more CRISPR-associated Tn7 transposases or functional fragments thereof linked to or otherwise capable of associated with the one or more Type I-D Cas proteins; and a guide molecule capable of forming a complex with the one or more Type I-D Cas proteins and directing sequence-specific binding of the complex to the target polynucleotide.

[0009] In one embodiment, the one or more Type I-D Cas proteins comprise Cas5, Cas6, Cas7, and/or Cas10d. In another embodiment, the one or more Type I-D Cas proteins further comprise Cas1, Cas2, and/or Cas3d.

[0010] In one embodiment, the one or more CRISPR-associated Tn7 transposases comprise (i) TnsA, TnsB, and TnsC; or (ii) TnsAB and TnsC. In another embodiment, the one or more CRISPR-associated Tn7 transposases further comprise TniQ. In another embodiment, the one or more CRISPR-associated Tn7 transposases further comprise TnsE. In another embodiment, the one or more CRISPR-associated Tn7 transposases further comprise TnsF. In one embodiment, the one or more CRISPR-associated Tn7 transposases further comprise a first TniQ, and a second TniQ, wherein the first TniQ and the second TniQ are different. In another embodiment, TniQ is derived from a first species and the one or more Type I-D Cas proteins is derived from a second species different from the first species.

[0011] In one embodiment, the one or more CRISPR-associated Tn7 transposases are derived from a first species, and the one or more Type I-D Cas proteins are derived from a second species different from the first species.

[0012] In one embodiment, the target polynucleotide comprises a protospacer adjacent motif (PAM). In another embodiment, the PAM comprises the nucleotide sequence GTT. In one embodiment, the target polynucleotide comprises linear DNA, circular DNA, or genomic DNA.

[0013] In one embodiment, the engineered system further comprises a plurality of guide molecules capable of forming a complex with the one or more Type I-D Cas proteins and directing sequence specific binding of the complex to one or more target polynucleotides.

[0014] In one embodiment, the present disclosure provides an engineered system comprising one or more Tn7 transposases or functional fragments thereof comprising (a) TnsA, TnsB, TnsC, and TnsF; or (b) TnsAB, TnsC, and TnsF. In another embodiment, the engineered system further comprises TniQ.

[0015] In one embodiment, the engineered system further comprises one or more Cas proteins and a guide molecule capable of forming a complex with the one or more Cas proteins and directing sequence-specific binding of the complex to a target polynucleotide. In another embodiment, the one or more Cas proteins comprise a Type I, a Type II, or a Type V Cas protein. In another embodiment, the one or more Cas proteins further comprise a catalytically inactivated Cas protein. In another embodiment, the one or more Tn7 transposases are derived from a first species, and the one or more Cas proteins are derived from a second species different from the first species. In another embodiment, the engineered system further comprises a plurality of guide molecules capable of forming a complex with the one or more Cas proteins and directing sequence specific binding of the complex to one or more target polynucleotides.

[0016] In one embodiment, the present disclosure provides an engineered system comprising one or more tyrosine recombinases, one or more helix-turn-helix (HTH) domain proteins, and one or more TnsF homologs comprising a catalytic nuclease domain.

[0017] In one embodiment, the engineered system further comprises one or more Cas proteins and a guide molecule capable of forming a complex with the one or more Cas proteins and directing sequence-specific binding of the complex to a target polynucleotide. In another embodiment, the one or more Cas proteins comprise a Type I, a Type II, or a Type V Cas protein. In another embodiment, the one or more Cas proteins further comprise a catalytically inactivated Cas protein. In another embodiment, the engineered system further comprises a plurality of guide molecules capable of forming a complex with the one or more Cas proteins and directing sequence-specific binding of the complex to one or more target polynucleotides.

[0018] In one embodiment, the engineered system further comprises one or more GIY-YIG nucleases.

[0019] In one embodiment, the present disclosure provides a system comprising one or more polynucleotides encoding the components of any of the various embodiments of the engineered systems. In another embodiment, the system further comprises a donor polynucleotide. In another embodiment, the donor polynucleotide comprises a polynucleotide insert, a left element sequence, and a right element sequence.

[0020] In one embodiment, the present disclosure provides a vector comprising one or more polynucleotides encoding the components of any of the various embodiments of the engineered systems. In another embodiment, the vector further comprises a donor polynucleotide. In another embodiment, the donor polynucleotide comprises a polynucleotide insert, a left element sequence, and a right element sequence.

[0021] In one embodiment, the present disclosure provides an engineered cell comprising any of the various embodiments of the engineered systems or vectors. In another embodiment, the engineered cell produces and/or secretes an endogenous or non-endogenous biological product or chemical compound. In another embodiment, the biological product comprises a protein or an RNA. In one embodiment, the present disclosure provides a cell line comprising the engineered cell. In another embodiment, the present disclosure provides a composition comprising the engineered cell. In another embodiment, the composition is formulated for use as a therapeutic. In one embodiment, the present disclosure provides for a biological product or chemical compound produced by the engineered cell. In another embodiment, the biological product comprises a mutated protein or product provided by a template.

[0022] In one embodiment, the present disclosure provides an engineered cell or progeny thereof, engineered by use of any of the various embodiments of the engineered systems. In another embodiment, the cell or progeny thereof produces and/or secretes an endogenous or non-endogenous biological product or chemical compound. In another embodiment, the biological product comprises a protein or an RNA. In another embodiment, the engineered cell is further used as a therapeutic.

[0023] In one embodiment, the present disclosure provides a biological product or chemical compound produced by the engineered cell or progeny thereof. In another embodiment, the biological product comprises a protein or an RNA. In another embodiment, the protein comprises a mutation.

[0024] In one embodiment, the present disclosure provides a pharmaceutical composition for treatment of a disease or disorder, comprising the engineered cell or progeny thereof. In another embodiment, the treatment results in genetic changes in one or more cells. In another embodiment, the treatment results in correction of one or more defective genotypes. In another embodiment, the treatment results in improved phenotype.

[0025] In one embodiment, the present disclosure provides an engineered cell or progeny thereof comprising a mutation in the protein expressed from a gene comprising the target sequence. In another embodiment, the cell or progeny thereof comprises decreased transcription of a gene associated with the target sequence. In another embodiment, the cell or progeny thereof comprises increased transcription of a gene associated with the target sequence.

[0026] In one embodiment, the present disclosure provides a method of inserting a donor polynucleotide into a target polynucleotide in a cell, comprising introducing into the cell any of the various embodiments of the engineered systems. In one embodiment, the donor polynucleotide (a) introduces one or more mutations to the target polynucleotide; (b) corrects a premature stop codon in the target polynucleotide; (c) disrupts a splicing site; (d) restores a splicing site; or (e) a combination thereof. In another embodiment, the one or more mutations comprises substitutions, deletions, insertions, or a combination thereof. In another embodiment, the one or more mutations causes a shift in an open reading frame on the target polynucleotide. In one embodiment, the donor polynucleotide is between 100 bases and 30 kilobases in length. In one embodiment, insertion of the donor polynucleotide into the target polynucleotide in the cell results in (a) a cell or population of cells comprising altered expression levels of one or more gene products; or (b) a cell or population of cells that produces and/or secretes an endogenous or non-endogenous biological product or chemical compound. In another embodiment, the target polynucleotide comprises linear DNA, circular DNA, or genomic DNA.

[0027] In one embodiment, the present disclosure provides a method of inserting a donor polynucleotide into a target polynucleotide in a cell, wherein the one or more components of the engineered systems is expressed from a nucleic acid operably linked to a regulatory sequence. In another embodiment, the one or more components of the engineered system is introduced into a particle for delivery into a cell.

[0028] These and other aspects, objects, features, and advantages of the example embodiments will become apparent to those having ordinary skill in the art upon consideration of the following detailed description of illustrated example embodiments.

### BRIEF DESCRIPTION OF THE DRAWINGS

[0029] An understanding of the features and advantages of the present invention will be obtained by reference to the following detailed description that sets forth illustrative embodiments, in which the principles of the invention may be utilized, and the accompanying drawings of which:

[0030] FIG. 1A-1C-Prediction of novel target selectors in Tn7-like transposons. (1A) Schematic of Tn7 transposition. TnsB (cyan) recognizes both ends (R, right and L, left) and excises the transposon with the help of TnsA (yellow). TnsD is a sequence specific target selector and binds an attachment site in the bacterial genome to recruit TnsC (orange) and the transposon for insertion. (1B) Pipeline for discovery of novel target selectors. Sequence databases were mined for Tn7 component seeds and searched for genomic co-localization of these seeds. The genomic neighborhoods of the detected loci were annotated, with the focus on cas effectors and genes that appear to be operonized with tns C and tniQ/tnsD. (1C) Locus architectures of known systems and novel systems identified in this study. Mu (muA and muB) and IS21 (istA and istB) encode relatives of TnsB and TnsC. IS21 has not been reported to be associated with a target selector. Tn7 encodes various target selectors including TniQ/TnsD, TnsE, and Cas effectors (Cas12k, Cascade I-F, and Cascade I-B, all of which partner with TniQ, the latter of which constitute CAST systems. Applicants identified a novel CAST system containing Cascade I-D and a novel target selector named TnsF. Applicants also identified a TnsF-like target selector in a distinct non-Tn7 transposon.

[0031] FIG. 2—Phylogenetic tree of TnsC homologs. Rings around the tree show the presence of a particular gene or a feature in the vicinity of tnsC within the genomic contig. From inner to outer ring: tnsA is shown in light pink, tnsAB fusion is shown in light blue, presence of tnsB operonized with the central tns C (representative of the leaf) is shown in cyan, presence of an additional distinct tns C operonized with tnsB in the vicinity is shown in dark blue, tniQ/tnsD is shown in light purple and the presence of a second tniQ/tnsD in dark purple where both their protein size are proportional to size of the ring bar, tnsE is shown in dark red, cas effectors and cas6 genes are shown in yellow, the presence of a gene operonized with the central tns C is shown in green. Various known transposons are annotated around the tree including known CAST systems. Red boxes highlight areas of interest. The Mu clade corresponds to the left branch harboring a conserved gene operonized with MuB (homologous to tns (*). This gene is part of the Mu phage genome. By subtraction, the Tn7 clade corresponds to the remaining clade and is characterized by the presence of TniQ/TnsD.

[0032] FIG. 3A-3C-Characterization of CAST I-D. (3A) Schematic of Cyanothece sp. PCC 7425 CAST I-D (CyCAST) locus architecture. (3B) RNA-guided insertion frequency of CyCAST into pTarget with PSP1, with or without TniQ and TnsD. (3C) Protein-mediated insertion frequency of CyCAST into pTarget with tRNA-leu, with or without TniQ and TnsD. ddPCR experiments were performed with three biological replicates. All data points are shown with an error bar showing standard deviation, and statistical significance was assessed by t-test.

[0033] FIG. 4A-4B-Comparison of dual TniQ-TnsD in CAST systems. (4A) Domain architecture comparison of TniQ/TnsD. Left: CAST TniQ-like proteins involved in RNA-guided transposition. Right: TnsD-like proteins involved in protein-guided transposition compared with E. coli canonical Tn7 TnsD. Except for CAST V-K TniQ, all TniQ/TnsD share a common core region composed of a N-terminal helical domain (HelD, a zinc finger (ZF), a helical linker, and a C-terminal helical domain (Hel2) (CAST I-D TniQ contains only a partial Hel2 domain). TnsD-like proteins performing protein-guided insertion in CASTs harbor long and diverse C-terminal regions folding into multiple HTH domains similar to Tn7 TnsD. (4B) Domain architecture of TniQ and TnsF in Tn6022 (left). Docking prediction of TniQ and TnsF (right). Pink in TniQ indicates C-terminal extension predicted to interact with TnsF. Pink and purple in TnsF indicate the predicted tandem core binding domain (CB1 and CB2) and the partial catalytic domain pCAT, respectively.

[0034] FIG. 5A-5E-Characterization of TnsF-containing Tn6022. (5A) Schematic of Acinetobacter johnsonii Tn6022 (AjTn6022) locus architecture. (5B) Insertion frequency of AjTn6022 into pTarget with a 200 bp-fragment of comM in the absence of indicated AjTn6022 component. (5C) Purified proteins used in the pull-down assay to capture the physical interaction between TnsF and TniQ (left). Eluted TnsF-TniQ complexes on the beads were analyzed on the protein gel (right). (5D) Molecular details of the interaction region from the docking prediction between Tn6022 TnsF (purple) and TniQ (pink). TniQ is predicted to interact via its C-terminal helix with the pCAT domain of TnsF. The interaction involves 2 salt bridges (circled in red) and multiple hydrophobic interactions (dashed green lines) (left). (5E) Insertion frequency of AjTn6022 into the comM gene fragment by TnsF and TniQ mutants. For TniQ mutants, overlapped TniQ and TnsF sequences were separated. ddPCR experiments were performed with three biological replicates. All data points are shown with an error bar showing standard deviation, and statistical significance was assessed by t-test.

[0035] FIG. 6A-6H—TnsF targets a conserved WalkerB motif in comM. (6A) Schematic of the locus architecture of Zoogloea sp. LCSB751 Target Selector based on tYrosine (Y) recombinase transposon (ZooTsy). (6B) Genetic requirement of YRec, HTH, and TnsF on ZooTsy transposition activity, as assayed by quantification of upstream-end1 junction formation by ddPCR. Deleted genes are indicated by a dashed outline. (6C) Insertion frequency of AjTn6022 into pTarget with a 200 bp-fragment of comM (left) and E. coli endogenous comM (right) in the absence of TnsF and/or presence of the pTarget (AjTn6022). pSC101 donor was used. (6D) Insertion frequency of ZooTsy into pTarget with a 200 bp-fragment of comM (left) and E. coli endogenous comM (right) in the absence of TnsF and/or presence of the pTarget (ZooTsy). pSC101 donor was used. (6E) Electrophoretic mobility shift assay to assess the interaction between a 200 bp- or 200 nt-fragment of AjcomM and purified AjTn6022-TnsF. (6F) Electrophoretic mobility shift assay to assess the interaction between a 200 bp- or 200 nt-fragment of ZoocomM and purified ZooTsy-TnsF_Y584F. (6G) (SEQ ID NO: 1-6) Insertion sites of Tn6022 and ZooTsy on E. coli endogenous comM and comM of their respective host used in the pTarget. ComM protein sequences (translated comM) are superimposed in frame to the nucleotide sequence. Pink rectangle indicate the genomic location of the walker B of the AAA ATPase encoded by comM, the red rectangle shows the probable hot spot binding region of both TnsFs. (6H) Model of TnsF target selection and insertions for Tn6022 and Tsy. comM is shown as a green arrow with the walker B genomic region indicated in red. ComM protein is shown below where walker B site is displayed. Purple arrows indicate the recognition of the similar attachment site by both TnsF (pink) while the dashed red arrows indicate the distinct insertion sites. Dashed gray indicates the recruitment of the transpososome to the insertion site. ddPCR experiments were performed with three biological replicates. All data points are shown with an error bar showing standard deviation, and statistical significance was assessed by t-test.

[0036] FIG. 7—Model of the evolution of the functional versatility of TniQ-based target selector. Evolutionary scenario for various Tn7-like transposons with distinct modes of target selection. Locus architecture is shown on the left and mechanics of target site selection on the right. (1) An ancestral Tn7-like transposon might have used TnsD for site-specific target selection and a DNA bending protein or complex (e.g., Cas effector, transcription factor, tyrosine recombinase) in trans as a second mode of target site selection. These DNA-bending proteins would create a distortion in the DNA that TnsC would recognize, albeit with a low efficiency. Gene duplication produced a second copy of TnsD. (2) Neofunctionalization of the second copy of TnsD yielded TniQ, which evolved to optimize the interaction between a trans DNA bending target selector and the target site. The trans system could also be captured by the transposon as cargo. (3) Further domestication of the DNA binding system would then occur, eventually leading to the loss of the native function of the system (e.g., CAST I-B), fusion to TniQ to create a new TnsD (e.g., TniQ-TnsF fusion), or adaptation of the system for dual modes of transposition as in CAST V-K, which relies entirely on the CRISPR system for both homing and jumping. Pink indicates DNA binding function; green indicates TniQ core; blue indicates native function of DNA binding system.

[0037] FIG. 8A-8F—(8A) CAST I-D loci architectures and comparison with PmcCAST I-B2 locus. Rectangles show predicted end, light gray genes indicate predicted homing genes. Cargo areas are summarized by a gray rectangle. Cascade components are shown in purple; dark for I-B2, light purple for I-D. Adaptation module and cas3d are show in lighter purple. CRISPR arrays are shown by dark grey vertical rectangle for repeats and dark purple diamonds for spacers. Ends are displayed via light grey vertical rectangle. tRNAs is the predicted homing gene. Tn7 components are shown in similar colors than in FIG. 1A-1C. Contigs and coordinates are indicated for CAST I-D loci. Absence of one of the locus coordinates indicates the edge of the contig. NCBI accessions of Cas10d proteins are written below each cas10d gene. (8B) (SEQ ID NO: 7-16) Cas10d subtree restricted to CAST I-D and close relatives. Local alignment of the HD nuclease catalytic sites is shown on the right of the tree. Presence of Tn7 components is shown on the right. Right, structural model of CyCAST Cas10d colored by domain architecture. The inset shows the detailed area of the catalytic pocket. (8C) Weblogo representation of PAM for CyCAST RNA-guided insertions. (8D) CyCAST RNA-guided insertion positions identified by deep sequencing with four different primer pairs. (8E) Docking predictions of CyCAST TnsC (coraD with TniQ (green) and TnsD (pink). Insets are zoom ins of two regions of interaction between TnsC with TniQ and TnsD. The C-terminal portion of the TniQ core region is disordered and truncated compared to the corresponding regions of CAST I-D TnsD and its relatives in CAST I-B2, suggesting that the interaction between TniQ and Cascade I-D is unstable and that TniQ serves as a facilitator rather than an essential scaffold for the interaction between Cascade I-D and TnsC. (8F) CyCAST-mediated prominent insertion location at tRNA-leu gene on target plasmid identified by deep sequencing.

[0038] FIG. 9A-9D-(9A) Structural comparison of Tn7 TnsD and CAST TniQ/TnsD proteins. CAST TniQ corresponds to the protein partnering with the Cas effector for RNA-guided transposition. Hell, ZF, and linker helix are conserved in all TniQ/TnsD and are colored using the same palette as in FIG. 3A-3B. Hel2 has two distinct folds, one colored in rainbow by secondary structure, has structural similarity to XRE T-F and is shared between Tn7 TnsD and CAST TniQ/TnsD from I-B and I-D, the other colored in red is found in CAST I-F TniQ/TnsD. The C-terminal regions of TniQ/TnsD are partially truncated for visualization in TniQ/TnsD harboring long extensions that are partially shown in pink. (9B) Phylogenetic tree of the core region of TniQ/TnsD (see Methods). Rings around the tree show the presence of a particular gene or a feature in the vicinity of tniQ/tnsD within the genomic contig. From inner to outer ring: TniQ/TnsD protein size is shown as a bar proportional to the length of TniQ/TnsD, presence of tnsE is shown in red, cas effectors and cas6 genes are shown in purple, the presence of a gene operonized with the tniQ/tnsD is shown in light green. Various known transposons are annotated around the tree including known CAST systems. Red boxes highlight areas of interest, and gene architectures of these systems are shown in panel D. Dual tniQ-tnsD are highlighted via a connector colored from a rainbow gradient starting on the left border and going to the right border of the tree where the color of the connector is set by the location of TniQ the most in the left. A connector originating and arriving within areas of the same color indicates the TniQ/TnsD tandem belong to closely related leaves. By contrast, a connector originating and arriving within areas of different colors indicates TniQ/TnsD distantly related. (9C) Left. Protein size distribution of TniQ/TnsD in single TniQ/TnsD systems (in red) and dual TniQ-TnsD systems (in green). From the 4 peaks, 4 groups (delineated by dashed lines) were defined: group1<220aa, group 2 220-400aa, group 3 400-550aa, and group 5>550aa. Right. Protein size comparison of TniQ/TnsD in dual TniQ-TnsD systems. Y axis indicates the protein size of the smaller of the TniQ/TnsD tandem; X axis indicates the size of the larger one. Solid lines segregate the different groups by protein size. Number of occurrences is indicated for each of the groups. (9D) Schematics of locus architecture for systems of interest (corresponding to systems boxed in red in panel C). One example of a system harboring divergent dual TniQ-TnsD in which TniQ and TnsD share less than 20% of sequence identity. Five examples of systems with conserved candidates (in green) operonized with a tniQ/tnsD. Below the first candidate is a docking prediction between the candidate (light green), TnsC (coraD and TnsD (dark green). TnsD is truncated for visualization purposes.

[0039] FIG. 10A-10D-(10A) TnsC homologs phylogenetic tree and presence of TnsE (in red). The 2 distinct branches with TnsE are represented by Tn7 E. coli (Tn7) and Tn6022. (10B) Locus architecture of Tn7 (top) and Tn6022 (bottom) encoding tnsk. Below each locus, the predicted domain architecture of their respective TnsE proteins is shown. Both TnsEs have 2 single strand DNA binding like domains (SSBa and SSBb) in the N-terminal region and a double strand DNA binding domain (DBD) in the C-terminal region that has been solved experimentally (PDB: 5D17). The SSBs are deduced from structural modelling and structural mining (panel C and D). (10C) Structural modeling of TnsE Tn7 and Tn6022 indicates similar domain architecture despite their low sequence similarity (8% sequence identity). (10D) Structural superimposition of TnsE N-terminal domains (pink and orange) with PriB (light and dark blue) for Tn7 TnsE (left) and Tn6022 TnsE (right), suggesting TnsE contains 2 SSB domains. The second domain is split into 3 regions separated by a linker (yellow) and a domain of unknown function.

[0040] FIG. 11A-11F-(11A) Structural comparison of CB1, CB2, and pCAT domain of TnsF with the homodimer tyrosine recombinase (Yrec) XerH structure bound to DNA. Monomer of Yrec contains one CB and one CAT (monomers are circled in dashed red lines). Each CB and CAT of Yrec are bound to the attachment site and dimerize with the same domain of another monomer of Yrec. Structural similarity between CB and CAT of Yrec and CB and pCAT of TnsF is shown via matching secondary structural colors. Gray colored regions are found only in Yrec and not in TnsF. (11B) Domain architecture comparison between AjTnsF (Tn6022) and ZooTnsF (Tsy). The domain architectures were deduced from structural prediction of both proteins. Both TnsF proteins encode an N-terminal zinc finger region (ZFs, blue), a dual core binding domain (CB1 and CB2, pink), and a partial catalytic domain in AjTnsF (pCAT in purple) and complete catalytic domain in ZooTnsF (CAT in purple and orange). Tyrosine catalytic position is annotated in ZooTnsF and in the structure. (11C) Nanopore long-read sequencing to characterize the structure of pInsert. (11D) (SEQ ID NO: 17-18) Sanger sequencing chromatograms for RE and LE junctions of a simple insertion at Tn6022 attachment site in comM 100 bp-fragment on pTarget. “CCCGC” is a target site duplication (TSD). (11E) Phylogenetic tree built from TnsF homologs extracted from the CLANS analysis (panel A). Rings around the tree show the presence of a particular gene or a feature in the vicinity of tns/within the genomic contig. From inner to outer ring: presence of comM fragments in the vicinity of tns/in dark purple, presence of a tyrosine recombinase gene (yrec) in light purple, presence of tniQ in green, and presence of gene encoding a GIY-YIG nuclease in light blue. TnsF protein size is shown in pink as a bar proportional to its length. (11F) Structural homology between TnsF, RitB, and protelomerase TelA and TelK. TnsF, RitB, and TelA were obtained using Alphafold2. TelK is an experimental structure and shows a dimer of TelK binding DNA (pdb: 2v6e). Colors are similar to panel B and indicate the various domains. The second TelK in the structure is shown in green. All these structural homologs encode 2 CB tandem domains and one CAT domain. TelK has an additional domain in C-terminal (gray). Only TnsF has a N-terminal with multiple zinc fingers.

[0041] FIG. 12A-121—(12A) (SEQ ID NO: 19) Experimental scheme for ZooTsy transposition assay. Left top: Schematic of the ZooTsy donor and target comM fragment for transposition assay in E. coli. Left bottom: Representative PCR amplicon images on the gel for each upstream-end1, downstream-end2, and circularized donor junction. pHelper has all Tsy components (YRec, HTH, TnsF, and GIY-YIG). Right top: Schematic of the Tsy circular intermediate isolation assay with a lacZα backbone pDonor to isolate circularized donor (cd). E. coli were transformed with pHelper and lacZα donor. A day after, plasmids were prepped, and used for re-transformation. The transformants were plated on the blue/white selection plate. Representative images of E. coli colonies on the blue/white selection plate. Right middle: The left shows the E. coli transformed with the mini-prep product after pHelper expression and the one transformed with the product after no pHelper expression. The middle image shows a representative gel image to show the original lacZα donor and isolated circularized donor (cd) after linearization by NruI restriction enzyme. The right shows the structure of the circularized donor (cd) as characterized by nanopore long-read sequencing. Right bottom: Sanger sequencing chromatograms for endl and end2 junctions of the circularized donor (cd). (12B) Schematic of transposition assay with R6K origin pDonor to isolate pInsert for nanopore long-read sequencing. (12C) Schematic of nanopore sequencing reads analysis pipeline. (12D) Structure of pInsert as characterized by nanopore long-read sequencing. Left: Nanopore sequencing reads mapping on the reference sequence of a ZooTsy simple insertion on pTarget. Right: Nanopore sequencing reads mapping on the reference sequence of a ZooTsy excised cointegrate on pTarget. (12E) Determinants of donor endl for ZooTsy transposition. Top: Schematic of the expected PCR amplicons from the upstream-end1 junction of simple insertions and excised cointegrates. Bottom left: A representative gel image showing PCR amplicons from the upstream-end1 junction. Four donor constructs with different end1 lengths (hom1: 12 bp, end1: 0, 35, 85 and 135 bp, end2: 39 bp, hom2: 12 bp) were tested. Purple arrow indicates the amplicons from simple insertions; dark blue arrow indicates amplicons from excised cointegrates. Bottom right: Simple insertion ratio (%) in total insertion reads quantified by nanopore sequencing. (12F) Top: Determinants of donor end 1 for ZooTsy transposition. Representative gel images of PCR amplicons from the upstream-end1 (u-end1), downstream-end2 (d-end2), and circularized donor (cd) junctions. Seven donor constructs with different end1 lengths (hom1: 12 bp, end1: 135-85 bp, end2: 39 bp, hom2: 12 bp) were tested. Bottom: Determinants of donor end2 for ZooTsy transposition. Representative gel images of PCR amplicons from the u-end1, d-end2, and cd junctions. Seven donor constructs with different end2 lengths (hom 1:12 bp, end1: 135 bp, end2: 39-0 bp, hom2: 12 bp) were tested. (12G) Donor sequence determinants for ZooTsy transposition. Top: Schematic of ZooTsy donor. Bottom: Representative gel images showing PCR amplicons from the u-end1, ds-end2, and cd junctions. Sixteen donors constructed by systematic combinations of four elements (hom1, end1, end2 and hom2) were tested. (12H) Requirements of tyrosine recombinase activities of YRec and TnsF on ZooTsy transposition activity. Quantification of u-end1 junction formation by ddPCR. Experiments were performed with three biological replicates. All data points are shown with an error bar showing standard deviation, and statistical significance was assessed by t-test. (12I) Representative gel images to show PCR amplicons from each junction (see FIG. 6B).

[0042] FIG. 13A-13D-(13A) AjTn6022 TTISS analysis in the absence of TnsF and/or presence of the pTarget. Filtered reads are mapped on CP011113.2 (Strain RR1, HB101 RecA+), complete genome for HB101-derived Endura competent cells and pTarget (AjTn6022) sequence. (13B) ZooTsy TTISS analysis in the absence of TnsF and/or presence of the pTarget. Filtered reads are mapped on CP011113.2 (Strain RR1, HB101 RecA+), complete genome for HB101-derived Endura competent cells and pTarget (ZooTsy) sequence. (13C) Insertion frequency of AjTn6022 into each comM gene fragment on pTarget. Four different comM fragments were tested. U50D50 is the fragment containing 50 bp upstream and 50 bp downstream of the insertion site on comM. U25D50 contains 25 bp upstream and 50 bp downstream of the insertion site. U50D25 contains 50 bp upstream and 25 bp downstream of the insertion site. U0D0 has no comM fragment. (13D) Insertion frequency of ZooTsy into each comM gene fragment on pTarget. Twenty-two different comM fragments were tested. U100-OD100 are the fragments containing 100-0 bp upstream and 100 bp downstream of the insertion site on comM. U0D0 has no comM fragment. Left: Quantification of u-end1 junction formation by ddPCR. All data points are shown with an error bar showing standard deviation, and statistical significance was assessed by t-test.

[0043] FIG. 14A-14D-(14A) Electrophoretic mobility shift assay to assess the interaction between a 200 bp-Aj comM fragment with 10 bp-mutation in the TnsF binding motif and purified AjTn6022-TnsF. (14B) Electrophoretic mobility shift assay to assess the interaction between a 200 bp- or 200 nt-Zoo comM fragment with 10 bp-mutation in the TnsF binding motif and purified ZooTsy-TnsF_Y584F. (14C) (SEQ ID NO: 20-26) Insertion frequency of AjTn6022 into pTarget with a 200 bp-fragment of Aj comM harboring 10 bp-mutation in the TnsF binding motif. (14D) (SEQ ID NO: 20-26) Insertion frequency of ZooTsy into pTarget with a 200 bp-fragment of Zoo comM harboring 10 bp-mutation in the TnsF binding motif. All data points are shown with an error bar showing standard deviation, and statistical significance was assessed by t-test.

[0044] The figures herein are for illustrative purposes only and are not necessarily drawn to scale.

### DETAILED DESCRIPTION OF THE EXAMPLE EMBODIMENTS

### General Definitions

[0045] Unless defined otherwise, technical and scientific terms used herein have the same meaning as commonly understood by one of ordinary skill in the art to which this disclosure pertains. Definitions of common terms and techniques in molecular biology may be found in Molecular Cloning: A Laboratory Manual, 2nd edition (1989) (Sambrook, Fritsch, and Maniatis); Molecular Cloning: A Laboratory Manual, 4th edition (2012) (Green and Sambrook); Current Protocols in Molecular Biology (1987) (F. M. Ausubel et al. eds.); the series Methods in Enzymology (Academic Press, Inc.): PCR 2: A Practical Approach (1995) (M.J. MacPherson, B.D. Hames, and G. R. Taylor eds.): Antibodies, A Laboratory Manual (1988) (Harlow and Lane, eds.): Antibodies A Laboratory Manual, 2nd edition 2013 (E.A. Greenfield ed.); Animal Cell Culture (1987) (R.I. Freshney, ed.); Benjamin Lewin, Genes IX, published by Jones and Bartlet, 2008 (ISBN 0763752223); Kendrew et al. (eds.), The Encyclopedia of Molecular Biology, published by Blackwell Science Ltd., 1994 (ISBN 0632021829); Robert A. Meyers (ed.), Molecular Biology and Biotechnology: a Comprehensive Desk Reference, published by VCH Publishers, Inc., 1995 (ISBN 9780471185710); Singleton et al., Dictionary of Microbiology and Molecular Biology 2nd ed., J. Wiley & Sons (New York, N.Y. 1994), March, Advanced Organic Chemistry Reactions, Mechanisms and Structure 4th ed., John Wiley & Sons (New York, N.Y. 1992); and Marten H. Hofker and Jan van Deursen, Transgenic Mouse Methods and Protocols, 2nd edition (2011).

[0046] As used herein, the singular forms “a”, “an”, and “the” include both singular and plural referents unless the context clearly dictates otherwise.

[0047] The term “optional” or “optionally” means that the subsequent described event, circumstance or substituent may or may not occur, and that the description includes instances where the event or circumstance occurs and instances where it does not.

[0048] The recitation of numerical ranges by endpoints includes all numbers and fractions subsumed within the respective ranges, as well as the recited endpoints.

[0049] The terms “about” or “approximately” as used herein when referring to a measurable value such as a parameter, an amount, a temporal duration, and the like, are meant to encompass variations of and from the specified value, such as variations of +/−10% or less, +/−5% or less, +/−1% or less, and +/−0.1% or less of and from the specified value, insofar such variations are appropriate to perform in the disclosed invention. It is to be understood that the value to which the modifier “about” or “approximately” refers is itself also specifically, and preferably, disclosed.

[0050] As used herein, a “biological sample” may contain whole cells and/or live cells and/or cell debris. The biological sample may contain (or be derived from) a “bodily fluid”. The present invention encompasses embodiments wherein the bodily fluid is selected from amniotic fluid, aqueous humour, vitreous humour, bile, blood serum, breast milk, cerebrospinal fluid, cerumen (earwax), chyle, chyme, endolymph, perilymph, exudates, feces, female ejaculate, gastric acid, gastric juice, lymph, mucus (including nasal drainage and phlegm), pericardial fluid, peritoneal fluid, pleural fluid, pus, rheum, saliva, sebum (skin oiD, semen, sputum, synovial fluid, sweat, tears, urine, vaginal secretion, vomit and mixtures of one or more thereof. Biological samples include cell cultures, bodily fluids, cell cultures from bodily fluids. Bodily fluids may be obtained from a mammal organism, for example by puncture, or other collecting or sampling procedures.

[0051] The terms “subject,” “individual,” and “patient” are used interchangeably herein to refer to a vertebrate, preferably a mammal, more preferably a human. Mammals include, but are not limited to, murines, simians, humans, farm animals, sport animals, and pets. Tissues, cells and their progeny of a biological entity obtained in vivo or cultured in vitro are also encompassed.

[0052] Various embodiments are described hereinafter. It should be noted that the specific embodiments are not intended as an exhaustive description or as a limitation to the broader aspects discussed herein. One aspect described in conjunction with a particular embodiment is not necessarily limited to that embodiment and can be practiced with any other embodiment(s). Reference throughout this specification to “one embodiment”, “an embodiment,” “an example embodiment,” means that a particular feature, structure or characteristic described in connection with the embodiment is included in at least one embodiment of the present invention. Thus, appearances of the phrases “in one embodiment,” “in an embodiment,” or “an example embodiment” in various places throughout this specification are not necessarily all referring to the same embodiment, but may. Furthermore, the particular features, structures or characteristics may be combined in any suitable manner, as would be apparent to a person skilled in the art from this disclosure, in one or more embodiments. Furthermore, while some embodiments described herein include some but not other features included in other embodiments, combinations of features of different embodiments are meant to be within the scope of the invention. For example, in the appended claims, any of the claimed embodiments can be used in any combination.

[0053] All publications, published patent documents, and patent applications cited herein are hereby incorporated by reference to the same extent as though each individual publication, published patent document, or patent application was specifically and individually indicated as being incorporated by reference.

### Overview

[0054] The present disclose provides gene editing systems capable of inserting large polynucleotides into precise locations in a target polynucleotide without requiring single or double strand breaks in the target DNA. The systems can be configured to insert large donor sequences into the target DNA. For example, the gene editing systems can be used to insert additional copies of a gene, replace dysfunctional copies of a gene, or insert donor polynucleotides edited to make multiple modifications at multiple sites in the donor polynucleotide, which is useful, for example, where multiple deleterious mutations need to be corrected within a given stretch of DNA. The gene editing systems are reprogrammable and can be configured to target insertions at different locations within the target DNA. In one aspect, the gene editing tool is an engineered Type I-D/Tn7 CRISPR-associated transposase system (CAST) comprising a Tn7-like transposase that is linked to or otherwise capable of associating with a Type I-D CRISPR-Cas complex (Tn7-CAST 1-D). In one aspect, the disclosure advantageously provides a Tn7-CAST 1-D system requiring a minimal Tn7 component that reduces the size and number of components needed to create a functional Tn7-CAST 1-D system. In another aspect, the present disclosure comprises a novel Tn7-like transposase that comprises a novel guided target selector called TnsF. The TnsF is a modular target site selection protein that may be engineered to reprogram the Tn7-like transposase to facilitate insertion at different target sites in a target DNA polynucleotide. In another aspect, the present disclosure provides a novel transposon system that comprises a tyrosine recombinase which provides for scar-less insertion of large donor sequences into target DNAs. In another aspect, the disclose provides methods for modify target DNA polynucleotides using the aforementioned gene editing systems. In another aspect, the present disclosure provides polynucleotides encoding said gene editing systems as well as delivery systems for delivering polynucleotide and polypeptide components of said systems. In another aspect, the present disclosure provides cells and biological products modified by or modified to include said gene editing systems.

[0055] The present disclosure provides engineered systems and methods for inserting a polynucleotide to a desired position in a target nucleic acid. In one aspect, the engineered systems comprise one or more Type I-D Cas proteins (e.g., Cas5, Cas6, Cas7, and/or Cas10d; and Cas1, Cas2, and/or Cas3d); one or more CRISPR-associated Tn7 transposases or functional fragments thereof linked to or otherwise capable of associating with the one or more Type I-D Cas proteins (e.g., TnsA, TnsB, and TnsC; or TnsAB and TnsC; TniQ; TnsE); and a guide molecule capable of forming a complex with the one or more Type I-D Cas proteins and directing sequence-specific binding of the complex to a target polynucleotide.

[0056] In another aspect, the engineered systems comprise one or more Tn7 transposases or functional fragments thereof (e.g., TnsA, TnsB, and TnsC; or TnsAB and TnsC; TniQ and one or more Tn7 target selector proteins (e.g., TnsF). In another embodiment, the engineered systems further comprise one or more Cas proteins (e.g., a Type I, a Type II, or a Type V Cas protein) and a guide molecule capable of forming a complex with the one or more Cas proteins and directing sequence-specific binding of the complex to a target polynucleotide.

[0057] In another aspect, the engineered systems comprise one or more tyrosine recombinases, one or more helix-turn-helix (HTH) domain proteins, and one or more TnsF homologs comprising a catalytic nuclease domain. In another embodiment, the engineered systems further comprise one or more Cas proteins (e.g., a Type I, a Type II, or a Type V Cas protein) and a guide molecule capable of forming a complex with the one or more Cas proteins and directing sequence-specific binding of the complex to a target polynucleotide. In another embodiment, the engineered systems further comprise one or more GIY-YIG nucleases.

[0058] The present disclosure also includes polynucleotides encoding components of the nucleic acid targeting systems, and vector systems comprising one or more vectors comprising said polynucleotide. The present disclosure also includes engineered cells, tissues, organs, organisms, biological products, pharmaceutical compositions comprising the systems or generated using the systems.

### Tn7-Cast I-D Systems

[0059] In one example embodiment, the gene editing system is a Tn7-CAST I-D system comprising a Tn7-like transposase linked to or otherwise capable of associating with a CRISPR-Cas Type I-D complex. Tn7-like transposes are multimeric proteins comprising multiple sub-units. Cas Type I-D is also a multimeric protein (also referred to as the Cascade complex) and further comprises a nucleic acid component, or guide molecule, capable of forming a complex with the Cas I-D multimeric protein and directing sequence specific binding of the complex to a target sequence in a target polynucleotide. The guide component comprises a guide sequence (also referred to as a “spacer”) and a scaffold. The spacer facilitates sequence-specific binding to the target sequence and the scaffold primarily facilitates complex formation with the Type I-D Cas protein. The systems disclosed herein are engineered such that the Tn7-CAST 1-D systems recognize and modify target sequences other than the target sequence of a naturally occurring Tn7-CAST 1-D system. This can be achieved, for example, by modifying the spacer sequence to target a target sequence other than the target sequence of the naturally occurring CRISPR-Cas I-D complex, modifying the scaffold, modifying the CRISPR-Cas Type I-D Cascade complex, modifying the Tn7-like transposase, or a combination thereof. The separate components of Tn7-CAST 1-D systems are discussed in further detail below.

### Type 1-D CRISPR-Cas

[0060] The Class I, Type I-D CRISPR-Cas comprises a protein and nucleic acid component. The protein component is a multimeric protein comprised of multiple subunits. The nucleic acid component, or guide molecule, is capable of forming a complex with the multimeric protein component and directing sequence-specific binding of the complex to a target polynucleotide.

### Type I-D CRISPR-Cas Protein Component

[0061] An example Type I-D Cas protein may comprise one or more of the following polypeptide subunits, Cas5, Cas6, Cas7, Cas10d, Cas3d, Cas1, and Cas2. In one example embodiment, the Type I-D Cas protein comprises one or more of Cas5, Cas6, Cas7, and Cas10d. In one example embodiment, the Type I-D Cas protein comprises Cas5, Cas6, Cas7, and Cas10d. Cas5, Cas6 and Cas7 may form a backbone structure of the Type I-D Cas protein and necessary for guide molecule and target polynucleotide interactions. Cas6 of the present Type I-D Cas proteins has not been previously reported as associated with Type I-D CRISPR-Cas systems. See e.g. Lin et al. “DNA targeting by subtype I-D CRISPR-Cas shows type I and type III features” Nucleic Acids Res. 2020; 48 (18): 10470-10478. In one example embodiment, the Type I-D Cas protein may comprise multiple copies of Cas5 in the backbone structure. Cas10d comprises an endonuclease HD domain and may also comprise a PAM recognition domain. Cas3d, when present, comprises a helicase domain that may unwind double-stranded target DNA. In one example embodiment, the Type I-D Cas protein does not comprise a Cas5. In one example embodiment, the Type I-D Cas protein does not comprise a Cas6. In one example embodiment, the Type I-D Cas protein does not comprise a Cas7. In one example embodiment, the Cas10d protein may be catalytically inactive or be engineered to be catalytically inactive.

[0062] Example Type I-D Cas loci for Cas5, Cas6, Cas7, and Cas10d are provided in the CAST I-D loci illustrated in FIG. 8A. In an example embodiment, the one or more Type I-D Cas proteins are derived from the CAST I-D system of Cyanothece sp. PCC 7425. In a particular embodiment, the one or more Type I-D Cas proteins is a Cas10d derived from Cyanothece sp. PCC 7425 (ACL44814.1). Other example Cas 10d proteins are provided in FIG. 8A-8B and Table 5.

[0063] In some cases, the Cas proteins may be orthologs or homologs of the above mentioned Cas proteins. The terms “ortholog” and “homolog” are well known in the art. By means of further guidance, a “homolog” of a protein as used herein is a protein of the same species which performs the same or a similar function as the protein it is a homologue of. Homologous proteins may but need not be structurally related or are only partially structurally related. An “ortholog” of a protein as used herein is a protein of a different species which performs the same or a similar function as the protein it is an orthologue of. Orthologous proteins may but need not be structurally related or are only partially structurally related.

### Guide Molecules

[0064] The system herein may comprise one or more guide molecules. The term guide molecule may also be referred to a guide RNA (gRNA). A guide molecule comprises a guide sequence and a scaffold. The guide sequence may also be referred to herein as a “spacer sequence” When the spacer and scaffold are part of the same single molecule the molecular may be referred to as a single guide molecule or single guide RNA (sgRNA). In some cases, the system comprises one guide molecule. In certain cases, the system comprises a plurality of guide molecules. The guide molecule(s) may direct or may be capable of directing the binding of a guide-Cas protein complex to one or more target polynucleotides. For example, the system herein may be used for inserting a donor polynucleotide to one or more desired target sites with the direction of the guide molecule(s).

[0065] The guide molecule(s) may be component(s) of the CRISPR-Cas system herein. As used herein, the term “guide sequence” and “spacer” in the context of a CRISPR-Cas system, comprises any polynucleotide sequence having sufficient complementarity with a target nucleic acid sequence to hybridize with the target nucleic acid sequence and direct sequence-specific binding of a nucleic acid-targeting complex to the target nucleic acid sequence. The guide sequences made using the methods disclosed herein may be a full-length guide sequence, a truncated guide sequence, a full-length sgRNA sequence, or a truncated sgRNA sequence. In some embodiments, the degree of complementarity of the guide sequence to a given target sequence, when optimally aligned using a suitable alignment algorithm, is about or more than about 50%, 60%, 75%, 80%, 85%, 90%, 95%, 97.5%, 99%, or more. In certain example embodiments, the guide molecule comprises a guide sequence that may be designed to have at least one mismatch with the target sequence, such that an RNA duplex formed between the guide sequence and the target sequence. Accordingly, the degree of complementarity is preferably less than 99%. For instance, where the guide sequence consists of 24 nucleotides, the degree of complementarity is more particularly about 96% or less. In particular embodiments, the guide sequence is designed to have a stretch of two or more adjacent mismatching nucleotides, such that the degree of complementarity over the entire guide sequence is further reduced. For instance, where the guide sequence consists of 24 nucleotides, the degree of complementarity is more particularly about 96% or less, more particularly, about 92% or less, more particularly about 88% or less, more particularly about 84% or less, more particularly about 80% or less, more particularly about 76% or less, more particularly about 72% or less, depending on whether the stretch of two or more mismatching nucleotides encompasses 2, 3, 4, 5, 6 or 7 nucleotides, etc. In some embodiments, aside from the stretch of one or more mismatching nucleotides, the degree of complementarity, when optimally aligned using a suitable alignment algorithm, is about or more than about 50%, 60%, 75%, 80%, 85%, 90%, 95%, 97.5%, 99%, or more. Optimal alignment may be determined with the use of any suitable algorithm for aligning sequences, non-limiting example of which include the Smith-Waterman algorithm, the Needleman-Wunsch algorithm, algorithms based on the Burrows-Wheeler Transform (e.g., the Burrows Wheeler Aligner), Clustal W, Clustal X, BLAT, Novoalign (Novocraft Technologies; available at www.novocraft.com), ELAND (Illumina, San Diego, CA), SOAP (available at soap.genomics.org.cn), and Maq (available at maq.sourceforge.net). The ability of a guide sequence (within a nucleic acid-targeting guide RNA) to direct sequence-specific binding of a nucleic acid-targeting complex to a target nucleic acid sequence may be assessed by any suitable assay. For example, the components of a nucleic acid-targeting CRISPR system sufficient to form a nucleic acid-targeting complex, including the guide sequence to be tested, may be provided to a host cell having the corresponding target nucleic acid sequence, such as by transfection with vectors encoding the components of the nucleic acid-targeting complex, followed by an assessment of preferential targeting (e.g., cleavage) within the target nucleic acid sequence, such as by Surveyor assay as described herein. Similarly, cleavage of a target nucleic acid sequence (or a sequence in the vicinity thereof) may be evaluated in a test tube by providing the target nucleic acid sequence, components of a nucleic acid-targeting complex, including the guide sequence to be tested and a control guide sequence different from the test guide sequence, and comparing binding or rate of cleavage at or in the vicinity of the target sequence between the test and control guide sequence reactions. Other assays are possible, and will occur to those skilled in the art. A guide sequence, and hence a nucleic acid-targeting guide RNA may be selected to target any target nucleic acid sequence.

[0066] In certain embodiments, the guide sequence or spacer length of the guide molecules is from 15 to 50 nt. In certain embodiments, the spacer length of the guide RNA is at least 15 nucleotides. In certain embodiments, the spacer length is from 15 to 17 nt, e.g., 15, 16, or 17 nt, from 17 to 20 nt, e.g., 17, 18, 19, or 20 nt, from 20 to 24 nt, e.g., 20, 21, 22, 23, or 24 nt, from 23 to 25 nt, e.g., 23, 24, or 25 nt, from 24 to 27 nt, e.g., 24, 25, 26, or 27 nt, from 27-30 nt, e.g., 27, 28, 29, or 30 nt, from 30-35 nt, e.g., 30, 31, 32, 33, 34, or 35 nt, or 35 nt or longer. In certain example embodiment, the guide sequence is 15, 16, 17,18, 19, 20, 21, 22, 23, 24, 25, 26, 27, 28, 29, 30, 31, 32, 33, 34, 35, 36, 37, 38, 39 40, 41, 42, 43, 44, 45, 46, 47 48, 49, 50, 51, 52, 53, 54, 55, 56, 57, 58, 59, 60, 61, 62, 63, 64, 65, 66, 67, 68, 69, 70, 71, 72, 73, 74, 75, 76, 77, 78, 79, 80, 81, 82, 83, 84, 85, 86, 87, 88, 89, 90, 91, 92, 93, 94, 95, 96, 97, 98, 99, or 100 nt.

[0067] In some embodiments, the guide sequence is an RNA sequence of between 10 to 50 nt in length, but more particularly of about 20-30 nt advantageously about 20 nt, 23-25 nt or 24 nt. The guide sequence is selected so as to ensure that it hybridizes to the target sequence. This is described more in detail below. Selection can encompass further steps which increase efficacy and specificity.

[0068] In some embodiments, the guide sequence has a canonical length (e.g., about 15-30 nt) is used to hybridize with the target RNA or DNA. In some embodiments, a guide molecule is longer than the canonical length (e.g., >30 nt) is used to hybridize with the target RNA or DNA, such that a region of the guide sequence hybridizes with a region of the RNA or DNA strand outside of the Cas-guide target complex. This can be of interest where additional modifications, such deamination of nucleotides is of interest. In alternative embodiments, it is of interest to maintain the limitation of the canonical guide sequence length.

[0069] In some embodiments, the sequence of the guide molecule (direct repeat and/or spacer) is selected to reduce the degree secondary structure within the guide molecule. In some embodiments, about or less than about 75%, 50%, 40%, 30%, 25%, 20%, 15%, 10%, 5%, 1%, or fewer of the nucleotides of the nucleic acid-targeting guide RNA participate in self-complementary base pairing when optimally folded. Optimal folding may be determined by any suitable polynucleotide folding algorithm. Some programs are based on calculating the minimal Gibbs free energy. An example of one such algorithm is mFold, as described by Zuker and Stiegler (Nucleic Acids Res. 9 (1981), 133-148). Another example folding algorithm is the online webserver RNAfold, developed at Institute for Theoretical Chemistry at the University of Vienna, using the centroid structure prediction algorithm (see e.g., A.R. Gruber et al., 2008, Cell 106 (1): 23-24; and PA Carr and GM Church, 2009, Nature Biotechnology 27 (12): 1151-62).

[0070] In some embodiments, a guide molecule is designed or selected to modulate intermolecular interactions among guide molecules, such as among stem-loop regions of different guide molecules. It will be appreciated that nucleotides within a guide that base-pair to form a stem-loop are also capable of base-pairing to form an intermolecular duplex with a second guide and that such an intermolecular duplex would not have a secondary structure compatible with CRISPR complex formation. Accordingly, it is useful to select or design DR sequences in order to modulate stem-loop formation and CRISPR complex formation. In some embodiments, about or less than about 75%, 50%, 40%, 30%, 25%, 20%, 15%, 10%, 5%, 1%, or fewer of nucleic acid-targeting guides are in intermolecular duplexes. It will be appreciated that stem-loop variation will often be within limits imposed by DR-CRISPR effector interactions. One way to modulate stem-loop formation or change the equilibrium between stem-loop and intermolecular duplex is to vary nucleotide pairs in the stem of the stem-loop of a DR. For example, in one embodiment, a G-C pair is replaced by an A-U or U-A pair. In another embodiment, an A-U pair is substituted for a G-C or a C-G pair. In another embodiment, a naturally occurring nucleotide is replaced by a nucleotide analog. Another way to modulate stem-loop formation or change the equilibrium between stem-loop and intermolecular duplex is to modify the loop of the stem-loop of a DR. Without be bound by theory, the loop can be viewed as an intervening sequence flanked by two sequences that are complementary to each other. When that intervening sequence is not self-complementary, its effect will be to destabilize intermolecular duplex formation. The same principle applies when guides are multiplexed: while the targeting sequences may differ, it may be advantageous to modify the stem-loop region in the DRs of the different guides. Moreover, when guides are multiplexed, the relative activities of the different guides can be modulated by balancing the activity of each individual guide. In certain embodiments, the equilibrium between intermolecular stem-loops vs. intermolecular duplexes is determined. The determination may be made by physical or biochemical means and can be in the presence or absence of a CRISPR effector.

[0071] In some embodiments, it is of interest to reduce the susceptibility of the guide molecule to RNA cleavage, such as cleavage by a CRISPR system that cleaves RNA. Accordingly, in particular embodiments, the guide molecule is adjusted to avoid cleavage by a CRISPR system or other RNA-cleaving enzymes.

[0072] In certain embodiments, the guide molecule comprises non-naturally occurring nucleic acids and/or non-naturally occurring nucleotides and/or nucleotide analogs, and/or chemically modifications. Preferably, these non-naturally occurring nucleic acids and non-naturally occurring nucleotides are located outside the guide sequence. Non-naturally occurring nucleic acids can include, for example, mixtures of naturally and non-naturally occurring nucleotides. Non-naturally occurring nucleotides and/or nucleotide analogs may be modified at the ribose, phosphate, and/or base moiety. In an embodiment of the invention, a guide nucleic acid comprises ribonucleotides and non-ribonucleotides. In one such embodiment, a guide comprises one or more ribonucleotides and one or more deoxyribonucleotides. In an embodiment of the invention, the guide comprises one or more non-naturally occurring nucleotide or nucleotide analog such as a nucleotide with phosphorothioate linkage, a locked nucleic acid (LNA) nucleotide comprising a methylene bridge between the 2′ and 4′ carbons of the ribose ring, or bridged nucleic acids (BNA). Other examples of modified nucleotides include 2′-O-methyl analogs, 2′-deoxy analogs, or 2′-fluoro analogs. Further examples of modified bases include, but are not limited to, 2-aminopurine, 5-bromo-uridine, pseudouridine, inosine, 7-methylguanosine. Examples of guide RNA chemical modifications include, without limitation, incorporation of 2′-O-methyl (M), 2′-O-methyl 3′ phosphorothioate (MS), S-constrained ethyl (cEt), or 2′-O-methyl 3′thioPACE (MSP) at one or more terminal nucleotides. Such chemically modified guides can comprise increased stability and increased activity as compared to unmodified guides, though on-target vs. off-target specificity is not predictable. (See, Hendel, 2015, Nat Biotechnol. 33 (9): 985-9, doi: 10.1038/nbt.3290, published online 29 Jun. 2015 Ragdarm et al., 0215, PNAS, E7110-E7111; Allerson et al., J. Med. Chem. 2005, 48:901-904; Bramsen et al., Front. Genet., 2012, 3:154; Deng et al., PNAS, 2015, 112:11870-11875; Sharma et al., MedChemComm., 2014, 5:1454-1471; Hendel et al., Nat. Biotechnol. (2015) 33 (9): 985-989; Li et al., Nature Biomedical Engineering, 2017, 1, 0066 DOI: 10.1038/s41551-017-0066). In some embodiments, the 5′ and/or 3′ end of a guide RNA is modified by a variety of functional moieties including fluorescent dyes, polyethylene glycol, cholesterol, proteins, or detection tags. (See Kelly et al., 2016, J. Biotech. 233:74-83). In certain embodiments, a guide comprises ribonucleotides in a region that binds to a target RNA and one or more deoxyribonucleotides and/or nucleotide analogs in a region that binds to a Cas effector. In an embodiment of the invention, deoxyribonucleotides and/or nucleotide analogs are incorporated in engineered guide structures, such as, without limitation, stem-loop regions, and the seed region. In certain embodiments, at least 1, 2, 3, 4, 5, 6, 7, 8, 9, 10, 11, 12, 13, 14, 15, 16, 17, 18, 19, 20, 21, 22, 23, 24, 25, 26, 27, 28, 29, 30, 35, 40, 45, 50, or 75 nucleotides of a guide is chemically modified. In some embodiments, 3-5 nucleotides at either the 3′ or the 5′ end of a guide is chemically modified. In some embodiments, only minor modifications are introduced in the seed region, such as 2′-F modifications. In some embodiments, 2′-F modification is introduced at the 3′ end of a guide. In certain embodiments, three to five nucleotides at the 5′ and/or the 3′ end of the guide are chemically modified with 2′-O-methyl (M), 2′-O-methyl 3′ phosphorothioate (MS), S-constrained ethyl (cEt), or 2′-O-methyl 3′ thioPACE (MSP). Such modification can enhance genome editing efficiency (see Hendel et al., Nat. Biotechnol. (2015) 33 (9): 985-989). In certain embodiments, all of the phosphodiester bonds of a guide are substituted with phosphorothioates (PS) for enhancing levels of gene disruption. In certain embodiments, more than five nucleotides at the 5′ and/or the 3′ end of the guide are chemically modified with 2′-O-Me, 2′-F or S-constrained ethyl (cEt). Such chemically modified guide can mediate enhanced levels of gene disruption (see Ragdarm et al., 0215, PNAS, E7110-E7111). In an embodiment of the invention, a guide is modified to comprise a chemical moiety at its 3′ and/or 5′ end. Such moieties include, but are not limited to amine, azide, alkyne, thio, dibenzocyclooctyne (DBCO), or Rhodamine, peptides, nuclear localization sequence (NLS), peptide nucleic acid (PNA), polyethylene glycol (PEG), triethylene glycol, or tetraethyleneglycol (TEG). In certain embodiment, the chemical moiety is conjugated to the guide by a linker, such as an alkyl chain. In certain embodiments, the chemical moiety is conjugated to the guide by a linker, such as an alkyl chain. In certain embodiments, the chemical moiety of the modified guide can be used to attach the guide to another molecule, such as DNA, RNA, protein, or nanoparticles. Such chemically modified guide can be used to identify or enrich cells generically edited by a CRISPR system (see Lee et al., eLife, 2017, 6: e25312, DOI: 10.7554).

[0073] In some embodiments, 3 nucleotides at each of the 3′ and 5′ ends are chemically modified. In a specific embodiment, the modifications comprise 2′-O-methyl or phosphorothioate analogs. In a specific embodiment, 12 nucleotides in the tetraloop and 16 nucleotides in the stem-loop region are replaced with 2′-O-methyl analogs. Such chemical modifications improve in vivo editing and stability (see Finn et al., Cell Reports (2018), 22:2227-2235). In some embodiments, more than 60 or 70 nucleotides of the guide are chemically modified. In some embodiments, this modification comprises replacement of nucleotides with 2′-O-methyl or 2′-fluoro nucleotide analogs or phosphorothioate (PS) modification of phosphodiester bonds. In some embodiments, the chemical modification comprises 2′-O-methyl or 2′-fluoro modification of guide nucleotides extending outside of the nuclease protein when the CRISPR complex is formed or PS modification of 20 to 30 or more nucleotides of the 3′-terminus of the guide. In a particular embodiment, the chemical modification further comprises 2′-O-methyl analogs at the 5′ end of the guide or 2′-fluoro analogs in the seed and tail regions. Such chemical modifications improve stability to nuclease degradation and maintain or enhance genome-editing activity or efficiency, but modification of all nucleotides may abolish the function of the guide (see Yin et al., Nat. Biotech. (2018), 35 (12): 1179-1187). Such chemical modifications may be guided by knowledge of the structure of the CRISPR complex, including knowledge of the limited number of nuclease and RNA 2′-OH interactions (see Yin et al., Nat. Biotech. (2018), 35 (12): 1179-1187). In some embodiments, one or more guide RNA nucleotides may be replaced with DNA nucleotides. In some embodiments, up to 2, 4, 6, 8, 10, or 12 RNA nucleotides of the 5′-end tail/seed guide region are replaced with DNA nucleotides. In certain embodiments, the majority of guide RNA nucleotides at the 3′ end are replaced with DNA nucleotides. In particular embodiments, 16 guide RNA nucleotides at the 3′ end are replaced with DNA nucleotides. In particular embodiments, 8 guide RNA nucleotides of the 5′-end tail/seed region and 16 RNA nucleotides at the 3′ end are replaced with DNA nucleotides. In particular embodiments, guide RNA nucleotides that extend outside of the nuclease protein when the CRISPR complex is formed are replaced with DNA nucleotides. Such replacement of multiple RNA nucleotides with DNA nucleotides leads to decreased off-target activity but similar on-target activity compared to an unmodified guide; however, replacement of all RNA nucleotides at the 3′ end may abolish the function of the guide (see Yin et al., Nat. Chem. Biol. (2018) 14, 311-316). Such modifications may be guided by knowledge of the structure of the CRISPR complex, including knowledge of the limited number of nuclease and RNA 2′-OH interactions (see Yin et al., Nat. Chem. Biol. (2018) 14, 311-316).

[0074] In some embodiments, the guide molecule forms a stemloop with a separate non-covalently linked sequence, which can be DNA or RNA. In particular embodiments, the sequences forming the guide are first synthesized using the standard phosphoramidite synthetic protocol (Herdewijn, P., ed., Methods in Molecular Biology Col 288, Oligonucleotide Synthesis: Methods and Applications, Humana Press, New Jersey (2012)). In some embodiments, these sequences can be functionalized to contain an appropriate functional group for ligation using the standard protocol known in the art (Hermanson, G. T., Bioconjugate Techniques, Academic Press (2013)). Examples of functional groups include, but are not limited to, hydroxyl, amine, carboxylic acid, carboxylic acid halide, carboxylic acid active ester, aldehyde, carbonyl, chlorocarbonyl, imidazolylcarbonyl, hydrozide, semicarbazide, thio semicarbazide, thiol, maleimide, haloalkyl, sulfonyl, ally, propargyl, diene, alkyne, and azide. Once this sequence is functionalized, a covalent chemical bond or linkage can be formed between this sequence and the direct repeat sequence. Examples of chemical bonds include, but are not limited to, those based on carbamates, ethers, esters, amides, imines, amidines, aminotrizines, hydrozone, disulfides, thioethers, thioesters, phosphorothioates, phosphorodithioates, sulfonamides, sulfonates, sulfones, sulfoxides, ureas, thioureas, hydrazide, oxime, triazole, photolabile linkages, C—C bond forming groups such as Diels-Alder cyclo-addition pairs or ring-closing metathesis pairs, and Michael reaction pairs.

[0075] In some embodiments, these stem-loop forming sequences can be chemically synthesized. In some embodiments, the chemical synthesis uses automated, solid-phase oligonucleotide synthesis machines with 2′-acetoxyethyl orthoester (2′-ACE) (Scaringe et al., J. Am. Chem. Soc. (1998) 120:11820-11821; Scaringe, Methods Enzymol. (2000) 317:3-18) or 2′-thionocarbamate (2′-TC) chemistry (Dellinger et al., J. Am. Chem. Soc. (2011) 133:11540-11546; Hendel et al., Nat. Biotechnol. (2015) 33:985-989).

[0076] In certain embodiments, the guide molecule comprises (1) a guide sequence capable of hybridizing to a target locus and (2) a tracr mate or direct repeat sequence whereby the direct repeat sequence is located upstream (i.e., 5′) or downstream (i.e., 3′) from the guide sequence. In a particular embodiment, the seed sequence (i.e., the sequence essential critical for recognition and/or hybridization to the sequence at the target locus) of the guide sequence is approximately within the first 10 nucleotides of the guide sequence.

[0077] In a particular embodiment, the guide molecule comprises a guide sequence linked to a direct repeat sequence, wherein the direct repeat sequence comprises one or more stem loops or optimized secondary structures. In particular embodiments, the direct repeat has a minimum length of 16 nts and a single stem loop. In further embodiments the direct repeat has a length longer than 16 nts, preferably more than 17 nts, and has more than one stem loops or optimized secondary structures. In particular embodiments, the guide molecule comprises or consists of the guide sequence linked to all or part of the natural direct repeat sequence. A CRISPR-cas guide molecule comprises (in 3′ to 5′ direction or in 5′ to 3′ direction): a guide sequence a first complimentary stretch (the “repeat”), a loop (which is typically 4 or 5 nucleotides long), a second complimentary stretch (the “anti-repeat” being complimentary to the repeat), and a poly A (often poly U in RNA) tail (terminator). In certain embodiments, the direct repeat sequence retains its natural architecture and forms a single stem loop. In particular embodiments, certain aspects of the guide architecture can be modified, for example by addition, subtraction, or substitution of features, whereas certain other aspects of guide architecture are maintained. Preferred locations for engineered guide molecule modifications, including but not limited to insertions, deletions, and substitutions include guide termini and regions of the guide molecule that are exposed when complexed with the CRISPR-Cas protein and/or target, for example the stemloop of the direct repeat sequence.

[0078] In particular embodiments, the stem comprises at least about 4 bp comprising complementary X and Y sequences, although stems of more, e.g., 5, 6, 7, 8, 9, 10, 11 or 12 or fewer, e.g., 3, 2, base pairs are also contemplated. Thus, for example X2-10 and Y2-10 (wherein X and Y represent any complementary set of nucleotides) may be contemplated. In one aspect, the stem made of the X and Y nucleotides, together with the loop will form a complete hairpin in the overall secondary structure; and this may be advantageous and the amount of base pairs can be any amount that forms a complete hairpin. In one aspect, any complementary X: Y basepairing sequence (e.g., as to length) is tolerated, so long as the secondary structure of the entire guide molecule is preserved. In one aspect, the loop that connects the stem made of X: Y basepairs can be any sequence of the same length (e.g., 4 or 5 nucleotides) or longer that does not interrupt the overall secondary structure of the guide molecule. In one aspect, the stemloop can further comprise, e.g., an MS2 aptamer. In one aspect, the stem comprises about 5-7 bp comprising complementary X and Y sequences, although stems of more or fewer basepairs are also contemplated. In one aspect, non-Watson Crick basepairing is contemplated, where such pairing otherwise generally preserves the architecture of the stemloop at that position.

[0079] In particular embodiments, the natural hairpin or stemloop structure of the guide molecule is extended or replaced by an extended stemloop. It has been demonstrated that extension of the stem can enhance the assembly of the guide molecule with the CRISPR-Cas protein (Chen et al. Cell. (2013); 155 (7): 1479-1491). In particular embodiments, the stem of the stemloop is extended by at least 1, 2, 3, 4, 5 or more complementary basepairs (i.e., corresponding to the addition of 2, 4, 6, 8, 10 or more nucleotides in the guide molecule). In particular embodiments, these are located at the end of the stem, adjacent to the loop of the stemloop.

[0080] In particular embodiments, the susceptibility of the guide molecule to RNases or to decreased expression can be reduced by slight modifications of the sequence of the guide molecule which do not affect its function. For instance, in particular embodiments, premature termination of transcription, such as premature transcription of U6 Pol-III, can be removed by modifying a putative Pol-III terminator (4 consecutive U's) in the guide molecules sequence. Where such sequence modification is required in the stemloop of the guide molecule, it is preferably ensured by a basepair flip.

[0081] In a particular embodiment, the direct repeat may be modified to comprise one or more protein-binding RNA aptamers. In a particular embodiment, one or more aptamers may be included such as part of optimized secondary structure. Such aptamers may be capable of binding a bacteriophage coat protein as detailed further herein.

[0082] In some embodiments, the guide molecule forms a duplex with a target RNA comprising at least one target cytosine residue to be edited. Upon hybridization of the guide RNA molecule to the target RNA, the cytidine deaminase binds to the single strand RNA in the duplex made accessible by the mismatch in the guide sequence and catalyzes deamination of one or more target cytosine residues comprised within the stretch of mismatching nucleotides.

[0083] A guide sequence, and hence a nucleic acid-targeting guide RNA, may be selected to target any target nucleic acid sequence. The target sequence may be mRNA.

[0084] In certain embodiments, the target sequence should be associated with a PAM (protospacer adjacent motif) or PFS (protospacer flanking sequence or site), that is, a short sequence recognized by the CRISPR complex. Depending on the nature of the CRISPR-Cas protein, the target sequence should be selected such that its complementary sequence in the DNA duplex (also referred to herein as the non-target sequence) is upstream or downstream of the PAM.

[0085] Further, engineering of the PAM Interacting (PI) domain may allow programing of PAM specificity, improve target site recognition fidelity, and increase the versatility of the CRISPR-Cas protein, for example as described for Cas9 in Kleinstiver B P et al. Engineered CRISPR-Cas9 nucleases with altered PAM specificities. Nature. 2015 Jul. 23; 523 (7561): 481-5. doi: 10.1038/nature14592.

[0086] In particular embodiments, the guide is an escorted guide. By “escorted” is meant that the CRISPR-Cas system or complex or guide is delivered to a selected time or place within a cell, so that activity of the CRISPR-Cas system or complex or guide is spatially or temporally controlled. For example, the activity and destination of the 3 CRISPR-Cas system or complex or guide may be controlled by an escort RNA aptamer sequence that has binding affinity for an aptamer ligand, such as a cell surface protein or other localized cellular component. Alternatively, the escort aptamer may for example be responsive to an aptamer effector on or in the cell, such as a transient effector, such as an external energy source that is applied to the cell at a particular time.

[0087] The escorted CRISPR-Cas systems or complexes have a guide molecule with a functional structure designed to improve guide molecule structure, architecture, stability, genetic expression, or any combination thereof. Such a structure can include an aptamer.

[0088] Aptamers are biomolecules that can be designed or selected to bind tightly to other ligands, for example using a technique called systematic evolution of ligands by exponential enrichment (SELEX; Tuerk C, Gold L: “Systematic evolution of ligands by exponential enrichment: RNA ligands to bacteriophage T4 DNA polymerase.” Science 1990, 249:505-510). Nucleic acid aptamers can for example be selected from pools of random-sequence oligonucleotides, with high binding affinities and specificities for a wide range of biomedically relevant targets, suggesting a wide range of therapeutic utilities for aptamers (Keefe, Anthony D., Supriya Pai, and Andrew Ellington. “Aptamers as therapeutics.” Nature Reviews Drug Discovery 9.7 (2010): 537-550). These characteristics also suggest a wide range of uses for aptamers as drug delivery vehicles (Levy-Nissenbaum, Etgar, et al. “Nanotechnology and aptamers: applications in drug delivery.” Trends in biotechnology 26.8 (2008): 442-449; and, Hicke B J, Stephens A W. “Escort aptamers: a delivery service for diagnosis and therapy.” J Clin Invest 2000, 106:923-928.). Aptamers may also be constructed that function as molecular switches, responding to a que by changing properties, such as RNA aptamers that bind fluorophores to mimic the activity of green fluorescent protein (Paige, Jeremy S., Karen Y. Wu, and Samie R. Jaffrey. “RNA mimics of green fluorescent protein.” Science 333.6042 (2011): 642-646). It has also been suggested that aptamers may be used as components of targeted siRNA therapeutic delivery systems, for example targeting cell surface proteins (Zhou, Jiehua, and John J. Rossi. “Aptamer-targeted cell-specific RNA interference.” Silence 1.1 (2010): 4).

[0089] Accordingly, in particular embodiments, the guide molecule is modified, e.g., by one or more aptamer(s) designed to improve guide molecule delivery, including delivery across the cellular membrane, to intracellular compartments, or into the nucleus. Such a structure can include, either in addition to the one or more aptamer(s) or without such one or more aptamer(s), moiety(ies) so as to render the guide molecule deliverable, inducible or responsive to a selected effector. The invention accordingly comprehends a guide molecule that responds to normal or pathological physiological conditions, including without limitation pH, hypoxia, 02 concentration, temperature, protein concentration, enzymatic concentration, lipid structure, light exposure, mechanical disruption (e.g., ultrasound waves), magnetic fields, electric fields, or electromagnetic radiation.

[0090] Light responsiveness of an inducible system may be achieved via the activation and binding of cryptochrome-2 and CIB1. Blue light stimulation induces an activating conformational change in cryptochrome-2, resulting in recruitment of its binding partner CIB1. This binding is fast and reversible, achieving saturation in <15 sec following pulsed stimulation and returning to baseline <15 min after the end of stimulation. These rapid binding kinetics result in a system temporally bound only by the speed of transcription/translation and transcript/protein degradation, rather than uptake and clearance of inducing agents. Crytochrome-2 activation is also highly sensitive, allowing for the use of low light intensity stimulation and mitigating the risks of phototoxicity. Further, in a context such as the intact mammalian brain, variable light intensity may be used to control the size of a stimulated region, allowing for greater precision than vector delivery alone may offer.

[0091] The invention contemplates energy sources such as electromagnetic radiation, sound energy or thermal energy to induce the guide. Advantageously, the electromagnetic radiation is a component of visible light. In a preferred embodiment, the light is a blue light with a wavelength of about 450 to about 495 nm. In an especially preferred embodiment, the wavelength is about 488 nm. In another preferred embodiment, the light stimulation is via pulses. The light power may range from about 0-9 mW/cm2. In a preferred embodiment, a stimulation paradigm of as low as 0.25 sec every 15 sec should result in maximal activation.

[0092] The chemical or energy sensitive guide may undergo a conformational change upon induction by the binding of a chemical source or by the energy allowing it act as a guide and have the CRISPR-Cas system or complex function. The invention can involve applying the chemical source or energy so as to have the guide function and the CRISPR-Cas system or complex function; and optionally further determining that the expression of the genomic locus is altered.

[0093] There are several different designs of this chemical inducible system: 1. ABI-PYL based system inducible by Abscisic Acid (ABA) (see, e.g., stke.sciencemag.org/cgi/content/abstract/sigtrans; 4/164/rs2), 2. FKBP-FRB based system inducible by rapamycin (or related chemicals based on rapamycin) (see, e.g., www.nature.com/nmeth/journal/v2/n6/full/nmeth763.htmD, 3. GID1-GAI based system inducible by Gibberellin (GA) (see, e.g., www.nature.com/nchembio/journal/v8/n5/full/nchembio. 922.htmD.

[0094] A chemical inducible system can be an estrogen receptor (ER) based system inducible by 4-hydroxytamoxifen (4OHT) (see, e.g., www.pnas.org/content/1Apr. 3, 1027.abstract). A mutated ligand-binding domain of the estrogen receptor called ERT2 translocates into the nucleus of cells upon binding of 4-hydroxytamoxifen. In further embodiments of the invention any naturally occurring or engineered derivative of any nuclear receptor, thyroid hormone receptor, retinoic acid receptor, estrogen receptor, estrogen-related receptor, glucocorticoid receptor, progesterone receptor, androgen receptor may be used in inducible systems analogous to the ER based inducible system.

[0095] Another inducible system is based on the design using Transient receptor potential (TRP) ion channel based system inducible by energy, heat or radio-wave (see, e.g., www.sciencemag.org/content/336/6081/604). These TRP family proteins respond to different stimuli, including light and heat. When this protein is activated by light or heat, the ion channel will open and allow the entering of ions such as calcium into the plasma membrane. This influx of ions will bind to intracellular ion interacting partners linked to a polypeptide including the guide and the other components of the CRISPR-Cas complex or system, and the binding will induce the change of sub-cellular localization of the polypeptide, leading to the entire polypeptide entering the nucleus of cells. Once inside the nucleus, the guide protein and the other components of the CRISPR-Cas complex will be active and modulating target gene expression in cells.

[0096] While light activation may be an advantageous embodiment, sometimes it may be disadvantageous especially for in vivo applications in which the light may not penetrate the skin or other organs. In this instance, other methods of energy activation are contemplated, in particular, electric field energy and/or ultrasound which have a similar effect.

[0097] Electric field energy is preferably administered substantially as described in the art, using one or more electric pulses of from about 1 Volt/cm to about 10 kVolts/cm under in vivo conditions. Instead of or in addition to the pulses, the electric field may be delivered in a continuous manner. The electric pulse may be applied for between 1 us and 500 milliseconds, preferably between 1 us and 100 milliseconds. The electric field may be applied continuously or in a pulsed manner for 5 about minutes.

[0098] As used herein, ‘electric field energy’ is the electrical energy to which a cell is exposed. Preferably, the electric field has a strength of from about 1 Volt/cm to about 10 k Volts/cm or more under in vivo conditions (see WO97/49450).

[0099] As used herein, the term “electric field” includes one or more pulses at variable capacitance and voltage and including exponential and/or square wave and/or modulated wave and/or modulated square wave forms. References to electric fields and electricity should be taken to include reference the presence of an electric potential difference in the environment of a cell. Such an environment may be set up by way of static electricity, alternating current (AC), direct current (DC), etc., as known in the art. The electric field may be uniform, non-uniform or otherwise, and may vary in strength and/or direction in a time dependent manner.

[0100] Single or multiple applications of electric field, as well as single or multiple applications of ultrasound are also possible, in any order and in any combination. The ultrasound and/or the electric field may be delivered as single or multiple continuous applications, or as pulses (pulsatile delivery).

[0101] Electroporation has been used in both in vitro and in vivo procedures to introduce foreign material into living cells. With in vitro applications, a sample of live cells is first mixed with the agent of interest and placed between electrodes such as parallel plates. Then, the electrodes apply an electrical field to the cell/implant mixture. Examples of systems that perform in vitro electroporation include the Electro Cell Manipulator ECM600 product, and the Electro Square Porator T820, both made by the BTX Division of Genetronics, Inc (see U.S. Pat. No. 5,869,326).

[0102] The known electroporation techniques (both in vitro and in vivo) function by applying a brief high voltage pulse to electrodes positioned around the treatment region. The electric field generated between the electrodes causes the cell membranes to temporarily become porous, whereupon molecules of the agent of interest enter the cells. In known electroporation applications, this electric field comprises a single square wave pulse on the order of 1000 V/cm, of about 100. mu.s duration. Such a pulse may be generated, for example, in known applications of the Electro Square Porator T820.

[0103] Preferably, the electric field has a strength of from about 1 V/cm to about 10 kV/cm under in vitro conditions. Thus, the electric field may have a strength of 1 V/cm, 2 V/cm, 3 V/cm, 4 V/cm, 5 V/cm, 6 V/cm, 7 V/cm, 8 V/cm, 9 V/cm, 10 V/cm, 20 V/cm, 50 V/cm, 100 V/cm, 200 V/cm, 300 V/cm, 400 V/cm, 500 V/cm, 600 V/cm, 700 V/cm, 800 V/cm, 900 V/cm, 1 kV/cm, 2 kV/cm, 5 kV/cm, 10 kV/cm, 20 kV/cm, 50 kV/cm or more. More preferably from about 0.5 kV/cm to about 4.0 kV/cm under in vitro conditions. Preferably the electric field has a strength of from about 1 V/cm to about 10 kV/cm under in vivo conditions. However, the electric field strengths may be lowered where the number of pulses delivered to the target site are increased. Thus, pulsatile delivery of electric fields at lower field strengths is envisaged.

[0104] Preferably the application of the electric field is in the form of multiple pulses such as double pulses of the same strength and capacitance or sequential pulses of varying strength and/or capacitance. As used herein, the term “pulse” includes one or more electric pulses at variable capacitance and voltage and including exponential and/or square wave and/or modulated wave/square wave forms.

[0105] Preferably the electric pulse is delivered as a waveform selected from an exponential wave form, a square wave form, a modulated wave form and a modulated square wave form.

[0106] A preferred embodiment employs direct current at low voltage. Thus, Applicants disclose the use of an electric field which is applied to the cell, tissue or tissue mass at a field strength of between 1V/cm and 20V/cm, for a period of 100 milliseconds or more, preferably 15 minutes or more.

[0107] Ultrasound is advantageously administered at a power level of from about 0.05 W/cm2 to about 100 W/cm². Diagnostic or therapeutic ultrasound may be used, or combinations thereof.

[0108] As used herein, the term “ultrasound” refers to a form of energy which consists of mechanical vibrations the frequencies of which are so high they are above the range of human hearing. Lower frequency limit of the ultrasonic spectrum may generally be taken as about 20 KHz. Most diagnostic applications of ultrasound employ frequencies in the range 1 and 15 MHz′ (From Ultrasonics in Clinical Diagnosis, P. N. T. Wells, ed., 2nd. Edition, Publ. Churchill Livingstone [Edinburgh, London & NY, 1977]).

[0109] Ultrasound has been used in both diagnostic and therapeutic applications. When used as a diagnostic tool (“diagnostic ultrasound”), ultrasound is typically used in an energy density range of up to about 100 mW/cm2 (FDA recommendation), although energy densities of up to 750 mW/cm2 have been used. In physiotherapy, ultrasound is typically used as an energy source in a range up to about 3 to 4 W/cm2 (WHO recommendation). In other therapeutic applications, higher intensities of ultrasound may be employed, for example, HIFU at 100 W/cm up to 1 kW/cm2 (or even higher) for short periods of time. The term “ultrasound” as used in this specification is intended to encompass diagnostic, therapeutic and focused ultrasound.

[0110] Focused ultrasound (FUS) allows thermal energy to be delivered without an invasive probe (see Morocz et al 1998 Journal of Magnetic Resonance Imaging Vol. 8, No. 1, pp. 136-142. Another form of focused ultrasound is high intensity focused ultrasound (HIFU) which is reviewed by Moussatov et al in Ultrasonics (1998) Vol. 36, No. 8, pp. 893-900 and TranHuuHue et al in Acustica (1997) Vol. 83, No. 6, pp. 1103-1106.

[0111] Preferably, a combination of diagnostic ultrasound and a therapeutic ultrasound is employed. This combination is not intended to be limiting, however, and the skilled reader will appreciate that any variety of combinations of ultrasound may be used. Additionally, the energy density, frequency of ultrasound, and period of exposure may be varied.

[0112] Preferably the exposure to an ultrasound energy source is at a power density of from about 0.05 to about 100 Wcm−2. Even more preferably, the exposure to an ultrasound energy source is at a power density of from about 1 to about 15 Wcm−2.

[0113] Preferably the exposure to an ultrasound energy source is at a frequency of from about 0.015 to about 10.0 MHz. More preferably the exposure to an ultrasound energy source is at a frequency of from about 0.02 to about 5.0 MHz or about 6.0 MHz. Most preferably, the ultrasound is applied at a frequency of 3 MHz.

[0114] Preferably the exposure is for periods of from about 10 milliseconds to about 60 minutes. Preferably the exposure is for periods of from about 1 second to about 5 minutes. More preferably, the ultrasound is applied for about 2 minutes. Depending on the particular target cell to be disrupted, however, the exposure may be for a longer duration, for example, for 15 minutes.

[0115] Advantageously, the target tissue is exposed to an ultrasound energy source at an acoustic power density of from about 0.05 Wcm−2 to about 10 Wcm−2 with a frequency ranging from about 0.015 to about 10 MHz (see WO 98/52609). However, alternatives are also possible, for example, exposure to an ultrasound energy source at an acoustic power density of above 100 Wcm−2, but for reduced periods of time, for example, 1000 Wcm−2 for periods in the millisecond range or less.

[0116] Preferably the application of the ultrasound is in the form of multiple pulses; thus, both continuous wave and pulsed wave (pulsatile delivery of ultrasound) may be employed in any combination. For example, continuous wave ultrasound may be applied, followed by pulsed wave ultrasound, or vice versa. This may be repeated any number of times, in any order and combination. The pulsed wave ultrasound may be applied against a background of continuous wave ultrasound, and any number of pulses may be used in any number of groups.

[0117] Preferably, the ultrasound may comprise pulsed wave ultrasound. In a highly preferred embodiment, the ultrasound is applied at a power density of 0.7 Wcm−2 or 1.25 Wcm−2 as a continuous wave. Higher power densities may be employed if pulsed wave ultrasound is used.

[0118] Use of ultrasound is advantageous as, like light, it may be focused accurately on a target. Moreover, ultrasound is advantageous as it may be focused more deeply into tissues unlike light. It is therefore better suited to whole-tissue penetration (such as but not limited to a lobe of the liver) or whole organ (such as but not limited to the entire liver or an entire muscle, such as the heart) therapy. Another important advantage is that ultrasound is a non-invasive stimulus which is used in a wide variety of diagnostic and therapeutic applications. By way of example, ultrasound is well known in medical imaging techniques and, additionally, in orthopedic therapy. Furthermore, instruments suitable for the application of ultrasound to a subject vertebrate are widely available and their use is well known in the art.

[0119] In particular embodiments, the guide molecule is modified by a secondary structure to increase the specificity of the CRISPR-Cas system and the secondary structure can protect against exonuclease activity and allow for 5′ additions to the guide sequence also referred to herein as a protected guide molecule.

[0120] In one aspect, the invention provides for hybridizing a “protector RNA” to a sequence of the guide molecule, wherein the “protector RNA” is an RNA strand complementary to the 3′ end of the guide molecule to thereby generate a partially double-stranded guide RNA. In an embodiment of the invention, protecting mismatched bases (i.e. the bases of the guide molecule which do not form part of the guide sequence) with a perfectly complementary protector sequence decreases the likelihood of target RNA binding to the mismatched basepairs at the 3′ end. In particular embodiments of the invention, additional sequences comprising an extended length may also be present within the guide molecule such that the guide comprises a protector sequence within the guide molecule. This “protector sequence” ensures that the guide molecule comprises a “protected sequence” in addition to an “exposed sequence” (comprising the part of the guide sequence hybridizing to the target sequence). In particular embodiments, the guide molecule is modified by the presence of the protector guide to comprise a secondary structure such as a hairpin. Advantageously there are three or four to thirty or more, e.g., about 10 or more, contiguous base pairs having complementarity to the protected sequence, the guide sequence or both. It is advantageous that the protected portion does not impede thermodynamics of the CRISPR-Cas system interacting with its target. By providing such an extension including a partially double stranded guide molecule, the guide molecule is considered protected and results in improved specific binding of the CRISPR-Cas complex, while maintaining specific activity.

[0121] In particular embodiments, use is made of a truncated guide (tru-guide), i.e. a guide molecule which comprises a guide sequence which is truncated in length with respect to the canonical guide sequence length. As described by Nowak et al. (Nucleic Acids Res (2016) 44 (20): 9555-9564), such guides may allow catalytically active CRISPR-Cas enzyme to bind its target without cleaving the target RNA. In particular embodiments, a truncated guide is used which allows the binding of the target but retains only nickase activity of the CRISPR-Cas enzyme.

### Tn7 and Tn7-Like Transposases

[0122] The transposases in the systems herein may be CRISPR-associated transposases (also used interchangeably with “Cas-associated transposases,” “CRISPR-associated Tn7 transposases,” and “CRISPR-associated transposase proteins” herein) or functional fragments thereof. CRISPR-associated transposases may include any transposase that can be directed to or recruited to a region of a target polynucleotide by sequence-specific binding of a CRISPR-Cas complex. CRISPR-associated transposases may include any transposases that associate (e.g., form a complex) with one or more components in a CRISPR-Cas system, e.g., Cas protein, guide molecule etc.). In certain example embodiments, CRISPR-associated transposases may be fused or tethered (e.g. by a linker) to one or more components in a CRISPR-Cas system, e.g., Cas protein, guide molecule etc.).

[0123] The term “transposon,” as used herein, refers to a polynucleotide (or nucleic acid segment), which may be recognized by a transposase or an integrase enzyme and which is a component of a functional nucleic acid-protein complex (e.g., a transpososome, or transposon complex) capable of transposition. Transposons employ a variety of regulatory mechanisms to maintain transposition at a low frequency and sometimes coordinate transposition with various cell processes. Some prokaryotic transposons can also mobilize functions that benefit the host or otherwise help maintain the element.

[0124] The term “transposase” (used interchangeably herein with “transposition protein”) refers to an enzyme, which is a component of a functional nucleic acid-protein complex capable of transposition and which mediates transposition. The transposase may comprise a single protein or comprise multiple protein sub-units. A transposase may be an enzyme capable of forming a functional complex with a transposon end or transposon end sequences. The term “transposase” may also refer in certain embodiments to integrases. The expression “transposition reaction” used herein refers to a reaction wherein a transposase inserts a donor polynucleotide sequence in or adjacent to an insertion site on a target polynucleotide. The insertion site may contain a sequence or secondary structure recognized by the transposase and/or an insertion motif sequence where the transposase cuts or creates staggered breaks in the target polynucleotide into which the donor polynucleotide sequence may be inserted. Exemplary components in a transposition reaction include a transposon, comprising the donor polynucleotide sequence to be inserted, and a transposase or an integrase enzyme. The term “transposon end sequence” as used herein refers to the nucleotide sequences at the distal ends of a transposon. The transposon end sequences may be responsible for identifying the donor polynucleotide for transposition. The transposon end sequences may be the DNA sequences the transpose enzyme uses in order to form transpososome complex and to perform a transposition reaction.

### Tn7 Transposases

[0125] In one example embodiment, the CAST system comprises one or more Tn7 transposases or Tn7-like transposases. As used herein, the term “Tn7 transposase” refers to the canonical transposases encoded by the bacterial Tn7 transposon. These Tn7 transposases comprise the transposases TnsA, TnsB, TnsC, TnsD, and TnsE. The term “Tn7-like transposase” refers to transposases encoded by non-Tn7 transposons (i.e., “Tn7-like transposons”). These Tn7-like transposases include canonical Tn7 transposases (e.g., TnsA, TnsB, TnsC, etc.) as well as homologs of Tn7 transposases (e.g., proteins sharing at least 50%, at least 60%, at least 70%, at least 80%, at least 90%, at least 95%, or at least 99% sequence identity with a Tn7 transposase).

[0126] Transposons employ a variety of regulatory mechanisms to maintain transposition at a low frequency and sometimes coordinate transposition with various cell processes. Some prokaryotic transposons can also mobilize functions that benefit the host or otherwise help maintain the element. Certain transposons have evolved mechanisms of tight control over target site selection, the most notable example being the Tn7 family (see Peters J E (2014) Tn7. Microbiol Spectr 2:1-20). Three transposon-encoded proteins form the core transposition machinery of Tn7: a heteromeric transposase consisting of TnsA and TnsB; and a regulator protein, TnsC. In addition to the core TnsABC transposition proteins, Tn7 elements encode dedicated target site selection proteins, TnsD and TnsE. In conjunction with TnsABC, the sequence-specific DNA-binding protein TnsD directs transposition into a conserved site referred to as the “Tn7 attachment site,” attTn7. TnsD is a member of a large family of proteins that also includes TniQ, a protein found in other types of bacterial transposons. TniQ has been shown to target transposition into resolution sites of plasmids.

[0127] In example embodiments, the engineered CAST system comprises TnsA, TnsB, and TnsC. In some embodiments, TnsA and TnsB may comprise a fusion protein (denoted herein as “TnsAB”) to advantageously reduce the size and complexity of the system (i.e., to reduce the number of components and promote efficient packaging and delivery of components). Thus, in some embodiments, the engineered CAST system comprises TnsAB and TnsC. In some embodiments, the engineered CAST system further comprises TniQ. In some embodiments, the engineered CAST system further comprises TniQ and TnsF. Although TniQ may serve as an adaptor protein, bridging TnsF and the TnsABC transposition proteins, its presence in the engineered CAST system is not required for transposition. This, like the presence of TnsAB, also advantageously reduces the size and complexity of the system. Thus, in an example embodiment, the engineered CAST system may comprise TnsA, TnsB, TnsC, and TnsF. In another embodiment, the engineered CAST system may comprise TnsAB, TnsC, and TnsF.

[0128] As used herein, a right end sequence element or a left end sequence element are made in reference to an example Tn7 transposon. The general structure of the left end (LE) and right end (RE) sequence elements of canonical Tn7 is established. Tn7 ends comprise a series of 22-bp TnsB-binding sites. Flanking the most distal TnsB-binding sites is an 8-bp terminal sequence ending with 5′-TGT-3′/3′-ACA-5′. The right end of Tn7 contains four overlapping TnsB-binding sites in the ˜90-bp right end element. The left end contains three TnsB-binding sites dispersed in the ˜150-bp left end of the element. The number and distribution of TnsB-binding sites can vary among Tn7-like elements. End sequences of Tn7-related elements can be determined by identifying the directly repeated 5-bp target site duplication, the terminal 8-bp sequence, and 22-bp TnsB-binding sites (Peters J E et al., 2017). Example Tn7 elements, including right end sequence element and left end sequence element include those described in Parks A R, Plasmid, 2009 January; 61 (1): 1-14.

### Donor Polynucleotides

[0129] The systems may comprise one or more donor polynucleotides (e.g., for insertion into the target polynucleotide). A donor polynucleotide may be an equivalent of a transposable element that can be inserted or integrated to a target site. For example, the donor polynucleotide may comprise a polynucleotide to be inserted, a left element sequence, and a right element sequence. The donor polynucleotide may be or comprise one or more components of a transposon. A donor polynucleotide may be any type of polynucleotides, including, but not limited to, a gene, a gene fragment, a non-coding polynucleotide, a regulatory polynucleotide, a synthetic polynucleotide, etc.

[0130] In some embodiments, the donor polynucleotide is linear. In some embodiments, the donor polynucleotide is circular. In some examples, the donor polynucleotide has a single strand break (a nick). In some cases, the single strand break is on or close to the 3′ end of the donor polynucleotide. In some cases, the single strand break is on or close to the 5′ end of the donor polynucleotide.

[0131] The donor polynucleotides may be inserted to the upstream or downstream of a PAM sequence of a target polynucleotide. For CRISPR-associated transposases, the donor polynucleotide may be inserted at a position between 10 bases and 200 bases, e.g., between 20 bases and 150 bases, between 30 bases and 100 bases, between 45 bases and 70 bases, between 45 bases and 60 bases, between 55 bases and 70 bases, between 49 bases and 56 bases or between 60 bases and 66 bases, from a PAM sequence on the target polynucleotide. In some cases, the insertion is at a position upstream of the PAM sequence. In some cases, the insertion is at a position downstream of the PAM sequence. In some cases, the insertion is at a position from 49 to 56 bases or base pairs downstream from a PAM sequence. In some cases, the insertion is at a position from 60 to 66 bases or base pairs downstream from a PAM sequence.

[0132] The donor polynucleotide may be used for editing the target polynucleotide. In some cases, the donor polynucleotide comprises one or more mutations to be introduced into the target polynucleotide. Examples of such mutations include substitutions, deletions, insertions, or a combination thereof. The mutations may cause a shift in an open reading frame on the target polynucleotide. In some cases, the donor polynucleotide alters a stop codon in the target polynucleotide. For example, the donor polynucleotide may correct a premature stop codon. The correction may be achieved by deleting the stop codon or introduces one or more mutations to the stop codon. In other example embodiments, the donor polynucleotide addresses loss of function mutations, deletions, or translocations that may occur, for example, in certain disease contexts by inserting or restoring a functional copy of a gene, or functional fragment thereof, or a functional regulatory sequence or functional fragment of a regulatory sequence. A functional fragment refers to less than the entire copy of a gene by providing sufficient nucleotide sequence to restore the functionality of a wild type gene or non-coding regulatory sequence (e.g., sequences encoding long non-coding RNA). In certain example embodiments, the systems disclosed herein may be used to replace a single allele of a defective gene or defective fragment thereof. In another example embodiment, the systems disclosed herein may be used to replace both alleles of a defective gene or defective gene fragment. A “defective gene” or “defective gene fragment” is a gene or portion of a gene that when expressed fails to generate a functioning protein or non-coding RNA with functionality of a corresponding wild-type gene. In certain example embodiments, these defective genes may be associated with one or more disease phenotypes. In certain example embodiments, the defective gene or gene fragment is not replaced but the systems described herein are used to insert donor polynucleotides that encode gene or gene fragments that compensate for or override defective gene expression such that cell phenotypes associated with defective gene expression are eliminated or changed to a different or desired cellular phenotype.

[0133] In certain embodiments of the invention, the donor may include, but not be limited to, genes or gene fragments, encoding proteins or RNA transcripts to be expressed, regulatory elements, repair templates, and the like. According to the invention, the donor polynucleotides may comprise left end and right end sequence elements that function with transposition components that mediate insertion.

[0134] In certain cases, the donor polynucleotide manipulates a splicing site on the target polynucleotide. In some examples, the donor polynucleotide disrupts a splicing site. The disruption may be achieved by inserting the polynucleotide to a splicing site and/or introducing one or more mutations to the splicing site. In certain examples, the donor polynucleotide may restore a splicing site. For example, the polynucleotide may comprise a splicing site sequence.

[0135] The donor polynucleotide to be inserted may has a size from 10 bases to 50 kb in length, e.g., from 50 to 40 kb, from 100 and 30 kb, from 100 bases to 300 bases, from 200 bases to 400 bases, from 300 bases to 500 bases, from 400 bases to 600 bases, from 500 bases to 700 bases, from 600 bases to 800 bases, from 700 bases to 900 bases, from 800 bases to 1000 bases, from 900 bases to from 1100 bases, from 1000 bases to 1200 bases, from 1100 bases to 1300 bases, from 1200 bases to 1400 bases, from 1300 bases to 1500 bases, from 1400 bases to 1600 bases, from 1500 bases to 1700 bases, from 600 bases to 1800 bases, from 1700 bases to 1900 bases, from 1800 bases to 2000 bases, from 1900 bases to 2100 bases, from 2000 bases to 2200 bases, from 2100 bases to 2300 bases, from 2200 bases to 2400 bases, from 2300 bases to 2500 bases, from 2400 bases to 2600 bases, from 2500 bases to 2700 bases, from 2600 bases to 2800 bases, from 2700 bases to 2900 bases, or from 2800 bases to 3000 bases in length.

Tn7 Systems with Novel Tnsf Target Site Selection Protein

[0136] In some embodiments, the engineered systems may comprise one or more Tn7 transposases comprising a novel target selector referred to herein as TnsF. TnsF is a previously uncharacterized target site selection protein found in the Tn6022 family of Tn7-like transposons. As described in further detail herein, TnsF is characterized by a novel domain architecture exhibiting significant structural similarity to the tyrosine recombinase superfamily member XerH. However, TnsF lacks the catalytic activity of tyrosine recombinases. TnsF has an N-terminal region containing multiple zinc fingers; interior tandem DNA-binding domains, CB1 and CB2, positioned between the N- and C-termini; and a C-terminal, DNA-binding partial catalytic (pCAT) domain. The pCAT domain lacks the tyrosine recombinase catalytic site normally found in the full-length CAT domain of tyrosine recombinases. Within the context of Tn6022, TnsF helps mediate site-specific insertion of the transposon into the comM gene, which encodes a Mg chelatase. The TnsF attachment site within the comM gene spans a region of 50 base pairs upstream and 50 base pairs downstream of the transposon insertion site.

[0137] In certain example embodiments, the engineered system comprises TnsA, TnsB, TnsC, and TnsF. In other embodiments, the engineered system comprises TnsAB, TnsC, and TnsF. In other embodiments, the engineered system comprises TnsA, TnsB, TnsC, TniQ, and TnsF. In other embodiments, the engineered system comprises TnsAB, TnsC, TniQ, and TnsF.

[0138] TnsF is a modular protein that may be incorporated in Tn7 systems as well as CAST 1-D systems, and the nature of its structural domain architecture may provide pathways towards engineering its biomolecular function. In certain example embodiments, TnsF may be engineered to alter target site selection. In some embodiments, target site selection may be altered by mutating one or more of the DNA-binding domains. In some embodiments, target site selection may be altered by mutating CB1. In some embodiments, target site selection may be altered by mutating CB2. In some embodiments, target site selection may be altered by mutating CB1 and CB2. In some embodiments, target site selection may be altered by mutating the pCAT domain. It will be understood by a person skilled in the art that the target site selection activity of TnsF may be altered by any of the various means known in the art to engineer protein activity. In addition to conventional molecular biology techniques, TnsF may be engineered using phage-assisted continuous directed evolution (PAGE) (Esvelt et al., Nature 472, 499-503 (2011)).

[0139] In certain example embodiments, the engineered Tn7 system comprising TnsF may be used in combination with one or more gene editing systems. In such an embodiment, the gene editing system first inserts the TnsF attachment/transposon insertion site into the recipient polynucleotide, and the engineered Tn7 system then mediates transposition of a donor polynucleotide at the transposon insertion site.

[0140] For example, a Type II or Type V CRISPR-Cas system may be used to insert the TnsF recognition site in a target polynucleotide, e.g., via HDR, and the Tn7-TnsF system then facilitated transposition of a donor sequence at the marked recognitions sites. The Tn7-TnsF system may also be used with prime editing systems using a similar concept, i.e., the prime editing system inserts the TnsF recognition site and the Tn7 transposase facilitates insertion of a donor polynucleotide at the marked insertion site. Examples of such prime editing systems and methods are further described in Anzalone A V et al., Search-and-replace genome editing without double-strand breaks or donor DNA, Nature. 2019 Oct. 21. doi: 10.1038/s41586-019-1711-4, which is incorporated by reference herein in its entirety. Following integration of the TnsF attachment/transposon insertion site at the recipient polynucleotide, TnsF may bind to the TnsF attachment site and help mediate transposition by the TnsABC proteins.

### TSY Systems

[0141] The present disclosure also provides an engineered system comprising one or more components of a non-Tn7 transposon system featuring a catalytically active TnsF-like system termed Tsy (Target Selector based on tyrosine (Y) recombinase). This system lacks Tn7 components, but instead includes genes encoding a tyrosine recombinase (YRec), a small helix-turn-helix (HTH) domain protein, and a TnsF homolog having a predicted catalytic nuclease domain. In some cases, the transposon system includes a gene encoding a GIY-YIG nuclease. The TnsF homolog of the Tsy system has a similar domain architecture to the TnsF found in the Tn7 transposases described above, but includes a predicted active nuclease. The TnsF homolog has an N-terminal region containing multiple zinc fingers; interior tandem DNA-binding domains, CB1 and CB2, positioned between the N- and C-termini; and a C-terminal, DNA-binding catalytic (CAT) domain. In contrast to the pCAT domain of the Tn7 TnsF, the CAT domain of Tsy TnsF comprises the tyrosine recombinase catalytic site. Tsy helps mediate site-specific insertion into the comM gene at an insertion site that is about 67 base pairs downstream of the Tn6022 insertion site. The Tsy attachment site is 40 base pairs upstream of the Tsy transposon insertion site.

[0142] In certain example embodiments, Tsy-TnsF may be engineered to alter target site selection. In some embodiments, target site selection may be altered by mutating one or more of the DNA-binding domains. In some embodiments, target site selection may be altered by mutating CB1. In some embodiments, target site selection may be altered by mutating CB2. In some embodiments, target site selection may be altered by mutating CB1 and CB2. In some embodiments, target site selection may be altered by mutating the CAT domain. It will be understood by a person skilled in the art that the target site selection activity of Tsy-TnsF may be altered by any of the various means known in the art to engineer protein activity. In addition to conventional molecular biology techniques, Tsy-TnsF may be engineered using phage-assisted continuous directed evolution (PAGE) (Esvelt et al., Nature 472, 499-503 (2011)).

[0143] In certain example embodiments, the engineered system comprises one or more tyrosine recombinases, one or more helix-turn-helix (HTH) domain proteins, and one or more TnsF homologs comprising a catalytic nuclease domain. In some embodiments, the engineered system further comprises one or more GIY-YIG nucleases.

[0144] In certain example embodiments, the engineered non-Tn7 system comprising the Tsy-TnsF may be used in combination with one or more gene editing systems. In such an embodiment, the gene editing system first inserts the Tsy-TnsF attachment/transposon insertion site into the recipient polynucleotide, and the engineered non-Tn7 system then mediates transposition of a donor polynucleotide at the transposon insertion site.

[0145] For example, a Type II or Type V CRISPR-Cas system may be used to insert the TnsF recognition site in a target polynucleotide, e.g., via HDR, and the Tn7-TnsF system then facilitated transposition of a donor sequence at the marked recognitions sites. The Tn7-TnsF system may also be used with prime editing systems using a similar concept, i.e., the prime editing system inserts the TnsF recognition site and the Tn7 transposase facilitates insertion of a donor polynucleotide at the marked insertion site. Examples of such prime editing systems and methods are further described in Anzalone A V et al., Search-and-replace genome editing without double-strand breaks or donor DNA, Nature. 2019 Oct. 21. doi: 10.1038/s41586-019-1711-4, which is incorporated by reference herein in its entirety. Following integration of the TnsF attachment/transposon insertion site at the recipient polynucleotide, TnsF may bind to the TnsF attachment site and help mediate transposition by the TnsABC proteins.

### Protein Modifications

[0146] The polypeptide components of the above described gene editing systems, Tn7-CAST-ID, Tn7-like transposases comprising a TnsF target selection, and non-Tn7-lik transposoase comprising a Tsy-TnsF target selector, may comprise one or more modifications to one or more components of each system, where the components of the CRISPR-Cas Type I-D protein complex or the components of the Tn7-like or non-Tn7-like protein complexes. As used herein, the term “modified” with regard to a Fanzor polypeptide generally refers to a Fanzor polypeptide having one or more modifications or mutations (including point mutations, truncations, insertions, deletions, chimeras, fusion proteins, etc.) compared to the wild-type counterpart from which it is derived. By derived is meant that the derived polypeptide is largely based, in the sense of having a high degree of sequence homology with, a wildtype protein, but that it has been mutated (modified) in some way as known in the art or as described herein.

[0147] The Cas 1-D polypeptide, TnsF target selector, or TsY-TnsF target selectors may be catalytically inactive (also referred as dead). As used herein, a catalytically inactive or dead polypeptide may have reduced, or no enzymatic activity compared to a wildtype counterpart enzyme. In some cases, a catalytically inactive or dead nuclease may have nickase activity. Such a catalytically inactive or dead enzyme may not make either double-strand or single-strand break or facilitate recombination or insertion on a target polynucleotide but may still bind or otherwise form complex with the target polynucleotide.

[0148] In one embodiment, the modifications of the polypeptide components may or may not cause an altered functionality. By means of example, modifications which do not result in an altered functionality include for instance codon optimization for expression into a particular host, or providing the polypeptide with a particular marker (e.g., for visualization). Modifications with may result in altered functionality may also include mutations, including point mutations, insertions, deletions, truncations (including split nucleases), etc., as well as chimeric nucleases (e.g., comprising domains from different orthologues or homologues) or fusion proteins. Fusion proteins may without limitation include, for instance, fusions with heterologous domains or functional domains (e.g., localization signals, catalytic domains, etc.). In one embodiment, various different modifications may be combined (e.g., a mutated nuclease which is catalytically inactive and which further is fused to a functional domain, such as for instance to induce DNA methylation or another nucleic acid modification, such as including without limitation, a break (e.g., by a different nuclease (domain)), a mutation, a deletion, an insertion, a replacement, a ligation, a digestion, a break or a recombination). As used herein, “altered functionality” includes without limitation an altered specificity (e.g., altered target recognition, increased or decreased specificity, or altered PAM recognition or insertion site recognition, altered activity (e.g., increased or decreased catalytic activity), and/or altered stability (e.g., fusions with destabilization domains). It will be understood that a “modified” polypeptide as referred to herein still has the capacity to interact with or bind to the polynucleic acid (e.g., in complex with the nucleic acid component molecule).

### Nuclear Localization Sequences

[0149] In one embodiment, one or more polypeptides in the CRISPR-Cas, Tn7-like transposase, or non-Tn7-like transposase may be fused with one or more nuclear localization sequences (NLSs), such as about or more than about 1, 2, 3, 4, 5, 6, 7, 8, 9, 10, or more NLSs. In one embodiment, the Fanzor polypeptide comprises about or more than about 1, 2, 3, 4, 5, 6, 7, 8, 9, 10, or more NLSs at or near the amino-terminus, about or more than about 1, 2, 3, 4, 5, 6, 7, 8, 9, 10, or more NLSs at or near the carboxy-terminus, or a combination of these (e.g., zero or at least one or more NLS at the amino-terminus and zero or at one or more NLS at the carboxy terminus). When more than one NLS is present, each may be selected independently of the others, such that a single NLS may be present in more than one copy and/or in combination with one or more other NLSs present in one or more copies. In a preferred embodiment of the invention, the Fanzor polypeptide comprises at most 6 NLSs. In one embodiment, an NLS is considered near the N- or C-terminus when the nearest amino acid of the NLS is within about 1, 2, 3, 4, 5, 10, 15, 20, 25, 30, 40, 50, or more amino acids along the polypeptide chain from the N- or C-terminus. Non-limiting examples of NLSs include an NLS sequence derived from: the NLS of the SV40 virus large T-antigen, having the amino acid sequence PKKKRKV (SEQ ID NO: 27); the NLS from nucleoplasmin (e.g., the nucleoplasmin bipartite NLS with the sequence KRPAATKKAGQAKKKK (SEQ ID NO: 28); the c-myc NLS having the amino acid sequence PAAKRVKLD (SEQ ID NO: 29) or RQRRNELKRSP (SEQ ID NO: 30); the hRNPA1 M9 NLS having the sequence NQSSNFGPMKGGNFGGRSSGPYGGGGQYFAKPRNQGGY (SEQ ID NO: 31); the sequence RMRIZFKNKGKDTAELRRRRVEVSVELRKAKKDEQILKRRN (SEQ ID NO: 32) of the IBB domain from importin-alpha; the sequences VSRKRPRP (SEQ ID NO: 33) and PPKKARED (SEQ ID NO: 34) of the myoma T protein; the sequence PQPKKKPL (SEQ ID NO: 35) of human p53; the sequence SALIKKKKKMAP (SEQ ID NO: 36) of mouse c-abl IV; the sequences DRLRR (SEQ ID NO: 37) and PKQKKRK (SEQ ID NO: 38) of the influenza virus NS1; the sequence RKLKKKIKKL (SEQ ID NO: 39) of the Hepatitis virus delta antigen; the sequence REKKKFLKRR (SEQ ID NO: 40) of the mouse Mx1 protein; the sequence KRKGDEVDGVDEVAKKKSKK (SEQ ID NO: 41) of the human poly(ADP-ribose) polymerase; and the sequence RKCLQAGMNLEARKTKK (SEQ ID NO: 42) of the steroid hormone receptors (human) glucocorticoid. In general, the one or more NLSs are of sufficient strength to drive accumulation of the polypeptide complexes in a detectable amount in the nucleus of a eukaryotic cell. In general, strength of nuclear localization activity may derive from the number of NLSs in the polypeptide, the particular NLS(s) used, or a combination of these factors. Detection of accumulation in the nucleus may be performed by any suitable technique. For example, a detectable marker may be fused to the polypeptide, such that location within a cell may be visualized, such as in combination with a means for detecting the location of the nucleus (e.g., a stain specific for the nucleus such as DAPI). Cell nuclei may also be isolated from cells, the contents of which may then be analyzed by any suitable process for detecting protein, such as immunohistochemistry, Western blot, or enzyme activity assay. Accumulation in the nucleus may also be determined indirectly, such as by an assay for the effect of complex formation (e.g., assay for DNA cleavage or mutation at the target sequence, or assay for altered gene expression activity affected by complex formation and/or polypeptide activity), as compared to a control no exposed to the Fanzor polypeptide or complex, or exposed to a polypeptide lacking the one or more NLSs. In one embodiment of the herein described polypeptide protein complexes and systems the codon optimized polypeptides comprise an NLS attached to the C-terminal of the protein. In one embodiment, other localization tags may be fused to the Fanzor polypeptide, such as without limitation for localizing the polypeptide to particular sites in a cell, such as organelles, such as mitochondria, plastids, chloroplast, vesicles, Golgi, (nuclear or cellular) membranes, ribosomes, nucleolus, ER, cytoskeleton, vacuoles, centrosome, nucleosome, granules, centrioles, etc.

[0150] In one embodiment of the invention, at least one nuclear localization signal (NLS) is attached to the nucleic acid sequences encoding the polypeptide. In preferred embodiments at least one or more C-terminal or N-terminal NLSs are attached (and hence nucleic acid molecule(s) coding for the polypeptide can include coding for NLS(s) so that the expressed product has the NLS(s) attached or connected). In a preferred embodiment a C-terminal NLS is attached for optimal expression and nuclear targeting in eukaryotic cells, preferably human cells. The invention also encompasses methods for delivering multiple nucleic acid components, wherein each nucleic acid component is specific for a different target locus of interest thereby modifying multiple target loci of interest. The nucleic acid component of the complex may comprise one or more protein-binding RNA aptamers. The one or more aptamers may be capable of binding a bacteriophage coat protein.

### Linkers

[0151] The term “associated with” is used here in relation to the association of the functional domain to the polypeptide protein or the adaptor protein. It is used in respect of how one molecule ‘associates’ with respect to another, for example between an adaptor protein and a functional domain, or between a Cas or transposase polypeptide protein and other components of the gene editing system. In the case of such protein-protein interactions, this association may be viewed in terms of recognition in the way an antibody recognizes an epitope. Alternatively, one protein may be associated with another protein via a fusion of the two, for instance one subunit being fused to another subunit. Fusion typically occurs by addition of the amino acid sequence of one to that of the other, for instance via splicing together of the nucleotide sequences that encode each protein or subunit. Alternatively, this may essentially be viewed as binding between two molecules or direct linkage, such as a fusion protein. In any event, the fusion protein may include a linker between the two subunits of interest (i.e., between the enzyme and the functional domain or between the adaptor protein and the functional domain). Thus, in one embodiment, the Fanzor polypeptide protein or adaptor protein is associated with a functional domain by binding thereto. In other embodiments, the polypeptide or adaptor protein is associated with a functional domain because the two are fused together, optionally via an intermediate linker.

[0152] The term “linker” as used in reference to a fusion protein refers to a molecule which joins the proteins to form a fusion protein. Generally, such molecules have no specific biological activity other than to join or to preserve some minimum distance or other spatial relationship between the proteins. However, in one embodiment, the linker may be selected to influence some property of the linker and/or the fusion protein such as the folding, net charge, or hydrophobicity of the linker.

[0153] Suitable linkers for use in the methods of the present invention are well known to those of skill in the art and include, but are not limited to, straight or branched-chain carbon linkers, heterocyclic carbon linkers, or peptide linkers. However, as used herein the linker may also be a covalent bond (carbon-carbon bond or carbon-heteroatom bond). In particular embodiments, the linker is used to separate the Fanzor polypeptide and the nucleotide deaminase by a distance sufficient to ensure that each protein retains its required functional property. Preferred peptide linker sequences adopt a flexible extended conformation and do not exhibit a propensity for developing an ordered secondary structure. In one embodiment, the linker can be a chemical moiety which can be monomeric, dimeric, multimeric or polymeric. Preferably, the linker comprises amino acids. Typical amino acids in flexible linkers include Gly, Asn and Ser. Accordingly, in particular embodiments, the linker comprises a combination of one or more of Gly, Asn and Ser amino acids. Other near neutral amino acids, such as Thr and Ala, also may be used in the linker sequence. Exemplary linkers are disclosed in Maratea et al. (1985), Gene 40:39-46; Murphy et al. (1986) Proc. Nat'l. Acad. Sci. USA 83:8258-62; U.S. Pat. Nos. 4,935,233; and 4,751,180. For example, GlySer linkers GGS, GGGS (SEQ ID NO: 43) or GSG can be used. GGS, GSG, GGGS (SEQ ID NO: 43) or GGGGS (SEQ ID NO: 44) linkers can be used in repeats of 3 (such as (GGS)₃ (SEQ ID NO: 45), (GGGGS)₃ (SEQ ID NO: 46) or 5, 6, 7, 9 or even 12 or more, to provide suitable lengths. In some cases, the linker may be (GGGGS)₃₋₁₅ (SEQ ID NO: 46-58), For example, in some cases, the linker may be (GGGGS)₃₋₁₁ (SEQ ID NO: 46-54), e.g., GGGGS (SEQ ID NO: 44), (GGGGS)₂ (SEQ ID NO: 59), (GGGGS)₃ (SEQ ID NO: 46), (GGGGS)₄(SEQ ID NO: 47), (GGGGS)₅ (SEQ ID NO: 48), (GGGGS)₆ (SEQ ID NO: 49), (GGGGS)₇ (SEQ ID NO: 50), (GGGGS)₈ (SEQ ID NO: 51), (GGGGS)₉ (SEQ ID NO: 52), (GGGGS)₁₀ (SEQ ID NO: 53), or (GGGGS)₁₁ (SEQ ID NO: 54).

[0154] In particular embodiments, linkers such as (GGGGS)₃ (SEQ ID NO: 46) are preferably used herein. (GGGGS)₆ (SEQ ID NO: 49), (GGGGS)₉ (SEQ ID NO: 52) or (GGGGS)₁₂ (SEQ ID NO: 55) may preferably be used as alternatives. Other preferred alternatives are (GGGGS)₁ (SEQ ID NO: 44), (GGGGS)₄(SEQ ID NO: 47), (GGGGS)₅ (SEQ ID NO: 48), (GGGGS)₇ (SEQ ID NO: 50), (GGGGS): (SEQ ID NO: 51), (GGGGS)₁₀ (SEQ ID NO: 53), or (GGGGS)₁₁ (SEQ ID NO: 54). In yet a further embodiment, LEPGEKPYKCPECGKSFSQSGALTRHQRTHTR (SEQ ID NO: 60) is used as a linker. In yet an additional embodiment, the linker is an XTEN linker. In particular embodiments, the Fanzor polypeptide is linked to the deaminase protein or its catalytic domain by means of an LEPGEKPYKCPECGKSFSQSGALTRHQRTHTR (SEQ ID NO: 60) (linker. In further particular embodiments, Fanzor polypeptide is linked C-terminally to the N-terminus of a deaminase protein or its catalytic domain by means of an LEPGEKPYKCPECGKSFSQSGALTRHQRTHTR ((SEQ ID NO: 60)) linker. In addition, N-and C-terminal NLSs can also function as linker (e.g., PKKKRKVEASSPKKRKVEAS (SEQ ID NO: 61)).

[0155] Examples of linkers are shown in Table 1 below.

TABLE 1

| | |
|---|---|
| GGS | GGTGGTAGT |
| GGS × 3 | GGTGGTAGTGGAGGGAGCGGCGGTTCA |
| (SEQ ID | (SEQ ID NO: 62) |
| NO: 45) | |
| GGS × 7 | ggtggaggaggctctggtggaggcggt |
| (SEQ ID | agcggaggcggagggtcgGGTGGTAGT |
| NO: 63) | GGAGGGAGCGGCGGTTCA |
| | (SEQ ID NO: 64) |
| XTEN | TCGGGATCTGAGACGCCTGGGACCTC |
| | GGAATCGGCTACGCCCGAAAGT |
| | (SEQ ID NO: 65) |
| Z-EFGR_ | Gtggataacaaatttaacaaagaaat |
| Short | gtgggcggcgtgggaagaaattcgta |
| | acctgccgaacctgaacggctggcag |
| | atgaccgcgtttattgcgagcctggt |
| | ggatgatccgagccagagcgcgaacc |
| | tgctggcggaagcgaaaaaactgaac |
| | gatgcgcaggcgccgaaaaccggcgg |
| | tggttctggt (SEQ ID NO: 66) |
| GSAT | Ggtggttctgccggtggctccggttc |
| | tggctccagcggtggcagctctggtg |
| | cgtccggcacgggtactgcgggtggc |
| | actggcagcggttccggtactggctc |
| | tggc (SEQ ID NO: 67) |

[0156] Linkers may be used between the Nucleic acid component molecules and the functional domain (activator or repressor), or between the Fanzor polypeptide and the functional domain. The linkers may be used to engineer appropriate amounts of “mechanical flexibility”.

[0157] In one embodiment, the one or more functional domains are controllable, e.g., inducible.

[0158] Other suitable functional domains can be found, for example, in International Application Publication No. WO 2019/018423, for example, at [0678]-[0692], incorporated herein by reference. Exemplary functional domains are further detailed elsewhere herein.

### Polynucleotides and Vectors

[0159] The systems herein may comprise one or more polynucleotides. The polynucleotide(s) may comprise coding sequences of Cas protein(s), transposase(s), guide molecule(s), donor polynucleotide(s), or any combination thereof. The polynucleotide(s) may also comprise coding sequences of tyrosine recombinases, HTH domain proteins, GIY-YIG nucleases, transposase(s), Cas protein(s), guide molecule(s), donor polynucleotide(s), or any combination thereof. The present disclosure further provides vectors or vector systems comprising one or more polynucleotides herein. The vectors or vector systems include those described in the delivery sections herein.

[0160] The terms “polynucleotide”, “nucleotide”, “nucleotide sequence”, “nucleic acid”, and “oligonucleotide” are used interchangeably herein. They refer to a polymeric form of nucleotides of any length, either deoxyribonucleotides or ribonucleotides, or analogs thereof. Polynucleotides may have any three-dimensional structure, and may perform any function, known or unknown. The following are non-limiting examples of polynucleotides: coding or non-coding regions of a gene or gene fragment, loci (locus) defined from linkage analysis, exons, introns, messenger RNA (mRNA), transfer RNA, ribosomal RNA, short interfering RNA (siRNA), short-hairpin RNA (shRNA), micro-RNA (miRNA), ribozymes, cDNA, recombinant polynucleotides, branched polynucleotides, plasmids, vectors, isolated DNA of any sequence, isolated RNA of any sequence, nucleic acid probes, and primers. The term also encompasses nucleic acid-like structures with synthetic backbones, see, e.g., Eckstein, 1991; Baserga et al., 1992; Milligan, 1993; WO 97/03211; WO 96/39154; Mata, 1997; Strauss-Soukup, 1997; and Samstag, 1996. A polynucleotide may comprise one or more modified nucleotides, such as methylated nucleotides and nucleotide analogs. If present, modifications to the nucleotide structure may be imparted before or after assembly of the polymer. The sequence of nucleotides may be interrupted by non-nucleotide components. A polynucleotide may be further modified after polymerization, such as by conjugation with a labeling component. As used herein the term “wild type” is a term of the art understood by skilled persons and means the typical form of an organism, strain, gene or characteristic as it occurs in nature as distinguished from mutant or variant forms. A “wild type” can be a base line. As used herein the term “variant” should be taken to mean the exhibition of qualities that have a pattern that deviates from what occurs in nature. The terms “non-naturally occurring” or “engineered” are used interchangeably and indicate the involvement of the hand of man. The terms, when referring to nucleic acid molecules or polypeptides mean that the nucleic acid molecule or the polypeptide is at least substantially free from at least one other component with which they are naturally associated in nature and as found in nature. “Complementarity” refers to the ability of a nucleic acid to form hydrogen bond(s) with another nucleic acid sequence by either traditional Watson-Crick base pairing or other non-traditional types. A percent complementarity indicates the percentage of residues in a nucleic acid molecule which can form hydrogen bonds (e.g., Watson-Crick base pairing) with a second nucleic acid sequence (e.g., 5, 6, 7, 8, 9, 10 out of 10 being 50%, 60%, 70%, 80%, 90%, and 100% complementary). “Perfectly complementary” means that all the contiguous residues of a nucleic acid sequence will hydrogen bond with the same number of contiguous residues in a second nucleic acid sequence. “Substantially complementary” as used herein refers to a degree of complementarity that is at least 60%, 65%, 70%, 75%, 80%, 85%, 90%, 95%, 97%, 98%, 99%, or 100% over a region of 8, 9, 10, 11, 12, 13, 14, 15, 16, 17, 18, 19, 20, 21, 22, 23, 24, 25, 30, 35, 40, 45, 50, or more nucleotides, or refers to two nucleic acids that hybridize under stringent conditions. As used herein, “stringent conditions” for hybridization refer to conditions under which a nucleic acid having complementarity to a target sequence predominantly hybridizes with the target sequence, and substantially does not hybridize to non-target sequences. Stringent conditions are generally sequence-dependent and vary depending on a number of factors. In general, the longer the sequence, the higher the temperature at which the sequence specifically hybridizes to its target sequence. Non-limiting examples of stringent conditions are described in detail in Tijssen (1993), Laboratory Techniques In Biochemistry And Molecular Biology-Hybridization With Nucleic Acid Probes Part I, Second Chapter “Overview of principles of hybridization and the strategy of nucleic acid probe assay”, Elsevier, N.Y. Where reference is made to a polynucleotide sequence, then complementary or partially complementary sequences are also envisaged. These are preferably capable of hybridizing to the reference sequence under highly stringent conditions. Generally, in order to maximize the hybridization rate, relatively low-stringency hybridization conditions are selected: about 20 to 25° C. lower than the thermal melting point (Tm). The Tm is the temperature at which 50% of specific target sequence hybridizes to a perfectly complementary probe in solution at a defined ionic strength and pH. Generally, in order to require at least about 85% nucleotide complementarity of hybridized sequences, highly stringent washing conditions are selected to be about 5 to 15° C. lower than the Tm. A sequence capable of hybridizing with a given sequence is referred to as the “complement” of the given sequence.

[0161] As used herein, the term “genomic locus” or “locus” (plural loci) is the specific location of a gene or DNA sequence on a chromosome. A “gene” refers to stretches of DNA or RNA that encode a polypeptide or an RNA chain that has functional role to play in an organism and hence is the molecular unit of heredity in living organisms. It may be considered that genes include regions which regulate the production of the gene product, whether or not such regulatory sequences are adjacent to coding and/or transcribed sequences. Accordingly, a gene includes, but is not necessarily limited to, promoter sequences, terminators, translational regulatory sequences such as ribosome binding sites and internal ribosome entry sites, enhancers, silencers, insulators, boundary elements, replication origins, matrix attachment sites and locus control regions. As used herein, “expression of a genomic locus” or “gene expression” is the process by which information from a gene is used in the synthesis of a functional gene product. The products of gene expression are often proteins, but in non-protein coding genes such as rRNA genes or tRNA genes, the product is functional RNA. The process of gene expression is used by all known life-eukaryotes (including multicellular organisms), prokaryotes (bacteria and archaea) and viruses to generate functional products to survive. As used herein “expression” of a gene or nucleic acid encompasses not only cellular gene expression, but also the transcription and translation of nucleic acid(s) in cloning systems and in any other context. As used herein, “expression” also refers to the process by which a polynucleotide is transcribed from a DNA template (such as into and mRNA or other RNA transcript) and/or the process by which a transcribed mRNA is subsequently translated into peptides, polypeptides, or proteins. Transcripts and encoded polypeptides may be collectively referred to as “gene product.” If the polynucleotide is derived from genomic DNA, expression may include splicing of the mRNA in a eukaryotic cell. The terms “polypeptide”, “peptide” and “protein” are used interchangeably herein to refer to polymers of amino acids of any length. The polymer may be linear or branched, it may comprise modified amino acids, and it may be interrupted by non-amino acids. The terms also encompass an amino acid polymer that has been modified; for example, disulfide bond formation, glycosylation, lipidation, acetylation, phosphorylation, or any other manipulation, such as conjugation with a labeling component. As used herein the term “amino acid” includes natural and/or unnatural or synthetic amino acids, including glycine and both the D or L optical isomers, and amino acid analogs and peptidomimetics. As used herein, the term “domain” or “protein domain” refers to a part of a protein sequence that may exist and function independently of the rest of the protein chain. As described in aspects, sequence identity is related to sequence homology. Homology comparisons may be conducted by eye, or more usually, with the aid of readily available sequence comparison programs. These commercially available computer programs may calculate percent (%) homology between two or more sequences and may also calculate the sequence identity shared by two or more amino acid or nucleic acid sequences.

[0162] In certain embodiments, the polynucleotide sequence is recombinant DNA. In further embodiments, the polynucleotide sequence further comprises additional sequences as described elsewhere herein. In certain embodiments, the nucleic acid sequence is synthesized in vitro.

[0163] Aspects of the disclosure relate to polynucleotide molecules that encode one or more components of the systems as referred to in any embodiment herein. In certain embodiments, the polynucleotide molecules may comprise further regulatory sequences. By means of guidance and not limitation, the polynucleotide sequence can be part of an expression plasmid, a minicircle, a lentiviral vector, a retroviral vector, an adenoviral or adeno-associated viral vector, a piggyback vector, or a tol2 vector. In certain embodiments, the polynucleotide sequence may be a bicistronic expression construct. In further embodiments, the isolated polynucleotide sequence may be incorporated in a cellular genome. In yet further embodiments, the isolated polynucleotide sequence may be part of a cellular genome. In further embodiments, the isolated polynucleotide sequence may be comprised in an artificial chromosome. In certain embodiments, the 5′ and/or 3′ end of the isolated polynucleotide sequence may be modified to improve the stability of the sequence of actively avoid degradation. In certain embodiments, the isolated polynucleotide sequence may be comprised in a bacteriophage. In other embodiments, the isolated polynucleotide sequence may be contained in agrobacterium species. In certain embodiments, the isolated polynucleotide sequence is lyophilized.

### Codon Optimization

[0164] Aspects of the disclosure relate to polynucleotide molecules that encode one or more components of the systems as described in any of the embodiments herein, wherein at least one or more regions of the polynucleotide molecule may be codon optimized for expression in a eukaryotic cell. In certain embodiments, the polynucleotide molecules that encode one or more components of the systems as described in any of the embodiments herein are optimized for expression in a mammalian cell or a plant cell.

[0165] An example of a codon optimized sequence, is in this instance a sequence optimized for expression in a eukaryote, e.g., humans (i.e., being optimized for expression in humans), or for another eukaryote, animal or mammal as herein discussed; see, e.g., SaCas9 human codon optimized sequence in International Patent Publication No. WO 2014/093622 (PCT/US2013/074667) as an example of a codon optimized sequence (from knowledge in the art and this disclosure, codon optimizing coding nucleic acid molecule(s), especially as to effector protein is within the ambit of the skilled artisan). Whilst this is preferred, it will be appreciated that other examples are possible and codon optimization for a host species other than human, or for codon optimization for specific organs is known. In some embodiments, an enzyme coding sequence encoding a Cas protein and/or transposase is codon optimized for expression in particular cells, such as eukaryotic cells. The eukaryotic cells may be those of or derived from a particular organism, such as a plant or a mammal, including but not limited to human, or non-human eukaryote or animal or mammal as herein discussed, e.g., mouse, rat, rabbit, dog, livestock, or non-human mammal or primate. In some embodiments, processes for modifying the germ line genetic identity of human beings and/or processes for modifying the genetic identity of animals which are likely to cause them suffering without any substantial medical benefit to man or animal, and also animals resulting from such processes, may be excluded. In general, codon optimization refers to a process of modifying a nucleic acid sequence for enhanced expression in the host cells of interest by replacing at least one codon (e.g., about or more than about 1, 2, 3, 4, 5, 10, 15, 20, 25, 50, or more codons) of the native sequence with codons that are more frequently or most frequently used in the genes of that host cell while maintaining the native amino acid sequence. Various species exhibit particular bias for certain codons of a particular amino acid. Codon bias (differences in codon usage between organisms) often correlates with the efficiency of translation of messenger RNA (mRNA), which is in turn believed to be dependent on, among other things, the properties of the codons being translated and the availability of particular transfer RNA (tRNA) molecules. The predominance of selected tRNAs in a cell is generally a reflection of the codons used most frequently in peptide synthesis. Accordingly, genes can be tailored for optimal gene expression in a given organism based on codon optimization. Codon usage tables are readily available, for example, at the “Codon Usage Database” available at www.kazusa.orjp/codon/and these tables can be adapted in a number of ways. See Nakamura, Y., et al. “Codon usage tabulated from the international DNA sequence databases: status for the year 2000” Nucl. Acids Res. 28:292 (2000). Computer algorithms for codon optimizing a particular sequence for expression in a particular host cell are also available, such as Gene Forge (Aptagen; Jacobus, PA), are also available. In some embodiments, one or more codons (e.g., 1, 2, 3, 4, 5, 10, 15, 20, 25, 50, or more, or all codons) in a sequence encoding a DNA/RNA-targeting Cas protein corresponds to the most frequently used codon for a particular amino acid.

### Method of Inserting Polynucleotides

[0166] The present disclosure further provides methods of inserting a polynucleotide into a target nucleic acid in a cell, which comprises introducing into a cell one or more of the engineered systems described herein. In some examples, the present disclosure provides methods of inserting a donor polynucleotide into a target polynucleotide in a cell, said method comprising introducing into the cell an engineered system comprising one or more Type I-D Cas proteins, one or more CRISPR-associated Tn7 transposases or functional fragments thereof linked to or otherwise capable of associated with the one or more Type I-D Cas proteins, and a guide molecule capable of forming a complex with the one or more Type I-D Cas proteins and directing sequence-specific binding of the complex to a target polynucleotide. In some examples, the method of inserting a donor polynucleotide into a target polynucleotide in a cell comprises introducing into the cell an engineered system comprising one or more Tn7 transposases or functional fragments thereof (e.g., TnsA, TnsB, TnsC, and TnsF; TnsAB, TnsC, and TnsF; etc.). In some examples, the method of inserting a donor polynucleotide into a target polynucleotide in a cell comprises introducing into the cell an engineered system comprising one or more tyrosine recombinases, one or more HTH domain proteins, and one or more TnsF homologs.

[0167] The one or more of components of the engineered systems described herein may be expressed from a nucleic acid operably linked to a regulatory sequence that is expressed in the cell. The one or more of components of the engineered systems described herein may be introduced into a particle for delivery into the cell. The particle may comprise a ribonucleoprotein (RNP). The cell may be a prokaryotic cell. The cell may be a eukaryotic cell. The cell may be a mammalian cell, a cell of a non-human primate, or a human cell. The cell may be a plant cell.

[0168] In some cases, the method of inserting a donor polynucleotide into a target polynucleotide in a cell, which comprises introducing into the cell: one or more transposases (e.g., CRISPR-associated transposases), a Cas protein; and a guide molecule capable of complexing with the Cas protein and directing sequence specific binding of the guide-Cas protein complex to a target sequence of the target nucleic acid. The one or more CRISPR-associated transposons may comprise one or more transposases and a donor polynucleotide to be inserted.

### Immune Orthogonal Orthologs

[0169] In some embodiments, when one or more components of the systems (e.g., transposases, nucleotide-binding molecules) herein need to be expressed or administered in a subject, immunogenicity of the components may be reduced by sequentially expressing or administering immune orthogonal orthologs of the components of the transposon complexes to the subject. As used herein, the term “immune orthogonal orthologs” refer to orthologous proteins that have similar or substantially the same function or activity, but have no or low cross-reactivity with the immune response generated by one another. In some embodiments, sequential expression or administration of such orthologs elicits low or no secondary immune response. The immune orthogonal orthologs can avoid being neutralized by antibodies (e.g., existing antibodies in the host before the orthologs are expressed or administered). Cells expressing the orthologs can avoid being cleared by the host's immune system (e.g., by activated CTLs). In some examples, CRISPR enzyme orthologs from different species may be immune orthogonal orthologs.

[0170] Immune orthogonal orthologs may be identified by analyzing the sequences, structures, and/or immunogenicity of a set of candidates orthologs. In an example method, a set of immune orthogonal orthologs may be identified by a) comparing the sequences of a set of candidate orthologs (e.g., orthologs from different species) to identify a subset of candidates that have low or no sequence similarity; b) assessing immune overlap among the members of the subset of candidates to identify candidates that have no or low immune overlap. In some cases, immune overlap among candidates may be assessed by determining the binding (e.g., affinity) between a candidate ortholog and MHC (e.g., MHC type I and/or MHC II) of the host. Alternatively or additionally, immune overlap among candidates may be assessed by determining B-cell epitopes for the candidate orthologs. In one example, immune orthogonal orthologs may be identified using the method described in Moreno A M et al., BioRxiv, published online Jan. 10, 2018, doi: doi.org/10.1101/245985.

### Delivery

[0171] The present disclosure also provides delivery systems for introducing components of the systems and compositions herein to cells, tissues, organs, or organisms. A delivery system may comprise one or more delivery vehicles and/or cargos. Exemplary delivery systems and methods include those described in paragraphs to of Feng Zhang et al., (WO2016106236A1), and pages 1241-1251 and Table 1 of Lino C A et al., Delivering CRISPR: a review of the challenges and approaches, DRUG DELIVERY, 2018, VOL. 25, NO. 1, 1234-1257, which are incorporated by reference herein in their entireties.

[0172] In some embodiments, the delivery systems may be used to introduce the components of the systems and compositions to plant cells. For example, the components may be delivered to plant using electroporation, microinjection, aerosol beam injection of plant cell protoplasts, biolistic methods, DNA particle bombardment, and/or Agrobacterium-mediated transformation. Examples of methods and delivery systems for plants include those described in Fu et al., Transgenic Res. 2000 February; 9 (1): 11-9; Klein R M, et al., Biotechnology. 1992; 24:384-6; Casas A M et al., Proc Natl Acad Sci USA. 1993 Dec. 1; 90 (23): 11212-11216; and U.S. Pat. No. 5,563,055, Davey M R et al., Plant Mol Biol. 1989 September; 13 (3): 273-85, which are incorporated by reference herein in their entireties.

### Cargos

[0173] The delivery systems may comprise one or more cargos. The cargos may comprise one or more components of the engineered systems described herein. In some embodiments, a cargo may comprise one or more plasmids encoding one or more Cas proteins; one or more plasmids encoding one or more transposases; one or more plasmids encoding one or more guide molecules; or any combination thereof. In some embodiments, a cargo may comprise one or more plasmids encoding one or more tyrosine recombinases; one or more plasmids encoding one or more HTH domain proteins; one or more plasmids encoding one or more TnsF homologs; or any combination thereof. In some examples, a cargo may comprise a plasmid encoding one or more Cas protein and one or more (e.g., a plurality of) guide RNAs. In some embodiments, a cargo may comprise mRNA encoding one or more Cas proteins and one or more guide RNAs.

[0174] In some examples, a cargo may comprise one or more Cas proteins and one or more guide RNAs, e.g., in the form of ribonucleoprotein complexes (RNPs). The ribonucleoprotein complexes may be delivered by methods and systems herein. In some cases, the ribonucleoprotein may be delivered by way of a polypeptide-based shuttle agent. In one example, the ribonucleoprotein may be delivered using synthetic peptides comprising an endosome leakage domain (ELD) operably linked to a cell penetrating domain (CPD), to a histidine-rich domain and a CPD, e.g., as describe in WO2016161516. RNP may also be used for delivering the compositions and systems to plant cells, e.g., as described in Wu J W, et al., Nat Biotechnol. 2015 November; 33 (11): 1162-4.

### Physical Delivery

[0175] In some embodiments, the cargos may be introduced to cells by physical delivery methods. Examples of physical methods include microinjection, electroporation, and hydrodynamic delivery. Both nucleic acid and proteins may be delivered using such methods. For example, Cas protein may be prepared in vitro, isolated, (refolded, purified if needed), and introduced to cells.

### Microinjection

[0176] Microinjection of the cargo directly to cells can achieve high efficiency, e.g., above 90% or about 100%. In some embodiments, microinjection may be performed using a microscope and a needle (e.g., with 0.5-5.0 μm in diameter) to pierce a cell membrane and deliver the cargo directly to a target site within the cell. Microinjection may be used for in vitro and ex vivo delivery.

[0177] Plasmids comprising coding sequences for Cas proteins and/or guide RNAs, mRNAs, and/or guide RNAs, may be microinjected. In some cases, microinjection may be used i) to deliver DNA directly to a cell nucleus, and/or ii) to deliver mRNA (e.g., in vitro transcribed) to a cell nucleus or cytoplasm. In certain examples, microinjection may be used to delivery sgRNA directly to the nucleus and Cas-encoding mRNA to the cytoplasm, e.g., facilitating translation and shuttling of Cas to the nucleus.

[0178] Microinjection may be used to generate genetically modified animals. For example, gene editing cargos may be injected into zygotes to allow for efficient germline modification. Such approach can yield normal embryos and full-term mouse pups harboring the desired modification(s). Microinjection can also be used to provide transiently up- or down-regulate a specific gene within the genome of a cell, e.g., using CRISPRa and CRISPRi.

### Electroporation

[0179] In some embodiments, the cargos and/or delivery vehicles may be delivered by electroporation. Electroporation may use pulsed high-voltage electrical currents to transiently open nanometer-sized pores within the cellular membrane of cells suspended in buffer, allowing for components with hydrodynamic diameters of tens of nanometers to flow into the cell. In some cases, electroporation may be used on various cell types and efficiently transfer cargo into cells. Electroporation may be used for in vitro and ex vivo delivery.

[0180] Electroporation may also be used to deliver the cargo to into the nuclei of mammalian cells by applying specific voltage and reagents, e.g., by nucleofection. Such approaches include those described in Wu Y, et al. (2015). Cell Res 25:67-79; Ye L, et al. (2014). Proc Natl Acad Sci USA 111:9591-6; Choi P S, Meyerson M. (2014). Nat Commun 5:3728; Wang J, Quake S R. (2014). Proc Natl Acad Sci 111:13157-62. Electroporation may also be used to deliver the cargo in vivo, e.g., with methods described in Zuckermann M, et al. (2015). Nat Commun 6:7391.

### HYDRODYNAMIC Delivery

[0181] Hydrodynamic delivery may also be used for delivering the cargos, e.g., for in vivo delivery. In some examples, hydrodynamic delivery may be performed by rapidly pushing a large volume (8-10% body weight) solution containing the gene editing cargo into the bloodstream of a subject (e.g., an animal or human), e.g., for mice, via the tail vein. As blood is incompressible, the large bolus of liquid may result in an increase in hydrodynamic pressure that temporarily enhances permeability into endothelial and parenchymal cells, allowing for cargo not normally capable of crossing a cellular membrane to pass into cells. This approach may be used for delivering naked DNA plasmids and proteins. The delivered cargos may be enriched in liver, kidney, lung, muscle, and/or heart.

### Transfection

[0182] The cargos, e.g., nucleic acids, may be introduced to cells by transfection methods for introducing nucleic acids into cells. Examples of transfection methods include calcium phosphate-mediated transfection, cationic transfection, liposome transfection, dendrimer transfection, heat shock transfection, magnetofection, lipofection, impalefection, optical transfection, proprietary agent-enhanced uptake of nucleic acid.

### Delivery Vehicles

[0183] The delivery systems may comprise one or more delivery vehicles. The delivery vehicles may deliver the cargo into cells, tissues, organs, or organisms (e.g., animals or plants). The cargos may be packaged, carried, or otherwise associated with the delivery vehicles. The delivery vehicles may be selected based on the types of cargo to be delivered, and/or the delivery is in vitro and/or in vivo. Examples of delivery vehicles include vectors, viruses, non-viral vehicles, and other delivery reagents described herein.

[0184] The delivery vehicles in accordance with the present invention may a greatest dimension (e.g., diameter) of less than 100 microns (μm). In some embodiments, the delivery vehicles have a greatest dimension of less than 10 μm. In some embodiments, the delivery vehicles may have a greatest dimension of less than 2000 nanometers (nm). In some embodiments, the delivery vehicles may have a greatest dimension of less than 1000 nanometers (nm). In some embodiments, the delivery vehicles may have a greatest dimension (e.g., diameter) of less than 900 nm, less than 800 nm, less than 700 nm, less than 600 nm, less than 500 nm, less than 400 nm, less than 300 nm, less than 200 nm, less than 150 nm, or less than 100 nm, less than 50 nm. In some embodiments, the delivery vehicles may have a greatest dimension ranging between 25 nm and 200 nm.

[0185] In some embodiments, the delivery vehicles may be or comprise particles. For example, the delivery vehicle may be or comprise nanoparticles (e.g., particles with a greatest dimension (e.g., diameter) no greater than 1000 nm. The particles may be provided in different forms, e.g., as solid particles (e.g., metal such as silver, gold, iron, titanium), non-metal, lipid-based solids, polymers), suspensions of particles, or combinations thereof. Metal, dielectric, and semiconductor particles may be prepared, as well as hybrid structures (e.g., core-shell particles). Nanoparticles may also be used to deliver the compositions and systems to plant cells, e.g., as described in WO 2008042156, US20130185823, and WO2015089419.

### Vectors

[0186] The systems, compositions, and/or delivery systems may comprise one or more vectors. The present disclosure also includes vector systems. A vector system may comprise one or more vectors. In some embodiments, a vector refers to a nucleic acid molecule capable of transporting another nucleic acid to which it has been linked. Vectors include nucleic acid molecules that are single-stranded, double-stranded, or partially double-stranded; nucleic acid molecules that comprise one or more free ends, no free ends (e.g., circular); nucleic acid molecules that comprise DNA, RNA, or both; and other varieties of polynucleotides known in the art. A vector may be a plasmid, e.g., a circular double stranded DNA loop into which additional DNA segments can be inserted, such as by standard molecular cloning techniques. Certain vectors may be capable of autonomous replication in a host cell into which they are introduced (e.g., bacterial vectors having a bacterial origin of replication and episomal mammalian vectors). Some vectors (e.g., non-episomal mammalian vectors) are integrated into the genome of a host cell upon introduction into the host cell, and thereby are replicated along with the host genome. In certain examples, vectors may be expression vectors, e.g., capable of directing the expression of genes to which they are operatively-linked. In some cases, the expression vectors may be for expression in eukaryotic cells. Common expression vectors of utility in recombinant DNA techniques are often in the form of plasmids.

[0187] Examples of vectors include pGEX, pMAL, pRIT5, E. coli expression vectors (e.g., pTrc, pET 11d, yeast expression vectors (e.g., pYepSec1, pMFa, pJRY88, pYES2, and picZ, Baculovirus vectors (e.g., for expression in insect cells such as SF9 cells) (e.g., pAc series and the pVL series), mammalian expression vectors (e.g., pCDM8 and pMT2PC).

[0188] A vector may comprise i) Cas encoding sequence(s), and/or ii) a single, or at least 2, at least 3, at least 4, at least 5, at least 6, at least 7, at least 8, at least 9, at least 10, at least 12, at least 14, at least 16, at least 32, at least 48, at least 50 guide RNA(s) encoding sequences. In a single vector there can be a promoter for each RNA coding sequence. Alternatively or additionally, in a single vector, there may be a promoter controlling (e.g., driving transcription and/or expression) multiple RNA encoding sequences.

[0189] In some embodiments, the components (or coding sequences thereof) of any of the engineered systems described herein may be comprised in a single vector. In some examples, a single vector may comprise coding sequences for one or more CRISPR-associated Tn7 transposases, one or more Cas proteins, and one or more guide molecules. In some examples, a single vector may comprise coding sequences for one or more CRISPR-associated Tn7 transposases. In some examples, a single vector may comprise coding sequences for one or more tyrosine recombinases, one or more HTH domain proteins, and one or more TnsF homologs. In certain embodiments, the components (or coding sequences thereof) of any of the engineered systems described herein may be comprised in separate vectors. In some examples, a first vector may comprise coding sequences for one or more CRISPR-associated Tn7 transposases; a second vector may comprise coding sequences for one or more Cas proteins; a third vector may comprise coding sequences for one or more guide molecules. In some examples, a first vector may comprise coding sequences for one or more CRISPR-associated Tn7 transposases and one or more Cas proteins; a second vector may comprise coding sequences for one or more guide molecules. In some examples, a first vector may comprise coding sequences for one or more CRISPR-associated Tn7 transposases; a second vector may comprise coding sequences for one or more Cas proteins and one or more guide molecules. In some examples, a first vector may comprise coding sequences for one or more CRISPR-associated Tn7 transposases and one or more guide molecules; a second vector may comprise coding sequences for one or more Cas proteins. In some examples, a first vector may comprise coding sequences for one or more tyrosine recombinases; a second vector may comprise coding sequences for one or more HTH domain proteins; and a third vector may comprise coding sequences for one or more TnsF homologs. In some examples, a first vector may comprise coding sequences for one or more tyrosine recombinases and one or more HTH domain proteins; and a second vector may comprise coding sequences for one or more TnsF homologs. In some examples, a first vector may comprise coding sequences for one or more tyrosine recombinases; and a second vector may comprise coding sequences for one or more HTH domain proteins and one or more TnsF homologs. In some examples, a first vector may comprise coding sequences for one or more tyrosine recombinases and one or more TnsF homologs; and a second vector may comprise coding sequences for one or more HTH domain proteins.

### Regulatory Elements

[0190] A vector may comprise one or more regulatory elements. The regulatory element(s) may be operably linked to coding sequences of Cas proteins, transposases, tyrosine recombinases, HTH domain proteins, GIY-YIG nucleases, accessary proteins, guide RNAs (e.g., a single guide RNA, crRNA, and/or tracrRNA), or combination thereof. The term “operably linked” is intended to mean that the nucleotide sequence of interest is linked to the regulatory element(s) in a manner that allows for expression of the nucleotide sequence (e.g., in an in vitro transcription/translation system or in a host cell when the vector is introduced into the host celD. In certain examples, a vector may comprise a first regulatory element operably linked to a nucleotide sequence encoding a Cas protein, and a second regulatory element operably linked to a nucleotide sequence encoding a guide RNA.

[0191] Examples of regulatory elements include promoters, enhancers, internal ribosomal entry sites (IRES), and other expression control elements (e.g., transcription termination signals, such as polyadenylation signals and poly-U sequences). Such regulatory elements are described, for example, in Goeddel, GENE EXPRESSION TECHNOLOGY: METHODS IN ENZYMOLOGY 185, Academic Press, San Diego, Calif. (1990). Regulatory elements include those that direct constitutive expression of a nucleotide sequence in many types of host cell and those that direct expression of the nucleotide sequence only in certain host cells (e.g., tissue-specific regulatory sequences). A tissue-specific promoter may direct expression primarily in a desired tissue of interest, such as muscle, neuron, bone, skin, blood, specific organs (e.g., liver, pancreas), or particular cell types (e.g., lymphocytes). Regulatory elements may also direct expression in a temporal-dependent manner, such as in a cell-cycle dependent or developmental stage-dependent manner, which may or may not also be tissue or cell-type specific.

[0192] Examples of promoters include one or more pol III promoter (e.g., 1, 2, 3, 4, 5, or more pol III promoters), one or more pol II promoters (e.g., 1, 2, 3, 4, 5, or more pol II promoters), one or more pol I promoters (e.g., 1, 2, 3, 4, 5, or more pol I promoters), or combinations thereof. Examples of pol III promoters include, but are not limited to, U6 and H1 promoters. Examples of pol II promoters include, but are not limited to, the retroviral Rous sarcoma virus (RSV) LTR promoter (optionally with the RSV enhancer), the cytomegalovirus (CMV) promoter (optionally with the CMV enhancer), the SV40 promoter, the dihydrofolate reductase promoter, the β-actin promoter, the phosphoglycerol kinase (PGK) promoter, and the EF1α promoter.

### Viral Vectors

[0193] The cargos may be delivered by viruses. In some embodiments, viral vectors are used. A viral vector may comprise virally derived DNA or RNA sequences for packaging into a virus (e.g., retroviruses, replication defective retroviruses, adenoviruses, replication defective adenoviruses, and adeno-associated viruses). Viral vectors also include polynucleotides carried by a virus for transfection into a host cell. Viruses and viral vectors may be used for in vitro, ex vivo, and/or in vivo deliveries.

### Adeno Associated Virus (AAV)

[0194] The systems and compositions herein may be delivered by adeno associated virus (AAV). AAV vectors may be used for such delivery. AAV, of the Dependovirus genus and Parvoviridae family, is a single stranded DNA virus. In some embodiments, AAV may provide a persistent source of the provided DNA, as AAV delivered genomic material can exist indefinitely in cells, e.g., either as exogenous DNA or, with some modification, be directly integrated into the host DNA. In some embodiments, AAV do not cause or relate with any diseases in humans. The virus itself is able to efficiently infect cells while provoking little to no innate or adaptive immune response or associated toxicity.

[0195] Examples of AAV that can be used herein include AAV-1, AAV-2, AAV-3, AAV-4, AAV-5, AAV-6, AAV-8, and AAV-9. The type of AAV may be selected with regard to the cells to be targeted; e.g., one can select AAV serotypes 1, 2, 5 or a hybrid capsid AAV1, AAV2, AAV5 or any combination thereof for targeting brain or neuronal cells; and one can select AAV4 for targeting cardiac tissue. AAV8 is useful for delivery to the liver. AAV-2-based vectors were originally proposed for CFTR delivery to CF airways, other serotypes such as AAV-1, AAV-5, AAV-6, and AAV-9 exhibit improved gene transfer efficiency in a variety of models of the lung epithelium. Examples of cell types targeted by AAV are described in Grimm, D. et al, J. Virol. 82:5887-5911 (2008), and shown as follows:

TABLE 2

| Cell Line | AAV-1 | AAV-2 | AAV-3 | AAV-4 | AAV-5 | AAV-6 | AAV-8 | AAV-9 |
|---|---|---|---|---|---|---|---|---|
| Huh-7 | 13 | 100 | 2.5 | 0.0 | 0.1 | 10 | 0.7 | 0.0 |
| HEK293 | 25 | 100 | 2.5 | 0.1 | 0.1 | 5 | 0.7 | 0.1 |
| HeLa | 3 | 100 | 2.0 | 0.1 | 6.7 | 1 | 0.2 | 0.1 |
| HepG2 | 3 | 100 | 16.7 | 0.3 | 1.7 | 5 | 0.3 | ND |
| Hep1A | 20 | 100 | 0.2 | 1.0 | 0.1 | 1 | 0.2 | 0.0 |
| 911 | 17 | 100 | 11 | 0.2 | 0.1 | 17 | 0.1 | ND |
| CHO | 100 | 100 | 14 | 1.4 | 333 | 50 | 10 | 1.0 |
| COS | 33 | 100 | 33 | 3.3 | 5.0 | 14 | 2.0 | 0.5 |
| MeWo | 10 | 100 | 20 | 0.3 | 6.7 | 10 | 1.0 | 0.2 |
| NIH3T3 | 10 | 100 | 2.9 | 2.9 | 0.3 | 10 | 0.3 | ND |
| A549 | 14 | 100 | 20 | ND | 0.5 | 10 | 0.5 | 0.1 |
| HT1180 | 20 | 100 | 10 | 0.1 | 0.3 | 33 | 0.5 | 0.1 |
| Monocytes | 1111 | 100 | ND | ND | 125 | 1429 | ND | ND |
| Immature DC | 2500 | 100 | ND | ND | 222 | 2857 | ND | ND |
| Mature DC | 2222 | 100 | ND | ND | 333 | 3333 | ND | ND |

[0196] AAV particles may be created in HEK 293 T cells. Once particles with specific tropism have been created, they are used to infect the target cell line much in the same way that native viral particles do. This may allow for persistent presence of CRISPR-Cas components in the infected cell type, and what makes this version of delivery particularly suited to cases where long-term expression is desirable. Examples of doses and formulations for AAV that can be used include those describe in U.S. Pat. Nos. 8,454,972 and 8,404,658.

[0197] Various strategies may be used for delivery the systems and compositions herein with AAVs. In some examples, coding sequences of Cas and gRNA may be packaged directly onto one DNA plasmid vector and delivered via one AAV particle. In some examples, AAVs may be used to deliver gRNAs into cells that have been previously engineered to express Cas. In some examples, coding sequences of Cas and gRNA may be made into two separate AAV particles, which are used for co-transfection of target cells. In some examples, markers, tags, and other sequences may be packaged in the same AAV particles as coding sequences of Cas and/or gRNAs.

### Lentiviruses

[0198] The systems and compositions herein may be delivered by lentiviruses. Lentiviral vectors may be used for such delivery. Lentiviruses are complex retroviruses that have the ability to infect and express their genes in both mitotic and post-mitotic cells.

[0199] Examples of lentiviruses include human immunodeficiency virus (HIV), which may use its envelope glycoproteins of other viruses to target a broad range of cell types; minimal non-primate lentiviral vectors based on the equine infectious anemia virus (EIAV), which may be used for ocular therapies. In certain embodiments, self-inactivating lentiviral vectors with an siRNA targeting a common exon shared by HIV tat/rev, a nucleolar-localizing TAR decoy, and an anti-CCR5-specific hammerhead ribozyme (see, e.g., DiGiusto et al. (2010) Sci Transl Med 2: 36ra43) may be used/and or adapted to the nucleic acid-targeting system herein.

[0200] Lentiviruses may be pseudo-typed with other viral proteins, such as the G protein of vesicular stomatitis virus. In doing so, the cellular tropism of the lentiviruses can be altered to be as broad or narrow as desired. In some cases, to improve safety, second-and third-generation lentiviral systems may split essential genes across three plasmids, which may reduce the likelihood of accidental reconstitution of viable viral particles within cells.

[0201] In some examples, leveraging the integration ability, lentiviruses may be used to create libraries of cells comprising various genetic modifications, e.g., for screening and/or studying genes and signaling pathways.

### Adenoviruses

[0202] The systems and compositions herein may be delivered by adenoviruses. Adenoviral vectors may be used for such delivery. Adenoviruses include nonenveloped viruses with an icosahedral nucleocapsid containing a double stranded DNA genome. Adenoviruses may infect dividing and non-dividing cells. In some embodiments, adenoviruses do not integrate into the genome of host cells, which may be used for limiting off-target effects of CRISPR-Cas systems in gene editing applications.

### Viral Vehicles for Delivery to Plants

[0203] The systems and compositions may be delivered to plant cells using viral vehicles. In particular embodiments, the compositions and systems may be introduced in the plant cells using a plant viral vector (e.g., as described in Scholthof et al. 1996, Annu Rev Phytopathol. 1996; 34:299-323). Such viral vector may be a vector from a DNA virus, e.g., geminivirus (e.g., cabbage leaf curl virus, bean yellow dwarf virus, wheat dwarf virus, tomato leaf curl virus, maize streak virus, tobacco leaf curl virus, or tomato golden mosaic virus) or nanovirus (e.g., Faba bean necrotic yellow virus). The viral vector may be a vector from an RNA virus, e.g., tobravirus (e.g., tobacco rattle virus, tobacco mosaic virus), potexvirus (e.g., potato virus X), or hordeivirus (e.g., barley stripe mosaic virus). The replicating genomes of plant viruses may be non-integrative vectors.

### Non-Viral Vehicles

[0204] The delivery vehicles may comprise non-viral vehicles. In general, methods and vehicles capable of delivering nucleic acids and/or proteins may be used for delivering the systems compositions herein. Examples of non-viral vehicles include lipid nanoparticles, cell-penetrating peptides (CPPs), DNA nanoclews, gold nanoparticles, streptolysin O, multifunctional envelope-type nanodevices (MENDs), lipid-coated mesoporous silica particles, and other inorganic nanoparticles.

### Lipid Particles

[0205] The delivery vehicles may comprise lipid particles, e.g., lipid nanoparticles (LNPs) and liposomes.

### Lipid Nanoparticles (LNPs)

[0206] LNPs may encapsulate nucleic acids within cationic lipid particles (e.g., liposomes), and may be delivered to cells with relative ease. In some examples, lipid nanoparticles do not contain any viral components, which helps minimize safety and immunogenicity concerns. Lipid particles may be used for in vitro, ex vivo, and in vivo deliveries. Lipid particles may be used for various scales of cell populations.

[0207] In some examples. LNPs may be used for delivering DNA molecules (e.g., those comprising coding sequences of Cas and/or gRNA) and/or RNA molecules (e.g., mRNA of Cas, gRNAs). In certain cases, LNPs may be use for delivering RNP complexes of Cas/gRNA.

[0208] Components in LNPs may comprise cationic lipids 1,2-dilineoyl-3-dimethylammonium-propane (DLinDAP), 1,2-dilinoleyloxy-3-N,N-dimethylaminopropane (DLinDMA), 1,2-dilinoleyloxyketo-N,N-dimethyl-3-aminopropane (DLinK-DMA), 1,2-dilinoleyl-4-(2-dimethylaminoethyD-[1,3]-dioxolane (DLinKC2-DMA), (3-o-[2″-(methoxypolyethyleneglycol 2000) succinoyl]-1,2-dimyristoyl-sn-glycol (PEG-S-DMG), R-3-[(ro-methoxy-poly(ethylene glycoD 2000) carbamoyl]-1,2-dimyristyloxlpropyl-3-amine (PEG-C-DOMG, and any combination thereof. Preparation of LNPs and encapsulation may be adapted from Rosin et al, Molecular Therapy, vol. 19, no. 12, pages 1286-220 Dec. 2011).

### Liposomes

[0209] In some embodiments, a lipid particle may be liposome. Liposomes are spherical vesicle structures composed of a uni- or multilamellar lipid bilayer surrounding internal aqueous compartments and a relatively impermeable outer lipophilic phospholipid bilayer. In some embodiments, liposomes are biocompatible, nontoxic, can deliver both hydrophilic and lipophilic drug molecules, protect their cargo from degradation by plasma enzymes, and transport their load across biological membranes and the blood brain barrier (BBB).

[0210] Liposomes can be made from several different types of lipids, e.g., phospholipids. A liposome may comprise natural phospholipids and lipids such as 1,2-distearoryl-sn-glycero-3-phosphatidyl choline (DSPC), sphingomyelin, egg phosphatidylcholines, monosialoganglioside, or any combination thereof.

[0211] Several other additives may be added to liposomes in order to modify their structure and properties. For instance, liposomes may further comprise cholesterol, sphingomyelin, and/or 1,2-dioleoyl-sn-glycero-3-phosphoethanolamine (DOPE), e.g., to increase stability and/or to prevent the leakage of the liposomal inner cargo.

### Stable Nucleic-Acid-Lipid Particles (SNALPs)

[0212] In some embodiments, the lipid particles may be stable nucleic acid lipid particles (SNALPs). SNALPs may comprise an ionizable lipid (DLinDMA) (e.g., cationic at low pH), a neutral helper lipid, cholesterol, a diffusible polyethylene glycol (PEG)-lipid, or any combination thereof. In some examples, SNALPs may comprise synthetic cholesterol, dipalmitoylphosphatidylcholine, 3-N-[(w-methoxy polyethylene glycoD 2000) carbamoyl]-1,2-dimyrestyloxypropylamine, and cationic 1,2-dilinoleyloxy-3-N,Ndimethylaminopropane. In some examples, SNALPs may comprise synthetic cholesterol, 1,2-distearoyl-sn-glycero-3-phosphocholine, PEG-CDMA, and 1,2-dilinoleyloxy-3-(N;N-dimethyD aminopropane (DLinDMA).

### Other Lipids

[0213] The lipid particles may also comprise one or more other types of lipids, e.g., cationic lipids, such as amino lipid 2,2-dilinoleyl-4-dimethylaminoethyl-[1,3]-dioxolane (DLin-KC2-DMA), DLin-KC2-DMA4, C12-200 and colipids disteroylphosphatidyl choline, cholesterol, and PEG-DMG.

### Lipoplexes/Polyplexes

[0214] In some embodiments, the delivery vehicles comprise lipoplexes and/or polyplexes. Lipoplexes may bind to negatively charged cell membrane and induce endocytosis into the cells. Examples of lipoplexes may be complexes comprising lipid(s) and non-lipid components. Examples of lipoplexes and polyplexes include FuGENE-6 reagent, a non-liposomal solution containing lipids and other components, zwitterionic amino lipids (ZALs), Ca2p (e.g., forming DNA/Ca2· microcomplexes), polyethenimine (PEI) (e.g., branched PEI), and poly(L-lysine) (PLL).

### Cell Penetrating Peptides

[0215] In some embodiments, the delivery vehicles comprise cell penetrating peptides (CPPs). CPPs are short peptides that facilitate cellular uptake of various molecular cargo (e.g., from nanosized particles to small chemical molecules and large fragments of DNA).

[0216] CPPs may be of different sizes, amino acid sequences, and charges. In some examples, CPPs can translocate the plasma membrane and facilitate the delivery of various molecular cargoes to the cytoplasm or an organelle. CPPs may be introduced into cells via different mechanisms, e.g., direct penetration in the membrane, endocytosis-mediated entry, and translocation through the formation of a transitory structure.

[0217] CPPs may have an amino acid composition that either contains a high relative abundance of positively charged amino acids such as lysine or arginine or has sequences that contain an alternating pattern of polar/charged amino acids and non-polar, hydrophobic amino acids. These two types of structures are referred to as polycationic or amphipathic, respectively. A third class of CPPs are the hydrophobic peptides, containing only apolar residues, with low net charge or have hydrophobic amino acid groups that are crucial for cellular uptake. Another type of CPPs is the trans-activating transcriptional activator (Tat) from Human Immunodeficiency Virus 1 (HIV-1). Examples of CPPs include to Penetratin, Tat (48-60), Transportan, and (R-AhX-R4) (Ahx refers to aminohexanoyD, Kaposi fibroblast growth factor (FGF) signal peptide sequence, integrin β3 signal peptide sequence, polyarginine peptide Args sequence, Guanine rich-molecular transporters, and sweet arrow peptide. Examples of CPPs and related applications also include those described in U.S. Pat. No. 8,372,951.

[0218] CPPs can be used for in vitro and ex vivo work quite readily, and extensive optimization for each cargo and cell type is usually required. In some examples, CPPs may be covalently attached to the Cas protein directly, which is then complexed with the gRNA and delivered to cells. In some examples, separate delivery of CPP-Cas and CPP-gRNA to multiple cells may be performed. CPP may also be used to delivery RNPs.

[0219] CPPs may be used to deliver the compositions and systems to plants. In some examples, CPPs may be used to deliver the components to plant protoplasts, which are then regenerated to plant cells and further to plants.

### DNA Nanoclews

[0220] In some embodiments, the delivery vehicles comprise DNA nanoclews. A DNA nanoclew refers to a sphere-like structure of DNA (e.g., with a shape of a ball of yarn). The nanoclew may be synthesized by rolling circle amplification with palindromic sequences that aide in the self-assembly of the structure. The sphere may then be loaded with a payload. An example of DNA nanoclew is described in Sun W et al, J Am Chem Soc. 2014 Oct. 22; 136 (42): 14722-5; and Sun W et al, Angew Chem Int Ed Engl. 2015 Oct. 5; 54 (41): 12029-33. DNA nanoclew may have a palindromic sequences to be partially complementary to the gRNA within the Cas: gRNA ribonucleoprotein complex. A DNA nanoclew may be coated, e.g., coated with PEI to induce endosomal escape.

### Gold Nanoparticles

[0221] In some embodiments, the delivery vehicles comprise gold nanoparticles (also referred to AuNPs or colloidal gold). Gold nanoparticles may form complex with cargos, e.g., Cas: gRNA RNP. Gold nanoparticles may be coated, e.g., coated in a silicate and an endosomal disruptive polymer, PAsp (DET). Examples of gold nanoparticles include AuraSense Therapeutics' Spherical Nucleic Acid (SNATM) constructs, and those described in Mout R, et al. (2017). ACS Nano 11:2452-8; Lee K, et al. (2017). Nat Biomed Eng 1:889-901.

iTop

[0222] In some embodiments, the delivery vehicles comprise iTOP. iTOP refers to a combination of small molecules drives the highly efficient intracellular delivery of native proteins, independent of any transduction peptide. iTOP may be used for induced transduction by osmocytosis and propanebetaine, using NaCl-mediated hyperosmolality together with a transduction compound (propanebetaine) to trigger macropinocytotic uptake into cells of extracellular macromolecules. Examples of iTOP methods and reagents include those described in D′Astolfo D S, Pagliero R J, Pras A, et al. (2015). Cell 161:674-690.

### Polymer-Based Particles

[0223] In some embodiments, the delivery vehicles may comprise polymer-based particles (e.g., nanoparticles). In some embodiments, the polymer-based particles may mimic a viral mechanism of membrane fusion. The polymer-based particles may be a synthetic copy of Influenza virus machinery and form transfection complexes with various types of nucleic acids (siRNA, miRNA, plasmid DNA or shRNA, mRNA) that cells take up via the endocytosis pathway, a process that involves the formation of an acidic compartment. The low pH in late endosomes acts as a chemical switch that renders the particle surface hydrophobic and facilitates membrane crossing. Once in the cytosol, the particle releases its payload for cellular action. This Active Endosome Escape technology is safe and maximizes transfection efficiency as it is using a natural uptake pathway. In some embodiments, the polymer-based particles may comprise alkylated and carboxyalkylated branched polyethylenimine. In some examples, the polymer-based particles are VIROMER, e.g., VIROMER RNAi, VIROMER RED, VIROMER mRNA, VIROMER CRISPR. Example methods of delivering the systems and compositions herein include those described in Bawage S S et al., Synthetic mRNA expressed Cas13a mitigates RNA virus infections, www.biorxiv.org/content/10.1101/370460v1.full doi: doi.org/10.1101/370460, Viromer® RED, a powerful tool for transfection of keratinocytes. doi: 10.13140/RG.2.2.16993.61281, Viromer® Transfection-Factbook 2018: technology, product overview, users' data., doi: 10.13140/RG.2.2.23912.16642.

### Streptolysin O (SLO)

[0224] The delivery vehicles may be streptolysin O (SLO). SLO is a toxin produced by Group A streptococci that works by creating pores in mammalian cell membranes. SLO may act in a reversible manner, which allows for the delivery of proteins (e.g., up to 100 kDa) to the cytosol of cells without compromising overall viability. Examples of SLO include those described in Sierig G, et al. (2003). Infect Immun 71:446-55; Walev I, et al. (2001). Proc Natl Acad Sci USA 98:3185-90; Teng K W, et al. (2017). Elife 6: e25460.

### Multifunctional Envelope-Type Nanodevice (MEND)

[0225] The delivery vehicles may comprise multifunctional envelope-type nanodevice (MENDs). MENDs may comprise condensed plasmid DNA, a PLL core, and a lipid film shell. A MEND may further comprise cell-penetrating peptide (e.g., stearyl octaarginine). The cell penetrating peptide may be in the lipid shell. The lipid envelope may be modified with one or more functional components, e.g., one or more of: polyethylene glycol (e.g., to increase vascular circulation time), ligands for targeting of specific tissues/cells, additional cell-penetrating peptides (e.g., for greater cellular delivery), lipids to enhance endosomal escape, and nuclear delivery tags. In some examples, the MEND may be a tetra-lamellar MEND (T-MEND), which may target the cellular nucleus and mitochondria. In certain examples, a MEND may be a PEG-peptide-DOPE-conjugated MEND (PPD-MEND), which may target bladder cancer cells. Examples of MENDs include those described in Kogure K, et al. (2004). J Control Release 98:317-23; Nakamura T, et al. (2012). Acc Chem Res 45:1113-21.

### Lipid-Coated Mesoporous Silica Particles

[0226] The delivery vehicles may comprise lipid-coated mesoporous silica particles. Lipid-coated mesoporous silica particles may comprise a mesoporous silica nanoparticle core and a lipid membrane shell. The silica core may have a large internal surface area, leading to high cargo loading capacities. In some embodiments, pore sizes, pore chemistry, and overall particle sizes may be modified for loading different types of cargos. The lipid coating of the particle may also be modified to maximize cargo loading, increase circulation times, and provide precise targeting and cargo release. Examples of lipid-coated mesoporous silica particles include those described in Du X, et al. (2014). Biomaterials 35:5580-90; Durfee P N, et al. (2016). ACS Nano 10:8325-45.

### Inorganic Nanoparticles

[0227] The delivery vehicles may comprise inorganic nanoparticles. Examples of inorganic nanoparticles include carbon nanotubes (CNTs) (e.g., as described in Bates K and Kostarelos K. (2013). Adv Drug Deliv Rev 65:2023-33.), bare mesoporous silica nanoparticles (MSNPs) (e.g., as described in Luo G F, et al. (2014). Sci Rep 4:6064), and dense silica nanoparticles (SiNPs) (as described in Luo D and Saltzman W M. (2000). Nat Biotechnol 18:893-5).

### Exosomes

[0228] The delivery vehicles may comprise exosomes. Exosomes include membrane bound extracellular vesicles, which can be used to contain and delivery various types of biomolecules, such as proteins, carbohydrates, lipids, and nucleic acids, and complexes thereof (e.g., RNPs). Examples of exosomes include those described in Schroeder A, et al., J Intern Med. 2010 January;267 (1): 9-21; El-Andaloussi S, et al., Nat Protoc. 2012 December;7 (12): 2112-26; Uno Y, et al., Hum Gene Ther. 2011 June;22 (6): 711-9; Zou W, et al., Hum Gene Ther. 2011 April;22 (4): 465-75.

[0229] In some examples, the exosome may form a complex (e.g., by binding directly or indirectly) to one or more components of the cargo. In certain examples, a molecule of an exosome may be fused with first adapter protein and a component of the cargo may be fused with a second adapter protein. The first and the second adapter protein may specifically bind each other, thus associating the cargo with the exosome. Examples of such exosomes include those described in Ye Y, et al., Biomater Sci. 2020 Apr. 28. doi: 10.1039/d0bm00427h.

### Modified Cells and Organisms

[0230] Described herein are modified cells, cell populations, and organisms that can be modified by the engineered systems described herein. The modified cells, cell populations, and organisms can have an insertion of one or more polynucleotides, deletion of one or more polynucleotides, mutation of one or more polynucleotides, or a combination thereof. The modification can result in activation of one or more genes, inactivation of one or more genes, modulation of one or more genes, or a combination thereof. Cells, including cells in an organism, can be modified in vitro, in situ, ex vivo, or in vivo. In some embodiments, the modification is insertion or deletion of a polynucleotide, gene, or allele of interest. In some embodiments, the polynucleotide, gene, or allele of interest is associated with a genetic disease or condition.

### Modified Cells

[0231] Also described herein are modified cells and cell populations that can be modified by an embodiment of a polynucleotide modifying agent or system described in greater detail elsewhere herein. In some embodiments, a cell is modified the CRISPR-Cas or Cas-based components of the engineered systems described herein. In some embodiments, a cell is modified by the transposase components of the engineered systems described herein. In some embodiments, a cell is modified by the CRISPR-Cas and CRISPR-associated Tn7 transposase components of the engineered systems described herein. In some embodiments, the cell is a eukaryotic cell. In some embodiments, the eukaryotic cell is a mammalian cell. In some embodiments, the eukaryotic cell is a non-human mammalian cell. In some embodiments, the cell is a human cell. In some embodiments, the cell is a plant cell. In some embodiments, the cell is a fungal cell. In some embodiments, the cell is a prokaryotic cell. The cells can be modified in vitro, ex vivo, or in vivo. The cells can be modified by delivering a polynucleotide modifying agent or system described in greater detail elsewhere herein or a component thereof into a cell by a suitable delivery mechanism. Suitable delivery methods and techniques include but are not limited to, transfection via a vector, transduction with viral particles, electroporation, endocytic methods, and others, which are described elsewhere herein and will be appreciated by those of ordinary skill in the art in view of this disclosure.

[0232] The modified cells can be further optionally cultured and/or expanded in vitro or ex vivo using any suitable cell culture techniques or conditions, which unless specified otherwise herein, will be appreciated by one of ordinary skill in the art in view of this disclosure. In some embodiments, the cells can be modified, optionally cultured and/or expanded, and administered to a subject in need thereof. In some embodiments, cells can be isolated from a subject, subsequently modified and optionally cultured and/or expanded, and administered back to the subject, such as in a cell therapy. In some embodiments, the cell therapy is an adoptive cell therapy. Such administration can be referred to as autologous administration. In some embodiments, cells can be isolated from a first subject, subsequently modified, optionally cultured and/or expanded, and administered to a second subject, where the first subject and the second subject are different. Such administration can be referred to as non-autologous administration.

[0233] In some embodiments, the modified cells can be used as a bioreactor for production of a bioproduct. In some embodiments engineered compositions of the present invention introduce a gene or polynucleotide or otherwise modify the cell to produce one or more bioproducts. In some embodiments, the engineered compositions of the present invention are used to modify a producer cell so as to improve production of a bioproduct. For example, one or more genes and/or transcripts of a cell that limit or decrease efficiency of production of a bioproduct may be modified by the CRISPR-Cas and/or CRISPR-associated Tn7 transposase components of the engineered systems described herein such that efficiency in production of and/or amount of the bioproduct is increased. In some embodiments, one or more genes and/or transcripts of a cell are modified such that they enhance production or efficiency of production of the bioproduct.

### Organisms

[0234] Also described herein are modified organisms. In some embodiments, the modified organisms can include one or more modified cells as are described elsewhere herein. In some embodiments, the modified organism is a non-human mammal. In some embodiments, the modified organism is a modified plant. In some embodiments, the modified organism is an insect. In some embodiments, the modified organism is a fungus. In some embodiments, the modified organism is a fungus. The modified organisms can be generated using a that can be modified by an embodiment of the engineered or non-natural guided excision-transposition system described herein. Methods of making modified organisms are described in greater detail elsewhere herein.

[0235] The systems and methods described herein can be used in non-animal organisms, e.g., plants, fungi to generated modified non-animal organisms. The system and methods described can be used to generate non-human animal organisms. The system and methods described herein can be used to modify non-germline cells in a human. In some embodiments, the modification is expression of a polynucleotide of interest, gene of interest, and/or allele of interest.

### Non-Human Animals

[0236] The systems and methods may be used to generate modified non-human animals and cells thereof. In an aspect, the invention provides a non-human eukaryotic organism; preferably a multicellular eukaryotic organism, comprising a eukaryotic host cell according to any of the described embodiments. In other aspects, the invention provides a eukaryotic organism; preferably a multicellular eukaryotic organism, comprising a eukaryotic host cell according to any of the described embodiments. The organism in some embodiments of these aspects may be an animal, for example, a mammal. Also, the organism may be an arthropod such as an insect. The present invention may also be extended to other agricultural applications such as, for example, farm and production animals. For example, pigs have many features that make them attractive as biomedical models, especially in regenerative medicine. In particular, pigs with severe combined immunodeficiency (SCID) may provide useful models for regenerative medicine, xenotransplantation (discussed also elsewhere herein), and tumor development and will aid in developing therapies for human SCID patients. Lee et al., (Proc Natl Acad Sci USA. 2014 May 20; 111 (20): 7260-5) utilized a reporter-guided transcription activator-like effector nuclease (TALEN) system to generated targeted modifications of recombination activating gene (RAG) 2 in somatic cells at high efficiency, including some that affected both alleles. Such techniques and modifications can be adapted for and used with the modifying agent(s) and systems thereof described herein to generate a modified non-human animal or cell thereof.

[0237] The methods of Lee et al., (Proc Natl Acad Sci USA. 2014 May 20; 111 (20): 7260-5) may be applied to the present invention analogously as follows. Mutated pigs are produced by targeted insertion for example in RAG2 in fetal fibroblast cells followed by SCNT and embryo transfer. Constructs coding for CRISPR Cas and a reporter are electroporated into fetal-derived fibroblast cells. After 48 h, transfected cells expressing the green fluorescent protein are sorted into individual wells of a 96-well plate at an estimated dilution of a single cell per well. Targeted modification of RAG2 is screened by amplifying a genomic DNA fragment flanking any CRISPR Cas cutting sites followed by sequencing the PCR products. After screening and ensuring lack of off-site mutations, cells carrying targeted modification of RAG2 are used for SCNT. The polar body, along with a portion of the adjacent cytoplasm of oocyte, presumably containing the metaphase II plate, are removed, and a donor cell are placed in the perivitelline. The reconstructed embryos are then electrically porated to fuse the donor cell with the oocyte and then chemically activated. The activated embryos are incubated in Porcine Zygote Medium 3 (PZM3) with 0.5 μM Scriptaid (S7817; Sigma-Aldrich) for 14-16 h. Embryos are then washed to remove the Scriptaid and cultured in PZM3 until they were transferred into the oviducts of surrogate pigs. Such techniques and modifications can be adapted for and used with the modifying agent(s) and systems thereof described herein to generate a modified non-human animal or cell thereof.

[0238] The modified non-human animals described herein can be a platform to model a disease or disorder of an animal, including but not limited to mammals. In some of these embodiments, the mammal can be a human. In certain embodiments, such models and platforms are rodent based, in non-limiting examples rat or mouse. Such models and platforms can take advantage of distinctions among and comparisons between inbred rodent strains. In certain embodiments, such models and platforms primate, horse, cattle, sheep, goat, swine, dog, cat or bird-based, for example to directly model diseases and disorders of such animals or to create modified and/or improved lines of such animals. Advantageously, in certain embodiments, an animal-based platform or model is created to mimic a human disease or disorder. For example, the similarities of swine to humans make swine an ideal platform for modeling human diseases. Compared to rodent models, development of swine models has been costly and time intensive. On the other hand, swine and other animals are much more similar to humans genetically, anatomically, physiologically and pathophysiologically. The present invention provides a high efficiency platform for targeted gene and genome editing, gene and genome modification and gene and genome regulation to be used in such animal platforms and models. Though ethical standards block development of human models and in many cases models based on non-human primates, the present invention is used with in vitro systems, including but not limited to cell culture systems, three dimensional models and systems, and organoids to mimic, model, and investigate genetics, anatomy, physiology and pathophysiology of structures, organs, and systems of humans. The platforms and models provide manipulation of single or multiple targets.

[0239] In certain embodiments, the present invention is applicable to disease models like that of Schomberg et al. (FASEB Journal, April 2016; 30 (1): Suppl 571.1). To model the inherited disease neurofibromatosis type 1 (NF-1) Schomberg used CRISPR-Cas9 to introduce mutations in the swine neurofibromin 1 gene by cytosolic microinjection of CRISPR/Cas9 components into swine embryos. CRISPR guide RNAs (gRNA) were created for regions targeting sites both upstream and downstream of an exon within the gene for targeted cleavage by Cas9 and repair was mediated by a specific single-stranded oligodeoxynucleotide (ssODN) template to introduce a 2500 bp deletion. The systems were also used to engineer swine with specific NF-1 mutations or clusters of mutations, and further can be used to engineer mutations that are specific to or representative of a given human individual. Such techniques and modifications can be adapted for and used with the modifying agent(s) and systems thereof described herein to generate a modified non-human animal or cell thereof. In some embodiments, the polynucleotide modifying agent(s) or systems thereof can be similarly used to develop animal models, including but not limited to swine models, of human multigenic diseases. In some embodiments, multiple genetic loci in one gene or in multiple genes are simultaneously targeted using multiplexed guides and optionally one or multiple templates.

[0240] SNPs of other animals, such as cows can also be modified or generated using one or more polynucleotide modifying agents or systems described herein. Tan et al. (Proc Natl Acad Sci USA. 2013 Oct. 8; 110 (41): 16526-16531) expanded the livestock gene editing toolbox to include transcription activator-like (TAL) effector nuclease (TALEN)-and clustered regularly interspaced short palindromic repeats (CRISPR)/Cas9-stimulated homology-directed repair (HDR) using plasmid, rAAV, and oligonucleotide templates. Gene specific gRNA sequences were cloned into the Church lab gRNA vector (Addgene ID: 41824) according to their methods (Mali P, et al. (2013) RNA-Guided Human Genome Engineering via Cas9. Science 339 (6121): 823-826). The Cas9 nuclease was provided either by co-transfection of the hCas9 plasmid (Addgene ID: 41815) or mRNA synthesized from RCIScript-hCas9. This RCIScript-hCas9 was constructed by sub-cloning the Xbal-Agel fragment from the hCas9 plasmid (encompassing the hCas9 cDNA) into the RCIScript plasmid. Such techniques and modifications can be adapted for and used with the modifying agent(s) and systems thereof described herein to generate a modified non-human animal or cell thereof.

[0241] Heo et al. (Stem Cells Dev. 2015 Feb. 1; 24 (3): 393-402. doi: 10.1089/scd.2014.0278. Epub 2014 Nov. 3) reported highly efficient gene targeting in the bovine genome using bovine pluripotent cells and clustered regularly interspaced short palindromic repeat (CRISPR)/Cas9 nuclease. First, Heo et al. generate induced pluripotent stem cells (iPSCs) from bovine somatic fibroblasts by the ectopic expression of yamanaka factors and GSK3B and MEK inhibitor (2i) treatment. Heo et al. observed that these bovine iPSCs are highly similar to naïve pluripotent stem cells with regard to gene expression and developmental potential in teratomas. Moreover, CRISPR-Cas9 nuclease, which was specific for the bovine NANOG locus, showed highly efficient editing of the bovine genome in bovine iPSCs and embryos. Such techniques and modifications can be adapted for and used with the modifying agent(s) and systems thereof described herein to generate a modified non-human animal or cell thereof.

[0242] Igenity® provides a profile analysis of animals, such as cows, to perform and transmit traits of economic traits of economic importance, such as carcass composition, carcass quality, maternal and reproductive traits and average daily gain. The analysis of a comprehensive Igenity® profile begins with the discovery of DNA markers (most often single nucleotide polymorphisms or SNPs). All the markers behind the Igenity® profile were discovered by independent scientists at research institutions, including universities, research organizations, and government entities such as USDA. Markers are then analyzed at Igenity® in validation populations. Igenity® uses multiple resource populations that represent various production environments and biological types, often working with industry partners from the seedstock, cow-calf, feedlot and/or packing segments of the beef industry to collect phenotypes that are not commonly available. Cattle genome databases are widely available, see, e.g., the NAGRP Cattle Genome Coordination Program (www.animalgenome.org/cattle/maps/db.htmD. Thus, the polynucleotide modifying agent(s) and/or systems described herein can be applied to target bovine SNPs. One of skill in the art may utilize the above protocols for targeting SNPs and apply them to bovine SNPs as described, for example, by Tan et al. or Heo et al.

[0243] Qingjian Zou et al. (Journal of Molecular Cell Biology Advance Access published Oct. 12, 2015) demonstrated increased muscle mass in dogs by targeting the first exon of the dog Myostatin (MSTN) gene (a negative regulator of skeletal muscle mass). First, the efficiency of the sgRNA was validated, using cotransfection of the sgRNA targeting MSTN with a Cas9 vector into canine embryonic fibroblasts (CEFs). Thereafter, MSTN KO dogs were generated by micro-injecting embryos with normal morphology with a mixture of Cas9 mRNA and MSTN sgRNA and auto-transplantation of the zygotes into the oviduct of the same female dog. The knock-out puppies displayed an obvious muscular phenotype on thighs compared with its wild-type littermate sister. This can also be performed using the polynucleotide agent(s) and/or systems provided herein. Such techniques and modifications can be adapted for and used with the modifying agent(s) and systems thereof described herein to generate a modified non-human animal or cell thereof.

### Livestock

[0244] Also described herein are modified pigs or cells that can express one or more polynucleotides, genes or alleles of interest. As reported by Kristin M Whitworth and Dr Randall Prather et al. (Nature Biotech 3434 published online 7 Dec. 2015) CD163 (a viral target) was targeted using CRISPR-Cas9 and the offspring of edited pigs were resistant when exposed to PRRSv. One founder male and one founder female, both of whom had mutations in exon 7 of CD163, were bred to produce offspring. The founder male possessed an 11-bp deletion in exon 7 on one allele, which results in a frameshift mutation and missense translation at amino acid 45 in domain 5 and a subsequent premature stop codon at amino acid 64. The other allele had a 2-bp addition in exon 7 and a 377-bp deletion in the preceding intron, which were predicted to result in the expression of the first 49 amino acids of domain 5, followed by a premature stop code at amino acid 85. The sow had a 7 bp addition in one allele that when translated was predicted to express the first 48 amino acids of domain 5, followed by a premature stop codon at amino acid 70. The sow's other allele was unamplifiable. Selected offspring were predicted to be a null animal (CD163−/−), i.e., a CD163 knock out. Such techniques and modifications can be adapted for and used with the modifying agent(s) and systems thereof described herein to generate a modified pig that can express a polynucleotide of interest. Thus, also described herein are modified pigs their progeny that also express one or more copies of the gene or allele of interest. This may be for livestock, breeding or modelling purposes (i.e., a porcine modeD. Semen comprising the modification (e.g., polynucleotide of interest) is also provided.

### Other Animals

[0245] Also described herein are other non-human animals that are modified to express one or more polynucleotides, genes or alleles of interest. Suitable polynucleotide modifying agent(s) and/or system thereof described elsewhere herein can be used to generate other non-human animals such as non-human primates, chickens (reviewed in Sid and Schusser et al 2018. Front. Genet. Doi.org/10.3389/fgene.2018.00456) and other avians (e.g., Scott et al. 2010. ILAR J. 51 (4): 353-361), cattle (Yum et al., 2016. Scientific Reports. 6:27185 and Tait-Burkard et al. 2018. Genome Biology. 19:2014.), sheep and goats (see e.g., Kalds et al., 2019. Front. Genet. Doi.org//10.3389/fgene.2019.00750), horses (see e.g., West and Gill. 2016. J. Equine Vet. Sci. 41:1-6), dogs (see e.g., D. Duan. Nature Biomedical Engineering. 2018. 2:795-796), reptiles (see e.g. Rasys et al. 2019. Cell Reports. 28:2288-2292), fish (including but not limited to zebrafish, see e.g. Datsomor et al. 2019. Scientific Reports. 9:7533, Liu et al. 2019. Front. Cell. Dev. Biol. https://doi.org/10.3389/fcell.2019.00013), insects (see e.g., Kotwica-Rolinska et al. 2019. Front. Physiol. https://doi.org/10.3389/fphys.2019.00891; Gantz and Akbari. 2018. Curr. Opin. Insect. Sci. 28:66-72), rabbits (see e.g., Kawano and Honda. 2017. Methods Mol. Biol. 4630:109-120; Liu et al., 2018. Nature Commun. 9:2717; and Liu et al. 2018. Gene. https://doi.org/10.1016/j.gene.2018.01.044), mice (see e.g., Hall et al. 2018. Curr Protoc Cell Biol. 81 (1): e57), rats (see e.g., Back et al. 2019. Neuron. 102 (1): 105-119), amphibians (see e.g., Nakayama et al. 2013. Genesis. 51 (12): 835-843), nematodes (see e.g., J.B. Lok. 2019. Front. Genet. https://doi.org/10.3389/fgene.2019.00656), molluscs (see e.g., Abe and Kuroda. 2019. Development. 146: dev175976 doi: 10.1242/dev.175976, geckos, shrimp and other crustaceans (see e.g., Gui et al. Genes Genomes Genetics: 6 (11): 3757-3764), oysters (Yu et al. 2019; Mar. Biotechnol (NY) 21 (3): 301-309. doi: 10.1007/s10126-019-09885-y), and sponges (see e.g., Revilla-i-Domingo et al. 2018. Genetics. 210 (2) 435-443), the teachings of which can be adapted for use with one or more of the modifying agent(s) and/or systems described herein to generate the modified non-human animal or cell thereof.

### Therapeutic Applications

[0246] Also provided herein are methods of diagnosing, prognosing, treating, and/or preventing a disease, state, or condition in or of a subject. Generally, the methods of diagnosing, prognosing, treating, and/or preventing a disease, state, or condition in or of a subject can include modifying a polynucleotide in a subject or cell thereof using a composition, system, or component thereof described herein and/or include detecting a diseased or healthy polynucleotide in a subject or cell thereof using a composition, system, or component thereof described herein. In some embodiments, the method of treatment or prevention can include using a composition, system, or component thereof to modify a polynucleotide of an infectious organism (e.g., bacterial or virus) within a subject or cell thereof. In some embodiments, the method of treatment or prevention can include using a composition, system, or component thereof to modify a polynucleotide of an infectious organism or symbiotic organism within a subject. The composition, system, and components thereof can be used to develop models of diseases, states, or conditions. The composition, system, and components thereof can be used to detect a disease state or correction thereof, such as by a method of treatment or prevention described herein. The composition, system, and components thereof can be used to screen and select cells that can be used, for example, as treatments or preventions described herein. The composition, system, and components thereof can be used to develop biologically active agents that can be used to modify one or more biologic functions or activities in a subject or a cell thereof.

[0247] In general, the method can include delivering a composition, system, and/or component thereof to a subject or cell thereof, or to an infectious or symbiotic organism by a suitable delivery technique and/or composition. Once administered the components can operate as described elsewhere herein to elicit a nucleic acid modification event. In some aspects, the nucleic acid modification event can occur at the genomic, epigenomic, and/or transcriptomic level. DNA and/or RNA cleavage, gene activation, and/or gene deactivation can occur. Additional features, uses, and advantages are described in greater detail below. On the basis of this concept, several variations are appropriate to elicit a genomic locus event, including DNA cleavage, gene activation, or gene deactivation. Using the provided compositions, the person skilled in the art can advantageously and specifically target single or multiple loci with the same or different functional domains to elicit one or more genomic locus events. In addition to treating and/or preventing a disease in a subject, the compositions may be applied in a wide variety of methods for screening in libraries in cells and functional modeling in vivo (e.g., gene activation of lincRNA and identification of function; gain-of-function modeling; loss-of-function modeling; the use the compositions of the invention to establish cell lines and transgenic animals for optimization and screening purposes).

[0248] The composition, system, and components thereof described elsewhere herein can be used to treat and/or prevent a disease, such as a genetic and/or epigenetic disease, in a subject. The composition, system, and components thereof described elsewhere herein can be used to treat and/or prevent genetic infectious diseases in a subject, such as bacterial infections, viral infections, fungal infections, parasite infections, and combinations thereof. The composition, system, and components thereof described elsewhere herein can be used to modify the composition or profile of a microbiome in a subject, which can in turn modify the health status of the subject. The composition, system, described herein can be used to modify cells ex vivo, which can then be administered to the subject whereby the modified cells can treat or prevent a disease or symptom thereof. This is also referred to in some contexts as adoptive therapy. The composition, system, described herein can be used to treat mitochondrial diseases, where the mitochondrial disease etiology involves a mutation in the mitochondrial DNA.

[0249] Also provided is a method of treating a subject, e.g., a subject in need thereof, comprising inducing gene editing by transforming the subject with the polynucleotide encoding one or more components of the composition, system, or complex or any of polynucleotides or vectors described herein and administering them to the subject. A suitable repair template may also be provided, for example delivered by a vector comprising said repair template. Also provided is a method of treating a subject, e.g., a subject in need thereof, comprising inducing transcriptional activation or repression of multiple target gene loci by transforming the subject with the polynucleotides or vectors described herein, wherein said polynucleotide or vector encodes or comprises one or more components of composition, system, complex or component thereof comprising multiple Cas effectors. Where any treatment is occurring ex vivo, for example in a cell culture, then it will be appreciated that the term ‘subject’ may be replaced by the phrase “cell or cell culture.”

[0250] Also provided is a method of treating a subject, e.g., a subject in need thereof, comprising inducing gene editing by transforming the subject with the Cas effector(s), advantageously encoding and expressing in vivo the remaining portions of the composition, system, (e.g., RNA, guides). A suitable repair template may also be provided, for example delivered by a vector comprising said repair template. Also provided is a method of treating a subject, e.g., a subject in need thereof, comprising inducing transcriptional activation or repression by transforming the subject with the Cas effector(s) advantageously encoding and expressing in vivo the remaining portions of the composition, system, (e.g., RNA, guides); advantageously in some embodiments the CRISPR enzyme is a catalytically inactive Cas effector and includes one or more associated functional domains. Where any treatment is occurring ex vivo, for example in a cell culture, then it will be appreciated that the term ‘subject’ may be replaced by the phrase “cell or cell culture.”

[0251] One or more components of the composition and system described herein can be included in a composition, such as a pharmaceutical composition, and administered to a host individually or collectively. Alternatively, these components may be provided in a single composition for administration to a host. Administration to a host may be performed via viral vectors known to the skilled person or described herein for delivery to a host (e.g., lentiviral vector, adenoviral vector, AAV vector). As explained herein, use of different selection markers (e.g., for lentiviral gRNA selection) and concentration of gRNA (e.g., dependent on whether multiple gRNAs are used) may be advantageous for eliciting an improved effect.

[0252] Thus, also described herein are methods of inducing one or more polynucleotide modifications in a eukaryotic or prokaryotic cell or component thereof (e.g., a mitochondria) of a subject, infectious organism, and/or organism of the microbiome of the subject. The modification can include the introduction, deletion, or substitution of one or more nucleotides at a target sequence of a polynucleotide of one or more cell(s). The modification can occur in vitro, ex vivo, in situ, or in vivo.

[0253] In some embodiments, the method of treating or inhibiting a condition or a disease caused by one or more mutations in a genomic locus in a eukaryotic organism or a non-human organism can include manipulation of a target sequence within a coding, non-coding or regulatory element of said genomic locus in a target sequence in a subject or a non-human subject in need thereof comprising modifying the subject or a non-human subject by manipulation of the target sequence and wherein the condition or disease is susceptible to treatment or inhibition by manipulation of the target sequence including providing treatment comprising delivering a composition comprising the particle delivery system or the delivery system or the virus particle of any one of the above embodiment or the cell of any one of the above embodiment.

[0254] Also provided herein is the use of the particle delivery system or the delivery system or the virus particle of any one of the above embodiments or the cell of any one of the above embodiments in ex vivo or in vivo gene or genome editing; or for use in in vitro, ex vivo or in vivo gene therapy. Also provided herein are particle delivery systems, non-viral delivery systems, and/or the virus particle of any one of the above embodiments or the cell of any one of the above embodiments used in the manufacture of a medicament for in vitro, ex vivo or in vivo gene or genome editing or for use in in vitro, ex vivo or in vivo gene therapy or for use in a method of modifying an organism or a non-human organism by manipulation of a target sequence in a genomic locus associated with a disease or in a method of treating or inhibiting a condition or disease caused by one or more mutations in a genomic locus in a eukaryotic organism or a non-human organism.

[0255] In some embodiments, polynucleotide modification can include the introduction, deletion, or substitution of 1-75 nucleotides at each target sequence of said polynucleotide of said cell(s). The modification can include the introduction, deletion, or substitution of at least 1, 5, 10, 11, 12, 13, 14, 15, 16, 17, 18, 19, 20, 21, 22, 23, 24, 25, 26, 27, 28, 29, 30, 35, 40, 45, 50, or 75 nucleotides at each target sequence. The modification can include the introduction, deletion, or substitution of at least 5, 10, 11, 12, 13, 14, 15, 16, 17, 18, 19, 20, 21, 22, 23, 24, 25, 26, 27, 28, 29, 30, 35, 40, 45, 50, or 75 nucleotides at each target sequence of said cell(s). The modification can include the introduction, deletion, or substitution of at least 10, 11, 12, 13, 14, 15, 16, 17, 18, 19, 20, 21, 22, 23, 24, 25, 26, 27, 28, 29, 30, 35, 40, 45, 50, or 75 nucleotides at each target sequence of said cell(s). The modification can include the introduction, deletion, or substitution of at least 20, 21, 22, 23, 24, 25, 26, 27, 28, 29, 30, 35, 40, 45, 50, or 75 nucleotides at each target sequence of said cell(s). The modification can include the introduction, deletion, or substitution of at least 40, 45, 50, 75, 100, 200, 300, 400 or 500 nucleotides at each target sequence of said cell(s). The modification can include the introduction, deletion, or substitution of at least 500, 600, 700, 800, 900, 1000, 1100, 1200, 1300, 1400, 1500, 1600, 1700, 1800, 1900, 2000, 2100, 2200, 2300, 2400, 2500, 2600, 2700, 2800, 2900, 3000, 3100, 3200, 3300, 3400, 3500, 3600, 3700, 3800, 3900, 4000, 4100, 4200, 4300, 4400, 4500, 4600, 4700, 4800, 4900, 5000, 5100, 5200, 5300, 5400, 5500, 5600, 5700, 5800, 5900, 6000, 6100, 6200, 6300, 6400, 6500, 6600, 6700, 6800, 6900, 7000, 7100, 7200, 7300, 7400, 7500, 7600, 7700, 7800, 7900, 8000, 8100, 8200, 8300, 8400, 8500, 8600, 8700, 8800, 8900, 9000, 9100, 9200, 9300, 9400, 9500, 9600, 9700, 9800, or 9900 to 10000 nucleotides at each target sequence of said cell(s).

[0256] In some embodiments, the modifications can include the introduction, deletion, or substitution of nucleotides at each target sequence of said cell(s) via nucleic acid components (e.g., guide(s) RNA(s) or sgRNA(s)), such as those mediated by a composition, system, or a component thereof described elsewhere herein. In some embodiments, the modifications can include the introduction, deletion, or substitution of nucleotides at a target or random sequence of said cell(s) via a composition, system, or technique.

[0257] The target sequences of polynucleotides to be modified to treat or prevent disease are described in greater detail below.

[0258] As is also discussed elsewhere herein, the composition, system, can include a template polynucleotide (also referred to herein as template nucleic acids or template sequence). In an embodiment, the template nucleic acid alters the structure of the target position by participating in homologous recombination. In an embodiment, the template nucleic acid alters the sequence of the target position. In an embodiment, the template nucleic acid results in the incorporation of a modified, or non-naturally occurring base into the target nucleic acid.

[0259] The template sequence may undergo a breakage mediated or catalyzed recombination with the target sequence. In an embodiment, the template nucleic acid can include sequence that corresponds to a site on the target sequence that is cleaved, nicked, or otherwise modified by one or more Cas effector mediated cleavage event(s). In an embodiment, the template nucleic acid can include sequence that corresponds to both, a first site on the target sequence that is cleaved, nicked, or otherwise modified in a first Cas effector mediated event, and a second site on the target sequence that is cleaved in a second Cas effector mediated event.

[0260] In certain embodiments, the template nucleic acid can include a sequence which results in an alteration in the coding sequence of a translated sequence, e.g., one which results in the substitution of one amino acid for another in a protein product, e.g., transforming a mutant allele into a wild type allele, transforming a wild type allele into a mutant allele, and/or introducing a stop codon, insertion of an amino acid residue, deletion of an amino acid residue, or a nonsense mutation. In certain embodiments, the template nucleic acid can include sequence which results in an alteration in a non-coding sequence, e.g., an alteration in an exon or in a 5′ or 3′ non-translated or non-transcribed region. Such alterations include an alteration in a control element, e.g., a promoter, enhancer, and an alteration in a cis-acting or trans-acting control element.

[0261] A template nucleic acid having homology with a target position in a target gene may be used to alter the structure of a target sequence. The template sequence may be used to alter an unwanted structure, e.g., an unwanted or mutant nucleotide. The template nucleic acid may include sequence which, when integrated, results in: decreasing the activity of a positive control element; increasing the activity of a positive control element; decreasing the activity of a negative control element; increasing the activity of a negative control element; decreasing the expression of a gene; increasing the expression of a gene; increasing resistance to a disorder or disease; increasing resistance to viral entry; correcting a mutation or altering an unwanted amino acid residue conferring, increasing, abolishing or decreasing a biological property of a gene product, e.g., increasing the enzymatic activity of an enzyme, or increasing the ability of a gene product to interact with another molecule.

[0262] The template nucleic acid may include sequence which results in: a change in sequence of 1, 2, 3, 4, 5, 6, 7, 8, 9, 10, 11, 12 or more nucleotides of the target sequence. In an embodiment, the template nucleic acid may be 20+/−10, 30+/−10, 40+/−10, 50+/−10, 60+/−10, 70+/−10, 80 +/−10, 90+/−10, 100+/−10, 110+/−10, 120+/−10, 130+/−10, 140+/−10, 150+/−10, 160+/−10, 170+/−10, 180+/−10, 190+/−10, 200+/−10, 210+/−10, or 220+/−10 nucleotides in length. In an embodiment, the template nucleic acid may be 30+/−20, 40+/−20, 50+/−20, 60+/−20, 70+/−20, 80+/−20, 90+/−20, 100+/−20, 110+/−20, 120+/−20, 130+/−20, 140+/−20, 150+/−20, 160+/−20, 170+/−20, 180+/−20, 190+/−20, 200+/−20, 210+/−20, or 220+/−20 nucleotides in length. In an embodiment, the template nucleic acid is 10 to 1,000, 20 to 900, 30 to 800, 40 to 700, 50 to 600, 50 to 500, 50 to 400, 50 to 300, 50 to 200, or 50 to 100 nucleotides in length.

[0263] A template nucleic acid comprises the following components: [5′ homology arm]-[replacement sequence]-[3′ homology arm]. The homology arms provide for recombination into the chromosome, thus replacing the undesired element, e.g., a mutation or signature, with the replacement sequence. In an embodiment, the homology arms flank the most distal cleavage sites. In an embodiment, the 3′ end of the 5′ homology arm is the position next to the 5′ end of the replacement sequence. In an embodiment, the 5′ homology arm can extend at least 10, 20, 30, 40, 50, 100, 200, 300, 400, 500, 600, 700, 800, 900, 1000, 1500, or 2000 nucleotides 5′ from the 5′ end of the replacement sequence. In an embodiment, the 5′ end of the 3′ homology arm is the position next to the 3′ end of the replacement sequence. In an embodiment, the 3′ homology arm can extend at least 10, 20, 30, 40, 50, 100, 200, 300, 400, 500, 600, 700, 800, 900, 1000, 1500, or 2000 nucleotides 3′ from the 3′ end of the replacement sequence.

[0264] In certain embodiments, one or both homology arms may be shortened to avoid including certain sequence repeat elements. For example, a 5′ homology arm may be shortened to avoid a sequence repeat element. In other embodiments, a 3′ homology arm may be shortened to avoid a sequence repeat element. In some embodiments, both the 5′ and the 3′ homology arms may be shortened to avoid including certain sequence repeat elements.

[0265] In certain embodiments, template nucleic acids for correcting a mutation may designed for use as a single-stranded oligonucleotide. When using a single-stranded oligonucleotide, 5′ and 3′ homology arms may range up to about 200 base pairs (bp) in length, e.g., at least 25, 50, 75, 100, 125, 150, 175, or 200 bp in length.

[0266] In some embodiments, the composition, system, or component thereof can promote Non-Homologous End-Joining (NHEJ). In some embodiments, modification of a polynucleotide by a composition, system, or a component thereof, such as a diseased polynucleotide, can include NHEJ. In some embodiments, promotion of this repair pathway by the composition, system, or a component thereof can be used to target gene or polynucleotide specific knock-outs and/or knock-ins. In some embodiments, promotion of this repair pathway by the composition, system, or a component thereof can be used to generate NHEJ-mediated indels. Nuclease-induced NHEJ can also be used to remove (e.g., delete) sequence in a gene of interest. Generally, NHEJ repairs a double-strand break in the DNA by joining together the two ends; however, generally, the original sequence is restored only if two compatible ends, exactly as they were formed by the double-strand break, are perfectly ligated. The DNA ends of the double-strand break are frequently the subject of enzymatic processing, resulting in the addition or removal of nucleotides, at one or both strands, prior to rejoining of the ends. This results in the presence of insertion and/or deletion (indeD mutations in the DNA sequence at the site of the NHEJ repair. The indel can range in size from 1-50 or more base pairs. In some embodiments thee indel can be 1, 2, 3, 4, 5, 6, 7, 8, 9, 10, 11, 12, 13, 14, 15, 16, 17, 18, 19, 20, 21, 22, 23, 24, 25, 26, 27, 28, 29, 30, 31, 32, 33, 34, 35, 36, 37, 38, 39, 40, 41, 42, 43, 44, 45, 46, 47, 48, 49, 50, 51, 52, 53, 54, 55, 56, 57, 58, 59, 60, 61, 62, 63, 64, 65, 66, 67, 68, 69, 70, 71, 72, 73, 74, 75, 76, 77, 78, 79, 80, 81, 82, 83, 84, 85, 86, 87, 88, 89, 90, 91, 92, 93, 94, 95, 96, 97, 98, 99, 100, 101, 102, 103, 104, 105, 106, 107, 108, 109, 110, 111, 112, 113, 114, 115, 116, 117, 118, 119, 120, 121, 122, 123, 124, 125, 126, 127, 128, 129, 130, 131, 132, 133, 134, 135, 136, 137, 138, 139, 140, 141, 142, 143, 144, 145, 146, 147, 148, 149, 150, 151, 152, 153, 154, 155, 156, 157, 158, 159, 160, 161, 162, 163, 164, 165, 166, 167, 168, 169, 170, 171, 172, 173, 174, 175, 176, 177, 178, 179, 180, 181, 182, 183, 184, 185, 186, 187, 188, 189, 190, 191, 192, 193, 194, 195, 196, 197, 198, 199, 200, 201, 202, 203, 204, 205, 206, 207, 208, 209, 210, 211, 212, 213, 214, 215, 216, 217, 218, 219, 220, 221, 222, 223, 224, 225, 226, 227, 228, 229, 230, 231, 232, 233, 234, 235, 236, 237, 238, 239, 240, 241, 242, 243, 244, 245, 246, 247, 248, 249, 250, 251, 252, 253, 254, 255, 256, 257, 258, 259, 260, 261, 262, 263, 264, 265, 266, 267, 268, 269, 270, 271, 272, 273, 274, 275, 276, 277, 278, 279, 280, 281, 282, 283, 284, 285, 286, 287, 288, 289, 290, 291, 292, 293, 294, 295, 296, 297, 298, 299, 300, 301, 302, 303, 304, 305, 306, 307, 308, 309, 310, 311, 312, 313, 314, 315, 316, 317, 318, 319, 320, 321, 322, 323, 324, 325, 326, 327, 328, 329, 330, 331, 332, 333, 334, 335, 336, 337, 338, 339, 340, 341, 342, 343, 344, 345, 346, 347, 348, 349, 350, 351, 352, 353, 354, 355, 356, 357, 358, 359, 360, 361, 362, 363, 364, 365, 366, 367, 368, 369, 370, 371, 372, 373, 374, 375, 376, 377, 378, 379, 380, 381, 382, 383, 384, 385, 386, 387, 388, 389, 390, 391, 392, 393, 394, 395, 396, 397, 398, 399, 400, 401, 402, 403, 404, 405, 406, 407, 408, 409, 410, 411, 412, 413, 414, 415, 416, 417, 418, 419, 420, 421, 422, 423, 424, 425, 426, 427, 428, 429, 430, 431, 432, 433, 434, 435, 436, 437, 438, 439, 440, 441, 442, 443, 444, 445, 446, 447, 448, 449, 450, 451, 452, 453, 454, 455, 456, 457, 458, 459, 460, 461, 462, 463, 464, 465, 466, 467, 468, 469, 470, 471, 472, 473, 474, 475, 476, 477, 478, 479, 480, 481, 482, 483, 484, 485, 486, 487, 488, 489, 490, 491, 492, 493, 494, 495, 496, 497, 498, 499, or 500 base pairs or more. If a double-strand break is targeted near to a short target sequence, the deletion mutations caused by the NHEJ repair often span, and therefore remove, the unwanted nucleotides. For the deletion of larger DNA segments, introducing two double-strand breaks, one on each side of the sequence, can result in NHEJ between the ends with removal of the entire intervening sequence. Both of these approaches can be used to delete specific DNA sequences.

[0267] In some embodiments, composition, system, mediated NHEJ can be used in the method to delete small sequence motifs. In some embodiments, composition, system, mediated NHEJ can be used in the method to generate NHEJ-mediate indels that can be targeted to the gene, e.g., a coding region, e.g., an early coding region of a gene of interest can be used to knockout (i.e., eliminate expression of) a gene of interest. For example, early coding region of a gene of interest includes sequence immediately following a transcription start site, within a first exon of the coding sequence, or within 500 bp of the transcription start site (e.g., less than 500, 450, 400, 350, 300, 250, 200, 150, 100 or 50 bp). In an embodiment, in which a guide RNA and Cas effector generate a double strand break for the purpose of inducing NHEJ-mediated indels, a guide RNA may be configured to position one double-strand break in close proximity to a nucleotide of the target position. In an embodiment, the cleavage site may be between 0-500 bp away from the target position (e.g., less than 500, 400, 300, 200, 100, 50, 40, 30, 25, 20, 15, 10, 9, 8, 7, 6, 5, 4, 3, 2 or 1 bp from the target position). In an embodiment, in which two guide RNAs complexing with one or more Cas nickases induce two single strand breaks for the purpose of inducing NHEJ-mediated indels, two guide RNAs may be configured to position two single-strand breaks to provide for NHEJ repair a nucleotide of the target position.

[0268] For minimization of toxicity and off-target effect, it may be important to control the concentration of Cas mRNA and guide RNA delivered. Optimal concentrations of Cas mRNA and guide RNA can be determined by testing different concentrations in a cellular or non-human eukaryote animal model and using deep sequencing the analyze the extent of modification at potential off-target genomic loci. Alternatively, to minimize the level of toxicity and off-target effect, Cas nickase mRNA (for example S. pyogenes Cas9 with the D10A mutation) can be delivered with a pair of guide RNAs targeting a site of interest. Guide sequences and strategies to minimize toxicity and off-target effects can be as in WO 2014/093622 (PCT/US2013/074667); or, via mutation. Others are as described elsewhere herein.

[0269] Typically, in the context of an endogenous CRISPR or CAST system, formation of a CRISPR or CAST complex (comprising a guide sequence hybridized to a target sequence and complexed with one or more Cas proteins) results in cleavage, nicking, and/or another modification of one or both strands in or near (e.g., within 1, 2, 3, 4, 5, 6, 7, 8, 9, 10, 20, 50, or more base pairs from) the target sequence. In some embodiments, the tracr sequence, which may comprise or consist of all or a portion of a wild-type tracr sequence (e.g., about or more than about 20, 26, 32, 45, 48, 54, 63, 67, 85, or more nucleotides of a wild-type tracr sequence), can also form part of a CRISPR complex, such as by hybridization along at least a portion of the tracr sequence to all or a portion of a tracr mate sequence that is operably linked to the guide sequence.

[0270] In some embodiments, a method of modifying a target polynucleotide in a cell to treat or prevent a disease can include allowing a composition, system, or component thereof to bind to the target polynucleotide, e.g., to effect cleavage, nicking, or other modification as the composition, system, is capable of said target polynucleotide, thereby modifying the target polynucleotide, wherein the composition, system, or component thereof, complex with a guide sequence, and hybridize said guide sequence to a target sequence within the target polynucleotide, wherein said guide sequence is optionally linked to a tracr mate sequence, which in turn can hybridize to a tracr sequence. In some of these embodiments, the composition, system, or component thereof can be or include a CRISPR-Cas effector complexed with a guide sequence. In some embodiments, modification can include cleaving or nicking one or two strands at the location of the target sequence by one or more components of the composition, system, or component thereof.

[0271] The cleavage, nicking, or other modification capable of being performed by the composition, system, can modify transcription of a target polynucleotide. In some embodiments, modification of transcription can include decreasing transcription of a target polynucleotide. In some embodiments, modification can include increasing transcription of a target polynucleotide. In some embodiments, the method includes repairing said cleaved target polynucleotide by homologous recombination with an exogenous template polynucleotide, wherein said repair results in a modification such as, but not limited to, an insertion, deletion, or substitution of one or more nucleotides of said target polynucleotide. In some embodiments, said modification results in one or more amino acid changes in a protein expressed from a gene comprising the target sequence. In some embodiments, the modification imparted by the composition, system, or component thereof provides a transcript and/or protein that can correct a disease or a symptom thereof, including but not limited to, any of those described in greater detail elsewhere herein.

[0272] In some embodiments, the method of treating or preventing a disease can include delivering one or more vectors or vector systems to a cell, such as a eukaryotic or prokaryotic cell, wherein one or more vectors or vector systems include the composition, system, or component thereof. In some embodiments, the vector(s) or vector system(s) can be a viral vector or vector system, such as an AAV or lentiviral vector system, which are described in greater detail elsewhere herein. In some embodiments, the method of treating or preventing a disease can include delivering one or more viral particles, such as an AAV or lentiviral particle, containing the composition, system, or component thereof. In some embodiments, the viral particle has a tissue specific tropism. In some embodiments, the viral particle has a liver, muscle, eye, heart, pancreas, kidney, neuron, epithelial cell, endothelial cell, astrocyte, glial cell, immune cell, or red blood cell specific tropism.

[0273] It will be understood that the composition, system, according to the invention as described herein, such as the composition, system, for use in the methods according to the invention as described herein, may be suitably used for any type of application known for composition, system, preferably in eukaryotes. In certain aspects, the application is therapeutic, preferably therapeutic in a eukaryote organism, such as including but not limited to animals (including human), plants, algae, fungi (including yeasts), etc. Alternatively, or in addition, in certain aspects, the application may involve accomplishing or inducing one or more particular traits or characteristics, such as genotypic and/or phenotypic traits or characteristics, as also described elsewhere herein.

### Treating Diseases of the Circulatory System

[0274] In some embodiments, the composition, system, and/or component thereof described herein can be used to treat and/or prevent a circulatory system disease. Exemplary disease is provided, for example, in Tables 3 and 4. In some embodiments the plasma exosomes of Wahlgren et al. (Nucleic Acids Research, 2012, Vol. 40, No. 17e130) can be used to deliver the composition, system, and/or component thereof described herein to the blood. In some embodiments, the circulatory system disease can be treated by using a lentivirus to deliver the composition, system, described herein to modify hematopoietic stem cells (HSCs) in vivo or ex vivo (see e.g., Drakopoulou, “Review Article, The Ongoing Challenge of Hematopoietic Stem Cell-Based Gene Therapy for β-Thalassemia,” Stem Cells International, Volume 2011, Article ID 987980, 10 pages, doi: 10.4061/2011/987980, which can be adapted for use with the composition, system, herein in view of the description herein). In some embodiments, the circulatory system disorder can be treated by correcting HSCs as to the disease using a composition, system, herein or a component thereof, wherein the composition, system, optionally includes a suitable HDR repair template (see e.g., Cavazzana, “Outcomes of Gene Therapy for β-Thalassemia Major via Transplantation of Autologous Hematopoietic Stem Cells Transduced Ex Vivo with a Lentiviral BA-T87Q-Globin Vector.”; Cavazzana-Calvo, “Transfusion independence and HMGA2 activation after gene therapy of human B-thalassaemia”, Nature 467, 318-322 (16 Sep. 2010) doi: 10.1038/nature09328; Nienhuis, “Development of Gene Therapy for Thalassemia, Cold Spring Harbor Perspectives in Medicine, doi: 10.1101/cshperspect.a011833 (2012), LentiGlobin BB305, a lentiviral vector containing an engineered B-globin gene (BA-T87Q; and Xie et al., “Seamless gene correction of B-thalassaemia mutations in patient-specific iPSCs using CRISPR/Cas9 and piggyback” Genome Research gr. 173427.114 (2014) http://www.genome.org/cgi/doi/10.1101/gr.173427.114 (Cold Spring Harbor Laboratory Press; Watts, “Hematopoietic Stem Cell Expansion and Gene Therapy” Cytotherapy 13 (10): 1164-1171. doi: 10.3109/14653249.2011.620748 (2011), which can be adapted for use with the composition, system, herein in view of the description herein). In some embodiments, iPSCs can be modified using a composition, system, described herein to correct a disease polynucleotide associated with a circulatory disease. In this regard, the teachings of Xu et al. (Sci Rep. 2015 Jul. 9; 5:12065. doi: 10.1038/srep12065) and Song et al. (Stem Cells Dev. 2015 May 1; 24 (9): 1053-65. doi: 10.1089/scd.2014.0347. Epub 2015 Feb. 5) with respect to modifying iPSCs can be adapted for use in view of the description herein with the composition, system, described herein.

[0275] The term “Hematopoietic Stem Cell” or “HSC” refers broadly those cells considered to be an HSC, e.g., blood cells that give rise to all the other blood cells and are derived from mesoderm; located in the red bone marrow, which is contained in the core of most bones. HSCs of the invention include cells having a phenotype of hematopoietic stem cells, identified by small size, lack of lineage (lin) markers, and markers that belong to the cluster of differentiation series, like: CD34, CD38, CD90, CD133, CD105, CD45, and also c-kit,-the receptor for stem cell factor. Hematopoietic stem cells are negative for the markers that are used for detection of lineage commitment, and are, thus, called Lin-; and, during their purification by FACS, a number of up to 14 different mature blood-lineage markers, e.g., CD13 & CD33 for myeloid, CD71 for erythroid, CD19 for B cells, CD61 for megakaryocytic, etc. for humans; and, B220 (murine CD45) for B cells, Mac-1 (CD11b/CD18) for monocytes, Gr-1 for Granulocytes, Ter119 for erythroid cells, I17Ra, CD3, CD4, CD5, CD8 for T cells, etc. Mouse HSC markers: CD34lo/−, SCA-1+, Thy 1.1+/lo, CD38+, C-kit+, lin−, and Human HSC markers: CD34+, CD59+, Thyl/CD90+, CD38lo/−, C-kit/CD117+, and lin−. HSCs are identified by markers. Hence in embodiments discussed herein, the HSCs can be CD34+ cells. HSCs can also be hematopoietic stem cells that are CD34-/CD38-. Stem cells that may lack c-kit on the cell surface that are considered in the art as HSCs are within the ambit of the invention, as well as CD133+ cells likewise considered HSCs in the art.

[0276] The CRISPR-Cas system may be engineered to target genetic locus or loci in HSCs. In some embodiments, the Cas effector(s) can be codon-optimized for a eukaryotic cell and especially a mammalian cell, e.g., a human cell, for instance, HSC, or iPSC and sgRNA targeting a locus or loci in HSC, such as circulatory disease, can be prepared. These may be delivered via particles. The particles may be formed by the Cas effector (e.g., Cas9) protein and the gRNA being admixed. The gRNA and Cas effector (e.g., Cas9) protein mixture can be, for example, admixed with a mixture comprising or consisting essentially of or consisting of surfactant, phospholipid, biodegradable polymer, lipoprotein and alcohol, whereby particles containing the gRNA and Cas effector (e.g., Cas9) protein may be formed. The invention comprehends so making particles and particles from such a method as well as uses thereof. Particles suitable delivery of the CRISRP-Cas systems in the context of blood or circulatory system or HSC delivery to the blood or circulatory system are described in greater detail elsewhere herein.

[0277] In some embodiments, after ex vivo modification the HSCs or iPCS can be expanded prior to administration to the subject. Expansion of HSCs can be via any suitable method such as that described by, Lee, “Improved ex vivo expansion of adult hematopoietic stem cells by overcoming CUL4-mediated degradation of HOXB4.” Blood. 2013 May 16; 121 (20): 4082-9. doi: 10.1182/blood-2012-09-455204. Epub 2013 Mar. 21.

[0278] In some embodiments, the HSCs or iPSCs modified can be autologous. In some embodiments, the HSCs or iPSCs can be allogenic. In addition to the modification of the disease gene(s), allogenic cells can be further modified using the composition, system, described herein to reduce the immunogenicity of the cells when delivered to the recipient. Such techniques are described elsewhere herein and e.g., Cartier, “MINI-SYMPOSIUM: X-Linked Adrenoleukodystrophypa, Hematopoietic Stem Cell Transplantation and Hematopoietic Stem Cell Gene Therapy in X-Linked Adrenoleukodystrophy,” Brain Pathology 20 (2010) 857-862, which can be adapted for use with the composition, system, herein.

### Treating Diseases of the Brain

[0279] In some embodiments, the compositions, systems, described herein can be used to treat diseases of the brain and CNS. Delivery options for the brain include encapsulation of CRISPR enzyme and guide RNA in the form of either DNA or RNA into liposomes and conjugating to molecular Trojan horses for trans-blood brain barrier (BBB) delivery. Molecular Trojan horses have been shown to be effective for delivery of B-gal expression vectors into the brain of non-human primates. The same approach can be used to delivery vectors containing CRISPR enzyme and guide RNA. For instance, Xia C F and Boado R J, Pardridge W M (“Antibody-mediated targeting of siRNA via the human insulin receptor using avidin-biotin technology.” Mol Pharm. 2009 May-Jun;6 (3): 747-51. doi: 10.1021/mp800194) describes how delivery of short interfering RNA (siRNA) to cells in culture, and in vivo, is possible with combined use of a receptor-specific monoclonal antibody (mAb) and avidin-biotin technology. The authors also report that because the bond between the targeting mAb and the siRNA is stable with avidin-biotin technology, and RNAi effects at distant sites such as brain are observed in vivo following an intravenous administration of the targeted siRNA, the teachings of which can be adapted for use with the compositions, systems, herein. In other embodiments, an artificial virus can be generated for CNS and/or brain delivery. See e.g., Zhang et al. (Mol Ther. 2003 January;7 (1): 11-8.), the teachings of which can be adapted for use with the compositions, systems, herein.

### Treating Hearing Diseases

[0280] In some embodiments the composition, system, described herein can be used to treat a hearing disease or hearing loss in one or both ears. Deafness is often caused by lost or damaged hair cells that cannot relay signals to auditory neurons. In such cases, cochlear implants may be used to respond to sound and transmit electrical signals to the nerve cells. But these neurons often degenerate and retract from the cochlea as fewer growth factors are released by impaired hair cells.

[0281] In some embodiments, the composition, system, or modified cells can be delivered to one or both ears for treating or preventing hearing disease or loss by any suitable method or technique. Suitable methods and techniques include, but are not limited to, those set forth in U.S. patent application No. 20120328580 describes injection of a pharmaceutical composition into the ear (e.g., auricular administration), such as into the luminae of the cochlea (e.g., the Scala media, Sc vestibulae, and Sc tympani), e.g., using a syringe, e.g., a single-dose syringe. For example, one or more of the compounds described herein can be administered by intratympanic injection (e.g., into the middle ear), and/or injections into the outer, middle, and/or inner ear; administration in situ, via a catheter or pump (see e.g., Mckenna et al., (U.S. Publication No. 2006/0030837) and Jacobsen et al., (U.S. Pat. No. 7,206,639); administration in combination with a mechanical device such as a cochlear implant or a hearing aid, which is worn in the outer ear (see e.g., U.S. Publication No. 2007/0093878, which provides an exemplary cochlear implant suitable for delivery of the compositions, systems, described herein to the ear). Such methods are routinely used in the art, for example, for the administration of steroids and antibiotics into human ears. Injection can be, for example, through the round window of the ear or through the cochlear capsule. Other inner ear administration methods are known in the art (see, e.g., Salt and Plontke, Drug Discovery Today, 10:1299-1306, 2005). In some embodiments, a catheter or pump can be positioned, e.g., in the ear (e.g., the outer, middle, and/or inner ear) of a patient during a surgical procedure. In some embodiments, a catheter or pump can be positioned, e.g., in the ear (e.g., the outer, middle, and/or inner ear) of a patient without the need for a surgical procedure.

[0282] In general, the cell therapy methods described in U.S. patent application No. 20120328580 can be used to promote complete or partial differentiation of a cell to or towards a mature cell type of the inner ear (e.g., a hair celD in vitro. Cells resulting from such methods can then be transplanted or implanted into a patient in need of such treatment. The cell culture methods required to practice these methods, including methods for identifying and selecting suitable cell types, methods for promoting complete or partial differentiation of selected cells, methods for identifying complete or partially differentiated cell types, and methods for implanting complete or partially differentiated cells are described below.

[0283] Cells suitable for use in the present invention include, but are not limited to, cells that are capable of differentiating completely or partially into a mature cell of the inner ear, e.g., a hair cell (e.g., an inner and/or outer hair celD, when contacted, e.g., in vitro, with one or more of the compounds described herein. Exemplary cells that are capable of differentiating into a hair cell include, but are not limited to stem cells (e.g., inner ear stem cells, adult stem cells, bone marrow derived stem cells, embryonic stem cells, mesenchymal stem cells, skin stem cells, iPS cells, and fat derived stem cells), progenitor cells (e.g., inner ear progenitor cells), support cells (e.g., Deiters' cells, pillar cells, inner phalangeal cells, tectal cells and Hensen's cells), and/or germ cells. The use of stem cells for the replacement of inner ear sensory cells is described in Li et al., (U.S. Publication No. 2005/0287127) and Li et al., (U.S. patent Ser. No. 11/953,797). The use of bone marrow derived stem cells for the replacement of inner ear sensory cells is described in Edge et al., PCT/US2007/084654. iPS cells are described, e.g., at Takahashi et al., Cell, Volume 131, Issue 5, Pages 861-872 (2007); Takahashi and Yamanaka, Cell 126, 663-76 (2006); Okita et al., Nature 448, 260-262 (2007); Yu, J. et al., Science 318 (5858): 1917-1920 (2007); Nakagawa et al., Nat. Biotechnol. 26:101-106 (2008); and Zaehres and Scholer, Cell 131 (5): 834-835 (2007). Such suitable cells can be identified by analyzing (e.g., qualitatively or quantitatively) the presence of one or more tissue specific genes. For example, gene expression can be detected by detecting the protein product of one or more tissue-specific genes. Protein detection techniques involve staining proteins (e.g., using cell extracts or whole cells) using antibodies against the appropriate antigen. In this case, the appropriate antigen is the protein product of the tissue-specific gene expression. Although, in principle, a first antibody (i.e., the antibody that binds the antigen) can be labeled, it is more common (and improves the visualization) to use a second antibody directed against the first (e.g., an anti-IgG). This second antibody is conjugated either with fluorochromes, or appropriate enzymes for colorimetric reactions, or gold beads (for electron microscopy), or with the biotin-avidin system, so that the location of the primary antibody, and thus the antigen, can be recognized.

[0284] The composition and system may be delivered to the ear by direct application of pharmaceutical composition to the outer ear, with compositions modified from US Published application, 20110142917. In some embodiments the pharmaceutical composition is applied to the ear canal. Delivery to the ear may also be referred to as aural or otic delivery.

[0285] In some embodiments, the compositions, systems, or components thereof and/or vectors or vector systems can be delivered to ear via a transfection to the inner ear through the intact round window by a novel proteidic delivery technology which may be applied to the nucleic acid-targeting system of the present invention (see, e.g., Qi et al., Gene Therapy (2013), 1-9). About 40 μl of 10 mM RNA may be contemplated as the dosage for administration to the ear.

[0286] According to Rejali et al. (Hear Res. 2007 June;228 (1-2): 180-7), cochlear implant function can be improved by good preservation of the spiral ganglion neurons, which are the target of electrical stimulation by the implant and brain derived neurotrophic factor (BDNF) has previously been shown to enhance spiral ganglion survival in experimentally deafened ears. Rejali et al. tested a modified design of the cochlear implant electrode that includes a coating of fibroblast cells transduced by a viral vector with a BDNF gene insert. To accomplish this type of ex vivo gene transfer, Rejali et al. transduced guinea pig fibroblasts with an adenovirus with a BDNF gene cassette insert, and determined that these cells secreted BDNF and then attached BDNF-secreting cells to the cochlear implant electrode via an agarose gel, and implanted the electrode in the scala tympani. Rejali et al. determined that the BDNF expressing electrodes were able to preserve significantly more spiral ganglion neurons in the basal turns of the cochlea after 48 days of implantation when compared to control electrodes and demonstrated the feasibility of combining cochlear implant therapy with ex vivo gene transfer for enhancing spiral ganglion neuron survival. Such a system may be applied to the nucleic acid-targeting system of the present invention for delivery to the ear.

[0287] In some embodiments, the system set forth in Mukherjea et al. (Antioxidants & Redox Signaling, Volume 13, Number 5, 2010) can be adapted for transtympanic administration of the composition, system, or component thereof to the ear. In some embodiments, a dosage of about 2 mg to about 4 mg of CRISPR Cas for administration to a human.

[0288] In some embodiments, the system set forth in Jung et al. (Molecular Therapy, vol. 21 no. 4, 834-841 Apr. 2013) can be adapted for vestibular epithelial delivery of the composition, system, or component thereof to the ear. In some embodiments, a dosage of about 1 to about 30 mg of CRISPR Cas for administration to a human.

### Treating Diseases in Non-Dividing Cells

[0289] In some embodiments, the gene or transcript to be corrected is in a non-dividing cell. Exemplary non-dividing cells are muscle cells or neurons. Non-dividing (especially non-dividing, fully differentiated) cell types present issues for gene targeting or genome engineering, for example because homologous recombination (HR) is generally suppressed in the G1 cell-cycle phase. However, while studying the mechanisms by which cells control normal DNA repair systems, Durocher discovered a previously unknown switch that keeps HR “off” in non-dividing cells and devised a strategy to toggle this switch back on. Orthwein et al. (Daniel Durocher's lab at the Mount Sinai Hospital in Ottawa, Canada) recently reported (Nature 16142, published online 9 Dec. 2015) have shown that the suppression of HR can be lifted and gene targeting successfully concluded in both kidney (293T) and osteosarcoma (U2OS) cells. Tumor suppressors, BRCA1, PALB2 and BRAC2 are known to promote DNA DSB repair by HR. They found that formation of a complex of BRCA1 with PALB2-BRAC2 is governed by a ubiquitin site on PALB2, such that action on the site by an E3 ubiquitin ligase. This E3 ubiquitin ligase is composed of KEAP1 (a PALB2-interacting protein) in complex with cullin −3 (CUL3)-RBX1. PALB2 ubiquitylation suppresses its interaction with BRCA1 and is counteracted by the deubiquitylase USP11, which is itself under cell cycle control. Restoration of the BRCA1-PALB2 interaction combined with the activation of DNA-end resection is sufficient to induce homologous recombination in G1, as measured by a number of methods including a CRISPR-Cas9-based gene-targeting assay directed at USP11 or KEAP1 (expressed from a pX459 vector). However, when the BRCA1-PALB2 interaction was restored in resection-competent G1 cells using either KEAP1 depletion or expression of the PALB2-KR mutant, a robust increase in gene-targeting events was detected. These teachings can be adapted for and/or applied to the Cas compositions, systems, described herein.

[0290] Thus, reactivation of HR in cells, especially non-dividing, fully differentiated cell types is preferred, in some embodiments. In some embodiments, promotion of the BRCA1-PALB2 interaction is preferred in some embodiments. In some embodiments, the target cell is a non-dividing cell. In some embodiments, the target cell is a neuron or muscle cell. In some embodiments, the target cell is targeted in vivo. In some embodiments, the cell is in G1 and HR is suppressed. In some embodiments, use of KEAP1 depletion, for example inhibition of expression of KEAP1 activity, is preferred. KEAP1 depletion may be achieved through siRNA, for example as shown in Orthwein et al. Alternatively, expression of the PALB2-KR mutant (lacking all eight Lys residues in the BRCA1-interaction domain is preferred, either in combination with KEAP1 depletion or alone. PALB2-KR interacts with BRCA1 irrespective of cell cycle position. Thus, promotion or restoration of the BRCA1-PALB2 interaction, especially in G1 cells, is preferred in some embodiments, especially where the target cells are non-dividing, or where removal and return (ex vivo gene targeting) is problematic, for example neuron or muscle cells. KEAP1 siRNA is available from ThermoFischer. In some embodiments, a BRCA1-PALB2 complex may be delivered to the G1 cell. In some embodiments, PALB2 deubiquitylation may be promoted for example by increased expression of the deubiquitylase USP11, so it is envisaged that a construct may be provided to promote or up-regulate expression or activity of the deubiquitylase USP11.

### Treating Diseases of the Eye

[0291] In some embodiments, the disease to be treated is a disease that affects the eyes. Thus, in some embodiments, the composition, system, or component thereof described herein is delivered to one or both eyes.

[0292] The composition, system, can be used to correct ocular defects that arise from several genetic mutations further described in Genetic Diseases of the Eye, Second Edition, edited by Elias I. Traboulsi, Oxford University Press, 2012.

[0293] In some embodiments, the condition to be treated or targeted is an eye disorder. In some embodiments, the eye disorder may include glaucoma. In some embodiments, the eye disorder includes a retinal degenerative disease. In some embodiments, the retinal degenerative disease is selected from Stargardt disease, Bardet-Biedl Syndrome, Best disease, Blue Cone Monochromacy, Choroidermia, Cone-rod dystrophy, Congenital Stationary Night Blindness, Enhanced S-Cone Syndrome, Juvenile X-Linked Retinoschisis, Leber Congenital Amaurosis, Malattia Leventinesse, Norrie Disease or X-linked Familial Exudative Vitreoretinopathy, Pattern Dystrophy, Sorsby Dystrophy, Usher Syndrome, Retinitis Pigmentosa, Achromatopsia or Macular dystrophies or degeneration, Retinitis Pigmentosa, Achromatopsia, and age related macular degeneration. In some embodiments, the retinal degenerative disease is Leber Congenital Amaurosis (LCA) or Retinitis Pigmentosa. Other exemplary eye diseases are described in greater detail elsewhere herein.

[0294] In some embodiments, the composition, system, is delivered to the eye, optionally via intravitreal injection or subretinal injection. Intraocular injections may be performed with the aid of an operating microscope. For subretinal and intravitreal injections, eyes may be prolapsed by gentle digital pressure and fundi visualized using a contact lens system consisting of a drop of a coupling medium solution on the cornea covered with a glass microscope slide coverslip. For subretinal injections, the tip of a 10-mm 34-gauge needle, mounted on a 5-μl Hamilton syringe may be advanced under direct visualization through the superior equatorial sclera tangentially towards the posterior pole until the aperture of the needle was visible in the subretinal space. Then, 2 μl of vector suspension may be injected to produce a superior bullous retinal detachment, thus confirming subretinal vector administration. This approach creates a self-sealing sclerotomy allowing the vector suspension to be retained in the subretinal space until it is absorbed by the RPE, usually within 48 h of the procedure. This procedure may be repeated in the inferior hemisphere to produce an inferior retinal detachment. This technique results in the exposure of approximately 70% of neurosensory retina and RPE to the vector suspension. For intravitreal injections, the needle tip may be advanced through the sclera 1 mm posterior to the corneoscleral limbus and 2 μl of vector suspension injected into the vitreous cavity. For intracameral injections, the needle tip may be advanced through a corneoscleral limbal paracentesis, directed towards the central cornea, and 2 μl of vector suspension may be injected. For intracameral injections, the needle tip may be advanced through a corneoscleral limbal paracentesis, directed towards the central cornea, and 2 μl of vector suspension may be injected. These vectors may be injected at titers of either 1.0-1.4×10¹⁰ or 1.0-1.4×10⁹ transducing units (TU)/ml.

[0295] In some embodiments, for administration to the eye, lentiviral vectors. In some embodiments, the lentiviral vector is an equine infectious anemia virus (EIAV) vector. Exemplary EIAV vectors for eye delivery are described in Balagaan, J Gene Med 2006; 8:275-285, Published online 21 Nov. 2005 in Wiley InterScience (www.interscience.wiley.com). DOI: 10.1002/jgm.845; Binley et al., HUMAN GENE THERAPY 23:980-991 (September 2012), which can be adapted for use with the composition, system, described herein. In some embodiments, the dosage can be 1.1×10⁵ transducing units per eye (TU/eye) in a total volume of 100 μl.

[0296] Other viral vectors can also be used for delivery to the eye, such as AAV vectors, such as those described in Campochiaro et al., Human Gene Therapy 17:167-176 (February 2006), Millington-Ward et al. (Molecular Therapy, vol. 19 no. 4, 642-649 Apr. 2011; Dalkara et al. (Sci Transl Med 5, 189ra76 (2013)), which can be adapted for use with the composition, system, described herein. In some embodiments, the dose can range from about 106 to 109.5 particle units. In the context of the Millington-Ward AAV vectors, a dose of about 2×10¹¹ to about 6×10¹³ virus particles can be administered. In the context of Dalkara vectors, a dose of about 1×10¹⁵ to about 1×10¹⁶ vg/ml administered to a human.

[0297] In some embodiments, the sd-rxRNA® system of RXi Pharmaceuticals may be used/and or adapted for delivering composition, system, to the eye. In this system, a single intravitreal administration of 3 μg of sd-rxRNA results in sequence-specific reduction of PPIB mRNA levels for 14 days. The sd-rxRNA® system may be applied to the nucleic acid-targeting system of the present invention, contemplating a dose of about 3 to 20 mg of CRISPR administered to a human.

[0298] In other embodiments, the methods of US Patent Publication No. 20130183282, which is directed to methods of cleaving a target sequence from the human rhodopsin gene, may also be modified to the nucleic acid-targeting system of the present invention.

[0299] In other embodiments, the methods of US Patent Publication No. 20130202678 for treating retinopathies and sight-threatening ophthalmologic disorders relating to delivering of the Puf-A gene (which is expressed in retinal ganglion and pigmented cells of eye tissues and displays a unique anti-apoptotic activity) to the sub-retinal or intravitreal space in the eye. In particular, desirable targets are zgc: 193933, prdm1a, spata2, tex10, rbb4, ddx3, zp2.2, Blimp-1 and HtrA2, all of which may be targeted by the composition, system, of the present invention.

[0300] Wu (Cell Stem Cell, 13:659-62, 2013) designed a guide RNA that led Cas9 to a single base pair mutation that causes cataracts in mice, where it induced DNA cleavage. Then using either the other wild-type allele or oligos given to the zygotes repair mechanisms corrected the sequence of the broken allele and corrected the cataract-causing genetic defect in mutant mouse. This approach can be adapted to and/or applied to the compositions, systems, described herein.

[0301] US Patent Publication No. 20120159653, describes use of zinc finger nucleases to genetically modify cells, animals and proteins associated with macular degeneration (MD), the teachings of which can be applied to and/or adapted for the compositions, systems, described herein.

[0302] One aspect of US Patent Publication No. 20120159653 relates to editing of any chromosomal sequences that encode proteins associated with MD which may be applied to the nucleic acid-targeting system of the present invention.

### Treating Muscle Diseases and Cardiovascular Diseases

[0303] In some embodiments, the composition, system, can be used to treat and/or prevent a muscle disease and associated circulatory or cardiovascular disease or disorder. The present invention also contemplates delivering the composition, system, described herein, e.g. Cas effector protein systems, to the heart. For the heart, a myocardium tropic adeno-associated virus (AAVM) is preferred, in particular AAVM41 which showed preferential gene transfer in the heart (see, e.g., Lin-Yanga et al., PNAS, Mar. 10, 2009, vol. 106, no. 10). Administration may be systemic or local. A dosage of about 1-10×10¹⁴ vector genomes is contemplated for systemic administration. See also, e.g., Eulalio et al. (2012) Nature 492:376 and Somasuntharam et al. (2013) Biomaterials 34:7790, the teachings of which can be adapted for and/or applied to the compositions, systems, described herein.

[0304] For example, US Patent Publication No. 20110023139, the teachings of which can be adapted for and/or applied to the compositions, systems, described herein describes use of zinc finger nucleases to genetically modify cells, animals and proteins associated with cardiovascular disease. Cardiovascular diseases generally include high blood pressure, heart attacks, heart failure, and stroke and TIA. Any chromosomal sequence involved in cardiovascular disease or the protein encoded by any chromosomal sequence involved in cardiovascular disease may be utilized in the methods described in this disclosure. The cardiovascular-related proteins are typically selected based on an experimental association of the cardiovascular-related protein to the development of cardiovascular disease. For example, the production rate or circulating concentration of a cardiovascular-related protein may be elevated or depressed in a population having a cardiovascular disorder relative to a population lacking the cardiovascular disorder. Differences in protein levels may be assessed using proteomic techniques including but not limited to Western blot, immunohistochemical staining, enzyme linked immunosorbent assay (ELISA), and mass spectrometry. Alternatively, the cardiovascular-related proteins may be identified by obtaining gene expression profiles of the genes encoding the proteins using genomic techniques including but not limited to DNA microarray analysis, serial analysis of gene expression (SAGE), and quantitative real-time polymerase chain reaction (Q-PCR). Exemplary chromosomal sequences can be found in Table 3.

[0305] The compositions, systems, herein can be used for treating diseases of the muscular system. The present invention also contemplates delivering the composition, system, described herein, e.g., Cas (e.g. Cas9 and/or Cas12) effector protein systems, to muscle(s).

[0306] In some embodiments, the muscle disease to be treated is a muscle dystrophy such as DMD. In some embodiments, the composition, system, such as a system capable of RNA modification, described herein can be used to achieve exon skipping to achieve correction of the diseased gene. As used herein, the term “exon skipping” refers to the modification of pre-mRNA splicing by the targeting of splice donor and/or acceptor sites within a pre-mRNA with one or more complementary antisense oligonucleotide(s) (AONs). By blocking access of a spliceosome to one or more splice donor or acceptor site, an AON may prevent a splicing reaction thereby causing the deletion of one or more exons from a fully-processed mRNA. Exon skipping may be achieved in the nucleus during the maturation process of pre-mRNAs. In some examples, exon skipping may include the masking of key sequences involved in the splicing of targeted exons by using a composition, system, described herein capable of RNA modification. In some embodiments, exon skipping can be achieved in dystrophin mRNA. In some embodiments, the composition, system, can induce exon skipping at exon 1, 2, 3, 4, 5, 6, 7, 8, 10, 11, 12, 13, 14, 15, 16, 17, 18, 19, 20, 21, 22, 23, 24, 25, 26, 27, 28, 29, 30, 31, 32, 33, 34, 45, 36, 37, 38, 39, 40, 41, 42, 43, 44, 45, 46, 47, 48, 49, 50, 51, 52, 53, 54, 55, 56, 57, 58, 59, 60, 61, 62, 63, 64, 65, 66, 67, 68, 69, 70, 71, 72, 73, 74, 75, 76, 77, 78, 79, or any combination thereof of the dystrophin mRNA. In some embodiments, the composition, system, can induce exon skipping at exon 43, 44, 50, 51, 52, 55, or any combination thereof of the dystrophin mRNA. Mutations in these exons, can also be corrected using non-exon skipping polynucleotide modification methods.

[0307] In some embodiments, for treatment of a muscle disease, the method of Bortolanza et al. Molecular Therapy vol. 19 no. 11, 2055-264 Nov. 2011) may be applied to an AAV expressing CRISPR Cas and injected into humans at a dosage of about 2× 1015 or 2× 1016 vg of vector. The teachings of Bortolanza et al., can be adapted for and/or applied to the compositions, systems, described herein.

[0308] In some embodiments, the method of Dumonceaux et al. (Molecular Therapy vol. 18 no. 5, 881-887 May 2010) may be applied to an AAV expressing CRISPR Cas and injected into humans, for example, at a dosage of about 1014 to about 1015 vg of vector. The teachings of Dumonceaux described herein can be adapted for and/or applied to the compositions, systems, described herein.

[0309] In some embodiments, the method of Kinouchi et al. (Gene Therapy (2008) 15, 1126-1130) may be applied to CRISPR Cas systems described herein and injected into a human, for example, at a dosage of about 500 to 1000 ml of a 40 μM solution into the muscle.

[0310] In some embodiments, the method of Hagstrom et al. (Molecular Therapy Vol. 10, No. 2, August 2004) can be adapted for and/or applied to the compositions, systems, herein and injected at a dose of about 15 to about 50 mg into the great saphenous vein of a human.

### Treating Diseases of the Liver and Kidney

[0311] In some embodiments, the composition, system, or component thereof described herein can be used to treat a disease of the kidney or liver. Thus, in some embodiments, delivery of the CRISRP-Cas system or component thereof described herein is to the liver or kidney.

[0312] Delivery strategies to induce cellular uptake of the therapeutic nucleic acid include physical force or vector systems such as viral-, lipid- or complex-based delivery, or nanocarriers. From the initial applications with less possible clinical relevance, when nucleic acids were addressed to renal cells with hydrodynamic high-pressure injection systemically, a wide range of gene therapeutic viral and non-viral carriers have been applied already to target posttranscriptional events in different animal kidney disease models in vivo (Csaba Révész and Péter Hamar (2011). Delivery Methods to Target RNAs in the Kidney, Gene Therapy Applications, Prof. Chunsheng Kang (Ed.), ISBN: 978-953-307-541-9, InTech, Available from: www.intechopen.com/books/gene-therapy-applications/delivery-methods-to-target-rnas-inthe-kidney). Delivery methods to the kidney may include those in Yuan et al. (Am J Physiol Renal Physiol 295: F605-F617, 2008). The method of Yuang et al. may be applied to the CRISPR Cas system of the present invention contemplating a 1-2 g subcutaneous injection of CRISPR Cas conjugated with cholesterol to a human for delivery to the kidneys. In some embodiments, the method of Molitoris et al. (J Am Soc Nephrol 20:1754-1764, 2009) can be adapted to the CRISRP-Cas system of the present invention and a cumulative dose of 12-20 mg/kg to a human can be used for delivery to the proximal tubule cells of the kidneys. In some embodiments, the methods of Thompson et al. (Nucleic Acid Therapeutics, Volume 22, Number 4, 2012) can be adapted to the CRISRP-Cas system of the present invention and a dose of up to 25 mg/kg can be delivered via i.v. administration. In some embodiments, the method of Shimizu et al. (J Am Soc Nephrol 21:622-633, 2010) can be adapted to the CRISRP-Cas system of the present invention and a dose of about of 10-20 μmol CRISPR Cas complexed with nanocarriers in about 1-2 liters of a physiologic fluid for i.p. administration can be used.

[0313] Other various delivery vehicles can be used to deliver the composition, system, to the kidney such as viral, hydrodynamic, lipid, polymer nanoparticles, aptamers and various combinations thereof (see e.g. Larson et al., Surgery, (August 2007), Vol. 142, No. 2, pp. (262-269); Hamar et al., Proc Natl Acad Sci, (October 2004), Vol. 101, No. 41, pp. (14883-14888); Zheng et al., Am J Pathol, (October 2008), Vol. 173, No. 4, pp. (973-980); Feng et al., Transplantation, (May 2009), Vol. 87, No. 9, pp. (1283-1289); Q. Zhang et al., PloS ONE, (July 2010), Vol. 5, No. 7, e11709, pp. (1-13); Kushibikia et al., J Controlled Release, (July 2005), Vol. 105, No. 3, pp. (318-331); Wang et al., Gene Therapy, (July 2006), Vol. 13, No. 14, pp. (1097-1103); Kobayashi et al., Journal of Pharmacology and Experimental Therapeutics, (February 2004), Vol. 308, No. 2, pp. (688-693); Wolfrum et al., Nature Biotechnology, (September 2007), Vol. 25, No. 10, pp. (1149-1157); Molitoris et al., J Am Soc Nephrol, (August 2009), Vol. 20, No. 8 pp. (1754-1764); Mikhaylova et al., Cancer Gene Therapy, (March 2011), Vol. 16, No. 3, pp. (217-226); Y. Zhang et al., J Am Soc Nephrol, (April 2006), Vol. 17, No. 4, pp. (1090-1101); Singhal et al., Cancer Res, (May 2009), Vol. 69, No. 10, pp. (4244-4251); Malek et al., Toxicology and Applied Pharmacology, (April 2009), Vol. 236, No. 1, pp. (97-108); Shimizu et al., J Am Soc Nephrology, (April 2010), Vol. 21, No. 4, pp. (622-633); Jiang et al., Molecular Pharmaceutics, (May-June 2009), Vol. 6, No. 3, pp. (727-737); Cao et al, J Controlled Release, (June 2010), Vol. 144, No. 2, pp. (203-212); Ninichuk et al., Am J Pathol, (March 2008), Vol. 172, No. 3, pp. (628-637); Purschke et al., Proc Natl Acad Sci, (March 2006), Vol. 103, No. 13, pp. (5173-5178).

[0314] In some embodiments, delivery is to liver cells. In some embodiments, the liver cell is a hepatocyte. Delivery of the composition and system herein may be via viral vectors, especially AAV (and in particular AAV2/6) vectors. These can be administered by intravenous injection. A preferred target for the liver, whether in vitro or in vivo, is the albumin gene. This is a so-called ‘safe harbor” as albumin is expressed at very high levels and so some reduction in the production of albumin following successful gene editing is tolerated. It is also preferred as the high levels of expression seen from the albumin promoter/enhancer allows for useful levels of correct or transgene production (from the inserted donor template) to be achieved even if only a small fraction of hepatocytes are edited. See sites identified by Wechsler et al. (reported at the 57th Annual Meeting and Exposition of the American Society of Hematology-abstract available online at https://ash.confex.com/ash/2015/webprogram/Paper86495.html and presented on 6th December 2015) which can be adapted for use with the compositions, systems, herein.

[0315] Exemplary liver and kidney diseases that can be treated and/or prevented are described elsewhere herein.

### Treating Epithelial and Lung Diseases

[0316] In some embodiments, the disease treated or prevented by the composition, system, described herein can be a lung or epithelial disease. The compositions, systems, described herein can be used for treating epithelial and/or lung diseases. The present invention also contemplates delivering the composition, system, described herein, to one or both lungs.

[0317] In some embodiments, as viral vector can be used to deliver the composition, system, or component thereof to the lungs. In some embodiments, the AAV is an AAV-1, AAV-2, AAV-5, AAV-6, and/or AAV-9 for delivery to the lungs. (see, e.g., Li et al., Molecular Therapy, vol. 17 no. 12, 2067-277 Dec. 2009). In some embodiments, the MOI can vary from 1×10³ to 4×10⁵ vector genomes/cell. In some embodiments, the delivery vector can be an RSV vector as in Zamora et al. (Am J Respir Crit Care Med Vol 183. pp 531-538, 2011. The method of Zamora et al. may be applied to the nucleic acid-targeting system of the present invention and an aerosolized CRISPR Cas, for example with a dosage of 0.6 mg/kg, may be contemplated for the present invention.

[0318] Subjects treated for a lung disease may for example receive pharmaceutically effective amount of aerosolized AAV vector system per lung endobronchially delivered while spontaneously breathing. As such, aerosolized delivery is preferred for AAV delivery in general.

[0319] An adenovirus or an AAV particle may be used for delivery. Suitable gene constructs, each operably linked to one or more regulatory sequences, may be cloned into the delivery vector. In this instance, the following constructs are provided as examples: Cbh or EF1α promoter for Cas (Cas (e.g., Cas9 and/or Cas12)), U6 or H1 promoter for guide RNA). A preferred arrangement is to use a CFTRdelta508 targeting guide, a repair template for deltaF508 mutation and a codon optimized Cas (e.g. Cas9 and/or Cas12) enzyme, with optionally one or more nuclear localization signal or sequence(s) (NLS(s)), e.g., two (2) NLSs.

### Treating Diseases of the Skin

[0320] The compositions, systems, described herein can be used for the treatment of skin diseases. The present invention also contemplates delivering the composition, system, described herein, to the skin.

[0321] In some embodiments, delivery to the skin (intradermal delivery) of the composition, system, or component thereof can be via one or more microneedles or microneedle containing device. For example, in some embodiments the device and methods of Hickerson et al. (Molecular Therapy-Nucleic Acids (2013) 2, e129) can be used and/or adapted to deliver the composition, system, described herein, for example, at a dosage of up to 300 μl of 0.1 mg/ml CRISPR-Cas (e.g. Cas9 and/or Cas12) system to the skin.

[0322] In some embodiments, the methods and techniques of Leachman et al. (Molecular Therapy, vol. 18 no. 2, 442-446 Feb. 2010) can be used and/or adapted for delivery of a CIRPSR-Cas system described herein to the skin.

[0323] In some embodiments, the methods and techniques of Zheng et al. (PNAS, Jul. 24, 2012, vol. 109, no. 30, 11975-11980) can be used and/or adapted for nanoparticle delivery of a CIRPSR-Cas system described herein to the skin. In some embodiments, as dosage of about 25 nM applied in a single application can achieve gene knockdown in the skin.

### Treating Cancer

[0324] The compositions, systems, described herein can be used for the treatment of cancer. The present invention also contemplates delivering the composition, system, described herein, to a cancer cell. Also, as is described elsewhere herein the compositions, systems, can be used to modify an immune cell, such as a CAR or CAR T cell, which can then in turn be used to treat and/or prevent cancer. This is also described in WO2015161276, the disclosure of which is hereby incorporated by reference and described herein below.

[0325] Target genes suitable for the treatment or prophylaxis of cancer can include those set forth in Tables 4 and 5. In some embodiments, target genes for cancer treatment and prevention can also include those described in WO2015048577 the disclosure of which is hereby incorporated by reference and can be adapted for and/or applied to the composition, system, described herein.

### Diseases

Genetic Diseases and Diseases with a Genetic and/or Epigenetic Aspect

[0326] The compositions, systems, or components thereof can be used to treat and/or prevent a genetic disease or a disease with a genetic and/or epigenetic aspect. The genes and conditions exemplified herein are not exhaustive. In some embodiments, a method of treating and/or preventing a genetic disease can include administering a composition, system, and/or one or more components thereof to a subject, where the composition, system, and/or one or more components thereof is capable of modifying one or more copies of one or more genes associated with the genetic disease or a disease with a genetic and/or epigenetic aspect in one or more cells of the subject. In some embodiments, modifying one or more copies of one or more genes associated with a genetic disease or a disease with a genetic and/or epigenetic aspect in the subject can eliminate a genetic disease or a symptom thereof in the subject. In some embodiments, modifying one or more copies of one or more genes associated with a genetic disease or a disease with a genetic and/or epigenetic aspect in the subject can decrease the severity of a genetic disease or a symptom thereof in the subject. In some embodiments, the compositions, systems, or components thereof can modify one or more genes or polynucleotides associated with one or more diseases, including genetic diseases and/or those having a genetic aspect and/or epigenetic aspect, including but not limited to, any one or more set forth in Table 3. It will be appreciated that those diseases and associated genes listed herein are non-exhaustive and non-limiting. Further some genes play roles in the development of multiple diseases.

TABLE 3
Table 3. Exemplary Genetic and Other Diseases and Associated Genes

| | Primary | Additional | |
|---|---|---|---|
| | Tissues or | Tissues/ | |
| | System | Systems | |
| Disease Name | Affected | Affected | Genes |
| Achondroplasia | Bone and | | fibroblast growth factor receptor 3 |
| | Muscle | | (FGFR3) |
| Achromatopsia | eye | | CNGA3, CNGB3, GNAT2, PDE6C, |
| | | | PDE6H, ACHM2, ACHM3, |
| Acute Renal Injury | kidney | | NFkappaB, AATF, p85alpha, FAS, |
| | | | Apoptosis cascade elements (e.g. |
| | | | FASR, Caspase 2, 3, 4, 6, 7, 8, 9, 10, |
| | | | AKT, TNF alpha, IGF1, IGF1R, |
| | | | RIPK1), p53 |
| Age Related Macular | eye | | Abcr; CCL2; CC2; CP |
| Degeneration | | | (ceruloplasmin); Timp3; cathepsinD; |
| | | | VLDLR, CCR2 |
| AIDS | Immune System | | KIR3DL1, NKAT3, NKB1, AMB11, |
| | | | KIR3DS1, IFNG, CXCL12, SDF1 |
| Albinism (including | Skin, hair, eyes, | | TYR, OCA2, TYRP1, and SLC45A2, |
| oculocutaneous albinism (types | | | SLC24A5 and C10orf11 |
| 1-7) and ocular albinism) | | | |
| Alkaptonuria | Metabolism of | Tissues/organs | HGD |
| | amino acids | where | |
| | | homogentisic | |
| | | acid | |
| | | accumulates, | |
| | | particularly | |
| | | cartilage (joints), | |
| | | heart valves, | |
| | | kidneys | |
| alpha-1 antitrypsin deficiency | Lung | Liver, skin, | SERPINA1, those set forth in |
| (AATD or A1AD) | | vascular system, | WO2017165862, PiZ allele |
| | | kidneys, GI | |
| ALS | CNS | | SOD1; ALS2; ALS3; ALS5; |
| | | | ALS7; STEX; FUS; TARDBP; VEGF |
| | | | (VEGF-a; |
| | | | VEGF-b; VEGF-c); DPP6; NEFH, |
| | | | PTGS1, SLC1A2, TNFRSF10B, |
| | | | PRPH, HSP90AA1, CRIA2, IFNG, |
| | | | AMPA2 S100B, FGF2, AOX1, CS, |
| | | | TXN, RAPHJ1, MAP3K5, NBEAL1, |
| | | | GPX1, ICA1L, RAC1, MAPT, ITPR2, |
| | | | ALS2CR4, GLS, ALS2CR8, CNTFR, |
| | | | ALS2CR11, FOLH1, FAM117B, |
| | | | P4HB, CNTF, SQSTM1, STRADB, |
| | | | NAIP, NLR, YWHAQ, SLC33A1, |
| | | | TRAK2, SCA1, NIF3L1, NIF3, |
| | | | PARD3B, COX8A, CDK15, HECW1, |
| | | | HECT, C2, WW 15, NOS1, MET, |
| | | | SOD2, HSPB1, NEFL, CTSB, ANG, |
| | | | HSPA8, RNase A, VAPB, VAMP, |
| | | | SNCA, alpha HGF, CAT, ACTB, |
| | | | NEFM, TH, BCL2, FAS, CASP3, |
| | | | CLU, SMN1, G6PD, BAX, HSF1, |
| | | | RNF19A, JUN, ALS2CR12, HSPA5, |
| | | | MAPK14, APEX1, TXNRD1, NOS2, |
| | | | TIMP1, CASP9, XIAP, GLG1, EPO, |
| | | | VEGFA, ELN, GDNF, NFE2L2, |
| | | | SLC6A3, HSPA4, APOE, PSMB8, |
| | | | DCTN2, TIMP3, KIFAP3, SLC1A1, |
| | | | SMN2, CCNC, STUB1, ALS2, |
| | | | PRDX6, SYP, CABIN1, CASP1, |
| | | | GART, CDK5, ATXN3, RTN4, |
| | | | C1QB, VEGFC, HTT, PARK7, XDH, |
| | | | GFAP, MAP2, CYCS, FCGR3B, CCS, |
| | | | UBL5, MMP9m SLC18A3, TRPM7, |
| | | | HSPB2, AKT1, DEERL1, CCL2, |
| | | | NGRN, GSR, TPPP3, APAF1, |
| | | | BTBD10, GLUD1, CXCR4, S:C1A3, |
| | | | FLT1, PON1, AR, LIF, ERBB3, :GA:S1, |
| | | | CD44, TP53, TLR3, GRIA1, |
| | | | GAPDH, AMPA, GRIK1, DES, |
| | | | CHAT, FLT4, CHMP2B, BAG1, |
| | | | CHRNA4, GSS, BAK1, KDR, GSTP1, |
| | | | OGG1, IL6 |
| Alzheimer's Disease | Brain | | E1; CHIP; UCH; UBB; Tau; LRP; |
| | | | PICALM; CLU; PS1; |
| | | | SORL1; CR1; VLDLR; UBA1; |
| | | | UBA3; CHIP28; AQP1; UCHL1; |
| | | | UCHL3; APP, AAA, CVAP, AD1, |
| | | | APOE, AD2, DCP1, ACE1, MPO, |
| | | | PACIP1, PAXIP1L, PTIP, A2M, |
| | | | BLMH, BMH, PSEN1, AD3, ALAS2, |
| | | | ABCA1, BIN1, BDNF, BTNL8, |
| | | | C1ORF49, CDH4, CHRNB2, |
| | | | CKLFSF2, CLEC4E, CR1L, CSF3R, |
| | | | CST3, CYP2C, DAPK1, ESR1, |
| | | | FCAR, FCGR3B, FFA2, FGA, GAB2, |
| | | | GALP, GAPDHS, GMPB, HP, HTR7, |
| | | | IDE, IF127, IFI6, IFIT2, IL1RN, IL- |
| | | | 1RA, IL8RA, IL8RB, JAG1, KCNJ15, |
| | | | LRP6, MAPT, MARK4, MPHOSPH1, |
| | | | MTHFR, NBN, NCSTN, NIACR2, |
| | | | NMNAT3, NTM, ORM1, P2RY13, |
| | | | PBEF1, PCK1, PICALM, PLAU, |
| | | | PLXNC1, PRNP, PSEN1, PSEN2, |
| | | | PTPRA, RALGPS2, RGSL2, |
| | | | SELENBP1, SLC25A37, SORL1, |
| | | | Mitoferrin-1, TF, TFAM, TNF, |
| | | | TNFRSF10C, UBE1C |
| Amyloidosis | | | APOA1, APP, AAA, CVAP, AD1, |
| | | | GSN, FGA, LYZ, TTR, PALB |
| Amyloid neuropathy | | | TTR, PALB |
| Anemia | Blood | | CDAN1, CDA1, RPS19, DBA, PKLR, |
| | | | PK1, NT5C3, UMPH1, PSN1, RHAG, |
| | | | RH50A, NRAMP2, SPTB, ALAS2, |
| | | | ANH1, ASB, ABCB7, ABC7, ASAT |
| Angelman Syndrome | Nervous system, | | UBE3A |
| | brain | | |
| Attention Deficit Hyperactivity | Brain | | PTCHD1 |
| Disorder (ADHD) | | | |
| Autoimmune lymphoproliferative | Immune system | | TNFRSF6, APT1, FAS, CD95, |
| syndrome | | | ALPS1A |
| Autism, Autism spectrum | Brain | | PTCHD1; Mecp2; BZRAP1; MDGA2; |
| disorders (ASDs), including | | | Sema5A; Neurexin 1; GLO1, RTT, |
| Asperger's and a general | | | PPMX, MRX16, RX79, NLGN3, |
| diagnostic category called | | | NLGN4, KIAA1260, AUTSX2, |
| Pervasive Developmental | | | FMR1, FMR2; FXR1; FXR2; |
| Disorders (PDDs) | | | MGLUR5, ATP10C, CDH10, GRM6, |
| | | | MGLUR6, CDH9, CNTN4, NLGN2, |
| | | | CNTNAP2, SEMA5A, DHCR7, |
| | | | NLGN4X, NLGN4Y, DPP6, NLGN5, |
| | | | EN2, NRCAM, MDGA2, NRXN1, |
| | | | FMR2, AFF2, FOXP2, OR4M2, |
| | | | OXTR, FXR1, FXR2, PAH, |
| | | | GABRA1, PTEN, GABRA5, PTPRZ1, |
| | | | GABRB3, GABRG1, HIRIP3, |
| | | | SEZ6L2, HOXA1, SHANK3, IL6, |
| | | | SHBZRAP1, LAMB1, SLC6A4, |
| | | | SERT, MAPK3, TAS2R1, MAZ, |
| | | | TSC1, MDGA2, TSC2, MECP2, |
| | | | UBE3A, WNT2, see also |
| | | | 20110023145 |
| autosomal dominant polycystic | kidney | liver | PKD1, PKD2 |
| kidney disease (ADPKD) - | | | |
| (includes diseases such as von | | | |
| Hippel-Lindau disease and | | | |
| tubreous sclerosis complex | | | |
| disease) | | | |
| Autosomal Recessive Polycystic | kidney | liver | PKDH1 |
| Kidney Disease (ARPKD) | | | |
| Ataxia-Telangiectasia (a.k.a | Nervous system, | various | ATM |
| Louis Bar syndrome) | immune system | | |
| B-Cell Non-Hodgkin Lymphoma | | | BCL7A, BCL7 |
| Bardet-Biedl syndrome | Eye, | Liver, ear, | ARL6, BBS1, BBS2, BBS4, BBS5, |
| | musculoskeletal | gastrointestinal | BBS7, BBS9, BBS10, BBS12, |
| | system, kidney, | system, brain | CEP290, INPP5E, LZTFL1, MKKS, |
| | reproductive | | MKS1, SDCCAG8, TRIM32, TTC8 |
| | organs | | |
| Bare Lymphocyte Syndrome | blood | | TAPBP, TPSN, TAP2, ABCB3, PSF2, |
| | | | RING11, MHC2TA, C2TA, RFX5, |
| | | | RFXAP, RFX5 |
| Barter's Syndrome (types I, II, | kidney | | SLC12A1 (type I), KCNJ1 (type II), |
| III, IVA and B, and V) | | | CLCNKB (type III), BSND (type IV |
| | | | A), or both the CLCNKA CLCNKB |
| | | | genes (type IV B), CASR (type V). |
| Becker muscular dystrophy | Muscle | | DMD, BMD, MYF6 |
| Best Disease (Vitelliform | eye | | VMD2 |
| Macular Dystrophy type 2) | | | |
| Bleeding Disorders | blood | | TBXA2R, P2RX1, P2X1 |
| Blue Cone Monochromacy | eye | | OPN1LW, OPN1MW, and LCR |
| Breast Cancer | Breast tissue | | BRCA1, BRCA2, COX-2 |
| Bruton's Disease (aka X-linked | Immune system, | | BTK |
| Agammglobulinemia) | specifically B | | |
| | cells | | |
| Cancers (e.g., lymphoma, chronic | Various | | FAS, BID, CTLA4, PDCD1, CBLB, |
| lymphocytic leukemia (CLL), B | | | PTPN6, TRAC, TRBC, those |
| cell acute lymphocytic leukemia | | | described in WO2015048577 |
| (B-ALL), acute lymphoblastic | | | |
| leukemia, acute myeloid | | | |
| leukemia, non-Hodgkin's | | | |
| lymphoma (NHL), diffuse large | | | |
| cell lymphoma (DLCL), multiple | | | |
| myeloma, renal cell carcinoma | | | |
| (RCC), neuroblastoma, colorectal | | | |
| cancer, breast cancer, ovarian | | | |
| cancer, melanoma, sarcoma, | | | |
| prostate cancer, lung cancer, | | | |
| esophageal cancer, hepatocellular | | | |
| carcinoma, pancreatic cancer, | | | |
| astrocytoma, mesothelioma, head | | | |
| and neck cancer, and | | | |
| medulloblastoma | | | |
| Cardiovascular Diseases | heart | Vascular system | IL1B, XDH, TP53, PTGS, MB, IL4, |
| | | | ANGPT1, ABCGu8, CTSK, PTGIR, |
| | | | KCNJ11, INS, CRP, PDGFRB, |
| | | | CCNA2, PDGFB, KCNJ5, KCNN3, |
| | | | CAPN10, ADRA2B, ABCG5, |
| | | | PRDX2, CPAN5, PARP14, MEX3C, |
| | | | ACE, RNF, IL6, TNF, STN, |
| | | | SERPINE1, ALB, ADIPOQ, APOB, |
| | | | APOE, LEP, MTHFR, APOA1, |
| | | | EDN1, NPPB, NOS3, PPARG, PLAT, |
| | | | PTGS2, CETP, AGTR1, HMGCR, |
| | | | IGF1, SELE, REN, PPARA, PON1, |
| | | | KNG1, CCL2, LPL, VWF, F2, |
| | | | ICAM1, TGFB, NPPA, IL10, EPO, |
| | | | SOD1, VCAM1, IFNG, LPA, MPO, |
| | | | ESR1, MAPK, HP, F3, CST3, COG2, |
| | | | MMP9, SERPINC1, F8, HMOX1, |
| | | | APOC3, IL8, PROL1, CBS, NOS2, |
| | | | TLR4, SELP, ABCA1, AGT, LDLR, |
| | | | GPT, VEGFA, NR3C2, IL18, NOS1, |
| | | | NR3C1, FGB, HGF, IL1A, AKT1, |
| | | | LIPC, HSPD1, MAPK14, SPP1, |
| | | | ITGB3, CAT, UTS2, THBD, F10, CP, |
| | | | TNFRSF11B, EGFR, MMP2, PLG, |
| | | | NPY, RHOD, MAPK8, MYC, FN1, |
| | | | CMA1, PLAU, GNB3, ADRB2, |
| | | | SOD2, F5, VDR, ALOX5, HLA- |
| | | | DRB1, PARP1, CD40LG, PON2, |
| | | | AGER, IRS1, PTGS1, ECE1, F7, |
| | | | IRMN, EPHX2, IGFBP1, MAPK10, |
| | | | FAS, ABCB1, JUN, IGFBP3, CD14, |
| | | | PDE5A, AGTR2, CD40, LCAT, |
| | | | CCR5, MMP1, TIMP1, ADM, |
| | | | DYT10, STAT3, MMP3, ELN, USF1, |
| | | | CFH, HSPA4, MMP12, MME, F2R, |
| | | | SELL, CTSB, ANXA5, ADRB1, |
| | | | CYBA, FGA, GGT1, LIPG, HIF1A, |
| | | | CXCR4, PROC, SCARB1, CD79A, |
| | | | PLTP, ADD1, FGG, SAA1, KCNH2, |
| | | | DPP4, NPR1, VTN, KIAA0101, FOS, |
| | | | TLR2, PPIG, IL1R1, AR, CYP1A1, |
| | | | SERPINA1, MTR, RBP4, APOA4, |
| | | | CDKN2A, FGF2, EDNRB, ITGA2, |
| | | | VLA-2, CABIN1, SHBG, HMGB1, |
| | | | HSP90B2P, CYP3A4, GJA1, CAV1, |
| | | | ESR2, LTA, GDF15, BDNF, |
| | | | CYP2D6, NGF, SP1, TGIF1, SRC, |
| | | | EGF, PIK3CG, HLA-A, KCNQ1, |
| | | | CNR1, FBN1, CHKA, BEST1, |
| | | | CTNNB1, IL2, CD36, PRKAB1, TPO, |
| | | | ALDH7A1, CX3CR1, TH, F9, CH1, |
| | | | TF, HFE, IL17A, PTEN, GSTM1, |
| | | | DMD, GATA4, F13A1, TTR, FABP4, |
| | | | PON3, APOC1, INSR, TNFRSF1B, |
| | | | HTR2A, CSF3, CYP2C9, TXN, |
| | | | CYP11B2, PTH, CSF2, KDR, |
| | | | PLA2G2A, THBS1, GCG, RHOA, |
| | | | ALDH2, TCF7L2, NFE2L2, |
| | | | NOTCH1, UGT1A1, IFNA1, PPARD, |
| | | | SIRT1, GNHR1, PAPPA, ARR3, |
| | | | NPPC, AHSP, PTK2, IL13, MTOR, |
| | | | ITGB2, GSTT1, IL6ST, CPB2, |
| | | | CYP1A2, HNF4A, SLC64A, |
| | | | PLA2G6, TNFSF11, SLC8A1, F2RL1, |
| | | | AKR1A1, ALDH9A1, BGLAP, |
| | | | MTTP, MTRR, SULT1A3, RAGE, |
| | | | C4B, P2RY12, RNLS, CREB1, |
| | | | POMC, RAC1, LMNA, CD59, |
| | | | SCM5A, CYP1B1, MIF, MMP13, |
| | | | TIMP2, CYP19A1, CUP21A2, |
| | | | PTPN22, MYH14, MBL2, SELPLG, |
| | | | AOC3, CTSL1, PCNA, IGF2, ITGB1, |
| | | | CAST, CXCL12, IGHE, KCNE1, |
| | | | TFRC, COL1A1, COL1A2, IL2RB, |
| | | | PLA2G10, ANGPT2, PROCR, NOX4, |
| | | | HAMP, PTPN11, SLCA1, IL2RA, |
| | | | CCL5, IRF1, CF:AR, CA:CA, EIF4E, |
| | | | GSTP1, JAK2, CYP3A5, HSPG2, |
| | | | CCL3, MYD88, VIP, SOAT1, |
| | | | ADRBK1, NR4A2, MMP8, NPR2, |
| | | | GCH1, EPRS, PPARGC1A, F12, |
| | | | PECAM1, CCL4, CERPINA34, |
| | | | CASR, FABP2, TTF2, PROS1, CTF1, |
| | | | SGCB, YME1L1, CAMP, ZC3H12A, |
| | | | AKR1B1, MMP7, AHR, CSF1, |
| | | | HDAC9, CTGF, KCNMA1, UGT1A, |
| | | | PRKCA, COMT, S100B, EGR1, PRL, |
| | | | IL15, DRD4, CAMK2G, SLC22A2, |
| | | | CCL11, PGF, THPO, GP6, TACR1, |
| | | | NTS, HNF1A, SST, KCDN1, |
| | | | LOC646627, TBXAS1, CUP2J2, |
| | | | TBXA2R, ADH1C, ALOX12, AHSG, |
| | | | BHMT, GJA4, SLC25A4, ACLY, |
| | | | ALOX5AP, NUMA1, CYP27B1, |
| | | | CYSLTR2, SOD3, LTC4S, UCN, |
| | | | GHRL, APOC2, CLEC4A, |
| | | | KBTBD10, TNC, TYMS, SHC1, |
| | | | LRP1, SOCS3, ADH1B, KLK3, |
| | | | HSD11B1, VKORC1, SERPINB2, |
| | | | TNS1, RNF19A, EPOR, ITGAM, |
| | | | PITX2, MAPK7, FCGR3A, LEEPR, |
| | | | ENG, GPX1, GOT2, HRH1, NR112, |
| | | | CRH, HTR1A, VDAC1, HPSE, |
| | | | SFTPD, TAP2, RMF123, PTK2Bm |
| | | | NTRK2, IL6R, ACHE, GLP1R, GHR, |
| | | | GSR, NQO1, NR5A1, GJB2, |
| | | | SLC9A1, MAOA, PCSK9, FCGR2A, |
| | | | SERPINF1, EDN3, UCP2, TFAP2A, |
| | | | C4BPA, SERPINF2, TYMP, ALPP, |
| | | | CXCR2, SLC3A3, ABCG2, ADA, |
| | | | JAK3, HSPA1A, FASN, FGF1, F11, |
| | | | ATP7A, CR1, GFPA, ROCK1, |
| | | | MECP2, MYLK, BCHE, LIPE, |
| | | | ADORA1, WRN, CXCR3, CD81, |
| | | | SMAD7, LAMC2, MAP3K5, CHGA, |
| | | | IAPP, RHO, ENPP1, PTHLH, NRG1, |
| | | | VEGFC, ENPEP, CEBPB, NAGLU,. |
| | | | F2RL3, CX3CL1, BDKRB1, |
| | | | ADAMTS13, ELANE, ENPP2, CISH, |
| | | | GAST, MYOC, ATP1A2, NF1, GJB1, |
| | | | MEF2A, VCL, BMPR2, TUBB, |
| | | | CDC42, KRT18, HSF1, MYB, |
| | | | PRKAA2, ROCK2, TFP1, PRKG1, |
| | | | BMP2, CTNND1, CTH, CTSS, |
| | | | VAV2, NPY2R, IGFBP2, CD28, |
| | | | GSTA1, PPIA, APOH, S100A8, IL11, |
| | | | ALOX15, FBLN1, NR1H3, SCD, GIP, |
| | | | CHGB, PRKCB, SRD5A1,HSD11B2, |
| | | | CALCRL, GALNT2, ANGPTL4, |
| | | | KCNN4, PIK3C2A, HBEGF, |
| | | | CYP7A1, HLA-DRB5, BNIP3, |
| | | | GCKR, S100A12, PADI4, HSPA14, |
| | | | CXCR1, H19, KRTAP19-3, IDDM2, |
| | | | RAC2, YRY1, CLOCK, NGFR, DBH, |
| | | | CHRNA4, CACNA1C, PRKAG2, |
| | | | CHAT, PTGDS, NR1H2, TEK, |
| | | | VEGFB, MEF2C, MAPKAPK2, |
| | | | TNFRSF11A, HSPA9, CYSLTR1, |
| | | | MAT1A, OPRL1, IMPA1, CLCN2, |
| | | | DLD, PSMA6, PSMB8, CHI3L1, |
| | | | ALDH1B1, PARP2, STAR, LBP, |
| | | | ABCC6, RGS2, EFNB2, GJB6, |
| | | | APOA2, AMPD1, DYSF, |
| | | | FDFT1, EMD2, CCR6, GJB3, IL1RL1, |
| | | | ENTPD1, BBS4, CELSR2, F11R, |
| | | | RAPGEF3, HYAL1, ZNF259, |
| | | | ATOX1, ATF6, KHK, SAT1, GGH, |
| | | | TIMP4, SLC4A4, PDE2A, PDE3B, |
| | | | FADS1, FADS2, TMSB4X, TXNIP, |
| | | | LIMS1, RHOB, LY96, FOXO1, |
| | | | PNPLA2,TRH, GJC1, S:C17A5, FTO, |
| | | | GJD2, PRSC1, CASP12, GPBAR1, |
| | | | PXK, IL33, TRIB1, PBX4, NUPR1, |
| | | | 15-SEP, CILP2, TERC, GGT2, |
| | | | MTCO1, UOX, AVP |
| Cataract | eye | | CRYAA, CRYA1, CRYBB2, CRYB2, |
| | | | PITX3, BFSP2, CP49, CP47, CRYAA, |
| | | | CRYA1, PAX6, AN2, MGDA, |
| | | | CRYBA1, CRYB1, CRYGC, CRYG3, |
| | | | CCL, LIM2, MP19, CRYGD, CRYG4, |
| | | | BFSP2, CP49, CP47, HSF4, CTM, |
| | | | HSF4, CTM, MIP, AQP0, CRYAB, |
| | | | CRYA2, CTPP2, CRYBB1, CRYGD, |
| | | | CRYG4, CRYBB2, CRYB2, CRYGC, |
| | | | CRYG3, CCL, CRYAA, CRYA1, |
| | | | GJA8, CX50, CAE1, GJA3, CX46, |
| | | | CZP3, CAE3, CCM1, CAM, KRIT1 |
| CDKL-5 Deficiencies or | Brain, CNS | | CDKL5 |
| Mediated Diseases | | | |
| Charcot-Marie-Tooth (CMT) | Nervous system | Muscles | PMP22 (CMT1A and E), MPZ |
| disease (Types 1, 2, 3, 4,) | | (dystrophy) | (CMT1B), LITAF (CMT1C), EGR2 |
| | | | (CMT1D), NEFL (CMT1F), GJB1 |
| | | | (CMT1X), MFN2 (CMT2A), KIF1B |
| | | | (CMT2A2B), RAB7A (CMT2B), |
| | | | TRPV4 (CMT2C), GARS (CMT2D), |
| | | | NEFL (CMT2E), GAPD1 (CMT2K), |
| | | | HSPB8 (CMT2L), DYNC1H1, |
| | | | CMT20), LRSAM1 (CMT2P), |
| | | | IGHMBP2 (CMT2S), MORC2 |
| | | | (CMT2Z), GDAP1 (CMT4A), |
| | | | MTMR2 or SBF2/MTMR13 |
| | | | (CMT4B), SH3TC2 (CMT4C), |
| | | | NDRG1 (CMT4D), PRX (CMT4F), |
| | | | FIG4 (CMT4J), NT-3 |
| Chédiak-Higashi Syndrome | Immune system | Skin, hair, eyes, | LYST |
| | | neurons | |
| Choroidermia | | | CHM, REP1, |
| Chorioretinal atrophy | eye | | PRDM13, RGR, TEAD1 |
| Chronic Granulomatous Disease | Immune system | | CYBA, CYBB, NCF1, NCF2, NCF4 |
| Chronic Mucocutaneous | Immune system | | AIRE, CARD9, CLEC7A IL12B, |
| Candidiasis | | | IL12B1, IL1F, IL17RA, IL17RC, |
| | | | RORC, STAT1, STAT3, TRAF31P2 |
| Cirrhosis | liver | | KRT18, KRT8, CIRH1A, NAIC, |
| | | | TEX292, KIAA1988 |
| Colon cancer (Familial | Gastrointestinal | | FAP: APC HNPCC: |
| adenomatous polyposis (FAP) | | | MSH2, MLH1, PMS2, SH6, PMS1 |
| and hereditary nonpolyposis | | | |
| colon cancer (HNPCC)) | | | |
| Combined Immunodeficiency | Immune System | | IL2RG, SCIDX1, SCIDX, IMD4); |
| | | | HIV-1 (CCL5, SCYA5, D17S136E, |
| | | | TCP228 |
| Cone(-rod) dystrophy | eye | | AIPL1, CRX, GUA1A, GUCY2D, |
| | | | PITPM3, PROM1, PRPH2, RIMS1, |
| | | | SEMA4A, ABCA4, ADAM9, ATF6, |
| | | | C21ORF2, C8ORF37, CACNA2D4, |
| | | | CDHR1, CERKL, CNGA3, CNGB3, |
| | | | CNNM4, CNAT2, IFT81, KCNV2, |
| | | | PDE6C, PDE6H, POC1B, RAX2, |
| | | | RDH5, RPGRIP1, TTLL5, RetCG1, |
| | | | GUCY2E |
| Congenital Stationary Night | eye | | CABP4, CACNA1F, CACNA2D4, |
| Blindness | | | GNAT1, CPR179, GRK1, GRM6, |
| | | | LRIT3, NYX, PDE6B, RDH5, RHO, |
| | | | RLBP1, RPE65, SAG, SLC24A1, |
| | | | TRPM1, |
| Congenital Fructose Intolerance | Metabolism | | ALDOB |
| Cori's Disease (Glycogen Storage | Various- | | AGL |
| Disease Type III) | wherever | | |
| | glycogen | | |
| | accumulates, | | |
| | particularly | | |
| | liver, heart, | | |
| | skeletal muscle | | |
| Corneal clouding and dystrophy | eye | | APOA1, TGFBI, CSD2, CDGG1, |
| | | | CSD, BIGH3, CDG2, TACSTD2, |
| | | | TROP2, M1S1, VSX1, RINX, PPCD, |
| | | | PPD, KTCN, COL8A2, FECD, |
| | | | PPCD2, PIP5K3, CFD |
| Cornea plana congenital | | | KERA, CNA2 |
| Cri du chat Syndrome, also | | | Deletions involving only band 5p15.2 |
| known as 5p syndrome and cat | | | to the entire short arm of chromosome |
| cry syndrome | | | 5, e.g. CTNND2, TERT, |
| Cystic Fibrosis (CF) | Lungs and | Pancreas, liver, | CTFR, ABCC7, CF, MRP7, SCNN1A, |
| | respiratory | digestive | those described in WO2015157070 |
| | system | system, | |
| | | reproductive | |
| | | system, | |
| | | exocrine, glands, | |
| Diabetic nephropathy | kidney | | Gremlin, 12/15- lipoxygenase, TIM44, |
| Dent Disease (Types 1 and 2) | Kidney | | Type 1: CLCN5, Type 2: ORCL |
| Dentatorubro-Pallidoluysian | CNS, brain, | | Atrophin-1 and Atn1 |
| Atrophy (DRPLA) (aka Haw | muscle | | |
| River and Naito-Oyanagi | | | |
| Disease) | | | |
| Down Syndrome | various | | Chromosome 21 trisomy |
| Drug Addiction | Brain | | Prkce; Drd2; Drd4; ABAT; |
| | | | GRIA2; Grm5; Grin1; Htr1b; Grin2a; |
| | | | Drd3; Pdyn; Gria1 |
| Duane syndrome (Types 1, 2, and | eye | | CHN1, indels on chromosomes 4 and 8 |
| 3, including subgroups A, B and | | | |
| C). Other names for this | | | |
| condition include: Duane's | | | |
| Retraction Syndrome (or DR | | | |
| syndrome), Eye Retraction | | | |
| Syndrome, Retraction Syndrome, | | | |
| Congenital retraction syndrome | | | |
| and Stilling-Turk-Duane | | | |
| Syndrome | | | |
| Duchenne muscular dystrophy | muscle | Cardiovascular, | DMD, BMD, dystrophin gene, intron |
| (DMD) | | respiratory | flanking exon 51 of DMD gene, exon |
| | | | 51 mutations in DMD gene, see also |
| | | | WO2013163628 and US Pat. Pub. |
| | | | 20130145487 |
| Edward's Syndrome | | | Complete or partial trisomy of |
| (Trisomy 18) | | | chromosome 18 |
| Ehlers-Danlos Syndrome (Types | Various | | COL5A1, COL5A2, COL1A1, |
| I-VI) | depending on | | COL3A1, TNXB, PLOD1, COL1A2, |
| | type: including | | FKBP14 and ADAMTS2 |
| | musculoskeletal, | | |
| | eye, vasculature, | | |
| | immune, and | | |
| | skin | | |
| Emery-Dreifuss muscular | muscle | | LMNA, LMN1, EMD2, FPLD, |
| dystrophy | | | CMD1A, HGPS, LGMD1B, LMNA, |
| | | | LMN1, EMD2, FPLD, CMD1A |
| Enhanced S-Cone Syndrome | eye | | NR2E3, NRL |
| Fabry's Disease | Various - | | GLA |
| | including skin, | | |
| | eyes, and | | |
| | gastrointestinal | | |
| | system, kidney, | | |
| | heart, brain, | | |
| | nervous system | | |
| Facioscapulohumeral muscular | muscles | | FSHMD1A, FSHD1A, FRG1, |
| dystrophy | | | |
| Factor H and Factor H-like 1 | blood | | HF1, CFH, HUS |
| Factor V Leiden thrombophilia | blood | | Factor V (F5) |
| and Factor V deficiency | | | |
| Factor V and Factor VII | blood | | MCFD2 |
| deficiency | | | |
| Factor VII deficiency | blood | | F7 |
| Factor X deficiency | blood | | F10 |
| Factor XI deficiency | blood | | F11 |
| Factor XII deficiency | blood | | F12, HAF |
| Factor XIIIA deficiency | blood | | F13A1, F13A |
| Factor XIIIB deficiency | blood | | F13B |
| Familial Hypercholestereolemia | Cardiovascular | | APOB, LDLR, PCSK9 |
| | system | | |
| Familial Mediterranean Fever | Various- | Heart, kidney, | MEFV |
| (FMF) also called recurrent | organs/tissues | brain/CNS, | |
| polyserositis or familial | with serous or | reproductive | |
| paroxysmal polyserositis | synovial | organs | |
| | membranes, | | |
| | skin, joints | | |
| Fanconi Anemia | Various - blood | | FANCA, FACA, FA1, FA, FAA, |
| | (anemia), | | FAAP95, FAAP90, FLJ34064, |
| | immune system, | | FANCC, FANCG, RAD51, BRCA1, |
| | cognitive, | | BRCA2, BRIP1, BACH1, FANCJ, |
| | kidneys, eyes, | | FANCB, FANCD1, FANCD2, |
| | musculoskeletal | | FANCD, FAD, FANCE, FACE, |
| | | | FANCF, FANCI, ERCC4, FANCL, |
| | | | FANCM, PALB2, RAD51C, SLX4, |
| | | | UBE2T, FANCB, XRCC9, PHF9, |
| | | | KIAA1596 |
| Fanconi Syndrome Types I | kidneys | | FRTS1, GATM |
| (Childhood onset) and II (Adult | | | |
| Onset) | | | |
| Fragile X syndrome and related | brain | | FMR1, FMR2; FXR1; FXR2; |
| disorders | | | mGLUR5 |
| Fragile XE Mental Retardation | Brain, nervous | | FMR1 |
| (aka Martin Bell syndrome) | system | | |
| Friedreich Ataxia (FRDA) | Brain, nervous | heart | FXN/X25 |
| | system | | |
| Fuchs endothelial corneal | Eye | | TCF4; COL8A2 |
| dystrophy | | | |
| Galactosemia | Carbohydrate | Various-where | GALT, GALK1, and GALE |
| | metabolism | galactose | |
| | disorder | accumulates - | |
| | | liver, brain, eyes | |
| Gastrointestinal Epithelial | | | CISH |
| Cancer, GI cancer | | | |
| Gaucher Disease (Types 1, 2, and | Fat metabolism | Various-liver, | GBA |
| 3, as well as other unusual forms | disorder | spleen, blood, | |
| that may not fit into these types) | | CNS, skeletal | |
| | | system | |
| Griscelli syndrome | | | |
| Glaucoma | eye | | MYOC, TIGR, GLC1A, JOAG, |
| | | | GPOA, OPTN, GLC1E, FIP2, HYPL, |
| | | | NRP, CYP1B1, GLC3A, OPA1, NTG, |
| | | | NPG, CYP1B1, GLC3A, those |
| | | | described in WO2015153780 |
| Glomerulo sclerosis | kidney | | CC chemokine ligand 2 |
| Glycogen Storage Diseases | Metabolism | | SLC2A2, GLUT2, G6PC, G6PT, |
| Types I-VI -See also Cori's | Diseases | | G6PT1, GAA, LAMP2, LAMPB, |
| Disease, Pompe's Disease, | | | AGL, GDE, GBE1, GYS2, PYGL, |
| McArdle's disease, Hers Disease, | | | PFKM, see also Cori's Disease, |
| and Von Gierke's disease | | | Pompe's Disease, McArdle's disease, |
| | | | Hers Disease, and Von Gierke's |
| | | | disease |
| RBC Glycolytic enzyme | blood | | any mutations in a gene for an enzyme |
| deficiency | | | in the glycolysis pathway including |
| | | | mutations in genes for hexokinases I |
| | | | and II, glucokinase, phosphoglucose |
| | | | isomerase, phosphofructokinase, |
| | | | aldolase Bm triosephosphate |
| | | | isomerease, glyceraldehydee-3- |
| | | | phosphate dehydrogenase, |
| | | | phosphoglycerokinase, |
| | | | phosphoglycerate mutase, enolase I, |
| | | | pyruvate kinase |
| Hartnup's disease | Malabsorption | Various- brain, | SLC6A19 |
| | disease | gastrointestinal, | |
| | | skin, | |
| Hearing Loss | ear | | NOX3, Hes5, BDNF, |
| Hemochromatosis (HH) | Iron absorption | Various- | HFE and H63D |
| | regulation | wherever iron | |
| | disease | accumulates, | |
| | | liver, heart, | |
| | | pancreas, joints, | |
| | | pituitary gland | |
| Hemophagocytic | blood | | PRF1, HPLH2, UNC13D, MUNC13- |
| lymphohistiocytosis disorders | | | 4, HPLH3, HLH3, FHL3 |
| Hemorrhagic disorders | blood | | PI, ATT, F5 |
| Hers disease (Glycogen storage | liver | muscle | PYGL |
| disease Type VI) | | | |
| Hereditary angioedema (HAE) | | | kalikrein B1 |
| Hereditary Hemorrhagic | Skin and | | ACVRL1, ENG and SMAD4 |
| Telangiectasia (Osler-Weber- | mucous | | |
| Rendu Syndrome) | membranes | | |
| Hereditary Spherocytosis | blood | | NK1, EPB42, SLC4A1, SPTA1, and |
| | | | SPTB |
| Hereditary Persistence of Fetal | blood | | HBG1, HBG2, BCL11A, promoter |
| Hemoglobin | | | region of HBG 1 and/or 2 (in the |
| | | | CCAAT box) |
| Hemophilia (hemophilia A | blood | | A: FVIII, F8C, HEMA |
| (Classic) a B (aka Christmas | | | B: FVIX, HEMB |
| disease) and C) | | | C: F9, F11 |
| Hepatic adenoma | liver | | TCF1, HNF1A, MODY3 |
| Hepatic failure, early onset, and | liver | | SCOD1, SCO1 |
| neurologic disorder | | | |
| Hepatic lipase deficiency | liver | | LIPC |
| Hepatoblastoma, cancer and | liver | | CTNNB1, PDGFRL, PDGRL, PRLTS, |
| carcinomas | | | AXIN1, AXIN, CTNNB1, TP53, P53, |
| | | | LFS1, IGF2R, MPRI, MET, CASP8, |
| | | | MCH5 |
| Hermansky-Pudlak syndrome | Skin, eyes, | | HPS1, HPS3, HPS4, HPS5, HPS6, |
| | blood, lung, | | HPS7, DTNBP1, BLOC1, BLOC1S2, |
| | kidneys, | | BLOC3 |
| | intestine | | |
| HIV susceptibility or infection | Immune system | | IL10, CSIF, CMKBR2, CCR2, |
| | | | CMKBR5, CCCKR5 (CCR5), those in |
| | | | WO2015148670A1 |
| Holoprosencephaly (HPE) | brain | | ACVRL1, ENG, SMAD4 |
| (Alobar, Semilobar, and Lobar) | | | |
| Homocystinuria | Metabolic | Various- | CBS, MTHFR, MTR, MTRR, and |
| | disease | connective | MMADHC |
| | | tissue, muscles, | |
| | | CNS, | |
| | | cardiovascular | |
| | | system | |
| HPV | | | HPV16 and HPV18 E6/E7 |
| HSV1, HSV2, and related | eye | | HSV1 genes (immediate early and late |
| keratitis | | | HSV-1 genes (UL1, 1.5, 5, 6, 8, 9, 12, |
| | | | 15, 16, 18, 19, 22, 23, 26, 26.5, 27, 28, |
| | | | 29, 30, 31, 32, 33, 34, 35, 36, 37, 38, |
| | | | 42, 48, 49.5, 50, 52, 54, S6, RL2, RS1, |
| | | | those described in WO2015153789, |
| | | | WO2015153791 |
| Hunter's Syndrome (aka | Lysosomal | Various- liver, | IDS |
| Mucopolysaccharidosis type II) | storage disease | spleen, eye, | |
| | | joint, heart, | |
| | | brain, skeletal | |
| Huntington's disease (HD) and | Brain, nervous | | HD, HTT, IT15, PRNP, PRIP, JPH3, |
| HD-like disorders | system | | JP3, HDL2, TBP, SCA17, PRKCE; |
| | | | IGF1; EP300; RCOR1; PRKCZ; |
| | | | HDAC4; and TGM2, and those |
| | | | described in WO2013130824, |
| | | | WO2015089354 |
| Hurler's Syndrome (aka | Lysosomal | Various- liver, | IDUA, α-L-iduronidase |
| mucopolysaccharidosis type I H, | storage disease | spleen, eye, | |
| MPS IH) | | joint, heart, | |
| | | brain, skeletal | |
| Hurler-Scheie syndrome (aka | Lysosomal | Various- liver, | IDUA, α-L-iduronidase |
| mucopolysaccharidosis type I H- | storage disease | spleen, eye, | |
| S, MPS I H-S) | | joint, heart, | |
| | | brain, skeletal | |
| hyaluronidase deficiency (aka | Soft and | | HYAL1 |
| MPS IX) | connective | | |
| | tissues | | |
| Hyper IgM syndrome | Immune system | | CD40L |
| Hyper- tension caused renal | kidney | | Mineral corticoid receptor |
| damage | | | |
| Immunodeficiencies | Immune System | | CD3E, CD3G, AICDA, AID, HIGM2, |
| | | | TNFRSF5, CD40, UNG, DGU, |
| | | | HIGM4, TNFSF5, CD40LG, HIGM1, |
| | | | IGM, FOXP3, IPEX, AIID, XPID, |
| | | | PIDX, TNFRSF14B, TACI |
| Inborn errors of metabolism: | Metabolism | Various organs | See also: Carbohydrate metabolism |
| including urea cycle disorders, | diseases, liver | and cells | disorders (e.g. galactosemia), Amino |
| organic acidemias), fatty acid | | | acid Metabolism disorders (e.g. |
| oxidation defects, amino | | | phenylketonuria), Fatty acid |
| acidopathies, carbohydrate | | | metabolism (e.g. MCAD deficiency), |
| disorders, mitochondrial | | | Urea Cycle disorders (e.g. |
| disorders | | | Citrullinemia), Organic acidemias (e.g. |
| | | | Maple Syrup Urine disease), |
| | | | Mitochondrial disorders (e.g. |
| | | | MELAS), peroxisomal disorders (e.g. |
| | | | Zellweger syndrome) |
| Inflammation | Various | | IL-10; IL-1 (IL-1a; IL-1b); IL-13; IL- |
| | | | 17 (IL-17a (CTLA8); IL- |
| | | | 17b; IL-17c; IL-17d; IL-17f); II-23; |
| | | | Cx3cr1; ptpn22; TNFa; |
| | | | NOD2/CARD15 for IBD; IL-6; IL-12 |
| | | | (IL-12a; IL-12b); |
| | | | CTLA4; Cx3cl1 |
| Inflammatory Bowel Diseases | Gastrointestinal | Joints, skin | NOD2, IRGM, LRRK2, ATG5, |
| (e.g. Ulcerative Colitis and | | | ATG16L1, IRGM, GATM, ECM1, |
| Chron's Disease) | | | CDH1, LAMB1, HNF4A, GNA12, |
| | | | IL10, CARD9/15. CCR6, IL2RA, |
| | | | MST1, TNFSF15, REL, STAT3, |
| | | | IL23R, IL12B, FUT2 |
| Interstitial renal fibrosis | kidney | | TGF-β type II receptor |
| Job's Syndrome (aka Hyper IgE | Immune System | | STAT3, DOCK8 |
| Syndrome) | | | |
| Juvenile Retinoschisis | eye | | RS1, XLRS1 |
| Kabuki Syndrome 1 | | | MLL4, KMT2D |
| Kennedy Disease (aka | Muscles, brain, | | SBMA/SMAX1/AR |
| Spinobulbar Muscular Atrophy) | nervous system | | |
| Klinefelter syndrome | Various- | | Extra X chromosome in males |
| | particularly | | |
| | those involved | | |
| | in development | | |
| | of male | | |
| | characteristics | | |
| Lafora Disease | Brain, CNS | | EMP2A and EMP2B |
| Leber Congenital Amaurosis | eye | | CRB1, RP12, CORD2, CRD, CRX, |
| | | | IMPDH1, OTX2, AIPL1, CABP4, |
| | | | CCT2, CEP290, CLUAP1, CRB1, |
| | | | CRX, DTHD1, GDF6, GUCY2D, |
| | | | IFT140, IQCB1, KCNJ13, LCA5, |
| | | | LRAT, NMNAT1, PRPH2, RD3, |
| | | | RDH12, RPE65, RP20, RPGRIP1, |
| | | | SPATA7, TULP1, LCA1, LCA4, |
| | | | GUC2D, CORD6, LCA3, |
| Lesch-Nyhan Syndrome | Metabolism | Various - joints, | HPRT1 |
| | disease | cognitive, brain, | |
| | | nervous system | |
| Leukocyte deficiencies and | blood | | ITGB2, CD18, LCAMB, LAD, |
| disorders | | | EIF2B1, EIF2BA, EIF2B2, EIF2B3, |
| | | | EIF2B5, LVWM, CACH, CLE, |
| | | | EIF2B4 |
| Leukemia | Blood | | TAL1, TCL5, SCL, TAL2, FLT3, |
| | | | NBS1, NBS, ZNFN1A1, IK1, LYF1, |
| | | | HOXD4, HOX4B, BCR, CML, PHL, |
| | | | ALL, ARNT, KRAS2, RASK2, |
| | | | GMPS, AF10, ARHGEF12, LARG, |
| | | | KIAA0382, CALM, CLTH, CEBPA, |
| | | | CEBP, CHIC2, BTL, FLT3, KIT, |
| | | | PBT, LPP, NPM1, NUP214, D9S46E, |
| | | | CAN, CAIN, RUNX1, CBFA2, |
| | | | AML1, WHSC1L1, NSD3, FLT3, |
| | | | AF1Q, NPM1, NUMA1, ZNF145, |
| | | | PLZF, PML, MYL, STAT5B, AF10, |
| | | | CALM, CLTH, ARL11, ARLTS1, |
| | | | P2RX7, P2X7, BCR, CML, PHL, |
| | | | ALL, GRAF, NF1, VRNF, WSS, |
| | | | NFNS, PTPN11, PTP2C, SHP2, NS1, |
| | | | BCL2, CCND1, PRAD1, BCL1, |
| | | | TCRA, GATA1, GF1, ERYF1, NFE1, |
| | | | ABL1, NQO1, DIA4, NMOR1, |
| | | | NUP214, D9S46E, CAN, CAIN |
| Limb-girdle muscular dystrophy | muscle | | LGMD |
| diseases | | | |
| Lowe syndrome | brain, eyes, | | OCRL |
| | kidneys | | |
| Lupus glomerulo- nephritis | kidney | | MAPK1 |
| Machado- | Brain, CNS, | | ATX3 |
| Joseph's Disease (also known as | muscle | | |
| Spinocerebellar ataxia Type 3) | | | |
| Macular degeneration | eye | | ABC4, CBC1, CHM1, APOE, |
| | | | C1QTNF5, C2, C3, CCL2, CCR2, |
| | | | CD36, CFB, CFH, CFHR1, CFHR3, |
| | | | CNGB3, CP, CRP, CST3, CTSD, |
| | | | CX3CR1, ELOVL4, ERCC6, FBLN5, |
| | | | FBLN6, FSCN2, HMCN1, HIRA1, |
| | | | IL6, IL8, PLEKHA1, PROM1, |
| | | | PRPH2, RPGR, SERPING1, TCOF1, |
| | | | TIMP3, TLR3 |
| Macular Dystrophy | eye | | BEST1, C1QTNF5, CTNNA1, |
| | | | EFEMP1, ELOVL4, FSCN2, |
| | | | GUCA1B, HMCN1, IMPG1, OTX2, |
| | | | PRDM13, PROM1, PRPH2, RP1L1, |
| | | | TIMP3, ABCA4, CFH, DRAM2, |
| | | | IMG1, MFSD8, ADMD, STGD2, |
| | | | STGD3, RDS, RP7, PRPH, AVMD, |
| | | | AOFMD, VMD2 |
| Malattia Leventinesse | eye | | EFEMP1, FBLN3 |
| Maple Syrup Urine Disease | Metabolism | | BCKDHA, BCKDHB, and DBT |
| | disease | | |
| Marfan syndrome | Connective | Musculoskeletal | FBN1 |
| | tissue | | |
| Maroteaux-Lamy Syndrome (aka | Musculoskeletal | Liver, spleen | ARSB |
| MPS VI) | system, nervous | | |
| | system | | |
| McArdle's Disease (Glycogen | Glycogen | muscle | PYGM |
| Storage Disease Type V) | storage disease | | |
| Medullary cystic kidney disease | kidney | | UMOD, HNFJ, FJHN, MCKD2, |
| | | | ADMCKD2 |
| Metachromatic leukodystrophy | Lysosomal | Nervous system | ARSA |
| | storage disease | | |
| Methylmalonic acidemia (MMA) | Metabolism | | MMAA, MMAB, MUT, MMACHC, |
| | disease | | MMADHC, LMBRD1 |
| Morquio Syndrome (aka MPS IV | Connective | heart | GALNS |
| A and B) | tissue, skin, | | |
| | bone, eyes | | |
| Mucopolysaccharidosis diseases | Lysosomal | | See also Hurler/Scheie syndrome, |
| (Types I H/S, I H, II, III A B and | storage disease - | | Hurler disease, Sanfillipo syndrome, |
| C, I S, IVA and B, IX, VII, and | affects various | | Scheie syndrome, Morquio syndrome, |
| VI) | organs/tissues | | hyaluronidase deficiency, Sly |
| | | | syndrome, and Maroteaux-Lamy |
| | | | syndrome |
| Muscular Atrophy | muscle | | VAPB, VAPC, ALS8, SMN1, SMA1, |
| | | | SMA2, SMA3, SMA4, BSCL2, |
| | | | SPG17, GARS, SMAD1, CMT2D, |
| | | | HEXB, IGHMBP2, SMUBP2, |
| | | | CATF1, SMARD1 |
| Muscular dystrophy | muscle | | FKRP, MDC1C, LGMD2I, LAMA2, |
| | | | LAMM, LARGE, KIAA0609, |
| | | | MDC1D, FCMD, TTID, MYOT, |
| | | | CAPN3, CANP3, DYSF, LGMD2B, |
| | | | SGCG, LGMD2C, DMDA1, SCG3, |
| | | | SGCA, ADL, DAG2, LGMD2D, |
| | | | DMDA2, SGCB, LGMD2E, SGCD, |
| | | | SGD, LGMD2F, CMD1L, TCAP, |
| | | | LGMD2G, CMD1N, TRIM32, HT2A, |
| | | | LGMD2H, FKRP, MDC1C, LGMD2I, |
| | | | TTN, CMD1G, TMD, LGMD2J, |
| | | | POMT1, CAV3, LGMD1C, SEPN1, |
| | | | SELN, RSMD1, PLEC1, PLTN, EBS1 |
| Myotonic dystrophy (Type 1 and | Muscles | Eyes, heart, | CNBP (Type 2) and DMPK (Type 1) |
| Type 2) | | endocrine | |
| Neoplasia | | | PTEN; ATM; ATR; EGFR; ERBB2; |
| | | | ERBB3; ERBB4; |
| | | | Notch1; Notch2; Notch3; Notch4; |
| | | | AKT; AKT2; AKT3; HIF; |
| | | | HIF1a; HIF3a; Met; HRG; Bcl2; |
| | | | PPAR alpha; PPAR |
| | | | gamma; WT1 (Wilms Tumor); FGF |
| | | | Receptor Family |
| | | | members (5 members: 1, 2, 3, 4, 5); |
| | | | CDKN2a; APC; RB |
| | | | (retinoblastoma); MEN1; VHL; |
| | | | BRCA1; BRCA2; AR |
| | | | (Androgen Receptor); TSG101; IGF; |
| | | | IGF Receptor; Igf1 (4 |
| | | | variants); Igf2 (3 variants); Igf 1 |
| | | | Receptor; Igf 2 Receptor; |
| | | | Bax; Bcl2; caspases family (9 |
| | | | members: |
| | | | 1, 2, 3, 4, 6, 7, 8, 9, 12); Kras; Apc |
| Neurofibromatosis (NF) (NF1, | brain, spinal | | NF1, NF2 |
| formerly Recklinghausen's NF, | cord, nerves, | | |
| and NF2) | and skin | | |
| Niemann-Pick Lipidosis (Types | Lysosomal | Various- where | Types A and B: SMPD1; Type C: |
| A, B, and C) | Storage Disease | sphingomyelin | NPC1 or NPC2 |
| | | accumulates, | |
| | | particularly | |
| | | spleen, liver, | |
| | | blood, CNS | |
| Noonan Syndrome | Various - | | PTPN11, SOS1, RAF1 and KRAS |
| | musculoskeletal, | | |
| | heart, eyes, | | |
| | reproductive | | |
| | organs, blood | | |
| Norrie Disease or X-linked | eye | | NDP |
| Familial Exudative | | | |
| Vitreoretinopathy | | | |
| North Carolina Macular | eye | | MCDR1 |
| Dystrophy | | | |
| Osteogenesis imperfecta (OI) | bones, | | COL1A1, COL1A2, CRTAP, P3H |
| (Types I, II, III, IV, V, VI, VII) | musculoskeletal | | |
| Osteopetrosis | bones | | LRP5, BMND1, LRP7, LR3, OPPG, |
| | | | VBCH2, CLCN7, CLC7, OPTA2, |
| | | | OSTM1, GL, TCIRG1, TIRC7, |
| | | | OC116, OPTB1 |
| Patau's Syndrome | Brain, heart, | | Additional copy of chromosome 13 |
| (Trisomy 13) | skeletal system | | |
| Parkinson's disease (PD) | Brain, nervous | | SNCA (PARK1), UCHL1 (PARK 5), |
| | system | | and LRRK2 (PARK8), (PARK3), |
| | | | PARK2, PARK4, PARK7 (PARK7), |
| | | | PINK1 (PARK6); x-Synuclein, DJ-1, |
| | | | Parkin, NR4A2, NURR1, NOT, |
| | | | TINUR, SNCAIP, TBP, SCA17, |
| | | | NCAP, PRKN, PDJ, DBH, NDUFV2 |
| Pattern Dystrophy of the RPE | eye | | RDS/peripherin |
| Phenylketonuria (PKU) | Metabolism | Various due to | PAH, PKU1, QDPR, DHPR, PTS |
| | disorder | build-up of | |
| | | phenylalanine, | |
| | | phenyl ketones | |
| | | in tissues and | |
| | | CNS | |
| Polycystic kidney and hepatic | Kidney, liver | | FCYT, PKHD1, ARPKD, PKD1, |
| disease | | | PKD2, PKD4, PKDTS, PRKCSH, |
| | | | G19P1, PCLD, SEC63 |
| Pompe's Disease | Glycogen | Various - heart, | GAA |
| | storage disease | liver, spleen | |
| Porphyria (actually refers to a | Various- | | ALAD, ALAS2, CPOX, FECH, |
| group of different diseases all | wherever heme | | HMBS, PPOX, UROD, or UROS |
| having a specific heme | precursors | | |
| production process abnormality) | accumulate | | |
| posterior polymorphous corneal | eyes | | TCF4; COL8A2 |
| dystrophy | | | |
| Primary Hyperoxaluria (e.g. type | Various - eyes, | | LDHA (lactate dehydrogenase A) and |
| 1) | heart, kidneys, | | hydroxyacid oxidase 1 (HAO1) |
| | skeletal system | | |
| Primary Open Angle Glaucoma | eyes | | MYOC |
| (POAG) | | | |
| Primary sclerosing cholangitis | Liver, | | TCF4; COL8A2 |
| | gallbladder | | |
| Progeria (also called Hutchinson- | All | | LMNA |
| Gilford progeria syndrome) | | | |
| Prader-Willi Syndrome | Musculoskeletal | | Deletion of region of short arm of |
| | system, brain, | | chromosome 15, including UBE3A |
| | reproductive | | |
| | and endocrine | | |
| | system | | |
| Prostate Cancer | prostate | | HOXB13, MSMB, GPRC6A, TP53 |
| Pyruvate Dehydrogenase | Brain, nervous | | PDHA1 |
| Deficiency | system | | |
| Kidney/Renal carcinoma | kidney | | RLIP76, VEGF |
| Rett Syndrome | Brain | | MECP2, RTT, PPMX, MRX16, |
| | | | MRX79, CDKL5, STK9, MECP2, |
| | | | RTT, PPMX, MRX16, MRX79, x- |
| | | | Synuclein, DJ-1 |
| Retinitis pigmentosa (RP) | eye | | ADIPOR1, ABCA4, AGBL5, |
| | | | ARHGEF18, ARL2BP, ARL3, ARL6, |
| | | | BEST1, BBS1, BBS2, C2ORF71, |
| | | | C8ORF37, CA4, CERKL, CLRN1, |
| | | | CNGA1, CMGB1, CRB1, CRX, |
| | | | CYP4V2, DHDDS, DHX38, EMC1, |
| | | | EYS, FAM161A, FSCN2, GPR125, |
| | | | GUCA1B, HK1, HPRPF3, HGSNAT, |
| | | | IDH3B, IMPDH1, IMPG2, IFT140, |
| | | | IFT172, KLHL7, KIAA1549, KIZ, |
| | | | LRAT, MAK, MERTK, MVK, NEK2, |
| | | | NUROD1, NR2E3, NRL, OFD1, |
| | | | PDE6A, PDE6B, PDE6G, POMGNT1, |
| | | | PRCD, PROM1, PRPF3, PRPF4, |
| | | | PRPF6, PRPF8, PRPF31, PRPH2, |
| | | | RPB3, RDH12, REEP6, RP39, RGR, |
| | | | RHO, RLBP1, ROM1, RP1, RP1L1, |
| | | | RPY, RP2, RP9, RPE65, RPGR, |
| | | | SAMD11, SAG, SEMA4A, SLC7A14, |
| | | | SNRNP200, SPP2, SPATA7, TRNT1, |
| | | | TOPORS, TTC8, TULP1, USH2A, |
| | | | ZFN408, ZNF513, see also |
| | | | 20120204282 |
| Scheie syndrome (also known as | Various- liver, | | IDUA, α-L-iduronidase |
| mucopolysaccharidosis type I | spleen, eye, | | |
| S(MPS I-S)) | joint, heart, | | |
| | brain, skeletal | | |
| Schizophrenia | Brain | | Neuregulin1 (Nrg1); Erb4 (receptor for |
| | | | Neuregulin); |
| | | | Complexin1 (Cplx1); Tph1 |
| | | | Tryptophan hydroxylase; Tph2 |
| | | | Tryptophan hydroxylase 2; Neurexin |
| | | | 1; GSK3; GSK3a; |
| | | | GSK3b; 5-HTT (Slc6a4); COMT; |
| | | | DRD (Drd1a); SLC6A3; DAOA; |
| | | | DTNBP1; Dao (Dao1); TCF4; |
| | | | COL8A2 |
| Secretase Related Disorders | Various | | APH-1 (alpha and beta); PSEN1; |
| | | | NCSTN; PEN-2; Nos1, Parp1, Nat1, |
| | | | Nat2, CTSB, APP, APH1B, PSEN2, |
| | | | PSENEN, BACE1, ITM2B, CTSD, |
| | | | NOTCH1, TNF, INS, DYT10, |
| | | | ADAM17, APOE, ACE, STN, TP53, |
| | | | IL6, NGFR, IL1B, ACHE, CTNNB1, |
| | | | IGF1, IFNG, NRG1, CASP3, MAPK1, |
| | | | CDH1, APBB1, HMGCR, CREB1, |
| | | | PTGS2, HES1, CAT, TGFB1, ENO2, |
| | | | ERBB4, TRAPPC10, MAOB, NGF, |
| | | | MMP12, JAG1, CD40LG, PPARG, |
| | | | FGF2, LRP1, NOTCH4, MAPK8, |
| | | | PREP, NOTCH3, PRNP, CTSG, EGF, |
| | | | REN, CD44, SELP, GHR, ADCYAP1, |
| | | | INSR, GFAP, MMP3, MAPK10, SP1, |
| | | | MYC, CTSE, PPARA, JUN, TIMP1, |
| | | | IL5, IL1A, MMP9, HTR4, HSPG2, |
| | | | KRAS, CYCS, SMG1, IL1R1, |
| | | | PROK1, MAPK3, NTRK1, IL13, |
| | | | MME, TKT, CXCR2, CHRM1, |
| | | | ATXN1, PAWR, NOTCJ2, M6PR, |
| | | | CYP46A1, CSNK1D, MAPK14, |
| | | | PRG2, PRKCA, L1 CAM, CD40, |
| | | | NR1I2, JAG2, CTNND1, CMA1, |
| | | | SORT1, DLK1, THEM4, JUP, CD46, |
| | | | CCL11, CAV3, RNASE3, HSPA8, |
| | | | CASP9, CYP3A4, CCR3, TFAP2A, |
| | | | SCP2, CDK4, JOF1A, TCF7L2, |
| | | | B3GALTL, MDM2, RELA, CASP7, |
| | | | IDE, FANP4, CASK, ADCYAP1R1, |
| | | | ATF4, PDGFA, C21ORF33, SCG5, |
| | | | RMF123, NKFB1, ERBB2, CAV1, |
| | | | MMP7, TGFA, RXRA, STX1A, |
| | | | PSMC4, P2RY2, TNFRSF21, DLG1, |
| | | | NUMBL, SPN, PLSCR1, UBQLN2, |
| | | | UBQLN1, PCSK7, SPON1, SILV, |
| | | | QPCT, HESS, GCC1 |
| Selective IgA Deficiency | Immune system | | Type 1: MSH5; Type 2: TNFRSF13B |
| Severe Combined | Immune system | | JAK3, JAKL, DCLRE1C, ARTEMIS, |
| Immunodeficiency (SCID) and | | | SCIDA, RAG1, RAG2, ADA, PTPRC, |
| SCID-χ1, and ADA-SCID | | | CD45, LCA, IL7R, CD3D, T3D, |
| | | | IL2RG, SCIDX1, SCIDX, IMD4, |
| | | | those identified in US Pat. App. Pub. |
| | | | 20110225664, 20110091441, |
| | | | 20100229252, 20090271881 and |
| | | | 20090222937; |
| Sickle cell disease | blood | | HBB, BCL11A, BCL11Ae, cis- |
| | | | regulatory elements of the B-globin |
| | | | locus, HBG ½ promoter, HBG distal |
| | | | CCAAT box region between -92 and - |
| | | | 130 of the HBG Transcription Start |
| | | | Site, those described in |
| | | | WO2015148863, WO 2013/126794, |
| | | | US Pat. Pub. 20110182867 |
| Sly Syndrome (aka MPS VII) | | | GUSB |
| Spinocerebellar Ataxias (SCA | | | ATXN1, ATXN2, ATX3 |
| types 1, 2, 3, 6, 7, 8, 12 and 17) | | | |
| Sorsby Fundus Dystrophy | eye | | TIMP3 |
| Stargardt disease | eye | | ABCR, ELOVL4, ABCA4, PROM1 |
| Tay-Sachs Disease | Lysosomal | Various - CNS, | HEX-A |
| | Storage disease | brain, eye | |
| Thalassemia (Alpha, Beta, Delta) | blood | | HBA1, HBA2 (Alpha), HBB (Beta), |
| | | | HBB and HBD (delta), LCRB, |
| | | | BCL11A, BCL11Ae, cis-regulatory |
| | | | elements of the B-globin locus, HBG |
| | | | ½ promoter, those described in |
| | | | WO2015148860, US Pat. Pub. |
| | | | 20110182867, 2015/148860 |
| Thymic Aplasia (DiGeorge | Immune system, | | deletion of 30 to 40 genes in the |
| Syndrome; 22q11.2 deletion | thymus | | middle of chromosome 22 at |
| syndrome) | | | a location known as 22q11.2, including |
| | | | TBX1, DGCR8 |
| Transthyretin amyloidosis | liver | | TTR (transthyretin) |
| (ATTR) | | | |
| trimethylaminuria | Metabolism | | FMO3 |
| | disease | | |
| Trinucleotide Repeat Disorders | Various | | HTT; SBMA/SMAX1/AR; |
| (generally) | | | FXN/X25 ATX3; |
| | | | ATXN1; ATXN2; |
| | | | DMPK; Atrophin-1 and Atn1 |
| | | | (DRPLA Dx); CBP (Creb-BP - global |
| | | | instability); VLDLR; Atxn7; Atxn10; |
| | | | FEN1, TNRC6A, PABPN1, JPH3, |
| | | | MED15, ATXN1, ATXN3, TBP, |
| | | | CACNA1A, ATXN80S, PPP2R2B, |
| | | | ATXN7, TNRC6B, TNRC6C, CELF3, |
| | | | MAB21L1, MSH2, TMEM185A, |
| | | | SIX5, CNPY3, RAXE, GNB2, RPL14, |
| | | | ATXN8, ISR, TTR, EP400, GIGYF2, |
| | | | OGG1, STC1, CNDP1, C10ORF2, |
| | | | MAML3, DKC1, PAXIP1, CASK, |
| | | | MAPT, SP1, POLG, AFF2, THBS1, |
| | | | TP53, ESR1, CGGBP1, ABT1, KLK3, |
| | | | PRNP, JUN, KCNN3, BAX, FRAXA, |
| | | | KBTBD10, MBNL1, RAD51, |
| | | | NCOA3, ERDA1, TSC1, COMP, |
| | | | GGLC, RRAD, MSH3, DRD2, CD44, |
| | | | CTCF, CCND1, CLSPN, MEF2A, |
| | | | PTPRU, GAPDH, TRIM22, WT1, |
| | | | AHR, GPX1, TPMT, NDP, ARX, |
| | | | TYR, EGR1, UNG, NUMBL, FABP2, |
| | | | EN2, CRYGC, SRP14, CRYGB, |
| | | | PDCD1, HOXA1, ATXN2L, PMS2, |
| | | | GLA, CBL, FTH1, IL12RB2, OTX2, |
| | | | HOXA5, POLG2, DLX2, AHRR, |
| | | | MANF, RMEM158, see also |
| | | | 20110016540 |
| Turner's Syndrome (XO) | Various - | | Monosomy X |
| | reproductive | | |
| | organs, and sex | | |
| | characteristics, | | |
| | vasculature | | |
| Tuberous Sclerosis | CNS, heart, | | TSC1, TSC2 |
| | kidneys | | |
| Usher syndrome (Types I, II, and | Ears, eyes | | ABHD12, CDH23, CIB2, CLRN1, |
| III) | | | DFNB31, GPR98, HARS, MYO7A, |
| | | | PCDH15, USH1C, USH1G, USH2A, |
| | | | USH11A, those described in |
| | | | WO2015134812A1 |
| Velocardiofacial syndrome (aka | Various - | | Many genes are deleted, COM, TBX1, |
| 22q11.2 deletion syndrome, | skeletal, heart, | | and other are associated with |
| DiGeorge syndrome, conotruncal | kidney, immune | | symptoms |
| anomaly face syndrome (CTAF), | system, brain | | |
| autosomal dominant Opitz G/BB | | | |
| syndrome or Cayler cardiofacial | | | |
| syndrome) | | | |
| Von Gierke's Disease (Glycogen | Glycogen | Various - liver, | G6PC and SLC37A4 |
| Storage Disease type I) | Storage disease | kidney | |
| Von Hippel-Lindau Syndrome | Various - cell | CNS, Kidney, | VHL |
| | growth | Eye, visceral | |
| | regulation | organs | |
| | disorder | | |
| Von Willebrand Disease (Types | blood | | VWF |
| I, II and III) | | | |
| Wilson Disease | Various - | Liver, brains, | ATP7B |
| | Copper Storage | eyes, other | |
| | Disease | tissues where | |
| | | copper builds up | |
| Wiskott-Aldrich Syndrome | Immune System | | WAS |
| Xeroderma Pigmentosum | Skin | Nervous system | POLH |
| XXX Syndrome | Endocrine, brain | | X chromosome trisomy |

[0327] In some embodiments, the compositions, systems, or components thereof can be used treat or prevent a disease in a subject by modifying one or more genes associated with one or more cellular functions, such as any one or more of those in Table 4. In some embodiments, the disease is a genetic disease or disorder. In some of embodiments, the composition, system, or component thereof can modify one or more genes or polynucleotides associated with one or more genetic diseases such as any set forth in Table 4.

TABLE 4
Exemplary Genes controlling Cellular Functions

| CELLULAR FUNCTION | GENES |
|---|---|
| PI3K/AKT Signaling | PRKCE; ITGAM; ITGA5; IRAK1; PRKAA2; EIF2AK2; |
| | PTEN; EIF4E; PRKCZ; GRK6; MAPK1; TSC1; PLK1; |
| | AKT2; IKBKB; PIK3CA; CDK8; CDKN1B; NFKB2; BCL2; |
| | PIK3CB; PPP2R1A; MAPK8; BCL2L1; MAPK3; TSC2; |
| | ITGA1; KRAS; EIF4EBP1; RELA; PRKCD; NOS3; |
| | PRKAA1; MAPK9; CDK2; PPP2CA; PIM1; ITGB7; |
| | YWHAZ; ILK; TP53; RAF1; IKBKG; RELB; DYRK1A; |
| | CDKN1A; ITGB1; MAP2K2; JAK1; AKT1; JAK2; PIK3R1; |
| | CHUK; PDPK1; PPP2R5C; CTNNB1; MAP2K1; NFKB1; |
| | PAK3; ITGB3; CCND1; GSK3A; FRAP1; SFN; ITGA2; |
| | TTK; CSNK1A1; BRAF; GSK3B; AKT3; FOXO1; SGK; |
| | HSP90AA1; RPS6KB1 |
| ERK/MAPK Signaling | PRKCE; ITGAM; ITGA5; HSPB1; IRAK1; PRKAA2; |
| | EIF2AK2; RAC1; RAP1A; TLN1; EIF4E; ELK1; GRK6; |
| | MAPK1; RAC2; PLK1; AKT2; PIK3CA; CDK8; CREB1; |
| | PRKCI; PTK2; FOS; RPS6KA4; PIK3CB; PPP2R1A; |
| | PIK3C3; MAPK8; MAPK3; ITGA1; ETS1; KRAS; MYCN; |
| | EIF4EBP1; PPARG; PRKCD; PRKAA1; MAPK9; SRC; |
| | CDK2; PPP2CA; PIM1; PIK3C2A; ITGB7; YWHAZ; |
| | PPP1CC; KSR1; PXN; RAF1; FYN; DYRK1A; ITGB1; |
| | MAP2K2; PAK4; PIK3R1; STAT3; PPP2R5C; MAP2K1; |
| | PAK3; ITGB3; ESR1; ITGA2; MYC; TTK; CSNK1A1; |
| | CRKL; BRAF; ATF4; PRKCA; SRF; STAT1; SGK |
| Glucocorticoid Receptor | RAC1; TAF4B; EP300; SMAD2; TRAF6; PCAF; ELK1; |
| Signaling | MAPK1; SMAD3; AKT2; IKBKB; NCOR2; UBE2I; |
| | PIK3CA; CREB1; FOS; HSPA5; NFKB2; BCL2; |
| | MAP3K14; STAT5B; PIK3CB; PIK3C3; MAPK8; BCL2L1; |
| | MAPK3; TSC22D3; MAPK10; NRIP1; KRAS; MAPK13; |
| | RELA; STAT5A; MAPK9; NOS2A; PBX1; NR3C1; |
| | PIK3C2A; CDKN1C; TRAF2; SERPINE1; NCOA3; |
| | MAPK14; TNF; RAF1; IKBKG; MAP3K7; CREBBP; |
| | CDKN1A; MAP2K2; JAK1; IL8; NCOA2; AKT1; JAK2; |
| | PIK3R1; CHUK; STAT3; MAP2K1; NFKB1; TGFBR1; |
| | ESR1; SMAD4; CEBPB; JUN; AR; AKT3; CCL2; MMP1; |
| | STAT1; IL6; HSP90AA1 |
| Axonal Guidance Signaling | PRKCE; ITGAM; ROCK1; ITGA5; CXCR4; ADAM12; |
| | IGF1; RAC1; RAP1A; EIF4E; PRKCZ; NRP1; NTRK2; |
| | ARHGEF7; SMO; ROCK2; MAPK1; PGF; RAC2; |
| | PTPN11; GNAS; AKT2; PIK3CA; ERBB2; PRKCI; PTK2; |
| | CFL1; GNAQ; PIK3CB; CXCL12; PIK3C3; WNT11; |
| | PRKD1; GNB2L1; ABL1; MAPK3; ITGA1; KRAS; RHOA; |
| | PRKCD; PIK3C2A; ITGB7; GLI2; PXN; VASP; RAF1; |
| | FYN; ITGB1; MAP2K2; PAK4; ADAM17; AKT1; PIK3R1; |
| | GLI1; WNT5A; ADAM10; MAP2K1; PAK3; ITGB3; |
| | CDC42; VEGFA; ITGA2; EPHA8; CRKL; RND1; GSK3B; |
| | AKT3; PRKCA |
| Ephrin Receptor Signaling | PRKCE; ITGAM; ROCK1; ITGA5; CXCR4; IRAK1; |
| Actin Cytoskeleton | PRKAA2; EIF2AK2; RAC1; RAP1A; GRK6; ROCK2; |
| Signaling | MAPK1; PGF; RAC2; PTPN11; GNAS; PLK1; AKT2; |
| | DOK1; CDK8; CREB1; PTK2; CFL1; GNAQ; MAP3K14; |
| | CXCL12; MAPK8; GNB2L1; ABL1; MAPK3; ITGA1; |
| | KRAS; RHOA; PRKCD; PRKAA1; MAPK9; SRC; CDK2; |
| | PIM1; ITGB7; PXN; RAF1; FYN; DYRK1A; ITGB1; |
| | MAP2K2; PAK4; AKT1; JAK2; STAT3; ADAM10; |
| | MAP2K1; PAK3; ITGB3; CDC42; VEGFA; ITGA2; |
| | EPHA8; TTK; CSNK1A1; CRKL; BRAF; PTPN13; ATF4; |
| | AKT3; SGK |
| | ACTN4; PRKCE; ITGAM; ROCK1; ITGA5; IRAK1; |
| | PRKAA2; EIF2AK2; RAC1; INS; ARHGEF7; GRK6; |
| | ROCK2; MAPK1; RAC2; PLK1; AKT2; PIK3CA; CDK8; |
| | PTK2; CFL1; PIK3CB; MYH9; DIAPH1; PIK3C3; MAPK8; |
| | F2R; MAPK3; SLC9A1; ITGA1; KRAS; RHOA; PRKCD; |
| | PRKAA1; MAPK9; CDK2; PIM1; PIK3C2A; ITGB7; |
| | PPP1CC; PXN; VIL2; RAF1; GSN; DYRK1A; ITGB1; |
| | MAP2K2; PAK4; PIP5K1A; PIK3R1; MAP2K1; PAK3; |
| | ITGB3; CDC42; APC; ITGA2; TTK; CSNK1A1; CRKL; |
| | BRAF; VAV3; SGK |
| Huntington's Disease | PRKCE; IGF1; EP300; RCOR1; PRKCZ; HDAC4; TGM2; |
| Signaling | MAPK1; CAPNS1; AKT2; EGFR; NCOR2; SP1; CAPN2; |
| | PIK3CA; HDAC5; CREB1; PRKCI; HSPA5; REST; |
| | GNAQ; PIK3CB; PIK3C3; MAPK8; IGF1R; PRKD1; |
| | GNB2L1; BCL2L1; CAPN1; MAPK3; CASP8; HDAC2; |
| | HDAC7A; PRKCD; HDAC11; MAPK9; HDAC9; PIK3C2A; |
| | HDAC3; TP53; CASP9; CREBBP; AKT1; PIK3R1; |
| | PDPK1; CASP1; APAF1; FRAP1; CASP2; JUN; BAX; |
| | ATF4; AKT3; PRKCA; CLTC; SGK; HDAC6; CASP3 |
| Apoptosis Signaling | PRKCE; ROCK1; BID; IRAK1; PRKAA2; EIF2AK2; BAK1; |
| | BIRC4; GRK6; MAPK1; CAPNS1; PLK1; AKT2; IKBKB; |
| | CAPN2; CDK8; FAS; NFKB2; BCL2; MAP3K14; MAPK8; |
| | BCL2L1; CAPN1; MAPK3; CASP8; KRAS; RELA; |
| | PRKCD; PRKAA1; MAPK9; CDK2; PIM1; TP53; TNF; |
| | RAF1; IKBKG; RELB; CASP9; DYRK1A; MAP2K2; |
| | CHUK; APAF1; MAP2K1; NFKB1; PAK3; LMNA; CASP2; |
| | BIRC2; TTK; CSNK1A1; BRAF; BAX; PRKCA; SGK; |
| | CASP3; BIRC3; PARP1 |
| B Cell Receptor Signaling | RAC1; PTEN; LYN; ELK1; MAPK1; RAC2; PTPN11; |
| | AKT2; IKBKB; PIK3CA; CREB1; SYK; NFKB2; CAMK2A; |
| | MAP3K14; PIK3CB; PIK3C3; MAPK8; BCL2L1; ABL1; |
| | MAPK3; ETS1; KRAS; MAPK13; RELA; PTPN6; MAPK9; |
| | EGR1; PIK3C2A; BTK; MAPK14; RAF1; IKBKG; RELB; |
| | MAP3K7; MAP2K2; AKT1; PIK3R1; CHUK; MAP2K1; |
| | NFKB1; CDC42; GSK3A; FRAP1; BCL6; BCL10; JUN; |
| | GSK3B; ATF4; AKT3; VAV3; RPS6KB1 |
| Leukocyte Extravasation | ACTN4; CD44; PRKCE; ITGAM; ROCK1; CXCR4; CYBA; |
| Signaling | RAC1; RAP1A; PRKCZ; ROCK2; RAC2; PTPN11; |
| | MMP14; PIK3CA; PRKCI; PTK2; PIK3CB; CXCL12; |
| | PIK3C3; MAPK8; PRKD1; ABL1; MAPK10; CYBB; |
| | MAPK13; RHOA; PRKCD; MAPK9; SRC; PIK3C2A; BTK; |
| | MAPK14; NOX1; PXN; VIL2; VASP; ITGB1; MAP2K2; |
| | CTNND1; PIK3R1; CTNNB1; CLDN1; CDC42; F11R; ITK; |
| | CRKL; VAV3; CTTN; PRKCA; MMP1; MMP9 |
| Integrin Signaling | ACTN4; ITGAM; ROCK1; ITGA5; RAC1; PTEN; RAP1A; |
| | TLN1; ARHGEF7; MAPK1; RAC2; CAPNS1; AKT2; |
| | CAPN2; PIK3CA; PTK2; PIK3CB; PIK3C3; MAPK8; |
| | CAV1; CAPN1; ABL1; MAPK3; ITGA1; KRAS; RHOA; |
| | SRC; PIK3C2A; ITGB7; PPP1CC; ILK; PXN; VASP; |
| | RAF1; FYN; ITGB1; MAP2K2; PAK4; AKT1; PIK3R1; |
| | TNK2; MAP2K1; PAK3; ITGB3; CDC42; RND3; ITGA2; |
| | CRKL; BRAF; GSK3B; AKT3 |
| Acute Phase Response | IRAK1; SOD2; MYD88; TRAF6; ELK1; MAPK1; PTPN11; |
| Signaling | AKT2; IKBKB; PIK3CA; FOS; NFKB2; MAP3K14; |
| | PIK3CB; MAPK8; RIPK1; MAPK3; IL6ST; KRAS; |
| | MAPK13; IL6R; RELA; SOCS1; MAPK9; FTL; NR3C1; |
| | TRAF2; SERPINE1; MAPK14; TNF; RAF1; PDK1; |
| | IKBKG; RELB; MAP3K7; MAP2K2; AKT1; JAK2; PIK3R1; |
| | CHUK; STAT3; MAP2K1; NFKB1; FRAP1; CEBPB; JUN; |
| | AKT3; IL1R1; IL6 |
| PTEN Signaling | ITGAM; ITGA5; RAC1; PTEN; PRKCZ; BCL2L11; |
| | MAPK1; RAC2; AKT2; EGFR; IKBKB; CBL; PIK3CA; |
| | CDKN1B; PTK2; NFKB2; BCL2; PIK3CB; BCL2L1; |
| | MAPK3; ITGA1; KRAS; ITGB7; ILK; PDGFRB; INSR; |
| | RAF1; IKBKG; CASP9; CDKN1A; ITGB1; MAP2K2; |
| | AKT1; PIK3R1; CHUK; PDGFRA; PDPK1; MAP2K1; |
| | NFKB1; ITGB3; CDC42; CCND1; GSK3A; ITGA2; |
| | GSK3B; AKT3; FOXO1; CASP3; RPS6KB1 |
| p53 Signaling | PTEN; EP300; BBC3; PCAF; FASN; BRCA1; GADD45A; |
| Aryl Hydrocarbon Receptor | BIRC5; AKT2; PIK3CA; CHEK1; TP53INP1; BCL2; |
| Signaling | PIK3CB; PIK3C3; MAPK8; THBS1; ATR; BCL2L1; E2F1; |
| | PMAIP1; CHEK2; TNFRSF10B; TP73; RB1; HDAC9; |
| | CDK2; PIK3C2A; MAPK14; TP53; LRDD; CDKN1A; |
| | HIPK2; AKT1; PIK3R1; RRM2B; APAF1; CTNNB1; |
| | SIRT1; CCND1; PRKDC; ATM; SFN; CDKN2A; JUN; |
| | SNAI2; GSK3B; BAχ; AKT3 |
| | HSPB1; EP300; FASN; TGM2; RXRA; MAPK1; NQO1; |
| | NCOR2; SP1; ARNT; CDKN1B; FOS; CHEK1; |
| | SMARCA4; NFKB2; MAPK8; ALDH1A1; ATR; E2F1; |
| | MAPK3; NRIP1; CHEK2; RELA; TP73; GSTP1; RB1; |
| | SRC; CDK2; AHR; NFE2L2; NCOA3; TP53; TNF; |
| | CDKN1A; NCOA2; APAF1; NFKB1; CCND1; ATM; ESR1; |
| | CDKN2A; MYC; JUN; ESR2; BAX; IL6; CYP1B1; |
| | HSP90AA1 |
| Xenobiotic Metabolism | PRKCE; EP300; PRKCZ; RXRA; MAPK1; NQO1; |
| Signaling | NCOR2; PIK3CA; ARNT; PRKCI; NFKB2; CAMK2A; |
| | PIK3CB; PPP2R1A; PIK3C3; MAPK8; PRKD1; |
| | ALDH1A1; MAPK3; NRIP1; KRAS; MAPK13; PRKCD; |
| | GSTP1; MAPK9; NOS2A; ABCB1; AHR; PPP2CA; FTL; |
| | NFE2L2; PIK3C2A; PPARGC1A; MAPK14; TNF; RAF1; |
| | CREBBP; MAP2K2; PIK3R1; PPP2R5C; MAP2K1; |
| | NFKB1; KEAP1; PRKCA; EIF2AK3; IL6; CYP1B1; |
| | HSP90AA1 |
| SAPK/JNK Signaling | PRKCE; IRAK1; PRKAA2; EIF2AK2; RAC1; ELK1; |
| | GRK6; MAPK1; GADD45A; RAC2; PLK1; AKT2; PIK3CA; |
| | FADD; CDK8; PIK3CB; PIK3C3; MAPK8; RIPK1; |
| | GNB2L1; IRS1; MAPK3; MAPK10; DAXX; KRAS; |
| | PRKCD; PRKAA1; MAPK9; CDK2; PIM1; PIK3C2A; |
| | TRAF2; TP53; LCK; MAP3K7; DYRK1A; MAP2K2; |
| | PIK3R1; MAP2K1; PAK3; CDC42; JUN; TTK; CSNK1A1; |
| | CRKL; BRAF; SGK |
| PPAr/RXR Signaling | PRKAA2; EP300; INS; SMAD2; TRAF6; PPARA; FASN; |
| | RXRA; MAPK1; SMAD3; GNAS; IKBKB; NCOR2; |
| | ABCA1; GNAQ; NFKB2; MAP3K14; STAT5B; MAPK8; |
| | IRS1; MAPK3; KRAS; RELA; PRKAA1; PPARGC1A; |
| | NCOA3; MAPK14; INSR; RAF1; IKBKG; RELB; MAP3K7; |
| | CREBBP; MAP2K2; JAK2; CHUK; MAP2K1; NFKB1; |
| | TGFBR1; SMAD4; JUN; IL1R1; PRKCA; IL6; HSP90AA1; |
| | ADIPOQ |
| NF-KB Signaling | IRAK1; EIF2AK2; EP300; INS; MYD88; PRKCZ; TRAF6; |
| | TBK1; AKT2; EGFR; IKBKB; PIK3CA; BTRC; NFKB2; |
| | MAP3K14; PIK3CB; PIK3C3; MAPK8; RIPK1; HDAC2; |
| | KRAS; RELA; PIK3C2A; TRAF2; TLR4; PDGFRB; TNF; |
| | INSR; LCK; IKBKG; RELB; MAP3K7; CREBBP; AKT1; |
| | PIK3R1; CHUK; PDGFRA; NFKB1; TLR2; BCL10; |
| | GSK3B; AKT3; TNFAIP3; IL1R1 |
| Neuregulin Signaling | ERBB4; PRKCE; ITGAM; ITGA5; PTEN; PRKCZ; ELK1; |
| Wnt & Beta catenin | MAPK1; PTPN11; AKT2; EGFR; ERBB2; PRKCI; |
| Signaling | CDKN1B; STAT5B; PRKD1; MAPK3; ITGA1; KRAS; |
| | PRKCD; STAT5A; SRC; ITGB7; RAF1; ITGB1; MAP2K2; |
| | ADAM17; AKT1; PIK3R1; PDPK1; MAP2K1; ITGB3; |
| | EREG; FRAP1; PSEN1; ITGA2; MYC; NRG1; CRKL; |
| | AKT3; PRKCA; HSP90AA1; RPS6KB1 |
| | CD44; EP300; LRP6; DVL3; CSNK1E; GJA1; SMO; |
| | AKT2; PIN1; CDH1; BTRC; GNAQ; MARK2; PPP2R1A; |
| | WNT11; SRC; DKK1; PPP2CA; SOX6; SFRP2; ILK; |
| | LEF1; SOX9; TP53; MAP3K7; CREBBP; TCF7L2; AKT1; |
| | PPP2R5C; WNT5A; LRP5; CTNNB1; TGFBR1; CCND1; |
| | GSK3A; DVL1; APC; CDKN2A; MYC; CSNK1A1; GSK3B; |
| | AKT3; SOX2 |
| Insulin Receptor Signaling | PTEN; INS; EIF4E; PTPN1; PRKCZ; MAPK1; TSC1; |
| | PTPN11; AKT2; CBL; PIK3CA; PRKCI; PIK3CB; PIK3C3; |
| | MAPK8; IRS1; MAPK3; TSC2; KRAS; EIF4EBP1; |
| | SLC2A4; PIK3C2A; PPP1CC; INSR; RAF1; FYN; |
| | MAP2K2; JAK1; AKT1; JAK2; PIK3R1; PDPK1; MAP2K1; |
| | GSK3A; FRAP1; CRKL; GSK3B; AKT3; FOXO1; SGK; |
| | RPS6KB1 |
| IL-6 Signaling | HSPB1; TRAF6; MAPKAPK2; ELK1; MAPK1; PTPN11; |
| | IKBKB; FOS; NFKB2; MAP3K14; MAPK8; MAPK3; |
| | MAPK10; IL6ST; KRAS; MAPK13; IL6R; RELA; SOCS1; |
| | MAPK9; ABCB1; TRAF2; MAPK14; TNF; RAF1; IKBKG; |
| | RELB; MAP3K7; MAP2K2; IL8; JAK2; CHUK; STAT3; |
| | MAP2K1; NFKB1; CEBPB; JUN; IL1R1; SRF; IL6 |
| Hepatic Cholestasis | PRKCE; IRAK1; INS; MYD88; PRKCZ; TRAF6; PPARA; |
| | RXRA; IKBKB; PRKCI; NFKB2; MAP3K14; MAPK8; |
| | PRKD1; MAPK10; RELA; PRKCD; MAPK9; ABCB1; |
| | TRAF2; TLR4; TNF; INSR; IKBKG; RELB; MAP3K7; IL8; |
| | CHUK; NR1H2; TJP2; NFKB1; ESR1; SREBF1; FGFR4; |
| | JUN; IL1R1; PRKCA; IL6 |
| IGF-1 Signaling | IGF1; PRKCZ; ELK1; MAPK1; PTPN11; NEDD4; AKT2; |
| | PIK3CA; PRKCI; PTK2; FOS; PIK3CB; PIK3C3; MAPK8; |
| | IGF1R; IRS1; MAPK3; IGFBP7; KRAS; PIK3C2A; |
| | YWHAZ; PXN; RAF1; CASP9; MAP2K2; AKT1; PIK3R1; |
| | PDPK1; MAP2K1; IGFBP2; SFN; JUN; CYR61; AKT3; |
| | FOXO1; SRF; CTGF; RPS6KB1 |
| NRF2-mediated Oxidative | PRKCE; EP300; SOD2; PRKCZ; MAPK1; SQSTM1; |
| Stress Response | NQO1; PIK3CA; PRKCI; FOS; PIK3CB; PIK3C3; MAPK8; |
| | PRKD1; MAPK3; KRAS; PRKCD; GSTP1; MAPK9; FTL; |
| | NFE2L2; PIK3C2A; MAPK14; RAF1; MAP3K7; CREBBP; |
| | MAP2K2; AKT1; PIK3R1; MAP2K1; PPIB; JUN; KEAP1; |
| | GSK3B; ATF4; PRKCA; EIF2AK3; HSP90AA1 |
| Hepatic Fibrosis/Hepatic | EDN1; IGF1; KDR; FLT1; SMAD2; FGFR1; MET; PGF; |
| Stellate Cell Activation | SMAD3; EGFR; FAS; CSF1; NFKB2; BCL2; MYH9; |
| | IGF1R; IL6R; RELA; TLR4; PDGFRB; TNF; RELB; IL8; |
| | PDGFRA; NFKB1; TGFBR1; SMAD4; VEGFA; BAX; |
| | IL1R1; CCL2; HGF; MMP1; STAT1; IL6; CTGF; MMP9 |
| PPAR Signaling | EP300; INS; TRAF6; PPARA; RXRA; MAPK1; IKBKB; |
| | NCOR2; FOS; NFKB2; MAP3K14; STAT5B; MAPK3; |
| | NRIP1; KRAS; PPARG; RELA; STAT5A; TRAF2; |
| | PPARGC1A; PDGFRB; TNF; INSR; RAF1; IKBKG; |
| | RELB; MAP3K7; CREBBP; MAP2K2; CHUK; PDGFRA; |
| | MAP2K1; NFKB1; JUN; IL1R1; HSP90AA1 |
| Fc Epsilon RI Signaling | PRKCE; RAC1; PRKCZ; LYN; MAPK1; RAC2; PTPN11; |
| | AKT2; PIK3CA; SYK; PRKCI; PIK3CB; PIK3C3; MAPK8; |
| | PRKD1; MAPK3; MAPK10; KRAS; MAPK13; PRKCD; |
| | MAPK9; PIK3C2A; BTK; MAPK14; TNF; RAF1; FYN; |
| | MAP2K2; AKT1; PIK3R1; PDPK1; MAP2K1; AKT3; |
| | VAV3; PRKCA |
| G-Protein Coupled | PRKCE; RAP1A; RGS16; MAPK1; GNAS; AKT2; IKBKB; |
| Receptor Signaling | PIK3CA; CREB1; GNAQ; NFKB2; CAMK2A; PIK3CB; |
| | PIK3C3; MAPK3; KRAS; RELA; SRC; PIK3C2A; RAF1; |
| | IKBKG; RELB; FYN; MAP2K2; AKT1; PIK3R1; CHUK; |
| | PDPK1; STAT3; MAP2K1; NFKB1; BRAF; ATF4; AKT3; |
| | PRKCA |
| Inositol Phosphate | PRKCE; IRAK1; PRKAA2; EIF2AK2; PTEN; GRK6; |
| Metabolism | MAPK1; PLK1; AKT2; PIK3CA; CDK8; PIK3CB; PIK3C3; |
| | MAPK8; MAPK3; PRKCD; PRKAA1; MAPK9; CDK2; |
| | PIM1; PIK3C2A; DYRK1A; MAP2K2; PIP5K1A; PIK3R1; |
| | MAP2K1; PAK3; ATM; TTK; CSNK1A1; BRAF; SGK |
| PDGF Signaling | EIF2AK2; ELK1; ABL2; MAPK1; PIK3CA; FOS; PIK3CB; |
| | PIK3C3; MAPK8; CAV1; ABL1; MAPK3; KRAS; SRC; |
| | PIK3C2A; PDGFRB; RAF1; MAP2K2; JAK1; JAK2; |
| | PIK3R1; PDGFRA; STAT3; SPHK1; MAP2K1; MYC; |
| | JUN; CRKL; PRKCA; SRF; STAT1; SPHK2 |
| VEGF Signaling | ACTN4; ROCK1; KDR; FLT1; ROCK2; MAPK1; PGF; |
| | AKT2; PIK3CA; ARNT; PTK2; BCL2; PIK3CB; PIK3C3; |
| | BCL2L1; MAPK3; KRAS; HIF1A; NOS3; PIK3C2A; PXN; |
| | RAF1; MAP2K2; ELAVL1; AKT1; PIK3R1; MAP2K1; SFN; |
| | VEGFA; AKT3; FOXO1; PRKCA |
| Natural Killer Cell Signaling | PRKCE; RAC1; PRKCZ; MAPK1; RAC2; PTPN11; |
| | KIR2DL3; AKT2; PIK3CA; SYK; PRKCI; PIK3CB; |
| | PIK3C3; PRKD1; MAPK3; KRAS; PRKCD; PTPN6; |
| | PIK3C2A; LCK; RAF1; FYN; MAP2K2; PAK4; AKT1; |
| | PIK3R1; MAP2K1; PAK3; AKT3; VAV3; PRKCA |
| Cell Cycle: G1/S | HDAC4; SMAD3; SUV39H1; HDAC5; CDKN1B; BTRC; |
| Checkpoint Regulation | ATR; ABL1; E2F1; HDAC2; HDAC7A; RB1; HDAC11; |
| | HDAC9; CDK2; E2F2; HDAC3; TP53; CDKN1A; CCND1; |
| | E2F4; ATM; RBL2; SMAD4; CDKN2A; MYC; NRG1; |
| | GSK3B; RBL1; HDAC6 |
| T Cell Receptor Signaling | RAC1; ELK1; MAPK1; IKBKB; CBL; PIK3CA; FOS; |
| | NFKB2; PIK3CB; PIK3C3; MAPK8; MAPK3; KRAS; |
| | RELA; PIK3C2A; BTK; LCK; RAF1; IKBKG; RELB; FYN; |
| | MAP2K2; PIK3R1; CHUK; MAP2K1; NFKB1; ITK; BCL10; |
| | JUN; VAV3 |
| Death Receptor Signaling | CRADD; HSPB1; BID; BIRC4; TBK1; IKBKB; FADD; |
| | FAS; NFKB2; BCL2; MAP3K14; MAPK8; RIPK1; CASP8; |
| | DAXX; TNFRSF10B; RELA; TRAF2; TNF; IKBKG; RELB; |
| | CASP9; CHUK; APAF1; NFKB1; CASP2; BIRC2; CASP3; |
| | BIRC3 |
| FGF Signaling | RAC1; FGFR1; MET; MAPKAPK2; MAPK1; PTPN11; |
| | AKT2; PIK3CA; CREB1; PIK3CB; PIK3C3; MAPK8; |
| | MAPK3; MAPK13; PTPN6; PIK3C2A; MAPK14; RAF1; |
| | AKT1; PIK3R1; STAT3; MAP2K1; FGFR4; CRKL; ATF4; |
| | AKT3; PRKCA; HGF |
| GM-CSF Signaling | LYN; ELK1; MAPK1; PTPN11; AKT2; PIK3CA; CAMK2A; |
| | STAT5B; PIK3CB; PIK3C3; GNB2L1; BCL2L1; MAPK3; |
| | ETS1; KRAS; RUNX1; PIM1; PIK3C2A; RAF1; MAP2K2; |
| | AKT1; JAK2; PIK3R1; STAT3; MAP2K1; CCND1; AKT3; |
| | STAT1 |
| Amyotrophic Lateral | BID; IGF1; RAC1; BIRC4; PGF; CAPNS1; CAPN2; |
| Sclerosis Signaling | PIK3CA; BCL2; PIK3CB; PIK3C3; BCL2L1; CAPN1; |
| | PIK3C2A; TP53; CASP9; PIK3R1; RAB5A; CASP1; |
| | APAF1; VEGFA; BIRC2; BAχ; AKT3; CASP3; BIRC3 |
| JAK/Stat Signaling | PTPN1; MAPK1; PTPN11; AKT2; PIK3CA; STAT5B; |
| | PIK3CB; PIK3C3; MAPK3; KRAS; SOCS1; STAT5A; |
| | PTPN6; PIK3C2A; RAF1; CDKN1A; MAP2K2; JAK1; |
| | AKT1; JAK2; PIK3R1; STAT3; MAP2K1; FRAP1; AKT3; |
| | STAT1 |
| Nicotinate and Nicotinamide | PRKCE; IRAK1; PRKAA2; EIF2AK2; GRK6; MAPK1; |
| Metabolism | PLK1; AKT2; CDK8; MAPK8; MAPK3; PRKCD; PRKAA1; |
| | PBEF1; MAPK9; CDK2; PIM1; DYRK1A; MAP2K2; |
| | MAP2K1; PAK3; NT5E; TTK; CSNK1A1; BRAF; SGK |
| Chemokine Signaling | CXCR4; ROCK2; MAPK1; PTK2; FOS; CFL1; GNAQ; |
| | CAMK2A; CXCL12; MAPK8; MAPK3; KRAS; MAPK13; |
| | RHOA; CCR3; SRC; PPP1CC; MAPK14; NOX1; RAF1; |
| | MAP2K2; MAP2K1; JUN; CCL2; PRKCA |
| IL-2 Signaling | ELK1; MAPK1; PTPN11; AKT2; PIK3CA; SYK; FOS; |
| | STAT5B; PIK3CB; PIK3C3; MAPK8; MAPK3; KRAS; |
| | SOCS1; STAT5A; PIK3C2A; LCK; RAF1; MAP2K2; |
| | JAK1; AKT1; PIK3R1; MAP2K1; JUN; AKT3 |
| Synaptic Long Term | PRKCE; IGF1; PRKCZ; PRDX6; LYN; MAPK1; GNAS; |
| Depression | PRKCI; GNAQ; PPP2R1A; IGF1R; PRKD1; MAPK3; |
| | KRAS; GRN; PRKCD; NOS3; NOS2A; PPP2CA; |
| | YWHAZ; RAF1; MAP2K2; PPP2R5C; MAP2K1; PRKCA |
| Estrogen Receptor | TAF4B; EP300; CARM1; PCAF; MAPK1; NCOR2; |
| Signaling | SMARCA4; MAPK3; NRIP1; KRAS; SRC; NR3C1; |
| | HDAC3; PPARGC1A; RBM9; NCOA3; RAF1; CREBBP; |
| | MAP2K2; NCOA2; MAP2K1; PRKDC; ESR1; ESR2 |
| Protein Ubiquitination | TRAF6; SMURF1; BIRC4; BRCA1; UCHL1; NEDD4; |
| Pathway | CBL; UBE2I; BTRC; HSPA5; USP7; USP10; FBXW7; |
| | USP9X; STUB1; USP22; B2M; BIRC2; PARK2; USP8; |
| | USP1; VHL; HSP90AA1; BIRC3 |
| IL-10 Signaling | TRAF6; CCR1; ELK1; IKBKB; SP1; FOS; NFKB2; |
| | MAP3K14; MAPK8; MAPK13; RELA; MAPK14; TNF; |
| | IKBKG; RELB; MAP3K7; JAK1; CHUK; STAT3; NFKB1; |
| | JUN; IL1R1; IL6 |
| VDR/RXR Activation | PRKCE; EP300; PRKCZ; RXRA; GADD45A; HES1; |
| | NCOR2; SP1; PRKCI; CDKN1B; PRKD1; PRKCD; |
| | RUNX2; KLF4; YY1; NCOA3; CDKN1A; NCOA2; SPP1; |
| | LRP5; CEBPB; FOXO1; PRKCA |
| TGF-beta Signaling | EP300; SMAD2; SMURF1; MAPK1; SMAD3; SMAD1; |
| | FOS; MAPK8; MAPK3; KRAS; MAPK9; RUNX2; |
| | SERPINE1; RAF1; MAP3K7; CREBBP; MAP2K2; |
| | MAP2K1; TGFBR1; SMAD4; JUN; SMAD5 |
| Toll-like Receptor Signaling | IRAK1; EIF2AK2; MYD88; TRAF6; PPARA; ELK1; |
| | IKBKB; FOS; NFKB2; MAP3K14; MAPK8; MAPK13; |
| | RELA; TLR4; MAPK14; IKBKG; RELB; MAP3K7; CHUK; |
| | NFKB1; TLR2; JUN |
| p38 MAPK Signaling | HSPB1; IRAK1; TRAF6; MAPKAPK2; ELK1; FADD; FAS; |
| | CREB1; DDIT3; RPS6KA4; DAXX; MAPK13; TRAF2; |
| | MAPK14; TNF; MAP3K7; TGFBR1; MYC; ATF4; IL1R1; |
| | SRF; STAT1 |
| Neurotrophin/TRK Signaling | NTRK2; MAPK1; PTPN11; PIK3CA; CREB1; FOS; |
| | PIK3CB; PIK3C3; MAPK8; MAPK3; KRAS; PIK3C2A; |
| | RAF1; MAP2K2; AKT1; PIK3R1; PDPK1; MAP2K1; |
| | CDC42; JUN; ATF4 |
| FXR/RXR Activation | INS; PPARA; FASN; RXRA; AKT2; SDC1; MAPK8; |
| | APOB; MAPK10; PPARG; MTTP; MAPK9; PPARGC1A; |
| | TNF; CREBBP; AKT1; SREBF1; FGFR4; AKT3; FOXO1 |
| Synaptic Long Term | PRKCE; RAP1A; EP300; PRKCZ; MAPK1; CREB1; |
| Potentiation | PRKCI; GNAQ; CAMK2A; PRKD1; MAPK3; KRAS; |
| | PRKCD; PPP1CC; RAF1; CREBBP; MAP2K2; MAP2K1; |
| | ATF4; PRKCA |
| Calcium Signaling | RAP1A; EP300; HDAC4; MAPK1; HDAC5; CREB1; |
| | CAMK2A; MYH9; MAPK3; HDAC2; HDAC7A; HDAC11; |
| | HDAC9; HDAC3; CREBBP; CALR; CAMKK2; ATF4; |
| | HDAC6 |
| EGF Signaling | ELK1; MAPK1; EGFR; PIK3CA; FOS; PIK3CB; PIK3C3; |
| | MAPK8; MAPK3; PIK3C2A; RAF1; JAK1; PIK3R1; |
| | STAT3; MAP2K1; JUN; PRKCA; SRF; STAT1 |
| Hypoxia Signaling in the | EDN1; PTEN; EP300; NQO1; UBE2I; CREB1; ARNT; |
| Cardiovascular System | HIF1A; SLC2A4; NOS3; TP53; LDHA; AKT1; ATM; |
| | VEGFA; JUN; ATF4; VHL; HSP90AA1 |
| LPS/IL-1 Mediated Inhibition | IRAK1; MYD88; TRAF6; PPARA; RXRA; ABCA1; |
| of RXR Function | MAPK8; ALDH1A1; GSTP1; MAPK9; ABCB1; TRAF2; |
| | TLR4; TNF; MAP3K7; NR1H2; SREBF1; JUN; IL1R1 |
| LXR/RXR Activation | FASN; RXRA; NCOR2; ABCA1; NFKB2; IRF3; RELA; |
| | NOS2A; TLR4; TNF; RELB; LDLR; NR1H2; NFKB1; |
| | SREBF1; IL1R1; CCL2; IL6; MMP9 |
| Amyloid Processing | PRKCE; CSNK1E; MAPK1; CAPNS1; AKT2; CAPN2; |
| | CAPN1; MAPK3; MAPK13; MAPT; MAPK14; AKT1; |
| | PSEN1; CSNK1A1; GSK3B; AKT3; APP |
| IL-4 Signaling | AKT2; PIK3CA; PIK3CB; PIK3C3; IRS1; KRAS; SOCS1; |
| | PTPN6; NR3C1; PIK3C2A; JAK1; AKT1; JAK2; PIK3R1; |
| | FRAP1; AKT3; RPS6KB1 |
| Cell Cycle: G2/M DNA | EP300; PCAF; BRCA1; GADD45A; PLK1; BTRC; |
| Damage Checkpoint | CHEK1; ATR; CHEK2; YWHAZ; TP53; CDKN1A; |
| Regulation | PRKDC; ATM; SFN; CDKN2A |
| Nitric Oxide Signaling in the | KDR; FLT1; PGF; AKT2; PIK3CA; PIK3CB; PIK3C3; |
| Cardiovascular System | CAV1; PRKCD; NOS3; PIK3C2A; AKT1; PIK3R1; |
| | VEGFA; AKT3; HSP90AA1 |
| Purine Metabolism | NME2; SMARCA4; MYH9; RRM2; ADAR; EIF2AK4; |
| | PKM2; ENTPD1; RAD51; RRM2B; TJP2; RAD51C; |
| | NT5E; POLD1; NME1 |
| cAMP-mediated Signaling | RAP1A; MAPK1; GNAS; CREB1; CAMK2A; MAPK3; |
| | SRC; RAF1; MAP2K2; STAT3; MAP2K1; BRAF; ATF4 |
| Mitochondrial Dysfunction | SOD2; MAPK8; CASP8; MAPK10; MAPK9; CASP9; |
| Notch Signaling | PARK7; PSEN1; PARK2; APP; CASP3 |
| | HES1; JAG1; NUMB; NOTCH4; ADAM17; NOTCH2; |
| | PSEN1; NOTCH3; NOTCH1; DLL4 |
| Endoplasmic Reticulum | HSPA5; MAPK8; XBP1; TRAF2; ATF6; CASP9; ATF4; |
| Stress Pathway | EIF2AK3; CASP3 |
| Pyrimidine Metabolism | NME2; AICDA; RRM2; EIF2AK4; ENTPD1; RRM2B; |
| | NT5E; POLD1; NME1 |
| Parkinson's Signaling | UCHL1; MAPK8; MAPK13; MAPK14; CASP9; PARK7; |
| | PARK2; CASP3 |
| Cardiac & Beta Adrenergic | GNAS; GNAQ; PPP2R1A; GNB2L1; PPP2CA; PPP1CC; |
| Signaling | PPP2R5C |
| Glycolysis/Gluconeogenesis | HK2; GCK; GPI; ALDH1A1; PKM2; LDHA; HK1 |
| Interferon Signaling | IRF1; SOCS1; JAK1; JAK2; IFITM1; STAT1; IFIT3 |
| Sonic Hedgehog Signaling | ARRB2; SMO; GLI2; DYRK1A; GLI1; GSK3B; DYRK1B |
| Glycerophospholipid | PLD1; GRN; GPAM; YWHAZ; SPHK1; SPHK2 |
| Metabolism | |
| Phospholipid Degradation | PRDX6; PLD1; GRN; YWHAZ; SPHK1; SPHK2 |
| Tryptophan Metabolism | SIAH2; PRMT5; NEDD4; ALDH1A1; CYP1B1; SIAH1 |
| Lysine Degradation | SUV39H1; EHMT2; NSD1; SETD7; PPP2R5C |
| Nucleotide Excision Repair | ERCC5; ERCC4; XPA; XPC; ERCC1 |
| Pathway | |
| Starch and Sucrose | UCHL1; HK2; GCK; GPI; HK1 |
| Metabolism | |
| Aminosugars Metabolism | NQO1; HK2; GCK; HK1 |
| Arachidonic Acid | PRDX6; GRN; YWHAZ; CYP1B1 |
| Metabolism | |
| Circadian Rhythm Signaling | CSNK1E; CREB1; ATF4; NR1D1 |
| Coagulation System | BDKRB1; F2R; SERPINE1; F3 |
| Dopamine Receptor | PPP2R1A; PPP2CA; PPP1CC; PPP2R5C |
| Signaling | |
| Glutathione Metabolism | IDH2; GSTP1; ANPEP; IDH1 |
| Glycerolipid Metabolism | ALDH1A1; GPAM; SPHK1; SPHK2 |
| Linoleic Acid Metabolism | PRDX6; GRN; YWHAZ; CYP1B1 |
| Methionine Metabolism | DNMT1; DNMT3B; AHCY; DNMT3A |
| Pyruvate Metabolism | GLO1; ALDH1A1; PKM2; LDHA |
| Arginine and Proline | ALDH1A1; NOS3; NOS2A |
| Metabolism | |
| Eicosanoid Signaling | PRDX6; GRN; YWHAZ |
| Fructose and Mannose | HK2; GCK; HK1 |
| Metabolism | |
| Galactose Metabolism | HK2; GCK; HK1 |
| Stilbene, Coumarine and | PRDX6; PRDX1; TYR |
| Lignin Biosynthesis | |
| Antigen Presentation | CALR; B2M |
| Pathway | |
| Biosynthesis of Steroids | NQO1; DHCR7 |
| Butanoate Metabolism | ALDH1A1; NLGN1 |
| Citrate Cycle | IDH2; IDH1 |
| Fatty Acid Metabolism | ALDH1A1; CYP1B1 |
| Glycerophospholipid | PRDX6; CHKA |
| Metabolism | |
| Histidine Metabolism | PRMT5; ALDH1A1 |
| Inositol Metabolism | ERO1L; APEX1 |
| Metabolism of Xenobiotics | GSTP1; CYP1B1 |
| by Cytochrome p450 | |
| Methane Metabolism | PRDX6; PRDX1 |
| Phenylalanine Metabolism | PRDX6; PRDX1 |
| Propanoate Metabolism | ALDH1A1; LDHA |
| Selenoamino Acid | PRMT5; AHCY |
| Metabolism | |
| Sphingolipid Metabolism | SPHK1; SPHK2 |
| Aminophosphonate | PRMT5 |
| Metabolism | |
| Androgen and Estrogen | PRMT5 |
| Metabolism | |
| Ascorbate and Aldarate | ALDH1A1 |
| Metabolism | |
| Bile Acid Biosynthesis | ALDH1A1 |
| Cysteine Metabolism | LDHA |
| Fatty Acid Biosynthesis | FASN |
| Glutamate Receptor | GNB2L1 |
| Signaling | |
| NRF2-mediated Oxidative | PRDX1 |
| Stress Response | |
| Pentose Phosphate | GPI |
| Pathway | |
| Pentose and Glucuronate | UCHL1 |
| Interconversions | |
| Retinol Metabolism | ALDH1A1 |
| Riboflavin Metabolism | TYR |
| Tyrosine Metabolism | PRMT5, TYR |
| Ubiquinone Biosynthesis | PRMT5 |
| Valine, Leucine and | ALDH1A1 |
| Isoleucine Degradation | |
| Glycine, Serine and | CHKA |
| Threonine Metabolism | |
| Lysine Degradation | ALDH1A1 |
| Pain/Taste | TRPM5; TRPA1 |
| Pain | TRPM7; TRPC5; TRPC6; TRPC1; Cnr1; crn2; Grk2; |
| | Trpa1; Pomc; Cgrp; Crf; Pka; Era; Nr2b; TRPM5; Prkaca; |
| | Prkacb; Prkar1a; Prkar2a |
| Mitochondrial Function | AIF; CytC; SMAC (Diablo); Aifm-1; Aifm-2 |
| Developmental Neurology | BMP-4; Chordin (Chrd); Noggin (Nog); WNT (Wnt2; |
| | Wnt2b; Wnt3a; Wnt4; Wnt5a; Wnt6; Wnt7b; Wnt8b; |
| | Wnt9a; Wnt9b; Wnt10a; Wnt10b; Wnt16); beta-catenin; |
| | Dkk-1; Frizzled related proteins; Otx-2; Gbx2; FGF-8; |
| | Reelin; Dab1; unc-86 (Pou4f1 or Brn3a); Numb; Reln |

[0328] In an aspect, the invention provides a method of individualized or personalized treatment of a genetic disease in a subject in need of such treatment comprising: (a) introducing one or more mutations ex vivo in a tissue, organ or a cell line, or in vivo in a transgenic non-human mammal, comprising delivering to cell(s) of the tissue, organ, cell or mammal a composition comprising the particle delivery system or the delivery system or the virus particle of any one of the above embodiment or the cell of any one of the above embodiment, wherein the specific mutations or precise sequence substitutions are or have been correlated to the genetic disease; (b) testing treatment(s) for the genetic disease on the cells to which the vector has been delivered that have the specific mutations or precise sequence substitutions correlated to the genetic disease; and (c) treating the subject based on results from the testing of treatment(s) of step (b).

### Infectious Diseases

[0329] In some embodiments, the composition, system(s), or component(s) thereof can be used to diagnose, prognose, treat, and/or prevent an infectious disease caused by a microorganism, such as bacteria, virus, fungi, parasites, or combinations thereof.

[0330] In some embodiments, the system(s) or component(s) thereof can be capable of targeting specific microorganism within a mixed population. Exemplary methods of such techniques are described in e.g. Gomaa A A, Klumpe H E, Luo M L, Selle K, Barrangou R, Beisel

[0331] CL. 2014. Programmable removal of bacterial strains by use of genome-targeting composition, systems. mBio 5: e00928-13; Citorik R J, Mimee M, Lu T K. 2014. Sequence-specific antimicrobials using efficiently delivered RNA-guided nucleases. Nat Biotechnol 32:1141-1145, the teachings of which can be adapted for use with the compositions, systems, and components thereof described herein.

[0332] In some embodiments, the composition, system(s), and/or components thereof can be capable of targeting pathogenic and/or drug-resistant microorganisms, such as bacteria, virus, parasites, and fungi. In some embodiments, the composition, system(s), and/or components thereof can be capable of targeting and modifying one or more polynucleotides in a pathogenic microorganism such that the microorganism is less virulent, killed, inhibited, or is otherwise rendered incapable of causing disease and/or infecting and/or replicating in a host cell.

[0333] In some embodiments, the pathogenic bacteria that can be targeted and/or modified by the composition, system(s), and/or component(s) thereof described herein include, but are not limited to, those of the genus Actinomyces (e.g., A. israelii), Bacillus (e.g., B. anthracis, B. cereus), Bactereoides (e.g., B. fragilis), Bartonella (B. henselae, B. quintana), Bordetella (B. pertussis), Borrelia (e.g., B. burgdorferi, B. garinii, B. afzelii, and B. recurreentis), Brucella (e.g., B. abortus, B. canis, B. melitensis, and B. suis), Campylobacter (e.g., C. jejuni), Chlamydia (e.g., C. pneumoniae and C. trachomatis), Chlamydophila (e.g., C. psittaci), Clostridium (e.g., C. botulinum, C. difficile, C. perfringens. C. tetani), Corynebacterium (e.g., C. diptheriae), Enterococcus (e.g., E. Faecalis, E. faecium), Ehrlichia (E. canis and E. chaffensis) Escherichia (e.g., E. coli), Francisella (e.g., F. tularensis), Haemophilus (e.g., H. influenzae), Helicobacter (H. pylori), Klebsiella (e.g., K. pneumoniae), Legionella (e.g., L. pneumophila), Leptospira (e.g., L. interrogans, L. santarosai, L. weilii, L. noguchii), Listereia (e.g., L. monocytogeenes), Mycobacterium (e.g., M. leprae, M. tuberculosis, M. ulcerans), Mycoplasma (M. pneumoniae), Neisseria (N. gonorrhoeae and N. menigitidis), Nocardia (e.g., N. asteeroides), Pseudomonas (P. aeruginosa), Rickettsia (R. rickettsia), Salmonella (S. typhi and S. typhimurium), Shigella (S. sonnei and S. dysenteriae), Staphylococcus (S. aureus, S. epidermidis, and S. saprophyticus), Streptococcus (S. agalactiaee, S. pneumoniae, S. pyogenes), Treponema (T. pallidum), Ureeaplasma (e.g., U. urealyticum), Vibrio (e.g., V. cholerae), Yersinia (e.g., Y pestis, Y, enteerocolitica, and Y, pseudotuberculosis).

[0334] In some embodiments, the pathogenic virus that can be targeted and/or modified by the composition, system(s), and/or component(s) thereof described herein include, but are not limited to, a double-stranded DNA virus, a partly double-stranded DNA virus, a single-stranded DNA virus, a positive single-stranded RNA virus, a negative single-stranded RNA virus, or a double stranded RNA virus. In some embodiments, the pathogenic virus can be from the family Adenoviridae (e.g., Adenovirus), Herpesviridae (e.g., Herpes simplex, type 1, Herpes simplex, type 2, Varicella-zoster virus, Epstein-Barr virus, Human cytomegalovirus, Human herpesvirus, type 8), Papillomaviridae (e.g., Human papillomavirus), Polyomaviridae (e.g., BK virus, JC virus), Poxviridae (e.g., smallpox), Hepadnaviridae (e.g., Hepatitis B), Parvoviridae (e.g., Parvovirus B19), Astroviridae (e.g., Human astrovirus), Caliciviridae (e.g., Norwalk virus), Picornaviridae (e.g., coxsackievirus, hepatitis A virus, poliovirus, rhinovirus), Coronaviridae (e.g., Severe acute respiratory syndrome-related coronavirus, strains: Severe acute respiratory syndrome virus, Severe acute respiratory syndrome coronavirus 2 (COVID-19)), Flaviviridae (e.g., Hepatitis C virus, yellow fever virus, dengue virus, West Nile virus, TBE virus), Togaviridae (e.g., Rubella virus), Hepeviridae (e.g., Hepatitis E virus), Retroviridae (Human immunodeficiency virus (HIV)), Orthomyxoviridae (e.g., Influenza virus), Arenaviridae (e.g., Lassa virus), Bunyaviridae (e.g., Crimean-Congo hemorrhagic fever virus, Hantaan virus), Filoviridae (e.g., Ebola virus and Marburg virus), Paramyxoviridae (e.g., Measles virus, Mumps virus, Parainfluenza virus, Respiratory syncytial virus), Rhabdoviridae (Rabies virus), Hepatitis D virus, Reoviridae (e.g., Rotavirus, Orbivirus, Coltivirus, Banna virus).

[0335] In some embodiments, the pathogenic fungi that can be targeted and/or modified by the composition, system(s), and/or component(s) thereof described herein include, but are not limited to, those of the genus Candida (e.g., C. albicans), Aspergillus (e.g., A. fumigatus, A. flavus, A. clavatus), Cryptococcus (e.g., C. neoformans, C. gattii), Histoplasma (H. capsulatum), Pneumocystis (e.g., P. jiroveecii), Stachybotrys (e.g., S. chartarum).

[0336] In some embodiments, the pathogenic parasites that can be targeted and/or modified by the composition, system(s), and/or component(s) thereof described herein include, but are not limited to, protozoa, helminths, and ectoparasites. In some embodiments, the pathogenic protozoa that can be targeted and/or modified by the composition, system(s), and/or component(s) thereof described herein include, but are not limited to, those from the groups Sarcodina (e.g., ameba such as Entamoeba), Mastigophora (e.g., flagellates such as Giardia and Leishmania), Cilophora (e.g., ciliates such as Balantidum), and sporozoa (e.g., plasmodium and cryptosporidium). In some embodiments, the pathogenic helminths that can be targeted and/or modified by the composition, system(s), and/or component(s) thereof described herein include, but are not limited to, flatworms (platyhelminths), thorny-headed worms (acanthoceephalins), and roundworms (nematodes). In some embodiments, the pathogenic ectoparasites that can be targeted and/or modified by the composition, system(s), and/or component(s) thereof described herein include, but are not limited to, ticks, fleas, lice, and mites.

[0337] In some embodiments, the pathogenic parasite that can be targeted and/or modified by the composition, system(s), and/or component(s) thereof described herein include, but are not limited to, Acanthamoeba spp., Balamuthia mandrillaris, Babesiosis spp. (e.g., Babesia B. divergens, B. bigemina, B. equi, B. microfti, B. duncani), Balantidiasis spp. (e.g., Balantidium coli), Blastocystis spp., Cryptosporidium spp., Cyclosporiasis spp. (e.g., Cyclospora cayetanensis), Dientamoebiasis spp. (e.g., Dientamoeba fragilis), Amoebiasis spp. (e.g., Entamoeba histolytica), Giardiasis spp. (e.g., Giardia lamblia), Isosporiasis spp. (e.g., Isospora belli), Leishmania spp., Naegleria spp. (e.g., Naegleria fowleri), Plasmodium spp. (e.g., Plasmodium falciparum, Plasmodium vivax, Plasmodium ovale curtisi, Plasmodium ovale wallikeri, Plasmodium malariae, Plasmodium knowlesi), Rhinosporidiosis spp. (e.g., Rhinosporidium seeberi), Sarcocystosis spp. (e.g., Sarcocystis bovihominis, Sarcocystis suihominis), Toxoplasma spp. (e.g., Toxoplasma gondii), Trichomonas spp. (e.g., Trichomonas vaginalis), Trypanosoma spp. (e.g., Trypanosoma brucei), Trypanosoma spp. (e.g., Trypanosoma cruzi), Tapeworm (e.g., Cestoda, Taenia multiceps, Taenia saginata, Taenia solium), Diphyllobothrium latum spp., Echinococcus spp. (e.g., Echinococcus granulosus, Echinococcus multilocularis, E. vogeli, E. oligarthrus), Hymenolepis spp. (e.g., Hymenolepis nana, Hymenolepis diminuta), Bertiella spp. (e.g., Bertiella mucronata, Bertiella studeri), Spirometra (e.g., Spirometra erinaceieuropaei), Clonorchis spp. (e.g., Clonorchis sinensis; Clonorchis viverrini), Dicrocoelium spp. (e.g., Dicrocoelium dendriticum), Fasciola spp. (e.g., Fasciola hepatica, Fasciola gigantica), Fasciolopsis spp. (e.g., Fasciolopsis buski), Metagonimus spp. (e.g., Metagonimus yokogawai), Metorchis spp. (e.g., Metorchis conjunctus), Opisthorchis spp. (e.g., Opisthorchis viverrini, Opisthorchis felineus), Clonorchis spp. (e.g., Clonorchis sinensis), Paragonimus spp. (e.g., Paragonimus westermani; Paragonimus africanus; Paragonimus caliensis; Paragonimus kellicotti; Paragonimus skrjabini; Paragonimus uterobilateralis), Schistosoma sp., Schistosoma spp. (e.g., Schistosoma mansoni, Schistosoma haematobium, Schistosoma japonicum, Schistosoma mekongi, and Schistosoma intercalatum), Echinostoma spp. (e.g., E. echinatum), Trichobilharzia spp. (e.g., Trichobilharzia regent), Ancylostoma spp. (e.g., Ancylostoma duodenale), Necator spp. (e.g., Necator americanus), Angiostrongylus spp., Anisakis spp., Ascaris spp. (e.g., Ascaris lumbricoides), Baylisascaris spp. (e.g., Baylisascaris procyonis), Brugia spp. (e.g., Brugia malayi, Brugia timori), Dioctophyme spp. (e.g., Dioctophyme renale), Dracunculus spp. (e.g., Dracunculus medinensis), Enterobius spp. (e.g., Enterobius vermicularis, Enterobius gregorii), Gnathostoma spp. (e.g., Gnathostoma spinigerum, Gnathostoma hispidum), Halicephalobus spp. (e.g., Halicephalobus gingivalis), Loa loa spp. (e.g., Loa loa filaria), Mansonella spp. (e.g., Mansonella streptocerca), Onchocerca spp. (e.g., Onchocerca volvulus), Strongyloides spp. (e.g., Strongyloides stercoralis), Thelazia spp. (e.g., Thelazia californiensis, Thelazia callipaeda), Toxocara spp. (e.g., Toxocara canis, Toxocara cati, Toxascaris leonine), Trichinella spp. (e.g., Trichinella spiralis, Trichinella britovi, Trichinella nelsoni, Trichinella nativa), Trichuris spp. (e.g., Trichuris trichiura, Trichuris vulpis), Wuchereria spp. (e.g., Wuchereria bancrofti), Dermatobia spp. (e.g., Dermatobia hominis), Tunga spp. (e.g., Tunga penetrans), Cochliomyia spp. (e.g., Cochliomyia hominivorax), Linguatula spp. (e.g., Linguatula serrata), Archiacanthocephala sp., Moniliformis sp. (e.g., Moniliformis moniliformis), Pediculus spp. (e.g., Pediculus humanus capitis, Pediculus humanus humanus), Pthirus spp. (e.g., Pthirus pubis), Arachnida spp. (e.g., Trombiculidae, Ixodidae, Argaside), Siphonaptera spp (e.g., Siphonaptera: Pulicinae), Cimicidae spp. (e.g., Cimex lectularius and Cimex hemipterus), Diptera spp., Demodex spp. (e.g., Demodex folliculorum/brevis/canis), Sarcoptes spp. (e.g., Sarcoptes scabiei), Dermanyssus spp. (e.g., Dermanyssus gallinae), Ornithonyssus spp. (e.g., Ornithonyssus sylviarum, Ornithonyssus bursa, Ornithonyssus bacoti), Laelaps spp. (e.g., Laelaps echidnina), Liponyssoides spp. (e.g., Liponyssoides sanguineus).

[0338] In some embodiments, the gene targets can be any of those as set forth in Table 1 of Strich and Chertow. 2019. J. Clin. Microbio. 57:4e01307-18, which is incorporated herein as if expressed in its entirety herein.

[0339] In some embodiments, the method can include delivering a composition, system, and/or component thereof to a pathogenic organism described herein, allowing the composition, system, and/or component thereof to specifically bind and modify one or more targets in the pathogenic organism, whereby the modification kills, inhibits, reduces the pathogenicity of the pathogenic organism, or otherwise renders the pathogenic organism non-pathogenic. In some embodiments, delivery of the composition, system, occurs in vivo (i.e., in the subject being treated). In some embodiments occurs by an intermediary, such as microorganism or phage that is non-pathogenic to the subject but is capable of transferring polynucleotides and/or infecting the pathogenic microorganism. In some embodiments, the intermediary microorganism can be an engineered bacteria, virus, or phage that contains the composition, system(s), and/or component(s) thereof and/or CRISPR-Cas vectors and/or vector systems. The method can include administering an intermediary microorganism containing the composition, system(s), and/or component(s) thereof and/or CRISPR-Cas vectors and/or vector systems to the subject to be treated. The intermediary microorganism can then produce the CRISPR-system and/or component thereof or transfer a composition, system, polynucleotide to the pathogenic organism. In embodiments, where the CRISPR-system and/or component thereof, vector, or vector system is transferred to the pathogenic microorganism, the composition, system, or component thereof is then produced in the pathogenic microorganism and modifies the pathogenic microorganism such that it is less virulent, killed, inhibited, or is otherwise rendered incapable of causing disease and/or infecting and/or replicating in a host or cell thereof.

[0340] In some embodiments, where the pathogenic microorganism inserts its genetic material into the host cell's genome (e.g., a virus), the composition, system can be designed such that it modifies the host cell's genome such that the viral DNA or cDNA cannot be replicated by the host cell's machinery into a functional virus. In some embodiments, where the pathogenic microorganism inserts its genetic material into the host cell's genome (e.g., a virus), the composition, system, can be designed such that it modifies the host cell's genome such that the viral DNA or cDNA is deleted from the host cell's genome.

[0341] It will be appreciated that inhibiting or killing the pathogenic microorganism, the disease and/or condition that its infection causes in the subject can be treated or prevented. Thus, also provided herein are methods of treating and/or preventing one or more diseases or symptoms thereof caused by any one or more pathogenic microorganisms, such as any of those described herein.

### Mitochondrial Diseases

[0342] Some of the most challenging mitochondrial disorders arise from mutations in mitochondrial DNA (mtDNA), a high copy number genome that is maternally inherited. In some embodiments, mtDNA mutations can be modified using a composition, system, described herein. In some embodiments, the mitochondrial disease that can be diagnosed, prognosed, treated, and/or prevented can be MELAS (mitochondrial myopathy encephalopathy, and lactic acidosis and stroke-like episodes), CPEO/PEO (chronic progressive external ophthalmoplegia syndrome/progressive external ophthalmoplegia), KSS (Kearns-Sayre syndrome), MIDD (maternally inherited diabetes and deafness), MERRF (myoclonic epilepsy associated with ragged red fibers), NIDDM (noninsulin-dependent diabetes mellitus), LHON (Leber hereditary optic neuropathy), LS (Leigh Syndrome) an aminoglycoside induced hearing disorder, NARP (neuropathy, ataxia, and pigmentary retinopathy), Extrapyramidal disorder with akinesia-rigidity, psychosis and SNHL, Nonsyndromic hearing loss a cardiomyopathy, an encephalomyopathy, Pearson's syndrome, or a combination thereof.

[0343] In some embodiments, the mtDNA of a subject can be modified in vivo or ex vivo. In some embodiments, where the mtDNA is modified ex vivo, after modification the cells containing the modified mitochondria can be administered back to the subject. In some embodiments, the composition, system, or component thereof can be capable of correcting an mtDNA mutation, or a combination thereof.

[0344] In some embodiments, at least one of the one or more mtDNA mutations is selected from the group consisting of: A3243G, C3256T, T3271C, G1019A, A1304T, A15533G, C1494T, C4467A, T1658C, G12315A, A3421G, A8344G, T8356C, G8363A, A13042T, T3200C, G3242A, A3252G, T3264C, G3316A, T3394C, T14577C, A4833G, G3460A, G9804A, G11778A, G14459A, A14484G, G15257A, T8993C, T8993G, G10197A, G13513A, T1095C, C1494T, A1555G, G1541A, C1634T, A3260G, A4269G, T7587C, A8296G, A8348G, G8363A, T9957C, T9997C, G12192A, C12297T, A14484G, G15059A, duplication of CCCCCTCCCC-tandem (SEQ ID NO: 68) repeats at positions 305-314 and/or 956-965, deletion at positions from 8,469-13,447, 4,308-14,874, and/or 4,398-14,822, 961ins/delC, the mitochondrial common deletion (e.g., mtDNA 4,977 bp deletion), and combinations thereof.

[0345] In some embodiments, the mitochondrial mutation can be any mutation as set forth in or as identified by use of one or more bioinformatic tools available at Mitomap available at mitomap.org. Such tools include, but are not limited to, “Variant Search, aka Market Finder”, Find Sequences for Any Haplogroup, aka “Sequence Finder”, “Variant Info”, “POLG Pathogenicity Prediction Server”, “MITOMASTER”, “Allele Search”, “Sequence and Variant Downloads”, “Data Downloads”. MitoMap contains reports of mutations in mtDNA that can be associated with disease and maintains a database of reported mitochondrial DNA Base Substitution Diseases: rRNA/tRNA mutations.

[0346] In some embodiments, the method includes delivering a composition, system, and/or a component thereof to a cell, and more specifically one or more mitochondria in a cell, allowing the composition, system, and/or component thereof to modify one or more target polynucleotides in the cell, and more specifically one or more mitochondria in the cell. The target polynucleotides can correspond to a mutation in the mtDNA, such as any one or more of those described herein. In some embodiments, the modification can alter a function of the mitochondria such that the mitochondria functions normally or at least is/are less dysfunctional as compared to an unmodified mitochondria. Modification can occur in vivo or ex vivo. Where modification is performed ex vivo, cells containing modified mitochondria can be administered to a subject in need thereof in an autologous or allogenic manner.

### Kits

[0347] Any of the compounds, compositions, formulations, particles, cells, described herein or a combination thereof can be presented as a combination kit. As used herein, the terms “combination kit” or “kit of parts” refers to the compounds, compositions, formulations, particles, cells and any additional components that are used to package, sell, market, deliver, and/or administer the combination of elements or a single element, such as the active ingredient, contained therein. Such additional components include, but are not limited to, packaging, syringes, blister packages, bottles, and the like. When one or more of the compounds, compositions, formulations, particles, cells, described herein or a combination thereof (e.g., agents) contained in the kit are administered simultaneously, the combination kit can contain the active agents in a single formulation, such as a pharmaceutical formulation, (e.g., a tablet) or in separate formulations. When the compounds, compositions, formulations, particles, and cells described herein or a combination thereof and/or kit components are not administered simultaneously, the combination kit can contain each agent or other component in separate pharmaceutical formulations. The separate kit components can be contained in a single package or in separate packages within the kit.

[0348] In some embodiments, the combination kit also includes instructions printed on or otherwise contained in a tangible medium of expression. The instructions can provide information regarding the content of the compounds, compositions, formulations, particles, cells, described herein or a combination thereof contained therein, safety information regarding the content of the compounds, compositions, formulations (e.g., pharmaceutical formulations), particles, and cells described herein or a combination thereof contained therein, information regarding the dosages, indications for use, and/or recommended treatment regimen(s) for the compound(s) and/or pharmaceutical formulations contained therein. In some embodiments, the instructions can provide directions for administering the compounds, compositions, formulations, particles, and cells described herein or a combination thereof to a subject in need thereof.

### EXAMPLES

[0349] Further embodiments are illustrated in the following Examples which are given for illustrative purposes only and are not intended to limit the scope of the invention.

### Example 1

### Results

### TnsC Phylogeny Reveals the Diversity of Target Selectors in Th7-Like Transposons

[0350] Known target selector proteins exhibit a wide range of diversity, but they all use TnsC to bridge target selection function with transposition. Applicant therefore used phylogenomic analysis of TnsC, which is more conserved, as a gateway to investigate the diversity of target selectors and search for new ones (FIG. 1B-1C). Applicant selected 80,028 Tn7-like loci identified in publicly available prokaryotic datasets from NCBI, JGI, and MG-RAST and analyzed their genomic neighborhoods to identify candidates associated with Tn7 components using a phylogenetic tree of a representative set of TnsC. Applicant selected 6,384 protein homologs of TnsC to build the tree. The tree included two main clades, one consisting of MuB, the homolog of tnsC from Mu phage-transposons (MuTn), and the other one of TnsC from Tn7-like transposons (FIG. 2). Applicant refers to BI-11050_All_Tn7_Systems (herein referred to as Table 8) and BI-11050_Tn7_Tsy_TnsF_Systems_BROD-5710 (herein referred to as Table 9) from U.S. Provisional Application No. 63/442,710, filed Feb. 1, 2023 to which priority is claimed herein. Reference is made herein to Faure, G., Saito, M., Benler, S., Peng, I., Wolf, Y., Strecker, J., Altae-Tran, H., Neumann, E., Li, D., Makarova, K., Macrae, R., Koonin, E., and Zhang, F., Modularity and diversity of target selectors in Tn7 transposons, Modular Cell, 83, 2122-2136.e1-e10, Jun. 15, 2023. Supplemental Information at https://doi.org/10.1016/j.molcel.2023.05.013, the entire contents of the which is fully incorporated herein by reference.

[0351] To explore the diversity of target selectors, the known target selectors (tniQ/tnsD, tnsE, and cas genes from CAST systems) were mapped on the tree. tniQ/tnsD is ubiquitous in the Tn7 branch and is represented either by a single gene (2,905 loci) or as tandem genes (1,048 loci). These tandems consist of either two tniQ genes, or tniQ and tnsD, or two thsD genes, which are collectively referred to as dual tniQ/tnsD. In contrast to the ubiquity of tniQ/tnsD, tnsE is more restricted and is present in transposons closely related to the canonical E. coli Tn7 and in the more distantly related group of Tn6022 transposons (379 loci total; FIG. 2). The CAST systems are spread around the tree and grouped according to their subtypes except for CAST I-B, which is found in two distinct clades (1 and 2), suggesting independent capture by two distinct transposons (Saito, M. et al. Dual modes of CRISPR-associated transposon homing. Cell 184, 2441-2453.e18 (2021)). Tn7017, a CAST I-F variant that uniquely harbors a dual tniQ/tnsD and uses TnsD for protein-mediated homing (Klompe, S. E. et al. Evolutionary and mechanistic diversity of Type I-F CRISPR-associated transposons. Mol. Cell 82, 616-628.e5 (2022)), belongs to a branch distant from other CAST I-F, which use a dedicated spacer for RNA-guided transposition (Petassi, M. T., Hsieh, S.-C. & Peters, J. E. Guide RNA categorization enables target site choice in Tn7-CRISPR-Cas transposons. Cell 183, 1757-1771.e18 (2020)). This branch consists of transposons encoding tns C and dual tniQ-tnsD, but mostly lacking Cascade I-F, suggesting multiple gains or losses of Cascade I-F.

### Identification of CAST I-D Subtype

[0352] To identify potential novel CAST systems, a search was performed for cas genes encoding CRISPR effector components (including Cascade subunits Cas6 and single protein Class 2 effectors) in the vicinity of tnsC and mapped the detected cas genes onto the tree (FIGS. 1B-1C and 2). Altogether, 234 groups of loci (nodes in the tree) harboring at least one of these cas genes were identified. Manual examination of tns C tree branches bearing cas genes showed that several of these genes are part of the cargo and are unlikely to be involved in transposition (Benler, S. et al. Cargo genes of Tn7-like transposons comprise an enormous diversity of defense systems, mobile genetic elements, and antibiotic resistance genes. MBio 12, e0293821 (2021)) or belong to already reported CAST systems. However, one group of loci was identified in the Tn7 clade in branches closely related to CAST I-B2 that encodes transposase components closely similar to those of I-B2 PmCAST, with ˜50% sequence identity between TnsABs and TnsCs, and ˜30% sequence identity between the dual TniQ-TnsDs (FIG. 8A). However, these loci contain Cascade I-D, rather than Cascade I-B, and thus comprise a novel CAST variety.

[0353] To experimentally characterize CAST I-D, Applicant chose a locus from the cyanobacterium Cyanothece sp. PCC 7425, CyCAST, that encodes a complete subtype I-D CRISPR-Cas system encompassing both the adaptation module (Cas1, Cas2 and Cas4), the Cas6 processing nuclease, and the Cascade complex, along with TniQ and TnsD (FIG. 3A). Unlike other known CASTs, the CRISPR-Cas system of CyCAST appears to be fully functional, that is, competent for both adaptation and interference based on the conservation of catalytic residues in the HD nuclease domain of Cas10d, suggesting that this is a recent acquisition of a CRISPR system not yet fully domesticated by Tn7 (FIG. 8B). Similar Cas10d proteins are also found encoded in loci where Tn7 components are absent in the vicinity (FIG. 8B). CyCAST Cas10d and orthologs are described in Table 5, below. Manual identification of the CyCAST boundaries indicated potential attachment sites in a tRNA gene, similar to the attachment site of CAST I-B2 systems (FIG. 8A).

TABLE 5
Table 5.

| Cas10d | Amino Acid Sequence |
|---|---|
| Cyanothece sp. | MKVFLKPLYSQLNPGIGHCPLGCEQVCQVQQQAPSLQPPPGYTC |
| PCC 7425 | PLSIHQANTCAKVVQGTADVIFNKAATGDGKSLAAYAPSLLNPN |
| (ACL44814.1) | VRIMGLYPTIELVEDQTRSQQGWHSMFRLDADERIDRLFGEELS |
| | RRVQEAETSNKFQELLLAIQQKPILLTNPDIFHLITHFQYRDPAYG |
| | NDLLPLALAEFPDLWVFDEFHIFGPHQEAAVLNSMTLIRRTQSD |
| | QRPRRFLFTSATPKPDFINQLQQSGLHTVEITGSYASEPTPGFRQV |
| | LQPVELEFVNLKDSDSLGWLAENANIIRDILQTESQGRGLVILNS |
| | VAQAGRAARLLAELLPNILVREISGRIDRQGRSETQLDLRNCPQP |
| | VLVIGTSAVDVGVDFKIHLLIFESSDSATVIQRLGRLGRHPGFSSY |
| | RAFVLLSGRAPWVMARLQERLQPDQLIERSELQEAIVEAFDAPK |
| | EFQEYRNRWGAIQAQGMLWKMGEGNSKVMQPVRDRMVADLQ |
| | KVYGSRLKSWLGDWKNLAKTDVGKETQQELLRFRGGSTLQAA |
| | VWDGDRFYTYDLLRLLPYTLVETTTRETFLEAATKAGLEKEAFP |
| | KNYIEIYLRVLEWVDDRFNISLHCNWNSSDLKCCELTLLNRLSL |
| | VGHLQSEVGRCFYSKKLLAFLVPLGMRQLHWEVSRHLKLSPVF |
| | GLHYLIDGSNKQGYACAFNQDALLLDALKSRLTKFCRLQPQSLI |
| | F (SEQ ID NO: 69) |
| Cyanobacteria | MATLLQTLLLQTLDLDPVLLAYIETVLPALEQEFGMLSAFDKAW |
| bacterium FACHB- | NGWFVQPEELDRMQQATQSSNNLGQSLLICILNSLLIVWNLLSFL |
| 471 | RAKLMLSDNEKRLLCLGFTFQGYNNGCLSKATALLPTSDITLGE |
| (MBD1866148.1) | TLNLDAFWMEWREYLSEINYLAQITPKIARKNTSSVKRNTYKISE |
| | CRLKQPLHQLLLFGTIAAQLSGPADIVVTPEGNCLQELMNELGIA |
| | RTLIYHRLRNCTGLLTNSIHNAVLQFTEKLDWQPILFFPDGIIYLA |
| | PSDSRIPAHIEFQKFVWEQVRDQLIDSISRGEAGFKRDGKGLKAA |
| | PQTLELFSPARLIRNLPSIMKAYVRNEKEPATPKRLARLSLDPTER |
| | EFLARGAGLRSDRLAEFLILVQREFFRNRPEFIAWILEKLEIQSDIT |
| | PEQTORNAGGVNLGWYYAAAHYVTKHSTPNSRNSIPNYFLVEL |
| | QDLAEQLATWAEQNHLLPTHPNLTREIFYDYVTQYLEIQGWDV |
| | QPTSFQRELAGYVNAKTKLAKQPICSLSSGEFLSEDQMDSVVLF |
| | KPQQYSNKNQLGGRQLKRGISKIWSLEMLLRQAFWSVPAGKLE |
| | DQQPIFLYLFPAFVHAPQITKAIRLLVKQLKQVNLWEICRFWQEH |
| | GMDANALRFYPWLRTDLDPNAEDKRDLPFLAVIYTTTKGKTTT |
| | DAWIKPAFLAIALPLLLGVKVVATASSVPFYNRGSEFQATVQVD |
| | ETASFWSLLSLPTTLHLEEHSQGQTKHLSDWLDRLLIAYTIHLDC |
| | RAKRPDPQWQAFPGTVQAIVTDVSAIFSLARSRFQSLSDDRVQQ |
| | YWEFAQIWATGDLDMEQQLELTQRLVQEYRTFYRVHVAKSSH |
| | AIVLPLSKVLEDILSTSNDLPIETLILQTAGRLHDALKRQEPYKRP |
| | LIMDKSLSIEIRVKNEMQAVHQFVTTCIKDLFLGQYKGDRALLQ |
| | EHRHRVKSGAEFAYRNL (SEQ ID NO: 70) |
| Oculatella sp. | MATLLQTLLLQTLPADLDPVLLAYIETVLPAVEQKFGMLPVVEG |
| FACHB-28 | SSNDRFVQLGKLDEVQRVFYSTNDSDQSLLIFILNGLLTVWNLLP |
| (WP 190646788.1) | FLSKKLALSDSEKRLLCLGFTFQGYRNLWQHSAKTSERTPVILLG |
| | ETLNLDAFWAGWQEYLPELTYIVPTIYQTAGERIAPTKQSPYKIP |
| | EPRLKLLLNQLLTFGKIAAHISDPADIVVTLRGNYLQGVMNELGI |
| | NRTLIYHRLRNCIGLLTNSIHNAVLQFTEKLDWQPILFFPEGIIYL |
| | APPNSGVPTHIEFQEFAWKQISDRLIDSMLRGEAGFKRDGKGLK |
| | AAPQTLELFSPAQLIRNLPSIIKAYVRNEKEPATPKRLVRLSLDST |
| | EQEFLAGGADLRSDRLAEFLILVQREFFRNRPEFIAWILEKLEIQS |
| | DITPEQTQRNAGGVNLGWYHAAAHYVAKHPTPNSNNPVPNHFL |
| | IELQDLAEQLATWAEQNQLLPTHPNPTREIFYDYVTQYLEIQSW |
| | DVQATSFQRELAGYVNAKTKLAKQPICSLSSGEFLSEDQVDSVV |
| | LFKPQQYSNKNSLGGRQLKRGISKIWSLEMLLRQAFWSVPAGKL |
| | EDQQPIFLYLFPAFVHAPQITKAIRLLVNQLKQVNLWEIRRFWQE |
| | HGMDANALRFYPWLRTDLDSNTEDKRDLPFLAVTYTTTKGKTT |
| | TDAWIEPAFLAIALPLLLGIKVVATASSVPSYNRGSEFQATAQVD |
| | GPASFWSLLGLPTTLHLEEHLQEQSKHLSDWIDRLLIAYTIHLDC |
| | RSKPPDSRWQSFPGTVHAIVTDVLAIFSLARSHFQNLSDDKVQQ |
| | YWEFAQIWAAGDLNMEQQLELTQRLVQEYRMFYRVHVAKSSY |
| | AIVLPLSKVLEDILSTSSDLPIETLMLQTAGRLHDALKRQEPYKRP |
| | LIMDQSLSIEIRVNNEIQAIHQFVTTCIKDLFLGQYKGDRALLQEH |
| | RHRVKSGAEFAYRLLAMQESESKTKQQDVEGAQL (SEQ ID NO: |
| | 71) |
| Kovacikia minuta | MTTLLQTLLLQTLPPDLDPVLLAYIKTVLPAVEEPGMISALNGLL |
| (WP_224344603.1) | TTWNLLPLLNSKFALSDDEKRLLCLGFTFQGYGHPCQSRTFELD |
| | TFWAEWREYLPEINYLAQITQQTVGKNSALARKTAYKIPERRLK |
| | LPLHQLLSLGTIAAQLTDPADIVTKPAGDRLREHLKALGIDRTLT |
| | YHRLRNCTGLLTNSIHNAVLHFTEKLDWQPLLFFAQGVVYLVPS |
| | DSELPDRSKVQAFLWEQISGSLATRMLNGKIGCKRAGQGLKVA |
| | PQALELIPPAQLIQNLPGVVAVTVKNETDPATLKRLARLDLRPTE |
| | REFLARGADLRSDLIAEFVIFLQKEFFGNNPEFITQVLDQLAIRLA |
| | ITPEQTQVRTGGFYWGWYHAAAYYVASNPHLESEDVTAKLQD |
| | LANQLVTWAEEKKLLPVRSSSTREGFDRYLTQHLELPGWDNPEP |
| | SFQQELATYIAAKTKAAKQPICSLSSGEFASEEQMDSVVLFKPQQ |
| | YSNKNPLGGRQLKRGISKIWSLEMLLRQAFWPIPAGKLEERQPIF |
| | LYLFPAFVHAPQVTKAIRLLVNQLKRVNLWEIRRFWQEQGMDS |
| | NALRFYPWLRDNPNPDENDKRDLPFIAVTYTTTNGKTTTDAWV |
| | EPAFLAIALPLLLGMKVVATASPVPLYNSSSEFSAKAQVDGPPSF |
| | WHLLGLPTSMHLEEEIQGQGKHLSDWLDRLLIAYSIHLDCQAKP |
| | PKTHWQAFPGTVQAISTNITAIFSLAHSHFQSLFDEKVQQYWQF |
| | AQIWATGDLEMEQQLELTQRLVQEYRTFYRVHVAKSTHAIVLP |
| | LSKVLEDILSTPSDLPFEDMLLQISGRLHDALRRQEPYERPLIMD |
| | QSLSFEIRVNNEIQAVHQFVKTCIKDLFLGQYKGDRALLQEHRN |
| | RIKSGAEFAYRLQAMQEPKSKTKKQEIEGAQR (SEQ ID NO: 72) |
| Myxacorys | MKPLLQTLLLQTLPSDIDPVLLAYVETVLPAVEQEFGLIPVSNDV |
| californica | SQTEQSLLVHILNSLLTAWNLFPFLSSKLALSDNEKRLLCLSLIFQ |
| WJT36-NPBG1 | NDNSKCQSRENNSPPTLGVNETLKQYRAFGDKLNLAAFWTEWR |
| (MBW4418978.1) | EYLTDIVYLTQSTQPHALSIKKTALKIPANRLELPLRPLLLFGAIA |
| | AQLTDPADIVIKPEGNVLKECLKRLGVQHQLTYHRVRACTGLLT |
| | EGIHNAIMRFVQPLDWQSILFFAQGIVYLVPSDSKLLDCSKLQTFI |
| | WEQISEQLAISMLRGKVGFKRDGKGMKAAPQTLELFSPAQFIRN |
| | LPTVINACVKNETEPATPKRLANLDLDPTDREFLACGADLRSDRI |
| | AEFILFLQKKFFGTNPEFIDRVLDQLGIQSAITPEQTQIFSSGVNRG |
| | WYHAAAYYVASNPHLDSDDVTIKLQEIANQLVDWAEEKELFPP |
| | QISPTREVFNQYLAQYLEFPRWNNSAPSFQHELATYVAAKTKAA |
| | KQPICSLSSSEFDSEDQLDSVVLFKPQQYSNKNPLGGWQLKRGIS |
| | KLWSLEMLLRQSFWSVSAGKLEERQPVFLYFFPSLVHSPQVAKA |
| | IRILVNQLKRVNLWKVCRFWQVHGMNANTLRFYSWLKSDPRP |
| | DDNGKRDLPFLAITYTTTAGKTTTQAWIEPAFLVLALSLVLGIKV |
| | VATASPVPLYNRSSEFPETVKIDGPASFWSLLGLPTSIRLEEKIQG |
| | RVKHLNDWLDRLLIAYSIHLDCQANPPDSRWQLFPGTVQAITTD |
| | VSAIFSLAHSHFQSLSDDRVQRYWHFAQVWAAGDSNMEQQLEL |
| | TQRLVQEYRAFYQVHVAKATHAIVLPLLKVLEEILSTPSDLPIET |
| | LILQTSGRLHDALKRQEPYKRPLIMDQSLSIEIRVNNEIQAIQRFV |
| | TTCINDLFLAQYKGDRALLQEHRNRIKSGAEFAYRLLAMQEPKP |
| | KTKKQEIEGAQI (SEQ ID NO: 73) |
| Trichocoleus sp. | MAIALPLVLGIKVTATTSSAPPYNRDSDSEFLTTVQVDGPASFW |
| FACHB-46 | NLLDLPTRIHLEEERKGQVKHLSDWLNRLLIAYSVHLDCRSKPP |
| (WP_199299221.1) | DPRWQAFPGTVHAITDDVLAIFSLAHASFPVLSDEIVQRYWKFA |
| | QIWTAGNPAMKQQLDITQRLVQEYRVFYQVHVAKSTYAILLPLS |
| | KVLEDILSTPSDLPIETLILQTSERLHDALRRQEPKRRPLVKDHSL |
| | SIEIRVNNEIQAVHQFVSTCVNDLFLGQYKGDRALLQEHRSRIKS |
| | GAEFAYRLLAMEETKPKTKKQEVEGAQL (SEQ ID NO: 74) |
| Synechococcus sp. | MTLLQTLLLRTLSEETDPILRAYLATVLPAMEQEFGLIPALGGSE |
| C9 | EAQYHLLLQRGSEFAMEKAKRYAEYSDQSLLVHVLNALLTAW |
| (WP_247216937.1) | NLLPFLSPELILTDAEKRLLCLGLTLHDYNKWCNGEQQQVPDAS |
| | EIPKILELCQTLGERLNFDAFWAEWREYLTEIGYLAQNTQGKVGI |
| | NPFKANWGTFKIPDTRRLDSPLRWLLAFGDVAVHLSDPSDIETK |
| | TAGNRLRDHLRHLGIHRKLTYHRLRDCTGILTSGIHNAVMHFAR |
| | ELDWQPLLFFAQGVVYLAPQDTGVPDRSELQEFLWEQVSKLLA |
| | SNMENGQVGFKRDGKGLKVAPQTLELFSPAQLIRNLPSVVKSYV |
| | ANAKSPATPKRLERLEPSEIEREFLSSSADLRADRTAEFIILAQKE |
| | FFADRPEFIAWMLEKLGVQDAITPEQTQFQSGGVNYGWYYVAA |
| | YYIARHSTLDLEQLDKKLQEIAEQLATWAEENKLLPEHYSPTRE |
| | VFYDYLTQYLEVQGWEQPESSFQRELVGYISAKTSKAKHPICSLS |
| | SGEFASEDQMDSVVLFKPQQYSNKNPLGGTQIKRGISKIWALEM |
| | LLRQIFWSVPAGKLEDQQPVFLYIFPAYVYSPQVAAAIRLMMNE |
| | LKRINFWDVRKYWLEHGMDAQALRSFSWLTNDDGDAGNSAPS |
| | KYSREDLPFMAMHYTTTRGKTVTEAWIEPAFLALALPLLLGVK |
| | VVATSSQIPLYDSDKDFKESVKIDGPANFWYALGFPTSLHLQDW |
| | IGGRVQNLADNLNRLMVAYCLHLDSRSNPPDACWRKLNDTDF |
| | ANKHSGLGGTNPPDERWRKLNDTIQQIVASVLNVFSLAKEGLRR |
| | SSSKDKRKPTKNEINRYWSYAHIWAEGDTEMETKLKITKRLANE |
| | YRQFYRVGIDKSSYAILLPFSKALEHILSVPNDWDDEELIVQGAG |
| | QLRAALERQEVYKRPIIQNKEIPFEQRRIQEFEAIQTFMTTCVIDV |
| | FGRMCKGDRALLQEHRNRLKSGVEFAYLQLALQDQQATS (SEQ |
| | ID NO: 75) |
| Kovacikia minuta | MTTLLQTLLLRTLPPDTDPILRAYIETVLPAMEREFGMIPALGGS |
| (WP_224346160.1) | EEAHYYLQKQRGNKFAAENARRYASRSDQSLLVHVLNALLTG |
| | WNLLPFLSPALAVSEDEKRLFCLGLTLHDYNKWCQGEEDSPHA |
| | SEVADILKLCNTLGAQLNFDAFWVDWREYLTEIAYLAQNTQGK |
| | VGTNLPKTNWGSFKLPDTRRLDSPLRWLLAFGDVAVHLSDPADI |
| | VTKTGGDRLREHLRFLGIRRRLVYHRLRNCTGILTNAIHNSVLRF |
| | VQEFDWHPILFFAQGIVYLAPLDEEIPDRLSIQEFLWERISQFLAE |
| | EMLGGQVGFKRDGKGLKVAPQTLELFSPAQLIRNLPGVIQSYVN |
| | NAKSPATPKRLEKLELSQTEREFLARGEDLRADRLAEFIFLAQKE |
| | FFGNRPEFIPWMLETLGIQSAITPEQTQLQSGGVNWGWYHAAAY |
| | YVASNATLDLNGLSEKLQDFAEHLATWAEENGFFPEHLSPTRDI |
| | FSNYLAQYLEVQGWDEQERSFQYELASYTVSKTKAARQPICSLS |
| | SGEFASEDQMDSVVLFKPQQYSNKNALGGRQIKRGISKIWSLEM |
| | LLRQALWSAPAGKLEEQQPVFLYIFPAYVYSPQVASAIRLLVND |
| | LKRVNLWEIRKHWLQNGMDVEALRSLPWLNTSGD (SEQ ID NO: |
| | 76) |
| Trichocoleus sp. | MNSLLIVWSLIPLLNEELALSKDEKCLLCVWFTLQGYNSCYSSR |
| FACHB-46 | VTAPLLTPDINLGEVLNLDMFWPQWREYLPEIDYLTQITLQNSD |
| (WP_206755453.1) | NNTSAKRNGFRVPDQRLRLTLHPLLSFSTIAAQLTSPVDIVTTSA |
| | GDRLPALLKELGIDRTLIYHRLRNCTGLLTNSIHNAVLNFTEKLN |
| | WQPILCFTEGVVYLAPRGFNLLNRMDLQQFIWEQISDQLVTNML |
| | VGEIGFKRDGKGLKAAPQILELLSPAQLIQGLPSIVEATIKNEIDP |
| | ATPKRLMNLSITTLERKFLSQGADLRSDRIAEFIIFLQKQFFRSNS |
| | EFIAWILEQLGIQSAITWEQAQIHTGGVNLGWYHAAAYYVANSP |
| | HLDLRSVTRKLQEIASRLTIWAEEKKLFPVLTSATREAFDRYLVQ |
| | YLELPGWDSPESSFEHELATYMAAKTKAARQPICSLSSGEFVSEA |
| | QMASVVPFKPQQYSNKNPLGGRQLKRGISKIWSLEMLLRQAFW |
| | SFSPGKLEERQPVFLYFSPTFAHAPPVTKVIHILAKQLERVNLWKI |
| | RRFWQEHGMDANALRFYPWLKNELNSNEESQHNLTFLAMTYT |
| | TTKGKNNDRCLD (SEQ ID NO: 77) |
| Leptolyngbya sp. | MTTLLQTLLIRTLPPDTDLILKEFIDTVLPAMETQFGHMTALGGS |
| SIO4C1 | QAVHEHRLRKMNDAYATEKAQRWASSPDQSLLVHVTNALLLA |
| (NEP20205.1) | WTLTPFLSEPLSDNEKRLICLGLTLHDYNKYCQGEEEDVPKAHE |
| | VNEILTLCEEMGERLNFSAFWSDWRQYLSEIGFLAQNTQGKIGT |
| | NLIGTNWPKFQLRERRLKNPLRPLLRFGDVAVHMANPAELAMP |
| | ATGRTRPRGKALKDCLEDLGIKGELTYHRLRQPTGILSNRVHNA |
| | VLHFTAALDWQPILYFAQGVVYLSPLSPTAPKRETLKKALWQSI |
| | SQFLESQMMNGEIGFKRDGKGVKVAPQTRELFESTQIIRELPGVI |
| | AANVRNEKDPATPKRLASIGMDATERKALMAVADLRCDLIAER |
| | (SEQ ID NO: 78) |
| Leptolyngbyaceae | MATLLQMLLISTLSSDTDPTLRQFIDTVLPSMEQEFSSITALGGSY |
| cyanobacterium | EVHLSRLKHKETAKRWSEKADQSLLVHVLNGLLTAWNLIPFLD |
| CCMR0081 | DNPLNDDEKRLLCLGLTLHDYNKYCQGEEKDSPKAYEVDSILA |
| (NEZ54669.1) | LCQEMGKRLNFGSFWPEWKSYLSEIGFLAQNTQRKHGSNLVLA |
| | NWPNFKLRRHRLLNPLRLLLTFGDVAVHMTNPAEVITTTRGDRL |
| | QDCLDDLCIPRKLVYHRLRDVTGILSNGIHNAVLAFTKQEKWQP |
| | ILYFAQGAVYLAPQGTKVPESEKLKSVLWNAIEKILSGAMLGGN |
| | IGFKRDGKGVKVSPQTLELFSPEQLIRGLPEVITAKVRNDKAPAT |
| | PKRLASLELSESELERLAAGSDIRSDQLAELIGLVQKEFFSKTPEF |
| | TPWVLEQLKIQDEITTEQTQVQKGGVNYGWYRAAAEYVLKHQ |
| | TLDTEQFAEMLGQFSTALADWAIEKQLLPETVNSTKDAFLSYLD |
| | QYLEISGWDSIGGSFQQELERYTIAKTKASKQPICSLSSGEFISED |
| | QMDSVVLFKPQQYSNKNPLGGGQIKRGISKIWSLEMLLRQSKW |
| | AVPPGKMEDQNPIFLYMYPAYVYSPQVAQAVRVFAKDLRQINF |
| | WELHKFWINHNLDIHALHQFPWLSEPDPEEWKLKNTQIYGSTGP |
| | KQDLPFLGISYTTTRGKTHTDAWAEPAFLSLVIAKFLGIKVVATA |
| | SQTPLYRSDSDFRESIKLDGLANFWSVLNLPDAIHLEEHHQGRIQ |
| | RIEDFMQRLLIAYSVHLENQADKPDPRWRALPDTVRQLMSNVL |
| | NLFSLAESGCRKRKRDPTPDDAQRYWKYAQLWSQGDAIMEEQI |
| | SLVKRLAQEYRQFYKVRSTASSHAILLPLTKALDTILSVPPDLPEE |
| | DLILEGAGQLKDALERQEVYTRPLLLDKSKDIALRKALELQAIQ |
| | QFMTTCVEQLFKEQYQKDIALLQENRNRIKSGVEFAYLMLNLED |
| | VQQEAESETETESAA (SEQ ID NO: 79) |
| Leptothoe | MATLLQTLLINTLAADTDPIFRQFIDTVLPAMEQEFGSITALGGS |
| spongobia | YEVHLDRLTRKKHPYAEETAQRWANSADQSLLVHVLNGLLTA |
| (WP_215607749.1) | WNLIPFLPDNDLTDTEKRLLCLGLTLHDYNKYCQGEEDDPPKAY |
| | EVDSILALCHEMGQKLNFESFWPEWKDYVSEIGFLAQNTQGKH |
| | GTNLAPRNWPDFKLRDRRLLKPLRPLLAFGDVAVHMTNPAEVE |
| | TTTRKDRLRDHLDSLGISGKLVYHRLRDVTGILSNGIHNAVLAFT |
| | AQEDWQPILYFAQGAVYLAPKKTEVPEPDHLKHALWNSIEELLS |
| | GAMLGGDIGFKRDGKGVKVSPQTLELFSPEQLIRGLPEVITAKVR |
| | NEKSPATPKRLDSLELSETERARLGTVADIRSDRLAELIGLVQKE |
| | FFSKTPEFTPWVLEQLKIQDEITPEQTQVQKGGVNYGWYRAAAE |
| | YVLKHQTLDTEQFSEILEEFVKALADWATEKQLLPETVNPTKEA |
| | FLSYLDQYLEISGWDSVGGSFQQELERYTIAKTKGSKQPICSLSS |
| | GEFISEDQMDSVVLFKPQQYSNKNPLGGGQIKRGISKIWSLEMLL |
| | RQSKWAVSSGKMEDQQPIFLYMYPAYVYSPQVAKAVRVLVND |
| | LKRVNFWELHKFLIEHDLDINALKQYPWLSETEPEEGRENDEKY |
| | AGQDLPFLGISYTTTRGKTHTDAWAEPAFLSLVIAKFLGIKVVAT |
| | ASQTPLYRSDNDFRESIKLDGLANFWSVLNLPDAIHLEEHHQGHI |
| | QRIEDFMQRLLIAYSVHLENQADKPDPRWRALPDTARQLMSNV |
| | LNLFSLAESGCRKRKRDPTPDDAQRYWEYAQLWSQGDAIMEEQ |
| | ISLVKRLAQEYRQFYKVRSTASSHAILLPLTKALDTILSVPSDLPE |
| | EDLILEGSGQLKDALERQEVYTRPLLLDKSKDIALRKAQELQAIQ |
| | QFMATCVEQLFKGQYQKDIALLQENRNRIKSGVEFAYLILNLED |
| | AQQETESETETESAA (SEQ ID NO: 80) |
| Cyanobacteria | MTLLQSLLTTTLEVDPDPILQAYIDTIVPAMEKEFGSIPALGGSEA |
| bacterium FACHB- | VHFYRLQKQGNTYADSTAKRWAEKADQSLLVHVLNGLLTAWN |
| 63 | LFPFLNQDKQLSEIEKRLLCLGLTLHDYNKYCQGEEDDAPKAHE |
| (MBD1847458.1) | VSEILALCEKLGQLLNFDAFWSDWRLYLADISFLAQNTQYKVG |
| | ANPVPSNWQTFKLEDSRRLKNPLRPLLAFGDIAVHINDPADVITT |
| | TRGNRLREHLRSLQIDRKLMYHRLRDCTGLLSGGIHNAVLYFTE |
| | PLDWQPLLFFGQGVIYLAPQNAEVPDRNDVQAVLWEQISQILGS |
| | KMLGGEIGFKRDGKGLKVAPQTLELFSPAELIRNLPEVVRTKVG |
| | NEKNPATPKRLESLDLGGDELEHLSKGADLRSDRLAEFIFLAQK |
| | EFFGNCPEFAPWILQRLGIQNRITPEHTQVQSGGVNYGWYYAAA |
| | CYVAAHASMRPEELLQTLEEVANDLADWAEENNLLPEHHSPTR |
| | DVFLNYLNQYLELSEWDSSVNQFAIEFNNYVAAKTKAAKQPICS |
| | LSSGEFISEDQVDSVVLFKPQQYSNKNPLGGRQIKRGISKIWSLE |
| | MLLRQALWAVPAGKLEEQQPVFLYLFPAYVYSPQVAKAVRVLI |
| | NELKRVNFWDLRKFWFEHDMNVQALRHYQWLQNEDEPGRFSS |
| | KDYGRRDRRDLPFMAITYTTTREKTTTDAWVEPAFLALALPFLL |
| | GIKVVASASPAPLYQSDREFRESVKLDGAANFWNLLGMPSSAHL |
| | EEFHQGRILRLEDWLERLLVAYSIHLDCEGEPPKPRWQALPGTV |
| | REIMTDVLNVFSLADSAFRDAKRDPKADEVLRYWSFAQIWSKG |
| | DVRMEAQLQLTQKLVKEYRRFYQVNTGESSHAILLPLSKALEIIL |
| | TVPNDLPIEDLIFQGSGQLHDAIARQKPYSRPLIMDKSVAYETRL |
| | ANELQAIHQFMTTCVKELFGEQYKGDRALLQENRNRIKSGAEFA |
| | YRWIALQEKQTKPSV (SEQ ID NO: 81) |
| Halomicronema | MTLLQDLLTTTLQEEPDPVIQRFVETVVPAMEQEFALVPALGGS |
| hongdechloris | DAVHRYRLRDDPFCEEKVQRWNQSADQSLLVHVINAILTAWNL |
| (WP_080810414.1) | QTFLDEDKQLTEEEKKLLCLGLTLHDYNKYCQGEEEDAPKTHE |
| | VSEILGLCHKLGHKLNFTDFWQDWENYLGDIGFLAQNTQYKTG |
| | TNPRLEVWNPKITDQRRLKNPLRPLLAFGDIAVHMNDPADIVTP |
| | KEGNQSRSRGHALREHLETLQIERKLVYHRLRDCTGLLTTGIHN |
| | AVLHFTEDLDWKPILFFAQGVVYLAPLDSETPDRETIQAVLWEQ |
| | IQQLLANKMLSGDIGFKRDGKGLKVAPQTLEVFKPAQLIRGLPD |
| | VIIAKVGNAKNPATPKRLASLELSDTECQKLEPAADLRSDRLAEL |
| | IFLAQKEFFGACPDFVPWVLKYLGIEQGISPEQTQVQSGGVNYG |
| | WYRAAAYYIAVTQKNTLDNEELEKILENLAYSLADWAEENDLL |
| | PEYKSPTQDVFHRYLNQNLEVSGWEPCLTSFDDELSAYTAAKTK |
| | ASKQPICSLSSGEFASEDQMDSVVLFKPQQYSNKNPLGGRHIKR |
| | GISKIWSLEMLIRQAMWAVPAGKLEDQRPVFLYIFPAYVYSPQT |
| | AKVVRVLMDELKDRINFWDIRKFWQENNMDIQALRSYSWLEEE |
| | SEAGRFGNPNYGRGDRRDLPFVAITYTTTRGKTVTDAWIEPAFL |
| | AMALPMLLGVKVVASTSPAPLYSSDSEFRESVKLDGPAGFWNS |
| | LGLPNSLHLEEWLQNRVQRLDELLNRLMIAYALHLDCEGDPPDP |
| | RWRAFANTVRDMMTDVLNIFSLAASHFRELKREPYPDEVGRYW |
| | RYAQIWTEGNTNMQKKLKITKQLVTEYRKFYRVNLSESSHAILL |
| | PLSKALELILSVPEDWDDEELILQGSGQLQDALDRQKVYRPILSD |
| | KSLPYQERKVQELEAIQAFVTTCVKDLFGEMCKGDRALLQENR |
| | NRIKSGVEFAYRWLTLQESQAETKNQKTEGEK (SEQ ID NO: 82) |
| Nodosilinea sp. | MTLLQDLLTITLREEPDPVLQKFVETVVPAMEREFALIPALGGSE |
| LEGE 07298 | AVHRHRLRDDLYGEEKAQRWSQSADQSLLVHVINAILTAWNLQ |
| (WP_194024837.1) | PFLDEDKQLTEEEQHLLCLGLTLHDYNKYCQGEEEDSPKAHKV |
| | EEILRLCRELGEKLNFSAFWPEWQDYLSDIGFLAQNTQYKAGTN |
| | LVSINWPTFKIDSRRLRNPLRPLLAFGDIAVHMGNPSDILTTTRG |
| | DRLREHLDALQIDRKLVYHRLRDCTGLLSSGIHNAVLHFTKELD |
| | WQPILFFAQGVVYLAPQSSETPDRDTVQGVLWEQIQSLLASKML |
| | TGEIGFKRDGKGLKVAPQTLELFSPVQLIRGLPDVITAKVGNVK |
| | NPATPKRLESLGLSEAERESLEPAADLRSDRLAELIFLAQKEFFG |
| | DIPEFAPWVLEYLGIDQSITPEQTQVQAGGVNYGWYYAAAHYIA |
| | VVRDNTLDKDQSQEVLVAFSNALADWAEEHNFLDSHKSPTQDI |
| | FLDYLSQNLEITGWHQTLTPFGDELAGYVAAKTKAARQPICSLS |
| | SGQFASEDQMDSVVLFKPQQYSNKNSLGGRQIKRGISKIWSLEM |
| | LIRQAMWAAPAGKLEDQRPVFIYVLPAYVYSPQTAKAIRVLMD |
| | ELKDRINFWDIRKFWQEHEMDIQALRSYPWLKEKSEEGRFADSN |
| | YGRGEKRDLPFVAITYTTTRGKTVTDAWIEPAFLAIALPLLLGVK |
| | VVASTSPAPLYSSDSEFRESVKLDGPAGFWNSLGLPNSLHLEEW |
| | MQGRVQRLDEILNRLLIAYALHLDCEGDPPDPRWRAFANTVRDI |
| | MTDVLNIFSLAASHFRGLKREPYAEEVKRYWSYAQIWSKGNID |
| | MQEKLKITNQLVTEYRQFYKVHLSESSHAILLPLSKALEEILSVPE |
| | DWDDEELILQGAGQLQAALDRQEIYKRPILSDKSIPFLDRKIQEL |
| | EAIEAFMTTCVKDLFGEMCKGDRALLQENRNRIKSGAEFAYRW |
| | LTLQESQSQANTQQPEGEE (SEQ ID NO: 83) |

[0354] CyCAST was expressed heterologously in E. coli and tested for activity. Using previously established assays (Strecker, J. et al. RNA-guided DNA insertion with CRISPR-associated transposases. Science 365, 48-53 (2019); Klompe, S. E., Vo, P. L. H., Halpin-Healy, T. S. & Sternberg, S. H. Transposon-encoded CRISPR-Cas systems direct RNA-guided DNA integration. Nature 571, 219-225 (2019); Saito, M. et al. Dual modes of CRISPR-associated transposon homing. Cell 184, 2441-2453.e18 (2021)), Applicant determined that CyCAST exhibits a GTT protospacer adjacent motif (PAM) preference, as observed in subtype I-D CRISPR-Cas systems (Kieper, S. N. et al. Cas4 facilitates PAM-compatible spacer selection during CRISPR adaptation. Cell Rep. 22, 3377-3384 (2018)) (FIG. 8C). Applicant detected mainly unidirectional left end (LE)-cargo-right end (RE) insertions within a 70-80-bp window downstream of the protospacer on a target plasmid (pTarget) (FIG. 8D).

[0355] To clarify the roles of TniQ and TnsD in RNA-guided insertion, Applicant deleted either TniQ, TnsD, or both and checked for activity. The full CyCAST system with both TniQ and TnsD showed RNA-guided transposition at an insertion frequency of 0.001% (FIG. 3B). Removing TnsD boosted RNA-guided transposition about 2.5-fold, to 0.0025%, suggesting that TnsD partially inhibits this activity. Elimination of TniQ abolished RNA-guided insertion activity, but perhaps unexpectedly, in the absence of both TniQ and TnsD, a low level of RNA-guided transposition was detected (0.0004%). Thus, CAST I-D retains some basal RNA-guided transposition activity in the absence of a protein target selector, in contrast to the previously characterized CAST systems, which may indicate TnsC can recognize Cascade at the insertion site (FIG. 8E).

[0356] Applicant also tested CRISPR-independent transposition (homing) of CyCAST. To this end, Applicant cloned into the pTarget plasmid a tRNA leucine gene from Cyanothece sp. PCC 7425 to serve as a homing site. Homing transposition was observed when TnsAB, TnsC, and TnsD were expressed in the absence of TniQ (0.008%); the presence of TniQ drastically diminished this activity, but transposition was still detectable (0.0006%) (FIG. 3C). Homing transposition occurs around 30-33 nt downstream of the end of the tRNA homing site, resembling the insertion site of CyCAST in the genome of Cyanothece sp. PCC 7425 (FIG. 8F). Thus, like some other CASTs, such as AvCAST, a type I-B1 system, and Tn7017, CyCAST exhibits dual modes of transposition that rely on different target selectors, namely, the small TniQ protein for RNA-guided transposition and the larger TnsD for protein-mediated homing (Saito, M. et al. Dual modes of CRISPR-associated transposon homing. Cell 184, 2441-2453.e18 (2021); Klompe, S. E. et al. Evolutionary and mechanistic diversity of Type I-F CRISPR-associated transposons. Mol. Cell 82, 616-628.e5 (2022)).

Comparison of TniQ and TnsD reveals a modular architecture of target selectors

[0357] The presence of dual tniQ-tnsD genes in a variety of Tn7 loci motivated Applicant to examine these proteins in greater detail to gain additional insight into their roles in target selection. Mechanistic studies of CAST systems have shown that TniQ, which is smaller than TnsD, partners with Cascade to mediate RNA-guided transposition, whereas TnsD mediates protein-guided transposition (similar to its role in E. coli Tn7) (Saito, M. et al. Dual modes of CRISPR-associated transposon homing. Cel/184, 2441-2453.e18 (2021)). Applicant therefore first focused on TniQ and TnsD from CASTs and non-CAST Tn7-like transposons to determine how they function in these two capacities. Applicant employed structural prediction using AlphaFold2 (Evans, R. et al. Protein complex prediction with AlphaFold-Multimer. bioRxiv (2021) doi: 10.1101/2021.10.04.463034; Jumper, J. et al. Highly accurate protein structure prediction with AlphaFold. Nature 596, 583-589 (2021); Mirdita, M. et al. ColabFold: making protein folding accessible to all. Nat. Methods 19, 679-682 (2022)) to compare the domain organizations of TniQ and TnsD variants encoded by E. coli Tn7, CAST I-B, CAST I-D, and Tn7017 (the dual TniQ-TnsD CAST I-F) (FIGS. 4A and 9A). From the structural models, Applicant identified a common core structure shared by CAST TniQ and TnsD of about 300 amino acids (aa) that consists of a helical domain (HelD, a zinc finger (ZF), a connector helix, and another helical domain (Hel2). Even within this core region, however, there are notable differences among the TniQ and TnsD proteins from different transposons. For example, in some of these proteins, the Hel2 domain folds into an HTH domain that is similar to an XRE family transcription factor (TF), whereas in others, this domain has a unique fold (FIG. 9A). TniQ from Tn6677 CAST I-F interacts with Cas6 as well as Cas7 and the guide RNA through a loop in the Hel2 domain (Halpin-Healy, T. S., Klompe, S. E., Sternberg, S. H. & Fernández, I. S. Structural basis of DNA targeting by a transposon-encoded CRISPR-Cas system. Nature 577, 271-274 (2020)), suggesting that Hel2 provides a bridge to Cascade and that the structural diversity of Hel2 translates into compatibility with distinct Cascades. However, TniQ from CAST V-K, which associates with the Cas 12k effector rather than Cascade, contains only the Hell and ZF domains (Park, J.-U. et al. Structural basis for target site selection in RNA-guided DNA transposition systems. Science 373, 768-774 (2021); Querques, I., Schmitz, M., Oberli, S., Chanez, C. & Jinek, M. Target site selection and remodelling by type V CRISPR-transposon systems. Nature 599, 497-502 (2021)), indicating a different mode of interaction between the target selector components and highlighting the flexibility of TniQ as an adaptor between target selection and transposase machineries.

[0358] The CAST TniQ proteins consist largely of the core region, whereas the CAST TnsD and Tn7 TnsD proteins have a long C-terminal extension with broad diversity in terms of length, sequence, and structure (FIG. 4A). However, some of these regions share similarities that might reflect overlapping functions. For example, the TnsD proteins in Tn7 and CAST I-B, both of which home to the same site (glmS gene) (Waddell, C. S. & Craig, N. L. Tn7 transposition: two transposition pathways directed by five Tn7-encoded genes. Genes Dev. 2, 137-149 (1988); Saito, M. et al. Dual modes of CRISPR-associated transposon homing. Cell 184, 2441-2453.e18 (2021); Kuduvalli, P. N., Rao, J. E. & Craig, N. L. Target DNA structure plays a critical role in Tn7 transposition. EMBO J. 20, 924-932 (2001)), have common C-terminal domain architectures (one HTH domain following by a long linker and 2 HTH domains staggered by a short linker), which may indicate the C-terminal region is involved in the recognition of the attachment site. Applicant also detected similar structures and domain architectures (a long linker followed by a tandem of HTH domains back-to-back) between the C-terminal regions of TnsDs from CAST I-B2 and CAST I-D, suggesting they also recognize similar attachment sites.

[0359] Applicant's structural analysis of the models suggests that the conserved core region of TniQ and TnsD mediates the recruitment of the transposon via direct interaction with TnsC or via local conformational changes in the DNA near the target site, consistent with the observations of CAST V-K (Querques, I., Schmitz, M., Oberli, S., Chanez, C. & Jinek, M. Target site selection and remodelling by type V CRISPR-transposon systems. Nature 599, 497-502 (2021); Schmitz, M., Querques, I., Oberli, S., Chanez, C. & Jinek, M. Structural basis for RNA-mediated assembly of type V CRISPR-associated transposons. bioRxiv (2022) doi: 10.1101/2022.06.17.496590). By contrast, the C-terminal region of TnsD likely recognizes the attachment site during protein-guided transposition (FIG. 4A). The diversity of the interactions between TniQ and Cas effectors raises the possibility that the TniQ core acquired the ability to bind other target selector proteins as well. Furthermore, these findings suggest that the presence of a small TniQ lacking a large C-terminal extension is a general hallmark of Tn7-like transposons that employ additional target selectors.

### Identification of Novel Target Selectors

[0360] The analysis of TniQ and TnsD was expanded beyond the CAST systems to systematically analyze their diversity and identify potential novel partners of TniQ. To this end, Applicant extracted all TniQ and TnsD proteins encoded in the vicinity of the tnsC homologs in the Tn7 clade (4,916 altogether). Applicant found 2,905 loci encoding a single TniQ or TnsD and 1,048 loci encoding two distinct TniQ or TnsD proteins (FIGS. 1B and 9B). TniQ and TnsD protein size distribution comprises four sharply defined bins (210aa, 350aa, 450aa, and 610aa), suggesting selection driven by particular size constraints (FIG. 9C). However, TniQ and TnsD seem to represent two ends of a continuum, which is spanned by proteins containing extensions of variable length (FIG. 9C), making it difficult to predict, for some of these proteins, whether they bind directly to attachment sites or require a target selector partner. Therefore, some proteins are referred to as TniQ/TnsD, to emphasize that it remains unclear based on their size whether they interact directly with the target site.

[0361] The C-terminal target selector region of TnsD is highly diverse, and these proteins might have evolved by independent fusion of the TniQ core with other proteins containing DNA binding domains, such as HTH-containing transcription factors. However, the opposite directionality of evolution, namely truncation of TnsD upon recruitment of other target selectors, such as CRISPR effectors, cannot be ruled out either. The evolution of target selectors might have taken these alternative routes in different groups of Tn7-like transposons.

[0362] In dual TniQ-TnsD loci, one of these proteins is usually larger than 400aa, suggesting direct target selection, whereas the second one is substantially smaller (FIG. 9C). Such an architecture could provide transposons with multiple options for target selection: direct, via TnsD, or indirect, via TniQ interacting with an external target selector. Analysis of the phylogenetic tree of TniQ/TnsD built using the multiple alignment of the core regions indicates that dual TniQ-TnsD is polyphyletic (i.e., it emerged independently on multiple occasions via duplication of a single tniQ/tnsD (FIG. 9B), and monophyly of dual TniQ-TnsD (i.e., evolution from a single, ancestral TniQ/TnsD) was compellingly ruled out (p-value=2.4e-236). Dual TniQ-TnsD have likely arisen from in situ duplication of a single tniQ/tnsD (FIG. 9B), followed by neofunctionalization, and thus the ancestral Tn7-like transposons likely encoded a single member of this family. Such duplication might ensure compatibility with the other transposase components, while opening the possibility of evolving different modes of target selection. Consistent with the independent duplication scenario, only a few examples of dual TniQ-TnsD loci containing distantly related proteins were identified, as would be expected under an alternative scenario including exchange of tniQ/tnsD genes between different transposons (FIGS. 9B and 9D).

[0363] Apart from the dual TniQ-TnsD loci, numerous Tn7-like transposons encompass TniQ and another, unrelated target selector, such as TnsE, the plasmid target selector (FIG. 9B). Applicant identified two distinct branches encoding TniQ and TnsE (FIG. 10A-10B). Although these TnsEs are highly divergent in sequence (less than 10% of sequence identity) (FIG. 10C), they are predicted to form closely similar structures based on Alphafold2 modeling. The N-terminal domain of TnsE binds dsRNA via a unique fold (Shi, Q. et al. Conformational toggling controls target site choice for the heteromeric transposase element Tn7. Nucleic Acids Res. 43, 10734-10745 (2015)), but the activity of this domain has not been explored. Using structural prediction and structural mining (Holm, L. Dali server: structural unification of protein families. Nucleic Acids Res. 50, W210-W215 (2022)) of the N-terminal region, Applicant found that it folds into two single-strand binding (SSB) domains related to PriB (FIG. 10D), a component of the bacterial primosome, which can bind both ssDNA and ssRNA and is involved in restarting replication at the fork (Fujiyama, S. et al. Structure and mechanism of the primosome protein DnaT-functional structures for homotrimerization, dissociation of ssDNA from the PriB. ssDNA complex, and formation of the DnaT ssDNA complex. FEBS J. 281, 5356-5370 (2014); Huang, C.-Y., Hsu, C.-H., Sun, Y.-J., Wu, H.-N. & Hsiao, C.-D. Complexed crystal structure of replication restart primosome protein PriB reveals a novel single-stranded DNA-binding mode. Nucleic Acids Res. 34, 3878-3886 (2006); Lovett, S. T. Filling the gaps in replication restart pathways. Mol. Cell 17, 751-752 (2005)). Such structural similarity with PriB suggests that TnsE might have been co-opted from a system that functions at the replication fork. The domain architecture of TnsE has features including a dsDNA binding domain and a domain predicted to bind ssRNA or DNA, suggesting it targets the lagging strand of replication. Thus, TnsE is likely to specifically target replication forks of conjugative plasmids, further highlighting the remarkable diversity of target selectors co-opted by Tn7-like transposons.

[0364] To search for additional target selectors, Applicant focused on genes operonized with TniQ/TnsD and conserved in multiple nodes (FIG. 9D). The most common candidate gene (121 groups of loci), found in the Tn6022 family of Tn7-like transposons, encodes an uncharacterized protein of 498aa, which forms a putative operon with a TniQ of 369aa and is denoted TnsF (previously annotated as orf3 or thif (Petassi, M. T., Hsieh, S.-C. & Peters, J. E. Guide RNA categorization enables target site choice in Tn7-CRISPR-Cas transposons. Cell 183, 1757-1771.e18 (2020); Partridge, S. R., Kwong, S. M., Firth, N. & Jensen, S. O. Mobile genetic elements associated with antimicrobial resistance. Clin. Microbiol. Rev. 31, (2018)), see SI). Structural prediction with Alphafold2 of TnsF revealed a novel domain architecture including an N-terminal region containing multiple ZFs in the first 199aa, whereas the remaining ˜300aa exhibit significant structural similarity to the N- and C-terminal domains of the tyrosine recombinase superfamily member XerH (pdb: 5jk0 PMID: 28009253) (Dali score 3.9) (FIG. 4B). However, the chamber holding the tyrosine catalytic site is missing in TnsF (FIG. 11A-11B). Tyrosine recombinases typically contain an N-terminal DNA binding domain (CB domain (Smyshlyaev, G., Bateman, A. & Barabas, O. Sequence analysis of tyrosine recombinases allows annotation of mobile genetic elements in prokaryotic genomes. Mol. Syst. Biol. 17, e9880 (2021))) and a C-terminal catalytic domain (CAT) and dimerize or tetramerise on DNA during site-specific recombination. Both the N-and C-terminal domains of XerH interact with DNA in the crystal structure (FIG. 11A). TnsF is predicted to contain tandem domains (designated CB1 and CB2) structurally similar and, by inference, homologous to the CB of XerH (FIG. 11A-11B), suggesting these domains may impart the ability to interact with DNA. A beta sheet at the C-terminus of XerH maps to the last 70aa of TnsF (designated partial CAT or pCAT) (FIG. 4B) and corresponds to the DNA binding region of the recombinase domain of XerH (FIG. 11A) but lacks the helix K (Bebel, A., Karaca, E., Kumar, B., Stark, W. M. & Barabas, O. Structural snapshots of Xer recombination reveal activation by synaptic complex remodeling and DNA bending. Elife 5, (2016)). In XerH, the helix K contributes substantially to its interaction with DNA, suggesting that the pCAT domain of TnsF might have lost DNA binding activity but gained the ability to interact with TniQ. Indeed, based on an Alphafold2 multimer model, TnsF is predicted to interact with TniQ through its C-terminal region (FIG. 4B). Additionally, Applicant found one case where the N-terminal region of TnsF is fused to the C-terminal region of TniQ (NCBI accession: SCZ64694). This fusion protein lacks the full catalytic domain but contains an additional CB-like domain within a linker between TniQ and TnsF.

[0365] The Tn6022 transposons also encode tnsE on the opposite strand, suggesting they can jump to conjugative plasmids, whereas TniQ and TnsF are likely involved in target selection within the bacterial chromosome. Together, these data suggest that TnsF is a novel target selector protein and that TniQ of Tn6022 serves as a hub that bridges TnsF, which binds directly to the attachment site, with the transposition machinery.

### TnsF is a Bona Fide Target Selector

[0366] To experimentally test the predicted target partner selector role of TnsF, Applicant focused on the Tn6022 transposon. Tn6022 encodes TnsA, TnsB, TnsC, TniQ, TnsF, and TnsE and is inserted in the comM gene, which encodes a Mg chelatase-containing protein (FIG. 5A). Applicant reconstituted Acinetobacter johnsonii Tn6022 (hereafter AjTn6022) in E. coli. Applicant determined the ends of the transposon and cloned the left and right ends into a pDonor plasmid with a kanamycin resistance gene as a cargo. Applicant also cloned a 100-bp fragment (50 bp upstream and 50 bp downstream of the insertion site) of the AjcomM gene into a pTarget plasmid. These plasmids were co-electroporated into E. coli with a pHelper plasmid (bearing tnsA, tnsB, tnsC, tniQ, and tnsD. To determine the structure of the insertion, long read, amplification-free nanopore sequencing was performed. Applicant found simple insertions (60.9% of insertions) and co-integrate insertions (39.1% of insertions) (FIG. 11C), and confirmed the presence of target site duplications (TSDs), a signature of Tn7-like transposition (FIG. 11D). To determine whether all Tns proteins including TnsF are essential for transposition into the comM gene, Applicant generated pHelper variants lacking each Tns protein component and repeated the transposition assay. AjTn6022 achieves transposition at 2.4% efficiency, and removal of any Tns protein (A, B, C, Q, or F) impaired transposition, as quantified by ddPCR (FIG. 5B).

[0367] To confirm the prediction that TnsF and TniQ interact, Applicant purified TnsF and TniQ proteins from AjTn6022, and tested their interaction in vitro. Applicant showed that the TnsF interacts specifically with AjTniQ (and not with TniQ proteins from ShCAST, AvCAST, PmcCAST, CyCAST, or Tn7017) (FIG. 5C). The docking model of AjTnsF: AjTniQ predicts an interaction between the C-terminal helix of TniQ and the pCAT region of TnsF held by hydrophobic interactions and salt bridges (FIG. 5D). TniQ from other systems lack this helical region, which may explain why they do not interact with AjTnsF. Mutants designed to disrupt the predicted salt bridges (TnsF E427K/D476K and TniQ K348D/K361D) abrogated or substantially reduced transposition (FIG. 5D), supporting the hypothesis that this Aj-specific region of TniQ is important for interaction with TnsF.

Identification of Tsy, a Non-Th7 Transposon that Uses Task for Target Selection

[0368] To gain further insight into the role of TnsF as a target selector, Applicant searched for TnsF homologs in genomic databases. Applicant selected 1,099 non-redundant TnsF homologs, including Tn6022 TnsF and a homolog of TnsF (referred to as TnsF-like protein) that harbors a predicted active catalytic domain (FIG. 11A-11B). Although Applicant also detected more remote structural homologs of TnsF harboring tandem CB and CAT domains, these homologs did not have ZF N-terminal regions, so Applicant did not focus on them (FIG. 11E). Applicant built a phylogenetic tree from the TnsF and TnsF-like proteins (FIG. 11F) and mapped on it conserved genes located in the vicinity of tnsF and tns/-like genes. The Tn7 TnsF forms a distinct clade and apparently evolved from TnsF-like proteins with an active catalytic domain. The genomic vicinity of these TnsF-like proteins lacks Tn7 components but instead includes upstream genes encoding a tyrosine recombinase (YRec) and a small HTH domain protein as well as a downstream gene encoding a GIY-YIG nuclease (present only in the branch close to Tn7) (FIGS. 6A and 11F). Although inverted repeats or any canonical ends in these loci could not be detected, the presence of comM fragments, namely, the 5′-terminal portion located upstream of YRec and the 3′-terminal portion located downstream of the predicted operon was detected (FIG. 6A). The downstream portion of the comM gene is in some cases located after several additional genes, which likely represent transposon cargo. These features suggest that this locus is a distinct transposon and that the TnsF-like protein recognizes comM, similarly to TnsF of Tn6022.

[0369] To test the function of this TnsF-like protein, Applicant experimentally characterized this mobile element (designated Tsy (Target Selector based on tYrosine (Y) recombinase). The system from Zoogloea sp. LCSB751 (hereafter ZooTsy) was reconstituted in E. coli. To assess ZooTsy transposition, Applicant cloned 135 bp and 39 bp of each transposon endl (comM 5′-terminal portion side) and end2 (comM 3′-terminal portion side) with 12 bp of homology arm extensions into an R6K origin pDonor plasmid with a kanamycin resistance gene as a cargo (FIG. 12A-12B). A Tsy attachment site (a 100-bp fragment with 50 bp upstream and 50 bp downstream of the Zoogloea sp. comM insertion site) was also cloned into a pTarget plasmid (FIG. 12A-12B). These plasmids were co-electroporated into E. coli with a pHelper plasmid (bearing YRec, HTH, tns, and the GIY-YIG nuclease, nuc). Applicant detected transposition into pTarget and observed circular intermediates (CIs) derived from pDonor by PCR in a YRec-dependent manner (FIG. 12A), as previously demonstrated for various transposons encoding tyrosine recombinases (Rubio-Cosials, A. et al. Transposase-DNA complex structures reveal mechanisms for conjugative transposition of antibiotic resistance. Cell 173, 208-220.e20 (2018)). To further validate this, Applicant established an assay to isolate and confirm the structure of the CI derived from pDonor. Applicant created a new pDonor that contains the ColEl origin of replication and kanamycin resistance gene as cargo as well as lacZα but no other origin of replication. Upon circularization, this pDonor will lose lacZα and can be isolated from white colonies by traditional blue-white screening (FIG. 12A). Using this assay, Applicant obtained white colonies (98% of total) in a pHelper-dependent manner after re-transformation with the extracted plasmids and successfully isolated a smaller plasmid which had lost the 0.6-kb backbone region of pDonor (FIG. 12A). Applicant confirmed the smaller plasmid as a CI by nanopore long-read sequencing and observed the connected endl and end2 junction by Sanger sequencing (FIG. 12A). To determine the structure of the ZooTsy insertions, Applicant performed nanopore long-read sequencing and found simple insertions (62.3% of total insertions) as well as cointegrates (37.7% of total insertions) in which an upstream copy of ZooTsy was excised before resolution (FIG. 12C-12D).

[0370] To narrow down the requirements for transposition, variants of the cargo with serial deletions of end1 from 135 bp to 0 bp were generated, finding that truncation of this end gradually decreased the rate of simple insertions to zero (FIG. 12E-12F). By contrast, only 20 bp at end2 are required for the transposition (FIG. 12F). By systematically combining these optimized parameters, Applicant found that 12 bp of homology arm 1 (hom1), 135-bp end1, and 20-bp end2 are sufficient for ZooTsy to achieve transposition (FIG. 12G).

[0371] To determine the genetic requirements for ZooTsy transpositions in E. coli, a series of pHelper plasmids with deletions of each gene were constructed. ZooTsy achieves transposition at 5.0% efficiency, and removal of any component (YRec, HTH, TnsF, or GIY-YIG nuclease) from the system impaired transposition, as quantified by ddPCR for the upstream-end1 junction formation (FIGS. 6B and 12H). The GIY-YIG nuclease, however, is not essential for transposition, which is supported by the identification of Tsy relatives lacking this component (FIG. 11E). Applicant also confirmed that the tyrosine recombinase catalytic activities of both YRec and TnsF are essential for transposition (FIG. 12I).

Tnsk Targets a Conserved Region of comM

[0372] Both AjTn6022 and ZooTsy use TnsF to target comM of their respective hosts. ComM has been reported to facilitate recombination of sequences acquired by transformation (Nero, T. M. et al. ComM is a hexameric helicase that promotes branch migration during natural transformation in diverse Gram-negative species. Nucleic Acids Res. 46, 6099-6111 (2018)), and disruption of the comM gene by transposon insertion could inactivate this functionality, limiting transformation of other MGEs. To explore comM targeting in greater depth, Applicant sought to compare TnsF-mediated targeting of this gene by AjTnsF and ZooTnsF. Using heterologous E. coli expression systems, Applicant looked for AjTn6022 and ZooTsy targeting of genomic comM, finding that they can both target E. coli endogenous comM in addition to their respective comM sites on pTarget, highlighting the broad recognition of comM by both TnsFs (FIG. 6C-6D). To determine the specificity of comM gene targeting by TnsF, Applicant performed tagmentation-based tag integration site sequencing (TTISS) (Schmid-Burgk, J. L. et al. Highly Parallel Profiling of Cas9 Variant Specificity. Mol. Cell 78, 794-800.e8 (2020)). For AjTn6022, in the absence of pTarget, 96.7% of insertions at the E. coli endogenous comM locus were observed; in the presence of pTarget, 56.6% of insertions were on pTarget and 40.8% were on the genome comM (97.4% on-target in total) (FIG. 13A). For ZooTsy, similarly high levels of specificity were observed, indicating that TnsF is highly selective for comM (FIG. 13B). Applicant confirmed both TnsF proteins bind 200-bp dsDNA fragments corresponding to their respective comM target sequences (FIG. 6E-6F).

[0373] To further characterize the attachment sites of these proteins, Applicant constructed additional pTarget variants with different lengths of comM gene fragments to map the target-site specificity of both TnsFs with greater resolution. For AjTn6022, deletion of the 40-50 bp-either upstream or downstream sequences of the insertion site substantially reduced transposition, indicating that the insertion site is within the TnsF attachment site (FIG. 13C). For Tsy, Applicant found the attachment site is within a 40 bp-upstream region from the insertion site (FIG. 13D). Mapping these refined target sites on the respective comM genes revealed they overlap with a conserved 10-bp region within the WalkerB motif (a conserved ATPase motif (Iyer, L. M., Leipe, D. D., Koonin, E. V. & Aravind, L. Evolutionary history and higher order classification of AAA+ATPases. J. Struct. Biol. 146, 11-31 (2004)) of the comM protein (FIG. 6G). Applicant confirmed this 10-bp region is necessary for both AjTnsF and ZooTnsF binding (FIG. 14A-14B). Furthermore, Applicant found that mutating this region abolished transposition activity for both AjTn6022 and ZooTsy (FIG. 14C-14D). Targeting the Walker B motif of comM might provide a natural conserved anchor for TEs to spread across species, paralleling Tn7 targeting of the catalytic site in glmS. Together, these results demonstrate that TnsF is a novel target selector found in two distinct transposons and highlights the ability of Tn7-like transposons to co-opt target selectors from various systems and adapt them by abrogating their original functions, such as recombinase/nuclease activity.

### Supplementary Information

### TnsC Phylogeny Analysis

[0374] Applicant selected loci using the following criteria: at least 2 genes, one of which is a tns C homolog and the other is a homolog of another Tn7 component (tnsA, tnsB, tniQ or tnsD (tniQ/tnsD, or tnsk:), and the presence of at least two closely spaced codirectional Tn7 components comprising a predicted operon (See Methods). Applicant obtained 80,028 loci meeting these criteria, from which 6,384 non-redundant tns C homolog representatives (<80% sequence identity) were extracted and a phylogenetic tree was built from them (FIG. 2). Applicant mapped onto the tree known target selectors tniQ/tnsD and tnsE and found they are present in the Tn7 clades (the isolated occurrences of these components in the MuB branch are instances of Tn7 transposons located near MuTn). TnsE is detected in 2 distant branches, one encompassing the canonical E. coli Tn7 and another the Tn6022 transposon. These two groups of transposons harbor distinct InsEs distantly related and only detectable by profile profile comparison (hhpred probability >=90) (Söding, J., Biegert, A. & Lupas, A. N. The HHpred interactive server for protein homology detection and structure prediction. Nucleic Acids Res. 33, W244-8 (2005); Steinegger, M. et al. HH-suite3 for fast remote homology detection and deep protein annotation. BMC Bioinformatics 20, 473 (2019)), suggesting an ancient origin of tnsE in the Tn7 family.

### Search for CAST Systems

[0375] From TnsC phylogenetic tree analysis (FIG. 2), it was found that CAST systems are spread around the tree: CAST V-K forms one clade, suggesting a single ancestral capture of Cas12k, CAST I-B is found in two distinct clades respective to their subtype (1 and 2), suggesting two distincts transposons independently captured a Cascade I-B system (Saito, M. et al. Dual modes of CRISPR-associated transposon homing. Cell 184, 2441-2453.e18 (2021)), and CAST I-F forms its own clade. However, Tn7017, a CAST I-F system that uniquely harbors a dual tniQ-tnsD and uses TnsD for protein-mediated homing (in contrast to other CAST I-F systems that use a dedicated spacer for RNA-guided transposition (Petassi, M. T., Hsieh, S.-C. & Peters, J. E. Guide RNA categorization enables target site choice in Tn7-CRISPR-Cas transposons. Cell 183, 1757-1771.e18 (2020)) is located in a side branch containing tns ('s with dual tniQ-tnsD and sparsely populated with Cascade I-B systems. This separation of CAST I-F and Tn7017 suggests either an ongoing gain or loss of Cascade I-F or a trans partnership with a Cascade system located outside the transposon border.

[0376] Several groups of loci in the MuB clade harbor associations with Cascade including I-E Cascade, in agreement with a previous report (Faure, G. et al. CRISPR-Cas in mobile genetic elements: counter-defence and beyond. Nat. Rev. Microbiol. 17, 513-525 (2019)), however, the absence of detectable ends and the presence of the cas3 nuclease gene suggest that these Cascade systems are not likely to be involved in RNA-guided transposition with MuA/MuB components and therefore are unlikely to be target selectors.

Analysis of the Genes Operonized with tnsC's

[0377] To search for new target selectors, Applicant first looked at non-Tn7 components (i.e., genes other than tnsA, tnsB, tnsC′, tniQ/tnsD, or tnsk) that are conserved in the vicinity of closely related tns ('s (defined as branches that group together to form a subtree) and operonized with it. It was observed that the entire MuB clade has a conserved and operonized gene downstream, which is a known component of the Mu phage. The Tn7 TnsC clade contains a few branches harboring potential candidates, but manual inspection of these candidates revealed that they are remote homologs of TniQ and TnsD that were not detected automatically, highlighting the diversity of these proteins. No new components directly operonized with ins C were found.

Structural analysis of dual TniQ/TnsD

[0378] From the structural prediction of CAST dual TniQ-TnsD and Tn7 TnsD Applicant found the core region of TniQ consists of a helical domain (HelD, a zinc finger (ZF), a connector helix, and another helical domain (Hel2) (FIGS. 3A and 9A). Hel2 in TnsD of Tn7, TniQ and TnsD of CAST I-B, and TnsD of CAST I-D fold into an HTH domain that is structurally similar to an XRE family transcription factor (TF) (FIG. 9A). Hel2 in TniQ of CAST I-D is composed of 3 helices that fold into a smaller domain that seems to be a partial version of CAST I-D TnsD. Hel2 in TniQ and TnsD of Tn7017 folds into a large helical domain distinct and larger than other Hel2 domains (FIG. 9A).

[0379] The structure of the Cascade I-F-TniQ complex from Tn6677 CAST I-F (a single TniQ CAST I-F) revealed that TniQ dimerizes head to tail via an HTH domain located downstream of Hel2 (Halpin-Healy, T. S., Klompe, S. E., Sternberg, S. H. & Fernández, I. S. Structural basis of DNA targeting by a transposon-encoded CRISPR-Cas system. Nature 577, 271-274 (2020)) and that this dimer interacts with Cas6 (as well as Cas7 and the guide RNA) through a loop in the Hel2 domain, suggesting that Hel2 bridges TniQ to the Cascade complex. Hel2 domains from TniQ and TnsD of CAST I-B2 and CAST I-D share a similar fold. However, the Hel2 domain in CAST I-D TniQ shows the most pronounced differences compared to both CAST I-D TnsD and TniQ/TnsD of CAST I-B2. This Hel2 domain seems to be truncated, which distorts the structure and likely the function of the HTH fold (FIG. 9A). Finally, CAST V-K TniQ is the smallest protein of this family, containing only the Hell and ZF domains and lacking the connector helix and the Hel2 domain (Querques, I., Schmitz, M., Oberli, S., Chanez, C. & Jinek, M. Target site selection and remodelling by type V CRISPR-transposon systems. Nature 599, 497-502 (2021)).

[0380] The C-terminal extensions of TnsD proteins show broad diversity in sequence, length, and predicted structure (FIG. 3A). For example, the C-terminal region of TnsD from Tn7 accommodates three HTH domains (distinct from the one in TniQ from Tn7017, which is involved in dimerization) interspaced with disordered linkers (FIG. 3A). Three HTH domains are similarly predicted to exist in the C-terminal regions of the TnsD proteins of CAST I-B and I-D. Other TnsD proteins contain even larger C-terminal regions: TnsD of Tn7017 contains an additional domain composed of an alpha helix and beta sheet, and TnsD of CAST I-B1 contains an additional domain composed of a beta sheet with an unknown function. These domains are likely involved in additional interactions during transposition that remain to be explored.

### Analysis of TniQ/TnsD Size

[0381] TniQ/TnsD size distribution shows 4 distinct groups (FIG. 9C). Group 1 (g1) encompasses proteins that are smaller than 220aa and are mainly seen in CAST V-K systems. The second group (g2) of proteins range from 220aa to 400aa and encode the TniQ core region with no or only a short C-terminal addition, which suggests they probably cannot recognize target sites alone and need a partner to perform target selection. The proteins from group 3 (g3), which are the most widespread, range from 400aa to 550aa and encode a C-terminal extension that is likely long enough to recognize target sites. Finally, group 4 (g4) encompasses proteins larger than 550aa and which harbor very large C-terminal regions, suggesting they bind longer target sites and/or encode additional functions.

### TniQ-TnsD Tandem

[0382] Applicant identified 5072 TniQ/TnsD protein in total in the vicinity of the Tn7 tnsc representatives. 2905 loci encode a single TniQ/TnsD, while 998 loci have a dual TniQ-TnsD, 33 have 3 TniQ/TnsD, 17 have more than 3 TniQ/TnsD. Manual inspection indicates the loci with more than 2 TniQ-TnsD are usually involving partial TniQ maybe results from degradation of TniQ or insertion of another Tn7 where other transposases would be localized beyond the edge of the contigs. For the TniQ-TnsD tandem analysis, for loci encoding more than 2 TniQ/TnsD Applicant selected the two largest TniQ/TnsD and considered these systems as TniQ-TnsD tandem systems. Thus, Applicant considered a total 1048 tandem TniQ-TnsD systems and considered 1029 of them from which the sequences were not discarded during the alignment constructions (see Methods).

[0383] Dual TniQ-TnsD loci often harbor at least one protein larger than 400aa (FIG. 9C), suggesting that it is a direct target selector. Typically, one of the two proteins is larger than the other, with the most common architecture being one protein from g2 and the other protein from g3. Such an architecture could provide systems with multiple options for target selection: either directly via TnsD or indirectly via TniQ interacting with an external target selector.

[0384] To explore the origin of dual TniQ-TnsD systems, a phylogenetic tree of TniQ/TnsD using the core region (FIG. 9C) was built and tandem TniQ/TnsD proteins (encoded in the same locus) were mapped using connecter lines that link one TniQ/TnsD leaf to the other TniQ/TnsD leaf when they belong to the same locus. Using statistical comparison of branch distances and visualization of these connectors, Applicant found that the dual TniQ-TnsD likely emerged multiple times and independently via duplication of a single TniQ/TnsD (FIG. 9A-9D) ruling out an origin whereby an ancestral TniQ/TnsD would give rise to all dual TniQ-TnsD systems (p-value=2.4e-236). The duplication of TniQ/TnsD in situ might ensure compatibility with the other transposase components while opening up the possibility of acquiring different target selectors, either direct (encoded in the C-terminal region of TnsD) or via a partnership (through interaction with TniQ. This scenario may explain the frequency of duplication events. Consistent with this idea, Applicant found only a few examples of dual TniQ-TnsD loci containing very distant proteins, as would be expected to arise from the exchange of TniQ/TnsD. (FIG. 9B).

### Structural Comparison of Tandem TniQ/TnsD CAST Systems

[0385] The presence of dual tniQ/tnsD genes in a variety of Tn7 loci motivated Applicant to look more deeply at these proteins to better understand their roles in target selection. Mechanistic studies of CAST systems have shown that TniQ, which is smaller than TnsD, partners with Cascade to mediate RNA-guided transposition, whereas TnsD mediates protein-guided transposition (similar to its role in E. coli Tn7) (Saito, M. et al. Dual modes of CRISPR-associated transposon homing. Cell 184, 2441-2453.e18 (2021)). Applicant therefore first focused on TniQ and TnsD from these systems. Structural prediction was employed using AlphaFold2 (Evans, R. et al. Protein complex prediction with AlphaFold-Multimer. bioRxiv (2021) doi: 10.1101/2021.10.04.463034; Jumper, J. et al. Highly accurate protein structure prediction with AlphaFold. Nature 596, 583-589 (2021); Mirdita, M. et al. ColabFold: making protein folding accessible to all. Nat. Methods 19, 679-682 (2022)) to compare the domain organization of TniQ and TnsD variants encoded by E. coli Tn7, CAST I-B, CAST I-D, and Tn7017 (the dual TniQ-TnsD CAST I-F) (FIGS. 2 and 9A). Applicant identified a common core structure shared by CAST TniQ and TnsD of about 300 amino acids (aa). The CAST TniQ proteins are largely restricted to this core region, whereas the CAST TnsD and Tn7 TnsD proteins have a long C-terminal extension. Applicant hypothesized that this additional region in TnsD might confer target DNA recognition to enable protein-guided transposition. Accordingly, Applicant proposed that TniQ family proteins predicted to perform target selection be named TnsD, while the TniQ designation be reserved for those proteins that consist of the core region but cannot perform target selection without a partner. Applicant notes, however, that TniQ and TnsD seem to represent two ends of a continuum, which is spanned by proteins containing extensions of variable length (FIG. 9C), making it difficult to predict in some cases whether they bind directly to attachment sites or require a target selector partner. As a reflection of this continuum, Applicant refers to some proteins as TniQ/TnsD when the ability of the proteins to interact directly with a target site could not be predicted.

[0386] The core region of TniQ consists of a helical domain (HelD, a zinc finger (ZF), a connector helix, and another helical domain (Hel2) (FIGS. 2 and 9A). Even within this core region, there are notable differences in the TniQ and TnsD proteins found in different systems. For example, in some proteins, the Hel2 domain folds into an HTH domain that is similar to an XRE family transcription factor (TF), whereas in others, this domain has a unique fold (FIG. 9A). TniQ (from Tn6677 CAST I-F) interacts with Cas6 (as well as Cas7 and the guide RNA) through a loop in the Hel2 domain (Halpin-Healy, T. S., Klompe, S. E., Sternberg, S. H. & Fernández, I. S. Structural basis of DNA targeting by a transposon-encoded CRISPR-Cas system. Nature 577, 271-274 (2020)) suggesting Hel2 might bridge to Cascade and that the diversity of Hel2 might encode compatibility with distinct Cascades. TniQ from CAST V-K, which uses the Cas12k effector rather than Cascade, contains only the Hell and ZF domains, suggesting a different mode of target selector partner interaction, highlighting the flexibility of TniQ as an adaptor between target selection and transposase machinery.

[0387] The C-terminal extensions of TnsD proteins show even broader diversity in terms of sequence, length, and predicted structure (FIG. 9A). This region often folds into HTH domains (distinct from the one found in the core region) interspaced with disordered linkers. For example, three HTH domains are predicted to exist in the C-terminal regions of the TnsD proteins of CAST I-B and I-D suggesting similarities in the mechanism of recognition of the attachment site.

[0388] The structural analysis described herein suggests that the conserved core region of TniQ and TnsD likely mediates the recruitment of the transposon (via direct interaction with TnsC or via local conformational changes in the DNA near the target site), consistent with observations from the CAST V-K system (Querques, I., Schmitz, M., Oberli, S., Chanez, C. & Jinek, M. Target site selection and remodelling by type V CRISPR-transposon systems. Nature 599, 497-502 (2021); Schmitz, M., Querques, I., Oberli, S., Chanez, C. & Jinek, M. Structural basis for RNA-mediated assembly of type V CRISPR-associated transposons. bioRxiv (2022) doi: 10.1101/2022.06.17.496590). By contrast, the C-terminal region in TnsD recognizes the attachment site in protein-guided transposition (FIG. 9A). In CAST systems, the Cas effectors cooperate with TniQ proteins that lack the C-terminal extension, likely via the Hel2 domain. This raises the possibility that the TniQ core acquired the ability to bind other target selector proteins as well. Together, these results suggest that the presence of a small TniQ lacking a large C-terminal extension is a general hallmark of Tn7-like transposons that employ additional target selectors.

Analysis of the genes operonized with tniQs

[0389] In addition to instances of dual TniQ-TnsD loci, there are also systems that contain TniQ and another target selector from a non-TniQ family (e.g., TnsE). To search for non-TniQ family target selector partners of TniQ and independent target selectors, Applicant focused on genes operonized with TniQs with no or minimal C-terminal extensions (FIG. 9D). Applicant found several genes operonized with TniQ/TnsD that are conserved in multiple nodes. The 6 largest groups of candidates were selected based on the conservation of the operonized genes across several adjacent leaves in the TniQ tree. For example, Cascade I-F, a known target selector partner, forms a conserved pool of genes operonized with TniQ, validating the approach described herein (FIG. 9B). Applicant found 5 conserved candidates located in closely related branches of the TniQ/TnsD tree. The first candidate (comprising 6 groups of loci) encodes a protein with a weak relationship to the C-terminal region of Csn2, a protein found in Class 2 type II-A CRISPR-Cas systems that is linked to adaptation. The structural docking prediction indicates a potential interaction between the candidate and a region at the surface of TnsC distinct from where TniQ/TnsD is predicted to interact, suggesting this candidate is likely not performing target selection in partnership with TniQ/TnsD but rather independently (FIG. 9D). The second candidate is an unknown gene operonized with a g4 TnsD (found in 16 groups of loci) and does not seem to interact with TnsC or TniQ/TnsD (FIG. 9D), suggesting it is likely not involved in target selection. The third candidate (comprising 8 groups of loci) is a small gene sharing similarity with transcription factor (TF). It is located in between two tniQ/tnsD (encoding proteins of 500aa and 550aa) and is not predicted to interact with TniQ/TnsD or TnsC. Although this TF-like protein is likely not involved in target selection given the lack of interaction with TnsC or TniQ, TFs have been shown to regulate CAST I-F transposition (Petassi, M. T., Hsieh, S.-C. & Peters, J. E. Guide RNA categorization enables target site choice in Tn7-CRISPR-Cas transposons. Cell 183, 1757-1771.e18 (2020)) and are also found in CAST V-K systems. Thus, this TF could regulate the expression of TniQ/TnsD in this system. The fourth candidate (comprising 31 groups of loci) is a small gene with similarity to ParD-like proteins, which are the antitoxin component of the ParDE toxin-antitoxin systems. It is encoded downstream of two operonized tandem tniQ family genes (encoding a 314aa and 506aa TniQ and TnsD, respectively). The ParD component in ParDE systems binds the promoter region of the ParDE system on plasmids, suggesting it has target selector-like functionality. However, it is not predicted to interact with TnsC or the TniQ or TnsD proteins. The last candidate is highly spread (the most spread candidate) and hhsearch profile profile comparison with pfam highlight a match in its N-terminal region (hhprob=94.5; evalue=0.07; from positions ˜50-160) with pf18551.4 annotated as Thaumarchaeal output domain 1 and described as a metal binding domain found in prokaryotes. The candidate is also predicted to interact with TniQ predicted with AF2 multimer (Evans, R. et al. Protein complex prediction with AlphaFold-Multimer. bioRxiv (2021) doi: 10.1101/2021.10.04.463034; Mirdita, M. et al. ColabFold: making protein folding accessible to all. Nat. Methods 19, 679-682 (2022)). Considering the widespread of the latter candidate and its predicted direct interaction with TniQ, it was further investigated computational and experimentally. This new candidate was named TnsF as an alphabetical logic order after TnsA, TnsB, TnsC, TnsD.

### CAST I-D Analysis

[0390] For CAST I-D, 6 contigs encoding the system were extracted (FIG. 8A). Two of these loci are located near the edge of the contig and are incomplete. Three loci lack cas3d and harbor a dead Cas10d (the large subunit of the subtype I-D effector complex) in which the Histidine Aspartate (HD) nuclease has been inactivated (FIG. 12A).

### TnsF and Alternative Naming in Literature

[0391] Applicant named TnsF as a logical alphabetical order after TnsA, TnsB, TnsC, TnsD, TnsF. In Tn6022 transposons TnsA, TnsB, TnsC are sometimes denoted TniC, TniA, TniB (Partridge, S. R., Kwong, S. M., Firth, N. & Jensen, S. O. Mobile genetic elements associated with antimicrobial resistance. Clin. Microbiol. Rev. 31, (2018)), TniQ was referred as orf2 or TniD (Partridge, S. R., Kwong, S. M., Firth, N. & Jensen, S. O. Mobile genetic elements associated with antimicrobial resistance. Clin. Microbiol. Rev. 31, (2018); Petassi, M. T., Hsieh, S.-C. & Peters, J. E. Guide RNA categorization enables target site choice in Tn7-CRISPR-Cas transposons. Cell 183, 1757-1771.e18 (2020)), and TnsF as orf3 or til. Finally, tnsE which (FIG. 4) which is located near the left end, after the cargo was previously referred to as orf4 (Partridge, S. R., Kwong, S. M., Firth, N. & Jensen, S. O. Mobile genetic elements associated with antimicrobial resistance. Clin. Microbiol. Rev. 31, (2018); Petassi, M. T., Hsieh, S.-C. & Peters, J. E. Guide RNA categorization enables target site choice in Tn7-CRISPR-Cas transposons. Cell 183, 1757-1771.e18 (2020)).

### Mining of TnsF Relative

[0392] Applicant mined and visualized the diversity of the TnsF hits by drawing a graph network using hit BLAST comparisons (see Methods). Applicant found that TnsF forms a dense connected cluster but is also connected to another cluster (FIG. 13A) formed by larger proteins.

[0393] These larger proteins share a similar domain architecture with TnsF but retain the tyrosine recombinase catalytic site in the C-terminal region (CAT) (FIG. 13B). Applicant extracted 1099 non-redundant TnsF homologs including Tn6022 TnsF and these nuclease-active larger TnsFs.

### Characterization of CyCAST

[0394] The previously characterized CAST systems have been shown to mediate either bidirectional or unidirectional transposon insertion (Strecker, J. et al. RNA-guided DNA insertion with CRISPR-associated transposases. Science 365, 48-53 (2019); Klompe, S. E., Vo, P. L. H., Halpin-Healy, T. S. & Sternberg, S. H. Transposon-encoded CRISPR-Cas systems direct RNA-guided DNA integration. Nature 571, 219-225 (2019); Saito, M. et al. Dual modes of CRISPR-associated transposon homing. Cell 184, 2441-2453.e18 (2021)). To define the directionality of the CyCAST-mediated insertion, four pairs of primers were tested to recover each junction between target and insertion (FIG. 12C). Given that CyCAST likely requires a protospacer adjacent motif (PAM) to recognize target DNA, Applicant targeted a plasmid (pTarget) library containing protospacer adjacent motif 1 (PSP1) flanked by a 6N motif upstream of the protospacer with a single CyCAST protein expression vector (pHelper), as previously described (Strecker, J. et al. RNA-guided DNA insertion with CRISPR-associated transposases. Science 365, 48-53 (2019)).

### Prediction of the Insertion Site of Th6022 and Tsy

[0395] Applicant searched for contigs with a full comM gene and mapped the insertion sites of Tn6022 and this non-Tn7 putative system. Applicant found that both are inserted in the same region of comM 66 bp apart from each other but the directionality of insertion is different, suggesting different modes of insertion. The insertion of this putative mobile element into the same homing site as Tn6022 suggests that the TnsF and TnsF-like proteins perform similar target selection via a region within ZF, CB1, and CB2 domains that specifically recognizes the comM gene (FIG. 13D).

### Tsy Ends and Homology Arms

[0396] Applicant manually defined the ends of ZooTsy based on conservation at 135-bp for end1 (upstream the YRec to the border of comM) and 39-bp for end2 (end of cargo till the border of comM) and test 5 differents extensions (called homology arm and hereafter hom) for each end with comM sequence upstream end1 (hom1) and downstream end2 (hom2) to test if comM itself encode any motif for end recognition. YRec usually works as a dimer to recognize a region with two DNA motifs (each bound by the CB domain of each monomer) and cleave the middle region surrounding these motifs during recombination (Jayaram et al., 2015). In an excision scenario where the cleavage site for excision is at the edge of the partial comM gene, one motif should be located within comM gene while the other motif should be located downstream comM in the end of the transposon which would lead to a cleavage site at the transition area between comM gene and the end region.

### DISCUSSION

[0397] Target site selection is a crucial step in the life cycle of TEs because insertion of the element can dramatically affect the fitness of both the host and the TE depending on the insertion site (Durrant, M. G., Li, M. M., Siranosian, B. A., Montgomery, S. B. & Bhatt, A. S. A bioinformatic analysis of integrative mobile genetic elements highlights their role in bacterial adaptation. Cell Host Microbe 28, 767 (2020); Touchon, M., Bobay, L.-M. & Rocha, E. P. C. The chromosomal accommodation and domestication of mobile genetic elements. Curr. Opin. Microbiol. 22, 22-29 (2014)). Moreover, the choice of target site is critical for the TE to spread horizontally. It was recently reported that Tn7-like transposons co-opted CRISPR systems for RNA-guided target-site selection in addition to using protein-guided target selection. Here, Applicant expands on the understanding of target site selection mechanisms, identifying previously uncharacterized target site selectors and a novel TE. Together, these results indicate a modular architecture used by Tn7-like transposons to bridge target-site selection with transposase activity, providing TEs with maximal flexibility in targeting while maintaining conserved activity (FIG. 7).

[0398] This flexibility is manifested in the various proteins that Tn7-like transposons have co-opted and adapted for target-site selection. The results disclosed herein provide several examples of this. Although the CRISPR systems in most CASTs have lost their ancestral interference and nuclease functions, the CyCAST system was found to have an interference component and active Cas10d. Very recently, other CAST I-D systems were reported, but these have fully domesticated Cascade I-D whereby Cas3d is absent and HD nuclease of Cas10d is dead (Hsieh, S.-C. & Peters, J. E. Discovery and characterization of novel type I-D CRISPR-guided transposons identified among diverse Tn7-like elements in cyanobacteria. Nucleic Acids Res. (2022) doi: 10.1093/nar/gkac1216). Thus, CyCAST may be an evolutionary intermediate where the CRISPR system has been co-opted by the TE, but has not fully lost its native function. Similarly, Applicant found the Tn7-like transposon Tn6022 has co-opted TnsF, a catalytically inactive derivative of a tyrosine recombinase containing protein, whereas the Tsy transposon described here encodes a homolog of TnsF with an active catalytic domain. Applicant showed that TnsF from Tn6022 and Tsy interact with TniQ, the bridge to the transposase machinery. These results highlight the advantages of using TniQ as a hub to expand target-site selection by interacting with other sequence-specific DNA recognition partners, a process that may evolve into complete co-option of these partners, which then lose their original function(s).

[0399] In the case of Tsy, however, the nuclease function of TnsF is required for transposition (FIG. 121). Interestingly, Applicant also found that, in contrast to most transposons, Tsy does not have inverted repeats or conserved sequence patterns at its ends. Instead, Applicant found that it requires ends of different size (135 bp and 20 bp) and a 12-bp homology arm matching the insertion site upstream of end1. The requirement for homology arms, along with the finding that a catalytically dead TnsF does not support transposition, suggests an active role of TnsF (and/or Yrec, which is also encoded by Tsy) in excision whereby the recognition motifs surround the cleavage site, leaving half of the motif in the transposon after excision. The different lengths of the ends, however, suggest a distinct excision mechanism for each end. TnsF may also participate in the recognition of the ends through its DNA binding domain.

[0400] Applicant showed TnsF can target a heterologous comM gene, specifically the highly conserved Walker B motif, suggesting it may confer the ability on its host TE to spread across species. Although both Tn6022 and Tsy target this same attachment site, a unique characteristic of the Tsy system compared to Tn6022 is the lack of target duplication (TSD), which is consistent with previous findings that tyrosine recombinase driven MGEs do not create TSDs (Smyshlyaev, G., Bateman, A. & Barabas, O. Sequence analysis of tyrosine recombinases allows annotation of mobile genetic elements in prokaryotic genomes. Mol. Syst. Biol. 17, e9880 (2021)). This raises the possibility that, although insertion by Tn6022 or Tsy will impair comM, excision of Tsy could restore comM integrity, and the encoded ComM might play a role in the spread of Tsy.

[0401] Applicant's finding that other enzymes have been co-opted by Tn7-like transposons raises the question of how new target selectors originate. In Tn7, to recruit the transposase machinery to the target site, TnsD binds to and induces a local distortion of the DNA, which attracts TnsC. Artificial induction of such DNA distortion has been shown to attract TnsC independently of TnsD (Kuduvalli, P. N., Rao, J. E. & Craig, N. L. Target DNA structure plays a critical role in Tn7 transposition. EMBO J. 20, 924-932 (2001); Rao, J. E., Miller, P. S. & Craig, N. L. Recognition of triple-helical DNA structures by transposon Tn7. Proc. Natl. Acad. Sci. U.S.A. 97, 3936-3941 (2000)). Native Cas effectors (Jiang, F. & Doudna, J. A. The structural biology of CRISPR-Cas systems. Curr. Opin. Struct. Biol. 30, 100-111 (2015)) and TnsF likely induce similar distortions in the target DNA (i.e., R-loop formation by Cas effectors and DNA bending by tyrosine recombinase-containing proteins including TnsF). Although a canonical tyrosine recombinase would entirely cover the distorted DNA, precluding TnsC access, the distinct architecture of TnsF, with two different DNA binding domains, may bend the DNA while still allowing partial or full access for TnsC. Thus, proteins that provide more efficient target selection may supersede the target selecting role of the C-terminal region of TnsD, ultimately leading to their domestication and loss of their native enzymatic activity (FIG. 7). CAST-I-D and the TnsF homolog in the Tsy system are examples of intermediate stages on the evolutionary path to domestication. Applicant also detected numerous loci encoding a TniQ that is too short to enable target selection and no other identifiable target selector partner. Such elements might recruit target selectors in trans, perhaps representing the very first step in the generation of a new target selector or even greater flexibility in target selector partnering.

### Methods

### Identification of Th7-Like Transposons

[0402] HMMs of Tn7 proteins, i.e., TnsA (PF08721.12, PF08722.12), TnsB (PF00665.27), TnsC (PF05621.12, PF11426.9, PF13401.7), TnsD PF06527.12, PF15978.6), and TnsE (PF18623.2) were used to search homologs with hmmsearch software (Eddy, S. R. Accelerated profile HMM searches. PLoS Comput. Biol. 7, e1002195 (2011)) (using option ga_cut) within predicted protein sequences derived from microbial contigs available in the NCBI Genbank and WGS databases, JGI database (projects with stated permission to use), and the MG-RAST database (Meyer, F. et al. The metagenomics RAST server-a public resource for the automatic phylogenetic and functional analysis of metagenomes. BMC Bioinformatics 9, 386 (2008)) (all frozen in November 2020). The full database encompasses 521,828,662 contigs in total (contigs greater than 1.5 kb) covering 6,932,321,054,498 bp of genomic DNA. 1,617,895 contigs have detectable rpob genes (detected with hmmsearch from TIRGR02013.1 profile) suggesting the diversity is probably reflected by 1.6 million genomes (Vos, M., Quince, C., Pijl, A. S., de Hollander, M. & Kowalchuk, G. A. A comparison of rpoB and 16S rRNA as markers in pyrosequencing studies of bacterial diversity. PLoS One 7, e30600 (2012); Ogier, J.-C., Pagès, S., Galan, M., Barret, M. & Gaudriault, S. rpoB, a promising marker for analyzing the diversity of bacterial communities by amplicon sequencing. BMC Microbiol. 19, 171 (2019)). Loci were built by mapping the location of the hits into the contig and aggregating hits when they are no further than 20 kb from each other. Loci were selected if they satisfied the following criteria: (i) at least 2 hit genes homologous to 2 distinct Tn7 components, (ii) 2 of the hit genes are in a putative operon, which is operationally defined as 2 codirectional ORFs separated by less than 50 bp of non-coding sequence, and (iii) the hit genes are less than 3 kb from the contig boundary (to remove likely incomplete transposons). Using these criteria, 80,028 loci were obtained from which 86,517 TnsC homologs were extracted and translated. These homologs were clustered at 80% sequence identity over 75% of the protein length (coverage) using MMSeqs2 (v. 12-113e3) (Steinegger, M. & Söding, J. Clustering huge protein sequence sets in linear time. Nat. Commun. 9, (2018)) and obtained 7,789 TnsC homolog representatives.

### Construction of the Phylogenetic Tree of TnsC Homologs

[0403] The protein sequences of representative TnsC homologs were aligned using a method described previously (Wolf, Y. I. et al. Origins and evolution of the global RNA virome. MBio 9, (2018)). Briefly, the protein sequences were clustered at 50% identity and cluster members were extracted and aligned using MUSCLE (version 5) (Edgar, R. C. et al. Petabase-scale sequence alignment catalyses viral discovery. bioRxiv (2020) doi: 10.1101/2020.08.07.241729). An all-versus-all comparison of the multiple sequence alignments (MSAs) was computed using HHsearch (Steinegger, M. et al. HH-suite3 for fast remote homology detection and deep protein annotation. BMC Bioinformatics 20, 473 (2019)). An unweighted pair group method with arithmetic mean (UPGMA) dendrogram was constructed using the HHSearch similarity scores. The dendrogram was used to guide the iterative pairwise alignment of cluster MSAs using HHalign (Steinegger, M. et al. HH-suite3 for fast remote homology detection and deep protein annotation. BMC Bioinformatics 20, 473 (2019)). Clusters were discarded if they could not be aligned using this approach, leaving 6,988 sequences in the single final alignment. The alignment was first filtered to remove sites with conserved gaps using trimal version 1.2 with the option gappyout (Capella-Gutiérrez, S., Silla-Martínez, J. M. & Gabaldón, T. trimAl: a tool for automated alignment trimming in large-scale phylogenetic analyses. Bioinformatics 25, 1972-1973 (2009)). Finally, aligned sequences from which Walkers A and B were not aligned correctly (any gap in one of the positions) were discarded. This led to an alignment of 6,384 sequences that are used for this study. The alignment was input into FastTree2 (Price, M. N., Dehal, P. S. & Arkin, A. P. FastTree 2-approximately maximum-likelihood trees for large alignments. PLoS One 5, e9490 (2010)) with the Whelan-Goldman models of amino acid evolution and gamma-distributed site rates. The tree was visualized and annotated using the interactive tree of life (itoD (Letunic, I. & Bork, P. Interactive Tree Of Life (iTOL) v5: an online tool for phylogenetic tree display and annotation. Nucleic Acids Res. 49, W293-W296 (2021)).

### Annotation of the Genomic Vicinity of TnsC Homologs

[0404] TnsC homolog representatives were mapped onto their genomic contigs and genes within 50 kb distance were extracted. These genes were translated and annotated for specific genes of interest including Cas effectors (Cascade and RAMP components and single protein effector from Class 2 CRISPR-Cas systems) and Cas6 that were annotated using the profiles extracted from DefenseFinder (Tesson, F. et al. Systematic and quantitative view of the antiviral arsenal of prokaryotes. Nat. Commun. 13, 2561 (2022)) and hmmsearch (Eddy, S. R. Accelerated profile HMM searches. PLoS Comput. Biol. 7, e1002195 (2011)) with a hit threshold set at a score of 25 whereby all hits with a score of 25 or greater were selected. Hits were mapped onto leaves of the TnsC homolog tree and subsequently the TniQ homolog tree and displayed with itol (FIGS. 2 and 9B). As TniQ/TnsD can be extremely divergent and therefore not always detected by hmmsearch, a profile-profile comparison was performed using HHalign software (Steinegger, M. et al. HH-suite3 for fast remote homology detection and deep protein annotation. BMC Bioinformatics 20, 473 (2019); Söding, J., Biegert, A. & Lupas, A. N. The HHpred interactive server for protein homology detection and structure prediction. Nucleic Acids Res. 33, W244-8 (2005)) and the TniQ PF06527 profile to annotate remote TniQ homologs. TniQ hits were selected if they have a hhsearch probability >=80. Given the abundance of TniQ, false positive detection of TnsC (AAA-ATpase among cargo), and sometimes multiple Tn7 transposons co-occurring, it is challenging to know which tniQ/tnsD is associated with which tns C. For a given tnsC, Applicant defined an association with tniQ/tnsD (s) if no other tns C homologs were found in the vicinity. If there was a tns C homolog closer than the given tnsC, Applicant associated tniQ/tnsD to it only if there was a tnsB gene operonized with this closer tns C. In total 5,072 tniQ/tnsD were found to be associated with TnsC homolog representatives. The presence of these tniQ/tnsD were mapped onto the TnsC homolog tree. When multiple tniQ/tnsD were found in the vicinity, the two largest were selected and the second selected tniQ/tnsD were mapped on an additional barplot indicating the size of the second protein in aa. tnsE were detected in relatives of E. coli Tn7 but also weakly in Tn6022-like transposons where it is encoded in the far vicinity of the Tn core components (in contrast to E. coli Tn7 relatives where tnsE is part of a full operon encompassing all Tn core components and tnsD). Manual inspection indicated these TnsE remote homologs are encoded near the left end of the transposon far from the other transposon components. Structural comparison from the models predicted by Alphafold2 (Jumper, J. et al. Highly accurate protein structure prediction with AlphaFold. Nature 596, 583-589 (2021)) (FIG. 10A-10B) confirmed that these hits are TnsE relatives. These remote TnsE were used as a new seed to annotate more TnsE using blastp on all translated genes in the vicinity of tns C. 552 TnsE in total were detected, and their presence were mapped on the TnsC homolog tree and on the TniQ homolog tree and displayed using itol framework (Letunic, I. & Bork, P. Interactive Tree Of Life (iTOL) v5: an online tool for phylogenetic tree display and annotation. Nucleic Acids Res. 49, W293-W296 (2021)).

### Structural Prediction and Analysis

[0405] All structural models were built using Alphafold2 (AF2) software under the colabfold framework installed locally (Evans, R. et al. Protein complex prediction with AlphaFold-Multimer. bioRxiv (2021) doi: 10.1101/2021.10.04.463034; Jumper, J. et al. Highly accurate protein structure prediction with AlphaFold. Nature 596, 583-589 (2021); Mirdita, M. et al. ColabFold: making protein folding accessible to all. Nat. Methods 19, 679-682 (2022)). Multiple sequence alignments were constructed using colabfold_search on colabfold database that includes Uniref and environmental protein sequences. Alignments were input into AF2 and generated 3 models with 35 recycles. All models were examined using the PyMOL framework (The PyMOL Molecular Graphic System Version 1.2, Schrodinger, LLC) mapping the predicted local distance difference test (plDDT) (Jumper, J. et al. Highly accurate protein structure prediction with AlphaFold. Nature 596, 583-589 (2021); Mariani, V., Biasini, M., Barbato, A. & Schwede, T. IDDT: a local superposition-free score for comparing protein structures and models using distance difference tests. Bioinformatics 29, 2722-2728 (2013)), a local measure of prediction confidence, on each residue. Regions of the proteins with plDDT inferior to 50 were not considered. Protein docking prediction was performed using AF2 with the multimeric model (Evans, R. et al. Protein complex prediction with AlphaFold-Multimer. bioRxiv (2021) doi: 10.1101/2021.10.04.463034). Results of protein docking were analyzed by examining the predicted aligned error (PAE) matrix (Jumper, J. et al. Highly accurate protein structure prediction with AlphaFold. Nature 596, 583-589 (2021)) and visualizing the interaction area on PyMOL. The spatial distribution of specific chemical interactions found in protein-protein interactions (Andreani, J., Faure, G. & Guerois, R. Versatility and invariance in the evolution of homologous heteromeric interfaces. PLoS Comput. Biol. 8, e1002677 (2012); Faure, G., Andreani, J. & Guerois, R. InterEvol database: exploring the structure and evolution of protein complex interfaces. Nucleic Acids Res. 40, D847-56 (2012)) were analyzed using PyMOL to validate models when PAE was weak. The predicted structures with high confidence (typically average pLDDT>70) were considered for downstream analysis. Search for structural similarity was performed using DALI software version 226 using the PDB50 (non-redundant at 50% of sequence identity) and a custom made database made from the EBI Alphafold2 database. This database contains Alphafold2 models of Uniref50 (Steinegger, M. & Söding, J. Clustering huge protein sequence sets in linear time. Nat. Commun. 9, (2018); Suzek, B. E., Huang, H., McGarvey, P., Mazumder, R. & Wu, C. H. UniRef: comprehensive and non-redundant UniProt reference clusters. Bioinformatics 23, 1282-1288 (2007)) extracted from EBI Alphafold2 database (https://alphafold.ebi.ac.uk/) restricted to models having at least 30aa with a plDDT greater than 50 (hereafter called AF2DB50). Hits with Z-scores greater than 5 were retained, and every hit was manually verified by building structural alignment in PyMOL editing mode.

### Phylogenetic Analysis of TniQ

[0406] 5,072 tniQ/tnsD detected in the vicinity of the Tn7 tns C homolog representatives were translated and aligned using muscle version 5 (Edgar, R. C. et al. Petabase-scale sequence alignment catalyses viral discovery. bioRxiv (2020) doi: 10.1101/2020.08.07.241729) using the option super5 that clusters the sequences. Alignments were then created for each cluster and merged into a single alignment. The alignment was first filtered to remove sites with conserved gaps using trimal version 1.2 with the option gappyout (Capella-Gutiérrez, S., Silla-Martinez, J. M. & Gabaldón, T. trimAl: a tool for automated alignment trimming in large-scale phylogenetic analyses. Bioinformatics 25, 1972-1973 (2009)). As TniQ/TnsD can harbor very divergent C-terminal regions in terms of both sequence and size, the alignment was restricted to the core region of TniQ. To determine the core (roughly corresponding to the first 300 aa), the structure of all dual TniQ-TnsD CAST systems was predicted with AF2 and manually aligned structurally under the PyMOL framework. Core positions were mapped to the sequence alignment and the downstream regions (C-terminal region) were trimmed out. Finally, to filter out misaligned TniQ cores, aligned sequences from which the first CxxC motif of the zing finger were not well aligned (any gap in one of the positions) were discarded. The 4,916 remaining aligned sequences were used to build a tree using FastTree2 (Price, M. N., Dehal, P. S. & Arkin, A. P. FastTree 2--approximately maximum-likelihood trees for large alignments. PLoS One 5, e9490 (2010)) with the Whelan-Goldman models of amino acid evolution and gamma-distributed site rates. The presence of cas effector genes and cas6 as well as tnsE in the vicinity was shown similarly as for the TnsC tree. Operonized genes with tniQ/tnsD (see TniQ partner candidate analysis) were also displayed (light green ring). To investigate the origin of dual TniQ-TnsD, a visual approach and a statistical approach were used. A connector between dual TniQ-TnsD leaves of the tree was drawn and colored based on a rainbow gradient spread across all leaves from the left to the right of the tree. The connector has a uniform color picked from the color assigned to the left-most leaf. If a connector has a color that matched the color both at the starting leaf (left) and the arriving leaf (right), the proteins are closely related. Conversely, any contrast between the colors indicates the proteins are not closely related. For the statistical approach, the branch distances of all dual TniQ-TnsD were extracted and compared with 1000 random branch distances involving nondual TniQ-TnsD across the tree. Branch distances were calculated using the Phylo package from the Biopython library. Biopython package (Cock et al., 2009). Comparison of these distances was done via a T-Test using SciPy python library version 1.0 (Virtanen et al., 2020).

### Analysis of Candidate Partners of TniQ

[0407] Genes operonized with tniQ/tnsD were extracted and translated if they were not related to any Tn7 components (TnsA, TnsB, TnsC, TniQ/TnsD, or TnsE). 782 proteins were clustered at 30% of sequence identities and 30% sequences coverages using MMSeqs2 (v. 12-113e3) (Steinegger, M. & Söding, J. Clustering huge protein sequence sets in linear time. Nat. Commun. 9, (2018)). From each cluster, members were aligned together using mafft-linsi (Katoh and Standley, 2013). From each alignment, secondary structures were predicted psipred version 2.6 (Jones, 1999) to ensure compatibility with hhpred, and HMM profiles were built for each using hhmake (Söding et al., 2005). Each hhpred profile was compared to the Pfam protein domain database (preformatted for hhpred and available at https://wwwuser.gwdg.de/˜compbiol/data/hhsuite/databases/hhsuite_dbs) using hhsearch. Hits with hhsearch probability >=90 were considered. Candidates operonized with tniQ/tnsD were mapped onto the tree (light green ring). The 6 largest groups of candidates were selected based on the conservation of the operonized genes across several adjacent leaves in the TniQ tree and analyzed further. For each candidate, profile analysis was performed (using hhpred webserver (Söding, J., Biegert, A. & Lupas, A. N. The HHpred interactive server for protein homology detection and structure prediction. Nucleic Acids Res. 33, W244-8 (2005)) to assess their potential function and structural docking with TnsC and TniQ/TnsD to test for potential interactions (interaction with TnsC could highlight a novel target selector independent from TniQ/TnsD, whereas interaction with TniQ/TnsD could suggest a partner target selector) using Alphafold multimer.

### TnsF Analysis

[0408] TnsF from Acinetobacter johnsonii Tn6022 (hereafter AjTn6022 and AjTnsF) was chosen as the representative for computational and experimental analysis. HHpred was used to annotate the domain architecture region of AjTnsF and detect the presence of multiple zinc fingers in the N-terminal region (positions 1-180 has a hit to a LIM Zinc-binding domain-containing protein hhprob=97.23) and similarity with tyrosine recombinase in the C-terminal region (positions 328-493 has a hit to a site-specific recombinase IntI4 hhprob=99.14). A structural model of TnsF was obtained using AF2 and split into 3 domains defined by long linkers connecting globular regions and a long N-terminal region encoding several zinc fingers. Each domain was used as a seed for structural similarity search using DALI software across the PDB50 (as described above). Top hits were inspected manually with PyMOL.

### Mining of TnsF and Phylogenetic Analysis of Tnsf Homologs

[0409] To search for TnsF relatives, TnsF from Acinetobacter johnsonii Tn6022 (hereafter AjTn6022) Tn6022 was used as a seed for a psiblast (Altschul et al., 1997) search for 3 iterations on the NCBI NR database (in August 2022). 22,419 protein hits were extracted and clustered at 80% of sequence identity and 70% of coverage with MMSeqs2 (v. 12-113e3) (Steinegger, M. & Söding, J. Clustering huge protein sequence sets in linear time. Nat. Commun. 9, (2018)). A blastall comparison (Altschul and Lipman, 1990) was performed, and e-values associated with each comparison were input into CLANS software (Frickey and Lupas, 2004) to cluster hits according to their e-values and draw a graph network representation. Several clusters (point density connected and close to each other) are also connected to each other. AjTn6022 TnsF was mapped onto the graph to identify the cluster to which it belongs in order to define the Tn6022 TnsF cluster. The Tn6022 TnsF cluster is connected to another cluster from which several members were extracted and mapped onto genomic contigs. Genomic comparison between these contigs and Tn6022 contigs reveals a distinct system with partial comM surrounding the system and with no apparent Tn7 components but other genes operonized with tnsl. Hhpred webserver (Söding, J., Biegert, A. & Lupas, A. N. The HHpred interactive server for protein homology detection and structure prediction. Nucleic Acids Res. 33, W244-8 (2005)) was used to annotate these genes, revealing the presence of a gene encoding a tyrosine recombinase (yrec), a gene encoding a helix turn helix domain (hth), and a gene encoding a GIY-YIG nuclease. The system was named transposon using Target Selector based on tYrosine recombinase (Tsy) based on the components operonized with tnsl. Hits belonging to the CLANS Tn6022 TnsF cluster and the adjacent cluster harboring the Tsy TnsF were extracted and aligned using muscle version 5 (Edgar, R. C. et al. Petabase-scale sequence alignment catalyses viral discovery. bioRxiv (2020) doi: 10.1101/2020.08.07.241729) with the super5 algorithm. The alignment of 1,095 protein sequences was further trimmed using trimal version 1.2 (gappyout option) (Capella-Gutiérrez, S., Silla-Martinez, J. M. & Gabaldón, T. trimAl: a tool for automated alignment trimming in large-scale phylogenetic analyses. Bioinformatics 25, 1972-1973 (2009)) and was input to FastTree2 (Price, M. N., Dehal, P. S. & Arkin, A. P. FastTree 2--approximately maximum-likelihood trees for large alignments. PLoS One 5, e9490 (2010)) with the Whelan-Goldman models of amino acid evolution and gamma-distributed site rates. The tree was visualized and annotated using the interactive tree of life (itoD (Letunic, I. & Bork, P. Interactive Tree Of Life (iTOL) v5: an online tool for phylogenetic tree display and annotation. Nucleic Acids Res. 49, W293-W296 (2021)). Ins genes were mapped to genomic contigs, and genes in the vicinity (20 kb) were extracted, translated, and further clustered at 30% of sequence identity retaining 50% of coverage using MMSeqs2 (v. 12-113e3) (Steinegger, M. & Söding, J. Clustering huge protein sequence sets in linear time. Nat. Commun. 9, (2018)) and each cluster was converted into HMM profile using hhmake and compared to the profile pfam database using hhsearch (Söding, J., Biegert, A. & Lupas, A. N. The HHpred interactive server for protein homology detection and structure prediction. Nucleic Acids Res. 33, W244-8 (2005)). The top populated clusters were Tn7 components (tnsA, tnsB, tns C, and tniQ/tnsD and candidates operonized with Tsy TnsF (yrec, GIY-YIG). The presence of tniQ thsD as a marker of Tn7, and the presence of the yrec and the GIY-YIG nuclease were mapped on the TnsF tree as distinct rings. Split comM genes were extracted and translated from AjTn6022 and one Tsy locus and used as seeds to search for the full protein version of Mg chelatase for Tn6022 and Tsy using blastp (Altschul and Lipman, 1990). The closest Mg chelatase was selected for each of the two systems and used as a seed to detect comM pieces in the nucleotide vicinity of each locus using tblastn (Altschul and Lipman, 1990). The presence of a comM hit is indicated as a ring on the TnsF tree. Inspection of the tree shows Tn6022 TnsF is monophyletic (branch support=0.976). A TnsF from Tsy was extracted from Zoogloea sp. LCSB751 (ZooTnsF) and the structure was predicted using AF2. Structural comparison between AjTnsF and ZooTnsF was performed manually using a PyMOL framework. The structural similarity search was done using DALI on AF2DB50 (as described above). Hits with a zscore greater than 8 were inspected manually to search for tandem CB+CAT domain architecture using PyMOL.

### Prediction of Transposon Ends for Th6022 and Tsy

[0410] Transposon ends for AjTn6022 were determined using Geneious searching for at least one distinct cluster of short repeats (12 nt with 3 mismatches maximum, repeated at least twice in each end) that surround the transposon components including the tsA, tnsB, tnsC, tniQ, tnsF, and tnsE. Exact end boundaries were then adjusted manually based on local alignment of the clustered repeats area and search for target site duplications.

[0411] Nucleotide sequences for the right and left transposon ends of CyCAST, AjTn6022, and ZooTsy can be found in Table 6, below.

TABLE 6

| System Type | RE (5′ to 3′) | LE (5′ to 3′) |
|---|---|---|
| CyCAST | Tgtgactgcaaccataagttgtccgatttt | Tgtgactgcaaccataagttgtctatttcgga |
| 40005\|0\|GCA_ | gaaagcataagttgtccactcatgggtgtg | cactttatgcttacaattttggctggacagctta |
| 000022045.1_ | gacaacttgagtcatcgtcaatattcacttt | tgcttacaattttggctggacagatagagcga |
| ASM2204v1_ | gcaaaataaaaaactgaaagcataagttg | aagcaataggcaagacgattatatttctttgcc |
| genomic\| | cccaaatgttaacaatcgaaagcataagtt | tataaagtaggcctattgatggatgaccctcc |
| CP001344.1\| | gtccaaaagttagaacttggagcagccgt | aac (SEQ ID NO: 85) |
| 5374574\| | tgtgttgccttagggttatttgccaagagca | |
| Cyanothece | agtatgcttttaatcctggaaaagctccga | |
| | aggaatgacttct (SEQ ID NO: | |
| | 84) | |
| AjTn6022 | Tgtcatttacagcaatagataagagtgtca | Tgtcagttccacaaataaatcagagtttacac |
| ENU40864.1 | tgataagaaaacaataggttgccactctaa | aaataaactagagtgataataaaaactatact |
| (Acinetobacter | aattacacaaatagattagagtaatgacag | atttatatatgaatttcattaaattcactaaaaga |
| johnsonii | taataagcaagagtggcttgcaaatttaca | tatgcctgcaaataaaaaagttaaagtcacaa |
| CIP 64.6 | caaatacgcacgagtggctgtaagaggc | ctattgattgtttcccaaatgataatattcgcag |
| acLZl- | attct (SEQ ID NO: 86) | aactgtctatagatatggtgggtttcttaggaa |
| supercont1.5.C9, | | tgagggcagtga (SEQ ID NO: 87) |
| whole genome | | |
| shotgun | | |
| sequence) | | |
| ZooTsy | Aagttctgatttagccaatgtagcaacga | Ggactgggattctccaatat (SEQ ID |
| Zoogloea sp. | acaaggcaaaaattcggataacccactga | NO: 89) |
| LCSB751 NODE_ | ctataaaggaatcccaaagtatccaatgtc | |
| 6_length_ | gcattacttgcaggaatcctgtgagtgatg | |
| 275285_cov_ | tcacagcattagaagta (SEQ ID | |
| 54.3012_ID_11, | NO: 88) | |
| whole genome | | |
| shotgun | | |
| sequence | | |

Computational analysis of CAST I-D

[0412] A blastp search was performed from CAST I-D Cas10d on the NCBI NR database to fetch additional loci. Only one candidate, from the Cyanothece sp. PCC 7425 genome (CyCAST), harbors a predicted active HD and Cas3′. The CRISPR-array of CyCast was predicted using minced (Bland et al., 2007) with default parameters, and transposon ends were determined as described above. Exact end boundaries were then adjusted manually based on local alignment of the clustered repeats area and search for target site duplication. CAST I-D Cas10d was used as a seed to search for homologs using blastp on the NCBI NR database. An initial phylogenetic tree (using FastTree) was done from the sequence alignment (using mafft-linsi) of the hits, and the subtree harboring all CAST I-D Cas10d and a few non-CAST I-D Cas10d were extracted. A structural model of CyCAST Cas10d was obtained using AF2 and used to determine the position of the catalytic sites of the HD nuclease domain. These positions were mapped onto the alignment from which a sub-alignment encompassing these positions and their local sequential vicinity was built and juxtaposed next to the tree.

### Plasmid Construction

[0413] All plasmids used in this study are described in Table 7. For type I-D CyCAST experiments, genes encoding Cyanothece sp. PCC 7425 (ASM2204v1_genomic|CP001344.1|5374574|) TnsAB-TnsC-TniQ-TnsD, and Cas10d-Csc2-Cas5-Cas6 were synthesized (Twist Bioscience) and cloned into pCDFDuet-1 with the appropriate spacer flanked by two CRISPR direct repeats, yielding pHelper (CyCAST). Gene fragments encoding both transposon ends (Genewiz) were cloned into pBluescript II SK (+) (Agilent), yielding pDonor (CyCAST). For PAM screens, a 0.5-kb exon fragment amplified from human EMX1 was inserted between the transposon ends as a mock non-functional cargo in E. coli. For AjTn6022 experiments, genes encoding Acinetobacter johnsonii Tn6022 locus TnsA-TnsB-TnsC-TnsD-TnsF weresynthesized (Twist Bioscience) and cloned into pCDFDuet-1. Predicted AjTn6022 transposon ends (RE and LE) were synthesized (Genewiz) and cloned into pBluescript II SK (+) with a kanamycin resistance gene to obtain pDonor (AjTn6022). For ZooTsy experiments, genes encoding Zoogloea sp. LCSB751 Tsy locus YRec-HTH-TnsF-GIY-YIG nuclease were synthesized (Twist Bioscience) and cloned into pCDFDuet-1. Predicted ZooTsy transposon ends (endl and end2) were synthesized (Genewiz) and cloned to obtain pDonor (ZooTsy). Through the study, pBluescropt-donor was used for CyCAST, and pR6K-donor (backbone: addgene #127924) was used for AjTn6022 and ZooTsy experiments, except Tagmentation-based Tag Integration Site Sequencing (TTISS) analysis (Schmid-Burgk, J. L. et al. Highly Parallel Profiling of Cas9 Variant Specificity. Mol. Cell 78, 794-800.e8 (2020)) with pSC101-donor (backbone: addgene #140630). To construct pHelper variants for CyCAST, AjTn6022, and ZooTsy, the Q5 Site-Directed Mutagenesis Kit (NEB) was used. For pHelper (AjTn6022) TniQ point mutants, a ribosome binding site and a partial TnsF N-terminal coding sequence was inserted to separate overlapped ORFs of TniQ and TnsF, and mutations were introduced into TniQ. The tRNA-Val gene of pTarget (PmcCAST) (addgene #168163) was replaced by either tRNA-Leu gene of Cyanothece, comM gene fragment of A. johnsonii, or comM gene fragment of Zoogloea sp. LCSB751, yielding pTarget (CyCAST), pTarget (AjTn6022), or pTarget (ZooTsy), respectively. For TniQ and TnsF proteins purification, TniQ of AvCAST, PmcCAST, CyCAST, Tn7017 and AjTn6022 were individually cloned into ColE1-based pTwinStrep-SUMO bacterial expression vector, and ShCAST (addgene #135527) were used. TnsF of AjTn6022 and nuclease-dead TnsF-Y584F mutant of ZooTsy were individually cloned into ColE1-based pTwinStrep-bdSUMO bacterial expression vector.

TABLE 7

| Plasmid description | Plasmid DNA sequence |
|---|---|
| pHelper(CyCAST)_PSP | ggggaattgtgagcggataacaattcccctgtagaaataattttgtttaactttaataaggagatat |
| 1 | accatggtttccaagcctgaatcccggtctacgggactgaaacgagaagtcatttaataaggcc |
| | actgttaaacgtaggtttccaagcctgaatcccggtctacgggactgaaacgatccgaattcga |
| | gctcggcgcgcctgcaggtcgacaagcttgcggccgcataatgcttaagtcgaacagaaagta |
| | atcgtattgtacacggccgcataatcgaaattaatacgactcactataggggaattgtgagcgga |
| | taacaattccccatcttagtatattagttaagtataagaaggagatatacatatggctaccctactcc |
| | aaaccctcctgttacgaacgttgtcacccgaggcggatccagttctctatgtctacattgagacg |
| | gtactacctgcaatggaacgggaatttggcttgattccagcccttggtggctcggaggaagcac |
| | actttcatctgctgaggcgacggggaaacaaatatgcggcggaaaattccaagcggtacgcca |
| | gtcgctctgatcaaagcctgctggttcatgtgctcaatgccttgctgaccgcctggaatttgttgc |
| | cattcctaagctccacatttgaactatcagatgatgagaaacggctgctctgcctggggctgacc |
| | ctacacgattacaacaagtggtgccagggtgaggaggaagattcgccgattgcatgcgaagta |
| | gcagagattcttgagctttgtcaaacattgggagagcggttgaactttgacggattctgggcaga |
| | gtggcgggagtatttgacagagattgcctaccttgcccaaaacacccagggaaaagttggaac |
| | aaatctacccaaagcgaattggggcagcttcaaaattctagatacccgtcgtctggattcgcccc |
| | tacgatggctactcgcttttggcgatgtcgcagtccatctcagcgatccatctgacatcgcaatga |
| | aaacggggggagatcgcctgcgggaacatctgcgctttctaggtattcgtcgcaagctggtcta |
| | ccatcgcctgcgcaactgtacagggctattaaccaacggaattcataatgcggtaatgcattttg |
| | ctagagaactggattggcaacccatcctcttctttgctcagggtgttgtttatctcgctcctcaggg |
| | tgctggcgttccggatcgcttagaacttcaggaatttctctgggagcaggtcagcaaccgattag |
| | ccaccagcatgttgcggggagaggttggtttcaaacgggatggcaagggactcaaggtggct |
| | ccccaaaccctggaactgttctcccctgctcagttgattcggaacttgcccggtgttgtccaatctt |
| | atgtcggaaacgctaaatctcctgcgactccaaaacgacttgagaagctggaactcagttcaac |
| | agagcgagagtttttggctaaaggtgcagatttaagagcagatcgcattgccgagtttatctttct |
| | ggcgcaaaaagagtttttcggagataaaccagaatttatcacttggatgcttgaaactctggggg |
| | ttcaaactgctatcacttcggagcagacgcagcttcaatccggtggtgtgaactggggatggtat |
| | cacgcagcagcctattacgtcgcgagcaatgccacgctggatttggaagagatttcggagaaa |
| | cttcaggaatttgccgagcagttggcaacctgggcggaggaaaacaatttcttcccagagcatc |
| | gcagcccaacccatgacatctttttcaactatctgactcaatacctggaagttcaggggtgggag |
| | cagcaggagcagtcctttcagcttgaactggcaggctatgttggcgcaaagactaaaactgcca |
| | gacaaccgatttgctccctcagttccggtgaatttgcttcggaagaccagatggattctgttgtcct |
| | gttcaaaccgcagcagtacagcaacaagaatcctctcggtggacggcagatcaagcggggg |
| | atttccaaaatctggtccctggaaatgctgctcaggcaggctctttggtctgcgccagcaggcaa |
| | actagaggaacaacaacccattttcctttacatcttcccggcatacgtttactcgccccaggttgct |
| | gctgctgtccggttactggtgaatgatctgaagcgtgtcaacctctgggaagtccgtaaacactg |
| | gttggagaatggcatggatgctcaggcgttgcgatcgtttccctggctagtcggtgacaaaaac |
| | gattcgggtaactctgctccatccagatactctggtgaagacttgcctttcatggcaatgaactac |
| | accaccaccagaggcaaaacgataactgatgcctgggttgaacctgctttcctgacactggtgc |
| | tgcctttgttgctgggtgtgaaagttgtcgccaccagtagccagattccactctatgaaagcgac |
| | aacgacttttgcgaatctgtcaagctggatggacccgccgatttctgggctttgctgcggctacc |
| | aacttccctgcatctccaggattggattggggggcgtgttcaaaatttagcagaaggcttgaacc |
| | gcttgatggttgcctactgcctgcatctggacagtcgtagcgctccaccagatgcgcgctggag |
| | agccttaaacggcagtgtccgagagatgacaacaaatgttctaaacattttttcacttgcagagg |
| | agggattacgtcgtgatggctctaaacgcgatgcaacagttgaagaaattaaccgctattggaa |
| | atacgcccagctgtgggcagagggagactctgatatgcaaaacaagttgaagattaccaaacg |
| | cttagtcgatgagtaccgccagttttacagagccagtgcgaacgaatccagccatacggttttgc |
| | tgccattttctaaggcactggaacacattctttcggtaccaaatgattgggacgatgaggaaatta |
| | ttgttcaaggggcaggacagttacaggccgcgttagatcggcaggaagtctacaaacgtcccc |
| | tcatgcttgacaaagagattccctttgaaattcgtcggatgaaggagtttgaggcaattcaaacct |
| | tcatgaccacctgcgtcattgacctatttggacaaatgtgtaaaggcgatcgcgcgctcctgcag |
| | gaacatcgcaaccgccttaaatcaggggtcgaatttgcctatcgtcagttagccctgcaagaga |
| | aacaagccaaagccaaccaaaaatctggagaacaatcatgagcattcttgaaaccttaaagcc |
| | agagttccacacagccttccctcgcctcgcctctggcaaatatgtccatttcttcatggtgcgtca |
| | cagccagtcgttccccgtctttcaaaccgatggcgttttgaacactgcccgtactcaggctgggtt |
| | aaatgcaggcgatgaaaaatccagacaggcaatcagtcgcctggtcatgttcaaacggaaaca |
| | ggtgacaccagaacgactcacaggacgggaactgctgcgatcgctgggcattaacggagtag |
| | ttgaaggggaagccaatttctgtgaatacaacggcgaaagatcctgtaaaaaatgccctgattg |
| | cattctctatggttttgcgattggggacagtggctcggaacgttccaaagtctactctgattcagc |
| | cttttccctgagtccttatgaagtttcccatcgcagttttaccttcaatgctccctttgaaggtggaac |
| | catgagtgagaagggtgaaatgcggagtgcgatcaacgaactggatcatgttttgccggaagtt |
| | gcttttccttgcgttgaaacactacgtgaccccacgctggaaggcttcatttatgtaatgggcaac |
| | ctgatccggactcggcgctatggagcgcaggagtcgcgtacagggacaatggcgaatcacat |
| | tattggcgttaccctatgtgatggcgagatcttcagcaatttgcactttacccaagccctctacgat |
| | gccctgaagggtgatttgagtgcgccaattagtgatttatgcagagaggcggcgatcgtggca |
| | gaaaacttgctaaatcaggaacctgtgcggaagatccaagttatttttggagagcagttgaacga |
| | actcctggctgaggtagcgggaatctgccaggatgaaactcgcttgcgaaacactgtgacagc |
| | cttgtaccagcaatcacaagcctatgccgagacctatggtgctgctgctaagaaaggcaaagg |
| | caaatcttaaggtggctgccaatggttatttatcgatgcaatctcacgttgcacgacaacgtattct |
| | tcgccactcgcgagatggggattctctacgaaacagagaagtatctacacaactgggcactca |
| | gctttgctctgtttgaagccacccacatccccaaaccctatcgcttgcagggtgcgatcgctcaa |
| | cgacccggttatctggaagctgacaacgagcaaaaccttttagttctgaatcacgcaggcatcta |
| | tgttttccctgctctaccacttcagtggtcctaccaagtcaataccttcaaagcggctcaagtgcct |
| | tactatggcaaatccaaacagttcggggataagggagctgatcgcaactacccgattaactacg |
| | gacgggcaaaagaactggcagttggcagcacctaccgaacgtatattcttgcccctgaaccaa |
| | tccagatcccccactggatacggttgggtaagtgggcagccaagattcaggtggacgcaaga |
| | cccatacctaactgtggaatccgacaacggtcaggagaatacacctgcgaccatccactaaatc |
| | cgatcgacctgtccggttcaacccgattgctgttatacaaccgcattgtcatgccacccgctagtc |
| | tcgtcagtcagtcgcgagtttctggggactactgggaaatttctaaaccatccaattggactgaat |
| | ttccggactggtcagacctgaaagacatacccaatcaagtttgcttacccagcggagtagcctat |
| | ggagccagtactgccattgccgcatcttaagtccaccgctctgcatatcctggtaattcatttagg |
| | cgttgccgaaagcggagccttgcctgttgaatccggtcgagccgtccatgctcaagttttggact |
| | ggttccgcatggcggatccggcaatttctgaggcaattcacaaaagccaggaatccccgctca |
| | gtctctcaggcctggtcgggaaacgccgtaaagtaggggtgcgggcaggagatgaattttact |
| | tccgaattgggttgttagatgggagtttgattgaaccactgctgagtggtttggagaagtggggc |
| | gacaagcccttttctctggcaaagtgtccctttgttttccgcagtatcaatatgttgccaggaactg |
| | acccctgggttggttcttccgattatgccttgcttacccaaaccccggctactttggataacctagc |
| | tctcaagctcctgtcgccaacaagcttcaagtcgaatgccgggcaaggaatccaaccctttcctt |
| | tgccagagtcagttttcggaaatttacatcgtcgctggaatgtctttgcaccaaaggaattgcagtt |
| | tccaaaaattcaatggagtgggctggtctctgattatgacctcaaaactcaaaagttaaggatgg |
| | aaaactcggttgagatcggcgcagtgggctgggtgcgctatcggtttccagatccagaacaag |
| | cgagaattgcaaccattctggctcactttgccttttttgctggagttgggcgtaagacagcaatgg |
| | ggatgggacaggtggtgttggacaaaaaaacgtagcctaggctgctgccaccgctgagcaat |
| | aactagcataaccccttggggcctctaaacgggtcttgaggggttttttgctgaaacctcaggca |
| | tttgagaagcacacggtcacactgcttccggtagtcaataaaccggtaaaccagcaatagacat |
| | aagcggctatttaacgaccctcgggatctcgacgctctcccttatgcgactcctgcattaggaaa |
| | ttaatacgactcactataggggaattgtgagcggataacaattcccctgtagaaataattttgttta |
| | actttaataaggagatataccatgcttgatgaaaaaagcttcgacaactggtgccaatccgttggt |
| | ctgagccaggcagcacgtgaagttgtagagcgtgtgcgatcctcttcaccctcccgtcgcgtac |
| | agagcggtagaggaaacgtctccggcaattaccctagccgcaaaatgggcgtcacaattcagt |
| | ttgagtcccatcgaaatgagcttgcccgcatctacgaactggagcatgaccccggcgttctgga |
| | atattacgatcaacctcccaaaatcgaacttgattatttgtcaaaaaatgggaggcgtgttcgtact |
| | caatacacacctgatttctttgttatccgtaatgactcagcaggttgggaggagtgtaaaacagag |
| | gatgaccttaagcaattagctgaggacagccctaaccgttaccaacgagctgaggacaatcgc |
| | tggcgatgtccacctgcagaagcctatgctcttccccttgagttgtattttcaggtacggtctagtg |
| | ctgaaattaactggattttccagcaaaactttgtatggctagaagactaccttggtactgaatcactt |
| | actatggatgagtcggttgcagatgcaatcatagccacagtcagagcaaacgagggtatcaca |
| | ctactcgaactgattcaacaattacaaggcacagatgctgatgctatctacatcctgattgcaacc |
| | gaacaaatttatgttgatttgatggctgaacggttagcgaacagcgatcgggcacgggtattttc |
| | cagtccagaaattgctcaagcctttcaactcattacgctggtcgaagcacctctggctaacagttc |
| | tctccatatagttcaggtgggcgttggcacaaccatacactgggatggtgaagtctgggagatt |
| | gttaatacaggctctaccatgacaggattgttgcgatcggacggtaagtttatcgagttgcccaat |
| | tctgcaattgatgaattgattcagaagggcaagattcaatcaatttcagcacaacaagcccctgat |
| | agcaaagcagaagttgaagaaatgcttcgctgtgctcgtccagccgacattaaagaagccaac |
| | cgtcgctacgaaatcattcagccttacctggaaaaggatgcaccagcttgtccaactcgaacaat |
| | tcggcgctggcgtaatcagtattggcaggcagaaaagctttacgggaatggctatgttggtttac |
| | taccaaatcatcagaagaaagggaattatttagttaaggttaatgaagtaactcaagcttttatgctt |
| | gagtttattgagaagcattacgaaaatctcaaacagcgtagtaagcttagagtttatcaggcttttg |
| | tggaggcatgtgaaagccacgaaccgaaactaaaccctccaagccgtactacattcacactag |
| | cgattcagaaacgagcaggacatcagcaaaccttgaaacgtgaaggacgaagagctgccatt |
| | cagaaggaggagttttactgggaactggagctaactactcctcgacacggcgatcgccccttc |
| | gagatcgttcatattgatcacactcaactcgatattgagcttatcagttctttgaactccctggccca |
| | atgcaaccctacatctgttgatgccacttacaatttgggtcgtccttgggcaacgttcatggttgat |
| | gcttacagccgccgtttgctagcagtttacataacctatgaagaacccagctatcgttcctgcatg |
| | atggtgctccgtatttgcgtacagcgatttaagcgttttcctcagacgatcgtggtagataatggtg |
| | cagaatttcacagccattactttgaacaactactggcaacatatcaatgcacaaagaagcacag |
| | gccacctgcaaaagctcgctttggtgcagttgttgaacgattatttggcactgcaaataagcaatt |
| | aattcatgagttgcagggaaatacccaaattactcgcaagcatcgccaagttactcaatctgttca |
| | tccccaaaaattggctctttggacgttaggcgatctctacgaatcactatgtgaatgggcttacaa |
| | agtttatgctgaccgccagcaccctgcgctagggcaaagccctaatgctgcattcgctcaaggg |
| | ctggcgttgggaggtagtcgcatccatcgccgagtagagtatgaccaagtcttccgtatcttgac |
| | attgcccgcaccggaaagaggacaacgcaaagttcagccaggacaagggataaaacttagc |
| | aatatctactactggtcaaatgcctttcgagacccagaaattgaacaatcgatggttgaagttcgtt |
| | atgatccctttgatgccagcattgcctatgcactggtgcgaaaacaatgggtccggtgtatttcct |
| | cctactatcaacagtttcaaaatcgttcagaaaaggaaattcgtttaataactgctgagttgattaa |
| | gcaaaagcgtgaccagggaagagatacaaatgttacggataaagaattggcgcagtttttaag |
| | ctctacagaaatgaaagaaggcaaattcttggagcaacgcttgcggactacagaaaacagggt |
| | agttattcagaatagtacagctacagaagacgatccccccatcactaattctcagaattcttacga |
| | gccatcgcttatgctgccaagtgaggatgagttggatgatcaggaagactggttaaataccggc |
| | aaagctgaggcagaattagaattctatggagagtactagcgatgcaacctcaaataagcttccc |
| | aaaagagttactgcttcaaccaattcctgatcgaattgcctatttcaaagattacacaatggcacat |
| | ccgaagcttatagaagcagaccggaagttaatgcatgctattcgtgaacctggaggagctgctc |
| | ttatctttgtctttggtcctaccggagttggaaagtctactctattgaaacgaattactcaaaagctg |
| | cttaaagaagcattgtctttgatggagactgacaaaggctatattcctattgcgggggtagagata |
| | aaaactccagaggatagtaactttgattggaacgatttttatgttcgtgctcttatggcacttaatga |
| | gccaatgatcgagaaaaaaatcaaccgtacaggtgcaaaactaaaattacggttggcacttgaa |
| | tctgcccttcgtaatcgccgtcctgatgctttttacatagacgaagctcaaaattttggtaaggtag |
| | ccagtgggcgaaaattgcaagatcaaacagattgcattaaatctcttgcaaatctcgctcaaact |
| | cggtttatcttatgtgggatttatgaacttttaccactacgaaatctaagtgggcagctatgccgcc |
| | gtagccatagtattcactttccacgttattcggcagattctgagcaggatctaaaggcctttaaaag |
| | tgcgttattaacactacaaaatcaactccctcttcccgaaccacctgatttagtggcgcattggga |
| | attttgttatgagagaactatcggctgtattggtattttgaaagatttgctccttcggactctaagcg |
| | cgattttagtacgggatggagacaaagttttgacattgaagcccaaggatttagaacaacgtgca |
| | tggtctttagaagaatgtttggttatgctgagagaggcaaaggaaggagagcaacaacttactg |
| | acaaatcgggcttacatgaggaattacggacagctttagggtttaatgcagctacgtccaagca |
| | gtctgccaaatcatccaagtcaacatcaagcaaaaaagcaggcagtgttggaaagccttcacct |
| | cgtcgtcgttcagttggaatagatcaagatgccagctaacgatctagaaatctatgaatcttggaa |
| | tttagatctccctttactacctaatcgaagtaggctctaccacttgaaaccgattgcaattggagat |
| | gcttacgttgaaggattaatcagctatgtttgccgtttggctgaagcccactgtgtttctccaggag |
| | tccttactaaacaggaaatattgcccagtctaagaaaagtttataatgtgggttcaagagaagttc |
| | atgaagtacgaagagatgaaagtttagtttctatttcctcctttcctaagccagaaagcaataaaaa |
| | tcctaatgaaccaggcttctgggcatggcaatatattgaaggattgcagcctttaactcttagaga |
| | aaaccttgaagcattaactattccaaattggaaaaagcaaattccacaggtgacaggaattgag |
| | gttgcgcgtgagttgagagcttggtgccctgaatgctttcaacaatggcgcaagactaatcagat |
| | aatttatgaaccgatgctttggtcgatcgctttagttaccgtatgtccttatcattaccttccgctaca |
| | aactcgctgtccttattgtaaaaaaactcaacggcctatcacaggaaaaatgcaggtagctcgct |
| | gttccgaatgtttagagtggcttggcattcaaccaagcgaagattcagagttagaaatcaaaatta |
| | aatctgaagtcgaatggcaccattgggttgcggagaaagtaatggagattttggtatttaaagatt |
| | atactttaactgcaaatgctataacaatagcagctccaattacgaaagaaaaatattttcaactaga |
| | atcgagcttaataaattgtccaattaagtatgctcaacagcagttcttaaagctcttcttcaattaaat |
| | ttataaaggtatggctatggcgactgaagtaccttttacttttagcacgtgggatttatctaaacccc |
| | ttaccccagctcgtagttctctctttagcttgaaaccgattggggttggaacggctgcagtagaaa |
| | gcctcactggatatattgcacgtttggctgaagctcactgtatctggccaggagatcttcttgcag |
| | ctgaatttagttcttcatattcctattcttacctgcatagcatgaggggccgtattgctgctttgaatg |
| | gtaatagccaaatggctcaggatgctgtacttaagcttcaagagcttaccttacaggagaatttat |
| | ccgctttaacaatgttaggctgggctaatattttacccgcaaaagggttgttaaatcggactcgaa |
| | cttggtgtccggtttgttttgaggcgtggcgtttcatcaaaagtcctatatatgagcctctattatggt |
| | atttaacctcggtcaaatattgtccaattcatcagcaacgccttttatctcaatgtccattctgcgggt |
| | gccagcagcctcctctagactggaaaactcggccgggctattgttcaaggtgccaggtgtggc |
| | tgggttcaccaccaggtgtaacttccagtaattcgctttctaatacagaaataaggtgggagagtt |
| | gggttgcccagagctgcggaaatttgttagcctatagtcctcgtttacacaagatatccgttagcg |
| | ttcaggtcgcagcatccctttctaaatgtatcaacctttatgcagagggcaatattgcggagtttgc |
| | ccgtcaaatgagcttgccaaaaacttctgtttggctgtggcagtctggtcaggtactccccgagtt |
| | atccaggcttttaagcatctgctatcacttcaatctgtcgctcttagactttctaattaatacaccagt |
| | tcttaagataaggagagacttaattccagaaaagagaactaatgagtttcgccagcctcgaagag |
| | atccctcaaccatatctcaattgcaacctattctgggattaattcttttcgagcagccacctccctctt |
| | tagcagcagtagcgtgtcgcttaggttgtagctcaagatccctgcgccataattttcctgatctctg |
| | tggctctatttctgcacgttaccttcaacaccgtgatgaagtttataaagaaaaattgaatcaattct |
| | gtcaagacttgcgccaagttgtacttcaactttattcggcaggcattgatccgactcggagccaa |
| | gttgctcgccgtctgaggaaacccgcttattttagagaacccgaagtcgaggcaatgcttgagt |
| | ctgttcgacgagaattaggcttgcacagcaattctcagcatgagactaattctcacaaaaacgcc |
| | cagttttaacttaagtcgaacagaaagtaatcgtattgtacacggccgcataatcgaaattaatac |
| | gactcactataggggaattgtgagcggataacaattccccatcttagtatattagttaagtataaga |
| | aggagatatacatatggcagatctcaattggatatcggccggccacgcgatcgctgacgtcggt |
| | accctcgagtctggtaaagaaaccgctgctgcgaaatttgaacgccagcacatggactcgtcta |
| | ctagcgcagcttaattaacctaggctgctgccaccgctgagcaataactagcataaccccttgg |
| | ggcctctaaacgggtcttgaggggttttttgctgaaacctcaggcatttgagaagcacacggtca |
| | cactgcttccggtagtgccctgaaccgacgaccgggtcatcgtggccggatcttgcggcccct |
| | cggcttgaacgaattgttagacattatttgccgactaccttggtgatctcgcctttcacgtagtgga |
| | caaattcttccaactgatctgcgcgcgaggccaagcgatcttcttcttgtccaagataagcctgtc |
| | tagcttcaagtatgacgggctgatactgggccggcaggcgctccattgcccagtcggcagcga |
| | catccttcggcgcgattttgccggttactgcgctgtaccaaatggggacaacgtaagcactac |
| | atttcgctcatcgccagcccagtcgggcggcgagttccatagcgttaaggtttcatttagcgcct |
| | caaatagatcctgttcaggaaccggatcaaagagttcctccgccgctggacctaccaaggcaa |
| | cgctatgttctcttgcttttgtcagcaagatagccagatcaatgtcgatcgtggctggctcgaaga |
| | tacctgcaagaatgtcattgcgctgccattctccaaattgcagttcgcgcttagctggataacgcc |
| | acggaatgatgtcgtcgtgcacaacaatggtgacttctacagcgcggagaatctcgctctctcc |
| | aggggaagccgaagtttccaaaaggtcgttgatcaaagctcgccgcgttgtttcatcaagcctta |
| | cggtcaccgtaaccagcaaatcaatatcactgtgtggcttcaggccgccatccactgcggagc |
| | cgtacaaatgtacggccagcaacgtcggttcgagatggcgctcgatgacgccaactacctctg |
| | atagttgagtcgatacttcggcgatcaccgcttccctcatactcttcctttttcaatattattgaagca |
| | tttatcagggttattgtctcatgagcggatacatatttgaatgtatttagaaaaataaacaaatagct |
| | agctcactcggtcgctacgctccgggcgtgagactgcggcgggcgctgcggacacatacaaa |
| | gttacccacagattccgtggataagcaggggactaacatgtgaggcaaaacagcagggccgc |
| | gccggtggcgtttttccataggctccgccctcctgccagagttcacataaacagacgcttttccg |
| | gtgcatctgtgggagccgtgaggctcaaccatgaatctgacagtacgggcgaaacccgacag |
| | gacttaaagatccccaccgtttccggcgggtcgctccctcttgcgctctcctgttccgaccctgc |
| | cgtttaccggatacctgttccgcctttctcccttacgggaagtgtggcgctttctcatagctcacac |
| | actggtatctcggctcggtgtaggtcgttcgctccaagctgggctgtaagcaagaactccccgtt |
| | cagcccgactgctgcgccttatccggtaactgttcacttgagtccaacccggaaaagcacggta |
| | aaacgccactggcagcagccattggtaactgggagttcgcagaggatttgtttagctaaacacg |
| | cggttgctcttgaagtgtgcgccaaagtccggctacactggaaggacagatttggttgctgtgct |
| | ctgcgaaagccagttaccacggttaagcagttccccaactgacttaaccttcgatcaaaccacct |
| | ccccaggtggttttttcgtttacagggcaaaagattacgcgcagaaaaaaaggatctcaagaag |
| | atcctttgatcttttctactgaaccgctctagatttcagtgcaatttatctcttcaaatgtagcacctg |
| | aagtcagccccatacgatataagttgtaattctcatgttagtcatgccccgcgcccaccggaagga |
| | gctgactgggttgaaggctctcaagggcatcggtcgagatcccggtgcctaatgagtgagcta |
| | acttacattaattgcgttgcgctcactgcccgctttccagtcgggaaacctgtcgtgccagctgca |
| | ttaatgaatcggccaacgcgcggggagaggcggtttgcgtattgggcgccagggtggtttttct |
| | tttcaccagtgagacgggcaacagctgattgcccttcaccgcctggccctgagagagttgcag |
| | caagcggtccacgctggtttgccccagcaggcgaaaatcctgtttgatggtggttaacggcgg |
| | gatataacatgagctgtcttcggtatcgtcgtatcccactaccgagatgtccgcaccaacgcgca |
| | gcccggactcggtaatggcgcgcattgcgcccagcgccatctgatcgttggcaaccagcatcg |
| | cagtgggaacgatgccctcattcagcatttgcatggtttgttgaaaaccggacatggcactccag |
| | tcgccttcccgttccgctatcggctgaatttgattgcgagtgagatatttatgccagccagccaga |
| | cgcagacgcgccgagacagaacttaatgggcccgctaacagcgcgatttgctggtgacccaa |
| | tgcgaccagatgctccacgcccagtcgcgtaccgtcttcatgggagaaaataatactgttgatg |
| | ggtgtctggtcagagacatcaagaaataacgccggaacattagtgcaggcagcttccacagca |
| | atggcatcctggtcatccagcggatagttaatgatcagcccactgacgcgttgcgcgagaagat |
| | tgtgcaccgccgctttacaggcttcgacgccgcttcgttctaccatcgacaccaccacgctggc |
| | acccagttgatcggcgcgagatttaatcgccgcgacaatttgcgacggcgcgtgcagggcca |
| | gactggaggtggcaacgccaatcagcaacgactgtttgcccgccagttgttgtgccacgcggt |
| | tgggaatgtaattcagctccgccatcgccgcttccactttttcccgcgttttcgcagaaacgtggc |
| | tggcctggttcaccacgcgggaaacggtctgataagagacaccggcatactctgcgacatcgt |
| | ataacgttactggtttcacattcaccaccctgaattgactctcttccgggcgctatcatgccatacc |
| | gcgaaaggttttgcgccattcgatggtgtccgggatctcgacgctctcccttatgcgactcctgc |
| | attaggaaattaatacgactcactata (SEQ ID NO: 90) |
| pHelper(CyCAST)_ | ggggaattgtgagcggataacaattcccctgtagaaataattttgtttaactttaataaggagatat |
| Shuffled-spacer | accatggtttccaagcctgaatcccggtctacgggactgaaacaccatctatgtatagctacgat |
| | ggaatagtaaagggtttccaagcctgaatcccggtctacgggactgaaacgatccgaattcga |
| | gctcggcgcgcctgcaggtcgacaagcttgcggccgcataatgcttaagtcgaacagaaagta |
| | atcgtattgtacacggccgcataatcgaaattaatacgactcactataggggaattgtgagcgga |
| | taacaattccccatcttagtatattagttaagtataagaaggagatatacatatggctaccctactcc |
| | aaaccctcctgttacgaacgttgtcacccgaggcggatccagttctctatgtctacattgagacg |
| | gtactacctgcaatggaacgggaatttggcttgattccagcccttggtggctcggaggaagcac |
| | actttcatctgctgaggcgacggggaaacaaatatgcggcggaaaattccaagcggtacgcca |
| | gtcgctctgatcaaagcctgctggttcatgtgctcaatgccttgctgaccgcctggaatttgttgc |
| | cattcctaagctccacatttgaactatcagatgatgagaaacggctgctctgcctggggctgacc |
| | ctacacgattacaacaagtggtgccagggtgaggaggaagattcgccgattgcatgcgaagta |
| | gcagagattcttgagctttgtcaaacattgggagagcggttgaactttgacggattctgggcaga |
| | gtggcgggagtatttgacagagattgcctaccttgcccaaaacacccagggaaaagttggaac |
| | aaatctacccaaagcgaattggggcagcttcaaaattctagatacccgtcgtctggattcgcccc |
| | tacgatggctactcgcttttggcgatgtcgcagtccatctcagcgatccatctgacatcgcaatga |
| | aaacggggggagatcgcctgcgggaacatctgcgctttctaggtattcgtcgcaagctggtcta |
| | ccatcgcctgcgcaactgtacagggctattaaccaacggaattcataatgcggtaatgcattttg |
| | ctagagaactggattggcaacccatcctcttctttgctcagggtgttgtttatctcgctcctcaggg |
| | tgctggcgttccggatcgcttagaacttcaggaatttctctgggagcaggtcagcaaccgattag |
| | ccaccagcatgttgcggggagaggttggtttcaaacgggatggcaagggactcaaggggct |
| | ccccaaaccctggaactgttctcccctgctcagttgattcggaacttgcccggtgttgtccaatctt |
| | atgtcggaaacgctaaatctcctgcgactccaaaacgacttgagaagctggaactcagttcaac |
| | agagcgagagtttttggctaaaggtgcagatttaagagcagatcgcattgccgagtttatctttct |
| | ggcgcaaaaagagtttttcggagataaaccagaatttatcacttggatgcttgaaactctggggg |
| | ttcaaactgctatcacttcggagcagacgcagcttcaatccggtggtgtgaactggggatggtat |
| | cacgcagcagcctattacgtcgcgagcaatgccacgctggatttggaagagatttcggagaaa |
| | cttcaggaatttgccgagcagttggcaacctgggcggaggaaaacaatttcttcccagagcatc |
| | gcagcccaacccatgacatctttttcaactatctgactcaatacctggaagttcaggggtgggag |
| | cagcaggagcagtcctttcagcttgaactggcaggctatgttggcgcaaagactaaaactgcca |
| | gacaaccgatttgctccctcagttccggtgaatttgcttcggaagaccagatggattctgttgtcct |
| | gttcaaaccgcagcagtacagcaacaagaatcctctcggtggacggcagatcaagcggggg |
| | atttccaaaatctggtccctggaaatgctgctcaggcaggctctttggtctgcgccagcaggcaa |
| | actagaggaacaacaacccattttcctttacatcttcccggcatacgtttactcgccccaggttgct |
| | gctgctgtccggttactggtgaatgatctgaagcgtgtcaacctctgggaagtccgtaaacactg |
| | gttggagaatggcatggatgctcaggcgttgcgatcgtttccctggctagtcggtgacaaaaac |
| | gattcgggtaactctgctccatccagatactctggtgaagacttgcctttcatggcaatgaactac |
| | accaccaccagaggcaaaacgataactgatgcctgggttgaacctgctttcctgacactggtgc |
| | tgcctttgttgctgggtgtgaaagttgtcgccaccagtagccagattccactctatgaaagcgac |
| | aacgacttttgcgaatctgtcaagctggatggacccgccgatttctgggctttgctgcggctacc |
| | aacttccctgcatctccaggattggattggggggcgtgttcaaaatttagcagaaggcttgaacc |
| | gcttgatggttgcctactgcctgcatctggacagtcgtagcgctccaccagatgcgcgctggag |
| | agccttaaacggcagtgtccgagagatgacaacaaatgttctaaacattttttcacttgcagagg |
| | agggattacgtcgtgatggctctaaacgcgatgcaacagttgaagaaattaaccgctattggaa |
| | atacgcccagctgtgggcagagggagactctgatatgcaaaacaagttgaagattaccaaacg |
| | cttagtcgatgagtaccgccagttttacagagccagtgcgaacgaatccagccatacggttttgc |
| | tgccattttctaaggcactggaacacattctttcggtaccaaatgattgggacgatgaggaaatta |
| | ttgttcaaggggcaggacagttacaggccgcgttagatcggcaggaagtctacaaacgtcccc |
| | tcatgcttgacaaagagattccctttgaaattcgtcggatgaaggagtttgaggcaattcaaacct |
| | tcatgaccacctgcgtcattgacctatttggacaaatgtgtaaaggcgatcgcgcgctcctgcag |
| | gaacatcgcaaccgccttaaatcaggggtcgaatttgcctatcgtcagttagccctgcaagaga |
| | aacaagccaaagccaaccaaaaatctggagaacaatcatgagcattcttgaaaccttaaagcc |
| | agagttccacacagccttccctcgcctcgcctctggcaaatatgtccatttcttcatggtgcgtca |
| | cagccagtcgttccccgtctttcaaaccgatggcgttttgaacactgcccgtactcaggctgggtt |
| | aaatgcaggcgatgaaaaatccagacaggcaatcagtcgcctggtcatgttcaaacggaaaca |
| | ggtgacaccagaacgactcacaggacgggaactgctgcgatcgctgggcattaacggagtag |
| | ttgaaggggaagccaatttctgtgaatacaacggcgaaagatcctgtaaaaaatgccctgattg |
| | cattctctatggttttgcgattggggacagtggctcggaacgttccaaagtctactctgattcagc |
| | cttttccctgagtccttatgaagtttcccatcgcagttttaccttcaatgctccctttgaaggtggaac |
| | catgagtgagaagggtgaaatgcggagtgcgatcaacgaactggatcatgttttgccggaagtt |
| | gcttttccttgcgttgaaacactacgtgaccccacgctggaaggcttcatttatgtaatgggcaac |
| | ctgatccggactcggcgctatggagcgcaggagtcgcgtacagggacaatggcgaatcacat |
| | tattggcgttaccctatgtgatggcgagatcttcagcaatttgcactttacccaagccctctacgat |
| | gccctgaagggtgatttgagtgcgccaattagtgatttatgcagagaggcggcgatcgtggca |
| | gaaaacttgctaaatcaggaacctgtgcggaagatccaagttatttttggagagcagttgaacga |
| | actcctggctgaggtagcgggaatctgccaggatgaaactcgcttgcgaaacactgtgacagc |
| | cttgtaccagcaatcacaagcctatgccgagacctatggtgctgctgctaagaaaggcaaagg |
| | caaatcttaaggtggctgccaatggttatttatcgatgcaatctcacgttgcacgacaacgtattct |
| | tcgccactcgcgagatggggattctctacgaaacagagaagtatctacacaactgggcactca |
| | gctttgctctgtttgaagccacccacatccccaaaccctatcgcttgcagggtgcgatcgctcaa |
| | cgacccggttatctggaagctgacaacgagcaaaaccttttagttctgaatcacgcaggcatcta |
| | tgttttccctgctctaccacttcagtggtcctaccaagtcaataccttcaaagcggctcaagtgcct |
| | tactatggcaaatccaaacagttcggggataagggagctgatcgcaactacccgattaactacg |
| | gacgggcaaaagaactggcagttggcagcacctaccgaacgtatattcttgcccctgaaccaa |
| | tccagatcccccactggatacggttgggtaagtgggcagccaagattcaggtggacgcaaga |
| | cccatacctaactgtggaatccgacaacggtcaggagaatacacctgcgaccatccactaaatc |
| | cgatcgacctgtccggttcaacccgattgctgttatacaaccgcattgtcatgccacccgctagtc |
| | tcgtcagtcagtcgcgagtttctggggactactgggaaatttctaaaccatccaattggactgaat |
| | ttccggactggtcagacctgaaagacatacccaatcaagtttgcttacccagcggagtagcctat |
| | ggagccagtactgccattgccgcatcttaagtccaccgctctgcatatcctggtaattcatttagg |
| | cgttgccgaaagcggagccttgcctgttgaatccggtcgagccgtccatgctcaagttttggact |
| | ggttccgcatggcggatccggcaatttctgaggcaattcacaaaagccaggaatccccgctca |
| | gtctctcaggcctggtcgggaaacgccgtaaagtaggggtgcgggcaggagatgaattttact |
| | tccgaattgggttgttagatgggagtttgattgaaccactgctgagtggtttggagaagtggggc |
| | gacaagcccttttctctggcaaagtgtccctttgttttccgcagtatcaatatgttgccaggaactg |
| | acccctgggttggttcttccgattatgccttgcttacccaaaccccggctactttggataacctagc |
| | tctcaagctcctgtcgccaacaagcttcaagtcgaatgccgggcaaggaatccaaccctttcctt |
| | tgccagagtcagttttcggaaatttacatcgtcgctggaatgtctttgcaccaaaggaattgcagtt |
| | tccaaaaattcaatggagtgggctggtctctgattatgacctcaaaactcaaaagttaaggatgg |
| | aaaactcggttgagatcggcgcagtgggctgggtgcgctatcggtttccagatccagaacaag |
| | cgagaattgcaaccattctggctcactttgccttttttgctggagttgggcgtaagacagcaatgg |
| | ggatgggacaggtggtgttggacaaaaaaacgtagcctaggctgctgccaccgctgagcaat |
| | aactagcataaccccttggggcctctaaacgggtcttgaggggttttttgctgaaacctcaggca |
| | tttgagaagcacacggtcacactgcttccggtagtcaataaaccggtaaaccagcaatagacat |
| | aagcggctatttaacgaccctcgggatctcgacgctctcccttatgcgactcctgcattaggaaa |
| | ttaatacgactcactataggggaattgtgagcggataacaattcccctgtagaaataattttgttta |
| | actttaataaggagatataccatgcttgatgaaaaaagcttcgacaactggtgccaatccgttggt |
| | ctgagccaggcagcacgtgaagttgtagagcgtgtgcgatcctcttcaccctcccgtcgcgtac |
| | agagcggtagaggaaacgtctccggcaattaccctagccgcaaaatgggcgtcacaattcagt |
| | ttgagtcccatcgaaatgagcttgcccgcatctacgaactggagcatgaccccggcgttctgga |
| | atattacgatcaacctcccaaaatcgaacttgattatttgtcaaaaaatgggaggcgtgttcgtact |
| | caatacacacctgatttctttgttatccgtaatgactcagcaggttgggaggagtgtaaaacagag |
| | gatgaccttaagcaattagctgaggacagccctaaccgttaccaacgagctgaggacaatcgc |
| | tggcgatgtccacctgcagaagcctatgctcttccccttgagttgtattttcaggtacggtctagtg |
| | ctgaaattaactggattttccagcaaaactttgtatggctagaagactaccttggtactgaatcactt |
| | actatggatgagtcggttgcagatgcaatcatagccacagtcagagcaaacgagggtatcaca |
| | ctactcgaactgattcaacaattacaaggcacagatgctgatgctatctacatcctgattgcaacc |
| | gaacaaatttatgttgatttgatggctgaacggttagcgaacagcgatcgggcacgggtattttc |
| | cagtccagaaattgctcaagcctttcaactcattacgctggtcgaagcacctctggctaacagttc |
| | tctccatatagttcaggtgggcgttggcacaaccatacactgggatggtgaagtctgggagatt |
| | gttaatacaggctctaccatgacaggattgttgcgatcggacggtaagtttatcgagttgcccaat |
| | tctgcaattgatgaattgattcagaagggcaagattcaatcaatttcagcacaacaagcccctgat |
| | agcaaagcagaagttgaagaaatgcttcgctgtgctcgtccagccgacattaaagaagccaac |
| | cgtcgctacgaaatcattcagccttacctggaaaaggatgcaccagcttgtccaactcgaacaat |
| | tcggcgctggcgtaatcagtattggcaggcagaaaagctttacgggaatggctatgttggtttac |
| | taccaaatcatcagaagaaagggaattatttagttaaggttaatgaagtaactcaagcttttatgctt |
| | gagtttattgagaagcattacgaaaatctcaaacagcgtagtaagcttagagtttatcaggcttttg |
| | tggaggcatgtgaaagccacgaaccgaaactaaaccctccaagccgtactacattcacactag |
| | cgattcagaaacgagcaggacatcagcaaaccttgaaacgtgaaggacgaagagctgccatt |
| | cagaaggaggagttttactgggaactggagctaactactcctcgacacggcgatcgccccttc |
| | gagatcgttcatattgatcacactcaactcgatattgagcttatcagttctttgaactccctggccca |
| | atgcaaccctacatctgttgatgccacttacaatttgggtcgtccttgggcaacgttcatggttgat |
| | gcttacagccgccgtttgctagcagtttacataacctatgaagaacccagctatcgttcctgcatg |
| | atggtgctccgtatttgcgtacagcgatttaagcgttttcctcagacgatcgtggtagataatggtg |
| | cagaatttcacagccattactttgaacaactactggcaacatatcaatgcacaaagaagcacag |
| | gccacctgcaaaagctcgctttggtgcagttgttgaacgattatttggcactgcaaataagcaatt |
| | aattcatgagttgcagggaaatacccaaattactcgcaagcatcgccaagttactcaatctgttca |
| | tccccaaaaattggctctttggacgttaggcgatctctacgaatcactatgtgaatgggcttacaa |
| | agtttatgctgaccgccagcaccctgcgctagggcaaagccctaatgctgcattcgctcaaggg |
| | ctggcgttgggaggtagtcgcatccatcgccgagtagagtatgaccaagtcttccgtatcttgac |
| | attgcccgcaccggaaagaggacaacgcaaagttcagccaggacaagggataaaacttagc |
| | aatatctactactggtcaaatgcctttcgagacccagaaattgaacaatcgatggttgaagttcgtt |
| | atgatccctttgatgccagcattgcctatgcactggtgcgaaaacaatgggtccggtgtatttcct |
| | cctactatcaacagtttcaaaatcgttcagaaaaggaaattcgtttaataactgctgagttgattaa |
| | gcaaaagcgtgaccagggaagagatacaaatgttacggataaagaattggcgcagtttttaag |
| | ctctacagaaatgaaagaaggcaaattcttggagcaacgcttgcggactacagaaaacagggt |
| | agttattcagaatagtacagctacagaagacgatccccccatcactaattctcagaattcttacga |
| | gccatcgcttatgctgccaagtgaggatgagttggatgatcaggaagactggttaaataccggc |
| | aaagctgaggcagaattagaattctatggagagtactagcgatgcaacctcaaataagcttccc |
| | aaaagagttactgcttcaaccaattcctgatcgaattgcctatttcaaagattacacaatggcacat |
| | ccgaagcttatagaagcagaccggaagttaatgcatgctattcgtgaacctggaggagctgctc |
| | ttatctttgtctttggtcctaccggagttggaaagtctactctattgaaacgaattactcaaaagctg |
| | cttaaagaagcattgtctttgatggagactgacaaaggctatattcctattgcgggggtagagata |
| | aaaactccagaggatagtaactttgattggaacgatttttatgttcgtgctcttatggcacttaatga |
| | gccaatgatcgagaaaaaaatcaaccgtacaggtgcaaaactaaaattacggttggcacttgaa |
| | tctgcccttcgtaatcgccgtcctgatgctttttacatagacgaagctcaaaattttggtaaggtag |
| | ccagtgggcgaaaattgcaagatcaaacagattgcattaaatctcttgcaaatctcgctcaaact |
| | cggtttatcttatgtgggatttatgaacttttaccactacgaaatctaagtgggcagctatgccgcc |
| | gtagccatagtattcactttccacgttattcggcagattctgagcaggatctaaaggcctttaaaag |
| | tgcgttattaacactacaaaatcaactccctcttcccgaaccacctgatttagtggcgcattggga |
| | attttgttatgagagaactatcggctgtattggtattttgaaagatttgctccttcggactctaagcg |
| | cgattttagtacgggatggagacaaagttttgacattgaagcccaaggatttagaacaacgtgca |
| | tggtctttagaagaatgtttggttatgctgagagaggcaaaggaaggagagcaacaacttactg |
| | acaaatcgggcttacatgaggaattacggacagctttagggtttaatgcagctacgtccaagca |
| | gtctgccaaatcatccaagtcaacatcaagcaaaaaagcaggcagtgttggaaagccttcacct |
| | cgtcgtcgttcagttggaatagatcaagatgccagctaacgatctagaaatctatgaatcttggaa |
| | tttagatctccctttactacctaatcgaagtaggctctaccacttgaaaccgattgcaattggagat |
| | gcttacgttgaaggattaatcagctatgtttgccgtttggctgaagcccactgtgtttctccaggag |
| | tccttactaaacaggaaatattgcccagtctaagaaaagtttataatgtgggttcaagagaagttc |
| | atgaagtacgaagagatgaaagtttagtttctatttcctcctttcctaagccagaaagcaataaaaa |
| | tcctaatgaaccaggcttctgggcatggcaatatattgaaggattgcagcctttaactcttagaga |
| | aaaccttgaagcattaactattccaaattggaaaaagcaaattccacaggtgacaggaattgag |
| | gttgcgcgtgagttgagagcttggtgccctgaatgctttcaacaatggcgcaagactaatcagat |
| | aatttatgaaccgatgctttggtcgatcgctttagttaccgtatgtccttatcattaccttccgctaca |
| | aactcgctgtccttattgtaaaaaaactcaacggcctatcacaggaaaaatgcaggtagctcgct |
| | gttccgaatgtttagagtggcttggcattcaaccaagcgaagattcagagttagaaatcaaaatta |
| | aatctgaagtcgaatggcaccattgggttgcggagaaagtaatggagattttggtatttaaagatt |
| | atactttaactgcaaatgctataacaatagcagctccaattacgaaagaaaaatattttcaactaga |
| | atcgagcttaataaattgtccaattaagtatgctcaacagcagttcttaaagctcttcttcaattaaat |
| | ttataaaggtatggctatggcgactgaagtaccttttacttttagcacgtgggatttatctaaacccc |
| | ttaccccagctcgtagttctctctttagcttgaaaccgattggggttggaacggctgcagtagaaa |
| | gcctcactggatatattgcacgtttggctgaagctcactgtatctggccaggagatcttcttgcag |
| | ctgaatttagttcttcatattcctattcttacctgcatagcatgaggggccgtattgctgctttgaatg |
| | gtaatagccaaatggctcaggatgctgtacttaagcttcaagagcttaccttacaggagaatttat |
| | ccgctttaacaatgttaggctgggctaatattttacccgcaaaagggttgttaaatcggactcgaa |
| | cttggtgtccggtttgttttgaggcgtggcgtttcatcaaaagtcctatatatgagcctctattatggt |
| | atttaacctcggtcaaatattgtccaattcatcagcaacgccttttatctcaatgtccattctgcgggt |
| | gccagcagcctcctctagactggaaaactcggccgggctattgttcaaggtgccaggtgtggc |
| | tgggttcaccaccaggtgtaacttccagtaattcgctttctaatacagaaataaggtgggagagtt |
| | gggttgcccagagctgcggaaatttgttagcctatagtcctcgtttacacaagatatccgttagcg |
| | ttcaggtcgcagcatccctttctaaatgtatcaacctttatgcagagggcaatattgcggagtttgc |
| | ccgtcaaatgagcttgccaaaaacttctgtttggctgtggcagtctggtcaggtactccccgagtt |
| | atccaggcttttaagcatctgctatcacttcaatctgtcgctcttagactttctaattaatacaccagt |
| | tcttaagataaggagagacttaattccagaaaagagaactaatgagtttcgccagcctcgaagag |
| | atccctcaaccatatctcaattgcaacctattctgggattaattcttttcgagcagccacctccctctt |
| | tagcagcagtagcgtgtcgcttaggttgtagctcaagatccctgcgccataattttcctgatctctg |
| | tggctctatttctgcacgttaccttcaacaccgtgatgaagtttataaagaaaaattgaatcaattct |
| | gtcaagacttgcgccaagttgtacttcaactttattcggcaggcattgatccgactcggagccaa |
| | gttgctcgccgtctgaggaaacccgcttattttagagaacccgaagtcgaggcaatgcttgagt |
| | ctgttcgacgagaattaggcttgcacagcaattctcagcatgagactaattctcacaaaaacgcc |
| | cagttttaacttaagtcgaacagaaagtaatcgtattgtacacggccgcataatcgaaattaatac |
| | gactcactataggggaattgtgagcggataacaattccccatcttagtatattagttaagtataaga |
| | aggagatatacatatggcagatctcaattggatatcggccggccacgcgatcgctgacgtcggt |
| | accctcgagtctggtaaagaaaccgctgctgcgaaatttgaacgccagcacatggactcgtcta |
| | ctagcgcagcttaattaacctaggctgctgccaccgctgagcaataactagcataaccccttgg |
| | ggcctctaaacgggtcttgaggggttttttgctgaaacctcaggcatttgagaagcacacggtca |
| | cactgcttccggtagtgccctgaaccgacgaccgggtcatcgtggccggatcttgcggcccct |
| | cggcttgaacgaattgttagacattatttgccgactaccttggtgatctcgcctttcacgtagtgga |
| | caaattcttccaactgatctgcgcgcgaggccaagcgatcttcttcttgtccaagataagcctgtc |
| | tagcttcaagtatgacgggctgatactgggccggcaggcgctccattgcccagtcggcagcga |
| | catccttcggcgcgattttgccggttactgcgctgtaccaaatgcgggacaacgtaagcactac |
| | atttcgctcatcgccagcccagtcgggcggcgagttccatagcgttaaggtttcatttagcgcct |
| | caaatagatcctgttcaggaaccggatcaaagagttcctccgccgctggacctaccaaggcaa |
| | cgctatgttctcttgcttttgtcagcaagatagccagatcaatgtcgatcgtggctggctcgaaga |
| | tacctgcaagaatgtcattgcgctgccattctccaaattgcagttcgcgcttagctggataacgcc |
| | acggaatgatgtcgtcgtgcacaacaatggtgacttctacagcgcggagaatctcgctctctcc |
| | aggggaagccgaagtttccaaaaggtcgttgatcaaagctcgccgcgttgtttcatcaagcctta |
| | cggtcaccgtaaccagcaaatcaatatcactgtgtggcttcaggccgccatccactgcggagc |
| | cgtacaaatgtacggccagcaacgtcggttcgagatggcgctcgatgacgccaactacctctg |
| | atagttgagtcgatacttcggcgatcaccgcttccctcatactcttcctttttcaatattattgaagca |
| | tttatcagggttattgtctcatgagcggatacatatttgaatgtatttagaaaaataaacaaatagct |
| | agctcactcggtcgctacgctccgggcgtgagactgcgggggcgctgcggacacatacaaa |
| | gttacccacagattccgtggataagcaggggactaacatgtgaggcaaaacagcagggccgc |
| | gccggtggcgtttttccataggctccgccctcctgccagagttcacataaacagacgcttttccg |
| | gtgcatctgtgggagccgtgaggctcaaccatgaatctgacagtacgggcgaaacccgacag |
| | gacttaaagatccccaccgtttccggcgggtcgctccctcttgcgctctcctgttccgaccctgc |
| | cgtttaccggatacctgttccgcctttctcccttacgggaagtgtggcgctttctcatagctcacac |
| | actggtatctcggctcggtgtaggtcgttcgctccaagctgggctgtaagcaagaactccccgtt |
| | cagcccgactgctgcgccttatccggtaactgttcacttgagtccaacccggaaaagcacggta |
| | aaacgccactggcagcagccattggtaactgggagttcgcagaggatttgtttagctaaacacg |
| | cggttgctcttgaagtgtgcgccaaagtccggctacactggaaggacagatttggttgctgtgct |
| | ctgcgaaagccagttaccacggttaagcagttccccaactgacttaaccttcgatcaaaccacct |
| | ccccaggtggttttttcgtttacagggcaaaagattacgcgcagaaaaaaaggatctcaagaag |
| | atcctttgatcttttctactgaaccgctctagatttcagtgcaatttatctcttcaaatgtagcacctg |
| | aagtcagccccatacgatataagttgtaattctcatgttagtcatgccccgcgcccaccggaagga |
| | gctgactgggttgaaggctctcaagggcatcggtcgagatcccggtgcctaatgagtgagcta |
| | acttacattaattgcgttgcgctcactgcccgctttccagtcgggaaacctgtcgtgccagctgca |
| | ttaatgaatcggccaacgcgcggggagaggcggtttgcgtattgggcgccagggtggtttttct |
| | tttcaccagtgagacgggcaacagctgattgcccttcaccgcctggccctgagagagttgcag |
| | caagcggtccacgctggtttgccccagcaggcgaaaatcctgtttgatggtggttaacggcgg |
| | gatataacatgagctgtcttcggtatcgtcgtatcccactaccgagatgtccgcaccaacgcgca |
| | gcccggactcggtaatggcgcgcattgcgcccagcgccatctgatcgttggcaaccagcatcg |
| | cagtgggaacgatgccctcattcagcatttgcatggtttgttgaaaaccggacatggcactccag |
| | tcgccttcccgttccgctatcggctgaatttgattgcgagtgagatatttatgccagccagccaga |
| | cgcagacgcgccgagacagaacttaatgggcccgctaacagcgcgatttgctggtgacccaa |
| | tgcgaccagatgctccacgcccagtcgcgtaccgtcttcatgggagaaaataatactgttgatg |
| | ggtgtctggtcagagacatcaagaaataacgccggaacattagtgcaggcagcttccacagca |
| | atggcatcctggtcatccagcggatagttaatgatcagcccactgacgcgttgcgcgagaagat |
| | tgtgcaccgccgctttacaggcttcgacgccgcttcgttctaccatcgacaccaccacgctggc |
| | acccagttgatcggcgcgagatttaatcgccgcgacaatttgcgacggcgcgtgcagggcca |
| | gactggaggtggcaacgccaatcagcaacgactgtttgcccgccagttgttgtgccacgcggt |
| | tgggaatgtaattcagctccgccatcgccgcttccactttttcccgcgttttcgcagaaacgtggc |
| | tggcctggttcaccacgcgggaaacggtctgataagagacaccggcatactctgcgacatcgt |
| | ataacgttactggtttcacattcaccaccctgaattgactctcttccgggcgctatcatgccatacc |
| | gcgaaaggttttgcgccattcgatggtgtccgggatctcgacgctctcccttatgcgactcctgc |
| | attaggaaattaatacgactcactata (SEQ ID NO: 91) |
| pHelper(CyCAST)_PSP | ggggaattgtgagcggataacaattcccctgtagaaataattttgtttaactttaataaggagatat |
| 1_ΔTniQ | accatggtttccaagcctgaatcccggtctacgggactgaaacgagaagtcatttaataaggcc |
| | actgttaaacgtaggtttccaagcctgaatcccggtctacgggactgaaacgatccgaattcga |
| | gctcggcgcgcctgcaggtcgacaagcttgcggccgcataatgcttaagtcgaacagaaagta |
| | atcgtattgtacacggccgcataatcgaaattaatacgactcactataggggaattgtgagcgga |
| | taacaattccccatcttagtatattagttaagtataagaaggagatatacatatggctaccctactcc |
| | aaaccctcctgttacgaacgttgtcacccgaggcggatccagttctctatgtctacattgagacg |
| | gtactacctgcaatggaacgggaatttggcttgattccagcccttggtggctcggaggaagcac |
| | actttcatctgctgaggcgacggggaaacaaatatgcggcggaaaattccaagcggtacgcca |
| | gtcgctctgatcaaagcctgctggttcatgtgctcaatgccttgctgaccgcctggaatttgttgc |
| | cattcctaagctccacatttgaactatcagatgatgagaaacggctgctctgcctggggctgacc |
| | ctacacgattacaacaagtggtgccagggtgaggaggaagattcgccgattgcatgcgaagta |
| | gcagagattcttgagctttgtcaaacattgggagagcggttgaactttgacggattctgggcaga |
| | gtggcgggagtatttgacagagattgcctaccttgcccaaaacacccagggaaaagttggaac |
| | aaatctacccaaagcgaattggggcagcttcaaaattctagatacccgtcgtctggattcgcccc |
| | tacgatggctactcgcttttggcgatgtcgcagtccatctcagcgatccatctgacatcgcaatga |
| | aaacggggggagatcgcctgcgggaacatctgcgctttctaggtattcgtcgcaagctggtcta |
| | ccatcgcctgcgcaactgtacagggctattaaccaacggaattcataatgcggtaatgcattttg |
| | ctagagaactggattggcaacccatcctcttctttgctcagggtgttgtttatctcgctcctcaggg |
| | tgctggcgttccggatcgcttagaacttcaggaatttctctgggagcaggtcagcaaccgattag |
| | ccaccagcatgttgcggggagaggttggtttcaaacgggatggcaagggactcaaggtggct |
| | ccccaaaccctggaactgttctcccctgctcagttgattcggaacttgcccggtgttgtccaatctt |
| | atgtcggaaacgctaaatctcctgcgactccaaaacgacttgagaagctggaactcagttcaac |
| | agagcgagagtttttggctaaaggtgcagatttaagagcagatcgcattgccgagtttatctttct |
| | ggcgcaaaaagagtttttcggagataaaccagaatttatcacttggatgcttgaaactctggggg |
| | ttcaaactgctatcacttcggagcagacgcagcttcaatccggtggtgtgaactggggatggtat |
| | cacgcagcagcctattacgtcgcgagcaatgccacgctggatttggaagagatttcggagaaa |
| | cttcaggaatttgccgagcagttggcaacctgggcggaggaaaacaatttcttcccagagcatc |
| | gcagcccaacccatgacatctttttcaactatctgactcaatacctggaagttcaggggtgggag |
| | cagcaggagcagtcctttcagcttgaactggcaggctatgttggcgcaaagactaaaactgcca |
| | gacaaccgatttgctccctcagttccggtgaatttgcttcggaagaccagatggattctgttgtcct |
| | gttcaaaccgcagcagtacagcaacaagaatcctctcggtggacggcagatcaagcggggg |
| | atttccaaaatctggtccctggaaatgctgctcaggcaggctctttggtctgcgccagcaggcaa |
| | actagaggaacaacaacccattttcctttacatcttcccggcatacgtttactcgccccaggttgct |
| | gctgctgtccggttactggtgaatgatctgaagcgtgtcaacctctgggaagtccgtaaacactg |
| | gttggagaatggcatggatgctcaggcgttgcgatcgtttccctggctagtcggtgacaaaaac |
| | gattcgggtaactctgctccatccagatactctggtgaagacttgcctttcatggcaatgaactac |
| | accaccaccagaggcaaaacgataactgatgcctgggttgaacctgctttcctgacactggtgc |
| | tgcctttgttgctgggtgtgaaagttgtcgccaccagtagccagattccactctatgaaagcgac |
| | aacgacttttgcgaatctgtcaagctggatggacccgccgatttctgggctttgctgcggctacc |
| | aacttccctgcatctccaggattggattggggggcgtgttcaaaatttagcagaaggcttgaacc |
| | gcttgatggttgcctactgcctgcatctggacagtcgtagcgctccaccagatgcgcgctggag |
| | agccttaaacggcagtgtccgagagatgacaacaaatgttctaaacattttttcacttgcagagg |
| | agggattacgtcgtgatggctctaaacgcgatgcaacagttgaagaaattaaccgctattggaa |
| | atacgcccagctgtgggcagagggagactctgatatgcaaaacaagttgaagattaccaaacg |
| | cttagtcgatgagtaccgccagttttacagagccagtgcgaacgaatccagccatacggttttgc |
| | tgccattttctaaggcactggaacacattctttcggtaccaaatgattgggacgatgaggaaatta |
| | ttgttcaaggggcaggacagttacaggccgcgttagatcggcaggaagtctacaaacgtcccc |
| | tcatgcttgacaaagagattccctttgaaattcgtcggatgaaggagtttgaggcaattcaaacct |
| | tcatgaccacctgcgtcattgacctatttggacaaatgtgtaaaggcgatcgcgcgctcctgcag |
| | gaacatcgcaaccgccttaaatcaggggtcgaatttgcctatcgtcagttagccctgcaagaga |
| | aacaagccaaagccaaccaaaaatctggagaacaatcatgagcattcttgaaaccttaaagcc |
| | agagttccacacagccttccctcgcctcgcctctggcaaatatgtccatttcttcatggtgcgtca |
| | cagccagtcgttccccgtctttcaaaccgatggcgttttgaacactgcccgtactcaggctgggtt |
| | aaatgcaggcgatgaaaaatccagacaggcaatcagtcgcctggtcatgttcaaacggaaaca |
| | ggtgacaccagaacgactcacaggacgggaactgctgcgatcgctgggcattaacggagtag |
| | ttgaaggggaagccaatttctgtgaatacaacggcgaaagatcctgtaaaaaatgccctgattg |
| | cattctctatggttttgcgattggggacagtggctcggaacgttccaaagtctactctgattcagc |
| | cttttccctgagtccttatgaagtttcccatcgcagttttaccttcaatgctccctttgaaggtggaac |
| | catgagtgagaagggtgaaatgcggagtgcgatcaacgaactggatcatgttttgccggaagtt |
| | gcttttccttgcgttgaaacactacgtgaccccacgctggaaggcttcatttatgtaatgggcaac |
| | ctgatccggactcggcgctatggagcgcaggagtcgcgtacagggacaatggcgaatcacat |
| | tattggcgttaccctatgtgatggcgagatcttcagcaatttgcactttacccaagccctctacgat |
| | gccctgaagggtgatttgagtgcgccaattagtgatttatgcagagaggcggcgatcgtggca |
| | gaaaacttgctaaatcaggaacctgtgcggaagatccaagttatttttggagagcagttgaacga |
| | actcctggctgaggtagcgggaatctgccaggatgaaactcgcttgcgaaacactgtgacagc |
| | cttgtaccagcaatcacaagcctatgccgagacctatggtgctgctgctaagaaaggcaaagg |
| | caaatcttaaggtggctgccaatggttatttatcgatgcaatctcacgttgcacgacaacgtattct |
| | tcgccactcgcgagatggggattctctacgaaacagagaagtatctacacaactgggcactca |
| | gctttgctctgtttgaagccacccacatccccaaaccctatcgcttgcagggtgcgatcgctcaa |
| | cgacccggttatctggaagctgacaacgagcaaaaccttttagttctgaatcacgcaggcatcta |
| | tgttttccctgctctaccacttcagtggtcctaccaagtcaataccttcaaagcggctcaagtgcct |
| | tactatggcaaatccaaacagttcggggataagggagctgatcgcaactacccgattaactacg |
| | gacgggcaaaagaactggcagttggcagcacctaccgaacgtatattcttgcccctgaaccaa |
| | tccagatcccccactggatacggttgggtaagtgggcagccaagattcaggtggacgcaaga |
| | cccatacctaactgtggaatccgacaacggtcaggagaatacacctgcgaccatccactaaatc |
| | cgatcgacctgtccggttcaacccgattgctgttatacaaccgcattgtcatgccacccgctagtc |
| | tcgtcagtcagtcgcgagtttctggggactactgggaaatttctaaaccatccaattggactgaat |
| | ttccggactggtcagacctgaaagacatacccaatcaagtttgcttacccagcggagtagcctat |
| | ggagccagtactgccattgccgcatcttaagtccaccgctctgcatatcctggtaattcatttagg |
| | cgttgccgaaagcggagccttgcctgttgaatccggtcgagccgtccatgctcaagttttggact |
| | ggttccgcatggcggatccggcaatttctgaggcaattcacaaaagccaggaatccccgctca |
| | gtctctcaggcctggtcgggaaacgccgtaaagtaggggtgcgggcaggagatgaattttact |
| | tccgaattgggttgttagatgggagtttgattgaaccactgctgagtggtttggagaagtggggc |
| | gacaagcccttttctctggcaaagtgtccctttgttttccgcagtatcaatatgttgccaggaactg |
| | acccctgggttggttcttccgattatgccttgcttacccaaaccccggctactttggataacctagc |
| | tctcaagctcctgtcgccaacaagcttcaagtcgaatgccgggcaaggaatccaaccctttcctt |
| | tgccagagtcagttttcggaaatttacatcgtcgctggaatgtctttgcaccaaaggaattgcagtt |
| | tccaaaaattcaatggagtgggctggtctctgattatgacctcaaaactcaaaagttaaggatgg |
| | aaaactcggttgagatcggcgcagtgggctgggtgcgctatcggtttccagatccagaacaag |
| | cgagaattgcaaccattctggctcactttgccttttttgctggagttgggcgtaagacagcaatgg |
| | ggatgggacaggtggtgttggacaaaaaaacgtagcctaggctgctgccaccgctgagcaat |
| | aactagcataaccccttggggcctctaaacgggtcttgaggggttttttgctgaaacctcaggca |
| | tttgagaagcacacggtcacactgcttccggtagtcaataaaccggtaaaccagcaatagacat |
| | aagcggctatttaacgaccctcgggatctcgacgctctcccttatgcgactcctgcattaggaaa |
| | ttaatacgactcactataggggaattgtgagcggataacaattcccctgtagaaataattttgttta |
| | actttaataaggagatataccatgcttgatgaaaaaagcttcgacaactggtgccaatccgttggt |
| | ctgagccaggcagcacgtgaagttgtagagcgtgtgcgatcctcttcaccctcccgtcgcgtac |
| | agagcggtagaggaaacgtctccggcaattaccctagccgcaaaatgggcgtcacaattcagt |
| | ttgagtcccatcgaaatgagcttgcccgcatctacgaactggagcatgaccccggcgttctgga |
| | atattacgatcaacctcccaaaatcgaacttgattatttgtcaaaaaatgggaggcgtgttcgtact |
| | caatacacacctgatttctttgttatccgtaatgactcagcaggttgggaggagtgtaaaacagag |
| | gatgaccttaagcaattagctgaggacagccctaaccgttaccaacgagctgaggacaatcgc |
| | tggcgatgtccacctgcagaagcctatgctcttccccttgagttgtattttcaggtacggtctagtg |
| | ctgaaattaactggattttccagcaaaactttgtatggctagaagactaccttggtactgaatcactt |
| | actatggatgagtcggttgcagatgcaatcatagccacagtcagagcaaacgagggtatcaca |
| | ctactcgaactgattcaacaattacaaggcacagatgctgatgctatctacatcctgattgcaacc |
| | gaacaaatttatgttgatttgatggctgaacggttagcgaacagcgatcgggcacgggtattttc |
| | cagtccagaaattgctcaagcctttcaactcattacgctggtcgaagcacctctggctaacagttc |
| | tctccatatagttcaggtgggcgttggcacaaccatacactgggatggtgaagtctgggagatt |
| | gttaatacaggctctaccatgacaggattgttgcgatcggacggtaagtttatcgagttgcccaat |
| | tctgcaattgatgaattgattcagaagggcaagattcaatcaatttcagcacaacaagcccctgat |
| | agcaaagcagaagttgaagaaatgcttcgctgtgctcgtccagccgacattaaagaagccaac |
| | cgtcgctacgaaatcattcagccttacctggaaaaggatgcaccagcttgtccaactcgaacaat |
| | tcggcgctggcgtaatcagtattggcaggcagaaaagctttacgggaatggctatgttggtttac |
| | taccaaatcatcagaagaaagggaattatttagttaaggttaatgaagtaactcaagcttttatgctt |
| | gagtttattgagaagcattacgaaaatctcaaacagcgtagtaagcttagagtttatcaggcttttg |
| | tggaggcatgtgaaagccacgaaccgaaactaaaccctccaagccgtactacattcacactag |
| | cgattcagaaacgagcaggacatcagcaaaccttgaaacgtgaaggacgaagagctgccatt |
| | cagaaggaggagttttactgggaactggagctaactactcctcgacacggcgatcgccccttc |
| | gagatcgttcatattgatcacactcaactcgatattgagcttatcagttctttgaactccctggccca |
| | atgcaaccctacatctgttgatgccacttacaatttgggtcgtccttgggcaacgttcatggttgat |
| | gcttacagccgccgtttgctagcagtttacataacctatgaagaacccagctatcgttcctgcatg |
| | atggtgctccgtatttgcgtacagcgatttaagcgttttcctcagacgatcgtggtagataatggtg |
| | cagaatttcacagccattactttgaacaactactggcaacatatcaatgcacaaagaagcacag |
| | gccacctgcaaaagctcgctttggtgcagttgttgaacgattatttggcactgcaaataagcaatt |
| | aattcatgagttgcagggaaatacccaaattactcgcaagcatcgccaagttactcaatctgttca |
| | tccccaaaaattggctctttggacgttaggcgatctctacgaatcactatgtgaatgggcttacaa |
| | agtttatgctgaccgccagcaccctgcgctagggcaaagccctaatgctgcattcgctcaaggg |
| | ctggcgttgggaggtagtcgcatccatcgccgagtagagtatgaccaagtcttccgtatcttgac |
| | attgcccgcaccggaaagaggacaacgcaaagttcagccaggacaagggataaaacttagc |
| | aatatctactactggtcaaatgcctttcgagacccagaaattgaacaatcgatggttgaagttcgtt |
| | atgatccctttgatgccagcattgcctatgcactggtgcgaaaacaatgggtccggtgtatttcct |
| | cctactatcaacagtttcaaaatcgttcagaaaaggaaattcgtttaataactgctgagttgattaa |
| | gcaaaagcgtgaccagggaagagatacaaatgttacggataaagaattggcgcagtttttaag |
| | ctctacagaaatgaaagaaggcaaattcttggagcaacgcttgcggactacagaaaacagggt |
| | agttattcagaatagtacagctacagaagacgatccccccatcactaattctcagaattcttacga |
| | gccatcgcttatgctgccaagtgaggatgagttggatgatcaggaagactggttaaataccggc |
| | aaagctgaggcagaattagaattctatggagagtactagcgatgcaacctcaaataagcttccc |
| | aaaagagttactgcttcaaccaattcctgatcgaattgcctatttcaaagattacacaatggcacat |
| | ccgaagcttatagaagcagaccggaagttaatgcatgctattcgtgaacctggaggagctgctc |
| | ttatctttgtctttggtcctaccggagttggaaagtctactctattgaaacgaattactcaaaagctg |
| | cttaaagaagcattgtctttgatggagactgacaaaggctatattcctattgcgggggtagagata |
| | aaaactccagaggatagtaactttgattggaacgatttttatgttcgtgctcttatggcacttaatga |
| | gccaatgatcgagaaaaaaatcaaccgtacaggtgcaaaactaaaattacggttggcacttgaa |
| | tctgcccttcgtaatcgccgtcctgatgctttttacatagacgaagctcaaaattttggtaaggtag |
| | ccagtgggcgaaaattgcaagatcaaacagattgcattaaatctcttgcaaatctcgctcaaact |
| | cggtttatcttatgtgggatttatgaacttttaccactacgaaatctaagtgggcagctatgccgcc |
| | gtagccatagtattcactttccacgttattcggcagattctgagcaggatctaaaggcctttaaaag |
| | tgcgttattaacactacaaaatcaactccctcttcccgaaccacctgatttagtggcgcattggga |
| | attttgttatgagagaactatcggctgtattggtattttgaaagatttgctccttcggactctaagcg |
| | cgattttagtacgggatggagacaaagttttgacattgaagcccaaggatttagaacaacgtgca |
| | tggtctttagaagaatgtttggttatgctgagagaggcaaaggaaggagagcaacaacttactg |
| | acaaatcgggcttacatgaggaattacggacagctttagggtttaatgcagctacgtccaagca |
| | gtctgccaaatcatccaagtcaacatcaagcaaaaaagcaggcagtgttggaaagccttcacct |
| | cgtcgtcgttcagttggaatagatcaagatgccagctaatagcagctccaattacgaaagaaaa |
| | atattttcaactagaatcgagcttaataaattgtccaattaagtatgctcaacagcagttcttaaagc |
| | tcttcttcaattaaatttataaaggtatggctatggcgactgaagtaccttttacttttagcacgtggg |
| | atttatctaaaccccttaccccagctcgtagttctctctttagcttgaaaccgattggggttggaac |
| | ggctgcagtagaaagcctcactggatatattgcacgtttggctgaagctcactgtatctggccag |
| | gagatcttcttgcagctgaatttagttcttcatattcctattcttacctgcatagcatgaggggccgt |
| | attgctgctttgaatggtaatagccaaatggctcaggatgctgtacttaagcttcaagagcttacct |
| | tacaggagaatttatccgctttaacaatgttaggctgggctaatattttacccgcaaaagggttgtt |
| | aaatcggactcgaacttggtgtccggtttgttttgaggcgtggcgtttcatcaaaagtcctatatat |
| | gagcctctattatggtatttaacctcggtcaaatattgtccaattcatcagcaacgccttttatctcaa |
| | tgtccattctgcgggtgccagcagcctcctctagactggaaaactcggccgggctattgttcaa |
| | ggtgccaggtgtggctgggttcaccaccaggtgtaacttccagtaattcgctttctaatacagaa |
| | ataaggtgggagagttgggttgcccagagctgcggaaatttgttagcctatagtcctcgtttaca |
| | caagatatccgttagcgttcaggtcgcagcatccctttctaaatgtatcaacctttatgcagaggg |
| | caatattgcggagtttgcccgtcaaatgagcttgccaaaaacttctgtttggctgtggcagtctgg |
| | tcaggtactccccgagttatccaggcttttaagcatctgctatcacttcaatctgtcgctcttagact |
| | ttctaattaatacaccagttcttaagataaggagagacttaattccagaaaagagaactaatgagtt |
| | tcgccagcctcgaagagatccctcaaccatatctcaattgcaacctattctgggattaattcttttc |
| | gagcagccacctccctctttagcagcagtagcgtgtcgcttaggttgtagctcaagatccctgcg |
| | ccataattttcctgatctctgtggctctatttctgcacgttaccttcaacaccgtgatgaagtttataa |
| | agaaaaattgaatcaattctgtcaagacttgcgccaagttgtacttcaactttattcggcaggcatt |
| | gatccgactcggagccaagttgctcgccgtctgaggaaacccgcttattttagagaacccgaag |
| | tcgaggcaatgcttgagtctgttcgacgagaattaggcttgcacagcaattctcagcatgagact |
| | aattctcacaaaaacgcccagttttaacttaagtcgaacagaaagtaatcgtattgtacacggcc |
| | gcataatcgaaattaatacgactcactataggggaattgtgagcggataacaattccccatcttag |
| | tatattagttaagtataagaaggagatatacatatggcagatctcaattggatatcggccggccac |
| | gcgatcgctgacgtcggtaccctcgagtctggtaaagaaaccgctgctgcgaaatttgaacgc |
| | cagcacatggactcgtctactagcgcagcttaattaacctaggctgctgccaccgctgagcaat |
| | aactagcataaccccttggggcctctaaacgggtcttgaggggttttttgctgaaacctcaggca |
| | tttgagaagcacacggtcacactgcttccggtagtgccctgaaccgacgaccgggtcatcgtg |
| | gccggatcttgcggcccctcggcttgaacgaattgttagacattatttgccgactaccttggtgat |
| | ctcgcctttcacgtagtggacaaattcttccaactgatctgcgcgcgaggccaagcgatcttcttc |
| | ttgtccaagataagcctgtctagcttcaagtatgacgggctgatactgggccggcaggcgctcc |
| | attgcccagtcggcagcgacatccttcggcgcgattttgccggttactgcgctgtaccaaatgc |
| | gggacaacgtaagcactacatttcgctcatcgccagcccagtcgggcggcgagttccatagcg |
| | ttaaggtttcatttagcgcctcaaatagatcctgttcaggaaccggatcaaagagttcctccgccg |
| | ctggacctaccaaggcaacgctatgttctcttgcttttgtcagcaagatagccagatcaatgtcga |
| | tcgtggctggctcgaagatacctgcaagaatgtcattgcgctgccattctccaaattgcagttcgc |
| | gcttagctggataacgccacggaatgatgtcgtcgtgcacaacaatggtgacttctacagcgcg |
| | gagaatctcgctctctccaggggaagccgaagtttccaaaaggtcgttgatcaaagctcgccgc |
| | gttgtttcatcaagccttacggtcaccgtaaccagcaaatcaatatcactgtgtggcttcaggccg |
| | ccatccactgcggagccgtacaaatgtacggccagcaacgtcggttcgagatggcgctcgatg |
| | acgccaactacctctgatagttgagtcgatacttcggcgatcaccgcttccctcatactcttcctttt |
| | tcaatattattgaagcatttatcagggttattgtctcatgagcggatacatatttgaatgtatttagaa |
| | aaataaacaaatagctagctcactcggtcgctacgctccgggcgtgagactgcggcgggcgct |
| | gcggacacatacaaagttacccacagattccgtggataagcaggggactaacatgtgaggca |
| | aaacagcagggccgcgccggtggcgtttttccataggctccgccctcctgccagagttcacata |
| | aacagacgcttttccggtgcatctgtgggagccgtgaggctcaaccatgaatctgacagtacgg |
| | gcgaaacccgacaggacttaaagatccccaccgtttccggcgggtcgctccctcttgcgctctc |
| | ctgttccgaccctgccgtttaccggatacctgttccgcctttctcccttacgggaagtgtggcgctt |
| | tctcatagctcacacactggtatctcggctcggtgtaggtcgttcgctccaagctgggctgtaag |
| | caagaactccccgttcagcccgactgctgcgccttatccggtaactgttcacttgagtccaaccc |
| | ggaaaagcacggtaaaacgccactggcagcagccattggtaactgggagttcgcagaggatt |
| | tgtttagctaaacacgcggttgctcttgaagtgtgcgccaaagtccggctacactggaaggaca |
| | gatttggttgctgtgctctgcgaaagccagttaccacggttaagcagttccccaactgacttaacc |
| | ttcgatcaaaccacctccccaggtggttttttcgtttacagggcaaaagattacgcgcagaaaaa |
| | aaggatctcaagaagatcctttgatcttttctactgaaccgctctagatttcagtgcaatttatctctt |
| | caaatgtagcacctgaagtcagccccatacgatataagttgtaattctcatgttagtcatgccccg |
| | cgcccaccggaaggagctgactgggttgaaggctctcaagggcatcggtcgagatcccggtg |
| | cctaatgagtgagctaacttacattaattgcgttgcgctcactgcccgctttccagtcgggaaacc |
| | tgtcgtgccagctgcattaatgaatcggccaacgcgcggggagaggcggtttgcgtattgggc |
| | gccagggtggtttttcttttcaccagtgagacgggcaacagctgattgcccttcaccgcctggcc |
| | ctgagagagttgcagcaagcggtccacgctggtttgccccagcaggcgaaaatcctgtttgat |
| | ggtggttaacggcgggatataacatgagctgtcttcggtatcgtcgtatcccactaccgagatgt |
| | ccgcaccaacgcgcagcccggactcggtaatggcgcgcattgcgcccagcgccatctgatcg |
| | ttggcaaccagcatcgcagtgggaacgatgccctcattcagcatttgcatggtttgttgaaaacc |
| | ggacatggcactccagtcgccttcccgttccgctatcggctgaatttgattgcgagtgagatattt |
| | atgccagccagccagacgcagacgcgccgagacagaacttaatgggcccgctaacagcgc |
| | gatttgctggtgacccaatgcgaccagatgctccacgcccagtcgcgtaccgtcttcatgggag |
| | aaaataatactgttgatgggtgtctggtcagagacatcaagaaataacgccggaacattagtgc |
| | aggcagcttccacagcaatggcatcctggtcatccagcggatagttaatgatcagcccactgac |
| | gcgttgcgcgagaagattgtgcaccgccgctttacaggcttcgacgccgcttcgttctaccatc |
| | gacaccaccacgctggcacccagttgatcggcgcgagatttaatcgccgcgacaatttgcgac |
| | ggcgcgtgcagggccagactggaggtggcaacgccaatcagcaacgactgtttgcccgcca |
| | gttgttgtgccacgcggttgggaatgtaattcagctccgccatcgccgcttccactttttcccgcg |
| | ttttcgcagaaacgtggctggcctggttcaccacgcgggaaacggtctgataagagacaccgg |
| | catactctgcgacatcgtataacgttactggtttcacattcaccaccctgaattgactctcttccgg |
| | gcgctatcatgccataccgcgaaaggttttgcgccattcgatggtgtccgggatctcgacgctct |
| | cccttatgcgactcctgcattaggaaattaatacgactcactata (SEQ ID NO: 92) |
| pHelper(CyCAST)_ | ggggaattgtgagcggataacaattcccctgtagaaataattttgtttaactttaataaggagatat |
| Shuffled-spacer_ | accatggtttccaagcctgaatcccggtctacgggactgaaacaccatctatgtatagctacgat |
| ΔTniQ | ggaatagtaaagggtttccaagcctgaatcccggtctacgggactgaaacgatccgaattcga |
| | gctcggcgcgcctgcaggtcgacaagcttgcggccgcataatgcttaagtcgaacagaaagta |
| | atcgtattgtacacggccgcataatcgaaattaatacgactcactataggggaattgtgagcgga |
| | taacaattccccatcttagtatattagttaagtataagaaggagatatacatatggctaccctactcc |
| | aaaccctcctgttacgaacgttgtcacccgaggcggatccagttctctatgtctacattgagacg |
| | gtactacctgcaatggaacgggaatttggcttgattccagcccttggtggctcggaggaagcac |
| | actttcatctgctgaggcgacggggaaacaaatatgcggcggaaaattccaagcggtacgcca |
| | gtcgctctgatcaaagcctgctggttcatgtgctcaatgccttgctgaccgcctggaatttgttgc |
| | cattcctaagctccacatttgaactatcagatgatgagaaacggctgctctgcctggggctgacc |
| | ctacacgattacaacaagtggtgccagggtgaggaggaagattcgccgattgcatgcgaagta |
| | gcagagattcttgagctttgtcaaacattgggagagcggttgaactttgacggattctgggcaga |
| | gtggcgggagtatttgacagagattgcctaccttgcccaaaacacccagggaaaagttggaac |
| | aaatctacccaaagcgaattggggcagcttcaaaattctagatacccgtcgtctggattcgcccc |
| | tacgatggctactcgcttttggcgatgtcgcagtccatctcagcgatccatctgacatcgcaatga |
| | aaacggggggagatcgcctgcgggaacatctgcgctttctaggtattcgtcgcaagctggtcta |
| | ccatcgcctgcgcaactgtacagggctattaaccaacggaattcataatgcggtaatgcattttg |
| | ctagagaactggattggcaacccatcctcttctttgctcagggtgttgtttatctcgctcctcaggg |
| | tgctggcgttccggatcgcttagaacttcaggaatttctctgggagcaggtcagcaaccgattag |
| | ccaccagcatgttgcggggagaggttggtttcaaacgggatggcaagggactcaaggtggct |
| | ccccaaaccctggaactgttctcccctgctcagttgattcggaacttgcccggtgttgtccaatctt |
| | atgtcggaaacgctaaatctcctgcgactccaaaacgacttgagaagctggaactcagttcaac |
| | agagcgagagtttttggctaaaggtgcagatttaagagcagatcgcattgccgagtttatctttct |
| | ggcgcaaaaagagtttttcggagataaaccagaatttatcacttggatgcttgaaactctggggg |
| | ttcaaactgctatcacttcggagcagacgcagcttcaatccggtggtgtgaactggggatggtat |
| | cacgcagcagcctattacgtcgcgagcaatgccacgctggatttggaagagatttcggagaaa |
| | cttcaggaatttgccgagcagttggcaacctgggcggaggaaaacaatttcttcccagagcatc |
| | gcagcccaacccatgacatctttttcaactatctgactcaatacctggaagttcaggggtgggag |
| | cagcaggagcagtcctttcagcttgaactggcaggctatgttggcgcaaagactaaaactgcca |
| | gacaaccgatttgctccctcagttccggtgaatttgcttcggaagaccagatggattctgttgtcct |
| | gttcaaaccgcagcagtacagcaacaagaatcctctcggtggacggcagatcaagcggggg |
| | atttccaaaatctggtccctggaaatgctgctcaggcaggctctttggtctgcgccagcaggcaa |
| | actagaggaacaacaacccattttcctttacatcttcccggcatacgtttactcgccccaggttgct |
| | gctgctgtccggttactggtgaatgatctgaagcgtgtcaacctctgggaagtccgtaaacactg |
| | gttggagaatggcatggatgctcaggcgttgcgatcgtttccctggctagtcggtgacaaaaac |
| | gattcgggtaactctgctccatccagatactctggtgaagacttgcctttcatggcaatgaactac |
| | accaccaccagaggcaaaacgataactgatgcctgggttgaacctgctttcctgacactggtgc |
| | tgcctttgttgctgggtgtgaaagttgtcgccaccagtagccagattccactctatgaaagcgac |
| | aacgacttttgcgaatctgtcaagctggatggacccgccgatttctgggctttgctgcggctacc |
| | aacttccctgcatctccaggattggattggggggcgtgttcaaaatttagcagaaggcttgaacc |
| | gcttgatggttgcctactgcctgcatctggacagtcgtagcgctccaccagatgcgcgctggag |
| | agccttaaacggcagtgtccgagagatgacaacaaatgttctaaacattttttcacttgcagagg |
| | agggattacgtcgtgatggctctaaacgcgatgcaacagttgaagaaattaaccgctattggaa |
| | atacgcccagctgtgggcagagggagactctgatatgcaaaacaagttgaagattaccaaacg |
| | cttagtcgatgagtaccgccagttttacagagccagtgcgaacgaatccagccatacggttttgc |
| | tgccattttctaaggcactggaacacattctttcggtaccaaatgattgggacgatgaggaaatta |
| | ttgttcaaggggcaggacagttacaggccgcgttagatcggcaggaagtctacaaacgtcccc |
| | tcatgcttgacaaagagattccctttgaaattcgtcggatgaaggagtttgaggcaattcaaacct |
| | tcatgaccacctgcgtcattgacctatttggacaaatgtgtaaaggcgatcgcgcgctcctgcag |
| | gaacatcgcaaccgccttaaatcaggggtcgaatttgcctatcgtcagttagccctgcaagaga |
| | aacaagccaaagccaaccaaaaatctggagaacaatcatgagcattcttgaaaccttaaagcc |
| | agagttccacacagccttccctcgcctcgcctctggcaaatatgtccatttcttcatggtgcgtca |
| | cagccagtcgttccccgtctttcaaaccgatggcgttttgaacactgcccgtactcaggctgggtt |
| | aaatgcaggcgatgaaaaatccagacaggcaatcagtcgcctggtcatgttcaaacggaaaca |
| | ggtgacaccagaacgactcacaggacgggaactgctgcgatcgctgggcattaacggagtag |
| | ttgaaggggaagccaatttctgtgaatacaacggcgaaagatcctgtaaaaaatgccctgattg |
| | cattctctatggttttgcgattggggacagtggctcggaacgttccaaagtctactctgattcagc |
| | cttttccctgagtccttatgaagtttcccatcgcagttttaccttcaatgctccctttgaaggtggaac |
| | catgagtgagaagggtgaaatgcggagtgcgatcaacgaactggatcatgttttgccggaagtt |
| | gcttttccttgcgttgaaacactacgtgaccccacgctggaaggcttcatttatgtaatgggcaac |
| | ctgatccggactcggcgctatggagcgcaggagtcgcgtacagggacaatggcgaatcacat |
| | tattggcgttaccctatgtgatggcgagatcttcagcaatttgcactttacccaagccctctacgat |
| | gccctgaagggtgatttgagtgcgccaattagtgatttatgcagagaggcggcgatcgtggca |
| | gaaaacttgctaaatcaggaacctgtgcggaagatccaagttatttttggagagcagttgaacga |
| | actcctggctgaggtagcgggaatctgccaggatgaaactcgcttgcgaaacactgtgacagc |
| | cttgtaccagcaatcacaagcctatgccgagacctatggtgctgctgctaagaaaggcaaagg |
| | caaatcttaaggtggctgccaatggttatttatcgatgcaatctcacgttgcacgacaacgtattct |
| | tcgccactcgcgagatggggattctctacgaaacagagaagtatctacacaactgggcactca |
| | gctttgctctgtttgaagccacccacatccccaaaccctatcgcttgcagggtgcgatcgctcaa |
| | cgacccggttatctggaagctgacaacgagcaaaaccttttagttctgaatcacgcaggcatcta |
| | tgttttccctgctctaccacttcagtggtcctaccaagtcaataccttcaaagcggctcaagtgcct |
| | tactatggcaaatccaaacagttcggggataagggagctgatcgcaactacccgattaactacg |
| | gacgggcaaaagaactggcagttggcagcacctaccgaacgtatattcttgcccctgaaccaa |
| | tccagatcccccactggatacggttgggtaagtgggcagccaagattcaggtggacgcaaga |
| | cccatacctaactgtggaatccgacaacggtcaggagaatacacctgcgaccatccactaaatc |
| | cgatcgacctgtccggttcaacccgattgctgttatacaaccgcattgtcatgccacccgctagtc |
| | tcgtcagtcagtcgcgagtttctggggactactgggaaatttctaaaccatccaattggactgaat |
| | ttccggactggtcagacctgaaagacatacccaatcaagtttgcttacccagcggagtagcctat |
| | ggagccagtactgccattgccgcatcttaagtccaccgctctgcatatcctggtaattcatttagg |
| | cgttgccgaaagcggagccttgcctgttgaatccggtcgagccgtccatgctcaagttttggact |
| | ggttccgcatggcggatccggcaatttctgaggcaattcacaaaagccaggaatccccgctca |
| | gtctctcaggcctggtcgggaaacgccgtaaagtaggggtgcgggcaggagatgaattttact |
| | tccgaattgggttgttagatgggagtttgattgaaccactgctgagtggtttggagaagtggggc |
| | gacaagcccttttctctggcaaagtgtccctttgttttccgcagtatcaatatgttgccaggaactg |
| | acccctgggttggttcttccgattatgccttgcttacccaaaccccggctactttggataacctagc |
| | tctcaagctcctgtcgccaacaagcttcaagtcgaatgccgggcaaggaatccaaccctttcctt |
| | tgccagagtcagttttcggaaatttacatcgtcgctggaatgtctttgcaccaaaggaattgcagtt |
| | tccaaaaattcaatggagtgggctggtctctgattatgacctcaaaactcaaaagttaaggatgg |
| | aaaactcggttgagatcggcgcagtgggctgggtgcgctatcggtttccagatccagaacaag |
| | cgagaattgcaaccattctggctcactttgccttttttgctggagttgggcgtaagacagcaatgg |
| | ggatgggacaggtggtgttggacaaaaaaacgtagcctaggctgctgccaccgctgagcaat |
| | aactagcataaccccttggggcctctaaacgggtcttgaggggttttttgctgaaacctcaggca |
| | tttgagaagcacacggtcacactgcttccggtagtcaataaaccggtaaaccagcaatagacat |
| | aagcggctatttaacgaccctcgggatctcgacgctctcccttatgcgactcctgcattaggaaa |
| | ttaatacgactcactataggggaattgtgagcggataacaattcccctgtagaaataattttgttta |
| | actttaataaggagatataccatgcttgatgaaaaaagcttcgacaactggtgccaatccgttggt |
| | ctgagccaggcagcacgtgaagttgtagagcgtgtgcgatcctcttcaccctcccgtcgcgtac |
| | agagcggtagaggaaacgtctccggcaattaccctagccgcaaaatgggcgtcacaattcagt |
| | ttgagtcccatcgaaatgagcttgcccgcatctacgaactggagcatgaccccggcgttctgga |
| | atattacgatcaacctcccaaaatcgaacttgattatttgtcaaaaaatgggaggcgtgttcgtact |
| | caatacacacctgatttctttgttatccgtaatgactcagcaggttgggaggagtgtaaaacagag |
| | gatgaccttaagcaattagctgaggacagccctaaccgttaccaacgagctgaggacaatcgc |
| | tggcgatgtccacctgcagaagcctatgctcttccccttgagttgtattttcaggtacggtctagtg |
| | ctgaaattaactggattttccagcaaaactttgtatggctagaagactaccttggtactgaatcactt |
| | actatggatgagtcggttgcagatgcaatcatagccacagtcagagcaaacgagggtatcaca |
| | ctactcgaactgattcaacaattacaaggcacagatgctgatgctatctacatcctgattgcaacc |
| | gaacaaatttatgttgatttgatggctgaacggttagcgaacagcgatcgggcacgggtattttc |
| | cagtccagaaattgctcaagcctttcaactcattacgctggtcgaagcacctctggctaacagttc |
| | tctccatatagttcaggtgggcgttggcacaaccatacactgggatggtgaagtctgggagatt |
| | gttaatacaggctctaccatgacaggattgttgcgatcggacggtaagtttatcgagttgcccaat |
| | tctgcaattgatgaattgattcagaagggcaagattcaatcaatttcagcacaacaagcccctgat |
| | agcaaagcagaagttgaagaaatgcttcgctgtgctcgtccagccgacattaaagaagccaac |
| | cgtcgctacgaaatcattcagccttacctggaaaaggatgcaccagcttgtccaactcgaacaat |
| | tcggcgctggcgtaatcagtattggcaggcagaaaagctttacgggaatggctatgttggtttac |
| | taccaaatcatcagaagaaagggaattatttagttaaggttaatgaagtaactcaagcttttatgctt |
| | gagtttattgagaagcattacgaaaatctcaaacagcgtagtaagcttagagtttatcaggcttttg |
| | tggaggcatgtgaaagccacgaaccgaaactaaaccctccaagccgtactacattcacactag |
| | cgattcagaaacgagcaggacatcagcaaaccttgaaacgtgaaggacgaagagctgccatt |
| | cagaaggaggagttttactgggaactggagctaactactcctcgacacggcgatcgccccttc |
| | gagatcgttcatattgatcacactcaactcgatattgagcttatcagttctttgaactccctggccca |
| | atgcaaccctacatctgttgatgccacttacaatttgggtcgtccttgggcaacgttcatggttgat |
| | gcttacagccgccgtttgctagcagtttacataacctatgaagaacccagctatcgttcctgcatg |
| | atggtgctccgtatttgcgtacagcgatttaagcgttttcctcagacgatcgtggtagataatggtg |
| | cagaatttcacagccattactttgaacaactactggcaacatatcaatgcacaaagaagcacag |
| | gccacctgcaaaagctcgctttggtgcagttgttgaacgattatttggcactgcaaataagcaatt |
| | aattcatgagttgcagggaaatacccaaattactcgcaagcatcgccaagttactcaatctgttca |
| | tccccaaaaattggctctttggacgttaggcgatctctacgaatcactatgtgaatgggcttacaa |
| | agtttatgctgaccgccagcaccctgcgctagggcaaagccctaatgctgcattcgctcaaggg |
| | ctggcgttgggaggtagtcgcatccatcgccgagtagagtatgaccaagtcttccgtatcttgac |
| | attgcccgcaccggaaagaggacaacgcaaagttcagccaggacaagggataaaacttagc |
| | aatatctactactggtcaaatgcctttcgagacccagaaattgaacaatcgatggttgaagttcgtt |
| | atgatccctttgatgccagcattgcctatgcactggtgcgaaaacaatgggtccggtgtatttcct |
| | cctactatcaacagtttcaaaatcgttcagaaaaggaaattcgtttaataactgctgagttgattaa |
| | gcaaaagcgtgaccagggaagagatacaaatgttacggataaagaattggcgcagtttttaag |
| | ctctacagaaatgaaagaaggcaaattcttggagcaacgcttgcggactacagaaaacagggt |
| | agttattcagaatagtacagctacagaagacgatccccccatcactaattctcagaattcttacga |
| | gccatcgcttatgctgccaagtgaggatgagttggatgatcaggaagactggttaaataccggc |
| | aaagctgaggcagaattagaattctatggagagtactagcgatgcaacctcaaataagcttccc |
| | aaaagagttactgcttcaaccaattcctgatcgaattgcctatttcaaagattacacaatggcacat |
| | ccgaagcttatagaagcagaccggaagttaatgcatgctattcgtgaacctggaggagctgctc |
| | ttatctttgtctttggtcctaccggagttggaaagtctactctattgaaacgaattactcaaaagctg |
| | cttaaagaagcattgtctttgatggagactgacaaaggctatattcctattgcgggggtagagata |
| | aaaactccagaggatagtaactttgattggaacgatttttatgttcgtgctcttatggcacttaatga |
| | gccaatgatcgagaaaaaaatcaaccgtacaggtgcaaaactaaaattacggttggcacttgaa |
| | tctgcccttcgtaatcgccgtcctgatgctttttacatagacgaagctcaaaattttggtaaggtag |
| | ccagtgggcgaaaattgcaagatcaaacagattgcattaaatctcttgcaaatctcgctcaaact |
| | cggtttatcttatgtgggatttatgaacttttaccactacgaaatctaagtgggcagctatgccgcc |
| | gtagccatagtattcactttccacgttattcggcagattctgagcaggatctaaaggcctttaaaag |
| | tgcgttattaacactacaaaatcaactccctcttcccgaaccacctgatttagtggcgcattggga |
| | attttgttatgagagaactatcggctgtattggtattttgaaagatttgctccttcggactctaagcg |
| | cgattttagtacgggatggagacaaagttttgacattgaagcccaaggatttagaacaacgtgca |
| | tggtctttagaagaatgtttggttatgctgagagaggcaaaggaaggagagcaacaacttactg |
| | acaaatcgggcttacatgaggaattacggacagctttagggtttaatgcagctacgtccaagca |
| | gtctgccaaatcatccaagtcaacatcaagcaaaaaagcaggcagtgttggaaagccttcacct |
| | cgtcgtcgttcagttggaatagatcaagatgccagctaatagcagctccaattacgaaagaaaa |
| | atattttcaactagaatcgagcttaataaattgtccaattaagtatgctcaacagcagttcttaaagc |
| | tcttcttcaattaaatttataaaggtatggctatggcgactgaagtaccttttacttttagcacgtggg |
| | atttatctaaaccccttaccccagctcgtagttctctctttagcttgaaaccgattggggttggaac |
| | ggctgcagtagaaagcctcactggatatattgcacgtttggctgaagctcactgtatctggccag |
| | gagatcttcttgcagctgaatttagttcttcatattcctattcttacctgcatagcatgaggggccgt |
| | attgctgctttgaatggtaatagccaaatggctcaggatgctgtacttaagcttcaagagcttacct |
| | tacaggagaatttatccgctttaacaatgttaggctgggctaatattttacccgcaaaagggttgtt |
| | aaatcggactcgaacttggtgtccggtttgttttgaggcgtggcgtttcatcaaaagtcctatatat |
| | gagcctctattatggtatttaacctcggtcaaatattgtccaattcatcagcaacgccttttatctcaa |
| | tgtccattctgcgggtgccagcagcctcctctagactggaaaactcggccgggctattgttcaa |
| | ggtgccaggtgtggctgggttcaccaccaggtgtaacttccagtaattcgctttctaatacagaa |
| | ataaggtgggagagttgggttgcccagagctgcggaaatttgttagcctatagtcctcgtttaca |
| | caagatatccgttagcgttcaggtcgcagcatccctttctaaatgtatcaacctttatgcagaggg |
| | caatattgcggagtttgcccgtcaaatgagcttgccaaaaacttctgtttggctgtggcagtctgg |
| | tcaggtactccccgagttatccaggcttttaagcatctgctatcacttcaatctgtcgctcttagact |
| | ttctaattaatacaccagttcttaagataaggagagacttaattccagaaaagagaactaatgagtt |
| | tcgccagcctcgaagagatccctcaaccatatctcaattgcaacctattctgggattaattcttttc |
| | gagcagccacctccctctttagcagcagtagcgtgtcgcttaggttgtagctcaagatccctgcg |
| | ccataattttcctgatctctgtggctctatttctgcacgttaccttcaacaccgtgatgaagtttataa |
| | agaaaaattgaatcaattctgtcaagacttgcgccaagttgtacttcaactttattcggcaggcatt |
| | gatccgactcggagccaagttgctcgccgtctgaggaaacccgcttattttagagaacccgaag |
| | tcgaggcaatgcttgagtctgttcgacgagaattaggcttgcacagcaattctcagcatgagact |
| | aattctcacaaaaacgcccagttttaacttaagtcgaacagaaagtaatcgtattgtacacggcc |
| | gcataatcgaaattaatacgactcactataggggaattgtgagcggataacaattccccatcttag |
| | tatattagttaagtataagaaggagatatacatatggcagatctcaattggatatcggccggccac |
| | gcgatcgctgacgtcggtaccctcgagtctggtaaagaaaccgctgctgcgaaatttgaacgc |
| | cagcacatggactcgtctactagcgcagcttaattaacctaggctgctgccaccgctgagcaat |
| | aactagcataaccccttggggcctctaaacgggtcttgaggggttttttgctgaaacctcaggca |
| | tttgagaagcacacggtcacactgcttccggtagtgccctgaaccgacgaccgggtcatcgtg |
| | gccggatcttgcggcccctcggcttgaacgaattgttagacattatttgccgactaccttggtgat |
| | ctcgcctttcacgtagtggacaaattcttccaactgatctgcgcgcgaggccaagcgatcttcttc |
| | ttgtccaagataagcctgtctagcttcaagtatgacgggctgatactgggccggcaggcgctcc |
| | attgcccagtcggcagcgacatccttcggcgcgattttgccggttactgcgctgtaccaaatgc |
| | gggacaacgtaagcactacatttcgctcatcgccagcccagtcgggcggcgagttccatagcg |
| | ttaaggtttcatttagcgcctcaaatagatcctgttcaggaaccggatcaaagagttcctccgccg |
| | ctggacctaccaaggcaacgctatgttctcttgcttttgtcagcaagatagccagatcaatgtcga |
| | tcgtggctggctcgaagatacctgcaagaatgtcattgcgctgccattctccaaattgcagttcgc |
| | gcttagctggataacgccacggaatgatgtcgtcgtgcacaacaatggtgacttctacagcgcg |
| | gagaatctcgctctctccaggggaagccgaagtttccaaaaggtcgttgatcaaagctcgccgc |
| | gttgtttcatcaagccttacggtcaccgtaaccagcaaatcaatatcactgtgtggcttcaggccg |
| | ccatccactgcggagccgtacaaatgtacggccagcaacgtcggttcgagatggcgctcgatg |
| | acgccaactacctctgatagttgagtcgatacttcggcgatcaccgcttccctcatactcttcctttt |
| | tcaatattattgaagcatttatcagggttattgtctcatgagcggatacatatttgaatgtatttagaa |
| | aaataaacaaatagctagctcactcggtcgctacgctccgggcgtgagactgcggcgggcgct |
| | gcggacacatacaaagttacccacagattccgtggataagcaggggactaacatgtgaggca |
| | aaacagcagggccgcgccggtggcgtttttccataggctccgccctcctgccagagttcacata |
| | aacagacgcttttccggtgcatctgtgggagccgtgaggctcaaccatgaatctgacagtacgg |
| | gcgaaacccgacaggacttaaagatccccaccgtttccggcgggtcgctccctcttgcgctctc |
| | ctgttccgaccctgccgtttaccggatacctgttccgcctttctcccttacgggaagtgtggcgctt |
| | tctcatagctcacacactggtatctcggctcggtgtaggtcgttcgctccaagctgggctgtaag |
| | caagaactccccgttcagcccgactgctgcgccttatccggtaactgttcacttgagtccaaccc |
| | ggaaaagcacggtaaaacgccactggcagcagccattggtaactgggagttcgcagaggatt |
| | tgtttagctaaacacgcggttgctcttgaagtgtgcgccaaagtccggctacactggaaggaca |
| | gatttggttgctgtgctctgcgaaagccagttaccacggttaagcagttccccaactgacttaacc |
| | ttcgatcaaaccacctccccaggtggttttttcgtttacagggcaaaagattacgcgcagaaaaa |
| | aaggatctcaagaagatcctttgatcttttctactgaaccgctctagatttcagtgcaatttatctctt |
| | caaatgtagcacctgaagtcagccccatacgatataagttgtaattctcatgttagtcatgccccg |
| | cgcccaccggaaggagctgactgggttgaaggctctcaagggcatcggtcgagatcccggtg |
| | cctaatgagtgagctaacttacattaattgcgttgcgctcactgcccgctttccagtcgggaaacc |
| | tgtcgtgccagctgcattaatgaatcggccaacgcgcggggagaggcggtttgcgtattgggc |
| | gccagggtggtttttcttttcaccagtgagacgggcaacagctgattgcccttcaccgcctggcc |
| | ctgagagagttgcagcaagcggtccacgctggtttgccccagcaggcgaaaatcctgtttgat |
| | ggtggttaacggcgggatataacatgagctgtcttcggtatcgtcgtatcccactaccgagatgt |
| | ccgcaccaacgcgcagcccggactcggtaatggcgcgcattgcgcccagcgccatctgatcg |
| | ttggcaaccagcatcgcagtgggaacgatgccctcattcagcatttgcatggtttgttgaaaacc |
| | ggacatggcactccagtcgccttcccgttccgctatcggctgaatttgattgcgagtgagatattt |
| | atgccagccagccagacgcagacgcgccgagacagaacttaatgggcccgctaacagcgc |
| | gatttgctggtgacccaatgcgaccagatgctccacgcccagtcgcgtaccgtcttcatgggag |
| | aaaataatactgttgatgggtgtctggtcagagacatcaagaaataacgccggaacattagtgc |
| | aggcagcttccacagcaatggcatcctggtcatccagcggatagttaatgatcagcccactgac |
| | gcgttgcgcgagaagattgtgcaccgccgctttacaggcttcgacgccgcttcgttctaccatc |
| | gacaccaccacgctggcacccagttgatcggcgcgagatttaatcgccgcgacaatttgcgac |
| | ggcgcgtgcagggccagactggaggtggcaacgccaatcagcaacgactgtttgcccgcca |
| | gttgttgtgccacgcggttgggaatgtaattcagctccgccatcgccgcttccactttttcccgcg |
| | ttttcgcagaaacgtggctggcctggttcaccacgcgggaaacggtctgataagagacaccgg |
| | catactctgcgacatcgtataacgttactggtttcacattcaccaccctgaattgactctcttccgg |
| | gcgctatcatgccataccgcgaaaggttttgcgccattcgatggtgtccgggatctcgacgctct |
| | cccttatgcgactcctgcattaggaaattaatacgactcactata (SEQ ID NO: 93) |
| pHelper(CyCAST)_PSP | ggggaattgtgagcggataacaattcccctgtagaaataattttgtttaactttaataaggagatat |
| 1_ΔTnsD | accatggtttccaagcctgaatcccggtctacgggactgaaacgagaagtcatttaataaggcc |
| | actgttaaacgtaggtttccaagcctgaatcccggtctacgggactgaaacgatccgaattcga |
| | gctcggcgcgcctgcaggtcgacaagcttgcggccgcataatgcttaagtcgaacagaaagta |
| | atcgtattgtacacggccgcataatcgaaattaatacgactcactataggggaattgtgagcgga |
| | taacaattccccatcttagtatattagttaagtataagaaggagatatacatatggctaccctactcc |
| | aaaccctcctgttacgaacgttgtcacccgaggcggatccagttctctatgtctacattgagacg |
| | gtactacctgcaatggaacgggaatttggcttgattccagcccttggtggctcggaggaagcac |
| | actttcatctgctgaggcgacggggaaacaaatatgcggcggaaaattccaagcggtacgcca |
| | gtcgctctgatcaaagcctgctggttcatgtgctcaatgccttgctgaccgcctggaatttgttgc |
| | cattcctaagctccacatttgaactatcagatgatgagaaacggctgctctgcctggggctgacc |
| | ctacacgattacaacaagtggtgccagggtgaggaggaagattcgccgattgcatgcgaagta |
| | gcagagattcttgagctttgtcaaacattgggagagcggttgaactttgacggattctgggcaga |
| | gtgggggagtatttgacagagattgcctaccttgcccaaaacacccagggaaaagttggaac |
| | aaatctacccaaagcgaattggggcagcttcaaaattctagatacccgtcgtctggattcgcccc |
| | tacgatggctactcgcttttggcgatgtcgcagtccatctcagcgatccatctgacatcgcaatga |
| | aaacggggggagatcgcctgcgggaacatctgcgctttctaggtattcgtcgcaagctggtcta |
| | ccatcgcctgcgcaactgtacagggctattaaccaacggaattcataatgcggtaatgcattttg |
| | ctagagaactggattggcaacccatcctcttctttgctcagggtgttgtttatctcgctcctcaggg |
| | tgctggcgttccggatcgcttagaacttcaggaatttctctgggagcaggtcagcaaccgattag |
| | ccaccagcatgttgcggggagaggttggtttcaaacgggatggcaagggactcaaggtggct |
| | ccccaaaccctggaactgttctcccctgctcagttgattcggaacttgcccggtgttgtccaatctt |
| | atgtcggaaacgctaaatctcctgcgactccaaaacgacttgagaagctggaactcagttcaac |
| | agagcgagagtttttggctaaaggtgcagatttaagagcagatcgcattgccgagtttatctttct |
| | ggcgcaaaaagagtttttcggagataaaccagaatttatcacttggatgcttgaaactctggggg |
| | ttcaaactgctatcacttcggagcagacgcagcttcaatccggtggtgtgaactggggatggtat |
| | cacgcagcagcctattacgtcgcgagcaatgccacgctggatttggaagagatttcggagaaa |
| | cttcaggaatttgccgagcagttggcaacctgggggaggaaaacaatttcttcccagagcatc |
| | gcagcccaacccatgacatctttttcaactatctgactcaatacctggaagttcaggggtgggag |
| | cagcaggagcagtcctttcagcttgaactggcaggctatgttggcgcaaagactaaaactgcca |
| | gacaaccgatttgctccctcagttccggtgaatttgcttcggaagaccagatggattctgttgtcct |
| | gttcaaaccgcagcagtacagcaacaagaatcctctcggtggacggcagatcaagcggggg |
| | atttccaaaatctggtccctggaaatgctgctcaggcaggctctttggtctgcgccagcaggcaa |
| | actagaggaacaacaacccattttcctttacatcttcccggcatacgtttactcgccccaggttgct |
| | gctgctgtccggttactggtgaatgatctgaagcgtgtcaacctctgggaagtccgtaaacactg |
| | gttggagaatggcatggatgctcaggcgttgcgatcgtttccctggctagtcggtgacaaaaac |
| | gattcgggtaactctgctccatccagatactctggtgaagacttgcctttcatggcaatgaactac |
| | accaccaccagaggcaaaacgataactgatgcctgggttgaacctgctttcctgacactggtgc |
| | tgcctttgttgctgggtgtgaaagttgtcgccaccagtagccagattccactctatgaaagcgac |
| | aacgacttttgcgaatctgtcaagctggatggacccgccgatttctgggctttgctgcggctacc |
| | aacttccctgcatctccaggattggattggggggcgtgttcaaaatttagcagaaggcttgaacc |
| | gcttgatggttgcctactgcctgcatctggacagtcgtagcgctccaccagatgcgcgctggag |
| | agccttaaacggcagtgtccgagagatgacaacaaatgttctaaacattttttcacttgcagagg |
| | agggattacgtcgtgatggctctaaacgcgatgcaacagttgaagaaattaaccgctattggaa |
| | atacgcccagctgtgggcagagggagactctgatatgcaaaacaagttgaagattaccaaacg |
| | cttagtcgatgagtaccgccagttttacagagccagtgcgaacgaatccagccatacggttttgc |
| | tgccattttctaaggcactggaacacattctttcggtaccaaatgattgggacgatgaggaaatta |
| | ttgttcaaggggcaggacagttacaggccgcgttagatcggcaggaagtctacaaacgtcccc |
| | tcatgcttgacaaagagattccctttgaaattcgtcggatgaaggagtttgaggcaattcaaacct |
| | tcatgaccacctgcgtcattgacctatttggacaaatgtgtaaaggcgatcgcgcgctcctgcag |
| | gaacatcgcaaccgccttaaatcaggggtcgaatttgcctatcgtcagttagccctgcaagaga |
| | aacaagccaaagccaaccaaaaatctggagaacaatcatgagcattcttgaaaccttaaagcc |
| | agagttccacacagccttccctcgcctcgcctctggcaaatatgtccatttcttcatggtgcgtca |
| | cagccagtcgttccccgtctttcaaaccgatggcgttttgaacactgcccgtactcaggctgggtt |
| | aaatgcaggcgatgaaaaatccagacaggcaatcagtcgcctggtcatgttcaaacggaaaca |
| | ggtgacaccagaacgactcacaggacgggaactgctgcgatcgctgggcattaacggagtag |
| | ttgaaggggaagccaatttctgtgaatacaacggcgaaagatcctgtaaaaaatgccctgattg |
| | cattctctatggttttgcgattggggacagtggctcggaacgttccaaagtctactctgattcagc |
| | cttttccctgagtccttatgaagtttcccatcgcagttttaccttcaatgctccctttgaaggtggaac |
| | catgagtgagaagggtgaaatgcggagtgcgatcaacgaactggatcatgttttgccggaagtt |
| | gcttttccttgcgttgaaacactacgtgaccccacgctggaaggcttcatttatgtaatgggcaac |
| | ctgatccggactcggcgctatggagcgcaggagtcgcgtacagggacaatggcgaatcacat |
| | tattggcgttaccctatgtgatggcgagatcttcagcaatttgcactttacccaagccctctacgat |
| | gccctgaagggtgatttgagtgcgccaattagtgatttatgcagagaggcggcgatcgtggca |
| | gaaaacttgctaaatcaggaacctgtgcggaagatccaagttatttttggagagcagttgaacga |
| | actcctggctgaggtagcgggaatctgccaggatgaaactcgcttgcgaaacactgtgacagc |
| | cttgtaccagcaatcacaagcctatgccgagacctatggtgctgctgctaagaaaggcaaagg |
| | caaatcttaaggtggctgccaatggttatttatcgatgcaatctcacgttgcacgacaacgtattct |
| | tcgccactcgcgagatggggattctctacgaaacagagaagtatctacacaactgggcactca |
| | gctttgctctgtttgaagccacccacatccccaaaccctatcgcttgcagggtgcgatcgctcaa |
| | cgacccggttatctggaagctgacaacgagcaaaaccttttagttctgaatcacgcaggcatcta |
| | tgttttccctgctctaccacttcagtggtcctaccaagtcaataccttcaaagcggctcaagtgcct |
| | tactatggcaaatccaaacagttcggggataagggagctgatcgcaactacccgattaactacg |
| | gacgggcaaaagaactggcagttggcagcacctaccgaacgtatattcttgcccctgaaccaa |
| | tccagatcccccactggatacggttgggtaagtgggcagccaagattcaggtggacgcaaga |
| | cccatacctaactgtggaatccgacaacggtcaggagaatacacctgcgaccatccactaaatc |
| | cgatcgacctgtccggttcaacccgattgctgttatacaaccgcattgtcatgccacccgctagtc |
| | tcgtcagtcagtcgcgagtttctggggactactgggaaatttctaaaccatccaattggactgaat |
| | ttccggactggtcagacctgaaagacatacccaatcaagtttgcttacccagcggagtagcctat |
| | ggagccagtactgccattgccgcatcttaagtccaccgctctgcatatcctggtaattcatttagg |
| | cgttgccgaaagcggagccttgcctgttgaatccggtcgagccgtccatgctcaagttttggact |
| | ggttccgcatggcggatccggcaatttctgaggcaattcacaaaagccaggaatccccgctca |
| | gtctctcaggcctggtcgggaaacgccgtaaagtaggggtgcgggcaggagatgaattttact |
| | tccgaattgggttgttagatgggagtttgattgaaccactgctgagtggtttggagaagtggggc |
| | gacaagcccttttctctggcaaagtgtccctttgttttccgcagtatcaatatgttgccaggaactg |
| | acccctgggttggttcttccgattatgccttgcttacccaaaccccggctactttggataacctagc |
| | tctcaagctcctgtcgccaacaagcttcaagtcgaatgccgggcaaggaatccaaccctttcctt |
| | tgccagagtcagttttcggaaatttacatcgtcgctggaatgtctttgcaccaaaggaattgcagtt |
| | tccaaaaattcaatggagtgggctggtctctgattatgacctcaaaactcaaaagttaaggatgg |
| | aaaactcggttgagatcggcgcagtgggctgggtgcgctatcggtttccagatccagaacaag |
| | cgagaattgcaaccattctggctcactttgccttttttgctggagttgggcgtaagacagcaatgg |
| | ggatgggacaggtggtgttggacaaaaaaacgtagcctaggctgctgccaccgctgagcaat |
| | aactagcataaccccttggggcctctaaacgggtcttgaggggttttttgctgaaacctcaggca |
| | tttgagaagcacacggtcacactgcttccggtagtcaataaaccggtaaaccagcaatagacat |
| | aagcggctatttaacgaccctcgggatctcgacgctctcccttatgcgactcctgcattaggaaa |
| | ttaatacgactcactataggggaattgtgagcggataacaattcccctgtagaaataattttgttta |
| | actttaataaggagatataccatgcttgatgaaaaaagcttcgacaactggtgccaatccgttggt |
| | ctgagccaggcagcacgtgaagttgtagagcgtgtgcgatcctcttcaccctcccgtcgcgtac |
| | agagcggtagaggaaacgtctccggcaattaccctagccgcaaaatgggcgtcacaattcagt |
| | ttgagtcccatcgaaatgagcttgcccgcatctacgaactggagcatgaccccggcgttctgga |
| | atattacgatcaacctcccaaaatcgaacttgattatttgtcaaaaaatgggaggcgtgttcgtact |
| | caatacacacctgatttctttgttatccgtaatgactcagcaggttgggaggagtgtaaaacagag |
| | gatgaccttaagcaattagctgaggacagccctaaccgttaccaacgagctgaggacaatcgc |
| | tggcgatgtccacctgcagaagcctatgctcttccccttgagttgtattttcaggtacggtctagtg |
| | ctgaaattaactggattttccagcaaaactttgtatggctagaagactaccttggtactgaatcactt |
| | actatggatgagtcggttgcagatgcaatcatagccacagtcagagcaaacgagggtatcaca |
| | ctactcgaactgattcaacaattacaaggcacagatgctgatgctatctacatcctgattgcaacc |
| | gaacaaatttatgttgatttgatggctgaacggttagcgaacagcgatcgggcacgggtattttc |
| | cagtccagaaattgctcaagcctttcaactcattacgctggtcgaagcacctctggctaacagttc |
| | tctccatatagttcaggtgggcgttggcacaaccatacactgggatggtgaagtctgggagatt |
| | gttaatacaggctctaccatgacaggattgttgcgatcggacggtaagtttatcgagttgcccaat |
| | tctgcaattgatgaattgattcagaagggcaagattcaatcaatttcagcacaacaagcccctgat |
| | agcaaagcagaagttgaagaaatgcttcgctgtgctcgtccagccgacattaaagaagccaac |
| | cgtcgctacgaaatcattcagccttacctggaaaaggatgcaccagcttgtccaactcgaacaat |
| | tcggcgctggcgtaatcagtattggcaggcagaaaagctttacgggaatggctatgttggtttac |
| | taccaaatcatcagaagaaagggaattatttagttaaggttaatgaagtaactcaagcttttatgctt |
| | gagtttattgagaagcattacgaaaatctcaaacagcgtagtaagcttagagtttatcaggcttttg |
| | tggaggcatgtgaaagccacgaaccgaaactaaaccctccaagccgtactacattcacactag |
| | cgattcagaaacgagcaggacatcagcaaaccttgaaacgtgaaggacgaagagctgccatt |
| | cagaaggaggagttttactgggaactggagctaactactcctcgacacggcgatcgccccttc |
| | gagatcgttcatattgatcacactcaactcgatattgagcttatcagttctttgaactccctggccca |
| | atgcaaccctacatctgttgatgccacttacaatttgggtcgtccttgggcaacgttcatggttgat |
| | gcttacagccgccgtttgctagcagtttacataacctatgaagaacccagctatcgttcctgcatg |
| | atggtgctccgtatttgcgtacagcgatttaagcgttttcctcagacgatcgtggtagataatggtg |
| | cagaatttcacagccattactttgaacaactactggcaacatatcaatgcacaaagaagcacag |
| | gccacctgcaaaagctcgctttggtgcagttgttgaacgattatttggcactgcaaataagcaatt |
| | aattcatgagttgcagggaaatacccaaattactcgcaagcatcgccaagttactcaatctgttca |
| | tccccaaaaattggctctttggacgttaggcgatctctacgaatcactatgtgaatgggcttacaa |
| | agtttatgctgaccgccagcaccctgcgctagggcaaagccctaatgctgcattcgctcaaggg |
| | ctggcgttgggaggtagtcgcatccatcgccgagtagagtatgaccaagtcttccgtatcttgac |
| | attgcccgcaccggaaagaggacaacgcaaagttcagccaggacaagggataaaacttagc |
| | aatatctactactggtcaaatgcctttcgagacccagaaattgaacaatcgatggttgaagttcgtt |
| | atgatccctttgatgccagcattgcctatgcactggtgcgaaaacaatgggtccggtgtatttcct |
| | cctactatcaacagtttcaaaatcgttcagaaaaggaaattcgtttaataactgctgagttgattaa |
| | gcaaaagcgtgaccagggaagagatacaaatgttacggataaagaattggcgcagtttttaag |
| | ctctacagaaatgaaagaaggcaaattcttggagcaacgcttgcggactacagaaaacagggt |
| | agttattcagaatagtacagctacagaagacgatccccccatcactaattctcagaattcttacga |
| | gccatcgcttatgctgccaagtgaggatgagttggatgatcaggaagactggttaaataccggc |
| | aaagctgaggcagaattagaattctatggagagtactagcgatgcaacctcaaataagcttccc |
| | aaaagagttactgcttcaaccaattcctgatcgaattgcctatttcaaagattacacaatggcacat |
| | ccgaagcttatagaagcagaccggaagttaatgcatgctattcgtgaacctggaggagctgctc |
| | ttatctttgtctttggtcctaccggagttggaaagtctactctattgaaacgaattactcaaaagctg |
| | cttaaagaagcattgtctttgatggagactgacaaaggctatattcctattgcgggggtagagata |
| | aaaactccagaggatagtaactttgattggaacgatttttatgttcgtgctcttatggcacttaatga |
| | gccaatgatcgagaaaaaaatcaaccgtacaggtgcaaaactaaaattacggttggcacttgaa |
| | tctgcccttcgtaatcgccgtcctgatgctttttacatagacgaagctcaaaattttggtaaggtag |
| | ccagtgggcgaaaattgcaagatcaaacagattgcattaaatctcttgcaaatctcgctcaaact |
| | cggtttatcttatgtgggatttatgaacttttaccactacgaaatctaagtgggcagctatgccgcc |
| | gtagccatagtattcactttccacgttattcggcagattctgagcaggatctaaaggcctttaaaag |
| | tgcgttattaacactacaaaatcaactccctcttcccgaaccacctgatttagtggcgcattggga |
| | attttgttatgagagaactatcggctgtattggtattttgaaagatttgctccttcggactctaagcg |
| | cgattttagtacgggatggagacaaagttttgacattgaagcccaaggatttagaacaacgtgca |
| | tggtctttagaagaatgtttggttatgctgagagaggcaaaggaaggagagcaacaacttactg |
| | acaaatcgggcttacatgaggaattacggacagctttagggtttaatgcagctacgtccaagca |
| | gtctgccaaatcatccaagtcaacatcaagcaaaaaagcaggcagtgttggaaagccttcacct |
| | cgtcgtcgttcagttggaatagatcaagatgccagctaacgatctagaaatctatgaatcttggaa |
| | tttagatctccctttactacctaatcgaagtaggctctaccacttgaaaccgattgcaattggagat |
| | gcttacgttgaaggattaatcagctatgtttgccgtttggctgaagcccactgtgtttctccaggag |
| | tccttactaaacaggaaatattgcccagtctaagaaaagtttataatgtgggttcaagagaagttc |
| | atgaagtacgaagagatgaaagtttagtttctatttcctcctttcctaagccagaaagcaataaaaa |
| | tcctaatgaaccaggcttctgggcatggcaatatattgaaggattgcagcctttaactcttagaga |
| | aaaccttgaagcattaactattccaaattggaaaaagcaaattccacaggtgacaggaattgag |
| | gttgcgcgtgagttgagagcttggtgccctgaatgctttcaacaatggcgcaagactaatcagat |
| | aatttatgaaccgatgctttggtcgatcgctttagttaccgtatgtccttatcattaccttccgctaca |
| | aactcgctgtccttattgtaaaaaaactcaacggcctatcacaggaaaaatgcaggtagctcgct |
| | gttccgaatgtttagagtggcttggcattcaaccaagcgaagattcagagttagaaatcaaaatta |
| | aatctgaagtcgaatggcaccattgggttgcggagaaagtaatggagattttggtatttaaagatt |
| | atactttaactgcaaatgctataacaatagcagctccaattacgaaagaaaaatattttcaactaga |
| | atcgagcttaataaattgtccaattaagtatgctcaacagcagttcttaaagctcttcttcaattaac |
| | acaaaaacgcccagttttaacttaagtcgaacagaaagtaatcgtattgtacacggccgcataat |
| | cgaaattaatacgactcactataggggaattgtgagcggataacaattccccatcttagtatatta |
| | gttaagtataagaaggagatatacatatggcagatctcaattggatatcggccggccacgcgat |
| | cgctgacgtcggtaccctcgagtctggtaaagaaaccgctgctgcgaaatttgaacgccagca |
| | catggactcgtctactagcgcagcttaattaacctaggctgctgccaccgctgagcaataactag |
| | cataaccccttggggcctctaaacgggtcttgaggggttttttgctgaaacctcaggcatttgaga |
| | agcacacggtcacactgcttccggtagtgccctgaaccgacgaccgggtcatcgtggccggat |
| | cttgcggcccctcggcttgaacgaattgttagacattatttgccgactaccttggtgatctcgcctt |
| | tcacgtagtggacaaattcttccaactgatctgcgcgcgaggccaagcgatcttcttcttgtccaa |
| | gataagcctgtctagcttcaagtatgacgggctgatactgggccggcaggcgctccattgccca |
| | gtcggcagcgacatccttcggcgcgattttgccggttactgcgctgtaccaaatgcgggacaac |
| | gtaagcactacatttcgctcatcgccagcccagtcgggcggcgagttccatagcgttaaggtttc |
| | atttagcgcctcaaatagatcctgttcaggaaccggatcaaagagttcctccgccgctggaccta |
| | ccaaggcaacgctatgttctcttgcttttgtcagcaagatagccagatcaatgtcgatcgtggctg |
| | gctcgaagatacctgcaagaatgtcattgcgctgccattctccaaattgcagttcgcgcttagctg |
| | gataacgccacggaatgatgtcgtcgtgcacaacaatggtgacttctacagcgcggagaatctc |
| | gctctctccaggggaagccgaagtttccaaaaggtcgttgatcaaagctcgccgcgttgtttcat |
| | caagccttacggtcaccgtaaccagcaaatcaatatcactgtgtggcttcaggccgccatccact |
| | gcggagccgtacaaatgtacggccagcaacgtcggttcgagatggcgctcgatgacgccaac |
| | tacctctgatagttgagtcgatacttcggcgatcaccgcttccctcatactcttcctttttcaatatta |
| | ttgaagcatttatcagggttattgtctcatgagcggatacatatttgaatgtatttagaaaaataaaca |
| | aatagctagctcactcggtcgctacgctccgggcgtgagactgcggcgggcgctgcggacac |
| | atacaaagttacccacagattccgtggataagcaggggactaacatgtgaggcaaaacagcag |
| | ggccgcgccggtggcgtttttccataggctccgccctcctgccagagttcacataaacagacgc |
| | ttttccggtgcatctgtgggagccgtgaggctcaaccatgaatctgacagtacgggcgaaaccc |
| | gacaggacttaaagatccccaccgtttccggcgggtcgctccctcttgcgctctcctgttccgac |
| | cctgccgtttaccggatacctgttccgcctttctcccttacgggaagtgtggcgctttctcatagct |
| | cacacactggtatctcggctcggtgtaggtcgttcgctccaagctgggctgtaagcaagaactc |
| | cccgttcagcccgactgctgcgccttatccggtaactgttcacttgagtccaacccggaaaagc |
| | acggtaaaacgccactggcagcagccattggtaactgggagttcgcagaggatttgtttagcta |
| | aacacgcggttgctcttgaagtgtgcgccaaagtccggctacactggaaggacagatttggttg |
| | ctgtgctctgcgaaagccagttaccacggttaagcagttccccaactgacttaaccttcgatcaa |
| | accacctccccaggtggttttttcgtttacagggcaaaagattacgcgcagaaaaaaaggatctc |
| | aagaagatcctttgatcttttctactgaaccgctctagatttcagtgcaatttatctcttcaaatgtag |
| | cacctgaagtcagccccatacgatataagttgtaattctcatgttagtcatgccccgcgcccacc |
| | ggaaggagctgactgggttgaaggctctcaagggcatcggtcgagatcccggtgcctaatga |
| | gtgagctaacttacattaattgcgttgcgctcactgcccgctttccagtcgggaaacctgtcgtgc |
| | cagctgcattaatgaatcggccaacgcgcggggagaggcggtttgcgtattgggcgccaggg |
| | tggtttttcttttcaccagtgagacgggcaacagctgattgcccttcaccgcctggccctgagag |
| | agttgcagcaagcggtccacgctggtttgccccagcaggcgaaaatcctgtttgatggtggtta |
| | acggcgggatataacatgagctgtcttcggtatcgtcgtatcccactaccgagatgtccgcacc |
| | aacgcgcagcccggactcggtaatggcgcgcattgcgcccagcgccatctgatcgttggcaa |
| | ccagcatcgcagtgggaacgatgccctcattcagcatttgcatggtttgttgaaaaccggacatg |
| | gcactccagtcgccttcccgttccgctatcggctgaatttgattgcgagtgagatatttatgccag |
| | ccagccagacgcagacgcgccgagacagaacttaatgggcccgctaacagcgcgatttgctg |
| | gtgacccaatgcgaccagatgctccacgcccagtcgcgtaccgtcttcatgggagaaaataat |
| | actgttgatgggtgtctggtcagagacatcaagaaataacgccggaacattagtgcaggcagct |
| | tccacagcaatggcatcctggtcatccagcggatagttaatgatcagcccactgacgcgttgcg |
| | cgagaagattgtgcaccgccgctttacaggcttcgacgccgcttcgttctaccatcgacaccac |
| | cacgctggcacccagttgatcggcgcgagatttaatcgccgcgacaatttgcgacggcgcgtg |
| | cagggccagactggaggtggcaacgccaatcagcaacgactgtttgcccgccagttgttgtgc |
| | cacgcggttgggaatgtaattcagctccgccatcgccgcttccactttttcccgcgttttcgcaga |
| | aacgtggctggcctggttcaccacgcgggaaacggtctgataagagacaccggcatactctgc |
| | gacatcgtataacgttactggtttcacattcaccaccctgaattgactctcttccgggcgctatcat |
| | gccataccgcgaaaggttttgcgccattcgatggtgtccgggatctcgacgctctcccttatgcg |
| | actcctgcattaggaaattaatacgactcactata (SEQ ID NO: 94) |
| pHelper(CyCAST)_ | ggggaattgtgagcggataacaattcccctgtagaaataattttgtttaactttaataaggagatat |
| Shuffled-spacer_ | accatggtttccaagcctgaatcccggtctacgggactgaaacaccatctatgtatagctacgat |
| ΔTnsD | ggaatagtaaagggtttccaagcctgaatcccggtctacgggactgaaacgatccgaattcga |
| | gctcggcgcgcctgcaggtcgacaagcttgcggccgcataatgcttaagtcgaacagaaagta |
| | atcgtattgtacacggccgcataatcgaaattaatacgactcactataggggaattgtgagcgga |
| | taacaattccccatcttagtatattagttaagtataagaaggagatatacatatggctaccctactcc |
| | aaaccctcctgttacgaacgttgtcacccgaggcggatccagttctctatgtctacattgagacg |
| | gtactacctgcaatggaacgggaatttggcttgattccagcccttggtggctcggaggaagcac |
| | actttcatctgctgaggcgacggggaaacaaatatgcggcggaaaattccaagcggtacgcca |
| | gtcgctctgatcaaagcctgctggttcatgtgctcaatgccttgctgaccgcctggaatttgttgc |
| | cattcctaagctccacatttgaactatcagatgatgagaaacggctgctctgcctggggctgacc |
| | ctacacgattacaacaagtggtgccagggtgaggaggaagattcgccgattgcatgcgaagta |
| | gcagagattcttgagctttgtcaaacattgggagagcggttgaactttgacggattctgggcaga |
| | gtggcgggagtatttgacagagattgcctaccttgcccaaaacacccagggaaaagttggaac |
| | aaatctacccaaagcgaattggggcagcttcaaaattctagatacccgtcgtctggattcgcccc |
| | tacgatggctactcgcttttggcgatgtcgcagtccatctcagcgatccatctgacatcgcaatga |
| | aaacggggggagatcgcctgcgggaacatctgcgctttctaggtattcgtcgcaagctggtcta |
| | ccatcgcctgcgcaactgtacagggctattaaccaacggaattcataatgcggtaatgcattttg |
| | ctagagaactggattggcaacccatcctcttctttgctcagggtgttgtttatctcgctcctcaggg |
| | tgctggcgttccggatcgcttagaacttcaggaatttctctgggagcaggtcagcaaccgattag |
| | ccaccagcatgttgcggggagaggttggtttcaaacgggatggcaagggactcaaggtggct |
| | ccccaaaccctggaactgttctcccctgctcagttgattcggaacttgcccggtgttgtccaatctt |
| | atgtcggaaacgctaaatctcctgcgactccaaaacgacttgagaagctggaactcagttcaac |
| | agagcgagagtttttggctaaaggtgcagatttaagagcagatcgcattgccgagtttatctttct |
| | ggcgcaaaaagagtttttcggagataaaccagaatttatcacttggatgcttgaaactctggggg |
| | ttcaaactgctatcacttcggagcagacgcagcttcaatccggtggtgtgaactggggatggtat |
| | cacgcagcagcctattacgtcgcgagcaatgccacgctggatttggaagagatttcggagaaa |
| | cttcaggaatttgccgagcagttggcaacctgggcggaggaaaacaatttcttcccagagcatc |
| | gcagcccaacccatgacatctttttcaactatctgactcaatacctggaagttcaggggtgggag |
| | cagcaggagcagtcctttcagcttgaactggcaggctatgttggcgcaaagactaaaactgcca |
| | gacaaccgatttgctccctcagttccggtgaatttgcttcggaagaccagatggattctgttgtcct |
| | gttcaaaccgcagcagtacagcaacaagaatcctctcggtggacggcagatcaagcggggg |
| | atttccaaaatctggtccctggaaatgctgctcaggcaggctctttggtctgcgccagcaggcaa |
| | actagaggaacaacaacccattttcctttacatcttcccggcatacgtttactcgccccaggttgct |
| | gctgctgtccggttactggtgaatgatctgaagcgtgtcaacctctgggaagtccgtaaacactg |
| | gttggagaatggcatggatgctcaggcgttgcgatcgtttccctggctagtcggtgacaaaaac |
| | gattcgggtaactctgctccatccagatactctggtgaagacttgcctttcatggcaatgaactac |
| | accaccaccagaggcaaaacgataactgatgcctgggttgaacctgctttcctgacactggtgc |
| | tgcctttgttgctgggtgtgaaagttgtcgccaccagtagccagattccactctatgaaagcgac |
| | aacgacttttgcgaatctgtcaagctggatggacccgccgatttctgggctttgctgcggctacc |
| | aacttccctgcatctccaggattggattggggggcgtgttcaaaatttagcagaaggcttgaacc |
| | gcttgatggttgcctactgcctgcatctggacagtcgtagcgctccaccagatgcgcgctggag |
| | agccttaaacggcagtgtccgagagatgacaacaaatgttctaaacattttttcacttgcagagg |
| | agggattacgtcgtgatggctctaaacgcgatgcaacagttgaagaaattaaccgctattggaa |
| | atacgcccagctgtgggcagagggagactctgatatgcaaaacaagttgaagattaccaaacg |
| | cttagtcgatgagtaccgccagttttacagagccagtgcgaacgaatccagccatacggttttgc |
| | tgccattttctaaggcactggaacacattctttcggtaccaaatgattgggacgatgaggaaatta |
| | ttgttcaaggggcaggacagttacaggccgcgttagatcggcaggaagtctacaaacgtcccc |
| | tcatgcttgacaaagagattccctttgaaattcgtcggatgaaggagtttgaggcaattcaaacct |
| | tcatgaccacctgcgtcattgacctatttggacaaatgtgtaaaggcgatcgcgcgctcctgcag |
| | gaacatcgcaaccgccttaaatcaggggtcgaatttgcctatcgtcagttagccctgcaagaga |
| | aacaagccaaagccaaccaaaaatctggagaacaatcatgagcattcttgaaaccttaaagcc |
| | agagttccacacagccttccctcgcctcgcctctggcaaatatgtccatttcttcatggtgcgtca |
| | cagccagtcgttccccgtctttcaaaccgatggcgttttgaacactgcccgtactcaggctgggtt |
| | aaatgcaggcgatgaaaaatccagacaggcaatcagtcgcctggtcatgttcaaacggaaaca |
| | ggtgacaccagaacgactcacaggacgggaactgctgcgatcgctgggcattaacggagtag |
| | ttgaaggggaagccaatttctgtgaatacaacggcgaaagatcctgtaaaaaatgccctgattg |
| | cattctctatggttttgcgattggggacagtggctcggaacgttccaaagtctactctgattcagc |
| | cttttccctgagtccttatgaagtttcccatcgcagttttaccttcaatgctccctttgaaggtggaac |
| | catgagtgagaagggtgaaatgcggagtgcgatcaacgaactggatcatgttttgccggaagtt |
| | gcttttccttgcgttgaaacactacgtgaccccacgctggaaggcttcatttatgtaatgggcaac |
| | ctgatccggactcggcgctatggagcgcaggagtcgcgtacagggacaatggcgaatcacat |
| | tattggcgttaccctatgtgatggcgagatcttcagcaatttgcactttacccaagccctctacgat |
| | gccctgaagggtgatttgagtgcgccaattagtgatttatgcagagaggcggcgatcgtggca |
| | gaaaacttgctaaatcaggaacctgtgcggaagatccaagttatttttggagagcagttgaacga |
| | actcctggctgaggtagcgggaatctgccaggatgaaactcgcttgcgaaacactgtgacagc |
| | cttgtaccagcaatcacaagcctatgccgagacctatggtgctgctgctaagaaaggcaaagg |
| | caaatcttaaggtggctgccaatggttatttatcgatgcaatctcacgttgcacgacaacgtattct |
| | tcgccactcgcgagatggggattctctacgaaacagagaagtatctacacaactgggcactca |
| | gctttgctctgtttgaagccacccacatccccaaaccctatcgcttgcagggtgcgatcgctcaa |
| | cgacccggttatctggaagctgacaacgagcaaaaccttttagttctgaatcacgcaggcatcta |
| | tgttttccctgctctaccacttcagtggtcctaccaagtcaataccttcaaagcggctcaagtgcct |
| | tactatggcaaatccaaacagttcggggataagggagctgatcgcaactacccgattaactacg |
| | gacgggcaaaagaactggcagttggcagcacctaccgaacgtatattcttgcccctgaaccaa |
| | tccagatcccccactggatacggttgggtaagtgggcagccaagattcaggtggacgcaaga |
| | cccatacctaactgtggaatccgacaacggtcaggagaatacacctgcgaccatccactaaatc |
| | cgatcgacctgtccggttcaacccgattgctgttatacaaccgcattgtcatgccacccgctagtc |
| | tcgtcagtcagtcgcgagtttctggggactactgggaaatttctaaaccatccaattggactgaat |
| | ttccggactggtcagacctgaaagacatacccaatcaagtttgcttacccagcggagtagcctat |
| | ggagccagtactgccattgccgcatcttaagtccaccgctctgcatatcctggtaattcatttagg |
| | cgttgccgaaagcggagccttgcctgttgaatccggtcgagccgtccatgctcaagttttggact |
| | ggttccgcatggcggatccggcaatttctgaggcaattcacaaaagccaggaatccccgctca |
| | gtctctcaggcctggtcgggaaacgccgtaaagtaggggtgcgggcaggagatgaattttact |
| | tccgaattgggttgttagatgggagtttgattgaaccactgctgagtggtttggagaagtggggc |
| | gacaagcccttttctctggcaaagtgtccctttgttttccgcagtatcaatatgttgccaggaactg |
| | acccctgggttggttcttccgattatgccttgcttacccaaaccccggctactttggataacctagc |
| | tctcaagctcctgtcgccaacaagcttcaagtcgaatgccgggcaaggaatccaaccctttcctt |
| | tgccagagtcagttttcggaaatttacatcgtcgctggaatgtctttgcaccaaaggaattgcagtt |
| | tccaaaaattcaatggagtgggctggtctctgattatgacctcaaaactcaaaagttaaggatgg |
| | aaaactcggttgagatcggcgcagtgggctgggtgcgctatcggtttccagatccagaacaag |
| | cgagaattgcaaccattctggctcactttgccttttttgctggagttgggcgtaagacagcaatgg |
| | ggatgggacaggtggtgttggacaaaaaaacgtagcctaggctgctgccaccgctgagcaat |
| | aactagcataaccccttggggcctctaaacgggtcttgaggggttttttgctgaaacctcaggca |
| | tttgagaagcacacggtcacactgcttccggtagtcaataaaccggtaaaccagcaatagacat |
| | aagcggctatttaacgaccctcgggatctcgacgctctcccttatgcgactcctgcattaggaaa |
| | ttaatacgactcactataggggaattgtgagcggataacaattcccctgtagaaataattttgttta |
| | actttaataaggagatataccatgcttgatgaaaaaagcttcgacaactggtgccaatccgttggt |
| | ctgagccaggcagcacgtgaagttgtagagcgtgtgcgatcctcttcaccctcccgtcgcgtac |
| | agagcggtagaggaaacgtctccggcaattaccctagccgcaaaatgggcgtcacaattcagt |
| | ttgagtcccatcgaaatgagcttgcccgcatctacgaactggagcatgaccccggcgttctgga |
| | atattacgatcaacctcccaaaatcgaacttgattatttgtcaaaaaatgggaggcgtgttcgtact |
| | caatacacacctgatttctttgttatccgtaatgactcagcaggttgggaggagtgtaaaacagag |
| | gatgaccttaagcaattagctgaggacagccctaaccgttaccaacgagctgaggacaatcgc |
| | tggcgatgtccacctgcagaagcctatgctcttccccttgagttgtattttcaggtacggtctagtg |
| | ctgaaattaactggattttccagcaaaactttgtatggctagaagactaccttggtactgaatcactt |
| | actatggatgagtcggttgcagatgcaatcatagccacagtcagagcaaacgagggtatcaca |
| | ctactcgaactgattcaacaattacaaggcacagatgctgatgctatctacatcctgattgcaacc |
| | gaacaaatttatgttgatttgatggctgaacggttagcgaacagcgatcgggcacgggtattttc |
| | cagtccagaaattgctcaagcctttcaactcattacgctggtcgaagcacctctggctaacagttc |
| | tctccatatagttcaggtgggcgttggcacaaccatacactgggatggtgaagtctgggagatt |
| | gttaatacaggctctaccatgacaggattgttgcgatcggacggtaagtttatcgagttgcccaat |
| | tctgcaattgatgaattgattcagaagggcaagattcaatcaatttcagcacaacaagcccctgat |
| | agcaaagcagaagttgaagaaatgcttcgctgtgctcgtccagccgacattaaagaagccaac |
| | cgtcgctacgaaatcattcagccttacctggaaaaggatgcaccagcttgtccaactcgaacaat |
| | tcggcgctggcgtaatcagtattggcaggcagaaaagctttacgggaatggctatgttggtttac |
| | taccaaatcatcagaagaaagggaattatttagttaaggttaatgaagtaactcaagcttttatgctt |
| | gagtttattgagaagcattacgaaaatctcaaacagcgtagtaagcttagagtttatcaggcttttg |
| | tggaggcatgtgaaagccacgaaccgaaactaaaccctccaagccgtactacattcacactag |
| | cgattcagaaacgagcaggacatcagcaaaccttgaaacgtgaaggacgaagagctgccatt |
| | cagaaggaggagttttactgggaactggagctaactactcctcgacacggcgatcgccccttc |
| | gagatcgttcatattgatcacactcaactcgatattgagcttatcagttctttgaactccctggccca |
| | atgcaaccctacatctgttgatgccacttacaatttgggtcgtccttgggcaacgttcatggttgat |
| | gcttacagccgccgtttgctagcagtttacataacctatgaagaacccagctatcgttcctgcatg |
| | atggtgctccgtatttgcgtacagcgatttaagcgttttcctcagacgatcgtggtagataatggtg |
| | cagaatttcacagccattactttgaacaactactggcaacatatcaatgcacaaagaagcacag |
| | gccacctgcaaaagctcgctttggtgcagttgttgaacgattatttggcactgcaaataagcaatt |
| | aattcatgagttgcagggaaatacccaaattactcgcaagcatcgccaagttactcaatctgttca |
| | tccccaaaaattggctctttggacgttaggcgatctctacgaatcactatgtgaatgggcttacaa |
| | agtttatgctgaccgccagcaccctgcgctagggcaaagccctaatgctgcattcgctcaaggg |
| | ctggcgttgggaggtagtcgcatccatcgccgagtagagtatgaccaagtcttccgtatcttgac |
| | attgcccgcaccggaaagaggacaacgcaaagttcagccaggacaagggataaaacttagc |
| | aatatctactactggtcaaatgcctttcgagacccagaaattgaacaatcgatggttgaagttcgtt |
| | atgatccctttgatgccagcattgcctatgcactggtgcgaaaacaatgggtccggtgtatttcct |
| | cctactatcaacagtttcaaaatcgttcagaaaaggaaattcgtttaataactgctgagttgattaa |
| | gcaaaagcgtgaccagggaagagatacaaatgttacggataaagaattggcgcagtttttaag |
| | ctctacagaaatgaaagaaggcaaattcttggagcaacgcttgcggactacagaaaacagggt |
| | agttattcagaatagtacagctacagaagacgatccccccatcactaattctcagaattcttacga |
| | gccatcgcttatgctgccaagtgaggatgagttggatgatcaggaagactggttaaataccggc |
| | aaagctgaggcagaattagaattctatggagagtactagcgatgcaacctcaaataagcttccc |
| | aaaagagttactgcttcaaccaattcctgatcgaattgcctatttcaaagattacacaatggcacat |
| | ccgaagcttatagaagcagaccggaagttaatgcatgctattcgtgaacctggaggagctgctc |
| | ttatctttgtctttggtcctaccggagttggaaagtctactctattgaaacgaattactcaaaagctg |
| | cttaaagaagcattgtctttgatggagactgacaaaggctatattcctattgcgggggtagagata |
| | aaaactccagaggatagtaactttgattggaacgatttttatgttcgtgctcttatggcacttaatga |
| | gccaatgatcgagaaaaaaatcaaccgtacaggtgcaaaactaaaattacggttggcacttgaa |
| | tctgcccttcgtaatcgccgtcctgatgctttttacatagacgaagctcaaaattttggtaaggtag |
| | ccagtgggcgaaaattgcaagatcaaacagattgcattaaatctcttgcaaatctcgctcaaact |
| | cggtttatcttatgtgggatttatgaacttttaccactacgaaatctaagtgggcagctatgccgcc |
| | gtagccatagtattcactttccacgttattcggcagattctgagcaggatctaaaggcctttaaaag |
| | tgcgttattaacactacaaaatcaactccctcttcccgaaccacctgatttagtggcgcattggga |
| | attttgttatgagagaactatcggctgtattggtattttgaaagatttgctccttcggactctaagcg |
| | cgattttagtacgggatggagacaaagttttgacattgaagcccaaggatttagaacaacgtgca |
| | tggtctttagaagaatgtttggttatgctgagagaggcaaaggaaggagagcaacaacttactg |
| | acaaatcgggcttacatgaggaattacggacagctttagggtttaatgcagctacgtccaagca |
| | gtctgccaaatcatccaagtcaacatcaagcaaaaaagcaggcagtgttggaaagccttcacct |
| | cgtcgtcgttcagttggaatagatcaagatgccagctaacgatctagaaatctatgaatcttggaa |
| | tttagatctccctttactacctaatcgaagtaggctctaccacttgaaaccgattgcaattggagat |
| | gcttacgttgaaggattaatcagctatgtttgccgtttggctgaagcccactgtgtttctccaggag |
| | tccttactaaacaggaaatattgcccagtctaagaaaagtttataatgtgggttcaagagaagttc |
| | atgaagtacgaagagatgaaagtttagtttctatttcctcctttcctaagccagaaagcaataaaaa |
| | tcctaatgaaccaggcttctgggcatggcaatatattgaaggattgcagcctttaactcttagaga |
| | aaaccttgaagcattaactattccaaattggaaaaagcaaattccacaggtgacaggaattgag |
| | gttgcgcgtgagttgagagcttggtgccctgaatgctttcaacaatggcgcaagactaatcagat |
| | aatttatgaaccgatgctttggtcgatcgctttagttaccgtatgtccttatcattaccttccgctaca |
| | aactcgctgtccttattgtaaaaaaactcaacggcctatcacaggaaaaatgcaggtagctcgct |
| | gttccgaatgtttagagtggcttggcattcaaccaagcgaagattcagagttagaaatcaaaatta |
| | aatctgaagtcgaatggcaccattgggttgcggagaaagtaatggagattttggtatttaaagatt |
| | atactttaactgcaaatgctataacaatagcagctccaattacgaaagaaaaatattttcaactaga |
| | atcgagcttaataaattgtccaattaagtatgctcaacagcagttcttaaagctcttcttcaattaac |
| | acaaaaacgcccagttttaacttaagtcgaacagaaagtaatcgtattgtacacggccgcataat |
| | cgaaattaatacgactcactataggggaattgtgagcggataacaattccccatcttagtatatta |
| | gttaagtataagaaggagatatacatatggcagatctcaattggatatcggccggccacgcgat |
| | cgctgacgtcggtaccctcgagtctggtaaagaaaccgctgctgcgaaatttgaacgccagca |
| | catggactcgtctactagcgcagcttaattaacctaggctgctgccaccgctgagcaataactag |
| | cataaccccttggggcctctaaacgggtcttgaggggttttttgctgaaacctcaggcatttgaga |
| | agcacacggtcacactgcttccggtagtgccctgaaccgacgaccgggtcatcgtggccggat |
| | cttgcggcccctcggcttgaacgaattgttagacattatttgccgactaccttggtgatctcgcctt |
| | tcacgtagtggacaaattcttccaactgatctgcgcgcgaggccaagcgatcttcttcttgtccaa |
| | gataagcctgtctagcttcaagtatgacgggctgatactgggccggcaggcgctccattgccca |
| | gtcggcagcgacatccttcggcgcgattttgccggttactgcgctgtaccaaatgcgggacaac |
| | gtaagcactacatttcgctcatcgccagcccagtcgggcggcgagttccatagcgttaaggtttc |
| | atttagcgcctcaaatagatcctgttcaggaaccggatcaaagagttcctccgccgctggaccta |
| | ccaaggcaacgctatgttctcttgcttttgtcagcaagatagccagatcaatgtcgatcgtggctg |
| | gctcgaagatacctgcaagaatgtcattgcgctgccattctccaaattgcagttcgcgcttagctg |
| | gataacgccacggaatgatgtcgtcgtgcacaacaatggtgacttctacagcgcggagaatctc |
| | gctctctccaggggaagccgaagtttccaaaaggtcgttgatcaaagctcgccgcgttgtttcat |
| | caagccttacggtcaccgtaaccagcaaatcaatatcactgtgtggcttcaggccgccatccact |
| | gcggagccgtacaaatgtacggccagcaacgtcggttcgagatggcgctcgatgacgccaac |
| | tacctctgatagttgagtcgatacttcggcgatcaccgcttccctcatactcttcctttttcaatatta |
| | ttgaagcatttatcagggttattgtctcatgagcggatacatatttgaatgtatttagaaaaataaaca |
| | aatagctagctcactcggtcgctacgctccgggcgtgagactgcggcgggcgctgcggacac |
| | atacaaagttacccacagattccgtggataagcaggggactaacatgtgaggcaaaacagcag |
| | ggccgcgccggtggcgtttttccataggctccgccctcctgccagagttcacataaacagacgc |
| | ttttccggtgcatctgtgggagccgtgaggctcaaccatgaatctgacagtacgggcgaaaccc |
| | gacaggacttaaagatccccaccgtttccgggggtcgctccctcttgcgctctcctgttccgac |
| | cctgccgtttaccggatacctgttccgcctttctcccttacgggaagtgtggcgctttctcatagct |
| | cacacactggtatctcggctcggtgtaggtcgttcgctccaagctgggctgtaagcaagaactc |
| | cccgttcagcccgactgctgcgccttatccggtaactgttcacttgagtccaacccggaaaagc |
| | acggtaaaacgccactggcagcagccattggtaactgggagttcgcagaggatttgtttagcta |
| | aacacgcggttgctcttgaagtgtgcgccaaagtccggctacactggaaggacagatttggttg |
| | ctgtgctctgcgaaagccagttaccacggttaagcagttccccaactgacttaaccttcgatcaa |
| | accacctccccaggtggttttttcgtttacagggcaaaagattacgcgcagaaaaaaaggatctc |
| | aagaagatcctttgatcttttctactgaaccgctctagatttcagtgcaatttatctcttcaaatgtag |
| | cacctgaagtcagccccatacgatataagttgtaattctcatgttagtcatgccccgcgcccacc |
| | ggaaggagctgactgggttgaaggctctcaagggcatcggtcgagatcccggtgcctaatga |
| | gtgagctaacttacattaattgcgttgcgctcactgcccgctttccagtcgggaaacctgtcgtgc |
| | cagctgcattaatgaatcggccaacgcgcggggagaggcggtttgcgtattgggcgccaggg |
| | tggtttttcttttcaccagtgagacgggcaacagctgattgcccttcaccgcctggccctgagag |
| | agttgcagcaagcggtccacgctggtttgccccagcaggcgaaaatcctgtttgatggtggtta |
| | acggcgggatataacatgagctgtcttcggtatcgtcgtatcccactaccgagatgtccgcacc |
| | aacgcgcagcccggactcggtaatggcgcgcattgcgcccagcgccatctgatcgttggcaa |
| | ccagcatcgcagtgggaacgatgccctcattcagcatttgcatggtttgttgaaaaccggacatg |
| | gcactccagtcgccttcccgttccgctatcggctgaatttgattgcgagtgagatatttatgccag |
| | ccagccagacgcagacgcgccgagacagaacttaatgggcccgctaacagcgcgatttgctg |
| | gtgacccaatgcgaccagatgctccacgcccagtcgcgtaccgtcttcatgggagaaaataat |
| | actgttgatgggtgtctggtcagagacatcaagaaataacgccggaacattagtgcaggcagct |
| | tccacagcaatggcatcctggtcatccagcggatagttaatgatcagcccactgacgcgttgcg |
| | cgagaagattgtgcaccgccgctttacaggcttcgacgccgcttcgttctaccatcgacaccac |
| | cacgctggcacccagttgatcggcgcgagatttaatcgccgcgacaatttgcgacggcgcgtg |
| | cagggccagactggaggtggcaacgccaatcagcaacgactgtttgcccgccagttgttgtgc |
| | cacgcggttgggaatgtaattcagctccgccatcgccgcttccactttttcccgcgttttcgcaga |
| | aacgtggctggcctggttcaccacgcgggaaacggtctgataagagacaccggcatactctgc |
| | gacatcgtataacgttactggtttcacattcaccaccctgaattgactctcttccgggcgctatcat |
| | gccataccgcgaaaggttttgcgccattcgatggtgtccgggatctcgacgctctcccttatgcg |
| | actcctgcattaggaaattaatacgactcactata (SEQ ID NO: 95) |
| pHelper(CyCAST)_PSP | ggggaattgtgagcggataacaattcccctgtagaaataattttgtttaactttaataaggagatat |
| 1_ΔTniQΔTnsD | accatggtttccaagcctgaatcccggtctacgggactgaaacgagaagtcatttaataaggcc |
| | actgttaaacgtaggtttccaagcctgaatcccggtctacgggactgaaacgatccgaattcga |
| | gctcggcgcgcctgcaggtcgacaagcttgcggccgcataatgcttaagtcgaacagaaagta |
| | atcgtattgtacacggccgcataatcgaaattaatacgactcactataggggaattgtgagcgga |
| | taacaattccccatcttagtatattagttaagtataagaaggagatatacatatggctaccctactcc |
| | aaaccctcctgttacgaacgttgtcacccgaggcggatccagttctctatgtctacattgagacg |
| | gtactacctgcaatggaacgggaatttggcttgattccagcccttggtggctcggaggaagcac |
| | actttcatctgctgaggcgacggggaaacaaatatgcggcggaaaattccaagcggtacgcca |
| | gtcgctctgatcaaagcctgctggttcatgtgctcaatgccttgctgaccgcctggaatttgttgc |
| | cattcctaagctccacatttgaactatcagatgatgagaaacggctgctctgcctggggctgacc |
| | ctacacgattacaacaagtggtgccagggtgaggaggaagattcgccgattgcatgcgaagta |
| | gcagagattcttgagctttgtcaaacattgggagagcggttgaactttgacggattctgggcaga |
| | gtggcgggagtatttgacagagattgcctaccttgcccaaaacacccagggaaaagttggaac |
| | aaatctacccaaagcgaattggggcagcttcaaaattctagatacccgtcgtctggattcgcccc |
| | tacgatggctactcgcttttggcgatgtcgcagtccatctcagcgatccatctgacatcgcaatga |
| | aaacggggggagatcgcctgcgggaacatctgcgctttctaggtattcgtcgcaagctggtcta |
| | ccatcgcctgcgcaactgtacagggctattaaccaacggaattcataatgcggtaatgcattttg |
| | ctagagaactggattggcaacccatcctcttctttgctcagggtgttgtttatctcgctcctcaggg |
| | tgctggcgttccggatcgcttagaacttcaggaatttctctgggagcaggtcagcaaccgattag |
| | ccaccagcatgttgcggggagaggttggtttcaaacgggatggcaagggactcaaggtggct |
| | ccccaaaccctggaactgttctcccctgctcagttgattcggaacttgcccggtgttgtccaatctt |
| | atgtcggaaacgctaaatctcctgcgactccaaaacgacttgagaagctggaactcagttcaac |
| | agagcgagagtttttggctaaaggtgcagatttaagagcagatcgcattgccgagtttatctttct |
| | ggcgcaaaaagagtttttcggagataaaccagaatttatcacttggatgcttgaaactctggggg |
| | ttcaaactgctatcacttcggagcagacgcagcttcaatccggtggtgtgaactggggatggtat |
| | cacgcagcagcctattacgtcgcgagcaatgccacgctggatttggaagagatttcggagaaa |
| | cttcaggaatttgccgagcagttggcaacctgggcggaggaaaacaatttcttcccagagcatc |
| | gcagcccaacccatgacatctttttcaactatctgactcaatacctggaagttcaggggtgggag |
| | cagcaggagcagtcctttcagcttgaactggcaggctatgttggcgcaaagactaaaactgcca |
| | gacaaccgatttgctccctcagttccggtgaatttgcttcggaagaccagatggattctgttgtcct |
| | gttcaaaccgcagcagtacagcaacaagaatcctctcggtggacggcagatcaagcggggg |
| | atttccaaaatctggtccctggaaatgctgctcaggcaggctctttggtctgcgccagcaggcaa |
| | actagaggaacaacaacccattttcctttacatcttcccggcatacgtttactcgccccaggttgct |
| | gctgctgtccggttactggtgaatgatctgaagcgtgtcaacctctgggaagtccgtaaacactg |
| | gttggagaatggcatggatgctcaggcgttgcgatcgtttccctggctagtcggtgacaaaaac |
| | gattcgggtaactctgctccatccagatactctggtgaagacttgcctttcatggcaatgaactac |
| | accaccaccagaggcaaaacgataactgatgcctgggttgaacctgctttcctgacactggtgc |
| | tgcctttgttgctgggtgtgaaagttgtcgccaccagtagccagattccactctatgaaagcgac |
| | aacgacttttgcgaatctgtcaagctggatggacccgccgatttctgggctttgctgcggctacc |
| | aacttccctgcatctccaggattggattggggggcgtgttcaaaatttagcagaaggcttgaacc |
| | gcttgatggttgcctactgcctgcatctggacagtcgtagcgctccaccagatgcgcgctggag |
| | agccttaaacggcagtgtccgagagatgacaacaaatgttctaaacattttttcacttgcagagg |
| | agggattacgtcgtgatggctctaaacgcgatgcaacagttgaagaaattaaccgctattggaa |
| | atacgcccagctgtgggcagagggagactctgatatgcaaaacaagttgaagattaccaaacg |
| | cttagtcgatgagtaccgccagttttacagagccagtgcgaacgaatccagccatacggttttgc |
| | tgccattttctaaggcactggaacacattctttcggtaccaaatgattgggacgatgaggaaatta |
| | ttgttcaaggggcaggacagttacaggccgcgttagatcggcaggaagtctacaaacgtcccc |
| | tcatgcttgacaaagagattccctttgaaattcgtcggatgaaggagtttgaggcaattcaaacct |
| | tcatgaccacctgcgtcattgacctatttggacaaatgtgtaaaggcgatcgcgcgctcctgcag |
| | gaacatcgcaaccgccttaaatcaggggtcgaatttgcctatcgtcagttagccctgcaagaga |
| | aacaagccaaagccaaccaaaaatctggagaacaatcatgagcattcttgaaaccttaaagcc |
| | agagttccacacagccttccctcgcctcgcctctggcaaatatgtccatttcttcatggtgcgtca |
| | cagccagtcgttccccgtctttcaaaccgatggcgttttgaacactgcccgtactcaggctgggtt |
| | aaatgcaggcgatgaaaaatccagacaggcaatcagtcgcctggtcatgttcaaacggaaaca |
| | ggtgacaccagaacgactcacaggacgggaactgctgcgatcgctgggcattaacggagtag |
| | ttgaaggggaagccaatttctgtgaatacaacggcgaaagatcctgtaaaaaatgccctgattg |
| | cattctctatggttttgcgattggggacagtggctcggaacgttccaaagtctactctgattcagc |
| | cttttccctgagtccttatgaagtttcccatcgcagttttaccttcaatgctccctttgaaggtggaac |
| | catgagtgagaagggtgaaatgcggagtgcgatcaacgaactggatcatgttttgccggaagtt |
| | gcttttccttgcgttgaaacactacgtgaccccacgctggaaggcttcatttatgtaatgggcaac |
| | ctgatccggactcggcgctatggagcgcaggagtcgcgtacagggacaatggcgaatcacat |
| | tattggcgttaccctatgtgatggcgagatcttcagcaatttgcactttacccaagccctctacgat |
| | gccctgaagggtgatttgagtgcgccaattagtgatttatgcagagaggcggcgatcgtggca |
| | gaaaacttgctaaatcaggaacctgtgcggaagatccaagttatttttggagagcagttgaacga |
| | actcctggctgaggtagcgggaatctgccaggatgaaactcgcttgcgaaacactgtgacagc |
| | cttgtaccagcaatcacaagcctatgccgagacctatggtgctgctgctaagaaaggcaaagg |
| | caaatcttaaggtggctgccaatggttatttatcgatgcaatctcacgttgcacgacaacgtattct |
| | tcgccactcgcgagatggggattctctacgaaacagagaagtatctacacaactgggcactca |
| | gctttgctctgtttgaagccacccacatccccaaaccctatcgcttgcagggtgcgatcgctcaa |
| | cgacccggttatctggaagctgacaacgagcaaaaccttttagttctgaatcacgcaggcatcta |
| | tgttttccctgctctaccacttcagtggtcctaccaagtcaataccttcaaagcggctcaagtgcct |
| | tactatggcaaatccaaacagttcggggataagggagctgatcgcaactacccgattaactacg |
| | gacgggcaaaagaactggcagttggcagcacctaccgaacgtatattcttgcccctgaaccaa |
| | tccagatcccccactggatacggttgggtaagtgggcagccaagattcaggtggacgcaaga |
| | cccatacctaactgtggaatccgacaacggtcaggagaatacacctgcgaccatccactaaatc |
| | cgatcgacctgtccggttcaacccgattgctgttatacaaccgcattgtcatgccacccgctagtc |
| | tcgtcagtcagtcgcgagtttctggggactactgggaaatttctaaaccatccaattggactgaat |
| | ttccggactggtcagacctgaaagacatacccaatcaagtttgcttacccagcggagtagcctat |
| | ggagccagtactgccattgccgcatcttaagtccaccgctctgcatatcctggtaattcatttagg |
| | cgttgccgaaagcggagccttgcctgttgaatccggtcgagccgtccatgctcaagttttggact |
| | ggttccgcatggcggatccggcaatttctgaggcaattcacaaaagccaggaatccccgctca |
| | gtctctcaggcctggtcgggaaacgccgtaaagtaggggtgcgggcaggagatgaattttact |
| | tccgaattgggttgttagatgggagtttgattgaaccactgctgagtggtttggagaagtggggc |
| | gacaagcccttttctctggcaaagtgtccctttgttttccgcagtatcaatatgttgccaggaactg |
| | acccctgggttggttcttccgattatgccttgcttacccaaaccccggctactttggataacctagc |
| | tctcaagctcctgtcgccaacaagcttcaagtcgaatgccgggcaaggaatccaaccctttcctt |
| | tgccagagtcagttttcggaaatttacatcgtcgctggaatgtctttgcaccaaaggaattgcagtt |
| | tccaaaaattcaatggagtgggctggtctctgattatgacctcaaaactcaaaagttaaggatgg |
| | aaaactcggttgagatcggcgcagtgggctgggtgcgctatcggtttccagatccagaacaag |
| | cgagaattgcaaccattctggctcactttgccttttttgctggagttgggcgtaagacagcaatgg |
| | ggatgggacaggtggtgttggacaaaaaaacgtagcctaggctgctgccaccgctgagcaat |
| | aactagcataaccccttggggcctctaaacgggtcttgaggggttttttgctgaaacctcaggca |
| | tttgagaagcacacggtcacactgcttccggtagtcaataaaccggtaaaccagcaatagacat |
| | aagcggctatttaacgaccctcgggatctcgacgctctcccttatgcgactcctgcattaggaaa |
| | ttaatacgactcactataggggaattgtgagcggataacaattcccctgtagaaataattttgttta |
| | actttaataaggagatataccatgcttgatgaaaaaagcttcgacaactggtgccaatccgttggt |
| | ctgagccaggcagcacgtgaagttgtagagcgtgtgcgatcctcttcaccctcccgtcgcgtac |
| | agagcggtagaggaaacgtctccggcaattaccctagccgcaaaatgggcgtcacaattcagt |
| | ttgagtcccatcgaaatgagcttgcccgcatctacgaactggagcatgaccccggcgttctgga |
| | atattacgatcaacctcccaaaatcgaacttgattatttgtcaaaaaatgggaggcgtgttcgtact |
| | caatacacacctgatttctttgttatccgtaatgactcagcaggttgggaggagtgtaaaacagag |
| | gatgaccttaagcaattagctgaggacagccctaaccgttaccaacgagctgaggacaatcgc |
| | tggcgatgtccacctgcagaagcctatgctcttccccttgagttgtattttcaggtacggtctagtg |
| | ctgaaattaactggattttccagcaaaactttgtatggctagaagactaccttggtactgaatcactt |
| | actatggatgagtcggttgcagatgcaatcatagccacagtcagagcaaacgagggtatcaca |
| | ctactcgaactgattcaacaattacaaggcacagatgctgatgctatctacatcctgattgcaacc |
| | gaacaaatttatgttgatttgatggctgaacggttagcgaacagcgatcgggcacgggtattttc |
| | cagtccagaaattgctcaagcctttcaactcattacgctggtcgaagcacctctggctaacagttc |
| | tctccatatagttcaggtgggcgttggcacaaccatacactgggatggtgaagtctgggagatt |
| | gttaatacaggctctaccatgacaggattgttgcgatcggacggtaagtttatcgagttgcccaat |
| | tctgcaattgatgaattgattcagaagggcaagattcaatcaatttcagcacaacaagcccctgat |
| | agcaaagcagaagttgaagaaatgcttcgctgtgctcgtccagccgacattaaagaagccaac |
| | cgtcgctacgaaatcattcagccttacctggaaaaggatgcaccagcttgtccaactcgaacaat |
| | tcggcgctggcgtaatcagtattggcaggcagaaaagctttacgggaatggctatgttggtttac |
| | taccaaatcatcagaagaaagggaattatttagttaaggttaatgaagtaactcaagcttttatgctt |
| | gagtttattgagaagcattacgaaaatctcaaacagcgtagtaagcttagagtttatcaggcttttg |
| | tggaggcatgtgaaagccacgaaccgaaactaaaccctccaagccgtactacattcacactag |
| | cgattcagaaacgagcaggacatcagcaaaccttgaaacgtgaaggacgaagagctgccatt |
| | cagaaggaggagttttactgggaactggagctaactactcctcgacacggcgatcgccccttc |
| | gagatcgttcatattgatcacactcaactcgatattgagcttatcagttctttgaactccctggccca |
| | atgcaaccctacatctgttgatgccacttacaatttgggtcgtccttgggcaacgttcatggttgat |
| | gcttacagccgccgtttgctagcagtttacataacctatgaagaacccagctatcgttcctgcatg |
| | atggtgctccgtatttgcgtacagcgatttaagcgttttcctcagacgatcgtggtagataatggtg |
| | cagaatttcacagccattactttgaacaactactggcaacatatcaatgcacaaagaagcacag |
| | gccacctgcaaaagctcgctttggtgcagttgttgaacgattatttggcactgcaaataagcaatt |
| | aattcatgagttgcagggaaatacccaaattactcgcaagcatcgccaagttactcaatctgttca |
| | tccccaaaaattggctctttggacgttaggcgatctctacgaatcactatgtgaatgggcttacaa |
| | agtttatgctgaccgccagcaccctgcgctagggcaaagccctaatgctgcattcgctcaaggg |
| | ctggcgttgggaggtagtcgcatccatcgccgagtagagtatgaccaagtcttccgtatcttgac |
| | attgcccgcaccggaaagaggacaacgcaaagttcagccaggacaagggataaaacttagc |
| | aatatctactactggtcaaatgcctttcgagacccagaaattgaacaatcgatggttgaagttcgtt |
| | atgatccctttgatgccagcattgcctatgcactggtgcgaaaacaatgggtccggtgtatttcct |
| | cctactatcaacagtttcaaaatcgttcagaaaaggaaattcgtttaataactgctgagttgattaa |
| | gcaaaagcgtgaccagggaagagatacaaatgttacggataaagaattggcgcagtttttaag |
| | ctctacagaaatgaaagaaggcaaattcttggagcaacgcttgcggactacagaaaacagggt |
| | agttattcagaatagtacagctacagaagacgatccccccatcactaattctcagaattcttacga |
| | gccatcgcttatgctgccaagtgaggatgagttggatgatcaggaagactggttaaataccggc |
| | aaagctgaggcagaattagaattctatggagagtactagcgatgcaacctcaaataagcttccc |
| | aaaagagttactgcttcaaccaattcctgatcgaattgcctatttcaaagattacacaatggcacat |
| | ccgaagcttatagaagcagaccggaagttaatgcatgctattcgtgaacctggaggagctgctc |
| | ttatctttgtctttggtcctaccggagttggaaagtctactctattgaaacgaattactcaaaagctg |
| | cttaaagaagcattgtctttgatggagactgacaaaggctatattcctattgcgggggtagagata |
| | aaaactccagaggatagtaactttgattggaacgatttttatgttcgtgctcttatggcacttaatga |
| | gccaatgatcgagaaaaaaatcaaccgtacaggtgcaaaactaaaattacggttggcacttgaa |
| | tctgcccttcgtaatcgccgtcctgatgctttttacatagacgaagctcaaaattttggtaaggtag |
| | ccagtgggcgaaaattgcaagatcaaacagattgcattaaatctcttgcaaatctcgctcaaact |
| | cggtttatcttatgtgggatttatgaacttttaccactacgaaatctaagtgggcagctatgccgcc |
| | gtagccatagtattcactttccacgttattcggcagattctgagcaggatctaaaggcctttaaaag |
| | tgcgttattaacactacaaaatcaactccctcttcccgaaccacctgatttagtggcgcattggga |
| | attttgttatgagagaactatcggctgtattggtattttgaaagatttgctccttcggactctaagcg |
| | cgattttagtacgggatggagacaaagttttgacattgaagcccaaggatttagaacaacgtgca |
| | tggtctttagaagaatgtttggttatgctgagagaggcaaaggaaggagagcaacaacttactg |
| | acaaatcgggcttacatgaggaattacggacagctttagggtttaatgcagctacgtccaagca |
| | gtctgccaaatcatccaagtcaacatcaagcaaaaaagcaggcagtgttggaaagccttcacct |
| | cgtcgtcgttcagttggaatagatcaagatgccagctaatagcagctccaattacgaaagaaaa |
| | atattttcaactagaatcgagcttaataaattgtccaattaagtatgctcaacagcagttcttaaagc |
| | tcttcttcaattaacacaaaaacgcccagttttaacttaagtcgaacagaaagtaatcgtattgtac |
| | acggccgcataatcgaaattaatacgactcactataggggaattgtgagcggataacaattccc |
| | catcttagtatattagttaagtataagaaggagatatacatatggcagatctcaattggatatcggc |
| | cggccacgcgatcgctgacgtcggtaccctcgagtctggtaaagaaaccgctgctgcgaaatt |
| | tgaacgccagcacatggactcgtctactagcgcagcttaattaacctaggctgctgccaccgct |
| | gagcaataactagcataaccccttggggcctctaaacgggtcttgaggggttttttgctgaaacc |
| | tcaggcatttgagaagcacacggtcacactgcttccggtagtgccctgaaccgacgaccgggt |
| | catcgtggccggatcttgcggcccctcggcttgaacgaattgttagacattatttgccgactacct |
| | tggtgatctcgcctttcacgtagtggacaaattcttccaactgatctgcgcgcgaggccaagcga |
| | tcttcttcttgtccaagataagcctgtctagcttcaagtatgacgggctgatactgggccggcagg |
| | cgctccattgcccagtcggcagcgacatccttcggcgcgattttgccggttactgcgctgtacca |
| | aatgcgggacaacgtaagcactacatttcgctcatcgccagcccagtcgggcggcgagttcca |
| | tagcgttaaggtttcatttagcgcctcaaatagatcctgttcaggaaccggatcaaagagttcctc |
| | cgccgctggacctaccaaggcaacgctatgttctcttgcttttgtcagcaagatagccagatcaa |
| | tgtcgatcgtggctggctcgaagatacctgcaagaatgtcattgcgctgccattctccaaattgca |
| | gttcgcgcttagctggataacgccacggaatgatgtcgtcgtgcacaacaatggtgacttctaca |
| | gcgcggagaatctcgctctctccaggggaagccgaagtttccaaaaggtcgttgatcaaagct |
| | cgccgcgttgtttcatcaagccttacggtcaccgtaaccagcaaatcaatatcactgtgtggcttc |
| | aggccgccatccactgcggagccgtacaaatgtacggccagcaacgtcggttcgagatggcg |
| | ctcgatgacgccaactacctctgatagttgagtcgatacttcggcgatcaccgcttccctcatact |
| | cttcctttttcaatattattgaagcatttatcagggttattgtctcatgagcggatacatatttgaatg |
| | tatttagaaaaataaacaaatagctagctcactcggtcgctacgctccgggcgtgagactgcggc |
| | gggcgctgcggacacatacaaagttacccacagattccgtggataagcaggggactaacatgt |
| | gaggcaaaacagcagggccgcgccggtggcgtttttccataggctccgccctcctgccagag |
| | ttcacataaacagacgcttttccggtgcatctgtgggagccgtgaggctcaaccatgaatctgac |
| | agtacgggcgaaacccgacaggacttaaagatccccaccgtttccgggggtcgctccctctt |
| | gcgctctcctgttccgaccctgccgtttaccggatacctgttccgcctttctcccttacgggaagt |
| | gtggcgctttctcatagctcacacactggtatctcggctcggtgtaggtcgttcgctccaagctg |
| | ggctgtaagcaagaactccccgttcagcccgactgctgcgccttatccggtaactgttcacttga |
| | gtccaacccggaaaagcacggtaaaacgccactggcagcagccattggtaactgggagttcg |
| | cagaggatttgtttagctaaacacgcggttgctcttgaagtgtgcgccaaagtccggctacactg |
| | gaaggacagatttggttgctgtgctctgcgaaagccagttaccacggttaagcagttccccaact |
| | gacttaaccttcgatcaaaccacctccccaggtggttttttcgtttacagggcaaaagattacgcg |
| | cagaaaaaaaggatctcaagaagatcctttgatcttttctactgaaccgctctagatttcagtgcaa |
| | tttatctcttcaaatgtagcacctgaagtcagccccatacgatataagttgtaattctcatgttagtca |
| | tgccccgcgcccaccggaaggagctgactgggttgaaggctctcaagggcatcggtcgagat |
| | cccggtgcctaatgagtgagctaacttacattaattgcgttgcgctcactgcccgctttccagtcg |
| | ggaaacctgtcgtgccagctgcattaatgaatcggccaacgcgcggggagaggcggtttgcg |
| | tattgggcgccagggtggtttttcttttcaccagtgagacgggcaacagctgattgcccttcacc |
| | gcctggccctgagagagttgcagcaagcggtccacgctggtttgccccagcaggcgaaaatc |
| | ctgtttgatggtggttaacggcgggatataacatgagctgtcttcggtatcgtcgtatcccactac |
| | cgagatgtccgcaccaacgcgcagcccggactcggtaatggcgcgcattgcgcccagcgcc |
| | atctgatcgttggcaaccagcatcgcagtgggaacgatgccctcattcagcatttgcatggtttgt |
| | tgaaaaccggacatggcactccagtcgccttcccgttccgctatcggctgaatttgattgcgagt |
| | gagatatttatgccagccagccagacgcagacgcgccgagacagaacttaatgggcccgcta |
| | acagcgcgatttgctggtgacccaatgcgaccagatgctccacgcccagtcgcgtaccgtcttc |
| | atgggagaaaataatactgttgatgggtgtctggtcagagacatcaagaaataacgccggaac |
| | attagtgcaggcagcttccacagcaatggcatcctggtcatccagcggatagttaatgatcagc |
| | ccactgacgcgttgcgcgagaagattgtgcaccgccgctttacaggcttcgacgccgcttcgtt |
| | ctaccatcgacaccaccacgctggcacccagttgatcggcgcgagatttaatcgccgcgacaa |
| | tttgcgacggcgcgtgcagggccagactggaggtggcaacgccaatcagcaacgactgtttg |
| | cccgccagttgttgtgccacgcggttgggaatgtaattcagctccgccatcgccgcttccactttt |
| | tcccgcgttttcgcagaaacgtggctggcctggttcaccacgcgggaaacggtctgataagag |
| | acaccggcatactctgcgacatcgtataacgttactggtttcacattcaccaccctgaattgactct |
| | cttccgggcgctatcatgccataccgcgaaaggttttgcgccattcgatggtgtccgggatctcg |
| | acgctctcccttatgcgactcctgcattaggaaattaatacgactcactata (SEQ ID NO: |
| | 96) |
| pHelper(CyCAST)_ | ggggaattgtgagcggataacaattcccctgtagaaataattttgtttaactttaataaggagatat |
| Shuffled- | accatggtttccaagcctgaatcccggtctacgggactgaaacaccatctatgtatagctacgat |
| spacer_ΔTniQΔTnsD | ggaatagtaaagggtttccaagcctgaatcccggtctacgggactgaaacgatccgaattcga |
| | gctcggcgcgcctgcaggtcgacaagcttgcggccgcataatgcttaagtcgaacagaaagta |
| | atcgtattgtacacggccgcataatcgaaattaatacgactcactataggggaattgtgagcgga |
| | taacaattccccatcttagtatattagttaagtataagaaggagatatacatatggctaccctactcc |
| | aaaccctcctgttacgaacgttgtcacccgaggcggatccagttctctatgtctacattgagacg |
| | gtactacctgcaatggaacgggaatttggcttgattccagcccttggtggctcggaggaagcac |
| | actttcatctgctgaggcgacggggaaacaaatatgcggcggaaaattccaagcggtacgcca |
| | gtcgctctgatcaaagcctgctggttcatgtgctcaatgccttgctgaccgcctggaatttgttgc |
| | cattcctaagctccacatttgaactatcagatgatgagaaacggctgctctgcctggggctgacc |
| | ctacacgattacaacaagtggtgccagggtgaggaggaagattcgccgattgcatgcgaagta |
| | gcagagattcttgagctttgtcaaacattgggagagcggttgaactttgacggattctgggcaga |
| | gtggcgggagtatttgacagagattgcctaccttgcccaaaacacccagggaaaagttggaac |
| | aaatctacccaaagcgaattggggcagcttcaaaattctagatacccgtcgtctggattcgcccc |
| | tacgatggctactcgcttttggcgatgtcgcagtccatctcagcgatccatctgacatcgcaatga |
| | aaacggggggagatcgcctgcgggaacatctgcgctttctaggtattcgtcgcaagctggtcta |
| | ccatcgcctgcgcaactgtacagggctattaaccaacggaattcataatgcggtaatgcattttg |
| | ctagagaactggattggcaacccatcctcttctttgctcagggtgttgtttatctcgctcctcaggg |
| | tgctggcgttccggatcgcttagaacttcaggaatttctctgggagcaggtcagcaaccgattag |
| | ccaccagcatgttgcggggagaggttggtttcaaacgggatggcaagggactcaaggtggct |
| | ccccaaaccctggaactgttctcccctgctcagttgattcggaacttgcccggtgttgtccaatctt |
| | atgtcggaaacgctaaatctcctgcgactccaaaacgacttgagaagctggaactcagttcaac |
| | agagcgagagtttttggctaaaggtgcagatttaagagcagatcgcattgccgagtttatctttct |
| | ggcgcaaaaagagtttttcggagataaaccagaatttatcacttggatgcttgaaactctggggg |
| | ttcaaactgctatcacttcggagcagacgcagcttcaatccggtggtgtgaactggggatggtat |
| | cacgcagcagcctattacgtcgcgagcaatgccacgctggatttggaagagatttcggagaaa |
| | cttcaggaatttgccgagcagttggcaacctgggggaggaaaacaatttcttcccagagcatc |
| | gcagcccaacccatgacatctttttcaactatctgactcaatacctggaagttcaggggtgggag |
| | cagcaggagcagtcctttcagcttgaactggcaggctatgttggcgcaaagactaaaactgcca |
| | gacaaccgatttgctccctcagttccggtgaatttgcttcggaagaccagatggattctgttgtcct |
| | gttcaaaccgcagcagtacagcaacaagaatcctctcggtggacggcagatcaagcggggg |
| | atttccaaaatctggtccctggaaatgctgctcaggcaggctctttggtctgcgccagcaggcaa |
| | actagaggaacaacaacccattttcctttacatcttcccggcatacgtttactcgccccaggttgct |
| | gctgctgtccggttactggtgaatgatctgaagcgtgtcaacctctgggaagtccgtaaacactg |
| | gttggagaatggcatggatgctcaggcgttgcgatcgtttccctggctagtcggtgacaaaaac |
| | gattcgggtaactctgctccatccagatactctggtgaagacttgcctttcatggcaatgaactac |
| | accaccaccagaggcaaaacgataactgatgcctgggttgaacctgctttcctgacactggtgc |
| | tgcctttgttgctgggtgtgaaagttgtcgccaccagtagccagattccactctatgaaagcgac |
| | aacgacttttgcgaatctgtcaagctggatggacccgccgatttctgggctttgctgcggctacc |
| | aacttccctgcatctccaggattggattggggggcgtgttcaaaatttagcagaaggcttgaacc |
| | gcttgatggttgcctactgcctgcatctggacagtcgtagcgctccaccagatgcgcgctggag |
| | agccttaaacggcagtgtccgagagatgacaacaaatgttctaaacattttttcacttgcagagg |
| | agggattacgtcgtgatggctctaaacgcgatgcaacagttgaagaaattaaccgctattggaa |
| | atacgcccagctgtgggcagagggagactctgatatgcaaaacaagttgaagattaccaaacg |
| | cttagtcgatgagtaccgccagttttacagagccagtgcgaacgaatccagccatacggttttgc |
| | tgccattttctaaggcactggaacacattctttcggtaccaaatgattgggacgatgaggaaatta |
| | ttgttcaaggggcaggacagttacaggccgcgttagatcggcaggaagtctacaaacgtcccc |
| | tcatgcttgacaaagagattccctttgaaattcgtcggatgaaggagtttgaggcaattcaaacct |
| | tcatgaccacctgcgtcattgacctatttggacaaatgtgtaaaggcgatcgcgcgctcctgcag |
| | gaacatcgcaaccgccttaaatcaggggtcgaatttgcctatcgtcagttagccctgcaagaga |
| | aacaagccaaagccaaccaaaaatctggagaacaatcatgagcattcttgaaaccttaaagcc |
| | agagttccacacagccttccctcgcctcgcctctggcaaatatgtccatttcttcatggtgcgtca |
| | cagccagtcgttccccgtctttcaaaccgatggcgttttgaacactgcccgtactcaggctgggtt |
| | aaatgcaggcgatgaaaaatccagacaggcaatcagtcgcctggtcatgttcaaacggaaaca |
| | ggtgacaccagaacgactcacaggacgggaactgctgcgatcgctgggcattaacggagtag |
| | ttgaaggggaagccaatttctgtgaatacaacggcgaaagatcctgtaaaaaatgccctgattg |
| | cattctctatggttttgcgattggggacagtggctcggaacgttccaaagtctactctgattcagc |
| | cttttccctgagtccttatgaagtttcccatcgcagttttaccttcaatgctccctttgaaggtggaac |
| | catgagtgagaagggtgaaatgcggagtgcgatcaacgaactggatcatgttttgccggaagtt |
| | gcttttccttgcgttgaaacactacgtgaccccacgctggaaggcttcatttatgtaatgggcaac |
| | ctgatccggactcggcgctatggagcgcaggagtcgcgtacagggacaatggcgaatcacat |
| | tattggcgttaccctatgtgatggcgagatcttcagcaatttgcactttacccaagccctctacgat |
| | gccctgaagggtgatttgagtgcgccaattagtgatttatgcagagaggcggcgatcgtggca |
| | gaaaacttgctaaatcaggaacctgtgcggaagatccaagttatttttggagagcagttgaacga |
| | actcctggctgaggtagcgggaatctgccaggatgaaactcgcttgcgaaacactgtgacagc |
| | cttgtaccagcaatcacaagcctatgccgagacctatggtgctgctgctaagaaaggcaaagg |
| | caaatcttaaggtggctgccaatggttatttatcgatgcaatctcacgttgcacgacaacgtattct |
| | tcgccactcgcgagatggggattctctacgaaacagagaagtatctacacaactgggcactca |
| | gctttgctctgtttgaagccacccacatccccaaaccctatcgcttgcagggtgcgatcgctcaa |
| | cgacccggttatctggaagctgacaacgagcaaaaccttttagttctgaatcacgcaggcatcta |
| | tgttttccctgctctaccacttcagtggtcctaccaagtcaataccttcaaagcggctcaagtgcct |
| | tactatggcaaatccaaacagttcggggataagggagctgatcgcaactacccgattaactacg |
| | gacgggcaaaagaactggcagttggcagcacctaccgaacgtatattcttgcccctgaaccaa |
| | tccagatcccccactggatacggttgggtaagtgggcagccaagattcaggtggacgcaaga |
| | cccatacctaactgtggaatccgacaacggtcaggagaatacacctgcgaccatccactaaatc |
| | cgatcgacctgtccggttcaacccgattgctgttatacaaccgcattgtcatgccacccgctagtc |
| | tcgtcagtcagtcgcgagtttctggggactactgggaaatttctaaaccatccaattggactgaat |
| | ttccggactggtcagacctgaaagacatacccaatcaagtttgcttacccagcggagtagcctat |
| | ggagccagtactgccattgccgcatcttaagtccaccgctctgcatatcctggtaattcatttagg |
| | cgttgccgaaagcggagccttgcctgttgaatccggtcgagccgtccatgctcaagttttggact |
| | ggttccgcatggcggatccggcaatttctgaggcaattcacaaaagccaggaatccccgctca |
| | gtctctcaggcctggtcgggaaacgccgtaaagtaggggtgcgggcaggagatgaattttact |
| | tccgaattgggttgttagatgggagtttgattgaaccactgctgagtggtttggagaagtggggc |
| | gacaagcccttttctctggcaaagtgtccctttgttttccgcagtatcaatatgttgccaggaactg |
| | acccctgggttggttcttccgattatgccttgcttacccaaaccccggctactttggataacctagc |
| | tctcaagctcctgtcgccaacaagcttcaagtcgaatgccgggcaaggaatccaaccctttcctt |
| | tgccagagtcagttttcggaaatttacatcgtcgctggaatgtctttgcaccaaaggaattgcagtt |
| | tccaaaaattcaatggagtgggctggtctctgattatgacctcaaaactcaaaagttaaggatgg |
| | aaaactcggttgagatcggcgcagtgggctgggtgcgctatcggtttccagatccagaacaag |
| | cgagaattgcaaccattctggctcactttgccttttttgctggagttgggcgtaagacagcaatgg |
| | ggatgggacaggtggtgttggacaaaaaaacgtagcctaggctgctgccaccgctgagcaat |
| | aactagcataaccccttggggcctctaaacgggtcttgaggggttttttgctgaaacctcaggca |
| | tttgagaagcacacggtcacactgcttccggtagtcaataaaccggtaaaccagcaatagacat |
| | aagcggctatttaacgaccctcgggatctcgacgctctcccttatgcgactcctgcattaggaaa |
| | ttaatacgactcactataggggaattgtgagcggataacaattcccctgtagaaataattttgttta |
| | actttaataaggagatataccatgcttgatgaaaaaagcttcgacaactggtgccaatccgttggt |
| | ctgagccaggcagcacgtgaagttgtagagcgtgtgcgatcctcttcaccctcccgtcgcgtac |
| | agagcggtagaggaaacgtctccggcaattaccctagccgcaaaatgggcgtcacaattcagt |
| | ttgagtcccatcgaaatgagcttgcccgcatctacgaactggagcatgaccccggcgttctgga |
| | atattacgatcaacctcccaaaatcgaacttgattatttgtcaaaaaatgggaggcgtgttcgtact |
| | caatacacacctgatttctttgttatccgtaatgactcagcaggttgggaggagtgtaaaacagag |
| | gatgaccttaagcaattagctgaggacagccctaaccgttaccaacgagctgaggacaatcgc |
| | tggcgatgtccacctgcagaagcctatgctcttccccttgagttgtattttcaggtacggtctagtg |
| | ctgaaattaactggattttccagcaaaactttgtatggctagaagactaccttggtactgaatcactt |
| | actatggatgagtcggttgcagatgcaatcatagccacagtcagagcaaacgagggtatcaca |
| | ctactcgaactgattcaacaattacaaggcacagatgctgatgctatctacatcctgattgcaacc |
| | gaacaaatttatgttgatttgatggctgaacggttagcgaacagcgatcgggcacgggtattttc |
| | cagtccagaaattgctcaagcctttcaactcattacgctggtcgaagcacctctggctaacagttc |
| | tctccatatagttcaggtgggcgttggcacaaccatacactgggatggtgaagtctgggagatt |
| | gttaatacaggctctaccatgacaggattgttgcgatcggacggtaagtttatcgagttgcccaat |
| | tctgcaattgatgaattgattcagaagggcaagattcaatcaatttcagcacaacaagcccctgat |
| | agcaaagcagaagttgaagaaatgcttcgctgtgctcgtccagccgacattaaagaagccaac |
| | cgtcgctacgaaatcattcagccttacctggaaaaggatgcaccagcttgtccaactcgaacaat |
| | tcggcgctggcgtaatcagtattggcaggcagaaaagctttacgggaatggctatgttggtttac |
| | taccaaatcatcagaagaaagggaattatttagttaaggttaatgaagtaactcaagcttttatgctt |
| | gagtttattgagaagcattacgaaaatctcaaacagcgtagtaagcttagagtttatcaggcttttg |
| | tggaggcatgtgaaagccacgaaccgaaactaaaccctccaagccgtactacattcacactag |
| | cgattcagaaacgagcaggacatcagcaaaccttgaaacgtgaaggacgaagagctgccatt |
| | cagaaggaggagttttactgggaactggagctaactactcctcgacacggcgatcgccccttc |
| | gagatcgttcatattgatcacactcaactcgatattgagcttatcagttctttgaactccctggccca |
| | atgcaaccctacatctgttgatgccacttacaatttgggtcgtccttgggcaacgttcatggttgat |
| | gcttacagccgccgtttgctagcagtttacataacctatgaagaacccagctatcgttcctgcatg |
| | atggtgctccgtatttgcgtacagcgatttaagcgttttcctcagacgatcgtggtagataatggtg |
| | cagaatttcacagccattactttgaacaactactggcaacatatcaatgcacaaagaagcacag |
| | gccacctgcaaaagctcgctttggtgcagttgttgaacgattatttggcactgcaaataagcaatt |
| | aattcatgagttgcagggaaatacccaaattactcgcaagcatcgccaagttactcaatctgttca |
| | tccccaaaaattggctctttggacgttaggcgatctctacgaatcactatgtgaatgggcttacaa |
| | agtttatgctgaccgccagcaccctgcgctagggcaaagccctaatgctgcattcgctcaaggg |
| | ctggcgttgggaggtagtcgcatccatcgccgagtagagtatgaccaagtcttccgtatcttgac |
| | attgcccgcaccggaaagaggacaacgcaaagttcagccaggacaagggataaaacttagc |
| | aatatctactactggtcaaatgcctttcgagacccagaaattgaacaatcgatggttgaagttcgtt |
| | atgatccctttgatgccagcattgcctatgcactggtgcgaaaacaatgggtccggtgtatttcct |
| | cctactatcaacagtttcaaaatcgttcagaaaaggaaattcgtttaataactgctgagttgattaa |
| | gcaaaagcgtgaccagggaagagatacaaatgttacggataaagaattggcgcagtttttaag |
| | ctctacagaaatgaaagaaggcaaattcttggagcaacgcttgcggactacagaaaacagggt |
| | agttattcagaatagtacagctacagaagacgatccccccatcactaattctcagaattcttacga |
| | gccatcgcttatgctgccaagtgaggatgagttggatgatcaggaagactggttaaataccggc |
| | aaagctgaggcagaattagaattctatggagagtactagcgatgcaacctcaaataagcttccc |
| | aaaagagttactgcttcaaccaattcctgatcgaattgcctatttcaaagattacacaatggcacat |
| | ccgaagcttatagaagcagaccggaagttaatgcatgctattcgtgaacctggaggagctgctc |
| | ttatctttgtctttggtcctaccggagttggaaagtctactctattgaaacgaattactcaaaagctg |
| | cttaaagaagcattgtctttgatggagactgacaaaggctatattcctattgcgggggtagagata |
| | aaaactccagaggatagtaactttgattggaacgatttttatgttcgtgctcttatggcacttaatga |
| | gccaatgatcgagaaaaaaatcaaccgtacaggtgcaaaactaaaattacggttggcacttgaa |
| | tctgcccttcgtaatcgccgtcctgatgctttttacatagacgaagctcaaaattttggtaaggtag |
| | ccagtgggcgaaaattgcaagatcaaacagattgcattaaatctcttgcaaatctcgctcaaact |
| | cggtttatcttatgtgggatttatgaacttttaccactacgaaatctaagtgggcagctatgccgcc |
| | gtagccatagtattcactttccacgttattcggcagattctgagcaggatctaaaggcctttaaaag |
| | tgcgttattaacactacaaaatcaactccctcttcccgaaccacctgatttagtggcgcattggga |
| | attttgttatgagagaactatcggctgtattggtattttgaaagatttgctccttcggactctaagcg |
| | cgattttagtacgggatggagacaaagttttgacattgaagcccaaggatttagaacaacgtgca |
| | tggtctttagaagaatgtttggttatgctgagagaggcaaaggaaggagagcaacaacttactg |
| | acaaatcgggcttacatgaggaattacggacagctttagggtttaatgcagctacgtccaagca |
| | gtctgccaaatcatccaagtcaacatcaagcaaaaaagcaggcagtgttggaaagccttcacct |
| | cgtcgtcgttcagttggaatagatcaagatgccagctaatagcagctccaattacgaaagaaaa |
| | atattttcaactagaatcgagcttaataaattgtccaattaagtatgctcaacagcagttcttaaagc |
| | tcttcttcaattaacacaaaaacgcccagttttaacttaagtcgaacagaaagtaatcgtattgtac |
| | acggccgcataatcgaaattaatacgactcactataggggaattgtgagcggataacaattccc |
| | catcttagtatattagttaagtataagaaggagatatacatatggcagatctcaattggatatcggc |
| | cggccacgcgatcgctgacgtcggtaccctcgagtctggtaaagaaaccgctgctgcgaaatt |
| | tgaacgccagcacatggactcgtctactagcgcagcttaattaacctaggctgctgccaccgct |
| | gagcaataactagcataaccccttggggcctctaaacgggtcttgaggggttttttgctgaaacc |
| | tcaggcatttgagaagcacacggtcacactgcttccggtagtgccctgaaccgacgaccgggt |
| | catcgtggccggatcttgcggcccctcggcttgaacgaattgttagacattatttgccgactacct |
| | tggtgatctcgcctttcacgtagtggacaaattcttccaactgatctgcgcgcgaggccaagcga |
| | tcttcttcttgtccaagataagcctgtctagcttcaagtatgacgggctgatactgggccggcagg |
| | cgctccattgcccagtcggcagcgacatccttcggcgcgattttgccggttactgcgctgtacca |
| | aatgcgggacaacgtaagcactacatttcgctcatcgccagcccagtcgggcggcgagttcca |
| | tagcgttaaggtttcatttagcgcctcaaatagatcctgttcaggaaccggatcaaagagttcctc |
| | cgccgctggacctaccaaggcaacgctatgttctcttgcttttgtcagcaagatagccagatcaa |
| | tgtcgatcgtggctggctcgaagatacctgcaagaatgtcattgcgctgccattctccaaattgca |
| | gttcgcgcttagctggataacgccacggaatgatgtcgtcgtgcacaacaatggtgacttctaca |
| | gcgcggagaatctcgctctctccaggggaagccgaagtttccaaaaggtcgttgatcaaagct |
| | cgccgcgttgtttcatcaagccttacggtcaccgtaaccagcaaatcaatatcactgtgtggcttc |
| | aggccgccatccactgcggagccgtacaaatgtacggccagcaacgtcggttcgagatggcg |
| | ctcgatgacgccaactacctctgatagttgagtcgatacttcggcgatcaccgcttccctcatact |
| | cttcctttttcaatattattgaagcatttatcagggttattgtctcatgagcggatacatatttgaatg |
| | tatttagaaaaataaacaaatagctagctcactcggtcgctacgctccgggcgtgagactgcggc |
| | gggcgctgcggacacatacaaagttacccacagattccgtggataagcaggggactaacatgt |
| | gaggcaaaacagcagggccgcgccggtggcgtttttccataggctccgccctcctgccagag |
| | ttcacataaacagacgcttttccggtgcatctgtgggagccgtgaggctcaaccatgaatctgac |
| | agtacgggcgaaacccgacaggacttaaagatccccaccgtttccggcgggtcgctccctctt |
| | gcgctctcctgttccgaccctgccgtttaccggatacctgttccgcctttctcccttacgggaagt |
| | gtggcgctttctcatagctcacacactggtatctcggctcggtgtaggtcgttcgctccaagctg |
| | ggctgtaagcaagaactccccgttcagcccgactgctgcgccttatccggtaactgttcacttga |
| | gtccaacccggaaaagcacggtaaaacgccactggcagcagccattggtaactgggagttcg |
| | cagaggatttgtttagctaaacacgcggttgctcttgaagtgtgcgccaaagtccggctacactg |
| | gaaggacagatttggttgctgtgctctgcgaaagccagttaccacggttaagcagttccccaact |
| | gacttaaccttcgatcaaaccacctccccaggtggttttttcgtttacagggcaaaagattacgcg |
| | cagaaaaaaaggatctcaagaagatcctttgatcttttctactgaaccgctctagatttcagtgcaa |
| | tttatctcttcaaatgtagcacctgaagtcagccccatacgatataagttgtaattctcatgttagtca |
| | tgccccgcgcccaccggaaggagctgactgggttgaaggctctcaagggcatcggtcgagat |
| | cccggtgcctaatgagtgagctaacttacattaattgcgttgcgctcactgcccgctttccagtcg |
| | ggaaacctgtcgtgccagctgcattaatgaatcggccaacgcgcggggagaggcggtttgcg |
| | tattgggcgccagggtggtttttcttttcaccagtgagacgggcaacagctgattgcccttcacc |
| | gcctggccctgagagagttgcagcaagcggtccacgctggtttgccccagcaggcgaaaatc |
| | ctgtttgatggtggttaacggcgggatataacatgagctgtcttcggtatcgtcgtatcccactac |
| | cgagatgtccgcaccaacgcgcagcccggactcggtaatggcgcgcattgcgcccagcgcc |
| | atctgatcgttggcaaccagcatcgcagtgggaacgatgccctcattcagcatttgcatggtttgt |
| | tgaaaaccggacatggcactccagtcgccttcccgttccgctatcggctgaatttgattgcgagt |
| | gagatatttatgccagccagccagacgcagacgcgccgagacagaacttaatgggcccgcta |
| | acagcgcgatttgctggtgacccaatgcgaccagatgctccacgcccagtcgcgtaccgtcttc |
| | atgggagaaaataatactgttgatgggtgtctggtcagagacatcaagaaataacgccggaac |
| | attagtgcaggcagcttccacagcaatggcatcctggtcatccagcggatagttaatgatcagc |
| | ccactgacgcgttgcgcgagaagattgtgcaccgccgctttacaggcttcgacgccgcttcgtt |
| | ctaccatcgacaccaccacgctggcacccagttgatcggcgcgagatttaatcgccgcgacaa |
| | tttgcgacggcgcgtgcagggccagactggaggtggcaacgccaatcagcaacgactgtttg |
| | cccgccagttgttgtgccacgcggttgggaatgtaattcagctccgccatcgccgcttccactttt |
| | tcccgcgttttcgcagaaacgtggctggcctggttcaccacgcgggaaacggtctgataagag |
| | acaccggcatactctgcgacatcgtataacgttactggtttcacattcaccaccctgaattgactct |
| | cttccgggcgctatcatgccataccgcgaaaggttttgcgccattcgatggtgtccgggatctcg |
| | acgctctcccttatgcgactcctgcattaggaaattaatacgactcactata (SEQ ID NO: |
| | 97) |
| pDonor(CyCAST)_ | tcgcgcgtttcggtgatgacggtgaaaacctctgacacatgcagctcccggagactgtcacag |
| 0.5 kb-cargo | cttgtctgtaagcggatgccgggagcagacaagcccgtcagggcgcgtcagcgggtgttggc |
| | gggtgtcggggctggcttaactatgcggcatcagagcagattgtactgagagtgcaccatatgc |
| | ggtgtgaaataccgcacagatgcgtaaggagaaaataccgcatcaggcgccattcgccattca |
| | ggctgcgcaactgttgggaagggcgatcggtgcgggcctcttcgctattacgccagctggcga |
| | aagggggatgtgctgcaaggcgattaagttgggtaacgccagggttttcccagtcacgacgtt |
| | gtaaaacgacggccagtgaattgacgcgtattgggattaaaaacgttcaaccccataaatcatg |
| | catgttgtgactgcaaccataagttgtctatttcggacactttatgcttacaattttggctggacagc |
| | ttatgcttacaattttggctggacagatagagcgaaagcaataggcaagacgattatatttctttgc |
| | ctataaagtaggcctattgatggatgaccctccaaccgggttcgtgagtggcttccctgccgcg |
| | gccgccgcgggcgcgggccgctcgctctacggtgggcccgagctcgtgttccccgaggcca |
| | tgaaccaccccgcgctgaccgtgcatccggcgcaccagctgggcgcctccccgctgcagcc |
| | cccgcactccttcttcggcgcccagcaccgggaccctctccatttctacccctgggtcctgcgg |
| | aaccgcttcttcggccaccgcttccagggtgagtgtccacgctgtgcccgccgaggcggccg |
| | gccggcgcccgtgctgcggcgatgcgggggaggctcgggggcgcgcggggctgtttagaa |
| | gttactgccgggaaggctgcaggtccgcggaggtagattcccaggcagggaagagctgtgc |
| | ggcatccacccgcgccttcgccgcgtaggtctccctcccaggaaagcaggtggagatattggt |
| | gcccttctagagtcagaagtcattccttcggagcttttccaggattaaaagcatacttgctcttggc |
| | aaataaccctaaggcaacacaacggctgctccaagttctaacttttggacaacttatgctttcgatt |
| | gttaacatttgggcaacttatgctttcagttttttattttgcaaagtgaatattgacgatgactcaagt |
| | tgtccacacccatgagtggacaacttatgctttcaaaatcggacaacttatggttgcagtcacacat |
| | gttgtgactgggcaagtgagatgatagtcacctgatttgcttctccctcactgcttccttagcctaa |
| | aatcccaatggcgcgccgagcttggcgtaatcatggtcatagctgtttcctgtgtgaaattgttat |
| | ccgctcacaattccacacaacatacgagccggaagcataaagtgtaaagcctggggtgcctaa |
| | tgagtgagctaactcacattaattgcgttgcgctcactgcccgctttccagtcgggaaacctgtcg |
| | tgccagctgcattaatgaatcggccaacgcgcggggagaggcggtttgcgtattgggcgctgt |
| | tccgcttcctcgctcactgactcgctgcgctcggtcgttcggctgcggcgagcggtatcagctc |
| | actcaaaggcggtaatacggttatccacagaatcaggggataacgcaggaaagaacatgtga |
| | gcaaaaggccagcaaaaggccaggaaccgtaaaaaggccgcgttgctggcgtttttccatag |
| | gctccgcccccctgacgagcatcacaaaaatcgacgctcaagtcagaggtggcgaaacccga |
| | caggactataaagataccaggcgtttccccctggaagctccctcgtgcgctctcctgttccgacc |
| | ctgccgcttaccggatacctgtccgcctttctcccttcgggaagcgtggcgctttctcatagctca |
| | cgctgtaggtatctcagttcggtgtaggtcgttcgctccaagctgggctgtgtgcacgaaccccc |
| | cgttcagcccgaccgctgcgccttatccggtaactatcgtcttgagtccaacccggtaagacac |
| | gacttatcgccactggcagcagccactggtaacaggattagcagagcgaggtatgtaggcggt |
| | gctacagagttcttgaagtggtggcctaactacggctacactagaagaacagtatttggtatctg |
| | cgctctgctgaagccagttaccttcggaaaaagagttggtagctcttgatccggcaaacaaacc |
| | accgctggtagcggtggtttttttgtttgcaagcagcagattacgcgcagaaaaaaaggatctca |
| | agaagatcctttgatcttttctacggggtctgacgctcagtggaacgaaaactcacgttaaggga |
| | ttttggtcatgagattatcaaaaaggatcttcacctagatccttttaaattaaaaatgaagttttaaat |
| | caatctaaagtatatatgagtaaacttggtctgacagttaccaatgcttaatcagtgaggcacctat |
| | ctcagcgatctgtctatttcgttcatccatagttgcctgactccccgtcgtgtagataactacgatac |
| | gggagggcttaccatctggccccagtgctgcaatgataccgcgagaaccacgctcaccggct |
| | ccagatttatcagcaataaaccagccagccggaagggccgagcgcagaagtggtcctgcaac |
| | tttatccgcctccatccagtctattaattgttgccgggaagctagagtaagtagttcgccagttaat |
| | agtttgcgcaacgttgttgccattgctacaggcatcgtggtgtcacgctcgtcgtttggtatggctt |
| | cattcagctccggttcccaacgatcaaggcgagttacatgatcccccatgttgtgcaaaaaagc |
| | ggttagctccttcggtcctccgatcgttgtcagaagtaagttggccgcagtgttatcactcatggtt |
| | atggcagcactgcataattctcttactgtcatgccatccgtaagatgcttttctgtgactggtgagt |
| | actcaaccaagtcattctgagaatagtgtatgcggcgaccgagttgctcttgcccggcgtcaata |
| | cgggataataccgcgccacatagcagaactttaaaagtgctcatcattggaaaacgttcttcggg |
| | gcgaaaactctcaaggatcttaccgctgttgagatccagttcgatgtaacccactcgtgcaccca |
| | actgatcttcagcatcttttactttcaccagcgtttctgggtgagcaaaaacaggaaggcaaaatg |
| | ccgcaaaaaagggaataagggcgacacggaaatgttgaatactcatactcttcctttttcaatatt |
| | attgaagcatttatcagggttattgtctcatgagcggatacatatttgaatgtatttagaaaaataaa |
| | caaataggggttccgcgcacatttccccgaaaagtgccacctgacgtctaagaaaccattattat |
| | catgacattaacctataaaaataggcgtatcacgaggcccttttgtc (SEQ ID NO: 98) |
| pTarget(CyCAST) | cggggcggagatttcctggaagatgccaggaagatacttaacagggaagtgagagggccgc |
| | ggcaaagccgtttttccataggctccgcccccctgacaagcatcacgaaatctgacgctcaaat |
| | cagtggtggcgaaacccgacaggactataaagataccaggcgtttccccctggcggctccctc |
| | gtgcgctctcctgttcctgcctttcggtttaccggtgtcattccgctgttatggccgcgtttgtctcat |
| | tccacgcctgacactcagttccgggtaggcagttcgctccaagctggactgtatgcacgaaccc |
| | cccgttcagtccgaccgctgcgccttatccggtaactatcgtcttgagtccaacccggaaagac |
| | atgcaaaagcaccactggcagcagccactggtaattgatttagaggagttagtcttgaagtcatg |
| | cgccggttaaggctaaactgaaaggacaagttttggtgactgcgctcctccaagccagttacct |
| | cggttcaaagagttggtagctcagagaaccttcgaaaaaccgccctgcaaggcggttttttcgtt |
| | ttcagagcaagagattacgcgcagaccaaaacgatctcaagaagatcatcttattaatatacgta |
| | gtatctacgatacgtagtatctacgatacgtagnnnnnngagaagtcatttaataaggccactgt |
| | taaacgtagatatatctacgcgtagatatatctacgatacgtagcggccgacgcgctgggctac |
| | gtctttaatgggcagcgcccacatacgcagcgatttccaacagcttgaggcggaagctttaatg |
| | cggtagtttatcacagttaaattgctaacgcagtcaggcaccgtgtatgaaatctaacaatgcgct |
| | catcgtcatcctcggcaccgtcaccctggatgctgtaggcataggcttggttatgccggtactgc |
| | cgggcctcttgcgggatatcgtccattccgacagcatcgccagtcactatggcgtgctgctagc |
| | gctatatgcgttgatgcaatttctatgcgcacccgttctcggagcactgtccgaccgctttggccg |
| | ccgcccagtcctgctcgcttcgctacttggagccactatcgactacgcgatcatggcgaccaca |
| | cccgtcctgtggatcctctacgccggacgcatcgtggccggcatcaccggcgccacaggtgc |
| | ggttgctggcgcctatatcgccgacatcaccgatggggaagatcgggcctgccaccataccca |
| | cgccgaaacaagcgccctgcaccattatgttccggatctgcatcgcaggatgctgctggctacc |
| | ctgtggaacacctacatctgtattaacgaagcgctaaccgtttttatcaggctctgggaggcaga |
| | ataaatgatcatatcgtcaattattacctccacggggagagcctgagcaaactggcctcaggcat |
| | ttgagaagcacacggtcacactgcttccggtagtcaataaaccggtaaaccagcaatagacata |
| | agcggctatttaacgaccctgccctgaaccgacgaccgggtcgaatttgctttcgaatttctgcc |
| | attcatccgcttattatcacttattcaggcgtagcaaccaggcgtttaagggcaccaataactgcc |
| | ttaaaaaaattacgccccgccctgccactcatcgcagtactgttgtaattcattaagcattctgccg |
| | acatggaagccatcacaaacggcatgatgaacctgaatcgccagcggcatcagcaccttgtcg |
| | ccttgcgtataatatttgcccatggtgaaaacgggggcgaagaagttgtccatattggccacgttt |
| | aaatcaaaactggtgaaactcacccagggattggctgagacgaaaaacatattctcaataaacc |
| | ctttagggaaataggccaggttttcaccgtaacacgccacatcttgcgaatatatgtgtagaaact |
| | gccggaaatcgtcgtggtattcactccagagcgatgaaaacgtttcagtttgctcatggaaaacg |
| | gtgtaacaagggtgaacactatcccatatcaccagctcaccgtctttcattgccatacggaattcc |
| | ggatgagcattcatcaggcgggcaagaatgtgaataaaggccggataaaacttgtgcttattttt |
| | ctttacggtctttaaaaaggccgtaatatccagctgaacggtctggttataggtacattgagcaac |
| | tgactgaaatgcctcaaaatgttctttacgatgccattgggatatatcaacggtggtatatccagtg |
| | atttttttctccattttagcttccttagctcctgaaaatctcgataactcaaaaaatacgcccggcgg |
| | atgtggtggaattggtagacacgcacgtttgaggggcgtgtggcgtaagccttgcgagttcgat |
| | tctcgccatccgcagtagtgatcttatttcattatggtgaaagttggaacctcttacgtgccgatca |
| | acgtctcattttcgccaaaagttggcccagggcttcccggtatcaacagggacaccaggatttat |
| | ttattctgcgaagtgatcttccgtcacaggtatttattcggcgcaaagtgcgtcgggtgatgctgc |
| | caacttactgatttagtgtatgatggtgtttttgaggtgctccagtggcttctgtttctatcagctgtc |
| | cctcctgttcagctactgacggggtggtgcgtaacggcaaaagcaccgccggacatcagcgct |
| | agcggagtgtatactggcttactatgttggcactgatgagggtgtcagtgaagtgcttcatgtgg |
| | caggagaaaaaaggctgcaccggtgcgtcagcagaatatgtgatacaggatatattccgcttcc |
| | tcgctcactgactcgctacgctcggtcgttcgactgcggcgagcggaaatggcttacgaa |
| | (SEQ ID NO: 99) |
| pHelper(AjTn6022) | ggggaattgtgagcggataacaattcccctgtagaaataattttgtttaactttaataaggagatat |
| | acatgaaaagaatcagtgatgaatattccccagttaggaaatcccaaactgtatatgggagtattt |
| | cagtaaattatgcttttagaggggaaaagacgatttggtgtgaatctactcttgagcgtgattttttg |
| | attaggcaagaattcaatagcaatgtcatagatatcgtaagccagcctattaccatcccatatata |
| | acagagttgggtaatgaatccacttatactcctgatttcctcgtacagttttccagtgcaaattgtgg |
| | tgattttgaggaaattccctgtccactgttaatagaaataaaacctagaaagaaacttatagaagat |
| | tgggataaattaaagccaaaatttaaggcggctcatacttttgctaaagaaaaaggttggaaattc |
| | aagattataaatgaatcaaggttatatgatcagtattgggaaaatattaattttttgaaaagatttaga |
| | cgttctcatgtggatgtctatgatgaacaaactttaattgagactttagatagtcttggtcaatcgac |
| | tattaatcaattaccggcacatatttttaaggataaaactaatattcttcgaggtattcatcaagtatg |
| | ggcattggtcgcaaaacgaaaaatcatgtgtgatttatattgccccttaacagcagagacggtga |
| | tttggacaaatcaagatgatgtgcttacaaggagatttttaaatggttcagactgatactgtaagta |
| | ttgaccgaagtcggatcatactcaaaccaaatgtaattgttaagtatgaagggcaaccgtataag |
| | attgctaatgttttgaatgccaacgatatcgtgatttctagtttagattctgtgcgttgtttacaagta |
| | agtgcagattctctacaagtatttgaagctgaaaataaccaaactaaagatataaataaaggtgatt |
| | gggatattacgcatgaagcgtggaaaatagctttacatcgttatgaaatcatcaagccgttgatta |
| | agtattcaacaaccgaattagtcgagcaacgagcaagtgaatatggcattaaccgttccacctta |
| | tggaaatggttaaaagattttagagaaaataattctatcttagtgttagttcctaaaaagagaggtt |
| | ggacgaccaagaagtctaggttgtctcctcaaattatgaatattattaaccaaggtattcaagagg |
| | aatatctcaatgccagaaagcctagtattgcaaaaactatagattttattaaagcagaatgttctcg |
| | ccttaaactagaagcaccccatgacaattcaattcgtagaaaaatagaagcattaaacgattatat |
| | ggtgattaaggctcgtcatggttctaaagcagcacaagataagtatgcatctgctgctggtgagt |
| | ttcctaatgctgattatcccttggcatatgtacaggtagaccacactccactagatattgaaattgtt |
| | gatgatgaatttagagaggcgattggacgaccatttctaacattagctattgatataaatactcgaa |
| | tggtggtcggttattacttgtccttagaagcccccagtgcaacatctgttgccatgtgtattgcttcc |
| | agtattttgtcaaaaaaacggaagctaattgaattggatatagatgctgattggcaagttgaaggt |
| | cttatggattctatacatacagataatggtcctgactttagaactaaccatatcagtcgagcttgctt |
| | aaaatatgggattcattgggagtttcgtccgattggtggggcaaggtttggtggacatatcgaac |
| | gtttgattggtgttgttaacattgaaatgcacatcttggatggtacaaccttctcgaatatccaagaa |
| | cgtggaacctataattcagcaggtcatgcctgtatgacactaaaagaactagaatattatattgttt |
| | attggatcactaaagtttatcaccaaaagaaacactccaaactcggtatgtcacctttacagaagt |
| | ggcaagatggtgtttggggaacaaaaactagtgttggaacaggtttaaaagagagagtttcgga |
| | tgaagatacattatttattgatttccttcccgaatttgaatcaacaattcaacgtgtaggtgtacaga |
| | aagacaatctattttattttgctgattgtttacgacaatgggttaattgtgttgatcccgaagatgtaa |
| | ataaaaagagaaaaaagaaatttttgtttaaacgtgatccaagggatatttctcttatttggttttatg |
| | aacctctgtccaatacatattttaaagtgcctactgctaagcgagaaataccaccaattagcttattt |
| | gaatacaaacaagtgcagaaatatcttcgtggcgagcaacatgataatcaaaatcaggatgaga |
| | tttatcaggcaattcttcatttacgagagcaattgaaacaatcccgtagtctgactcggaagcaac |
| | ggagagtaaatcaacgtaaaaaggaaaatgcaaaagcaacacatcatttatctgtaaaaaatga |
| | acctgaaaaaccatctattgtcgaaaacagtgttcagccgactaatgatttatggagtattccattg |
| | acggcatttgaagatttaaggggataataatgcaaaaatatgaacatcttgcagatgatgtacttg |
| | aagtcatgtctctaagtgatagtgatcgtatcaatattttattttctgatcgttggattggttataaaa |
| | aagcggtcactattttggatactttaactgatctgttgaatcgccctaggaagcttcgcccagaatgt |
| | ttattgattgtgggtgattctaatatgggtaaaacgaccattatccacgaattcacaaagcagcatt |
| | acaccaaaacagtgaatgacatagatatggagctgctgtctgtaaaaaaacctgttttaaccatat |
| | tagcccctgctaaagcgaatgtaaaagaattctatatcaatatattgaatcatttctttgtcccatttc |
| | gtcctactgatcctgaagcaaagttacggaatcaagctgtccatctaatgcggaagtatgaaaca |
| | aaaatgttgattattgatgaaatccataattgtttaacaggttctaccaaacttctttccgaagtgatg |
| | aataccttaaagaatctaagtaatgatctaagtctgaatatcgttggcgtcggtactcgtgaagca |
| | gttacgattctacataccgatgctcaatatgcaagccgttttgatgtagcaatgttgcctaaatggg |
| | aactgaatcaggattttctaagactattattaagttatgtacgattattgcctttaaagaaacgttctg |
| | atctagcatctcaaagacttgccacccttatatttgaaatttcaggtgggaattttggtgacttaaac |
| | agattgttgattgagtgtgctaaagaggcaatcgtaaaaggtaatgaagaaattaccgaagaaat |
| | tgttaataaatttaaatggcttaaaccaaccgagggtatgaggaatattagaaatataaatcttaac |
| | atggtttaggtattctacttttcataggaaaatagccatgcaccaagtagaacaacgttggtatatt |
| | cgtacccctattcaagagggtgaagtattttcctcttggctcatacgttctgctttggatttaggctg |
| | ctcaccattaactttagtgaatcttttgtgggaaaaatggagaggattaacgatagatattgatcgt |
| | gggttaaatgaagaaaaattagacatattgttaaatcattgttttgtggaacagcatgaagttcaga |
| | aaactatgttaagcagttatttccctgctttgattccaaaaaattataacaaaaatcagcgtattcctt |
| | ggatattggctctaggtattcgaaatcgttcaaatgtgtcaggtcgtcaaatttgtacgcaatgtct |
| | aagttctacccatacaccaccatatttgcgtatcaagtggcgtatggggtggcatagtggctgtg |
| | atattcataaaaccatattaatagatcattgtcctcaatgcagaatcacattacaacctataaaaatt |
| | gatatagagcatggatcattagcaatttgtacttcatgctatgctgatttaagtacactcattcaacg |
| | tccagtagaaacggatgcattaagatttcagcatcaagctgatcaggtcttagagtcacaatttgg |
| | gcgatataaccaaaaggatatttcatcaatagagtggtttgagattgctcgtatatggttaagtttta |
| | ttcgatcccctttaaatatgaagagtcctaaccttttgcaaatgtttgaaagtcttaatattgatttaa |
| | atatagattatcctattacaccagtagcctttgaatttctgtctgttcaggagcgtgaaaaattattat |
| | caattttaaataaaatcatggcattaccttgtgatttatttgttgatcgctctttagaatatcatgtaa |
| | gtcattcttatttttgggataaaagaaaaaaactgcctacgcagcttcaactaatgaaagataaaatgt |
| | tgaagccaattaagattattttgccgaaagataacgccatagccatgagtaaacccaaatctaaaa |
| | aaagtgtacaacggaagtggttaaggctattgagaaagctacagaaaggggggaacaggtga |
| | ctttagctcaattttcccataaagaaggctgtagtggttgtgacagggctgatatagataaattcaa |
| | aaaaagatataagggcgataagtattgttcaacttgttatgcccgaatttttaaaaaaagagcttgt |
| | ccaaaatgtggtgaatatgccagattgccaaaaaatgatgatcaagcaatttgtaatgaatgcatc |
| | aaaaaacagccttgtattcgctgtaatcaaactaagaagccgatagggacactcaccgaatatg |
| | gtgtggtttgtaatagctgttctgtttattttcgcccaattgagcgttgtgagaggtgtgatacacca |
| | tcacaaaaattgacacatatttcacgatttggtgatgatttaagggtatgtcccaaatgctctactag |
| | agattatgaaacatgtccctcttgtcataaatatcgcttattagagcaagatgatacaggagctaa |
| | gatttgtaaaaaatgtaggaataacgccaaaaagaaatgcaagcaatgtgatgtcttgataccag |
| | caggctgtcctgatctatgtaacaactgttactggcataagaatctatgggagaaagctagacga |
| | aatattaaagcattccaatcccaacacttacaggctcaatatgagcaatatttaatttggttagaag |
| | atgaggttggtgcaaataaagcagcactgtatatcaataaacatacccatttttttatcaaaactga |
| | agaattatggcttgatgcaattcctacagcagaacagttattggctgttttaagaaccagtggactt |
| | agaaaatttgagttggttgcatcttggctagatgaagcccatcacattaaggttgcattagaggat |
| | aaagacttttgctctcaacaggatcagatagaaaaactgatttcaagccttcctcacccctctact |
| | gcttatgatgtggttatatcttataaagatgagcttgatataaaaatgaaagatggaaagaccagt |
| | atccggtccataaaactggcaataaagcctgcggttgctcttatgcactatgtttgtgcatcggga |
| | gctacattacctaatttaaaccatataaaagcctatcttatcgacttttctggtcaggctgctgcact |
| | aacagggttcattaattttttgaataaaaattttgatacatctatagactatttggcttttaaaaaatc |
| | aaaaaatttcaatgaaaaacgaaaaaataaagtagaaaaagaaattgtccaatgggtggataagc |
| | ctttggagaataaggaagatgtattaaattgggtgaagaatgggctaagatattttcataatgtatc |
| | ttatgtggagtctctaaaagtcaaatttgagatgattacagaagctgatgatggatatgaaattttat |
| | tgcagaatcattcttattggttgccaaaaaacacaggagatttaaaaagatagtttttttgtgattata |
| | ctgtgctatttcaagctaatttattgtacaagttggtttgtttatctaattcttctaaaagaactgtcc |
| | ataacaatatggggcaggctgctgccaccgctgagcaataactagcataaccccttggggcctct |
| | aaacgggtcttgaggggttttttgctgaaacctcaggcatttgagaagcacacggtcacactgct |
| | tccggtagtcaataaaccggtaaaccagcaatagacataagcggctatttaacgaccctgccct |
| | gaaccgacgaccgggtcatcgtggccggatcttgcggcccctcggcttgaacgaattgttaga |
| | cattatttgccgactaccttggtgatctcgcctttcacgtagtggacaaattcttccaactgatctgc |
| | gcgcgaggccaagcgatcttcttcttgtccaagataagcctgtctagcttcaagtatgacgggct |
| | gatactgggccggcaggcgctccattgcccagtcggcagcgacatccttcggcgcgattttgc |
| | cggttactgcgctgtaccaaatgcgggacaacgtaagcactacatttcgctcatcgccagccca |
| | gtcgggcggcgagttccatagcgttaaggtttcatttagcgcctcaaatagatcctgttcaggaa |
| | ccggatcaaagagttcctccgccgctggacctaccaaggcaacgctatgttctcttgcttttgtca |
| | gcaagatagccagatcaatgtcgatcgtggctggctcgaagatacctgcaagaatgtcattgcg |
| | ctgccattctccaaattgcagttcgcgcttagctggataacgccacggaatgatgtcgtcgtgca |
| | caacaatggtgacttctacagcgcggagaatctcgctctctccaggggaagccgaagtttccaa |
| | aaggtcgttgatcaaagctcgccgcgttgtttcatcaagccttacggtcaccgtaaccagcaaat |
| | caatatcactgtgtggcttcaggccgccatccactgcggagccgtacaaatgtacggccagca |
| | acgtcggttcgagatggcgctcgatgacgccaactacctctgatagttgagtcgatacttcggc |
| | gatcaccgcttccctcatactcttcctttttcaatattattgaagcatttatcagggttattgtctcat |
| | gagcggatacatatttgaatgtatttagaaaaataaacaaatagctagctcactcggtcgctacgctc |
| | cgggcgtgagactgcggcgggcgctgcggacacatacaaagttacccacagattccgtggat |
| | aagcaggggactaacatgtgaggcaaaacagcagggccgcgccggtggcgtttttccatagg |
| | ctccgccctcctgccagagttcacataaacagacgcttttccggtgcatctgtgggagccgtga |
| | ggctcaaccatgaatctgacagtacgggcgaaacccgacaggacttaaagatccccaccgttt |
| | ccggcgggtcgctccctcttgcgctctcctgttccgaccctgccgtttaccggatacctgttccgc |
| | ctttctcccttacgggaagtgtggcgctttctcatagctcacacactggtatctcggctcggtgta |
| | ggtcgttcgctccaagctgggctgtaagcaagaactccccgttcagcccgactgctgcgcctta |
| | tccggtaactgttcacttgagtccaacccggaaaagcacggtaaaacgccactggcagcagcc |
| | attggtaactgggagttcgcagaggatttgtttagctaaacacgcggttgctcttgaagtgtgcgc |
| | caaagtccggctacactggaaggacagatttggttgctgtgctctgcgaaagccagttaccacg |
| | gttaagcagttccccaactgacttaaccttcgatcaaaccacctccccaggtggttttttcgtttac |
| | agggcaaaagattacgcgcagaaaaaaaggatctcaagaagatcctttgatcttttctactgaac |
| | cgctctagatttcagtgcaatttatctcttcaaatgtagcacctgaagtcagccccatacgatataa |
| | gttgtaattctcatgttagtcatgccccgcgcccaccggaaggagctgactgggttgaaggctct |
| | caagggcatcggtcgagatcccggtgcctaatgagtgagctaacttacattaattgcgttgcgct |
| | cactgcccgctttccagtcgggaaacctgtcgtgccagctgcattaatgaatcggccaacgcgc |
| | ggggagaggcggtttgcgtattgggcgccagggtggtttttcttttcaccagtgagacgggcaa |
| | cagctgattgcccttcaccgcctggccctgagagagttgcagcaagcggtccacgctggtttgc |
| | cccagcaggcgaaaatcctgtttgatggtggttaacggcgggatataacatgagctgtcttcggt |
| | atcgtcgtatcccactaccgagatgtccgcaccaacgcgcagcccggactcggtaatggcgc |
| | gcattgcgcccagcgccatctgatcgttggcaaccagcatcgcagtgggaacgatgccctcatt |
| | cagcatttgcatggtttgttgaaaaccggacatggcactccagtcgccttcccgttccgctatcgg |
| | ctgaatttgattgcgagtgagatatttatgccagccagccagacgcagacgcgccgagacaga |
| | acttaatgggcccgctaacagcgcgatttgctggtgacccaatgcgaccagatgctccacgcc |
| | cagtcgcgtaccgtcttcatgggagaaaataatactgttgatgggtgtctggtcagagacatcaa |
| | gaaataacgccggaacattagtgcaggcagcttccacagcaatggcatcctggtcatccagcg |
| | gatagttaatgatcagcccactgacgcgttgcgcgagaagattgtgcaccgccgctttacaggc |
| | ttcgacgccgcttcgttctaccatcgacaccaccacgctggcacccagttgatcggcgcgagat |
| | ttaatcgccgcgacaatttgcgacggcgcgtgcagggccagactggaggtggcaacgccaat |
| | cagcaacgactgtttgcccgccagttgttgtgccacgcggttgggaatgtaattcagctccgcc |
| | atcgccgcttccactttttcccgcgttttcgcagaaacgtggctggcctggttcaccacgcggga |
| | aacggtctgataagagacaccggcatactctgcgacatcgtataacgttactggtttcacattcac |
| | caccctgaattgactctcttccgggcgctatcatgccataccgcgaaaggttttgcgccattcgat |
| | ggtgtccgggatctcgacgctctcccttatgcgactcctgcattaggaaattaatacgactcacta |
| | ta (SEQ ID NO: 100) |
| pHelper(AjTn6022)_ | Ggggaattgtgagcggataacaattcccctgtagaaataattttgtttaactttaataaggagatat |
| ΔTnsA | acatggttcagactgatactgtaagtattgaccgaagtcggatcatactcaaaccaaatgtaattg |
| | ttaagtatgaagggcaaccgtataagattgctaatgttttgaatgccaacgatatcgtgatttctag |
| | tttagattctgtgcgttgtttacaagtaagtgcagattctctacaagtatttgaagctgaaaataacc |
| | aaactaaagatataaataaaggtgattgggatattacgcatgaagcgtggaaaatagctttacat |
| | cgttatgaaatcatcaagccgttgattaagtattcaacaaccgaattagtcgagcaacgagcaag |
| | tgaatatggcattaaccgttccaccttatggaaatggttaaaagattttagagaaaataattctatct |
| | tagtgttagttcctaaaaagagaggttggacgaccaagaagtctaggttgtctcctcaaattatga |
| | atattattaaccaaggtattcaagaggaatatctcaatgccagaaagcctagtattgcaaaaacta |
| | tagattttattaaagcagaatgttctcgccttaaactagaagcaccccatgacaattcaattcgtag |
| | aaaaatagaagcattaaacgattatatggtgattaaggctcgtcatggttctaaagcagcacaag |
| | ataagtatgcatctgctgctggtgagtttcctaatgctgattatcccttggcatatgtacaggtaga |
| | ccacactccactagatattgaaattgttgatgatgaatttagagaggcgattggacgaccatttcta |
| | acattagctattgatataaatactcgaatggtggtcggttattacttgtccttagaagcccccagtg |
| | caacatctgttgccatgtgtattgcttccagtattttgtcaaaaaaacggaagctaattgaattggat |
| | atagatgctgattggcaagttgaaggtcttatggattctatacatacagataatggtcctgacttta |
| | gaactaaccatatcagtcgagcttgcttaaaatatgggattcattgggagtttcgtccgattggtg |
| | gggcaaggtttggtggacatatcgaacgtttgattggtgttgttaacattgaaatgcacatcttgg |
| | atggtacaaccttctcgaatatccaagaacgtggaacctataattcagcaggtcatgcctgtatga |
| | cactaaaagaactagaatattatattgtttattggatcactaaagtttatcaccaaaagaaacactc |
| | caaactcggtatgtcacctttacagaagtggcaagatggtgtttggggaacaaaaactagtgttg |
| | gaacaggtttaaaagagagagtttcggatgaagatacattatttattgatttccttcccgaatttgaa |
| | tcaacaattcaacgtgtaggtgtacagaaagacaatctattttattttgctgattgtttacgacaatg |
| | ggttaattgtgttgatcccgaagatgtaaataaaaagagaaaaaagaaatttttgtttaaacgtgat |
| | ccaagggatatttctcttatttggttttatgaacctctgtccaatacatattttaaagtgcctactgct |
| | aagcgagaaataccaccaattagcttatttgaatacaaacaagtgcagaaatatcttcgtggcgag |
| | caacatgataatcaaaatcaggatgagatttatcaggcaattcttcatttacgagagcaattgaaa |
| | caatcccgtagtctgactcggaagcaacggagagtaaatcaacgtaaaaaggaaaatgcaaa |
| | agcaacacatcatttatctgtaaaaaatgaacctgaaaaaccatctattgtcgaaaacagtgttca |
| | gccgactaatgatttatggagtattccattgacggcatttgaagatttaaggggataataatgcaa |
| | aaatatgaacatcttgcagatgatgtacttgaagtcatgtctctaagtgatagtgatcgtatcaatat |
| | tttattttctgatcgttggattggttataaaaaagcggtcactattttggatactttaactgatctgtt |
| | gaatcgccctaggaagcttcgcccagaatgtttattgattgtgggtgattctaatatgggtaaaacga |
| | ccattatccacgaattcacaaagcagcattacaccaaaacagtgaatgacatagatatggagct |
| | gctgtctgtaaaaaaacctgttttaaccatattagcccctgctaaagcgaatgtaaaagaattctat |
| | atcaatatattgaatcatttctttgtcccatttcgtcctactgatcctgaagcaaagttacggaatcaa |
| | gctgtccatctaatgcggaagtatgaaacaaaaatgttgattattgatgaaatccataattgtttaac |
| | aggttctaccaaacttctttccgaagtgatgaataccttaaagaatctaagtaatgatctaagtctg |
| | aatatcgttggcgtcggtactcgtgaagcagttacgattctacataccgatgctcaatatgcaagc |
| | cgttttgatgtagcaatgttgcctaaatgggaactgaatcaggattttctaagactattattaagttat |
| | gtacgattattgcctttaaagaaacgttctgatctagcatctcaaagacttgccacccttatatttga |
| | aatttcaggtgggaattttggtgacttaaacagattgttgattgagtgtgctaaagaggcaatcgta |
| | aaaggtaatgaagaaattaccgaagaaattgttaataaatttaaatggcttaaaccaaccgaggg |
| | tatgaggaatattagaaatataaatcttaacatggtttaggtattctacttttcataggaaaatagcc |
| | atgcaccaagtagaacaacgttggtatattcgtacccctattcaagagggtgaagtattttcctctt |
| | ggctcatacgttctgctttggatttaggctgctcaccattaactttagtgaatcttttgtgggaaaaat |
| | ggagaggattaacgatagatattgatcgtgggttaaatgaagaaaaattagacatattgttaaatc |
| | attgttttgtggaacagcatgaagttcagaaaactatgttaagcagttatttccctgctttgattcca |
| | aaaaattataacaaaaatcagcgtattccttggatattggctctaggtattcgaaatcgttcaaatgt |
| | gtcaggtcgtcaaatttgtacgcaatgtctaagttctacccatacaccaccatatttgcgtatcaag |
| | tggcgtatggggtggcatagtggctgtgatattcataaaaccatattaatagatcattgtcctcaat |
| | gcagaatcacattacaacctataaaaattgatatagagcatggatcattagcaatttgtacttcatg |
| | ctatgctgatttaagtacactcattcaacgtccagtagaaacggatgcattaagatttcagcatcaa |
| | gctgatcaggtcttagagtcacaatttgggcgatataaccaaaaggatatttcatcaatagagtgg |
| | tttgagattgctcgtatatggttaagttttattcgatcccctttaaatatgaagagtcctaaccttttg |
| | caaatgtttgaaagtcttaatattgatttaaatatagattatcctattacaccagtagcctttgaattt |
| | ctgtctgttcaggagcgtgaaaaattattatcaattttaaataaaatcatggcattaccttgtgattta |
| | tttgttgatcgctctttagaatatcatgtaagtcattcttatttttgggataaaagaaaaaaactgcct |
| | acgcagcttcaactaatgaaagataaaatgttgaagccaattaagattattttgccgaaagataacgcc |
| | atagccatgagtaaacccaaatctaaaaaaagtgtacaacggaagtggttaaggctattgagaa |
| | agctacagaaaggggggaacaggtgactttagctcaattttcccataaagaaggctgtagtggt |
| | tgtgacagggctgatatagataaattcaaaaaaagatataagggcgataagtattgttcaacttgt |
| | tatgcccgaatttttaaaaaaagagcttgtccaaaatgtggtgaatatgccagattgccaaaaaat |
| | gatgatcaagcaatttgtaatgaatgcatcaaaaaacagccttgtattcgctgtaatcaaactaag |
| | aagccgatagggacactcaccgaatatggtgtggtttgtaatagctgttctgtttattttcgcccaa |
| | ttgagcgttgtgagaggtgtgatacaccatcacaaaaattgacacatatttcacgatttggtgatg |
| | atttaagggtatgtcccaaatgctctactagagattatgaaacatgtccctcttgtcataaatatcgc |
| | ttattagagcaagatgatacaggagctaagatttgtaaaaaatgtaggaataacgccaaaaaga |
| | aatgcaagcaatgtgatgtcttgataccagcaggctgtcctgatctatgtaacaactgttactggc |
| | ataagaatctatgggagaaagctagacgaaatattaaagcattccaatcccaacacttacaggct |
| | caatatgagcaatatttaatttggttagaagatgaggttggtgcaaataaagcagcactgtatatc |
| | aataaacatacccatttttttatcaaaactgaagaattatggcttgatgcaattcctacagcagaac |
| | agttattggctgttttaagaaccagtggacttagaaaatttgagttggttgcatcttggctagatga |
| | agcccatcacattaaggttgcattagaggataaagacttttgctctcaacaggatcagatagaaa |
| | aactgatttcaagccttcctcacccctctactgcttatgatgtggttatatcttataaagatgagcttg |
| | atataaaaatgaaagatggaaagaccagtatccggtccataaaactggcaataaagcctgcggt |
| | tgctcttatgcactatgtttgtgcatcgggagctacattacctaatttaaaccatataaaagcctatct |
| | tatcgacttttctggtcaggctgctgcactaacagggttcattaattttttgaataaaaattttgatac |
| | atctatagactatttggcttttaaaaaatcaaaaaatttcaatgaaaaacgaaaaaataaagtagaa |
| | aaagaaattgtccaatgggtggataagcctttggagaataaggaagatgtattaaattgggtgaa |
| | gaatgggctaagatattttcataatgtatcttatgtggagtctctaaaagtcaaatttgagatgatta |
| | cagaagctgatgatggatatgaaattttattgcagaatcattcttattggttgccaaaaaacacagg |
| | agatttaaaaagatagtttttttgtgattatactgtgctatttcaagctaatttattgtacaagttggt |
| | ttgtttatctaattcttctaaaagaactgtccataacaatatggggcaggctgctgccaccgctgagc |
| | aataactagcataaccccttggggcctctaaacgggtcttgaggggttttttgctgaaacctcag |
| | gcatttgagaagcacacggtcacactgcttccggtagtcaataaaccggtaaaccagcaataga |
| | cataagcggctatttaacgaccctgccctgaaccgacgaccgggtcatcgtggccggatcttgc |
| | ggcccctcggcttgaacgaattgttagacattatttgccgactaccttggtgatctcgcctttcacg |
| | tagtggacaaattcttccaactgatctgcgcgcgaggccaagcgatcttcttcttgtccaagataa |
| | gcctgtctagcttcaagtatgacgggctgatactgggccggcaggcgctccattgcccagtcg |
| | gcagcgacatccttcggcgcgattttgccggttactgcgctgtaccaaatgcgggacaacgtaa |
| | gcactacatttcgctcatcgccagcccagtcgggcggcgagttccatagcgttaaggtttcattta |
| | gcgcctcaaatagatcctgttcaggaaccggatcaaagagttcctccgccgctggacctaccaa |
| | ggcaacgctatgttctcttgcttttgtcagcaagatagccagatcaatgtcgatcgtggctggctc |
| | gaagatacctgcaagaatgtcattgcgctgccattctccaaattgcagttcgcgcttagctggata |
| | acgccacggaatgatgtcgtcgtgcacaacaatggtgacttctacagcgcggagaatctcgctc |
| | tctccaggggaagccgaagtttccaaaaggtcgttgatcaaagctcgccgcgttgtttcatcaag |
| | ccttacggtcaccgtaaccagcaaatcaatatcactgtgtggcttcaggccgccatccactgcg |
| | gagccgtacaaatgtacggccagcaacgtcggttcgagatggcgctcgatgacgccaactac |
| | ctctgatagttgagtcgatacttcggcgatcaccgcttccctcatactcttcctttttcaatattattg |
| | aagcatttatcagggttattgtctcatgagcggatacatatttgaatgtatttagaaaaataaacaaat |
| | agctagctcactcggtcgctacgctccgggcgtgagactgcggcgggcgctgcggacacata |
| | caaagttacccacagattccgtggataagcaggggactaacatgtgaggcaaaacagcaggg |
| | ccgcgccggtggcgtttttccataggctccgccctcctgccagagttcacataaacagacgcttt |
| | tccggtgcatctgtgggagccgtgaggctcaaccatgaatctgacagtacgggcgaaacccg |
| | acaggacttaaagatccccaccgtttccggcgggtcgctccctcttgcgctctcctgttccgacc |
| | ctgccgtttaccggatacctgttccgcctttctcccttacgggaagtgtggcgctttctcatagctc |
| | acacactggtatctcggctcggtgtaggtcgttcgctccaagctgggctgtaagcaagaactcc |
| | ccgttcagcccgactgctgcgccttatccggtaactgttcacttgagtccaacccggaaaagca |
| | cggtaaaacgccactggcagcagccattggtaactgggagttcgcagaggatttgtttagctaa |
| | acacgcggttgctcttgaagtgtgcgccaaagtccggctacactggaaggacagatttggttgc |
| | tgtgctctgcgaaagccagttaccacggttaagcagttccccaactgacttaaccttcgatcaaa |
| | ccacctccccaggtggttttttcgtttacagggcaaaagattacgcgcagaaaaaaaggatctca |
| | agaagatcctttgatcttttctactgaaccgctctagatttcagtgcaatttatctcttcaaatgtagc |
| | acctgaagtcagccccatacgatataagttgtaattctcatgttagtcatgccccgcgcccaccg |
| | gaaggagctgactgggttgaaggctctcaagggcatcggtcgagatcccggtgcctaatgagt |
| | gagctaacttacattaattgcgttgcgctcactgcccgctttccagtcgggaaacctgtcgtgcca |
| | gctgcattaatgaatcggccaacgcgcggggagaggcggtttgcgtattgggcgccagggtg |
| | gtttttcttttcaccagtgagacgggcaacagctgattgcccttcaccgcctggccctgagagag |
| | ttgcagcaagcggtccacgctggtttgccccagcaggcgaaaatcctgtttgatggtggttaac |
| | ggcgggatataacatgagctgtcttcggtatcgtcgtatcccactaccgagatgtccgcaccaa |
| | cgcgcagcccggactcggtaatggcgcgcattgcgcccagcgccatctgatcgttggcaacc |
| | agcatcgcagtgggaacgatgccctcattcagcatttgcatggtttgttgaaaaccggacatgg |
| | cactccagtcgccttcccgttccgctatcggctgaatttgattgcgagtgagatatttatgccagc |
| | cagccagacgcagacgcgccgagacagaacttaatgggcccgctaacagcgcgatttgctg |
| | gtgacccaatgcgaccagatgctccacgcccagtcgcgtaccgtcttcatgggagaaaataat |
| | actgttgatgggtgtctggtcagagacatcaagaaataacgccggaacattagtgcaggcagct |
| | tccacagcaatggcatcctggtcatccagcggatagttaatgatcagcccactgacgcgttgcg |
| | cgagaagattgtgcaccgccgctttacaggcttcgacgccgcttcgttctaccatcgacaccac |
| | cacgctggcacccagttgatcggcgcgagatttaatcgccgcgacaatttgcgacggcgcgtg |
| | cagggccagactggaggtggcaacgccaatcagcaacgactgtttgcccgccagttgttgtgc |
| | cacgcggttgggaatgtaattcagctccgccatcgccgcttccactttttcccgcgttttcgcaga |
| | aacgtggctggcctggttcaccacgcgggaaacggtctgataagagacaccggcatactctgc |
| | gacatcgtataacgttactggtttcacattcaccaccctgaattgactctcttccgggcgctatcat |
| | gccataccgcgaaaggttttgcgccattcgatggtgtccgggatctcgacgctctcccttatgcg |
| | actcctgcattaggaaattaatacgactcactata (SEQ ID NO: 101) |
| pHelper(AjTn6022)_ | ggggaattgtgagcggataacaattcccctgtagaaataattttgtttaactttaataaggagatat |
| ΔTnsB | acatgaaaagaatcagtgatgaatattccccagttaggaaatcccaaactgtatatgggagtattt |
| | cagtaaattatgcttttagaggggaaaagacgatttggtgtgaatctactcttgagcgtgattttttg |
| | attaggcaagaattcaatagcaatgtcatagatatcgtaagccagcctattaccatcccatatata |
| | acagagttgggtaatgaatccacttatactcctgatttcctcgtacagttttccagtgcaaattgtgg |
| | tgattttgaggaaattccctgtccactgttaatagaaataaaacctagaaagaaacttatagaagat |
| | tgggataaattaaagccaaaatttaaggcggctcatacttttgctaaagaaaaaggttggaaattc |
| | aagattataaatgaatcaaggttatatgatcagtattgggaaaatattaattttttgaaaagatttaga |
| | cgttctcatgtggatgtctatgatgaacaaactttaattgagactttagatagtcttggtcaatcgac |
| | tattaatcaattaccggcacatatttttaaggataaaactaatattcttcgaggtattcatcaagtatg |
| | ggcattggtcgcaaaacgaaaaatcatgtgtgatttatattgccccttaacagcagagacggtga |
| | tttggacaaatcaagatgatgtgcttacaaggagatttttaaatggttcagactgataatgcaaaaa |
| | tatgaacatcttgcagatgatgtacttgaagtcatgtctctaagtgatagtgatcgtatcaatatttta |
| | ttttctgatcgttggattggttataaaaaagcggtcactattttggatactttaactgatctgttgaat |
| | cgccctaggaagcttcgcccagaatgtttattgattgtgggtgattctaatatgggtaaaacgacca |
| | ttatccacgaattcacaaagcagcattacaccaaaacagtgaatgacatagatatggagctgctg |
| | tctgtaaaaaaacctgttttaaccatattagcccctgctaaagcgaatgtaaaagaattctatatca |
| | atatattgaatcatttctttgtcccatttcgtcctactgatcctgaagcaaagttacggaatcaagct |
| | gtccatctaatgcggaagtatgaaacaaaaatgttgattattgatgaaatccataattgtttaacag |
| | gttctaccaaacttctttccgaagtgatgaataccttaaagaatctaagtaatgatctaagtctgaat |
| | atcgttggcgtcggtactcgtgaagcagttacgattctacataccgatgctcaatatgcaagccgt |
| | tttgatgtagcaatgttgcctaaatgggaactgaatcaggattttctaagactattattaagttatgta |
| | cgattattgcctttaaagaaacgttctgatctagcatctcaaagacttgccacccttatatttgaaatt |
| | tcaggtgggaattttggtgacttaaacagattgttgattgagtgtgctaaagaggcaatcgtaaaa |
| | ggtaatgaagaaattaccgaagaaattgttaataaatttaaatggcttaaaccaaccgagggtat |
| | gaggaatattagaaatataaatcttaacatggtttaggtattctacttttcataggaaaatagccatg |
| | caccaagtagaacaacgttggtatattcgtacccctattcaagagggtgaagtattttcctcttggc |
| | tcatacgttctgctttggatttaggctgctcaccattaactttagtgaatcttttgtgggaaaaatgga |
| | gaggattaacgatagatattgatcgtgggttaaatgaagaaaaattagacatattgttaaatcattg |
| | ttttgtggaacagcatgaagttcagaaaactatgttaagcagttatttccctgctttgattccaaaaa |
| | attataacaaaaatcagcgtattccttggatattggctctaggtattcgaaatcgttcaaatgtgtca |
| | ggtcgtcaaatttgtacgcaatgtctaagttctacccatacaccaccatatttgcgtatcaagtggc |
| | gtatggggtggcatagtggctgtgatattcataaaaccatattaatagatcattgtcctcaatgcag |
| | aatcacattacaacctataaaaattgatatagagcatggatcattagcaatttgtacttcatgctatg |
| | ctgatttaagtacactcattcaacgtccagtagaaacggatgcattaagatttcagcatcaagctg |
| | atcaggtcttagagtcacaatttgggcgatataaccaaaaggatatttcatcaatagagtggtttg |
| | agattgctcgtatatggttaagttttattcgatcccctttaaatatgaagagtcctaaccttttgcaaa |
| | tgtttgaaagtcttaatattgatttaaatatagattatcctattacaccagtagcctttgaatttctgt |
| | ctgttcaggagcgtgaaaaattattatcaattttaaataaaatcatggcattaccttgtgatttatttg |
| | ttgatcgctctttagaatatcatgtaagtcattcttatttttgggataaaagaaaaaaactgcctacgc |
| | agcttcaactaatgaaagataaaatgttgaagccaattaagattattttgccgaaagataacgccata |
| | gccatgagtaaacccaaatctaaaaaaagtgtacaacggaagtggttaaggctattgagaaag |
| | ctacagaaaggggggaacaggtgactttagctcaattttcccataaagaaggctgtagtggttgt |
| | gacagggctgatatagataaattcaaaaaaagatataagggcgataagtattgttcaacttgttat |
| | gcccgaatttttaaaaaaagagcttgtccaaaatgtggtgaatatgccagattgccaaaaaatgat |
| | gatcaagcaatttgtaatgaatgcatcaaaaaacagccttgtattcgctgtaatcaaactaagaag |
| | ccgatagggacactcaccgaatatggtgtggtttgtaatagctgttctgtttattttcgcccaattga |
| | gcgttgtgagaggtgtgatacaccatcacaaaaattgacacatatttcacgatttggtgatgattta |
| | agggtatgtcccaaatgctctactagagattatgaaacatgtccctcttgtcataaatatcgcttatt |
| | agagcaagatgatacaggagctaagatttgtaaaaaatgtaggaataacgccaaaaagaaatg |
| | caagcaatgtgatgtcttgataccagcaggctgtcctgatctatgtaacaactgttactggcataa |
| | gaatctatgggagaaagctagacgaaatattaaagcattccaatcccaacacttacaggctcaat |
| | atgagcaatatttaatttggttagaagatgaggttggtgcaaataaagcagcactgtatatcaata |
| | aacatacccatttttttatcaaaactgaagaattatggcttgatgcaattcctacagcagaacagtta |
| | ttggctgttttaagaaccagtggacttagaaaatttgagttggttgcatcttggctagatgaagccc |
| | atcacattaaggttgcattagaggataaagacttttgctctcaacaggatcagatagaaaaactga |
| | tttcaagccttcctcacccctctactgcttatgatgtggttatatcttataaagatgagcttgatataa |
| | aaatgaaagatggaaagaccagtatccggtccataaaactggcaataaagcctgcggttgctct |
| | tatgcactatgtttgtgcatcgggagctacattacctaatttaaaccatataaaagcctatcttatcg |
| | acttttctggtcaggctgctgcactaacagggttcattaattttttgaataaaaattttgatacatcta |
| | tagactatttggcttttaaaaaatcaaaaaatttcaatgaaaaacgaaaaaataaagtagaaaaag |
| | aaattgtccaatgggtggataagcctttggagaataaggaagatgtattaaattgggtgaagaat |
| | gggctaagatattttcataatgtatcttatgtggagtctctaaaagtcaaatttgagatgattacaga |
| | agctgatgatggatatgaaattttattgcagaatcattcttattggttgccaaaaaacacaggagat |
| | ttaaaaagatagtttttttgtgattatactgtgctatttcaagctaatttattgtacaagttggtttgt |
| | ttatctaattcttctaaaagaactgtccataacaatatggggcaggctgctgccaccgctgagcaataa |
| | ctagcataaccccttggggcctctaaacgggtcttgaggggttttttgctgaaacctcaggcattt |
| | gagaagcacacggtcacactgcttccggtagtcaataaaccggtaaaccagcaatagacataa |
| | gcggctatttaacgaccctgccctgaaccgacgaccgggtcatcgtggccggatcttgcggcc |
| | cctcggcttgaacgaattgttagacattatttgccgactaccttggtgatctcgcctttcacgtagt |
| | ggacaaattcttccaactgatctgcgcgcgaggccaagcgatcttcttcttgtccaagataagcc |
| | tgtctagcttcaagtatgacgggctgatactgggccggcaggcgctccattgcccagtcggca |
| | gcgacatccttcggcgcgattttgccggttactgcgctgtaccaaatgcgggacaacgtaagca |
| | ctacatttcgctcatcgccagcccagtcgggcggcgagttccatagcgttaaggtttcatttagc |
| | gcctcaaatagatcctgttcaggaaccggatcaaagagttcctccgccgctggacctaccaag |
| | gcaacgctatgttctcttgcttttgtcagcaagatagccagatcaatgtcgatcgtggctggctcg |
| | aagatacctgcaagaatgtcattgcgctgccattctccaaattgcagttcgcgcttagctggataa |
| | cgccacggaatgatgtcgtcgtgcacaacaatggtgacttctacagcgcggagaatctcgctct |
| | ctccaggggaagccgaagtttccaaaaggtcgttgatcaaagctcgccgcgttgtttcatcaag |
| | ccttacggtcaccgtaaccagcaaatcaatatcactgtgtggcttcaggccgccatccactgcg |
| | gagccgtacaaatgtacggccagcaacgtcggttcgagatggcgctcgatgacgccaactac |
| | ctctgatagttgagtcgatacttcggcgatcaccgcttccctcatactcttcctttttcaatattattg |
| | aagcatttatcagggttattgtctcatgagcggatacatatttgaatgtatttagaaaaataaacaaat |
| | agctagctcactcggtcgctacgctccgggcgtgagactgcggcgggcgctgcggacacata |
| | caaagttacccacagattccgtggataagcaggggactaacatgtgaggcaaaacagcaggg |
| | ccgcgccggtggcgtttttccataggctccgccctcctgccagagttcacataaacagacgcttt |
| | tccggtgcatctgtgggagccgtgaggctcaaccatgaatctgacagtacgggcgaaacccg |
| | acaggacttaaagatccccaccgtttccggcgggtcgctccctcttgcgctctcctgttccgacc |
| | ctgccgtttaccggatacctgttccgcctttctcccttacgggaagtgtggcgctttctcatagctc |
| | acacactggtatctcggctcggtgtaggtcgttcgctccaagctgggctgtaagcaagaactcc |
| | ccgttcagcccgactgctgcgccttatccggtaactgttcacttgagtccaacccggaaaagca |
| | cggtaaaacgccactggcagcagccattggtaactgggagttcgcagaggatttgtttagctaa |
| | acacgcggttgctcttgaagtgtgcgccaaagtccggctacactggaaggacagatttggttgc |
| | tgtgctctgcgaaagccagttaccacggttaagcagttccccaactgacttaaccttcgatcaaa |
| | ccacctccccaggtggttttttcgtttacagggcaaaagattacgcgcagaaaaaaaggatctca |
| | agaagatcctttgatcttttctactgaaccgctctagatttcagtgcaatttatctcttcaaatgtagc |
| | acctgaagtcagccccatacgatataagttgtaattctcatgttagtcatgccccgcgcccaccg |
| | gaaggagctgactgggttgaaggctctcaagggcatcggtcgagatcccggtgcctaatgagt |
| | gagctaacttacattaattgcgttgcgctcactgcccgctttccagtcgggaaacctgtcgtgcca |
| | gctgcattaatgaatcggccaacgcgcggggagaggcggtttgcgtattgggcgccagggtg |
| | gtttttttttcaccagtgagacgggcaacagctgattgcccttcaccgcctggccctgagagag |
| | ttgcagcaagcggtccacgctggtttgccccagcaggcgaaaatcctgtttgatggtggttaac |
| | ggcgggatataacatgagctgtcttcggtatcgtcgtatcccactaccgagatgtccgcaccaa |
| | cgcgcagcccggactcggtaatggcgcgcattgcgcccagcgccatctgatcgttggcaacc |
| | agcatcgcagtgggaacgatgccctcattcagcatttgcatggtttgttgaaaaccggacatgg |
| | cactccagtcgccttcccgttccgctatcggctgaatttgattgcgagtgagatatttatgccagc |
| | cagccagacgcagacgcgccgagacagaacttaatgggcccgctaacagcgcgatttgctg |
| | gtgacccaatgcgaccagatgctccacgcccagtcgcgtaccgtcttcatgggagaaaataat |
| | actgttgatgggtgtctggtcagagacatcaagaaataacgccggaacattagtgcaggcagct |
| | tccacagcaatggcatcctggtcatccagcggatagttaatgatcagcccactgacgcgttgcg |
| | cgagaagattgtgcaccgccgctttacaggcttcgacgccgcttcgttctaccatcgacaccac |
| | cacgctggcacccagttgatcggcgcgagatttaatcgccgcgacaatttgcgacggcgcgtg |
| | cagggccagactggaggtggcaacgccaatcagcaacgactgtttgcccgccagttgttgtgc |
| | cacgcggttgggaatgtaattcagctccgccatcgccgcttccactttttcccgcgttttcgcaga |
| | aacgtggctggcctggttcaccacgcgggaaacggtctgataagagacaccggcatactctgc |
| | gacatcgtataacgttactggtttcacattcaccaccctgaattgactctcttccgggcgctatcat |
| | gccataccgcgaaaggttttgcgccattcgatggtgtccgggatctcgacgctctcccttatgcg |
| | actcctgcattaggaaattaatacgactcactata (SEQ ID NO: 102) |
| pHelper(AjTn6022)_ | gggaattgtgagcggataacaattcccctgtagaaataattttgtttaactttaataaggagatat |
| ΔTnsC | acatgaaaagaatcagtgatgaatattccccagttaggaaatcccaaactgtatatgggagtattt |
| | cagtaaattatgcttttagaggggaaaagacgatttggtgtgaatctactcttgagcgtgattttttg |
| | attaggcaagaattcaatagcaatgtcatagatatcgtaagccagcctattaccatcccatatata |
| | acagagttgggtaatgaatccacttatactcctgatttcctcgtacagttttccagtgcaaattgtgg |
| | tgattttgaggaaattccctgtccactgttaatagaaataaaacctagaaagaaacttatagaagat |
| | tgggataaattaaagccaaaatttaaggcggctcatacttttgctaaagaaaaaggttggaaattc |
| | aagattataaatgaatcaaggttatatgatcagtattgggaaaatattaattttttgaaaagatttaga |
| | cgttctcatgtggatgtctatgatgaacaaactttaattgagactttagatagtcttggtcaatcgac |
| | tattaatcaattaccggcacatatttttaaggataaaactaatattcttcgaggtattcatcaagtatg |
| | ggcattggtcgcaaaacgaaaaatcatgtgtgatttatattgccccttaacagcagagacggtga |
| | tttggacaaatcaagatgatgtgcttacaaggagatttttaaatggttcagactgatactgtaagta |
| | ttgaccgaagtcggatcatactcaaaccaaatgtaattgttaagtatgaagggcaaccgtataag |
| | attgctaatgttttgaatgccaacgatatcgtgatttctagtttagattctgtgcgttgtttacaagta |
| | agtgcagattctctacaagtatttgaagctgaaaataaccaaactaaagatataaataaaggtgatt |
| | gggatattacgcatgaagcgtggaaaatagctttacatcgttatgaaatcatcaagccgttgatta |
| | agtattcaacaaccgaattagtcgagcaacgagcaagtgaatatggcattaaccgttccacctta |
| | tggaaatggttaaaagattttagagaaaataattctatcttagtgttagttcctaaaaagagaggtt |
| | ggacgaccaagaagtctaggttgtctcctcaaattatgaatattattaaccaaggtattcaagagg |
| | aatatctcaatgccagaaagcctagtattgcaaaaactatagattttattaaagcagaatgttctcg |
| | ccttaaactagaagcaccccatgacaattcaattcgtagaaaaatagaagcattaaacgattatat |
| | ggtgattaaggctcgtcatggttctaaagcagcacaagataagtatgcatctgctgctggtgagt |
| | ttcctaatgctgattatcccttggcatatgtacaggtagaccacactccactagatattgaaattgtt |
| | gatgatgaatttagagaggcgattggacgaccatttctaacattagctattgatataaatactcgaa |
| | tggtggtcggttattacttgtccttagaagcccccagtgcaacatctgttgccatgtgtattgcttcc |
| | agtattttgtcaaaaaaacggaagctaattgaattggatatagatgctgattggcaagttgaaggt |
| | cttatggattctatacatacagataatggtcctgactttagaactaaccatatcagtcgagcttgctt |
| | aaaatatgggattcattgggagtttcgtccgattggtggggcaaggtttggtggacatatcgaac |
| | gtttgattggtgttgttaacattgaaatgcacatcttggatggtacaaccttctcgaatatccaagaa |
| | cgtggaacctataattcagcaggtcatgcctgtatgacactaaaagaactagaatattatattgttt |
| | attggatcactaaagtttatcaccaaaagaaacactccaaactcggtatgtcacctttacagaagt |
| | ggcaagatggtgtttggggaacaaaaactagtgttggaacaggtttaaaagagagagtttcgga |
| | tgaagatacattatttattgatttccttcccgaatttgaatcaacaattcaacgtgtaggtgtacaga |
| | aagacaatctattttattttgctgattgtttacgacaatgggttaattgtgttgatcccgaagatgtaa |
| | ataaaaagagaaaaaagaaatttttgtttaaacgtgatccaagggatatttctcttatttggttttatg |
| | aacctctgtccaatacatattttaaagtgcctactgctaagcgagaaataccaccaattagcttattt |
| | gaatacaaacaagtgcagaaatatcttcgtggcgagcaacatgataatcaaaatcaggatgaga |
| | tttatcaggcaattcttcatttacgagagcaattgaaacaatcccgtagtctgactcggaagcaac |
| | ggagagtaaatcaacgtaaaaaggaaaatgcaaaagcaacacatcatttatctgtaaaaaatga |
| | acctgaaaaaccatctattgtcgaaaacagtgttcagccgactaatgatttatggagtattccattg |
| | acggcatttgaagatttaaggggataatagtattctacttttcataggaaaatagccatgcaccaa |
| | gtagaacaacgttggtatattcgtacccctattcaagagggtgaagtattttcctcttggctcatac |
| | gttctgctttggatttaggctgctcaccattaactttagtgaatcttttgtgggaaaaatggagagg |
| | attaacgatagatattgatcgtgggttaaatgaagaaaaattagacatattgttaaatcattgttttgt |
| | ggaacagcatgaagttcagaaaactatgttaagcagttatttccctgctttgattccaaaaaattat |
| | aacaaaaatcagcgtattccttggatattggctctaggtattcgaaatcgttcaaatgtgtcaggtc |
| | gtcaaatttgtacgcaatgtctaagttctacccatacaccaccatatttgcgtatcaagtggcgtat |
| | ggggtggcatagtggctgtgatattcataaaaccatattaatagatcattgtcctcaatgcagaat |
| | cacattacaacctataaaaattgatatagagcatggatcattagcaatttgtacttcatgctatgctg |
| | atttaagtacactcattcaacgtccagtagaaacggatgcattaagatttcagcatcaagctgatc |
| | aggtcttagagtcacaatttgggcgatataaccaaaaggatatttcatcaatagagtggtttgaga |
| | ttgctcgtatatggttaagttttattcgatcccctttaaatatgaagagtcctaaccttttgcaaatgt |
| | ttgaaagtcttaatattgatttaaatatagattatcctattacaccagtagcctttgaatttctgtctg |
| | ttcaggagcgtgaaaaattattatcaattttaaataaaatcatggcattaccttgtgatttatttgttg |
| | atcgctctttagaatatcatgtaagtcattcttatttttgggataaaagaaaaaaactgcctacgcagc |
| | ttcaactaatgaaagataaaatgttgaagccaattaagattattttgccgaaagataacgccatagcc |
| | atgagtaaacccaaatctaaaaaaagtgtacaacggaagtggttaaggctattgagaaagctac |
| | agaaaggggggaacaggtgactttagctcaattttcccataaagaaggctgtagtggttgtgac |
| | agggctgatatagataaattcaaaaaaagatataagggcgataagtattgttcaacttgttatgcc |
| | cgaatttttaaaaaaagagcttgtccaaaatgtggtgaatatgccagattgccaaaaaatgatgat |
| | caagcaatttgtaatgaatgcatcaaaaaacagccttgtattcgctgtaatcaaactaagaagcc |
| | gatagggacactcaccgaatatggtgtggtttgtaatagctgttctgtttattttcgcccaattgagc |
| | gttgtgagaggtgtgatacaccatcacaaaaattgacacatatttcacgatttggtgatgatttaag |
| | ggtatgtcccaaatgctctactagagattatgaaacatgtccctcttgtcataaatatcgcttattag |
| | agcaagatgatacaggagctaagatttgtaaaaaatgtaggaataacgccaaaaagaaatgca |
| | agcaatgtgatgtcttgataccagcaggctgtcctgatctatgtaacaactgttactggcataaga |
| | atctatgggagaaagctagacgaaatattaaagcattccaatcccaacacttacaggctcaatat |
| | gagcaatatttaatttggttagaagatgaggttggtgcaaataaagcagcactgtatatcaataaa |
| | catacccatttttttatcaaaactgaagaattatggcttgatgcaattcctacagcagaacagttatt |
| | ggctgttttaagaaccagtggacttagaaaatttgagttggttgcatcttggctagatgaagccca |
| | tcacattaaggttgcattagaggataaagacttttgctctcaacaggatcagatagaaaaactgat |
| | ttcaagccttcctcacccctctactgcttatgatgtggttatatcttataaagatgagcttgatataaa |
| | aatgaaagatggaaagaccagtatccggtccataaaactggcaataaagcctgcggttgctctt |
| | atgcactatgtttgtgcatcgggagctacattacctaatttaaaccatataaaagcctatcttatcga |
| | cttttctggtcaggctgctgcactaacagggttcattaattttttgaataaaaattttgatacatctat |
| | agactatttggcttttaaaaaatcaaaaaatttcaatgaaaaacgaaaaaataaagtagaaaaaga |
| | aattgtccaatgggtggataagcctttggagaataaggaagatgtattaaattgggtgaagaatg |
| | ggctaagatattttcataatgtatcttatgtggagtctctaaaagtcaaatttgagatgattacagaa |
| | gctgatgatggatatgaaattttattgcagaatcattcttattggttgccaaaaaacacaggagattt |
| | aaaaagatagtttttttgtgattatactgtgctatttcaagctaatttattgtacaagttggtttgttt |
| | atctaattcttctaaaagaactgtccataacaatatggggcaggctgctgccaccgctgagcaataac |
| | tagcataaccccttggggcctctaaacgggtcttgaggggttttttgctgaaacctcaggcatttg |
| | agaagcacacggtcacactgcttccggtagtcaataaaccggtaaaccagcaatagacataag |
| | cggctatttaacgaccctgccctgaaccgacgaccgggtcatcgtggccggatcttgcggccc |
| | ctcggcttgaacgaattgttagacattatttgccgactaccttggtgatctcgcctttcacgtagtg |
| | gacaaattcttccaactgatctgcgcgcgaggccaagcgatcttcttcttgtccaagataagcct |
| | gtctagcttcaagtatgacgggctgatactgggccggcaggcgctccattgcccagtcggcag |
| | cgacatccttcggcgcgattttgccggttactgcgctgtaccaaatgcgggacaacgtaagcac |
| | tacatttcgctcatcgccagcccagtcgggcggcgagttccatagcgttaaggtttcatttagcg |
| | cctcaaatagatcctgttcaggaaccggatcaaagagttcctccgccgctggacctaccaaggc |
| | aacgctatgttctcttgcttttgtcagcaagatagccagatcaatgtcgatcgtggctggctcgaa |
| | gatacctgcaagaatgtcattgcgctgccattctccaaattgcagttcgcgcttagctggataacg |
| | ccacggaatgatgtcgtcgtgcacaacaatggtgacttctacagcgcggagaatctcgctctct |
| | ccaggggaagccgaagtttccaaaaggtcgttgatcaaagctcgccgcgttgtttcatcaagcc |
| | ttacggtcaccgtaaccagcaaatcaatatcactgtgtggcttcaggccgccatccactgcgga |
| | gccgtacaaatgtacggccagcaacgtcggttcgagatggcgctcgatgacgccaactacctc |
| | tgatagttgagtcgatacttcggcgatcaccgcttccctcatactcttcctttttcaatattattgaag |
| | catttatcagggttattgtctcatgagcggatacatatttgaatgtatttagaaaaataaacaaatag |
| | ctagctcactcggtcgctacgctccgggcgtgagactgcggcgggcgctgcggacacataca |
| | aagttacccacagattccgtggataagcaggggactaacatgtgaggcaaaacagcagggcc |
| | gcgccggtggcgtttttccataggctccgccctcctgccagagttcacataaacagacgcttttc |
| | cggtgcatctgtgggagccgtgaggctcaaccatgaatctgacagtacgggcgaaacccgac |
| | aggacttaaagatccccaccgtttccggcgggtcgctccctcttgcgctctcctgttccgaccct |
| | gccgtttaccggatacctgttccgcctttctcccttacgggaagtgtggcgctttctcatagctcac |
| | acactggtatctcggctcggtgtaggtcgttcgctccaagctgggctgtaagcaagaactcccc |
| | gttcagcccgactgctgcgccttatccggtaactgttcacttgagtccaacccggaaaagcacg |
| | gtaaaacgccactggcagcagccattggtaactgggagttcgcagaggatttgtttagctaaac |
| | acgcggttgctcttgaagtgtgcgccaaagtccggctacactggaaggacagatttggttgctg |
| | tgctctgcgaaagccagttaccacggttaagcagttccccaactgacttaaccttcgatcaaacc |
| | acctccccaggtggttttttcgtttacagggcaaaagattacgcgcagaaaaaaaggatctcaag |
| | aagatcctttgatcttttctactgaaccgctctagatttcagtgcaatttatctcttcaaatgtagcac |
| | ctgaagtcagccccatacgatataagttgtaattctcatgttagtcatgccccgcgcccaccgga |
| | aggagctgactgggttgaaggctctcaagggcatcggtcgagatcccggtgcctaatgagtga |
| | gctaacttacattaattgcgttgcgctcactgcccgctttccagtcgggaaacctgtcgtgccagc |
| | tgcattaatgaatcggccaacgcgcggggagaggcggtttgcgtattgggcgccagggtggtt |
| | tttcttttcaccagtgagacgggcaacagctgattgcccttcaccgcctggccctgagagagttg |
| | cagcaagcggtccacgctggtttgccccagcaggcgaaaatcctgtttgatggtggttaacgg |
| | cgggatataacatgagctgtcttcggtatcgtcgtatcccactaccgagatgtccgcaccaacgc |
| | gcagcccggactcggtaatggcgcgcattgcgcccagcgccatctgatcgttggcaaccagc |
| | atcgcagtgggaacgatgccctcattcagcatttgcatggtttgttgaaaaccggacatggcact |
| | ccagtcgccttcccgttccgctatcggctgaatttgattgcgagtgagatatttatgccagccagc |
| | cagacgcagacgcgccgagacagaacttaatgggcccgctaacagcgcgatttgctggtgac |
| | ccaatgcgaccagatgctccacgcccagtcgcgtaccgtcttcatgggagaaaataatactgtt |
| | gatgggtgtctggtcagagacatcaagaaataacgccggaacattagtgcaggcagcttccac |
| | agcaatggcatcctggtcatccagcggatagttaatgatcagcccactgacgcgttgcgcgag |
| | aagattgtgcaccgccgctttacaggcttcgacgccgcttcgttctaccatcgacaccaccacg |
| | ctggcacccagttgatcggcgcgagatttaatcgccgcgacaatttgcgacggcgcgtgcagg |
| | gccagactggaggtggcaacgccaatcagcaacgactgtttgcccgccagttgttgtgccacg |
| | cggttgggaatgtaattcagctccgccatcgccgcttccactttttcccgcgttttcgcagaaacg |
| | tggctggcctggttcaccacgcgggaaacggtctgataagagacaccggcatactctgcgaca |
| | tcgtataacgttactggtttcacattcaccaccctgaattgactctcttccgggcgctatcatgccat |
| | accgcgaaaggttttgcgccattcgatggtgtccgggatctcgacgctctcccttatgcgactcc |
| | tgcattaggaaattaatacgactcactata (SEQ ID NO: 103) |
| pHelper(AjTn6022)_ | ggggaattgtgagcggataacaattcccctgtagaaataattttgtttaactttaataaggagatat |
| ΔTnsD | acatgaaaagaatcagtgatgaatattccccagttaggaaatcccaaactgtatatgggagtattt |
| | cagtaaattatgcttttagaggggaaaagacgatttggtgtgaatctactcttgagcgtgattttttg |
| | attaggcaagaattcaatagcaatgtcatagatatcgtaagccagcctattaccatcccatatata |
| | acagagttgggtaatgaatccacttatactcctgatttcctcgtacagttttccagtgcaaattgtgg |
| | tgattttgaggaaattccctgtccactgttaatagaaataaaacctagaaagaaacttatagaagat |
| | tgggataaattaaagccaaaatttaaggcggctcatacttttgctaaagaaaaaggttggaaattc |
| | aagattataaatgaatcaaggttatatgatcagtattgggaaaatattaattttttgaaaagatttaga |
| | cgttctcatgtggatgtctatgatgaacaaactttaattgagactttagatagtcttggtcaatcgac |
| | tattaatcaattaccggcacatatttttaaggataaaactaatattcttcgaggtattcatcaagtatg |
| | ggcattggtcgcaaaacgaaaaatcatgtgtgatttatattgccccttaacagcagagacggtga |
| | tttggacaaatcaagatgatgtgcttacaaggagatttttaaatggttcagactgatactgtaagta |
| | ttgaccgaagtcggatcatactcaaaccaaatgtaattgttaagtatgaagggcaaccgtataag |
| | attgctaatgttttgaatgccaacgatatcgtgatttctagtttagattctgtgcgttgtttacaagta |
| | agtgcagattctctacaagtatttgaagctgaaaataaccaaactaaagatataaataaaggtgatt |
| | gggatattacgcatgaagcgtggaaaatagctttacatcgttatgaaatcatcaagccgttgatta |
| | agtattcaacaaccgaattagtcgagcaacgagcaagtgaatatggcattaaccgttccacctta |
| | tggaaatggttaaaagattttagagaaaataattctatcttagtgttagttcctaaaaagagaggtt |
| | ggacgaccaagaagtctaggttgtctcctcaaattatgaatattattaaccaaggtattcaagagg |
| | aatatctcaatgccagaaagcctagtattgcaaaaactatagattttattaaagcagaatgttctcg |
| | ccttaaactagaagcaccccatgacaattcaattcgtagaaaaatagaagcattaaacgattatat |
| | ggtgattaaggctcgtcatggttctaaagcagcacaagataagtatgcatctgctgctggtgagt |
| | ttcctaatgctgattatcccttggcatatgtacaggtagaccacactccactagatattgaaattgtt |
| | gatgatgaatttagagaggcgattggacgaccatttctaacattagctattgatataaatactcgaa |
| | tggtggtcggttattacttgtccttagaagcccccagtgcaacatctgttgccatgtgtattgcttcc |
| | agtattttgtcaaaaaaacggaagctaattgaattggatatagatgctgattggcaagttgaaggt |
| | cttatggattctatacatacagataatggtcctgactttagaactaaccatatcagtcgagcttgctt |
| | aaaatatgggattcattgggagtttcgtccgattggtggggcaaggtttggtggacatatcgaac |
| | gtttgattggtgttgttaacattgaaatgcacatcttggatggtacaaccttctcgaatatccaagaa |
| | cgtggaacctataattcagcaggtcatgcctgtatgacactaaaagaactagaatattatattgttt |
| | attggatcactaaagtttatcaccaaaagaaacactccaaactcggtatgtcacctttacagaagt |
| | ggcaagatggtgtttggggaacaaaaactagtgttggaacaggtttaaaagagagagtttcgga |
| | tgaagatacattatttattgatttccttcccgaatttgaatcaacaattcaacgtgtaggtgtacaga |
| | aagacaatctattttattttgctgattgtttacgacaatgggttaattgtgttgatcccgaagatgtaa |
| | ataaaaagagaaaaaagaaatttttgtttaaacgtgatccaagggatatttctcttatttggttttatg |
| | aacctctgtccaatacatattttaaagtgcctactgctaagcgagaaataccaccaattagcttattt |
| | gaatacaaacaagtgcagaaatatcttcgtggcgagcaacatgataatcaaaatcaggatgaga |
| | tttatcaggcaattcttcatttacgagagcaattgaaacaatcccgtagtctgactcggaagcaac |
| | ggagagtaaatcaacgtaaaaaggaaaatgcaaaagcaacacatcatttatctgtaaaaaatga |
| | acctgaaaaaccatctattgtcgaaaacagtgttcagccgactaatgatttatggagtattccattg |
| | acggcatttgaagatttaaggggataataatgcaaaaatatgaacatcttgcagatgatgtacttg |
| | aagtcatgtctctaagtgatagtgatcgtatcaatattttattttctgatcgttggattggttataaaa |
| | aagcggtcactattttggatactttaactgatctgttgaatcgccctaggaagcttcgcccagaatgt |
| | ttattgattgtgggtgattctaatatgggtaaaacgaccattatccacgaattcacaaagcagcatt |
| | acaccaaaacagtgaatgacatagatatggagctgctgtctgtaaaaaaacctgttttaaccatat |
| | tagcccctgctaaagcgaatgtaaaagaattctatatcaatatattgaatcatttctttgtcccatttc |
| | gtcctactgatcctgaagcaaagttacggaatcaagctgtccatctaatgcggaagtatgaaaca |
| | aaaatgttgattattgatgaaatccataattgtttaacaggttctaccaaacttctttccgaagtgatg |
| | aataccttaaagaatctaagtaatgatctaagtctgaatatcgttggcgtcggtactcgtgaagca |
| | gttacgattctacataccgatgctcaatatgcaagccgttttgatgtagcaatgttgcctaaatggg |
| | aactgaatcaggattttctaagactattattaagttatgtacgattattgcctttaaagaaacgttctg |
| | atctagcatctcaaagacttgccacccttatatttgaaatttcaggtgggaattttggtgacttaaac |
| | agattgttgattgagtgtgctaaagaggcaatcgtaaaaggtaatgaagaaattaccgaagaaat |
| | tgttaataaatttaaatggcttaaaccaaccgagggtatgaggaatattagaaatataaatcttaac |
| | atggtttaggtattctacttttcataggaaaatagccgtggttaaggctattgagaaagctacagaa |
| | aggggggaacaggtgactttagctcaattttcccataaagaaggctgtagtggttgtgacaggg |
| | ctgatatagataaattcaaaaaaagatataagggcgataagtattgttcaacttgttatgcccgaat |
| | ttttaaaaaaagagcttgtccaaaatgtggtgaatatgccagattgccaaaaaatgatgatcaagc |
| | aatttgtaatgaatgcatcaaaaaacagccttgtattcgctgtaatcaaactaagaagccgatagg |
| | gacactcaccgaatatggtgtggtttgtaatagctgttctgtttattttcgcccaattgagcgttgtg |
| | agaggtgtgatacaccatcacaaaaattgacacatatttcacgatttggtgatgatttaagggtat |
| | gtcccaaatgctctactagagattatgaaacatgtccctcttgtcataaatatcgcttattagagca |
| | agatgatacaggagctaagatttgtaaaaaatgtaggaataacgccaaaaagaaatgcaagca |
| | atgtgatgtcttgataccagcaggctgtcctgatctatgtaacaactgttactggcataagaatcta |
| | tgggagaaagctagacgaaatattaaagcattccaatcccaacacttacaggctcaatatgagc |
| | aatatttaatttggttagaagatgaggttggtgcaaataaagcagcactgtatatcaataaacatac |
| | ccatttttttatcaaaactgaagaattatggcttgatgcaattcctacagcagaacagttattggctg |
| | ttttaagaaccagtggacttagaaaatttgagttggttgcatcttggctagatgaagcccatcacat |
| | taaggttgcattagaggataaagacttttgctctcaacaggatcagatagaaaaactgatttcaag |
| | ccttcctcacccctctactgcttatgatgtggttatatcttataaagatgagcttgatataaaaatgaa |
| | agatggaaagaccagtatccggtccataaaactggcaataaagcctgcggttgctcttatgcact |
| | atgtttgtgcatcgggagctacattacctaatttaaaccatataaaagcctatcttatcgacttttctg |
| | gtcaggctgctgcactaacagggttcattaattttttgaataaaaattttgatacatctatagactatt |
| | tggcttttaaaaaatcaaaaaatttcaatgaaaaacgaaaaaataaagtagaaaaagaaattgtc |
| | caatgggtggataagcctttggagaataaggaagatgtattaaattgggtgaagaatgggctaa |
| | gatattttcataatgtatcttatgtggagtctctaaaagtcaaatttgagatgattacagaagctgat |
| | gatggatatgaaattttattgcagaatcattcttattggttgccaaaaaacacaggagatttaaaaa |
| | gatagtttttttgtgattatactgtgctatttcaagctaatttattgtacaagttggtttgtttatcta |
| | attcttctaaaagaactgtccataacaatatggggcaggctgctgccaccgctgagcaataactagca |
| | taaccccttggggcctctaaacgggtcttgaggggttttttgctgaaacctcaggcatttgagaa |
| | gcacacggtcacactgcttccggtagtcaataaaccggtaaaccagcaatagacataagcggc |
| | tatttaacgaccctgccctgaaccgacgaccgggtcatcgtggccggatcttgcggcccctcg |
| | gcttgaacgaattgttagacattatttgccgactaccttggtgatctcgcctttcacgtagtggaca |
| | aattcttccaactgatctgcgcgcgaggccaagcgatcttcttcttgtccaagataagcctgtcta |
| | gcttcaagtatgacgggctgatactgggccggcaggcgctccattgcccagtcggcagcgac |
| | atccttcggcgcgattttgccggttactgcgctgtaccaaatgcgggacaacgtaagcactacat |
| | ttcgctcatcgccagcccagtcgggcggcgagttccatagcgttaaggtttcatttagcgcctca |
| | aatagatcctgttcaggaaccggatcaaagagttcctccgccgctggacctaccaaggcaacg |
| | ctatgttctcttgcttttgtcagcaagatagccagatcaatgtcgatcgtggctggctcgaagatac |
| | ctgcaagaatgtcattgcgctgccattctccaaattgcagttcgcgcttagctggataacgccac |
| | ggaatgatgtcgtcgtgcacaacaatggtgacttctacagcgcggagaatctcgctctctccag |
| | gggaagccgaagtttccaaaaggtcgttgatcaaagctcgccgcgttgtttcatcaagccttacg |
| | gtcaccgtaaccagcaaatcaatatcactgtgtggcttcaggccgccatccactgcggagccgt |
| | acaaatgtacggccagcaacgtcggttcgagatggcgctcgatgacgccaactacctctgata |
| | gttgagtcgatacttcggcgatcaccgcttccctcatactcttcctttttcaatattattgaagcattt |
| | atcagggttattgtctcatgagcggatacatatttgaatgtatttagaaaaataaacaaatagctagc |
| | tcactcggtcgctacgctccgggcgtgagactgcgggggcgctgcggacacatacaaagtt |
| | acccacagattccgtggataagcaggggactaacatgtgaggcaaaacagcagggccgcgc |
| | cggtggcgtttttccataggctccgccctcctgccagagttcacataaacagacgcttttccggtg |
| | catctgtgggagccgtgaggctcaaccatgaatctgacagtacgggcgaaacccgacaggac |
| | ttaaagatccccaccgtttccggcgggtcgctccctcttgcgctctcctgttccgaccctgccgttt |
| | accggatacctgttccgcctttctcccttacgggaagtgtggcgctttctcatagctcacacactg |
| | gtatctcggctcggtgtaggtcgttcgctccaagctgggctgtaagcaagaactccccgttcag |
| | cccgactgctgcgccttatccggtaactgttcacttgagtccaacccggaaaagcacggtaaaa |
| | cgccactggcagcagccattggtaactgggagttcgcagaggatttgtttagctaaacacgcg |
| | gttgctcttgaagtgtgcgccaaagtccggctacactggaaggacagatttggttgctgtgctct |
| | gcgaaagccagttaccacggttaagcagttccccaactgacttaaccttcgatcaaaccacctc |
| | cccaggtggttttttcgtttacagggcaaaagattacgcgcagaaaaaaaggatctcaagaaga |
| | tcctttgatcttttctactgaaccgctctagatttcagtgcaatttatctcttcaaatgtagcacctga |
| | agtcagccccatacgatataagttgtaattctcatgttagtcatgccccgcgcccaccggaaggag |
| | ctgactgggttgaaggctctcaagggcatcggtcgagatcccggtgcctaatgagtgagctaa |
| | cttacattaattgcgttgcgctcactgcccgctttccagtcgggaaacctgtcgtgccagctgcat |
| | taatgaatcggccaacgcgcggggagaggcggtttgcgtattgggcgccagggtggtttttctt |
| | ttcaccagtgagacgggcaacagctgattgcccttcaccgcctggccctgagagagttgcagc |
| | aagcggtccacgctggtttgccccagcaggcgaaaatcctgtttgatggtggttaacggcggg |
| | atataacatgagctgtcttcggtatcgtcgtatcccactaccgagatgtccgcaccaacgcgcag |
| | cccggactcggtaatggcgcgcattgcgcccagcgccatctgatcgttggcaaccagcatcgc |
| | agtgggaacgatgccctcattcagcatttgcatggtttgttgaaaaccggacatggcactccagt |
| | cgccttcccgttccgctatcggctgaatttgattgcgagtgagatatttatgccagccagccagac |
| | gcagacgcgccgagacagaacttaatgggcccgctaacagcgcgatttgctggtgacccaat |
| | gcgaccagatgctccacgcccagtcgcgtaccgtcttcatgggagaaaataatactgttgatgg |
| | gtgtctggtcagagacatcaagaaataacgccggaacattagtgcaggcagcttccacagcaa |
| | tggcatcctggtcatccagcggatagttaatgatcagcccactgacgcgttgcgcgagaagatt |
| | gtgcaccgccgctttacaggcttcgacgccgcttcgttctaccatcgacaccaccacgctggca |
| | cccagttgatcggcgcgagatttaatcgccgcgacaatttgcgacggcgcgtgcagggccag |
| | actggaggtggcaacgccaatcagcaacgactgtttgcccgccagttgttgtgccacgcggtt |
| | gggaatgtaattcagctccgccatcgccgcttccactttttcccgcgttttcgcagaaacgtggct |
| | ggcctggttcaccacgcgggaaacggtctgataagagacaccggcatactctgcgacatcgta |
| | taacgttactggtttcacattcaccaccctgaattgactctcttccgggcgctatcatgccataccg |
| | cgaaaggttttgcgccattcgatggtgtccgggatctcgacgctctcccttatgcgactcctgcat |
| | taggaaattaatacgactcactata (SEQ ID NO: 104) |
| pHelper(AjTn6022)_ | ggggaattgtgagcggataacaattcccctgtagaaataattttgtttaactttaataaggagatat |
| ΔTnsF | acatgaaaagaatcagtgatgaatattccccagttaggaaatcccaaactgtatatgggagtattt |
| | cagtaaattatgcttttagaggggaaaagacgatttggtgtgaatctactcttgagcgtgattttttg |
| | attaggcaagaattcaatagcaatgtcatagatatcgtaagccagcctattaccatcccatatata |
| | acagagttgggtaatgaatccacttatactcctgatttcctcgtacagttttccagtgcaaattgtgg |
| | tgattttgaggaaattccctgtccactgttaatagaaataaaacctagaaagaaacttatagaagat |
| | tgggataaattaaagccaaaatttaaggcggctcatacttttgctaaagaaaaaggttggaaattc |
| | aagattataaatgaatcaaggttatatgatcagtattgggaaaatattaattttttgaaaagatttaga |
| | cgttctcatgtggatgtctatgatgaacaaactttaattgagactttagatagtcttggtcaatcgac |
| | tattaatcaattaccggcacatatttttaaggataaaactaatattcttcgaggtattcatcaagtatg |
| | ggcattggtcgcaaaacgaaaaatcatgtgtgatttatattgccccttaacagcagagacggtga |
| | tttggacaaatcaagatgatgtgcttacaaggagatttttaaatggttcagactgatactgtaagta |
| | ttgaccgaagtcggatcatactcaaaccaaatgtaattgttaagtatgaagggcaaccgtataag |
| | attgctaatgttttgaatgccaacgatatcgtgatttctagtttagattctgtgcgttgtttacaagta |
| | agtgcagattctctacaagtatttgaagctgaaaataaccaaactaaagatataaataaaggtgatt |
| | gggatattacgcatgaagcgtggaaaatagctttacatcgttatgaaatcatcaagccgttgatta |
| | agtattcaacaaccgaattagtcgagcaacgagcaagtgaatatggcattaaccgttccacctta |
| | tggaaatggttaaaagattttagagaaaataattctatcttagtgttagttcctaaaaagagaggtt |
| | ggacgaccaagaagtctaggttgtctcctcaaattatgaatattattaaccaaggtattcaagagg |
| | aatatctcaatgccagaaagcctagtattgcaaaaactatagattttattaaagcagaatgttctcg |
| | ccttaaactagaagcaccccatgacaattcaattcgtagaaaaatagaagcattaaacgattatat |
| | ggtgattaaggctcgtcatggttctaaagcagcacaagataagtatgcatctgctgctggtgagt |
| | ttcctaatgctgattatcccttggcatatgtacaggtagaccacactccactagatattgaaattgtt |
| | gatgatgaatttagagaggcgattggacgaccatttctaacattagctattgatataaatactcgaa |
| | tggtggtcggttattacttgtccttagaagcccccagtgcaacatctgttgccatgtgtattgcttcc |
| | agtattttgtcaaaaaaacggaagctaattgaattggatatagatgctgattggcaagttgaaggt |
| | cttatggattctatacatacagataatggtcctgactttagaactaaccatatcagtcgagcttgctt |
| | aaaatatgggattcattgggagtttcgtccgattggtggggcaaggtttggtggacatatcgaac |
| | gtttgattggtgttgttaacattgaaatgcacatcttggatggtacaaccttctcgaatatccaagaa |
| | cgtggaacctataattcagcaggtcatgcctgtatgacactaaaagaactagaatattatattgttt |
| | attggatcactaaagtttatcaccaaaagaaacactccaaactcggtatgtcacctttacagaagt |
| | ggcaagatggtgtttggggaacaaaaactagtgttggaacaggtttaaaagagagagtttcgga |
| | tgaagatacattatttattgatttccttcccgaatttgaatcaacaattcaacgtgtaggtgtacaga |
| | aagacaatctattttattttgctgattgtttacgacaatgggttaattgtgttgatcccgaagatgtaa |
| | ataaaaagagaaaaaagaaatttttgtttaaacgtgatccaagggatatttctcttatttggttttatg |
| | aacctctgtccaatacatattttaaagtgcctactgctaagcgagaaataccaccaattagcttattt |
| | gaatacaaacaagtgcagaaatatcttcgtggcgagcaacatgataatcaaaatcaggatgaga |
| | tttatcaggcaattcttcatttacgagagcaattgaaacaatcccgtagtctgactcggaagcaac |
| | ggagagtaaatcaacgtaaaaaggaaaatgcaaaagcaacacatcatttatctgtaaaaaatga |
| | acctgaaaaaccatctattgtcgaaaacagtgttcagccgactaatgatttatggagtattccattg |
| | acggcatttgaagatttaaggggataataatgcaaaaatatgaacatcttgcagatgatgtacttg |
| | aagtcatgtctctaagtgatagtgatcgtatcaatattttattttctgatcgttggattggttataaaa |
| | aagcggtcactattttggatactttaactgatctgttgaatcgccctaggaagcttcgcccagaatgt |
| | ttattgattgtgggtgattctaatatgggtaaaacgaccattatccacgaattcacaaagcagcatt |
| | acaccaaaacagtgaatgacatagatatggagctgctgtctgtaaaaaaacctgttttaaccatat |
| | tagcccctgctaaagcgaatgtaaaagaattctatatcaatatattgaatcatttctttgtcccatttc |
| | gtcctactgatcctgaagcaaagttacggaatcaagctgtccatctaatgcggaagtatgaaaca |
| | aaaatgttgattattgatgaaatccataattgtttaacaggttctaccaaacttctttccgaagtgatg |
| | aataccttaaagaatctaagtaatgatctaagtctgaatatcgttggcgtcggtactcgtgaagca |
| | gttacgattctacataccgatgctcaatatgcaagccgttttgatgtagcaatgttgcctaaatggg |
| | aactgaatcaggattttctaagactattattaagttatgtacgattattgcctttaaagaaacgttctg |
| | atctagcatctcaaagacttgccacccttatatttgaaatttcaggtgggaattttggtgacttaaac |
| | agattgttgattgagtgtgctaaagaggcaatcgtaaaaggtaatgaagaaattaccgaagaaat |
| | tgttaataaatttaaatggcttaaaccaaccgagggtatgaggaatattagaaatataaatcttaac |
| | atggtttaggtattctacttttcataggaaaatagccatgcaccaagtagaacaacgttggtatatt |
| | cgtacccctattcaagagggtgaagtattttcctcttggctcatacgttctgctttggatttaggctg |
| | ctcaccattaactttagtgaatcttttgtgggaaaaatggagaggattaacgatagatattgatcgt |
| | gggttaaatgaagaaaaattagacatattgttaaatcattgttttgtggaacagcatgaagttcaga |
| | aaactatgttaagcagttatttccctgctttgattccaaaaaattataacaaaaatcagcgtattcctt |
| | ggatattggctctaggtattcgaaatcgttcaaatgtgtcaggtcgtcaaatttgtacgcaatgtct |
| | aagttctacccatacaccaccatatttgcgtatcaagtggcgtatggggggcatagtggctgtg |
| | atattcataaaaccatattaatagatcattgtcctcaatgcagaatcacattacaacctataaaaatt |
| | gatatagagcatggatcattagcaatttgtacttcatgctatgctgatttaagtacactcattcaacg |
| | tccagtagaaacggatgcattaagatttcagcatcaagctgatcaggtcttagagtcacaatttgg |
| | gcgatataaccaaaaggatatttcatcaatagagtggtttgagattgctcgtatatggttaagtttta |
| | ttcgatcccctttaaatatgaagagtcctaaccttttgcaaatgtttgaaagtcttaatattgatttaa |
| | atatagattatcctattacaccagtagcctttgaatttctgtctgttcaggagcgtgaaaaattattat |
| | caattttaaataaaatcatggcattaccttgtgatttatttgttgatcgctctttagaatatcatgtaa |
| | gtcattcttatttttgggataaaagaaaaaaactgcctacgcagcttcaactaatgaaagataaaatgt |
| | tgaagccaattaagattattttgccgaaagataacgccatagccatgagtaaacccaaatctaaaa |
| | aaagtgtacaacggaagtggttaaggctattgagaaagctacagaaaggggggaacaggtga |
| | tttttttgtgattatactgtgctatttcaagctaatttattgtacaagttggtttgtttatctaattct |
| | tctaaaagaactgtccataacaatatggggcaggctgctgccaccgctgagcaataactagcataacc |
| | ccttggggcctctaaacgggtcttgaggggttttttgctgaaacctcaggcatttgagaagcaca |
| | cggtcacactgcttccggtagtcaataaaccggtaaaccagcaatagacataagcggctattta |
| | acgaccctgccctgaaccgacgaccgggtcatcgtggccggatcttgcggcccctcggcttga |
| | acgaattgttagacattatttgccgactaccttggtgatctcgcctttcacgtagtggacaaattctt |
| | ccaactgatctgcgcgcgaggccaagcgatcttcttcttgtccaagataagcctgtctagcttca |
| | agtatgacgggctgatactgggccggcaggcgctccattgcccagtcggcagcgacatccttc |
| | ggcgcgattttgccggttactgcgctgtaccaaatgcgggacaacgtaagcactacatttcgctc |
| | atcgccagcccagtcgggcggcgagttccatagcgttaaggtttcatttagcgcctcaaatagat |
| | cctgttcaggaaccggatcaaagagttcctccgccgctggacctaccaaggcaacgctatgttc |
| | tcttgcttttgtcagcaagatagccagatcaatgtcgatcgtggctggctcgaagatacctgcaa |
| | gaatgtcattgcgctgccattctccaaattgcagttcgcgcttagctggataacgccacggaatg |
| | atgtcgtcgtgcacaacaatggtgacttctacagcgcggagaatctcgctctctccaggggaag |
| | ccgaagtttccaaaaggtcgttgatcaaagctcgccgcgttgtttcatcaagccttacggtcacc |
| | gtaaccagcaaatcaatatcactgtgtggcttcaggccgccatccactgcggagccgtacaaat |
| | gtacggccagcaacgtcggttcgagatggcgctcgatgacgccaactacctctgatagttgagt |
| | cgatacttcggcgatcaccgcttccctcatactcttcctttttcaatattattgaagcatttatcaggg |
| | ttattgtctcatgagcggatacatatttgaatgtatttagaaaaataaacaaatagctagctcactcg |
| | gtcgctacgctccgggcgtgagactgcggcgggcgctgcggacacatacaaagttacccaca |
| | gattccgtggataagcaggggactaacatgtgaggcaaaacagcagggccgcgccggtggc |
| | gtttttccataggctccgccctcctgccagagttcacataaacagacgcttttccggtgcatctgtg |
| | ggagccgtgaggctcaaccatgaatctgacagtacgggcgaaacccgacaggacttaaagat |
| | ccccaccgtttccggcgggtcgctccctcttgcgctctcctgttccgaccctgccgtttaccggat |
| | acctgttccgcctttctcccttacgggaagtgtggcgctttctcatagctcacacactggtatctcg |
| | gctcggtgtaggtcgttcgctccaagctgggctgtaagcaagaactccccgttcagcccgactg |
| | ctgcgccttatccggtaactgttcacttgagtccaacccggaaaagcacggtaaaacgccactg |
| | gcagcagccattggtaactgggagttcgcagaggatttgtttagctaaacacgcggttgctcttg |
| | aagtgtgcgccaaagtccggctacactggaaggacagatttggttgctgtgctctgcgaaagc |
| | cagttaccacggttaagcagttccccaactgacttaaccttcgatcaaaccacctccccaggtgg |
| | ttttttcgtttacagggcaaaagattacgcgcagaaaaaaaggatctcaagaagatcctttgatctt |
| | ttctactgaaccgctctagatttcagtgcaatttatctcttcaaatgtagcacctgaagtcagcccc |
| | atacgatataagttgtaattctcatgttagtcatgccccgcgcccaccggaaggagctgactggg |
| | ttgaaggctctcaagggcatcggtcgagatcccggtgcctaatgagtgagctaacttacattaat |
| | tgcgttgcgctcactgcccgctttccagtcgggaaacctgtcgtgccagctgcattaatgaatcg |
| | gccaacgcgcggggagaggcggtttgcgtattgggcgccagggtggtttttttttcaccagtg |
| | agacgggcaacagctgattgcccttcaccgcctggccctgagagagttgcagcaagcggtcc |
| | acgctggtttgccccagcaggcgaaaatcctgtttgatggtggttaacggcgggatataacatg |
| | agctgtcttcggtatcgtcgtatcccactaccgagatgtccgcaccaacgcgcagcccggactc |
| | ggtaatggcgcgcattgcgcccagcgccatctgatcgttggcaaccagcatcgcagtgggaa |
| | cgatgccctcattcagcatttgcatggtttgttgaaaaccggacatggcactccagtcgccttccc |
| | gttccgctatcggctgaatttgattgcgagtgagatatttatgccagccagccagacgcagacg |
| | cgccgagacagaacttaatgggcccgctaacagcgcgatttgctggtgacccaatgcgacca |
| | gatgctccacgcccagtcgcgtaccgtcttcatgggagaaaataatactgttgatgggtgtctgg |
| | tcagagacatcaagaaataacgccggaacattagtgcaggcagcttccacagcaatggcatcc |
| | tggtcatccagcggatagttaatgatcagcccactgacgcgttgcgcgagaagattgtgcaccg |
| | ccgctttacaggcttcgacgccgcttcgttctaccatcgacaccaccacgctggcacccagttg |
| | atcggcgcgagatttaatcgccgcgacaatttgcgacggcgcgtgcagggccagactggagg |
| | tggcaacgccaatcagcaacgactgtttgcccgccagttgttgtgccacgcggttgggaatgta |
| | attcagctccgccatcgccgcttccactttttcccgcgttttcgcagaaacgtggctggcctggtt |
| | caccacgcgggaaacggtctgataagagacaccggcatactctgcgacatcgtataacgttac |
| | tggtttcacattcaccaccctgaattgactctcttccgggcgctatcatgccataccgcgaaaggt |
| | tttgcgccattcgatggtgtccgggatctcgacgctctcccttatgcgactcctgcattaggaaatt |
| | aatacgactcactata (SEQ ID NO: 105) |
| pTarget(AjTn6022)_ | cggggcggagatttcctggaagatgccaggaagatacttaacagggaagtgagagggccgc |
| U50D50 | ggcaaagccgtttttccataggctccgcccccctgacaagcatcacgaaatctgacgctcaaat |
| | cagtggtggcgaaacccgacaggactataaagataccaggcgtttccccctggcggctccctc |
| | gtgcgctctcctgttcctgcctttcggtttaccggtgtcattccgctgttatggccgcgtttgtctcat |
| | tccacgcctgacactcagttccgggtaggcagttcgctccaagctggactgtatgcacgaaccc |
| | cccgttcagtccgaccgctgcgccttatccggtaactatcgtcttgagtccaacccggaaagac |
| | atgcaaaagcaccactggcagcagccactggtaattgatttagaggagttagtcttgaagtcatg |
| | cgccggttaaggctaaactgaaaggacaagttttggtgactgcgctcctccaagccagttacct |
| | cggttcaaagagttggtagctcagagaaccttcgaaaaaccgccctgcaaggcggttttttcgtt |
| | ttcagagcaagagattacgcgcagaccaaaacgatctcaagaagatcatcttattaatatacgta |
| | gtatctacgatacgtagtatctacgatacgtagatcatggagaagtcatttaataaggccactgtta |
| | aacgtagatatatctacgcgtagatatatctacgatacgtagcggccgacgcgctgggctacgt |
| | ctttaatgggcagcgcccacatacgcagcgatttccaacagcttgaggcggaagctttaatgcg |
| | gtagtttatcacagttaaattgctaacgcagtcaggcaccgtgtatgaaatctaacaatgcgctca |
| | tcgtcatcctcggcaccgtcaccctggatgctgtaggcataggcttggttatgccggtactgccg |
| | ggcctcttgcgggatatcgtccattccgacagcatcgccagtcactatggcgtgctgctagcgc |
| | tatatgcgttgatgcaatttctatgcgcacccgttctcggagcactgtccgaccgctttggccgcc |
| | gcccagtcctgctcgcttcgctacttggagccactatcgactacgcgatcatggcgaccacacc |
| | cgtcctgtggatcctctacgccggacgcatcgtggccggcatcaccggcgccacaggtgcgg |
| | ttgctggcgcctatatcgccgacatcaccgatggggaagatcgggcctgccaccatacccacg |
| | ccgaaacaagcgccctgcaccattatgttccggatctgcatcgcaggatgctgctggctaccct |
| | gtggaacacctacatctgtattaacgaagcgctaaccgtttttatcaggctctgggaggcagaat |
| | aaatgatcatatcgtcaattattacctccacggggagagcctgagcaaactggcctcaggcattt |
| | gagaagcacacggtcacactgcttccggtagtcaataaaccggtaaaccagcaatagacataa |
| | gcggctatttaacgaccctgccctgaaccgacgaccgggtcgaatttgctttcgaatttctgccat |
| | tcatccgcttattatcacttattcaggcgtagcaaccaggcgtttaagggcaccaataactgcctt |
| | aaaaaaattacgccccgccctgccactcatcgcagtactgttgtaattcattaagcattctgccga |
| | catggaagccatcacaaacggcatgatgaacctgaatcgccagcggcatcagcaccttgtcgc |
| | cttgcgtataatatttgcccatggtgaaaacgggggcgaagaagttgtccatattggccacgttta |
| | aatcaaaactggtgaaactcacccagggattggctgagacgaaaaacatattctcaataaaccc |
| | tttagggaaataggccaggttttcaccgtaacacgccacatcttgcgaatatatgtgtagaaactg |
| | ccggaaatcgtcgtggtattcactccagagcgatgaaaacgtttcagtttgctcatggaaaacgg |
| | tgtaacaagggtgaacactatcccatatcaccagctcaccgtctttcattgccatacggaattccg |
| | gatgagcattcatcaggcgggcaagaatgtgaataaaggccggataaaacttgtgcttatttttct |
| | ttacggtctttaaaaaggccgtaatatccagctgaacggtctggttataggtacattgagcaactg |
| | actgaaatgcctcaaaatgttctttacgatgccattgggatatatcaacggtggtatatccagtgat |
| | ttttttctccattttagcttccttagctcctgaaaatctcgataactcaaaaaatacgcccgcatttcg |
| | tgcaccgcaccatacagcttctgcggttgccttagtcggtggcgggtcacaacccaaacccggt |
| | gaaattactttggcacataaaggcgtgctgtagtgatcttatttcattatggtgaaagttggaacct |
| | cttacgtgccgatcaacgtctcattttcgccaaaagttggcccagggcttcccggtatcaacagg |
| | gacaccaggatttatttattctgcgaagtgatcttccgtcacaggtatttattcggcgcaaagtgcg |
| | tcgggtgatgctgccaacttactgatttagtgtatgatggtgtttttgaggtgctccagtggcttctg |
| | tttctatcagctgtccctcctgttcagctactgacggggtggtgcgtaacggcaaaagcaccgcc |
| | ggacatcagcgctagcggagtgtatactggcttactatgttggcactgatgagggtgtcagtga |
| | agtgcttcatgtggcaggagaaaaaaggctgcaccggtgcgtcagcagaatatgtgatacagg |
| | atatattccgcttcctcgctcactgactcgctacgctcggtcgttcgactgcggcgagcggaaat |
| | ggcttacgaa (SEQ ID NO: 106) |
| pUC-Donor(AjTn6022) | tcgcgcgtttcggtgatgacggtgaaaacctctgacacatgcagctcccggagacggtcacag |
| | cttgtctgtaagcggatgccgggagcagacaagcccgtcagggcgcgtcagcgggtgttggc |
| | gggtgtcggggctggcttaactatgcggcatcagagcagattgtactgagagtgcaccatatgc |
| | ggtgtgaaataccgcacagatgcgtaaggagaaaataccgcatcaggcgccattcgccattca |
| | ggctgcgcaactgttgggaagggcgatcggtgcgggcctcttcgctattacgccagctggcga |
| | aagggggatgtgctgcaaggcgattaagttgggtaacgccagggttttcccagtcacgacgtt |
| | gtaaaacgacggccagtgaattgacgcgtattgggatagcacgcctttatgtgccaaagtaattt |
| | caccgggtttgggttgtgacccgctgtcatttacagcaatagataagagtgtcatgataagaaaa |
| | caataggttgccactctaaaattacacaaatagattagagtaatgacagtaataagcaagagtgg |
| | cttgcaaatttacacaaatacgcacgagtggctgtaagaggcattctgtcgtaggtcttgaaagg |
| | agtgggaattggctccggtgcccgtcagtgggcagagcgcacatcgcccacagtccccgaga |
| | agttggggggaggggtcggcaattgatccggtgcctagagaaggtggcgcggggtaaactg |
| | ggaaagtgatgtcgtgtactggctccgcctttttcccgagggtgggggagaaccgtatataagt |
| | gcagtagtcgccgtgaacgttctttttcgcaacgggtttgccgccagaacacaggaccggttct |
| | agagcgctgccaccatgaccgagtacaagcccacggtgcgcctcgccacccgcgacgacgt |
| | ccccagggccgtacgcaccctcgccgccgcgttcgccgactaccccgccacgcgccacacc |
| | gtcgatccggaccgccacatcgagcgggtcaccgagctgcaagaactcttcctcacgcgcgt |
| | cgggctcgacatcggcaaggtgtgggtcgcggacgacggcgccgcggtggcggtctggac |
| | cacgccggagagcgtcgaagcgggggcggtgttcgccgagatcggcccgcgcatggccga |
| | gttgagcggttcccggctggccgcgcagcaacagatggaaggcctcctggcgccgcaccgg |
| | cccaaggagcccgcgtggttcctggccaccgtcggcgtctcgcccgaccaccagggcaagg |
| | gtctgggcagcgccgtcgtgctccccggagtggaggcggccgagcgcgccggggtgcccg |
| | ccttcctggagacctccgcgccccgcaacctccccttctacgagcggctcggcttcaccgtcac |
| | cgccgacgtcgaggtgcccgaaggaccgcgcacctggtgcatgacccgcaagcccggtgc |
| | ctgattctaaataaaggaaatttattttcattgcaatagtgtgttggaattttttgtgtctctcagcac |
| | ttcactgccctcattcctaagaaacccaccatatctatagacagttctgcgaatattatcatttgggaa |
| | acaatcaatagttgtgactttaacttttttatttgcaggcatatcttttagtgaatttaatgaaattca |
| | tatataaatagtatagtttttattatcactctagtttatttgtgtaaactctgatttatttgtggaact |
| | gacacccgccaccgactaaggcaaccgcagaagctgtatggtgcggtgcacgaaatgatcccaatgg |
| | cgcgccgagcttggcgtaatcatggtcatagctgtttcctgtgtgaaattgttatccgctcacaatt |
| | ccacacaacatacgagccggaagcataaagtgtaaagcctggggtgcctaatgagtgagcta |
| | actcacattaattgcgttgcgctcactgcccgctttccagtcgggaaacctgtcgtgccagctgc |
| | attaatgaatcggccaacgcgcggggagaggcggtttgcgtattgggcgctcttccgcttcctc |
| | gctcactgactcgctgcgctcggtcgttcggctgcggcgagcggtatcagctcactcaaaggc |
| | ggtaatacggttatccacagaatcaggggataacgcaggaaagaacatgtgagcaaaaggcc |
| | agcaaaaggccaggaaccgtaaaaaggccgcgttgctggcgtttttccataggctccgccccc |
| | ctgacgagcatcacaaaatcacaaaaatcgacgctcaagtcagaggtggcgaaacccgacag |
| | gactataaagataccaggcgtttccccctggaagctccctcgtgcgctctcctgttccgaccctg |
| | ccgcttaccggatacctgtccgcctttctcccttcgggaagcgtggcgctttctcatagctcacgc |
| | tgtaggtatctcagttcggtgtaggtcgttcgctccaagctgggctgtgtgcacgaaccccccgt |
| | tcagcccgaccgctgcgccttatccggtaactatcgtcttgagtccaacccggtaagacacgac |
| | ttatcgccactggcagcagccactggtaacaggattagcagagcgaggtatgtaggcggtgct |
| | acagagttcttgaagtggtggcctaactacggctacactagaagaacagtatttggtatctgcgc |
| | tctgctgaagccagttaccttcggaaaaagagttggtagctcttgatccggcaaacaaaccacc |
| | gctggtagcggtggtttttttgtttgcaagcagcagattacgcgcagaaaaaaaggatctcaaga |
| | agatcctttgatcttttctacggggtctgacgctcagtggaacgaaaactcacgttaagggatttt |
| | ggtcatgagattatcaaaaaggatcttcacctagatccttttaaattaaaaatgaagttttaaatcaa |
| | tctaaagtatatatgagtaaacttggtctgacagttaccaatgcttaatcagtgaggcacctatctc |
| | agcgatctgtctatttcgttcatccatagttgcctgactccccgtcgtgtagataactacgatacgg |
| | gagggcttaccatctggccccagtgctgcaatgataccgcgagacccacgctcaccggctcca |
| | gatttatcagcaataaaccagccagccggaagggccgagcgcagaagtggtcctgcaacttta |
| | tccgcctccatccagtctattaattgttgccgggaagctagagtaagtagttcgccagttaatagtt |
| | tgcgcaacgttgttgccattgctacaggcatcgtggtgtcacgctcgtcgtttggtatggcttcatt |
| | cagctccggttcccaacgatcaaggcgagttacatgatcccccatgttgtgcaaaaaagcggtt |
| | agctccttcggtcctccgatcgttgtcagaagtaagttggccgcagtgttatcactcatggttatg |
| | gcagcactgcataattctcttactgtcatgccatccgtaagatgcttttctgtgactggtgagtactc |
| | aaccaagtcattctgagaatagtgtatgcggcgaccgagttgctcttgcccggcgtcaatacgg |
| | gataataccgcgccacatagcagaactttaaaagtgctcatcattggaaaacgttcttcggggcg |
| | aaaactctcaaggatcttaccgctgttgagatccagttcgatgtaacccactcgtgcacccaact |
| | gatcttcagcatcttttactttcaccagcgtttctgggtgagcaaaaacaggaaggcaaaatgcc |
| | gcaaaaaagggaataagggcgacacggaaatgttgaatactcatactcttcctttttcaatattatt |
| | gaagcatttatcagggttattgtctcatgagcggatacatatttgaatgtatttagaaaaataaaca |
| | aataggggttccgcgcacatttccccgaaaagtgccacctgacgtctaagaaaccattattatca |
| | tgacattaacctataaaaataggcgtatcacgaggccctttcgtc (SEQ ID NO: 107) |
| pR6K- | gagagtgcaccatacaggaaacagctatgaccatgattacgccaagctcggcgcgccattgg |
| Donor(AjTn6022) | gattgtcagttccacaaataaatcagagtttacacaaataaactagagtgataataaaaactatact |
| | atttatatatgaatttcattaaattcactaaaagatatgcctgcaaataaaaaagttaaagtcacaac |
| | tattgattgtttcccaaatgataatattcgcagaactgtctatagatatggtgggtttcttaggaatga |
| | gggcagtgaagagcgcttttgaagctgatgtgcttaaaaacttactcaatggaataattctagata |
| | attcactagtgattggaaatgttggatcctcatactcttcctttttcaattcagaagaactcgtcaag |
| | aaggcgatagaaggcgatgcgctgcgaatcgggagcggcgataccgtaaagcacgaggaa |
| | gcggtcagcccattcgccgccaagctcttcagcaatatcacgggtagccaacgctatgtcctga |
| | tagcggtccgccacacccagccggccacagtcgatgaatccagaaaagcggccattttccac |
| | catgatattcggcaagcaggcatcgccatgggtcacgacgagatcctcgccgtcgggcatgc |
| | gcgccttgagcctggcgaacagttcggctggcgcgagcccctgatgctcttcgtccagatcatc |
| | ctgatcgacaagaccggcttccatccgagtacgtgctcgctcgatgcgatgtttcgcttggtggt |
| | cgaatgggcaggtagccggatcaagcgtatgcagccgccgcattgcatcagccatgatggat |
| | actttctcggcaggagcaaggtgggatgacaggagatcctgccccggcacttcgcccaatagc |
| | agccagtcccttcccgcttcagtgacaacgtcgagcacagctgcgcaaggaacgcccgtcgt |
| | ggccagccacgatagccgcgctgcctcgtcctgcagttcattcagggcaccggacaggtcgg |
| | tcttgacaaaaagaaccgggcgcccctgcgctgacagccggaacacggggcatcagagca |
| | gccgattgtctgttgtgcccagtcatagccgaatagcctctccacccaagcggccggagaacct |
| | gcgtgcaatccatcttgttcaatcatgcgaaacgatcctcatcctgtctcttgatcagatcttgatcc |
| | cctgcgccatcagatccttggcggcaagaaagccatccagtttactttgcagggcttcccaacct |
| | taccagagggcgccccagctggcaattccggttcgcttgctgtccataaaaccgcccagtctag |
| | ctatcgccatgtaagcccactgcaagctacctgctttctctttgcgcttgcgttttcccttgtccaga |
| | tagcccagtagctgacattcatccggggtcagcaccgtttctgcggactggctttctacgtgttcc |
| | gcttcctttagcagcccttgcgccatgcatttgttaaatcgaattatccattgctgttgacaaaggg |
| | aatcaggggatcttgaagttcctattccgaagttcctattctctagaaagtataggaacttcagagc |
| | gcttttgaagctaattcgagatcatgcatgagctcactagtggatccccccgacagaatgcctctt |
| | acagccactcgtgcgtatttgtgtaaatttgcaagccactcttgcttattactgtcattactctaatct |
| | atttgtgtaattttagagtggcaacctattgttttcttatcatgacactcttatctattgctgtaaatg |
| | acaatcccaatacgcgtcaattcactggccgtcgttttactactttccgctgcataaccctgcttcggg |
| | gtcattatagcgattttttcggtatatccatcctttttcgcacgatatacaggattttgccaaagggtt |
| | cgtgtagactttccttggtgtatccaacggcgtcagccgggcaggataggtgaagtaggccca |
| | cccgcgagcgggtgttccttcttcactgtcccttattcgcacctggcggtgctcaacgggaatcc |
| | tgctctgcgaggctggccgataagctctgataacgcaggaaagaacatgggcagttcaacctg |
| | ttgatagtacgtactaagctctcatgtttcacgtactaagctctcaagtttaacgtactaagctctcat |
| | gtttaacgaactaaaccctcatggctaacgtactaagctctcatggctaacgtactaagctctcat |
| | gtttcacgtactaagctctcatgtttgaacaataaaattaatataaatcagcaacttaaatagcctct |
| | aaggttttaagttttataagaaaaaaaagaatatataaggcttttaaagcttttaaggtttaacggtt |
| | gtggacaacaagccagggatgtaacgcactgagaagcccttagagcctctcaaagcaattttg |
| | agtgacacaggaacacttaacggctgacaaccggctggtaacaggattagcagagcgaggta |
| | tgtaggcggtgctacaagattgtactgagagtgcaccatacaggaaacagc (SEQ ID |
| | NO: 108) |
| pTarget(AjTn6022)_ | cggggcggagatttcctggaagatgccaggaagatacttaacagggaagtgagagggccgc |
| U25D50 | ggcaaagccgtttttccataggctccgcccccctgacaagcatcacgaaatctgacgctcaaat |
| | cagtggtggcgaaacccgacaggactataaagataccaggcgtttccccctggcggctccctc |
| | gtgcgctctcctgttcctgcctttcggtttaccggtgtcattccgctgttatggccgcgtttgtctcat |
| | tccacgcctgacactcagttccgggtaggcagttcgctccaagctggactgtatgcacgaaccc |
| | cccgttcagtccgaccgctgcgccttatccggtaactatcgtcttgagtccaacccggaaagac |
| | atgcaaaagcaccactggcagcagccactggtaattgatttagaggagttagtcttgaagtcatg |
| | cgccggttaaggctaaactgaaaggacaagttttggtgactgcgctcctccaagccagttacct |
| | cggttcaaagagttggtagctcagagaaccttcgaaaaaccgccctgcaaggcggttttttcgtt |
| | ttcagagcaagagattacgcgcagaccaaaacgatctcaagaagatcatcttattaatatacgta |
| | gtatctacgatacgtagtatctacgatacgtagatcatggagaagtcatttaataaggccactgtta |
| | aacgtagatatatctacgcgtagatatatctacgatacgtagcggccgacgcgctgggctacgt |
| | ctttaatgggcagcgcccacatacgcagcgatttccaacagcttgaggcggaagctttaatgcg |
| | gtagtttatcacagttaaattgctaacgcagtcaggcaccgtgtatgaaatctaacaatgcgctca |
| | tcgtcatcctcggcaccgtcaccctggatgctgtaggcataggcttggttatgccggtactgccg |
| | ggcctcttgcgggatatcgtccattccgacagcatcgccagtcactatggcgtgctgctagcgc |
| | tatatgcgttgatgcaatttctatgcgcacccgttctcggagcactgtccgaccgctttggccgcc |
| | gcccagtcctgctcgcttcgctacttggagccactatcgactacgcgatcatggcgaccacacc |
| | cgtcctgtggatcctctacgccggacgcatcgtggccggcatcaccggcgccacaggtgcgg |
| | ttgctggcgcctatatcgccgacatcaccgatggggaagatcgggcctgccaccatacccacg |
| | ccgaaacaagcgccctgcaccattatgttccggatctgcatcgcaggatgctgctggctaccct |
| | gtggaacacctacatctgtattaacgaagcgctaaccgtttttatcaggctctgggaggcagaat |
| | aaatgatcatatcgtcaattattacctccacggggagagcctgagcaaactggcctcaggcattt |
| | gagaagcacacggtcacactgcttccggtagtcaataaaccggtaaaccagcaatagacataa |
| | gcggctatttaacgaccctgccctgaaccgacgaccgggtcgaatttgctttcgaatttctgccat |
| | tcatccgcttattatcacttattcaggcgtagcaaccaggcgtttaagggcaccaataactgcctt |
| | aaaaaaattacgccccgccctgccactcatcgcagtactgttgtaattcattaagcattctgccga |
| | catggaagccatcacaaacggcatgatgaacctgaatcgccagcggcatcagcaccttgtcgc |
| | cttgcgtataatatttgcccatggtgaaaacgggggcgaagaagttgtccatattggccacgttta |
| | aatcaaaactggtgaaactcacccagggattggctgagacgaaaaacatattctcaataaaccc |
| | tttagggaaataggccaggttttcaccgtaacacgccacatcttgcgaatatatgtgtagaaactg |
| | ccggaaatcgtcgtggtattcactccagagcgatgaaaacgtttcagtttgctcatggaaaacgg |
| | tgtaacaagggtgaacactatcccatatcaccagctcaccgtctttcattgccatacggaattccg |
| | gatgagcattcatcaggcgggcaagaatgtgaataaaggccggataaaacttgtgcttatttttct |
| | ttacggtctttaaaaaggccgtaatatccagctgaacggtctggttataggtacattgagcaactg |
| | actgaaatgcctcaaaatgttctttacgatgccattgggatatatcaacggtggtatatccagtgat |
| | ttttttctccattttagcttccttagctcctgaaaatctcgataactcaaaaaatacgcccgttctgcg |
| | gttgccttagtcggtggcgggtcacaacccaaacccggtgaaattactttggcacataaaggcg |
| | tgctgtagtgatcttatttcattatggtgaaagttggaacctcttacgtgccgatcaacgtctcatttt |
| | cgccaaaagttggcccagggcttcccggtatcaacagggacaccaggatttatttattctgcga |
| | agtgatcttccgtcacaggtatttattcggcgcaaagtgcgtcgggtgatgctgccaacttactga |
| | tttagtgtatgatggtgtttttgaggtgctccagtggcttctgtttctatcagctgtccctcctgttca |
| | cgtactgacggggtggtgcgtaacggcaaaagcaccgccggacatcagcgctagcggagtgt |
| | atactggcttactatgttggcactgatgagggtgtcagtgaagtgcttcatgtggcaggagaaaa |
| | aaggctgcaccggtgcgtcagcagaatatgtgatacaggatatattccgcttcctcgctcactga |
| | ctcgctacgctcggtcgttcgactgcggcgagcggaaatggcttacgaa (SEQ ID NO: |
| | 109) |
| pTarget(AjTn6022)_ | cggggcggagatttcctggaagatgccaggaagatacttaacagggaagtgagagggccgc |
| U50D25 | ggcaaagccgtttttccataggctccgcccccctgacaagcatcacgaaatctgacgctcaaat |
| | cagtggtggcgaaacccgacaggactataaagataccaggcgtttccccctggcggctccctc |
| | gtgcgctctcctgttcctgcctttcggtttaccggtgtcattccgctgttatggccgcgtttgtctcat |
| | tccacgcctgacactcagttccgggtaggcagttcgctccaagctggactgtatgcacgaaccc |
| | cccgttcagtccgaccgctgcgccttatccggtaactatcgtcttgagtccaacccggaaagac |
| | atgcaaaagcaccactggcagcagccactggtaattgatttagaggagttagtcttgaagtcatg |
| | cgccggttaaggctaaactgaaaggacaagttttggtgactgcgctcctccaagccagttacct |
| | cggttcaaagagttggtagctcagagaaccttcgaaaaaccgccctgcaaggcggttttttcgtt |
| | ttcagagcaagagattacgcgcagaccaaaacgatctcaagaagatcatcttattaatatacgta |
| | gtatctacgatacgtagtatctacgatacgtagatcatggagaagtcatttaataaggccactgtta |
| | aacgtagatatatctacgcgtagatatatctacgatacgtagcggccgacgcgctgggctacgt |
| | ctttaatgggcagcgcccacatacgcagcgatttccaacagcttgaggcggaagctttaatgcg |
| | gtagtttatcacagttaaattgctaacgcagtcaggcaccgtgtatgaaatctaacaatgcgctca |
| | tcgtcatcctcggcaccgtcaccctggatgctgtaggcataggcttggttatgccggtactgccg |
| | ggcctcttgcgggatatcgtccattccgacagcatcgccagtcactatggcgtgctgctagcgc |
| | tatatgcgttgatgcaatttctatgcgcacccgttctcggagcactgtccgaccgctttggccgcc |
| | gcccagtcctgctcgcttcgctacttggagccactatcgactacgcgatcatggcgaccacacc |
| | cgtcctgtggatcctctacgccggacgcatcgtggccggcatcaccggcgccacaggtgcgg |
| | ttgctggcgcctatatcgccgacatcaccgatggggaagatcgggcctgccaccatacccacg |
| | ccgaaacaagcgccctgcaccattatgttccggatctgcatcgcaggatgctgctggctaccct |
| | gtggaacacctacatctgtattaacgaagcgctaaccgtttttatcaggctctgggaggcagaat |
| | aaatgatcatatcgtcaattattacctccacggggagagcctgagcaaactggcctcaggcattt |
| | gagaagcacacggtcacactgcttccggtagtcaataaaccggtaaaccagcaatagacataa |
| | gcggctatttaacgaccctgccctgaaccgacgaccgggtcgaatttgctttcgaatttctgccat |
| | tcatccgcttattatcacttattcaggcgtagcaaccaggcgtttaagggcaccaataactgcctt |
| | aaaaaaattacgccccgccctgccactcatcgcagtactgttgtaattcattaagcattctgccga |
| | catggaagccatcacaaacggcatgatgaacctgaatcgccagcggcatcagcaccttgtcgc |
| | cttgcgtataatatttgcccatggtgaaaacgggggcgaagaagttgtccatattggccacgttta |
| | aatcaaaactggtgaaactcacccagggattggctgagacgaaaaacatattctcaataaaccc |
| | tttagggaaataggccaggttttcaccgtaacacgccacatcttgcgaatatatgtgtagaaactg |
| | ccggaaatcgtcgtggtattcactccagagcgatgaaaacgtttcagtttgctcatggaaaacgg |
| | tgtaacaagggtgaacactatcccatatcaccagctcaccgtctttcattgccatacggaattccg |
| | gatgagcattcatcaggcgggcaagaatgtgaataaaggccggataaaacttgtgcttatttttct |
| | ttacggtctttaaaaaggccgtaatatccagctgaacggtctggttataggtacattgagcaactg |
| | actgaaatgcctcaaaatgttctttacgatgccattgggatatatcaacggtggtatatccagtgat |
| | ttttttctccattttagcttccttagctcctgaaaatctcgataactcaaaaaatacgcccgcatttcg |
| | tgcaccgcaccatacagcttctgcggttgccttagtcggtggcgggtcacaacccaaacccggt |
| | gaaagtagtgatcttatttcattatggtgaaagttggaacctcttacgtgccgatcaacgtctcattt |
| | tcgccaaaagttggcccagggcttcccggtatcaacagggacaccaggatttatttattctgcga |
| | agtgatcttccgtcacaggtatttattcggcgcaaagtgcgtcgggtgatgctgccaacttactga |
| | tttagtgtatgatggtgtttttgaggtgctccagtggcttctgtttctatcagctgtccctcctgttca |
| | gctactgacggggtggtgcgtaacggcaaaagcaccgccggacatcagcgctagcggagtgt |
| | atactggcttactatgttggcactgatgagggtgtcagtgaagtgcttcatgtggcaggagaaaa |
| | aaggctgcaccggtgcgtcagcagaatatgtgatacaggatatattccgcttcctcgctcactga |
| | ctcgctacgctcggtcgttcgactgcggcgagcggaaatggcttacgaa (SEQ ID NO: |
| | 110) |
| pHelper(ZooTsy) | tttacactttatgcttccggctcgtatgttggtcgacgtggagatataccatgtttaactttaataagg |
| | agatatacatggcgaatccgaagatagtgctggcgacatccgatgtcgcttcgcgcgctctcgc |
| | gccagcagatgccgaactgttcgggaccatcattgatgcatggactcgtcgccgcatcggctc |
| | gctgcgccatacccacaaagccgtagccagggacgtctcggtgctgcgggagtttgctgccc |
| | actcaggtctgccgccttggctctggaatgaggatgcatttgactgctggtgcgatcatctcgga |
| | ttggagcgccggttggccaatagcacccagcggcattaccaatgctcgatccgatccttcctcg |
| | aatatctcacgacgaacgtcaagttcaggaacgagatccggcgcttgtatggcgtcgagccac |
| | gacagatttgcacggaagagaactgcatcccccataccgtcgaaaaggagtcctccaaagag |
| | cgccgagccttcacacatgaggaaatcgagttgttttttgacgggctgcggcgcgcttctgtcga |
| | ggccggccgcttcaggaccaaggattacaaccctcttcgtcgggaccgtactttctttttcaccct |
| | ctactccggagggctcaggatttccgaaggcctcaacctaaacgtaaattcgtttgcgccgaatc |
| | cagctttacctgaacttggcccctatggattcatcaaggtctggggcaagggaagccggggaa |
| | gtgggaagcgctttcggaccgtaccggtcacccatcctgacttccctgagctcatggactggta |
| | catcacaagagtccgccctgaattccttcatcgagcggaccccaatgaggaagccttgttcctct |
| | cggagcggggaactcgtctcaagtcgtccagcgccgacgcacgcttcaaaatcgcaactcgc |
| | tattgcggcctggaaggcgaaggactgacgccacactgtctgcgccactcgagcgttacccac |
| | gaatccttgcgcttcagcatcgagatggttcgtcggaagcatggccacgcttctgcggcaacga |
| | cacaaggctatatgcacgtccccgacgttatggtcgacgacgaaatcagcagcgtcgtctccc |
| | gcgagctcgatgacgcgctcaacacacaggagaagaaagaatgagcgatacgcccaatatc |
| | agacttggttggcgcctccgcgtgcggatggcggaaaaccgaataccgaccgccacggaact |
| | caagcgacggctcgacgcgatcggctacgacatcaccagcgcccaactctcccgaattgtgg |
| | acgagcgaccggcccaggtgaaaaccgcgctactggaggctttgcttaaagtcctgggggga |
| | accctagacgatctcatgcccgcggagggccgtgttgagcagccgagttctgcgcctcaaggt |
| | ggtgaggaagttgcgccaagcccagcgccggcggccacccccacccgtaagcgcaaaccg |
| | gcgcgccccgcctcggaagcagtcgatccggacgatgccggtggccccagggtacgcccct |
| | tctcggtcccaccgaagaagtgaaatagcgttcctacatggcgacctctgctcatacctgttgcg |
| | atgaatgcagccgtccgatggccaaggcgcgtctcgtccggaacgggaaggccttgtgcgac |
| | acctgcagccagcggattccctacgccccttgtggcaagtgcggaaagcagacgcgcatgct |
| | caatgaccaaggggaaccgctctgcaaggtctgccgtgccctcaaccgcacctgcgtgcgttg |
| | cggcaagccagtgcgcaaggctgggcgcttggtcgatggcggtgctgtctgcggcccctgcg |
| | ccaagtattaccgtgaaccgcaggcctgcgatcaatgtggggcaatggagaaggttcttaccg |
| | gcgtacagacagaaactgggcggcgccgtctctgcggcaggtgtttccggcgccataaaggc |
| | tacaagagctgcagcatctgccggaaagacaggctgcctgtcggcgtgaccgctgacggcaa |
| | gcctatatgcaaaacctgtttgagtgcggccggaaaacctttcgtgtgcccaacctgtggccag |
| | gaaggaatacgccatagtagaaggcgttgccagaagtgctacgttcgcgatacggcgaaaag |
| | ccgtgtcgaggaatatgctcccctttttagtcatgcatggacccgggaagcctggctgggatttg |
| | gtgcagagaccctggaggcaatgaatccagaaaagctagtgcatcgaatcaacagctactacc |
| | tcttcttcgtccggcttgatctcgccttcagcaaacctacagaaatcacgccggtcgcgctgttga |
| | aaagcgtcggcggcttggatgggctccgtcgatacaccgtgccctatggctatctcctgaagca |
| | ccgaatcatccccgagacaacgcgcagtctcctgcaggacgaggctgaatccatcaggcagg |
| | aagccatgatcgccaagctggatggcaagtggtatgccccagtcatggcacgctaccggaatc |
| | acctgctgactgtccgcgcccgatacgacagccggggctggaaaggggaagatacccggat |
| | gaaggcgcgctcgattacgctcaacctccgggcggctcggcgtttatgcgaaacgctggatgc |
| | cataggtgtccagatgattcagcagacgacgccagagatgctggacaagttcttcatggactat |
| | cctggactggccgtctcaatccgtgccttcgtccgatacctgaaccggaaggaaaaactctttca |
| | gcgcctgcgcctgaagacagttgcccggagtgtgccggaagggattttcctgccccgcgaaa |
| | aatccactgcgctcattcaagcgtggatgacgccgactgatgagacgcttcggcagtccctcat |
| | cggcctgttcatgctgctctatgcccagacggtcaagaactgtgttcggcttcgtctggatgcact |
| | catccaacgggctgacgggcgttatcgcatagcatttggccgcgcggaaatccacctggatgc |
| | tcggatcagcgcgatactcgatcgctatttgaacgtgcggcaaacactggttgctctggaccat |
| | gccgacgaaaatccgtatctctttccgggacggcagttaggcagtcacctgagtgccgaatcg |
| | gtatccggttggttgaaaaaggcgggcgtcagctccgatcagttgtttgcaacatcaatctataa |
| | cgcctatcaaaatggcctgcgacttcccaaggtcttggtgcgagcgtttggcatcaccgatacg |
| | accgcgatcaagtatctcaacatgctggatccccgcctggtcatggagatcgaacgcaaacca |
| | ctgggcggcggggacgaaccctgatggctggcgaacttaccgttcggaaaaatccatacgcc |
| | agcggtcagccgtggtggctctatatgctcgaatgcaagggcggaggcatctacaccggcatc |
| | gcgctggatgtggatgcgcggtttgagcaacacgtcgcaggcaagggcgccaaatacacgc |
| | gcatgaaccggcccatccgggtcgtcgcgcgcatccgctacgacacgcaccgggaagccgc |
| | tcaggctgaagttgcgctgaaacgcctcaagcccctggaaaagctgcggtgggcctatgcctt |
| | ggctgggttagtcggcatggacaagtcggcgtaacgcgtggggcgtctccggatcgttgagg |
| | ggcaaaagcatcgcggcccccgaggctgctgccaccgctgagcaataacctaggctgctgcc |
| | accgctgagcaataactagcataaccccttggggcctctaaacgggtcttgaggggttttttgct |
| | gaaacctcaggcatttgagaagcacacggtcacactgcttccggtagtcaataaaccggtaaac |
| | cagcaatagacataagcggctatttaacgaccctgccctgaaccgacgaccgggtcatcgtgg |
| | ccggatcttgcggcccctcggcttgaacgaattgttagacattatttgccgactaccttggtgatct |
| | cgcctttcacgtagtggacaaattcttccaactgatctgcgcgcgaggccaagcgatcttcttctt |
| | gtccaagataagcctgtctagcttcaagtatgacgggctgatactgggccggcaggcgctccat |
| | tgcccagtcggcagcgacatccttcggcgcgattttgccggttactgcgctgtaccaaatgcgg |
| | gacaacgtaagcactacatttcgctcatcgccagcccagtcgggcggcgagttccatagcgtta |
| | aggtttcatttagcgcctcaaatagatcctgttcaggaaccggatcaaagagttcctccgccgct |
| | ggacctaccaaggcaacgctatgttctcttgcttttgtcagcaagatagccagatcaatgtcgatc |
| | gtggctggctcgaagatacctgcaagaatgtcattgcgctgccattctccaaattgcagttcgcg |
| | cttagctggataacgccacggaatgatgtcgtcgtgcacaacaatggtgacttctacagcgcgg |
| | agaatctcgctctctccaggggaagccgaagtttccaaaaggtcgttgatcaaagctcgccgcg |
| | ttgtttcatcaagccttacggtcaccgtaaccagcaaatcaatatcactgtgtggcttcaggccgc |
| | catccactgcggagccgtacaaatgtacggccagcaacgtcggttcgagatggcgctcgatga |
| | cgccaactacctctgatagttgagtcgatacttcggcgatcaccgcttccctcatactcttccttttt |
| | caatattattgaagcatttatcagggttattgtctcatgagcggatacatatttgaatgtatttagaaa |
| | aataaacaaatagctagctcactcggtcgctacgctccgggcgtgagactgcggcgggcgct |
| | gcggacacatacaaagttacccacagattccgtggataagcaggggactaacatgtgaggca |
| | aaacagcagggccgcgccggtggcgtttttccataggctccgccctcctgccagagttcacata |
| | aacagacgcttttccggtgcatctgtgggagccgtgaggctcaaccatgaatctgacagtacgg |
| | gcgaaacccgacaggacttaaagatccccaccgtttccggcgggtcgctccctcttgcgctctc |
| | ctgttccgaccctgccgtttaccggatacctgttccgcctttctcccttacgggaagtgtggcgctt |
| | tctcatagctcacacactggtatctcggctcggtgtaggtcgttcgctccaagctgggctgtaag |
| | caagaactccccgttcagcccgactgctgcgccttatccggtaactgttcacttgagtccaaccc |
| | ggaaaagcacggtaaaacgccactggcagcagccattggtaactgggagttcgcagaggatt |
| | tgtttagctaaacacgcggttgctcttgaagtgtgcgccaaagtccggctacactggaaggaca |
| | gatttggttgctgtgctctgcgaaagccagttaccacggttaagcagttccccaactgacttaacc |
| | ttcgatcaaaccacctccccaggggttttttcgtttacagggcaaaagattacgcgcagaaaaa |
| | aaggatctcaagaagatcctttgatcttttctactgaaccgctctagatttcagtgcaatttatctctt |
| | caaatgtagcacctgaagtcagccccatacgatataagttgtaattctcatgttagtcatgccccg |
| | cgcccaccggaaggagctgactgggttgaaggctctcaagggcatcggtcgagatcccggtg |
| | cctaatgagtgagctaacttacattaattgcgttgcgc (SEQ ID NO: 111) |
| pHelper(ZooTsy)_ | tttacactttatgcttccggctcgtatgttggtcgacgtggagatataccatgtttaactttaataagg |
| ΔYRec | agatatacatgagcgatacgcccaatatcagacttggttggcgcctccgcgtgcggatggcgg |
| | aaaaccgaataccgaccgccacggaactcaagcgacggctcgacgcgatcggctacgacat |
| | caccagcgcccaactctcccgaattgtggacgagcgaccggcccaggtgaaaaccgcgcta |
| | ctggaggctttgcttaaagtcctggggggaaccctagacgatctcatgcccgcggagggccgt |
| | gttgagcagccgagttctgcgcctcaaggtggtgaggaagttgcgccaagcccagcgccggc |
| | ggccacccccacccgtaagcgcaaaccggcgcgccccgcctcggaagcagtcgatccgga |
| | cgatgccggtggccccagggtacgccccttctcggtcccaccgaagaagtgaaatagcgttcc |
| | tacatggcgacctctgctcatacctgttgcgatgaatgcagccgtccgatggccaaggcgcgtc |
| | tcgtccggaacgggaaggccttgtgcgacacctgcagccagcggattccctacgccccttgtg |
| | gcaagtgcggaaagcagacgcgcatgctcaatgaccaaggggaaccgctctgcaaggtctg |
| | ccgtgccctcaaccgcacctgcgtgcgttgcggcaagccagtgcgcaaggctgggcgcttgg |
| | tcgatggcggtgctgtctgcggcccctgcgccaagtattaccgtgaaccgcaggcctgcgatc |
| | aatgtggggcaatggagaaggttcttaccggcgtacagacagaaactgggggcgccgtctc |
| | tgcggcaggtgtttccggcgccataaaggctacaagagctgcagcatctgccggaaagacag |
| | gctgcctgtcggcgtgaccgctgacggcaagcctatatgcaaaacctgtttgagtgcggccgg |
| | aaaacctttcgtgtgcccaacctgtggccaggaaggaatacgccatagtagaaggcgttgcca |
| | gaagtgctacgttcgcgatacggcgaaaagccgtgtcgaggaatatgctcccctttttagtcatg |
| | catggacccgggaagcctggctgggatttggtgcagagaccctggaggcaatgaatccagaa |
| | aagctagtgcatcgaatcaacagctactacctcttcttcgtccggcttgatctcgccttcagcaaa |
| | cctacagaaatcacgccggtcgcgctgttgaaaagcgtcggcggcttggatgggctccgtcga |
| | tacaccgtgccctatggctatctcctgaagcaccgaatcatccccgagacaacgcgcagtctcc |
| | tgcaggacgaggctgaatccatcaggcaggaagccatgatcgccaagctggatggcaagtg |
| | gtatgccccagtcatggcacgctaccggaatcacctgctgactgtccgcgcccgatacgacag |
| | ccggggctggaaaggggaagatacccggatgaaggcgcgctcgattacgctcaacctccgg |
| | gcggctcggcgtttatgcgaaacgctggatgccataggtgtccagatgattcagcagacgacg |
| | ccagagatgctggacaagttcttcatggactatcctggactggccgtctcaatccgtgccttcgtc |
| | cgatacctgaaccggaaggaaaaactctttcagcgcctgcgcctgaagacagttgcccggagt |
| | gtgccggaagggattttcctgccccgcgaaaaatccactgcgctcattcaagcgtggatgacg |
| | ccgactgatgagacgcttcggcagtccctcatcggcctgttcatgctgctctatgcccagacggt |
| | caagaactgtgttcggcttcgtctggatgcactcatccaacgggctgacgggcgttatcgcata |
| | gcatttggccgcgcggaaatccacctggatgctcggatcagcgcgatactcgatcgctatttga |
| | acgtgcggcaaacactggttgctctggaccatgccgacgaaaatccgtatctctttccgggacg |
| | gcagttaggcagtcacctgagtgccgaatcggtatccggttggttgaaaaaggcgggcgtcag |
| | ctccgatcagttgtttgcaacatcaatctataacgcctatcaaaatggcctgcgacttcccaaggt |
| | cttggtgcgagcgtttggcatcaccgatacgaccgcgatcaagtatctcaacatgctggatccc |
| | cgcctggtcatggagatcgaacgcaaaccactgggcggcggggacgaaccctgatggctgg |
| | cgaacttaccgttcggaaaaatccatacgccagcggtcagccgtggtggctctatatgctcgaa |
| | tgcaagggcggaggcatctacaccggcatcgcgctggatgtggatgcgcggtttgagcaaca |
| | cgtcgcaggcaagggcgccaaatacacgcgcatgaaccggcccatccgggtcgtcgcgcgc |
| | atccgctacgacacgcaccgggaagccgctcaggctgaagttgcgctgaaacgcctcaagcc |
| | cctggaaaagctgcggtgggcctatgccttggctgggttagtcggcatggacaagtcggcgta |
| | acgcgtggggcgtctccggatcgttgaggggcaaaagcatcgcggcccccgaggctgctgc |
| | caccgctgagcaataacctaggctgctgccaccgctgagcaataactagcataaccccttggg |
| | gcctctaaacgggtcttgaggggttttttgctgaaacctcaggcatttgagaagcacacggtcac |
| | actgcttccggtagtcaataaaccggtaaaccagcaatagacataagcggctatttaacgaccct |
| | gccctgaaccgacgaccgggtcatcgtggccggatcttgcggcccctcggcttgaacgaattg |
| | ttagacattatttgccgactaccttggtgatctcgcctttcacgtagtggacaaattcttccaactga |
| | tctgcgcgcgaggccaagcgatcttcttcttgtccaagataagcctgtctagcttcaagtatgacg |
| | ggctgatactgggccggcaggcgctccattgcccagtcggcagcgacatccttcggcgcgatt |
| | ttgccggttactgcgctgtaccaaatgcgggacaacgtaagcactacatttcgctcatcgccagc |
| | ccagtcgggcggcgagttccatagcgttaaggtttcatttagcgcctcaaatagatcctgttcag |
| | gaaccggatcaaagagttcctccgccgctggacctaccaaggcaacgctatgttctcttgctttt |
| | gtcagcaagatagccagatcaatgtcgatcgtggctggctcgaagatacctgcaagaatgtcat |
| | tgcgctgccattctccaaattgcagttcgcgcttagctggataacgccacggaatgatgtcgtcg |
| | tgcacaacaatggtgacttctacagcgcggagaatctcgctctctccaggggaagccgaagttt |
| | ccaaaaggtcgttgatcaaagctcgccgcgttgtttcatcaagccttacggtcaccgtaaccagc |
| | aaatcaatatcactgtgtggcttcaggccgccatccactgcggagccgtacaaatgtacggcca |
| | gcaacgtcggttcgagatggcgctcgatgacgccaactacctctgatagttgagtcgatacttc |
| | ggcgatcaccgcttccctcatactcttcctttttcaatattattgaagcatttatcagggttattgtct |
| | catgagcggatacatatttgaatgtatttagaaaaataaacaaatagctagctcactcggtcgctac |
| | gctccgggcgtgagactgcggcgggcgctgcggacacatacaaagttacccacagattccgt |
| | ggataagcaggggactaacatgtgaggcaaaacagcagggccgcgccggtggcgtttttcca |
| | taggctccgccctcctgccagagttcacataaacagacgcttttccggtgcatctgtgggagcc |
| | gtgaggctcaaccatgaatctgacagtacgggcgaaacccgacaggacttaaagatccccac |
| | cgtttccggcgggtcgctccctcttgcgctctcctgttccgaccctgccgtttaccggatacctgtt |
| | ccgcctttctcccttacgggaagtgtggcgctttctcatagctcacacactggtatctcggctcgg |
| | tgtaggtcgttcgctccaagctgggctgtaagcaagaactccccgttcagcccgactgctgcgc |
| | cttatccggtaactgttcacttgagtccaacccggaaaagcacggtaaaacgccactggcagca |
| | gccattggtaactgggagttcgcagaggatttgtttagctaaacacgcggttgctcttgaagtgtg |
| | cgccaaagtccggctacactggaaggacagatttggttgctgtgctctgcgaaagccagttacc |
| | acggttaagcagttccccaactgacttaaccttcgatcaaaccacctccccaggggttttttcgtt |
| | tacagggcaaaagattacgcgcagaaaaaaaggatctcaagaagatcctttgatcttttctactg |
| | aaccgctctagatttcagtgcaatttatctcttcaaatgtagcacctgaagtcagccccatacgata |
| | taagttgtaattctcatgttagtcatgccccgcgcccaccggaaggagctgactgggttgaagg |
| | ctctcaagggcatcggtcgagatcccggtgcctaatgagtgagctaacttacattaattgcgttg |
| | cgc (SEQ ID NO: 112) |
| pHelper(ZooTsy)_ | tttacactttatgcttccggctcgtatgttggtcgacgtggagatataccatgtttaactttaataagg |
| ΔHTH | agatatacatggcgaatccgaagatagtgctggcgacatccgatgtcgcttcgcgcgctctcgc |
| | gccagcagatgccgaactgttcgggaccatcattgatgcatggactcgtcgccgcatcggctc |
| | gctgcgccatacccacaaagccgtagccagggacgtctcggtgctgcgggagtttgctgccc |
| | actcaggtctgccgccttggctctggaatgaggatgcatttgactgctggtgcgatcatctcgga |
| | ttggagcgccggttggccaatagcacccagcggcattaccaatgctcgatccgatccttcctcg |
| | aatatctcacgacgaacgtcaagttcaggaacgagatccggcgcttgtatggcgtcgagccac |
| | gacagatttgcacggaagagaactgcatcccccataccgtcgaaaaggagtcctccaaagag |
| | cgccgagccttcacacatgaggaaatcgagttgttttttgacgggctgcggcgcgcttctgtcga |
| | ggccggccgcttcaggaccaaggattacaaccctcttcgtcgggaccgtactttctttttcaccct |
| | ctactccggagggctcaggatttccgaaggcctcaacctaaacgtaaattcgtttgcgccgaatc |
| | cagctttacctgaacttggcccctatggattcatcaaggtctggggcaagggaagccggggaa |
| | gtgggaagcgctttcggaccgtaccggtcacccatcctgacttccctgagctcatggactggta |
| | catcacaagagtccgccctgaattccttcatcgagcggaccccaatgaggaagccttgttcctct |
| | cggagcggggaactcgtctcaagtcgtccagcgccgacgcacgcttcaaaatcgcaactcgc |
| | tattgcggcctggaaggcgaaggactgacgccacactgtctgcgccactcgagcgttacccac |
| | gaatccttgcgcttcagcatcgagatggttcgtcggaagcatggccacgcttctgcggcaacga |
| | cacaaggctatatgcacgtccccgacgttatggtcgacgacgaaatcagcagcgtcgtctccc |
| | gcgagctcgatgacgcgctcaacacacaggagaagaaagaatgaaatagcgttcctacatgg |
| | cgacctctgctcatacctgttgcgatgaatgcagccgtccgatggccaaggcgcgtctcgtccg |
| | gaacgggaaggccttgtgcgacacctgcagccagcggattccctacgccccttgtggcaagt |
| | gcggaaagcagacgcgcatgctcaatgaccaaggggaaccgctctgcaaggtctgccgtgc |
| | cctcaaccgcacctgcgtgcgttgcggcaagccagtgcgcaaggctgggcgcttggtcgatg |
| | gcggtgctgtctgcggcccctgcgccaagtattaccgtgaaccgcaggcctgcgatcaatgtg |
| | gggcaatggagaaggttcttaccggcgtacagacagaaactgggcggcgccgtctctgcggc |
| | aggtgtttccggcgccataaaggctacaagagctgcagcatctgccggaaagacaggctgcct |
| | gtcggcgtgaccgctgacggcaagcctatatgcaaaacctgtttgagtgcggccggaaaacct |
| | ttcgtgtgcccaacctgtggccaggaaggaatacgccatagtagaaggcgttgccagaagtgc |
| | tacgttcgcgatacggcgaaaagccgtgtcgaggaatatgctcccctttttagtcatgcatggac |
| | ccgggaagcctggctgggatttggtgcagagaccctggaggcaatgaatccagaaaagctag |
| | tgcatcgaatcaacagctactacctcttcttcgtccggcttgatctcgccttcagcaaacctacag |
| | aaatcacgccggtcgcgctgttgaaaagcgtcggcggcttggatgggctccgtcgatacaccg |
| | tgccctatggctatctcctgaagcaccgaatcatccccgagacaacgcgcagtctcctgcagga |
| | cgaggctgaatccatcaggcaggaagccatgatcgccaagctggatggcaagtggtatgccc |
| | cagtcatggcacgctaccggaatcacctgctgactgtccgcgcccgatacgacagccggggc |
| | tggaaaggggaagatacccggatgaaggcgcgctcgattacgctcaacctccgggcggctc |
| | ggcgtttatgcgaaacgctggatgccataggtgtccagatgattcagcagacgacgccagaga |
| | tgctggacaagttcttcatggactatcctggactggccgtctcaatccgtgccttcgtccgatacc |
| | tgaaccggaaggaaaaactctttcagcgcctgcgcctgaagacagttgcccggagtgtgccg |
| | gaagggattttcctgccccgcgaaaaatccactgcgctcattcaagcgtggatgacgccgactg |
| | atgagacgcttcggcagtccctcatcggcctgttcatgctgctctatgcccagacggtcaagaa |
| | ctgtgttcggcttcgtctggatgcactcatccaacgggctgacgggcgttatcgcatagcatttg |
| | gccgcgcggaaatccacctggatgctcggatcagcgcgatactcgatcgctatttgaacgtgc |
| | ggcaaacactggttgctctggaccatgccgacgaaaatccgtatctctttccgggacggcagtt |
| | aggcagtcacctgagtgccgaatcggtatccggttggttgaaaaaggcgggcgtcagctccg |
| | atcagttgtttgcaacatcaatctataacgcctatcaaaatggcctgcgacttcccaaggtcttggt |
| | gcgagcgtttggcatcaccgatacgaccgcgatcaagtatctcaacatgctggatccccgcctg |
| | gtcatggagatcgaacgcaaaccactgggcggcggggacgaaccctgatggctggcgaact |
| | taccgttcggaaaaatccatacgccagcggtcagccgtggtggctctatatgctcgaatgcaag |
| | ggcggaggcatctacaccggcatcgcgctggatgtggatgcgcggtttgagcaacacgtcgc |
| | aggcaagggcgccaaatacacgcgcatgaaccggcccatccgggtcgtcgcgcgcatccgc |
| | tacgacacgcaccgggaagccgctcaggctgaagttgcgctgaaacgcctcaagcccctgga |
| | aaagctgcggtgggcctatgccttggctgggttagtcggcatggacaagtcggcgtaacgcgt |
| | ggggcgtctccggatcgttgaggggcaaaagcatcgcggcccccgaggctgctgccaccgc |
| | tgagcaataacctaggctgctgccaccgctgagcaataactagcataaccccttggggcctcta |
| | aacgggtcttgaggggttttttgctgaaacctcaggcatttgagaagcacacggtcacactgctt |
| | ccggtagtcaataaaccggtaaaccagcaatagacataagcggctatttaacgaccctgccctg |
| | aaccgacgaccgggtcatcgtggccggatcttgcggcccctcggcttgaacgaattgttagac |
| | attatttgccgactaccttggtgatctcgcctttcacgtagtggacaaattcttccaactgatctgcg |
| | cgcgaggccaagcgatcttcttcttgtccaagataagcctgtctagcttcaagtatgacgggctg |
| | atactgggccggcaggcgctccattgcccagtcggcagcgacatccttcggcgcgattttgcc |
| | ggttactgcgctgtaccaaatgcgggacaacgtaagcactacatttcgctcatcgccagcccag |
| | tcgggcggcgagttccatagcgttaaggtttcatttagcgcctcaaatagatcctgttcaggaac |
| | cggatcaaagagttcctccgccgctggacctaccaaggcaacgctatgttctcttgcttttgtcag |
| | caagatagccagatcaatgtcgatcgtggctggctcgaagatacctgcaagaatgtcattgcgc |
| | tgccattctccaaattgcagttcgcgcttagctggataacgccacggaatgatgtcgtcgtgcac |
| | aacaatggtgacttctacagcgcggagaatctcgctctctccaggggaagccgaagtttccaaa |
| | aggtcgttgatcaaagctcgccgcgttgtttcatcaagccttacggtcaccgtaaccagcaaatc |
| | aatatcactgtgtggcttcaggccgccatccactgcggagccgtacaaatgtacggccagcaa |
| | cgtcggttcgagatggcgctcgatgacgccaactacctctgatagttgagtcgatacttcggcg |
| | atcaccgcttccctcatactcttcctttttcaatattattgaagcatttatcagggttattgtctcatg |
| | agcggatacatatttgaatgtatttagaaaaataaacaaatagctagctcactcggtcgctacgctcc |
| | gggcgtgagactgcggcgggcgctgcggacacatacaaagttacccacagattccgtggata |
| | agcaggggactaacatgtgaggcaaaacagcagggccgcgccggtggcgtttttccataggc |
| | tccgccctcctgccagagttcacataaacagacgcttttccggtgcatctgtgggagccgtgag |
| | gctcaaccatgaatctgacagtacgggcgaaacccgacaggacttaaagatccccaccgtttc |
| | cggcgggtcgctccctcttgcgctctcctgttccgaccctgccgtttaccggatacctgttccgcc |
| | tttctcccttacgggaagtgtggcgctttctcatagctcacacactggtatctcggctcggtgtag |
| | gtcgttcgctccaagctgggctgtaagcaagaactccccgttcagcccgactgctgcgccttat |
| | ccggtaactgttcacttgagtccaacccggaaaagcacggtaaaacgccactggcagcagcc |
| | attggtaactgggagttcgcagaggatttgtttagctaaacacgcggttgctcttgaagtgtgcgc |
| | caaagtccggctacactggaaggacagatttggttgctgtgctctgcgaaagccagttaccacg |
| | gttaagcagttccccaactgacttaaccttcgatcaaaccacctccccaggtggttttttcgtttac |
| | agggcaaaagattacgcgcagaaaaaaaggatctcaagaagatcctttgatcttttctactgaac |
| | cgctctagatttcagtgcaatttatctcttcaaatgtagcacctgaagtcagccccatacgatataa |
| | gttgtaattctcatgttagtcatgccccgcgcccaccggaaggagctgactgggttgaaggctct |
| | caagggcatcggtcgagatcccggtgcctaatgagtgagctaacttacattaattgcgttgcgc |
| | (SEQ ID NO: 113) |
| pHelper(ZooTsy)_ | tttacactttatgcttccggctcgtatgttggtcgacgtggagatataccatgtttaactttaataagg |
| ΔTnsF | agatatacatggcgaatccgaagatagtgctggcgacatccgatgtcgcttcgcgcgctctcgc |
| | gccagcagatgccgaactgttcgggaccatcattgatgcatggactcgtcgccgcatcggctc |
| | gctgcgccatacccacaaagccgtagccagggacgtctcggtgctgcgggagtttgctgccc |
| | actcaggtctgccgccttggctctggaatgaggatgcatttgactgctggtgcgatcatctcgga |
| | ttggagcgccggttggccaatagcacccagcggcattaccaatgctcgatccgatccttcctcg |
| | aatatctcacgacgaacgtcaagttcaggaacgagatccggcgcttgtatggcgtcgagccac |
| | gacagatttgcacggaagagaactgcatcccccataccgtcgaaaaggagtcctccaaagag |
| | cgccgagccttcacacatgaggaaatcgagttgttttttgacgggctgcggcgcgcttctgtcga |
| | ggccggccgcttcaggaccaaggattacaaccctcttcgtcgggaccgtactttctttttcaccct |
| | ctactccggagggctcaggatttccgaaggcctcaacctaaacgtaaattcgtttgcgccgaatc |
| | cagctttacctgaacttggcccctatggattcatcaaggtctggggcaagggaagccggggaa |
| | gtgggaagcgctttcggaccgtaccggtcacccatcctgacttccctgagctcatggactggta |
| | catcacaagagtccgccctgaattccttcatcgagcggaccccaatgaggaagccttgttcctct |
| | cggagcggggaactcgtctcaagtcgtccagcgccgacgcacgcttcaaaatcgcaactcgc |
| | tattgcggcctggaaggcgaaggactgacgccacactgtctgcgccactcgagcgttacccac |
| | gaatccttgcgcttcagcatcgagatggttcgtcggaagcatggccacgcttctgcggcaacga |
| | cacaaggctatatgcacgtccccgacgttatggtcgacgacgaaatcagcagcgtcgtctccc |
| | gcgagctcgatgacgcgctcaacacacaggagaagaaagaatgagcgatacgcccaatatc |
| | agacttggttggcgcctccgcgtgcggatggcggaaaaccgaataccgaccgccacggaact |
| | caagcgacggctcgacgcgatcggctacgacatcaccagcgcccaactctcccgaattgtgg |
| | acgagcgaccggcccaggtgaaaaccgcgctactggaggctttgcttaaagtcctgggggga |
| | accctagacgatctcatgcccgcggagggccgtgttgagcagccgagttctgcgcctcaaggt |
| | ggtgaggaagttgcgccaagcccagcgccggcggccacccccacccgtaagcgcaaaccg |
| | gcgcgccccgcctcggaagcagtcgatccggacgatgccggtggccccagggtacgcccct |
| | tctcggtcccaccgaagaagtgaaatagcgttcctacatggctggcgaacttaccgttcggaaa |
| | aatccatacgccagcggtcagccgtggtggctctatatgctcgaatgcaagggcggaggcatc |
| | tacaccggcatcgcgctggatgtggatgcgcggtttgagcaacacgtcgcaggcaagggcgc |
| | caaatacacgcgcatgaaccggcccatccgggtcgtcgcgcgcatccgctacgacacgcacc |
| | gggaagccgctcaggctgaagttgcgctgaaacgcctcaagcccctggaaaagctgcggtg |
| | ggcctatgccttggctgggttagtcggcatggacaagtcggcgtaacgcgtggggcgtctccg |
| | gatcgttgaggggcaaaagcatcgcggcccccgaggctgctgccaccgctgagcaataacct |
| | aggctgctgccaccgctgagcaataactagcataaccccttggggcctctaaacgggtcttgag |
| | gggttttttgctgaaacctcaggcatttgagaagcacacggtcacactgcttccggtagtcaataa |
| | accggtaaaccagcaatagacataagcggctatttaacgaccctgccctgaaccgacgaccg |
| | ggtcatcgtggccggatcttgcggcccctcggcttgaacgaattgttagacattatttgccgacta |
| | ccttggtgatctcgcctttcacgtagtggacaaattcttccaactgatctgcgcgcgaggccaag |
| | cgatcttcttcttgtccaagataagcctgtctagcttcaagtatgacgggctgatactgggccggc |
| | aggcgctccattgcccagtcggcagcgacatccttcggcgcgattttgccggttactgcgctgt |
| | accaaatgcgggacaacgtaagcactacatttcgctcatcgccagcccagtcgggcggcgag |
| | ttccatagcgttaaggtttcatttagcgcctcaaatagatcctgttcaggaaccggatcaaagagtt |
| | cctccgccgctggacctaccaaggcaacgctatgttctcttgcttttgtcagcaagatagccaga |
| | tcaatgtcgatcgtggctggctcgaagatacctgcaagaatgtcattgcgctgccattctccaaat |
| | tgcagttcgcgcttagctggataacgccacggaatgatgtcgtcgtgcacaacaatggtgactt |
| | ctacagcgcggagaatctcgctctctccaggggaagccgaagtttccaaaaggtcgttgatcaa |
| | agctcgccgcgttgtttcatcaagccttacggtcaccgtaaccagcaaatcaatatcactgtgtg |
| | gcttcaggccgccatccactgcggagccgtacaaatgtacggccagcaacgtcggttcgagat |
| | ggcgctcgatgacgccaactacctctgatagttgagtcgatacttcggcgatcaccgcttccctc |
| | atactcttcctttttcaatattattgaagcatttatcagggttattgtctcatgagcggatacatattt |
| | gaatgtatttagaaaaataaacaaatagctagctcactcggtcgctacgctccgggcgtgagactgc |
| | gggggcgctgcggacacatacaaagttacccacagattccgtggataagcaggggactaac |
| | atgtgaggcaaaacagcagggccgcgccggtggcgtttttccataggctccgccctcctgcca |
| | gagttcacataaacagacgcttttccggtgcatctgtgggagccgtgaggctcaaccatgaatct |
| | gacagtacgggcgaaacccgacaggacttaaagatccccaccgtttccgggggtcgctccc |
| | tcttgcgctctcctgttccgaccctgccgtttaccggatacctgttccgcctttctcccttacggga |
| | agtgtggcgctttctcatagctcacacactggtatctcggctcggtgtaggtcgttcgctccaagc |
| | tgggctgtaagcaagaactccccgttcagcccgactgctgcgccttatccggtaactgttcactt |
| | gagtccaacccggaaaagcacggtaaaacgccactggcagcagccattggtaactgggagtt |
| | cgcagaggatttgtttagctaaacacgcggttgctcttgaagtgtgcgccaaagtccggctaca |
| | ctggaaggacagatttggttgctgtgctctgcgaaagccagttaccacggttaagcagttcccc |
| | aactgacttaaccttcgatcaaaccacctccccaggtggttttttcgtttacagggcaaaagattac |
| | gcgcagaaaaaaaggatctcaagaagatcctttgatcttttctactgaaccgctctagatttcagt |
| | gcaatttatctcttcaaatgtagcacctgaagtcagccccatacgatataagttgtaattctcatgtt |
| | agtcatgccccgcgcccaccggaaggagctgactgggttgaaggctctcaagggcatcggtc |
| | gagatcccggtgcctaatgagtgagctaacttacattaattgcgttgcgc (SEQ ID NO: |
| | 114) |
| pHelper(ZooTsy)_ | tttacactttatgcttccggctcgtatgttggtcgacgtggagatataccatgtttaactttaataagg |
| ΔGIY-YIG | agatatacatggcgaatccgaagatagtgctggcgacatccgatgtcgcttcgcgcgctctcgc |
| | gccagcagatgccgaactgttcgggaccatcattgatgcatggactcgtcgccgcatcggctc |
| | gctgcgccatacccacaaagccgtagccagggacgtctcggtgctgcgggagtttgctgccc |
| | actcaggtctgccgccttggctctggaatgaggatgcatttgactgctggtgcgatcatctcgga |
| | ttggagcgccggttggccaatagcacccagcggcattaccaatgctcgatccgatccttcctcg |
| | aatatctcacgacgaacgtcaagttcaggaacgagatccggcgcttgtatggcgtcgagccac |
| | gacagatttgcacggaagagaactgcatcccccataccgtcgaaaaggagtcctccaaagag |
| | cgccgagccttcacacatgaggaaatcgagttgttttttgacgggctgcggcgcgcttctgtcga |
| | ggccggccgcttcaggaccaaggattacaaccctcttcgtcgggaccgtactttctttttcaccct |
| | ctactccggagggctcaggatttccgaaggcctcaacctaaacgtaaattcgtttgcgccgaatc |
| | cagctttacctgaacttggcccctatggattcatcaaggtctggggcaagggaagccggggaa |
| | gtgggaagcgctttcggaccgtaccggtcacccatcctgacttccctgagctcatggactggta |
| | catcacaagagtccgccctgaattccttcatcgagcggaccccaatgaggaagccttgttcctct |
| | cggagcggggaactcgtctcaagtcgtccagcgccgacgcacgcttcaaaatcgcaactcgc |
| | tattgcggcctggaaggcgaaggactgacgccacactgtctgcgccactcgagcgttacccac |
| | gaatccttgcgcttcagcatcgagatggttcgtcggaagcatggccacgcttctgcggcaacga |
| | cacaaggctatatgcacgtccccgacgttatggtcgacgacgaaatcagcagcgtcgtctccc |
| | gcgagctcgatgacgcgctcaacacacaggagaagaaagaatgagcgatacgcccaatatc |
| | agacttggttggcgcctccgcgtgcggatggcggaaaaccgaataccgaccgccacggaact |
| | caagcgacggctcgacgcgatcggctacgacatcaccagcgcccaactctcccgaattgtgg |
| | acgagcgaccggcccaggtgaaaaccgcgctactggaggctttgcttaaagtcctgggggga |
| | accctagacgatctcatgcccgcggagggccgtgttgagcagccgagttctgcgcctcaaggt |
| | ggtgaggaagttgcgccaagcccagcgccggcggccacccccacccgtaagcgcaaaccg |
| | gcgcgccccgcctcggaagcagtcgatccggacgatgccggtggccccagggtacgcccct |
| | tctcggtcccaccgaagaagtgaaatagcgttcctacatggcgacctctgctcatacctgttgcg |
| | atgaatgcagccgtccgatggccaaggcgcgtctcgtccggaacgggaaggccttgtgcgac |
| | acctgcagccagcggattccctacgccccttgtggcaagtgcggaaagcagacgcgcatgct |
| | caatgaccaaggggaaccgctctgcaaggtctgccgtgccctcaaccgcacctgcgtgcgttg |
| | cggcaagccagtgcgcaaggctgggcgcttggtcgatggcggtgctgtctgcggcccctgcg |
| | ccaagtattaccgtgaaccgcaggcctgcgatcaatgtggggcaatggagaaggttcttaccg |
| | gcgtacagacagaaactgggcggcgccgtctctgcggcaggtgtttccggcgccataaaggc |
| | tacaagagctgcagcatctgccggaaagacaggctgcctgtcggcgtgaccgctgacggcaa |
| | gcctatatgcaaaacctgtttgagtgcggccggaaaacctttcgtgtgcccaacctgtggccag |
| | gaaggaatacgccatagtagaaggcgttgccagaagtgctacgttcgcgatacggcgaaaag |
| | ccgtgtcgaggaatatgctcccctttttagtcatgcatggacccgggaagcctggctgggatttg |
| | gtgcagagaccctggaggcaatgaatccagaaaagctagtgcatcgaatcaacagctactacc |
| | tcttcttcgtccggcttgatctcgccttcagcaaacctacagaaatcacgccggtcgcgctgttga |
| | aaagcgtcggcggcttggatgggctccgtcgatacaccgtgccctatggctatctcctgaagca |
| | ccgaatcatccccgagacaacgcgcagtctcctgcaggacgaggctgaatccatcaggcagg |
| | aagccatgatcgccaagctggatggcaagtggtatgccccagtcatggcacgctaccggaatc |
| | acctgctgactgtccgcgcccgatacgacagccggggctggaaaggggaagatacccggat |
| | gaaggcgcgctcgattacgctcaacctccgggcggctcggcgtttatgcgaaacgctggatgc |
| | cataggtgtccagatgattcagcagacgacgccagagatgctggacaagttcttcatggactat |
| | cctggactggccgtctcaatccgtgccttcgtccgatacctgaaccggaaggaaaaactctttca |
| | gcgcctgcgcctgaagacagttgcccggagtgtgccggaagggattttcctgccccgcgaaa |
| | aatccactgcgctcattcaagcgtggatgacgccgactgatgagacgcttcggcagtccctcat |
| | cggcctgttcatgctgctctatgcccagacggtcaagaactgtgttcggcttcgtctggatgcact |
| | catccaacgggctgacgggcgttatcgcatagcatttggccgcgcggaaatccacctggatgc |
| | tcggatcagcgcgatactcgatcgctatttgaacgtgcggcaaacactggttgctctggaccat |
| | gccgacgaaaatccgtatctctttccgggacggcagttaggcagtcacctgagtgccgaatcg |
| | gtatccggttggttgaaaaaggcgggcgtcagctccgatcagttgtttgcaacatcaatctataa |
| | cgcctatcaaaatggcctgcgacttcccaaggtcttggtgcgagcgtttggcatcaccgatacg |
| | accgcgatcaagtatctcaacatgctggatccccgcctggtcatggagatcgaacgcaaacca |
| | ctgggcggcggggacgaaccctgacgcgtggggcgtctccggatcgttgaggggcaaaag |
| | catcgcggcccccgaggctgctgccaccgctgagcaataacctaggctgctgccaccgctga |
| | gcaataactagcataaccccttggggcctctaaacgggtcttgaggggttttttgctgaaacctca |
| | ggcatttgagaagcacacggtcacactgcttccggtagtcaataaaccggtaaaccagcaata |
| | gacataagcggctatttaacgaccctgccctgaaccgacgaccgggtcatcgtggccggatctt |
| | gcggcccctcggcttgaacgaattgttagacattatttgccgactaccttggtgatctcgcctttca |
| | cgtagtggacaaattcttccaactgatctgcgcgcgaggccaagcgatcttcttcttgtccaagat |
| | aagcctgtctagcttcaagtatgacgggctgatactgggccggcaggcgctccattgcccagtc |
| | ggcagcgacatccttcggcgcgattttgccggttactgcgctgtaccaaatgcgggacaacgta |
| | agcactacatttcgctcatcgccagcccagtcgggcggcgagttccatagcgttaaggtttcattt |
| | agcgcctcaaatagatcctgttcaggaaccggatcaaagagttcctccgccgctggacctacca |
| | aggcaacgctatgttctcttgcttttgtcagcaagatagccagatcaatgtcgatcgtggctggct |
| | cgaagatacctgcaagaatgtcattgcgctgccattctccaaattgcagttcgcgcttagctggat |
| | aacgccacggaatgatgtcgtcgtgcacaacaatggtgacttctacagcgcggagaatctcgct |
| | ctctccaggggaagccgaagtttccaaaaggtcgttgatcaaagctcgccgcgttgtttcatcaa |
| | gccttacggtcaccgtaaccagcaaatcaatatcactgtgtggcttcaggccgccatccactgc |
| | ggagccgtacaaatgtacggccagcaacgtcggttcgagatggcgctcgatgacgccaacta |
| | cctctgatagttgagtcgatacttcggcgatcaccgcttccctcatactcttcctttttcaatattatt |
| | gaagcatttatcagggttattgtctcatgagcggatacatatttgaatgtatttagaaaaataaacaaa |
| | tagctagctcactcggtcgctacgctccgggcgtgagactgcggcgggcgctgcggacacat |
| | acaaagttacccacagattccgtggataagcaggggactaacatgtgaggcaaaacagcagg |
| | gccgcgccggtggcgtttttccataggctccgccctcctgccagagttcacataaacagacgct |
| | tttccggtgcatctgtgggagccgtgaggctcaaccatgaatctgacagtacgggcgaaaccc |
| | gacaggacttaaagatccccaccgtttccggcgggtcgctccctcttgcgctctcctgttccgac |
| | cctgccgtttaccggatacctgttccgcctttctcccttacgggaagtgtggcgctttctcatagct |
| | cacacactggtatctcggctcggtgtaggtcgttcgctccaagctgggctgtaagcaagaactc |
| | cccgttcagcccgactgctgcgccttatccggtaactgttcacttgagtccaacccggaaaagc |
| | acggtaaaacgccactggcagcagccattggtaactgggagttcgcagaggatttgtttagcta |
| | aacacgcggttgctcttgaagtgtgcgccaaagtccggctacactggaaggacagatttggttg |
| | ctgtgctctgcgaaagccagttaccacggttaagcagttccccaactgacttaaccttcgatcaa |
| | accacctccccaggtggttttttcgtttacagggcaaaagattacgcgcagaaaaaaaggatctc |
| | aagaagatcctttgatcttttctactgaaccgctctagatttcagtgcaatttatctcttcaaatgtag |
| | cacctgaagtcagccccatacgatataagttgtaattctcatgttagtcatgccccgcgcccacc |
| | ggaaggagctgactgggttgaaggctctcaagggcatcggtcgagatcccggtgcctaatga |
| | gtgagctaacttacattaattgcgttgcgc (SEQ ID NO: 115) |
| pHelper(ZooTsy)_ | tttacactttatgcttccggctcgtatgttggtcgacgtggagatataccatgtttaactttaataagg |
| YRec-Y341F | agatatacatggcgaatccgaagatagtgctggcgacatccgatgtcgcttcgcgcgctctcgc |
| | gccagcagatgccgaactgttcgggaccatcattgatgcatggactcgtcgccgcatcggctc |
| | gctgcgccatacccacaaagccgtagccagggacgtctcggtgctgcgggagtttgctgccc |
| | actcaggtctgccgccttggctctggaatgaggatgcatttgactgctggtgcgatcatctcgga |
| | ttggagcgccggttggccaatagcacccagcggcattaccaatgctcgatccgatccttcctcg |
| | aatatctcacgacgaacgtcaagttcaggaacgagatccggcgcttgtatggcgtcgagccac |
| | gacagatttgcacggaagagaactgcatcccccataccgtcgaaaaggagtcctccaaagag |
| | cgccgagccttcacacatgaggaaatcgagttgttttttgacgggctgcggcgcgcttctgtcga |
| | ggccggccgcttcaggaccaaggattacaaccctcttcgtcgggaccgtactttctttttcaccct |
| | ctactccggagggctcaggatttccgaaggcctcaacctaaacgtaaattcgtttgcgccgaatc |
| | cagctttacctgaacttggcccctatggattcatcaaggtctggggcaagggaagccggggaa |
| | gtgggaagcgctttcggaccgtaccggtcacccatcctgacttccctgagctcatggactggta |
| | catcacaagagtccgccctgaattccttcatcgagcggaccccaatgaggaagccttgttcctct |
| | cggagcggggaactcgtctcaagtcgtccagcgccgacgcacgcttcaaaatcgcaactcgc |
| | tattgcggcctggaaggcgaaggactgacgccacactgtctgcgccactcgagcgttacccac |
| | gaatccttgcgcttcagcatcgagatggttcgtcggaagcatggccacgcttctgcggcaacga |
| | cacaaggcttcatgcacgtccccgacgttatggtcgacgacgaaatcagcagcgtcgtctccc |
| | gcgagctcgatgacgcgctcaacacacaggagaagaaagaatgagcgatacgcccaatatc |
| | agacttggttggcgcctccgcgtgcggatggcggaaaaccgaataccgaccgccacggaact |
| | caagcgacggctcgacgcgatcggctacgacatcaccagcgcccaactctcccgaattgtgg |
| | acgagcgaccggcccaggtgaaaaccgcgctactggaggctttgcttaaagtcctgggggga |
| | accctagacgatctcatgcccgcggagggccgtgttgagcagccgagttctgcgcctcaaggt |
| | ggtgaggaagttgcgccaagcccagcgccggcggccacccccacccgtaagcgcaaaccg |
| | gcgcgccccgcctcggaagcagtcgatccggacgatgccggtggccccagggtacgcccct |
| | tctcggtcccaccgaagaagtgaaatagcgttcctacatggcgacctctgctcatacctgttgcg |
| | atgaatgcagccgtccgatggccaaggcgcgtctcgtccggaacgggaaggccttgtgcgac |
| | acctgcagccagcggattccctacgccccttgtggcaagtgcggaaagcagacgcgcatgct |
| | caatgaccaaggggaaccgctctgcaaggtctgccgtgccctcaaccgcacctgcgtgcgttg |
| | cggcaagccagtgcgcaaggctgggcgcttggtcgatggcggtgctgtctgcggcccctgcg |
| | ccaagtattaccgtgaaccgcaggcctgcgatcaatgtggggcaatggagaaggttcttaccg |
| | gcgtacagacagaaactgggcggcgccgtctctgcggcaggtgtttccggcgccataaaggc |
| | tacaagagctgcagcatctgccggaaagacaggctgcctgtcggcgtgaccgctgacggcaa |
| | gcctatatgcaaaacctgtttgagtgcggccggaaaacctttcgtgtgcccaacctgtggccag |
| | gaaggaatacgccatagtagaaggcgttgccagaagtgctacgttcgcgatacggcgaaaag |
| | ccgtgtcgaggaatatgctcccctttttagtcatgcatggacccgggaagcctggctgggatttg |
| | gtgcagagaccctggaggcaatgaatccagaaaagctagtgcatcgaatcaacagctactacc |
| | tcttcttcgtccggcttgatctcgccttcagcaaacctacagaaatcacgccggtcgcgctgttga |
| | aaagcgtcggcggcttggatgggctccgtcgatacaccgtgccctatggctatctcctgaagca |
| | ccgaatcatccccgagacaacgcgcagtctcctgcaggacgaggctgaatccatcaggcagg |
| | aagccatgatcgccaagctggatggcaagtggtatgccccagtcatggcacgctaccggaatc |
| | acctgctgactgtccgcgcccgatacgacagccggggctggaaaggggaagatacccggat |
| | gaaggcgcgctcgattacgctcaacctccgggcggctcggcgtttatgcgaaacgctggatgc |
| | cataggtgtccagatgattcagcagacgacgccagagatgctggacaagttcttcatggactat |
| | cctggactggccgtctcaatccgtgccttcgtccgatacctgaaccggaaggaaaaactctttca |
| | gcgcctgcgcctgaagacagttgcccggagtgtgccggaagggattttcctgccccgcgaaa |
| | aatccactgcgctcattcaagcgtggatgacgccgactgatgagacgcttcggcagtccctcat |
| | cggcctgttcatgctgctctatgcccagacggtcaagaactgtgttcggcttcgtctggatgcact |
| | catccaacgggctgacgggcgttatcgcatagcatttggccgcgcggaaatccacctggatgc |
| | tcggatcagcgcgatactcgatcgctatttgaacgtgcggcaaacactggttgctctggaccat |
| | gccgacgaaaatccgtatctctttccgggacggcagttaggcagtcacctgagtgccgaatcg |
| | gtatccggttggttgaaaaaggcgggcgtcagctccgatcagttgtttgcaacatcaatctataa |
| | cgcctatcaaaatggcctgcgacttcccaaggtcttggtgcgagcgtttggcatcaccgatacg |
| | accgcgatcaagtatctcaacatgctggatccccgcctggtcatggagatcgaacgcaaacca |
| | ctgggcggcggggacgaaccctgatggctggcgaacttaccgttcggaaaaatccatacgcc |
| | agcggtcagccgtggtggctctatatgctcgaatgcaagggcggaggcatctacaccggcatc |
| | gcgctggatgtggatgcgcggtttgagcaacacgtcgcaggcaagggcgccaaatacacgc |
| | gcatgaaccggcccatccgggtcgtcgcgcgcatccgctacgacacgcaccgggaagccgc |
| | tcaggctgaagttgcgctgaaacgcctcaagcccctggaaaagctgcggtgggcctatgcctt |
| | ggctgggttagtcggcatggacaagtcggcgtaacgcgtggggcgtctccggatcgttgagg |
| | ggcaaaagcatcgcggcccccgaggctgctgccaccgctgagcaataacctaggctgctgcc |
| | accgctgagcaataactagcataaccccttggggcctctaaacgggtcttgaggggttttttgct |
| | gaaacctcaggcatttgagaagcacacggtcacactgcttccggtagtcaataaaccggtaaac |
| | cagcaatagacataagcggctatttaacgaccctgccctgaaccgacgaccgggtcatcgtgg |
| | ccggatcttgcggcccctcggcttgaacgaattgttagacattatttgccgactaccttggtgatct |
| | cgcctttcacgtagtggacaaattcttccaactgatctgcgcgcgaggccaagcgatcttcttctt |
| | gtccaagataagcctgtctagcttcaagtatgacgggctgatactgggccggcaggcgctccat |
| | tgcccagtcggcagcgacatccttcggcgcgattttgccggttactgcgctgtaccaaatgcgg |
| | gacaacgtaagcactacatttcgctcatcgccagcccagtcgggcggcgagttccatagcgtta |
| | aggtttcatttagcgcctcaaatagatcctgttcaggaaccggatcaaagagttcctccgccgct |
| | ggacctaccaaggcaacgctatgttctcttgcttttgtcagcaagatagccagatcaatgtcgatc |
| | gtggctggctcgaagatacctgcaagaatgtcattgcgctgccattctccaaattgcagttcgcg |
| | cttagctggataacgccacggaatgatgtcgtcgtgcacaacaatggtgacttctacagcgcgg |
| | agaatctcgctctctccaggggaagccgaagtttccaaaaggtcgttgatcaaagctcgccgcg |
| | ttgtttcatcaagccttacggtcaccgtaaccagcaaatcaatatcactgtgtggcttcaggccgc |
| | catccactgcggagccgtacaaatgtacggccagcaacgtcggttcgagatggcgctcgatga |
| | cgccaactacctctgatagttgagtcgatacttcggcgatcaccgcttccctcatactcttccttttt |
| | caatattattgaagcatttatcagggttattgtctcatgagcggatacatatttgaatgtatttagaaa |
| | aataaacaaatagctagctcactcggtcgctacgctccgggcgtgagactgcggcgggcgct |
| | gcggacacatacaaagttacccacagattccgtggataagcaggggactaacatgtgaggca |
| | aaacagcagggccgcgccggtggcgtttttccataggctccgccctcctgccagagttcacata |
| | aacagacgcttttccggtgcatctgtgggagccgtgaggctcaaccatgaatctgacagtacgg |
| | gcgaaacccgacaggacttaaagatccccaccgtttccgggggtcgctccctcttgcgctctc |
| | ctgttccgaccctgccgtttaccggatacctgttccgcctttctcccttacgggaagtgtggcgctt |
| | tctcatagctcacacactggtatctcggctcggtgtaggtcgttcgctccaagctgggctgtaag |
| | caagaactccccgttcagcccgactgctgcgccttatccggtaactgttcacttgagtccaaccc |
| | ggaaaagcacggtaaaacgccactggcagcagccattggtaactgggagttcgcagaggatt |
| | tgtttagctaaacacgcggttgctcttgaagtgtgcgccaaagtccggctacactggaaggaca |
| | gatttggttgctgtgctctgcgaaagccagttaccacggttaagcagttccccaactgacttaacc |
| | ttcgatcaaaccacctccccaggtggttttttcgtttacagggcaaaagattacgcgcagaaaaa |
| | aaggatctcaagaagatcctttgatcttttctactgaaccgctctagatttcagtgcaatttatctctt |
| | caaatgtagcacctgaagtcagccccatacgatataagttgtaattctcatgttagtcatgccccg |
| | cgcccaccggaaggagctgactgggttgaaggctctcaagggcatcggtcgagatcccggtg |
| | cctaatgagtgagctaacttacattaattgcgttgcgc (SEQ ID NO: 116) |
| pHelper(ZooTsy)_ | tttacactttatgcttccggctcgtatgttggtcgacgtggagatataccatgtttaactttaataagg |
| TnsF-Y584F | agatatacatggcgaatccgaagatagtgctggcgacatccgatgtcgcttcgcgcgctctcgc |
| | gccagcagatgccgaactgttcgggaccatcattgatgcatggactcgtcgccgcatcggctc |
| | gctgcgccatacccacaaagccgtagccagggacgtctcggtgctgcgggagtttgctgccc |
| | actcaggtctgccgccttggctctggaatgaggatgcatttgactgctggtgcgatcatctcgga |
| | ttggagcgccggttggccaatagcacccagcggcattaccaatgctcgatccgatccttcctcg |
| | aatatctcacgacgaacgtcaagttcaggaacgagatccggcgcttgtatggcgtcgagccac |
| | gacagatttgcacggaagagaactgcatcccccataccgtcgaaaaggagtcctccaaagag |
| | cgccgagccttcacacatgaggaaatcgagttgttttttgacgggctgcggcgcgcttctgtcga |
| | ggccggccgcttcaggaccaaggattacaaccctcttcgtcgggaccgtactttctttttcaccct |
| | ctactccggagggctcaggatttccgaaggcctcaacctaaacgtaaattcgtttgcgccgaatc |
| | cagctttacctgaacttggcccctatggattcatcaaggtctggggcaagggaagccggggaa |
| | gtgggaagcgctttcggaccgtaccggtcacccatcctgacttccctgagctcatggactggta |
| | catcacaagagtccgccctgaattccttcatcgagcggaccccaatgaggaagccttgttcctct |
| | cggagcggggaactcgtctcaagtcgtccagcgccgacgcacgcttcaaaatcgcaactcgc |
| | tattgcggcctggaaggcgaaggactgacgccacactgtctgcgccactcgagcgttacccac |
| | gaatccttgcgcttcagcatcgagatggttcgtcggaagcatggccacgcttctgcggcaacga |
| | cacaaggctatatgcacgtccccgacgttatggtcgacgacgaaatcagcagcgtcgtctccc |
| | gcgagctcgatgacgcgctcaacacacaggagaagaaagaatgagcgatacgcccaatatc |
| | agacttggttggcgcctccgcgtgcggatggcggaaaaccgaataccgaccgccacggaact |
| | caagcgacggctcgacgcgatcggctacgacatcaccagcgcccaactctcccgaattgtgg |
| | acgagcgaccggcccaggtgaaaaccgcgctactggaggctttgcttaaagtcctgggggga |
| | accctagacgatctcatgcccgcggagggccgtgttgagcagccgagttctgcgcctcaaggt |
| | ggtgaggaagttgcgccaagcccagcgccggcggccacccccacccgtaagcgcaaaccg |
| | gcgcgccccgcctcggaagcagtcgatccggacgatgccggtggccccagggtacgcccct |
| | tctcggtcccaccgaagaagtgaaatagcgttcctacatggcgacctctgctcatacctgttgcg |
| | atgaatgcagccgtccgatggccaaggcgcgtctcgtccggaacgggaaggccttgtgcgac |
| | acctgcagccagcggattccctacgccccttgtggcaagtgcggaaagcagacgcgcatgct |
| | caatgaccaaggggaaccgctctgcaaggtctgccgtgccctcaaccgcacctgcgtgcgttg |
| | cggcaagccagtgcgcaaggctgggcgcttggtcgatggcggtgctgtctgcggcccctgcg |
| | ccaagtattaccgtgaaccgcaggcctgcgatcaatgtggggcaatggagaaggttcttaccg |
| | gcgtacagacagaaactgggcggcgccgtctctgcggcaggtgtttccggcgccataaaggc |
| | tacaagagctgcagcatctgccggaaagacaggctgcctgtcggcgtgaccgctgacggcaa |
| | gcctatatgcaaaacctgtttgagtgcggccggaaaacctttcgtgtgcccaacctgtggccag |
| | gaaggaatacgccatagtagaaggcgttgccagaagtgctacgttcgcgatacggcgaaaag |
| | ccgtgtcgaggaatatgctcccctttttagtcatgcatggacccgggaagcctggctgggatttg |
| | gtgcagagaccctggaggcaatgaatccagaaaagctagtgcatcgaatcaacagctactacc |
| | tcttcttcgtccggcttgatctcgccttcagcaaacctacagaaatcacgccggtcgcgctgttga |
| | aaagcgtcggcggcttggatgggctccgtcgatacaccgtgccctatggctatctcctgaagca |
| | ccgaatcatccccgagacaacgcgcagtctcctgcaggacgaggctgaatccatcaggcagg |
| | aagccatgatcgccaagctggatggcaagtggtatgccccagtcatggcacgctaccggaatc |
| | acctgctgactgtccgcgcccgatacgacagccggggctggaaaggggaagatacccggat |
| | gaaggcgcgctcgattacgctcaacctccgggcggctcggcgtttatgcgaaacgctggatgc |
| | cataggtgtccagatgattcagcagacgacgccagagatgctggacaagttcttcatggactat |
| | cctggactggccgtctcaatccgtgccttcgtccgatacctgaaccggaaggaaaaactctttca |
| | gcgcctgcgcctgaagacagttgcccggagtgtgccggaagggattttcctgccccgcgaaa |
| | aatccactgcgctcattcaagcgtggatgacgccgactgatgagacgcttcggcagtccctcat |
| | cggcctgttcatgctgctctatgcccagacggtcaagaactgtgttcggcttcgtctggatgcact |
| | catccaacgggctgacgggcgttatcgcatagcatttggccgcgcggaaatccacctggatgc |
| | tcggatcagcgcgatactcgatcgctatttgaacgtgcggcaaacactggttgctctggaccat |
| | gccgacgaaaatccgtatctctttccgggacggcagttaggcagtcacctgagtgccgaatcg |
| | gtatccggttggttgaaaaaggcgggcgtcagctccgatcagttgtttgcaacatcaatctataa |
| | cgcctatcaaaatggcctgcgacttcccaaggtcttggtgcgagcgtttggcatcaccgatacg |
| | accgcgatcaagttcctcaacatgctggatccccgcctggtcatggagatcgaacgcaaacca |
| | ctgggcggcggggacgaaccctgatggctggcgaacttaccgttcggaaaaatccatacgcc |
| | agcggtcagccgtggtggctctatatgctcgaatgcaagggcggaggcatctacaccggcatc |
| | gcgctggatgtggatgcgcggtttgagcaacacgtcgcaggcaagggcgccaaatacacgc |
| | gcatgaaccggcccatccgggtcgtcgcgcgcatccgctacgacacgcaccgggaagccgc |
| | tcaggctgaagttgcgctgaaacgcctcaagcccctggaaaagctgcggtgggcctatgcctt |
| | ggctgggttagtcggcatggacaagtcggcgtaacgcgtggggcgtctccggatcgttgagg |
| | ggcaaaagcatcgcggcccccgaggctgctgccaccgctgagcaataacctaggctgctgcc |
| | accgctgagcaataactagcataaccccttggggcctctaaacgggtcttgaggggttttttgct |
| | gaaacctcaggcatttgagaagcacacggtcacactgcttccggtagtcaataaaccggtaaac |
| | cagcaatagacataagcggctatttaacgaccctgccctgaaccgacgaccgggtcatcgtgg |
| | ccggatcttgcggcccctcggcttgaacgaattgttagacattatttgccgactaccttggtgatct |
| | cgcctttcacgtagtggacaaattcttccaactgatctgcgcgcgaggccaagcgatcttcttctt |
| | gtccaagataagcctgtctagcttcaagtatgacgggctgatactgggccggcaggcgctccat |
| | tgcccagtcggcagcgacatccttcggcgcgattttgccggttactgcgctgtaccaaatgcgg |
| | gacaacgtaagcactacatttcgctcatcgccagcccagtcgggcggcgagttccatagcgtta |
| | aggtttcatttagcgcctcaaatagatcctgttcaggaaccggatcaaagagttcctccgccgct |
| | ggacctaccaaggcaacgctatgttctcttgcttttgtcagcaagatagccagatcaatgtcgatc |
| | gtggctggctcgaagatacctgcaagaatgtcattgcgctgccattctccaaattgcagttcgcg |
| | cttagctggataacgccacggaatgatgtcgtcgtgcacaacaatggtgacttctacagcgcgg |
| | agaatctcgctctctccaggggaagccgaagtttccaaaaggtcgttgatcaaagctcgccgcg |
| | ttgtttcatcaagccttacggtcaccgtaaccagcaaatcaatatcactgtgtggcttcaggccgc |
| | catccactgcggagccgtacaaatgtacggccagcaacgtcggttcgagatggcgctcgatga |
| | cgccaactacctctgatagttgagtcgatacttcggcgatcaccgcttccctcatactcttccttttt |
| | caatattattgaagcatttatcagggttattgtctcatgagcggatacatatttgaatgtatttagaaa |
| | aataaacaaatagctagctcactcggtcgctacgctccgggcgtgagactgcggcgggcgct |
| | gcggacacatacaaagttacccacagattccgtggataagcaggggactaacatgtgaggca |
| | aaacagcagggccgcgccggtggcgtttttccataggctccgccctcctgccagagttcacata |
| | aacagacgcttttccggtgcatctgtgggagccgtgaggctcaaccatgaatctgacagtacgg |
| | gcgaaacccgacaggacttaaagatccccaccgtttccgggggtcgctccctcttgcgctctc |
| | ctgttccgaccctgccgtttaccggatacctgttccgcctttctcccttacgggaagtgtggcgctt |
| | tctcatagctcacacactggtatctcggctcggtgtaggtcgttcgctccaagctgggctgtaag |
| | caagaactccccgttcagcccgactgctgcgccttatccggtaactgttcacttgagtccaaccc |
| | ggaaaagcacggtaaaacgccactggcagcagccattggtaactgggagttcgcagaggatt |
| | tgtttagctaaacacgcggttgctcttgaagtgtgcgccaaagtccggctacactggaaggaca |
| | gatttggttgctgtgctctgcgaaagccagttaccacggttaagcagttccccaactgacttaacc |
| | ttcgatcaaaccacctccccaggtggttttttcgtttacagggcaaaagattacgcgcagaaaaa |
| | aaggatctcaagaagatcctttgatcttttctactgaaccgctctagatttcagtgcaatttatctctt |
| | caaatgtagcacctgaagtcagccccatacgatataagttgtaattctcatgttagtcatgccccg |
| | cgcccaccggaaggagctgactgggttgaaggctctcaagggcatcggtcgagatcccggtg |
| | cctaatgagtgagctaacttacattaattgcgttgcgc (SEQ ID NO: 117) |
| pR6K- | gagagtgcaccatacaggaaacagctatgaccatgattacgccaagctcggcgcgccattgg |
| Donor(ZooTsy)_ | gattcggtcgaattcggactgggattctccaatattccttagcgcttccaataaagagcgcttttga |
| H1:12_E1:135_E2:39_ | agctgatgtgcttaaaaacttactcaatggaataattctagataattcactagtgattggaaatgttg |
| H2:12 | gatcctcatactcttcctttttcaattcagaagaactcgtcaagaaggcgatagaaggcgatgcg |
| | ctgcgaatcgggagcggcgataccgtaaagcacgaggaagcggtcagcccattcgccgcca |
| | agctcttcagcaatatcacgggtagccaacgctatgtcctgatagcggtccgccacacccagcc |
| | ggccacagtcgatgaatccagaaaagcggccattttccaccatgatattcggcaagcaggcat |
| | cgccatgggtcacgacgagatcctcgccgtcgggcatgcgcgccttgagcctggcgaacagt |
| | tcggctggcgcgagcccctgatgctcttcgtccagatcatcctgatcgacaagaccggcttcca |
| | tccgagtacgtgctcgctcgatgcgatgtttcgcttggtggtcgaatgggcaggtagccggatc |
| | aagcgtatgcagccgccgcattgcatcagccatgatggatactttctcggcaggagcaaggtg |
| | ggatgacaggagatcctgccccggcacttcgcccaatagcagccagtcccttcccgcttcagt |
| | gacaacgtcgagcacagctgcgcaaggaacgcccgtcgtggccagccacgatagccgcgct |
| | gcctcgtcctgcagttcattcagggcaccggacaggtcggtcttgacaaaaagaaccgggcgc |
| | ccctgcgctgacagccggaacacggcggcatcagagcagccgattgtctgttgtgcccagtca |
| | tagccgaatagcctctccacccaagcggccggagaacctgcgtgcaatccatcttgttcaatca |
| | tgcgaaacgatcctcatcctgtctcttgatcagatcttgatcccctgcgccatcagatccttggcg |
| | gcaagaaagccatccagtttactttgcagggcttcccaaccttaccagagggcgccccagctg |
| | gcaattccggttcgcttgctgtccataaaaccgcccagtctagctatcgccatgtaagcccactg |
| | caagctacctgctttctctttgcgcttgcgttttcccttgtccagatagcccagtagctgacattcat |
| | ccggggtcagcaccgtttctgcggactggctttctacgtgttccgcttcctttagcagcccttgcg |
| | ccatgcatttgttaaatcgaattatccattgctgttgacaaagggaatcaggggatcttgaagttcc |
| | tattccgaagttcctattctctagaaagtataggaacttcagagcgcttttgaagctaattcgagat |
| | catgcatgagctcactagtggatccccccgactacttctaatgctgtgacatcactcacaggattc |
| | ctgcaagtaatgcgacattggatactttgggattcctttatagtcagtgggttatccgaatttttgcc |
| | ttgttcgttgctacattggctaaatcagaacttcggcagctcgtcatcccaatacgcgtcaattcac |
| | tggccgtcgttttactactttccgctgcataaccctgcttcggggtcattatagcgattttttcggtat |
| | atccatcctttttcgcacgatatacaggattttgccaaagggttcgtgtagactttccttggtgtatc |
| | caacggcgtcagccgggcaggataggtgaagtaggcccacccgcgagcgggtgttccttctt |
| | cactgtcccttattcgcacctggcggtgctcaacgggaatcctgctctgcgaggctggccgata |
| | agctctgataacgcaggaaagaacatgggcagttcaacctgttgatagtacgtactaagctctca |
| | tgtttcacgtactaagctctcaagtttaacgtactaagctctcatgtttaacgaactaaaccctcatg |
| | gctaacgtactaagctctcatggctaacgtactaagctctcatgtttcacgtactaagctctcatgtt |
| | tgaacaataaaattaatataaatcagcaacttaaatagcctctaaggttttaagttttataagaaaaa |
| | aaagaatatataaggcttttaaagcttttaaggtttaacggttgtggacaacaagccagggatgta |
| | acgcactgagaagcccttagagcctctcaaagcaattttgagtgacacaggaacacttaacggc |
| | tgacaaccggctggtaacaggattagcagagcgaggtatgtaggcggtgctacaagattgtac |
| | tgagagtgcaccatacaggaaacagc (SEQ ID NO: 118) |
| pR6K- | gagagtgcaccatacaggaaacagctatgaccatgattacgccaagctcggcgcgccattgg |
| Donor(ZooTsy)_H1:0_ | gatggactgggattctccaatattccttagcgcttccaataaagagcgcttttgaagctgatgtgct |
| E1:135_E2:39_H2:0 | taaaaacttactcaatggaataattctagataattcactagtgattggaaatgttggatcctcatact |
| | cttcctttttcaattcagaagaactcgtcaagaaggcgatagaaggcgatgcgctgcgaatcgg |
| | gagcggcgataccgtaaagcacgaggaagcggtcagcccattcgccgccaagctcttcagca |
| | atatcacgggtagccaacgctatgtcctgatagcggtccgccacacccagccggccacagtcg |
| | atgaatccagaaaagcggccattttccaccatgatattcggcaagcaggcatcgccatgggtca |
| | cgacgagatcctcgccgtcgggcatgcgcgccttgagcctggcgaacagttcggctggcgcg |
| | agcccctgatgctcttcgtccagatcatcctgatcgacaagaccggcttccatccgagtacgtgc |
| | tcgctcgatgcgatgtttcgcttggtggtcgaatgggcaggtagccggatcaagcgtatgcagc |
| | cgccgcattgcatcagccatgatggatactttctcggcaggagcaaggtgggatgacaggaga |
| | tcctgccccggcacttcgcccaatagcagccagtcccttcccgcttcagtgacaacgtcgagca |
| | cagctgcgcaaggaacgcccgtcgtggccagccacgatagccgcgctgcctcgtcctgcagt |
| | tcattcagggcaccggacaggtcggtcttgacaaaaagaaccgggcgcccctgcgctgacag |
| | ccggaacacggggcatcagagcagccgattgtctgttgtgcccagtcatagccgaatagcct |
| | ctccacccaagcggccggagaacctgcgtgcaatccatcttgttcaatcatgcgaaacgatcct |
| | catcctgtctcttgatcagatcttgatcccctgcgccatcagatccttggcggcaagaaagccatc |
| | cagtttactttgcagggcttcccaaccttaccagagggcgccccagctggcaattccggttcgct |
| | tgctgtccataaaaccgcccagtctagctatcgccatgtaagcccactgcaagctacctgctttct |
| | ctttgcgcttgcgttttcccttgtccagatagcccagtagctgacattcatccggggtcagcaccg |
| | tttctgcggactggctttctacgtgttccgcttcctttagcagcccttgcgccatgcatttgttaaatc |
| | gaattatccattgctgttgacaaagggaatcaggggatcttgaagttcctattccgaagttcctatt |
| | ctctagaaagtataggaacttcagagcgcttttgaagctaattcgagatcatgcatgagctcacta |
| | gtggatccccccgactacttctaatgctgtgacatcactcacaggattcctgcaagtaatgcgac |
| | attggatactttgggattcctttatagtcagtgggttatccgaatttttgccttgttcgttgctacatt |
| | ggctaaatcagaacttatcccaatacgcgtcaattcactggccgtcgttttactactttccgctgcat |
| | aaccctgcttcggggtcattatagcgattttttcggtatatccatcctttttcgcacgatatacagga |
| | ttttgccaaagggttcgtgtagactttccttggtgtatccaacggcgtcagccgggcaggatagg |
| | tgaagtaggcccacccgcgagcgggtgttccttcttcactgtcccttattcgcacctggcggtgc |
| | tcaacgggaatcctgctctgcgaggctggccgataagctctgataacgcaggaaagaacatgg |
| | gcagttcaacctgttgatagtacgtactaagctctcatgtttcacgtactaagctctcaagtttaacg |
| | tactaagctctcatgtttaacgaactaaaccctcatggctaacgtactaagctctcatggctaacgt |
| | actaagctctcatgtttcacgtactaagctctcatgtttgaacaataaaattaatataaatcagcaac |
| | ttaaatagcctctaaggttttaagttttataagaaaaaaaagaatatataaggcttttaaagcttttaa |
| | ggtttaacggttgtggacaacaagccagggatgtaacgcactgagaagcccttagagcctctc |
| | aaagcaattttgagtgacacaggaacacttaacggctgacaaccggctggtaacaggattagc |
| | agagcgaggtatgtaggcggtgctacaagattgtactgagagtgcaccatacaggaaacagc |
| | (SEQ ID NO: 119) |
| pR6K- | gagagtgcaccatacaggaaacagctatgaccatgattacgccaagctcggcgcgccattgg |
| Donor(ZooTsy)_H1:0_ | gatagagcgcttttgaagctgatgtgcttaaaaacttactcaatggaataattctagataattcacta |
| E1:0_E2:0_H2:0 | gtgattggaaatgttggatcctcatactcttcctttttcaattcagaagaactcgtcaagaaggcga |
| | tagaaggcgatgcgctgcgaatcgggagcggcgataccgtaaagcacgaggaagcggtca |
| | gcccattcgccgccaagctcttcagcaatatcacgggtagccaacgctatgtcctgatagcggt |
| | ccgccacacccagccggccacagtcgatgaatccagaaaagcggccattttccaccatgatat |
| | tcggcaagcaggcatcgccatgggtcacgacgagatcctcgccgtcgggcatgcgcgccttg |
| | agcctggcgaacagttcggctggcgcgagcccctgatgctcttcgtccagatcatcctgatcga |
| | caagaccggcttccatccgagtacgtgctcgctcgatgcgatgtttcgcttggtggtcgaatgg |
| | gcaggtagccggatcaagcgtatgcagccgccgcattgcatcagccatgatggatactttctcg |
| | gcaggagcaaggtgggatgacaggagatcctgccccggcacttcgcccaatagcagccagt |
| | cccttcccgcttcagtgacaacgtcgagcacagctgcgcaaggaacgcccgtcgtggccagc |
| | cacgatagccgcgctgcctcgtcctgcagttcattcagggcaccggacaggtcggtcttgaca |
| | aaaagaaccgggcgcccctgcgctgacagccggaacacggcggcatcagagcagccgatt |
| | gtctgttgtgcccagtcatagccgaatagcctctccacccaagcggccggagaacctgcgtgc |
| | aatccatcttgttcaatcatgcgaaacgatcctcatcctgtctcttgatcagatcttgatcccctgcg |
| | ccatcagatccttggcggcaagaaagccatccagtttactttgcagggcttcccaaccttaccag |
| | agggcgccccagctggcaattccggttcgcttgctgtccataaaaccgcccagtctagctatcg |
| | ccatgtaagcccactgcaagctacctgctttctctttgcgcttgcgttttcccttgtccagatagccc |
| | agtagctgacattcatccggggtcagcaccgtttctgcggactggctttctacgtgttccgcttcc |
| | tttagcagcccttgcgccatgcatttgttaaatcgaattatccattgctgttgacaaagggaatcag |
| | gggatcttgaagttcctattccgaagttcctattctctagaaagtataggaacttcagagcgctttt |
| | gaagctaattcgagatcatgcatgagctcactagtggatccccccgacatcccaatacgcgtca |
| | attcactggccgtcgttttactactttccgctgcataaccctgcttcggggtcattatagcgatttttt |
| | cggtatatccatcctttttcgcacgatatacaggattttgccaaagggttcgtgtagactttccttgg |
| | tgtatccaacggcgtcagccgggcaggataggtgaagtaggcccacccgcgagcgggtgttc |
| | cttcttcactgtcccttattcgcacctggcggtgctcaacgggaatcctgctctgcgaggctggc |
| | cgataagctctgataacgcaggaaagaacatgggcagttcaacctgttgatagtacgtactaag |
| | ctctcatgtttcacgtactaagctctcaagtttaacgtactaagctctcatgtttaacgaactaaacc |
| | ctcatggctaacgtactaagctctcatggctaacgtactaagctctcatgtttcacgtactaagctc |
| | tcatgtttgaacaataaaattaatataaatcagcaacttaaatagcctctaaggttttaagttttataa |
| | gaaaaaaaagaatatataaggcttttaaagcttttaaggtttaacggttgtggacaacaagccag |
| | ggatgtaacgcactgagaagcccttagagcctctcaaagcaattttgagtgacacaggaacact |
| | taacggctgacaaccggctggtaacaggattagcagagcgaggtatgtaggcggtgctacaa |
| | gattgtactgagagtgcaccatacaggaaacagc (SEQ ID NO: 120) |
| pR6K- | gagagtgcaccatacaggaaacagctatgaccatgattacgccaagctcggcgcgccattgg |
| Donor(ZooTsy)_ | gattcggtcgaattcggactgggattctccaatattccttagcgcttccaataaagagcgcttttga |
| H1:12_ | agctgatgtgcttaaaaacttactcaatggaataattctagataattcactagtgattggaaatgttg |
| E1:85_E2:39_H2:12 | gatcctcatactcttcctttttcaattcagaagaactcgtcaagaaggcgatagaaggcgatgcg |
| | ctgcgaatcgggagcggcgataccgtaaagcacgaggaagcggtcagcccattcgccgcca |
| | agctcttcagcaatatcacgggtagccaacgctatgtcctgatagcggtccgccacacccagcc |
| | ggccacagtcgatgaatccagaaaagcggccattttccaccatgatattcggcaagcaggcat |
| | cgccatgggtcacgacgagatcctcgccgtcgggcatgcgcgccttgagcctggcgaacagt |
| | tcggctggcgcgagcccctgatgctcttcgtccagatcatcctgatcgacaagaccggcttcca |
| | tccgagtacgtgctcgctcgatgcgatgtttcgcttggtggtcgaatgggcaggtagccggatc |
| | aagcgtatgcagccgccgcattgcatcagccatgatggatactttctcggcaggagcaaggtg |
| | ggatgacaggagatcctgccccggcacttcgcccaatagcagccagtcccttcccgcttcagt |
| | gacaacgtcgagcacagctgcgcaaggaacgcccgtcgtggccagccacgatagccgcgct |
| | gcctcgtcctgcagttcattcagggcaccggacaggtcggtcttgacaaaaagaaccgggcgc |
| | ccctgcgctgacagccggaacacggcggcatcagagcagccgattgtctgttgtgcccagtca |
| | tagccgaatagcctctccacccaagcggccggagaacctgcgtgcaatccatcttgttcaatca |
| | tgcgaaacgatcctcatcctgtctcttgatcagatcttgatcccctgcgccatcagatccttggcg |
| | gcaagaaagccatccagtttactttgcagggcttcccaaccttaccagagggcgccccagctg |
| | gcaattccggttcgcttgctgtccataaaaccgcccagtctagctatcgccatgtaagcccactg |
| | caagctacctgctttctctttgcgcttgcgttttcccttgtccagatagcccagtagctgacattcat |
| | ccggggtcagcaccgtttctgcggactggctttctacgtgttccgcttcctttagcagcccttgcg |
| | ccatgcatttgttaaatcgaattatccattgctgttgacaaagggaatcaggggatcttgaagttcc |
| | tattccgaagttcctattctctagaaagtataggaacttcagagcgcttttgaagctaattcgagat |
| | catgcatgagctcactagtggatccccccgacattggatactttgggattcctttatagtcagtgg |
| | gttatccgaatttttgccttgttcgttgctacattggctaaatcagaacttcggcagctcgtcatccc |
| | aatacgcgtcaattcactggccgtcgttttactactttccgctgcataaccctgcttcggggtcatt |
| | atagcgattttttcggtatatccatcctttttcgcacgatatacaggattttgccaaagggttcgtgta |
| | gactttccttggtgtatccaacggcgtcagccgggcaggataggtgaagtaggcccacccgcg |
| | agcgggtgttccttcttcactgtcccttattcgcacctggcggtgctcaacgggaatcctgctctg |
| | cgaggctggccgataagctctgataacgcaggaaagaacatgggcagttcaacctgttgatag |
| | tacgtactaagctctcatgtttcacgtactaagctctcaagtttaacgtactaagctctcatgtttaac |
| | gaactaaaccctcatggctaacgtactaagctctcatggctaacgtactaagctctcatgtttcac |
| | gtactaagctctcatgtttgaacaataaaattaatataaatcagcaacttaaatagcctctaaggttt |
| | taagttttataagaaaaaaaagaatatataaggcttttaaagcttttaaggtttaacggttgtggaca |
| | acaagccagggatgtaacgcactgagaagcccttagagcctctcaaagcaattttgagtgaca |
| | caggaacacttaacggctgacaaccggctggtaacaggattagcagagcgaggtatgtaggc |
| | ggtgctacaagattgtactgagagtgcaccatacaggaaacagc (SEQ ID NO: 121) |
| pR6K- | gagagtgcaccatacaggaaacagctatgaccatgattacgccaagctcggcgcgccattgg |
| Donor(ZooTsy)_ | gattcggtcgaattcggactgggattctccaatattccttagcgcttccaataaagagcgcttttga |
| H1:12_ | agctgatgtgcttaaaaacttactcaatggaataattctagataattcactagtgattggaaatgttg |
| E1:35_E2:39_H2:12 | gatcctcatactcttcctttttcaattcagaagaactcgtcaagaaggcgatagaaggcgatgcg |
| | ctgcgaatcgggagcggcgataccgtaaagcacgaggaagcggtcagcccattcgccgcca |
| | agctcttcagcaatatcacgggtagccaacgctatgtcctgatagcggtccgccacacccagcc |
| | ggccacagtcgatgaatccagaaaagcggccattttccaccatgatattcggcaagcaggcat |
| | cgccatgggtcacgacgagatcctcgccgtcgggcatgcgcgccttgagcctggcgaacagt |
| | tcggctggcgcgagcccctgatgctcttcgtccagatcatcctgatcgacaagaccggcttcca |
| | tccgagtacgtgctcgctcgatgcgatgtttcgcttggtggtcgaatgggcaggtagccggatc |
| | aagcgtatgcagccgccgcattgcatcagccatgatggatactttctcggcaggagcaaggtg |
| | ggatgacaggagatcctgccccggcacttcgcccaatagcagccagtcccttcccgcttcagt |
| | gacaacgtcgagcacagctgcgcaaggaacgcccgtcgtggccagccacgatagccgcgct |
| | gcctcgtcctgcagttcattcagggcaccggacaggtcggtcttgacaaaaagaaccgggcgc |
| | ccctgcgctgacagccggaacacggcggcatcagagcagccgattgtctgttgtgcccagtca |
| | tagccgaatagcctctccacccaagcggccggagaacctgcgtgcaatccatcttgttcaatca |
| | tgcgaaacgatcctcatcctgtctcttgatcagatcttgatcccctgcgccatcagatccttggcg |
| | gcaagaaagccatccagtttactttgcagggcttcccaaccttaccagagggcgccccagctg |
| | gcaattccggttcgcttgctgtccataaaaccgcccagtctagctatcgccatgtaagcccactg |
| | caagctacctgctttctctttgcgcttgcgttttcccttgtccagatagcccagtagctgacattcat |
| | ccggggtcagcaccgtttctgcggactggctttctacgtgttccgcttcctttagcagcccttgcg |
| | ccatgcatttgttaaatcgaattatccattgctgttgacaaagggaatcaggggatcttgaagttcc |
| | tattccgaagttcctattctctagaaagtataggaacttcagagcgcttttgaagctaattcgagat |
| | catgcatgagctcactagtggatccccccgacccttgttcgttgctacattggctaaatcagaact |
| | tcggcagctcgtcatcccaatacgcgtcaattcactggccgtcgttttactactttccgctgcataa |
| | ccctgcttcggggtcattatagcgattttttcggtatatccatcctttttcgcacgatatacaggattt |
| | tgccaaagggttcgtgtagactttccttggtgtatccaacggcgtcagccgggcaggataggtga |
| | agtaggcccacccgcgagcgggtgttccttcttcactgtcccttattcgcacctggcggtgctca |
| | acgggaatcctgctctgcgaggctggccgataagctctgataacgcaggaaagaacatgggc |
| | agttcaacctgttgatagtacgtactaagctctcatgtttcacgtactaagctctcaagtttaacgta |
| | ctaagctctcatgtttaacgaactaaaccctcatggctaacgtactaagctctcatggctaacgta |
| | ctaagctctcatgtttcacgtactaagctctcatgtttgaacaataaaattaatataaatcagcaactt |
| | aaatagcctctaaggttttaagttttataagaaaaaaaagaatatataaggcttttaaagcttttaag |
| | gtttaacggttgtggacaacaagccagggatgtaacgcactgagaagcccttagagcctctcaa |
| | agcaattttgagtgacacaggaacacttaacggctgacaaccggctggtaacaggattagcag |
| | agcgaggtatgtaggcggtgctacaagattgtactgagagtgcaccatacaggaaacagc |
| | (SEQ ID NO: 122) |
| pR6K- | gagagtgcaccatacaggaaacagctatgaccatgattacgccaagctcggcgcgccattgg |
| Donor(ZooTsy)_ | gattcggtcgaattcggactgggattctccaatattccttagcgcttccaataaagagcgcttttga |
| H1:12_ | agctgatgtgcttaaaaacttactcaatggaataattctagataattcactagtgattggaaatgttg |
| E1:0_E2:39_H2:12 | gatcctcatactcttcctttttcaattcagaagaactcgtcaagaaggcgatagaaggcgatgcg |
| | ctgcgaatcgggagcggcgataccgtaaagcacgaggaagcggtcagcccattcgccgcca |
| | agctcttcagcaatatcacgggtagccaacgctatgtcctgatagcggtccgccacacccagcc |
| | ggccacagtcgatgaatccagaaaagcggccattttccaccatgatattcggcaagcaggcat |
| | cgccatgggtcacgacgagatcctcgccgtcgggcatgcgcgccttgagcctggcgaacagt |
| | tcggctggcgcgagcccctgatgctcttcgtccagatcatcctgatcgacaagaccggcttcca |
| | tccgagtacgtgctcgctcgatgcgatgtttcgcttggtggtcgaatgggcaggtagccggatc |
| | aagcgtatgcagccgccgcattgcatcagccatgatggatactttctcggcaggagcaaggtg |
| | ggatgacaggagatcctgccccggcacttcgcccaatagcagccagtcccttcccgcttcagt |
| | gacaacgtcgagcacagctgcgcaaggaacgcccgtcgtggccagccacgatagccgcgct |
| | gcctcgtcctgcagttcattcagggcaccggacaggtcggtcttgacaaaaagaaccgggcgc |
| | ccctgcgctgacagccggaacacggcggcatcagagcagccgattgtctgttgtgcccagtca |
| | tagccgaatagcctctccacccaagcggccggagaacctgcgtgcaatccatcttgttcaatca |
| | tgcgaaacgatcctcatcctgtctcttgatcagatcttgatcccctgcgccatcagatccttggcg |
| | gcaagaaagccatccagtttactttgcagggcttcccaaccttaccagagggcgccccagctg |
| | gcaattccggttcgcttgctgtccataaaaccgcccagtctagctatcgccatgtaagcccactg |
| | caagctacctgctttctctttgcgcttgcgttttcccttgtccagatagcccagtagctgacattcat |
| | ccggggtcagcaccgtttctgcggactggctttctacgtgttccgcttcctttagcagcccttgcg |
| | ccatgcatttgttaaatcgaattatccattgctgttgacaaagggaatcaggggatcttgaagttcc |
| | tattccgaagttcctattctctagaaagtataggaacttcagagcgcttttgaagctaattcgagat |
| | catgcatgagctcactagtggatccccccgaccggcagctcgtcatcccaatacgcgtcaattc |
| | actggccgtcgttttactactttccgctgcataaccctgcttcggggtcattatagcgattttttcggt |
| | atatccatcctttttcgcacgatatacaggattttgccaaagggttcgtgtagactttccttggtgtat |
| | ccaacggcgtcagccgggcaggataggtgaagtaggcccacccgcgagcgggtgttccttct |
| | tcactgtcccttattcgcacctggcggtgctcaacgggaatcctgctctgcgaggctggccgat |
| | aagctctgataacgcaggaaagaacatgggcagttcaacctgttgatagtacgtactaagctctc |
| | atgtttcacgtactaagctctcaagtttaacgtactaagctctcatgtttaacgaactaaaccctcat |
| | ggctaacgtactaagctctcatggctaacgtactaagctctcatgtttcacgtactaagctctcatg |
| | tttgaacaataaaattaatataaatcagcaacttaaatagcctctaaggttttaagttttataagaaaa |
| | aaaagaatatataaggcttttaaagcttttaaggtttaacggttgtggacaacaagccagggatgt |
| | aacgcactgagaagcccttagagcctctcaaagcaattttgagtgacacaggaacacttaacgg |
| | ctgacaaccggctggtaacaggattagcagagcgaggtatgtaggcggtgctacaagattgta |
| | ctgagagtgcaccatacaggaaacagc (SEQ ID NO: 123) |
| pR6K- | gagagtgcaccatacaggaaacagctatgaccatgattacgccaagctcggcgcgccattgg |
| Donor(ZooTsy)_ | gattcggtcgaattcggactgggattctccaatattccttagcgcttccaataaagagcgcttttga |
| H1:12_ | agctgatgtgcttaaaaacttactcaatggaataattctagataattcactagtgattggaaatgttg |
| E1:115_E2:39_H2:12 | gatcctcatactcttcctttttcaattcagaagaactcgtcaagaaggcgatagaaggcgatgcg |
| | ctgcgaatcgggagcggcgataccgtaaagcacgaggaagcggtcagcccattcgccgcca |
| | agctcttcagcaatatcacgggtagccaacgctatgtcctgatagcggtccgccacacccagcc |
| | ggccacagtcgatgaatccagaaaagcggccattttccaccatgatattcggcaagcaggcat |
| | cgccatgggtcacgacgagatcctcgccgtcgggcatgcgcgccttgagcctggcgaacagt |
| | tcggctggcgcgagcccctgatgctcttcgtccagatcatcctgatcgacaagaccggcttcca |
| | tccgagtacgtgctcgctcgatgcgatgtttcgcttggtggtcgaatgggcaggtagccggatc |
| | aagcgtatgcagccgccgcattgcatcagccatgatggatactttctcggcaggagcaaggtg |
| | ggatgacaggagatcctgccccggcacttcgcccaatagcagccagtcccttcccgcttcagt |
| | gacaacgtcgagcacagctgcgcaaggaacgcccgtcgtggccagccacgatagccgcgct |
| | gcctcgtcctgcagttcattcagggcaccggacaggtcggtcttgacaaaaagaaccgggcgc |
| | ccctgcgctgacagccggaacacggcggcatcagagcagccgattgtctgttgtgcccagtca |
| | tagccgaatagcctctccacccaagcggccggagaacctgcgtgcaatccatcttgttcaatca |
| | tgcgaaacgatcctcatcctgtctcttgatcagatcttgatcccctgcgccatcagatccttggcg |
| | gcaagaaagccatccagtttactttgcagggcttcccaaccttaccagagggcgccccagctg |
| | gcaattccggttcgcttgctgtccataaaaccgcccagtctagctatcgccatgtaagcccactg |
| | caagctacctgctttctctttgcgcttgcgttttcccttgtccagatagcccagtagctgacattcat |
| | ccggggtcagcaccgtttctgcggactggctttctacgtgttccgcttcctttagcagcccttgcg |
| | ccatgcatttgttaaatcgaattatccattgctgttgacaaagggaatcaggggatcttgaagttcc |
| | tattccgaagttcctattctctagaaagtataggaacttcagagcgcttttgaagctaattcgagat |
| | catgcatgagctcactagtggatccccccgaccactcacaggattcctgcaagtaatgcgacat |
| | tggatactttgggattcctttatagtcagtgggttatccgaatttttgccttgttcgttgctacattgg |
| | ctaaatcagaacttcggcagctcgtcatcccaatacgcgtcaattcactggccgtcgttttactactt |
| | tccgctgcataaccctgcttcggggtcattatagcgattttttcggtatatccatcctttttcgcacg |
| | atatacaggattttgccaaagggttcgtgtagactttccttggtgtatccaacggcgtcagccgg |
| | gcaggataggtgaagtaggcccacccgcgagcgggtgttccttcttcactgtcccttattcgca |
| | cctggcggtgctcaacgggaatcctgctctgcgaggctggccgataagctctgataacgcagg |
| | aaagaacatgggcagttcaacctgttgatagtacgtactaagctctcatgtttcacgtactaagct |
| | ctcaagtttaacgtactaagctctcatgtttaacgaactaaaccctcatggctaacgtactaagctc |
| | tcatggctaacgtactaagctctcatgtttcacgtactaagctctcatgtttgaacaataaaattaat |
| | ataaatcagcaacttaaatagcctctaaggttttaagttttataagaaaaaaaagaatatataaggc |
| | ttttaaagcttttaaggtttaacggttgtggacaacaagccagggatgtaacgcactgagaagcc |
| | cttagagcctctcaaagcaattttgagtgacacaggaacacttaacggctgacaaccggctggt |
| | aacaggattagcagagcgaggtatgtaggcggtgctacaagattgtactgagagtgcaccata |
| | caggaaacagc (SEQ ID NO: 124) |
| pR6K- | gagagtgcaccatacaggaaacagctatgaccatgattacgccaagctcggcgcgccattgg |
| Donor(ZooTsy)_ | gattcggtcgaattcggactgggattctccaatattccttagcgcttccaataaagagcgcttttga |
| H1:12_ | agctgatgtgcttaaaaacttactcaatggaataattctagataattcactagtgattggaaatgttg |
| E1:105_E2:39_H2:12 | gatcctcatactcttcctttttcaattcagaagaactcgtcaagaaggcgatagaaggcgatgcg |
| | ctgcgaatcgggagcggcgataccgtaaagcacgaggaagcggtcagcccattcgccgcca |
| | agctcttcagcaatatcacgggtagccaacgctatgtcctgatagcggtccgccacacccagcc |
| | ggccacagtcgatgaatccagaaaagcggccattttccaccatgatattcggcaagcaggcat |
| | cgccatgggtcacgacgagatcctcgccgtcgggcatgcgcgccttgagcctggcgaacagt |
| | tcggctggcgcgagcccctgatgctcttcgtccagatcatcctgatcgacaagaccggcttcca |
| | tccgagtacgtgctcgctcgatgcgatgtttcgcttggtggtcgaatgggcaggtagccggatc |
| | aagcgtatgcagccgccgcattgcatcagccatgatggatactttctcggcaggagcaaggtg |
| | ggatgacaggagatcctgccccggcacttcgcccaatagcagccagtcccttcccgcttcagt |
| | gacaacgtcgagcacagctgcgcaaggaacgcccgtcgtggccagccacgatagccgcgct |
| | gcctcgtcctgcagttcattcagggcaccggacaggtcggtcttgacaaaaagaaccgggcgc |
| | ccctgcgctgacagccggaacacggcggcatcagagcagccgattgtctgttgtgcccagtca |
| | tagccgaatagcctctccacccaagcggccggagaacctgcgtgcaatccatcttgttcaatca |
| | tgcgaaacgatcctcatcctgtctcttgatcagatcttgatcccctgcgccatcagatccttggcg |
| | gcaagaaagccatccagtttactttgcagggcttcccaaccttaccagagggcgccccagctg |
| | gcaattccggttcgcttgctgtccataaaaccgcccagtctagctatcgccatgtaagcccactg |
| | caagctacctgctttctctttgcgcttgcgttttcccttgtccagatagcccagtagctgacattcat |
| | ccggggtcagcaccgtttctgcggactggctttctacgtgttccgcttcctttagcagcccttgcg |
| | ccatgcatttgttaaatcgaattatccattgctgttgacaaagggaatcaggggatcttgaagttcc |
| | tattccgaagttcctattctctagaaagtataggaacttcagagcgcttttgaagctaattcgagat |
| | catgcatgagctcactagtggatccccccgacattcctgcaagtaatgcgacattggatactttg |
| | ggattcctttatagtcagtgggttatccgaatttttgccttgttcgttgctacattggctaaatcagaa |
| | cttcggcagctcgtcatcccaatacgcgtcaattcactggccgtcgttttactactttccgctgcat |
| | aaccctgcttcggggtcattatagcgattttttcggtatatccatcctttttcgcacgatatacagga |
| | ttttgccaaagggttcgtgtagactttccttggtgtatccaacggcgtcagccgggcaggatagg |
| | tgaagtaggcccacccgcgagcgggtgttccttcttcactgtcccttattcgcacctggcggtgc |
| | tcaacgggaatcctgctctgcgaggctggccgataagctctgataacgcaggaaagaacatgg |
| | gcagttcaacctgttgatagtacgtactaagctctcatgtttcacgtactaagctctcaagtttaacg |
| | tactaagctctcatgtttaacgaactaaaccctcatggctaacgtactaagctctcatggctaacgt |
| | actaagctctcatgtttcacgtactaagctctcatgtttgaacaataaaattaatataaatcagcaac |
| | ttaaatagcctctaaggttttaagttttataagaaaaaaaagaatatataaggcttttaaagcttttaa |
| | ggtttaacggttgtggacaacaagccagggatgtaacgcactgagaagcccttagagcctctc |
| | aaagcaattttgagtgacacaggaacacttaacggctgacaaccggctggtaacaggattagc |
| | agagcgaggtatgtaggcggtgctacaagattgtactgagagtgcaccatacaggaaacagc |
| | (SEQ ID NO: 125) |
| pR6K- | gagagtgcaccatacaggaaacagctatgaccatgattacgccaagctcggcgcgccattgg |
| Donor(ZooTsy)_ | gattcggtcgaattcggactgggattctccaatattccttagcgcttccaataaagagcgcttttga |
| H1:12_ | agctgatgtgcttaaaaacttactcaatggaataattctagataattcactagtgattggaaatgttg |
| E1:95_E2:39_H2:12 | gatcctcatactcttcctttttcaattcagaagaactcgtcaagaaggcgatagaaggcgatgcg |
| | ctgcgaatcgggagcggcgataccgtaaagcacgaggaagcggtcagcccattcgccgcca |
| | agctcttcagcaatatcacgggtagccaacgctatgtcctgatagcggtccgccacacccagcc |
| | ggccacagtcgatgaatccagaaaagcggccattttccaccatgatattcggcaagcaggcat |
| | cgccatgggtcacgacgagatcctcgccgtcgggcatgcgcgccttgagcctggcgaacagt |
| | tcggctggcgcgagcccctgatgctcttcgtccagatcatcctgatcgacaagaccggcttcca |
| | tccgagtacgtgctcgctcgatgcgatgtttcgcttggtggtcgaatgggcaggtagccggatc |
| | aagcgtatgcagccgccgcattgcatcagccatgatggatactttctcggcaggagcaaggtg |
| | ggatgacaggagatcctgccccggcacttcgcccaatagcagccagtcccttcccgcttcagt |
| | gacaacgtcgagcacagctgcgcaaggaacgcccgtcgtggccagccacgatagccgcgct |
| | gcctcgtcctgcagttcattcagggcaccggacaggtcggtcttgacaaaaagaaccgggcgc |
| | ccctgcgctgacagccggaacacggcggcatcagagcagccgattgtctgttgtgcccagtca |
| | tagccgaatagcctctccacccaagcggccggagaacctgcgtgcaatccatcttgttcaatca |
| | tgcgaaacgatcctcatcctgtctcttgatcagatcttgatcccctgcgccatcagatccttggcg |
| | gcaagaaagccatccagtttactttgcagggcttcccaaccttaccagagggcgccccagctg |
| | gcaattccggttcgcttgctgtccataaaaccgcccagtctagctatcgccatgtaagcccactg |
| | caagctacctgctttctctttgcgcttgcgttttcccttgtccagatagcccagtagctgacattcat |
| | ccggggtcagcaccgtttctgcggactggctttctacgtgttccgcttcctttagcagcccttgcg |
| | ccatgcatttgttaaatcgaattatccattgctgttgacaaagggaatcaggggatcttgaagttcc |
| | tattccgaagttcctattctctagaaagtataggaacttcagagcgcttttgaagctaattcgagat |
| | catgcatgagctcactagtggatccccccgacgtaatgcgacattggatactttgggattccttta |
| | tagtcagtgggttatccgaatttttgccttgttcgttgctacattggctaaatcagaacttcggcagc |
| | tcgtcatcccaatacgcgtcaattcactggccgtcgttttactactttccgctgcataaccctgcttc |
| | ggggtcattatagcgattttttcggtatatccatcctttttcgcacgatatacaggattttgccaaag |
| | ggttcgtgtagactttccttggtgtatccaacggcgtcagccgggcaggataggtgaagtaggc |
| | ccacccgcgagcgggtgttccttcttcactgtcccttattcgcacctggcggtgctcaacgggaa |
| | tcctgctctgcgaggctggccgataagctctgataacgcaggaaagaacatgggcagttcaac |
| | ctgttgatagtacgtactaagctctcatgtttcacgtactaagctctcaagtttaacgtactaagctc |
| | tcatgtttaacgaactaaaccctcatggctaacgtactaagctctcatggctaacgtactaagctct |
| | catgtttcacgtactaagctctcatgtttgaacaataaaattaatataaatcagcaacttaaatagcc |
| | tctaaggttttaagttttataagaaaaaaaagaatatataaggcttttaaagcttttaaggtttaacgg |
| | ttgtggacaacaagccagggatgtaacgcactgagaagcccttagagcctctcaaagcaatttt |
| | gagtgacacaggaacacttaacggctgacaaccggctggtaacaggattagcagagcgaggt |
| | atgtaggcggtgctacaagattgtactgagagtgcaccatacaggaaacagc (SEQ ID |
| | NO: 126) |
| pR6K- | gagagtgcaccatacaggaaacagctatgaccatgattacgccaagctcggcgcgccattgg |
| Donor(ZooTsy)_ | gattcggtcgaattcggactgggattctccaatattccttagcgcagagcgcttttgaagctgatg |
| H1:12_ | tgcttaaaaacttactcaatggaataattctagataattcactagtgattggaaatgttggatcctca |
| E1:135_E2:30_H2:12 | tactcttcctttttcaattcagaagaactcgtcaagaaggcgatagaaggcgatgcgctgcgaat |
| | cgggagcggcgataccgtaaagcacgaggaagcggtcagcccattcgccgccaagctcttc |
| | agcaatatcacgggtagccaacgctatgtcctgatagcggtccgccacacccagccggccac |
| | agtcgatgaatccagaaaagcggccattttccaccatgatattcggcaagcaggcatcgccatg |
| | ggtcacgacgagatcctcgccgtcgggcatgcgcgccttgagcctggcgaacagttcggctg |
| | gcgcgagcccctgatgctcttcgtccagatcatcctgatcgacaagaccggcttccatccgagt |
| | acgtgctcgctcgatgcgatgtttcgcttggtggtcgaatgggcaggtagccggatcaagcgta |
| | tgcagccgccgcattgcatcagccatgatggatactttctcggcaggagcaaggtgggatgac |
| | aggagatcctgccccggcacttcgcccaatagcagccagtcccttcccgcttcagtgacaacgt |
| | cgagcacagctgcgcaaggaacgcccgtcgtggccagccacgatagccgcgctgcctcgtc |
| | ctgcagttcattcagggcaccggacaggtcggtcttgacaaaaagaaccgggcgcccctgcg |
| | ctgacagccggaacacggcggcatcagagcagccgattgtctgttgtgcccagtcatagccga |
| | atagcctctccacccaagcggccggagaacctgcgtgcaatccatcttgttcaatcatgcgaaa |
| | cgatcctcatcctgtctcttgatcagatcttgatcccctgcgccatcagatccttggggcaagaa |
| | agccatccagtttactttgcagggcttcccaaccttaccagagggcgccccagctggcaattcc |
| | ggttcgcttgctgtccataaaaccgcccagtctagctatcgccatgtaagcccactgcaagctac |
| | ctgctttctctttgcgcttgcgttttcccttgtccagatagcccagtagctgacattcatccggggtc |
| | agcaccgtttctgcggactggctttctacgtgttccgcttcctttagcagcccttgcgccatgcatt |
| | tgttaaatcgaattatccattgctgttgacaaagggaatcaggggatcttgaagttcctattccgaa |
| | gttcctattctctagaaagtataggaacttcagagcgcttttgaagctaattcgagatcatgcatga |
| | gctcactagtggatccccccgactacttctaatgctgtgacatcactcacaggattcctgcaagta |
| | atgcgacattggatactttgggattcctttatagtcagtgggttatccgaatttttgccttgttcgttg |
| | ctacattggctaaatcagaacttcggcagctcgtcatcccaatacgcgtcaattcactggccgtc |
| | gttttactactttccgctgcataaccctgcttcggggtcattatagcgattttttcggtatatccatcc |
| | tttttcgcacgatatacaggattttgccaaagggttcgtgtagactttccttggtgtatccaacggcg |
| | tcagccgggcaggataggtgaagtaggcccacccgcgagcgggtgttccttcttcactgtccc |
| | ttattcgcacctggcggtgctcaacgggaatcctgctctgcgaggctggccgataagctctgat |
| | aacgcaggaaagaacatgggcagttcaacctgttgatagtacgtactaagctctcatgtttcacg |
| | tactaagctctcaagtttaacgtactaagctctcatgtttaacgaactaaaccctcatggctaacgt |
| | actaagctctcatggctaacgtactaagctctcatgtttcacgtactaagctctcatgtttgaacaat |
| | aaaattaatataaatcagcaacttaaatagcctctaaggttttaagttttataagaaaaaaaagaat |
| | atataaggcttttaaagcttttaaggtttaacggttgtggacaacaagccagggatgtaacgcact |
| | gagaagcccttagagcctctcaaagcaattttgagtgacacaggaacacttaacggctgacaac |
| | cggctggtaacaggattagcagagcgaggtatgtaggcggtgctacaagattgtactgagagt |
| | gcaccatacaggaaacagc (SEQ ID NO: 127) |
| pR6K- | gagagtgcaccatacaggaaacagctatgaccatgattacgccaagctcggcgcgccattgg |
| Donor(ZooTsy)_ | gattcggtcgaattcggactgggattctccaatattccttagagcgcttttgaagctgatgtgctta |
| H1:12_ | aaaacttactcaatggaataattctagataattcactagtgattggaaatgttggatcctcatactctt |
| E1:135_E2:25_H2:12 | cctttttcaattcagaagaactcgtcaagaaggcgatagaaggcgatgcgctgcgaatcggga |
| | gcggcgataccgtaaagcacgaggaagcggtcagcccattcgccgccaagctcttcagcaat |
| | atcacgggtagccaacgctatgtcctgatagcggtccgccacacccagccggccacagtcgat |
| | gaatccagaaaagcggccattttccaccatgatattcggcaagcaggcatcgccatgggtcac |
| | gacgagatcctcgccgtcgggcatgcgcgccttgagcctggcgaacagttcggctggcgcga |
| | gcccctgatgctcttcgtccagatcatcctgatcgacaagaccggcttccatccgagtacgtgct |
| | cgctcgatgcgatgtttcgcttggtggtcgaatgggcaggtagccggatcaagcgtatgcagc |
| | cgccgcattgcatcagccatgatggatactttctcggcaggagcaaggtgggatgacaggaga |
| | tcctgccccggcacttcgcccaatagcagccagtcccttcccgcttcagtgacaacgtcgagca |
| | cagctgcgcaaggaacgcccgtcgtggccagccacgatagccgcgctgcctcgtcctgcagt |
| | tcattcagggcaccggacaggtcggtcttgacaaaaagaaccgggcgcccctgcgctgacag |
| | ccggaacacggcggcatcagagcagccgattgtctgttgtgcccagtcatagccgaatagcct |
| | ctccacccaagcggccggagaacctgcgtgcaatccatcttgttcaatcatgcgaaacgatcct |
| | catcctgtctcttgatcagatcttgatcccctgcgccatcagatccttggcggcaagaaagccatc |
| | cagtttactttgcagggcttcccaaccttaccagagggcgccccagctggcaattccggttcgct |
| | tgctgtccataaaaccgcccagtctagctatcgccatgtaagcccactgcaagctacctgctttct |
| | ctttgcgcttgcgttttcccttgtccagatagcccagtagctgacattcatccggggtcagcaccg |
| | tttctgcggactggctttctacgtgttccgcttcctttagcagcccttgcgccatgcatttgttaaatc |
| | gaattatccattgctgttgacaaagggaatcaggggatcttgaagttcctattccgaagttcctatt |
| | ctctagaaagtataggaacttcagagcgcttttgaagctaattcgagatcatgcatgagctcacta |
| | gtggatccccccgactacttctaatgctgtgacatcactcacaggattcctgcaagtaatgcgac |
| | attggatactttgggattcctttatagtcagtgggttatccgaatttttgccttgttcgttgctacatt |
| | ggctaaatcagaacttcggcagctcgtcatcccaatacgcgtcaattcactggccgtcgttttacta |
| | ctttccgctgcataaccctgcttcggggtcattatagcgattttttcggtatatccatcctttttcgca |
| | cgatatacaggattttgccaaagggttcgtgtagactttccttggtgtatccaacggcgtcagccg |
| | ggcaggataggtgaagtaggcccacccgcgagcgggtgttccttcttcactgtcccttattcgc |
| | acctggcggtgctcaacgggaatcctgctctgcgaggctggccgataagctctgataacgcag |
| | gaaagaacatgggcagttcaacctgttgatagtacgtactaagctctcatgtttcacgtactaagc |
| | tctcaagtttaacgtactaagctctcatgtttaacgaactaaaccctcatggctaacgtactaagct |
| | ctcatggctaacgtactaagctctcatgtttcacgtactaagctctcatgtttgaacaataaaattaa |
| | tataaatcagcaacttaaatagcctctaaggttttaagttttataagaaaaaaaagaatatataagg |
| | cttttaaagcttttaaggtttaacggttgtggacaacaagccagggatgtaacgcactgagaagc |
| | ccttagagcctctcaaagcaattttgagtgacacaggaacacttaacggctgacaaccggctgg |
| | taacaggattagcagagcgaggtatgtaggcggtgctacaagattgtactgagagtgcaccat |
| | acaggaaacagc (SEQ ID NO: 128) |
| pR6K- | gagagtgcaccatacaggaaacagctatgaccatgattacgccaagctcggcgcgccattgg |
| Donor(ZooTsy)_ | gattcggtcgaattcggactgggattctccaatatagagcgcttttgaagctgatgtgcttaaaaa |
| H1:12_ | cttactcaatggaataattctagataattcactagtgattggaaatgttggatcctcatactcttcctt |
| E1:135_E2:20_H2:12t | ttcaattcagaagaactcgtcaagaaggcgatagaaggcgatgcgctgcgaatcgggagcgg |
| | cgataccgtaaagcacgaggaagcggtcagcccattcgccgccaagctcttcagcaatatcac |
| | gggtagccaacgctatgtcctgatagcggtccgccacacccagccggccacagtcgatgaat |
| | ccagaaaagcggccattttccaccatgatattcggcaagcaggcatcgccatgggtcacgacg |
| | agatcctcgccgtcgggcatgcgcgccttgagcctggcgaacagttcggctggcgcgagccc |
| | ctgatgctcttcgtccagatcatcctgatcgacaagaccggcttccatccgagtacgtgctcgct |
| | cgatgcgatgtttcgcttggtggtcgaatgggcaggtagccggatcaagcgtatgcagccgcc |
| | gcattgcatcagccatgatggatactttctcggcaggagcaaggtgggatgacaggagatcct |
| | gccccggcacttcgcccaatagcagccagtcccttcccgcttcagtgacaacgtcgagcacag |
| | ctgcgcaaggaacgcccgtcgtggccagccacgatagccgcgctgcctcgtcctgcagttcat |
| | tcagggcaccggacaggtcggtcttgacaaaaagaaccgggcgcccctgcgctgacagccg |
| | gaacacggcggcatcagagcagccgattgtctgttgtgcccagtcatagccgaatagcctctcc |
| | acccaagcggccggagaacctgcgtgcaatccatcttgttcaatcatgcgaaacgatcctcatc |
| | ctgtctcttgatcagatcttgatcccctgcgccatcagatccttggcggcaagaaagccatccag |
| | tttactttgcagggcttcccaaccttaccagagggcgccccagctggcaattccggttcgcttgct |
| | gtccataaaaccgcccagtctagctatcgccatgtaagcccactgcaagctacctgctttctcttt |
| | gcgcttgcgttttcccttgtccagatagcccagtagctgacattcatccggggtcagcaccgtttc |
| | tgcggactggctttctacgtgttccgcttcctttagcagcccttgcgccatgcatttgttaaatcga |
| | attatccattgctgttgacaaagggaatcaggggatcttgaagttcctattccgaagttcctattctc |
| | tagaaagtataggaacttcagagcgcttttgaagctaattcgagatcatgcatgagctcactagtg |
| | gatccccccgactacttctaatgctgtgacatcactcacaggattcctgcaagtaatgcgacattg |
| | gatactttgggattcctttatagtcagtgggttatccgaatttttgccttgttcgttgctacattggct |
| | aaatcagaacttcggcagctcgtcatcccaatacgcgtcaattcactggccgtcgttttactactttc |
| | cgctgcataaccctgcttcggggtcattatagcgattttttcggtatatccatcctttttcgcacgat |
| | atacaggattttgccaaagggttcgtgtagactttccttggtgtatccaacggcgtcagccgggc |
| | aggataggtgaagtaggcccacccgcgagcgggtgttccttcttcactgtcccttattcgcacct |
| | ggcggtgctcaacgggaatcctgctctgcgaggctggccgataagctctgataacgcaggaa |
| | agaacatgggcagttcaacctgttgatagtacgtactaagctctcatgtttcacgtactaagctctc |
| | aagtttaacgtactaagctctcatgtttaacgaactaaaccctcatggctaacgtactaagctctca |
| | tggctaacgtactaagctctcatgtttcacgtactaagctctcatgtttgaacaataaaattaatata |
| | aatcagcaacttaaatagcctctaaggttttaagttttataagaaaaaaaagaatatataaggctttt |
| | aaagcttttaaggtttaacggttgtggacaacaagccagggatgtaacgcactgagaagccctt |
| | agagcctctcaaagcaattttgagtgacacaggaacacttaacggctgacaaccggctggtaa |
| | caggattagcagagcgaggtatgtaggcggtgctacaagattgtactgagagtgcaccataca |
| | ggaaacagc (SEQ ID NO: 129) |
| pR6K- | gagagtgcaccatacaggaaacagctatgaccatgattacgccaagctcggcgcgccattgg |
| Donor(ZooTsy)_ | gattcggtcgaattcggactgggattctccagagcgcttttgaagctgatgtgcttaaaaacttac |
| H1:12_ | tcaatggaataattctagataattcactagtgattggaaatgttggatcctcatactcttcctttttca |
| E1:135_E2:15_H2:12 | attcagaagaactcgtcaagaaggcgatagaaggcgatgcgctgcgaatcgggagcggcgat |
| | accgtaaagcacgaggaagcggtcagcccattcgccgccaagctcttcagcaatatcacgggt |
| | agccaacgctatgtcctgatagcggtccgccacacccagccggccacagtcgatgaatccag |
| | aaaagcggccattttccaccatgatattcggcaagcaggcatcgccatgggtcacgacgagat |
| | cctcgccgtcgggcatgcgcgccttgagcctggcgaacagttcggctggcgcgagcccctga |
| | tgctcttcgtccagatcatcctgatcgacaagaccggcttccatccgagtacgtgctcgctcgat |
| | gcgatgtttcgcttggtggtcgaatgggcaggtagccggatcaagcgtatgcagccgccgcat |
| | tgcatcagccatgatggatactttctcggcaggagcaaggtgggatgacaggagatcctgccc |
| | cggcacttcgcccaatagcagccagtcccttcccgcttcagtgacaacgtcgagcacagctgc |
| | gcaaggaacgcccgtcgtggccagccacgatagccgcgctgcctcgtcctgcagttcattcag |
| | ggcaccggacaggtcggtcttgacaaaaagaaccgggcgcccctgcgctgacagccggaac |
| | acggcggcatcagagcagccgattgtctgttgtgcccagtcatagccgaatagcctctccaccc |
| | aagcggccggagaacctgcgtgcaatccatcttgttcaatcatgcgaaacgatcctcatcctgtc |
| | tcttgatcagatcttgatcccctgcgccatcagatccttggcggcaagaaagccatccagtttact |
| | ttgcagggcttcccaaccttaccagagggcgccccagctggcaattccggttcgcttgctgtcc |
| | ataaaaccgcccagtctagctatcgccatgtaagcccactgcaagctacctgctttctctttgcgc |
| | ttgcgttttcccttgtccagatagcccagtagctgacattcatccggggtcagcaccgtttctgcg |
| | gactggctttctacgtgttccgcttcctttagcagcccttgcgccatgcatttgttaaatcgaattat |
| | ccattgctgttgacaaagggaatcaggggatcttgaagttcctattccgaagttcctattctctaga |
| | aagtataggaacttcagagcgcttttgaagctaattcgagatcatgcatgagctcactagtggatc |
| | cccccgactacttctaatgctgtgacatcactcacaggattcctgcaagtaatgcgacattggata |
| | ctttgggattcctttatagtcagtgggttatccgaatttttgccttgttcgttgctacattggctaaat |
| | cagaacttcggcagctcgtcatcccaatacgcgtcaattcactggccgtcgttttactactttccgct |
| | gcataaccctgcttcggggtcattatagcgattttttcggtatatccatcctttttcgcacgatataca |
| | ggattttgccaaagggttcgtgtagactttccttggtgtatccaacggcgtcagccgggcaggat |
| | aggtgaagtaggcccacccgcgagcgggtgttccttcttcactgtcccttattcgcacctggcg |
| | gtgctcaacgggaatcctgctctgcgaggctggccgataagctctgataacgcaggaaagaac |
| | atgggcagttcaacctgttgatagtacgtactaagctctcatgtttcacgtactaagctctcaagttt |
| | aacgtactaagctctcatgtttaacgaactaaaccctcatggctaacgtactaagctctcatggct |
| | aacgtactaagctctcatgtttcacgtactaagctctcatgtttgaacaataaaattaatataaatca |
| | gcaacttaaatagcctctaaggttttaagttttataagaaaaaaaagaatatataaggcttttaaag |
| | cttttaaggtttaacggttgtggacaacaagccagggatgtaacgcactgagaagcccttagag |
| | cctctcaaagcaattttgagtgacacaggaacacttaacggctgacaaccggctggtaacagg |
| | attagcagagcgaggtatgtaggcggtgctacaagattgtactgagagtgcaccatacaggaa |
| | acagc (SEQ ID NO: 130) |
| pR6K- | gagagtgcaccatacaggaaacagctatgaccatgattacgccaagctcggcgcgccattgg |
| Donor(ZooTsy)_ | gattcggtcgaattcggactgggatagagcgcttttgaagctgatgtgcttaaaaacttactcaat |
| H1:12_ | ggaataattctagataattcactagtgattggaaatgttggatcctcatactcttcctttttcaattca |
| E1:135_E2:10_H2:12 | gaagaactcgtcaagaaggcgatagaaggcgatgcgctgcgaatcgggagcggcgataccg |
| | taaagcacgaggaagcggtcagcccattcgccgccaagctcttcagcaatatcacgggtagcc |
| | aacgctatgtcctgatagcggtccgccacacccagccggccacagtcgatgaatccagaaaa |
| | gcggccattttccaccatgatattcggcaagcaggcatcgccatgggtcacgacgagatcctcg |
| | ccgtcgggcatgcgcgccttgagcctggcgaacagttcggctggcgcgagcccctgatgctc |
| | ttcgtccagatcatcctgatcgacaagaccggcttccatccgagtacgtgctcgctcgatgcgat |
| | gtttcgcttggtggtcgaatgggcaggtagccggatcaagcgtatgcagccgccgcattgcatc |
| | agccatgatggatactttctcggcaggagcaaggtgggatgacaggagatcctgccccggca |
| | cttcgcccaatagcagccagtcccttcccgcttcagtgacaacgtcgagcacagctgcgcaag |
| | gaacgcccgtcgtggccagccacgatagccgcgctgcctcgtcctgcagttcattcagggcac |
| | cggacaggtcggtcttgacaaaaagaaccgggcgcccctgcgctgacagccggaacacggc |
| | ggcatcagagcagccgattgtctgttgtgcccagtcatagccgaatagcctctccacccaagcg |
| | gccggagaacctgcgtgcaatccatcttgttcaatcatgcgaaacgatcctcatcctgtctcttga |
| | tcagatcttgatcccctgcgccatcagatccttggcggcaagaaagccatccagtttactttgca |
| | gggcttcccaaccttaccagagggcgccccagctggcaattccggttcgcttgctgtccataaa |
| | accgcccagtctagctatcgccatgtaagcccactgcaagctacctgctttctctttgcgcttgcg |
| | ttttcccttgtccagatagcccagtagctgacattcatccggggtcagcaccgtttctgcggactg |
| | gctttctacgtgttccgcttcctttagcagcccttgcgccatgcatttgttaaatcgaattatccattg |
| | ctgttgacaaagggaatcaggggatcttgaagttcctattccgaagttcctattctctagaaagtat |
| | aggaacttcagagcgcttttgaagctaattcgagatcatgcatgagctcactagtggatcccccc |
| | gactacttctaatgctgtgacatcactcacaggattcctgcaagtaatgcgacattggatactttgg |
| | gattcctttatagtcagtgggttatccgaatttttgccttgttcgttgctacattggctaaatcagaac |
| | ttcggcagctcgtcatcccaatacgcgtcaattcactggccgtcgttttactactttccgctgcata |
| | accctgcttcggggtcattatagcgattttttcggtatatccatcctttttcgcacgatatacaggatt |
| | ttgccaaagggttcgtgtagactttccttggtgtatccaacggcgtcagccgggcaggataggt |
| | gaagtaggcccacccgcgagcgggtgttccttcttcactgtcccttattcgcacctggcggtgct |
| | caacgggaatcctgctctgcgaggctggccgataagctctgataacgcaggaaagaacatgg |
| | gcagttcaacctgttgatagtacgtactaagctctcatgtttcacgtactaagctctcaagtttaacg |
| | tactaagctctcatgtttaacgaactaaaccctcatggctaacgtactaagctctcatggctaacgt |
| | actaagctctcatgtttcacgtactaagctctcatgtttgaacaataaaattaatataaatcagcaac |
| | ttaaatagcctctaaggttttaagttttataagaaaaaaaagaatatataaggcttttaaagcttttaa |
| | ggtttaacggttgtggacaacaagccagggatgtaacgcactgagaagcccttagagcctctc |
| | aaagcaattttgagtgacacaggaacacttaacggctgacaaccggctggtaacaggattagc |
| | agagcgaggtatgtaggcggtgctacaagattgtactgagagtgcaccatacaggaaacagc |
| | (SEQ ID NO: 131) |
| pR6K- | gagagtgcaccatacaggaaacagctatgaccatgattacgccaagctcggcgcgccattgg |
| Donor(ZooTsy)_ | gattcggtcgaattcagagcgcttttgaagctgatgtgcttaaaaacttactcaatggaataattct |
| H1:12_ | agataattcactagtgattggaaatgttggatcctcatactcttcctttttcaattcagaagaactcgt |
| E1:135_E2:0_H2:12 | caagaaggcgatagaaggcgatgcgctgcgaatcgggagcggcgataccgtaaagcacga |
| | ggaagcggtcagcccattcgccgccaagctcttcagcaatatcacgggtagccaacgctatgt |
| | cctgatagcggtccgccacacccagccggccacagtcgatgaatccagaaaagcggccatttt |
| | ccaccatgatattcggcaagcaggcatcgccatgggtcacgacgagatcctcgccgtcgggc |
| | atgcgcgccttgagcctggcgaacagttcggctggcgcgagcccctgatgctcttcgtccaga |
| | tcatcctgatcgacaagaccggcttccatccgagtacgtgctcgctcgatgcgatgtttcgcttg |
| | gtggtcgaatgggcaggtagccggatcaagcgtatgcagccgccgcattgcatcagccatgat |
| | ggatactttctcggcaggagcaaggtgggatgacaggagatcctgccccggcacttcgccca |
| | atagcagccagtcccttcccgcttcagtgacaacgtcgagcacagctgcgcaaggaacgccc |
| | gtcgtggccagccacgatagccgcgctgcctcgtcctgcagttcattcagggcaccggacag |
| | gtcggtcttgacaaaaagaaccgggcgcccctgcgctgacagccggaacacggcggcatca |
| | gagcagccgattgtctgttgtgcccagtcatagccgaatagcctctccacccaagcggccgga |
| | gaacctgcgtgcaatccatcttgttcaatcatgcgaaacgatcctcatcctgtctcttgatcagatc |
| | ttgatcccctgcgccatcagatccttggcggcaagaaagccatccagtttactttgcagggcttc |
| | ccaaccttaccagagggcgccccagctggcaattccggttcgcttgctgtccataaaaccgccc |
| | agtctagctatcgccatgtaagcccactgcaagctacctgctttctctttgcgcttgcgttttccctt |
| | gtccagatagcccagtagctgacattcatccggggtcagcaccgtttctgcggactggctttcta |
| | cgtgttccgcttcctttagcagcccttgcgccatgcatttgttaaatcgaattatccattgctgttga |
| | caaagggaatcaggggatcttgaagttcctattccgaagttcctattctctagaaagtataggaac |
| | ttcagagcgcttttgaagctaattcgagatcatgcatgagctcactagtggatccccccgactact |
| | tctaatgctgtgacatcactcacaggattcctgcaagtaatgcgacattggatactttgggattcct |
| | ttatagtcagtgggttatccgaatttttgccttgttcgttgctacattggctaaatcagaacttcggca |
| | gctcgtcatcccaatacgcgtcaattcactggccgtcgttttactactttccgctgcataaccctgc |
| | ttcggggtcattatagcgattttttcggtatatccatcctttttcgcacgatatacaggattttgccaa |
| | agggttcgtgtagactttccttggtgtatccaacggcgtcagccgggcaggataggtgaagtag |
| | gcccacccgcgagcgggtgttccttcttcactgtcccttattcgcacctggcggtgctcaacgg |
| | gaatcctgctctgcgaggctggccgataagctctgataacgcaggaaagaacatgggcagttc |
| | aacctgttgatagtacgtactaagctctcatgtttcacgtactaagctctcaagtttaacgtactaag |
| | ctctcatgtttaacgaactaaaccctcatggctaacgtactaagctctcatggctaacgtactaag |
| | ctctcatgtttcacgtactaagctctcatgtttgaacaataaaattaatataaatcagcaacttaaata |
| | gcctctaaggttttaagttttataagaaaaaaaagaatatataaggcttttaaagcttttaaggtttaa |
| | cggttgtggacaacaagccagggatgtaacgcactgagaagcccttagagcctctcaaagca |
| | attttgagtgacacaggaacacttaacggctgacaaccggctggtaacaggattagcagagcg |
| | aggtatgtaggcggtgctacaagattgtactgagagtgcaccatacaggaaacagc (SEQ |
| | ID NO: 132) |
| pR6K- | gagagtgcaccatacaggaaacagctatgaccatgattacgccaagctcggcgcgccattgg |
| Donor(ZooTsy)_ | gattcggtcgaattcggactgggattctccaatatagagcgcttttgaagctgatgtgcttaaaaa |
| H1:12_ | cttactcaatggaataattctagataattcactagtgattggaaatgttggatcctcatactcttcctt |
| E1:0_E2:20_H2:12 | tttcaattcagaagaactcgtcaagaaggcgatagaaggcgatgcgctgcgaatcgggagcgg |
| | cgataccgtaaagcacgaggaagcggtcagcccattcgccgccaagctcttcagcaatatcac |
| | gggtagccaacgctatgtcctgatagcggtccgccacacccagccggccacagtcgatgaat |
| | ccagaaaagcggccattttccaccatgatattcggcaagcaggcatcgccatgggtcacgacg |
| | agatcctcgccgtcgggcatgcgcgccttgagcctggcgaacagttcggctggcgcgagccc |
| | ctgatgctcttcgtccagatcatcctgatcgacaagaccggcttccatccgagtacgtgctcgct |
| | cgatgcgatgtttcgcttggtggtcgaatgggcaggtagccggatcaagcgtatgcagccgcc |
| | gcattgcatcagccatgatggatactttctcggcaggagcaaggtgggatgacaggagatcct |
| | gccccggcacttcgcccaatagcagccagtcccttcccgcttcagtgacaacgtcgagcacag |
| | ctgcgcaaggaacgcccgtcgtggccagccacgatagccgcgctgcctcgtcctgcagttcat |
| | tcagggcaccggacaggtcggtcttgacaaaaagaaccgggcgcccctgcgctgacagccg |
| | gaacacggcggcatcagagcagccgattgtctgttgtgcccagtcatagccgaatagcctctcc |
| | acccaagcggccggagaacctgcgtgcaatccatcttgttcaatcatgcgaaacgatcctcatc |
| | ctgtctcttgatcagatcttgatcccctgcgccatcagatccttggcggcaagaaagccatccag |
| | tttactttgcagggcttcccaaccttaccagagggcgccccagctggcaattccggttcgcttgct |
| | gtccataaaaccgcccagtctagctatcgccatgtaagcccactgcaagctacctgctttctcttt |
| | gcgcttgcgttttcccttgtccagatagcccagtagctgacattcatccggggtcagcaccgtttc |
| | tgcggactggctttctacgtgttccgcttcctttagcagcccttgcgccatgcatttgttaaatcga |
| | attatccattgctgttgacaaagggaatcaggggatcttgaagttcctattccgaagttcctattctc |
| | tagaaagtataggaacttcagagcgcttttgaagctaattcgagatcatgcatgagctcactagtg |
| | gatccccccgaccggcagctcgtcatcccaatacgcgtcaattcactggccgtcgttttactactt |
| | tccgctgcataaccctgcttcggggtcattatagcgattttttcggtatatccatcctttttcgcacg |
| | atatacaggattttgccaaagggttcgtgtagactttccttggtgtatccaacggcgtcagccgg |
| | gcaggataggtgaagtaggcccacccgcgagcgggtgttccttcttcactgtcccttattcgca |
| | cctggcggtgctcaacgggaatcctgctctgcgaggctggccgataagctctgataacgcagg |
| | aaagaacatgggcagttcaacctgttgatagtacgtactaagctctcatgtttcacgtactaagct |
| | ctcaagtttaacgtactaagctctcatgtttaacgaactaaaccctcatggctaacgtactaagctc |
| | tcatggctaacgtactaagctctcatgtttcacgtactaagctctcatgtttgaacaataaaattaat |
| | ataaatcagcaacttaaatagcctctaaggttttaagttttataagaaaaaaaagaatatataaggc |
| | ttttaaagcttttaaggtttaacggttgtggacaacaagccagggatgtaacgcactgagaagcc |
| | cttagagcctctcaaagcaattttgagtgacacaggaacacttaacggctgacaaccggctggt |
| | aacaggattagcagagcgaggtatgtaggcggtgctacaagattgtactgagagtgcaccata |
| | caggaaacagc (SEQ ID NO: 133) |
| pR6K- | gagagtgcaccatacaggaaacagctatgaccatgattacgccaagctcggcgcgccattgg |
| Donor(ZooTsy)_H1:0_ | gattcggtcgaattcggactgggattctccaatatagagcgcttttgaagctgatgtgcttaaaaa |
| E1:135_E2:20_H2:12 | cttactcaatggaataattctagataattcactagtgattggaaatgttggatcctcatactcttcctt |
| | tttcaattcagaagaactcgtcaagaaggcgatagaaggcgatgcgctgcgaatcgggagcgg |
| | cgataccgtaaagcacgaggaagcggtcagcccattcgccgccaagctcttcagcaatatcac |
| | gggtagccaacgctatgtcctgatagcggtccgccacacccagccggccacagtcgatgaat |
| | ccagaaaagcggccattttccaccatgatattcggcaagcaggcatcgccatgggtcacgacg |
| | agatcctcgccgtcgggcatgcgcgccttgagcctggcgaacagttcggctggcgcgagccc |
| | ctgatgctcttcgtccagatcatcctgatcgacaagaccggcttccatccgagtacgtgctcgct |
| | cgatgcgatgtttcgcttggtggtcgaatgggcaggtagccggatcaagcgtatgcagccgcc |
| | gcattgcatcagccatgatggatactttctcggcaggagcaaggtgggatgacaggagatcct |
| | gccccggcacttcgcccaatagcagccagtcccttcccgcttcagtgacaacgtcgagcacag |
| | ctgcgcaaggaacgcccgtcgtggccagccacgatagccgcgctgcctcgtcctgcagttcat |
| | tcagggcaccggacaggtcggtcttgacaaaaagaaccgggcgcccctgcgctgacagccg |
| | gaacacggcggcatcagagcagccgattgtctgttgtgcccagtcatagccgaatagcctctcc |
| | acccaagcggccggagaacctgcgtgcaatccatcttgttcaatcatgcgaaacgatcctcatc |
| | ctgtctcttgatcagatcttgatcccctgcgccatcagatccttggcggcaagaaagccatccag |
| | tttactttgcagggcttcccaaccttaccagagggcgccccagctggcaattccggttcgcttgct |
| | gtccataaaaccgcccagtctagctatcgccatgtaagcccactgcaagctacctgctttctcttt |
| | gcgcttgcgttttcccttgtccagatagcccagtagctgacattcatccggggtcagcaccgtttc |
| | tgcggactggctttctacgtgttccgcttcctttagcagcccttgcgccatgcatttgttaaatcga |
| | attatccattgctgttgacaaagggaatcaggggatcttgaagttcctattccgaagttcctattctc |
| | tagaaagtataggaacttcagagcgcttttgaagctaattcgagatcatgcatgagctcactagtg |
| | gatccccccgactacttctaatgctgtgacatcactcacaggattcctgcaagtaatgcgacattg |
| | gatactttgggattcctttatagtcagtgggttatccgaatttttgccttgttcgttgctacattggct |
| | aaatcagaacttatcccaatacgcgtcaattcactggccgtcgttttactactttccgctgcataacc |
| | ctgcttcggggtcattatagcgattttttcggtatatccatcctttttcgcacgatatacaggattttg |
| | ccaaagggttcgtgtagactttccttggtgtatccaacggcgtcagccgggcaggataggtgaa |
| | gtaggcccacccgcgagcgggtgttccttcttcactgtcccttattcgcacctggcggtgctcaa |
| | cgggaatcctgctctgcgaggctggccgataagctctgataacgcaggaaagaacatgggca |
| | gttcaacctgttgatagtacgtactaagctctcatgtttcacgtactaagctctcaagtttaacgtac |
| | taagctctcatgtttaacgaactaaaccctcatggctaacgtactaagctctcatggctaacgtact |
| | aagctctcatgtttcacgtactaagctctcatgtttgaacaataaaattaatataaatcagcaactta |
| | aatagcctctaaggttttaagttttataagaaaaaaaagaatatataaggcttttaaagcttttaagg |
| | tttaacggttgtggacaacaagccagggatgtaacgcactgagaagcccttagagcctctcaaa |
| | gcaattttgagtgacacaggaacacttaacggctgacaaccggctggtaacaggattagcaga |
| | gcgaggtatgtaggcggtgctacaagattgtactgagagtgcaccatacaggaaacagc |
| | (SEQ ID NO: 134) |
| pR6K- | gagagtgcaccatacaggaaacagctatgaccatgattacgccaagctcggcgcgccattgg |
| Donor(ZooTsy)_H1:0_ | gattcggtcgaattcggactgggattctccaatatagagcgcttttgaagctgatgtgcttaaaaa |
| E1:0_E2:20_H2:12 | cttactcaatggaataattctagataattcactagtgattggaaatgttggatcctcatactcttcctt |
| | tttcaattcagaagaactcgtcaagaaggcgatagaaggcgatgcgctgcgaatcgggagcgg |
| | cgataccgtaaagcacgaggaagcggtcagcccattcgccgccaagctcttcagcaatatcac |
| | gggtagccaacgctatgtcctgatagcggtccgccacacccagccggccacagtcgatgaat |
| | ccagaaaagcggccattttccaccatgatattcggcaagcaggcatcgccatgggtcacgacg |
| | agatcctcgccgtcgggcatgcgcgccttgagcctggcgaacagttcggctggcgcgagccc |
| | ctgatgctcttcgtccagatcatcctgatcgacaagaccggcttccatccgagtacgtgctcgct |
| | cgatgcgatgtttcgcttggtggtcgaatgggcaggtagccggatcaagcgtatgcagccgcc |
| | gcattgcatcagccatgatggatactttctcggcaggagcaaggtgggatgacaggagatcct |
| | gccccggcacttcgcccaatagcagccagtcccttcccgcttcagtgacaacgtcgagcacag |
| | ctgcgcaaggaacgcccgtcgtggccagccacgatagccgcgctgcctcgtcctgcagttcat |
| | tcagggcaccggacaggtcggtcttgacaaaaagaaccgggcgcccctgcgctgacagccg |
| | gaacacggcggcatcagagcagccgattgtctgttgtgcccagtcatagccgaatagcctctcc |
| | acccaagcggccggagaacctgcgtgcaatccatcttgttcaatcatgcgaaacgatcctcatc |
| | ctgtctcttgatcagatcttgatcccctgcgccatcagatccttggcggcaagaaagccatccag |
| | tttactttgcagggcttcccaaccttaccagagggcgccccagctggcaattccggttcgcttgct |
| | gtccataaaaccgcccagtctagctatcgccatgtaagcccactgcaagctacctgctttctcttt |
| | gcgcttgcgttttcccttgtccagatagcccagtagctgacattcatccggggtcagcaccgtttc |
| | tgcggactggctttctacgtgttccgcttcctttagcagcccttgcgccatgcatttgttaaatcga |
| | attatccattgctgttgacaaagggaatcaggggatcttgaagttcctattccgaagttcctattctc |
| | tagaaagtataggaacttcagagcgcttttgaagctaattcgagatcatgcatgagctcactagtg |
| | gatccccccgacatcccaatacgcgtcaattcactggccgtcgttttactactttccgctgcataa |
| | ccctgcttcggggtcattatagcgattttttcggtatatccatcctttttcgcacgatatacaggattt |
| | tgccaaagggttcgtgtagactttccttggtgtatccaacggcgtcagccgggcaggataggtga |
| | agtaggcccacccgcgagcgggtgttccttcttcactgtcccttattcgcacctggcggtgctca |
| | acgggaatcctgctctgcgaggctggccgataagctctgataacgcaggaaagaacatgggc |
| | agttcaacctgttgatagtacgtactaagctctcatgtttcacgtactaagctctcaagtttaacgta |
| | ctaagctctcatgtttaacgaactaaaccctcatggctaacgtactaagctctcatggctaacgta |
| | ctaagctctcatgtttcacgtactaagctctcatgtttgaacaataaaattaatataaatcagcaactt |
| | aaatagcctctaaggttttaagttttataagaaaaaaaagaatatataaggcttttaaagcttttaag |
| | gtttaacggttgtggacaacaagccagggatgtaacgcactgagaagcccttagagcctctcaa |
| | agcaattttgagtgacacaggaacacttaacggctgacaaccggctggtaacaggattagcag |
| | agcgaggtatgtaggcggtgctacaagattgtactgagagtgcaccatacaggaaacagc |
| | (SEQ ID NO: 135) |
| pR6K- | gagagtgcaccatacaggaaacagctatgaccatgattacgccaagctcggcgcgccattgg |
| Donor(ZooTsy)_ | gattcggtcgaattcagagcgcttttgaagctgatgtgcttaaaaacttactcaatggaataattct |
| H1:12_ | agataattcactagtgattggaaatgttggatcctcatactcttcctttttcaattcagaagaactcgt |
| E1:0_E2:0_H2:12 | caagaaggcgatagaaggcgatgcgctgcgaatcgggagcggcgataccgtaaagcacga |
| | ggaagcggtcagcccattcgccgccaagctcttcagcaatatcacgggtagccaacgctatgt |
| | cctgatagcggtccgccacacccagccggccacagtcgatgaatccagaaaagcggccatttt |
| | ccaccatgatattcggcaagcaggcatcgccatgggtcacgacgagatcctcgccgtcgggc |
| | atgcgcgccttgagcctggcgaacagttcggctggcgcgagcccctgatgctcttcgtccaga |
| | tcatcctgatcgacaagaccggcttccatccgagtacgtgctcgctcgatgcgatgtttcgcttg |
| | gtggtcgaatgggcaggtagccggatcaagcgtatgcagccgccgcattgcatcagccatgat |
| | ggatactttctcggcaggagcaaggtgggatgacaggagatcctgccccggcacttcgccca |
| | atagcagccagtcccttcccgcttcagtgacaacgtcgagcacagctgcgcaaggaacgccc |
| | gtcgtggccagccacgatagccgcgctgcctcgtcctgcagttcattcagggcaccggacag |
| | gtcggtcttgacaaaaagaaccgggcgcccctgcgctgacagccggaacacggcggcatca |
| | gagcagccgattgtctgttgtgcccagtcatagccgaatagcctctccacccaagcggccgga |
| | gaacctgcgtgcaatccatcttgttcaatcatgcgaaacgatcctcatcctgtctcttgatcagatc |
| | ttgatcccctgcgccatcagatccttggcggcaagaaagccatccagtttactttgcagggcttc |
| | ccaaccttaccagagggcgccccagctggcaattccggttcgcttgctgtccataaaaccgccc |
| | agtctagctatcgccatgtaagcccactgcaagctacctgctttctctttgcgcttgcgttttccctt |
| | gtccagatagcccagtagctgacattcatccggggtcagcaccgtttctgcggactggctttcta |
| | cgtgttccgcttcctttagcagcccttgcgccatgcatttgttaaatcgaattatccattgctgttga |
| | caaagggaatcaggggatcttgaagttcctattccgaagttcctattctctagaaagtataggaac |
| | ttcagagcgcttttgaagctaattcgagatcatgcatgagctcactagtggatccccccgaccgg |
| | cagctcgtcatcccaatacgcgtcaattcactggccgtcgttttactactttccgctgcataaccct |
| | gcttcggggtcattatagcgattttttcggtatatccatcctttttcgcacgatatacaggattttgcc |
| | aaagggttcgtgtagactttccttggtgtatccaacggcgtcagccgggcaggataggtgaagt |
| | aggcccacccgcgagcgggtgttccttcttcactgtcccttattcgcacctggcggtgctcaacg |
| | ggaatcctgctctgcgaggctggccgataagctctgataacgcaggaaagaacatgggcagtt |
| | caacctgttgatagtacgtactaagctctcatgtttcacgtactaagctctcaagtttaacgtactaa |
| | gctctcatgtttaacgaactaaaccctcatggctaacgtactaagctctcatggctaacgtactaa |
| | gctctcatgtttcacgtactaagctctcatgtttgaacaataaaattaatataaatcagcaacttaaat |
| | agcctctaaggttttaagttttataagaaaaaaaagaatatataaggcttttaaagcttttaaggttta |
| | acggttgtggacaacaagccagggatgtaacgcactgagaagcccttagagcctctcaaagc |
| | aattttgagtgacacaggaacacttaacggctgacaaccggctggtaacaggattagcagagc |
| | gaggtatgtaggcggtgctacaagattgtactgagagtgcaccatacaggaaacagc (SEQ |
| | ID NO: 136) |
| pR6K- | gagagtgcaccatacaggaaacagctatgaccatgattacgccaagctcggcgcgccattgg |
| Donor(ZooTsy)_H1:0_ | gattcggtcgaattcagagcgcttttgaagctgatgtgcttaaaaacttactcaatggaataattct |
| E1:135_E2:0_H2:12 | agataattcactagtgattggaaatgttggatcctcatactcttcctttttcaattcagaagaactcgt |
| | caagaaggcgatagaaggcgatgcgctgcgaatcgggagcggcgataccgtaaagcacga |
| | ggaagcggtcagcccattcgccgccaagctcttcagcaatatcacgggtagccaacgctatgt |
| | cctgatagcggtccgccacacccagccggccacagtcgatgaatccagaaaagcggccatttt |
| | ccaccatgatattcggcaagcaggcatcgccatgggtcacgacgagatcctcgccgtcgggc |
| | atgcgcgccttgagcctggcgaacagttcggctggcgcgagcccctgatgctcttcgtccaga |
| | tcatcctgatcgacaagaccggcttccatccgagtacgtgctcgctcgatgcgatgtttcgcttg |
| | gtggtcgaatgggcaggtagccggatcaagcgtatgcagccgccgcattgcatcagccatgat |
| | ggatactttctcggcaggagcaaggtgggatgacaggagatcctgccccggcacttcgccca |
| | atagcagccagtcccttcccgcttcagtgacaacgtcgagcacagctgcgcaaggaacgccc |
| | gtcgtggccagccacgatagccgcgctgcctcgtcctgcagttcattcagggcaccggacag |
| | gtcggtcttgacaaaaagaaccgggcgcccctgcgctgacagccggaacacggcggcatca |
| | gagcagccgattgtctgttgtgcccagtcatagccgaatagcctctccacccaagcggccgga |
| | gaacctgcgtgcaatccatcttgttcaatcatgcgaaacgatcctcatcctgtctcttgatcagatc |
| | ttgatcccctgcgccatcagatccttggcggcaagaaagccatccagtttactttgcagggcttc |
| | ccaaccttaccagagggcgccccagctggcaattccggttcgcttgctgtccataaaaccgccc |
| | agtctagctatcgccatgtaagcccactgcaagctacctgctttctctttgcgcttgcgttttccctt |
| | gtccagatagcccagtagctgacattcatccggggtcagcaccgtttctgcggactggctttcta |
| | cgtgttccgcttcctttagcagcccttgcgccatgcatttgttaaatcgaattatccattgctgttga |
| | caaagggaatcaggggatcttgaagttcctattccgaagttcctattctctagaaagtataggaac |
| | ttcagagcgcttttgaagctaattcgagatcatgcatgagctcactagtggatccccccgactact |
| | tctaatgctgtgacatcactcacaggattcctgcaagtaatgcgacattggatactttgggattcct |
| | ttatagtcagtgggttatccgaatttttgccttgttcgttgctacattggctaaatcagaacttatccc |
| | aatacgcgtcaattcactggccgtcgttttactactttccgctgcataaccctgcttcggggtcatt |
| | atagcgattttttcggtatatccatcctttttcgcacgatatacaggattttgccaaagggttcgtgta |
| | gactttccttggtgtatccaacggcgtcagccgggcaggataggtgaagtaggcccacccgcg |
| | agcgggtgttccttcttcactgtcccttattcgcacctggcggtgctcaacgggaatcctgctctg |
| | cgaggctggccgataagctctgataacgcaggaaagaacatgggcagttcaacctgttgatag |
| | tacgtactaagctctcatgtttcacgtactaagctctcaagtttaacgtactaagctctcatgtttaac |
| | gaactaaaccctcatggctaacgtactaagctctcatggctaacgtactaagctctcatgtttcac |
| | gtactaagctctcatgtttgaacaataaaattaatataaatcagcaacttaaatagcctctaaggttt |
| | taagttttataagaaaaaaaagaatatataaggcttttaaagcttttaaggtttaacggttgtggaca |
| | acaagccagggatgtaacgcactgagaagcccttagagcctctcaaagcaattttgagtgaca |
| | caggaacacttaacggctgacaaccggctggtaacaggattagcagagcgaggtatgtaggc |
| | ggtgctacaagattgtactgagagtgcaccatacaggaaacagc (SEQ ID NO: 137) |
| pR6K- | gagagtgcaccatacaggaaacagctatgaccatgattacgccaagctcggcgcgccattgg |
| Donor(ZooTsy)_H1:0_ | gattcggtcgaattcagagcgcttttgaagctgatgtgcttaaaaacttactcaatggaataattct |
| E1:0_E2:0_H2:12 | agataattcactagtgattggaaatgttggatcctcatactcttcctttttcaattcagaagaactcgt |
| | caagaaggcgatagaaggcgatgcgctgcgaatcgggagcggcgataccgtaaagcacga |
| | ggaagcggtcagcccattcgccgccaagctcttcagcaatatcacgggtagccaacgctatgt |
| | cctgatagcggtccgccacacccagccggccacagtcgatgaatccagaaaagcggccatttt |
| | ccaccatgatattcggcaagcaggcatcgccatgggtcacgacgagatcctcgccgtcgggc |
| | atgcgcgccttgagcctggcgaacagttcggctggcgcgagcccctgatgctcttcgtccaga |
| | tcatcctgatcgacaagaccggcttccatccgagtacgtgctcgctcgatgcgatgtttcgcttg |
| | gtggtcgaatgggcaggtagccggatcaagcgtatgcagccgccgcattgcatcagccatgat |
| | ggatactttctcggcaggagcaaggtgggatgacaggagatcctgccccggcacttcgccca |
| | atagcagccagtcccttcccgcttcagtgacaacgtcgagcacagctgcgcaaggaacgccc |
| | gtcgtggccagccacgatagccgcgctgcctcgtcctgcagttcattcagggcaccggacag |
| | gtcggtcttgacaaaaagaaccgggcgcccctgcgctgacagccggaacacggcggcatca |
| | gagcagccgattgtctgttgtgcccagtcatagccgaatagcctctccacccaagcggccgga |
| | gaacctgcgtgcaatccatcttgttcaatcatgcgaaacgatcctcatcctgtctcttgatcagatc |
| | ttgatcccctgcgccatcagatccttggggcaagaaagccatccagtttactttgcagggcttc |
| | ccaaccttaccagagggcgccccagctggcaattccggttcgcttgctgtccataaaaccgccc |
| | agtctagctatcgccatgtaagcccactgcaagctacctgctttctctttgcgcttgcgttttccctt |
| | gtccagatagcccagtagctgacattcatccggggtcagcaccgtttctgcggactggctttcta |
| | cgtgttccgcttcctttagcagcccttgcgccatgcatttgttaaatcgaattatccattgctgttga |
| | caaagggaatcaggggatcttgaagttcctattccgaagttcctattctctagaaagtataggaac |
| | ttcagagcgcttttgaagctaattcgagatcatgcatgagctcactagtggatccccccgacatc |
| | ccaatacgcgtcaattcactggccgtcgttttactactttccgctgcataaccctgcttcggggtca |
| | ttatagcgattttttcggtatatccatcctttttcgcacgatatacaggattttgccaaagggttcgtg |
| | tagactttccttggtgtatccaacggcgtcagccgggcaggataggtgaagtaggcccacccg |
| | cgagcgggtgttccttcttcactgtcccttattcgcacctggcggtgctcaacgggaatcctgctc |
| | tgcgaggctggccgataagctctgataacgcaggaaagaacatgggcagttcaacctgttgat |
| | agtacgtactaagctctcatgtttcacgtactaagctctcaagtttaacgtactaagctctcatgttta |
| | acgaactaaaccctcatggctaacgtactaagctctcatggctaacgtactaagctctcatgtttc |
| | acgtactaagctctcatgtttgaacaataaaattaatataaatcagcaacttaaatagcctctaagg |
| | ttttaagttttataagaaaaaaaagaatatataaggcttttaaagcttttaaggtttaacggttgtgga |
| | caacaagccagggatgtaacgcactgagaagcccttagagcctctcaaagcaattttgagtga |
| | cacaggaacacttaacggctgacaaccggctggtaacaggattagcagagcgaggtatgtag |
| | gcggtgctacaagattgtactgagagtgcaccatacaggaaacagc (SEQ ID NO: |
| | 138) |
| pR6K- | gagagtgcaccatacaggaaacagctatgaccatgattacgccaagctcggcgcgccattgg |
| Donor(ZooTsy)_ | gatggactgggattctccaatatagagcgcttttgaagctgatgtgcttaaaaacttactcaatgg |
| H1:12_ | aataattctagataattcactagtgattggaaatgttggatcctcatactcttcctttttcaattcaga |
| E1:135_E2:20_H2:0 | agaactcgtcaagaaggcgatagaaggcgatgcgctgcgaatcgggagcggcgataccgtaa |
| | agcacgaggaagcggtcagcccattcgccgccaagctcttcagcaatatcacgggtagccaa |
| | cgctatgtcctgatagcggtccgccacacccagccggccacagtcgatgaatccagaaaagc |
| | ggccattttccaccatgatattcggcaagcaggcatcgccatgggtcacgacgagatcctcgcc |
| | gtcgggcatgcgcgccttgagcctggcgaacagttcggctggcgcgagcccctgatgctcttc |
| | gtccagatcatcctgatcgacaagaccggcttccatccgagtacgtgctcgctcgatgcgatgtt |
| | tcgcttggtggtcgaatgggcaggtagccggatcaagcgtatgcagccgccgcattgcatcag |
| | ccatgatggatactttctcggcaggagcaaggtgggatgacaggagatcctgccccggcactt |
| | cgcccaatagcagccagtcccttcccgcttcagtgacaacgtcgagcacagctgcgcaagga |
| | acgcccgtcgtggccagccacgatagccgcgctgcctcgtcctgcagttcattcagggcaccg |
| | gacaggtcggtcttgacaaaaagaaccgggcgcccctgcgctgacagccggaacacggcg |
| | gcatcagagcagccgattgtctgttgtgcccagtcatagccgaatagcctctccacccaagcgg |
| | ccggagaacctgcgtgcaatccatcttgttcaatcatgcgaaacgatcctcatcctgtctcttgat |
| | cagatcttgatcccctgcgccatcagatccttggcggcaagaaagccatccagtttactttgcag |
| | ggcttcccaaccttaccagagggcgccccagctggcaattccggttcgcttgctgtccataaaa |
| | ccgcccagtctagctatcgccatgtaagcccactgcaagctacctgctttctctttgcgcttgcgtt |
| | ttcccttgtccagatagcccagtagctgacattcatccggggtcagcaccgtttctgcggactgg |
| | ctttctacgtgttccgcttcctttagcagcccttgcgccatgcatttgttaaatcgaattatccattgc |
| | tgttgacaaagggaatcaggggatcttgaagttcctattccgaagttcctattctctagaaagtata |
| | ggaacttcagagcgcttttgaagctaattcgagatcatgcatgagctcactagtggatccccccg |
| | actacttctaatgctgtgacatcactcacaggattcctgcaagtaatgcgacattggatactttggg |
| | attcctttatagtcagtgggttatccgaatttttgccttgttcgttgctacattggctaaatcagaact |
| | tcggcagctcgtcatcccaatacgcgtcaattcactggccgtcgttttactactttccgctgcataa |
| | ccctgcttcggggtcattatagcgattttttcggtatatccatcctttttcgcacgatatacaggattt |
| | tgccaaagggttcgtgtagactttccttggtgtatccaacggcgtcagccgggcaggataggtga |
| | agtaggcccacccgcgagcgggtgttccttcttcactgtcccttattcgcacctggcggtgctca |
| | acgggaatcctgctctgcgaggctggccgataagctctgataacgcaggaaagaacatgggc |
| | agttcaacctgttgatagtacgtactaagctctcatgtttcacgtactaagctctcaagtttaacgta |
| | ctaagctctcatgtttaacgaactaaaccctcatggctaacgtactaagctctcatggctaacgta |
| | ctaagctctcatgtttcacgtactaagctctcatgtttgaacaataaaattaatataaatcagcaactt |
| | aaatagcctctaaggttttaagttttataagaaaaaaaagaatatataaggcttttaaagcttttaag |
| | gtttaacggttgtggacaacaagccagggatgtaacgcactgagaagcccttagagcctctcaa |
| | agcaattttgagtgacacaggaacacttaacggctgacaaccggctggtaacaggattagcag |
| | agcgaggtatgtaggcggtgctacaagattgtactgagagtgcaccatacaggaaacagc |
| | (SEQ ID NO: 139) |
| pR6K- | gagagtgcaccatacaggaaacagctatgaccatgattacgccaagctcggcgcgccattgg |
| Donor(ZooTsy)_ | gatggactgggattctccaatatagagcgcttttgaagctgatgtgcttaaaaacttactcaatgg |
| H1:12_ | aataattctagataattcactagtgattggaaatgttggatcctcatactcttcctttttcaattcaga |
| E1:0_E2:20_H2:0 | agaactcgtcaagaaggcgatagaaggcgatgcgctgcgaatcgggagcggcgataccgtaa |
| | agcacgaggaagcggtcagcccattcgccgccaagctcttcagcaatatcacgggtagccaa |
| | cgctatgtcctgatagcggtccgccacacccagccggccacagtcgatgaatccagaaaagc |
| | ggccattttccaccatgatattcggcaagcaggcatcgccatgggtcacgacgagatcctcgcc |
| | gtcgggcatgcgcgccttgagcctggcgaacagttcggctggcgcgagcccctgatgctcttc |
| | gtccagatcatcctgatcgacaagaccggcttccatccgagtacgtgctcgctcgatgcgatgtt |
| | tcgcttggtggtcgaatgggcaggtagccggatcaagcgtatgcagccgccgcattgcatcag |
| | ccatgatggatactttctcggcaggagcaaggtgggatgacaggagatcctgccccggcactt |
| | cgcccaatagcagccagtcccttcccgcttcagtgacaacgtcgagcacagctgcgcaagga |
| | acgcccgtcgtggccagccacgatagccgcgctgcctcgtcctgcagttcattcagggcaccg |
| | gacaggtcggtcttgacaaaaagaaccgggcgcccctgcgctgacagccggaacacggcg |
| | gcatcagagcagccgattgtctgttgtgcccagtcatagccgaatagcctctccacccaagcgg |
| | ccggagaacctgcgtgcaatccatcttgttcaatcatgcgaaacgatcctcatcctgtctcttgat |
| | cagatcttgatcccctgcgccatcagatccttggcggcaagaaagccatccagtttactttgcag |
| | ggcttcccaaccttaccagagggcgccccagctggcaattccggttcgcttgctgtccataaaa |
| | ccgcccagtctagctatcgccatgtaagcccactgcaagctacctgctttctctttgcgcttgcgtt |
| | ttcccttgtccagatagcccagtagctgacattcatccggggtcagcaccgtttctgcggactgg |
| | ctttctacgtgttccgcttcctttagcagcccttgcgccatgcatttgttaaatcgaattatccattgc |
| | tgttgacaaagggaatcaggggatcttgaagttcctattccgaagttcctattctctagaaagtata |
| | ggaacttcagagcgcttttgaagctaattcgagatcatgcatgagctcactagtggatccccccg |
| | accggcagctcgtcatcccaatacgcgtcaattcactggccgtcgttttactactttccgctgcat |
| | aaccctgcttcggggtcattatagcgattttttcggtatatccatcctttttcgcacgatatacagga |
| | ttttgccaaagggttcgtgtagactttccttggtgtatccaacggcgtcagccgggcaggatagg |
| | tgaagtaggcccacccgcgagcgggtgttccttcttcactgtcccttattcgcacctggcggtgc |
| | tcaacgggaatcctgctctgcgaggctggccgataagctctgataacgcaggaaagaacatgg |
| | gcagttcaacctgttgatagtacgtactaagctctcatgtttcacgtactaagctctcaagtttaacg |
| | tactaagctctcatgtttaacgaactaaaccctcatggctaacgtactaagctctcatggctaacgt |
| | actaagctctcatgtttcacgtactaagctctcatgtttgaacaataaaattaatataaatcagcaac |
| | ttaaatagcctctaaggttttaagttttataagaaaaaaaagaatatataaggcttttaaagcttttaa |
| | ggtttaacggttgtggacaacaagccagggatgtaacgcactgagaagcccttagagcctctc |
| | aaagcaattttgagtgacacaggaacacttaacggctgacaaccggctggtaacaggattagc |
| | agagcgaggtatgtaggcggtgctacaagattgtactgagagtgcaccatacaggaaacagc |
| | (SEQ ID NO: 140) |
| pR6K- | gagagtgcaccatacaggaaacagctatgaccatgattacgccaagctcggcgcgccattgg |
| Donor(ZooTsy)_H1:0_ | gatggactgggattctccaatatagagcgcttttgaagctgatgtgcttaaaaacttactcaatgg |
| E1:135_E2:20_H2:0 | aataattctagataattcactagtgattggaaatgttggatcctcatactcttcctttttcaattcaga |
| | agaactcgtcaagaaggcgatagaaggcgatgcgctgcgaatcgggagcggcgataccgtaa |
| | agcacgaggaagcggtcagcccattcgccgccaagctcttcagcaatatcacgggtagccaa |
| | cgctatgtcctgatagcggtccgccacacccagccggccacagtcgatgaatccagaaaagc |
| | ggccattttccaccatgatattcggcaagcaggcatcgccatgggtcacgacgagatcctcgcc |
| | gtcgggcatgcgcgccttgagcctggcgaacagttcggctggcgcgagcccctgatgctcttc |
| | gtccagatcatcctgatcgacaagaccggcttccatccgagtacgtgctcgctcgatgcgatgtt |
| | tcgcttggtggtcgaatgggcaggtagccggatcaagcgtatgcagccgccgcattgcatcag |
| | ccatgatggatactttctcggcaggagcaaggtgggatgacaggagatcctgccccggcactt |
| | cgcccaatagcagccagtcccttcccgcttcagtgacaacgtcgagcacagctgcgcaagga |
| | acgcccgtcgtggccagccacgatagccgcgctgcctcgtcctgcagttcattcagggcaccg |
| | gacaggtcggtcttgacaaaaagaaccgggcgcccctgcgctgacagccggaacacggcg |
| | gcatcagagcagccgattgtctgttgtgcccagtcatagccgaatagcctctccacccaagcgg |
| | ccggagaacctgcgtgcaatccatcttgttcaatcatgcgaaacgatcctcatcctgtctcttgat |
| | cagatcttgatcccctgcgccatcagatccttggcggcaagaaagccatccagtttactttgcag |
| | ggcttcccaaccttaccagagggcgccccagctggcaattccggttcgcttgctgtccataaaa |
| | ccgcccagtctagctatcgccatgtaagcccactgcaagctacctgctttctctttgcgcttgcgtt |
| | ttcccttgtccagatagcccagtagctgacattcatccggggtcagcaccgtttctgcggactgg |
| | ctttctacgtgttccgcttcctttagcagcccttgcgccatgcatttgttaaatcgaattatccattgc |
| | tgttgacaaagggaatcaggggatcttgaagttcctattccgaagttcctattctctagaaagtata |
| | ggaacttcagagcgcttttgaagctaattcgagatcatgcatgagctcactagtggatccccccg |
| | actacttctaatgctgtgacatcactcacaggattcctgcaagtaatgcgacattggatactttggg |
| | attcctttatagtcagtgggttatccgaatttttgccttgttcgttgctacattggctaaatcagaact |
| | tatcccaatacgcgtcaattcactggccgtcgttttactactttccgctgcataaccctgcttcgggg |
| | tcattatagcgattttttcggtatatccatcctttttcgcacgatatacaggattttgccaaagggttc |
| | gtgtagactttccttggtgtatccaacggcgtcagccgggcaggataggtgaagtaggcccac |
| | ccgcgagcgggtgttccttcttcactgtcccttattcgcacctggcggtgctcaacgggaatcct |
| | gctctgcgaggctggccgataagctctgataacgcaggaaagaacatgggcagttcaacctgt |
| | tgatagtacgtactaagctctcatgtttcacgtactaagctctcaagtttaacgtactaagctctcat |
| | gtttaacgaactaaaccctcatggctaacgtactaagctctcatggctaacgtactaagctctcat |
| | gtttcacgtactaagctctcatgtttgaacaataaaattaatataaatcagcaacttaaatagcctct |
| | aaggttttaagttttataagaaaaaaaagaatatataaggcttttaaagcttttaaggtttaacggtt |
| | gtggacaacaagccagggatgtaacgcactgagaagcccttagagcctctcaaagcaattttg |
| | agtgacacaggaacacttaacggctgacaaccggctggtaacaggattagcagagcgaggta |
| | tgtaggcggtgctacaagattgtactgagagtgcaccatacaggaaacagc (SEQ ID |
| | NO: 141) |
| pR6K- | Gagagtgcaccatacaggaaacagctatgaccatgattacgccaagctcggcgcgccattgg |
| Donor(ZooTsy)_H1:0_ | gatggactgggattctccaatatagagcgcttttgaagctgatgtgcttaaaaacttactcaatgg |
| E1:0_E2:20_H2:0 | aataattctagataattcactagtgattggaaatgttggatcctcatactcttcctttttcaattcaga |
| | agaactcgtcaagaaggcgatagaaggcgatgcgctgcgaatcgggagcggcgataccgtaa |
| | agcacgaggaagcggtcagcccattcgccgccaagctcttcagcaatatcacgggtagccaa |
| | cgctatgtcctgatagcggtccgccacacccagccggccacagtcgatgaatccagaaaagc |
| | ggccattttccaccatgatattcggcaagcaggcatcgccatgggtcacgacgagatcctcgcc |
| | gtcgggcatgcgcgccttgagcctggcgaacagttcggctggcgcgagcccctgatgctcttc |
| | gtccagatcatcctgatcgacaagaccggcttccatccgagtacgtgctcgctcgatgcgatgtt |
| | tcgcttggtggtcgaatgggcaggtagccggatcaagcgtatgcagccgccgcattgcatcag |
| | ccatgatggatactttctcggcaggagcaaggtgggatgacaggagatcctgccccggcactt |
| | cgcccaatagcagccagtcccttcccgcttcagtgacaacgtcgagcacagctgcgcaagga |
| | acgcccgtcgtggccagccacgatagccgcgctgcctcgtcctgcagttcattcagggcaccg |
| | gacaggtcggtcttgacaaaaagaaccgggcgcccctgcgctgacagccggaacacggcg |
| | gcatcagagcagccgattgtctgttgtgcccagtcatagccgaatagcctctccacccaagcgg |
| | ccggagaacctgcgtgcaatccatcttgttcaatcatgcgaaacgatcctcatcctgtctcttgat |
| | cagatcttgatcccctgcgccatcagatccttggcggcaagaaagccatccagtttactttgcag |
| | ggcttcccaaccttaccagagggcgccccagctggcaattccggttcgcttgctgtccataaaa |
| | ccgcccagtctagctatcgccatgtaagcccactgcaagctacctgctttctctttgcgcttgcgtt |
| | ttcccttgtccagatagcccagtagctgacattcatccggggtcagcaccgtttctgcggactgg |
| | ctttctacgtgttccgcttcctttagcagcccttgcgccatgcatttgttaaatcgaattatccattgc |
| | tgttgacaaagggaatcaggggatcttgaagttcctattccgaagttcctattctctagaaagtata |
| | ggaacttcagagcgcttttgaagctaattcgagatcatgcatgagctcactagtggatccccccg |
| | acatcccaatacgcgtcaattcactggccgtcgttttactactttccgctgcataaccctgcttcgg |
| | ggtcattatagcgattttttcggtatatccatcctttttcgcacgatatacaggattttgccaaagggt |
| | tcgtgtagactttccttggtgtatccaacggcgtcagccgggcaggataggtgaagtaggccca |
| | cccgcgagcgggtgttccttcttcactgtcccttattcgcacctggcggtgctcaacgggaatcc |
| | tgctctgcgaggctggccgataagctctgataacgcaggaaagaacatgggcagttcaacctg |
| | ttgatagtacgtactaagctctcatgtttcacgtactaagctctcaagtttaacgtactaagctctcat |
| | gtttaacgaactaaaccctcatggctaacgtactaagctctcatggctaacgtactaagctctcat |
| | gtttcacgtactaagctctcatgtttgaacaataaaattaatataaatcagcaacttaaatagcctct |
| | aaggttttaagttttataagaaaaaaaagaatatataaggcttttaaagcttttaaggtttaacggtt |
| | gtggacaacaagccagggatgtaacgcactgagaagcccttagagcctctcaaagcaattttg |
| | agtgacacaggaacacttaacggctgacaaccggctggtaacaggattagcagagcgaggta |
| | tgtaggcggtgctacaagattgtactgagagtgcaccatacaggaaacagc (SEQ ID |
| | NO: 142) |
| pR6K- | gagagtgcaccatacaggaaacagctatgaccatgattacgccaagctcggcgcgccattgg |
| Donor(ZooTsy)_ | gatagagcgcttttgaagctgatgtgcttaaaaacttactcaatggaataattctagataattcacta |
| H1:12_ | gtgattggaaatgttggatcctcatactcttcctttttcaattcagaagaactcgtcaagaaggcga |
| E1:135_E2:0_H2:0 | tagaaggcgatgcgctgcgaatcgggagcggcgataccgtaaagcacgaggaagcggtca |
| | gcccattcgccgccaagctcttcagcaatatcacgggtagccaacgctatgtcctgatagcggt |
| | ccgccacacccagccggccacagtcgatgaatccagaaaagcggccattttccaccatgatat |
| | tcggcaagcaggcatcgccatgggtcacgacgagatcctcgccgtcgggcatgcgcgccttg |
| | agcctggcgaacagttcggctggcgcgagcccctgatgctcttcgtccagatcatcctgatcga |
| | caagaccggcttccatccgagtacgtgctcgctcgatgcgatgtttcgcttggtggtcgaatgg |
| | gcaggtagccggatcaagcgtatgcagccgccgcattgcatcagccatgatggatactttctcg |
| | gcaggagcaaggtgggatgacaggagatcctgccccggcacttcgcccaatagcagccagt |
| | cccttcccgcttcagtgacaacgtcgagcacagctgcgcaaggaacgcccgtcgtggccagc |
| | cacgatagccgcgctgcctcgtcctgcagttcattcagggcaccggacaggtcggtcttgaca |
| | aaaagaaccgggcgcccctgcgctgacagccggaacacggcggcatcagagcagccgatt |
| | gtctgttgtgcccagtcatagccgaatagcctctccacccaagcggccggagaacctgcgtgc |
| | aatccatcttgttcaatcatgcgaaacgatcctcatcctgtctcttgatcagatcttgatcccctgcg |
| | ccatcagatccttggcggcaagaaagccatccagtttactttgcagggcttcccaaccttaccag |
| | agggcgccccagctggcaattccggttcgcttgctgtccataaaaccgcccagtctagctatcg |
| | ccatgtaagcccactgcaagctacctgctttctctttgcgcttgcgttttcccttgtccagatagccc |
| | agtagctgacattcatccggggtcagcaccgtttctgcggactggctttctacgtgttccgcttcc |
| | tttagcagcccttgcgccatgcatttgttaaatcgaattatccattgctgttgacaaagggaatcag |
| | gggatcttgaagttcctattccgaagttcctattctctagaaagtataggaacttcagagcgctttt |
| | gaagctaattcgagatcatgcatgagctcactagtggatccccccgactacttctaatgctgtga |
| | catcactcacaggattcctgcaagtaatgcgacattggatactttgggattcctttatagtcagtgg |
| | gttatccgaatttttgccttgttcgttgctacattggctaaatcagaacttcggcagctcgtcatccc |
| | aatacgcgtcaattcactggccgtcgttttactactttccgctgcataaccctgcttcggggtcatt |
| | atagcgattttttcggtatatccatcctttttcgcacgatatacaggattttgccaaagggttcgtgta |
| | gactttccttggtgtatccaacggcgtcagccgggcaggataggtgaagtaggcccacccgcg |
| | agcgggtgttccttcttcactgtcccttattcgcacctggcggtgctcaacgggaatcctgctctg |
| | cgaggctggccgataagctctgataacgcaggaaagaacatgggcagttcaacctgttgatag |
| | tacgtactaagctctcatgtttcacgtactaagctctcaagtttaacgtactaagctctcatgtttaac |
| | gaactaaaccctcatggctaacgtactaagctctcatggctaacgtactaagctctcatgtttcac |
| | gtactaagctctcatgtttgaacaataaaattaatataaatcagcaacttaaatagcctctaaggttt |
| | taagttttataagaaaaaaaagaatatataaggcttttaaagcttttaaggtttaacggttgtggaca |
| | acaagccagggatgtaacgcactgagaagcccttagagcctctcaaagcaattttgagtgaca |
| | caggaacacttaacggctgacaaccggctggtaacaggattagcagagcgaggtatgtaggc |
| | ggtgctacaagattgtactgagagtgcaccatacaggaaacagc (SEQ ID NO: 143) |
| pR6K- | gagagtgcaccatacaggaaacagctatgaccatgattacgccaagctcggcgcgccattgg |
| Donor(ZooTsy)_ | gatagagcgcttttgaagctgatgtgcttaaaaacttactcaatggaataattctagataattcacta |
| H1:12_ | gtgattggaaatgttggatcctcatactcttcctttttcaattcagaagaactcgtcaagaaggcga |
| E1:0_E2:0_H2:0 | tagaaggcgatgcgctgcgaatcgggagcggcgataccgtaaagcacgaggaagcggtca |
| | gcccattcgccgccaagctcttcagcaatatcacgggtagccaacgctatgtcctgatagcggt |
| | ccgccacacccagccggccacagtcgatgaatccagaaaagcggccattttccaccatgatat |
| | tcggcaagcaggcatcgccatgggtcacgacgagatcctcgccgtcgggcatgcgcgccttg |
| | agcctggcgaacagttcggctggcgcgagcccctgatgctcttcgtccagatcatcctgatcga |
| | caagaccggcttccatccgagtacgtgctcgctcgatgcgatgtttcgcttggtggtcgaatgg |
| | gcaggtagccggatcaagcgtatgcagccgccgcattgcatcagccatgatggatactttctcg |
| | gcaggagcaaggtgggatgacaggagatcctgccccggcacttcgcccaatagcagccagt |
| | cccttcccgcttcagtgacaacgtcgagcacagctgcgcaaggaacgcccgtcgtggccagc |
| | cacgatagccgcgctgcctcgtcctgcagttcattcagggcaccggacaggtcggtcttgaca |
| | aaaagaaccgggcgcccctgcgctgacagccggaacacggcggcatcagagcagccgatt |
| | gtctgttgtgcccagtcatagccgaatagcctctccacccaagcggccggagaacctgcgtgc |
| | aatccatcttgttcaatcatgcgaaacgatcctcatcctgtctcttgatcagatcttgatcccctgcg |
| | ccatcagatccttggcggcaagaaagccatccagtttactttgcagggcttcccaaccttaccag |
| | agggcgccccagctggcaattccggttcgcttgctgtccataaaaccgcccagtctagctatcg |
| | ccatgtaagcccactgcaagctacctgctttctctttgcgcttgcgttttcccttgtccagatagccc |
| | agtagctgacattcatccggggtcagcaccgtttctgcggactggctttctacgtgttccgcttcc |
| | tttagcagcccttgcgccatgcatttgttaaatcgaattatccattgctgttgacaaagggaatcag |
| | gggatcttgaagttcctattccgaagttcctattctctagaaagtataggaacttcagagcgctttt |
| | gaagctaattcgagatcatgcatgagctcactagtggatccccccgaccggcagctcgtcatcc |
| | caatacgcgtcaattcactggccgtcgttttactactttccgctgcataaccctgcttcggggtcat |
| | tatagcgattttttcggtatatccatcctttttcgcacgatatacaggattttgccaaagggttcgtgt |
| | agactttccttggtgtatccaacggcgtcagccgggcaggataggtgaagtaggcccacccgc |
| | gagcgggtgttccttcttcactgtcccttattcgcacctggcggtgctcaacgggaatcctgctct |
| | gcgaggctggccgataagctctgataacgcaggaaagaacatgggcagttcaacctgttgata |
| | gtacgtactaagctctcatgtttcacgtactaagctctcaagtttaacgtactaagctctcatgtttaa |
| | cgaactaaaccctcatggctaacgtactaagctctcatggctaacgtactaagctctcatgtttca |
| | cgtactaagctctcatgtttgaacaataaaattaatataaatcagcaacttaaatagcctctaaggtt |
| | ttaagttttataagaaaaaaaagaatatataaggcttttaaagcttttaaggtttaacggttgtggac |
| | aacaagccagggatgtaacgcactgagaagcccttagagcctctcaaagcaattttgagtgac |
| | acaggaacacttaacggctgacaaccggctggtaacaggattagcagagcgaggtatgtagg |
| | cggtgctacaagattgtactgagagtgcaccatacaggaaacagc (SEQ ID NO: 144) |
| pR6K- | gagagtgcaccatacaggaaacagctatgaccatgattacgccaagctcggcgcgccattgg |
| Donor(ZooTsy)_H1:0_ | gatagagcgcttttgaagctgatgtgcttaaaaacttactcaatggaataattctagataattcacta |
| E1:135_E2:0_H2:0 | gtgattggaaatgttggatcctcatactcttcctttttcaattcagaagaactcgtcaagaaggcga |
| | tagaaggcgatgcgctgcgaatcgggagcggcgataccgtaaagcacgaggaagcggtca |
| | gcccattcgccgccaagctcttcagcaatatcacgggtagccaacgctatgtcctgatagcggt |
| | ccgccacacccagccggccacagtcgatgaatccagaaaagcggccattttccaccatgatat |
| | tcggcaagcaggcatcgccatgggtcacgacgagatcctcgccgtcgggcatgcgcgccttg |
| | agcctggcgaacagttcggctggcgcgagcccctgatgctcttcgtccagatcatcctgatcga |
| | caagaccggcttccatccgagtacgtgctcgctcgatgcgatgtttcgcttggtggtcgaatgg |
| | gcaggtagccggatcaagcgtatgcagccgccgcattgcatcagccatgatggatactttctcg |
| | gcaggagcaaggtgggatgacaggagatcctgccccggcacttcgcccaatagcagccagt |
| | cccttcccgcttcagtgacaacgtcgagcacagctgcgcaaggaacgcccgtcgtggccagc |
| | cacgatagccgcgctgcctcgtcctgcagttcattcagggcaccggacaggtcggtcttgaca |
| | aaaagaaccgggcgcccctgcgctgacagccggaacacggcggcatcagagcagccgatt |
| | gtctgttgtgcccagtcatagccgaatagcctctccacccaagcggccggagaacctgcgtgc |
| | aatccatcttgttcaatcatgcgaaacgatcctcatcctgtctcttgatcagatcttgatcccctgcg |
| | ccatcagatccttggcggcaagaaagccatccagtttactttgcagggcttcccaaccttaccag |
| | agggcgccccagctggcaattccggttcgcttgctgtccataaaaccgcccagtctagctatcg |
| | ccatgtaagcccactgcaagctacctgctttctctttgcgcttgcgttttcccttgtccagatagccc |
| | agtagctgacattcatccggggtcagcaccgtttctgcggactggctttctacgtgttccgcttcc |
| | tttagcagcccttgcgccatgcatttgttaaatcgaattatccattgctgttgacaaagggaatcag |
| | gggatcttgaagttcctattccgaagttcctattctctagaaagtataggaacttcagagcgctttt |
| | gaagctaattcgagatcatgcatgagctcactagtggatccccccgactacttctaatgctgtga |
| | catcactcacaggattcctgcaagtaatgcgacattggatactttgggattcctttatagtcagtgg |
| | gttatccgaatttttgccttgttcgttgctacattggctaaatcagaacttatcccaatacgcgtcaat |
| | tcactggccgtcgttttactactttccgctgcataaccctgcttcggggtcattatagcgattttttcg |
| | gtatatccatcctttttcgcacgatatacaggattttgccaaagggttcgtgtagactttccttggtgt |
| | atccaacggcgtcagccgggcaggataggtgaagtaggcccacccgcgagcgggtgttcctt |
| | cttcactgtcccttattcgcacctggcggtgctcaacgggaatcctgctctgcgaggctggccg |
| | ataagctctgataacgcaggaaagaacatgggcagttcaacctgttgatagtacgtactaagctc |
| | tcatgtttcacgtactaagctctcaagtttaacgtactaagctctcatgtttaacgaactaaaccctc |
| | atggctaacgtactaagctctcatggctaacgtactaagctctcatgtttcacgtactaagctctca |
| | tgtttgaacaataaaattaatataaatcagcaacttaaatagcctctaaggttttaagttttataagaa |
| | aaaaaagaatatataaggcttttaaagcttttaaggtttaacggttgtggacaacaagccagggat |
| | gtaacgcactgagaagcccttagagcctctcaaagcaattttgagtgacacaggaacacttaac |
| | ggctgacaaccggctggtaacaggattagcagagcgaggtatgtaggcggtgctacaagatt |
| | gtactgagagtgcaccatacaggaaacagc (SEQ ID NO: 145) |
| pTarget(ZooTsy) | Cacggcttcgaccgcagcactggtcggtggaggcggcacgccccgccccggcgagatcag |
| | cctggcgcacaacggcgtgctgtacctggacgagctgccggaattcgaccgacgtgtgctcg |
| | aggccctgcgcgagccgctggaaagcggccacatcacgatttcccgtgcagcccgccgcgc |
| | cgagttcccggcccgctctaggctgctgccaccgctgagcaataactagcataaccccttggg |
| | gcctctaaacgggtcttgaggggttttttgctgaaacctcaggcatttgagaagcacacggtcac |
| | actgcttccggtagtcaataaaccggtaaaccagcaatagacataagcggctatttaacgaccct |
| | gccctgaaccgacgaccgggtcgaatttgctttcgaatttctgccattcatccgcttattatcactta |
| | ttcaggcgtagcaccaggcgtttaagggcaccaataactgccttaaaaaaattacgccccgccc |
| | tgccactcatcgcagtactgttgtaattcattaagcattctgccgacatggaagccatcacagacg |
| | gcatgatgaacctgaatcgccagcggcatcagcaccttgtcgccttgcgtataatatttgcccat |
| | agtgaaaacgggggcgaagaagttgtccatattggccacgtttaaatcaaaactggtgaaactc |
| | acccagggattggctgagacgaaaaacatattctcaataaaccctttagggaaataggccaggt |
| | tttcaccgtaacacgccacatcttgcgaatatatgtgtagaaactgccggaaatcgtcgtggtatt |
| | cactccagagcgatgaaaacgtttcagtttgctcatggaaaacggtgtaacaagggtgaacact |
| | atcccatatcaccagctcaccgtctttcattgccatacggaactccggatgagcattcatcaggc |
| | gggcaagaatgtgaataaaggccggataaaacttgtgcttatttttctttacggtctttaaaaaggc |
| | cgtaatatccagctgaacggtctggttataggtacattgagcaactgactgaaatgcctcaaaat |
| | gttctttacgatgccattgggatatatcaacggtggtatatccagtgatttttttctccattttagcttc |
| | cttagctcctgaaaatctcgataactcaaaaaatacgcccggtagtgatcttatttcattatggtga |
| | aagttggaacctcttacgtgccgatcaacgtctcattttcgccaaaagttggcccagggcttccc |
| | ggtatcaacagggacaccaggatttatttattctgcgaagtgatcttccgtcacaggtatttattcg |
| | gcgcaaagtgcgtcgggtgatgctgccaacttactgatttagtgtatgatggtgtttttgaggtgct |
| | ccagtggcttctgtttctatcagctgtccctcctgttcagctactgacggggtggtgcgtaacggc |
| | aaaagcaccgccggacatcagcgctagcggagtgtatactggcttactatgttggcactgatga |
| | gggtgtcagtgaagtgcttcatgtggcaggagaaaaaaggctgcaccggtgcgtcagcagaa |
| | tatgtgatacaggatatattccgcttcctcgctcactgactcgctacgctcggtcgttcgactgcg |
| | gcgagcggaaatggcttacgaacggggcggagatttcctggaagatgccaggaagatactta |
| | acagggaagtgagagggccgcggcaaagccgtttttccataggctccgcccccctgacaagc |
| | atcacgaaatctgacgctcaaatcagtggtggcgaaacccgacaggactataaagataccagg |
| | cgtttcccctggcggctccctcgtgcgctctcctgttcctgcctttcggtttaccggtgtcattccg |
| | ctgttatggccgcgtttgtctcattccacgcctgacactcagttccgggtaggcagttcgctccaa |
| | gctggactgtatgcacgaaccccccgttcagtccgaccgctgcgccttatccggtaactatcgtc |
| | ttgagtccaacccggaaagacatgcaaaagcaccactggcagcagccactggtaattgattta |
| | gaggagttagtcttgaagtcatgcgccggttaaggctaaactgaaaggacaagttttggtgact |
| | gcgctcctccaagccagttacctcggttcaaagagttggtagctcagagaaccttcgaaaaacc |
| | gccctgcaaggcggttttttcgttttcagagcaagagattacgcgcagaccaaaacgatctcaa |
| | gaagatcatcttattaatcagataaaatatttctagatttcagtgcaatttatctcttcaaatgtagcac |
| | ctgaagtcagccccatacgatataagttgtaattctcatgttagtcatgccccgcgcccaccgga |
| | aggagctgactgggttgaaggctctcaagggcatcggtcgagatcccggtgcctaatgagtga |
| | gctaacttacattaattgcgttgcgc (SEQ ID NO: 146) |

E. coli Transposition Assays

[0414] For CyCAST, 100 ng of pHelper (CyCAST) was co-electroporated with 100 ng of pDonor (CyCAST) and 100 ng of pTarget (CyCAST) into BL21 (DE3) electrocompetent cells (Sigma) and plated on 100 μg/ml carbenicillin, 50 μg/ml spectinomycin, and 50 μg/ml chloramphenicol containing LB-agar plates. After incubation for 17 hours at 37° C., all colonies were scraped from the plates, and a portion was re-plated on 0.1 mM IPTG supplemented triple antibiotic LB-agar plates to induce protein expression. Cells were incubated for an additional 17 hours at 37° C. All colonies were scraped, and the plasmid DNA was purified using QIAprep Spin Miniprep Kit (QIAGEN). Insertions were identified by PCR using Q5 High-Fidelity DNA polymerase (NEB). Insertion products containing the 6N sequence were amplified and sequenced using a MiSeq Reagent Kit v2, 300-cycle (Illumina). PAM and insert position were characterized with the established pipeline (Strecker, J. et al. RNA-guided DNA insertion with CRISPR-associated transposases. Science 365, 48-53 (2019)). The frequency of insertions was determined with droplet digital PCR (ddPCR) as described below with 1 μg to 10 ng template plasmid DNA for 20 μL ddPCR reaction. AjTn6022 and ZooTsy were analyzed in the same manner, but a constitutive lac promoter was used for expression of proteins. In brief, co-electroporated transformants were incubated at triple antibiotics 50 μg/ml kanamycin, 50 μg/ml spectinomycin, and 50 μg/ml chloramphenicol containing LB-agar plates for 17 hours at 37° C., and all colonies were scraped for the downstream analysis. Experiments were performed with three biological replicates. All data points are shown with an error bar showing standard deviation, and statistical significance was assessed by t-test.

### Nanopore Long-Read Sequencing to Determine the Plasmid Structure

[0415] To isolate pInsert and determine its structure, the pR6K-donor was utilized. For AjTn6022, pHelper (AjTn6022), pR6K-donor (AjTn6022), and pTarget (AjTn6022) were co-electroporated into Pir1+E. coli. Cells were recovered for 1 hour and plated on 50 μg/ml kanamycin, 50 μg/ml spectinomycin, and 50 μg/ml chloramphenicol containing LB-agar plates. Cells were harvested 5 days after incubation at room temperature and subjected to mini-prep by QIAprep Spin Miniprep Kit (Qiagen). Incubation at 37° C. was avoided to prevent transposed products being actively resolved to enable detection of replicative transposition. To recover transposed pInsert products, 100 ng mini-prep product was electroporated into Endura Competent Cells (Lucigen). Cells were recovered for 1 hour and plated on 50 μg/ml kanamycin and 50 μg/ml chloramphenicol containing LB-agar plates, and further incubated at room temperature for 5 days. Donor insertion on pTarget was confirmed by Sanger sequencing of mini-prep products for 4 colonies. In parallel, all colonies were harvested and subjected to mini-prep, followed by amplification-free nanopore sequencing library preparation (Oxford Nanopore Technologies SQK-LSK109). Briefly, mini-prep products were linearized by BstZ17I, followed by end-prep and subsequent ligation of sequencing adapters. Resulting libraries were loaded on a MinION R9 flow cell and sequenced. Sequence reads containing 25 bp of comM gene fragment, 25 bp of LE and 25 bp of RE (up to 2 bp mismatches were allowed for each component) were filtered for further analysis, thereby discarding low-quality and contaminating gDNA reads. ZooTsy was analyzed in the same manner with cognate plasmids. For quality control, reads over 2.5 kb with QScore >7 were filtered. To determine the structure of pInsert, the reads were mapped on the expected simple insertion or excised cointegrate products (FIG. 12D). To count simple insertions and excised cointegrates, nanopore sequencing reads were analyzed using the following pipeline (FIGS. 12C and 12E): the reads which contain both (1) the downstream edge 30-bp sequence of cloned comM 100-bp fragment (AGCGGGCCGGGAACTCGGCGCGGCGGGCTG (SEQ ID NO: 147)) and (2)30-bp end2 sequence (GGACTGGGATTCTCCAATATTCCTTAGCGC (SEQ ID NO: 148)) were further extracted by the insertion reads counter. Among those reads, the ones which have (3) the upstream edge 30-bp sequence of the cloned comM fragment (CACGGCTTCGACCGCAGCACTGGTCGGTGG (SEQ ID NO: 149)) and (4) the 30-bp sequence of the cargo (GTCGGGGGGATCCACTAGTGAGCTCATGCA (SEQ ID NO: 150)) were extracted by the counter and used for mapping on the expected simple insertion or excised cointegrate products. Based on the distance between the upstream edge of comM and cargo, each selected read was counted as either a simple insertion or excised cointegrate.

### Tsy Circular Intermediate Isolation Assays

[0416] 100 ng of pHelper (ZooTsy) was co-electroporated with 100 ng of lacZα backbone pDonor (ZooTsy) and 100 ng of pACYC backbone vector into BL21 (DE3) electrocompetent cells (Sigma) and plated on 50 μg/ml kanamycin, 50 μg/ml spectinomycin, and 50 μg/ml chloramphenicol containing LB-agar plates. After incubation for 17 hours at 37° C., all colonies were scraped from the plates, and the plasmid DNA was purified using QIAprep Spin Miniprep Kit (QIAGEN). 100 μg of mini-prep product was used for re-transformation of NEB 10-beta Competent E. coli (NEB), and the cells were plated on S-Gal (Sigma) and 50 μg/ml kanamycin containing LB-agar plates for blue/white selection. After incubation for 17 hours at 37° C., white colonies were picked up and further cultured for 17 hours at 37° C., and the plasmid DNA was purified using QIAprep Spin Miniprep Kit (QIAGEN). The original lacZα backbone pDonor (ZooTsy) and the circularized donor (cd) were digested with NruI (NEB) for an hour at 37° C. and loaded on E-Gel Ex Agarose Gels 1%. The junction of end1 and end2 was confirmed by Sanger sequencing of mini-prep products for 4 white colonies. In parallel, isolated products from 24 white colonies were combined and subjected to amplification-free nanopore sequencing library preparation (Oxford Nanopore Technologies SQK-LSK109). Briefly, mini-prep products were linearized by NruI, followed by end-prep and subsequent ligation of sequencing adapters. Resulting libraries were loaded on a MinION R9 flow cell and sequenced.

### TTISS for Insertion Specificity Analysis

[0417] Endura Competent Cells were transformed for transposition assay as mentioned above, except following; 100 ng of a temperature sensitive pSC101-donor was used. After incubation on triple antibiotic LB-agar plates, cells were re-plated and grown for 12 hours at 43° C. to prevent unintended amplification of donor plasmids in the following Tagmentation-based Tag Integration Site Sequencing (TTISS) analysis (Schmid-Burgk, J. L. et al. Highly Parallel Profiling of Cas9 Variant Specificity. Mol. Cell 78, 794-800.e8 (2020)). Genomic DNA was extracted from hundreds of colonies on a LB-agar petri dish, and 500 ng genomic DNA (from approximate 108 E. coli cells) was tagmented with Tn5, and re-purified by Wizard SV Gel and PCR Clean-Up System (Promega). Tagmented DNA samples were amplified using two rounds (in total 37 cycles) of PCR with KOD Hot Start DNA Polymerase (Millipore) using a Tn5 adapter-specific primer and nested primers within the DNA donor Table S2). PCR products from 4 different experimental conditions were pooled together, purified, and the resulting libraries were sequenced using a NextSeq v2 kit, 75 cycle kit with 45 forward cycles and 30 reverse cycles. Read pairs with RI containing the terminal 29 bp of the AjTn6022 transposon RE sequence were filtered for further analysis and trimmed of the transposon sequence for alignment to the E. coli genome (CP011113.2) and pTarget (AjTn6022). Filtered and trimmed reads were aligned using the established BWA aligner pipeline (Altae-Tran, H. et al. The widespread IS200/IS605 transposon family encodes diverse programmable RNA-guided endonucleases. Science 374, 57-65 (2021)). The resulting SAM files were exported for further analysis. Aligned RI reads with length of 16 bp (remaining RI length after trimming of 29 bp of transposon RE sequence) and SAM flags 99 and 147 (for mapped reads within the insert size and in correct orientation) were used to determine the correct transposon insertion reads. Reads with a single insertion position at the Aj comM on pTarget and E. coli endogenous comM insertion sites were considered on-target, while remaining reads were counted as off-targets. For ZooTsy, the resulting libraries were sequenced using a MiSeq v2 kit with 75 forward cycles and 75 reverse cycles. Read pairs with RI containing the terminal 36 bp of the ZooTsy endl sequence were filtered for further analysis and trimmed of the transposon sequence for alignment to the E. coli genome and pTarget (ZooTsy). Filtered and trimmed reads were aligned, and the resulting SAM files were exported for further analysis. Aligned R1 reads with length of 39 bp (remaining RI length after trimming of 36 bp of transposon endl sequence) and SAM flags 99 and 147 were used to determine the correct transposon insertion reads.

Droplet Digital POR (ddPCR) Reactions

[0418] Insertion events were quantified using insertion specific primers (Table 8) and a donor specific probe (Table 9). ddPCR Supermix for Probes (No dUTP) (BioRad), primers (900 nM each), a probe (250 nM), and template DNA were combined into 20 mL reactions, and droplets were generated with 70 μL of Droplet Generation Oil for Probes (BioRad) using the QX200 Droplet Generator (BioRad). Thermal cycling conditions for ddPCR reactions were as follows: 1 cycle, 95° C., 10 min; 40 cycles, 94° C., 30 s, 58° C., 1 min; 1 cycle, 98° C., 10 mins; 4° C. hold. PCR products were read with a QX200 Droplet Reader, and absolute concentrations of inserts were determined using QuantaSoft (v1.6.6.0320). Total template (genome or target plasmid) amount was also quantified through this process, and insertion frequency was calculated as inserts/template.

TABLE 8

| Primer | |
|---|---|
| description | Primer sequence |
| NGS pTarget | ctttccctacacgacgctcttccga |
| 6N-upstream | tctgagcaagagattacgcgcagac |
| | (SEQ ID NO: 151) |
| NGS pTarget | ctttccctacacgacgctcttccga |
| 6N-downstream | tctctaccgcattaaagcttccgcc |
| | (SEQ ID NO: 152) |
| NGS pDonor | gactggagttcagacgtgtgctctt |
| (CyCAST)-LE | ccgatctgcctattgctttcgctct |
| | atctgtcc |
| | (SEQ ID NO: 153) |
| NGS pDonor | gactggagttcagacgtgtgctctt |
| (CyCAST)-RE | ccgatctcctaaggcaacacaacgg |
| | ctg |
| | (SEQ ID NO: 154) |
| NGS tRNA-leu | ctttccctacacgacgctcttccga |
| | tctgtaagccttgcgagttcgattc |
| | tcg |
| | (SEQ ID NO: 155) |
| pTarget ddPCR | ctaccgcattaaagcttccgcc |
| 6N-downstream | (SEQ ID NO: 156) |
| pDonor(CyCAST) | cctaaggcaacacaacggctg |
| ddPCR for RE | (SEQ ID NO: 157) |
| pDonor(CyCAST) | cctggtgtccctgttgataccg |
| ddPCR | (SEQ ID NO: 158) |
| tRNA-leu | |
| downstream | |
| pTarget ddPCR | cgacagcatcgccagtcactatg |
| for TcR1 | (SEQ ID NO: 159) |
| pTarget ddPCR | caagtagcgaagcgagcaggac |
| for TcR2 | (SEQ ID NO: 160) |
| NGS AjTn6022- | ctttccctacacgacgctcttccga |
| comM upstream | tctagcttccttagctcctgaaaat |
| | ctcg |
| | (SEQ ID NO: 161) |
| NGS AjTn6022- | ctttccctacacgacgctcttccga |
| comM | tctgaaaatgagacgttgatcggca |
| downstream | c |
| | (SEQ ID NO: 162) |
| NGS pDonor | gactggagttcagacgtgtgctctt |
| (AjTn6022)-RE | ccgatctgccactcttgcttattac |
| | tgtc |
| | (SEQ ID NO: 163) |
| NGS pDonor | gactggagttcagacgtgtgctctt |
| (AjTn6022)-LE | ccgatctttgcaggcatatctttta |
| | gtg |
| | (SEQ ID NO: 164) |
| pDonor | gccactcttgcttattactgtc |
| (AjTn6022) | (SEQ ID NO: 165) |
| ddPCR forRE | |
| pTarget ddPCR | gaaaatgagacgttgatcggcac |
| Aj-comM | (SEQ ID NO: 166) |
| downstream | |
| NGS ZooTsy- | ctttccctacacgacgctcttccga |
| comM upstream | tctctgggttgaaggctctcaaggg |
| | c |
| | (SEQ ID NO: 167) |
| NGS ZooTsy- | ctttccctacacgacgctcttccga |
| comM | tctgtgtgcttctcaaatgcctgag |
| downstream | gtttc |
| | (SEQ ID NO: 168) |
| NGS ZooTsy- | gactggagttcagacgtgtgctctt |
| end1 (for | ccgatctctgcaagtaatgcgacat |
| upstream- | tgg |
| end1 | (SEQ ID NO: 169) |
| junction) | |
| NGS ZooTsy- | ctttccctacacgacgctcttccga |
| end1 (for | tctcctttatagtcagtgggttatc |
| circularized | cg |
| donor | (SEQID NO: 170) |
| junction) | |
| NGS KanR- | gactggagttcagacgtgtgctctt |
| cargo | ccgatctttcgagatcatgcatgag |
| upstream | ctcac |
| | (SEQ ID NO: 171) |
| NGS KanR- | gactggagttcagacgtgtgctctt |
| cargo | ccgatcttgaggatccaacatttcc |
| downstream | aatcactag |
| | (SEQ ID NO: 172) |
| pDonor | ctgcaagtaatgcgacattgg |
| (ZooTsy) | (SEQ ID NO: 173) |
| ddPCR | |
| for end1 | |
| pTarget | atcaaaactggtgaaactcacccag |
| ddPCR for | (SEQ ID NO: 174) |
| CmR1 | |
| pTarget | gtgttcacccttgttacaccgtttt |
| ddPCR for | c |
| CmR2 | (SEQ ID NO: 175) |

TABLE 9

| Probe | |
|---|---|
| description | Probe sequence |
| pTarget | tgcgttgatgcaattt |
| ddPCR TcR | ctatgcgcacccgt |
| | (SEQ ID NO: 176) |
| pDonor | tgtccacacccatgag |
| (CyCAST) | tggacaacttatgc |
| ddPCR | (SEQ ID NO: 177) |
| for RE | |
| pDonor | tcatgataagaaaaca |
| (AjTn6022) | ataggttgccactc |
| ddPCR | (SEQ ID NO: 178) |
| for RE | |
| pDonor | caacgaacaaggcaaa |
| (ZooTsy) | aattcggataaccc |
| ddPCR for | (SEQ ID NO: 179) |
| end1 | |
| pTarget | aggttttcaccgtaac |
| ddPCR CmR | acgccacatcttgc |
| | (SEQ ID NO: 180) |

### Purification of TniQ and TnsF Proteins

[0419] Each protein expression vector was transformed into BL21 (DE3) Competent Cells (NEB). A 4 mL of starter culture was grown in TB supplemented with 100 μg/ml ampicillin for 12 h, which was used to inoculate 2 L of TB for growth at 37° C. and 150 rpm until an OD600 of 0.6. Protein expression was induced by supplementation with IPTG to a final concentration of 0.5 mM. The cells were incubated at 16° C. for 16 h for protein expression, and then harvested by centrifugation for 20 min at 4° C. at 4000 rpm (Beckman Coulter Avanti J-E, rotor JLA9.100). All subsequent steps were performed at 4° C. Cell pellet was resuspended in 200 mL of lysis buffer (50 mM Tris-HCl, 500 mM NaCl, 5% glycerol, 1 mM DTT, pH 8.0) supplemented with complete Protease Inhibitor Cocktail (Millipore sigma 4693116001). Cells were disrupted by the LM20 Microfluidizer system at 28,000 PSI. Lysate was cleared by centrifugation for 30 min at 4° C. at 9000 rpm (Beckman Coulter Avanti J-E, rotor JLA-10.500). The cleared lysate was applied to 1 mL of packed Strep-Tactin Sepharose resin (IBA) and incubated with rotation for 1 h, followed by washing of the protein-bound beads in 50 mL of lysis buffer. The proteins were cleaved off by Ulp1 SUMO protease OR SENP at 4° C. for 16 h. Resulting TniQ proteins were concentrated by an Amicon Ultra Centrifugal Filter Units (Millipore), and its concentration were estimated by NuPAGE (Invitrogen) and eStain L1 Protein Staining System (GenScript). The concentrated protein was loaded onto a gel filtration column (Superdex 200 Increase 10/300 GL, GE Healthcare) equilibrated with storage buffer (50 mM Tris-HCl, 250 mM NaCl, 5% glycerol, 1 mM DTT, pH 8.0) via FPLC. The resulting fractions from gel filtration were analyzed and the fractions containing the protein were pooled, and stored at −80° C. To purify TwinStrep-bdSUMO-TnsF of AjTn6022, the bound bdSUMO-tagged proteins were eluted in 10 mL of lysis buffer supplemented with 2.5 mM desthiobiotin (Sigma) instead of digestion by SENP.

### Pull-Down Experiments for Detecting AjTn6022 TniQ Tnsl Interactions

[0420] TwinStrep-bdSUMO-TnsF was mixed with each purified TniQ protein in the assembly buffer (25 mM Tris-HCl, 250 mM NaCl, 1 mM DTT, pH 8.0) and incubated at 37° C. for 1 hour. The reaction was mixed with pre-washed Strep-Tactin Magnetic Microbeads (IBA) and further incubated at 4° C. for 30 min. The beads were washed three times with the wash buffer (25 mM Tris-HCl, 250 mM NaCl, 1 mM DTT, 0.05% Tween20, pH 8.0). Then, the protein complex on the beads were eluted and denatured in NuPAGE LDS sample buffer at 95° C. for 10 min. Samples were loaded on NuPAGE 4 to 12%, Bis-Tris Gel, separated by electrophoresis, and stained with Imperial Protein Stain (ThermoFisher Scientific).

### Electrophoretic Mobility Shift Assay (EMSA) for Detecting Tnsl-DNA Interactions

[0421] Purified PCR amplicons and oligos (HPLC purified, IDT) were used as DNA probes in the assay. For DNA-protein complex assembly, 20 ng DNA probe was mixed with purified AjTn6022 TnsF protein or ZooTsy nuclease-dead TnsF-Y584F mutant protein at different DNA: protein molecular ratio in assembly buffer (25 mM Tris-HCl, 50 mM NaCl, 1% glycerol, 5 mM MgCl₂, pH 8.0), and incubated at 37° C. for 1 hour. Samples were mixed with Novex Hi-Density TBE Sample Buffer (ThermoFischer Scientific) and loaded on pre-equilibrated Novex 6% TBE Gel (ThermoFischer Scientific) in 0.5X TBE buffer for electrophoresis. Gel images were captured by SYBR Gold-staining.

### Data and Code Availability

[0422] The Illumina NGS and Oxford Nanopore Technologies (ONT) sequencing data generated during this study are available at SRA (SRA: PRJNA913200). The code for transposition junction NGS reads analysis is provided on GitHub.

[0423] Various modifications and variations of the described methods, pharmaceutical compositions, and kits of the invention will be apparent to those skilled in the art without departing from the scope and spirit of the invention. Although the invention has been described in connection with specific embodiments, it will be understood that it is capable of further modifications and that the invention as claimed should not be unduly limited to such specific embodiments. Indeed, various modifications of the described modes for carrying out the invention that are obvious to those skilled in the art are intended to be within the scope of the invention. This application is intended to cover any variations, uses, or adaptations of the invention following, in general, the principles of the invention and including such departures from the present disclosure come within known customary practice within the art to which the invention pertains and may be applied to the essential features herein before set forth.

1. An engineered CRISPR-associated transposon (CAST) system comprising:
(a) one or more Type I-D Cas proteins;
(b) one or more CRISPR-associated Tn7 transposases or functional fragments thereof linked to or otherwise capable of associating with the one or more Type I-D Cas proteins; and
(c) a guide molecule capable of forming a complex with the one or more Type I-D Cas proteins and directing sequence-specific binding of the complex to a target polynucleotide.

2. The engineered system of claim 1, wherein the one or more Type I-D Cas proteins comprise Cas5, Cas6, Cas7, and/or Cas10d, and optionally further comprise Cas1, Cas2, and/or Cas3d.

3. (canceled)

4. The engineered system of claim 1, wherein the one or more CRISPR-associated Tn7 transposases comprise (i) TnsA, TnsB, and TnsC; or (ii) TnsAB and TnsC, and optionally further comprise TniQ, TnsE, or TnsF.

5. (canceled)

6. (canceled)

7. (canceled)

8. The engineered system of claim 4, wherein the one or more CRISPR-associated Tn7 transposases further comprise a first TniQ, and a second TniQ, wherein the first TniQ and the second TniQ are different.

9. The engineered system of claim 8, wherein TniQ is derived from a first species, and the one or more Type I-D Cas proteins is derived from a second species different from the first species, or wherein the one or more CRISPR-associated Tn7 transposases are derived from a first species, and the one or more Type I-D Cas proteins are derived from a second species different from the first species.

10. (canceled)

11. The engineered system of claim 1, wherein the target polynucleotide comprises a protospacer adjacent motif (PAM), wherein the PAM optionally comprises the nucleotide sequence GTT.

12. (canceled)

13. The engineered system of claim 1, wherein the target polynucleotide comprises linear DNA, circular DNA, or genomic DNA.

14. The engineered system of claim 1, further comprising a plurality of guide molecules capable of forming a complex with the one or more Type I-D Cas proteins and directing sequence specific binding of the complex to one or more target polynucleotides.

15. A system comprising one or more polynucleotides encoding the components of claim 1.

16. The system of claim 15, further comprising a donor polynucleotide, wherein the donor polynucleotide optionally comprises a polynucleotide insert, a left element sequence, and a right element sequence.

17. (canceled)

18. A vector comprising one or more polynucleotides encoding the components of claim 1, and optionally further comprising a donor polynucleotide, wherein the donor polynucleotide optionally comprises a polynucleotide insert, a left element sequence, and a right element sequence.

19. (canceled)

20. (canceled)

21. An engineered cell comprising the system of claim 1, wherein the cell optionally produces and/or secretes an endogenous or non-endogenous biological product or chemical compound, wherein the biological product optionally comprises a protein or an RNA.

22. (canceled)

23. (canceled)

24. A cell line comprising the engineered cell of claim 21, or composition comprising the engineered cell of claim 21, wherein the composition is optionally formulated for use as a therapeutic.

25. (canceled)

26. (canceled)

27. A biological product or chemical compound produced by the engineered cell of claim 21, wherein the biological product optionally comprises a mutated protein or product provided by a template.

28. (canceled)

29. An engineered cell or progeny thereof, said cell or progeny thereof being engineered by use of the system of claim 1, wherein the cell or progeny thereof optionally produces and/or secretes an endogenous or non-endogenous biological product or chemical compound, wherein the biological product optionally comprises a protein or an RNA, and wherein the protein optionally comprises a mutation, and wherein the cell or progeny thereof optionally comprises a mutation in a protein expressed from a gene comprising the target sequence, and wherein the cell or progeny thereof optionally comprises a deletion of a genomic region comprising the target sequence, decreased transcription of a gene associated with the target sequence, or increased transcription of a gene associated with the target sequence.

30. (canceled)

31. (canceled)

32. (canceled)

33. (canceled)

34. (canceled)

35. (canceled)

36. (canceled)

37. A pharmaceutical composition for treatment of a disease or disorder, comprising the cell or progeny thereof of claim 29, wherein the treatment optionally results in genetic changes in one or more cells, correction of one or more defective genotypes, or improved phenotype.

38. (canceled)

39. (canceled)

40. (canceled)

41. (canceled)

42. (canceled)

43. (canceled)

44. (canceled)

45. A method of inserting a donor polynucleotide into a target polynucleotide in a cell, said method comprising introducing into the cell the system of claim 1, wherein the donor polynucleotide optionally:
(a) introduces one or more mutations to the target polynucleotide;
(b) corrects a premature stop codon in the target polynucleotide;
(c) disrupts a splicing site;
(d) restores a splicing site; or
(e) a combination thereof,
and wherein the mutations optionally comprise substitutions, deletions, insertions, or a combination thereof, and wherein the mutations optionally cause a shift in an open reading frame on the target polynucleotide.

46. (canceled)

47. (canceled)

48. (canceled)

49. (canceled)

50. The method of claim 45, wherein insertion of the donor polynucleotide into the target polynucleotide in the cell results in:
(a) a cell or population of cells comprising altered expression levels of one or more gene products; or
(b) a cell or population of cells that produces and/or secretes an endogenous or non-endogenous biological product or chemical compound,
and wherein the target polynucleotide optionally comprises linear DNA, circular DNA, or genomic DNA, and wherein the one or more components of the engineered system optionally is expressed from a nucleic acid operably linked to a regulatory sequence or is introduced into a particle for delivery into a cell.

51. (canceled)

52. (canceled)

53. (canceled)

54. An engineered system comprising one or more Tn7 transposases or functional fragments thereof comprising:
(a) TnsA, TnsB, TnsC, and TnsF; or
(b) TnsAB, TnsC, and TnsF.

55. The engineered system of claim 54, optionally further comprising TniQ, and optionally further comprising:
(a) one or more Cas proteins, wherein the Cas proteins optionally comprise a Type I, a Type II, or a Type V Cas protein, and optionally further comprise a catalytically inactivated Cas protein; and
(b) a guide molecule capable of forming a complex with the one or more Cas proteins and directing sequence-specific binding of the complex to a target polynucleotide, wherein the Tn7 transposases are optionally derived from a first species and the Cas proteins are optionally derived from a second species different from the first species.

56. (canceled)

57. (canceled)

58. (canceled)

59. (canceled)

60. (canceled)

61. A system comprising one or more polynucleotides encoding the components of claim 54, optionally further comprising a donor polynucleotide, wherein the donor polynucleotide optionally comprises a polynucleotide insert, a left element sequence, and a right element sequence.

62. (canceled)

63. (canceled)

64. A vector comprising one or more polynucleotides encoding the components of claim 54, and optionally further comprising a donor polynucleotide, wherein the donor polynucleotide optionally comprises a polynucleotide insert, a left element sequence, and a right element sequence.

65. (canceled)

66. (canceled)

67. An engineered cell comprising the system of any one of claim 54, or the vector of claim 64, wherein the cell optionally produces and/or secretes an endogenous or non-endogenous biological product or chemical compound, and wherein the biological product optionally comprises a protein or an RNA.

68. (canceled)

69. (canceled)

70. A cell line comprising the engineered cell of claim 67, or a composition comprising the engineered cell of claim 67, wherein the composition is optionally formulated for use as a therapeutic.

71. (canceled)

72. (canceled)

73. A biological product or chemical compound produced by the engineered cell of claim 67, wherein the biological product optionally comprises a mutated protein or product provided by a template.

74. (canceled)

75. An engineered cell or progeny thereof, said cell or progeny thereof being engineered by use of the system of any one of claim 54, wherein the cell or progeny thereof optionally produces and/or secretes an endogenous or non-endogenous biological product or chemical compound, wherein the biological product optionally comprises a protein or an RNA, wherein the protein optionally comprises a mutation, and wherein the cell or progeny thereof optionally is isolated or is further used as a therapeutic.

76. (canceled)

77. (canceled)

78. (canceled)

79. (canceled)

80. (canceled)

81. (canceled)

82. (canceled)

83. A pharmaceutical composition for treatment of a disease or disorder, comprising the cell or progeny thereof of claim 75, wherein the treatment optionally results in genetic changes in one or more cells, correction of one or more defective genotypes, or improved phenotype.

84. (canceled)

85. (canceled)

86. (canceled)

87. The engineered cell or progeny thereof of claim 75, wherein the cell or progeny thereof comprises a mutation in a protein expressed form from a gene comprising the target sequence, and wherein the cell or progeny thereof optionally comprises a deletion of a genomic region comprising the target sequence, decreased transcription of a gene associated with the target sequence, or increased transcription of a gene associated with the target sequence.

88. (canceled)

89. (canceled)

90. (canceled)

91. A method of inserting a donor polynucleotide into a target polynucleotide in a cell, said method comprising introducing into the cell the system of claim 54, wherein the donor polynucleotide optioinally:
(a) introduces one or more mutations to the target polynucleotide;
(b) corrects a premature stop codon in the target polynucleotide;
(c) disrupts a splicing site;
(d) restores a splicing site; or
e) a combination thereof,
wherein the one or more mutations optionally comprises substitutions, deletions, insertions, or a combination thereof, wherein the one or more mutations optionally causes a shift in an open reading frame on the target polynucleotide, and wherein the donor polynucleotide is optionally between 100 bases and 30 kilobases in length.

92. (canceled)

93. (canceled)

94. (canceled)

95. (canceled)

96. The method of claim 91, wherein insertion of the donor polynucleotide into the target polynucleotide in the cell results in:
(a) a cell or population of cells comprising altered expression levels of one or more gene products; or
(b) a cell or population of cells that produces and/or secretes an endogenous or non-endogenous biological product or chemical compound,
and wherein the target polynucleotide optionally comprises linear DNA, circular DNA, or genomic DNA, and wherein the one or more components of the engineered system optionally is expressed from a nucleic acid operably linked to a regulatory sequence or is introduced into a particle for delivery into a cell.

97. (canceled)

98. (canceled)

99. (canceled)

100. An engineered system comprising:
(a) one or more tyrosine recombinases;
(b) one or more helix-turn-helix (HTH) domain proteins; and
(c) one or more TnsF homologs comprising a catalytic nuclease domain.

101. The engineered system of claim 100, optionally further comprising one or more Cas proteins, wherein the Cas proteins optionally comprise a Type I, Type II, or Type V Cas protein, optionally comprise a catalytically inactivated Cas protein, and a guide molecule capable of forming a complex with the one or more Cas proteins and directing sequence-specific binding of the complex to a target polynucleotide, and optionally further comprising a plurality of guide molecules capable of forming a complex with the one or more Cas proteins and directing sequence-specific binding of the complex to one or more target polynucleotides, and optionally further comprising one or more GIY-YIG nucleases.

102. (canceled)

103. (canceled)

104. (canceled)

105. (canceled)

106. A system comprising one or more polynucleotides encoding the components of claim 100, and optionally further comprising a donor polynucleotide, wherein the donor polynucleotide optionally comprises a polynucleotide insert, a left element sequence, and a right element sequence.

107. (canceled)

108. (canceled)

109. A vector comprising one or more polynucleotides encoding the components of claim 100, and optionally further comprising a donor polynucleotide, wherein the donor polynucleotide optionally comprises a polynucleotide insert, a left element sequence, and a right element sequence.

110. (canceled)

111. (canceled)

112. An engineered cell comprising the system of claim 100, wherein the cell optionally produces and/or secretes an endogenous or non-endogenous biological product or chemical compound, and wherein the biological product optionally comprises a protein or an RNA.

113. (canceled)

114. (canceled)

115. A cell line comprising the engineered cell of claim 112, or a composition comprising the engineered cell of claim 112, wherein the composition is optionally formulated for use as a therapeutic.

116. (canceled)

117. (canceled)

118. A biological product or chemical compound produced by the engineered cell of claim 112, wherein the biological product optionally comprises a mutated protein or product provided by a template.

119. (canceled)

120. An engineered cell or progeny thereof, said cell or progeny thereof being engineered by use of the system of claim 100, wherein the cell or progeny thereof optionally produces and/or secretes an endogenous or non-endogenous biological product or chemical compound, wherein the biological product optionally comprises a protein or an RNA, wherein the protein optionally comprises a mutation, and wherein the cell or progeny thereof optionally is isolated or is further used as a therapeutic.

121. (canceled)

122. (canceled)

123. (canceled)

124. (canceled)

125. (canceled)

126. (canceled)

127. (canceled)

128. A pharmaceutical composition for treatment of a disease or disorder, comprising the cell or progeny thereof of claim 120, wherein the treatment optionally results in genetic changes in one or more cells, correction of one or more defective genotypes, or improved phenotype.

129. (canceled)

130. (canceled)

131. (canceled)

132. The engineered cell or progeny thereof of claim 120, wherein the cell or progeny thereof comprises a mutation in a protein expressed from a gene comprising the target sequence, and wherein the cell or progeny thereof optionally comprises a deletion of a genomic region comprising the target sequence, decreased transcription of a gene associated with the target sequence, or increased transcription of a gene associated with the target sequence.

133. (canceled)

134. (canceled)

135. (canceled)

136. A method of inserting a donor polynucleotide into a target polynucleotide in a cell, said method comprising introducing into the cell the system of claim 100, wherein the donor polynucleotide optionally:
(a) introduces one or more mutations to the target polynucleotide;
(b) corrects a premature stop codon in the target polynucleotide;
(c) disrupts a splicing site;
(d) restores a splicing site; or
(e) a combination thereof,
wherein the one or more mutations optionally comprises substitutions, deletions, insertions, or a combination thereof, wherein the one or more mutations optionally causes a shift in an open reading frame on the target polynucleotide, and wherein the donor polynucleotide is optionally between 100 bases and 30 kilobases in length.

137. (canceled)

138. (canceled)

139. (canceled)

140. (canceled)

141. The method of claim 136, wherein insertion of the donor polynucleotide into the target polynucleotide in the cell results in:
(a) a cell or population of cells comprising altered expression levels of one or more gene products; or
(b) a cell or population of cells that produces and/or secretes an endogenous or non-endogenous biological product or chemical compound,
and wherein the target polynucleotide optionally comprises linear DNA, circular DNA, or genomic DNA, and wherein the one or more components of the engineered system optionally is expressed from a nucleic acid operably linked to a regulatory sequence or is introduced into a particle for delivery into a cell.

142. (canceled)

143. (canceled)

144. (canceled)

145. (canceled)

146. (canceled)

147. (canceled)

148. (canceled)

149. (canceled)

150. (canceled)

The application's sequence listing, which the Patent Office published only in electronic form, follows.

SEQUENCE LISTING (6384 sequences)

SEQ ID NO: 1 - DNA, 130 bp, synthetic construct
  misc_feature 1..130: note = Synthetic
  source 1..130: mol_type = other DNA
cagtgcatcgttaactgcgatggtaggcggtggcgcaattccagggcccggtgaaatttcgctggcgcataacggcgtgctttttcttgatgagctacctgaatttgaacggcgtacactggatgccttg

SEQ ID NO: 2 - protein, 43 aa, synthetic construct
  REGION 1..43: note = Synthetic
SASLTAMVGGGAIPGPGEISLAHNGVLFLDELPEFERRTLDAL

SEQ ID NO: 3 - DNA, 130 bp, synthetic construct
  misc_feature 1..130: note = Synthetic
  source 1..130: mol_type = other DNA
tacagcttctgcggttgccttagtcggtggcgggtcacaacccaaacccggtgaaattactttggcacataaaggcgtgctgtttttagatgaactaccagagtttgaccgcaaggttttagaggtttta

SEQ ID NO: 4 - protein, 43 aa, synthetic construct
  REGION 1..43: note = Synthetic
TASAVALVGGGSQPKPGEITLAHKGVLFLDELPEFDRKVLEVL

SEQ ID NO: 5 - DNA, 130 bp, synthetic construct
  source 1..130: mol_type = other DNA
  misc_feature 1..130: note = Synthetic
cacggcttcgaccgcagcactggtcggtggaggcggcacgccccgccccggcgagatcagcctggcgcacaacggcgtgctgtacctggacgagctgccggaattcgaccgacgtgtgctcgaggccctg

SEQ ID NO: 6 - protein, 43 aa, synthetic construct
  REGION 1..43: note = Synthetic
TASTAALVGGGGTPRPGEISLAHNGVLYLDELPEFDRRVLEAL

SEQ ID NO: 7 - protein, 14 aa, synthetic construct
  REGION 1..14: note = Synthetic
RLLCLGLTLHDYNK

SEQ ID NO: 8 - protein, 14 aa, synthetic construct
  REGION 1..14: note = Synthetic
RLFCLGLTLHDYNK

SEQ ID NO: 9 - protein, 14 aa, synthetic construct
  REGION 1..14: note = Synthetic
RLLCLGFTFQGYNN

SEQ ID NO: 10 - protein, 14 aa, synthetic construct
  REGION 1..14: note = Synthetic
RLLCLGFTFQGYRN

SEQ ID NO: 11 - protein, 14 aa, synthetic construct
  REGION 1..14: note = Synthetic
RLLCLGFTFQGYGH

SEQ ID NO: 12 - protein, 14 aa, synthetic construct
  REGION 1..14: note = Synthetic
RLLCLSLIFQNDNS

SEQ ID NO: 13 - protein, 14 aa, synthetic construct
  REGION 1..14: note = Synthetic
CLLCVWFTLQGYNS

SEQ ID NO: 14 - protein, 14 aa, synthetic construct
  REGION 1..14: note = Synthetic
RLICLGLTLHDYNK

SEQ ID NO: 15 - protein, 14 aa, synthetic construct
  REGION 1..14: note = Synthetic
KLLCLGLTLHDYNK

SEQ ID NO: 16 - protein, 14 aa, synthetic construct
  REGION 1..14: note = Synthetic
HLLCLGLTLHDYNK

SEQ ID NO: 17 - DNA, 47 bp, synthetic construct
  source 1..47: mol_type = other DNA
  misc_feature 1..47: note = Synthetic
caccgggtttgggttgtgacccgctgtcatttacagcaatagataag

SEQ ID NO: 18 - DNA, 49 bp, synthetic construct
  misc_feature 1..49: note = Synthetic
  source 1..49: mol_type = other DNA
gtaaactctgatttatttgtggaactgacacccgccaccgactaaggca

SEQ ID NO: 19 - DNA, 174 bp, synthetic construct
  source 1..174: mol_type = other DNA
  misc_feature 1..174: note = Synthetic
ttattggaagcgctaaggaatattggagaatcccagtcgaagttctgatttagccaatgtagcaacgaacaaggcaaaaattcggataacccactgactataaaggaatcccaaagtatccaatgtcgcattacttgcaggaatcctgtgagtgatgtcacagcattagaagta

SEQ ID NO: 20 - DNA, 10 bp, synthetic construct
  source 1..10: mol_type = other DNA
  misc_feature 1..10: note = Synthetic
ggcgtgctgt

SEQ ID NO: 21 - DNA, 10 bp, synthetic construct
  source 1..10: mol_type = other DNA
  misc_feature 1..10: note = Synthetic
tgtcgtgcgg

SEQ ID NO: 22 - DNA, 10 bp, synthetic construct
  misc_feature 1..10: note = Synthetic
  source 1..10: mol_type = other DNA
ccgcacgaca

SEQ ID NO: 23 - DNA, 10 bp, synthetic construct
  misc_feature 1..10: note = Synthetic
  source 1..10: mol_type = other DNA
acagcacgcc

SEQ ID NO: 24 - DNA, 10 bp, synthetic construct
  misc_feature 1..10: note = Synthetic
  source 1..10: mol_type = other DNA
aatacatcac

SEQ ID NO: 25 - DNA, 10 bp, synthetic construct
  source 1..10: mol_type = other DNA
  misc_feature 1..10: note = Synthetic
ctgtggctgg

SEQ ID NO: 26 - DNA, 10 bp, synthetic construct
  source 1..10: mol_type = other DNA
  misc_feature 1..10: note = Synthetic
cactatcaaa

SEQ ID NO: 27 - protein, 7 aa, unidentified
  source 1..7: note = Simian virus 40
PKKKRKV

SEQ ID NO: 28 - protein, 16 aa, unidentified
  source 1..16: note = Simian virus 40
KRPAATKKAGQAKKKK

SEQ ID NO: 29 - protein, 9 aa, Homo sapiens
PAAKRVKLD

SEQ ID NO: 30 - protein, 11 aa, Homo sapiens
RQRRNELKRSP

SEQ ID NO: 31 - protein, 38 aa, Homo sapiens
NQSSNFGPMKGGNFGGRSSGPYGGGGQYFAKPRNQGGY

SEQ ID NO: 32 - protein, 41 aa, Homo sapiens
RMRIZFKNKGKDTAELRRRRVEVSVELRKAKKDEQILKRRN

SEQ ID NO: 33 - protein, 8 aa, Homo sapiens
VSRKRPRP

SEQ ID NO: 34 - protein, 8 aa, Homo sapiens
PPKKARED

SEQ ID NO: 35 - protein, 8 aa, Homo sapiens
PQPKKKPL

SEQ ID NO: 36 - protein, 12 aa, Mus sp.
SALIKKKKKMAP

SEQ ID NO: 37 - protein, 5 aa, unidentified
  source 1..5: note = Influenza virus
DRLRR

SEQ ID NO: 38 - protein, 7 aa, unidentified
  source 1..7: note = Influenza virus
PKQKKRK

SEQ ID NO: 39 - protein, 10 aa, unidentified
  source 1..10: note = Hepatitis delta virus
RKLKKKIKKL

SEQ ID NO: 40 - protein, 10 aa, Mus sp.
REKKKFLKRR

SEQ ID NO: 41 - protein, 20 aa, Homo sapiens
KRKGDEVDGVDEVAKKKSKK

SEQ ID NO: 42 - protein, 17 aa, Homo sapiens
RKCLQAGMNLEARKTKK

SEQ ID NO: 43 - protein, 4 aa, synthetic construct
  REGION 1..4: note = Synthetic
GGGS

SEQ ID NO: 44 - protein, 5 aa, synthetic construct
  REGION 1..5: note = Synthetic
GGGGS

SEQ ID NO: 45 - protein, 9 aa, synthetic construct
  REGION 1..9: note = Synthetic
GGSGGSGGS

SEQ ID NO: 46 - protein, 15 aa, synthetic construct
  REGION 1..15: note = Synthetic
GGGGSGGGGSGGGGS

SEQ ID NO: 47 - protein, 20 aa, synthetic construct
  REGION 1..20: note = Synthetic
GGGGSGGGGSGGGGSGGGGS

SEQ ID NO: 48 - protein, 25 aa, synthetic construct
  REGION 1..25: note = Synthetic
GGGGSGGGGSGGGGSGGGGSGGGGS

SEQ ID NO: 49 - protein, 30 aa, synthetic construct
  REGION 1..30: note = Synthetic
GGGGSGGGGSGGGGSGGGGSGGGGSGGGGS

SEQ ID NO: 50 - protein, 35 aa, synthetic construct
  REGION 1..35: note = Synthetic
GGGGSGGGGSGGGGSGGGGSGGGGSGGGGSGGGGS

SEQ ID NO: 51 - protein, 40 aa, synthetic construct
  REGION 1..40: note = Synthetic
GGGGSGGGGSGGGGSGGGGSGGGGSGGGGSGGGGSGGGGS

SEQ ID NO: 52 - protein, 45 aa, synthetic construct
  REGION 1..45: note = Synthetic
GGGGSGGGGSGGGGSGGGGSGGGGSGGGGSGGGGSGGGGSGGGGS

SEQ ID NO: 53 - protein, 50 aa, synthetic construct
  REGION 1..50: note = Synthetic
GGGGSGGGGSGGGGSGGGGSGGGGSGGGGSGGGGSGGGGSGGGGSGGGGS

SEQ ID NO: 54 - protein, 55 aa, synthetic construct
  REGION 1..55: note = Synthetic
GGGGSGGGGSGGGGSGGGGSGGGGSGGGGSGGGGSGGGGSGGGGSGGGGSGGGGS

SEQ ID NO: 55 - protein, 60 aa, synthetic construct
  REGION 1..60: note = Synthetic
GGGGSGGGGSGGGGSGGGGSGGGGSGGGGSGGGGSGGGGSGGGGSGGGGSGGGGSGGGGS

SEQ ID NO: 56 - protein, 65 aa, synthetic construct
  REGION 1..65: note = Synthetic
GGGGSGGGGSGGGGSGGGGSGGGGSGGGGSGGGGSGGGGSGGGGSGGGGSGGGGSGGGGSGGGGS

SEQ ID NO: 57 - protein, 70 aa, synthetic construct
  REGION 1..70: note = Synthetic
GGGGSGGGGSGGGGSGGGGSGGGGSGGGGSGGGGSGGGGSGGGGSGGGGSGGGGSGGGGSGGGGSGGGGS

SEQ ID NO: 58 - protein, 75 aa, synthetic construct
  REGION 1..75: note = Synthetic
GGGGSGGGGSGGGGSGGGGSGGGGSGGGGSGGGGSGGGGSGGGGSGGGGSGGGGSGGGGSGGGGSGGGGSGGGGS

SEQ ID NO: 59 - protein, 10 aa, synthetic construct
  REGION 1..10: note = Synthetic
GGGGSGGGGS

SEQ ID NO: 60 - protein, 32 aa, synthetic construct
  REGION 1..32: note = Synthetic
LEPGEKPYKCPECGKSFSQSGALTRHQRTHTR

SEQ ID NO: 61 - protein, 20 aa, synthetic construct
  REGION 1..20: note = Synthetic
PKKKRKVEASSPKKRKVEAS

SEQ ID NO: 62 - DNA, 27 bp, synthetic construct
  misc_feature 1..27: note = Synthetic
  source 1..27: mol_type = other DNA
ggtggtagtggagggagcggcggttca

SEQ ID NO: 63 - protein, 21 aa, synthetic construct
  REGION 1..21: note = Synthetic
GGSGGSGGSGGSGGSGGSGGS

SEQ ID NO: 64 - DNA, 72 bp, synthetic construct
  misc_feature 1..72: note = Synthetic
  source 1..72: mol_type = other DNA
ggtggaggaggctctggtggaggcggtagcggaggcggagggtcgggtggtagtggagggagcggcggttca

SEQ ID NO: 65 - DNA, 48 bp, synthetic construct
  misc_feature 1..48: note = Synthetic
  source 1..48: mol_type = other DNA
tcgggatctgagacgcctgggacctcggaatcggctacgcccgaaagt

SEQ ID NO: 66 - DNA, 192 bp, synthetic construct
  source 1..192: mol_type = other DNA
  misc_feature 1..192: note = Synthetic
gtggataacaaatttaacaaagaaatgtgggcggcgtgggaagaaattcgtaacctgccgaacctgaacggctggcagatgaccgcgtttattgcgagcctggtggatgatccgagccagagcgcgaacctgctggcggaagcgaaaaaactgaacgatgcgcaggcgccgaaaaccggcggtggttctggt

SEQ ID NO: 67 - DNA, 108 bp, synthetic construct
  misc_feature 1..108: note = Synthetic
  source 1..108: mol_type = other DNA
ggtggttctgccggtggctccggttctggctccagcggtggcagctctggtgcgtccggcacgggtactgcgggtggcactggcagcggttccggtactggctctggc

SEQ ID NO: 68 - DNA, 10 bp, synthetic construct
  misc_feature 1..10: note = Synthetic
  source 1..10: mol_type = other DNA
ccccctcccc

SEQ ID NO: 69 - protein, 707 aa, unidentified
  source 1..707: note = Cyanothece sp.
MKVFLKPLYSQLNPGIGHCPLGCEQVCQVQQQAPSLQPPPGYTCPLSIHQANTCAKVVQGTADVIFNKAATGDGKSLAAYAPSLLNPNVRIMGLYPTIELVEDQTRSQQGWHSMFRLDADERIDRLFGEELSRRVQEAETSNKFQELLLAIQQKPILLTNPDIFHLITHFQYRDPAYGNDLLPLALAEFPDLWVFDEFHIFGPHQEAAVLNSMTLIRRTQSDQRPRRFLFTSATPKPDFINQLQQSGLHTVEITGSYASEPTPGFRQVLQPVELEFVNLKDSDSLGWLAENANIIRDILQTESQGRGLVILNSVAQAGRAARLLAELLPNILVREISGRIDRQGRSETQLDLRNCPQPVLVIGTSAVDVGVDFKIHLLIFESSDSATVIQRLGRLGRHPGFSSYRAFVLLSGRAPWVMARLQERLQPDQLIERSELQEAIVEAFDAPKEFQEYRNRWGAIQAQGMLWKMGEGNSKVMQPVRDRMVADLQKVYGSRLKSWLGDWKNLAKTDVGKETQQELLRFRGGSTLQAAVWDGDRFYTYDLLRLLPYTLVETTTRETFLEAATKAGLEKEAFPKNYIEIYLRVLEWVDDRFNISLHCNWNSSDLKCCELTLLNRLSLVGHLQSEVGRCFYSKKLLAFLVPLGMRQLHWEVSRHLKLSPVFGLHYLIDGSNKQGYACAFNQDALLLDALKSRLTKFCRLQPQSLIF

SEQ ID NO: 70 - protein, 950 aa, unidentified
  REGION 1..950: note = Cyanobacteria bacterium
MATLLQTLLLQTLDLDPVLLAYIETVLPALEQEFGMLSAFDKAWNGWFVQPEELDRMQQATQSSNNLGQSLLICILNSLLIVWNLLSFLRAKLMLSDNEKRLLCLGFTFQGYNNGCLSKATALLPTSDITLGETLNLDAFWMEWREYLSEINYLAQITPKIARKNTSSVKRNTYKISECRLKQPLHQLLLFGTIAAQLSGPADIVVTPEGNCLQELMNELGIARTLIYHRLRNCTGLLTNSIHNAVLQFTEKLDWQPILFFPDGIIYLAPSDSRIPAHIEFQKFVWEQVRDQLIDSISRGEAGFKRDGKGLKAAPQTLELFSPARLIRNLPSIMKAYVRNEKEPATPKRLARLSLDPTEREFLARGAGLRSDRLAEFLILVQREFFRNRPEFIAWILEKLEIQSDITPEQTQRNAGGVNLGWYYAAAHYVTKHSTPNSRNSIPNYFLVELQDLAEQLATWAEQNHLLPTHPNLTREIFYDYVTQYLEIQGWDVQPTSFQRELAGYVNAKTKLAKQPICSLSSGEFLSEDQMDSVVLFKPQQYSNKNQLGGRQLKRGISKIWSLEMLLRQAFWSVPAGKLEDQQPIFLYLFPAFVHAPQITKAIRLLVKQLKQVNLWEICRFWQEHGMDANALRFYPWLRTDLDPNAEDKRDLPFLAVIYTTTKGKTTTDAWIKPAFLAIALPLLLGVKVVATASSVPFYNRGSEFQATVQVDETASFWSLLSLPTTLHLEEHSQGQTKHLSDWLDRLLIAYTIHLDCRAKRPDPQWQAFPGTVQAIVTDVSAIFSLARSRFQSLSDDRVQQYWEFAQIWATGDLDMEQQLELTQRLVQEYRTFYRVHVAKSSHAIVLPLSKVLEDILSTSNDLPIETLILQTAGRLHDALKRQEPYKRPLIMDKSLSIEIRVKNEMQAVHQFVTTCIKDLFLGQYKGDRALLQEHRHRVKSGAEFAYRNL

SEQ ID NO: 71 - protein, 971 aa, unidentified
  source 1..971: note = Oculatella sp.
MATLLQTLLLQTLPADLDPVLLAYIETVLPAVEQKFGMLPVVEGSSNDRFVQLGKLDEVQRVFYSTNDSDQSLLIFILNGLLTVWNLLPFLSKKLALSDSEKRLLCLGFTFQGYRNLWQHSAKTSERTPVILLGETLNLDAFWAGWQEYLPELTYIVPTIYQTAGERIAPTKQSPYKIPEPRLKLLLNQLLTFGKIAAHISDPADIVVTLRGNYLQGVMNELGINRTLIYHRLRNCIGLLTNSIHNAVLQFTEKLDWQPILFFPEGIIYLAPPNSGVPTHIEFQEFAWKQISDRLIDSMLRGEAGFKRDGKGLKAAPQTLELFSPAQLIRNLPSIIKAYVRNEKEPATPKRLVRLSLDSTEQEFLAGGADLRSDRLAEFLILVQREFFRNRPEFIAWILEKLEIQSDITPEQTQRNAGGVNLGWYHAAAHYVAKHPTPNSNNPVPNHFLIELQDLAEQLATWAEQNQLLPTHPNPTREIFYDYVTQYLEIQSWDVQATSFQRELAGYVNAKTKLAKQPICSLSSGEFLSEDQVDSVVLFKPQQYSNKNSLGGRQLKRGISKIWSLEMLLRQAFWSVPAGKLEDQQPIFLYLFPAFVHAPQITKAIRLLVNQLKQVNLWEIRRFWQEHGMDANALRFYPWLRTDLDSNTEDKRDLPFLAVTYTTTKGKTTTDAWIEPAFLAIALPLLLGIKVVATASSVPSYNRGSEFQATAQVDGPASFWSLLGLPTTLHLEEHLQEQSKHLSDWIDRLLIAYTIHLDCRSKPPDSRWQSFPGTVHAIVTDVLAIFSLARSHFQNLSDDKVQQYWEFAQIWAAGDLNMEQQLELTQRLVQEYRMFYRVHVAKSSYAIVLPLSKVLEDILSTSSDLPIETLMLQTAGRLHDALKRQEPYKRPLIMDQSLSIEIRVNNEIQAIHQFVTTCIKDLFLGQYKGDRALLQEHRHRVKSGAEFAYRLLAMQESESKTKQQDVEGAQL

SEQ ID NO: 72 - protein, 915 aa, unidentified
  source 1..915: note = Kovacikia minuta
MTTLLQTLLLQTLPPDLDPVLLAYIKTVLPAVEEPGMISALNGLLTTWNLLPLLNSKFALSDDEKRLLCLGFTFQGYGHPCQSRTFELDTFWAEWREYLPEINYLAQITQQTVGKNSALARKTAYKIPERRLKLPLHQLLSLGTIAAQLTDPADIVTKPAGDRLREHLKALGIDRTLTYHRLRNCTGLLTNSIHNAVLHFTEKLDWQPLLFFAQGVVYLVPSDSELPDRSKVQAFLWEQISGSLATRMLNGKIGCKRAGQGLKVAPQALELIPPAQLIQNLPGVVAVTVKNETDPATLKRLARLDLRPTEREFLARGADLRSDLIAEFVIFLQKEFFGNNPEFITQVLDQLAIRLAITPEQTQVRTGGFYWGWYHAAAYYVASNPHLESEDVTAKLQDLANQLVTWAEEKKLLPVRSSSTREGFDRYLTQHLELPGWDNPEPSFQQELATYIAAKTKAAKQPICSLSSGEFASEEQMDSVVLFKPQQYSNKNPLGGRQLKRGISKIWSLEMLLRQAFWPIPAGKLEERQPIFLYLFPAFVHAPQVTKAIRLLVNQLKRVNLWEIRRFWQEQGMDSNALRFYPWLRDNPNPDENDKRDLPFIAVTYTTTNGKTTTDAWVEPAFLAIALPLLLGMKVVATASPVPLYNSSSEFSAKAQVDGPPSFWHLLGLPTSMHLEEEIQGQGKHLSDWLDRLLIAYSIHLDCQAKPPKTHWQAFPGTVQAISTNITAIFSLAHSHFQSLFDEKVQQYWQFAQIWATGDLEMEQQLELTQRLVQEYRTFYRVHVAKSTHAIVLPLSKVLEDILSTPSDLPFEDMLLQISGRLHDALRRQEPYERPLIMDQSLSFEIRVNNEIQAVHQFVKTCIKDLFLGQYKGDRALLQEHRNRIKSGAEFAYRLQAMQEPKSKTKKQEIEGAQR

SEQ ID NO: 73 - protein, 949 aa, unidentified
  source 1..949: note = Myxacorys californica
MKPLLQTLLLQTLPSDIDPVLLAYVETVLPAVEQEFGLIPVSNDVSQTEQSLLVHILNSLLTAWNLFPFLSSKLALSDNEKRLLCLSLIFQNDNSKCQSRENNSPPTLGVNETLKQYRAFGDKLNLAAFWTEWREYLTDIVYLTQSTQPHALSIKKTALKIPANRLELPLRPLLLFGAIAAQLTDPADIVIKPEGNVLKECLKRLGVQHQLTYHRVRACTGLLTEGIHNAIMRFVQPLDWQSILFFAQGIVYLVPSDSKLLDCSKLQTFIWEQISEQLAISMLRGKVGFKRDGKGMKAAPQTLELFSPAQFIRNLPTVINACVKNETEPATPKRLANLDLDPTDREFLACGADLRSDRIAEFILFLQKKFFGTNPEFIDRVLDQLGIQSAITPEQTQIFSSGVNRGWYHAAAYYVASNPHLDSDDVTIKLQEIANQLVDWAEEKELFPPQISPTREVFNQYLAQYLEFPRWNNSAPSFQHELATYVAAKTKAAKQPICSLSSSEFDSEDQLDSVVLFKPQQYSNKNPLGGWQLKRGISKLWSLEMLLRQSFWSVSAGKLEERQPVFLYFFPSLVHSPQVAKAIRILVNQLKRVNLWKVCRFWQVHGMNANTLRFYSWLKSDPRPDDNGKRDLPFLAITYTTTAGKTTTQAWIEPAFLVLALSLVLGIKVVATASPVPLYNRSSEFPETVKIDGPASFWSLLGLPTSIRLEEKIQGRVKHLNDWLDRLLIAYSIHLDCQANPPDSRWQLFPGTVQAITTDVSAIFSLAHSHFQSLSDDRVQRYWHFAQVWAAGDSNMEQQLELTQRLVQEYRAFYQVHVAKATHAIVLPLLKVLEEILSTPSDLPIETLILQTSGRLHDALKRQEPYKRPLIMDQSLSIEIRVNNEIQAIQRFVTTCINDLFLAQYKGDRALLQEHRNRIKSGAEFAYRLLAMQEPKPKTKKQEIEGAQI

SEQ ID NO: 74 - protein, 295 aa, unidentified
  source 1..295: note = Trichocoleus sp.
MAIALPLVLGIKVTATTSSAPPYNRDSDSEFLTTVQVDGPASFWNLLDLPTRIHLEEERKGQVKHLSDWLNRLLIAYSVHLDCRSKPPDPRWQAFPGTVHAITDDVLAIFSLAHASFPVLSDEIVQRYWKFAQIWTAGNPAMKQQLDITQRLVQEYRVFYQVHVAKSTYAILLPLSKVLEDILSTPSDLPIETLILQTSERLHDALRRQEPKRRPLVKDHSLSIEIRVNNEIQAVHQFVSTCVNDLFLGQYKGDRALLQEHRSRIKSGAEFAYRLLAMEETKPKTKKQEVEGAQL

SEQ ID NO: 75 - protein, 1006 aa, Synechococcus sp.
MTLLQTLLLRTLSEETDPILRAYLATVLPAMEQEFGLIPALGGSEEAQYHLLLQRGSEFAMEKAKRYAEYSDQSLLVHVLNALLTAWNLLPFLSPELILTDAEKRLLCLGLTLHDYNKWCNGEQQQVPDASEIPKILELCQTLGERLNFDAFWAEWREYLTEIGYLAQNTQGKVGINPFKANWGTFKIPDTRRLDSPLRWLLAFGDVAVHLSDPSDIETKTAGNRLRDHLRHLGIHRKLTYHRLRDCTGILTSGIHNAVMHFARELDWQPLLFFAQGVVYLAPQDTGVPDRSELQEFLWEQVSKLLASNMENGQVGFKRDGKGLKVAPQTLELFSPAQLIRNLPSVVKSYVANAKSPATPKRLERLEPSEIEREFLSSSADLRADRTAEFIILAQKEFFADRPEFIAWMLEKLGVQDAITPEQTQFQSGGVNYGWYYVAAYYIARHSTLDLEQLDKKLQEIAEQLATWAEENKLLPEHYSPTREVFYDYLTQYLEVQGWEQPESSFQRELVGYISAKTSKAKHPICSLSSGEFASEDQMDSVVLFKPQQYSNKNPLGGTQIKRGISKIWALEMLLRQIFWSVPAGKLEDQQPVFLYIFPAYVYSPQVAAAIRLMMNELKRINFWDVRKYWLEHGMDAQALRSFSWLTNDDGDAGNSAPSKYSREDLPFMAMHYTTTRGKTVTEAWIEPAFLALALPLLLGVKVVATSSQIPLYDSDKDFKESVKIDGPANFWYALGFPTSLHLQDWIGGRVQNLADNLNRLMVAYCLHLDSRSNPPDACWRKLNDTDFANKHSGLGGTNPPDERWRKLNDTIQQIVASVLNVFSLAKEGLRRSSSKDKRKPTKNEINRYWSYAHIWAEGDTEMETKLKITKRLANEYRQFYRVGIDKSSYAILLPFSKALEHILSVPNDWDDEELIVQGAGQLRAALERQEVYKRPIIQNKEIPFEQRRIQEFEAIQTFMTTCVIDVFGRMCKGDRALLQEHRNRLKSGVEFAYLQLALQDQQATS

SEQ ID NO: 76 - protein, 651 aa, unidentified
  source 1..651: note = Kovacikia minuta
MTTLLQTLLLRTLPPDTDPILRAYIETVLPAMEREFGMIPALGGSEEAHYYLQKQRGNKFAAENARRYASRSDQSLLVHVLNALLTGWNLLPFLSPALAVSEDEKRLFCLGLTLHDYNKWCQGEEDSPHASEVADILKLCNTLGAQLNFDAFWVDWREYLTEIAYLAQNTQGKVGTNLPKTNWGSFKLPDTRRLDSPLRWLLAFGDVAVHLSDPADIVTKTGGDRLREHLRFLGIRRRLVYHRLRNCTGILTNAIHNSVLRFVQEFDWHPILFFAQGIVYLAPLDEEIPDRLSIQEFLWERISQFLAEEMLGGQVGFKRDGKGLKVAPQTLELFSPAQLIRNLPGVIQSYVNNAKSPATPKRLEKLELSQTEREFLARGEDLRADRLAEFIFLAQKEFFGNRPEFIPWMLETLGIQSAITPEQTQLQSGGVNWGWYHAAAYYVASNATLDLNGLSEKLQDFAEHLATWAEENGFFPEHLSPTRDIFSNYLAQYLEVQGWDEQERSFQYELASYTVSKTKAARQPICSLSSGEFASEDQMDSVVLFKPQQYSNKNALGGRQIKRGISKIWSLEMLLRQALWSAPAGKLEEQQPVFLYIFPAYVYSPQVASAIRLLVNDLKRVNLWEIRKHWLQNGMDVEALRSLPWLNTSGD

SEQ ID NO: 77 - protein, 591 aa, unidentified
  source 1..591: note = Trichocoleus sp.
MNSLLIVWSLIPLLNEELALSKDEKCLLCVWFTLQGYNSCYSSRVTAPLLTPDINLGEVLNLDMFWPQWREYLPEIDYLTQITLQNSDNNTSAKRNGFRVPDQRLRLTLHPLLSFSTIAAQLTSPVDIVTTSAGDRLPALLKELGIDRTLIYHRLRNCTGLLTNSIHNAVLNFTEKLNWQPILCFTEGVVYLAPRGFNLLNRMDLQQFIWEQISDQLVTNMLVGEIGFKRDGKGLKAAPQILELLSPAQLIQGLPSIVEATIKNEIDPATPKRLMNLSITTLERKFLSQGADLRSDRIAEFIIFLQKQFFRSNSEFIAWILEQLGIQSAITWEQAQIHTGGVNLGWYHAAAYYVANSPHLDLRSVTRKLQEIASRLTIWAEEKKLFPVLTSATREAFDRYLVQYLELPGWDSPESSFEHELATYMAAKTKAARQPICSLSSGEFVSEAQMASVVPFKPQQYSNKNPLGGRQLKRGISKIWSLEMLLRQAFWSFSPGKLEERQPVFLYFSPTFAHAPPVTKVIHILAKQLERVNLWKIRRFWQEHGMDANALRFYPWLKNELNSNEESQHNLTFLAMTYTTTKGKNNDRCLD

SEQ ID NO: 78 - protein, 394 aa, Leptolyngbya sp.
MTTLLQTLLIRTLPPDTDLILKEFIDTVLPAMETQFGHMTALGGSQAVHEHRLRKMNDAYATEKAQRWASSPDQSLLVHVTNALLLAWTLTPFLSEPLSDNEKRLICLGLTLHDYNKYCQGEEEDVPKAHEVNEILTLCEEMGERLNFSAFWSDWRQYLSEIGFLAQNTQGKIGTNLIGTNWPKFQLRERRLKNPLRPLLRFGDVAVHMANPAELAMPATGRTRPRGKALKDCLEDLGIKGELTYHRLRQPTGILSNRVHNAVLHFTAALDWQPILYFAQGVVYLSPLSPTAPKRETLKKALWQSISQFLESQMMNGEIGFKRDGKGVKVAPQTRELFESTQIIRELPGVIAANVRNEKDPATPKRLASIGMDATERKALMAVADLRCDLIAER

SEQ ID NO: 79 - protein, 985 aa, unidentified
  REGION 1..985: note = Leptolyngbyaceae cyanobacterium
MATLLQMLLISTLSSDTDPTLRQFIDTVLPSMEQEFSSITALGGSYEVHLSRLKHKETAKRWSEKADQSLLVHVLNGLLTAWNLIPFLDDNPLNDDEKRLLCLGLTLHDYNKYCQGEEKDSPKAYEVDSILALCQEMGKRLNFGSFWPEWKSYLSEIGFLAQNTQRKHGSNLVLANWPNFKLRRHRLLNPLRLLLTFGDVAVHMTNPAEVITTTRGDRLQDCLDDLCIPRKLVYHRLRDVTGILSNGIHNAVLAFTKQEKWQPILYFAQGAVYLAPQGTKVPESEKLKSVLWNAIEKILSGAMLGGNIGFKRDGKGVKVSPQTLELFSPEQLIRGLPEVITAKVRNDKAPATPKRLASLELSESELERLAAGSDIRSDQLAELIGLVQKEFFSKTPEFTPWVLEQLKIQDEITTEQTQVQKGGVNYGWYRAAAEYVLKHQTLDTEQFAEMLGQFSTALADWAIEKQLLPETVNSTKDAFLSYLDQYLEISGWDSIGGSFQQELERYTIAKTKASKQPICSLSSGEFISEDQMDSVVLFKPQQYSNKNPLGGGQIKRGISKIWSLEMLLRQSKWAVPPGKMEDQNPIFLYMYPAYVYSPQVAQAVRVFAKDLRQINFWELHKFWINHNLDIHALHQFPWLSEPDPEEWKLKNTQIYGSTGPKQDLPFLGISYTTTRGKTHTDAWAEPAFLSLVIAKFLGIKVVATASQTPLYRSDSDFRESIKLDGLANFWSVLNLPDAIHLEEHHQGRIQRIEDFMQRLLIAYSVHLENQADKPDPRWRALPDTVRQLMSNVLNLFSLAESGCRKRKRDPTPDDAQRYWKYAQLWSQGDAIMEEQISLVKRLAQEYRQFYKVRSTASSHAILLPLTKALDTILSVPPDLPEEDLILEGAGQLKDALERQEVYTRPLLLDKSKDIALRKALELQAIQQFMTTCVEQLFKEQYQKDIALLQENRNRIKSGVEFAYLMLNLEDVQQEAESETETESAA

SEQ ID NO: 80 - protein, 986 aa, unidentified
  source 1..986: note = Leptothoe spongobia
MATLLQTLLINTLAADTDPIFRQFIDTVLPAMEQEFGSITALGGSYEVHLDRLTRKKHPYAEETAQRWANSADQSLLVHVLNGLLTAWNLIPFLPDNDLTDTEKRLLCLGLTLHDYNKYCQGEEDDPPKAYEVDSILALCHEMGQKLNFESFWPEWKDYVSEIGFLAQNTQGKHGTNLAPRNWPDFKLRDRRLLKPLRPLLAFGDVAVHMTNPAEVETTTRKDRLRDHLDSLGISGKLVYHRLRDVTGILSNGIHNAVLAFTAQEDWQPILYFAQGAVYLAPKKTEVPEPDHLKHALWNSIEELLSGAMLGGDIGFKRDGKGVKVSPQTLELFSPEQLIRGLPEVITAKVRNEKSPATPKRLDSLELSETERARLGTVADIRSDRLAELIGLVQKEFFSKTPEFTPWVLEQLKIQDEITPEQTQVQKGGVNYGWYRAAAEYVLKHQTLDTEQFSEILEEFVKALADWATEKQLLPETVNPTKEAFLSYLDQYLEISGWDSVGGSFQQELERYTIAKTKGSKQPICSLSSGEFISEDQMDSVVLFKPQQYSNKNPLGGGQIKRGISKIWSLEMLLRQSKWAVSSGKMEDQQPIFLYMYPAYVYSPQVAKAVRVLVNDLKRVNFWELHKFLIEHDLDINALKQYPWLSETEPEEGRFNDEKYAGQDLPFLGISYTTTRGKTHTDAWAEPAFLSLVIAKFLGIKVVATASQTPLYRSDNDFRESIKLDGLANFWSVLNLPDAIHLEEHHQGHIQRIEDFMQRLLIAYSVHLENQADKPDPRWRALPDTARQLMSNVLNLFSLAESGCRKRKRDPTPDDAQRYWEYAQLWSQGDAIMEEQISLVKRLAQEYRQFYKVRSTASSHAILLPLTKALDTILSVPSDLPEEDLILEGSGQLKDALERQEVYTRPLLLDKSKDIALRKAQELQAIQQFMATCVEQLFKGQYQKDIALLQENRNRIKSGVEFAYLILNLEDAQQETESETETESAA

SEQ ID NO: 81 - protein, 981 aa, unidentified
  REGION 1..981: note = Cyanobacteria bacterium
MTLLQSLLTTTLEVDPDPILQAYIDTIVPAMEKEFGSIPALGGSEAVHFYRLQKQGNTYADSTAKRWAEKADQSLLVHVLNGLLTAWNLFPFLNQDKQLSEIEKRLLCLGLTLHDYNKYCQGEEDDAPKAHEVSEILALCEKLGQLLNFDAFWSDWRLYLADISFLAQNTQYKVGANPVPSNWQTFKLEDSRRLKNPLRPLLAFGDIAVHINDPADVITTTRGNRLREHLRSLQIDRKLMYHRLRDCTGLLSGGIHNAVLYFTEPLDWQPLLFFGQGVIYLAPQNAEVPDRNDVQAVLWEQISQILGSKMLGGEIGFKRDGKGLKVAPQTLELFSPAELIRNLPEVVRTKVGNEKNPATPKRLESLDLGGDELEHLSKGADLRSDRLAEFIFLAQKEFFGNCPEFAPWILQRLGIQNRITPEHTQVQSGGVNYGWYYAAACYVAAHASMRPEELLQTLEEVANDLADWAEENNLLPEHHSPTRDVFLNYLNQYLELSEWDSSVNQFAIEFNNYVAAKTKAAKQPICSLSSGEFISEDQVDSVVLFKPQQYSNKNPLGGRQIKRGISKIWSLEMLLRQALWAVPAGKLEEQQPVFLYLFPAYVYSPQVAKAVRVLINELKRVNFWDLRKFWFEHDMNVQALRHYQWLQNEDEPGRFSSKDYGRRDRRDLPFMAITYTTTREKTTTDAWVEPAFLALALPFLLGIKVVASASPAPLYQSDREFRESVKLDGAANFWNLLGMPSSAHLEEFHQGRILRLEDWLERLLVAYSIHLDCEGEPPKPRWQALPGTVREIMTDVLNVFSLADSAFRDAKRDPKADEVLRYWSFAQIWSKGDVRMEAQLQLTQKLVKEYRRFYQVNTGESSHAILLPLSKALEIILTVPNDLPIEDLIFQGSGQLHDAIARQKPYSRPLIMDKSVAYETRLANELQAIHQFMTTCVKELFGEQYKGDRALLQENRNRIKSGAEFAYRWIALQEKQTKPSV

SEQ ID NO: 82 - protein, 994 aa, unidentified
  source 1..994: note = Halomicronema hongdechloris
MTLLQDLLTTTLQEEPDPVIQRFVETVVPAMEQEFALVPALGGSDAVHRYRLRDDPFCEEKVQRWNQSADQSLLVHVINAILTAWNLQTFLDEDKQLTEEEKKLLCLGLTLHDYNKYCQGEEEDAPKTHEVSEILGLCHKLGHKLNFTDFWQDWENYLGDIGFLAQNTQYKTGTNPRLEVWNPKITDQRRLKNPLRPLLAFGDIAVHMNDPADIVTPKEGNQSRSRGHALREHLETLQIERKLVYHRLRDCTGLLTTGIHNAVLHFTEDLDWKPILFFAQGVVYLAPLDSETPDRETIQAVLWEQIQQLLANKMLSGDIGFKRDGKGLKVAPQTLEVFKPAQLIRGLPDVIIAKVGNAKNPATPKRLASLELSDTECQKLEPAADLRSDRLAELIFLAQKEFFGACPDFVPWVLKYLGIEQGISPEQTQVQSGGVNYGWYRAAAYYIAVTQKNTLDNEELEKILENLAYSLADWAEENDLLPEYKSPTQDVFHRYLNQNLEVSGWEPCLTSFDDELSAYTAAKTKASKQPICSLSSGEFASEDQMDSVVLFKPQQYSNKNPLGGRHIKRGISKIWSLEMLIRQAMWAVPAGKLEDQRPVFLYIFPAYVYSPQTAKVVRVLMDELKDRINFWDIRKFWQENNMDIQALRSYSWLEEESEAGRFGNPNYGRGDRRDLPFVAITYTTTRGKTVTDAWIEPAFLAMALPMLLGVKVVASTSPAPLYSSDSEFRESVKLDGPAGFWNSLGLPNSLHLEEWLQNRVQRLDELLNRLMIAYALHLDCEGDPPDPRWRAFANTVRDMMTDVLNIFSLAASHFRELKREPYPDEVGRYWRYAQIWTEGNTNMQKKLKITKQLVTEYRKFYRVNLSESSHAILLPLSKALELILSVPEDWDDEELILQGSGQLQDALDRQKVYRPILSDKSLPYQERKVQELEAIQAFVTTCVKDLFGEMCKGDRALLQENRNRIKSGVEFAYRWLTLQESQAETKNQKTEGEK

SEQ ID NO: 83 - protein, 988 aa, unidentified
  source 1..988: note = Nodosilinea sp.
MTLLQDLLTITLREEPDPVLQKFVETVVPAMEREFALIPALGGSEAVHRHRLRDDLYGEEKAQRWSQSADQSLLVHVINAILTAWNLQPFLDEDKQLTEEEQHLLCLGLTLHDYNKYCQGEEEDSPKAHKVEEILRLCRELGEKLNFSAFWPEWQDYLSDIGFLAQNTQYKAGTNLVSINWPTFKIDSRRLRNPLRPLLAFGDIAVHMGNPSDILTTTRGDRLREHLDALQIDRKLVYHRLRDCTGLLSSGIHNAVLHFTKELDWQPILFFAQGVVYLAPQSSETPDRDTVQGVLWEQIQSLLASKMLTGEIGFKRDGKGLKVAPQTLELFSPVQLIRGLPDVITAKVGNVKNPATPKRLESLGLSEAERESLEPAADLRSDRLAELIFLAQKEFFGDIPEFAPWVLEYLGIDQSITPEQTQVQAGGVNYGWYYAAAHYIAVVRDNTLDKDQSQEVLVAFSNALADWAEEHNFLDSHKSPTQDIFLDYLSQNLEITGWHQTLTPFGDELAGYVAAKTKAARQPICSLSSGQFASEDQMDSVVLFKPQQYSNKNSLGGRQIKRGISKIWSLEMLIRQAMWAAPAGKLEDQRPVFIYVLPAYVYSPQTAKAIRVLMDELKDRINFWDIRKFWQEHEMDIQALRSYPWLKEKSEEGRFADSNYGRGEKRDLPFVAITYTTTRGKTVTDAWIEPAFLAIALPLLLGVKVVASTSPAPLYSSDSEFRESVKLDGPAGFWNSLGLPNSLHLEEWMQGRVQRLDEILNRLLIAYALHLDCEGDPPDPRWRAFANTVRDIMTDVLNIFSLAASHFRGLKREPYAEEVKRYWSYAQIWSKGNIDMQEKLKITNQLVTEYRQFYKVHLSESSHAILLPLSKALEEILSVPEDWDDEELILQGAGQLQAALDRQEIYKRPILSDKSIPFLDRKIQELEAIEAFMTTCVKDLFGEMCKGDRALLQENRNRIKSGAEFAYRWLTLQESQSQANTQQPEGEE

SEQ ID NO: 84 - DNA, 253 bp, unidentified
  source 1..253: mol_type = other DNA; note = Cyanothece sp.
tgtgactgcaaccataagttgtccgattttgaaagcataagttgtccactcatgggtgtggacaacttgagtcatcgtcaatattcactttgcaaaataaaaaactgaaagcataagttgcccaaatgttaacaatcgaaagcataagttgtccaaaagttagaacttggagcagccgttgtgttgccttagggttatttgccaagagcaagtatgcttttaatcctggaaaagctccgaaggaatgacttct

SEQ ID NO: 85 - DNA, 166 bp, unidentified
  source 1..166: mol_type = other DNA; note = Cyanothece sp.
tgtgactgcaaccataagttgtctatttcggacactttatgcttacaattttggctggacagcttatgcttacaattttggctggacagatagagcgaaagcaataggcaagacgattatatttctttgcctataaagtaggcctattgatggatgaccctccaac

SEQ ID NO: 86 - DNA, 153 bp, Acinetobacter johnsonii
  source 1..153: mol_type = other DNA
tgtcatttacagcaatagataagagtgtcatgataagaaaacaataggttgccactctaaaattacacaaatagattagagtaatgacagtaataagcaagagtggcttgcaaatttacacaaatacgcacgagtggctgtaagaggcattct

SEQ ID NO: 87 - DNA, 210 bp, Acinetobacter johnsonii
  source 1..210: mol_type = other DNA
tgtcagttccacaaataaatcagagtttacacaaataaactagagtgataataaaaactatactatttatatatgaatttcattaaattcactaaaagatatgcctgcaaataaaaaagttaaagtcacaactattgattgtttcccaaatgataatattcgcagaactgtctatagatatggtgggtttcttaggaatgagggcagtga

SEQ ID NO: 88 - DNA, 135 bp, Zoogloea sp.
  source 1..135: mol_type = other DNA
aagttctgatttagccaatgtagcaacgaacaaggcaaaaattcggataacccactgactataaaggaatcccaaagtatccaatgtcgcattacttgcaggaatcctgtgagtgatgtcacagcattagaagta

SEQ ID NO: 89 - DNA, 20 bp, Zoogloea sp.
  source 1..20: mol_type = other DNA
ggactgggattctccaatat

SEQ ID NO: 90 - DNA, 15976 bp, synthetic construct
  misc_feature 1..15976: note = Synthetic
  source 1..15976: mol_type = other DNA
ggggaattgtgagcggataacaattcccctgtagaaataattttgtttaactttaataaggagatataccatggtttccaagcctgaatcccggtctacgggactgaaacgagaagtcatttaataaggccactgttaaacgtaggtttccaagcctgaatcccggtctacgggactgaaacgatccgaattcgagctcggcgcgcctgcaggtcgacaagcttgcggccgcataatgcttaagtcgaacagaaagtaatcgtattgtacacggccgcataatcgaaattaatacgactcactataggggaattgtgagcggataacaattccccatcttagtatattagttaagtataagaaggagatatacatatggctaccctactccaaaccctcctgttacgaacgttgtcacccgaggcggatccagttctctatgtctacattgagacggtactacctgcaatggaacgggaatttggcttgattccagcccttggtggctcggaggaagcacactttcatctgctgaggcgacggggaaacaaatatgcggcggaaaattccaagcggtacgccagtcgctctgatcaaagcctgctggttcatgtgctcaatgccttgctgaccgcctggaatttgttgccattcctaagctccacatttgaactatcagatgatgagaaacggctgctctgcctggggctgaccctacacgattacaacaagtggtgccagggtgaggaggaagattcgccgattgcatgcgaagtagcagagattcttgagctttgtcaaacattgggagagcggttgaactttgacggattctgggcagagtggcgggagtatttgacagagattgcctaccttgcccaaaacacccagggaaaagttggaacaaatctacccaaagcgaattggggcagcttcaaaattctagatacccgtcgtctggattcgcccctacgatggctactcgcttttggcgatgtcgcagtccatctcagcgatccatctgacatcgcaatgaaaacggggggagatcgcctgcgggaacatctgcgctttctaggtattcgtcgcaagctggtctaccatcgcctgcgcaactgtacagggctattaaccaacggaattcataatgcggtaatgcattttgctagagaactggattggcaacccatcctcttctttgctcagggtgttgtttatctcgctcctcagggtgctggcgttccggatcgcttagaacttcaggaatttctctgggagcaggtcagcaaccgattagccaccagcatgttgcggggagaggttggtttcaaacgggatggcaagggactcaaggtggctccccaaaccctggaactgttctcccctgctcagttgattcggaacttgcccggtgttgtccaatcttatgtcggaaacgctaaatctcctgcgactccaaaacgacttgagaagctggaactcagttcaacagagcgagagtttttggctaaaggtgcagatttaagagcagatcgcattgccgagtttatctttctggcgcaaaaagagtttttcggagataaaccagaatttatcacttggatgcttgaaactctgggggttcaaactgctatcacttcggagcagacgcagcttcaatccggtggtgtgaactggggatggtatcacgcagcagcctattacgtcgcgagcaatgccacgctggatttggaagagatttcggagaaacttcaggaatttgccgagcagttggcaacctgggcggaggaaaacaatttcttcccagagcatcgcagcccaacccatgacatctttttcaactatctgactcaatacctggaagttcaggggtgggagcagcaggagcagtcctttcagcttgaactggcaggctatgttggcgcaaagactaaaactgccagacaaccgatttgctccctcagttccggtgaatttgcttcggaagaccagatggattctgttgtcctgttcaaaccgcagcagtacagcaacaagaatcctctcggtggacggcagatcaagcgggggatttccaaaatctggtccctggaaatgctgctcaggcaggctctttggtctgcgccagcaggcaaactagaggaacaacaacccattttcctttacatcttcccggcatacgtttactcgccccaggttgctgctgctgtccggttactggtgaatgatctgaagcgtgtcaacctctgggaagtccgtaaacactggttggagaatggcatggatgctcaggcgttgcgatcgtttccctggctagtcggtgacaaaaacgattcgggtaactctgctccatccagatactctggtgaagacttgcctttcatggcaatgaactacaccaccaccagaggcaaaacgataactgatgcctgggttgaacctgctttcctgacactggtgctgcctttgttgctgggtgtgaaagttgtcgccaccagtagccagattccactctatgaaagcgacaacgacttttgcgaatctgtcaagctggatggacccgccgatttctgggctttgctgcggctaccaacttccctgcatctccaggattggattggggggcgtgttcaaaatttagcagaaggcttgaaccgcttgatggttgcctactgcctgcatctggacagtcgtagcgctccaccagatgcgcgctggagagccttaaacggcagtgtccgagagatgacaacaaatgttctaaacattttttcacttgcagaggagggattacgtcgtgatggctctaaacgcgatgcaacagttgaagaaattaaccgctattggaaatacgcccagctgtgggcagagggagactctgatatgcaaaacaagttgaagattaccaaacgcttagtcgatgagtaccgccagttttacagagccagtgcgaacgaatccagccatacggttttgctgccattttctaaggcactggaacacattctttcggtaccaaatgattgggacgatgaggaaattattgttcaaggggcaggacagttacaggccgcgttagatcggcaggaagtctacaaacgtcccctcatgcttgacaaagagattccctttgaaattcgtcggatgaaggagtttgaggcaattcaaaccttcatgaccacctgcgtcattgacctatttggacaaatgtgtaaaggcgatcgcgcgctcctgcaggaacatcgcaaccgccttaaatcaggggtcgaatttgcctatcgtcagttagccctgcaagagaaacaagccaaagccaaccaaaaatctggagaacaatcatgagcattcttgaaaccttaaagccagagttccacacagccttccctcgcctcgcctctggcaaatatgtccatttcttcatggtgcgtcacagccagtcgttccccgtctttcaaaccgatggcgttttgaacactgcccgtactcaggctgggttaaatgcaggcgatgaaaaatccagacaggcaatcagtcgcctggtcatgttcaaacggaaacaggtgacaccagaacgactcacaggacgggaactgctgcgatcgctgggcattaacggagtagttgaaggggaagccaatttctgtgaatacaacggcgaaagatcctgtaaaaaatgccctgattgcattctctatggttttgcgattggggacagtggctcggaacgttccaaagtctactctgattcagccttttccctgagtccttatgaagtttcccatcgcagttttaccttcaatgctccctttgaaggtggaaccatgagtgagaagggtgaaatgcggagtgcgatcaacgaactggatcatgttttgccggaagttgcttttccttgcgttgaaacactacgtgaccccacgctggaaggcttcatttatgtaatgggcaacctgatccggactcggcgctatggagcgcaggagtcgcgtacagggacaatggcgaatcacattattggcgttaccctatgtgatggcgagatcttcagcaatttgcactttacccaagccctctacgatgccctgaagggtgatttgagtgcgccaattagtgatttatgcagagaggcggcgatcgtggcagaaaacttgctaaatcaggaacctgtgcggaagatccaagttatttttggagagcagttgaacgaactcctggctgaggtagcgggaatctgccaggatgaaactcgcttgcgaaacactgtgacagccttgtaccagcaatcacaagcctatgccgagacctatggtgctgctgctaagaaaggcaaaggcaaatcttaaggtggctgccaatggttatttatcgatgcaatctcacgttgcacgacaacgtattcttcgccactcgcgagatggggattctctacgaaacagagaagtatctacacaactgggcactcagctttgctctgtttgaagccacccacatccccaaaccctatcgcttgcagggtgcgatcgctcaacgacccggttatctggaagctgacaacgagcaaaaccttttagttctgaatcacgcaggcatctatgttttccctgctctaccacttcagtggtcctaccaagtcaataccttcaaagcggctcaagtgccttactatggcaaatccaaacagttcggggataagggagctgatcgcaactacccgattaactacggacgggcaaaagaactggcagttggcagcacctaccgaacgtatattcttgcccctgaaccaatccagatcccccactggatacggttgggtaagtgggcagccaagattcaggtggacgcaagacccatacctaactgtggaatccgacaacggtcaggagaatacacctgcgaccatccactaaatccgatcgacctgtccggttcaacccgattgctgttatacaaccgcattgtcatgccacccgctagtctcgtcagtcagtcgcgagtttctggggactactgggaaatttctaaaccatccaattggactgaatttccggactggtcagacctgaaagacatacccaatcaagtttgcttacccagcggagtagcctatggagccagtactgccattgccgcatcttaagtccaccgctctgcatatcctggtaattcatttaggcgttgccgaaagcggagccttgcctgttgaatccggtcgagccgtccatgctcaagttttggactggttccgcatggcggatccggcaatttctgaggcaattcacaaaagccaggaatccccgctcagtctctcaggcctggtcgggaaacgccgtaaagtaggggtgcgggcaggagatgaattttacttccgaattgggttgttagatgggagtttgattgaaccactgctgagtggtttggagaagtggggcgacaagcccttttctctggcaaagtgtccctttgttttccgcagtatcaatatgttgccaggaactgacccctgggttggttcttccgattatgccttgcttacccaaaccccggctactttggataacctagctctcaagctcctgtcgccaacaagcttcaagtcgaatgccgggcaaggaatccaaccctttcctttgccagagtcagttttcggaaatttacatcgtcgctggaatgtctttgcaccaaaggaattgcagtttccaaaaattcaatggagtgggctggtctctgattatgacctcaaaactcaaaagttaaggatggaaaactcggttgagatcggcgcagtgggctgggtgcgctatcggtttccagatccagaacaagcgagaattgcaaccattctggctcactttgccttttttgctggagttgggcgtaagacagcaatggggatgggacaggtggtgttggacaaaaaaacgtagcctaggctgctgccaccgctgagcaataactagcataaccccttggggcctctaaacgggtcttgaggggttttttgctgaaacctcaggcatttgagaagcacacggtcacactgcttccggtagtcaataaaccggtaaaccagcaatagacataagcggctatttaacgaccctcgggatctcgacgctctcccttatgcgactcctgcattaggaaattaatacgactcactataggggaattgtgagcggataacaattcccctgtagaaataattttgtttaactttaataaggagatataccatgcttgatgaaaaaagcttcgacaactggtgccaatccgttggtctgagccaggcagcacgtgaagttgtagagcgtgtgcgatcctcttcaccctcccgtcgcgtacagagcggtagaggaaacgtctccggcaattaccctagccgcaaaatgggcgtcacaattcagtttgagtcccatcgaaatgagcttgcccgcatctacgaactggagcatgaccccggcgttctggaatattacgatcaacctcccaaaatcgaacttgattatttgtcaaaaaatgggaggcgtgttcgtactcaatacacacctgatttctttgttatccgtaatgactcagcaggttgggaggagtgtaaaacagaggatgaccttaagcaattagctgaggacagccctaaccgttaccaacgagctgaggacaatcgctggcgatgtccacctgcagaagcctatgctcttccccttgagttgtattttcaggtacggtctagtgctgaaattaactggattttccagcaaaactttgtatggctagaagactaccttggtactgaatcacttactatggatgagtcggttgcagatgcaatcatagccacagtcagagcaaacgagggtatcacactactcgaactgattcaacaattacaaggcacagatgctgatgctatctacatcctgattgcaaccgaacaaatttatgttgatttgatggctgaacggttagcgaacagcgatcgggcacgggtattttccagtccagaaattgctcaagcctttcaactcattacgctggtcgaagcacctctggctaacagttctctccatatagttcaggtgggcgttggcacaaccatacactgggatggtgaagtctgggagattgttaatacaggctctaccatgacaggattgttgcgatcggacggtaagtttatcgagttgcccaattctgcaattgatgaattgattcagaagggcaagattcaatcaatttcagcacaacaagcccctgatagcaaagcagaagttgaagaaatgcttcgctgtgctcgtccagccgacattaaagaagccaaccgtcgctacgaaatcattcagccttacctggaaaaggatgcaccagcttgtccaactcgaacaattcggcgctggcgtaatcagtattggcaggcagaaaagctttacgggaatggctatgttggtttactaccaaatcatcagaagaaagggaattatttagttaaggttaatgaagtaactcaagcttttatgcttgagtttattgagaagcattacgaaaatctcaaacagcgtagtaagcttagagtttatcaggcttttgtggaggcatgtgaaagccacgaaccgaaactaaaccctccaagccgtactacattcacactagcgattcagaaacgagcaggacatcagcaaaccttgaaacgtgaaggacgaagagctgccattcagaaggaggagttttactgggaactggagctaactactcctcgacacggcgatcgccccttcgagatcgttcatattgatcacactcaactcgatattgagcttatcagttctttgaactccctggcccaatgcaaccctacatctgttgatgccacttacaatttgggtcgtccttgggcaacgttcatggttgatgcttacagccgccgtttgctagcagtttacataacctatgaagaacccagctatcgttcctgcatgatggtgctccgtatttgcgtacagcgatttaagcgttttcctcagacgatcgtggtagataatggtgcagaatttcacagccattactttgaacaactactggcaacatatcaatgcacaaagaagcacaggccacctgcaaaagctcgctttggtgcagttgttgaacgattatttggcactgcaaataagcaattaattcatgagttgcagggaaatacccaaattactcgcaagcatcgccaagttactcaatctgttcatccccaaaaattggctctttggacgttaggcgatctctacgaatcactatgtgaatgggcttacaaagtttatgctgaccgccagcaccctgcgctagggcaaagccctaatgctgcattcgctcaagggctggcgttgggaggtagtcgcatccatcgccgagtagagtatgaccaagtcttccgtatcttgacattgcccgcaccggaaagaggacaacgcaaagttcagccaggacaagggataaaacttagcaatatctactactggtcaaatgcctttcgagacccagaaattgaacaatcgatggttgaagttcgttatgatccctttgatgccagcattgcctatgcactggtgcgaaaacaatgggtccggtgtatttcctcctactatcaacagtttcaaaatcgttcagaaaaggaaattcgtttaataactgctgagttgattaagcaaaagcgtgaccagggaagagatacaaatgttacggataaagaattggcgcagtttttaagctctacagaaatgaaagaaggcaaattcttggagcaacgcttgcggactacagaaaacagggtagttattcagaatagtacagctacagaagacgatccccccatcactaattctcagaattcttacgagccatcgcttatgctgccaagtgaggatgagttggatgatcaggaagactggttaaataccggcaaagctgaggcagaattagaattctatggagagtactagcgatgcaacctcaaataagcttcccaaaagagttactgcttcaaccaattcctgatcgaattgcctatttcaaagattacacaatggcacatccgaagcttatagaagcagaccggaagttaatgcatgctattcgtgaacctggaggagctgctcttatctttgtctttggtcctaccggagttggaaagtctactctattgaaacgaattactcaaaagctgcttaaagaagcattgtctttgatggagactgacaaaggctatattcctattgcgggggtagagataaaaactccagaggatagtaactttgattggaacgatttttatgttcgtgctcttatggcacttaatgagccaatgatcgagaaaaaaatcaaccgtacaggtgcaaaactaaaattacggttggcacttgaatctgcccttcgtaatcgccgtcctgatgctttttacatagacgaagctcaaaattttggtaaggtagccagtgggcgaaaattgcaagatcaaacagattgcattaaatctcttgcaaatctcgctcaaactcggtttatcttatgtgggatttatgaacttttaccactacgaaatctaagtgggcagctatgccgccgtagccatagtattcactttccacgttattcggcagattctgagcaggatctaaaggcctttaaaagtgcgttattaacactacaaaatcaactccctcttcccgaaccacctgatttagtggcgcattgggaattttgttatgagagaactatcggctgtattggtattttgaaagatttgctccttcggactctaagcgcgattttagtacgggatggagacaaagttttgacattgaagcccaaggatttagaacaacgtgcatggtctttagaagaatgtttggttatgctgagagaggcaaaggaaggagagcaacaacttactgacaaatcgggcttacatgaggaattacggacagctttagggtttaatgcagctacgtccaagcagtctgccaaatcatccaagtcaacatcaagcaaaaaagcaggcagtgttggaaagccttcacctcgtcgtcgttcagttggaatagatcaagatgccagctaacgatctagaaatctatgaatcttggaatttagatctccctttactacctaatcgaagtaggctctaccacttgaaaccgattgcaattggagatgcttacgttgaaggattaatcagctatgtttgccgtttggctgaagcccactgtgtttctccaggagtccttactaaacaggaaatattgcccagtctaagaaaagtttataatgtgggttcaagagaagttcatgaagtacgaagagatgaaagtttagtttctatttcctcctttcctaagccagaaagcaataaaaatcctaatgaaccaggcttctgggcatggcaatatattgaaggattgcagcctttaactcttagagaaaaccttgaagcattaactattccaaattggaaaaagcaaattccacaggtgacaggaattgaggttgcgcgtgagttgagagcttggtgccctgaatgctttcaacaatggcgcaagactaatcagataatttatgaaccgatgctttggtcgatcgctttagttaccgtatgtccttatcattaccttccgctacaaactcgctgtccttattgtaaaaaaactcaacggcctatcacaggaaaaatgcaggtagctcgctgttccgaatgtttagagtggcttggcattcaaccaagcgaagattcagagttagaaatcaaaattaaatctgaagtcgaatggcaccattgggttgcggagaaagtaatggagattttggtatttaaagattatactttaactgcaaatgctataacaatagcagctccaattacgaaagaaaaatattttcaactagaatcgagcttaataaattgtccaattaagtatgctcaacagcagttcttaaagctcttcttcaattaaatttataaaggtatggctatggcgactgaagtaccttttacttttagcacgtgggatttatctaaaccccttaccccagctcgtagttctctctttagcttgaaaccgattggggttggaacggctgcagtagaaagcctcactggatatattgcacgtttggctgaagctcactgtatctggccaggagatcttcttgcagctgaatttagttcttcatattcctattcttacctgcatagcatgaggggccgtattgctgctttgaatggtaatagccaaatggctcaggatgctgtacttaagcttcaagagcttaccttacaggagaatttatccgctttaacaatgttaggctgggctaatattttacccgcaaaagggttgttaaatcggactcgaacttggtgtccggtttgttttgaggcgtggcgtttcatcaaaagtcctatatatgagcctctattatggtatttaacctcggtcaaatattgtccaattcatcagcaacgccttttatctcaatgtccattctgcgggtgccagcagcctcctctagactggaaaactcggccgggctattgttcaaggtgccaggtgtggctgggttcaccaccaggtgtaacttccagtaattcgctttctaatacagaaataaggtgggagagttgggttgcccagagctgcggaaatttgttagcctatagtcctcgtttacacaagatatccgttagcgttcaggtcgcagcatccctttctaaatgtatcaacctttatgcagagggcaatattgcggagtttgcccgtcaaatgagcttgccaaaaacttctgtttggctgtggcagtctggtcaggtactccccgagttatccaggcttttaagcatctgctatcacttcaatctgtcgctcttagactttctaattaatacaccagttcttaagataaggagagacttaattccagaaaagagaactaatgagtttcgccagcctcgaagagatccctcaaccatatctcaattgcaacctattctgggattaattcttttcgagcagccacctccctctttagcagcagtagcgtgtcgcttaggttgtagctcaagatccctgcgccataattttcctgatctctgtggctctatttctgcacgttaccttcaacaccgtgatgaagtttataaagaaaaattgaatcaattctgtcaagacttgcgccaagttgtacttcaactttattcggcaggcattgatccgactcggagccaagttgctcgccgtctgaggaaacccgcttattttagagaacccgaagtcgaggcaatgcttgagtctgttcgacgagaattaggcttgcacagcaattctcagcatgagactaattctcacaaaaacgcccagttttaacttaagtcgaacagaaagtaatcgtattgtacacggccgcataatcgaaattaatacgactcactataggggaattgtgagcggataacaattccccatcttagtatattagttaagtataagaaggagatatacatatggcagatctcaattggatatcggccggccacgcgatcgctgacgtcggtaccctcgagtctggtaaagaaaccgctgctgcgaaatttgaacgccagcacatggactcgtctactagcgcagcttaattaacctaggctgctgccaccgctgagcaataactagcataaccccttggggcctctaaacgggtcttgaggggttttttgctgaaacctcaggcatttgagaagcacacggtcacactgcttccggtagtgccctgaaccgacgaccgggtcatcgtggccggatcttgcggcccctcggcttgaacgaattgttagacattatttgccgactaccttggtgatctcgcctttcacgtagtggacaaattcttccaactgatctgcgcgcgaggccaagcgatcttcttcttgtccaagataagcctgtctagcttcaagtatgacgggctgatactgggccggcaggcgctccattgcccagtcggcagcgacatccttcggcgcgattttgccggttactgcgctgtaccaaatgcgggacaacgtaagcactacatttcgctcatcgccagcccagtcgggcggcgagttccatagcgttaaggtttcatttagcgcctcaaatagatcctgttcaggaaccggatcaaagagttcctccgccgctggacctaccaaggcaacgctatgttctcttgcttttgtcagcaagatagccagatcaatgtcgatcgtggctggctcgaagatacctgcaagaatgtcattgcgctgccattctccaaattgcagttcgcgcttagctggataacgccacggaatgatgtcgtcgtgcacaacaatggtgacttctacagcgcggagaatctcgctctctccaggggaagccgaagtttccaaaaggtcgttgatcaaagctcgccgcgttgtttcatcaagccttacggtcaccgtaaccagcaaatcaatatcactgtgtggcttcaggccgccatccactgcggagccgtacaaatgtacggccagcaacgtcggttcgagatggcgctcgatgacgccaactacctctgatagttgagtcgatacttcggcgatcaccgcttccctcatactcttcctttttcaatattattgaagcatttatcagggttattgtctcatgagcggatacatatttgaatgtatttagaaaaataaacaaatagctagctcactcggtcgctacgctccgggcgtgagactgcggcgggcgctgcggacacatacaaagttacccacagattccgtggataagcaggggactaacatgtgaggcaaaacagcagggccgcgccggtggcgtttttccataggctccgccctcctgccagagttcacataaacagacgcttttccggtgcatctgtgggagccgtgaggctcaaccatgaatctgacagtacgggcgaaacccgacaggacttaaagatccccaccgtttccggcgggtcgctccctcttgcgctctcctgttccgaccctgccgtttaccggatacctgttccgcctttctcccttacgggaagtgtggcgctttctcatagctcacacactggtatctcggctcggtgtaggtcgttcgctccaagctgggctgtaagcaagaactccccgttcagcccgactgctgcgccttatccggtaactgttcacttgagtccaacccggaaaagcacggtaaaacgccactggcagcagccattggtaactgggagttcgcagaggatttgtttagctaaacacgcggttgctcttgaagtgtgcgccaaagtccggctacactggaaggacagatttggttgctgtgctctgcgaaagccagttaccacggttaagcagttccccaactgacttaaccttcgatcaaaccacctccccaggtggttttttcgtttacagggcaaaagattacgcgcagaaaaaaaggatctcaagaagatcctttgatcttttctactgaaccgctctagatttcagtgcaatttatctcttcaaatgtagcacctgaagtcagccccatacgatataagttgtaattctcatgttagtcatgccccgcgcccaccggaaggagctgactgggttgaaggctctcaagggcatcggtcgagatcccggtgcctaatgagtgagctaacttacattaattgcgttgcgctcactgcccgctttccagtcgggaaacctgtcgtgccagctgcattaatgaatcggccaacgcgcggggagaggcggtttgcgtattgggcgccagggtggtttttcttttcaccagtgagacgggcaacagctgattgcccttcaccgcctggccctgagagagttgcagcaagcggtccacgctggtttgccccagcaggcgaaaatcctgtttgatggtggttaacggcgggatataacatgagctgtcttcggtatcgtcgtatcccactaccgagatgtccgcaccaacgcgcagcccggactcggtaatggcgcgcattgcgcccagcgccatctgatcgttggcaaccagcatcgcagtgggaacgatgccctcattcagcatttgcatggtttgttgaaaaccggacatggcactccagtcgccttcccgttccgctatcggctgaatttgattgcgagtgagatatttatgccagccagccagacgcagacgcgccgagacagaacttaatgggcccgctaacagcgcgatttgctggtgacccaatgcgaccagatgctccacgcccagtcgcgtaccgtcttcatgggagaaaataatactgttgatgggtgtctggtcagagacatcaagaaataacgccggaacattagtgcaggcagcttccacagcaatggcatcctggtcatccagcggatagttaatgatcagcccactgacgcgttgcgcgagaagattgtgcaccgccgctttacaggcttcgacgccgcttcgttctaccatcgacaccaccacgctggcacccagttgatcggcgcgagatttaatcgccgcgacaatttgcgacggcgcgtgcagggccagactggaggtggcaacgccaatcagcaacgactgtttgcccgccagttgttgtgccacgcggttgggaatgtaattcagctccgccatcgccgcttccactttttcccgcgttttcgcagaaacgtggctggcctggttcaccacgcgggaaacggtctgataagagacaccggcatactctgcgacatcgtataacgttactggtttcacattcaccaccctgaattgactctcttccgggcgctatcatgccataccgcgaaaggttttgcgccattcgatggtgtccgggatctcgacgctctcccttatgcgactcctgcattaggaaattaatacgactcactata

SEQ ID NO: 91 - DNA, 15976 bp, synthetic construct
  misc_feature 1..15976: note = Synthetic
  source 1..15976: mol_type = other DNA
ggggaattgtgagcggataacaattcccctgtagaaataattttgtttaactttaataaggagatataccatggtttccaagcctgaatcccggtctacgggactgaaacaccatctatgtatagctacgatggaatagtaaagggtttccaagcctgaatcccggtctacgggactgaaacgatccgaattcgagctcggcgcgcctgcaggtcgacaagcttgcggccgcataatgcttaagtcgaacagaaagtaatcgtattgtacacggccgcataatcgaaattaatacgactcactataggggaattgtgagcggataacaattccccatcttagtatattagttaagtataagaaggagatatacatatggctaccctactccaaaccctcctgttacgaacgttgtcacccgaggcggatccagttctctatgtctacattgagacggtactacctgcaatggaacgggaatttggcttgattccagcccttggtggctcggaggaagcacactttcatctgctgaggcgacggggaaacaaatatgcggcggaaaattccaagcggtacgccagtcgctctgatcaaagcctgctggttcatgtgctcaatgccttgctgaccgcctggaatttgttgccattcctaagctccacatttgaactatcagatgatgagaaacggctgctctgcctggggctgaccctacacgattacaacaagtggtgccagggtgaggaggaagattcgccgattgcatgcgaagtagcagagattcttgagctttgtcaaacattgggagagcggttgaactttgacggattctgggcagagtggcgggagtatttgacagagattgcctaccttgcccaaaacacccagggaaaagttggaacaaatctacccaaagcgaattggggcagcttcaaaattctagatacccgtcgtctggattcgcccctacgatggctactcgcttttggcgatgtcgcagtccatctcagcgatccatctgacatcgcaatgaaaacggggggagatcgcctgcgggaacatctgcgctttctaggtattcgtcgcaagctggtctaccatcgcctgcgcaactgtacagggctattaaccaacggaattcataatgcggtaatgcattttgctagagaactggattggcaacccatcctcttctttgctcagggtgttgtttatctcgctcctcagggtgctggcgttccggatcgcttagaacttcaggaatttctctgggagcaggtcagcaaccgattagccaccagcatgttgcggggagaggttggtttcaaacgggatggcaagggactcaaggtggctccccaaaccctggaactgttctcccctgctcagttgattcggaacttgcccggtgttgtccaatcttatgtcggaaacgctaaatctcctgcgactccaaaacgacttgagaagctggaactcagttcaacagagcgagagtttttggctaaaggtgcagatttaagagcagatcgcattgccgagtttatctttctggcgcaaaaagagtttttcggagataaaccagaatttatcacttggatgcttgaaactctgggggttcaaactgctatcacttcggagcagacgcagcttcaatccggtggtgtgaactggggatggtatcacgcagcagcctattacgtcgcgagcaatgccacgctggatttggaagagatttcggagaaacttcaggaatttgccgagcagttggcaacctgggcggaggaaaacaatttcttcccagagcatcgcagcccaacccatgacatctttttcaactatctgactcaatacctggaagttcaggggtgggagcagcaggagcagtcctttcagcttgaactggcaggctatgttggcgcaaagactaaaactgccagacaaccgatttgctccctcagttccggtgaatttgcttcggaagaccagatggattctgttgtcctgttcaaaccgcagcagtacagcaacaagaatcctctcggtggacggcagatcaagcgggggatttccaaaatctggtccctggaaatgctgctcaggcaggctctttggtctgcgccagcaggcaaactagaggaacaacaacccattttcctttacatcttcccggcatacgtttactcgccccaggttgctgctgctgtccggttactggtgaatgatctgaagcgtgtcaacctctgggaagtccgtaaacactggttggagaatggcatggatgctcaggcgttgcgatcgtttccctggctagtcggtgacaaaaacgattcgggtaactctgctccatccagatactctggtgaagacttgcctttcatggcaatgaactacaccaccaccagaggcaaaacgataactgatgcctgggttgaacctgctttcctgacactggtgctgcctttgttgctgggtgtgaaagttgtcgccaccagtagccagattccactctatgaaagcgacaacgacttttgcgaatctgtcaagctggatggacccgccgatttctgggctttgctgcggctaccaacttccctgcatctccaggattggattggggggcgtgttcaaaatttagcagaaggcttgaaccgcttgatggttgcctactgcctgcatctggacagtcgtagcgctccaccagatgcgcgctggagagccttaaacggcagtgtccgagagatgacaacaaatgttctaaacattttttcacttgcagaggagggattacgtcgtgatggctctaaacgcgatgcaacagttgaagaaattaaccgctattggaaatacgcccagctgtgggcagagggagactctgatatgcaaaacaagttgaagattaccaaacgcttagtcgatgagtaccgccagttttacagagccagtgcgaacgaatccagccatacggttttgctgccattttctaaggcactggaacacattctttcggtaccaaatgattgggacgatgaggaaattattgttcaaggggcaggacagttacaggccgcgttagatcggcaggaagtctacaaacgtcccctcatgcttgacaaagagattccctttgaaattcgtcggatgaaggagtttgaggcaattcaaaccttcatgaccacctgcgtcattgacctatttggacaaatgtgtaaaggcgatcgcgcgctcctgcaggaacatcgcaaccgccttaaatcaggggtcgaatttgcctatcgtcagttagccctgcaagagaaacaagccaaagccaaccaaaaatctggagaacaatcatgagcattcttgaaaccttaaagccagagttccacacagccttccctcgcctcgcctctggcaaatatgtccatttcttcatggtgcgtcacagccagtcgttccccgtctttcaaaccgatggcgttttgaacactgcccgtactcaggctgggttaaatgcaggcgatgaaaaatccagacaggcaatcagtcgcctggtcatgttcaaacggaaacaggtgacaccagaacgactcacaggacgggaactgctgcgatcgctgggcattaacggagtagttgaaggggaagccaatttctgtgaatacaacggcgaaagatcctgtaaaaaatgccctgattgcattctctatggttttgcgattggggacagtggctcggaacgttccaaagtctactctgattcagccttttccctgagtccttatgaagtttcccatcgcagttttaccttcaatgctccctttgaaggtggaaccatgagtgagaagggtgaaatgcggagtgcgatcaacgaactggatcatgttttgccggaagttgcttttccttgcgttgaaacactacgtgaccccacgctggaaggcttcatttatgtaatgggcaacctgatccggactcggcgctatggagcgcaggagtcgcgtacagggacaatggcgaatcacattattggcgttaccctatgtgatggcgagatcttcagcaatttgcactttacccaagccctctacgatgccctgaagggtgatttgagtgcgccaattagtgatttatgcagagaggcggcgatcgtggcagaaaacttgctaaatcaggaacctgtgcggaagatccaagttatttttggagagcagttgaacgaactcctggctgaggtagcgggaatctgccaggatgaaactcgcttgcgaaacactgtgacagccttgtaccagcaatcacaagcctatgccgagacctatggtgctgctgctaagaaaggcaaaggcaaatcttaaggtggctgccaatggttatttatcgatgcaatctcacgttgcacgacaacgtattcttcgccactcgcgagatggggattctctacgaaacagagaagtatctacacaactgggcactcagctttgctctgtttgaagccacccacatccccaaaccctatcgcttgcagggtgcgatcgctcaacgacccggttatctggaagctgacaacgagcaaaaccttttagttctgaatcacgcaggcatctatgttttccctgctctaccacttcagtggtcctaccaagtcaataccttcaaagcggctcaagtgccttactatggcaaatccaaacagttcggggataagggagctgatcgcaactacccgattaactacggacgggcaaaagaactggcagttggcagcacctaccgaacgtatattcttgcccctgaaccaatccagatcccccactggatacggttgggtaagtgggcagccaagattcaggtggacgcaagacccatacctaactgtggaatccgacaacggtcaggagaatacacctgcgaccatccactaaatccgatcgacctgtccggttcaacccgattgctgttatacaaccgcattgtcatgccacccgctagtctcgtcagtcagtcgcgagtttctggggactactgggaaatttctaaaccatccaattggactgaatttccggactggtcagacctgaaagacatacccaatcaagtttgcttacccagcggagtagcctatggagccagtactgccattgccgcatcttaagtccaccgctctgcatatcctggtaattcatttaggcgttgccgaaagcggagccttgcctgttgaatccggtcgagccgtccatgctcaagttttggactggttccgcatggcggatccggcaatttctgaggcaattcacaaaagccaggaatccccgctcagtctctcaggcctggtcgggaaacgccgtaaagtaggggtgcgggcaggagatgaattttacttccgaattgggttgttagatgggagtttgattgaaccactgctgagtggtttggagaagtggggcgacaagcccttttctctggcaaagtgtccctttgttttccgcagtatcaatatgttgccaggaactgacccctgggttggttcttccgattatgccttgcttacccaaaccccggctactttggataacctagctctcaagctcctgtcgccaacaagcttcaagtcgaatgccgggcaaggaatccaaccctttcctttgccagagtcagttttcggaaatttacatcgtcgctggaatgtctttgcaccaaaggaattgcagtttccaaaaattcaatggagtgggctggtctctgattatgacctcaaaactcaaaagttaaggatggaaaactcggttgagatcggcgcagtgggctgggtgcgctatcggtttccagatccagaacaagcgagaattgcaaccattctggctcactttgccttttttgctggagttgggcgtaagacagcaatggggatgggacaggtggtgttggacaaaaaaacgtagcctaggctgctgccaccgctgagcaataactagcataaccccttggggcctctaaacgggtcttgaggggttttttgctgaaacctcaggcatttgagaagcacacggtcacactgcttccggtagtcaataaaccggtaaaccagcaatagacataagcggctatttaacgaccctcgggatctcgacgctctcccttatgcgactcctgcattaggaaattaatacgactcactataggggaattgtgagcggataacaattcccctgtagaaataattttgtttaactttaataaggagatataccatgcttgatgaaaaaagcttcgacaactggtgccaatccgttggtctgagccaggcagcacgtgaagttgtagagcgtgtgcgatcctcttcaccctcccgtcgcgtacagagcggtagaggaaacgtctccggcaattaccctagccgcaaaatgggcgtcacaattcagtttgagtcccatcgaaatgagcttgcccgcatctacgaactggagcatgaccccggcgttctggaatattacgatcaacctcccaaaatcgaacttgattatttgtcaaaaaatgggaggcgtgttcgtactcaatacacacctgatttctttgttatccgtaatgactcagcaggttgggaggagtgtaaaacagaggatgaccttaagcaattagctgaggacagccctaaccgttaccaacgagctgaggacaatcgctggcgatgtccacctgcagaagcctatgctcttccccttgagttgtattttcaggtacggtctagtgctgaaattaactggattttccagcaaaactttgtatggctagaagactaccttggtactgaatcacttactatggatgagtcggttgcagatgcaatcatagccacagtcagagcaaacgagggtatcacactactcgaactgattcaacaattacaaggcacagatgctgatgctatctacatcctgattgcaaccgaacaaatttatgttgatttgatggctgaacggttagcgaacagcgatcgggcacgggtattttccagtccagaaattgctcaagcctttcaactcattacgctggtcgaagcacctctggctaacagttctctccatatagttcaggtgggcgttggcacaaccatacactgggatggtgaagtctgggagattgttaatacaggctctaccatgacaggattgttgcgatcggacggtaagtttatcgagttgcccaattctgcaattgatgaattgattcagaagggcaagattcaatcaatttcagcacaacaagcccctgatagcaaagcagaagttgaagaaatgcttcgctgtgctcgtccagccgacattaaagaagccaaccgtcgctacgaaatcattcagccttacctggaaaaggatgcaccagcttgtccaactcgaacaattcggcgctggcgtaatcagtattggcaggcagaaaagctttacgggaatggctatgttggtttactaccaaatcatcagaagaaagggaattatttagttaaggttaatgaagtaactcaagcttttatgcttgagtttattgagaagcattacgaaaatctcaaacagcgtagtaagcttagagtttatcaggcttttgtggaggcatgtgaaagccacgaaccgaaactaaaccctccaagccgtactacattcacactagcgattcagaaacgagcaggacatcagcaaaccttgaaacgtgaaggacgaagagctgccattcagaaggaggagttttactgggaactggagctaactactcctcgacacggcgatcgccccttcgagatcgttcatattgatcacactcaactcgatattgagcttatcagttctttgaactccctggcccaatgcaaccctacatctgttgatgccacttacaatttgggtcgtccttgggcaacgttcatggttgatgcttacagccgccgtttgctagcagtttacataacctatgaagaacccagctatcgttcctgcatgatggtgctccgtatttgcgtacagcgatttaagcgttttcctcagacgatcgtggtagataatggtgcagaatttcacagccattactttgaacaactactggcaacatatcaatgcacaaagaagcacaggccacctgcaaaagctcgctttggtgcagttgttgaacgattatttggcactgcaaataagcaattaattcatgagttgcagggaaatacccaaattactcgcaagcatcgccaagttactcaatctgttcatccccaaaaattggctctttggacgttaggcgatctctacgaatcactatgtgaatgggcttacaaagtttatgctgaccgccagcaccctgcgctagggcaaagccctaatgctgcattcgctcaagggctggcgttgggaggtagtcgcatccatcgccgagtagagtatgaccaagtcttccgtatcttgacattgcccgcaccggaaagaggacaacgcaaagttcagccaggacaagggataaaacttagcaatatctactactggtcaaatgcctttcgagacccagaaattgaacaatcgatggttgaagttcgttatgatccctttgatgccagcattgcctatgcactggtgcgaaaacaatgggtccggtgtatttcctcctactatcaacagtttcaaaatcgttcagaaaaggaaattcgtttaataactgctgagttgattaagcaaaagcgtgaccagggaagagatacaaatgttacggataaagaattggcgcagtttttaagctctacagaaatgaaagaaggcaaattcttggagcaacgcttgcggactacagaaaacagggtagttattcagaatagtacagctacagaagacgatccccccatcactaattctcagaattcttacgagccatcgcttatgctgccaagtgaggatgagttggatgatcaggaagactggttaaataccggcaaagctgaggcagaattagaattctatggagagtactagcgatgcaacctcaaataagcttcccaaaagagttactgcttcaaccaattcctgatcgaattgcctatttcaaagattacacaatggcacatccgaagcttatagaagcagaccggaagttaatgcatgctattcgtgaacctggaggagctgctcttatctttgtctttggtcctaccggagttggaaagtctactctattgaaacgaattactcaaaagctgcttaaagaagcattgtctttgatggagactgacaaaggctatattcctattgcgggggtagagataaaaactccagaggatagtaactttgattggaacgatttttatgttcgtgctcttatggcacttaatgagccaatgatcgagaaaaaaatcaaccgtacaggtgcaaaactaaaattacggttggcacttgaatctgcccttcgtaatcgccgtcctgatgctttttacatagacgaagctcaaaattttggtaaggtagccagtgggcgaaaattgcaagatcaaacagattgcattaaatctcttgcaaatctcgctcaaactcggtttatcttatgtgggatttatgaacttttaccactacgaaatctaagtgggcagctatgccgccgtagccatagtattcactttccacgttattcggcagattctgagcaggatctaaaggcctttaaaagtgcgttattaacactacaaaatcaactccctcttcccgaaccacctgatttagtggcgcattgggaattttgttatgagagaactatcggctgtattggtattttgaaagatttgctccttcggactctaagcgcgattttagtacgggatggagacaaagttttgacattgaagcccaaggatttagaacaacgtgcatggtctttagaagaatgtttggttatgctgagagaggcaaaggaaggagagcaacaacttactgacaaatcgggcttacatgaggaattacggacagctttagggtttaatgcagctacgtccaagcagtctgccaaatcatccaagtcaacatcaagcaaaaaagcaggcagtgttggaaagccttcacctcgtcgtcgttcagttggaatagatcaagatgccagctaacgatctagaaatctatgaatcttggaatttagatctccctttactacctaatcgaagtaggctctaccacttgaaaccgattgcaattggagatgcttacgttgaaggattaatcagctatgtttgccgtttggctgaagcccactgtgtttctccaggagtccttactaaacaggaaatattgcccagtctaagaaaagtttataatgtgggttcaagagaagttcatgaagtacgaagagatgaaagtttagtttctatttcctcctttcctaagccagaaagcaataaaaatcctaatgaaccaggcttctgggcatggcaatatattgaaggattgcagcctttaactcttagagaaaaccttgaagcattaactattccaaattggaaaaagcaaattccacaggtgacaggaattgaggttgcgcgtgagttgagagcttggtgccctgaatgctttcaacaatggcgcaagactaatcagataatttatgaaccgatgctttggtcgatcgctttagttaccgtatgtccttatcattaccttccgctacaaactcgctgtccttattgtaaaaaaactcaacggcctatcacaggaaaaatgcaggtagctcgctgttccgaatgtttagagtggcttggcattcaaccaagcgaagattcagagttagaaatcaaaattaaatctgaagtcgaatggcaccattgggttgcggagaaagtaatggagattttggtatttaaagattatactttaactgcaaatgctataacaatagcagctccaattacgaaagaaaaatattttcaactagaatcgagcttaataaattgtccaattaagtatgctcaacagcagttcttaaagctcttcttcaattaaatttataaaggtatggctatggcgactgaagtaccttttacttttagcacgtgggatttatctaaaccccttaccccagctcgtagttctctctttagcttgaaaccgattggggttggaacggctgcagtagaaagcctcactggatatattgcacgtttggctgaagctcactgtatctggccaggagatcttcttgcagctgaatttagttcttcatattcctattcttacctgcatagcatgaggggccgtattgctgctttgaatggtaatagccaaatggctcaggatgctgtacttaagcttcaagagcttaccttacaggagaatttatccgctttaacaatgttaggctgggctaatattttacccgcaaaagggttgttaaatcggactcgaacttggtgtccggtttgttttgaggcgtggcgtttcatcaaaagtcctatatatgagcctctattatggtatttaacctcggtcaaatattgtccaattcatcagcaacgccttttatctcaatgtccattctgcgggtgccagcagcctcctctagactggaaaactcggccgggctattgttcaaggtgccaggtgtggctgggttcaccaccaggtgtaacttccagtaattcgctttctaatacagaaataaggtgggagagttgggttgcccagagctgcggaaatttgttagcctatagtcctcgtttacacaagatatccgttagcgttcaggtcgcagcatccctttctaaatgtatcaacctttatgcagagggcaatattgcggagtttgcccgtcaaatgagcttgccaaaaacttctgtttggctgtggcagtctggtcaggtactccccgagttatccaggcttttaagcatctgctatcacttcaatctgtcgctcttagactttctaattaatacaccagttcttaagataaggagagacttaattccagaaaagagaactaatgagtttcgccagcctcgaagagatccctcaaccatatctcaattgcaacctattctgggattaattcttttcgagcagccacctccctctttagcagcagtagcgtgtcgcttaggttgtagctcaagatccctgcgccataattttcctgatctctgtggctctatttctgcacgttaccttcaacaccgtgatgaagtttataaagaaaaattgaatcaattctgtcaagacttgcgccaagttgtacttcaactttattcggcaggcattgatccgactcggagccaagttgctcgccgtctgaggaaacccgcttattttagagaacccgaagtcgaggcaatgcttgagtctgttcgacgagaattaggcttgcacagcaattctcagcatgagactaattctcacaaaaacgcccagttttaacttaagtcgaacagaaagtaatcgtattgtacacggccgcataatcgaaattaatacgactcactataggggaattgtgagcggataacaattccccatcttagtatattagttaagtataagaaggagatatacatatggcagatctcaattggatatcggccggccacgcgatcgctgacgtcggtaccctcgagtctggtaaagaaaccgctgctgcgaaatttgaacgccagcacatggactcgtctactagcgcagcttaattaacctaggctgctgccaccgctgagcaataactagcataaccccttggggcctctaaacgggtcttgaggggttttttgctgaaacctcaggcatttgagaagcacacggtcacactgcttccggtagtgccctgaaccgacgaccgggtcatcgtggccggatcttgcggcccctcggcttgaacgaattgttagacattatttgccgactaccttggtgatctcgcctttcacgtagtggacaaattcttccaactgatctgcgcgcgaggccaagcgatcttcttcttgtccaagataagcctgtctagcttcaagtatgacgggctgatactgggccggcaggcgctccattgcccagtcggcagcgacatccttcggcgcgattttgccggttactgcgctgtaccaaatgcgggacaacgtaagcactacatttcgctcatcgccagcccagtcgggcggcgagttccatagcgttaaggtttcatttagcgcctcaaatagatcctgttcaggaaccggatcaaagagttcctccgccgctggacctaccaaggcaacgctatgttctcttgcttttgtcagcaagatagccagatcaatgtcgatcgtggctggctcgaagatacctgcaagaatgtcattgcgctgccattctccaaattgcagttcgcgcttagctggataacgccacggaatgatgtcgtcgtgcacaacaatggtgacttctacagcgcggagaatctcgctctctccaggggaagccgaagtttccaaaaggtcgttgatcaaagctcgccgcgttgtttcatcaagccttacggtcaccgtaaccagcaaatcaatatcactgtgtggcttcaggccgccatccactgcggagccgtacaaatgtacggccagcaacgtcggttcgagatggcgctcgatgacgccaactacctctgatagttgagtcgatacttcggcgatcaccgcttccctcatactcttcctttttcaatattattgaagcatttatcagggttattgtctcatgagcggatacatatttgaatgtatttagaaaaataaacaaatagctagctcactcggtcgctacgctccgggcgtgagactgcggcgggcgctgcggacacatacaaagttacccacagattccgtggataagcaggggactaacatgtgaggcaaaacagcagggccgcgccggtggcgtttttccataggctccgccctcctgccagagttcacataaacagacgcttttccggtgcatctgtgggagccgtgaggctcaaccatgaatctgacagtacgggcgaaacccgacaggacttaaagatccccaccgtttccggcgggtcgctccctcttgcgctctcctgttccgaccctgccgtttaccggatacctgttccgcctttctcccttacgggaagtgtggcgctttctcatagctcacacactggtatctcggctcggtgtaggtcgttcgctccaagctgggctgtaagcaagaactccccgttcagcccgactgctgcgccttatccggtaactgttcacttgagtccaacccggaaaagcacggtaaaacgccactggcagcagccattggtaactgggagttcgcagaggatttgtttagctaaacacgcggttgctcttgaagtgtgcgccaaagtccggctacactggaaggacagatttggttgctgtgctctgcgaaagccagttaccacggttaagcagttccccaactgacttaaccttcgatcaaaccacctccccaggtggttttttcgtttacagggcaaaagattacgcgcagaaaaaaaggatctcaagaagatcctttgatcttttctactgaaccgctctagatttcagtgcaatttatctcttcaaatgtagcacctgaagtcagccccatacgatataagttgtaattctcatgttagtcatgccccgcgcccaccggaaggagctgactgggttgaaggctctcaagggcatcggtcgagatcccggtgcctaatgagtgagctaacttacattaattgcgttgcgctcactgcccgctttccagtcgggaaacctgtcgtgccagctgcattaatgaatcggccaacgcgcggggagaggcggtttgcgtattgggcgccagggtggtttttcttttcaccagtgagacgggcaacagctgattgcccttcaccgcctggccctgagagagttgcagcaagcggtccacgctggtttgccccagcaggcgaaaatcctgtttgatggtggttaacggcgggatataacatgagctgtcttcggtatcgtcgtatcccactaccgagatgtccgcaccaacgcgcagcccggactcggtaatggcgcgcattgcgcccagcgccatctgatcgttggcaaccagcatcgcagtgggaacgatgccctcattcagcatttgcatggtttgttgaaaaccggacatggcactccagtcgccttcccgttccgctatcggctgaatttgattgcgagtgagatatttatgccagccagccagacgcagacgcgccgagacagaacttaatgggcccgctaacagcgcgatttgctggtgacccaatgcgaccagatgctccacgcccagtcgcgtaccgtcttcatgggagaaaataatactgttgatgggtgtctggtcagagacatcaagaaataacgccggaacattagtgcaggcagcttccacagcaatggcatcctggtcatccagcggatagttaatgatcagcccactgacgcgttgcgcgagaagattgtgcaccgccgctttacaggcttcgacgccgcttcgttctaccatcgacaccaccacgctggcacccagttgatcggcgcgagatttaatcgccgcgacaatttgcgacggcgcgtgcagggccagactggaggtggcaacgccaatcagcaacgactgtttgcccgccagttgttgtgccacgcggttgggaatgtaattcagctccgccatcgccgcttccactttttcccgcgttttcgcagaaacgtggctggcctggttcaccacgcgggaaacggtctgataagagacaccggcatactctgcgacatcgtataacgttactggtttcacattcaccaccctgaattgactctcttccgggcgctatcatgccataccgcgaaaggttttgcgccattcgatggtgtccgggatctcgacgctctcccttatgcgactcctgcattaggaaattaatacgactcactata

SEQ ID NO: 92 - DNA, 15194 bp, synthetic construct
  misc_feature 1..15194: note = Synthetic
  source 1..15194: mol_type = other DNA
ggggaattgtgagcggataacaattcccctgtagaaataattttgtttaactttaataaggagatataccatggtttccaagcctgaatcccggtctacgggactgaaacgagaagtcatttaataaggccactgttaaacgtaggtttccaagcctgaatcccggtctacgggactgaaacgatccgaattcgagctcggcgcgcctgcaggtcgacaagcttgcggccgcataatgcttaagtcgaacagaaagtaatcgtattgtacacggccgcataatcgaaattaatacgactcactataggggaattgtgagcggataacaattccccatcttagtatattagttaagtataagaaggagatatacatatggctaccctactccaaaccctcctgttacgaacgttgtcacccgaggcggatccagttctctatgtctacattgagacggtactacctgcaatggaacgggaatttggcttgattccagcccttggtggctcggaggaagcacactttcatctgctgaggcgacggggaaacaaatatgcggcggaaaattccaagcggtacgccagtcgctctgatcaaagcctgctggttcatgtgctcaatgccttgctgaccgcctggaatttgttgccattcctaagctccacatttgaactatcagatgatgagaaacggctgctctgcctggggctgaccctacacgattacaacaagtggtgccagggtgaggaggaagattcgccgattgcatgcgaagtagcagagattcttgagctttgtcaaacattgggagagcggttgaactttgacggattctgggcagagtggcgggagtatttgacagagattgcctaccttgcccaaaacacccagggaaaagttggaacaaatctacccaaagcgaattggggcagcttcaaaattctagatacccgtcgtctggattcgcccctacgatggctactcgcttttggcgatgtcgcagtccatctcagcgatccatctgacatcgcaatgaaaacggggggagatcgcctgcgggaacatctgcgctttctaggtattcgtcgcaagctggtctaccatcgcctgcgcaactgtacagggctattaaccaacggaattcataatgcggtaatgcattttgctagagaactggattggcaacccatcctcttctttgctcagggtgttgtttatctcgctcctcagggtgctggcgttccggatcgcttagaacttcaggaatttctctgggagcaggtcagcaaccgattagccaccagcatgttgcggggagaggttggtttcaaacgggatggcaagggactcaaggtggctccccaaaccctggaactgttctcccctgctcagttgattcggaacttgcccggtgttgtccaatcttatgtcggaaacgctaaatctcctgcgactccaaaacgacttgagaagctggaactcagttcaacagagcgagagtttttggctaaaggtgcagatttaagagcagatcgcattgccgagtttatctttctggcgcaaaaagagtttttcggagataaaccagaatttatcacttggatgcttgaaactctgggggttcaaactgctatcacttcggagcagacgcagcttcaatccggtggtgtgaactggggatggtatcacgcagcagcctattacgtcgcgagcaatgccacgctggatttggaagagatttcggagaaacttcaggaatttgccgagcagttggcaacctgggcggaggaaaacaatttcttcccagagcatcgcagcccaacccatgacatctttttcaactatctgactcaatacctggaagttcaggggtgggagcagcaggagcagtcctttcagcttgaactggcaggctatgttggcgcaaagactaaaactgccagacaaccgatttgctccctcagttccggtgaatttgcttcggaagaccagatggattctgttgtcctgttcaaaccgcagcagtacagcaacaagaatcctctcggtggacggcagatcaagcgggggatttccaaaatctggtccctggaaatgctgctcaggcaggctctttggtctgcgccagcaggcaaactagaggaacaacaacccattttcctttacatcttcccggcatacgtttactcgccccaggttgctgctgctgtccggttactggtgaatgatctgaagcgtgtcaacctctgggaagtccgtaaacactggttggagaatggcatggatgctcaggcgttgcgatcgtttccctggctagtcggtgacaaaaacgattcgggtaactctgctccatccagatactctggtgaagacttgcctttcatggcaatgaactacaccaccaccagaggcaaaacgataactgatgcctgggttgaacctgctttcctgacactggtgctgcctttgttgctgggtgtgaaagttgtcgccaccagtagccagattccactctatgaaagcgacaacgacttttgcgaatctgtcaagctggatggacccgccgatttctgggctttgctgcggctaccaacttccctgcatctccaggattggattggggggcgtgttcaaaatttagcagaaggcttgaaccgcttgatggttgcctactgcctgcatctggacagtcgtagcgctccaccagatgcgcgctggagagccttaaacggcagtgtccgagagatgacaacaaatgttctaaacattttttcacttgcagaggagggattacgtcgtgatggctctaaacgcgatgcaacagttgaagaaattaaccgctattggaaatacgcccagctgtgggcagagggagactctgatatgcaaaacaagttgaagattaccaaacgcttagtcgatgagtaccgccagttttacagagccagtgcgaacgaatccagccatacggttttgctgccattttctaaggcactggaacacattctttcggtaccaaatgattgggacgatgaggaaattattgttcaaggggcaggacagttacaggccgcgttagatcggcaggaagtctacaaacgtcccctcatgcttgacaaagagattccctttgaaattcgtcggatgaaggagtttgaggcaattcaaaccttcatgaccacctgcgtcattgacctatttggacaaatgtgtaaaggcgatcgcgcgctcctgcaggaacatcgcaaccgccttaaatcaggggtcgaatttgcctatcgtcagttagccctgcaagagaaacaagccaaagccaaccaaaaatctggagaacaatcatgagcattcttgaaaccttaaagccagagttccacacagccttccctcgcctcgcctctggcaaatatgtccatttcttcatggtgcgtcacagccagtcgttccccgtctttcaaaccgatggcgttttgaacactgcccgtactcaggctgggttaaatgcaggcgatgaaaaatccagacaggcaatcagtcgcctggtcatgttcaaacggaaacaggtgacaccagaacgactcacaggacgggaactgctgcgatcgctgggcattaacggagtagttgaaggggaagccaatttctgtgaatacaacggcgaaagatcctgtaaaaaatgccctgattgcattctctatggttttgcgattggggacagtggctcggaacgttccaaagtctactctgattcagccttttccctgagtccttatgaagtttcccatcgcagttttaccttcaatgctccctttgaaggtggaaccatgagtgagaagggtgaaatgcggagtgcgatcaacgaactggatcatgttttgccggaagttgcttttccttgcgttgaaacactacgtgaccccacgctggaaggcttcatttatgtaatgggcaacctgatccggactcggcgctatggagcgcaggagtcgcgtacagggacaatggcgaatcacattattggcgttaccctatgtgatggcgagatcttcagcaatttgcactttacccaagccctctacgatgccctgaagggtgatttgagtgcgccaattagtgatttatgcagagaggcggcgatcgtggcagaaaacttgctaaatcaggaacctgtgcggaagatccaagttatttttggagagcagttgaacgaactcctggctgaggtagcgggaatctgccaggatgaaactcgcttgcgaaacactgtgacagccttgtaccagcaatcacaagcctatgccgagacctatggtgctgctgctaagaaaggcaaaggcaaatcttaaggtggctgccaatggttatttatcgatgcaatctcacgttgcacgacaacgtattcttcgccactcgcgagatggggattctctacgaaacagagaagtatctacacaactgggcactcagctttgctctgtttgaagccacccacatccccaaaccctatcgcttgcagggtgcgatcgctcaacgacccggttatctggaagctgacaacgagcaaaaccttttagttctgaatcacgcaggcatctatgttttccctgctctaccacttcagtggtcctaccaagtcaataccttcaaagcggctcaagtgccttactatggcaaatccaaacagttcggggataagggagctgatcgcaactacccgattaactacggacgggcaaaagaactggcagttggcagcacctaccgaacgtatattcttgcccctgaaccaatccagatcccccactggatacggttgggtaagtgggcagccaagattcaggtggacgcaagacccatacctaactgtggaatccgacaacggtcaggagaatacacctgcgaccatccactaaatccgatcgacctgtccggttcaacccgattgctgttatacaaccgcattgtcatgccacccgctagtctcgtcagtcagtcgcgagtttctggggactactgggaaatttctaaaccatccaattggactgaatttccggactggtcagacctgaaagacatacccaatcaagtttgcttacccagcggagtagcctatggagccagtactgccattgccgcatcttaagtccaccgctctgcatatcctggtaattcatttaggcgttgccgaaagcggagccttgcctgttgaatccggtcgagccgtccatgctcaagttttggactggttccgcatggcggatccggcaatttctgaggcaattcacaaaagccaggaatccccgctcagtctctcaggcctggtcgggaaacgccgtaaagtaggggtgcgggcaggagatgaattttacttccgaattgggttgttagatgggagtttgattgaaccactgctgagtggtttggagaagtggggcgacaagcccttttctctggcaaagtgtccctttgttttccgcagtatcaatatgttgccaggaactgacccctgggttggttcttccgattatgccttgcttacccaaaccccggctactttggataacctagctctcaagctcctgtcgccaacaagcttcaagtcgaatgccgggcaaggaatccaaccctttcctttgccagagtcagttttcggaaatttacatcgtcgctggaatgtctttgcaccaaaggaattgcagtttccaaaaattcaatggagtgggctggtctctgattatgacctcaaaactcaaaagttaaggatggaaaactcggttgagatcggcgcagtgggctgggtgcgctatcggtttccagatccagaacaagcgagaattgcaaccattctggctcactttgccttttttgctggagttgggcgtaagacagcaatggggatgggacaggtggtgttggacaaaaaaacgtagcctaggctgctgccaccgctgagcaataactagcataaccccttggggcctctaaacgggtcttgaggggttttttgctgaaacctcaggcatttgagaagcacacggtcacactgcttccggtagtcaataaaccggtaaaccagcaatagacataagcggctatttaacgaccctcgggatctcgacgctctcccttatgcgactcctgcattaggaaattaatacgactcactataggggaattgtgagcggataacaattcccctgtagaaataattttgtttaactttaataaggagatataccatgcttgatgaaaaaagcttcgacaactggtgccaatccgttggtctgagccaggcagcacgtgaagttgtagagcgtgtgcgatcctcttcaccctcccgtcgcgtacagagcggtagaggaaacgtctccggcaattaccctagccgcaaaatgggcgtcacaattcagtttgagtcccatcgaaatgagcttgcccgcatctacgaactggagcatgaccccggcgttctggaatattacgatcaacctcccaaaatcgaacttgattatttgtcaaaaaatgggaggcgtgttcgtactcaatacacacctgatttctttgttatccgtaatgactcagcaggttgggaggagtgtaaaacagaggatgaccttaagcaattagctgaggacagccctaaccgttaccaacgagctgaggacaatcgctggcgatgtccacctgcagaagcctatgctcttccccttgagttgtattttcaggtacggtctagtgctgaaattaactggattttccagcaaaactttgtatggctagaagactaccttggtactgaatcacttactatggatgagtcggttgcagatgcaatcatagccacagtcagagcaaacgagggtatcacactactcgaactgattcaacaattacaaggcacagatgctgatgctatctacatcctgattgcaaccgaacaaatttatgttgatttgatggctgaacggttagcgaacagcgatcgggcacgggtattttccagtccagaaattgctcaagcctttcaactcattacgctggtcgaagcacctctggctaacagttctctccatatagttcaggtgggcgttggcacaaccatacactgggatggtgaagtctgggagattgttaatacaggctctaccatgacaggattgttgcgatcggacggtaagtttatcgagttgcccaattctgcaattgatgaattgattcagaagggcaagattcaatcaatttcagcacaacaagcccctgatagcaaagcagaagttgaagaaatgcttcgctgtgctcgtccagccgacattaaagaagccaaccgtcgctacgaaatcattcagccttacctggaaaaggatgcaccagcttgtccaactcgaacaattcggcgctggcgtaatcagtattggcaggcagaaaagctttacgggaatggctatgttggtttactaccaaatcatcagaagaaagggaattatttagttaaggttaatgaagtaactcaagcttttatgcttgagtttattgagaagcattacgaaaatctcaaacagcgtagtaagcttagagtttatcaggcttttgtggaggcatgtgaaagccacgaaccgaaactaaaccctccaagccgtactacattcacactagcgattcagaaacgagcaggacatcagcaaaccttgaaacgtgaaggacgaagagctgccattcagaaggaggagttttactgggaactggagctaactactcctcgacacggcgatcgccccttcgagatcgttcatattgatcacactcaactcgatattgagcttatcagttctttgaactccctggcccaatgcaaccctacatctgttgatgccacttacaatttgggtcgtccttgggcaacgttcatggttgatgcttacagccgccgtttgctagcagtttacataacctatgaagaacccagctatcgttcctgcatgatggtgctccgtatttgcgtacagcgatttaagcgttttcctcagacgatcgtggtagataatggtgcagaatttcacagccattactttgaacaactactggcaacatatcaatgcacaaagaagcacaggccacctgcaaaagctcgctttggtgcagttgttgaacgattatttggcactgcaaataagcaattaattcatgagttgcagggaaatacccaaattactcgcaagcatcgccaagttactcaatctgttcatccccaaaaattggctctttggacgttaggcgatctctacgaatcactatgtgaatgggcttacaaagtttatgctgaccgccagcaccctgcgctagggcaaagccctaatgctgcattcgctcaagggctggcgttgggaggtagtcgcatccatcgccgagtagagtatgaccaagtcttccgtatcttgacattgcccgcaccggaaagaggacaacgcaaagttcagccaggacaagggataaaacttagcaatatctactactggtcaaatgcctttcgagacccagaaattgaacaatcgatggttgaagttcgttatgatccctttgatgccagcattgcctatgcactggtgcgaaaacaatgggtccggtgtatttcctcctactatcaacagtttcaaaatcgttcagaaaaggaaattcgtttaataactgctgagttgattaagcaaaagcgtgaccagggaagagatacaaatgttacggataaagaattggcgcagtttttaagctctacagaaatgaaagaaggcaaattcttggagcaacgcttgcggactacagaaaacagggtagttattcagaatagtacagctacagaagacgatccccccatcactaattctcagaattcttacgagccatcgcttatgctgccaagtgaggatgagttggatgatcaggaagactggttaaataccggcaaagctgaggcagaattagaattctatggagagtactagcgatgcaacctcaaataagcttcccaaaagagttactgcttcaaccaattcctgatcgaattgcctatttcaaagattacacaatggcacatccgaagcttatagaagcagaccggaagttaatgcatgctattcgtgaacctggaggagctgctcttatctttgtctttggtcctaccggagttggaaagtctactctattgaaacgaattactcaaaagctgcttaaagaagcattgtctttgatggagactgacaaaggctatattcctattgcgggggtagagataaaaactccagaggatagtaactttgattggaacgatttttatgttcgtgctcttatggcacttaatgagccaatgatcgagaaaaaaatcaaccgtacaggtgcaaaactaaaattacggttggcacttgaatctgcccttcgtaatcgccgtcctgatgctttttacatagacgaagctcaaaattttggtaaggtagccagtgggcgaaaattgcaagatcaaacagattgcattaaatctcttgcaaatctcgctcaaactcggtttatcttatgtgggatttatgaacttttaccactacgaaatctaagtgggcagctatgccgccgtagccatagtattcactttccacgttattcggcagattctgagcaggatctaaaggcctttaaaagtgcgttattaacactacaaaatcaactccctcttcccgaaccacctgatttagtggcgcattgggaattttgttatgagagaactatcggctgtattggtattttgaaagatttgctccttcggactctaagcgcgattttagtacgggatggagacaaagttttgacattgaagcccaaggatttagaacaacgtgcatggtctttagaagaatgtttggttatgctgagagaggcaaaggaaggagagcaacaacttactgacaaatcgggcttacatgaggaattacggacagctttagggtttaatgcagctacgtccaagcagtctgccaaatcatccaagtcaacatcaagcaaaaaagcaggcagtgttggaaagccttcacctcgtcgtcgttcagttggaatagatcaagatgccagctaatagcagctccaattacgaaagaaaaatattttcaactagaatcgagcttaataaattgtccaattaagtatgctcaacagcagttcttaaagctcttcttcaattaaatttataaaggtatggctatggcgactgaagtaccttttacttttagcacgtgggatttatctaaaccccttaccccagctcgtagttctctctttagcttgaaaccgattggggttggaacggctgcagtagaaagcctcactggatatattgcacgtttggctgaagctcactgtatctggccaggagatcttcttgcagctgaatttagttcttcatattcctattcttacctgcatagcatgaggggccgtattgctgctttgaatggtaatagccaaatggctcaggatgctgtacttaagcttcaagagcttaccttacaggagaatttatccgctttaacaatgttaggctgggctaatattttacccgcaaaagggttgttaaatcggactcgaacttggtgtccggtttgttttgaggcgtggcgtttcatcaaaagtcctatatatgagcctctattatggtatttaacctcggtcaaatattgtccaattcatcagcaacgccttttatctcaatgtccattctgcgggtgccagcagcctcctctagactggaaaactcggccgggctattgttcaaggtgccaggtgtggctgggttcaccaccaggtgtaacttccagtaattcgctttctaatacagaaataaggtgggagagttgggttgcccagagctgcggaaatttgttagcctatagtcctcgtttacacaagatatccgttagcgttcaggtcgcagcatccctttctaaatgtatcaacctttatgcagagggcaatattgcggagtttgcccgtcaaatgagcttgccaaaaacttctgtttggctgtggcagtctggtcaggtactccccgagttatccaggcttttaagcatctgctatcacttcaatctgtcgctcttagactttctaattaatacaccagttcttaagataaggagagacttaattccagaaaagagaactaatgagtttcgccagcctcgaagagatccctcaaccatatctcaattgcaacctattctgggattaattcttttcgagcagccacctccctctttagcagcagtagcgtgtcgcttaggttgtagctcaagatccctgcgccataattttcctgatctctgtggctctatttctgcacgttaccttcaacaccgtgatgaagtttataaagaaaaattgaatcaattctgtcaagacttgcgccaagttgtacttcaactttattcggcaggcattgatccgactcggagccaagttgctcgccgtctgaggaaacccgcttattttagagaacccgaagtcgaggcaatgcttgagtctgttcgacgagaattaggcttgcacagcaattctcagcatgagactaattctcacaaaaacgcccagttttaacttaagtcgaacagaaagtaatcgtattgtacacggccgcataatcgaaattaatacgactcactataggggaattgtgagcggataacaattccccatcttagtatattagttaagtataagaaggagatatacatatggcagatctcaattggatatcggccggccacgcgatcgctgacgtcggtaccctcgagtctggtaaagaaaccgctgctgcgaaatttgaacgccagcacatggactcgtctactagcgcagcttaattaacctaggctgctgccaccgctgagcaataactagcataaccccttggggcctctaaacgggtcttgaggggttttttgctgaaacctcaggcatttgagaagcacacggtcacactgcttccggtagtgccctgaaccgacgaccgggtcatcgtggccggatcttgcggcccctcggcttgaacgaattgttagacattatttgccgactaccttggtgatctcgcctttcacgtagtggacaaattcttccaactgatctgcgcgcgaggccaagcgatcttcttcttgtccaagataagcctgtctagcttcaagtatgacgggctgatactgggccggcaggcgctccattgcccagtcggcagcgacatccttcggcgcgattttgccggttactgcgctgtaccaaatgcgggacaacgtaagcactacatttcgctcatcgccagcccagtcgggcggcgagttccatagcgttaaggtttcatttagcgcctcaaatagatcctgttcaggaaccggatcaaagagttcctccgccgctggacctaccaaggcaacgctatgttctcttgcttttgtcagcaagatagccagatcaatgtcgatcgtggctggctcgaagatacctgcaagaatgtcattgcgctgccattctccaaattgcagttcgcgcttagctggataacgccacggaatgatgtcgtcgtgcacaacaatggtgacttctacagcgcggagaatctcgctctctccaggggaagccgaagtttccaaaaggtcgttgatcaaagctcgccgcgttgtttcatcaagccttacggtcaccgtaaccagcaaatcaatatcactgtgtggcttcaggccgccatccactgcggagccgtacaaatgtacggccagcaacgtcggttcgagatggcgctcgatgacgccaactacctctgatagttgagtcgatacttcggcgatcaccgcttccctcatactcttcctttttcaatattattgaagcatttatcagggttattgtctcatgagcggatacatatttgaatgtatttagaaaaataaacaaatagctagctcactcggtcgctacgctccgggcgtgagactgcggcgggcgctgcggacacatacaaagttacccacagattccgtggataagcaggggactaacatgtgaggcaaaacagcagggccgcgccggtggcgtttttccataggctccgccctcctgccagagttcacataaacagacgcttttccggtgcatctgtgggagccgtgaggctcaaccatgaatctgacagtacgggcgaaacccgacaggacttaaagatccccaccgtttccggcgggtcgctccctcttgcgctctcctgttccgaccctgccgtttaccggatacctgttccgcctttctcccttacgggaagtgtggcgctttctcatagctcacacactggtatctcggctcggtgtaggtcgttcgctccaagctgggctgtaagcaagaactccccgttcagcccgactgctgcgccttatccggtaactgttcacttgagtccaacccggaaaagcacggtaaaacgccactggcagcagccattggtaactgggagttcgcagaggatttgtttagctaaacacgcggttgctcttgaagtgtgcgccaaagtccggctacactggaaggacagatttggttgctgtgctctgcgaaagccagttaccacggttaagcagttccccaactgacttaaccttcgatcaaaccacctccccaggtggttttttcgtttacagggcaaaagattacgcgcagaaaaaaaggatctcaagaagatcctttgatcttttctactgaaccgctctagatttcagtgcaatttatctcttcaaatgtagcacctgaagtcagccccatacgatataagttgtaattctcatgttagtcatgccccgcgcccaccggaaggagctgactgggttgaaggctctcaagggcatcggtcgagatcccggtgcctaatgagtgagctaacttacattaattgcgttgcgctcactgcccgctttccagtcgggaaacctgtcgtgccagctgcattaatgaatcggccaacgcgcggggagaggcggtttgcgtattgggcgccagggtggtttttcttttcaccagtgagacgggcaacagctgattgcccttcaccgcctggccctgagagagttgcagcaagcggtccacgctggtttgccccagcaggcgaaaatcctgtttgatggtggttaacggcgggatataacatgagctgtcttcggtatcgtcgtatcccactaccgagatgtccgcaccaacgcgcagcccggactcggtaatggcgcgcattgcgcccagcgccatctgatcgttggcaaccagcatcgcagtgggaacgatgccctcattcagcatttgcatggtttgttgaaaaccggacatggcactccagtcgccttcccgttccgctatcggctgaatttgattgcgagtgagatatttatgccagccagccagacgcagacgcgccgagacagaacttaatgggcccgctaacagcgcgatttgctggtgacccaatgcgaccagatgctccacgcccagtcgcgtaccgtcttcatgggagaaaataatactgttgatgggtgtctggtcagagacatcaagaaataacgccggaacattagtgcaggcagcttccacagcaatggcatcctggtcatccagcggatagttaatgatcagcccactgacgcgttgcgcgagaagattgtgcaccgccgctttacaggcttcgacgccgcttcgttctaccatcgacaccaccacgctggcacccagttgatcggcgcgagatttaatcgccgcgacaatttgcgacggcgcgtgcagggccagactggaggtggcaacgccaatcagcaacgactgtttgcccgccagttgttgtgccacgcggttgggaatgtaattcagctccgccatcgccgcttccactttttcccgcgttttcgcagaaacgtggctggcctggttcaccacgcgggaaacggtctgataagagacaccggcatactctgcgacatcgtataacgttactggtttcacattcaccaccctgaattgactctcttccgggcgctatcatgccataccgcgaaaggttttgcgccattcgatggtgtccgggatctcgacgctctcccttatgcgactcctgcattaggaaattaatacgactcactata

SEQ ID NO: 93 - DNA, 15194 bp, synthetic construct
  misc_feature 1..15194: note = Synthetic
  source 1..15194: mol_type = other DNA
ggggaattgtgagcggataacaattcccctgtagaaataattttgtttaactttaataaggagatataccatggtttccaagcctgaatcccggtctacgggactgaaacaccatctatgtatagctacgatggaatagtaaagggtttccaagcctgaatcccggtctacgggactgaaacgatccgaattcgagctcggcgcgcctgcaggtcgacaagcttgcggccgcataatgcttaagtcgaacagaaagtaatcgtattgtacacggccgcataatcgaaattaatacgactcactataggggaattgtgagcggataacaattccccatcttagtatattagttaagtataagaaggagatatacatatggctaccctactccaaaccctcctgttacgaacgttgtcacccgaggcggatccagttctctatgtctacattgagacggtactacctgcaatggaacgggaatttggcttgattccagcccttggtggctcggaggaagcacactttcatctgctgaggcgacggggaaacaaatatgcggcggaaaattccaagcggtacgccagtcgctctgatcaaagcctgctggttcatgtgctcaatgccttgctgaccgcctggaatttgttgccattcctaagctccacatttgaactatcagatgatgagaaacggctgctctgcctggggctgaccctacacgattacaacaagtggtgccagggtgaggaggaagattcgccgattgcatgcgaagtagcagagattcttgagctttgtcaaacattgggagagcggttgaactttgacggattctgggcagagtggcgggagtatttgacagagattgcctaccttgcccaaaacacccagggaaaagttggaacaaatctacccaaagcgaattggggcagcttcaaaattctagatacccgtcgtctggattcgcccctacgatggctactcgcttttggcgatgtcgcagtccatctcagcgatccatctgacatcgcaatgaaaacggggggagatcgcctgcgggaacatctgcgctttctaggtattcgtcgcaagctggtctaccatcgcctgcgcaactgtacagggctattaaccaacggaattcataatgcggtaatgcattttgctagagaactggattggcaacccatcctcttctttgctcagggtgttgtttatctcgctcctcagggtgctggcgttccggatcgcttagaacttcaggaatttctctgggagcaggtcagcaaccgattagccaccagcatgttgcggggagaggttggtttcaaacgggatggcaagggactcaaggtggctccccaaaccctggaactgttctcccctgctcagttgattcggaacttgcccggtgttgtccaatcttatgtcggaaacgctaaatctcctgcgactccaaaacgacttgagaagctggaactcagttcaacagagcgagagtttttggctaaaggtgcagatttaagagcagatcgcattgccgagtttatctttctggcgcaaaaagagtttttcggagataaaccagaatttatcacttggatgcttgaaactctgggggttcaaactgctatcacttcggagcagacgcagcttcaatccggtggtgtgaactggggatggtatcacgcagcagcctattacgtcgcgagcaatgccacgctggatttggaagagatttcggagaaacttcaggaatttgccgagcagttggcaacctgggcggaggaaaacaatttcttcccagagcatcgcagcccaacccatgacatctttttcaactatctgactcaatacctggaagttcaggggtgggagcagcaggagcagtcctttcagcttgaactggcaggctatgttggcgcaaagactaaaactgccagacaaccgatttgctccctcagttccggtgaatttgcttcggaagaccagatggattctgttgtcctgttcaaaccgcagcagtacagcaacaagaatcctctcggtggacggcagatcaagcgggggatttccaaaatctggtccctggaaatgctgctcaggcaggctctttggtctgcgccagcaggcaaactagaggaacaacaacccattttcctttacatcttcccggcatacgtttactcgccccaggttgctgctgctgtccggttactggtgaatgatctgaagcgtgtcaacctctgggaagtccgtaaacactggttggagaatggcatggatgctcaggcgttgcgatcgtttccctggctagtcggtgacaaaaacgattcgggtaactctgctccatccagatactctggtgaagacttgcctttcatggcaatgaactacaccaccaccagaggcaaaacgataactgatgcctgggttgaacctgctttcctgacactggtgctgcctttgttgctgggtgtgaaagttgtcgccaccagtagccagattccactctatgaaagcgacaacgacttttgcgaatctgtcaagctggatggacccgccgatttctgggctttgctgcggctaccaacttccctgcatctccaggattggattggggggcgtgttcaaaatttagcagaaggcttgaaccgcttgatggttgcctactgcctgcatctggacagtcgtagcgctccaccagatgcgcgctggagagccttaaacggcagtgtccgagagatgacaacaaatgttctaaacattttttcacttgcagaggagggattacgtcgtgatggctctaaacgcgatgcaacagttgaagaaattaaccgctattggaaatacgcccagctgtgggcagagggagactctgatatgcaaaacaagttgaagattaccaaacgcttagtcgatgagtaccgccagttttacagagccagtgcgaacgaatccagccatacggttttgctgccattttctaaggcactggaacacattctttcggtaccaaatgattgggacgatgaggaaattattgttcaaggggcaggacagttacaggccgcgttagatcggcaggaagtctacaaacgtcccctcatgcttgacaaagagattccctttgaaattcgtcggatgaaggagtttgaggcaattcaaaccttcatgaccacctgcgtcattgacctatttggacaaatgtgtaaaggcgatcgcgcgctcctgcaggaacatcgcaaccgccttaaatcaggggtcgaatttgcctatcgtcagttagccctgcaagagaaacaagccaaagccaaccaaaaatctggagaacaatcatgagcattcttgaaaccttaaagccagagttccacacagccttccctcgcctcgcctctggcaaatatgtccatttcttcatggtgcgtcacagccagtcgttccccgtctttcaaaccgatggcgttttgaacactgcccgtactcaggctgggttaaatgcaggcgatgaaaaatccagacaggcaatcagtcgcctggtcatgttcaaacggaaacaggtgacaccagaacgactcacaggacgggaactgctgcgatcgctgggcattaacggagtagttgaaggggaagccaatttctgtgaatacaacggcgaaagatcctgtaaaaaatgccctgattgcattctctatggttttgcgattggggacagtggctcggaacgttccaaagtctactctgattcagccttttccctgagtccttatgaagtttcccatcgcagttttaccttcaatgctccctttgaaggtggaaccatgagtgagaagggtgaaatgcggagtgcgatcaacgaactggatcatgttttgccggaagttgcttttccttgcgttgaaacactacgtgaccccacgctggaaggcttcatttatgtaatgggcaacctgatccggactcggcgctatggagcgcaggagtcgcgtacagggacaatggcgaatcacattattggcgttaccctatgtgatggcgagatcttcagcaatttgcactttacccaagccctctacgatgccctgaagggtgatttgagtgcgccaattagtgatttatgcagagaggcggcgatcgtggcagaaaacttgctaaatcaggaacctgtgcggaagatccaagttatttttggagagcagttgaacgaactcctggctgaggtagcgggaatctgccaggatgaaactcgcttgcgaaacactgtgacagccttgtaccagcaatcacaagcctatgccgagacctatggtgctgctgctaagaaaggcaaaggcaaatcttaaggtggctgccaatggttatttatcgatgcaatctcacgttgcacgacaacgtattcttcgccactcgcgagatggggattctctacgaaacagagaagtatctacacaactgggcactcagctttgctctgtttgaagccacccacatccccaaaccctatcgcttgcagggtgcgatcgctcaacgacccggttatctggaagctgacaacgagcaaaaccttttagttctgaatcacgcaggcatctatgttttccctgctctaccacttcagtggtcctaccaagtcaataccttcaaagcggctcaagtgccttactatggcaaatccaaacagttcggggataagggagctgatcgcaactacccgattaactacggacgggcaaaagaactggcagttggcagcacctaccgaacgtatattcttgcccctgaaccaatccagatcccccactggatacggttgggtaagtgggcagccaagattcaggtggacgcaagacccatacctaactgtggaatccgacaacggtcaggagaatacacctgcgaccatccactaaatccgatcgacctgtccggttcaacccgattgctgttatacaaccgcattgtcatgccacccgctagtctcgtcagtcagtcgcgagtttctggggactactgggaaatttctaaaccatccaattggactgaatttccggactggtcagacctgaaagacatacccaatcaagtttgcttacccagcggagtagcctatggagccagtactgccattgccgcatcttaagtccaccgctctgcatatcctggtaattcatttaggcgttgccgaaagcggagccttgcctgttgaatccggtcgagccgtccatgctcaagttttggactggttccgcatggcggatccggcaatttctgaggcaattcacaaaagccaggaatccccgctcagtctctcaggcctggtcgggaaacgccgtaaagtaggggtgcgggcaggagatgaattttacttccgaattgggttgttagatgggagtttgattgaaccactgctgagtggtttggagaagtggggcgacaagcccttttctctggcaaagtgtccctttgttttccgcagtatcaatatgttgccaggaactgacccctgggttggttcttccgattatgccttgcttacccaaaccccggctactttggataacctagctctcaagctcctgtcgccaacaagcttcaagtcgaatgccgggcaaggaatccaaccctttcctttgccagagtcagttttcggaaatttacatcgtcgctggaatgtctttgcaccaaaggaattgcagtttccaaaaattcaatggagtgggctggtctctgattatgacctcaaaactcaaaagttaaggatggaaaactcggttgagatcggcgcagtgggctgggtgcgctatcggtttccagatccagaacaagcgagaattgcaaccattctggctcactttgccttttttgctggagttgggcgtaagacagcaatggggatgggacaggtggtgttggacaaaaaaacgtagcctaggctgctgccaccgctgagcaataactagcataaccccttggggcctctaaacgggtcttgaggggttttttgctgaaacctcaggcatttgagaagcacacggtcacactgcttccggtagtcaataaaccggtaaaccagcaatagacataagcggctatttaacgaccctcgggatctcgacgctctcccttatgcgactcctgcattaggaaattaatacgactcactataggggaattgtgagcggataacaattcccctgtagaaataattttgtttaactttaataaggagatataccatgcttgatgaaaaaagcttcgacaactggtgccaatccgttggtctgagccaggcagcacgtgaagttgtagagcgtgtgcgatcctcttcaccctcccgtcgcgtacagagcggtagaggaaacgtctccggcaattaccctagccgcaaaatgggcgtcacaattcagtttgagtcccatcgaaatgagcttgcccgcatctacgaactggagcatgaccccggcgttctggaatattacgatcaacctcccaaaatcgaacttgattatttgtcaaaaaatgggaggcgtgttcgtactcaatacacacctgatttctttgttatccgtaatgactcagcaggttgggaggagtgtaaaacagaggatgaccttaagcaattagctgaggacagccctaaccgttaccaacgagctgaggacaatcgctggcgatgtccacctgcagaagcctatgctcttccccttgagttgtattttcaggtacggtctagtgctgaaattaactggattttccagcaaaactttgtatggctagaagactaccttggtactgaatcacttactatggatgagtcggttgcagatgcaatcatagccacagtcagagcaaacgagggtatcacactactcgaactgattcaacaattacaaggcacagatgctgatgctatctacatcctgattgcaaccgaacaaatttatgttgatttgatggctgaacggttagcgaacagcgatcgggcacgggtattttccagtccagaaattgctcaagcctttcaactcattacgctggtcgaagcacctctggctaacagttctctccatatagttcaggtgggcgttggcacaaccatacactgggatggtgaagtctgggagattgttaatacaggctctaccatgacaggattgttgcgatcggacggtaagtttatcgagttgcccaattctgcaattgatgaattgattcagaagggcaagattcaatcaatttcagcacaacaagcccctgatagcaaagcagaagttgaagaaatgcttcgctgtgctcgtccagccgacattaaagaagccaaccgtcgctacgaaatcattcagccttacctggaaaaggatgcaccagcttgtccaactcgaacaattcggcgctggcgtaatcagtattggcaggcagaaaagctttacgggaatggctatgttggtttactaccaaatcatcagaagaaagggaattatttagttaaggttaatgaagtaactcaagcttttatgcttgagtttattgagaagcattacgaaaatctcaaacagcgtagtaagcttagagtttatcaggcttttgtggaggcatgtgaaagccacgaaccgaaactaaaccctccaagccgtactacattcacactagcgattcagaaacgagcaggacatcagcaaaccttgaaacgtgaaggacgaagagctgccattcagaaggaggagttttactgggaactggagctaactactcctcgacacggcgatcgccccttcgagatcgttcatattgatcacactcaactcgatattgagcttatcagttctttgaactccctggcccaatgcaaccctacatctgttgatgccacttacaatttgggtcgtccttgggcaacgttcatggttgatgcttacagccgccgtttgctagcagtttacataacctatgaagaacccagctatcgttcctgcatgatggtgctccgtatttgcgtacagcgatttaagcgttttcctcagacgatcgtggtagataatggtgcagaatttcacagccattactttgaacaactactggcaacatatcaatgcacaaagaagcacaggccacctgcaaaagctcgctttggtgcagttgttgaacgattatttggcactgcaaataagcaattaattcatgagttgcagggaaatacccaaattactcgcaagcatcgccaagttactcaatctgttcatccccaaaaattggctctttggacgttaggcgatctctacgaatcactatgtgaatgggcttacaaagtttatgctgaccgccagcaccctgcgctagggcaaagccctaatgctgcattcgctcaagggctggcgttgggaggtagtcgcatccatcgccgagtagagtatgaccaagtcttccgtatcttgacattgcccgcaccggaaagaggacaacgcaaagttcagccaggacaagggataaaacttagcaatatctactactggtcaaatgcctttcgagacccagaaattgaacaatcgatggttgaagttcgttatgatccctttgatgccagcattgcctatgcactggtgcgaaaacaatgggtccggtgtatttcctcctactatcaacagtttcaaaatcgttcagaaaaggaaattcgtttaataactgctgagttgattaagcaaaagcgtgaccagggaagagatacaaatgttacggataaagaattggcgcagtttttaagctctacagaaatgaaagaaggcaaattcttggagcaacgcttgcggactacagaaaacagggtagttattcagaatagtacagctacagaagacgatccccccatcactaattctcagaattcttacgagccatcgcttatgctgccaagtgaggatgagttggatgatcaggaagactggttaaataccggcaaagctgaggcagaattagaattctatggagagtactagcgatgcaacctcaaataagcttcccaaaagagttactgcttcaaccaattcctgatcgaattgcctatttcaaagattacacaatggcacatccgaagcttatagaagcagaccggaagttaatgcatgctattcgtgaacctggaggagctgctcttatctttgtctttggtcctaccggagttggaaagtctactctattgaaacgaattactcaaaagctgcttaaagaagcattgtctttgatggagactgacaaaggctatattcctattgcgggggtagagataaaaactccagaggatagtaactttgattggaacgatttttatgttcgtgctcttatggcacttaatgagccaatgatcgagaaaaaaatcaaccgtacaggtgcaaaactaaaattacggttggcacttgaatctgcccttcgtaatcgccgtcctgatgctttttacatagacgaagctcaaaattttggtaaggtagccagtgggcgaaaattgcaagatcaaacagattgcattaaatctcttgcaaatctcgctcaaactcggtttatcttatgtgggatttatgaacttttaccactacgaaatctaagtgggcagctatgccgccgtagccatagtattcactttccacgttattcggcagattctgagcaggatctaaaggcctttaaaagtgcgttattaacactacaaaatcaactccctcttcccgaaccacctgatttagtggcgcattgggaattttgttatgagagaactatcggctgtattggtattttgaaagatttgctccttcggactctaagcgcgattttagtacgggatggagacaaagttttgacattgaagcccaaggatttagaacaacgtgcatggtctttagaagaatgtttggttatgctgagagaggcaaaggaaggagagcaacaacttactgacaaatcgggcttacatgaggaattacggacagctttagggtttaatgcagctacgtccaagcagtctgccaaatcatccaagtcaacatcaagcaaaaaagcaggcagtgttggaaagccttcacctcgtcgtcgttcagttggaatagatcaagatgccagctaatagcagctccaattacgaaagaaaaatattttcaactagaatcgagcttaataaattgtccaattaagtatgctcaacagcagttcttaaagctcttcttcaattaaatttataaaggtatggctatggcgactgaagtaccttttacttttagcacgtgggatttatctaaaccccttaccccagctcgtagttctctctttagcttgaaaccgattggggttggaacggctgcagtagaaagcctcactggatatattgcacgtttggctgaagctcactgtatctggccaggagatcttcttgcagctgaatttagttcttcatattcctattcttacctgcatagcatgaggggccgtattgctgctttgaatggtaatagccaaatggctcaggatgctgtacttaagcttcaagagcttaccttacaggagaatttatccgctttaacaatgttaggctgggctaatattttacccgcaaaagggttgttaaatcggactcgaacttggtgtccggtttgttttgaggcgtggcgtttcatcaaaagtcctatatatgagcctctattatggtatttaacctcggtcaaatattgtccaattcatcagcaacgccttttatctcaatgtccattctgcgggtgccagcagcctcctctagactggaaaactcggccgggctattgttcaaggtgccaggtgtggctgggttcaccaccaggtgtaacttccagtaattcgctttctaatacagaaataaggtgggagagttgggttgcccagagctgcggaaatttgttagcctatagtcctcgtttacacaagatatccgttagcgttcaggtcgcagcatccctttctaaatgtatcaacctttatgcagagggcaatattgcggagtttgcccgtcaaatgagcttgccaaaaacttctgtttggctgtggcagtctggtcaggtactccccgagttatccaggcttttaagcatctgctatcacttcaatctgtcgctcttagactttctaattaatacaccagttcttaagataaggagagacttaattccagaaaagagaactaatgagtttcgccagcctcgaagagatccctcaaccatatctcaattgcaacctattctgggattaattcttttcgagcagccacctccctctttagcagcagtagcgtgtcgcttaggttgtagctcaagatccctgcgccataattttcctgatctctgtggctctatttctgcacgttaccttcaacaccgtgatgaagtttataaagaaaaattgaatcaattctgtcaagacttgcgccaagttgtacttcaactttattcggcaggcattgatccgactcggagccaagttgctcgccgtctgaggaaacccgcttattttagagaacccgaagtcgaggcaatgcttgagtctgttcgacgagaattaggcttgcacagcaattctcagcatgagactaattctcacaaaaacgcccagttttaacttaagtcgaacagaaagtaatcgtattgtacacggccgcataatcgaaattaatacgactcactataggggaattgtgagcggataacaattccccatcttagtatattagttaagtataagaaggagatatacatatggcagatctcaattggatatcggccggccacgcgatcgctgacgtcggtaccctcgagtctggtaaagaaaccgctgctgcgaaatttgaacgccagcacatggactcgtctactagcgcagcttaattaacctaggctgctgccaccgctgagcaataactagcataaccccttggggcctctaaacgggtcttgaggggttttttgctgaaacctcaggcatttgagaagcacacggtcacactgcttccggtagtgccctgaaccgacgaccgggtcatcgtggccggatcttgcggcccctcggcttgaacgaattgttagacattatttgccgactaccttggtgatctcgcctttcacgtagtggacaaattcttccaactgatctgcgcgcgaggccaagcgatcttcttcttgtccaagataagcctgtctagcttcaagtatgacgggctgatactgggccggcaggcgctccattgcccagtcggcagcgacatccttcggcgcgattttgccggttactgcgctgtaccaaatgcgggacaacgtaagcactacatttcgctcatcgccagcccagtcgggcggcgagttccatagcgttaaggtttcatttagcgcctcaaatagatcctgttcaggaaccggatcaaagagttcctccgccgctggacctaccaaggcaacgctatgttctcttgcttttgtcagcaagatagccagatcaatgtcgatcgtggctggctcgaagatacctgcaagaatgtcattgcgctgccattctccaaattgcagttcgcgcttagctggataacgccacggaatgatgtcgtcgtgcacaacaatggtgacttctacagcgcggagaatctcgctctctccaggggaagccgaagtttccaaaaggtcgttgatcaaagctcgccgcgttgtttcatcaagccttacggtcaccgtaaccagcaaatcaatatcactgtgtggcttcaggccgccatccactgcggagccgtacaaatgtacggccagcaacgtcggttcgagatggcgctcgatgacgccaactacctctgatagttgagtcgatacttcggcgatcaccgcttccctcatactcttcctttttcaatattattgaagcatttatcagggttattgtctcatgagcggatacatatttgaatgtatttagaaaaataaacaaatagctagctcactcggtcgctacgctccgggcgtgagactgcggcgggcgctgcggacacatacaaagttacccacagattccgtggataagcaggggactaacatgtgaggcaaaacagcagggccgcgccggtggcgtttttccataggctccgccctcctgccagagttcacataaacagacgcttttccggtgcatctgtgggagccgtgaggctcaaccatgaatctgacagtacgggcgaaacccgacaggacttaaagatccccaccgtttccggcgggtcgctccctcttgcgctctcctgttccgaccctgccgtttaccggatacctgttccgcctttctcccttacgggaagtgtggcgctttctcatagctcacacactggtatctcggctcggtgtaggtcgttcgctccaagctgggctgtaagcaagaactccccgttcagcccgactgctgcgccttatccggtaactgttcacttgagtccaacccggaaaagcacggtaaaacgccactggcagcagccattggtaactgggagttcgcagaggatttgtttagctaaacacgcggttgctcttgaagtgtgcgccaaagtccggctacactggaaggacagatttggttgctgtgctctgcgaaagccagttaccacggttaagcagttccccaactgacttaaccttcgatcaaaccacctccccaggtggttttttcgtttacagggcaaaagattacgcgcagaaaaaaaggatctcaagaagatcctttgatcttttctactgaaccgctctagatttcagtgcaatttatctcttcaaatgtagcacctgaagtcagccccatacgatataagttgtaattctcatgttagtcatgccccgcgcccaccggaaggagctgactgggttgaaggctctcaagggcatcggtcgagatcccggtgcctaatgagtgagctaacttacattaattgcgttgcgctcactgcccgctttccagtcgggaaacctgtcgtgccagctgcattaatgaatcggccaacgcgcggggagaggcggtttgcgtattgggcgccagggtggtttttcttttcaccagtgagacgggcaacagctgattgcccttcaccgcctggccctgagagagttgcagcaagcggtccacgctggtttgccccagcaggcgaaaatcctgtttgatggtggttaacggcgggatataacatgagctgtcttcggtatcgtcgtatcccactaccgagatgtccgcaccaacgcgcagcccggactcggtaatggcgcgcattgcgcccagcgccatctgatcgttggcaaccagcatcgcagtgggaacgatgccctcattcagcatttgcatggtttgttgaaaaccggacatggcactccagtcgccttcccgttccgctatcggctgaatttgattgcgagtgagatatttatgccagccagccagacgcagacgcgccgagacagaacttaatgggcccgctaacagcgcgatttgctggtgacccaatgcgaccagatgctccacgcccagtcgcgtaccgtcttcatgggagaaaataatactgttgatgggtgtctggtcagagacatcaagaaataacgccggaacattagtgcaggcagcttccacagcaatggcatcctggtcatccagcggatagttaatgatcagcccactgacgcgttgcgcgagaagattgtgcaccgccgctttacaggcttcgacgccgcttcgttctaccatcgacaccaccacgctggcacccagttgatcggcgcgagatttaatcgccgcgacaatttgcgacggcgcgtgcagggccagactggaggtggcaacgccaatcagcaacgactgtttgcccgccagttgttgtgccacgcggttgggaatgtaattcagctccgccatcgccgcttccactttttcccgcgttttcgcagaaacgtggctggcctggttcaccacgcgggaaacggtctgataagagacaccggcatactctgcgacatcgtataacgttactggtttcacattcaccaccctgaattgactctcttccgggcgctatcatgccataccgcgaaaggttttgcgccattcgatggtgtccgggatctcgacgctctcccttatgcgactcctgcattaggaaattaatacgactcactata

SEQ ID NO: 94 - DNA, 14587 bp, synthetic construct
  source 1..14587: mol_type = other DNA
  misc_feature 1..14587: note = Synthetic
ggggaattgtgagcggataacaattcccctgtagaaataattttgtttaactttaataaggagatataccatggtttccaagcctgaatcccggtctacgggactgaaacgagaagtcatttaataaggccactgttaaacgtaggtttccaagcctgaatcccggtctacgggactgaaacgatccgaattcgagctcggcgcgcctgcaggtcgacaagcttgcggccgcataatgcttaagtcgaacagaaagtaatcgtattgtacacggccgcataatcgaaattaatacgactcactataggggaattgtgagcggataacaattccccatcttagtatattagttaagtataagaaggagatatacatatggctaccctactccaaaccctcctgttacgaacgttgtcacccgaggcggatccagttctctatgtctacattgagacggtactacctgcaatggaacgggaatttggcttgattccagcccttggtggctcggaggaagcacactttcatctgctgaggcgacggggaaacaaatatgcggcggaaaattccaagcggtacgccagtcgctctgatcaaagcctgctggttcatgtgctcaatgccttgctgaccgcctggaatttgttgccattcctaagctccacatttgaactatcagatgatgagaaacggctgctctgcctggggctgaccctacacgattacaacaagtggtgccagggtgaggaggaagattcgccgattgcatgcgaagtagcagagattcttgagctttgtcaaacattgggagagcggttgaactttgacggattctgggcagagtggcgggagtatttgacagagattgcctaccttgcccaaaacacccagggaaaagttggaacaaatctacccaaagcgaattggggcagcttcaaaattctagatacccgtcgtctggattcgcccctacgatggctactcgcttttggcgatgtcgcagtccatctcagcgatccatctgacatcgcaatgaaaacggggggagatcgcctgcgggaacatctgcgctttctaggtattcgtcgcaagctggtctaccatcgcctgcgcaactgtacagggctattaaccaacggaattcataatgcggtaatgcattttgctagagaactggattggcaacccatcctcttctttgctcagggtgttgtttatctcgctcctcagggtgctggcgttccggatcgcttagaacttcaggaatttctctgggagcaggtcagcaaccgattagccaccagcatgttgcggggagaggttggtttcaaacgggatggcaagggactcaaggtggctccccaaaccctggaactgttctcccctgctcagttgattcggaacttgcccggtgttgtccaatcttatgtcggaaacgctaaatctcctgcgactccaaaacgacttgagaagctggaactcagttcaacagagcgagagtttttggctaaaggtgcagatttaagagcagatcgcattgccgagtttatctttctggcgcaaaaagagtttttcggagataaaccagaatttatcacttggatgcttgaaactctgggggttcaaactgctatcacttcggagcagacgcagcttcaatccggtggtgtgaactggggatggtatcacgcagcagcctattacgtcgcgagcaatgccacgctggatttggaagagatttcggagaaacttcaggaatttgccgagcagttggcaacctgggcggaggaaaacaatttcttcccagagcatcgcagcccaacccatgacatctttttcaactatctgactcaatacctggaagttcaggggtgggagcagcaggagcagtcctttcagcttgaactggcaggctatgttggcgcaaagactaaaactgccagacaaccgatttgctccctcagttccggtgaatttgcttcggaagaccagatggattctgttgtcctgttcaaaccgcagcagtacagcaacaagaatcctctcggtggacggcagatcaagcgggggatttccaaaatctggtccctggaaatgctgctcaggcaggctctttggtctgcgccagcaggcaaactagaggaacaacaacccattttcctttacatcttcccggcatacgtttactcgccccaggttgctgctgctgtccggttactggtgaatgatctgaagcgtgtcaacctctgggaagtccgtaaacactggttggagaatggcatggatgctcaggcgttgcgatcgtttccctggctagtcggtgacaaaaacgattcgggtaactctgctccatccagatactctggtgaagacttgcctttcatggcaatgaactacaccaccaccagaggcaaaacgataactgatgcctgggttgaacctgctttcctgacactggtgctgcctttgttgctgggtgtgaaagttgtcgccaccagtagccagattccactctatgaaagcgacaacgacttttgcgaatctgtcaagctggatggacccgccgatttctgggctttgctgcggctaccaacttccctgcatctccaggattggattggggggcgtgttcaaaatttagcagaaggcttgaaccgcttgatggttgcctactgcctgcatctggacagtcgtagcgctccaccagatgcgcgctggagagccttaaacggcagtgtccgagagatgacaacaaatgttctaaacattttttcacttgcagaggagggattacgtcgtgatggctctaaacgcgatgcaacagttgaagaaattaaccgctattggaaatacgcccagctgtgggcagagggagactctgatatgcaaaacaagttgaagattaccaaacgcttagtcgatgagtaccgccagttttacagagccagtgcgaacgaatccagccatacggttttgctgccattttctaaggcactggaacacattctttcggtaccaaatgattgggacgatgaggaaattattgttcaaggggcaggacagttacaggccgcgttagatcggcaggaagtctacaaacgtcccctcatgcttgacaaagagattccctttgaaattcgtcggatgaaggagtttgaggcaattcaaaccttcatgaccacctgcgtcattgacctatttggacaaatgtgtaaaggcgatcgcgcgctcctgcaggaacatcgcaaccgccttaaatcaggggtcgaatttgcctatcgtcagttagccctgcaagagaaacaagccaaagccaaccaaaaatctggagaacaatcatgagcattcttgaaaccttaaagccagagttccacacagccttccctcgcctcgcctctggcaaatatgtccatttcttcatggtgcgtcacagccagtcgttccccgtctttcaaaccgatggcgttttgaacactgcccgtactcaggctgggttaaatgcaggcgatgaaaaatccagacaggcaatcagtcgcctggtcatgttcaaacggaaacaggtgacaccagaacgactcacaggacgggaactgctgcgatcgctgggcattaacggagtagttgaaggggaagccaatttctgtgaatacaacggcgaaagatcctgtaaaaaatgccctgattgcattctctatggttttgcgattggggacagtggctcggaacgttccaaagtctactctgattcagccttttccctgagtccttatgaagtttcccatcgcagttttaccttcaatgctccctttgaaggtggaaccatgagtgagaagggtgaaatgcggagtgcgatcaacgaactggatcatgttttgccggaagttgcttttccttgcgttgaaacactacgtgaccccacgctggaaggcttcatttatgtaatgggcaacctgatccggactcggcgctatggagcgcaggagtcgcgtacagggacaatggcgaatcacattattggcgttaccctatgtgatggcgagatcttcagcaatttgcactttacccaagccctctacgatgccctgaagggtgatttgagtgcgccaattagtgatttatgcagagaggcggcgatcgtggcagaaaacttgctaaatcaggaacctgtgcggaagatccaagttatttttggagagcagttgaacgaactcctggctgaggtagcgggaatctgccaggatgaaactcgcttgcgaaacactgtgacagccttgtaccagcaatcacaagcctatgccgagacctatggtgctgctgctaagaaaggcaaaggcaaatcttaaggtggctgccaatggttatttatcgatgcaatctcacgttgcacgacaacgtattcttcgccactcgcgagatggggattctctacgaaacagagaagtatctacacaactgggcactcagctttgctctgtttgaagccacccacatccccaaaccctatcgcttgcagggtgcgatcgctcaacgacccggttatctggaagctgacaacgagcaaaaccttttagttctgaatcacgcaggcatctatgttttccctgctctaccacttcagtggtcctaccaagtcaataccttcaaagcggctcaagtgccttactatggcaaatccaaacagttcggggataagggagctgatcgcaactacccgattaactacggacgggcaaaagaactggcagttggcagcacctaccgaacgtatattcttgcccctgaaccaatccagatcccccactggatacggttgggtaagtgggcagccaagattcaggtggacgcaagacccatacctaactgtggaatccgacaacggtcaggagaatacacctgcgaccatccactaaatccgatcgacctgtccggttcaacccgattgctgttatacaaccgcattgtcatgccacccgctagtctcgtcagtcagtcgcgagtttctggggactactgggaaatttctaaaccatccaattggactgaatttccggactggtcagacctgaaagacatacccaatcaagtttgcttacccagcggagtagcctatggagccagtactgccattgccgcatcttaagtccaccgctctgcatatcctggtaattcatttaggcgttgccgaaagcggagccttgcctgttgaatccggtcgagccgtccatgctcaagttttggactggttccgcatggcggatccggcaatttctgaggcaattcacaaaagccaggaatccccgctcagtctctcaggcctggtcgggaaacgccgtaaagtaggggtgcgggcaggagatgaattttacttccgaattgggttgttagatgggagtttgattgaaccactgctgagtggtttggagaagtggggcgacaagcccttttctctggcaaagtgtccctttgttttccgcagtatcaatatgttgccaggaactgacccctgggttggttcttccgattatgccttgcttacccaaaccccggctactttggataacctagctctcaagctcctgtcgccaacaagcttcaagtcgaatgccgggcaaggaatccaaccctttcctttgccagagtcagttttcggaaatttacatcgtcgctggaatgtctttgcaccaaaggaattgcagtttccaaaaattcaatggagtgggctggtctctgattatgacctcaaaactcaaaagttaaggatggaaaactcggttgagatcggcgcagtgggctgggtgcgctatcggtttccagatccagaacaagcgagaattgcaaccattctggctcactttgccttttttgctggagttgggcgtaagacagcaatggggatgggacaggtggtgttggacaaaaaaacgtagcctaggctgctgccaccgctgagcaataactagcataaccccttggggcctctaaacgggtcttgaggggttttttgctgaaacctcaggcatttgagaagcacacggtcacactgcttccggtagtcaataaaccggtaaaccagcaatagacataagcggctatttaacgaccctcgggatctcgacgctctcccttatgcgactcctgcattaggaaattaatacgactcactataggggaattgtgagcggataacaattcccctgtagaaataattttgtttaactttaataaggagatataccatgcttgatgaaaaaagcttcgacaactggtgccaatccgttggtctgagccaggcagcacgtgaagttgtagagcgtgtgcgatcctcttcaccctcccgtcgcgtacagagcggtagaggaaacgtctccggcaattaccctagccgcaaaatgggcgtcacaattcagtttgagtcccatcgaaatgagcttgcccgcatctacgaactggagcatgaccccggcgttctggaatattacgatcaacctcccaaaatcgaacttgattatttgtcaaaaaatgggaggcgtgttcgtactcaatacacacctgatttctttgttatccgtaatgactcagcaggttgggaggagtgtaaaacagaggatgaccttaagcaattagctgaggacagccctaaccgttaccaacgagctgaggacaatcgctggcgatgtccacctgcagaagcctatgctcttccccttgagttgtattttcaggtacggtctagtgctgaaattaactggattttccagcaaaactttgtatggctagaagactaccttggtactgaatcacttactatggatgagtcggttgcagatgcaatcatagccacagtcagagcaaacgagggtatcacactactcgaactgattcaacaattacaaggcacagatgctgatgctatctacatcctgattgcaaccgaacaaatttatgttgatttgatggctgaacggttagcgaacagcgatcgggcacgggtattttccagtccagaaattgctcaagcctttcaactcattacgctggtcgaagcacctctggctaacagttctctccatatagttcaggtgggcgttggcacaaccatacactgggatggtgaagtctgggagattgttaatacaggctctaccatgacaggattgttgcgatcggacggtaagtttatcgagttgcccaattctgcaattgatgaattgattcagaagggcaagattcaatcaatttcagcacaacaagcccctgatagcaaagcagaagttgaagaaatgcttcgctgtgctcgtccagccgacattaaagaagccaaccgtcgctacgaaatcattcagccttacctggaaaaggatgcaccagcttgtccaactcgaacaattcggcgctggcgtaatcagtattggcaggcagaaaagctttacgggaatggctatgttggtttactaccaaatcatcagaagaaagggaattatttagttaaggttaatgaagtaactcaagcttttatgcttgagtttattgagaagcattacgaaaatctcaaacagcgtagtaagcttagagtttatcaggcttttgtggaggcatgtgaaagccacgaaccgaaactaaaccctccaagccgtactacattcacactagcgattcagaaacgagcaggacatcagcaaaccttgaaacgtgaaggacgaagagctgccattcagaaggaggagttttactgggaactggagctaactactcctcgacacggcgatcgccccttcgagatcgttcatattgatcacactcaactcgatattgagcttatcagttctttgaactccctggcccaatgcaaccctacatctgttgatgccacttacaatttgggtcgtccttgggcaacgttcatggttgatgcttacagccgccgtttgctagcagtttacataacctatgaagaacccagctatcgttcctgcatgatggtgctccgtatttgcgtacagcgatttaagcgttttcctcagacgatcgtggtagataatggtgcagaatttcacagccattactttgaacaactactggcaacatatcaatgcacaaagaagcacaggccacctgcaaaagctcgctttggtgcagttgttgaacgattatttggcactgcaaataagcaattaattcatgagttgcagggaaatacccaaattactcgcaagcatcgccaagttactcaatctgttcatccccaaaaattggctctttggacgttaggcgatctctacgaatcactatgtgaatgggcttacaaagtttatgctgaccgccagcaccctgcgctagggcaaagccctaatgctgcattcgctcaagggctggcgttgggaggtagtcgcatccatcgccgagtagagtatgaccaagtcttccgtatcttgacattgcccgcaccggaaagaggacaacgcaaagttcagccaggacaagggataaaacttagcaatatctactactggtcaaatgcctttcgagacccagaaattgaacaatcgatggttgaagttcgttatgatccctttgatgccagcattgcctatgcactggtgcgaaaacaatgggtccggtgtatttcctcctactatcaacagtttcaaaatcgttcagaaaaggaaattcgtttaataactgctgagttgattaagcaaaagcgtgaccagggaagagatacaaatgttacggataaagaattggcgcagtttttaagctctacagaaatgaaagaaggcaaattcttggagcaacgcttgcggactacagaaaacagggtagttattcagaatagtacagctacagaagacgatccccccatcactaattctcagaattcttacgagccatcgcttatgctgccaagtgaggatgagttggatgatcaggaagactggttaaataccggcaaagctgaggcagaattagaattctatggagagtactagcgatgcaacctcaaataagcttcccaaaagagttactgcttcaaccaattcctgatcgaattgcctatttcaaagattacacaatggcacatccgaagcttatagaagcagaccggaagttaatgcatgctattcgtgaacctggaggagctgctcttatctttgtctttggtcctaccggagttggaaagtctactctattgaaacgaattactcaaaagctgcttaaagaagcattgtctttgatggagactgacaaaggctatattcctattgcgggggtagagataaaaactccagaggatagtaactttgattggaacgatttttatgttcgtgctcttatggcacttaatgagccaatgatcgagaaaaaaatcaaccgtacaggtgcaaaactaaaattacggttggcacttgaatctgcccttcgtaatcgccgtcctgatgctttttacatagacgaagctcaaaattttggtaaggtagccagtgggcgaaaattgcaagatcaaacagattgcattaaatctcttgcaaatctcgctcaaactcggtttatcttatgtgggatttatgaacttttaccactacgaaatctaagtgggcagctatgccgccgtagccatagtattcactttccacgttattcggcagattctgagcaggatctaaaggcctttaaaagtgcgttattaacactacaaaatcaactccctcttcccgaaccacctgatttagtggcgcattgggaattttgttatgagagaactatcggctgtattggtattttgaaagatttgctccttcggactctaagcgcgattttagtacgggatggagacaaagttttgacattgaagcccaaggatttagaacaacgtgcatggtctttagaagaatgtttggttatgctgagagaggcaaaggaaggagagcaacaacttactgacaaatcgggcttacatgaggaattacggacagctttagggtttaatgcagctacgtccaagcagtctgccaaatcatccaagtcaacatcaagcaaaaaagcaggcagtgttggaaagccttcacctcgtcgtcgttcagttggaatagatcaagatgccagctaacgatctagaaatctatgaatcttggaatttagatctccctttactacctaatcgaagtaggctctaccacttgaaaccgattgcaattggagatgcttacgttgaaggattaatcagctatgtttgccgtttggctgaagcccactgtgtttctccaggagtccttactaaacaggaaatattgcccagtctaagaaaagtttataatgtgggttcaagagaagttcatgaagtacgaagagatgaaagtttagtttctatttcctcctttcctaagccagaaagcaataaaaatcctaatgaaccaggcttctgggcatggcaatatattgaaggattgcagcctttaactcttagagaaaaccttgaagcattaactattccaaattggaaaaagcaaattccacaggtgacaggaattgaggttgcgcgtgagttgagagcttggtgccctgaatgctttcaacaatggcgcaagactaatcagataatttatgaaccgatgctttggtcgatcgctttagttaccgtatgtccttatcattaccttccgctacaaactcgctgtccttattgtaaaaaaactcaacggcctatcacaggaaaaatgcaggtagctcgctgttccgaatgtttagagtggcttggcattcaaccaagcgaagattcagagttagaaatcaaaattaaatctgaagtcgaatggcaccattgggttgcggagaaagtaatggagattttggtatttaaagattatactttaactgcaaatgctataacaatagcagctccaattacgaaagaaaaatattttcaactagaatcgagcttaataaattgtccaattaagtatgctcaacagcagttcttaaagctcttcttcaattaacacaaaaacgcccagttttaacttaagtcgaacagaaagtaatcgtattgtacacggccgcataatcgaaattaatacgactcactataggggaattgtgagcggataacaattccccatcttagtatattagttaagtataagaaggagatatacatatggcagatctcaattggatatcggccggccacgcgatcgctgacgtcggtaccctcgagtctggtaaagaaaccgctgctgcgaaatttgaacgccagcacatggactcgtctactagcgcagcttaattaacctaggctgctgccaccgctgagcaataactagcataaccccttggggcctctaaacgggtcttgaggggttttttgctgaaacctcaggcatttgagaagcacacggtcacactgcttccggtagtgccctgaaccgacgaccgggtcatcgtggccggatcttgcggcccctcggcttgaacgaattgttagacattatttgccgactaccttggtgatctcgcctttcacgtagtggacaaattcttccaactgatctgcgcgcgaggccaagcgatcttcttcttgtccaagataagcctgtctagcttcaagtatgacgggctgatactgggccggcaggcgctccattgcccagtcggcagcgacatccttcggcgcgattttgccggttactgcgctgtaccaaatgcgggacaacgtaagcactacatttcgctcatcgccagcccagtcgggcggcgagttccatagcgttaaggtttcatttagcgcctcaaatagatcctgttcaggaaccggatcaaagagttcctccgccgctggacctaccaaggcaacgctatgttctcttgcttttgtcagcaagatagccagatcaatgtcgatcgtggctggctcgaagatacctgcaagaatgtcattgcgctgccattctccaaattgcagttcgcgcttagctggataacgccacggaatgatgtcgtcgtgcacaacaatggtgacttctacagcgcggagaatctcgctctctccaggggaagccgaagtttccaaaaggtcgttgatcaaagctcgccgcgttgtttcatcaagccttacggtcaccgtaaccagcaaatcaatatcactgtgtggcttcaggccgccatccactgcggagccgtacaaatgtacggccagcaacgtcggttcgagatggcgctcgatgacgccaactacctctgatagttgagtcgatacttcggcgatcaccgcttccctcatactcttcctttttcaatattattgaagcatttatcagggttattgtctcatgagcggatacatatttgaatgtatttagaaaaataaacaaatagctagctcactcggtcgctacgctccgggcgtgagactgcggcgggcgctgcggacacatacaaagttacccacagattccgtggataagcaggggactaacatgtgaggcaaaacagcagggccgcgccggtggcgtttttccataggctccgccctcctgccagagttcacataaacagacgcttttccggtgcatctgtgggagccgtgaggctcaaccatgaatctgacagtacgggcgaaacccgacaggacttaaagatccccaccgtttccggcgggtcgctccctcttgcgctctcctgttccgaccctgccgtttaccggatacctgttccgcctttctcccttacgggaagtgtggcgctttctcatagctcacacactggtatctcggctcggtgtaggtcgttcgctccaagctgggctgtaagcaagaactccccgttcagcccgactgctgcgccttatccggtaactgttcacttgagtccaacccggaaaagcacggtaaaacgccactggcagcagccattggtaactgggagttcgcagaggatttgtttagctaaacacgcggttgctcttgaagtgtgcgccaaagtccggctacactggaaggacagatttggttgctgtgctctgcgaaagccagttaccacggttaagcagttccccaactgacttaaccttcgatcaaaccacctccccaggtggttttttcgtttacagggcaaaagattacgcgcagaaaaaaaggatctcaagaagatcctttgatcttttctactgaaccgctctagatttcagtgcaatttatctcttcaaatgtagcacctgaagtcagccccatacgatataagttgtaattctcatgttagtcatgccccgcgcccaccggaaggagctgactgggttgaaggctctcaagggcatcggtcgagatcccggtgcctaatgagtgagctaacttacattaattgcgttgcgctcactgcccgctttccagtcgggaaacctgtcgtgccagctgcattaatgaatcggccaacgcgcggggagaggcggtttgcgtattgggcgccagggtggtttttcttttcaccagtgagacgggcaacagctgattgcccttcaccgcctggccctgagagagttgcagcaagcggtccacgctggtttgccccagcaggcgaaaatcctgtttgatggtggttaacggcgggatataacatgagctgtcttcggtatcgtcgtatcccactaccgagatgtccgcaccaacgcgcagcccggactcggtaatggcgcgcattgcgcccagcgccatctgatcgttggcaaccagcatcgcagtgggaacgatgccctcattcagcatttgcatggtttgttgaaaaccggacatggcactccagtcgccttcccgttccgctatcggctgaatttgattgcgagtgagatatttatgccagccagccagacgcagacgcgccgagacagaacttaatgggcccgctaacagcgcgatttgctggtgacccaatgcgaccagatgctccacgcccagtcgcgtaccgtcttcatgggagaaaataatactgttgatgggtgtctggtcagagacatcaagaaataacgccggaacattagtgcaggcagcttccacagcaatggcatcctggtcatccagcggatagttaatgatcagcccactgacgcgttgcgcgagaagattgtgcaccgccgctttacaggcttcgacgccgcttcgttctaccatcgacaccaccacgctggcacccagttgatcggcgcgagatttaatcgccgcgacaatttgcgacggcgcgtgcagggccagactggaggtggcaacgccaatcagcaacgactgtttgcccgccagttgttgtgccacgcggttgggaatgtaattcagctccgccatcgccgcttccactttttcccgcgttttcgcagaaacgtggctggcctggttcaccacgcgggaaacggtctgataagagacaccggcatactctgcgacatcgtataacgttactggtttcacattcaccaccctgaattgactctcttccgggcgctatcatgccataccgcgaaaggttttgcgccattcgatggtgtccgggatctcgacgctctcccttatgcgactcctgcattaggaaattaatacgactcactata

SEQ ID NO: 95 - DNA, 14587 bp, synthetic construct
  misc_feature 1..14587: note = Synthetic
  source 1..14587: mol_type = other DNA
ggggaattgtgagcggataacaattcccctgtagaaataattttgtttaactttaataaggagatataccatggtttccaagcctgaatcccggtctacgggactgaaacaccatctatgtatagctacgatggaatagtaaagggtttccaagcctgaatcccggtctacgggactgaaacgatccgaattcgagctcggcgcgcctgcaggtcgacaagcttgcggccgcataatgcttaagtcgaacagaaagtaatcgtattgtacacggccgcataatcgaaattaatacgactcactataggggaattgtgagcggataacaattccccatcttagtatattagttaagtataagaaggagatatacatatggctaccctactccaaaccctcctgttacgaacgttgtcacccgaggcggatccagttctctatgtctacattgagacggtactacctgcaatggaacgggaatttggcttgattccagcccttggtggctcggaggaagcacactttcatctgctgaggcgacggggaaacaaatatgcggcggaaaattccaagcggtacgccagtcgctctgatcaaagcctgctggttcatgtgctcaatgccttgctgaccgcctggaatttgttgccattcctaagctccacatttgaactatcagatgatgagaaacggctgctctgcctggggctgaccctacacgattacaacaagtggtgccagggtgaggaggaagattcgccgattgcatgcgaagtagcagagattcttgagctttgtcaaacattgggagagcggttgaactttgacggattctgggcagagtggcgggagtatttgacagagattgcctaccttgcccaaaacacccagggaaaagttggaacaaatctacccaaagcgaattggggcagcttcaaaattctagatacccgtcgtctggattcgcccctacgatggctactcgcttttggcgatgtcgcagtccatctcagcgatccatctgacatcgcaatgaaaacggggggagatcgcctgcgggaacatctgcgctttctaggtattcgtcgcaagctggtctaccatcgcctgcgcaactgtacagggctattaaccaacggaattcataatgcggtaatgcattttgctagagaactggattggcaacccatcctcttctttgctcagggtgttgtttatctcgctcctcagggtgctggcgttccggatcgcttagaacttcaggaatttctctgggagcaggtcagcaaccgattagccaccagcatgttgcggggagaggttggtttcaaacgggatggcaagggactcaaggtggctccccaaaccctggaactgttctcccctgctcagttgattcggaacttgcccggtgttgtccaatcttatgtcggaaacgctaaatctcctgcgactccaaaacgacttgagaagctggaactcagttcaacagagcgagagtttttggctaaaggtgcagatttaagagcagatcgcattgccgagtttatctttctggcgcaaaaagagtttttcggagataaaccagaatttatcacttggatgcttgaaactctgggggttcaaactgctatcacttcggagcagacgcagcttcaatccggtggtgtgaactggggatggtatcacgcagcagcctattacgtcgcgagcaatgccacgctggatttggaagagatttcggagaaacttcaggaatttgccgagcagttggcaacctgggcggaggaaaacaatttcttcccagagcatcgcagcccaacccatgacatctttttcaactatctgactcaatacctggaagttcaggggtgggagcagcaggagcagtcctttcagcttgaactggcaggctatgttggcgcaaagactaaaactgccagacaaccgatttgctccctcagttccggtgaatttgcttcggaagaccagatggattctgttgtcctgttcaaaccgcagcagtacagcaacaagaatcctctcggtggacggcagatcaagcgggggatttccaaaatctggtccctggaaatgctgctcaggcaggctctttggtctgcgccagcaggcaaactagaggaacaacaacccattttcctttacatcttcccggcatacgtttactcgccccaggttgctgctgctgtccggttactggtgaatgatctgaagcgtgtcaacctctgggaagtccgtaaacactggttggagaatggcatggatgctcaggcgttgcgatcgtttccctggctagtcggtgacaaaaacgattcgggtaactctgctccatccagatactctggtgaagacttgcctttcatggcaatgaactacaccaccaccagaggcaaaacgataactgatgcctgggttgaacctgctttcctgacactggtgctgcctttgttgctgggtgtgaaagttgtcgccaccagtagccagattccactctatgaaagcgacaacgacttttgcgaatctgtcaagctggatggacccgccgatttctgggctttgctgcggctaccaacttccctgcatctccaggattggattggggggcgtgttcaaaatttagcagaaggcttgaaccgcttgatggttgcctactgcctgcatctggacagtcgtagcgctccaccagatgcgcgctggagagccttaaacggcagtgtccgagagatgacaacaaatgttctaaacattttttcacttgcagaggagggattacgtcgtgatggctctaaacgcgatgcaacagttgaagaaattaaccgctattggaaatacgcccagctgtgggcagagggagactctgatatgcaaaacaagttgaagattaccaaacgcttagtcgatgagtaccgccagttttacagagccagtgcgaacgaatccagccatacggttttgctgccattttctaaggcactggaacacattctttcggtaccaaatgattgggacgatgaggaaattattgttcaaggggcaggacagttacaggccgcgttagatcggcaggaagtctacaaacgtcccctcatgcttgacaaagagattccctttgaaattcgtcggatgaaggagtttgaggcaattcaaaccttcatgaccacctgcgtcattgacctatttggacaaatgtgtaaaggcgatcgcgcgctcctgcaggaacatcgcaaccgccttaaatcaggggtcgaatttgcctatcgtcagttagccctgcaagagaaacaagccaaagccaaccaaaaatctggagaacaatcatgagcattcttgaaaccttaaagccagagttccacacagccttccctcgcctcgcctctggcaaatatgtccatttcttcatggtgcgtcacagccagtcgttccccgtctttcaaaccgatggcgttttgaacactgcccgtactcaggctgggttaaatgcaggcgatgaaaaatccagacaggcaatcagtcgcctggtcatgttcaaacggaaacaggtgacaccagaacgactcacaggacgggaactgctgcgatcgctgggcattaacggagtagttgaaggggaagccaatttctgtgaatacaacggcgaaagatcctgtaaaaaatgccctgattgcattctctatggttttgcgattggggacagtggctcggaacgttccaaagtctactctgattcagccttttccctgagtccttatgaagtttcccatcgcagttttaccttcaatgctccctttgaaggtggaaccatgagtgagaagggtgaaatgcggagtgcgatcaacgaactggatcatgttttgccggaagttgcttttccttgcgttgaaacactacgtgaccccacgctggaaggcttcatttatgtaatgggcaacctgatccggactcggcgctatggagcgcaggagtcgcgtacagggacaatggcgaatcacattattggcgttaccctatgtgatggcgagatcttcagcaatttgcactttacccaagccctctacgatgccctgaagggtgatttgagtgcgccaattagtgatttatgcagagaggcggcgatcgtggcagaaaacttgctaaatcaggaacctgtgcggaagatccaagttatttttggagagcagttgaacgaactcctggctgaggtagcgggaatctgccaggatgaaactcgcttgcgaaacactgtgacagccttgtaccagcaatcacaagcctatgccgagacctatggtgctgctgctaagaaaggcaaaggcaaatcttaaggtggctgccaatggttatttatcgatgcaatctcacgttgcacgacaacgtattcttcgccactcgcgagatggggattctctacgaaacagagaagtatctacacaactgggcactcagctttgctctgtttgaagccacccacatccccaaaccctatcgcttgcagggtgcgatcgctcaacgacccggttatctggaagctgacaacgagcaaaaccttttagttctgaatcacgcaggcatctatgttttccctgctctaccacttcagtggtcctaccaagtcaataccttcaaagcggctcaagtgccttactatggcaaatccaaacagttcggggataagggagctgatcgcaactacccgattaactacggacgggcaaaagaactggcagttggcagcacctaccgaacgtatattcttgcccctgaaccaatccagatcccccactggatacggttgggtaagtgggcagccaagattcaggtggacgcaagacccatacctaactgtggaatccgacaacggtcaggagaatacacctgcgaccatccactaaatccgatcgacctgtccggttcaacccgattgctgttatacaaccgcattgtcatgccacccgctagtctcgtcagtcagtcgcgagtttctggggactactgggaaatttctaaaccatccaattggactgaatttccggactggtcagacctgaaagacatacccaatcaagtttgcttacccagcggagtagcctatggagccagtactgccattgccgcatcttaagtccaccgctctgcatatcctggtaattcatttaggcgttgccgaaagcggagccttgcctgttgaatccggtcgagccgtccatgctcaagttttggactggttccgcatggcggatccggcaatttctgaggcaattcacaaaagccaggaatccccgctcagtctctcaggcctggtcgggaaacgccgtaaagtaggggtgcgggcaggagatgaattttacttccgaattgggttgttagatgggagtttgattgaaccactgctgagtggtttggagaagtggggcgacaagcccttttctctggcaaagtgtccctttgttttccgcagtatcaatatgttgccaggaactgacccctgggttggttcttccgattatgccttgcttacccaaaccccggctactttggataacctagctctcaagctcctgtcgccaacaagcttcaagtcgaatgccgggcaaggaatccaaccctttcctttgccagagtcagttttcggaaatttacatcgtcgctggaatgtctttgcaccaaaggaattgcagtttccaaaaattcaatggagtgggctggtctctgattatgacctcaaaactcaaaagttaaggatggaaaactcggttgagatcggcgcagtgggctgggtgcgctatcggtttccagatccagaacaagcgagaattgcaaccattctggctcactttgccttttttgctggagttgggcgtaagacagcaatggggatgggacaggtggtgttggacaaaaaaacgtagcctaggctgctgccaccgctgagcaataactagcataaccccttggggcctctaaacgggtcttgaggggttttttgctgaaacctcaggcatttgagaagcacacggtcacactgcttccggtagtcaataaaccggtaaaccagcaatagacataagcggctatttaacgaccctcgggatctcgacgctctcccttatgcgactcctgcattaggaaattaatacgactcactataggggaattgtgagcggataacaattcccctgtagaaataattttgtttaactttaataaggagatataccatgcttgatgaaaaaagcttcgacaactggtgccaatccgttggtctgagccaggcagcacgtgaagttgtagagcgtgtgcgatcctcttcaccctcccgtcgcgtacagagcggtagaggaaacgtctccggcaattaccctagccgcaaaatgggcgtcacaattcagtttgagtcccatcgaaatgagcttgcccgcatctacgaactggagcatgaccccggcgttctggaatattacgatcaacctcccaaaatcgaacttgattatttgtcaaaaaatgggaggcgtgttcgtactcaatacacacctgatttctttgttatccgtaatgactcagcaggttgggaggagtgtaaaacagaggatgaccttaagcaattagctgaggacagccctaaccgttaccaacgagctgaggacaatcgctggcgatgtccacctgcagaagcctatgctcttccccttgagttgtattttcaggtacggtctagtgctgaaattaactggattttccagcaaaactttgtatggctagaagactaccttggtactgaatcacttactatggatgagtcggttgcagatgcaatcatagccacagtcagagcaaacgagggtatcacactactcgaactgattcaacaattacaaggcacagatgctgatgctatctacatcctgattgcaaccgaacaaatttatgttgatttgatggctgaacggttagcgaacagcgatcgggcacgggtattttccagtccagaaattgctcaagcctttcaactcattacgctggtcgaagcacctctggctaacagttctctccatatagttcaggtgggcgttggcacaaccatacactgggatggtgaagtctgggagattgttaatacaggctctaccatgacaggattgttgcgatcggacggtaagtttatcgagttgcccaattctgcaattgatgaattgattcagaagggcaagattcaatcaatttcagcacaacaagcccctgatagcaaagcagaagttgaagaaatgcttcgctgtgctcgtccagccgacattaaagaagccaaccgtcgctacgaaatcattcagccttacctggaaaaggatgcaccagcttgtccaactcgaacaattcggcgctggcgtaatcagtattggcaggcagaaaagctttacgggaatggctatgttggtttactaccaaatcatcagaagaaagggaattatttagttaaggttaatgaagtaactcaagcttttatgcttgagtttattgagaagcattacgaaaatctcaaacagcgtagtaagcttagagtttatcaggcttttgtggaggcatgtgaaagccacgaaccgaaactaaaccctccaagccgtactacattcacactagcgattcagaaacgagcaggacatcagcaaaccttgaaacgtgaaggacgaagagctgccattcagaaggaggagttttactgggaactggagctaactactcctcgacacggcgatcgccccttcgagatcgttcatattgatcacactcaactcgatattgagcttatcagttctttgaactccctggcccaatgcaaccctacatctgttgatgccacttacaatttgggtcgtccttgggcaacgttcatggttgatgcttacagccgccgtttgctagcagtttacataacctatgaagaacccagctatcgttcctgcatgatggtgctccgtatttgcgtacagcgatttaagcgttttcctcagacgatcgtggtagataatggtgcagaatttcacagccattactttgaacaactactggcaacatatcaatgcacaaagaagcacaggccacctgcaaaagctcgctttggtgcagttgttgaacgattatttggcactgcaaataagcaattaattcatgagttgcagggaaatacccaaattactcgcaagcatcgccaagttactcaatctgttcatccccaaaaattggctctttggacgttaggcgatctctacgaatcactatgtgaatgggcttacaaagtttatgctgaccgccagcaccctgcgctagggcaaagccctaatgctgcattcgctcaagggctggcgttgggaggtagtcgcatccatcgccgagtagagtatgaccaagtcttccgtatcttgacattgcccgcaccggaaagaggacaacgcaaagttcagccaggacaagggataaaacttagcaatatctactactggtcaaatgcctttcgagacccagaaattgaacaatcgatggttgaagttcgttatgatccctttgatgccagcattgcctatgcactggtgcgaaaacaatgggtccggtgtatttcctcctactatcaacagtttcaaaatcgttcagaaaaggaaattcgtttaataactgctgagttgattaagcaaaagcgtgaccagggaagagatacaaatgttacggataaagaattggcgcagtttttaagctctacagaaatgaaagaaggcaaattcttggagcaacgcttgcggactacagaaaacagggtagttattcagaatagtacagctacagaagacgatccccccatcactaattctcagaattcttacgagccatcgcttatgctgccaagtgaggatgagttggatgatcaggaagactggttaaataccggcaaagctgaggcagaattagaattctatggagagtactagcgatgcaacctcaaataagcttcccaaaagagttactgcttcaaccaattcctgatcgaattgcctatttcaaagattacacaatggcacatccgaagcttatagaagcagaccggaagttaatgcatgctattcgtgaacctggaggagctgctcttatctttgtctttggtcctaccggagttggaaagtctactctattgaaacgaattactcaaaagctgcttaaagaagcattgtctttgatggagactgacaaaggctatattcctattgcgggggtagagataaaaactccagaggatagtaactttgattggaacgatttttatgttcgtgctcttatggcacttaatgagccaatgatcgagaaaaaaatcaaccgtacaggtgcaaaactaaaattacggttggcacttgaatctgcccttcgtaatcgccgtcctgatgctttttacatagacgaagctcaaaattttggtaaggtagccagtgggcgaaaattgcaagatcaaacagattgcattaaatctcttgcaaatctcgctcaaactcggtttatcttatgtgggatttatgaacttttaccactacgaaatctaagtgggcagctatgccgccgtagccatagtattcactttccacgttattcggcagattctgagcaggatctaaaggcctttaaaagtgcgttattaacactacaaaatcaactccctcttcccgaaccacctgatttagtggcgcattgggaattttgttatgagagaactatcggctgtattggtattttgaaagatttgctccttcggactctaagcgcgattttagtacgggatggagacaaagttttgacattgaagcccaaggatttagaacaacgtgcatggtctttagaagaatgtttggttatgctgagagaggcaaaggaaggagagcaacaacttactgacaaatcgggcttacatgaggaattacggacagctttagggtttaatgcagctacgtccaagcagtctgccaaatcatccaagtcaacatcaagcaaaaaagcaggcagtgttggaaagccttcacctcgtcgtcgttcagttggaatagatcaagatgccagctaacgatctagaaatctatgaatcttggaatttagatctccctttactacctaatcgaagtaggctctaccacttgaaaccgattgcaattggagatgcttacgttgaaggattaatcagctatgtttgccgtttggctgaagcccactgtgtttctccaggagtccttactaaacaggaaatattgcccagtctaagaaaagtttataatgtgggttcaagagaagttcatgaagtacgaagagatgaaagtttagtttctatttcctcctttcctaagccagaaagcaataaaaatcctaatgaaccaggcttctgggcatggcaatatattgaaggattgcagcctttaactcttagagaaaaccttgaagcattaactattccaaattggaaaaagcaaattccacaggtgacaggaattgaggttgcgcgtgagttgagagcttggtgccctgaatgctttcaacaatggcgcaagactaatcagataatttatgaaccgatgctttggtcgatcgctttagttaccgtatgtccttatcattaccttccgctacaaactcgctgtccttattgtaaaaaaactcaacggcctatcacaggaaaaatgcaggtagctcgctgttccgaatgtttagagtggcttggcattcaaccaagcgaagattcagagttagaaatcaaaattaaatctgaagtcgaatggcaccattgggttgcggagaaagtaatggagattttggtatttaaagattatactttaactgcaaatgctataacaatagcagctccaattacgaaagaaaaatattttcaactagaatcgagcttaataaattgtccaattaagtatgctcaacagcagttcttaaagctcttcttcaattaacacaaaaacgcccagttttaacttaagtcgaacagaaagtaatcgtattgtacacggccgcataatcgaaattaatacgactcactataggggaattgtgagcggataacaattccccatcttagtatattagttaagtataagaaggagatatacatatggcagatctcaattggatatcggccggccacgcgatcgctgacgtcggtaccctcgagtctggtaaagaaaccgctgctgcgaaatttgaacgccagcacatggactcgtctactagcgcagcttaattaacctaggctgctgccaccgctgagcaataactagcataaccccttggggcctctaaacgggtcttgaggggttttttgctgaaacctcaggcatttgagaagcacacggtcacactgcttccggtagtgccctgaaccgacgaccgggtcatcgtggccggatcttgcggcccctcggcttgaacgaattgttagacattatttgccgactaccttggtgatctcgcctttcacgtagtggacaaattcttccaactgatctgcgcgcgaggccaagcgatcttcttcttgtccaagataagcctgtctagcttcaagtatgacgggctgatactgggccggcaggcgctccattgcccagtcggcagcgacatccttcggcgcgattttgccggttactgcgctgtaccaaatgcgggacaacgtaagcactacatttcgctcatcgccagcccagtcgggcggcgagttccatagcgttaaggtttcatttagcgcctcaaatagatcctgttcaggaaccggatcaaagagttcctccgccgctggacctaccaaggcaacgctatgttctcttgcttttgtcagcaagatagccagatcaatgtcgatcgtggctggctcgaagatacctgcaagaatgtcattgcgctgccattctccaaattgcagttcgcgcttagctggataacgccacggaatgatgtcgtcgtgcacaacaatggtgacttctacagcgcggagaatctcgctctctccaggggaagccgaagtttccaaaaggtcgttgatcaaagctcgccgcgttgtttcatcaagccttacggtcaccgtaaccagcaaatcaatatcactgtgtggcttcaggccgccatccactgcggagccgtacaaatgtacggccagcaacgtcggttcgagatggcgctcgatgacgccaactacctctgatagttgagtcgatacttcggcgatcaccgcttccctcatactcttcctttttcaatattattgaagcatttatcagggttattgtctcatgagcggatacatatttgaatgtatttagaaaaataaacaaatagctagctcactcggtcgctacgctccgggcgtgagactgcggcgggcgctgcggacacatacaaagttacccacagattccgtggataagcaggggactaacatgtgaggcaaaacagcagggccgcgccggtggcgtttttccataggctccgccctcctgccagagttcacataaacagacgcttttccggtgcatctgtgggagccgtgaggctcaaccatgaatctgacagtacgggcgaaacccgacaggacttaaagatccccaccgtttccggcgggtcgctccctcttgcgctctcctgttccgaccctgccgtttaccggatacctgttccgcctttctcccttacgggaagtgtggcgctttctcatagctcacacactggtatctcggctcggtgtaggtcgttcgctccaagctgggctgtaagcaagaactccccgttcagcccgactgctgcgccttatccggtaactgttcacttgagtccaacccggaaaagcacggtaaaacgccactggcagcagccattggtaactgggagttcgcagaggatttgtttagctaaacacgcggttgctcttgaagtgtgcgccaaagtccggctacactggaaggacagatttggttgctgtgctctgcgaaagccagttaccacggttaagcagttccccaactgacttaaccttcgatcaaaccacctccccaggtggttttttcgtttacagggcaaaagattacgcgcagaaaaaaaggatctcaagaagatcctttgatcttttctactgaaccgctctagatttcagtgcaatttatctcttcaaatgtagcacctgaagtcagccccatacgatataagttgtaattctcatgttagtcatgccccgcgcccaccggaaggagctgactgggttgaaggctctcaagggcatcggtcgagatcccggtgcctaatgagtgagctaacttacattaattgcgttgcgctcactgcccgctttccagtcgggaaacctgtcgtgccagctgcattaatgaatcggccaacgcgcggggagaggcggtttgcgtattgggcgccagggtggtttttcttttcaccagtgagacgggcaacagctgattgcccttcaccgcctggccctgagagagttgcagcaagcggtccacgctggtttgccccagcaggcgaaaatcctgtttgatggtggttaacggcgggatataacatgagctgtcttcggtatcgtcgtatcccactaccgagatgtccgcaccaacgcgcagcccggactcggtaatggcgcgcattgcgcccagcgccatctgatcgttggcaaccagcatcgcagtgggaacgatgccctcattcagcatttgcatggtttgttgaaaaccggacatggcactccagtcgccttcccgttccgctatcggctgaatttgattgcgagtgagatatttatgccagccagccagacgcagacgcgccgagacagaacttaatgggcccgctaacagcgcgatttgctggtgacccaatgcgaccagatgctccacgcccagtcgcgtaccgtcttcatgggagaaaataatactgttgatgggtgtctggtcagagacatcaagaaataacgccggaacattagtgcaggcagcttccacagcaatggcatcctggtcatccagcggatagttaatgatcagcccactgacgcgttgcgcgagaagattgtgcaccgccgctttacaggcttcgacgccgcttcgttctaccatcgacaccaccacgctggcacccagttgatcggcgcgagatttaatcgccgcgacaatttgcgacggcgcgtgcagggccagactggaggtggcaacgccaatcagcaacgactgtttgcccgccagttgttgtgccacgcggttgggaatgtaattcagctccgccatcgccgcttccactttttcccgcgttttcgcagaaacgtggctggcctggttcaccacgcgggaaacggtctgataagagacaccggcatactctgcgacatcgtataacgttactggtttcacattcaccaccctgaattgactctcttccgggcgctatcatgccataccgcgaaaggttttgcgccattcgatggtgtccgggatctcgacgctctcccttatgcgactcctgcattaggaaattaatacgactcactata

SEQ ID NO: 96 - DNA, 13805 bp, synthetic construct
  source 1..13805: mol_type = other DNA
  misc_feature 1..13805: note = Synthetic
ggggaattgtgagcggataacaattcccctgtagaaataattttgtttaactttaataaggagatataccatggtttccaagcctgaatcccggtctacgggactgaaacgagaagtcatttaataaggccactgttaaacgtaggtttccaagcctgaatcccggtctacgggactgaaacgatccgaattcgagctcggcgcgcctgcaggtcgacaagcttgcggccgcataatgcttaagtcgaacagaaagtaatcgtattgtacacggccgcataatcgaaattaatacgactcactataggggaattgtgagcggataacaattccccatcttagtatattagttaagtataagaaggagatatacatatggctaccctactccaaaccctcctgttacgaacgttgtcacccgaggcggatccagttctctatgtctacattgagacggtactacctgcaatggaacgggaatttggcttgattccagcccttggtggctcggaggaagcacactttcatctgctgaggcgacggggaaacaaatatgcggcggaaaattccaagcggtacgccagtcgctctgatcaaagcctgctggttcatgtgctcaatgccttgctgaccgcctggaatttgttgccattcctaagctccacatttgaactatcagatgatgagaaacggctgctctgcctggggctgaccctacacgattacaacaagtggtgccagggtgaggaggaagattcgccgattgcatgcgaagtagcagagattcttgagctttgtcaaacattgggagagcggttgaactttgacggattctgggcagagtggcgggagtatttgacagagattgcctaccttgcccaaaacacccagggaaaagttggaacaaatctacccaaagcgaattggggcagcttcaaaattctagatacccgtcgtctggattcgcccctacgatggctactcgcttttggcgatgtcgcagtccatctcagcgatccatctgacatcgcaatgaaaacggggggagatcgcctgcgggaacatctgcgctttctaggtattcgtcgcaagctggtctaccatcgcctgcgcaactgtacagggctattaaccaacggaattcataatgcggtaatgcattttgctagagaactggattggcaacccatcctcttctttgctcagggtgttgtttatctcgctcctcagggtgctggcgttccggatcgcttagaacttcaggaatttctctgggagcaggtcagcaaccgattagccaccagcatgttgcggggagaggttggtttcaaacgggatggcaagggactcaaggtggctccccaaaccctggaactgttctcccctgctcagttgattcggaacttgcccggtgttgtccaatcttatgtcggaaacgctaaatctcctgcgactccaaaacgacttgagaagctggaactcagttcaacagagcgagagtttttggctaaaggtgcagatttaagagcagatcgcattgccgagtttatctttctggcgcaaaaagagtttttcggagataaaccagaatttatcacttggatgcttgaaactctgggggttcaaactgctatcacttcggagcagacgcagcttcaatccggtggtgtgaactggggatggtatcacgcagcagcctattacgtcgcgagcaatgccacgctggatttggaagagatttcggagaaacttcaggaatttgccgagcagttggcaacctgggcggaggaaaacaatttcttcccagagcatcgcagcccaacccatgacatctttttcaactatctgactcaatacctggaagttcaggggtgggagcagcaggagcagtcctttcagcttgaactggcaggctatgttggcgcaaagactaaaactgccagacaaccgatttgctccctcagttccggtgaatttgcttcggaagaccagatggattctgttgtcctgttcaaaccgcagcagtacagcaacaagaatcctctcggtggacggcagatcaagcgggggatttccaaaatctggtccctggaaatgctgctcaggcaggctctttggtctgcgccagcaggcaaactagaggaacaacaacccattttcctttacatcttcccggcatacgtttactcgccccaggttgctgctgctgtccggttactggtgaatgatctgaagcgtgtcaacctctgggaagtccgtaaacactggttggagaatggcatggatgctcaggcgttgcgatcgtttccctggctagtcggtgacaaaaacgattcgggtaactctgctccatccagatactctggtgaagacttgcctttcatggcaatgaactacaccaccaccagaggcaaaacgataactgatgcctgggttgaacctgctttcctgacactggtgctgcctttgttgctgggtgtgaaagttgtcgccaccagtagccagattccactctatgaaagcgacaacgacttttgcgaatctgtcaagctggatggacccgccgatttctgggctttgctgcggctaccaacttccctgcatctccaggattggattggggggcgtgttcaaaatttagcagaaggcttgaaccgcttgatggttgcctactgcctgcatctggacagtcgtagcgctccaccagatgcgcgctggagagccttaaacggcagtgtccgagagatgacaacaaatgttctaaacattttttcacttgcagaggagggattacgtcgtgatggctctaaacgcgatgcaacagttgaagaaattaaccgctattggaaatacgcccagctgtgggcagagggagactctgatatgcaaaacaagttgaagattaccaaacgcttagtcgatgagtaccgccagttttacagagccagtgcgaacgaatccagccatacggttttgctgccattttctaaggcactggaacacattctttcggtaccaaatgattgggacgatgaggaaattattgttcaaggggcaggacagttacaggccgcgttagatcggcaggaagtctacaaacgtcccctcatgcttgacaaagagattccctttgaaattcgtcggatgaaggagtttgaggcaattcaaaccttcatgaccacctgcgtcattgacctatttggacaaatgtgtaaaggcgatcgcgcgctcctgcaggaacatcgcaaccgccttaaatcaggggtcgaatttgcctatcgtcagttagccctgcaagagaaacaagccaaagccaaccaaaaatctggagaacaatcatgagcattcttgaaaccttaaagccagagttccacacagccttccctcgcctcgcctctggcaaatatgtccatttcttcatggtgcgtcacagccagtcgttccccgtctttcaaaccgatggcgttttgaacactgcccgtactcaggctgggttaaatgcaggcgatgaaaaatccagacaggcaatcagtcgcctggtcatgttcaaacggaaacaggtgacaccagaacgactcacaggacgggaactgctgcgatcgctgggcattaacggagtagttgaaggggaagccaatttctgtgaatacaacggcgaaagatcctgtaaaaaatgccctgattgcattctctatggttttgcgattggggacagtggctcggaacgttccaaagtctactctgattcagccttttccctgagtccttatgaagtttcccatcgcagttttaccttcaatgctccctttgaaggtggaaccatgagtgagaagggtgaaatgcggagtgcgatcaacgaactggatcatgttttgccggaagttgcttttccttgcgttgaaacactacgtgaccccacgctggaaggcttcatttatgtaatgggcaacctgatccggactcggcgctatggagcgcaggagtcgcgtacagggacaatggcgaatcacattattggcgttaccctatgtgatggcgagatcttcagcaatttgcactttacccaagccctctacgatgccctgaagggtgatttgagtgcgccaattagtgatttatgcagagaggcggcgatcgtggcagaaaacttgctaaatcaggaacctgtgcggaagatccaagttatttttggagagcagttgaacgaactcctggctgaggtagcgggaatctgccaggatgaaactcgcttgcgaaacactgtgacagccttgtaccagcaatcacaagcctatgccgagacctatggtgctgctgctaagaaaggcaaaggcaaatcttaaggtggctgccaatggttatttatcgatgcaatctcacgttgcacgacaacgtattcttcgccactcgcgagatggggattctctacgaaacagagaagtatctacacaactgggcactcagctttgctctgtttgaagccacccacatccccaaaccctatcgcttgcagggtgcgatcgctcaacgacccggttatctggaagctgacaacgagcaaaaccttttagttctgaatcacgcaggcatctatgttttccctgctctaccacttcagtggtcctaccaagtcaataccttcaaagcggctcaagtgccttactatggcaaatccaaacagttcggggataagggagctgatcgcaactacccgattaactacggacgggcaaaagaactggcagttggcagcacctaccgaacgtatattcttgcccctgaaccaatccagatcccccactggatacggttgggtaagtgggcagccaagattcaggtggacgcaagacccatacctaactgtggaatccgacaacggtcaggagaatacacctgcgaccatccactaaatccgatcgacctgtccggttcaacccgattgctgttatacaaccgcattgtcatgccacccgctagtctcgtcagtcagtcgcgagtttctggggactactgggaaatttctaaaccatccaattggactgaatttccggactggtcagacctgaaagacatacccaatcaagtttgcttacccagcggagtagcctatggagccagtactgccattgccgcatcttaagtccaccgctctgcatatcctggtaattcatttaggcgttgccgaaagcggagccttgcctgttgaatccggtcgagccgtccatgctcaagttttggactggttccgcatggcggatccggcaatttctgaggcaattcacaaaagccaggaatccccgctcagtctctcaggcctggtcgggaaacgccgtaaagtaggggtgcgggcaggagatgaattttacttccgaattgggttgttagatgggagtttgattgaaccactgctgagtggtttggagaagtggggcgacaagcccttttctctggcaaagtgtccctttgttttccgcagtatcaatatgttgccaggaactgacccctgggttggttcttccgattatgccttgcttacccaaaccccggctactttggataacctagctctcaagctcctgtcgccaacaagcttcaagtcgaatgccgggcaaggaatccaaccctttcctttgccagagtcagttttcggaaatttacatcgtcgctggaatgtctttgcaccaaaggaattgcagtttccaaaaattcaatggagtgggctggtctctgattatgacctcaaaactcaaaagttaaggatggaaaactcggttgagatcggcgcagtgggctgggtgcgctatcggtttccagatccagaacaagcgagaattgcaaccattctggctcactttgccttttttgctggagttgggcgtaagacagcaatggggatgggacaggtggtgttggacaaaaaaacgtagcctaggctgctgccaccgctgagcaataactagcataaccccttggggcctctaaacgggtcttgaggggttttttgctgaaacctcaggcatttgagaagcacacggtcacactgcttccggtagtcaataaaccggtaaaccagcaatagacataagcggctatttaacgaccctcgggatctcgacgctctcccttatgcgactcctgcattaggaaattaatacgactcactataggggaattgtgagcggataacaattcccctgtagaaataattttgtttaactttaataaggagatataccatgcttgatgaaaaaagcttcgacaactggtgccaatccgttggtctgagccaggcagcacgtgaagttgtagagcgtgtgcgatcctcttcaccctcccgtcgcgtacagagcggtagaggaaacgtctccggcaattaccctagccgcaaaatgggcgtcacaattcagtttgagtcccatcgaaatgagcttgcccgcatctacgaactggagcatgaccccggcgttctggaatattacgatcaacctcccaaaatcgaacttgattatttgtcaaaaaatgggaggcgtgttcgtactcaatacacacctgatttctttgttatccgtaatgactcagcaggttgggaggagtgtaaaacagaggatgaccttaagcaattagctgaggacagccctaaccgttaccaacgagctgaggacaatcgctggcgatgtccacctgcagaagcctatgctcttccccttgagttgtattttcaggtacggtctagtgctgaaattaactggattttccagcaaaactttgtatggctagaagactaccttggtactgaatcacttactatggatgagtcggttgcagatgcaatcatagccacagtcagagcaaacgagggtatcacactactcgaactgattcaacaattacaaggcacagatgctgatgctatctacatcctgattgcaaccgaacaaatttatgttgatttgatggctgaacggttagcgaacagcgatcgggcacgggtattttccagtccagaaattgctcaagcctttcaactcattacgctggtcgaagcacctctggctaacagttctctccatatagttcaggtgggcgttggcacaaccatacactgggatggtgaagtctgggagattgttaatacaggctctaccatgacaggattgttgcgatcggacggtaagtttatcgagttgcccaattctgcaattgatgaattgattcagaagggcaagattcaatcaatttcagcacaacaagcccctgatagcaaagcagaagttgaagaaatgcttcgctgtgctcgtccagccgacattaaagaagccaaccgtcgctacgaaatcattcagccttacctggaaaaggatgcaccagcttgtccaactcgaacaattcggcgctggcgtaatcagtattggcaggcagaaaagctttacgggaatggctatgttggtttactaccaaatcatcagaagaaagggaattatttagttaaggttaatgaagtaactcaagcttttatgcttgagtttattgagaagcattacgaaaatctcaaacagcgtagtaagcttagagtttatcaggcttttgtggaggcatgtgaaagccacgaaccgaaactaaaccctccaagccgtactacattcacactagcgattcagaaacgagcaggacatcagcaaaccttgaaacgtgaaggacgaagagctgccattcagaaggaggagttttactgggaactggagctaactactcctcgacacggcgatcgccccttcgagatcgttcatattgatcacactcaactcgatattgagcttatcagttctttgaactccctggcccaatgcaaccctacatctgttgatgccacttacaatttgggtcgtccttgggcaacgttcatggttgatgcttacagccgccgtttgctagcagtttacataacctatgaagaacccagctatcgttcctgcatgatggtgctccgtatttgcgtacagcgatttaagcgttttcctcagacgatcgtggtagataatggtgcagaatttcacagccattactttgaacaactactggcaacatatcaatgcacaaagaagcacaggccacctgcaaaagctcgctttggtgcagttgttgaacgattatttggcactgcaaataagcaattaattcatgagttgcagggaaatacccaaattactcgcaagcatcgccaagttactcaatctgttcatccccaaaaattggctctttggacgttaggcgatctctacgaatcactatgtgaatgggcttacaaagtttatgctgaccgccagcaccctgcgctagggcaaagccctaatgctgcattcgctcaagggctggcgttgggaggtagtcgcatccatcgccgagtagagtatgaccaagtcttccgtatcttgacattgcccgcaccggaaagaggacaacgcaaagttcagccaggacaagggataaaacttagcaatatctactactggtcaaatgcctttcgagacccagaaattgaacaatcgatggttgaagttcgttatgatccctttgatgccagcattgcctatgcactggtgcgaaaacaatgggtccggtgtatttcctcctactatcaacagtttcaaaatcgttcagaaaaggaaattcgtttaataactgctgagttgattaagcaaaagcgtgaccagggaagagatacaaatgttacggataaagaattggcgcagtttttaagctctacagaaatgaaagaaggcaaattcttggagcaacgcttgcggactacagaaaacagggtagttattcagaatagtacagctacagaagacgatccccccatcactaattctcagaattcttacgagccatcgcttatgctgccaagtgaggatgagttggatgatcaggaagactggttaaataccggcaaagctgaggcagaattagaattctatggagagtactagcgatgcaacctcaaataagcttcccaaaagagttactgcttcaaccaattcctgatcgaattgcctatttcaaagattacacaatggcacatccgaagcttatagaagcagaccggaagttaatgcatgctattcgtgaacctggaggagctgctcttatctttgtctttggtcctaccggagttggaaagtctactctattgaaacgaattactcaaaagctgcttaaagaagcattgtctttgatggagactgacaaaggctatattcctattgcgggggtagagataaaaactccagaggatagtaactttgattggaacgatttttatgttcgtgctcttatggcacttaatgagccaatgatcgagaaaaaaatcaaccgtacaggtgcaaaactaaaattacggttggcacttgaatctgcccttcgtaatcgccgtcctgatgctttttacatagacgaagctcaaaattttggtaaggtagccagtgggcgaaaattgcaagatcaaacagattgcattaaatctcttgcaaatctcgctcaaactcggtttatcttatgtgggatttatgaacttttaccactacgaaatctaagtgggcagctatgccgccgtagccatagtattcactttccacgttattcggcagattctgagcaggatctaaaggcctttaaaagtgcgttattaacactacaaaatcaactccctcttcccgaaccacctgatttagtggcgcattgggaattttgttatgagagaactatcggctgtattggtattttgaaagatttgctccttcggactctaagcgcgattttagtacgggatggagacaaagttttgacattgaagcccaaggatttagaacaacgtgcatggtctttagaagaatgtttggttatgctgagagaggcaaaggaaggagagcaacaacttactgacaaatcgggcttacatgaggaattacggacagctttagggtttaatgcagctacgtccaagcagtctgccaaatcatccaagtcaacatcaagcaaaaaagcaggcagtgttggaaagccttcacctcgtcgtcgttcagttggaatagatcaagatgccagctaatagcagctccaattacgaaagaaaaatattttcaactagaatcgagcttaataaattgtccaattaagtatgctcaacagcagttcttaaagctcttcttcaattaacacaaaaacgcccagttttaacttaagtcgaacagaaagtaatcgtattgtacacggccgcataatcgaaattaatacgactcactataggggaattgtgagcggataacaattccccatcttagtatattagttaagtataagaaggagatatacatatggcagatctcaattggatatcggccggccacgcgatcgctgacgtcggtaccctcgagtctggtaaagaaaccgctgctgcgaaatttgaacgccagcacatggactcgtctactagcgcagcttaattaacctaggctgctgccaccgctgagcaataactagcataaccccttggggcctctaaacgggtcttgaggggttttttgctgaaacctcaggcatttgagaagcacacggtcacactgcttccggtagtgccctgaaccgacgaccgggtcatcgtggccggatcttgcggcccctcggcttgaacgaattgttagacattatttgccgactaccttggtgatctcgcctttcacgtagtggacaaattcttccaactgatctgcgcgcgaggccaagcgatcttcttcttgtccaagataagcctgtctagcttcaagtatgacgggctgatactgggccggcaggcgctccattgcccagtcggcagcgacatccttcggcgcgattttgccggttactgcgctgtaccaaatgcgggacaacgtaagcactacatttcgctcatcgccagcccagtcgggcggcgagttccatagcgttaaggtttcatttagcgcctcaaatagatcctgttcaggaaccggatcaaagagttcctccgccgctggacctaccaaggcaacgctatgttctcttgcttttgtcagcaagatagccagatcaatgtcgatcgtggctggctcgaagatacctgcaagaatgtcattgcgctgccattctccaaattgcagttcgcgcttagctggataacgccacggaatgatgtcgtcgtgcacaacaatggtgacttctacagcgcggagaatctcgctctctccaggggaagccgaagtttccaaaaggtcgttgatcaaagctcgccgcgttgtttcatcaagccttacggtcaccgtaaccagcaaatcaatatcactgtgtggcttcaggccgccatccactgcggagccgtacaaatgtacggccagcaacgtcggttcgagatggcgctcgatgacgccaactacctctgatagttgagtcgatacttcggcgatcaccgcttccctcatactcttcctttttcaatattattgaagcatttatcagggttattgtctcatgagcggatacatatttgaatgtatttagaaaaataaacaaatagctagctcactcggtcgctacgctccgggcgtgagactgcggcgggcgctgcggacacatacaaagttacccacagattccgtggataagcaggggactaacatgtgaggcaaaacagcagggccgcgccggtggcgtttttccataggctccgccctcctgccagagttcacataaacagacgcttttccggtgcatctgtgggagccgtgaggctcaaccatgaatctgacagtacgggcgaaacccgacaggacttaaagatccccaccgtttccggcgggtcgctccctcttgcgctctcctgttccgaccctgccgtttaccggatacctgttccgcctttctcccttacgggaagtgtggcgctttctcatagctcacacactggtatctcggctcggtgtaggtcgttcgctccaagctgggctgtaagcaagaactccccgttcagcccgactgctgcgccttatccggtaactgttcacttgagtccaacccggaaaagcacggtaaaacgccactggcagcagccattggtaactgggagttcgcagaggatttgtttagctaaacacgcggttgctcttgaagtgtgcgccaaagtccggctacactggaaggacagatttggttgctgtgctctgcgaaagccagttaccacggttaagcagttccccaactgacttaaccttcgatcaaaccacctccccaggtggttttttcgtttacagggcaaaagattacgcgcagaaaaaaaggatctcaagaagatcctttgatcttttctactgaaccgctctagatttcagtgcaatttatctcttcaaatgtagcacctgaagtcagccccatacgatataagttgtaattctcatgttagtcatgccccgcgcccaccggaaggagctgactgggttgaaggctctcaagggcatcggtcgagatcccggtgcctaatgagtgagctaacttacattaattgcgttgcgctcactgcccgctttccagtcgggaaacctgtcgtgccagctgcattaatgaatcggccaacgcgcggggagaggcggtttgcgtattgggcgccagggtggtttttcttttcaccagtgagacgggcaacagctgattgcccttcaccgcctggccctgagagagttgcagcaagcggtccacgctggtttgccccagcaggcgaaaatcctgtttgatggtggttaacggcgggatataacatgagctgtcttcggtatcgtcgtatcccactaccgagatgtccgcaccaacgcgcagcccggactcggtaatggcgcgcattgcgcccagcgccatctgatcgttggcaaccagcatcgcagtgggaacgatgccctcattcagcatttgcatggtttgttgaaaaccggacatggcactccagtcgccttcccgttccgctatcggctgaatttgattgcgagtgagatatttatgccagccagccagacgcagacgcgccgagacagaacttaatgggcccgctaacagcgcgatttgctggtgacccaatgcgaccagatgctccacgcccagtcgcgtaccgtcttcatgggagaaaataatactgttgatgggtgtctggtcagagacatcaagaaataacgccggaacattagtgcaggcagcttccacagcaatggcatcctggtcatccagcggatagttaatgatcagcccactgacgcgttgcgcgagaagattgtgcaccgccgctttacaggcttcgacgccgcttcgttctaccatcgacaccaccacgctggcacccagttgatcggcgcgagatttaatcgccgcgacaatttgcgacggcgcgtgcagggccagactggaggtggcaacgccaatcagcaacgactgtttgcccgccagttgttgtgccacgcggttgggaatgtaattcagctccgccatcgccgcttccactttttcccgcgttttcgcagaaacgtggctggcctggttcaccacgcgggaaacggtctgataagagacaccggcatactctgcgacatcgtataacgttactggtttcacattcaccaccctgaattgactctcttccgggcgctatcatgccataccgcgaaaggttttgcgccattcgatggtgtccgggatctcgacgctctcccttatgcgactcctgcattaggaaattaatacgactcactata

SEQ ID NO: 97 - DNA, 13805 bp, synthetic construct
  misc_feature 1..13805: note = Synthetic
  source 1..13805: mol_type = other DNA
ggggaattgtgagcggataacaattcccctgtagaaataattttgtttaactttaataaggagatataccatggtttccaagcctgaatcccggtctacgggactgaaacaccatctatgtatagctacgatggaatagtaaagggtttccaagcctgaatcccggtctacgggactgaaacgatccgaattcgagctcggcgcgcctgcaggtcgacaagcttgcggccgcataatgcttaagtcgaacagaaagtaatcgtattgtacacggccgcataatcgaaattaatacgactcactataggggaattgtgagcggataacaattccccatcttagtatattagttaagtataagaaggagatatacatatggctaccctactccaaaccctcctgttacgaacgttgtcacccgaggcggatccagttctctatgtctacattgagacggtactacctgcaatggaacgggaatttggcttgattccagcccttggtggctcggaggaagcacactttcatctgctgaggcgacggggaaacaaatatgcggcggaaaattccaagcggtacgccagtcgctctgatcaaagcctgctggttcatgtgctcaatgccttgctgaccgcctggaatttgttgccattcctaagctccacatttgaactatcagatgatgagaaacggctgctctgcctggggctgaccctacacgattacaacaagtggtgccagggtgaggaggaagattcgccgattgcatgcgaagtagcagagattcttgagctttgtcaaacattgggagagcggttgaactttgacggattctgggcagagtggcgggagtatttgacagagattgcctaccttgcccaaaacacccagggaaaagttggaacaaatctacccaaagcgaattggggcagcttcaaaattctagatacccgtcgtctggattcgcccctacgatggctactcgcttttggcgatgtcgcagtccatctcagcgatccatctgacatcgcaatgaaaacggggggagatcgcctgcgggaacatctgcgctttctaggtattcgtcgcaagctggtctaccatcgcctgcgcaactgtacagggctattaaccaacggaattcataatgcggtaatgcattttgctagagaactggattggcaacccatcctcttctttgctcagggtgttgtttatctcgctcctcagggtgctggcgttccggatcgcttagaacttcaggaatttctctgggagcaggtcagcaaccgattagccaccagcatgttgcggggagaggttggtttcaaacgggatggcaagggactcaaggtggctccccaaaccctggaactgttctcccctgctcagttgattcggaacttgcccggtgttgtccaatcttatgtcggaaacgctaaatctcctgcgactccaaaacgacttgagaagctggaactcagttcaacagagcgagagtttttggctaaaggtgcagatttaagagcagatcgcattgccgagtttatctttctggcgcaaaaagagtttttcggagataaaccagaatttatcacttggatgcttgaaactctgggggttcaaactgctatcacttcggagcagacgcagcttcaatccggtggtgtgaactggggatggtatcacgcagcagcctattacgtcgcgagcaatgccacgctggatttggaagagatttcggagaaacttcaggaatttgccgagcagttggcaacctgggcggaggaaaacaatttcttcccagagcatcgcagcccaacccatgacatctttttcaactatctgactcaatacctggaagttcaggggtgggagcagcaggagcagtcctttcagcttgaactggcaggctatgttggcgcaaagactaaaactgccagacaaccgatttgctccctcagttccggtgaatttgcttcggaagaccagatggattctgttgtcctgttcaaaccgcagcagtacagcaacaagaatcctctcggtggacggcagatcaagcgggggatttccaaaatctggtccctggaaatgctgctcaggcaggctctttggtctgcgccagcaggcaaactagaggaacaacaacccattttcctttacatcttcccggcatacgtttactcgccccaggttgctgctgctgtccggttactggtgaatgatctgaagcgtgtcaacctctgggaagtccgtaaacactggttggagaatggcatggatgctcaggcgttgcgatcgtttccctggctagtcggtgacaaaaacgattcgggtaactctgctccatccagatactctggtgaagacttgcctttcatggcaatgaactacaccaccaccagaggcaaaacgataactgatgcctgggttgaacctgctttcctgacactggtgctgcctttgttgctgggtgtgaaagttgtcgccaccagtagccagattccactctatgaaagcgacaacgacttttgcgaatctgtcaagctggatggacccgccgatttctgggctttgctgcggctaccaacttccctgcatctccaggattggattggggggcgtgttcaaaatttagcagaaggcttgaaccgcttgatggttgcctactgcctgcatctggacagtcgtagcgctccaccagatgcgcgctggagagccttaaacggcagtgtccgagagatgacaacaaatgttctaaacattttttcacttgcagaggagggattacgtcgtgatggctctaaacgcgatgcaacagttgaagaaattaaccgctattggaaatacgcccagctgtgggcagagggagactctgatatgcaaaacaagttgaagattaccaaacgcttagtcgatgagtaccgccagttttacagagccagtgcgaacgaatccagccatacggttttgctgccattttctaaggcactggaacacattctttcggtaccaaatgattgggacgatgaggaaattattgttcaaggggcaggacagttacaggccgcgttagatcggcaggaagtctacaaacgtcccctcatgcttgacaaagagattccctttgaaattcgtcggatgaaggagtttgaggcaattcaaaccttcatgaccacctgcgtcattgacctatttggacaaatgtgtaaaggcgatcgcgcgctcctgcaggaacatcgcaaccgccttaaatcaggggtcgaatttgcctatcgtcagttagccctgcaagagaaacaagccaaagccaaccaaaaatctggagaacaatcatgagcattcttgaaaccttaaagccagagttccacacagccttccctcgcctcgcctctggcaaatatgtccatttcttcatggtgcgtcacagccagtcgttccccgtctttcaaaccgatggcgttttgaacactgcccgtactcaggctgggttaaatgcaggcgatgaaaaatccagacaggcaatcagtcgcctggtcatgttcaaacggaaacaggtgacaccagaacgactcacaggacgggaactgctgcgatcgctgggcattaacggagtagttgaaggggaagccaatttctgtgaatacaacggcgaaagatcctgtaaaaaatgccctgattgcattctctatggttttgcgattggggacagtggctcggaacgttccaaagtctactctgattcagccttttccctgagtccttatgaagtttcccatcgcagttttaccttcaatgctccctttgaaggtggaaccatgagtgagaagggtgaaatgcggagtgcgatcaacgaactggatcatgttttgccggaagttgcttttccttgcgttgaaacactacgtgaccccacgctggaaggcttcatttatgtaatgggcaacctgatccggactcggcgctatggagcgcaggagtcgcgtacagggacaatggcgaatcacattattggcgttaccctatgtgatggcgagatcttcagcaatttgcactttacccaagccctctacgatgccctgaagggtgatttgagtgcgccaattagtgatttatgcagagaggcggcgatcgtggcagaaaacttgctaaatcaggaacctgtgcggaagatccaagttatttttggagagcagttgaacgaactcctggctgaggtagcgggaatctgccaggatgaaactcgcttgcgaaacactgtgacagccttgtaccagcaatcacaagcctatgccgagacctatggtgctgctgctaagaaaggcaaaggcaaatcttaaggtggctgccaatggttatttatcgatgcaatctcacgttgcacgacaacgtattcttcgccactcgcgagatggggattctctacgaaacagagaagtatctacacaactgggcactcagctttgctctgtttgaagccacccacatccccaaaccctatcgcttgcagggtgcgatcgctcaacgacccggttatctggaagctgacaacgagcaaaaccttttagttctgaatcacgcaggcatctatgttttccctgctctaccacttcagtggtcctaccaagtcaataccttcaaagcggctcaagtgccttactatggcaaatccaaacagttcggggataagggagctgatcgcaactacccgattaactacggacgggcaaaagaactggcagttggcagcacctaccgaacgtatattcttgcccctgaaccaatccagatcccccactggatacggttgggtaagtgggcagccaagattcaggtggacgcaagacccatacctaactgtggaatccgacaacggtcaggagaatacacctgcgaccatccactaaatccgatcgacctgtccggttcaacccgattgctgttatacaaccgcattgtcatgccacccgctagtctcgtcagtcagtcgcgagtttctggggactactgggaaatttctaaaccatccaattggactgaatttccggactggtcagacctgaaagacatacccaatcaagtttgcttacccagcggagtagcctatggagccagtactgccattgccgcatcttaagtccaccgctctgcatatcctggtaattcatttaggcgttgccgaaagcggagccttgcctgttgaatccggtcgagccgtccatgctcaagttttggactggttccgcatggcggatccggcaatttctgaggcaattcacaaaagccaggaatccccgctcagtctctcaggcctggtcgggaaacgccgtaaagtaggggtgcgggcaggagatgaattttacttccgaattgggttgttagatgggagtttgattgaaccactgctgagtggtttggagaagtggggcgacaagcccttttctctggcaaagtgtccctttgttttccgcagtatcaatatgttgccaggaactgacccctgggttggttcttccgattatgccttgcttacccaaaccccggctactttggataacctagctctcaagctcctgtcgccaacaagcttcaagtcgaatgccgggcaaggaatccaaccctttcctttgccagagtcagttttcggaaatttacatcgtcgctggaatgtctttgcaccaaaggaattgcagtttccaaaaattcaatggagtgggctggtctctgattatgacctcaaaactcaaaagttaaggatggaaaactcggttgagatcggcgcagtgggctgggtgcgctatcggtttccagatccagaacaagcgagaattgcaaccattctggctcactttgccttttttgctggagttgggcgtaagacagcaatggggatgggacaggtggtgttggacaaaaaaacgtagcctaggctgctgccaccgctgagcaataactagcataaccccttggggcctctaaacgggtcttgaggggttttttgctgaaacctcaggcatttgagaagcacacggtcacactgcttccggtagtcaataaaccggtaaaccagcaatagacataagcggctatttaacgaccctcgggatctcgacgctctcccttatgcgactcctgcattaggaaattaatacgactcactataggggaattgtgagcggataacaattcccctgtagaaataattttgtttaactttaataaggagatataccatgcttgatgaaaaaagcttcgacaactggtgccaatccgttggtctgagccaggcagcacgtgaagttgtagagcgtgtgcgatcctcttcaccctcccgtcgcgtacagagcggtagaggaaacgtctccggcaattaccctagccgcaaaatgggcgtcacaattcagtttgagtcccatcgaaatgagcttgcccgcatctacgaactggagcatgaccccggcgttctggaatattacgatcaacctcccaaaatcgaacttgattatttgtcaaaaaatgggaggcgtgttcgtactcaatacacacctgatttctttgttatccgtaatgactcagcaggttgggaggagtgtaaaacagaggatgaccttaagcaattagctgaggacagccctaaccgttaccaacgagctgaggacaatcgctggcgatgtccacctgcagaagcctatgctcttccccttgagttgtattttcaggtacggtctagtgctgaaattaactggattttccagcaaaactttgtatggctagaagactaccttggtactgaatcacttactatggatgagtcggttgcagatgcaatcatagccacagtcagagcaaacgagggtatcacactactcgaactgattcaacaattacaaggcacagatgctgatgctatctacatcctgattgcaaccgaacaaatttatgttgatttgatggctgaacggttagcgaacagcgatcgggcacgggtattttccagtccagaaattgctcaagcctttcaactcattacgctggtcgaagcacctctggctaacagttctctccatatagttcaggtgggcgttggcacaaccatacactgggatggtgaagtctgggagattgttaatacaggctctaccatgacaggattgttgcgatcggacggtaagtttatcgagttgcccaattctgcaattgatgaattgattcagaagggcaagattcaatcaatttcagcacaacaagcccctgatagcaaagcagaagttgaagaaatgcttcgctgtgctcgtccagccgacattaaagaagccaaccgtcgctacgaaatcattcagccttacctggaaaaggatgcaccagcttgtccaactcgaacaattcggcgctggcgtaatcagtattggcaggcagaaaagctttacgggaatggctatgttggtttactaccaaatcatcagaagaaagggaattatttagttaaggttaatgaagtaactcaagcttttatgcttgagtttattgagaagcattacgaaaatctcaaacagcgtagtaagcttagagtttatcaggcttttgtggaggcatgtgaaagccacgaaccgaaactaaaccctccaagccgtactacattcacactagcgattcagaaacgagcaggacatcagcaaaccttgaaacgtgaaggacgaagagctgccattcagaaggaggagttttactgggaactggagctaactactcctcgacacggcgatcgccccttcgagatcgttcatattgatcacactcaactcgatattgagcttatcagttctttgaactccctggcccaatgcaaccctacatctgttgatgccacttacaatttgggtcgtccttgggcaacgttcatggttgatgcttacagccgccgtttgctagcagtttacataacctatgaagaacccagctatcgttcctgcatgatggtgctccgtatttgcgtacagcgatttaagcgttttcctcagacgatcgtggtagataatggtgcagaatttcacagccattactttgaacaactactggcaacatatcaatgcacaaagaagcacaggccacctgcaaaagctcgctttggtgcagttgttgaacgattatttggcactgcaaataagcaattaattcatgagttgcagggaaatacccaaattactcgcaagcatcgccaagttactcaatctgttcatccccaaaaattggctctttggacgttaggcgatctctacgaatcactatgtgaatgggcttacaaagtttatgctgaccgccagcaccctgcgctagggcaaagccctaatgctgcattcgctcaagggctggcgttgggaggtagtcgcatccatcgccgagtagagtatgaccaagtcttccgtatcttgacattgcccgcaccggaaagaggacaacgcaaagttcagccaggacaagggataaaacttagcaatatctactactggtcaaatgcctttcgagacccagaaattgaacaatcgatggttgaagttcgttatgatccctttgatgccagcattgcctatgcactggtgcgaaaacaatgggtccggtgtatttcctcctactatcaacagtttcaaaatcgttcagaaaaggaaattcgtttaataactgctgagttgattaagcaaaagcgtgaccagggaagagatacaaatgttacggataaagaattggcgcagtttttaagctctacagaaatgaaagaaggcaaattcttggagcaacgcttgcggactacagaaaacagggtagttattcagaatagtacagctacagaagacgatccccccatcactaattctcagaattcttacgagccatcgcttatgctgccaagtgaggatgagttggatgatcaggaagactggttaaataccggcaaagctgaggcagaattagaattctatggagagtactagcgatgcaacctcaaataagcttcccaaaagagttactgcttcaaccaattcctgatcgaattgcctatttcaaagattacacaatggcacatccgaagcttatagaagcagaccggaagttaatgcatgctattcgtgaacctggaggagctgctcttatctttgtctttggtcctaccggagttggaaagtctactctattgaaacgaattactcaaaagctgcttaaagaagcattgtctttgatggagactgacaaaggctatattcctattgcgggggtagagataaaaactccagaggatagtaactttgattggaacgatttttatgttcgtgctcttatggcacttaatgagccaatgatcgagaaaaaaatcaaccgtacaggtgcaaaactaaaattacggttggcacttgaatctgcccttcgtaatcgccgtcctgatgctttttacatagacgaagctcaaaattttggtaaggtagccagtgggcgaaaattgcaagatcaaacagattgcattaaatctcttgcaaatctcgctcaaactcggtttatcttatgtgggatttatgaacttttaccactacgaaatctaagtgggcagctatgccgccgtagccatagtattcactttccacgttattcggcagattctgagcaggatctaaaggcctttaaaagtgcgttattaacactacaaaatcaactccctcttcccgaaccacctgatttagtggcgcattgggaattttgttatgagagaactatcggctgtattggtattttgaaagatttgctccttcggactctaagcgcgattttagtacgggatggagacaaagttttgacattgaagcccaaggatttagaacaacgtgcatggtctttagaagaatgtttggttatgctgagagaggcaaaggaaggagagcaacaacttactgacaaatcgggcttacatgaggaattacggacagctttagggtttaatgcagctacgtccaagcagtctgccaaatcatccaagtcaacatcaagcaaaaaagcaggcagtgttggaaagccttcacctcgtcgtcgttcagttggaatagatcaagatgccagctaatagcagctccaattacgaaagaaaaatattttcaactagaatcgagcttaataaattgtccaattaagtatgctcaacagcagttcttaaagctcttcttcaattaacacaaaaacgcccagttttaacttaagtcgaacagaaagtaatcgtattgtacacggccgcataatcgaaattaatacgactcactataggggaattgtgagcggataacaattccccatcttagtatattagttaagtataagaaggagatatacatatggcagatctcaattggatatcggccggccacgcgatcgctgacgtcggtaccctcgagtctggtaaagaaaccgctgctgcgaaatttgaacgccagcacatggactcgtctactagcgcagcttaattaacctaggctgctgccaccgctgagcaataactagcataaccccttggggcctctaaacgggtcttgaggggttttttgctgaaacctcaggcatttgagaagcacacggtcacactgcttccggtagtgccctgaaccgacgaccgggtcatcgtggccggatcttgcggcccctcggcttgaacgaattgttagacattatttgccgactaccttggtgatctcgcctttcacgtagtggacaaattcttccaactgatctgcgcgcgaggccaagcgatcttcttcttgtccaagataagcctgtctagcttcaagtatgacgggctgatactgggccggcaggcgctccattgcccagtcggcagcgacatccttcggcgcgattttgccggttactgcgctgtaccaaatgcgggacaacgtaagcactacatttcgctcatcgccagcccagtcgggcggcgagttccatagcgttaaggtttcatttagcgcctcaaatagatcctgttcaggaaccggatcaaagagttcctccgccgctggacctaccaaggcaacgctatgttctcttgcttttgtcagcaagatagccagatcaatgtcgatcgtggctggctcgaagatacctgcaagaatgtcattgcgctgccattctccaaattgcagttcgcgcttagctggataacgccacggaatgatgtcgtcgtgcacaacaatggtgacttctacagcgcggagaatctcgctctctccaggggaagccgaagtttccaaaaggtcgttgatcaaagctcgccgcgttgtttcatcaagccttacggtcaccgtaaccagcaaatcaatatcactgtgtggcttcaggccgccatccactgcggagccgtacaaatgtacggccagcaacgtcggttcgagatggcgctcgatgacgccaactacctctgatagttgagtcgatacttcggcgatcaccgcttccctcatactcttcctttttcaatattattgaagcatttatcagggttattgtctcatgagcggatacatatttgaatgtatttagaaaaataaacaaatagctagctcactcggtcgctacgctccgggcgtgagactgcggcgggcgctgcggacacatacaaagttacccacagattccgtggataagcaggggactaacatgtgaggcaaaacagcagggccgcgccggtggcgtttttccataggctccgccctcctgccagagttcacataaacagacgcttttccggtgcatctgtgggagccgtgaggctcaaccatgaatctgacagtacgggcgaaacccgacaggacttaaagatccccaccgtttccggcgggtcgctccctcttgcgctctcctgttccgaccctgccgtttaccggatacctgttccgcctttctcccttacgggaagtgtggcgctttctcatagctcacacactggtatctcggctcggtgtaggtcgttcgctccaagctgggctgtaagcaagaactccccgttcagcccgactgctgcgccttatccggtaactgttcacttgagtccaacccggaaaagcacggtaaaacgccactggcagcagccattggtaactgggagttcgcagaggatttgtttagctaaacacgcggttgctcttgaagtgtgcgccaaagtccggctacactggaaggacagatttggttgctgtgctctgcgaaagccagttaccacggttaagcagttccccaactgacttaaccttcgatcaaaccacctccccaggtggttttttcgtttacagggcaaaagattacgcgcagaaaaaaaggatctcaagaagatcctttgatcttttctactgaaccgctctagatttcagtgcaatttatctcttcaaatgtagcacctgaagtcagccccatacgatataagttgtaattctcatgttagtcatgccccgcgcccaccggaaggagctgactgggttgaaggctctcaagggcatcggtcgagatcccggtgcctaatgagtgagctaacttacattaattgcgttgcgctcactgcccgctttccagtcgggaaacctgtcgtgccagctgcattaatgaatcggccaacgcgcggggagaggcggtttgcgtattgggcgccagggtggtttttcttttcaccagtgagacgggcaacagctgattgcccttcaccgcctggccctgagagagttgcagcaagcggtccacgctggtttgccccagcaggcgaaaatcctgtttgatggtggttaacggcgggatataacatgagctgtcttcggtatcgtcgtatcccactaccgagatgtccgcaccaacgcgcagcccggactcggtaatggcgcgcattgcgcccagcgccatctgatcgttggcaaccagcatcgcagtgggaacgatgccctcattcagcatttgcatggtttgttgaaaaccggacatggcactccagtcgccttcccgttccgctatcggctgaatttgattgcgagtgagatatttatgccagccagccagacgcagacgcgccgagacagaacttaatgggcccgctaacagcgcgatttgctggtgacccaatgcgaccagatgctccacgcccagtcgcgtaccgtcttcatgggagaaaataatactgttgatgggtgtctggtcagagacatcaagaaataacgccggaacattagtgcaggcagcttccacagcaatggcatcctggtcatccagcggatagttaatgatcagcccactgacgcgttgcgcgagaagattgtgcaccgccgctttacaggcttcgacgccgcttcgttctaccatcgacaccaccacgctggcacccagttgatcggcgcgagatttaatcgccgcgacaatttgcgacggcgcgtgcagggccagactggaggtggcaacgccaatcagcaacgactgtttgcccgccagttgttgtgccacgcggttgggaatgtaattcagctccgccatcgccgcttccactttttcccgcgttttcgcagaaacgtggctggcctggttcaccacgcgggaaacggtctgataagagacaccggcatactctgcgacatcgtataacgttactggtttcacattcaccaccctgaattgactctcttccgggcgctatcatgccataccgcgaaaggttttgcgccattcgatggtgtccgggatctcgacgctctcccttatgcgactcctgcattaggaaattaatacgactcactata

SEQ ID NO: 98 - DNA, 3667 bp, synthetic construct
  misc_feature 1..3667: note = Synthetic
  source 1..3667: mol_type = other DNA
tcgcgcgtttcggtgatgacggtgaaaacctctgacacatgcagctcccggagactgtcacagcttgtctgtaagcggatgccgggagcagacaagcccgtcagggcgcgtcagcgggtgttggcgggtgtcggggctggcttaactatgcggcatcagagcagattgtactgagagtgcaccatatgcggtgtgaaataccgcacagatgcgtaaggagaaaataccgcatcaggcgccattcgccattcaggctgcgcaactgttgggaagggcgatcggtgcgggcctcttcgctattacgccagctggcgaaagggggatgtgctgcaaggcgattaagttgggtaacgccagggttttcccagtcacgacgttgtaaaacgacggccagtgaattgacgcgtattgggattaaaaacgttcaaccccataaatcatgcatgttgtgactgcaaccataagttgtctatttcggacactttatgcttacaattttggctggacagcttatgcttacaattttggctggacagatagagcgaaagcaataggcaagacgattatatttctttgcctataaagtaggcctattgatggatgaccctccaaccgggttcgtgagtggcttccctgccgcggccgccgcgggcgcgggccgctcgctctacggtgggcccgagctcgtgttccccgaggccatgaaccaccccgcgctgaccgtgcatccggcgcaccagctgggcgcctccccgctgcagcccccgcactccttcttcggcgcccagcaccgggaccctctccatttctacccctgggtcctgcggaaccgcttcttcggccaccgcttccagggtgagtgtccacgctgtgcccgccgaggcggccggccggcgcccgtgctgcggcgatgcgggggaggctcgggggcgcgcggggctgtttagaagttactgccgggaaggctgcaggtccgcggaggtagattcccaggcagggaagagctgtgcggcatccacccgcgccttcgccgcgtaggtctccctcccaggaaagcaggtggagatattggtgcccttctagagtcagaagtcattccttcggagcttttccaggattaaaagcatacttgctcttggcaaataaccctaaggcaacacaacggctgctccaagttctaacttttggacaacttatgctttcgattgttaacatttgggcaacttatgctttcagttttttattttgcaaagtgaatattgacgatgactcaagttgtccacacccatgagtggacaacttatgctttcaaaatcggacaacttatggttgcagtcacacatgttgtgactgggcaagtgagatgatagtcacctgatttgcttctccctcactgcttccttagcctaaaatcccaatggcgcgccgagcttggcgtaatcatggtcatagctgtttcctgtgtgaaattgttatccgctcacaattccacacaacatacgagccggaagcataaagtgtaaagcctggggtgcctaatgagtgagctaactcacattaattgcgttgcgctcactgcccgctttccagtcgggaaacctgtcgtgccagctgcattaatgaatcggccaacgcgcggggagaggcggtttgcgtattgggcgctgttccgcttcctcgctcactgactcgctgcgctcggtcgttcggctgcggcgagcggtatcagctcactcaaaggcggtaatacggttatccacagaatcaggggataacgcaggaaagaacatgtgagcaaaaggccagcaaaaggccaggaaccgtaaaaaggccgcgttgctggcgtttttccataggctccgcccccctgacgagcatcacaaaaatcgacgctcaagtcagaggtggcgaaacccgacaggactataaagataccaggcgtttccccctggaagctccctcgtgcgctctcctgttccgaccctgccgcttaccggatacctgtccgcctttctcccttcgggaagcgtggcgctttctcatagctcacgctgtaggtatctcagttcggtgtaggtcgttcgctccaagctgggctgtgtgcacgaaccccccgttcagcccgaccgctgcgccttatccggtaactatcgtcttgagtccaacccggtaagacacgacttatcgccactggcagcagccactggtaacaggattagcagagcgaggtatgtaggcggtgctacagagttcttgaagtggtggcctaactacggctacactagaagaacagtatttggtatctgcgctctgctgaagccagttaccttcggaaaaagagttggtagctcttgatccggcaaacaaaccaccgctggtagcggtggtttttttgtttgcaagcagcagattacgcgcagaaaaaaaggatctcaagaagatcctttgatcttttctacggggtctgacgctcagtggaacgaaaactcacgttaagggattttggtcatgagattatcaaaaaggatcttcacctagatccttttaaattaaaaatgaagttttaaatcaatctaaagtatatatgagtaaacttggtctgacagttaccaatgcttaatcagtgaggcacctatctcagcgatctgtctatttcgttcatccatagttgcctgactccccgtcgtgtagataactacgatacgggagggcttaccatctggccccagtgctgcaatgataccgcgagaaccacgctcaccggctccagatttatcagcaataaaccagccagccggaagggccgagcgcagaagtggtcctgcaactttatccgcctccatccagtctattaattgttgccgggaagctagagtaagtagttcgccagttaatagtttgcgcaacgttgttgccattgctacaggcatcgtggtgtcacgctcgtcgtttggtatggcttcattcagctccggttcccaacgatcaaggcgagttacatgatcccccatgttgtgcaaaaaagcggttagctccttcggtcctccgatcgttgtcagaagtaagttggccgcagtgttatcactcatggttatggcagcactgcataattctcttactgtcatgccatccgtaagatgcttttctgtgactggtgagtactcaaccaagtcattctgagaatagtgtatgcggcgaccgagttgctcttgcccggcgtcaatacgggataataccgcgccacatagcagaactttaaaagtgctcatcattggaaaacgttcttcggggcgaaaactctcaaggatcttaccgctgttgagatccagttcgatgtaacccactcgtgcacccaactgatcttcagcatcttttactttcaccagcgtttctgggtgagcaaaaacaggaaggcaaaatgccgcaaaaaagggaataagggcgacacggaaatgttgaatactcatactcttcctttttcaatattattgaagcatttatcagggttattgtctcatgagcggatacatatttgaatgtatttagaaaaataaacaaataggggttccgcgcacatttccccgaaaagtgccacctgacgtctaagaaaccattattatcatgacattaacctataaaaataggcgtatcacgaggcccttttgtc

SEQ ID NO: 99 - DNA, 2982 bp, synthetic construct
  source 1..2982: mol_type = other DNA
  variation 678..683: note = n is a, c, g, or t
cggggcggagatttcctggaagatgccaggaagatacttaacagggaagtgagagggccgcggcaaagccgtttttccataggctccgcccccctgacaagcatcacgaaatctgacgctcaaatcagtggtggcgaaacccgacaggactataaagataccaggcgtttccccctggcggctccctcgtgcgctctcctgttcctgcctttcggtttaccggtgtcattccgctgttatggccgcgtttgtctcattccacgcctgacactcagttccgggtaggcagttcgctccaagctggactgtatgcacgaaccccccgttcagtccgaccgctgcgccttatccggtaactatcgtcttgagtccaacccggaaagacatgcaaaagcaccactggcagcagccactggtaattgatttagaggagttagtcttgaagtcatgcgccggttaaggctaaactgaaaggacaagttttggtgactgcgctcctccaagccagttacctcggttcaaagagttggtagctcagagaaccttcgaaaaaccgccctgcaaggcggttttttcgttttcagagcaagagattacgcgcagaccaaaacgatctcaagaagatcatcttattaatatacgtagtatctacgatacgtagtatctacgatacgtagnnnnnngagaagtcatttaataaggccactgttaaacgtagatatatctacgcgtagatatatctacgatacgtagcggccgacgcgctgggctacgtctttaatgggcagcgcccacatacgcagcgatttccaacagcttgaggcggaagctttaatgcggtagtttatcacagttaaattgctaacgcagtcaggcaccgtgtatgaaatctaacaatgcgctcatcgtcatcctcggcaccgtcaccctggatgctgtaggcataggcttggttatgccggtactgccgggcctcttgcgggatatcgtccattccgacagcatcgccagtcactatggcgtgctgctagcgctatatgcgttgatgcaatttctatgcgcacccgttctcggagcactgtccgaccgctttggccgccgcccagtcctgctcgcttcgctacttggagccactatcgactacgcgatcatggcgaccacacccgtcctgtggatcctctacgccggacgcatcgtggccggcatcaccggcgccacaggtgcggttgctggcgcctatatcgccgacatcaccgatggggaagatcgggcctgccaccatacccacgccgaaacaagcgccctgcaccattatgttccggatctgcatcgcaggatgctgctggctaccctgtggaacacctacatctgtattaacgaagcgctaaccgtttttatcaggctctgggaggcagaataaatgatcatatcgtcaattattacctccacggggagagcctgagcaaactggcctcaggcatttgagaagcacacggtcacactgcttccggtagtcaataaaccggtaaaccagcaatagacataagcggctatttaacgaccctgccctgaaccgacgaccgggtcgaatttgctttcgaatttctgccattcatccgcttattatcacttattcaggcgtagcaaccaggcgtttaagggcaccaataactgccttaaaaaaattacgccccgccctgccactcatcgcagtactgttgtaattcattaagcattctgccgacatggaagccatcacaaacggcatgatgaacctgaatcgccagcggcatcagcaccttgtcgccttgcgtataatatttgcccatggtgaaaacgggggcgaagaagttgtccatattggccacgtttaaatcaaaactggtgaaactcacccagggattggctgagacgaaaaacatattctcaataaaccctttagggaaataggccaggttttcaccgtaacacgccacatcttgcgaatatatgtgtagaaactgccggaaatcgtcgtggtattcactccagagcgatgaaaacgtttcagtttgctcatggaaaacggtgtaacaagggtgaacactatcccatatcaccagctcaccgtctttcattgccatacggaattccggatgagcattcatcaggcgggcaagaatgtgaataaaggccggataaaacttgtgcttatttttctttacggtctttaaaaaggccgtaatatccagctgaacggtctggttataggtacattgagcaactgactgaaatgcctcaaaatgttctttacgatgccattgggatatatcaacggtggtatatccagtgatttttttctccattttagcttccttagctcctgaaaatctcgataactcaaaaaatacgcccggcggatgtggtggaattggtagacacgcacgtttgaggggcgtgtggcgtaagccttgcgagttcgattctcgccatccgcagtagtgatcttatttcattatggtgaaagttggaacctcttacgtgccgatcaacgtctcattttcgccaaaagttggcccagggcttcccggtatcaacagggacaccaggatttatttattctgcgaagtgatcttccgtcacaggtatttattcggcgcaaagtgcgtcgggtgatgctgccaacttactgatttagtgtatgatggtgtttttgaggtgctccagtggcttctgtttctatcagctgtccctcctgttcagctactgacggggtggtgcgtaacggcaaaagcaccgccggacatcagcgctagcggagtgtatactggcttactatgttggcactgatgagggtgtcagtgaagtgcttcatgtggcaggagaaaaaaggctgcaccggtgcgtcagcagaatatgtgatacaggatatattccgcttcctcgctcactgactcgctacgctcggtcgttcgactgcggcgagcggaaatggcttacgaa

SEQ ID NO: 100 - DNA, 9653 bp, synthetic construct
  misc_feature 1..9653: note = Synthetic
  source 1..9653: mol_type = other DNA
ggggaattgtgagcggataacaattcccctgtagaaataattttgtttaactttaataaggagatatacatgaaaagaatcagtgatgaatattccccagttaggaaatcccaaactgtatatgggagtatttcagtaaattatgcttttagaggggaaaagacgatttggtgtgaatctactcttgagcgtgattttttgattaggcaagaattcaatagcaatgtcatagatatcgtaagccagcctattaccatcccatatataacagagttgggtaatgaatccacttatactcctgatttcctcgtacagttttccagtgcaaattgtggtgattttgaggaaattccctgtccactgttaatagaaataaaacctagaaagaaacttatagaagattgggataaattaaagccaaaatttaaggcggctcatacttttgctaaagaaaaaggttggaaattcaagattataaatgaatcaaggttatatgatcagtattgggaaaatattaattttttgaaaagatttagacgttctcatgtggatgtctatgatgaacaaactttaattgagactttagatagtcttggtcaatcgactattaatcaattaccggcacatatttttaaggataaaactaatattcttcgaggtattcatcaagtatgggcattggtcgcaaaacgaaaaatcatgtgtgatttatattgccccttaacagcagagacggtgatttggacaaatcaagatgatgtgcttacaaggagatttttaaatggttcagactgatactgtaagtattgaccgaagtcggatcatactcaaaccaaatgtaattgttaagtatgaagggcaaccgtataagattgctaatgttttgaatgccaacgatatcgtgatttctagtttagattctgtgcgttgtttacaagtaagtgcagattctctacaagtatttgaagctgaaaataaccaaactaaagatataaataaaggtgattgggatattacgcatgaagcgtggaaaatagctttacatcgttatgaaatcatcaagccgttgattaagtattcaacaaccgaattagtcgagcaacgagcaagtgaatatggcattaaccgttccaccttatggaaatggttaaaagattttagagaaaataattctatcttagtgttagttcctaaaaagagaggttggacgaccaagaagtctaggttgtctcctcaaattatgaatattattaaccaaggtattcaagaggaatatctcaatgccagaaagcctagtattgcaaaaactatagattttattaaagcagaatgttctcgccttaaactagaagcaccccatgacaattcaattcgtagaaaaatagaagcattaaacgattatatggtgattaaggctcgtcatggttctaaagcagcacaagataagtatgcatctgctgctggtgagtttcctaatgctgattatcccttggcatatgtacaggtagaccacactccactagatattgaaattgttgatgatgaatttagagaggcgattggacgaccatttctaacattagctattgatataaatactcgaatggtggtcggttattacttgtccttagaagcccccagtgcaacatctgttgccatgtgtattgcttccagtattttgtcaaaaaaacggaagctaattgaattggatatagatgctgattggcaagttgaaggtcttatggattctatacatacagataatggtcctgactttagaactaaccatatcagtcgagcttgcttaaaatatgggattcattgggagtttcgtccgattggtggggcaaggtttggtggacatatcgaacgtttgattggtgttgttaacattgaaatgcacatcttggatggtacaaccttctcgaatatccaagaacgtggaacctataattcagcaggtcatgcctgtatgacactaaaagaactagaatattatattgtttattggatcactaaagtttatcaccaaaagaaacactccaaactcggtatgtcacctttacagaagtggcaagatggtgtttggggaacaaaaactagtgttggaacaggtttaaaagagagagtttcggatgaagatacattatttattgatttccttcccgaatttgaatcaacaattcaacgtgtaggtgtacagaaagacaatctattttattttgctgattgtttacgacaatgggttaattgtgttgatcccgaagatgtaaataaaaagagaaaaaagaaatttttgtttaaacgtgatccaagggatatttctcttatttggttttatgaacctctgtccaatacatattttaaagtgcctactgctaagcgagaaataccaccaattagcttatttgaatacaaacaagtgcagaaatatcttcgtggcgagcaacatgataatcaaaatcaggatgagatttatcaggcaattcttcatttacgagagcaattgaaacaatcccgtagtctgactcggaagcaacggagagtaaatcaacgtaaaaaggaaaatgcaaaagcaacacatcatttatctgtaaaaaatgaacctgaaaaaccatctattgtcgaaaacagtgttcagccgactaatgatttatggagtattccattgacggcatttgaagatttaaggggataataatgcaaaaatatgaacatcttgcagatgatgtacttgaagtcatgtctctaagtgatagtgatcgtatcaatattttattttctgatcgttggattggttataaaaaagcggtcactattttggatactttaactgatctgttgaatcgccctaggaagcttcgcccagaatgtttattgattgtgggtgattctaatatgggtaaaacgaccattatccacgaattcacaaagcagcattacaccaaaacagtgaatgacatagatatggagctgctgtctgtaaaaaaacctgttttaaccatattagcccctgctaaagcgaatgtaaaagaattctatatcaatatattgaatcatttctttgtcccatttcgtcctactgatcctgaagcaaagttacggaatcaagctgtccatctaatgcggaagtatgaaacaaaaatgttgattattgatgaaatccataattgtttaacaggttctaccaaacttctttccgaagtgatgaataccttaaagaatctaagtaatgatctaagtctgaatatcgttggcgtcggtactcgtgaagcagttacgattctacataccgatgctcaatatgcaagccgttttgatgtagcaatgttgcctaaatgggaactgaatcaggattttctaagactattattaagttatgtacgattattgcctttaaagaaacgttctgatctagcatctcaaagacttgccacccttatatttgaaatttcaggtgggaattttggtgacttaaacagattgttgattgagtgtgctaaagaggcaatcgtaaaaggtaatgaagaaattaccgaagaaattgttaataaatttaaatggcttaaaccaaccgagggtatgaggaatattagaaatataaatcttaacatggtttaggtattctacttttcataggaaaatagccatgcaccaagtagaacaacgttggtatattcgtacccctattcaagagggtgaagtattttcctcttggctcatacgttctgctttggatttaggctgctcaccattaactttagtgaatcttttgtgggaaaaatggagaggattaacgatagatattgatcgtgggttaaatgaagaaaaattagacatattgttaaatcattgttttgtggaacagcatgaagttcagaaaactatgttaagcagttatttccctgctttgattccaaaaaattataacaaaaatcagcgtattccttggatattggctctaggtattcgaaatcgttcaaatgtgtcaggtcgtcaaatttgtacgcaatgtctaagttctacccatacaccaccatatttgcgtatcaagtggcgtatggggtggcatagtggctgtgatattcataaaaccatattaatagatcattgtcctcaatgcagaatcacattacaacctataaaaattgatatagagcatggatcattagcaatttgtacttcatgctatgctgatttaagtacactcattcaacgtccagtagaaacggatgcattaagatttcagcatcaagctgatcaggtcttagagtcacaatttgggcgatataaccaaaaggatatttcatcaatagagtggtttgagattgctcgtatatggttaagttttattcgatcccctttaaatatgaagagtcctaaccttttgcaaatgtttgaaagtcttaatattgatttaaatatagattatcctattacaccagtagcctttgaatttctgtctgttcaggagcgtgaaaaattattatcaattttaaataaaatcatggcattaccttgtgatttatttgttgatcgctctttagaatatcatgtaagtcattcttatttttgggataaaagaaaaaaactgcctacgcagcttcaactaatgaaagataaaatgttgaagccaattaagattattttgccgaaagataacgccatagccatgagtaaacccaaatctaaaaaaagtgtacaacggaagtggttaaggctattgagaaagctacagaaaggggggaacaggtgactttagctcaattttcccataaagaaggctgtagtggttgtgacagggctgatatagataaattcaaaaaaagatataagggcgataagtattgttcaacttgttatgcccgaatttttaaaaaaagagcttgtccaaaatgtggtgaatatgccagattgccaaaaaatgatgatcaagcaatttgtaatgaatgcatcaaaaaacagccttgtattcgctgtaatcaaactaagaagccgatagggacactcaccgaatatggtgtggtttgtaatagctgttctgtttattttcgcccaattgagcgttgtgagaggtgtgatacaccatcacaaaaattgacacatatttcacgatttggtgatgatttaagggtatgtcccaaatgctctactagagattatgaaacatgtccctcttgtcataaatatcgcttattagagcaagatgatacaggagctaagatttgtaaaaaatgtaggaataacgccaaaaagaaatgcaagcaatgtgatgtcttgataccagcaggctgtcctgatctatgtaacaactgttactggcataagaatctatgggagaaagctagacgaaatattaaagcattccaatcccaacacttacaggctcaatatgagcaatatttaatttggttagaagatgaggttggtgcaaataaagcagcactgtatatcaataaacatacccatttttttatcaaaactgaagaattatggcttgatgcaattcctacagcagaacagttattggctgttttaagaaccagtggacttagaaaatttgagttggttgcatcttggctagatgaagcccatcacattaaggttgcattagaggataaagacttttgctctcaacaggatcagatagaaaaactgatttcaagccttcctcacccctctactgcttatgatgtggttatatcttataaagatgagcttgatataaaaatgaaagatggaaagaccagtatccggtccataaaactggcaataaagcctgcggttgctcttatgcactatgtttgtgcatcgggagctacattacctaatttaaaccatataaaagcctatcttatcgacttttctggtcaggctgctgcactaacagggttcattaattttttgaataaaaattttgatacatctatagactatttggcttttaaaaaatcaaaaaatttcaatgaaaaacgaaaaaataaagtagaaaaagaaattgtccaatgggtggataagcctttggagaataaggaagatgtattaaattgggtgaagaatgggctaagatattttcataatgtatcttatgtggagtctctaaaagtcaaatttgagatgattacagaagctgatgatggatatgaaattttattgcagaatcattcttattggttgccaaaaaacacaggagatttaaaaagatagtttttttgtgattatactgtgctatttcaagctaatttattgtacaagttggtttgtttatctaattcttctaaaagaactgtccataacaatatggggcaggctgctgccaccgctgagcaataactagcataaccccttggggcctctaaacgggtcttgaggggttttttgctgaaacctcaggcatttgagaagcacacggtcacactgcttccggtagtcaataaaccggtaaaccagcaatagacataagcggctatttaacgaccctgccctgaaccgacgaccgggtcatcgtggccggatcttgcggcccctcggcttgaacgaattgttagacattatttgccgactaccttggtgatctcgcctttcacgtagtggacaaattcttccaactgatctgcgcgcgaggccaagcgatcttcttcttgtccaagataagcctgtctagcttcaagtatgacgggctgatactgggccggcaggcgctccattgcccagtcggcagcgacatccttcggcgcgattttgccggttactgcgctgtaccaaatgcgggacaacgtaagcactacatttcgctcatcgccagcccagtcgggcggcgagttccatagcgttaaggtttcatttagcgcctcaaatagatcctgttcaggaaccggatcaaagagttcctccgccgctggacctaccaaggcaacgctatgttctcttgcttttgtcagcaagatagccagatcaatgtcgatcgtggctggctcgaagatacctgcaagaatgtcattgcgctgccattctccaaattgcagttcgcgcttagctggataacgccacggaatgatgtcgtcgtgcacaacaatggtgacttctacagcgcggagaatctcgctctctccaggggaagccgaagtttccaaaaggtcgttgatcaaagctcgccgcgttgtttcatcaagccttacggtcaccgtaaccagcaaatcaatatcactgtgtggcttcaggccgccatccactgcggagccgtacaaatgtacggccagcaacgtcggttcgagatggcgctcgatgacgccaactacctctgatagttgagtcgatacttcggcgatcaccgcttccctcatactcttcctttttcaatattattgaagcatttatcagggttattgtctcatgagcggatacatatttgaatgtatttagaaaaataaacaaatagctagctcactcggtcgctacgctccgggcgtgagactgcggcgggcgctgcggacacatacaaagttacccacagattccgtggataagcaggggactaacatgtgaggcaaaacagcagggccgcgccggtggcgtttttccataggctccgccctcctgccagagttcacataaacagacgcttttccggtgcatctgtgggagccgtgaggctcaaccatgaatctgacagtacgggcgaaacccgacaggacttaaagatccccaccgtttccggcgggtcgctccctcttgcgctctcctgttccgaccctgccgtttaccggatacctgttccgcctttctcccttacgggaagtgtggcgctttctcatagctcacacactggtatctcggctcggtgtaggtcgttcgctccaagctgggctgtaagcaagaactccccgttcagcccgactgctgcgccttatccggtaactgttcacttgagtccaacccggaaaagcacggtaaaacgccactggcagcagccattggtaactgggagttcgcagaggatttgtttagctaaacacgcggttgctcttgaagtgtgcgccaaagtccggctacactggaaggacagatttggttgctgtgctctgcgaaagccagttaccacggttaagcagttccccaactgacttaaccttcgatcaaaccacctccccaggtggttttttcgtttacagggcaaaagattacgcgcagaaaaaaaggatctcaagaagatcctttgatcttttctactgaaccgctctagatttcagtgcaatttatctcttcaaatgtagcacctgaagtcagccccatacgatataagttgtaattctcatgttagtcatgccccgcgcccaccggaaggagctgactgggttgaaggctctcaagggcatcggtcgagatcccggtgcctaatgagtgagctaacttacattaattgcgttgcgctcactgcccgctttccagtcgggaaacctgtcgtgccagctgcattaatgaatcggccaacgcgcggggagaggcggtttgcgtattgggcgccagggtggtttttcttttcaccagtgagacgggcaacagctgattgcccttcaccgcctggccctgagagagttgcagcaagcggtccacgctggtttgccccagcaggcgaaaatcctgtttgatggtggttaacggcgggatataacatgagctgtcttcggtatcgtcgtatcccactaccgagatgtccgcaccaacgcgcagcccggactcggtaatggcgcgcattgcgcccagcgccatctgatcgttggcaaccagcatcgcagtgggaacgatgccctcattcagcatttgcatggtttgttgaaaaccggacatggcactccagtcgccttcccgttccgctatcggctgaatttgattgcgagtgagatatttatgccagccagccagacgcagacgcgccgagacagaacttaatgggcccgctaacagcgcgatttgctggtgacccaatgcgaccagatgctccacgcccagtcgcgtaccgtcttcatgggagaaaataatactgttgatgggtgtctggtcagagacatcaagaaataacgccggaacattagtgcaggcagcttccacagcaatggcatcctggtcatccagcggatagttaatgatcagcccactgacgcgttgcgcgagaagattgtgcaccgccgctttacaggcttcgacgccgcttcgttctaccatcgacaccaccacgctggcacccagttgatcggcgcgagatttaatcgccgcgacaatttgcgacggcgcgtgcagggccagactggaggtggcaacgccaatcagcaacgactgtttgcccgccagttgttgtgccacgcggttgggaatgtaattcagctccgccatcgccgcttccactttttcccgcgttttcgcagaaacgtggctggcctggttcaccacgcgggaaacggtctgataagagacaccggcatactctgcgacatcgtataacgttactggtttcacattcaccaccctgaattgactctcttccgggcgctatcatgccataccgcgaaaggttttgcgccattcgatggtgtccgggatctcgacgctctcccttatgcgactcctgcattaggaaattaatacgactcactata

SEQ ID NO: 101 - DNA, 8941 bp, synthetic construct
  source 1..8941: mol_type = other DNA
  misc_feature 1..8941: note = Synthetic
ggggaattgtgagcggataacaattcccctgtagaaataattttgtttaactttaataaggagatatacatggttcagactgatactgtaagtattgaccgaagtcggatcatactcaaaccaaatgtaattgttaagtatgaagggcaaccgtataagattgctaatgttttgaatgccaacgatatcgtgatttctagtttagattctgtgcgttgtttacaagtaagtgcagattctctacaagtatttgaagctgaaaataaccaaactaaagatataaataaaggtgattgggatattacgcatgaagcgtggaaaatagctttacatcgttatgaaatcatcaagccgttgattaagtattcaacaaccgaattagtcgagcaacgagcaagtgaatatggcattaaccgttccaccttatggaaatggttaaaagattttagagaaaataattctatcttagtgttagttcctaaaaagagaggttggacgaccaagaagtctaggttgtctcctcaaattatgaatattattaaccaaggtattcaagaggaatatctcaatgccagaaagcctagtattgcaaaaactatagattttattaaagcagaatgttctcgccttaaactagaagcaccccatgacaattcaattcgtagaaaaatagaagcattaaacgattatatggtgattaaggctcgtcatggttctaaagcagcacaagataagtatgcatctgctgctggtgagtttcctaatgctgattatcccttggcatatgtacaggtagaccacactccactagatattgaaattgttgatgatgaatttagagaggcgattggacgaccatttctaacattagctattgatataaatactcgaatggtggtcggttattacttgtccttagaagcccccagtgcaacatctgttgccatgtgtattgcttccagtattttgtcaaaaaaacggaagctaattgaattggatatagatgctgattggcaagttgaaggtcttatggattctatacatacagataatggtcctgactttagaactaaccatatcagtcgagcttgcttaaaatatgggattcattgggagtttcgtccgattggtggggcaaggtttggtggacatatcgaacgtttgattggtgttgttaacattgaaatgcacatcttggatggtacaaccttctcgaatatccaagaacgtggaacctataattcagcaggtcatgcctgtatgacactaaaagaactagaatattatattgtttattggatcactaaagtttatcaccaaaagaaacactccaaactcggtatgtcacctttacagaagtggcaagatggtgtttggggaacaaaaactagtgttggaacaggtttaaaagagagagtttcggatgaagatacattatttattgatttccttcccgaatttgaatcaacaattcaacgtgtaggtgtacagaaagacaatctattttattttgctgattgtttacgacaatgggttaattgtgttgatcccgaagatgtaaataaaaagagaaaaaagaaatttttgtttaaacgtgatccaagggatatttctcttatttggttttatgaacctctgtccaatacatattttaaagtgcctactgctaagcgagaaataccaccaattagcttatttgaatacaaacaagtgcagaaatatcttcgtggcgagcaacatgataatcaaaatcaggatgagatttatcaggcaattcttcatttacgagagcaattgaaacaatcccgtagtctgactcggaagcaacggagagtaaatcaacgtaaaaaggaaaatgcaaaagcaacacatcatttatctgtaaaaaatgaacctgaaaaaccatctattgtcgaaaacagtgttcagccgactaatgatttatggagtattccattgacggcatttgaagatttaaggggataataatgcaaaaatatgaacatcttgcagatgatgtacttgaagtcatgtctctaagtgatagtgatcgtatcaatattttattttctgatcgttggattggttataaaaaagcggtcactattttggatactttaactgatctgttgaatcgccctaggaagcttcgcccagaatgtttattgattgtgggtgattctaatatgggtaaaacgaccattatccacgaattcacaaagcagcattacaccaaaacagtgaatgacatagatatggagctgctgtctgtaaaaaaacctgttttaaccatattagcccctgctaaagcgaatgtaaaagaattctatatcaatatattgaatcatttctttgtcccatttcgtcctactgatcctgaagcaaagttacggaatcaagctgtccatctaatgcggaagtatgaaacaaaaatgttgattattgatgaaatccataattgtttaacaggttctaccaaacttctttccgaagtgatgaataccttaaagaatctaagtaatgatctaagtctgaatatcgttggcgtcggtactcgtgaagcagttacgattctacataccgatgctcaatatgcaagccgttttgatgtagcaatgttgcctaaatgggaactgaatcaggattttctaagactattattaagttatgtacgattattgcctttaaagaaacgttctgatctagcatctcaaagacttgccacccttatatttgaaatttcaggtgggaattttggtgacttaaacagattgttgattgagtgtgctaaagaggcaatcgtaaaaggtaatgaagaaattaccgaagaaattgttaataaatttaaatggcttaaaccaaccgagggtatgaggaatattagaaatataaatcttaacatggtttaggtattctacttttcataggaaaatagccatgcaccaagtagaacaacgttggtatattcgtacccctattcaagagggtgaagtattttcctcttggctcatacgttctgctttggatttaggctgctcaccattaactttagtgaatcttttgtgggaaaaatggagaggattaacgatagatattgatcgtgggttaaatgaagaaaaattagacatattgttaaatcattgttttgtggaacagcatgaagttcagaaaactatgttaagcagttatttccctgctttgattccaaaaaattataacaaaaatcagcgtattccttggatattggctctaggtattcgaaatcgttcaaatgtgtcaggtcgtcaaatttgtacgcaatgtctaagttctacccatacaccaccatatttgcgtatcaagtggcgtatggggtggcatagtggctgtgatattcataaaaccatattaatagatcattgtcctcaatgcagaatcacattacaacctataaaaattgatatagagcatggatcattagcaatttgtacttcatgctatgctgatttaagtacactcattcaacgtccagtagaaacggatgcattaagatttcagcatcaagctgatcaggtcttagagtcacaatttgggcgatataaccaaaaggatatttcatcaatagagtggtttgagattgctcgtatatggttaagttttattcgatcccctttaaatatgaagagtcctaaccttttgcaaatgtttgaaagtcttaatattgatttaaatatagattatcctattacaccagtagcctttgaatttctgtctgttcaggagcgtgaaaaattattatcaattttaaataaaatcatggcattaccttgtgatttatttgttgatcgctctttagaatatcatgtaagtcattcttatttttgggataaaagaaaaaaactgcctacgcagcttcaactaatgaaagataaaatgttgaagccaattaagattattttgccgaaagataacgccatagccatgagtaaacccaaatctaaaaaaagtgtacaacggaagtggttaaggctattgagaaagctacagaaaggggggaacaggtgactttagctcaattttcccataaagaaggctgtagtggttgtgacagggctgatatagataaattcaaaaaaagatataagggcgataagtattgttcaacttgttatgcccgaatttttaaaaaaagagcttgtccaaaatgtggtgaatatgccagattgccaaaaaatgatgatcaagcaatttgtaatgaatgcatcaaaaaacagccttgtattcgctgtaatcaaactaagaagccgatagggacactcaccgaatatggtgtggtttgtaatagctgttctgtttattttcgcccaattgagcgttgtgagaggtgtgatacaccatcacaaaaattgacacatatttcacgatttggtgatgatttaagggtatgtcccaaatgctctactagagattatgaaacatgtccctcttgtcataaatatcgcttattagagcaagatgatacaggagctaagatttgtaaaaaatgtaggaataacgccaaaaagaaatgcaagcaatgtgatgtcttgataccagcaggctgtcctgatctatgtaacaactgttactggcataagaatctatgggagaaagctagacgaaatattaaagcattccaatcccaacacttacaggctcaatatgagcaatatttaatttggttagaagatgaggttggtgcaaataaagcagcactgtatatcaataaacatacccatttttttatcaaaactgaagaattatggcttgatgcaattcctacagcagaacagttattggctgttttaagaaccagtggacttagaaaatttgagttggttgcatcttggctagatgaagcccatcacattaaggttgcattagaggataaagacttttgctctcaacaggatcagatagaaaaactgatttcaagccttcctcacccctctactgcttatgatgtggttatatcttataaagatgagcttgatataaaaatgaaagatggaaagaccagtatccggtccataaaactggcaataaagcctgcggttgctcttatgcactatgtttgtgcatcgggagctacattacctaatttaaaccatataaaagcctatcttatcgacttttctggtcaggctgctgcactaacagggttcattaattttttgaataaaaattttgatacatctatagactatttggcttttaaaaaatcaaaaaatttcaatgaaaaacgaaaaaataaagtagaaaaagaaattgtccaatgggtggataagcctttggagaataaggaagatgtattaaattgggtgaagaatgggctaagatattttcataatgtatcttatgtggagtctctaaaagtcaaatttgagatgattacagaagctgatgatggatatgaaattttattgcagaatcattcttattggttgccaaaaaacacaggagatttaaaaagatagtttttttgtgattatactgtgctatttcaagctaatttattgtacaagttggtttgtttatctaattcttctaaaagaactgtccataacaatatggggcaggctgctgccaccgctgagcaataactagcataaccccttggggcctctaaacgggtcttgaggggttttttgctgaaacctcaggcatttgagaagcacacggtcacactgcttccggtagtcaataaaccggtaaaccagcaatagacataagcggctatttaacgaccctgccctgaaccgacgaccgggtcatcgtggccggatcttgcggcccctcggcttgaacgaattgttagacattatttgccgactaccttggtgatctcgcctttcacgtagtggacaaattcttccaactgatctgcgcgcgaggccaagcgatcttcttcttgtccaagataagcctgtctagcttcaagtatgacgggctgatactgggccggcaggcgctccattgcccagtcggcagcgacatccttcggcgcgattttgccggttactgcgctgtaccaaatgcgggacaacgtaagcactacatttcgctcatcgccagcccagtcgggcggcgagttccatagcgttaaggtttcatttagcgcctcaaatagatcctgttcaggaaccggatcaaagagttcctccgccgctggacctaccaaggcaacgctatgttctcttgcttttgtcagcaagatagccagatcaatgtcgatcgtggctggctcgaagatacctgcaagaatgtcattgcgctgccattctccaaattgcagttcgcgcttagctggataacgccacggaatgatgtcgtcgtgcacaacaatggtgacttctacagcgcggagaatctcgctctctccaggggaagccgaagtttccaaaaggtcgttgatcaaagctcgccgcgttgtttcatcaagccttacggtcaccgtaaccagcaaatcaatatcactgtgtggcttcaggccgccatccactgcggagccgtacaaatgtacggccagcaacgtcggttcgagatggcgctcgatgacgccaactacctctgatagttgagtcgatacttcggcgatcaccgcttccctcatactcttcctttttcaatattattgaagcatttatcagggttattgtctcatgagcggatacatatttgaatgtatttagaaaaataaacaaatagctagctcactcggtcgctacgctccgggcgtgagactgcggcgggcgctgcggacacatacaaagttacccacagattccgtggataagcaggggactaacatgtgaggcaaaacagcagggccgcgccggtggcgtttttccataggctccgccctcctgccagagttcacataaacagacgcttttccggtgcatctgtgggagccgtgaggctcaaccatgaatctgacagtacgggcgaaacccgacaggacttaaagatccccaccgtttccggcgggtcgctccctcttgcgctctcctgttccgaccctgccgtttaccggatacctgttccgcctttctcccttacgggaagtgtggcgctttctcatagctcacacactggtatctcggctcggtgtaggtcgttcgctccaagctgggctgtaagcaagaactccccgttcagcccgactgctgcgccttatccggtaactgttcacttgagtccaacccggaaaagcacggtaaaacgccactggcagcagccattggtaactgggagttcgcagaggatttgtttagctaaacacgcggttgctcttgaagtgtgcgccaaagtccggctacactggaaggacagatttggttgctgtgctctgcgaaagccagttaccacggttaagcagttccccaactgacttaaccttcgatcaaaccacctccccaggtggttttttcgtttacagggcaaaagattacgcgcagaaaaaaaggatctcaagaagatcctttgatcttttctactgaaccgctctagatttcagtgcaatttatctcttcaaatgtagcacctgaagtcagccccatacgatataagttgtaattctcatgttagtcatgccccgcgcccaccggaaggagctgactgggttgaaggctctcaagggcatcggtcgagatcccggtgcctaatgagtgagctaacttacattaattgcgttgcgctcactgcccgctttccagtcgggaaacctgtcgtgccagctgcattaatgaatcggccaacgcgcggggagaggcggtttgcgtattgggcgccagggtggtttttcttttcaccagtgagacgggcaacagctgattgcccttcaccgcctggccctgagagagttgcagcaagcggtccacgctggtttgccccagcaggcgaaaatcctgtttgatggtggttaacggcgggatataacatgagctgtcttcggtatcgtcgtatcccactaccgagatgtccgcaccaacgcgcagcccggactcggtaatggcgcgcattgcgcccagcgccatctgatcgttggcaaccagcatcgcagtgggaacgatgccctcattcagcatttgcatggtttgttgaaaaccggacatggcactccagtcgccttcccgttccgctatcggctgaatttgattgcgagtgagatatttatgccagccagccagacgcagacgcgccgagacagaacttaatgggcccgctaacagcgcgatttgctggtgacccaatgcgaccagatgctccacgcccagtcgcgtaccgtcttcatgggagaaaataatactgttgatgggtgtctggtcagagacatcaagaaataacgccggaacattagtgcaggcagcttccacagcaatggcatcctggtcatccagcggatagttaatgatcagcccactgacgcgttgcgcgagaagattgtgcaccgccgctttacaggcttcgacgccgcttcgttctaccatcgacaccaccacgctggcacccagttgatcggcgcgagatttaatcgccgcgacaatttgcgacggcgcgtgcagggccagactggaggtggcaacgccaatcagcaacgactgtttgcccgccagttgttgtgccacgcggttgggaatgtaattcagctccgccatcgccgcttccactttttcccgcgttttcgcagaaacgtggctggcctggttcaccacgcgggaaacggtctgataagagacaccggcatactctgcgacatcgtataacgttactggtttcacattcaccaccctgaattgactctcttccgggcgctatcatgccataccgcgaaaggttttgcgccattcgatggtgtccgggatctcgacgctctcccttatgcgactcctgcattaggaaattaatacgactcactata

SEQ ID NO: 102 - DNA, 7750 bp, synthetic construct
  source 1..7750: mol_type = other DNA
  misc_feature 1..7750: note = Synthetic
ggggaattgtgagcggataacaattcccctgtagaaataattttgtttaactttaataaggagatatacatgaaaagaatcagtgatgaatattccccagttaggaaatcccaaactgtatatgggagtatttcagtaaattatgcttttagaggggaaaagacgatttggtgtgaatctactcttgagcgtgattttttgattaggcaagaattcaatagcaatgtcatagatatcgtaagccagcctattaccatcccatatataacagagttgggtaatgaatccacttatactcctgatttcctcgtacagttttccagtgcaaattgtggtgattttgaggaaattccctgtccactgttaatagaaataaaacctagaaagaaacttatagaagattgggataaattaaagccaaaatttaaggcggctcatacttttgctaaagaaaaaggttggaaattcaagattataaatgaatcaaggttatatgatcagtattgggaaaatattaattttttgaaaagatttagacgttctcatgtggatgtctatgatgaacaaactttaattgagactttagatagtcttggtcaatcgactattaatcaattaccggcacatatttttaaggataaaactaatattcttcgaggtattcatcaagtatgggcattggtcgcaaaacgaaaaatcatgtgtgatttatattgccccttaacagcagagacggtgatttggacaaatcaagatgatgtgcttacaaggagatttttaaatggttcagactgataatgcaaaaatatgaacatcttgcagatgatgtacttgaagtcatgtctctaagtgatagtgatcgtatcaatattttattttctgatcgttggattggttataaaaaagcggtcactattttggatactttaactgatctgttgaatcgccctaggaagcttcgcccagaatgtttattgattgtgggtgattctaatatgggtaaaacgaccattatccacgaattcacaaagcagcattacaccaaaacagtgaatgacatagatatggagctgctgtctgtaaaaaaacctgttttaaccatattagcccctgctaaagcgaatgtaaaagaattctatatcaatatattgaatcatttctttgtcccatttcgtcctactgatcctgaagcaaagttacggaatcaagctgtccatctaatgcggaagtatgaaacaaaaatgttgattattgatgaaatccataattgtttaacaggttctaccaaacttctttccgaagtgatgaataccttaaagaatctaagtaatgatctaagtctgaatatcgttggcgtcggtactcgtgaagcagttacgattctacataccgatgctcaatatgcaagccgttttgatgtagcaatgttgcctaaatgggaactgaatcaggattttctaagactattattaagttatgtacgattattgcctttaaagaaacgttctgatctagcatctcaaagacttgccacccttatatttgaaatttcaggtgggaattttggtgacttaaacagattgttgattgagtgtgctaaagaggcaatcgtaaaaggtaatgaagaaattaccgaagaaattgttaataaatttaaatggcttaaaccaaccgagggtatgaggaatattagaaatataaatcttaacatggtttaggtattctacttttcataggaaaatagccatgcaccaagtagaacaacgttggtatattcgtacccctattcaagagggtgaagtattttcctcttggctcatacgttctgctttggatttaggctgctcaccattaactttagtgaatcttttgtgggaaaaatggagaggattaacgatagatattgatcgtgggttaaatgaagaaaaattagacatattgttaaatcattgttttgtggaacagcatgaagttcagaaaactatgttaagcagttatttccctgctttgattccaaaaaattataacaaaaatcagcgtattccttggatattggctctaggtattcgaaatcgttcaaatgtgtcaggtcgtcaaatttgtacgcaatgtctaagttctacccatacaccaccatatttgcgtatcaagtggcgtatggggtggcatagtggctgtgatattcataaaaccatattaatagatcattgtcctcaatgcagaatcacattacaacctataaaaattgatatagagcatggatcattagcaatttgtacttcatgctatgctgatttaagtacactcattcaacgtccagtagaaacggatgcattaagatttcagcatcaagctgatcaggtcttagagtcacaatttgggcgatataaccaaaaggatatttcatcaatagagtggtttgagattgctcgtatatggttaagttttattcgatcccctttaaatatgaagagtcctaaccttttgcaaatgtttgaaagtcttaatattgatttaaatatagattatcctattacaccagtagcctttgaatttctgtctgttcaggagcgtgaaaaattattatcaattttaaataaaatcatggcattaccttgtgatttatttgttgatcgctctttagaatatcatgtaagtcattcttatttttgggataaaagaaaaaaactgcctacgcagcttcaactaatgaaagataaaatgttgaagccaattaagattattttgccgaaagataacgccatagccatgagtaaacccaaatctaaaaaaagtgtacaacggaagtggttaaggctattgagaaagctacagaaaggggggaacaggtgactttagctcaattttcccataaagaaggctgtagtggttgtgacagggctgatatagataaattcaaaaaaagatataagggcgataagtattgttcaacttgttatgcccgaatttttaaaaaaagagcttgtccaaaatgtggtgaatatgccagattgccaaaaaatgatgatcaagcaatttgtaatgaatgcatcaaaaaacagccttgtattcgctgtaatcaaactaagaagccgatagggacactcaccgaatatggtgtggtttgtaatagctgttctgtttattttcgcccaattgagcgttgtgagaggtgtgatacaccatcacaaaaattgacacatatttcacgatttggtgatgatttaagggtatgtcccaaatgctctactagagattatgaaacatgtccctcttgtcataaatatcgcttattagagcaagatgatacaggagctaagatttgtaaaaaatgtaggaataacgccaaaaagaaatgcaagcaatgtgatgtcttgataccagcaggctgtcctgatctatgtaacaactgttactggcataagaatctatgggagaaagctagacgaaatattaaagcattccaatcccaacacttacaggctcaatatgagcaatatttaatttggttagaagatgaggttggtgcaaataaagcagcactgtatatcaataaacatacccatttttttatcaaaactgaagaattatggcttgatgcaattcctacagcagaacagttattggctgttttaagaaccagtggacttagaaaatttgagttggttgcatcttggctagatgaagcccatcacattaaggttgcattagaggataaagacttttgctctcaacaggatcagatagaaaaactgatttcaagccttcctcacccctctactgcttatgatgtggttatatcttataaagatgagcttgatataaaaatgaaagatggaaagaccagtatccggtccataaaactggcaataaagcctgcggttgctcttatgcactatgtttgtgcatcgggagctacattacctaatttaaaccatataaaagcctatcttatcgacttttctggtcaggctgctgcactaacagggttcattaattttttgaataaaaattttgatacatctatagactatttggcttttaaaaaatcaaaaaatttcaatgaaaaacgaaaaaataaagtagaaaaagaaattgtccaatgggtggataagcctttggagaataaggaagatgtattaaattgggtgaagaatgggctaagatattttcataatgtatcttatgtggagtctctaaaagtcaaatttgagatgattacagaagctgatgatggatatgaaattttattgcagaatcattcttattggttgccaaaaaacacaggagatttaaaaagatagtttttttgtgattatactgtgctatttcaagctaatttattgtacaagttggtttgtttatctaattcttctaaaagaactgtccataacaatatggggcaggctgctgccaccgctgagcaataactagcataaccccttggggcctctaaacgggtcttgaggggttttttgctgaaacctcaggcatttgagaagcacacggtcacactgcttccggtagtcaataaaccggtaaaccagcaatagacataagcggctatttaacgaccctgccctgaaccgacgaccgggtcatcgtggccggatcttgcggcccctcggcttgaacgaattgttagacattatttgccgactaccttggtgatctcgcctttcacgtagtggacaaattcttccaactgatctgcgcgcgaggccaagcgatcttcttcttgtccaagataagcctgtctagcttcaagtatgacgggctgatactgggccggcaggcgctccattgcccagtcggcagcgacatccttcggcgcgattttgccggttactgcgctgtaccaaatgcgggacaacgtaagcactacatttcgctcatcgccagcccagtcgggcggcgagttccatagcgttaaggtttcatttagcgcctcaaatagatcctgttcaggaaccggatcaaagagttcctccgccgctggacctaccaaggcaacgctatgttctcttgcttttgtcagcaagatagccagatcaatgtcgatcgtggctggctcgaagatacctgcaagaatgtcattgcgctgccattctccaaattgcagttcgcgcttagctggataacgccacggaatgatgtcgtcgtgcacaacaatggtgacttctacagcgcggagaatctcgctctctccaggggaagccgaagtttccaaaaggtcgttgatcaaagctcgccgcgttgtttcatcaagccttacggtcaccgtaaccagcaaatcaatatcactgtgtggcttcaggccgccatccactgcggagccgtacaaatgtacggccagcaacgtcggttcgagatggcgctcgatgacgccaactacctctgatagttgagtcgatacttcggcgatcaccgcttccctcatactcttcctttttcaatattattgaagcatttatcagggttattgtctcatgagcggatacatatttgaatgtatttagaaaaataaacaaatagctagctcactcggtcgctacgctccgggcgtgagactgcggcgggcgctgcggacacatacaaagttacccacagattccgtggataagcaggggactaacatgtgaggcaaaacagcagggccgcgccggtggcgtttttccataggctccgccctcctgccagagttcacataaacagacgcttttccggtgcatctgtgggagccgtgaggctcaaccatgaatctgacagtacgggcgaaacccgacaggacttaaagatccccaccgtttccggcgggtcgctccctcttgcgctctcctgttccgaccctgccgtttaccggatacctgttccgcctttctcccttacgggaagtgtggcgctttctcatagctcacacactggtatctcggctcggtgtaggtcgttcgctccaagctgggctgtaagcaagaactccccgttcagcccgactgctgcgccttatccggtaactgttcacttgagtccaacccggaaaagcacggtaaaacgccactggcagcagccattggtaactgggagttcgcagaggatttgtttagctaaacacgcggttgctcttgaagtgtgcgccaaagtccggctacactggaaggacagatttggttgctgtgctctgcgaaagccagttaccacggttaagcagttccccaactgacttaaccttcgatcaaaccacctccccaggtggttttttcgtttacagggcaaaagattacgcgcagaaaaaaaggatctcaagaagatcctttgatcttttctactgaaccgctctagatttcagtgcaatttatctcttcaaatgtagcacctgaagtcagccccatacgatataagttgtaattctcatgttagtcatgccccgcgcccaccggaaggagctgactgggttgaaggctctcaagggcatcggtcgagatcccggtgcctaatgagtgagctaacttacattaattgcgttgcgctcactgcccgctttccagtcgggaaacctgtcgtgccagctgcattaatgaatcggccaacgcgcggggagaggcggtttgcgtattgggcgccagggtggtttttcttttcaccagtgagacgggcaacagctgattgcccttcaccgcctggccctgagagagttgcagcaagcggtccacgctggtttgccccagcaggcgaaaatcctgtttgatggtggttaacggcgggatataacatgagctgtcttcggtatcgtcgtatcccactaccgagatgtccgcaccaacgcgcagcccggactcggtaatggcgcgcattgcgcccagcgccatctgatcgttggcaaccagcatcgcagtgggaacgatgccctcattcagcatttgcatggtttgttgaaaaccggacatggcactccagtcgccttcccgttccgctatcggctgaatttgattgcgagtgagatatttatgccagccagccagacgcagacgcgccgagacagaacttaatgggcccgctaacagcgcgatttgctggtgacccaatgcgaccagatgctccacgcccagtcgcgtaccgtcttcatgggagaaaataatactgttgatgggtgtctggtcagagacatcaagaaataacgccggaacattagtgcaggcagcttccacagcaatggcatcctggtcatccagcggatagttaatgatcagcccactgacgcgttgcgcgagaagattgtgcaccgccgctttacaggcttcgacgccgcttcgttctaccatcgacaccaccacgctggcacccagttgatcggcgcgagatttaatcgccgcgacaatttgcgacggcgcgtgcagggccagactggaggtggcaacgccaatcagcaacgactgtttgcccgccagttgttgtgccacgcggttgggaatgtaattcagctccgccatcgccgcttccactttttcccgcgttttcgcagaaacgtggctggcctggttcaccacgcgggaaacggtctgataagagacaccggcatactctgcgacatcgtataacgttactggtttcacattcaccaccctgaattgactctcttccgggcgctatcatgccataccgcgaaaggttttgcgccattcgatggtgtccgggatctcgacgctctcccttatgcgactcctgcattaggaaattaatacgactcactata

SEQ ID NO: 103 - DNA, 8732 bp, synthetic construct
  misc_feature 1..8732: note = Synthetic
  source 1..8732: mol_type = other DNA
ggggaattgtgagcggataacaattcccctgtagaaataattttgtttaactttaataaggagatatacatgaaaagaatcagtgatgaatattccccagttaggaaatcccaaactgtatatgggagtatttcagtaaattatgcttttagaggggaaaagacgatttggtgtgaatctactcttgagcgtgattttttgattaggcaagaattcaatagcaatgtcatagatatcgtaagccagcctattaccatcccatatataacagagttgggtaatgaatccacttatactcctgatttcctcgtacagttttccagtgcaaattgtggtgattttgaggaaattccctgtccactgttaatagaaataaaacctagaaagaaacttatagaagattgggataaattaaagccaaaatttaaggcggctcatacttttgctaaagaaaaaggttggaaattcaagattataaatgaatcaaggttatatgatcagtattgggaaaatattaattttttgaaaagatttagacgttctcatgtggatgtctatgatgaacaaactttaattgagactttagatagtcttggtcaatcgactattaatcaattaccggcacatatttttaaggataaaactaatattcttcgaggtattcatcaagtatgggcattggtcgcaaaacgaaaaatcatgtgtgatttatattgccccttaacagcagagacggtgatttggacaaatcaagatgatgtgcttacaaggagatttttaaatggttcagactgatactgtaagtattgaccgaagtcggatcatactcaaaccaaatgtaattgttaagtatgaagggcaaccgtataagattgctaatgttttgaatgccaacgatatcgtgatttctagtttagattctgtgcgttgtttacaagtaagtgcagattctctacaagtatttgaagctgaaaataaccaaactaaagatataaataaaggtgattgggatattacgcatgaagcgtggaaaatagctttacatcgttatgaaatcatcaagccgttgattaagtattcaacaaccgaattagtcgagcaacgagcaagtgaatatggcattaaccgttccaccttatggaaatggttaaaagattttagagaaaataattctatcttagtgttagttcctaaaaagagaggttggacgaccaagaagtctaggttgtctcctcaaattatgaatattattaaccaaggtattcaagaggaatatctcaatgccagaaagcctagtattgcaaaaactatagattttattaaagcagaatgttctcgccttaaactagaagcaccccatgacaattcaattcgtagaaaaatagaagcattaaacgattatatggtgattaaggctcgtcatggttctaaagcagcacaagataagtatgcatctgctgctggtgagtttcctaatgctgattatcccttggcatatgtacaggtagaccacactccactagatattgaaattgttgatgatgaatttagagaggcgattggacgaccatttctaacattagctattgatataaatactcgaatggtggtcggttattacttgtccttagaagcccccagtgcaacatctgttgccatgtgtattgcttccagtattttgtcaaaaaaacggaagctaattgaattggatatagatgctgattggcaagttgaaggtcttatggattctatacatacagataatggtcctgactttagaactaaccatatcagtcgagcttgcttaaaatatgggattcattgggagtttcgtccgattggtggggcaaggtttggtggacatatcgaacgtttgattggtgttgttaacattgaaatgcacatcttggatggtacaaccttctcgaatatccaagaacgtggaacctataattcagcaggtcatgcctgtatgacactaaaagaactagaatattatattgtttattggatcactaaagtttatcaccaaaagaaacactccaaactcggtatgtcacctttacagaagtggcaagatggtgtttggggaacaaaaactagtgttggaacaggtttaaaagagagagtttcggatgaagatacattatttattgatttccttcccgaatttgaatcaacaattcaacgtgtaggtgtacagaaagacaatctattttattttgctgattgtttacgacaatgggttaattgtgttgatcccgaagatgtaaataaaaagagaaaaaagaaatttttgtttaaacgtgatccaagggatatttctcttatttggttttatgaacctctgtccaatacatattttaaagtgcctactgctaagcgagaaataccaccaattagcttatttgaatacaaacaagtgcagaaatatcttcgtggcgagcaacatgataatcaaaatcaggatgagatttatcaggcaattcttcatttacgagagcaattgaaacaatcccgtagtctgactcggaagcaacggagagtaaatcaacgtaaaaaggaaaatgcaaaagcaacacatcatttatctgtaaaaaatgaacctgaaaaaccatctattgtcgaaaacagtgttcagccgactaatgatttatggagtattccattgacggcatttgaagatttaaggggataatagtattctacttttcataggaaaatagccatgcaccaagtagaacaacgttggtatattcgtacccctattcaagagggtgaagtattttcctcttggctcatacgttctgctttggatttaggctgctcaccattaactttagtgaatcttttgtgggaaaaatggagaggattaacgatagatattgatcgtgggttaaatgaagaaaaattagacatattgttaaatcattgttttgtggaacagcatgaagttcagaaaactatgttaagcagttatttccctgctttgattccaaaaaattataacaaaaatcagcgtattccttggatattggctctaggtattcgaaatcgttcaaatgtgtcaggtcgtcaaatttgtacgcaatgtctaagttctacccatacaccaccatatttgcgtatcaagtggcgtatggggtggcatagtggctgtgatattcataaaaccatattaatagatcattgtcctcaatgcagaatcacattacaacctataaaaattgatatagagcatggatcattagcaatttgtacttcatgctatgctgatttaagtacactcattcaacgtccagtagaaacggatgcattaagatttcagcatcaagctgatcaggtcttagagtcacaatttgggcgatataaccaaaaggatatttcatcaatagagtggtttgagattgctcgtatatggttaagttttattcgatcccctttaaatatgaagagtcctaaccttttgcaaatgtttgaaagtcttaatattgatttaaatatagattatcctattacaccagtagcctttgaatttctgtctgttcaggagcgtgaaaaattattatcaattttaaataaaatcatggcattaccttgtgatttatttgttgatcgctctttagaatatcatgtaagtcattcttatttttgggataaaagaaaaaaactgcctacgcagcttcaactaatgaaagataaaatgttgaagccaattaagattattttgccgaaagataacgccatagccatgagtaaacccaaatctaaaaaaagtgtacaacggaagtggttaaggctattgagaaagctacagaaaggggggaacaggtgactttagctcaattttcccataaagaaggctgtagtggttgtgacagggctgatatagataaattcaaaaaaagatataagggcgataagtattgttcaacttgttatgcccgaatttttaaaaaaagagcttgtccaaaatgtggtgaatatgccagattgccaaaaaatgatgatcaagcaatttgtaatgaatgcatcaaaaaacagccttgtattcgctgtaatcaaactaagaagccgatagggacactcaccgaatatggtgtggtttgtaatagctgttctgtttattttcgcccaattgagcgttgtgagaggtgtgatacaccatcacaaaaattgacacatatttcacgatttggtgatgatttaagggtatgtcccaaatgctctactagagattatgaaacatgtccctcttgtcataaatatcgcttattagagcaagatgatacaggagctaagatttgtaaaaaatgtaggaataacgccaaaaagaaatgcaagcaatgtgatgtcttgataccagcaggctgtcctgatctatgtaacaactgttactggcataagaatctatgggagaaagctagacgaaatattaaagcattccaatcccaacacttacaggctcaatatgagcaatatttaatttggttagaagatgaggttggtgcaaataaagcagcactgtatatcaataaacatacccatttttttatcaaaactgaagaattatggcttgatgcaattcctacagcagaacagttattggctgttttaagaaccagtggacttagaaaatttgagttggttgcatcttggctagatgaagcccatcacattaaggttgcattagaggataaagacttttgctctcaacaggatcagatagaaaaactgatttcaagccttcctcacccctctactgcttatgatgtggttatatcttataaagatgagcttgatataaaaatgaaagatggaaagaccagtatccggtccataaaactggcaataaagcctgcggttgctcttatgcactatgtttgtgcatcgggagctacattacctaatttaaaccatataaaagcctatcttatcgacttttctggtcaggctgctgcactaacagggttcattaattttttgaataaaaattttgatacatctatagactatttggcttttaaaaaatcaaaaaatttcaatgaaaaacgaaaaaataaagtagaaaaagaaattgtccaatgggtggataagcctttggagaataaggaagatgtattaaattgggtgaagaatgggctaagatattttcataatgtatcttatgtggagtctctaaaagtcaaatttgagatgattacagaagctgatgatggatatgaaattttattgcagaatcattcttattggttgccaaaaaacacaggagatttaaaaagatagtttttttgtgattatactgtgctatttcaagctaatttattgtacaagttggtttgtttatctaattcttctaaaagaactgtccataacaatatggggcaggctgctgccaccgctgagcaataactagcataaccccttggggcctctaaacgggtcttgaggggttttttgctgaaacctcaggcatttgagaagcacacggtcacactgcttccggtagtcaataaaccggtaaaccagcaatagacataagcggctatttaacgaccctgccctgaaccgacgaccgggtcatcgtggccggatcttgcggcccctcggcttgaacgaattgttagacattatttgccgactaccttggtgatctcgcctttcacgtagtggacaaattcttccaactgatctgcgcgcgaggccaagcgatcttcttcttgtccaagataagcctgtctagcttcaagtatgacgggctgatactgggccggcaggcgctccattgcccagtcggcagcgacatccttcggcgcgattttgccggttactgcgctgtaccaaatgcgggacaacgtaagcactacatttcgctcatcgccagcccagtcgggcggcgagttccatagcgttaaggtttcatttagcgcctcaaatagatcctgttcaggaaccggatcaaagagttcctccgccgctggacctaccaaggcaacgctatgttctcttgcttttgtcagcaagatagccagatcaatgtcgatcgtggctggctcgaagatacctgcaagaatgtcattgcgctgccattctccaaattgcagttcgcgcttagctggataacgccacggaatgatgtcgtcgtgcacaacaatggtgacttctacagcgcggagaatctcgctctctccaggggaagccgaagtttccaaaaggtcgttgatcaaagctcgccgcgttgtttcatcaagccttacggtcaccgtaaccagcaaatcaatatcactgtgtggcttcaggccgccatccactgcggagccgtacaaatgtacggccagcaacgtcggttcgagatggcgctcgatgacgccaactacctctgatagttgagtcgatacttcggcgatcaccgcttccctcatactcttcctttttcaatattattgaagcatttatcagggttattgtctcatgagcggatacatatttgaatgtatttagaaaaataaacaaatagctagctcactcggtcgctacgctccgggcgtgagactgcggcgggcgctgcggacacatacaaagttacccacagattccgtggataagcaggggactaacatgtgaggcaaaacagcagggccgcgccggtggcgtttttccataggctccgccctcctgccagagttcacataaacagacgcttttccggtgcatctgtgggagccgtgaggctcaaccatgaatctgacagtacgggcgaaacccgacaggacttaaagatccccaccgtttccggcgggtcgctccctcttgcgctctcctgttccgaccctgccgtttaccggatacctgttccgcctttctcccttacgggaagtgtggcgctttctcatagctcacacactggtatctcggctcggtgtaggtcgttcgctccaagctgggctgtaagcaagaactccccgttcagcccgactgctgcgccttatccggtaactgttcacttgagtccaacccggaaaagcacggtaaaacgccactggcagcagccattggtaactgggagttcgcagaggatttgtttagctaaacacgcggttgctcttgaagtgtgcgccaaagtccggctacactggaaggacagatttggttgctgtgctctgcgaaagccagttaccacggttaagcagttccccaactgacttaaccttcgatcaaaccacctccccaggtggttttttcgtttacagggcaaaagattacgcgcagaaaaaaaggatctcaagaagatcctttgatcttttctactgaaccgctctagatttcagtgcaatttatctcttcaaatgtagcacctgaagtcagccccatacgatataagttgtaattctcatgttagtcatgccccgcgcccaccggaaggagctgactgggttgaaggctctcaagggcatcggtcgagatcccggtgcctaatgagtgagctaacttacattaattgcgttgcgctcactgcccgctttccagtcgggaaacctgtcgtgccagctgcattaatgaatcggccaacgcgcggggagaggcggtttgcgtattgggcgccagggtggtttttcttttcaccagtgagacgggcaacagctgattgcccttcaccgcctggccctgagagagttgcagcaagcggtccacgctggtttgccccagcaggcgaaaatcctgtttgatggtggttaacggcgggatataacatgagctgtcttcggtatcgtcgtatcccactaccgagatgtccgcaccaacgcgcagcccggactcggtaatggcgcgcattgcgcccagcgccatctgatcgttggcaaccagcatcgcagtgggaacgatgccctcattcagcatttgcatggtttgttgaaaaccggacatggcactccagtcgccttcccgttccgctatcggctgaatttgattgcgagtgagatatttatgccagccagccagacgcagacgcgccgagacagaacttaatgggcccgctaacagcgcgatttgctggtgacccaatgcgaccagatgctccacgcccagtcgcgtaccgtcttcatgggagaaaataatactgttgatgggtgtctggtcagagacatcaagaaataacgccggaacattagtgcaggcagcttccacagcaatggcatcctggtcatccagcggatagttaatgatcagcccactgacgcgttgcgcgagaagattgtgcaccgccgctttacaggcttcgacgccgcttcgttctaccatcgacaccaccacgctggcacccagttgatcggcgcgagatttaatcgccgcgacaatttgcgacggcgcgtgcagggccagactggaggtggcaacgccaatcagcaacgactgtttgcccgccagttgttgtgccacgcggttgggaatgtaattcagctccgccatcgccgcttccactttttcccgcgttttcgcagaaacgtggctggcctggttcaccacgcgggaaacggtctgataagagacaccggcatactctgcgacatcgtataacgttactggtttcacattcaccaccctgaattgactctcttccgggcgctatcatgccataccgcgaaaggttttgcgccattcgatggtgtccgggatctcgacgctctcccttatgcgactcctgcattaggaaattaatacgactcactata

SEQ ID NO: 104 - DNA, 8592 bp, synthetic construct
  misc_feature 1..8592: note = Synthetic
  source 1..8592: mol_type = other DNA
ggggaattgtgagcggataacaattcccctgtagaaataattttgtttaactttaataaggagatatacatgaaaagaatcagtgatgaatattccccagttaggaaatcccaaactgtatatgggagtatttcagtaaattatgcttttagaggggaaaagacgatttggtgtgaatctactcttgagcgtgattttttgattaggcaagaattcaatagcaatgtcatagatatcgtaagccagcctattaccatcccatatataacagagttgggtaatgaatccacttatactcctgatttcctcgtacagttttccagtgcaaattgtggtgattttgaggaaattccctgtccactgttaatagaaataaaacctagaaagaaacttatagaagattgggataaattaaagccaaaatttaaggcggctcatacttttgctaaagaaaaaggttggaaattcaagattataaatgaatcaaggttatatgatcagtattgggaaaatattaattttttgaaaagatttagacgttctcatgtggatgtctatgatgaacaaactttaattgagactttagatagtcttggtcaatcgactattaatcaattaccggcacatatttttaaggataaaactaatattcttcgaggtattcatcaagtatgggcattggtcgcaaaacgaaaaatcatgtgtgatttatattgccccttaacagcagagacggtgatttggacaaatcaagatgatgtgcttacaaggagatttttaaatggttcagactgatactgtaagtattgaccgaagtcggatcatactcaaaccaaatgtaattgttaagtatgaagggcaaccgtataagattgctaatgttttgaatgccaacgatatcgtgatttctagtttagattctgtgcgttgtttacaagtaagtgcagattctctacaagtatttgaagctgaaaataaccaaactaaagatataaataaaggtgattgggatattacgcatgaagcgtggaaaatagctttacatcgttatgaaatcatcaagccgttgattaagtattcaacaaccgaattagtcgagcaacgagcaagtgaatatggcattaaccgttccaccttatggaaatggttaaaagattttagagaaaataattctatcttagtgttagttcctaaaaagagaggttggacgaccaagaagtctaggttgtctcctcaaattatgaatattattaaccaaggtattcaagaggaatatctcaatgccagaaagcctagtattgcaaaaactatagattttattaaagcagaatgttctcgccttaaactagaagcaccccatgacaattcaattcgtagaaaaatagaagcattaaacgattatatggtgattaaggctcgtcatggttctaaagcagcacaagataagtatgcatctgctgctggtgagtttcctaatgctgattatcccttggcatatgtacaggtagaccacactccactagatattgaaattgttgatgatgaatttagagaggcgattggacgaccatttctaacattagctattgatataaatactcgaatggtggtcggttattacttgtccttagaagcccccagtgcaacatctgttgccatgtgtattgcttccagtattttgtcaaaaaaacggaagctaattgaattggatatagatgctgattggcaagttgaaggtcttatggattctatacatacagataatggtcctgactttagaactaaccatatcagtcgagcttgcttaaaatatgggattcattgggagtttcgtccgattggtggggcaaggtttggtggacatatcgaacgtttgattggtgttgttaacattgaaatgcacatcttggatggtacaaccttctcgaatatccaagaacgtggaacctataattcagcaggtcatgcctgtatgacactaaaagaactagaatattatattgtttattggatcactaaagtttatcaccaaaagaaacactccaaactcggtatgtcacctttacagaagtggcaagatggtgtttggggaacaaaaactagtgttggaacaggtttaaaagagagagtttcggatgaagatacattatttattgatttccttcccgaatttgaatcaacaattcaacgtgtaggtgtacagaaagacaatctattttattttgctgattgtttacgacaatgggttaattgtgttgatcccgaagatgtaaataaaaagagaaaaaagaaatttttgtttaaacgtgatccaagggatatttctcttatttggttttatgaacctctgtccaatacatattttaaagtgcctactgctaagcgagaaataccaccaattagcttatttgaatacaaacaagtgcagaaatatcttcgtggcgagcaacatgataatcaaaatcaggatgagatttatcaggcaattcttcatttacgagagcaattgaaacaatcccgtagtctgactcggaagcaacggagagtaaatcaacgtaaaaaggaaaatgcaaaagcaacacatcatttatctgtaaaaaatgaacctgaaaaaccatctattgtcgaaaacagtgttcagccgactaatgatttatggagtattccattgacggcatttgaagatttaaggggataataatgcaaaaatatgaacatcttgcagatgatgtacttgaagtcatgtctctaagtgatagtgatcgtatcaatattttattttctgatcgttggattggttataaaaaagcggtcactattttggatactttaactgatctgttgaatcgccctaggaagcttcgcccagaatgtttattgattgtgggtgattctaatatgggtaaaacgaccattatccacgaattcacaaagcagcattacaccaaaacagtgaatgacatagatatggagctgctgtctgtaaaaaaacctgttttaaccatattagcccctgctaaagcgaatgtaaaagaattctatatcaatatattgaatcatttctttgtcccatttcgtcctactgatcctgaagcaaagttacggaatcaagctgtccatctaatgcggaagtatgaaacaaaaatgttgattattgatgaaatccataattgtttaacaggttctaccaaacttctttccgaagtgatgaataccttaaagaatctaagtaatgatctaagtctgaatatcgttggcgtcggtactcgtgaagcagttacgattctacataccgatgctcaatatgcaagccgttttgatgtagcaatgttgcctaaatgggaactgaatcaggattttctaagactattattaagttatgtacgattattgcctttaaagaaacgttctgatctagcatctcaaagacttgccacccttatatttgaaatttcaggtgggaattttggtgacttaaacagattgttgattgagtgtgctaaagaggcaatcgtaaaaggtaatgaagaaattaccgaagaaattgttaataaatttaaatggcttaaaccaaccgagggtatgaggaatattagaaatataaatcttaacatggtttaggtattctacttttcataggaaaatagccgtggttaaggctattgagaaagctacagaaaggggggaacaggtgactttagctcaattttcccataaagaaggctgtagtggttgtgacagggctgatatagataaattcaaaaaaagatataagggcgataagtattgttcaacttgttatgcccgaatttttaaaaaaagagcttgtccaaaatgtggtgaatatgccagattgccaaaaaatgatgatcaagcaatttgtaatgaatgcatcaaaaaacagccttgtattcgctgtaatcaaactaagaagccgatagggacactcaccgaatatggtgtggtttgtaatagctgttctgtttattttcgcccaattgagcgttgtgagaggtgtgatacaccatcacaaaaattgacacatatttcacgatttggtgatgatttaagggtatgtcccaaatgctctactagagattatgaaacatgtccctcttgtcataaatatcgcttattagagcaagatgatacaggagctaagatttgtaaaaaatgtaggaataacgccaaaaagaaatgcaagcaatgtgatgtcttgataccagcaggctgtcctgatctatgtaacaactgttactggcataagaatctatgggagaaagctagacgaaatattaaagcattccaatcccaacacttacaggctcaatatgagcaatatttaatttggttagaagatgaggttggtgcaaataaagcagcactgtatatcaataaacatacccatttttttatcaaaactgaagaattatggcttgatgcaattcctacagcagaacagttattggctgttttaagaaccagtggacttagaaaatttgagttggttgcatcttggctagatgaagcccatcacattaaggttgcattagaggataaagacttttgctctcaacaggatcagatagaaaaactgatttcaagccttcctcacccctctactgcttatgatgtggttatatcttataaagatgagcttgatataaaaatgaaagatggaaagaccagtatccggtccataaaactggcaataaagcctgcggttgctcttatgcactatgtttgtgcatcgggagctacattacctaatttaaaccatataaaagcctatcttatcgacttttctggtcaggctgctgcactaacagggttcattaattttttgaataaaaattttgatacatctatagactatttggcttttaaaaaatcaaaaaatttcaatgaaaaacgaaaaaataaagtagaaaaagaaattgtccaatgggtggataagcctttggagaataaggaagatgtattaaattgggtgaagaatgggctaagatattttcataatgtatcttatgtggagtctctaaaagtcaaatttgagatgattacagaagctgatgatggatatgaaattttattgcagaatcattcttattggttgccaaaaaacacaggagatttaaaaagatagtttttttgtgattatactgtgctatttcaagctaatttattgtacaagttggtttgtttatctaattcttctaaaagaactgtccataacaatatggggcaggctgctgccaccgctgagcaataactagcataaccccttggggcctctaaacgggtcttgaggggttttttgctgaaacctcaggcatttgagaagcacacggtcacactgcttccggtagtcaataaaccggtaaaccagcaatagacataagcggctatttaacgaccctgccctgaaccgacgaccgggtcatcgtggccggatcttgcggcccctcggcttgaacgaattgttagacattatttgccgactaccttggtgatctcgcctttcacgtagtggacaaattcttccaactgatctgcgcgcgaggccaagcgatcttcttcttgtccaagataagcctgtctagcttcaagtatgacgggctgatactgggccggcaggcgctccattgcccagtcggcagcgacatccttcggcgcgattttgccggttactgcgctgtaccaaatgcgggacaacgtaagcactacatttcgctcatcgccagcccagtcgggcggcgagttccatagcgttaaggtttcatttagcgcctcaaatagatcctgttcaggaaccggatcaaagagttcctccgccgctggacctaccaaggcaacgctatgttctcttgcttttgtcagcaagatagccagatcaatgtcgatcgtggctggctcgaagatacctgcaagaatgtcattgcgctgccattctccaaattgcagttcgcgcttagctggataacgccacggaatgatgtcgtcgtgcacaacaatggtgacttctacagcgcggagaatctcgctctctccaggggaagccgaagtttccaaaaggtcgttgatcaaagctcgccgcgttgtttcatcaagccttacggtcaccgtaaccagcaaatcaatatcactgtgtggcttcaggccgccatccactgcggagccgtacaaatgtacggccagcaacgtcggttcgagatggcgctcgatgacgccaactacctctgatagttgagtcgatacttcggcgatcaccgcttccctcatactcttcctttttcaatattattgaagcatttatcagggttattgtctcatgagcggatacatatttgaatgtatttagaaaaataaacaaatagctagctcactcggtcgctacgctccgggcgtgagactgcggcgggcgctgcggacacatacaaagttacccacagattccgtggataagcaggggactaacatgtgaggcaaaacagcagggccgcgccggtggcgtttttccataggctccgccctcctgccagagttcacataaacagacgcttttccggtgcatctgtgggagccgtgaggctcaaccatgaatctgacagtacgggcgaaacccgacaggacttaaagatccccaccgtttccggcgggtcgctccctcttgcgctctcctgttccgaccctgccgtttaccggatacctgttccgcctttctcccttacgggaagtgtggcgctttctcatagctcacacactggtatctcggctcggtgtaggtcgttcgctccaagctgggctgtaagcaagaactccccgttcagcccgactgctgcgccttatccggtaactgttcacttgagtccaacccggaaaagcacggtaaaacgccactggcagcagccattggtaactgggagttcgcagaggatttgtttagctaaacacgcggttgctcttgaagtgtgcgccaaagtccggctacactggaaggacagatttggttgctgtgctctgcgaaagccagttaccacggttaagcagttccccaactgacttaaccttcgatcaaaccacctccccaggtggttttttcgtttacagggcaaaagattacgcgcagaaaaaaaggatctcaagaagatcctttgatcttttctactgaaccgctctagatttcagtgcaatttatctcttcaaatgtagcacctgaagtcagccccatacgatataagttgtaattctcatgttagtcatgccccgcgcccaccggaaggagctgactgggttgaaggctctcaagggcatcggtcgagatcccggtgcctaatgagtgagctaacttacattaattgcgttgcgctcactgcccgctttccagtcgggaaacctgtcgtgccagctgcattaatgaatcggccaacgcgcggggagaggcggtttgcgtattgggcgccagggtggtttttcttttcaccagtgagacgggcaacagctgattgcccttcaccgcctggccctgagagagttgcagcaagcggtccacgctggtttgccccagcaggcgaaaatcctgtttgatggtggttaacggcgggatataacatgagctgtcttcggtatcgtcgtatcccactaccgagatgtccgcaccaacgcgcagcccggactcggtaatggcgcgcattgcgcccagcgccatctgatcgttggcaaccagcatcgcagtgggaacgatgccctcattcagcatttgcatggtttgttgaaaaccggacatggcactccagtcgccttcccgttccgctatcggctgaatttgattgcgagtgagatatttatgccagccagccagacgcagacgcgccgagacagaacttaatgggcccgctaacagcgcgatttgctggtgacccaatgcgaccagatgctccacgcccagtcgcgtaccgtcttcatgggagaaaataatactgttgatgggtgtctggtcagagacatcaagaaataacgccggaacattagtgcaggcagcttccacagcaatggcatcctggtcatccagcggatagttaatgatcagcccactgacgcgttgcgcgagaagattgtgcaccgccgctttacaggcttcgacgccgcttcgttctaccatcgacaccaccacgctggcacccagttgatcggcgcgagatttaatcgccgcgacaatttgcgacggcgcgtgcagggccagactggaggtggcaacgccaatcagcaacgactgtttgcccgccagttgttgtgccacgcggttgggaatgtaattcagctccgccatcgccgcttccactttttcccgcgttttcgcagaaacgtggctggcctggttcaccacgcgggaaacggtctgataagagacaccggcatactctgcgacatcgtataacgttactggtttcacattcaccaccctgaattgactctcttccgggcgctatcatgccataccgcgaaaggttttgcgccattcgatggtgtccgggatctcgacgctctcccttatgcgactcctgcattaggaaattaatacgactcactata

SEQ ID NO: 105 - DNA, 8202 bp, synthetic construct
  source 1..8202: mol_type = other DNA
  misc_feature 1..8202: note = Synthetic
ggggaattgtgagcggataacaattcccctgtagaaataattttgtttaactttaataaggagatatacatgaaaagaatcagtgatgaatattccccagttaggaaatcccaaactgtatatgggagtatttcagtaaattatgcttttagaggggaaaagacgatttggtgtgaatctactcttgagcgtgattttttgattaggcaagaattcaatagcaatgtcatagatatcgtaagccagcctattaccatcccatatataacagagttgggtaatgaatccacttatactcctgatttcctcgtacagttttccagtgcaaattgtggtgattttgaggaaattccctgtccactgttaatagaaataaaacctagaaagaaacttatagaagattgggataaattaaagccaaaatttaaggcggctcatacttttgctaaagaaaaaggttggaaattcaagattataaatgaatcaaggttatatgatcagtattgggaaaatattaattttttgaaaagatttagacgttctcatgtggatgtctatgatgaacaaactttaattgagactttagatagtcttggtcaatcgactattaatcaattaccggcacatatttttaaggataaaactaatattcttcgaggtattcatcaagtatgggcattggtcgcaaaacgaaaaatcatgtgtgatttatattgccccttaacagcagagacggtgatttggacaaatcaagatgatgtgcttacaaggagatttttaaatggttcagactgatactgtaagtattgaccgaagtcggatcatactcaaaccaaatgtaattgttaagtatgaagggcaaccgtataagattgctaatgttttgaatgccaacgatatcgtgatttctagtttagattctgtgcgttgtttacaagtaagtgcagattctctacaagtatttgaagctgaaaataaccaaactaaagatataaataaaggtgattgggatattacgcatgaagcgtggaaaatagctttacatcgttatgaaatcatcaagccgttgattaagtattcaacaaccgaattagtcgagcaacgagcaagtgaatatggcattaaccgttccaccttatggaaatggttaaaagattttagagaaaataattctatcttagtgttagttcctaaaaagagaggttggacgaccaagaagtctaggttgtctcctcaaattatgaatattattaaccaaggtattcaagaggaatatctcaatgccagaaagcctagtattgcaaaaactatagattttattaaagcagaatgttctcgccttaaactagaagcaccccatgacaattcaattcgtagaaaaatagaagcattaaacgattatatggtgattaaggctcgtcatggttctaaagcagcacaagataagtatgcatctgctgctggtgagtttcctaatgctgattatcccttggcatatgtacaggtagaccacactccactagatattgaaattgttgatgatgaatttagagaggcgattggacgaccatttctaacattagctattgatataaatactcgaatggtggtcggttattacttgtccttagaagcccccagtgcaacatctgttgccatgtgtattgcttccagtattttgtcaaaaaaacggaagctaattgaattggatatagatgctgattggcaagttgaaggtcttatggattctatacatacagataatggtcctgactttagaactaaccatatcagtcgagcttgcttaaaatatgggattcattgggagtttcgtccgattggtggggcaaggtttggtggacatatcgaacgtttgattggtgttgttaacattgaaatgcacatcttggatggtacaaccttctcgaatatccaagaacgtggaacctataattcagcaggtcatgcctgtatgacactaaaagaactagaatattatattgtttattggatcactaaagtttatcaccaaaagaaacactccaaactcggtatgtcacctttacagaagtggcaagatggtgtttggggaacaaaaactagtgttggaacaggtttaaaagagagagtttcggatgaagatacattatttattgatttccttcccgaatttgaatcaacaattcaacgtgtaggtgtacagaaagacaatctattttattttgctgattgtttacgacaatgggttaattgtgttgatcccgaagatgtaaataaaaagagaaaaaagaaatttttgtttaaacgtgatccaagggatatttctcttatttggttttatgaacctctgtccaatacatattttaaagtgcctactgctaagcgagaaataccaccaattagcttatttgaatacaaacaagtgcagaaatatcttcgtggcgagcaacatgataatcaaaatcaggatgagatttatcaggcaattcttcatttacgagagcaattgaaacaatcccgtagtctgactcggaagcaacggagagtaaatcaacgtaaaaaggaaaatgcaaaagcaacacatcatttatctgtaaaaaatgaacctgaaaaaccatctattgtcgaaaacagtgttcagccgactaatgatttatggagtattccattgacggcatttgaagatttaaggggataataatgcaaaaatatgaacatcttgcagatgatgtacttgaagtcatgtctctaagtgatagtgatcgtatcaatattttattttctgatcgttggattggttataaaaaagcggtcactattttggatactttaactgatctgttgaatcgccctaggaagcttcgcccagaatgtttattgattgtgggtgattctaatatgggtaaaacgaccattatccacgaattcacaaagcagcattacaccaaaacagtgaatgacatagatatggagctgctgtctgtaaaaaaacctgttttaaccatattagcccctgctaaagcgaatgtaaaagaattctatatcaatatattgaatcatttctttgtcccatttcgtcctactgatcctgaagcaaagttacggaatcaagctgtccatctaatgcggaagtatgaaacaaaaatgttgattattgatgaaatccataattgtttaacaggttctaccaaacttctttccgaagtgatgaataccttaaagaatctaagtaatgatctaagtctgaatatcgttggcgtcggtactcgtgaagcagttacgattctacataccgatgctcaatatgcaagccgttttgatgtagcaatgttgcctaaatgggaactgaatcaggattttctaagactattattaagttatgtacgattattgcctttaaagaaacgttctgatctagcatctcaaagacttgccacccttatatttgaaatttcaggtgggaattttggtgacttaaacagattgttgattgagtgtgctaaagaggcaatcgtaaaaggtaatgaagaaattaccgaagaaattgttaataaatttaaatggcttaaaccaaccgagggtatgaggaatattagaaatataaatcttaacatggtttaggtattctacttttcataggaaaatagccatgcaccaagtagaacaacgttggtatattcgtacccctattcaagagggtgaagtattttcctcttggctcatacgttctgctttggatttaggctgctcaccattaactttagtgaatcttttgtgggaaaaatggagaggattaacgatagatattgatcgtgggttaaatgaagaaaaattagacatattgttaaatcattgttttgtggaacagcatgaagttcagaaaactatgttaagcagttatttccctgctttgattccaaaaaattataacaaaaatcagcgtattccttggatattggctctaggtattcgaaatcgttcaaatgtgtcaggtcgtcaaatttgtacgcaatgtctaagttctacccatacaccaccatatttgcgtatcaagtggcgtatggggtggcatagtggctgtgatattcataaaaccatattaatagatcattgtcctcaatgcagaatcacattacaacctataaaaattgatatagagcatggatcattagcaatttgtacttcatgctatgctgatttaagtacactcattcaacgtccagtagaaacggatgcattaagatttcagcatcaagctgatcaggtcttagagtcacaatttgggcgatataaccaaaaggatatttcatcaatagagtggtttgagattgctcgtatatggttaagttttattcgatcccctttaaatatgaagagtcctaaccttttgcaaatgtttgaaagtcttaatattgatttaaatatagattatcctattacaccagtagcctttgaatttctgtctgttcaggagcgtgaaaaattattatcaattttaaataaaatcatggcattaccttgtgatttatttgttgatcgctctttagaatatcatgtaagtcattcttatttttgggataaaagaaaaaaactgcctacgcagcttcaactaatgaaagataaaatgttgaagccaattaagattattttgccgaaagataacgccatagccatgagtaaacccaaatctaaaaaaagtgtacaacggaagtggttaaggctattgagaaagctacagaaaggggggaacaggtgatttttttgtgattatactgtgctatttcaagctaatttattgtacaagttggtttgtttatctaattcttctaaaagaactgtccataacaatatggggcaggctgctgccaccgctgagcaataactagcataaccccttggggcctctaaacgggtcttgaggggttttttgctgaaacctcaggcatttgagaagcacacggtcacactgcttccggtagtcaataaaccggtaaaccagcaatagacataagcggctatttaacgaccctgccctgaaccgacgaccgggtcatcgtggccggatcttgcggcccctcggcttgaacgaattgttagacattatttgccgactaccttggtgatctcgcctttcacgtagtggacaaattcttccaactgatctgcgcgcgaggccaagcgatcttcttcttgtccaagataagcctgtctagcttcaagtatgacgggctgatactgggccggcaggcgctccattgcccagtcggcagcgacatccttcggcgcgattttgccggttactgcgctgtaccaaatgcgggacaacgtaagcactacatttcgctcatcgccagcccagtcgggcggcgagttccatagcgttaaggtttcatttagcgcctcaaatagatcctgttcaggaaccggatcaaagagttcctccgccgctggacctaccaaggcaacgctatgttctcttgcttttgtcagcaagatagccagatcaatgtcgatcgtggctggctcgaagatacctgcaagaatgtcattgcgctgccattctccaaattgcagttcgcgcttagctggataacgccacggaatgatgtcgtcgtgcacaacaatggtgacttctacagcgcggagaatctcgctctctccaggggaagccgaagtttccaaaaggtcgttgatcaaagctcgccgcgttgtttcatcaagccttacggtcaccgtaaccagcaaatcaatatcactgtgtggcttcaggccgccatccactgcggagccgtacaaatgtacggccagcaacgtcggttcgagatggcgctcgatgacgccaactacctctgatagttgagtcgatacttcggcgatcaccgcttccctcatactcttcctttttcaatattattgaagcatttatcagggttattgtctcatgagcggatacatatttgaatgtatttagaaaaataaacaaatagctagctcactcggtcgctacgctccgggcgtgagactgcggcgggcgctgcggacacatacaaagttacccacagattccgtggataagcaggggactaacatgtgaggcaaaacagcagggccgcgccggtggcgtttttccataggctccgccctcctgccagagttcacataaacagacgcttttccggtgcatctgtgggagccgtgaggctcaaccatgaatctgacagtacgggcgaaacccgacaggacttaaagatccccaccgtttccggcgggtcgctccctcttgcgctctcctgttccgaccctgccgtttaccggatacctgttccgcctttctcccttacgggaagtgtggcgctttctcatagctcacacactggtatctcggctcggtgtaggtcgttcgctccaagctgggctgtaagcaagaactccccgttcagcccgactgctgcgccttatccggtaactgttcacttgagtccaacccggaaaagcacggtaaaacgccactggcagcagccattggtaactgggagttcgcagaggatttgtttagctaaacacgcggttgctcttgaagtgtgcgccaaagtccggctacactggaaggacagatttggttgctgtgctctgcgaaagccagttaccacggttaagcagttccccaactgacttaaccttcgatcaaaccacctccccaggtggttttttcgtttacagggcaaaagattacgcgcagaaaaaaaggatctcaagaagatcctttgatcttttctactgaaccgctctagatttcagtgcaatttatctcttcaaatgtagcacctgaagtcagccccatacgatataagttgtaattctcatgttagtcatgccccgcgcccaccggaaggagctgactgggttgaaggctctcaagggcatcggtcgagatcccggtgcctaatgagtgagctaacttacattaattgcgttgcgctcactgcccgctttccagtcgggaaacctgtcgtgccagctgcattaatgaatcggccaacgcgcggggagaggcggtttgcgtattgggcgccagggtggtttttcttttcaccagtgagacgggcaacagctgattgcccttcaccgcctggccctgagagagttgcagcaagcggtccacgctggtttgccccagcaggcgaaaatcctgtttgatggtggttaacggcgggatataacatgagctgtcttcggtatcgtcgtatcccactaccgagatgtccgcaccaacgcgcagcccggactcggtaatggcgcgcattgcgcccagcgccatctgatcgttggcaaccagcatcgcagtgggaacgatgccctcattcagcatttgcatggtttgttgaaaaccggacatggcactccagtcgccttcccgttccgctatcggctgaatttgattgcgagtgagatatttatgccagccagccagacgcagacgcgccgagacagaacttaatgggcccgctaacagcgcgatttgctggtgacccaatgcgaccagatgctccacgcccagtcgcgtaccgtcttcatgggagaaaataatactgttgatgggtgtctggtcagagacatcaagaaataacgccggaacattagtgcaggcagcttccacagcaatggcatcctggtcatccagcggatagttaatgatcagcccactgacgcgttgcgcgagaagattgtgcaccgccgctttacaggcttcgacgccgcttcgttctaccatcgacaccaccacgctggcacccagttgatcggcgcgagatttaatcgccgcgacaatttgcgacggcgcgtgcagggccagactggaggtggcaacgccaatcagcaacgactgtttgcccgccagttgttgtgccacgcggttgggaatgtaattcagctccgccatcgccgcttccactttttcccgcgttttcgcagaaacgtggctggcctggttcaccacgcgggaaacggtctgataagagacaccggcatactctgcgacatcgtataacgttactggtttcacattcaccaccctgaattgactctcttccgggcgctatcatgccataccgcgaaaggttttgcgccattcgatggtgtccgggatctcgacgctctcccttatgcgactcctgcattaggaaattaatacgactcactata

SEQ ID NO: 106 - DNA, 3000 bp, synthetic construct
  misc_feature 1..3000: note = Synthetic
  source 1..3000: mol_type = other DNA
cggggcggagatttcctggaagatgccaggaagatacttaacagggaagtgagagggccgcggcaaagccgtttttccataggctccgcccccctgacaagcatcacgaaatctgacgctcaaatcagtggtggcgaaacccgacaggactataaagataccaggcgtttccccctggcggctccctcgtgcgctctcctgttcctgcctttcggtttaccggtgtcattccgctgttatggccgcgtttgtctcattccacgcctgacactcagttccgggtaggcagttcgctccaagctggactgtatgcacgaaccccccgttcagtccgaccgctgcgccttatccggtaactatcgtcttgagtccaacccggaaagacatgcaaaagcaccactggcagcagccactggtaattgatttagaggagttagtcttgaagtcatgcgccggttaaggctaaactgaaaggacaagttttggtgactgcgctcctccaagccagttacctcggttcaaagagttggtagctcagagaaccttcgaaaaaccgccctgcaaggcggttttttcgttttcagagcaagagattacgcgcagaccaaaacgatctcaagaagatcatcttattaatatacgtagtatctacgatacgtagtatctacgatacgtagatcatggagaagtcatttaataaggccactgttaaacgtagatatatctacgcgtagatatatctacgatacgtagcggccgacgcgctgggctacgtctttaatgggcagcgcccacatacgcagcgatttccaacagcttgaggcggaagctttaatgcggtagtttatcacagttaaattgctaacgcagtcaggcaccgtgtatgaaatctaacaatgcgctcatcgtcatcctcggcaccgtcaccctggatgctgtaggcataggcttggttatgccggtactgccgggcctcttgcgggatatcgtccattccgacagcatcgccagtcactatggcgtgctgctagcgctatatgcgttgatgcaatttctatgcgcacccgttctcggagcactgtccgaccgctttggccgccgcccagtcctgctcgcttcgctacttggagccactatcgactacgcgatcatggcgaccacacccgtcctgtggatcctctacgccggacgcatcgtggccggcatcaccggcgccacaggtgcggttgctggcgcctatatcgccgacatcaccgatggggaagatcgggcctgccaccatacccacgccgaaacaagcgccctgcaccattatgttccggatctgcatcgcaggatgctgctggctaccctgtggaacacctacatctgtattaacgaagcgctaaccgtttttatcaggctctgggaggcagaataaatgatcatatcgtcaattattacctccacggggagagcctgagcaaactggcctcaggcatttgagaagcacacggtcacactgcttccggtagtcaataaaccggtaaaccagcaatagacataagcggctatttaacgaccctgccctgaaccgacgaccgggtcgaatttgctttcgaatttctgccattcatccgcttattatcacttattcaggcgtagcaaccaggcgtttaagggcaccaataactgccttaaaaaaattacgccccgccctgccactcatcgcagtactgttgtaattcattaagcattctgccgacatggaagccatcacaaacggcatgatgaacctgaatcgccagcggcatcagcaccttgtcgccttgcgtataatatttgcccatggtgaaaacgggggcgaagaagttgtccatattggccacgtttaaatcaaaactggtgaaactcacccagggattggctgagacgaaaaacatattctcaataaaccctttagggaaataggccaggttttcaccgtaacacgccacatcttgcgaatatatgtgtagaaactgccggaaatcgtcgtggtattcactccagagcgatgaaaacgtttcagtttgctcatggaaaacggtgtaacaagggtgaacactatcccatatcaccagctcaccgtctttcattgccatacggaattccggatgagcattcatcaggcgggcaagaatgtgaataaaggccggataaaacttgtgcttatttttctttacggtctttaaaaaggccgtaatatccagctgaacggtctggttataggtacattgagcaactgactgaaatgcctcaaaatgttctttacgatgccattgggatatatcaacggtggtatatccagtgatttttttctccattttagcttccttagctcctgaaaatctcgataactcaaaaaatacgcccgcatttcgtgcaccgcaccatacagcttctgcggttgccttagtcggtggcgggtcacaacccaaacccggtgaaattactttggcacataaaggcgtgctgtagtgatcttatttcattatggtgaaagttggaacctcttacgtgccgatcaacgtctcattttcgccaaaagttggcccagggcttcccggtatcaacagggacaccaggatttatttattctgcgaagtgatcttccgtcacaggtatttattcggcgcaaagtgcgtcgggtgatgctgccaacttactgatttagtgtatgatggtgtttttgaggtgctccagtggcttctgtttctatcagctgtccctcctgttcagctactgacggggtggtgcgtaacggcaaaagcaccgccggacatcagcgctagcggagtgtatactggcttactatgttggcactgatgagggtgtcagtgaagtgcttcatgtggcaggagaaaaaaggctgcaccggtgcgtcagcagaatatgtgatacaggatatattccgcttcctcgctcactgactcgctacgctcggtcgttcgactgcggcgagcggaaatggcttacgaa

SEQ ID NO: 107 - DNA, 4096 bp, synthetic construct
  source 1..4096: mol_type = other DNA
  misc_feature 1..4096: note = Synthetic
tcgcgcgtttcggtgatgacggtgaaaacctctgacacatgcagctcccggagacggtcacagcttgtctgtaagcggatgccgggagcagacaagcccgtcagggcgcgtcagcgggtgttggcgggtgtcggggctggcttaactatgcggcatcagagcagattgtactgagagtgcaccatatgcggtgtgaaataccgcacagatgcgtaaggagaaaataccgcatcaggcgccattcgccattcaggctgcgcaactgttgggaagggcgatcggtgcgggcctcttcgctattacgccagctggcgaaagggggatgtgctgcaaggcgattaagttgggtaacgccagggttttcccagtcacgacgttgtaaaacgacggccagtgaattgacgcgtattgggatagcacgcctttatgtgccaaagtaatttcaccgggtttgggttgtgacccgctgtcatttacagcaatagataagagtgtcatgataagaaaacaataggttgccactctaaaattacacaaatagattagagtaatgacagtaataagcaagagtggcttgcaaatttacacaaatacgcacgagtggctgtaagaggcattctgtcgtaggtcttgaaaggagtgggaattggctccggtgcccgtcagtgggcagagcgcacatcgcccacagtccccgagaagttggggggaggggtcggcaattgatccggtgcctagagaaggtggcgcggggtaaactgggaaagtgatgtcgtgtactggctccgcctttttcccgagggtgggggagaaccgtatataagtgcagtagtcgccgtgaacgttctttttcgcaacgggtttgccgccagaacacaggaccggttctagagcgctgccaccatgaccgagtacaagcccacggtgcgcctcgccacccgcgacgacgtccccagggccgtacgcaccctcgccgccgcgttcgccgactaccccgccacgcgccacaccgtcgatccggaccgccacatcgagcgggtcaccgagctgcaagaactcttcctcacgcgcgtcgggctcgacatcggcaaggtgtgggtcgcggacgacggcgccgcggtggcggtctggaccacgccggagagcgtcgaagcgggggcggtgttcgccgagatcggcccgcgcatggccgagttgagcggttcccggctggccgcgcagcaacagatggaaggcctcctggcgccgcaccggcccaaggagcccgcgtggttcctggccaccgtcggcgtctcgcccgaccaccagggcaagggtctgggcagcgccgtcgtgctccccggagtggaggcggccgagcgcgccggggtgcccgccttcctggagacctccgcgccccgcaacctccccttctacgagcggctcggcttcaccgtcaccgccgacgtcgaggtgcccgaaggaccgcgcacctggtgcatgacccgcaagcccggtgcctgattctaaataaaggaaatttattttcattgcaatagtgtgttggaattttttgtgtctctcagcacttcactgccctcattcctaagaaacccaccatatctatagacagttctgcgaatattatcatttgggaaacaatcaatagttgtgactttaacttttttatttgcaggcatatcttttagtgaatttaatgaaattcatatataaatagtatagtttttattatcactctagtttatttgtgtaaactctgatttatttgtggaactgacacccgccaccgactaaggcaaccgcagaagctgtatggtgcggtgcacgaaatgatcccaatggcgcgccgagcttggcgtaatcatggtcatagctgtttcctgtgtgaaattgttatccgctcacaattccacacaacatacgagccggaagcataaagtgtaaagcctggggtgcctaatgagtgagctaactcacattaattgcgttgcgctcactgcccgctttccagtcgggaaacctgtcgtgccagctgcattaatgaatcggccaacgcgcggggagaggcggtttgcgtattgggcgctcttccgcttcctcgctcactgactcgctgcgctcggtcgttcggctgcggcgagcggtatcagctcactcaaaggcggtaatacggttatccacagaatcaggggataacgcaggaaagaacatgtgagcaaaaggccagcaaaaggccaggaaccgtaaaaaggccgcgttgctggcgtttttccataggctccgcccccctgacgagcatcacaaaatcacaaaaatcgacgctcaagtcagaggtggcgaaacccgacaggactataaagataccaggcgtttccccctggaagctccctcgtgcgctctcctgttccgaccctgccgcttaccggatacctgtccgcctttctcccttcgggaagcgtggcgctttctcatagctcacgctgtaggtatctcagttcggtgtaggtcgttcgctccaagctgggctgtgtgcacgaaccccccgttcagcccgaccgctgcgccttatccggtaactatcgtcttgagtccaacccggtaagacacgacttatcgccactggcagcagccactggtaacaggattagcagagcgaggtatgtaggcggtgctacagagttcttgaagtggtggcctaactacggctacactagaagaacagtatttggtatctgcgctctgctgaagccagttaccttcggaaaaagagttggtagctcttgatccggcaaacaaaccaccgctggtagcggtggtttttttgtttgcaagcagcagattacgcgcagaaaaaaaggatctcaagaagatcctttgatcttttctacggggtctgacgctcagtggaacgaaaactcacgttaagggattttggtcatgagattatcaaaaaggatcttcacctagatccttttaaattaaaaatgaagttttaaatcaatctaaagtatatatgagtaaacttggtctgacagttaccaatgcttaatcagtgaggcacctatctcagcgatctgtctatttcgttcatccatagttgcctgactccccgtcgtgtagataactacgatacgggagggcttaccatctggccccagtgctgcaatgataccgcgagacccacgctcaccggctccagatttatcagcaataaaccagccagccggaagggccgagcgcagaagtggtcctgcaactttatccgcctccatccagtctattaattgttgccgggaagctagagtaagtagttcgccagttaatagtttgcgcaacgttgttgccattgctacaggcatcgtggtgtcacgctcgtcgtttggtatggcttcattcagctccggttcccaacgatcaaggcgagttacatgatcccccatgttgtgcaaaaaagcggttagctccttcggtcctccgatcgttgtcagaagtaagttggccgcagtgttatcactcatggttatggcagcactgcataattctcttactgtcatgccatccgtaagatgcttttctgtgactggtgagtactcaaccaagtcattctgagaatagtgtatgcggcgaccgagttgctcttgcccggcgtcaatacgggataataccgcgccacatagcagaactttaaaagtgctcatcattggaaaacgttcttcggggcgaaaactctcaaggatcttaccgctgttgagatccagttcgatgtaacccactcgtgcacccaactgatcttcagcatcttttactttcaccagcgtttctgggtgagcaaaaacaggaaggcaaaatgccgcaaaaaagggaataagggcgacacggaaatgttgaatactcatactcttcctttttcaatattattgaagcatttatcagggttattgtctcatgagcggatacatatttgaatgtatttagaaaaataaacaaataggggttccgcgcacatttccccgaaaagtgccacctgacgtctaagaaaccattattatcatgacattaacctataaaaataggcgtatcacgaggccctttcgtc

SEQ ID NO: 108 - DNA, 2596 bp, synthetic construct
  misc_feature 1..2596: note = Synthetic
  source 1..2596: mol_type = other DNA
gagagtgcaccatacaggaaacagctatgaccatgattacgccaagctcggcgcgccattgggattgtcagttccacaaataaatcagagtttacacaaataaactagagtgataataaaaactatactatttatatatgaatttcattaaattcactaaaagatatgcctgcaaataaaaaagttaaagtcacaactattgattgtttcccaaatgataatattcgcagaactgtctatagatatggtgggtttcttaggaatgagggcagtgaagagcgcttttgaagctgatgtgcttaaaaacttactcaatggaataattctagataattcactagtgattggaaatgttggatcctcatactcttcctttttcaattcagaagaactcgtcaagaaggcgatagaaggcgatgcgctgcgaatcgggagcggcgataccgtaaagcacgaggaagcggtcagcccattcgccgccaagctcttcagcaatatcacgggtagccaacgctatgtcctgatagcggtccgccacacccagccggccacagtcgatgaatccagaaaagcggccattttccaccatgatattcggcaagcaggcatcgccatgggtcacgacgagatcctcgccgtcgggcatgcgcgccttgagcctggcgaacagttcggctggcgcgagcccctgatgctcttcgtccagatcatcctgatcgacaagaccggcttccatccgagtacgtgctcgctcgatgcgatgtttcgcttggtggtcgaatgggcaggtagccggatcaagcgtatgcagccgccgcattgcatcagccatgatggatactttctcggcaggagcaaggtgggatgacaggagatcctgccccggcacttcgcccaatagcagccagtcccttcccgcttcagtgacaacgtcgagcacagctgcgcaaggaacgcccgtcgtggccagccacgatagccgcgctgcctcgtcctgcagttcattcagggcaccggacaggtcggtcttgacaaaaagaaccgggcgcccctgcgctgacagccggaacacggcggcatcagagcagccgattgtctgttgtgcccagtcatagccgaatagcctctccacccaagcggccggagaacctgcgtgcaatccatcttgttcaatcatgcgaaacgatcctcatcctgtctcttgatcagatcttgatcccctgcgccatcagatccttggcggcaagaaagccatccagtttactttgcagggcttcccaaccttaccagagggcgccccagctggcaattccggttcgcttgctgtccataaaaccgcccagtctagctatcgccatgtaagcccactgcaagctacctgctttctctttgcgcttgcgttttcccttgtccagatagcccagtagctgacattcatccggggtcagcaccgtttctgcggactggctttctacgtgttccgcttcctttagcagcccttgcgccatgcatttgttaaatcgaattatccattgctgttgacaaagggaatcaggggatcttgaagttcctattccgaagttcctattctctagaaagtataggaacttcagagcgcttttgaagctaattcgagatcatgcatgagctcactagtggatccccccgacagaatgcctcttacagccactcgtgcgtatttgtgtaaatttgcaagccactcttgcttattactgtcattactctaatctatttgtgtaattttagagtggcaacctattgttttcttatcatgacactcttatctattgctgtaaatgacaatcccaatacgcgtcaattcactggccgtcgttttactactttccgctgcataaccctgcttcggggtcattatagcgattttttcggtatatccatcctttttcgcacgatatacaggattttgccaaagggttcgtgtagactttccttggtgtatccaacggcgtcagccgggcaggataggtgaagtaggcccacccgcgagcgggtgttccttcttcactgtcccttattcgcacctggcggtgctcaacgggaatcctgctctgcgaggctggccgataagctctgataacgcaggaaagaacatgggcagttcaacctgttgatagtacgtactaagctctcatgtttcacgtactaagctctcaagtttaacgtactaagctctcatgtttaacgaactaaaccctcatggctaacgtactaagctctcatggctaacgtactaagctctcatgtttcacgtactaagctctcatgtttgaacaataaaattaatataaatcagcaacttaaatagcctctaaggttttaagttttataagaaaaaaaagaatatataaggcttttaaagcttttaaggtttaacggttgtggacaacaagccagggatgtaacgcactgagaagcccttagagcctctcaaagcaattttgagtgacacaggaacacttaacggctgacaaccggctggtaacaggattagcagagcgaggtatgtaggcggtgctacaagattgtactgagagtgcaccatacaggaaacagc

SEQ ID NO: 109 - DNA, 2975 bp, synthetic construct
  source 1..2975: mol_type = other DNA
  misc_feature 1..2975: note = Synthetic
cggggcggagatttcctggaagatgccaggaagatacttaacagggaagtgagagggccgcggcaaagccgtttttccataggctccgcccccctgacaagcatcacgaaatctgacgctcaaatcagtggtggcgaaacccgacaggactataaagataccaggcgtttccccctggcggctccctcgtgcgctctcctgttcctgcctttcggtttaccggtgtcattccgctgttatggccgcgtttgtctcattccacgcctgacactcagttccgggtaggcagttcgctccaagctggactgtatgcacgaaccccccgttcagtccgaccgctgcgccttatccggtaactatcgtcttgagtccaacccggaaagacatgcaaaagcaccactggcagcagccactggtaattgatttagaggagttagtcttgaagtcatgcgccggttaaggctaaactgaaaggacaagttttggtgactgcgctcctccaagccagttacctcggttcaaagagttggtagctcagagaaccttcgaaaaaccgccctgcaaggcggttttttcgttttcagagcaagagattacgcgcagaccaaaacgatctcaagaagatcatcttattaatatacgtagtatctacgatacgtagtatctacgatacgtagatcatggagaagtcatttaataaggccactgttaaacgtagatatatctacgcgtagatatatctacgatacgtagcggccgacgcgctgggctacgtctttaatgggcagcgcccacatacgcagcgatttccaacagcttgaggcggaagctttaatgcggtagtttatcacagttaaattgctaacgcagtcaggcaccgtgtatgaaatctaacaatgcgctcatcgtcatcctcggcaccgtcaccctggatgctgtaggcataggcttggttatgccggtactgccgggcctcttgcgggatatcgtccattccgacagcatcgccagtcactatggcgtgctgctagcgctatatgcgttgatgcaatttctatgcgcacccgttctcggagcactgtccgaccgctttggccgccgcccagtcctgctcgcttcgctacttggagccactatcgactacgcgatcatggcgaccacacccgtcctgtggatcctctacgccggacgcatcgtggccggcatcaccggcgccacaggtgcggttgctggcgcctatatcgccgacatcaccgatggggaagatcgggcctgccaccatacccacgccgaaacaagcgccctgcaccattatgttccggatctgcatcgcaggatgctgctggctaccctgtggaacacctacatctgtattaacgaagcgctaaccgtttttatcaggctctgggaggcagaataaatgatcatatcgtcaattattacctccacggggagagcctgagcaaactggcctcaggcatttgagaagcacacggtcacactgcttccggtagtcaataaaccggtaaaccagcaatagacataagcggctatttaacgaccctgccctgaaccgacgaccgggtcgaatttgctttcgaatttctgccattcatccgcttattatcacttattcaggcgtagcaaccaggcgtttaagggcaccaataactgccttaaaaaaattacgccccgccctgccactcatcgcagtactgttgtaattcattaagcattctgccgacatggaagccatcacaaacggcatgatgaacctgaatcgccagcggcatcagcaccttgtcgccttgcgtataatatttgcccatggtgaaaacgggggcgaagaagttgtccatattggccacgtttaaatcaaaactggtgaaactcacccagggattggctgagacgaaaaacatattctcaataaaccctttagggaaataggccaggttttcaccgtaacacgccacatcttgcgaatatatgtgtagaaactgccggaaatcgtcgtggtattcactccagagcgatgaaaacgtttcagtttgctcatggaaaacggtgtaacaagggtgaacactatcccatatcaccagctcaccgtctttcattgccatacggaattccggatgagcattcatcaggcgggcaagaatgtgaataaaggccggataaaacttgtgcttatttttctttacggtctttaaaaaggccgtaatatccagctgaacggtctggttataggtacattgagcaactgactgaaatgcctcaaaatgttctttacgatgccattgggatatatcaacggtggtatatccagtgatttttttctccattttagcttccttagctcctgaaaatctcgataactcaaaaaatacgcccgttctgcggttgccttagtcggtggcgggtcacaacccaaacccggtgaaattactttggcacataaaggcgtgctgtagtgatcttatttcattatggtgaaagttggaacctcttacgtgccgatcaacgtctcattttcgccaaaagttggcccagggcttcccggtatcaacagggacaccaggatttatttattctgcgaagtgatcttccgtcacaggtatttattcggcgcaaagtgcgtcgggtgatgctgccaacttactgatttagtgtatgatggtgtttttgaggtgctccagtggcttctgtttctatcagctgtccctcctgttcagctactgacggggtggtgcgtaacggcaaaagcaccgccggacatcagcgctagcggagtgtatactggcttactatgttggcactgatgagggtgtcagtgaagtgcttcatgtggcaggagaaaaaaggctgcaccggtgcgtcagcagaatatgtgatacaggatatattccgcttcctcgctcactgactcgctacgctcggtcgttcgactgcggcgagcggaaatggcttacgaa

SEQ ID NO: 110 - DNA, 2975 bp, synthetic construct
  source 1..2975: mol_type = other DNA
  misc_feature 1..2975: note = Synthetic
cggggcggagatttcctggaagatgccaggaagatacttaacagggaagtgagagggccgcggcaaagccgtttttccataggctccgcccccctgacaagcatcacgaaatctgacgctcaaatcagtggtggcgaaacccgacaggactataaagataccaggcgtttccccctggcggctccctcgtgcgctctcctgttcctgcctttcggtttaccggtgtcattccgctgttatggccgcgtttgtctcattccacgcctgacactcagttccgggtaggcagttcgctccaagctggactgtatgcacgaaccccccgttcagtccgaccgctgcgccttatccggtaactatcgtcttgagtccaacccggaaagacatgcaaaagcaccactggcagcagccactggtaattgatttagaggagttagtcttgaagtcatgcgccggttaaggctaaactgaaaggacaagttttggtgactgcgctcctccaagccagttacctcggttcaaagagttggtagctcagagaaccttcgaaaaaccgccctgcaaggcggttttttcgttttcagagcaagagattacgcgcagaccaaaacgatctcaagaagatcatcttattaatatacgtagtatctacgatacgtagtatctacgatacgtagatcatggagaagtcatttaataaggccactgttaaacgtagatatatctacgcgtagatatatctacgatacgtagcggccgacgcgctgggctacgtctttaatgggcagcgcccacatacgcagcgatttccaacagcttgaggcggaagctttaatgcggtagtttatcacagttaaattgctaacgcagtcaggcaccgtgtatgaaatctaacaatgcgctcatcgtcatcctcggcaccgtcaccctggatgctgtaggcataggcttggttatgccggtactgccgggcctcttgcgggatatcgtccattccgacagcatcgccagtcactatggcgtgctgctagcgctatatgcgttgatgcaatttctatgcgcacccgttctcggagcactgtccgaccgctttggccgccgcccagtcctgctcgcttcgctacttggagccactatcgactacgcgatcatggcgaccacacccgtcctgtggatcctctacgccggacgcatcgtggccggcatcaccggcgccacaggtgcggttgctggcgcctatatcgccgacatcaccgatggggaagatcgggcctgccaccatacccacgccgaaacaagcgccctgcaccattatgttccggatctgcatcgcaggatgctgctggctaccctgtggaacacctacatctgtattaacgaagcgctaaccgtttttatcaggctctgggaggcagaataaatgatcatatcgtcaattattacctccacggggagagcctgagcaaactggcctcaggcatttgagaagcacacggtcacactgcttccggtagtcaataaaccggtaaaccagcaatagacataagcggctatttaacgaccctgccctgaaccgacgaccgggtcgaatttgctttcgaatttctgccattcatccgcttattatcacttattcaggcgtagcaaccaggcgtttaagggcaccaataactgccttaaaaaaattacgccccgccctgccactcatcgcagtactgttgtaattcattaagcattctgccgacatggaagccatcacaaacggcatgatgaacctgaatcgccagcggcatcagcaccttgtcgccttgcgtataatatttgcccatggtgaaaacgggggcgaagaagttgtccatattggccacgtttaaatcaaaactggtgaaactcacccagggattggctgagacgaaaaacatattctcaataaaccctttagggaaataggccaggttttcaccgtaacacgccacatcttgcgaatatatgtgtagaaactgccggaaatcgtcgtggtattcactccagagcgatgaaaacgtttcagtttgctcatggaaaacggtgtaacaagggtgaacactatcccatatcaccagctcaccgtctttcattgccatacggaattccggatgagcattcatcaggcgggcaagaatgtgaataaaggccggataaaacttgtgcttatttttctttacggtctttaaaaaggccgtaatatccagctgaacggtctggttataggtacattgagcaactgactgaaatgcctcaaaatgttctttacgatgccattgggatatatcaacggtggtatatccagtgatttttttctccattttagcttccttagctcctgaaaatctcgataactcaaaaaatacgcccgcatttcgtgcaccgcaccatacagcttctgcggttgccttagtcggtggcgggtcacaacccaaacccggtgaaagtagtgatcttatttcattatggtgaaagttggaacctcttacgtgccgatcaacgtctcattttcgccaaaagttggcccagggcttcccggtatcaacagggacaccaggatttatttattctgcgaagtgatcttccgtcacaggtatttattcggcgcaaagtgcgtcgggtgatgctgccaacttactgatttagtgtatgatggtgtttttgaggtgctccagtggcttctgtttctatcagctgtccctcctgttcagctactgacggggtggtgcgtaacggcaaaagcaccgccggacatcagcgctagcggagtgtatactggcttactatgttggcactgatgagggtgtcagtgaagtgcttcatgtggcaggagaaaaaaggctgcaccggtgcgtcagcagaatatgtgatacaggatatattccgcttcctcgctcactgactcgctacgctcggtcgttcgactgcggcgagcggaaatggcttacgaa

SEQ ID NO: 111 - DNA, 5966 bp, synthetic construct
  misc_feature 1..5966: note = Synthetic
  source 1..5966: mol_type = other DNA
tttacactttatgcttccggctcgtatgttggtcgacgtggagatataccatgtttaactttaataaggagatatacatggcgaatccgaagatagtgctggcgacatccgatgtcgcttcgcgcgctctcgcgccagcagatgccgaactgttcgggaccatcattgatgcatggactcgtcgccgcatcggctcgctgcgccatacccacaaagccgtagccagggacgtctcggtgctgcgggagtttgctgcccactcaggtctgccgccttggctctggaatgaggatgcatttgactgctggtgcgatcatctcggattggagcgccggttggccaatagcacccagcggcattaccaatgctcgatccgatccttcctcgaatatctcacgacgaacgtcaagttcaggaacgagatccggcgcttgtatggcgtcgagccacgacagatttgcacggaagagaactgcatcccccataccgtcgaaaaggagtcctccaaagagcgccgagccttcacacatgaggaaatcgagttgttttttgacgggctgcggcgcgcttctgtcgaggccggccgcttcaggaccaaggattacaaccctcttcgtcgggaccgtactttctttttcaccctctactccggagggctcaggatttccgaaggcctcaacctaaacgtaaattcgtttgcgccgaatccagctttacctgaacttggcccctatggattcatcaaggtctggggcaagggaagccggggaagtgggaagcgctttcggaccgtaccggtcacccatcctgacttccctgagctcatggactggtacatcacaagagtccgccctgaattccttcatcgagcggaccccaatgaggaagccttgttcctctcggagcggggaactcgtctcaagtcgtccagcgccgacgcacgcttcaaaatcgcaactcgctattgcggcctggaaggcgaaggactgacgccacactgtctgcgccactcgagcgttacccacgaatccttgcgcttcagcatcgagatggttcgtcggaagcatggccacgcttctgcggcaacgacacaaggctatatgcacgtccccgacgttatggtcgacgacgaaatcagcagcgtcgtctcccgcgagctcgatgacgcgctcaacacacaggagaagaaagaatgagcgatacgcccaatatcagacttggttggcgcctccgcgtgcggatggcggaaaaccgaataccgaccgccacggaactcaagcgacggctcgacgcgatcggctacgacatcaccagcgcccaactctcccgaattgtggacgagcgaccggcccaggtgaaaaccgcgctactggaggctttgcttaaagtcctggggggaaccctagacgatctcatgcccgcggagggccgtgttgagcagccgagttctgcgcctcaaggtggtgaggaagttgcgccaagcccagcgccggcggccacccccacccgtaagcgcaaaccggcgcgccccgcctcggaagcagtcgatccggacgatgccggtggccccagggtacgccccttctcggtcccaccgaagaagtgaaatagcgttcctacatggcgacctctgctcatacctgttgcgatgaatgcagccgtccgatggccaaggcgcgtctcgtccggaacgggaaggccttgtgcgacacctgcagccagcggattccctacgccccttgtggcaagtgcggaaagcagacgcgcatgctcaatgaccaaggggaaccgctctgcaaggtctgccgtgccctcaaccgcacctgcgtgcgttgcggcaagccagtgcgcaaggctgggcgcttggtcgatggcggtgctgtctgcggcccctgcgccaagtattaccgtgaaccgcaggcctgcgatcaatgtggggcaatggagaaggttcttaccggcgtacagacagaaactgggcggcgccgtctctgcggcaggtgtttccggcgccataaaggctacaagagctgcagcatctgccggaaagacaggctgcctgtcggcgtgaccgctgacggcaagcctatatgcaaaacctgtttgagtgcggccggaaaacctttcgtgtgcccaacctgtggccaggaaggaatacgccatagtagaaggcgttgccagaagtgctacgttcgcgatacggcgaaaagccgtgtcgaggaatatgctcccctttttagtcatgcatggacccgggaagcctggctgggatttggtgcagagaccctggaggcaatgaatccagaaaagctagtgcatcgaatcaacagctactacctcttcttcgtccggcttgatctcgccttcagcaaacctacagaaatcacgccggtcgcgctgttgaaaagcgtcggcggcttggatgggctccgtcgatacaccgtgccctatggctatctcctgaagcaccgaatcatccccgagacaacgcgcagtctcctgcaggacgaggctgaatccatcaggcaggaagccatgatcgccaagctggatggcaagtggtatgccccagtcatggcacgctaccggaatcacctgctgactgtccgcgcccgatacgacagccggggctggaaaggggaagatacccggatgaaggcgcgctcgattacgctcaacctccgggcggctcggcgtttatgcgaaacgctggatgccataggtgtccagatgattcagcagacgacgccagagatgctggacaagttcttcatggactatcctggactggccgtctcaatccgtgccttcgtccgatacctgaaccggaaggaaaaactctttcagcgcctgcgcctgaagacagttgcccggagtgtgccggaagggattttcctgccccgcgaaaaatccactgcgctcattcaagcgtggatgacgccgactgatgagacgcttcggcagtccctcatcggcctgttcatgctgctctatgcccagacggtcaagaactgtgttcggcttcgtctggatgcactcatccaacgggctgacgggcgttatcgcatagcatttggccgcgcggaaatccacctggatgctcggatcagcgcgatactcgatcgctatttgaacgtgcggcaaacactggttgctctggaccatgccgacgaaaatccgtatctctttccgggacggcagttaggcagtcacctgagtgccgaatcggtatccggttggttgaaaaaggcgggcgtcagctccgatcagttgtttgcaacatcaatctataacgcctatcaaaatggcctgcgacttcccaaggtcttggtgcgagcgtttggcatcaccgatacgaccgcgatcaagtatctcaacatgctggatccccgcctggtcatggagatcgaacgcaaaccactgggcggcggggacgaaccctgatggctggcgaacttaccgttcggaaaaatccatacgccagcggtcagccgtggtggctctatatgctcgaatgcaagggcggaggcatctacaccggcatcgcgctggatgtggatgcgcggtttgagcaacacgtcgcaggcaagggcgccaaatacacgcgcatgaaccggcccatccgggtcgtcgcgcgcatccgctacgacacgcaccgggaagccgctcaggctgaagttgcgctgaaacgcctcaagcccctggaaaagctgcggtgggcctatgccttggctgggttagtcggcatggacaagtcggcgtaacgcgtggggcgtctccggatcgttgaggggcaaaagcatcgcggcccccgaggctgctgccaccgctgagcaataacctaggctgctgccaccgctgagcaataactagcataaccccttggggcctctaaacgggtcttgaggggttttttgctgaaacctcaggcatttgagaagcacacggtcacactgcttccggtagtcaataaaccggtaaaccagcaatagacataagcggctatttaacgaccctgccctgaaccgacgaccgggtcatcgtggccggatcttgcggcccctcggcttgaacgaattgttagacattatttgccgactaccttggtgatctcgcctttcacgtagtggacaaattcttccaactgatctgcgcgcgaggccaagcgatcttcttcttgtccaagataagcctgtctagcttcaagtatgacgggctgatactgggccggcaggcgctccattgcccagtcggcagcgacatccttcggcgcgattttgccggttactgcgctgtaccaaatgcgggacaacgtaagcactacatttcgctcatcgccagcccagtcgggcggcgagttccatagcgttaaggtttcatttagcgcctcaaatagatcctgttcaggaaccggatcaaagagttcctccgccgctggacctaccaaggcaacgctatgttctcttgcttttgtcagcaagatagccagatcaatgtcgatcgtggctggctcgaagatacctgcaagaatgtcattgcgctgccattctccaaattgcagttcgcgcttagctggataacgccacggaatgatgtcgtcgtgcacaacaatggtgacttctacagcgcggagaatctcgctctctccaggggaagccgaagtttccaaaaggtcgttgatcaaagctcgccgcgttgtttcatcaagccttacggtcaccgtaaccagcaaatcaatatcactgtgtggcttcaggccgccatccactgcggagccgtacaaatgtacggccagcaacgtcggttcgagatggcgctcgatgacgccaactacctctgatagttgagtcgatacttcggcgatcaccgcttccctcatactcttcctttttcaatattattgaagcatttatcagggttattgtctcatgagcggatacatatttgaatgtatttagaaaaataaacaaatagctagctcactcggtcgctacgctccgggcgtgagactgcggcgggcgctgcggacacatacaaagttacccacagattccgtggataagcaggggactaacatgtgaggcaaaacagcagggccgcgccggtggcgtttttccataggctccgccctcctgccagagttcacataaacagacgcttttccggtgcatctgtgggagccgtgaggctcaaccatgaatctgacagtacgggcgaaacccgacaggacttaaagatccccaccgtttccggcgggtcgctccctcttgcgctctcctgttccgaccctgccgtttaccggatacctgttccgcctttctcccttacgggaagtgtggcgctttctcatagctcacacactggtatctcggctcggtgtaggtcgttcgctccaagctgggctgtaagcaagaactccccgttcagcccgactgctgcgccttatccggtaactgttcacttgagtccaacccggaaaagcacggtaaaacgccactggcagcagccattggtaactgggagttcgcagaggatttgtttagctaaacacgcggttgctcttgaagtgtgcgccaaagtccggctacactggaaggacagatttggttgctgtgctctgcgaaagccagttaccacggttaagcagttccccaactgacttaaccttcgatcaaaccacctccccaggtggttttttcgtttacagggcaaaagattacgcgcagaaaaaaaggatctcaagaagatcctttgatcttttctactgaaccgctctagatttcagtgcaatttatctcttcaaatgtagcacctgaagtcagccccatacgatataagttgtaattctcatgttagtcatgccccgcgcccaccggaaggagctgactgggttgaaggctctcaagggcatcggtcgagatcccggtgcctaatgagtgagctaacttacattaattgcgttgcgc

SEQ ID NO: 112 - DNA, 4851 bp, synthetic construct
  source 1..4851: mol_type = other DNA
  misc_feature 1..4851: note = Synthetic
tttacactttatgcttccggctcgtatgttggtcgacgtggagatataccatgtttaactttaataaggagatatacatgagcgatacgcccaatatcagacttggttggcgcctccgcgtgcggatggcggaaaaccgaataccgaccgccacggaactcaagcgacggctcgacgcgatcggctacgacatcaccagcgcccaactctcccgaattgtggacgagcgaccggcccaggtgaaaaccgcgctactggaggctttgcttaaagtcctggggggaaccctagacgatctcatgcccgcggagggccgtgttgagcagccgagttctgcgcctcaaggtggtgaggaagttgcgccaagcccagcgccggcggccacccccacccgtaagcgcaaaccggcgcgccccgcctcggaagcagtcgatccggacgatgccggtggccccagggtacgccccttctcggtcccaccgaagaagtgaaatagcgttcctacatggcgacctctgctcatacctgttgcgatgaatgcagccgtccgatggccaaggcgcgtctcgtccggaacgggaaggccttgtgcgacacctgcagccagcggattccctacgccccttgtggcaagtgcggaaagcagacgcgcatgctcaatgaccaaggggaaccgctctgcaaggtctgccgtgccctcaaccgcacctgcgtgcgttgcggcaagccagtgcgcaaggctgggcgcttggtcgatggcggtgctgtctgcggcccctgcgccaagtattaccgtgaaccgcaggcctgcgatcaatgtggggcaatggagaaggttcttaccggcgtacagacagaaactgggcggcgccgtctctgcggcaggtgtttccggcgccataaaggctacaagagctgcagcatctgccggaaagacaggctgcctgtcggcgtgaccgctgacggcaagcctatatgcaaaacctgtttgagtgcggccggaaaacctttcgtgtgcccaacctgtggccaggaaggaatacgccatagtagaaggcgttgccagaagtgctacgttcgcgatacggcgaaaagccgtgtcgaggaatatgctcccctttttagtcatgcatggacccgggaagcctggctgggatttggtgcagagaccctggaggcaatgaatccagaaaagctagtgcatcgaatcaacagctactacctcttcttcgtccggcttgatctcgccttcagcaaacctacagaaatcacgccggtcgcgctgttgaaaagcgtcggcggcttggatgggctccgtcgatacaccgtgccctatggctatctcctgaagcaccgaatcatccccgagacaacgcgcagtctcctgcaggacgaggctgaatccatcaggcaggaagccatgatcgccaagctggatggcaagtggtatgccccagtcatggcacgctaccggaatcacctgctgactgtccgcgcccgatacgacagccggggctggaaaggggaagatacccggatgaaggcgcgctcgattacgctcaacctccgggcggctcggcgtttatgcgaaacgctggatgccataggtgtccagatgattcagcagacgacgccagagatgctggacaagttcttcatggactatcctggactggccgtctcaatccgtgccttcgtccgatacctgaaccggaaggaaaaactctttcagcgcctgcgcctgaagacagttgcccggagtgtgccggaagggattttcctgccccgcgaaaaatccactgcgctcattcaagcgtggatgacgccgactgatgagacgcttcggcagtccctcatcggcctgttcatgctgctctatgcccagacggtcaagaactgtgttcggcttcgtctggatgcactcatccaacgggctgacgggcgttatcgcatagcatttggccgcgcggaaatccacctggatgctcggatcagcgcgatactcgatcgctatttgaacgtgcggcaaacactggttgctctggaccatgccgacgaaaatccgtatctctttccgggacggcagttaggcagtcacctgagtgccgaatcggtatccggttggttgaaaaaggcgggcgtcagctccgatcagttgtttgcaacatcaatctataacgcctatcaaaatggcctgcgacttcccaaggtcttggtgcgagcgtttggcatcaccgatacgaccgcgatcaagtatctcaacatgctggatccccgcctggtcatggagatcgaacgcaaaccactgggcggcggggacgaaccctgatggctggcgaacttaccgttcggaaaaatccatacgccagcggtcagccgtggtggctctatatgctcgaatgcaagggcggaggcatctacaccggcatcgcgctggatgtggatgcgcggtttgagcaacacgtcgcaggcaagggcgccaaatacacgcgcatgaaccggcccatccgggtcgtcgcgcgcatccgctacgacacgcaccgggaagccgctcaggctgaagttgcgctgaaacgcctcaagcccctggaaaagctgcggtgggcctatgccttggctgggttagtcggcatggacaagtcggcgtaacgcgtggggcgtctccggatcgttgaggggcaaaagcatcgcggcccccgaggctgctgccaccgctgagcaataacctaggctgctgccaccgctgagcaataactagcataaccccttggggcctctaaacgggtcttgaggggttttttgctgaaacctcaggcatttgagaagcacacggtcacactgcttccggtagtcaataaaccggtaaaccagcaatagacataagcggctatttaacgaccctgccctgaaccgacgaccgggtcatcgtggccggatcttgcggcccctcggcttgaacgaattgttagacattatttgccgactaccttggtgatctcgcctttcacgtagtggacaaattcttccaactgatctgcgcgcgaggccaagcgatcttcttcttgtccaagataagcctgtctagcttcaagtatgacgggctgatactgggccggcaggcgctccattgcccagtcggcagcgacatccttcggcgcgattttgccggttactgcgctgtaccaaatgcgggacaacgtaagcactacatttcgctcatcgccagcccagtcgggcggcgagttccatagcgttaaggtttcatttagcgcctcaaatagatcctgttcaggaaccggatcaaagagttcctccgccgctggacctaccaaggcaacgctatgttctcttgcttttgtcagcaagatagccagatcaatgtcgatcgtggctggctcgaagatacctgcaagaatgtcattgcgctgccattctccaaattgcagttcgcgcttagctggataacgccacggaatgatgtcgtcgtgcacaacaatggtgacttctacagcgcggagaatctcgctctctccaggggaagccgaagtttccaaaaggtcgttgatcaaagctcgccgcgttgtttcatcaagccttacggtcaccgtaaccagcaaatcaatatcactgtgtggcttcaggccgccatccactgcggagccgtacaaatgtacggccagcaacgtcggttcgagatggcgctcgatgacgccaactacctctgatagttgagtcgatacttcggcgatcaccgcttccctcatactcttcctttttcaatattattgaagcatttatcagggttattgtctcatgagcggatacatatttgaatgtatttagaaaaataaacaaatagctagctcactcggtcgctacgctccgggcgtgagactgcggcgggcgctgcggacacatacaaagttacccacagattccgtggataagcaggggactaacatgtgaggcaaaacagcagggccgcgccggtggcgtttttccataggctccgccctcctgccagagttcacataaacagacgcttttccggtgcatctgtgggagccgtgaggctcaaccatgaatctgacagtacgggcgaaacccgacaggacttaaagatccccaccgtttccggcgggtcgctccctcttgcgctctcctgttccgaccctgccgtttaccggatacctgttccgcctttctcccttacgggaagtgtggcgctttctcatagctcacacactggtatctcggctcggtgtaggtcgttcgctccaagctgggctgtaagcaagaactccccgttcagcccgactgctgcgccttatccggtaactgttcacttgagtccaacccggaaaagcacggtaaaacgccactggcagcagccattggtaactgggagttcgcagaggatttgtttagctaaacacgcggttgctcttgaagtgtgcgccaaagtccggctacactggaaggacagatttggttgctgtgctctgcgaaagccagttaccacggttaagcagttccccaactgacttaaccttcgatcaaaccacctccccaggtggttttttcgtttacagggcaaaagattacgcgcagaaaaaaaggatctcaagaagatcctttgatcttttctactgaaccgctctagatttcagtgcaatttatctcttcaaatgtagcacctgaagtcagccccatacgatataagttgtaattctcatgttagtcatgccccgcgcccaccggaaggagctgactgggttgaaggctctcaagggcatcggtcgagatcccggtgcctaatgagtgagctaacttacattaattgcgttgcgc

SEQ ID NO: 113 - DNA, 5556 bp, synthetic construct
  source 1..5556: mol_type = other DNA
  misc_feature 1..5556: note = Synthetic
tttacactttatgcttccggctcgtatgttggtcgacgtggagatataccatgtttaactttaataaggagatatacatggcgaatccgaagatagtgctggcgacatccgatgtcgcttcgcgcgctctcgcgccagcagatgccgaactgttcgggaccatcattgatgcatggactcgtcgccgcatcggctcgctgcgccatacccacaaagccgtagccagggacgtctcggtgctgcgggagtttgctgcccactcaggtctgccgccttggctctggaatgaggatgcatttgactgctggtgcgatcatctcggattggagcgccggttggccaatagcacccagcggcattaccaatgctcgatccgatccttcctcgaatatctcacgacgaacgtcaagttcaggaacgagatccggcgcttgtatggcgtcgagccacgacagatttgcacggaagagaactgcatcccccataccgtcgaaaaggagtcctccaaagagcgccgagccttcacacatgaggaaatcgagttgttttttgacgggctgcggcgcgcttctgtcgaggccggccgcttcaggaccaaggattacaaccctcttcgtcgggaccgtactttctttttcaccctctactccggagggctcaggatttccgaaggcctcaacctaaacgtaaattcgtttgcgccgaatccagctttacctgaacttggcccctatggattcatcaaggtctggggcaagggaagccggggaagtgggaagcgctttcggaccgtaccggtcacccatcctgacttccctgagctcatggactggtacatcacaagagtccgccctgaattccttcatcgagcggaccccaatgaggaagccttgttcctctcggagcggggaactcgtctcaagtcgtccagcgccgacgcacgcttcaaaatcgcaactcgctattgcggcctggaaggcgaaggactgacgccacactgtctgcgccactcgagcgttacccacgaatccttgcgcttcagcatcgagatggttcgtcggaagcatggccacgcttctgcggcaacgacacaaggctatatgcacgtccccgacgttatggtcgacgacgaaatcagcagcgtcgtctcccgcgagctcgatgacgcgctcaacacacaggagaagaaagaatgaaatagcgttcctacatggcgacctctgctcatacctgttgcgatgaatgcagccgtccgatggccaaggcgcgtctcgtccggaacgggaaggccttgtgcgacacctgcagccagcggattccctacgccccttgtggcaagtgcggaaagcagacgcgcatgctcaatgaccaaggggaaccgctctgcaaggtctgccgtgccctcaaccgcacctgcgtgcgttgcggcaagccagtgcgcaaggctgggcgcttggtcgatggcggtgctgtctgcggcccctgcgccaagtattaccgtgaaccgcaggcctgcgatcaatgtggggcaatggagaaggttcttaccggcgtacagacagaaactgggcggcgccgtctctgcggcaggtgtttccggcgccataaaggctacaagagctgcagcatctgccggaaagacaggctgcctgtcggcgtgaccgctgacggcaagcctatatgcaaaacctgtttgagtgcggccggaaaacctttcgtgtgcccaacctgtggccaggaaggaatacgccatagtagaaggcgttgccagaagtgctacgttcgcgatacggcgaaaagccgtgtcgaggaatatgctcccctttttagtcatgcatggacccgggaagcctggctgggatttggtgcagagaccctggaggcaatgaatccagaaaagctagtgcatcgaatcaacagctactacctcttcttcgtccggcttgatctcgccttcagcaaacctacagaaatcacgccggtcgcgctgttgaaaagcgtcggcggcttggatgggctccgtcgatacaccgtgccctatggctatctcctgaagcaccgaatcatccccgagacaacgcgcagtctcctgcaggacgaggctgaatccatcaggcaggaagccatgatcgccaagctggatggcaagtggtatgccccagtcatggcacgctaccggaatcacctgctgactgtccgcgcccgatacgacagccggggctggaaaggggaagatacccggatgaaggcgcgctcgattacgctcaacctccgggcggctcggcgtttatgcgaaacgctggatgccataggtgtccagatgattcagcagacgacgccagagatgctggacaagttcttcatggactatcctggactggccgtctcaatccgtgccttcgtccgatacctgaaccggaaggaaaaactctttcagcgcctgcgcctgaagacagttgcccggagtgtgccggaagggattttcctgccccgcgaaaaatccactgcgctcattcaagcgtggatgacgccgactgatgagacgcttcggcagtccctcatcggcctgttcatgctgctctatgcccagacggtcaagaactgtgttcggcttcgtctggatgcactcatccaacgggctgacgggcgttatcgcatagcatttggccgcgcggaaatccacctggatgctcggatcagcgcgatactcgatcgctatttgaacgtgcggcaaacactggttgctctggaccatgccgacgaaaatccgtatctctttccgggacggcagttaggcagtcacctgagtgccgaatcggtatccggttggttgaaaaaggcgggcgtcagctccgatcagttgtttgcaacatcaatctataacgcctatcaaaatggcctgcgacttcccaaggtcttggtgcgagcgtttggcatcaccgatacgaccgcgatcaagtatctcaacatgctggatccccgcctggtcatggagatcgaacgcaaaccactgggcggcggggacgaaccctgatggctggcgaacttaccgttcggaaaaatccatacgccagcggtcagccgtggtggctctatatgctcgaatgcaagggcggaggcatctacaccggcatcgcgctggatgtggatgcgcggtttgagcaacacgtcgcaggcaagggcgccaaatacacgcgcatgaaccggcccatccgggtcgtcgcgcgcatccgctacgacacgcaccgggaagccgctcaggctgaagttgcgctgaaacgcctcaagcccctggaaaagctgcggtgggcctatgccttggctgggttagtcggcatggacaagtcggcgtaacgcgtggggcgtctccggatcgttgaggggcaaaagcatcgcggcccccgaggctgctgccaccgctgagcaataacctaggctgctgccaccgctgagcaataactagcataaccccttggggcctctaaacgggtcttgaggggttttttgctgaaacctcaggcatttgagaagcacacggtcacactgcttccggtagtcaataaaccggtaaaccagcaatagacataagcggctatttaacgaccctgccctgaaccgacgaccgggtcatcgtggccggatcttgcggcccctcggcttgaacgaattgttagacattatttgccgactaccttggtgatctcgcctttcacgtagtggacaaattcttccaactgatctgcgcgcgaggccaagcgatcttcttcttgtccaagataagcctgtctagcttcaagtatgacgggctgatactgggccggcaggcgctccattgcccagtcggcagcgacatccttcggcgcgattttgccggttactgcgctgtaccaaatgcgggacaacgtaagcactacatttcgctcatcgccagcccagtcgggcggcgagttccatagcgttaaggtttcatttagcgcctcaaatagatcctgttcaggaaccggatcaaagagttcctccgccgctggacctaccaaggcaacgctatgttctcttgcttttgtcagcaagatagccagatcaatgtcgatcgtggctggctcgaagatacctgcaagaatgtcattgcgctgccattctccaaattgcagttcgcgcttagctggataacgccacggaatgatgtcgtcgtgcacaacaatggtgacttctacagcgcggagaatctcgctctctccaggggaagccgaagtttccaaaaggtcgttgatcaaagctcgccgcgttgtttcatcaagccttacggtcaccgtaaccagcaaatcaatatcactgtgtggcttcaggccgccatccactgcggagccgtacaaatgtacggccagcaacgtcggttcgagatggcgctcgatgacgccaactacctctgatagttgagtcgatacttcggcgatcaccgcttccctcatactcttcctttttcaatattattgaagcatttatcagggttattgtctcatgagcggatacatatttgaatgtatttagaaaaataaacaaatagctagctcactcggtcgctacgctccgggcgtgagactgcggcgggcgctgcggacacatacaaagttacccacagattccgtggataagcaggggactaacatgtgaggcaaaacagcagggccgcgccggtggcgtttttccataggctccgccctcctgccagagttcacataaacagacgcttttccggtgcatctgtgggagccgtgaggctcaaccatgaatctgacagtacgggcgaaacccgacaggacttaaagatccccaccgtttccggcgggtcgctccctcttgcgctctcctgttccgaccctgccgtttaccggatacctgttccgcctttctcccttacgggaagtgtggcgctttctcatagctcacacactggtatctcggctcggtgtaggtcgttcgctccaagctgggctgtaagcaagaactccccgttcagcccgactgctgcgccttatccggtaactgttcacttgagtccaacccggaaaagcacggtaaaacgccactggcagcagccattggtaactgggagttcgcagaggatttgtttagctaaacacgcggttgctcttgaagtgtgcgccaaagtccggctacactggaaggacagatttggttgctgtgctctgcgaaagccagttaccacggttaagcagttccccaactgacttaaccttcgatcaaaccacctccccaggtggttttttcgtttacagggcaaaagattacgcgcagaaaaaaaggatctcaagaagatcctttgatcttttctactgaaccgctctagatttcagtgcaatttatctcttcaaatgtagcacctgaagtcagccccatacgatataagttgtaattctcatgttagtcatgccccgcgcccaccggaaggagctgactgggttgaaggctctcaagggcatcggtcgagatcccggtgcctaatgagtgagctaacttacattaattgcgttgcgc

SEQ ID NO: 114 - DNA, 4143 bp, synthetic construct
  source 1..4143: mol_type = other DNA
  misc_feature 1..4143: note = Synthetic
tttacactttatgcttccggctcgtatgttggtcgacgtggagatataccatgtttaactttaataaggagatatacatggcgaatccgaagatagtgctggcgacatccgatgtcgcttcgcgcgctctcgcgccagcagatgccgaactgttcgggaccatcattgatgcatggactcgtcgccgcatcggctcgctgcgccatacccacaaagccgtagccagggacgtctcggtgctgcgggagtttgctgcccactcaggtctgccgccttggctctggaatgaggatgcatttgactgctggtgcgatcatctcggattggagcgccggttggccaatagcacccagcggcattaccaatgctcgatccgatccttcctcgaatatctcacgacgaacgtcaagttcaggaacgagatccggcgcttgtatggcgtcgagccacgacagatttgcacggaagagaactgcatcccccataccgtcgaaaaggagtcctccaaagagcgccgagccttcacacatgaggaaatcgagttgttttttgacgggctgcggcgcgcttctgtcgaggccggccgcttcaggaccaaggattacaaccctcttcgtcgggaccgtactttctttttcaccctctactccggagggctcaggatttccgaaggcctcaacctaaacgtaaattcgtttgcgccgaatccagctttacctgaacttggcccctatggattcatcaaggtctggggcaagggaagccggggaagtgggaagcgctttcggaccgtaccggtcacccatcctgacttccctgagctcatggactggtacatcacaagagtccgccctgaattccttcatcgagcggaccccaatgaggaagccttgttcctctcggagcggggaactcgtctcaagtcgtccagcgccgacgcacgcttcaaaatcgcaactcgctattgcggcctggaaggcgaaggactgacgccacactgtctgcgccactcgagcgttacccacgaatccttgcgcttcagcatcgagatggttcgtcggaagcatggccacgcttctgcggcaacgacacaaggctatatgcacgtccccgacgttatggtcgacgacgaaatcagcagcgtcgtctcccgcgagctcgatgacgcgctcaacacacaggagaagaaagaatgagcgatacgcccaatatcagacttggttggcgcctccgcgtgcggatggcggaaaaccgaataccgaccgccacggaactcaagcgacggctcgacgcgatcggctacgacatcaccagcgcccaactctcccgaattgtggacgagcgaccggcccaggtgaaaaccgcgctactggaggctttgcttaaagtcctggggggaaccctagacgatctcatgcccgcggagggccgtgttgagcagccgagttctgcgcctcaaggtggtgaggaagttgcgccaagcccagcgccggcggccacccccacccgtaagcgcaaaccggcgcgccccgcctcggaagcagtcgatccggacgatgccggtggccccagggtacgccccttctcggtcccaccgaagaagtgaaatagcgttcctacatggctggcgaacttaccgttcggaaaaatccatacgccagcggtcagccgtggtggctctatatgctcgaatgcaagggcggaggcatctacaccggcatcgcgctggatgtggatgcgcggtttgagcaacacgtcgcaggcaagggcgccaaatacacgcgcatgaaccggcccatccgggtcgtcgcgcgcatccgctacgacacgcaccgggaagccgctcaggctgaagttgcgctgaaacgcctcaagcccctggaaaagctgcggtgggcctatgccttggctgggttagtcggcatggacaagtcggcgtaacgcgtggggcgtctccggatcgttgaggggcaaaagcatcgcggcccccgaggctgctgccaccgctgagcaataacctaggctgctgccaccgctgagcaataactagcataaccccttggggcctctaaacgggtcttgaggggttttttgctgaaacctcaggcatttgagaagcacacggtcacactgcttccggtagtcaataaaccggtaaaccagcaatagacataagcggctatttaacgaccctgccctgaaccgacgaccgggtcatcgtggccggatcttgcggcccctcggcttgaacgaattgttagacattatttgccgactaccttggtgatctcgcctttcacgtagtggacaaattcttccaactgatctgcgcgcgaggccaagcgatcttcttcttgtccaagataagcctgtctagcttcaagtatgacgggctgatactgggccggcaggcgctccattgcccagtcggcagcgacatccttcggcgcgattttgccggttactgcgctgtaccaaatgcgggacaacgtaagcactacatttcgctcatcgccagcccagtcgggcggcgagttccatagcgttaaggtttcatttagcgcctcaaatagatcctgttcaggaaccggatcaaagagttcctccgccgctggacctaccaaggcaacgctatgttctcttgcttttgtcagcaagatagccagatcaatgtcgatcgtggctggctcgaagatacctgcaagaatgtcattgcgctgccattctccaaattgcagttcgcgcttagctggataacgccacggaatgatgtcgtcgtgcacaacaatggtgacttctacagcgcggagaatctcgctctctccaggggaagccgaagtttccaaaaggtcgttgatcaaagctcgccgcgttgtttcatcaagccttacggtcaccgtaaccagcaaatcaatatcactgtgtggcttcaggccgccatccactgcggagccgtacaaatgtacggccagcaacgtcggttcgagatggcgctcgatgacgccaactacctctgatagttgagtcgatacttcggcgatcaccgcttccctcatactcttcctttttcaatattattgaagcatttatcagggttattgtctcatgagcggatacatatttgaatgtatttagaaaaataaacaaatagctagctcactcggtcgctacgctccgggcgtgagactgcggcgggcgctgcggacacatacaaagttacccacagattccgtggataagcaggggactaacatgtgaggcaaaacagcagggccgcgccggtggcgtttttccataggctccgccctcctgccagagttcacataaacagacgcttttccggtgcatctgtgggagccgtgaggctcaaccatgaatctgacagtacgggcgaaacccgacaggacttaaagatccccaccgtttccggcgggtcgctccctcttgcgctctcctgttccgaccctgccgtttaccggatacctgttccgcctttctcccttacgggaagtgtggcgctttctcatagctcacacactggtatctcggctcggtgtaggtcgttcgctccaagctgggctgtaagcaagaactccccgttcagcccgactgctgcgccttatccggtaactgttcacttgagtccaacccggaaaagcacggtaaaacgccactggcagcagccattggtaactgggagttcgcagaggatttgtttagctaaacacgcggttgctcttgaagtgtgcgccaaagtccggctacactggaaggacagatttggttgctgtgctctgcgaaagccagttaccacggttaagcagttccccaactgacttaaccttcgatcaaaccacctccccaggtggttttttcgtttacagggcaaaagattacgcgcagaaaaaaaggatctcaagaagatcctttgatcttttctactgaaccgctctagatttcagtgcaatttatctcttcaaatgtagcacctgaagtcagccccatacgatataagttgtaattctcatgttagtcatgccccgcgcccaccggaaggagctgactgggttgaaggctctcaagggcatcggtcgagatcccggtgcctaatgagtgagctaacttacattaattgcgttgcgc

SEQ ID NO: 115 - DNA, 5646 bp, synthetic construct
  source 1..5646: mol_type = other DNA
  misc_feature 1..5646: note = Synthetic
tttacactttatgcttccggctcgtatgttggtcgacgtggagatataccatgtttaactttaataaggagatatacatggcgaatccgaagatagtgctggcgacatccgatgtcgcttcgcgcgctctcgcgccagcagatgccgaactgttcgggaccatcattgatgcatggactcgtcgccgcatcggctcgctgcgccatacccacaaagccgtagccagggacgtctcggtgctgcgggagtttgctgcccactcaggtctgccgccttggctctggaatgaggatgcatttgactgctggtgcgatcatctcggattggagcgccggttggccaatagcacccagcggcattaccaatgctcgatccgatccttcctcgaatatctcacgacgaacgtcaagttcaggaacgagatccggcgcttgtatggcgtcgagccacgacagatttgcacggaagagaactgcatcccccataccgtcgaaaaggagtcctccaaagagcgccgagccttcacacatgaggaaatcgagttgttttttgacgggctgcggcgcgcttctgtcgaggccggccgcttcaggaccaaggattacaaccctcttcgtcgggaccgtactttctttttcaccctctactccggagggctcaggatttccgaaggcctcaacctaaacgtaaattcgtttgcgccgaatccagctttacctgaacttggcccctatggattcatcaaggtctggggcaagggaagccggggaagtgggaagcgctttcggaccgtaccggtcacccatcctgacttccctgagctcatggactggtacatcacaagagtccgccctgaattccttcatcgagcggaccccaatgaggaagccttgttcctctcggagcggggaactcgtctcaagtcgtccagcgccgacgcacgcttcaaaatcgcaactcgctattgcggcctggaaggcgaaggactgacgccacactgtctgcgccactcgagcgttacccacgaatccttgcgcttcagcatcgagatggttcgtcggaagcatggccacgcttctgcggcaacgacacaaggctatatgcacgtccccgacgttatggtcgacgacgaaatcagcagcgtcgtctcccgcgagctcgatgacgcgctcaacacacaggagaagaaagaatgagcgatacgcccaatatcagacttggttggcgcctccgcgtgcggatggcggaaaaccgaataccgaccgccacggaactcaagcgacggctcgacgcgatcggctacgacatcaccagcgcccaactctcccgaattgtggacgagcgaccggcccaggtgaaaaccgcgctactggaggctttgcttaaagtcctggggggaaccctagacgatctcatgcccgcggagggccgtgttgagcagccgagttctgcgcctcaaggtggtgaggaagttgcgccaagcccagcgccggcggccacccccacccgtaagcgcaaaccggcgcgccccgcctcggaagcagtcgatccggacgatgccggtggccccagggtacgccccttctcggtcccaccgaagaagtgaaatagcgttcctacatggcgacctctgctcatacctgttgcgatgaatgcagccgtccgatggccaaggcgcgtctcgtccggaacgggaaggccttgtgcgacacctgcagccagcggattccctacgccccttgtggcaagtgcggaaagcagacgcgcatgctcaatgaccaaggggaaccgctctgcaaggtctgccgtgccctcaaccgcacctgcgtgcgttgcggcaagccagtgcgcaaggctgggcgcttggtcgatggcggtgctgtctgcggcccctgcgccaagtattaccgtgaaccgcaggcctgcgatcaatgtggggcaatggagaaggttcttaccggcgtacagacagaaactgggcggcgccgtctctgcggcaggtgtttccggcgccataaaggctacaagagctgcagcatctgccggaaagacaggctgcctgtcggcgtgaccgctgacggcaagcctatatgcaaaacctgtttgagtgcggccggaaaacctttcgtgtgcccaacctgtggccaggaaggaatacgccatagtagaaggcgttgccagaagtgctacgttcgcgatacggcgaaaagccgtgtcgaggaatatgctcccctttttagtcatgcatggacccgggaagcctggctgggatttggtgcagagaccctggaggcaatgaatccagaaaagctagtgcatcgaatcaacagctactacctcttcttcgtccggcttgatctcgccttcagcaaacctacagaaatcacgccggtcgcgctgttgaaaagcgtcggcggcttggatgggctccgtcgatacaccgtgccctatggctatctcctgaagcaccgaatcatccccgagacaacgcgcagtctcctgcaggacgaggctgaatccatcaggcaggaagccatgatcgccaagctggatggcaagtggtatgccccagtcatggcacgctaccggaatcacctgctgactgtccgcgcccgatacgacagccggggctggaaaggggaagatacccggatgaaggcgcgctcgattacgctcaacctccgggcggctcggcgtttatgcgaaacgctggatgccataggtgtccagatgattcagcagacgacgccagagatgctggacaagttcttcatggactatcctggactggccgtctcaatccgtgccttcgtccgatacctgaaccggaaggaaaaactctttcagcgcctgcgcctgaagacagttgcccggagtgtgccggaagggattttcctgccccgcgaaaaatccactgcgctcattcaagcgtggatgacgccgactgatgagacgcttcggcagtccctcatcggcctgttcatgctgctctatgcccagacggtcaagaactgtgttcggcttcgtctggatgcactcatccaacgggctgacgggcgttatcgcatagcatttggccgcgcggaaatccacctggatgctcggatcagcgcgatactcgatcgctatttgaacgtgcggcaaacactggttgctctggaccatgccgacgaaaatccgtatctctttccgggacggcagttaggcagtcacctgagtgccgaatcggtatccggttggttgaaaaaggcgggcgtcagctccgatcagttgtttgcaacatcaatctataacgcctatcaaaatggcctgcgacttcccaaggtcttggtgcgagcgtttggcatcaccgatacgaccgcgatcaagtatctcaacatgctggatccccgcctggtcatggagatcgaacgcaaaccactgggcggcggggacgaaccctgacgcgtggggcgtctccggatcgttgaggggcaaaagcatcgcggcccccgaggctgctgccaccgctgagcaataacctaggctgctgccaccgctgagcaataactagcataaccccttggggcctctaaacgggtcttgaggggttttttgctgaaacctcaggcatttgagaagcacacggtcacactgcttccggtagtcaataaaccggtaaaccagcaatagacataagcggctatttaacgaccctgccctgaaccgacgaccgggtcatcgtggccggatcttgcggcccctcggcttgaacgaattgttagacattatttgccgactaccttggtgatctcgcctttcacgtagtggacaaattcttccaactgatctgcgcgcgaggccaagcgatcttcttcttgtccaagataagcctgtctagcttcaagtatgacgggctgatactgggccggcaggcgctccattgcccagtcggcagcgacatccttcggcgcgattttgccggttactgcgctgtaccaaatgcgggacaacgtaagcactacatttcgctcatcgccagcccagtcgggcggcgagttccatagcgttaaggtttcatttagcgcctcaaatagatcctgttcaggaaccggatcaaagagttcctccgccgctggacctaccaaggcaacgctatgttctcttgcttttgtcagcaagatagccagatcaatgtcgatcgtggctggctcgaagatacctgcaagaatgtcattgcgctgccattctccaaattgcagttcgcgcttagctggataacgccacggaatgatgtcgtcgtgcacaacaatggtgacttctacagcgcggagaatctcgctctctccaggggaagccgaagtttccaaaaggtcgttgatcaaagctcgccgcgttgtttcatcaagccttacggtcaccgtaaccagcaaatcaatatcactgtgtggcttcaggccgccatccactgcggagccgtacaaatgtacggccagcaacgtcggttcgagatggcgctcgatgacgccaactacctctgatagttgagtcgatacttcggcgatcaccgcttccctcatactcttcctttttcaatattattgaagcatttatcagggttattgtctcatgagcggatacatatttgaatgtatttagaaaaataaacaaatagctagctcactcggtcgctacgctccgggcgtgagactgcggcgggcgctgcggacacatacaaagttacccacagattccgtggataagcaggggactaacatgtgaggcaaaacagcagggccgcgccggtggcgtttttccataggctccgccctcctgccagagttcacataaacagacgcttttccggtgcatctgtgggagccgtgaggctcaaccatgaatctgacagtacgggcgaaacccgacaggacttaaagatccccaccgtttccggcgggtcgctccctcttgcgctctcctgttccgaccctgccgtttaccggatacctgttccgcctttctcccttacgggaagtgtggcgctttctcatagctcacacactggtatctcggctcggtgtaggtcgttcgctccaagctgggctgtaagcaagaactccccgttcagcccgactgctgcgccttatccggtaactgttcacttgagtccaacccggaaaagcacggtaaaacgccactggcagcagccattggtaactgggagttcgcagaggatttgtttagctaaacacgcggttgctcttgaagtgtgcgccaaagtccggctacactggaaggacagatttggttgctgtgctctgcgaaagccagttaccacggttaagcagttccccaactgacttaaccttcgatcaaaccacctccccaggtggttttttcgtttacagggcaaaagattacgcgcagaaaaaaaggatctcaagaagatcctttgatcttttctactgaaccgctctagatttcagtgcaatttatctcttcaaatgtagcacctgaagtcagccccatacgatataagttgtaattctcatgttagtcatgccccgcgcccaccggaaggagctgactgggttgaaggctctcaagggcatcggtcgagatcccggtgcctaatgagtgagctaacttacattaattgcgttgcgc

SEQ ID NO: 116 - DNA, 5966 bp, synthetic construct
  misc_feature 1..5966: note = Synthetic
  source 1..5966: mol_type = other DNA
tttacactttatgcttccggctcgtatgttggtcgacgtggagatataccatgtttaactttaataaggagatatacatggcgaatccgaagatagtgctggcgacatccgatgtcgcttcgcgcgctctcgcgccagcagatgccgaactgttcgggaccatcattgatgcatggactcgtcgccgcatcggctcgctgcgccatacccacaaagccgtagccagggacgtctcggtgctgcgggagtttgctgcccactcaggtctgccgccttggctctggaatgaggatgcatttgactgctggtgcgatcatctcggattggagcgccggttggccaatagcacccagcggcattaccaatgctcgatccgatccttcctcgaatatctcacgacgaacgtcaagttcaggaacgagatccggcgcttgtatggcgtcgagccacgacagatttgcacggaagagaactgcatcccccataccgtcgaaaaggagtcctccaaagagcgccgagccttcacacatgaggaaatcgagttgttttttgacgggctgcggcgcgcttctgtcgaggccggccgcttcaggaccaaggattacaaccctcttcgtcgggaccgtactttctttttcaccctctactccggagggctcaggatttccgaaggcctcaacctaaacgtaaattcgtttgcgccgaatccagctttacctgaacttggcccctatggattcatcaaggtctggggcaagggaagccggggaagtgggaagcgctttcggaccgtaccggtcacccatcctgacttccctgagctcatggactggtacatcacaagagtccgccctgaattccttcatcgagcggaccccaatgaggaagccttgttcctctcggagcggggaactcgtctcaagtcgtccagcgccgacgcacgcttcaaaatcgcaactcgctattgcggcctggaaggcgaaggactgacgccacactgtctgcgccactcgagcgttacccacgaatccttgcgcttcagcatcgagatggttcgtcggaagcatggccacgcttctgcggcaacgacacaaggcttcatgcacgtccccgacgttatggtcgacgacgaaatcagcagcgtcgtctcccgcgagctcgatgacgcgctcaacacacaggagaagaaagaatgagcgatacgcccaatatcagacttggttggcgcctccgcgtgcggatggcggaaaaccgaataccgaccgccacggaactcaagcgacggctcgacgcgatcggctacgacatcaccagcgcccaactctcccgaattgtggacgagcgaccggcccaggtgaaaaccgcgctactggaggctttgcttaaagtcctggggggaaccctagacgatctcatgcccgcggagggccgtgttgagcagccgagttctgcgcctcaaggtggtgaggaagttgcgccaagcccagcgccggcggccacccccacccgtaagcgcaaaccggcgcgccccgcctcggaagcagtcgatccggacgatgccggtggccccagggtacgccccttctcggtcccaccgaagaagtgaaatagcgttcctacatggcgacctctgctcatacctgttgcgatgaatgcagccgtccgatggccaaggcgcgtctcgtccggaacgggaaggccttgtgcgacacctgcagccagcggattccctacgccccttgtggcaagtgcggaaagcagacgcgcatgctcaatgaccaaggggaaccgctctgcaaggtctgccgtgccctcaaccgcacctgcgtgcgttgcggcaagccagtgcgcaaggctgggcgcttggtcgatggcggtgctgtctgcggcccctgcgccaagtattaccgtgaaccgcaggcctgcgatcaatgtggggcaatggagaaggttcttaccggcgtacagacagaaactgggcggcgccgtctctgcggcaggtgtttccggcgccataaaggctacaagagctgcagcatctgccggaaagacaggctgcctgtcggcgtgaccgctgacggcaagcctatatgcaaaacctgtttgagtgcggccggaaaacctttcgtgtgcccaacctgtggccaggaaggaatacgccatagtagaaggcgttgccagaagtgctacgttcgcgatacggcgaaaagccgtgtcgaggaatatgctcccctttttagtcatgcatggacccgggaagcctggctgggatttggtgcagagaccctggaggcaatgaatccagaaaagctagtgcatcgaatcaacagctactacctcttcttcgtccggcttgatctcgccttcagcaaacctacagaaatcacgccggtcgcgctgttgaaaagcgtcggcggcttggatgggctccgtcgatacaccgtgccctatggctatctcctgaagcaccgaatcatccccgagacaacgcgcagtctcctgcaggacgaggctgaatccatcaggcaggaagccatgatcgccaagctggatggcaagtggtatgccccagtcatggcacgctaccggaatcacctgctgactgtccgcgcccgatacgacagccggggctggaaaggggaagatacccggatgaaggcgcgctcgattacgctcaacctccgggcggctcggcgtttatgcgaaacgctggatgccataggtgtccagatgattcagcagacgacgccagagatgctggacaagttcttcatggactatcctggactggccgtctcaatccgtgccttcgtccgatacctgaaccggaaggaaaaactctttcagcgcctgcgcctgaagacagttgcccggagtgtgccggaagggattttcctgccccgcgaaaaatccactgcgctcattcaagcgtggatgacgccgactgatgagacgcttcggcagtccctcatcggcctgttcatgctgctctatgcccagacggtcaagaactgtgttcggcttcgtctggatgcactcatccaacgggctgacgggcgttatcgcatagcatttggccgcgcggaaatccacctggatgctcggatcagcgcgatactcgatcgctatttgaacgtgcggcaaacactggttgctctggaccatgccgacgaaaatccgtatctctttccgggacggcagttaggcagtcacctgagtgccgaatcggtatccggttggttgaaaaaggcgggcgtcagctccgatcagttgtttgcaacatcaatctataacgcctatcaaaatggcctgcgacttcccaaggtcttggtgcgagcgtttggcatcaccgatacgaccgcgatcaagtatctcaacatgctggatccccgcctggtcatggagatcgaacgcaaaccactgggcggcggggacgaaccctgatggctggcgaacttaccgttcggaaaaatccatacgccagcggtcagccgtggtggctctatatgctcgaatgcaagggcggaggcatctacaccggcatcgcgctggatgtggatgcgcggtttgagcaacacgtcgcaggcaagggcgccaaatacacgcgcatgaaccggcccatccgggtcgtcgcgcgcatccgctacgacacgcaccgggaagccgctcaggctgaagttgcgctgaaacgcctcaagcccctggaaaagctgcggtgggcctatgccttggctgggttagtcggcatggacaagtcggcgtaacgcgtggggcgtctccggatcgttgaggggcaaaagcatcgcggcccccgaggctgctgccaccgctgagcaataacctaggctgctgccaccgctgagcaataactagcataaccccttggggcctctaaacgggtcttgaggggttttttgctgaaacctcaggcatttgagaagcacacggtcacactgcttccggtagtcaataaaccggtaaaccagcaatagacataagcggctatttaacgaccctgccctgaaccgacgaccgggtcatcgtggccggatcttgcggcccctcggcttgaacgaattgttagacattatttgccgactaccttggtgatctcgcctttcacgtagtggacaaattcttccaactgatctgcgcgcgaggccaagcgatcttcttcttgtccaagataagcctgtctagcttcaagtatgacgggctgatactgggccggcaggcgctccattgcccagtcggcagcgacatccttcggcgcgattttgccggttactgcgctgtaccaaatgcgggacaacgtaagcactacatttcgctcatcgccagcccagtcgggcggcgagttccatagcgttaaggtttcatttagcgcctcaaatagatcctgttcaggaaccggatcaaagagttcctccgccgctggacctaccaaggcaacgctatgttctcttgcttttgtcagcaagatagccagatcaatgtcgatcgtggctggctcgaagatacctgcaagaatgtcattgcgctgccattctccaaattgcagttcgcgcttagctggataacgccacggaatgatgtcgtcgtgcacaacaatggtgacttctacagcgcggagaatctcgctctctccaggggaagccgaagtttccaaaaggtcgttgatcaaagctcgccgcgttgtttcatcaagccttacggtcaccgtaaccagcaaatcaatatcactgtgtggcttcaggccgccatccactgcggagccgtacaaatgtacggccagcaacgtcggttcgagatggcgctcgatgacgccaactacctctgatagttgagtcgatacttcggcgatcaccgcttccctcatactcttcctttttcaatattattgaagcatttatcagggttattgtctcatgagcggatacatatttgaatgtatttagaaaaataaacaaatagctagctcactcggtcgctacgctccgggcgtgagactgcggcgggcgctgcggacacatacaaagttacccacagattccgtggataagcaggggactaacatgtgaggcaaaacagcagggccgcgccggtggcgtttttccataggctccgccctcctgccagagttcacataaacagacgcttttccggtgcatctgtgggagccgtgaggctcaaccatgaatctgacagtacgggcgaaacccgacaggacttaaagatccccaccgtttccggcgggtcgctccctcttgcgctctcctgttccgaccctgccgtttaccggatacctgttccgcctttctcccttacgggaagtgtggcgctttctcatagctcacacactggtatctcggctcggtgtaggtcgttcgctccaagctgggctgtaagcaagaactccccgttcagcccgactgctgcgccttatccggtaactgttcacttgagtccaacccggaaaagcacggtaaaacgccactggcagcagccattggtaactgggagttcgcagaggatttgtttagctaaacacgcggttgctcttgaagtgtgcgccaaagtccggctacactggaaggacagatttggttgctgtgctctgcgaaagccagttaccacggttaagcagttccccaactgacttaaccttcgatcaaaccacctccccaggtggttttttcgtttacagggcaaaagattacgcgcagaaaaaaaggatctcaagaagatcctttgatcttttctactgaaccgctctagatttcagtgcaatttatctcttcaaatgtagcacctgaagtcagccccatacgatataagttgtaattctcatgttagtcatgccccgcgcccaccggaaggagctgactgggttgaaggctctcaagggcatcggtcgagatcccggtgcctaatgagtgagctaacttacattaattgcgttgcgc

SEQ ID NO: 117 - DNA, 5966 bp, synthetic construct
  source 1..5966: mol_type = other DNA
  misc_feature 1..5966: note = Synthetic
tttacactttatgcttccggctcgtatgttggtcgacgtggagatataccatgtttaactttaataaggagatatacatggcgaatccgaagatagtgctggcgacatccgatgtcgcttcgcgcgctctcgcgccagcagatgccgaactgttcgggaccatcattgatgcatggactcgtcgccgcatcggctcgctgcgccatacccacaaagccgtagccagggacgtctcggtgctgcgggagtttgctgcccactcaggtctgccgccttggctctggaatgaggatgcatttgactgctggtgcgatcatctcggattggagcgccggttggccaatagcacccagcggcattaccaatgctcgatccgatccttcctcgaatatctcacgacgaacgtcaagttcaggaacgagatccggcgcttgtatggcgtcgagccacgacagatttgcacggaagagaactgcatcccccataccgtcgaaaaggagtcctccaaagagcgccgagccttcacacatgaggaaatcgagttgttttttgacgggctgcggcgcgcttctgtcgaggccggccgcttcaggaccaaggattacaaccctcttcgtcgggaccgtactttctttttcaccctctactccggagggctcaggatttccgaaggcctcaacctaaacgtaaattcgtttgcgccgaatccagctttacctgaacttggcccctatggattcatcaaggtctggggcaagggaagccggggaagtgggaagcgctttcggaccgtaccggtcacccatcctgacttccctgagctcatggactggtacatcacaagagtccgccctgaattccttcatcgagcggaccccaatgaggaagccttgttcctctcggagcggggaactcgtctcaagtcgtccagcgccgacgcacgcttcaaaatcgcaactcgctattgcggcctggaaggcgaaggactgacgccacactgtctgcgccactcgagcgttacccacgaatccttgcgcttcagcatcgagatggttcgtcggaagcatggccacgcttctgcggcaacgacacaaggctatatgcacgtccccgacgttatggtcgacgacgaaatcagcagcgtcgtctcccgcgagctcgatgacgcgctcaacacacaggagaagaaagaatgagcgatacgcccaatatcagacttggttggcgcctccgcgtgcggatggcggaaaaccgaataccgaccgccacggaactcaagcgacggctcgacgcgatcggctacgacatcaccagcgcccaactctcccgaattgtggacgagcgaccggcccaggtgaaaaccgcgctactggaggctttgcttaaagtcctggggggaaccctagacgatctcatgcccgcggagggccgtgttgagcagccgagttctgcgcctcaaggtggtgaggaagttgcgccaagcccagcgccggcggccacccccacccgtaagcgcaaaccggcgcgccccgcctcggaagcagtcgatccggacgatgccggtggccccagggtacgccccttctcggtcccaccgaagaagtgaaatagcgttcctacatggcgacctctgctcatacctgttgcgatgaatgcagccgtccgatggccaaggcgcgtctcgtccggaacgggaaggccttgtgcgacacctgcagccagcggattccctacgccccttgtggcaagtgcggaaagcagacgcgcatgctcaatgaccaaggggaaccgctctgcaaggtctgccgtgccctcaaccgcacctgcgtgcgttgcggcaagccagtgcgcaaggctgggcgcttggtcgatggcggtgctgtctgcggcccctgcgccaagtattaccgtgaaccgcaggcctgcgatcaatgtggggcaatggagaaggttcttaccggcgtacagacagaaactgggcggcgccgtctctgcggcaggtgtttccggcgccataaaggctacaagagctgcagcatctgccggaaagacaggctgcctgtcggcgtgaccgctgacggcaagcctatatgcaaaacctgtttgagtgcggccggaaaacctttcgtgtgcccaacctgtggccaggaaggaatacgccatagtagaaggcgttgccagaagtgctacgttcgcgatacggcgaaaagccgtgtcgaggaatatgctcccctttttagtcatgcatggacccgggaagcctggctgggatttggtgcagagaccctggaggcaatgaatccagaaaagctagtgcatcgaatcaacagctactacctcttcttcgtccggcttgatctcgccttcagcaaacctacagaaatcacgccggtcgcgctgttgaaaagcgtcggcggcttggatgggctccgtcgatacaccgtgccctatggctatctcctgaagcaccgaatcatccccgagacaacgcgcagtctcctgcaggacgaggctgaatccatcaggcaggaagccatgatcgccaagctggatggcaagtggtatgccccagtcatggcacgctaccggaatcacctgctgactgtccgcgcccgatacgacagccggggctggaaaggggaagatacccggatgaaggcgcgctcgattacgctcaacctccgggcggctcggcgtttatgcgaaacgctggatgccataggtgtccagatgattcagcagacgacgccagagatgctggacaagttcttcatggactatcctggactggccgtctcaatccgtgccttcgtccgatacctgaaccggaaggaaaaactctttcagcgcctgcgcctgaagacagttgcccggagtgtgccggaagggattttcctgccccgcgaaaaatccactgcgctcattcaagcgtggatgacgccgactgatgagacgcttcggcagtccctcatcggcctgttcatgctgctctatgcccagacggtcaagaactgtgttcggcttcgtctggatgcactcatccaacgggctgacgggcgttatcgcatagcatttggccgcgcggaaatccacctggatgctcggatcagcgcgatactcgatcgctatttgaacgtgcggcaaacactggttgctctggaccatgccgacgaaaatccgtatctctttccgggacggcagttaggcagtcacctgagtgccgaatcggtatccggttggttgaaaaaggcgggcgtcagctccgatcagttgtttgcaacatcaatctataacgcctatcaaaatggcctgcgacttcccaaggtcttggtgcgagcgtttggcatcaccgatacgaccgcgatcaagttcctcaacatgctggatccccgcctggtcatggagatcgaacgcaaaccactgggcggcggggacgaaccctgatggctggcgaacttaccgttcggaaaaatccatacgccagcggtcagccgtggtggctctatatgctcgaatgcaagggcggaggcatctacaccggcatcgcgctggatgtggatgcgcggtttgagcaacacgtcgcaggcaagggcgccaaatacacgcgcatgaaccggcccatccgggtcgtcgcgcgcatccgctacgacacgcaccgggaagccgctcaggctgaagttgcgctgaaacgcctcaagcccctggaaaagctgcggtgggcctatgccttggctgggttagtcggcatggacaagtcggcgtaacgcgtggggcgtctccggatcgttgaggggcaaaagcatcgcggcccccgaggctgctgccaccgctgagcaataacctaggctgctgccaccgctgagcaataactagcataaccccttggggcctctaaacgggtcttgaggggttttttgctgaaacctcaggcatttgagaagcacacggtcacactgcttccggtagtcaataaaccggtaaaccagcaatagacataagcggctatttaacgaccctgccctgaaccgacgaccgggtcatcgtggccggatcttgcggcccctcggcttgaacgaattgttagacattatttgccgactaccttggtgatctcgcctttcacgtagtggacaaattcttccaactgatctgcgcgcgaggccaagcgatcttcttcttgtccaagataagcctgtctagcttcaagtatgacgggctgatactgggccggcaggcgctccattgcccagtcggcagcgacatccttcggcgcgattttgccggttactgcgctgtaccaaatgcgggacaacgtaagcactacatttcgctcatcgccagcccagtcgggcggcgagttccatagcgttaaggtttcatttagcgcctcaaatagatcctgttcaggaaccggatcaaagagttcctccgccgctggacctaccaaggcaacgctatgttctcttgcttttgtcagcaagatagccagatcaatgtcgatcgtggctggctcgaagatacctgcaagaatgtcattgcgctgccattctccaaattgcagttcgcgcttagctggataacgccacggaatgatgtcgtcgtgcacaacaatggtgacttctacagcgcggagaatctcgctctctccaggggaagccgaagtttccaaaaggtcgttgatcaaagctcgccgcgttgtttcatcaagccttacggtcaccgtaaccagcaaatcaatatcactgtgtggcttcaggccgccatccactgcggagccgtacaaatgtacggccagcaacgtcggttcgagatggcgctcgatgacgccaactacctctgatagttgagtcgatacttcggcgatcaccgcttccctcatactcttcctttttcaatattattgaagcatttatcagggttattgtctcatgagcggatacatatttgaatgtatttagaaaaataaacaaatagctagctcactcggtcgctacgctccgggcgtgagactgcggcgggcgctgcggacacatacaaagttacccacagattccgtggataagcaggggactaacatgtgaggcaaaacagcagggccgcgccggtggcgtttttccataggctccgccctcctgccagagttcacataaacagacgcttttccggtgcatctgtgggagccgtgaggctcaaccatgaatctgacagtacgggcgaaacccgacaggacttaaagatccccaccgtttccggcgggtcgctccctcttgcgctctcctgttccgaccctgccgtttaccggatacctgttccgcctttctcccttacgggaagtgtggcgctttctcatagctcacacactggtatctcggctcggtgtaggtcgttcgctccaagctgggctgtaagcaagaactccccgttcagcccgactgctgcgccttatccggtaactgttcacttgagtccaacccggaaaagcacggtaaaacgccactggcagcagccattggtaactgggagttcgcagaggatttgtttagctaaacacgcggttgctcttgaagtgtgcgccaaagtccggctacactggaaggacagatttggttgctgtgctctgcgaaagccagttaccacggttaagcagttccccaactgacttaaccttcgatcaaaccacctccccaggtggttttttcgtttacagggcaaaagattacgcgcagaaaaaaaggatctcaagaagatcctttgatcttttctactgaaccgctctagatttcagtgcaatttatctcttcaaatgtagcacctgaagtcagccccatacgatataagttgtaattctcatgttagtcatgccccgcgcccaccggaaggagctgactgggttgaaggctctcaagggcatcggtcgagatcccggtgcctaatgagtgagctaacttacattaattgcgttgcgc

SEQ ID NO: 118 - DNA, 2431 bp, synthetic construct
  misc_feature 1..2431: note = Synthetic
  source 1..2431: mol_type = other DNA
gagagtgcaccatacaggaaacagctatgaccatgattacgccaagctcggcgcgccattgggattcggtcgaattcggactgggattctccaatattccttagcgcttccaataaagagcgcttttgaagctgatgtgcttaaaaacttactcaatggaataattctagataattcactagtgattggaaatgttggatcctcatactcttcctttttcaattcagaagaactcgtcaagaaggcgatagaaggcgatgcgctgcgaatcgggagcggcgataccgtaaagcacgaggaagcggtcagcccattcgccgccaagctcttcagcaatatcacgggtagccaacgctatgtcctgatagcggtccgccacacccagccggccacagtcgatgaatccagaaaagcggccattttccaccatgatattcggcaagcaggcatcgccatgggtcacgacgagatcctcgccgtcgggcatgcgcgccttgagcctggcgaacagttcggctggcgcgagcccctgatgctcttcgtccagatcatcctgatcgacaagaccggcttccatccgagtacgtgctcgctcgatgcgatgtttcgcttggtggtcgaatgggcaggtagccggatcaagcgtatgcagccgccgcattgcatcagccatgatggatactttctcggcaggagcaaggtgggatgacaggagatcctgccccggcacttcgcccaatagcagccagtcccttcccgcttcagtgacaacgtcgagcacagctgcgcaaggaacgcccgtcgtggccagccacgatagccgcgctgcctcgtcctgcagttcattcagggcaccggacaggtcggtcttgacaaaaagaaccgggcgcccctgcgctgacagccggaacacggcggcatcagagcagccgattgtctgttgtgcccagtcatagccgaatagcctctccacccaagcggccggagaacctgcgtgcaatccatcttgttcaatcatgcgaaacgatcctcatcctgtctcttgatcagatcttgatcccctgcgccatcagatccttggcggcaagaaagccatccagtttactttgcagggcttcccaaccttaccagagggcgccccagctggcaattccggttcgcttgctgtccataaaaccgcccagtctagctatcgccatgtaagcccactgcaagctacctgctttctctttgcgcttgcgttttcccttgtccagatagcccagtagctgacattcatccggggtcagcaccgtttctgcggactggctttctacgtgttccgcttcctttagcagcccttgcgccatgcatttgttaaatcgaattatccattgctgttgacaaagggaatcaggggatcttgaagttcctattccgaagttcctattctctagaaagtataggaacttcagagcgcttttgaagctaattcgagatcatgcatgagctcactagtggatccccccgactacttctaatgctgtgacatcactcacaggattcctgcaagtaatgcgacattggatactttgggattcctttatagtcagtgggttatccgaatttttgccttgttcgttgctacattggctaaatcagaacttcggcagctcgtcatcccaatacgcgtcaattcactggccgtcgttttactactttccgctgcataaccctgcttcggggtcattatagcgattttttcggtatatccatcctttttcgcacgatatacaggattttgccaaagggttcgtgtagactttccttggtgtatccaacggcgtcagccgggcaggataggtgaagtaggcccacccgcgagcgggtgttccttcttcactgtcccttattcgcacctggcggtgctcaacgggaatcctgctctgcgaggctggccgataagctctgataacgcaggaaagaacatgggcagttcaacctgttgatagtacgtactaagctctcatgtttcacgtactaagctctcaagtttaacgtactaagctctcatgtttaacgaactaaaccctcatggctaacgtactaagctctcatggctaacgtactaagctctcatgtttcacgtactaagctctcatgtttgaacaataaaattaatataaatcagcaacttaaatagcctctaaggttttaagttttataagaaaaaaaagaatatataaggcttttaaagcttttaaggtttaacggttgtggacaacaagccagggatgtaacgcactgagaagcccttagagcctctcaaagcaattttgagtgacacaggaacacttaacggctgacaaccggctggtaacaggattagcagagcgaggtatgtaggcggtgctacaagattgtactgagagtgcaccatacaggaaacagc

SEQ ID NO: 119 - DNA, 2407 bp, synthetic construct
  misc_feature 1..2407: note = Synthetic
  source 1..2407: mol_type = other DNA
gagagtgcaccatacaggaaacagctatgaccatgattacgccaagctcggcgcgccattgggatggactgggattctccaatattccttagcgcttccaataaagagcgcttttgaagctgatgtgcttaaaaacttactcaatggaataattctagataattcactagtgattggaaatgttggatcctcatactcttcctttttcaattcagaagaactcgtcaagaaggcgatagaaggcgatgcgctgcgaatcgggagcggcgataccgtaaagcacgaggaagcggtcagcccattcgccgccaagctcttcagcaatatcacgggtagccaacgctatgtcctgatagcggtccgccacacccagccggccacagtcgatgaatccagaaaagcggccattttccaccatgatattcggcaagcaggcatcgccatgggtcacgacgagatcctcgccgtcgggcatgcgcgccttgagcctggcgaacagttcggctggcgcgagcccctgatgctcttcgtccagatcatcctgatcgacaagaccggcttccatccgagtacgtgctcgctcgatgcgatgtttcgcttggtggtcgaatgggcaggtagccggatcaagcgtatgcagccgccgcattgcatcagccatgatggatactttctcggcaggagcaaggtgggatgacaggagatcctgccccggcacttcgcccaatagcagccagtcccttcccgcttcagtgacaacgtcgagcacagctgcgcaaggaacgcccgtcgtggccagccacgatagccgcgctgcctcgtcctgcagttcattcagggcaccggacaggtcggtcttgacaaaaagaaccgggcgcccctgcgctgacagccggaacacggcggcatcagagcagccgattgtctgttgtgcccagtcatagccgaatagcctctccacccaagcggccggagaacctgcgtgcaatccatcttgttcaatcatgcgaaacgatcctcatcctgtctcttgatcagatcttgatcccctgcgccatcagatccttggcggcaagaaagccatccagtttactttgcagggcttcccaaccttaccagagggcgccccagctggcaattccggttcgcttgctgtccataaaaccgcccagtctagctatcgccatgtaagcccactgcaagctacctgctttctctttgcgcttgcgttttcccttgtccagatagcccagtagctgacattcatccggggtcagcaccgtttctgcggactggctttctacgtgttccgcttcctttagcagcccttgcgccatgcatttgttaaatcgaattatccattgctgttgacaaagggaatcaggggatcttgaagttcctattccgaagttcctattctctagaaagtataggaacttcagagcgcttttgaagctaattcgagatcatgcatgagctcactagtggatccccccgactacttctaatgctgtgacatcactcacaggattcctgcaagtaatgcgacattggatactttgggattcctttatagtcagtgggttatccgaatttttgccttgttcgttgctacattggctaaatcagaacttatcccaatacgcgtcaattcactggccgtcgttttactactttccgctgcataaccctgcttcggggtcattatagcgattttttcggtatatccatcctttttcgcacgatatacaggattttgccaaagggttcgtgtagactttccttggtgtatccaacggcgtcagccgggcaggataggtgaagtaggcccacccgcgagcgggtgttccttcttcactgtcccttattcgcacctggcggtgctcaacgggaatcctgctctgcgaggctggccgataagctctgataacgcaggaaagaacatgggcagttcaacctgttgatagtacgtactaagctctcatgtttcacgtactaagctctcaagtttaacgtactaagctctcatgtttaacgaactaaaccctcatggctaacgtactaagctctcatggctaacgtactaagctctcatgtttcacgtactaagctctcatgtttgaacaataaaattaatataaatcagcaacttaaatagcctctaaggttttaagttttataagaaaaaaaagaatatataaggcttttaaagcttttaaggtttaacggttgtggacaacaagccagggatgtaacgcactgagaagcccttagagcctctcaaagcaattttgagtgacacaggaacacttaacggctgacaaccggctggtaacaggattagcagagcgaggtatgtaggcggtgctacaagattgtactgagagtgcaccatacaggaaacagc

SEQ ID NO: 120 - DNA, 2233 bp, synthetic construct
  misc_feature 1..2233: note = Synthetic
  source 1..2233: mol_type = other DNA
gagagtgcaccatacaggaaacagctatgaccatgattacgccaagctcggcgcgccattgggatagagcgcttttgaagctgatgtgcttaaaaacttactcaatggaataattctagataattcactagtgattggaaatgttggatcctcatactcttcctttttcaattcagaagaactcgtcaagaaggcgatagaaggcgatgcgctgcgaatcgggagcggcgataccgtaaagcacgaggaagcggtcagcccattcgccgccaagctcttcagcaatatcacgggtagccaacgctatgtcctgatagcggtccgccacacccagccggccacagtcgatgaatccagaaaagcggccattttccaccatgatattcggcaagcaggcatcgccatgggtcacgacgagatcctcgccgtcgggcatgcgcgccttgagcctggcgaacagttcggctggcgcgagcccctgatgctcttcgtccagatcatcctgatcgacaagaccggcttccatccgagtacgtgctcgctcgatgcgatgtttcgcttggtggtcgaatgggcaggtagccggatcaagcgtatgcagccgccgcattgcatcagccatgatggatactttctcggcaggagcaaggtgggatgacaggagatcctgccccggcacttcgcccaatagcagccagtcccttcccgcttcagtgacaacgtcgagcacagctgcgcaaggaacgcccgtcgtggccagccacgatagccgcgctgcctcgtcctgcagttcattcagggcaccggacaggtcggtcttgacaaaaagaaccgggcgcccctgcgctgacagccggaacacggcggcatcagagcagccgattgtctgttgtgcccagtcatagccgaatagcctctccacccaagcggccggagaacctgcgtgcaatccatcttgttcaatcatgcgaaacgatcctcatcctgtctcttgatcagatcttgatcccctgcgccatcagatccttggcggcaagaaagccatccagtttactttgcagggcttcccaaccttaccagagggcgccccagctggcaattccggttcgcttgctgtccataaaaccgcccagtctagctatcgccatgtaagcccactgcaagctacctgctttctctttgcgcttgcgttttcccttgtccagatagcccagtagctgacattcatccggggtcagcaccgtttctgcggactggctttctacgtgttccgcttcctttagcagcccttgcgccatgcatttgttaaatcgaattatccattgctgttgacaaagggaatcaggggatcttgaagttcctattccgaagttcctattctctagaaagtataggaacttcagagcgcttttgaagctaattcgagatcatgcatgagctcactagtggatccccccgacatcccaatacgcgtcaattcactggccgtcgttttactactttccgctgcataaccctgcttcggggtcattatagcgattttttcggtatatccatcctttttcgcacgatatacaggattttgccaaagggttcgtgtagactttccttggtgtatccaacggcgtcagccgggcaggataggtgaagtaggcccacccgcgagcgggtgttccttcttcactgtcccttattcgcacctggcggtgctcaacgggaatcctgctctgcgaggctggccgataagctctgataacgcaggaaagaacatgggcagttcaacctgttgatagtacgtactaagctctcatgtttcacgtactaagctctcaagtttaacgtactaagctctcatgtttaacgaactaaaccctcatggctaacgtactaagctctcatggctaacgtactaagctctcatgtttcacgtactaagctctcatgtttgaacaataaaattaatataaatcagcaacttaaatagcctctaaggttttaagttttataagaaaaaaaagaatatataaggcttttaaagcttttaaggtttaacggttgtggacaacaagccagggatgtaacgcactgagaagcccttagagcctctcaaagcaattttgagtgacacaggaacacttaacggctgacaaccggctggtaacaggattagcagagcgaggtatgtaggcggtgctacaagattgtactgagagtgcaccatacaggaaacagc

SEQ ID NO: 121 - DNA, 2381 bp, synthetic construct
  source 1..2381: mol_type = other DNA
  misc_feature 1..2381: note = Synthetic
gagagtgcaccatacaggaaacagctatgaccatgattacgccaagctcggcgcgccattgggattcggtcgaattcggactgggattctccaatattccttagcgcttccaataaagagcgcttttgaagctgatgtgcttaaaaacttactcaatggaataattctagataattcactagtgattggaaatgttggatcctcatactcttcctttttcaattcagaagaactcgtcaagaaggcgatagaaggcgatgcgctgcgaatcgggagcggcgataccgtaaagcacgaggaagcggtcagcccattcgccgccaagctcttcagcaatatcacgggtagccaacgctatgtcctgatagcggtccgccacacccagccggccacagtcgatgaatccagaaaagcggccattttccaccatgatattcggcaagcaggcatcgccatgggtcacgacgagatcctcgccgtcgggcatgcgcgccttgagcctggcgaacagttcggctggcgcgagcccctgatgctcttcgtccagatcatcctgatcgacaagaccggcttccatccgagtacgtgctcgctcgatgcgatgtttcgcttggtggtcgaatgggcaggtagccggatcaagcgtatgcagccgccgcattgcatcagccatgatggatactttctcggcaggagcaaggtgggatgacaggagatcctgccccggcacttcgcccaatagcagccagtcccttcccgcttcagtgacaacgtcgagcacagctgcgcaaggaacgcccgtcgtggccagccacgatagccgcgctgcctcgtcctgcagttcattcagggcaccggacaggtcggtcttgacaaaaagaaccgggcgcccctgcgctgacagccggaacacggcggcatcagagcagccgattgtctgttgtgcccagtcatagccgaatagcctctccacccaagcggccggagaacctgcgtgcaatccatcttgttcaatcatgcgaaacgatcctcatcctgtctcttgatcagatcttgatcccctgcgccatcagatccttggcggcaagaaagccatccagtttactttgcagggcttcccaaccttaccagagggcgccccagctggcaattccggttcgcttgctgtccataaaaccgcccagtctagctatcgccatgtaagcccactgcaagctacctgctttctctttgcgcttgcgttttcccttgtccagatagcccagtagctgacattcatccggggtcagcaccgtttctgcggactggctttctacgtgttccgcttcctttagcagcccttgcgccatgcatttgttaaatcgaattatccattgctgttgacaaagggaatcaggggatcttgaagttcctattccgaagttcctattctctagaaagtataggaacttcagagcgcttttgaagctaattcgagatcatgcatgagctcactagtggatccccccgacattggatactttgggattcctttatagtcagtgggttatccgaatttttgccttgttcgttgctacattggctaaatcagaacttcggcagctcgtcatcccaatacgcgtcaattcactggccgtcgttttactactttccgctgcataaccctgcttcggggtcattatagcgattttttcggtatatccatcctttttcgcacgatatacaggattttgccaaagggttcgtgtagactttccttggtgtatccaacggcgtcagccgggcaggataggtgaagtaggcccacccgcgagcgggtgttccttcttcactgtcccttattcgcacctggcggtgctcaacgggaatcctgctctgcgaggctggccgataagctctgataacgcaggaaagaacatgggcagttcaacctgttgatagtacgtactaagctctcatgtttcacgtactaagctctcaagtttaacgtactaagctctcatgtttaacgaactaaaccctcatggctaacgtactaagctctcatggctaacgtactaagctctcatgtttcacgtactaagctctcatgtttgaacaataaaattaatataaatcagcaacttaaatagcctctaaggttttaagttttataagaaaaaaaagaatatataaggcttttaaagcttttaaggtttaacggttgtggacaacaagccagggatgtaacgcactgagaagcccttagagcctctcaaagcaattttgagtgacacaggaacacttaacggctgacaaccggctggtaacaggattagcagagcgaggtatgtaggcggtgctacaagattgtactgagagtgcaccatacaggaaacagc

SEQ ID NO: 122 - DNA, 2331 bp, synthetic construct
  source 1..2331: mol_type = other DNA
  misc_feature 1..2331: note = Synthetic
gagagtgcaccatacaggaaacagctatgaccatgattacgccaagctcggcgcgccattgggattcggtcgaattcggactgggattctccaatattccttagcgcttccaataaagagcgcttttgaagctgatgtgcttaaaaacttactcaatggaataattctagataattcactagtgattggaaatgttggatcctcatactcttcctttttcaattcagaagaactcgtcaagaaggcgatagaaggcgatgcgctgcgaatcgggagcggcgataccgtaaagcacgaggaagcggtcagcccattcgccgccaagctcttcagcaatatcacgggtagccaacgctatgtcctgatagcggtccgccacacccagccggccacagtcgatgaatccagaaaagcggccattttccaccatgatattcggcaagcaggcatcgccatgggtcacgacgagatcctcgccgtcgggcatgcgcgccttgagcctggcgaacagttcggctggcgcgagcccctgatgctcttcgtccagatcatcctgatcgacaagaccggcttccatccgagtacgtgctcgctcgatgcgatgtttcgcttggtggtcgaatgggcaggtagccggatcaagcgtatgcagccgccgcattgcatcagccatgatggatactttctcggcaggagcaaggtgggatgacaggagatcctgccccggcacttcgcccaatagcagccagtcccttcccgcttcagtgacaacgtcgagcacagctgcgcaaggaacgcccgtcgtggccagccacgatagccgcgctgcctcgtcctgcagttcattcagggcaccggacaggtcggtcttgacaaaaagaaccgggcgcccctgcgctgacagccggaacacggcggcatcagagcagccgattgtctgttgtgcccagtcatagccgaatagcctctccacccaagcggccggagaacctgcgtgcaatccatcttgttcaatcatgcgaaacgatcctcatcctgtctcttgatcagatcttgatcccctgcgccatcagatccttggcggcaagaaagccatccagtttactttgcagggcttcccaaccttaccagagggcgccccagctggcaattccggttcgcttgctgtccataaaaccgcccagtctagctatcgccatgtaagcccactgcaagctacctgctttctctttgcgcttgcgttttcccttgtccagatagcccagtagctgacattcatccggggtcagcaccgtttctgcggactggctttctacgtgttccgcttcctttagcagcccttgcgccatgcatttgttaaatcgaattatccattgctgttgacaaagggaatcaggggatcttgaagttcctattccgaagttcctattctctagaaagtataggaacttcagagcgcttttgaagctaattcgagatcatgcatgagctcactagtggatccccccgacccttgttcgttgctacattggctaaatcagaacttcggcagctcgtcatcccaatacgcgtcaattcactggccgtcgttttactactttccgctgcataaccctgcttcggggtcattatagcgattttttcggtatatccatcctttttcgcacgatatacaggattttgccaaagggttcgtgtagactttccttggtgtatccaacggcgtcagccgggcaggataggtgaagtaggcccacccgcgagcgggtgttccttcttcactgtcccttattcgcacctggcggtgctcaacgggaatcctgctctgcgaggctggccgataagctctgataacgcaggaaagaacatgggcagttcaacctgttgatagtacgtactaagctctcatgtttcacgtactaagctctcaagtttaacgtactaagctctcatgtttaacgaactaaaccctcatggctaacgtactaagctctcatggctaacgtactaagctctcatgtttcacgtactaagctctcatgtttgaacaataaaattaatataaatcagcaacttaaatagcctctaaggttttaagttttataagaaaaaaaagaatatataaggcttttaaagcttttaaggtttaacggttgtggacaacaagccagggatgtaacgcactgagaagcccttagagcctctcaaagcaattttgagtgacacaggaacacttaacggctgacaaccggctggtaacaggattagcagagcgaggtatgtaggcggtgctacaagattgtactgagagtgcaccatacaggaaacagc

SEQ ID NO: 123 - DNA, 2296 bp, synthetic construct
  source 1..2296: mol_type = other DNA
  misc_feature 1..2296: note = Synthetic
gagagtgcaccatacaggaaacagctatgaccatgattacgccaagctcggcgcgccattgggattcggtcgaattcggactgggattctccaatattccttagcgcttccaataaagagcgcttttgaagctgatgtgcttaaaaacttactcaatggaataattctagataattcactagtgattggaaatgttggatcctcatactcttcctttttcaattcagaagaactcgtcaagaaggcgatagaaggcgatgcgctgcgaatcgggagcggcgataccgtaaagcacgaggaagcggtcagcccattcgccgccaagctcttcagcaatatcacgggtagccaacgctatgtcctgatagcggtccgccacacccagccggccacagtcgatgaatccagaaaagcggccattttccaccatgatattcggcaagcaggcatcgccatgggtcacgacgagatcctcgccgtcgggcatgcgcgccttgagcctggcgaacagttcggctggcgcgagcccctgatgctcttcgtccagatcatcctgatcgacaagaccggcttccatccgagtacgtgctcgctcgatgcgatgtttcgcttggtggtcgaatgggcaggtagccggatcaagcgtatgcagccgccgcattgcatcagccatgatggatactttctcggcaggagcaaggtgggatgacaggagatcctgccccggcacttcgcccaatagcagccagtcccttcccgcttcagtgacaacgtcgagcacagctgcgcaaggaacgcccgtcgtggccagccacgatagccgcgctgcctcgtcctgcagttcattcagggcaccggacaggtcggtcttgacaaaaagaaccgggcgcccctgcgctgacagccggaacacggcggcatcagagcagccgattgtctgttgtgcccagtcatagccgaatagcctctccacccaagcggccggagaacctgcgtgcaatccatcttgttcaatcatgcgaaacgatcctcatcctgtctcttgatcagatcttgatcccctgcgccatcagatccttggcggcaagaaagccatccagtttactttgcagggcttcccaaccttaccagagggcgccccagctggcaattccggttcgcttgctgtccataaaaccgcccagtctagctatcgccatgtaagcccactgcaagctacctgctttctctttgcgcttgcgttttcccttgtccagatagcccagtagctgacattcatccggggtcagcaccgtttctgcggactggctttctacgtgttccgcttcctttagcagcccttgcgccatgcatttgttaaatcgaattatccattgctgttgacaaagggaatcaggggatcttgaagttcctattccgaagttcctattctctagaaagtataggaacttcagagcgcttttgaagctaattcgagatcatgcatgagctcactagtggatccccccgaccggcagctcgtcatcccaatacgcgtcaattcactggccgtcgttttactactttccgctgcataaccctgcttcggggtcattatagcgattttttcggtatatccatcctttttcgcacgatatacaggattttgccaaagggttcgtgtagactttccttggtgtatccaacggcgtcagccgggcaggataggtgaagtaggcccacccgcgagcgggtgttccttcttcactgtcccttattcgcacctggcggtgctcaacgggaatcctgctctgcgaggctggccgataagctctgataacgcaggaaagaacatgggcagttcaacctgttgatagtacgtactaagctctcatgtttcacgtactaagctctcaagtttaacgtactaagctctcatgtttaacgaactaaaccctcatggctaacgtactaagctctcatggctaacgtactaagctctcatgtttcacgtactaagctctcatgtttgaacaataaaattaatataaatcagcaacttaaatagcctctaaggttttaagttttataagaaaaaaaagaatatataaggcttttaaagcttttaaggtttaacggttgtggacaacaagccagggatgtaacgcactgagaagcccttagagcctctcaaagcaattttgagtgacacaggaacacttaacggctgacaaccggctggtaacaggattagcagagcgaggtatgtaggcggtgctacaagattgtactgagagtgcaccatacaggaaacagc

SEQ ID NO: 124 - DNA, 2411 bp, synthetic construct
  misc_feature 1..2411: note = Synthetic
  source 1..2411: mol_type = other DNA
gagagtgcaccatacaggaaacagctatgaccatgattacgccaagctcggcgcgccattgggattcggtcgaattcggactgggattctccaatattccttagcgcttccaataaagagcgcttttgaagctgatgtgcttaaaaacttactcaatggaataattctagataattcactagtgattggaaatgttggatcctcatactcttcctttttcaattcagaagaactcgtcaagaaggcgatagaaggcgatgcgctgcgaatcgggagcggcgataccgtaaagcacgaggaagcggtcagcccattcgccgccaagctcttcagcaatatcacgggtagccaacgctatgtcctgatagcggtccgccacacccagccggccacagtcgatgaatccagaaaagcggccattttccaccatgatattcggcaagcaggcatcgccatgggtcacgacgagatcctcgccgtcgggcatgcgcgccttgagcctggcgaacagttcggctggcgcgagcccctgatgctcttcgtccagatcatcctgatcgacaagaccggcttccatccgagtacgtgctcgctcgatgcgatgtttcgcttggtggtcgaatgggcaggtagccggatcaagcgtatgcagccgccgcattgcatcagccatgatggatactttctcggcaggagcaaggtgggatgacaggagatcctgccccggcacttcgcccaatagcagccagtcccttcccgcttcagtgacaacgtcgagcacagctgcgcaaggaacgcccgtcgtggccagccacgatagccgcgctgcctcgtcctgcagttcattcagggcaccggacaggtcggtcttgacaaaaagaaccgggcgcccctgcgctgacagccggaacacggcggcatcagagcagccgattgtctgttgtgcccagtcatagccgaatagcctctccacccaagcggccggagaacctgcgtgcaatccatcttgttcaatcatgcgaaacgatcctcatcctgtctcttgatcagatcttgatcccctgcgccatcagatccttggcggcaagaaagccatccagtttactttgcagggcttcccaaccttaccagagggcgccccagctggcaattccggttcgcttgctgtccataaaaccgcccagtctagctatcgccatgtaagcccactgcaagctacctgctttctctttgcgcttgcgttttcccttgtccagatagcccagtagctgacattcatccggggtcagcaccgtttctgcggactggctttctacgtgttccgcttcctttagcagcccttgcgccatgcatttgttaaatcgaattatccattgctgttgacaaagggaatcaggggatcttgaagttcctattccgaagttcctattctctagaaagtataggaacttcagagcgcttttgaagctaattcgagatcatgcatgagctcactagtggatccccccgaccactcacaggattcctgcaagtaatgcgacattggatactttgggattcctttatagtcagtgggttatccgaatttttgccttgttcgttgctacattggctaaatcagaacttcggcagctcgtcatcccaatacgcgtcaattcactggccgtcgttttactactttccgctgcataaccctgcttcggggtcattatagcgattttttcggtatatccatcctttttcgcacgatatacaggattttgccaaagggttcgtgtagactttccttggtgtatccaacggcgtcagccgggcaggataggtgaagtaggcccacccgcgagcgggtgttccttcttcactgtcccttattcgcacctggcggtgctcaacgggaatcctgctctgcgaggctggccgataagctctgataacgcaggaaagaacatgggcagttcaacctgttgatagtacgtactaagctctcatgtttcacgtactaagctctcaagtttaacgtactaagctctcatgtttaacgaactaaaccctcatggctaacgtactaagctctcatggctaacgtactaagctctcatgtttcacgtactaagctctcatgtttgaacaataaaattaatataaatcagcaacttaaatagcctctaaggttttaagttttataagaaaaaaaagaatatataaggcttttaaagcttttaaggtttaacggttgtggacaacaagccagggatgtaacgcactgagaagcccttagagcctctcaaagcaattttgagtgacacaggaacacttaacggctgacaaccggctggtaacaggattagcagagcgaggtatgtaggcggtgctacaagattgtactgagagtgcaccatacaggaaacagc

SEQ ID NO: 125 - DNA, 2401 bp, synthetic construct
  source 1..2401: mol_type = other DNA
  misc_feature 1..2401: note = Synthetic
gagagtgcaccatacaggaaacagctatgaccatgattacgccaagctcggcgcgccattgggattcggtcgaattcggactgggattctccaatattccttagcgcttccaataaagagcgcttttgaagctgatgtgcttaaaaacttactcaatggaataattctagataattcactagtgattggaaatgttggatcctcatactcttcctttttcaattcagaagaactcgtcaagaaggcgatagaaggcgatgcgctgcgaatcgggagcggcgataccgtaaagcacgaggaagcggtcagcccattcgccgccaagctcttcagcaatatcacgggtagccaacgctatgtcctgatagcggtccgccacacccagccggccacagtcgatgaatccagaaaagcggccattttccaccatgatattcggcaagcaggcatcgccatgggtcacgacgagatcctcgccgtcgggcatgcgcgccttgagcctggcgaacagttcggctggcgcgagcccctgatgctcttcgtccagatcatcctgatcgacaagaccggcttccatccgagtacgtgctcgctcgatgcgatgtttcgcttggtggtcgaatgggcaggtagccggatcaagcgtatgcagccgccgcattgcatcagccatgatggatactttctcggcaggagcaaggtgggatgacaggagatcctgccccggcacttcgcccaatagcagccagtcccttcccgcttcagtgacaacgtcgagcacagctgcgcaaggaacgcccgtcgtggccagccacgatagccgcgctgcctcgtcctgcagttcattcagggcaccggacaggtcggtcttgacaaaaagaaccgggcgcccctgcgctgacagccggaacacggcggcatcagagcagccgattgtctgttgtgcccagtcatagccgaatagcctctccacccaagcggccggagaacctgcgtgcaatccatcttgttcaatcatgcgaaacgatcctcatcctgtctcttgatcagatcttgatcccctgcgccatcagatccttggcggcaagaaagccatccagtttactttgcagggcttcccaaccttaccagagggcgccccagctggcaattccggttcgcttgctgtccataaaaccgcccagtctagctatcgccatgtaagcccactgcaagctacctgctttctctttgcgcttgcgttttcccttgtccagatagcccagtagctgacattcatccggggtcagcaccgtttctgcggactggctttctacgtgttccgcttcctttagcagcccttgcgccatgcatttgttaaatcgaattatccattgctgttgacaaagggaatcaggggatcttgaagttcctattccgaagttcctattctctagaaagtataggaacttcagagcgcttttgaagctaattcgagatcatgcatgagctcactagtggatccccccgacattcctgcaagtaatgcgacattggatactttgggattcctttatagtcagtgggttatccgaatttttgccttgttcgttgctacattggctaaatcagaacttcggcagctcgtcatcccaatacgcgtcaattcactggccgtcgttttactactttccgctgcataaccctgcttcggggtcattatagcgattttttcggtatatccatcctttttcgcacgatatacaggattttgccaaagggttcgtgtagactttccttggtgtatccaacggcgtcagccgggcaggataggtgaagtaggcccacccgcgagcgggtgttccttcttcactgtcccttattcgcacctggcggtgctcaacgggaatcctgctctgcgaggctggccgataagctctgataacgcaggaaagaacatgggcagttcaacctgttgatagtacgtactaagctctcatgtttcacgtactaagctctcaagtttaacgtactaagctctcatgtttaacgaactaaaccctcatggctaacgtactaagctctcatggctaacgtactaagctctcatgtttcacgtactaagctctcatgtttgaacaataaaattaatataaatcagcaacttaaatagcctctaaggttttaagttttataagaaaaaaaagaatatataaggcttttaaagcttttaaggtttaacggttgtggacaacaagccagggatgtaacgcactgagaagcccttagagcctctcaaagcaattttgagtgacacaggaacacttaacggctgacaaccggctggtaacaggattagcagagcgaggtatgtaggcggtgctacaagattgtactgagagtgcaccatacaggaaacagc

SEQ ID NO: 126 - DNA, 2391 bp, synthetic construct
  source 1..2391: mol_type = other DNA
  misc_feature 1..2391: note = Synthetic
gagagtgcaccatacaggaaacagctatgaccatgattacgccaagctcggcgcgccattgggattcggtcgaattcggactgggattctccaatattccttagcgcttccaataaagagcgcttttgaagctgatgtgcttaaaaacttactcaatggaataattctagataattcactagtgattggaaatgttggatcctcatactcttcctttttcaattcagaagaactcgtcaagaaggcgatagaaggcgatgcgctgcgaatcgggagcggcgataccgtaaagcacgaggaagcggtcagcccattcgccgccaagctcttcagcaatatcacgggtagccaacgctatgtcctgatagcggtccgccacacccagccggccacagtcgatgaatccagaaaagcggccattttccaccatgatattcggcaagcaggcatcgccatgggtcacgacgagatcctcgccgtcgggcatgcgcgccttgagcctggcgaacagttcggctggcgcgagcccctgatgctcttcgtccagatcatcctgatcgacaagaccggcttccatccgagtacgtgctcgctcgatgcgatgtttcgcttggtggtcgaatgggcaggtagccggatcaagcgtatgcagccgccgcattgcatcagccatgatggatactttctcggcaggagcaaggtgggatgacaggagatcctgccccggcacttcgcccaatagcagccagtcccttcccgcttcagtgacaacgtcgagcacagctgcgcaaggaacgcccgtcgtggccagccacgatagccgcgctgcctcgtcctgcagttcattcagggcaccggacaggtcggtcttgacaaaaagaaccgggcgcccctgcgctgacagccggaacacggcggcatcagagcagccgattgtctgttgtgcccagtcatagccgaatagcctctccacccaagcggccggagaacctgcgtgcaatccatcttgttcaatcatgcgaaacgatcctcatcctgtctcttgatcagatcttgatcccctgcgccatcagatccttggcggcaagaaagccatccagtttactttgcagggcttcccaaccttaccagagggcgccccagctggcaattccggttcgcttgctgtccataaaaccgcccagtctagctatcgccatgtaagcccactgcaagctacctgctttctctttgcgcttgcgttttcccttgtccagatagcccagtagctgacattcatccggggtcagcaccgtttctgcggactggctttctacgtgttccgcttcctttagcagcccttgcgccatgcatttgttaaatcgaattatccattgctgttgacaaagggaatcaggggatcttgaagttcctattccgaagttcctattctctagaaagtataggaacttcagagcgcttttgaagctaattcgagatcatgcatgagctcactagtggatccccccgacgtaatgcgacattggatactttgggattcctttatagtcagtgggttatccgaatttttgccttgttcgttgctacattggctaaatcagaacttcggcagctcgtcatcccaatacgcgtcaattcactggccgtcgttttactactttccgctgcataaccctgcttcggggtcattatagcgattttttcggtatatccatcctttttcgcacgatatacaggattttgccaaagggttcgtgtagactttccttggtgtatccaacggcgtcagccgggcaggataggtgaagtaggcccacccgcgagcgggtgttccttcttcactgtcccttattcgcacctggcggtgctcaacgggaatcctgctctgcgaggctggccgataagctctgataacgcaggaaagaacatgggcagttcaacctgttgatagtacgtactaagctctcatgtttcacgtactaagctctcaagtttaacgtactaagctctcatgtttaacgaactaaaccctcatggctaacgtactaagctctcatggctaacgtactaagctctcatgtttcacgtactaagctctcatgtttgaacaataaaattaatataaatcagcaacttaaatagcctctaaggttttaagttttataagaaaaaaaagaatatataaggcttttaaagcttttaaggtttaacggttgtggacaacaagccagggatgtaacgcactgagaagcccttagagcctctcaaagcaattttgagtgacacaggaacacttaacggctgacaaccggctggtaacaggattagcagagcgaggtatgtaggcggtgctacaagattgtactgagagtgcaccatacaggaaacagc

SEQ ID NO: 127 - DNA, 2422 bp, synthetic construct
  source 1..2422: mol_type = other DNA
  misc_feature 1..2422: note = Synthetic
gagagtgcaccatacaggaaacagctatgaccatgattacgccaagctcggcgcgccattgggattcggtcgaattcggactgggattctccaatattccttagcgcagagcgcttttgaagctgatgtgcttaaaaacttactcaatggaataattctagataattcactagtgattggaaatgttggatcctcatactcttcctttttcaattcagaagaactcgtcaagaaggcgatagaaggcgatgcgctgcgaatcgggagcggcgataccgtaaagcacgaggaagcggtcagcccattcgccgccaagctcttcagcaatatcacgggtagccaacgctatgtcctgatagcggtccgccacacccagccggccacagtcgatgaatccagaaaagcggccattttccaccatgatattcggcaagcaggcatcgccatgggtcacgacgagatcctcgccgtcgggcatgcgcgccttgagcctggcgaacagttcggctggcgcgagcccctgatgctcttcgtccagatcatcctgatcgacaagaccggcttccatccgagtacgtgctcgctcgatgcgatgtttcgcttggtggtcgaatgggcaggtagccggatcaagcgtatgcagccgccgcattgcatcagccatgatggatactttctcggcaggagcaaggtgggatgacaggagatcctgccccggcacttcgcccaatagcagccagtcccttcccgcttcagtgacaacgtcgagcacagctgcgcaaggaacgcccgtcgtggccagccacgatagccgcgctgcctcgtcctgcagttcattcagggcaccggacaggtcggtcttgacaaaaagaaccgggcgcccctgcgctgacagccggaacacggcggcatcagagcagccgattgtctgttgtgcccagtcatagccgaatagcctctccacccaagcggccggagaacctgcgtgcaatccatcttgttcaatcatgcgaaacgatcctcatcctgtctcttgatcagatcttgatcccctgcgccatcagatccttggcggcaagaaagccatccagtttactttgcagggcttcccaaccttaccagagggcgccccagctggcaattccggttcgcttgctgtccataaaaccgcccagtctagctatcgccatgtaagcccactgcaagctacctgctttctctttgcgcttgcgttttcccttgtccagatagcccagtagctgacattcatccggggtcagcaccgtttctgcggactggctttctacgtgttccgcttcctttagcagcccttgcgccatgcatttgttaaatcgaattatccattgctgttgacaaagggaatcaggggatcttgaagttcctattccgaagttcctattctctagaaagtataggaacttcagagcgcttttgaagctaattcgagatcatgcatgagctcactagtggatccccccgactacttctaatgctgtgacatcactcacaggattcctgcaagtaatgcgacattggatactttgggattcctttatagtcagtgggttatccgaatttttgccttgttcgttgctacattggctaaatcagaacttcggcagctcgtcatcccaatacgcgtcaattcactggccgtcgttttactactttccgctgcataaccctgcttcggggtcattatagcgattttttcggtatatccatcctttttcgcacgatatacaggattttgccaaagggttcgtgtagactttccttggtgtatccaacggcgtcagccgggcaggataggtgaagtaggcccacccgcgagcgggtgttccttcttcactgtcccttattcgcacctggcggtgctcaacgggaatcctgctctgcgaggctggccgataagctctgataacgcaggaaagaacatgggcagttcaacctgttgatagtacgtactaagctctcatgtttcacgtactaagctctcaagtttaacgtactaagctctcatgtttaacgaactaaaccctcatggctaacgtactaagctctcatggctaacgtactaagctctcatgtttcacgtactaagctctcatgtttgaacaataaaattaatataaatcagcaacttaaatagcctctaaggttttaagttttataagaaaaaaaagaatatataaggcttttaaagcttttaaggtttaacggttgtggacaacaagccagggatgtaacgcactgagaagcccttagagcctctcaaagcaattttgagtgacacaggaacacttaacggctgacaaccggctggtaacaggattagcagagcgaggtatgtaggcggtgctacaagattgtactgagagtgcaccatacaggaaacagc

SEQ ID NO: 128 - DNA, 2417 bp, synthetic construct
  source 1..2417: mol_type = other DNA
  misc_feature 1..2417: note = Synthetic
gagagtgcaccatacaggaaacagctatgaccatgattacgccaagctcggcgcgccattgggattcggtcgaattcggactgggattctccaatattccttagagcgcttttgaagctgatgtgcttaaaaacttactcaatggaataattctagataattcactagtgattggaaatgttggatcctcatactcttcctttttcaattcagaagaactcgtcaagaaggcgatagaaggcgatgcgctgcgaatcgggagcggcgataccgtaaagcacgaggaagcggtcagcccattcgccgccaagctcttcagcaatatcacgggtagccaacgctatgtcctgatagcggtccgccacacccagccggccacagtcgatgaatccagaaaagcggccattttccaccatgatattcggcaagcaggcatcgccatgggtcacgacgagatcctcgccgtcgggcatgcgcgccttgagcctggcgaacagttcggctggcgcgagcccctgatgctcttcgtccagatcatcctgatcgacaagaccggcttccatccgagtacgtgctcgctcgatgcgatgtttcgcttggtggtcgaatgggcaggtagccggatcaagcgtatgcagccgccgcattgcatcagccatgatggatactttctcggcaggagcaaggtgggatgacaggagatcctgccccggcacttcgcccaatagcagccagtcccttcccgcttcagtgacaacgtcgagcacagctgcgcaaggaacgcccgtcgtggccagccacgatagccgcgctgcctcgtcctgcagttcattcagggcaccggacaggtcggtcttgacaaaaagaaccgggcgcccctgcgctgacagccggaacacggcggcatcagagcagccgattgtctgttgtgcccagtcatagccgaatagcctctccacccaagcggccggagaacctgcgtgcaatccatcttgttcaatcatgcgaaacgatcctcatcctgtctcttgatcagatcttgatcccctgcgccatcagatccttggcggcaagaaagccatccagtttactttgcagggcttcccaaccttaccagagggcgccccagctggcaattccggttcgcttgctgtccataaaaccgcccagtctagctatcgccatgtaagcccactgcaagctacctgctttctctttgcgcttgcgttttcccttgtccagatagcccagtagctgacattcatccggggtcagcaccgtttctgcggactggctttctacgtgttccgcttcctttagcagcccttgcgccatgcatttgttaaatcgaattatccattgctgttgacaaagggaatcaggggatcttgaagttcctattccgaagttcctattctctagaaagtataggaacttcagagcgcttttgaagctaattcgagatcatgcatgagctcactagtggatccccccgactacttctaatgctgtgacatcactcacaggattcctgcaagtaatgcgacattggatactttgggattcctttatagtcagtgggttatccgaatttttgccttgttcgttgctacattggctaaatcagaacttcggcagctcgtcatcccaatacgcgtcaattcactggccgtcgttttactactttccgctgcataaccctgcttcggggtcattatagcgattttttcggtatatccatcctttttcgcacgatatacaggattttgccaaagggttcgtgtagactttccttggtgtatccaacggcgtcagccgggcaggataggtgaagtaggcccacccgcgagcgggtgttccttcttcactgtcccttattcgcacctggcggtgctcaacgggaatcctgctctgcgaggctggccgataagctctgataacgcaggaaagaacatgggcagttcaacctgttgatagtacgtactaagctctcatgtttcacgtactaagctctcaagtttaacgtactaagctctcatgtttaacgaactaaaccctcatggctaacgtactaagctctcatggctaacgtactaagctctcatgtttcacgtactaagctctcatgtttgaacaataaaattaatataaatcagcaacttaaatagcctctaaggttttaagttttataagaaaaaaaagaatatataaggcttttaaagcttttaaggtttaacggttgtggacaacaagccagggatgtaacgcactgagaagcccttagagcctctcaaagcaattttgagtgacacaggaacacttaacggctgacaaccggctggtaacaggattagcagagcgaggtatgtaggcggtgctacaagattgtactgagagtgcaccatacaggaaacagc

SEQ ID NO: 129 - DNA, 2412 bp, synthetic construct
  source 1..2412: mol_type = other DNA
  misc_feature 1..2412: note = Synthetic
gagagtgcaccatacaggaaacagctatgaccatgattacgccaagctcggcgcgccattgggattcggtcgaattcggactgggattctccaatatagagcgcttttgaagctgatgtgcttaaaaacttactcaatggaataattctagataattcactagtgattggaaatgttggatcctcatactcttcctttttcaattcagaagaactcgtcaagaaggcgatagaaggcgatgcgctgcgaatcgggagcggcgataccgtaaagcacgaggaagcggtcagcccattcgccgccaagctcttcagcaatatcacgggtagccaacgctatgtcctgatagcggtccgccacacccagccggccacagtcgatgaatccagaaaagcggccattttccaccatgatattcggcaagcaggcatcgccatgggtcacgacgagatcctcgccgtcgggcatgcgcgccttgagcctggcgaacagttcggctggcgcgagcccctgatgctcttcgtccagatcatcctgatcgacaagaccggcttccatccgagtacgtgctcgctcgatgcgatgtttcgcttggtggtcgaatgggcaggtagccggatcaagcgtatgcagccgccgcattgcatcagccatgatggatactttctcggcaggagcaaggtgggatgacaggagatcctgccccggcacttcgcccaatagcagccagtcccttcccgcttcagtgacaacgtcgagcacagctgcgcaaggaacgcccgtcgtggccagccacgatagccgcgctgcctcgtcctgcagttcattcagggcaccggacaggtcggtcttgacaaaaagaaccgggcgcccctgcgctgacagccggaacacggcggcatcagagcagccgattgtctgttgtgcccagtcatagccgaatagcctctccacccaagcggccggagaacctgcgtgcaatccatcttgttcaatcatgcgaaacgatcctcatcctgtctcttgatcagatcttgatcccctgcgccatcagatccttggcggcaagaaagccatccagtttactttgcagggcttcccaaccttaccagagggcgccccagctggcaattccggttcgcttgctgtccataaaaccgcccagtctagctatcgccatgtaagcccactgcaagctacctgctttctctttgcgcttgcgttttcccttgtccagatagcccagtagctgacattcatccggggtcagcaccgtttctgcggactggctttctacgtgttccgcttcctttagcagcccttgcgccatgcatttgttaaatcgaattatccattgctgttgacaaagggaatcaggggatcttgaagttcctattccgaagttcctattctctagaaagtataggaacttcagagcgcttttgaagctaattcgagatcatgcatgagctcactagtggatccccccgactacttctaatgctgtgacatcactcacaggattcctgcaagtaatgcgacattggatactttgggattcctttatagtcagtgggttatccgaatttttgccttgttcgttgctacattggctaaatcagaacttcggcagctcgtcatcccaatacgcgtcaattcactggccgtcgttttactactttccgctgcataaccctgcttcggggtcattatagcgattttttcggtatatccatcctttttcgcacgatatacaggattttgccaaagggttcgtgtagactttccttggtgtatccaacggcgtcagccgggcaggataggtgaagtaggcccacccgcgagcgggtgttccttcttcactgtcccttattcgcacctggcggtgctcaacgggaatcctgctctgcgaggctggccgataagctctgataacgcaggaaagaacatgggcagttcaacctgttgatagtacgtactaagctctcatgtttcacgtactaagctctcaagtttaacgtactaagctctcatgtttaacgaactaaaccctcatggctaacgtactaagctctcatggctaacgtactaagctctcatgtttcacgtactaagctctcatgtttgaacaataaaattaatataaatcagcaacttaaatagcctctaaggttttaagttttataagaaaaaaaagaatatataaggcttttaaagcttttaaggtttaacggttgtggacaacaagccagggatgtaacgcactgagaagcccttagagcctctcaaagcaattttgagtgacacaggaacacttaacggctgacaaccggctggtaacaggattagcagagcgaggtatgtaggcggtgctacaagattgtactgagagtgcaccatacaggaaacagc

SEQ ID NO: 130 - DNA, 2407 bp, synthetic construct
  source 1..2407: mol_type = other DNA
  misc_feature 1..2407: note = Synthetic
gagagtgcaccatacaggaaacagctatgaccatgattacgccaagctcggcgcgccattgggattcggtcgaattcggactgggattctccagagcgcttttgaagctgatgtgcttaaaaacttactcaatggaataattctagataattcactagtgattggaaatgttggatcctcatactcttcctttttcaattcagaagaactcgtcaagaaggcgatagaaggcgatgcgctgcgaatcgggagcggcgataccgtaaagcacgaggaagcggtcagcccattcgccgccaagctcttcagcaatatcacgggtagccaacgctatgtcctgatagcggtccgccacacccagccggccacagtcgatgaatccagaaaagcggccattttccaccatgatattcggcaagcaggcatcgccatgggtcacgacgagatcctcgccgtcgggcatgcgcgccttgagcctggcgaacagttcggctggcgcgagcccctgatgctcttcgtccagatcatcctgatcgacaagaccggcttccatccgagtacgtgctcgctcgatgcgatgtttcgcttggtggtcgaatgggcaggtagccggatcaagcgtatgcagccgccgcattgcatcagccatgatggatactttctcggcaggagcaaggtgggatgacaggagatcctgccccggcacttcgcccaatagcagccagtcccttcccgcttcagtgacaacgtcgagcacagctgcgcaaggaacgcccgtcgtggccagccacgatagccgcgctgcctcgtcctgcagttcattcagggcaccggacaggtcggtcttgacaaaaagaaccgggcgcccctgcgctgacagccggaacacggcggcatcagagcagccgattgtctgttgtgcccagtcatagccgaatagcctctccacccaagcggccggagaacctgcgtgcaatccatcttgttcaatcatgcgaaacgatcctcatcctgtctcttgatcagatcttgatcccctgcgccatcagatccttggcggcaagaaagccatccagtttactttgcagggcttcccaaccttaccagagggcgccccagctggcaattccggttcgcttgctgtccataaaaccgcccagtctagctatcgccatgtaagcccactgcaagctacctgctttctctttgcgcttgcgttttcccttgtccagatagcccagtagctgacattcatccggggtcagcaccgtttctgcggactggctttctacgtgttccgcttcctttagcagcccttgcgccatgcatttgttaaatcgaattatccattgctgttgacaaagggaatcaggggatcttgaagttcctattccgaagttcctattctctagaaagtataggaacttcagagcgcttttgaagctaattcgagatcatgcatgagctcactagtggatccccccgactacttctaatgctgtgacatcactcacaggattcctgcaagtaatgcgacattggatactttgggattcctttatagtcagtgggttatccgaatttttgccttgttcgttgctacattggctaaatcagaacttcggcagctcgtcatcccaatacgcgtcaattcactggccgtcgttttactactttccgctgcataaccctgcttcggggtcattatagcgattttttcggtatatccatcctttttcgcacgatatacaggattttgccaaagggttcgtgtagactttccttggtgtatccaacggcgtcagccgggcaggataggtgaagtaggcccacccgcgagcgggtgttccttcttcactgtcccttattcgcacctggcggtgctcaacgggaatcctgctctgcgaggctggccgataagctctgataacgcaggaaagaacatgggcagttcaacctgttgatagtacgtactaagctctcatgtttcacgtactaagctctcaagtttaacgtactaagctctcatgtttaacgaactaaaccctcatggctaacgtactaagctctcatggctaacgtactaagctctcatgtttcacgtactaagctctcatgtttgaacaataaaattaatataaatcagcaacttaaatagcctctaaggttttaagttttataagaaaaaaaagaatatataaggcttttaaagcttttaaggtttaacggttgtggacaacaagccagggatgtaacgcactgagaagcccttagagcctctcaaagcaattttgagtgacacaggaacacttaacggctgacaaccggctggtaacaggattagcagagcgaggtatgtaggcggtgctacaagattgtactgagagtgcaccatacaggaaacagc

SEQ ID NO: 131 - DNA, 2402 bp, synthetic construct
  misc_feature 1..2402: note = Synthetic
  source 1..2402: mol_type = other DNA
gagagtgcaccatacaggaaacagctatgaccatgattacgccaagctcggcgcgccattgggattcggtcgaattcggactgggatagagcgcttttgaagctgatgtgcttaaaaacttactcaatggaataattctagataattcactagtgattggaaatgttggatcctcatactcttcctttttcaattcagaagaactcgtcaagaaggcgatagaaggcgatgcgctgcgaatcgggagcggcgataccgtaaagcacgaggaagcggtcagcccattcgccgccaagctcttcagcaatatcacgggtagccaacgctatgtcctgatagcggtccgccacacccagccggccacagtcgatgaatccagaaaagcggccattttccaccatgatattcggcaagcaggcatcgccatgggtcacgacgagatcctcgccgtcgggcatgcgcgccttgagcctggcgaacagttcggctggcgcgagcccctgatgctcttcgtccagatcatcctgatcgacaagaccggcttccatccgagtacgtgctcgctcgatgcgatgtttcgcttggtggtcgaatgggcaggtagccggatcaagcgtatgcagccgccgcattgcatcagccatgatggatactttctcggcaggagcaaggtgggatgacaggagatcctgccccggcacttcgcccaatagcagccagtcccttcccgcttcagtgacaacgtcgagcacagctgcgcaaggaacgcccgtcgtggccagccacgatagccgcgctgcctcgtcctgcagttcattcagggcaccggacaggtcggtcttgacaaaaagaaccgggcgcccctgcgctgacagccggaacacggcggcatcagagcagccgattgtctgttgtgcccagtcatagccgaatagcctctccacccaagcggccggagaacctgcgtgcaatccatcttgttcaatcatgcgaaacgatcctcatcctgtctcttgatcagatcttgatcccctgcgccatcagatccttggcggcaagaaagccatccagtttactttgcagggcttcccaaccttaccagagggcgccccagctggcaattccggttcgcttgctgtccataaaaccgcccagtctagctatcgccatgtaagcccactgcaagctacctgctttctctttgcgcttgcgttttcccttgtccagatagcccagtagctgacattcatccggggtcagcaccgtttctgcggactggctttctacgtgttccgcttcctttagcagcccttgcgccatgcatttgttaaatcgaattatccattgctgttgacaaagggaatcaggggatcttgaagttcctattccgaagttcctattctctagaaagtataggaacttcagagcgcttttgaagctaattcgagatcatgcatgagctcactagtggatccccccgactacttctaatgctgtgacatcactcacaggattcctgcaagtaatgcgacattggatactttgggattcctttatagtcagtgggttatccgaatttttgccttgttcgttgctacattggctaaatcagaacttcggcagctcgtcatcccaatacgcgtcaattcactggccgtcgttttactactttccgctgcataaccctgcttcggggtcattatagcgattttttcggtatatccatcctttttcgcacgatatacaggattttgccaaagggttcgtgtagactttccttggtgtatccaacggcgtcagccgggcaggataggtgaagtaggcccacccgcgagcgggtgttccttcttcactgtcccttattcgcacctggcggtgctcaacgggaatcctgctctgcgaggctggccgataagctctgataacgcaggaaagaacatgggcagttcaacctgttgatagtacgtactaagctctcatgtttcacgtactaagctctcaagtttaacgtactaagctctcatgtttaacgaactaaaccctcatggctaacgtactaagctctcatggctaacgtactaagctctcatgtttcacgtactaagctctcatgtttgaacaataaaattaatataaatcagcaacttaaatagcctctaaggttttaagttttataagaaaaaaaagaatatataaggcttttaaagcttttaaggtttaacggttgtggacaacaagccagggatgtaacgcactgagaagcccttagagcctctcaaagcaattttgagtgacacaggaacacttaacggctgacaaccggctggtaacaggattagcagagcgaggtatgtaggcggtgctacaagattgtactgagagtgcaccatacaggaaacagc

SEQ ID NO: 132 - DNA, 2392 bp, synthetic construct
  misc_feature 1..2392: note = Synthetic
  source 1..2392: mol_type = other DNA
gagagtgcaccatacaggaaacagctatgaccatgattacgccaagctcggcgcgccattgggattcggtcgaattcagagcgcttttgaagctgatgtgcttaaaaacttactcaatggaataattctagataattcactagtgattggaaatgttggatcctcatactcttcctttttcaattcagaagaactcgtcaagaaggcgatagaaggcgatgcgctgcgaatcgggagcggcgataccgtaaagcacgaggaagcggtcagcccattcgccgccaagctcttcagcaatatcacgggtagccaacgctatgtcctgatagcggtccgccacacccagccggccacagtcgatgaatccagaaaagcggccattttccaccatgatattcggcaagcaggcatcgccatgggtcacgacgagatcctcgccgtcgggcatgcgcgccttgagcctggcgaacagttcggctggcgcgagcccctgatgctcttcgtccagatcatcctgatcgacaagaccggcttccatccgagtacgtgctcgctcgatgcgatgtttcgcttggtggtcgaatgggcaggtagccggatcaagcgtatgcagccgccgcattgcatcagccatgatggatactttctcggcaggagcaaggtgggatgacaggagatcctgccccggcacttcgcccaatagcagccagtcccttcccgcttcagtgacaacgtcgagcacagctgcgcaaggaacgcccgtcgtggccagccacgatagccgcgctgcctcgtcctgcagttcattcagggcaccggacaggtcggtcttgacaaaaagaaccgggcgcccctgcgctgacagccggaacacggcggcatcagagcagccgattgtctgttgtgcccagtcatagccgaatagcctctccacccaagcggccggagaacctgcgtgcaatccatcttgttcaatcatgcgaaacgatcctcatcctgtctcttgatcagatcttgatcccctgcgccatcagatccttggcggcaagaaagccatccagtttactttgcagggcttcccaaccttaccagagggcgccccagctggcaattccggttcgcttgctgtccataaaaccgcccagtctagctatcgccatgtaagcccactgcaagctacctgctttctctttgcgcttgcgttttcccttgtccagatagcccagtagctgacattcatccggggtcagcaccgtttctgcggactggctttctacgtgttccgcttcctttagcagcccttgcgccatgcatttgttaaatcgaattatccattgctgttgacaaagggaatcaggggatcttgaagttcctattccgaagttcctattctctagaaagtataggaacttcagagcgcttttgaagctaattcgagatcatgcatgagctcactagtggatccccccgactacttctaatgctgtgacatcactcacaggattcctgcaagtaatgcgacattggatactttgggattcctttatagtcagtgggttatccgaatttttgccttgttcgttgctacattggctaaatcagaacttcggcagctcgtcatcccaatacgcgtcaattcactggccgtcgttttactactttccgctgcataaccctgcttcggggtcattatagcgattttttcggtatatccatcctttttcgcacgatatacaggattttgccaaagggttcgtgtagactttccttggtgtatccaacggcgtcagccgggcaggataggtgaagtaggcccacccgcgagcgggtgttccttcttcactgtcccttattcgcacctggcggtgctcaacgggaatcctgctctgcgaggctggccgataagctctgataacgcaggaaagaacatgggcagttcaacctgttgatagtacgtactaagctctcatgtttcacgtactaagctctcaagtttaacgtactaagctctcatgtttaacgaactaaaccctcatggctaacgtactaagctctcatggctaacgtactaagctctcatgtttcacgtactaagctctcatgtttgaacaataaaattaatataaatcagcaacttaaatagcctctaaggttttaagttttataagaaaaaaaagaatatataaggcttttaaagcttttaaggtttaacggttgtggacaacaagccagggatgtaacgcactgagaagcccttagagcctctcaaagcaattttgagtgacacaggaacacttaacggctgacaaccggctggtaacaggattagcagagcgaggtatgtaggcggtgctacaagattgtactgagagtgcaccatacaggaaacagc

SEQ ID NO: 133 - DNA, 2277 bp, synthetic construct
  source 1..2277: mol_type = other DNA
  misc_feature 1..2277: note = Synthetic
gagagtgcaccatacaggaaacagctatgaccatgattacgccaagctcggcgcgccattgggattcggtcgaattcggactgggattctccaatatagagcgcttttgaagctgatgtgcttaaaaacttactcaatggaataattctagataattcactagtgattggaaatgttggatcctcatactcttcctttttcaattcagaagaactcgtcaagaaggcgatagaaggcgatgcgctgcgaatcgggagcggcgataccgtaaagcacgaggaagcggtcagcccattcgccgccaagctcttcagcaatatcacgggtagccaacgctatgtcctgatagcggtccgccacacccagccggccacagtcgatgaatccagaaaagcggccattttccaccatgatattcggcaagcaggcatcgccatgggtcacgacgagatcctcgccgtcgggcatgcgcgccttgagcctggcgaacagttcggctggcgcgagcccctgatgctcttcgtccagatcatcctgatcgacaagaccggcttccatccgagtacgtgctcgctcgatgcgatgtttcgcttggtggtcgaatgggcaggtagccggatcaagcgtatgcagccgccgcattgcatcagccatgatggatactttctcggcaggagcaaggtgggatgacaggagatcctgccccggcacttcgcccaatagcagccagtcccttcccgcttcagtgacaacgtcgagcacagctgcgcaaggaacgcccgtcgtggccagccacgatagccgcgctgcctcgtcctgcagttcattcagggcaccggacaggtcggtcttgacaaaaagaaccgggcgcccctgcgctgacagccggaacacggcggcatcagagcagccgattgtctgttgtgcccagtcatagccgaatagcctctccacccaagcggccggagaacctgcgtgcaatccatcttgttcaatcatgcgaaacgatcctcatcctgtctcttgatcagatcttgatcccctgcgccatcagatccttggcggcaagaaagccatccagtttactttgcagggcttcccaaccttaccagagggcgccccagctggcaattccggttcgcttgctgtccataaaaccgcccagtctagctatcgccatgtaagcccactgcaagctacctgctttctctttgcgcttgcgttttcccttgtccagatagcccagtagctgacattcatccggggtcagcaccgtttctgcggactggctttctacgtgttccgcttcctttagcagcccttgcgccatgcatttgttaaatcgaattatccattgctgttgacaaagggaatcaggggatcttgaagttcctattccgaagttcctattctctagaaagtataggaacttcagagcgcttttgaagctaattcgagatcatgcatgagctcactagtggatccccccgaccggcagctcgtcatcccaatacgcgtcaattcactggccgtcgttttactactttccgctgcataaccctgcttcggggtcattatagcgattttttcggtatatccatcctttttcgcacgatatacaggattttgccaaagggttcgtgtagactttccttggtgtatccaacggcgtcagccgggcaggataggtgaagtaggcccacccgcgagcgggtgttccttcttcactgtcccttattcgcacctggcggtgctcaacgggaatcctgctctgcgaggctggccgataagctctgataacgcaggaaagaacatgggcagttcaacctgttgatagtacgtactaagctctcatgtttcacgtactaagctctcaagtttaacgtactaagctctcatgtttaacgaactaaaccctcatggctaacgtactaagctctcatggctaacgtactaagctctcatgtttcacgtactaagctctcatgtttgaacaataaaattaatataaatcagcaacttaaatagcctctaaggttttaagttttataagaaaaaaaagaatatataaggcttttaaagcttttaaggtttaacggttgtggacaacaagccagggatgtaacgcactgagaagcccttagagcctctcaaagcaattttgagtgacacaggaacacttaacggctgacaaccggctggtaacaggattagcagagcgaggtatgtaggcggtgctacaagattgtactgagagtgcaccatacaggaaacagc

SEQ ID NO: 134 - DNA, 2400 bp, synthetic construct
  misc_feature 1..2400: note = Synthetic
  source 1..2400: mol_type = other DNA
gagagtgcaccatacaggaaacagctatgaccatgattacgccaagctcggcgcgccattgggattcggtcgaattcggactgggattctccaatatagagcgcttttgaagctgatgtgcttaaaaacttactcaatggaataattctagataattcactagtgattggaaatgttggatcctcatactcttcctttttcaattcagaagaactcgtcaagaaggcgatagaaggcgatgcgctgcgaatcgggagcggcgataccgtaaagcacgaggaagcggtcagcccattcgccgccaagctcttcagcaatatcacgggtagccaacgctatgtcctgatagcggtccgccacacccagccggccacagtcgatgaatccagaaaagcggccattttccaccatgatattcggcaagcaggcatcgccatgggtcacgacgagatcctcgccgtcgggcatgcgcgccttgagcctggcgaacagttcggctggcgcgagcccctgatgctcttcgtccagatcatcctgatcgacaagaccggcttccatccgagtacgtgctcgctcgatgcgatgtttcgcttggtggtcgaatgggcaggtagccggatcaagcgtatgcagccgccgcattgcatcagccatgatggatactttctcggcaggagcaaggtgggatgacaggagatcctgccccggcacttcgcccaatagcagccagtcccttcccgcttcagtgacaacgtcgagcacagctgcgcaaggaacgcccgtcgtggccagccacgatagccgcgctgcctcgtcctgcagttcattcagggcaccggacaggtcggtcttgacaaaaagaaccgggcgcccctgcgctgacagccggaacacggcggcatcagagcagccgattgtctgttgtgcccagtcatagccgaatagcctctccacccaagcggccggagaacctgcgtgcaatccatcttgttcaatcatgcgaaacgatcctcatcctgtctcttgatcagatcttgatcccctgcgccatcagatccttggcggcaagaaagccatccagtttactttgcagggcttcccaaccttaccagagggcgccccagctggcaattccggttcgcttgctgtccataaaaccgcccagtctagctatcgccatgtaagcccactgcaagctacctgctttctctttgcgcttgcgttttcccttgtccagatagcccagtagctgacattcatccggggtcagcaccgtttctgcggactggctttctacgtgttccgcttcctttagcagcccttgcgccatgcatttgttaaatcgaattatccattgctgttgacaaagggaatcaggggatcttgaagttcctattccgaagttcctattctctagaaagtataggaacttcagagcgcttttgaagctaattcgagatcatgcatgagctcactagtggatccccccgactacttctaatgctgtgacatcactcacaggattcctgcaagtaatgcgacattggatactttgggattcctttatagtcagtgggttatccgaatttttgccttgttcgttgctacattggctaaatcagaacttatcccaatacgcgtcaattcactggccgtcgttttactactttccgctgcataaccctgcttcggggtcattatagcgattttttcggtatatccatcctttttcgcacgatatacaggattttgccaaagggttcgtgtagactttccttggtgtatccaacggcgtcagccgggcaggataggtgaagtaggcccacccgcgagcgggtgttccttcttcactgtcccttattcgcacctggcggtgctcaacgggaatcctgctctgcgaggctggccgataagctctgataacgcaggaaagaacatgggcagttcaacctgttgatagtacgtactaagctctcatgtttcacgtactaagctctcaagtttaacgtactaagctctcatgtttaacgaactaaaccctcatggctaacgtactaagctctcatggctaacgtactaagctctcatgtttcacgtactaagctctcatgtttgaacaataaaattaatataaatcagcaacttaaatagcctctaaggttttaagttttataagaaaaaaaagaatatataaggcttttaaagcttttaaggtttaacggttgtggacaacaagccagggatgtaacgcactgagaagcccttagagcctctcaaagcaattttgagtgacacaggaacacttaacggctgacaaccggctggtaacaggattagcagagcgaggtatgtaggcggtgctacaagattgtactgagagtgcaccatacaggaaacagc

SEQ ID NO: 135 - DNA, 2265 bp, synthetic construct
  source 1..2265: mol_type = other DNA
  misc_feature 1..2265: note = Synthetic
gagagtgcaccatacaggaaacagctatgaccatgattacgccaagctcggcgcgccattgggattcggtcgaattcggactgggattctccaatatagagcgcttttgaagctgatgtgcttaaaaacttactcaatggaataattctagataattcactagtgattggaaatgttggatcctcatactcttcctttttcaattcagaagaactcgtcaagaaggcgatagaaggcgatgcgctgcgaatcgggagcggcgataccgtaaagcacgaggaagcggtcagcccattcgccgccaagctcttcagcaatatcacgggtagccaacgctatgtcctgatagcggtccgccacacccagccggccacagtcgatgaatccagaaaagcggccattttccaccatgatattcggcaagcaggcatcgccatgggtcacgacgagatcctcgccgtcgggcatgcgcgccttgagcctggcgaacagttcggctggcgcgagcccctgatgctcttcgtccagatcatcctgatcgacaagaccggcttccatccgagtacgtgctcgctcgatgcgatgtttcgcttggtggtcgaatgggcaggtagccggatcaagcgtatgcagccgccgcattgcatcagccatgatggatactttctcggcaggagcaaggtgggatgacaggagatcctgccccggcacttcgcccaatagcagccagtcccttcccgcttcagtgacaacgtcgagcacagctgcgcaaggaacgcccgtcgtggccagccacgatagccgcgctgcctcgtcctgcagttcattcagggcaccggacaggtcggtcttgacaaaaagaaccgggcgcccctgcgctgacagccggaacacggcggcatcagagcagccgattgtctgttgtgcccagtcatagccgaatagcctctccacccaagcggccggagaacctgcgtgcaatccatcttgttcaatcatgcgaaacgatcctcatcctgtctcttgatcagatcttgatcccctgcgccatcagatccttggcggcaagaaagccatccagtttactttgcagggcttcccaaccttaccagagggcgccccagctggcaattccggttcgcttgctgtccataaaaccgcccagtctagctatcgccatgtaagcccactgcaagctacctgctttctctttgcgcttgcgttttcccttgtccagatagcccagtagctgacattcatccggggtcagcaccgtttctgcggactggctttctacgtgttccgcttcctttagcagcccttgcgccatgcatttgttaaatcgaattatccattgctgttgacaaagggaatcaggggatcttgaagttcctattccgaagttcctattctctagaaagtataggaacttcagagcgcttttgaagctaattcgagatcatgcatgagctcactagtggatccccccgacatcccaatacgcgtcaattcactggccgtcgttttactactttccgctgcataaccctgcttcggggtcattatagcgattttttcggtatatccatcctttttcgcacgatatacaggattttgccaaagggttcgtgtagactttccttggtgtatccaacggcgtcagccgggcaggataggtgaagtaggcccacccgcgagcgggtgttccttcttcactgtcccttattcgcacctggcggtgctcaacgggaatcctgctctgcgaggctggccgataagctctgataacgcaggaaagaacatgggcagttcaacctgttgatagtacgtactaagctctcatgtttcacgtactaagctctcaagtttaacgtactaagctctcatgtttaacgaactaaaccctcatggctaacgtactaagctctcatggctaacgtactaagctctcatgtttcacgtactaagctctcatgtttgaacaataaaattaatataaatcagcaacttaaatagcctctaaggttttaagttttataagaaaaaaaagaatatataaggcttttaaagcttttaaggtttaacggttgtggacaacaagccagggatgtaacgcactgagaagcccttagagcctctcaaagcaattttgagtgacacaggaacacttaacggctgacaaccggctggtaacaggattagcagagcgaggtatgtaggcggtgctacaagattgtactgagagtgcaccatacaggaaacagc

SEQ ID NO: 136 - DNA, 2257 bp, synthetic construct
  source 1..2257: mol_type = other DNA
  misc_feature 1..2257: note = Synthetic
gagagtgcaccatacaggaaacagctatgaccatgattacgccaagctcggcgcgccattgggattcggtcgaattcagagcgcttttgaagctgatgtgcttaaaaacttactcaatggaataattctagataattcactagtgattggaaatgttggatcctcatactcttcctttttcaattcagaagaactcgtcaagaaggcgatagaaggcgatgcgctgcgaatcgggagcggcgataccgtaaagcacgaggaagcggtcagcccattcgccgccaagctcttcagcaatatcacgggtagccaacgctatgtcctgatagcggtccgccacacccagccggccacagtcgatgaatccagaaaagcggccattttccaccatgatattcggcaagcaggcatcgccatgggtcacgacgagatcctcgccgtcgggcatgcgcgccttgagcctggcgaacagttcggctggcgcgagcccctgatgctcttcgtccagatcatcctgatcgacaagaccggcttccatccgagtacgtgctcgctcgatgcgatgtttcgcttggtggtcgaatgggcaggtagccggatcaagcgtatgcagccgccgcattgcatcagccatgatggatactttctcggcaggagcaaggtgggatgacaggagatcctgccccggcacttcgcccaatagcagccagtcccttcccgcttcagtgacaacgtcgagcacagctgcgcaaggaacgcccgtcgtggccagccacgatagccgcgctgcctcgtcctgcagttcattcagggcaccggacaggtcggtcttgacaaaaagaaccgggcgcccctgcgctgacagccggaacacggcggcatcagagcagccgattgtctgttgtgcccagtcatagccgaatagcctctccacccaagcggccggagaacctgcgtgcaatccatcttgttcaatcatgcgaaacgatcctcatcctgtctcttgatcagatcttgatcccctgcgccatcagatccttggcggcaagaaagccatccagtttactttgcagggcttcccaaccttaccagagggcgccccagctggcaattccggttcgcttgctgtccataaaaccgcccagtctagctatcgccatgtaagcccactgcaagctacctgctttctctttgcgcttgcgttttcccttgtccagatagcccagtagctgacattcatccggggtcagcaccgtttctgcggactggctttctacgtgttccgcttcctttagcagcccttgcgccatgcatttgttaaatcgaattatccattgctgttgacaaagggaatcaggggatcttgaagttcctattccgaagttcctattctctagaaagtataggaacttcagagcgcttttgaagctaattcgagatcatgcatgagctcactagtggatccccccgaccggcagctcgtcatcccaatacgcgtcaattcactggccgtcgttttactactttccgctgcataaccctgcttcggggtcattatagcgattttttcggtatatccatcctttttcgcacgatatacaggattttgccaaagggttcgtgtagactttccttggtgtatccaacggcgtcagccgggcaggataggtgaagtaggcccacccgcgagcgggtgttccttcttcactgtcccttattcgcacctggcggtgctcaacgggaatcctgctctgcgaggctggccgataagctctgataacgcaggaaagaacatgggcagttcaacctgttgatagtacgtactaagctctcatgtttcacgtactaagctctcaagtttaacgtactaagctctcatgtttaacgaactaaaccctcatggctaacgtactaagctctcatggctaacgtactaagctctcatgtttcacgtactaagctctcatgtttgaacaataaaattaatataaatcagcaacttaaatagcctctaaggttttaagttttataagaaaaaaaagaatatataaggcttttaaagcttttaaggtttaacggttgtggacaacaagccagggatgtaacgcactgagaagcccttagagcctctcaaagcaattttgagtgacacaggaacacttaacggctgacaaccggctggtaacaggattagcagagcgaggtatgtaggcggtgctacaagattgtactgagagtgcaccatacaggaaacagc

SEQ ID NO: 137 - DNA, 2380 bp, synthetic construct
  misc_feature 1..2380: note = Synthetic
  source 1..2380: mol_type = other DNA
gagagtgcaccatacaggaaacagctatgaccatgattacgccaagctcggcgcgccattgggattcggtcgaattcagagcgcttttgaagctgatgtgcttaaaaacttactcaatggaataattctagataattcactagtgattggaaatgttggatcctcatactcttcctttttcaattcagaagaactcgtcaagaaggcgatagaaggcgatgcgctgcgaatcgggagcggcgataccgtaaagcacgaggaagcggtcagcccattcgccgccaagctcttcagcaatatcacgggtagccaacgctatgtcctgatagcggtccgccacacccagccggccacagtcgatgaatccagaaaagcggccattttccaccatgatattcggcaagcaggcatcgccatgggtcacgacgagatcctcgccgtcgggcatgcgcgccttgagcctggcgaacagttcggctggcgcgagcccctgatgctcttcgtccagatcatcctgatcgacaagaccggcttccatccgagtacgtgctcgctcgatgcgatgtttcgcttggtggtcgaatgggcaggtagccggatcaagcgtatgcagccgccgcattgcatcagccatgatggatactttctcggcaggagcaaggtgggatgacaggagatcctgccccggcacttcgcccaatagcagccagtcccttcccgcttcagtgacaacgtcgagcacagctgcgcaaggaacgcccgtcgtggccagccacgatagccgcgctgcctcgtcctgcagttcattcagggcaccggacaggtcggtcttgacaaaaagaaccgggcgcccctgcgctgacagccggaacacggcggcatcagagcagccgattgtctgttgtgcccagtcatagccgaatagcctctccacccaagcggccggagaacctgcgtgcaatccatcttgttcaatcatgcgaaacgatcctcatcctgtctcttgatcagatcttgatcccctgcgccatcagatccttggcggcaagaaagccatccagtttactttgcagggcttcccaaccttaccagagggcgccccagctggcaattccggttcgcttgctgtccataaaaccgcccagtctagctatcgccatgtaagcccactgcaagctacctgctttctctttgcgcttgcgttttcccttgtccagatagcccagtagctgacattcatccggggtcagcaccgtttctgcggactggctttctacgtgttccgcttcctttagcagcccttgcgccatgcatttgttaaatcgaattatccattgctgttgacaaagggaatcaggggatcttgaagttcctattccgaagttcctattctctagaaagtataggaacttcagagcgcttttgaagctaattcgagatcatgcatgagctcactagtggatccccccgactacttctaatgctgtgacatcactcacaggattcctgcaagtaatgcgacattggatactttgggattcctttatagtcagtgggttatccgaatttttgccttgttcgttgctacattggctaaatcagaacttatcccaatacgcgtcaattcactggccgtcgttttactactttccgctgcataaccctgcttcggggtcattatagcgattttttcggtatatccatcctttttcgcacgatatacaggattttgccaaagggttcgtgtagactttccttggtgtatccaacggcgtcagccgggcaggataggtgaagtaggcccacccgcgagcgggtgttccttcttcactgtcccttattcgcacctggcggtgctcaacgggaatcctgctctgcgaggctggccgataagctctgataacgcaggaaagaacatgggcagttcaacctgttgatagtacgtactaagctctcatgtttcacgtactaagctctcaagtttaacgtactaagctctcatgtttaacgaactaaaccctcatggctaacgtactaagctctcatggctaacgtactaagctctcatgtttcacgtactaagctctcatgtttgaacaataaaattaatataaatcagcaacttaaatagcctctaaggttttaagttttataagaaaaaaaagaatatataaggcttttaaagcttttaaggtttaacggttgtggacaacaagccagggatgtaacgcactgagaagcccttagagcctctcaaagcaattttgagtgacacaggaacacttaacggctgacaaccggctggtaacaggattagcagagcgaggtatgtaggcggtgctacaagattgtactgagagtgcaccatacaggaaacagc

SEQ ID NO: 138 - DNA, 2245 bp, synthetic construct
  source 1..2245: mol_type = other DNA
  misc_feature 1..2245: note = Synthetic
gagagtgcaccatacaggaaacagctatgaccatgattacgccaagctcggcgcgccattgggattcggtcgaattcagagcgcttttgaagctgatgtgcttaaaaacttactcaatggaataattctagataattcactagtgattggaaatgttggatcctcatactcttcctttttcaattcagaagaactcgtcaagaaggcgatagaaggcgatgcgctgcgaatcgggagcggcgataccgtaaagcacgaggaagcggtcagcccattcgccgccaagctcttcagcaatatcacgggtagccaacgctatgtcctgatagcggtccgccacacccagccggccacagtcgatgaatccagaaaagcggccattttccaccatgatattcggcaagcaggcatcgccatgggtcacgacgagatcctcgccgtcgggcatgcgcgccttgagcctggcgaacagttcggctggcgcgagcccctgatgctcttcgtccagatcatcctgatcgacaagaccggcttccatccgagtacgtgctcgctcgatgcgatgtttcgcttggtggtcgaatgggcaggtagccggatcaagcgtatgcagccgccgcattgcatcagccatgatggatactttctcggcaggagcaaggtgggatgacaggagatcctgccccggcacttcgcccaatagcagccagtcccttcccgcttcagtgacaacgtcgagcacagctgcgcaaggaacgcccgtcgtggccagccacgatagccgcgctgcctcgtcctgcagttcattcagggcaccggacaggtcggtcttgacaaaaagaaccgggcgcccctgcgctgacagccggaacacggcggcatcagagcagccgattgtctgttgtgcccagtcatagccgaatagcctctccacccaagcggccggagaacctgcgtgcaatccatcttgttcaatcatgcgaaacgatcctcatcctgtctcttgatcagatcttgatcccctgcgccatcagatccttggcggcaagaaagccatccagtttactttgcagggcttcccaaccttaccagagggcgccccagctggcaattccggttcgcttgctgtccataaaaccgcccagtctagctatcgccatgtaagcccactgcaagctacctgctttctctttgcgcttgcgttttcccttgtccagatagcccagtagctgacattcatccggggtcagcaccgtttctgcggactggctttctacgtgttccgcttcctttagcagcccttgcgccatgcatttgttaaatcgaattatccattgctgttgacaaagggaatcaggggatcttgaagttcctattccgaagttcctattctctagaaagtataggaacttcagagcgcttttgaagctaattcgagatcatgcatgagctcactagtggatccccccgacatcccaatacgcgtcaattcactggccgtcgttttactactttccgctgcataaccctgcttcggggtcattatagcgattttttcggtatatccatcctttttcgcacgatatacaggattttgccaaagggttcgtgtagactttccttggtgtatccaacggcgtcagccgggcaggataggtgaagtaggcccacccgcgagcgggtgttccttcttcactgtcccttattcgcacctggcggtgctcaacgggaatcctgctctgcgaggctggccgataagctctgataacgcaggaaagaacatgggcagttcaacctgttgatagtacgtactaagctctcatgtttcacgtactaagctctcaagtttaacgtactaagctctcatgtttaacgaactaaaccctcatggctaacgtactaagctctcatggctaacgtactaagctctcatgtttcacgtactaagctctcatgtttgaacaataaaattaatataaatcagcaacttaaatagcctctaaggttttaagttttataagaaaaaaaagaatatataaggcttttaaagcttttaaggtttaacggttgtggacaacaagccagggatgtaacgcactgagaagcccttagagcctctcaaagcaattttgagtgacacaggaacacttaacggctgacaaccggctggtaacaggattagcagagcgaggtatgtaggcggtgctacaagattgtactgagagtgcaccatacaggaaacagc

SEQ ID NO: 139 - DNA, 2400 bp, synthetic construct
  misc_feature 1..2400: note = Synthetic
  source 1..2400: mol_type = other DNA
gagagtgcaccatacaggaaacagctatgaccatgattacgccaagctcggcgcgccattgggatggactgggattctccaatatagagcgcttttgaagctgatgtgcttaaaaacttactcaatggaataattctagataattcactagtgattggaaatgttggatcctcatactcttcctttttcaattcagaagaactcgtcaagaaggcgatagaaggcgatgcgctgcgaatcgggagcggcgataccgtaaagcacgaggaagcggtcagcccattcgccgccaagctcttcagcaatatcacgggtagccaacgctatgtcctgatagcggtccgccacacccagccggccacagtcgatgaatccagaaaagcggccattttccaccatgatattcggcaagcaggcatcgccatgggtcacgacgagatcctcgccgtcgggcatgcgcgccttgagcctggcgaacagttcggctggcgcgagcccctgatgctcttcgtccagatcatcctgatcgacaagaccggcttccatccgagtacgtgctcgctcgatgcgatgtttcgcttggtggtcgaatgggcaggtagccggatcaagcgtatgcagccgccgcattgcatcagccatgatggatactttctcggcaggagcaaggtgggatgacaggagatcctgccccggcacttcgcccaatagcagccagtcccttcccgcttcagtgacaacgtcgagcacagctgcgcaaggaacgcccgtcgtggccagccacgatagccgcgctgcctcgtcctgcagttcattcagggcaccggacaggtcggtcttgacaaaaagaaccgggcgcccctgcgctgacagccggaacacggcggcatcagagcagccgattgtctgttgtgcccagtcatagccgaatagcctctccacccaagcggccggagaacctgcgtgcaatccatcttgttcaatcatgcgaaacgatcctcatcctgtctcttgatcagatcttgatcccctgcgccatcagatccttggcggcaagaaagccatccagtttactttgcagggcttcccaaccttaccagagggcgccccagctggcaattccggttcgcttgctgtccataaaaccgcccagtctagctatcgccatgtaagcccactgcaagctacctgctttctctttgcgcttgcgttttcccttgtccagatagcccagtagctgacattcatccggggtcagcaccgtttctgcggactggctttctacgtgttccgcttcctttagcagcccttgcgccatgcatttgttaaatcgaattatccattgctgttgacaaagggaatcaggggatcttgaagttcctattccgaagttcctattctctagaaagtataggaacttcagagcgcttttgaagctaattcgagatcatgcatgagctcactagtggatccccccgactacttctaatgctgtgacatcactcacaggattcctgcaagtaatgcgacattggatactttgggattcctttatagtcagtgggttatccgaatttttgccttgttcgttgctacattggctaaatcagaacttcggcagctcgtcatcccaatacgcgtcaattcactggccgtcgttttactactttccgctgcataaccctgcttcggggtcattatagcgattttttcggtatatccatcctttttcgcacgatatacaggattttgccaaagggttcgtgtagactttccttggtgtatccaacggcgtcagccgggcaggataggtgaagtaggcccacccgcgagcgggtgttccttcttcactgtcccttattcgcacctggcggtgctcaacgggaatcctgctctgcgaggctggccgataagctctgataacgcaggaaagaacatgggcagttcaacctgttgatagtacgtactaagctctcatgtttcacgtactaagctctcaagtttaacgtactaagctctcatgtttaacgaactaaaccctcatggctaacgtactaagctctcatggctaacgtactaagctctcatgtttcacgtactaagctctcatgtttgaacaataaaattaatataaatcagcaacttaaatagcctctaaggttttaagttttataagaaaaaaaagaatatataaggcttttaaagcttttaaggtttaacggttgtggacaacaagccagggatgtaacgcactgagaagcccttagagcctctcaaagcaattttgagtgacacaggaacacttaacggctgacaaccggctggtaacaggattagcagagcgaggtatgtaggcggtgctacaagattgtactgagagtgcaccatacaggaaacagc

SEQ ID NO: 140 - DNA, 2265 bp, synthetic construct
  source 1..2265: mol_type = other DNA
  misc_feature 1..2265: note = Synthetic
gagagtgcaccatacaggaaacagctatgaccatgattacgccaagctcggcgcgccattgggatggactgggattctccaatatagagcgcttttgaagctgatgtgcttaaaaacttactcaatggaataattctagataattcactagtgattggaaatgttggatcctcatactcttcctttttcaattcagaagaactcgtcaagaaggcgatagaaggcgatgcgctgcgaatcgggagcggcgataccgtaaagcacgaggaagcggtcagcccattcgccgccaagctcttcagcaatatcacgggtagccaacgctatgtcctgatagcggtccgccacacccagccggccacagtcgatgaatccagaaaagcggccattttccaccatgatattcggcaagcaggcatcgccatgggtcacgacgagatcctcgccgtcgggcatgcgcgccttgagcctggcgaacagttcggctggcgcgagcccctgatgctcttcgtccagatcatcctgatcgacaagaccggcttccatccgagtacgtgctcgctcgatgcgatgtttcgcttggtggtcgaatgggcaggtagccggatcaagcgtatgcagccgccgcattgcatcagccatgatggatactttctcggcaggagcaaggtgggatgacaggagatcctgccccggcacttcgcccaatagcagccagtcccttcccgcttcagtgacaacgtcgagcacagctgcgcaaggaacgcccgtcgtggccagccacgatagccgcgctgcctcgtcctgcagttcattcagggcaccggacaggtcggtcttgacaaaaagaaccgggcgcccctgcgctgacagccggaacacggcggcatcagagcagccgattgtctgttgtgcccagtcatagccgaatagcctctccacccaagcggccggagaacctgcgtgcaatccatcttgttcaatcatgcgaaacgatcctcatcctgtctcttgatcagatcttgatcccctgcgccatcagatccttggcggcaagaaagccatccagtttactttgcagggcttcccaaccttaccagagggcgccccagctggcaattccggttcgcttgctgtccataaaaccgcccagtctagctatcgccatgtaagcccactgcaagctacctgctttctctttgcgcttgcgttttcccttgtccagatagcccagtagctgacattcatccggggtcagcaccgtttctgcggactggctttctacgtgttccgcttcctttagcagcccttgcgccatgcatttgttaaatcgaattatccattgctgttgacaaagggaatcaggggatcttgaagttcctattccgaagttcctattctctagaaagtataggaacttcagagcgcttttgaagctaattcgagatcatgcatgagctcactagtggatccccccgaccggcagctcgtcatcccaatacgcgtcaattcactggccgtcgttttactactttccgctgcataaccctgcttcggggtcattatagcgattttttcggtatatccatcctttttcgcacgatatacaggattttgccaaagggttcgtgtagactttccttggtgtatccaacggcgtcagccgggcaggataggtgaagtaggcccacccgcgagcgggtgttccttcttcactgtcccttattcgcacctggcggtgctcaacgggaatcctgctctgcgaggctggccgataagctctgataacgcaggaaagaacatgggcagttcaacctgttgatagtacgtactaagctctcatgtttcacgtactaagctctcaagtttaacgtactaagctctcatgtttaacgaactaaaccctcatggctaacgtactaagctctcatggctaacgtactaagctctcatgtttcacgtactaagctctcatgtttgaacaataaaattaatataaatcagcaacttaaatagcctctaaggttttaagttttataagaaaaaaaagaatatataaggcttttaaagcttttaaggtttaacggttgtggacaacaagccagggatgtaacgcactgagaagcccttagagcctctcaaagcaattttgagtgacacaggaacacttaacggctgacaaccggctggtaacaggattagcagagcgaggtatgtaggcggtgctacaagattgtactgagagtgcaccatacaggaaacagc

SEQ ID NO: 141 - DNA, 2388 bp, synthetic construct
  misc_feature 1..2388: note = Synthetic
  source 1..2388: mol_type = other DNA
gagagtgcaccatacaggaaacagctatgaccatgattacgccaagctcggcgcgccattgggatggactgggattctccaatatagagcgcttttgaagctgatgtgcttaaaaacttactcaatggaataattctagataattcactagtgattggaaatgttggatcctcatactcttcctttttcaattcagaagaactcgtcaagaaggcgatagaaggcgatgcgctgcgaatcgggagcggcgataccgtaaagcacgaggaagcggtcagcccattcgccgccaagctcttcagcaatatcacgggtagccaacgctatgtcctgatagcggtccgccacacccagccggccacagtcgatgaatccagaaaagcggccattttccaccatgatattcggcaagcaggcatcgccatgggtcacgacgagatcctcgccgtcgggcatgcgcgccttgagcctggcgaacagttcggctggcgcgagcccctgatgctcttcgtccagatcatcctgatcgacaagaccggcttccatccgagtacgtgctcgctcgatgcgatgtttcgcttggtggtcgaatgggcaggtagccggatcaagcgtatgcagccgccgcattgcatcagccatgatggatactttctcggcaggagcaaggtgggatgacaggagatcctgccccggcacttcgcccaatagcagccagtcccttcccgcttcagtgacaacgtcgagcacagctgcgcaaggaacgcccgtcgtggccagccacgatagccgcgctgcctcgtcctgcagttcattcagggcaccggacaggtcggtcttgacaaaaagaaccgggcgcccctgcgctgacagccggaacacggcggcatcagagcagccgattgtctgttgtgcccagtcatagccgaatagcctctccacccaagcggccggagaacctgcgtgcaatccatcttgttcaatcatgcgaaacgatcctcatcctgtctcttgatcagatcttgatcccctgcgccatcagatccttggcggcaagaaagccatccagtttactttgcagggcttcccaaccttaccagagggcgccccagctggcaattccggttcgcttgctgtccataaaaccgcccagtctagctatcgccatgtaagcccactgcaagctacctgctttctctttgcgcttgcgttttcccttgtccagatagcccagtagctgacattcatccggggtcagcaccgtttctgcggactggctttctacgtgttccgcttcctttagcagcccttgcgccatgcatttgttaaatcgaattatccattgctgttgacaaagggaatcaggggatcttgaagttcctattccgaagttcctattctctagaaagtataggaacttcagagcgcttttgaagctaattcgagatcatgcatgagctcactagtggatccccccgactacttctaatgctgtgacatcactcacaggattcctgcaagtaatgcgacattggatactttgggattcctttatagtcagtgggttatccgaatttttgccttgttcgttgctacattggctaaatcagaacttatcccaatacgcgtcaattcactggccgtcgttttactactttccgctgcataaccctgcttcggggtcattatagcgattttttcggtatatccatcctttttcgcacgatatacaggattttgccaaagggttcgtgtagactttccttggtgtatccaacggcgtcagccgggcaggataggtgaagtaggcccacccgcgagcgggtgttccttcttcactgtcccttattcgcacctggcggtgctcaacgggaatcctgctctgcgaggctggccgataagctctgataacgcaggaaagaacatgggcagttcaacctgttgatagtacgtactaagctctcatgtttcacgtactaagctctcaagtttaacgtactaagctctcatgtttaacgaactaaaccctcatggctaacgtactaagctctcatggctaacgtactaagctctcatgtttcacgtactaagctctcatgtttgaacaataaaattaatataaatcagcaacttaaatagcctctaaggttttaagttttataagaaaaaaaagaatatataaggcttttaaagcttttaaggtttaacggttgtggacaacaagccagggatgtaacgcactgagaagcccttagagcctctcaaagcaattttgagtgacacaggaacacttaacggctgacaaccggctggtaacaggattagcagagcgaggtatgtaggcggtgctacaagattgtactgagagtgcaccatacaggaaacagc

SEQ ID NO: 142 - DNA, 2253 bp, synthetic construct
  source 1..2253: mol_type = other DNA
  misc_feature 1..2253: note = Synthetic
gagagtgcaccatacaggaaacagctatgaccatgattacgccaagctcggcgcgccattgggatggactgggattctccaatatagagcgcttttgaagctgatgtgcttaaaaacttactcaatggaataattctagataattcactagtgattggaaatgttggatcctcatactcttcctttttcaattcagaagaactcgtcaagaaggcgatagaaggcgatgcgctgcgaatcgggagcggcgataccgtaaagcacgaggaagcggtcagcccattcgccgccaagctcttcagcaatatcacgggtagccaacgctatgtcctgatagcggtccgccacacccagccggccacagtcgatgaatccagaaaagcggccattttccaccatgatattcggcaagcaggcatcgccatgggtcacgacgagatcctcgccgtcgggcatgcgcgccttgagcctggcgaacagttcggctggcgcgagcccctgatgctcttcgtccagatcatcctgatcgacaagaccggcttccatccgagtacgtgctcgctcgatgcgatgtttcgcttggtggtcgaatgggcaggtagccggatcaagcgtatgcagccgccgcattgcatcagccatgatggatactttctcggcaggagcaaggtgggatgacaggagatcctgccccggcacttcgcccaatagcagccagtcccttcccgcttcagtgacaacgtcgagcacagctgcgcaaggaacgcccgtcgtggccagccacgatagccgcgctgcctcgtcctgcagttcattcagggcaccggacaggtcggtcttgacaaaaagaaccgggcgcccctgcgctgacagccggaacacggcggcatcagagcagccgattgtctgttgtgcccagtcatagccgaatagcctctccacccaagcggccggagaacctgcgtgcaatccatcttgttcaatcatgcgaaacgatcctcatcctgtctcttgatcagatcttgatcccctgcgccatcagatccttggcggcaagaaagccatccagtttactttgcagggcttcccaaccttaccagagggcgccccagctggcaattccggttcgcttgctgtccataaaaccgcccagtctagctatcgccatgtaagcccactgcaagctacctgctttctctttgcgcttgcgttttcccttgtccagatagcccagtagctgacattcatccggggtcagcaccgtttctgcggactggctttctacgtgttccgcttcctttagcagcccttgcgccatgcatttgttaaatcgaattatccattgctgttgacaaagggaatcaggggatcttgaagttcctattccgaagttcctattctctagaaagtataggaacttcagagcgcttttgaagctaattcgagatcatgcatgagctcactagtggatccccccgacatcccaatacgcgtcaattcactggccgtcgttttactactttccgctgcataaccctgcttcggggtcattatagcgattttttcggtatatccatcctttttcgcacgatatacaggattttgccaaagggttcgtgtagactttccttggtgtatccaacggcgtcagccgggcaggataggtgaagtaggcccacccgcgagcgggtgttccttcttcactgtcccttattcgcacctggcggtgctcaacgggaatcctgctctgcgaggctggccgataagctctgataacgcaggaaagaacatgggcagttcaacctgttgatagtacgtactaagctctcatgtttcacgtactaagctctcaagtttaacgtactaagctctcatgtttaacgaactaaaccctcatggctaacgtactaagctctcatggctaacgtactaagctctcatgtttcacgtactaagctctcatgtttgaacaataaaattaatataaatcagcaacttaaatagcctctaaggttttaagttttataagaaaaaaaagaatatataaggcttttaaagcttttaaggtttaacggttgtggacaacaagccagggatgtaacgcactgagaagcccttagagcctctcaaagcaattttgagtgacacaggaacacttaacggctgacaaccggctggtaacaggattagcagagcgaggtatgtaggcggtgctacaagattgtactgagagtgcaccatacaggaaacagc

SEQ ID NO: 143 - DNA, 2380 bp, synthetic construct
  source 1..2380: mol_type = other DNA
  misc_feature 1..2380: note = Synthetic
gagagtgcaccatacaggaaacagctatgaccatgattacgccaagctcggcgcgccattgggatagagcgcttttgaagctgatgtgcttaaaaacttactcaatggaataattctagataattcactagtgattggaaatgttggatcctcatactcttcctttttcaattcagaagaactcgtcaagaaggcgatagaaggcgatgcgctgcgaatcgggagcggcgataccgtaaagcacgaggaagcggtcagcccattcgccgccaagctcttcagcaatatcacgggtagccaacgctatgtcctgatagcggtccgccacacccagccggccacagtcgatgaatccagaaaagcggccattttccaccatgatattcggcaagcaggcatcgccatgggtcacgacgagatcctcgccgtcgggcatgcgcgccttgagcctggcgaacagttcggctggcgcgagcccctgatgctcttcgtccagatcatcctgatcgacaagaccggcttccatccgagtacgtgctcgctcgatgcgatgtttcgcttggtggtcgaatgggcaggtagccggatcaagcgtatgcagccgccgcattgcatcagccatgatggatactttctcggcaggagcaaggtgggatgacaggagatcctgccccggcacttcgcccaatagcagccagtcccttcccgcttcagtgacaacgtcgagcacagctgcgcaaggaacgcccgtcgtggccagccacgatagccgcgctgcctcgtcctgcagttcattcagggcaccggacaggtcggtcttgacaaaaagaaccgggcgcccctgcgctgacagccggaacacggcggcatcagagcagccgattgtctgttgtgcccagtcatagccgaatagcctctccacccaagcggccggagaacctgcgtgcaatccatcttgttcaatcatgcgaaacgatcctcatcctgtctcttgatcagatcttgatcccctgcgccatcagatccttggcggcaagaaagccatccagtttactttgcagggcttcccaaccttaccagagggcgccccagctggcaattccggttcgcttgctgtccataaaaccgcccagtctagctatcgccatgtaagcccactgcaagctacctgctttctctttgcgcttgcgttttcccttgtccagatagcccagtagctgacattcatccggggtcagcaccgtttctgcggactggctttctacgtgttccgcttcctttagcagcccttgcgccatgcatttgttaaatcgaattatccattgctgttgacaaagggaatcaggggatcttgaagttcctattccgaagttcctattctctagaaagtataggaacttcagagcgcttttgaagctaattcgagatcatgcatgagctcactagtggatccccccgactacttctaatgctgtgacatcactcacaggattcctgcaagtaatgcgacattggatactttgggattcctttatagtcagtgggttatccgaatttttgccttgttcgttgctacattggctaaatcagaacttcggcagctcgtcatcccaatacgcgtcaattcactggccgtcgttttactactttccgctgcataaccctgcttcggggtcattatagcgattttttcggtatatccatcctttttcgcacgatatacaggattttgccaaagggttcgtgtagactttccttggtgtatccaacggcgtcagccgggcaggataggtgaagtaggcccacccgcgagcgggtgttccttcttcactgtcccttattcgcacctggcggtgctcaacgggaatcctgctctgcgaggctggccgataagctctgataacgcaggaaagaacatgggcagttcaacctgttgatagtacgtactaagctctcatgtttcacgtactaagctctcaagtttaacgtactaagctctcatgtttaacgaactaaaccctcatggctaacgtactaagctctcatggctaacgtactaagctctcatgtttcacgtactaagctctcatgtttgaacaataaaattaatataaatcagcaacttaaatagcctctaaggttttaagttttataagaaaaaaaagaatatataaggcttttaaagcttttaaggtttaacggttgtggacaacaagccagggatgtaacgcactgagaagcccttagagcctctcaaagcaattttgagtgacacaggaacacttaacggctgacaaccggctggtaacaggattagcagagcgaggtatgtaggcggtgctacaagattgtactgagagtgcaccatacaggaaacagc

SEQ ID NO: 144 - DNA, 2245 bp, synthetic construct
  misc_feature 1..2245: note = Synthetic
  source 1..2245: mol_type = other DNA
gagagtgcaccatacaggaaacagctatgaccatgattacgccaagctcggcgcgccattgggatagagcgcttttgaagctgatgtgcttaaaaacttactcaatggaataattctagataattcactagtgattggaaatgttggatcctcatactcttcctttttcaattcagaagaactcgtcaagaaggcgatagaaggcgatgcgctgcgaatcgggagcggcgataccgtaaagcacgaggaagcggtcagcccattcgccgccaagctcttcagcaatatcacgggtagccaacgctatgtcctgatagcggtccgccacacccagccggccacagtcgatgaatccagaaaagcggccattttccaccatgatattcggcaagcaggcatcgccatgggtcacgacgagatcctcgccgtcgggcatgcgcgccttgagcctggcgaacagttcggctggcgcgagcccctgatgctcttcgtccagatcatcctgatcgacaagaccggcttccatccgagtacgtgctcgctcgatgcgatgtttcgcttggtggtcgaatgggcaggtagccggatcaagcgtatgcagccgccgcattgcatcagccatgatggatactttctcggcaggagcaaggtgggatgacaggagatcctgccccggcacttcgcccaatagcagccagtcccttcccgcttcagtgacaacgtcgagcacagctgcgcaaggaacgcccgtcgtggccagccacgatagccgcgctgcctcgtcctgcagttcattcagggcaccggacaggtcggtcttgacaaaaagaaccgggcgcccctgcgctgacagccggaacacggcggcatcagagcagccgattgtctgttgtgcccagtcatagccgaatagcctctccacccaagcggccggagaacctgcgtgcaatccatcttgttcaatcatgcgaaacgatcctcatcctgtctcttgatcagatcttgatcccctgcgccatcagatccttggcggcaagaaagccatccagtttactttgcagggcttcccaaccttaccagagggcgccccagctggcaattccggttcgcttgctgtccataaaaccgcccagtctagctatcgccatgtaagcccactgcaagctacctgctttctctttgcgcttgcgttttcccttgtccagatagcccagtagctgacattcatccggggtcagcaccgtttctgcggactggctttctacgtgttccgcttcctttagcagcccttgcgccatgcatttgttaaatcgaattatccattgctgttgacaaagggaatcaggggatcttgaagttcctattccgaagttcctattctctagaaagtataggaacttcagagcgcttttgaagctaattcgagatcatgcatgagctcactagtggatccccccgaccggcagctcgtcatcccaatacgcgtcaattcactggccgtcgttttactactttccgctgcataaccctgcttcggggtcattatagcgattttttcggtatatccatcctttttcgcacgatatacaggattttgccaaagggttcgtgtagactttccttggtgtatccaacggcgtcagccgggcaggataggtgaagtaggcccacccgcgagcgggtgttccttcttcactgtcccttattcgcacctggcggtgctcaacgggaatcctgctctgcgaggctggccgataagctctgataacgcaggaaagaacatgggcagttcaacctgttgatagtacgtactaagctctcatgtttcacgtactaagctctcaagtttaacgtactaagctctcatgtttaacgaactaaaccctcatggctaacgtactaagctctcatggctaacgtactaagctctcatgtttcacgtactaagctctcatgtttgaacaataaaattaatataaatcagcaacttaaatagcctctaaggttttaagttttataagaaaaaaaagaatatataaggcttttaaagcttttaaggtttaacggttgtggacaacaagccagggatgtaacgcactgagaagcccttagagcctctcaaagcaattttgagtgacacaggaacacttaacggctgacaaccggctggtaacaggattagcagagcgaggtatgtaggcggtgctacaagattgtactgagagtgcaccatacaggaaacagc

SEQ ID NO: 145 - DNA, 2368 bp, synthetic construct
  misc_feature 1..2368: note = Synthetic
  source 1..2368: mol_type = other DNA
gagagtgcaccatacaggaaacagctatgaccatgattacgccaagctcggcgcgccattgggatagagcgcttttgaagctgatgtgcttaaaaacttactcaatggaataattctagataattcactagtgattggaaatgttggatcctcatactcttcctttttcaattcagaagaactcgtcaagaaggcgatagaaggcgatgcgctgcgaatcgggagcggcgataccgtaaagcacgaggaagcggtcagcccattcgccgccaagctcttcagcaatatcacgggtagccaacgctatgtcctgatagcggtccgccacacccagccggccacagtcgatgaatccagaaaagcggccattttccaccatgatattcggcaagcaggcatcgccatgggtcacgacgagatcctcgccgtcgggcatgcgcgccttgagcctggcgaacagttcggctggcgcgagcccctgatgctcttcgtccagatcatcctgatcgacaagaccggcttccatccgagtacgtgctcgctcgatgcgatgtttcgcttggtggtcgaatgggcaggtagccggatcaagcgtatgcagccgccgcattgcatcagccatgatggatactttctcggcaggagcaaggtgggatgacaggagatcctgccccggcacttcgcccaatagcagccagtcccttcccgcttcagtgacaacgtcgagcacagctgcgcaaggaacgcccgtcgtggccagccacgatagccgcgctgcctcgtcctgcagttcattcagggcaccggacaggtcggtcttgacaaaaagaaccgggcgcccctgcgctgacagccggaacacggcggcatcagagcagccgattgtctgttgtgcccagtcatagccgaatagcctctccacccaagcggccggagaacctgcgtgcaatccatcttgttcaatcatgcgaaacgatcctcatcctgtctcttgatcagatcttgatcccctgcgccatcagatccttggcggcaagaaagccatccagtttactttgcagggcttcccaaccttaccagagggcgccccagctggcaattccggttcgcttgctgtccataaaaccgcccagtctagctatcgccatgtaagcccactgcaagctacctgctttctctttgcgcttgcgttttcccttgtccagatagcccagtagctgacattcatccggggtcagcaccgtttctgcggactggctttctacgtgttccgcttcctttagcagcccttgcgccatgcatttgttaaatcgaattatccattgctgttgacaaagggaatcaggggatcttgaagttcctattccgaagttcctattctctagaaagtataggaacttcagagcgcttttgaagctaattcgagatcatgcatgagctcactagtggatccccccgactacttctaatgctgtgacatcactcacaggattcctgcaagtaatgcgacattggatactttgggattcctttatagtcagtgggttatccgaatttttgccttgttcgttgctacattggctaaatcagaacttatcccaatacgcgtcaattcactggccgtcgttttactactttccgctgcataaccctgcttcggggtcattatagcgattttttcggtatatccatcctttttcgcacgatatacaggattttgccaaagggttcgtgtagactttccttggtgtatccaacggcgtcagccgggcaggataggtgaagtaggcccacccgcgagcgggtgttccttcttcactgtcccttattcgcacctggcggtgctcaacgggaatcctgctctgcgaggctggccgataagctctgataacgcaggaaagaacatgggcagttcaacctgttgatagtacgtactaagctctcatgtttcacgtactaagctctcaagtttaacgtactaagctctcatgtttaacgaactaaaccctcatggctaacgtactaagctctcatggctaacgtactaagctctcatgtttcacgtactaagctctcatgtttgaacaataaaattaatataaatcagcaacttaaatagcctctaaggttttaagttttataagaaaaaaaagaatatataaggcttttaaagcttttaaggtttaacggttgtggacaacaagccagggatgtaacgcactgagaagcccttagagcctctcaaagcaattttgagtgacacaggaacacttaacggctgacaaccggctggtaacaggattagcagagcgaggtatgtaggcggtgctacaagattgtactgagagtgcaccatacaggaaacagc

SEQ ID NO: 146 - DNA, 2552 bp, synthetic construct
  source 1..2552: mol_type = other DNA
  misc_feature 1..2552: note = Synthetic
cacggcttcgaccgcagcactggtcggtggaggcggcacgccccgccccggcgagatcagcctggcgcacaacggcgtgctgtacctggacgagctgccggaattcgaccgacgtgtgctcgaggccctgcgcgagccgctggaaagcggccacatcacgatttcccgtgcagcccgccgcgccgagttcccggcccgctctaggctgctgccaccgctgagcaataactagcataaccccttggggcctctaaacgggtcttgaggggttttttgctgaaacctcaggcatttgagaagcacacggtcacactgcttccggtagtcaataaaccggtaaaccagcaatagacataagcggctatttaacgaccctgccctgaaccgacgaccgggtcgaatttgctttcgaatttctgccattcatccgcttattatcacttattcaggcgtagcaccaggcgtttaagggcaccaataactgccttaaaaaaattacgccccgccctgccactcatcgcagtactgttgtaattcattaagcattctgccgacatggaagccatcacagacggcatgatgaacctgaatcgccagcggcatcagcaccttgtcgccttgcgtataatatttgcccatagtgaaaacgggggcgaagaagttgtccatattggccacgtttaaatcaaaactggtgaaactcacccagggattggctgagacgaaaaacatattctcaataaaccctttagggaaataggccaggttttcaccgtaacacgccacatcttgcgaatatatgtgtagaaactgccggaaatcgtcgtggtattcactccagagcgatgaaaacgtttcagtttgctcatggaaaacggtgtaacaagggtgaacactatcccatatcaccagctcaccgtctttcattgccatacggaactccggatgagcattcatcaggcgggcaagaatgtgaataaaggccggataaaacttgtgcttatttttctttacggtctttaaaaaggccgtaatatccagctgaacggtctggttataggtacattgagcaactgactgaaatgcctcaaaatgttctttacgatgccattgggatatatcaacggtggtatatccagtgatttttttctccattttagcttccttagctcctgaaaatctcgataactcaaaaaatacgcccggtagtgatcttatttcattatggtgaaagttggaacctcttacgtgccgatcaacgtctcattttcgccaaaagttggcccagggcttcccggtatcaacagggacaccaggatttatttattctgcgaagtgatcttccgtcacaggtatttattcggcgcaaagtgcgtcgggtgatgctgccaacttactgatttagtgtatgatggtgtttttgaggtgctccagtggcttctgtttctatcagctgtccctcctgttcagctactgacggggtggtgcgtaacggcaaaagcaccgccggacatcagcgctagcggagtgtatactggcttactatgttggcactgatgagggtgtcagtgaagtgcttcatgtggcaggagaaaaaaggctgcaccggtgcgtcagcagaatatgtgatacaggatatattccgcttcctcgctcactgactcgctacgctcggtcgttcgactgcggcgagcggaaatggcttacgaacggggcggagatttcctggaagatgccaggaagatacttaacagggaagtgagagggccgcggcaaagccgtttttccataggctccgcccccctgacaagcatcacgaaatctgacgctcaaatcagtggtggcgaaacccgacaggactataaagataccaggcgtttcccctggcggctccctcgtgcgctctcctgttcctgcctttcggtttaccggtgtcattccgctgttatggccgcgtttgtctcattccacgcctgacactcagttccgggtaggcagttcgctccaagctggactgtatgcacgaaccccccgttcagtccgaccgctgcgccttatccggtaactatcgtcttgagtccaacccggaaagacatgcaaaagcaccactggcagcagccactggtaattgatttagaggagttagtcttgaagtcatgcgccggttaaggctaaactgaaaggacaagttttggtgactgcgctcctccaagccagttacctcggttcaaagagttggtagctcagagaaccttcgaaaaaccgccctgcaaggcggttttttcgttttcagagcaagagattacgcgcagaccaaaacgatctcaagaagatcatcttattaatcagataaaatatttctagatttcagtgcaatttatctcttcaaatgtagcacctgaagtcagccccatacgatataagttgtaattctcatgttagtcatgccccgcgcccaccggaaggagctgactgggttgaaggctctcaagggcatcggtcgagatcccggtgcctaatgagtgagctaacttacattaattgcgttgcgc

SEQ ID NO: 147 - DNA, 30 bp, synthetic construct
  source 1..30: mol_type = other DNA
  misc_feature 1..30: note = Synthetic
agcgggccgggaactcggcgcggcgggctg

SEQ ID NO: 148 - DNA, 30 bp, synthetic construct
  source 1..30: mol_type = other DNA
  misc_feature 1..30: note = Synthetic
ggactgggattctccaatattccttagcgc

SEQ ID NO: 149 - DNA, 30 bp, synthetic construct
  misc_feature 1..30: note = Synthetic
  source 1..30: mol_type = other DNA
cacggcttcgaccgcagcactggtcggtgg

SEQ ID NO: 150 - DNA, 30 bp, synthetic construct
  source 1..30: mol_type = other DNA
  misc_feature 1..30: note = Synthetic
gtcggggggatccactagtgagctcatgca

SEQ ID NO: 151 - DNA, 50 bp, synthetic construct
  misc_feature 1..50: note = Synthetic
  source 1..50: mol_type = other DNA
ctttccctacacgacgctcttccgatctgagcaagagattacgcgcagac

SEQ ID NO: 152 - DNA, 50 bp, synthetic construct
  source 1..50: mol_type = other DNA
  misc_feature 1..50: note = Synthetic
ctttccctacacgacgctcttccgatctctaccgcattaaagcttccgcc

SEQ ID NO: 153 - DNA, 58 bp, synthetic construct
  misc_feature 1..58: note = Synthetic
  source 1..58: mol_type = other DNA
gactggagttcagacgtgtgctcttccgatctgcctattgctttcgctctatctgtcc

SEQ ID NO: 154 - DNA, 53 bp, synthetic construct
  source 1..53: mol_type = other DNA
  misc_feature 1..53: note = Synthetic
gactggagttcagacgtgtgctcttccgatctcctaaggcaacacaacggctg

SEQ ID NO: 155 - DNA, 53 bp, synthetic construct
  misc_feature 1..53: note = Synthetic
  source 1..53: mol_type = other DNA
ctttccctacacgacgctcttccgatctgtaagccttgcgagttcgattctcg

SEQ ID NO: 156 - DNA, 22 bp, synthetic construct
  source 1..22: mol_type = other DNA
  misc_feature 1..22: note = Synthetic
ctaccgcattaaagcttccgcc

SEQ ID NO: 157 - DNA, 21 bp, synthetic construct
  source 1..21: mol_type = other DNA
  misc_feature 1..21: note = Synthetic
cctaaggcaacacaacggctg

SEQ ID NO: 158 - DNA, 22 bp, synthetic construct
  source 1..22: mol_type = other DNA
  misc_feature 1..22: note = Synthetic
cctggtgtccctgttgataccg

SEQ ID NO: 159 - DNA, 23 bp, synthetic construct
  misc_feature 1..23: note = Synthetic
  source 1..23: mol_type = other DNA
cgacagcatcgccagtcactatg

SEQ ID NO: 160 - DNA, 22 bp, synthetic construct
  misc_feature 1..22: note = Synthetic
  source 1..22: mol_type = other DNA
caagtagcgaagcgagcaggac

SEQ ID NO: 161 - DNA, 54 bp, synthetic construct
  misc_feature 1..54: note = Synthetic
  source 1..54: mol_type = other DNA
ctttccctacacgacgctcttccgatctagcttccttagctcctgaaaatctcg

SEQ ID NO: 162 - DNA, 51 bp, synthetic construct
  source 1..51: mol_type = other DNA
  misc_feature 1..51: note = Synthetic
ctttccctacacgacgctcttccgatctgaaaatgagacgttgatcggcac

SEQ ID NO: 163 - DNA, 54 bp, synthetic construct
  source 1..54: mol_type = other DNA
  misc_feature 1..54: note = Synthetic
gactggagttcagacgtgtgctcttccgatctgccactcttgcttattactgtc

SEQ ID NO: 164 - DNA, 53 bp, synthetic construct
  source 1..53: mol_type = other DNA
  misc_feature 1..53: note = Synthetic
gactggagttcagacgtgtgctcttccgatctttgcaggcatatcttttagtg

SEQ ID NO: 165 - DNA, 22 bp, synthetic construct
  source 1..22: mol_type = other DNA
  misc_feature 1..22: note = Synthetic
gccactcttgcttattactgtc

SEQ ID NO: 166 - DNA, 23 bp, synthetic construct
  misc_feature 1..23: note = Synthetic
  source 1..23: mol_type = other DNA
gaaaatgagacgttgatcggcac

SEQ ID NO: 167 - DNA, 51 bp, synthetic construct
  source 1..51: mol_type = other DNA
  misc_feature 1..51: note = Synthetic
ctttccctacacgacgctcttccgatctctgggttgaaggctctcaagggc

SEQ ID NO: 168 - DNA, 55 bp, synthetic construct
  source 1..55: mol_type = other DNA
  misc_feature 1..55: note = Synthetic
ctttccctacacgacgctcttccgatctgtgtgcttctcaaatgcctgaggtttc

SEQ ID NO: 169 - DNA, 53 bp, synthetic construct
  source 1..53: mol_type = other DNA
  misc_feature 1..53: note = Synthetic
gactggagttcagacgtgtgctcttccgatctctgcaagtaatgcgacattgg

SEQ ID NO: 170 - DNA, 52 bp, synthetic construct
  source 1..52: mol_type = other DNA
  misc_feature 1..52: note = Synthetic
ctttccctacacgacgctcttccgatctcctttatagtcagtgggttatccg

SEQ ID NO: 171 - DNA, 55 bp, synthetic construct
  misc_feature 1..55: note = Synthetic
  source 1..55: mol_type = other DNA
gactggagttcagacgtgtgctcttccgatctttcgagatcatgcatgagctcac

SEQ ID NO: 172 - DNA, 59 bp, synthetic construct
  misc_feature 1..59: note = Synthetic
  source 1..59: mol_type = other DNA
gactggagttcagacgtgtgctcttccgatcttgaggatccaacatttccaatcactag

SEQ ID NO: 173 - DNA, 21 bp, synthetic construct
  source 1..21: mol_type = other DNA
  misc_feature 1..21: note = Synthetic
ctgcaagtaatgcgacattgg

SEQ ID NO: 174 - DNA, 25 bp, synthetic construct
  source 1..25: mol_type = other DNA
  misc_feature 1..25: note = Synthetic
atcaaaactggtgaaactcacccag

SEQ ID NO: 175 - DNA, 26 bp, synthetic construct
  source 1..26: mol_type = other DNA
  misc_feature 1..26: note = Synthetic
gtgttcacccttgttacaccgttttc

SEQ ID NO: 176 - DNA, 30 bp, synthetic construct
  source 1..30: mol_type = other DNA
  misc_feature 1..30: note = Synthetic
tgcgttgatgcaatttctatgcgcacccgt

SEQ ID NO: 177 - DNA, 30 bp, synthetic construct
  source 1..30: mol_type = other DNA
  misc_feature 1..30: note = Synthetic
tgtccacacccatgagtggacaacttatgc

SEQ ID NO: 178 - DNA, 30 bp, synthetic construct
  misc_feature 1..30: note = Synthetic
  source 1..30: mol_type = other DNA
tcatgataagaaaacaataggttgccactc

SEQ ID NO: 179 - DNA, 30 bp, synthetic construct
  source 1..30: mol_type = other DNA
  misc_feature 1..30: note = Synthetic
caacgaacaaggcaaaaattcggataaccc

SEQ ID NO: 180 - DNA, 30 bp, synthetic construct
  source 1..30: mol_type = other DNA
  misc_feature 1..30: note = Synthetic
aggttttcaccgtaacacgccacatcttgc

SEQ ID NO: 181 - protein, 207 aa, synthetic construct
  REGION 1..207: note = TnsF-Tn7 System Protein
MCPNCARDRSPREVLAGLDGQVRPELQGVVDTLRALDARTVPRWVHKTPARRVGFRALATATGPVTHQSLDAVADGHVADHLRALLVPHGVLVVRDEHLARIEQWLPKVLGRLPDAAERRSVERWARRQPLRRLHRQAEHTSSGQACGIRQEIRAVVRLLEWLPEQGGNLAACTQDHVDAYLATGTAGRPQPRAFCTGPAATSTPEP

SEQ ID NO: 182 - protein, 468 aa, synthetic construct
  REGION 1..468: note = TnsF-Tn7 System Protein
MTSPERPFGLADALDASDESQDTGLRHVRGLSAQPGEGAAAAEQRTAGPERVVLVGAWTSGTLAEAESSMAELAALAEAAGGLVLDGVIQRRDKPDPATFIGSGKAQELRELVEEWAADTVVCDGELSPAQLVRLEEVVKAKIVDRTALILDIFAQRATSKEGKAQVELAQLQYMLPRLRGWGQSLSRQMGGGGGAGGGMATRGPGETKIETDRRRLREKISKLRRELDEMKTGRDVKRMERRRNKVPSVALAGYTNAGKSSLLNRLTGADVYVRNALFATLDPTVRRGQTSGGRTYTLADTVGFVRHLPHQLVDAFRSTLEEVAEADLILHVVDGTHPDPEAQIEAVRAVIGEIGGAGVQEIVVVNKADAAPPEVLSRLLEAEPGAVAVSARTGQGCDALLARVEEALPQPDVEVEVLIPYTQGHLVSRVHEEGEILTEDHDENGTRLRANVDARLAAELAAYTTLS

SEQ ID NO: 183 - protein, 468 aa, synthetic construct; identical to SEQ ID NO: 182
  REGION 1..468: note = TnsF-Tn7 System Protein

SEQ ID NO: 184 - protein, 207 aa, synthetic construct; identical to SEQ ID NO: 181
  REGION 1..207: note = TnsF-Tn7 System Protein

SEQ ID NO: 185 - protein, 539 aa, synthetic construct
  REGION 1..539: note = TnsF-Tn7 System Protein
MSTQITVSDVTKSFDGRLVLDAVTCTFAVGERTGIVGENGSGKTTLLRLLAGRDRPDQGEVVVHAEGGVGYLAQDGHLPPGATVQEIVDRALGDLRAIERRLRALEAAMAAGDESGMSEYGELATVFELRGGYEADARVERALHGLGLGRLDRDRTVGGLSGGEQVRLRLAALLAASPEVLLLDEPTNHLDEQALGWLEDHLRGRRGTTVAVSHDRDFLERVATTLVEVDADRHRVVRYGNGYAGYLAEKAAARQRWAQAHQRWQADVDRYREAAATTARRVAPGRAIKDGNKMAYDRAAGRVQQSLASRVRQAEERLRRLLASPVPPPPEPLRFAPVLRSGPLRGVLLQAEDVAVTGRLAPVGLQMPAGERLLVTGPNGGGKSTLLQVLAGDLAPSEGRVVRRGRIGHLPQEPRPGRPGDTVLAAFARGSSTEPAEHADRLLALGLFDRDQLSVPVGRLSTGQRQRLALARLLSRPWDVLLLDEPTNHLSPALVEELEAALLGYDGTLVVVSHDRRLRRRWQGARMTLEPASLAAVRS

SEQ ID NO: 186 - protein, 539 aa, synthetic construct; identical to SEQ ID NO: 185
  REGION 1..539: note = TnsF-Tn7 System Protein

SEQ ID NO: 187 - protein, 291 aa, synthetic construct
  REGION 1..291: note = TnsF-Tn7 System Protein
MAIDRQGFRSPVMGPLFVSFGEWLQREMEVKKAAARVHVYFDFFSQVDALWGHIPTYEALLEHFHAGGLRRAEVPMRWLRETQGVHASATVREAHSEQRRLDELLSQVSGHWARDVLAKYHHSLIAKQGLHDIKLRSVRLSVRAAVNFLNHAKLARGELPDQRVLEAFWRQSPGQVAAVTGFINFLNKVHNLKLDPRPNERWLKTAKHEKAERELIDLFKCRHEIEAFDAKWIVKGLAYFHGIRRANRKALVYRQATFHEVAGFDVELGDSSFWVPSADSYAVTHTAGEIA

SEQ ID NO: 188 - protein, 291 aa, synthetic construct; identical to SEQ ID NO: 187
  REGION 1..291: note = TnsF-Tn7 System Protein

SEQ ID NO: 189 - protein, 228 aa, synthetic construct
  REGION 1..228: note = TnsF-Tn7 System Protein
MTTNSCDQPKQVRRIKPTRRSVSGFLPFRGAGGVPFESLLERDFLKRMRFSHRVSSVVAQPVRIDFIDPHGRPQTYTPDFLVYYQQAGRSHVDYIKPMLVEVKPEYLWREHWRAWSRKWKAARRYAREQGWSFSIYDESRIRGLPLDNIIFLERFERMAFDREDIEMVLNTLRETEISPVHYLLARHFNGIYRDRGVSLLWHLVATGRVACDITEPLDQFLELWIPEL

SEQ ID NO: 190 - protein, 641 aa, synthetic construct
  REGION 1..641: note = TnsF-Tn7 System Protein
MNIYEVDTDEHLIPFEPSRSRVSIEVGAMVRRDKSIYRILQILGFDTVIGVEVETGVSASLRVAELRAVEQEKVDGLYVNHDIATINSDDWAIAQKRFSAISPLIKETINPRCNVEERAKEVGVDTATLYRWLERYQSWNEILALVPRKRGWRSGASRLTIEAEKIIQDVIDEHYLKSQRPSIQSTIAEVEMRAKAQGVAPPSASAIRARIAKIPEKQILRKRGFADQARNRYTPSVGKFPGADYPLAVVQIDHTPIDLIVVDDLHRKPIGRLWLTVAIDVHSRMIVGYYLALEEPSEISVGMCIAHSVLPKEDWLNIHHVEGEWPVWGFPRVIHSDNGPDFRAENVRRSCSNYNIENVFRPVKVPKYGGHIERLLGTFMRMLHELPGTTFSNTNDRDGYDSDKNATLTMGEFEKWLVRAILRYHQSPHSSIYMSPARKWQLGFFGNRELDPLVSVPPRPDDALTVQLDFLPSFHRTVQTYGVQIDVFYYSEALRHWINTTDPETGLARKFVFRRDPRDISVIWFYDPLLKQYFRVPVANQAFPAATVWEFRAAKKKAVDEGRENVDEATISRLILENRELVNNASLMTKKARRDAQKIRVHGKNVTPASPKRSVAQVVADIPAPAEGLLLDDVDLIGDIS

SEQ ID NO: 191 - protein, 296 aa, synthetic construct
  REGION 1..296: note = TnsF-Tn7 System Protein
MNEYAHLLPDFRPVLQLSDRERILFMGEPRWIGYEAAHSILENLGCLFDMPKRPRMQNLLIVGDSNNGKTTIVRQFMKTHGEGYVNENADPVRPVILAEAPPSADEKDLYIALLDRLWMPYRTTDSKVSLRYQVFHSFRELNVRMLIIDEIHSLLTGSAIKQREVMNAIKALCNELAIPVIGVGTPDAVRVLHHDAQHASRFDVVKLDLWKLNADFQRLLKAFEAVLPLKRPSELFKADKAQLIHSISGGNTGDVHRLLVECAKEAIVSGKEHIDRELIESKSWLRPTRGIRELMG

SEQ ID NO: 192 - protein, 296 aa, synthetic construct; identical to SEQ ID NO: 191
  REGION 1..296: note = TnsF-Tn7 System Protein

SEQ ID NO: 193 - protein, 293 aa, synthetic construct
  REGION 1..293: note = TnsF-Tn7 System Protein
MEHEAQLIAVTFGAAWTVQLLNGFVRWLLKRDSDSPQLPRILRSHLSFFSSLDMRFSGPEEVRASTLLDHFTVAGMRQHQLAVRYVCEVLNIEVTDEDKKEHVESSRVAAILEKAGSNQWNDDLFQFNLWLIKAERPVRTRRLYLSSAAGLMVSAGAKCIHELDQESLDRHLTKVPGARANLSSLLRFAREHLGHTLTLPVRPPRKEAEPKPVRRLRALLKRIEASGDHAAVTDVESVISVALKIPLRSIQAGKWWPLQRAGRWHIVSSDEEVRCPLQLQDVASRWAALRALA

SEQ ID NO: 194 - protein, 206 aa, synthetic construct
  REGION 1..206: note = TnsF-Tn7 System Protein
MGVRSRGLSGRVALQVGAAGFESSLEQDLIELLDFDPRVTELLVQPFSLYHTEEGKRRRYTPDVRATFVGERPEVVVYEVKYQDELRADWAKFRARFGAAYRHCCQNGWRFKVLTEKHIRTPYLGNVKFLRRFHRLPEQELISGQLLYTLKATGPTTVQSLLSATYQSSESRLRAIPGLWKMVADGRVGCDLTVPLTMASTIWMEH

SEQ ID NO: 195 - protein, 352 aa, synthetic construct
  REGION 1..352: note = TnsF-Tn7 System Protein
MLGKRSPKLSDPFPFHRGVHPVEGELLSSYLLRLAVGHSADPYRFYSYLLPGIQVWNRDIDRGGSEAVSALLVDRCGLPPLAVERMCLREYSKAIEGPCPDGSRYRGTWINPIGIFHRIRVLSGLQVCPICLAEDGIYRRIWRLSFVTHCPVHLVPLYAACPVCKAPIVPHRQLAGTTLCHHCHADYVASWSGWDQGCPCPLSQQELLSALSGTPVPTLSDPVPIADLARGVTLLRNWGMLRTPEQAKGHAIETCSGLARWVYFDLIHELVSEWPESMGLLNVKGRISLPTFERCSPPVWLQCIANQLPATARPRGLRKKAPLAAFLRGLGLTPPAGWREKRALALLKAALK

SEQ ID NO: 196 - protein, 646 aa, synthetic construct
  REGION 1..646: note = TnsF-Tn7 System Protein
MVGISRKFLTITAGVEVASEGRRYVVTNVMTSSSVLAKDLGTGESKRLRVETLSRILEPDDDQTRAERDLALYTDEEWAEGQRRLEVIKPLLQMPVRSRSDVESIATAAGVHFTTLYKWLKAFLSSGHVSALVPTKSGRRTGTRMLSQDLEEVIRSVIEDKYLSIDRGTAQDVVDEVKKRCKQMKLKAPSHITIRARIKDIPVALALRKRGRRDDARDQYQPIRGSFPGADHPYSVIQIDHTPANVIVVDEVSRLPIGRPYLTLAIDVRSRLVAGLYLSMDPPSAVAVGLCLSQAICQKRDYLINLGVAGDWPAWGVMGKVHCDNAKEFRSRALSRACEDYGIDLQYRMKKTPHYGGHIERLMGTAARIFLGLPGKTFSNPAQRKGYDSDAKAAMTLKELEAYLVDYIVNKYHRNLHTGIQMTPLAAWERGLSGSATEAGIGLLPIPEDPMRVQLDFMPYEERTIQRYGYQLDKVHYYDRVLDRYINSLEPGTKTKQKYLVRRDPRDISVTYFLDPQDNRYTAVPYRNTGFPAISLWELNAANEALKQDGLKDVDEDQIFATVDRLRQRVDDSLNATKKARSARRSAARRPPGTRPTAAVQPERSVPIPAAANEESIHGYNPPRPSRIEDDASDEPITPFQVSLKR

SEQ ID NO: 197 - protein, 294 aa, synthetic construct
  REGION 1..294: note = TnsF-Tn7 System Protein
MNTQHLLPEVAEVLDAPNEYRVEFCRQDRWVGYTAATKALDELDDLLNFPKNLRPNNILLVAGSGNGKSSILEYFTNRHPILATHEGKPVVPVLKIEMPSKPDESEFWSLILWTLGISHREGDRAAHKKRQAKSAMVNANVQMLALDEFNNVADAGRATSDLLAAIRNLSNELRVPIVAAGTAKAINALNLDPQLKSRFEPIGLPRWSANREYRTFLASYEQLLPLARPSGLSQAELARAIFAMAGDTVGQNVKLLRRAAVAAIESGTEQITMDLLSRLDWTRSDAWQAIAKAV

SEQ ID NO: 198 - protein, 294 aa, synthetic construct; identical to SEQ ID NO: 197
  REGION 1..294: note = TnsF-Tn7 System Protein

SEQ ID NO: 199 - protein, 818 aa, synthetic construct
  REGION 1..818: note = TnsF-Tn7 System Protein
MTVPPRAPEAPEALLDPIGTVVAVVTSIDPCLDHDDVHRVVERVGGGRAKRRRLATTLARDASVMTSGRSPAPRVVGDLLLALRAAGASRISPPWCTSCGRELSAMQLRGQDWYCSPCYTRPQPCAACGEQRQVTFRDRHGRPRCSQCPDHDARDPRQVLVGLITAIDPGLSADAVTTAITDTVSKPAHAQKLAWALEDAPELLTGDGAKAPFPMVLRLIDALGDAGATRIQPPACPRCRRVIALSKRRDGLRICRNCCARANAVACSGCGTVREPAARDVHGNPLCPNCLVAAPLNLEECVRCGRRQRVNTRVADGPICAACIPRTTATCSMCARTAPCMISKTTGQPWCRACARAWVQCSRCRRWDAIRAGTREAPLCAGCAVPDPNFWTTCPSCGTGGRLIAGLCRHCRLHRQLGELLADTTGQIRPELQALHDSLATAERPDTISKWLQQSTVRSVLRDLAAGHRPLTHSALDDLPPGKSMDHLRSVLVATAVLPTRDEQLSRLQRWVNQTLHEDADPQDREVLRRYAVWHELRRIRQRNRSAEATYGQLDMVRQRLRGAINLLAWLRPRGLTLDTCRQPDLEAWLTSDDASHRAEVGHFVRWAISQRINPNLQFAATRWTGPARPLDQEQRWHQAKRLLHDDTLDTDDRVAGLLVLLYAQRPATISRLTLDDIDADAATVELRLGSVPVELPEPLAALVRDLAATRHGHAVTGHHSTARWLFPGGQPGRPVSADRLGERLRLLGIRPGQARSTALFQLATEIPAAVLARMLGIHIKVAVQWQHVSAGDWTNYAADVSRRTNEAQERHSDSSDI

SEQ ID NO: 200 - protein, 1636 aa, synthetic construct
  REGION 1..1636: note = TnsF-Tn7 System Protein
MGVVRVTAMGPGSVEYLLHGCDSTPEQGVESAGLERHGAAAYLEQGLEHGEPQGTWLGSGMASLGLSMQAGDTAESVDVRAIFGQLRYPEHEVEGSTEKTPVYLGSAPRKYRTAAQIVADALKAEPEATRERRDQIEWSATKRARTTHAWYDVTFSPVKSVSVYYTALLAAGDERGAEAVRAAHFDAIRIAVEAAESDLAYVRTGRHEGKGPGGRSVGTYEQAGGLSVAVFEHHTNRDGEPQLHAHAAVLARAAAANGAIYAIDGYGFKTITNQLTADYTRAYQQLLTERLDVVWGLRADGKAREIVGVEAELLDEASTRTAEHVRPRVAELVEGYVARHGREPGAVARRALAQQAVKDTRSPKTGLAGPAAVKAWAGQWVGRAAGRGQRLEAALDAVDAAAAAAALAGVHPNHPGPVAGQAVGAVAGQEHGRVLATDGRQAALEVLAEIAAAVAVDESGVTGQTAGVAGRPVAGGHDRSMAEAGTVAGRVAAAITAGIGDVQAAYPTWTTANLARAIDHQLGDAASAVGVAAAARPAFLKTVTDAVLAQPGQYGIVQVSAGDPVPVPDELRRASDGRSKFRPHSDERYATTAHISIEQRLLAGVQTPGAPRLDDAELAAVAGRLDRRGLSPDQAAVVTGVLTSGRRADVLVGPAGTGKSHTVGALAREWADTIGGRVVGVATAEIAARNLAGLGLEALNTTRFRGRFEPDPSTGAALDQLGTRDLVVLDEASMSTTTDMHAIAAIAETAGAKVLYTGDHHQLQGVGAGGMFAHLADQPGALELDTVHRFDQAWEAEASLQLRTGDPVAASAYVDHGRVRTGTLEEMKTHTVRGHVADLVSGTEALLVVDSNRLAAELSKQIHDELVELGRVESQVLFRLPDRTEIGVGDRILAGRNARGLRVDPGPDGVLRPVTNKEVYTVLGRDRDGQLLGRDEHGAVAHLPESYVRKHVGLAYAVTGHAAEGVTVHGNGRALAGRDATREQVYTALTRGTRQNLLYLVTEQAPDAHTPQRVEDTPVQRLADIISRSGIDQAALATQEAAAAEQTSMGMLGALINQVSSEYAHEHNAGVVDELLAEQLGADAAAGVREEGAYGRMLAAVYAAELDGHDPRALLTEAVQMRELDSARAVSEVLHWRVGARAAARAPEHDQSERAAGMEWAAISETVPDGPVRGYLDALTERAAAREAELGAQAAADPPEWAQQRLPAVPDAEQDPAGRQAWEQRAGLVAGYREYRGIPEAQLSLGEAPPEAQQFARAFWMAAVERLDDDPTTAALRHRSAAELYQAREAWSLALYHAEEHGPRSVAEELAATHRLAAEIRDDAVLAAAEAATHPADTPEHTERAEAAARYHALAEQYQADAASLETAHADRQHWWEQTADLREADHAAAVELARRKLPAHRHTEPHPGAEQLALLHTTGPGTEPGTAEPAAEPAAEATPAPAEADMPDRETSTHVVDPAPEHTSAEREVVAGPVLDTEPAAATGPGEEPAVHAEPGAGDEPGNDPEIGPSSEAEVDTGDDDGRGAGTEAAPEADHEPKPDERAAERAATHALRDAVHNSDRHRAYHQALRTGHHDAEHTPQHRGQAAAERRAELDQHQLEAERNEATLDRGTAPAAEYEHGYELDSEQGYELDDW

SEQ ID NO: 201 - protein, 1636 aa, synthetic construct; identical to SEQ ID NO: 200
  REGION 1..1636: note = TnsF-Tn7 System Protein

SEQ ID NO: 202 - protein, 847 aa, synthetic construct
  REGION 1..847: note = TnsF-Tn7 System Protein
MREQTLEEISQIISTAEPAVALATIREVVGAALPKHPPAKRLLALLRTEPDLLTSASSAMPRALDRLVGALLDHGAEYLQRPQCGHCGATRPLSSRDGTSRICYSCAARAARADRADQQPVACHDCGRHAPAKATVLDRPYCRGCWARTTASALDRIAAVTRRHLAEAGDLAGTNGSKNDPEAVIADAVVAGVGGSPKRARLALELEQLGAIWFADPAQGNKLFGVLYDALHEAGLPLPRRRCGRCGREAALPGIIDGRRCCRRCQRHGLRTVCDGCGELASLERREPDGTRYCQRCTNTFPDESAICIVCGIHRLISHRAATGPVCGSCRGRELVATCTRCGRSGPCRFAGTAHAVCEPCAVTREACHHCGRVRTVHSRTSEGRAVCPGCAPPVIETCTGCGRARRVAGRGNAAAYCTSCYSKNPVSFRDCRRCGRHAYLTAERLCDRCDAHDKITTLLPDTLIATRPPLRNLRDTCLAADPATVRGVFRRKRSTTILRTLLAAPDAIDHAALDALDTPQATRAVRSLLVEHGVLPARDEHLARLETWVEHACARISDPTERRAFVSFARWRHLRHLRNRETPTSYGQAASRRRELQLIIDLLLWARQNATSLSTLTQDDLDRWRAGGATDRYQVKAFLRWTNRNGYSRRFELTHVWNSSVTAAGVGEDKRWQLLRHVLDTDRATASTRFAAALLLLYGVRLHRIATITVTDVTRGDGLVHVTLGSEPLALPDQLDPLAAAALDDRGAARLFHTAQDTHWLFPGTNAGQPISADTLTDRVATLGISAINARRTALASLAMQLPPVIIARLTGLDVATASRWADAVSASNARYAAVAANRSPGPHQD

SEQ ID NO: 203 - protein, 818 aa, synthetic construct; identical to SEQ ID NO: 199
  REGION 1..818: note = TnsF-Tn7 System Protein

SEQ ID NO: 204 - protein, 381 aa, synthetic construct
  REGION 1..381: note = TnsF-Tn7 System Protein
MTGAVRVRKGVAHGTSSLYLASGVVFLHEEETVWEAMLEGWTMQQIGGRNSLKSSVDQLVAAVRAYQRFSGEWPWQWSATSFDEWMAHLVGVRHLAVSSLRKYQQAVRNFCEFLCSPHYGWASECEQRFGTHPVQVCHEYNSVRHLQAYEGDPARRPLTRDELQRLLDHADDQVDVRLESGRKGALPAYRDATLLKVVYAWGLRAREATMLDVTDFYRNAHAPEFREYGVLQVRWGKASRGGAPKRRAVVSLFDWAVDAVEDYVENVWPLMRSTRTNALWLSERGARLRPRELSDRFKQYRDVLGLDPVLSPHALRHSYVTHLIENGYDARFVQEQVGHVYQSTTAIYTNPRELHQTSENLQVAWPAWLGNGDPRTWQACA

SEQ ID NO: 205 - protein, 373 aa, synthetic construct
  REGION 1..373: note = TnsF-Tn7 System Protein
MRRVDLAGAAHLELVDGVVALHPEDAMFEAMLRGWRAQQAARGLREDAVGARERLMRRFGEFTNEYPWNWEPSHVDEWSLSLTAEQHLAPSTIRTYQCSLRLFNDYLCDSRYGWVAACRREFGPQTHPVPIVHEWNTIPHLNDYEGDPEARPFTREELQRFLDYADEQVERAVRAKRKGALAAYRDATLFKVLYGWGLRRTEASKLDVVDFGRNPAAPEFGRFGTLNVRYGKAKRGQPPRRRNVASVMGWAVDAVADYVENIRPRFDCAEHAALWVTERGGRIKPAEINARFVAYRDALKLPRALVPHSMRHSYVSHLTEDGVDRRFIQCQVGHEVDSSTAVYTHVSSDFMNTALRRALAPALGHGPAGQEGR

SEQ ID NO: 206 - protein, 118 aa, synthetic construct
  REGION 1..118: note = TnsF-Tn7 System Protein
MMKVIGYQWRLREVMAAHGMFSTTKLAPLLAERGINLSTSQVYRLAAEKPERLNMHVLVALMDIFDCSADELISRVELGTAAATGTDDESHEQAAGAQVLRDKQLRPRRARIVPRGDA

SEQ ID NO: 207 - protein, 115 aa, synthetic construct
  REGION 1..115: note = TnsF-Tn7 System Protein
MMTKLDYRWHLRQVMAARGMFATTDLIEPLAERGIRLSSSQVYRLVVERPERLSLKVLMALLDILDTTMDELIEPVAAEPAKQTRAAGSSGAGAGGAAGVGGLRPKRAQVTRIDS

SEQ ID NO: 208 - protein, 851 aa, synthetic construct
  REGION 1..851: note = TnsF-Tn7 System Protein
MSAALVAEVIADPTGLVVRLVTAVEPTLTAASIREEVAKIAGGRAKSRRLAQNLLTDPTMLTSGRPPIPWAVGQLLLGLRAAGATAIAAPCCGECGRTVSYLISRKGCVICSPCRDKPETCAKCGEERRVCTRDRHGLPRCEHCPDLDDDPVRLLTLLITELEPALNGRSVLDALHRATVRPAGQRRLAWAILDNPELLTGAGSLAPVPAVLRFIDELIKTGAAKVLPPSCPRCQRVVALSKQLDGHRICRNCFAKTRAVACSRCGSVREPAARDPGGGPLCPNCLVNDPINLEDCSGCGQRRRVAARTAAGPFCQNCRPRPIATCGICGRDAYCEMSRATGQPWCDNCQHRWMRCSGCGTTAQLRGGTLDQPLCARCVNPDPDFWDRCSTCKTTWVLSPRPCQRCVLGQDLRSLLAEDPGHINDDLAHLQRALTEVERPDVAMAWLRRPHVRQLLAGIGRDPRTISHDILDELPSSKKLDHLRNVLVASGALPERDERLAVLERWTATTLAARADPHERQILHAYAIWHHLRRLRRRLNGVHATHLQCLNIRSHVTAATNLLDWLTDSGLTLSTCTQADLDRWSTDEVSYRHETGHFVRWALAHRHARGLTFPAARWQGPAGPLDSEKRWNDARRLLGDTTLKPSDRVVGLLLLLYAQNLSVISRLTTEHVNTHGNRVELLLGSSPVVLPEPLADLVLELVETRRANTILNKTADPPLAVSRPATRPAPQPRLPRPTTQEDRHPRRPRPLHSPVRPRHRDPRRHPRPRARHPHQGRRRLAASIRRRLDDLRRRRRPPKNRSGVLRPPGANRAHWRVARTVTASLVGARCSGMSGCQDRRLVERSAHMTPR

SEQ ID NO: 209 - protein, 851 aa, synthetic construct; identical to SEQ ID NO: 208
  REGION 1..851: note = TnsF-Tn7 System Protein

SEQ ID NO: 210 - protein, 378 aa, synthetic construct
  REGION 1..378: note = TnsF-Tn7 System Protein
MQQRRVGLAEAAHMELVSGVVQLRPEDAMVEAMLRGWRDQQTARGLKEDTIVPRERLVRRFLEFTNDYPWCWTPGHMDEWSLSLTAELHLAPSTIRSYQCTIRQFSEFLIDGRYGWAVACEREFGPGQHPVAIAHEWNTIAHLNDYEGNPEARPFTRAELQRFLDYADDQVDRAVKVKRKGALAAYRDATLFKVIYGWGLRRTETAKLDLVDFGRNPAAPEFGSYGMLNVRYGKAKRGQPPRRRNVASVMDWAVDAVADYVENVRARFGCEDHPALWVTERGGRVKPAEINARFVAYRDALKLPAVLVPHSLRHSYVTHLTEDGVDRRFIQAQVGHENDSSTAVYTHVSDDFMNAALRRALTPALGAENDGTARKGRR

SEQ ID NO: 211 - protein, 109 aa, synthetic construct
  REGION 1..109: note = TnsF-Tn7 System Protein
MTAKLDYRWHLRQVMATRNMFSTTDLLAPLADRGIKLSSSQVYRLVVDRPERLSLKILMALLDILDCTMEELIEPFPVAGQAKKRKAVGEETGVGELRPKRARIAPTSE

SEQ ID NO: 212 - protein, 476 aa, synthetic construct
  REGION 1..476: note = TnsF-Tn7 System Protein
MAVKRWPEGPICSGCFAKARETYGRCSTCDTDRMLPGISASGQGLCTDCAGGLGDFTCTRCGQEGWLHYAGICGRCVLTDRLTTFLDDGTSSIRPELQPLFASICAMSRPRSGILWLSKPHVPPILQALAKGNVPLTHEGLSRLTPWRSVVHVRDLLISCGILPPIDRYLFLFEQWLPTWLDTITDPEHRKLLHRFSTWHILRRLRTTAQTGPIGHYRNQNARCQLRAAAAFLAHLSTRGHDAQQCTQTDLDSWFATANSTGRQDVRSFLRWATEHHTMARLTVPASFTDNPAPISNQQRIDLIRRIHTDPAIAPIDRVIALLILLYAQPLPRIVRLTLADISRDGEQLLIRLGDPPVPVPEPFAEHITTYVASRPNLTTATNPDSQLLFPGRRAGQPIHPTSVRLRLQNLGIPNLNARTRAIRELLLQAPAPVVATMLNYTSQRAERIAAEAGNTWKTYAAGDHTRRPNPTPDRR

SEQ ID NO: 213 - protein, 476 aa, synthetic construct; identical to SEQ ID NO: 212
  REGION 1..476: note = TnsF-Tn7 System Protein

SEQ ID NO: 214 - protein, 923 aa, synthetic construct
  REGION 1..923: note = TnsF-Tn7 System Protein
MLSIHRLTAGDGYKYLLRHIASADIDGRMATPLTAYYAATGYPPGRWLGSGLVGLGDGQLVAGSEVSEAQMEALYGRAEDPLTDRTLGQPYRVYKSPTSRIDEQTRVLDPGLNDDDRHAAIDRIRKTEMRRKSRQAVAGFDLTFSPAKSVSALWATADVGVQEQIVAAHHEAVQQVLDLIEQHAAFTRSGHDGIAQLDTRGVITAAFDHWDTRAGDPQLHTHVVVANRIQGPDGNWRTLDGRVLFQSAAMSEIHNVLLADNLSRRLGVTWELRERGPRRNPAFEIDAIPDDLIREFSARTEQIETNLALLLDERGDDLHPPNRREMYVLRQQATLLNRPPKHLARPLAELLASWKRRANQAVGSTVIASIQQSLAHGPERPLAADDLSPETIDAYGAATVLTLQNKRATWTRWNLMAEAARQTRLIRIVSSDQRFAVLQLIVEAAERHSISLTAPDLVALPVTRASGESVFTIHNGQIYTSPVILGAESVLLDLARDPSGPKVSHEHMPTTDLSADKVHAIQRITTSGQKVEALIGPAGTGKTSLLSVLATTWQATHGPGSIIALAPSSAASQILSDAIGSPTENIAKWIYESTGLGAETRRQRLQQTEYAAQLAHRSRRKVRHQRLATQLAGLRAEEDRWTFHKNQLVIVDEASMASTMELAILARATNAAGAKLLLVGDDAQLGAADTGGAFRLIAKDTQAAELTDVWRFTNPWERDASLALRTGNLTVIDTYDDHNRLTAGPTDEMETAAYQAWRTDTHAGKTSLLIAADNTTVARLNNRARLDRITTGEVEPDGIQLHDGTHVGLGDHIVTRLNNRRLRYAKTSFVQNGNLWTVIHRWPDGSLTVQNHNQDTVTLPTTYVQESVELAYATTAHRAQGATVDTAHLLVTDHLTRALLYVGLTRGRHTNHAYIATHQPTPD

SEQ ID NO: 215 - protein, 923 aa, synthetic construct; identical to SEQ ID NO: 214
  REGION 1..923: note = TnsF-Tn7 System Protein

SEQ ID NO: 216 - protein, 112 aa, synthetic construct
  REGION 1..112: note = TnsF-Tn7 System Protein
MRGQKRQVSYQWRLRDIMAEHQMFATTELVPLLHERGIDLSASQVHRLVTGTPERLSLAVLAALCDIFDTDPGELIPTDAVNLGVRKTASGTAAPTKASVAGLRPKRARITD

SEQ ID NO: 217 - protein, 356 aa, synthetic construct
  REGION 1..356: note = TnsF-Tn7 System Protein
MHWLRNPSPQGALQDLAAGHGPVTHETLDRLQPYGTVRLIRAALVTAGAIPPRDEQLARLEDQVLRIAARVIDPGDRRTVRSFATWHHLRRLRRRSQPASYEQINSARTEIKAAAELVNWLRQHGTTLADCRQHDIDEWLTGTAWLRVLARTFLAWAVRNRHAQKVKIPARQQRLSGAGIHTDKRWNLIRRLLHDDTLDLRDRVAGLILLLFAQPLTRISTLTIDQIDDDGVLLTLTLGAEPIQIPPPLDDLLRALRDRRQGHAAIGRTDSNPWLFPGGVPGGHLSSHQLQRNMKALGVHARPARNTSLIDLAADLPAVVLSQLLDLHLSTATRWTATAGSPAADYAADLLRRADR

SEQ ID NO: 218 - protein, 356 aa, synthetic construct; identical to SEQ ID NO: 217
  REGION 1..356: note = TnsF-Tn7 System Protein

SEQ ID NO: 219 - protein, 388 aa, synthetic construct
  REGION 1..388: note = TnsF-Tn7 System Protein
MLGEANGVVRADLEPVFAALHRQPPHTVLAWLRGRGARALMAAIGHGKGPVTHETLDQLAAPARTVAHLRGLLVSVGTLPQRDDYLAPLEQWTARATARIADPNERAIVRQFATWHHLRRLRRLSQQTGTTTYTQVGAVRRDVKAAISLLAWLRGAGSCLADCRQADLDEWLADGSGQRSNARRFLLWAIARRRAPALEIPAPPRDAVAPFIAHDRRWNLLRRLLHDTDLDLGDRVCGLLVLLFAQACSRTVRLTTDDVQYDGSHVTLALGAKPIQIPPPVDDLLTELVRQRRTDTPGAVWLFPGAVAGRPFSADQLSRRLNAIGVRVRAARNTAMLDLAGDVPAVVLSHLLGLHVRTTTDWVRLAGATGAEYAAEVSRREPFGRNRG

SEQ ID NO: 220 - protein, 1144 aa, synthetic construct
  REGION 1..1144: note = TnsF-Tn7 System Protein
MGIAPLLSIGLPLVRVLLRLQNPSGGDLADSITDFSQLATSVKDRADQREIGRNLERISDKVIRRLDKFIQIEFRKATEDEIERAAGIVAAALTRAGSADLTAVVSNDVQVRALERYTLEHSDFATEAAELGSVTKAAGRGRPDLEDLAYKLLRETCYEVVELAHKHPNLTATALAGLLSRTTELRELLDSVDRSLNDLPGRTAALTGEDQRTEQQRAFGEFALDYRRAVANDQDKLELYGVDLIREVRRYSLTAAYLSLRLAVSWSDDDQAGDGDVAAMLPAHGLAVLRGAAGAGKTTILQWLATNVARRTLSGRLAHLNDHVPFVIKLRNYADRPFPKIAGLAADTTQSTLVGEPDGWIGDVFQQNVLLLVDGLDELSDRKQEDLVTWLEGFEGLGRRVLIVLTSRPTADPVLRSLSRLGFSTTRIIDVLPLDREQIRSFVMHWHTAIASQFTGAERAKLEGQAGKVAAKVSSDREYLLLASSPLLCAVLCALFHLKRGILPSHRIEIYDTLLNLLLGDRDAHKRVEVDQVRLSPTEKRMVLEEIADFMLTNELSEAEHSRIVDVVGRSGVASRFGSATPQEVVRHLLARSGILRTPSEGLVDFVHRTFLEYLAARSLVRQDRIELLASNVEKANWNEAVVLAAGVGIERQVELLVGAVVARAEAADDPLLSVTCASLLDTALVVPKDLRPRILRIIARIVPPMDEATAKACAAAGNSLLQPMRDALQAPDLHPLALQTSIRTLGEIGTPEALAVLGAIPARHRVDAIKQLVAVWTWFDPREFAETVLRNLAPERGVPVTLPNSMLLPHIRGLHANFLWECAVEVPEESFNDNCRDVRIQTLWVSNLQVLQDPRARDGEFLWTIDGLRRVRADGLRSVRVTADSDAARAGSIEDVTFRLRNGSIGVDVWDHLPGLRSIELGGDVEVDFRGLCRSTRLHRLILDGKVRSSEPTDFDLPALTELHWADTDDTELLMSIVYGAPELQRVSIAGVSGLANLDFLSRAASLRVVELTDLEDLSDVSTLVNLGGLQTVKVGGNHALESSRSLELLASEVEDLAIDGLDLGRFSWSEYDASVAVPVAGPVDPEAAREQDQAEAMEKLEEEYGPLLPWDEEERVWEAELELEDPDVEADIGDADQSGKSE

SEQ ID NO: 221 - protein, 1144 aa, synthetic construct; identical to SEQ ID NO: 220
  REGION 1..1144: note = TnsF-Tn7 System Protein

SEQ ID NO: 222 - protein, 388 aa, synthetic construct; identical to SEQ ID NO: 219
  REGION 1..388: note = TnsF-Tn7 System Protein

SEQ ID NO: 223 - protein, 394 aa, synthetic construct
  REGION 1..394: note = TnsF-Tn7 System Protein
MITRPDGTRDERLAPLLELFARVDQPRTLLIWVNRKPSDERPTRGIDVLARIASGEVELSHDALDTLDSTPSLTHVRALLIAAGILPDRDPHIAALEHAITRTLARVKSNDDRRVLTSFARWDVLHRLRRRQARKTSIPSSSAKNAAGDIAEAARFLDHLRSSDAQLADATQAHVDQWLASGERARLRISTFLNWAHAQHYAPHVTVPAPRRELAPRALDQDERWSLARRMLTDDALPAADRVAGLLVTLYAQPLKRIASLRTEHVNDDGTTMHLTLGSDALLIPEPLADLIRQLPELRQRGLSGHSPNHHGWLYPGRNAGQHLHPETIRARLATLGIRARDTRTAALLQLAAELPPTVLADLLGMHRNTATTWAKAAGGDWTRYAALRAKSLD

SEQ ID NO: 224 - protein, 394 aa, synthetic construct; identical to SEQ ID NO: 223
  REGION 1..394: note = TnsF-Tn7 System Protein

SEQ ID NO: 225 - protein, 243 aa, synthetic construct
  REGION 1..243: note = TnsF-Tn7 System Protein
MVTAALRVDGLSKVYAGGTRALDGVSLEIPDGSFFGLLGPNGAGKTTLIGAVTGLVRIGAGAAFVFGHDVVSESRMARALVGLAPQEIHLDRFLTAREVLTYHGRYFGMRRDDADQRADELLSVFDLAAKASQKPNRLSGGMRRRLLIARALVHRPKLLVLDEPTAGVDLELRYELWEYLRMLQGELGVTILLTTHYIEEAEALCERVAFIRGGQIIGEGTTAELTSRYGGARLEDAYVAAMA

SEQ ID NO: 226 - protein, 243 aa, synthetic construct; identical to SEQ ID NO: 225
  REGION 1..243: note = TnsF-Tn7 System Protein

SEQ ID NO: 227 - protein, 367 aa, synthetic construct
  REGION 1..367: note = TnsF-Tn7 System Protein
MAGAAHLVLHPDVTPLHPEEATFEGMLAGWVTQQQSRHLAESTIEDRVRLVRRFAAFTNEYPWQWQPSDLEDWSASLVSRSTPVAASTLRSYQLAIGVFLDYVVDRRYGWHDVCVRRFGRGAIQVCHEWNTLAHTAEYEGRPGNRPFTRDELQLLFDYADERVDRTRRLGRKGWLAAFRDATIFKTAYAWGLRRREVARLDAVDFTRNAHAPEFGAHGMLSVRWGKAAKGSPPRRRNVLTVMPWAVETIAQYLDEVRPLYGRSEHPALWLTERGGRVSGEYLNQRFAEYRRHLQLPDELGMHCLRHSYVTHLIEDGYDPLFVQQQVGHAWGSTTALYTGVSNDFKNRTLRSALDRAFTTDNDEEPAR

SEQ ID NO: 228 - protein, 435 aa, synthetic construct
  REGION 1..435: note = TnsF-Tn7 System Protein
MIRTLLGLIKRPEHRATSKHLAAIYPFVAQGGLGGRGALIGYDHSGGAFCYDPWVQYGKTITGPNMIVMGIVGRAKSSLIKTYLYRQAVFGRRHLIIDPKGEYSPLARSLGCTPIVLKPGGDVRLNPLSSHAGLTSQLRLLVAVASGAIGRDLTPTEHTICSNTLATFHADGQPEATLPRVVDRLLDPSEQIAEAMQLSLRELLDASRDLAYGLGRLCDGDLAGMFDGETTHGIDLAAPSLVLDLHHVVDSQAIGIIMVCAAAWLRAAIAAEAIEVDPAKRPNRILVFEEAWRVLANLAAAEWLVDSFKHSRSYGVQNIVVTHRISDLQATGDDGSRVSRLTQGLIADAETKVIYAQDKAELEQAERLLGLTDTEAAELPNLPRGLALWIVGERSFLVRHVLAEHEVALVDTDARMRTTQAHADPDPDPELREAA

SEQ ID NO: 229 - protein, 435 aa, synthetic construct; identical to SEQ ID NO: 228
  REGION 1..435: note = TnsF-Tn7 System Protein

SEQ ID NO: 230 - protein, 115 aa, synthetic construct
  REGION 1..115: note = TnsF-Tn7 System Protein
MSRKHKLGYVWHLRRLMAEHGMFATTDLQPHLVERGITLSSVQVYRLVAQTPERLNLNVLVALCDILGCTPTELIEPIAVPRKARKTASASDPVPAPANVKPKRARIARDAKKRS

SEQ ID NO: 231 - protein, 318 aa, synthetic construct
  REGION 1..318: note = TnsF-Tn7 System Protein
MLDVYPQTAALHWLRALLVTNGVLPARDEMLERVEQWLDEQLLKVPTPHARIVEPFATWHLLRQARQRGRGSPTDQATATHIRTQARLAIAFLTWLDDRGRDLTTASQGDLDRWLTEGKQTRYFLGGFISWARARGLCPDLTMSHRTSADPHDVLDDHERWTRLRRCLTDGELPLHLRVAGALILLYGRTCTDLYQLTTDDVDQDGEDSTLHINGTPLPLPPTLADLVRALADRATPASSIRQQAHTQCWLFPGRAAGRPIAPYVLARGLRRHGIALLPSRHAARAAWATEIPVPLAADLLGINITAAERWAQRVRRD

SEQ ID NO: 232 - protein, 318 aa, synthetic construct; identical to SEQ ID NO: 231
  REGION 1..318: note = TnsF-Tn7 System Protein

SEQ ID NO: 233 - protein, 111 aa, synthetic construct
  REGION 1..111: note = TnsF-Tn7 System Protein
MIKKMGFRWTLRARMAEREMFQTSDLLSPLAERGIHLSREQVYRLVTQPPQRLSMDTLAALCDVLGCTPNDLIEIDAVHTQVRKTGTADSASSKDDAPVPRRTTIRRPPTA

SEQ ID NO: 234 - protein, 526 aa, synthetic construct
  REGION 1..526: note = TnsF-Tn7 System Protein
MAPGPVPATVGSHLVCARCRRPARAKRPGPTDPRQGQPEDTALPPVDVMGYQGRSRLVSVVRWWPEGPVCSGCFARACESYGRCILCRRHRLLPGMDAHGQPALCTDCAGGLGDFTCPRCGQEGWRHGHGGCARCVLTDRLSALLDRGDGTLAPALGPFLKTFTAMDRPRSGLLWLSKPHVPALLRALATEAVPLTHAGLDTLAPPKAVTHLRDLLVASGVLPPVDRFLAQFQQWLTAWQQEITDPDHARILHRYAAWCVHHRLLKATRTAPVGPYRVQNARTALRQAEQFLVFLADADLTLATCTQADLDCWVAEAPTYQPRVLRPFIRWANTTRITRNLHMGIPPEGSRPPLEARAQIDLLRRALNDPAMSVADKVLVLLVGLYAQPLTRIVALTIHDVARTGTEVTIALGDPASPVPAPLDRIFLEHLAHRENLATATNPDSQLLFPGRRAHQSLHPATLRLRLRNLGVANLDSRRGALRQLLLSTPAPIVAEMLGYTSATTERIARESGRTWADYVHLRTSD

SEQ ID NO: 235 - protein, 526 aa, synthetic construct; identical to SEQ ID NO: 234
  REGION 1..526: note = TnsF-Tn7 System Protein

SEQ ID NO: 236 - protein, 1637 aa, synthetic construct
  REGION 1..1637: note = TnsF-Tn7 System Protein
MTLHKLTAGDGYLYLMRHVAKADADGVRAADAAGYYTTRGNPPGVWLGSGTEVLGLAASEVTAEQMRALFGAGLHPDAQRIITEYTRARAHSDMRDAQVRTLAQAAVRQAQLGRKFAEYKPLPPLSQRVTERVAALEEATGREATTQEIAGIRRAESRRAAGAVAGFDLVFSPVKSVALVWALDPRAQVREAIRMSHEAAMTETLTFLEAHAAHTRTGRDGLAQIDTHGLVAVAFTHYDSRAGDPNLHTHLVISNKVQGVDGIWRALDARGLHALAVAASEHYNTRLQAHVTHRLGARFAARPAGRGKRDIMEIAGIDQRVIDHFSRRRAQLEARYDTLLAEYRATHGRDPDFAGARALAERANLETRSAKGTIRSLDQMRHAWRQELTDTFGPAALTALTEAVGPVPHPTDATAHATPPGLVPGSNDHTHLVEQLAGRVLDVVQNERSTWTTWNLRAETERALRHPGLLAEHHLHAVSAAELDRLAEAVVQRTSGPGMSLRIDPPALVAEPADLRRADGDSVFTRHSATRYTSQAVLDAEHRLLTAATTPRRVRDGGLTPDQVDAVLASWQQDSGTTLDAGQAGLVSVFTTDPRDIVVGLGPAGTGKTTAMRALKAILDHTGTGRLIPLATSAHAAAVLASELGARAENVHKFLHDHTTAHPGRITLAAGDVILVDEAGMAGTPNLDHILTLAQRAGARVRLLGDDRQLAAVESGGALRLLVAEAGVVELDVIHRFTNPDEATATLGLRTGDHRALAFYQQHDRIHGGSQQEMTDAAYAAWLIDVTAGKTSVLATTTTADVTRLAARARADRVASGHVEADGVLLHDGNTAGVGDWIVTRANDRRLTSPDRRTWVRNGDAWRVIHRRDDGALTVEHLRDGARVVLPGAYVGAHVELLYATTAHRVQGATVDTAHALITGEAAREHLYVLATRARSGTHLYVQTHAVLPVDEDERVDRRSWDPAGVDATVILQRILDREAAETSATQAITNAYNTAASLATLVPRYEHAITTFSTGYYERVLDECLDSLDAACARTDDAYPNLLTELRRAHQAGWQPERALADALRQARIDHASQCGPGELDAPARESDTLDTAGGGAVSMTRRLTTHLRRLTATTTPSVHLEKPTREDLTRYRALLTDAGIDTEHLDLDAALTAPALLRSGVFTDPVPGRVRAQITSTTYQQEVARALPRALAHRVLDTRANPTVWTTLQQVLARIEAAGHDIPAILSTPALRTTPAVLDAAQRLAETLTRFSIEHPTPALHGPNARTRAGQTYAFTHLAWAMKAAETHGHDPAVLLPDAAQQQARSGIPGVVSAWLHAQNQHANLTRPPAPAPVLPWAPDVVPATLEDPEHVRYLDQMRQAITDRVAYLRTDLEVAIGEQAPPAWTENLFTPAEGHEHARSHWLDHAQVLAAYRDQYPPATQDPDQPLGPHPEPAPHANHAHVRAHTGAAHVLALTWQIAHPHGTSLQVPAPPASGEEHVRRHMAIVAWNALDSATKTRVAATVLGRIGTLPTPTSGPDALPQQVIPLLAIDVCQEGLDEALTQPHTLTALHRALIDHGHLTDPDTRGAPNITPTHRRPAPATTRTSRTQPRGTPQRQNPPPAPRPDAPQPDVHRRYDPQPGRIEQSHPGRQHRW

SEQ ID NO: 237 - protein, 1637 aa, synthetic construct; identical to SEQ ID NO: 236
  REGION 1..1637: note = TnsF-Tn7 System Protein

SEQ ID NO: 238 - protein, 378 aa, synthetic construct
  REGION 1..378: note = TnsF-Tn7 System Protein
MVAWGEGSRRTALRLVEADEVLDEAEQVLAEMLAGWERRQRARNLAESTIAHRRAVVRSFVDQVQLYPWSWTPAVVDEWFSDQRAVRHMARSTVRAYQGALRGFCEYVTDPAEEWVGRCLDRFDDHPVQVITEANCAVHVADYEGRPARRAFTRSELQRLFDHADEQVDRARVLGRKGWLAAFRDATIFKVAYGYGLRRREVAMLDVSDFGPNPRAREFGDLGVCYVRYGKASKGSEPKRRSVLTVWAWSPGVIQQWRGQALPLFGAASGPALWPTERSARVGLESLTRRLREYRDTLGMDRMLDFHSLRRSYVTHLIEDGWDPRFVQEQVGHEHASTTAIYTCVSSDFRTRTLRRGLDDLLGRAQDAHETRAGEDHR

SEQ ID NO: 239 - protein, 132 aa, synthetic construct
  REGION 1..132: note = TnsF-Tn7 System Protein
MTRQVAYRWRLREVMAMNGIYATTDLVPLLGQRGVSLSASQVHRLVTGTPERLNLTVLAALCDILNAEVGELIETSAVEVASARRVVGRRVEDIEPSRPASRRAVEPVNQDPAQHLRPVRVRLLGDGPDATR

SEQ ID NO: 240 - protein, 391 aa, synthetic construct
  REGION 1..391: note = TnsF-Tn7 System Protein
MTDRLTALLTDPITGLVHEQLRPVFDELNAAPRPQSVITWLKKPPATGARLLGQMARRQTPISHDTFRNLPADRSHNYLRELLASTGTLPRYHAPIEQMERWLDDKLELVDTEDAAVIGRYGRWHLLRNLRTTADRGGLSTSAIYGARSHINGAIRLSRWATTRRTTIAGLTQSQLEAYLAEHPGGRNAQQGFVIWLGRSRTNTAITMRWRESTLPEVVVADVDRWEQIDQLLHDEQIALYARIGGLFTLLFAQPLEAIVSMRTDQVAIDDAGRVMVSFEAVPVEMPPALDDLIRRHLTRPGAPSIASTDHGWLFPGRHPGRHMVRENFRSKLVANGIHPGQSRQAAMFALAGGIPAAVLSDLIGIADTTAIRWAALAARDWSGYIAQRQL

SEQ ID NO: 241 - protein, 391 aa, synthetic construct; identical to SEQ ID NO: 240
  REGION 1..391: note = TnsF-Tn7 System Protein

SEQ ID NO: 242 - protein, 371 aa, synthetic construct
  REGION 1..371: note = TnsF-Tn7 System Protein
MAGEFPGSARMLLVPGVVHLNETAAVFEAMVTGWSRQQRSRQLGEGTVRTRERLIRRFQEFCDSYPWQWTPVDVEDFTVSLTSGSERLALSTIRGYHLTLRMFCDYITDSRYEWPAQCHDRFGQVPSQVCNEWNTVAHLNEYEGQPQRRPLTYRELELLFDWLDDRVDRLARSGRKGALAALRDAVMLKTTYAFGLRRNELARLDVADLRPNPHMRKWGTYGSVHVRYGKASAGSLPRRRTVLAVPEFDWAVDGLRQWVEQALPLYEAGGHPALWLTERSTRVKVRQIDDLFSVARTEIGLDEHLSLHCLRHSYVTHLVEHGYPERFVTEQVGHAFASTTAIYTSVSDDFKNKTLQAALARVYRIDEKGTR

SEQ ID NO: 243 - protein, 113 aa, synthetic construct
  REGION 1..113: note = TnsF-Tn7 System Protein
MTRTIQVQWNLRQVMADRGLFQTSELRPLLEERGIQLTREHVYRLVTKTPQRLNTEVLVALCDALGCTPTDLITPVVAEQKQAKTGTTGEGGPKIGQLRPIRAKVRRPDGVGE

SEQ ID NO: 244 - protein, 702 aa, synthetic construct
  REGION 1..702: note = TnsF-Tn7 System Protein
  VARIANT 296: note = X can be any naturally occurring amino acid
MTVNAADHDRAVSDPSGLITDLVMEAGHGLGRDQVQAVVAAVAGGRAKSRRLALALAERPGVLADGRSPAPRAIADLLVALHDAGAQNKSLPACAQCGRQVRGFQRAGQDWYCPPCIRPCEPCAACGRDRPVSSRDRAGRPRGAKCPDEDGRDPVAVIHGIIAALDPGAGRGTVAEAVRRSAPRPSYQQKLAWALEDNPALLTGGRAPVAAARHPTVHRDAQRRRHRRCRPPFMRALRPPGAHRQAAGRRPGLPVLHREVPHRTVHAVRKRPRARHPRRAGAGLCGLLFIAAPENXTEPCGISRATGKPWCPACQRRRAACSTCGRNEAIASGTVQRPLCAGCTPPLPWASCPVCSDPDHPSPGQCARCIISARLDELMGPDDGSLPPGLQALRREIAAAEHTITATRWLSKQSVAPVLSGLADGSIPLTHQALDELPQRPALAYLRQALVATGALPSRDEEIIRLEAFLHGLLDAQADPERRRLLHRYLIWHLVRRMRSRNNGKPATRQQALLARRLARGAITFLDWLDSAGLTLETCRQADLDQWLASGQAVYREEAGRLIRWAHAARLTSCHLPSAARWTGPTAVLDSEDRWGIARRLLHDDALKPEDRLAGLLVLLYAQGVTAISRMTACQVQAGGDGAVRLQLGRVPVELPEPVGSIALAVAANRKGHATIGAAGPSPWLFPGGQPGQPISGARLTL

SEQ ID NO: 245 - protein, 702 aa, synthetic construct; identical to SEQ ID NO: 244
  VARIANT 296: note = X can be any naturally occurring amino acid
  REGION 1..702: note = TnsF-Tn7 System Protein

SEQ ID NO: 246 - protein, 110 aa, synthetic construct
  REGION 1..110: note = TnsF-Tn7 System Protein
MTRRLDYKWNLRQVMAGRGMFATTDLIGPLADREIRLSSSQVYRLVAERPERLSLKVLMALLDILDCSLEDLIEPAAEPGTAARRKKKAAGAEAGIGGLRPRRARIHGPL

SEQ ID NO: 247 - protein, 399 aa, synthetic construct
  REGION 1..399: note = TnsF-Tn7 System Protein
MIAFDAVDKPRSVIRWLSKSAGARLLSQIASEESEITHATLDKFPQTLHLNHVRQTLVHTGVLPERDEYLDRIDPWLDTLVSSHPEERAQLVRAYARWHVLRRARSRASRRTFTSDAGRRARTMIRVALEWLTWLDDIDRKLADVRQDEIDQWLTANPTRRGYMIDGFVAWAKGRRLMEGGTIPSYPKGEPACFLDDDQRWQQLKRCLDDDGVALTGRVAGALVLLFGQSPTRLIHLSAAHVEQQGEHTFLQLDERPVLLPPKLAKIVIKLRDTGRPSSVLGRAHPGTHWLFASVTPGRPLSIAGLRRRLDELGIRTRPARNAAMMALATDLPAAVLADLFGLHIVTAVRWVKYAKRDWAAYVAERATEANGNSAGSRAVDNPTVGSQQLRESRSTVPR

SEQ ID NO: 248 - protein, 399 aa, synthetic construct; identical to SEQ ID NO: 247
  REGION 1..399: note = TnsF-Tn7 System Protein

SEQ ID NO: 249 - protein, 348 aa, synthetic construct
  REGION 1..348: note = TnsF-Tn7 System Protein
MDPASAVFKAMLEGWETQQRARFLKAGGTIKPRLDLVRRFAEYTNQYPWQWEPAEVEAFIVSLSIAPSTARNYQNCLRMFCEFVTDARYGWPAKCLDIFGAVPRQILHEANTISHVTDYEGNPGRRPLSYDEVQALFDASDGRVEEIQSRHRKGALTAMRDSAMLKVIYAFGLRRQEAVGLDVADWRHNPKVPAFGRFGGVFVRWGKSTNGSPPRRRTVFTVAEFDWIVPVMEHYLEEVRPLLAPGKHPAMWVTERCGRISRRRLNRTFGLVRDLAGLPSELDLHALRHSFVTHLVEFDYPEKFVQDQCGHSWGSTTAIYTGVSDEYRNRLVQRALRERHPDLWKDQP

SEQ ID NO: 250 - protein, 103 aa, synthetic construct
  REGION 1..103: note = TnsF-Tn7 System Protein
MGFQWRLRLRMAEKGYFQTSDLVPLLAERGIVLSREQVFRLVTQPPQRLSMDTLAALCDILDCQPNDLIEVQVVNEKVRKVAGEAKRSAPQARRTTIRRPEGL

SEQ ID NO: 251 - protein, 385 aa, synthetic construct
  REGION 1..385: note = TnsF-Tn7 System Protein
MNCEYPRTALRWLLNSASARLLANTAAASRQLTHADLDQLATAGRGTAQTIDYLRQVLVTFGVLPARDEYLVRIERHLGRVLTRWPEQAPLLRPYVRWSVMPRARRRSTHSPSTPGRAQWAYVRINAAADFLSFATERGLALMEVTQHQVDQWLAGGASTRYEVRDFLVWAARRGHSQDLLVPHRAKAEPVGLDEDSHWDLLQQCLYDEELPLDVRAAGALLLFLGQHLTRIVTLTDSDLISKNGRTALLLDRSPVHLPVPLATLLTELVEQSPEPGWSANSPMPWLFPGTQPGAHRSSASLARTLTAHGIPIRASRGTALIQLAQDMPPAVLAPLLGLHVITAEQWRRRAVTDWTAYLQARGRALAAPDSCRNPEPQSSGQLVV

SEQ ID NO: 252 - protein, 327 aa, synthetic construct
  REGION 1..327: note = TnsF-Tn7 System Protein
MMPAAGRTYWLTEPCRIRRENNSIRIERPDGSPVRIPITDIRDLVTFDHVDINTSAIALLSRHGVTVHILDHYGNHAGHFAPADSMSSASAVRRQVELTSKPEQRLTIARSLVSTTAHNIRWALETTHLDPALATLETALPHCTTSDEAMGQEGNFRRTAWATLDTHLPPWLRLNGRTRRPPTNAGNAFISYLNALVYARVLTALRTTPLHPAIGFLHADTDRRRNTLALDLAEPFKPLFAERLLKRAAAQKILTRNDFETDVASASLSTQGRKKISALMREELATTIYHRTLKRKVTYEELIHLEALKIVRLCLEKTPYKPFRPWW

SEQ ID NO: 253 - protein, 101 aa, synthetic construct
  REGION 1..101: note = TnsF-Tn7 System Protein
MWETATPVVIKWEDRYLLPGDEGFVERLEHNLAHKADVLGLPAPGGLRVLDAGPRRRFEVRGAPRIGAQVRVALAGKTEALEALRSWGLGLDTVQGFGWIR

SEQ ID NO: 254 - protein, 376 aa, synthetic construct
  REGION 1..376: note = TnsF-Tn7 System Protein
MGAVDVPGAMRLVVLGNVRALDPAAAMFQAMLKGWEQQQQSRLLAKKTISDRLSLVRRFADYTGTYPWEWNAEDVEAYFSTQMSRELPLAHSTVRGQQNDLQLFCTFITDGRYGWAAACQEEFGQVPAQICHDWNTADHVAEFEGNPGRRALTYDELQALFDAADDRVEQARKRRRKGVLAAWRDAVLLKSVYTYGKRRRETSMLDLHDLRHNPRAKDYGRFGALEVRFGKAPRGSPSKRRTVLTVPEMDWIVPLLEEWVDEVRGRFGAGKHPALWVTERCGRLGLRRLDEVFALVRQHAGLPEELELHSLRHSYITHLIEFGYPERFVQDQVGHRYASTTALYTWVSDEYRNRLLEDSLARRVERMAAREEVGQR

SEQ ID NO: 255 - protein, 110 aa, synthetic construct
  REGION 1..110: note = TnsF-Tn7 System Protein
MTKRMGFRWNLRRLMAERDMYQTSDLLPLLAEYGVHLSREQVFRLVTQPPQRLSMDTLAALCGILQCTPTDLIDVEEVRRQVVKPAASGEVADRSVPPARRTRLRRPEGL

SEQ ID NO: 256 - protein, 273 aa, synthetic construct
  REGION 1..273: note = TnsF-Tn7 System Protein
MARCRDARRRAARGRYTALAAKGDTRDIKVAIDFMSWLDTHDIYLQDTTHNDLERWLVAHSSLHRTVVTFIQWAVARRLTGKLAITRPSKKNDSRFLDEQDLHDQLRRCLNDDTLPREARIIGALIRLYALPVSRIVELTTDRFRRDEKGAYLTLDRHPVLLPPKLAVLIEDQIAQPVTDSRMRQQFGNENGYLFPGKAPGRPRNVIGTHNLLNQLGLPVLSARNTAMIEAVTSLPPIVVADLFGMHPSTAQRWANYAKDDWSAYLAARMVAE

SEQ ID NO: 257 - protein, 796 aa, synthetic construct
  REGION 1..796: note = TnsF-Tn7 System Protein
MGGQRGAMPDPSKAADLAEFVCLLGELRAWAGMPSYRVLAKKVGPLMRPARVVSLSTVVDVFKTGRSRLDLDLVVGIVRALGADGPVVGLWRTACIKVHGLARTGGPVGVFGQLPADLVTFTGRREELARLIAAATQHHDRSGANAVVISAVEGMAGVGKTQLAIHAAHKLVRAGHFTDVQLYVNLRGFDPELPPADPSAVLEAFLRQLGVSAPHIPESRDERAAMYRDRMRDRRALVLLDNAATEDQVRDLIPAGPTCLVLITSRRSLAGLDGATPHLIDTFTETEALDLLARIAGHDRVAAEPEAAARVIEYCDRLPLALALTAARLRSRPAWSPAELADRMQAGRLEAISAGGRAIRPVFDASYQALPDRAQQVFRLIGLHPGPDFSAAAAAALAGITVSEAAEVLELLLDEHLLQQKRSGRFELHDLLRAYANEQAITIDPGQERRAAVYRMLDHYVHTAHDAALLVERGRDPLNLPSPQPGVCLEHFADHERALAWFTTEHAVLLSAVGHAAATGFHAHTWQLAHALATYLDRRGNWHDLAAVGNTAIEAADRLADPLGKAIARNIVARAHRRHGNYEDAQHHLRHALDLFRRIGNLDGQADTYIELARVKARQSPPAIAEALTLSRQAQALYQSRGHRLGQAQTLTAIGWSHARLGDYAQALACCRQALPVLEEFDDRERQAHAWDSIAYAHSDLGQHSQAVACYRRALDLCRDLGDRPLEADILNRFGDAHHAAHCPDAAHDAWQQALDILTELDQPYADQIRSKLGLYGDRWEVPDRGRVRGQHQRTF

SEQ ID NO: 258 - protein, 796 aa, synthetic construct; identical to SEQ ID NO: 257
  REGION 1..796: note = TnsF-Tn7 System Protein

SEQ ID NO: 259 - protein, 303 aa, synthetic construct
  REGION 1..303: note = TnsF-Tn7 System Protein
MTGTDPAALAAFIGNQRAEHHVPHRLACRVLGVSESWFYKWRDKPTTAREVRRGQLADAIRQIFEKSGGTYGSPKVWLLLIRAGWRVSVNTVARLMAELGLAGRKIRRRGGLTRPGKRPAFADFVRRDFTADAPDQVWCGDMTEIATGEGKLYLATVIDLFSRRLLGYAMGARHDAELVVASLNMAAATRGGDVKGVIFHSDRGSEYVSRRFRWACRRLGVTQSMGRVGSCFDNAVSEAFNSVLKVEYVHRHTFATRTEARLRIATWITAFYNTHRLHSVCGYRSPIDYEHDHRANSALELAA

SEQ ID NO: 260 - protein, 478 aa, synthetic construct
  REGION 1..478: note = TnsF-Tn7 System Protein
MPATPHTCTRCGQTATGRYLLLGGQICNTCYSSLRRNPKPCPSCTEIRVLAFIDDKGQITCASCAGQPRRFACRSRGSEQFLTGTHCGHCRLDQRLQELLDNHGSTLPPLALLRSYLTAAPMDPRSIVRWLRREPIARTLRGMATNTLPISHLTIDQLEPGPRTRYFRRLLIDAGTLPPIPVLLHELNIFVDTAAAQLPTKHAPVLRRFHRWEVLPQLHRRYRDQGVDITTGVFTTQRSATLVRARFLDWVSEQDLALTDLDQSTLDYYMARVKARVTINQFIGWAARSHLADDLVTHSQPVRAAPSTYSEGELWEDTHQLLRTDTVELPVRIIGLFALIYAQPLDHSVRLTRDDLQTRGNSLMVAFGPTPVQLPEPVADLVRQHLAAPARRGFATGTSRWLFEGIMPGQHLSAAYARLRLTDNGIHSRHARETQLDLLARQLPASIVADTLGVTLHTAEQRRGRAGGIWSSYPALRD

SEQ ID NO: 261 - protein, 478 aa, synthetic construct; identical to SEQ ID NO: 260
  REGION 1..478: note = TnsF-Tn7 System Protein

SEQ ID NO: 262 - protein, 366 aa, synthetic construct
  REGION 1..366: note = TnsF-Tn7 System Protein
MHPPSLIALATNVVALDEERFVFNAMVARWGDQQTSRGLQPTTIERRQQFIRRFQSFCEDYPWRWRPGDLEDFTTQARSGAAPLTRSTVRSYQLTIRLFCEFVTDTRYGWPAECSNRFGAVPQQICHDWNTIAHLLDFEGRPARRALTTDELEQFFDAADSRVDAIVRTRRKGALNALRDSQLFKTIYAFGLRRAETVGLDIADLRSNPGAPQFGSYGALYVRHGKGTRGTGPKRRTVLTVPETGWVVDGLTQWVDLARPRLLNEWHTDALWPTERHTRVSTRYLNMRFADLRDQIGLPSELTPHALRHTYVTNLIEWGYSEKFVQDQVGHAYASTTAIYTSVGDDFKNRALARALSHIYGDTDGR

SEQ ID NO: 263 - protein, 117 aa, synthetic construct
  REGION 1..117: note = TnsF-Tn7 System Protein
MAANQNSPVRWNLRALMADAGMFQTTDLIQPLRDHDVQLSREQVFRLVTRTPERLNIEVLAALCQIFDCGPSELITVKAQHTSTQAEAGGQGSRRDISIGDLPPVRARLHRPDTPNR

SEQ ID NO: 264 - protein, 256 aa, synthetic construct
  REGION 1..256: note = TnsF-Tn7 System Protein
MDYATRTAKQEITEAGKFMVWLEESQHAQIEYLTQEHIDLYWSEGPTTRTVVRNFLLNRKLIGRRKPLHAPKREAMTTPLSTPTERMNALRTVIEADTVKLSTRVAALIFLLYGTEIGRIATLKRDAIAHTPNGMTIELGPLLAPVPEPLLPLFSEYLAANHQGTRSSTDASVWLFPSTQPGRHIQANSLWNRFTIFGIRPQASRNATLNDLTKELDISTLSSMLGYGLNTMAAHAARAGTQMATYPLISRTTPRN

SEQ ID NO: 265 - protein, 799 aa, synthetic construct
  REGION 1..799: note = TnsF-Tn7 System Protein
MTMTGNAVSAASARPVAAAPAADAHDLIRVRGARENNLKDVSVDLPKRRLTVFTGVSGSGKSSLVFDTIAAESRRLIDETYSAFVQGFMPSVPRPDVDVLEGLTTAILVDQERLGANPRSTVGTVTDANAMLRILFSKLGEPHIGGPTAFSFNIPTQQASGVMTSATGDKTIVRNAVYLGGMCPRCEGRGSVSELDLSQIVDESRSLNAGAIMVPGYTADGWMVRGFAESGFYDPDKPVAEFTEKERHALLYNEPTKVKVKGINLTYEGLIPKITKSMLSKDLDALQPHIRAFVERVATFARCPECDGTRLTEAARSSKIAGVSIADACRMQVTDLAEWVRGLDLPDAGPLLEALSANLDAFVTLGLGYLSLERPSGTLSGGEAQRIKMLRHLGSSLTDVTYVFDEPTIGLHPHDIQRMNTLLLQLRDKGNTVLVVEHKPETIAIADHVVDLGPGAGVGGGEIGFEGTVDGLKASGTVTGRHLEDRAAIKSSVRRATGAIEVRGAEENNLQGVDVDVPLGVLTVVTGVAGSGKSSLIHGSVSPREGIVSIDQGAIKGSRRSSPATYTGLLDPIRKAFAKANGVKPAFFSANSEGACPTCKGSGVIITELGFMDTIETPCEDCGGKRFQSGVLQYTLGGLDITEVLDLPVSRAREFFSSGEARIPAAAKILGRLEDVGLGYLSLGQPLSTLSGGERQRVKLAIAMGEAGDVYVLDEPTTGLHLADVDNLLRLLDGLVDSGKTVIVIEHHQAVMAHADWIIDLGPGAGHDGGRIVFEGTPADLVASRATLTGEHLAEYVGA

SEQ ID NO: 266 - protein, 799 aa, synthetic construct; identical to SEQ ID NO: 265
  REGION 1..799: note = TnsF-Tn7 System Protein

SEQ ID NO: 267 - protein, 374 aa, synthetic construct
  REGION 1..374: note = TnsF-Tn7 System Protein
MRDQIGNVSWLPSARPAMDADTFLNEILTAWKRQQLARNFGLVTIQRRIRSVERMASFAGSHPWEWLPSDADDFFGHLRGVENRAHNTVRAYQSDVKLFLEFAGDPNYDWNERCGQWFGTVFTQVVTEFNKAKHSDESPDGEKRPFSPLELQEFFDLADLEPERILSAGRKGALAAWRDAVMFKTLYAWGLRHNEARNLILPDFSRNARMPAYGDWGVLRVRVGKAMKGAPPKQRTVLTIFDWSVELLDHWIRVGLPRFGVGRAAPLFPTDTGRMVDKGYLRKRFRSLVDELGFPPGLDIHSLRRSYATDLQGEHGFDTSFVQLQLGHEHASTTGIYTRLSPDYRTREMNRVLTETVERSGARLPRADPKESSR

SEQ ID NO: 268 - protein, 114 aa, synthetic construct
  REGION 1..114: note = TnsF-Tn7 System Protein
MKRQIHYEWHTRELMARMGMRNSRDLVEPLRERGITLSESQIYRIVAQDPERIAFKVLVALADIFRVEVNELVTYTATDVRAQYPRKAVGSAAEVPLIEAYRPVRARIRPDNDA

SEQ ID NO: 269 - protein, 364 aa, synthetic construct
  REGION 1..364: note = TnsF-Tn7 System Protein
MDCVECGAETELYRGGRCQRCILQYTATELLRNPDTGNVDPKLTVIADALGAMERPNSGLTWIRQPHVEQFLTQLAAQNNIDHDTVDALPTGQTTNYMRALLVEHGVLPRRDELLARFEMWALDKQERVIDPEQQIIIDQFRRWGLLRHLRSSSPISNSAFLRAKQLFTVAIEYCNWLTLEHGLTLTQAGQHEIDAWQPGGTSTRGHVYRFIRWAIATRIVPADLTVVQHRRGTATRLDTQSQTEAVQQVVYTEDLTDRDRLVAILIIVFGQRAEKISNLTCNDIIVTDTGVTLQLGSYPITLPHPSTNPSGHWPRTTSTDKPPPTPTHHGYSAATPPETTSTPHTCGYDSNPSSPHSPPASAP

SEQ ID NO: 270 - protein, 364 aa, synthetic construct; identical to SEQ ID NO: 269
  REGION 1..364: note = TnsF-Tn7 System Protein

SEQ ID NO: 271 - protein, 314 aa, synthetic construct
  REGION 1..314: note = TnsF-Tn7 System Protein
MSEELPGFAPKVFSTSDVGVIRAEDRVYEAMLDGWRSQQLARGLVPATITPRCQLVDRFFTYTNEYPWHWRPQDLDDYMAERRLASSAITVRTLRTYSNAIAMFCEYISDPRYMWTEVCDKYFGTHPIQIRFEWNTPRHSADDAMPTRRRAFTRPELQQVFDCIDDYVDDLHARNRKQWRTVMRDSMAFKVAYAYGLRRRELTMLDTIDFGPNPYVPQYRRYGALTVRWAKGTRGSGPRRRTVLTVPGFAWVVELLEYWCTDGREIFTTAERSRALWPSERGERITLGTLGRSFAFHRDRAGLPTELCLHALRH

SEQ ID NO: 272 - protein, 121 aa, synthetic construct
  REGION 1..121: note = TnsF-Tn7 System Protein
MSGEQRRIGFHWHLRTVMATHNLWKSTDLKPLLQSRGIHLSDAQIYGLVTTEPQRISSQTLAALCDIFDCSPGDLFEPFVEMRAAKTAHAPPDRALGLRPSPGGPIAHRIRVVEDPDRQTT

SEQ ID NO: 273 - protein, 498 aa, synthetic construct
  REGION 1..498: note = TnsF-Tn7 System Protein
MVKAIEKATERGEQVTLAQFSHKEGCSGCDRADIDKFKKRYKGDKYCSTCYARIFKKRACPKCGEYARLPKNDDQAICNECIKKQPCIRCNQTKKPIGTLTEYGVVCNSCSVYFRPIERCERCDTPSQKLTHISRFGDDLRVCPKCSTRDYETCPSCHKYRLLEQDDTGAKICKKCRNNAKKKCKQCDVLIPAGCPDLCNNCYWHKNLWEKARRNIKAFQSQHLQAQYEQYLIWLEDEVGANKAALYINKHTHFFIKTEELWLDAIPTAEQLLAVLRTSGLRKFELVASWLDEAHHIKVALEDKDFCSQQDQIEKLISSLPHPSTAYDVVISYKDELDIKMKDGKTSIRSIKLAIKPAVALMHYVCASGATLPNLNHIKAYLIDFSGQAAALTGFINFLNKNFDTSIDYLAFKKSKNFNEKRKNKVEKEIVQWVDKPLENKEDVLNWVKNGLRYFHNVSYVESLKVKFEMITEADDGYEILLQNHSYWLPKNTGDLKR

SEQ ID NO: 274 - protein, 498 aa, synthetic construct; identical to SEQ ID NO: 273
  REGION 1..498: note = TnsF-Tn7 System Protein

SEQ ID NO: 275 - protein, 241 aa, synthetic construct
  REGION 1..241: note = TnsF-Tn7 System Protein
MKRISDEYSPVRKSQTVYGSISVNYAFRGEKTIWCESTLERDFLIRQEFNSNVIDIVSQPITIPYITELGNESTYTPDFLVQFSSANCGDFEEIPCPLLIEIKPRKKLIEDWDKLKPKFKAAHTFAKEKGWKFKIINESRLYDQYWENINFLKRFRRSHVDVYDEQTLIETLDSLGQSTINQLPAHIFKDKTNILRGIHQVWALVAKRKIMCDLYCPLTAETVIWTNQDDVLTRRFLNGSD

SEQ ID NO: 276 - protein, 595 aa, synthetic construct
  REGION 1..595: note = TnsF-Tn7 System Protein
MPANKKVKVTTIDCFPNDNIRRTVYRYGGFLRNEGSDSTNPFIEVLLVELQDNDKWINIQRCSTFLVPFLEIDTVQIGSIWEGNILQDNVYKFYGKLITKSFTFDFTSHRPKNIKSTYKIPNTDDEYYMPLKHLMLPKGNDFILQGYPFTHYTPETYRQVNHCLMVSNNNVQVVTSAVHILHSLFVNRKDIRGMILSSSIQNIINRYLESFTSETVENQTEYRIRIRKPYEDLGEIAIIFLANLALNEHVQNIVERLQHSMEITDFDPLQSGKRYPIVFPPHPTKLSVEVEGLWLDDNKTRFFITRFKRVDPIDDYTIHINQDHINTIPKADEKNPIPRGKSQNKNEHINTQKPPSRVNGEYRKRSDVESGNTNGILKYSFNEPITDPVEVDSYIQSYTDKSEDVETSSDEPYGTEKTNIKKSETTDKPPTRDERFDLQYIVESLQTLTLENDSPLQKVYAINEFGDGIEGFNSLQIKELVPNPNHPSWIDDKLGRHLLFLKLELKDRIDHCYLIDIYKNKKHEAFCAFLIVTPYRLTREQINKICIELESAKGIKKWTTHCEYFTKQIISLKHSWATPDEWKNKFKNLFKTLSK

SEQ ID NO: 277 - protein, 638 aa, synthetic construct
  REGION 1..638: note = TnsF-Tn7 System Protein
MVQTDTVSIDRSRIILKPNVIVKYEGQPYKIANVLNANDIVISSLDSVRCLQVSADSLQVFEAENNQTKDINKGDWDITHEAWKIALHRYEIIKPLIKYSTTELVEQRASEYGINRSTLWKWLKDFRENNSILVLVPKKRGWTTKKSRLSPQIMNIINQGIQEEYLNARKPSIAKTIDFIKAECSRLKLEAPHDNSIRRKIEALNDYMVIKARHGSKAAQDKYASAAGEFPNADYPLAYVQVDHTPLDIEIVDDEFREAIGRPFLTLAIDINTRMVVGYYLSLEAPSATSVAMCIASSILSKKRKLIELDIDADWQVEGLMDSIHTDNGPDFRTNHISRACLKYGIHWEFRPIGGARFGGHIERLIGVVNIEMHILDGTTFSNIQERGTYNSAGHACMTLKELEYYIVYWITKVYHQKKHSKLGMSPLQKWQDGVWGTKTSVGTGLKERVSDEDTLFIDFLPEFESTIQRVGVQKDNLFYFADCLRQWVNCVDPEDVNKKRKKKFLFKRDPRDISLIWFYEPLSNTYFKVPTAKREIPPISLFEYKQVQKYLRGEQHDNQNQDEIYQAILHLREQLKQSRSLTRKQRRVNQRKKENAKATHHLSVKNEPEKPSIVENSVQPTNDLWSIPLTAFEDLRG

SEQ ID NO: 278 - protein, 227 aa, synthetic construct
  REGION 1..227: note = TnsF-Tn7 System Protein
MTLLSIAVNDSGSQPKPGEITLAHKGVLFLDELPEFDRKVLEVLRQPIEAKEIVISRASRQITFPANFQLIAAMNPCPCGYAFNQDSRCQCSAEAIKRYQNRISGPLLDRIDLHIDVPPLHASELQDTQVVEDSATVRERVIQAYQWQMQRQACLNMALSPKQLEQFAPLNEQAALIFEKAQQRLNLSARGYHRILRVARTIADLAQSEQIQTGHLTEALSYRGQHH

SEQ ID NO: 279 - protein, 285 aa, synthetic construct
  REGION 1..285: note = TnsF-Tn7 System Protein
MSFAKIYTRALLGLHAPSVEVEVHLSQGLPSLTIVGLPEAAVRESKDRVRSAIINSGFQFPTKRLTINLAPADLPKDSSRLDLPIALGILIASGQLPEQGTENFEFIGELALDGQLRPISGTLSIAIACQQAGHQLILPEANAQEASQLPNFQVFAAQHLKQVCEHLSQNHLIQQFQPTALKASQHYKFDLADVKGQLRPRRALEIAAAGGHSLLFKGPPGTGKTLLASRLASILPPLNTQENLEVASIYSVANHQHPFGQRPFRAPHHTASAVALVGGGCQFHK

SEQ ID NO: 280 - protein, 285 aa, synthetic construct; identical to SEQ ID NO: 279
  REGION 1..285: note = TnsF-Tn7 System Protein

SEQ ID NO: 281 - protein, 306 aa, synthetic construct
  REGION 1..306: note = TnsF-Tn7 System Protein
MQKYEHLADDVLEVMSLSDSDRINILFSDRWIGYKKAVTILDTLTDLLNRPRKLRPECLLIVGDSNMGKTTIIHEFTKQHYTKTVNDIDMELLSVKKPVLTILAPAKANVKEFYINILNHFFVPFRPTDPEAKLRNQAVHLMRKYETKMLIIDEIHNCLTGSTKLLSEVMNTLKNLSNDLSLNIVGVGTREAVTILHTDAQYASRFDVAMLPKWELNQDFLRLLLSYVRLLPLKKRSDLASQRLATLIFEISGGNFGDLNRLLIECAKEAIVKGNEEITEEIVNKFKWLKPTEGMRNIRNINLNMV

SEQ ID NO: 282 - protein, 306 aa, synthetic construct; identical to SEQ ID NO: 281
  REGION 1..306: note = TnsF-Tn7 System Protein

SEQ ID NO: 283 - protein, 368 aa, synthetic construct
  REGION 1..368: note = TnsF-Tn7 System Protein
MHQVEQRWYIRTPIQEGEVFSSWLIRSALDLGCSPLTLVNLLWEKWRGLTIDIDRGLNEEKLDILLNHCFVEQHEVQKTMLSSYFPALIPKNYNKNQRIPWILALGIRNRSNVSGRQICTQCLSSTHTPPYLRIKWRMGWHSGCDIHKTILIDHCPQCRITLQPIKIDIEHGSLAICTSCYADLSTLIQRPVETDALRFQHQADQVLESQFGRYNQKDISSIEWFEIARIWLSFIRSPLNMKSPNLLQMFESLNIDLNIDYPITPVAFEFLSVQEREKLLSILNKIMALPCDLFVDRSLEYHVSHSYFWDKRKKLPTQLQLMKDKMLKPIKIILPKDNAIAMSKPKSKKSVQRKWLRLLRKLQKGGNR

SEQ ID NO: 284 - protein, 481 aa, synthetic construct
  REGION 1..481: note = TnsF-Tn7 System Protein
MSRPTTPIGTRSGTSCTCNECGRMMTKAKKIHREKRYCETCYVRLFRRQLCPNCCNFARLPLFDLAAVCRSCEVKKPCVRCHRTGRKIGRLTAEGPACSSCSHYFKAPESCERCGKPSTRLVRVELDDQQPRCCPACLSSLTTSCCAACRRPRVIFSHGERPLCKKCYEIGEVECSTCGSSMPAGLGRECAVCTWTASFEKRRNHLLADLDDERVIAAVHSYSTWLLRRRGAHFAALNLHRYLPFLKALYEKWVTLPDYATVVDHFGAETLRRSRSVVRWLHEDGQIQIDPRAREDASERRRIEQSLQFFQAGPAKDALLVYHSTLVNRPEDDQLKLLSVRLALSSALRLLYHCDKFGLQLPTQHGLRSLLSSRPGLYASLYGFVTFLNRQFALDLVAQFDKRWLSRASRHVAEARLRQLYAKAGESGISEREWISVALVFFHRIKRVPLGHFEYEGQNHCGQRGFQVRYQGKDYWVPNGC

SEQ ID NO: 285 - protein, 601 aa, synthetic construct
  REGION 1..601: note = TnsF-Tn7 System Protein
MRHQIQREKIAPPRSRGKLKEISLKLPPGEWVVWWYSTVVKNNEDNTVPLVNVVFRGVDGDVLMEETETRRIALSRLRLYRIGVILKEGYPVARMALSTEYFDVDFSYGWKLNRASRHKLCASTSPHALPEHCNDDWLLRFNQPDRKILILNCIDFLVSGYSMGSEIPRILTTYEWPEVLKRLLAQPTPPTEKNLHDRLVVYPHKKMLLKDQTFLALLANENQYTTQAAKTLFSQINPKSFKLGQPHSLMVRPWFLGQTRLKCRGFWTPDKMQFLCTALVGFEEPSGLNIDNRGFVGKQNDNATEDKEIPSDAGRRLAENDLDIIMTDEHQPSSSYVHENIEAEEFEFVITRESTRTLMETPFDRRTVLPMEEVSPEQYGTGDNQGQGDATTGKMTANAQVVDIDVHGTLVEMWDAFVRMTEVGEIDELSWYVPDKDHTQGPPKCLAFSNRSDLGSRWKHKSAEAQAEEREKQEKWITLKENVRRGMMYLLITVENDLFLVAEVQRHRWIGRDKKPKEQSFCGLICHIHDQNRQKIQQICSHIDCELPEHNGVFKNMSWPFDYQSYIFSHHSSTDPKSLLDKAAANALNTIRDLAKRRLPS

SEQ ID NO: 286 - protein, 481 aa, synthetic construct; identical to SEQ ID NO: 284
  REGION 1..481: note = TnsF-Tn7 System Protein

SEQ ID NO: 287 - protein, 226 aa, synthetic construct
  REGION 1..226: note = TnsF-Tn7 System Protein
MSSSTVYKGQEISQTRKSRSMTRSLSGVFPFRGQAVSYESGLERDFIRIWSLSPEVVALVAQPVQIPFTAHNGRDYIHTPDFFVQFDDELNLKPLLVEVKPREDWKENWRQWLPKWKAAWRFARNQGWEFHIFDESRIRGPRLNNVEFLQRYRNMAMDPKLTAEILEGLTMMRRAPFHVLLALHFHGHEAVGRSHLWHLIATCQIWTNLDEELNEFSVMRCHDERF

SEQ ID NO: 288 - protein, 637 aa, synthetic construct
  REGION 1..637: note = TnsF-Tn7 System Protein
MSASEIESHALNRASLKIQVGEFVRHIKSTYKIALLVDFHHVLGQDVESGISRLLPISELKKPEGKNGGVYTSGLDLEQIADKQWAMAERRYSIIAPLLAKDMYVEGAVPKRAKECGVSKATVYRWLYAYTEGSQFLSLLPQARGWKKGNARVCADVEDIIRNVIHTLYLSTRRYTIKDVHDEVAKICKLRGLKIPSIPTITQRIQKVPHKQVLQARGYADIASDTYEARPGKYSADYPLHRIQIDHSPADVMIVDDVHRISIGRPWVTMAIDMYSRMVVGYFISLNAPSAVSVAMCLVHSMLPKHEWLTHHQVSGEWPVWGKPYEIHSDNGSDFKTKSLILACTAHNIERQFRPRKRPHWGGHIEALMEENAKVFSKLKGATQRNPNSRGDVNSDKEATMSFDALEKWLVHTILIYNNKPHSGLLFKAPIARWKQAFWGPKAFCGMPPIPEDPLSLQLDFLPSEYRTIQTYGVEWDAMYYAEALRPWINHVDPKTGKKMQFLFRRDLRDINFIWFYDPDLNRYFRIPLADGRFDSVSVAEYVKAKRELKKENLASVDNDTIRQHIEERRIIEEEEARRTKAARRNTQKTKNNAKGITPATVFLRQQQDSPPRSQSVLPVDDAWGNDDDVPLYGGVA

SEQ ID NO: 289 - protein, 201 aa, synthetic construct
  REGION 1..201: note = TnsF-Tn7 System Protein
MLFLDELPEFDRKVLEVLREPLESGQIVIARARDRVHFPARFQLVAAMNPCPCGYLGEPSGRCRCTPEQIQRYRNKLSGPLLDRIDLHLTVARESTALNPKPQAGDNTAQAAALVARARERQQRRQGCANAFLDLPGLHRHCQLSTTDERWLETACERLTLSLRAAHRLLKVARTLADLEQAEQISREHLAEALQYRPAAS

SEQ ID NO: 290 - protein, 371 aa, synthetic construct
  REGION 1..371: note = TnsF-Tn7 System Protein
MGSRCLWHEEVRPVDQQWPCVPSLRRDELFSSWLVRCSLRNACDAVEVAQSLWPGRRIWTGDCDLSLSRHSLQVVAAKSGLDAADLFSSTLSAVCSLLNLDWPANGRTTWVIPLGKRNLRCAGGLQFCPCCFAAGIPYYRVDWRLAWCTCCPKHEVYLHDRCPHCRAILSPHRLGYRAMDLARCHQCGGLLAAARTVPIESADLFLANCVAKVLGGERLDNSWPCMAPADWFTLLRCLCRLVRALALHPTTAAQAFLRSLDVDLRALLTINSGLALEYLSVEERARYLSAASSILQAGELRFVAAANEVRLSAWVHRELLGTYLGTLLPAQPTRHYRTTARPTSSGPRKPETVVRAWYRFLRISSRTGVLH

SEQ ID NO: 291 - protein, 278 aa, synthetic construct
  REGION 1..278: note = TnsF-Tn7 System Protein
MNLSDAERLAFIKSRWIDYELSENLFEQLYAKLCGHRDVPDFFIVGESRMGKSSLVDRFITVHGAEYVNEDGCRIRPIVKVEVSKPNLRMLYCSILSCSISPFNPDASEMKLRYKVESLFTSSQTKMLIIDEIQTVANGTSRQVADFMNEIKCLTNTLKLAVVGVGMPSANKLLMLERQYAARFVTVELPVWAPSLGFRQLLKGFESWLPLKQPSNLASKEIAALILKRSQGITGYVEEILFHSARKAIETGKEKIDLELLEQYQWAPDVSGMRKYVP

SEQ ID NO: 292 - protein, 278 aa, synthetic construct; identical to SEQ ID NO: 291
  REGION 1..278: note = TnsF-Tn7 System Protein

SEQ ID NO: 293 - protein, 481 aa, synthetic construct
  REGION 1..481: note = TnsF-Tn7 System Protein
MSVKFRIFARTCDFCNKNLTNWDYRYKEKHYCRSCYEKYFISKKCIKCNKTKKIHKYSENHICKFCEVANLPCSRCDKKDFSIGKILKNGVVCKSCAKYYSKLKCCSNCNKEKINVSNRKLKDGHIKMLCTSCYNKTLPICSSCSYRREAHSYDDNKNAICKICYEQGFKECKTCNSLIPAGYGNICRNCNNLKTLNNKVNKLSKALSNYFKDSFISFSKWLLQKRDSNFASLKIQHYFKYFFMLDELALNLKRVPTYDEIVSNFTVATTREYLLVTSFLDEQNIININLEVKEKQANLDMINKYLDNFPKGSKNRILIEDYYKYLLEKLEQNKTTIRSIRLSLTPAIKFLEYCENFKNNRPSTFLLEGYLWLYSGQKAAITGFINFLRNEKKIDVSLINIKPFKFKKTSTSKTILKQRLLDLMRLPKIPQNKEQLYYRTLIGYLHDIKVPTNLFISINNIKSNEHNNKYILINKYKIYIE

SEQ ID NO: 294 - protein, 598 aa, synthetic construct
  REGION 1..598: note = TnsF-Tn7 System Protein
MKNLKFREKTPPIDRFPKDDVFRVVWAYGSVQKGSTTTGIPEIHVLLVELTFNNSTNEYELSKQTKVVKISIAQLDTVRYMTIWKGQKRINSCWENFSEYKSNVRFNLDTTNSETIKYSTQNQNKTYRYLFPFNKYKIENIDKQYFVKFTNSTFTKISHDNIDVIIPSMELFTSTYAPHEQQIRYKLIQKSLSDTLDDYVKSSIEDSGKYIIELVEDKVDSNIVFLAYASLNQITRQRLSKTRTSLENGMVDKYPVILPYHPTSLSIQGDGFWIDENTFFMIRINKYSLPSDYEIVELKDELDIEESKKENDKNKSYGQIPRNLDDYQLPATNEHNPHRRNGYLALISEVDLLEDSKHKISRKINVKTIKAQESNTEIQNTENIENVSSGEADSTKDSEKTGKLCTKQENKKLHQSKALDLFLDDILQMRDKKVDISEGNKIYITDASCVNEEANITTDKYFIEFNDILKSRNETNSFAVMRNRIEEKDKLGKTKRKDTFIGYRKCFLLKICLSNGKWFYLLEIERKDNTEGFSGLLLKPENEFDKAILEENIMTVIKAKGILKNATFKIKNVIFKHVVDKESGSLIDCYLKNFRRIV

SEQ ID NO: 295 - protein, 240 aa, synthetic construct
  REGION 1..240: note = TnsF-Tn7 System Protein
MRISMKNRKIGYTYSSVSGHYAFRKEKSIAFESTLERDLLTILEFNSSVFDVTEQPITIEYINKNSREVTYTPDFLVLFNDPNELTNITSVSRKPLLIEVKPRDILIKKWNILKPKFQIATKYAKSNDMKFKIFDETRIRTPYLKRIQLLNRYKNMETEWWWKEWVFIGLEALGGHSTIDELVVFKFRGGVLDRKLATGVIYHLIANKILNADISQRLDFQTKIWINYEHPSYINFLEEK

SEQ ID NO: 296 - protein, 631 aa, synthetic construct
  REGION 1..631: note = TnsF-Tn7 System Protein
MLNKETSIKLDRSRIDIKPNSYVQYKKSVYKITQILNFDEVVGTNTKTKKAELLPIKDLSSIESDKNINAESISKDINNIEDEEYLEAQRRYKAILPLLEKKLSRQEAVQYSKNLGIHFTTLYRWQEKYKSTGTILGLISNKVGVRKGSKRLDSEIEIIIRKIIENYYLTIQKPSIQSVVNKVLSECKRLNIVAPHSNTIRNRINEVSEYEKLLKHGSRGLAKTKYEPAPNKFEADYPLQLIEIDHTPCDIILVDDEHRLPIGRPWITLAIDIYSRMIVGYYLSMNAPSVTSVGMCVSNAILPKDLLLSKFDINSNWNVWGYPETIHVDNGADFRADAVKRAGLAHGINIEFRPVGRANFGGHIERVIGTLMHEIHNLPGTTFSNIKQRGEYNSDANASMTFSEFEKWILTFITKIYHKRIHSSLSLSPEQQWEEGLFADESGIGFIQKPSNNSSIILDFLPIYERTIQKNGVNIEGLNYYDHVLRTKINQMENGKKKQFIFKRDPRDISYIWFYEETTQEYFKINVANQNMPSMTAWEFDLIKTELKNKGLKRVNQDAILEAREELHKQIEQSVKSSKKARRDSQRLKNKNIELKEQEQRINQNTSINIKQTENNFSKNESFWEDDIPDF

SEQ ID NO: 297 - protein, 224 aa, synthetic construct
  REGION 1..224: note = TnsF-Tn7 System Protein
MRIVALFTSNVSGSSNAKMGEVALSNHGVLFFDELPHFPSNILEALREPLEDNKILISRVNSKILYETKFIFVSAMNPCPCGNKLSSMKECRCSDFEIQRYKNRLSEPFLDRIDLYVVMNDSFSDNKNVVGSQELHESVIKAFQRQKNRGQKELNGKLSDKDIKKYCILDDESHEILEKARVNYALSFRSINKVLKVARTIADINEHEIIQKGDLLKSLNFRKR

SEQ ID NO: 298 - protein, 358 aa, synthetic construct
  REGION 1..358: note = TnsF-Tn7 System Protein
MKILIEPQIYNNEILSSWLIRSSIINGSEPSSWATMIFNDNKFWSKDPDRFIEDEEVHKLVKGCNKSFQELKNMTLEPLYKKIIGNDKLNYKKAWTFIISTGQRGTYRRNGTYFCPLCLKNEKEFSLRREFRLAWNTSCSIHKINLLQKCQKCETNFTPYKITFDEAKPFLCTNCEYDLRESNMKRANEEVYIFQEKLNNAIFNENIDKKFPLIELNLEELFKTLRILLSFLRALMKTNKSTTFLKKLNLEHLKKQLEEIKTSDNFEDMELKAREFYLLLVSRLFSLKIEDIKKIFEELDFTYKLVAKQSTLSSKTIDYITKNLKVNSKNKDVVSTKEITPKSKEEVKILLEELKSCL

SEQ ID NO: 299 - protein, 303 aa, synthetic construct
  REGION 1..303: note = TnsF-Tn7 System Protein
MKEYKHLNQETIDILFSSKDDKLFYLESPIFIDYPRTKELMQIFEQMMKTPKRPRMPNLLLIGEPNIGKTSILNKFYNKYSSEELEDENGYSIPYRPVILATAHTKASEKDLYIAILEAFYTYHNPNNTLAQLRHQMFSLMNECKVNLLIIDEIHHFLNGTPAQQRDVIQALKNIGTKLQIPIIGVGIKDAALILGTDPQLSSRFDIIRLDSWELDTSFRGLVKAFEKYLPLEKPSNLAEQDKCTLLYNISQGNLGDLHKLIVACSKYAIEHNFEEITIDIIKKFKDFKPTSRLVPREIKLKS

SEQ ID NO: 300 - protein, 303 aa, synthetic construct; identical to SEQ ID NO: 299
  REGION 1..303: note = TnsF-Tn7 System Protein

SEQ ID NO: 301 - protein, 290 aa, synthetic construct
  REGION 1..290: note = TnsF-Tn7 System Protein
MKRIDLDKAAFASPHMAHVFESFGGWLSNHAGAHRAALTIHRYLAFFMEIERAWGELPTYAQLLERFGAEGLRRVRTVMHWLSDVHGVETDPQLREIDSERRRIRAILDLVPKDSRAAQVLLAYCDHLGGPDQNAPSSLRSTRMALRPAADLLLDAAQNGNELPRQVHLDHYLKQHLGQRAAVTGFVHFLNAAYACSMELRLDKARAKARRHKLLAAELMHLAASAVTLDDNLQRWIRLGLEYFHGVKMTRAQIRAATLGLVGDDGLEVRLNDHVYWLPHMARSQSEVAS

SEQ ID NO: 302 - protein, 290 aa, synthetic construct; identical to SEQ ID NO: 301
  REGION 1..290: note = TnsF-Tn7 System Protein

SEQ ID NO: 303 - protein, 196 aa, synthetic construct
  REGION 1..196: note = TnsF-Tn7 System Protein
MAYESTLERDFVVKHEFYRHVLDVIPQPVQLEWRDARRAVQSYIPDYMVYFKLGARSFENYPKPLLVEVKPRLVWKKHWRAWLPKWKAARRYAIETGAEFRIWDESRIRDQAFDNITFLERYKRMQFDEEDCQQVLETVNLKDVATMDYLLARHFLGIYRAEGIALIWHLLAMRRLDCDIRDPLGPLTALWIPRDE

SEQ ID NO: 304 - protein, 645 aa, synthetic construct
  REGION 1..645: note = TnsF-Tn7 System Protein
MNNKTDDSRSEPATGHPLARGMVDIQIGALVSRSDRTYRVTQVLDFDSIIGTDVESGRTSSLAVKDLGLASPAAIQGDDIEEIDDAAWRIAQSRYAAIKDLVETVFPGRAEVEACAKQVGVDASTVYRWMRRYRATGVVTSLIPKKRGWRDGRNRIHSDADAVIREVVAEFYLTKQRPTPQKTALEVGRICKRRKIKPPSNSTIRARIASIPDEECLRKRGFVEKANNRYQARPGKFPGADYPLAVIQMDHTPADIVLVDDTYRKPIGRPWITVAIDVYSRLVIGVYVSFDAPSETSVAMCLAQSIVPKDEWLALHKIDAKWPVWGVPKKVYVDNGPDFRSDALTRSCLPYAIQLEFRKVRTPHYGAHIERLLGTLLREIHALPGTTFSSIKDREGYDSDKHAAMTKGEFEDWLMTLICKVYHERRHSELGMSPLRKWEIGIFGNAETRGMGMPARPADHHTVLLDFLPIFDRTVHPTGVAIDGLTYYAEALRPWINAEDPDARGKKRKMIFRRDPRDISVLWFRDPVIKSYFKIPLANQALPCMSIWEHRAARAKLREAGYAHPNDAQLIAALDELHAKEEASKATTKSARRAAQKRKEHSKAHAPFQKQPDRDSAAEHPTPYASIPPGSALLDGIVQPTGEVA

SEQ ID NO: 305 - protein, 296 aa, synthetic construct
  REGION 1..296: note = TnsF-Tn7 System Protein
MSEHLHPDFRHVLGLTDKGRLDFIDQNRWIGYPVASQIIETLRALMEKPSRPRMPNLLIVGEPNNGKTTLVSRFMKLHGEGHIEDDSVPIKPVVTAEAPPSADEKGLYISILERFFAPYRATDSTHKLRYQVVHQFRSCRTRLLIIDEFHSMLTGSAIKQREVMNAIKALCNELAIPVVGVGTREAVRILHTDPQHASRFDVVTLPLWQLDPGFQRLLANFESVLPLKKPSRLSAPELATALHAMSGGNMGDLHRLLDECTKVAITSGKEMIDLEIVQRLKWVKPTGGVREISTAQ

SEQ ID NO: 306 - protein, 296 aa, synthetic construct; identical to SEQ ID NO: 305
  REGION 1..296: note = TnsF-Tn7 System Protein

SEQ ID NO: 307 - protein, 304 aa, synthetic construct
  REGION 1..304: note = TnsF-Tn7 System Protein
MPAGRGDCCAECYWRQVYEQRLRFNLDALGSSIQPHYQAFASWLLGRSGAHKAARYLDRYLTFFQMLERAGLIETTSYQPLVKEFGAEVLRRYQLAALWLKESRGWADDEATRLNDSEQRSINRLLQGISNQQTCEVLVGYYEYLQAKLMRKEMSLRSVRLALTPAKKLLVQTLTSKRSIPEQQDVAVYLSHVPGQKAALHGFIAYLNRSQNSQLSMTLAQKTKHKSQAKAALEMRLAQMVQKPESDRRFQERWAITALAYFHGLTGPAIRQLIANEGLEDDGDGLLFRHQGLNYWIPKCSMQL

SEQ ID NO: 308 - protein, 304 aa, synthetic construct; identical to SEQ ID NO: 307
  REGION 1..304: note = TnsF-Tn7 System Protein

SEQ ID NO: 309 - protein, 256 aa, synthetic construct
  REGION 1..256: note = TnsF-Tn7 System Protein
MATLNELIEQPQKPRMINLLLVGEPNNGKTTIVRHFHEQYYTAFEDADPEGFKPVILAEAPPTADEKGLYVSILERFFTPYRISDPTVKLRYQVIHLCRACRVKMLIIDEFHSLLAGSAIKQREIMNAIKLMCNELMIPIVAVGTTEAVRVLHTDPQHASRFDVQRLPSWEMDANFAKLVASFERILPLKHPSMLRSAESIQLLHSISGGNLGNLQRLLATCAAAAIKDGSEKVDKSQIEKHMWLRPTSGQRETIR

SEQ ID NO: 310 - protein, 256 aa, synthetic construct; identical to SEQ ID NO: 309
  REGION 1..256: note = TnsF-Tn7 System Protein

SEQ ID NO: 311 - protein, 320 aa, synthetic construct
  REGION 1..320: note = TnsF-Tn7 System Protein
MLCKICLEQGKVICTKCSQPMPAGYGKSCEACYWQGLLDKRTYINCSAFTSPKMEIHFREFASWLGVKVGTHKAAITLNRYLSLFLDIENKLTGISSYEAMLNSFGAAKLRKYLLPMKWMEESGLIVVDAIAREANTERCRIESLLNKLEAKSKQRQLADGYYQLLKTDLAHNKTTIRSIRLALSPAIHLMLQGAKMSIPIPNQKLLDNYLSKSVGQRSSISGFVCYLRDRQGIEIKLPKLDANKALLNRRRKLESEILALMKADKANAHNREWLCVALEYFHGMPKRVGKTIASENLIYTADGGVVVCWNGLRYWLKAS

SEQ ID NO: 312 - protein, 609 aa, synthetic construct
  REGION 1..609: note = TnsF-Tn7 System Protein
MTIPFDHHFTKVNSSTRLDSKLLNNGKEWIAWWYVGIVKNKLAETQPHVLVAFREVLADGLSEEVFHQKIQVTMLGQVKIGSVWKDGFCIKQAQFEHEIFDVDFTYRTWQTNSFKSASADKKPAPFIQSIYPLEYQSNDRTWLLEFSLSTGGKLVIPCLEYFARCYGCSGELKRVLVTYPWEDKVNINADTALKRLYAPLDEGEVDDGSVWKVKLKQRLYNGDVIFLAHAKYDKAYTGAVIKQIYTSIFNQYDASKPDRPIFTKIAPWFQGDAQLSVKGIWFDNRKSFLALNILGGSEPNGVLIERDRTNTNKTNIPADVADAGKAWNGAPARILTPPQIIDLTGNLEPDHGAPIIEVQDPSYVILGKPREIKDVVREKAKSSKGELTNGAEATVFATGDAYSSEKDVGYASIHAKNELESNGALRDMWNAMLYFQQKYPKQIKSVEWFTFDNGYQDNGEPNLIALNPFSKETGKDLEGEIRNWPYFDTRSLQRRGILVSRIGIDGQFVYIVEIQRRPRSVENEDGIAYSSEESYTGFIFKAESQQEVEEVIKYFMNRIRYVKGIVKNLLRDCPVSMASAFQHKSAGFETIPCEAAVLNALGKVNITIG

SEQ ID NO: 313 - protein, 320 aa, synthetic construct; identical to SEQ ID NO: 311
  REGION 1..320: note = TnsF-Tn7 System Protein

SEQ ID NO: 314 - protein, 230 aa, synthetic construct
  REGION 1..230: note = TnsF-Tn7 System Protein
MNKNNCDLIIPKQMRQIKPTRRSVSGIYAFKAETAIPFESTLERDFLIRKEFNVHVLDIIPQPVQIPFVKNGRTYTYTPDFLVYYRLSNHSFEFYPKPQLIEVKPRAEIQTHWSEWKAKFRAARKISKEQGWVFSVHDESRIRDQAFTNIRFLERYKRMQFPVEESRAVIETVKQMGLVPFHYLISRHFMGIYKAEGIAHLWYLLATRQLDCDINLPLSDFTELWTPTYE

SEQ ID NO: 315 - protein, 622 aa, synthetic construct
  REGION 1..622: note = TnsF-Tn7 System Protein
MRQHVDIQVGAVVACGDQVYRIEQILDFQSVIGVDVSSGRSTPLRIGELRPVEDSTNEHEDLAQIGDEDWRIAEQRFAAIKPLLGITLIGRDEVARRANEVNVNTATLYRWLQRYNAYGVVSALIPKRRGWKTGASRISMDVALTIDKVIEDFYLTTQRPTAQKTVTEVLRRCMLRGIEPPHPNTIRSRISKVNEKQLLRGRGHKEKARNKFLPAAGSFPNANYPLAVIQIDHTPADIVLVDDIHRKPIGRPWITLAMDIYSRMVVGYYLSFDAPSETSVAMCVAHAVLPKDEWLTLHNVDAEWNVWGMPVTIHTDNGADFRSNNFQQSCLMYGINLEFRPVRQPNYGGHIERILGTFLREIHDLPGTTFSNIKEKDSYNSEKEAVLTMSEFEAWLVTLICKVYHQKLHSSIGMTPARKWEIGIFGNNEVQGCGVPARPANRFTVLLDFLPSFSRTVQTFGVTIDGLTYYAEALRPWINSRDQNNNKQKREFIFRRDPRDISTIWFFDPSLKQYFKIPFADLSLPSVSIWEYQQAKELLKREGAKSVNEHQVLHAITELRNKVDKAKESTKKARRQAQRRIEHEKQVSPANPRPVKKVEPNLHNLPVSGLISGDIDDFGDIA

SEQ ID NO: 316 - protein, 375 aa, synthetic construct
  REGION 1..375: note = TnsF-Tn7 System Protein
MATPYTWDKRNQDLKPHWLVHVPLFPNELISSWLSRAALTHGCDPLVLTGSVFGKWRILTIDADRLHEAQRLLPLAKISGISIEAFNQASLFPVAGKVCGGTPSDAVWPWILAIGARNTKRSGGLQYCPQCLIEDNKPYYRQEWRFAWHTTCEKHLSNLLDRCSSCNSPIEPQRLEAKDRTLRICASCKSDLSQSISQEASKHALAFQMMADLVVLDGTGAFHGQMLDTGKWFKLIDFFCSMIRRTNRSPSLLLRDFFSKFSVNTLANLPLVSGAGVELLRTHERIALFEAIYPLVIASKSHFEASALQSALTRQAFCSKDETLPSVFSGLHSLLPDNSRKRGKNIRRSKFKPRPRNEVVLMMARLQRKLKMAER

SEQ ID NO: 317 - protein, 295 aa, synthetic construct
  REGION 1..295: note = TnsF-Tn7 System Protein
MDYQHIHPDFRHIMLLSDHERIEFMEMPRWIGNKSAQQILDTLQGLMNKPIRPRMPNLLIIGDSNNGKTTIIDRFKELCGQGYIDENTDPIKPVIVAESPPSADEKGLYISILEQFYAPYRASDPASKLRYQVIHLLRMCKTKILVIDEFNSLLIGSAIKQREVMNTIKLLCNELAIPIVGVGTREAVLALHTDPQHASRFDVVTLPLWELNQDFQRLLAGFEKVLPLKNPSKLHEPELAGLIHSISEGNMGNLHRLLVECATDAIKCGKEQIDASIIKSKAWLRPTRGIREIKI

SEQ ID NO: 318 - protein, 295 aa, synthetic construct; identical to SEQ ID NO: 317
  REGION 1..295: note = TnsF-Tn7 System Protein

SEQ ID NO: 319 - protein, 315 aa, synthetic construct
  REGION 1..315: note = TnsF-Tn7 System Protein
MPAGRGQECDDCSREKSFKRRANLFIESFEHPATHQRFADFCQWLKEEMGTHSAARKLKNYLTFFSFLDRHPEGIPSYVSLLEHFTADGLRRMQTPMLWLKVRYGAEPDATVKEDHSEKRRIDQMVDLVSPGVAADALKGYRSYLQTKQAEGRTSIRSVRLSLRAAVNLLATMPPTFDVLPSQKTVSGYLAHTPGQAAALQGFVGYLNRVHDCDLKTTADALATSRARTSKLEGEMLALYRSAGAGEAFERAWIKVALMLLHGLKRVNKKAMEYCPEVFRDRSGFRVSFKDKQYWVPSPTDQATFFSVNETKPNG

SEQ ID NO: 320 - protein, 521 aa, synthetic construct
  REGION 1..521: note = TnsF-Tn7 System Protein
MVPIGLSRMGSFRIGTIWQSGKCIAEADFGQEYEASVDFTDGAWSMLSVPGKHNIPYLRQDHELRRTSTNGIVSELLSFPLPGRNKNLLIPCIEFLFRCYGSTSDIPRILVTYPWEKVLTKLYATFEHDNPETWAVSPADNVPDSDALLLATLRYNKKAELVARRLHAQLDNALADNKALEKSLQVEPWFEGPARLRMRGRWINGGKTFLCLEVTGMSEPQHHSYDIRREKQSEEQPEPPDPATPLKTTTIDRPKDQDPFRITDQLEPGGNAGSWGTPDPHFVTLGTPCPFTRTPIARPRIKRETMSVEVAPPFMFSTGDPQGGHNGVSHIYHRAKRIIGNGGVLSALWAELQHLKQTYPGFTSLAWYSEKQGFVHTPDFRLYPLKAFAEDDRLTEGASAWLKYSDNATLRRGLLLIQVVIRGQTFYLFELQRKKRREGNAFKDEQISGLVVNINDPQKARELISTVCDQIRNAMGKFAQLDIPDFPHKVFRHYSRKGVFTADVTLRKAFEPLGIYLPHRK

SEQ ID NO: 321 - protein, 1148 aa, synthetic construct
  REGION 1..1148: note = TnsF-Tn7 System Protein
MKRLESIKLVQFLLYESEEFRVGETSAIFGSNGSGKSSALDAVQIAMFGANKSHMAFNAQADATGSKLTRSLRSYCLGQYGDQIVDCARPNSTTYITLTWRNTETNEPTTTGICIEASLEAEDATVVGRYVVNGLELAMSDHLQSIEDDFSPLPWKSFRTRLKERANILGEDPFYDDPSSFTKQVLFALRGKNGQPSYDAFIRAFRFALRMKFDKTVDHIVRNDVLESRPTNVKKFKAIVDTFKHLNLLIQNVEKKIAQGKAVAGQYLAAQTKLRRAVSWRAMAAIAQEEEAQLAYENADDVLQKAIQTTQRLTTTSQRLRDSLLASESEIQHLTTRQHLHAAHKENADAHLGQVNAQQALANGTQALHDDLQKVCIALDTAVESPYLAEVREHTQSLAARLRLLISTPGLANVASLRAPLEEMASVGMEIKTILEAIVHELSGQVSAITEEIRVLDGSLTRVMEGRAPLSDDAQVLLRELRDEGLNPTPVCDLVKIIDPGWQPAIEAYLGKNTEALLLPEDQEEQAFEIYRELKGRRAAFGVKIVRSNQVKIAQTSLKGLVAELIEGLNPIAVGYLRGQLGNLKRAEGKDDALKGERTLTMDGMYVSPRDFERLRLNNEKLRIGAGTRSQADRLKAELASANLKLRRNQDQLTSTRRTLDVISGLGSEFASRLILSRATAYEEAVRQCELANQRVANIADAEYVEICERIKTLQAVLNRLKTDERNASNEAIKSESLIPGMEQTLASSKLRYEQCILFKQKCREHIDYDPDFVSAEWSKLIERFDSPDTMIAHCQEASQTNERTGNTQANGAQRDLWAYLQEHRETLPQQDVEDWRLAKAWIDNYVQKLEITELPEYKAQAEEAYRASQETFRRDVAIALNTNLEFLRQTFDRLNAALLSTPLFTNGERYQFMYKKRPHLKDLLEFIEKVADYGVDGGLFGDAGSIPPQFEELLKDKAAPGNSGEKSPLDDYREFYEFDIRIEQVAPDNTFKTIGHLSSRIGPGSGGEHRAPLYVIAGAGLWSAYRMDHGGNDGLRLIMLDEAFDKMDPSNTVATMKYLQELGLQVLLASPGENLGILNAFLDSYFEIQKDAVRHVVQVDRMEVTAAMRDQFREDLWEFHPELVEEEILAIRNQSNGSQRLADGAAP

SEQ ID NO: 322 - protein, 1148 aa, synthetic construct; identical to SEQ ID NO: 321
  REGION 1..1148: note = TnsF-Tn7 System Protein

SEQ ID NO: 323 - protein, 337 aa, synthetic construct
  REGION 1..337: note = TnsF-Tn7 System Protein
MSDELVATAWASDQMQRGPVALFLSNYLDSHSKIKVLNINAPWGAGKTFFLNNWMLQEKTHRACVYFNAWENDFTGDSFVSLVSAIRDQLQDIIGLPVKADGIVQEFTQKAAKAMVAATPALAKGVLKKLTGTDLDVLKELIDEDALGDAAEKAVETMITSSRDALNAVNDFKKVFHELLVAAADKAQSGETKCPVYIFIDELDRCRPTFSIELLERLKHLFDAPNCKFIIATDSQQLGEAIKAVYGNGFDSRRYLKRFFDSEFTLDNADYAAWIKANFALLPDPAPMEMGHSIEDPLASRTYSYGSGRERVAADKDTVLTGPHRLDADQVIFLALA

SEQ ID NO: 324 - protein, 315 aa, synthetic construct; identical to SEQ ID NO: 319
  REGION 1..315: note = TnsF-Tn7 System Protein

SEQ ID NO: 325 - protein, 222 aa, synthetic construct
  REGION 1..222: note = TnsF-Tn7 System Protein
MDSNSCNQIPFSVARRVKSTTRSLSGVFAFRGEGVAFESGLERDFLSRMEFRTDVLSVVSQPIQLDFASNNGRSYTYTPDFLVRFHPHTQQMPILVEVKPEENWRKSWRDSFPKWKAALRHAKQQGWSFHIYDESRIRGQSLKNIQYLERFKRAAYEAVDLEAVIRTVAIMGIATVQYLVALHFNGAEALGKSHIFHLIATRRLDCDISEALDDSLEVVMPE

SEQ ID NO: 326 - protein, 637 aa, synthetic construct
  REGION 1..637: note = TnsF-Tn7 System Protein
MNNLSSEAVRGTKLDRSVVNVLPGALVCYQKETFRITQVLDFQSVLGINVESGRASVMPIADLKPFLGNKIRGAYADYDLEELGAEQWAAAQKRYAVISPLLGIEGHSRSVVERHAQEAGVDPVTVYRWMRRYKEQGDITALIPIKRGWSRGRPRISEEVEAVIAETLKEYYLTEQKPNAKATFEEVRTRCKKLKLRVPNITTVQARIRKIPDHIRLRKRGDKELAGNKYEPRPGGLHTEYPLQIVQIDHTPMDVILVDDIHRRPIGRPWLTLAICVYTRMVTGYYLSMDAPSAVSVAMCVVHSILPKEQWLALHNVAAKWPVWGKMGTLHSDNGADFRSHSLIQSCILHEIKREFRPKKKPHWGGHIERLMGTFAGMAKRDKGATFSNPQERSEYNSEKKATYTFAEYEERLVKNIIIYNNKYHEELDCAPIKKWDAAFFGDKETNPLLPLPPRVADPWAFQLDFLPSSRRTIRPDGVEMDAMYYAEALRPYVGTIDPATGNPRKFLFRRDPRDINRIWFFDPGLREYFEIPILRGRYAGTTVAEYVAAKKKAKQMGRDAVDHELLERLIEENRQQELEAAARTKAARKNTQKRTNNAKQTTPAAPNPAVSSQPVKPVDIPELLSINDVDTFGDVW

SEQ ID NO: 327 - protein, 297 aa, synthetic construct
  REGION 1..297: note = TnsF-Tn7 System Protein
MTDYSHIAPQFREVMLKTDLERLDFLEEPRWIDYPAANKLRAILDGMLRVPERTRMPNLLLVGMSNSGKTSVVTRFKNTTGKPYVSDDAVSVRPVIYVEIHKPDERELYNAILREFWAPHNPAAVVPKLRDQAIHLLRVARTRMLVIDEIHTISNGSPRKAMDAMNEIKMLSNTLHIPLVLVGTRTALQLLALDPQYCSRFEVAALPNWSINPDLQRFLKSFESVLPLKKPSRLFSPELTRSIHTISEGNTGNIEYLLRECAKEAINTGKEVIDLSLLEKNSWMRPTATNGVRTRVL

SEQ ID NO: 328 - protein, 297 aa, synthetic construct; identical to SEQ ID NO: 327
  REGION 1..297: note = TnsF-Tn7 System Protein

SEQ ID NO: 329 - protein, 283 aa, synthetic construct
  REGION 1..283: note = TnsF-Tn7 System Protein
MRLVQLQADVSDLRVQTSLAGFAAWLKARRGAQYAALNIQRYVPFLDELHSRWADLPNYSELLSHVTAEGLRRVRLVVQWLEETGQIQIDPVARERSSEMRRIAHSLGVFPEGAGQAALHAYHRLLQSRHNDGKMKLRSMRLALSSAVRLQYIADEGGQKLPNQRDLLKLLRTRPGLWASLFGFVSFLNHRYSRGMDPWVDPAWRLKATRALRESKLLQLYAEAGAGEVFERRWISAALSCFHELGRVGVNSFNYRPDNQDAQPGFIVTYQNQEYWVPVASVS

SEQ ID NO: 330 - protein, 283 aa, synthetic construct; identical to SEQ ID NO: 329
  REGION 1..283: note = TnsF-Tn7 System Protein

SEQ ID NO: 331 - protein, 225 aa, synthetic construct
  REGION 1..225: note = TnsF-Tn7 System Protein
MSSTTYNGRVISQTRKSKSMTRSFSGVFPICGQGVTYESGLERDFIRSWLLDPDVVAVVAQPAQIPFTARNGRNYIYPPDFFVHFNERSGRKPLLVEVKMREQWELNWREWSYKWKAARRYAREQGWEFRIYDESRIRGPRLQNIDFLQRYRNLSFDPVFTEAVRKTLSLMRAAPFHHLLALHFTGNEGIGRSHLWHLIAAGQVTADLDHELDEHTILRACDEGR

SEQ ID NO: 332 - protein, 640 aa, synthetic construct
  REGION 1..640: note = TnsF-Tn7 System Protein
MKGVETEGHDLNRNSISLQIGEFVCHRQLTYRLTATVGFSHIVGVDVVIGTSKLLPIAELKRVKPDRVKGPYANYSLDDIADELWAEAERRMAIIQPLLQGKMFESGAVETRARESGVSKATVYRWLSAYIEGDQFLSLMPRKRGWRKGTPRVSEEIERIIRNTIAREYLTTERKSQKDVHAKVVAICEAQGLKPPSIPTVSERIKMLPRKQVLKARGYSDIARDTYEAEPGSFSADYPLHRIQIDHTPADVIIVDDEYRMPIGRPHVSLAIDMYTRMIVGYFISLDAPSAVSVAMCLVHAMLPKHKWLNLHGVEGEWNAWGKPYEVHTDNGPDFKKESLIKSCILHGIEREFRPRETPTWGGQIERLMNTKARAFATLPGATGRNVDERGDVDSDKEAVVSFAAFEKWFLAQVIKYNNQPHSGIEFMPPKEKWNEAFFGSSLRKPICGLPPIPEDPITLELDFLPSTSRTVQTYGVEWDAFYYAEVLRPWVGHQDPKTKKATRLFFRRDPRDVNCIWFFEPRAKKYYRIPITTGPFPGVSVASYVKAKRKVKEHGLSLVDDVQIKKMLNVMRGVVEEEAGKSKAARRLKQSNKNKAKGTTPAKVYVDSPPANQVPEPAAESVEADTWGDDEVGLYGGVS

SEQ ID NO: 333 - protein, 909 aa, synthetic construct
  REGION 1..909: note = TnsF-Tn7 System Protein
MILKNTTWGARCTLSPNFTLYFTDDEVTLSLKGKKHVWPLPAIGTLETLPGLVWAAIVITPLEGVEIRLGGVDKKEGDRWQAAFTAAHLKRVAETSNEACLRFLLWSGRVEKDLPTQWHPSWLAHQLYKTRPTPKLSCGVTYDSFARHPALAQALAAHPDILRTLPEPPERWISTTLERRNEQRFREHVDLPLFETLEATPLTQEQRRAVICFDSKLLVVAAAGSGKTATMVAKAAYAITMGIVRPEEILMLAFNTDAATELQERVDKRLVNLANADQVACRTFHSFGLSVIGEAAGAKPRPAAWLEGGQDVAKVVALMKELAEKDKAFGMTLMLVRTVFAEPLGNMSSNCSDPVSSTDVFVTCRGETVKSREEQLIADWLFINGVNYQYEVRYKVDTADAQHSQYHPDFYYPEIDLYHEHFALDAAGNPPPHFKDYAAGVAWKRALHQEHQTQLVETTSYTLRTGEGLKALEQALVSRGIKLNPDPDRMPPGRPPLDNEALAKILRNLMTHAKGNQLDVGELTARASRTDPLRGPLIVSLYAEVLRRWQEDLAATNTVDFDDMINMAIEQAESSRYRSPYKLVIADEYQDSSVARARLLRAITTTPGTFLCVVGDDWQSINRFAGADSGVMRRFKSFYGSGTVLQLTRTFRCPEQICRVSSDFVQQNPDQLPKEVSTTSTVTGNAIQCFAAGTHEEMTQMVERMLTRLAKKLQAVWDSPRKPTVMLMGRYRSDRPANWGQLNRICGPGIDLTFTTVHSSKGTEADYVLLLNVIKGRRGFPSEIEDDPILQIAMPDPEVYPFAEERRLFYVALTRARRGIFIFTLAQRPSRFLVELQKRRQIVIVGTDGAPIATDSCPKCGEGFRKLKTGRYGDFYGCSNHPACNWTENVGVPGNHVNAKRPSQQNRTM

SEQ ID NO: 334 - protein, 909 aa, synthetic construct; identical to SEQ ID NO: 333
  REGION 1..909: note = TnsF-Tn7 System Protein

SEQ ID NO: 335 - protein, 373 aa, synthetic construct
  REGION 1..373: note = TnsF-Tn7 System Protein
MDHRFLWHAGSRPVNQRWPLVPALRGDELFSSWLIRCSLCHACDPLEISHLLWPMRRIWTRDCDLSACVLPMAELSKHSGMAERTLRESTLEPVRRVLNFQLPPTSVTPWILSQGSRNISRAGGLQYCPVCFAESLPFYRVQWRLAWYTSCPDHGVLLRDRCPHCQAIVSPHRLDYMAGDLSRCHACGGVLGDAAIDSVERGSQELEAFADSIVRGNQSGFGGLVMPAEEWFSLIRGLYRLMRALAIHRTGPAREFLGLLDVDIDALPRATLALTLECLPIPDRVAYLSAVNTILSAGAARFSAAAISACLCHSTCKAAIGRDLSCLSQLLPDTTPRRHVACGSDRSRPRKRQSVVRAWLRFQRKAHRLGVIH

SEQ ID NO: 336 - protein, 276 aa, synthetic construct
  REGION 1..276: note = TnsF-Tn7 System Protein
MSDAERLAAIRPRWIDYEFADKLHKMLFAKLCGHRDQPDIFILGEPRMGKTTLIKRFIEVHAPEFINIEGVREKPVLLVEVSKPNAREFLIDILDTSVSPYNPDATESKLFFQVMNLFRSCKTKMLIIDEIQSLNQGTAREVTAMATLIKRLSNKAGISIIGVGVDAARQLLPKDDQYLKRFVTVTVPDWKASPAFRQFLKGFESWLPLRQPSNLASVEMAAFILKKTGGNTSRVEELLLGCARKAITTGRERIDLDLLSQPKWTIDSFGTREVAP

SEQ ID NO: 337 - protein, 276 aa, synthetic construct; identical to SEQ ID NO: 336
  REGION 1..276: note = TnsF-Tn7 System Protein

SEQ ID NO: 338 - protein, 277 aa, synthetic construct
  REGION 1..277: note = TnsF-Tn7 System Protein
MSDYFQQHFLDFAEWLVKRRGTNFAATSIKRYFEYFFQLDQFTLEIKRFPSYQQILHQFSVKKTRKYLLVTKFLDELEIVKLKPEVKEQYSHLNTIEKYITYFEAETTWHSLINDYYVFLKQKHITLKSLRLALTPAFHLLKNCQYFCFENPTQDILDGYLWASPGQKSAITGFVHFLNKNHSCSIKLEGIDKKIKLSRPLESNKHLKQKLISTLRFPTKSEQYIQTLLKRAVEYLHLIKVPNYTIITCSKKTFQTQHLHIAGQKLYIPNDIFTFMD

SEQ ID NO: 339 - protein, 1140 aa, synthetic construct
  REGION 1..1140: note = TnsF-Tn7 System Protein
MKQLKRISLVQFYLHEAVDIEVEGATAFLGPNGSGKSSTLDAIQIAMLGGNQQYIRFNTQSVSAKQRRSLAGYCLGMLRNPEKDSEVIGRARDEARTYIVLVFGNDMETEWVSAGICIEADSETDEHEVKGLFVLPGIALKADDCIVYDGSDQRPIPFADFRENAREQARKSGRTPIFTDKSSEYVQELLYSLNGERMPNSRQFMSSFVKSMTLKNVDSIDQFVRDYVVESNPVDIATFRKQVEQFIALRDLIMRTKARISQLEGIITDFDRAQQAECRIATLEAIKAVFNVEWLGEKIDNIETQIDTLKFQIKTAEGLAAYAKEQRDLKQDEITQLKVRLESDHKEQLRQRLEDQISSQRELITAYQHPEISRANRLISSLRELIDEPSFSAIRSLMSTVVDALVEARGSEDPGSALSKSIWKHDGNLSQIRIFSQSNLTTIQKKQNELTEERDAIRRRISAAAQTGRLLNDGAARLLDILNHAGMEAKPLSALLRISDPSWAPALEAYLGGDRDALIITEGNTREAVKLLRQARQSGIQVSGAAIIQPFHLRNIDTSAKGEEFALGVFETDDETARRFVWQKFGSMRLVDTELELETHPRAITRDGMLSQGGLTKSIRIAPISDLRIGKEVQDTSLLTRHASELQGELEQFEKHRKRVEGLEQALFTNANDDGQGVTEKLAEANEVINLANQKLKSLDVSHLDELKSLLNTAVSKHSEYDKQYTEHDRLAAGLKEQIGQCWERKKQQERQFPAIRQAEHEAVTNALVNKEWLDSMKDEIERAETSYDLRLKEVDRKLDYHTPRLRNAEEKASLELARYVQDERLDVQVADMEWHERYDWVLEEKMKLFDTELHRYEEEAELARQASEETLRSDIAMSLHDRFKEMELERRERNKILESCPSFTGGERYKFTAKVVPQYEALVRYINQIAQDDNNFSLFAENPDEINETLRDLVEAAADSGNASGVLDYRQFYTFDLDILVDGKRVDRMSNRQGAGSNGEHIAPMYVAAGAALAKAYRLHSNKGKQRGIGLICLDEAFHGMDTINAIATARFLQSIGLQLIMAGPELERTKLAPVTQTIYDLDREGLDLQMERTKFKEAANKLMVSDMPDENPEIMKGAYQQLGLEQPTEYALSNDGGQ

SEQ ID NO: 340 - protein, 1140 aa, synthetic construct; identical to SEQ ID NO: 339
  REGION 1..1140: note = TnsF-Tn7 System Protein

SEQ ID NO: 341 - protein, 240 aa, synthetic construct
  REGION 1..240: note = TnsF-Tn7 System Protein
MSIKFSHKNRKIGYTYGSLSGIFSFRGDKSIAFESKLEKNLLQILEFNESVIDVEEQPFTLEYRNQKGRMTTYTPDFLVRFKALPSTISHLPYPKPLIIEVKPRNKIQTEFQKLKPKFKTGLRFANENDMNFRIYDESRIYTQEFENIEFLSRYKKRDYDTENEMRILEHLNNIGHTTVDHLLCTLFVTKEEQGVALGQIWHMLVTKKISCDIGKKLSLCSVIWLNREESNHEGVSQYGS

SEQ ID NO: 342 - protein, 623 aa, synthetic construct
  REGION 1..623: note = TnsF-Tn7 System Protein
MGANVQKADRRKIVFKTGEFVSHQNKIYQLTNLINFEEAIGVDIKTGRSERLLIISLEIAKLDDNLERNNGHIHRDLADVSDDNWKEIERRFSLIQPILKNASRSEIELHATQHGTHFTTLYRWVRHYHATGSLLGLLPKKKGINKGTIKTESQVENIISKIVDEYYLSKQRPTIKATLDAIKIACKHQNIEAPSDSTIRRRISTISEYQRLKRRNKKNKAKKYEPAPGSFEATYPLQVVQIDHTPVDLILVDDEYRLPIGRPYITFAICIYSRMIVGYWLSLDAPSTTSVAMCIGNSINPKDELLLLNKVESTWPVWGFMETIHVDNAGEFRSDTLKRSCLIHDINLDFRPINQPQYGSHIERLIGTVMKKVHNLPGTTFSNIEERAEYDSDGNAVFTFDEFDKYILTYITKYYHKNRHSSLGVSPEDKWHQGIFGNLHSEGIGYPPKPNNPDTIYKDFLPIIERTIQSNGVNIDGLNYFDNVLRPFLHAMNEETNKKKKFVFRRDPRDISYIWFYEANNQTYFKIPLANTTIPPMSIWEFREAKKRIQEYGYTFSEHVLLDTLQELNEMAEEAAKKTRKIRRNQQKKQINKTNLQQITPQFQHIQTPDDDELWNDDIPVFN

SEQ ID NO: 343 - protein, 352 aa, synthetic construct
  REGION 1..352: note = TnsF-Tn7 System Protein
MLSPIKVTPFKDELLSSWIVRLALANGTDPLSLSGAIFPSQRVWSRDFDKSLNVEFLKALSNISGIPISALTKLTLENHLSSILTPKSKNNAVWPWVIPLAHRNRVHTNGLHFCPECLREKDVYFKRDWRISWNTCCTDHELNFRLGCPKCNTAFSPHLVTYDKPDFCCCVHCGLDLRAVVQKEVDPEIVYFQGQLNRFLSDNTPEYPWKIKSKTEFFATLNSLTSFIQKTRSSQSKHLFQYLDINDSILNSQTSFSNSSLKERQLTVRCCFRMFSLQLDELIKLLKDAKVFRSSLRPTLHGYSSQTIKTIKQQLPSYKTYEKPNYQKSSQEIHPRSKDEVEKLMDEIRCFL

SEQ ID NO: 344 - protein, 228 aa, synthetic construct
  REGION 1..228: note = TnsF-Tn7 System Protein
MKSVSGSGSNPKPGAVSLAHRSILFLDELPEFNRTVLEALREPLETGHVEIARVNQQVTYPARVQLVCAMNPTPSGFFPDDALGRCSDTPEQISRYRQKISGPLLDRIDCHLEVPPVDFEALSGKPEAGAETSARIRARVEQCQALQYDRQGCLNTALTSKQLEALVVLDSDSKQLLEQAMNRLGLSARGYHRILRVARTLADMIGQEAVQTVQLAEAISYRSMDKTQ

SEQ ID NO: 345 - protein, 309 aa, synthetic construct
  REGION 1..309: note = TnsF-Tn7 System Protein
MSEAEAYNHLHEPIVPLVKTGSKKQRVEYLDQPLWINHHVSNEILKLLNNLINRPQKLRMQSILLIAESNMGKTSLISQFAKMHSDYMVDDEEQQISYAVKPVIIAESPASADEKGLYISILEQFWTAFRPTDTNAKLRHQVMHMMRECHVKMLILDELHNLLGTTPVKQRKMMNIIKSLSNELKIPIVGVGTHDAALVLTTDPQHASRFDTVVIPRWEMDKNFRGLLAAFEKRLPLKKPSHLHSKEKAPLLLAISGGNIGNLHRLLNECCIYAIDNDVEEITVDIINHFKWLKPTDGKRPRELIMQNA

SEQ ID NO: 346 - protein, 309 aa, synthetic construct; identical to SEQ ID NO: 345
  REGION 1..309: note = TnsF-Tn7 System Protein

SEQ ID NO: 347 - protein, 492 aa, synthetic construct
  REGION 1..492: note = TnsF-Tn7 System Protein
MSLRLSRAPEIGIDERICWKCRTKRTHFSCTSCGKYRKPAGLNSSGDIVCKTCLEDENYHCPKCGEPGKPHSKTRCQACYWKDHANEVIAEGVAVLSRPWMRHAYRSFGDSLITGYGAQKASHRIPKYLAFFVSLDMRFKNAESITSRSLIKTFGSDGLRKYTVAVVYLTKEGIFPSFCQTELNHYNEITKQEKIVDQTNDRWYGTFLSQYRQHALKIQQVSLDRGNKGPVSRTITSWVSAAKAFLQYADSKGVKGLAQIETHHLDLFLEEQPGYDASLRRFIRYLNKEAKLFKPIKLEKTVATHAPHLILPQRKIDELTSRFLDPNTPAKEAIFGVFMLLYAQTSSKIIDLRMNQLGRNKEGLRTIHFYRLDVDIAPEIEPIIDRWIKERKSLSVLESEHDNKFLFPGRRHGCHLSPAAVKYYYDQWGVTADQLLASSLFQMYCNGVRHPNVPHNAFGVSKAMTGKYLDLFDAHYRDAVDFYREQEEKAVS

SEQ ID NO: 348 - protein, 1044 aa, synthetic construct
  REGION 1..1044: note = TnsF-Tn7 System Protein
MIENDLETACLNWLSELNYECLTGDDVSSGGSHEGRQKYLEVVLKPRLHEAIDRLNPDLSTASIDEAVSKFSDYGSQSLIEGNREIYEWIRNGVPIEVEGADGHKSIIKVQAFNFNDFDDNDFLAVQQFTVHGSKVRRPDVIIFVNGLPIVILELKNPADINADIESAYNQIQTYKNDIDQLFAYNLLNILSDGTVARYGSLTAGFGHYSPWRLIADEKAPEGMLELEVLVRGLLAPKTLLRFLKDFVLYMSDDGSPSTKIIAQWHQYHGVLKSVDRALDAYLHKKDGKGGVVWFTQGSGKSFLSIFYVMALRERPEFQNPTFVIVTDRNDLDGQLYGTFSSCEKSLRATPVQAENRDDLREKLSTVEAGGIFFTTINKFAPEKGVTTVEPLCDRSNVVVITDEAHRTQYGFTAKIDSKTGQTKYGLAKYMRDSLPNAIYLGMTGTPISMDDKDTQSVFGSYVDVYDMIAAQKDNAVVPVHYEPRIIELEFNEADKQVIMDEFLDVTEEDDTDGQNRAISRLTRLEELAMSEGRMERMATDLVAHWELRKESMPGKAMIVAISREAAVRAYDEIIKLRPDWASDDLNSGKIKVVMTGNKASDPSHFIPHQTDKKDRKLLEKRFKSDADELEIVIVRDMWLTGFDAPPVHTLYVDKPMKGHGLMQAIARTNRIWKDKPGGLVVDYIGIGEELKKAIKSYTQDTDSKKSPVDVSGEALRILLDSIDVVRKEFFHGFNYEGFQDSQVALSLLGPAMEFITQLNPKADKKGHNTGVKEYSDQVAKLTKAQALAGTLPEALEHRDEIAFFQAVRVSLIKLTRAGSGRSRLEKEAALRQLVAKGVLVEGVQDLYGTLGLDKPDISVLDESFLAQISEMPTKNLAAELLQRLIEDEVKSRSKRNVVQAKEFTEKLQEAINKYRNRGLTTAQIIDELINLAKEINNAKPPEGMREDEYAFYQALCKNESAVRDLGDPILKALAHELTDKMRKSASIDWQKRQSARARMQMLIKVLLAKYRYPPDKQPKAVELVIEQAELFADEWGVEHPGVA

SEQ ID NO: 349 - protein, 492 aa, synthetic construct; identical to SEQ ID NO: 347
  REGION 1..492: note = TnsF-Tn7 System Protein

SEQ ID NO: 350 - protein, 86 aa, synthetic construct
  REGION 1..86: note = TnsF-Tn7 System Protein
MSEQWWMYLLECEGDMTYIGTAADVEKRFNKHSSGKGSRFTKINKPITIIAAQPFPDRSSACKAEYALKQRSLPQKLVWAEKWPWV

SEQ ID NO: 351 - protein, 611 aa, synthetic construct
  REGION 1..611: note = TnsF-Tn7 System Protein
MTATDRLKCARCDRFVRPQRALFGHSLCNTCLTQTGTACPCTRCGRNTHVLPGAEVPLCFRCERTTWFEHQTCKRCGRSLADRARKRYPDGTASCASCTAMLADPVACHYCGRWGLKRSRDYQRGFTELACHKCRTTDDAFQTCAGCRRYRLSAGERDGRPYCAHCLPTGAPPIITCATCNTVKYQYNEHQCEDCAWEHSHRLLLARLAPQFKTSWARQLFERYHSEAKLKTLHGNWRKSLKRDIAFFQGLESAFDSPDQLNGVLIVRRLGAPFVKRYRRGMSFLAHTHLIVLDDDPDFEVERVLGNLKAIAVDETDWIRLVLERFLTHVLNARARIVDRKRHGRIPVSPQSLDSAMRMARRLLIYARDDHGATSIREISQDVLDQFIGQHKHARTGLSAFIRYLRRYEKTFQPLRLRTVPPPAVPAHLVLPEEERQHFIRLFSAVTEPKQVHWALVCLLNLLYAQLPIQLVRMERDRVRHGDQGYEMRFAKVWLPLDSVIQPLMGRWMESRREFGAFDATNSSSYLFPGVRSGTHLRASASANFRRKYEYDARAGRVTALAAMIRGGLKQAKVLTDCFGLSAIRAQAYLRHFGAGHQAQARHVYEHHARH

SEQ ID NO: 352 - protein, 397 aa, synthetic construct
  REGION 1..397: note = TnsF-Tn7 System Protein
MTAVILPFRPAQAILPGAVAPPEAPARPRPPATPQTPLPLARSPRPLTEAEGRLQTRILDGYFRGFRLAQNHAPKSVSRDRAYVEEFLAFVGQPLWACTEDDFCSWAGHLGLERHLAPRSQRTMQTAVAAFWDYAVAHRAWQNEALALSGQRIETIVTRENRMVHTCDNTPVLQRTYLAADEFDRFFQILDLVIEVCAHERPRLLKDFQRDRAMIYTYYAFGIRLSEGWGINVSSFSPNPDLPELGAFGCVGVWGKGSRGSGPKFRTVPAVLPDISPMLTWYLSEIRPKFKDNTGRDRAMWLSERGARLCRASIALRYKRVLEVCGMEARLFSPHGLRHMHVSHQQTAGVPLQYTSKTVGHADGAVTERYTHLPEDYLRQVAVNIVRNSARQGDGNE

SEQ ID NO: 353 - protein, 147 aa, synthetic construct
  REGION 1..147: note = TnsF-Tn7 System Protein
MSDSPAPGQIVWRLRELMAQRNQMSQSEMARALEADGAHPISRTQVGRMMARAPTNLPIALIAALCRILKCSPDELFGWQSPSPAVDLNPLLTAIGQQGRERRGAAHVPDVPRLSGDAPQLDEHERARIVGPAARALPAHVLARKPK

SEQ ID NO: 354 - protein, 199 aa, synthetic construct
  REGION 1..199: note = TnsF-Tn7 System Protein
MSTNITHGTDELWWVYVLHCAGDRCYVGASSQVDARLRAHAAGTASAFTRAHPVEALIGTLPVGTRRQAMVLERRVKRWKPARKRAYFRHYRLAWDHHRATSLLAEVPMYAALAVSIDALNLLEAQHQEVQRSVLAALDGIAPELLEVLRQTGCDDAGIGAWLCYPNPQLSGRRPVDLVAHGEAAVVMALIVRAQHGVE

SEQ ID NO: 355 - protein, 611 aa, synthetic construct; identical to SEQ ID NO: 351
  REGION 1..611: note = TnsF-Tn7 System Protein

SEQ ID NO: 356 - protein, 176 aa, synthetic construct
  REGION 1..176: note = TnsF-Tn7 System Protein
MPPTTDAFADFARQANDTVGSYRLEFTLSPKTLRSANYCIANLAWHSVRFDPAEFKKLPKDKRGVYAFVLCEPNSVLPQHGYVAYIGIAGRDSNRSLRDRCRDYLNDRKLVKTRQGIAFLIGNWRDILHVFYAPVDAAVSAQTLKQLEEELNGALQPPYSRGDVQATIKNFQKAFP

SEQ ID NO: 357 - protein, 473 aa, synthetic construct
  REGION 1..473: note = TnsF-Tn7 System Protein
MDNSAVHPNCDGCGKPMAKAKRIYEGLRYCEGCYSKKFKKRVCHGCGNQARLFVKDPLATCTKCLNGRPCIRCRRVGRPVGKVTAQGPVCNSCANYFEASGRCEICNKFSIRLANKTIDGQVRRFCTGCSNVSSATCPCCRRYRVLVESASGAMQCKLCAELGEVACEVCSKSMPAGLGRECTVCYWRRTFHKRLEINSEGFSSQTFREEFKAYGLWFIDQIEAKKGALLINKHMLFFVEMAQHWSSLPSYDQMLKAFGADWVRRARYPVQWMIACRNLVIDDELKQSETELRRIEVILASARLGSSSALLKGYHDVLTARAAVRKTSLATIRTSLRSAANLLALGEASKSGLSSKTLRYLLIDTPGTAASLVAFVNYLNKTLNLSIEFPDPGETKKLTRKKQGHGLLALTQQALTGTDVMEQWLPEALSYFHGVSRFKKSEVTTVSDDDGLLVTVGEAEFWIPSPTTGFKME

SEQ ID NO: 358 - protein, 473 aa, synthetic construct; identical to SEQ ID NO: 357
  REGION 1..473: note = TnsF-Tn7 System Protein

SEQ ID NO: 359 - protein, 229 aa, synthetic construct
  REGION 1..229: note = TnsF-Tn7 System Protein
MVRNSCDGNKPRPVRSIKPTKRSVSGVFPFRGEGGIPYESMLERDFLFRTEFSGEVLEIIHQPVLIPFQKNGRSYNYTPDFLVYYRLGNRHYENYPKPMLVEVKPQEAWQENWRGWLSKWKAAWRYARDQGWVFHIHDETRIRDTAFFNIQFLERYARMNFAPEDSAWIIDSVRDMGIAPVHYLLATHSCSHYRGQGISHLWHLIATRRLECDIRLPLNEFLEVWVPNR

SEQ ID NO: 360 - protein, 620 aa, synthetic construct
  REGION 1..620: note = TnsF-Tn7 System Protein
MAIEIGAMVGHGDYVYRIAQILDFKTVVGIEVESGKASALPIGALNPLKRQKVDGLYVNYDVASIGVKDWATARERFATIEPLLGGGIVGRREVQARSEATGVDVSTIYRWLKLYKEWGELLSLVPRKRGWQEGNARISPEAGQIIERVLKDFYLKKQRPTIQATIKRIKETCEAEDVTAPGVSTIRERIKSVPDREFLRGRGFAEKARNKYSPSPGSFPGASYPLAVVQIDHTPLDVLLVDDVHRKSIGRVWVTFSIDVHTRMITGYYLALDAPAGISVAMCVAHSILPKEEWLIAHGIDGEWPVWGIPKILHSDNGPDFQSGDLKRSCSNYGIENRFRPVKRPKFGGHIERLMGTFAQTLKDLPGKTYSNKEDRDGYDSDANAALTFSEFEKWLVREVLIYNESYHSGIYMSPSRKWHLGIFGNADLDPLVGVPPRPSDAYTIQRDFLPSFERTIQHYGVQLDVFYYSEALRPWINAKDEKTGKTRTFIFRRDPRDISMLWFFDPLLKQYYKIPVANQAFPAASVWEFQAAKKKAVDEGHANVNEALIKRYILENRELVNHSESTTKKARRQAQRQRVHSKGSTPANPTPKPVQTATPLPIEFSDLISGDLDDFGDIS

SEQ ID NO: 361 - protein, 202 aa, synthetic construct
  REGION 1..202: note = TnsF-Tn7 System Protein
MLFLDELPEFDRKVLEVLREPLESGHIVISRARDRVSFPARFQLVAAMNPCPCGYLGEPSGRCRCTPEQIQRYRNKLSGPLLDRIDLHLTVARETTALNPIHQAGDTTAHASARVAQAREHQQKRQGCANAFLDLPGLRKHCKLTKVDEGWLETACERLTLSLRAAHRLLKVARTLADIEQTDAISRDHLKEALQYRPAAIT

SEQ ID NO: 362 - protein, 452 aa, synthetic construct
  REGION 1..452: note = TnsF-Tn7 System Protein
MKILVPCAEFFVRAYGRSTETVRTLLRFPWKEAQNRFYFDAEPDANKWVKLNHRVKSSEAVFLHHALYDDYTKDICERFYATLAAGFDKQKKKQGSLPCLDTGPWFRGAALIEGKGIWLEEGKVFLMLDIKGMSEPVGDIIVIQRQGTDSTGGEQGERVYTQSSRDIPIDQVLDLTDSEPPDSDSPRVFYDPPFKRLGEKRPRVTKRRKAPGKLGAALQGDDDAQKVSTGDAFGGSKGTHKGEGNAPEHFLEGALAKMWKSCSDLKTEYEAITKVEWFTSDDEFVEGGTPGLEAIRPHASKEPIAADAKAWSYLSAKTRNIRGVMIVRVTCGSRTFYIFEIQRIRHFSTSGKKLTSFNEESYRGLMVELPSDGTAAKYEIKLILQKLCACHGRIPKDTISELGPMSKYGHTRFDHDENPGDIVYENVLVKKFRQLGMHLQRKEKTTAAPTPS

SEQ ID NO: 363 - protein, 371 aa, synthetic construct
  REGION 1..371: note = TnsF-Tn7 System Protein
MAAAYTWHPRVDVTNARWPLAQNLLEDELLTSWLVRNAFAHGCSPLVLTGHLWPSWRCWTVDLDRGLAPDQSHILSKAAGISISDISSCTLRPIAQSVSPWIDAKTATWPWILVIGGRNRRHAGGLQCCPLCLEEGVPYYRLSWRLAWHTCCEQHMIRLIDSCLHCGAPLQPHRLNYEVADCSKCYRCGHRLAGPDGLCLDPPALAFQVDGDRYLNGDQRVAEGGFGDSQQWFYHSRFVWGLLRESAVHDTKAFTRFREMFSIGKLSSPSSGLAIEMLSVTERVPFLSAVWKIMATGQDQLYEAIMESSMTRTSVSLPAGESPVMLRRVLSELPLARPYKKSHAPVLKRATPRAVVMRMWARLKRKVLRDG

SEQ ID NO: 364 - protein, 295 aa, synthetic construct
  REGION 1..295: note = TnsF-Tn7 System Protein
MSEYAHIHPDFRAVLSLSDKERIHFLNEPRWIGYPAAQKLIELLRHMMELPTRARMPNLLIVGDSNNGKTTILDRFKELHGKGYVNENAEPVKPVIIVESPPTSDEKALYASILEEFWTPYRVTDSVIKLRYQVIHLLRECNVKILIIDELHSLLSGSAIKQRELMNTIKMLCNELKIPVVGVGTSDAVRVLHADPQHASRFDVLSLHPWTLGVDFQRFLKGFESVLPLRQASELFRPEVAKALHAISEGNTGNLHRLLIECATEAINSGKEKIDVELINRKSWLQPTRGIRELM

SEQ ID NO: 365 - protein, 295 aa, synthetic construct; identical to SEQ ID NO: 364
  REGION 1..295: note = TnsF-Tn7 System Protein

SEQ ID NO: 366 - protein, 479 aa, synthetic construct
  REGION 1..479: note = TnsF-Tn7 System Protein
MNKTSSENKLHTHCDHCNKQHVKIVRYYQQETYCANCYRTWFTKKPCSSCGEIKRLHKKEHSSVCLDCRRHQPCIRCGCDAVKHSANTPQGRACQSCYQRHFKAPQQCFECGKKKTGLSRYQELPHQHPICGTCYQQHVCETCPACRRYRKLVDTPQGKLCHKCHELGEINCPSCQKLMPAGCGEHCWSCYWQQRLIREVEINQNKFASDGVKQGYGDFIKWFVAQRDYQVVTLKHQHFVKFFERCNALWGQIPNYDKLANEFKPEGLRSHLTVLRWLIDTGQITINLKVKDDIAEQERIQNLLGKFDAVPEQVDRYYEILVKKINAGRTTLKSLRLALQPVAGLYQQFGLIGAQAPSQAQIDNYLTLKSGQRNALYGFINYLNQTQELELKCEVPDLKRRKRAKRQQLEQEIMGLARQTTPLSKKDQLRWLQLGMAYFHDQEVSLKALANVPVFCQPDNEMLRLNYEGKHYWLPRAGQ

SEQ ID NO: 367 - protein, 222 aa, synthetic construct
  REGION 1..222: note = TnsF-Tn7 System Protein
MLKQERKINPTWRSVSGQISFRGEAVPYESTLERDFLVYQSFRKDVIDIVAQPIVIPFRKNGRTYHYTPDFFVQVKMHRGISGYDDRSMLVEVKPQEEWKKHWRDWSIKWKAAMQWCKERDFRFAIYDEGRIRHLALENIQFLARYKNLAVDEREVAAILQQIELMGNTTVEYLLERFFKGYIYRPRGHQIIWHLMARQKIGFDVWSDIKNEATEVWHEPTK

SEQ ID NO: 368 - protein, 664 aa, synthetic construct
  REGION 1..664: note = TnsF-Tn7 System Protein
MNLPNNDQADSDIQDEPTKTGFGIWREAVHLTTGGIYRHKNTDHEYQLLHLIDSNQATFKNLKTLRNEILSVHDFNNVRSKQGASVQVHADEISDMDWEKAQKRYMAIKPLMGDSDIRINSWSGEIEKWASECGVSTRTLMRWMNAYTSTYSIASLLDKKRGWVSGNRRLHDHIRELIDTVIQEYYLSIQRPTVEATIREVFKRCHQMGWDKPSKNAIRYQIERIPEKDHLKKRGYRERAKNKFTPKVGQFPQVDYPMAVIQIDHTPADIILVDDKHRKPIGRPFITVAIDIYSRMITGYYISLDAPSVTSVAMCLSRSILPKQELLIKHGLTDVSWDVFGIPQKIHVDNGSDFRAESLRKSCALHGIGIEFRPLARPEYGGHIERLIGNIMHKVHELPGTTFSNIKQRDGYDAEKNAALTLDEFERWFLNYVTRIYHQSIHSGIGRTPNDQWRIGIFGDGVEAGSGLPVIPADAQTLTLDFMPSFERTIQHTGVTINGIHYYDPCLNSLINISEDKQKKKFLFKQDPRDISIIWFFDPFLRQYFKIPYANQALPVMSLWEYNQLYRMVKAKHGTVSEGLIYQAWEDMQKLVDESQKNTKTLRRQEQRRKTHIKSQDVYQPVEQAALISEQDCAVSGDMTIQPVSQTQQHALDNDAPTYFEDIE

SEQ ID NO: 369 - protein, 389 aa, synthetic construct
  REGION 1..389: note = TnsF-Tn7 System Protein
MAKTNTGYSQGHRINPLTVPTPYHEGESMTSWLVRASLNQGCDPLTFTQYYWPDYRLWTQDVDRGFSQVNSDIQHDIEIMARIDTEVDVPATLIIFADNLGAEIKTQAAPIAWTQPLSKRNRTSQIGYPHCPECLEVGKNAYLKLSWRYSWVMYCTEHYLKLQSQCIYCDQPYQPQMLQAQARYLNRCHYCEQKLAVAAVSEIVHLLAYNFQQWAEQVWNVRQGWILEQQVSAGEWFNLVLFYVRLIRRAIKRPNHMFGLLLTYFGFKLDDEILETGATGLALDLLSIDDRVELFKRVYHLLEISPEQWLDGCAECGVSQNSFKWHKEFQVPAAFMPVFLQLPQKTKRSPQKQIQTINPKSSEAVKQSWARLQRKIKIREFYEQNLIRK

SEQ ID NO: 370 - protein, 479 aa, synthetic construct; identical to SEQ ID NO: 366
  REGION 1..479: note = TnsF-Tn7 System Protein

SEQ ID NO: 371 - protein, 298 aa, synthetic construct
  REGION 1..298: note = TnsF-Tn7 System Protein
MQDAAYLHIHEKFRPNVILPDRERIAFIDQPRWIGYSKANQLLNLMQGLLNRTKQHRMPNLLVVGESNNGKTTVIKQFVKKFGQSYIEDDIRWVVPVISIQAPPSPNEKELYISILENLALPYKGSGSTAMLRYQMIHAFKECQVKLLIIDEIHSFLTGTARQQRQIMNCLKFLCNELEIPLVIAGTKDAVRILHTDPQHASRFDVAELSTWNNDGEFKRMVGSFERFLPLKEPSNLTDTTKINLIHNISEGRIGNVKRLLSECAIDAIKSGTEHISEQAIKDKSWLRPTQGIRKVIG

SEQ ID NO: 372 - protein, 298 aa, synthetic construct; identical to SEQ ID NO: 371
  REGION 1..298: note = TnsF-Tn7 System Protein

SEQ ID NO: 373 - protein, 484 aa, synthetic construct
  REGION 1..484: note = TnsF-Tn7 System Protein
MSIKFRVFAKNCNFCNSALTNWDYRYKEKHYCRNCYENSFVSKTCIVCNKNKKIHKDSKESICKFCEVTNLPCTRCGKTEFTVGKILKNGVVCNSCVKYYKEPKICSCCNKEKLNVSNRMLDNSHKRLLCTSCYNKFLPICSSCGYRRKTHSYNKDNKSICKVCYEQGYKKCISCTSLIPAGYGNICRECSNLKTLNKKVNALSGAFSSYFRESFIDFSKWLLKKRGSPFTSLKIQHYYKYFFMLDELALSLKKVPNYEEIVSKFTILETRKYLLVTTFLDEQNIVNINLKVKEEFANLDMIDRYLARFSKGSKSRNLINDYYKYLLEKLEQNKTTIRSIRLSLTPAVKFLEYCNNFKDKTPSNFILEGYLSLYCGQKAAITGFINFLKNVKNINISLTNIKPFKFKKVVTSKVILKQRLLDLMRLPSIPKSKEQLYYRTLIGYIHDIEIPINIFINKNDFKKDKNNNTYIILAKQNIYIENIN

SEQ ID NO: 374 - protein, 599 aa, synthetic construct
  REGION 1..599: note = TnsF-Tn7 System Protein
MINLTFKQKTPPIDRFPNDDIFRVVWAYGSVQKGSTVTGIPEIHILLVDLFFNTLKNEFQLSNKTRVVKISIAQLDIVRYMTIWKGQKRINGCWDNFSDYKSNVRFDLDTTNSESLNYSKQNQNKTYSYLFPFNKYKIENIDKQYFVKFTNSTFTKISHDNIDVIIPSMELFTSTYAPHEQQIRYKLIQKSLSDTLDDYVKSSIEDSGKYIIELVEDKVDSNIVFLAYASLNQITRQRLSKTRASLENGMVDKYPVILPYHPTSLSIQGDGFWINENIFFMLRINKYSLPNDYEIELIKEELDIEESKKENDKNKSYGQIPRNLDDYQLPATNEHNPHRRNGYLSLISEVDLLDDVKYKISKKVKIKTIKAEEKNREIQNTDDIENVSSGEADSTKDSEKTGKLCIKEENKKLHQSKALDSFLNDILQMRDTKTDISEGNKIYISNIHFLNEEANFEPITYFVQFKDILIARGEKNSFARMINRIKEKDKSGKTKSKNLFFGYRRCFLLKICLSNGKWFYLLEIERKDNTEGFSGLLLKPENEFDKAILEENIMTVIKAKGILKNATFKIKNVIFKHAVDKKSGSLIDCYSKNFRKILK

SEQ ID NO: 375 - protein, 942 aa, synthetic construct
  REGION 1..942: note = TnsF-Tn7 System Protein
MNTQSEALLEENLLKQLQSLGYERVVIKDDKELEDNLKIQLEKHNKTTISDSEFKRVLNHLNKGNVFEKAKILRDKFVLLCDDGTSKYIEFLDSEHWCQNLFQVTSQVSVEGIYKTRYDVTILINGLPLCQIELKRSGLELKEAFNQTLRYKRHSYSSNNALFNYIQLFVISNNVNTKYYANSKLESMNFKQTFYWSDKNNKRIDSLNEFATNFLEKCHLSKMICKYIVLAQATKSLMVLRPYQFWAVEAIIERVRDTNKNGYIWHTTGSGKTLTSFKTAQILMKLPKIEKVVFVVDRKDLDYQTTKEFNSFSDGSVDGTDNTKTLVKQFTDDTKLIVTTIQKLNTAISKKQYLEQMNIVKDKNIVFIFDECHRSQFGETHLAITKFFTNNQMIGFTGTPIFAQNATGNALGKRTTKELFDECLHKYVITDAISDENVLKFSVEYIGKYKQRENSVTNIDIAVEDIDKKELLESSDRIEKIVDYIIANHDRKTHSKEFTAMMCVSSVEMLIKYYELFKRKNHNLNIATIFSYSANEDDKDATGIVDLEEADGAYVDEEHINKHSREKLDEFIDDYNKIFGCKYSTKDSQSFYNYYNDISKRVKQKEIDILLVVNMFLTGFDSKTLNTLYVDKNLKYHGLIQAFSRTNRILNELKSQGNIVCFRNLKQATDDAIALFSNKDAKEIIIMQPYESYVETFNEKYDALKLIVPTVSSVSDLYSEEEKLEFIKAFRELLRVKNILGGFSDFKWDDLKILEQEFEDYMSKYLDLKPSVNPNKEKVSILEDVDFELELIHKDEINVTYILKLLGLFKESDNEEQKAKQREDISNLLNNNPQLRSKRELIEKFINENLVKIDNSENIEDEFIKFWDEEKVKAFNAIADEENLNKDELKKVVDTYIYEQREPLPNDIAKTLNVSPKYLDRKTIVTRVLERIVGFVDKFYEK

SEQ ID NO: 376 - protein, 240 aa, synthetic construct
  REGION 1..240: note = TnsF-Tn7 System Protein
MKLSMKNRKIGYTYSSVSGHFAFRNKKSISFESTLERDLLTILEFNSSVFDVTEQPLTIEYTNKNGRAVTYTPDFLVQFEEPNEMVCINKISRKPWLIEVKPREILKKEWDKLKPKFKIAIKYARENDLIFKVFDETRIRTSYLERIKFLNRYKRMEVDSWWKEWVFQGLEALGGHSTIDELIVFKFRGGKVDEKLALGVIYHLISHKIIKADITENLNMQTEIWLNTEHPNYFNFRHGE

SEQ ID NO: 377 - protein, 627 aa, synthetic construct
  REGION 1..627: note = TnsF-Tn7 System Protein
MQETNSIKLDRTRIEIKPNSYVKYKNLEYKITQLLNFNEVIGIDVVTKKAKLLPIAELSSIEPSKDINAESISKDISEINDSEYNEAKRRYEAILPLLEKNLSRKDSVEYSKKIGIHFTTLYRWQERYKSTGTILGLISNKVGAKKGNTRLNSEIEILIKRIIDSYYLTIQKPSVQSVIDKVLAECKKMNIIAPHSNTIRNRIESISEYEKLKKQGSKSIARTRYEPTPNKFEADYPLQLIEIDHTPCDIILVDDEHRLPIGRPWITVAIDIYSRMIAGYYLSMNAPSVTSVGMCVSNTILPKDTLLAKFDVNANWNVWGFPETIHVDNGADFRADAVKKAGLAHGINIEFRPVGRANFGGHIERAIGTLMSEIHNLPGTTFSNIKQRGEYNSDANASMTFFEFEKWLVTFITKIYHKRVHNSLFLTPEQQWEEGLFGDENSIGFIQKPSSHSTIILDFLPIYERTIQKNGVNIEGLNYYDHVLRTKINQTENGKKKKFIFKRDPRDISYVWFYEESTKEYFKIPVANQNMPSMTAWEFDSIKTNLKNKGLKRVNQDAILEAREELHNQIQLSVKNSKKARRDSQKLKNKDIEMKEINNNFSNNKINIDNQNHSISESFWDEEIPEF

SEQ ID NO: 378 - protein, 206 aa, synthetic construct
  REGION 1..206: note = TnsF-Tn7 System Protein
MGEVALSNHGVLFFDELPHFPSNILEALREPLEDNKILISRVNSKILYETKFIFVSAMNPCPCGNKLSSVKECRCSDFEVQRYKNRLSEPFLDRIDLYVVMNDSFSDNKNIVSSKELHESVIKAFIRQKNRGQKELNGKLNDKDIKKYCVLDSETSDILEKARVNYSLSFRSINKILKVARTIADINENEFITKGDLLKSLNFRKR

SEQ ID NO: 379 - protein, 359 aa, synthetic construct
  REGION 1..359: note = TnsF-Tn7 System Protein
MKIVIEPKTYNNEILSSWLIRSSILNGSEPSSWTTMIFNDNKFWSKDFDRFTEDKELIKLVKGSTKSLQELKNMTLEPLVKKILPIEEINPKKTWTFIISNGKRGAYKRNGTYFCPLCIENENSFNLRREFRLAWNTSCSIHKINLLQKCQKCNTIFTPNKIKFDNAKPFLCTNCGYDLRNSDIKGTNKEVYVFQEKLNNAIFKEEIDQNFPLVEKNIEELFKTLRILLSFLRALFKTNKGIKFLEKLNLEYMKEDLDKNKTTDNFEDMELENREMYILIASKLFNLKLQTIKDIFEELKFSYKLVAKQSTLKSQTIDYLASNLEINFKNKSVTGAYKEIIPKSAKEVKILFEELKKCL

SEQ ID NO: 380 - protein, 303 aa, synthetic construct
  REGION 1..303: note = TnsF-Tn7 System Protein
MENFEHLNQETKEIMYSSKEERLYYLEKNLFIDYPRTKELMDLLARMMNSPKKPRMQNLLLIGEPNIGKTSILNKFYEKYNTAELEDENGYSKPHRPVILATAHTKASEKDLYLAILDAFYTYHNPNNTLAQLRHQMFSLMIECRVDLLIIDEIHHFLNGTPAQQRDVIQALKNIGTKLQISIIGVGIKDAALVLGTDPQLSSRFDIIRLFNWELDKTFRGLLNAFEKHLPLKKPSNLAEKEKCILLYDISQGNLGDLHKLLIVCTRYAIENEIEEITIDVIKKFKDFKPTSRLVPREIKLKS

SEQ ID NO: 381 - protein, 303 aa, synthetic construct; identical to SEQ ID NO: 380
  REGION 1..303: note = TnsF-Tn7 System Protein

SEQ ID NO: 382 - protein, 348 aa, synthetic construct
  REGION 1..348: note = TnsF-Tn7 System Protein
MATCPTCRHYRVLVTAADGVARCETCASNPDRPCESCGAPTPAGRGRKCEECAWQSTFQKRLAINVQGFSSGEFGELFAQFGAWLFERVGAQRAALSINGHYPFFRAMDESWGVVPNYEKLLQHFGAARLRKAENPMRFLAEKCLVTVNPMLREQSIEQGRLAAILTEPRDSWSNQLLVEYLDPLKVRVEQGNTDLRSVRLAARAAANLLESAQLDLGALPTQKTLESFWKRSPGQVAAVTGFVGHLNRRHGLELQAKPDARWLSHAKRQKAERELVAMLYESTDEDFEGRWIVKGLAYFHDVARVSRKALIYQPHDYRGVAGYNVTHKGETLWVPSASSYQRSVHSN

SEQ ID NO: 383 - protein, 576 aa, synthetic construct
  REGION 1..576: note = TnsF-Tn7 System Protein
MVELVERVDVSYIRADLRHPDSQVKMLQGDQLVWWYGPIRQNTRPRSIPLAKVHFRQLFNDKPGPRTSAIVPLSSLPHYRKGTIWRSGKCISDTNLASTTRVFDVDFGKTGWSVTSRAELIKQGNAHIFSHHEYPLQYQHDLTRLLRFKLDDGKSLLIPCTEYFIRAYARNMEVCRALATLRWSDVKSVLFDDTRRDAHRWLVKPSAKMRGYDAVFLAHLLYDDYADEQIRRVNAQFISRDPSAQIFMEATPWFTGKGQLECRGRWLNDGNTFLCLNLSRSSQPDGEEIEWQTKKFDSSEGKEGGRLVLPRPVRTAEADEFLNENSHTVPDSHSEIIVVKPPPFGVIGSKRSIKKTKDVIRTDRGRLGPHPSEAGSHSSGDGSGAGKNVGKLEHAPEAELETQGFLYDIWNAFRSIMEDNPDRVTKVNWYTPPKFQNQGPPRAIRLQPTVDWEPDDKSAPSWVYLDKKTGECRGLMVLRIEVDGQNYFCFEIQPIKPEKPEYRGVLMKSHVTSMAEFEDFVQKVCSQIRYEVGRFKRMESFFPSDTKIFKHHQKDAKVFYRSRLINVFKDIGVVLQ

SEQ ID NO: 384 - protein, 348 aa, synthetic construct; identical to SEQ ID NO: 382
  REGION 1..348: note = TnsF-Tn7 System Protein

SEQ ID NO: 385 - protein, 229 aa, synthetic construct
  REGION 1..229: note = TnsF-Tn7 System Protein
MTRNSCDKPQQVRPIKPTRRSVSGFLPFRGVGGVPFESLLERDFLKRMRFSHRVESVIAQPVRVDFVDSLGRAQTYTPDFLVHYRQPADVEYMDYIKPMLVEVKPAYEWRKNWRAWLGKWKAARRYARQEGWTFSIYDESRIRGLPLENITFLERFERLDFDQVDIEMVLKTLQEMEFAPVHYLLARHFKGLYRDRGVALLWHLIATGRVECDITEPLNEYLELWVATR

SEQ ID NO: 386 - protein, 640 aa, synthetic construct
  REGION 1..640: note = TnsF-Tn7 System Protein
MNIYEIDTDEHFVPYEPSRERVRVEVGEMVRCDKQIFRIVQLLDFQNVVGVEVETGRSVSLRIAELLPVEQERVDGLYVNYDVSTISSDEWAVAQQRFSAIKPLLRDSVLPRSSVEERAKEVGVDTATLYRWLERYQSWHEVLALVPRKRGWQSGNSRLSAQADKLIDDVIDQHYLTIQRRTVQSTIAEIESQAKALGIKPPSASAIRARIKRIPEKIVLRRRGYADKARNRHTPSVGKFPGADYPLAVIQIDHTPIDLIIVDDRHRKPIGRLWLSLAIDVHSRMITGYYLALEDPSEISVGMCLAHSILPKEAWLNLHNVRGEWPVWGFPRVVHTDNGPDFQAENFRRSCANYNIENQFRPVKRPKYGGHIERLLGTFMSELHELPGTTYSSVPDRDGYNSDKHAALTMGEFEEWLVKSIILYHNRNHSAIYMSPARKWHIGFFGSREADALVSIPPRPADPLTVQLDFMPSYRRTVQHYGVQLDVYYYSEALRHWIGTTDPATGQARKFVFRRDPRDISVIWFYDPVLKQYFRVPVANQAFPAATLWEFRAAKKQAVDEGRQHIDEALIGRLIQERRQIVSEASASTKKARRDAQKHKVHSKNVTPAQPVKTLVEPLHPIPSDEGLLLDDVDLIGDIQ

SEQ ID NO: 387 - protein, 371 aa, synthetic construct
  REGION 1..371: note = TnsF-Tn7 System Protein
METSYTWHPGARCVNPRWPLTPPILPDELFSSWLVRTAHAHGCLPSSLTGAVWPGSHAWSVDPDRAHPWANLDRLSGMSGLSSHQLLASTLWPVMQRLHPRPVLQRSMYLPWILPLGCRSRSHAGGLMCCPDCIKSGVPHFLLQHRLAWHTACPWHNMLLIDRCVVCSSALQPARLCVDRPLSECHQCGQPLGKAALTPPVEAALTFQTFADSASQSMPFYGRVPLGFSEWMCIARVMVSFLEQVTRHPSAGSHLFCEAMGVDLSQLQASSLGLPFEYGTPSERAGLLGQAWVIMQAGPERFVESAAEAKLPVTSFPLPAVSVPDILHQMLSVLTNTPHKPGHMGLKRTHSPQEVWRRWHRLQRRTHRNGI

SEQ ID NO: 388 - protein, 1682 aa, synthetic construct
  REGION 1..1682: note = TnsF-Tn7 System Protein
MLDERLAHRPIDYDQSVDEGWLNRCDINALGQEGELSYFRLRDPATDQAWIAVRAPREVPAACQRLERDYRLQLDPQWAVIPSAFVRSAEGPLLVYPAGRSIADLIAEGPAALTPFLEIAVNAATALAQAHERNVLHGALQPEHVCLHTNQRVRLGCFRADPAELISEQGTALGNWAYLAPEQVCPHGSSSDRRTDIYALGAILYQLLLGELPLAGRDTQHWRQLHAGVQPRAACEVDSNVPQPLSRILAKALAKEPDARYQSARALAVDLAYCQRQWAASKSMEAFEPGCADPMTPDRARLYGRSAEQKAIALLLKAQRRNSKPQALFINGATGMGKSSLVEAALRANAQGYWATGKCNGVAQAVPYAPWVEILGALTTQLLAKNSRDLDALRCEILRRIKGHGRLLGKLAPDLQLILGPLPELPAKPTRLALQKELRAIVEFLQVFSRPDQPLVLFFDDMHWVDDSSQQLLAQLLAHSPGNLLLIFARRSDAPASSTPLALPAALRSTTLNLRPLAVSAVTELIGERYHVGPEDALQVAELVHDKTAGNPFFINQILRAMVEDQLFTFDTQAMRWSWCLQAVARHRYSDNVADLMIHRLVRLPEPQRDLLRVVSAAGSRCDERLLHQVLSQAPGEPLKALIGAGFLQPGQNGLGFAHERVMEAAYALTPARARAQLHARIAQAMRQAWPGRLHEVLFELANQLQRASPCGFAADDCEAFLQLLREAAARARDGGAFEQSAGYLHTAEQLLQRGATLESRATHGFAIACMATECDMQLSRMVAAEARITECRLRARSALDQARVCRLQALLYTLRGDYQAAIDSAISGLDLLGMSPVRGVDWQQVEASHAHVQTLVEQKGRHCLESLQRTDSEEVTVAISLLATLSSSFFVKDDICFLHLAKLMELSLLHGVAPGSTYGMAWYGVMIAERFGAYHDGHACCLAALKLIERHGFDADLTSALLALDQVSAWTSPMEFARRTALDAVDSGRLSGDLAMSCYACNHLVSDSLFMGRYLPDVVEELAQGLATVRRYGYRDIEQILQAQQAFVAKLSGTPCPASATASKSPTTRFFQYLMAGMCDFYLGNIPQAMRNLALAGDNTWAVPAHINLADYHLFHGLALGSPEAIGSLADKLRELQALRERFGRWAGFNPATFRNKLLLIEGVIAKLEGDGLAAIRCFDQAQIAATAAGFIHEQALAHEQLAEVCIPSGLISGANLHLRIARDCFHIWGATGKVHQLEALHPFLRTQPIQESQRATNQAKLDLEAGIEAARALSEEVLLEGLIETLMGHLTQHSGADHGALLIVSGAEFQMAALAYIDDAGLHVSMDDCQKFLTQAPLSIINATMRTKKPLVLNDAQSDCPEAFRQQLQARKARSVLCLPLVIQGVLIGLVYLENRLVPNLFGSQRLAMLEILASQAAVSLQTAKFYTRLAEDNQTRAQMEAELRRSRAELARTAHLQVMNELSASIAHEISQPLLGIASNAAASLRWLKRAKPDLEEAIAGLEDIRNDSERAANIVRALRSLAKQSPMQLKVVKLDELIREVVRLTSADAAKGTVDVQMRLQAGVSVMADPVQLQQLVFNLITNGLEALAGYRSDGVLRIASAVVGDGVEICVDDNGPGIAADERERVFDAFHTTKIGGMGMGLAICNSVVQAHGGQLQALVSELGGCRIRLTLPVNHS

SEQ ID NO: 389 - protein, 1682 aa, synthetic construct; identical to SEQ ID NO: 388
  REGION 1..1682: note = TnsF-Tn7 System Protein

SEQ ID NO: 390 - protein, 296 aa, synthetic construct
  REGION 1..296: note = TnsF-Tn7 System Protein
MTEYAHLHADFRPVLQLSARERIRFMGEPRWIGYKAAHHILDSLECLLDAPKRPRMPNMLIVGDPNNGKTTIVRHFEKTHGEGYVDENSEPVRPIILAEAPPSAEEKDLYIAILDRMWMPYKTTDSKVTLRFQVIHALRELKVRMLIIDEVHSMLTGSATKQREVMNALKMLCNTLMIPIVGVGTPNAVQILHLDPQHASRFDVIKLETWKLNADFQRLLKAFEAVLPLKKASELYKPELAQLIHSISGGNTGDLHGLLLECATEAINSGKECIDRQLIESKSWKRPTRGIRERVV

SEQ ID NO: 391 - protein, 296 aa, synthetic construct; identical to SEQ ID NO: 390
  REGION 1..296: note = TnsF-Tn7 System Protein

SEQ ID NO: 392 - protein, 316 aa, synthetic construct
  REGION 1..316: note = TnsF-Tn7 System Protein
MPAGRRNACEPCYWRRVHLRRVKLDQSAFESSRFAALFADFAAWLQCHAGGHRAALTVHRYLPFFTEIEKRWSEIPAYPDLLKYFGAEGLRRVRLPMKWLGESHQMTVDAVAREAVSEGRRVATIISTVPAGTVGAIALSAYKSKLQEKIATGKSTTRSMRLALRPAASLLLTADAFGHTLPDQAVVDRLLREVPGQLAAVSGFIRFLNEHYTLGLSAVVDKQLTAERRRKSLEVTLLNLAQRGDGSDAFLRNWVGIGLEYFHRLSRTVTRRLPDNAIAIDADGYRVSVGGQEYWLPTWKSLSGISAVVDRRAKGS

SEQ ID NO: 393 - protein, 396 aa, synthetic construct
  REGION 1..396: note = TnsF-Tn7 System Protein
MEHFSIIHAICRVALISPSEALTHQVERLAHALTEAGDAKSGQQIKLLLRSAARAQDMAPRRLVPSRAAPSLPGEALLPTTILPADRESGIRLVEAVFPDATTLARPFFPPHLDRAVQMLLDEWRHVAEIRKVAEEPTTSCLLTGAPGTGKTSLALWLAQQLGMPVLVARVDAMMSSFLGTTSRNIAQVFAFANRFRCVLLIDELDSLAKVRDDPNEVGEIKRVVNALLQNMDMRVPIGITLGITNHPQLLDPAVWRRFAVQIEVPLPSQEVRESIVRRTLEPVEMTPVVVSLIAALMDGGAGSEVRSVTVLFKKRNAMATEPTPVTDVLREITALNSGRLSPEVKAILRHDDPELARWIRKTLGNRINLNELGSLFDKSKSTVARWLEETDNREA

SEQ ID NO: 394 - protein, 396 aa, synthetic construct; identical to SEQ ID NO: 393
  REGION 1..396: note = TnsF-Tn7 System Protein

SEQ ID NO: 395 - protein, 570 aa, synthetic construct
  REGION 1..570: note = TnsF-Tn7 System Protein
MIAWWYCGMYKNSTADSQPNVLVAFREMGPDGLGDEVTHRRVPLTALGQVRIGSIWKDQHCRSQAVFEEKKFDVVINSNTWRVVSFGAPQRHDNTTPYPFEIHPLQFERDKNWMIEFDLQSGGRLLVPCLEFFARCYGRSAELKRILATYPWCGPNDAHRSRLYAPLDEAEEPGRWKVKLRRRMVNGDIVFLAHAKYDRYTEAAARKVYAQIEATHDPKGKTPAFIKIAPWFQGPAQLKVSGISFDNGRSFLGLNIIGCSDPEGVPLVRDRENSSLVNEGADTGVGREAWAGTPERRLVKPPEIVDLTGEHEPDHSAGAVEIHDPDFEVLGEQRLIFDVRREKAESVAGPKSSGTGADEYSSGEPHGDGKGVGYASIHAKPVLESQGTLRDVWNAMLFLQKKYPEKIRAAQWFTWENGFKNDAEPQLIGLTEFDNDVEGIDTNLRHWLYADLPAGQVRGILVARLVFQDKWVCILEIQRRPRTKKDKDGERKPSEEAFKGLVCVPPSFDEFKKWLTSTLSSIRYVRGIVQSLQSKHIENCAAFAHSQSKDGQVAGEAAVRNALEKVNIRL

SEQ ID NO: 396 - protein, 316 aa, synthetic construct; identical to SEQ ID NO: 392
  REGION 1..316: note = TnsF-Tn7 System Protein

SEQ ID NO: 397 - protein, 231 aa, synthetic construct
  REGION 1..231: note = TnsF-Tn7 System Protein
MNDNRCDPMSVRQTRRIGPTRRSVSGVYMFRRETPIPFESTLERDFLIRAEFMLDVLDVTPQPVAIPFIDALGRPSTYTPDFLVHYRLGDRSYDDYPRPLLVEVKPEAAWQTNWRTWAGKWRTARKFARSQGWQFRIQDESRIRDQTFQNIHFLERFQRMQFATEESQWIVSNLRQMGSTPFHYLLVRHFMGAYRPNGVAHIWHLLATRKIDCDMSRPLCDQTELWVPDNA

SEQ ID NO: 398 - protein, 644 aa, synthetic construct
  REGION 1..644: note = TnsF-Tn7 System Protein
MHDVEDTAHLNPAFEPRRQCVSLDIGAFVRHGQTIYKIAQLLDFESAIGIDVESGRSTTLRLGELRPVQVALQSTEHNVDLTEIADEDWQIAEQRFTAIKPLLDGFAGGREAVERRAKEVGVDAGTLYRWMQRYRAYEVVSALIPRKRGWKQGKGRISAQAEEVVSQVLSDFYLTSQRPSAQKTIVEIQRRCLERGINAPGESAIRSRIGSLSERERLRGRGYKEKAKNRFLPAAGKFPNADYPLAVVQIDHTPADIILVDDVYRKPIGRPWITLAMDVHSRMVTGYYLSFDPPSETSVAMCVAHSVLPKEDWLTLHRVDAQWPVWGVPKTIHVDNGADFRSNNFQQSCLMYSINLEFRPVKQPRYGGHIERMLGTLLREIHALPGTTFSSVKERDGYDAEKHAALTKSEFEEWLVTLICKVYHQRMHSALMMSPSRKWEIGVFGNAEMPGVGVPPRPVDRHSILLDFLPAFRRTVQTFGVTIEGMSYYAEALRPWINAVDKKTGVKREFTFRRDPRDISTLWFFDPEIKQYFKIPFADQALPAMSVWEYRQVKEKLKQEGRAGVDHHQILRAVTELRTKIDEAQEKTKRARKQAQRRKDHANKVSPGAPLASLPPRQPAAVSAPANVAIAGLSDEIDPYGDIA

SEQ ID NO: 399 - protein, 266 aa, synthetic construct
  REGION 1..266: note = TnsF-Tn7 System Protein
MAKRVVQQRRVSIRVACAVFGISESCYRYEAKLNTENEEIADWLLRITGCHRNWGFLLCYFYLRNVKGFGWNHKRIYRIYRELELNLRIKPRKRLVRETLQPLCVPKAINEVWSMDFMHDQLVNGRSTRTLNVIDDFNREALGIEVDFSLPSERVIRTLMQHMEWRGKPKVIRCDNGPEYLSAAIVTWTQKQGIRLEYIEPGKPQQNAYIERFNRTARYEWLSQYLWDDLEQVREAAVDWMWTYNYERPNMALGGFTPKQRLTMAA

SEQ ID NO: 400 - protein, 196 aa, synthetic construct
  REGION 1..196: note = TnsF-Tn7 System Protein
MPEFQRRVLEVLREPLELGHVTISRATARAAFPASFQLIAAMNPCPCGDLGHPSRACRCSSDAIARYRNRLSGPLLDRIDLHVGVPALSAETLAGPSHGERSAVVALRVREARERQHERQGQLNSQLSGRALETHCTLCADARAVLHRAVEQHHWSARTYHRVLRVARTVADLAACDAIDVSHIAEAVQYREATAA

SEQ ID NO: 401 - protein, 296 aa, synthetic construct
  REGION 1..296: note = TnsF-Tn7 System Protein
MTSYAHIHPEFRHVMALSDKERIAFLDLPRWIGYAKAQQILETLQGLLHKPQRPRMPNLLIVGESNNGKTTIVRRFADLCGKGYVNEESEPVKPIILAEAPPSADEKGLYISILEQFFTPYRATDPCAKLRYQVIHLFRACHVRMLVIDEFHSLLTGSPIKQREVMNAIKLLCNELAIPIVGVGTREAVRVLHTDPQHASRFDVFSLPTWALDKEFQALLASFERVLPLRKPSRLHQPELALTLHSICGGNIGNLHRLLIACARDAIQNGTECIDGPAVETKAWMRPTSGIREFVA

SEQ ID NO: 402 - protein, 296 aa, synthetic construct; identical to SEQ ID NO: 401
  REGION 1..296: note = TnsF-Tn7 System Protein

SEQ ID NO: 403 - protein, 265 aa, synthetic construct
  REGION 1..265: note = TnsF-Tn7 System Protein
MSNDITAQLKGLKLHGMASSWPELLAQSRHTEFDPERFMKQLLMAETAERQVRSIAYQMTAARFPAHRDLTGFDFDQAHVDEMLVRELHDLAFLSSAHNVVFIGGPGTGKTHLATAIGIQAVQRQGKRVRYFSTVELTNALEQEKAIGKQGQIAHKLMYVDMVILDELGYLPFSQTGGALLFHLLSKLYEHTSVAITTNLSFSEWASVFGDAKMTTALLDRVTHHCHIVETGNDSWRFKTSSAKSRVSRKKAPKGTENDDLSTQK

SEQ ID NO: 404 - protein, 265 aa, synthetic construct; identical to SEQ ID NO: 403
  REGION 1..265: note = TnsF-Tn7 System Protein

SEQ ID NO: 405 - protein, 323 aa, synthetic construct
  REGION 1..323: note = TnsF-Tn7 System Protein
MECKLCAHFGEVDCSKCGKAMPAGYGHECVDCYYDRTFHKRVKINIEALSTNAFRDAYSAYGEWLIKRVGAKRAALLINRHLKSFMEMNVRWKKLPSYRQLLESFGAQWIRRARLPMQWMTDECALQVDEELKADLTELRRIESVIASMPSDAGQKLLSEYRKHIESKPNKRRNSSRSVRMALRSAANLLLVSAATGQTLPSSKSLRSLLAETPGVAASLTSFVSFLNTKYSLGLEFPKDNRDAVRQWHNRFEQEIKVLMSEASMGIDVLDRWPTAALGYFHRVTKLTKAGMTLTPDAEQKGMLVSLKGKEYWIPIPSPAKSI

SEQ ID NO: 406 - protein, 187 aa, synthetic construct
  REGION 1..187: note = TnsF-Tn7 System Protein
MLERDFLLRTEFSIEVLAIVSQPVSIPFTTKGRPYKYTPDFLVYYRLGDRHFEDYPKPMLVEVKPEAEWRKNWRSWLPKWKAAWRYANEQGWTFHIYDESRIRDTALQNIKFLERYERMTFASEDSSWIIDGVREMGVAPVHYLLAKHSCSHYRGQGISHLWHLIATRRLACDIRLPLNDQLEVWVP

SEQ ID NO: 407 - protein, 639 aa, synthetic construct
  REGION 1..639: note = TnsF-Tn7 System Protein
MNSDEYAEQLTPYEPDRRQVVIEVGAVVGYSDAVYRISQILDFRTVVGIDLESGRAAALPVGGLRAIKQEKVDGLYANYDIALIGSEEWAEAQRRFAAIEPLLGSVVVGRAEVRERSKKVGVDVATLYRWLKRYKQWGELLALVPRKRGWKEGNSRISDEASRIIETVIKEFFLQRHRPTIPATIKKIQDACEAEQVTCPGVTAIRARLRSIPDKAYLRGRGFAEKARNKYTPTPGSFPGADYPLAVVQIDHTPLDILLVDDVHRRSIGRVWITFAIDVYSRMITGYYLALDAPAGISVAMCVAHSILPKEEWLIAHGVDGEWPVWGKPRVLHADNGADFQSEDVKTSCSNYGIENQFRPVKRPRYGAHIERLMGTFAQTLKDMPGRTYSNRADRDGYDSEKHAALTFDEFETWLIREILIYNEAYHSKIYMSPSRKWHIGIFGNVDQDPLVGIPPRPSDPFTLQRDFLPSFERTVQHYGVQIDMFYYSEALRPWINATDKETGKARTFVFRRDPRDISFIWFFDPVLMHYFKIPVSNQAFPAASIWEFKAAKKRAVDEGHSNVNEALIKRYILENRQLVATAEAQTAKTRRQAQRHRVHAKGKTPAQPNPQQPKIAPAANSDFDTMIDGDLDAFGDIS

SEQ ID NO: 408 - protein, 591 aa, synthetic construct
  REGION 1..591: note = TnsF-Tn7 System Protein
MRTIHPEKQQNKRDAAPESYEILPAKVNASRIRFKTPENAPRVLVSAWHGSMEKNPSQKNTTPISNVVFRSVRPDGTLGGVHIIPSALSFLGSLRVGSVWTEGRLLGRLAMATLPATVISFDPGRWTCITAREAGVPDKYRGFGIPPSQYGSWLIQLTAYSGKTLLVPCLEFFIRCYGRSSETSRLIATYGLTAVEKNYFYGHDRDPRTLKLQLRNNISHKEAVFLAHAIYSDFTKRKCAEIHSEARALFSPKDKLFLKAEPWFEGNATIQGDGFWIDDDTFLLLNIDGLSDPEGPPITVERQRYTADEGASGGARYYKKTPPPEASNEEINLIDSEAPDSNYARTVLDPPFAVLGVKRRLVKTKQKIPGKRGATKLGDNRLSLAPGDAFGNGKGGGKSESESPEWMVEGTLQQMWQTCTGLAKLYPQHISQIGWYTLASGLQFEGIPQYQFLSVTSTKTASTPAVKAAKSDVPTTKAVLIIRMTVDYRHIYIVEMYRKPPRKSISNNGESKFIETSYCGLMVQLPTKRDEAHLQLQLIFKNLLKHNGRIKDKTISDYPHVTFIHKPRETGPTPLSKVVLSNLEKLIGPVL

SEQ ID NO: 409 - protein, 370 aa, synthetic construct
  REGION 1..370: note = TnsF-Tn7 System Protein
MGATYSWHPRVDVNNSRWPRAQNLLADELLSSWLIRNAFAHGCSPMSLTGSLWPSWRCWTIDLDRGLTADQIKPLTRLSGISASDICSSTLHPIAEVLNPGLDSKKGVWPWILALGIRNRRRAGGMQICPVCLAEEMPYYRVSSRLAWHTCCEKHLAKLIDCCPKCGAALQPQLLGQGYSDFGRCDRCNTRLSAHLDDLGFAPGALAFQLACDKALHGMQLDGGVGCEPYEWFYRSRFVTGILRVVATSGSKSFVAFRDAFNLGNIPRPASGLPIEMLPVDERMNLLSAVWKIMDVGEAQMRETILACALPRHSLVVPAGEITAGLKAMLDELPPGIDRKQIPMGVRRPASKRSVEKMWARLQRKVRRDG

SEQ ID NO: 410 - protein, 323 aa, synthetic construct; identical to SEQ ID NO: 405
  REGION 1..323: note = TnsF-Tn7 System Protein

SEQ ID NO: 411 - protein, 295 aa, synthetic construct
  REGION 1..295: note = TnsF-Tn7 System Protein
MTEYSHIHPEFRTVVHMPKQARIDFLFEPRWIGYPAAQKLIDLLRHLMTIPTRPRMPNLLVVGSSNNGKTTIIDRFVDLYGKGYVNSDGEPVKPIISIESPPTSDERSFYCAILEQFWTPYRATDAVSKLRYQVIHQMRECNVRLLVVDEFHSMLSGTALKQREIMNVIKLLCNELAIPVIGVGTEDAVRVLHTDPQHASRFDVFPLRNWEVGIDFQRFLKGFESVLPLREPSEIFRPHLAGLLHGISQGNTGDLHRLLIECATEAIHSGKERIDADIIQSKSWVQPTRGIRELM

SEQ ID NO: 412 - protein, 295 aa, synthetic construct; identical to SEQ ID NO: 411
  REGION 1..295: note = TnsF-Tn7 System Protein

SEQ ID NO: 413 - protein, 301 aa, synthetic construct
  REGION 1..301: note = TnsF-Tn7 System Protein
MPAGCGKQCNICYWKALLTKRIDVNRAAFSHPEMADQMQKFSQWLGDQVGPNKAAISLKRYVPFFLEMEKTWSSNLPKAEELLEHFGTIRLRKVLLIGQWLESEGISLSREQKYDAADQRRIREKLSVFDEDSPEGKILQGYYQHMAGKTNTSVRSIRLALTPAIALLQLAREESLFPPDQSILNCYLSGKPGQRAAISGFVRHLRDHHGVEIELPSVTAVGAKRAQRKKLEQEMLEMMRQARDGEIPFRRWISITLAYFHGLPVCVGAKVKDTDIRKDREGWAIVWEGGRFWVPRYSSFY

SEQ ID NO: 414 - protein, 591 aa, synthetic construct
  REGION 1..591: note = TnsF-Tn7 System Protein
MKISLIPTKTFELNDSSVREAENWVVWWYGPITKNVRDRTVPKVDVVFRILDPDGNLTQATRCRKTGLTHLGFLRIGSVWNKGVSHSQIRYEARTFDVSFSPGDWEIISPSRSADYKSGRPLIPAPECPQYLRSENNYIIRFKLPDGKVLFVPCMEFFIRCYGRSKEIQRVLTVYPWEEAKQRLYEADDLPKLEDAWPIRLGKHLTRHDAVFLAHLLYDPYAQKVARGIYNQLVSALNDADDYVFLKVAPWFQGPAKLKVYGTASNDGQTFKANCILGCSDPLGKLVLYEQVSKIRTQGDETSEGDYQEEISKPVVKIQRKFPEIINLTADDAPDHGSSLQEFLDHDFEVLGPPRPVKYVRKISKGSQGKYRAIEANDDVSSTGEPYGTGKGVGQALVQAPILLDSKGVLRDMWNAVCHLRDEWPDVFHSAEWFTFEDGFQDDPEPRLIALKPFDQKDEVSGATQKWVYYNLDTQTPRGALVIKVETSHKTVYILEIQRRPIRSKNDESDEKNKEEAFKGLVFVLDDPQALADWLRLFLAEIRLTRGIIMAQLTTACPGTALTFKHAPSIHDNVPCEAAVKNALGKAGVSW

SEQ ID NO: 415 - protein, 223 aa, synthetic construct
  REGION 1..223: note = TnsF-Tn7 System Protein
MIPTQARTIKPTRRSVSGIYPFRGETAIPYESTLERDFIARNEFNRTVLDIIPQPCQIRFSLRGGREYTYTPDFLVYFRLGNRTHSDFPRPLLVEVKPESQWREHWRDWLPKWKAAYRYAKQEEWEFHIHDESRIRDQMFANIQFLERYKRMVFPREESDWIIQGLARMGSAPFHYLLARYFMGLYRAEGISHLWHLLATRQLDCDIYRPLNEHTVLWVANDE

SEQ ID NO: 416 - protein, 644 aa, synthetic construct
  REGION 1..644: note = TnsF-Tn7 System Protein
MSDSCGYEIDMAFDGPDFAPKRQKVDVKIGAYVQINGKVYRITEILDFSSVIGVDVETLQSQPLRISDLRPLENNSHSQQRNDLLEIGDKDWREAERRFEAIKPLLRQGTLLGRSEVSKRAQEVGVDTATLYRWIKRYNAYGSMTALIPMTRGWKRGKSRIGEFAEKIIEEVIQNYYLTHQRSTDQKAVTEVQRICAERGVSPPSPGTIRSRISRIPEKERLRKRGYRERAKNKFIPTPGRFPDADYPLAVIQIDHTPADIILVDDAHRKPIGRPWITLAMDIYSRMVTGYYLSFDPPSETSVAMCVSQSMLPKEEWLLLHKVDADWPVWGYPKKIHVDNGADFRSDNFQKSCLAHGIQLEFRPVGQPQYGGHIERLLGTLLRDIHDLPGTTFSSVKHKEGYESEKHAAMTLSEFEEWLVTLICKVYHHRLHSGIGMSPLKKWEIGVFGVGDLAGIGIPPRPADRHTVYLDFLPSFHRTIQTFGVTIDGMHYYDEALRPWINATSANDPKKKREFVFRRDPRDISAIWFFDPDLKQYFKIPFADLTLPAMSIWEYRQARELLKKQGAESVNEQQIFAALTELRGKVDEAKGKTKKARRQAQRRVEHEKKTTPAAPIVKEKSDTVQQPILDGLIDGEIDFMGDIS

SEQ ID NO: 417 - protein, 301 aa, synthetic construct; identical to SEQ ID NO: 413
  REGION 1..301: note = TnsF-Tn7 System Protein

SEQ ID NO: 418 - protein, 296 aa, synthetic construct
  REGION 1..296: note = TnsF-Tn7 System Protein
MMDFDHIHSDFRHIMGMSNADRIAFMDQPRWISYPLANNILDTLRGLMEKPKRPRMPNLLIVGDSNNGKTTIVRRFKELHGEGYVDENSEPVKPVVLAEAPPSADEKGLYISILERFFTPYRPTDSKSRLRYQVIHLLRLCQTRVLVIDEFHSLLTGSAIKQREVMNTLKLLCNELAIPIVGVGTRDAVRVLHTDPQHASRFDVIALSAWKLDKDFQHLLAGFERVLPLKKRSMLHRPELAQRLHALSGGNLGDLHRLLVVCATDAINNGQEQIDKTIIEGNTWVRPTRGIREVAL

SEQ ID NO: 419 - protein, 296 aa, synthetic construct; identical to SEQ ID NO: 418
  REGION 1..296: note = TnsF-Tn7 System Protein

SEQ ID NO: 420 - protein, 282 aa, synthetic construct
  REGION 1..282: note = TnsF-Tn7 System Protein
MNTHGLSNEVFREAFNAYGRWLISKTGSQRASLLINRHFKAFQEMNALWRSLPSYGQLLESFGARWMRRAELPMRWMQEECGMQVDEELKADLTELRRIDAIIASMPSDAGREILANYRKHLEAQPNKRPNSLRSVRMALRSAANLMLVSASPEDITVLPSSKSLNALLAQTPGEAASLSGFVSFLNSTYAVEIKFPKDNREAIRLRRHRFEIELKLLMREAAQGGDVSDRWPAVALGYFHGVPRVAKSQLVLTQDLDQEGMQVSLKGKDYWIPLPTKARLL

SEQ ID NO: 421 - protein, 282 aa, synthetic construct; identical to SEQ ID NO: 420
  REGION 1..282: note = TnsF-Tn7 System Protein

SEQ ID NO: 422 - protein, 187 aa, synthetic construct
  REGION 1..187: note = TnsF-Tn7 System Protein
MLERDFLLRTEFSKDVLAIIPQPVSLPFVTKGRQYSYTPDFLVYYRLGDRHPDDYPKPMLVEVKPEAEWRQHWQNWLPKWKAAWRYAKDQGWSFHIHDESRIRDTAWQNISFLERYERMTFAVEESDWIINTVREMGVAPVHYLLAKHSCAHYRGQGISHLWHLIATRRLVCDIRLPLNDFLEVWVA

SEQ ID NO: 423 - protein, 638 aa, synthetic construct
  REGION 1..638: note = TnsF-Tn7 System Protein
MGDDTKDVTTPYEPNRLDVPIEVGAVVAHGDSAYRISQVLDFRTVVGIDLESGRAAALPIGALKAVKRERVEGLYANYDMAVIGSEDWAEAKRRYQIIEPLLGSVVVGRAEVKARGVEFGVDTATVYRWLDRYKQWGELLALIPRKRGWKEGNSRISDAAGQIVEEVILNYYLQRHRPTVPKTIERIKEACEAQNITPPGNTAIRARLKGIPDKDYLRGRGFAEKARNKYNPTPGSFPGADYPLALVQIDHTPMDILLVDDVHRRSIGRVWITFAIDVYSRMITGYYLALDAPAGISVAMCVAHSILPKEEWLTAHGVNGEWPVWGKPKILHADNGADFQSEDVVKSCSNYGIENRFRPVKRPRYGAHIERLMGTFAQTLKDMPGRTYSKKEDRDGYDSEKHAALTFDEFETWLIREILIYNESYHSKIYMSPSRKWHIGIFGNADQDPLVGVPQRPTDPFTLQRDFLPAFERTVQHYGVQIDVFYYSEALRPWINAIDNVSGKARTFVFRRDPRDISFIWFFDPVLKQYFKVPVSNQSFPAASVWEFRAAKKRAIDEGHANINELLIKRYILENRELVAKSEAQTAKTRRQAQRHRVHAKGKTPAQPNPQLPKIAPAPVNDLANLIDGDLDDFGDIA

SEQ ID NO: 424 - protein, 574 aa, synthetic construct
  REGION 1..574: note = TnsF-Tn7 System Protein
MSDPLKLLKPRVDASRLRFKGTLSVARGDLAVCWQGGLTKNPTPNTVPLTDVLFRTLHEDGKLGAYHIIPAAISHLGSLRHGTVWREGRLVGHLKMQTLPETKVDFDRGGWRCIDARAAGLQDQYRLGITAKLLDSKLIELFVADGKSILTPCLEFFTRCYGRSSETSRLIATLGLEELRRQYFYEFDPAPNELILKLERGVANREAPFLAHAMYDDYTKARCNSLHQRLKAGFVPGEPTFLLVKPWFLGPASIEGQGYWINEHTFLLLNIDGLSDPLGPPIIVEREHFSGDEAPPDGQYNKRHQPPQPSNDEIDLTDNEAPDSNTARVLYTPPFKRLGIKRELIRKIRVTPGRPSIPVDGHDRNSYAPGDGYGGGRGGGKGEYVSSDWMAEGTLAQLWQTCLRLEENHPDRISEVGWYTLKKGFQTEGIPEYQFLSAAATQDPTQPNATQASKSKRAPKAVMIFRMTVEHAHIYIIEMYRRPRNKPSTADGKTTVTEDSYRGLIVQLPARRDAANTQLRLIFKNILRNNSRIRKTFMSDCPNVTFVHHPREPGPAPFATLLLTKLEKLIGSAF

SEQ ID NO: 425 - protein, 295 aa, synthetic construct
  REGION 1..295: note = TnsF-Tn7 System Protein
MTDYNHIHPEFQPVAHLSAQERIDFLYQNRWVGYPVAQKLIDLLRLLMTLPTQTRMRNLLVVGDSNNGKTTIIKRFESLHGKGFVNPDGEAVKPVIVIESPPKADERSLYCAILEKFWTPYRATDVVARLRYQVIHQMRDCHVRLLIIDELHSMLTGTARQQQEMMNVIKLLCNELGISVIGVGTEDAVRVLHTDAQHASRFEVFPLRNWEKGIDFQRFLKGFESVLPLREPSGIFQPHLTGLLHGISEGNTGNLHTLLVECAKEAISSGKERIDADIIQSKSWVKPTRGIRNLI

SEQ ID NO: 426 - protein, 295 aa, synthetic construct; identical to SEQ ID NO: 425
  REGION 1..295: note = TnsF-Tn7 System Protein

SEQ ID NO: 427 - protein, 451 aa, synthetic construct
  REGION 1..451: note = TnsF-Tn7 System Protein
MAFVIEAVAHDHGWIPLTHEDIHDDGQNVFSLVVGQNATGKSRLLRKIVSHFIFDNQFSERDRYLRQNPMAPMSHYSHLSGNEELVVGRWSAPSPSKIIAVSTGRHDRFPTPNSKELIDPTGRYHYIAPSEKGNVSALTRSLIAITSGLETHPWKFMSLASIFRYLGFEPILDFKLSLDPALRVQWTRDHAKAGGHTMLTLPGWEEAPKKYQYDKSLVDYHYQLLDHIYRQKHVSYEIDLGLSEPSRNYFSLENVADALRSGLIRVSDLTLNVRENHSRLKLSQASSGQQCMLVMILGIAGSIEDNSLICIDEPEISLHPKWQTDIISQLQYAFHGYRGCHFIIATHSPQIVAGLTADKGFVLSLEDRQLYSSKDYSNRSADYQLAQVFNAPGVNNEYLIRITLMLLTKISRREVLNREDWEQLEMLDQLKESLASNDPVRHLIDQVQMLR

SEQ ID NO: 428 - protein, 451 aa, synthetic construct; identical to SEQ ID NO: 427
  REGION 1..451: note = TnsF-Tn7 System Protein

SEQ ID NO: 429 - protein, 279 aa, synthetic construct
  REGION 1..279: note = TnsF-Tn7 System Protein
MKSLPGAAASDQTKQDFEDFAHWLSAHRGAHYAALNMKRYLSFFEEVGALWPEFPSYENLVDHFGAERLRRVRTVIRWLNESSRIAIDATVRERVSDRRRINRSLTFFSSGTGHEALVGYSAELEQRLADGLLQIRSVRLAISSAVQLLYVANPHGHKLPSQESLRRLLLRRPGLYASLQGFVGYLNRRYGVNLRGRFDPHWLKKASRNVGERRLMGLYAHAEDSEKFDRRWIREALRFFHGVRRIRAREIDYRPEPNGTQPGFNVTINNQEFWVPSIR

SEQ ID NO: 430 - protein, 581 aa, synthetic construct
  REGION 1..581: note = TnsF-Tn7 System Protein
MNHRIELVPYSISSRLQEVDLKLPEGNWIIWWYGRLKRNMRDASVPLVQVLFRKLEDGRVTDCTVREIALPRLVLYRIGTVFSDGIPVARRTGEDAWLDVSFDRSARQFALPRNLAFSSSEYELLATNGDDWLLEFSLLNGGKLYVNCIEYLIRGYSTNAEVARVLTTYPWDEVRRRFFASNSWEDGRWVVYPHSQMVKADEIFLAHAHNDFTARDACRWLYAQLDHNSFRDGDPYPLQVHPWFKGPTKLKCRGIPLSNGQDFLCTELLGFCLPAGTPFEVIDLYAEKGDASHDEVTAPVPKSRGADHDLSAIPMTDSSQPDVGSRATNIEHEVLEVIFPEREVTHTRQAKPYSEKTRFPGGEKDPKQFSTGEGHGLGDEDTGTLRLRSRLADAHDDADGVLAGMWGALEQLKNGGHIDTLQWYTQNGAGDELPFYLTELPGKETHWLGMDSGRKRGLLALLISVDKRQFMLFEIERKVVEKPLQNGLTVLDEENFSGLICEVVNAIELSELLTIIASQIVRDSGNFKAEKNYPTPYKVFRHKDSSSNTVPYESTAIHALNSMRLNIPKLRKRDREVDVVS

SEQ ID NO: 431 - protein, 279 aa, synthetic construct; identical to SEQ ID NO: 429
  REGION 1..279: note = TnsF-Tn7 System Protein

SEQ ID NO: 432 - protein, 224 aa, synthetic construct
  REGION 1..224: note = TnsF-Tn7 System Protein
MSSISVNGRSISQTRKIKSTRLSLSGVYSFRGIGVPFESTLERDFVQSWDISPVVKAIVAQPVQIPFTASNGRDYVCVPDYLVQFEAHAGIKPMLVEVKPREDWLKSWRGWLPKWRTIWRYAREHDWSFHIYDESRIRGVRLMNAQFLQRFRHLEFEQAPCDAVIHTVELMGQAPFQYLVARHFTGDEDVGRSLVWHLMATRKIAFDLNDPIDEFTILRSCYEH

SEQ ID NO: 433 - protein, 641 aa, synthetic construct
  REGION 1..641: note = TnsF-Tn7 System Protein
MNTNVEQGHRLARDSYQVEIGKFAEFRRKTYKIVEILNFDTVVGTNIDDGRAELLAIGELKSPSQDKDFSFYTHYDLDDIASSAWTEAQKRLAYITPLLQGEQHQKGAVEKRAKEVGASVASLYRWISRYHDGGGIIGLLPGRRGWGKGNSRLSEVQQDVIKNCIDEVYLNDKRYSKKDVCDAVKEACRLRGIRPPSDGAVHARINRIPPNIALRARGYSEEAANNYEARPGRFPADYPLHRVEIDHTRADVIIVDDEHRLPIGRPWVSMAIDDFSRMITGYYLSLDAPSAVSVAMCLAHSIIPKNEWLTLHGVEGEWPVWGKPHVVHTDNGPDFKTQRLIAACSAHNINREFRAVKRPHWGARIERLMGENARMFKYLPGATGSNPKDKGDVNPEKRATMTFEALEKWLVLSIMEYNNKYHSSIYMPPIAKWNSAYFGSKKLPGGLPPRPIDPWSLQLDFMPTENRKVHDYGVEWDAFYYADVLRPWINHHDPDTKKLTKLIFRRDPRDINSIWFYEPIQKRYHRIPIASAEFPGTAVSEYVQAKRAIKKAGAEMVDQEAIRRYLDAKKRIVEEESGATKSARLQQQKQKNNAKNKTPAGVATRTAPGTYASPPPLPLASGSDGNDGWGDEEVEIYGGIV

SEQ ID NO: 434 - protein, 298 aa, synthetic construct
  REGION 1..298: note = TnsF-Tn7 System Protein
MNSYSHVLPEYRGAFALSDQERLESIRRHWIDHEFADKLFKRMAGKLLNELESPDLMICGESDMGKTTLMKRFMSLYGNSYIEDESVRVKPVLMIEISKPSVRDFYCEILRTSIAPYDPKAPEAKLRKQAVDILVGCKTKMLIIDEIQVLFKGTARVTGNVMDEIKWLGNSLDISIILVGMPTATSLLNMDRQYANRFVMVEIPAWGKNAAFRQFLKAFESWLPLKKPSDLASPAMAGQILARTGGNTGHVENLLLACARRAIETGKEKIDVELLESEKWVPGTNGIRKLSLLGSAGL

SEQ ID NO: 435 - protein, 298 aa, synthetic construct; identical to SEQ ID NO: 434
  REGION 1..298: note = TnsF-Tn7 System Protein

SEQ ID NO: 436 - protein, 889 aa, synthetic construct
  REGION 1..889: note = TnsF-Tn7 System Protein
MNKTGRWSKLHDKCVICSKKDSEHKSKGICSRCYQKIKKYSEGICSVCGNSRVLQYKDSIGNPICRSCYKKPIRLCSICQKYDKAGKKINKNEYVCTSCYRKLFKPLRLCDSCGKVGETKKIIDGKFLCQACYNKYFRPKKECSVCGKEKHVHKKDGDKSYCCSCYMKYFRPTHICDICGRKGIIEKNDNGIKICTKCYSEKYTPKRQCSICLEIKKIHKRVNGQDICKNCYEKKYRPMAICVECGRWDIIIKKIDGNPICPRCYNKYFAPMRICVKCNTFGKISKIIAEGGICDTCYRKYYKPLKRCLVCGQTKSTHKLVNDESVCSACYQRYYQPKRICSVCQNSNRIAAYIDGKSICKSCYNKFEGTCTRCGNVTKSLFRIENLCDNCWYTDKINKFLEVQKHSFTDTSVYNLFENYCKTLIKYRNPLRVFNIIIRQFEIFKYISIHKIDLKSFSLGHLNKITDELQCGEISSLINFFIKESIIKPTDPLESFYNLRNFYISKLNPNFIKIFINYTDYLVEKRNNLEYKGWYNRFTWKTCSTYAYLAYFFLDYISKSVLCISEITDIVVQEYYSSNSQYMVTSLRPFIKWLNKNIHFFKNLPLPKVFRGNIGGRPYSEVELLNIINSLSEPEVPYKDKLMGLLLVLYGVRPFELCQLKISNFKIVNEKTFLEIRNTRIIIHPFIYDLYSKYVKYEYNPKLSLGNSIDWLFCGRNYNTAMSINRVCEILRSYNINSIRAFSTAITNLLLTEFITPAVAIHGLGISISTIANYYKAVNISNTYNSDTFEVCNYNKIQKKERVNHDIFFVYILKCIDGSYYTGYTSDINKRLHQHKSGYGCTYTKTRTPVELVYSEELPDKPSALKREKQIKKLDTYKKEQLIEKSRIE

SEQ ID NO: 437 - protein, 1554 aa, synthetic construct
  REGION 1..1554: note = TnsF-Tn7 System Protein
MSGNPTAGVGDPYWYEWSVGLLYTLDMLIPGKNIRHVILQCAAMQGLDDIVVVHENNQAECIQIKHTRESDTFTFSDAIDLLKSMISDWNNAKSQGYSHRSAILFTNRTIGTQRSTSKDGTKLPSLDEFWDSLQEQSNKAKAISEITFEPEWEAAWKKWLSELSEFSDEEKLEFLKDLKLITNQDGLMEIYRNISNKLKECFHVNERTATQLHQKLTYALMTWTTTIRFKEEITKEDLLQALSLSGDKIVGEHSLPTCEPFFESRADFAKTLEAILAERRNPIVFLSGGPGSGKTNIINYLSNKSDSVITLRFHAFKPLNAKDEYLTADKGISDPRALWGNLLIELREIFVKYDRMSDYNVPPTIELMESVDALRGEVLRLSDILGTLTGRTTVIAIDGIDHAARSGETNTFLGTLIPPESVPNQVCFLIAGQPVSEYSEYPYFIADTSRVLTLDVPCILENDVAQLYDSSDIKIPADGRDAAIRIIYGASAGNTLSAVFAVQEAKRFESIEELEEQLETKHLARGIESYYNYIWKAAIDAIPKEYTFVDMMLAGTLSLFNKQITPAMLQSICPDAEISLLAWRRIIQKLYPIIVTSSDDGYVVFHNDVRIYLGKYLRKEPGILSEVSGRLADFLLSGPCDIKTKHELTFDFLQNAHREKEFIDIFNRQYVTEALGIKRPMGEIVAQLEATLNSLNQISDYSKVLSLSCAVATLHQFNQSLQWMDQQYSGEIEVPAALFSERKVVQREFLTANILYSMLGNTMFLILYGEISRAESNIRRWLGTLDPGAVAELLYTNCGSKATADDFEKEMSRMMELWGRVSQYTGILFSSIDHTDSSEIIKRAYADYAKGWLDEGTNFLTPERIKNTLGQLGIHYRKDIHGYLMSILASEQDEAINVIFDSAKEHPNSNEIKLQLTMWAMQNDLQEQCSEWISEIQSQKFGYINKSAFEYQKEVFPYYCKIVYVFAYCEDIDIRTTSKACLLAFKEKDFSPKDRGYFAAQHLIQMSAFLGRLNRCINIGETSSIRVSDFCAILGQLLNYRDWINRYEVSGFNIEADLLNSIIRMYPKMDAEFRKAVDSMFSSRVEDYEHIEHLNIYWNHLKLHGQHGLLEQLFDNWMNPTGLVWDKELYEINEIATDFIEKATELGWKDRVIEAQKLLDSRIVGYVGRKDYSLYYLMNWYKHISIFDDSHWKTEGVLLLNISKIASETGDNRAAVYIDASVAESAGRLSADDLWKFANLSAQWDSYWVGVIFDGIIAALEFGSFSEAELLEIWSVATEIFFISEHASEYDSNNNKNRIYIADIKEAIILASNRLEYCNIADSMQKKSPLAFTQTRRSRTEHSFIIPRRWYEDDPYYNEGVVDKYLDEINALSCSEAFVVLNKLFQHEKSDFRWDIVISFIKKVERESRENILTYIPVIVDMLMQRHDAYYWEWDGANRLFEEIFKYFDKDQMTLILKDIVEKYFIYSNKHNDNNFFGLNSDLESFALFYYASLAEDANVNGFNEVAQMHMDWITGNQILSVRQQYSIQPGFVAENWSDFCKKLIKRCMKQRNY

SEQ ID NO: 438 - protein, 1554 aa, synthetic construct; identical to SEQ ID NO: 437
  REGION 1..1554: note = TnsF-Tn7 System Protein

SEQ ID NO: 439 - protein, 889 aa, synthetic construct; identical to SEQ ID NO: 436
  REGION 1..889: note = TnsF-Tn7 System Protein

SEQ ID NO: 440 - protein, 636 aa, synthetic construct
  REGION 1..636: note = TnsF-Tn7 System Protein
MSIITNNKWSLNYNNCISCGTTNHKHKAKGLCTRCYQKKHNYPQEYCSKCNKLTRVHSRLHGVPLCRSCSQAPIHICNICKKAATAALKFNNQYVCDSCYRKHFRKKYTCSICGKDEFAAIRSEEYTVCIKCYTTKNNFCNKCGRTILSPYLIDNKSVCNRCYEKSKSSNSDGIIDITRKTYICNICGQVNSVQEVYNDGSIICPDCYSSISKLCGLCKNPDNVIYSHLKSLPYCRKCYYQLLYIHELNESANKWNKDFYDIIAKFLEEKLKIISYESSYNLIKENEHIFHYLNEEFIKKNNSFTIDQFYELIKMYPSKKIFINDIISFLCIKNLLINFQHSYRILDSITSETSHLPKQLQKTLLSYNEFLVSKAKKYEEKGWIGQFTRFNYYTCYLYILTSIRFFTFLSCSLSISETASLNNHIVDMYIRLKPYDRGNLRHLVKFMNAEKLTFIKIALPNANFNHQLPVGLREDIQLKIYDKIINDPCVTLRDKVLLSLMILFAFTPGELQNLKKDYFAIRTENKVTILTLNFNKAKYKIPDNLYQIYINYIYSLKNNTEFIFPGRIYQKPLSLSSICHVLKKHGVTSTQLNCTAISNAMLNGMYQPALLMRSFRISNNTASRYYKLVKGSLEFE

SEQ ID NO: 441 - protein, 375 aa, synthetic construct
  REGION 1..375: note = TnsF-Tn7 System Protein
MQLQSQNKLKLVTNNVNSANPVELQSQKSEEEEVLIEMLHAYTNRLMSRRLKPRYIDSIISVIQSFVSYTNLYPWEWSSEDFEDWSTYLYQVRKNGESTQRHKQNRIYKFQNFLIESKHFCDLCNSKFGKKPIQICSDENLIPHKVEDENEEKRTAFTREQLACLWNFFDNEILQAYKNKSKKLKTLQRDKVLYLIIYYYGLRVNEVSKADTTDFICNPRKPEWGNFGGIIVKHGKSTAGSPPKRRTVWTISENAVKYIKWYLENVRPLFGFDEINSLFLSERGTMLTPNSITRNFKEYLKSAGLPYEHFSPHCLRHSYISHLSEKDDVSPRFIQDQVGHVFLATTQLYTHLSDAFVNRQLDKVINHQIDRYIKR

SEQ ID NO: 442 - protein, 746 aa, synthetic construct
  REGION 1..746: note = TnsF-Tn7 System Protein
MTLNSSIADLDERALDEVLAAARATGGIGLRELADHLQAHPDALLTGSTDGPKVLLRLLGLLAVAGYPVVLPCCTSCGKQTANLPRIASNGRVCQACGAKSYFGDCARCGRTNTRIAARRPEGRICYSCYRTDRIEPCARCGRDQHAVARLDNGGAICSRCWTPPQQPCAGCGRVGRVVFVSDDGPLCVNCYRRHHRPRALCGRCNRVRIVSRRGKNGAPDLCESCNPATRATATCSQCGRDRPGHRDDHGEWICKNCTPRIPRTCARCLRSRPVNALLPLGPVCSTCYCALHDHPAPCAGCREVRVLIGHDDRGSICGPCAGSDLDPRCRTCYRPGRHHTGDKCARCVLTDRVDELLTSPDGTLNTQLAPVRELLLAAEHPNGQIAWLARSGSARLLRELASREEAVTHDYLDTLPQTRAEMFLRQLLVEAGVLPARNDDLERIPPWLDTLLVDQPDHHVRLIQPFAHWFVLRRARRIAARRRYQAQAGHHIRMKIRVALEFLTWLDTLQLDLAATDQAAVDRWLAEGTTRFREVRYFLAWARSHRLVKDLRVPTQARSQPAEMLDEQDRWRLLERSLHDTTAPLDTRAAAALILLYGLPLIRVRSLTTDHLEQQDDGPAYLIVGAHRLLLPPKLAQMLSDLAEAGRGRSRYSPSPGARRWLFTGLVPGRPLSAEGLGAKLAGFGLHARPARNAALIALAAQLPPAVLADLIGLHHVTATRWSQLAARDWHAFVAARPGHTAGTE

SEQ ID NO: 443 - protein, 746 aa, synthetic construct; identical to SEQ ID NO: 442
  REGION 1..746: note = TnsF-Tn7 System Protein

SEQ ID NO: 444 - protein, 282 aa, synthetic construct
  REGION 1..282: note = TnsF-Tn7 System Protein
MSTARSYQNALRLFCEYVTDARYGWPGECLKRFGAAPQQVLHEWNSVVHNVEFEGRTSRRPLSYDEVQALFDAADGRVEEIRGRRRKGAAAAQRDAVLLKTVYAFGLRRQEARGLDLVDLRSNPKAKAFGRVGGLFVRHGKSSRGSAAKRRTVLTVPEFDWIVELIEHYLTEVRPMFVPGEHPAFWMTERRGRMSLRSINEAFEHARAAAGIDPELDLHSLRHSYVTHLVEFDYPERFVQEQVGHSYASTTAIYTGVSDDYRNRLLQRSLTAPSLDLWEPDS

SEQ ID NO: 445 - protein, 108 aa, synthetic construct
  REGION 1..108: note = TnsF-Tn7 System Protein
MIKKMGVQWHLRRRMAERDLFQTSDLVPLLAERGIELSREQVYRLVTQPPQRLSMDTLAALCDILDCSPNDLIEVTIVNATVRKTGTDTAPRPAPEVRRTTIRRPRQS

SEQ ID NO: 446 - protein, 389 aa, synthetic construct
  REGION 1..389: note = TnsF-Tn7 System Protein
MRATCRICRRHRPVMADDRICFPCSVGITHACPICQAVIPGSGHAPCYPCSQRRRSERQIAEEAATIPIRWMSGMFIAFCESGRIPLDNGLATERIARAADACRRIAITAPNPDRLTTDALHAAIGAEGTRRVAPLIAFMSDVGVLDWDRARLQVLIENERVDAILTAHRDSPHAPLLRRYRDSLAARNRKPITQRTALTAALALLAELGDAPLGDLSQRHLARALRKSPGHRAALQGFLSFVTTQGGPALISPKPRRLGPVAQEKRLRAEIKAWRKRLEKPRSSGEARAMVIMLLARIYALPITRVLTLRRDEILVTSNTVTLWPAAEAIALEEPFASTFLRWARWTSGWSSRPGPWAFPGRHGHQPLSEAAIAYHLTGKAKDQAKRP

SEQ ID NO: 447 - protein, 252 aa, synthetic construct
  REGION 1..252: note = TnsF-Tn7 System Protein
MGHRSVRGMVQVKGASIAHESTLERDLLTILDFMPSAQRVRGQPITIPFRDPVTHKPRRYTPDVAVDFVGPNAAQPSTAAATPMIYEVKYRADLIAQWPRLKPAFLAARAHAREQGATFKILTEREIRTPLLANVTFLRPYLRRAEHDGFEETLIATLMAYEEATPEIVLLASFCDEHSRLQALPHLWRLLAQGRIEADLTLELTMNTPIWVAEDEATTWSDPHSYALRPLVRSAAERRRIASPMRSISTAS

SEQ ID NO: 448 - protein, 351 aa, synthetic construct
  REGION 1..351: note = TnsF-Tn7 System Protein
MRWPLPSAPYDDEILSSYLARAAFRHRLPPTVFAAQWWPDRPVWNRDLDRGEETAWLADLAGRAGLTLERVQAMTLDALRRRFGRGSGDTPLILSAGIFHRTRVRHAVQICPRCLADGEPYVRRAWRYSFVLACPSCMTLLRDACPHCEAAIVPHRSYRWRLDACHACGLDLAHRDPHPAVVPPAALDLQARLLAVLANDPGTTVGPWEGDDAFSGLRALVTVARHPDVLPALRAALGLDAAAISAGRFERMRAGNRAVILETVGHWLSDWPNRFFVAAGSAGLTQRSFRKVAQPGDLALQILRLPEGFARDRTFVPVLQDRVLKRLRRQNRAGYRRVRATRLLAATDPRR

SEQ ID NO: 449 - protein, 632 aa, synthetic construct
  REGION 1..632: note = TnsF-Tn7 System Protein
MERSAFIRLAPSCEVRCGAATYRITHEIDLDSVLGENVATGERKRLKVADIEAVQPDTDGPAEKQRRASDISDKAWAVAEQRWAIIKPLVDRGIIPRAEVEAVAARAGVDPSTIYRWLSDYSHSGHLSALAPTTAGRPPGRTSLSPEVEAVIAGAIEDAFLTRQKLKPSDIIEKVEAACRQAKLPVPGKNTVRARIAALHPQLVLRRRGQKAKADNLGKPVRGHFPGADKPLAVIQIDHTQVDVIVVEETTRLPMGRPWLTLAIDVYSRMVTGYHLSMERPNANAVGLCLSMSMLPKGSVLEALGVPGEWPVYGRLAKVMADNAKEFRGKLLARACRDWGIDLDFRPVKTPHYGGHIERLMGTTANEVRKLDGATFSNTRQREGYNSEGMASMTLGEVERYLVDFLTTTYHMRLHSEIAMTPRRRWQVGLLGDGIQPGAGLPEKIADAEKLRLDFTPCLERTIQRYGVEMDKIGYQDEVLYRWAGATDPNDPKRPRQFEFRRDPRDVSRIWFWDPEIQRYFAIPYRDLSHPSVSLWQIKAAKAELKRQGVLDVDEDALFKAIARREGYAEEARAKTKAARREFHRATRVKPAPAASAVQEPQPSTPSLREEDGLFDTPPIIYGDIEPAEFQR

SEQ ID NO: 450 - protein, 697 aa, synthetic construct
  REGION 1..697: note = TnsF-Tn7 System Protein
MAELSDTTLRYAADGSSKRTDALGMRVMQRRVWDVRDSQYILVKSPPASGKSRAAMFIGLDKLQNQGLRKVVVAVPERSIGASFRDTKLSAGGFFRDWKLDRDLCGVGSETGSKVTELIEFLGSSGESIALCTHATLRFAFTRAGIEIFDGALICVDELHHASSNDENKLGSLLRGLMDRGSAHVLAMTGSYFRGDTEAILHPEDEARFERVIYTYYEQLNGYEYLKTLHIGFRFYQGRYLDRMGEALDPALKTIVHIPHVGSSEAVADKMFEVDAIVDTLGDPLGVDPVTGFVKVRNGRRILKIANLVDDGPGREKVMASLRKVKSRDDVDVIIALGMAKEGFDWIWCEHVLTVGYRGSLTEVVQIIGRATRDAPGKTEARFTNLVSAPFAKDDVVSRAVNDMLKAISVSLLMEQVMAPTFKFRTHKGSDDMTGQQPQTGKPEPVTNAGEIEVINGPMVSDEAKRIIDADFPDLVANVQSDPRTITVMLNPDAHHADVMHDVITTDIVRRRYPHQPESVIQDVVTLFGARTELGRAVKEDPSVIQSLTLGLDEPTTAGSGEGSSDPQLPGGGDNFIRATHKFLDVRDLQVDLLGGRREFVDAYEILSKELNEDILARLHGEVRAMKVTMTREEAEKLMPRIKEFLAREGREPNLNSPNGREVRLADALAFMRKLARQRRADLAGADAGRTAGAANG

SEQ ID NO: 451 - protein, 697 aa, synthetic construct; identical to SEQ ID NO: 450
  REGION 1..697: note = TnsF-Tn7 System Protein

SEQ ID NO: 452 - protein, 300 aa, synthetic construct
  REGION 1..300: note = TnsF-Tn7 System Protein
MSERYPHLQPDVRLLVDRSRQERIAFVQSDQWIGYPAATAAMDRLESILHHARARRMENCLLIGDSNNGKSTILETFAARHGDPVRLREPDGLTGHRPLSVVLIEMPKEANEALFWEAILERLRCAPPRRSENLMRYTCAILDQLAVRMLMIDELHNITRLPPRAQRDRLLLLKSLSNRLRLPIVAAGTRDAEAALKTDEQTANRFEPFVLPRWRLNQEFRSFVASYERLLPLPEPSNLADKEPLTALFNVSEGTVGRVVRVIQRATETAIEAGKPRVDLALLEAASRLPYGGERRRVAG

SEQ ID NO: 453 - protein, 300 aa, synthetic construct; identical to SEQ ID NO: 452
  REGION 1..300: note = TnsF-Tn7 System Protein

SEQ ID NO: 454 - protein, 444 aa, synthetic construct
  REGION 1..444: note = TnsF-Tn7 System Protein
MNRAAEPGEACTVCGRVRPAVSRREDGTGVCDRCYRTPERTCSSCGQLRPTKAHTDAGPLCRTCYHRERAPRPCGGCGQTRPVVLRARDGQPDLCGTCYNGPRRTCTACGKLRTCRGVRTGRYVCLSCTPRSQDTCTLCGKLTDVKARWPLGPVCPRCYQLTKRHPGICASCGTSRPLIGLNSHNVRICGPCAGTGQDYACATCGTSGDNYRKNQCYRCAIPTEAKAVLGDAAETFLAPVIHALQQVSNPPAVIHWLHKEASGAATLRDLLAGGHILTHELLDTLPNSTSNVFLRNLLVQAAVLPERDERLAATETWIRRQLETAPEHHRLVLDPYAHWVVLRRLRQRTQKIAHTSHSTTSHARLQLRCATEFLTWLDERGTSLHEAMQSDVDQWTTTGATTRLRLRDFLKWTNNARLTAGLHIRGARYAAPATFLDQDDHVAH

SEQ ID NO: 455 - protein, 366 aa, synthetic construct
  REGION 1..366: note = TnsF-Tn7 System Protein
MRRLTDQEGQKLQQIVRRGSTSSVRYRRAMMLLASAGGNRVPVIAQLMAADEDTVRDVIHRFNEIGLAALDPRWAGGRPRLLSPDDEDFVVATATTRPTKLGQPFTRWSIRKLAAYLRKVHGRVIRIGREALRCLLARRGVTFQRTKTWKESTDPQSDAKLDRIDHVLEHFPDRVFAFDEFGPLGIRPTAGSCWAGQGRPDRVPATYHRTHGVTYFHGCYSIGDDTLWGVNRRHKGATQSLAALKSIRAARPDGAPIYVIMDNLSAHKGAKIRTWAKKSRVELCFTPTNASWANPIEAHFGPLRQFTLANSHHHNHTVQTRALHAHLRWRNANARHPDVLAAQRRERARIRSEKGIRWGGGPSLAA

SEQ ID NO: 456 - protein, 384 aa, synthetic construct
  REGION 1..384: note = TnsF-Tn7 System Protein
MQRCCVRCNMRNGPSELAGNVDLVLADGVTHLDPETAAFGAMIEGWRLQQRARFLNEAGTIRPRLRLVRRFAEFTNQYPWQWTPAEAEAFMEELRSSNDTFSVSSARTYQAALRMFCEYVTDARYGWPQRCWEMFEASPAQIFHEWNSVVHCAEFEGDPRRRPLTYDEVQALFDAADGQVEEIQAQHRKGALAAMRDSAVLKTVYAFGLRRQEACCLDLADLRRNPRAADFGRFGAMFVRFGKASRGSPPKRRTVLAVPEFDWIVEVLEHYLQEVRPAFSPKRHPALWITERCSRLSRRRLDEAFEAARARAGLPKELDLHCLRHSYITHLVEFGYPELFVQQQAGHSYASTTAIYTGVSDEYRNRLVERALKARFADLWEEQP

SEQ ID NO: 457 - protein, 444 aa, synthetic construct; identical to SEQ ID NO: 454
  REGION 1..444: note = TnsF-Tn7 System Protein

SEQ ID NO: 458 - protein, 108 aa, synthetic construct
  REGION 1..108: note = TnsF-Tn7 System Protein
MIKKMSVNWHLRQLMASQDMFQTSDLLPLLAERGIHLSREQVFRLVTQPPQRLSMDTLAALCDILGCGVEQLIEVVAVNEEVHKTGTTATGTAAPRARRTTIRRPGPS

SEQ ID NO: 459 - protein, 171 aa, synthetic construct
  REGION 1..171: note = TnsF-Tn7 System Protein
MQRARGDEPDLCAQCYRVPDRTCFQCGGTRRVAAIVRGKPLCPGCHERRPRSCAICHLSRKVQAEWPLGPVCNTCYSQVRRAPATCSDCGRMRPLIGRRLDSVACCGPCSGAGPAYECQGCGDSGLLYRRGFCVRCVLDQRLTSLLSPDAPSVPEQLAPVRAARGPREARA

SEQ ID NO: 460 - protein, 171 aa, synthetic construct; identical to SEQ ID NO: 459
  REGION 1..171: note = TnsF-Tn7 System Protein

SEQ ID NO: 461 - protein, 206 aa, synthetic construct
  REGION 1..206: note = TnsF-Tn7 System Protein
MDCAPWSDPPVTYVPATVTRSAKIVVAGGFGVGKTTLIGSVSEVKPLRMEEPITQASAGVDDLRGTPHKTTTTVAMDFGRIHMAGGSLALYLFGLPGQARFQPLWEDLAEGALGCLVLADTRDLDASHDALGLLDSGGIPYAVAINTFPDAPGYPEAELREALALDPYTPLTTCDARDRTSSLHALITLTEYLTEHRSAAVLETPR

SEQ ID NO: 462 - protein, 206 aa, synthetic construct; identical to SEQ ID NO: 461
  REGION 1..206: note = TnsF-Tn7 System Protein

SEQ ID NO: 463 - protein, 169 aa, synthetic construct
  REGION 1..169: note = TnsF-Tn7 System Protein
MRQPVQHFATWHHLRRIRAKAASGAATRDPVHSAKQEITETVKFLVWLHETYQRTAATCTQQDVDEWLATGPTTRSAIRTFFVVAKKARLNTAVTVQHRLAKTSPSLSQDQRRAWIHELLTGSSESLPYRRHAPDLQKHGLSLIRCIMESLDETGLSTFTDRTSDGHLR

SEQ ID NO: 464 - protein, 670 aa, synthetic construct
  REGION 1..670: note = TnsF-Tn7 System Protein
MRTLNLGILAHVDAGKTSLTERLLFAAGVIDEVGSVDDGNTQTDSLALERQRGITIKSAVVSFAIDDITVNLIDTPGHPDFIAEVERALSVLDGAVLVISAVEGVQAQTRVLMRTLQRLGIPTLIFVNKLDRAGAQYCSLLKSVADRLSAAVIPMGSTDRLGTPGAAFTPYGRDDTSFTFAMLDLLAERDDQMLATYVENEKALSYDVLRARLAEQTQQALVHPVYFGSAITGAGTDALIAGIRELLPAGQGDVEGPVDGSVFKVERGPAGEKIAFVRMFSGAIRTRDRLRFHGDKEAKVTSVSVFDNGSVLTRPEVVAGEIGKLWGLGEIRIGDKLGAAGESDDGGDRAGAGESAYFAPPTLETVIAPTRPSDKGNLQVALSQLAEQDPLINLRQDDIRQETFVSLYGEVQKEVIQTTLADDFGIDVTFRETTTICIERLEGVGAAVEFNKKDGNPFLATVGLRVEPAPVNSGVSFSLEVELGSMPYAFIKAVEETVYETLEQGIHGWQIPDATVVMTHSGYSARQSHAHAVFDKSMSSTAGDFRNLTPLVLMTALQQAGTTVYEPMHRFELEIPTDTVRAVLAALSRLRAIPQVPALGTETSVLEGEIPAAAVYELEQQLPALTRGEGVLESSFERHQPVTGPIPDRTRTDHDPLNRRDYLLHVLRRV

SEQ ID NO: 465 - protein, 550 aa, synthetic construct
  REGION 1..550: note = TnsF-Tn7 System Protein
MGKRQRDCVGCGAPVGFIDRQHCCRCTARMKDEATRASCPACGRSRVLQADTGRCITCSRTCASCGRPVRSPSASHCGICRRESARQAAKRLCPRCQRPGFLQTSTGWCGHCSRRRQTKQPPRECAGCGQVRRHAGHGLCSACWQKHPDRPFIAAENLASRLAEPVPWLGDFAGHLADRHCVSRACTMISTLGRLLNDEQPNHPQALLDRARRPGRSMGSLARALEAFLTQHGLALPTDQAQRLATGRRRRRIDAVPLPLRPPVQAFAESMLRARERARKAGTLPRTDSTIETALAIVRDLARFLTSTRNKQDWALTDVHDVEAFLATIPKARQRRLTVLRQYFRFARSRKIVLIDPTLGVKAKGPSGFSGTTVAVDQQRQLFRRWTTGTDAHPHEALLGLLALLHAASSSEVRLLRLDDLDPTNRTIRLGKRPHPVPMDPVSWSVLQRCLAHRADWGTDNPYVIVTRITKTGRAPASTAYVSHLLDPCGTPPRTLRSTRLADLVNTLDPKLVAAALGMDPEGVMIYLADHVDVGRLAQRRENAPGSGTA

SEQ ID NO: 466 - protein, 354 aa, synthetic construct
  REGION 1..354: note = TnsF-Tn7 System Protein
MVESRLRVIESRTVPEAPVAWDPWEFQALCVEAFVASWRARGFSPVTVDNDIGLLERTLKALGRPAWDVTPEDIDRVVGGLAVDGRAPSTRRGYVQIFKGFHRFLQARKVIEIEAAFGVRLVCPVDEFNASRHVGDDSPALLPPPTPERVEEFFDFLKARIATARKYAPAARDYALFRTLYHAGLRSEEASLLDRPDVHFGRGPFGKLHVRFGKGAHTSGPRPRWVPMLDQLDLILRWFLDDVRGKFPDSPALFADESGGHLHQGTVRNRLRYLMELEGRPAADRFSPHALRRACATHNYERGVDLVAIQQLLGHWTVSSTMRYVRPSATFIEDAYRRAVTSTLGELTGEEPTP

SEQ ID NO: 467 - protein, 104 aa, synthetic construct
  REGION 1..104: note = TnsF-Tn7 System Protein
MNIKWKLRMAAAQREVWTGAQLRRLLAEKAGLELSSASVSALFTKEPSQVKMSTLAALCTALECTPNDLIEVDTTPVERPAAHPQPAADLPRAASARGRSMPPI

SEQ ID NO: 468 - protein, 223 aa, synthetic construct
  REGION 1..223: note = TnsF-Tn7 System Protein
MARRRAQYTLRAEGFLVWAARRGHSRELEVPFRGKSEPEGMDEDAHWDLLQQCVHDEELPLDVRTAGSLVLMFGQHLSHIVALTTDHLGEADGLLTLRLDDTPIRLPGPLAAVLQRLTAERPRYGWSANAPSTWLFPGTRPGAHRSTGPLARALAKHGIPLRSSRTTALIQLAQDMPPAALAPLLGMHVATAQQWRRRCGTDWTAYLQARRRALEAGRESTTR

SEQ ID NO: 469 - protein, 419 aa, synthetic construct
  REGION 1..419: note = TnsF-Tn7 System Protein
MLLDHPVHRAWRQHLQTARTAADALLATWPDIERDTDLAQVLRTNTGALARQAEDALYRREAHAVLHRFGSSIGASGQVTTAVNQFQYLADTSRRRLGEDHIDTFVMRSNLASSWGQAGDPGAAVQAMVDLLPDEIRVLGKNHRETLMTRSNLAYWRGQAGDVAGAVQALTDLLPDRIRALGKNHPDTLDTRNSLAFWRGEVGDAAGAVQAFADLLTDRIRILGEDHPDTLVTRSNLASYTGEAGDTAGALQAFTDLLTYHIRVLGEDHPDTLITRNNLAVWQGKVGGVAEAAHALAQLVADRIRVLGEDHPDTLIAQDNLALWRGKAGDAPGAAQAYEHLLQARRRLIGEDHPSTLAAWGSSAHWRGQAGDVVGAVTYSKELLEHMVRVLGEDHPHLRIVRSNLDHWQKEAQRAQDAG

SEQ ID NO: 470 - protein, 419 aa, synthetic construct; identical to SEQ ID NO: 469
  REGION 1..419: note = TnsF-Tn7 System Protein

SEQ ID NO: 471 - protein, 228 aa, synthetic construct
  REGION 1..228: note = TnsF-Tn7 System Protein
MTAALATSFTAIADSLAAADIVIADSELENLLQRADAAKPRSRQSLAAYLMEQATPWTTPNPHCPYAFARMAYLLWQSDYPVQPVACAQCGRITPKLDRVIDGARCCGWCASRRTQHICERCGRLGHRVTTTETGGLCRRCYQKDPARRETCGGCGQSHVPSKRTAEGLPLCGNCARPNTCALVAAALTTPRSSPAPARYASGATTHRHAPAASAAPSAPSRCVLNAA

SEQ ID NO: 472 - protein, 144 aa, synthetic construct
  REGION 1..144: note = TnsF-Tn7 System Protein
MRAQRGLKDLCFRCADNPYARCAICGHQCPVHTRWPVGPVCLRCYRRTIAYPETCAACGDTKVLIALDATGARVCGSCANVSIDYTCRSCGHSGPQHYAGMCLRCSVVQATRLLITVDGTMRPELEQLPVILADRASRPQRCAG

SEQ ID NO: 473 - protein, 228 aa, synthetic construct; identical to SEQ ID NO: 471
  REGION 1..228: note = TnsF-Tn7 System Protein

SEQ ID NO: 474 - protein, 258 aa, synthetic construct
  REGION 1..258: note = TnsF-Tn7 System Protein
MGRFHRHDDGTAHAHEHGDHPHTHEHGDHSGYDTSRQRVDVLESIFAENDLRAGYNREAFEIHGVKALNLMSSPGSGKTTVLEATLDEFAGEIAVGVIEGDIATDLDAAKLGGRGAQISLLNTGNGFGGECHLDAPMVNRALQGLDLAELDLVIIENVGNLVCPAEFDVGEHAKAMVYSVTEGDDKPLKYPVMFRAVDVVLLNKIDLVPYLDVDVDSYTAHIREVNPTATILPVSARTGDGMSAWFGWLRRFVAGESP

SEQ ID NO: 475 - protein, 258 aa, synthetic construct; identical to SEQ ID NO: 474
  REGION 1..258: note = TnsF-Tn7 System Protein

SEQ ID NO: 476 - protein, 247 aa, synthetic construct
  REGION 1..247: note = TnsF-Tn7 System Protein
MTSDSQGAARRVLAPNVVHLDPEQAVLEAMLQGWESQQRARFLRDATIVPRLRLVRRFVEFSGLYPWQWTPAEGEAWISDLRSGSSPLRVSTARNYEIDIRMFCEYLLDQRYGWVAECSQQFGQVPQQVFHEDNSIIHVGEYEGDPTRRPLTYDEVQALFDAADARVGLIRSRGRKGAMTALRDAAMLKFCYAYGLRRREVVYSDVVDLRRNSKMDEFGRFGALSVRYGKASRAERPSGAPCSRFQR

SEQ ID NO: 477 - protein, 235 aa, synthetic construct
  REGION 1..235: note = TnsF-Tn7 System Protein
MLDDGTGRIHPQLIPLFDQLRTMPKPVLGLSWLQSAQPNTMLRDLAAGRLTLTHEAFQHLPNWRTAAYLRDLLMQSGVLPLKDRQLLLFERWLETHLGAVANPEHAKLLHRFATWHQLRKLRAKAAKAPLCDSTTREAHEQQIQALAFLTWLNHRGTAVNDTRQADLDAWQSENYFTRRASHAFLTWCMNTGNMPALTIHFRQAERQAPMSQHCRLPAGWDHRFATSMGPLVSVI

SEQ ID NO: 478 - protein, 274 aa, synthetic construct
  REGION 1..274: note = TnsF-Tn7 System Protein
MNQQSSTATAAGPVDPLSSELAGILRALKLSGLKDTLPERLVLARQQKMGHAAFLELLLADELSRRDSRSATLRAARAGLDPMMRLEAWDDAEDLSYDRMLLSNLSTLAFAEAGHSVLLLGPVGVGKTHLATALGHAGIRRRMSVHFTRADKLFTRLRAARLDNSLAAEMRKIAAVDMLIIDDFAIKALDATETNDFYEIVVERHRRKSTIISSNREPAEWMAMTADTLLAQSAIDRLTQGAHTLVIEGPSWRQRATGNRRMTLDENKETRNAK

SEQ ID NO: 479 - protein, 274 aa, synthetic construct; identical to SEQ ID NO: 478
  REGION 1..274: note = TnsF-Tn7 System Protein

SEQ ID NO: 480 - protein, 235 aa, synthetic construct; identical to SEQ ID NO: 477
  REGION 1..235: note = TnsF-Tn7 System Protein

SEQ ID NO: 481 - protein, 372 aa, synthetic construct
  REGION 1..372: note = TnsF-Tn7 System Protein
MVGNSFAPGTVGLHLIGDLPLLRPEEQVFTAMLDGWRNQQLARNLAFSTIEGREKAVRAFVLHADAFPWVWTPQMVDEWMGDLRSVRNLHHSTLRTYQGTIRAFCGFVTDPGYGWAAICQDRFGTHPVQVIHEWNAAVHVQEAEAGPIKRAFTRDELQAFFDYADEQVGQVRGRGRKGWLPAFRDAMLFKTAYAFGLRRKEARMLDVVDFGRNPRGPEFGDYGVLYVRHGKAMKGSPPKRRSVLTVFDWSAEILQQWNEEVRPLFSTAGSGALWPSERSPRVGFTQMNTRFSTYRDSLGLDRGLDFHSFRRSYVTHLIEDGWDARFVQEQVGHEHASTTSIYTCVSSDFRTRTLRRALDTTLTAALQLERKP

SEQ ID NO: 482 - protein, 110 aa, synthetic construct
  REGION 1..110: note = TnsF-Tn7 System Protein
MKRQVSYQWRLREVMATRGIFNATDLSPLLFRRGIELSSVQVWRLVAQVPERLSLPVLAALCDILDVTPTDLIATRAEAVTPRRTADGGAEIVDLATTIRPKRARITPER

SEQ ID NO: 483 - protein, 375 aa, synthetic construct
  REGION 1..375: note = TnsF-Tn7 System Protein
MKPCVRCGVEGKKLGKLTKYGVVCKSCYKYFVKPKKGILSSNNDNFGTCSRCHRHRKLTNKVCKKCLFNEDVLCIECGKKIPAGRGRSCEECYWKKLLDKKVHLSAAMFEGSSLQNDWISFGHWLQKRRGAERAAVLINRYASFFYEMYRHWKRVPSYPELLEVFGAGELRKVLNVIRWLDESNRILLDKDLQEKSSEENRIKKYFQSLEKSPEAYRVLHRYHLYLLSKLHSDSITIRTLRLSLYPASDLLKKSKLPITQYCLERYLRQHQGQRSSISGFITFVNREYGLALRIPWKTKTAHRRNLKKLEKEIVQLYCENTPDKEIKWIQLGLEYFHSIPRKLTNKVQPEDIIRNEDLSYQIIIYKAHYWLPALK

SEQ ID NO: 484 - protein, 375 aa, synthetic construct; identical to SEQ ID NO: 483
  REGION 1..375: note = TnsF-Tn7 System Protein

SEQ ID NO: 485 - protein, 215 aa, synthetic construct
  REGION 1..215: note = TnsF-Tn7 System Protein
MKPTRRSVSGFVPIRSGSSVGYESLLERDFIVRADSDLSVLDILPQPVSIPFCYPDGRSFEYTPDFLVHYRLGYHNVDHYTKPMLVEVKPKEEWQKHWRKWLPKWKAAWRFAQEQGYSFHIMDESRIRDLTLSNIEFLSRYKRMQFDEDISNRIIANVEQHGQIMFSNLVGFHFSGIGQAIGIAHLWYLVATRQLDCDLSLPLSNNTYLWVPCYG

SEQ ID NO: 486 - protein, 639 aa, synthetic construct
  REGION 1..639: note = TnsF-Tn7 System Protein
MDNEFLNKNFKPNREQVSVDVGNIVYRGNDLFVIKEIVDFSTVIATSPVTNRTAVLKVKELRPANVQMENSVVEIDLSDISEKDWETAEYRFNAIKPFIQLEKVGRNLVKKRAEEINVDPATLYRWLKRYRSYGLVIALAPKRRGWKKGNSRLSNKEEEIINEVINDYYLTQQRPSAANVILEVQRRCHNACIKSPCHSAIRARIASVSERERLRKHGFRDKAINKFKPAPGTFPGANYPLSVIQIDHTPADIIIVDDEHREPIGRPWITMAIDVYSRMVVGYYLSLDPPTETSVAMCVAHSILPKEEWLTLHNIDTDWPVWGVPAKIHVDNGADFRSDNFQRSCAAYGIELQFRPVKQPQYGGHVERLLGTFLSDIHNLPGTTFSDIKAREGYDSDKHSALTLSELEEWLVRKICKIYNNKKHSSIGMSPIQKWNEGIFGTNDSPGAGLPPRPVNKNTIQLDFMPSFYRTVQPFGVSIDKLRYYSESLRPWINAIDPETSKKRKLLFRRDPRSLKTIWFYDPTLKQYFEVPFSDQSKPDLSLWELRKAQEKLKLSGQKGINEAQIFEALNEQRELVDAAKKNTKRARRQAQRRKVHAQEVTPASPSIKSQSDSKSFTPTESSDWDLLEEEVSGYGDIA

SEQ ID NO: 487 - protein, 383 aa, synthetic construct
  REGION 1..383: note = TnsF-Tn7 System Protein
MDTPYSWHPGGPALESRWTFDVPLYPDELLSSWLTRVSFKHGCDPLTLTGDLWPKWRVWTIDFDRGFSPDKVKKLSGYSGVNSDAISSAFLSHFATRLSPTVLPIGIWPWVLSLGSKNRKHLSGSQVCPICLALDHPFYRTEWRFSWHTVCERHKHPLIQRCPSCRSLIEPNQLKVQDGITERCPHCKKSMIIEEKINNLINTPSDLSFRFQSEADFVLRTGYGLYGKGNVSSEQWFHLNRFFIYVIRKAAQQPKSKLAQSLVSDFGVPQSSLFIPVSGLALEMLPTFERSRLLYGAKKLMDAAPQDLFEQLARFGPPTIFTDSKVQTLPCLQKYLPTLRIRGKFNKNKRQAMTGLPSPKSKAHVKKKMARLLRKYHLNYEDL

SEQ ID NO: 488 - protein, 296 aa, synthetic construct
  REGION 1..296: note = TnsF-Tn7 System Protein
MSDLDHIHPEFRHIAALNSQERIQFLEHPRWIGYKRATYLLELMEDLLKRPAKPRMTNLLIIGDSNNGKTTLIRRFKSLHGEGYVDDDNDPVKPIVLAESPPSADEKGLYLTLLKQFWAPHRVSDSKSKLRYQLIDLCRTCQVKMIILDEIHSLLTGSAIKQREVMNAIKLLCNELMIPIVGVGTREAVRVLHTDPQHASRFDVFPLVNWELNKEFQQLLADFERVLPLGKPSKLSSPSIASQLFSISGGNFGDLHRLLIECSREAIIQGKEQIDLDIIKGKVWIRPTRGIREVQL

SEQ ID NO: 489 - protein, 296 aa, synthetic construct; identical to SEQ ID NO: 488
  REGION 1..296: note = TnsF-Tn7 System Protein

SEQ ID NO: 490 - protein, 268 aa, synthetic construct
  REGION 1..268: note = TnsF-Tn7 System Protein
MVAFASWLRDRRGAQFASLNLSRYLPFLHEVHTCWDRIPTYAELVEHASAEGLRRVRLVIFWMEDARQLVIDPSVREEVSERRRISKLLGLVPNGPSLQALERYHQLLLTHMADGRTTLRSIRLALGAAVRLMHTTDPSGQKLPNQDAFLKHLRARPGLWASSIGFVGHLNRLFDCRINPWVDVEWISKGTRALKERKLLMLYKEGEQGDAFDRKWISAALAYFHQLGRVGLKSFQYRSDEENGCPGFTVRYRDSDYWVPRISCRQGQ

SEQ ID NO: 491 - protein, 537 aa, synthetic construct
  REGION 1..537: note = TnsF-Tn7 System Protein
MSSAIKPFSGTASIGLLRTNITPQAPDEFHSILFPAARRPSLASVPPPCFKDLNLDQVVDAITADRHEYDLEPFFYTHLDDLDAIVYRQEVMHDLLDPGLLAGIQAFAAGMRAVRRLLVPEEKLYYPRQQQRSFVEAVRVYCDALRQLAQALAACSFASRGLRGLLAYLERYLASERFLGLEGDTQHLLDGLGTITYSMLIKDNQVRVQRYEPTENISTAINKTFAKFRQGDVRDYHAKFNEWPAMNHVEAAVLDMVAKLYPDLFAEQAEFCTKHADFQDEAMEVFDREIQFYLAYLAYIQPLVDAGMPFCFPGVRVDSKAVFARDAFDLALASRLVRNSNRLEVVCNDFELSGQERILVVSGPNQGGKTTFARLFGQLHYLACIGCLVPAESADLFLYDRLFTLFEKQERPGDLRGKLQDDLLRAREILTGASARSLVLINEIFSSTTASDAAFLGQKILGRIIELDSLCVCVTFIYELTQMGDSIVSMMSCVDADDPSRRTFKVLRKPADRLSYALSIARKHRLSYDSVKERIRP

SEQ ID NO: 492 - protein, 537 aa, synthetic construct; identical to SEQ ID NO: 491
  REGION 1..537: note = TnsF-Tn7 System Protein

SEQ ID NO: 493 - protein, 500 aa, synthetic construct
  REGION 1..500: note = TnsF-Tn7 System Protein
MKAHLMYPQADFDLTKPPPLHAEELVQDLALDTLFDALAADDKFLRQVARCALLSGFDCTQEIVRYRQAVLRDCLANQAVVRDLYQLALDVLGLEKDIYLSFMTKYPSSIMHRSLKLLHLQIDLLRRLRRMVDDQAEHFASDGFGKLFGLIREEINDQYFAELNEHFEQLKLRKGFLISARLGPLNRGMDYCLRRYPRPQGNWMQRLMQKKPESYVYELAERDETGATALSELEDRGANEVANALAQAAEHITGFFEMLRTELAFYIGCLNLRERLSELRGEICFPDVAPAGQYQEDFEGLYDICLALNMQRKVVGNDLAGDGCRLFVVTGANQGGKSTFLRSIGIAQVMLQCGLFVPARRLRANLCDGLYTHYKREEDASMKRGKLDEELARMSDIIDRLSPRSILLCNESFAATNEREGSEIARQVVRALAETGVKTVFVTHLHDFAESLYRDPPEGSLFLRAERKDDGGRTFRIVEGEPLATAFGTDLYVQVFGEVA

SEQ ID NO: 494 - protein, 500 aa, synthetic construct; identical to SEQ ID NO: 493
  REGION 1..500: note = TnsF-Tn7 System Protein

SEQ ID NO: 495 - protein, 268 aa, synthetic construct; identical to SEQ ID NO: 490
  REGION 1..268: note = TnsF-Tn7 System Protein

SEQ ID NO: 496 - protein, 225 aa, synthetic construct
  REGION 1..225: note = TnsF-Tn7 System Protein
MSSTVYKGQLISQTRRAKSMTRSLSGVIPFRGQGIYYESGLERDFIRIWALNPDVVAIVAQPVQLPFTAHNGRNYVYPPDFFVQFDERTGRKPLLVEVKMREQWTVNWREWLPKWKAAYRYARDRGWEFRIYDETRIRGQILENVEYLQRYRNQSFDPVFTAKVLHTLSLMKAAPFHHLLALHFTGNEGIGRSHLLHLVATGQVLADLEHELDEQSILRYRYEGR

SEQ ID NO: 497 - protein, 641 aa, synthetic construct
  REGION 1..641: note = TnsF-Tn7 System Protein
MRGVETEGHALNRGTVPLAIGSYVGYRKSTYRLTATVDFAHVLGIDVIRGTSMLLPIAELTRASPERVAGPYANYSLDEIADQSWLEAERRMAIIQPLLQGGMFESGAVEARAKKCGVSRSSIYRWLAAYTEGDQFLSLMPGKRGWKEGNSRVSEEVEKIIAEQIRCIYLTMERKTQKDVFEAVKVICERGNLPPPSYPTVAKRIGKIPKRDILRSRGYSKLAQRNEPSPNTFDADYPLHRIQIDHTPGDVILVDDTYRLPIGRPWVTLAIDMYTRMIVGYYLSLSAPSAVSVAMCLVHAMLPKHKWLNLHGIDAKWEVWGKPYEIHSDNGPDFKTRSLIESCSAHGIEREFRPKNQPHWGGKIESLMLTKARAFATLPGATSRNIDERGDVNPDGKAVVSFSAFEKWFIAQIIKYNNKSHSAIENMPPVQKWHEAFFGSSLRKPVSGLPPIPADPMTLEIDFMPSIERTVQGYGVEWNAFYYAEVLRPWIEYKDPGSKVNKKFLFRRDPRDINFIWFYEPTERKYHKIPITTGPFPGISVEAYNKAKLKVKKLGLSLQDDEQIRKLTALQQALVAEEAAKSKAARREQQKNKNRPEKKTPASVYMAEENVETETKQSNTVQPAADAWGDDNEAELYGGVA

SEQ ID NO: 498 - protein, 373 aa, synthetic construct
  REGION 1..373: note = TnsF-Tn7 System Protein
MVARYLWHSGSRPLNQRWPLVPALREDELFSSWLIRCSLCHACDPLELAHLIWPGQRLWTRDCDRRICTLPLDELARNSGLEEKALRASTLEPFCQLLRLDTSTRSITPWVLSLGARNVRRAGGLQYCPACFNEPRPYYRLQWRLAWYTSCPTHHVLLRDRCPHCQAIISPHRLDYASMDLSRCHACRGRLSEVDLEPCDCRASELESFADSIVLGNELGFGGLVMPAHEWFALMREMHQLLRALSRQRTEGVCDFLALLDVDLDALPEIALSLPLECLPISDRVAYLAVLSDILRAGAFRFFMAARSTALCHSYYSAAVRPGHSYLAELMPYVPPRSYVRGKKKAGKPRSKRSVLRRWLRFERKALRCGFVR

SEQ ID NO: 499 - protein, 291 aa, synthetic construct
  REGION 1..291: note = TnsF-Tn7 System Protein
MTEYLHILPQFRPLMELSDADRLAAIHSRWVDYEFADKVHAMLYAKLSGHRDQPDIFLLGDSRMGKTTIIKRFIELHAPGFINQEGYREKPVLLIEVDHPSPKQFLIEILGTSISPFNPDASVEKLFFQVLHLLRECNTKMLIIDEVHSITQGTAREVTTMARMIKRLSNKTGIAIVGVGVKFSRQLLATDEQYANRFVTVTVPEWTPLGFRGLLKGFESFLPLRLPSKLSTKHMAMLIYEKTRGNTARVEELLLGCARQAIITGKECIDEDLLSQKKWSLDTFGTREVAP

SEQ ID NO: 500 - protein, 291 aa, synthetic construct; identical to SEQ ID NO: 499
  REGION 1..291: note = TnsF-Tn7 System Protein

SEQ ID NO: 501 - protein, 476 aa, synthetic construct
  REGION 1..476: note = TnsF-Tn7 System Protein
MSQCDECGNAVEKIHRRYKQRNYCHKCYVRVFKKRDCPSCGKSSRLHKTDELAVCQKCETNRPCIRCQRIDYPVGKITEQGPVCNSCSVYFREFQACERCGMASQRLSRISRFEDNLRVCTKCATRDYQTCQSCRRYRSVEQDAVSGKMLCKKCSSCPPLQCLTCQQQIPAGCGKYCESCSWRRILGNRIKELVNTLVNPSVKGYFEEYMNWLDHELGPHKAALLIHKHIQFFEKTNNLWREQIPDYAPLLHRLRASGLRKYELPMRWLVSMYKLEINTELKDQCSELDQLERLVKSSPELTLSAQVLQEYDQYLKNKMKLGNTTLRSTRLAMKPASALMQLVNQSRLDLPTMWHVKHYLYQSPGQAAALTGFLNFLNKNYDTQLNSTRMLDKESKNKSNLKKLEKDLLTMMKNPTENFDELTWVRLCLGYFHGLDKNICNRVDKVDMNVEIDGFNVLINNQQYWIPNMEFSSIRF

SEQ ID NO: 502 - protein, 476 aa, synthetic construct; identical to SEQ ID NO: 501
  REGION 1..476: note = TnsF-Tn7 System Protein

SEQ ID NO: 503 - protein, 231 aa, synthetic construct
  REGION 1..231: note = TnsF-Tn7 System Protein
MNNQSCDTVNIVPARRKIGNTRISVSGLYPFKKDSAVAFESTLERDFLIRLEVDPNVLAVESQPFTIEYFDNGQKRVYTPDYLVTYKHDDFLPFIAPKLVEVKPTDELQLNLHLWKARYRAAMRVCKEEGWKFHIAHEGRIRDQLWSNAMFLQKYRKMDFPPADSKHLLDYVRDREVVTFETLLARHFLGKWDRANGISQIWYLVAHGYLVCDLSAPLQPSTELWVSGSLS

SEQ ID NO: 504 - protein, 629 aa, synthetic construct
  REGION 1..629: note = TnsF-Tn7 System Protein
MNDRRVNIKIAAGEPVQIKGIPHTIIEVIDLKSVFVENNNTGRKNIAAISELRPSIAVEQHEDLELIADKDWIEAERRFNIIRPFIEGGVSGRKEVELRAQAHDINPATIYRWLKIYKAYGTIDGLRPRKEGLPQGKKIINKHAEAIIEKAINDLYLTNQRISVQKVVLEVKRLCHEYHILEVPHANTVRNRIAAISQKDSLRKRGHKEKADNKFTPAAGKFPHADYPLAVVQIDHTPVDLILVDDFSRCPIGRPFLTLAIDVRTRVVVGYYLSLDAPSVMSIAMSVSQAVLPKEKWLASRKIQAEWPVWGIMNTIHVDNGPEFHSETFRNACMAHDIRLEYRPVKKPRFGGHIERLMGTFATDIHAVPGTTFSNIFERKGYNSDTEAVFTFSEFEDWLIDFICNVYHKRKHSALGTSPLHAFELGIFGDKNTLGSGAARLPANDHNFFLDFLPSFERTIQTTGVTIDGLAYYADVLRGWINAVDPYNQKEKRKFIFRRDPRNISEIWFFDPEIKNYFKVPLADQSIPPFSIWEHKKIQELKKENGEYLKDHELGQALAKLRERVQEASTKTRRARRSRQRSTQHQMSVNPASIQGKKPQQESTILEQQLDSVYGLLPLDELENDEDIS

SEQ ID NO: 505 - protein, 363 aa, synthetic construct
  REGION 1..363: note = TnsF-Tn7 System Protein
MIGTTEVHSWIIPTTLQKDEALSSWLIRAALDSGCDPLSLTGVLWPKWRIWSVDVDRGLSSEHLRALVNTTKIDESQFDSATLRNFLFKYNLDNGTLDSWYLVLGTRNRKHRGGWQYCPKCLSEDDVAYFRLPWRFAWHTGCMKHNQRLHDQCPNCHNAIQPRRLEAPDQVMTCCSICKKSLLEVNERFMDCHALAFQKIFDQFLEQGRATYQDNLISLNDWLTVIKLFSQFIRKVLASSSNGKGWAFLEQLKIQVPHSELISNGLVISQLQVIERERLFSCIYQLLIIPLEKFIETAQSLNMNRSSFWDKRNQLPAILRPIEEQLGSVYRNYPPKRALVDTRKPKSKEAVIRKFLRLKRKLG

SEQ ID NO: 506 - protein, 283 aa, synthetic construct
  REGION 1..283: note = TnsF-Tn7 System Protein
MSNYSHVFQEFRPIVEQSNEDRLYFLEEDRWIGYPAANDLLDQLKGFLTLPKRSRMPNLLVLSKPNNGKTSIINQFFKLYGEGYVNAENNAVKPVIVVQAPVSPDEKALYMAILDKFWVPFRERDPVAKLRYQVVHCLKLYEVKLLIIDEMNSLLCGSPIKQRTVMNAIKYLCNETQIPIVGFGTEEAISVLRTDPQHVSRFRVVNLPLWKLDKDFQAMVNKFEKVLPLKQASKLAEPATVKYLHDITDGNLGNLRTLLREAAKKAIVSGQEFIDRSLLESVK

SEQ ID NO: 507 - protein, 283 aa, synthetic construct; identical to SEQ ID NO: 506
  REGION 1..283: note = TnsF-Tn7 System Protein

SEQ ID NO: 508 - protein, 623 aa, synthetic construct
  REGION 1..623: note = TnsF-Tn7 System Protein
MNNHSNEENTDNSSDKKKSPAFKVLESNAEKFLMVWWYGALAKAERRNTQPKVHVAFRELLEDYTPTNNFIFIDANITDLVSWPIGTVWHHERLVDYLPLEIREFDIDHTDFTHTYVQAYKRDEKTGRIDHFFSDKNKFYINPSQRENCISFSLKDQEYKELLVPCFEFLVRGYGLSTELPRILTTYDEAERHERLYTPHPQEENTWTILIGDSLTSDDHVFIAYYKYSEYTQDAVRILFSSIAKHDDFTQRNHIYPKVMPWHEETRKIRVSGFCLPDTNAFLALTILGIELPDQTLIRRVPKVIHRVKKPVDVNSPNPPQLQLGPGQINVSEDQGGRKPLSQSVILGHEFTWLGAGPVGEKSKTKHEKTITQPQRKKNTKETNTIGTGQPDSSKDILNATINPTTNKDNATEFEAPEQGRIMDLWNACVKAHSLNPSIVNAVHYYTFEEDFNYNDKPTLMAFSVNSETLENEDISDEEKQAYKNWCYANSNKTATRGALVIRLSLRNYPPVYIFDIQPAIYVSNAEGKSVYKERGHSGLIFRSKTLEQFEQYISDLMKSLPLSEGSYTKTLQGSNLVTQLFVFRRSKSAGFSDGESTLLNALRKIGITNIQLKEEKKEKNEG

SEQ ID NO: 509 - protein, 308 aa, synthetic construct
  REGION 1..308: note = TnsF-Tn7 System Protein
MPAGRGRECEICEWLRVFHKRLAINVKGFSSDHITELFSQFGEWFLASVGAHKAALNINVHYHFFAVLDSNWSAAPSYEQLLQHFGAAGLRKAESPMRFLTETGVVTVDVQLRDEHTEHRRLAAILSEPSSRWSAQLLNEYVSVLKAKMEQGLTDLRSVRLAARAAVNLLENAQLKLGELPTQKSLQSFWRGSPGQVAAVAGFIGHLNRRHGLELQVKPDARWLSQARRQKAERELVAMLSETAEGDFEGRWIVKALAYFHDVTRASRKKLVFQRQDYRDVAGYSVTHGEKNLWVPSASSYRRGEHPG

SEQ ID NO: 510 - protein, 580 aa, synthetic construct
  REGION 1..580: note = TnsF-Tn7 System Protein
MAGQLQRIDLSYSRANLRHPDSLVESLKGDQLVWWYGPIRPGRPTRTIPLAKVHFKQLFNDVPGPWTSAIVPLSSLPHYRKGTIWRNGKCISDTNLASPAQIFDVDFNESMWSITSRADLLKEDRANVFHHDEYPLKYRHDLSRLIEFKLGGDKNLLIPCTEYFVRAYARNMEICRALATLHWSDVKSVFFDDVRPDEHRWLVRPSRKMRNYDAVFLAHLLYDDYTEDCIKRVNAQFTSQDPSTQIFMEATPWFRGKGQLQCRGRWINGGNTFLCLNLVGSSQPAGQEIEWQRKSFDSSEGEDGGRIVLPRPVRTAEAEEFLTEHSHAEPDNHSETVIVKTPPFKTLGEKRKVKKIKEVIKANRGRLGPRPSEANSHSSGEETGSGKNIGKLEHVADPDVDVELETHGFLNDIWNAFRSIMAANPGRVTKVNWYTPPKFRNQGPPRAILLQPTTDWEPEDKSALGWVYLDRKTGKCRGLMVLRIVIDGKNYFCFEVQPINPNKAEYSGVLMRSHVHSPEEFEEFVKEICSRVRYVVGRFIHMHRYFPPNAKIFKHHQRDATVLYRSRLINVFREMGVTLD

SEQ ID NO: 511 - protein, 308 aa, synthetic construct; identical to SEQ ID NO: 509
  REGION 1..308: note = TnsF-Tn7 System Protein

SEQ ID NO: 512 - protein, 191 aa, synthetic construct
  REGION 1..191: note = TnsF-Tn7 System Protein
MLERDFLKRMRFSHRVESVVAQPVRVDFVDSRGRDLTYTPDFLVHYRQPAAVNYMDYIKPMLVEVKPAYEWRNNWRAWLGKWKAARRYAREEGWTFSIYDESRIRGLPLDNITFLERFERLDFDREDIEMVLKTLQEMEFAPVHYLLARHFKGVYRDRGVALFWHLIATGRVECDITEPLNEYLELWVATP

SEQ ID NO: 513 - protein, 640 aa, synthetic construct
  REGION 1..640: note = TnsF-Tn7 System Protein
MNIYEIDTDEHFTPFEPSRERVLVEVGEMVSCDKQIFRIVQLLDFQNVVGVEVETGRSVSLRISELQPVAQDRVDGLYVNYDISTISSDEWAIAQQRFSAIKPLLRDSILPRASVEERAKEVGVDTATLYRWLDRYQSWHEVLALVPRKRGWQSGNSRLTAQADKLIDEVIEQHYLTIQRRTVQSTIAEIELRAKAKGVKPPSASAIRARIKRIPEKIKLRRRGYADQARNRHTPSVGKFPGADYPLAVVQIDHTPIDLIIVDDRHRKPIGRLWLSLAIDVHSRMITGYYLALEEPSEISVGMCVAHSILPKEAWLNLHNVRGEWPVWGFPRMVHTDNGPDFQAENFRRSCANYNIENQFRPVKRPKYGGHIERLLGTFMRELHELPGTTHSSVPDRDGYDSDKHAALTMGEFEEWLVRTIILYHNRPHSALYMSPSRKWHLGFFGSREADALVSIPPRPADPLTVQLDFMPSYRRTVQHYGVQLDVYYYSEALRHWIGTTDPETGQARKFVFRRDPRDISVIWFYNPVLKQYFRVPVANQAFPAATLWEFRAAKKQAVDEGRKHIDEALIGRLILERRQIVDGSSASTKKARREAQKHKVHSKNTTPAQPVKAPMQAMPSISTSEGLLLDDVDLIGDIQ

SEQ ID NO: 514 - protein, 296 aa, synthetic construct
  REGION 1..296: note = TnsF-Tn7 System Protein
MTEYAHLHADFRPVLQLSARERIRFMGEPRWIGYKAAHHILDSLECLLEAPKRPRMPNMLIVGDSNNGKTTIVRHFEKMHGQGYVDESSEAVRPIIVAEAPPSAEEKDLYIAILDRMWMPYRTTDSKVTLRFQVIHALRELKVRMLIIDEVHSMLTGSAMKQREVMNALKMLCNTLVIPVVGVGTPDAVQILHLDPQHASRFDVIKLETWKLDAEFQRMLKAFEAVLPLKKPSAIYKPELAQLIHSISGGNTGDLHGLLLECATEAINSGKECIDRQLIEAKSWKRPTRGIRERVV

SEQ ID NO: 515 - protein, 296 aa, synthetic construct; identical to SEQ ID NO: 514
  REGION 1..296: note = TnsF-Tn7 System Protein

SEQ ID NO: 516 - protein, 283 aa, synthetic construct
  REGION 1..283: note = TnsF-Tn7 System Protein
MSSPEFVEIFHRFGVWLIGQIPAKKAALTIHGYFPFFYEIEKRWGKIPSYEQLLVHFTAEGLRRVRLPMRWLSETLQVSINAMEREIASDRRRIAAIMASIPIETTAAKILNSYNLELQSRIAAGRLSIRSARLALRPAASLLASCEKIGNKLPKQNTLDSYLLKTPGQKASIFGFIKFLNRRYATNLVIQVNAQKTILLRRKQLETELIRLLESGKCDDTFEEKWISVSLSFFHDLPWRKVKNLKHFSLSTDADGNFLVSLSGKTYFVPHWNFRSCSSQLEN

SEQ ID NO: 517 - protein, 1138 aa, synthetic construct
  REGION 1..1138: note = TnsF-Tn7 System Protein
MKKLKKLHVIQFSFWDVESFVFDKDCTGIIGANGAGKTTLIDAIQIALVGANKQHMHFNAQSVQKDSRLLRDYALGAMRSGDSEDQKQSVITRKREEALSYITLIFKGDQPSDTVSAGICIHSTATDRDHKVLGLYVLPGVELQQDDHLESRGAEGRAPMDWAQFEALIRGKAKGVGLTPTITTKPEAYLSELLHSIQDPERHIDRNQFLRALKHSINLKQVDGVGVFLRKYLVESTPIDKQGTLLHIKTMRLLARKIEEIKNQIARLQSIGKRFESVRHFHQQKAVAAAVRLTLQVEAADTNLSNLGMELDRLGDEIRTGQSNLTKLKKDTELMKGLVEDLIRQQASDPEILKSIQADQIGNLNRQAAESSKRTLLKIENKVRIALSAVAAELEFRKHTDSLVFREFVEQLDEHAASGPIASTSLIGKAFAALAKIKPDLFKYDESALIAIDEAKRAYESANERLKASAKGMRLELDDSISEAMSIFRSEDIDCATVASLVRITDVKWQGVIESFLARNRYALVVDPGREQDAVHLLRASRRPLYGVTVVQPRHLQEDLHRHYESNSVAALITGDHPVALAFLRRMLGALRQVESEQDLEKHPRSMTQDGMLSANGGTTRLRLIEPQLWSLGVQISSVERIGLENELREADRAWIDAKSIRNRTKTAIEELQSAITAYTIEEYEAAIDAMNIAFVTMSAAGAISSSEKAQSLAEKLKAATIARQAADQAVLDQTELLATKTEANRVKVIERDAAKLQFIDLSAKCQMAHEEQDYDAEAASTLYNECQSKNVQLGVSAAMEHLASKIIHANKRISTDEPQVHADFITYINEQAIALVEERSDWRLAAVWVSTHTQRLVNSTLSEYEGDAAQARSAAEQAFKADVKFKMREAIHRVQQEIGDLNRILDKCPEFTGGERYRFSHEISPMHRDLYELILSDADAGQPSFLDATDNDGTQGKLVTLLEACESGDDKGNNPLEDYRLLFNFDLKIIVNGMVVDKLSKRMGVASNGEHRVPFYVIAGAALASAYRIKPGAQHRGAGLMLLDEAFYGMDAQNSFVTAEFLKSLGLQLILAGPDTDVGKLIPVLDSYYDVFRPDNGADAYFSHVQIKEAAKTLLQSDIPEMHPHLVEQKMQQLSMI

SEQ ID NO: 518 - protein, 1138 aa, synthetic construct; identical to SEQ ID NO: 517
  REGION 1..1138: note = TnsF-Tn7 System Protein

SEQ ID NO: 519 - protein, 283 aa, synthetic construct; identical to SEQ ID NO: 516
  REGION 1..283: note = TnsF-Tn7 System Protein

SEQ ID NO: 520 - protein, 247 aa, synthetic construct
  REGION 1..247: note = TnsF-Tn7 System Protein
MEIYPTEIGKLDATDPKTNGNSCDEALPRQTRKIKPTRRSVSGVYPFRCETSIPFESTLERDFLIRAEFFVDVLDIIPQPIRVPFTCLNGESYVYTPDFLVYYKLGSRDYCNYPKPLLVEVKPEADWRKHWREWLPKWKAARQYALTQGWNFHIVDESRIRDKVFHNVRFLERYKRMTFVREESEAVISSVRDMGSTPVHYLLARHFMGIYREEGIAHIWSLIATRRLDCDVSHPLNEFTQVWIPHA

SEQ ID NO: 521 - protein, 642 aa, synthetic construct
  REGION 1..642: note = TnsF-Tn7 System Protein
MHKNADVSMPNDAFEPVRDRVDVAIGMLVRRGEDVFRIAQVLDFESLIGVDVLTGRSISLRLGDLRPLAREGKVSQLVNVDMAQIADEDWRIAQERFAAIKPLLNRMHIGRIAVEQRGKETGVDPATLYRWLQRYRAYGVVSALIPQKRGWKAGNSRIGADADALIEQVIRNFYLTPQRPTAQKTVLEVLRACQEKGIQAPGSSAIRARISRIAEREKLRGRGYKEQAKNKFLPAPGSFPNADYPLAVMQIDHTPADIILVDDVFRKPIGRPWITLAIDVHSRMVTGYYLSFDPPSETSVAMCVAHSILPKEDWMLLHKVDAEWPVWGIPKTIHVDNGADFRSNNFQQSCLMYGISLEFRPVKQPRYGGHIERMLGTLLREIHSLPGTTFSSVKARDGYDSEKHATMTKSEFEEWLVTLICKVYHRRLHSAIGLSPTRKWEIGIFGNAEIQGVGVPSRPTNSLAILLDFLPFFRRTVQTFGVTIDGLTYYAEALRPWINAQDPETKKKKDLIFRRDPRDISSIWFFDPTLKHYYKIPLADLALPSMSIWEYQQAREKLRREGIASVDEHQILRAITELRNRVDESMEKTKTARRQAQRRKEHAKNISPAQTVNVSLIPKKSAPILETDGLLEGDIQDFGDIA

SEQ ID NO: 522 - protein, 192 aa, synthetic construct
  REGION 1..192: note = TnsF-Tn7 System Protein
MSTCPSCKRDLRDAVMVPASASSLEFQEYADNVVITNSGFYGAHQLKTTEWFFLARYLLMLLRFTARNQTSNVRKCLASLLPSVSCLKPPITGLGFEMLPTSERANFLESVGVLIRTGPEHFRSAVLAHSLTGMSLRQGWQILPQYIHDIVQEIPQLARSRSTNIAVVSAPKSKQTVLYKWARLQRKIRRFP

SEQ ID NO: 523 - protein, 296 aa, synthetic construct
  REGION 1..296: note = TnsF-Tn7 System Protein
MNEYEHIHPDFRHVMSLTDSERLSFLDQPRWIGHKVAQHILDTLQGLLLKPNRPRMPNLLIVGDSNNGKTTIICRFRLLCGQGYVNEDAEPVKPVIVAEAPPSADEKGLYISILEQFFAPYRATDPTSKLRYQVIHLFRSCHVRMLVIDEFHSLLTGSPVKQREVMNAIKLMCNELAIPIVGVGTREAVRVLHSDPQHASRFDVLSLPLWELNADFQRLLAGFEKILPLRQRSNLHSPELAKLLHTISEGNTGNLQRLLVECAREAIKSGKEHIDKSIVESKAWLRPTRGIRELVG

SEQ ID NO: 524 - protein, 296 aa, synthetic construct; identical to SEQ ID NO: 523
  REGION 1..296: note = TnsF-Tn7 System Protein

SEQ ID NO: 525 - protein, 763 aa, synthetic construct
  REGION 1..763: note = TnsF-Tn7 System Protein
MRADKARRQRELAQARARLIAHLQRVVGPSLTAEEAQAALEKAKAWAPGGARTMDDYFAEHPKALTEPSPHCPVQVVRLLQHFEATGHGEAVTQLACARCHRTGLRLPRIAPEGRCCDWCVGRTELRPCARCGQNGHIVAQREEGPICRRCYRKDPLFLKECAGCGRNTAPAIRCEDGTSFCAHCNPNKPEHECIHCGELRPANAITENGPVCRRCYLAPPQLCDLCQQIKPIRYRKPEGEPLICGDCYRGPKRTCVQCGQVRHGFTRREGAFYCTSCRQRRWLPCADCGQTRPVKVNWPVGSLCDSCYQRRRRHPAPCGQCGTLRALVGRTEDGRNTCGPCSGTDIDYTCPRCGQPGAAYAGGACAHCVVKDRVRALLGNEDGIVHPQLQPLAEQLAAAPHPWSVLLWMRRSDAARMLASLAAHQGEITHEFLDDLPQDWRTLYIRELLVAAGTLPKRAEHFARLQLWLTDTLKDLPLHHAQIIRPFAEWGVLRSARRRADKGRYGLGSANSDRRSIRAAIKFMPWLDDNSITLCDLDQEGLDLWLTTNPTQRRDLAAFIRWAVARRLTNKVAIKTKKAGLPSQFLDTDDLNQQLRRCLNDDTLPLEARIIGALTSLYALPTTRILELTTDRFHRDGDDAYLTIGKHPVLLPPRLAVLIERQIASPIRTSVLKQPHSDIPSFLFPGQPPSRPRSAHTVTAYMRKHGLPGISARNTAMWEAITDLPPIVVSDLFGLHPHTAYAWAQYAQNSWAEYLEAVQNAD

SEQ ID NO: 526 - protein, 763 aa, synthetic construct; identical to SEQ ID NO: 525
  REGION 1..763: note = TnsF-Tn7 System Protein

SEQ ID NO: 527 - protein, 271 aa, synthetic construct
  REGION 1..271: note = TnsF-Tn7 System Protein
MSTSVFVFVATAVVLPLLLSEFGDWCPWLAKRLTRWTARRLGDVEATARYSEEWLAELAHLPGKLSHLLTATSYLLALPRIRWSLRAARRATRTEPSLDELLPTQAPIYWDSRGVIMNWGHQLEAAYHLLRVIVNEDPQVRNRLHLLVGPPGTGKTTLAHWLQHEFVRDGKNIHYVWAPAWIHRTRPLRVSAQMRDRLIQASQDVNLLVVDEADQATVDTLQALQLPCPVLVLATTGGQLGEIVPSPATAGVVVDLGRILDSWQRATPGAL

SEQ ID NO: 528 - protein, 271 aa, synthetic construct; identical to SEQ ID NO: 527
  REGION 1..271: note = TnsF-Tn7 System Protein

SEQ ID NO: 529 - protein, 389 aa, synthetic construct
  REGION 1..389: note = TnsF-Tn7 System Protein
MLTLVRPGADTAEVVDPAAVSVESGLADVVTLQRRRQARMSAVDEESFFLDTLSEYQWARDAAGLAPTTLDGLLKPVVEVCEYYGTVPWQLSPREVDRYFAGPGKRATSTLRGKINKIDAYFAFLEQRYAGEIMRRFGAAVESPIDPFNRPRHRGDFGLRIPPSQTAMRDFLGRWREDLPNARKYLVACRDYVMTKVAYLSGVRAAELCGVAMGDLHWEHGQWGRFVVLGKGANGSGPRPREAYMFQEGRALLWWYIEEIRGEFGDDVEHPRAPLWPSERKPTAVSALNLPIAPAIVPSTFRKALHTAAASYLTGPVTDLFPHLLRHSCATHNYERGMTLWEVQKVLGHDWATTTLRYMATAHADPEHANLTASSRAAQRLVMDKGNLR

SEQ ID NO: 530 - protein, 115 aa, synthetic construct
  REGION 1..115: note = TnsF-Tn7 System Protein
MKWNLRMVAAQRDLWRPTQVLAAFQQVGFNPSLSKVAALWGGTPVTVRLEDLDMMCAALNCTVAELLQAEPLAGAQAAPESDQQAVGAEEQQAAGPVRPVPHSRRGAGPRSLPPN

SEQ ID NO: 531 - protein, 456 aa, synthetic construct
  REGION 1..456: note = TnsF-Tn7 System Protein
MGFARTCSVALVGVEGVVVEVQADLEPGIATFALVGLPDKSLTESRDRVRAAIVNSGETWPSKKLTVGLSPASVPKGGSGFDLAVACAVLAAGGRIAPEAIADLMMIGELGLDGRVRPVRGVLPAVLAAADAGYKHVVVPERTTAEAALVPGVAVLGVRSLRQLIAVLNDEPVPEEDAEAGAEGRPDPMLAGLTAPGGGIGTGLATSLGGSAHPAGGARPGPGAAPGHTDSRDMADVAGQPAARLALEVAAAGGHHVFLKGPPGAGKTMLAERLPGILPPLTRQESLEVTAVHSVAGILPPGRPLVDAPPYCAPHHSATMPSLVGGGSGLPRPGAVSLAHRGVLFLDEAPEFSVRALDALRQPLESGHIIVARAAGVMRLPARFMLVRRSAPGSRAAAPPGPCASCPTGPYSVVEYARVRQRWSDPAKQHFSRLRQPSGTFTRWCEISAVTRRFCL

SEQ ID NO: 532 - protein, 456 aa, synthetic construct; identical to SEQ ID NO: 531
  REGION 1..456: note = TnsF-Tn7 System Protein

SEQ ID NO: 533 - protein, 360 aa, synthetic construct
  REGION 1..360: note = TnsF-Tn7 System Protein
MLARNVIHLDPAPAVFDAMKEGWARQQSARFLKSSTIVPRLRLIERLEEFTGQYPWQWTPAEGEAFIADLRSGKNPIQLSTARTYEVTIELFLEYLLDSRYGWIDACLERFGEVPQQVFHEGNSVLHTVEYEGDPRRRPLTYDEVQALFDAADARPGKVKAQGRKGALTALRDAAAIKTIYAYGTRRTESSKVDLVDLRRNRKAPKFRGYGSMMVRFGKSSKGAPPKRRSVLMVPEMDWAVDVLDEWVTEIRPHFSPGRHPALWVTERVGRLSPRSINEAFVTAREDAGLDEDLDLHCLRHSYITHLTEFGYPARFVQEQVGHSHASTTAIYMGVSNEYRNTLLAASMKNRLGDDWDVVS

SEQ ID NO: 534 - protein, 108 aa, synthetic construct
  REGION 1..108: note = TnsF-Tn7 System Protein
MIKKMGYQWLLRQLMAERQMFQTSDLVPLLAERGITLSREQVYRLVTQPPQRMSMDTLVALCDILQCTPNDLIKPEVVNVQLRKTADGDAEPLPLKPRRSVIRRPGQP

SEQ ID NO: 535 - protein, 846 aa, synthetic construct
  REGION 1..846: note = TnsF-Tn7 System Protein
MTNPDSRQPRFLTDPHEVVAEIVAAADPGLDPAVIEEVVRGITVHKPRMRKLAHALHDDPGLLVSGRPEGPKLVAVLIGALLAVGSTRVTRPRCAHCGKQNSLNSLATGTKERICGYCAILQREAVCGSCGRKAAVAYRDRCGRPLCQVCPPGDGDGDPVDSITAQLDRLDTGLDGDRLAELITATVPMPAQRQHLAWALEENPAPLTGEGARGTPRLLALLDCLVEQGARGVTIPSCLSCGKRRRLKFQLDGLRCCRNCYERARTEPCGHCGVAKRIATRGLDGQAVCHTCVRRDPLNFQRCSRCGRQATPVVNNSRETLCASCYRPPTATCSGCGQGKPCYRASTDAPLCENCMSKLRPPETCTRCGRARLVSVRTADGGALCHACGRRKEECSRCGRVMHVNGRTSEGEALCGTCYGRHPVSLRNCIRCGGFERLHHHGLCSNCAARQQLHDLLSDDEGVLYPAHEPVFTALTTSPASRILLWLSHAAPRRILAAIGREPQPVTHALLDGLTPPKSANRLRAALVAQGVLADRDERLAALERWLGPFLDDQLPDAAERQIVRRFVTWTHMRRLRRGFPERRTTFSQAVVVKREVRLACHLIAWLHARGTSLADCDQADIDQWLADGSTYRHGTRTFVSWAVRRGHAGAIEVPARSQANLRTSFIDSDERWSKAKELLHDTTLDPVDRVAGLLLLLFAQPLTRTATITLDLVTQRVSDRAVLLHLGNKPLELPPPLDQLVLDLVERRHGHAVIGRTLDMTWLFPGGAPGQHLSARQIMRRLKTLGIRARHARNTALMDLAAQLPASVLADLLNLDTRTATLWNQAAGNTRSDYAAELARRNQRR

SEQ ID NO: 536 - protein, 846 aa, synthetic construct; identical to SEQ ID NO: 535
  REGION 1..846: note = TnsF-Tn7 System Protein

SEQ ID NO: 537 - protein, 949 aa, synthetic construct
  REGION 1..949: note = TnsF-Tn7 System Protein
MDFRIDFRVLGPTTAVTGVPGPINVTGLQLRTVLALLIASPGEVVSTDKIIEALWPVADDSPLAGDSPLAGDSPPSVGRRRPRNALNRVHQLIRDLRDLLGVDDLIVTREPGYLLAVKRSVTDHGRLHAAVAQARSETDLPRRVEILRDALTEWRGDPFADIKTDALEAARQSFVDLRFAAFDLCIDAELKLGRHREVIGEIREWVTRHPFIERLHYHLILAIYGSDDPVEAQHAYLRFRDLLVEELGEEPGEKLQTLMEQIRNRDPALPVAAATSGPLSPSGPCEQLPLVPRGFSGRADELAALSAAAEEGTGALWAITGLGGMGKTSIATHWAHQNEHLFPDGKFYVNLHGDTSGSEPLTTGAALRGFLDALGVDSRRIPAELHAQAALWRSLVSGKQILVVLDNAADADQVDALLPGSSSCTVLITSRDPLTRLITAYGARPLRIGALKEPEARALLTARAGHTRLAAEPTAATALLDGCAGYPLALSIVAGRLQTDTTATLTELATDLPHELLTTQDTRESHRSLPAMLSWSYNALHDTEARAFRLLGEAPGRDISSTAAASLLGVAGSQARALLRGLVDHSLLERTAAGRFHMHDLVRAFAAERAAKDELASDREAALRRVIAHYLHTAHAADRLLHPPRSPIPLPPPPHGCTPDAPPDRASAVTWFDTEHQCLLAAQRRAADIGCDDAGWQLAWAMHTFHHRRGHRRDHLSSWQIGVHCAAQADATVRSLVLRLHAGACARAGKHQDAQDSLHDALTLAEQAGDVAGQTQTHHFLGWYWLHRGDNPRALAHATSALALLENLDEPPCLADVLNLTGTSAAHTGDLDTGHRRCTEALLLARRHADRDGEAAALDSLGFIAAAAGNHPQAADHYHQAAHLLSALGNTYAQASTLERLGHARRACGRDARSAWRLALRLYRSQLRDDDAHRIENLLGTAQHSENAP

SEQ ID NO: 538 - protein, 949 aa, synthetic construct; identical to SEQ ID NO: 537
  REGION 1..949: note = TnsF-Tn7 System Protein

SEQ ID NO: 539 - protein, 561 aa, synthetic construct
  REGION 1..561: note = TnsF-Tn7 System Protein
MSDGPDVPEDGVTVDNGVNGDVSGSVVQAGVVHGGVHFHQQGHRPVVTFPYRAGVAPLRAAAFQNREGTTRLLAQALERGDAAVLTGQSAVHTGVVSGLGGVGKTQVALDYAQRLWAAGEVELWVWVTAGSREAIVSSYARLAADLTGVEGSDPEDGARRVLKWLSAASVRWLIVLDDVQNPADLRGLWPPAATGGRVVVTTRRRDAALRGHGRCLVEVDVFTEQEAEAYLRSALADQPHLTFGAAELAAGLGCLPLALAQAAAFMLDRGLSCTEYHARWTNRRRSLASLLPEPDGLPDEHRATVATTWSLSVEQANRLEPVGVAGVLLEVASVLDPNGIPAYLFTSPAITGLLTMGTGKEVDAERARDGLRCLHRLNLITLNQDTTSAAVRVHALVQRATRDTLTEHQFATVTSAAADALLHSWPENERDTTLAQVLRAKTDTLADVAGEHLWKPDGHAVLFRAGNSLGDGGLVTEARDHFLLLHTTATQRLGPDHPDTLIIRGDLAYWRGEAGDPAGAAAAFAELLTDQLRVLGSDHPDTLTTRGDLAYWKRMVSRVSE

SEQ ID NO: 540 - protein, 561 aa, synthetic construct; identical to SEQ ID NO: 539
  REGION 1..561: note = TnsF-Tn7 System Protein

SEQ ID NO: 541 - protein, 109 aa, synthetic construct
  REGION 1..109: note = TnsF-Tn7 System Protein
MTAKLDYEWHLREIMATRGMFSTTDLRPLLAERGIDLSASQIYRLVVDKPERLSLKTLVALLDILGCRMEELVTPVAARTSKPRKTAVGESTAGVGDFRPKRARITPTS

SEQ ID NO: 542 - protein, 865 aa, synthetic construct
  REGION 1..865: note = TnsF-Tn7 System Protein
MTGRRPSDIEPVHYREPVGYIIEQIAQVESALDPVVIAQCVESVADNRRKLRELAQSLFEFPGLLISGEPNGSRLVEYLVIELKGHGARRVALPHCARCGRVRPLLGLNKAKKRICASCQSAELARSATCSVCGKHGKVMGRDRDGQPLCKRCVKVSYAADYRTAVVAHLTALKIGIAADAVNRVLDSVLPQPYQQREVSWILDKNPSLLSTNAASSGSHRLVLLAEALIRAGADDIAEPSCPLCGAKKPIRNHIEGTRCCRQCYERSQKQPCSRCGRIANVVVRNHKDEPICASCYRLDPLNHEPCTECGRPDLIRHREPSTGQRYCGRCWRGQLATCVTCGRTKPCPSTRQGFRCADCVRRANAEPCAECGRVLAVWSRTQSGAAVCSRCTRMKAKTSCSQCRNVRIVIARVDGEPFCKFCYRKHPASFRECESCGRTERLHHFGKCASCVADLLLHDLLGDDRGVIPAGRQRLYEALSESTPRRLIAWITESPAVPPFRQLLSSATEITHESLDALLPNRAIDVLRCALVTAGMLPVRDERLATLERWLLDFLPTIGDLEERRLLERYSRWTHLRRLRRKSAVAATSMPQIGFVRGDLSRARTFLNWLHTRDTRLVDATAADIDKYLTIRPEHRSIATFINWARRHGYPALPHVAPPLRSTPRDLIAEDERWRTVQRLLHDTDLHASNRLAGLLVLLYAQRPSRIVQLSTDDISVAETVTLKLGREPLHLPPQIGDLIVQLTTRRENWVQIAVDKEHPWLFPGALPGTHLSAAHLSERLNRLGIRTRLGRNSALINLAVELPSSVLAGLLGIDIATATTWRAVAGARRAMYASEITQRVPKSQKGPDIPSGSGTVHGPRAAF

SEQ ID NO: 543 - protein, 865 aa, synthetic construct; identical to SEQ ID NO: 542
  REGION 1..865: note = TnsF-Tn7 System Protein

SEQ ID NO: 544 - protein, 274 aa, synthetic construct
  REGION 1..274: note = TnsF-Tn7 System Protein
MLAQRLPGLLPPLSHEEALEVTAVHSVAGLLTAQRPLITEPPFVAPHHTSSVAALVGGGSGTAKPGAVSMAHRGVLFLDECAELSTPALEALRTPLEDGEIRLARRDGVVTYPARFQLVLAANPCPCAPANPRDCTCPAQLRRRYLGKLSGPLLDRVDLRVKMHQVSQTALNDAAEGTAVVRERVLLARERASRRWADYGFRVNADAPGPLLRKEFRPSRAVMEPLRNAMERGLISVRALDRCLRVAWTLADLGGRDLPAAEDVKLALTFRDKR

SEQ ID NO: 545 - protein, 274 aa, synthetic construct; identical to SEQ ID NO: 544
  REGION 1..274: note = TnsF-Tn7 System Protein

SEQ ID NO: 546 - protein, 343 aa, synthetic construct
  REGION 1..343: note = TnsF-Tn7 System Protein
MLVGWEHQQLGGRNLRLKTVRQRVNVIRRFFEFTNEYPWNWTAAHVDEWMMSITSERGGAKTTIRNYQGTLRAFCDYITSPHYEWPAVCDRMFGNQPAQICHEWNTVAHLLDYEGNPGRRPATREELQLLFDYADAQVERALTSGRKGAMRAYRDATIFKTLYGWGLRCGELSKLDITDLHTNSHSPEFGRYGVIQVRWGKASNGSPPKRRAVLSVMPWAVDALADYVENIRPLLGYPNQSALWVTERGFRVQPREIDERFASYRDDLGLAKELSPHCLRHSYITHLIEDGADEKFVQDQVGHRFASTTGIYTAVSGDFMNKMMRKVVDRALHSNGDSDERNR

SEQ ID NO: 547 - protein, 717 aa, synthetic construct
  REGION 1..717: note = TnsF-Tn7 System Protein
MLEHLRAHPDALVSGDSSGPPGLLKLLDVLAAEHQAVQRARCAQCGTVRRLPYRIDGAATCGRCYARSHLKPCVRCGETGRPAFRENGGVVCAGCKTRDPRARCECARCGKLARVAYRIEGRPLCQNCGPRKLYTCSACGRHNQRAHEITEDGPLCPRCYHRARERQCCRCGRTTWNVRIADRQESTWICYRCWIPPTTRCTSCGQNKPCVRGATLGRPVCSTCHSRQRPERTCARCGRTKKMRTTLPLGPVCGLCYNTLRRSPAPCTNCGCVRPLVGRGERGGVCGPCSGDERNWTCRRCGRVDLLVAQEHCLPCIVSERVDALLSGPDGTLHPQLSAVRALLLQDCAPEQVLHWLYATVWAELLGRLATQGGEITHARLDRLPPGYAVRYLRQVLVNTGVLEPRTEHLDSVEPWVEHLLAGQPPHIAAIVRPYASWSVLRRARSLATRSRVTRSVRKYARSRIGMAVQFLTWLETRGLTLSAATQSDVDLWLAIGTTTHYRLRDFLRWAHARGLADGLTVPWLGRAEQPEHVLPDDDRWRLLRRCLNDDSIALHLRVAGALVLLYAQVPSRIVELTRQDLSTTGSGTYLAVGRQPVLLPPRLAMLVQRLANHAAPGRRPLIHRGTRPWLFPSAQPGTHLDADRLATLLNDRVGIFIRPARGGALCELAGDLPAPVLAELLGLSVGTATRWTTLAGRDWSDYLTARAEDLSIGTPG

SEQ ID NO: 548 - protein, 717 aa, synthetic construct; identical to SEQ ID NO: 547
  REGION 1..717: note = TnsF-Tn7 System Protein

SEQ ID NO: 549 - protein, 1066 aa, synthetic construct
  REGION 1..1066: note = TnsF-Tn7 System Protein
MRDIHRGEAERLVGRAVEEEVRRSGGRIDGQLLLSRARGALDGMAEKAAEEYEAYTRALDESEAGRLTFAQRYAREGAGTPLLVAAVAAVAATVADLALGTGTDTAVGAGVTVAVVAAAATVVKVAGAHLPAAHHRAGAAGQPGGPEQLRLQWLTALDVRGIRPFLDQQRVLSASTAPKKAAPSLRGQDKSAAARRRTVLEQSFGQLPDADGVFAGRRQELARIRQWAQAARATTETRPTVVVLHGAPGSGRTTLAVRAAHDLRDHFRGAVVVDLRGGSRDEPPLPTRDALLHLLNRLGAPREQLLFRERSSPEQQLKRLGELYHQQLTGLPVTIVLDDASDPEQVRALVPEHSDSLVLVTAAAPLELPADLPAWVHHLPVEALDAAGAEELLGAAAQDASGPYDAESADRVRELCGGLPLALRVAGSSLGPRSPRQLAADLGAYGPVEPVERALWLRYTDQPEAGRRLLRRLALAGRASLGAAAAAALLATDEAEATRHLVALAGAGLIDHVRGSRYRLHDLVRAFAHARLLDEEEPAERTAAQERLIVNYADLADSVLRLVDGNMSTRSHRFGGHGFTSLDEALRWLDDESSFITAALRHGEGVNRAAVLNLLGALCDYCLLRGDLYRLGEINELAQAVDEGLLVRSVQWRTGIAARQLGELDKARTTLASVVDLYREAQHDAGAARALCSLGITLHHQGNLTEAAARLQEALDLQAAPELATDRAWTMHALAAVQRDRARLAEALDLLTRSLVLHREGGSVHGEAWAHYQLGQLALRMGDVPRADTELRAALDRYGRTHDARGEAWALTQVARARLVDGDASAAVEALRQAAVRHRDNEDARGEAWTLYYLGQALEETGDLDRSVRELERSRTMFSRMRDGYGLACARHHSARVTRDQRAAQTGSLRNSGFARQLLADARADFQRIGVAHGEAWSLLELAVVDAGNARTQQALALCDEAVALFASYGDRRGEDWARYLRCTLLPYAAPGGVEVGTAVAQEELAQLGRAAHPLRDEKLGECVVAYGLLLERGVSLEAGWQAWRLRMTPDRHAREVMGVAVPAGH

SEQ ID NO: 550 - protein, 1066 aa, synthetic construct; identical to SEQ ID NO: 549
  REGION 1..1066: note = TnsF-Tn7 System Protein

SEQ ID NO: 551 - protein, 373 aa, synthetic construct
  REGION 1..373: note = TnsF-Tn7 System Protein
MRATDLPGAAHLVLASGVIHLAPETAVFDAMLDGWQLQQRTRFLKADTIRGRVELMRRLAAYTNAYPWQWEAADVEAFIDHLRQRPRPIVVSTARIYQHSVRMFMEYITDPRYCWPRVCQEQFSTAPVQILHEWNTVVHVTEYEGEPRRRPLTYDEIQALFDAADGRVEEIRARHRKGALAAMRDAAMLKTVYAFGLRRREAWGLDLGDLRHNPKSPVFGRCGALFVRWGKSSRGSAPKRRTVLTIPEMDWIVPVLEQWLDEVRPAFGAGRHPAMWVTERAGRMSLRRINEAFTEARQAAGLPAELDLHCLRHSHITHCVEFDYPEKFVSSQAGHTYAATTAIYTGVSDEYRNRLLQRSLARHPELWDEEPAS

SEQ ID NO: 552 - protein, 108 aa, synthetic construct
  REGION 1..108: note = TnsF-Tn7 System Protein
MTKKMGYRWNLRQIMASREMFATTDLVPLLAERGIHLSREQVFRLVTQPPQRLSMDTLAALCDILDVGVADLIEITVVNEQVRKAAGETGKVPPPTVRRSTIRRPEGL

SEQ ID NO: 553 - protein, 731 aa, synthetic construct
  REGION 1..731: note = TnsF-Tn7 System Protein
MSLNTRTRRLCKACYDATRPKETCHRCGQWCAPYKRTPAGPLCARCHRATRPTEPCTDCGKTRTVTARPHGHPVCGSCWRRRTAERCTGCGRIRPVRTRTPDGPTCATCFTRAQPPGTCSGCGRHGPIKLKKRSLCNTCAIKERPPEPCRDCGHTRPVATRDERGPQCHSCWRTQHRAHCTRCGQARPVLGKLDGQPYCPYCWEIVKPSTNLCVDCGRRPALLASRDDGRRRCRPCHCNRKIPCARCGTPAKAERTWPEGPVCLTCVDTVRFTHVTCTTCRQHRPVFRRDHHGNPTCPECAGVRFTYTCTACGGMGRIHSRGLCPSCRARERLDELFATGTTSQAAELALLREHLAGYPSPYSLIAYLNGAGGQLLHRLISGDLACTHDALDRLHQTGSVAHLRDLLSAAGVLPSRDEHLVRVQHRTQALLDEVDERANRLLLARYLRWVLLPAAHQQAERDGRLAPQRAGYLLEQLRTAQAFTNHLRGVGSALAHCTQPQIDAWLAAQRWRTSYLRQFLTWAALQEEAPRHVAVTALTTGEDRSIMNDADRLLLAHRLEHDDTIALVDRVAGCLVLQYGQQVSRIARLTIDDVREHPAEPGVLGLVLGSDPLWLRPKLSHLLARLITDRRSDRVLIRSVPNPYLFPGAHPGRPLGSDTLARRLKTLGINKVRHARNGALLALVGSVHWKLLADLLGISDSAAQRWHVAAGGDRASYVASRLKQDATTGPE

SEQ ID NO: 554 - protein, 731 aa, synthetic construct; identical to SEQ ID NO: 553
  REGION 1..731: note = TnsF-Tn7 System Protein

SEQ ID NO: 555 - protein, 360 aa, synthetic construct
  REGION 1..360: note = TnsF-Tn7 System Protein
MPASTIVASGGRFRLYDDSVQTFDRLPVATYAIDFSKMTGYSLRQVTPLAPGEDTVYGSHVQRVDRIIGSYEAMDRSLGVILSGDKGMGKSLMLRMLAERAREQLELPTILVQHSTPGLASFLDDLGEVVVVFDEFEKVFASHGEDETQTQFLSLFDGLSVTKRLYVLSVNDLVRVNEFMLNRPGRFHYHMRFAYPEPETVATYLHDQVPGIAAAQVDEVVEFSRKYDLNFDHLRAIAFELRRGEPFAEVIGDLNIKRIERSGSVVEARITWPNGEADVLTGSIDLFDRDGAQSINDYDSEVSLRFRMRDAVSTNEGYHLPAGAFELIDMRSEHRKAQDGELPAALSVVLSRSRKRPIDF

SEQ ID NO: 556 - protein, 360 aa, synthetic construct; identical to SEQ ID NO: 555
  REGION 1..360: note = TnsF-Tn7 System Protein

SEQ ID NO: 557 - protein, 493 aa, synthetic construct
  REGION 1..493: note = TnsF-Tn7 System Protein
MSTVHTVSLRGLTGQVSTLTATAGDGPPEILLTGGNGRGQRELRDRVHAALANSGRPNRNRRIEVHLGSPEAAPQAAAVAVAALCAILGVPARRLAGTAVLGEVGLDGSLRPTRGVLPAVQAVRAHGLHRVIVPADALGQAVLVDGVEVLGAHTLSEVADWLRGTDTALHRPGVPAGFVAETPQPPGRALTAPALRAVEVAAAGGHHLLLDAAEGAGALLVAQWLHQLLPDLTPDQQLQLAAIRSLTGPREDGAILTATAPMVTAHHSDSLAALVGGSVPGAVSRAHHGVLVACDLDRFTPLALETLRRALLDRQVRLAHGGHELRYPALGQLFATCIRTPGPRARLAPVLLDVLDIRLRLASSRAVMLPPEDDRDRIGRVRAHSRARVLRARARAATRWSQAASGSDTVFTNATVPEEVLHSRPLPAAVDAPIHHALRIGALSHRGADAVLRMAWTAADLDGLTPPARRHVEQALALRQATPTRSATVPEVR

SEQ ID NO: 558 - protein, 493 aa, synthetic construct; identical to SEQ ID NO: 557
  REGION 1..493: note = TnsF-Tn7 System Protein

SEQ ID NO: 559 - protein, 411 aa, synthetic construct
  REGION 1..411: note = TnsF-Tn7 System Protein
MEKQPHSRSMQSEQGVPGAATLYVVPGVTMLRPTEAVFEKMIEGFVEHQQARALKPNTIAGRVRTVRQLHAFADAFPWEWNASIFDRWSATVAAAVAHSTLGQKQLQLRAFLSYVTNTAYEWPTVCRELFGTFPTMALGELNTVRHSQGYVGQPSRNRPLTRPEVRAFFGQMDPEIGRLRAAGHKGALTAARDLALFTTMYAWGLRRRETAWLEIHDWRRQAKLSEFGDFAGLAVRWGKALPGQPPRRRMVISVWPWAVTTVRYYVENIRPLFYVDRQDDGVMFPTERDGEISIRSVNDRFAHWRALASLPDHLCPHCLRHTYVTRLIEAGYDASFVTEQVGHSHAATTAIYTALSSDYKNTKVREFLDAAEEEALRTAFARAEIEADIDDEFDATDTQPATTAKERRTTR

SEQ ID NO: 560 - protein, 485 aa, synthetic construct
  REGION 1..485: note = TnsF-Tn7 System Protein
MNQNRYQECSRCGAPGTTVMLPTGPICYRCRRHFAYHPHICPECFELRPVAYPSVSSPNVLVCATCAGETSVFACAECGREDHPYGAERCARCILAERLTALLTDPTTGRLHPELQSLYDELLTTPRPQSVITWLKKPPATGARLLALMAKGELPINHDTFRRLPADRSHNYLRELLTSTGVLPPYYPPIEQIERWLIDLLDPLDPDSTAMISRYAHWHHLRRLRSLAERGKLNKSVIYAARANINGAVRLALWASMHETTLDMLTQTQLEHYLAEYPGGRNSQQTFIAWLRRTRTNTRINIPWRGQTTPEVVVSDADRWNQISQLLHDAATPLYVRIGGLFTLLFAQPLETIIAMRADQITLEHNGRVLVTFDTIPIEMPPGLDSLLRCYLAKRGTPSIVSREHGWLFPGRHPGRHLVRETFRGHLVAVGIKPGYSRHAAMYSLAGEVPAPVLAELIGVANKTAVKWAALAGRDWSEYVTQRDT

SEQ ID NO: 561 - protein, 485 aa, synthetic construct; identical to SEQ ID NO: 560
  REGION 1..485: note = TnsF-Tn7 System Protein

SEQ ID NO: 562 - protein, 1185 aa, synthetic construct
  REGION 1..1185: note = TnsF-Tn7 System Protein
MTVSMRVMSAGDGYKYLLRTVAAGDGERDLSTPLTRYYNADGTPPGRWMGSGFPALGSGQLHEGDEVTEAQLQLLIGMGRDPLTGDPLGRAYPAYKSVAERVEERASAIDPELGPTARGRAVAAIEAEESERGTRRAVAGYDFTFSIPKSASVLWAVADAGTQSLIVNAHHAAVAEVVAFMEREVAATRAGATPGDGAVAQVEVRGLIATAYDHYDSRAGDPHLHTHVVISNKVQTVLDSKWRSLDGRPLHAATVALSEFHETVFADHLTRLFGVEWETRDRGRDRNAAWAIAKVPEQLVSEFSSRSRHINEEKDRLIAAYVEKHGRRPSSTTIIKLRAQATLATRPEKEIHSLAELTDQWRQRVGKVLGVYATSWARDVTANEAPLLLRADDLPLDVVRGLGESVVATVGEKRSTWRRWNLTAEAARQTMRYRFASTRDREAIIGMVVDAAEAVSIQLTPPEFASSPAAFRRSDESSVFRPKNSTVFSSGQLLDAEERLLQLAHTTTAPTVSLATVERVTREPDRDGLVLGEDQASALTEIAVSGRVVDLLVGPAGAGKTTAMNALRRAWEKEHGQGSVVGLAPSSSAAQVLAEDLGIDTENTAKWWQNHLQEGESFQPGQLVIVDEASLAGTLSLDRITQLADEAGAKVLLVGDYAQLQAVDAGGAFGMLTHDRDDVPELVDVHRFAHDWEKRASLDLRHGHAEVIDIYDEHQRVVDGETEGMVDAAYAAWRSDLVAGRATVLVSDSNESVTALNNRARTDLIIDGTVRGSRESELHDGTHVASGDIVITRRNNRRLLAGRGWVRNGDRWNVVDVRRDGSMLVRRAGSSWGTNVLLPADYVAEHVELGYAVTSFRAQGLTTDTAHVLVDSTMTRETLYVAMTRGRDANVAYVAVDKPDASHDGPHPGENDDVTGRSVLVGVLQHVGAELSAHETIAVEQESWGTIAQLAAEYETIAAAAQGDRWAALVQTSGLSAEQAEEVVASDAFGPLTAELRRAEANHHDLAVLLPRLVRARDFDDADDIAAVMRHRLNAATARPAGAGRARRVPRLIVGLVPETMGEIADDMRQALDERRDLITQRADAVLDKAIADGEQWIASLSEAPTAESRRERWLSAARTIAAYRDRYSVTTPSPLGLRPESAAQRIDHARAEAALKEIRGLDSAGRRLQPPREPSQRGVRIRSI

SEQ ID NO: 563 - protein, 1185 aa, synthetic construct; identical to SEQ ID NO: 562
  REGION 1..1185: note = TnsF-Tn7 System Protein

SEQ ID NO: 564 - protein, 1172 aa, synthetic construct
  REGION 1..1172: note = TnsF-Tn7 System Protein
MQKEIVKQILYVMDPARTPASRFPRTSKFHWPRSLSWAFLAGLTGVAVQWLITLILAFAQQDTNLAWRPELYVPTLVGVVLVTFLLLRITNGRLAISDFTAGPAKLTLTDASGSYFDDYLDEIVYFFQVSKKRILVLEDMDRFDNVEVFEDLRALNVLLNHSAQLQPQRIHGNFGVWNRLKSRSPWAKTEELDLDTLESLKEIPPGFHVGPIVFVYAIRDSLLAETVTTTNDVRHDAFTRTKFFDLIVPVVPFVTEQNARGALKKELDLLVGEGPATPQDVHARPSNDLVRSIAQYFPDQRQIRNIRNEFSMYRDRLLRPGQHPVELNPDRLLALILYKNLEVADFERIRVGKSKLHDLLRFSQALVHENLDRINIRLGHPSEESQQARARDLAEHIVKRGDSLGIQFQRVRRNHPYADDYLTLRHDELASIELWRQVVAGQNLAFNNGKQLSRDAIERGFDVSLSFAEATALPLPAEERARLERERRDLESATWEGLWSAPNFVLDPQSPVWSDGKSRPAGALSFAQIVGETIGEGLASDLIAAGHLTQNFALLSAQFDSQFLGIEAQNFITSITEHPGRRPLAPVSPDAIREVIEERSPAILERSGMVNIHVLAYLLDELPNEAHRIVAQLRSWTGEDQNLTRAFLSRYGSKAPLSSLANAMSLLTGLVPAAVGLVANDSAVPEARRTVLFDAAIRGLSPDSAPTSVSENEAVRRYAQQAHSALESLTLDGSLARVVSRHLIHFGVIVENLQPLSPDARGVFVAAGKFEMTLSNLNAILGNEEPRWVSLERLQDDEDALGATLPRIDEYLTLLERQDPSEDVVTSETSEGLTRILENLAKLDEGDESAGSTLRAVAHHSSPSLRVMDIEPNAGSVQEALLLENRVEITTGNLMARFADQGRITEGIATALHENSCPERNVDADLAPFLAAVLIATRHFPALLSADILRELLEHLGGDYVLSESSLLAAEPAVAVQLINDGWGEAGGFRAVADSNLDWSVREALLAMEPAPDASHVGNLVEPEDVVAFLESEAIETEVRTYVHLHLDTLLIGPHAMRNANAIASFLRNLGVGIGVAEIHALARLGAERGRLLALLTLPGARDEFVADPVTTLDILGGDYAAIVNREGTKSPKFKPTQENRDFLAFLQSRGLVRIGRPKPDGTLQIGRTLRR

SEQ ID NO: 565 - protein, 1172 aa, synthetic construct; identical to SEQ ID NO: 564
  REGION 1..1172: note = TnsF-Tn7 System Protein

SEQ ID NO: 566 - protein, 352 aa, synthetic construct
  REGION 1..352: note = TnsF-Tn7 System Protein
MIHLNEQAAVFDAMLVGWERQQKSRLLADATIEPRMALLRRFTEFAGSFPWQWGPGDVEDFTLSLMSGSSRLAPSTIRGYHLTLRMFCDYLLDGRYGWVAECEQRFDEIPSQVCHDFNTVAHLNDYEGRPGRRPFSYDELQHLFDFLDTRVEQTAHSGRKGAWAALRDAQMVKTCYAYGLRRRELCNLDIPDLRPNPHMRQWGAYGAVHVRYGKAVRGGTPRRRTVLTVPEFDWVVDGMRQWVEQARPLLARVGDNVLWLTERRQRISVDTMDRRFLWLREQAGLDADLSLHCLRHSYVTHLIEFGYPERFVTEQVGHSYASTTAIYTSVSNDFKTKTLKAALARVYEPREE

SEQ ID NO: 567 - protein, 105 aa, synthetic construct
  REGION 1..105: note = TnsF-Tn7 System Protein
MLWHLRQLMAAKGMFQTTDLVEPLRERGIEISRQMIHRTVTKPPQRINTDLLAALCDILDCTPSDLLELHVEEHRQASVVNDHGAGIGDIRPIRARVRRPDGIGE

SEQ ID NO: 568 - protein, 483 aa, synthetic construct
  REGION 1..483: note = TnsF-Tn7 System Protein
MTPGRPPRECARCSRTDVRFATTWPEGSICRRCYQRATRIHGTCGTCGQHRLLPGLLDETPVCVDCAGIPKDFHCTRCGREDEPVRVGLCAHCCLTDDLTPLLADPTGAISPTVLPLFTALTQQTHARSARTWLTVNPDATRLLRDLAHGIVPMEHATFTDHHEPAKVAFLRELCIEHQLLPPVHLDVERFATWLDDKLPAAHPADARLIKQYARWVHLNRLQRLADAGVLKKGGFLAAKQSTTVSLEFLHHVRAAGLSPATCTQACVDDWLATGPTTRSLARAFVRWAIAHRHIPSLTFPYRVAKTEPVITQQQRLEHIARLIEPGDNLATDERAAALLLLLYAQPLTRIVSMQLDQVRDERDTITVSFTDDALTIPDPFAQIIRNHLAALPNRNTAAHRDTPWLFPGRRPGQDIHQTTLMNKLRDAGIDLRGARNAAMRALVVELPAPVVADSLNYSYNVTDKHRRNAGATFLDYTSRRTR

SEQ ID NO: 569 - protein, 341 aa, synthetic construct
  REGION 1..341: note = TnsF-Tn7 System Protein
MLDGWAAQQIARNLSASTVDKRRTIVTRFRLFAESYPWSWSTPMVDEFFLELRALRGASHSTVLGYQNALRLFLEYLTDPAYGWVQHCWDRFGDHPTQLLHEWNTARHSQDAMAGPGKRPYTRDEIQDLFDCADDRVMRIRRAGAKGWVAAFRIATIMKTAYAWGLRRNEVRQLDLVDLAANPRARHFGDAGILYVRYGKAMRGSPPKRRTVLTLPEFDWIVECLREWREQVRPLVAPPKSTALWPSERSGMLAADSLSRAFNEVKREAGLDDDLDFHSLRRSYVTHLVEDGYDAFFIQQQVGHEHASTTSIYTGLSPDYRARVVDDAIARMAAQAITKEH

SEQ ID NO: 570 - protein, 111 aa, synthetic construct
  REGION 1..111: note = TnsF-Tn7 System Protein
MQRRIEHGWRLRELMAARGMNTISDLIPHLSDRGIHLSDSQIYRLVGGTPERMNLNLLGAILDTLDCSFEELCPITVQAAPDRATGTADAADAAPAQGAFRPARARIRKPQ

SEQ ID NO: 571 - protein, 492 aa, synthetic construct
  REGION 1..492: note = TnsF-Tn7 System Protein
MTVTTRPPRECARCTRTGVRFAVTWPEGSVCRCCYQRATRTHGTCTGCGEQRLLPGLVDGRPSCTVCAGIPKDFHCTRCGREDEPVRVGLCAHCCLSDDLTALLTDTTGQVSPTLLPLFTALTQQTHARSARTWLTVNPHATKLLQDLARGTVPLQHATFTEHAHPSKVAFLRELCIEHGLLEPVSLDIERFQTWLDGKLRTADPADARLIRQYARWVHLNRMQHLAGTGALKKGTFLAAKQSTTVALEFVQHIRASGLTPATCTQACVDDWLATGPTTRSLARGFVRWASAHRHLPPVVFPYRVARTEPVITQQQRLGHIARLLVPNDQLATDERVAALLLLLYAQPLARIAGMRRHQIRDEHGLLTVTFTGDALTIPAPFAAIVRDHLAAPPNQNTAAHRDSPRLFPGRRPGQHLHQNTIMNKLRDAGIDLRGARNAALRALVIDLPAPVVADSLNYSYTITDKHRRNAGATFLDYATLRTTHTIGIPTA

SEQ ID NO: 572 - protein, 492 aa, synthetic construct; identical to SEQ ID NO: 571
  REGION 1..492: note = TnsF-Tn7 System Protein

SEQ ID NO: 573 - protein, 204 aa, synthetic construct
  REGION 1..204: note = TnsF-Tn7 System Protein
MVFEYLPGVAVLDGWSAAFERGMMTALTGPSGRGKSTLLYLLGLMLKPTRGGIYVDGVATSSLPDAERARLRAHDFGFVFQDAALDATRTVLDNVTETALYRRQPVAAARSRARELLQRLSVDVPAYRRPGQVSGGQAQRIALCRALLSEPSILLADEPTGNLDPATSDVVVETLRQHASQGAAVIVVTHSPQVAAACDVEIRL

SEQ ID NO: 574 - protein, 204 aa, synthetic construct; identical to SEQ ID NO: 573
  REGION 1..204: note = TnsF-Tn7 System Protein

SEQ ID NO: 575 - protein, 373 aa, synthetic construct
  REGION 1..373: note = TnsF-Tn7 System Protein
MRIPSLVAPGAVPAHLRASIAVLNAEESVWVAMLDGWTAQQIARNLAASTVEKRRSIVTRFRAFADCYPWSWSTPVVDEFFLELRALHGASHSTVLGYQNALRMFLEYLTDPAYGWVQQCWDRFGDHPTQLLHEWNSARHSQAAMAEPGKRPYTRDEIQDLFDCADDRVMRIRRAGAKGWVAAFRIATIMKTAYAWGLRRNEVRQLDLVDLAANPRARQFGDVGIVYVRHGKAMRGAPPKRRTVLTLPEFDWIVECLSEWREQVRPLVAPPRSTALWPSERSNVIAADSLSRAFNEVKREAGLDDDLDFHSLRRSYVTHLIEDGYDAFFVQQQVGHEHASTTSIYTGLSPDYRARVVDDAIARMAAQAIAKEN

SEQ ID NO: 576 - protein, 860 aa, synthetic construct
  REGION 1..860: note = TnsF-Tn7 System Protein
MPFVHNPVQSTSYATPEDLYRDLPRRTGAVSGLWSHQADILREYTKKHRKSADVALELPTGTGKTLTGLLIAEWTRRTRTARVVYACPTKQLARQVAASAYPEGIDTALLIGSHHSWPEPAHHAYEAAEAIAVTSYSSIFNSHPALVDADLIVFDDAHAGEQYVGDAYAVTLSRWQDRSAYDAMLAAVAPALDGVFVERLRAATADPGFSDSVRLVVPLRQGDMVSQVKTALNGIDGSQRFNFAMIREGLASCLVYVSYSTILIRPYLPPTHQNPLFSGARQRLYLSATLGEAGELERAFGRPSIARLALEEGSTPPRYGRRFFVFPRAAQGSDPEGLARQIVAKAGKALVLAPQHDRAQQTAEALAQPGWPVLTINEVRDGMKPFADLPHATCGLASRYDGLDLPGKACQLIALNGLPNQNNLQERFLASRAHADAVFAERVRTRIVQGAGRCTRSPQDTAIVLILDAELSRYLGRPEITRALDPELQAELKFGRENSQDQPQQNVLGNIDLFLGQDTNDLWRTEAEPSLVSYRREMTRQSPPAASSLAAIVDLEIEAWSEAHTGNWPEAARLAHEIAELLSRAGNVTDGYRSFWTYLQATWTDQAGQDAGDATARAAAQALIREAEAIMGMGSWVREMAPLPAVPRLPLTPADSVAVQALTARLLSGVRDATINRQFGEIHAGLAQTSAGPYEAALTELGKLLGADAYKPTAHGNCDSAWCFDNNQWLALEAKSEHQPHGVVGLDDVRQANAQLGLLAGDRSVPQPAISASVIISPRDDVHDDGISIAHADVHLAHPDLLRQIAHDAASAWSTMLARQAGLNRDQLRELVGDTMAGFDVLPSRLFERLTATPIGEIPA

SEQ ID NO: 577 - protein, 860 aa, synthetic construct; identical to SEQ ID NO: 576
  REGION 1..860: note = TnsF-Tn7 System Protein

SEQ ID NO: 578 - protein, 108 aa, synthetic construct
  REGION 1..108: note = TnsF-Tn7 System Protein
MQRRIEHGWRLRELMAARGMNTISDLIPHLSDRGIHLSDSQIYRLVGGTPERMNLNLLGAILDTLDCSFEELCPITVQATPDRATGTSGTAPAAGAFRPVRARIRKPQ

SEQ ID NO: 579 - protein, 486 aa, synthetic construct
  REGION 1..486: note = TnsF-Tn7 System Protein
MTGDRGARATVCAHCGQHRPGRRHILDQPVCPNCELRFRRKPRQCPHCDEPKILAFYDKQRRPSCAACTGNEPIYACPCCNSEDKHFGAYCAECTLEDRLMTLLNDPATSEVHHQLVPVFRALMDARDPRATLYWLTRPTSRPDILADMANGALAIAHTAFDELPTTRNVSYVHDLLVATGVLTPHSIAVDAITRWLTDNVSDLPKAQADLVRQYARWRLLRRLRQLDAAGNLTAGSLDTARAALSSAVRFLTWLNARGLTLASLNQHQLDDYLTEFPTRASTLGSGFLRWTTSSRITHAVAVPVPPRPTPNVAMAHDLRWDHVQTLLHNNTIRGYTRVAGLFMLLFAQPLVRTLRMRRDQIEVHGGGEVTVTFDSIAIELPDPLNKLVIDHLDFGAPASYATSNWLFPGRNPGKPLVTENVRGELVSLGIPPNHARQAAMFQLASEMPTAVLAEVLGLNNITAIRWATLASRDWAYYAALRREPT

SEQ ID NO: 580 - protein, 486 aa, synthetic construct; identical to SEQ ID NO: 579
  REGION 1..486: note = TnsF-Tn7 System Protein

SEQ ID NO: 581 - protein, 1972 aa, synthetic construct
  REGION 1..1972: note = TnsF-Tn7 System Protein
MLHGGMVATIHRVAAGNGYQYYLRKTAANDRTARGRSSLSQYYSDHGEAPGRWHGTGLTSLGIAAGTEVTEEQMKSLFGQGLHPNAEQIKTEVFQRQIALGANDRDATRTAEKATKLGNKFAIYKVRSEYRKRCSEAYRAHNSERNLEPTAAIPDDERARIRTRLATGMFTDEYGRPPLNARELSGWVAKNSRANQAALAGLEIAFSPVKSVSVLWALAPPDMAARIEAAHQRAIGDALTWLERNGLLTRLGRNGVRHVEVEGIVAACFTHRDSRAGDPDLHTHVLIANKVRTLDGKWRTIDSRLFHEAAVTVSEIYDSRLEHHLELALNLQFETRPDRNIHQVPVREVIGVPLELIHAWSQRGTAINARLDQLTADFQTTFGREPTPEEVYGLADRATLDTRPAKHLPESHTQQSETWLAQATTLLGGREPVEAVAIRVVAVPRIPRPDPDAVFIAATAERALAAASQRRSTWRPFNLRAEIERQLRGQISPADWDWVPDKVVVAALSPRSAVARGDPDLTEEPGLRAVPAWLRHRDGSPVHVRPNSQIYTTEATLDVEAALIELSIEPGARTLDSALLTSAVADYNTAHPDRPLNAGQVGVISSFATSGLRVHTANAPAGTGKTTAMQVLTSAWHSSGGTVLGMAPTAAAAAVLGESIGTRAETVDKLLDVIDRHSRRPDSPTIVRDHPPSLPQWVLDIDDRTLVIVDEHVKLGNTKRLQLLQFLSQRGATVRCIGDDRQLPAIDAGGADADMNAASPEQTLTLSHVVRFASTGEATASIGLREGDPAALAWYLDNDRIHAGHTGSVYDDTYTAWAADNVAGRDAVMLAPTHKVVSALNARARADRLTRTGTKPDTEVALVDGLSGSVGDTVRTRRNNPKLRFGQTDWVRNGYSWTITAVHEDGSLTVSHRRGGTDSDKTVRLPVEYVRVHVHLGYAATIDSAQGITADACHVALSGLESRQQFYVAMTRGIHANHAYIATALDGAEGSIYTEPAVYPRTAVEVLQRVLARDGAQKSAHTELRDALDPALRIGRAVDIYLDTLGLAAEHALDTDRLAELDRAADTIHPDLTESPAYPVLRQHLALIALTGADPVAALRAAATARELDTADDPAAVLDWRLDPSGAHSTGSGPLSWTPGLPTGVADQALAEPVRARERIVSALAEQIRDAAAGWTPATAPAWARPLLGTDPSLLGELSVWRAGLHVPDTDTRPTGPARYTDLERLHQKRLQQRVIDAYGDPALPRNRWADVVDDLDSRISTDALWSVVADKIDLAARSGLDITVLLTDAAAQRPLPDEMPAAALWARLELEPSALDTTSTDLLRPDWLPDLEAVLGTDMTEQVTTEPAWPRVVAAVERATSTWSPRDLLVTAYELLQGAQPDDAAPLRADQLAAALAWRIDALHHHTPTEQQPTQGHEPFAREPTAPDAEREPSASSATAASATNEHDAAPVVTVISDPLEEDLVTGIEGIARLFATGRVADAVAAYRGFRTELSDDEQAVLTAVSETLYQYSFPVALARLRWAEQQFPQHRALIHACTPSTDPQTFHRDTEPERGRPHPVYDHREHVDPTITPALFDPIQAAGNDAFDTYLDDAERFDSRYMALTGERQRPAGAGYPIDYDLAAMPAIVGLPCVDCSTERPRNASSPVPPRHSDDGLCLDCRDNERPGIPDHNPADHLVARCAHIAETHPAPAALAMLRRDWRTLDQAGRAVIQQWLTDNPLTEQPLPVLEPLQRLTERDLADAIDGLAQRLGNSATEAEFFAPIRHDGFDPGPDPIVVAHQDAADTARDTARMRADELDSAIRRLRITSDALDTAREALDALPLIRRAARQTIQSRINDLSREHRERRGEHQQARDIARAANRHANELIAQAERSAADDETRRSGEQARAAAENTVARDATVEALHQGLESELAAHRTEHNRRQNLTNPQRQLEERARQQHAATADEFTVEERSAVEGTGPDYRSGMGL

SEQ ID NO: 582 - protein, 1972 aa, synthetic construct; identical to SEQ ID NO: 581
  REGION 1..1972: note = TnsF-Tn7 System Protein

SEQ ID NO: 583 - protein, 366 aa, synthetic construct
  REGION 1..366: note = TnsF-Tn7 System Protein
MAEVPGLARLILVPGIAHLDEPTAVFEAMLKGWSNQQKSRLLADSTVAPRLTFIRRFVEFTGTYPWTWLPGDVEDFTVSLTSTGNLAPSTIRGYHLILRMFCDYLTDARYEWARQCHDRFGQVPSQICHEWNTAAHLSDYEGRPARRPFTYDEVEDLFGFVDDRVDRIARSGRKGALAALRDAQMVKTVYAFGLRRNEVCHLDIADLRPNPHVREWGTYGSVHVRFGKGRGGTPRRRTVLVVPEFDWVVAGLRQWVEHARDRYDVADHPALWVTERLTRVTAVRLDIRFAELRDGAGLPPELTLHCLRHAYVTHLIEFGYPERFVQEQVGHAYASTTAIYTSVSNDFKRRVLRTALSRVYSPDGKG

SEQ ID NO: 584 - protein, 114 aa, synthetic construct
  REGION 1..114: note = TnsF-Tn7 System Protein
MSDRRVTVRWNLRQLMAAHGMFQTSELMPLLADRGITLTRTFVYRLVTNTPQRINVEVLAALCDILNCTPNDLLELVTEPVENAKTGTTGHHETQGIGDLRPIRSTIRRPKTGE

SEQ ID NO: 585 - protein, 435 aa, synthetic construct
  REGION 1..435: note = TnsF-Tn7 System Protein
MPGLDENGDPICRVCARIETDLDCVKCGLEAELIRNKRCARCVLREDLNAVLSPTDPPDLRLKRLVNVLCAVDRPASITVWMRGPAAKDLLTRIGHRELELDHSAFDALPRANSVEHLRSLLVAHGVLPDRGNVDLARFDLWVDQRLRDLAPRPRIVAALEPFARWHHARRLHDDADRIRNLNYATRAAKQEITEAGKLLAWLDETRDVAFTDAEQRHIDEYLSEGPSTRKSARNFINWNHKIGATALGSGRKREAVTTPLATDSERLQQLAHLLAETDAPLVARVVGLLMLLFGTPIGRLVQLRRDAVTETPEGMRIDLGGTQPALVPGAISEVVFEMVTSVAQSRTATVDAGWLFPGRRSGQHIHPDSVRGQLRRLGVTVLAGRNAALADLTQELHPAVLADILGYGAPTLTRHAIRSGLAFASYAAQPRTPR

SEQ ID NO: 586 - protein, 435 aa, synthetic construct; identical to SEQ ID NO: 585
  REGION 1..435: note = TnsF-Tn7 System Protein

SEQ ID NO: 587 - protein, 260 aa, synthetic construct
  REGION 1..260: note = TnsF-Tn7 System Protein
MNGGELEIQALRKSFGEKLVLDDVSLKVGAGEIVALVGPSGSGKSTLLSLLTGAQQADAGEIRYDGAQIDGRSRPFAFMPQRDVLLPWRRILDNAGIGLEVAGLSRGEARAKASELLAPFGLEGTERLYPRQLSGGMRQRVSFLRTVVQGRPVLLLDEPFGALDAITRDELQRWLLGIWAEHRWSILLITHDIREAIRVADRVLVLGAPGRIAGEIAVTRDIPRDDGFVRDLRVPGLEDRLHRLLSEAARPGSAAARIAT

SEQ ID NO: 588 - protein, 260 aa, synthetic construct; identical to SEQ ID NO: 587
  REGION 1..260: note = TnsF-Tn7 System Protein

SEQ ID NO: 589 - protein, 370 aa, synthetic construct
  REGION 1..370: note = TnsF-Tn7 System Protein
MESTGRIRLFRSSRASIDAESLCTAMLDGWAHSQLAQGFQQRTIARRARTVQRLIDWSGKYPWQWTQLEADDFFAELRGIHHLAPSTVRAFQTDIGLLLAYAADPTYPWSAHCTELLGETFVPIAPRRMVHRQEGPENPSKRPFALAELQSFFDFADDEVERILRSGKRGGLAAYRDAVAFKVMYGWGLRRRELCHLKVVDFSRNVRAPRFGAWGLLRVRYGKAMRGSPSKQRTVLTVFDWAAETVADWAQHGLPRCGDTSGWLFPTERDAVLDGQSLLRRFRRYVDALELPEGLDLHSLRRAYATHLQLEWGFDTSFAKEQLGHEHASTTAIYTIASPDYRARELDRVLGATLDRATAVHRRTQGGLPS

SEQ ID NO: 590 - protein, 112 aa, synthetic construct
  REGION 1..112: note = TnsF-Tn7 System Protein
MKIQVRYQWQLPVLMAKAGYRKTTDLIEPLADRGIVLSRTQVYRLTRDPERISLQLLAALCDIFDVGVDELITVESQRLRAVRKRRVNEESPPLLESYRPVRARIVADPDDA

SEQ ID NO: 591 - protein, 521 aa, synthetic construct
  REGION 1..521: note = TnsF-Tn7 System Protein
MSRPATGGNGSTRPPTVRIAAEPPARGRPRSVGDLTCDRCHRTDVAKIRVRWPDGAICGICFTTATHTFGTCPDCLEPDRMLPGRNKQGKPICRHCAGITTQLVCARCGREAERFRAGNCARCVVTEDLTALLQPGDNISLHRLIRVLADAERPESIYTYTRGAKTRELLTAIGERRLAIRHDAFDKLARSTAAEHLRALLMHHGMLPQRGPEPLARFERWLSQKLDALPDDSTRTAIERFATWHHLNRLRKRAADPAANLETVTHAAKQEITEAAKLLIWLADTHGVDAASLTQAYVDDYLADGPSTRKHIRNYVRWLNHERSSPSRRLDAPHRDAKSVPMITQTQRIALVRNCLEWERVGISLRVAGLILLLWAHPLNKIVMLRSDHLQQSPTGMTILLGTRPAAVPEAISELFWRHAQRPSNQQTTNTSTDWLFPGTRAGAHLHPGTLSTHLKALGIDAQRARNATLRDLVHDVDARSLINLLGYSPAVITQHAARTGTRMSDYVDLKRGRNHDRTNG

SEQ ID NO: 592 - protein, 371 aa, synthetic construct
  REGION 1..371: note = TnsF-Tn7 System Protein
MADGPENVLFAPFGGQAPDPEMFLASVLDGWERQQRAKDFSAATIRSRRRLVLAMVDFTGHYPWDWTMADADDFFSHARGVRNLSHSTVRSYQGAIKLFCDYACDPRYDWSEQAATLFGRVFGQIVTELNKVTHAHPTDARPAKRPFTQRELQEFFDLADLEVHRILDSGRRGALAAWRDSVAFKTAYGWGLRVNELRHLQQVDFSRNNRAPYLGDHGVLRVRWGKSHRGSAKKVRTVLTVWQWAADTIHDWVERGLPRYGYPVTDLFPTGTGGLLSETHLIHKLRTLVDELGFPPGLDLHSFRRAYATHLITGEGFDVTFVQMQLGHEHASTTSIYSLPSPDYQRLALERAHDRTLAAARRPRNDDRSTP

SEQ ID NO: 593 - protein, 114 aa, synthetic construct
  REGION 1..114: note = TnsF-Tn7 System Protein
MTRREITYTWRVREVMARRRIFNAKQLAPLLQERGITLTPNAIWRIVSQDPERISFQMLVALCDALDVTPNDLITYTAADAKTVRHRRKASGDDLPDLRDYRPVRARIVDDDDE

SEQ ID NO: 594 - protein, 222 aa, synthetic construct
  REGION 1..222: note = TnsF-Tn7 System Protein
MPANQTRCPDCARGRLCSGCGRGRISTAVAAAVPGIPIGVLSAALEAVAGHPAVIRSLAAALAADADALTVGAPPVVSRLVAELRARGVDLPDPVCARCARTGKPLTRSSAGGVCARCRRRQLATACVRCGVVKPVASRDGQGQPVCARCADRPQRVCGKCGRTRRIARRARDGQPDICDSCFRGHEALCSRCGRRRPCAFASGPNPICAGCAPRATATCAH

SEQ ID NO: 595 - protein, 283 aa, synthetic construct
  REGION 1..283: note = TnsF-Tn7 System Protein
MSWEALAWAKDLDIAHPVAKFILVLLANKADENFSCYPSIRTLMAESGAGRSTILRALSHLETRGFMSRRPQFHDSGARRSTRYYLNHPRAPHLLTGPDPGPPRPAAGRGPSRTETGTVSKRHPPRVPQRDPLNPSTESPSEPGDAAITVLESVTRAWKLGTHDARSLRPAIESALERGWLAADLTDLLIRNLNGARDPVRVLARRLADLRQPPDPPITNVPWCGECEDAHSRTITVTEPDGAEAARFCPQCSPQVHRGRSSEEQSVQHCGKVVNYLGEQRVQ

SEQ ID NO: 596 - protein, 340 aa, synthetic construct
  REGION 1..340: note = TnsF-Tn7 System Protein
MNRRILTLMVALVPIVVFGVLLAVVTVPFVSLGPGPTFDTLGEVDGKQVVDIEGTQTHPTSGHLNMTTVSQRDGLSLGEAITLWLSGQEQLVPRDLVYPPGKSREEVDKANNADFKNSEDSAEYAALGYLKYPEAVTVASVNDPGPSAGKLKAGDAIDAVNGTPVANIEQFTGLLKNTKPGQSVTIDFRRKNEPAGVAQITLGTNKDRDYGFMGVAVLDAPWAPFVVDFNLANVGGPSAGLMFSLAVIDKLTTGDLVGSTFVAGTGTISVDGKVGAIGGITHKMAAARAAGATVFLVPAKNCYEAASDTPQGLRLVKVETLGQAVDALHAMTAGAPTPSC

SEQ ID NO: 597 - protein, 546 aa, synthetic construct
  REGION 1..546: note = TnsF-Tn7 System Protein
MKLTRIEVKNFRSFGESDIRLTDGMNALVGPNNCGKSNLVRAIRMAFDPKYPFDPAVDVPGQRKFAFPRTTLTFDCRGATSSESTLLRYLRDYEKTVSRSSSSTYAEDSTVRFVVTYRGGRENVTRQEYFSARGGGDRRGNPELNEKALRQFRKVMRFIAVDSGQSIEELLAGRFREILHTVLKEELKQHLHDAELARKDYVGKLESQLLSPMRDRTLTISKRLFPEVKDMFLTPTVSGLEETLSNVEIRLADSVETELRNKGTGVAGAILVALLRYLTEASKQSMVLAVEEPEAFLHPAAQERLREDLEALAEKDNVSLLITTHSPYILSRHPKAQVVAIEKSSDGISAVCGTARGSEPHSPALSGLFRDLAVPRLLDRYNTIPATSRGILLVEGASDEAFIKIAADKLNCRATIDGVHILPNTGTDSLVLQAVILRAETDRPIWILLDSDENGRHARDLLIKRFKMNQKDVLEYGRFLGSQYREGAEAEWLFPPKTMEAFVKKFGEDLVLKSKAKKFGDFRYDFTPEGKEAFPEWLRKTRSSQM

SEQ ID NO: 598 - protein, 546 aa, synthetic construct; identical to SEQ ID NO: 597
  REGION 1..546: note = TnsF-Tn7 System Protein

SEQ ID NO: 599 - protein, 364 aa, synthetic construct
  REGION 1..364: note = TnsF-Tn7 System Protein
MAGAGVAGSAALTLVTGCTPVRPEPALFEAMLDGWRSQQRARRLGESIIGSRERTVRRFVEFTGGWPWSWTAGQLESWIATGGWAHSTVRSYQGAVAVFLEYVCDNRYGWVVECEQRVGARPAQICHEWNTARHVCEYEGRPARRPLTRAELQAFFDAADDWAEQAVTSGRKGWLAAFRDAALFKVCYGFGLRRREVAMLDVADFTANPAAPQLGGLGVCQVRFGKAMRGSPPRRRSVAAVMPWALEALEQYLTLVRPRYAAAAHPALWLTERGGRISPRQVDDRFARWRAAAGLPTELSVHCLRHSYVSHLIEDGVDPLFVQQQVGHSWASTTAVYTQVGADAKNRMLRAALDAAFGAELSPG

SEQ ID NO: 600 - protein, 222 aa, synthetic construct; identical to SEQ ID NO: 594
  REGION 1..222: note = TnsF-Tn7 System Protein

SEQ ID NO: 601 - protein, 94 aa, synthetic construct
  REGION 1..94: note = TnsF-Tn7 System Protein
MAAAGMFATTDLVPLLAERGVVLSREQVYRLVAGVPERLSLTTLAALCDILSCTPADLIEPYRVARSRPTRGDSAGPAAPKRPTRARVLPDTGG

SEQ ID NO: 602 - protein, 544 aa, synthetic construct
  REGION 1..544: note = TnsF-Tn7 System Protein
MIVARGPDGPLCTRCRRQDRFPQHPCRDCGLRTAEVTAVEDGIPRCASCYGKLRVSCSRCGTIARADRRWPEGPVCRACVDQVLASPAICSRCQQPSIAFQHHDGDPVCPECAGVRFSYRCRTCRGFARLESDACCRACTAQSRLTALTTDPVTGAAPEWLLPLVDELAAYENPSSLDAYLRGPGGQLISQLATGALLPTHEALDELRQTASVNHLRDVLILVGILPPRDEQLAQLARDVTVYATALDPGNRLILTRYGRWSLMPLAQHAIRHGKPLTKGQRAYLLRRLRVARQFLSHLHYRGVLLADCTQARCDRWVTQHCHYQAELRHFLVWSADARLSPPRIAIAAAQRAENRSIMSDTERVLTALRLETDETVPLADRVAGCLVLQYGQLCTRIVSLTMDDVQHHPNEPDTLGLLFGRDPLWLRPRLSALLQRLIDSRTPPTVIARSHPTPYLFPGMRPGRHLTANALSERLVRHGIPATRLARNGAWLSLVSSVHWKMLADLIGTCNATAHRWHLHSATDRASYVAMRLKDQPPPSAPE

SEQ ID NO: 603 - protein, 544 aa, synthetic construct; identical to SEQ ID NO: 602
  REGION 1..544: note = TnsF-Tn7 System Protein

SEQ ID NO: 604 - protein, 791 aa, synthetic construct
  REGION 1..791: note = TnsF-Tn7 System Protein
MRREAGCLVLSGAGGVGKTQLAADYARAVQGAGSVDVLLWVPAGGRASVVASYAQAATELLARDWDDAEQAAEAFLAWLEPKSEAAQQASCRWLVVLDGVEDPAEVEGLVPAESRWGRTLITSRRRDAALVHGRKHVPVGLYSEEESRAYLAAALDSHGRSDDQEELAALAGDLGHLPLALAQAVAYIVDDGIDCADYRRLLADRATRLEELAPDQLPDGQTAAVHAAWSLSIDRADQLRPHGLARPMLHMASLLDPNGIPQDVLTSDMACAYLAGPGGKRTVSHRDASRVLRVLHRLCLIDHDRDTAHREVRIHELIQRAVRDELSVGTSQVAAVAAGAALLTSWPDTAHATALGMVLRSNAAAFAAHAHAIDDMGFAVFRVVLRAASSFGQAGHLSTAIDWFQRLAEAARPKDHELALNTWYQLAHYRGEAGEVAEAIAILQEMLPRVRRVLGPEHRGVLAAGHELARWQAQADNHSDALKVSKEILAAAVDAHGPDSPDTITLQLNLALRQGDAGDLPSAVATLEDLVPRAIRAYGPESTTALMIQGYVARFQADAGDMKSARRTFRDLAAEEQLLMGSDDVNVLHARHELAFSRGATGDIKGALRDYDRLLADRTRVLGPDHPDTLLTQYNLLTYQLEVVQAMESAAARLTRSMNARGSDRRQASSALHEVMYLRDMVNHDAESVIASVNNVVEHANTVLGSDHPLVRRFRSLQEEAASVDLKHQAAISTGSTEMTLSATAARDPKTFLVEIEDKIRRDAERIYGPSIHVVRNFSEEDIANLFNKNG

SEQ ID NO: 605 - protein, 791 aa, synthetic construct; identical to SEQ ID NO: 604
  REGION 1..791: note = TnsF-Tn7 System Protein

SEQ ID NO: 606 - protein, 654 aa, synthetic construct
  REGION 1..654: note = TnsF-Tn7 System Protein
MADPQVSDAEHELFGGPLRYDMGWSQHEHATLDLTMLSALRSMPGLVGATLRMAWQADRRALLSVGVSEIGQGIAAAAGLLAVNAVMHALLAGNGSAAERLHALLPGLLAAAIIGVVNSALSAWSTSRAGRLEPKVERIATTQYLAAAARVELEAIDDPDFRRLVDIAQHGPGSARRMISSCVAALNGLISLITTAGVLAVLHPALLPMLILIAAPRGWGAMRVAQERYVSVMSWIEHVRASRLIGNLLTERTAAQEIRLHAVGPFLLNRYERMAESAEAEQERLASSKALTEWVASALSGLAMAATYGTMFWLITAGHMSLAVAGTAVIAVRTGSASLGALVMNINQLHEESLYVRDHGRFLTEAGQRILPTGEAPVPERIKEIVLDQVTYRYPDRDTAALDGVTLTLPMGSVTAVVGENGSGKSTLMKILSGMLLPESGTLRWGEADLTDLDRAQVFERVSLLTQDFQRWPVTAAMNIRLGRPDHPATDDDLKPSVDYAVAGPVIAKLPDGLRSLLARMFRGAIELSGGEWQKIGLARTHWRSSTSQADGVLIVDEPTSALDPEAEIEAFDRIRRLAAPNRAVVLVTHRMSGVRHADHIYVLNNGHLAEHGTHDELITARGRYAAMFDAQAAQYAPTTAIPHPAGPTVPDQV

SEQ ID NO: 607 - protein, 654 aa, synthetic construct; identical to SEQ ID NO: 606
  REGION 1..654: note = TnsF-Tn7 System Protein

SEQ ID NO: 608 - protein, 410 aa, synthetic construct
  REGION 1..410: note = TnsF-Tn7 System Protein
MSTTIDLPTRRTRRSGPGSSTHQVPDGVARLRSPSVVFEQTLTGFGDSQRARHLDPDTIRGRERTVRQLQAFSGAFPWQPTWGAPLYDRWSSALAEKVATSTVIAHQQKLGLYLTYLCEPAYGWREVCQELFGTFNERALWDLNRVRHSQEYVGRPNRNRPLTRPEIRSLIGQIDPEIRRLQAVGHKGALSAARDLALLTTTYAWGLRRREAARLDLHDWRRQPRLPEFGDFGGLAVRWGKAMAGQPPRRRTVVSVWPWAVSTVRFYVEHVRPLFYQGRRDDGVMFPTERGSRISERSLNDRFAHWRDKADLAEELGPHCLRHTYVTRLIESGYDAGFVTDQVGHSHAATTAIYTALSSEYKNLQVRQHLEAAEAEVLRLAFAQADIEAECDEELAITLALQGAESRRGA

SEQ ID NO: 609 - protein, 505 aa, synthetic construct
  REGION 1..505: note = TnsF-Tn7 System Protein
MNPTPDGLSPRSTRRGRPRATSTRDDPCARCGRNIPRLAARWPEGRLCFTCYNTAIHTHGTCPNCRQDRLLPGPPGADGEPVCGTCAGIDVDFHCQRCGAEAGHHRGNLCVRCVLREDLHALLGSAPSDPTLAGLVDALCAADRPESIITWKRSPKVKTLLTGLGDGSIPCTHDGFDAVGGKPAEHVRALLQHHDLLPTRDPYLPRFEQWIATKLDGLPDEVRQPVHHFATWHHLRRIRAKAADGTPTRAPIHSAKQEITETIKFLSWLHTTYGRTAATCTQPDIDEWLATGPSTRQLIRTFFVVAARTRLNTTVTVGHRAARSSPSLTQDQRIAWIHELLTGNSETLPYRVAGTLLLLYARPITRIVTLQVSDVTDQADGMTIALGLRPTDVPEPFAGLLRTHLATRPNLRTGAGGDNPWLLPGTLAGRHLHPTTVANRLRGLGINLRGARNRALAELVVECPPSLVADALGYSHQVAFRHASKTAEPWARYVGRSLPRPTDTP

SEQ ID NO: 610 - protein, 505 aa, synthetic construct; identical to SEQ ID NO: 609
  REGION 1..505: note = TnsF-Tn7 System Protein

SEQ ID NO: 611 - protein, 552 aa, synthetic construct
  REGION 1..552: note = TnsF-Tn7 System Protein
MHHDQHHHQHHRLPAGHRAHIRLTDVAVTLGDRTVLTGVDLTVSAASRLAVVGENGRGKTTLLRVLAGRHRPDSGTVSRVGRIGTVDQHLDAPAARTVGDLVAEEIADSLAALRALDAAADAMGAGKPGAEDEYAAALELATALDAWDADRRVDVALAGLGACDDRARPLASLSVGQRYRVRLACVLGAHHDLLLLDEPTNHLDASGLEFLTARLRAHPGGVAVVSHDRALLREVATHFCDLDPSPDGKPLVFGGGYEGWLEGRRRVRSAWEQAHAEQLDEHHRLARAADEARDRLRDGWRPAKGHGKHERSTRAGGTVRAFVRRREELERHRVSVPPPPPRFRWPAWDVPAGQRVLTCREVVVSGRLRTPVSFSLDTGDRLLVTGPNGAGKSTLLALLAGELVPDRGAVDRRPAARVAYLSQEVPEWDPLRTAAQIYTEHVSRLGRADAPGLTSTGLLDPRAAATAVSRMSQGQQRRLHLALCLAARPALLILDEPTNHLSSTLVDGLTEALVTASCAVVVATHDRQLLRDLSSWPALALTPSGVDSAHVR

SEQ ID NO: 612 - protein, 552 aa, synthetic construct; identical to SEQ ID NO: 611
  REGION 1..552: note = TnsF-Tn7 System Protein

SEQ ID NO: 613 - protein, 782 aa, synthetic construct
  REGION 1..782: note = TnsF-Tn7 System Protein
MSTHTADMHDIIRVLGARENNLRSVDVELPKRRLTVFTGVSGSGKSSLVFATIAAESQRMINETYSAFVQGFMPTLARPDVDVLEGLTTAIVVDQERMGSDPRSTVGTATDTGAMLRILFSRLARPAIGGPKAYSFNVASASGVGTLKKADGTRQKAEFTITGGMCVRCEGRGSVSDFDIDALVDRSKSLAEGAITVPGYSMDGWYGRIYSGSGFFDMAKPVGEFSGREMDDLLRKEPVKIKADGINVTFEGLIPRIQKSMLSKDVEAMQPHIRAFVERAVVFTTCPECDGTRLNEGARSSRIGEHNIADVSAMQITDLAEWLRGLDEPSVAPLLGSLQHTLDSFVEIGLGYLSLDRPAGTLSGGESQRVKMIRHLGSALTDVTYVFDEPSIGLHPHDIDRMNGLLLRLRDKGNTVLVVEHKPETMAIADHIVDLGPGAGSEGGEICFEGTVDGLRASGTVTGRHLDDRASLKDSVRAPAGWIEVRGASAHNVRNVDVDIPLGVLCVVTGVAGSGKSSLIHGSVSPREGVVAIDQSAIRGSRRSNPATYTGLLEPIRKAFAKANGVKPALFSPNSEGACPTCKGAGVIYTDLGMMAGVATTCDDCEGRRFQAEVLEYRLGERNIGEVLAMSVAEAEDFFSAGEARIPAAHKILVRLRDVGLGYVRLGQPLTTLSGGERQRLKLAAQMADKADVYVLDEPTTGLHLADVQNLLGMLDRLVDAGKSMIVIEHHQAVMAHADWIIDLGPGAGHDGGRVVFEGAPADLVADASTLTGEYLARYVGG

SEQ ID NO: 614 - protein, 782 aa, synthetic construct; identical to SEQ ID NO: 613
  REGION 1..782: note = TnsF-Tn7 System Protein

SEQ ID NO: 615 - protein, 368 aa, synthetic construct
  REGION 1..368: note = TnsF-Tn7 System Protein
MRLDGSGRVHMAPSLPVLRPAEQVLRLMLEGWRNQQLSRNLQFNTIEQRLRLVQRFVDHVNAEPWHWTPAMVEEFSADLRTVKHVAHSTLRGYHCALRAFTSYIANPDYGWDRVCEQHFGTHPAQVFFDWNTAPHVQAYDGRATKRPYTREELDALFEHADNEVARAGASGRKGWQPAYRDAVMMKIAYGYGLRFNELRHLQTVDFARNPHAREFGAFGLCKVRYGKSRRASPFRPRSVLTVWRWTPSILEDWLANGRGAPDGLELFCSERGGLVVESTLLRRLRRYCDELGFSDGLDIHSFRRSYATHLLEAGWDPRFVQDQMGHEYASTTGIYQFTSDEFRRSTLRAALDRTMNQALSPDDRSGPS

SEQ ID NO: 616 - protein, 110 aa, synthetic construct
  REGION 1..110: note = TnsF-Tn7 System Protein
MKRTVDYRWRLAELMAARGMHNTTELIPHLAERDITLSRPQVYRLVTQRPERISLQVVAALCDIFDCGPDDLLTVTAADARARKTGTTPAANVVDLDRSVRPRRANILDE

SEQ ID NO: 617 - protein, 452 aa, synthetic construct
  REGION 1..452: note = TnsF-Tn7 System Protein
MRRRRAVQVCPGCGEQKVLAFYDEQRRPACTACTGNTSSFACRDCGREDNVFGACCATCTLRHRLTDLLSDDTGQVHPLLRPVYDTLLTGPRAQTTLYWLTRRSSRPDILALMARGEMAISHAAFDDLPCDRNVNYIRDLLAATGVLPHYQPLVARIPSWLGDLLAAHPKPRADLVHRFARWHVLRRLHLLGDRVTRSAALSGRAAVLSAIGFLTWLDDREIALPHLTQAELDGYLVEHPGHAGMLAPFIEWAGKTGVTSGLKIPKPPTSLPEVVLSDEQRWDHVETLLHDDTIHLYARIGGLFMLLFAQPVSRICRMRAHQITTHPDAVTVTFDTEPIELPDPLDRLVRDHLTRPGWASYVSRPDQWLFPGGVPGKHLTTESMRSRLVARGIHPSHARKAAMFQLAAVMPVPVLADLLGLAPQTAVRWAALSARDWGQYTAIRHDGVAAVR

SEQ ID NO: 618 - protein, 452 aa, synthetic construct; identical to SEQ ID NO: 617
  REGION 1..452: note = TnsF-Tn7 System Protein

SEQ ID NO: 619 - protein, 375 aa, synthetic construct
  REGION 1..375: note = TnsF-Tn7 System Protein
MLNKIPGAAGLVLVKDVRHLDEPAAVFDGMLAGWTKQQAARMLSQSTIDPRIKLVRRFVEFTGSYPWAWTPADVEDFTVSLTSETGGRLAVSTIRGYHLTLRMFCDYLTDARYEWVRQCRDRFGQVPVQVCHEWNTVVHLTDYEGRPGRRPLSYSELQQLFDFLDDRVERIAGSGRKGALAALRDAQMVKTAYAYGLRRNELCRLDVVDLRPNPHVPEWGTYGSVHVRYGKSTRGGVPRRRTVLTVPEFDWVVAGMRQWVEHARPIFAAGDHPALWLTERLTRVDAHFLERRFARIRGEAGLESDLTLHCLRHSYVTHLIEFGYPERFVQEQVGHHFASTTAIYASVSSDFKNKTLRSALSRVYAPEHGTGKEDW

SEQ ID NO: 620 - protein, 106 aa, synthetic construct
  REGION 1..106: note = TnsF-Tn7 System Protein
MRWHLRQMMATRGMFQTSELVPLLAERGVNLSRQYVHRLVTTAPQRINTDLLAALCDILDCEPNDLLEPAVEYDEVVATGTDGAAEEGLEIGALRPIRATVRRPQP

SEQ ID NO: 621 - protein, 543 aa, synthetic construct
  REGION 1..543: note = TnsF-Tn7 System Protein
MWKMGKRQRDCVGCGAPVGIIGRDRCCLCIRRIRERSARQRCPDCGRDRVLVPTTGRCVLCSRRCTECGHMVRNADARLCKTCRRRADLLARQEPCPRCGKPGYLRESTGWCGSCSRSGPPKDPPRICMSCGELRRHQARGMCSRCWQRHPDRPFIQGDTLAARLDEKPSWLADFVVYLAARYCPGRACNAITALGRLLEDNEPNHPQSVLERSRQPGRSMGSLARALENYFTEHGLAMPTDQPERLAAGRRQRRIDAIAEPLRPAVASFADHLLRARERARVAGTRPRSDQTIEVALATMRDLANFLYYTRGKQDWSTIDVNDIEAFLSTLVRARKRRLTVLRQFFRFARSRRLLLVDPSSNLSARESQAFRGRTLTRDQQRALFRRWTTDPTVHPHEALVGMLALLHGASSRETRLLRCSDAHSQHHTLQLGKQPHPVPLDPATWSVLDLCLAHRDRQRTTNPHVIVTKGTKAGRAAASTAYLSHVLDDCGYPPRTIRSTRLVDLVNTLDPKLVAAAFGMDPQAALIYLADHVDPDRLPNP

SEQ ID NO: 622 - protein, 355 aa, synthetic construct
  REGION 1..355: note = TnsF-Tn7 System Protein
MLVMDGLRLIPGSAVPAGPVTADPFVFQRECVDAFVASWRARGFSPVTIDNDVGLLERMLAALGRPAWEVTADDIDRVVGDLAAAGRASATRREYVQIFKGFHRFLQVRKAAEIEAGFGVRLVCPVDEFNASRHVGDDSPALLPPPTPQRVDEFFDFMKSRIANARKCAPAARDYALFRTLYHAGLRSEEAALLEVADLHFGRGPFGKLHVRFGKGAHTSGPRPRWVPMLDGLDLVLRWFLADVRPRFPDSQVLFADESGGALHRGTIRNRLRYLMDLEGRPLADRFSPHAMRRACATHNYERGVDLVAIQQLLGHWTVGSTMRYVRPSATFIEDAYRRAVTSTLAELSGEDGQE

SEQ ID NO: 623 - protein, 105 aa, synthetic construct
  REGION 1..105: note = TnsF-Tn7 System Protein
MRIRWRLRMAAAQREIWTGADLRRLLAEKAGLDMSAASVSALLTKEPSQIKLSTLIALCTALQCTPDDLFEIDTAPVEQSPAAPVPAPQAKAQSVNSRGRSMPPM

SEQ ID NO: 624 - protein, 543 aa, synthetic construct
  REGION 1..543: note = TnsF-Tn7 System Protein
MQNMGKRQRDCAECGGPVGIIGRDLCCRCTARAKDAAAKQPCPDCSRSRVLVVETGRCVICSRRCAQCGHKVRFAEAVLCRGCQRKADLQARQQDCPRCGKPGYLRVDTGWCGHCSRPRPSKKPPRVCVACGVLRRHAGRGMCSRCWQRHPDRPHVAGEHLLARLADPPDWLPGLITCLADGYSPGRACVAVTELGRLLDDEHSNHPPSLLDRARRSGRSMGPLARSMQDFFTEHGLAMPTDHNERLAAGRRQRRIEAAPEPLRPAIAGFAEFMLTAKARARRAGTLPRSDSTIEAALAAVRDFASFLNSERGKQDWATVELGDVEAFLVSLPKSRQRRLTVLRQFFRFARSHRLVLVDPTKSLDRKEAKGFRGRTLTLEQQRRLFQRWTTDLLVHPHESLVGILALLHGASSREVRLLTCDDVDPLRQTVRLGERPHPVPMDPASWTIVQRCLAQRASWRTANPHVIVTKGTKAGRSPASVAYLSHVLDDCGFGPRMIRCTRLIDLVNTMDPKLVAAAFGMTAGAAMIYLADFVDPTRLPNP

SEQ ID NO: 625 - protein, 353 aa, synthetic construct
  REGION 1..353: note = TnsF-Tn7 System Protein
MTEGLRLIPGNVVPIESIESDPVVFQRNCVDAFVASWRARGFSPVTIDNDIGLLERTLTALGRPAWEVTAEDIDRVVGSLAVAGRAPSTRREYVQIFKGFHWFLQVRKAAEIEAVFGVKLVCPVDEFNASRHVGDDSPALVPPPTPERVREFFEFMKARIITARKYGPAARDYALFRTLYHAGLRSEEAALLDLPDVHFDRGPFGKLHVRFGKGARMSGPRPRWVPMLDGLDLVLRWFLTDVRPKFPDSPVLFADESGGPLHRGTIRNRLRYLMELEGRPRSERFSPHALRRACATHNYERGVDLVAIQQLLGHWTVGSTMRYVRPSETFIEDAYRRAVTTTLAELSGEDERA

SEQ ID NO: 626 - protein, 756 aa, synthetic construct
  REGION 1..756: note = TnsF-Tn7 System Protein
MTTTTHDVIRVRGARQNSLQDIDVDVPKHQLVVVTGVSGSGKSSLVFDTIAAESARQLNETFSAFAQGRLPSYAHPDVDLLENLSAVIVVDQQRLSGGPRSTVGTISDIGARLRLLFSRIGEPAAGYSNAYSFNDPAGMCPNCQGLGVAASVVESELVDDDRSLNEGAITFPKFNPGTWLWKAYAKSGFFDPDLAIRDYTPEQRELLLNAPAAKHTPPAGMDAVGTAYEGLVTRFNRIYLQREPDSFKGKQREAFERIVSRGPCPECHGSRLAAPARASLIDGKSIADLNAMQISDLAERVAKIDGIGVAPLVANLSVHLKRMITLGLGYLSLDRATSTLSGGEAQRIKMVRHLGSALADMLYVFDEPTVGLHPRDVATLGQMLEALRDRGNTVLVVEHDPDIMSIADHIIDLGPGAGTSGGQIVYQGDYDGLTQADTPTGHGLREHRRATRTRREPDGWISIDDATTNNLQDVSTRVPRGVMTAVTGVAGSGKSSLILGNLPAVEPDAIVIDQRPIRGSRRSNPATFTGLLNLIRDVFAKTTGAPVGLFTPNSTGGCPACEGNGIIYTDLAFMEGVITRCEVCEGRRFTPEAQEHQVDGKSIADVFEMSVTDALGYFTQPAIGRILSRLHDVGLDYLTLGQTLTSLSGGERQRLKLATELGISGRTIILDEPTTGLHIADISRLLGLLDRLIDAGSTLIVIEHNLDIIAAADWIIDIGPEAGHEGGQVVFEGTPDQMITDGGTYTAEHLRARAKN

SEQ ID NO: 627 - protein, 756 aa, synthetic construct; identical to SEQ ID NO: 626
  REGION 1..756: note = TnsF-Tn7 System Protein

SEQ ID NO: 628 - protein, 553 aa, synthetic construct
  REGION 1..553: note = TnsF-Tn7 System Protein
MPAGRSRVDLYSAIRRDVRAGMSNRALQRKHGVGYRTVAAAQASAWPEPRKPQPKRGSRIDPHRGVIDSWLRDDLDAPRKQRHTAKRIFDRLLDEHDAHEVSYGMVRDYVATRRREIRIEAGREPAATFIPQEHLPGREAEVDFGDVAIQLRGELVTCALFSLRLSYSGKAVHRISASAGQEAFFEGHAHAFRVLGGVPVGKIRYDNLKAAVASVIGFSRQRVEADRWTAFRSHYGIEAFYCQPGIQGAHEKGGVEGQIGWFRRNHLVPIPEVDSLSELNSLVDEWDLADETRRIGSRARTVGEHFVTEQPLLAPLPVEVFETGRWFTPRVDRYAQVTVRMNKYSVPARLVGRQARVLLNASDLIIYDGKTEIARHERLMTKGATRVDLDHYLEVLLRKPGALPGATALEQARASGQFTQVHDAWWAAACKAHGDADGTRALIEVLMLHRHLPHEQVVAGLATALRAGALTADAVALEARKHEDTADDAALDHPTAHVGSEAYGEGEAPAVRSLTERRLRAHLPADTRPLPSVDKYDQLLPNRRENPNEGAAP

SEQ ID NO: 629 - protein, 105 aa, synthetic construct
  REGION 1..105: note = TnsF-Tn7 System Protein
MRIKWRLRMAAAQREVWTGTELRRLLADKAGLEMSAASVSALFTKEPTQIKMTTLIALCTALQCTPDDLFEIDATPVERPADPPIRPAPTQRQAVNARGRSLPPM

SEQ ID NO: 630 - protein, 260 aa, synthetic construct
  REGION 1..260: note = TnsF-Tn7 System Protein
MDVEMSPPGSIRVEAVRKTFPKRDKPALTRVDLRVDSGRVCALLGANGAGKTTLVRILTTLTGKDSGTVSVNGWDVDRDPARVRASIGVVGQYAALDEVLSARENLELFARLIGLSRTAARSRAATLLEQAGLSEHGGQKVSGFSGGMRRRLDLVTSMITRPAVLLIDEPTTGLDPIARRTIWNTVRSLVDEGTTVLLTTQYLEEADELADDVVILREGSVVATGTPSDLKALVGEPRMELRDPSLEDVYLHLHQGGDAA

SEQ ID NO: 631 - protein, 260 aa, synthetic construct; identical to SEQ ID NO: 630
  REGION 1..260: note = TnsF-Tn7 System Protein

SEQ ID NO: 632 - protein, 477 aa, synthetic construct
  REGION 1..477: note = TnsF-Tn7 System Protein
MGKPRVHWPGEQLCNSCFYTGMRTYGQCPRCGHDGVLPARARHDDPRPCCLECGGVDPDAYRCRTCAHEGEIYRDGQCARCALRDNLDHLTPQPRRADIKRVRSAMIEALCRAQRPESVMTWMRNADAREILKDLMTGTIACTHESFDEFPHSKTTEHFRSILEQHGLLPRRDHYLAIFEKWLAAKEAAADTPETWAMAYRFATWHHLRRIRAQSVPGDSSEGAVRSAKQEITEVIKFLNWLHHTHARTAQTSTQLDVDQYLQSGPTTRHLIRTFFVWCRANHINTSVEIAHRYAKTTPTLTDEQRLQWIQTLMRGNVTSLHQRVAGLLMLLYAQPLTRVVALEIGDLQLTPTEMRISLGTEPTPVPAPFAVLIYELLEHRPNLQTTGSDTMYLFPGYRPGRHLHAQTVMKELRRLGINLHGARNSALDNLVKLAPPPIVADMLGYSYQVTERHAALAATTYSRYAQSLATTIATVN

SEQ ID NO: 633 - protein, 477 aa, synthetic construct; identical to SEQ ID NO: 632
  REGION 1..477: note = TnsF-Tn7 System Protein

SEQ ID NO: 634 - protein, 371 aa, synthetic construct
  REGION 1..371: note = TnsF-Tn7 System Protein
MAVDEAGRLVLVPGVRYLNSRDVVFAEMLEGWRNQQLSRNLSFGTIEKRVKLISRFADYANEYPWQWTPAMVDEFFGDLRGVRHLRQTSVRNYQASLRLFCDYVSSSDYGWTDLCLEQFGSHPVQVCHDWNSARHVQEAESNPTKRAFSRAELQRFFDHADSEVDRIAASGRKGWRAAYRDATWFKVAYGWGLRGNEVRHLQTRDFYRNPKAPEFGKYGVVHVRYGKPHRGSPPKPRSVLTVFDWCPEVVDDWISAAQLGGEDGPLDLFTSERDTLVSVCCVWQRFSRYCDELGLAPGLDMHSFRRSYTTHLIEAGVDPKFVQDQLGHEFASTTGIYDCTTTHFRQSTLREALDSTLRDAMNTGIDDDTRR

SEQ ID NO: 635 - protein, 94 aa, synthetic construct
  REGION 1..94: note = TnsF-Tn7 System Protein
MAAAGMHNSTDLVPLLRERGIDLSASQVYRLVAGQPERVSLQVMAAICDVFACTPGDLVTVTATDARRRKTASDNVVDLGRSARPKRARVIRDG

SEQ ID NO: 636 - protein, 491 aa, synthetic construct
  REGION 1..491: note = TnsF-Tn7 System Protein
MSDRPYATAEQYERWFKRDCARCGRHGHFAAHWPDGHVCRTCHDRALGVRGQCPCCGQNRALPGLGDDDVPVCADCAGFRRSYACSRCGTEGKLHRRRLCTRCTLADQLHQALDDGTGRVHLPLVPLLDAIVATPRPKNGLSWLRSQQVRQLLGDLATGRVALTHEALQELPNWRTVAHLRDLLMDCGVLSVVDKQVLHTQTWLHHRLAALADNPHQQLLRQFGLWHQIPRLRRRAQTRPLTDAARRSTGEQFTQAERFLSWLDGRDRPLTDCTQTDIDTWHAQAAEHHKRNLRQFLTWAINTRHMPKLALPILHVRAGQPISQTRRLALLRRLLTDDQLPARPRVAACLMLLYAQPASRIVRLTTDDVLCDGDQVLVRLGEPPSPVPEPVGDLLLHLAGHHHNPNDSGSRWLFPGTRAGQPLHARTLLPLIRQLGVPAQATRVAALRQLVLQAPAPVIADALGFHNKHVTRVWTDAGGAWKTYAPSDPGR

SEQ ID NO: 637 - protein, 491 aa, synthetic construct; identical to SEQ ID NO: 636
  REGION 1..491: note = TnsF-Tn7 System Protein

SEQ ID NO: 638 - protein, 480 aa, synthetic construct
  REGION 1..480: note = TnsF-Tn7 System Protein
MNYPSNGYSPPVPLRSHQQQEQASSQQTAPSDTHPAQASEAVGRLRQHLRDTLGTELPLRVDAQQRRTGASVSREARRELARAILDDAVRAHSENELMDNRSLVGRDVEQQVITEVINELFGMAGLQPLLDDPTVETINANRFDRVFVQYNDGRRARVAPIAGSNEELTDLVRLLAARASSQERRFDHGSPAVNLQLPGGERLFAVMGLTAGGVTSLSIRQHGYLTVTLPELRARGTVDPGLEQFLRALVRARKNILITGGTGAGKTTLLRALASEMDALERIVTIEDAFELGLELDPDVHADVTAFQAREANVEGEGAISQAELVRWGLRMSPDRVIVGEIRGPEVIPMCNAMSQGNDGSMATLHASSSRVAFTRLASYAAQGVERLPLDATNLLVASAVHFVVHLARGIDRTTRVVSSIREVVGADGPQVVSNEVYRPGADRRARPVAGALRTDTLDDLLDVGFDAGLLEQPEGWWPR

SEQ ID NO: 639 - protein, 480 aa, synthetic construct; identical to SEQ ID NO: 638
  REGION 1..480: note = TnsF-Tn7 System Protein

SEQ ID NO: 640 - protein, 373 aa, synthetic construct
  REGION 1..373: note = TnsF-Tn7 System Protein
MGQDGLAPGAAGLHLVGGLSLLRPEEQVFGAMLDGWRNQQLARNLAFSTINGREKVVRAFALHADTFPWHWTAHQVDEWLGDLRAVRNLKRSTLRNYQEAIGSFCAYLIDPAYQWSTECEQRFGTHPIQVVHEWNTAVHVADAEADASKRAFTRKELIALFDHADDQVDRIRKAGRKGWLPAFRDAALLKTAYAFGLRRNEIRMLDTVDFGRNPDGPEFGEYGVLYVRHGKAKKGSPPKRRSVVAVWDWSAEILQEWIEEFRPLFATTDSPACWPSERGPRIGLSSINTRLAAYRDELGLDPALDFHSLRRSHITHQIEDGLDARFVQEQAGHEHASTTSLYTCVSSDYRRRTLRRVLDATVQAALKPTGRTR

SEQ ID NO: 641 - protein, 110 aa, synthetic construct
  REGION 1..110: note = TnsF-Tn7 System Protein
MKRQTSYKWRLREVMAAAGMFAATDLEPHLHDRGVTLSSVQVWRLVTQTPERLSLPVLAALCDIFDCSPAELIATKAENTAPRKTAGGEAKVVDLATTIRPKRARIRPEA

SEQ ID NO: 642 - protein, 418 aa, synthetic construct
  REGION 1..418: note = TnsF-Tn7 System Protein
MSSRTPDDRPLCGRCFRKSPLSFRECVECGDTSRLHHFGLCPKCAAPRQLRSLLTGPDGEVRPELVPVLTALAASNPHSLLIRLRNPGTPLLLRASAAESGPVTHEVLDRLPQPRSIRYLRAALVSTGVLAERNELLIRFEEWVNSVVEEVQEPEERQVIRAFTAWFYLRRLRRRSPRRHPITSGGYNFMRYEIRAAIRLLAWLRERGASLETCTQSDIDQWLSSEESGRYAIRNFLVWVVSRGHAHNITAPTHTTSRGQEMLAEVDQRWDLSRRLLHDTTIATTDRVAGCLVLLYGQSCARIAALTTSHVTKTHDGVQLWLGRKPLEIPEPLAGLVPELVGTRQGHAVVGHTDSTPWLFPGAFPERPMDGVSITARLNRIGIKARAGRNTALMELAGELPAVVLSGLLGIHINTATL

SEQ ID NO: 643 - protein, 418 aa, synthetic construct; identical to SEQ ID NO: 642
  REGION 1..418: note = TnsF-Tn7 System Protein

SEQ ID NO: 644 - protein, 194 aa, synthetic construct
  REGION 1..194: note = TnsF-Tn7 System Protein
MHTCVSCGKTAAAALVDDDGALCHLCYIRHRRPRRLCARSGWPIGRVCMTCFTVVLRSPAECPRCGMVQPLIARDDDGADVCGPCVGFAADYTCKQCGRTGNPHSRGRCAQCVLAERANALLAGPDGTITSQLEPLAAALADAPSPFPAIQWLKESPNTKLLARLASEGHELSHELLDELPPSRNQRYIRQLLL

SEQ ID NO: 645 - protein, 194 aa, synthetic construct; identical to SEQ ID NO: 644
  REGION 1..194: note = TnsF-Tn7 System Protein

SEQ ID NO: 646 - protein, 481 aa, synthetic construct
  REGION 1..481: note = TnsF-Tn7 System Protein
MTSELNNCFKPQPAQKRCGECGRLTATFHSIYKGDGFCCACYTRVFIRKECQACGQGYRIHPKQDFAYCRACRPKMIPCFRCHRTNYPIGCYFKDKPVCNTCAPHFKTEKACPRCGKLSAHLAKALEFGVTEAICKSCISAYYNPCELCGRARHPLKEKDGHHLCSKCYRLGLIPCPDCANDYPAGVGLRCRDCYLRKLTRSKAQIAIHLYEQKSTQHDIIAFAEWLLSHTTLLKASVSVNRFHSFFKVVDESPDDWFLSPHLLAPLDKELLRKDGYARLFYESLGKIIPAEVLADVSTWRSIYKHLEYIYQPSPYPLSKEAQHYAKHCRTRIERNEIKLRTLKQQLSAVVSFTTYLKRCNRQLSEDSVSEFLRHYPGLEASLTGFLVFFNGPRAPITAKRKRFKTSSKSILKAYLRQPIQEEKRPPIKVIHAALNYLHGVPKSLLPQVTMKHVYGDAKTGWEVRIQGFSYILALKPNHVD

SEQ ID NO: 647 - protein, 392 aa, synthetic construct
  REGION 1..392: note = TnsF-Tn7 System Protein
MTKKLDDILASWAAGRNVLLYGPPATGKTRLISELFQLLKQAQQGTSGILLDPNESEKPFSRPSKPLTIPQPVKVVWTTFHQSFSYEDFIIGLRPDITSTGTRLRPWAGLFLDAALELADPDSEYKSVVIFIDEINRGNAARIFGEFMTFLDFDYRKEGRVAIPLPLRQLIYKDGLSEPIFRLGGKEAQIPENFTFPKDIYIVSTMNSVDRAAVPIDSALARRFDRIEMRPSLEVLAQLWSIDRDTIPSSIDDIRDTLSPLLAAYLILDRLNISISSDLGPEFELGHGLLTSIQASETDRGMEQESLEDNIWRGIATAWDDIIFPQLEDRYAGRPEQLIDLLRIETPPLEGEYAWKFRRSVSSALISRTLEPVRTSELNVDVIKRSFRWLAG

SEQ ID NO: 648 - protein, 392 aa, synthetic construct; identical to SEQ ID NO: 647
  REGION 1..392: note = TnsF-Tn7 System Protein

SEQ ID NO: 649 - protein, 481 aa, synthetic construct; identical to SEQ ID NO: 646
  REGION 1..481: note = TnsF-Tn7 System Protein

SEQ ID NO: 650 - protein, 235 aa, synthetic construct
  REGION 1..235: note = TnsF-Tn7 System Protein
MPKYVQQRKIKPTRLSLSGFYSFRGLDSIPYESTLERDFLTIMEANSSVSNIIPQPVELSYQHSNGNRYRYTPDFLVQFDSTESIRSFSEVKPLLVEVKPRAELRRNFKKWKPKFKAAMHFAKSEGMIFHIFDERLIRTQVLDNMKFLSRYRLKPYMKAHRPEELNLITEQVELFEFATVRDVVESLYTSFDRRALALTQVWHLLAMGILECDLNDPLNLDTTVWVNASEDVYGE

SEQ ID NO: 651 - protein, 638 aa, synthetic construct
  REGION 1..638: note = TnsF-Tn7 System Protein
MENKKLEGNAPKRGKLFLRPGLPVSLDGELHIIKDFLSSERVVCKSIESGKSIAVNLTELEAYEGDSPETQLYSDLHAIDSEAYNNAIKRYEIIKPLLALGRVTLADAEARAEETKVGVASIYRWLKKFKGQGVISALVEKKRGWRSDKTRLDPRIIEVVDDAINRVYLSKRRYSINKTILEVEIQCEKLNLPKPHAATVRRRINKLSAKQVLTRRGMNDKYKNELKPAAGKFPDADYPLAVIQIDHTPVDLIIVDDESRQPIGRPWITVAIDIFSRCITGYYIGLEAPNANSVAMCISHSILPKTAWLHKHGITDTAWDVFGFPGKIHVDNGADFRTETLRRACLEYDINLEFRPVREAQYGGHIERLLGSFMKHVHDLPGTTFSDVKTKGDYKSEKYAAMTFSELEVWLANLIVRYYHNKVHSSIGMAPIKMWENAIWQDGGSGMPAIPEDPLTVELDFMPLYERTIQKNGVSIDGVRYYAPIIDRWIGFREDNSKNPKKFIFRRDPRNISKIWFFEPELRAYFEVPFADQSLPEMSKWELEEARKHVKQQGSDPRNIHEVRRGIEEMRTIVESSMKETKKARRKQQQRKNHAIGETPAGLLSKEKDDSSKPPDYEYDGDVVSDDNLDELEPFDED

SEQ ID NO: 652 - protein, 219 aa, synthetic construct
  REGION 1..219: note = TnsF-Tn7 System Protein
MAHRGILFLDELTEMPRHVLDSLREPLESGRVFISRAKQQTEYPARFQLICALNPSPCGQFDGDIASARATPDQILKYLGRLSGPFLDRIDLQVEVPRQPEVLRHGPSGTTATPSETTAALAEQVAVARRRQYQRQGCLNSELDVNKLQQVCTLSSGNHDFLVTAIEKLQLSHRAYHRTLRLARTIADLSEQKDIQRAHVAEAMSYRALDTLLTRLKEL

SEQ ID NO: 653 - protein, 380 aa, synthetic construct
  REGION 1..380: note = TnsF-Tn7 System Protein
MAYADTRHAKYQCITSIELSNLSINSWHIHTELLPDEALSSWLIRAGLRHAIEPLAIGRIIWGHWRVWTRDIDRWLPNQRLEELSQEIQIHRDLLYHVTLTPWARQMSLSPLNPQQRWYWVTSLSHRNRSRQSSFAFCPHCLAEDAIPYMRKSWRFSWVTTCPTHKTILSEACPHCHYAVNLSRHTLSSKSLRYCTSCHGDLTAVSNQAVASKQSHETQGQLIEALYAKEPVAQDFTTLKFLIKLIRQSLASKRNMHNSPLHTFINIANDTRSPLCSICFTELSIKDRHALLTAAFKLMSLKDSSLVDLLIETGVTQSAFLKDKTELSNKILRISKQLPTHQRVRLRQRDASIRWPEPRSLEATQRLIKILHKSIRADDK

SEQ ID NO: 654 - protein, 294 aa, synthetic construct
  REGION 1..294: note = TnsF-Tn7 System Protein
MSTFAHLSEKYRPIAALPDEQRIHFIKAPRWIAYPTAKNVLREMEDLYNYPQQTRMRSLLVTGNPNNGKSSILERFLEQHPPSNLNEDEYQIPVVKIETSQANPKQLYTEILQQFHSPFRPSQPLIELQQQAVDVLRECNVRILMIDEFHSLLTGTPKLQRQVMNEIKYLTNKIKISVIAAGTKEAVQVIQTDSQHSSRFSVISLPNWKMGKEFQQLLLSFERGLPLRKESKLSELEKAKLILSISQGIIGNIHELLKLCATDAIRTGREQIDMSVLSKHRWHTPTQGMRNINV

SEQ ID NO: 655 - protein, 294 aa, synthetic construct; identical to SEQ ID NO: 654
  REGION 1..294: note = TnsF-Tn7 System Protein

SEQ ID NO: 656 - protein, 811 aa, synthetic construct
  REGION 1..811: note = TnsF-Tn7 System Protein
MVTPLAPQVLADPIAVIVDAVGAVEPALEREAVTATVAGLAGGRHKRRLLAQALLDSPKVLRDGRSPAPRAIGDLLLALRQLGAEKIAPPACADCGKHLRTLQRRGQDWYCTVCIAAPGPCAACGKTKQLVFRDRQGQRRCAQCPPVEGKDPAELLLDVVIGIDPSVTPSIMAEAVAAVASRPGNRRHLAWAIEQRPELLMGAGAEAPIPSVLRLIEVLADAGVQNIVRPVCPGCRRAISLHRKINGLWLCRTCVAHSRAVTCTGCGAVREPGTRDEYGRPLCPACLINDPANHETCVKCGRHRPVSNRTADGPLCANCRPLTIATCSICGAHGPTLASKTTGKPWCTACAQRWAICSGCGQMRSIRGGTRTEPLCSTCTRPDAEFWRECQDCGETGRIHLGRCARCALEQKLCELLGDQTGQIRPDLRVLYQTLATTPRPHTAAAWLTKSTAPQILRNIKDGEKPLTHATLDELPTGKTVEHLRSVLVAIGTLPPRDEQLARLERWIAQTIAKREDSDERGVLHRYATWHVVRRLRGRLNGTEATYGQLTTARRNITAAIALLDELAGRGTTLATARQRDLDAWLADSETPNRKEAGNFIRWAKRNKLTSLDFAAVRWMGPTGVIDTETRWKQARTLLHDENLEPEDRVAGLLVLLYAQRTATISRLTLDHLRTGPGGVHLCFGEEPILLPEPLDGVVLSLAATRTGHATIGESGQSTWLFPGGQPGRPISAYRLGERLHELGIRPSRARSTALFQLATELPAAVLARMLGIHIAVAVAWQRASSGDWTNYAAEIARRADRNEHPDQRER

SEQ ID NO: 657 - protein, 811 aa, synthetic construct; identical to SEQ ID NO: 656
  REGION 1..811: note = TnsF-Tn7 System Protein

SEQ ID NO: 658 - protein, 366 aa, synthetic construct
  REGION 1..366: note = TnsF-Tn7 System Protein
MAGSAHLELVSGVVHLRPQDAMFEAMLRGWCAQQTARGLQQATIEAREKLVRRFLEFTNAYPWQWTPGDVDEWTVSLTSEKHLAPSTIRGYQTDLRLFSEYVTDGRYGWAVECDKAFGTFPVAICHEWNTIAHLNEYEGNPEARPFTREELQRFLDYADDQVERAVRVRRKGALAAYRDATMFKVLYAWGLRRTECSKLDLVDFGRNPAAPEFGRFGMLHVRYGKAVRGQPPRRRNVPSVMGWAVDAVADYVENVRPRFDCAEHPALWVTERAGRLQPAEINARFVAYRDALGLPKVLTPHSLRHSWVTHLTEDGVDRRFIQEAVGHRCDTSTAIYTHVSGDFMNTALRKALTPAFEAPAPRREGR

SEQ ID NO: 659 - protein, 111 aa, synthetic construct
  REGION 1..111: note = TnsF-Tn7 System Protein
MTSLLDYRWNLRQVMATRGMFQTTDLTGPLAERGIQLSSSQVYRLVVERPERLSLKVLMALMDILECRMDELIEPVAAPGAAARPKKAVGAETSIGHLRPRRARITAVGEE

SEQ ID NO: 660 - protein, 720 aa, synthetic construct
  REGION 1..720: note = TnsF-Tn7 System Protein
MTDLTAVVDAACAAAPELDRRVIEDIVAAAAPITQQRNKLIRYLADVTAFTSGASDVPPVVARVLTDMAGAGAPVTPPACDGCGRVVRLVYKRGSGRVCKACGQSQYSETCSECGQDRRVSIRNPDGTAVCNSCRLRQRTEHCASCGRDRPVSRRTPDGGALCQSCYQRPERECASCGRVAPVKSNKTGEPLCGTCYRAPAALCAKCGEHRALAARDVIDLGNVCTRCWRPATRTCSVCGDTKPCRVSESDGKPYCGVCAPRPLVTCARCGRDRPVQAHTDIGPVCNGCYDHVVARPCAACGELTRIYADGRCHRCVLTARLDTAFGQRPELTSVRDALLEGRSAAATLRWFDHGAGGQLLRRVASGEVELSHEALDQFGRGHRHVDHVRQLLVAVGALPDRGELAARLSVWLDSFTATLPPSHARVVRPFAEWRILRRVRRQDARDRLTDAGAKWARQRIRTAANLLAWLDLRDLELESLAQRDLDAWLAAGPTTRYCIRDFLRWAHERNEAPKLTVPLRQALTATAAVDDADRWALVDDLLHNEDIPLDLRIAGLLVLVYGQHLSRVATIRLDDIEHGPPTTVKFGSSPVALLEPLDDLVRRQVETPRGHAGAAVENPWLFPGGHAGENVTPEQLRKRLEAAIGIRARPSRNTALLHLAREIPVPVLADLLGLHFNTAVDWVQLARGDWSGYVASREASARRAPAASRPSSAGPPFGS

SEQ ID NO: 661 - protein, 720 aa, synthetic construct; identical to SEQ ID NO: 660
  REGION 1..720: note = TnsF-Tn7 System Protein

SEQ ID NO: 662 - protein, 368 aa, synthetic construct
  REGION 1..368: note = TnsF-Tn7 System Protein
MTRREPGSAQLVLADGVVHLDVPEAVWQAMCLGWSQQQQSRMLRPETISQRLSVIRRFREFTGSYPWQWHPADVEEFTVAAVAGGAKAHATIRGYQNHIALFCEYLIDRRYEWVAVCEERFGAAPAQICHEWNTVDHVQQLEAQPARRPLDLDELEALFAHADERVEQIQRSGRKGAVAALRNATAFKVSYAWGLRLREMTHLDLVDRHRNPKVPGWGRYGALRVRFGKSSRGSAPKQRTVLTVPEMDWAVEALQHWVEVARPLLKPGQHPAIFVTERRSRMSEWSADVAFAAVRERAGLDSAITHHCLRHSYVTHLLEHYGYPELFVQQQVGHAYASTTAIYSGVSDEFKNRILADAIAANRPEVTR

SEQ ID NO: 663 - protein, 113 aa, synthetic construct
  REGION 1..113: note = TnsF-Tn7 System Protein
MTRKMRTRWNLRRVMADRGMYQTSDIVGPLAERGIHLSREQVYRLVTGEPQRLSMDTLAALCDILDCTPNDLMEVVLESRQVRKTGTANAGGEGPAVSDLRPVRARIKRPPKS

SEQ ID NO: 664 - protein, 847 aa, synthetic construct; identical to SEQ ID NO: 202
  REGION 1..847: note = TnsF-Tn7 System Protein

SEQ ID NO: 665 - protein, 847 aa, synthetic construct; identical to SEQ ID NO: 202
  REGION 1..847: note = TnsF-Tn7 System Protein

SEQ ID NO: 666 - protein, 818 aa, synthetic construct; identical to SEQ ID NO: 199
  REGION 1..818: note = TnsF-Tn7 System Protein

SEQ ID NO: 667 - protein, 381 aa, synthetic construct; identical to SEQ ID NO: 204
  REGION 1..381: note = TnsF-Tn7 System Protein

SEQ ID NO: 668 - protein, 373 aa, synthetic construct; identical to SEQ ID NO: 205
  REGION 1..373: note = TnsF-Tn7 System Protein

SEQ ID NO: 669 - protein, 118 aa, synthetic construct; identical to SEQ ID NO: 206
  REGION 1..118: note = TnsF-Tn7 System Protein

SEQ ID NO: 670 - protein, 115 aa, synthetic construct; identical to SEQ ID NO: 207
  REGION 1..115: note = TnsF-Tn7 System Protein

SEQ ID NO: 671 - protein, 818 aa, synthetic construct
  REGION 1..818: note = TnsF-Tn7 System Protein
MTTTDQSARAVTDPIGLITDLITRVERNLGPEAVRGVVLGVAGGRAKSRRLAEALAARPQVLSDGRSPAPRAIGDLLIALRKAGAPTISPPVCCDCGKHLRTFQRRGQDWCCSVCGQESAECAACGNTRRISMRDRTGRPRCSICPDVDPRNPLDVIHEVITRISPAADREVVADAVRRSAPRPSYQQKLAWALEDNPRLLTGEGHLAPLRAIPRFIELLHAADVAGVVRPACPRCQRVVRIDKPLDGQRVCRNCIAKSRIEECSRCGARREPATRDAEGRPLCPHCLITDPANLETCIVCGKRRMVCTRTPDGPICPNCRPLPSLVCSICGRTAPCMLSKLTGQPRCGRCDQREVHCTVCGRFRDIHSGTADAPICGPCTKPDAELWRPCPTCGEAERLTAPGPCRRCTLKQRLDDLLTDDTRTVPPKLKALHDALADTQRTATAMSWLSKGIVAIVLSDLASGRRPLAHEALDELPDSKVVEHIRTVLVAAGALPPRDEQMVRLERHVKDLVASHATPEGRQILHRYATWHLIRRLRRRSRGNDITHTQLNVVRVHLRAAVYLLDWLAGQDLTLASCRQSDLERWMTRDETQLLREAGHFVRWALAQRIARDLSFPAVKWNGPSQAMDDDARWATARRLLHDDTIRTEDRLAGLLLLLYAQWPAAISRLTTAHVEKTDGAVRIRLGDVAVTLPGPIAELALEQVAARRSHAVLAQTDSPWLFPGGQPGRPISAWAMGERLRKLGIRLAETRSTALFQLATELPAAVLARTLGIHISVAVKWQRAAAGDWGAYAAEVSRRAAPLTNPSLHDTEQGTR

SEQ ID NO: 672 - protein, 420 aa, synthetic construct
  REGION 1..420: note = TnsF-Tn7 System Protein
MSSPATSSDREKVVSKLPGWLRQNLKIRAAQHGIEIQAAVEQGITAWCSLASTPTAVDTAGADSFSTFLPPGQWEQFRQIAADRHVSLIQGLAQSVQLWLDTNPTPEIERPAITRRIVVCNQKGGVGKTAVTAGLGEALAEDSNNLHPVRVAKALAQALRASKAHDDSETGADPLDIENLPGLGLRVLLVDFDPQCHLTNQLGASPLPMNGDSLTNHMAGDPKGDLRDLIVSIDDATFDGRLHLLPACNDAFLLDVRLSAVRAREAALERALASLEADYDVIIVDCPPSLGLSMDAAAYYGRRRDGESPGQSGTLIVVQAEDSSADAYELLTTQIDDLRGDLQVDIDYLGIVVNLYDSRRGYIATSSLQGWVDIKDPRVVGLIGDLKEQKEAVRVKQPLLSYAPKSQQAVGMRALAREVS

SEQ ID NO: 673 - protein, 818 aa, synthetic construct; identical to SEQ ID NO: 671
  REGION 1..818: note = TnsF-Tn7 System Protein

SEQ ID NO: 674 - protein, 367 aa, synthetic construct
  REGION 1..367: note = TnsF-Tn7 System Protein
MVHQRKVALAGSAHLELVSGVVQLRPEDAMFDAMLRGWRAQQKARGLQDETVEDRERLIRRFHEFANDYPWQWTPAHMDEWSVCLTGEKHLAPSTIRGYQGIVRLFSEFVIDSRYGWVPACEEAFGAFPVAICHEWNTIPHLQDYEGSPEARPFTREELQRFLDYADDQVDRAVRAKRKGALAAYRDATLFKVIYGWGLRRTETSKLDVVDFGRNPQAPQFGRHGTLNVRYGKAKKGQQPRRRNVLSVMDWAVDAVADYVENVRPRFGFPDHPALWITERGGRLQPGSINDRFEAYRDALKLPKDLVPHSIRHSYVTHLTEDGVDRRFIQQQVGHECDSSTAIYTHVSDDFMNTALHKALAPAFAGV

SEQ ID NO: 675 - protein, 117 aa, synthetic construct
  REGION 1..117: note = TnsF-Tn7 System Protein
MTAKLDYRWHLRKVMADRGMFSTTDLIPPLAERGITLSTSQVYRLVVERPERLSLKILMALLDILDCRMDDLVEPIASATAVKRPKKAAAAGTAPPASDGLGDLRPKRARIRGVDLS

SEQ ID NO: 676 - protein, 389 aa, synthetic construct
  REGION 1..389: note = TnsF-Tn7 System Protein
MKKICPQCNYSKNNVFNRHLNTETLLLCDKCYRKCLDICSLCRRHTITFTYSKENKPICKKCFTEPFRTCKICKNKFPAGRGRICYECSCFHRLSKKVSILNLILSEFTNLFFEQFTWWLTKRKGIEYSSNFIQKYFIFFYKIDLLANTLNRFPTYFDLLNHFKVSFTRKYLLVMIFLNEYKIIEIDKKIKELHSNLNIIDSYLNRFNKNSSDYLIINSYYTYLEKKYLSNKTTQRSIRLALTPAIKLLEYKKYFNISRLNDNVIDGYLWIYPGQKSSLIGFINYLNKKFNYNLSSIKNLTYTLESSISRKKQLQLRLIYLLKREKLTILQQKRLINISLEYFHRIKIPNNVYLNIKNIFKINDNYYIWCCKNKFYLPINIYFNLKYCF

SEQ ID NO: 677 - protein, 641 aa, synthetic construct
  REGION 1..641: note = TnsF-Tn7 System Protein
MQEKNTTKNIPFKNLPDNDNYYLVLNYCAAIKLKNESLIPNIQVILRKVNIDNQTVIKNSPDIVVYLPIPELDEVRIGSVWKRRQKVLDRWKNFDNLEYMEDVNFNFDFTLHNPRIVKFNEKIDSLGDSLSNIYKINFQEKEEKFNKTNYTKLISDDGITVLIPSIELFVSAYTPQHKIIKQRLLQFNLDNAINEFINLDNSKVENQEYYIGLYKKWEDSNIKFLAYAKFNNISRKRISYLYSSLEFNSGDTISGYQVRYPIVLPYHPIHLFISSDGLWLNEKTFFIQRIYTISIPSDITVKAIIEGTIHKVEKKFYKPEKKESKPKIIESEEQNQDHENGITNLLEVTNITGMDSNKQPRRRESLYRVQTQVKTIDDNKPKIEILNKEEKKIELIEDSGAENNKQIDVQNDQETPKINKENIENVDGSDAEKLPSGDNSKQIKYLTSHRDIETNILLNQIIEILNNFKIEQFILDYKFLDKKFKELNELKETTFYETLLNNGFNKKDLEDNWYKLKKRENGELKELGYREYFLIEIKLIDKYCYLLEIGKKESESSYLGVIFRNTDLNKLRSVNLVEILKKIVENEGNYSKKDPSIINVKKLKAVDLGVKYEKYSHKFNEELNEFVNLKANIESKMKLLI

SEQ ID NO: 678 - protein, 232 aa, synthetic construct
  REGION 1..232: note = TnsF-Tn7 System Protein
MKISHKNRKIGYTYGSTSGKFMFRNKKIILFESLLEKSFLQVLEFNDMVLDVVEQPFTIETETTKGNKGSYTPDFLIYFKEPELKTNNPIKPIVAEVKPSKKLIENRIELKQKFKSAIKFCNEQEFRFKIFNENRIRSTEVDNIVFLNRYKDYRPDEVEVEIIKNHLLSVGHTTIEYLLTHLYVTDYQKGNALSHIWYLIYSKVLVTDLKFPLNNKTVIWLNIEEDNLGVEL

SEQ ID NO: 679 - protein, 632 aa, synthetic construct
  REGION 1..632: note = TnsF-Tn7 System Protein
MTSIKNEKLKLNRQKVQLIIGNFVKYESQIYKITQLIDFSEVIGINIETNEAKRLLIEYIKPVHNNTIKNNGYIFKDIDDIADDEWKTIEIRLNAIRPLLNGATRKEIEEHAKEINIHFTTLYRWLSGYKSTGTVTGLLSQKRGRKNGTVFIAEDIEKIIQDTIKNDYLIKERPSIKSVINKIKIKCLEKNLALPSNNTIRNRINKITQYEFFEKRNSKNLVKDRFSPATKKYSADYPLQKVQIDHTRVDLHIVDDEYRTSIGRPWLTLAIDIYSRMIVGYYLSLDAPSGVSVGMCIVNAILQKNKLLNQFELDTEWNVWGKFDNIFTDNGADFRSFSVEQACLANGIHINFRPIGKKEYGGHIERLIGTTMTEVHDIPGTTYSNIKEKMHYDSEGNACMTFDEFEKWLLIYITKIYQHNIHSGIKTSPYSKWKEGIFGTKYTPGIGYPQIPGDIESLTIDFLPSIERTVQKNGVTIDGLTYFDQILRTKIRGYDIGYETSNSNPKYIFKRDPRDISFIWFYDNIQQEYYKIGFANMEFPPMSLQELNIIKNNIEKTNSKILNEYNILEGYKELYNHVDESIKKTKQQKKMIQKAKNNKKSSITNIINEHITNSIPKNNESDIWDNDIPDFD

SEQ ID NO: 680 - protein, 359 aa, synthetic construct
  REGION 1..359: note = TnsF-Tn7 System Protein
MLVVKVFPREHELLSSWLLRLSHSNGSNIGVLSNFLFDSSKLILNDIDRLLENKDIQKLAEYTDIDSKIIERLTLKNFLSNFSKEPLDSLKKWKWIIPSGTKYTVKTNGLQFCSKCLEEKNTIFYIFNRLSWNVICPIHNQLLQNKCPRCNHQFSPNLKNFNDTFHICSYCSHDFSLDVSDENISTQSLELQIYLNNCIKEKQIVKSNYNLLDKTLFELFYTIRTLLHFTLAIQKNKRIIRLLKEEFKLNDNVLFKNKATLYFDILESDERMKLMHIISRFLKMDIKLFEIFLRISKITYKQFLGSNTAIPESSTIKCLSKNLKIKETHQNKRTHHKIIQPKSKEEVDILMYELEEFLE

SEQ ID NO: 681 - protein, 301 aa, synthetic construct
  REGION 1..301: note = TnsF-Tn7 System Protein
MNNTYEHIHPDFLYLLELNKKDRCYAINEAFVISYPKAKELLQIMSNYMNKPKKHRMQNLLIIAEPNMGKTTIAKKFHEMNPDIKIELNDEVKTIKPIIYVDIQNSDEKEFYVKILDQFWAPYRVTHSKLKLKQQAIHLLKVSQVKTIIFDEIHNILTGSPLKQKIIMDTIKNLSNELNIPIIGVGTKAAATILYSDPQHVSRFDIIKIDRWELDNDFRGLLKSFEKRIPLKKPSNLASKEKATLLYDLSQGNLGHLHKILIACAEYAILNDIEEITLDIIEKFIYLKEAKVSNPKSYASR

SEQ ID NO: 682 - protein, 301 aa, synthetic construct; identical to SEQ ID NO: 681
  REGION 1..301: note = TnsF-Tn7 System Protein

SEQ ID NO: 683 - protein, 848 aa, synthetic construct
  REGION 1..848: note = TnsF-Tn7 System Protein
MGNHTVSGYAAEVLDDPLSIIHAAVQRADPTLSASVLSAALAEAAPSITVQRRLAQALFENPELLTGREPLGPPAMDRLIKALQGHGSAGIELPLCSECHRDVDLTNRQGPLRICGSCYTRQRKRIESCTSCEKSTLTRYRDWEGRPLCAACERRISEVDQLNRLVNQITIINAAVDTGLLREIVERELPKAGNQRRIADELAEHPLRLTTEAAHATAATTGLLRALVNAAIGGFVMPPCPFCNRAVELTTVRERLRSCRRCYEQHHAHICAGCGAARPAASRNASGAPICRSCHNHQPENQDTCPGCGERARLYRLAGQQPRCRRCQRSPITICAFCGKLKECYFADTSTPRCEPCSSKLLRREPCSVCNQIRIVRTRTADGAPVCNNCGLPKALCHSCHRVMTVRAWLPDGPRCKACYRRHPDSFKPCRQCGKLEHLHHFGLCRGCACIAQLRTALGDDTNIIPRLQPVYDALARSSLESTLTYLEGGGSQLLGQLRETGRPVTHQLLDEYRNLPHTRPLRDALVCAGALAPRDEILHTLEEQLHRFLADIDDEEDRKLLRNYATWRLLHKLRTKARRPLTRPQATYARLQLSIAADLLKYLRRHGRQPEEADQHDLDRWQMSNTQAHRARDFFQWATARRHFRRGLLLAPRPRHHGSGAITDDERWKHARRLLHDTSIDRCDRFAGLLLLLFAQPSRRIVTLRTDAITQRIDNRAVSLALGTEPVVLPTLIGRLALDLVVNRYRGRAALAQTSDHDWLFPGVRAGSPMSSQNLNIRFNRVGISAQPARTAALMDLAAQMPAAVLAALLGIEATTAQGWVTEVGQNGAYAADIARRHRPPSEQANP

SEQ ID NO: 684 - protein, 848 aa, synthetic construct; identical to SEQ ID NO: 683
  REGION 1..848: note = TnsF-Tn7 System Protein

SEQ ID NO: 685 - protein, 335 aa, synthetic construct
  REGION 1..335: note = TnsF-Tn7 System Protein
MTHRNAPLTVEGRRRLIERCHDRPIAHVAAEMGISRQCASKWVNRYRKYGDLGLQDRSSTPHHQPTATAAGLVAEIEAMRRSRKWSASRITFELGTDGIVIARRTVTRILRSLGLHRRRFIDPNGETNRKPQVIAAKRPGQMVHVDVKKVGKIPDGGGWRAHGRGSDKAKRSQRRKTKNKQARIGYTYLHSAIDGNTRLAYTEARDNETAATAIDFMNNARVFFAAHGITRIERVITDNGSCYRAADFTVSLREARHYRIKPYTPKHNGKVERYNRILAEELLYSREYTSEAERRTAVEIWNVHYNYHRPHSTRGGRPPAAYRRHRVTNVRASYT

SEQ ID NO: 686 - protein, 309 aa, synthetic construct
  REGION 1..309: note = TnsF-Tn7 System Protein
MTSNNGVVLDVDGLRMQYDTTDVLRDVTFHARRGEVLVMLGPNGAGKTTTIEILEGFRRRSAGRVTVLGADPEQGDEHWRARIGVVLQSWRDHAKWRVRELLAHLGAYYHPYSTARVQRPWDTDELIDLVGLTEQADAKISTLSGGQRRKLDVAIGLVGRPELLFMDEPTAGFDPAARRDFHDLVHRLADLEDTTVLLTTHDLDEAEILADRILILAGGRIIADGSPDELSRSIAGEAQVSWTVDGHRFVHTTTESTKYVHELFKQHGESIVDLEVRRASLEETYMTLVKRAESGEATEPVHTLTEVTR

SEQ ID NO: 687 - protein, 309 aa, synthetic construct; identical to SEQ ID NO: 686
  REGION 1..309: note = TnsF-Tn7 System Protein

SEQ ID NO: 688 - protein, 433 aa, synthetic construct
  REGION 1..433: note = TnsF-Tn7 System Protein
MRITASSSDIAAPSGPVPSSSRPPVPSLTGWPGSEIMADPITARVLFSVWSGDPAVVVPSPPGAGKTRLVALLAAALAHRADLRVGIAAQTREQAVEIARRLGTLTDRAALMWKAKAPAPDSGDTPVVSGQKVRWQGDVGAILIGTTARWLFSDPDRVGADVLIVDESWQCTYADLGALGAMAKQVVCVGDPGQIDPVVTGDVSRWEGSETAPDLPAPIALLAAHGDAVGMVRLAHTWRLGPDTTALIAPLFYPDLPFTSKRPPEHLTDSSGAVWPELAHRPITACGGPSDPALVTACAARAAELLAADLVTTAGQRPMTAADVAVVVPHVTQAAAIRALLSEHPDVLVGTANSLQGLERPAVVVLHPLAGYRTAEPFNLDAGRTCVMLSRHRAHMSVVIDDTTASVLAHGAPSPALEVQTALLAALHSTPAV

SEQ ID NO: 689 - protein, 433 aa, synthetic construct; identical to SEQ ID NO: 688
  REGION 1..433: note = TnsF-Tn7 System Protein

SEQ ID NO: 690 - protein, 340 aa, synthetic construct
  REGION 1..340: note = TnsF-Tn7 System Protein
MLRGWEQQLLGGRRMAQRTVRAYLGTVNRFLAFTDEYPWLWTAAHFDEWMAELVGARQRKKSTLRNYQGAVRDFCTYLTSPHYKWPEECEKRFGTHPVQICHEWNTVGHLVDYEGDPDRRPLNRTELQQLLDYADDRVGLAVKRGRKGALTAYRDATVLKVAYGWGLRAREVSRLDTTDCYRSPSAPELGSFGQLHVRWGKASRGSPPKRRMVASVMPWAVEALQDYVANIRPRFTDRADGPLFMTERGTRLQPREIDSRFADYRDALDLPSTLVPHCLRHSYVTHLIEDGADPKFVQEQVGHRFASTTAIYTAVSGDFMNTMMRRTLERGLSADEEWMD

SEQ ID NO: 691 - protein, 96 aa, synthetic construct
  REGION 1..96: note = TnsF-Tn7 System Protein
MATRGMFSTSDLKPLLADRGIALSTSQVYRLVVERPERLSLNTLVALMDILDCRMEDLIEPVTATARRRKAAGANETGSVGDHRPKRARIIGTNEP

SEQ ID NO: 692 - protein, 645 aa, synthetic construct
  REGION 1..645: note = TnsF-Tn7 System Protein
MEIIRACQDVMPDLPASVITASAQQAGGPKALVRLARELSAKPDVLVSGHSDALPTTRRLIRDLRRQGHFLFQLPKCSSCGLTKQLRHRDGQGGKHCDRCSRNARNPDCSGCGQKRPGGYRLLAGNPYCRACFRGDPRSKETCIACGMAETPEARNLAGPVCRRCYTAPPVTCVVCAENRPAASRADGRAVCMRCYLRRNRRPRACSSCHEVRISPHVSEDGPICGECAGVGKSGCCHGCGGDQQKLHGVYCAKCLLPDKVRGLITDQNGQPHPKLKPLETYLLREDGNAQTILTWVLRSPMAVVVKAMATGNTAISLRAVAELPNARATGYFAALLMEAGVVPVDNFDRVRLEVWQRQFFASLTKPDERSLLQRYAAWAVNPQFSNEAHLSKTDESSRYRQSKAHLIAVTEFLQHLDSLGLSLESTPQRLFDNYVVTHRRGRAALTPFIRWARNQRLTRLRSEYLPQRSPGVTAVSEDQRWEWVKYLLNADDLGFAARVGGLLMLLYGITATRVVTIQLDDLDIDSDTIRISLGSDPIELPEAMTSLVRQLLDSARRASTGEHIWLFAGRKPGRHLTTAAMTEPLRRRGINSRAGRSTAMINLARDIPPAVLASLLGISIHTATRWSALSSRDWVDYPRIRLAE

SEQ ID NO: 693 - protein, 645 aa, synthetic construct; identical to SEQ ID NO: 692
  REGION 1..645: note = TnsF-Tn7 System Protein

SEQ ID NO: 694 - protein, 1010 aa, synthetic construct
  REGION 1..1010: note = TnsF-Tn7 System Protein
MAGFNEANAVQHPILDLLVAAGWKHIPGHQLDRHTEDVLLEADIRAALARLNPAIAEVPERAAEIFTPLRSMMLSAREDGLVPTNQHFVEWLRGQKTHRFQGRDGFDPVQLIDFTNPANNILVVSDEVTFGTPGHSCRFDLVLWVNGIPLVVIETKTRLDARITWLKAAHEIHAIYEPGWPEFFVPNAFSVATDGKDFHYGGVGQDIESWGVWGSTEEDILPAGWPRVKRSVELMLNPPTVLSVIADFTAFELKGKHSGLPRLHKIVPRYPQVEAVRAIHARALHGTKRQGLIHHTQGSGKTLAMLFAAVKLVNEPRLKNPSIILIADRIQLVTQMYRQFLRTGMPSLEAPESAPDLRRLLSEDRRGLVFSTVHKFRNAGVLNTRENIIVLIDEAHRTQEGQLGKFLRAAFPNARFFGFTGTPIADEDRNTYELFGDPDDPNHAMNTYDSDRSIADGTTVPMHVSPRLVDFHIHKADLDKAFDELAAEEGLTEEEQEYVAAKATDSRTFFANPERVRKVCADIIDHFYSTIDPLGMKAQVVVFDRGLCVAYYEELTRQLQARAPDGASPDEAAVVMSVQTKDHTDWQKFRLSDEKEEALLNRFRQLGERLKFLVVTSKLGTGFDAPIEGVMYLDKPMKLHTLYQTITRTNRNWKNPTTGQEKRYGLIVDYVGLGDGFARAMSPANPEHARKEIETDSLLEQFEFEIANVLDRFAGIDRTSSGFEALQAAHDRIPDDKAMERFAAQYGMLQGIWEAAYPDLRLEAHRDDYRWLSKVYASVAPADDTRDLLWHRLGAKTLELVHGHIGEVTVSDTGVDVVIADEGTIKRLIEAGVIDPSAGTGDTQVTTAGEVIDNIATRLRKRLEGAQGSHPAYKTLAERLERLRERQLAKAHDSVDFLRDLLDLARDLAAAERAENEAGAEGLDLLPDPNVGALTQIFEEYKPQDVPVIVGKVVSDIDAIVKEVRWDGWNNTKEGDKAVRIAIRKVLLRYGLPAAGELFDRAYAYVSENY

SEQ ID NO: 695 - protein, 369 aa, synthetic construct
  REGION 1..369: note = TnsF-Tn7 System Protein
MQHFLGVTQLRRAAGSDSDLELLHPEEAVFESMLGSWTQQQQSRGLAEDTIKGRLGIVRRFCDYAGSYPWQWQASDLDEYSGMFRSKGRAVSTIRHMHNALSLFCDYLISPDYDWVEICEARFGDTPSQICLRWNTTRHVQDYEGHPSRRALTLEELQNFFDYADARVESILTSGRKGALAAFRDAQMFKTAYAFGLRRSELRGIDLADLHFNAKVPQWGKYAALSVRFAKSSRGGTPKRRTVLLVPELAWWIDGMRQWVEEGRDLFAPAELAAMWPTERRSRVSREYLDRRFAALRRESGMDPALTLHCLRHSYVTHLIEYGYADRFVQEQVGHMHASTTSIYTSVSGDFKNRILADALRRFNTLEVS

SEQ ID NO: 696 - protein, 86 aa, synthetic construct
  REGION 1..86: note = TnsF-Tn7 System Protein
MSTGVETVWHLRRIMAEHGLFKTTELIPLLEQYGVHLSREQVFRLVTQTPERANLHVIGAVCAALGCTPSDLIEVRIVEEKTAPVE

SEQ ID NO: 697 - protein, 884 aa, synthetic construct
  REGION 1..884: note = TnsF-Tn7 System Protein
MDASALPRYASDPEGVIAEAVVAVELAMPAELIGSVVRATFPRGAQRRKLAELLQRDLSWLTQGRSESPAIVERFVRALREQGAVHVQQPRCGACGQARLLVGVLPGSGSRICNTCEGRRRHEANPCAVCGRHEFRTRDREGRPRCRAHPPDDGVDPMDGLCQVIQQICPTLPEQTVAEAVRAVEPVTARQRKLLWALEDRPGLLTGQGAQGPVKALHLIAALREREAVNLVVPGCPYCGRNVPLPRTRNGLRCCAECRSAARAEPCAWCGRDRPVMGRTHDGLPLCQTCRQRNPVVHQICAQCGERRYIQAREDDHPLCGRCHQYPTAACSECGERRPCLHVSTDAPICFSCTRKRRPRAICVGCDRDNQISYRTADGEPLCSSCGATHRPCAQCGRTLRIHAIAPNGDELCPTCWRHHPARKRPCSECGTATHLHHYGLCPDCAARARLREVLSVEGRMRPGIEPVFKALSRQPGTNLLYWLNRRPARRSVLRALAAGSGPVTHDTLDGMRPAKVIDNLRMHLVAGGALPARDEQLAALERWLAARSAQVRDPESHKVLQAYIAWHLLRRLRRFAHHRPVSQAQAHGVRAYVTQVVRLLNWLHTQDIALSTCTQDLLDTWLDDYPARGPRVHSFLAWTSRHGHTRQLTVELPIPTFTGQLIAQDTRWQLVNRLIHDDEIPVPDKAAGLLALLFAQDLSRIVVLTAKHVEVTPSTVLLRLGQVPAQMPPPLDGYIRTLHAQATATDTAGERWLFPGRFPAQHLSRSQLVCRLHPLGLRPRMARNTALVELASELPALVVSRLLGVHQNTADSWNRIGGQDNAYAAEVASRPYPTPPTCLSSPPRRAGSWKGRGCCAPRSGRPRPPPDLIKLSDFRDHRDPVGP

SEQ ID NO: 698 - protein, 884 aa, synthetic construct; identical to SEQ ID NO: 697
  REGION 1..884: note = TnsF-Tn7 System Protein

SEQ ID NO: 699 - protein, 108 aa, synthetic construct
  REGION 1..108: note = TnsF-Tn7 System Protein
MRKVLDKALYQMFSTTDLRPLLAERGIDLSASQVYRLVVERPERLSLTTLMALLDILQRRMEDLIEPTAARAASRRTAAAGGEGTAAGPAAGVGEYRPKRARITPAGE

SEQ ID NO: 700 - protein, 819 aa, synthetic construct
  REGION 1..819: note = TnsF-Tn7 System Protein
MTSAPAVPLPEPDDIVVSVVAGVEPDLTEKVVRQAVADAAASRAKRRRLARALTDDPDLLTSGRPEGPPVVGDFIRSLLAHGSRRAVLPKCADCGSVKKLTSLRADGKRVCGPCAHNTRAASLSCVECSRPARIYRRTRTGEVICRDCFQMPDGDPVALISAAVTAVAPDADPATVRRAVESVVPVGNVYLMFRLLWEIEDTPGMLTGEGAKGSARAARLITALTDAGIAVTAPACHGCGEVRPLTHVFDGHRCCLLCYRKANSAACGHCGKERPVATRRPDGTPLCSACTRHEADHLIICVLCDRVRPVGRRTEDGPLCRACFRPTLRTCSFCGKGPRRCYRAATGMPRCDTCSRTRRTCVGCGKNKYAAARTEDGHLCETCWQRNPISFNPCRLCGTIEYLHSYGRCHSCVRDQLVRDALSRDGAMPPRLQPVHDVLIASGAMAGLKLLAKPSTRTILYALVDGTCPLTHEGLDALLPNKSVAFLRAALVTAGALPARDERFAALEQWIASTTEAVTDDSERKLVRRFATWHHLRRLRREATKHPVTATQTTAVRASIRGAVALLVWLREHGTELGLCSQVHLDEWIDSGSTTRYDARGFVEWCRKNRHIGKGLEIAAREKLSHVRPTDEDERWALSRRLMHDDGLAIEDRFAGLLVLLYAQPLTTVSQLPVTAVIVADSQTSLMLGDSPLLLPDPLDKLARQLLARRRGHVTIGASSDSPWLFPGAFAGQPLSNEHLGTRLKRMGIYSRPGRTSALMGLSTQLPAAVLTELLGISPETATAWTQEGGNWARYAAELPGRPRPASPQPGPGCLRNPD

SEQ ID NO: 701 - protein, 819 aa, synthetic construct; identical to SEQ ID NO: 700
  REGION 1..819: note = TnsF-Tn7 System Protein

SEQ ID NO: 702 - protein, 906 aa, synthetic construct
  REGION 1..906: note = TnsF-Tn7 System Protein
MIPSEARSFQHRAEADRLRAAVESGGTAVLTQVLTGMGGVGKTQLAADYARAAWDDDGLDVLVWVTASAQSSVVSAYAQAGVELCRADPEDPEQAAKQFLAWLTPKPEQRPCRWLIVLDDIADPSDLIVHSNAPGNRYSLWPPASPHGRTLLTTRRRDAALFGDGRRRIEVGLFTPDESVAYLTAALNAHGRTEPADQLTTLAADLGHLPLALAQAAAYLIDSGEAAATYRSLLADRATKLTDLAPDALPDEQATALAAAWSLSIDRADILRPAGLARPMLHLAALLDANGIPQSVLTSEPARIHLAAHRTTTGPTPQPAPVSCSDAVRALRALDRLSLIDHQPDTPHQAVRVHQLIQRATREDYTPHQHDHAAHTAADALAAVWPKTERDTALAQALRTNTDALIRHAGDGLYRPDTHTVLYRLGRSLGESGQVTAAIDHFDHLAASARSRLGPDHPDTLTARGNLATWRGESGDVAGAVQAFAELLADMVRVLGPDHLHTLTTRHNLAAMRGEAGDVAGAAQAFADLLADRMRVLGPDHPDTFAARGNLAAMRGESGDVAGAVQAFAELLADIVRLLGPDHLHTLTTRHNLAAMRGEAGDAAGAAQAFADLLADMVRLLGPDHPDTLAARSSLAAWRGRAGDAVGAAQALADLLANRMRVLGPDHPDILTARHDVAAMRGEAGDAAGAAQALADLLADMVRLLGPDHPDTLAARSSLAAWRGRAGDAVGAVQAFADLLADMVRVLGPDHPDTLTSRGNLAAMRGTAGDAAGAAQAFAELLADIVRVLGPDHPHTLTTRHNLATWRGRAGDAAGAAQACADLLASRMRVLGPDHPDTLTSRGNLAAWRGEAGDAVGAVQAFAELLADMVRVLGPDHPHTLTTRHNLATWWGEAWDAARAAQTLAD

SEQ ID NO: 703 - protein, 906 aa, synthetic construct; identical to SEQ ID NO: 702
  REGION 1..906: note = TnsF-Tn7 System Protein

SEQ ID NO: 704 - protein, 375 aa, synthetic construct
  REGION 1..375: note = TnsF-Tn7 System Protein
MSNGVRPPITGAARLELVDGVALLHPEDAVFEAMLSGFAKQQRGGRRLDKKTVKGRDGQLRRFALFTNEYPWNWTASHMDEWMMSLISEKGLAHSTLRSYQLTVRLFCDFLISPAYEWADECEKRFGTHPVQICHEWNTVQHLTDYEGRAERRPFTREELQKFLDYCDDRIDVAARSRRKGALAAYRDATLFKVLYGWGLRRNEGCKLDLVDFHRNAAAPELGRYGMLQVRWGKATKGSPPRRRNVASVMPWAVEAVEDYVVNIRPRFGVPDHPALWLTERGGRLQPREVNDRFTTYRDAIGLPPELTPHSLRHSHVTHQIEDGVDPKFVQDQVGHRYASTTAIYTAVSGDFMNTMMRKALDRAFERDADMGGTG

SEQ ID NO: 705 - protein, 110 aa, synthetic construct
  REGION 1..110: note = TnsF-Tn7 System Protein
MTAKLDYTWRLREIMAEQGMFTTAALQPLLAERGVTLSTSQVYRLVTEKPERLSLKVLMALLDIFGCPMDDLIKPTASARATRSKRTADGTEAGIGTLRPPRARITGPEK

SEQ ID NO: 706 - protein, 253 aa, synthetic construct
  REGION 1..253: note = TnsF-Tn7 System Protein
MSINGHYHFFLALDITWGAVPSYEQLVQHFGAAGLRKAESPMRWLTEVGEVVVSVEIREQLTEQRRLEAILAEPADSWSAQLLKEYVAALKGKMEHSGTDLRSIRLAARAAANLLKNAQLKLGAMPSQKALESFWRGAPGQVAAATGFVGHLNKHHGLELKARPDPRWLAGAKRQKAERELVALLSEVEHETFEERWIVKGLAYFHGVTRASRKSLVYQPQVYRGVAGFNVTYEQQVLWVPSASSYQRGDHSD

SEQ ID NO: 707 - protein, 549 aa, synthetic construct
  REGION 1..549: note = TnsF-Tn7 System Protein
MKGDHLVWWYGPIQQNTRPRSIPLVTVYFRKLIDDEPGAFSPAVVPLSSLPHYRKGSIWRDGKCISSTELEQERFDVDFNEGGWSLTSRAELLRRGNAHVFHDSDYPLKYPQDHGQLLSFKIGKDEKNLLIPCTEYFVRAYARNMEVCRAVATLRWSDVRSVLFDEPRRHEHRWLVKPSRLMRNYDAVFLAHLLYDDYAEQAVKSINAQFISKDPSSKIFLKATPWFQGKGQFLCRGRWINGGNTFLCLDLVGSNQPDGQEIEWQRMKFDSSEGPEGGRIVLPRPLRTAEAEEFIGEHSHAEPDSHSEIIIVKTPPFKLLGAKRKVKKTKHVIKTDRGRLGPKPSEASSHSSGEGSGAGKNVGKLEHGAEAELETHGFLYDIWNAFKSIMAANPDRVSHVNWYTPSRFREQSPPNLILLQPPVEWPSDDKSCRGWVYLDRETGLRRGLLVLRIQVDGQNYFCFEIQPDKPHKPAYSGVLMKSHVATHGEFEDFVEKLCSRVRFVVGRFKNMESFFPTGAKIFKHHQKDAKVLYRSRLINAFKEIGVELE

SEQ ID NO: 708 - protein, 253 aa, synthetic construct; identical to SEQ ID NO: 706
  REGION 1..253: note = TnsF-Tn7 System Protein

SEQ ID NO: 709 - protein, 191 aa, synthetic construct
  REGION 1..191: note = TnsF-Tn7 System Protein
MLERDFLKRMRFSHRVESVIAQPVRVDFIDALGRAQTYTPDFLVHYRQPHGVDYMDYFKPMLVEVKPAYEWRKNWRTWLGKWKAARRYARNEGWTFSIYDESRIRGLPLDNITFLERFERLDFDREDIDMVLKTLHEMDFAPVHYLLARHFKGVYRDRGVALLWHLIATGRVECDITEPLNEYLELWVATP

SEQ ID NO: 710 - protein, 640 aa, synthetic construct
  REGION 1..640: note = TnsF-Tn7 System Protein
MNIYEIDTDEHLVPFEPSRERVSVEVGEMVRRDKQVYRIVQLLDFQNVVGVEVETGRSVSLRIPELQPVEQERVDGLFVNYDISTISSDEWAVAQQRFSAIKPLLRDSVLPRSSVEARAKEVGVDTATLYRWLDRYQSWQEVLALVPRKRGWQTGNSRLSAQADQLIDEVVDKHYLTTQRNSVQSTIKEIETQAKALGLTPPSASAIRIRIKRIPEKIVLRRRGYADQARNRHTPSVGQFPGADYPLAVVQIDHTPIDLIIVDDRHRKPIGRLWLSLAIDVHSRMVNGYYLALEEPSEISVAMCLAHSILPKEDWLNLHGIQGEWPVWGFPRVVHSDNGPDFQAENFRRSCSNYNIENQFRPVKRPKYGGHIERLLGTFMRELHALPGTTHSSVAKRDGYDSDKHAVLTMSEFEEWLVRSIILYHNNYHSAIYMSPARKWHLGFFGSREADALVSIPPRPADPLTVQLDFMPSYRRTVQHYGVQLDVYYYSEALRHWIGTTDPETGQARKFVFRRDPRDISVIWFYDPVLKQYFRVPVANQAFPAATLWEFRAAKKQAVDEGRMHIDETLIARMILERRQIVETASANTKRARRDAQKNKVHSKNSTPARPVKMPVDAPPSIPAIDGLLLDDVDLIGDIQ

SEQ ID NO: 711 - protein, 209 aa, synthetic construct
  REGION 1..209: note = TnsF-Tn7 System Protein
MALAASHGLTVTRDGRDYAGFKCESGKRLRVHFEFNDRPPKEPKGNRSRLSKDTTGIWIYALVAHSKDGERKACYVGQTVNLRKRFQEHLHHPREGRCSYALFQWAAHEQVDIQAVVLTWTSGTDSNAHYYEGYWLQRAQNAGFETPDVHKWGGLPRPESLPGQPGHWPTGEVEANSISLIEVVMQKLTPVVLYPDAGTIGNGDSAARA

SEQ ID NO: 712 - protein, 349 aa, synthetic construct
  REGION 1..349: note = TnsF-Tn7 System Protein
MPDELFSSWLIRTAHVHGCSPSTLTASAWSKPHAWGADLDRWHPWADFKVLSGIVGLRPQTLLACTLWRVMSDLHPYLVTARLGNVPWILPLGCRSHSHAGGLMCCPCCIDGPTPHYQLQSRLAWHTVCPWHRVLLIDRCLRCGVALQPARLQPGHPLSECHHCGQSLAKKSFGPSIESALEFQRFADLASGSSPLFGDRPLSFPEWMAVARLIISFLLNAIRHPSAGTLQFCRAIGVEISLLQPSSLGLPFEYLSPAERSVLLGQTWVIMQAGPERFMELASCTQLPISAFPSLAKGAPEIAREMLSVLTRHSQHRPGRQGQRQSHTPLDVWQMWHRLQRRTHRNGIS

SEQ ID NO: 713 - protein, 1699 aa, synthetic construct
  REGION 1..1699: note = TnsF-Tn7 System Protein
MLGERLVQWPIDHDPSIDEDWLNRCDTALLTQEGELSYFRLWDARSARAWTAIRAPVESPAACQRLERDYRLRLDPEWAVTPCAFVRSAEGPLLVYPAGESLAEVIAQGRPTLRAFLQIAVNASKALAQAHQAGVLHGALQPQHVVLLADNRVKLGGFQADSGERISDQGTATDTWSFLAPEQVCPHGASSDRRSDLYALAAILYQLLVGELPLAGRDKQHWRQLHAGVLPRPAAELSPDVPQAISLILAKALAKEPDARYQSAQALAVDLAHCQRQWQASQTIATFTLGCSDPMPCTHERLYGRSSELQSIARILKTLRRDSTAQALFISGATGMGKSSLVKAALRDHDAGYWAAGKCNSLEQAIPYAPWVDILGALTTQLLAKNRADLETIRSQIQQRIQNRGRLLGTLAPELKLIIGPMAEFPQQPSRLALEKELRAIVDFLQLFTAPGRPLILFFDDLQWADDASLHLLRELLARSPANLLLIFASRCNAAGNPAGKAYELANSTHLTPLHSHHLELLALPVDAVAQLISERYHVTTDDARQVAELVHAKTAGNPLFARQILKAMVEDKLFTFDPLAMRWSWSLEAVAQHRYADNVADLMIHRLGRLPAAQREILRVAGAAGGRFDPPLLAKLVTIDHDRLGEHLNALLDAGFLAASQHGLSFSHDRVEEAAYLLTAAPERAAQHAQIARVMKYVWRNALADAVFEIANQVQRAEKSVFSTEECEAYLILLMEAARRARDSASHEQAAGYLNAGEELLQTCGSPAVDYRHAFSLACMAAECDMLLSRMSQAQQRIGECSKRAHSPLDQAIACKLRARFKTLHSDYDAAINDALEGLRLLGIELGRGNDALQVETQLRSIQALIEQRGRHCLEALPKAESETVIVAIGLLATLSCSFFIDDDIRYLHLAKILELTLAHGVAPGSTYGLAWFGVMAAERFGAYHDGHAYCLAALKLIERYGFEVDLTSTLLALDQVSAWTASMDFARRTAQQAIDSGRLSGDLAMACYACNHLVSDSLVMGQHLHSVAEEIQLGLATVRQYGYRDIEQILLAQQAFVSALREGGEAHRDSLESALYDALETHATSRTTLFFKRLFEGMSAFYLGDINQAVVALERAAPLTWAAPAHINLADYHLFCGLTLGSPEAPGSLEHKREQLSRLRELFSQWAQFNPVTFRNKLLLIEGVIAKLDGDGLAAIRCFDQAQIAATAAGFIHEQALAHEQLAEVCIPSGLISGANLHLRIARDCFHIWGAAGKVRQLETLHPFLRTQPIQETYRSTSQASLDLEAGIQAARALSEEVLLEGLIETLMGHLTLHSGADHGALLIVSGAEFQMAASAAISDGGLQVSMEDCQKFITQAPLSIINATMRTKKPLLLHDALSDCPEAFRHDLQARGARSVLCLPLVIQGVLIGLVYLENRMVPNLFGSQRLAMLEILASQAAVSLQTAKFYTRLAEDNQARAQMAAELRHSRAELARSSHLQVMNELSASIAHEISQPLLGIASNAAASLRWLKREQPNLEEAIDGLQDIRADSERAASIVKALRALAKQTPMQLKVARLDELLEDVIRMTSSDALRAAVKVQAQLQPGVSAKVDAVQIQQLVFNLITNALEALSDFRPDGVLQIACTLGEAGVEISVDDNGPGIAPEEQGRVFDAFYTTKASGLGMGLAICNSVVQAHGGSLRVQASTLGGCRIVVTLP

SEQ ID NO: 714 - protein, 1699 aa, synthetic construct; identical to SEQ ID NO: 713
  REGION 1..1699: note = TnsF-Tn7 System Protein

SEQ ID NO: 715 - protein, 296 aa, synthetic construct
  REGION 1..296: note = TnsF-Tn7 System Protein
MTEYAHLHADFRPVLQLSARERIRFMREPRWIGYKAAHHILDSLECLLDAPKRPRMPNLLIVGDPNNGKSTIVQHFEKTHGQGYVDENSEPVRPIILAEAPPSAEEKDLYAAILEKMWMPYKTTDSKLTLRYQVIHALRELKVRMLIIDEIHSMLVGPATKQREVMNALKMLCNTLVIPIVGVGTPNAVQILHLDAQHASRFDVIKLENWKLNADFQRLLKAFEAILPLKHPSELYKPELAQLIHSISGGNTGDLHSLLIECAIEAINSGKECIDRQLIESKSWKRPTRGIRELIV

SEQ ID NO: 716 - protein, 296 aa, synthetic construct; identical to SEQ ID NO: 715
  REGION 1..296: note = TnsF-Tn7 System Protein

SEQ ID NO: 717 - protein, 766 aa, synthetic construct
  REGION 1..766: note = TnsF-Tn7 System Protein
MRPLTPDQLRLRAELAAAQEQVVTLLRSAVGESLAPEQAQAVAEEARAWRGANAFRLVRYLSDKPDALSLPSSDCPTCVVRLLAALTAVGHGDKVALVPCGDCGRTDPLPTNNGPAGRLCSRCAGRRAKKPCARCGKVAGIYARRPEGGICNPCRNKEPDAKEECADCHRMMISYRRLPDGSSLCQTCAPKNTQTCCRCGRVRRVNALTSDGPVCGGCYSSPARLCGVCGQIVPIVARADGTRPDTCDRCYKRHEKTCAICERVRPGHHINGGLGPFHCDTCRPREECACALCGQVAKVKVFWPRGPVCNSCYRTALSTPAPCASCNRQRILIGQTAEGTLLCKACSFPDEPVERCSACDEPADLYSGRRCPRCTLAARVTDLLSADGASVAQPLQPLASVLTGADNPYRVLQWLRRSPAAHLLGRLALDPEALNHESLDTLPQRAATAYVRGLLVTAGILPPRDENLALLANWVARTVAELPARHANLIRPFAEWHIIRDARRRSSRGRYTYAAHKGDCGNVLAAINFLNWLGTQHLSLSQLQQRHLDTWAIERPTLRSRSIPFLRWSTARRLCPPDLVIERSAAQLPGHFQAEEQHRKELLRCFNDTALPLEVRVAAALVRLYALPLTRIVELTDDHIRRDQGHTYLTVNHHPFVLPPKLARLIDDQLQYSPRHSNTAGCRYLLPGHSPGRPRNPLGLADTLRHHGLPARAARNTAMMDALVDLPPMVIADLLGIHPKTAERWATLAGGNWSEYLAAQRAAPQS

SEQ ID NO: 718 - protein, 382 aa, synthetic construct
  REGION 1..382: note = TnsF-Tn7 System Protein
MSIPSPRGEREKLITALTPKLRRHLKIRAFEHGMDIQDATEHAIKAWYTATEVPEVSTDGAKTWGTFLPEGEPDAFKAACTDRGVTYVKGLAQALTLWLDAHPSPTSPLTAQPVVRVIVANQKGGVGKTFISSGIAQALAEGGRKVLIVDYDPQGHLTSELGFEDLMYEDDVETLLMHMDGTAKGDIHDLLVALDQERFGERLHLLPASDDAFMRDVALSKVSFSEAALERSLEPLENEYDVIIIDGPPSLGLNMDTALYYVRRREGELADRSGVITPVWANKASHRAFRLLKSQMEDLCAKGRIQVDYLGLVVNAYDSRRGKLVKENKDEWEKSSSPPVLAVIGDLKEGREAADGEIPLLEYAPDSEHAQAMRDLAKELAV

SEQ ID NO: 719 - protein, 370 aa, synthetic construct
  REGION 1..370: note = TnsF-Tn7 System Protein
MVAEAPGSVRLALAPNVVLLDPEPAVSSAMKEGWARQQSARFLRASTIQPRLRLLQRFEEFTGLYPWQWTPADGEAFIVHLRSGAKPIQLSTARSYEVVIELFVEYLLDRRYGWVETCQERFGLSPQVIFHEGNSVLHSVEYEGDPRRRPLTYDEVQALFDAADARPRRIHGQGRKGTLTALRDAAALKTIYAYGTRRTESSKVDLVDLRRHRKAPQFGQAGSMAVRYGKSSKGTPPKRRTVLLVPEMDWVVDVLDEWVHEIRPRLSPDRHPALWVTERVGRMSPRSINEAFVTARQDAGLDEDLDLHCLRHSYITHLTEFGYPARFVQEQVGHTHASTTAIYMGVSDEYRNQLLEASLKRRLGDDWDLK

SEQ ID NO: 720 - protein, 766 aa, synthetic construct; identical to SEQ ID NO: 717
  REGION 1..766: note = TnsF-Tn7 System Protein

SEQ ID NO: 721 - protein, 315 aa, synthetic construct
  REGION 1..315: note = TnsF-Tn7 System Protein
MELSPAHEQATPTICARELSKRYGRRQAVSGLSLTVEAGQICALLGPNGAGKTSTMRMLVGLSSPDTGSARLLGEPVGLGADVLRGVGVLIDGPAFVPHLTGRANLRLLWSATRQAWPPPALDDALDLAGLGEALDRKVKGYSMGMKQRLMLAQALMRKPDVLILDEPANGLDPGEVRALREYLGELARRGAAVLVSSHQLAEVQQLATHVVVMNHGRLIAAGPMGELLGAAGTYRLQVDDPEKGAAVLRALPGVASATTQRDEIVVTAPGELSRDLVRALVTEGIGVTSVQQESKSLEEAFLTMTEGAGEHAAR

SEQ ID NO: 722 - protein, 315 aa, synthetic construct; identical to SEQ ID NO: 721
  REGION 1..315: note = TnsF-Tn7 System Protein

SEQ ID NO: 723 - protein, 108 aa, synthetic construct
  REGION 1..108: note = TnsF-Tn7 System Protein
MIKKMGYEWCLRATMAEHQMFQTSDLVPLLAERGVTLSREQVYRLVTQPPQRMSMDTLVALCDIFECTPNDLIKPKVVNAQVKKTADGQAEPLPLKERRTTIRRPGQP

SEQ ID NO: 724 - protein, 856 aa, synthetic construct
  REGION 1..856: note = TnsF-Tn7 System Protein
MTDPESPRSLTDPVGVVLAIVGTVEPDLSSDVVEEAVRAVATSRTGHRQLARILETDPGVLLSGRTDGPPLVDRFIRHLLAAGASQVVQPRCPDCGRAAARMSHRDQQGRRVCTGCRNRGSGIFEPRPCSACGTVTRARHRDREGRPLCVRCPPEPGVDHVEVISDVIVAAAPGLDRGWLRTVILGVVVQPARQRQVAWELQDRPELLTGAAAEGTLAVRRLAAALADHGVEGMAPATCPGCGKHQPVIRHQDGTISCNTCYQRARATACSRCGIVRSVVARTPDGGPLCSSCRPLVSYNQRTCSLCGQRGVIGGQADGAPVCVGCYRLPTAVCSVCGRDRPCYRANSSAPRCLPCCRAARTAVCARCGKLRQIAGRDPDRAPLCRPCAVRREACCRCRRVRPVVGRVQDGPLCWTCIETEPAYFRACADCGVIGRTHHFGLCARCAAPKVLRTLLAGADGTVRDELHPALDALGRTEPAPLLEWLSRTSSRSMLAHLAAAQGPLTHATLDDLTPVAAAHHLRHVLIAHHVLPTRDRHLAALQRWIDQTLGDIDDPDHRRVLRHYVTWTHLRRLRRRRTPVTPGAAYSVRNEVSVAIRLLEWLSSRGRNLSTCTQTDLDTWCLAIGRPAHKARSFITWCTASGHTRDLDIRARGDHGRRDTLPGEDTRWIIARRLLHDTTIAVPDRVAGLLVLLYGQTPSRITTLTADDITHFRGEVHLCLGPQPLALPRPIAELVLTLADTRRGHVSLGGRTDEQHRWLFPGRLPGQPLHTATLARRLATLDVHSRISRNSALMGNAASVPAKALSSLLGLSIVGAQRWIKLAHPSGDDYAATITRRATADADDSDAASCHSPCE

SEQ ID NO: 725 - protein, 856 aa, synthetic construct; identical to SEQ ID NO: 724
  REGION 1..856: note = TnsF-Tn7 System Protein

SEQ ID NO: 726 - protein, 176 aa, synthetic construct
  REGION 1..176: note = TnsF-Tn7 System Protein
MGCVPRESSRLDTMDWYRNPQAPELGRFGNLEVRWGKASRGSPPRRRTVHTVMPWIVEVVDDWLTNIRPRYGFPDHPAVWLTERGGRIGSRHIEQRFADYRRALGLDETLVPHCLRHSHVTHQIEDGVDPVFVQQQVGHRYASTTAIYTGVSGDFMNTMMTNAIGKALSAEETNAW

SEQ ID NO: 727 - protein, 1399 aa, synthetic construct
  REGION 1..1399: note = TnsF-Tn7 System Protein
MTQLPEINWRQLRGKSPSGSQRDGFEELVNQLMIFGGLVAWPPGTTFSVFGNPDGGREGRGELPGGAVWAWQAKCLFELDTDEFGQITKSVRRVLETEPMLERYFVLLPLNLPAGDTPKTKSAWTKWNEYVAKWQVMAEAAGRTVTFEYVGETQLNSCLLQQSQVGRLRYWFDLDTFSEDRFRTIAARAEADAGGRYTPKLNVKVPIAAAFDGLARTPAFEHVIRLALAALRNARGTYGLPTPTEQPELFEPAIATLNECLDHLEEAVTGAITQACHPKGTLPDVISAIDATNDPVDSVAELLRQHCLRDRHYTGNAASLYHQISSIEAAIFGLRELRTGRAWQSYDQTAILMTGTGGSGKTHLLCDLARTRTANNLPTIIVLGEQFERGPIETDLGRIIGFSSPAGQLLATFEAACQNAGTVGLIIIDGLNEPADRSVWNKYLHSFLNETAEYRHIRVVLSCRTEFLADTLSDPLRQRLHTVKHTGFAEVSRDAVRQFLDWYGIERPSFPLLDPEFTNPLFLKLLCTTLQTRGEHRFPRTGFGASWIYDSFLDAINDRLAAPERCDYDRSSALVRRAVEQIATAIQTHERRLPRAEVENLTASLLPGRGWSRSLLNGLLKEAILADLLIDGVSYIRFGYERLGDIAWAKLIAADDLATVAERTASMAQRWYRNAGVLQALASVLPETHGIELIDVLSIPTGEYHPDTHTDFLLSIAWRKPDALTARTEAILVELQSNPDVADAANSALLQVATVPGHRLNAEWLHGQLRRLTLPDRDVTWSHFCDWQHDSAGHLPNLISWAWSDASATATEDTRHLAALTLSWALGASHRPTRDNATKAIIALLEPAPHLFGPILQRFVDCGDDAIEERLLAVACGIAQRTCDASTAAAIAVAVRDHTIGRGYWPQNYLSRDYARRTVDVALDHGWQPDPSNIAVRVRPPYTTDWITPERSPEEIEELSGPPAYRYSAVKGPALSDFDDFHKHVIASLTRDFRLEGNVDTDYLGRIVFDQALHLGWTPELFGSIDRHLRRAGGADEKQHEGYARKYIWTAFKQLVGRMTDRFALDPAYRDDSRTDYQTPLDVYGHDIDPTTLLRRIENRVYADTPRTWFAPAAATFPVVLDPTWATHDRHAPPIDRLLACTNTAGDRWLVLEGHYQWSQPQTPDEAAAGIPHHKTWAQIRSYLVNSVDVDAWEAWAQGQDWNGRWMPESGSPTGLILADHPYKSDWPNLQGRDRTAYRESPPGTLIVTTTRYGGVANDWDQSDSKHLYTFMPSTTFCKTMDLQRVGDFQWGRAGISLAESFAAREPGPDTVHVSAELLRSALASNGQCLLWTILAEKDTVTPDHHWPKDGEPVSRSYSATYLFDGAEMRLLDANAHTMRAGGDASHATTWSLPSNVPI

SEQ ID NO: 728 - protein, 1399 aa, synthetic construct; identical to SEQ ID NO: 727
  REGION 1..1399: note = TnsF-Tn7 System Protein

SEQ ID NO: 729 - protein, 112 aa, synthetic construct
  REGION 1..112: note = TnsF-Tn7 System Protein
MVSAKLDYTWNLRELMARQGMFQTTHLRPKLAERGIVLSDSQVYRLVADKPERLSLKTLVALVDILGCGMEDLIEPTVAAPSLRRSTAVGADDDAGVGDFRPKRARIAPDRS

SEQ ID NO: 730 - protein, 448 aa, synthetic construct
  REGION 1..448: note = TnsF-Tn7 System Protein
MRTHGQCPGCGHQGVLPGRRNSTDDRPVCLHCAGVNDAVVRCRSCALEGEMYRQGHCAQCALRHDLQHLAGARIDTPECASLIEALCSVDRPESILTWKRSSAVHALLVGLLGGSIAFTHQALDDVEHTRATEHLRSILIEHGLLPVRDQYLANFERWIEAKLATLDNSDSRSDLERFTRWHHLRRIRTIAAAGKATNGPVRSAKQEITETAKFLNWLHTEHHRTAATCNQHDVDEYLAGGPTTRHHIRTFFIWARQAKLNQSIVIGHRHAATTPVLHQDQRVALIRDLIVGTVDTLQYRVAGLLLLLYAQPVSKIVTLTVDDLLLAPSDMRLRLGAEPVPVPAPFAVLIYELLEGRANLRTTTMRSSWLFPGYRAGQHINAQTCMQRLRRLGIDLRGTRNGTLRELVREVPAPILADMLGYSTQVTQNHGDLAGQTYARYASTPRSR

SEQ ID NO: 731 - protein, 448 aa, synthetic construct; identical to SEQ ID NO: 730
  REGION 1..448: note = TnsF-Tn7 System Protein

SEQ ID NO: 732 - protein, 452 aa, synthetic construct
  REGION 1..452: note = TnsF-Tn7 System Protein
MTPGRDDVEGPLYPRCSKIPLDLTCNRCGDETWLAKANVCWRCLLDDIVRGLLSGPNGTVSPELEPLAAAIIAMPRANSGVTWIHANPKVRELLRALGEGALDPTHEALDALPGARTVEFLRALMIEYGILPPRDRLLANYERWVAEKLETIADSESRQIVERFARWHHLRTLRTRADNAAVDTGPFLRAKQSTVVAISFLNWLGEHDTTLPDCTQHHIDSWYASGPSTRQHTERFLYWSRSNRLTTHLDIPRRTTGAHELVTENERLRTIRTLLLHENLLTTHRIAGCLLALYGQSVGRIVTLTTDDLEVTDETVSIKLSGSWIELPEPLAAIVKLHIDNRPNTNTATNTGSRWLFPGFVPGDHLHRQSVIDTLRRAGIPVRATRNTTWQQLVRHAPPQVLAETLGVSATTAMDHARRAGSDWASYAALNCTTESSADPQDPQRPGMTRMD

SEQ ID NO: 733 - protein, 505 aa, synthetic construct; identical to SEQ ID NO: 609
  REGION 1..505: note = TnsF-Tn7 System Protein

SEQ ID NO: 734 - protein, 267 aa, synthetic construct
  REGION 1..267: note = TnsF-Tn7 System Protein
MTTTRTPATTEPVGTDLVRLLKALKLGALADTLPERAALARQHKLSHIGFLEVLLSDEVNRRDSRSATLRSTKAGLDPAMAFEDWNTHDDLRYDRTLLGDLTSLRFLDAHQSAIILGPVGVGKTHLATALGHMAIRRRHSVLFARSDKLFTRLRAARLDNTVDAEIRRLTAIEVLIIDDFALRPLDATETSDFYELIVERHRKKTTVVTSNREPSEWLTMTADTLLAQSAIDRLTSTAHTLVIEGPSYRQRTRPGTVDATTDNEHPQ

SEQ ID NO: 735 - protein, 267 aa, synthetic construct; identical to SEQ ID NO: 734
  REGION 1..267: note = TnsF-Tn7 System Protein

SEQ ID NO: 736 - protein, 385 aa, synthetic construct
  REGION 1..385: note = TnsF-Tn7 System Protein
MENMAGRKRNSAEDIVRKLRRADELTAAGKTQEEIAAELEVSAATLYNWRRQYGGMDTDAAKELKELREQNGKLKRLLAEAELEKDALREGSEGKILSPAAKRPAVDMLVNTMSVSKRLACRAVGLARSTYARTPIAETPADPDAALRASLRQYAGSHPLHGFRRAWAHLRHDEGMSVNKKKVHRLWKEEGLQVRIYHPRKRAGISSCPQIEADAPKVVWAMDFQFDSTIDGKAIKIASMIDEHTRQSLLNIVERSITAQRLTDELDKTFALWGGPPLVLRMDNGPEFISHVLQQFCRDRVGISYIPPGTPWNNGHIESFNNRLRKECLNRNHWTSLLEARVVIEDFKDDHNHRHRHSSLGYLTPAEYAAKCTHNHQPVEGCEID

SEQ ID NO: 737 - protein, 1168 aa, synthetic construct
  REGION 1..1168: note = TnsF-Tn7 System Protein
MSLRAVHAGTGYQYLLRSVATHDADPQGMALSDYYAAKGTPPGRWIGSGLAGLESDHVTAGAVVTEPQMAALYGEGLHPDTDEMMLAGTALADCKLGRSFPLYTGGVDVLDAIAAAERTFLKTEKRRPTTLERSELAEQVGRAFYTEKFGYEHASGKDVIAWINRERDQVKQAVAGFDFTFSPVKSVSVLWALADEQTSSKIAALHHEAVAEALAWAEDNAVYTRIGRQGIEQVKTRGLIASEFTHFDTRGGDPDLHSHVLVANKVQGPDGRWLSLDSRAIHQMHQAISARYDAILHDKMSRRMGVEFTANYPHPDKAPIWEIAGIDRRLIEMFSSRRALARPVFDQLVAEYVEKNGRQPSQRASYALWQKAILDTRDAKKPAQSLDEHRAAWREAAIKRVGAEVVEQIVATSTTADIEASRETFDPEQHTEKVAELAVARVTHARAHFRASHVDTAISTALKGYRFDTDTQLEAAHQAVMNHAMNTLVVPLTPPEPLLLPSALMTARGAGIDRHANSAKYTTDAVLGAETAVLNAARTPVAVLAAEAAVDDVLADHEKTEGWSLNPGQQALAKHLVGVGTLVAAGVGPAGTGKTASMKIVAKTWQSTGRNVIGLAPSAAAASVLSEDIDSPAHTIDLLTFTWRGLNPNSPGKTLSSLPIQISPGDMLLVDEAGMASTENLAALTEIAAESGAVVRLIGDPYQLSAVTSGGLFADITRTPGTVELEQVMRMGADTDQAEATLGLRVGDTAALDLYDGRGWVRGGHRESMLTDAVQSYLADLDAGRSSLIIASRNEDVDTLNEVIRAGRIAEGIVDDTHTRVVSRGDTVGVGDTVIARKNSMLYAADRTPLGRVINGQLFTVTGLAEDGSLAVRDQNTGSDMLIPADYASKSIHLGYAATIHRSQGATVDTTHAVIDTSVDRAGLYVAMTRGKKENRVYAVCDPVLDLGAEDGHMHSAGDREAPTATEVLHTVLARDTRQISAIQTLRTEYDQATDPERLEALYRHGAELAAKAFTAQTLPDYLDALPRAYSPTDELQDEIAQAWTEAVLAGLDPRELWAEATDNLEDAKSPTAVIAHRLRHQTREADNADELPAVAPDTIGTDTELTAWLTDTRATLTDPPAEAPDRNLFVESYLEALDAEEDTDPYADTTGPSWSWSPSVDSSPDLW

SEQ ID NO: 738 - protein, 1168 aa, synthetic construct; identical to SEQ ID NO: 737
  REGION 1..1168: note = TnsF-Tn7 System Protein

SEQ ID NO: 739 - protein, 1168 aa, synthetic construct; identical to SEQ ID NO: 737
  REGION 1..1168: note = TnsF-Tn7 System Protein

SEQ ID NO: 740 - protein, 1168 aa, synthetic construct; identical to SEQ ID NO: 737
  REGION 1..1168: note = TnsF-Tn7 System Protein

SEQ ID NO: 741 - protein, 319 aa, synthetic construct
  REGION 1..319: note = TnsF-Tn7 System Protein
MLAPKGRLKLARTVVDDGWSLRRAAERFQVSPTTAKKWADRYRAGGPAAMVDRSSRPHHSPARTPTRTERRIINLRFTRRWGPHRIAYHLHLAHSTVGAVLTRFRMPLLRHLDQNTGLSVRRPDPHRYEHDAPGDLVHIDIKKLGRIPDGGGHRKLGRAVGRRNSGQRGSGYSYVHHAIDDHSRMAYSEILGDERKETAAAFYERAKADFAGRGITIRAVLTDNGSCYRSRLFAETLGPDVKHRRTRPYRPQTNGKVERFNRTLNQEWAYACTYLSDDARAATYQDWLHQYNHHRPHTGIGGLSPIDRLTVHDLPGKNT

SEQ ID NO: 742 - protein, 368 aa, synthetic construct; identical to SEQ ID NO: 615
  REGION 1..368: note = TnsF-Tn7 System Protein

SEQ ID NO: 743 - protein, 377 aa, synthetic construct
  REGION 1..377: note = TnsF-Tn7 System Protein
MAVDESGRFVRDRRVRELLSADIVLHQMLDGWRNQQLSRNLTFATIEQRQRVVVRFHEFTNEFPWRWQPAHVDEYFGDLRSERQAARSTVRGYQQAISLFCLYVSDSSYGWVELCEKLFGAHPVQVCHEWNTAAHVQDMESAPSLRPFTRDELQAFFDRADDEVESIAARRRKGWLAAYRDATVYKTAYAWGLRRNEARHLQTVDFSRNPHAPEFTRYGVLQVRFGKASRGSAPKRRSVLTVFDWAPDVVDDWVTQGLPHMPGNLDLFTGERGSLVSERALLRRFRRYCDDLKLPRGLVFHSLRRSYITHLIESGMDPRFVQEQAGHENASTTAIYTSVSSDYRVTTLRRALDSTLKQALNTGDPAEPDGAHKSKEI

SEQ ID NO: 744 - protein, 114 aa, synthetic construct
  REGION 1..114: note = TnsF-Tn7 System Protein
MSRTRHLDYHWKLRQQMAAHQMWKTTQLAPLLRERGIDLSAAQIYRLVTDKPERLSMKVLVALCDIFDCSPNDLITPEVVTGRAKKTAGEPNATVTALDPELRPARARILDPDT

SEQ ID NO: 745 - protein, 111 aa, synthetic construct
  REGION 1..111: note = TnsF-Tn7 System Protein
MRRSVDYTWRLSELMAAAGMHNSTDLVPHLRERGIELSASQVYRLVARKPERVSLTLIAAVCDIFTCTPSDLVTVTGADQRRKKTASAEENVLDLNRSARPRRARVTRIDD

SEQ ID NO: 746 - protein, 110 aa, synthetic construct; identical to SEQ ID NO: 616
  REGION 1..110: note = TnsF-Tn7 System Protein

SEQ ID NO: 747 - protein, 321 aa, synthetic construct
  REGION 1..321: note = TnsF-Tn7 System Protein
MKPAQPCDFCGALTPAGRGKECERCYWLKNFQRRLAINSKGFSADEIATVFTLFGQWLLERSGAHKAALSINDHYQFFHQLDVTWRSVPSYQELLAHFGAAGLRKAENPMRWLTETGAVTVCAQLKDQLTEQRRLEAILAEPGDGWSAQLLSGYVTALKARMERGGTDLRSIRLAARTAANLLKSARLKGRTLPTQKNIESFWKKSPGQVAAITGFINYINKCHDLQLQAKPDERLLHQAKRQKAERELVALLSETGDAEFERRWIVKGLAYFHGVMRASCKKLVYQPQDYRGVAGYNITYGDKVLWVPSAGSYQHGDYSA

SEQ ID NO: 748 - protein, 574 aa, synthetic construct
  REGION 1..574: note = TnsF-Tn7 System Protein
MAATVERIDFSYRRPNLRHPDSQVMRLKGDYIVWWYGPIQQNTRPRSIPLAKIYFRRLYEDEPGPFTPVLVPLSSLPHYRIGTIWREGKCISNTRLDKGVFDVDFGEGGWSLTSRGDLLKQDRAHVFHNSEYELKYPQDHGQLLEFKLGSDEHLLIPCTEYFVRAYARNMEVCRAVATLKWSDMMSVLFDAPRRDELRWLVKPARYMRNFDAVFLAHLLYDDHTARCIKHINAQFISRDPSEKIFLKATPWFQGKGKIKCFGKWINDGKTFLCLDLVGTNQPDGDEIEWQTKRFDSSEGQEGGRLVLPRPVRTAEAEEFLSEHSHAEPDGHSETVIVKTPPFEILGAKRKVQKKKEVIQTDRGRLGPRPEEATSHSSGQGTGAGKNIGKLEHAAEGELESRGFLMDIWNAFKSIMADNPDRVTQVNWYTPSKFRDQGLPKAILLQPPVEWPSDDKAGRWWVYLDRATGTRRGLMVLRIQVDGENYFCFEIQPDKPEKPAYAGVLMKSHVASTEEFDEFVRKLCSKVRFVVGRFKHMESFFPPGSKIFKHHRNDAKVLYRSRLINAFKDVGVELK

SEQ ID NO: 749 - protein, 321 aa, synthetic construct; identical to SEQ ID NO: 747
  REGION 1..321: note = TnsF-Tn7 System Protein

SEQ ID NO: 750 - protein, 229 aa, synthetic construct
  REGION 1..229: note = TnsF-Tn7 System Protein
MTRNSCDQPKQVRAIKPTRRSVSGFLPFRGTGGVPFESLLERDFLKRMRFSHRVESVIAQPVRVDFIDSLGRAQVYTPDFLVHYRQPEGIDYKDYFKPMLVEVKPAYEWRQHWRAWLGKWKAARRYAREEGWTFSIYDESRIRGLPLENITFLERFERLDFDREDIEMVLKTLREMEFAPVHYLLARHFKGLYRDRGVALLWHLIATGRVECDITEPLNEYLELWLATP

SEQ ID NO: 751 - protein, 641 aa, synthetic construct
  REGION 1..641: note = TnsF-Tn7 System Protein
MNIYEIDTDEHLVPFEPSRERVRVEIGEMVRRDKQIFRIVHLLDLQTIVGVEVESGRSFSLRISELQPVELERVEGLYVNHDISTISSDDWAVAQQRFSAIKPLLRDSVLPRGCVEERAKEVGVDTATLYRWLDRYQSWNEVLALVPRKRGWQSGNSRLSAQTDKLIDDVIEQHYLTIQRRTVQSTIAEISRQAKSLGIRAPSASAIRARIKRIPEKIFLRSRGFADRARNRHTPSVGKFPGADYPLAVIQIDHTPIDLIIVDDRHRKPIGRLWLTLAIDVHSRMIAGYYLALEDPSEISVGMCLAHSILPKERWLDLHKVEGEWPVWGFPRVVHTDNGPDFQAENFRRSCANYNIENQFRPVKRPKYGGHIERLLGTFMRELHELPGTTHSNIPDRDGYDSDKHAALTMSEFEEWLVRTIILYHNRVHSVLFMSPARKWHLGFFGSLETDALVSIPPRPADSMTVQLDFMPSYRRTVQHYGVQLDVYYYSEALRHWIGASDPDTGMARKFVFRRDPRDISVIWFYDPVLKQYFRVPVANQAFPAATLWEFRAAKKQAVDEGRKHVDEAVIGRLILERRQIVNEASASTKKARRDAQKHKVHSKNTTPARPVKAPVEAAPPIPAVEGLLLGDDVDLTGDIQ

SEQ ID NO: 752 - protein, 296 aa, synthetic construct
  REGION 1..296: note = TnsF-Tn7 System Protein
MTEYAHLHADFRPVLQLSARERIRFMGEPRWIGYRSAHYILDTLECLLDAPKRPRMPNLLVVGDPNNGKTTIVRHFEKLQGQGYVDENAEPVRPIILAEAPPSAEEKDLYIAILERLWMPYKTTDSKVTLRFQVIHALRELKVRMLIVDEIHSLLTGSATKQREVMNALKMLCNTLVIPIVGVGTPDAVQILHLDPQHASRFDVIKLETWKLNPDFQRLLKAFEAVLPLKRPSEIYKPELAQLIHSISGGNTGDLHSLLIECATEAINSGKEFIDRQLIESKSWKRPTRGIRERVV

SEQ ID NO: 753 - protein, 296 aa, synthetic construct; identical to SEQ ID NO: 752
  REGION 1..296: note = TnsF-Tn7 System Protein

SEQ ID NO: 754 - protein, 850 aa, synthetic construct
  REGION 1..850: note = TnsF-Tn7 System Protein
MTAGAPPRFLTEPGAVLVEVVADAEPLLDPAAIGSVIGQVAPTRAELRRLARALHADPGLLTSGEPDGPRLLQDLIGALLTVGARHVRPASCARCRRMRPLRRRLEDRLVCAPCANAAAVRREACARCQRERRVDGRDGDGAPLCAACTRQQRGADPLGELVDGLDRLGTGLPASALRELILAALPRPHQRRTVTADFAARPTALADNAAHGSHHLVLLAEALIAAGATDVALPVCPFCQQSAKIRFGRDGLRCCKRCYEASRSQPCTRCGRARPVAERTADGAALCKACGQRDPVNFETCARCGQHARLVPTDSGERCCRACWRAPIATCSICGRRRPCHGASGPSPRCETCVKRLNTAACQRCGITRVVFARTAQGQPLCQRCAGPRERCVHCHRVRPVVGRPPDGPVCGACWRRDPAATHPCQRCGTVTWLHHFGLCPACACPEVLRELLTAADGTLRPAATTVLDVLAGDDNPAAVLKWLQAPTPRALLAALAEQAGPLQHTTLDRLRPTKAADRLRALLVARGALPARDEHLVLLERWIDTATAAIADVNDRRLVRRFATWHHLRRLRQLSTPDRPTGYGQISAARGDLAAAIAFLAWLRTRSTSIATAQQADVDDWLTSGPSSRHNASAFVSWAVRRRHAHDIDLSARSSTTHRRVLTQRDQRWQLARRLLHDNDLHAVDRVAGLLVLLHAQPVSRIAGLTVEHVEATPDGTHLRLGSTPIRLPPPLDHLVAELVGRRAGHTAVGRTAANRWLFPGAAPGQPLSAQQLGARLRRLGVPARTSRNTTLMDLAGQLPAAVLSQLLGLHLQTATNWTQEAGNTRPRYAAAVTTRTAPERHSSRPDLR

SEQ ID NO: 755 - protein, 850 aa, synthetic construct; identical to SEQ ID NO: 754
  REGION 1..850: note = TnsF-Tn7 System Protein

SEQ ID NO: 756 - protein, 662 aa, synthetic construct
  REGION 1..662: note = TnsF-Tn7 System Protein
MPRTVNPDRTPARPGTPQRDSVLPELREMWWESGVRARAQAGLFAVFSELPRLVRSALVVSWRADRVRTSVVAATTVVAGVMAAFGLLAAQRVLVELFAGGPTADKVVAALPALAALAAVTALRAGMATAMGYAQNGLTPKVDREVERGLFEVTTAVRLEAFDADAFADDMERASRGADSTTGLVQASMNLLAGLAGVLAVAVAVVVVHPLLLLALLVATVPNGWASLRAGHLRYQTYAAGSVRRRRLWLLHRLMAERDSAPELRSYGLRGFLLDQYDRVMAVETGIQLALARRVTTTTTVGAMIGGVATAVVYVLLGLLLVDGQIPLAAAATCVIAVQAAQRSLAVVTFQVDRVYTEGQHFRDYTGFMTRAADYLPSHTEPAAELPAPGRLEEITVDAVSLRYPDRDTAAVDQVSLTIEAGQTVAFVGENGSGKSTLATMIATLRTPTGGTIRYNGRPADDWGTDALRARIGVVTQEYHKWPFTAATNIAVGDITTHAEQTHIEAAAARAVAHDMIIELPHGYETLLDRTFAGGQDLSGGQWQRITAARGFLRDADVLIMDEPSSALDPRAEDALFQAIRDRQGQGITILITHRLANVRHADRIFVLHHGRLVEAGTHDDLMSAGGRYAELFTLQAAGYDTTTGPAAAVPRQTATAGRSTP

SEQ ID NO: 757 - protein, 662 aa, synthetic construct; identical to SEQ ID NO: 756
  REGION 1..662: note = TnsF-Tn7 System Protein

SEQ ID NO: 758 - protein, 349 aa, synthetic construct
  REGION 1..349: note = TnsF-Tn7 System Protein
MHPEDAVLRAMLSGWAKQQLGGRRLDRRTITARERVIDGFVAFTNEYPWRWTAALVDEWTTHLVAERRLARSTIRGYQGALRLFCDYLVSPYYGWAQECLQRFGTHPTQVCHEWNTAAHLVEYEGRPGRRPLTRDEVQRLFDYADGRVERAVRLGRKGALAAYRDATVLKTIYGWGLRCTEVSRLDLVDFYRNPQAPALGGFGMVHVRYGKGTRGSGPRRRMVASLMPWAVEALEDYVVNIRPRFGLAEHPAVWVTERGGRLRPREIEERFAVYRDALGLDGDLSPHCLRHSYVTHLIEDGVDPKFVQEQVGHVFASTTGLYTQISAAAMNTMMDRALHPVLTAEGAER

SEQ ID NO: 759 - protein, 105 aa, synthetic construct
  REGION 1..105: note = TnsF-Tn7 System Protein
MAERGMFSTTDLRGPLVERGIDLSASQVYRLVVEKPERLSLRTLMALLDILGCQMTDLIVPVAAAGSGRARKAAAGGGAPAGGRGAEAGVGELRPRRARITPTQP

SEQ ID NO: 760 - protein, 464 aa, synthetic construct
  REGION 1..464: note = TnsF-Tn7 System Protein
MSRPVKGTLQNQQFCAPCYNRITTTASGCPECGRFRILAYRGVDGVFLCAECAGQPVRFACKTCGGEEHLVGRNCARCVLTDRMTALITAPSGEAHPQLKPVRDAVLARKNPRSALRWVARASATSILKSMADGRTQISHEGIDSFARSASREYLRDLLIASGALAAEPRELRDTLEWIDGFLTDYAGPDRHVLTAYSRWNVIRRVRARAARGKFTSSAAKNVPPHLRVLGDFMMWLAERRTDLATARQAHVDEFLTTHPEGARHLPQFLKWAHSSGRCGPLTSPTYRSQQPTPQVPANEHWDTVERLLHDNSIRIDTRICGLFVLLYGQRPSHICQLTRDLVVVNETNVLVRFAADPIVLPPGVDDLFREHLSTLEDEPTPWLFPGRNPDRPIVEAGLSLRLRDLGISPQASRTTAMMQLAAQLPAAVLAGFLGIHPQTAVAWSKIAASDWSTYPALRLTTIH

SEQ ID NO: 761 - protein, 368 aa, synthetic construct
  REGION 1..368: note = TnsF-Tn7 System Protein
MDPVPGAASLVLVRGVSYLDEAAAVFEAMVEGWSRQQASRRLQPSTISARLNLIRRFQRFTEEYPWLWRAQDVEDFTVSLMSRNRLSTSTIRGYHLTLRQFCDYLTDRRYDWMTECERRFSSVPTQVCHEWNTVVHLDEYEGRPARRPLTYDELETLFGHCDDRVEQIARTGRKGALAAMRDAQILKTTYAFGLRRREVARLDIADLRVNPQVREWGQYGSLHVRYGKAVRGGPPRRRTVLAVPEFDWALDGLRQWVEEARPRMDPRAHPAVWITERNSRVSVRYLDIRFAELRAGAGLPAELTLHCLRHSYVTHLIEFGYAERFVQEQVGHATASSTVIYASVGSDFKNRILADALHRVYDPAKGRR

SEQ ID NO: 762 - protein, 105 aa, synthetic construct
  REGION 1..105: note = TnsF-Tn7 System Protein
MSARWKLRELMASQGWFQTTDLVPLLAERGIHLSREQVFRLVTKPPQRLNMDVLVALCDILSCTPSDLIEAVEDPVTVQKTGTDEARGIGELRPIPARIRRPDQT

SEQ ID NO: 763 - protein, 172 aa, synthetic construct
  REGION 1..172: note = TnsF-Tn7 System Protein
MRCVDDMTLPLDVRAAGALVLLYGVPVSRIAQLTLQDIEEREDGTYIALGARPILMPPVVADLVAQQAAALPRSIAARTIDGTDWLFPGNLAGRPTTAMPLTRRLSTHGISVRPARNTAVLALAADLPATILSDVLGMHIVTAVDWVKYVKRDWTGYIEAKAADRHNQQEGM

SEQ ID NO: 764 - protein, 520 aa, synthetic construct
  REGION 1..520: note = TnsF-Tn7 System Protein
MPTPTDEQTEAADAFRAGHHLVLQAGAGTGKTSTLNLLAAGTKRLGRYVAFNKNIAQDASSRFPRTVLCKTAHATAYAALGHRYTHRLNSPRQPAWKTGQALGITRAIRIGDHDVSRRTLSHTVLRTVTRYCHSAERTLAHHHVPHLRGLGTPAEQAQLASEILPFAVKAWADLQDPDQGVVRFEHDHYLKMWALTEPKINADFLFLDEAQDTNPVLEQVFTAQRDHAQLVMVGDSAQAIYGWRGARDVMTGFNAMPLTLTRSFRFGPRLAEQANRWLELADAPIRLTGTDTIPTEVGAISHPDAVLCRTNIGAIGEVMKLLAAGHRVALTRSGHALSALALAARDLKEGRRTSHPELVLFTSWGELQDYAAYDPAGRDLQPFVDLIDTHGPDAILAAVDELTDEKHANVTVSTAHKAKGREWPTVKIADDFPPPKDTDQHDAQGRPIPEPVNDIDARLAYVAVTRARYHLDLGGLSWIGMYPTAPSGNEPCTSDKPPPHIRQGLGHSHEQPTQVTCSSQ

SEQ ID NO: 765 - protein, 520 aa, synthetic construct; identical to SEQ ID NO: 764
  REGION 1..520: note = TnsF-Tn7 System Protein

SEQ ID NO: 766 - protein, 305 aa, synthetic construct
  REGION 1..305: note = TnsF-Tn7 System Protein
MSETARLHAFPRSLPDEGTQGIADARLLPDEEFRGAWSSIALPTDMKERMLRGAVASIRLRQTVPFDAVPLHGITLLTGAPGVGKTTMARGLADKIARTLGSPTPWLFLEVDPHALASASLGRSQRSVETLFGTVIEEMAMAGPLVVLVDEVETLLTDRAALSMDANPVDVHRAVDAALVGLDRLARRHTDVFVLATSNFPDAIDPALASRADNVIRVPLPDRTARRWILEHTVIAIARAFPGAHALTAAEALDAAAERGEGLDGRRLRKAVAAACAYRPETKGDPNGVTVQDLLGALDHARETA

SEQ ID NO: 767 - protein, 305 aa, synthetic construct; identical to SEQ ID NO: 766
  REGION 1..305: note = TnsF-Tn7 System Protein

SEQ ID NO: 768 - protein, 190 aa, synthetic construct
  REGION 1..190: note = TnsF-Tn7 System Protein
MRDSALVKTVYAFGLRRQEARGLDLADLRRNARVPEYGRYGALFVRYGKSSKGGPPKRRTVLTVPEFDWVVDVLDHYLEEIRPGFSPAKHSALWMTERRGRISLRSIDDAFSELRQLAGLPEELDLHCLRHSYVTHLLEFDYPERFVQDQVGHEYASTTSIYAGVSDEYRNRLVQRSLKSRLGRLWGTES

SEQ ID NO: 769 - protein, 179 aa, synthetic construct
  REGION 1..179: note = TnsF-Tn7 System Protein
MQEARQQIIQTGAFPVWLSARHVTLDSCTQTDLDAWHVEKHATRRPAQTFLRWCMDTRRLPWLTIPNRPTTNPDPTGQHQHIAALQRVLADDSTSPRVRVAACLVLLFAQPVSRIVRMTTDNVVHDGQHVTLRLGAPLPQSPSRWPTSCSTTSGPCPPAPLPSTGTRIGSFPATARASR

SEQ ID NO: 770 - protein, 371 aa, synthetic construct
  REGION 1..371: note = TnsF-Tn7 System Protein
MREIDDDEGRRLLRIVRRGTGSVVTWRRAQMVLLSAQGMPVTKIAGVTFTSADRVRDVLHNFNTDGFDSLYPKYKGGRPRTFSLPERREIKKTAKSKPADHGLPFSTWSLAKLADFLVAEGVVDDISHEGLRVLLREEGVSFQCVKTWKTSRDPDYAAKKARVEHLYAIADGEVMAEEDEPEVIFCMDEFGPLNLQPHPGRQWAEHGGRHKDPDRGPRPRRRATYTRPHGVRHLFAAYDLTKNQLYGHVKKTKNRSQFLEFCRYLRSLHPVEKRIAIICDNYSPHLTTKRCQRVATWAEANNVEIAYTPTNSSWLNRIEAQFTALRYFALDGTDHASHKEQGSMIRRYIIWRNKHAADERLREVVNRANVA

SEQ ID NO: 771 - protein, 477 aa, synthetic construct
  REGION 1..477: note = TnsF-Tn7 System Protein
MKGTSRCDICGKSVHTLTRRYKGEGYCSRCYARYFVKRLCPKCGESARLPLDDTSAICRKCEVTKPCIRCGKNEYRTGKVTRYGPVCNACSVYFRKPRACPRCGKLSRRLSRAFRLGITEQVCPQCSNHDRGTCRSCRRHRRLYESPLGVFLCKACLETGKIPCPKCGQLMPAGRKDKCEPCYWLGTLYKRLKLDYAAFNSQIMAEHFETFGKWLGGHSGYKKASLTIHRYLPFFKDIESRWQSIPEYSSLLTAYDVSHLRRQLLPMKWMVESDLIQIDLSLKAEATEKRLIHNILDSLSEGKVKKVLLEYHDILNQSYNQSAISLRSVRLALQPAKQLLSEANRHNRIIPNQSDILSLLHRVPGQRNALSKFVGFLNEAFGQNLRLPSPTKRASIARRKRLKEELILLLAEHNDSLKYKKRLLGVALAYFHDLPLIIGQTHLHIVKSDPSGGLAFQFKGHNYWLPEDIRNRLFASL

SEQ ID NO: 772 - protein, 477 aa, synthetic construct; identical to SEQ ID NO: 771
  REGION 1..477: note = TnsF-Tn7 System Protein

SEQ ID NO: 773 - protein, 639 aa, synthetic construct
  REGION 1..639: note = TnsF-Tn7 System Protein
MTKHIAEYQTKKAYEPKRTPVDLRVGNLVSCGDQVYRLSEILDFGSVIGVEVHSGRSVPLRIGELRALDDQETQISVDQDIDEITSDDWKIAEKRYEAIKPIVEFDSPGRKRVTQRAKEIGVHPSTLYRWLGAFQSFGVISALIPRRRGWKEGNGRISVAAEEVVQQTIKDFYLTPQRPSAQETVVEVRRRCREVGVNAPSASTIRSRISKITEKERLRGRGYREKAKNKFIPTPGTFPHADYPLAVVQIDHTPVDLNIVDDEFRRPIDRVWLTLAIDVYSRMVTGYHLSLDSPSGTSVAMCVAHSMLPKEEWLTLHGVDADWPVWGKPRTIHVDNGPDFKSDNFKKSCAMHSINLDYRPVKVPRYGAHIERLLGTFMKHVHGLPGTTFSSVHHKAEYDSEKHAAMTKSELEKWLVVLICKYYHQKMHNGIGMSPSRKWEIGIFGNAEETGIGMRPRPSDRLSIQLDFLPSFKRTIQTFGVTIDGLKYYSESLRPWINYKDPKKKTKRKFVFRRDPRDISNVWFYDPDLKQYFRIPFANLSLPPMSFYEYQQAQKKLKAEGEKSVNEHRLLDAVNELREMVEVSKEKTKKARRQAQRRKEHEKKITPATPFKKTASKPSKSKTNNSFVDGDIDGFGDIA

SEQ ID NO: 774 - protein, 623 aa, synthetic construct
  REGION 1..623: note = TnsF-Tn7 System Protein
MSNKETYLGDVQDVNGTTVSISLSKESLTGFVYIDGQGYRVSQVGSFVRIPIGFNDLFGIVSQVGASAVPENQLESQNHGNRWMTIQLIGEGPRNGVFQRGLSQYPTIGDEVHLVSENELQNIYGQPDKPYFVKVGHISNADSIPALIDVNKLISRHSAVTGTTGSGKSTTVASIINALSDREKYPSSRIIMLDLHGEYGQALQDKAQIYKINKETSPRLEENELQVPFWALNFDELCEISFGEFNNEKDRNIVMERVHKYKLESLTKHPRKGVSADTLSVDSPVPFSLHNLWYELFVEQFGTYYREGDGKPIEKLAYETDENGVELKGNPSEGIPPIFKNIATGAGEVKVNYLPGNLNIGKQLLLLGTKLRIPRYNFLFKPDDWTPNAEGDVVQDLDTLLMNWIGSDRPVTILDLSGVPADILQTTIGALLRLLYEALFWARDLSQGGRHRPLLVVMEEAHIYLNGNSKGMASKVVQRIVKEGRKYGIGAMIVSQRPSEINSTILSQCGTFFALRLSNASDRSHITSTLSDNLDGLTGMLPILRTGEAIILGEAVKLPMRTTIEAPPKNRRPDSQDPVVYDEVPMEESQNPGGWGIKMEAAPRYDELVEAWRAQNPRIDKVK

SEQ ID NO: 775 - protein, 623 aa, synthetic construct; identical to SEQ ID NO: 774
  REGION 1..623: note = TnsF-Tn7 System Protein

SEQ ID NO: 776 - protein, 203 aa, synthetic construct
  REGION 1..203: note = TnsF-Tn7 System Protein
MPEFKKQVLEVLRQPLEDGEVSISRSLITLKYPADVMLVAAMNPCPCGYLSDETHICTCSPLAVQRYRSRLSGPLLDRIDLHVDVPAVPYEELKKTRSDVDSATMRARILDAREMQSTRYADERITLNAELTGSALEKHCVLKEEGHDFLKQAVETLGLSARAYTRVLRIARTIADLEKTASLSVDHLAEAINYRTMDRQGNV

SEQ ID NO: 777 - protein, 271 aa, synthetic construct
  REGION 1..271: note = TnsF-Tn7 System Protein
MDLPRWVGYGAAQKVLDTLQGLLHKPKRPRMPNLLLVGDPNNGKTTIVRRFKQLCGEGYVNEDNDPVKPIILAEAPPTADEKSLYISILERFFTPYRPTDPASKLRYQVVHLFRECHVSLLIIDEFHSLLTGTPIKQREVMNAIKLLCNELSIPVVGVGTREAVTVLHTDPQHASRFDVLALPLWETNKEFQTLLTDFEKILPLKKPSTLHTPELAQSLHSISGGNLGNLHRLLVECATEAIKSGKEQIDKPIIEGKTWVRPTRGIRELSG

SEQ ID NO: 778 - protein, 271 aa, synthetic construct; identical to SEQ ID NO: 777
  REGION 1..271: note = TnsF-Tn7 System Protein

SEQ ID NO: 779 - protein, 487 aa, synthetic construct
  REGION 1..487: note = TnsF-Tn7 System Protein
MAIKISNNVCNYCKNILTNWDYKYKEEHYCRICYEKLFILKTCLSCNKIKRIYRYSEKLLCKFCEVKDLHCSRCAKTDFKIGKILKNGVICNSCVKYYQEQKICSSCNQEKINVSNRTLTDGSKKLLCGNCYNKTLPICSCCSYRRIAYSYDKNNKAVCEICSIEIKRKCIGCDKSIPAGYGNICKECTSLKTLNNKTFNLSKSLSKYLNSIFIEFSNWLLKRRNSIFTALNIQHYYGYFFLLDEICLEFKRLPTYEEIVSKLKVEKTRKYLLVTIFFNELKIIKIDKKIKEEHANLNMIDKYINTFKKDTRNHSLIEKYYLFLLQKLNNNETTTRSIRLALTPAVKFLNYCENFKNSTPTNYILEGYLWCYGGQKSAITGFINFLQKKENLNISINNIYSFDFVVSSTSKEILKERFLDMLRLPLIHKSKKQYFYKTAIGYLHNIEIPKNVYINKNEIKKDKNNNFYFVLNKHKFFIGNTFNKELV

SEQ ID NO: 780 - protein, 591 aa, synthetic construct
  REGION 1..591: note = TnsF-Tn7 System Protein
MINLNIKEKIPPIENFPDDEIYRVIWAYGSLQKGATITTVPEIHVLLVNLEYDASKKKYQLNPYKINIVKISIAQLDIARYMTIWKGKKRVEDNWEDFNEYEKNKKFRLDSTTSICESYSKKIDEKKYESFFPKEKYKLPYLGNIDDFLKFSYVTFTKISNEEYDVVIPSMELYTSTYVPHEQQIRNKLIQFSLDDTLNDYVKLVKEESSKYIIELYHSKTATNISFLAYSSLNNMTRQRLSELRSSLENGKLDKYPIILPYHPSSISLQGDGFWIDDKTFFMLRINKYSLPADIEIDNITDEIEVEENNKSNSKNTTISSIKRDLDNYELPVTNNHNPHIRNASLSIISEIELLNDSEHKIENKKKTTIIEKTDNTSLVQNTENIQNVSSSEADNANDSENTGKLYVKSENTLHQSKALDLFLNSINLIKDNNKYIDDEKNSIKIDELYYLDKDSNLNIDKCFIEFKDILEAKNEKSTFVYMKQIKEHKTEFLGNRKCLVLKICLNNASWFYLIEIERKDDNEGFSGLLFKPTKEFDKKELEDLLMDFINKKGIVKNIEYKNKFVIFKHSVDKTNNNLVDSYLRNFKKIL

SEQ ID NO: 781 - protein, 240 aa, synthetic construct
  REGION 1..240: note = TnsF-Tn7 System Protein
MKISMKNRKIGYTYSSVSGHFAFRKEKSIAFESTLERDLLTLLEFNSSVFDVTEQPLTIEYQNKNGRNVTYTPDFLVIFYDPNNKVSSTKLSRKPWLIEVKPREILIKKFKELKPKFKIAMQYAKQNDMTFKIFDESRIRTDYLKRIKFLNRYKNMECEWWWKEWVFNGLESLGGHSTIDELLVFKFRGGTVDRLLALGVIYHLIVNKIINADITENLNFETKIWINYEHPNYLDYSEKD

SEQ ID NO: 782 - protein, 631 aa, synthetic construct
  REGION 1..631: note = TnsF-Tn7 System Protein
MLENQTNIKLDRSRIEIRQNSYVRYKNNRYKITQILNLNEVVGIDVKTRKAKLLPIKELSSIEASQKIDVEAISKDINEIEDEEFNEAQRRYKAILPLLENKLSRKDAVTYSEKIGIHFTTLYRWQERYKSTGTILGLISNKVGVKQGYKRLDTELEIIIKRIIDNYYLTIQKPSIQSVVNKILAECKRLDIKAPHSNTIRNRINEITEYEKLKKQGSRGIARTKFEPTPNKFEVDYPLQLIEIDHTPCDIILVDDEHRLPIGRPWITVAIDIYSRMIVGYYLSMNAPSVTSVGMCVSNAILPKDNLLAKFDVNANWNVWGFPETIHVDNGADFRAEAVQKAGLAHGINIEFRPVGRANFGGHIERAIGTLMNEIHNLPGTTFSNIKQRGEYNSDENASMTFFEFEKWLITFITKIYHKRIHKGLLMSPEQQWEEGLFSNETGIGFIQKPSNNNTIILDFLPIYERTIQKNGVNIDGLNYYDHVLRTKINQMEKGKKKKFIFKRDPRNISYVWFYEELTKEYFKIPIANQNIPQMTAWEYDTIRIDLKNKGLRRINQDAIIEAREELHNQIQQSVKNSKKARRDIQRLKNKDIELKEFNNKFNKETFDKVENIQTNTSSDSNLWDEEIPQF

SEQ ID NO: 783 - protein, 215 aa, synthetic construct
  REGION 1..215: note = TnsF-Tn7 System Protein
MYLSGTNSKMGEVALSNNGVLFFDELPHFPNNILEALREPLEDNKILISRVNSKVLYETKFIFVAALNPCPCGNLLSSVKECRCSEVEIQRYKNRLSEPFLDRIDLYLVMNDSFNDNKNIVSSTELHQNVIKAFIKQKSRGQKELNGKLSDEDIKKYCLLDNESSEILEKARLNYSLSFRSINKVLKVARTIADLNDNDIITKSDLLKSLNFRRR

SEQ ID NO: 784 - protein, 360 aa, synthetic construct
  REGION 1..360: note = TnsF-Tn7 System Protein
MKIVIEPQIYPNETLSSWLIRGSILNGSQPNDWTHLLFKDNRIWNKDIDRFLSEEKLILLSKNCSKSIKELKGMTLEPLIKKIFKKEKLNPLKSWTFILSVGQRGSYKRNGMYFCPLCLSNEKNSYFRLENKLAWNTSCLIHNIKLLQRCENCNKNFAPHKITYDKTKIYLCTNCGYDLRNSKTEVCNFEIQNFQVKLNKAIFENIIDESFPLIEFSIEELFKTLRIILSFIKALFRTNKYESLLNILNLSILNDSLETMNNSYNSFEEMHIKEREFLILISSKLFNLKIYEIKETFEKLNFSYKLVANQSTLTSKTISYLSKDLKINTKNKILIIKQSKILPKSADEVNKLLEELKSWL

SEQ ID NO: 785 - protein, 303 aa, synthetic construct
  REGION 1..303: note = TnsF-Tn7 System Protein
MNDFEYLNEQTKQIIYSSKEYRLSYIDEPLYIEYPRTKELFEIFEQMIKTPKKPRMPNLLVIGEPNIGKTSIINQFYNKHNTTELEDVNGYSIPNRPVILATAHTKANEKDLYIAILEAFWTPHKPNNTLAQLRHQMFSLMIECKVKLLIIDEIHHFLNGTPSQQRDIMQALKNIGTKLQIPIIGVGIKDASLVLGTDPQLSSRFDMVKLSAWELDKSFRGLVNAFEKYLPLQKPSKLAEQEKCTLLHNISQGNLGDLHKLLIACAKYAIENNIEEITIDIIRKFKNFKPTSKLVPREIQLKS

SEQ ID NO: 786 - protein, 303 aa, synthetic construct; identical to SEQ ID NO: 785
  REGION 1..303: note = TnsF-Tn7 System Protein

SEQ ID NO: 787 - protein, 453 aa, synthetic construct
  REGION 1..453: note = TnsF-Tn7 System Protein
MENILKILIDFSLFEKYDKEYFISNKIVPICEDNISLKVAVCKNSDLSNIKEKFSKLISFVEADELDILFLLSNLDKKIYLYKIASKSIFQKTDEKYIEEFLNELTLFSIYLRTSDIHIEMYKNLVLFKFRVDGRLKIFFTFEKEFFKSISSYIKLISNLDMTQIRLPQDGRYSLNIEDKKYDFRVSTMPTLEAESIVLRILDNKNIDKNLLTLGLTESLLHKLKQSLKLTQGLILISGPTGSGKTTTLYSILKELNCEDKKIITVEDPVEYKIESINQVPINPKIGLSFEVVLKNILRQDPDIIFIGEIRDRFSLDIALQASLTGHLVLASIHSNSAVETITRLIDLQADPFLISTTLKLIMAQRLVLNYCKFCDSNGCEKCNYTKYYDRSSIAEILKVDEKISSLIFKKADINEFKGYLKAINYQTLLDDGKLKVNQNLTSIEEIYKVVTY

SEQ ID NO: 788 - protein, 453 aa, synthetic construct; identical to SEQ ID NO: 787
  REGION 1..453: note = TnsF-Tn7 System Protein

SEQ ID NO: 789 - protein, 294 aa, synthetic construct
  REGION 1..294: note = TnsF-Tn7 System Protein
MTKCGYVSVVGRPNAGKSSLLNWLVGEKIAMVSHKANATRKRSNIIVMHEDDQVIFIDTPGIHETEKLLNQYMLDEALKAMGDCDLILYLAPVTDKISYYEDFLEKNKKNVKHILLLTKIDFVSADELMLKLKEYEKYNDKYEAIIPVSIKKATKKADILGEVVKYLPEHPYLYDPEIMTTEHLRDIFKEFIRESIFENISDEIPYEADVIVNKVEEKPNVDVIKATIIVQKDTQKGMIIGKGATAIKRIGRDARMKIEKLTGKKCFLELFVSIKKGWTKDKEGLKALGYDVNL

SEQ ID NO: 790 - protein, 294 aa, synthetic construct; identical to SEQ ID NO: 789
  REGION 1..294: note = TnsF-Tn7 System Protein

SEQ ID NO: 791 - protein, 343 aa, synthetic construct
  REGION 1..343: note = TnsF-Tn7 System Protein
MLIPGENGIALCRGCTEQGEIHCETCQEPMPAGRGKQCESCSWKKAFERRLKVNAETFELQHIRRLFIEFGQWLEGHLGAHRAFLRLLNYMPFFDFLTSQPSGIPSYFSLLEHFHADGIRRMKTPMLWLKEAYGVEADPLMRENHSEKRRIEELLRSVLNGTASTALGKYHASLMIKVSEGTMTLRSVRLSLRAAVGVLGEASSSLDVLPSKESVRHYLSKTPGQKAAAQGFIGYLNRTLGLDLDVTVSKRTLARVKREKLEHELMTMLGSGGSGETFERSWIKLALMFFHGLTSINKKSLLYDRVSMDAQEGFQVQLGGKEYWVPVPDDAGSVDFRAHQPLE

SEQ ID NO: 792 - protein, 343 aa, synthetic construct; identical to SEQ ID NO: 791
  REGION 1..343: note = TnsF-Tn7 System Protein

SEQ ID NO: 793 - protein, 183 aa, synthetic construct
  REGION 1..183: note = TnsF-Tn7 System Protein
MLERDFLHRMDFDQSVVAVASQPVKLDFVSSNGRSYTYTPDFLVYFTERSGIRPMLVEVKLEEEWRENWRSWLPKWKAAWRYASEHGWGFHIYDESRIRGLPLKNIQYIERFKRANYSEEDSDAVIRTVAEMGTAPFHYLLARHFTGFEHQGASHLFHLIATRQLDCDVDQPFDEFLELWVTA

SEQ ID NO: 794 - protein, 635 aa, synthetic construct
  REGION 1..635: note = TnsF-Tn7 System Protein
MESSPQGLKIDRSFISIVVGQLVAYQKEVFRITQVLDFQSILAINVESGRAKVLRIAELKPVLAEKVKGLYIDHDLEDIGTEEWATAQMRFSVIAPLLNNEGQNKGAVEKRAKEAGVDTVTVYRWLKRYKEYGEVTALIPFKRGWSKGRQRTSDEVEKVISEVIDEFFLSDQRYTITATIAEVVSRCKKRKLTPPNGSTVRARIKKVPDKVVLRRRGYQELANNKYTARPGILASEYPLQIVQIDHTPADMIVVDDIHRKPIGRPWLTLAICVYSRMVTGYFLSMDAPSAVSVAMCLVHSVLPKEGWLSLHGVDAEWPVWGKPVTVHSDNGPDFRAHSLIQSCINHDIKREFRPKKKPHWGGHIERLMGTFSLMNKKDKGTTFSNPTERKGYDSDKKSIYTFAEYEERLVRNIIKYNNAYHEEISMAPIRKWNIGFFGDKEQPSLIPLPPRVADPWTFQLDFLPSTRRVIHPYGVEMDAMYFTEALRPWIGATDAKTGKARKFIFRRDPRDINRIWFYDPAVKEYFEVPITRSLFSGTTVAEYVAAKKKARKEGMEAIDHELIERLLQENKEQEAESAARTKQARKNVQKRANNAKGVTPASPKRREEPNAPVVPQVANQGLLSADDVESFGEVW

SEQ ID NO: 795 - protein, 370 aa, synthetic construct
  REGION 1..370: note = TnsF-Tn7 System Protein
MDAAYQWFAGANPVNATWPLVPTLLPDEIISSWLVRCALAQGCDPLTLTGSLWPGVRFWCADPDKGLSKSQATDLGVFAGMPVEVLNSSTLASIRSALSEQGDFPNAITPWILCLGLRNRRRSGGLQYCPQCFVERQPYYEIQSRLAWHSICPIHQLTLLDRCQCCGSPLCPHLLTPPEEDLGRCHRCRFELKSAMGRTISSDAMCLQHAADRLLAGETQFYGDERLGVPDWFYLCRWMLGILRSAARARSSSSKQFFQRLNVDFEALTRPSTGLPFQYLTPMDRAHLLADTWKMIQAGPESLAQACSEFSIAPSLMPLPAGNPPACVMSIILGLQGRRSKGDIHHHADAPRSGKSVLMQWHRLLRKTKR

SEQ ID NO: 796 - protein, 296 aa, synthetic construct
  REGION 1..296: note = TnsF-Tn7 System Protein
MVMEYSHIAPQFRSVMELSDLERIKFMEEARWVDYPAGNKLLDLLNGLLLKPPRPRMPNVLVVGASNSGKTTVIHRFKKLCGAPYISDDGVSVRPVVYAEIHKPDERELYNAILDNFWAPHNPAAPLAKLRHQAIHLIREARTRMLIIDEIHTVNNGSPTKKADVMNELKMLANILQIPLVLVGTRVALQLLRLDPQYSSRFEVLSLPNWEVNPDFQRFLKSFESVLPLKKPSKLFSPDLATLIHAISEGITGNVEYLLQECAKEAIQTGSELIDRRLLEKNQWMRPTNGSRERIL

SEQ ID NO: 797 - protein, 296 aa, synthetic construct; identical to SEQ ID NO: 796
  REGION 1..296: note = TnsF-Tn7 System Protein

SEQ ID NO: 798 - protein, 284 aa, synthetic construct
  REGION 1..284: note = TnsF-Tn7 System Protein
MSTPQITALFKEFCLWLINEVPKQIAAQSIHRYFLFFYEIDKKWGAIPSYKKLLDHFNAEGLRRVRLPMCWLAETSRVVVDANLREQASEHRRIKAITSQLRPETMPAKILLAYRDELLGRMADGKITVRSARLSLQPAAALLGECEADGVSVPGQLSLNRYLARVPGQQAGITGFVGFINSNYGAGVNIEHKKSQAHANQKRKLEADLVALISAANTSPLFQGQWLSVALAYFYGLPRRLGKRLEDSKISVQTDGNFYVTVDEKKYWVPRWNFNPSATSAKTQ

SEQ ID NO: 799 - protein, 601 aa, synthetic construct
  REGION 1..601: note = TnsF-Tn7 System Protein
MPIQFKHKFKKISTVIRIKGTLDFGNDAMVAWWYSGFYKNPKDNSQPHVLVHFREYISPGVIGDKIAHRRIPLTSLGQVRVGTVWKNDRCKGELDLEPTKFSLNFNEDGWRFTSLSEARRKHLAPPFQQSLYKLERENDANWLIEFDLPNGGKLFVPCLEFFTRCYGRSGELKRIVATYPWEDVPDSAKSRLYATLDEPEEAGKWKVRLRRRMFNGDVVFLAHAKYDNYTTRLTKRINADLQTMIDPKLTKPAFIQIAPWFRGPAELSVKGFSFDDGKSFLAFNIVGMSDPIGEQIHRGRENSNNAETAAPDGSPEAWAGRPERILNINEIIDLTGDGEPDGDSPAVEIQDPVFVTLGIERAVIDMRADQAKTVSGKHGKGSDASMFSAGEAHGSDKGIGHASIHAPQTYESHGILRDMWDAMGSLHRKRPDLIRSLSWFTFEDGFISTSEYKLIPLTPFDIDEDVTTKVKRFPYLEPPKPGLRGFLVARLILADGPAYIIELQRRPKLVKDKDGETKAGEDQFQGMVFRLKHENQLVPWLRYFREQIRHAKGVVRRLTGSCSGEAESFSHRNPTELVDGCLPRESIVLHALSKVTEKTIR

SEQ ID NO: 800 - protein, 284 aa, synthetic construct; identical to SEQ ID NO: 798
  REGION 1..284: note = TnsF-Tn7 System Protein

SEQ ID NO: 801 - protein, 232 aa, synthetic construct
  REGION 1..232: note = TnsF-Tn7 System Protein
MNQNSCDELVPYQTRKIKPTRRSVSGVYPFRGDVAVPFESTLERDFLMRSEFFLDVLDVIAQPAQIPFLGVNGQTYTYTPDFLVYYKLGNRSYSDYPKPLLVEIKPQVEWRQHWRSWLPKWKTARHYAHEQGWQFRIHDESRVRDKVFENIRFFERYKRMSFSPEESQCVIDSVQQMGAAPIHYLLARHFMGLYRSQGVAHIWHLIATRRLDCDVSKSINEFSEVWIPTNVY

SEQ ID NO: 802 - protein, 643 aa, synthetic construct
  REGION 1..643: note = TnsF-Tn7 System Protein
MSTETEYVISNDAFEPIRERVNVNVGGLVQRGETIFRIVQVLDFESLIGVNVDTGQSASLRIGDLRSIERSPTVTQNASQDLGDIADEDWRIAQERLAAIKPLVDAGRLGRENVEARASELKINPATLYRWLQRYKAYGVVTALIPQKRGWKQGNGRIDQDAEALIEQVIRDFYLTLQRPTAQKAITEVLRACQAKGITPPSPTAIRARISRIAEKEQLRGRGHKEKAKNKFLPAAGSFPNATFPLAVMQIDHTPADIILVDDVYRKPIGRPWITLAMDVHTRVVTGYYLSFDPPSETSVAMCVAHSMLPKDDWMLLHKVDAEWPVWGVPRTIYVDNGADFRSNNFQQSCLMYGISLEFRPVKQPRYGGHIERMLGTLLREIHDLPGTTFSSVKERDGYDSEKHATLTKSEFEEWLVTLITKLYHRRLHSAIGLSPMRKWEIGIFGNAEVQGIGVPPRPADRLTILLDFLPFFRRTVQTFGVTIDGLSYYAEALRPWINAQDENTKKKKDLIFRRDPRDISTIWFFDPKLEHYFKIPLADLTLPAMSIWEYQQAKDKLKRDGVASVNEHQILHAITELRSRVDEAAEKTKAARRQAQRRKEHAKNVSPAQPLPAPKLPVQVQSAMALQDGLLDGEINDFGDIA

SEQ ID NO: 803 - protein, 719 aa, synthetic construct
  REGION 1..719: note = TnsF-Tn7 System Protein
MAISSRQLSAVISFCLFANKHKIDVNSQKLISMGMIDEDKNPIELFHELAKKFQLKARVTKMGRAKASLFTYPFAYQNVDGVFILVMEKNDAGYVTVNPLFPAERGIATTSQLRDACDGKIIEVVETGSTQEEHRRFGMGWLGRRMLKFKALLWKIALASLVLQLFATATPLFSQIIIDKVLVRNNPSMLYVLGLGMFIVIAFELVLTILRSRQQAHIASKIDIALGTHIKRHLMRLPLGYFQHRSSGQVIGIFRELDTVRSFITGPSATSIVDISFIVIFLPLMYSYSGRLTLITIVTGLLMATVAIIAKPWELRNAKEFSFATTEAQTRLIEGISTIETVKALGAENIIRGRWEAAFARLVLATKETSGTQGSLQAINASIQRLSTLAILWLGAELVIQGQMSAGQLIAYQMLSMRVLHPMLRLTHLWHEVKKVEFALGRLGEIMNAATESDVSTHVGDTLPQGDIVLKNVSFRYGDQRTQALRNLTLTFGAGKFSALVGSSGSGKSTLLKLLLKLQQQSIGSIQYGASDLRGIDPVLLRKRVSLVVQDTQLFTMSVAENIAIRAPWASMEEIVAAAQCVGAHEFIDNLQHGYRTVLGENGVAVSGGQRQRIAIARAILDQPDVLILDEATSALDFPSEKLIYRNLFQIFKGRKIIVITHRIRSVEHCDTIHVLDQGALVASGSHAALMASCDAYRHMLEQGPVRAEANGSEEVQYG

SEQ ID NO: 804 - protein, 719 aa, synthetic construct; identical to SEQ ID NO: 803
  REGION 1..719: note = TnsF-Tn7 System Protein

SEQ ID NO: 805 - protein, 375 aa, synthetic construct
  REGION 1..375: note = TnsF-Tn7 System Protein
MVASHTWHPGTGRIASRWPVPVPLEADELLSTWLVRVALSQGCDPLALTGELWPKWRVWTLDLDRGVATERLRILERMSGIDMSALDAASLRTIAMAIGTAVPGDVAVVPWILALGSRNRQRHGGLQYCPQCFGTDKSPFYRLQWRLAWHNCCHVHSAALLDRCCHCAAPVEPHRLSPPTGLLNVCSSCGYDLRACHAMAADAGAMAFQITADDVVSCGYGKYGEFTLATTEWFLLSRYFLMLLRVAIRNSSSNLASCLVMLGADIPGMRPSLTGLGFELLPVGERAVFLAGTGKLLAAGPKRLLETAQALSLSSATLRQCLSNLPVHIRDIVDALPKQSRSRKSNSKTAEIAPLPRQTVTRIWARLQRKMRRIS

SEQ ID NO: 806 - protein, 296 aa, synthetic construct
  REGION 1..296: note = TnsF-Tn7 System Protein
MSTYEHIHEDFRHIMALSAAERIEFLDHPRWIGYKVAQNILDTLQGLILKPMRPRMPNLLIVGDSNNGKTTIVARFRHLCGQPYVNDESEPVKPVIVAEAPPSADEKGLYISILEEFFAPYRATDPTSKLRYQTIHLFRACHVRMLIIDEFHSLLTGSPVKQREVMNAIKLLCNELAIPIVGVGTREAVRVLHTDPQHASRFDVMTLPAWELNVDFQRLLAGFEKVLPLKLGSNLHAPELAQRLYTISEGNTGNLHRLLIECAVEAIKSGKEQIDKTIVESKAWLRPTRGIRELVG

SEQ ID NO: 807 - protein, 296 aa, synthetic construct; identical to SEQ ID NO: 806
  REGION 1..296: note = TnsF-Tn7 System Protein

SEQ ID NO: 808 - protein, 632 aa, synthetic construct
  REGION 1..632: note = TnsF-Tn7 System Protein
MSENKWSNKFSKCISCNTTLHPHKAKGLCNSCYQKEHKYPKSECSICGKTSRVHKIDNGKSICQKCYKQPLHTCSICNKQASAAVKLSMTEYVCDSCYIKHYRTKHICSICGKLEVLAINSSDKKVCIKCYSSPNHLCSKCGRNIESPYIVDGKHVCSRCYENSKTSSSEIDINQGVYICSICGNSGSVQHIFSDNSIICQDCAKQQVHICNSCFNPAVPIHSYSNALPYCRNCYYKQKFESIFDKLAMNWCENFTNIIKDYFNSKAEKVSYESVWVQVNTSKNLLDDVYSNYVNNSSDFSSIDFSIIHQKHFTKKLFIIDMISFLCHKNIMPDYDCSLFLLENLSYQISNLAVEFQKVIKAYKESLLIKYRNYQQKGWIKNHSKFRYYTCYLYMLTALRFLYFCHVLLNLIQPTEINNQTIDAYLRLKPYDKGNLRHFITYINKHKITFTQLNLPNSKYRHELNVSLCTDKQKQLLKSCLYNKNIKLRDRIIVILMLLYGFTPEEIRILKKSNFAQTILSNKTINILCFNKTSHEIPEILSPLILEYLDTLRTDSEYAFPGRNYNTAISLSLVCRIVHDFDVTATELYYTAINNAMLNGLHQPALLMKSFGINHKTATRYYKLLRGSEEFI

SEQ ID NO: 809 - protein, 85 aa, synthetic construct
  REGION 1..85: note = TnsF-Tn7 System Protein
MSNFKVYILSCSDGTYYTGYTSDLQKRLQQHQEGHGCTYTKTRTPVELVYTEELPDKPSALKREKQIKKLTIFDKEKLIEKSRAN

SEQ ID NO: 810 - protein, 632 aa, synthetic construct; identical to SEQ ID NO: 808
  REGION 1..632: note = TnsF-Tn7 System Protein

SEQ ID NO: 811 - protein, 380 aa, synthetic construct
  REGION 1..380: note = TnsF-Tn7 System Protein
MEVNFKNKLKLVVNSNSPQKNNTTNINNSISLEEDTYSQIINAYTNRLMARRLKPSSIRTTINTINDLFLFTNQYPWDWTAEIFDEWCAYLYRERNNCEATQRHKQNMISRFQSFLVESPQLSDLCKVNFGKKPLLICSQDNLIPHKVPDENKEKRLAFTKDHLKCLWAYFDEQIALAYKNKSKSLKVLQRDKVLYLIIYYYGLRANEVSMLDTTDFLHNPKRPEWNNFGGIIVRFGKASGGSPPKRRTVWTISETSVEYLRWYLESIRPLFGFDESKSLFLTERGCRMNPKTITQNFKEHLKCAGLPHDNYSTHCLRHSYISHLSEDLEISPRFIQEQVGHTYLATTQIYTHLSDSFVSKQLTNVIDRQLAKFLPKGCN

SEQ ID NO: 812 - protein, 471 aa, synthetic construct
  REGION 1..471: note = TnsF-Tn7 System Protein
MYQCDECGRSVDKIHRIYKKNNFCHSCYIRVFKKRNCPSCGKNARLNKYDSSAICQKCENNRPCIRCQCVDYCIGKITEHGPVCKSCSVYFRELQTCERCGALSQKLSRISRFEDNLRVCPKCATRDYRTCPSCQRYRLLEKNVISGQMYCKKCLNLPPHDCLTCEMKIPAGRGNYCENCSWHQTLERRIKNLVNNLGNQNLQEYFKDYARWLEQEIGSHKAALLIPKHIGFFEETNNLWNSGVPTYAMFLLKLRPSGLRRYELPVRWLVVVHKLKLDRYLKEYYSELDQLKKLTDVCLAGSLSDQILHDYYKVLINKVDQGKTSIRSMRLAMKPASVLMSRISKSRFKLPQLWHIKHYLSEYPGQSCEIVGFINYLNLKYSAGLNISFITNSSFLKKIRHQKLEKEILNLIQRTDDSFDTLLWVQSCLRYFHKLNRSDSLEIELSMITEVDDGYKILFKNQIYWIPKLKK

SEQ ID NO: 813 - protein, 471 aa, synthetic construct; identical to SEQ ID NO: 812
  REGION 1..471: note = TnsF-Tn7 System Protein

SEQ ID NO: 814 - protein, 232 aa, synthetic construct
  REGION 1..232: note = TnsF-Tn7 System Protein
MYNQLCDTVKIVPARRKVGNTRISVSGLYPFKKDSAVAFESTLERDFLIRLEIDPNVLAVESQPFTIEYIDNGKKRVYTPDFLVTYKHDNYLPFIPPKLVEVKPAAELEQNLNLWKTRYRAAMTICKEEGWKFHIAHEGRIRDQLWLNAMFLQKYRKMNFSFADSKHLIDYVRDREVVTFDTLLARHFSGKWDRANGISQIWYLVAHGYLVCDLSLSLQPSTELWTSGNYYE

SEQ ID NO: 815 - protein, 629 aa, synthetic construct
  REGION 1..629: note = TnsF-Tn7 System Protein
MNDRRINIKIAAGEAVQVKGVPHTILEIIDLKSVFVENKNTGRKGIAAISELEPALPTEKYEDINLIPDKDWVEAERRFNIIRPFIEEGVSGRKEVELRAKQHDINPATVYRWLKIYNAYGTIDGLRPKKEGLPQGQKMINKHAEAIIEKAIKDLYLTNQRISVQKVVLEVKRLCHEYHILDVPHANTVRNRIAAISQKEALRKRGHKEKANNRFTPAAGKFPHADYPLAVVQIDHTPVDLILVDDFNRQPIGRPYLTLAIDVFSRVVVGYYLSLDAPSVMSIAMCVSQAVLPKEKWLALRKIQTEWPVWGIMNTIHVDNGPEFHSETFRNACMAHDIRLEYRPVKKPRFGGHIERLMGTFATDIHAVPGTTFSNIFQRKDYNSDTEAVFTFSEFEDWLIDFICNVYHKRKHSALGTSPLHAFELGIFGDKNTLGSGAARLPANDHNFFLDFLPSFERTIQTTGVTIDGLSYYSDVLRGWINSVDPDKHKEKRKFIFRRDPRNISEIWFFDPEIKNYFKVPLADQSIPPFSIWEHKKIQELKKETGEYLKDHELGQALAKLRERVQEASTKTRRARRSYQRSTQHQQSINPASIQDKKSQQESTVMVQQLENLYGLLPLDELENDEDIS

SEQ ID NO: 816 - protein, 208 aa, synthetic construct
  REGION 1..208: note = TnsF-Tn7 System Protein
MTLSHLGVLFLDELPEFDRKVLEVLRQPLESKEIIISRAARQITYPANFQLIAAMNPCPCGYAFNQDSRCQCSPESIKRYQNRISGPLLDRIDLHIDVPPLKAQELQDPTPVEGSTAVRQRVISAYEQQMQRQNCLNQALSPKQLEQFAILDDTSQRMIEMAQQRLNLSARAYHRVLRVARTIADLSQSEMIQSPHLTEALSYRGNHS

SEQ ID NO: 817 - protein, 360 aa, synthetic construct
  REGION 1..360: note = TnsF-Tn7 System Protein
MAPTRETYYWVTRTPLFQDEALSSWLIRVALGCGCDPLSLTGIIWPKWRVWTIDIDKGLNQEYLEILARKTAVSQDQLNNATFKELFVQNNELNPHQWILALGTRNRKHVGGWQYCPKCLEEDPVAYYRLNWRYVLHVGCTKHQLRLLDQCPHCHKAIQPRLLEAPDRTLFCCAICKKRLPDVKANTIDQNALRLQEDFALFLRQGYAIYANTLISISEWLNIIQFFNQFIRKVLRGPLNSKGWTFLNALEIKVPPIQILSTGLVLSQLSVVERERIFSCVYQLLNISQIKFIETACSLKMNRASFLDKRYQIPETLKFIEEHIVKISRNYPLIKLMPNVPKPSSKEAVQRRFMRLKKKI

SEQ ID NO: 818 - protein, 283 aa, synthetic construct
  REGION 1..283: note = TnsF-Tn7 System Protein
MSNYPHIFQEFRPIVDQSNEDRLYFLEEDRWIGYPAANDLLDQLKGMLTLPKRSRMPNLLVLSKPNNGKTSIINQFFKLYGEGYINELNNAVKPVIVVQAPVSPDEKALYMAILDRFWEPFRERDPVAKLRYQVVHCLKLYEVKLLIIDEMNSLLCGTPIKQRTVMNAIKYLCNETQIPVVGFGTEEAVRVLYTDPQHVSRFRVVNLPLWQLDKEFQALVNKFEKVLPLKQPSRLAEPATVKYLHDITEGNLGNLRSLLREAAKKAIISGQEYIDHHLLEDVR

SEQ ID NO: 819 - protein, 283 aa, synthetic construct; identical to SEQ ID NO: 818
  REGION 1..283: note = TnsF-Tn7 System Protein

SEQ ID NO: 820 - protein, 603 aa, synthetic construct
  REGION 1..603: note = TnsF-Tn7 System Protein
MTNTSTDQDKNSSDENKVKLLWEILKPYKDKYLQVWWYGGMEKGKRPGDQPQVHVLFREVLEDLRPTDNFIQITANITDLVSWRVDSIWHQQRKIDFANQDIYEFVINHTDFEFKFLKIYENVDEKKKINFFKNREECEIVDTKERKNCISFKVNHPEFDELLIPCLEFLTRAYGLSTELIRILTTYNESERESRLYIPHVGEKDLWSVLLGDRITRQDADFVAYYKYTELAKNATRILYSSIVRNSDLKQANIYPKVVPWHTETLPIRVSGFRLAGTKTFVVTRIRGMKSPKNDHIRIIPRATERINTTTDTNQPNPPLPQLGSGDINVSTNQGGRRPPSDYEFLEDDFEWIDGGPANELSKYKYVKQTKRPKRKKKYIETQTIGTGAPDNSPEVLNGQIVPSTNQSTEFQASEDGRIIGLWKACVKAMDFNPDLIQKVHYYTFEKGFNYSELPMLIGFFTESEVQVHKTWCYANSLKTQIRGALIIRLIVSQLEPVYIFDIQPATYTSTVEGETLTKERGHAGLVFQMKYEKDLEQFISDLMYLLPLYEGSYPQEVFQSLLVTQVFLFRHSNTKGLTEGESTLLNALKKIGINELSFKNIK

SEQ ID NO: 821 - protein, 481 aa, synthetic construct
  REGION 1..481: note = TnsF-Tn7 System Protein
MSNTSLENKQLTYCDGCGNLKPDIHRRYLNKAYCTACYVRCFVKKPCPKCGKDARLLKNDTHNVCERCLRSVPCIRCGKVAKSTARTPYGIACQSCYQRYFTEKKTCYECNKQAVNVSRYSAVPHDEPICASCAQKYTHKTCPCCGRYRKLVQIDKGEMCQKCHDLGQIPCSGCQKPMWAGRGQRCHECYLRERLTREIELNKHLFRNPNIKESYANFIEWLAETRGYGWTVEKHLKYIDFFAHCDKTWGEIPSYKKLVIEFKPDGLRTYLNALRWLIETNQVKVDKQLKTEMAEEQRIEQLLAKLGKTTPPIILKYLDYLHTRRLERGTSITTLRLSLQPVVDMYHQFELKDENTPSQAQLDAYLAIKSGQRASLMSFLPFLRNNYGVELRAKVKDTKDELSIQSKRKEVEKRLMALINSENPLSKKEQIEWFMLSMLFFHKKEITKKALKSATITDYTEEDMFLLVHESKEYWIPKYKA

SEQ ID NO: 822 - protein, 481 aa, synthetic construct; identical to SEQ ID NO: 821
  REGION 1..481: note = TnsF-Tn7 System Protein

SEQ ID NO: 823 - protein, 218 aa, synthetic construct
  REGION 1..218: note = TnsF-Tn7 System Protein
MLKQVRKIKPNYRSVTGFVTYKGESIAYESTLERDFLLYHAALPNVIDITPQPISIPFIKNGRTYEYTPDYFVQFKLNDKFKPRSLMVEVKPKEEWQVNWRDWSDKWKAAIAYCNENDFRFSIYDEDRIRHHALDNVNFLSKYKNLAVDRKEVNAILQQIEMRGETTVEVILELFFKGDIYRPHGKRVLWHLMSHNLIGFDIWEDITSEKLEIYHVDF

SEQ ID NO: 824 - protein, 671 aa, synthetic construct
  REGION 1..671: note = TnsF-Tn7 System Protein
MSIFEDRELKKQDESDLTSMNNKGVVINRGTLRLSIGGIYKKQDSDEEYQLIEFVDANQAFFKNLKTLKVQVLSIHQFENVHDADHAVMRLDIDAISDKEWERAQAKHAAIEPILRYDDDYDGYAGLERRAQECGVSVRTLQRWLASYVKTNSIASLIDKKRGWQEGRRRIDVVQELIIDEVIQDYYLTIQRPTIQATIQEVFKRCHLSGVKKPSKNAIRYQIGKIDEKEYLKARGYRSRAKNKFTPKVGSFPSVNAPLSVIQIDHTPADIILVDDKHRKPIGRPYITVAIDIYSRMITGYYISLDAPSVTSVGMCLTRSILPKEELLLSHGIQDVTWDVFGIPKKIHVDNGSDFRAESLKRSCSLYGIDIEFRPLARPEYGGHIERIIGNLMHEVHKLPGTTFSNIRQKDGYDSEKHASLTLGEFETWFLTYITKVYHQKPHSALGCSPAHQWRIGIFGDDEHEGIGIPSIPTSPQTLVLDFMPSVERTIQHTGVTIDGLQYYDTILNSYINTTDNKTDKKRKFIFRQDPRDISTVWFFDPNIKQYFKIPCANQAFPPMSIWEYNQLKKQVKQRSGTVNESLIYQAWEEMRTMIDAAQSTTKTARRQAQRRKTHIQSQKIHESARSQEDDVTTKAAELTVMGDALQGLKTTTLTSPVQHDDDSTYFEDIE

SEQ ID NO: 825 - protein, 393 aa, synthetic construct
  REGION 1..393: note = TnsF-Tn7 System Protein
MVASYSGLKKSHVKPLFFRTPIFDDESIASWLIRAAFRQGCSVTTFASYYWEEYRLWTLDVDKGFNFVDETIHEDMAILAETTRERFDFKNLTWLSKGMSSTIGKYRTTPWVLPLFKRNRRALYGYHYCPVCLEEDKIPYMRLLWRYSWYTYCHVHAVKMENRCHSCDALFQPGLLSQELQTINHCHSCHEVVTNDYLGNLLLIPEVFELQKQAMQVLEDKQAVVFGQIVNGVDWFDLIGFFITLTKIAARHADNQYKMFRLFNELGLDTSRVSTFSLKESETGLVFESLPIHERIRYLRYAKMLLDIPLDKWVCACLAVEANQNSFMFNGKKSVLPRAFMPVINQLPLVEEQKREKRQFDKPATLNAVKKSWARLQKKANAWAEYEQHLTRK

SEQ ID NO: 826 - protein, 298 aa, synthetic construct
  REGION 1..298: note = TnsF-Tn7 System Protein
MQTQLPYTHIHEKFRHIAHLSDKERLEFIGSPRWIGYTAANKAIDIMQGLMNTVRQHRMPNLLIIGESNNGKTTILNQFSRKFGDTYLEDDLDLVIPVVFIQAPPASTEKDLYIALLATFALPIKMSDSASALRYQVIHAFRQCRVKILIIDEIHSLLSGTARQQRQIMNCIKFLCNELQIPIVLSGTPDAVRVLHTDPQHISRFDVLPIPIWQNDGEFKRLVGSFERILPLKEPSNLTEPKKLNLIYSITDGRIGNVRRLLNECAIDAIKQGKETITVEIIKEKSWLRPTQGLRNLM

SEQ ID NO: 827 - protein, 298 aa, synthetic construct; identical to SEQ ID NO: 826
  REGION 1..298: note = TnsF-Tn7 System Protein

SEQ ID NO: 828 - protein, 321 aa, synthetic construct
  REGION 1..321: note = TnsF-Tn7 System Protein
MPAGRARTCETCYWTSLFNRRVAVNLAGFTSPRIQQLYESFSQWLLMRNGPHKAALNINVHYSFFAQLDDLWGEVPTYDNLLKAFGAAGLRQAENPMRWLQEIGAVIVSAEKRDEHTEQRRVSEMLSEFPDFWSNQLLHGYHAELALRIERSETDLRSVRIALRAALNFLKHAGLAPQTIPKMKVLEAFWRSSPGQVAAVTGFVGYLNKSYNAQLRSRPEKRWLEKARRDKAERELVALLKGGAYVESETIWIGKALAYFHNIRRVNRKTLVYRPESFKGEAGFSIEYEGQVLWVPSASTYTREPAAARATPEQRLLERRR

SEQ ID NO: 829 - protein, 525 aa, synthetic construct
  REGION 1..525: note = TnsF-Tn7 System Protein
MFKTLYNNIPGPNSRAVVPLTALPHYRQGSIWREGQCIADTEMTLRKFSVNFSPEGYSITSRAELIDGGLGHIFHDNEYPLKYRRDACKLISFKLPDKKNLLVPCMEFFVRAYANNMAVCKALSTLTFAEAKSVFFQCDKPDAFRWLIKPTNIMRNSDAVFLAHLLYDDYTETQVRRLNSAIIASEPNTKIFPEVKPWFQGLGELLCRGRWINQGQTFLCLDLRGSSQPEGREVELFRETFNSNGGEDGGRTVLPQPTRTARADELLAEESYVTPDAQAGKVIVKLPPFQILGSKRPVKKIKTVKETNRGRRGPEPPEVETYSSGDGTGDGKNIGKSEHIADVALESQGFLLDIWNAFLSIKRNNPERVKEVSWYAPPNYGTSTPPRVILFNRNGLDWTQTAAWNWVNLEPWSSQRRGLMVLRIVIDHETFFCFEIERQEPSEKYPNPRGFSGVLMKAHTADPVEFQQFVETVTSRIRNNLGIFKNIMKTFPPNSIVFAHRSIDQEMRYRTRLINVFFQAGVVLE

SEQ ID NO: 830 - protein, 321 aa, synthetic construct; identical to SEQ ID NO: 828
  REGION 1..321: note = TnsF-Tn7 System Protein

SEQ ID NO: 831 - protein, 181 aa, synthetic construct
  REGION 1..181: note = TnsF-Tn7 System Protein
MRFNYRVETVIAQPVTVDFIDPSGRANTYTPDFLVYYHQGNVVPEQYIRPMLVEVKPAYEWRNNWRAWRGKWKAARRYAQQEGWTFSIYDESRIRGQALENIVFLERFERYTFDQEDIDMVLNTIRGMEVAPVHYLLARHFNGIYRGRGVSLLWHLIAVGLVQCDINEPLSEYLELWVVTP

SEQ ID NO: 832 - protein, 642 aa, synthetic construct
  REGION 1..642: note = TnsF-Tn7 System Protein
MNIYEVDTEEYLQPFEPSRARVPIEVGAMVRREKEIFRIVQILDFQTVIGLEVETGKCVSLRVPDLKAVEQDKLDGLYVNYDVSTISSDEWAIAQQRFSAIKPFINDSIIKRDSVETRAKEVGVDTATLYRWLERYRNWHEVLALVPRKRGWKAGSSRLTIQADKLISNVIDEFYLTPNRKSVQSTIKEIEERAKNMGIEPPGASAVRARIKNIPEKIVLRRRGYADKARNRHTPSVGQFPGADYPLAIVQIDHTPIDLIIVDDRHRKPIGRLWLTLAIDVYSRMITGYYLALEEPSAISVGMCLAHSFLPKENWLLLHKVEGDWPVWGFPRVVHSDNGADFKAEDIRRSCSNYNIENNFRPKKNPKYGGHIERLLGTFMTMLHELPGTTFGNITDRDGYDSDKHSALTMDEFERWLVMTIILYHNENHSALYMSPSRKWHLGFFGNRELDPLVCIPPRPNDPHTLQLDFMPHYERTVQTYGVQIDVLYYSDALRHWINTKDPETGLARKFVFRRDPRDISVIWFYDPVLKQYFRVPVANQAFPATTVWEFRAAKQQAVDEGRKHIDEALISKIIIERRALVDEAISTTKKARRAAQKHKVHSKNKTPAQPNKPFSNPVPAPVIPVAEGLLLGDVEFEGDIQ

SEQ ID NO: 833 - protein, 373 aa, synthetic construct
  REGION 1..373: note = TnsF-Tn7 System Protein
MEASYTWHPAAHGLNPRWPLTPQLLPDELFSSWLVRTALAHACTPETLTDNAWPKSRIWCIDLDRGLSESRLAVLAQLTGVSVADLTASTLLLVAHALHPDAFLQISNLWPWILVLGCRNHFHAGGLQCCPGCMDEPAPHYLIQDRLAWHTSCPLHRSLLVDRCPRCFSALQPGLLRVGNSLAQCHHCGEHFSIAAPLSCSEEALAFQRFADGLYGKSTAFGQAEVGFAEWMFVARVIISLLRSVVRHPTASSRLFCQLMEVDVGACPTSSLGLPFEYLQPAERSALIGPAWVIMQAGPERFIECATRASLPHSLLPIPVRDAPEILTHMASALSCRPRCSPDMTEHNHTRNPLGVWRMWLRLQRRIRRDGFH

SEQ ID NO: 834 - protein, 296 aa, synthetic construct
  REGION 1..296: note = TnsF-Tn7 System Protein
MMGYAHLHTDFRPVLDLSDRERILFMGEPRWIAYKSAVRILETLNSLIDAHKRPRMPNLLLVGEPNNGKTTLIRQFVKTHGQGYVNEDSEPVRPVILAESPTSADEKELYVAILEQMWMPYRATDSKVKLRYQVIHALRELKVRMLIIDEIHSMLTGSAIKQREVMNALKLLCNTLMIPIVGVGTPDAVQILHLDPQHASRFDVIKLETWKLDADFQRLLKAFELVLPLKKPSNLFQPELAQLLHSISGGNTGDLHSLLVECATEAITSGKECIDRPLIESKSWKRPTRGIRQLMV

SEQ ID NO: 835 - protein, 296 aa, synthetic construct; identical to SEQ ID NO: 834
  REGION 1..296: note = TnsF-Tn7 System Protein

SEQ ID NO: 836 - protein, 476 aa, synthetic construct
  REGION 1..476: note = TnsF-Tn7 System Protein
MKDNRTGKLYCDECGKNVTEFKRRIGEHRFCDACYVRIFEKRTCQNCNSQFREHPTSNASYCRRCRPKFSPCVRCGRLDYKVNKLTPYGAVCHSCYQYFVTHTPCTECGNSLKRTSRYLSLKAFEPLCDLCAEKRFDTCSNCGRRRHPLTQILEEKLCRKCFTSKTTICRICSTPYPSGHGSQCRNCTFTLSVERKLPIDIALFEHPYTQEYYKKFAYWLIKETSASNAATKLHSYISMFKAIDSNPTAWNVDVKTLSLIDKAQLRKDSLVLRYFNYRCISIPTELLRDVSMQRVISKCVNHFQNPNIPNSVIFKGYASEVLQKCEQGEIKISSTKQSLSTANSLLQYLIKTKSFISNASIRKFLAQHPGQRASITGFVNYCHEHYDLEELELPQKPKLNAKAVVKLYLKNHLFTKAPSIQEIRAFMVFCHNAPVDMVEQLTMKHVLVASSSFLSVQIDGKLYQVDLSQLKNVSLM

SEQ ID NO: 837 - protein, 476 aa, synthetic construct; identical to SEQ ID NO: 836
  REGION 1..476: note = TnsF-Tn7 System Protein

SEQ ID NO: 838 - protein, 227 aa, synthetic construct
  REGION 1..227: note = TnsF-Tn7 System Protein
MYQQVRKIKPTRRSISGVYPFRGEVSIPFESSLERDFIILQEANPRVSRIVAQPVELSYRNSQNRAYRYTPDFLVYRDNCFPHDSDHQWKPMLVEVKPLEELRKSFSKLKPKFQSAFAFARSEGFLFHVFDERRIRTTKLENLNFLNRYKRFPFDQYDTEELELLLSRVEVLGQCTIDNLVTSLYKSDKMKLQTLAQVWHLISVSTLACDLSLPLNWQTEVWINEYE

SEQ ID NO: 839 - protein, 650 aa, synthetic construct
  REGION 1..650: note = TnsF-Tn7 System Protein
MSKSDKQPTEPFTPSRGKLEIQRGLQVIHNNSAYVVTEVISITQVIAKSLDTEKAIPLHIDNLEVVQNEDLSSLAARDMFALHSAEYERAKERFAIIEPLLEFDHISKKDIEKRAQETDASVPSIYRWLKRFRATGVISSLMMKQRGWSSNRSRLPPRVDEIVNDVIEKVYLSKRRKSVMKVIQEIEIQCAKLNLPAPHPNTVRGRISNIDERIKVRRRGNRDQARNLYDPAAGTFPNADYPLAVIQIDHTPMDIIIVDDENRQPLGRPFLTLAIDVFSRCVTGYYIGLEAPNETSVAMCISHSILPKEGWLELFGVSATWDVRGFPAKIHVDNGADFRTETLRRACREYQIQLEYRPVKQPQYGGHIERLLGTFMRKLHDIDGTTFESVYKRKNYDSDKHASMTMNELELWLLKYITQIYHTSKHTGIGVSPNKKWELGIWGDGVNKGTGLPAIPTDPMTVQLDFMPLFQRTVQKDGVNIEGVQYYEDVLRAHIGARDETTNRARKFIFRRDPRNISVIWFFDESLNQYFEIPFADRTLPRMSLWQLRAIKKHLDSQGRDKSNHHEIRSAYEELEQIEQEARRKTRGARRKAQREKNFQIRPTPADVVTNNVTPMQEQGLNTGAPQKDSGIPDDEYFDLIKDIRAFDED

SEQ ID NO: 840 - protein, 239 aa, synthetic construct
  REGION 1..239: note = TnsF-Tn7 System Protein
MTVSHYSVYHRGSIPKPGEITLAHRGTLFLDELTEIPRHILDALREPLESGSVHISRAKMQTQFPAQFQFIGALNPSPCGHFNGDLSSARATPDQILKYLNRISGPFLDRIDLQVEVPRQPEALRQTQNREIKEDETTQYWSGKVKQARELQNLRQQCLNSEISVANLETHCAVTEDDHEYLLAAMEKLQLSHRAYHRTLRLARTIADLEEKTEIQRVHLSEALSYRALDTLFNRLKEL

SEQ ID NO: 841 - protein, 374 aa, synthetic construct
  REGION 1..374: note = TnsF-Tn7 System Protein
MAHADSRKPTTEVVVATKWSFKPKSLPNETLSSFVVRAALAHHLDPMSAANIIWGAWRAWTFDIDRRLPAEQLQQLAQSLGADKDALKSLTIHPHIHAISNDTYSNRNRWFWVTSLAHRNGVRRESYSFCPQCLGSDKLPYYRREWRYSWYVCCPIHRSWLLSRCPHCSYPVHLHQYRPDNPSLLYCSSCKKRLDSWLDNTPVPDYLIHGHIRTLEHLENRDEDWTRWFYSLKFLVSLSRKILNGKQRCSQLILATLSEHFPELVPMHLGSTNFPDLELESRRAIVAIAFYLKSLHFNDFLSLLVEHAVTYSFFTEGSLELPTEYADIAPELKRITHLKSRRVRRLNVWPEPRSEEYVQRKLQIALKEIRSRER

SEQ ID NO: 842 - protein, 551 aa, synthetic construct
  REGION 1..551: note = TnsF-Tn7 System Protein
MKMETLPEDDNIWRVHSLGKILWNYDAPDSPLIECCLEKLGESHEFKIIKVGFFDMVFAPIGSCWQRQEEVDAPLWSHQGISLKNIVIKPSEVSFVSAFGLRQSEPKRYFIPPYQYKLPKEFGSSKFLMCSLQDGSKVFIPSSVIFLRLYGASRTFKKAFLSSDSTHALKAMRYDVDLTKLENQPKEGDYVVGLTMEMLDADCPWVYLLENSPYFQSVHNKVRHQLNRSRKYGGFISFPLCQGGDQAMLVSGMDISTSEYQAFLVFDIKGASLPQTPPFFRDRENTNSVSENAERPEKEATGWPGGKQPENNNESPDETSMDSTKPPSNDRQSKSASTPPFIVLGNQMKMTSAVRRERKTSPGANRDLKEAESHSQADPDDNADSDKGGLFAHTAFRKHDMLIEVWERLNHLKASGEIIEIQSVSIRNGEKALLGEKFHFCELPRQGDWTYHAGDKSKPRFIVILEIQTKEQVVTLFEIEPRINRNGKTSRHQGCVVKGTFSAISFYEIFKHLALSKGVWARIPAGFLGEYRAYSHTSNQGGLVKALKEPK

SEQ ID NO: 843 - protein, 296 aa, synthetic construct
  REGION 1..296: note = TnsF-Tn7 System Protein
MKLDHINEKYREIARLPDENRIQFLNSERWINYPAAKRVLEELDDLLIAPRRTRMRSLLIVGNPSNGKSSILETFVKKHSSELDETLEDEEISVPIIKIETSKPDIKQLYIEILTAFWTPFRPSQTENVLRQQAIHVMRECKLKMLLIDEFHSLLTGTAKQQREVMNEIKYLSNVLKISIIGAGTKEAVNVLHTDPQYASRFDLIQLPIWQFDRPWLQLLFSFEQGLPLRKPSNLIDKEKSQLILSISQGILGNVDSLIRLCAIKAIESGSEEISLALLKEFKWHTPTRGNRQLKL

SEQ ID NO: 844 - protein, 296 aa, synthetic construct; identical to SEQ ID NO: 843
  REGION 1..296: note = TnsF-Tn7 System Protein

SEQ ID NO: 845 - protein, 287 aa, synthetic construct
  REGION 1..287: note = TnsF-Tn7 System Protein
MAINANGFSADGINALYNQFGEWLLDRSGPHKAALKINGHYQFFQALDAGWGAVPSYEQLLQHFGARGLRKAENPMRFLVETGRVTVSAQLREQDTERGRLAAILAEPVDAWSARLLSEYVDTLMAKMEHSGTGVRSVRLAARPAANLLKVAQLKQGALPTQKNLEAFWRGSPGQVAAVTGFVGYLNKRHGLALQVKPDSHWLAQARRQRAERELVALLSEAAGDDFEARWIVKGLAYFHDLPRVNRKALVFQMQEYRGVAGYNVTYVDKTLWVPSASSYQHGEHSR

SEQ ID NO: 846 - protein, 577 aa, synthetic construct
  REGION 1..577: note = TnsF-Tn7 System Protein
MADQLQRIDLSYYRINLRHTDSQVKLLQGDQLVWWYGPIRQNTRPRSIPLVKVHFRQLFNDVPGPRTSAIVPLSSLPHYRIGSIWRNGLCVADTNLTSAPEDFEVNFDEDGWSLTSRAELVRENNSHLFHHDEYALQYQHDRTRLLNFKLANGRKNLLVPCTEYFIRAYARNMEVCRALATLRWSDVMSVCFDEPRRDAYQWLVKPSRKMRFYDAVFLAHLLYDDYAARRIRHINAQFISQDPSAHIFMEAVPWFRGKGKLRCRGRWINGDNTFLCLNLGGSSQPVGEEIEWLTKKLDSSDGEEGGHIVLPRPVRTAEAEEFINEHSHMAPDGHAETIIVKPPPFKLLGPKRPVKKRKEVIKTDRGRLGPNPPEADSHSSGEGTGAGKNIGKLEHAAEAELETHGFLYDIWNAFKSIMLDNPDRVTKVNWYTPPKFREQGLPRAIVLRPTIDWTPEDKTAPGWVYLDKKTGECRGVMVLRIEIDGENYFCFEVQPTKPDKAEYSGVLMKSHVTTMEEFEEFVQQLCSRVRYVVGRFKHMESFFPPGTKIFKHHQKDAKVLYRSRLINALKEIGVELN

SEQ ID NO: 847 - protein, 287 aa, synthetic construct; identical to SEQ ID NO: 845
  REGION 1..287: note = TnsF-Tn7 System Protein

SEQ ID NO: 848 - protein, 182 aa, synthetic construct
  REGION 1..182: note = TnsF-Tn7 System Protein
MRFSHRVESVIAQPARVDFLDSRGRPQTYTPDFLVHYRQLPGVDYMDYIKPMLVEVKPAYEWRKNWRTWLGKWKAARRYARQEGWTFSIYDESRIRGLPLENITFLERFERLEFDREDIEMVLKTLQEMELAPVHYLLARHFKGVYRDRGVALLWHLIATGRVECDITEPLNEFLEIWTAAV

SEQ ID NO: 849 - protein, 640 aa, synthetic construct
  REGION 1..640: note = TnsF-Tn7 System Protein
MNIYDIDTDEHLVPFEPSRERVRIEVGATVRSDKQNYQIVQLLDLQNVVGIEVESGRSVSLRISELEPVEQERVDGLYVNYDISTISSDEWAIAQQRFSAIKPLLRDSVLPRNSVEERAKEVGVDAATLYRWLDRYQSWHEVLALVPRKRGWQSGNSRLSAQADDLIGAVIEEHYLTTQRRSIQSTIKEIETQAKALGLTPPSASAIRTRIKRIPEKVVLRRRGFADEARNRFTPSVGKFPGADYPLAVVQIDHTPIDLIIVDDRHRKPIGRLWLTLAIDVHSRMITGYYLALEDPSEISVGMCLAHSILPKESWLNLHNVRGEWPVWGFPRTVHTDNGPDFQAENFRRSCSNYNIENQFRPVKRPKYGGHIERLLGTFMRELHELPGTTHSSVPDRAGYDSDKHAALTMSEFEEWLVKTIIIYHNRVHSGIYMPPARKWHLGFFGSRGVDALVSVPPRPADPLTVQLDFMPSYRRTVQHYGVQLDVYYYSEALRHWIGTTDPATGQARKFVFRRDPRDISVIWFYDPVLKQYFRVPVANQAFPAATLWEFRAAKKQAVDEGRQHIDEALIGRLILERRQIVNDASASTKKARRDAQKHKVHTKNITPARPVKERVEAVPSLLTGEGQLLDDVDLIGDIQ

SEQ ID NO: 850 - protein, 296 aa, synthetic construct
  REGION 1..296: note = TnsF-Tn7 System Protein
MTEYAHLHSDFRPVLQLSARERILFMGEPRWIGYKAAHHILDSLECLLDAPKRPRMPNLLIVGDPNNGKTTIVRHFEKTHGQGHVDENSEPVRPIILAEAPPSAEEKDLYIAILDRMWMPYKTTDSKVTLRFQVIHALRELKVRMLIIDEVHSMLTGSATKQREVMNALKMLCNTLMIPIVGVGTRDAVQILHLDAQHASRFDVIKLETWKLNADFQRLLKSFEAVLPLKRPSELYKPELAQLIHSISGGNTGDLHGLLVECATEAINSGKECIDRPLIESKSWKRPTRGIRERVV

SEQ ID NO: 851 - protein, 296 aa, synthetic construct; identical to SEQ ID NO: 850
  REGION 1..296: note = TnsF-Tn7 System Protein

SEQ ID NO: 852 - protein, 653 aa, synthetic construct
  REGION 1..653: note = TnsF-Tn7 System Protein
MSAEASRPADDGEAAELASIVSIVQATANELSVDVIEQIVLRVAPIRRTRRRLQIALETRPLLLTGGHPNVPATAQDLCHALVDAGASAVVLPACEGCGRHVRMPHKAPDGGRHCSRCERNHRARECSNCGQVRPVYRSIEGDTLCRVCWRSDTRSFAVCSRCGQNATIITRRPEPVCVRCYRAPLKRCSLCDKDGPVATHLDGRRVCARCYYGMRRPRPCPDCGQPRFLTHPHSGRMTCAECAGAPATLACPGCGSVSNSRKHHFCDRCRHPATVRRLLTKEDGEVPEALRPLEAYLLTHPTKSDSIERWALRSGTARTLRDLVEGRLALDAGAIIDALPSPQSEAFLLSLLAAAGLLPEDDVHQARFERWLEHWLAGIESQQDRLILHRYHAWGTNQLLRRPVSRPTGRGHRMSRHRSRLRYCAHLLVHIREAGHTIASFPQRDLDRHLTGSSSQKDALSHFTRWLRQHRLSALTVSARSTGEPSPGMDSDQRWQTARRFLNDDTIPPGDRVGGLLTLLYGMQATRVVALERSSVTELGGRVSLTIGSDPIELPATLGRAVRDLMSASAPKTDRWLFPGRNPGTHLTAGTLVQRLARYGLRLADARATTLLELAQHMHPRLISDLLGLSTTAAARWWRLAAGDWTGYPPIR

SEQ ID NO: 853 - protein, 360 aa, synthetic construct
  REGION 1..360: note = TnsF-Tn7 System Protein
MATVTFDNATRLYPGTDKPAVDKLNIEIADGEFLVLVGPSGCGKSTSLRMLAGLEDVNSGRILIGERDVTDVPPKDRDIAMVFQNYALYPHMTVADNMGFALKIAGVSKEERAQRVREAAKLLDLEQYLDRKPKALSGGQRQRVAMGRAIVRNPQVFLMDEPLSNLDAKLRVQTRTQIASLTRRLGVTTVYVTHDQVEAMTMGDRVAVLKDGILQQVDTPRNLYDRPANVFVAGFIGSPAMNLLELPEADGGVKFGGTIYPVSRDVLSEASGPTVTLGVRPEDLETAPQGEGLEVEVDVVEELGADAYVYGHTSLDGQNHDIVARVDGRRPPMKGETIWVRPQQGHVHLFDTKSAQRLGD

SEQ ID NO: 854 - protein, 360 aa, synthetic construct; identical to SEQ ID NO: 853
  REGION 1..360: note = TnsF-Tn7 System Protein

SEQ ID NO: 855 - protein, 349 aa, synthetic construct
  REGION 1..349: note = TnsF-Tn7 System Protein
MARPEETVFGEMLDSWAAQQASRGLRQSVIRARRNLVDRLCEHSGHAPWEWTPRDIESFTVELAASGVALSTLRGYHGSIRQFCEYLTSPHYDWAEICEAQFGTVPSQVCLPWNTLAHRFEFEGDGSRRPLTYDEVEKLFDTADRRVEDLVSSRRKGALAALRDAQLLKTVYAFGLRRTEAVSLDLADLHHSAKMRSWGRYGALHVRWGKAAGGGAPRRRTVLLVPEFDWWIPGMRQWVEEARPRFAGRDLPSIWVTERRTRVSPGYLDRRFADLREAAGLDEKLTLHSLRHSYATHLLEFGYAERFVQEQLGHAHASTTSIYASVSSDYKNRVLANALKGLLEIEEEQ

SEQ ID NO: 856 - protein, 110 aa, synthetic construct
  REGION 1..110: note = TnsF-Tn7 System Protein
MIEIEPTWNLRGVMASRGIFQTTKLGPLLAERGIDLSREQVFRLVTGTPSRVSLHVLAALTDALECTLDDLVTVTRREVAEKKAVGGEEPSAGIGDLRPIRASIRRPRER

SEQ ID NO: 857 - protein, 292 aa, synthetic construct
  REGION 1..292: note = TnsF-Tn7 System Protein
MNHKWSRELLSQFSEWLLETQGNHPNLRRKLIIHETFFERLDASFPSTDTINYEELLKAFTVAELRKYLLSSQFLLNKLSIEIPDQIKHDQSEKDIIRNKLASNAREPWGALLKQYSEWLKNSKIQPRTIRLYLRAAEKFCQYGSLDSLQPWKKTLLKSFLQKHSSSRASLHKFVTYCRKIKSWDVSMPSKSELKSTSSGQKQPRTIKELKNLLAEVEKRGVENTPIHVLHSIIAKAFGFPLNSIDLSTWRLYTSGNDLLIKTDHESIEVPPSLRPIATQAFSLLRNHPPQA

SEQ ID NO: 858 - protein, 93 aa, synthetic construct
  REGION 1..93: note = TnsF-Tn7 System Protein
MTELEIRTPLLQNAKFLRKYQHRAENPLIKQQLMNTLRALGKTTPQALLAAAYWRDDSRMEALPVLWKMIAEREILASLHNTLTMKSSIWLAE

SEQ ID NO: 859 - protein, 634 aa, synthetic construct
  REGION 1..634: note = TnsF-Tn7 System Protein
MSGISRNFFKIEPGQLVSFGDSRYQVTHLLSLDSILAVNLETQETQRLRIETVTPIDPEANEHTSQPSERELWQLSKEEWEEAQDRFRAIKPLLANPIRSRDDVERLAQEHKIHAATLYRWLKLYQDAGHVSALVPSKRGRKKGTFLLTTEQEKVIESAIEDLYLTKQRHNPTDVAEEVLRRCRLAKISPPHPNTVRSRISLINPAHKLRRRGFKDIARNRYAPIQGEFPGADHPLAIVQIDHTEADLILVDEVHRQPIGRPWLTLAIDVFSRMVVGLYLTFERPSAASVGMCMANAMCPKREYLADLGVAGEWPVWGKPDVIHADNAKEFRGKVLQLACENYAIDLQWRPVQLPHFGGHVERLMGTMANEIRKLPGTTFSNPKQRRGYNSESEATLTLAELEKYLIDFTVNVYHQRLHHQLGMSPRKKWELGVLGDEHTLGTGLFPIPEDPLRIRLDFMPFFERTVQQYGIQIDNITYYESSLDPYINSTDPENPKAKRKFLIRRDPRDISKVYFFDPADNRYIAIPYRNIGFPAMSVWELNEVLTRLKNEGRKDIDENLIFDALERMRAHVEEAQKKTKAARRQATRKPKPTPKTLPSKSEPKSSPSMAPNSVEDDLFSTPVRPFDEVLLTR

SEQ ID NO: 860 - protein, 416 aa, synthetic construct
  REGION 1..416: note = TnsF-Tn7 System Protein
MTENTIIEIAGLYKVFGKTPEKIMPMVREGVPKDTILKQTGHTLGLKDINLQIRRGEIFVIMGLSGSGKSTLIRHFNRLIDPTEGQIKVEGTDIMQLGIPELRDFRRQKMSMVFQHFGLLPHYTVLDNVAFGLKTQGINKKTRNAKAQEWLTTVGLGEYGDQYPSQLSGGQQQRVGLARALCTDADILLMDEAFSALDPLIRSEMQDQLISLQEKLHKTIIFITHDLDEALRLGDRIAILRDGELVQVGEPKDILLEPADDYVEAFVRDVNRARALTVDTVMKPPSCRIASELISEAIRQMKQSKSEYGFYVNEQGYQGAVSRKSLEQALEQQGDRAIDTSVVNAGHVLSPNAIIEEVIPDTLESEFPLPVVNERGELEGEISRRHIARILSVPHDAPEASNEANNDDPPSKDLPA

SEQ ID NO: 861 - protein, 416 aa, synthetic construct; identical to SEQ ID NO: 860
  REGION 1..416: note = TnsF-Tn7 System Protein

SEQ ID NO: 862 - protein, 212 aa, synthetic construct
  REGION 1..212: note = TnsF-Tn7 System Protein
MDELPEFDRKVLEVLREPMESGEIVISRAAQQTTFPASFQLVAAMNPCPCGYAGHPQIACQCTEQQVQRYRQKISGPLLDRFDLHIEVPAIGLRELQMQGATDTTEQVRTRVEQARGAAVERSGAANQYLSGGALEQFCALEEADRLMLEQALQKLGMSARAYHRVLRVARTIADLSGVEKISSAHLLESLSFRALDRRRMTQVIGSGVTSN

SEQ ID NO: 863 - protein, 295 aa, synthetic construct
  REGION 1..295: note = TnsF-Tn7 System Protein
MSKFSHLSPDVIEMLDLPVNERATFCKTDRWIGYTRATQILNQLNRLLTHPKSLRMPNVLIVGRSGNGKSSILERFCHWHPIQITPSGTPIAPILRIEMPETPDESEFWSTILWNLGISHRERDPAPIKKREVKSTLQYAEVRVLAIDEFNNLTNAGKIAGDLLAAIKGLSNDLKISIVAAGTQTAINALNSDPQMKSRFEPAALDRWQLNHEYLRFLASYERLLPLAEPSNLASREIAPKLYGMMGDTIGGTVKLLKAAAVQAIETGQEKITSKLLDNLDWVRPGDWEEVARRV

SEQ ID NO: 864 - protein, 295 aa, synthetic construct; identical to SEQ ID NO: 863
  REGION 1..295: note = TnsF-Tn7 System Protein

SEQ ID NO: 865 - protein, 651 aa, synthetic construct
  REGION 1..651: note = TnsF-Tn7 System Protein
MTPRTTQEFFDRLVALVAADLPELGTEGAATILRSMDHRTRRFLREHLEVFPQALTSGSAHATPCVQRFITVLREAGYTRVKQPACPRCGLLRPLVENASPGIGHLCRNCFYLSKTGSCRRCGKTRPLVSQGHCSACYRLHVGPKKVCAACGRLTVCSAGTGRLLCDSCRPRRPKPCTLCAKSAVAYAHWPLGPVCGMCYDRNRQHPGTCTRCGQRRVLIARLDGQPACGPCAGSTTDYLCTHCGNPSDSSFRPTLCARCALKVEVADYFEGLPPAAARQLNPLREAFSRTDQPQTVASWLRNAKGARFLRDLARAGREVTHQRLDAFTAEHPMAGGHLRKLLVAVGVLAARDEHLAQVERHLERVIARHPQFSAVLRAYGRWSVLPRLRRRAQRRPPTSYVTSWATTRINRGVQFLTWAANQQVELAQVTQEQVDQWLTEGSRARYQLRDFLVWTARRGLSRDLLVPHLSKPDPAGMDEDDHWDMLQQCLHDDELPLDVRVAGALVLLYGQQVSRIVRLTAADLSRTGEQTFLTLEQAPVLLPADLAVLVTELSDRPDNAAVRGSGATRWLFPSNRHPNGHWQPATITKRLNQAGIQVKPGRATALTNLGQDLPPAVLASLTGMHIVTAEKWYRRAAPDWAVYIQSRRNS

SEQ ID NO: 866 - protein, 651 aa, synthetic construct; identical to SEQ ID NO: 865
  REGION 1..651: note = TnsF-Tn7 System Protein

SEQ ID NO: 867 - protein, 380 aa, synthetic construct
  REGION 1..380: note = TnsF-Tn7 System Protein
MRTVDLPGAIHLVVPDNVRALDPAPAMFSAMLEGWSRQQLSRLLQRKTIDDRLGLVRRFAEYTGTYPWEWTPEDVEAYFASQMSKRPPLAHSTVRGQQGDLAMFCSFITDSRYGWSSACEEKFGQFPVQVCHEWNTADHVAEYEGRPGRRALTYDELQQFFDAADNRVERIRKLGRKGSLAAWRDSVMLKSVYAYGLRRRESSMLDLQDMRHNPRAKDYGRFGAQEVRFGKASRGSPPKRRTVLTVPELDWIVELLEEWVDEVRPRFQPAQHPALWVTERCGRMSARRLDEVFATIRQEAELPEELELHCLRHSYITHLIEFGYPERFVQDQVGHRFGSTTALYTWVSDEFRNRLLEQSLKRQSVRPSQRRTKPEKGSRR

SEQ ID NO: 868 - protein, 111 aa, synthetic construct
  REGION 1..111: note = TnsF-Tn7 System Protein
MKKNMSIRWNLRKLMAARDLFQTSDLVPLLAERGVHLSREQVYRLVAQPPQRLSMDTLAALCDILAVTPNDLIEVVEVKAQVAKPTASGETASSEPAPPTRRTRVRRPEGL

SEQ ID NO: 869 - protein, 757 aa, synthetic construct
  REGION 1..757: note = TnsF-Tn7 System Protein
MARAHQGLCASCGRHRKLVGRNPDGAPWCDACYSTAGAARLAADRRTVILAAVAAAEPTLGEAAVLRVIDQMSEGRRFGQLADHLRAHPDVLVIGPTSRPPVLDRFVEALVAAGAQTIKAIDPTCLDCGRTRAARRELPGGAVICSACSARRTSTRLCAGCGRPRRPYARDEAGHPRCHACTQRARNDVQRLEQVERLTSVLSAQVALDPAQIIDVVTSLAPRRHDLQVLAGLLGDHRLTDPRAPFVVARLVIALRAAGANLPCPPCGSCQQPAGTGASLYGQRVRCQACVRYCPGCARPARGEDERVCGRCRRDLHRLRAACATCREPDRLLDDRGLCRWCRERGERRCAHCHHSRTLTTVDGERLCGPCSLRRTVDGLLADDPPGALHALRAPILAAEPMTTRRWLRRPAITALLTSLDSGRLALTHTSLDAEPASRAVEHLRDLLVATSALGSDPGRLIDRFAHDINQMLVELDAHDARIVRAWMRWQVLPRLRRHHDGTADIGAAVTNARRTLRSVIAFLSTIEAAQGTLTSVRQSDIDHWFASPSARAHQVRPFLAWARRTRVLPPSTMLPPSASGRNDRHTDTERRWNVARRLVQDVTLDTVDRVAGALVVLYAQPLVRVCALTTDDVAGDGDVVTVRLGGDLLQLPEPFAALIQGLPSPRRKGVAEQLPGCWLFPGQRAGRHLAAASLGRRLRTIGIEPRRTRLAALGQLSAEIPPAMLAGVLGLKASQVVRHTTRAGGDWAQYAADRAT

SEQ ID NO: 870 - protein, 757 aa, synthetic construct; identical to SEQ ID NO: 869
  REGION 1..757: note = TnsF-Tn7 System Protein

SEQ ID NO: 871 - protein, 217 aa, synthetic construct
  REGION 1..217: note = TnsF-Tn7 System Protein
MTAAVVAEDVGVTVGDVSLLPPVSFELEAGRTLAVVGPNGSGKTTLLRVLAGLTSPSSGTVTVGGGTPDERRPGFRSTVAALLGVPPLARNLTLREYLTLIGISWGVDQPLAERDAGNLLDELGIARLESRFPHELSSGQTQLYVLAVTLARPFRILLLDEPEQRLDADRLSLVGDALSRRQAAGATVVLASHSQHLVKRLTDQTLTLDDRSDGYGG

SEQ ID NO: 872 - protein, 217 aa, synthetic construct; identical to SEQ ID NO: 871
  REGION 1..217: note = TnsF-Tn7 System Protein

SEQ ID NO: 873 - protein, 370 aa, synthetic construct
  REGION 1..370: note = TnsF-Tn7 System Protein
MRTDRSVREVVAGSAVSVLASEVSFLAPEEAVLEAMLAGWVAQQTSRLLAATTIEQRLLLVRRLVAFTNAYPWTWTPGDVEEWTTALVSRGLAHSTLRNYQMAVQLFCGYVTDRRYGWDEVCEQRFGTHPVQVFHEWNTAVHRDQSEARPGNRPLSRPELQRFFDYCDERVVTVGRSGRKGWLAAFRDAALFKTVYAFGLRRREAAMLDLADLSPNAHAEQFGRYGAVSVRYGKAMKGGTPRRRTVLTTMGWAAGTLAEWVEEIRPGYASASTTLWPTERGAAISTDHINARFAAYRDQCGLPRELGPHCLRHSYITHLIEDGFDHLFVQQQVGHSWGSTTAGYTSVGSDYKNRALRRALSPAFTGPATP

SEQ ID NO: 874 - protein, 407 aa, synthetic construct
  REGION 1..407: note = TnsF-Tn7 System Protein
MPAHRASSAVLAGAYPFLAPPTLVQGVPVGVDLFSGGAFCFDPWTQYADGTLTNPNVLLAGVIGQGKSALAKSLALRSIAAGRAVYVPGDPKGEWAVVADAVGGTVLRLGPGSPTRLNPLDVVGEDRQTLRSQLLAGVASATLRRDLTAAEHSALDAALAHLSGRGQITVREVIEALVTPDTCLARADGLRVQDRAADGRDLVHGLRRLVSGDLAGLFDAPTTDALNPMAPIVVLDLSALGSDDDALAIASTCAAAWVEGALASSTNPRWVIYDEAWRLLRHPGLIRRMQAQWKLSRAYGIANLLVLHRLSDLDAVGHRGSETRALADGLLADCSTRVIYRQEADQLSAATASLGLSEPERDLLPLLSRGTGLWKLPRRSHVVQHVLLPIEEPLIDTDAAMRAGGWS

SEQ ID NO: 875 - protein, 407 aa, synthetic construct; identical to SEQ ID NO: 874
  REGION 1..407: note = TnsF-Tn7 System Protein

SEQ ID NO: 876 - protein, 115 aa, synthetic construct
  REGION 1..115: note = TnsF-Tn7 System Protein
MAPARKLGYAWHLRLLMAEQGMFATTDLVPLLAERGVILSAAQVYRLVTQTPERLSLRTLMALCDILACGPNDLIEPVAATRRSRATGTGGPAAPATGDGVRGRIPRRAEIHRDR

SEQ ID NO: 877 - protein, 802 aa, synthetic construct
  REGION 1..802: note = TnsF-Tn7 System Protein
MTNELVDEVLADPVGVVVRLVGEVEPSMEADQVKEIVCSVARARAGQRRLAQALRDNPALLTTGRPPAPFCVARLLTALNKAGARTVSLPRCVQCARACRRVSSVRGGQWSCSPCSSKSAVCEGCGEERPVHSRGRNGEMRCRRCRDTGDPLTELVDLVTRLDPALAPATVLGALNQATTRSASQRQLAWAVVARPDLLTGAGCEAPAPAVLRFIDALVAAGSTTVVRPACPHCRQVKPLLNLVGGKRVCRVCYGRHVAVACARCGSVQVPRSRDPDGAPLCSNCLISDPVNHEECRACQRRRPVSVRLVDGPRCRGCHPKTMAQCAICHRTGSCDTSRVTGQPWCTGCQKKWVTCGGCGQNAQLRGSTLDTPLCARCVNPDPDFWGRCPTCRTTWQFSNAPCPWCVLDTRARTLLGDQNGAISAGLTPLHDALMRVERPDTAINWLARPKVAGLLTALQRDRRPLNHQVLDELPASKTLAHLRSVLVATGALPVRDERLVDLERWIAATIQARSDPTERQILHSYGIWHHLRRLRQRLDGTHTTRLQALNVRCHLIAAIHLLDWLTTHGRALTTCTQTNLDDWAAAGHSRRGETAHFVRWAVAHKHARGLALSTIGWHGPAGPHDTEKRWDDARRHLHDDTLHIADRVAGLLLLLYPQRVSTITQLTTDNIHDDGQTMTMSFGHVPLQLPELVAVLVRELVATRKGSTIIKTTDTDTDSWLFPGRRPGQPLSDHRLGQRLQRIGLHPGQDRSTALFALATELPAAVLARILGIYIKVAVAWQHAASGDWTAYAAERSQRTP

SEQ ID NO: 878 - protein, 802 aa, synthetic construct; identical to SEQ ID NO: 877
  REGION 1..802: note = TnsF-Tn7 System Protein

SEQ ID NO: 879 - protein, 355 aa, synthetic construct
  REGION 1..355: note = TnsF-Tn7 System Protein
MVSGVVQLRPEDAMVEAMLRGWRAQQAARGLRQDTTAVRERVVRRFMGFTNEYPWQWTAAHVDEWSLWMTSERHLAPSTIRAYQNSVQLFTEFLTDNARYGWVSACEREFGTGVHPIPIVHEWNSIAHLQTYEGNPEARPFTREELQRFFDYADDQVDRAVRAKRKGVLAAYRDVTLFKVMYGWGLRRTETARLDVHDWGRNPEAPQFGRYGMLHVRYGKAKRGQPPRRRNVLSMFAWAVEAVSDYVENIRPRFGYPDHPALWVTERGGRVRPPEINARFESYRDALGLPKILVPHSFRHGYVSHNTEDGVDRRFLQVQVGHECDSSTAIYTHVSDDFMNAALRKAIAPALVPTD

SEQ ID NO: 880 - protein, 109 aa, synthetic construct
  REGION 1..109: note = TnsF-Tn7 System Protein
MDYRWHLRQVMATREMFQTTDLLAPLAERDITLSSSQVYRLVTERPERLSLRILMALLDILDCSMDDLIVPVADANTATTPKKKVVGGGSAERIGELRPKRARIAPTDR

SEQ ID NO: 881 - protein, 543 aa, synthetic construct
  REGION 1..543: note = TnsF-Tn7 System Protein
MGKRQRDCVTCGAPVGFLDREHCCRCWRRMKEDAARSPCRSCGLQRVLQQDTGRCVLCSRICEQCGHPVRAKDGRLCRDCRNKARRLAAQQPCPRCGRPGYLREPTGWCGSCSRPRPAKKPPRICRECGQLRRHAGLGLCSPCWQKHPGRPFIRGDHLREQLAEPPWWLDDFVAHVAKRHCVSRACGFVTDLGRLLGDEHPNSPQALLERSRRPGRSMGSFARALEDFFTRHGLALPTDQSDRLAAGRRRRRLDAVPDPLRLAVTAFDASRMRAQERARRAGTRPRSNHTLETALSILRDLALFLAAERGKDGWELVDVQDIEAFLNTLPRARKRRLTVLRQFFRFARAQHLVLVDPTRGLAGDEARGFRGATLTLDQQRGLFRRWTTDESVHPHEALVGMLALLHGASSTETRLLQIDDVDETTQSLRLGKRPRPVPMDPASWAVLQRCLAHRDGWRTDNPHVMVTKGTKAGRSPASTAYLSHVLDPCGFPPRMIRSTRLLDLVNVMDPKLVAAAFGMTAESTLIYLADRVDPGALPGPETP

SEQ ID NO: 882 - protein, 354 aa, synthetic construct
  REGION 1..354: note = TnsF-Tn7 System Protein
MAGTRLQVITGGAVPQEPLSTDPWQFQTLCVDAFVASWRARGFSPVTIDNDIGLLERTLKALGRPAWEVTAEDIDRIVGDLAVQGRRTSTRREYVQIFKGFHRFLQARKAAEIEAAFGVRLVCPIDEFNASRHVGDDSPALVPPPSPERIGEFFDFMKQRIATARKYGPAARDYAMFRTLYHAGLRSEEASLLEKPDLHFTRGPFGKIHVRFGKGAHTSGPRPRWVPMLDGLDLVLRWFLEDVRPKFPDSPLLFADESGGPLHRGTIRNRLRYLMQLEGQPAAEWFSPHALRRACATHNYERGVDLVAIQQMLGHWTVGSTMRYVRPSTTFIEDAYQRAVASTLAELTGKESTE

SEQ ID NO: 883 - protein, 417 aa, synthetic construct
  REGION 1..417: note = TnsF-Tn7 System Protein
MIHVEDWAEIRRLHRSEGQGIRAIARDLGISRNTVKRALASDRPPKYTRAAKGSAVDAVEEEIKTLLADTPTMPATVIAERIGWDRGMTILNERVRELRPAFLPPDPVSRTTYQPGEIAQCDLWFPPAEIPLGFGQSGSPPVLVLVAGYSRVIAARMLPSRRAFDLIDGHWRLLTGWNAVPKMLVWDNEPAVGQRGKLSVEFAALAGLLGIKVFQARPRDPEAKGLVERANGYLETSFLPGRTFTSPADFNTQLTNWLQIANRRRHRSIEARPADRFEADRAGMLALPPIEPARWWQFGLRLPRDHYVRIETNDYSIHPAAIGRRITMRIDAEQVTARLGEQLVARHERCWARHQTLTDPEHTAAGRALRTAFLTQRTSPAQAADPAAVEVEQRPLASYDRLFTVIDGGRAPGKEQR

SEQ ID NO: 884 - protein, 104 aa, synthetic construct
  REGION 1..104: note = TnsF-Tn7 System Protein
MKIQWRLRMAAAQREVWTGTELRRLLAEKAGLDLSSASVSALFTKEPSQVKMTTLAALCTALECTPNDLIEVDTTPVERPVAPPRPVAKLPRVASARGRSMPPM

SEQ ID NO: 885 - protein, 298 aa, synthetic construct
  REGION 1..298: note = TnsF-Tn7 System Protein
MVLRPGRVVALLGPNGAGKTTFVRAVATLLRPDAGALEVAGVDALRRPAQVRQIIGLAGQFAAVEPAMTGRENLVMVGRLFGLKGSRAKAAAASVLQRMGLTEDADRLVRGYSGGLRRRLDLGASLVGTPRLLLLDEPTTGLDPGSRIRLWDAIRQLVADGTDVLLTTQYLDEADQLAADIVIIDHGRVVAAGTPAELKALGGDDVIEVHVRDPLALGEVAAVLATVGGEPRTDPATRRAWTAVSDGTRRLMEAMRALDRTGVPIDDIALRHPTLDEVFLTLTGHRADDASVRKEQQS

SEQ ID NO: 886 - protein, 298 aa, synthetic construct; identical to SEQ ID NO: 885
  REGION 1..298: note = TnsF-Tn7 System Protein

SEQ ID NO: 887 - protein, 447 aa, synthetic construct
  REGION 1..447: note = TnsF-Tn7 System Protein
MRARGTCPTCGVNRLLPGPPDKSGRRNCAECACIPYDFHCDECGEEAAHHRGRRCVRCVLRETLGDDLGGSPVDPALIGLVDALCASDRPESILTWRRSAKVQNLLRALGTGAIPVTHEGLDSAHGRPSEHLRALLVHHALLPDRDPYLPVFERWIGNKTADLPVEVQQPVTHFATWHHLRRIRDKAAAGEETRAAVHSAKQEITETVKFLTWLHTTYGRTAATCTQQDVDEWLTTGPTTRHIIRTFFVIARKSGLNRQVTIGFRDPKTARLLSQEQRIAWIHELLTSTNESVQYRVAGMLLLLYAQPLVRVVELPVTAVTDTGDSMTILLGKSPIDVPEPFSALVRTHVATRPNLRTGSGPESPWLFPSSLAGRHLHPNTVMDRLRTLGINILGSRNRALAELVLDCPPSLVADALGYSPQVAFLHAAKSAEPWARYAGRRVTRPE

SEQ ID NO: 888 - protein, 447 aa, synthetic construct; identical to SEQ ID NO: 887
  REGION 1..447: note = TnsF-Tn7 System Protein

SEQ ID NO: 889 - protein, 784 aa, synthetic construct
  REGION 1..784: note = TnsF-Tn7 System Protein
MPHAADSHEKIRVHGARENNLKDVSIELPKRRLTVFTGVSGSGKSSLVFGTIAAESQRLINETYSAFVQGFMPTLARPDVDVLDGLTTAIIVGQERMGSDPRSTVGTATDANAMLRILFSRLGDPHIGSPQAFSFNVASVSGAGAVKHDKGGREVKERVSFSITGGMCPRCEGRGSVNDIDPTALYDDSKSLDDGPFTIPGYSMDGWQGRIYRGSGFFDTAKPIAKYTKRELNDLLYKEPTKIKVEGINLTYEGIIPKIQKSFLSKDVEAMQPHIRAFVERAVTFNTCPDCDGTRLSELARSSKINDTSIADCCAMQINELAQWVRAVDDPGVAPLLESLRQTLDSFVEIGLGYLSLDRPAGTLSGGEAQRTRMIRHLNSSLTDITYVFDEPTIGLHPHDIARMNDLLLRLRDKGNTVLVVEHKPETIAIGDHVVDLGPKAGTAGGEIVFEGTVDALRTADTLTGRHLDDRAHLKAEVRAPSGVLEVRGATEHNLQDVDVDVPLGVLVVVTGVAGSGKSSLIHGSISPREGVVTVDQTPIKGSRRSNPATYTGLLDHIRKAFAKANGVKPALFSANSEGACPACNGAGVIYTDLGIMAGVSSTCEECEGRRFQAAVLEYHFGGRNISEVLSMPVAEALEFFGDGDAKIPAAHRILGHLDDVGLGYVSLGQPLSTLSGGERQRLKLATHMGDKGGVLVLDEPTTGLHLADVEQLLRLLDRLVDSGKSVIVIEHHQAVMAHGDWIIDIGPGAGHDGGRIVFEGTPAELVAGRATLTGRHLADYVQA

SEQ ID NO: 890 - protein, 784 aa, synthetic construct; identical to SEQ ID NO: 889
  REGION 1..784: note = TnsF-Tn7 System Protein

SEQ ID NO: 891 - protein, 110 aa, synthetic construct
  REGION 1..110: note = TnsF-Tn7 System Protein
MKRTVSYTWRLPELMAARGLHNTTELIPLLAERDITLSRPQVYRMVNQRPERVSLQVIAALCDIFECTPADLLTTTAADARVRKTGTAAARNVVPLDRTVRPRRANVLDE

SEQ ID NO: 892 - protein, 319 aa, synthetic construct
  REGION 1..319: note = TnsF-Tn7 System Protein
MAEHLRACLRTVGTLQPRDEILAQLERRCAQFLAADDTADAPALRAYMSWKVLPRLRRHSARAELTASMARHAGSRMRAAHKFHCWLAERGMDLAHATQPLVEEYQSLHPSPFLPGYLKWAAQTQRCSTLDLPSARHGPANVTMTDEQRWAWVKQLLISPDGGLPARLAGLLVLLFGQQLSRLAQLHIDTVSTHDGHTQLRLGPHPVRLPEPVARLVHELVPPHDGSVSAATSPWLFPGKYPGTHTTVNALSHELTKLGLNTTQARNAALIALAKDVPSPVLADASGIAAATASRWAELAGERCQTYPAARRATTQPNE

SEQ ID NO: 893 - protein, 319 aa, synthetic construct; identical to SEQ ID NO: 892
  REGION 1..319: note = TnsF-Tn7 System Protein

SEQ ID NO: 894 - protein, 1181 aa, synthetic construct
  REGION 1..1181: note = TnsF-Tn7 System Protein
MRVMSAGDGYKYLLRTVAAGDCDRSLSTPLTRYYAEAGTPPGRWLGAGVRSLGSGQILVGDQVSEEQLQLLIGMGRDAVTGDPLGRAYPAYTAVADRTIARVSALDPGLDIVERAEAIATIEADEAARGTRRAVAGFDFTFSIPKSASVLWAVADAGTQALIADAHHAAVAEMVAFMEREVAATRTGATGRDGAVAQVDVTGLIATAFDHYDSRAGDPHLHTHVVISNKVRTVLDEKWRSLDGRPMHAVVVALSELHEAVFADHLSRTLGVEWEQRAGGGDRNPAWAISTVPEELVAEFSSRSRHIDVEARRLVEEWAREHGRRPSNKTIIRLRQQATLTTRPEKEVRSLADLTAEWRDRASNLLAQDATGWVGIVTAGHAPLELRADQVPLELIAGLGEMVVEIVGEKRSTWRRWNLYAEAARQTMGWRFADTCDREAIVGMVVDAAEGASLRLTPPELASTPAVFLRLDGTSVFRPRHSSVFSSEGLLAAEDRLLALGRNTTGPTVALETINRVTGRPDGHGRILGADQAGALAAVAASGRLLDLLVGPAGAGKTTTMNALRRAWETGHGAGSVIGLAPSAVAAQVLADDLGITTENTAKWWQDHLTHGTTFTPGQLIIIDEASLTGTLTLDRITGLAADTGAKVLLVGDWAQLQSVDAGGAFAMLVADRPAAPELLDVHRFTHEWEKTASLDLRHGRTTAIDTYNDHDRIIGGDLDEMIGSAYTAWRHDCAAGLASILIAERGELVTELNVRARADLVLDGIVDPSRQVGLRDGSAASAGDVVISRRNDRRLRAGRDWVRNGERWQVTGVRGDGSLTVRRPGRRCGGKLVLPAGYVAEHVDLGYAVTAHRAQGVTTNTAHALIEPTTTRENLYVALTRGRDSNSAYVAVDRPDASHSVRHPGDNPAATAQSVLYGVLQHVGAEPSAHQMITTEQDAWGSIGQLAAEYETIAAAAQHDRWATLIRTSGLSETDAEAAITSDAFGPLTAQLRRAEANHHNIDTLLPRLVAARGFTDADDIAAVLHARVARATAGPAGSGRTRRTPRLIAGLIPAAIGTMTPDVRQALTERRDLIEQRASALVDDALTGHAAWVAGLGERPRDPQKAGAWRNRVCVIAAYRDRYNITTGSPLGAPAENAAQRIDATHARAAMDQARRLTINVDPETSRPRRVSTDRSALTL

SEQ ID NO: 895 - protein, 1181 aa, synthetic construct; identical to SEQ ID NO: 894
  REGION 1..1181: note = TnsF-Tn7 System Protein

SEQ ID NO: 896 - protein, 541 aa, synthetic construct
  REGION 1..541: note = TnsF-Tn7 System Protein
MTEDNASAIGIETRPFLDDLAVGIPRTQPPTRYTSPGPAHLFAAATEAGPHLIENTPAVLDLSESTSTAQVLEHSVVDPIILPGRGLRPAQASDRENADDVDWRLVDHLTKQLNLNTDHERTRQDFDVAIASAEPETVFEENVLGEIRRLVNRHGDYLVINNGPDYEWSSKRLADHVQAVFDSVFRYGRFQQYLREPGIEDISVVGFANVMVTTSEGRREHRRPIAFDNDDLEGQIADLTSWRGRAFSRPGGHIDLDIGGARFSATGRPITSLPNITMRKHNHIDVSLDDMVALGTITSRMAILLSAAARANRSALVSGWTDAGKTTFLRAWMSAVPWEEKIVTIETEHELYLGKQVRRHAQVQDFQYLPSMLAGSDLAVTYSLEDAFRESLRSSAQRILFGEIRGAEGPVAIKAMQAGKGSISTIHARNADDAIHRFADILMSEQGLSDDTVPLRQIMRSIDLIVHLDMLYDPDGTRRRIVTEIAEVIPRPDAQLPMASLLYAWDWDAGAYTQPEKPSAQLQQALYRVGLDREHFWAGAE

SEQ ID NO: 897 - protein, 541 aa, synthetic construct; identical to SEQ ID NO: 896
  REGION 1..541: note = TnsF-Tn7 System Protein

SEQ ID NO: 898 - protein, 195 aa, synthetic construct
  REGION 1..195: note = TnsF-Tn7 System Protein
MSPAGRAAAYITLGGAGSGKSTVSRHISEYTGALYLDKDALAGPLVGVALEALGQNASDRESNDVYLHRVMPLEYDALFAVAGQNLRLGHSVVLDAPFVAYLSDPDYLRTAMAGASWPEVRVRVIQVVASAQTVKRRLIERASARDRIKLSDWDAYWQTFGSLKCSWQGVEHVQAANDKDNDFSEIDTLLGAPHD

SEQ ID NO: 899 - protein, 195 aa, synthetic construct; identical to SEQ ID NO: 898
  REGION 1..195: note = TnsF-Tn7 System Protein

SEQ ID NO: 900 - protein, 338 aa, synthetic construct
  REGION 1..338: note = TnsF-Tn7 System Protein
MLAGWERQQRSRGVGATTVAANVRIVSRFFAFAGTYPWQWMPGDVEDFTVQLMAGNDRLAPSTIRRYHAAIRSFCTLVTDPRYGWPVECERRFGELPQQICHAQNTLAHLAEYEGKPARRPFTFEEIQRLFDTADDEVARVGGGRTKGAVSALRDAYMVRVAYAYGLRRHELIMLETVDLHRNPASPEYDSFGALHVRFAKGSRGTGPKRRTVLTVPELDWVVESLREWLHYRAEADIEGTVLWPSERGGTMGSGYWDRRFSHIREVAGLDAHLTPHALRHSYVTHLTEFGYPMEFVRQQVGHLYAATTQTYAAVSDDFRQRLIMNSLARINQMGTPR

SEQ ID NO: 901 - protein, 114 aa, synthetic construct
  REGION 1..114: note = TnsF-Tn7 System Protein
MNATTTVHWHLRELLALKGIYQTTHLVPMLAERNVHLSREQVYRLVTQTPQRLNLDVLAALCAILGCGPEDLITFSADEVAAPRRAAGASKRGIAPAAARPSKTTIRRPSSNDG

SEQ ID NO: 902 - protein, 395 aa, synthetic construct
  REGION 1..395: note = TnsF-Tn7 System Protein
MIACDFLHIDTISPQRLYTLIFLEHHTRRLHITGVTAHPTATWATQQARNHATDLGIRMGSLRFLIRDRDSKYTDAFAVFQAEDIAWLDQLLADQPADRAHLIRTYAQWHPLRRARHRTHRRDFTPGANNWARTRISAALALLRWLDQHDLDLAAARQDDIDQWLTTGHPESTYPARDFLTWARHRYLTGDLTIPKKQPRTTLTPITEDERWQQLRRCLHDDTLPTPVRAGGSLVLLYGLPVSRVTALCHNDIHTDTKNRTWLRIGGHRLRLPPAVAGLVLAQRDKATAVSAVARAYPGDTAWLFPGGFPGRPARDALYRALRTHLHVHLRRARSAALVALAADLPAAVLSDLLGIHINTALAWSAYAQTDWTAYLAARYRSGPPQAGSATRRQR

SEQ ID NO: 903 - protein, 395 aa, synthetic construct; identical to SEQ ID NO: 902
  REGION 1..395: note = TnsF-Tn7 System Protein

SEQ ID NO: 904 - protein, 190 aa, synthetic construct
  REGION 1..190: note = TnsF-Tn7 System Protein
MHVETVFLKRLYVFFVMEIATRRVHVLGVTAHPTGAWVTQLARNLLMDLGDRAGCFRFLIRDRDSKFTAAFDAVFAGNGTAVIPTPPQSPRSNAFAERWIRTARAECTDRLLITGERHLRAVLTTYAEHYNTGRAHRSLDLRAPDDHPNVIPLPAATVRRRQILGGLLNEYHTMPPRLPHHPQETPSSAA

SEQ ID NO: 905 - protein, 301 aa, synthetic construct
  REGION 1..301: note = TnsF-Tn7 System Protein
MNRQRIERDALVQMLALERDWSRAAYLAFGQWLHEAQPDKPLLAKVFARHFPFFSRLDASVANPDTLRGNGLLETFSVAELRRHVLPVRFLEVHLGVSLDEAAKVEHVERSRIAEKLRASRRAPYAAVLNRYVGWLDEQKTPARTMRLYLTAASQLCADEGLGEDGHCDDDQLQHFLRRHPGARASLFRWLTFGRTILGWECTMPKRSTGKDRPPRTVRDLSVLMAKIEQVGIEKAPLKLLQRAIAKAFGFPAKRLGHSRWNVVERGEELHLFDEHDRVRVPEAMRHLVKVWADRVETASR

SEQ ID NO: 906 - protein, 220 aa, synthetic construct
  REGION 1..220: note = TnsF-Tn7 System Protein
MSSDTPVRELRTNRRSLTGRLTLGDGGVAVFESSLERDWLLALDFDPRVQAIQVQPFSLRYQHEGATRRYTPDVRADYALGSHVITMVYEVKPARELHANWSAYRPRFKAAVGYCREHGWRFKLVTERHIRTALLDNARFLRRYRALLDQDLFLQQLLYTLRALGTTTPQALLAAAYWSEESRMAALPMLWKLIATRRVSADLQVPLTMSAPIWLPGRGA

SEQ ID NO: 907 - protein, 360 aa, synthetic construct
  REGION 1..360: note = TnsF-Tn7 System Protein
MDAPGRLGISGARGVREMRWPLPIEPQEDELLSSFLVRAAQRHGLAPYRFCAFHFPSIPIWNRDIDRSASDTLLAAIAVKSGLALARVVQMTLRGAEAGLRGGVTRGPAPWINRIGIYHRLRRGWGLQYCPDCLADRPVFCLDWRMSFMVACSRHRRLLQDACPHCDAPLAIHRQMLSVRRCQLCSRMLGRTPQDPSVPIGAVIQAQSYLDRALNGGIAEIGGQPVCREDLFHGSRVLASLLARRIHSPPDPAGRHARPLELARVQTRAEVVLLVIDVLASWPLEFKKIARDQNLTQRRFARESLPDWLRSAVEDLPAGRTRKVVPRKPHALRAKLEHERRRSTDWRATRAALLWQAISE

SEQ ID NO: 908 - protein, 636 aa, synthetic construct
  REGION 1..636: note = TnsF-Tn7 System Protein
MSGISKAFFRAEPGQLVRHGDRRFRITHLLSVDSVLAVDLESHESQRLRVESITPLPPDRDGESKADLERDLAHYSKEEWAEAQRRFSAIKPLLENPLRTRAMAEKLAEKERIHASTLYKWLKLYQAAGHVSALVPGKRGRKSGTILLRDEQEKVISSAIEDVYLSKQRHNKQDVVDEVIRRCRLAKIDAPSSNTIRNRIAALEPAQTLRRRGFRDVARNRYEAIQGAFPGANHPLSVVQIDHTEADIILVDEVHRRPVGRPWITLAIDVYSRIVAGIYVTFEKPAAISVGMCLAHAICPKREYLAELGVGGEWPVWGAMSAVHSDNGKEFRGQMLKRACEEYGIDLQWRPVTLPHFGGHIERLMGTMANQLRKLPGATFSNPQQRRGYNSEAMAALTLKEFENHLVDFIVNVYHQRVHSELGMSPKTKWSLGILGDANSTGTGMFPMPEDALRIHLDFMPFFHRSVQQYGIQIDNISYYDPVLDPYVSAMDPDNVRAKREFLIRRDPRDISKVYFLDPKDGRYTALPYRNIGYPAMSAWELREVQARLKAEGRRGVDENLIFEALERMRSKVAEAKKKSKAARRQATRNPATAKHFVPKPQAPPSVSHLSAPTSTIEPDPFDEPIRPFDEVSLVR

SEQ ID NO: 909 - protein, 281 aa, synthetic construct
  REGION 1..281: note = TnsF-Tn7 System Protein
MSVARVQGCQNSVAPLSSIPEAVASIRIPRSCHLLQSCSPEPGLAIDRVAAIIGSHSGSRPRPGEISLAHGGVLFLDELPEWGRAVLEVLREPLESGRIVISRAARQAEFPARFQLVAAMNPCPCGYAGDPAGRCRCTGEAIGRYRSRLSGPLLDRIDLHVEVPRLAQQVLLAPEGGGEPSARVRSRVAEARAVQHARSGADNALLAGPALRRHAALGASERRLLEQAAERLELSARACHRILRVARTIADLDRAAAIGQAHLAEAVSYRCLDRPVASAHS

SEQ ID NO: 910 - protein, 295 aa, synthetic construct
  REGION 1..295: note = TnsF-Tn7 System Protein
MTRYSHLTPAVAQALELPKEERITFCQTDRWIGYTRATQILDQLDQLLAYPRSLRMPNLLVVGRSGNGKSSIIEHFTNRHPVQMTESGSPIAPILCVEMPETPDETEFWSTLLWALAISHREKDPASIKKRQAKSVLQYASVRLLVIDEFNNLTNAGKAAGDLLAAIKGLSNELKISIVAAGTQAAINALNSDPQMKSRFEPTALDRWKLNGEYLRFLASYEQLLPLAEPSQLASRELAPKLYGMAGDTIGGTVKLLKAASAHAIKAGVERITASVLDDLGWTRLGDWESVARVV

SEQ ID NO: 911 - protein, 295 aa, synthetic construct; identical to SEQ ID NO: 910
  REGION 1..295: note = TnsF-Tn7 System Protein

SEQ ID NO: 912 - protein, 300 aa, synthetic construct
  REGION 1..300: note = TnsF-Tn7 System Protein
MGSGDIPMTHDALDAEGDIEAADYVRYMLVAAGILQKRDEGLEHAKRWARRLLLTVTGAMNRRTVTEFWSCHVVPNIRFLSETGSARQLGIVRAKRKVRGAVDFMVWLEARGVDLYDLCQADVNEWLKRGSQANDVASFLMWAGTQGYCVRLRVPTAEDLLGLDSEVDKYWRLVDRFLDDEGLDVADRVAGGLVLIYGRRTNEICSLTSDHVTLDGKDVILPLGGRDVQLLPALSALVIRLMRGEGAHGGTVTPDDRRTLFGGPWYREHITPFRLAERLSTHGLGEASDLMTRRKKPFSA

SEQ ID NO: 913 - protein, 332 aa, synthetic construct
  REGION 1..332: note = TnsF-Tn7 System Protein
MRAVHAAAEDLRQSWAKELLIAFHESLDYGRMPGDMTRRVAASATFLASLDSVLSRPTEIDQTTLIDLHGREGLRRQERLVTFLVKRLGLSWDARAGAVHSARRVTLAALNESIDAGWHEDLVAFSATLRQSARPLSDRTVKSYVSAARGLLEAAGIEHASDLTQRHVKSWLRHRPGRTNDVYCFLSWLKEAGGPELEVRFRAGKTVRVRECATLRKAKTFIDQLTACDDPRKGRALLAWAITTIHGVRLEKVLAMRRNDVVPKVDRVELRIDDTIVDLCPILSNAFLRFADRSADMPFAGRAGIAPYSVDSARYFLRGTRIKNIKKASYRA

SEQ ID NO: 914 - protein, 249 aa, synthetic construct
  REGION 1..249: note = TnsF-Tn7 System Protein
MDELQRLLALVPAKPARTVSYGHRGNRGRMSFLGQSVDHESHLERDFLLIMQFDPTLAAIRAQPFTIPCVGANGRQTRYTPDFLTIHKGSRPRGFVVEIKPMADLRRDWRTLKPRLHAGRTFAHENGLAFELLTERQLHRWPLDAYHFLAPFRTLPDDDSMEEHLVHTLAGIGPSTPQRLLAAAFMTESNRIQAIPHMWKLVATRRIMAGLDEGQIDIRTTPLWIDRDSDWRRCNPYSRKHLMQTETDR

SEQ ID NO: 915 - protein, 370 aa, synthetic construct
  REGION 1..370: note = TnsF-Tn7 System Protein
MPGELLSSCLTRNAFAHGLSPYRFLNLIWDHDPVWNRDFDRDPETLLRMNRTPEARTWLDDIAERLSVPYETVIGATLTGWREVLGTNIAVSAADSRLILSAGIYHRTRTRHALQYCPNCLADGIPYFRREWRLGFSTWCSGHGRPLRDACPHCDAAVIPHRSMSIRLIDCHQCGRDLTKGGREIRGGPVPQSARRLQNQLLDLLAQADRRPTAFAWLETGRAELPLTVRGLIAASAPWSAYSTLREALGLAPTTTYDDADRRRFEHARFAVRTPWLETVAAWMENWPRNFFLGAEAIGASHRTFARCPMSQTLARQVAQLPARRKAARKQWKPILNEPVINRLRRTDRTAYSALRACRILHAIGVHTDA

SEQ ID NO: 916 - protein, 630 aa, synthetic construct
  REGION 1..630: note = TnsF-Tn7 System Protein
MTPNPRFLDISKGAMVQVGQARYRIEAQTSEQTVLAQKADDGRYETLRIATLSPATETAAVMPNAHDLVADAPAYATAQQRLEIIRPLVGAVVRPRSQVEAVAASAGRSVRTIYNWLSAYHDAPQLSSLIPTPRGPAPGQKTLDPRLDAIIDHAIETNLKVPQRKRVSHVIEAVEDACQKAGIEPPHANTIRRRVKTIPRAELLQSQGRSDEADAFRPMIGSLPGAVAPLSIVQIDHSEADVMIVDEALRLPLNRPWITVAIDVHTRMIVGLVVSMEAPSAFAAGRCIAQAMTPKDEYLREQGVPGDWPAYGKPHIVHMDNAKEFRGEVLKTACAEYGIDIQFRRVKTPRYGGHIERLMRTLGEAIRELPGATFSNPKERTGYDSDAKAVMTLAEFESWLVDHVVNRYHQQPHSRLDGMPPIEKWRQGIERIGLPRPPSDPQRLQLDFLPFEWRTMGRRGIIIDHLHYYENELRHWIGRTDPGQPKQLMKFLIRVDPRDISRVWFLDPDRREYLPISTLDKTRPPISRWEWKAVQRQLRSEGAKAVDEPLLFSTYDRLRKRAEESAIKTKAARKVHQRAADTRRHAASARKPSVRLPAGNDARKSDAPAPTTKVPSLFDIPVEPFDDIDA

SEQ ID NO: 917 - protein, 591 aa, synthetic construct
  REGION 1..591: note = TnsF-Tn7 System Protein
MTDSGRLRYDGFPMDGRHRWLRWIDGLDLHGPTGSPTIKAHLVTLPDAPNPENLLTLAVVAASGAPITRHEVVVGSLPALRLGMVFLDGEHVGDLRMERFERRSLGPSRDAELIAANSPVETPEWASVRWTVLPTTSYPLGNVRNSFCLRLVYGGCEVIIPASEVFRVFCAPERLLANVILSGEWKDVAGKLLNESFCEKTPTEWRVGLRTGLTGASAAVLAAYRWTDAGAAVRNQLRSGLLQNDHRLQAMIPYGFEGIELSGEGLKLSNREGTSRFLMLRISAVRITGLHEMRVPVRFRLDNYTVKRSSDREMKDRTPFVQTAPIVEESTSEPIALSIAEPPSSAAIERQSPCEAAAIEGLPEVSRLPLDPPMRPEAERRRRLTVLEPTNVGSTAMHQRGHRPVGSFAHLPEVRASLGFDAVGTVLNELLRTRDITSWMPVIPLDRPWRTVSGLEAWDLPAEIKAKRAAFSFLRDGNRRTCLVIEITLGQEKVFWLELERRLPVGKHSDGFCYLLLKVRPDYLEDAIGRLLMSAVKEKGVWKLGDVDKGTFAAKAFRHAYYDTGAIRIASASRSIRSFILQNRSGPVASE

SEQ ID NO: 918 - protein, 301 aa, synthetic construct
  REGION 1..301: note = TnsF-Tn7 System Protein
MSADQDKELHHLAPSTRNVLDLTVEERVWFAREDRWIGYSAANAALAAMADLVRRPRTTTSPAMLLLGRPGNGKTTILERFASQFQPRTTQNGDLVVDVVRMAMPAGATEKDLWSELLQACQTCHRATDPAALLLRQAYAVLGTLEPRIIISDEINNLLSGSGVNQRLILGKLKDLTNRFRMHLILAGTQDAQAAVLSDEQLKRRLDRFELPKWTLNAEFLRLLRSLEKVLPLPAPSGLADQQAATLISLRTDGSIGSIARLVKEAAVLAIRNGRDRIDLDMLQSVRVETDDARNERARSL

SEQ ID NO: 919 - protein, 301 aa, synthetic construct; identical to SEQ ID NO: 918
  REGION 1..301: note = TnsF-Tn7 System Protein

SEQ ID NO: 920 - protein, 323 aa, synthetic construct
  REGION 1..323: note = TnsF-Tn7 System Protein
MTHDRLDRLGTMRAVSQVRSLLVQLDVLPSRDEYAIAFQALAAREIAALPHGPDRLAVRQFVRWRQQRTDTTRHLTMTQAANDRNELRVILSLIRAVNAASATINTAQQATLDSWVVSVRTPLKARRFLLWCATSGTNTGLVAPGYQRKPFNLGGKLTGSNEAALRRALTEDIHPPRIRLAVVLTIAYGIRVHKIVQLRRDALALIDGRPRIRFGTLDLELPVVAAPWVESILAGTTVRNRVGGRPGDEIWIFPGYRHDDHMLPGSLAAKLRAIGVSPRRAHQAAAASLITQVPPAVIARLLGISLTTATAWYALAGSNIEHR

SEQ ID NO: 921 - protein, 808 aa, synthetic construct
  REGION 1..808: note = TnsF-Tn7 System Protein
MDLQDGVSPLAAEFEALQDRLRNRIITTWQRELNARRGSGGSIRQPLHQIEVVELQHRRSRALDPHVHRHLWLSVKVLGEDGKWSNVDSRVAMRLHTLINAEGDVAARTDPDWIAALARHGYTIGVDGEVPQVAHAVPALSRRSSQIEANRATLLAEWRDDHPGQEPSRDIQKQIDRQAWAKERPGKPKGLEEDAWEQTVRDELAAIDPWLLAERASVAVRAVDVENIDLDLLAARAIVDADDRSAGSGGRVSLFDLRAGATRAVAASGVVAHRQALQATIDAVVSRSLAHTVDLLDGAVDRPQHIKGYMTTRTAALKVELARRFGSLNIAGAALSPEAMRLVSESELPTGVVIESGQAEAAGAIAGTDRLVTITGPAGTGKTTMLRVAHAALTLQRRRLIVVAPTRKAASVAGREIGAPASSVHALLADHGWRWGRDAAGAETWTRLIPGDIDPTTGAPYPGSTRYPVNHDDRIVIDEAGMLDLHTANALAALALETGAGLAMVGDHLQAMPVGHSGAMATMARRSGSVVELSAVHRFRDQEYAALTLRLREPGSMDAALAVAAELDDRGVIHRVDDNSGARDLMAEAYFRWAGRHRRVALVTATNEEADAVNDAIQQRRLDLGQLRLNRVAVGRGEQRLLEGDVVQTRRNDRAADVDNRAVWAIRRIRPGSIDLVSLTDSADIRRISTDYAASHVHLAYASTVHGIQGETTDASIVGPGVDASGLYVGMTRGRAHNEAIAIARTRDAAVAAIAESMTRSPIEASIEDSRAAAMTELRLAARFVDSGAPFVSAGFTTPQSGRTPSLS

SEQ ID NO: 922 - protein, 808 aa, synthetic construct; identical to SEQ ID NO: 921
  REGION 1..808: note = TnsF-Tn7 System Protein

SEQ ID NO: 923 - protein, 344 aa, synthetic construct
  REGION 1..344: note = TnsF-Tn7 System Protein
MLQGWSAQQVGGRALQSRTVNQSLHAVRRFQRHANAYPWHWTAAAFDEWMLDMASVRQLAPSTLRNNQHAIRQFCDFLCSPHYGWAQECERRFGTHPVQVCHEWNTRPHVQDYEGDPRRRPLTRSELQLLFDRADDEVEARVSTGRKGAASAYRDATLLKVIYSWGLRAREALMLDTVDFYNNPKFPAFGDFGFLRVRYGKASRGSPPKPRTVATVLPWAVTAVEDYVRNVLPLVRVGTTSAMWVSERGTRLGTRSLNDKFAQLRDDIGLDPRLTPHCLRHSYATHLIEDGHDPVFVQRQLGHAYQSTTGIYTHVSAEFANRMLASALDRAGLMNNLDNKRETS

SEQ ID NO: 924 - protein, 111 aa, synthetic construct
  REGION 1..111: note = TnsF-Tn7 System Protein
MTVMIGYEWRLREQMAAAGMFSTTKLIPLLAERGVHLSSSQVYRLVADKPERLNLSVLIALTDILGCTADDLIVKVDLGRARETDQAVNGDSASAAIRDRGLRPQRAHLTD

SEQ ID NO: 925 - protein, 582 aa, synthetic construct
  REGION 1..582: note = TnsF-Tn7 System Protein
MSPAPGPTARLRPPEKCTGCGVARVAWVRPRVDYCYACLPGGPFAPPPCSRCGSAAYFSQGLCERCHPGSPEYLGACKDCLAWGVYRRHNWRCWQCRWWQGHYPVGDCAWCGRHVPIGETGACRLCLESARRIAPAGTAPNLDDVLTAGQQLFFANLPAPRKPKQPKQLLRASRIILDAEAAAAAAAAYEQPALFDVDPDPEVLRRLATEQARDWTYRTDTIVFEHAERFGWSKRQTNQVRRSLKMLQILNPGANTIRASEVLRLRRHDADANVVSTLDVLDAAGILIDDRVPTIDRYFDGKFESLPPTMRTQLELWFDIMIHGSRTPPRRKPRDPATVKIQILGIAPIITDWAAAGHHSLAEITTDMILDALPAERGKRHWAERGCRTLFSILKGRKLIFADPTRGIPLTDSGESIPLPIDTDTILAVLNHEDPAIALATSIVTFDGLTSGQIREIQLTDIIDGRLSLPDGRVIPLAEPVRVRLAVWLDHRATTWPRTLNPHLFVSLLTAGRLSPPGHQFPWQKAGISAQALRNDRIIQEIQATGGDVRRIADLFGIGVDAATRYLRVLDPDLSKGLDREG

SEQ ID NO: 926 - protein, 359 aa, synthetic construct
  REGION 1..359: note = TnsF-Tn7 System Protein
MRLAAVRSIGSARGFRDEQDAADFEQEIVDQYALAMAAAGLTDAHILVARATVFEFRQGLAAPLWTAGPDDADRFLSGLRRAGRAVSTRAGKAGVLAQFYDFAITRYQADVHALTGFVLEQPIDEFNRQSGNSLGRIRVPPSDAEVEVLFAGWRSSLSSARKFLPAARDYFAASLWRRLGLRISESAKLDIRDWRPDLGEFGKLHVRFGKGSRGRGAKPRLVPAINGTDRLIDWWLAEVRHLFGPDWEDPDAPMIPSERFDAELGRCQRASDDVLRQGLKAQTAVFLPAWVGRMTPHVLRHYCASSLYGAGMDLKAIQEVLGHEWLSTTTRYIHVSSDHVEQAWVNANRRLETRFGGRV

SEQ ID NO: 927 - protein, 286 aa, synthetic construct
  REGION 1..286: note = TnsF-Tn7 System Protein
MTDLHAAFQTPHPSGQEETLPSTTSVVHGIMRCEDVNVYYGDFRAVTGVDLEFGRNEITALIGPSGCGKSTLLRSLNRMNDLVDGARVEGGVLFQEENIYGKGVDPIEVRRRIGMVFQKPNPFPKSIYDNIAYGPRVTGMKVDSMDDLVEEALTHAALWHEVKDKLKQSAFGLSGGQQQRLCIARTIAVRPDVILMDEPCSALDPIATSRIEDLMNDLKRDYTIIIVTHNMQQAARVADRTAFFTALADETTGDRTGVLVEYGLTKQIFDTPADQRTEDYISGKFG

SEQ ID NO: 928 - protein, 286 aa, synthetic construct; identical to SEQ ID NO: 927
  REGION 1..286: note = TnsF-Tn7 System Protein

SEQ ID NO: 929 - protein, 108 aa, synthetic construct
  REGION 1..108: note = TnsF-Tn7 System Protein
MKWNLRMAAAERGIWKSSELRRMLADAGLEISVGKMSKLWTTTPTTLRLDDLDVICAVLDCTPGDLLTADLAAAAARKPQAEIEEQTSNGSPSIVRPRFTGSRPEPPL

SEQ ID NO: 930 - protein, 298 aa, synthetic construct
  REGION 1..298: note = TnsF-Tn7 System Protein
MPAGRGDVCEPCYWTRTCRKRISIGQAGLTTKALREAFEEFGEWMIRTTGPHKAALKINHFWSFFTELDQAWARIPSYVELLHHFGAEGLRRVRLPMRWLHEEKGVEPDHQAKRVDSEKRRIQECLRSMPPASLAEKALRAYWHQLEARIEAGKTSHTSARLTLRAAATLLLKTHPEGLQLPNQANVENYLVVAPGQAASLTGFINFLNHRYSTELAPKVDSKRVRMMRKEKLARMIMEMADSDAKDEAWMARWVLLGMEYFHNKKVTKKSAVTYELSQAGDGVVAFHAGSRYWLPIK

SEQ ID NO: 931 - protein, 298 aa, synthetic construct; identical to SEQ ID NO: 930
  REGION 1..298: note = TnsF-Tn7 System Protein

SEQ ID NO: 932 - protein, 226 aa, synthetic construct
  REGION 1..226: note = TnsF-Tn7 System Protein
MPLPTSVRNIGPTRRSVSGYYAFRGEESIAFESTLERDFLIKADFDVSVLGVISQPCEIPFHHPVTGRRYTYTPDYLVYYRLGNRDYRDYPKPLLVEVKPREKWQAHWREWSPKWKAAMRHASNEGWSFSIHDESRIRDKTLDNITFLARYKRMVFASVESQAVLNTVREMGVATLDYLLSRHFMGDIYRAEGIAHLWHLLATRQLDCDMAQSFSPLSEVWIPDHE

SEQ ID NO: 933 - protein, 642 aa, synthetic construct
  REGION 1..642: note = TnsF-Tn7 System Protein
MNNPRDNTDEPSNGVAQTRQHLQITVGEQVQKGDTVYRISQVLDFETVIGIAVESGRSCPLRISELTPFHRGPAPLEQDLSEIGDADWREAEHRLSIIKPLVDRHTVGRDAAEERAKQTGVDTATIYRWLKRYKATGSVLALIPQKPGWKKGKSRIPAHAEAVIQEVIKDVYLTLQRPSAQKAVQEVMRRCHERRIDPPSPGTVRARLRDIPERDRLRGHGFRDKAINKFQPAAGKFPNADYPLAVMQIDHTPADIILVDDVHRKPIGRPWITLAMDVCTRVVTGYYLSFDPPSETSVGMCVAQSMLPKDEWLLLHNVEAEWPVWGMPATIHVDNGPDFRSETFRRSCLAYGINLEFRPVKQPRYGGHIERLLGSLLKEIHNLPGTTFSSIKEKEGYDPEKHAAMTKSEFEEWLVTLICKVYHQRLHSGIGMSPMRKWEIGVFGNADVQGVGLAPRPANRLSVLLDFLPSFQRTIQTFGVTIDGMNYYDEALRPWINAKDPDTSNKKRTFVFRRDPRDISVIWFKDPELGQYFRVPFANLALPSMSVWEYAQAKARLRQEGRSSVNESEILRAISELRTHVEESQARTKRSRRQAQRRKEHEKKVTPADPLLHAPSTAAPKESPAQADGLLSGDIDVNWDIS

SEQ ID NO: 934 - protein, 294 aa, synthetic construct
  REGION 1..294: note = TnsF-Tn7 System Protein
MSTHLHPDLRYVLGLSAKERMEFMDQPRWLGYPLANRVIEVMRGLMEKPSRPRMPNLLLVGDSNNGKTTIVQRFRKQYGEGYVNEDVEPVKPVIVTQAPPSADEKSLYVAVLESFWAPYRPSDPVPKLRYQVIHQLRACHTRLLIIDEFHSLLTGGAVKQRETMNAIKLLCNELMIPIVGVGTQDAVRVLHSDPQHASRFDVVALPKWELNQEFQKLLAGFEKILPLQHPSQLHEPQLATQLHAISGGNLGDLHRLLVECANAAIVSGAERIDEKIIQSKSWVRPTRGIREVML

SEQ ID NO: 935 - protein, 294 aa, synthetic construct; identical to SEQ ID NO: 934
  REGION 1..294: note = TnsF-Tn7 System Protein

SEQ ID NO: 936 - protein, 804 aa, synthetic construct
  REGION 1..804: note = TnsF-Tn7 System Protein
MSTALDDEVVDDPIEVIVDLVSTIERGLDADRICQVVTAVAGGRAKRRRLARFLVENPHVLTSGASPAPRSAGELLLALRVAGARDVAAPVCGGCGRQLRSLRSLGGGLWGCSPCSVRPQVCGGCGKSRPAVTRDRHGRPRCESCPDTDGDPIETLTRIVSTIDPELSADTIASAVQRTLVHPGGQRRLAWAIEANPALLTGAGADAPTPAVLRFIAELFAAGATKIVRPACPRCGHVKALPARLTGRRVCRACYAQAVAIACSRCGDVREPATRDADGAALCAKCLTSDPINAEECSACGRRRPVAIRTPEGPRCSTCRIRHVTACGICGRQAQCETSRATGQPWCTRCKQRWIRCSACRVVGPLRGGTLKAPLCARCVNPDPDFWVCCPSCQQTWQLNTRPCQRCTLDQRARELLGGGTGQVRAALAPLHKALQDVQRPDIVMLWISRPQVSAILTELGLDSRQLTHEILDELPASKTLAHIRSALVATGTLPGRDERLIKLEHWIATALASRQDRDQRRILHGYAIWHHLRRLRQRLGTAAHTTRNQELSIRGHLIAAINFLDWLTEHNLSLAGCTQLDLDRWASGQVTYRDQTAHFIRWAVTHRHSASLALPTTGWAGPRGPHDIDKRWDDARRLLRDDNLTTRDRVAGLLLLLYAQHLSTISRLTTEDVDTQGDSVTLRLGAVPIVLPEPVGDLVLDLVNDRRPGTLIDAPNAPRWLFPGRRHGHPISAGQLRQRLITIGIQPTRARSTALFTLATQLPAAILARMLGIHIQVAVRWQRASAGDWMTYAADVSLRKQHP

SEQ ID NO: 937 - protein, 804 aa, synthetic construct; identical to SEQ ID NO: 936
  REGION 1..804: note = TnsF-Tn7 System Protein

SEQ ID NO: 938 - protein, 213 aa, synthetic construct
  REGION 1..213: note = TnsF-Tn7 System Protein
MSPDRAQPSGPGRRNPAPSAVKIIVSGGFGVGKTTLIGAVSEIEPLATEECLTVVSDGIDSLVGVDEKTTTTVALDFGRLTFDQQQMVLYLFGTPGQDRFWFTWDDLVVGAVGAVLLVDTRRLSDSFGPVGYFEQRGIPFVIAINEFADAPHCYSRAEVRHALDVPGHVPVVRCDARDARSAITVLLALIDHALTHPPRPEQPHQPLAHGASA

SEQ ID NO: 939 - protein, 213 aa, synthetic construct; identical to SEQ ID NO: 938
  REGION 1..213: note = TnsF-Tn7 System Protein

SEQ ID NO: 940 - protein, 349 aa, synthetic construct
  REGION 1..349: note = TnsF-Tn7 System Protein
MFDAMLRGWRSQQKARGLKDDTVADREKLIRRFHAWVNEYPWQWSPVHMDEWSVYLTSERHLAPSTIRSYQGDVRLFTEFLVDGRYGWGPACEKAFGTHPVAICHEWNTIAHLNDYEGNPEARPFTRQELQRFLDYADDQVERAVRAKRKGALAAYRDATLFKVVYGWGLRRTETSKLDVVDFGRNPQAAQFGPYGMLNVRYGKAKKGQAPRRRNVLSVMEWAVEAVADYVENVRPRFGYEGHPALWLTERGGRVKPAEINARFITYRDALKLPRSLVPHSLRHSYVTHLTEDAVDRRFIQQQVGHECDSSTAIYTHVSDDFMNTALKRALAPAFDTRKESRAGQEGRR

SEQ ID NO: 941 - protein, 109 aa, synthetic construct
  REGION 1..109: note = TnsF-Tn7 System Protein
MTGKLDYRWHLRQVMATRDMFSTTDLLEPLAERGITLSSSQVYRLVVERPERLSLKILMALLDILDCTMEDLIEPTAAAGTVKKSRAAGGGTGVGSLRPRRARITPVGE

SEQ ID NO: 942 - protein, 562 aa, synthetic construct
  REGION 1..562: note = TnsF-Tn7 System Protein
MSTAECAFCNRTRRVKDRVDGAARCATCRNRDPATWKECSGCARPRPVNARTADGLPLCVTCYAHRHAPVHRCDQCGRPAPAATRRKHHDPTSQTLCNRCLVYPQRPCGGCGRTRRVAVRATATSPDLCPTCHQAPMLTCHRCGVVDLCRTTGPGRAPICFRCQLTARLDKTLTPTGTDLHPGLIALREAIATVDNPRVALNWLHRSPAARLLTAITAGELPLTHTTLDDAAHEQASPTTATSIDHLRRLLVAAGALPERDEALARLRQRADDAITRLTHPADQALLRSYLTWHLLRRVRERAEHEPLTPAALAKARNHITAATRLISGLRTTGHTLSDATQADLDSALAAIPNSRAGIDFLTWAHRHHRTGYSTPTTPARQPPRDFIDDNHRVTLSRKLLHDPTIPTADRVAGLLVLLYGQRASTICRLTHTDITHLGDEVIGLNLGREKLLVPPALAALITRLPDGRPGGIAATLADHQWLFPGRRPDRPADPSTIMRRLARHGLPLRLTRNAALLHLAAELPPIVIADLLGIHPGTAHHWADAAAGRWTTYAAHRGRSH

SEQ ID NO: 943 - protein, 562 aa, synthetic construct; identical to SEQ ID NO: 942
  REGION 1..562: note = TnsF-Tn7 System Protein

SEQ ID NO: 944 - protein, 384 aa, synthetic construct
  REGION 1..384: note = TnsF-Tn7 System Protein
MQERLDVPGAAHRELDGNVTHLNPEHAVFEAMLAGWAGQQSARLLSMITIGQREGVLRRFAHFTGSWPWQWSPGDVEDWAGALRSGPSPCSHSTLRYYQNSVALFLSYLIDRRYGWSDECLQRFGTHPVQICHEWNTARHAADHEARPQVRPFTRVELQKFFDFADEQVGRADRLGRKGSVAAFRDATLFKVIYAYGLRRTEAAMLDIGDFTRNPKAPEFGRLGACNVRYGKAMRGSPPRRRTVLTVMGWSVEVLEEYLEHVRPAYTPGAQPALWPTERGGRIRAAYIDTRFAQYRDELGLPAELHPHCLRHSYVTHLIEDGFDPFFVQQQVGHRWGSTTALYTGVSGDFKNRMLRRALDAALPADSPTGTPTDHAHDGRQEDQ

SEQ ID NO: 945 - protein, 107 aa, synthetic construct
  REGION 1..107: note = TnsF-Tn7 System Protein
MMAERGMFATTDLVPLLAERGVELHYTQVYRLVTGTPERLNMQVLAALCDILDVTPADLISTAAQPGTRRARRTGTTPGHPADPAGPADTASRPSAPTRARIVRDEP

SEQ ID NO: 946 - protein, 840 aa, synthetic construct
  REGION 1..840: note = TnsF-Tn7 System Protein
MTGRETERYLVDPLGVISGIVGNFEPSLEPATIAMVTEQVAQSRAGRRQLAKAIEDDPSLLTSGRTAGTPLIDRFIRALRASGAVVVVQPVCASCGKPAQRMAQHDEDGLRICVTCYNRAKGTFAPRPCAMCHRVVRPSSYDRQGRPRCNLCPPDPGVDHVEMICELVNAVDPVADRTQLRELIIRTVRQAAQRRRVAWDVEDRPELLTGAAASGTLVVRRLVAALVDHGVEGVVAPQCPFCGKTKQVISWREGLPCCLSCYQKARAKPCGRCGKVRTISTRTPQGRPMCAECARQEPCNQERCSVCGLLAAIVSHRDGVPICVGCWQMPSAVCSICGETKPCQGVGTAAPRCVNCYRRSRTAVCARCAAVHPIGGRDAEGRPLCAPCARRREPCCRCGRVRPVDGRVDDGPVCWTCIKAEPAYFRACRGCGTVTRLHRHGLCEACAATDLLAAALAGRDGSVRAELNSVRHALATSRPSTLLNWLYRPTTSAMLGQLAAGDGPVTHETLDKLTPAGPARYLREVLIAQKVLPDNDRHLRALQRWFDLRLATVDDPEDQRLLRGYLTWTHLRRLRRLGNPATPGSTNSIKNEITSAIGLIEWLHARGRKLRACTQADLDAWCMLGGRTPRRARSFVAWCVARGVTGSAAIAAPAAAARPRVFADEDRRWRTARQLLHDDTIATIDRVAGLLVLLYGQAVSRIVRLTINDVLRADGAVQLRLGRQPLMVPEPLDTLLLGLVGTRRGKAALGHTDDHRWLFPGGLPGQALHPLTLARRLRDVGIPSRGSRNTAMIELAATLPAKILSELLGISTDSATRWAALAGTDGNGYAAELVRCATDS

SEQ ID NO: 947 - protein, 840 aa, synthetic construct; identical to SEQ ID NO: 946
  REGION 1..840: note = TnsF-Tn7 System Protein

SEQ ID NO: 948 - protein, 356 aa, synthetic construct
  REGION 1..356: note = TnsF-Tn7 System Protein
MDGVVLLRPEDTVVQAMLRGWEAQQIGGRGLRPSSVRDRLGVVRRFLTYTNEFPWCWTPAYLDEWMVELVSHSGRAKSTIRNYQDAVRSFCNFLIQPEYRWVAECEARFGTHPAQICFEWNTLAHLADYEGKADRRPMTRGELQRFFDHADAQVELAVRRRRKGALAAYRDATLFKVMYAYGLRVREATRLDVTDWYRNPKAPELGRYGNLEVRWGKASRGSPPRRRTVHTVMPWIVEVLDDYLTNVLPRYGFPEHPALWLTERGSRVLPRSIEQRFVDYRIALKLDSALVPHCLRHSHVTHQIEDGVDPKFVQEQVGHRYASTTAIYTGVSGDFMNTMMRNALDKAFQPDRAELR

SEQ ID NO: 949 - protein, 110 aa, synthetic construct
  REGION 1..110: note = TnsF-Tn7 System Protein
MTARLDYKWNLRELMARQGMFQTTHLRPQLAERGIALSDSQVYRLVVDKPERLSVKTLVALIDILGCTMEELIEPVAAAQPQRKRAAAAADGVGVGEFRPKRAKIVTDRA

SEQ ID NO: 950 - protein, 493 aa, synthetic construct
  REGION 1..493: note = TnsF-Tn7 System Protein
MNELRGRGRPRSTGTLHCDRCKNLVAKIRVHWPDGAICGACFSFAVNASGSCAHCHEIRLLPGRSPFGEEICRDCAGITTNLTCSKCGAEAERRRGGHCARCIVIEDLTKILKPNDPSDIRLHRLIRELASTDRPRSVISWMRLPEAQALLDSLGDRTLELTHETFDMLPTAHSTEHLREMLVHHRILPSRGNIRLARFESWLDTRLSSLQGKPHIHQPLEQFGRWHHLRRLRNMPPQTNMDYATRSAKQEITEAGKFMVWLDTEHGTHIDRISQTRIDLYWSEGPSTRKHIRNFLQQRKLTGPGHALKAKARQAATSPMASTTSRLNAIRTVIEADEIYLGTRIAALIFLFYGTPIGKLASLQTNQIHAGVNGMTISLGSQPAPIPEPLIPLFADHLRHGANSRSMNKDSPWLFPSTRGGQHISANTLWNRLKIFDLQPLATRNTTLFDLSKELDPATLSALLGYTSITMTNHAARAGAPMGSYPATRPATE

SEQ ID NO: 951 - protein, 493 aa, synthetic construct; identical to SEQ ID NO: 950
  REGION 1..493: note = TnsF-Tn7 System Protein

SEQ ID NO: 952 - protein, 373 aa, synthetic construct
  REGION 1..373: note = TnsF-Tn7 System Protein
MSEELGGLIWLPSIAAAPDPDEFLREVLEGWKRQQLAQNLGLNTIRRRSRSVLRMTSFAGKAPWEWLPGDADDFFSHLRGVQNLSHNTVRAYQTDVKLFLDFAGDSAYDWNARCGQLFGTVFSQVLSELNHATHAQDTGEASKRPFSIQELQEFFDLADLEPERILNSGRKGALAAWRDAVMFKTIYAWGLRHNEARHLILADFSRNIRAPSFGEWGLLRVRQGKAMKGSAPKQRTVLTVFDWATEMLDHWKRVGHPRFGLHRATPLFPTDTGKMLDQAYLRRRFHAFIQELGFAPGLDIHSFRRSYASNLQIDAGYDVSFVQLQLGHEHASTTSIYTVASPDYRTRELNRVLTGTLERSGATLPHPKQKESQ

SEQ ID NO: 953 - protein, 116 aa, synthetic construct
  REGION 1..116: note = TnsF-Tn7 System Protein
MRRQVEYQWRVREIMARNGMRNSRDLVEPLRERGITLSESQIYRLVAQEPERIAFKVLVALADIFRVEVNELVTYSATDTRAQRPKKVVGSAAEVPLREAYRPIRARINRPGNDDE

SEQ ID NO: 954 - protein, 491 aa, synthetic construct
  REGION 1..491: note = TnsF-Tn7 System Protein
MRSPSAEQYERWYLRDCARCGRHAGKAANWSDGPMCRTCLDKATRTRGRCPGCGTDRLLPGRRPDGTPICRDCAGITRNFFCDRCGFEGRLHTGRLCERCTLADKVTATLDDGTGRINPALAPLAEALIAMPDPWKGWMWLRTAHVQDLLTGLARGRIPLTHQALHQLPGWRTVAYLRDLLMACGVLPATDKQLLHTETWLTHRLAELDGHAHEPLLRRFATWHLLPTLRARAARQPLTASARQSAGEQFTHAQAFLTWLDEHDLDLRQCGQADLDSWHATHPKSHRAALKAFLTWAMANRHMRRLDLPVPPHGNSAPLSQRRRLELIRRAATDDQIPPRVRVTACLVLLYAQPITRIMRLTLDDISITDTEVRLRLDNPPSPVPEPFATLLLQLAEARTNMNTAANPDARWLFPGQNAREPLNAATIREQLRLLGFSSGAAREAALRQLVLQAPAPVVAEMLGYTPQATTRHAAAAGSPWSRYAAGDHTK

SEQ ID NO: 955 - protein, 491 aa, synthetic construct; identical to SEQ ID NO: 954
  REGION 1..491: note = TnsF-Tn7 System Protein

SEQ ID NO: 956 - protein, 296 aa, synthetic construct
  REGION 1..296: note = TnsF-Tn7 System Protein
MTSALQAQALGKKYGKRWALRECTIDIPAGHVVGLVGPNGAGKTTLLKLAGGQLQPTAGDITVLGGRPGSTPAQLAKVGFVAQDTPVYAGLTVAEHLRLGARLNPRWDATMARERIAQLGLDSTRRAGKLSGGQRAQLALTLGLAKRPELLILDEPVASLDPLARHEFMQGLIEATVEHQFSVVLSSHLVSDLERTCDYLIVLVESRVQVAGEVDELLATHHRLTGPRRDLDRLPADQQVISARHTEQQSTFVVRTDAPIHDPAWTVTELSLEDLVLAYMDKQTADNRRAALEVQR

SEQ ID NO: 957 - protein, 296 aa, synthetic construct; identical to SEQ ID NO: 956
  REGION 1..296: note = TnsF-Tn7 System Protein

SEQ ID NO: 958 - protein, 170 aa, synthetic construct
  REGION 1..170: note = TnsF-Tn7 System Protein
MLDVVDFGHNPDGPEFGEYGVLYVRHGKAQKGSPPKRRSVLTVWPWAAEILEQWDTEVRPLFTTCEAGALWPSERGSRIGFSQINTRFAAYRDALGLDRALDFHSFRRSYVTHLIEDGWDARFVQEQVGHEHASTTSIYTCVSSDFRTRTLRRALDATMDAALKPSRRKR

SEQ ID NO: 959 - protein, 1202 aa, synthetic construct
  REGION 1..1202: note = TnsF-Tn7 System Protein
MRESAGRLSYRELSRRAHYSATALSEAAGGCVFPSLAVTLAYVRACGADPATWEKRWQEAADELAAPESAEGRYRAPYLGLMTFEPDDAELFFGRDELLRDLVYRVSCTPFIGVFGASGSGKSSLLRAGLVPALRHWPIVVLTPGEHPVLELAIGLSSHAGISPEALRNDISSAPENIDVIVRGILHGRPDGDRVVFLVDQFEEVFTLCHDEREREAFIACLLAAGDQARVVLGMRADFYSHCAGHGGLVAALRDRQILVGPMEEEGLRAVVVEPAARAGLKVEASLVVAVLADARGQAGALPLLAHALLETWKRRTGQTLTLAGYRETGGIQGAIAQTAERVYAEFDAAGQRLVKDIFLRLTALGEGTEDTRRRLAPAELLTAPDPAASAAVLSRLTHARLVTADASSVQMAHEAVLRSWPRLRGWLAEDREFVLRRRRLTEAAAEWDGHGREEGALYRGARLAAWQGREMDRLNEQELAFLTASWAHRDKERRSAQRRMRRVVAGLVAAFTAISVAAGAAIFQARQAQDKHDLAASRRLAADARAQLELDPELALLLARQALRTAATREAEAVLRQAMVEHRQRLVVSLSPTNVRGVAYSPDGTRLATTGSDGVVRVWDTRTMRDPLVLAASSGDAQSPVFSPDGTRLATTDALFDVVRVWDLTRPGQARVLHPHLGRTWGMAFAADGRLATAGEDGAVSVWTADGRLTRILSHGRARKLAVAVNADGTLLAAVGDDDVIRVWGSSAKPRLLRARDYRLAHLALSADGTRLALSADGTRLASGDVDGTVWVWDPRGPGEPIALRGHDRTVRSVAFSADGRLASASSDGTVRVWDPHGRRDPLVLRGHHGTVWSVALSPDGSTLASAGEDNTLRLWDARPPGAPLLLRGHTGTVGQAAFTPDGQGVVSGGHDGTVRLWKADGSGRSVLLRNRGGEVLAVAVSPDGRHVADAGADGRIRIFPIAGGPERLLRGHEGPVSNVAFSPDGRRLASGGSDGTVRSWNTDGSGQPLIRHSMPGTIRYAAYSPDGRHVAGTDYDGSVTIWPLEQPEQPVVLRGHHDTVSAVAFSPDGHLVASASTDGAIHIQRADGTGPRRVLHGHQGLVWSLAFSPDGQWLASGGSDDTARFWQVSGGDESVVYHGFGTTVEGITFGPGGRLVTGHGDGIVRIWQCQVCRPIGQLLALADHRITRALTAEEKAKYLP

SEQ ID NO: 960 - protein, 109 aa, synthetic construct
  REGION 1..109: note = TnsF-Tn7 System Protein
MKRQVSYQWRLRETMAAHGMFAATDLAPLLAERGITLSSVQVWRLVTQTPERLSLPVLAALCDIFGCTPDRLIATKAENAPARRTATNSGEVTELAPIRPKRARIQPEK

SEQ ID NO: 961 - protein, 501 aa, synthetic construct
  REGION 1..501: note = TnsF-Tn7 System Protein
MTPRTRAQCGDTPLADSKCVRCDRYSQPAVRWEGPVCRPCIKRATRNRGCCPHCGNHRLLPGRDDTGHPICRDWAGIARSFFCRRCHHEGLLVSDKLCERCTLTDRLTTVLDDGTGQPRAELLPLLDKLRLTDKPHSGLTWLDKPGTTDLLTALATGATAISHDALAAHPAWRKATYLRELLIACGILPPIDKQLMLFQRWLDTQLDAVADAERRALLQRFATWNELRRLRHKAEQAPLSPATIRGSRERVRQAAALLNWLDISGHTLATCPQPALDTWLATNPQTRKPATAFLRWAGQATLMPRRRLTRAPLPAATIQPRRQQHELINALVTSDDWPLRERLIALLVLLYAQPLSRITRLRRTDISIIGPDVFIRLGDPPAPLPPPLDDMTRQLLEHRNTYRGPNANTDWLFPGKRPEQPINSKTLNNRFSKLGIPIQLGRTTGLRELLHTTPSPVVASMLGIHPGTTARIAAEEGITWSRYATRRPTPNGHHDTRIHDS

SEQ ID NO: 962 - protein, 501 aa, synthetic construct; identical to SEQ ID NO: 961
  REGION 1..501: note = TnsF-Tn7 System Protein

SEQ ID NO: 963 - protein, 499 aa, synthetic construct
  REGION 1..499: note = TnsF-Tn7 System Protein
MTYPPNGNGYPPPVPLRPHQQQDHPHGGWPQNPPAAAPSYFGSPPPEVFGAPEPVDMAAAVGRLRQHLRDTLSTQLPAWADAQQRRTGSTLTREARRKLAQAILDEAIAVHTERELDADRSLVGRAVEQRVIGEVINELFGMAGLQPLLDDPTVETINANRFDRVFVQYNDGRRAQVAPIASSNEELTDLVRLLAARASSQERRFDQGSPAVNLQLPGGERLFAVMGLTAGGVTSLSIRRHGYLTVTLPELRARGTIDAGLQEFLRALVRAKKNVLITGGTGAGKTTLLRALAAEMDPMERIVTIEDAFELGLELDPDIHADVTAFQAREANIEGEGAISQSELVRWGLRMSPDRVIVGEIRGPEVIPMCNAMSQGNDGSMATLHASSSRIAFTRLASYAAQGVERLPLEATNLLVASAVHFVVHLARGTDRTTRVVSSIREVVGTDGPQVISNEIYRPGPDRRARPVAGSMRTDTLDDLVNAGFDPAVLEQPEGWWAS

SEQ ID NO: 964 - protein, 499 aa, synthetic construct; identical to SEQ ID NO: 963
  REGION 1..499: note = TnsF-Tn7 System Protein

SEQ ID NO: 965 - protein, 377 aa, synthetic construct
  REGION 1..377: note = TnsF-Tn7 System Protein
MTEAERPTAGATALQLVDGVVFLRPEEQVFEAMLTGWGRQQAARNLASSTIANRDKRVRGFVEHVNAFPWQWSAAMVDEWCADLRSINGVSRSSLRTYQQALRLFCHYLTDPAYGWAGECERRFGTHPVQVCHEWNTAVHVQDNESEPAKRAFTLDEIQAFFDYADDAVLRVRDAGRKGWLAAFRDATMFKVAYAFGLRRTETRMLDTADLATNPHAREFGEYGVLHVRFGKAKPGSPPKRRSVLTVWDWSVEVLEEWITEIRPRMAHASSPALWPSEQSKRISGAALNARFATYRDALGLEPGLDFHSLRRSYVTHLIEAGWDPFFVQQQVGHEHSSTTSIYTCVSSDFRTRTLRRSLDDTLASALKSTTDGGSAR

SEQ ID NO: 966 - protein, 429 aa, synthetic construct
  REGION 1..429: note = TnsF-Tn7 System Protein
MTTPTPPTAPAPTTPAAPAAASGGSVPRLRNGELRAMVARVLADAAGTNLTPRAIAATLNRSSGAVGNACKVLADRGEAEVAATAPLAYRATATTASAAAPTAPPAPSGTPRPRRPKTTTKPAATPNPSATTPPPSGAGSSAAPVTGPVMRPNGMAYHPRQLSGMPDVTALRKLREAGVAALMYGPPGTGKTSVIEAAFPDLVTVQGDGDTTVADLVGEYTQTGDGRYVFIHGPLVRAMREGRTLFIDDATLIPPTVLAVVYPAMDGRRQIIIKANGGEVVDAAPGFYTVAGHNPGVHGAVLSDALSSRFSAQIHVSTDYDLAAQLNIDRRAVKIARNLATRQANGEVGWAPQLRELLAFQKIADVLGANAAAGNLVGTAPGRRPRHRGRRGARRVRRHRRPAVAGFPHLNPPPPTPNPPTVPERTPAP

SEQ ID NO: 967 - protein, 429 aa, synthetic construct; identical to SEQ ID NO: 966
  REGION 1..429: note = TnsF-Tn7 System Protein

SEQ ID NO: 968 - protein, 113 aa, synthetic construct
  REGION 1..113: note = TnsF-Tn7 System Protein
MNAMKRRVSYDWRLRDLMADHGMFSTTELVPLLRDRGVELSVSQVHRLVTGTPERLSLTVLAALCDIFECSPAELIRTEAANVTRRTATGTAGTATPPATGALRPTRARIRPQ

SEQ ID NO: 969 - protein, 515 aa, synthetic construct
  REGION 1..515: note = TnsF-Tn7 System Protein
MTATAADHTAGEASRCARCDRLVRDRYERVEGAGEVVLVWIRRWPDGLICSGCFATAMETYGICDGCGIDRLLPGIGPEGQHRCTDCAGGLGDFTCTRCGREGWREHAGICGWCVLQDRVDEILDDGTGRVRIELVPLAALIISMKRPRSGILWLSRPEPRSVLRAIARDEVPLTHEGIHSLPHRRSTVYIRDLMVTAGILPPIDKSLFYFEQWSRSWLNELADPEQRKMFRLFITWHYLRVFRARIDARGELGYAAPQIARHQLRTAATFVAGLAEQGRALAEATQTDLDRLFAEGTPRLRDTLRPFLRWTMNTRRIPKLELPPPIKRPVALMTQQRRIELIRQVHDGDGMELTDRVLALFVLLYAQPLTRIQQLTIDDIGIDDEGNLLVRLGDPPIPIPAPFDDIIRKHVAARRNQTTATNKTSPWLFPGRASGRPLHTTSIRDRLHNHGIPNLSNRSRAIRELLRQAPPIIVAGMLGYSPTGSERIATEYGTTWQHYAPLGKPARRLPRLNE

SEQ ID NO: 970 - protein, 515 aa, synthetic construct; identical to SEQ ID NO: 969
  REGION 1..515: note = TnsF-Tn7 System Protein

SEQ ID NO: 971 - protein, 554 aa, synthetic construct
  REGION 1..554: note = TnsF-Tn7 System Protein
MLLATLVGLALSALAIAQALATALLFSGIVDGLSLSVLVGPFAVLAAALLLRPAATAGRELVAHGVASRMKRVMREKFLEKDEALGPFGGQDVRLGERHALLVDGIENLEPYVTRYLPQVIVTIITAVVTVSLLFSIDPVVGAVAAGTAVVVPLVPRLWDRVLRGRGDEHWSAYSQLHADVVDSMRGMETLKLLGAEQRRRAELGRSGDSLLRSTLSQLRLSLVESGLTGFLLVAGPALALGVAVARVGSGALEPAALFAVALIGFEVFRPFRDLSNHWHAGYLGVTAGTRLLAYFNTPVLGSAISPVSDDVPAGTAVEIHNVRVRYPGADETALDGLTLRIPRATVTAIVGGSGSGKSTVANVILGLLTPDEGRVAVVDGQGRPPVSLVSQDPVIFSGTLRENLAVIAPDADDVQLREALALAEAGELADPARGGLDAPVGDGGGLLSGGQRQRVAIARALLRGSPVLILDEASSALDVRREHDLLESLRRSVAEGGLTVIVIAHRLSAIREADDILVVDDGRIVEHGTYDDLVLAGGVFARLHAAQSQGVAQ

SEQ ID NO: 972 - protein, 554 aa, synthetic construct; identical to SEQ ID NO: 971
  REGION 1..554: note = TnsF-Tn7 System Protein

SEQ ID NO: 973 - protein, 590 aa, synthetic construct
  REGION 1..590: note = TnsF-Tn7 System Protein
MLRPVLRLLGEIREERGLFACSTASMTAFQLATAVVAGISTAIATAVIDDRPTGLVNALLIALVTAVVAVAVFTWIESWLSHVLAYRVINALRMKVYDAVERIVPARSGRRRAGEVAGTAMTDVEVLEWFYAHTLGAGINAVLSPMLVSVALVVLVGPIGLIVPAGVALLLTIPWLFAGLQVRQGTAIRERLGDLHAVAFEGAEARRELATLGLTVRHREDVLARTAGVQDAKRRFALRASVESALADVVVAATSLGFLAALMAQAASGSVDPVLVPAAMVLVSAAVLPAAGAFAMVQRLGEMSSAARRVRAFIDEPDTDAASSETLPSGGAGSVRFDDVHFAYDGAEPVLSGLDLTVNAGETVALVGASGSGKTTIARLLTRLWEPGSGRILLDGIPIAEADPVSVRREVALVSQHPFVFRGTVRSNLALASPEADEADMWQALSDAGLADTVTDWAKGLDEPVGDRGTTMSGGQRQRLSIAQVLLRDPAVLILDEASAQLDAVLEMDLADAVARLRAGRTTIVIAHRVSTIRRAKRVIVLGQGRIIGDGAHEDLLDRLPAYRALLAGGDGPHDPPAEHAGSPRETERR

SEQ ID NO: 974 - protein, 590 aa, synthetic construct; identical to SEQ ID NO: 973
  REGION 1..590: note = TnsF-Tn7 System Protein

SEQ ID NO: 975 - protein, 281 aa, synthetic construct
  REGION 1..281: note = TnsF-Tn7 System Protein
MITAREITVRYGSTLALDATDLAVPSGRTVGLIGPNGSGKSTMLRAILQAVRTESGTVLIDDDPIEALSPVQRAQRLAVVAQEEPSGLPLTAWDSVLLGRSPHISGWSSYRQEDERAAEDAMGRAGVLHLASRSIDELSGGERQRVLIARALAQGAHHLLLDEPTNHLDVRYQHDILSLVQDLPLTTVVVLHDLNLAARYCDELVLLHEGAAVARGTPTQVLTSEVLTPVYGIDVRRLDIDGVPQLVFSPRRRRPLAEPILHDDDVHSSMEVAPATSGVIQ

SEQ ID NO: 976 - protein, 281 aa, synthetic construct; identical to SEQ ID NO: 975
  REGION 1..281: note = TnsF-Tn7 System Protein

SEQ ID NO: 977 - protein, 115 aa, synthetic construct
  REGION 1..115: note = TnsF-Tn7 System Protein
MTRQRRKVSYEWRLREVMAAHKLYATTELVPLLAERGIVLSASQVHRLVTTTPERLSLPVLAALCDIFDVTPAELIPTDATGVGVRKIAAGDRPAKPTGIGDLRPVRARIVRPGE

SEQ ID NO: 978 - protein, 537 aa, synthetic construct
  REGION 1..537: note = TnsF-Tn7 System Protein
MGKRQRDCVDCGAPVGFLGREHCCLCMRRMREQAAKASCPDCGKQRVLLDSTGRCTLCSRRCTECDHPVRRADARLCKTCRRKAELRTQRQLCPRCGKPGYLRDATGWCGSCSRPRPGKQPPRICRQCGQLRRHSGLGLCSPCYQRQPARLFIRADNLIARLDDPPRWLGEFTVHLSARHNPSSACEMITTLGRLLTSEHPNHPQTILERARRPGRSIGPLARALEDFFTARGLALPTDQSERLAAGRRQRRIDAVPSPLRPAVAAFDTSRMQAQQRARRAGTRPRSDHTLETALAILRDLAVFLVSQRGKQDWALVDVHDIEAFLTTLPKARKRRLTVLRQFFASARAQRRVLVDPTRGLTARESNAFRGRTLTRDQQRELFRRWTTNDQVHPHEALVGMLALLHGAASWETRTLKITDIDPHAQTVRLGKRPHPVPLDPASWSALQRCLAHRQAWPTDNPHVLVTKGTKTGRAAAYLSHVLDECGFPPQMVRSTRLVDLVNTLDPKLVAAAFGMDPQAPLIYLADHVDACRLPQP

SEQ ID NO: 979 - protein, 780 aa, synthetic construct
  REGION 1..780: note = TnsF-Tn7 System Protein
MKRRGWLLALLVVGVVALGWWLWVLYRAPNRADLAGYWQLVVAIPSLAVAVGALVRDRAGRGSGDRERDAAAELRWLADRLAEALEQQWTQAAVARRLVVPEPIAVRWARPARAVAGSAAAATLAGRFAPLPGLSAIRVERFGGGGVRELHGIYGGLGSGRLVIVGAPGAGKSGAAILLVLDALRHRGQVAEAERDRVPVPVLVTLQQWSPRTQSLRAWLAGQLCGAYPGLLSGRGGERDAAALIESGRIAVIADGLDEIAEQLRPLVLRALSSQATFRLVLLARSEEMLGAAEQAVLDGAVAVELRDVGPAEAVDYLARVQRDPPPPRWRELLERVSSEPDGALARALSTPLILSLVRDTCRDDAAVGALLDLRAARGAALTRVDVENHLLGLVLPEAYAERPGEPAPPYPLPLARRTLGWLAARMNRAGTRDLAWWRIPAWTSPLPGVVLVGVAAAVSVGLGLLWLPAEQSPVGWLAKAILGAVAVGGAFGAWLARRRMGRASVVASPARGSALSEPAAQFVLGLVLGLLVVRGQWALGHASATPGRGLLADLLLALLYAGVCYLAQSFFMRRGLRRHQHKHGVALPIPWRRLRRMNLFSAMPGFCGAIGTELPPAWALVLVLLFAALTSRGVIRGLARAIPRSAAALTPLGQWRYFRIHSLLSWPMIGIFVGGFGLPRLEFGILGLFGDDLSALPPVLVAGLALGLALAAGVFQGWATPPSWLTAVAAVQLTLRHRTPPDLMHFLDDAHQRGVLRAVGLIYQFRHARLQDRLATHDH

SEQ ID NO: 980 - protein, 780 aa, synthetic construct; identical to SEQ ID NO: 979
  REGION 1..780: note = TnsF-Tn7 System Protein

SEQ ID NO: 981 - protein, 190 aa, synthetic construct
  REGION 1..190: note = TnsF-Tn7 System Protein
MFRTLYHAGLRSEEASMLDMPDLHFDRGPFGKLHVRFGKGAHTSGPRPRWVPMLDGLDLVLHWFLRDVRGRFPDSPVLFADESGGQLHRGTIRNRLRRLMELEGRSPTEWFSPHGLRRACATHNYERGVDLVAIQQLLGHWTVSSTMRYVRPSATFIEDAYRRAVTTTLSELGDPGQVGLAGPSDGGGRR

SEQ ID NO: 982 - protein, 102 aa, synthetic construct
  REGION 1..102: note = TnsF-Tn7 System Protein
MRIRWRLRMAAAQREVWTGTELRRLLADKAGLELSAASVSALLTKEPAQVKLSTLIALCTALQCTPDDLFEVDTTPVESPAAPRPAGEPKVVNEHGRSLPPL

SEQ ID NO: 983 - protein, 505 aa, synthetic construct
  REGION 1..505: note = TnsF-Tn7 System Protein
MMLSSESRRPKGRPRASGDAVCARCGERGSDSTTKYSFPEGIICGRCYEKAVHTHGPCATCGSDRLLPGLNEYREPICVTCAGLDRDFRCTRCATEGAIFRKGLCERCALSDDLNALLGHPSHSSRTDLAHLRDYLLRVERPASTLTWLRSAKVKALLRWLAENPEPVTHAALDALPQSPAVRHLRSLLTGTGVLGHRDESLTRFEVWVRAKVALFAGEHRRAIERYAIWYHLRRVRQLSSLGQDTHPAVHNAKQQVTAAVNFLVWLQERHVPLAHCEQTDVDTWLTEGNTSRYTVRGFLEFTREARIAPPLFVPTRHARARTRRITSEERLARIRYYLTDESLTLSARSVALLLLLYGQPLSRVAAMRLDAIRDSPEEGMSITFSDDPVPVPPPFDDVLRRHIVSRARTRTVSVSANPFLFPGLRASSHISREQLKAELNMAGVDVLAAKNTSLDELVAAMPAPVVADALGYSYGALSKHEEYGGLRYRRYVHGMHPGDGADES

SEQ ID NO: 984 - protein, 505 aa, synthetic construct; identical to SEQ ID NO: 983
  REGION 1..505: note = TnsF-Tn7 System Protein

SEQ ID NO: 985 - protein, 246 aa, synthetic construct
  REGION 1..246: note = TnsF-Tn7 System Protein
MGELHKGLDALMHIVAIVNQKGGVGKTTTTMNLAAVMAKHARVLMVDVDPQQSATEWAETAGERLPFDFAPNINPQSLSRLKELGDEYDYVFVDTPGNLETESILKAVLEVTDFAVLPLNPEPLVTKALKRTYERYIEPMGIEYRVLLSKIDRRRAGQLEDWQVVVDTGLKLARFQDSIRLYAAHTDAPIDGRVVTQYPDTRQNANAIFDYMMVANELRSILNGETARGGSFKPRQVSLEQAAKGA

SEQ ID NO: 986 - protein, 246 aa, synthetic construct; identical to SEQ ID NO: 985
  REGION 1..246: note = TnsF-Tn7 System Protein

SEQ ID NO: 987 - protein, 361 aa, synthetic construct
  REGION 1..361: note = TnsF-Tn7 System Protein
MEYARRTPGITLLHPEEQMFDEMLLGWRRQQLARNLSINTIDGREKAVRRFMKSTNTYPWLWTLEQVDEFFGDRREIHGNQRTTVRSYQDALKLFTDYICSPAYAWAERCTDLFGTHPVRVIHQWNMARHIQEAEHGGRRRPFRHAELQLFFDRADDEADIIARRGRKGWAAAFRDSTLFKLAYCFGLRRNEIRHLETFDFSRNPHAPEFGKYGHLNVRFGKAMRGSDYKQRNVLAVFPWGSDILAEWIERGLPLFGPQTALFPTERNTLVSESALNDRFRTYRDDLGLGTELKFHSFRHSYITHLIEAGFDPLFVQQQVGHEYASTTALYTGVSSNYRIKTLRDALDGTIGQALKLGVEN

SEQ ID NO: 988 - protein, 236 aa, synthetic construct
  REGION 1..236: note = TnsF-Tn7 System Protein
MGRRWRSHRADHHRHPGRNPGPATDHDQRWAQIARLLHDDTIELTDRVAGSLLLLYGQQLARIVAITHDQIKTQGQQVFLRLGTDDLHIPEPLAALITALVRDGRPYTGVGTPPTTNWQFPGLQPGRPSPPPDSASACANLGSELNPAAAPHSPTSPPNYPPPSSPTYSASTPTPQSTGSTTPAATGTATPPNPPRTSITNHDECLNRALPAAGHSHGSKIAGYQFAGWHQPESDQ

SEQ ID NO: 989 - protein, 182 aa, synthetic construct
  REGION 1..182: note = TnsF-Tn7 System Protein
MSWEALAWAKDLDIAHPVAKFILVLLANKADENFSCYPSIRTLMAESGAGRSTILRALSHLETRGFMSRRPQFHDSGARRSTRYYLNHPRAPHLLTGPDPGPPRPAAGRGPSRTETGTVSKRHPEGPTAGPLEPINRITIRTGRRRDNGPGVRDQSVETRDPRRAQSSTGHRVCPGARLAGR

SEQ ID NO: 990 - protein, 307 aa, synthetic construct
  REGION 1..307: note = TnsF-Tn7 System Protein
MVALVPIVVFGVLLAVVTVPFVSLGPGPTFDTLGEVDGKQVVDIEGTQTHPTSGHLNMTTVSQRDGLSLGEAITLWLSGQEQLVPRDLVYPPGKSREEVDKANNADFKNSEDSAEYAALGYLKYPEAVTVASVNDPGPSAGKLKAGDAIDAVNGTPVANIEQFTGLLKNTKPGQSVTIDFRRKNEPAGVAQITLGTNKDRDYGFMGVAVLDAPWAPFVVDFNLANVGGPSAGLMFSLAVIDKLTTGDLVGSTFVAGTGTISVDGKVGAIGGSRTRWPLPVPRAPRCFWCRRKTATRRPPTPRKACGW

SEQ ID NO: 991 - protein, 338 aa, synthetic construct
  REGION 1..338: note = TnsF-Tn7 System Protein
MKLTRIEVKNFRSFGESDIRLTDGMNALVGPNNCGKSNLVRAIRMAFDPKYPFDPAVDVPGQRKFAFPRTTLTFDCRGATSSESTLLRYLRDYEKTVSRSSSSTYAEDSTVRFVVTYRGGRENVTRQEYFSARGGGDRRGNPELNEKALRQFRKVMRFIAVDSGQSIEELLAGRFREILHTVLKEELKQHLHDAELARKDYVGKLESQLLSPMRDRTLTISKRLFPEVKDMFLTPTVSGLEETLSNVEIRLADSVETELRNKGTGVAGAILVALLRYLTEASKQSMVLAVEEPEAFLHPAAQERLREDLEALAEKDNVSLLITTHSPTFYLGIRRRKW

SEQ ID NO: 992 - protein, 338 aa, synthetic construct; identical to SEQ ID NO: 991
  REGION 1..338: note = TnsF-Tn7 System Protein

SEQ ID NO: 993 - protein, 218 aa, synthetic construct
  REGION 1..218: note = TnsF-Tn7 System Protein
MTRAELQAFFDAADDWAEQAVTSGRKGWLAAFRDAALFKVCYGFGLRRREVAMLDVADFTANPAAPQLGGLGVCQVRFGKAMRGSPPRRRSVAAVMPWALEALEQYLTLVRPRYAAAAHPALWLTERGGRISPRQVDDRFARWRAAAGLPTELSVHCLRHSYVSHLIEDGVDPLFVQQQVGHSWASTTAVYTQVGADAKNRMLRAALDAAFGAELSPG

SEQ ID NO: 994 - protein, 74 aa, synthetic construct
  REGION 1..74: note = TnsF-Tn7 System Protein
MVLSREQVYRLVAGVPERLSLTTLAALCDILSCTPADLIEPYRVARSRPTRGDSAGPAAPKRPTRARVLPDTGG

SEQ ID NO: 995 - protein, 316 aa, synthetic construct
  REGION 1..316: note = TnsF-Tn7 System Protein
MERVLAHLPPRHRRILRLYAEWSLMRRARRRAARGRFTSASAAGVRNAVRCSAAFLTWLDDHNISLADLAQTDVDMWLSESRDRRHVRLFLRWAHQRRLTGKHEVLDRPRDEPHRWWTETEHWTHLRRCLHDEALPADVRAAGALVLLYGMPITRIAALTRSDLTGGIEPRLLMGTHPAALPPLVHQLLLRQAEHAEPNSAIGRVTPRTAWLFPGYAAGTHRSAADLARKLRLHNLPARIGRNTALLALAADLPASVLSETLCLSITAALKWTRRAARDWNAYLAARPTPRPNTGPFTKTNSVPGRRIPRYQADAY

SEQ ID NO: 996 - protein, 316 aa, synthetic construct; identical to SEQ ID NO: 995
  REGION 1..316: note = TnsF-Tn7 System Protein

SEQ ID NO: 997 - protein, 140 aa, synthetic construct
  REGION 1..140: note = TnsF-Tn7 System Protein
RLAGWAIADHMRTELVIDALAAAGRTRGSLAGAVMHTDHGSQYTSRAFAEACRSAGVRQSMSAVGSSADNAAAESFNATLKRETLQGRKGWSTEREARLDAFCWLTRYNTRRRHSRLGQRSPIAFENTLQPTSTTLAQAA

SEQ ID NO: 998 - protein, 845 aa, synthetic construct
  REGION 1..845: note = TnsF-Tn7 System Protein
MTISKDTVASRCDTEPVAAITDIVLAVEPTMSQAEAERAVLDVVTRRDYQRELARALTAAPDLLTSGRPEGPRSVERLIRALLAHGARQVVLPRCPRCGNARPLLCRDGDLRICNKCSHRAASRNQPCAGCGKPRITAYRDHLGQPWCQYCRPGAGTPTDDPLRELVEIVCSIEPGMPQQAVIDAISEAIPLLSQIRQTAGALRDAPDLLTGRGAHGSPRVIALIGALVSRGAANVVAPPCTICGVVKPLRSTLHGLRCCRHCYQLSNQKACADCGQVRSISFRTMEGRLLCRPCSNKQPSAYDDCASCGRRKRIVTRAKGAPLCKTCYLPVVTCSICNKAKPCYFADTDAPRCPNCSRNLATPEPCTRCGRVRLVRARAKDGGAICQACGVVREACGDCGRKRPVSSRTPEGSPLCRNCYEKSPLSYRECTGCGSLERLYHHGLCDSCARAAAVQDLLADADGVVPARLSGLASALLAGEPLAALRWTNMPTSRAMLAHLIASREPITHEALDAAPSERAARHLRAILVAHGVLPERDEQLAALERWITRALAEISNPEDRRVVQSFATWHHLRRYRRKSSVKPLTHPQTTQARREITTAISLLTWLSKSDRTLETCTQEHIDHWLDTDRAARPFGRTFILWATRNRHCRPLTIPVVKPKKGTLFIGQDDRWTLIRRLLHDDEIDLTARVAGLLLLLFAQPLTRIARITPGDITVSAEKVTLTLGREPLELPPPVDQLVLQLRDLPDLNPRADDRTKRWLFPGISPGTPLSNQALMDRLKPLGIQSRPSRNTTIQELASELPAVVLSKLLGVHITTATRWSRTTGANRTEYAAELSRRRAFRKS

SEQ ID NO: 999 - protein, 845 aa, synthetic construct; identical to SEQ ID NO: 998
  REGION 1..845: note = TnsF-Tn7 System Protein

SEQ ID NO: 1000 - protein, 367 aa, synthetic construct
  REGION 1..367: note = TnsF-Tn7 System Protein
MGKVEAGPGSARLVLVDGVALLHPEDAVLDAMLVGWGRQQRGGRRLEPDTIEDRERTVRRFTEFAGEYPWRWTAAHMDEWTTYLIAELGRASSTIRNYQAAVRLFCDYITSPYYEWPEQCEARFGTHPVQICHEWNTAAHLLDYEGDAERRPMTREEIQAFLDYADDRVEFAVRRHRKGAQAAYRDATVFKVIYGWGLRCTETSKLDITDFYRNPKAPELGRFGSISVRFGKGSKGSGPKRRMVLSVMPWAVEALEDYVVNLRPRYRASHKPALWLTERDGRLKAREIEDRFAEYRDALKLDEALTPHCLRHSYVTHLIEDGADPQFVQQQVGHDYASTTAIYTGVSGDFMNTMMRKVLDGAMAAER

SEQ ID NO: 1001 - protein, 110 aa, synthetic construct
  REGION 1..110: note = TnsF-Tn7 System Protein
MKAKLDYHWHLREIMANRGMFSTTDLRPLLAERGIDLSASQVYRLVTEKPERLSLKILMALLDILGCTMEELIEPMAAAGAGRRKTAVGESSGEPGVGDLRPKRARVLPK

SEQ ID NO: 1002 - protein, 746 aa, synthetic construct
  REGION 1..746: note = TnsF-Tn7 System Protein
MLVNGRSPAPLVVGELLLAARSIGAEQIAPPLCTGCDRPLHGSLARIGENWYCHTCGRPRERCVSCGNLRPVGRRDRHGRPHCHRCPVPDSRDPDAVLVEVITTLDPALTATTIVAAGALAAPRLTARRMLAWTIEDHPGLLTGDGYEAPIPAVLRLIDALCSAGATGIVRPACPGCGRVTPLTRCWEGRRICRRCSIADRSVPCSRCRKPREPAGRDEHGLVLCSRCVLNDPANHEHCTGCGQRKPVEARTQEGPFCWNCRPKQQLTCTICGRRGPAEISRLTGEPWCAACKQRWARCAGCRQVKPIRSGTLEAPLCAGCTDSNHPLCPGCGTAERLVGKRPCTRCVLAERLRALLADDSGNIRPELTVLHRTLVNTDRPRTVLKWLSRSSAAAVLGDLGSGARPLTHDSLDDLGPSKPVEHLRSVLVATRALPVRDEYLVRVERWTTDTVDEIADPENRKLLRHYATWHLMRRLRARNRGRPVTYGQFTGIRQRVRGAIAILDWLTDQQLSLATCTQADIDRWLTDSDARYRTDGSGFLRWVTTHKLVDTSLVGVSRSWRGPAELIDGEDRWATARRLLHDETLKPEDRVAGLLVLLYAQRASTITRLTTNHITTGTSGVHLRLGSSPVELPEPLSALVKSLANTRTGHAAIGERGTSPWLFPGGQPGRPISTAQMGVRLRALRIRPNPARSAALFALATEVPAAILARTLGIHIDVAVDWQQASAGDWTAYAADVGRRPSMNR

SEQ ID NO: 1003 - protein, 746 aa, synthetic construct; identical to SEQ ID NO: 1002
  REGION 1..746: note = TnsF-Tn7 System Protein

SEQ ID NO: 1004 - protein, 372 aa, synthetic construct
  REGION 1..372: note = TnsF-Tn7 System Protein
MGRGDLAGAAHLELVSGVVQLRPEDALVEAMLRGFRAQQTARGLREETIAAREQAVKRFMAFTNEYPWSWTAGRVDEWSLSLTAEHHLAPSTIRQYQGHLRLFSEYLTDPRYGWVRACENEFGPGVHPVPIVHEWNTIAHLNDYEGNPEARPFTREELQRFFDYADDQVERAVRAGRKGALAAYRDATVFKVIYGWGLRRTETAKLDLVDWGRNPAAPEFGRYGMLHVRYGKAKRGQTPRRRNVAATMGWAVEAVADYVENVRPRFGHADHPALWVTERGGRIKSAEINARFSAYRDALGLPSVLVPHSLRHSYVTHLTEDGVDRRFIQSQVGHECDSSTAIYTHVSDDFMNTALRRALSPAFGALVEEGNP

SEQ ID NO: 1005 - protein, 112 aa, synthetic construct
  REGION 1..112: note = TnsF-Tn7 System Protein
MMAAKLDYHWHLRQVMAARGMFSTTDLIEPLTQRGIRLSSSQVYRLVVERPERLSLKVLMALLDVLDCAITDLIEPVEAASSKPTRAAGGSAAEGVGDLRPRRARIVGTDGR

SEQ ID NO: 1006 - protein, 813 aa, synthetic construct
  REGION 1..813: note = TnsF-Tn7 System Protein
MTTADHHGRAVTDPIGLMTDLIADVEMELGPAAIQTVVTAVAGGRAKSRRLAQALATRPGVLTDGRSPAPRAIGDLLIELRKAGATAISPPVCAECGKNLRTLQRQGQDRYCSVCGQESAECAACGNTRRLAFRDREGLPRCSMCPDADDRDPVDVVHEVIAAISPDADRDVVAGALHRSVPTRPAYRRRLVWALEDNPRLLTGDGYLAPHRAILQFIDLLHEAGVAGIVRPACPRCHRVVRIDKPLDGQRVCRNCIAKSRVEECVRCGARREPATRDEHGRPLCPNCLVTDPANTEVCVSCGERRRVQTRTADGPLCPNCCPLPVLACSLCGRTTPCTLSKLTGLPRCGGCDRRQAHCTVCGRLRGIHSGTADAPVCGPCTTPDAELWRPCPTCGEAERLRAPGPCPRCTLKQRLHGLLADDAGAIPPKLQALHDALTGTERAGTAMRWLSKGIVSTVLSDLASGRRPLSHKALDELPEGKVVEHIRSVLVATDTLPQRDEQMARLERHVKDLVTSHATVEGRKVLHRYATWHLLRRLRRRSRDKDITHTQLTVVRQHLRAAVHLLDWLEGQNLTLVTCRQLDLERWMTSDDVRHRREAGNFVRWALSQKIARDLSFPAVRWNGPSRPMDEEARWATARRLLHDDTIRTEDRLAGLLLLLYAQWPAVISRLTVDHIEQTDEAVRIRLGDVPVQLPDLVADLAIRQVAARRSHAVLARTDSPWLFPGGQPGRPISVWAMGERLRKLGIRLAETRSTALFQLATELPAAVLARTLGIDITVAVKWQRAAAGDWGTYAADVSRRLQRSVQEDPSE

SEQ ID NO: 1007 - protein, 813 aa, synthetic construct; identical to SEQ ID NO: 1006
  REGION 1..813: note = TnsF-Tn7 System Protein

SEQ ID NO: 1008 - protein, 367 aa, synthetic construct
  REGION 1..367: note = TnsF-Tn7 System Protein
MVHQRKVALAGSAHLELVSGVVQLRPEDAMFDAMLRGWRAQQKSRGLKDETVEDRERLVRRFMEFANEYPWQWVPAHVDEWSLSLTGEKHLAPSTIRSYQGTVRLFSEFLIDGRYGWGPACEEAFGTFPVAVCHEWNTIAHLNDYEGDPEAKPFTREQLQLFLDYADDQVDRAVRAKRKGALAAYRDATLFKVIYGWGLRRTETSKLDLVDFGRNPQARQFGRYGTLNVRYGKAKKGQPPRRRNVLSVMDWAVDAVADYVENVRPRFGFPDHPALWITERGGRLQPGSINDRFESYRDALGLPKELVPHSLRHSYVTHLTEDGVDRRFIQQQVGHECDSSLAIYTHVSDDFMNTSPHKALAPAFAGA

SEQ ID NO: 1009 - protein, 883 aa, synthetic construct
  REGION 1..883: note = TnsF-Tn7 System Protein
MKPSRPLYEREPELAAAAEAVDALCGAQAVGGLLVFSGEAGLGKTALLAEIQAMAADRCTVWSARGGETVTSVPFHVVRQLLQPALDRFPPDETRALFGDWYEITAPALGLAEPSGPQPDPQGVRDGLDFVVGRLASRLSHRPLLLMVDDAHWADGESLAWLASFTARLGELPVLVVQAHRPQELAERDANYIADREAERGGSQGTVTRVALRALTPDATAVLVRAGLGDHADDPFCREVWAVTGGNPYEAVELVAKVQDRELPPVEESAGELRELGASARGSGLVARLERLGTNANRFAWAAAVLGTDISQELAATLAGMSSAEAADCTARLRDARIVSGFDPLEFVHPLIATAVYRSIPPATRTAMHGRAAWAITRAGLGAAAASRHLLEVHPDDDQELVAQLREAAGQHLAVGAPEAARRCLERALEEPPRPKDRAVLLYELGCATLLSSPPTTVQHLRAALDMPGLDDGLRVDATFRLAAALAHNNQLKDAALSLAAEAARTAPGPGLMRLQAAHFMWEGMQAAEDDGPARSRRLTRNADHLKGRDNSERALLTLRAFDAMLRGENAQLIVDLCERALVDGSPARGLGWTDSEWGFELPTMVGITYTFVDQLDRAESLFGEAVRAFEISGWSGAHLAFAHTLLGMVHRRRGRLAEAEGFLREGLRLADRVGSGLPVHWDAACLLIDTLLARGRTDEARRIADRYDFGSPYPSAMVLPDGPCVRGRLLLAEGRKKEAIAELEAAGAALEPRERFNGIWAPWAGDLARALAEDDPARAAHLAARNRVHAERFGTPTALGEALRCVALFAPPERSAQLLAEAVGHLEKSSSAYEHALARVDYGIAIGSHRELARAQKQAMACGAEGLAARAQQARASIRSSE

SEQ ID NO: 1010 - protein, 883 aa, synthetic construct; identical to SEQ ID NO: 1009
  REGION 1..883: note = TnsF-Tn7 System Protein

SEQ ID NO: 1011 - protein, 115 aa, synthetic construct
  REGION 1..115: note = TnsF-Tn7 System Protein
MAAKLDYQWHLRKVMADRGMFSTTDLIPPLAERGITLSSSQVYRLVVERPERLSLKILMALLDILDCTMDDLIEPIAVAGAVRKPKKAAAGGGEPAEGLGGLRPKRARIRGVDRP

SEQ ID NO: 1012 - protein, 507 aa, synthetic construct
  REGION 1..507: note = TnsF-Tn7 System Protein
MSEPIEGLTPRNTTRGRPRTVGDVPCARCGRMAKRGRATWPEGRICNSCFYEATRRHGACAACGAERLTPGVREDGAWLCALCAQIPFDFTCSDCGVEGEVSRARLCARCLLRRELDDLIVRDAADPTAMSRIAQALCAARRPESIRTWKRSPKVQTLLAGLASGTVPLSHDGLDDCEPGLHVEHLRALLQHHQILPDREHYLAQFESWIARKLAPLPTPIAQPVEQFATWHHLRRIRAMPADDRTLRGPVHNSKQEITEAIRFLAWLDATQGRTLSTCRQGDVDAYLQSGPSTRHTIRTFMVFARRHRLSPRLTIPYRTARSRPALTQEQRTAWIGEMLVGTSESLPYRTAGMLLLLLAQPLVKVASLRVDAVHDSPAGMTIELGTPPTPLPEPFAGLVRAHLSNRPNLATGNTQSPWMFPSTRAGQHLHPQSVMDRLRDLGINLRGARNRALDELVTEVPPSVVADALGYSHAIAFAHQHAAGGTWARYAGRQAVAPRAAPPYRI

SEQ ID NO: 1013 - protein, 507 aa, synthetic construct; identical to SEQ ID NO: 1012
  REGION 1..507: note = TnsF-Tn7 System Protein

SEQ ID NO: 1014 - protein, 919 aa, synthetic construct
  REGION 1..919: note = TnsF-Tn7 System Protein
MPGPAEPSPAQRYANARVRARTPQLTRFAAGLPFDLDAFQISGCAALEEGRGVLVAAPTGAGKTVVGEFAVHLALATGRKAFYTTPIKALSNQKYADLVTLHGADKIGLLTGDTSVNGDAPVVVMTTEVLRNMLYASSPALAGLGYVVLDEVHYLADRFRGPVWEEVILQLADAVQIVCLSATVSNAEEFGDWLTTVRGPTEVVVSEHRPVPLGQHVLLGGRLADLYARRARGDDREPALNPDLVARLRAGGPPEPGGPRRRGRPGDRRTGPRPPRPASRLVTVQALERAELLPAIVFIFSRAGCQAAVDQCVAAGVRLTSQEEEAEIRRTVERRCAAIPPEDLAVLGVDHLSDALARGVGAHHAGMLPLFKETVEDLFSRGLVKVVFATETLALGINMPARCVVLDSLVKWDGSRMADVTAGEYTQLTGRAGRRGIDTEGHAVVLARPGLDPEYVAGLASRRLYPLRSAFAPTYNMAVNLVSQVGRERARDVLETSFAQYQADQAVVGLARTSRANKATLAELETAMACHLGDFAQYAALRRDLWTLEKGTRAGELDASARAQAVASLVALRRGDVVLVPTGRRPVHAVVVDVGGPAGFEGPRPTVVTPDARVRQLTAADVGPGLTTVGRLPVPETFSSRAPHHRRDLAARLRAHDAVTAARPKGRGDRDDAAIAALRRALKAHPCHACPQREDHARWAERHARLLAEQESLARRIAGRAGSIAVVFDRGCDVLLTLGYLDQPGTDTLTVTAAGQGLRRLYSENDLLLAECLRTGAFTGLDAPGLAAAVSALVYRSRRDPESAPRVPGGPGSNLGRTLDEIARAASRVAATEREHGLTSATSIDLGLVEAVHRWALGRSLAAVLQGVELEAGDFVRWVKQVIDVLGQLSAAAPDAALRTTAEAAASALRRGVVAYASV

SEQ ID NO: 1015 - protein, 919 aa, synthetic construct; identical to SEQ ID NO: 1014
  REGION 1..919: note = TnsF-Tn7 System Protein

SEQ ID NO: 1016 - protein, 355 aa, synthetic construct
  REGION 1..355: note = TnsF-Tn7 System Protein
MRVLPSVHTLHPEDQAVEDMLLGWRNQQLSRNLQFATIDQRLRYVRRFMESVNEFPWRWTPMLVEEYFGDLRSVRHLSNSTIRAHQAALRHFTSYISSPDYGWDVECERLFNEHPAQVFFDWNTAPHVQEFEGGPSKRPFTRDELQRLFDYADWEVERVATSRVRGWQAAYRDATMLKVAYSFGLRFNELRHIQLVDFARNPHAPEFGKYGVCKVRFGKSRRASPPKPRAVLTVFSWTPEVIQDWLSNGRGSHDTLDVFPNESGALVSEPTLLRRLRRYCQVLDFPTGLDLHSLRRSYATHLLEDGWDPLFVQAQMGHEHASTTGIYTFVSSSFRTSTLRQALDRTVRDALEGRS

SEQ ID NO: 1017 - protein, 111 aa, synthetic construct
  REGION 1..111: note = TnsF-Tn7 System Protein
MKRDVDYTWRLPELMAARGLHNTTELVPLLAERGIELSRVQVYRLVNQRPERVSLQLLAALCDAFQCEVGDLVTVTAADARARRKTAAAGENVVTLDRSVRPRRARVLDDE

SEQ ID NO: 1018 - protein, 394 aa, synthetic construct
  REGION 1..394: note = TnsF-Tn7 System Protein
MSKKCPQCNIYFDGHPNRKYCTIECRRKFYEEECSICHKIKMPGSKQNGIIVCAECFRKNKKEICVECGNDRPVHCRMEDGTSLCNQCYRENNKKICDKCKKLSVITINKNNMRLCCNCYKKKENCIKCGKLGVVGKRNSDGTSICDYCNRKDKKEICLQCNKLKMVHSRFDGNSICANCLRKHKKEKCYLCKENKSVSSRDNGKPVCDNCQRKRQIISCYICEKEKQRHRNINGNPICTNCSQFYKKSGYNLELTKEIIKNNKYFHHLIFEKEFKEIFDSEISFARLLIEGIILNNVENSFLRYDYFSKNRKIAVEINEPVHYDKKLFNSRYETKNKNFDDYVRDFKTKLLVANQNNFKVIIINIQYRMTAEELIKLYRDKLSEYLYLATTSN

SEQ ID NO: 1019 - protein, 510 aa, synthetic construct
  REGION 1..510: note = TnsF-Tn7 System Protein
MKQEMSLREEVSLMIKSRYPLIYVVSWEGSRVRKELAEIAQESKKQSYFWDVVSGWVDANGHRVNLDAPIQEGTAKKKVSNVEVESAQRAVDGILHTASQPCEAKGRLFILTDFEEYLENGYVRGAMRKCAEKFPYDGHDTIILVSSVMKIPDAMSKDVTIVDAKMPDYRELREHFEKFVESLPEEAKVDLTEDDRETLVKAALGLTLSEAENAFAKAVVQNKRLSRDDVQLILEEKKQIVRKSGSLEYLESKVGFDAVGGMDLLRDWLKKRKHSLNEDAKEFGIPNAKGVLLLGTQGTGKSLICKTLGDLLERPVLRLDLGSLMSKWLGESENNMRKALDAASSCSPAILFLDELEKGFSGMQESGDSGTSSRVLSFFLSWMQDNEKPVFVVATCNDFRKLPPELLRKGRFDEIFFIDLPSRQEREDIFRVHLELRHRDPSEFEVEKLAQRTIGFSGAEIEQVVISGLYDAYDEKRELTSDDMINNIESSIPMSRTMSEKIQALRDWAT

SEQ ID NO: 1020 - protein, 510 aa, synthetic construct; identical to SEQ ID NO: 1019
  REGION 1..510: note = TnsF-Tn7 System Protein

SEQ ID NO: 1021 - protein, 483 aa, synthetic construct
  REGION 1..483: note = TnsF-Tn7 System Protein
MSCGWCGGTGGSIVLPHTRICGPCYRRRHYHPAPCPGCDQIRPLAWPDAGGRTICADCAGHPSIFACAQCGREDHPYGHIRCARCTLHERLTALLTDPATGDIHERLRPVFDTLLGGERPQTGIYWLMRGKRIGPTLLAQMARGEIAISHDTFSDLPMDRSHNYLRDLLVAAGVLPPYEPLLERMIPWLRSLGEPLSEHHARLVNQYARWTVLRRLRRQAQDGTLSKGVFQAARSQLRRVVGLLSWLEAHDRSLETATQADLENFLASQPKSVGSELTRFLTWARQTGLNTALTTAVAARPAPQITMSDADRWEHVATLLHDDRIRLYTRIGGLLMLLFAQPLVDICRMRTDQVDVTDPGGRVLVTFRDTPIEMPEPLGALVHAHLDQRGQASYASRGNGWLFPGGIPGRHLVTENIRSQLVARGIRPHSARHAALFALSAQIPHMILAQTLGISSTAATRWAALAARDWGGYIEQRREQIPH

SEQ ID NO: 1022 - protein, 483 aa, synthetic construct; identical to SEQ ID NO: 1021
  REGION 1..483: note = TnsF-Tn7 System Protein

SEQ ID NO: 1023 - protein, 1829 aa, synthetic construct
  REGION 1..1829: note = TnsF-Tn7 System Protein
MSLHKLTAGDGYTYLTRQVAAQDATERGHAGLGDYYSQRGESPGVWTGSGLTGLTGVSAGQPVDEAQMKALFGEGCHPDAERLERDALAAGRTPEQARAAAALGQPFLVYPTPADGFRARCAHEFAAVNAARRLPRDAPLPAPERARIRGEVARGMFAAEHSRPPADVRELSGFIARASRPATKAVAGYDLTFSPVKSVSALWALAPREISEQIEAAHHAAVNDTLAWLEEHACFTRLGAGGVRQVETSGLIAAVFTHRDSRAGDPDLHTHVAVSNKVQTRDGRWRALDGRVLYKANVAASERYNTRLEANLISGLGIRFAERPGREDGKRPVREIVGLDARLLAAWSSRRQAIDIRRDELATDFQSEHGRTPTTPEAIALAQQATLETRDAKHEPRSLAEQRAAWREQALEVLGGPNAVAGMLDDVLRPRVRAVAVVTDAWVRSAAGRVLDTVSAQRATWQVWHVRAEAERSVRAADLAPDVVDAAVSQVSAAALSPSLSIPLRELDSAVEPSELRRSDGASVFTVAGAELYTSQQVLGAEALLLAAAGRTDGRQADPRVVELALLEATANGTELNPGQAQLVRDLAGSGMRVQLAIAPAGTGKTTALAALARAWTAGGGSVLGLAPSAVATAGLREAVGGHCDTVTKLVWALDTGDRPAWVTDIGPGTLVIVDEAGMAGTRELAAAVDHVLGRGGSVRLVGDDRQLAAVAAGGVLSEIAATHGAVTLTQLVRFADPAEAAATVAVRDGDTTAVGFYLDSGRVHVGDAATCAEQAYTAWAADRARGVDALLLAATRETVTALNARARIDRLAALGGPAGPEVALADGTRAGTGDPIITRINDRRLPLGAADWVKNGDRWTVTAVHDDGALAVTHTRSGRRITLPVGYVAEHVQLGYATTVHGAQGVTADTCRTVLSGSESRQLLYVALSRGRTANHLYLATVGDGDPHSIVTPAAVHPPAATDLLIGMLDREGAQTSATGARRALADPAEQLHSAAARYADALRFAAAHHLGATAAEALENAAEQLHPGLTGAPAWPTLHGHLALLAVGGTDPIAALRTAAARRELNSVRDPAAVLDWRLNVSGSGPAGPLPWLPGTPTALADDPHWGTYLAARADHVTDCATRVADTAAAMTPAGAPGWAHPLVDPSHAALRTELAVWRAALGVPDSDRRPTGSPHPAAAESRHQQRLDDAVAAAIPTLESSGWSRLADSIDPRVRRDPHWPALAERLAAADRAGLDAASLLAAVAAQRPLPDDLPAAALWWRLTPHLAPATVAAGPGATVVRPDWCTTLLTLLPDEHGRSVLAAPAWPALVAAVTVGIRDGWSSTDLLTAPVAGLPSADDGGRSGNELAETLVFRITALIDPAPVQTPEPLPDDLQPPDDAHLLPPAAHNTALTSAVWAYGPDDDAEPPVPGGESSLAEPRYRTPDPFALGEPAADEADYLLEQHFWATAVVGRDRLIELNTKAAALYTDRYPHSWAPEYLRERLGTDLTADPRFSPGFAPASWNVLLDHLRASGATDTELLAAGLAQRARTGALIDRFRDRLVFPIHGVDGTVVGFIARRNPAATDDDRAGPKYLNTPGTDLYTKGDHLLGLYESRAALAAGAVPALVEGPLDALAITLAGDGRTVGVAALGTALTDRQADLLRSHIREGNPGILLATDNDAAGQRAAERIFWQLTARGDDPRRLTLPDRLDPADVLHRDGVVALRTAIETSDSLADALLDARLTPTRSDRNPVVIKAGVRDAAAIIVATPPARWLAHIDRVTEILGVPLGAVHAAVLDTEPIAARTTASSRQASRLASPYDDPHRTGHTGWPSQAALPDLHHSR

SEQ ID NO: 1024 - protein, 1829 aa, synthetic construct; identical to SEQ ID NO: 1023
  REGION 1..1829: note = TnsF-Tn7 System Protein

SEQ ID NO: 1025 - protein, 371 aa, synthetic construct
  REGION 1..371: note = TnsF-Tn7 System Protein
MGEVPGSAKLMLAPGVVHLNEPAAVFEAMVAGWARQQKSRQLAEGTISDRERLVRRFAEFTDSYPWQWTAGDVEDFTVSLTSGRDRLALSTIRGYHLTLRLFCDYVTDPRYEWATQCRDRFGQVPAQVCSEWNTVAHLNDYEGKPGRRPLTYDELERLFDHLDDRVDTIVQAGRKGSLAALRDAMMIKTAYAFGLRRNELCSLDVADLRPNPHVRAWGTYGSVHVRFGKATKGSLPRRRTVLAVPEFDWVVDGLRQWVEQARPIFDAAEHPALWLTERLTRVSARHVDEFFAQVRTDLGLDEHLTLHCLRHSYVTHLIEFGYPERFVTDQVGHLWGSTTAIYTSVSNDFKNKTLQAALARIYRPENDGSTP

SEQ ID NO: 1026 - protein, 109 aa, synthetic construct
  REGION 1..109: note = TnsF-Tn7 System Protein
MRTISMQWNLRQVMADRGLFQTSQLLPLLEERGIHLTREHVYRLVTKPPQRLNTDVFVALCDALGCTPNDLVVPVVEQRPAAKTGTTDSGPKIGSLRPVRAKVRRPDGA

SEQ ID NO: 1027 - protein, 513 aa, synthetic construct
  REGION 1..513: note = TnsF-Tn7 System Protein
MSRPYATDEQYERWFMAECCRCGQRRHKAGTWPDGYVCRTCSDRAVRTRGTCPGCAQDRALPGRHPVDNSAICTTCAGFSQTFDCSRCGFEGKLLGGRLCERCTLTDRLTALLDDGTGRVRPTLTPFFDLLVAMAEPRSGLAWLAMRRNHPGNASQMLRRLARGHIPLTHDAFHELQPWRAAAHLEELLMTSGALPAVNKYICSYQRWLPGHLAGIADPEHVKTIRLFATWHVLPRLRERANRSRITPSVRRFAAEQIKHATAFLQWLSTRNSSLASCGQLDIDAWFAENTEHRRTCLRPFLNWAMQSRRCPRALSIPAQRASRRPALSEDERLDALGRLLTDPDPPMRLRVAAVIVLLYAQPLTRIVQLTVDDVLHDGETTLLRLGEPASPVPTPVAALLLTYIADRDNMNTATNQASRWLFPGRRAGQPARPDHLSALLREIGIPVAAARGAAIRQQLLELPAPVVADALGYHDKTTSRLLRETGGTWSRYAAGDRTRSPAGWSPRGTGES

SEQ ID NO: 1028 - protein, 513 aa, synthetic construct; identical to SEQ ID NO: 1027
  REGION 1..513: note = TnsF-Tn7 System Protein

SEQ ID NO: 1029 - protein, 374 aa, synthetic construct
  REGION 1..374: note = TnsF-Tn7 System Protein
MGFNGTIPGAARLHLVDGVALLRPEEQVFTAMLTGFANQQLARNLARTTVEGRENTVKAFAAYVNTYPWHWTPAMVDEWLGDLRSLRDLRRSTIRSYSEAVRAFCHFVTDPLYDWAATCEERFGTHPVQVVHEWNTAVHVQDNEADAKKRAFTKAELHAFFEHCDDEVARIRAFGRKGWLPAFRDATLFKTAYAYGLRRNETRMLDAADFGRNPHGAEYGEFGRCQVRFGKAKKGSPPKRRGVLTVFGWTPDVLDEWFTEVRPLLGADGNPAAWPSERGLRIGCQRINSRFIAYRKALGLDDGLDYHSFRRSYVTHLIEDGWDPRFVQEQVGHEHASTTSIYTCVSSDFRTRTLRRHLDATVSAALQAQNGRQA

SEQ ID NO: 1030 - protein, 111 aa, synthetic construct
  REGION 1..111: note = TnsF-Tn7 System Protein
MKRKVGYTWRLRELMAQRHIFTATELVPLLRERGIALSASQVHRLVSGTPERLSLQVLSALCDILSCTPADLVNTTAENAGVRKTATGDLPTPLDNVAKLRPRAARILPDA

SEQ ID NO: 1031 - protein, 396 aa, synthetic construct
  REGION 1..396: note = TnsF-Tn7 System Protein
MRENHLEAIATILHTMEPGMAFAEILSTVSAAIRTQPPALRIRTLLENEPAVLASGTPRMPRALERIITSLTQQGATTLQRPRCNRCHRVRTLANCIGGALVCGSCHQGSQRTTIDCFGCSEPKRRHVDIGNRSYCRRCWIDKQAGAQTSLINILVTRFPTVPEQDIEAAVEKSRALSANRDRTARLLMECEAFGDTWFVDPAPASALFSRLYDGLREAGAALDEPLCGHCKQPGPLGSRREGLICCRKCYRAGHLSPCDGCGEEAGIERRQPDGTGLCQHCTNHLADESAACSVCGHHRLIAARTPEGPVCSTCRTNLRTDLCTICAKEAPCRFAGSEAAICLTCRSTQRYDHCRVCGNDRKCRFAGTPQAICEQCANRREPCLVCGQTRLIRRR

SEQ ID NO: 1032 - protein, 828 aa, synthetic construct
  REGION 1..828: note = TnsF-Tn7 System Protein
MKREAALDDIAELIHRIEPGLPRPRILQVVARTVAARPAVPELLSVLQNDIRFLTSGDDTMPSSLAGIIDQLIHEGATTLKRPRCHRCHEQRRLPNRRGGHGICASCYSLDRRVHIECSRCGQRRKRRAVVDGQEWCGTCWEGQLGQVEAVFRTAVLGSGCGITARQFETVAATVHSTWKAGAILRLSLELNTRSEQWFAQPAAGSVLFLRFHAALEKAGVKVTPVACGRCGREATLANILGGLRCCARCYSASKRETCSQCGREQVLVLHAADGTGICQTCMKKLPDRTATCIDCGQRRYVAWNGPDGPVCSKCRPKHRIDYCPGCQRQKPCLFAGTSRARCHECSRRKETCALCGTQVRAATRNDQGIAICGRCSRKPEPCSDCGRHRIVVGRAQGKPLCDYCYPKDPVSFRDCGRCGRHENLQVADLCQHCAADDELERLVPLEARANSPVAQAIHDLCQDAKPQSILAAARNSSMGLLRSIIDSQIIPTHEFLDHAGADQATRAVRSLLIDAGLLPYRDNNLARFEEWITRTAQRITDPQQRAAFVQFARWRHVRELRKRKSPVHSSLTTSRRRELRLVMELLAWLQQQNRALVSLTQSDMDRWRANGSAERHRVKPFLAWAHANGRVRSIEILRKPGNALDVAGTPANERAHLLHGILDPGCTSQVAVRFAAALVLLFGAGPQQIVELRVSDISTNDERVYLKLGNEPLLLPDALVDLAIGTHENRMAPRLFAPTRDTDWLFPGIRTGYPLSASTLIGSMKQLGVSASRGRTGAMAELAQELPPAILARLTGNSTTTAIRWSIAVAASNARYAALAMPATPLG

SEQ ID NO: 1033 - protein, 193 aa, synthetic construct
  REGION 1..193: note = TnsF-Tn7 System Protein
MIIVLAGIDGAGKTTTGRLLTQRLNAAHYPATFIKNRSGRRSLSTCSARHNIHPPVMVFETIETAIRCVNVLISHCRATFGPGTVIMDRYLYCQVALRRARGLLSGWLLPFLSKILPTPDIIFYFAIPADLAHARIESRATDTEALGHLQAFDAAYREMENFPSFVVIDATLPSGQIVEDMLRELGLCELVLQ

SEQ ID NO: 1034 - protein, 193 aa, synthetic construct; identical to SEQ ID NO: 1033
  REGION 1..193: note = TnsF-Tn7 System Protein

SEQ ID NO: 1035 - protein, 375 aa, synthetic construct
  REGION 1..375: note = TnsF-Tn7 System Protein
MVVQPGVPHGAASLYLAAGISFLNEEDAVFGAMLEGWTMQQRGGRNLRKHSVASAIGIVKRFHDFTSEWPWQWTAATMDEWMMHLVAVRKLAPSTIRGYQQAVRRFCDYLCSEHYGWSAQCEERFGTHPVQVCHDWNTTRHLQDYEGIPGRRPMTKAEIQLLFDHADGEVGRRLEAGKKGALPAYRDATLLKVVYAWGLRANEAVNLDSTDFYRNRHAPEFEGFGMLQVRHGKSSRGGPPKRRSVVTLRGWAVEALQDYTENVWPLVKVEQSNALWLSERGTRLRPRELSDRFASYRDELGMDKDLSPHALRHSYVTHLAEEGVDPTFIQQQVGHAYQSTTAIYTAVSGDFANKMMRQALDRLVRPEQPEERPGE

SEQ ID NO: 1036 - protein, 115 aa, synthetic construct
  REGION 1..115: note = TnsF-Tn7 System Protein
MNVLGYEWRLREVMAAAGMFSTTKLIPLLKERGITLSTSQVYRLAAEKPERLNMHVLVALMDILDCTADDLVRRVELGTAATPSEATGTDGGSEPSGTSVLREKNLRPKRAQIQP

SEQ ID NO: 1037 - protein, 477 aa, synthetic construct
  REGION 1..477: note = TnsF-Tn7 System Protein
MWSVLRRWPDGLICSGCYARACETYGVCDGCSTDRLLPGRGSQGQRWCTDCAGGMGDFTCIRCGQEGWNHYKSVCGRCVLIDRLAAALDDGTGQICPQLVPLADWLAAMSRPRSGILWLTKTHVQPILTAIAHHRVPLTHEGVATLTPWRSVIHVRDLLVACGILPPVDRFLFLFEQWLPIWLDTITDSEHRQLLHLHATWHVLRQLRHTAASGPIGHYRHQSARHNLRVAAAFLDHLAEDHVTLATCTQGQLDDWHAHHTHAEAASLRPLLRWAITGHHMPRLRWAAVPERQGTPISHRQWLELIRRVHDDDGLDLTERVLSLLILLYAQSLDRISRLTIDDVITNGQGVSIRLGTPPSPVPPPFDRIVTSYLAARPSLITATNPGSRWLFPGRSAGQPLHPTSMRRRLHRLGIPNLAGRRRALRDLVLQAPPSVVARMLGYSNPRTENLAIDAGTTWRHYAPGDHNRTRQPTITP

SEQ ID NO: 1038 - protein, 477 aa, synthetic construct; identical to SEQ ID NO: 1037
  REGION 1..477: note = TnsF-Tn7 System Protein

SEQ ID NO: 1039 - protein, 1207 aa, synthetic construct
  REGION 1..1207: note = TnsF-Tn7 System Protein
MTVSMRVMSAGDGYKYLLKTIAAADGNRPLSTPLTRYYAAAGTPPGRWLGTGVTSLGRGELTAGDRVSEPQLQLLMGMGRDPITGDPLGLAFPVYKTPVERIESRIADLDPSLTPGAKGEAVAQIVAEETARGRRRAVAGFDFTFSIPKSASVLWAVGDAGVQALIGEAHHRAVAEVVAFMEREVAATRTGATAGDGAVAQVDVTGLVATAFDHFDSRAGDPHLHTHVVISNKVKTVLDGRWRSLDGRPMHAAVVALSELHEAVFADHMTRTFGVAWEAREMGRDRNPAWTIAGVPEQLIAEFSTRARHIDAETDTLIDDYITKHGRRPTPAAIMKLRAQATLSTRPEKQVRSLADLTSEWRTRATKTLGQDATMWARDLADNDKPLLLRADDIPLDAIGELGRSVVEVVGEKRSTWRRWNLMAEASRQTMAWRFATMQDREAIVAMVSDAAELASLRLTPPELATSPVVFRRPDGTSVFRPKTSTVFTSETQLAAEDRLLERASLLTGPTVTLTTVEQIAHRPDADGRMLGDDQADALTRIAVSGRMVDVLVGPAGAGKTTAMNALRQAWETEHGAGSVVGLAPSAVAARVLADELRIATENTAKWWQNHLLHGTTFEAGQLVIIDEASLAGTLSLDRITHLAQRAGAKVLLVGDYAQLQSVDAGGAFAMIARDRHDTPELVDVHRFTHSWEKGASLGLRHGRTHAIDAYLAHQRIHDGDAETMTDAAYSAWRADRDAGLVSVLIAETHEEVAALNRRARADLILNGTLNPDSEVELHDGTAAGVGDTIITRKNDRKLHTITGRDWVRNGDVWIIAAVGEDGTITIARDYGSGTTVGDDGTITTRRRGRRFGGSILLPTAYVAEHVDLGYAVTAYRAQGVTTDTAHLLVEPTSTRENFYVAMTRGRHSNHAYVALDRADDHTQPHPGDDPDATARGVLYGVLKHSGAELSARETIVAEQEQWGSIAQLAAEYETIAAAAQHDRWATLVRVAGLTDEQADSAIESEAFGPLAAELRRAEANQHNVGALLPRLVAARGFSDADDIAAVLHYRVERATARPAGSGRTRKPPRLIAGLLPLAHGVADAEMRAALNEREVLIEARADAVLATALTEAAPWTKALGAPPLDRQQVRRWRKAARVVAAYRDRYRIADDAPLGAPPDSASQKIDHARARVACDEALHLATDAHHPTEVGSRRATRSQPQAGRSF

SEQ ID NO: 1040 - protein, 1207 aa, synthetic construct; identical to SEQ ID NO: 1039
  REGION 1..1207: note = TnsF-Tn7 System Protein

SEQ ID NO: 1041 - protein, 681 aa, synthetic construct
  REGION 1..681: note = TnsF-Tn7 System Protein
MTLDEIDTTAASAFEGYVVRKDLAQQFKGAYPVPTYVGEFLIGRYCATTDPEEIEEGLQVVRRLLADRTVRAGEEELFKSRARERMTVKLIDLVKARLDAKSNAYVAELPSLGLRDVRIDDAVVRENERMLTGGFYAEVDLFYDAAIADENNGKPFAIGSLRPIQLSTRESLSRLAEGRSRFTTEQWKHLLLRSVGFEPAQLTEREQDVLLLRMVPFVQRNFNMVELGPRGTGKSHLFQQVSPYAHLISGGKATVARMFVNNTTGQRGLVAQYDVVCFDEVSGVSFDQKDGVNIMKGYMESGEFSRGRESIRADGSIMLVGNFDVDVAHQQRIGHLLSPLPPEMRDDTAFMDRIHAYLPGWDVPKLNPTYFTHHFGLVSDFLSECWSRLRDQSRLTSIQGRVNYSDALSGRDLSAVNKTVDGLLKLLYPDAEAAISDEDLEWAVRIALECRRRVKEQQRRIGAAEFRNTQFGYRLGEGVEQFVSTPELASPDSISLDPLPPGQVWAISEGGGDVGPGLYRIEAADTPGSGARGLLNQAAPATLRESFKVAEQNLIAQARQLVGDRDPREHNLTAQIRALDAAKTGAGLGLPILLALASAMLQRSIRGGLIAVGNLSLGGGVETVLNAAQLAEHAMEKGATALLLPVSARRQLLDVSDEVATKVSFIFYSDAQDALVKALDE

SEQ ID NO: 1042 - protein, 1062 aa, synthetic construct
  REGION 1..1062: note = TnsF-Tn7 System Protein
MGHRTEDVWATPHVAGKNVVRQLLVPAYDNVDVLEIDSGLEVVNTPFGQWPVTRAAELPTEGPLAAKLPVRRSKNAQIRWEGGREPVQASDVIRSFDGAIGFTAHDQPHSLRRPQIAALHSIVGYQSSGLSEPGIVVMPTGTGKTETMLAWLVAQRPERVLVVVPSTALRDQIATKFETLGILQLEGIVDRAALRPRVGRLEGRFADDAEARAFVEAANVVVATPNAIHANEPEVREVFFQGFTHLLVDEAHHAPARTWTEIIRVFADRPTLLFTATPFRRDGLTLPGRVIFRFPLREAQTEGYFSTIDFTAVLDLDDDDEALAKAAVTRLREDLAAGHEHLLLARVGTKTRADEVHALYSRLAPEFTPKVIYDSMSARRRAETLKAMRDRTSRVIVCVDMLGEGFDLPTLKVGAFHDAHRSLSPMVQLIGRLARTSSPLPIGRASVFVRQDPRQALSPMRFLLREDPDWDKVLSDITERATERANEVSEFEASFVDNPPDVPVGLLEPKMSAKAFATSTIDWNPLAAREIYGDSVLDDLISVNTENTIAWFVIETIADLRWGDIPSLRATDYTLVALYRDRVQSLLYVHCSDTKRSLDDLVEAVLGHEPRPVNGYDTFKVFSKLDRLIPTNIGLLDARDRDKRFSMHVGSDVETALTEAERTHKANTHVAAKAFEEGDRVTIAASLSGRFWSMRTAPNLAEWRTWCQQQGAKLRDGNVDIHSIFRSMIIPIDVKQRPTFPILAMEWPWDLYLGNGTSSRLGYKDSSVLLTDAEFRIDDYGSSGPLRFSIITSTWELAYEGQFGSHGLHYNAVGDDAEVVGWRDAKTPFSAWLNNHKPTLFLSGDRMVTGDDRLLAPRTELAPYPREQLRALDWVGNGVDITVESQGIERKTNSIQAYMSRYLSKSRIFDVLIDDDRSGEAADLVGIRADKGDLHITLVHCKYSSKPTAGSRLNDLYEVCGQAMRGARWRDNGALPLLEHLDRRAKASTRRTGLSPFEIGDREALFRIRQKAPQLFPRVSTVIAQPGLSIKASSDEQLRLIAGAASYVQSVTKGTLDVYAST

SEQ ID NO: 1043 - protein, 1062 aa, synthetic construct; identical to SEQ ID NO: 1042
  REGION 1..1062: note = TnsF-Tn7 System Protein

SEQ ID NO: 1044 - protein, 387 aa, synthetic construct
  REGION 1..387: note = TnsF-Tn7 System Protein
MRYCRDRCERWKGCSVGQRVASAGSARLVLVDGVALLHPEPQVFEAMVTGWRNQMLARNLTGSTITGRERQVRAFHAHSNEFPWSWSSCLADEWFADLRSVRHCTRSTVRGYQVSLRGFCDYLTDPAYGWASVCEERFGTHPIQVINEVNSAAHVADSESEPSKRAYTRDELQALFDHADDQVARRRALGRKGWLAAFRDATLMKVAYSYGTRRQETQMLDAADFGRNPDGAEFGDYGVLYVRHGKAQRGSPPKRRSVLTVWPWTTDVLEQWFTEVRPLFGVESPAAWPSERGTRIGLEVLDHRLAGYRDAIGLAPGLDFHSLRRSYVTHLIEDGWDPRFVQEQVGHDHASTTSIYTCVSSDFRTRTLRRALDRTIADALTPQEGRR

SEQ ID NO: 1045 - protein, 869 aa, synthetic construct
  REGION 1..869: note = TnsF-Tn7 System Protein
MAGAHWVRAALQVNPYAYQGRNSPSTRFASEADYNKALLDKCDELGIELIAITDHWAIDTASGLIQEATTRGVVALPGFEANTAEGFHVLVIFEAGTTAADVNAAVGACGVTPGCNNGTVGQPFEDILEKMSDRGALVIPAHANVANSGMLTGRQGNPLAKLINQPRLHALGITPSVAAAQEQEGIIERRKPFDRKHPLAVIHADDISHPDALDSEGGSTWFKVSTLTVESLKIAVRTPETRIALADPKEETRPLLKEISWVGGFLDGVTIPLSPDLTALIGGRGTGKSTAIESLRYVLGLAPIGASAKADHEAIVSSVLRAGTVVKLTVEATSPRVQTFTIERSVNNTPVVKDASGTVTSLQSADVIGDVEIFGQHELAELASDSEKVASMLHRFQGNGDLTADHKATLARLKENRDKLTRAEKDKVELEDELTDIPRLEEQVRHFKETDVPTRLSEVTRLNQDEAVFSEGRSRVADAKSTLTGLTDTQLAAKLGATYDGLDESPQADTLRLVRSATTTLADTLKSLATQAQEAIIAAEAAIASAETGWTNAVREQRDDHAKVLRKRVEDGLEPDKYLATTKALENLRAKEPRRTSLDANIKELVTSRKTLLQELTEHENKRAEALHDAIRTANAATGGVVIVKPVAAQDRRHIKTLIESAISGQRTQIMAAIDSDGFSTRAFVEAARKGQTELADKFSVRGAQARGVVDAGEAFFRHLEELSVGNAVEVQLDIGAGTGTREFKKMDDLSKGQRATALLLLLLGASRAPLVIDQPEDDLDNRFVYDGIVKNLRELKGKRQIIASTHNANVPVLGDAELIVALEGSGRNGKPTDGGIGSLDDALIRTLAESILEGGPAAFNARQHLYGF

SEQ ID NO: 1046 - protein, 869 aa, synthetic construct; identical to SEQ ID NO: 1045
  REGION 1..869: note = TnsF-Tn7 System Protein

SEQ ID NO: 1047 - protein, 114 aa, synthetic construct
  REGION 1..114: note = TnsF-Tn7 System Protein
MTRQKRKVSYEWRLREVMADHKMYATTELVPLLADRGIVLSPSQVHRLVTQTPERLSLPTLAALCDIFAVEADQLVTTHATNVGVRKIAAGDSPAGAFHADGPAPIRARISPQK

SEQ ID NO: 1048 - protein, 587 aa, synthetic construct
  REGION 1..587: note = TnsF-Tn7 System Protein
MTAPRICPTCGLRPVAHRKAKYCYNCRTRGSHTPPPCRRCGSLDYYTAGLCRRCHKGAPPLPDSCQRCDSWGLFKSAGGICAACLDWARRHPGEAECASCTRITSLNTEGQCRLCWRRSRSWARDPSDPDRLEAISGGHQLFFNGMEQRLALMVPPHRRPPPQHFRTRRTRSRRRPVLRPITAATHRQLVLFDIRRDYARVRTLTVPEPVLPELLESLEANCLQLGEQRGWTGDTTGAVNRALKLLLATQDTPGAPIEAGAVALLRELALPVQPTIDVLDHADFLTDNRTPAVITWVERKTAHLPAKIRSEIAEWADIMQNGSTVVPRRYPRSHRTTRNHLYAAMPALDSWATTRKSLREVTREDVVAVLPVGVTDRSEMLSGLRSIYQVLHGRKRVFTNPTTRMKVGMPATRTPVSMDVPVLRHLVSDSDPTRAACGTLLIFHGLRPLQLRRLSVTDVIDGRLAIEGRKILLAPHARAALNGYLAYREQKWPKSGNPHLFINQATAGRLTPVTGKWINKVLGTSAQALREDRILDEAHASEGDARRLADLFGLTVNAAQRYTATVDHVSFAEHQRRQGQSTESTDS

SEQ ID NO: 1049 - protein, 346 aa, synthetic construct
  REGION 1..346: note = TnsF-Tn7 System Protein
MEQECEDYEQELVDQYLLASVGAGVEDVTIAGDRAVLFELIRFVDRPVWTVQPDDVDRFLVHQRKDRDLAKGTVHKKAGSIAQFFDFLIARYQGDVHALTGHVLVQPIDEFNRPAKADYGSPRIPPSSSEVGDFFSAWRTSLPSARKYLPAARDYFAASLWRRAGLRIGETRMLDIRDWRPDLGEYGKLHVRHGKGSRGRGPKARLVPAINSVDALVNWWFTDVRHQFGDDYMDPDAPLLPSERRDPYTGWCRRAGDDALRSGLAKAVGLYLPSWSGRLTPHGLRHFCASEYYAQGLDLKAIQELLGHEWLSTTTRYVHVHSDHIEHTWAAANERVAARLGASNGK

SEQ ID NO: 1050 - protein, 100 aa, synthetic construct
  REGION 1..100: note = TnsF-Tn7 System Protein
MTAAEQGIWKSTEMRRRLAEAGLEISAGKMSALWTGTPTTVRLDDLDIICAVLGCTTGDLLIHEPEAAAARRPAKPTQAEAGGAGTVVPQLGRNRTLPPA

SEQ ID NO: 1051 - protein, 502 aa, synthetic construct
  REGION 1..502: note = TnsF-Tn7 System Protein
MSEPVGLSPRSTTRGRPRTTGTAVCVRCGRGAGRPRVWWPEGKVCGPCFTVATRTRGICPGCGQDRLLPGPPTPDGGPRCGECAGIPHDFHCTRCGTEGESYRRGTCARCALRDDLTAMLLTDPADPAAMARLVDVLCRADRPESIITWKRSPKVQALLASLAAGTTPLTHEGLDARIGTDGRTVDHLRALLVHHGLLPYRDPYLARFEAWIEDKLRPLAPEVAKPVEQFAKWHHLRRIRSTATPDATARGPVHSAKQEVTETAKFLQWLWDTHHRTAAACTQQDVDEWRASGPTTRKQIKTFFGFARRTRLNTAVDVGSYTARTRPTLAQDQRLAWLRELLTGNSESRPYRVAGILLLLYAQPLVRVAALRTEAITIDPATGQAAITFAERPIPVPGGFAELLRDHLEARPNLRTGVAESPWLFPGTIAGQHLHPNGIMDRLRSLGIELASGRNRALDELVTQMPPPLVADALGYSYQVAFLHASAAAEPWARYAGLRPHP

SEQ ID NO: 1052 - protein, 502 aa, synthetic construct; identical to SEQ ID NO: 1051
  REGION 1..502: note = TnsF-Tn7 System Protein

SEQ ID NO: 1053 - protein, 366 aa, synthetic construct
  REGION 1..366: note = TnsF-Tn7 System Protein
MDRSGRVLAVAGSVPLLHPEQHTFEDMLDGWRNQQLSRNLQFDTIAQRIRYVRRFVDHMNEFPWNWTPAHVEEYFGDLRSIRRLAHSSVRAQQSALRAFASYVANPDYGWDRRCEELFGTHPAQVFFDWNTAAHVQEFDGRPAKRPFTRRELQRLFDHADDEVERAAASGRKGWRAAYRDAVMLKAAYSYGLRFNELRHLQTVDFATNPHARRFGRFGVCKVRYGKSRRASPPKPRSVLTVFDWTPGIFEDWLANGRGTLDTPDLFPSERGGLISESTLLRRLRRYIDELGIPAEGLDLHSLRRSYATHLLEDGWDPRFVQYQMGHEHASTTGIYQFVSDDFRARTLRAGLDRTLEEVLGDSGGAR

SEQ ID NO: 1054 - protein, 112 aa, synthetic construct
  REGION 1..112: note = TnsF-Tn7 System Protein
MKRQVEYRWRLAELMAARGLHNTTDLIPLLAERGIVLSRPQVYRLVNQKPERVALQLISAICDIFSCGPEDLITVTAADVRARRTGTAPSPNVVDLNRTARPRRARIIDDSE

SEQ ID NO: 1055 - protein, 389 aa, synthetic construct
  REGION 1..389: note = TnsF-Tn7 System Protein
MLKDQIRQTLTGPTGQIPDKLAPLAAALGDMARPNSGLTWIRQPHVDRLLRSIAAGTIDLSHDAFDALPPSQTVEYIRALLIEHDALPTRDRYLAEFTAWSTRKLTLLKDPAHKSVTERFIRWHQLRRLREQIKTDGAVSSGLFLSAKQSTTVTVNFLNWLTDNEATLEDVNQAYVDRWLAHGPSTNALIETFLYWAIGRRLVPPLELPKRSLANRKSFGHDQRVDAIRRVLLSDEMLLNLRIAGGLVLLFGQPLNRIASMKLDHVQLDGDVTRLQIVDEWLDLPAPFDALMRSWLTTRFNLQTAAHTQSPWLFPGLMPGQHLIPAYISTALAREGIPGQLGRTAAWRDMVKDAPPSILAGLLGMTLETAVRHAELAGANFARCAALRQ

SEQ ID NO: 1056 - protein, 389 aa, synthetic construct; identical to SEQ ID NO: 1055
  REGION 1..389: note = TnsF-Tn7 System Protein

SEQ ID NO: 1057 - protein, 1270 aa, synthetic construct
  REGION 1..1270: note = TnsF-Tn7 System Protein
MMTVHVLHAGDGYTYLTRQVVAGDHSVRRGEDLTEYYTAEGNPVGEWLGSGLVNLGVSGNVSEEQMQALFGDGLHPDAEAAIRAAVAGGESPEDAVQASRLGRRFPRIQPKLDGWDDAVADAYQAFEVENGRSPEAGVERDLIRWNIAAARIAATLQRPGTDAEVATHLSQMGKAARQPVAGYDLVFTPVKSVSVLWALGDEATSQQVRDAHNAAWQATVAWLETEAGVTRVGAGGIAQVDTHGFVATAFEHRDSRTGDPNLHTHVAVSTKVQGLDGKWRSLDGRVLHALGVAASERYNTLVEQEVRNRLGVTFVDETRGRNKRSVREIAGISRELRDSFSSRRAAIEDAYETLVQKYVAKHGHTPPKTVQLSLAQRATLETREGKSAPKSLSRQRAEWRLAAIKIIGEVAVDTIEATVRQPQQLSVTDEILAALSINQLAERVLNTVEDSRATWRRSHVAAETQRIARAFANVRPGVDAQQVADQVAQAVMARVIGVTAPALNPVPEQLQRQDGESIYRVHGTERFTSTRILAIEDSLIDAARTVAGFTVDPATFATTVEALNAASEYPLDASQVELARRFASGGRLLEVGIGPAGTGKTTAMRAFARAVEAGGGRVLALAPTAAASTVLAEEIKVEAETAHKLVDVHRHGSPEQQESDQYRIDSNTVLLIDEAGMASTPLLADVLALAQQHGATIRLLGDPAQLAAVESGGALRLIEQRVGASYLDQVHRFIDTDEAAASLLLRDGASAALDFYVTADRTRGGIRQSMLEEIYVAWAADRAGKRHSIMVAGTNDEVAALNARARLDLVSQGVVGKSGAVLHDGNKAGLNDVIVTRQNDRKLRSNQGKDFVANGDLWTVIDNEGGDLKVKSLRHGGVLTLPAEYVATHVELGYAATINRVQGMTVDTSHILVDPQSTSREQLYVAATRGRESNRMYAVVEETLEVDAHAPDHLRTSVLDALTAVLARESAERSATEEIQRAQDSAASLSTLLPAYEDALSRVYDPNQLDRMEAVVRDVLDSEIADRVVRDEAWTHLARRLAAHEAHGADVRTHLAAAVRFVDAAPDSTVESFAKIYHHRIGAPADGATPTETGLPSWVSPPPVGVDGDNPETRAWLRAQAELIRNRTEALVDTAAANPEPWSEKIRPSPDDASLTVAWRRDLGNVVAFRDLNQIADAESPLGAVRTGDDAYTAAEASLESLRVVEDNAAAEARRRVASLRQRLAETNSGGPALEAAERIQQLLDRQLVREPPRWDDERVQRGPGQRPTV

SEQ ID NO: 1058 - protein, 1270 aa, synthetic construct; identical to SEQ ID NO: 1057
  REGION 1..1270: note = TnsF-Tn7 System Protein

SEQ ID NO: 1059 - protein, 296 aa, synthetic construct
  REGION 1..296: note = TnsF-Tn7 System Protein
MSELRSGSGVAVSTLRSHQAAIRIFCDFVCDPRYDWVTVCERLFGTHPIQICFDWNTAVHSSDYEGRPGRRALTRVELQGFFDHADDEVVRLRHTGTKGWLSAQRDATAFKVAYAYGLRRREFQMLDLEVFGPNPHAPEFGGNGVLYVRWGKATKGGTPRRRSVLTVFPWVTEVIDEWVGTFRGQFDTAPRSSALWPSERGARVGPEALGRRFASWRTEVGLPSEIGPHCLRHSYVTHLIEDGYDPLFVQRQVGHTHASSTSIYTSVSSDFRTRTLRKVLDASIAAALSDPQKDRP

SEQ ID NO: 1060 - protein, 113 aa, synthetic construct
  REGION 1..113: note = TnsF-Tn7 System Protein
MTAKRRISYHWHLRTLMAAHSMWKTTELGPLLRDRGVSLSPAQVYRLVAEQPERLSLRTLVALCDIFDCTPNDLVEPYVEATVGKQAVNAAPAVDISADSRPVRARIITEEKT

SEQ ID NO: 1061 - protein, 382 aa, synthetic construct
  REGION 1..382: note = TnsF-Tn7 System Protein
MITRPDGRPHPQLLPVENYLLNSNSNPDSRLEWVTGSVGARLIRRMAAGSLPVSLRAVAELRVTSATAYVAALLIESGAVPADDFSRVRFEAWLTGLLLSIPDTDDRPTVQQYASWVVKRRFADAGESTDPIQRLSRARRELIEIRRFLAATRVAGFTLEDIPQRLLDEYFVRRGDTAHQLVRFLRWARTQHLTQLRSEYRPQLQRGPSISDDQRWEWVRILLSREDISLAPRVVGLFALLFGVPVTRIVTLRRSAITVEGERVTISFGTDPVKLPPRLADLVRRVIEAPPRSPVSEDTWVFRGLRPGAHLANVSVSAALRPAGISVQQGRVVALMTLSRDLQPAIVADLIGVTADTAARWSTHTGGDWAPYPQLRGDAASY

SEQ ID NO: 1062 - protein, 239 aa, synthetic construct
  REGION 1..239: note = TnsF-Tn7 System Protein
MQDRSNPARDLAMETKMRVLSVIGQKGGLGKTTTAMNLAACMSRASSVAVVDVDPQLTATDWAEAAGEDLPFDFTSETDPAMLSRMRELEYDVVIVDTPGSLADTDVLNAVLDVTDFVIAPLTPSFMELKPVQRTLQQFVLPRDIPYRVLMNRVDPRDGRAQLEAFQALLDTGSFFDGVTGMPRFRNYIRQAAVMKNMPLEGTVITQYTDTRQSRAAISDYTSVSLELMNLWARKDQVA

SEQ ID NO: 1063 - protein, 239 aa, synthetic construct; identical to SEQ ID NO: 1062
  REGION 1..239: note = TnsF-Tn7 System Protein

SEQ ID NO: 1064 - protein, 210 aa, synthetic construct
  REGION 1..210: note = TnsF-Tn7 System Protein
MIILVGSQKGGPGKTTIAVNLAVEYARRGKDVCLVDADPQRSAARWHADREEQGLEPAIACVEKIGSIHQTLQDLATRYDVVIVDVAGKDSKEMRTGMTAADKLVVVVRPSQLDLDTLGHMTEVIEQALDFNPELDVRGLITQAPANPNISERTDAGEYLADYPRIRPLETVIYERKAYRDVVGEGLGVVEWSNPKAKAEIQELAAELVA

SEQ ID NO: 1065 - protein, 210 aa, synthetic construct; identical to SEQ ID NO: 1064
  REGION 1..210: note = TnsF-Tn7 System Protein

SEQ ID NO: 1066 - protein, 370 aa, synthetic construct
  REGION 1..370: note = TnsF-Tn7 System Protein
MQQFLSVSELRSALLPSLGMGVLRVEEAVWRSMVGSWALQQRARHLATQTIQTRVALIERFQAFTEKYPWRWQASDLDEFTDSYRQRARGHATIRAVHGGIRVFCDYLTSPDYDWVEICEQQFGETPSQVCLPWNTAAHVQEYEGSPRRRALTFEEVQQLFDYADSRVEAVARSGRKGALGALRDAQMFKTAYAFGLRRAELRGLDLADLHYNARVPKWGRYAALHVRFAKASRGSNPRRRTVLLVPEMAWWIEGMSQWVEDARDRFGPRDLAAMWVTERNTRVSAKYVDARFTALRQGAGLDPALTLHCLRHSYVTHLIEYGYADKFVQEQVGHLHASTTSIYTSVSGDFKNRVLAAALARFRQMEEEL

SEQ ID NO: 1067 - protein, 110 aa, synthetic construct
  REGION 1..110: note = TnsF-Tn7 System Protein
MKQVETTWNLRQLMAGHQMFKTTELIPLLVEYGVFLSREQVFRLVTQKPERASMQVIGAVCAALNCTPADLITVRLVEEQAVGAEPTSRPIGDLRPPRARIHRPPTTATE

SEQ ID NO: 1068 - protein, 379 aa, synthetic construct
  REGION 1..379: note = TnsF-Tn7 System Protein
MIADPDGHPHPQLLPVAKFLLDSPSNPNSRLEWITDGAGARILRRMAAREMAVSLRAVAELRVTAATSYVAALLLESGAVPADDFARIRFEVWLTGLLSSVPNSRDRGIVQQYASWVVKRRFAVAGENTDPLQRSQRARHELLEIRSFLAVLRAAGYELEDTPQRLYDEYCAGRGDPAEQLVRFLRWARTQHLTRLRSDYRVQVKRGPTVSDDQRWEWVRTLLIREDISLGPRVVGLLTLLFGVPVTRIVTLRRTAVTVDEEQVTVAFGPDPVQLPPRLAELLRRVIETPSRSPVAEDRWVFRGLRPGAHLANGSVSAALRPAGISVQQGRLVALMNLSRDLQPAVVADLIGVTAVTAARWSTHAGGDWSVYPMLRDSL

SEQ ID NO: 1069 - protein, 701 aa, synthetic construct
  REGION 1..701: note = TnsF-Tn7 System Protein
MATRVAQRPPARPTAPAAVSLGVLPRRQLTGIIPALLCIALATAVTGINAVRPFTDLVPVVWIVAVALAVGAIASGVRAFQRQGRMDPAIEAVLPHLGAAQPTRALVEPVKWTKGWVGLPARIKIRYASHVVDDDPRFVDQIIAGLTRRLGAEYRVRKHNSRRCVLIVELAPASDPVSREQQRAIEVVKQVIDPTASVSVTSAEDASVSKIEVKHNVGPKMAIAARRSQIEKVVSSMLPGRWRAHWDLEGDKIRFEVRPTMPDMVLHEVEPAAALTHSAYKSFRIPIGPDEDGQIQSWHPAVSPHCLVIGGTGSGKTSFQHTVLTHLTHAHWRVWVLDGKRIEFAGFRDWPNVELVGARVEHQVRMLHAAHELMEERYSQLENGTARLEDFDPLALIIDEYATFKARVQRWYKTVKPKGAPAQAPVLDLLSDLARLARSAKIHILLGLQRPDVEFLGGEMRDNFGARVSFGRLSPQGANMMWDSFAVGVAIPRNKRGRGITLNAESLPVEIQAFYTPDPAKLDSSDKADWDHLAALRPATADYERMMVRDPEPELTDDGEGEEIEPDYFQWSTAEIVEWDPAAASKTQPGTLRPANVTPLDPRERVRFVPDVEDEAPDVDAAADGDGYSESLEGPAVELEVGDLLLVDATLGLWGVVEGVEPDVVDDEYLAIEYRDIDSGEDGLLTVFDNSVISYRRPEAA

SEQ ID NO: 1070 - protein, 701 aa, synthetic construct; identical to SEQ ID NO: 1069
  REGION 1..701: note = TnsF-Tn7 System Protein

SEQ ID NO: 1071 - protein, 357 aa, synthetic construct
  REGION 1..357: note = TnsF-Tn7 System Protein
MLPGLGMGVLRAEEAVWRSMVGSWAQQQRARHLAAQTIETRIALVNRFQAFTEKYPWQWQASDLDEFTDSYRQRGRGRSTIRQVHGGIRGFCDYLTSPDYDWVEICEQQFGETPSQVCLPWNTAAHVQEYEGDPRRRALTFDEVEQLFDYADSRVEAAVRSGRKGALGALRDAQMFKTAYAFGLRRGELRGLDLVDLHYNSRVPKWGRYAALHVRFAKASRGSNPRRRTVLLVPEMAWWIEGMAQWVEEGRDRFGSRDLAAMWVTERNTRVSAKYVDARFSALRDGAGLDPALTLHCLRHSYVTHLIEYGYADKFVQEQVGHLHASTTSIYTSVSGDFKNRVLSDALRRFRQMEAEL

SEQ ID NO: 1072 - protein, 97 aa, synthetic construct
  REGION 1..97: note = TnsF-Tn7 System Protein
MASQQMFKTTELIPLLAEYGVFLSREQVFRLVTQKPERASMQVIGAVCAALGCTPSELITVRVVEEQAVGAEPTSRPIGDLRPPRARIHRPPTSTAK

SEQ ID NO: 1073 - protein, 332 aa, synthetic construct
  REGION 1..332: note = TnsF-Tn7 System Protein
MSTDTRGRRTCDGCYAPMITAHKLHKDSEYCASCYSRQFVSSACPTCEGTVVYHKSEQQVPSCSICIREQRCCVRCHRPAPDARIIRDTTPGPDGGSPITHEHIVCLSCFPYTTPELPCPICKELSQRLAGAAHLPANVKACPSCVNEQTHATCKRCRKHRKVISYTEQGEPLCSACSGDQPAEHVCPDCSSMVKGAGMARCDACSIAVRLRREVALNAATIEREWVASLYRAFGEWLLVKNVATGALPKVAVRAVSFFRAIDLDGDTHQPIVAADLLRIFDSKQLRAYLNVTRFICERYGFQIDEKARAAARDQALIERGLQESASKPWAG

SEQ ID NO: 1074 - protein, 219 aa, synthetic construct
  REGION 1..219: note = TnsF-Tn7 System Protein
MSRLRTHSPVRKLRNSHRALTGKVNLQAGGMAGFESSLERDLLLILDFDRTVLSVKEQPFSLTHIQDASVRRYTPDVMAEYDRDALPTIVYEVKPIEKLRADWASLRPGFKAAVAHCRLRDWQFKIVTERHIRTPYLANAKFLRRYRDLPPLLVRQAQLRYTASAVGPTTPQGLLAAAYWPKEEQAQAIPALWQMVAAGEFNIDLTKPLSMRMPIQLAE

SEQ ID NO: 1075 - protein, 344 aa, synthetic construct
  REGION 1..344: note = TnsF-Tn7 System Protein
MRIVWPPQVPDELLSSYLARVSIAYGTSPQKLMALYAPGFQVWTRDIDVCAPEGLLSCLTDPSGKSLQMLYGLTLVGWNEVTKRRCEPPRGVYHWINSMGIYHRTRLRHGLTFCPECLEQNGAYLRPWRLSFWTVCPLHQRLLQDGCPNCGVVIQPHRHGFDLRMCWNCNRSLTTATSPVLDVLPVQSLLFRCLINPTRDFEFSGHTCSGSEALWGADTLLSALKPLWRGLGLASERGPRIEMRRVQERYTDMRMLDHLLSLGPAGLLRLAQSMRVTQRCFRQQMPAWIGGIAANLPEGRARRAVSSNRSELRSVGEAQRRRLGGWREMRAAVLLKMTGRSNEY

SEQ ID NO: 1076 - protein, 653 aa, synthetic construct
  REGION 1..653: note = TnsF-Tn7 System Protein
MTDLTDFPDDSRVYFIRHIDGYTQPHKGTESTSVRCYLAPIPPGWGTVPEKLDDRQIARLFSDKNRETFISTIFVGSLATFVVGQCFIRGKDGGGVYAGMLTAKQRKLGNALAFGEDSRIYREFEDESETELYPCTEVGRGSTGERILVLPESQLYLSDLMAYATKILVARDTRSADPRQHVEYIIPRTVIFRAFYAFSSTTADIFTAGPWDTVRSQAISEEEFAGHKTGINEVTGSWTIVLALGMTLDDGPIMALYRFDRYAESKAKRIHEPILQSQLDTALWAGDLTVWCSNAEIPLNPSYGPYRGTVSGYFLNRRKDGGFAGRTFLVTAIHQVSFPKQLPKIAPILVNDSTEGMKVIHTDAPRPHDKRPRNRTPRPNGTPSVDTREATEQKPGFDMPSISFAFYPRPKIIRLKKNQSFKYNSKRSKPNQEPTTEISGGRKSGKQEDLSHAHSAHEKRDPSELLVGLMEILKKLKARGTIAEYRVVAPVASEQRVQVGGYACWNFLGGDERKALRAGKAEWGTRSWVYLQKGNSHYNALARSAFVVRVTLPNGTSGLWIEIERRIKEDKTKESIASAFAISSNLAIQAETEAALSIIRAAHGVSLSKAFERKGKVCYTHPHYMEKAGSEKWSMAPLESFFTSLGDQQATAE

SEQ ID NO: 1077 - protein, 293 aa, synthetic construct
  REGION 1..293: note = TnsF-Tn7 System Protein
MSSFPHLHPQVAAYMGGSNEERIAVSRKDRWIGYPKAMTVLDELDQLIVYPSTQRPPCRLIVARGDNGKTALLRQFQLRHPAVQLGDGGMSVPVLRVNMPAQPDLSQLWSEVLTRCATTHRRGDPASAKYAMVVSVLRVLKVRVLAIDEFNDVALARKGTSDVLAGIRKLSNELNLSIVAAGTEAAVHALAFDAQMRSRFSALSMPKWAMDLPYLNFLNTYERLLPLAKPSNLPGEELAPVLFAAGGEAIGGTVTLLRNAAALAIKSGEERITMEIIRAVQETVSHANALSEI

SEQ ID NO: 1078 - protein, 293 aa, synthetic construct; identical to SEQ ID NO: 1077
  REGION 1..293: note = TnsF-Tn7 System Protein

SEQ ID NO: 1079 - protein, 259 aa, synthetic construct
  REGION 1..259: note = TnsF-Tn7 System Protein
MNTATQSAKQEITEAGKFLRWLLEEHGTVVAGLRQAHVDEYLAEGTSTRKHIRNFVHWLSPGRARQKTITAPHRAAKSIPMLTQDQRIELVRNCLDFQQVALSTRVAGLIFLLLAHPLVKVVALTVDRVERPPDGMMIRLGVNPTSIPELIAPLFWEHLSKRGNQQTANTGTEWLFPGFRAGQHIHHKTLGDRLPVLGIDPQRARNTTLQDLARQVDARTLIDLLGYSGPIIAQHAARSGAPMSDYIDLKRQSHDRPGR

SEQ ID NO: 1080 - protein, 1254 aa, synthetic construct
  REGION 1..1254: note = TnsF-Tn7 System Protein
MTMHILSAGDGYVYYTNEVATGDAKRESGRELGDYYTEDGNPPGVWVGGGLAALGVSGVVTEEQMKALYGEGLHPDAERIIADAQAQGKTVGEATKAAKLGRSYYGYSTDGTDLSAKITAGYTDFTKLNVREPNVADRRAIRTREGDLAFRDAKGRPPADKEELGRFITAATRPTQQAVAGFDLVFSPAKSVSVLWGLGDEDTRKTIEDAQAVAILDTVSYLEREAIATRAGTNGVAQIDVEGGLVATRFRHYDSRNGDPQLHDHLVVANKVKGVDGKWRTIDSKLLHRQGVAASEFYNQRVMDEVTTRLGLTTELREVTPGKRPVVEIAGVDERLTGVFSTRSADIKKVVGQLEKDYRATHGRSPDAVARIKLAQQATLETRPAKAHARSLAGLRAEWATKAAERVGTAIVTNLLKDARAAAPALGSRPGEPRVVDVDRAAREVVATVSEHHAVWGPHMIEAEARRWVQKETSLGPVPVGTVELITRRALETDSIAVTPPAPHGSFEPLTRRDGSSIYEHKGRMLFTSTSLLAAEDTLLDAGRTRTIAPITVAEFDRTAARHTGPLDAGQRALAREFTTSGTLLVVATGPAGAGKTTALALAARATEQAGGRLIGLAPSATAAAVFRDAVEVPAATIHSFVRAYDTHGDATPDSRHPEELKLRAGDIIVVDEAGMAGTLNLAKVTSIAERHGAHVRLIGDDRQLAAVESGGALRLLEREVGSVKLEEIHRFTSPAEAEATRQLRDPVTVGDPFRWYVDNNRVTGGSIDRMTDHVFAAWQHDDEAGKNAVMLAQQNVTVTDLNTRAQAYRLGSGLVSGKKSSQLRDGLAAYQGDRIVTRLNDATLRTGRGTDRVKNGDVWTVGKVQADGALTVTHAGHGGRITLPAEYVQNNVELGYASTIHRAQGMTADTAHVLADSSTSRELVYVGMTRGKEANHLYVETEDAQPMSDVLATIAGHSDGMLSATETIRAEQARVDDLVTLIDQYGDVAERANTVRFTQLVGHTLDEQDARRLTSSESWGAVTAALTRAETQGLDPANVLRDLWNERERGTADDVGAVLSHRMERRIETAPADQTPTAAERPGMPTWIADRRVLDAAGTDPAWRDHLAERYEYLAVRLEERGTAIAAEQPAWAQQLGDVPTESARRQEWVLLAAEIDVFRDRYKVDPAQTLAIPEAYRERNVGAELAARVTALEKMQSQATAPSTPEARGGPAEAAHRARGDACREPDDGRPAAGSAACCRPDREGTAGHPRR

SEQ ID NO: 1081 - protein, 1254 aa, synthetic construct; identical to SEQ ID NO: 1080
  REGION 1..1254: note = TnsF-Tn7 System Protein

SEQ ID NO: 1082 - protein, 430 aa, synthetic construct
  REGION 1..430: note = TnsF-Tn7 System Protein
MPEQTCVRCRHQGERYRWWGHRDDGIICSRCHLVERSTAVLDDGSGRVAPSLLALHQAICEQPSADAGLVWLICNRHVAPLLGDLATGRLPLTHATLDAHESPQTAMHLRDMLMQHQILPHRDRYLVLFENWLRGKLNTIEPADDQQLIRRSATWRSLRQLRQRAAREPLRPGLTKRHCHEINSAAALLAWLRQHDTTPRACTQTDLDAWITTGNSSRQGSRAFVVWSTKNGTMPRHLHLPYQQSAAHETITQAQRLQLLRDLLDPAKPFFQRDRAAALLLALFAQPLTRIAALTMNDIDLSGDEVRITLGPHGPIPVPEPFGQILRDHAADRGPRNVEANRTSPWLFPGRRPAQHVHSTYLMNQLAKSRINLLGTRLAAIRTLVLDMPPAIAAQALGYTPECAEDHATLAGATWASYAAHRRRPGDREA

SEQ ID NO: 1083 - protein, 430 aa, synthetic construct; identical to SEQ ID NO: 1082
  REGION 1..430: note = TnsF-Tn7 System Protein

SEQ ID NO: 1084 - protein, 1652 aa, synthetic construct
  REGION 1..1652: note = TnsF-Tn7 System Protein
MSVIAYPGRWAVGDDEQVTDGTDGPMVAGRWQPTRAGAVNSWAWTDETFVFADGWLALAGPNGSGKSLTASMLVTVLLDGEVSQKALSVSGEAAGTLIDRHTDRNAKEDRTGAWWLEYGYREPETDEIQYMSSGLWLRSQSSGLQKAFFLSPGRVGTDLLLQQQRDPVGIDGLAEQVAAVGGRLFTSHERLTVKIREYGNVADENQYRDAIRTSLFAPLDPVQFDALVGVLRSLRSVRTAEAISPNQMRAVLTDALPALDPRALQFIADTMERIADLEEQLKRARAEIRQLEQSEQHYQRYIDAVIAEEAGQLAHAQTVFDDHARQARLAEQQRDTEDAAAQRVSKRRQQLRTETADVRGRLQAAEDALREHAGAELPHLEQRLHDLRQRHAQLEQARDDLQTEAQEAAERALESAGQVHSGQEQLTGISSLLRTTAAEVGAQAFVDRLADATEQVATLATVEHVVPDLDVQRLTQTPRGWAEARTSSLNGIDTALHAHDLAQAQQRTEAGHLRTAENQYDRIADLAADAAADRRTAEQSFLTQLHLWNEQRLQLPAVPAELSVDAEDRIDPARLVEWLHRAVSSTRDRIALAAREQDVRHGSDAVEKAAGVVRQATAAREQAERDVDQADRHLAQTLEQAAQQRAEADTYGSQAHLDHNAAAEAAHQITTAAEHALDASRAAASQAAQQWRGEVAAWRAELVHLDGRTVTLLDDPDAIDVRQPFVDLERAHAAAVGGLHRAIADADRAVAEAEGRAATIDADLAAARRQPPAPQAPPWRSPRDPHAGVPLWATVAFADHVSADEANLIEGALLTAGLLDALITADGLVNDGDLLLAGDSPAAGRSLAEVLTVEARPDVDPRLVGWLLRAVAIDLAGSDLRIGRLRTGAVIATAPRGYQATFIGATARERARLALVADLEQQLAQAHAEVAAARQHGRELHTAVEEAGQERDRFPTAELVSRTRTHVTAMQLELAGARQQTAQSLAAAAADLTTAVARVAALHRDIDRTVEQSRQATITAAADLRRAQDAESEADAALRGAREELAEAVLQRDDARTAEQQCTAEQNRFPDLDELRRTSRDEDDTARDEAAARAQVDEHRRRHGTAGDHVRQTLRELNTAATLPDGSILPIDRDNLQRHRAAVGTLVQQIEAWQSAAARTLELLKSAHRDHGTATRLANRLQKAAAEADKIGLEAEQLDARVEETRNLYGAEYAELRGKQEALTSDLEAKDAEDKQLEADFREHDRAAASAQATLDGIAPRREEADKHRTACYLRVCLLVTHGFAALPDTLTSDEQGRPANITAALTWSRQLLADQPATTARLDTLKTNRERAQRQLETTMRSVNRALAEFDQQLDSTTLEGTEWRRITLAAPNAAVGEDLRQAADTLRVTAEGLEQDLRQDIKATLKTSMFTQLRRDIQTRREAARDLVRHIRATLEHVRTGVAQVGVQVDWKVRDDDNSQQMVTLLAAPPSDEVFDQMYAILRQRMEDAVDEPWTDRVAHTFDYRSWHQWDISVTHSSFGTDQFRPVNARSNPLKGLSTGESRLATMLPLLAAAWSMYSAPTFQGPRLLSIDEIDAAFDEPNLRQILALLRTWNFDVLATTPTIAPLIKREAQHVVVHEVVTDGRHRITVPWLWRGNGEPSPLTLPTAGG

SEQ ID NO: 1085 - protein, 313 aa, synthetic construct
  REGION 1..313: note = TnsF-Tn7 System Protein
MSKVIAELYSLPLFAENARISHAMRGVEVAVPEGSAGLHLVRGVPLLHPEEQVFQAMLDGWRNQQLARNLSFGTIEPRERLVRRFRNYTDAGPWAWSAADADAFFAEARAVKHVSHATLLGYQTTLRQFCDYITDPHYGWPDECQNRFGTHPIQVCTEWNTGRHVQEALGRPGKRALTHDELQALFDYADERAVAAQSSGRKGWSSAFPDSVLLKTAYAWGLRRNEAAHLDLCDLANNPKAPEFDGYGIIRVRYGKAMRGSPPKRRSVLTVPLFDWAVDALKQWVEELRPALAEPGNSSLWPSSATTSSAPGR

SEQ ID NO: 1086 - protein, 482 aa, synthetic construct
  REGION 1..482: note = TnsF-Tn7 System Protein
MSNKDSRQVCNGCAKTVLKIKKKYKDKKYCSTCYARIFKKRPCPSCGVLARLSKNDSKAKCNECIKKQPCIRCNLTNRPIGKLTQYGVVCNSCSVYFRMIQQCERCNAPSQKLTKISRFKDDLRVCPKCATRDYETCPFCHKYRLLELDENGVKKCKRCKNYKDKPCLICNKLIAAGCGDVCEDCYWYKNLWQKYNQNLSIFESPFLKQQYKKYTSWLMNEVGTHKAALYLNKHTYFFIKSKMLWMESIPTANELLSQLRTHGLRKFELIIRWLDESYDLQILSTSKRECSEQDQTRLLIESLSQLSIAYKVVNSYKKKLDNKMKQGLTSARSVRLAIKPAVALMLLTDQGGELLPDLKSVKEYLVAFPGQAAALHGFINFLNDEYNTNIDYVTIKKSNSIKKANKNKLENDLIKMICSNQRIDMLTWVKTGLQFFHDMSNQQALRVKSEMVEEVQDGYNISYNNKKYWLPKNTHCLFQKND

SEQ ID NO: 1087 - protein, 482 aa, synthetic construct; identical to SEQ ID NO: 1086
  REGION 1..482: note = TnsF-Tn7 System Protein

SEQ ID NO: 1088 - protein, 236 aa, synthetic construct
  REGION 1..236: note = TnsF-Tn7 System Protein
MKRISDEYSPVRKAQTVYGSISGNYSFRGEKTIWYESTLERDFLFKQEYNENVIDVVGQPVAIPYITELGNESTYTPDFLVQFSSAQYEDVDLFAAPLLIEIKPRKKLRTDWKGLRPKFKAAYTFALEKGWKFRIIDESRLYDQYWENINFLKRFKRSYIEKDEQRILTEILEKLGYSTVNQLPTYIFTDQRNILKAIHKIWILISKKIILCDLYSPLSAETIIWINDKNATKGEI

SEQ ID NO: 1089 - protein, 636 aa, synthetic construct
  REGION 1..636: note = TnsF-Tn7 System Protein
MIENDSVKIDRKRLIIKPNNVVNYNGSKYRIINILNSEEVVISNLESARCIQVNIRNLSVVDSEDNETSMLNKGEDISDEAWQVALQHYEIIKPLIENSTVETVKKTAEKNNLHVNTIWKWLKAYRENKSILVLIPKKRGWRANKKRLSPELNYIIQQAIHTKYLTSLKPSIAKTILEVKLECFKRKLEPPHDNTIRCRIEAINAYEVTKARYGKKILKDKYEAAAGSFPNADYPLAYVQIDHTPLDVEIVDEQYRETIGRAYLTLAIDVFSRMVVGYYLSLDEPSSISVAMCISSAILSKKRKLLELGIDGEWDVEGLMDSVHSDNGSDFRTLHLSKACLKYDINWEYRPIDGAKFGGHIERLLGIVNLEMHVLDGTTKSNIVMKGAYDSAKNACLTLRDLEYYIVYWIVNVYHKSKHSILDAPPLQMWEEGIWGTKFKPGTGLKERVADEATLFLDFAPEFESTIQRTGVKKDKLFYFSDCLRPWINAIDPNDPNKKKKRKFIFKRDPRDISMIWFYEPNTNTYFKVPTAKREIPSISLHEYKQVQKYLKSQRLNTVDQDAIYKAIIHLREKVDQALSLTRKQRRLNQRRKENSKSFTQSLFEKNNANQNVNSNLSQSENSLWNTDLTAFDDLR

SEQ ID NO: 1090 - protein, 306 aa, synthetic construct
  REGION 1..306: note = TnsF-Tn7 System Protein
MEKFNHLAAHVREIMVLSDDERINFLYMDRWIGYQRAITVLNMLTDLLNRPKKLRPECLLIVGDSNMGKTTIIHEFAKKYYINKVNDIDMQLLSLTKPVIPIQAPVRANVKELYINILEHFFVPFRTTDPESKLKNQAIHLLRKYETKMLIIDELHNCLSGSSRQQQEVMNALKTLSNELSLNIIGVGTREASLILHTDAQYASRFDILDLPLWKLDEDFLRLLLSYVKLIPLKKPSNLSSQEIATLLHEISGGNLGDLNRVVVECAKMAILTGTEEITLEIIKKFRWLKPTQGVRNIQNIKINRI

SEQ ID NO: 1091 - protein, 306 aa, synthetic construct; identical to SEQ ID NO: 1090
  REGION 1..306: note = TnsF-Tn7 System Protein

SEQ ID NO: 1092 - protein, 674 aa, synthetic construct
  REGION 1..674: note = TnsF-Tn7 System Protein
MENSNPFSFSKASDYTDEEINTFWVDIDDDFVRKIIDPTSKKSSFILGGKGTGKTHLLRHFSYASTKLRHPNLSGLEIIRNDGFVGVFLRANALDASRFDTSNENEKGKWQILFAIFLELKLTENLLDTLIDIEKTSTDYKFNTKGLLEILSSEISQETYFAQIKSLEELKIWLKKASKKINTAINNYAFTSTLDLIPPFTPGSLSLKFKKALDEWHPVFKDISLVYLIDEIENFYSIEHQEVIQSFIRYGEGMTTFRISGRLYAIKTYSTIGGGEENREDVEFKKINLDEKLKELGAKYKNFANNFIKQRLCVKKLIPLNRLESFNIEDCFESIKSSNYYSEFIDFLELDSSQPQVFVQNFRSTLLKVPKLIATEEIDQIIDLLTSNFPILLQKHNILRFCKDYSNKDSVIEVAKNINQICELYIENPKDEKCKSYDDSYSHWSSNLIAQLCRENRKPVIYSGFDTFVKMSSNNPRNLLSILSNAYDLAIFNNLDFINKAPLSIENQTKSVLSNSKFIFEQDSNYGRPSDIAQIVVDRLASLLRTARFALNIPEVSPLSVSFIDDDLSKNAKLAIQSALNYSFIFETSSGRPDRNSERINRKIYLNPILSPKWDLPIGRRGDISLSAELVNAIFDIEKGNEFKVLLTRLDTKWNNPFTRDELLLKQPDLFSND

SEQ ID NO: 1093 - protein, 674 aa, synthetic construct; identical to SEQ ID NO: 1092
  REGION 1..674: note = TnsF-Tn7 System Protein

SEQ ID NO: 1094 - protein, 366 aa, synthetic construct
  REGION 1..366: note = TnsF-Tn7 System Protein
MSDHAGQWYIRTPIKNGEIFSSWLIRSALDMGCSPLILVEALWRDWRALTIDLDKGISDIRLNSLLLHCFENKQTILNTMLSSIIPQLYLHPNKIWILVLGQRNRSNLSGRQLCVKCFKDDGVSPYFRLMWRMGWHSCCEKHQVELIDHCPKCGITIQLFKIDLEHGSLAICSSCGYNFIDHQPKVCNLNALDFQINADQVLKTGKGLYNNQSISSYEWFEIARAWLSEIRLLLDTENLRLLEMFKSLGVDLDIPLTITPLSFEYLNIHERTILLSLLDRIMKIPCDLIVDRAYEYGISNASFWDNRKKLPSQLLQMKAAMAKPVRIYPSQRLKSSINQPKSKKNVERKWLKLLRKIKKVGVIEFE

SEQ ID NO: 1095 - protein, 482 aa, synthetic construct
  REGION 1..482: note = TnsF-Tn7 System Protein
MIDTVATLSAEVICDECGKRGRKITRVYHGHKYCPTCYAREFKRRLCPKCGNYARLPRRDITAVCRHCALDQPCIRCGKTDFRVGRVTRSGPVCNSCAKYFREAEACELCGELSRRLTRVSRFNHNLRLCSKCAHADHGNCQACHHPRLLVVTDDGRRLCKVCLDGGMILCQECGQSMPAGRGAQCEPCYWRSLLTKRIAMNLAAFTMPVMAGHFERFGAWLAVTVGDNKAAITVNRYLPFFMEIEKVWQAIPDYSRLVAHFGAEGLRRVRLPMRWMQETGLVVKDVAVQAKDSEKRQIAGMLKALEGDPPGLRVLKGYHDTLMAKVKAGKLSLRSVRLAMAPAKALMLEAQKMGLKKPDQKAVDLYLAKVPGQRAALTGFVRYLREAHSVGVAMPKAKEGAAQKVRQRKLEQEMLAMMREGGEGDEFLRRWVSVGLAYFHGLPRKVGIGADVLRTDGEGMAINVEGKSYWLPSISQMGLSE

SEQ ID NO: 1096 - protein, 539 aa, synthetic construct
  REGION 1..539: note = TnsF-Tn7 System Protein
MSLSPVAAAPANAFTDAIRRRRTFAIISHPDAGKTTLTEKLLLFGGAIQLAGTVKARKSSRHATSDWMAIEKSRGISVASSVMQFEYDEHVINLLDTPGHQDFSEDTYRVLTAVDSALMVIDGGNGVEAQTIKLLEVCRLRDTPIITFMNKFDRESRDPTELLDEVESVLGIRCAPVTWPIGMGKRFRGVYHLLRDEVLVFAAGEETREQAVERIAGINNPELDRRFPEEMPELREQVELLRGASHPFSLEEFLQGQQTPVFFGSAINNFGVRELLGALIDWAPSPRPRPTTGRTVMPEEEAFSGFVFKIQANMDPQHRDRVAFLRICSGHFKRGMKIRQLRLGRDIQVHNPITFLAQERELVEEAFAGDIIGLHNHGSIQIGDSFSQGEVLQFTGIPYFAPELFRRVRLRNPLKAKQLQKGLQQLAEEGATQVFKPLHGGDMILGAVGVLQFDVVAERLKTEYTVDAIFETVTVQTARWIQCADPKILAEFTRKHEEQLAEDAGNRLAYLAPSRVNLDLTMERWPQIVFHATREHAGS

SEQ ID NO: 1097 - protein, 539 aa, synthetic construct; identical to SEQ ID NO: 1096
  REGION 1..539: note = TnsF-Tn7 System Protein

SEQ ID NO: 1098 - protein, 482 aa, synthetic construct; identical to SEQ ID NO: 1095
  REGION 1..482: note = TnsF-Tn7 System Protein

SEQ ID NO: 1099 - protein, 229 aa, synthetic construct
  REGION 1..229: note = TnsF-Tn7 System Protein
MNINSCNKVDNPSRRKIGTTRRSVSGLYPFRGVGPVDFESTLERDFLIRLETDRRVLDVVSQPTTIEFVGLRGQVYPYTPDYLVTYRAYPGPYHAPILVEVKPASELDKHLPEWKAKFRAAMTHCKERGYIFHLRHEPRIRDQRWKNAMFLQRYRQMQFVPEESEWIIGNLRQMGTATFDHLLARHFFGEVDRAIGISHLWHLLATARMECDWSQPLSQTSELWVPDHG

SEQ ID NO: 1100 - protein, 626 aa, synthetic construct
  REGION 1..626: note = TnsF-Tn7 System Protein
MAKPARQTFLPAPGKMVMTSGKIYRITEVLDLETVIGLDVESARSCTLRIADLAPAADGTVMVRDLDTIADEDWKTAQSRYAAIQPLLDRFDVGRREVEARAQEVGINFTTLYRWLKLYRDAGTLDGLMPEKRGVRRGAKKISVHAEQIIQDVISVLYLTVQRPSVQKVVLEARRRCIEAQLTEVPHPNTVRARVAEISERETLRKRGYREKAKNKFIPVPGQFPNADYPLAVVQIDHTPADIILVDDIYRKPIGRPYITMAIDVFSRMVVGYYLSFDAPSVTSVGMCVAQAILPKDDWLVLHKVDAKWPVSGLMTTIHVDNGSDFRSESFRNSCMMYNIRLEYRPVKQPRYGGHIERLLGTMLKEIHDLPGTTFSSIKERDEYDSEKHATMTKSEFETWLVTLVCKVYHKRLHSSIGMTPEKKWELGIFGDKNTPGRGMPALPANREVLLLDFLPMFKRTIQADGVSVDGLTYYADVIRQWINANDPDTPGKKRQFIFRRDPRDISVIWFHDPELKMYFRIPYADQTIPSMSIWEYQQAVSRARQQGMKSVDEAMVLQALNDLRQQVDGSSERTKKARRQQQKRKEHAKKVSPSQPLTSNRSVLEKAAPASMLLEGVVKPLDDIA

SEQ ID NO: 1101 - protein, 233 aa, synthetic construct
  REGION 1..233: note = TnsF-Tn7 System Protein
MVHSVALIGRSHSGSHPRPGEISLAHHGVLFLDEMPEFPRAVLEVLREPLESGEIHIARAARRATFPARFQLVAAMNPCPCGHLGDPQQICRCTPAQVSQYRSRLSGPLLDRIDIQMEVPALPVSALQEAAPGESSAYWRERIAQAVDRQWQRQQVRNAQLQGELLDQFCALDTVGTRLLSRATETLHLSARGYHRVLRVARSIADLEGSDPIGTQHLAEAIQYRRLAQTLAQ

SEQ ID NO: 1102 - protein, 352 aa, synthetic construct
  REGION 1..352: note = TnsF-Tn7 System Protein
MPDEIISSWLVRAALAQGCDPMVLTGEVWPKWRIWTRDADRFLHDLPLNKLTAPAGIPLSSFRAATLKSVAERVSKGPLPDKAVWPWILALGARNTKRRSGLQYCPDCLRDDRIPYYRLQWRLAWHVGCEHHHCLLLDRCPHCGAPLESHRLHAEDGHVAVCATCKGDLRDVGAITPCSDDVMAFQDAGDEAIRHGSGQFMAHPTETDAWFAGASFLSALLRRANRSDAENLHVFLERMRVAVPELPLNPGTGVELLGTAERHLLLGALWKLMRTDLADVSKYLQESGITRQGFVSKGERMPDLFAETFAQLPDNARGPRKQAVRDPGQPRPRHEVMRMWRRLQRKLEMSQR

SEQ ID NO: 1103 - protein, 295 aa, synthetic construct
  REGION 1..295: note = TnsF-Tn7 System Protein
MIDLAHIHPEFRHVLGMSDKDRTAFLDEPRWIGYAQANRLLDNLRGLMEKPVRPRMPNLLIVGDSNNGKTTVIRRFQKLHGEGYVNEDAEPVKPVIVSEAPPSADEKGLYIAILERFWTPYRATDSASKLRYQVVHLMRDCHVRILVIDEFHSLLTGTATKQREVMNAIKLLCNELAIPIVGVGTREAVRVLHTDPQHASRFDVVTLPPWELNPEFQQLVASFERVLPLKKPSLLHQSETVSLLFAISEGNLGNLHRLLVECAVEAIKTGTEKIDKSIIEGKQWLRPTHGIRELV

SEQ ID NO: 1104 - protein, 295 aa, synthetic construct; identical to SEQ ID NO: 1103
  REGION 1..295: note = TnsF-Tn7 System Protein

SEQ ID NO: 1105 - protein, 326 aa, synthetic construct
  REGION 1..326: note = TnsF-Tn7 System Protein
MIDTEQGRICKKCDEFGEVSCTSCNKLMPAGMGKQCQDCYWLKRLLHEAELNDYLLKSNETKKAYSDFVEWLADCKGSMVAALKHNKFIYFFIRCDEIWHKIPSYESLVQEFKPNGLREHLTVLRWLILTEQITIDSTTKAQVAEQERIVNLLEKFDNKTPRCIEEYHKYLDQKLLEGKTSLKSVRLALQPAVDLCIEYEVKGLNTPTQEHIDGYLLLKQGQYSSLYGFVTFLNKSYELVMVCNKPSKEDVWKLKSKEIEQEIMRLYNKDKPLSPKDRLIWLQLAMAYFHQVNVTLSTLKALTVQQRNEEMYMIVFNEKEYWLPKI

SEQ ID NO: 1106 - protein, 575 aa, synthetic construct
  REGION 1..575: note = TnsF-Tn7 System Protein
MTPDFFNGFERIDNLNKIDIHKYTDKFFNNYEYVVIWFGRIFRGSNRQNAVKLIEVKFLNLSNGYTVEVRIPIELAHRLTIGSIWVNGVTHQKFDFDDALTVINEKSDNLTYSNHFGISKEGGTYEFALNNYPVVGLESDTNTLLVINQGSYKVIIHPLLFYMAHYGISKEVNRVLLTDLWVDIEESLNLNHPNPEISNTVIIPDKCVIADAVFLHHLKHDKHTKTVTKQLNKRVLDAFIKSQNNYDLSRKSRLPSAPLKVVPYHEQQIEIGFKGINIEDGVMLCTEITGMSMPRGDAISYAFNEYEKKQGDLSYSESAKRSYRALFNKIDANKLVIEAESNAGNSTTAVVLQHIYTIGEIRELVRAENITIQQFIQRQSGQVIPLTEPVPSTYAIGEKSGTNNTVGMLKIFISSGVVAYKNPLFKKLLGYAQSLRADTEYPRYNHMVIDCYSNGRLYGESVEQLNQYHGATYVTAIYVLKLVVNRNVYYVFDCSMTTWINTSGICIKVNNDDYFMSYGVNDVLEQLFTNNGRLLDQDELERLYGSIVKFNHTGSESSNWVRTALEKLNNPSAKE

SEQ ID NO: 1107 - protein, 213 aa, synthetic construct
  REGION 1..213: note = TnsF-Tn7 System Protein
MKQVRKIKPTRRSISGHVAFKGDSIAFESSLERDFIIYHSFRDDVIDIVPQPIAIPFVKNGRSYEYTPDFFVQMKPDTSKSLIVEVKPKTEWQTNWRDWSDKWKATIKFCREREFRFVIYDEDRIHHLALENINFLMRYKNTTVVPEEVKAVLQDIELRGNTTVEYVLERYFKSHFYRNQGKHLLWYLMANKMIGFNIWSDIRSEKLEIWHEY

SEQ ID NO: 1108 - protein, 659 aa, synthetic construct
  REGION 1..659: note = TnsF-Tn7 System Protein
MSINNDDYELVNENLGVQVDHHYDNIERNYIQMSLGGVYRRKSNSEEYQLMEYLEDINQAVFKNLSNLRNEVLSVHDFGNITDKNDVSIQVDLNDISDKDWQKAQKKYLAIKPLIGGAYDEYTGERGYERRADETKVSARTLKRWVKSYQSTNSVASLLDKKRGWKSGKNRIPKDLEKLIDDVINEHYLCKQRPSVEATIREVYKRCYRLGCVKPSESTVRRRINSISERDFLRGRGYREKAKDKFTPKAGFFPNAEYPLSVIQIDHTPVDIILVDDKYRKPIGRPFLTVATDVYSRMITGYYISLDAPSVTSVGMCISRSILPKTDLLLEFGLGDATWDVFGMPRKIHVDNGSDFRAVSLQKSCAFHGIDIEFRPVARPEFGGHVERLIGTLMKTIHELPGTTFSNIKQKDNYDSEKNAALTLDEFETWFLTYITKIYHQSVHRSIGKTPTAQWQLGIFGDNFNEGIGIPALPSSHKTLLLDFMPGIERTVQRNGVNIGGLNYYDPSLNNFINQTDKTTKKKRKFIFRQDPRDISIIWFYDPILKTYFDIPLANQALPAMSLWEYRQIYKQVKQQSGTVSEALIYQAWEDMQALVESSEESTLTLRRQGQRRKFHVKSQEIHQPVKDDINSRQTTVTVDAKYSENDDSDDLDFFEDIR

SEQ ID NO: 1109 - protein, 386 aa, synthetic construct
  REGION 1..386: note = TnsF-Tn7 System Protein
MAKTDKRVAQNYRIKPLTIATPFYKGESITSWLVRAALNQGCDPQTLAYYFWPSRRVWTCDVDKGFKHIDSHIHADMAVLARTVIDDFDNQNLMSLSQPLSDHISSRTPVPWTQPLSKRNRYSRIGYPYCPNCMEDGKSAYLKLQWRFTWSVCCTQHKKLLQTECPHCDHPYQPQLINAEQRFINHCHFCRSKLGKAGHNSIPTVENYQFQLKIDKVFHDKQGTVLGETVSMNDWFDYLIFLINIVRIALRNPNYMFAKLLLDFGIDVSSLSLPKTALRFDYLPIEERALLLRCAFYLFEITCEDWLKGCKELDVTQNSFQWSRHTVIPQAFHQVYNQLPKTPTRKYLAQSEEVQPASPEAVTASWNRLKRKITMLKYYDNHLKKD

SEQ ID NO: 1110 - protein, 326 aa, synthetic construct; identical to SEQ ID NO: 1105
  REGION 1..326: note = TnsF-Tn7 System Protein

SEQ ID NO: 1111 - protein, 733 aa, synthetic construct
  REGION 1..733: note = TnsF-Tn7 System Protein
MSKPLNILSQTYAQTGQSKQNNTMGMREMQARAFEKRNSQYLLIKSPPASGKSRAMMFLALDKLQNQGIKKVIITVPEMSIGKSFKLTRLSDYGFFADWDVADRYNLCLILAQSDDRKTAIFSEFMNQDKEDNGLPQILICTHHSFRYGFDAIIKEGGGVEIFNNTLIGIDEFHHVSAGESNRLGMILDSIMTHTTAHIIAMTGSYFRGDAVPILSDKDEGRFEKVTYTYYEQLNGYEHLKSLGLGYHFYKKSFFGALAECLDTTKKTIIHIPNVNSQTAETDKYETVGRIIDVIGEVEGRDEETGVTTIRTHDGRQLLLADLVTDDDTRVRTQSYLATVTERDQMDIIIALGMAKEGFDWEYCEHVLTIGYRGSLTEVVQIIGRATRDSKGKSHAQFTNLIAEPEADKLKVEDSVNDLLKAITLSLLMEQVLKPKINFRRRSELDLLGKGDLEQGTVVIDDSENAPSDRVMDILNKDRDEILASLCQNPKNIKKYMAAENNNIEAQAVSDTVIPSIIRSKYPTLEPDEVRQIQEGIMRHLALNSQGGIVNGTNLPKDAVVENERCFIKQGNDYLDINTLSEKRREQLSDADVIKERDLPVGAKIYNPKTKSSNINESNPSNSFVKVGSKFINVNNLPIDLVMSVNPFHDAYEVLSKTVDKDVLMTINNAVNANRSSVTDAEVLLMWPKVRNFIKTKGRDPSLSSSDDIEKRMAEIMAYARTQKAKESVVSND

SEQ ID NO: 1112 - protein, 733 aa, synthetic construct; identical to SEQ ID NO: 1111
  REGION 1..733: note = TnsF-Tn7 System Protein

SEQ ID NO: 1113 - protein, 296 aa, synthetic construct
  REGION 1..296: note = TnsF-Tn7 System Protein
MTSTDYGHVHEKFRPIVLLPDNERIEFIDSPRWIGYSRANEVLDVMQGLMNKVKQHRMPNLLLIGDSNNGKTTIIQDFAKRFGQSYADEDLIVPVCLIQAPPSANEKDLYISLIDYFALPYKSSDSAGVLRAQVVHILRETHVKILIIDEAHSMLTGTARQQRLIMNAIKYLCNALQLPIVLSGTKDAVRILHTDPQHISRFDVAELPLWQNDRDFKKLVGSFERILPLKKASNLTETAILNLIYSISGGNIGNVKRLINECAIEAIKSGDEQITKKMIEDKSWLRPTRGLRKIIG

SEQ ID NO: 1114 - protein, 296 aa, synthetic construct; identical to SEQ ID NO: 1113
  REGION 1..296: note = TnsF-Tn7 System Protein

SEQ ID NO: 1115 - protein, 467 aa, synthetic construct
  REGION 1..467: note = TnsF-Tn7 System Protein
MMDDLRQCDQCKQYADTIHRKYRGKRYCGPCYTYFFIKRECSNCNKTKRIHRAEKRPLCYQCYSKVTPCRRCERIGRPVGKIDKFGLFCSSCANELRPESKCSLCGRVAILSIGKKYNLSTALCRNCRYRLNPKCPQCGARRALHEIKSGISICSGCANSKIYFCQGCNTPTKGARNALCDHCSALRRNGKRKDINCAGFTSPRIEQLFSGFVDWLTLEVGAEKSAFTQNRFVEFFMRLQESPIVWTEDVFFLSSIHGGFLRASSLPRRYLESTGTHFHRLALKEAMDLRTINKNLDIIRLKSAANCIPLVETYFADRIDEYKTGKTKLLTIRLESTSVRLLFETITDLNLIEDGLLTLAIKSPGVRCSLTRFISYLSLFVDRPLMYPNVSAELKLKHLVESCLTPTNEPLNIREYLATSISYLHHISAWAQDITEFNTVEDGFSVSLYGESYWVPNPLTRLRAKQN

SEQ ID NO: 1116 - protein, 571 aa, synthetic construct
  REGION 1..571: note = TnsF-Tn7 System Protein
MTELVIKDFPQDDIPWTVIEYRHVSWNEQLPDEPLIEVVLTNKVQKKTKIVKIAKSYTLYATKGTIWLKGERIGVRSDAVETEFRFDTLEYSKSITPWEPIISSVSETPKLFYIPPYSYYIPKELRDCRFHVFYAKDGTEVIVSSITLFDGLFGHSMKAKQIVFNYSAEDSMKLMEFTDFDVEDYQEQPTEDEVVIGLAKDIRDNDRYFLYHLKTAINAAHAVNKIYRQLSENRSKKSYIEVQPWFNQDHYWKVQGVWLSERKRFFVLQILNFQYPSSPNFFVVRENHNIAAEEHKEEEKPRPGKKKNTNTKPTAASKTRPGSNSIPTDIKMSGEDELWGSTELRKAIPKENKTKKLTLPPKESDLGNVSPSGMNKSNSTAGKANLTRNPEEDNKTSERPKTMPNAVTLIQRALTILSNTLSTNEIEYLNKNGEWVSAIDAGLSELYELPGRQRWGVNRTNVLMNINGKQIYSPRVLGVFHMSINGSSYFFVAIERIKKESFRTAIFDMGCKEEFVNSLGAIAMVLEIHKGVWKKVFDSDYSLDRVITHSGNAKSIASQIRMKLKLSDSSS

SEQ ID NO: 1117 - protein, 221 aa, synthetic construct
  REGION 1..221: note = TnsF-Tn7 System Protein
MKYQTPVRKIPTNRRSSRGYYAFRGQESIPHESTVERDFIMQMEFDANVAKVVSQPIELSYIDMSGRRQRYTPDYLVYFRSSNVKPWLVEVKERDEIKKDFGKLRLKFAAGFAEAKKQGWIFKICDDMRIRGLRLENIRKLKNFSSHSVSAELREKLLTSLATINTPSTVQAFLESYTNNRNDYLTNISRIWWLTLQHDIELDLSTPLSEKTIILKVKSND

SEQ ID NO: 1118 - protein, 638 aa, synthetic construct
  REGION 1..638: note = TnsF-Tn7 System Protein
MTDLHKLSKSKVQLRRGSLLKMDDGDYLLKEFLTSSEVLLQKVDDKDVKVAKLQDIVTDVIQAAPSEHLASDEILAIPPDELKAAKRKFKAIEPILELGPTASVQDIKIQAVKSGVHYTTLYRWLNAYLATNSLVSLINQKRGWQRKNIRTSDDVNKIIEHCIANYYLTKARFTPKMVYDRIKEACKSAGLKAPAQSTIYRRINLVPEERRLRSRGHLDLANNRFSARAGRFPNVDSILSVIQVDHTPLDIIIVDDEHRESIKRVWLTMAIDIYSRMVTGFYLSLDAPSTTSVAMCLSHSILPKQQWLKHLDIALDWYVWGIPKKVHVDNGADFTSDALRIGCLENNINLEFRPVAKPQYGGHIERLLGAFQNRLKALDGKTFNSPKVRGSYDSEKNAIFDFNSLERWLTNAIIEYHHTNHESIGVPPTTKWMMSVEGELEELPHGWPDVPADPLSIEISFLPYKERTIRSQGVVWDGIYYFSDNIRHLIGIRDQETRKPRKYVVRRDPRNIRYVWVYDEDIKSYHKVGLADPTLNFTSIWELNEAKLYLKKKGQSEYNQNMLSRAVNNMREIEEKARKKTKDARRKTQRKKNHQKTITPAQHFAAKEESNAISTEISPEQEVDDWDSGDEIDIFDIE

SEQ ID NO: 1119 - protein, 230 aa, synthetic construct
  REGION 1..230: note = TnsF-Tn7 System Protein
MWELTGSPPRPGEISLAHQNVLFLDELPEFSRHVLDCLREPLEAGCVTISRAAQQTTFPAKFQLICALNPSPCGHFDGDLSSARATPDQILKYLNKLSGPLLDRIDMQVSVPRQPEALQQQQPVHEPLSNSWRKLVVQARERQHNRQQCLNSELNTKQLTKHCLLTEEDHGFLVKAIDKFGLSHRAYHRLLRLARTIADLEGVNTISRQHLAEALSYRALDRLLQQLRDL

SEQ ID NO: 1120 - protein, 366 aa, synthetic construct
  REGION 1..366: note = TnsF-Tn7 System Protein
MVYTNGRAAGNSVVRGPWPARLKPLDDESLSSWLVRASLANRSTPSQIVNHVWPKWRAWTRDVDRGLDVSQTNALTQISTLHPEVIKQMLLAPIVQKITGKDSLSNSIAWKWVVQRSTRSVNTNRSTQFCPECLRTDHKPYLRLKWRLSFITICTKHQVELLDCCPQCGESVEIHKLKRGKLKYCAHCRWDISDTDTVNCNPGILILTEQLISELRNKEKAESKFELLRFTIALLRRLTDSKYAITDPLLLSLAAQTDECRLSDIRRLSFDWLNSDDRRNLLTMTAPLIELPPKELASVLLNSGIPIGRLRSFVPHLPKSLEQHFPRRETKSCRLNKTSPKSSLKPTPKRLVQRRWETFLKKHGLS

SEQ ID NO: 1121 - protein, 467 aa, synthetic construct; identical to SEQ ID NO: 1115
  REGION 1..467: note = TnsF-Tn7 System Protein

SEQ ID NO: 1122 - protein, 296 aa, synthetic construct
  REGION 1..296: note = TnsF-Tn7 System Protein
MDQFKHLSPKFKEVAAQSNENRIEFLKQKRWISYPVANRVLDVFAETLNHPKQARMPSILFIGESNNGKTSMIERFSHLHGQSYTCEETELLIKPVVAIELSGPNMRDLYYTILQEFWAPITPNETLAMLRRTAIDQMMQSKTKLLIIDEFHTLMNGTARARSEILAEIKRISNKLRIPVIASGVPNAANVIREDAQIQSRFSIVRLPLWEKGKDFISLLKTFETMLPLRKPSNLASREIGEKILNISKGNLGNIHGLLQVCAIEAINNGTEQIDKSIVESFSWYTPTEGPREIQL

SEQ ID NO: 1123 - protein, 296 aa, synthetic construct; identical to SEQ ID NO: 1122
  REGION 1..296: note = TnsF-Tn7 System Protein

SEQ ID NO: 1124 - protein, 1414 aa, synthetic construct
  REGION 1..1414: note = TnsF-Tn7 System Protein
MATLKKKALSHFLRTNCARRLRLDLYPEDSNIEARDERAAQLTMPPADSGRPALVGLTEAGQAWEEEVFNDLIKVFSDEVLFKVNTKSKFTSCSLLDVLNRSELPRFILEPSFTVSPSFEKTFQLNYLSEQLKKRGEHGLRFSKEFRPDIIELITPNDDVDREAISSNGEIEIASQNLIGLRVIDIKLAASASIPYFGEVAFYSMILAAWLVDNNLSDRFFVSAKAAVWPGKHLGSTLGTKYLEAEKAKVILSSEEATSSLHEDLTVLPKDVYTSRVKEFLEEDLPQVLLEQKWDELPWHVSPACIGCEYLGYKWTKNTKIHEEHCWPKAVDKEELCQVIGLTRGASDVLVKHKIKTIKDLSALSATDKVYDKHYTLTASRSVLAERASALGSLTAKRAPRSSNTLLPKSISVYVLLGVEFDISSGLTLAFSWKAWKLHNGKRESLKSDVYIVEEKKHDTERSILLLWLTKITQFLNEHKTENDELKYQVYLWDETSFAQLKRVISRHLTDILNSPDDLASFSWMFPSEEVLPDPKYANSSRPLSIVKSLIMNSVSADIPFYYNMTLLSQQYYPSFFDAAPSSVFSTMYNDPLSDHIPSERAHDIWSKSERNNFHYKEIEKQVIQTCKNKLNNLDRIILRANEDFPLKARPNGPALKLLEPRNDLPGVSHDGEIWYSFASLNNALQEFETDRVQSLDEYEREARFYSIRLDQRITGADAKKILKEHNLHSKNTMVFKVCARSIHSKIKVNSIGYSILPEKLSSEASYKVIYFLRKLGLDYRNFADKHKSILNKPLRNLFDITVEVFDRDSKYIVVRFRDWGSEIRSKLFSTGTVDFSSITAKNRAIIDPIHINFSLKKIKSSIKAIKNPPLANSKPVLSVPNRIKPRQKRRSITPTVPCESFIWAASSLPTKAKKPNEILKTLDLLEASENSKLNESQRDAVSTIHDKKLGIIWGPPGTGKTSTLARGIATLIHHRNINEEAPLRVLVTANTWVAIDTLCRKLANEVNNFNKDLEIDLYRLFSSQLVTPKHLSEPIRLVATSDEKNPDLRQLLHQLRTKNRHTVVFATPQQVFNIRNKMAGNECSTEPMFDHIIVDEASQLDMASMMMVFPSFAENASLTVVGDDKQMPPIFQAEMPLHCESQLGSIFNFYTGYWNIEKTMLQLNYRSNEEIVAFSRNAGYRKEFRSNNAQSKIALQRTNTPSRQSDNWLEFVVDPEKALVCIVHDDTTSPQRSTVETELTVEIIEALYGSLAPSEKSLAYGHDDFFEHGVGIVTPHVAQKSSIYSSLTKKLSSPSIDKSKIYDAIDTVERFQGQEKDVIIVSYALSDRDSIMQEEEFIFGLERFNVAISRAKHKAIVIISKELVKHIPKEIEVVEASRLIKLYSSNYLRNSKKFSLSDPKYEMNLNIKYSDRS

SEQ ID NO: 1125 - protein, 1414 aa, synthetic construct; identical to SEQ ID NO: 1124
  REGION 1..1414: note = TnsF-Tn7 System Protein

SEQ ID NO: 1126 - protein, 481 aa, synthetic construct
  REGION 1..481: note = TnsF-Tn7 System Protein
MESIVDEIEVKICFGCKVELDIPKRKYFGKVFCDYCYQRKFIIKKCNLCQNNKRIFEQDDTCQACLVQTLPCIRCNRIGRKIGKLVEHGIICNSCSVFFRKLRKCDECGKEKRYIHNYSLFDSQKIYCSQCIKKLFHQKCSSCKNKNFIYACNLKQDKFCKKCFLNKKYCRICHIDIPAGSWTTECRNCGAKRLFIERKEEYVKEFDLVVINLYEAVLNVLCEQKGYIIAARMVLQLSPVFKQMNRYYFEFKILPSSSLVKNELKKFKVNYTSLILKVMHDLGSRNHEEFLIKEKIANQILKISITNQFYDCFTSYVEKINKKTSQLHSKRLAITSAVMFVRFVNILEKKEINQMIVDQFCWLHWGQRASLTGFINHLNIYYDLKLIIKDKGKFVFEKRRESNVRLEQQIISILLISESTIKNHLLQKVFTYMHNIEFPDDLKNVDVVRLVSVKDSVRLKGITFYLGLGSLNFTKLNATND

SEQ ID NO: 1127 - protein, 233 aa, synthetic construct
  REGION 1..233: note = TnsF-Tn7 System Protein
MPIKDDFKPVRKPKPVYGSVSGYYAFRGEDTIWFESTLERDLLQKLEFNVNVMQVVSQPVEIPYRTNLDNLSTYTPDFLVQFYETKCYQPPLLIEVKPIQKLKKDWTILKPKLKAGLGYAHEHGWNFKIYDEKRIRDQLLANIQFLKRYKNADFPKDETIRILDRLEEFGVNCVNGLASSLYKSDQKVLQMIAHIWFLIEKKFICCDLTQPLKPTTVIWVNNDLKNYINFEGL

SEQ ID NO: 1128 - protein, 634 aa, synthetic construct
  REGION 1..634: note = TnsF-Tn7 System Protein
MMKEQITLDRRLLQLKVGAIVQYHKNEYQISDILSFEEVIGVHLKTFKSEILRIDELSLSELETDQDNHHIEHSEISEDDWKTAIKRYSIIQEFVDKSSKAEVIQLADQEGLHYTTIYNWLSAYRKSKSILALLPNKRGWKESKSRLNDTTEEIIRQAIRDYYLTEQKPTLSSLAEMVKALCLKNNIEPPHPNTVRYRVRQINEQLVLKSRAGKKAAKDKFEPTTGHFPNANYPLAVVQIDHTPIDIIVVDETHRLPIGRPFLTLAIDVYSRMIVGFYLSLDHPSATSVGLCIVNSILPKNRILLEHDINTTWDVWGVMDTIHTDNGVDFRTEFLQRSCLKYGINWEFRPIGKANFGGHIERLIGTVNNEIHLLEGTTFSNIQMKGNYQSEKKAAITLKELEKWLIFWMTKIYHQRTHSSLNMSPIKKWEQGIWGTKDQAGTGLKPRVNDEITLALDFLPEFKRTIQRYGVELDKLQYYSEVLRKWIGCSDPDNYKVKRKFSFRRDPRDISYIWFYEPDLKKYFKVYTSKKEIPPISIAEYEIVQKNLQEQLKDTTNQDFIYQAILESKEMIKDASSKTKKARKQHEKNLLRDKQALKPPNSSKSPVLELLKSANPVIQDDFWNESIEPYNDIE

SEQ ID NO: 1129 - protein, 351 aa, synthetic construct
  REGION 1..351: note = TnsF-Tn7 System Protein
MKLWFVEPYDDELLSSWLIRTAIAQGCEPLTLTHKIWGRSWRPWTSDLDLNIDSEYLEILLSNTMSQDQLLLLTLKNENNIINSRSPQGRWITKLGIRSLDRTGGLRFCPVCLNQQAYLKKSWRLAWNVCCPQHRCLLQTICIDCSLPFSPHKLSYNRLDIRYCVRCGHDLSLQISFNSSNEIFNVQRKLNSYIKVGDRYIDNDLIVNKVFDKYHFLLRFLNHACAIQTVSDIRLINDLSIEISKKSRSSENIETMSPDWLFELMKIISVIQDKSAIELALFFQEFGYTKQSFTSRIIMNRYSFNKDFLEYLPSLPRKKKELIKKKFTHTVEPLPKEQVLEKWNQLLMKLK

SEQ ID NO: 1130 - protein, 281 aa, synthetic construct
  REGION 1..281: note = TnsF-Tn7 System Protein
MSFAKVYTRGVLGLQAPLIEVEVHVSQGLPSLTIVGLPEAAVRESKDRVRSAIINSGFQFPTKRLTINLAPADLPKDSSRLDLPIAVGILIASGQIPDQAIADYELVGELALDGQLRAVSSILSIALACKKARHKLLLPSDNADEAVQLQHLDVYPAHSLQQVCQHLLSQQPIELHVLQTQEIKGSTLLDLADIKGQLRPRRALEIAAAGNHSILFRGPPGTGKTLLASRLPGILPKLDQDESLTVASIYSIANQPYQFGQRPFRAPHHTASAIALVGGGC

SEQ ID NO: 1131 - protein, 281 aa, synthetic construct; identical to SEQ ID NO: 1130
  REGION 1..281: note = TnsF-Tn7 System Protein

SEQ ID NO: 1132 - protein, 303 aa, synthetic construct
  REGION 1..303: note = TnsF-Tn7 System Protein
MNEFSHLHESVRQIIFLSNQERLKYLYSDKWIGYDRAKNILDLLDDLLNQPIRIRPQSLLIVGEPNIGKTTIIRKFVERHPQTNIEDQFNKIIEVRKHHLLIDAPIGADEKKLYIAILEQFLVAFKHTSPAIQLKQQVVHLFRKFHIRMLIIDEIHNFLTGTPLKQREIMNVLKSLSNELNLSIVGVGTQEAVQILYSDQQHASRFDVAELTTWALDSNFRKLLASYEKLLPLRQPSGLADKEKAIAIHQISSGNLGDIIRLLMDCTKDAIDSGKENIDISIINHFRERKTNQSYRSIRSINV

SEQ ID NO: 1133 - protein, 303 aa, synthetic construct; identical to SEQ ID NO: 1132
  REGION 1..303: note = TnsF-Tn7 System Protein

SEQ ID NO: 1134 - protein, 297 aa, synthetic construct
  REGION 1..297: note = TnsF-Tn7 System Protein
MIAGRLPCEACYWGKTCRKRLMINQATFSEPEMSQIFVEFGEWLMHAVGPKKAAIKINHYLAFFLDMETTWQQVPSYPQLLNHFGAEGLRRVRLPMRWLHEAKGVTLDHQAKSLDSDKRRVRECLSSLPPDSRAEKALLGYWEQLASRIKSAKTSYRSARLALRAAASLLRNTDPAGKRLPAQHDVDDYLSATPGQAASLTGFTNFLNRQHATTLKPVTDATRARKKRKENLARSLIKISKHEEKDDAWMLEWIALSMEYFHGRKVSQKAIRQKKIEASDNGIWITLQDMKYWLPMP

SEQ ID NO: 1135 - protein, 297 aa, synthetic construct; identical to SEQ ID NO: 1134
  REGION 1..297: note = TnsF-Tn7 System Protein

SEQ ID NO: 1136 - protein, 225 aa, synthetic construct
  REGION 1..225: note = TnsF-Tn7 System Protein
MRLPTSVRKIGPTRRSVSGYYAFRGEESIGFESTLERDFLVRADFDLDVLGVISQPCEIPFQHPVTGRWYTYTPDYLVYYQLGDRHYDDYPKPLLVEVKPQAAWRKHWREWLPKWKAALRYAKDQGWTFRLYDESRIRDTTFDNITFLARYKRMTFPPEESQEVLDTVRNMGVATLDYLLTRHFMGIYRTEGISHLWHLLATRQLDCHVALPFSPFTEVWVPDHE

SEQ ID NO: 1137 - protein, 642 aa, synthetic construct
  REGION 1..642: note = TnsF-Tn7 System Protein
MSNNSPDTSDPGKGVTQTRQQVKVAVGEYVQKGETVYRITEVLDFATVIGVAVESGRSSPLSIAELLPIDNTPTSPAPDLTEIEDSDWHEAERRFSIIQPLVDRYLIGREVVSARAKETGVDTATIYRWLQRYRSTGSVLALIPQKPGWKKGKTRIPAHAEAVIKEVIKEVYLTPQRPSAQKVILEVLRRCHERKIDPPSPGTVRSRLRRVPERDRMRAHGFRERAINRFQPAAGQFPNADYPLAVMQIDHTPADLILVDDVHRMPIGRPWITLAMDVFSRVVTGYYLSFDAPSETSVGMCVAHSMLPKDDWLLLHGVEAEWPVWGTPRTIHVDNGPDFRSESFRRSCLAHGINLEFRPVRQPRYGGHIERLLGSLLKEIHDLPGTTFSSIKDKEGYDPEKHAAMTKSEFEEWLVSLICKVYHQRRHSGIGMSPMKKWEIGVFGNAEVHGVGLAPRPADRLSVQLDFLPSFQRTIQTFGVTIDGLRYYDEALRAWINAVEPDNPSKKRSFTFRRDPRDISAIWFKDPTLGQHFKIPFANLSLPSMSVWEHAQARARLRQEGVESTDESQLLRAISELRSHVEESKARTKRSRRQAQRRKDHEKKVAPADPLANTRKAPTPETPPATPDGLLSGNIDVNWDIE

SEQ ID NO: 1138 - protein, 374 aa, synthetic construct
  REGION 1..374: note = TnsF-Tn7 System Protein
MAAPDARDQGSHALMPWTLRVPLLADESLSSWLTRAALRQGCDPLALTGAIWPGWRVWTRDVDRDIPPTRLRPLVKESGIPAPEFQQAALRGDCERINGHPLPEHGTWPWLLALGARNRARHGGQQCCPLCLDQDAAPYFRRAWRLSWHVGCPLHGVLLTDACPACQAPIEPHRLVAEDQHLSQCSRCRFDWRNIACTPLASDTLRFQQHADEVLQANPIFLGDKGVSTTEWFAASSFLLGVVRRASRYPASALAHTLRSLGIPVTDSLLPVTGLPFELLPVSERSALLTAVQRVLDIGLDEVFEAFRRNEVMATALHDPRIPPPGVIRSMMTNGSTHQKNPRSSLPLGHQPKSERAVRAAWARLKRRMKTETS

SEQ ID NO: 1139 - protein, 294 aa, synthetic construct
  REGION 1..294: note = TnsF-Tn7 System Protein
MSTHLHPDLLHILGLSAEERIAFMDQPRWLGYPLANRIIEAMRGLMEKPSRPRMPNLLIVGESNNGKTTIIQRFSQLHGQGYVNEDAEPVKPVIVTQSPPSADEKGLYIAILESFWAPYRPTDPVSKLRYQVIHQLRACHTRLLVIDEFHSLLTGGAVKQRETMNAIKLLCNELMLPIVGVGTRDAVRVLHSDPQHASRFDVVTLPAWTLNQDFQKLLAGFEKILPLNQASQLHEPELATSLHAISGGILGDLHRLLIECANTAILSGAERIDRSVIQSKAWLRPTRGIREVML

SEQ ID NO: 1140 - protein, 294 aa, synthetic construct; identical to SEQ ID NO: 1139
  REGION 1..294: note = TnsF-Tn7 System Protein

SEQ ID NO: 1141 - protein, 602 aa, synthetic construct
  REGION 1..602: note = TnsF-Tn7 System Protein
MTPGKAHKTCGCCGRSMAKAVAVTDGVAYCATCYAREFKKVPCAKCGKTMRSLGGKTPATCRSCKAQDRHCIRCGKPVPRAGLTVEGGVVCPSCVRYYKEPQACAVCGQKSLRLSRDFQEGFTEPVCNHCRCKSYITCPSCGKHRRPAGPDGQGRVVCKQCLERAGPFICPQCGHEGRAHSKTRCEACYWKDAVEKRMRSAVALLSRPWAKEAFSGFTLELRERVGAQPAAMRLEKYFLYFAKLDTLFTTPGDITAEKLIMALGREGLRRYAVPQSYLIRHGIVPAFSDETLQAASAEAAQTALLTASEGQWYAGLLRRFHAHLAEINARYRTRGWQGKQQRFVPRTVTTALRAAKIFLDFLEIGPAAGVQHIQQMQLDRFLVEHPGYRDGIRAFVRFLNRKEKLFRKLKIESVQRNLPKGLILDRDRYTSLLRGWLNPADDVLKASLISTLMLLYAQPAKRLVRLRLTDLAQGATDGMYRVIFGRTEITLDPRVGHLLARYLERRCALATMEETDDTDWLFPGRRHGGHLHEAIVSYYLKKQGVTADSLFTTAIYYAYLGGLRHPKVLVKAFGISDYTAVKYLEMIDPRLTAEVEARVASR

SEQ ID NO: 1142 - protein, 379 aa, synthetic construct
  REGION 1..379: note = TnsF-Tn7 System Protein
MVTRKLRSIPESHQGATAVPPVFRLPDKDEVLFREMLEAYVTRRRGALRHQHKSVDRDTRIILEFLQFSGKAPWYWTEEGFEKWSYEIGVVRTLAVSSQRHYQGAIRGFLAYLIENVKFRNVVRREYGVDLVQICHPENCIPHISERELTRERPALTHAEINQFFNAYDTAITEAASFKTKDLRPLQRDKAMFYLTYAAGLRASEIIGLNVSSFQPNPNIPELGEYGFISAWGKGSRGSGPKHRMVPVTHLPVSALLAWYIQEIRPLFMDVSDANDQALFFSERGRRIALSTFEARFQHGIALAGLEDRGFTPHCLRHSSVTHEDLRFSGEMVRRKHGHTYQATTQGYMHHPDEFVNEEITRAIGSQLDALLGKDEDKE

SEQ ID NO: 1143 - protein, 602 aa, synthetic construct; identical to SEQ ID NO: 1141
  REGION 1..602: note = TnsF-Tn7 System Protein

SEQ ID NO: 1144 - protein, 312 aa, synthetic construct
  REGION 1..312: note = TnsF-Tn7 System Protein
MPLAIVHSRALTGVQAAGVTVECDLGPGLPTFAVVGLAETAVKEARDRVRSAIQNSGFEFPARRMVVNLAPADLPKEGGRFDLPMAIGILAASGQLPAAALAKLEMIGELALDGSLRPVTGTLSSTLAAGQANRAILVPQGNAQEAAFAQSTPVFACANLAEAVAHLRGTDRLPEVIADAEAQESAIPYPDLHDVRGQESAKRALIVAAVGGHHLLLSGPPGTGKSMLAARLPGLLPPLRRSEALEVAAIHSLQESGFDIRHWGRRPFRSPHHSASSAALVGGGSHPRPGEISMAHHGILFLDEMPSLQYCQ

SEQ ID NO: 1145 - protein, 312 aa, synthetic construct; identical to SEQ ID NO: 1144
  REGION 1..312: note = TnsF-Tn7 System Protein

SEQ ID NO: 1146 - protein, 98 aa, synthetic construct
  REGION 1..98: note = TnsF-Tn7 System Protein
MPADRTWWLYLIECRGGGIYTGIALDVEKRYRQHVVGKGAKYTQMNPPVRMVACRAYPDHRSAAQAELAIKRLSCLEKWRWAMAYGPPNSCRAAEHPR

SEQ ID NO: 1147 - protein, 244 aa, synthetic construct
  REGION 1..244: note = TnsF-Tn7 System Protein
MPSSEQLVELFGIESLRRAKKPVSWLHSEYGIEIDPTRKKETSEIQQINKMIEQSSLKTNFLTMIDSYRSYLFDKYSKQQTTLRSIRLALRPAISFFISCQNEQQAHPGQDELQHYLNSKPGQRAAITGFINFVNDKYRLNMNIKNIRHRKINHKQHIENQLISLLKTPKKDDGFLMQWVSVGLSYFHNQPSHVITRVSETDVSLENENMIAVKIADKFLWLPHWNNNMGTEINQDGENSITLR

SEQ ID NO: 1148 - protein, 285 aa, synthetic construct
  REGION 1..285: note = TnsF-Tn7 System Protein
MKKRIQMDCTAFSLPKMAMHFEAFGYWLMGQVGENKAAMTIHRYLPFFMEVERNWKDFPEFAVLLMHFGTAKLRCVLLPMRWVEVTGLVVPDEAAKADDSELRRIVVILDKFAKGMKERTLLEGYYRTLMESLNAGKMTLRSVRLALSPAAALLCKASEMDQIPPNQKVLCIYLAKVPGQRAAISGFVRYLREVHDAKIALPKANPGRAQRQRRKRLEMELLALMTKGGSNQEFKQQWLSVALQYFHGLDKKIRVRMNDTKLSSSNGGVIVTWQNQNYWLPICWE

SEQ ID NO: 1149 - protein, 600 aa, synthetic construct
  REGION 1..600: note = TnsF-Tn7 System Protein
MATETPYPLKRYSQVIRLPGPLFDDDKPKVAWWYHGVYKNSSKDAQPHVKIIFRELTNGMLGDYYSQREVPITWLGQIRIGSVWEKNVSHYAMIFEQAEFIVDFSFGKHKNNSFSYAKNLNILPPFPPETYQLGYQPDSNWMIEFDLPSTGKLVVPCLEFFSRCYGRSSEIKRVLTTYAWDVPNGAKYRLYAPLNEPEVNGVWKVKLRRRFVNSDVVFLAHLKYDKKHAQKQAKSIFSTLDVSHHNKKDSLKLGPHFLRINPWFQEKTKMIVRGIPFNDGKSFLALHVVGCGEPGGLDIERSRENANNPLTKGTNLVPGAYSGTPIKHLITPPSIVDLTGDIDPQHAVSAIELHDEDFIITGKPRYVIDVRNKESKSTAGIRGGDLDATNYSAGEPIGSNGSTGYASIHAGQTLETHGILRDMWNAVKFLKQKHPQRIKSVAWYCADRTFSHHDEFALIPAKEFSLSEDIETSVRNWVYINSLKTQVRGFLVIRIVIDSTSIFIVEIQRKLRKTTDKHGNTYQAEEPFQGLVFKLKKESELHEWLGDLFSNIRHAEGIFKKISGTCPGMADTFSHAESKNEEVTCENTVLLALRKLDIRL

SEQ ID NO: 1150 - protein, 285 aa, synthetic construct; identical to SEQ ID NO: 1148
  REGION 1..285: note = TnsF-Tn7 System Protein

SEQ ID NO: 1151 - protein, 231 aa, synthetic construct
  REGION 1..231: note = TnsF-Tn7 System Protein
MHTNSYDEVKPRQIRKIKPTRRSVSGVYAFRGSSGVAYESTLERDFLIRTEFSLNVLDVIPQPAEIPFVSSNGRAYTYTPDFLVYYRLGSHSYYDYPKPVLVEVKPETEWRKHWREWLPKWKAAWSYAQSQGWEFHICDESRIRDQTFDNIRFLERYKRMPFSAEESQWVLETVRHMGCATMDYLLARHFMGIYRAEGIAHIWHLLATRKLDCDISRPLNEFSELWIPTNE

SEQ ID NO: 1152 - protein, 642 aa, synthetic construct
  REGION 1..642: note = TnsF-Tn7 System Protein
MNKNDEVEIPNMAFEPNRKRIKIDVGSFVQRDNIVYQIAQILDFESVIGVAAETGRSTALRIGDLRPVADIKDTKLQVNQDLAEIADKDWQIAQQRFAAISPLVGKLQIGRDEAERRAKELNIDPSTLYRWLQRYNAYGTVTALIPKKRGWQEGKSRISPDCDEIIEKTIRDYYLTVQRPTAQKTIMEVQRLCAERGIKPPNHMTIRARIAKVSEKARLRGRGFKEKALNKFLPVPGSFPNADYPLAVVQIDHTPADIILVDDIYRKPIGRPWITLAMDVHSRMVTGYYLSFDPPSETSVAMCVAHSMLPKDDWLLLHKVDTSWPIWGIPRTIHVDNGADFRSNNFQQSCLAYGMNLEFRPVKQPRYGGHIERMLGTLLREIHDLPGTTFSSIKAREGYDAEKHAAMTKSEFETWLVTLICKVYHQRLHASIGMTPLKKWEIGIFGNSEFQGVGVPPRPGDRLTILLDFLPAFRRTVQTFGVTIDGMSYYAEALRPWINIEDSETKKKLDLIFRRDPRDISAIWFFDPALQQYFKIPFADQSLPAMSIWEYQQAKEKLKREGVASVNEHGILRAITELRTYVEEAQERTKKARRQAQRRKEHEKNISPAAPLPAKSIQAEVSSRQAFTGLIDGDIDTFGDIA

SEQ ID NO: 1153 - protein, 296 aa, synthetic construct
  REGION 1..296: note = TnsF-Tn7 System Protein
MSSYKHIHPDFHHIMLLSDKERIEFLDEPRWIGYKTAQQVMDTLQGLLHKPVRPRMPNLLLVGDPNNGKTTIVRRFFDLCGQGYVNEDADPVKPIILAEAPPSADEKSLYISILERFFTPYRATDPVSKLRYQVIHLFRACHVRMLIIDEFHSLLTGSAVKQREVMNAIKLLCNELAIPIVGVGTREAVRVLHSDPQHASRFDVMSLPVWELNPDFQRLLADFEKVLPLKNPSRLHQPELATALHAISEGNIGNLHCLLVECAKEAAKSGKEQIDKVIIESKAWVRPTRGIRERMA

SEQ ID NO: 1154 - protein, 296 aa, synthetic construct; identical to SEQ ID NO: 1153
  REGION 1..296: note = TnsF-Tn7 System Protein

SEQ ID NO: 1155 - protein, 181 aa, synthetic construct
  REGION 1..181: note = TnsF-Tn7 System Protein
MTTLAAFPDGLKHTALNGYYRNLLTRVEQGTTSQRSVRMALTSAGEALLACGPDRDDLPSTQSMLALLRKSPGSTASLTGFVLYLNKCFNRDIDIQLMKQRAQLYAQQKLEQQILDLVQEAQSGVEVEERWIPLALKHFHKVTRMPPGDQLQVRTADEGGLWITLNAREYWVPDPRNLSQA

SEQ ID NO: 1156 - protein, 230 aa, synthetic construct
  REGION 1..230: note = TnsF-Tn7 System Protein
MIGNSCDSPTPRQTRAIKPTKRSLSGVFPLRNQAGIAYESLLERDFLFRTAFSVEVDTIIPQPVKIDFTGRDGRIFQYTPDFLVYYHLGNRHYDDYPKPMLVEVKPEKEWRQNWRSWLPKWKAAWRYAHDQGWVFHIHDENRIRDNVFSNIEFLERYKRFNFPVENTDWVLETVRQMGTVPFHYLLARHFSGIYKAEGISLIWHMVATRQLDCDIRQPLNSFLELWVPER

SEQ ID NO: 1157 - protein, 1677 aa, synthetic construct
  REGION 1..1677: note = TnsF-Tn7 System Protein
MDVSYWEGGLLSFEIDAIDKMAKAFGPKELPSEPGPGSTKGKSFDVLKQLKKPEAGNGVWPWRGYAGFRFANSRGSDGEFDLVIVTHSLVLVVELKHWRGEITNHGGKWHQDGKETEVSPVDKTRRKTFELRKRIKGLKSQLPNGKEPWVDFCIVLTGKCTLNLPEVEMQHVMLLDDFLEMADPKRFKDRFNARSNIGLNEHFGFFDDIINEGTVKPKELVVDDYRAQSQAVFTHPTEVYREYDAVNIHNKDDHAMVRLWDFSKLDDTRARTAEGRYRILSRERDVMVHLRLRDQELMHRCARPKRNASPDSVTEQYAELLEMPDGHYRLNEFINRFVERMTSLERVQLFKILLAQFAGLHGFNIAHRDLGDHSVWFSPSLSIALSNFISAYYQPVGTLGDLRTLLSIGAIALPEDQDTAMEGSTPFRRDVFALGLMGWHLLEARPMPLKLDVAYVAGVQAQVESSEDWPAKVLVQALRNDPKDRFDHASAFQQALSESTPDNSASFEFDNRRLDVFSTDLRLSSAYREDDDPIADTAEKLIYRSGPLVVKSWPSINARDPKDGQGPMLMAFFGVLEQLKGSGFAFLPKIEHFGYDRSGNPFLAQEHIEGEHWDELKGLSVDARIVVAHGLIEAIDGLHGQQLGHGDLHPHNVKVNVGSAPENTQVYLLDCPDFSVSGASPVNTRYSPILENCTPAERDNFAVMRMVFELLDMDWDVPSPKDIPALRTAVAHEMDTESGFFSLERFKDALDAAFTPAKTVETVSVVIRNRSGEVFEILPDNGKVFVVVKPDQRAPTKALEVTFAGVGGQLMTEFNPASKQFINAFRANQEMRVPPYLARQANHHIEARLSVSGGASVNVHELTKLLAKDEAFLNLAAQVHDAEVRKQTSIEGGESVAGSITGEDEDNGLVIDEAELEAVKVRSFPVSQIWKTITTTELEAQPSFRVSEEPHFHKDGLGLLIPYPIDAKALEGFEAGDNIRLILRDGEKDIDIGEINLGMSVRAAVYVLASSRSKRVQAGSQLFLQSQQNKTSMARRRGAMERILNRQSVLPDLMDYFDERCKLAPRGYSDEPTDADFAVYERTTASGAVIGLNEAQRAAFTQLITTGPVGLLQGPPGTGKTEFIAAFIHYLISKVGVRNILLVSQSHEAVNTAAERIRAHCRRLNTELNVVRFSNRDQVVSEELLDVYSRNIVDRQRNGFSAELKERVGYMASSLGLGKAFVQTMVDVNQGVFQLVRSLKKLDEEIQRTQADGADRKALQTLKSSLLGELNLNASLFLGELVDGESPPQKLLERIYDHVQTVHGVRAPELKHCLELIQLSQEYVERLSSNKANYDEFLMRSRTLVCGTCVGIGLQHLKLAETHFDWVIIDEAARSAPSELAIAMQVGSRVLLVGDHNQLRPTYEEDHKAAIARSLGVTTGSAEFQHVMRSDFERVFQSPYGRATRATLNTQYRMLPAIGDLVNDIFYDIDLNNGYRPSPPYFSQKVPECLSHVVTWVDTSGLGKKAYDSGTLSLSNNAEADAIIQMLEEIAEDTEFCAGMAKEMAESQEPPIGVICMYLDQRKLVRKRFAEKNWSEEFRKLVKIETVDSYQGKENNIIIVSLTRAKADQSTGFLATPNRINVAMSRAMERLVIVGSLRMWSGRNARLPLGQVASFIQTKQDTTNYCIKPVKPARRVV

SEQ ID NO: 1158 - protein, 1677 aa, synthetic construct; identical to SEQ ID NO: 1157
  REGION 1..1677: note = TnsF-Tn7 System Protein

SEQ ID NO: 1159 - protein, 640 aa, synthetic construct
  REGION 1..640: note = TnsF-Tn7 System Protein
MSWIENKENALVPYEPNRARLNIDVNSTVRFGDNVYRISQILDFKTVIGIDVESGRAASLAIAALIPIGQDKVDGLYANYDVSAIASEDWAIAQRRFAAIEPLLGHAIVGRKETEQRARETGVDAATLYRWIGKYNEWGELLALVPRKRGWQTGNSRISREADELITKVIKDYYLTKQRPSVQKAIEQVRELCDQSKIPPPSATAIRARIKAVSDRDYLRGRGFADKARNKYTPSPGTFPGADYPLAIVQVDHTPIDVMLVDDVHRLSIGRLWLTLAICVHTRMITGYYLALDAPSGISVAMCVAHAALPKEEWLTVHGIEGDWPVWGFPSVLHTDNGPDFQAETLKLSCSNYGIENRFRPVKRPKYGGHIERLLGKFMDKIHALPGTTFSNVSQREGYDSDKQAVMSVSEFETWLVREILKYNESYHSKIFMSPSRKWHIGIFGNTGVDPLVGLPMRPADPLTVQRDFLPSYERTIQHYGVELDVRYYSEALRPWINAKDEQTGKTRKFIFRRDPRDISLIWFYDPLLKQYFKVPVANQAFPAASVWEYRAAKKKAVEEGQTHVNEDLIKRYILENRDLVLSSEAKTKKARREAQRHRVHAKKVTPAQPNPKAVASKCEEAPMLMDMLDIELDSFGDIS

SEQ ID NO: 1160 - protein, 244 aa, synthetic construct
  REGION 1..244: note = TnsF-Tn7 System Protein
MRSRVNELFTQGRSAPGSRSIMAMMQDDGEQIGRFKVRSLMRELELVSKQPGSHAYKKATVERPDIPNVLNREFDVSAPDHVWCGDITYIWAQGKWQYLAVVLDLFARRVVGWALSEKPDADLVIKALDMAYEQRGKPQGLLFHSDQGSQYGSRSFRQRLWRYRMRQSMSRRGNCWDNAPMERVFRSLKTEWIPPMGYTTVQQAQRDISHFLMHRYNWIRPHQFNGGLPPAQAEKKLNAVSGIS

SEQ ID NO: 1161 - protein, 206 aa, synthetic construct
  REGION 1..206: note = TnsF-Tn7 System Protein
MAHHGVLFLDELPEFDRRVLEVLREPLESGHIVISRARDRVRFPARFQLVAAMNPCPCGYLGEPTGRCRCSTEQVQRYRNKLSGPLLDRIDLHLTVAREATALNPDPTTSENTASAAAVVAQARERQQRRQGCANAFLDLPGLREHCALSSVDERWLETACERLTLSLRSAHRLLKVARTLADLEQVDAISRSHLAEALQYRPSNN

SEQ ID NO: 1162 - protein, 1061 aa, synthetic construct
  REGION 1..1061: note = TnsF-Tn7 System Protein
MLALVAIGVHTAAAFGAAVTLKSLLIQLMRADSSVLSNITQGTTCLLLIYCAWLALNHTFFLAELVGVGSRSYVEQRVLIKRTVAQNGIFALSLTTLLDREAARVESSWSGLITIALALATVLFTSAFFFLALGASAVAALAVIAGSSMIVFWVAQRLGATYEQLSLSATQRIEVGVFATKNRRQAWLKNWNAELIRDYAAKRNLEEGSLKKAARLVAAISLISTMTPITALLSSALLQLIYLGQVDTPGVLAAIALIGGLKSVANNIPDIVQSISQGFVGHRHIEQYLDAPGPVNPPCATSIPPSTKAKHIAIVGAAGSGKTSMLRNCAQRFPGADDQAIFIPDEPWIFAGGLGENLSIYRREFSDEEVQEAIALARLPGDFYLDYIRERDCGAIKQWDVSRGQGKRIELVRALVARTDWIYIDQPTSGLDDALAAGLLRTLLDGPWRDTNVMFVTDKPEERDTAEEIWTVSGGRIIDIKTHHACASSRPLASPVASSFSASSPPKAVHSKNDSTEQPERVSRSITSSLIAFGTGAITLVAFTLMALKEVLTIAGDYLIASGYLGTHLNASLLGLAGVLLVSALLSISGALVTAKKCIEAASAHCNRYLSYLMNPGLDERLTQKINHDSQNKLTWDQRRVDEVLPVLLLETIGAATLLSVTAGYVVLNNIYVLFPFVFISLCYWRGARRSGELLKKSNTREIDTTALLFTRIQALSWDGGRFESMARNSSILNWLSGNLAARAFASLDNAAMRRWYSYKLDLMGVFFLSGIVASTLYFHAIGVATMANVLAVSLSYSLIAIFARLGRCVVELRQVLDSADRLVVAGLLPTAAPRCQYVQNGAPLVSFSNVTFVNPHSGITVLEDFDHAFHENDVVVIMGASGVGKSTFASLVVGSLLPSQGQVSTLGGTIGYLTRPHAEDVQLLTSSPIFKPGPLFEHFNSTSQEELYQQASYLGLSSIIERLPEGFNQEVAWSGDVNLSKSELQRLALLDLTINAPSIAILDEATSELDSVEELQLIRKLMAALPKTLFFIITHNAELSALGNRNFTFNSEKRLVEKTI

SEQ ID NO: 1163 - protein, 1061 aa, synthetic construct; identical to SEQ ID NO: 1162
  REGION 1..1061: note = TnsF-Tn7 System Protein

SEQ ID NO: 1164 - protein, 142 aa, synthetic construct
  REGION 1..142: note = TnsF-Tn7 System Protein
MLTGSVVKQREIMNTIKFLCNTLAIPVVGVGTPDAVRVLHTDPQHASRFDVMPLRIWEPNADFQRLLKGFESVLPLREASGLSKPQLAMLLHSISGGNTGDLHRLLIECTTEAIKSGKEHIDQAIIESKSWLQPTRGIRELI

SEQ ID NO: 1165 - protein, 653 aa, synthetic construct
  REGION 1..653: note = TnsF-Tn7 System Protein
MAKPPQQPRVTEVIDLVRPLVPEILPERLAEIVHSVAPVPLTQRLLELALIKQPGVLEGRHANVPVTVQDLARALVEEGADRVVLPTCESCGRSVRMPHKTPSGGRHCSRCERNARSVSCASCGRVRPVQRTIDGQRFCRECWRADPRSFGDCSRCRQHATIIVRRPELVCLACYTAPIKTCGLCGEPGRVGSHLDGRRVCARCYYAMRRPQPCPECGRRVFLTGFMNGQKVCADCAGAPVTMACPGCGSIEEIRKHHLCVECRRPVAIQQLLADDAGEIRADLHPLADYLLTHHSKAASLERWMHKSKCAMVLREIADGTLPLTAEAIITRARSGQSVAFLLSLLVRSGVLPEIDVEGTRFDHWLDGWLAGIEHAEDRLVLRRYCTWELLRSTRAFRAVPRSTSSPAAGFQRQRAALKYCAALLREIRSQQETLATYPQRRLDAYLTDSPSQRDALAPFTRWLRRHRMSTLRVEFRAHRLEGRSYASDHRWQMARKFLSDAGMDPKTRAAGLLVLLYGIQLTRIVTITRTQIDTSSRPVTLTVGAEPIGLPEILGDAISDLADAAKHHPEGWLFPGRNPGNHLTPGPLSRRLRAEGLLAGSARTTALIELTRQMHPRIVSDLLGITTSSAAAWSRLAGGDWSDYPALRSDHA

SEQ ID NO: 1166 - protein, 563 aa, synthetic construct
  REGION 1..563: note = TnsF-Tn7 System Protein
MGHIEANSVDYFLPDGRPLLGGVSLRVGDGAKVALVGPNGTGKTTLLRIISGELDAHDGAITRSGRIGVMPQFIGKVGREGKQVTVRDLLLTVAPLPIREAAATVDRTELAIMERDDESDQMAYAQALADWAEVGGYDWETLADVCTVAALSIPFDQAQWRDVNILSGGEQKRLVLEALLRGPEDVLLLDEPDNYLDVPTKRWLEAQLNASPKTVLFISHDRELLSTVATRIATLEPQAAGAVCWVHPGSFDTYQQARIDRNDRLEELRRRWDEEHTKLKTLVLNLKVKSTFNDGMASRYHAAQTRLAKFEAAGPPQAIPFEQKVTMRLRGGRTAKRSVICEGLELTGLMKPFDCEIWYGERVAVLGSNGSGKSHFLRLLAAGGSDPDIEHRPVGDFVPDTVQHTGIARLGSRVRPGWFAQTHQHASLTDRTLLDILHRGDEHREGMPREQASRALDRYELARSAEQTFGSLSGGQQARLQILLLELSGATLLLLDEPTDNLDLHSAESLEEGLDGFEGTVIAVTHDRWFAKGFDRYLVFGGDGRVYETPAPVWDETRVVRDR

SEQ ID NO: 1167 - protein, 563 aa, synthetic construct; identical to SEQ ID NO: 1166
  REGION 1..563: note = TnsF-Tn7 System Protein

SEQ ID NO: 1168 - protein, 351 aa, synthetic construct
  REGION 1..351: note = TnsF-Tn7 System Protein
MANPEEQVFNAMIEGWRNQQLSRGLREQTIRNRTATVSRFRDFVDKPPWRWTVADVDEFTAESGGRTRTLSTMRANHGSIRGFCNYLTNPLYDWMEICDREFGEVPSQVCLPWNTVAHRFEFEGDGKRRPFTYDEIERLFDTADARVELLVASGRKGALGALRDAQLLKTVYAFGLRRTEAVMLDTVDLHHNAKMRQWGRYGAIHVRWAKAAGGGAPRRRTVLLVPEFDWWVPGMQQWLEQARERFAPGVDLDALWVTERRTRLSAGYLDRRFAELRDEAGLSKDLTLHSLRHSYVTHLLEFGYADRFVQEQVGHMHASTTSIYASVSSDYKNRVLAEALKALIEGEADDR

SEQ ID NO: 1169 - protein, 111 aa, synthetic construct
  REGION 1..111: note = TnsF-Tn7 System Protein
MTVELDTGWNLRRVMASRGIFQTSKLKPLLEERGIDLSREQVYRLVTQPPQRVRLDVLAALCDALECSLDDLVTIARREASTPVAVGEEATRGSIGDLRPVRATIRRPRTK

SEQ ID NO: 1170 - protein, 743 aa, synthetic construct
  REGION 1..743: note = TnsF-Tn7 System Protein
MLTSASSDLPLTLVHIAHALHESGFPDVVLPACLDCQATVPQLRNVVDGGRVCDTCLRLRQRVACSACGALVRPGPAVRADGLCRPCRSAARPVETCAGCGRQATITHRQADGTGLCQRCHRAPAGSCSRCGAVGRVYQRGDDPLCRACYTAPHLACARCGRVRPVHARSDDGPVCSSCHQRPLRKCGHCGAIARWHTRPTNGQPGYCNACHRRPVQPCASCGQQRPVSRHKAADGAFTCDTCRARPATCTFCGRHRLINVRWPIGAACSGCYQRIRRAPQPCPRCHQHRILIGLDHIGRRLCAGCADLDYDYTCRRCGASGSFPVDRTCYRCLAQARIHTLIAVEGEDVTARQALAEALLAAGTGEAVWRWLRPDGPTAALVTAIVDANMPLTHDLLDALPQQQALHRLRAVLVQHGVLPARAEQLERIEPWLEQQLTTLNAAHAHLVRTWARWTLHRRARQRLARRPFTGGAAHYQRACLTAAIRLLTWIDGYHLTLADLTQADVDRWRVEHPHEYSYLAKEFLRWARRRHLVGDVTITPRQRDHNPDALTEDEHWHHLRRALTDTTLPLDVRTASSLNLLYGMTLARISRLHTAEVLREAAAGDTHTYLLLGKHRLRLAPAVASLLHAQITAAARHPNAANAGPRWIFPGGLPGTHVAALHRKLARHQMPRAAHGRATALINLAAQLPPPLLVDLLGINIDTANQWARHASPDWGIYLTTRPAPTPTPGQKPRQARRADR

SEQ ID NO: 1171 - protein, 743 aa, synthetic construct; identical to SEQ ID NO: 1170
  REGION 1..743: note = TnsF-Tn7 System Protein

SEQ ID NO: 1172 - protein, 373 aa, synthetic construct
  REGION 1..373: note = TnsF-Tn7 System Protein
MGVRSVDLPGAVHLVLPAGVVQLDPQRAVFDGMLESWWRQQRSRLSRESTIKPRIALVRRFAEFTGLYPWQWTPGEVEAFTSSLVSGGRPLAHSTVRSYQMTLRLFCEFVTDRRYGWAEECVRRFGQPPVQVCHEWNTVAHLSEYEGRPGRRALTYDEVQALFDAADDRVAVIRGRGRKGVLAAWRDAVVLKTVYAFGLRRQEAAMLDVVDFRRNPRVPRYDRFGSVQVRYGKASRGGPARRRTVLTVPEMDWVVDLLREWVQELRPQFGPGEHPAMFVTERRGRISRGYLDVAFRRAARDAGLPEELDLHSLRHSYVTHLLEFGYPPLMVQQQVGHSHASVTALYTSVSDEFRNRLLDAALARFPMAEGAAG

SEQ ID NO: 1173 - protein, 371 aa, synthetic construct
  REGION 1..371: note = TnsF-Tn7 System Protein
MHPTTAAAGPPAAGGNRRPGYLYQKVAAHLAAHPDQIFTVGELTKTLDVPSTGAVFDALKKMAAAGYTTHLTRPHRFQITQAGIDAAGQMPPPAPHPPRQGQRGAGRRQPVTRPNGDLYFPRKLAGATDVDVLQRLRDKRIPVLLYGPPGTGKTALVEAAFPDLLTVAGTGDTVVEDFLGNFIPLPDGGFEFVYGPLVTAMREGRALLVDDATLIPPKVLAVLYPAMDGRRVITIPSYRNERVEAADGFYVIAGHNPGVHGAILTEALASRFDVHIEVTTDWDLARHLGVPRPAIEVAITLNADLAAGRVSWAPQLRELLGFTRVRKTLGAAAAVANLVGRAPQEDRDHVLAALKQQFGPDISALTLGKQR

SEQ ID NO: 1174 - protein, 371 aa, synthetic construct; identical to SEQ ID NO: 1173
  REGION 1..371: note = TnsF-Tn7 System Protein

SEQ ID NO: 1175 - protein, 110 aa, synthetic construct
  REGION 1..110: note = TnsF-Tn7 System Protein
MTKRMGIVWHLRLRMAEKGLFQTSELVPLLAERGVQLSREQVYRLVTTPPQRLSMDILAALCDILDVTPNDLIEVTAVNTQVRKAAGGGTAAAPARSAAKRTVIRRPDGA

SEQ ID NO: 1176 - protein, 632 aa, synthetic construct
  REGION 1..632: note = TnsF-Tn7 System Protein
MRKVVGEFIYAAIAAGATGLVSPACALCSRPRTLFHSYEDGQRICTSCYSRLRVAICVVCERQDQRIMAVTDAGPVCGRCHQKTRPREACAECGRNRVLTHARDDGRGYCRGCRARRKATEPCARCGVDRRVNARTEDGQALCPSCYSRTSEDECDECGTIGPLVVRAGGRRDGSRDLCVRCYRHPRRRCGICGRDKRIALRATETSSDVCPTCYQAPVIACSLCGQQALGRRTTNRGRPRCFACQAAQQIDAARTGPDGSIRPELAGVCDALTGLERPRSLLTNWHNLASLRLLSDIAAGRLELSHEALDALPQVFSVTYLRALLIAAGALPARDENIARLHRHAAQVVADVADPEMRGVLTRYARWHVLGRAKTDRQDKIAPGVAARCRADIDTARGFIDYLTAREHDLDDCPQALLDAWITADRTRRLGLIRWLKRGGYLPLVRLPEPVPRKDPAHEIDPTAQLALARTLLHEPDSASIEDRAAACLLLLYAQPAAKIVTLTTDDLEVRDGDTYLALGDEPVLLIPPLDALVTALPVAKPFGAASILADSRWLFAGKNAGTHLHPASLMRRMHQLGIHARTSRNTALLHLASTTPPAVFASLIGLSIGTATRWAALAGASWNSYAALRR

SEQ ID NO: 1177 - protein, 632 aa, synthetic construct; identical to SEQ ID NO: 1176
  REGION 1..632: note = TnsF-Tn7 System Protein

SEQ ID NO: 1178 - protein, 374 aa, synthetic construct
  REGION 1..374: note = TnsF-Tn7 System Protein
MVFSDDQVPGVGVLSSGNVSLLRPAEQFFDEMVAGWSAQQTSRMLAAQTITTRASQVRRFADFCNAPPWEWSPADVEEWTTSLVSGPQPLSVATVRAYQNAVALFCDYLIDHRYGWVDRCIDLFDTHPVQVCHEWNTVIHTSDHEARPGVRPLSREELQMFFDYADDLVDQARSSKRKGWLTLFRDATLFKMIYAFGLRRREAAMLDLPDFTRNPQGWEFGRFGVCNVRWGKAMRGSQPRRRAVLAVFGWTRPVIEEYVTEIRPRFDLADKTILWPTERQGRIRLKHIDDRFAEWRNDLGLDPLLHPHCLRHSYVTHLIEDGYDPLFVQQQVGHRWGSTTALYTGVSGDYRNRTLRRALDAAFTPPEAIEGGSR

SEQ ID NO: 1179 - protein, 486 aa, synthetic construct
  REGION 1..486: note = TnsF-Tn7 System Protein
MHSAVLVAPAKERRRLRKQRRQAAADLVAEQRQKEQAQAREKKAAERAERRATRYLPAAGEPGPAILRTPGRFRLPKHQDTSAMLAGAYPFLAEGGLGSQGVFIGQDLYSGGSFVYDPWVLYANRVITAPNVVVAGIVGSGKSSLAKSLYTRSLGFGRRVYIPGDPKGEHTAVAEAVGGRAIKLGHGLPSRLNPLDEGYRPAGMSDEQWTATVVSRRRDLIGALTETVLARPMSPLEHTAIDTALAATMRANSVPILPMIVDHLLNPAHDDDGRLKEDGRMVGHALRRLVAGDLAGLFDGPSTEVFDPSLPMISLDLSQVTENSTLISALMTCSSAWMEAALLDPAGGQRWCIYDEAWRLMSQPALLKRMDAHWRLARAYGIANAMIFHKVSDLDNVGDQGSAMRGLANSLLANAETRIIYRQESDQLDPTSAALGLTGTEQALLPTLGVGQGLWKIKGSSYVVQHQLHPAENRLFDTSSRAAARS

SEQ ID NO: 1180 - protein, 486 aa, synthetic construct; identical to SEQ ID NO: 1179
  REGION 1..486: note = TnsF-Tn7 System Protein

SEQ ID NO: 1181 - protein, 115 aa, synthetic construct
  REGION 1..115: note = TnsF-Tn7 System Protein
MTKTVAYHWHLRKVMNEHGMQSTTDLVPLLADRGVVMTSTQVYRIVTGQPERLNMAFLSALCDIFGCTPADLIEPYVASSSQRGRKTGTAGRVKPSASGSKNRPTRATIRGADES

SEQ ID NO: 1182 - protein, 470 aa, synthetic construct
  REGION 1..470: note = TnsF-Tn7 System Protein
MQRAHKIYLTSRYCGTCYARLFKPRMCPGCGSRTRLAIFDDLAVCTSCATAGPCVRCGRTGRPVGKLTAYGPACNSCAHYFTEPGHCEVCNTLSTRLTKKRVGERDLRCCPRCWNTSATCPSCRRHRNLIPGRNGVMECRLCSQIGETSCGACGSEMPAGYGRECQNCYYIRTFRKRLRINTAALSCDSYCQAYAAYGDWLLKKTGGKRAALLINRHLKSFMEMKSRWPELPSYRELVESFGAQWIRRAQLPMEWMIELRGLQVDHELKAEHTELRRIESIISSMVSGASRTLLIDYRKHLESKPNKRRNSSRSIRMALRSAANLLTTGAAAGQELPSSSSLWSLLAETPGAAASLKSFVSYLNARYSLGLEYPKDNRGAIKLRHHRFELEIKALMREAALGRDVLDRWPAAALGYFHGVTRFRKADATFTPDAEQVGMLVSLQGKEYWIPMPPGAAVGESKDFGPTPSE

SEQ ID NO: 1183 - protein, 227 aa, synthetic construct
  REGION 1..227: note = TnsF-Tn7 System Protein
MVGNSCDKPRQASVRSIKPTKRSVSGVFPFRGEGGIPYESMLERDFLLRTEFSKDVLAIISQPVSIPFSTNGRPYKYTPDFLVYYRLGDRHYEDYPKPMLVEVKPETEWRKNWRAWLPKWKAAWRYAHEQGWTFHICDESRIRDTALQNIQFLERYERMTFPPEESSWIIESVREMGVAPVHYLLAKHSCSHYRGQGISHLWHLIATRRLICDIRLPFNDHLEVWVA

SEQ ID NO: 1184 - protein, 638 aa, synthetic construct
  REGION 1..638: note = TnsF-Tn7 System Protein
MNSDEYEEQLIPFEPDRQQVPIEVDALVAHGDAVYRISQILDFRTVVGIEVESGRAAALPIRGLRALKQGKVEGLYANYDTTLIGSEKWAEAERRFSAIQPLLKDALVGRRLVEARSLEVGVDVATLYRWIKRYKEWGEKLALIPRKRGWREGTARISDEASQITEKVIMEFFLQPHRPTIPKTIEKIQEACEAEQVTSPGTTAIRARLKGIPDKAYLRGRGFAEKARNKYNPTPGSFPGADYPLAVVQIDHTPLDILLVDDVHRRSIGRVWITFAIDVYSRMITGYYLALDAPAGISVAMCVAHSILPKEEWLIAHGVDGEWPVWGKPKVLHADNGADFQSEDVKRSCSNYGIENRFRPVKRPRYGAHIERLMGTFAQTLKDMPGKTYSKKSDRDGYDSEKHAALTFDEFETWLVREILIYNESYHSKIYMSPSRKWHIGIFGNIDQDPLVGVPPRPADAFTLQRDFLPSFERTVQHYGVQIDMFYYSEALRPWINAKDKDINKARTFVFRRDPRDISFIWFFDPVLLQYFKIPVSNQAFPAASIWEFKAAKKRAVDEGHANINDALLKRYILENRQLVSTAEAQTAKTRRQAQRHRVHSKGKTPAQPNPQSKILPVTNNGLETMIDGDLDAFGDIS

SEQ ID NO: 1185 - protein, 206 aa, synthetic construct
  REGION 1..206: note = TnsF-Tn7 System Protein
MAHHGVLFLDELPEFDRRVLEVLREPLESGHIVISRARDRVRFPARFQLVAAMNPCPCGYLGEPTGRCRCSTEQVQRYRNKLSGPLLDRIDLHLTVAREATALNPDPTTSENTASAAAVVAEARDRQQRRQGCANAFLDLPGLREYCALSSVDESWLETACERLTLSLRSAHRLLKVARTLADLEQVDAINRSHLAEALQYRPSTN

SEQ ID NO: 1186 - protein, 592 aa, synthetic construct
  REGION 1..592: note = TnsF-Tn7 System Protein
MQTTQSEKPQSNATPEKFEILCARVGAARVRFQPPKDAPKILVAIWHGSVSKNPGKKNTTPISNVVFRKLRSDNSLGGIHVVPSAISFLGTLRVGSVWSDGAQIGRLAMTMLSPTEVCFDTGAWKCVTAREAGVPERYRGFGLPSSQYNSWLIRLPTYTGKTILVPCLEFFTRCYGRSSETSRLIATYGLDAVEKNYFYGHERDSRTLKLQLRNHISHKEAVFLAHALYSDYTQRKCDDVHNLLKALFSPKDKIFLKAEPWFEGKAIIQGDGFWMDNDTFLLLNIDGISNPEGSAITIERQRYTADEGVAGTGRAYKKPPPEEASNQEIDLIDTEAPDNNHARVVLDSPLSTLGIKRKLIKTKQRIPGKRGTASPGDHRTLLAPGDAHRGGKGGGKSEAESPEWLVEGTLQQMWQTCTGLAKNHPQRISNVGWYTLPLGLQCEGIPQYQFLSVKSGSDKDSAKKPKQADTPPRKAVLIIRMTVDHHHIYVIEMYRKPSMSVCRKTGDSLLKEDSYCGLMVHLPTDSKEVERQLQLIFKNLLKHEGRIKDKDKEMSDHTHKVFIHKPREIGSTPLKKVVISNLNKIIGFTLKE

SEQ ID NO: 1187 - protein, 370 aa, synthetic construct
  REGION 1..370: note = TnsF-Tn7 System Protein
MGTSYAWHSRIDVINSRWPRAQSLMADELLSSWLIRSAFAHGCSPMSLTGSLWPDWRCWTIDLDRGLTAGQVEPLARLSGVSVADICTSTLHPIAQILSPGLDSKKGVWPWILALGRRNRRSTGGLQICPICLSEQIPYYRIWSRLAWHTCCEKHLVRLIDSCPRCGAPLQPHLLEQGASNLYRCDRCNTSLSSALDDLGFTPGALAFQLAGDNALRGMQHDDTGPCEASGWFYRARFVSGVLRVGATTGSKTFAAFREAFNLGEMARPLSGLPIEMLPVVERMNLFSAVWKIMDMGESKIRETIRACAFSRRSVVLPAGEVTFSIQAMLDELAPGAARPHKPVAISTPTPRRRVENMWARLKRKVLRDG

SEQ ID NO: 1188 - protein, 691 aa, synthetic construct
  REGION 1..691: note = TnsF-Tn7 System Protein
MSELSRVSVTALKGVGEAMAEKLAKVGLETLQDVLFHLPLRYQDRTRIVPIGALRPGQDAVIEGVVSGADVVMGKRRSLLVRLGDGTGVVSLRFYHFSNAQKESMKRGTHLRCFGEARPGASGLEIYHPEYRAITGDEPAPVEQTLTPIYPTTEGLTQQRLRQLCQQSLAMLGPKSLPDWLPEELARDYQLAPLDDAIRYLHHPPADADVEELALGHHWAQHRLAFEELLTHQLSQQRLRESLRSQRAPALPVAKKLPKQFLANLGFAPTGAQQRVGKEVAYDLSQPEPMLRLIQGDVGSGKTVVAALAALQALEAGYQVALMAPTEILAEQHYINFQRWLEPLGVGVAWLAGKLKGKARVASLEQIAGGTPMVVGTHALFQDEVQFKNLALVIIDEQHRFGVQQRLALRKKGVGGLMCPHQLIMTATPIPRTLAMSAYADLDTSILDELPPGRTPVNTVLVADSRRLEVVERVRAACAEGRQAYWVCTLIEESEELTCKAAETTYEELSSALGDVRVGLIHGRMKPAEKAAIMAEFKQGALQLLVATTVIEVGVDVPNSSLMIIENPERLGLAQLHQLRGRVGRGSAVSHCVLLYHPPLSQIGRQRLGIMRETNDGFVIAEKDLELRGPGEMLGTRQTGLLQFKVADLMRDADLLPAVRDAAQALLERWPQHVSPLLDRWLRHGQQYGQV

SEQ ID NO: 1189 - protein, 691 aa, synthetic construct; identical to SEQ ID NO: 1188
  REGION 1..691: note = TnsF-Tn7 System Protein

SEQ ID NO: 1190 - protein, 470 aa, synthetic construct; identical to SEQ ID NO: 1182
  REGION 1..470: note = TnsF-Tn7 System Protein

SEQ ID NO: 1191 - protein, 295 aa, synthetic construct
  REGION 1..295: note = TnsF-Tn7 System Protein
MSAYSHIHPDFRPVAVMPDQARIDFLFEPRWIGYPAAQRLLDLLRHLMTVPSRPRMPNLLVVGSSNNGKTTIIERFTELYGKGYVNDDGEAVKPIISIESPPTSDERSFYCAILEQFWAPYRATDAISKLRYQVIHQMRECHVRLLVIDEFHSMLSGTALKQREIMNVIKLLCNELAIPVIGIGTEDAVRVLHTDPQHASRFDVFSLRNWGVGVDFQRFLKAFESVLPLREPSEIFRPHIAGLLHGISQGNTGDLHRLLIECATEAIRSGKEKIDANIIQSKSWVHPTRGIRELM

SEQ ID NO: 1192 - protein, 295 aa, synthetic construct; identical to SEQ ID NO: 1191
  REGION 1..295: note = TnsF-Tn7 System Protein

SEQ ID NO: 1193 - protein, 340 aa, synthetic construct
  REGION 1..340: note = TnsF-Tn7 System Protein
MLITDADGISRCKICITEGERKCGTCGDEMPAGRGQCCENCTWTAVFAKRSAQNSAGFSSPRIQQHFEAFSQWLLNRSGPHKAALSINQHYRFFAQMDALWGDVPTYDMLLKHIGAAGLRKAENPMRWLQGIGAVTVSDEAREANTERRRLLEMLSVLPDFWSNQLLHGYHDYLAVRVESKETDLRSMRLAMRAALNFLKLAALAPQALPTQKTIEAFWRSSPGQVAAVSGFVGYLNKTRNTSIKARPEKRWLEQARKHKAERELVDLLKSDAQDLIETVWIVKGMAYFHEIYRANRKKLVYQKENFNGMAGFAVEHEGETLWIPSANTYRSERDTKQFL

SEQ ID NO: 1194 - protein, 583 aa, synthetic construct
  REGION 1..583: note = TnsF-Tn7 System Protein
MKAPITRTEFKYKRPDIRHPHSSVANLKGDNIVWWYSFIRNNRQGERSIPEVEVIFKTLYGDVPGSITSAIIPLAALPHYQLGSIWSNGACISDTAMTQEKFNVDFSPKGYDITSRNELRKTGQGHIFHDAEYELPLRCWASKLINFRLPNNKNLLVPCAEYFVRAYAHNMIICRSICTLLFDEVLSALFECKTPDAYRWLIKPKSNIPDSEAVFLAHLLYDNFTHNEIRRLNSYFISSAPGEKMFPEVRPWFEGRGKLLCRGRWINEGNTFLCLDLCKSSNPAGPRIELLRDEFDNTNGEAGGRTIIPQPTRTPEDGEPVNEESHVPPDAQAEKIVVNLRPFEIIGPERNVKILKYINETKRGWRGPSPSKADTFSSGDGTGTGKNVGKSEHVSDVALESHGFLLDIWNAFLSIKRDNPKQFKDLSWHASNGFGVSSPPIINLFDPNGLSKGARNWIYLYRSINWDDKRCRGLMVLRLIIDNQTFYCLEIERQEASDQVHDPRGYSGVLFRAHTIDPDAFKNFVKSVMSKIIKNKGVFKGMMDQFPEDALLITHHIKDPYVRYRTALLKTLTQAGIDFTETV

SEQ ID NO: 1195 - protein, 340 aa, synthetic construct; identical to SEQ ID NO: 1193
  REGION 1..340: note = TnsF-Tn7 System Protein

SEQ ID NO: 1196 - protein, 181 aa, synthetic construct
  REGION 1..181: note = TnsF-Tn7 System Protein
MRFNYRVETVIAQPVSVNFVDSLGRAQTYTPDFLVYYHQGDARPEEYLKPMLVEVKPAYDWRNNWRAWRAKWKAARRHARQEGWTFSIYDESRIRDQALENIVFLERFERYTFDQEVIDMVLNTLKGMGIAPVHYLLARHFNGIYRGRGVALLWHMVAVGLVQCDINEPLNDYLELWVMTP

SEQ ID NO: 1197 - protein, 642 aa, synthetic construct
  REGION 1..642: note = TnsF-Tn7 System Protein
MNIYETDSDEHLEPFEPSRARVPIEVGAMVRREKDVFRIVQILDFQTVIGLEVETGKCSSLRVPDLKAVEQEKVEGLYVNYDVSTISSDEWAIAQQRFSAIQPFVNDSIIQRDSVEARAKEVGVDTATLYRWLKRYRNWHEVLALVPRKRGWKAGSSRLTTQADKLISNVIDEFYLNESRKSVQSTIKEIVERAKEMGIEPPGASAIRARIKNIPEKIVLRRRGYADKARNRHTPSVGQFPGADYPLACVQIDHTPIDLIIVDDRHRKPIGRLWLTLAIDVYSRMITGYYLALEDPSAISVGMCLAHSILPKENWLLLHKVEGEWPVWGFPRVVHSDNGADFKAEDIRHSCLNHNIETNFRPKKNPKYGGRIERLLGTFMRMLHELPGTTFSNTAEREGYDSDKRAAMTMDEFERWLVITIILYHNTYHSALYMSPARQWHLGFFGNRELDPLVCIPPRPADPHTLQLDFMPMYERTVQAYGVQIDVFYYSDALRHWINTKDPETGLARKFVFRRDPRDISVIWFYDPVLKQYFRVPVANQAFPAATMWEYRAAKQQAVDEGRTNIDEALISSLIIERRALVEQSIKDTKKARRDAQKLKVHAKNKTPAQPDRPFSKPVPPPAMPVLEGLLLGDVEFDGDIQ

SEQ ID NO: 1198 - protein, 603 aa, synthetic construct
  REGION 1..603: note = TnsF-Tn7 System Protein
MRVARLQIENFRGIKRADVLFPKHAVIVGDNNIGKSTLLEAIDLVLGPERLSRRPVIDEHDFYAGEYVDPQGQPVHITIEAVITDLNLDQEMRFRDHIEWWDNGTGDLLGGPPAESTDDQMVQACLRVVFVGSYDADEDDFTGTTYFCSPMKQDGSYDFFRTADKRVCGFLYLRTIRTGSRALSLERGSLLDIILRLQDDKNFKIWEGLLVELRQLQVADDPEIGINNILANVQASIRGYMPSDDGSDPQMRVTQLTRESLRKSLTVFMATGAQRSDGEAHAAPFQSQGTGTINMMVLALLSLIAELKQNVIFAMEEPEIAIPPHIQKRIINGVRSKSAQALFTSHSPYVLEEFEPEQVIVISRNDGKLSAMPAGLPPGIKAKMYRQDMRLRVCEALLARRVLIAEGRTEYDAWPAVARLLHQQEPESFMPLEALGIPIIDATTDSLIAPMGAYYRRLGKKVYAVFDEQASEQLEAIRASVDYPYQAPEKGFENVVLKGTDEEVLRGWVASLVDSGAWPSDLKDKAPGPDATKDEVAAILGVLLKRWKGDGAAASLLCTAMTRHHLPEFIVSTLESITATIVPKKPEPELPELDDDLLDLVGP

SEQ ID NO: 1199 - protein, 603 aa, synthetic construct; identical to SEQ ID NO: 1198
  REGION 1..603: note = TnsF-Tn7 System Protein

SEQ ID NO: 1200 - protein, 373 aa, synthetic construct
  REGION 1..373: note = TnsF-Tn7 System Protein
MEASYTWHPGAHCLNPRWPLTPQLLPDELFSSWLVRTALLHGCTPQTLTNHAWPGSRIWSIDMDRTCDETRLANLAHLAGISVERLIASTLLPVSRSLHPQPFLRTSSLWPWIMVLGCRHQVHAGGLQCCPECMAGSTPHYSVHDRFAWHTCCPLHRVLLVDRCPHCFSALQPGLLEQSGSIFKCHHCEARLNSAASFPCSKDALAFQAFADGLYGQSTMFGWDRLSFADWMFVARVIIGLLLGVARHPTSSTRLFCELMQVDAAACQPSSLGLPLEYLSPAERSALMGQTWVIMQAGPERFVECALRAVLPCSALPLPAREAPQVLNQMASALSCSSRCPRHKKEQNHIRRPLGVLRMWLRLQRRIRRDGLH

SEQ ID NO: 1201 - protein, 296 aa, synthetic construct
  REGION 1..296: note = TnsF-Tn7 System Protein
MTDYAHLHADFRPVLHLSDRERILFMGEPRWIAYKSAVKILDTLGSLLDAPKRPRMPNLLLVGDSNNGKTTLIHQFVKTHGQGYVNEESEPVRPIILAESPPSADEKELYVAILEQMWMPYRSTDPKIKLRYQVIHSLRELKVRMLIIDEIHSMLTGSAIKQREVMNALKLLCNTLMIPIVGVGTPDAVQILHIDPQHASRFDTVKLETWKLDADFQRLLKAFELVLPLKKPSKLFEPQLAQLLHSISGGNTGDLHGLLVECAKEAITSGKECIDRQLIESKSWKRPTRGIRELIV

SEQ ID NO: 1202 - protein, 296 aa, synthetic construct; identical to SEQ ID NO: 1201
  REGION 1..296: note = TnsF-Tn7 System Protein

SEQ ID NO: 1203 - protein, 365 aa, synthetic construct
  REGION 1..365: note = TnsF-Tn7 System Protein
MALVCQSCYNKHLPVCSQCRKQRKAYTYDDEQKPVCRICALEGTRTCKVCGEEFPAGVGRICTSCSSNNSLGRQIDFGQHALSPFMAEYFTQFSQWLVKRRGSQFASNKIKQYFPYFFDLDRFAEELERHPSYEELVDRFTVARTRQNLLVSIFLDEIGVIRIDKRVQEEYSNMDMIERYLGRFPKKTWQADMLHKYSEHLHTKLQNDQTTVRSIRLALGGAVNLLHYCRHFVPVELSNKALHGYLWKFPGQRGTLTGFVNFVNSGYSIDLQLPNAGKTILHTPTKSRQLLERLFLEALRSGEQDLSSVVKKTVLAIEYLHHVGIPDNVVIELRDIKRSKKDSSWSVRLAGREFYLPEEVTPAAK

SEQ ID NO: 1204 - protein, 245 aa, synthetic construct
  REGION 1..245: note = TnsF-Tn7 System Protein
MQLLGSGKMKISLKNRKIGYTYGSISGYYAFRKEKSIAFESTLERDLLVVLEFYDLVLDVIEQPVTLEYFGADGNCVQYTPDFLVHFKLSSQGNARKPYPKPMLIEVKPSKKLKSDFSTLRPKFKLATKYALENGYVFKIFDEKKIRGQAFKNISFLARYKNYEYDPDERHRIISNLMILGEVTIENLLASLYVTDSERGIGLGHVWHLIANKHVVCDIGLPLGKHTVVWAKEEENNCLGAHYAF

SEQ ID NO: 1205 - protein, 629 aa, synthetic construct
  REGION 1..629: note = TnsF-Tn7 System Protein
MHSETEAHKLDRRLVKVEKDGYVQYQGEVYKVSLIIDPHEIVGINTKTGSATRLLARDLKPIEFSESSGYEIIDRDMLDISDETWEKVERRYEGIKPILNGASKVEIEQHAEQMNVHYTTLYRWYKEYRESGTILGLAPRKKGPKPGKSGINSRAEAIIQEMIQKFYLTKQRPNVSSIIHKVFNQCKQENVTPPGKNTIRNRIAGISEYERLKKQGNASIARDKFEPKPGSFNAEYPLQIVQIDHTRADVILVDDETRAPIDRPWLTVMIDLYSRMVVGFHLSLEAPSVTSDALCIANAVLPKDQILLEHGIEEEWDVWGFPQTIHSDNGADFRSESLKRSCLVYGMNYMFRSPGVPSLGGHVERMIKTIMDETHNIPGTTFSNIFERKTYDSEGNAMMTFSEYEKWLLLFLTKIYHKRQHQTLGVSPEAKWREGIFGSALHEGVGYPPKPSDPQTVLLDFLPMVMRTIQRNGVNIDGLNYYDQSLRPFINQIDLQTGKKKQFIFKRDIRDISFVWFYEEVNQVYYKVRLADMTIPRMSLWELKEIRKRLKNAGTQAITPYKLAEAYEELHEHIESSSQKSKKARRQLQKIKNQEHSKQKDPKPIVKTEEPAKAGDESLWDDDDLPVFD

SEQ ID NO: 1206 - protein, 218 aa, synthetic construct
  REGION 1..218: note = TnsF-Tn7 System Protein
MGNDSGSHRAQIGEVGLAHNGILFFDELPHFSKQVLEALREPLEDRRIRISRVHSKVEYPTDFLFVSAMNPCPCGNLLNDALECRCSDLEIRRYRSRLSDPFLDRIDLYVQMQPVRAEDSASLTSEAMHETVLRVHSLQRSRGQQALNGRLDDAGIDTYCRLDGESDTLLSQAVQRFALSFRAIKKLQRVARTIADIEGSPEIAAVHLLEALSYRRRT

SEQ ID NO: 1207 - protein, 353 aa, synthetic construct
  REGION 1..353: note = TnsF-Tn7 System Protein
MRPKPWEDEILSSWLIRCSIMNGSDPTSFADAIWPKSRMWTKDMDRFLPEDKVYALSEATSLSPGEIVGMTLAGVIEKVTHLSRMKPTIAWPWVIPTGSRSRKRVNGLHFCPKCLGLSTVYFKKQWRLSWNVACPHHSILLHIHCPACHSVFSPQLVQYDDGDVSKCHMCGYDLKSTSSLPANEMALDLQEYLNAIAINDQYAKDVFPLLEGKTHLVFATVRLLMRFFRRADRCQAVQRVVGRLDGQEERRLKHAGNLLDMAGVDERHYLLTLVGKLCKMQHNDVLFILREEGVTRQMFERTKCELESTIDDIMGALKDNVRGEVHRKLSTRSLEPKSKREIEIKMDELRRYL

SEQ ID NO: 1208 - protein, 301 aa, synthetic construct
  REGION 1..301: note = TnsF-Tn7 System Protein
MSIPYSHIHDDYKHLLDLDAERRIASLDEDVWINYPKSDSVIQLLNRIINMPKKPRMQGLLIIGEAAIGKTSIVNRFAQMHPDVTFEDEDRITHVQRPVIQAVMQNSDERELYIAILETFLTPFRKNDTRLKLKYQAISLMRACHVKMLILDEIHNLLRGTPVQQRSIMDVLKNLSNELMIPIVGVGVHEAALVLGSEPQLASRFDIARLPLWDMDKNFRALLVAFEKRLPLKKPSHIDRKEKATLIYQYCQGNLGDLHRLLVECSKSAIERGLEEITVDLIKENQWVMRSNKQRAREIPL

SEQ ID NO: 1209 - protein, 301 aa, synthetic construct; identical to SEQ ID NO: 1208
  REGION 1..301: note = TnsF-Tn7 System Protein

SEQ ID NO: 1210 - protein, 470 aa, synthetic construct
  REGION 1..470: note = TnsF-Tn7 System Protein
MGTLDDESEIILCFGCGCELERAKRKYFGKYFCNYCYKKYFIKKTCSACKKDKRIYRHEQNCQSCLTKIMPCIRCAKIGVKVGIILESGLVCNACSYHFRVLKKCDHCGQEKRNVHVYTLIDKNNKYCYQCIKLNFYEKCSACGNKEFIHCCDLQRRKYCKRCSLGEKNCQICNIRIPAGKRANKCDSCSYKILFSNRKKKALCGLESSVMKLFECLLDYLCVNKGIEDTARVIPHLYPVMLNINKHFLQFQEFPSMYVIDSLVKESKFKHYHFILSFLHSYMSQDYKDFKTYQMINRQINKINESTPYFDEFEKYIAKIQNRPIQLHSKRLAITSAVMILTFTQSIGANCLCQKVVDQFCWLYWGQRASVTGFINHINIACHLSLEVKEEECFKFEQRRESKARLEQQILDMFMGTKIIDKNILLKKVLAYMHNIELPKDLEKLDLIEVMSIKDKIRLKNLTFALPIIN

SEQ ID NO: 1211 - protein, 233 aa, synthetic construct
  REGION 1..233: note = TnsF-Tn7 System Protein
MSDKDSYQPVRKPRPVYGSVSGYFAFRGQDTIWFESTLERDLIQKLEFNDNVMQVVCQPIEIQYRTNLGNLSTYTPDFLVQFFETPLQQSPLLIEVKPRATLQRDWKMLKPKLRAGFQYAKDRGWDFKIYDETRIRDPLLANIQFLRRYRNSDFQKDETIQILNRLDDFGTHSVNGLANSLFKADQKILQAIAHIWFLVERKYICCDLTQPLKPTSMIWVNDERRDDLIQEYV

SEQ ID NO: 1212 - protein, 635 aa, synthetic construct
  REGION 1..635: note = TnsF-Tn7 System Protein
MMQENITLDRRLLELKVGTVICWKGNEYQISDILSFNEVVATHLETYKSAVIPIDEVSLDGVDNNITKLTYDDAVITEEDWSTALKRYSIIQPFIDESSKSEVIKLAEQEGYHYTTIYNWLSAYRKTGSILSLVPNKRGWKESKTRLKDTTELIIKQVLKDYYLTEQKPKLSSVAETIKALCIKNNIDPPHPNTVRYRVRQINEQLKVKSREGKKNARDKFTPTTGHFPHANHPLAVVQIDHTPLDIIVVDETHRLPIGRPFLTLAIDVYSRMIVGFYLSLDSPSATSVGMCIVNSILPKNRILLEHDINATWDVWGVMDTIHSDNGADFRTEFMQRSCLKYGINWEYRPIGKANFGGHIERLIGTINQEIHLLEGTTFSNVEMKGAYPSEKKATITLRELEQWLISWITRIYHQRVHTSLGIPPVKKWEQGIWGTKEHAGTGLKPRINDEFTLLIDFLPEYKRTIQRYGIGLDNLNYYSEILRKWIACPDSDNPKLKRKFSFRRDPRDISYIWFYEPDLKKYFKIPTAKKEIPSISIWEYEVVQKSMSEQSRDLSNQDNIYHAILESKEMIKMASSKTKKARRQHEKNQLRGSGGSQIIPDIKHDKSIEKSSKTMLIQEHNFWDDPITTFDDIE

SEQ ID NO: 1213 - protein, 351 aa, synthetic construct
  REGION 1..351: note = TnsF-Tn7 System Protein
MTLWFVSPHQDEILSSWLIRTAISHGCTPLTLTHTIWGNSWRPWTIDLDFNIPHHKLVPLLSSTLSTRQLQKLTLQDINQKININNDQTRKWITKLGIRNLDRTGGLRFCPLCLSEHGYIKKLWRVAWNIYCEDHNVLLQSCCEKCSLAFSPHKISFNSLDMACCPRCENKLSAQIYKVQDSEIKEIQLELNRMLLQDANKCFTEKFQELLEIYGFFIRFVNSSSLIRSTADQRLIRDIGLNLNKKTGIREEIEKMSAEWLYELFKILVIVRDKSIEDLSEYFNALGYTQQSFTSRLPNPRLAFLQNFISLLPSQPRAPKNITKARFVEAVYPLPREEVLKRWEHLMMRVK

SEQ ID NO: 1214 - protein, 250 aa, synthetic construct
  REGION 1..250: note = TnsF-Tn7 System Protein
MPETAVKESKDRVRAAIINSGFEFPARKITVNLSPADLPKEGGRYDLSIALGVLIASGQLQSPLIDTHEFIGELALTGDLRAIRGLLPTVIAAVSHHKNIIIPKDRSNEVGFLDSPHILVASSLKEVVIFLEQKATLSPPDQADIHHMHSHLDMLDIKGQVFAKRALKIAASGGHNILLIGPPGTGKTMLASRFMTILPDMTQTEAIEAAAIASVSHQGFDIEQFGVRPFRAPHHTASSVSLVGGGCHFY

SEQ ID NO: 1215 - protein, 250 aa, synthetic construct; identical to SEQ ID NO: 1214
  REGION 1..250: note = TnsF-Tn7 System Protein

SEQ ID NO: 1216 - protein, 303 aa, synthetic construct
  REGION 1..303: note = TnsF-Tn7 System Protein
MSELMHLQEHIKPIVSLSKEDRISYLYSDKWIGYDRARNIMALLDDILSQPKRIRPQSLLIVGEPNIGKTTIVRKFIERHPQTNIHNQLNELIEVHKHHLLIDAPVGADEKKLYIAILENFLVAFKRSAPAIELRYQVNHLIRKFHIKILIIDEIHNFLTGTALKQREVMNVLKNLSNELSLSIIGVGTKEAVQILYSDPQHASRFDIAELTSWSLDNSFRKLLASYEKLLPLKHPSNLAERELTTAIFEISLGNLGDIIRLLIDCSKEAINSEKEYIDIGIINQFRRQKDTSSYRSIRNLIV

SEQ ID NO: 1217 - protein, 303 aa, synthetic construct; identical to SEQ ID NO: 1216
  REGION 1..303: note = TnsF-Tn7 System Protein

SEQ ID NO: 1218 - protein, 558 aa, synthetic construct
  REGION 1..558: note = TnsF-Tn7 System Protein
MLNDQGEPLCKVCRALNRTCVRCGKPVRKAGRLVDGGAVCGPCAKYYREPQACDQCGAMEKVLTGVQTETGRRRLCGRCFRRHKGYKSCSICRKDRLPVGVTADGKPICKTCLSAAGKPFVCPTCGQEGIRHSRRRCQKCYVRDTAKSRVEEYAPLFSHAWTREAWLGFGAETLEAMNPEKLVHRINSYYLFFVRLDLAFSKPTEITPVALLKSVGGLDGLRRYTVPYGYLLKHRIIPETTRSLLQDEAESIRQEAMIAKLDGKWYAPVMARYRNHLLTVRARYDSRGWKGEDTRMKARSITLNLRAARRLCETLDAIGVQMIQQTTPEMLDKFFMDYPGLAVSIRAFVRYLNRKEKLFQRLRLKTVARSVPEGIFLPREKSTALIQAWMTPTDETLRQSLIGLFMLLYAQTVKNCVRLRLDALIQRADGRYRIAFGRAEIHLDARISAILDRYLNVRQTLVALDHADENPYLFPGRQLGSHLSAESVSGWLKKAGVSSDQLFATSIYNAYQNGLRLPKVLVRAFGITDTTAIKYLNMLDPRLVMEIERKPLGGGDEP

SEQ ID NO: 1219 - protein, 372 aa, synthetic construct
  REGION 1..372: note = TnsF-Tn7 System Protein
MANPKIVLATSDVASRALAPADAELFGTIIDAWTRRRIGSLRHTHKAVARDVSVLREFAAHSGLPPWLWNEDAFDCWCDHLGLERRLANSTQRHYQCSIRSFLEYLTTNVKFRNEIRRLYGVEPRQICTEENCIPHTVEKESSKERRAFTHEEIELFFDGLRRASVEAGRFRTKDYNPLRRDRTFFFTLYSGGLRISEGLNLNVNSFAPNPALPELGPYGFIKVWGKGSRGSGKRFRTVPVTHPDFPELMDWYITRVRPEFLHRADPNEEALFLSERGTRLKSSSADARFKIATRYCGLEGEGLTPHCLRHSSVTHESLRFSIEMVRRKHGHASAATTQGYMHVPDVMVDDEISSVVSRELDDALNTQEKKE

SEQ ID NO: 1220 - protein, 106 aa, synthetic construct
  REGION 1..106: note = TnsF-Tn7 System Protein
MAGELTVRKNPYASGQPWWLYMLECKGGGIYTGIALDVDARFEQHVAGKGAKYTRMNRPIRVVARIRYDTHREAAQAEVALKRLKPLEKLRWAYALAGLVGMDKSA

SEQ ID NO: 1221 - protein, 253 aa, synthetic construct
  REGION 1..253: note = TnsF-Tn7 System Protein
MKASQTMRRYLEFFAVIEQRWADVPSYDVLLVNFGAAALRRVALPMTWLAETRRITVDASAREADSEKRRIDALLSAMPVTSVGGVALAAYHRKLQLKVVAGATTVRSNRLALTPALALLSTVDAEGRSLPTQAALVKYLSQSPGQVAAVTGFVRFLNAEHGTSLNVRIDESVLRAHRRRVREKVLLALAKRAVDSPEFELEWIRAGLAYFHDHVKPGGSVVRSPDGSGFSVSVGDNYLWIPSWARFTPTGKG

SEQ ID NO: 1222 - protein, 593 aa, synthetic construct
  REGION 1..593: note = TnsF-Tn7 System Protein
MHIAPDQIYPRDEVVRADFVLKLGPGDWLAWWYCGIRKNYFDNAQPLVLVDFRQLVNGKVSGNSVLWPVPIALLSKFSVGSIWNDGESRQHVGYPVKEFDVSYDEGGWCVSSFEEAFDSGAKPPYPIGIHRLSNTYDKNKLLMFDLVQGGKLVVPCLEFYSRCYGRSSNLRRLLAADPWQDWQSPSSKFYAPLGEPEEPDVWKVKLRRQMANGDVIFLAHAKYDEYTARAARSINSQIQAQFQPSKASIAFIDVMPWHRGRARLKVAGIPFGDDGSFLALNIVGGSEPGGAPLHRLRDTIDASKSGAEGLGGFPIGGRRQVLSPDIVHVTADDSPDGGAETVEVWDTAFEVLGTSRVVHDSRHRKTARLAVPFATAESPHQYAAGDSHGGGKGIGHLSVVPLMDVPPNGVLRDTWSALLHLQKKYVIESVEWYSIEHGFQSQGEPKLIPLCAVPDDVAMRKSDRNWVYIDRQLRSILLASVVVRGLRVCFLEIERKMTARKIRPDLYVEREEALRGMVYVPKSADALTAWVAHMRERIPVERGIIRNLESTTFGWCKAFKHKPSEAPQVAGEASLLSGLEKLGVSLKLRKAAS

SEQ ID NO: 1223 - protein, 253 aa, synthetic construct; identical to SEQ ID NO: 1221
  REGION 1..253: note = TnsF-Tn7 System Protein

SEQ ID NO: 1224 - protein, 208 aa, synthetic construct
  REGION 1..208: note = TnsF-Tn7 System Protein
MSGVYMFRGLSAIQYESTLERDFLIRMAHLRDVLDVVPQPVEVPFLEPLGRPNIYTPDFLVYYRAGFPNLDNYRKPLLVEVKPGEAWRAHWRSWSGKWKAARRYAHEHGWRFQIFDESRIRDQTLLNIRFLERFERLMFDETESAWIVSNLAAVGAAPFHYLVARHFMGDDRAIGIAHIWHLLWAGRIECDMSMPLSEHTELWVPEHE

SEQ ID NO: 1225 - protein, 645 aa, synthetic construct
  REGION 1..645: note = TnsF-Tn7 System Protein
MNDNDQIDDYGSAYLPSRQRVNLDVGAFVQRENSVFKITQILDFESAIGVDVETGRSSALRIDQLRPVSDVDRSPAGSADLDAIADEDWRVAESRFAAIKPIVDGEVVGREAFIRRAAEVGVDVSSLYRWWNLYKPFGLVSALIPRARGWKPGKSRISPLAETVVAEVLRDFYLTDQRRTPSKTITEIQRRCLAVGIQAPSDSAIRLRIGRLSEREKLRRRGYAEKARNRFLPTAGKFPGADYPLAVIQIDHTPADIILVDDVHRKPIGRPWITLAIDVFSRMVTGYYLSFDPPSEASVAMCVAHSILPKEDWLALHNVDAQWPVWGLPKKIHVDNGADFRSNNFQKSCLQYAINLEFRPVKQPRYGGHIERLLGTVLREIHDLPGTTFSSVKERDGYDSEKRAVMTKSEFEEWLVGLICKIYHGRKHSALMMSPLRKWEIGVLGNGDVLGVGMQPRPTDRHTVLLDFLPSFHRTVQTFGTTVDNVEYYSEALRPWINAVNAETGKKQKFIFRRDPRDISALWFYDPALKQYFKVPYADLSLPSMSIWEYAQVTAQIKKDGSDGSDPAQILRAVGELRTKVDKASENTKIARRQAQRRKEHERKISPADPLRAKSVSAPTAPEPTLARPILEALSGDVTEFGEIE

SEQ ID NO: 1226 - protein, 373 aa, synthetic construct
  REGION 1..373: note = TnsF-Tn7 System Protein
MKKRFTEEQIIGFLREAEAGLPIKELCRRHGFSEASYYLWRSKFGGMSVPDAKRLKELEAENARLKKLLAESMLENEVTREALRKKLVSAPARRELVRHMTDSGLSERRALRIIGMSASAYRYEPAPDRNQALREQIVALAQRHRRYGSGMIYLKLRQSGMPVNHKRVERLYAEEKLQVRRRKRKKVPVSDRQPLVRPSAANQVWSMDFVFDRTAEGRVIKNLPVVDDATHEAVAIVPERAIGGLALPRILDRVALHRGLPQVIRTDNGKEFCGRAMLSWAHGRGVKLFLIEPGKPNQNAYIESFNGRLRDECLNEHWFTSLTHAKVVIEAWRREYNEERPKKSLGGLTPATYARNLAEKQLHQPSDSKARRY

SEQ ID NO: 1227 - protein, 297 aa, synthetic construct
  REGION 1..297: note = TnsF-Tn7 System Protein
MSNNYSHVRPEFQHVLALSDAERLAYLDMPRWIGYTAAQRLLDNLQSLLAKPQRPRMPSLLIVGDSNNGKTTIVRRFLETCGKGYVTEEMEAVKPVILAEAPPSADEKGLYISILEQFFATYRASDPTAKLRYQVIHMFRTCHVRMLVIDEFHSMLTGSAIKQREVMNAIKLLCNELAIPIVGVGTREAVRVLHTDPQHASRFDVFPLPIWSLDKEFQRLLLSFERTLPLKEASNLSEPERATLLHTICNGNLGNLHRLLVECSQEAIKSGTERIDDKIIKSKAWMRPTQGVRHISV

SEQ ID NO: 1228 - protein, 297 aa, synthetic construct; identical to SEQ ID NO: 1227
  REGION 1..297: note = TnsF-Tn7 System Protein

SEQ ID NO: 1229 - protein, 410 aa, synthetic construct
  REGION 1..410: note = TnsF-Tn7 System Protein
MRRTGEAVFSAEAARKGFEARQRRLSATCSRCGRSRRIADTTADSRPLCGACSAPIPAVHACPGCGTELPGDGNGFCRTCQNMRRRTQRAETRSAEIRQSWVQELYLGLCRSDAIAKQPNNELAIVDRQLETIRRIDGAFTDPGQLSQESLFGVFGAEGLRRAFHAMAYLCDRVGFAWSVEELERLTEERRQDVIVAAAEAAWFHPVLVAYRSQLRSGRPKSLKARTGRLYLRAAADQLAHARDIQRIEDLSQRHVRGYLRGHKGQAASVSAFLGFVERTYGVALHRPRARRSSPEHLDRLAIREVDELLSTTSSSDPLPQRRAKIVRAISRLYGVPVKKLLALRRGDLQTDGNRYILSVAGERIVLTDRLSTALGALIPSDPKGVMFSGKNAHQSMHSTSLRYNLRHAK

SEQ ID NO: 1230 - protein, 221 aa, synthetic construct
  REGION 1..221: note = TnsF-Tn7 System Protein
METRQQAQARRIRPNRRSLTGSIPVKGRAVPFESSLERDLLVLLDFDEDVASVAAQPYTLSFAGPGGERRRYTPDFRVRRHSGPPTVYEVKYRQELRERWPDLKPRFRAAARDARQRGLRFEVVTEVEIRGPRLENARFLRPYLDRRPDAGTESRLLDAMTQLGTAKPGDILNTAFPEHASRSMALPSLWRLVALGRIAADLDAPLTMATPLRAVGEDGRP

SEQ ID NO: 1231 - protein, 390 aa, synthetic construct
  REGION 1..390: note = TnsF-Tn7 System Protein
MRRGGWAFRLPPHDGELLSSLLVRNAHAHGCSGYRFVNLLWPRRPAWNRDVDRNQDDAWLREIADHLGVPRERLGQATLADYAERLAGPGWARRGTVRLLLSAGILHRTRRRHGLQYCPACLAADRKPWYRKIWRVGFVLQCPEHGEPLRDACPVCDAPVIPHRSAVGHADHCHACGFPLVGELVPSAPEIPGSALRLQDKLLAVLETGTTRDPIGPWTGTEAFAGMRTLMMLASLQNYAPRIRRVLDLPPQAWPDGTEVRFEEARLPVRVSLMETVAALLERWPADFHDVAAELRLSQRFFRRWDVPPALAAEIARLGEGFTRDRRYEPVVYTPEMMRLRRRDPAAYRQARAARLLDACGRSSAGLPPKSRSPRTRKRYPPSDPGEDDA

SEQ ID NO: 1232 - protein, 650 aa, synthetic construct
  REGION 1..650: note = TnsF-Tn7 System Protein
MTSRTFIHLKKGATITAGGRTYRVTHYVKPDAVLAQDVDTGNTEEIHVDAIRPQAPAPEEGDDPRAAPTPDVTEYSEQAWSEAERRFEAIKSLIGTQRRRRADVEQAAAAAGVNAATIYRWLNAYLDAECISALIPDKPGPAKGGRKLTPQVEAIIQSCIRDIYLQRRRGRPKEVANEVRRRCRREGLEPPHANTVRKRIKALDPASSMRKRGQKDRARDQYEPLKGQFPGADYPMAVVQIDHTPADIVVVEEESREPLGRPWITLAIDVYSRMVAACHVSIEAPNAAVAGICAARAMLPKTDYLKALGVPGEWPVWGRIGTLHTDNAKEFRSRAFTRACAQHGIDLQMRPVGKPNYGGHIERLIGTANTQEVQTLPGTTFSSPADREGYDSEGQAALTLAEFERHLVDFIVNIYHKRVHSSLDMPPERKWELGIVGDETRPGTGPPEVPADPARLWVDFLPYEERTVQRYGIVLDNIHYYHEVLNRWINAKDPEDPKRKRRFIVRRNPMDISGVYFYDPEVQRYYLIPYGNTGRPPISVWELREAQRRAKQEGRQQVDEDAIFRAVERMRANVEAAQAKTKAEKRRRHRMRRTKQGTGQPPATSQPSGAGNGTADRQDRAEPAGTAAGGEDIFEKDIQPFDEQDLGDLE

SEQ ID NO: 1233 - protein, 1077 aa, synthetic construct
  REGION 1..1077: note = TnsF-Tn7 System Protein
MDSAKLLTYWNYCLKDADLLEIQVKEDTELTYVSQDTLRAGQLDQTAVNALWDSANAESKIGPDQYGETRLEILAAPLVLRAETARGGRDRTNGKPRLVLIVPARLDEAGALHPHPEQGAFVARQFLEPMGGGEPTVAALDAYDAARSIFDEVRADTWSEHLRRAEALLAKTLQAAESGSPPQQSGATEEDPADGAMSAHGGAVPPGWLALDEAALLPTSGLVQAGHHLRRLTAYAAEGDSRKRLRGTALCSVIQGGERRGLRHWRGRSRKQAHLGQMKGDFPLAELQREALAHYNETGDGEVLAVDGPPGTGKTTLIQSVVAHLVVDRARRGAEPPLIFGTSANNQAVTNVIDAFGESSGDDGPLGLRWLPEVSSFGLYLPSPSQQVSEGYQVAGLNGWQWRGFIADKHDPEYISKAKAAFAAACRLHNGADTVDTGVQALCDEIRAECDRIERAQKTAHDVLEGRGALPGGTLASARDELECRRKACADTQARYNETIERVQREREPAAARCDAVRDLHAEAAPLTARGLIAALLRLLPGRRARAWRRLQHRLRELDLGEIAGAPFDRLEAPSPSELRAAFERLDRDAREAVKAADDRVARLRRERDAEVQHLRKKERRLRETIRHMEDLEDRFARLVSEFLQRTGGVTHPGKAEILESPASIEELLDVKARHRAFLLAVHYWEGRFLLEADRDVVNANKPGAKLNGAPAGARRATLRRTAMLTPCMVSTAYMLPRWLSCRQGGADGETVYMLGEADLLIADEAGQASPDVAGPPFALARTGLIVGDIWQIEPVHDLPVSVDEANLRQLGLDRDTVAGDTIRKNGLKASPGSGEDTGGNLMVAAHRATAWSRAHADEPPRADGLFLEEHRRCPDPIIGFCNDLIYEPEGQPLVPCRGKKVAGGLPFFGWVDVVGRVERRAGSMANPDEADAIAAWLARNRLALQRTYGRQGERLEDLVAVVTPYRPQKEALIRALRNQGIRVARNAGMTVGTVHALQGAASQIVIFSPTITGDVDKTAFFDRQPNMLNVAVSRAKRSFLVFGDMRRFRGEGRKHSDVLARHMERAVQTGSQTASV

SEQ ID NO: 1234 - protein, 1077 aa, synthetic construct; identical to SEQ ID NO: 1233
  REGION 1..1077: note = TnsF-Tn7 System Protein

SEQ ID NO: 1235 - protein, 296 aa, synthetic construct
  REGION 1..296: note = TnsF-Tn7 System Protein
MSDGQHLAEKVRPVLDYPTEERVRHAWQDRWIGYDRAKEALQQLSDLVQYPRSHRMPSLALVGESGNGKSTILERFANQHPSQRRDDGSGYTPVLRVEMPSGPSETRFWSEILSTLNVPYRDTDAAHRKRGQALDALKAVGCRVVVMDEFHNIEYGTYNKQRQFLGVIKNLSNELQISLVAAGTFSSLRTLQTDEQIARRFEVLSLPQWALDESFLRLLTNFERILPLAKPSNLKSRDMAMKLHGMTDGTIGDLARVLKRAAVDAIRSGEERITERTLDNLERTRLADFTQTAKQL

SEQ ID NO: 1236 - protein, 296 aa, synthetic construct; identical to SEQ ID NO: 1235
  REGION 1..296: note = TnsF-Tn7 System Protein

SEQ ID NO: 1237 - protein, 719 aa, synthetic construct
  REGION 1..719: note = TnsF-Tn7 System Protein
MNGTEARQEVLQLVSAALHLLDEQVVAQAVAGAVAPRTGRSTLAYLKEHRDWLTAGDPRLPRTVLRLLAELRAAGAAEAVVPGCADCSRPRALTGRREDGSRICRSCASTRSSETCQRCGRLRRVAARQADATALCDTCYQRPTTPCSGCGQDRPVKAHTANGPVCKGCYSRSPRTCGGCHQERQIAIKASASHPDLCAGCYNGPRRPCSRCGKTRTCRGVRTGTYLCLSCAPRPQAACARCGKVRDVKTRWPIGPVCSSCYGFIRRHPTPCPACGDRQPMIGTTPDGSPRCGPCSGVDRRYACPRCGGPDSPGRPGECARCRSADELRRHFGTGPLLAPLIAGLEASERPDNVLHWLQRPDSSATLLRQLLASGHQPTHELLDAFPRRTAAVHLRQLLVTHQILPERDERLARTETWMHRLLADASPEHRHLLQPYTTWLILRRLRHRADTHGLTDSSVTYAREQARCALAFLRWLDEQSLTLDRAAQHDVDRWLTGGATTRRRLRDFLRWSARHKLSGDLRVPAMPNSQAVAFLDEDLQVELLHRCVHDQGLPDDVRAAGALLLLFGAKLTRIARLPMRDFTQDGDQAFVTFGGQPAPLPPAVARLLTTQAATRPRHLTRHHAEALSRQWLFPGALPGRPVSAHRLGERLVAHGIGVRAARNTAVLALAQDLPAPVISELLDLHINTAVHWGKRGGRDWTSYLEARRGEAPTVTFTS

SEQ ID NO: 1238 - protein, 719 aa, synthetic construct; identical to SEQ ID NO: 1237
  REGION 1..719: note = TnsF-Tn7 System Protein

SEQ ID NO: 1239 - protein, 235 aa, synthetic construct
  REGION 1..235: note = TnsF-Tn7 System Protein
MRTHRDPRTLADGPSVLDRMARILAARGIDHAQVDALPDEPEPFSPEAELSAGMPPRYRDAIADHPLVLAWTRQVAAQATAPSTGARRQVTRGPSLLMAGVTGAGKTHQAYGAVRVLVRTGIGVRWRATTAADLYAELRPSSDTDAERVLAAYSRMPLLILDDLGAAKTSEFVEEQTYRLINRRYNHCLPTLITTNLAIKDLRTCLGDRVTSRLAEMTTRVEFEPIDRRRPQRAA

SEQ ID NO: 1240 - protein, 235 aa, synthetic construct; identical to SEQ ID NO: 1239
  REGION 1..235: note = TnsF-Tn7 System Protein

SEQ ID NO: 1241 - protein, 374 aa, synthetic construct
  REGION 1..374: note = TnsF-Tn7 System Protein
MDRVLDLPGAAHLVLASGVAYLDPEPAAFEAMLEGWALQQRARFLDVEQTIAPRLRLVRRFAEFTNEYPWQWTPLEAEAFIDSLRSRRQGLAVSTGRSYQDALRLFCGYATDGRYGWPARCLDLFGTVPAQILHEWNTVRHTSDYEGSPRRRPLTYDEVQALFDAADGRVEEIRARRRKGALAALRDAVALKTVYAFGLRRQETCCLDLPDLRRNPKAPQYRRLGALFVRYGKASRGGPPKRRTVLTVPEFDWIVEVLEYYLQEVRPAFAPGKHPALWMTERVGRLSLRRLDEAFETAQRLAGLPEELDLHCLRHSYVTHLVEFDYPERFVQEQVGHAYASTTAIYTGVSDDYRTRLVQRALKARHAGLWEVGT

SEQ ID NO: 1242 - protein, 111 aa, synthetic construct
  REGION 1..111: note = TnsF-Tn7 System Protein
MIRKMGFRWHLRQLMAQRDMFQTADLVPKLAERGVHLSREQVFRLVTQPPQRLSMDTLAALCDILGCGVQDLIEVVIVDEQVRKTGTGGGADPAAPAPMARRTTIRRPGQT

SEQ ID NO: 1243 - protein, 834 aa, synthetic construct
  REGION 1..834: note = TnsF-Tn7 System Protein
MDESLPRFAIEPETVIGEIVRSVDSSCATIDITALLEEVFCYRSQRRTLAEVLHTDAELLTSGRPEGPRTVERLIRALQAKGATGLVLPRCGKCGRQRPLTALADGRRICRSCANRRQVQANPCGICGSIDYAGRDRDGTPRCRAHPPGGDIDPAVELAGRLAGPTGLPIETAVAAIRAVARNRGGQLRLLWAFEDHPDLLSGGGAKGPPKTGALARALINRGATGVQVPRCPLCDRAAELRLLHQGQRCCGRCWLARHREVCADCERLLPVGGRTFDGKPVCVGCRQADPFNRRRCDGCGQLRVVKARTGDGRALCSTCHDIPRARCATCGELGPCRFVTSEPPRCLSCCAKQRKEANCVGCGNWRRVNNRTATGEPLCGNCGKKPKPCDGCGKVYRVSARTTDARALCQTCWAKHPAARQPCAACGSVERLYHHGLCAACAAPRSLHRALAGPDGQLRPELEGVYTALLRLPPHASLRWSNRRPTHRALLQALAAGTGPITHESLDPLAPAQIVDHLRALLVAGEALPERDEQLARLERWATRTVARVPNATERRLLTHYTAWQPLRRLRRVRPGRHITVGQSDSVRMEIRNTVRLLEWLHGGGIPLAEATQDHIDTWLSQGSTQRHWVRAFLLWTSRSGHSRPLTAPAHGSELSFNVIAQDHRWALVRRLATDHQLAAPDRAAGLLVLLFAQPPSRITRLTTDHVLDTGEHVRLRLGREPVLVPAPLDDLLRELVTRRRGRSTIPPSREPTWLFHGIYPGRPMDPSSLSRRLRAIGVQPRQARNASLMDVASELPAYVFSRLLGYCQQTADNWNTEASGFGPDYAADLTRR

SEQ ID NO: 1244 - protein, 834 aa, synthetic construct; identical to SEQ ID NO: 1243
  REGION 1..834: note = TnsF-Tn7 System Protein

SEQ ID NO: 1245 - protein, 368 aa, synthetic construct
  REGION 1..368: note = TnsF-Tn7 System Protein
MSGAGVSEASARLVLVQGVSLLHPEDAVFDAMLSGWERQQRGGRRLQPDTIDDRTGMVRRFAAYTNSYPWQWTASDLDEWMTYLIGELKRAESTIRGYQGAIRMFCDYVTSPHYQWPAECEARFGTHPVQICHEWNTTAHLVDYEGQPARRPMTREEIQAFLDHADAQVERAVRHGRKGALAAYRDATVFKVMYGWGTRCTETSRLDEADFYRNPKAPELDRFGALHVRYGKRTRGSPPRRRTTLTVMPWAAEAVCDYVTNIRPRYPAAASSAALWLTERGGRLKPREIEARFAEYRDALGLEEALVPHCLRHSHVTHQIEDGADPVFVQRQVGHVYPSTTALYTGVSGDFMNTMMRKVLDRALDGGG

SEQ ID NO: 1246 - protein, 115 aa, synthetic construct
  REGION 1..115: note = TnsF-Tn7 System Protein
MAAKLDYRWHLREVMATRGMFSTTDLGPLLAERGIDLSPSQIYRLVAERPERLSLRTLMALLDILGCTMDELIEPVAAAGARRRRAAGADLNDPPGPGEAGVGGFRPRRARIVPE

SEQ ID NO: 1247 - protein, 735 aa, synthetic construct
  REGION 1..735: note = TnsF-Tn7 System Protein
MAKTTTRERVAATLAARARVLDHLVAHLPGVDRDQAREILIAVNADGYTGLRNLDAHLQTNPDALVAGSPECPTVLVRLVQHLAARGFAVVLVPCAGCGRTDKPLPLQGTGGRICDTCWVRDPSRHEPCARCGKRRRPQKRQPDGSALCSSCHANPQYRCSGCGQVDIAAARGPDGPLCPRCYESTTRPRRRCGQCGEVRIINKRDPDGDRELCKRCNHTIAQCSRCGRRRPCRRAATDAPVCRSCVDVPTSPCARCDRPRPVAAYWPIGGVCRDCYRTSRANPKLCPSCGHIRPLIGHDPAGRDACGPCSGADVDYACRTCGSGAEELFHQGRCVRCVAAERLRCKFVDENGDVPAALQPLLDSLARAERARSVLEWLRRDNSGAEILRGMIGRDDISHAALDALPPGPAVIALRAMLVHLGILAKRNEALAAADAWAERTVRALPEHHRRIIAPYAHWSALRSARHRAEHKRFTEHSGARARMLINVAISLLTWAEERNTSLAQLTQADVDEWLSAGGNRLQSRHFLRWARRRRLVGELDLPRHRSSDPQDFLTEDDYGRLLQRCLHDQDVPLDVRVAGALVVVFGLHVARIVELTTDDLDLGSEPQLRLNGHCLVLPPVLGSLLAQHVGTATTTSLVGRSGTPANWLFPGQQAGRPLAAASLVSKLTAHDIPTRISRNSALLSLASDLPAAVLSTLLGLSETAAVQWVRRTKRDWHAFLQARAHDQAHQRRS

SEQ ID NO: 1248 - protein, 735 aa, synthetic construct; identical to SEQ ID NO: 1247
  REGION 1..735: note = TnsF-Tn7 System Protein

SEQ ID NO: 1249 - protein, 1686 aa, synthetic construct
  REGION 1..1686: note = TnsF-Tn7 System Protein
MTGSVACGDRELEPGESLSDYYTAHGYPPGQWFGRGAAALGVDGEVTAAQMNALFGEGRHPEADRIEAEMIADGASQAEALAATKLGYRFRQHSGADELRSKVIDAYKTYNLENDRPIGAPIDEATRASIRRDVQVQAYADEHEGQHPSDAELKRWLAEQKRELKSATSGYELVFAPPKSVSVAWALSDDATRERIVELHRQAVRDTLQYFENNAAYTRKGDGGYAQVDVKGITAALFEHWDSRAGDPHLHTHVPISAKVQGADGRWTSLDGRTVLAAAVTTSEYYDSRLRDLFREAGASWSERAKGGFDLKRVGWELDGVSDALLEGFSQRSSQVEADRARRIVDFRREHDREPSPSELREISRCAKYDTRDPKQEPRSLAQHLRRWRDQAIETVGPNELATLGTRLFSGHGEAVADVDVDELAAGTLATVSDHFSHFNKWNLAAEAHRQTAHLRVPEGTRDQVIDQVVDAVLRDADTVSLHAPPAVEEPSALRRSDGESVFVEHNAQRFTTHRTLREEAALAAWGRRHDGVRISEATVRRAVGGAKLNAGQTRAVAGFATSGRRVQLLYAPAGAGKTTAMRVFADAWRAEAGEVYAFGPSARAAQELGASIDARPHTLHQVTTAMQMGSAERAFPFTRGDVLIIDEAAMAGTHTLHDVVRYALNRGADVRLVGDDKQLASVEAGGAVRWFEHNNGALRLREVVRFADQDQAAASLKLHRGDASGLDYYFEQGWVHEGSRETMREAAHHAWRSDLDAGRPSLLIVPANDDVVALNHQARQLRLDRGDVDDGRAVRLHDGTAASKGDLVVTRRNDRLKTLFGGRDFVKNGDTWEVQNVRASGAIKLRHQVSGGSIILPPNYVAEHVELAYAATVNRSQGMSVKGGSSHSLVPQGLSREQLYTQMTRAEYDNQVYVETVQHTIDSHQETPLERTGRGVLEAALERSSAETSATEELRASLDKAESLHTLVGHHDFVAHLGSQERIEAVLTEHVPHLLEQPATGALRQTVRNAEDLGWQAEHLVPAALAQGALADADDPAAVLQWRIEQQLLHEQPPPRTAAPTMNQINHWRGIVERHDATADVEEPAWTQVWKLAAAASAEGLDADAAVTTAATRLADRPAADPMDAHRYTADAVSDALSEQREAGAGWSPALPWMARPDHTSLSDELRDYLQRLNSAIHDRHTELRAQITAEQPHWTAGLGPRPEDPALAERWDTVAGLAAAYRDTYGVTSDDPAHPLGEQPDSQGLRARAWHDLIDQWGPPTETASTDQTTGTSHDEVERLRDGIDVDDLLDTFTDTISERTEEPLSVLAERHHNTSRELLNHVAHQALAEHAPHALGQPAEPKLLDTLRRAETLGWQSDRLVARAAASSGREHSADPAAVLRWRIESHIADREPPARFADPSAEQIDRWHTITTAVVPDEDVTDDWRLVWRHAAAGAAEGLDADAAVADAARQLAEWPADPTEAHRYAAQIVVDHLTDQRDQGAGEQPVLPWLTAPHRTVRDAAPELADHLDQITTAVATRVDELRDHVAYDRPDWAARLGTRPQEETAAERWDDVAGLAAAYRETFNIRTNDPDVPLGPEPGGQTAKADAWRTITDKWRHTMTSPNENFQRDDTTERIEALRDEVLETREDSRDDYVERWLDSRDEDEARRENEGSYERYGYDDDEELDQGSGFHSGMGGMGF

SEQ ID NO: 1250 - protein, 1686 aa, synthetic construct; identical to SEQ ID NO: 1249
  REGION 1..1686: note = TnsF-Tn7 System Protein

SEQ ID NO: 1251 - protein, 367 aa, synthetic construct
  REGION 1..367: note = TnsF-Tn7 System Protein
MPGTARSVLADGVVHLDPAPAVFAAMLEGWARQQRVRFLRDETIKRRLDLLRRLHRFSELYPWQWNVGEVEAFFDHLRSGSRPIAASTARGYQTDLRMFLDYLVDARYGWTELCSEKFAEVPRQLLHPENSVVHAAEFEGRPGRRPLSYDEVQELFDAADGRVEQIRARGRKGALAAQRGAAMLKTIYAFGLRRREAWGLDVVDFRRNPKVREFGQFGGVFVRWGKSSRGGPPKRRTVLLVPEMDWVVPVLEQWVAELRPMFSPGKHPAVWITERRGRLSYRKIDQLFAVVRDEAGLDPELDLHCLRHSYVTHLIEFGYPEKFVQDQVGHSYASTTALYSGVSDEYRNRLLTSALRSRTSDLWESTP

SEQ ID NO: 1252 - protein, 86 aa, synthetic construct
  REGION 1..86: note = TnsF-Tn7 System Protein
MFQTSDLVPLLAERGIHLSREQVYRLVAQPPQRLSMDVLAALCDILGCQPNDLIEVQVVNEERRKTAEQGRTAAPPVRRSTIRRPD

SEQ ID NO: 1253 - protein, 702 aa, synthetic construct
  REGION 1..702: note = TnsF-Tn7 System Protein
MTAPTGPSRKEDVSDADPAQVVAAVVARLDPTTDRPELAALLCAMVPYPRWRQKIADQLTSRPELLTGAGAYGSASVVTLIQTLRERGVPGVVIPACPFCDRLVRLSRSRDGLRCCKSCWNQAHVKRCARCGELAVMTRRTGDGQSLCAACCRTEPSIAETCTSCGRKALPARRDGEIVQCQNCCTPPVATCSVCRHRKPCALAGTDAPRCKACTDRLRVEPCSECGRQSTVHRRTSSGKPLCKSCGSMDTCTGCRRRRPIRARTEHGIFCQSCYRNDSASHRACVRCGSVERLHHFGLCTNCAWPEVARGLLTGPDGAVQPAIEPVLVALAATDAAAGLNWVARARTQQMLAELAIGMCPVTHQFLDGLTPNGAATHLRAILIQAGVLPARDERLNRLESAVERRIVRVKEPAARKILRSFATWYHLRRLRTLAVREPLTQDQVVYSMNSLTAAASLLNWLHGRGQNLATCTQTDIDDWLTVDTFSRSRGFVSWAVKRGHAHGIEVPPFNNESVREVFTEHDQRWSLARRLLSDSSIAVADSVAGLLVLLYAQRAVRITRLTTEHILVTQAGVQLLLGEQPIAVPSALGELIMELLHDRSDATATGPDDRTWLYPARRLGQPLAPRDLLRRLRLLGVSPTLGRNTALMEMASEMPAAVIARLLGISLNRATRWTQDAGNTRPGYAADLARRRTARPSPQQG

SEQ ID NO: 1254 - protein, 702 aa, synthetic construct; identical to SEQ ID NO: 1253
  REGION 1..702: note = TnsF-Tn7 System Protein

SEQ ID NO: 1255 - protein, 344 aa, synthetic construct
  REGION 1..344: note = TnsF-Tn7 System Protein
MLDAMVSGWEKQQRGGRRLQRETVDARTSVVRRFIEFTNEYPWHWSAAHMDEWTAQLVMEQKLAESTMRNYQGAIRMFSDFITSPYYQWPEECEARFGTHPVQICHEWNTVAHLVDYEGGPGRRPMTREECQALFDYADEQVDRAVRLKRKGALTAYRDATVLKVIYAWGLRCNEASKLDRTDWYRNPKAPELGKYGQLNVRWGKRSKGSPPKRRMVATVMPWAVEAVEDYLANARPRFGLADHPAMWVTERGGRLRPREIEERFAAYRDALGMDTDLVPHCLRHSHVTHLIEDGADAKFVQDQVGHRFASTTAIYTGVSGDFMNTTLRQHLDRGLAPADGGTA

SEQ ID NO: 1256 - protein, 466 aa, synthetic construct
  REGION 1..466: note = TnsF-Tn7 System Protein
MASAGPVGGFEGRLWNVAGAVATFTARDLELATVTTAVSDNTGVPVVLHGVPGVGKTQLALAWVYGYAESAQVVWQIRAANRLEVVADLAQLADRLGMAVGGDLEQAARAAMQELNGRDDWLLLFDDATPDSVAGLVPVRGGRVLMTSRNPNWALTGVPSEVGLFAPHVAAVFLDPSAGEAAGLLASELGYLPLALEQARAYCAAPAGRLVVYLADFRRQRLLGQGIDHTLHAPVTVTLALALDEVRRREPGAAQLMMVLAQFAPAAIPWDLVAVGAMVQPVPLDDAAIDGVYADQLIGVLRELALVTADRSGLLRVHQLVAEVLREHPLPVPDNYSLWQSPLRVIGAGPPPRSWIQEGAELLAEALPADVKNPVHWDRWALLLPHAETVIERGASPSTTIGTLQYLCGAYLLRRGEYSSARRCSTRSVEGRGRLLGEEHPDTLTSMSNLAAIERRMDDSGGQESR

SEQ ID NO: 1257 - protein, 466 aa, synthetic construct; identical to SEQ ID NO: 1256
  REGION 1..466: note = TnsF-Tn7 System Protein

SEQ ID NO: 1258 - protein, 112 aa, synthetic construct
  REGION 1..112: note = TnsF-Tn7 System Protein
MTVKLDYTWNLREIMATRGMFNTTDIRPHLIDRGITLSPTQIWRLVTEKPERLSLKILVALMDILDCRMEELIVPVAATARRATAVGESPGTDAGRESGVGTFRPKRARITD

SEQ ID NO: 1259 - protein, 813 aa, synthetic construct
  REGION 1..813: note = TnsF-Tn7 System Protein
MTGLADEVLADPVGLVVRLVGNAEKHLPAEHIRDIVLTVVHTRAGRRSLAQALHDDPSLLRTGQPPAPYCVAKLLMALNDAGAQNVALPRCGECGRACRYVGSSTGGRWGCSPCFDKPAVCAGCHQERRVTSRDRHGEPRCQNCPDTDGDPLRELTELITNLDPGLNTDAILAALGRATVRPAGQRRLAWAVVARPELLTGAGYEAPTPAALRFINELVEAGATKVVRPACPRCHGVKALSKLLEGKRICRACFARHAAVACSGCGAVREPATRDSEGRPLCPNCMIRQPANLEECVGCRRRMPVATRLPDGPRCNNCRPRITAECGICRRMAPCEMSRATGQPWCERCQHRWVTCSGCDSVAQARGGTWEAPLCAKCTNPDPDFWGRCPVCTTTWQLSPRPCQRCVLDQQVRDLLGDATGALRPELAPFHEALTSAERPDVAIAWISRSKARDLLEHIGRDERPVTHEVLDELPPGKVLAHLRSVLVATGTLPPRDERLIALEKWITETVQTRTDLAERRILHGYAVWHHMRRLRRRLGEDHTTRLQDLNVRCHVTAADSFLTWLNREGLTLGTCTQPDLERWMADATVSYRDETGHFVRWSVQHGHARGLTYGTVRWAGPQGTIDSEKRWADARRLLNDDTLPTPDRVAGLLLILYAQKIATISQLTVDDVHIDGDTVTITFGSSPVVLPTPLASLVRELVANRRGKAKIGSPDDCPWLFPGGHPGLPLTDSQIGKRLHGIGIRPKQDRSTALFTLATELPAAILARMLGIHIKVAVQWQKASAGDWAAYAADVSGRNAPHQPIHEPGATP

SEQ ID NO: 1260 - protein, 813 aa, synthetic construct; identical to SEQ ID NO: 1259
  REGION 1..813: note = TnsF-Tn7 System Protein

SEQ ID NO: 1261 - protein, 367 aa, synthetic construct
  REGION 1..367: note = TnsF-Tn7 System Protein
MVHQQKVALAGAARLELVSGVVQLRPEDAMFDAMLRGWRAQQKSRGLKDETIDPRERLVRRFLEFTNDYPWQWTPAHMDEWSASLTGEKHLAPSTIRSYQGDIRLFTEFLIDGRYGWGPACEEAFGVHPVAIAHEWNTLPHLQDYEGDPEARPFTREELQRFLDYADDQVARAVKSKRKGALAAYRDATLFKVIYGWGLRRTETSKLDVVDFGRNPKARQFGRYGTLNVRYGKAKKGQPPRRRNVLSVMDWAVEAVEDYVENVRPRFGFPDHPALWITERGGRLQPSSINDRFEAYRDALKLPKELVPHSIRHSYVTHLTEDGVDRRFIQQQAGHECDSSTAIYTHVSDDFMNTALSKALAPAFAGV

SEQ ID NO: 1262 - protein, 114 aa, synthetic construct
  REGION 1..114: note = TnsF-Tn7 System Protein
MAAKLDYHWHLRKVMADCGMFSTTDLIPPLKERGITLSSSQVYRLVVERPERLSLKILMALLDILDCTMDDLIEPIAVAGSATKPKKAAAGGTSISEGVGDLRPRRARITGVDR

SEQ ID NO: 1263 - protein, 270 aa, synthetic construct
  REGION 1..270: note = TnsF-Tn7 System Protein
MTRKQPAPLSEALVAKTTRLLMGAVPSLDTDQAWELLIVAAGKNASMRQVHDFLSRHPDALRHGLSDSPLALGRLARLLVDLGVGDIVEPTCFDCGRTIARPHRVEGGRVCRRCYRHRLTGLCCRCGQSRPIMARLPEGVICPTCYGRETRELCANCGGLFRVTARRADGKPLCQTCRPRRLEKCVVCGTEQPVAMRYEINAVCKRCYRLTFQPRRECGRCGKTAQIAKAATAEQPDICTNCNAGPIQTCSVCGRRRPCHRGKHGVPRCE

SEQ ID NO: 1264 - protein, 399 aa, synthetic construct; identical to SEQ ID NO: 247
  REGION 1..399: note = TnsF-Tn7 System Protein

SEQ ID NO: 1265 - protein, 270 aa, synthetic construct; identical to SEQ ID NO: 1263
  REGION 1..270: note = TnsF-Tn7 System Protein

SEQ ID NO: 1266 - protein, 351 aa, synthetic construct
  REGION 1..351: note = TnsF-Tn7 System Protein
MVHLDPASAVFKAMLEGWETQQRARFLKAGGTIKPRLDLVRRFAEYTNQYPWQWEPAEVEAFIVSLSIAPSTARNYQNCLRMFCEFVTDARYGWPAKCLDIFGAVPRQILHEANTISHVTDYEGNPGRRPLSYDEVQALFDASDGRVEEIQSRHRKGALTAMRDSAMLKVIYAFGLRRQEAVGLDVADWRHNPKVPAFGRFGGVFVRWGKSTNGSPPRRRTVFTVAEFDWIVPVMEHYLEEVRPLLAPGKHPAMWVTERCGRISRRRLNRTFGLVRDLAGLPSELDLHALRHSFVTHLVEFDYPEKFVQDQCGHSWGSTTAIYTGVSDEYRNRLVQRALRERHPDLWKDQP

SEQ ID NO: 1267 - protein, 107 aa, synthetic construct
  REGION 1..107: note = TnsF-Tn7 System Protein
MIKKMGFQWRLRLRMAEKGYFQTSDLVPLLAERGIVLSREQVFRLVTQPPQRLSMDTLAALCDILDCQPNDLIEVQVVNEKVRKVAGEAKRSAPQARRTTIRRPEGL

SEQ ID NO: 1268 - protein, 485 aa, synthetic construct
  REGION 1..485: note = TnsF-Tn7 System Protein
MTGPRTPGRRCCVRCAATGVKFATTWPEGSICRRCYQQATRRHGICPACLTQRLLPGRIGDANVCTDCAGIPKDFHCSRCGREDEPVRIGLCAHCALNDDLTVLLDDGTGQIAPALLPLHTALTEQRHARSATIWLITNPDATALLGDLARGTQPLEHSTFTSHPHPRKVAFLHELFIEHQLLGPMNLDIERFQTWLTAKLSFAPETDARIITQYARWVHLNRMHRLAETGMLTKGTILSARQSTTVALGFLAFLAGRDSTLAQCTQTDIDQWLADGPTTHSLSRGFVRWAIEHHHAPHVDFPYRVAKTEPILSQPQRLASIQLALDEHTDLTDADRAAAVLFLVFGQPLTRISRMTRDQIERRHNATILRVTDDEILVPSPFDNVLTQHLERLPHQNTTAHRGDPRWLFPGARPGQPINHNTLMTRLRDAGIEIRAAHNAALRALVLDIPAAIVANTLGYSYQITDKHRRNSGATFIDYINHRS

SEQ ID NO: 1269 - protein, 485 aa, synthetic construct; identical to SEQ ID NO: 1268
  REGION 1..485: note = TnsF-Tn7 System Protein

SEQ ID NO: 1270 - protein, 793 aa, synthetic construct
  REGION 1..793: note = TnsF-Tn7 System Protein
MTMTGTAAQAGHAADTHDLIRVRGARENNLKDVTIDIPKRRLSVFTGVSGSGKSSLVFDTIAAESQRMINETYSAFQQGFMPTLARPEVDLLEGLTTAIIVDQERMGANPRSTVGTATDVNAMLRIVFSRLGQPHVGSPQAYSFNVASISGAGSVTFERGDTTVKERRSFTITGGMCPRCEGTGSVTDIDLTQLYDATKSLNGAALTIPGYSMDGWYGRIFGGCGFFDADTPIEQFSEGQLHDLLHREPTRIKVDGINITYEGLIPKLQKSMLTKDREAMQPHIRAFVDRAITFTPCPDCDGTRLSEAARSSRIDGVSIADACRMQISDLAGWVRGLDEPTMAPVLAALGETLGSFVDIGLGYLSLDRPSGSLSGGESQRTKMIRHLGSSLTDVTYVFDEPTIGLHPHDIERMNSLLLRLRDKGNTVLVVEHKPELIAMADHVVDLGPGAGGAGGSVCFEGSVEELRRSGTLTGRHLDDRAALKESLRTPRGVLEIRGATAHNVRDVDVDIPLGVLCVVTGVAGSGKSSLIHGSVSGRDGVVAVDQTAIKGSRRSNPATYTGMLEPIRKAFAKANGVKPALFSANSAGACPTCNGAGVIFTDLAMMAGVATTCEVCGGRRFMAEVLEYTLGGLDISEVLALPVSDAAIFFAEGQSRVSAAAAILGRLADVGLGYLSLGQPLTTLSGGERQRLKLATRMGDEGGVLVLDEPTAGLHLADVENLLGLLDRLVDTGTSVIVVEHHQAVMAHADWIIDLGPGAGHDGGRIVFEGSPADLVATRATLTGRHLAGYVGA

SEQ ID NO: 1271 - protein, 793 aa, synthetic construct; identical to SEQ ID NO: 1270
  REGION 1..793: note = TnsF-Tn7 System Protein

SEQ ID NO: 1272 - protein, 375 aa, synthetic construct
  REGION 1..375: note = TnsF-Tn7 System Protein
MRSVIEVGPGSVPVHLQGAVAVLNEEETVWEAMLSGWRAQQFARNLAPSTVDRRRELVTRFRVCADAYPWSWTVGAVDEFFLELRAVGGAAQSTILGYQGALRMFLEYVCDPRYGWVEQCWQRFGDHPAQVFHEWNTARHAQNGIAQPGKRPYTRDELQDLFDCADERVVRIRQKGSKGWVTAFRTATMMKAAYAWGLRRNEVRSLDLVDCASNPAARQFGDFGIIYVRFGKAMRGSPPKRRSVLSLPEMDWSTEIMRQWVEEVRPLIARPRASCLWPSERGGMITADAVSRAFNEVKREAGLDDELDFHSLRRSYVTHLLEDGYDAFFIQQQVGHEHASTTSIYTGVSPDYRARVVSDAIARMATTMIPTAAKD

SEQ ID NO: 1273 - protein, 110 aa, synthetic construct
  REGION 1..110: note = TnsF-Tn7 System Protein
MRRRIEYTWRLRELMAARGMNTISDLLPHLADRGIELSASQIYRLVGSKPERMNLTLLGALLDTLDCSFEELCPTTIEAESSRTTKKAVGDGPSPDGSIRPARARIRRPE

SEQ ID NO: 1274 - protein, 426 aa, synthetic construct
  REGION 1..426: note = TnsF-Tn7 System Protein
MRCTKPVPKAGRLVGEQAVCPSCVPYFKDKEHCAQCGAESSRLSTMPSAGIDVKICESCRNQYTHKTCSVCRKYRKVSAIIDGRAYCNGCHVDPGVSHACPTCASLVFGAGQSRCRACTNEEAIQREVALSQHVFEHAWAGDVWNAFGTWLYQRDPGKPRLLHVLRSHQPFFERVDANFQSSAELTGVALLRLFGTAQCRKHLLPIQFLQQSHGVVLATQEKTQSAESDRIASILVQARREPWVGVLDAYSEHLAAAGLATRTSRMYLAAAASVLRELGVIDQPWPHSTLEGYLAKHPGAKNNVSRFVTFCREVLRWDVRLAEPAPLVRPLDDPARSVSKLAKSLRKAEAVGVAKASKRLVVTVLVTALGVSEKRFQSLNASNFERQAGAITLRLDAEQILLPPELVPYAERLMVLNEGTHDTEPV

SEQ ID NO: 1275 - protein, 469 aa, synthetic construct
  REGION 1..469: note = TnsF-Tn7 System Protein
MRLESLRLKNFRSYEDREFLLHPQFNLIVGENGAGKTSVLEAASVAIGSWFLGIRGYDSRNIRPRDVRIERAMIEGRYRELKQYPVRVSATAVFHLWEAHRDAQSNLVEVVRADDCKLRWTRSVEGENGRTTQQEAKEIRKLAEDMAKRVYGRTPRILPLIRYFGAGRLWESVRDTEKSKAQRAAKLPQELENIDDVRKAQAEHAELSKPFYGYKFSVDKRCSADEIIKWIEFERRNELDDEEPSQALALVYKAILSMLPDARSVRYQLKQKSLLIELKDWRMLRFDELSDGYRNVLALAADLAIKAAMLNPQLADRALELTPGVVLIDELDLHLHPKWQRQIVEAFRETFPMLQFICTTHSPFLIQSLRSGEELIVLDGQPVAQVNNMDIDEIAEGLMNVPETDVSPRYAQMKDTARDYLEALERAPIDDRAKLEAFKDRLAEAISPYADNPAYQALLEMKRVAKLGG

SEQ ID NO: 1276 - protein, 469 aa, synthetic construct; identical to SEQ ID NO: 1275
  REGION 1..469: note = TnsF-Tn7 System Protein

SEQ ID NO: 1277 - protein, 226 aa, synthetic construct
  REGION 1..226: note = TnsF-Tn7 System Protein
MEKQVNARLDELKPVRKIRSNGRSLTGRLTVATGPGVAFESSLERDWLICLDFNPQVKLILEQPFTVTYETEGCTQRYTPDVLAQYDDVDGLTPIIVYEVKLLEDLRKSWSKYRKRFSAAVSFCRERDWRFKIVTEKHIRTPFLENAKFLRTYKRSPVQQLYRDQLLYSLKALGPATPQSLLAFSYLQFESKMAALPELWRMVATGELGAELSKPLTMSSPIWMPK

SEQ ID NO: 1278 - protein, 642 aa, synthetic construct
  REGION 1..642: note = TnsF-Tn7 System Protein
MRSDNRIHKAFYTAEPGQLVTSGGRRYRITHLVSVDSVFAVDLETNESTRLRIDTLDFTPVLEDAAAKAEVPRKDLAQYSDEEWAEAQRRMQAIKPLLDRPMRPRSETEKIAQGVGVHVSTLYKWLKAYQLAGHVSALVPSKPGRRTGVRLLTDEQEKLIESVIADDFLTKQRNKPQHIVDEVNRRARLAKIPAPHANTVRNRLKSLPARQTLRERGRRDLARGLYEPIKGEFPGADFPLAIVQIDHTPADIIVVDEAHRRPIGRPWLTLAIDTYSRMIVGLYLTFEKPSSTSVAMCLANAICPKREYLATLGVAGEWPVWGVMNVLHLDNAKEFHGAVLERGCEEYNIDLQWRRPGVPEDGGTIERMMGTVANQVHKWPGTTFSNPQKRKGYDSEAEAALTLAEFERNLVDFIVNVYHQRRHAQLGMAPIKKWADGVAGDATRPGKGIPAVPADPMRLRLDFMPIFYRSVQQYGIQIDLINYYDKVLNPYINSTDPNDEKKRRQFLIRRDPRDISKIYFFDPLSEGYVQIPYRDIGHPPMSAWELKDIQRELREKGRRDIDENAIFEALGRMRAMVESAVHKTKSARRQATRNPAKMKHSQDGQKPIEVILETEQKHKQPVLDDDPFAQPVVPFDDISVYR

SEQ ID NO: 1279 - protein, 296 aa, synthetic construct
  REGION 1..296: note = TnsF-Tn7 System Protein
MTTVLSHLAPDAMAALELPSDERDDFCKKDRWIGYERATQIMQQLDEVLLYPRTLRMPNVLIVGQSGNGKSAILKQFCDRHPVQITAAGDPVAPVLPISMPETPDEAEIWSEILWALGVSHGERDSTKVPKSNAKSVMKYANIRVLAIDEFNNLVYAGRRAADILALIKGISNDLKISIVAAGTQAAINALNSEPQMKSRFEPAALDRWRLDTTYLRFLASFERTLPLAEPSNLASRELAPLIYGIGGETIGGTVKLLKAAACKAIELQRECIDADVLKKANIVRRDGWDDVMRRI

SEQ ID NO: 1280 - protein, 296 aa, synthetic construct; identical to SEQ ID NO: 1279
  REGION 1..296: note = TnsF-Tn7 System Protein

SEQ ID NO: 1281 - protein, 327 aa, synthetic construct
  REGION 1..327: note = TnsF-Tn7 System Protein
MKAQAAIDLMSDEQAQHLTLSFVGWANESGRHSKLAAGFARYAQALMRIDNAVLASGGVIDSAFLQKLFTTEEIRSMGILAQYMTETGLLTANNQERLEASLQRLVERQLQEVVGKSWEMDVKGFHRFMQAKEKPLSLRSVKVYLNVAIQLLQHSKVNRAAELSNAALEKYLRKSPGSTASASAFVSYLRATGVVALHLQKKAGQSPTVAHRAKEVRRIQDRLEYVVQRHERLPLIAKLVSLLFGARLEHVLQLRMDQLAVSASGTRVFLKDEWVDAPEEVAALVHEMAAGSSPTRESGERWVFPGRMATDHLSTAAVQYHLNKLNQ

SEQ ID NO: 1282 - protein, 361 aa, synthetic construct
  REGION 1..361: note = TnsF-Tn7 System Protein
MSGRPKTPLVLSATEREQLIALAKRRKTAQALALRARIVLACAEGLDNKVVAARQRVTQQTVSKWRGRFVELRLEGLLDAPRPGAPRTIEDERVDAVIAKTLESVPVGATHWSSRTMARAMGMSQTAVSRIWRAFGLQPHRQETFKLSSDPFFVEKVRDIVGLYMDPPLKAMVLCVDEKSQIQALDRTQPILPLMPGIPERRTHDYMRHGTTTLFAALDIATGQVIGELHRRHRSTEFLQFLRSIEANVPAQLDVHLVMDNYGTHKTPAVKAWFARHPRFHVHFTPTSASWLNQVERWFATLTEKCIRRGTHRSTRQLEQAIHQYLELNNSDPKPFAWVKSADDILASIERFCLRISNSGH

SEQ ID NO: 1283 - protein, 240 aa, synthetic construct
  REGION 1..240: note = TnsF-Tn7 System Protein
MTDHEITIVDVTESEKGVRKIPMSYRSVTGRAQASGETVPYESTLERDFAYLADFDDEVDTIISQPLCIRYRVNNGRLRRYTVDFLLKFRPQDGLRRRRPGLYEIKYREELRDRWGELEFGFRAARQLCRSRGWSFRVVTERQIRGPYLENVLFLRGFRTYDDNAGLGLRLLETLEELQVTTPAILLAAAFQDLENRAMAVGVMWRLLTMGYIGANLAFPLNMASEIWFEEVLNDDSDAA

SEQ ID NO: 1284 - protein, 649 aa, synthetic construct
  REGION 1..649: note = TnsF-Tn7 System Protein
MTTQMPLETVTAFDVRPEATVAYKNELHRVCAVLSLDRVIIQHVQSGRTESVLLDHLRHPSTVLELSAEKAEPLPALEAFSQAEQDLAKKRLEQLGELIGKDSRTREDVARVATTMDLSTASVYRLIKDYEQAGSLVGLIPGQRGPKGPRLPERVEEIIRDIINELYLQDQKLKVVDVFQELEERCKAEKLKLPHINSVRNRIKKIPAKEVLRGRGYSQEADKFTPTPGEFPPTRNVLGVVQIDHVRLDITVVYSDTREPWGRPWLTLVIDVMTRMIVGFYLSMSAPSSTSAGMALAMGMLPKKDYLADLGLSGSWPVQGKIHKVHCDNAKEFRGAVLEHACHEQRIDTEFRRVKTPRYGGHIERMIGNVNMMLQKKPGTTFSNPQKRGDYDSKKKSAYTLRELEVEIADWIVNHYHVSKHGALKKPPIKAWEEAILGTSKTPACGLPQLITNPEKLVFDFLPQDTRVVSPTGIRINKADYFSEVLIPWINYADPKTGKKKKFVIKEHPRRRNAIWFLDPQTRQYYRIPQFPPPPDTDYENQLTGEEFSALRSRDDAVGKAMEDTDAKAGYRQRSKEREAASVALTTTARKAARSGKSNQAGKKPTKPKQPDRSQIEDRMLGGVNTAPDPSEAFSGFSNAPVMPFTTRS

SEQ ID NO: 1285 - protein, 548 aa, synthetic construct
  REGION 1..548: note = TnsF-Tn7 System Protein
MDQQTRRVMVYLAEMEELTTGDAIYARREDGSIKFLVIDEAAGSIPSLILGSFWRDRTIQPDDLQNWVQVRDAILPEQTWQLTTLGALGLSTNPSSDSKGLPLAGTDAAGKAINVGRMPVLHGQTESGLDIYIPCYEIFRRFFGITTELANALVGGRWSNEVGKLVNLETTRVTEEGDFEIEPLVSLSNVACRAIALFQTAPHALTRAAAIYVNIVNAIRALDDSPWIEAWPPWQNQEMRISFMGEPLPGGGVLALWIHDAQFPKLPYPITRLTQQIIPKAEPEAPTGAVEPEQKTQQDEDESTSITRPGDVRPMGRAVHLAIQDTWSDLEPLRRRVISTRTIPYDPGKPKRKRTPPKKRVGTGARSRQGEAPPGSFSSEDQARVEDRFRALAECFQLMVQQKHLLSFTHYSLVNPVETPSASYCALPAKIGGVDRPWAVVEERPRMCWVVELTRADGQRFYWLETESRGEKHHRALLVRMQENASLPVATLDTLLKQAVLNSGAWKPKDLAINHNALTTCTVNHRYGMVKPSLVLHKMEQLAGIPQP

SEQ ID NO: 1286 - protein, 298 aa, synthetic construct
  REGION 1..298: note = TnsF-Tn7 System Protein
MDFEHLHPDARAVLQSSLEDRLEFVRRDRFIEYPAAEAILRDLADVVAYPRVQRPPCRAVIADSDNGKTSLTSELIRRNPVVLDATGNPITKVLWAECPPAPDEGRLFSSILTALDVLHRPDAAPERLEAIVSQELIAHQTTTLVIDELHAMLNGTARNQRLFMAALKRLSNTRNISVVCCGTQEVTRALATDSQFMTRFQKLALPRWQANEDFQRLLVSFEMFVPLPKPSGLSQGKLVQLIYMKSARTIGSVRAIVRAAAEMALREGEDRITYALLDKAVAGLVERLLNGGRNDGAI

SEQ ID NO: 1287 - protein, 298 aa, synthetic construct; identical to SEQ ID NO: 1286
  REGION 1..298: note = TnsF-Tn7 System Protein

SEQ ID NO: 1288 - protein, 804 aa, synthetic construct
  REGION 1..804: note = TnsF-Tn7 System Protein
MTQPDRILSDPCGTIVDMVARVEPDLTVEQIRDAVKQAAPSRTARRSLAKTLTADPALLTSRRPEGSRSVERLIHKLLAHGARQVAVPLCAGCGKPEPLPQRRGKLRVCAYCDATARAQQQPCADCGLPRVIRYTGRNGEGLCSSCQPKDNIDWAQRICDHIATVDPTVPAETVRQIITTITRGRPHYVRRLAWDLEDRPGMLTGNAGHGTPKVIALIDALRDAGAQAIVRPPCPHCGRTSVTLRNTLGDVRVCPTCYNTRKAVNCSRCKRRSPVARRSPDGQSICNHCDRTDPINHEECSGCGRLRPIIRRNSPTGPLCDTCYRPPVAICLLCGHARPCFGVAGGMPRCENCTRLREPCLDCGRTMPVKARTANGPLCETCFKKNPVSFKACTRCGTVERLRHHGLCHRCACNEELTALLAGPDGAVAAPLMQLHSTLMASNHVRVLDWLQKRNTAVSVLREIATAECSLDHESLDARTDKAVEHLRAILVAAGALPRRDEQLVAAERWIAAAVAAIADLSDRHTIQAFATWTHLTRLRKYSRRKPITAGQAVSARRSVKAAVGFLAWLRAEGLNLEAVGQRDLDRWLEGGPTTRQYARDLVLWAVRTKRATNISIPARLKNSPTQALDEDERREIAHRLLGDDQLDARDRVAGLLSLLYAQPFSVIIRLTADHVVVREKSVLLRLGKEPLELSPELGNLIQQIAADRRRDGQIGQIDAHWLFPGIRPGQHLSHITLAARLKRLGIRSLPSRTAAIRDLTAEVPAAVVNRLLGLSTSTATSWAKRTAKTSYAAEIARRSDSDK

SEQ ID NO: 1289 - protein, 804 aa, synthetic construct; identical to SEQ ID NO: 1288
  REGION 1..804: note = TnsF-Tn7 System Protein

SEQ ID NO: 1290 - protein, 380 aa, synthetic construct
  REGION 1..380: note = TnsF-Tn7 System Protein
MARDVEAPIGSARLELVEGVRLLHPADAVLEAMLTGWGRQQRGGRHLQEKTVSDRIATIRRFVKFADAFPWTWGAADMDEWTTHLVAEKHLQPSTIRATQGAVRMFCDYLLDPRYDWAVECERRFGTHPIQVCHEWNTLDHLLDYEGDPDRRPMTRGELQQLFDHIDERVDLAIRRGRKGALTAYRDATLFKVIYGWGLRRTETARLDTFDWYRNPKAKEFGRFGMLEVRYGKSSRGQPPKRRSVCSTMPWAVEAVEDYTTNIRPRFKGHDRSKALWLSERGTRLSAKEIDERFSVYRKALKLDEDLVPHCLRHSYVTHSIEDGADPVFIQQQVGHEYASTTALYTGVSGDFANTMMRKAIDSALQRDLQDFGPGGRSRR

SEQ ID NO: 1291 - protein, 112 aa, synthetic construct
  REGION 1..112: note = TnsF-Tn7 System Protein
MTAKLDYRWKLREVMATRGMFSTISLQPLLAERGIDLSSSQVYRLVTERPERLSLKVLMALLDILDCSMDDLIEPVASASSAAKPKRAVGDADTSVGSFRPKRARIVPRSEP

SEQ ID NO: 1292 - protein, 273 aa, synthetic construct
  REGION 1..273: note = TnsF-Tn7 System Protein
MLERPWLAELYRGYGEWLLSKSIPTAALPEKAAAAASFFRKIDLDDDVRQPLIASDLLRIFDSGELRKHLNAQRFVCEHYGIEIDQSARSQARDLARIERGLKEAAGKPWESLLRQYRQALAGKPARTTAQYLAVAQAFCVDGQISGPFGQAEIVAYLSKVPGARATLSTWVSFVRTHYGWQVSMPPKHPAKVSIKRDALKLNDLLQHVANPQLASDEDLVAILHLVYQFDSTHLKRHITSVDLEGNIQTKNGAIAVQKEMKGLVLEWAKRNL

SEQ ID NO: 1293 - protein, 200 aa, synthetic construct
  REGION 1..200: note = TnsF-Tn7 System Protein
MTGKVNLEPGGVAGFESSLERDLFLVLDFDPQVLSVREQPFTLTHIHDGRVRPYTPDALAEYDRERTPTVVYEVKPLEVLRAEWHALRPRFKAAVAYCSQRDWQFKIVTERHIRTPYLDNAKFLRIYRAMEPLLVRQAQLRYTATALGPTTPQALLAAAYWPKDEQALSIPALWQMVARGDFMIDLQKPLSMFSPIELRE

SEQ ID NO: 1294 - protein, 324 aa, synthetic construct
  REGION 1..324: note = TnsF-Tn7 System Protein
MRQAIAHGSSADKFTRLVLPHSSVWNRDLDVCAGSEFMSALCASSGHPPELLDELTLYRWTEVTRRSEVRTKGVYHWIGCLGLYHRTRRLHGQAFCPDCLGEYGGFLRQWRLSFWTVCPFHHRLLMDACPHCGAVVQPHRQDFDLRLCWSCSGDLTSCSPVCAVPTASQGLLFNALVGPSDWLEPCNFRCSGRQLLWGADVLLSAFYGHGRQEEQASDEHSRVEKRRIELRHADMELLDSLLAADARTIGPVAASYHVTQRCFRQEMPGWLQSLVALLPTGRVNKGFAAGRREIKAVVDAQRSRAPGWQELRADLLFKMIGRRA

SEQ ID NO: 1295 - protein, 627 aa, synthetic construct
  REGION 1..627: note = TnsF-Tn7 System Protein
MTASNFFEISPGREVMVGQRRYRITHSLDLHSVLAEDVETSQSTRLRVETMSRVIEAEAPDGSPNYSVHHYSEKDWAVAQRRFEAIKPLINNPYRTKRDVAAAGLRIGVKTSTLYKWIAIYLDHQHVASLVPRKPGPNKGGRYLSAEQELVIASAIEDEYLTKQRRSPAAVVLEVLKRCRVAKIDPPHENTIRNRIADLRPASALRRRGQKDKARDSFEPIMGAFPGADFPMAVVQIDHTPLDVIVVDEVHRKPIGRPYLTLAIDVFSRAVVGLYVTLDAPSATSVAMCISHGMNTKSDYLRELGVEGDWPVWGQIGTLHADNAREFKCKAVNRGCQANHIDMQWRPVKKPHYGGHIERYMGTVATEMRNIPGATFSNTQQRKGYDSEKESALTLREVEQYLVRFIVNIYHQRAHSQLNDSSPMRVWEEAILGGAKPGIGRMLPSNPDRIRMDFLPYFSSTVQRYGVRIDHVYYYDPILDSYIGAKDPDNPERARKFLFARDPRNISAIYFLDPVVGNYIPVPYRNVGLPPVSAGELREATRRVRAEGKAAVDEDLIFQSIEANRQLIDESVAKTKAARRQSEKRPKTKPETKAPVQSTKAAVPSRPAPDRNIFSQPAEVFEIGEID

SEQ ID NO: 1296 - protein, 204 aa, synthetic construct
  REGION 1..204: note = TnsF-Tn7 System Protein
MLFLDELPEWNRSALETLREPLESGHIRIARAARSVQYPARFQLVAAMNPCPCGWAGDRSNRCLCSDERINRYRARVSGPLLDRIDLHISVARMDAVELRESTPLGEPSAAVRARVEAAHARQQARGGLNAHLPPAALRACTRLSEADQDMLEQAIERLQLSARAMHRILRVARTIADLAGCEVIQTAHLAEAIGYRQLDRGKP

SEQ ID NO: 1297 - protein, 293 aa, synthetic construct
  REGION 1..293: note = TnsF-Tn7 System Protein
MSTYAHLHEKVIPYMHGTVEERIAVCRADRWIAYTKAKSVLDDLDQLVVYPITQRPPCRLILARGDNGKTALLRQFQLRHQMKARSDGTMCAPVIRIAMPATPDLSQIWSEILARCATTHRKSDPAHVKYSMVVAVLRSRGTRVLAIDEFNDVALARKGAADILAGLRKLSNDLNLSIAAAGTEAALHALSHDPQMQSRFTSVAMPRWDLEVPYRSFLNTYELLLPLAKPSNLASEGLSALLFDLGGVAIGGTVKLLREAATNAIRTGEECITEETIRSAVSATDSKAVAAEL

SEQ ID NO: 1298 - protein, 293 aa, synthetic construct; identical to SEQ ID NO: 1297
  REGION 1..293: note = TnsF-Tn7 System Protein

SEQ ID NO: 1299 - protein, 488 aa, synthetic construct
  REGION 1..488: note = TnsF-Tn7 System Protein
MNIPPDKPHAVCARCQQSGVKFATTWPEGRICRRCYQRATRIHGACISCGTTRLLPGLIDGEPACVDCADIPKDFRCTRCGREDEPVRRGLCAHCCLTDDLSGLLAGDDGDISPIVRPLFDALSTQTLARSATIWLTVNPAAKQLLRDLATGAAPLTHDTFTTHPSPEKVLFLRQLCIEHGLLERVNFDIERFQAWVDQMTAAEPASEARLIRQFARWVHLQRMHALDAAGKMRKGTFLSAKQSTSTAIGFLRHLRERGHTPSECVQADVDDWLTGGPTTRSLARTFVRWGVKNGHIASVEFPYRVAKTQPIITQQQRVQHLRTLLNTHVESETAEQVAGMLFLLYAQPLTRIARMRLSQVADAGDRLTVAITADELVVPTPFDEIVRAHLRDLPNTNTSAHRNSQWLFPGARPGEPMHQSTMMNKLRDRGIDLRGARNAALRTLVLEMPAPIVADSLGYSYNVTDRHRAAAGAIHTDYVGRRATSRK

SEQ ID NO: 1300 - protein, 488 aa, synthetic construct; identical to SEQ ID NO: 1299
  REGION 1..488: note = TnsF-Tn7 System Protein

SEQ ID NO: 1301 - protein, 785 aa, synthetic construct
  REGION 1..785: note = TnsF-Tn7 System Protein
MADVSHTADSHDLIRVQGARENNLKEISVDIPKRRLTVFTGVSGSGKSSLVFDTIAAESRRMIDETYSAFVQGFMPSVPRPDVDVLEGLTTSIIVDQERLGANPRSTVGTVTDANAMLRILFSKLGQPYIGGPTAFSFNIPTQKASGVMTGPGGEKKIVKDAIYLGGMCPRCEGRGAVSDLDLAQIVDESKSLDEGAIMVPGYTADGWMVKGFSQSGFYPADKAIADFTEKQRHLFLYGEVTKVKISGINMTYEGLIPKITKSMLSKDLDALQPHIRAFVERVATFATCPDCDGTRLTEGARSSKIEGVSIADACRMQVTDLAAWVRGLDMPEAGPLLKALSANLEAFVTLGLGYLSLDRPSGTLSGGEAQRIKMLRHLGSSLTDVTYVFDEPTIGLHPHDIQRMNTLLLQLRDKGNTVLVVEHKPETIAIADRVVDLGPGAGSAGGEICFEGTLEGLRASGTLTGTHLDDRASLKSTVRAKNGAIEVRGADENNLQDVDVDIPTGVLTVITGVAGSGKSSLIHGSVSGRDGVVVIDQGAIKGSRRSNPATYTGMLEPIRKAFAKANGVKPALFSANSEGACPSCKGSGVIVTQLGFMDTIETPCEDCGGKRFQAAVLDYKLAGKDITEVLDLPVTEARQFFADGEAKIPAVVTILGRLEDVGLGYLSLGQPLSTLSGGERQRVKLAIQMGDKGDVYVLDEPTTGLHLADVDKILGLLDRLVDAGKTVIVIEHHQAVMAHADWIIDIGPGAGHDGGRVVFEGVPADLVAAKSTLTGEHLAQYVGG

SEQ ID NO: 1302 - protein, 785 aa, synthetic construct; identical to SEQ ID NO: 1301
  REGION 1..785: note = TnsF-Tn7 System Protein

SEQ ID NO: 1303 - protein, 381 aa, synthetic construct
  REGION 1..381: note = TnsF-Tn7 System Protein
MRTQSPRSPDASTVRALLPPGVAILNEPETVWAAMLDGWSAQQLARNLSLSTIVSRRRLAERFRDFAEEYPWAWTVEQVDHFFMELRALRGGSRSTVLGYQNALRMFLGYLTDPTYGWGELCWERFGTHPAQVFHEWNTARHVQDAIGEPGKRPYTRNELEDLFDCADERVVRIRRAGSKGWIPAFRIATLMKTAYAWGLRRNEVRMLDLVDLASNPQARQFNDLGIVYVRHGKAMRGSPPKRRAVLTLPEFAWAVECIEEWLTEVRPLFVAPLATMLWPSERGHGASPIAADSVSRAFNEVKREAGLDDTLDFHSLRRSYVTHLVEIGYDAFFIQQQVGHEHASTTSIYTGLSPDYRARVVNDAIARMAHATTTDSPKEN

SEQ ID NO: 1304 - protein, 111 aa, synthetic construct
  REGION 1..111: note = TnsF-Tn7 System Protein
MQRRIEYTWRLRELMTAGGMHNISDLIPQLKDRGIELSASQIYRLVGAKPERMNIALLGALLDVLDCTFEELCPVAVVATPARLAANGTNGGSSDRKDAMRPRRARIHRPE

SEQ ID NO: 1305 - protein, 512 aa, synthetic construct
  REGION 1..512: note = TnsF-Tn7 System Protein
MTESRFRECVRCRLVGTTVMLPTGPICYRCRRNIAYHPAVCPECFELRPIAYPSMSSYGVLVCAGCAGEESVFACAECGREDHPYGATRCARCILAERLAELLTDPGTGTIHAGLRPLHDELAAATRPQSVITWLKKPPATGAELLGRMARGELPISHDTFRALPADRSHNYLRELLTSAGVLAPYHPPIEQIERWLADLLDGLDHDTAAVISRYGRWHHLRRLRGLAERGTLSKASIYSARSKINGAIRLAQWAAARGITVDQLTQTELERYLADHPGGRTSEQSFVAWLRRTRTNTRVNIPWREETIPQVVVSDADRWNQINLLLHDDTIGLYARIGGLFTLLFAQPLETIVAMRTDQITIEEDGPVLVAFDAIPIEMPPGMDELIRRYLGTPRTPSIASRDHGWLFPGRHPGRHMVRENFRAKLVANGIRPGQSRHVAMFALAGEVPAPILAELVGIADKTAVKWAALAARDWAGYITDRNEAFRSTNRTHRIENEIPGADTTSLPAQS

SEQ ID NO: 1306 - protein, 512 aa, synthetic construct; identical to SEQ ID NO: 1305
  REGION 1..512: note = TnsF-Tn7 System Protein

SEQ ID NO: 1307 - protein, 1207 aa, synthetic construct
  REGION 1..1207: note = TnsF-Tn7 System Protein
MTVSMRVMSAGDGYKYLLKTVAAADGNRPLSTPLTRYYMEEGTPPGRWLGAGVAALGKGEIQVGDRVSEHQLQLLMGTGHDPITDEPLGRAFATYKSQEERIEARIADLDPTMTPGAKGEAVAQIVAEETARSTRRAVAGFDFTFSIPKSASVLWAVADAGVQALIGEAHHRAVAEVVAFMEREVAATRTGATAGDGAVAQVDVTGLIATAFDHFDSRAGDPHLHTHVVISNKAKTVLDGKWRSLDGRPMHAAVVALSELHEAVFADHMTRTFGVSWEAREMGRDRNPAWAITGVPEELVAEFSTRARHIDAEKNRLIDEYVAQHGRQPSNATILKLRAQATLATRPEKQVRSLADLTAEWRTRASKTLGQDATSWAREVTDNDKPMLLRADDVPLDVIGELGRTVVEVVGEKRSTWRRWNLMAEASRQTMGWRFATMQDRGAIVAMIADAAELGSLRLTPPELATSPVVFRRPDGTSVFRPKSSTVFTSESQLAAEDRLLERAANLGGPTVTLATVEKITYRPDADGRMLGDDQADALTRIAVSGRMLDVLVGPAGAGKTTAMNALRRAWEAEHGSGAVVGLAPSAVAAQVLAEDLGIETENTAKWWQNHLVHGTTFEAGELVIIDEASLAGTLSLDRITHLAQDAGAKVLLVGDYAQLQSVDAGGAFAMIARDRADTPELVDVHRLTHAWEKTASLELRHGRTAAIDTYLAHERITDGDAEAVTDAAYNAWRADRDAGLVSVLIAETHEDVTMLNRRARADLILNKTLKPDREVELRDGTAAGVGDTIITRLNNRNLRTLAGRDWVRNGDIWTITAVGDDGTITIARDYGTGTTVRDDGTIRARRRGRRFGGSIVLPAAYVAEHVDLGYAVTAYRAQGITTDTARVLVEPTSTRETFYVAMTRGRHSNHAYVTLDRADDHAQPHPGDDPHATARSVLYGVLQHSGAELSAHETLVAEHELWGSIAQLAAEYETIAAAAQHDRWATLVRGSGLTDEQAEGAIESEAFGPLAAELRRAEANHHSVDALLPRLVAARGFGDADDIAAVLHYRVERATARPAGSGRTRKPPRLIAGLIPQAHGVIDTEMRTALDERESLIEHRADSVLEVALTESAPWTTALGTPPTDRRRAAAWRKSARVVAVYRDRYRITDDAPLGAPPESAAQKIDAARARSALDHVRQLAADESRQAEAGLQSARRDQSGPGRSI

SEQ ID NO: 1308 - protein, 1207 aa, synthetic construct; identical to SEQ ID NO: 1307
  REGION 1..1207: note = TnsF-Tn7 System Protein

SEQ ID NO: 1309 - protein, 213 aa, synthetic construct
  REGION 1..213: note = TnsF-Tn7 System Protein
MAFGNDVARRAGKVVVFEGYDGSGKSTLISELRRRLPNASIRVVGRKAESQLVDIAKILEREDQRPDPNAEILLRIAVEFERLGIVSESLQHNDIVVCDRGFVSLVSWLDYLGVERAAFESLLVQLGDYYQSALTLVCEADFETCWTRSSQREQLSRKDRLGKEVNRRYFEQYDANIHAYAASNPGCVMIDTLVNDISGSGNQMIAAIEAHEI

SEQ ID NO: 1310 - protein, 213 aa, synthetic construct; identical to SEQ ID NO: 1309
  REGION 1..213: note = TnsF-Tn7 System Protein

SEQ ID NO: 1311 - protein, 358 aa, synthetic construct
  REGION 1..358: note = TnsF-Tn7 System Protein
MLASGVVHLDEQAAVFEAMLVGWERQQKSRLLSEATIEPRIALLRRFTEFAGSFPWEWNAGDVEDFTVSLMSGGARLAPSTIRGYHLTLRMFCDYLLDGRYGWTAECEHRFGAIPSQVCHDFNTVAHLSEYEGRPGRRPFTYDELQHLFDFLDTRVERVQRSGRKGAWAALRDAQMIKTCYAYGLRRRELCNLDVADLRPNPHMRQWGRYGAVHVRYGKGVRGGTPRRRTVLTVPEFDWAVDGLRQWVEQARPLLEPGTRDALWLTERGQRISVKTMDHRFAWLREQAGLDADLSLHCLRHSYVTHLIEFGYPERFVTEQVGHSYASTTAIYTSVSNDFKTKTLKAALARVYESTEER

SEQ ID NO: 1312 - protein, 106 aa, synthetic construct
  REGION 1..106: note = TnsF-Tn7 System Protein
MLWHLRQLMAAKGMFQTTDLMEPLHERGVELSRQMVHRIVTKPPQRINTDLLAALCDILECTPSDLLELHVDHQRATKTVNDRGGPGIGDLRPVRARVRRPDGIEE

SEQ ID NO: 1313 - protein, 522 aa, synthetic construct
  REGION 1..522: note = TnsF-Tn7 System Protein
MTTDQPTGLTARNTTRGRPRTTGTATCARCSRSAGRTRATWPEGKICGPCFTTATRTHGTCPDCGQQRLLPGPPETSGGPRCAPCAGITHDFHCTRCNHEGEFYRTGICARCALRDDLTQLLPTNPAEPATAARLIDILCQAERPESIITWKRSATVQALLRSLTNGTTPLTHEGLDTYAETAERATNHLRALLVHHGLLPYQDPYLARFEAWIKAKLDPLPEQVAKPVEHFATWHHLRRIRTTTTPEKNARGPVHSAKQEITETIKFLLWLWETHQRTGATCTQQDIEAWLAAGPTTRKQIRTFIVFIKNTGTNHRVELGYYTPKTRPTITQDQRLAWLRELLTGTSESLPYRVAGALLLLYAQPLVKVARLRTDAIETNETTGNIRITLGLHPVPVPTPVADLIRQHLASRPNLRTGSNTQSPWLFPGTRAGQHLHPNTIMDRLRSLGIDLRGARNTALDELLTITPPPLVADALGYSHQVAFIHADNAGDAWTRYVSRRTNHTPEKLRDNKRKDRNGKA

SEQ ID NO: 1314 - protein, 522 aa, synthetic construct; identical to SEQ ID NO: 1313
  REGION 1..522: note = TnsF-Tn7 System Protein

SEQ ID NO: 1315 - protein, 797 aa, synthetic construct
  REGION 1..797: note = TnsF-Tn7 System Protein
MTIAAGSDTQSPAMNIADTHDLIRVQGARENNLKDVSVEIPKRRLTVFTGVSGSGKSSLVFATIAAESQRMINETYSAFVQGFMPSLARPDVDVLEGLTTAIIVDQERMGSNPRSTVGTATDANAMLRILFSRLGQPHIGSPNAYSFNVPTVKASGAITVDRGEGKTKTEKASFNRLGGMCSRCEGMGSVNDFDLTALYDESKSLSEGALTIPGYSMDGWYGRIFSGTGYFNMDKPIAKFTKKELHDLLYREPTKVKVEGINLTYEGVIPKIQKSMLSKDVDALQPHVRAFVERAITFTTCPECEGTRLSPEARSSKIKGKSIADVCTMQITDLAEWIRQLDEPSVAPLLKGLQHLLDSFADIGLGYLSLDRPAGTLSGGEAQRTKMIRHLGSSLTDITYVFDEPTIGLHPHDIERMNQLLLQLRDKGNTVLVVEHKPESIAIADHIIDLGPGAGTGGGTVCYEGDLDGLRGSDTTTGRHLDDRASIKATFRKAKGQLEVRGASTNNLQSVDADIPLGVLCVLTGVAGSGKSSLIHGSVAKRDGVLVIDQGAIRGSRRSNPATYTGLLEPIRKAFAKANGVKPALFSSNSEGACPTCNGAGVIYTDLGVMATVESTCEECEGKRFQASVLEYKLGERNIAEVLAMSVNEAEGFFSEGEARTPAAHKILDRLADVGLGYLTLGQPLTTLSGGERQRLKLATQMSEKGDIYILDEPTTGLHLADVQNLLGMLDRLVESGKSVIVIEHHQAVMAHADWIIDLGPGAGHDGGRIVFAGTPAELVAGKATLTGKHLAAYVGA

SEQ ID NO: 1316 - protein, 797 aa, synthetic construct; identical to SEQ ID NO: 1315
  REGION 1..797: note = TnsF-Tn7 System Protein

SEQ ID NO: 1317 - protein, 368 aa, synthetic construct
  REGION 1..368: note = TnsF-Tn7 System Protein
MAVDGSGRVLQLSAVRLLHPEEQTLEDMFTGWRNQQLSRNLQFDTIDKGIACVKRFVKHVNEFPWNWGPEHVEEYFGDLRSIYQLKQSTIRGYQSSLRRFCSYVSNPDYGWDRVCEERFGTHPSQVFFDWNTASHTQEYEGRPSKRPFTRAELQRLFDHADDQVELIAASGKKGWQAAYRDSVMLKVTYSYGLRFNELRHLQTVDFATNPQARRFGKTGICKVRFGKSLKGSTFKSRSVLTVFDWTSGVIDDWLANGRGTLDTLDLFHSERGGVICESTLLRRLRRYLKELGMPMDGLDLHSLRRSYATHLLEDGWDSRFVQYQMGHEHASTTGIYQFVSDDFRNTALRAALDGTMNDVLGMQMRGQW

SEQ ID NO: 1318 - protein, 112 aa, synthetic construct
  REGION 1..112: note = TnsF-Tn7 System Protein
MVKREVQYRWRLAELMAARGLHNTTDLIPLLAERGITLSRPQVYRLVNQKPERVALQVIAAICDIFSCGPEDLITVTAADIRARKTGTNSPNVVDLNRTVRPRRARIIDDDN

SEQ ID NO: 1319 - protein, 580 aa, synthetic construct
  REGION 1..580: note = TnsF-Tn7 System Protein
MRDGLPLLREQSQATDARPEHPPARSGTPPGYTTSWDAIVVTARDARGPWCSACWQHARPGPTCGDCGQNPSMPMPSWDGTPRCVSCYGAARLPCSRCGTLARAERRRPEGPVCLTCVDEVRFTHAECHRCGRLAAVFHQEEARPLCPECAGVNFTYRCPTCSAIGRLLHGQCPRCRALQELDETFAGPDGERSPQLAPLAEVLEQYEQPYSLVLYLRRPGGQLIRAMASGDLECSHKALDALRQTASVQHLRGLLVLAEVLEPREEQLAQFKRDVRVCLEEVADLHDRTVLARYARWHLMPLAHHRLERSGFNRFQREHLRRKLQTAHVLLTHIRRRGNTLDNVTQTLVDRWLIANKSRQNQARSFLLCAATCHLIPRNVAIASATRTVDRSIMSDADRILTALRLETDDSEHITDRVAGCLVLQYGLRTDRLVKLTPDHILVHPEEPGVLGLQLGRDPLWLRPRLSALLQQLINERRPLAAPLRTRKTPYLFPGLRPDQAVTSTTLQRRLTRLGIPSTSKARNGAWLSMVGAVHWKMLADLLGLADGTAHNWHKLNGGDRASYVASRLQASQAPTEPE

SEQ ID NO: 1320 - protein, 514 aa, synthetic construct
  REGION 1..514: note = TnsF-Tn7 System Protein
MTRTYATDEQYERWYMAECCRCGRRRHKGGSWPDGYVCRTCSDRAVRTRGTCPGCGQERALPGLRPGDGAPICTTCAGFSQTFDCSRCGFEGKLLGGRLCERCTLSDRLTALLDDGTGHIHPALVPLFDLLVAMDQPRSGLAWLEMRRGQPGNASQLLRRLGLGEIPLTHDAFHELQPWRAAAHLEELLMTCGVLPAVDKYLCSFQRWLPGHLARIADPEHVKTIKLFATWRVLPRLRARAERSHITPSVRRFAAEQIKYATAFLQWLGERNSTLASCGQIDIDAWWVGNNEHSRTCLRAFLSWAMQSRRCRRTLSIPAMKVSRRAALSEDERLDALGRLLTDAEIPMRLRAAGVIGLLYAQPVSRIVRLSVDDVIRDGDTVLLRLGEPASPVPAPVAALLLEHIANRDNMNTATNPASCWLFPGRRAGQPFRPDHLSALLNEVGVPAAAARGAAIRQQLLELPGPVVADALGYHDKTTSRLIRETGGTWSRYAPGDHARSPTGWLPRGPATVD

SEQ ID NO: 1321 - protein, 580 aa, synthetic construct; identical to SEQ ID NO: 1319
  REGION 1..580: note = TnsF-Tn7 System Protein

SEQ ID NO: 1322 - protein, 308 aa, synthetic construct
  REGION 1..308: note = TnsF-Tn7 System Protein
MVGFSGSVPGAARLHLVDGVALLRPEEQVFTAMLTGFANQQLARNLARTTVEGRENTVKAFAAYVNTYPWHWTPAMVDEWLGDLRSLRELKRSTIRSYSEAVRAFCHFITDPLYEWTATCQERFGTHPVQVVREWNTAVHVQDNEADAKKRAFGEYGRCLVRFGKAKKGSPPKRRGVLTVWDWPPDVLDEWFTEVRPLFGADNNPAAWPSERGLRIGCQRLNSRFIAYRKALGLDDGLDFHSFRRSYVTHLIEDGWDPRFVQEQVGHEHASTTSLYTCVSSDFRTRTLRRHLDSTIAAALQTQTGKQA

SEQ ID NO: 1323 - protein, 111 aa, synthetic construct
  REGION 1..111: note = TnsF-Tn7 System Protein
MKRKVGYVWRLREVMAQHQIFTATELVPLLRERGIDLSASQVHRLVSGTPERLSLQIMAALCDILSCTPANLVTTTAENAGVRKTATDDLPAPPANVAKLRPRAARILPDS

SEQ ID NO: 1324 - protein, 468 aa, synthetic construct
  REGION 1..468: note = TnsF-Tn7 System Protein
MSSGPCPICGREMGKSSKEFCGRCTQGTDRVRGACSACGKPDRVLDHHQVCKWCRRYSRRQCVDCGRTPDQARTIGPTQLCDHCTLRRALDHIIPAQPAGLLAPLRPVILAAEPLTTRRWLARHADLLTALDQGRSSLDHATLDTLPHPKAVGHLRALLISAEILTPDPTGPIRRLENSLDQLLAELDQPHRRIIAGWIRWQVLPPLRQRAADGLELTNSVANARNRIERTIAFLTTLQARGRTLSSITQHDIDDWFAGPGAARWNTRPFLAWAHKRKHLPQRVQLPPASYIGTRTAPADPEERWTTATRLLTDDTLDPADRVAGLLIVLYAQTLSRITTLTRSDITSDGDGVQLRLGADPIDLPEPLASLIQTLPIKRREGTAENLPNPWLFPGQWAGTHIHAVNLSDRLRRIGIEPRRMRLAAAEQLSREIPPAMLSGVLGLRTATIAKHSTQSGGNWAKYAGARG

SEQ ID NO: 1325 - protein, 468 aa, synthetic construct; identical to SEQ ID NO: 1324
  REGION 1..468: note = TnsF-Tn7 System Protein

SEQ ID NO: 1326 - protein, 510 aa, synthetic construct
  REGION 1..510: note = TnsF-Tn7 System Protein
MSPRPRVIDPGNLTCARCHRPARLATREPSPARGKIITLIRNWPDGKICSGCYANAAETFGTCQRCGTHRLLPGRGPDGELWCSDCAGIPSQACARCGREGWLEHKQTCGWCVLGDKLTTALDDGTGRIRPELQPFYDRIVAMPRPRTGILWLNKPHVQPLLHKIATGQVPLTHDGITSLTPARSASYVRRLLVAAGTLPDYDHYLDRFERWLPGWLDTIPDPDHRQILTRYAKWHVHRHLRNAATDDTIGPYREQTARRQLRVAAAFLTDLQAAGRPLERCTQAHLDAWLATATCADKTTARDFLSWTIRTRIAPRLRLPPVKDNPATVISQQHRLEILRRILTDAAIPTVDRVVATLILLYAQRLQRILALRLGDITDGAEGLTINLTGTAVDVPAPFDELIRAHLVERTTTIAPAANTGSDWLFPGRLAGHPIQPTGIRAHLQRLGIPNAPGRSRALRELVLQAPPAVIAPLLGYKAEHAEKIAAEAGNTWQRYAAGTHTPLTGTRP

SEQ ID NO: 1327 - protein, 366 aa, synthetic construct
  REGION 1..366: note = TnsF-Tn7 System Protein
MQLVLPAGVPLLHPETQVFEGMIQGWRNQMLARNLAESTIVAAVRVVRAFKAHHDVWPWLWTPAMSDEWFADLRSVHHIATSTVRSYQVALRGFCRYVTDPAYGWAEDCERRFGTHPIQLINEVNAAAHVADVESEPRKRAFTRPELQALFDWADDQVEQRRMAGRKGWLPAFRDATMLKTAYAFGLRRTETRMLDVVDFGPNPAASEFGNYGALYVRYGKAQRGSPPKRRSVLTVWPWVVPVLEQWFGEVRPLLAGDGPAAWPSERAVRITSPSVDALLRQARTAISLDPVLDFHSLRRSYVTHLIEDGWDARFVQEQVGHEHASTTALYTCVSSDYRTRTLRRALDALVGEVLDDSPTTARKGP

SEQ ID NO: 1328 - protein, 334 aa, synthetic construct
  REGION 1..334: note = TnsF-Tn7 System Protein
MLDGWAVQQRSRLLVDTTIKQRIFAVRRFHRFAGEYPWRWTPADVEEWTSELVGGGVAHSSVRYYQMAVSLFCGYVTDPRYRWAEVCELHFGSHPVQVFHEWNTVVHRAEYEGRPGNRPFTRDELQVFFDYCDQRVAQVADRGRKGWLAAYRDATLFKAIYAWGLRRREAAMLETVDWSANPAAPQFGRYGALSVRYGKAVKGSPPRRRTVLTTMGWAAEAVAEWVEEIRPLYAPAGVALWPTERRAKISTDALTVRFQAYREAAGLDPILSTHCLRHSYASHLLEDGYDHLFVQQQLGHAWGATTAIYTSVGADYKNQALRRALSRALDQPTS

SEQ ID NO: 1329 - protein, 116 aa, synthetic construct
  REGION 1..116: note = TnsF-Tn7 System Protein
MPRTRKPALGYRWHLRRLMAEHDMYATTDLTPLLAERGVALSPAQVYRLVTGTPERLSLRTLVALCDILDCTPNELIEPVVETKPVRATGTTGPAPATITAAKQRTPRRADITSVE

SEQ ID NO: 1330 - protein, 107 aa, synthetic construct
  REGION 1..107: note = TnsF-Tn7 System Protein
MSYTWRLRQVMAQAGMFATTDLVEPLAERGVQLSTSQVHRLVTTPPERLNLTVLAALCDILATTPDELILVESANVPSRKVVNDAPTPRGDRVRPIRAEVVPDTDQQ

SEQ ID NO: 1331 - protein, 494 aa, synthetic construct
  REGION 1..494: note = TnsF-Tn7 System Protein
MVRPRKPSDPDVWPIPCTRCGGHYPIAAKWPDGPVCTYCYQQAKRTRGTCGCGHTGVLPGVLDGRPACRRCSGIALNLDCRICGAEDELYRGGRCQRCELAVLVDHLLTDPQSGTIAAELVPVAAALKVMARPNSGITWIRQRHVTAFLADLSSAPTITHDSLDALPASRTRDYVRALLVEHGVLLQRDETRLRYRQWATEALDRVHHPAMREIIDRYVRWHLLRRMNQSETVSHGTFLRSKQTVSVAIDFVNWLGTEGLELGDLRQGHLDHWIATGPTTRLIVDRFLGWATASRLVAPELTVPKHRRGTSRRLSAAEQDHALQIAVHTDVLSSRDRALAILVLVFAQQIENIVRLRWDDVTITDDQVTIRLADLEIALPEPLDQPWRDLAVNPGHDQTAAHPRSNWVFRGYTPGRHLDPAAARDRLGRTFSARAARLGTLEHLSKLAPVAIIAETLGYHPATIERHAAASSAGYAEYIAAINDAQTDLAIDSP

SEQ ID NO: 1332 - protein, 494 aa, synthetic construct; identical to SEQ ID NO: 1331
  REGION 1..494: note = TnsF-Tn7 System Protein

SEQ ID NO: 1333 - protein, 378 aa, synthetic construct
  REGION 1..378: note = TnsF-Tn7 System Protein
MDVVPGRIPAFLSDQGVGLLRAEDRVFEAMLGGWRAQQLARGLTVAHIEASCRLVGRFQQHANEYPWTWSPHHFDEFMADRRSGHRRLALSTLRSNAGAIRAFCCYVTEPRYGWIPFCEVTFGQVPAQVVFEWNAPRHATDDAITPGRRSLTRTELQRLFDVVDDFVDAEFAKRSKRWLPALRDSIAFKVAYAYGLRRRELAMLEYVDFGPNPHVAHYRRFGAVQVRWAKGTGGSGPRRRTVLTVPEFEWVVPLLEFWLSPEGRERFPTADRSQLLWPSERADGSGVRNFDRAFSRARERAGLPGELTLHALRHSYVTHLIEAGYDPLFVQQQVGHGYSSTTALYTSVSTDFKHKTVQRIIAARLRGAEAHERSADRE

SEQ ID NO: 1334 - protein, 185 aa, synthetic construct
  REGION 1..185: note = TnsF-Tn7 System Protein
MTAGTCDVCKNFRAEVHRNRKTGREVCRSCHRKLFQPKHECFACGKKAISSLRTEDGKTVCVTCYNHPGTKKEVFRPTAICSVCGQERTAEAHDANGMPICVTCYPKTLRPKAICSQCQTEAHVVNYSADGKAICQRCYWKTYKRKIHVAICSVCEQEKPIMSLSRMICANCHLQSKKRSQTTPG

SEQ ID NO: 1335 - protein, 230 aa, synthetic construct
  REGION 1..230: note = TnsF-Tn7 System Protein
MAKAVVIYGPPGSGKGTQANLLAWTKNFIHFDTGKFIEEAIHNPEKASNPQVQEARKQFDSGVLVTPSFVLKITTEKTKEIGESGFNVAFSGSPRTMFEAFGDDKNEGLVAVLEKVYGKDNVNFVFLRIDPQVAIKRNANRKVCSLCATAILYNDSTHHHTECPLCGAKLRTRAVDNPEVLQTRIKEYEERTKPIIAELTSRGYKINEIDGTPSPYVVFDSLKKAITNNE

SEQ ID NO: 1336 - protein, 230 aa, synthetic construct; identical to SEQ ID NO: 1335
  REGION 1..230: note = TnsF-Tn7 System Protein

SEQ ID NO: 1337 - protein, 785 aa, synthetic construct
  REGION 1..785: note = TnsF-Tn7 System Protein
MDQYIALAVSFGAPALLALIVYGGFLFYQYRKKQFLGLLKLRLLSIRLGQKSDSQEKRDIMQEIGNSSQLFSLLSSLKIPFSLETSVHNVGEEIHFYIAVPEESVEFTARQIQGLWADAEVVKCDDYTIFNSQGAVKAAYLKLKEHYAVPVRAFNEINIDTFLPILSNFSKIEMAGEGLAIQILASPADSKAKKAPLEFIGRLKKGEKFSDIFHPKFFSKALLPKQKKPDDKPEPVVVDDESVKMLNQKISKPLFNVNVRLVASAPTAYRAEELLYSLTGSFGQFTAPLRNEFKVVEPRNSKDLVFKFVFREFDASQATVLNTDEIASIWHLPTSLTEIPKLKWIKSKEAAPPPAILPENGNLIGASNFRGETKNIFLTDEDRRRHIYVIGQTGTGKSTLLVNMARSDIESGKGVAVVDPHGELIESILGLVPENRMKDVVLFDPGDLQKPLGLNMLEYNPNRPEEKTFIVNEMQSIFNKLFNPETMGPMFEQYMRNALLLLMDDPNEHATIMEVPRIFTDVEYRKRLLQKATNPTVIDFWEKEAVKAGGEASLANMTPYITSKFNNFISNDYMRPIIGQPISSLNFRKIMDEGKILLVNLSKGKIGDINAGLLGMVVVGKLLLSALSRVDIPQEERRDFNLFIDEFQNFTTDSIATILSEARKYRLNLVVAHQFIGQLTEKIRNAVFGNVGSQIVFRVGAEDAEFLVKQFEPVFTKNDLLNIDNFNAYVKLLVKGQTTKPFNIKLFPSPKANTAIVEKIRESSRTTYGRDRQIVELDILKRLRG

SEQ ID NO: 1338 - protein, 785 aa, synthetic construct; identical to SEQ ID NO: 1337
  REGION 1..785: note = TnsF-Tn7 System Protein

SEQ ID NO: 1339 - protein, 408 aa, synthetic construct
  REGION 1..408: note = TnsF-Tn7 System Protein
MNQPCTRCGGSAVKDGANTEYGRVCQTCYQGYFKAKKECFECGEFKRDISRYSKLSHDHAVCTSCYQSHFMQSCPLCYRYRELVDSDKGPMCQKCHDFGDIPCESCHKLMPAGMGRRCNDCYWSQRLKHEAKVNSYLLSTILMRQAYIDFTEWFMINKGSMTATLKHNNYIDFFVRCDELWSKIPSYESLVNEFKPNGLREHLTVLRWLIKTKQVVVDTKIKEQIAEEERIINLLAKFDGKAPRCINDYHQYLEQKLLNGKTSLKSIRLALQPAIDLCTQYSIETSNTPNQEQIEGYLLVKHGQYSALYGFAMFLNREYGLGLVCMKPSKDAVLKAKKGEIERQLMLLYNQPQPLSDKDELLWLQLGMAYFHKINIQLKALKTLTIQPCNEEMSKIIFNDKEYWLPKI

SEQ ID NO: 1340 - protein, 562 aa, synthetic construct
  REGION 1..562: note = TnsF-Tn7 System Protein
MFDALFDANGKKVKFMGMVDIRKYFKACLRGSYKPKTEYVVLWYGPIRYRNRRRVVQVHFLDSDTKYQVVVEVSIKLIPRLPIGSIWVNGKCEEKYEFEILYTTLDAHDDNKDERPNLTYTSHYSISEKKGEYILKPDSYPVNKIKTDANSNLVVQTDATRIIIPAVLFFVAHYGVSKEINTALISWHKQEVEKRLNLNDDCGGLITIPDRCVIADAVFLWHLKIDSYTKKVVWELNRKMLRSNLAYLPLRAEPYHKQEIHLKIAGLRIDEQTLLCTEILGISMPQGQPIEYRIDKPNSATYGDGTIPHTSRIKPLYNTVESDEILLEAERDANNIVTAVIRHRVEQIGTIRALIKGENLTLDEVVDRCNTVIRLPQNEPDAFADGEGGNSNGDIGRIQTVLDSDAATSLQNNFERLLRYAQDLKVTLGYAPVVIDCVNLAGENIFIGETVRGMRSRQRDLSVEVIFVMRLITNLGLFYLFDCKKEGAQTSGLVIKVIDQDALTADVIRQVVGQLFRGNGRLSDVSAISKFGIIQYFKHTNGEGVNWVKTAIDNLKNGVSDE

SEQ ID NO: 1341 - protein, 215 aa, synthetic construct
  REGION 1..215: note = TnsF-Tn7 System Protein
MFKHQTRKIKPTRRSVSGVISYKKKPLAYESTLERDFIIYHAFREDVKNITPQPVKIPFTKNGRTYHYTPDYYVELDAKSGKSFIAEVKPKSEWQLNWRDWSDKWKAARQYCKEKGIRFIIFDEDRIRHEALDNINFLRAYETVSVSKQEVKVILADIKQRGITTVDYILARYFKSALYRPDGHALVWHLMASKQIGFDVWGDIKDPQMEVWHVE

SEQ ID NO: 1342 - protein, 676 aa, synthetic construct
  REGION 1..676: note = TnsF-Tn7 System Protein
MLNNEVVTKPIGLRMSTHFDTSSPYSRNHIQMVLGGIYRNKSDNDEYQLIEYLDDLNQAVFKNLKSLSNQVLSIHDFDNVTDGANSSFVIDLNDIGDDEWQEAQKKHLAITPLILENDWFGEDHYRGEQGYIRRAEEVGVSTRTLRRWVDAYQSTGSIGSLIDQKRGWRKGAKRLDDDMENIISDVINNFYLTVQRPNVQAAIREIFRRCHLEGIEKPSKNTIRNRISEIKEKDLLRGRGQRKRAKQKFTPKAGQFPDANYPLSVIQIDHTPVDLILVDDKHRKPIGRPFITVAIDVYSRMVTGYYISLDAPSVTSVSMCISRSILPKDELLLEFGLSDIKWNVFGVPKKIHVDNGSDFRAQSLQKSCAFHGINLEFRPVARPEYGGHIERLIGTMMKRVHELPGTTFSNIREKDEYNSEKHASLTLHEFERWFLTYVTMDYHESIHSSIDRSPKEQWRIGIFGDGFESGVGLPSIPSDPHTLVLDFMPSIERTIQRNGATIDGLQYYDACLNNFINHTDDNGNKTKFIFRQDPRDITRVWFYDPELLQYFPVPLANQVLPPISLWEYRSIYRQVKQESGTVNEALIYQALQDMQILVEESKSATKKMRRSEQRKKAHTKSQVMYDKLKLDEDKEVDILDTLPESTRILNKKAVEVSLESDDDNENGDDLYFEDID

SEQ ID NO: 1343 - protein, 385 aa, synthetic construct
  REGION 1..385: note = TnsF-Tn7 System Protein
MFKTNQGTSQNYWVKPLAFATPFISGESLTSWLVRAALKHGCSPLTFTYYYWPKYRIWTYDADKGFNHFDGQITSDIAILTGHNVDTFDDQILIDFSEDTSIKSDSKTPLQWTTPLSKRNRYSRLGYPYCPDCMSDDKEAYLKLQWRFTWSVCCTKHKTFLQVDCAHCNQPYQPQMLSPEQRYINRCHSCLGKMDKAILDTSPSKALNEFQQLADQAFLSRQGMVLGQVVSMAQWFEYLLFLINLVRRGLQNPNYMFGKLLTTLELDTSDLSLPKTALRFDYLPIEERTALLECAYHLLQIDGDDWIKACTVLNITQNSFQWSKYTVIPKAFAQVYDQLPHVPARRYTAQSEDMQPTSPKAVMAAWNRLKRKMQMRENYDKHKED

SEQ ID NO: 1344 - protein, 408 aa, synthetic construct; identical to SEQ ID NO: 1339
  REGION 1..408: note = TnsF-Tn7 System Protein

SEQ ID NO: 1345 - protein, 297 aa, synthetic construct
  REGION 1..297: note = TnsF-Tn7 System Protein
MSDPLYTHIHEKFRHIAHLPDKERIEFIHSPRWVGYDTANQVIDVMQGLMNHVKQHRMPNLLLIGDSNNGKTTIINRFYDKFGENYTVDEELVIPIIKIQAPPTASEKDLYISIIEAFQLPYRPTDATNKLRYQVVNAFRHTNGKMLIIDEVHSMLTGTARQQRAIMNVIKFLCNELLMPIVLCGTKDAIRILHTDPQHASRFDVAELSLWRNDKEFKRLVGSFEKILPLKKPSKLIETEKVNLIYSISTGNLGDVKRLINDCAISAIESGEEEITVENIKGKSCLKPTKGLRKIIG

SEQ ID NO: 1346 - protein, 297 aa, synthetic construct; identical to SEQ ID NO: 1345
  REGION 1..297: note = TnsF-Tn7 System Protein

SEQ ID NO: 1347 - protein, 800 aa, synthetic construct
  REGION 1..800: note = TnsF-Tn7 System Protein
MTHIDHGRAVTDPVEFITELVVAVDDRLAPEEIRAIVSTIAGGRAKSRRLAAFLADHPAVLRDGRSPAPRVIGDLLIALRSAGASVSAPVCADCDKQLRALQRMGQDWYCGSCSLRTVACAACGQRQRVATRDRAGGPRCAQCPDRDERDPISVIYDVIAQLDPAADRDVIATAVRTLASRPAHQRKIGWSLEAQPELLTGAGYLAPVRAIVPLIDALRAAGIGGIVAPACPRCHRVVKVDKPLDGQRVCRTCIAHSRIQECARCGAHREPATRDRNGRPLCSNCLITDPDNLEICLNCGRRRPVSLRTPDGPICGCCPPLPITTCSICGEERPCGTSRITGRPWCPDCQHHTARCCSCRQTAPIISGTRTQPRCQDCTTGEVWHDCPTCNDPSYPHPGQCGRCLINSSLNEILGPPSASLHPGLQALRHNIATAEHPITAIRWLKKKPVAVVLADLAAGRRDVTHDALDELPQSQPLAHLREVLIGVGALPARDEQMIRIERFVSQTLAAHADPELRKVLHHYTTWHLVRRLRQRNNGRPTTIQQFACIRQRTYGAVAFLDWLTVNGLTLSSCGQADLDRWLTDHTTTYRDPAGHFIRWAHNSKLTSVRARTHRWTGPTQSLDEQHRWNTARRLLHDTNLKPEDRLAGLLVLLYAQNPASICRMVVTNIDTTSDPVSLHLGRAPIHLPEPVAEIARSVVANRKGHATIGALSPSPWLLPGGQPGRPISTGQLTHRLNRLGIRPGPARSTALFQLATEIPAAILARTLGIHTDVAVAWQRLSAGDWTSYAAEVSQRPTRA

SEQ ID NO: 1348 - protein, 800 aa, synthetic construct; identical to SEQ ID NO: 1347
  REGION 1..800: note = TnsF-Tn7 System Protein

SEQ ID NO: 1349 - protein, 597 aa, synthetic construct
  REGION 1..597: note = TnsF-Tn7 System Protein
MEGLDVRLESGLNVVIGARGAGKTTLLELIGHALGTSHADQKRNDAEVRRVRSMLGDGEVVLDIEDGDSSYRLVVDAEGGGRRPEFAETALVLGQNELESIASDADSRLRLIDFRAKSEIGDSDIDEIASITQQLFALGIEIREIEERTSLRSLLQSDLANLANEEKILMSDASASLTTQREILRTLENTLLEIQSQQNVSEYAVSSINDLTQTYETLLDQANRLLDIPLPPDDITRVRPSLVEFQASVVSLNAHIDAASERLNQSRARRAALELELRAQAEPIRSDLNTAERGLGELTTKIRKVRAELERLDAEKARSEELTARYNLLHAQRDRLLDRAEQADEELYLRRRDIASAVSQDLTSRITVAIEHLADSRAFRDLLITSLQGSGMRYGSIADIFSKNLLPRQLLDFVERGDIDAASAATELSTDRVSRALDALRNSETLSALSIIKLDDMADFLLQDGSMQKSVETLSTGQKCAVTLPILLTEHARPLLLDQPEDHLDNAFLVDTVVVGLNKRSVSNAQTVIATHNANIPVLGSAAKVVQLVSDGRRGEVEASGSYDAPAVVDAITKLMEGGEDAFRRRAQFYRDHGFDT

SEQ ID NO: 1350 - protein, 597 aa, synthetic construct; identical to SEQ ID NO: 1349
  REGION 1..597: note = TnsF-Tn7 System Protein

SEQ ID NO: 1351 - protein, 347 aa, synthetic construct
  REGION 1..347: note = TnsF-Tn7 System Protein
MVEAMLRGWRAQQTARGLQEETVTPRERLVRRFVEFTNEYPWHWLPGHVDEWTQSLTAEAHLAPSTIRGYQTELRLFTEYLCDARYGWVALCEKQFGPGKHPVPICHEWNTIAHLNDYEGRPEARAFTRAEIQRFLDYADDQVERAVRVKRKGALAAYRDATIFKVIYGWGLRRTETAKLDLVDFGRNPRAPQFGRYGMLNVRYGKAKRGQPPRRRNVLSVMDWAVEAVADYVENARPKFGCEDHPALWVTERGGRIKSVEINARFVAYRDALKLPKALVLHSIRHSYVTHLTEDGVDRRFIQSQVGHECDSSTAIYTHVSTDYMNTMLQRALAPALDAGVPADKDS

SEQ ID NO: 1352 - protein, 440 aa, synthetic construct
  REGION 1..440: note = TnsF-Tn7 System Protein
MNPDPYELTDPDTPFRIDHVLNFLTAFTLCVAIIAIVIGAALICWRLHSPETYEERFATPARLLRWRLWAHLSWQKLCKRCGLSAAEQITRRDSEGRQFTSTRWFHPKLLATDVFRTTLRLTVRARMGQTVEDLERAVPAIRDAAGAHSARSVVVYPGTLRIELVMREQLSTVGNAVPPTTVATARVTLGRCENGSAWSLQLSGRHTLTVGCSGAGKGSVFWGIACGLGPAVAAGVVRLVGIDLKYGIELSVGSELFTKIAITEADAVETLAALENLMDQRGQRMAGRSRQHIASRDTPLVVLLIDELAGLTNYLSDPAMCKAGKASLSRILSKGRGLGIVVAAFVQDPRKEIIPMRELFTQTIALRLRSRDEVAMVLGDGMVDKAPAHRISPDQPGTGYVIAEDGQVTKVRSDFWSDDQIRTTAKRYSRARTPGGKSDE

SEQ ID NO: 1353 - protein, 440 aa, synthetic construct; identical to SEQ ID NO: 1352
  REGION 1..440: note = TnsF-Tn7 System Protein

SEQ ID NO: 1354 - protein, 111 aa, synthetic construct
  REGION 1..111: note = TnsF-Tn7 System Protein
MSAKLDYQWHLRKVMAERGMFATTDLIVPLHERGIVLSSSQVYRLVVDRPERLSLKVLMALLDILDCALDDLIEPVAPATAGTSRKKAAGAEVGIGSLRPKRARVRGAELP

SEQ ID NO: 1355 - protein, 744 aa, synthetic construct
  REGION 1..744: note = TnsF-Tn7 System Protein
MLTDGRSPAPKAVGDLLIALNKAGATAVALPRCAKCGKPMQYLQRLDQDWFCVLCHGQREACTSCGNVRRVFARDRCGQPYCTSCPDPDGRDPVAVIHTVVTALDANADPEVVAEAVRQATARPSSRRKLAWALEDNPRLLTGHGHLTPLRTVLPLIEHLAQAGIAGIVRPTCPRCHRAVRIDKAIDGQRLCRSCFAKAHTAECSRCGALREPATRDAQGRPLCPNCLINDPANLETCTDCGERRKVHTRTSDGPLCRKCRPLPILTCLICDRTTGCTLSRLTGSPRCRACMQRRSRCTRCHRVRQIHSGTLEQPLCGPCTNPTDDLWQPCPGCGSTERLNASRRCLRCVLHRRLEELIPASNSTIPAQLRVLREALASAERPKSALQWLAVNTVSTALKDISAGRRELTHQALDEMPAGKALDHFRSVLVATGALPARDEHLARLEQLVTELIAAHPDHEVRQILHRYAIWHLLRRLRRRTKDTETTHQQLITVRSHLRAAAGFLDWLAAQQLTLATCRQADLERWLTSDHASLRDTTGHFIRWAVKHKAAQRLSFPAVRWAGPSRPLDGESRWSIARRLLHDDALAPEDRLAGLFLLLYAQTPATISRLTIDRIRQADGAVTIGFGSVPIALPDPLANLATQQVALRRGHPVLVPTPSVWLFPGRQPGRPISTSAMGDRLRKLGIGPAETRSTALFQLAADLPAAVLARTLGIHISVAVQWQRAAAGDWASYAAEVGRRQST

SEQ ID NO: 1356 - protein, 784 aa, synthetic construct
  REGION 1..784: note = TnsF-Tn7 System Protein
MTAPSPTAPSIVARLAAQAARLEAATAAAVGQLTSVLPSLEAQEAEAALVTAVPIPVRGAAKFLEELAGHLAAHNDALTSGSSLCPPVLLRLAEVLHDAGHPVVRPGCAHCGKIRSDLRQLRPEGRLCGTCDARSRQATCARCGRENVRIAARRPEGRICHTCYHSDPEVFEECAECGQSRAPAVRREDGRALCRSCWRRPMHTCVSCGKTAAAALVDDDGALCHLCYNRHRRPRRLCGRCGQLKRIACNARDGQPDLCDGCYRGPEVACSVCGRTRPCNRNQQGQPVCGNCYRRTRSGEPCARCGRTKPVNTRWPIGPVCMSCYTAVLRSPAECSRCGTVQPLIARDDDGAGVCGPCVGFAVDYTCRQCGRAGNPHSRGRCAHCVLAERVNALLTGPDGTVAPQVKPLAAALADAPSPFPAIQWLKESPNTRLLAQLAAEGHTLSHELLDELPPSRNQRYVRQLLVHTGVLEERHEDLERIPGWLEHELADKPAAHANLARPFLHWFLLRRARQRAAIRRHPASADRDLRRRVSVALDFLAWMDQRGLALADLAQEHIDDWIAGATSQRRYLIRYFLKWTTSRRLTRELTVPSIPRQEPQNLLDEDDRWPLLQRCLTDEALPTDVRAAGAITLLFGPSTERLCHLTPGHLKFGDKDTHLVLGRHPVLLPPRLAELLGHLAEQPQLRPQLSRVQPGPRWLFPGMVPGKPISTHGMTQKLNRHGIPVRTARNAALAALAADLPSPILADVTGMHRHTALRWVAYARRDWAEYLAARVEDEAHKRQ

SEQ ID NO: 1357 - protein, 744 aa, synthetic construct; identical to SEQ ID NO: 1355
  REGION 1..744: note = TnsF-Tn7 System Protein

SEQ ID NO: 1358 - protein, 367 aa, synthetic construct
  REGION 1..367: note = TnsF-Tn7 System Protein
MVHQRNVALAGSAHLELVSDVVQLRPEDAMFDAMLRGWRAQQLSRGLKDDTIGYRERLIRRFLEYANEYPWQWSPGHMDEWSAYLTGERNLAPSTIRSYQGDVRLFTEFLVDGRYGWATACEDAFGAHPVAICHEWNTIAHLSDYEGNPEARPFTRAELQLFLDYADDQVERAVRSKRKGALAAYRDATIFKVIYGWGLRRTETSKLDVVDFGRNPKAPQFGRYGTLNVRYGKAKKGQAPRRRNVLSVMDWAVEAVADYVENVRPRFGCEDHPALWVTERGGRVKPSEINARFVAYRDALKLPKELVPHSARHSYVTHLTEDGVDRRFIQQQVGHECDSSTAIYTHVSDDFMNTALSKALAPALAGV

SEQ ID NO: 1359 - protein, 374 aa, synthetic construct
  REGION 1..374: note = TnsF-Tn7 System Protein
MAKAADLAGAAHLMLVDGISYLDPEPAVFEAMLEGWTKQQRARFLKWDGTIKPRLSLVRRFAEFSNQYPWQWQSAEFEAFIDHLRTKTPTFTVASGRNYQNHLRLFCEYITDPRYDWTSVCQERFGQVPVQILHEWNTVTHVSEYEGDPSRRPLTYDEIQDLFDAADGRVEEIRKRGRKGALTAMRDSALLKTYYAYGMRRRENVGLDLADLRRNPKAPQYKRHGAVFVRWGKSSKGSPPKRRTIFTVPEMDWIVDALDHYLTEVRPRFNVGRHPAIWVTERSGRLSRRSANEAFEAAKQAADLPEELELHCLRHSYITHLTEFDYPERFVQDQAGHGYASTTALYTGVSDEYRNRLLHKKLGQRFPGIWEDPK

SEQ ID NO: 1360 - protein, 115 aa, synthetic construct
  REGION 1..115: note = TnsF-Tn7 System Protein
MAAKLDYHWHLRKVMADRGMFSTTDLIPPLAERGITLSTSQVYRLVVERPERLSLKILMALLDILDCTMDDLIEPVAAAGSARKPKKAASGGTSAAGGIAGLRPKRARISNTDRS

SEQ ID NO: 1361 - protein, 108 aa, synthetic construct
  REGION 1..108: note = TnsF-Tn7 System Protein
MIKKMGYRWNLRRLMADREMFQTTDLVPLLAERGVNLSREQVFRLVTQPPQRMSMDTLAALCDILGCQPNDLIEIQVVNEEVRKTAGGETPGPLPAVRRSSIRRPEGL

SEQ ID NO: 1362 - protein, 373 aa, synthetic construct
  REGION 1..373: note = TnsF-Tn7 System Protein
MKLANVLAASDRPESVLIWMRSDHVHHLLTRIGTSELPLTHAGLDAEPPGRHVEHLRSILEHHGLLEPRDHYLSLFERWLSNKLTPIQDTAIRQPVEHFARWHHVNRIRAMHNEGTSRSRGPVHSAKQEITETLKFLNWLNLTHGKQLSACTQQDVDEYLADGPTTRQLIRTFFVWADRAHVKDGIVIGHRPARTTPAMTQDDRLASIRSLLTGDEQNRPYRVAGVLLLLYAQPLVRVTALKVDAVVSTSSGLGISFGSDPAPLPEPFANLVRQHLSHRPNQRVANADSDWFFPGTRAGKHLHPNTVMIRLRNLGIDLLGARNTALRQLVTTAPPPVVATMLGYSAQVAHLHAAAAAAPFGLYATSAPTKAKP

SEQ ID NO: 1363 - protein, 373 aa, synthetic construct; identical to SEQ ID NO: 1362
  REGION 1..373: note = TnsF-Tn7 System Protein

SEQ ID NO: 1364 - protein, 368 aa, synthetic construct
  REGION 1..368: note = TnsF-Tn7 System Protein
MAVDKAGRFVEVDTVAMLRPDEQILRDMLTGWRNQQLSRNLQLRTIEARERLIERFVDATNEYPWAWTVSHIDEFFGDLRSLRHVKATTVRGYQTSLRLFCEYVTSTDYGWPAACERYFGATTSQVCFEWNTVAHVQDTQSAPTKRAFTQAELQRLFDRADDEVEQIHAHQRKGWLAAYRDAVLLKTAYAWGLRRNEVRHLQSVDFSRNPHAREFGRYGVVQVRYGKARKGSPPKRRSVLTVFDWSVDIIKDWIDVHDQLPDHGLDLFVSERGTLVSESALTTRFRRYCNDLALSPGLDFHSLRRSYVTHLIESGMDAQFVQDQVGHEHASTTALYTCVSSDYRVTTLRRALDSTIKDALAGIDLEEA

SEQ ID NO: 1365 - protein, 108 aa, synthetic construct
  REGION 1..108: note = TnsF-Tn7 System Protein
MRRTITYTWHLAELMARDGMHNSTDLLPHLRERGIDLSSSQIYRLVTGTPERVSLQFLVACCDIFACTLDDLVTSTVTTKARKAANAEVVDLNRAARPRRARVLPDAD

SEQ ID NO: 1366 - protein, 415 aa, synthetic construct
  REGION 1..415: note = TnsF-Tn7 System Protein
MANRLRVYWPGDQLCNSCFYSAMRTHGICPNCTHEGVLPGRLNHTDQRQVCLTCAGILGDYCCRNCGTEGELYRSRQCARCALRDDLTALIVDGASDPRTMSTIVEILCCVERPESIFTWKRSPQVQALLKGLARGDIPLTHQGLDAIGRGRHISHLRSLLEHHDLLPRRDEHLARFDLWLAAKLDNITSPAVRVPVEQFATWHHLRRLRRNSEPGQANDGPKRSAKQEITETIKFLTWLEATHQRTAGTCRQQDVDQYLASGPTTRHLIRTFFVWAKKSKINTAVLINHRQAKSTQVLTQEQRLAWLKELLTDDAESLPYRVAGTLLLLYAQPLTRIVALKTTAIVLSQRETRITLGAEPVPVPAPFADMLNHHLHNRPNLRTGGGIVANPWLFPGHYPVRTSTRNQSCSDYEN

SEQ ID NO: 1367 - protein, 415 aa, synthetic construct; identical to SEQ ID NO: 1366
  REGION 1..415: note = TnsF-Tn7 System Protein

SEQ ID NO: 1368 - protein, 256 aa, synthetic construct
  REGION 1..256: note = TnsF-Tn7 System Protein
MSPVTDSAFLRAKQAVTVTIDFCNWLTAEHNLSVEQLTQAHLDLWQSSGPTTREHILRFIRWAIKTKLIASDLEVTPHCRGTAPRMPIAEQNAVIEQVAHQQMLHPRDRLAAILVIVFAQRAEDVAALTWNQISITADMVTIDLAGVPIHLPPPLDEPVRALAASNYNGQTAAHRDSPWVFRGYTPGRHVSPTHLRNHLRPVLAALEARLGTLNELTQTTPIAILAETLGYRPQTLEAHARASASTYARYVATRLD

SEQ ID NO: 1369 - protein, 312 aa, synthetic construct
  REGION 1..312: note = TnsF-Tn7 System Protein
MPVDNSGRFYVVGSVPLLHPEAQTVAEMLEGWRNQQLCRNLAHDTIDQRIRLVERFLSYTNEFPWTWTPAMVEEFFSDLRSIQRRRHSTIRGYQNALRLFCSYVCNPDYGWDRLCEQRFSTHLAQVFFDWNTAAHVQDNEQSPEKRAFTKQELQEFFDYADEKVTLIAASARKGWLPAYRDTVMFKLAYSYGLRFNELRHLQIVDFARNPHAREFGRYGLVHVRYGKAKKGSPPKRRSVLTVFDWTPEVITDWLVHGQPHLDDGIDLFPSERGALVAEDTLLRRFRRYCDALEFSPGLESALSAPFVCHSFD

SEQ ID NO: 1370 - protein, 372 aa, synthetic construct
  REGION 1..372: note = TnsF-Tn7 System Protein
MVEELPGFIPHVLRRDDVSLLRADETVFNAMVDGWRAQMLARGLAVDTIKGRCGVVSRFVEFTNDYPWQWRPLDLDQFLADLRSQETPIAFSTLRSYSNAISMFCSYVSDGRYGWVAFCEKQFADVPSQICFEWNTPQHTVDDAVPPRRRAFSKAELQHMFDVIDDFVDDAHRTGSKRWLTALRDSIAFKIGYAYGLRRRELVMLDLTDFGPNPHVPRYGNYGALTVRWAKGTKGSGPRRRTVLTSPEFSWAVDLLQYWCTEGRKLFSTADRSPALWPSERGGRLTLNALGRSFTAFRQRAGLPPELSLHALRHSFTTHLLEAGYDPLFVQQQLGHSYASTTSLYTSVSSDFKQRVVQQMITRRLRMEDSGG

SEQ ID NO: 1371 - protein, 805 aa, synthetic construct
  REGION 1..805: note = TnsF-Tn7 System Protein
MFEISELITRINPRQTVLLLGAGASIPSGAPSGAQLAQRLARDLSGLAGADTYTLSELCSVYERRQGRKELAAAVANILSPLEPTKGIQLLPKFDWYRIYSTNFDLLVEKVYKAAGSELRVLRSNFDFSRQSAAGTTEYYKVHGCITEDAGFGHRTRMLLTEEDYERYADFREASFRTLSADIVTKDTLIVGQSLADSHLRDLVRETLRLHGNSGTPGRIFILTYARDEERAQMYLSRGAEVYFGDLDSLFNGLLSALPGDEVKSSAEGAQFESTLLPSELVSVTTDVRHAVSLDPNPRKLFNGSPASYADISNGFTFQRSSRLPILKSLQEKPIAVILGAGGVGKTTLARQLTTELGQGFDAVWEHTNSFALEAKYWIEYETRLQRQSKKALLVIDDCIENLVQVGQLASHLGTTTDPALKLILTANTGQWAQRAKSRYIFSHGEAQTLTILSHDDILSLIELTSQKPEIRELVEDRFLSLPRGEQIRVLRERCAADMYVCMKNIFASEELDFILLREYADLDEPAQEIYRNVAALDATGARVHRQLIMRTLGVDAGGLMATLTALTGIVSEYDIDPGNGLYGWETRHREIAKTIARYKFAAPADLEALFGSLIDSINPSVRLEREAAKALCTDDEFGIDKLADAAKQVELLRRIVRLIPGEGIPRHRLIRHLIDQQRLDEAAKELRDAIESIKINPVLGRYEVLLLIRKAQLTPGLMDEDRAAILLNAQALALKNIDRYPTDLHAFRIYGDVAVALASVGGAAAALDDAIERTRGAESRILDPALVEIRRRLETERRKIPSDN

SEQ ID NO: 1372 - protein, 805 aa, synthetic construct; identical to SEQ ID NO: 1371
  REGION 1..805: note = TnsF-Tn7 System Protein

SEQ ID NO: 1373 - protein, 120 aa, synthetic construct
  REGION 1..120: note = TnsF-Tn7 System Protein
MAEQRRIGFHWHLRRVMAAHNLWKSTELRPLLRSRGINLSDAQVYRLVTGEPQRIPSRTFAALCDIFGCTPNDLFEPYVEMQAAATANAPHPRDLGVTPGNPVAKRIRIVQDDGGTTPQT

SEQ ID NO: 1374 - protein, 115 aa, synthetic construct
  REGION 1..115: note = TnsF-Tn7 System Protein
MKRQVGYSWRLAEIMAAHGMHNSTELIPRLAERGIELSRPQVYRVVHQRPERVSVQLLAALCDIFSCGIEDLIAVTAADVRAKKAAASTAVTSPNVVELNKSVRPRRARVIRDAD

SEQ ID NO: 1375 - protein, 433 aa, synthetic construct
  REGION 1..433: note = TnsF-Tn7 System Protein
MLVGRIDARDICALCAGVDLRFACRSCGEDGKNYVDGECRRCVVVGKVNDLLKGPGEAIAPHLKPLAAVLTSVYPSTALKWLGSESLAPLLRDLPTRTTEISHEDLDQLSQQTDIHHLRELLVAAGMLPRRNENLAQMQLWATRTVSALPPHQQKILRPFVEWHILRRVRRRLRRRGYRRGAAMSDRSRIKVAIEFLAWLDTSGITIEALTQPHLDTWLDANPSRRARIIGFLTWLNEHRLIADIEIPRRKYGLPQQFQDIDDYDRQLRRCLTDDTLPLELRIVGALVRLYALPLVRIVELTIDRFSRDDIGAYLTIDQNPIVLPPALADLIEQRINQLQSEATFSGHAVPSMTYLLPGKPPSRPINVPGLARALNRRELPTIAARNSAMMANIADLDPVVVSDLFGVHPATAHKWAHYAQSSWAIYLASLAR

SEQ ID NO: 1376 - protein, 872 aa, synthetic construct
  REGION 1..872: note = TnsF-Tn7 System Protein
MKLSETDVRARLAIELSQLRALVGDPSYRKMAKILAGQRSTDAVGETTLRNAATADQPAPKLTTVVQFVTACRRIATHDRPGIDERYFDPELWYARWKTLGSPETAVEQGLLRAWKSETDTEPGTIAAGWAGLVTALDEAGELPRVREVDPYQLGATESRYGDRDHYNPLDRRSATDRYVPRGVDAELAASITGRRLTVVIGPSKAGKTRTLFEALARTCPDARVLVPAWERFDTLPAHPTYTTSQDPIVIWLDDLSRFLTGATGLTPGRLTHLLTRSAPTTVVATLRREQHDRYHDATEDKLTGDIGELLRRAKIIDLESTIGNPIEQAAAEAAYPDADLDHYRELGYGLGEVLAGAPAVLASYDRAARNDPTLQAVIETAVDWARIGRLDEIPEPTLTDLAAIALRRNHPECDIDSATLTTAIRNARTRVEDRAHIAALNTRWLDTDTRGYRAFDYLVAADDGQHYRTPRPIPKAFWHTATRHADHATLLTVGIAAYQRGHPDISFEVIRKAADAGHPEATFTIGVLYKERDDLPNAETWWRKAADTGQPDALFNLGVLHEQRGDLTTAESWYRKAADAGHPAAMNSLGVLHNQRGDLVNAESWYRRAADIGQPAAMNHLAVLCEERGDPDGAEGWWLRAADTGLPDALYNLGVHYGERGDLINAESWYRQAAFVGHSAAMYNVGVLHKQHDDLTTAQFWWHRAADASFPEAMYNLGVLYVECGDHATAEAWYCKAADTGHSRAMFNLAALHMERGDTAGAELWWRKAADAGHARAMFNLGVLHKQRGDEAEAEAWFRKAVDTGSPDALNILGVLRNQLGEEAESEVLYRKAADTGHHDAMFNLALSHELRDDHTHRRNLVSPSGRRRSS

SEQ ID NO: 1377 - protein, 872 aa, synthetic construct; identical to SEQ ID NO: 1376
  REGION 1..872: note = TnsF-Tn7 System Protein

SEQ ID NO: 1378 - protein, 342 aa, synthetic construct
  REGION 1..342: note = TnsF-Tn7 System Protein
MLEGWRRQQSARFLSDKTVRPRLRLIQRLVEFTGLYPWQWTPAEGEAFIDHLRGGDCPRAMSTARGYEVTITLFLEFLLDPRYGWARVCEERFGEGPQQIFHEGNSILHKGDYEGDPRRRPLTYDEIQALFAAAEARPGRIAERGVKGALGAARDAAVLKTIYAYGLRRTETSKLDLVDLRRNAKMPQFGRFGSVMVRYGKASKGSAPKRRSVLLVPEMDWATDVLDEWLTELRPRFSPGKHPALWVTERVGRLSPRSINEAFVVIRRAADLDENLDVHCLRHSAITHWTEFGYPARFVQEQAGHSHAATTSIYMGVSNEFRNQLLVAALKGRLGDFWDVTA

SEQ ID NO: 1379 - protein, 108 aa, synthetic construct
  REGION 1..108: note = TnsF-Tn7 System Protein
MNKKMGYRWRLRDLMADQQMFQTSNLIPYLAERGVTLSREQVYRLVTQPPQRLSMDVLVALCDILGCTPNDLIEPEVVNQQVRKTADGNADSASITLRHTVIRRPGKQ

SEQ ID NO: 1380 - protein, 563 aa, synthetic construct
  REGION 1..563: note = TnsF-Tn7 System Protein
MRAHDEGLEELTEALGRGKPSAAAARRTATCSVCARHRPIAWNGPAGPVCTICRPGQKIDTCRVCKRKKPCLFAGTPRAQCHECSKRRECCNTCGKDRLVGTRTGAGEAVCKACSRKREPCSGCGRSRVVAARLQGAAYCDYCHRRNPGFFRDCLLCGRHEKLRKDGRCDRCTADSKVDELFPAELLASTPQARSLYDAFMASDGSTVLQAFERTQSMSLLRSLLASPDTITHATLDAAGTDQTTRTVRAVLVEHGLLPPRDNNLARFEAWVDSTAAQVLDPTERAAFVRFARWRHLRELRQRPTPIPSTTTTSRRRELRIVLELLAWARDHGRILATLTQADIDCFRASGHRERHRVKAFLVWAHQNRLAAKLQITKVQSSGLSLDGPSAGERCKLLNHLLSPAVQIPPATRLAASLILLYGVRPHQITNLRLQDVIREGSTIRIRFGAEPLLLPENIAELASEVCQERRATRMISSADDTEWLLPGTRPGYPLSPAALTKRLHLVGVVPTTARTGAMVSLAQELPPVILARLTGLSTTNDIKWSEAVAASNARYAALLVNR

SEQ ID NO: 1381 - protein, 563 aa, synthetic construct; identical to SEQ ID NO: 1380
  REGION 1..563: note = TnsF-Tn7 System Protein

SEQ ID NO: 1382 - protein, 382 aa, synthetic construct
  REGION 1..382: note = TnsF-Tn7 System Protein
MNSASDGRDWVNRGVTAGAASLCLVAGVSFLNEEEAVFQAMLEGWEMQQRGGRNLKDSSVRSSIGLARRFHAFSNEWPRQWTAGSFGEWMMHLVAVKRLAPSTIRTYQYAIRGFCDYLCSEHYGWAEECLRRFNTHPIQICHEWNTASHLQDHEGRPGRRPLTREEIQLLLDRADRAVDDCLSLRRKGALAAYRDATLLKVIYGWGLRINEAVSLDVTDFFTNPHAPEFGRYGLLQVRHGKSSAGGAPKRRPVLSLHHWAVAAVQDYVENVWPAVRDEESNALWVTERGTRARPRELRVRFGELRDELGLDPDLSPHSLRHSYVTHLVESGVDPAFVQRQVGHAYQSTTALYTAVSGDFANKMMRQALDRQLVQHNVVEGTP

SEQ ID NO: 1383 - protein, 116 aa, synthetic construct
  REGION 1..116: note = TnsF-Tn7 System Protein
MKVVGYEWRLREVMAAAGMFTTTKLIPALRERGIDLSSSQVYRLVTEKPDRLNLQVMVALMDIFDCSADDLVRKVDLGASSASTGTGGPEQGASADFLRERGLRPKRAQILPHEGA

SEQ ID NO: 1384 - protein, 400 aa, synthetic construct
  REGION 1..400: note = TnsF-Tn7 System Protein
MPKRPGRRPTCPPCRAALGVEQVLDDGTGTMNLAFTPLATALAAKQPETVLLWLSIRYVRELLTALATGRLPLTHAGLAEHDRPIAARYLRHELMACGILPTVDKHLLDTEQWLRCRLAELVDHPHEPLLRRFALWHQLPRLRTTAAARPLRANAKPCATQQFTQAQAFLTWLHERGIAPAALTQAGLDTWYAGARVHQRHGVHGFLTWAITNGHIPRHLIATRLTFKPGTVITQQRRLALLRRFVADEHADIGTRTAACLLLLYAQPLSRIQHLTTADITEHDDDLQIHLGDPPAPVPEPFAALLRQLITNAGQPPALLFPGRLAGQPVAYQTLHKRLRRLGFPIMEARIAALRQLVLQAPAPVVADALGFHPTTATRQVTNAGGTWSRYAAGDHAPSP

SEQ ID NO: 1385 - protein, 400 aa, synthetic construct; identical to SEQ ID NO: 1384
  REGION 1..400: note = TnsF-Tn7 System Protein

SEQ ID NO: 1386 - protein, 751 aa, synthetic construct
  REGION 1..751: note = TnsF-Tn7 System Protein
MNMLELEIFEQTSSYCELRLSTGEGPPKTRGLDKIAVDHLIELVERDYSQHAIAQKVFGSPQLGDLGAKLAVFLDGDERWLTAVLDRPPGVTLRITAEQRLRHLPWELLCRDGSFLTVSGPAPLLPVRAVGAGTTLQTPVIPGNRPLRVLFMATSPEGVEPVLNYEAEEAAILSATSRTGTDLVVEESGTLEGLRFLSRDYGEGYFDVLHLSGHATIDNGQPTFVVENEFGGVASATADQIAQAMAGYWPRLVFVSGCLTGNAPDRGAFPSMSESLVRAGAPAVLGWALPVGDVSATDFAAELYRALASGEPLDQAIIEARQHLYTNKRGNWHLLRVYADRSPLASMVTPLNTKGRARIQVRPADQEFLDPQTQLSRVAARAAFVGRRRVIQRCLRTLKQPPGSQGAAEALVLHGMGGLGKSSLASRLLERIPTHQRAVWYGRVDLTKFRELTTKILFPTVEQHIEAVKLLDTDYAPLAVRLRHLLDVDGPLGQTSCLFVFDDFEDGNLDERDGSHVLSPAMADILPALLTAIRDTGSPSRVIITSRYRFPTPPATRVVVESLETLTAIEQTKKITNLPNLRPSSPIDPTIRTRAIEAAAGNPRLLEWLNLIVADTTLDVDGIITAIENEADRFRRETILATNLLSSQPAELQKMLAKVNVVELPVPAETVHTIHDHPDAASHIERAAQLGLLEEGTDPETRRPRYYVSNVLRPLIRPLLSDDETTQACAAAARSLHSIWISAPVPPGSPS

SEQ ID NO: 1387 - protein, 751 aa, synthetic construct; identical to SEQ ID NO: 1386
  REGION 1..751: note = TnsF-Tn7 System Protein

SEQ ID NO: 1388 - protein, 830 aa, synthetic construct
  REGION 1..830: note = TnsF-Tn7 System Protein
MTDFDKQVGQALRASGWTVEHTGTDGELLATERRLDDDRRMAVICRDGPEPVTAAGLWSTLATPLDLLERREIDSVYVITAVDAADDLKEYAAGIRHLKVLRLDELLAAALDFGEYLQDLLDTFATSPDGLPDYYIPPRTRVDEDLETVVRRWIRGTREPDGPEPDQPIAVLGAYGMGKSSFSSHLAAVLAQAAKDDPHARIPILIRLGDLAGEQTLEGLLGKQFTATYQVPGYSFAAFQRLNQAGRFVVILDGFDEMKQLLSWNDFEYNLGQLYRLHDGDSRLIVLGRPTAFETDEEQEMALHAGGGRADAGWPNCFEVELSPFNNDEIRLFLGRYVRYRRPDLTDPDAEVAALWDKVGSRHLRDVARRPVQLRMLAEILPEYAGEISELDLARIYDIFIGHLIDTIIQREDDKNSRAAFDSIERRAFLTSLAFWLWKEQKATFVASETVPLELVEPYAKGRDLLAVRRDLFAGSPLDRRLGERFGFPHRSFQEFLVAETIWNRLRSGTLTLAEADPLVSQEVSSFMSLQRGRQETAAAARLVKALKPGTTLCWRLVTAVFMAEEVMLTIRERLDAHLSVRTRRASRRNQGKITSWELLLLSTWTRKHPQSDAGVTIQEVLKLAQAEDFTLTALFCVLRLGGTPRRVEEAFQKLVAMLVDGGTPQAVRSALVNGGQVRPSGDYVYLSRLNGSWSFGRRTGEARVETGRNGQPILVGGNELRVRWLAIAGIHLALRLDIGRGRTANARAILRSLRPVFGMWLPTAGFISDWLAPSGDLAVDVQLNEDFEITPAVRDQILDVLEPVRTACAALGLDVAFMERGTDSPELLE

SEQ ID NO: 1389 - protein, 830 aa, synthetic construct; identical to SEQ ID NO: 1388
  REGION 1..830: note = TnsF-Tn7 System Protein

SEQ ID NO: 1390 - protein, 346 aa, synthetic construct
  REGION 1..346: note = TnsF-Tn7 System Protein
MFVAMCDGWRAQQLARNLAFSTIDMRLQVVRAFAAHADAYPWQWRPQLLDDWLADLRAVRGRRRSTIRNYSATVAAFCDYLTDPAYEWASECERRFGTHPVQVVHEWNTAVHVQDAEGDPSRRAFTVDELQALFDYADEQVVRSRAAGRKGWLALFRDATLLKVAYGYGLRRREVTMLDLVDFGPNPHATEFGDVGVCRIRFGKARKGSPPKPRSVLTVWPWTVEILQQWTTEVRPLMPQAASPAMWPSERGPRITVDGINRRLADYRRALGFGPGLDFHSLRRSYVTHLIEAGWDPLFVQQQVGHEHASTTSIYTCVSSDFRTRTLRRALDATMAAVARAERTKR

SEQ ID NO: 1391 - protein, 111 aa, synthetic construct
  REGION 1..111: note = TnsF-Tn7 System Protein
MTGKRQVSYQWRLREVMAAHGLFNASDLEPLLDQRGIRLSSVQVWRLVTQTPERLSLPVLAALCDIFDVNPAQLIATRAEDIVPVRKAAGADGVVDLAAVRPKRAQLRPEP

SEQ ID NO: 1392 - protein, 252 aa, synthetic construct
  REGION 1..252: note = TnsF-Tn7 System Protein
MGSSLGNARQDLREVVAFLTGLAATGRSLATCRQDDLDNWFGERTAQRYRVRPFLTWAKRLRHLPRTLSMPPRYRGTPTTPTDSESRWATARRLVDDDSIHPADRIAAALVVLYAQPLARVTALTLDHIRKDGQAIMLRLGEDELELPEPFASLIVQLPRPLRNGPSMQFPGRWLFPGTRPGRPIGPIPLANRLLALDIQPRPMRASALRQLATDLPPAIVASVLGIRPSTAVRWAGEAGGNWTNYVHDRQT

SEQ ID NO: 1393 - protein, 252 aa, synthetic construct; identical to SEQ ID NO: 1392
  REGION 1..252: note = TnsF-Tn7 System Protein

SEQ ID NO: 1394 - protein, 356 aa, synthetic construct
  REGION 1..356: note = TnsF-Tn7 System Protein
MAETVLASGVALLQPEETVLQAMLAGWAKQQAARLVAPGTLEQREQNVRRLVAFTNDYPWNWGPVDVEDWTAAMVDRGLAHSTIRHYQGQVTLFLDYLTDARYGWDVVCEEHFGTHPVQVFHEWNTAVHRADVEARPGNRPMSRDELQDFFDYCDERVAVVRRSGRKGWLAAFRDAAMFKTIYGWGLRRRETAMLATIDWSSNAATPEFGRYAALSVRYGKAMRGSPPKRRSVLSTMGWAVEAVTEWVEDIRPMYGITGTVMWPTERGGRISNDYLNTRFAACRDAIGLPAELGPHCLRHSYISHLLEDGFDHLFVQQQVGHAWGSTTAIYTSVGSDYKNKALRRALDRAFAPAPR

SEQ ID NO: 1395 - protein, 114 aa, synthetic construct
  REGION 1..114: note = TnsF-Tn7 System Protein
MTSRSRNLGYRWHLRTLMAGKGMFATTDLMPLLAERGVTLSSAQVYRLVTQTPERLSLPILVALCDILDCTPNDLIEPVAEPKRCKATGTGGVVAKADAVTVDRKPRRAEIRRQ

SEQ ID NO: 1396 - protein, 216 aa, synthetic construct
  REGION 1..216: note = TnsF-Tn7 System Protein
MTGALPERHETFARLELWARATLEALPPHQSRIVSPFAEWHVIKDARRRAERGRHTLGAAKANRDNIRAAILLLNWLDQHQLILLDLHQEDLDLWLTQNPTRRQAVHSFVRWLTKRKLTRPLDTQLARKGFAANFQTDDEHEQQLRRCLTDEALPRELRIVGALIRLYALPISRIKEITTSPFQLNDADAFLTIDSHPVLLPPTLARLIKAHIASP

SEQ ID NO: 1397 - protein, 216 aa, synthetic construct; identical to SEQ ID NO: 1396
  REGION 1..216: note = TnsF-Tn7 System Protein

SEQ ID NO: 1398 - protein, 813 aa, synthetic construct
  REGION 1..813: note = TnsF-Tn7 System Protein
MTTAYHLDLGRAVADPTGLITDLVADVEKQLSAETIRAVVAAVAGGRAKSRRLAAALAMRPSVLIDGRSPAPRAIGDLLIELRKAGASEISPPVCVECGKKLRTLQRQGQDWYCSVCGQETAECVACGTVRRVAFRDRKGLLRCKMCPDNDDRDPVDVIYEVITGITPDADRDVIADALHQSAPHRPHYRQSLVWALEENPLLNGEGYLAPHRAILRFIDLLHEAGVTEIVRPACPRCHRVVRIDKPLDGQRVCRNCIAKSRIEECVRCGARREPATRDAQGRPLCPGCLIRDPANRETCTVCGESRMVSCRTTDGPICPNCRPLPLLLCSICGRTAPCTLSKLTGLPRCGGCDRRPAHCTICGRLRGIHSGTTDAPVCGPCTKPDAELWRPCPACGQAERLQAPGPCPHCTLKQRLHELLADDTGAIPTKLQALAGTERAATAMRWLSGGIVSTVLSDLGSGRRPLTHEALDELPEGKVVEHIRSVLVATGTLPRRDEQMARLERHVKDLVTSHTTAEGRRILHRYATWHLLRRLRRRSRGKETTHNQLQVARQHLRAAVYLLNWLGDQNLTLATCQQTDLERWMTSDDVRHRQEAGHFVRWALSQKIARDLTFPAERWNGPSQPMDDEARWHTARRLLHDDTLKSEDRLAGLLLLLYAQWPATISRLTVEQIEETDGAVRIRLGAVPVELPAPVAELALQQVAARRSHAVLGRTDSRWLFPGGQPGRPISAWAMGERLRKLGIRLAQARSTALFQLATDLPAAVLARTLGIDITVAVKWQRAAAGDWAAYAAEVSRRTSPQHPMHEPGLPT

SEQ ID NO: 1399 - protein, 620 aa, synthetic construct
  REGION 1..620: note = TnsF-Tn7 System Protein
MRFVDVTGSREAAGRSIRMRDMARRLPQLVRRSLALAWRVDRRATVGLLLCQLVTGVTQALGLVAIAGTLTALLRDGDVYHRLLQAWPSVALLAGAAGVRALLGITVNWLSSRLGPLMSREAEQLLLTGCTEAELCAYDDPDFNRDREAADRGAQVTGDLINEGQDLIASAAAFLAGAVVLAGVHWMLLPLLVAASLPQAVAQVSAARARYLANLRSNGDNRMLSVLRWHIYTKDAADQIRAGTMADFLSDRYRGTVARINREDRAAADQGARMSLVGAACGGLGSAVVWAAVVWLLATGRITVGHAGTAVFALQTVGMSVRGLVAVGARAVRTGLYMDDWTGFLDKAGGFRMRRGPHHPTAPETIEVKAVTHRYAGKDRDALSGVSLTLRRGEVTALVGFNGSGKSTLSKLVSGLYLPTGGQVLWDGVPTVDADPQALWKQVALVPQNYAHWPLTVRENVTQGQPTARGDQAVREACEAADADEVVDKLGAGLDTLLAREWLNGEELSGGQWQRIALARAFFRPAGLLVLDEPTANLDPRAEYRVFQRLRTLARDRAVLLVTHRITNVAIADRIVVLDEGRIVQEGSYAQLSQQPGLFQQLLSYQITSEPDGDKHGTPA

SEQ ID NO: 1400 - protein, 620 aa, synthetic construct; identical to SEQ ID NO: 1399
  REGION 1..620: note = TnsF-Tn7 System Protein

SEQ ID NO: 1401 - protein, 419 aa, synthetic construct
  REGION 1..419: note = TnsF-Tn7 System Protein
MVHQRTVALAGAAHMELVSGVVQLRPEDAMLRGWRAQQKSRGLRDDTIDPRERLIRRFLEFANEYPWQWTPAHLDEWSAWLTGERHLAPSTIRSYQGTVRLFTELLIDARYGWGTACDEAFGAFPVAICHEWNALPHLQDYEGDPEARPFTREELQRFLDYSDDQVARDVKAKRKGALATYRDATLFKVIYGWGLRRTETSKLDVVDFGRNPQARQFGRYGTLNVRYGKAKKGQPPRRRNVLSVMDWAVEAVADYVENARPRFGFSDHPALWITERGGRLQPGSINDRFEAYRDALKLPKDLTPHSIRHSYVTHLTEDGVDRRFIQQQVGHECDSSLAIYTHVSDDFMNTSLHKALAPAFAGAWQEGSGDGRQARLPLAPAQGHGRPRVVLHHRPHPSARRTRHHLVVEPGLPARRRAT

SEQ ID NO: 1402 - protein, 103 aa, synthetic construct
  REGION 1..103: note = TnsF-Tn7 System Protein
MAGRGLFSTTDLIPPLAERGITLSSSQVYRLVVERPERLSLKILMALLDILDCTMDDLIEPVAAAGAVKKPKRAAAGGGSASDAEGLGGLRPKRARIRGVDRP

SEQ ID NO: 1403 - protein, 411 aa, synthetic construct
  REGION 1..411: note = TnsF-Tn7 System Protein
MCHQCALEDALTIYFDKLPHTTAEQLQPLRDALASNDHPQTGLVWLRKTSSARLLADAAESGTLISHETVDGFAVAGRHEAAAYLRHLLVSAGVLPDRDEHLAHVERHLAKITNQDPENALVLRAYCRWRVLPRLRRRARQRPPTDYITSWATRRISSAAAFLAWARRQGMPLKQVTQEAVDLWLSEGKSSRYNVRDFLVWTSHRGYSRHLLVPHRGKPDPAGMDDDQHWDTLQQCLHDHDLPLQVRVAGSLVLFYGQQVSRIAALNSSHLQTSGDRTYLVLDHVPVLLMPPLARLIKDLEARQPPHPIRSSAEAPRWLFPGQQPGQHSAPASIVRSLNQAGIHVNAGRTTALMNLAQDLPAAVLASLTGMHVVTAEQWHRRAAPDWSAYLAARRKAGHAPSDASLTVQTE

SEQ ID NO: 1404 - protein, 524 aa, synthetic construct
  REGION 1..524: note = TnsF-Tn7 System Protein
MSNRALQRKYGVGFRTVKAAVESVWPEPRKQLPPRKTRLDVFKPVIDQMLRADLDAPRKQRHTVKRIFDRLLDEHGAVEVTYPMVRAYVADRRPQIRIEAGRGPLNAFIPQTHLPGAEAEVDFGDVTIRLAGEQVKVFLFAMRLSYSGKAVHRIFASCGQEAFFEGHVHALSVLGGVPRGKVRYDNLRAAVARVLGLSRARVENERWTAFRSHYGIESMYCRPGLEGAHEKGGVEGQIGWFRRNHLVPVPEVASLAELNAMVERWDAEDDDRRIRSRPRTIGEYFAVERPLLQPLPDEPFETGRLFSLRVDRYAQVSVRTNRYSVPVGLIGRTVRVMLHASEVVVYDGRKEVARHERLIAKGQSRLDLDHYLEALVRKPGAFPGATALEQARSAGKFTPVHDAWWAAACKAHGDRDGTRALIEVLLLGRHLHHEYLVTGLAAALRVGALTADAVALEARKAAEADDAPPAAADPEPDRARVTFLTERRLAHLPPDNRPLPSVAAYDQLLRPRRPDRSAAEGDRP

SEQ ID NO: 1405 - protein, 161 aa, synthetic construct
  REGION 1..161: note = TnsF-Tn7 System Protein
MPKLADMWCPLSVTKPRTPVLVLDEAHLLSYEQLEAVRMLTNQGMDQDSPLSCLLVGQPTLRRTMKLAVLAALEQRTALRYTMPGMSSAETTSYIGHHLKLVGRPDQLFTEDALSLIHTTSRGYPRAVNNLALQSLVAAFATGKNLVDDASARAAVSEVVD

SEQ ID NO: 1406 - protein, 161 aa, synthetic construct; identical to SEQ ID NO: 1405
  REGION 1..161: note = TnsF-Tn7 System Protein

SEQ ID NO: 1407 - protein, 375 aa, synthetic construct
  REGION 1..375: note = TnsF-Tn7 System Protein
MPGAIHLVRPTNVRALDPAPVMFEAMLEGWSRQQRSRLLATKTVGDRLSFVRRFAEYTGTYPWEWTPDDVEAYFSAQFTKDPPAAHSTVRGQQSSLSMFCGFITDARYGWAASCLEEFGQFPVQVCHDWNTADHVAEFEGKPGRRALTYDELEAFFDAADDRVERIRKLGRKGSLAAWRDSVLMKSVYAYGLRRREASKLDLPDLRHNPRAKDYGRFGALEVRFGKASRGSPPKRRTVLTVPEFDWIVDLLEEWVDEARPRFSPAKHPALWVTERRNRISKRRLDEVFSIIRQEAELPEELELHSLRHSYITHLIEFGYPERFVQDQVGHRYGSTTALYTWVSDEFRNRLLEQSLQRQSVRPGDRRQKPENRRKE

SEQ ID NO: 1408 - protein, 266 aa, synthetic construct
  REGION 1..266: note = TnsF-Tn7 System Protein
MTTFKRHRGLTEQAADAAVDQACRMLRLPTIRAQFPELAETAARDQMSYRGFLAELLMAECDDRARRRSERRIKAAAFPREKSLRAFDFEANPSVDPAVIHTLATCEWVKKGLPLCLIGDSGTGKSHLLIALGTEAAMAGYRVKYTLATKLVNELVEAADEKVLTKTIARYGRVDLLCIDELGYMELDRRGAELLFQVLTEREEKNSVAIASNESFSGWTKTFTDPRLCAAIVDRLTFGGNLIQTGTDSYRLAITQARAAAQVNTG

SEQ ID NO: 1409 - protein, 266 aa, synthetic construct; identical to SEQ ID NO: 1408
  REGION 1..266: note = TnsF-Tn7 System Protein

SEQ ID NO: 1410 - protein, 96 aa, synthetic construct
  REGION 1..96: note = TnsF-Tn7 System Protein
MAAQDMFQTTDLVPLLAERGVHLSREQVYRLVTQPPQRLSMDALAAICDILNCTPNDLIEVVDVRMQIAKPTASGDTVGAPAPPTRRTKLRRPEGL

SEQ ID NO: 1411 - protein, 259 aa, synthetic construct
  REGION 1..259: note = TnsF-Tn7 System Protein
MNVRCHINAADNFLAWLAGEGLALGACTQADLERWITDPAFRYRDETGHFVRWSVQHRHAHGLTCGAVRWTGPQGTIDSEKRWDDARRLLNDDTLPTTDRVAGLLLILYAQKISTISQLTVEDVDTTGETVAITFGTSPVTLTMPLGALVRELVATRRGKAKIGTPDDAPWLFPGGQPGRPLSDSQVGLRLHKIGIRPQQDRSTALFTLAAELPAAILARMLGVHIQVAVQWQKASGGDWAAYAADVSRRNTTHQPTHK

SEQ ID NO: 1412 - protein, 840 aa, synthetic construct
  REGION 1..840: note = TnsF-Tn7 System Protein
MSMSSFGFGSSDPFSEMLNRFFGMSPASSPPAVQRVPIGRLLTESSHELLNLAARRALEDGTSDLDTEHLLWATTKVDPARTLLAQAGVDPDELGSQIAEVLPRESGEPSAEPGLTPAAKRTLAAAYARSQAARVSYIGPEHILGALLGEADTGAAQMLRAEGQDVGRLAGLAEQAARQDGLPAERKKPATTLDEYGRDLTEEAKAGKLDPVVGRADEIEQTVEILSRRSKNNPVLIGEPGVGKTAIVEGLAQRIVAGGVPETLKGKRVVALDLSGMVAGAQYRGQFEERLKKVIEDVQESEGNIILFIDEMHTVVGAGATGEGAMDAGNILKPALARGELHMVGASTIDEYRRYVEKDAALERRFQPVMVPEPTVEETVLILEGLRDPYEAHHQVRIDDAAIAAAAELSDRYISDRFLPDKAIDVMDQASARVRLRSAGRSTEVISREDHIAKLRRELDQAVAAEDFDKAGQLKRQIAEAEAELAGIEERREGVVTVTAGDVADVVSRRTGIPVSQLTASEKEKLLKLEEEMHERIVGQDEAVTAIAQAVRRSRAGMGDPNRPVGSFLFLGPTGVGKTELAKTLAELLFGDENRMIRFDMSEFQEKHTVARLVGAPPGYVGYEEAGQLTEKVRRQPYSVVLFDEVEKAHPDVFNALLQILDDGRLTDAQGRTVSFSHCVIIMTSNIGAHLILAHEGDVSEIKDELMGELRAQFRPEFLNRIDDIIIFHGLTKEDLSQIVDHLLDQTKHRVHAQGMKLDVTEAAKKLLIAHGHQPEFGARPLRRTIQTELDNRIASLLLSGEAEPGDTIVADVKNDTLHCTVERNDAQPAADDAEEAKKS

SEQ ID NO: 1413 - protein, 840 aa, synthetic construct; identical to SEQ ID NO: 1412
  REGION 1..840: note = TnsF-Tn7 System Protein

SEQ ID NO: 1414 - protein, 319 aa, synthetic construct
  REGION 1..319: note = TnsF-Tn7 System Protein
MLETSQAKQLHAEFTHWGNNTHRASKVATNASRYLEFIMRIDNALQRGQQLGQELLMQEFSTEELRRMGLLAQFLAEQGVLQLDSTARRQRSDLNLIQNKLQSSAGQSWGNALQGFNAAMDAQPKELNVRSRKAYLHAAISLLEDANVRRAEQLTQASVDGFIRKKPGLRASLGPFLTYLAQQHGLALKTPRKKAISPPSLLPQARAVRALMDALAGGISETARLALTAALLAKLLNADLEKILQLRHMDVTWPTGDCIRLEGRWLQLPEAVWPMVRALESPQHAQGMDLDSWTFPGRNFTDCLSTAAVTYHLRKHLMV

SEQ ID NO: 1415 - protein, 316 aa, synthetic construct
  REGION 1..316: note = TnsF-Tn7 System Protein
MLPLPSETLGSFLTRWAWARGEEPSSLSHRLGLGYLVWRQDLDRSLPHAMLMIIARAIGVEVSIIRDMTYCARLAQADIPVQRSGFQPWLTPVGIYHLRRLRFGQLFCPLCLKEDTPRHVHLEWRIASTWLCAKHGVSLMDSCPGCGAPFAPYRNDSLLLGRCERCALPLYDARPSSCSTYQVALQRYVNSLWSQATEGSPFPLARMYCELTKAAKYSPDFTYAGEPWSFWRILQRGQLLENVLTKEVMKARSAICRDNAETLYVRAAPTKRVQPRTCWVDLKDPQQRAKKIMQIALRLHPKRSMSSRVSKNERQF

SEQ ID NO: 1416 - protein, 385 aa, synthetic construct
  REGION 1..385: note = TnsF-Tn7 System Protein
MEHLSEILKILDGALKSNQTMATNYAGLLADKLERDGSRREAAAIRERLARVPAALVAAQRGTHGDLLGNLPVDGDSRLNTVDVSRPVRGDIQVLLPSGLQARIQDFLSAIHHRDKLLAAGVSQPNRLIMHGPPGTGKTQTARWIAGELQLPLLTVRCDTLISSLLGQTSRNLRRVFDYAQEVPCVLFLDEFDALGTARGNERDVGELQRVVIALLQNIDALPEETILLAATNHDQLLDYAIWRRFTYRLAIPLPDSELRQRLWTQFIGANALSASSFKELAERSDGLSGAAIQQVSLDAKRSAILSGSSNIEEIEVFRRLGLTVAMSKEIRLHSVQSEMQWLRRWYPKFFSQRVLAAAYGISLRQVRNTLDEKGGDGDRGDQST

SEQ ID NO: 1417 - protein, 385 aa, synthetic construct; identical to SEQ ID NO: 1416
  REGION 1..385: note = TnsF-Tn7 System Protein

SEQ ID NO: 1418 - protein, 234 aa, synthetic construct
  REGION 1..234: note = TnsF-Tn7 System Protein
MEITLIGVTEKEGGVRAIPMNYRSVTGRVEPPEGPTVGFESTLERDLALLLDFDMTVKRVTSQPLRIDFTVGSGRKRTYTPDLLATFHHTIDGQTPPPILYEVKYADELRERAQELEPGFNAARMLCEQRGWHFQVMDETFIRTTYLQNVQKLRHFRSYPDDGRSATMLVDTLRELEISTPSELLAATFMDRTNRAQAVGAMWRLVCEQVIGVNLMNDLTMKSEIWLTEFATYG

SEQ ID NO: 1419 - protein, 625 aa, synthetic construct
  REGION 1..625: note = TnsF-Tn7 System Protein
MGFNKRLHIVRRVLASDRVIVENPASGQSEVAFLYQLTSVSKLPTAEGTPETPVPARPELLSFTDHEIAQAEERFEVIAPLVAMHRRKRSDVEARAKEAGVSAVTLYTWIKNYNGSGLVGLIDSKRGAPAIPKLNDRVEQIISDTIDKIYLSSQQLGPMEVHNHVKERCELEKLPVPHINTVRNRIAALPQNLASRRRGHPDLADKNFPTPGEFPTPFAPLGPVQIDHVRLDITIVFSDTRQPWGRPWLTLIIDVMTRVIVGFYLSMRAPSSVAAGMALVMGMLPKNDYLASLGVPGNWPVHGKILKIICDNAKEFRGNALKFGCKENLIDMDLRPVKTPRYGAHIERMIGNVNAMLRKKPGTTFSNPSQRGTYNSRKKSAYTLHELEIEVADWIVNHYHVSKHSFLKMPPITAWERAVFGNDQQIAAGLPIQICDPEKLKLDFLPMETRVVSPTGVRMNKADYYHEALNRWINAPDPEHPSEKRQFVCKYHPSRKRELWFLDPDLKQYIKLDRYPFYAPVEGDEDSFVGVDEYMATEARDHRDGERLEDNEAKASYRQRSSDREAKAVAETKRVRRRGNQVTRPRSEDRSVIEEKMQPERIQEEFSSNPFLAFAGKKITPFEGV

SEQ ID NO: 1420 - protein, 584 aa, synthetic construct
  REGION 1..584: note = TnsF-Tn7 System Protein
MQAHSFARLPLDNKLYRLVGAGKVLPKNLEMATARVQLWFAEVDVTDTANLGYARRANGEVSLLAVDEAAGSLPAYPLGSYWQDGTLQSGLWMSNQVKVERAYISPQNWRLMNARDCVGLVAAQGSASFPLQGDDVSGKTHRFGDAPVLICETASGEQLLIPSYEIFRRFYGVCSTLSNALLGGHWQRELDQLIDRDHTGMSDDAKHFELLTKKDISSIGCRAIALFEECEFAKAQAQGIYPSLVNARREQRDDPWIKVIPPWQGNATTNEGGMGISFIGHQLANGVTLVLWIYDSHFPRLPRPLMRVFPEVTIPVYDDARDNCHSERSGLQVPEDPGQAPIALSVPADTKFGKHIAHLAIQESWSDLPTIPKRYITRRFVSASPQAGIARPKRRRQLSTGHVSEMGHLNSASLSGDEHNKIKDRFRALGNSFEQLLQEGFLLNRRDYALCRPSETNGATYCELPSTLGSTPISWAIIGTAEGLRSRLCWVSELELADGSFRYFFDLEAQEWEGFYAMVLKFTNQEEMLDERTLDEIFKRAVANQGRWKKVNWASIQGRATFRLVQHKITDGMIDLKHLKAGLA

SEQ ID NO: 1421 - protein, 299 aa, synthetic construct
  REGION 1..299: note = TnsF-Tn7 System Protein
MNSFAHLSDDAIQMLEASLPEKLTFLRTSHLFSYPAFDHILRDLQDLVRFPRTTKPECRAVIADSDNGKTTLTRKFLANNPVVLDEAGYPINKVLWVETPPSADERRLYSSILQALDITHRPDAPPSRLDALVQQELAAQQTTVLVLDELHAMLNSPARQQKQFMAALKRLSNVRSLSIVACGTVDVSRALAIDSQFVSRFTRLALPRWQANETFLQLLASFETKMPLPQPSKLNAPEKAMEIFKSSDGTIGSVQKITMRAAEAALKKGSSSITFKILQEECQSYRRGLLMPSQPPLGA

SEQ ID NO: 1422 - protein, 299 aa, synthetic construct; identical to SEQ ID NO: 1421
  REGION 1..299: note = TnsF-Tn7 System Protein

SEQ ID NO: 1423 - protein, 245 aa, synthetic construct
  REGION 1..245: note = TnsF-Tn7 System Protein
MLDGELIVFDTATGRTSFRLTLATLQQHHLDTWAAGNPTLRARSIPFIRWAVARNLTAALTIDHPPTRPPSNFQVDQVHHDELRRCLTDTSLPLQIRIAGALTRLYALPLTRIVELTVSQFHRDDENAYLTINLQPVVLPPSLAQLIETHIHTAAAAPHHRAGSANHYLLPGQSPGQPRNPAGLADAMRRFDLPARAARNTAMMQALADLPPIVIADLFGMNPGTVHRWAQFAGNSWDDYLAAQP

SEQ ID NO: 1424 - protein, 245 aa, synthetic construct; identical to SEQ ID NO: 1423
  REGION 1..245: note = TnsF-Tn7 System Protein

SEQ ID NO: 1425 - protein, 175 aa, synthetic construct
  REGION 1..175: note = TnsF-Tn7 System Protein
MIRPFAEWQVLRDARRRTTRNRYSVGAAKADVTEIRTAIGFLTWLDSHQTSLADADQPLFERWMTEHHTHVRKLTRFIRWTTARGLNTTLATPKRPRQFAGSFLAEHDYTHHLRRCLTDGTLPREVRIMGVLVLLYALPLSRISELTTTQFRRTPEGAFLTLGRHPVLAHPASPS

SEQ ID NO: 1426 - protein, 201 aa, synthetic construct
  REGION 1..201: note = TnsF-Tn7 System Protein
MVRGARPHTHGARSPRGTSRGAEQLAEEDERWEISKRLLHDTELALTDRVAGCLVVLYGQPVSRIARLTTDKILTGAGGVQLQLGSRPVEIPEPLGSLLLELTRSRQAFAVLGQNEQGPWLFPGGRAGQAMTASHLTVRLNRLGIRARASRNTALLDLAAQIPASVLSDVLGISITCAVAWSHDAGNTRLGYAADVARRGP

SEQ ID NO: 1427 - protein, 504 aa, synthetic construct
  REGION 1..504: note = TnsF-Tn7 System Protein
MSRHRPGRRARRASASPVFTPHGTDRTSRRAARKQLAEAQAKAQAAALKNTADATAEAEIPAPLYPPTGRPGPASARGGRLRLPAHRMTTATASGAYPFLAEGGLGAEGIYIGRDVHAEGSFVFDPFSLYGRIEGFTNPNVLLAGVIGQGKSALAKSFALRSVAFGYRVYVPCDPKGEWTPVAAALGGTSIALGPGLPGRLNPLDAAPRPPSVPEADWAGEVRKRRLLLLGSLARTVLGRDLLPMEHTALDIALEGVVQAANAAGRAPLLGDIAHTLAQPHLLDAAAGTVSGHLGEAARDLSHALRRLVHGDLAGMFDAPSTVAFDPTSPMLSIDLSRLGGSGDDTALVLAMTCASAWMEAALTDPDGGRRWIVYDEAWRLMRHPGLLQRMQSQWKLSRGLGIANLMVIHRLSDLLTAGDAGSQGRALAEGLLADCSTRIIYRQETDQIHAAATLLGLTAVETEAISHLTRGRGLWRVAGRSFVVQHLLHPTEQTLFDTDSRMH

SEQ ID NO: 1428 - protein, 504 aa, synthetic construct; identical to SEQ ID NO: 1427
  REGION 1..504: note = TnsF-Tn7 System Protein

SEQ ID NO: 1429 - protein, 114 aa, synthetic construct
  REGION 1..114: note = TnsF-Tn7 System Protein
MTSKLDYNWHLRELMALRGMYSTTDLRPLLIERDVNLSASQVYRLVTEKPERLSMKTLMALIDILSCRMDELIEPVAAAAPVRRAAGASDAGADLDRGVGEFRPRRARVTRDPK

SEQ ID NO: 1430 - protein, 480 aa, synthetic construct
  REGION 1..480: note = TnsF-Tn7 System Protein
MTSTLKKNKKRCDSCANENVEIKRRYKNETYCANCYRIWFIKKPCSKCGEINRLHKKEDFAICSGCRMNQPCTRCGGAAVKDGANTEYGRVCQTCYQGYFKDKKKCFECGEFKRNISSYSRLSHDQAVCTNCFQGHFMQSCSLCGRYRELVDSEQGKICQKCHEFGEIPCESCNKPMPAGMGKKCNECYWNQRLEHETEVNIYLLSSEIMRQAYTQFTKWFAAEKGSMTATLKHNNFINFFTRCDEIWSKIPSYESLVKEFKPNGLRENLTVLRWLIKTKQIIVNPKIKEQIAEQERIINLLAKFNDNEPTCIKNYHSFLSQKLLKRKTSLKSVRLALQPATGLYIEYNVTDLNTPTQEQVNSYLLLKHGQYSSLYGFICFLNKEYNLNLTCEKPTKNEIFKANRKEVEKQIIDLFNQKKLLSKTDKLKWLQLSMMYFHCVHISLSSLKTLKSKQVDQRNMIILIYDRKEYWLPSPIQSN

SEQ ID NO: 1431 - protein, 218 aa, synthetic construct
  REGION 1..218: note = TnsF-Tn7 System Protein
MQQMRVIKPTRRSVSGLYSYNGLSIPYESTLERDFVIFQTFRTNVLEVIAQPVVIPFKKNGRAYKYTPDYFVHLDDGAEYRQELIKHLIVEVKPRSEWKKNWRDWSDKWKAAISYSDEHNFRFKIYDESRIHHKGLENVKYVLRFRKTACCEHDIQVILNQVEMMGNTTIEYLLEKFFKGGIYRPQGKRTILHLLGTKRLGFDFWEELDEKTEVWHVQ

SEQ ID NO: 1432 - protein, 659 aa, synthetic construct
  REGION 1..659: note = TnsF-Tn7 System Protein
MYSSRIDESKNLDNEEIIPNVGFTLDRAAIHLAKGNIYCHKQNGDQFELIELADFNQALFKSIETLRVELLSIHDFENLPNPNGTVINVDSECISDEDWEKAQKKYFAIQPLIAQKKGYRGVDGYERRAKESGVTSRTLRRWVDAYQHTGSIASLLDKKRGWTKDKTRLDEAMNDLIKTVIYDYYLTPQRPTMQATVRMVHKRCHELGVEKPSGNAIRFRINQLSESTVLKKRGYREKAKNKFTPKTGHFPEVLAPLDVVQIDHTPVDLIIVDDKHRKPIGRPWITIAIDIYSRMITGYYISLDAPSVTSVGMCLARSILPKNELLEQNNIENITWDVFGYPEKIHVDNGSDFRSEDLRKSCALHGINIEFRPLARPEYGGHVERMIGNIMKKVHELPGTTFSNIKQRDGYDAEKNASLTLAEFEKWFLTYITKVYHQSIHSSIEKTPSEQWKIGIFGDSLSEANGIPKLPVDDITLRLDFMPSFERTIQSSGVRIEGIYYYDICLNHYVNTSDKNGNKEKYIFRQDPRDISQIWFFDPKLKQYFKIPYANQALPVMSLWEYKQLKGLVRQKYGKSNEHLIYQAWDEMQSLTENATSSTKTQRRKEQRRKHHVKSQKHYAPKEVEVFELLEEESRVSDSILDITSDDSDDGIYFYEDIE

SEQ ID NO: 1433 - protein, 386 aa, synthetic construct
  REGION 1..386: note = TnsF-Tn7 System Protein
MAKINQSVTQNYRIRPLTFSTPLLEGESLTSWLIRAALRQGCSPLTFTHYYWPEHRIWTYDVDKGFKYINSQIHSDIAVLAVTAIDAINNQTLINFSKILSIESSSKVALLWTQPLSKRNRYSRIGYPYCYECMTNNKEAHLKLQWRFTWSVCCIEHRKFLQVDCPYCNLPYQPQLIEPEQEFINQCHSCHHKLDKTTLDTIPSEVVYKFQLLANQVLYSKQGTILGKVVDIAEWFDYLLFLINLVRQALKNPDYMFGKLLLELGIDLSELSSPKTSLRFDFLPLEERIVLIEHAYYLLQVECDDWIYYCQELDITQNSFQWSKRTIVPKAFSQVYDQLPKVPSREYKKQSSGIHPASLEAVMAAWSRLQRKIEMRESYDKHLKKE

SEQ ID NO: 1434 - protein, 480 aa, synthetic construct; identical to SEQ ID NO: 1430
  REGION 1..480: note = TnsF-Tn7 System Protein

SEQ ID NO: 1435 - protein, 286 aa, synthetic construct
  REGION 1..286: note = TnsF-Tn7 System Protein
MKQEIPYTHIHPKFRHIALLPNEERLRFIDEPRWIGYDKANQSMETLQGLMNKVKQHRMPNLMIIGDSNNGKTTLINQFHKKFGLPYIDDFKDSIVPVVLIQAPPSPSEKELYISLLERLALPYRSTEPTTKLRYQVIHAFRCCNVKMLVIDEIHSLLTGTARQQRQIMNVIKFLCNELQMPIVVAGTRDAVRVLHTDQQHISRFDVIELENWNNNVDFRKLVGSFERVIPLKKPSNLTHPDKLRIIHSISKGRIGDVRRLISECAIEAITSGSEEITSEILSSRV

SEQ ID NO: 1436 - protein, 286 aa, synthetic construct; identical to SEQ ID NO: 1435
  REGION 1..286: note = TnsF-Tn7 System Protein

SEQ ID NO: 1437 - protein, 485 aa, synthetic construct
  REGION 1..485: note = TnsF-Tn7 System Protein
MNTPRCKHCDVVIQGRKYCYRGGCYCTGCHSIYFKLKTCSVCNKRKRIWSKMEVPVCRQCLYVDAPCIRCSKTELKRYTATELGVVCNSCSKYFRDLKQCSWCNQKKTTVANRHLESGVELICGNCYTQTLPLCSECKYRREPFIYAFNKNPICKICALEETRYCKYCDTEIASGTGHICLPCKYLKTFEKRSKFGRSALSPYLANIFSQFCGWLKNTRSTQFAAENINVYFLYFVSLDKLANSLNRLPTYEEIVHQFTVAETRKNLLVTMFLDQENIVCVDQAIKDEYSNIDSIERYLNAFDEGSFFMAALHGYYDVLYKKLNENKTSTRSIRLALTPAVKLLRWCVHYELNQPTNELLRGFLWVTPGHKAAVTGFVGFLNRQHGLGLELPEMQDIELSRPTESRMQLKQRFVTLLRNPQNTQLYRDSLIVSALNYLHGVAVPKYAWVSINSVKNNEKRDYYIRLVNQTFFLPNIIFNGELSGK

SEQ ID NO: 1438 - protein, 618 aa, synthetic construct
  REGION 1..618: note = TnsF-Tn7 System Protein
MSEPLKQPPSIKAFPNDNVKRVVWWYGAVYKNASALSTTPLVDVALREIINFENNELGGATVVKIGLPQLDIVRLGTIWVGQHNTGTKWDNYNGTKTEPIKFEFDCSSPMIESINILDSKPDTDTPEQKNYTIPAYKYNLQSIDKETRYPFFNSKITKLLSVDNCTVLIPALELLTSTYTPKGQDIRCDLFSHSIDEALALHLDLEQSTGNVDGTYNITLKKDRHDTNIAFLAYLRCNHVSRSRASKIWSCLATKKTYPNGVLYYDHYPEIFPYHPKKLKLECDGLRLNDQTFLVFRINKYSIPDEHLIYPTTKEKGRSKGNIPQGDDLYVPPEYTVDADLPVTSEVDPGNNTGVAYITSEVTSSSNQSIIRQHAPGTDFENNANIQSLKPNTSTQLSSGDKNSSIDCKNTAKLKQYELEKKQSDREHIIQSEVIDLVRNALAELVGIRNSSIQSIKYLDENTEQYNDFKLASFPEGLFRKNATWSASNYESFVNKEGQKRYKFTPRKFLLAKITLKNATSAYLLEIDRKSSKTGFSGLIFNVPLSILSSYQLYVLLKTISKNKGTFRKRDGGKLIDIKLPVSSYHIYDHSLIENSMAKKMAKVIKIAEEKGVFLARH

SEQ ID NO: 1439 - protein, 194 aa, synthetic construct
  REGION 1..194: note = TnsF-Tn7 System Protein
MLLEYDPRVVDVIEQPVTIEYENANGRNVTYTPDFLVHYRTASSLDLNNSNRSRLIEVKPQRILKTKWQELKPKFKIGTSYAKQQGWRFCIYDEVRIRGQYLKNIRFINRYKNYQFDQAEGQRITSHLKLVGHTAIDHLLEFLYVKSDDKGIALAQVWSLVAKKVIACDMTLPLNLGAVVWLNLDEPYGVSVDD

SEQ ID NO: 1440 - protein, 626 aa, synthetic construct
  REGION 1..626: note = TnsF-Tn7 System Protein
MTDSIVKPDRTRVLIRPNEYVAHNGTVFKITQLIDFDSMIGIDVRTGKAKQLPLHAVTKVDYEVQPDNGYIHRDLEEITDADWREIERRFEMIKPLLKGATRKEIEEHANKVDVHFTTLYRWLRNYNATGVLTGLLPKKPGCTIGTLRIEQVAENIISTAINEHYLAAQRLSPQRIIELVNIECKKRNLQAPSKNTIRARINQISEEERLKRQGNRAKARTLYNPAAGMFPNVEHPLNVVQIDHTPVDIILVDDDHRLPIGRPWITLAIDIYSRMVTGYYLSLDAPSETSVAMCIAHSVLPKDNWLLLHGIETSWPVWGFMQTIHVDNGADFRSETLRKSCLTYNINLEFRPVGQPNFGGHIERLLGTVLKRVHSLPGTTFSNIKERDTYDSDKHASMTFSEFEKWLVTYIAKVYHKKKHSALGMSPEQQWEKGIFGDLTTEGVGYLPKPSNAETILIDFLPMFSRTIQKNGVNFDGLNYYDHVLRVWINSINPETKKKQLFIFRRDPRDISYIWFFEPKLQTYYRLPLANQAIPPMNLWEYKAAKEKLKEKGSATSDHELIAALEDLHKQTRESVKKSKKARRDVQKSKVHEKSRSISETNQVRPVLENEGDDDFWNDDDIVAFD

SEQ ID NO: 1441 - protein, 667 aa, synthetic construct
  REGION 1..667: note = TnsF-Tn7 System Protein
MSKLNPQQQAAVKAIDHPLLVLAGAGSGKTRVITEKIAYLVKQGLPARHIAAVTFTNKAAREMKNRVSKLLDNNQQRGLRVSTFHSLGLDILRAESKTLGYKAGITLFDEQDKYTLLRNLISHGAKDCDIDNIDNYSRQIGQWKNAFVTPEQSIAIATANEYPAAHLYVDYTRSLKAYNAVDFDDLILLPVLLFQQHPAILEKWQNKIRYLLVDEYQDTNITQYQLVRLIAGNLGRFTVVGDDDQSIYAWRGAQPENLAQLQKDYARLQVIKLEQNYRSTQRILKVANQLIANNPHAFEKRLWSELGYGDPLRVLSHKDELIEAQQIVSEIIHHKFKTGSNYQDYAILYRGNHQSRLFEKGLRENNIPYFISGSTSFFAYSEIKDILGYLRLFVNQDDDAAFLRVINTPKREIGPSTLEKLGAYANERHISLFAASTEFGLSQKLSEKAMHRLEKFRDWVIDTADRIERGDTFAVIEQFIDQIGYSQHLQEESKTKESADRKLKNVYELVEWLRRIADKETDGQKPLAEIVSKIMLMDIMERNQEDEASDQVSLMTLHAAKGLEFPHVFLIGIEENILPHQNSIETDNIEEERRLAYVGITRAQRTCTFSYCTHRKRYGEVAECEPSRFLSELPADDLEWVNKKQLAPEVIKERGKASLAHLKTMLS

SEQ ID NO: 1442 - protein, 359 aa, synthetic construct
  REGION 1..359: note = TnsF-Tn7 System Protein
MHAWPINIKPFSDELLSSWLIRTSLANGSDPSSLVGAIWGNWRVWTVDIDRSAPIDRLSTLSKVSGMSIERLKNMTLQPAIEFILKQSNLNSRQAWQWVIPTGSRNRTRINGLHFCSECLKESPVYFKKSWRLAWDTVCPKHHNLLSVACPACSSTISPHLVTFENVDLRKCVVCRYDLTQVPAIKADKAVVNLQDFVDSLVLSPCKTPEYPLGILDASELFEVLHFLVIFLHTAYKGLMPFQRLFSELDLRIEDAHFSHLPGTTFESYPVLERYFLMQAVSRIFMRSREDVIKLFVQTGLTQQMLSDSDGRPKIIEEIYEKLLNNGRNATLTKHPKKPIKPRSKTEVDALMDEILPFL

SEQ ID NO: 1443 - protein, 1419 aa, synthetic construct
  REGION 1..1419: note = TnsF-Tn7 System Protein
MTVATKKRISKSTLSMFLRTKCDRELYLSLHEDSELDAHDMPVPLQARPGIGVLQTAGREFEDERNEQLIQAFGSRVVFQPDKAGTNKPVKAPLAELLGKVTSTPSFVLQGKFELTAFQNTVMAKIGLNPTHVTLVPPIAGLIPDIIVVRDPADGDEEISADGCRKPIDFGNDTRLALSIIDVKHTSEANPSYSAEVALYALFLANWIADQELTDKYFVTVRSYLWTRFKQGQSELDRLMNARTAATPNQYLDALLADSEDANLRFYLSTVLHFFRDDILRVIDIGDACKDGWQNLEWHVDGRCSACDWLGHEKWATLKDKARIAEHPTHYCYPAAKLTGHLSQIAGMTRGARKTLQLNAIQDTFSAAKASSVHPVFQQHSHLKKERSRIPLRAQSLISATTSIDNAAILASLAPAPQLHVAITVNFDPSAGILTGLSIFGRATAYVSGQTPRQFPSRSFIVDQKSLTDEWVALEGLLSTLSDIIEQSEKFIIAAGKTPLTAQIAFWERRQFEELCAAMGRHLPKVLSLKDRKTKALAWLFPADELIEKPDGAVSPCVVFVDEIVRRVVFAPTPHVITLFDTVESYFSGTVPVKLTDSYYREFLTNGIPRERIYEIWSNSSSIKRGTVTVPRNTVIQEFGNALEKQCRALNSIIEKLRSDFKGQLKANAPKLSLSIPSGARGVAFDSKLWVWWDELQYQTNKLEGHQRLALDAETLEASYEAIRLTNGQQTAVPGEFIYDVLSGSTEAKLDDNDGFLALGKDGLPGFSLQRARDIIRPFAPTYPGQDQNLILPLWSSLSVTLVSFDRTARKAIVRLSNWRDNQFIPYLLANSTTDLMNDIFITKGQSTFKWHEKSAQILLQVGNPSIAVADRNAANAMGMVKIPSPGSDSITPIARVLWDAFNLHSLSVIPTPKALSIAAYAETKHNLNNSQRDAVAHAAEKGLTVIWGPPGTGKTQTLAGCVHGLVHDAAMNNQPLNVLVAGPTYKAVEELIGRVVTSLDQDVTCRAEIFVGYSASQNPKVFTTSGKHLRIESFNLNPEGQETRDCLSSLGRTDVLTIIATTTMQSYKLAYWMFGHNVGPVFDVVIIDESSQVQVTTSLSPLATLKDDFRLIIAGDHLQMPPIMALEPPVEAEYLVGSIQKYVLARPFDGQVKTCPLEENYRSTEDIVAYARSIGYRATLKAANPLTSLHLLSPVPLPTSGFPASLPWSDFWPAVIDPVKKVLTLLHDDDLSSQSNAFEAKIVAALVWCLRGTVSAELSGRGISEHVPPTPQQFWSECIGIVTPHRAQRALVVRELKEIFPTDPYNLIDMAVDTVEKFQGGQRHTIIVTFGVGDADIIMGEEAFLMQLERTNVAISRAMAKCLVIMPLTLAGHVPQDKKALKTAHAIKDYVEEFCNVEERGVVSLGGNDRHARLRFRQ

SEQ ID NO: 1444 - protein, 251 aa, synthetic construct
  REGION 1..251: note = TnsF-Tn7 System Protein
MLYFVARIAGQKINKLLILARSVALIVGTDSGSNPRPGEISLAHNGTLFLDELPEFDRKVLEVLREPLETGHITISRAARQVDFPARFQLIAAMNPCPCGFLGDASGRCHCTSEQVMRYRARVSGPLLDRIDMHLEVPRISHEVLRKGSPDGEESSETIRARVVAARNLAVARSGKANSALTAKEVKQLCVLSEPSHQILELAMDKFGLSHRAYHRILKLARTIADLAQSENIETAHLSEAISYRKLDRKV

SEQ ID NO: 1445 - protein, 317 aa, synthetic construct
  REGION 1..317: note = TnsF-Tn7 System Protein
MSSLAVVFSRGRSGIEAPLVTVEVHISNGLPALNIVGLPETAVKESKDRVRGAILNSKFEFPMQRITVNLAPADLPKEGGRFDLAIALGILAASGQIPIAHLHHYECVGELSLGGELRSINGVLPIAIQARNNHRKLILPKENTAEAALVKDIEIIPAMHLLEVCAHLAGQRLIQVEFQQEEQDVPTTDIDFADVHGQYHVKRAFEIAAAGAHNLIMLGPPGTGKSMIASRLPTILPQLTEQQAQETAAIASISDQGLDVANWLKPPYRAPHHTASAAALVGGGCQFQQLTLHSNKSCYKNKEVFRASTFISERFSA

SEQ ID NO: 1446 - protein, 317 aa, synthetic construct; identical to SEQ ID NO: 1445
  REGION 1..317: note = TnsF-Tn7 System Protein

SEQ ID NO: 1447 - protein, 300 aa, synthetic construct
  REGION 1..300: note = TnsF-Tn7 System Protein
MMDKYQHIHKDYRPLMLLDDHGRIEALHEPMWINYPRTVEVINLLKSLMNQPKKPRMQNLLIIGESNIGKTSLIVQFALNNPDFSLEDDLGMSHPSKPVIVAQFPASVDEKGLYIAILESFWTPFRPTDTIAKLRHQAIYLLRECNVRILILDEIHNLLGGTAAKQRTVMNLLKNLGNELLIPIVGVGTQDAALILHSDPQHASRFDVITLPRWEMNKDFRSLLMAFEARLPLQNPSDLGSREKGSALFAISSGNLGDLHRLVVECATCAINEGAEEITMDIINKYKWMKPTDGIRKRRA

SEQ ID NO: 1448 - protein, 300 aa, synthetic construct; identical to SEQ ID NO: 1447
  REGION 1..300: note = TnsF-Tn7 System Protein

SEQ ID NO: 1449 - protein, 590 aa, synthetic construct
  REGION 1..590: note = TnsF-Tn7 System Protein
MSQARCADCGRHRQIGGYRPGGDTVCGSCYRTYKPKVRCEGCGQMEPPAVKAGGRSGSPQTLCRRCYRSNRPKRRCDCCGQIRVINSGRSGSGEPALCVTCYTKARPETVCPQCGQRFHGSGSKLCPACYEHPRRVCGICGRKRRVAVKASDSGPDICPTCHQAPEVDCSVCSQRLHGRLTGHNGRPACFGCMLAARVEDLLAGADGSIAPELLGARDALVDTSNPQAALSNFGRSKGHKLLRDIAAGRLPLAHATLDDQEQGYSVRYLRDLLVATGALQTRDEPMARLEAFAQVTAEGAHPGDRGPLSLFARTHRLRRIRTRYDGGEIPPSVSYNARCELTTAARFLAWLRSRGRDRSTCNQADIDAWISISSTNAQHTTAFLNWAIRHRHMPDLVVPLPLRSFPSQFSPEDQRWTLAKRLLTDTSIDLVDRIAGSLVLLYAQPVSRIAPLTRDQVVLGDTKVSLRLGHTDLDVIAPLAELVTRLLAEDDDRSTSDGEQDLYLFPGRLPGRPLHPATLARRLHALGVDPRVNRNGALMSYARQLPPPVFGRLLGLAPGTAEQWAQIAGGKWARYSPAIHQSSTRGARKR

SEQ ID NO: 1450 - protein, 590 aa, synthetic construct; identical to SEQ ID NO: 1449
  REGION 1..590: note = TnsF-Tn7 System Protein

SEQ ID NO: 1451 - protein, 225 aa, synthetic construct
  REGION 1..225: note = TnsF-Tn7 System Protein
MVPTMVLVADDSRDTHRRDALWGLAEAVASRGEVPVTPAFGSPDDVAATVHSVRGPKVVVPAFVAGGDVASARLLSRLGLGRMSDSCQTPPLGAVPSIVADLAGRLADSGWGPSDGVVLAADGTTGTEEHQVVMDVARMLSRRLDSPVQVGYLRTWAPSVVDAVDRLRRHGQDNVAVAAWRLVDGPDFDLLRGLDVTAITEPLWPSELVVDTLLAQHRAVRGRLA

SEQ ID NO: 1452 - protein, 198 aa, synthetic construct
  REGION 1..198: note = TnsF-Tn7 System Protein
MRLRSSGRKGWLPAFRDATLFKVVYGWGLRRREAAQLDLADFSRNPRAPEFGRYGACYVRFGKALKGSPPRRRTVLTVWEWAAEALAEYVEEIRPLFGEGRRQLLWPTERGKRISGRHIDRRFAEYRDELDLPEILHPHCLRHSYITHLIEDGADPHFVQQQVGHAWGSTTAIYTHTGSDFMNNALQDLLNDGLQGEH

SEQ ID NO: 1453 - protein, 770 aa, synthetic construct
  REGION 1..770: note = TnsF-Tn7 System Protein
MADRNVNGTGASAGAVPRADGPRNIRNIALVGPSGAGKTSLVEALLAAAGEVSRPGSVEEGTTVSDHDEVEIRQGRSVDLTVNPVMVGDVKVNLLDTPGYADFIGAMRAGLRGADAALFVVSALEGVDGRTRVLWEECAAVGMPRAVAVTRIDHPRADYDEVVAQCREAFGPGVHPAYVPAVEGTGDDRRVVGVWGLVSERYYDYSGGAAGAGGSDGSERAKRSGRAGGGGPGSAPSARPVPDWLREAAGPLRETLVEEVITESEDEALMERYMEGGELDPDLLIDDLQKAVAAGGFHPVLAISTTTGVGVRELLRELPLSCPDPTRRPFPETSTPEGEPVAGLSCDPDGPLVAQVLSTAGDPYVGRVSLVRVFSGTLRPDTRVHLHGHGVPCGLTGQDELDRTGNDERTGPLSVPLGRENRPVGQVVAGDLCLVARLPDARTGDTLSEPERPVRVAPWRFPRPLLPVAVSAESSGDEDKLSQAVARLVAEDPSLRVEVNAETHQMVLWSLGEAHLDAALDRLEHRHGVRVGTGEVRVPLRETFAVPAQGTGRNVKQSGGHGEFGVCRIRVEPLESGAGLEFVDEIVGGVVPRQFVLSVEKGVRAQMADGVGTGTGAKGGAGSGDGAGSGAGYPLVDIRVTLYDGKAHSVDSSDMAFQKAGRLALRDAAAAARLAVLEPVDEVSVEVDDAYLGAVLSDLSARRGRVVGTESVRGGRAVVRAEVPELEIVRYAVELRSISHGTGVFSREYARHEPLPAQAAARLAGRGGQG

SEQ ID NO: 1454 - protein, 770 aa, synthetic construct; identical to SEQ ID NO: 1453
  REGION 1..770: note = TnsF-Tn7 System Protein

SEQ ID NO: 1455 - protein, 113 aa, synthetic construct
  REGION 1..113: note = TnsF-Tn7 System Protein
MRTVGYHWHLRELMAQRGMFHTSDLVPHLAERGIEMSSSQVHRLVSGVPERLTLKVFAALCDILQIDPGELFEPYAAERTRRKVADAGPPPAPDEGSSAARKPRRARILPEEP

SEQ ID NO: 1456 - protein, 280 aa, synthetic construct
  REGION 1..280: note = TnsF-Tn7 System Protein
MEREWVRQCVAGYAQWLLARQPENLCLAASLRSDLPLFQMLDQQLETAQALSGEALVGLMPQNRLRRHLLATVYLQDSGLIHLEPQQKREAADRGRMKAKLAECADAPWAYAVQGYARELINSHRQVHTSRLYLAVAIRFCRDQRLEGPFGQAELVDFLTRNPGSRASLSAWVSYVRRSLGYKVTMPPRVRTPLASVRAAKTLASLLAASPTTENIPTERLEAILCTAFGYSARQLRKDVECVGNEGAWLRTSNGLVNVPVRLRKLALAWAQRRGIESFN

SEQ ID NO: 1457 - protein, 223 aa, synthetic construct
  REGION 1..223: note = TnsF-Tn7 System Protein
MTRLGSQGPVRPLRNSHRALTGKLSLQDGGHAGFESSLERDWFIVLDFDPAVIRLQEQPFRLSHMVDGKSRSYTPDVLAEYSQDDLLWTVVYEVKHQQQLRSDWDQLCPRYRAAMRHCRQQGWRFKIVTEKHIRTPYLENAKFLRRYRTMAMEQLRIAQLRYTASALGPTTPQALIAAAHWPRQEQAMSLATVWHMLAAGDLRADLHKKLTMSSPIWLPEVTR

SEQ ID NO: 1458 - protein, 337 aa, synthetic construct
  REGION 1..337: note = TnsF-Tn7 System Protein
MRTAGWDRPVADELLSSYLVRVAIAQGTSAHRLCARYAPGVSVWTRDIDRCAPERLIRVVADQAQVSVDRIEGMCLSGWRELAPRTHPMAAITPWISAVGTYHRLRRRYGLHYCPACLEQDGAFLRCWRLSFVTACPMHEIQLRDRCGSCGEPVAPHRQGVMTRCWHCQGDLCAGSRPLEKVGLGQRWLSSCLCQQSSSRGAPSEIWLGLKQLLEAFAGRPSRRFADAAPRMRIELGDVQTQRADMRLLDDLIAQWPRSLWRAADRQGLNQLAFPPRLPPWLDAAVSKLPAGHPRGKRATPSTRLKAVQRAEAALSPGWRTERAEFLLDQVRQRRGH

SEQ ID NO: 1459 - protein, 627 aa, synthetic construct
  REGION 1..627: note = TnsF-Tn7 System Protein
MISPTFFAVEPGVEVLVGSRKYRVTHQLSVDSVLAIDLESQQSTRLRIETVTRVLPETEEGNVPQFPVQHYSDEDWAIAQSRFQHIKPLLNQQHNTRRGAEQAAASAGVHVGTLYKWLAMYLDAGHVAALVPQKRGRNKGTKLLKEEQELVIASVIDDIFLKKQRGSAQEVVQEVKNRCKLARIEYPHANTIRRRIAALNAATVLRRRGMKDKARDKYEPIRGSFPGADYPLAVVQIDHTPSDVIVVDEEHRLPIGRPWITVAIDVFSRMVVGFYMTLDKPSATSVALCVSQGMCPKAQYLVDLAVPGDWPVWGQIGTLHADNAKEFKCKAVNRGCQAHHIDLQWRPVKKPHYGAHIERYMGVLATELKKVPGTTFSNIQQRKGYNSEKEASLTLKELEQYLVDFIVNTYHQRSHSELNNASPQRVWERAIMGTGDTPGIGLPPIPHDAERLKLDFLPYFEKTIQRYGVRVENVFYYDPVLNPYINSTDEDSKTKRKFIFVRDPRDIADVYFLDPAVDMYMKIPYRNLANPSISAAELRETSKRLKQEGAAEVDEHRIFESAMRNRELVANAVTKTKSARRQVATQPKPRWSERLPAKELVPLASYAPPTGEGVFDEAPELLEVGGL

SEQ ID NO: 1460 - protein, 296 aa, synthetic construct
  REGION 1..296: note = TnsF-Tn7 System Protein
MDVLKDHLLPEVRAKLDVSDAERIAFCREDRWIAYPQAKQILDELDQLVAYPVTQRPPCRLIVARGDNGKSAIVRQFALRHPMLVTEQGTPDLPVAVINMPGSPDPSQMWSAILTAELIVHRPSDSASAKRAQVVSILRHNRVRVLVVDEFNNITNAGKRAADLLSSLRVLSSELNISIVAAGTQAAIHALSFDPQMRSRFQPLPVRLWTMDKAYRNFLYTYERLLPLAHPSGLAEPELMPLVFSMAGPAIGGTVALLKEAAVLAIRSGQERITAEVLHGVQANSKDNWDAIAKAV

SEQ ID NO: 1461 - protein, 296 aa, synthetic construct; identical to SEQ ID NO: 1460
  REGION 1..296: note = TnsF-Tn7 System Protein

SEQ ID NO: 1462 - protein, 386 aa, synthetic construct
  REGION 1..386: note = TnsF-Tn7 System Protein
MTCRDCHKPKYHFGSGRCEDCAWRRIHSRLLTRLYAEVPAAWARELMTEYYQTLRDQISHGTLSKSLRHDVSFFSALSSHFASAEALSGVLVVRKLGHEFLARYGRVMSFLNVTGHITTYEDPDYLLEWHLSRIRSYTTRGPAWSHAALDRFLTHMLHKRDLSLDRGKRRTVPVKPKSMESAVRAAVAFLAFAAAEGATSLPEVSQEHLELFLGRHRNYRLRIRAFVRYLRRHERRFQKLSVPASKSEFSLKHALSDEARWAHIDCFAQASTTVDVRWSLISLFALIYAHPLGHLWALDQWQAHDLARSDHHVPRAMGALRTGLAAHSDRCIGDQPRHGHHVLPAIGYAYASARAARFRREGLIDVVCLPARVHRWIDVHRHCHRC

SEQ ID NO: 1463 - protein, 408 aa, synthetic construct
  REGION 1..408: note = TnsF-Tn7 System Protein
MTARIYRLPGALAPPPLAPTLGPGPAPAGAGPVAVPQPRRKPKPPPTPTAPTPSRPPRELTEPEQVLQERMLRSYYEGRRPSRNHAKSSIHSDQIAVRQLLTFIGQPLWELTEDDFEVWSAHLGLTQGDAPGTQRRKQTAVATLMRYLSRHLALQNEARALGGELREIAHSENRVIHTTDLAPKRRRRYLSAVEFQEVILVLDAAIELAIRSKPRCVRALLRDKAMFITYYVYGLRMSEGHGLNLTSFRANPDIRELGRFGFADVYGKGSNGSGPRFRSVPAINPAIREILEWYLDVVRPMFPPLDPEEPALWLSEQGTRLSRSEIAARFKHLLRVCDIDPSTLSPHGLRHMSVSHEAEADVPLHFTQLRHGHANAATTQVYTHFPETFIRDRARQLVKQQLQNKEPT

SEQ ID NO: 1464 - protein, 125 aa, synthetic construct
  REGION 1..125: note = TnsF-Tn7 System Protein
MNTNAALPRVYWRLREVMAERGVPSVAALRRRLKDHYPFISEVQLGRVVGQLPERLNMALLIALCHALECTPNDLLHWGTCAPPLPTDKPARTRKPPRELPPDEIARLKGPVFTVFALPSKEDAP

SEQ ID NO: 1465 - protein, 202 aa, synthetic construct
  REGION 1..202: note = TnsF-Tn7 System Protein
MINNTDRIILKLLKKFNNDDNKKFLFKNFSKYIIITIKEKRLSITYGEKILRHTFSYLIYCNYFKQKIPTQFSLEGYLWLHYQQKYFLQKFIEFLSKYYNIQLDLSKIKAPQFKRPKKSHQILKERVIYILNTPEDKHLTQKFVFDAFIGYFHWIYIPKNVYISIKNIKEYKGSGYFLNINSSKLFFLNEIVNYLYKFQLIN

SEQ ID NO: 1466 - protein, 418 aa, synthetic construct
  REGION 1..418: note = TnsF-Tn7 System Protein
YVPRNKLIRNQLILNPLQNLIKNYVVNYSINDSQYNIEIEKALEKETMIFLAYMCCDKKTKSILSKIWTSLESTNYSNIKHPYILPYHTKTISFRASGIWINENLFFIQRIDNPKPPNDMKVKVKCYKTIGKNEDFKENKIEELDDEKQFSTPINQNKINETTNITAKKNPSRTTGIKYIVSEVSPDNNDIDCDIDEEVTIVDNNSLNTYSKNEDKIDGASSGKFSGQKGSQKIARTAYIVEENPIEINEIKEITDTLLSFIDTGTIQKLVFIDDHANEHKKLVYMSFNTHHIQLNGNKFWASGYKKGSGISKKKSGYRKLLLVRFDIKGKKPLYLLEIIKKAESDAFYGLIFQTEFELNFSDLETIKYIIASNKGHFKGENLRPFPFKAAKFKHTWGKMNERLNNICENIKQSDIFD

SEQ ID NO: 1467 - protein, 232 aa, synthetic construct
  REGION 1..232: note = TnsF-Tn7 System Protein
MKISMKKRKIGYTYGSVSGHFSFRKQKSIAFESTLERDLLTLLEFNESVDDVIEQPITIEYINRNGKNTTYTPDYLVHFCGSNTSLLKLDRKPLLIEVKPRNKLIKDWNILKPKFKIAMKYAKANDMIFKIYDENRIRTQYLKNILFLKRYYKLEYDLSSEDEILSFVHSVGITTIEHVLEYLTSIKESRGLILSHIWHLLSHKKLLCLMKDNLTIQTNIWINENIEMEIFK

SEQ ID NO: 1468 - protein, 630 aa, synthetic construct
  REGION 1..630: note = TnsF-Tn7 System Protein
MINKVSESISIDRSSLKIQENEFVQYKNDIYKISAIIDFNYIVGINIETKRPKRLEIKILKAISSENISKDISIFKDINDFKDEEFSEIQEKYLAIQPLLKNQISRDEIEEHANKIGVHFTTLYRWLNKYKSTGTLAGLLPRPSGRKKGETRLDFQTEEVIQKVIESYYLTYQKPSVQAVINKINIECKNRNITPPGKNTIRNRIHKLSEYDVLRKRGNKSLARTLYKPTPGKFVAEYPMQLIEIDHTPVDLILVDDQHRKPIGKPWITVAIDIYSRMIVGYYLSLNAPSVTSVAMCISNTVLPKDELLLKLDIDSNWDVWGFPETMHVDNGADFRADTIKHAGLLHGINIEFRPIGQSNFGGHIERVIGTLMNITHEIPGTTFSNIQQKGEINPDKNASMTFSEFERFLVTFITKVYHKRLHEGIKMSPEQLWDIGIFGDEAPIGLPPKPSDPQSVLIDFLPYFKRTIQKNGINIEGLNYYDYVLRSKIHEIDEETGKKKQFICKRDPRNIKFIWFYDDNVQQYYKISVADQSLPNMTLWEYDLIKRNLYDKGIQNINHAQIIEAHEELYQQIESSVKKSKKARREQQRIVNKDKEIKDFNESQTKIDKRNEIVYISNDTEDDDIPDFG

SEQ ID NO: 1469 - protein, 143 aa, synthetic construct
  REGION 1..143: note = TnsF-Tn7 System Protein
MVATFNGNVSRCSEVEIQRYKNRLSEPFLDRIDLYLVMNDSFNDNKNVVSSTELHQNVIKAFIKQKSRGQKELNGKLSDEDIKKYCLLDDESSEVLEKARLNYSLSFRSINKVLKVARTIADLNDNDIITKSDLLKSLNFRRR

SEQ ID NO: 1470 - protein, 364 aa, synthetic construct
  REGION 1..364: note = TnsF-Tn7 System Protein
MKILIEPKPFKDESFVSWFCRTAFSNGTDPKSFALSIWNQDSMFYRDLDRFIPNENANDIEKTSLLSKNSIKWLTLEPLIDEVDTSKSENQYKKWYFLLPLAQKGKLRTNGIHFCPKCLKSKTPYVNKFWRLSWFIICPIHKIKLLSNCPKCNHIFAPEKQDYLHPYMYLCCQCKYDLRETELKPINEKLLSFQKKLTNIFANKTTNFSFNLLITKSKKDLFLTINILLSFVYKVLRQPIRFNKLIQALELQIQHEFISIHNGTFSRLNSTDRYVLLKIIYKILCYTINDFIYILKQSEITQNILQQTFKTLSPTIVYIKKHLSNKKLKRNTSKPKRLILPKTQDEVLKLFKEISPYLTNRFRQ

SEQ ID NO: 1471 - protein, 304 aa, synthetic construct
  REGION 1..304: note = TnsF-Tn7 System Protein
MQENKYKHLNEDCQAIIETSKENRINYMLNEVVIEYPAVKKVHNILEDLMSRPKKSRMQNLLIIGESNMGKTSIAKSFDLKHKSYTIENKDAMSIIIRPVLYTEALNRAEEKDLYIAILDSFWTPYNPSDSMPKLRHQTYHLLQECNVKILIIDEIHHLLNGTGSQQKNIKDALKSIGNKLQIPIVGVGLKESELILSTDPQLSSRFDIIRLPKWDCDKNFRGLLQSFERRLPLKKVSNLYMDKEKYSLLHLISQGNLGDLHRLLIECATHAIENGIEEITLDIINKFKWLKPTNKLTAREIPL

SEQ ID NO: 1472 - protein, 304 aa, synthetic construct; identical to SEQ ID NO: 1471
  REGION 1..304: note = TnsF-Tn7 System Protein

SEQ ID NO: 1473 - protein, 294 aa, synthetic construct
  REGION 1..294: note = TnsF-Tn7 System Protein
MTKCGYVSVVGRPNAGKSSLLNWLVGEKIAMVSHKANATRKRSNIIVMHEDDQVIFIDTPGIHETEKLLNQFMLDEALKAMGDCDLILYLAPVTDKISYYEDFLEKNKKNVKHILLLTKIDFVSADELMLKLKEYEKYNDKYEAIIPVSIKKATKKADILGEVVKYLPEHPYLYDPEIMTTEHLRDIFKEFIRESIFENISDEIPYEADVIVNKVEEKPNVDVIKATIIVQKDTQKGMIIGKGATAIKRIGRDARMKIEKLTGKKCFLELFVSIKKGWTKDKEGLKALGYDVNL

SEQ ID NO: 1474 - protein, 294 aa, synthetic construct; identical to SEQ ID NO: 1473
  REGION 1..294: note = TnsF-Tn7 System Protein

SEQ ID NO: 1475 - protein, 204 aa, synthetic construct
  REGION 1..204: note = TnsF-Tn7 System Protein
MRSRSIPFPRWSTARRLCPPGLSIEHPASQLPGHFQAEDEARNELLRCFNDAALPLDVRVAAALVRLYALPPTRIVELTDNHIRRDQERTYLAVNQHPFVLPPKLARLIDDQLRHSTPRHSTAGHQYLLPGQSPGRPRNPLGLADTLRHHGLPARAARNTAMVDALVDLPPVVIADLLGIHPKTAERWATLAGENCPEYVSSLM

SEQ ID NO: 1476 - protein, 204 aa, synthetic construct; identical to SEQ ID NO: 1475
  REGION 1..204: note = TnsF-Tn7 System Protein

SEQ ID NO: 1477 - protein, 249 aa, synthetic construct
  REGION 1..249: note = TnsF-Tn7 System Protein
MTADEPLLRVASVSVALGGRTAVEEASLTVSGGELVGLLGPNGAGKTTLLRAVLGLTATASGSVTATDRIGYVPQRHEFAWDFPIDVAGAVLSGRTRSIGWLRRPKARDRAAADEALELAGLTDLHRRPIGELSGGQRQRVLVARALAAEPRLLLLDEPFTGVDVPTQELLNELFGRLAAEGRGLLMTTHDLAAAARTCTRVVLLNRTVVAEGGPELLADPEQMLRAFGLDRAIGAESAPGVAEAEAAA

SEQ ID NO: 1478 - protein, 249 aa, synthetic construct; identical to SEQ ID NO: 1477
  REGION 1..249: note = TnsF-Tn7 System Protein

SEQ ID NO: 1479 - protein, 319 aa, synthetic construct
  REGION 1..319: note = TnsF-Tn7 System Protein
MTDRGVRDRQCIVCISGRPLAGKTTAAAMLHEDRGWPVEEVDALGARLLEADSTAEIPVELDRRRLSYSDAARVEFEAAGRFQEQLRARLDPLGAPIVLVGLRSVSTLRWLDTQFPRRVCLVYVSAGVHVCQRRFATATRLPYREYRRCLESAIECDQEALHRMAQLVVSNHGSLDALRARLRGFIGPNGRAHRTRLEPCSVCGQIRPVHHRLNPDRTPICRKCYEWQLNAEPCSQCHERRPVHFRDSTGRPVCTRCYQRTCNVRICASCGRARPVCCRNLDGDPICKHCRRHGADMKHSRTKPPSSRGRVAKIGTSAR

SEQ ID NO: 1480 - protein, 319 aa, synthetic construct; identical to SEQ ID NO: 1479
  REGION 1..319: note = TnsF-Tn7 System Protein

SEQ ID NO: 1481 - protein, 319 aa, synthetic construct; identical to SEQ ID NO: 1479
  REGION 1..319: note = TnsF-Tn7 System Protein

SEQ ID NO: 1482 - protein, 242 aa, synthetic construct
  REGION 1..242: note = TnsF-Tn7 System Protein
MTQSPPLLRTRALEIGHGAKALLPPIDLELGPGEFWAVIGRNGCGKTTWLRTLLGLLPPLRGAVERRQGVRLAYLRQKGSVDDLYPLVARDVVAMGTLRSGACFGRSRRRARNVERALSLLGAEDLAELPFRTLSEGQRQRIVFARIAASHPELALLDEPTSAMDLVAEREAFELIGRLRQQTRVTVIVVSHYIELVADHADHLLFLDRDTPVVVAGTPQRVFDHPAFVAAFGASPTRGPAS

SEQ ID NO: 1483 - protein, 242 aa, synthetic construct; identical to SEQ ID NO: 1482
  REGION 1..242: note = TnsF-Tn7 System Protein

SEQ ID NO: 1484 - protein, 264 aa, synthetic construct
  REGION 1..264: note = TnsF-Tn7 System Protein
MSRPYAIDEQYERWFITECCRCGRRRNKASSWPDGHVCRTCLDRAVRTRGSCPGCGQDRALPGLRPGDGAAICTTCAGFTQTFNCSRCGFEDKLHAGRLCSRCTVADRLAELLDDGTGRILPELVPLAEIVLSADKPRSVLTWLTLRRGMPGSADDFLSRLARGEIELTHQAFHTLQPWRAASHLRELLMSCGILPQIDKQVCAFECWLASHLEDIAAANTSLCSSASLPGTSWPGCGTAPSGSLSPPPAAGSPENRSSSPQAS

SEQ ID NO: 1485 - protein, 264 aa, synthetic construct; identical to SEQ ID NO: 1484
  REGION 1..264: note = TnsF-Tn7 System Protein

SEQ ID NO: 1486 - protein, 478 aa, synthetic construct
  REGION 1..478: note = TnsF-Tn7 System Protein
MIADLIPQRCDECRQKMTKAHRIYKDHRYCSTCYSRIFKRQICPKCGNFARLPTSDPAAICRACENDRPCIRCGKIGYVIGKITIYGPVCNACSPYFRKPELCEVCGVLSSRLTRLSRLGHDCRICPKCARADYGTCQACSRYRCLLENPDGRMLCKTCLEKGEVACPKCTELMPAGCGSQCQHCYWRGLLKKRIQMDCTAFSLPKMAMHFEAFGYWLMGQVGENKAAMTIHRYLPFFMEVERNWKDFPEFAVLLMHFGTAKLRCMLLPMRWVEVTGLVVPDEAAKADDSERRRIVVILDKFAKGMKERTLLEGYYRTLMENMNAGKMTLRSVRLALSPAAALLRQVGEKGGIQPNQKNLDTYLDKIPGQRAAISGFVRYLREVHGAQIALAKANPNRVKLQRRKKLEAELLALMKEGCGSKGFKRRLLSVALAYFHGLKRNVGLVVKDTNLTQADGGLVVTWNNVDYWIPLGFSWDF

SEQ ID NO: 1487 - protein, 478 aa, synthetic construct; identical to SEQ ID NO: 1486
  REGION 1..478: note = TnsF-Tn7 System Protein

SEQ ID NO: 1488 - protein, 231 aa, synthetic construct
  REGION 1..231: note = TnsF-Tn7 System Protein
MHTNSCDEVKPRQMRKIKPTRRSVSGVYAFRGSSGVAYESILERDFLIRTEFSLNVLDVIPQPAEIPFVSSNGRAYTYTPDFLVYYRLGSHSYDDYPKPVLVEVKPETEWRKHWREWLPKWKAAWSYAQSQGWEFHICDESRIRDQTFDNIRFLERYKRMPFSAEESQWVLETVRHMGCATMDYLLARHFMGIYRAEGIAHLWHLLATRKLDCDISRPLNEFSELWIPTNE

SEQ ID NO: 1489 - protein, 642 aa, synthetic construct
  REGION 1..642: note = TnsF-Tn7 System Protein
MNKSDEVEMPNMAFEPNRKRIKIDVGSFVQQDNIVYQIAQILDFESVIGVAVETGRSTALRIGDLRPVADIKDAKLQVNQDLAEIADEDWQIAQQRFAAISPLVGKLQIGRDEAERRAKELNIDPSTLYRWLQRYNAYGTVTALIPKKRGWQEGKSRISPDCDEIIEKTIRDYYLTVQRPTAQKTIMEVQRLCAERGIKPPNHMTIRARIAKVSEKARLRGRGFKEKALNKFQPVPGCFPNADYPLAVVQIDHTPADIILVDDIYRKPIGRPWITLAMDVHSRMVTGYYLSFDPPSETSVAMCVAHSMLPKDDWLLLHKVDTSWPIWGVPRTIHVDNGADFRSNNFQQSCLAYGINLEFRPVKQPRYGGHIERMLGTLLREIHDLPGTTFSSIKAREGYDAEKHAAMTKSEFETWLVTLICKVYHQRLHTSIGMTPLKKWEIGIFGNSGFQGVGVPPRPGDRLTILLDFLPAFRRTVQTFGVTIDGMSYYAEALRPWINIEDSETKKKLDLIFRRDPRDISAIWFFDPALQQYFKIPFADQSLPAMSIWEYQQAKEKLKREGVASVNEHGILRAITELRTYVEEAQERTKKARRQAQRRKEHEKNISPAAPLPAKSTQAEVSSRQAFTGLIDGDIDTFGDIA

SEQ ID NO: 1490 - protein, 296 aa, synthetic construct
  REGION 1..296: note = TnsF-Tn7 System Protein
MSSYKHIHPDFHHIMLLSDKERIEFLDEPRWIGYKTAQQVMDTLQGLLHKPVRPRMPNLLLVGDPNNGKTTIVRRFFDLCGQGYVNEDADPVKPIILAEAPPSADEKSLYISILERFFTPYRATDPVSKLRYQVIHLFRACHVRMLIIDEFHSLLTGSAVKQREVMNAIKLLCNELAIPIVGVGTREAVRVLHSDPQHASRFDVMSLPVWELNPDFQRLLADFEKVLPLKNPSRLHQPELATALHAISEGNIGNLHCLLVECAKEAAKSGKEQIDKSIIESKAWVRPTRGIRELMA

SEQ ID NO: 1491 - protein, 296 aa, synthetic construct; identical to SEQ ID NO: 1490
  REGION 1..296: note = TnsF-Tn7 System Protein

SEQ ID NO: 1492 - protein, 679 aa, synthetic construct
  REGION 1..679: note = TnsF-Tn7 System Protein
MLAHLARLDTGLDEATLEEVLRQAAPKPFAVRRLANELEAMPSLLTGDGARGSAHLVTLLELLNKLGARNAVVPPCPWCGRAVRLTTTHGGLRSCSWCPQRLRVERCSACGEERRVYGRSHDGQRLCRSCHSRDPSNHAPCSRCGRTGEVRQTGDHAGVCFACERLPVALCSVCGRMTPCYRADTDAPRCLECSHRHEECSGCGRRRRVVTRTAEGEPLCGSCHVIIKTCARCGHETRVNTRRTSGDAVCDPCYRNDPARRQPCPGCGTIAIPARHGLCETCAAPDRLRELLGDDHGIVAPVLEPVFRALAGGKPSSVLEWLNRPGRAALLSQIRNTGMPVTHGMLDQLTPADRTRQLRMILVATHVLPERDEQLAALERWVSQFLKNTTDPVERRLLHAFVTWHYLRRLRRKHHPGRPLSPHTAANVRYCLAQSAQFLQWLREHGAPLAACSQHDIDTWLAEGTVMRFKARGFVRWAARHNHIRRPVTFPPMPSGRPYRTLPDDADRWRLVHRFLHDDSIAAVDRVAGLLVLLYGQPLTKIAALTTDQVLTTDEGIRLALGPHPVTVPPPLDQLLIHLAEDRDGALALGRSTDHSWLLPGTHPGRPRSPRQLRTRLASYGLPSRRGRNSALMDLAAQMPPAVLSEVLGVSIGAATGWAAAAGGPRAQYAAELSQRSKS

SEQ ID NO: 1493 - protein, 679 aa, synthetic construct; identical to SEQ ID NO: 1492
  REGION 1..679: note = TnsF-Tn7 System Protein

SEQ ID NO: 1494 - protein, 304 aa, synthetic construct
  REGION 1..304: note = TnsF-Tn7 System Protein
MNRERIERDAAVQVMALERDWSRAAYLGFGQWLLAALPDKPHLAKVFASHFPFFARLDVSVTNPGTLRGNGLLERFNVAELRRHVLPVRFLEALHGANLDEAAKVEQVERSRITEKLLVSRHAPYAAVLKRYVGWLDDQRTPTRTIRLYLTAASQLCAVEALGENGQCSDAQLQHFLRRHPGARASLFRWLTFGRKVLGWEVAMPPRSSAKDEAPRTVRDLSVLLAKIERVGLEQAPVTLLRRAIAKAFGFQAVRMTSTVWSLRIEGREMYLSDARESLLVPEPMRNLVKAWMRRVANSDHLDD

SEQ ID NO: 1495 - protein, 631 aa, synthetic construct
  REGION 1..631: note = TnsF-Tn7 System Protein
MPIIEEFPKDDAYRLVKWVDKFTLPHLTTRSTSVTVRLQRLPFERHSDLNRLTRDSAVALLPLDRSDAGQAHYASVAVHAGLLPHLAIGRVYQGQHLVGELPTRQATLALADAELSCHEIRIGEELPAPAGWTYPYKQLLSREFGGIQTEFAASRCLVFVDAAGIEYVIPRALIFQRFYAIQRELANAFTSGPWAQTRSRIVYEGQLKSGLETKIDPVTGAWHVILQTHVDNDFARLAALLYFDDYAAARAESIYTGMLLDRHGSAHGPWFASAQIPFRADTKPLRLQVKGFMLPPRLGRKEGGGKPVVHKQSFLVTSILGSSWPSYTPPIKAGRLNSGDKGKEQLPAEGHRPYAGQVRGKPAGEDLVTTSAVDASAAQSDAITLEDTFSWLDGEEPEKLTKDRSQLYSDGDVRPAPPPPDAASGGERTHQDGNAAPAHHKVLVRDPVNRFRYLLDAFEMLRSSGDLQRYTVFQPAIPAQMAQCGGLSCWNFLDETARRTGRWPSVGWRMLERARGAGSERSPGKPRCVLVVRIEIGDYVGYWFEIETRTTEGGVLSPLVASTGANEQVAVSHLVESIARAEGRNLRQAMTAAAHEIGSEAAHCYKHHYKGDNNSEIDPNSLRRFLVKWAI

SEQ ID NO: 1496 - protein, 223 aa, synthetic construct
  REGION 1..223: note = TnsF-Tn7 System Protein
MARLSSDTPARELRTSRRSLTGRVTLGDGGVAAFESSLERDWLLALDFDPRVLAIQVQPFSLQYEHQAATRRYTPDVRADYSLASGMATLVYEVKPHGELQENWSVYRPRFKAAVRYCRSHGWRFKVVTERHIRTALLDNAKFLRRYRLLPEQDLYVQQLLYTLRALGMTTPQALLAAAYWTEESRMAALPMLWKLIATRRLGTDLQMPLTMSAPIWLPGSGG

SEQ ID NO: 1497 - protein, 342 aa, synthetic construct
  REGION 1..342: note = TnsF-Tn7 System Protein
MHWPLPLEPHEDELLSSFLVRSAHRHGLSPYRFCAFHFPGAAVWNRDIDRSASDALLAAIAVKAGITPARVMQMTLRSLEGSLGKDLARGSAPWINRVGIYHRLRRRWGLQYCPDCLAERPILCRAWRMSCMVACSRHRRLLQDACPHCDAPLAIHRQLLSSQLCHHCSRVLGRTPDELNVSIDPVLRAQSYFKCVLHSGTAEIGGRSVCSDDLFHGARVLASLLAPAWLPQDPAEHCRPSLEQARVQARAGVVLRVVQLLALWPFGFRQLASVQHLTQRSFARRSLPDWLKSAVDELPAGRTRHALPRQHHSLRAKLEQDRRRNVDWRSARAALLWQAASK

SEQ ID NO: 1498 - protein, 636 aa, synthetic construct
  REGION 1..636: note = TnsF-Tn7 System Protein
MSGISKAFFCAVPGQLVGYGDRRFRITHLLSVDSVLAVDIESNESQRLRVESITPLAPEVANESRTEIERDLAQYSKDEWAEAQRRFAAIKPLLVDPLRTRAMVEKLAEKERIHTSTLYKWLKLYQTAGHVSALVPEKRGRKSGTLLLRDEQEKVIGSAIEDVYLSKQRHNKQDVVDEVIRRCRLSKIEAPSANTIRSRIAAVEPAQALRRRGFRDLARNRYEAIQGAFPGATHPLAVVQIDHTEADVILVDEVHRQPIGRPWLTLAIDVYSRMVAGIYVTFEKPAAISVGMCLAHAICPKREYLAELSVGGEWPVWGTMSVVHSDNGKEFRGQMLKRACEEYGMDLQWRPVTLPHFGGHIERLMGTMANQLRKLPGATFSNPQQRRGYDSEAMAALTLKEFENHLVDFIVNVYHQRVHSELGMSPKTKWGLGILGDANSTGTGIFPIPEDPLRIHLDFMPFFHRSVQQYGIQIDNISYYDPVLDPYVSAVDPDNAKAKREFLIRRDPRDISKVYFLDPKDGRYTALPYRNIGYPAMSAWELREVQARLKAEGRRGVDENLIFEALERMRSKVAEAKQKSKAARRQATRNPATANHHFPKPAAASSVSYVPAPTPTIEPDPFDEPIRPFDEVSLVR

SEQ ID NO: 1499 - protein, 295 aa, synthetic construct
  REGION 1..295: note = TnsF-Tn7 System Protein
MTRYSHLTAAVAQALELPKSERITFCQTDRWIGYTRATQILDQLDQLLTYPRSLRMPNLLVVGRSGNGKSSIIEHFTNRHPVQMTESGSPIAPILRMEMPETPDETEFWSTLLWSLAISHREKDPASIKKRQAKSVLQYASVRLLVIDEFNNLTNAGKAAGDLLAAIKGLSNDLKISIVAAGTQAAINALNSDPQMKSRFEPTALDRWKLNSEYLRFLASYEQLLPLAEPSKLASRELAPKLYGMAGDTIGGTVKLLKAASAHAINTGIERITPNVLDDLGWTRLGDWDAVARVV

SEQ ID NO: 1500 - protein, 295 aa, synthetic construct; identical to SEQ ID NO: 1499
  REGION 1..295: note = TnsF-Tn7 System Protein

SEQ ID NO: 1501 - protein, 724 aa, synthetic construct
  REGION 1..724: note = TnsF-Tn7 System Protein
MVTPGLHQQDRTSPLRPHAHEHLSLCQQALRCCECSGPARIYRRTRTGEAICGDCWRPPDGDPVDLICQAIAAVAPEGEPAAVRHAVESVVPVGNVYLMFRLLWEIEDTPGILTGEGAQASARAARLITALTAAGVPVPAPACPGCGQIRPLIQVLGGRRCCLHCYRKANSTACGRCGRDRAIATRRPDGTPLCSICMRHEADRLITCFLCDRVCPLRRSTKDGPLCGTCYRPTMQTCSFCGKGPRRCYRAATGMPRCDTCSRARRHCVGCGKDKYAAARTEDGHFCETCWQKNPISFNPCRLCGTVEYLHSYGRCHGCVHDQKVHEALSRDGVLRPELEPVRDVLLAHGPKTGLRWLERAGARMVLDALADGTCPLTHEGLDAFLPNRSVAFLRAALVTARVLPERDERFTALERWITSTAEAVPDDGERKLVQRFATWHHLRRVRREAQGRPITSPQAISVRAGIRAAVTLLVWLREHGTELRLCTQGHLDEWIATGTTTRYDARGFIEWCRRNRHIGKGLQIPARVKLSLVQPTDEDDRWALSRRLMHDDAIAIEDRFAGLLVLLYAQPLTVICRLPVTGVVIEGAKISLLLGERPLLLPDHLDKITRQLLARRRGHVTIGVTEDSPWFFPGALAGGHLSDFHLGTRLKRLGIYSRSGRTSALMSLSTQLPAAVLTELLGISPETATAWTQAGGNWARYAAQLPDRPNPRTLDVISSAVAA

SEQ ID NO: 1502 - protein, 724 aa, synthetic construct; identical to SEQ ID NO: 1501
  REGION 1..724: note = TnsF-Tn7 System Protein

SEQ ID NO: 1503 - protein, 554 aa, synthetic construct
  REGION 1..554: note = TnsF-Tn7 System Protein
MANNPITPGVSVTCSALSFQWPDGTTVFDGLSLSIGRGRTGLVGTNGTGKSTLLRLLAGGLRPSRGSVTVSGSLAYLPQNLTLDTALRVEEALGIAERRAALRAIEAGDVSEEHFETVGDDWDVEERTLATLGSLGLGDVELDRTVGEMSGGETVLLRLAALLLERPDVLLLDEPTNNLDLFARRRLYEAVDSWRSGVLVVVSHDRDLLERVDRIAELRSGAVSWYGGGWSAYEEALATQQEAAGRMLRAAEADVRRQKRELEETQIKVARRERHSKKMDAQRRAPRIVAGERKRSAQESADKLRGLQEDRLSEARERREEAADAIRNDAEIRVSLPHTAVPAGRTVLSLHELRPRFGKLHAGNLHVHGPERIALVGRNGAGKTTLLRTLTGELAPLSGEAKTFVPLRFLPQRLDVLDEELSVAANVARMAPGITDNHIRSQLARFLFKGARAEQPAGTLSGGERFRAALAATMLAAPAPQLLMLDEPTNNLDMASVRQLTSALDSYQGALLIAGHDLPFLESVGITRWLLLAEELQETTAEEVRDLLEASEAS

SEQ ID NO: 1504 - protein, 554 aa, synthetic construct; identical to SEQ ID NO: 1503
  REGION 1..554: note = TnsF-Tn7 System Protein

SEQ ID NO: 1505 - protein, 197 aa, synthetic construct
  REGION 1..197: note = TnsF-Tn7 System Protein
MPTLVIVSGPPGTGKTTLAHELARILGCPAVVRDEIKQGMVLAIPEYEPSLGDWLNHRTLGAFFGVLRVLLEAGSTVIAEAAFQDRVWSPHLEPLTGLAQIRIIRCTAPAAVIGDRIIQRAKQDVHRTAHADHTLIRAIEAGQRPFDSFVPISLDAPTVTVDTSVSYQPSLMEVAAFISSPGCTSPSGGPPEAAPAG

SEQ ID NO: 1506 - protein, 197 aa, synthetic construct; identical to SEQ ID NO: 1505
  REGION 1..197: note = TnsF-Tn7 System Protein

SEQ ID NO: 1507 - protein, 316 aa, synthetic construct
  REGION 1..316: note = TnsF-Tn7 System Protein
MSGQLCERCRCFSGVLFIAYKSKGISKRVCPRCCLGYFKTCSICKKHRKIYHVTHNSPPQTLCKVCIENPIFTCPKCLRQRQRHSKKECSDCYNNRSARVYTVKCSRKIDQRWLKVLLFKFYVFCTRQRGSLFTKYYLKKHLPFFQKIDKHVPSYSILGYWLRNALTIDELRKHLLIRKFFLKQGIYKPWSSLDHKKHQVQQSIERLLAKDSPHRLILNGYSSFLSTKKRLSSQTRLLYLRAANQYLITLANSEYQIMSSKICTSGYKNSLSIFLSWLKIQNLSPKTIYYSLTEDEQDSHRAEAHLSRLIRKQSTN

SEQ ID NO: 1508 - protein, 497 aa, synthetic construct
  REGION 1..497: note = TnsF-Tn7 System Protein
MWPYSAFADKPYQLKFRPVYVKGELLSSWMIRVAHFYGASPIKFWHYILQSHTVWNRDIDTHISESLRQKLRETIGYTNRALEILPSDKHWVLPVGIYHRRRFAYGLQYCPLCLSKQMIWPKLWRLGFFTVCPDHQSLLFDRCPQCSKPVEPHLDFKISLELWNCHQCGLSLTAAASTPDHPTYTQQCLSNCSDTYKINDQVISYNDFSLGVRLISQIIYRKNKFLEPSHLRSLCSSSPETRQSILLTVDDFLKDWPISFSMFLREHQIYPCELTQLRKLVPTWIYEPFKLPKKTFKGAPLHVKAPTPKKSIHEHDSRLVIDRVLGMMWFQVLDKTSNRKSQFQRYRNFQFAFSTYVLGWTIKRISSLHIIEGSYKNIRIGYQIKGITHELKVVNNPLWWVSVREYINIFKQELLTENKGQILYLFPPVNNNTNCTWVYKVLRKTINMCSSDNHNMLANFGLAHSQSQFDHIKSPLAFALNTNKEFQFSSSRRCTSL

SEQ ID NO: 1509 - protein, 220 aa, synthetic construct
  REGION 1..220: note = TnsF-Tn7 System Protein
MVARVIPMNYRNITGTVSLKRTTQSRMSIAFESSLERDFVALLDASDDVREIEEQPVQIKYKVSNENSFRTYTPDTLYTLKSGEKVLCEVKYRKDLFEHWDTLKPKFKAAIRYAKEKGWTFKIFTEKEIQCVWLSNMKFLFRFNSINPEPTQISSILSAIESVRHCEIRELLPILSASKQTQAEYFPIIWNLILKKDIQCDLNKPLTSATEIWVNITENV

SEQ ID NO: 1510 - protein, 628 aa, synthetic construct
  REGION 1..628: note = TnsF-Tn7 System Protein
MTSYKFVPGLKVYKVDDATPYEVVAPINMRSCVVRNLKTDVLETAFISDFTPEERTSNQHDDLSLHSDEQWLEAKSRYEIIAPILEKSSYGSPVTDLVKKAAKQHSIGSASIWRWIRTWHDNPKLSSLISKKTGIAKGTEKLSEQVNLIINDVIQNEYLTSQKKSIASVCREIDKRCKRLGIKPPHPNTIRLRIRKLPAFRVIKSREGRSKAEAKFSPSVHSFPDAHCPLSVYQIDHTPADVIIVDEISRQPLGRPWITLAIDVHTRMVAGLYLTLEKPSAISVGMCLAHAFLSKDKWLAERGIDGEWPIWGLPQTIHADNAKEFRGGMLKRACEQYSMDLTWRPVARPQFGAHVERLLGTLNQEIKQLPGTTFSSIEEKGDYSSTKKAALTLQEFETWLVTFIINVYHKKYHSTLMMSPLAKLEEGVFGNAKIPGIGLPRAVSDESKLLIDFMPLYSRTVQRYGIKVDDINYFSHSIVPWINETDPDNPKVKRKFIVRRDPRDISQIYFFDPIESNYISVPYQNISHPKLTLSELKSIKKKLKESGKRNIDEDSIFDAYDQMNSIVEQATKETKSKQRAAARKRYAKKAALETKSIIDLTPQNSTEEPSDIFDDQVAPFTEIKFQNR

SEQ ID NO: 1511 - protein, 228 aa, synthetic construct
  REGION 1..228: note = TnsF-Tn7 System Protein
MSGGTIPRPGEISLAHNGLLFLDEMPEFERKVLDSLREPLESGEIIISRAQGKTRFPARFQLVGALNPSPTGYYEGNQSRVNPQTILRYLSRLSGPLLDRFDMSLEIPALPKGTLAEGGDRGEPTEVVKQRVLNARVCMLERSNKVNALLGSREIEEYCPLKKEDAQFLESALHRLGLSIRAYHRIIKVARTIADLDGQSQIARNHLAEALGYRAMDRLLKQLTAQAV

SEQ ID NO: 1512 - protein, 1074 aa, synthetic construct
  REGION 1..1074: note = TnsF-Tn7 System Protein
MKYQIEKPADEDLFSSGGHSHTASAMEQVILNQPDVHAIGLEGELGSGKSTVLRFLEQQLPDDIYKFITFDVEQFHCASTKASFVKHLRDRLVTLFGSDNSPNSKKIKRQIIKAADKALGHDLTYTKRVNSNLSWYTVAFAISLLLSVRYAKDSLEYIFFTLSIFFTDTSHYTFGLDETITTSLGISPILVVLLMLIKRWQEKDKPDNERLVPNIGDIFKRNSVDKITEKFHVTREVGPSELKEAFQTMVSAIPDEQNVVLVIDNLDRVDKEKVREVWSDLEIFTSCENSNLRVIVPFSEKHVATALSDDRNSDGSEFILKRLPVKFRTPPVVSAGWRGPFEHYWNETLQDKAGIELCSELIDIWISPIKQITPRFLKTHINEIAVALASNPENISAVTCSAYLLVQKSLNFSFIDLITMNTEFRDQEEEQSIVLTRKVLRKILTDQCWSEQIMSLHYQTRVDIARSELLEDPLRRAVANYDAHEVVELSEIFGFDVAFQRLISMYDPYDLVKLASETHENDPKHEAWLSKWIPNINSYLEQYKDAISAYDSQLIEAYSNLTSREVKLSTARLKTEHAALSQHLSKSDLKKPEMEGILSKLHNIETVTGDRLTPRKISEPSVTFFLEYLWFDKESFPHWDISGSILSSLSFKSLFKSISELEFSKSNDLIMHAAKHFSLGWVKFNSRPFSDFSYSDADYPQVLITSDFANTNTTIELTEMLRTRKGTEYINFWSVITLVSAIASDSLEREYENSNLLDYLLENYYNEEEQGHLLDDILVFVPRYQQLYPALLCDRLPIAIKKRIALLIANGRVHALNITDVFSEYYPVMKTFFDNDDTEQTLVKLLGWKRHTSGDDISEWDRESILDCLTYNETWCNFIISWFDSEDNDVNFWKGQFLNSPSTLKAISEWYYINNKTIKYSSNLTSALIEEYRSFDANSSSSEMFDALLPLLPTSSLGRLKRALSSFIKEEQIDSSEKYYIIERLGKHIKLPDFESEASMSTVISLIENTTSQEVVNWFSEQIDELNQISWSETKRTNLSQAVKNLVEQFEIGNLVQLIIVEEGEVLSLDEESD

SEQ ID NO: 1513 - protein, 1074 aa, synthetic construct; identical to SEQ ID NO: 1512
  REGION 1..1074: note = TnsF-Tn7 System Protein

SEQ ID NO: 1514 - protein, 301 aa, synthetic construct
  REGION 1..301: note = TnsF-Tn7 System Protein
MVTEYKHLNSITLEKMSLPPTERINFARQSVWIGYNTANQILDELDELVRWPRTQRMPSKLIVGDTNNGKSMLISQFLLNHEPFYDDPQNEQGLHVPVIAIQAPPKPNERLLYSTILQQVWAPHSARETSSRLLEMVISILRHCKTKVLVIDEIHHLLAGTHSKQHEFLNILKYLSNELQLSIIAVGTKDAVRAINVDPQLANRFTALQLPRWKLDRDYLRLLATFEQILPLKKPSHLSSRELAPVIYDLTEGYIGETSMLLGNAACLAINDGSEKITSNILESLNWVSPSQRRRASLEEK

SEQ ID NO: 1515 - protein, 301 aa, synthetic construct; identical to SEQ ID NO: 1514
  REGION 1..301: note = TnsF-Tn7 System Protein

SEQ ID NO: 1516 - protein, 573 aa, synthetic construct
  REGION 1..573: note = TnsF-Tn7 System Protein
MHGHGPDDTPRCQVCQHKSRSAACARCGRVRTFNVSKADGKPYCRGCRARNHLEECAGCGSTRPVNVRDEDGRAFCGSCYAAHGMVPREACAACGTLAAVYRRRDDGTGVCSKCYRHPKRQCGVCGRVRRVALRATATSPDICPTCFQAPEITCSLCGDTTLGRRSTANGAPMCFRCQATQRVDAALVGPDGSIPAELKPVRDAIVSADNPRSILTNFTRSKSLALLNSIARSERPLSHDTLDEHAGAYSVEHLRALLVASGALPERDENLARLGRFVDDLAERAHAPVDRRLLRAFARWHVIARLRRRYPDRPVPPNSARRCRDGLTAALRFLEFFREQSRCLDDCHQSDIDVWFATQPAHVTTSSKAFLVWTRRHGTLSRSLTIPVAQGSQPKHFSPASDRWARARTLLHDDASASVPDRVAACLILLYAQPVTRIAALTTEHVQHGDGGAVRLRLGSAGLTVLPDLAQLLTQLPCEQPRGAARKLAHGRWLFPGRQPGHPLHPHSISRRVRALGVDPRPDRNTALLELVRELPPAVVGKLLGLHPGTAAKWAETAGSDWARYAAAHNRQR

SEQ ID NO: 1517 - protein, 573 aa, synthetic construct; identical to SEQ ID NO: 1516
  REGION 1..573: note = TnsF-Tn7 System Protein

SEQ ID NO: 1518 - protein, 647 aa, synthetic construct
  REGION 1..647: note = TnsF-Tn7 System Protein
MARTTHHTTTARSGTAGAFTPDSLSVSARHLEVGNEFVASFGVTGYPQEVYPGWLAPLLTYPARLDVSVHVQPVDPATAASGLRTQRAKLESSRRHNSRHDRLDDPDLDAAAEDAADLSRRIARGDGRLFRFGLYLTVHAPDETALAEEVSALRSLCASLLLDAKPATYRALQGWVSTLPLGLDPLGLKRTFDTAAVSAAYPFTSPDLPPTDPTTSAPSGVLYGYNVGSSGLVHWDRFACDNYNSVVLGRSGAGKSYLVKLETLRSLYRTLGHNEDEWGADGVQAFVVDPEDEYARLASQVGGTYMHLGAGGVRLNPFDLPVHTDARGRRTAPQDALKRRSVFLHTVLAVLFGAEITAAERTVLDTAITATYHRAGITDDARTWTRPAPLLRNLRDVLAASGDGGDAVAADLAARLHPFVDGSFADLFDGPTTATPDGHLVVFSLRDLPDELRGIGTLLVLDTVWRRVSNPAHRRPRLVVVDEAWLLMQQPEGAKFLFRMAKAARKHWAGLTVATQDTADVLSSDLGKAIVSNAATQVLLSQAPQAIDEIAETFDLSAGERQFLLSADRGQGLLSSGTQRVAFQSLASPTENFLVTTDPAELARLAGQDPDATNHGLADAYIDLGPADAEPDGEGCDDFGQVDLDPV

SEQ ID NO: 1519 - protein, 647 aa, synthetic construct; identical to SEQ ID NO: 1518
  REGION 1..647: note = TnsF-Tn7 System Protein

SEQ ID NO: 1520 - protein, 823 aa, synthetic construct
  REGION 1..823: note = TnsF-Tn7 System Protein
MAARRAVSPVMQSWVGDYLRDPGGTGLTLLATLCDWAVIWGPVAVPTMAVVLAAGAVVRRWWRARRHAVLQVDARRITVLAPPTVDPAGAAAVWSNLVGLLRPAWRRWWAGQPHLAMEYVFGEHGVTVQFWVPGPIPPSLVERAIEAAWPGSHTRTTFDADPIRGLLGAPVGLGRDEHACVQILARPVTGRRVAQARRAARRVHRGSSGRLAGRVLDAITPGANVTRSGRSTDSRRISQDPQLSLEYSAQNKAIVGKQRGSQYETVVRYAVTTDLPAEATDELTRQARDTARGRAHALAAAFAAYTDHNHYTRTRLRHPAHTLADRRLNRGDLLSVPELAVIAHLPTDAEIPGVERAGAKAVAPPPGVATPGPEVKPLGQADTGHARPVGLRVADARHHLHVLGATGSGKSTLLGSMILDDAENHRGIVVIDPKGDLVTDVLNRLPRSAAERVVLFDADSRHRPPILNPLEGGDTDREVDNLVSVFRRVYSAFWGPRTDDLMRAACLTLRAQEGVPTLADLPKLLASEAFRSRITAGLTDPVLTGFWQWYDDLTDSTRSQVISPLMNKLRAFLLRPFVKEAIAGGRSTVDMTQVLDEGGICLVRIPKGSLGEETTRLVGSLVVARTWQATTARARVPQRLRPDASLVVDECHNFLNLPYPLEDMLAEARGFRVSMTLAHQHLGQLTRELKEGISTNARSKIFFSASPEDARELARHTAPRLSDHDLSHLGVYHTATRLVVHGEETEPFTMTTTPLARPAPGRAREIRSVLRGQRRAHATSSTDTATRVSTPTTASATRTRPGPTGRRVPPTRPPTTDPRRTRP

SEQ ID NO: 1521 - protein, 823 aa, synthetic construct; identical to SEQ ID NO: 1520
  REGION 1..823: note = TnsF-Tn7 System Protein

SEQ ID NO: 1522 - protein, 372 aa, synthetic construct
  REGION 1..372: note = TnsF-Tn7 System Protein
MARRVDLEGAAHLVLTDAVVPLHPAETVFDAMLVGWRRQQRSRLLSPGTVENRESIVRRFAAFTNAFPWQWSPSDVEDWTSELLSGPRPLVHSTIRNYQVQLALFCDYLVDARYGWVEECEQRFGTHPVQICHEFNVARHTALYEGRPEVRALSRQELQNFFDFADDRVVHARKQGRKGWLTAFRDATIFKVAYGWGLRRRETAMLDVVDFGRNPNAPEFGGYGACYVRYGKALKGSPPRRRTVWTVWPWTADAVAEYVEEVRPQFGVGKRLLLWPTERGARIAPRDITRRFAAYRDELGLDEALHPHCLRHSHITHCIEDGADPFFVQSQAGHSWGSTTSLYTNVGSDFMNKALHDVLAPKLDATTGGSTG

SEQ ID NO: 1523 - protein, 115 aa, synthetic construct
  REGION 1..115: note = TnsF-Tn7 System Protein
MTRAVGYHWHLRELMAKAGMFSTTALQPHLAERGIELSVSQVHRLVTGTPERLSLPVLAALCDILDCQPGDLIEPYVAARSATARKAAGQRANPSSPRDRNLRPTRARIVDWDQK

SEQ ID NO: 1524 - protein, 566 aa, synthetic construct
  REGION 1..566: note = TnsF-Tn7 System Protein
MFVGDDGPLCVNCYRRDHRPRARCGRCNRVRIVSRRGKNGEPDLCESCNPATRATATCSQCGRDRSGHRDATGEWICRSCARVPRACSRCGRSRPVHAHLPLGPVCNTCHIKLHDHPEHCASCHELRVLIGRDDHGPLCGPCAGSTLDPRCRTCKRPGRHYSDEKCARCELHERVDDLLAGPNGTPNPQLQPVRELLLAADRPNGQIAWLMRSDAAQLLRDLARREDVVTHNYLDTLPQNRAETFLRALLVDAGVLPARNEELERIRPWLETFLADQPDHARLIRPFVHWFVLRRARRAAARRRYQARAGHHLRAKVRVAHEFLAWLDTLQLDLAELDQATIDRWLTQGTSQAREIRSFLAWARSHRLTKELRVPFPPRQQPEAMLEEGERWRLLERCFNDTTPPLDTRAAGALILLYGLPLIRIRSLTADHLEHHSDERTHLIVGAHRLLLPPKLADMLSRLAEAGSGRSRYPTRPGARRWLFPGLVPGAPLSAEGFNVKLARFGLHTRPARNAALISLAAQLPSAVLADLVGLHHNTAARWSQLAARDWHDFVAARPMLTAGSE

SEQ ID NO: 1525 - protein, 566 aa, synthetic construct; identical to SEQ ID NO: 1524
  REGION 1..566: note = TnsF-Tn7 System Protein

SEQ ID NO: 1526 - protein, 314 aa, synthetic construct
  REGION 1..314: note = TnsF-Tn7 System Protein
MPFPDGPTPDDQPAPAARVRGLRKTFGRVVAVDGVDLDLPSGAIVGMLGPNGSGKTTLIRMLLGLTRPTAGHVELLGRTGDDLPAALPDVGALVEGPGFHPFLSGRDNLRRAAATEPRLAGDLGAPVDAALERVGLTEAARRRYRGYSLGMKQRLGLAAALLVPRRLVVLDEPTNGLDPAGTRDVRRVIAELHDAGTTVLLSSHLLAEVEAVCTHVAVLQRGSLLVSGELSGLLDAGAGELVVTTDDPDAALDALRAAGAGPYLRDGGVVVPSGPLEPPDVVSALVHWGVGVWEVHRRRAHLEELFARLTEEDA

SEQ ID NO: 1527 - protein, 314 aa, synthetic construct; identical to SEQ ID NO: 1526
  REGION 1..314: note = TnsF-Tn7 System Protein

SEQ ID NO: 1528 - protein, 369 aa, synthetic construct
  REGION 1..369: note = TnsF-Tn7 System Protein
MDHGPALPGAASLVLVSGVLHLDPAPAVFEAMLDGWSRQQRSRFLRADATIKPRLEVVRRFARFSNQYPWQWTPGELEAFMSSMSVAVSTARSYQNALRLFCDYITDARYGWPSECLERFGASPQQVLHEWNSVLHNVEFEGRTSRRPLSYDEVQALFDAADGRVEEIRERRRKGAAAAQRDAVLLKTVYAFGLRRQEAQGLDLVDLRSNPKAKAFGRIGGLFVRHGKSSRGSTAKRRTVLTVPEFDWIVELVEHYLAEVRPILVPGDHPAFWVTERRGRMSLRSINDAFEHARAAAGIDPELDLHSLRHSYVTHLVEFDYPERFVQEQVGHSYASTTAIYTGVSDDYRNRLLQRSLTAPGFDLWEPVS

SEQ ID NO: 1529 - protein, 104 aa, synthetic construct
  REGION 1..104: note = TnsF-Tn7 System Protein
MGFEWHLRRRMAERDLYQTSDLVPLLAERGIELSREQVYRLVTQPPQRLSMDTFAALCDILACNPNDLIEITTVNTTVRKTGTGSTPRRAPEVRRTTIRRPDQS

SEQ ID NO: 1530 - protein, 306 aa, synthetic construct
  REGION 1..306: note = TnsF-Tn7 System Protein
MLLASSLAHDWAKSLCIGFANWLWQRHKQAPNLSAKYRTNHLIIQKLDATFVEVADVSSKALLSNFGTATIRRHLLLFQYLQEALGFHISQQDKSDASDAQRIHQNLLDNRNQPWASVLIGYVSWLDDQKVSLRTRRLYLSTAVSFCKAVKIKTAFWDEKNVYKFLRTNPGCEANTSKFVTYCRDVLGWHVAMPRVNHGKSMAKPPRTVSRLKLLLARVKENGIEQTDQNTLRSILAISLGIKSSALKEIDGSSFMRISTSLFLRVGDESVKIPDSLDQISEAYMKSLSHQDPRASSLDEHETSSN

SEQ ID NO: 1531 - protein, 202 aa, synthetic construct
  REGION 1..202: note = TnsF-Tn7 System Protein
MTGRVSTGGGSANFESSLERDWIAVLDFHPAVKSIREQPFSLYYDLDGVKRRYTPDVLAEWSAPRGNVKTMVYEVKPIDELRANWKTYRPRFKAAVRYCRSRGWKFKIVTEREIRTPYLKNVQFLRRYRALDPQKLTGDQLLYTLKALGPTTPQALLAASYLHQETRLKAIPELWRLVACGQIGVLLDEKLTMNSTIWLIGA

SEQ ID NO: 1532 - protein, 644 aa, synthetic construct
  REGION 1..644: note = TnsF-Tn7 System Protein
MPGISKAFFKVEIGQLVTYKEERFKITHLISVESVLALNLRTLESERLYIDEIKLVANDDGLKDTSVVGHNDLTLYSEEEWAQAQRRFLVIKSLLENPIRSRTDAEKIADSSGVHVATLYRWLKNYQEAGHVSALVPSKRGRKYGSKLLAQEQEKIVESVIEDIYLNKQRHKPQDVIEEVNRRCRLAKIAAPHSNTVRHRLKLLDPAATMRLRGFKEAARNKYAPILGQFPGADYPLAVVQIDHTEADIILVDEVHRKPIGRPWMTLAIDVCTRTVAGLYITFEKPSAASVGMCIAQAICPKREYLAELGIEGDWGVWGVMSVIHTDNAKEFRGVVLDRACVEYNIDLQWRPVLLPHYGGHIERLMGTMANEIRKLPGATFSNPTKRKGYDSEKNAAMTLKEFERYLVDFIVNVYHQRVHSQLGMSPRRKWELGVMGDEHMTGTGIMPIPEDPLRVRLDFMPFFERTVQQYGIKIDCITYYDHILDPYINSIDPENKREKKTFVVRRDPRDISKIYFFDPADNRYVVIPYRNIGQPAMSVWELKEVQQLLKNQGREDVDENMIFDALGRMRSRIEEAKHKTKAARRQATRNPSMNGANPNTVKSNANLTLKSSTFPLIESASVANEDDPFAQDIEPFDEISLRR

SEQ ID NO: 1533 - protein, 216 aa, synthetic construct
  REGION 1..216: note = TnsF-Tn7 System Protein
MLEFDRRCLESLREPLETGRVNISRSGHQASFPAKFLWVCAHNPCPCGWLGHPAKECRCTPEQVRKYQNKLSGPLADRLDISVEVQAIDHGALLQGETEPTELGGSAGLRKRVEEARTVQLERQGCLNGEMSAGQINKHCKPASGAEKLLLAYAQKNHLSARALHRICRVARTLADLDQASQIEKKHIATAIQYRKTLGGEAGSQSPVAQQPTYNP

SEQ ID NO: 1534 - protein, 295 aa, synthetic construct
  REGION 1..295: note = TnsF-Tn7 System Protein
MTKFAHLNEEVADVLTLPTPERIEFCQSDRWVGYTRATRILEQLDQLLIYPKTLRMPNLLVVGRSGNGKSSILERFACRHPIQITAAGAPIAPLLHIEMPDTPDESELWSTILWALGISHREKDPASLKKRQVKSALQYASVRLLVIDEFNNLSNAGKKAADLLAAIKGLSNDLKISIVAAGTQAAINALNSDPQMKSRFEPAPLDRWRLDAEYLRFLASYERLLPLAEPSGLATREIAPIIYGMCGETIGSTVKLLKAAACFAINNGVEKIDARVLKNLPWTKPGEWDEVARRL

SEQ ID NO: 1535 - protein, 295 aa, synthetic construct; identical to SEQ ID NO: 1534
  REGION 1..295: note = TnsF-Tn7 System Protein

SEQ ID NO: 1536 - protein, 488 aa, synthetic construct
  REGION 1..488: note = TnsF-Tn7 System Protein
MTESRFRECVRCGLVGTTMMLPTGPICYRCRRNIAYHPAVCPECFELRPIAYPSMSSYGVLVCAGCAGEVSVFACAQCGSEAHPYGAIRCARCILAERLTALLTDPATGAVHIGLRPLYDELAAAARPQSVLTWLKKPPATGARLLGLMARGELPISHDTFRELPADRSHNYLRDLLAATGVLPLYQAPIEQMERWLDIALAPLAADDSGLIGRYARWHLLRHLRQVAERGNLTKTALYGARSNVNAATRLARWATNHHATIASLTQPQLESYLAERPGARNSLQGFVAWLGRTRANPRISILTRKSTLPEVIVADADRWEQIDQLLHDEQIALYARIGGLFTLLFAQPLQTIVAMRANQITIKEDGRVLVTFDTIPIEMPPGLDELIRRYLRNPAPARSPTETTAGCSPAGTPAVTWSERTSAPSSSPTASAPAAPATPRPSHSPPASPLLSSPSSSASPTEPRHAGPPSPPVTGAATSATAPADPT

SEQ ID NO: 1537 - protein, 488 aa, synthetic construct; identical to SEQ ID NO: 1536
  REGION 1..488: note = TnsF-Tn7 System Protein

SEQ ID NO: 1538 - protein, 1177 aa, synthetic construct
  REGION 1..1177: note = TnsF-Tn7 System Protein
MRVMSAGDGYKYLLRSVAAVDGDRSLSTPLTRYYAEAGTPPGQWLGSGVAALGQGQLAVGDRVSEAQLQLLMGMGRDPITGDPLGLAFPSYKYVAERIDARIADLDASLSPGAKGEAVARIEVEETERATRRAVAGFDFTFSIPKSASALWAVADAGTQALIGEAHHAAVAEVVAFMEREVAATRTGATAGDGAVAQVDVTGLVATAFDHFDSRAGDPHLHTHVVISNKVPTALDGKWRSLDGRPMHAAVVALSELHEAVFADHMTRTFGVEWEARDMGRDRNPAWAISTVPEELVAEFSTRARHIDTETDRLIANYVSKHGRRPSPATIMKLRAQATLSTRPEKEVRSLADLTADWRTRATGVLGRDATTWAREVTENGKPLLLRADDVPLDAIGELGQTVVEVVGEKRSTWRRWNLMAEASRQTMGWRFATIQDREAVVGMIADAAEQASLRLTPPDLATSPVAFRRVDGTSVFRPKHSTVFSSELLLDAEDRLLDRSRTMTAPTVPVAAVEKTTARPDAEGRMLGEDQADALMKIAISGRVVDVLVGPAGAGKTTAMSALRQAWEKEHGAGSVVGLAPSAVAAQVLADDLRIATENTAKWWQNHLVHGEDFRAGQLVIIDEASLAGTLSLDRITHLAERAGAKVLLVGDYAQLQSVDAGGAFGLLVGDRDDAPELVDVHRFANAWEKTASLALRHGRTQVIDTYLDHDRVHDGDAEAMTDAAYIAWRADRERGLVSVLVAETRDHVTTLNQRARADLILEGTLKPGREVELNDGTISGVGDTIITRRNDRRLRNGTTWVRNGDTWTITDVRDDGSVTIRKTGRRFGGSIVLPASYVTDHVDLGYAITAHRAQGVTVDTAHVLVEPTTTRENLYVAMTRGKHSNRAYVILDRADEHAHPHPADDPDATGRSVLYGVLHHVGAELSAHETVTAEHEQWGTIAQLAAEYETIAGAAQHDRWVTLVRAAGLTSEQAEAVVESETFGALTAELRRAEANHHDLDRLFPRLVAARDLADADDLASVLHHRLARATTRPAGSGRARKSPRLIAGLIPPAQGKMSDDMRHALDERRDLIEHRADTVLDTALDQGAAWITPLGTPPRTAAQRRAWRRQARTVAAYRDRYGITDDTPLGALPASTAQKIDAARAKIALDHASRIINSAHEPTTRRTQERDPLSL

SEQ ID NO: 1539 - protein, 1177 aa, synthetic construct; identical to SEQ ID NO: 1538
  REGION 1..1177: note = TnsF-Tn7 System Protein

SEQ ID NO: 1540 - protein, 318 aa, synthetic construct
  REGION 1..318: note = TnsF-Tn7 System Protein
MARADLLLDLVEAERRGDRDRFRVLVEAVIAEERANQHHLVADRLSELITTTGQSAPRDDRAAAMRDLVQEIVPHRRLDELELAPVPHRVVTELIEEQKRAELLRSYGIEPRNRLLLSGPPGNGKTSVAEAIASELMLPFYVIRYEGVVSSFLGETAARLDNAFEFARTRRCVLFFDELDTIAKERSDEHETGEIKRVVSTLLLQIDQLPPHVLLVGATNHSELLDRAAWRRFQIRAELEPPSRAQATRFLERLAARLGGDLGFAPRTLADKLAGASFSELEEFALDVRRRAVLDLPDSNLRRIVQERLEHRRDQAAG

SEQ ID NO: 1541 - protein, 318 aa, synthetic construct; identical to SEQ ID NO: 1540
  REGION 1..318: note = TnsF-Tn7 System Protein

SEQ ID NO: 1542 - protein, 145 aa, synthetic construct
  REGION 1..145: note = TnsF-Tn7 System Protein
MARILVTGMSGAGKSTLLEELARRGRLTVDTDYDGWELPGAVWDEPRMSALLDRHDDVVVSGTVENQGRFYDRFEHVVLLSAPVEVLIERAATRTNNPYGRSTDQQAEIRQYVVDVEPLLRRGATVELDGRLPVRELADAIEALR

SEQ ID NO: 1543 - protein, 145 aa, synthetic construct; identical to SEQ ID NO: 1542
  REGION 1..145: note = TnsF-Tn7 System Protein

SEQ ID NO: 1544 - protein, 369 aa, synthetic construct
  REGION 1..369: note = TnsF-Tn7 System Protein
MSIEVPGSAHLVLASGVVHLDEQAAVFEAMLVGWERQQKSRLLSDATIEPRIALLRRFTEFAGSFPWQWNAGDVEDFTVSLMSGGARLAPSTIRSYHLTLRMFCDYLLDGRYGWTTECEQRFRAIPSQVCHDFNTVAHLSEYEGRPGRRPFTYDELQHLFDFLDTRVERVQRSRRKGAWAALRDAQMVKTCYAYGLRRRELCNLDVADLRPNPHMRQWGSYGAVHVRYGKGVRGGTPRRRTVLTVPELDWAVDGLRQWVEQARPLLEPGARGALWLTERGQRISVKTMDHRFAWLREQAGLDADLSLHCLRHSYVTHLIEFGYPERFVTEQVGHSHASTTAIYTSVSNDFKTKTLKAALARVYEPREER

SEQ ID NO: 1545 - protein, 111 aa, synthetic construct
  REGION 1..111: note = TnsF-Tn7 System Protein
MTRKLTMLWHLRQLMAAKGMFQTTDLMEPLHERGIELSRQMVHRIVTKPPQRINTDLLAALCDILDCTPSDLLELHVDQQRQAPAVGDHGPGIGDIRPIRARVRRPDGIDE

SEQ ID NO: 1546 - protein, 530 aa, synthetic construct
  REGION 1..530: note = TnsF-Tn7 System Protein
MSPFWPPTGRFGRALPAPMSSEFKPRGRPRSNRTSEGCDRCGKTTGKIRVRWPDGRICGICFTNATHRYGRCPLCGADRMLPGRTDTGEDICRECAGITTNLTCDNCGREAERFRGGHCISCVLTTDLTELLRPNDPPDLRLKRLIKILTDSTRPESIYTWLRGHGGRSASLLKRIGDREIELSHQAFDELPKTPAVEHLRAILTHNRILPAQEDRQLAMFEQWLEERLDQLSTTPEIHAPIERFARWHHLKRLRAESSATKNMNYAVRSAKQEITEAGKFLRWLHDEHGRTASSIRQMHLDEYLSEGTSTRRHIRNFIQYLKRETPGKDIQVAARLARTTPVLSQQERLDLVRKLIEADNVAVSIRIAGLIFLLYGIPIGRIAMLTIDDVEVTVKGMFLNLGRYPAPIPELLAPMFWAHLQNRGGQQTVNRDTRWLFPGVRAGSPRSPNTHLLKLRGMGVNIQGIRNATLQSLVKEIDATSLARMLGYSKQTLSRHAGATSAPMASYVVGKNPHFTRERSRDQPAEETQ

SEQ ID NO: 1547 - protein, 409 aa, synthetic construct
  REGION 1..409: note = TnsF-Tn7 System Protein
MSTNWRRIRHPGLAVCIFCILTAKLAVGIGGFLGDKFGGLAFLPLPNREPDRDAFLSEVLTGWKRSHLAQNFTLQTTKRRVASVMRLSDFSGKYPWEWGPVDADELFAHLRGVENLALSTVRAYQTDIKLFCEYATNPEYPWNENCGRLFGTTFSQVITEFNKARHVQDADMGPEKRAFTLEELQAFFDLADLEVERIINSGRKGALAAWRDAVAFKTAYGWGLRRDELRHLSLVDFSRNVKAPYFGDYGILRVRFGKPQKGSPKKQRSVLTLLDWAAEAVDDWVRRGLPRYGQPVGDLFPTDRGGLVPEKNLRARMRGFLDELGFPPGLDLHSLRRSYVTHMQTEHGYDTKFISMQVGHEHTSTTTIYTLPSPDYAARELERVLNSTLLASNSRVLTKPTTPSGKTPR

SEQ ID NO: 1548 - protein, 114 aa, synthetic construct
  REGION 1..114: note = TnsF-Tn7 System Protein
MNRQIDYQFRVKELMARAGMRNSRDLVAPLRERGITLSESQIYRLVGQNPDRISFQVLAALCDIFKVEANEILTYTATDARTQRRRTAVGDGTDVPLLAAYRPVRARITRPHEQ

SEQ ID NO: 1549 - protein, 714 aa, synthetic construct
  REGION 1..714: note = TnsF-Tn7 System Protein
MTAVEPELPVEVITAAVREAAPLKRHVSMLAKHLAEYPDALSGGPTSGMAPLHRLAGLLTDAGAQHIAPRHPVCTRCGQRARKHKRVDGGTCANCRSQEKRPCPACGKVRRPYAFDATGRTLCHMCIRGQRRRAETTELRDRIGDWVLARDPGAERPKIIAVIEDVAPNLEYLRRVTGELDQESELGWPPGATANLIVALVSTGTATGLPALICHECGHQAGPNPHISLNCVTVSPGVVRCDACVRRCPTCGRSSRLPGENMCGRCRNDRTRPRIRGTCAGCGNPDQRLGGAGTCRRCRSLVPKLCEDCQEPARRTRCDGIWVCQHCALQREVDKLLPDGGGPLAALREAILAAKPNTTRIWLAFPHVAERLSALRDRQMDLTHAALDHLPAGRDVEHLRNLLVASGALPDDPFRPINAWVRQLPDTLAGLGPVDSRTVRSWLRWQVLPRLRRRAEAGHYMKSSLGNARQDLREVVDFLASLAASGRALAGCRQEDVDDWFREANAQRHRAHPFLIWARRRRHMPRTLDLPQRYRGIPTTPTDSESRWAVAHRLVDDDSIHPADRVAAALVVLYAQPLTRVTALTLDHVRRDNAVVMLRLGDDELELPEPFASLIIQLPCPRSDGPSRQFPTRWLFPGTHPSRPLGPIPLANRLLALGIQPRPMRASALRQLTSEMPPAIVASVLGLRPGTAVRWAAASGGNWAKYVHDRQSRP

SEQ ID NO: 1550 - protein, 714 aa, synthetic construct; identical to SEQ ID NO: 1549
  REGION 1..714: note = TnsF-Tn7 System Protein

SEQ ID NO: 1551 - protein, 377 aa, synthetic construct
  REGION 1..377: note = TnsF-Tn7 System Protein
MGSEGRGQLHAVAGAAESMLASGVALLQPEETVLKAMLAGWAVQQASRLLTPGTVEQRQQNVRRFVAFTNEYPWKWAPGDVEEWTASLVDRGLAHSTIRHYQEQVALFLEYLTDIRYGWDMLCEKHFGTHPVQVFHEWNTAVHRAEVEARPGNRPMSRDELQDFFDYCDERVTVVRRSRRKGWLAAYRDSAMFKTIYAWGLRRRETAMLETVDWSGNSATPEFGRYAALSVRYGKAKRGSPPKRRSVLSTMGWAVEAVTEWVEDIRPMYAIAGTTMWPTERGGRISNDYLNTRFAACRDAIGLPSELGPHCLRHSYISHLLEDGYDHLFVQQQVGHAWGATTAIYTSVGSDYKNKVLRRALDRAFAPHAQVGDPNGE

SEQ ID NO: 1552 - protein, 115 aa, synthetic construct
  REGION 1..115: note = TnsF-Tn7 System Protein
MASNSGKLGYRWNLRTLMAGKDMFATTDLVPLLADRGVVLSAAQVYRLVTQTPERLSLPILVALCDILDCTPNDLIEPVAEARRPKATGTGGAIAKADSVVADRKPRRAEIRRQP

SEQ ID NO: 1553 - protein, 442 aa, synthetic construct
  REGION 1..442: note = TnsF-Tn7 System Protein
MRTTGTCACGHEGVLPGIVDGRPACRACSGVRVNIDCQHCGAETELYRNQMCLRCVLADLVDAAFADPRTGKVSAQLRPVTDAIKSMERANSGLTWIRQKHVLAMLRKIAATSPVTHASMDRLDRGRTRDYIRGLLVEHGVLEPRDELIARFTEWADDAEDRLTDTEHRAIIHRYLRWKHLRHMRAESPISNGTFLRAKQVTTVAIEFCNWLTDNSKTLPSATQGDLDTWLAEGATTRLMVAWFLTWTRTARITDPALTVPRHRRGTAARLPHDDQAEALDHVLTSSDWSARNQLAALLVLVFAQPIARIVQLRWDDVTIAPDSVTVNVSGMPILFDHPLDAPVRDLAANPGQANTAAHRDSPWIFRGAMPGNHITAMHLRQQLRPLFSSLAARLGTLTELSRQNPVAILAETLGYTAATLEKHAAVSGADYGKYVSDIAQA

SEQ ID NO: 1554 - protein, 442 aa, synthetic construct; identical to SEQ ID NO: 1553
  REGION 1..442: note = TnsF-Tn7 System Protein

SEQ ID NO: 1555 - protein, 375 aa, synthetic construct
  REGION 1..375: note = TnsF-Tn7 System Protein
MLETPGSVPMRLTGAANVPLLRAELQVFEAMLAGWRNQMLARGLTVATIKSRNRVVERFQEFTNDFPWSWQASDLDEYFAERRSGGRTLALTTLRAESNAIAMFCSFICDGRYGWATLCEQRFGDLPSQIVFEWNTPRHKTDDAVGPGRRAFVIDELQRFFDTVDDFVDAHHHARSKTWLTAMRDSMAFKVCYAYGLRRRELVMLDVTDFGPNPHVPDYGRFGAITVRWAKGMAGTGPRRRTVLTTPQFDWVTSVLQTWHSPGGRDQFATAARSDALWPSERGDRITMSGLGRSFARFRDLAGLPEELSLHALRHSYVTHLIEAGYDPLFVQQQVGHSYSSTTALYTSVSSDYKQKVVQRMIAQRMRTRTGEPDE

SEQ ID NO: 1556 - protein, 119 aa, synthetic construct
  REGION 1..119: note = TnsF-Tn7 System Protein
MNEIKRLGYTWHLRQIMAQHNLWKSTELRPLLRDRGINLSDTQIYRLVTGTPERISLSVLVALCDIFDCSPADLIETKVELRAAKTANAPRLPLDGDTTAPVAHRIRLVKGDDGPPAQA

SEQ ID NO: 1557 - protein, 489 aa, synthetic construct
  REGION 1..489: note = TnsF-Tn7 System Protein
MRCGRDHSAYRCWPEGRLCRTCALAALRIHGPCPGCGEQRILPGRGADGSPICPACAGIIHSVFRCRRCQTEGRLYHRKLCIRCTVTDRVAALLDNGTGHIDPALVPLAAALSTGPTPTPGGRLVWLTKPHNRDLLRALATGDLPLTHPDLNTYPDQAGVPYLRALLVHCGALPEIDKQLLDYEAWLTRRLTGLAAHPHERLLRQFGLWHQLPRMRTKAALQPITPPARTYARLEFVQATMFCNWLADTGRHPGELGQVDLDRYYTALKIGRRQSLRGFLNWAMTSRNLPTLTFARTRFTTGEALTQTQRLDLLRRSVTDHGADSADSAGDGGDSGNGPLRMRVAACVLLLYAQPVTRIRTITIDDIVTDDDGAMTLRLGDPPAPVPEPFATLVRRLLAQRPAGSTNPWLFPGRHAGQPLNYTSLSLGLRNLGIPMRRARVGAIRQLALQAPAPVIADALGFHNTTTQRQTINAGGIWNRYAAPTRAGT

SEQ ID NO: 1558 - protein, 489 aa, synthetic construct; identical to SEQ ID NO: 1557
  REGION 1..489: note = TnsF-Tn7 System Protein

SEQ ID NO: 1559 - protein, 799 aa, synthetic construct
  REGION 1..799: note = TnsF-Tn7 System Protein
MSSHESPTTVLDWQQLRVEVVNRLAAASAKGKAHWQRLLDLVDQRLAADPSVQAPPVDGRQWWLTEVRIEGFRGIPDSFELTLDPGAGLTVVHAPNGTGKSTIADAVRAALWGAPAPQPRELWQPVDRAVGAARARVEVRLRCGRDELRCVWTDDPQPHAVAVLASHDNEHPVTVADPDWQAALSAFTPVFSYAETQDRLGTPEALVKHLDDLLALGPCFVQLSEDVASRAAAAKESVARLQALKGSARTAIATVDAQFTDGAAPPMAVIEFPNRFGSEGPDNWLSENKLDGDLTTTVFSVTTEGLAKVKRQAEQVRDALGQLDDSETRLDSRIDDRLNEHLTELHDALTGNPPGGPCPVCGHGVDWWLVLSDTARRLSEWSTARRQVDKSARGLQEVHREHVRPLLEAARSLAIDPDGLADTLTDPPPDHGRTATDRARLGDVVDRLLGSSFSVLAHEVQTRGDHDRRWRAARLAAVDPFAQAWRDDGPVAVTANDWTQASKNLTVLRKELRDSRGTRLGEEVAEVLHRLLADTPLQLAGLTFAAADTLQLVGDDGGERRLGMLSAGQRNALVLAPLLRARSGGPFAFLVVDDPVHAFDDMRIDLVSDELVRLSADRRVVVLTHDSRLNEALVAKRPDTDVRTLTRDGGSVTADARKAPWVSLLDDAQDLVALGAKADLPAGLGRLPVLVRGMCRHAVEGALRGLALRWAVLAQEDLHATVIALDKTKTTAKRFTHASRYELPDRPGAAPAARAVCESYLRLWNEATHDTGGSSAGGLADEVRAARKACKLLGAWGEP

SEQ ID NO: 1560 - protein, 799 aa, synthetic construct; identical to SEQ ID NO: 1559
  REGION 1..799: note = TnsF-Tn7 System Protein

SEQ ID NO: 1561 - protein, 323 aa, synthetic construct
  REGION 1..323: note = TnsF-Tn7 System Protein
MLMLSDREEISRGLAEGLQFTEIGLRLGRDASVISREVARHGGRGGYRAVVADTTACAARERPKRFAVERSPRLRAVVCQQLRDGWSPASIAGRLPVEYASDQACRVSHEAIYQWVYAQPVSTLASELISLRTGRKARKGGRRPEPAPRIREPVYIDDRPAEVEGRQVPGHWEGDLVIGKGGKTAVATLVERTSRFLILVPLTGRDSLTVGDAVIAATHGLPDQIRRSLTWDCGSEMARHATITATGLPVYFAHPHSPWERGSNENLNRIVREYFPKGVTITSDPTYLAMVASDINDRPRKIHNWKKPSELFTELVEANASTG

SEQ ID NO: 1562 - protein, 391 aa, synthetic construct
  REGION 1..391: note = TnsF-Tn7 System Protein
MGIGAQVPGAARLHLADGIPLLRPEEQVFTAMLEGWRNQQLARNLAVATIAARERAARAFAVHADAFPWLWSAALLDEWLGDLRAVRGLRRSTLRGYQESIRLLCLYLTDPAYGWPGECETRFGTHPVQVVHEWNTAVHVQQAEGDPIKRAFTIDELQAFFDHADGQVARIRGAGRKGWLPAFRDATLFKIAYGYGLRRNETRMLDVADFGTNPHAPEFGERGVCYVRHGKAMKGSAPKRRSVLTVWPWVTEALAEWTTEIRPLLAASSVPPSTAMWPSERAPRVGLTQIDARFAALRTTLGLGRGLDFHSLRRSYVTHLIEAGWDPLFVQHQVGHEHASTTAIYTCVSSDFRTRTLRRALDATLAQAATGATATTATAVALGPRPDRSSR

SEQ ID NO: 1563 - protein, 113 aa, synthetic construct
  REGION 1..113: note = TnsF-Tn7 System Protein
MNRRRQVSYQWRLREIMATRGLFTTTHLAPLLAERGITLSASQIHRLVTGTPERLSLPVLAALCDLLEVTPADLIATRAENTTTRKTAGATGPTAVAGPSELRPTRARLRPEP

SEQ ID NO: 1564 - protein, 296 aa, synthetic construct
  REGION 1..296: note = TnsF-Tn7 System Protein
MAWSVSSIRRSRDRRLITTCARWDRIARIRRRARGKPISAYASDIAQARIAKAIAFLNWIKGHGETLATCRQPLVDLRLTSENHQGPYDAGPFVRWAVRSKCASGIGIPARPRRVFHRPLDADGRWATARRLLSDDSIETKDRVAGLMVLLHGQYLARACRPTTAHVIHDENGVALRLNRTPLRPPPPLDGLVLQLVDIANNHQHTVMSNDLNAPWLFPTQRPGTPLGSKQLSRRLRKIGLPTEAGPCAALLDLCTQMPPVVLQRLLGISPTAAERWAAGAVRTAYAAEVARRSDG

SEQ ID NO: 1565 - protein, 230 aa, synthetic construct
  REGION 1..230: note = TnsF-Tn7 System Protein
MPAGLEPLPDYLADRGQPQSTLRWLSKPTTSALLGSLALIDEPLSHSALDQCPPSWGRHHLREVLIDAELLPARDEPIERLGTWITETAAALPAHQSALIGPYGHWAILRRARRRSRRRRFTHAAADAARNRIRTAITLLDHLDENEWTISDLTQSKLDAWTDGQRRRTNNIAGFIGWLTQRGLAQNLSITRYTYPPPSQTGDEHDHHRTIAALLSGDTPADLLPASPDC

SEQ ID NO: 1566 - protein, 108 aa, synthetic construct
  REGION 1..108: note = TnsF-Tn7 System Protein
MKQIDYLWHLRTKMAEQGMFSTTDLQPHLSDRGITLSREQVYRLVTGQPQRLSMHTLVALCDILECTPNDLIEPRIVDTSAKKAAGRDAGATPIAARRTTIRRPRTES

SEQ ID NO: 1567 - protein, 188 aa, synthetic construct
  REGION 1..188: note = TnsF-Tn7 System Protein
MLLTDPGTGDIAAPLQPLFDTLMASERPQTTICWLRRPPGIGPRLLRAMVLGKMEISHAAFEALLSDRAHNYLRDLLAAVGVLPPYEPAIARMTPWLDSKLTALPAEEARLVNRFARWRVLRRLRGHAERGELTKAMIDRGRAEITEAIRFLNWARHHGETIDTVSQGMLDRYFHTHPSKIDTLCARS

SEQ ID NO: 1568 - protein, 188 aa, synthetic construct; identical to SEQ ID NO: 1567
  REGION 1..188: note = TnsF-Tn7 System Protein

SEQ ID NO: 1569 - protein, 112 aa, synthetic construct
  REGION 1..112: note = TnsF-Tn7 System Protein
MSRTVSMKWNVRQVMAARGIFQTSELVPLLEERGIHLTRQYVHRVVTSAPQRINTDLLAALCDILECTAADLLQLEVVETQAAPPKSIGEKGSGIGDLRPIRARIRTPGDLT

SEQ ID NO: 1570 - protein, 467 aa, synthetic construct
  REGION 1..467: note = TnsF-Tn7 System Protein
MIAGRCRICTTAEVRGMTVCDRCRKRATQHRGTCAGCRKPDKLLDDADTCRWCRQKARRTCTCCDATGSALTGAEGDTLCHRCTLTRRLDAIIPPHADGPLAPLRQPLLHAEPVTTRRWLIRTTPLLLSIQDGSTALTHTSFDTLPHPKSVEHLRSLLVATGILGPDLDRSLRRLEAQLPQLLSSLTPNHRALLTRWTQWAVLPRLRAATEKREGHVGAQNARSQIRQSALFLDLLQQRSTELGECTQHDIDTWFSAPGAAHWRVRSFLTWARRNRHLPRTLTLPSSYRGRAEVPTDDDERWQICRRLVHDESLDPADRLAGALIALFAQPLTRIAGLTTAHVTETDAGVELRLGSADTLLLPDPFAQIALQLPRPRRAGTAEQIPQTWLFPGHRADIPLTATALGNRLRRIGISPQALRLSAIAHLTRELPPSALAAMLGLNAHTVAQHTLRASGQWANYAADRHS

SEQ ID NO: 1571 - protein, 467 aa, synthetic construct; identical to SEQ ID NO: 1570
  REGION 1..467: note = TnsF-Tn7 System Protein

SEQ ID NO: 1572 - protein, 115 aa, synthetic construct
  REGION 1..115: note = TnsF-Tn7 System Protein
MPHPQLNYQWHLRRLLADQGIFATTGLGPLLAERGITLSEAQVYRLVTGTPERLSLRTLMALCDILTCTPNDLIEPIAEPATGTATGTSTHRPDTAAATTRAKTRTPRRADIRRQ

SEQ ID NO: 1573 - protein, 255 aa, synthetic construct
  REGION 1..255: note = TnsF-Tn7 System Protein
MQGQEQAAKNCVYCGFERDDMKPAWTGILACAACRIILLLVKFGLRCALCGKTPEKNSKFQNRLCEDCELIGVSARCFRCGLCRPIARKTKLGSVCIVCERSRHECAKCRKFLRGRSYKTGIWLCNYCNSSDAECSKCLEVKPIKKYCENGLTICRHCAAKEYVPPKHVCGKCGKVAPWAKRNADQTGLCSTCYERPVHKCVVCKTEKQVRKWTKKGTVCATCYGRERERERAVLGKKSVRVCKKTKISSVLPTI

SEQ ID NO: 1574 - protein, 792 aa, synthetic construct
  REGION 1..792: note = TnsF-Tn7 System Protein
MPAEAAAARLLEALNANPALPLSGAASMPPALQRIIARLRSEVDTRLQLPRCDGCNRETSSLLRRVYRSRLCLTCSRRAVRKMRRCARCAKNVLHVRVGGDHEYCPPCWRLLLATRLDDLESAIRILAASVTPPSVKIALEAGARTPTDQLKLVLDVVGHGVDLFADPAVGSAAFARFYRSLHASHADLPPLLCGRCGRDRPLVMVFDDRRVCLDCYKAARHRPCAECGQVREIVQRLPDGSGICQTCRKRLPDASGTCITCGNHRPIGIRTLNGPICPSCRLNSALDHCRKCGQRGPCRFAGSDRAVCESCRRARVTCSRCGNTRLVSTRDAAGAPICHSCTDRPPETCVECGAVARVVTRFGGAAVCGTCYRNHPASFRDCPRCGSHRRVRRSGLCDHCTIIELCDDLFPAAILDANPAARALRDALISHSAHRTVAAFLRPKSILHLRTLLQDPEPITHEAIDRLGSEQATMVLRSALIEYGVLEPIDTHLRRLEQWIRASSPAITDITVRAGYVQYATWKHLRELRAKPGPISSSLACSRRSELKIVLHLLEWAERNNVSLADLDQGHIDVWSMTGAERHRATGFLRWAHRNGFCRPLAVKPRQRSGPLLGGMSDEDRATLLRRVLRNSDIDAGTRLAAALILLYGIRPHRVVRIELSQIDTDGDFAAIRLGSETLHLPEELNLVAEAAATARDAHRLLHSVEDTRWLFPGGRPGYPIASTTLRRRLQKIGFPTSDVRKGALIALAGTVPPVVLADLTGIHVRTAIWWRDAVAASRSRYVAALTDGDR

SEQ ID NO: 1575 - protein, 792 aa, synthetic construct; identical to SEQ ID NO: 1574
  REGION 1..792: note = TnsF-Tn7 System Protein

SEQ ID NO: 1576 - protein, 347 aa, synthetic construct
  REGION 1..347: note = TnsF-Tn7 System Protein
MSVDIVLQQVTRRHPGQSSPAVDDVSLRVEGGTRTALLGPSGSGKSTLLRLIAGLDAPTSGRVLIGGHDMAGVPPEKRGVGMLAQRPLLFPHLSTLDNVAFAMRATGTTRRAARDAARPFLHLVHMDAYAARNPSSLSGGQQQRVAIARTLASRPEVLLLDEPFGALDAALRDDMYALLDALDTHLPPTILLVTHDRDEAAVIADRLAVIEAGAMLQHDTVEHVYQRPASLAVVRLMGGRNTVAGIVADGVHRSDAGAVRVDPITPDGAGLLVIRQEAIRVSQNDESDDSDIRGIVVAVDRRGPRRSATVRCGAAELTGDVPPGLDLRVGDAAAVTITPGAASVVRS

SEQ ID NO: 1577 - protein, 347 aa, synthetic construct; identical to SEQ ID NO: 1576
  REGION 1..347: note = TnsF-Tn7 System Protein

SEQ ID NO: 1578 - protein, 345 aa, synthetic construct
  REGION 1..345: note = TnsF-Tn7 System Protein
MLQGWTAQMVGGRGLLTKSARNALAKVENFQSHSNEWPWKWSAQMFDEWMADLVGRGLAVSTRRGYQQAVRSFCAYLCSPHYGWVAECETRFGEHPSQVCHEDNVLRHLAEFEGKPGRRPLTRDELQRLLDHVDDEVDRRLSRRRKGAIAAYRDATVFKVLYAWGLRANELCHLDLTDFFRNAESPQFGKFGIAQVRMGKASKGGAPKRRTVLTLHQWAVEALEDYLENVRPLMVKQKSPSNAVFLTERGTRLRPRDVSDRFGHYRDELGLDGVLTPHALRHSYVTHLIESGVDPVFVKEQVGHAYQSTTAIYTGVSGDFMNKMMQDAVRRVLPSSRGESSHEGD

SEQ ID NO: 1579 - protein, 117 aa, synthetic construct
  REGION 1..117: note = TnsF-Tn7 System Protein
MKVIEYEWRLREVMAVAGMYKTTALIAALEERGVSMSSSQVYRLVTEVPERLNLRALVALMDILGCGADDLIRPVPLGAVVERTGTDSTKGESAGEVLRGSGARPRRALITPGDTDR

SEQ ID NO: 1580 - protein, 476 aa, synthetic construct
  REGION 1..476: note = TnsF-Tn7 System Protein
MVCSRCRRPIRRTAATWPDGKICNSCYYEATSLYGDCPSCGFHRLLPGRLDIGEQPVCRDCARIPQSFYCPSCNEERRPYRRNLCARCCLRGDLTSAFLRPESPAGLSQLIDALCDADRAESIITWKRSEKVQQLLRALGDGTIPLTHEGLDQFEPRGRHVEHLRAILQHHDVLPARDKYVAFFGKWIDGKLAPVADPEISQPIKQFATWHHLRRINELQLDGRPTRGPVHASKQDITESLKFLQWLKAEHGRTIHNCTQQDVDQWIATGPTTRHTIRTFLVWCKKMRINRSVALGFREAKTVRSLTQDQRLAWIRELLTGDSESLPYRVAGTLLLLYAQPLVRVAALPMSKLVVAPDGLTLSLGVTPSPVPEPFATMLRAHITQRPNLRTSGAENPWLFPGIRPGEHLHPNTIMDRLRYLGLDLLGARNTALRELVCEVPAPVVAEMLGYSDQVVHRHAALASQPWAKYPFSGTG

SEQ ID NO: 1581 - protein, 476 aa, synthetic construct; identical to SEQ ID NO: 1580
  REGION 1..476: note = TnsF-Tn7 System Protein

SEQ ID NO: 1582 - protein, 342 aa, synthetic construct
  REGION 1..342: note = TnsF-Tn7 System Protein
MLQGWRNQQLSRNLQLETIDSRVKQVRRFIEYSNEYPWSWTVGMVDEFFGDLRSIHKLSQSSIRAYQVGLRQFCSYVSNPDYGWDRVCEALFGSHPAQVFFDWNTAKHVQDNEAQPEKRAFTKQELQDFFDHADDQVSAIAASSKKGWLPAYRDAVMFKIAYSYGLRFNELCHLQTVDFARNPHAKEFGKFGLVHVRYGKAKKGSPPKRRSVLTVFDWTPEVLTDWLENGQPHMDDGLDLFPSERGNLVSATTLLRRFRRYCDDLDLSPGLDLHSLRRSYATHLLEAGWDAMFVQNQMGHEHASTTAIYTCVSSDYRTRTLRNALDATIAAALGTAQDGGAG

SEQ ID NO: 1583 - protein, 488 aa, synthetic construct
  REGION 1..488: note = TnsF-Tn7 System Protein
MAGSLIGRNQERRVLSALLQRAREGPAAVILDGDAGIGKTTLCRAAAEAAVDAGFTVLLTSGAQAELSLAWAGLADLIGGIAESVLAGLSPLHQRALQATRAGLELPGANDRLVANAFRTALSRLSARRPVLIVVDDAQWLDEATTRAVGFAVRRLTGPVAVLASYRNTGPGRQDRSWVQPPDPQSVTRLTVGPMSLGELSTMLAVRTGHLPPRSILQRIHAVSGGNPFYALELERFMGDRDEPESLPPTLAGLVRDRIGQLDSATVETLAMVAVAFEPTMETIAAATGRTPAELLDVLEPLETRGVLTFDGTRIRFPHPLIASGIVSDADPALLRRTHRRLADFVAQPEQRARHLALSTPHADPDTLAALDSAAESAAARGAFSTAAELVCLAIRLGGDEHVRRSRGAEYHFRAGALDEAEALLAPIIDDLPAGFPRAVGLLLLGAVRGYEQGIGDTIDLFRRAVREAGGILPLRTQAMGVLSLATG

SEQ ID NO: 1584 - protein, 488 aa, synthetic construct; identical to SEQ ID NO: 1583
  REGION 1..488: note = TnsF-Tn7 System Protein

SEQ ID NO: 1585 - protein, 111 aa, synthetic construct
  REGION 1..111: note = TnsF-Tn7 System Protein
MKRDVDYQWRLAELMASNHMHNSTDLIPRLNERGIMLSRPQVYRLVHQRPERVSLKLIAALCDIFGCGPEDLVTVTAADARKKAASAGRENVVELNKAIRPKRARVISDDD

SEQ ID NO: 1586 - protein, 504 aa, synthetic construct
  REGION 1..504: note = TnsF-Tn7 System Protein
MTTEHPEGLTPRNTVRGRPRTTGAIQCARCGRNTGKTRASWPEGRICGPCFTVATRTHGTCPGCGENRLLPGPRAEEGGPRCAPCAGILHNFRCSRCSHEGEFYRRGTCARCALRDDLTALLLTSPDDPTTANRLVDVLCQADRPESIITWKRSGKVQGLLTAVASGQTPLTHDGLDSHRETAGRAADHLRALLVHHGLLPYQDPYLNRFEAWIDDKLRPLPSEVAKPVEHFAKWHHLRRIRAMATPAKSAQGPVHAAKQEITETIKFLDWLWQTHHRTAATCSQQDVDSWLTTGPTTRKAIRTFFIFAKKTGTNMRVEIGHYSAKGRPAIPQEQRFAWLKELLTGTSESLPYRVAGTLLLLYAQPLVRVAALRTDAININDTGAITIALGTHAVPVPQPFAELLRQHVRNRPNLRTASGADSPWLFPGTRAGHHLHPNTIMLRLRALGIELLGARNTALNDHLALTPPPLVADALGYSYQVAFLHADAAGEPWSRYVDRRTFN

SEQ ID NO: 1587 - protein, 504 aa, synthetic construct; identical to SEQ ID NO: 1586
  REGION 1..504: note = TnsF-Tn7 System Protein

SEQ ID NO: 1588 - protein, 368 aa, synthetic construct
  REGION 1..368: note = TnsF-Tn7 System Protein
MAVDGSGRVHLLGSVQLLHPEQQTFDQMLDGWRNQQLSRHLKFDTIDQRIRYVRRFVDHVNEFPWCWTPAHVEEYFGDLRSIRHLSHSTLRAHQSALRHFTSYVANPDYGWDRVCEQRFGTHPAQVFYEWNTAAHVQEFEGRPSKRPFTREELQKLFDHADDEVELIEASGKKGWQAAYRDAVMLKIAYSYGLRFNELRHLQTVDFATNPHARRFGKFGVCKVRFGKSRKASPPKPRSVLTVFDWTTGVLEDWLANGRGTLHTLDLFPSERGGLIVESTLLRRLRRYLDELGMPSDGLDLHSLRRSYATHLLEAGWDPRFVQYQMGHEYASTTGIYQFVSDDFRSTTLRASLDRTMDQALGKQSGGRR

SEQ ID NO: 1589 - protein, 112 aa, synthetic construct
  REGION 1..112: note = TnsF-Tn7 System Protein
MKRQVEYTWRLSELMAARGLHNTTDLIPLLAERGIILSRPQVYRIVNQKPERVALQVIAAICDIFSCGPEDLITVTAADVRARKTGTANSPNVVDLNRTVRPRRARIIDDDH

SEQ ID NO: 1590 - protein, 425 aa, synthetic construct
  REGION 1..425: note = TnsF-Tn7 System Protein
MTIRLDAVLAGPDGRIHPQLDEFRRTLLDGRTAEHVNRLLNGVKWIHLLDQLTTSGTPVTHTDLDALSPTAHVHHLRSVLVYTGALDNREVDLVATQVWVDTLLADLPADVAALLRPYARWSVLRRARHRASRFRLTPSVPQYARNRILMAAHFLTWLADHDRTLADTTQTDIDRWLDAGTLSRRRLRDFIRWTNSRRLTDNLHVPWLGREGLPEHLLDEHERWTLLRRCLTDETLELRLRVAGALVLLYGQLPTRIVELTSAHLEHTTAGTRLVLDTQPVLIPPVLAKLIAQLSENRPDRPPLPSATATPDWLFPGRLPGAHLTGGRLATLLNNRPGIPIRAARGAALSALAADLPAPVLAELLGISIAAATRWTTLAARDNAEYLTARTSHPPHLAPSRNRDQQTAFVSDDTPTITGNSTDDT

SEQ ID NO: 1591 - protein, 425 aa, synthetic construct; identical to SEQ ID NO: 1590
  REGION 1..425: note = TnsF-Tn7 System Protein

SEQ ID NO: 1592 - protein, 1975 aa, synthetic construct
  REGION 1..1975: note = TnsF-Tn7 System Protein
MSAKKLTAGDGYEYLTRQVAAADSTELGRSTLSDYYSAKGESPGRWMGSGLESLIGVETGETVSAEQMRALFGEGRHPNATEIEKRLVAEGIARGLDKEAATRQALVETKLGNPFRIYAGETEFRQLVAERFADYNLARGESANARIDDTMRAEIRTQVGQELFAKEYGRSPANEAELSGFIAKGSRQKTTAVAGYDLTFTPVKSVSTLWAVAPREVSEKIEDAHHAAVQKAIAFVEKNATYTRLGTDGVQQVDVDGLLCAAFTHRDSRAGDPNLHTHVAISNKVHATDSGRWLALDGRPLHKLFVAASEVYNTELESEMRTRVGVQFAERGQAENGKRPIREIVGVDSQLNEVWSSRRAMIEARRGELAAQFQREHGREPTPIEAIALAQQANLDTREAKHEPKSHAEQREEWRATALQVLGGEQGLSDMVRTSTHPSRSAPRTAVTERWIQQAAEQIIDTVSEHQSRWQEAHLIAEAQRVVRAANLPADRIQPVVDRLVSATKSPEMSVALGREDDLNEPDVLRRRDGSSVYSTAGTQLYTSESVLAAEQRIVDAALRTDGRRTSEMDVDLALLEQAANDFELNAGQTALVREMATSGARVQLALAPAGTGKTSAMAAYARAWENSGGNVIGLAPTAAAAAALRKDLGATTDTMGKLIHTLKEQPFRKPEWFDQIGPDTVVVVDEAGMASTADLDRVIEFVLERGGSVRLVGDDQQLASVSAGGVLRDVASSAGAVTLTEVVRFKDPAEGVASIALREGDPAAIGFYVDQSRVHVADKVAAEELAYRAWQSDRAEGLDAVMLAPTRDMVRGLNERARTDRLALNGGVAGLETTLSDGLTCSAGDIISTRLNNRRLALTRTDFVRNGDRWTVDEVHQDGSLTVTHIGTARSIQLPADYVAENTTLGYARTIHGAQGITADTCHTVATGTENRQLAYVALTRGKRGNDVYFGTANDGDPENVIDRETLLPRTAVDIFTDILARDGAQESATTTARALDDPAQRIAHAAAAYDDAVGTAAEHTIGAEELARIDAAAEDVWEGLTDQAAYPVLRKHLAVIAVGGDDAVEMLRAAAASRELDTAADVAAVLDWRLDPSGEHSAGTGPLPWLPAIPAALAADEKWGAYLRRRADLVSDLADKVAVQTEAFTLDTAPRWARPLLGVDSRLVKDLAVWRAAFAVDEADRRPTGPERYAAAQKRHQHRLDERATEVLGQPSAAASRWRSLGESAEPRLLEDPFWPELADRLALARRSAVDVHALVRRAVADRPLPVEMPAAALWWRLSRELKKTEFAATIDAGYSPAWSADLVELFGRDGADTLTADPAWTKLVAVIDAADTAEWTPQELLALARDLAVDGQGGADLDPAQLATALPWRVEAVLAHSAPVPGEGEIEPVSPEAEEAAAAAAGVWLVEDVPTDAHLTTRPAATERTEPEIVADDEIEYDVSQLTDADATLDPDLPPPPPDYEFDPSTADERGLLTPADAAELDSIDDWAAELLAQARSTAADRYVELPPAERLERLQRDLADARTRLGVLWQATLDGTTEHLSAAMPMLIEMQQRADAQRPFAAEAAYAHRRWTEAALESEAADNTVARLTREAHTAREAGEDDTAAHLEADLALAETVADAATAAARAEHAEYEQAQQRLVQAADGAAGIVTSEDVQVARLTVMELDERALAEARRDVEQLKGAVVRAEAAGARDFAETASAEHPLILVEQRTPEQAVQTITAPTTAPEQTQTGAVDAAAVEARVRQADKVVQTPTPELKSRIKQTQLNQRMNPTQAADRYLDRYHSEMRRRAELPRQELAAEDSTRQRIWDEAQRAAEADGTGVIRNRDRDHQLPRPGREQAAPAETPAATAEVRAAAADSPSAQAGAVDAAAVEARVRQADKVVQTPTSELKSRIKQTQLNLRMNPTDAGRANLDRYRAEYTRRAELPREELAAEEAARQRIRDENKRTDTRGPGQDTGPDRRRDRGLER

SEQ ID NO: 1593 - protein, 1975 aa, synthetic construct; identical to SEQ ID NO: 1592
  REGION 1..1975: note = TnsF-Tn7 System Protein

SEQ ID NO: 1594 - protein, 371 aa, synthetic construct
  REGION 1..371: note = TnsF-Tn7 System Protein
MQSGVDHPGSAHLVLASGVVHLDPESGVFEAMLDGWALQQRTRFLKAATIESRLSLVRRVSAFVNEYPWKWEASDVEAFIDSLRNQQPPIVVSTARLYETTLRMFLDYLTDPRYGWSAVCVERFGQPPRQVLHEANSIVHVTEYEGVPGRRPLTYDEVQALFDAADRHVDEIRSQHRKGALPAMRDAALLKTIYAYGLRRREAWGLDLADLRHNPKAAQFGRYGALFVRWGKSSRGSPPKRRTVLTVPEMDWVVPVLEQWITDARPLFGAGEHPGLWVTERAGRISLRRINEAFAAARDAAGLDPVLDLHCLRHSYVTHLVEFDYPERFVSSQVGHAYAATTAIYTGVSDEYRNRLLQRSLSRYPELWEQP

SEQ ID NO: 1595 - protein, 108 aa, synthetic construct
  REGION 1..108: note = TnsF-Tn7 System Protein
MNKKMSYRWNLRKIMASRDMFATSDLVPLLAERGIHLSREQVYRLVTTSPQRLSLDTLAALCDILDVGVEDLIEVTTTNTQIRKTVNDTASAAPPPVRRSIIRRPDGI

SEQ ID NO: 1596 - protein, 501 aa, synthetic construct
  REGION 1..501: note = TnsF-Tn7 System Protein
MSTQNRTPSWPDEQLCNSCFYTAMRTRGICPICGHDGVLPGRANCTDPQPVCLACAGIPDNYRCRTCDIEGQIYRGGQCARCALRDDLTALMVHGAADPVTMGTIVTILCGVDRPESILTWKRSPTVRALLTGLASQDIPLSHDGLDAAGQSRQVSHLRSLLEHNGLLPPRDEPLARFQAWLASKLDAICEPAVRAPVEQFATWHHLHRLRRTSASGQSSHGPTHSAKQEINETIKFLSWLHENHHRTAATCRQQDIDEWLATGSTTRTKIRTFVVWASKSKVNTALHLDAPQAKDTRLLTQDQRLAWIKKLLHGDAESLPYRVGGTLLLLYAQPVAKIVALPTAAIVTAASETRISLGAEPVPIPEPFADMLKDHLHNRPNLRTAGGLKTNPWLFPGHRAGKHLEHHTMMLKLRTLGINLLGARNSARRLPPLGLQPQLHPPTCPTATTAPTDMPNLQPNHGHATSPSRHNRIMTAPIARRIRPSRIRRFTGIKALPFIR

SEQ ID NO: 1597 - protein, 460 aa, synthetic construct
  REGION 1..460: note = TnsF-Tn7 System Protein
MANQLRVNWPADRLCHSCFYTAMRTHGICPICGHDGVLPGRVNQADPRPVCLSCPGISDDYRCATCHTEGQLYRRGQCARCALRDDLTALMVHDAADPVAMGTIVTILCGVDRPESILTWKRSPTVRALLLGLASEDIPLSHDGLDAAGQSRQVSHLRSLLEHNGLLPPRDEPLARFQAWLASKLEAICEPAVRAPVEQFATWHHLQRLRRTSASGQSSHGPTHSARQEINETIKFLSWLHENHHRTAATCRQQDIDEWLATGPTTRTKIRTFVVWASKSKVNTALQLDAPQAKDTRLLTQDQRLAWIKELLHGDAESLPYRVAGTLLLLYAQPVAKIVALPTAAIVIAAGETRISLGAEPVPIPEPFASMLKDHLHNRPNLRTAGGLKTNPWLFPGHRAGKNLEHHTMMLKLRTLGINLLGARNSALQNLVAEIPPPVVGHLLGYSHNCTQRHAQLAVA

SEQ ID NO: 1598 - protein, 501 aa, synthetic construct; identical to SEQ ID NO: 1596
  REGION 1..501: note = TnsF-Tn7 System Protein

SEQ ID NO: 1599 - protein, 369 aa, synthetic construct
  REGION 1..369: note = TnsF-Tn7 System Protein
MPVDRSGRVYVVGSVPLLHPEAQTVEEMLEGWRNQQLCRNLDHETIAGRIRIVRRFVEVTNEFPWTWTPAMAEEFFSDLRAIHRRKQSTVRGYQNALKLFCSYVSHPDYGWDRVCEQRFGTHPAQVFFEWNSAAHVQDNEQTPEKRAFTKAELQDFFDHADDQVALIAASGRKGWLPAYRDAVMFKIAYSYGLRCNELRHLQTVDFSRNPRGREFGRYGVVHIRYGKAKKGSPPKRRSVLTVFDWTPEVISDWLTRGQPYLDDGIDLFPSERGALVAERTLLRRFRRYCDDDLQLPGGLDLHSLRRSYATHLIEDGWDAKFVQDQLGHEHASTTSLYTCVSSDFRTRTLRRTLDATIAEALSVDGGEIS

SEQ ID NO: 1600 - protein, 115 aa, synthetic construct
  REGION 1..115: note = TnsF-Tn7 System Protein
MKRHVDYAWRLPEIMAAHGMHNSTDLMPRLAERGIELSRPQVYRIVYQRPERLSLHLLAALCDIFGCGVEDLLTITATDVRRKKAASSTTTARPNVVDLNKSVRPRRARVIRDED

SEQ ID NO: 1601 - protein, 115 aa, synthetic construct
  REGION 1..115: note = TnsF-Tn7 System Protein
MKRQVDYTWRVAELMAAAGMHNSTDLIPRLAERGIQLSRPQVYRVVHQRPERVSLQMMAALCDIFGCGVEDLITVTATDVRRNKAATVAKSAAPNVVEINKSVRPRRARVLRDDD

SEQ ID NO: 1602 - protein, 572 aa, synthetic construct
  REGION 1..572: note = TnsF-Tn7 System Protein
MSRAVCAFCGQDKPVRQRMPDGRARCRNCFHQDPATWEPCGGCGQTKRVNARAADGTARCTNCYRKSTQPKLPCDRRGKLVHPIVRAGGRGGHTENLGPCCYRGESRRCGGCGRTRRVRVKATATSPDLCGTCHQAAITACTRCGTVTRCRGTTTGRHAICWRCHLTDRLDALLVQPDGTILPALQPIRTAVLSVDNPATGLGWLGRSRGATLLAQLASGQLPLTHDALDRQPPGKSVEHLRRMLVAADALPERNEHLARLEAFAKRTIEAIEDPKDRRLLRSYATWHVIHRIRNDRPRPAIWPAAGYRARHEITAAARLLADIRQQGRSLDTLCQPDIDALLTSRDILRSFLSWADSHRLITGIQLPKHQPRQPLHFADDQHRWNLARTLLHDDSAATISDRFAGLLVLLYAQPVARIARLTTGHLRHVGGTTMLDVGTDALQLPSPLAGLAASLPERRPVGMARTLYTDHWLFPGRHPDRPADSATLMRRLNALGIYARSNRNAAMLQLAAELPAVVIADLLGVHTGTATKMGARSQRQLGHLRRRPQSMKTCNGRSTVLVAWPGPGERS

SEQ ID NO: 1603 - protein, 572 aa, synthetic construct; identical to SEQ ID NO: 1602
  REGION 1..572: note = TnsF-Tn7 System Protein

SEQ ID NO: 1604 - protein, 710 aa, synthetic construct
  REGION 1..710: note = TnsF-Tn7 System Protein
MAASEAERAVVRERAEEVLRRLAGEHAVLREDQWRAIEALTVDRRRVLCVQRTGWGKSAVYFVATALLRAGDRQAGPTVIVSPLLALMRNQVDAAARAGIQARTINSANLDEWSLIEQEIRAGEVDVLLISPERLNNPDFRDNVLPGLAGSTGLLVVDEAHCVSDWGHDFRPDYRRLRTFLAGLPSRTPVLATTATANARVTADVADQLGDALVLRGSLERDSLRLAALRLEDPAHRLAWLADHLERLPGSGIIYTLTVAAAGETADFLRSRGFEVATYTGQVEDAERRAAEQDLLNNKIKALVATSALGMGFDKPDLGFVVHLGAPPSPIAYYQQVGRAGRAVEHAEVVLLPGPEDVAIWRYFASLAFPPEDQVHAVLSRLSPVQPMSTQALEPLVDLRRTRLELMLKVLDVDGAVRRTRGGWLATGEPWTYDEARLRRVAEARETEQKTMLEYAVTTACRMEFLRRCLDDPEAVPCGRCDNCAEPLFDSEVSAGSFAAAEAFLGRPGLEIAPKKMWPTGLAAVGVSLKGRIAPAEQIEPGRAVGRLSDLGWGNRLRAAVSPESVDGPIPPELADAVVEVLKAWARGDDAWKQRPAAVAAVYSQRHPQLIHSLTERIAAVGRLPMLGVVQASPTLDGGSHRGNSAQRVRALHDAFEVPPAMAAELPDLSGPVLLVDDLVDSGWTMTLAGRALRRAGAPGVLPLALAVAG

SEQ ID NO: 1605 - protein, 370 aa, synthetic construct
  REGION 1..370: note = TnsF-Tn7 System Protein
MVAVRAVDIPGAAHLVLADRGVVRHLDPAEAMFAAMLTVWDRQQASRLLAASTRKQRADSVGRFARFVGSYPWQWTPADVEEWTAELRGGRAHSTIRGYQNDVALFCSFITDARYGWADRCEQELGTHPVQVFHEWNTARHTSDHEARPEVRPFTRSELQEFFDFADEQVDQARRLNRKGWLAAFRDATLFKVAYAWGLRRREVAMLDVTDFTRNAAAPQFGRYGMCNVRYGKAVKGSPPRRRNVLTTMGWAVDVLTEYVEDIRGFYAPGKRTALWPTERGGRISVASINIRFAEYRSAAGLPPELHPHCLRHSYVTHLIEDGFDPFFVQQQVGHAWGSTTALYTGVSSDFKNTMLRRALGPALGKESHG

SEQ ID NO: 1606 - protein, 112 aa, synthetic construct
  REGION 1..112: note = TnsF-Tn7 System Protein
MTRRVGHRWRLREVMAAHGMFHTTDIHPHLAERGIDLSPVQVYRLVAQTPERLNLTVLAALCDILGCTAADLFEPTVETSSGRARKAAGGEAPTASVARRPKRARIVGDDPR

SEQ ID NO: 1607 - protein, 500 aa, synthetic construct
  REGION 1..500: note = TnsF-Tn7 System Protein
MPRPRKAGDPVRWPEPCGRCGEHHQIAVRWPDGGICGYCYQQAKRTRGTCACGHEGVLPGRVDTLPACRSCSGVQLNIDCIGCGNEDELHSGNRCWSCILAATVDRLLSPPDNQPPSPALRAVATALKSMKRANSGMTWIQQPHVTAFLQQLAATPVITHTHLDELPASRTREYVRGLLVEHQALPRRDELSARFAEWAEQALERITSQNHRDIIRRYIRWHHQRRMNQMDEVTQGTFLRAKQSVTVGIELLNWLTERDTELAALTQAHLDRWQAEGPTTRGIASRFLDWATRTSLIDPSLKLQPHRRGTSPRLDAAAQAELVRGLSHTTDMSPRDRAAAILVLVFGQQVSDIVQLTWHDVKVTEDLVTVTFGAVEIALTSPLDEPWRELAATPTHDQTAAHPNSNWVFRGGAPGRHLRASTLTQRLSAAFSSRAARLGTLHELTKIAPVAIIAEALGYAPATIDRHALASSANYIEYISSLHAPSSSHDKPSLPLRRGY

SEQ ID NO: 1608 - protein, 500 aa, synthetic construct; identical to SEQ ID NO: 1607
  REGION 1..500: note = TnsF-Tn7 System Protein

SEQ ID NO: 1609 - protein, 797 aa, synthetic construct
  REGION 1..797: note = TnsF-Tn7 System Protein
MTIAAGSDTQSPELHVADTHDLIRVQGARENNLKDVSIEIPKRRLTVFTGVSGSGKSSLVFATIAAESQRMINETYSAFVQGFMPSLARPDVDVLEGLTTAIIVDQERMGSNPRSTVGTATDANAMLRILFSRLGQPHIGSPNAYSFNVPTVKASGAITVERGEGKTKTEKATFNRLGGMCPRCEGMGSVSDFDLTALYDDSKSLNEGALTIPGYSMDGWYGRIFSGTGYFNMDKPIAKFTKKELHDLLYREPTKVKVEGINLTYEGVIPKIQKSMLSKDVDALQPHVRAFVERAITFTTCPECEGTRLSPEARSSKINGKSIADVCTMQISDLADWIRQLDEPSVAPLLKGLQHLLDSFTDIGLGYLSLDRPAGTLSGGEAQRTKMIRHLGSSLTDITYVFDEPTIGLHPHDIERMNQLLLQLRDKGNTVLVVEHKPEAIAIADHIIDLGPGAGSGGGTICFEGDLEGLRGSDTITGRHLDDRASLKAKARTAKGHMEVRGASTNNLRNVDVDIPLGVLCVLTGVAGSGKSSLVHGSVAKRDGVVVIDQGAIRGSRRSNPATYTGLLEPIRKAFAKANGVKPALFSSNSEGACPTCNGAGVIYTDLGVMATVESTCEECEGKRFQASVLEYKLGGRNIAEVLAMSVNEAEAFFSDGDARTPAAHKILDRLADVGLGYLTLGQPLTTLSGGERQRLKLATQMSEKGDIYILDEPTTGLHLADVQNLLGMLDRLVESGKSVIVIEHHQAVMAHADWIIDLGPGAGHDGGRIVFAGSPAELVAGKGTLTGKHLAAYVGA

SEQ ID NO: 1610 - protein, 797 aa, synthetic construct; identical to SEQ ID NO: 1609
  REGION 1..797: note = TnsF-Tn7 System Protein

SEQ ID NO: 1611 - protein, 376 aa, synthetic construct
  REGION 1..376: note = TnsF-Tn7 System Protein
MREAVRLGDVLTNVNVGLLRAEDRVFEAMLDGWRAQMLARGLSTSYIKSSCGTVQRFQEHANEYPWTWSAHHVDEFLADRRSSEKGLALSTLRANSGAIRAFCSYLTDGRYGWAAFCERVFSDIPVQVVFEWNSPRHTTDDAMPARRRAFTRAELQAFFDAADDLVDTEFAKGSKRWLPALRDSTAFKVAYAYGLRRRELAMLEYVDFGPNPHVESFGRFGALQVRWAKGTRGSGPRRRTVLTVPEFDWVVGLLEYWLSPDGRKRFPTADRSASLWPSERSGSTVFRNFDRSFQRVRKIAGLPEELSLHTLRHSYVTHLIEAGYDPLFIQQQVGHSYSSTTALYTSVSADFKQKTIQKMIAQRLRSGGTNEGNGHG

SEQ ID NO: 1612 - protein, 293 aa, synthetic construct
  REGION 1..293: note = TnsF-Tn7 System Protein
MIKQNPTREPEELLSHNIYQSYADFSEFLRSRTGKRNFVAPAYRFLEFFKECDLQWGKIPSYEIITYTFDDHFVQKNMPVLGWLLKTHQICVDNTTEQIIISQAAIQEMFVAFDDDPPSILQEYLCFLNKRQKRRQSKPSSVRTVFQPMISLYYYYGLHGSQTPSQAQIDRYLTMNKGQISAMVCFVQYLNTNRQFNLICKRVSKQIPVRPAYKIVGDKDRQKFERRFIALAMLTDPLNDKEKIQWINYGIRYFHRFFISIKTLSDIDIKPCDEYENLMLVQYDNKKFALPKF

SEQ ID NO: 1613 - protein, 525 aa, synthetic construct
  REGION 1..525: note = TnsF-Tn7 System Protein
MQNLIEARQLSLVFPESSLPLFSEIDIFLTNELHALIGRNGVGKSCLAAILADRLQPSEGVVQRFCKIGYLAQGETEIVGTAGDVLGVSEIQRVSSRILNGEGTPEDFSFMDGKWNWEAETDALLAEGELSLDVLKRPFKSLSGGEQTRLKLLALKRQGCKFLILDEPSNHLDQDGRVWLAQWLESFNGGVLLVSHDPILLEQVQIVYELTSMGISISRGGWHDWLESQEQLLLGAQRSADQAKKELQQAKREQQAAQEKTEQRQSRGKNKRKDSNQSKIILDRELGRSEATQSRKAKLHDDRIQNASGQAASAKAQLEIIEPLAIVTATPEVTSNPLLHLSDVVLPFGMATPLSLIVNKGERIAITGKNGSGKSTLLKVISGQLEALRGEIAVTQSYRLMDQHFSFLDKDLSALDNFRQQASGWTEDLYRTRLAQLRIKGDAAIKPVNTLSGGEQLKVALACLFCGPTAPALLLLDEPDNHLDIESKNLLQQALHDYTGAIILVSHDQSFIEAIGDMDNLTLKK

SEQ ID NO: 1614 - protein, 525 aa, synthetic construct; identical to SEQ ID NO: 1613
  REGION 1..525: note = TnsF-Tn7 System Protein

SEQ ID NO: 1615 - protein, 214 aa, synthetic construct
  REGION 1..214: note = TnsF-Tn7 System Protein
MRQMRKIKPTRMSVSGRIPYKGKSLPYESTLERDLIIVHAFREDVEDIVAQPITIPFVKNGITYKYTPDFFIKFVEDDGKPNMIIEVKPYDLWQANWRDWSDKWKTMQRYCKDNGYVFHIYDESRIKNTALDNINLLMKFKNSAIEEEDKEAVLEQVRLMGTTTIDYLLTRFYIGSFLRNHGLRVIYHLLATKRLKFNLFLEINDLTEVWVDYE

SEQ ID NO: 1616 - protein, 673 aa, synthetic construct
  REGION 1..673: note = TnsF-Tn7 System Protein
MIDHDDEGLDRFEIRRGRIDLRKGKTYLNKSDNKHYELVEYLNESTEVVVRSVETGKTSIVNIQSLSNIKDQNNDHINVDISAIGDEEWQKAQSKFEAIKPIINTEHSYNHRKLIMERSKEINVSIRSLYRWIKQYQAVGSIAGLVEKKRGWKEGGSRLTKAQDDVIQRAIKAFYLTKQRASLEQTYREVFRLCSMEKIDKPSKKAIKLRIDQISEYEQLKKRGQIEQARKKFKPTPHSFPNADYPLSVIQIDHTPVDLILVDNEHRKSIGRPYLTLAIDVYSRMITGYYLSLDPPSATSVAMCVARSILQKESLLLEHGIDHTEWQVYGYPQKIHVDNGADFRSNTLARSCEVHGINLEFRPVARPQFGGHIERLIGTFMKEVHGINGTTFSNIKEKDNYDSEKEATLTLDEFEVWLLTFITKVYHKRIHSTLGRSPTEQWYLGIHGDGDNIGTGLPSLPEDSKTLLLDFMPSFERTIQHFGVTIDSLRYYDPCLNIFINAKNKDGSKKHFLFRRDPRDISKIWFYDPSLHQYFTVPFANQQLPSMSLWEYKKIRKQIADKGNEYINEHQIYEALTEMRDLIEDSSKKTKSARRQAQLQKTHAKSQTIVAKTMMASKRNNAATANNLEPTNSDNIQTNLQPSTQVSKKPEKSVIAKNGLLLDTTDFDFGDIE

SEQ ID NO: 1617 - protein, 386 aa, synthetic construct
  REGION 1..386: note = TnsF-Tn7 System Protein
MVSVKPLPVATPLLDDESINSWLLRVSLNQGCDLSTILFYHWSKYNLRHHDFDKGFNHINKQIHQDMAVLAQTNLDFFDNRSLIQFNEDIGLEYRSNISLTWVLPIPKFHSKTMVGHQYCAQCMQEDKNAYLRLKWRFSWIVYCEQHLKPLQNSCSSCGLPYQPHLIKANHRFINRCPHCREKLSAEKANQVLCADAYEFQLKAEQVLSANQAVVFGHSIASGDWFELILFFINLIRKSTLKKDLIYKNLVETLDVGIDGFELSKTRTGLKFDYLSHGERVMLIAYANQMLKITFDDWLLACRKNNLTQNSFRLGKRPIIPQAFLPIYKELPSVVKRQIKGSRVSAKPKSARAVNTSWERMQLRIEKLKIYDKAKPNKRARRATKS

SEQ ID NO: 1618 - protein, 299 aa, synthetic construct
  REGION 1..299: note = TnsF-Tn7 System Protein
MNEIITDNKASYLHVYKDFRHLVEYSDDDRLDFINEARWVNYDVADNIILELNGLLRFPKRLRMPNLLIVGDSNNGKTSIAHRFFRKHGIPVEENGILIKPVIFANAPSSTNEKDLYMSILEALHMPYRTKDSASSLLYQVLHLCREYQVKMIMVDELHSLLTGTPRQQRQVMNALKTLCNELQIPIVGIGTQDAKRVLHTDPQHASRFDIVEVPLWKLNKKFQELLFRLESVFPLKNPSELHQPKTAALIHAVSKGNLGNIHRLLSVCAKDAILSGTEQITEEILTKNKDVRPTEGLR

SEQ ID NO: 1619 - protein, 299 aa, synthetic construct; identical to SEQ ID NO: 1618
  REGION 1..299: note = TnsF-Tn7 System Protein

SEQ ID NO: 1620 - protein, 498 aa, synthetic construct
  REGION 1..498: note = TnsF-Tn7 System Protein
MTSSTQKTRLSPCIGCGRTDTPIDQRITGWQMCRPCTKRRRNHPAPCPTCGLVRVLAFPLGKQAVCTTCAGAPPLFECPNCGEESHPYGKVCARCTLATRATELLTDPATGHLNQQLRPLLDYWINSVDPRTPLRWVSQSQASTDLLRQMACGQSSISHVAFRQLPPTKPNDYLRNLLVSIGILGPWEPHVDRFISWLDTEIAPRLEPECAFTINSYARWHILRNLHRHASNGTLTQAVANSARIRVRAAIEFCELLARRGVSIEDATQVDLEELISNSPGYNRTKTIASFIAWARKTRVNRNLTASGEPWPNATVTISTEQHWSDVERLLNEDHHPAHIRLAGLFTLLFAQPLNRIVAMRLQQIHVTETDVLVTFANDPIEMPPILDDLLRNYLTTRADRLVETSDPGWLFPGGQPGRHLVTEVFRRDLTAIGIKPYESRKASMFHLAARIPAPVLAGLLGITDRNAAAWAKLSGRDWSAYIQHRDEAGQKGGTHAI

SEQ ID NO: 1621 - protein, 498 aa, synthetic construct; identical to SEQ ID NO: 1620
  REGION 1..498: note = TnsF-Tn7 System Protein

SEQ ID NO: 1622 - protein, 516 aa, synthetic construct
  REGION 1..516: note = TnsF-Tn7 System Protein
MSEEAKLNVIGRSSAVALWGLAGKIVSIEACVSAGLPGIDIVGLPDASVSESRKRLRAALAYLGIPVATQHVTINLTPGTVPKVGTGFDLGIAVAVLKAQGIITETHTESIIHCGELGLDGRIRPVNGVLPSLHSGLQAGFDRFVVPVGNRQESALLAGARVMTISSLAELINIYGGALNVPQLPPVVDAAAAHPETSQRHDLAEVQGQAEARFGLEVAAAGGHNLLMRGTPGAGKTLLAQCLPGILPPLDDQQAVEVAAVRSLRGELPIGEGLDHRPPFEAPHHRSTASALIGGRRPGSIGILSRAHRGVLFMDEAPEFSRDVLEALRQPMEARQVHIHRAWGSMVLPASFQLVMAANPCPCGAGMRGAESTCRCTPMDKRRYRNRLSGPLLDRVDLQLELFPVSPADIRLGGAQEDSAAVAGRVRLARQRQADRYVDCDWTLNSNAPGAWLREHFSLRPHSLRDLDRALDTGRITMRGYDRVLRVATTLADLEGTEAPTPDKITTALALRTQDS

SEQ ID NO: 1623 - protein, 516 aa, synthetic construct; identical to SEQ ID NO: 1622
  REGION 1..516: note = TnsF-Tn7 System Protein

SEQ ID NO: 1624 - protein, 537 aa, synthetic construct
  REGION 1..537: note = TnsF-Tn7 System Protein
MFNSLSDRLTATFKNLRGKGRLSEADVDATIREIRRALLDADVALPVVRAFTGRIRERALSEEVSGALNPGQQVVKVVNDELVGILGGETRRLNYAKRPPTVIMLAGLQGAGKTTLAGKLAYWLKSEGHRPMLVAADLQRPNAVNQLEIVGERAGAFVYAPEPGNGVGNPVQVATDSLEVAKSKLHDVVIVDTAGRLGIDEELMQQAADIRSAVNPDEVLFVIDAMIGQDAVKTAEAFLEGVDFTGVVLSKLDGDSRGGAALSVAEVTGKPIMFASTGESMKEFEQFHPDRMADRILDMGDILTLIEQAEKNFDEKETAKLQKKVEAGEDFDLNDFLTQMSGLKKMGSMKKMLGMMPGMSQYKDQLENFDEREVDRVEAIVRSMTPAERTNPKILNGSRRARIAKGAGTTVTAVNQLMERFTQAQKMMRGMTRGGGMPGMGGGGGMPGMGGMPGMGSVPGGGNRKKKAVGKKKGRKGGQSGNPAKRAQQAQALEDKKAGKTKDPVGSAFGGVDLDGEEDFDMKNLPKGFGGMFPGGK

SEQ ID NO: 1625 - protein, 537 aa, synthetic construct; identical to SEQ ID NO: 1624
  REGION 1..537: note = TnsF-Tn7 System Protein

SEQ ID NO: 1626 - protein, 371 aa, synthetic construct
  REGION 1..371: note = TnsF-Tn7 System Protein
MDVPGSAQLVLVPGVRHLNEPEAVFNAMVAGWQRQLRSRSLSNQTVDSRISLIRRFNEFAGSHPWSWTPGDMEDFTLSLMSGSKKAAPSTIRGYHFVIRMFCDYLLDGRYGWIEECQKRFDQIPSQVCHDYNTVAHTTDYEGRPGRRPFTYDEIQHLFDFLDTRVERVKASGRKGAWAALRDSQIVKTIYAYGLRRREACMLDIADLRPSPDMPQWGTYGAVHVRYGKAVRGGVPRRRTVHTVPEFDWVVTGLTQWVEQARPMVLGTDAERRVELWPTERGGRIDPRTMDLRFAWLRREAELPDELTLHCLRHSYVTHLIEFGYPERFVTEQVGHSYASTTAIYTSVSNDFKTKTLQAALRRVYNNEEGQQ

SEQ ID NO: 1627 - protein, 118 aa, synthetic construct
  REGION 1..118: note = TnsF-Tn7 System Protein
MNTASNKFPTPGRQVSLQWNLRQVMASAGMFKTTDLVEPLAARGVDISKQMIYKVVTGTPQRINVELLAALCDILDCTPNDLLELNYDQKSAPQSPSGTAGIGDLRPVRSTVRRPDGL

SEQ ID NO: 1628 - protein, 508 aa, synthetic construct
  REGION 1..508: note = TnsF-Tn7 System Protein
MSRPYSTDEQYERWHMAQCCRCGRRRNKAGSWPDGYVCRTCSDRAVQARGACPGCCQDRALPGRRSSDGAAICTTCAGFSQSFACTRCSFEDKLHRGRLCTRCTLADRLAELLDDGTGRIRPELVPLADSLLAMDKPRSGLSWLTRRGAATELLGRLGRGEIELTHEAFHTLQPWRAAAHLRELLMACGVLPAIDKQICSLERWLVDHLADITDPDHAQVVRRFATWEVLPRLRTRAETKPITPAGRRHAGDQIKHATAFLQWLCEHDLVLSTCRQVDIDTWHVEHNEHSRNTVRAFLQWCTASKLTRRFRLPAAVIRQAAPLPQHERVDLLGHLLTDHSLPLRPRVAAAIVLLYAQPLSRVVRLTIDDVIHDDDQVLLRLGQPPSPVPGPVATLLLDWIQNRNNMNTATNRDSRWLFPGRRAGQPMHSDTLAAQVNGLGIPTVAGRASAIRQHVLEMPASVVADALGYHQVTTAKLATQTAATWSRYAAGDHLQSPSGWTPQRTHDS

SEQ ID NO: 1629 - protein, 508 aa, synthetic construct; identical to SEQ ID NO: 1628
  REGION 1..508: note = TnsF-Tn7 System Protein

SEQ ID NO: 1630 - protein, 111 aa, synthetic construct
  REGION 1..111: note = TnsF-Tn7 System Protein
MKRKVSYTWRLRDVMAEHRVFTATELMPLLRERGVDLSASQIRRLVSGTPERLSLQVLSEFCDILSCTPADLVATTAENAGVRKTATGDLAAPAPAVAKLRPRPARILPEQ

SEQ ID NO: 1631 - protein, 373 aa, synthetic construct
  REGION 1..373: note = TnsF-Tn7 System Protein
MANALAGAARPRSVIYWLRHSPSAKLLATLAAGHSEITHELLDGLPQGRNLWHVRETLVATGVLPRRQETLARLELWLRDFTDALPAHQARIIRPFAEWQVLRDARRRAARGRYKAGSARTDRTDIRTAVLFMTWLDDNQLDLSTLTQEALDLWLTTHPTRRQGVGTFVRWTLARRLASGIKLPPDHRADASHFLTEDEHYGQLRRCLNDDQLPLDVRIIGAMVRLYGMQVTRIVTLTTDRFHKEDTDWYVTFDREPVLLPPKLGRLIEEQIRHPARISMLEQLPGDGSRYLWPGRPASRPIGGGWAHTRLKRHGLPSLSARNTAMIEFVAELPPIVVSDLLGIDPGTAHKWARFAQDSWADYLAACQEDADG

SEQ ID NO: 1632 - protein, 342 aa, synthetic construct
  REGION 1..342: note = TnsF-Tn7 System Protein
MKEGWARQQSARFLKSSTIDPRIRLLERFEEFTGLYPWQWSPADGEAFIAHLRSGEKSIQMSTARTYEVTIGLFLEYLLDTRYEWARVCEERFGEVPQVVFHEGNSVLHTVEYEGDPRRRPLTYDEVQALFDAADARPSKIRGQGRKGALCALRDAAVLKAVYAFGTRRTETSKLDLVDLRRSRKAPKYGAYGSLMVRFGKASKGAPPKRRTVLTVPEMDWTVDVLQDWVTEIRPQFSPGRHPALWVTERVGRLSPRSINEAFVAARRDADLDEDLDLHCLRHSYITHLTEFGYPARFVQEQVGHSHAGTTAIYMGVSNEYRNKLLEASMKNRLGDDWDATA

SEQ ID NO: 1633 - protein, 108 aa, synthetic construct
  REGION 1..108: note = TnsF-Tn7 System Protein
MIKKMGYQWQLRQLMAERQMFQTSYLMPLLAERGVVLSREQVYRLVTQPPQRMSMDTLVALCDILECTPNDLIKPEVVNTPLRKTTGEATGPTPTTPRRTVIRRPGQQ

SEQ ID NO: 1634 - protein, 485 aa, synthetic construct
  REGION 1..485: note = TnsF-Tn7 System Protein
MARPRKPDDPERWPVSCDRCGGHYMVVANWPGESVCGYCYQAAKRVTGICACGHQGVLPGIIDARPACRRCTGITLNVDCVACGDEAELYSGGKCQRCVLGETATRFLTNPDTGVVASQLQVIIDALTGMQRPNSGLTWIRQRHVERVLRELACHPTLTHELVDLLPAGRTTNYVRGLLVAHQSLPARDERLARFLGWAATAQQRILTDEHRKVIARFIRWGLERRLRSMDAVTDSAFLRAKQTTTVTIEFCNWLTTEHDTYVENVTQAHIDLWQSTGPTTREHILRFVRWAIKTKLIPADLEVTPHRRGTAPRLPITEQNAVIEHVVHQQTLHPRDRFAAILIIVFAQRVEDIAALTWEQVTITADSVSVNLAGMPIDIPPPLDEPIRLLAAVNYNGQTAAHPNSPWVFRGYGPGTHVTPTHLRNHLRPVLAALEARLGTLNELTQTTPIAILAETLGYSPQTLEAHARASASTYARYIATRLD

SEQ ID NO: 1635 - protein, 485 aa, synthetic construct; identical to SEQ ID NO: 1634
  REGION 1..485: note = TnsF-Tn7 System Protein

SEQ ID NO: 1636 - protein, 374 aa, synthetic construct
  REGION 1..374: note = TnsF-Tn7 System Protein
MAEELPGFIPHILRADDVSLLRADETVFNAMVDGWRAQMLARGLAVDTIMTRGRLIARFVEFTNEYPWRWRPIDVDQFLAEFRSQERPIALSTLRTYSNTISMFCSYVCDSRYGWVAFCEKQFGDVPSQICFEWNTPQHTTDDAVPPGRRAFTKAELQHLFDVVDDFVDEAHRTASKRWVTALRDSIAFKVGYAYGLRRRELVMLDLTDFGPNPHVPRFGNYGALTVRWAKGTKGSGPRRRTVLTSPEFSWVVELLEYWCSEGRQLFATADRSPALWPSERGSRLTLGALGRSFTAFRKRAGLPPELSLHALRHSFTTHLLEAGYDPLFVQEQLGHSFASTTSLYTSVSSDFKQKTIQQMIARRIRMEEDQPDG

SEQ ID NO: 1637 - protein, 120 aa, synthetic construct
  REGION 1..120: note = TnsF-Tn7 System Protein
MAEQRRIGFHWHLRRMMAAHNLWKSTELRPLLKSRGINLSDAQVYRLVTGEPQRIPSRTFAALCDIFDCTPNDLFEPYVEMQAAKTANAPRPSDLGLKPGNPVAKRIRIVQDDDGPPAQT

SEQ ID NO: 1638 - protein, 413 aa, synthetic construct
  REGION 1..413: note = TnsF-Tn7 System Protein
MTGTEIVCGDCGTVPPGRPGRRPLCPACKLNRRITLLLDDGTGHIRPALRPLATALRNAPNLSTSRLWLYKPQAAELLTALATGRVPLSHDGLSTWPRPGAARHLRHRLIAYGILPPVDPSRADIESWLRHRLAQLSEHPHEQVLRQYALWHQLPRLRATAASRPLRSTAKPYATQQFTQAQLFLTWLHDNGIEPAALTQSQLDTWYAAHRVHQRYRVRGFLTWATSHGHLPCGLVVHQVTFKPGTTITQQRRLELLRHYLTDDAVALPARVAAVLILLYAQPLSRIHRLTRDDLLTIDGTPHLRLGDPPSPLPNPAAHLLHRLVDEGGSGSQWLFPGRLPDQPVAYATLHRRLRGSGFPLGEARISALRQLVLQAPAPVIADALGFHQTTTTRQHANAGATWSRYPANRNTQ

SEQ ID NO: 1639 - protein, 413 aa, synthetic construct; identical to SEQ ID NO: 1638
  REGION 1..413: note = TnsF-Tn7 System Protein

SEQ ID NO: 1640 - protein, 516 aa, synthetic construct
  REGION 1..516: note = TnsF-Tn7 System Protein
MKPRLEEPMGEGPRPIAEVIEETRARFGPRFALARVDAEEKARQMLDERHGEMDVEEIVKLGRLFNQHEAAGRVRYDRFSPGFAGAIMAKLGQDVVRFNRVVSRLWTQPLEAAVDLLGQMYADRSILPGAGTSLPSYLLYLREPDRFGVFINATRKGLGAEVGDVFRSDSKASYERFCAALLRWRERHGVAAQEADAILTAVMRNLPKTSDDSAPTVGELVGDVTPAESAHAPLRLTIEQVAAGSHLPVERVEAWVEALRGPMRQGVFHGPPGTGKTHLALLLARHLATAPANIELLQFHPAYSYEDFVEGLRPATDDDKGGFRYTVREGILSRLCERARKATDESFVLVIDEMNRADLAAVFGELLFLLEYRDTAEVTLPYSQRRFSVPSNVVLLGTMNTADRSLALLDFALRRRFNAFALEPNDLVLASWAAARPAVNADLALDVFRLIRDRVGRDAVVSPGHSYWMVENLDATVAEHIWAYQLHPYLAEYWFERPSELRQLDADVRTLIAERA

SEQ ID NO: 1641 - protein, 516 aa, synthetic construct; identical to SEQ ID NO: 1640
  REGION 1..516: note = TnsF-Tn7 System Protein

SEQ ID NO: 1642 - protein, 367 aa, synthetic construct
  REGION 1..367: note = TnsF-Tn7 System Protein
MTIKGAAGIHVVSGVALLRPEEQVFEAMLDGWQAQQTARNLSLATIAARLRVIRAFAEHVNSYPWQWLPQMIDEWSTDLRAVRGLARSTLRGYQEAVRLFCEYLTDPAYGWAGECQRRFGSHPVQVCHEWNTAVHVQSNESDPRKRAFTVDELQALFDHADEQVMRIRGAGRKGWLPAFRDATLLKTAYAYGLRRNEARMLDVVDFSTNPHAPEFGDLGVCHVRHGKAMAGSAPKRRSVLTIWPWGEDILRQWITEVRPLLAHDGNPALWPSERRDRIGLQRINSQLTTYRNALGLGPGLDFHSLRRSYVTHLIEAGWDPLFVQQQAGHEHASTTSIYTCVSSDFRTRTLRAALDQTMGQALPGATG

SEQ ID NO: 1643 - protein, 753 aa, synthetic construct
  REGION 1..753: note = TnsF-Tn7 System Protein
MTTEPEPPPETSQQTINVYGGIAPIAGPGAKQINIFRHYGQVGAWGLAVLCAAGALTAPLYAQSLVRYSIMVVGGGLAVLFLGTGFRSGASKAANMDDKSSAADAARLREPARQLAMAVRTKELDGRSVLLHKGPSELPADLTFTPVETENLLTGRPVRGELPPGSLREVASYYQALPTKRLVILGEPGAGKTVLATELIIQILGAGLARQDWPAGPNAVPIRFNLANWTDGDLSGFLAQQLHVQYQVPRDDAEELVISGTILPVLDGLDEMEPEPGNPLVRAQWAVDRINDYHRSHPDTARVVLTCRDMVHQALDRPVMDAAVVRVRALTVDQITEFVSQRLAGDRDEQQRWLPVLKSLRAEPAGAAYDLLRTPWRLTLALTAAADADAPDPASLLGETAGRFEAKLLDAFPAAMLNRRREEQKIVRPGQPDGSGSSFTVPDEHALRHWLRVLARYSNSTLALHTMWAIAGQYLVRLVHLVIHLACALAFLVPCLLAIIGGAGHGGQAVRALWNGSARFTEQQKAALVWLAGAGVVLIVWAVWLAITPAPRRSKTRSANHRSRAMRQMTGKQRIAAAAEISLAIGAALGLLAWLVGGWMAGAIVGVLAALFFGLVMDKVRLDKGLSGGTDLRLAWQNDLLLALFCAVLVGTVFPLLLSYPLWAGVVMGAIMGFAGAFVLSLQAWLRYVIAMTIMKFRGDLPWRLGAFLDWAYLAGLMRISGIGYQFRHRQLREWFAHDGLDQDGQSSVAAAR

SEQ ID NO: 1644 - protein, 753 aa, synthetic construct; identical to SEQ ID NO: 1643
  REGION 1..753: note = TnsF-Tn7 System Protein

SEQ ID NO: 1645 - protein, 110 aa, synthetic construct
  REGION 1..110: note = TnsF-Tn7 System Protein
MKRQVTYQWRLRQVMAEHHMFATTELVPLLSERGITLSASQVHRLVSGTPERLSLAVLAALCDIFDTTPACLITTSAENLAPRRIAAVGEPATGNPQAIRPKRATLRSRP

SEQ ID NO: 1646 - protein, 385 aa, synthetic construct
  REGION 1..385: note = TnsF-Tn7 System Protein
MHPALAPLRDHLLSARDPRSAVRWLRREPIDRTLRAMAHGEKPISHEAINELPQSTRVRYFRRMLIAAGTLPTIDVRLNDLEIRSRAFIDTLPAEQAIIVTRFFKWETLRKLRRRSLDRPISVGMANVHSSELHKIAAFLAWLDEHDLDLPTLEQVTVDRYLAHHDPNVTIGRFLNWAARHRITTRIDVPRSPSTVSPATLDEEAIWEKVDILLQDKSTPMSSRIIGLFLLVFAQPIRDSVRLRREDVQFTEGHVKVQFGTTPVILPPPIADLLTEHLDMTRDQRPYVGASPGWLFEGVMPEQHLSEASVRFNLNKHGLHARIIKRARLDHLVQVLPASIVADITGVTVNTAIRHSANTGAGWGAYPELGGMRGISTRTSNADCQ

SEQ ID NO: 1647 - protein, 385 aa, synthetic construct; identical to SEQ ID NO: 1646
  REGION 1..385: note = TnsF-Tn7 System Protein

SEQ ID NO: 1648 - protein, 916 aa, synthetic construct
  REGION 1..916: note = TnsF-Tn7 System Protein
MRGGLERWKRGVESRGVRHAIAYALEGTCDAHLQHASGGDALEAYGLASDSTVARFVVDHGRISADELTAGGLRVWITGHDPVSGEERGRQRLSADADLLLDGTLNHPKSYSIAALLHPELATEFEALQDRLRDQILLTWQRELNARRGHGGLIREDITRIEVVELQHRRSRALDPHAHRHMWLNIKVLGEDGKWSNVDSRVAMKLHTVINAEGDLAARTDPQWMAALARHGFTLDDDGEVAQLAGAVRPFSRRSAQIERNRARLVAVWTAEHDGARPSIRVLTQIDRRAWAMSRPNKPAHLDEQSWEATVRDELEVIDPALTRDRSPIAHTATPTDALDLDLLSDAAVVDADARSTRSGGRFSSFDLRAGAIRALSRSGVIAPRDTLTATIDEISERAHRKSVRLAGGADIPGHVKAYMATETMRLKIRLSGRLDALASPGRSLLPTELGRAAASIEDIDTLDASQLAAAGAIAGRGGLVAVTGPAGAGKTTMLRVAYAGLAGQRRRMLVVAPTRKAASVASREVGAAASSLHALLADHGYRWHTDSAGAQVWARLSRGEADPTTGVVYDGPARFVLRRGDRIVVDEAGMVDLQTAAALVDLALEHGVGVAMVGDPNQALPVGHAGAMASAVRYATASVELDTVHRFSDPEYAALTLRVRNPRDRDDALQVAGELLEHGHVQRVASAEEARDAMVAAYFDWHARSKRVALVAGTNDEADAINDAIQQRRLNDGELDPTTLALGMGEQHILVGDIVQTRRNDPRTGVENRAQWVVRNIWDASIDLASVGDSGEIRRVSREYALDHLQLAYASTVHGIQGETTDAAVVGPDVDAAGLYVGLTRGRHQNVAVTIARTDQDAIGNIGATMMRGTTELTIQDAMRAADAELRRAARARSLEASTPGVTPNSSASRGGLSL

SEQ ID NO: 1649 - protein, 916 aa, synthetic construct; identical to SEQ ID NO: 1648
  REGION 1..916: note = TnsF-Tn7 System Protein

SEQ ID NO: 1650 - protein, 370 aa, synthetic construct
  REGION 1..370: note = TnsF-Tn7 System Protein
MSSGHGGATALRLLGNVRPLDEKQFVYDAMLAGWSDQQVSRGLVASTIQGRILTIRRFEAFTGRYPWEWSVGDVEDYTTHAKSGARPAARSTIRAYQMIIRLFCEYLCDGRYEWAAECERRFGQAPQQICHEWNTTAHLVDYEGRAQRRALTYDELEQFFAAADARVESILDQGRKGALAALRDAQIFKTIYAYGLRRAEAVGLDVADMRPNGAAPRFGRFGAVEVRWGKGSRGSGPRRRSVLTVPELGWVTQGLAQWVDHARSRFTDGTGMLWPTERGSRVSLRYIDMRFAALRDQLGLPPELSVHALRHTYVTNLIEWGYSEKFVQDQVGHAYASTTAIYTSLGDDYRARMVTRALARIYGGNDADNR

SEQ ID NO: 1651 - protein, 115 aa, synthetic construct
  REGION 1..115: note = TnsF-Tn7 System Protein
MPTIADHSPITWQLRQVMAVAGMFHTTDLIDPLREQGVHLSREQIYRLVTKTPERLNIEVLAALCRILDCTPNDLIEVAPVAAARAPRAVGEARSNGPSIGALRPIPAKLHRPTE

SEQ ID NO: 1652 - protein, 390 aa, synthetic construct
  REGION 1..390: note = TnsF-Tn7 System Protein
MDDALTDIAQSWPVLKVATDVLLAADGLHVHASLARGKLPLLLRELKEGRATVTHDGLDSLGQDAATRRLRSFLVAHGALPERNEDLLSFEAWVDDQAASIGDPGDRMAFIRYARWRHLRQARNGVLSPAKWAWRRKELKMVHAFLGFLHEQNLGIRSARQRDVDQWIVRGNTYRGNVRMFLKWCRATGINTGLEAQYPQPTPLAIPSASAESERAQLLRRSMDPDGIEDPGLRLAAILVILYGFRPHQIAALRVEDITFHNGHAMIRFGPDPLQLPVQLTEYARQAKADRVIKRFGGDGEENYWLYPGHLHGRPIVPHTLSSRLAAIGISAKTVRGAALGQLALQLPPAVLARLTGLHRLTATRWYATVSAGTARNLPTNVQHPNPGNP

SEQ ID NO: 1653 - protein, 457 aa, synthetic construct
  REGION 1..457: note = TnsF-Tn7 System Protein
MASKTSRASKTPAYKCAECGWTAIKWVGRCGECQAWGTVEEYGATVARTTAAATVLEPARRIAEVDGTTAAFLPTGVDELDRVLGGGLVPGAVILLAGEPGVGKSTLLLDVAAKFARTGQDVLYITGEESAAQVKLRAERIDAVAHTLYLSAETDLGQALGQVEKLEPKLLIVDSVQTLSSADVEGSAGGVSQVREVAASIIAAAKRRNMTTLLVGHVTKDGNIAGPRLLEHLVDVVCQFEGERHSRLRLLRAVKNRYGATDDVGCFDLNEAGIEGLADPSGLFVSRTREPVSGTCITVTMEGRRPLLAEVQSLLADSANAQPRRATSGLESSRVAMLLAVLQQRAGCMLHKDDSYVATVGGVKLSEPATDLAVALAVASAKSRKALPQRLIAFGEVGLAGEVRPVPGINQRIQEAHRLGFTHAIVPASPAGAGVIPEGFSVREVGHLAEALELLIT

SEQ ID NO: 1654 - protein, 457 aa, synthetic construct; identical to SEQ ID NO: 1653
  REGION 1..457: note = TnsF-Tn7 System Protein

SEQ ID NO: 1655 - protein, 373 aa, synthetic construct
  REGION 1..373: note = TnsF-Tn7 System Protein
MGSGNGPFGLASLYLAPGVSYLDEEEAVFAAMLEGRRAQRVGGRNLRVAGVRTDLGTVQRFRASAGVFPWHWTAALFDEWMEDLIGVRRLAPSTIRNYQNVVAQFCDFICSPHYEWVGECEVRFGTHPVQVCTEWNTTRHLQDYEGRPRRRPLTRAELQRLFDYADEQVGVRLESGRKGTFIAYRDATLFKVAYAWGLRASEVAGLDVTDFYRNPHAPEFGSFGMLMVRNGKSSRGGAPKRRSVATLHQWAVDAVQDYVENIWPLVRADESNALWVSERGRRLRADEVSRRFAEYRDELGLDRVLSPHALRHSYVTHLTEDGVDPMFIQRQVGHAYLSTTAIYTAVSGDFANQMMRNAVSGILKAAGAGKVEE

SEQ ID NO: 1656 - protein, 117 aa, synthetic construct
  REGION 1..117: note = TnsF-Tn7 System Protein
MNSLDYEWRLREVMATRGLFTTTKLIPLLNERGVHLSASQVYRLATEKPERLNLQVLVALMDALECSADDLIGKIQMPAARRDANGTEAGTTEPGLEVLKHKGYRPRRAGILPPNAG

SEQ ID NO: 1657 - protein, 171 aa, synthetic construct
  REGION 1..171: note = TnsF-Tn7 System Protein
MRLGFNEYKKELFRRLGDKQISIKSIRMSLSAVTDLIKPIGMGDEFEQQHIDQHLIRKPGQKANLTGFINFINNCNKLDLKLRVDEKKANAYRKGKLQKKLVDLMSEDDDRAVERKWLLYGLQYFHSLPMRIAGSSLKNGVIDDVEEGIFVNWNDKKYFIPNREGLSETDI

SEQ ID NO: 1658 - protein, 313 aa, synthetic construct
  REGION 1..313: note = TnsF-Tn7 System Protein
MIECLNLSKQFGHFTAVDDLSFTAEKGQVLGFLGPNGAGKSTTMKMITGFLEPTSGGIKVCGEDVLQNPQICKQKIGYLPEGAPSYGEMEVGDFLYFIASMRGIAKAQQKAAVESVIERVNLTNVYYQRIETLSKGFKRRVGLAQAIIHNPEVLILDEPTDGLDPNQKHLVRELIINMSKEKTIILSTHILEEVHAVCDRAIIIADGRLVADNTPNEMEKMSRYNHAVSFVSNLDTNLLNKIKALDCVRDVSYDARLKETTVFPSQGLFIFDEISDFLKAQSVKVDSLKMESGRLDEVFRNITQDSKEKEVAK

SEQ ID NO: 1659 - protein, 313 aa, synthetic construct; identical to SEQ ID NO: 1658
  REGION 1..313: note = TnsF-Tn7 System Protein

SEQ ID NO: 1660 - protein, 392 aa, synthetic construct
  REGION 1..392: note = TnsF-Tn7 System Protein
MNKRTRRTFSAEFKLEAASLVTEQGYTVKQASEAMNVGLSTMGKWVKQLKDEQKGITPIASPITADQQKIRELEKRIKRIELEKEILKKGYRSLDVRRAERLRLIKRLKGSYSVKDLCDVFSIHRSTFKYWFNRPKKVNSQRIKELATVKSIHKESNGSAGARTISTIATTRGIPLSRYRVSGLMKALNLHSSQLPKHNYKKANREHICIPNLLNRQFNVSEPNQVWCGDVTYVWAGSRWAYLAVVMDLFSRKIIGWAMSYSPNTDLTAAALTMAYEQRGAPQSVMFHSDQGCHYTSIKYRQLLWRFQITQSMSRRGNCWDNSPMERFFRSYKTEWMSSVGYASLVAAKQSVINYIVGYYCNVRPHTHNDGLTPNESERKYWLESKTVAKIT

SEQ ID NO: 1661 - protein, 497 aa, synthetic construct
  REGION 1..497: note = TnsF-Tn7 System Protein
MARPRKPEDPHRYPVPCARCKKHYYLVKRWPDGVVCEYCYVAAKRIQGICGCGHKGILPGVINNNPACRRCSGVDLNLDCVECGAEAELYSGGCCQRCVLVATARRLLSNPETGILSTELERIVIALGAMTRPNSGLTWIRQKHVDEALRQIAAHPELTHEVFDQLPKGRTTNYLRALLVEHDLLPARSERIVRFTDWARESLQRVDAEEHRKLLSQYARWGLERHLRGKDTVSESAFMAAKQVLTVTIDFCNWLTTEHNVTVEQADQSHIDLWLSEGAVTRQRLDRFIRWAVKSRLVDPVLRVPPHRRGTAPRLSAADQSLVIDTVVHQSTLTPRDRLAAILVIVFGQRVETIAALTWGQILITDTVTIKLADLPIELTAPLDEPVRQLAADPSNSQTAAHRDSPWIFRGLTPGSHIGPTALRQRLKPTLSALQARLGTLNQLTQTTPIAILAETLGYSPITLEAHAQASGATYAQYIANKAAPSASEGPAQGELW

SEQ ID NO: 1662 - protein, 497 aa, synthetic construct; identical to SEQ ID NO: 1661
  REGION 1..497: note = TnsF-Tn7 System Protein

SEQ ID NO: 1663 - protein, 155 aa, synthetic construct
  REGION 1..155: note = TnsF-Tn7 System Protein
MALEHLRAGAVRLIRIGGGPGTGKTTLAQALSENNGVQAVSTDAVRRQLQAQGFISGDTGTLDSGLYSAQNVSTVYETVLQRAWTLLMHGQSVILDGTWRDPFRQEQACRLAHETHCLLYEIECHLPLSTAQDRITHRRNTLSERHARNCGGIQR

SEQ ID NO: 1664 - protein, 155 aa, synthetic construct; identical to SEQ ID NO: 1663
  REGION 1..155: note = TnsF-Tn7 System Protein

SEQ ID NO: 1665 - protein, 375 aa, synthetic construct
  REGION 1..375: note = TnsF-Tn7 System Protein
MSDELPGAAARLLRLDAGVSFLRAEERVFEAMLNGWRAQMLARGLAHDTIKARCRLVNQFGVYTNEYPWRWRPVDVDEFLAERRSGVRPIALTTLRSYSNSIAMFCSYISDSRYGWVEFCEKQFGDIPSQICFEWNTPQHSTDDAITPTRRAFTKHELQHFFDVVDNFVDHQFAAGSKRWLPALRDSIAFKVGYAYGLRRRELMMLDLTDFGPNPHVPKYGNFGAVTVRWAKGTNGSGPRRRTVLTTPEFDWVVDLLEYWCADQGRGLFATSDRSSALWPSERSDRITLSALTRSFAHFRQMAGLPPELSLHALRHSFTTHLIESGYDPLFVQKQLGHQFASTTSLYTSVTADFKQRVVQQMIARRIRTGVKDDE

SEQ ID NO: 1666 - protein, 553 aa, synthetic construct
  REGION 1..553: note = TnsF-Tn7 System Protein
MTEPFVPNGKAQRQVVETRADLTVVLGGAGTGKTVCALAAARNHLENPGTAPHDRVLFLSFSRAAVGRLLDRCAGILGAYTDRVDFMTFHALSYSVVHRFSSLLDRPHVQLVNKHCREIRPLEAYEIEYDDLHPLACRILNSCPAAADLIQKRWGLVIVDEFQDTDNEEEALLDIVTQSARRILLGDQQQCIYADFRGADGVRLDRITDACKLAGPDNVVTLPDLSHRDPTGVIPAVARAVMERRFTCPALLDAINDERLQIWRGIDYADEVATIEESIRRLRADDLEVAVFTHHVDVLAKLADGLEDVGVQLEIAGLGDALACAIDSQVAMLKYAVADTDWAEITDTLAIFVISAQRGKKVPQLAWDIVHRTGSSKLQSNLDELRAQLTDSASTTQLLAVAAQAHQFLGLPGKLSAWERAGSLLKPLRARAVRQLGSGASTRLVVRNITAAAREASTIELTNSRADHEPHVVQLMNLYQTKGREADATIIVLRGNDFMGKESSPFPHTSRLLYVVFSRARKRIVVLLVGDTFPDPVAPLQRLAHPIPRGFLS

SEQ ID NO: 1667 - protein, 120 aa, synthetic construct
  REGION 1..120: note = TnsF-Tn7 System Protein
MSEQRRIGFHWHLRRVMAAHNLWKSTELQPLLRSRGVNLSEAQVYRLVTGEPQRIPSRTFAALCDIFGCSPNDLFEPYVELQAAKTAEAPRAKDLGVSPGNPIARRVRLVADEEPGGPTT

SEQ ID NO: 1668 - protein, 385 aa, synthetic construct
  REGION 1..385: note = TnsF-Tn7 System Protein
MPAPTGRVPAQLTLLIDEMISTPNPVRLLNWLQKTSCSQFLGHLAASGEPISHATLDALPAGHDESYVRALLVRTNVLPPRQESLDRITPWLDRLLAERPTRHAQLLQPYVQWELLRRARRQGARGRSVAGSGLKIRAEVLLILEFLTWLDSRKLTLATLRQGHVEDWLDAGPARRHDLCMFLAWAHRRGLTGAHDVTPVRRSGGSRFLTDDERWAQLRECLHSDALPLRVRVGRALTLLYGLPANQIRNLTAADIQQRGTDSYLRLRTSTLFLPPRLADLLAELAATTRDEPLLPPSEPSQQWLFPGNIPGQPMSTPGISLLMRRHGFHVQPARIAALVALAEKLPAPVLAQLLGISIDTAHKWAAYTQPNWSAYLAVRDHALE

SEQ ID NO: 1669 - protein, 385 aa, synthetic construct; identical to SEQ ID NO: 1668
  REGION 1..385: note = TnsF-Tn7 System Protein

SEQ ID NO: 1670 - protein, 489 aa, synthetic construct
  REGION 1..489: note = TnsF-Tn7 System Protein
MNRTHTNDRSARPRNGSADARKSGSRFDSPARSGGYGRRPAAVQGEFALPKTITPALPGVEGFAELGMPEQLLAELGKQGVSAPFPIQGATLPNSLAGRDVLGRGRTGSGKTLAFGLALLARTAGQRAEPRQPLGLILVPTRELAQQVTDALTPYARSVKLRLATLVGGMSIGKQAGALRGGAEVVVATPGRLKDLIDRGDCRLNHVGVTVLDEADQMADMGFMPQVTALLDQVRPEGQRMLFSATLDRNVDLLVRRYLTDPVVHSVDPSAGAVTTMEHHVLHVHGADKHAATTEIAARDGRVIMFLDTKHAVDRLTQDLLNSGVRAAALHGGKSQPQRTRTLAQFKTGHVTVLVATNVAARGIHVDNLDLVVNVDPPTDHKDYLHRGGRTARAGESGSVVTLVTPNQRRGMVRLMADAGIRPQTTQIRSGDETLSQITGAQAPSGIPVVITAPVVERPQRSASSRGRRRPSSATRRAPARQSVFDAAA

SEQ ID NO: 1671 - protein, 489 aa, synthetic construct; identical to SEQ ID NO: 1670
  REGION 1..489: note = TnsF-Tn7 System Protein

SEQ ID NO: 1672 - protein, 373 aa, synthetic construct
  REGION 1..373: note = TnsF-Tn7 System Protein
MTGIQSPGPAILELAENVRPLDPESTVFRAMLEGWARQQRARFLQESGTIAPRLALMRRMADFTGQYPWQWTPAEAEAFIAHLRSGSKPIMVSTARGYEISIQMFCAYISDPRYGWAGECEQRFGLVPQQVFHEWNTVVHVAEYEGDPRRRPLHYDEVQALFDAADSRVEQIRARRVKGALPAMRDAALLKVLYAFGLRRQEAVGLDLVDFRRVPRTARFGQFGAVYVRFGKASRGGSAKRRTVLLVPEMDWVVPVLEQWVGEVRPLLRAGTHPALWVTERGGRLHRRSVNDIFNSVRDLAGLAPELDPHCLRHSYVTHLVEFDYPERFVQEQVGHLHASTTALYTGVSDEYRTRQLRRVLAEHHDDLWGEKP

SEQ ID NO: 1673 - protein, 108 aa, synthetic construct
  REGION 1..108: note = TnsF-Tn7 System Protein
MIRKMGCGWRLRRLMAEQGMFQTSELVPLLAERGVQLSREQVYRLVTQEPQRLSMDTLAALCDILQCTPNDLIEIRVVDRQVPKAACETSPAPPPQVRRSVIRRPEQP

SEQ ID NO: 1674 - protein, 319 aa, synthetic construct
  REGION 1..319: note = TnsF-Tn7 System Protein
MTCGLLPIIDKQICLLERWLAHHLAGITNPDHAQIVHRFATWNILPRLRTRAERKPITPAGRTFAGDQVRRATAFLSWLASRKTSLGDCGQADIDAWHAGHNEHGRNAVRRFLLWCTENKLTRKFMLPSAKTRQAAPLTRARRIELLRQVLTDADAPMRSRVAAGLVLLYAQPVSRIVRLTVDDIIQDEQVLIRIGDPPSPVPQPFAVLLLDYAAHRANMRTATNPTATCCSPAAAPINHCDRNTSQSSSANSVFPPALAAAPRSGSTSRTCQPRSSPTPSATTPSPQPSSPPRPVPPGADTPPAITHRYNHRELATVE

SEQ ID NO: 1675 - protein, 345 aa, synthetic construct
  REGION 1..345: note = TnsF-Tn7 System Protein
MATGARPLSLTTVAALPQTNATGYLAALLMESGTVPEENFDRIRMEIWERDHFSTIENRENRNLLRQYATWVINPLFSDSAIAGPVLENKRLARSKRQILLVTDWLRAIEALGFDLSTVPQRVFDEYVATHGRMGTELTPFMRWAKNQRQTRIRSHYFKAEFNAGSVSEEQRWAWIKMLLHESELKIAARVAGLFCLAYGLSLTRVIGLRMADLSMDSDPIRVTFGKDPVELPAAVGQLVKDLANHNSSNGFEEPSWLFKGKQPGRSLTTAAISGPLRKAGIHLQHGKGAAMMILSRDVPPSILADLLGISITAAIRWAGVSGHDWVDYPRLRMNVPANDHDELR

SEQ ID NO: 1676 - protein, 552 aa, synthetic construct
  REGION 1..552: note = TnsF-Tn7 System Protein
MEILAAYDLTRSYRDAAKICGVSHNTVRSYVKARQDGAQAPVARARGRITDPFLPQISSWVDQSRGKIRGDVVHAKLLDLGFTGSERTTRTALAEVKAHYRAQNVRVPRPWTPEPGLWLQYDYGDGPVVDGLKAVLFVAWLAFSRFRIVIPLRDKTMPSVFAALDRSFRLIGGVPTYVLTDNEKTVTIEHVAGIPVRNHQIVAFARHYSTSIQTCLPADPASKGGVENAVKIAKADLVPQETNLLPGYRSFAELEAACEAFMEDVNSRVHRSTLEIPKEMLGVVERHRLHPVPAAPITASFGQTRQVPPNTPMLVFQQARYSVPHTLMGERVWVRGTEDEVIIVHVGPAGPVEVARHQGVRPGSMGIIDAHFPPAPAGALDRVIRPTNQAEEEFLALGAGAALWLKEAAAAGTNKIRHKMDRAATLAKVLGTDVVDQGLGSAAVHQRFSHEDLLSIINTATPSRPSHTTGSTTHTVTDQARWLSQGTSSWAGFGTTPSGTNSSIRTNGSNGSIRTNGSNGPIRTNGTNAGITGIASNAGNASIPGDCEGGTE

SEQ ID NO: 1677 - protein, 241 aa, synthetic construct
  REGION 1..241: note = TnsF-Tn7 System Protein
MRTTRMPHARAVVAEVLATAKAQRWDPTEVVRVLLEAEATGRNRSMLATRRKRAGFPSGKTFDVWDEALSTLPAATTSFLRTLEWVRRRENLIACGPSGTGKTLLLEALGQQAIDEGMSVSWLSMEDLGALVRRHRIDDSVNKAITRATSVDLICIDDIGLLPVSTDAAEGFYRVVEASYEKRSLAISSNIHPSGFDELMPKTIATATVDRLLHHAHLCQTSGESVRLMQAQNGKGTRPMN

SEQ ID NO: 1678 - protein, 241 aa, synthetic construct; identical to SEQ ID NO: 1677
  REGION 1..241: note = TnsF-Tn7 System Protein

SEQ ID NO: 1679 - protein, 112 aa, synthetic construct
  REGION 1..112: note = TnsF-Tn7 System Protein
MSPAVETVWNLRRPMADHGLFKTTELVPLLAEYGVLLSREQVFRLVTQKPERANLNVIAAVCAALNCTPSDLIEVRVVEEKSVAVEQTRGGVGSLRPVPARVHRPHPSPLPE

SEQ ID NO: 1680 - protein, 230 aa, synthetic construct
  REGION 1..230: note = TnsF-Tn7 System Protein
MLDGWTAGNAQRSANIAGFIHWLAQRRITASDLKVVLQRPALPSEIVCEDAHHERIDRLLDGDGAQDLSTRVAGLLVLLYGARLTQIQQLTTGDITTSAGSTLIKLAQHPLQLPAPVGALVNELAAAARNERRARTPNGEHYLFPGGQPGMPIHTATLSRKLTDADIPDRISRSRALLALANDVPAAVIAAQLGLHATTTSGWAKFAQRDWSAYTASRLESLSEQTEETA

SEQ ID NO: 1681 - protein, 144 aa, synthetic construct; identical to SEQ ID NO: 472
  REGION 1..144: note = TnsF-Tn7 System Protein

SEQ ID NO: 1682 - protein, 228 aa, synthetic construct; identical to SEQ ID NO: 471
  REGION 1..228: note = TnsF-Tn7 System Protein

SEQ ID NO: 1683 - protein, 247 aa, synthetic construct; identical to SEQ ID NO: 476
  REGION 1..247: note = TnsF-Tn7 System Protein

SEQ ID NO: 1684 - protein, 243 aa, synthetic construct
  REGION 1..243: note = TnsF-Tn7 System Protein
MAIDFVNWLYTRNTLLAEATQSDIDTWLATGPTTRSTARMFVKWCITHQHMAAHLAFPHRRARTSPMTSDDERYAQLATILERRETPVWVKAATVLLLICAQPVSRIAAIRLDALRTDDSNGLWIRFADAEVALPHPLADPVTALIAHRPNMTTAANRTSQWLFPGVTAGHHINPQTLMGKLRDNGIDLRGARNSAMRELVRSIPPAIAATQFGYRAQTTERHAFISGATWSAYPELHQEPGP

SEQ ID NO: 1685 - protein, 415 aa, synthetic construct
  REGION 1..415: note = TnsF-Tn7 System Protein
MTASRWRDGGGAATCGLLSRFAFHATLSHKTRAIFGRCEMSQQDLPPGSARLQLADGIAVLRPEASVFEAMVTGWSHQQLARNLSAGTISARVATIRRFRDFCDADGPWTWTPAMADDWITELRGVHGIAHSTVLNYQGALRHFMDYLLDPAYEWAEQCQDRFATHPVQVITEANSARHVHEGPGDPRKRAYTTDELQDLCDTADEQVTRRYEVGTKGAMVALRTATITKVAYAWGLRRNEVRMLDLTDFGPNPRARQFGRFGVCYVRYGKPGKGSPAKRRGVLTVPETAWVIDCLEQWIDQGRTSFDRTTGTALFPTERSERISNGALSHSFAELCDTAGLTDPGLDFHSLRRSYVTLLVESGYDTHFIQEQVGHEYASTTSLYTFVSPDYRSRVVAAALRAAAGRLPERTNET

SEQ ID NO: 1686 - protein, 111 aa, synthetic construct
  REGION 1..111: note = TnsF-Tn7 System Protein
MKHRIAYQWRLRQVMTDRDMHNLSDLITPLHEVGIELSASQLYRLLGRTPDRLPLSLLGALCHVLDCSVEDLCDFRVDAAPSRRTATGASPAADGPLRPKRAHIHRPGPPA

SEQ ID NO: 1687 - protein, 506 aa, synthetic construct
  REGION 1..506: note = TnsF-Tn7 System Protein
MTTGDGTPRCVPCYSAAIVPCTRCTTPARAERRWPEGPVCLTCVDAVRLTHEQCHRCGQLGAVFRREDNGPLCPECAGVTFSYRCPTCAGMGRLLQGQCLPCRGRLVLAEAFTDADGRRCERLAPLAELLERYDNPYSMILYLRRPGGQLIRDMVNGRLPCTHEALDALRQTTSVQQLRGLLVLAEILEPRDEQLAQLKRDFGHCLEECATTADRVLLARYARWHLMPLAHQHVSRSGFTRFQREHLRRQLNAARLLLGHIRSRGRAIDGITQHLIDRWLIANPTLQPYARPFLLWAATCGLAPADVAIATSSRHGERAIMNDTDRVLTALRLETDDSLPLADRVAGCLVLQYGQSTDRIVNLTLAQVHIHPDEPGVLGLQLGRETLWLRTRLSALLQQLVHERRPLSAPLKNQETPYLFPGLRPSRPLNSNTLQRRLQRLGVPSASKARNGAWLALVGAVHWKMLADLLGAADGTAHHWHKWNGGDRASYVASRLRAAQTPTGPE

SEQ ID NO: 1688 - protein, 506 aa, synthetic construct; identical to SEQ ID NO: 1687
  REGION 1..506: note = TnsF-Tn7 System Protein

SEQ ID NO: 1689 - protein, 396 aa, synthetic construct
  REGION 1..396: note = TnsF-Tn7 System Protein
MPGVATLHVLPGVAMLRPEEAVFEKTLLGFADHQRARRLSWDTVNTRARIARQVQAMSGGYPWEPAWDRRLFDRWSAMLAGTVATSTMRKYQNDLALYLSYLSDPAYEWPQVCLSTFGMFTGFALRDLNAVRHAQEYIGQPSGNRPLTKAEVKTFFGQMDPEIKRLREQGHKGAFAAARDLAMFTTMYGWGLRRRETARLETHDWRRQAKLPEFGDHAGLAVRWGKAGAGQPPKRRMVISVWPWAVRTVQLYMENVRPLFYSDRPDDGVMFPTERNEMISERAVNQRFQHWRELGKLPAQLGPHCMRHTYVTRLIEAGYDGQFVTDQVGHSHAATTAIYTALSNDFKNLKVRESLDAAEEAALARAFAMADAEADMDDDFSDQTTQSRSGGSRRTR

SEQ ID NO: 1690 - protein, 334 aa, synthetic construct
  REGION 1..334: note = TnsF-Tn7 System Protein
MPLTHDAFQALPNWRTPYLRDLLMDSGVLPHLDRRLLLFERWLAQRIAATEDAERARIRRHFATWRQLRKLRAKAARSPLGTSTRQEARQQISRTGAFPAWLSARHVTLDSCTQTDLRCLARGKVRHPAARADIPMLVHEHPPTAVAHHPEPPDHQPRPDGPTPAHRSPATGSRRRKHLTESPSRFAVCLVPLFAHPVSRIVRMTTDDVVQDGQHVTLRLGAPPTPVPEPVADLLLDHLQALPASTPAINQNSHRLFPGRRPSQPVNTGTLRDALREPGVPAEKAAPRPSAGSSSRPKRPSSPKHWATTTRAPLASPPKPARPGRTTHPADNTR

SEQ ID NO: 1691 - protein, 334 aa, synthetic construct; identical to SEQ ID NO: 1690
  REGION 1..334: note = TnsF-Tn7 System Protein

SEQ ID NO: 1692 - protein, 242 aa, synthetic construct
  REGION 1..242: note = TnsF-Tn7 System Protein
MGVDAGGRRGVLLALTLADATQHEVDAWLAGSPSTHYEVRDFIVWAARRGHSRPLFVPHRPKADPVGIDDSHWELLQQCLTDTDLPLDVRVAGSVLLLFGQHLARVAPLPTAALSAVDGHTVLVLDRTPIRLPEPLARLLAELAEQPRPSGWAANSPHRWLFPGIRPGQHVSGTVLARRLAAHHIPIRPTRTTALVQLAQDLPPAVLAPMLGLHVITAQQWRLRAATDWSAYLEARRTGSPG

SEQ ID NO: 1693 - protein, 425 aa, synthetic construct
  REGION 1..425: note = TnsF-Tn7 System Protein
MLTNPRGDSMVCAQCAGEPVTLECPGCGSVSHSRAHRLCDRCRHPATVRRLLTNSDGQVPDALQPLEAYLLAHPGAANSFDRWALKSDAARAIRHLVSGLLPLEARAIIDDLSTPQSAGFLLSLLVAAGLLPELDVHQARFDRWLELWLAAIDSPQDRLILQRYHSWGTNPILRRPVARPTSSQHRVNRHRVRLRECATLLAHIRSSGHTLATFPQRELDHYLTGSASQADALSHFTRWLRQNRLSHLTVHPRRHTTAVAGMDPAERWRVARRFLKDDTIPSMDRVSGLLTLLYGMQSTRIAALERSDVQVSGDRVTLTIAADAIELPEPLGRAIVDQLQASAARSDRWLFPGRNPGAPITAGAITRRLRLHGVSLADARATALIELAQHMHPRVISDLLGLSSTAATRWWRLAGSGWATYPTLR

SEQ ID NO: 1694 - protein, 241 aa, synthetic construct
  REGION 1..241: note = TnsF-Tn7 System Protein
MIVDSCVSCNTRWFITRRHWAVNIRKFLPAFRDLGRLVAAGSLDPAAAGLLRDAMVAGRSVLVSGATHAGKTTLLGALIAACPDEHRIVTVEETFELAVGAPDIVSLQGRQPSLEGTGEVTLRRLVKEALRMRPDRLVVGEVRDAEALDLLLALNTGVPGAATIHANSAREALGKLAALPLLAGRNIDSAFVLPAVAASVDLVAHCERDASGARRVVEIVAPTGVEGGAVVARTLYRAGAA

SEQ ID NO: 1695 - protein, 241 aa, synthetic construct; identical to SEQ ID NO: 1694
  REGION 1..241: note = TnsF-Tn7 System Protein

SEQ ID NO: 1696 - protein, 946 aa, synthetic construct
  REGION 1..946: note = TnsF-Tn7 System Protein
MGGGVDGRLLVAQDYPLEELSPRAFEQLTVAVASKVLGSGVEAFGSGPDGGREATFRGRVDWSKTDPADEGAWNGYVVIQAKQSEHPSHKPGQNLSWLIKQVDAELESWMKDSSRRGEFPRYLIFVTNVRLSSVPGSGIDAIAAHIKSRLHEPWNGVKSNTLFARGLREGRVWHRDQLNAWLTVNDSIRLAFKGLLTVGDVLSRLGQLGGLLDPEQFAPVLTAHATNTLTTERWVSFREAGGTTRESVENIFIDLRVDNPMRETRSATDQPLSVLKEVLQRSDMVLKPSVVKDGFRRHVVLTGQAGSGKSTVTKFLTQAIRSRFAADEPLTATDREVIDGTDAALARMGVAPPRGRRWPMRVNLADFADAVGPDGGISLLRWISDRITDRAGLDIKPATLQNWLRYWPCVVILDGLDEVTAPEVRPRVLDEITQFVEKAELEDADLLVVVTTRPTGYTERLMPTHFQQLDLAYLDGEEAIDYGRLVTNRRLFDDLDRRDQLIATFEKQTKLPAMLRLMKTPLQVLIMTILLERAGVLPADRFQLFSRYFDTIYERESAKNTTLAPLLSQEQKVIVDLHEAAGLELQIQSESSNDARAVLPMAGLRALLEDRLTVLGHPAGPKRDRIADRVMQATTERLVLLVPAEDDSVAFEIRSLQELMAGRALQKAPDDVLRERLTLAAPSPHWRNTWVFVAGGVFAEGADHQRDMVVDIVESVDHTSPWPGWLSPVGPELAAALLDDGLATQTPKWQRRLTDVALRAITGPFPAEVHTVAAGLAAAAGADDALRMHVRNALMLGLAGAPRAAVAARLLLALAQLDMFVPGASMRLPEASGTPVGPVEIGPALRARLPEMPDPTAAATALEPVLTEVDDVRVADYGGGEVGIANPTRLVPWDGAFVETINDPVTGGLLELLVGALEPEQWHIGHALGIVYRVAAARKPIGDLLR

SEQ ID NO: 1697 - protein, 946 aa, synthetic construct; identical to SEQ ID NO: 1696
  REGION 1..946: note = TnsF-Tn7 System Protein

SEQ ID NO: 1698 - protein, 359 aa, synthetic construct
  REGION 1..359: note = TnsF-Tn7 System Protein
MRLISATSNVALAKPEEAVLDAMIEGWSAQQRSRGLREDMVRSRRKLVTRLCEHSGHAPWEWTPADVESFTVDLAAAGRHLSTLRGYHGSIRMFCEYLISPHYDWVEICEAQFGTVPSQVCLPWNTIAHRFAFEGDGSRRPLTYDEVETLFNTADARVDDLVASGRKGALSALRDAQLLKTVYAFGLRRTEAVSLDLADLHHSSMRSWGRYGALYVRWGKAAGGGAPKRRTVLLVPEFDWWVPGMQQWVEEARPRFAGRDLPGIWVTERRTRVSPGYLDRRFSDLRDAAGLDRKLTLHSLRHSFATHLLEFGYAERFVQEQLGHEHASTTSIYASVSSDYKNRLLAHALKNLLESEGPQ

SEQ ID NO: 1699 - protein, 712 aa, synthetic construct
  REGION 1..712: note = TnsF-Tn7 System Protein
MALEVVHGQPDNRAAALHLADVAASLVEDGTIYLGYPVLATADDRVEIDALLVSQSHGLIAFRFADVLPATVDDWLVLSSEQDSIYNTLESNLSRHESLRQGRQFAVDIGTITLLSADLGPSPISTAATFATFEQLPDLVASRPPLDADLYRSLEAALQRVTTIRPAKRRVDVKSDTSRGATMKVIERGIANLDFWQKKAAIETPDGPQRIRGLAGSGKTIVLALKAALLHAQNESWNIVVTFSSRALYQQFEDLVKRFSFAHMDDLPDPERLSIMHAWGSRGRDGVYTRLADALGVQPHNFRSAEQKFGREDAFEGACQELLEIARQREDIPPLFDAVLIDEAQDLPPAFFQLVHLFTKDPKRVVWAYDELQKLDETEMANVAELFGRTPTGEPVVNIQNRDDEPRRDIVLPVCYRNTPWALATAHAIGFGVYRSGGLVQHFDDPQLWEDIGYRLDAGALTLGSWVELERSADSSPKYFLERMDSADAVVLRGDFKDEQAQDEWVAEQIIRDVTDGELEHDDILVVLPSAYTSKRRYVRLARTFEEKGLPSHLVGVNNSTDEVFIRGSIAVAHIFRAKGNEAPMVYVVDSQYAGAPFSEVSRRNTIFTAITRSKGWVRVCGWGPAMAGIAGEVTQVQQADFKLRFTIPSAAELAEMRRVNADLQPDNAAARGLMTLEELAGALERNEITAEQLPPKLVRQLNQLSIPDDDL

SEQ ID NO: 1700 - protein, 712 aa, synthetic construct; identical to SEQ ID NO: 1699
  REGION 1..712: note = TnsF-Tn7 System Protein

SEQ ID NO: 1701 - protein, 110 aa, synthetic construct
  REGION 1..110: note = TnsF-Tn7 System Protein
MIEIETTWNLRAVMATRGIFQTTKLGPLLAERGVELSREQIFRLVTATPSRVSLHVLAALTDALDCSMDDLVTVTRREIAVRKAVGEAEPSQGIGDLRPIRANIRRPREQ

SEQ ID NO: 1702 - protein, 334 aa, synthetic construct
  REGION 1..334: note = TnsF-Tn7 System Protein
MKDRVRRRVRLNVELLEQPWVRSLFEGFCAWEGLPKVAGNMTRRIDQYAVFFAEIDRSCSAPQEVNQKRLFEIFGAEGLRRGFLPVSFLSQRLAFEWDASALENMIELRRIHEHEQTWRDRPWAIGLQRYMAELWACTSPTLRAKTIRMYQAAAASFVQVAGVETLCAITQSHLDRYLKRHPGQAANLSAFVRHLRQFWNANLELPKKAEVPRFKKDQALVRRVQSLTRSLESVSDGRTARALIAALLAALYQVPLKDVLALSAGDVTEEDGAFVLWPNTRDVRTDGRLAELFRRWLPMPQAGGLLFVGRNGLQPLSDHAVRHHLQVSGVSVSR

SEQ ID NO: 1703 - protein, 222 aa, synthetic construct
  REGION 1..222: note = TnsF-Tn7 System Protein
MTGLDLMRPARTIGMSRRSITGRVVFGTKSIPFESALERDFLVLLDFDLTVEDVLEQPVRITYKGADGRERSYTPDFLVEYRNGDRVVYEVKYRANLKEEWATLKPRFRAAIRYARQNGMRFSIATEVEIRGSSLLTNARFLRPYRDYAPNLAIDEHLIKTLTGLGETTPEALLTAAYWTLENRIKAVAPLWRLVATRRIHADLYEPLTMATPIWTTFEEGE

SEQ ID NO: 1704 - protein, 355 aa, synthetic construct
  REGION 1..355: note = TnsF-Tn7 System Protein
MIDSPWPYRVPLREDELLSSFLIRNAHVHGTTPYRFLSYFWPDRHIWNRDTDRTADSIWLNELELLAGVPAGSLEASTLLPFRRVLGSMLHNGDTPLLLSISVFHRTRRRHGLQFCPACLAEGRHWFRRIWRLGFVVVCPEHCIALLDACPACGSPVVPHRSLRLDLTRCHRCDAFLGSQTRANLPAAGALEWQTHLLGALSGSSQDVGPFSAAEAFATIRSLLSILTARSIHSALRDAFHLPPATLPASRLQFEHARTTERALMMETLAAWLASWPETFRIGANTVSLTQRTLQRLRQPPTLRMEVKRLPVGNGRNRQYVPKVFDRKLLRLARTDRKAYRALRAERLQALAGLA

SEQ ID NO: 1705 - protein, 643 aa, synthetic construct
  REGION 1..643: note = TnsF-Tn7 System Protein
MKEAAFLSMQPGSFVAFEGRRFKITHVLGIDSVLAKNLDTNAIERLRVDLIRPYGEDGSADGLVAVGQDIEDICDEDWKEAQRRFQAIKPLLEDPSRTREKVQQVAASEGVSTGTLYEWIRTYNESGQVSALIPQKRGRKRGHKGLDEVAETIIQTAIKEIYLTKQRQRPQDVVDHVAYLCRNAGIEAPHANTVRNRLKELRPAKVLRARGMGDKAQNLFAPIMGKFPGADFPLAVVQIDHTEADVIVVEENTRLPMGRPTITLAIDVHSRMVVGCYVSMEKPSAVAAGMCLARAMMPKNEYLADLDVPGDWPVWGKMNTLHCDNAKEFRGAMLAKACRQYGIDLQLRPVKVPRYGGHIERLMGTSADEIRKLPGATFSSPKERKGYDSEKESALTLREFEQRLVDFIVNIYHQNEHSELRVPPRRQWESGLLGDSFQPGKGIPEIPSDPRRLRLDFLPFVERTVQPYGIVIDEIFYYHEVLNPWINARDPTRPKEKRKFIVRRDPRDISAVFFYDPEAHQYFEIPYRNTAHPAISVWELRAAQQRVKEKGRAHVDEETIFEAVGRMRERVEAAITKTKAARRQLHRMKTTQQSAKARQIKASTVSASPPPSSSSTTVPASSSLDSDDIFSMPIRPFDDLMVK

SEQ ID NO: 1706 - protein, 234 aa, synthetic construct
  REGION 1..234: note = TnsF-Tn7 System Protein
MALLEMKDVRGGYGDADILQGVSIAVGEREIVVIVGPNGAGKSTAMKAVFGLLSVRGGSVVFDGEDITGWAPHRIVQRGICYVPQVDNVFREMTVHENFEMGAFLRRGELAAAFDRVYGLFPDLKAKRRSLAGDLSGGQRQMVAMGRALMLSPKLLLLDEPTAGLSPKYMEQIFRIARDVRDAGVSILLVEQHARQALAFCDRGYVLATGANRHEGTGRALLADREVAEMFLGG

SEQ ID NO: 1707 - protein, 234 aa, synthetic construct; identical to SEQ ID NO: 1706
  REGION 1..234: note = TnsF-Tn7 System Protein

SEQ ID NO: 1708 - protein, 279 aa, synthetic construct
  REGION 1..279: note = TnsF-Tn7 System Protein
MLEVDGLVKAFGGFRAVDGCTLRVNEGEILGLIGPNGAGKTTLFNLVAGALPPTAGTIRFRGEDVTGLTTAARFHKGLVRTFQIPHEFHHLSVRENLMMVPQQQPGERLFANWLAWGRVQRAEAVVRKRADETLAFLELTHVADERAGNLSGGQKKLLELGRTMMTEARLVLLDEPAAGVNRTLLRKLEDKILTLNRERGYTFILIEHDMEMIEKLCRPVVCMAEGKVLVEGDFHAVRSDPRVLEAYLGETPGGVARDAAGHDPVVETLRAQALPREEL

SEQ ID NO: 1709 - protein, 279 aa, synthetic construct; identical to SEQ ID NO: 1708
  REGION 1..279: note = TnsF-Tn7 System Protein

SEQ ID NO: 1710 - protein, 296 aa, synthetic construct
  REGION 1..296: note = TnsF-Tn7 System Protein
MSDLDHLEPSVRDAMSLPTEERVAFVQQDRWIGYTRAQEALRSLSDLLAHPRTLRMPNLLLVGESGNGKTTIIEKFRELHPVVSQPGGEPLAPVVVMGMPSEPVETRFWTELLLALKIAHRDSDPVQRKKNQAHSILTYVQCRMLVIDEIHNVLYGHARQQRHFLGVLKNLSNDLKLPIVAVGTRDAIRALHTDTQLSSRFEPFGLPKWQLNPEYLRLLASFERLLPLAKPSNLISRELAIKLHGMSGGTIGGLSRILKRATIQAIRERSEQITLKSLDQIEWVKLSDYGKQAQTL

SEQ ID NO: 1711 - protein, 296 aa, synthetic construct; identical to SEQ ID NO: 1710
  REGION 1..296: note = TnsF-Tn7 System Protein

SEQ ID NO: 1712 - protein, 267 aa, synthetic construct
  REGION 1..267: note = TnsF-Tn7 System Protein
MGRSIRAAVQLLAWLRETSKSLATCTQSDIDRWVTEGPWLRHIARTFLLWAVEHRHASGIEIPLPAREDEMTGIEQTRRWELVRHLCRDEAIDLADRVAGLLVLLFAQHLSHTTPLTVDHVAHVRGVVSLSLGSHPLEMPPPLDTLILRLVNERKGFAVVGQTDDHPWLFPGAFAGRPMTNKQLMRRLHRLGIRTKPVRNTVLLDLAAELPAVVLSRLLGINIQSATQWTQRSGASRNVYAADFSRRPVPGGAVPGPPGRGGGGPVP

SEQ ID NO: 1713 - protein, 782 aa, synthetic construct
  REGION 1..782: note = TnsF-Tn7 System Protein
MGERPGVPLAPELVLETDTGSTVMTPNRNYRVGRDPLCDIAIDDARVSWHHAVLRADAGHWTLVDEGSKNGTYDGGRRVQVCAVGPGSVLRFGNPMTGPCAVVTACHQGSPAAGWLEGPSAVVEPSSTGAFRIPTTVRPRPRQTVRIGRERDNELVIDDDLGVSRHHAELRAHADGTYEIVDLGSHNGTFLNGRPVGHALVAEGDIVGIGRSAFCLIGDQLREYVDSGEVSLNVHDLTVAVDGGRKTLIAGISLPVGAKCLLAVVGPSGAGKSTLLNALTGLRPADHGTVLYDGRDLYRDYAELRQRIGLVPQDDILHTQLTVRRALVYAAELRFPQDTAPAEREARVDEVIRELGLQERAEQPIHRLSGGQRKRVSVALELLTKPSLLFLDEPTSGLDPGMDRSVMAMLRGLADDGRTVIVVTHSVLSLKVCDRLLVLAPGGRTAYYGPPEDALGFFGFSDWPEAFEAFEADRVRDWAGEYRRSPQHRQYIEAASARQPARQAPPGVSGPLPRRQTWTAQLRTLVRRHAAALRADRLFVAIMIALPFVMGLLTRALVGGRQLAQESVTRTLLILCVGAVLTGAANAVRELVKERVIYQRERAFGLSRSAYVMSKVIVLGTITVLQAVVLTLVALAGIGLSAPGGHGVFMAPLLEITLAVALLAFTAMMLGLLISALVNKEEVTMPLLVFLAIVQVVFCGALLPIHGVFGIVAWLVPSRWALAAMASTIDLTRIAPTAADPLFHHTATTWLQNMGILIVFSAVLGYAVTRLLRHHEPAIMRR

SEQ ID NO: 1714 - protein, 782 aa, synthetic construct; identical to SEQ ID NO: 1713
  REGION 1..782: note = TnsF-Tn7 System Protein

SEQ ID NO: 1715 - protein, 354 aa, synthetic construct
  REGION 1..354: note = TnsF-Tn7 System Protein
MLDALPPSMMLHHIRRLLIFAAVLPPRDEYLDRITPWLREQLRDRPAHHTHLVRPYAEWDVLHRARRAARARRGAGIGTANNARLRISAALGLLSWLDQRGLLLTDLTQPDLDLWLDQPGNRSKPMGGYLGWASRRHLARRLTVPPARRGLACALIDETQRLQQLRRCLNDNGMPLPVRIIGVLNLLFGITTSRALGLTIYNIATNANHTYVNLGKHSLELPPRVAELIHQQLANASTPTNAPETARWLFPGQLRVYPITPGHMQPARRVRHRHQRRTPRSPHRPRRRPAACCTCQPAGRPRQHRDRLGSPRPAGLVDIPCGTRHRTGRRSGNNPSSTATCSSLGRSNVMHWLP

SEQ ID NO: 1716 - protein, 354 aa, synthetic construct; identical to SEQ ID NO: 1715
  REGION 1..354: note = TnsF-Tn7 System Protein

SEQ ID NO: 1717 - protein, 349 aa, synthetic construct
  REGION 1..349: note = TnsF-Tn7 System Protein
MALIRRLAEFTNQYPWQWACAELEAFFDMLRSAPRPAALSTLRGYQTTMRLFQDFVTDTRYGWPQACRERFGQAPAAVLHEWNSMVHAVEYEGRPGRRPLTYDEVQVLFDTADQRVDDIRSRGRKGALVAVRDAAVLKAVYAYGLRRREACGLDLADLRHNPSMPAFGRFGALFVRLAKASRGSAPKRRTVLTVPEMDWIVAVLDEYLTEVRPRLAPAAHPALWVSERTARLSVYRLGRVFEIVRDLAGLPEELDLHGLRHSYVTHLVEFDIPRSSFRTRSGTPSPRRRRSTPACRTSSVTNCCATNCASINPAWRRAGETENGLPVEPASGDGRTRNVRHHGPGRAVG

SEQ ID NO: 1718 - protein, 94 aa, synthetic construct
  REGION 1..94: note = TnsF-Tn7 System Protein
MFATTDLVGPLAERGVVLSREQVFRLVTQPPQRLSMEIFAALCHIFDCTPNDLIEIEVVNTPVRKAAGGGPRGGEKAAVAPTGRRVAVRRPDLS

SEQ ID NO: 1719 - protein, 253 aa, synthetic construct
  REGION 1..253: note = TnsF-Tn7 System Protein
MVRSNIRGAVALLAWLREHGTDLGHCTQAHLDEWTCGGTSIRFAARSFVEWCRKNRHIRPGLTIPPRETSAPIRPLDEDERWTLCRRLMHDDSVAIGDRFAGLLVLLYAQPLTVISRLPITSVIVEGTKTSLMLGEKPLLLQAALDTIAQQLLARRRGHITIGVTEDSPWLFPGGYVGQHLSDYHLGVRLTRIGIHSRSGRSSALSTLATQLPATVLTDLLGISIETATAWTQSGGHRARYAAELPGCPHPRA

SEQ ID NO: 1720 - protein, 253 aa, synthetic construct; identical to SEQ ID NO: 1719
  REGION 1..253: note = TnsF-Tn7 System Protein

SEQ ID NO: 1721 - protein, 306 aa, synthetic construct
  REGION 1..306: note = TnsF-Tn7 System Protein
MTALVDAHPHLGVEPVLRELSIPSSTYYRWRQAEKEPCKRRRQDAELTGKIRQVHADSGGIYGSPRVHAVLRREGIHVGRKRIERLMRQAGLAGISPRRGKGFTRRDPDAEPAPDLVQRDFTANVPNRLWVTDLTMIATEEGPLWLSAIRDAFSRRVVAWETSARADADLVLTTLEYALASREVAPGELIHHADHGCQYTSVKLTTRLVRAGIQASMGSVGDSFDNALAENLWMVIKTECIRGRVFPTRAEANLTLFEYIDGFYNPRRIQKRLGYLSPIEYEEKHYASQATAEQVNLKPRQPSLTS

SEQ ID NO: 1722 - protein, 106 aa, synthetic construct
  REGION 1..106: note = TnsF-Tn7 System Protein
MKWNLRLAAAQRDIWKSSQLQAMLADAGLVISAGKMSNLWSGQPVTIRLDDLDIICEVLGCEPNDLMVREPEKARAQRPASTPTRAAVAGEHPRLERRVGRTEPPL

SEQ ID NO: 1723 - protein, 636 aa, synthetic construct
  REGION 1..636: note = TnsF-Tn7 System Protein
MQLTRVRSRLYRNIVDSGDVDIAPDVTALVGKNESGKTAMLSSIYRFHPVYPEHSFALGQDYPRWRKVKDTRSGQITDAKPITCTFTLDDEDLKAVADVLGPGVITGRSYARSISYDGNHVLDLSIDEGAALENLYNDEEVPPALRSALGTRSLGAALEQAEGLEAAEDSDYTAADIDLFARAARQRLADRGSAWRRAAQILRDREPKFFYFSSYQNLPGRIALTDLNGQEEQPGASPVQTARALLELASTTAGALSAEDFEDRKAELESVSNDITQQVFEYWKQNPDLSVEIDLDKTTIQQPNGQHAIASHLEIRVKDRRHGFTNNFSARSTGFQWFFSFLAAFSEFENYPHGVVVLLDEPGLSLHGRAQADFLRFINERLAPQAQVIYTTHSPFMVETARLDRVRIVEDRGPATGAVVTDEVLSVTDDSLFPLQAALGYDIAQNLFVGPDNLLVEGTSDYTYLTLISDFLKDAGRTHLDERWRILPAGGATNIPAFIALIGTNLQATVLIDSTPAGVTKLRTLTNKGLLSPKRLLLTDTFSDGVKDSDIEDLFSPGDYLKLYNAAFGTRLKVSDLNGTDRIIARIGRANGASFNEHGRPADVLLRKRDTLLPGLSETTLSRFEQLFTAVNGTLT

SEQ ID NO: 1724 - protein, 636 aa, synthetic construct; identical to SEQ ID NO: 1723
  REGION 1..636: note = TnsF-Tn7 System Protein

SEQ ID NO: 1725 - protein, 187 aa, synthetic construct
  REGION 1..187: note = TnsF-Tn7 System Protein
MTEAAHGTVGTSDTRLIVLRGNSASGKSSVAAGLREKFGRNLAIVAQDNLRRIVLRERDRPGGANIGLIDLTARYALDNGFHVVLEGILYADRYGTMLQDLVRAHQSVRRCYYLHVPFEETVLRHATKPDAEYLAHVNEGHLRDWYREKDLLPNGMETVIDAASTLDDTVQQILSESGLNGILPIDR

SEQ ID NO: 1726 - protein, 187 aa, synthetic construct; identical to SEQ ID NO: 1725
  REGION 1..187: note = TnsF-Tn7 System Protein

SEQ ID NO: 1727 - protein, 177 aa, synthetic construct
  REGION 1..177: note = TnsF-Tn7 System Protein
MVGSEDTRLVVLRGNSASGKSSVAAGLRERFGRGLAVVGQDNLRRIVLRERDRPGAANIGLIDLTARYALDAGYHVVVEGILYADRYGDMLVQLRADHRGPTHGYYLNVPLDETLARHATKPIADDVSEAQLRDWYRPRDLLPDGLETVIGADSALHETVDRILLETGLAHLPALDR

SEQ ID NO: 1728 - protein, 177 aa, synthetic construct; identical to SEQ ID NO: 1727
  REGION 1..177: note = TnsF-Tn7 System Protein

SEQ ID NO: 1729 - protein, 385 aa, synthetic construct
  REGION 1..385: note = TnsF-Tn7 System Protein
MKWKIGYSWRLREVMATRKIFTATELVPLLKERGIDLSASQVHRLVSGTPERLSLQVLSAFCDILGCTPADLITTTAENRRRPQDRHRRPPGAACGRRQATAPSSPNPPERMSRTYATDEQYERWFKKTCARCGNRHFASGWWPDGPVCRTCHDRALLVRGTCPRCGHHRVLAGVAPDGQPICTDCAGFRTSYRCRRCGHEGKLHARKLCTRCTFADQLTELLGDDTGQILPELAPLFEVLVGMDNPLTGLTWLYRPHVPRFLRGLVTGEIPLSHKAFDTLQPWRAAAYLREILMGCGLLPAVDKQLLLFDRWLAEHLSAIDDQAHRPVVQQFATWKVLPWLRTRAERGPLSPSTRRNAGAQIMRATYLAGRAQPGTAELHPGRA

SEQ ID NO: 1730 - protein, 385 aa, synthetic construct; identical to SEQ ID NO: 1729
  REGION 1..385: note = TnsF-Tn7 System Protein

SEQ ID NO: 1731 - protein, 350 aa, synthetic construct
  REGION 1..350: note = TnsF-Tn7 System Protein
MLAGFANQQLARNLARSTVEGRENTVKAFADYVNAFPWQWSAAMVDEWLGDLRSLRDLKHSTIRSYSEAVRAFCHFITDPAYEWSTTCEQRFGTHPIQVVHEWNTAAHVQAGEADPKKRAFTKKELHDFFAHCDDQVARIRAFGRKGWLPAFRDATLFKTAYAFGLRRNETRMLDAADFGRNVAGSEFGEYGLCRVRFGKAKKGSPPKQRSVMTVWDWTRDILEEWFTEIRPLFGADDNPAAWPSERGLRVGCQRLNSRFIVYRKELGLDDAVDFHSLRRSYVTHLIEAGWDPRFVQVLLSPIEGVRDVHHAAGTGGNLRGGGGYLRPSITQIPRRFDACAAGADARFIV

SEQ ID NO: 1732 - protein, 235 aa, synthetic construct
  REGION 1..235: note = TnsF-Tn7 System Protein
MDDEGIALADLNQPTLDRWLCQGKQHRRDIRQFKQGAHRHKLARRLDVPRSRVEQPSVFIEDDERLQQLRRCVEDETIPLAARVVGSLVLLLGLQISKILRLTTEDVSLNGSTVRLHLNDHHVDLPPRISALVGQRLEQAEAAWENNRTASTTPWLFPGHNPARPLGLQSIHIQLRKHDLKGLAGRNTARLALAANVPASILAEVTGTSVSNATRWATLAKRDWTGYISSRRIGG

SEQ ID NO: 1733 - protein, 711 aa, synthetic construct
  REGION 1..711: note = TnsF-Tn7 System Protein
MTTPRSVALERLAYTLAAPVLAVAPNLYPDSPVNQVVQLAGAAGIGGWFLAAKSDEHGAGRKILRWSPLVLAAAIDVTAKTTTGFGPYWMDGLLAAGWAAAGYLVMPFSRHTRRRHRPALAAPAPQPAPAEVLEEPVVVDDGADLLTRDARMLWEQAGMPGRTHIVKATRHPGQQHDMTILLRASETGRPITGLTEAAVAAPFAVHSGDVVLAEVAIQPGRQGGPGWMEAHITPDANQRRRAKPTDQERWTDKVGSPKGGAPGSELVHKSRDDVRGVTFYRAKMADATTSPRIDLAKVCRGLKLPEDDSCVFVLIDGIEFLISAFDKPPLSAIFPATRELLTSDAKGMYVCGYTITGQPVKNMVFQHDKNAARHGLILGVSRSGKTQFFAIDMAAMSLAGQVVWLSTVRKDEKTSTLGKYIDRQGSNALWMARSLRAAKALCEIRAEMPWPHDGEAHDYKPGDARCPYRQLNVFADEFMTAAQDAQFGEFIQTDGDDLTVTGLKYGIGFNPAGQSPFAHNGFSTEMKDNLRQNSRPTIFNMGSPGATRKAAEGTMENAYDVPTIPARYAQQEGSAIERAMRGEADPENGVSTGGVAIVVMDNGRAVLMRSLYADFDTNLAALFPDDVNRLTDHEISELEKRGLWFDWNEPVRPGEFWPEPEEDDGDDGGSRRRGGGGGKGGGRGSKGGSRRSTEVVSARKALEAIKSLTDA

SEQ ID NO: 1734 - protein, 359 aa, synthetic construct
  REGION 1..359: note = TnsF-Tn7 System Protein
MRRRRTAQICPGCGEQKVLAFYDEQRRPACTACTGNTSSFACRDCGREDNVFGACCATCTLRHRLTALLSDDTGQVHPQLRPVYNTLLTGPRPQTTLYWLTRRSSRPDILRLMARGEMAISHAAFDDLPCNRNVNYIRDLLAATGVLPPYQPLVARIPSWLGDLLTAQLEIPKPPTSLPEVVLSDEQRWDHVETLLHDDTIHLYARIGGLFMLLFAQPVSRICRMRAHQITTHTDAVTVTFDTEPIELPDPLDQLIRDHLTRPGWASYVSRPDQWLFPGGVPGKHLTTESMRSRLVARGIHPSHARKAAMFQLAAAMPVPVLADLLGLAPQTAVRWAALSARDWGQYTAIRHDGVAAVR

SEQ ID NO: 1735 - protein, 359 aa, synthetic construct; identical to SEQ ID NO: 1734
  REGION 1..359: note = TnsF-Tn7 System Protein

SEQ ID NO: 1736 - protein, 375 aa, synthetic construct
  REGION 1..375: note = TnsF-Tn7 System Protein
MLNKIPGAAGLVLVEGVRHLDEPAAVFDGMLAGWTKQQAARMLSRSTIDPRIKLVRRFVEFTGSYPWAWTAADVEDFTVSLTSETGGRLAVSTIRGYHLTLRMFCDYLTDARYEWVRQCRDRFGQVPVQVCHEWNTVVHLTDYEGRPGRRPLSYSELQQLFDFLDDRVERIAGSGRKGALAALRDAQMVKAAYAYGLRRNELCRLDVVDLRPNPHVPEWGTYGSVHVRYGKSTRGGVPRRRTVLTVPEFDWVVAGMRQWVEHARPIFAAGDHPALWLTERLTRIDAHFLERRFARIRGEAGLESDLTLHCLRHSYVTHLIEFGYPERFVQEQVGHHFASTTAIYASVSSDFKNKTLRSALSRVYAPKHGRGKEDR

SEQ ID NO: 1737 - protein, 106 aa, synthetic construct
  REGION 1..106: note = TnsF-Tn7 System Protein
MRWHLRQMMATRGMFQTSELVPLLAERGVNLTRQYVHRLVTTAPQRINTDLLAALCDILDCEPNDLLEPAVEYDQVAATGTDTAADEGLEIGTLRPIRATVRRPQP

SEQ ID NO: 1738 - protein, 292 aa, synthetic construct
  REGION 1..292: note = TnsF-Tn7 System Protein
MHANGRCSRCVTAQLLDATLGGHDGQIPDQLRPLADALAAAPDPRSVAVWLARSDAARLLRTLAEGGETVTHDLLDALPPGRQVNYVREILVRTSVLPVRNERLERLVPWLDHYLADQPASHALLVRNYAVWYLLHRARRSPRPLVTAGAARIRRRVRIALEFLTWCDARGRSLTDIDQGDVDTWLATGDWRRPEVRPFLHWTTQRRITDAVSAPAPKPAPPSVFIDEATHLEQMHRCLHDDGIDIDLRAAGALILLYGIATWRVLNLRRNQVHTRDGETFLVLRDHELLLP

SEQ ID NO: 1739 - protein, 292 aa, synthetic construct; identical to SEQ ID NO: 1738
  REGION 1..292: note = TnsF-Tn7 System Protein

SEQ ID NO: 1740 - protein, 370 aa, synthetic construct
  REGION 1..370: note = TnsF-Tn7 System Protein
MSIDLPGSAALSLVSKVASLDPQEAVFRAMMAGWSDQQRARVCLPPTILARASVVRRFGDFTGTHPWQWTAEDADAFFSSMRSGSSPKAVSTLRGYQNALRLFCDFITDRRYGWAALCLERFGQPPAQILHDWNTVTHVTEFEGRAGRRPLSYDEVQELFDAADGLVEAARSRHRKGSLSALRDAAMLKTVYAYGLRRQEVVGLDIVDLRSNPKVPAYGRFGGLFVRHGKGSHGDAPKRRTVLTVPEMDWIVGVLEHYLDEVRPCFRPGRHPGLWITERQGRLSKRSANEAFTAARDAAGLPKELDLHSLRHSYVTHLTEFDYPERFVQDQVGHAYASTTSIYSHVSDEYRNRLLRAALTKRGVITEGEP

SEQ ID NO: 1741 - protein, 108 aa, synthetic construct
  REGION 1..108: note = TnsF-Tn7 System Protein
MIRKMGCQWHLRTLMAQRGMFQTTELVPLLAERGVALSREQVFRLVTQPPQRLSMDVLAALCDILDCTPNDLVEITVVNAAVNKVAGGAAPSPPKVRRTTVRRPDHTR

SEQ ID NO: 1742 - protein, 185 aa, synthetic construct
  REGION 1..185: note = TnsF-Tn7 System Protein
MTDLPAHHFRYLRPFIEWDVLRTARRTAARKRYTISSATLDRSKIRSAIQFLSWIEQQQTDLASITQAHVDIWLTTGPPTRQRARAFLRWTTARKITTPLTIAHQSPALPTRFLDEEGHIDQLRRCLTDSAMPTEARIAGALVRLYAMPLTRVVELTADRVHHHTATPSSPSARTRCSYRPASPR

SEQ ID NO: 1743 - protein, 733 aa, synthetic construct
  REGION 1..733: note = TnsF-Tn7 System Protein
MDEVDAAARRKQVGAKAREKLDALEALLQQGEILIGAPEALRERASELADALIEAQVAQRLRATSLNELRGVVGKGVRFGKLEAAGYRTVADVRSKPVSSLLAVQGVGENSAKAIATAAAQVARQFRQDAVIRFDVAQRPGRDTKLLGSLVKLRAAEQAAKRLRPDVERLRDEAAPLLVEARRAGSKFRMFFAGKAAKNAALAALRRIEALLAGPGVAALRREIASAETAVAAAGSRADEVWRSYENSAADINSLLATLSGARRADDTEAAHGYASSDLTRKIQAVPLDTSHLTATLRGYQVFGAQYAITQQRVILGDEMGLGKTVQALAAAAHLAANGQTLFLVVCPASVLVNWINEIDKHTVLKAQQLYGSGRDAAAETWARQGGVAVTTYTTLGRLRLPKVRLSMVIVDEAHYVKNPEAQRSQAVLAVVRQAERALFLTGTPMENRVEEFRNLVGYLQPGVAAKVRPLDALGGARAFRRAVAPVYLRRNQEDVLRELPERLEMDDWVQFTDADERNYRRAVSSGNYMAMRRAAFAGGKGRSAKLERLLEIVEESAASGWKVIVFSYFLDVLDCVLDAVRPVAFGPLTGSSTPRQKQDLVDSFSRHDGHAVLLSQVEAGGVGLNIQAASVVIIAEPQWKPSTEEQAIARAHRMGQLRKVHVHRLMAKDSVDERIREILEGKTRLFDAYARKSSAKESDARAVDTDWHSEEAAKHQIIEGERRRLGLGRVQD

SEQ ID NO: 1744 - protein, 733 aa, synthetic construct; identical to SEQ ID NO: 1743
  REGION 1..733: note = TnsF-Tn7 System Protein

SEQ ID NO: 1745 - protein, 110 aa, synthetic construct
  REGION 1..110: note = TnsF-Tn7 System Protein
MIKKMGYEWHLRQRMAERKLFQTTELVPLLAERGVVLSREQVFRLVTQPPQRLNMDVLVALCDILVCTPNDLIEPAVVNQQLRKTAHGVAPSADAPPPVVRRTVIRRPGQ

SEQ ID NO: 1746 - protein, 246 aa, synthetic construct
  REGION 1..246: note = TnsF-Tn7 System Protein
MINGVLFRQRTGVPWRDLPARFEHSDRARDSVKPFLMWCASNRLTRRFRLPGAQIRRGTQLTQQQRMKMLGQLFTNESLPLRSRVAAVIVLLYAQPVTRLVRLTIDDVTTDSDQVLLRLGEPPSPAPVPFADLLLRYIASRANMRTATNPGSRWLFPGRRAGQPMHPEALSALIKVLGIPTIAGRGAAIRQHVLEVPAPVVADALRYHQVTATRLATQAGGPWSRYAPGDHTRSPASPSEPRTRDS

SEQ ID NO: 1747 - protein, 192 aa, synthetic construct
  REGION 1..192: note = TnsF-Tn7 System Protein
MPAPLESFIRWTVARRLTGKLVVHRTRSGFPSQFLTEDARDQQLRRCLNDDSLPREARIAGAPTRLHALPTSRIVQLTTDRFHRDADGAYLTIDKNAVLLPPRLARLVEERIARPSDGLSILRQPSSDQPRFLLPGRPPSRPRSASWIQTLLKKHGLPVIHARNTAMTEAVTGLPPTVVGDLFGVPPGTAHL

SEQ ID NO: 1748 - protein, 835 aa, synthetic construct
  REGION 1..835: note = TnsF-Tn7 System Protein
MASAPLPRVAVEPERVIVEAVLAAEPDLSAPLVEAILVATVKRRPARRELAEALMADPGLLTSGRPEGPRAVERLIRALLDQGAVNLKLPCCARCGNERPLKAWDGDQRICGSCLARRIAVANPCVICGSRNFSGRDHLGRPRCRRHTPDEGLDVLTDLCKRISVLAPGLSHLDIADAVRTADSSRNGQTRLLRALNKVPGLLSGDGAHGPPRTIRLIKALADRGASALVIPPCPFCHRDVPLSHTRQDLRCCTLCWRATRTQECSRCHRERWIASRTADGAPLCGPCGQTDIINQLPCTSCGNTAHIVQRTEDQALCQRCYQRPTTTCSTCGQLRPCYYATTSTPRCGPCHSKAQPHKVCTSCGTERRAVYRTPAGDPLCTPCGAPRVPCVTCGHTRRVAGRTAQGEPLCEGCWERHPRARRPCTTCGAVERLYHHGLCTACAAQQTLLSLLTGPDGAVREDLTPSLHAMRLLPPAAVLRWLRGVPALRAILKELASAQGPVTHQTLDLCHPPKVVSALRAVLVAGGALPDRDEHLAALEQWLPRTYARIENTADRKSLRNYTAWNPMRRLRRLPSGKKVTHGQADAVRHEIRNAVRLLEWLRAQDLALRDCTQDHLDAWLADGPDARALVRSFLLWAHRHGHARPLDAPSLNSNAAVNLIARDQRWSMVRHLVQTTSLDVVDRAAGLLLLLFGQPPSRIIQLTTDHVVDHGDKITIRLGRTPAELPAPLDDLIRQLVDRRQGHAAARPAEESKWLFPGGLVGRPLSPAHLSKRLKAAGVRPRLARNTALMDIASELPAAVVSRLLGVHQNTADAWRLESEGPGAAYAADLIRR

SEQ ID NO: 1749 - protein, 835 aa, synthetic construct; identical to SEQ ID NO: 1748
  REGION 1..835: note = TnsF-Tn7 System Protein

SEQ ID NO: 1750 - protein, 368 aa, synthetic construct
  REGION 1..368: note = TnsF-Tn7 System Protein
MSGTVASESSARLVLLSGVSLLHPEEAVFEAMLEGWERQQRGGRQLQPDTVRGRLNLIRRFGKFTNRYPWQWAAADVDEWMTHLTSELHRAESTIRGYQTGLRLFCDYITSPHYQWPAECESRFGTHPVQVCHEWNTVSHLVDYEGDPDRRPMTREEIQLFFDYADDQVDRAIRLGRKGALAAYRDATVFKAIYGWGLRCTETSKLDITDFYRSPKAPELGRYGSLHVRYGKRSKGTPPKRRMVLSVMPWAVDAVEDYVVNIRSRYTSASKKPALWLTERGGRLRPREIEERFAAYRDALGLDKELVPHCLRHSHVTHQIEDGADPTFVQNQVGHRYPSTTALYTGVSGDFMNTMMRKVLDRALNNGQ

SEQ ID NO: 1751 - protein, 115 aa, synthetic construct
  REGION 1..115: note = TnsF-Tn7 System Protein
MTAKLDYRWHLREIMATRGMFSTTDLRPLLAERGIDLSPSQTYRLVVERPERLSLKTLMALLDILGCTMNELIEPVAVPRAGRRKAAAGGTIEQPGQGPSGVGDFRPKRARIVPE

SEQ ID NO: 1752 - protein, 922 aa, synthetic construct
  REGION 1..922: note = TnsF-Tn7 System Protein
MPPDSRPSGIRAAQREATRQRIVQIAVELLTTRGLAATTTVRVQRAGGFSRGALLHHFPTREAMLGATIRALMERNEAAVRQAEVEVDAAAPANLDRVERAVRVLCASVVRPAFIAELELWAAARTDSALREVLRCEEKRARRDLYRVVAEVFGEDVVADERYPMVASLTVQFLRGLAISNVLRGERRGTERLITDWAAVARAILAGSLPREPCWVCGKVVLAAVHTEEGAWCERCRQAHLAEPCSRCGRTAPVAIRDEGWPVCKACYQREHQRPLRRCVDCGEDKPAARLTDEGPLCERCDNRRAPKVLCPRCGKTRKVGIVSTGGCRACAQRAIPRQPCCNCGRTRLVVYRDADGEPWCDRCRRRAQAEPCSGCGARKVVCSRDHNGPWCKACWEVVRPGPPCDDCGQRPSMPMPGADGVARCVPCHLAAQVPCARCGTTARAERHWPEGPVCLSCVDAVRLTHARCHRCGELAGVFRREAAGPLCPDCAGVTFSYQCPTCGAMGRLLRGQCPSCTARRDLGEVFTQPDGQPAAWLAPLAELLENYDNPYSLCLYLRRPGGQLIRRLVTGELACTHQALDELRQTTAVQHLRGLLVLAELLEPREEELAQLTRDVQTLLERATTPHDKTILARYARWHLMPLVHQHAEQDACFTYYQREHLRRKLDGARLLLSYLGTRGTSLATLTQPVVDRWLIRNRPRQHHARSFLLWAATNGLAPAHVAIGTSRHTGDREIMSDTDRVLLAVTLETDDTLPLADRVAGCLVLQYGQSCWRLVNLTADDVLAHPDEPGILGLRLGRDSLWLRPRLSALLHRLVTNRRPLAGALRDRPTPYLFPGLRPDRPITSATLQTRLRKLGVPSVRTARNGAWLSLVGSVHWKMLADLLGVADTTASAWHRENGGDRASYVASRLRQGQRTAGPE

SEQ ID NO: 1753 - protein, 922 aa, synthetic construct; identical to SEQ ID NO: 1752
  REGION 1..922: note = TnsF-Tn7 System Protein

SEQ ID NO: 1754 - protein, 289 aa, synthetic construct
  REGION 1..289: note = TnsF-Tn7 System Protein
MITALANALPDRQDLDISLMLDTVRAATGIPLGHLAEHLACHPDALISGDPRCPVVLIRLTHALYDAGQPVVRPGCAGCGKVTLNLAQCGSGGLLCQMCRVRTRLSTCARCGREDTRIAARRAEGGICFPCYRVDPEVVEECGRCGRTRMPVTRRGDGTPLCLGCWTPPVHRCIHCGQDRPARVSGPDGSICRDCYRQRPRRCGRCGGVRVISKRATHGNPDLCGACNRGPDMPCAGCGQTRPSRRYRPDAAAAENSFGTCASPTGQPAGPTATSSTRWTTAPGCWRAG

SEQ ID NO: 1755 - protein, 289 aa, synthetic construct; identical to SEQ ID NO: 1754
  REGION 1..289: note = TnsF-Tn7 System Protein

SEQ ID NO: 1756 - protein, 107 aa, synthetic construct
  REGION 1..107: note = TnsF-Tn7 System Protein
MIKKMGFVWQLRLRMAEKGLFQTSDLVPLLAERGITLSREQVFRLVTQSPQRLSMDTLAALCDILGCQPNDLIEVQVVNTEVRKTAGETTTPAPQVRRTTIRRPEGL

SEQ ID NO: 1757 - protein, 314 aa, synthetic construct
  REGION 1..314: note = TnsF-Tn7 System Protein
MRRTSDVLAMSLHANWSRQWLVGFADWLLARERPHPHSTLRFRRHLGFFQRLDATYAGPQDVTPASLLGLWSIAELRRKLLPMQYLAEQHGIVIAAEDKLAAAERHRIAAMRTNAQETPWNPLVRAYTDTITESQLNLRTQRQYIHAAVTFCAAVGATAEQPWTDEAMSQYLERQPSTYTNLCRFVRFVRELHSWPVTMPAKPHIERTVPASVQVFRRLLGRIPDGEPERAPVLLLQRILSRAFSIRVADLSIPDIQYTQDGTTASLIHPTHGTIGVPREFMSIAQSWSSRRRVRRRHHPSPSPRTRPGDLVVR

SEQ ID NO: 1758 - protein, 222 aa, synthetic construct
  REGION 1..222: note = TnsF-Tn7 System Protein
MPSARRPHHNNGRSLTGTLSLKDGRSVTFESKLERNCLINLDFRDDTVDIETQFPRIPLPTGTGSPWYTPDIHVAFIQSSRARNIDVCEVKYLKDLDNPAYCAKHRHKWDAARSYCRERGWTFRLLSEQDINTPFTENALFFRRYLSIPDQPLERAQLLFCLQYLTRTTPEILLATAFRSPEARMTGISALWKMIARREVWTDFDKPFTNVSPIAFVEKVKP

SEQ ID NO: 1759 - protein, 348 aa, synthetic construct
  REGION 1..348: note = TnsF-Tn7 System Protein
MTSPIARHRIRPHDDELLSSYLMRVAHAEGTSPQRWAQHHLRHLELWTRDADRALPTSTMSTLAAHLGCSMDSITALSVDTGLDDRQPRCHAGVEPWITAVGLFHRIRHLHGLQYCPACLAEEPYFRRLWRLAFVTHCPVHHRVLLDGCVRCDAPIVPHRHERLPTHCPICGMDLAHPTISGEPTDDTTMAYVSQSSWLNAQSTRRFALGTASIPWHDALKGCRALIAVHRCSLTQTLRMLPPRSGVFEAQRVGLRMATMQWLHRVLAHWPRAWLEDARRGHVTQRSFHRQASIPPWLQHALQFLHVGHTRDRWRRARAFQVHIRRLRQLRPPHWRTDHAQQFARWAP

SEQ ID NO: 1760 - protein, 661 aa, synthetic construct
  REGION 1..661: note = TnsF-Tn7 System Protein
MTISSTTALLHPSVGTRVRYDGKLYQIIAVIDANRVLARNLTTFEIEHLIADRMQLARSEDELPPVAPIDTIVHHEPETVAIARKRLAVIEPLLKNAARTPETFKRIATENKVGVSTIYNWLRRYNSGEHLMGLIPHRGGRKSGSKYLQEEQEKILETTIQEFYLQPQRPTAAALIEEVLRRCRIGKIDPPHANTIRKRVHALDDKTALKRRGFRDKAHDTYERFQGGDSPDGKFPLEVVQIDHTQCDVEVVDSVTFKTIARPWITVAIDTYSRMVTGLYLSLDAPSVMSVGMCISHSMCRKVEYLIRQEVTGEWPVWGPMAAIHVDNGSEFHSESLKNSLAKYKINLYWRGRNKKEWGCFVERMMKHIANFFRQMPGATFSNPAERKGYDSSERAALTLPELEKRVVDYIVNNYHQSYHSGIGMTPVNKLIMGITGTPDTPGTGLLPMFDFEDQVRIDFLPLEKRTVQQYGIQIDGITYNDPILSRFIGARDPKKRSQKRQFTIRRDPRNLSKIYLLDPQTNTYLTIPYAHRNFGPVNLSEWNWVKKQMRAEGQRGVGEEAKFAELQRRQASIGQAQERTKVARREAERKRLIAKSLQTEEAQRTTSASSATETPVTPPTATPPQVDGANTAATPSPQAIGVVAVPKPRRVLVPIPNIRL

SEQ ID NO: 1761 - protein, 259 aa, synthetic construct
  REGION 1..259: note = TnsF-Tn7 System Protein
MELTTRVHSIAGLLPAGCGLIARRPFRSPHHGVSGPGLVGGGSPPRPGEVSLAHHGVLFLDELPEYPRTVLESLRQPLEDGHLSIVRAGGRLRFPARCCLVAAMNPCPCGFLGHPTRRCTCGSDEIHRYRAKISGPLLDRIDIHLEVPAQRPDALQDGDGGEPSPVLRQRVCAARERMQARQGRANALLDPRGLRQHVHAAPEALRLLGQAVDELGLSARAHDRILKVARTIADLEARDAVGLDDVSEAIGYRVLDRPG

SEQ ID NO: 1762 - protein, 164 aa, synthetic construct
  REGION 1..164: note = TnsF-Tn7 System Protein
MRRVHLVGSSGHGKTTLAVELIACWTAAGLRVGSIKHTGHIHELDTPGKDSWRQRQAGARPATIIAGDRLALHLPLQPDQDPYAAIAVHYADCALVLVEGDVATTAPKVEVWRAGPGAPPLASQRQDIAAIISDDHPEVAVPRWSRLDVPEIARRLQRLVGLAC

SEQ ID NO: 1763 - protein, 164 aa, synthetic construct; identical to SEQ ID NO: 1762
  REGION 1..164: note = TnsF-Tn7 System Protein

SEQ ID NO: 1764 - protein, 305 aa, synthetic construct
  REGION 1..305: note = TnsF-Tn7 System Protein
METYPHIYPDLRSYMAGTDAERIRESARDRFIPYARADQILTALQALLDYPSTLRPEHVLIVGDSSNGKSAILNEFRKRNAVRIDTTGAPICPIISIEVPPRPTETFLYSLIIGACGVSHNSGMRVSDKHLHVLRCLQQCSARVLVIDEFANIGNAKGNEATILLDAIRSISNQLRLSIVSAGVRSSINVVNYNSHMVTRFVPYHLPPWEYDDDYRTFLLTYEQLLLLREPSGISDDDLSATIYRMCDKNIGSTVRLLMKAAAHAITTGTERITIELLKTMPYVGPRAVDTLTRHFRESPPEVPA

SEQ ID NO: 1765 - protein, 305 aa, synthetic construct; identical to SEQ ID NO: 1764
  REGION 1..305: note = TnsF-Tn7 System Protein

SEQ ID NO: 1766 - protein, 243 aa, synthetic construct
  REGION 1..243: note = TnsF-Tn7 System Protein
MPKPRASRSTARHARQVPRAHSSANRSVGTRSIAARPLATVLIDCTICDTVVVHPATGAPIGRPWITVAIDTGSRMVTGLHLSLDQPSATSVDRCIRHSISRKAAYLARLGISGTWPVQGPMAAVAIDLPLVSQGAALTATLTKHHIRLIRRGSGTQAFRGISETVIRQLGPVLHSWPSPTRTHPAHPDSSARAVLTLRDLEHVLVDFIVNVYHLDYRVELGMPPMHAWTAATARLPASPTAS

SEQ ID NO: 1767 - protein, 660 aa, synthetic construct
  REGION 1..660: note = TnsF-Tn7 System Protein
MAPVGICPICNEKRLLKRILHQRRVCVRCRAAQKKICGTCGNARRVVRHLNGQPICHQCWKCHPSQLATCTVCQSFGPVVVKRAGSPICGACYPRHTEPCSLCGQQRPVQSRRDGRALCMCCYMAIRDGKDPLHVRRRPRRPGRIRICSNCGQRKLCQGFLGPTPLCAECAGRPLVQCVWCGEKKPVTAYWPGGPVCNHCAEEFRQKPKECTRCRNMGMAVPFEKRQIICRPCAGWEDSSRCVHCGQQKPRYAKGYCVDCYLRHVALPKLLNLQGASSNTPHLNRVMETLLSRKPISVVNWLKTGSAALLHSIAQGQTALSHSALDKHTSPGHAEFVRSILVEAGGLPVRNRMAAHIDHWLEVFRAEVPDQHRLLIMMFAEWRIVRRLRGKIQHQRLTRWALHSMKLRLRIAVRFLEWLDRQEKTLQQCTQKDVECWLTESKVTTPYLVRDFLQWTSLRKFSRPLEVPLLKSSGMVLVDEDRRWAMIERLSNDESMRLELRLCGLFVLVFGQHVSRIVTLLDSMVQIDEKKNVKIVFGGEPVVMPPVIARLLSKQLVACRGNPNGRRADGTYWLFPGRHYGSHRNVVRLQKNLNNIGVECRRGRNSALLQLASQLHPAVLGRLLHMSPNVAVRWSQNAGGGFNRYVASRTARIENGHHSA

SEQ ID NO: 1768 - protein, 660 aa, synthetic construct; identical to SEQ ID NO: 1767
  REGION 1..660: note = TnsF-Tn7 System Protein

SEQ ID NO: 1769 - protein, 832 aa, synthetic construct
  REGION 1..832: note = TnsF-Tn7 System Protein
MIARTSISEWLPHHAYDPDNQVYRLADGRIGCVWESPPLLGMGPDTIQKLTNLFESSQAPTGTTYQLMIHASPVIQPYLDAHVGLSDRGDLDSRFLRDATRTREFFLESQGTRLIPTSGIRPRDFNVYVSVTMPLKEDHPNGIEFEDIVEQLEGVEQTLRNVGLPVVRVPPLELIWLLHTLLSPGHAWGERPPSYNSTQLISDQVVARDTYAKLHARMFELDGKFVKSLTVQQFPEEWHGSKNRELIGSLLRGMDQITCPFFLTLNAVKLDQVNSVAALRKKHVVVTNQAVGFMLKLIPIFEKKLQHFNRMMALVAEGKQTIGLYVQAALYADDPKELEKHSSAIKAIYRTHDWLLQDDHFIGFRVFLFGLPMGLPSNVPLLRDDLRRLKTVHSDVPAHLAPIVGDWKGMGQPVMLLTSRSGQMMSLDVFANTEGNFNICIAADSGAGKSFFANFFFRSYLATGGQAWVIDAGKSYMKLCEHLKGQFMQFSREARKLCLNPLSRVIGRYDRKAESPEEEADRKDELAMIKAIFAQMLSPSRALTDLELSCLEQALIQVLADKGGESTPTDVAGALLKMGQEREDQRIKDLGTQLFPYTAAGNYGDLFNGPNNMHFERDFYVLELDGLDALPDLRSVILLQMIMNIQVAMYQGDRARRKICAMDEAWDLLSQGGNVAAFFEKGVRRVRKYGGSIMTITQGINDYYDKMGQTGAALLANSDFVFLLKQKPESIESIKQRGRLILSEFEYQLLRSVHRGAGYSEIFFYTANHGRGIGRLTVDRRTQLMYSTKAEELALIDRIVKAGGPEMTTDRAIDLILEQEREKAAATGERVA

SEQ ID NO: 1770 - protein, 832 aa, synthetic construct; identical to SEQ ID NO: 1769
  REGION 1..832: note = TnsF-Tn7 System Protein

SEQ ID NO: 1771 - protein, 366 aa, synthetic construct
  REGION 1..366: note = TnsF-Tn7 System Protein
MGPFSATAENVLPANVTFLDPPEQLYAAMLEGWRLQQHSRHLNPSTIKARHRLVQRFQQYTDTFPWQWKPEDLVEFSAELSQKLSVSTLRQYQTTLQLFLEYVTDRRYGWVERCEREIGSSIIQICDEWNTVSHATEYEGRPSRRPFTFDEIDRLFEYVEQHHAEVLRQRRKGSLAAARDAVMVKVAYAFGLRRTEVCRLDISDFRRNPDPKMKHLGRFGVLHVRFGKAANGGPPRRRLVFTVPEVSWIVEVLEQYLRDIRTLFNVGAHPALFPTERVQYLGSKDFGSRFQHIVEEAGLPVELSLHHLRHTYATNLAEYGYDPVFIQQQLGHAFLSTTAIYTHVSSDFKNHQLQQALERLYRPKEE

SEQ ID NO: 1772 - protein, 254 aa, synthetic construct
  REGION 1..254: note = TnsF-Tn7 System Protein
MLRHPTLTALEAMKLTGMATALAEQLEMPEVQRLSFEERLGLLVDRECTVRDNHRLARRLAQARFPGSATLEDLDYRHPRGLEKSVIASLATGQWIRQHDNVLIVGPTGAGKTYLACALAQMACRLGCSALYLRLPRFFRELAVAKGDGRYGRLLRSLAKTDLVVLDDWGLAPLTDEQRRDLLELLDDRHGRRATLVASQLPIDHWHTAIGEPTLADAILDRLVHNAYKITLKGESMRKRLAKSDGSRPLKTDH

SEQ ID NO: 1773 - protein, 254 aa, synthetic construct; identical to SEQ ID NO: 1772
  REGION 1..254: note = TnsF-Tn7 System Protein

SEQ ID NO: 1774 - protein, 105 aa, synthetic construct
  REGION 1..105: note = TnsF-Tn7 System Protein
MAAEWNLKKVMEQHHFHSTTELVPMLAQRGVQLSRIQVYRLVAQAPLRLTLDLLAALCDIFACTPNDLITIKQVDRQERKKLAAAGETKSSGRLSLIKTRVHRPK

SEQ ID NO: 1775 - protein, 492 aa, synthetic construct
  REGION 1..492: note = TnsF-Tn7 System Protein
MSRPRSPAECVRCGRTGVRFATTWPEGRICRRCYQRATRLHGTCPGCHVNRLLPGLLAEEPCCVDCAGIPKDFHCARCGREDEPVRIGLCAHCCLTDDLTDLFTDTHGHINPTMLPLFTALTQQAHARSARVWLIVNPHTKALIRDLSRGVAPLEHATFTGHSHPSKVAFLRELCVEHGLLDPVHLDIERFQTWLDSKLAGAEPDDARLLRQYARWVHLNRMHHLATTGQLKKGTFLSAKQSTTVALEFLRHIRDRGHSPATCTQTDIDDWLIGPTTRSLARGFVRWSVSHRHLPSLEFPYRVAKAEPIITQQQRLDHITRLLSPTNALDPDERAAALLLLLYGQPLVRIAQMRLHQLTATETAIIVAFTGDVLTIPSPFDRVIREHLAALPHQTTSAHRDNQWLFPGGRPGQHLHQGTLMNKLRNAGVDLRGARNASLRALVLELPAPVVADSLNYSYQVTDKHRQNTGATFADYVSRRPSPNTGTSTSTA

SEQ ID NO: 1776 - protein, 492 aa, synthetic construct; identical to SEQ ID NO: 1775
  REGION 1..492: note = TnsF-Tn7 System Protein

SEQ ID NO: 1777 - protein, 798 aa, synthetic construct
  REGION 1..798: note = TnsF-Tn7 System Protein
MSVGAVGEQTAVAEGVAAGDRHDVIRVRGARENNLQGVDVELPKRRLTVFTGVSGSGKSSLVFGTIAAESQRMINETYSAFVQGFMPTLARPDVDVLEGLTTAIIVDQERMGANARSTVGTATDANAMLRILFSRLGKPQIGSPNAYSFNVPSVKASGAITIQKGDSAKAVKTSFTRTGGMCPRCEGMGTVNDIDLAQLYDDSKSLNQGALTIPGYTADGWGVRVFTESGFLDPDKAIRDYSETELHDFLYKEPVKIKAAGINLTYEGLVPKVQKAFLSKDKEAMQTHVRAFVDRAVTFTTCPDCGGTRLGPEARSSRIDGVNIAEVCAMQLSDLAEWLRGLDEPSVAPLLDGLQHALDSFVEIGLGYLSLDRPSGTLSGGEAQRIKMIRHLGSSLTDVTYVFDEPTVGLHPHDIQRMNKLLLQLRDKGNTVLVVEHKPEAIAIADHVVDLGPGAGTAGGTICYEGTVEGLRASDTLTGRHLDYRAALKSDVRRPSGSLEIRGASANNLHDVDVDIPLGVLTVITGVAGSGKSSLVHGSIPPGAGVVSIDQSAIKGSRRSNPATYTGLLEPIRKAFAKANGVKPALFSANSEGACPSCNGAGVIYTDLGMMAGVSTTCEDCGGKRFDSFVLDYHLGGRDISEVLAMPVAEALEFFASGEARTPAAVAILERLSDVGLGYVSLGQPLTTLSGGERQRLKLASHMAESGDIYVLDEPTTGLHLADVDQLLGLLDRLVDSGRSVIVIEHHQAVMAHADWIIDVGPGAGHDGGRIVFEGTPSELVEARSTLTGEHLAQYVGA

SEQ ID NO: 1778 - protein, 798 aa, synthetic construct; identical to SEQ ID NO: 1777
  REGION 1..798: note = TnsF-Tn7 System Protein

SEQ ID NO: 1779 - protein, 371 aa, synthetic construct
  REGION 1..371: note = TnsF-Tn7 System Protein
MDEPGQPGAVPVHLRAGIAILNAEESVWVAMLDGWAAQQVTRLLSASTIEKRRSIAVRFLAFAGCYPWSWTASMVDEFFLELRGLKGASHATLLGYQNALRMFLEYLTDPAYGWSEHCWDRFGDHPAQVFHEWNTARHAQAAIGTPGKRPYTRDEIQDLFDCADDRVLRIRRSGSKGWIPAFRIATMMKAAYAWGLRRNEVRQLDLVDLASNPRARQFGDVGIIYVRFGKAMRGSPPKRRTVLTLPEFDWIVECIREWRTDVRPLFAPPGSTALWPSERSGMVAADSVSRAFNEVRREAGLVEDLDFHSLRRSYVTHLVEDGYDAFFIQQQVGHEHASTTSIYTGLSPDYRARVVDDAIARMATQLTTKET

SEQ ID NO: 1780 - protein, 108 aa, synthetic construct
  REGION 1..108: note = TnsF-Tn7 System Protein
MQRRIEHGWRLRELMAARGMNTISDLIPHLSDRGIHLSDSQIYRLVGGTPERMNLALLGAILDTLDCTFEELCPITVQAVPDRATGTVDASATKDAFRPARARVHRPE

SEQ ID NO: 1781 - protein, 469 aa, synthetic construct
  REGION 1..469: note = TnsF-Tn7 System Protein
MRKAAVTWPDGKICNSCYYDATNLYGTCPSCGMNRMLPGRLDIGEQPVCRGCAGISQNYQCLTCEQEARPYRRGSCARCALRSDLERDLLRDGSPDGIKTLIDALCGADRPESILTWKRSGKVQNLLSAIASGTTPLSHDGLDQFEPSGKHVEHLRSVLLHHKAIPPRDKYIALFERWLDEKLTHVDEPDIERPVRQFATWHHLRRINEIALAGNSTRGPVHSSKQEITETLKFLQWLHDEHGRTIATCVQQDVDQWVTAGPTTRHLIRTFLVWCANSRINRSVSLGFRQAKSVRLLTQEQRLAWIRELLDGDSESLPYRVAGTLLLLYAQPLVKIAELPMAKVIVSPDGLALQLGVTPSPVPAPFDSLLRQHITQRHNLRTSGSDSPWLFPGYRPGEHLHPNTVMIRLRDLGINLLGARNTAIRELVTQVPAPVVAEMLGYSDQVTQKHADLASEPWGRYASAPRPGS

SEQ ID NO: 1782 - protein, 469 aa, synthetic construct; identical to SEQ ID NO: 1781
  REGION 1..469: note = TnsF-Tn7 System Protein

SEQ ID NO: 1783 - protein, 1088 aa, synthetic construct
  REGION 1..1088: note = TnsF-Tn7 System Protein
MTRIFDNIKFNLGTHLQQSLQVSDRMDVAVGYFNLRGWGAFDSLVREKVAAGSTGPVVRILIGMVMTGPQQETLEDLQAGVDGKPRPDADANAARERKAQLLEQLRTQLMRGLPTNADRAALQSLRDLLAQGAVEIKVFTRRPLHGKTYICHRQDLNNPITGFVGSSNLTAPGLTHNLELNVDVLDTSGAETLAQWFEDRWNDRFSRPVTADVLDLLDESWVRKEPRRPYEVFLKVCYDLSRDVREGLAEYSVPSEISKQLLDYQATAVQTLARRIMTKRGTMLGDVVGLGKTLTAIAVALMLRDEHGYMPLVVCPKNLVSMWEEHFEAYDLHGRVVPYSMAHTILPELRRYAFVIVDESHTLRNDTRRDYKAIQDYIHVNDSKALLLTATPYNIRFQDVANQLALYVDDDDDLGIAPVNALSADPRLADKVDGKTTTMAAFRRSEDPDDWKRLMSEHLVRRTRTFIKNNYSLTDENGRQYLEFANGTRFQFPQRIPKPVDHSFGPEDPAVLMASDTTLDAMTKLILPRYELGSYISTTVQLRESEKEFVDNLARGRGNVAGFVRTTFYKRLSSCGHSFTLSLKRHIARNELFSYAIDNDLAIPTGTITENTFGEDEDPNNDKIPTADEVSQEASLRYEALREANPAGLTWVRPDIFTKDLRQDLATDTNTLWSLLASYGNWTPGRDSKLDALLTLLSTKHPNEKVLVFTEYKDTADYIGAALQAAGITRVGIATGDSDDPTRLAHRFSPRSNTLPGQQTDTTPDNELRILIATDVLSEGQNLQDAHIVVNYDLPWAIIRLIQRAGRVDRVGQNADTVLLYSFFHESVDNVISLRQRISDRLHANAEAFGSDEQFFGSDTEVKAITDLYNGNLDDQDAADDVDASSLAYQRWHQAQKDTPELAAKIASLPDMISATRTRRLSDTNDGVICYVRTESGIDGFGSATADGQTSLLTGHEVLRAFEATPEERGLEHADDHDSLLETLVRGDLANPHVAAGRPRGVRRTLWNRLSVTLHNHAADTELALEALYQHPLMKDAEHRLRRAVRNGADNDDLTALITALHKDGQLVIATRTGKDPIRIVSSMGVRS

SEQ ID NO: 1784 - protein, 189 aa, synthetic construct
  REGION 1..189: note = TnsF-Tn7 System Protein
MWTADDPLQDAPRRVAVAGVSGVGKTTLARRIAAIIDAEYVEIDGLYHGPNWQPRPSFAEDVRALVARDAWVTEWQYSLARPLIAERADLLVWLDLPFWTTTFPRVVRRTLRRRIRREVLWNGNLERPLYTFFTDDDHIVRWSISTRHSYHRRLLGPAAPRRIVRLTSRAEIERWVHGPLAGASDCRPR

SEQ ID NO: 1785 - protein, 189 aa, synthetic construct; identical to SEQ ID NO: 1784
  REGION 1..189: note = TnsF-Tn7 System Protein

SEQ ID NO: 1786 - protein, 369 aa, synthetic construct
  REGION 1..369: note = TnsF-Tn7 System Protein
MAVDDVGRAYLVSAVRPLHPEEQSLAEMLQGWRNQQLSRNLRFETIDARIKQVERFVQHSNEHPWTWTVAMVDEFFGDLRSIHNLSQSSIRSYQVGLRQFCSYVANPDYGWDRVCEELFGTHPSQVFFDWNTAQHVQENESRPDKRAFTKREIQDFFDHADEQVSAVSASGRKGWLPAYRDSVMFKLAYSYGLRFNELAHLQTVDFARNPHAKEFGKYGLVNVRYGKAKKGSPPKRRGVLTVFDWTPEVIADWLENGQPHMDDGIDLFPSERGNLVSETTLIRRFRRYCDDLDLSSGLDLHSFRRSYATHLLEDGWDSMFVQHQMGHEHASTTAIYSCVSSDYRTRTLRTALDATISAALSATENGGAS

SEQ ID NO: 1787 - protein, 111 aa, synthetic construct
  REGION 1..111: note = TnsF-Tn7 System Protein
MKRDVDYTWRLAELMAGNQMHNSTDLIPRLHERGITLSRPQVYRLVHQRPERVSLKLIAALCDIFDCGPEDLVTVTAANARKKAASAGRENVVELNKSVRPRRARIVSDDD

SEQ ID NO: 1788 - protein, 240 aa, synthetic construct
  REGION 1..240: note = TnsF-Tn7 System Protein
MDEGPWLRHIARTFPLWAVEHRHATGFEIPLSARQDETSGIEQTSRWQLVRQLLHDETLDLTDRVAGLLVLLFAQRLSTITALTATHVTHEDAAVSLSLGSHPLQMPPPLDILILRLVNERKGFAVIGQIDDHPWLFPGAFAGRPMTNKQLMRRLHRLGIRVKPARNTALLDLVGELPAVVLSRLLGITVQTAAHWTRRSRLPESPTQPTSPAADPICLAPAPGAAVPRPVQSMAYESIN

SEQ ID NO: 1789 - protein, 864 aa, synthetic construct
  REGION 1..864: note = TnsF-Tn7 System Protein
MRDPVFAELTARITAVERILDPARIQEVVEASFKQLPVAKRTRDLVDASPQLLTSMDPHMPPALAGLLLRLRDAGAETVRPPGCALCGQQRPLIQVIEQGRICSPCARRRTGRTGRCDRCHEERWLQPGPGEAAYCRRCWREMGRDARARIVDEVRRHRRIAAEVIRTALASMPSARDRSTRLMLELAAHGSEWFADPAAGSVLFGTFYDLMRVGGARLPERRCGGCGTTRTLTERVEGKVSCRRCYRIAHHQPCDGCGDVTNLERVLSDGRRLCQRCTNKLDDENAACVACGNHRLIAFRGPDGPVCSTCRSASQTDTCSVCGTVAACLFHGSEKAICKACSDAASIDTCTACGNTRQCRWPDTARAVCEQCANPRTPCVSCGEVRLRHKRADDGPGYLCWACTPQIIETCTSCGDDRLVNGRVDGQPFCPLCYPRQPESFRPCTVCGTVTRLIAKRCPRCRADEMIREMIPDDLAASDSRIAEMRARWFHGTPSKVIYAFERGTVACALVTKLLTTPGLRTHEYLDQAGSESQTRSVRSVLVDHGLLPPRDELLARFETWLAEALAEIADPGERRRITQYARWRHLRQLRKNTMPTRSGQLSWRRIEIMSIIDLLAWIRGRGGSLSSLSQGDLDAWLAAGPRPHLHHFVRWASSRRFTAPLAAPTPKSSPLSPRGISDDERWRLFADITTDPAIDPHTKFAAGLMLMFGIRAARTVQLRADDLTIADDTVLVRLGEAPLVLPAELAPFAEGAARNRTAPRMFVESIEQEWLYPGARAGQHMAPSTLNQRLRDLGIPPRLARASALIALTQQLPPVVLSRLTGLEINSAIAWSTAIAANNAAYAATVIDRVSIPLPDLAPSHL

SEQ ID NO: 1790 - protein, 864 aa, synthetic construct; identical to SEQ ID NO: 1789
  REGION 1..864: note = TnsF-Tn7 System Protein

SEQ ID NO: 1791 - protein, 538 aa, synthetic construct
  REGION 1..538: note = TnsF-Tn7 System Protein
MTTNHTNGHTHDDAVEAVRQGARRRTFAVISHPDAGKSTLTEALALHAHAISEAGHIHGKASRKSTVSDWMDMEQDRGISITSASLQLMYRDTVLNLLDTPGHADFSEDTYRVLAAVDAAIMLIDAAKGIEAQTMKLFEVCRHRGIPIITVINKWDRPGLDPLELMDEIIEKTGLEPTPLTWPVGISGDFHGFLDRETGEYVELTATAGGAQIAPEEHFAPDEAAARVGQDWTTALEGAELLSASGDDHDQETFLAGLSTPVIFAAAVRNFGVRRLLDILVDLAPAPEARNTVSGEARALEEPFSAFVFKLQSGMDSAHRDRLAYMRICSGIFRRGMNVTIARTGRGFATKYAQQTFGQSRDVVDMAFPGDVVGLVNASALTIGDTLYTQSPVEFPPMPTFSPEHFAVARALDSSRYKQFRRGIAQLEAEGVVQVLRSDLRGDQAPVLAAVGPMQFEVADHRLRGELGAPIRLEMLNYSLARRTDERSAGLLNAERGVEVLERADGELIAVFSDQWRLQSVSRSHPDLVCEPFMAAKD

SEQ ID NO: 1792 - protein, 538 aa, synthetic construct; identical to SEQ ID NO: 1791
  REGION 1..538: note = TnsF-Tn7 System Protein

SEQ ID NO: 1793 - protein, 718 aa, synthetic construct
  REGION 1..718: note = TnsF-Tn7 System Protein
MEFEERQKLAATLALIDNELVRVADQIATSDATIQSQKELIWNNQRDMDAAEKANIRTLVSTAVGLGEYTVKTRKRIEKLQDSPYFGRVDFTRDKPERTGYSADACDESPAEEIYIGVHNFYRPGTKDILVHDWRAPVSSLFYDYESGPASFTAPAGQIDGEITGKRQYKITQGQMEYVIESALNIDDEILQRELSRSADDKMQNIVATIQREQNAIIRNEAAEVLILQGVAGSGKTSIALHRVAFLLYRFKESLNSSNVMILSPNKVFTDYISGVLPELGEEQIAEIDFGTLAEKYLPPKLGFQTFNEQVSHVLEFPHDAASDRMRHKAGADFVNDLETWIHSEIATTLVPRAVSHREEEISAEEMAEIFERCSFLPVFACLERAAKIAVTTLGQRFKKDRRGWKTADEREVRKQVLGLFPYKDPLSMYKAFLASREEKGLFVMAGRNRLEYADVFPLILTRLRTTEFETYQNIRHLLVDEMQDYTPAQYAVVKALFPCRMTILGDADQKVNPFSSSSLSTIREIFPEANCLEMYRSYRSTSEIISFAQGISHNDRLESVDRHGRPPEVIRTEDTLDEVAVITNLIDSHSAGPQQSLGIVCRTIEQARELHDALRAAGADMTLLDYDSEEFASGVVITSAHVAKGLEFDTVIVPGVSADRYTSDVDKSMLYIACTRAMHELYLTYFGELSSYLDFAEPTNDRTVSARGSSRQAAVFG

SEQ ID NO: 1794 - protein, 344 aa, synthetic construct
  REGION 1..344: note = TnsF-Tn7 System Protein
MIEGWRMQQLGGRRLKGDSVTAGVGVVRRFEAYAMKKPWEWSASDFDEWMMLLVSQRQVAASTIRSYQGAVRQFCDYVCSPHYGWVDECMQRFGTHPVQVCHEWNTLPHLQDYEGGAGRRPLTRQELQRLLDHADDEVSRVLDGHRKGALPAFRDATLMKVVYAWGLRASEAVGLDVTDFYRNAKAPQFGELGVMQVRHGKSSRGGPPKRRAVVSLFDWAVEALQEYIEQVRPLMVRSEGTTALWLSERGTRLRTRELDSRFATYRDALGLDEVLTPHALRHSYVTHLIESGVDPGFVQRQVGHLHQSTTAIYTGVSTDYMNTMMSQALERTRHRPSGEEGTES

SEQ ID NO: 1795 - protein, 118 aa, synthetic construct
  REGION 1..118: note = TnsF-Tn7 System Protein
MRLIGYEWRLREVMAAAGMFSTTKLVPLLEERGVHLSTSQVYRLAAEKPERMNMQALVALLDIFDCTFEELAPRVLLGGEAAATGTTHAAPERGDSATKRLRESGLRPRRAQILPPDA

SEQ ID NO: 1796 - protein, 512 aa, synthetic construct
  REGION 1..512: note = TnsF-Tn7 System Protein
MSDFRPRGRPRSEGTGFTCGRCDRATDKIRVRWPDGQICGICFTEAVHTYGVCPSCGKDHMLPGRASDGLSICRECAGISTELTCIACGREAERFRDKSCITCVLRRDLTALLKPNSPPDLRLRRLVEVLANADRPESIYTWMRPADSPSANLLRLIGNRAIELTHAAFDGLVDKPSARHMRAILVHHHILPDQGDPELAVFEQWLARRLDQLSSTPEIHSPIERFARWHHLRRLKEASAQSTNMNYATRSAKQEITEAGKFLKWLREEHGCLASQMSQVHIDQYLAEGTSTRTHIRNFVRYMSKEQTVKGVDVKHREAQATPLLTQNERLAFIRLLMEAENVGVSIRVAGLIFLLYGTPIGRLSRLTVDDLIVRPTGMTLKLGSEEAPVPEEFVPLFWSHIQAREGQQTVNTGTRWLFPGSRAGQPRSPNTLLGKLRNLGMDVQGIRNATLKDLVAEVDPKSLGKMLGYSRSTLSRHATAATIPWMSYVAAKNPHYAVERGTPPVGPPLRG

SEQ ID NO: 1797 - protein, 512 aa, synthetic construct; identical to SEQ ID NO: 1796
  REGION 1..512: note = TnsF-Tn7 System Protein

SEQ ID NO: 1798 - protein, 831 aa, synthetic construct
  REGION 1..831: note = TnsF-Tn7 System Protein
MSPDLSPAERFAAAKTRDKTPKLQAFRSRLGFALDPFQLAACAALEAGDSVLVAAPTGAGKTLVAEYAIHLAMQDPRAKVFYTAPMKALSNQKFQELVAEYGASEVGLLTGDTNVNSRARIVVMTTEVLRNMIYAGSEMLTDLRYVVLDEVHFLADRFRGAVWEEVIIHLPLDVRLISLSATVSNAEEFGDWLQTVRGSTEVIVSEDRPVPLDQHVLVGGKFLDLFDSSGQAATNRVNPELLRATSLGRRGGRSGGRRDGHSVGRTGPRGHVVPPTQGGPGRLDRWKIVEMLDDQNLLPAIFFVFSRVGCDQAVSQVLRSGIRLTTADQRREIREIVEARCRTLRDEDLAVLGYWRWLDGLERGVAAHHAGLLPAFKEVVEELFQKKLVKVVFATETLALGINMPARTVVLEKLEKFNGEARVPITPGEYTQLTGRAGRRGIDVEGHSLIQWQQGLDPQAVASLASRRTYPMNSSFRPTYNMAVNLIEQFGRSRTREVLETSFAQFQADRSVVDLARKVRSQQQSLDGYAASMECHLGDFGEYTMLRREVGDLEKQGAARADSQSRAERDKRQRRIGELRRQVRTHPCHACPEREQHARWSERWFKLKKQTDQLSAQIRSRTGAVAKVFDRVTDVLLDRGYLVPTGTNAGGAGRVPRDVEVTVAPTGRTLRRIYGDRDLLVAESLRLGVWNMLDVPSMAAMAATLVYEPRRDEGQLSERFLPRGEFRAALDATQLLWAELDDLEHEHHLPGSQPPAPGLALAMHRWARGAALDSVLDDADLAAGDFVRWTKQTIDLLDQLSVVGDLPVGPTARQALDAVRRGIVAYTAVGP

SEQ ID NO: 1799 - protein, 831 aa, synthetic construct; identical to SEQ ID NO: 1798
  REGION 1..831: note = TnsF-Tn7 System Protein

SEQ ID NO: 1800 - protein, 377 aa, synthetic construct
  REGION 1..377: note = TnsF-Tn7 System Protein
MVDKLGGLAFLPVPDRGADRDAFFGEILKGWANSQAAKSFGPETIRRRANCVLRFADFAGKFPWEWTPQDADDFFSHLRNVLHRAPATARAYQSDIQLFLDYATSESYPWNAKCEHLFGTVMSQIITDLNKTKHVFDGVSGPEKRAFELDELQAFFDFADLEVQRIARAKRKGAMAAWRDAVAFKVCYGWGLRHDELRKLKVSDFSRSGKAPYFGDYGILRVRHGKAQKGSGKKQRSVLSLVDWAAEAVAEWVASGLPRMGVPDRYLFPTATGGLVSKGDLLARLHAYTSALDLPAGLDIHGLRRSYATHMITIEGYDEKFISMQLGHAHTSTTTIYTLPSADFAHKQLERVLTKTVLQSKGKLLLKPKRPSGRTTP

SEQ ID NO: 1801 - protein, 115 aa, synthetic construct
  REGION 1..115: note = TnsF-Tn7 System Protein
MNRQIDWNFRVRELMARAGMRNSRDLVEPLHERGITLSESQIYRLVSQNPDRISFQVFVSLCDIFNVEPNDLLTYTAADIRTKHRPAAVGQSTDVPLLEAYRPVRARVDRGNQDE

SEQ ID NO: 1802 - protein, 495 aa, synthetic construct
  REGION 1..495: note = TnsF-Tn7 System Protein
MARRAPDATALCSTCVRRDPGTWEPCSGCGRTRPVNARTDDRAPLCPTCYTSPVDTCDLCGRAAPISSRLGGTVVCRYCYRGHTDRCGRCHHHTVCRTLPDLGIICLSCLLTQRVDDLLTGEDGTINAIWDPLRTALAIGWLYRSPAVAVLQEMGTGASPVSHTTLDRAAGQARYASGVEHLRGLLVGVTILPERDNHLLRLEQRLATLVAAAHPDDRQVLTLYARWRLIPRVRRASHAGKHTGSRSGGAHTALRMVAGHLDWLRRHQVGLADSTQAHVDQWAATHPGHTSTVRTFLRWAAANRRTPRHDLAVPDNSHPHVFSTDDQRWALTRQALADHTWTVSDRVAAALILLYAQTPSRIATLTRRDLGTDNEGRLTLRLGADPITVPPPLDQLLTQLPEPQRHGLAATVILDQEWLFPGSRPGRHVDPTTVMRRLRLHGIHPRAARNTALLQLATETPTPVIADLLGLNLNTAEKWREVAGARWANYPSRRP

SEQ ID NO: 1803 - protein, 495 aa, synthetic construct; identical to SEQ ID NO: 1802
  REGION 1..495: note = TnsF-Tn7 System Protein

SEQ ID NO: 1804 - protein, 660 aa, synthetic construct
  REGION 1..660: note = TnsF-Tn7 System Protein
MDAEIAAAEARLNALLIHRAERRSSAPTPQRPGLSLYRWQVDALEAWSDRGHRGVVEAVTGAGKTRVGIAAIAEARKQGQRAVVIVPSLVLVKQWATTLNELLPDLTVSTSLQDTRHWDVMVTTVQSAMRRPALRLGERGLLVADECHRYGAEKFAIALRAAYDWRLGLSATLERGDAGDAALEAYFAGVCFHVGYERALAEELISPYRFAFVSVPLTTAERSRYTQLDEDLKKTRSALVLKYGVPEQPIAEFLAAVARLAEDRGVDGSGLARLYLARFAARKQLLAGTRMKRLALAGISPAVQSSNGTIVFTQTQQASHTAAETLEATGCSAVAIHSDLDGQEREERLELFRTQQTIAISAPRILDEGVDVPEADLGVVMASNRSRRQMIQRLGRVLRRRDGKVARFVVMYAADSVEDPFAGDHLPDFYDECIPWAEASETFDLAEDDLPRLLTFLGVTKADAGADVQRQIAEAAAPPPSATVGVSPVAPDLGRQPDSTPPDDVARVEKLCRRSSARARQPDHREYSAFPRVTGDIVYDYLGAIGRFPLLTATEEPELARAIEAGLYAEHLLAAEGGPPAPRTAASCPRGRRAFRRMVCSNLRLVVSIANITPVAGSTSLTSFKRNLGLIRAVQKFDFREVRKAPPMPPGGSSKRSRAV

SEQ ID NO: 1805 - protein, 660 aa, synthetic construct; identical to SEQ ID NO: 1804
  REGION 1..660: note = TnsF-Tn7 System Protein

SEQ ID NO: 1806 - protein, 927 aa, synthetic construct
  REGION 1..927: note = TnsF-Tn7 System Protein
MARRGVQLFRFLAASQRLRTATVRKAGDYSECLWLNALPEHVAVESALRAPVPREAARLVGVRRVPPVDPPAAPEQIRTRVLDLKRQTSVQPAWRHEEDEATASPEELSLFSDWSVAWRIWASREQSDAPARSLYERLFRLAATLEAHPEEFEFVLGVGCLSWRPEGYEDIQRHLWTTPLTVEMESVSGDFIVTLEEPDAPILNLELEMVEPELIQSNQGVASARDQIRREPHHPMDRTEMADLGKQVTNHLSADGAYDDRDSAAEPSSRPVATFAPALLLRKRNQAPLVELFDFIAAEIESRGTVPAGLLPLLDPDQLPAAIPSAEAGAMIQADGEPFLPLPLNEVQLRILDHVDHNAQTLVQGPPGTGKTHTAAALISHLLAQGKRVLVTAKTDQALREVREKLPKPIQPLAVSVIGASRSELAELDTAVQTISEKADLLDQHSDRAAETHLLAQVDRLQRERAEARHLLLEVRRAETAAVTVHGWEGTPAAIAQQVTRQRAEHEWILVLGDASAEGPLPVPAVSVQGWYALLTDHRLAPSGSSEEREFRAADRQFVELAPPTPEQVRVRWEERLRASERCDATRPPSPGTTAWGLETLPADVLGELREGVGIVALAGRNLASGRPDWVGRMVHDIQSGLVAVWSARHERVGTLLRTAAPFVAACPWTDEIQAIGSASEEVLALVPDLLVVVERSGPLKTDGQGRVKLGLLTPRKVRDAVPFLESVTVNGHQPHTGEEIAAGANYLRALSLVADLGLQWPDGGPQPSGSIHDRFAYHEAAARELQIGLAHGALILGLEKRMSALRVARPDWRSAQALSDFVAAIDHILAKREFDAADQAFAALGRAFGDVDLTPPVQDLARAFSSKDATAYAAQYSLLEERRKLGLLYAQRAELDGIVRAYWLSLADAVMGSADAPSVERAAEQA

SEQ ID NO: 1807 - protein, 927 aa, synthetic construct; identical to SEQ ID NO: 1806
  REGION 1..927: note = TnsF-Tn7 System Protein

SEQ ID NO: 1808 - protein, 110 aa, synthetic construct
  REGION 1..110: note = TnsF-Tn7 System Protein
MANRGLFATTELARLLAERGIELSPAQVHRLVTQTPERLSLPILVALCDALGCTSEDLIEGYVATGAGRVRKVADNTGGADAPPPPSPKRPRRADIVPPPGPQPGGTSTQ

SEQ ID NO: 1809 - protein, 480 aa, synthetic construct
  REGION 1..480: note = TnsF-Tn7 System Protein
MTEPARSCHICARTITAGYDLLGGPICNPCYSRLRREAFPCPSCGVPKVLAFHDKEQNVVCAACAGVPSRFACRSCGSEEQLTGAQCGTCRLKDRASKVLAREDGTLHPDLVSLFEHLLSAPDARNVTRWLRRDGISTALGQMALGIAPISHATLDLLGPSPRIRYLRCLLISAKTLPEIDIYVNDLDLFAQRLLESLSTEHAHVLRRHYRWHILRSLSQRYPNTHASASVVDSRRHQLTAIRDLLAWVEGQGQSLSTVTQGDLDYYFAQIANTGNALMTFLTWARTNRHVTDVEVQRRAGTNARPAVSEGERWQHIDRLLDDDKLPVTTRIVGLFVLLFAQSLATCAQMKHSDVTITDESVAVRFATDPVTMPRALGDLLRTYVNDPVVRTIYRTEGTEWLFSGLMPTTHITSSRLGELLLAVGISPRTAKDAAMRHLATALPARVVADAFGVAESTAARWSQLSGGTWNDYPQLREQN

SEQ ID NO: 1810 - protein, 480 aa, synthetic construct; identical to SEQ ID NO: 1809
  REGION 1..480: note = TnsF-Tn7 System Protein

SEQ ID NO: 1811 - protein, 232 aa, synthetic construct
  REGION 1..232: note = TnsF-Tn7 System Protein
MLTATDLRRTVRLPGGGTLAVLQGVDLEVRAGESVAIVGRSGSGKTTLLAQLGLLSPVSGGRLEILGIDVSSISDRRRARMRNRSIGYVFQSYSLVRHLSALKNVELALLYGARTGRRERRRRSRAALAAVGLTDRARSRPKHLSGGEQQRVAIARALVREPALILADEPTGALDVDTAASVLDVLLKATRERGCALVVVTHDEAVAAQMSRRVVMHEGTIRTTPALDGVDA

SEQ ID NO: 1812 - protein, 232 aa, synthetic construct; identical to SEQ ID NO: 1811
  REGION 1..232: note = TnsF-Tn7 System Protein

SEQ ID NO: 1813 - protein, 371 aa, synthetic construct
  REGION 1..371: note = TnsF-Tn7 System Protein
MSDHLDLSLSPTRRLRSVRPLHEASFVFDEMLNGWRDQQRSRGLDPYGVEVRIKFIRRFAGYCEKPPWQWGPGDLEDFTVRSMSGSKPLAKSTIRNYQMTVRIFCAYLTDMRYEWVAECLERFGSAPQQICHDWNTVAHLLEYEGRPQRRALTYDELEAFFACADERVETILAAGRKGALSALRDAQIFKTIYAFGLRRKEAASLELADLRPNPAAPRFGTYGAVEVRWGKGSSGSGPRRRTVLTLPELDWVVDGLRQWVDEGRPRLSDDPRGALWPTERGTRVCLRYLDSRFADLRDRAGLPVELSLHALRHTYVTNLIEWGYSEKFVQDQVGHLYASTTAIYTSVGNDYKNRVIAQALSRVYGDSHAQP

SEQ ID NO: 1814 - protein, 119 aa, synthetic construct
  REGION 1..119: note = TnsF-Tn7 System Protein
MPSPDTHAPITWHLRALMASAGMFQTTDLVEPLRAAGVHLSREQVFRLVTKPPARLNMEILAALCTILSCSPADLIEINPPVAATGSTRTGTASTTGATGPSIGSLRPIPARIHRPTSD

SEQ ID NO: 1815 - protein, 624 aa, synthetic construct
  REGION 1..624: note = TnsF-Tn7 System Protein
MEFSEHYPWRWTAAHMDEWSFSLTAEQGRAKSTIRTYQGAIRLFCDFITSPHYHWAAECEKRFGTHPVQICHEWNTATHLEEYEGDAERRPLTREECQALFDYADDRVEHAIKYGRKGALTAYRDATVFKTIYAWGLRCREVSRLDLTDFYRNPKAPELGRYGQLHVRYGKASKGSGPRRRMVGSARPPPVRPPPPATSPIPTGWARSVRSGPASSDMSRATAPAPRFMTEPQTVIIETIATLEPGLPTEVLASTADQSVDTRAKLRRLAQALEAAPDLLTSGRPEGPRLVELLIRALQAHGTKHLVLPGCARCGRQRPLPRVDGPRRICDSCAGTVKVHREPRAVCGKTRAVAMRDRDDRARCFRHPPEATDDTAVICGPLQSHGTGLDDDALTAIVERALPRAFQRREIAGDLTRRPELISGQGAHGSPRMITLIEALVEHGALGITLPACPFCERTIPLRFRRDDAGCCCRCYDKTRLQDCSRCGNGRNVVTRAADGQPLCGNCMKADPHFHEVCRSCGQLAFTIRHDDQGQGICDACWRPPVAICSVCGNHKPCHYANSEAPPVRELHRPAGSRALLVLRHHPRGLCPDRRWRGALPSLQPAPGTVQHLREPSIRVQPHA

SEQ ID NO: 1816 - protein, 190 aa, synthetic construct
  REGION 1..190: note = TnsF-Tn7 System Protein
MSGAPGTGKTTLALHLAKACGLPLVSRDDIYEDLVQAGGAVGQPASRGAGDAVAKAAYTAFFGAVERALAAGQSVIAEAAFQHRLWAPGLERVTAGGATVRVVLCMAPVSVTGQRIVSRAGQVPPLSAHTDPAMFGLIARGELSHDGWVPIQLDVPALEVDTTDGYQPPLELIEAFASRSPQEDGPGAGA

SEQ ID NO: 1817 - protein, 190 aa, synthetic construct; identical to SEQ ID NO: 1816
  REGION 1..190: note = TnsF-Tn7 System Protein

SEQ ID NO: 1818 - protein, 624 aa, synthetic construct; identical to SEQ ID NO: 1815
  REGION 1..624: note = TnsF-Tn7 System Protein

SEQ ID NO: 1819 - protein, 834 aa, synthetic construct
  REGION 1..834: note = TnsF-Tn7 System Protein
MLPRFAAEPEQLIAETVRMVEPQLTAEVIEAVLVATVKRRPERRRLAEVLDAAPDLLTSGRPEGPRSIERLITALLQHGALRLRPPECARCGAQKPLRALMNGLRICSYCKGRQIQRANPCVICGSRNYQGRDRDGRPRCRRHPPDEGRDPLDELSRNIAALSIGLSHSAAAAAIRSVERSRQGQLRLLWAWEDHPDLLTGGGAAGPPKTVPLIRALLDHGATGLIVPPCPFCRRAAELDMVLDSLRCCRICWRDARPQSCAQCGKSRYVAGRTLDGRPLCQNCNRADPLNLDLCSQCGTPGEVITRTEAGAVCRRCYQLPTATCVTCARTLPCLYADTDHPTCSTCASNAREHRPCSRCNTVRRMMYRSPEGEPLCKPCGAPKPTCSQCGQARRCHGRTLEGERLCKSCWRAHPVSQRACTDCESVVRLFHFGLCPPCAARRRLAAVLSGTRVAMRPELEPVFHALLQTSPTTLLRSLLADRPTHRLLTALAAGHGPVTHATLDRMTPVKAVQALRATLVAGGALSERDEHLATLEQWLSRTYARVPHADDRRLLRSFITWTQLRRLRRLSERRPTTYGQIIAVRHEVRNIVRLLEWLHQQGVRLAECTQDHLDAWLADGPAARCLVRVFLNWTSRRGYTRRLQTPLPSTDFSVNLLVPDQRWAMVRRLVGDEDLQAVDRAAGLLLLLFAQPTSRITLLTTDQVADHGDKVTLQLGRVPVELPAPLGDLVRQLVRRRKGHASPAGEGKWLFPGGQAGRPLAASHLNHRLKVIGIRPRLGRNTALMDIVSEVPSVVVSRLLGFHQNTADTWQRERPGFGPEYAAEVSRRRTTPD

SEQ ID NO: 1820 - protein, 834 aa, synthetic construct; identical to SEQ ID NO: 1819
  REGION 1..834: note = TnsF-Tn7 System Protein

SEQ ID NO: 1821 - protein, 368 aa, synthetic construct
  REGION 1..368: note = TnsF-Tn7 System Protein
MSKSGLSEGSARLVLLDGVSLLHPEDAVFEAMLEGWGRQQRGGRRLQPKTVMRRQNLVRRFGAFTNGYPWQWSAADLDEWMTYLIAELRRKESTIRSYQTTMRLFCDYVTSPHYQWPGECETRFGTHPIQICHEWNTVAHLVDYEGDPERRPMTREEIQLFLDYADDQVERAVRLGRKGALAAYRDATVFKAIYGWGLRCTETSKLDVTDFYRNPKAPELGRFGSLHVRYGKRSKGSPPRRRMVLSVMPWAVEAVEDYVVNVRSRYAGSAKKQALWLTERGGRLQPRDIEDRFAAYRDALGLGKELVPHCLRHSHVTHQIEDGADPVFVQNQVGHRFASTTALYTGVSGDFMNSMMRRVLDRALHSGQ

SEQ ID NO: 1822 - protein, 104 aa, synthetic construct
  REGION 1..104: note = TnsF-Tn7 System Protein
MATRGMFSTTDLRPKLAERGIDLSPSQTYRLVVERPERLSLKTLMALLDILGCSMEDLIEPVPAAGARRRKSATAAEADPAEPGSAGVGDFRPRRARIVTDKDR

SEQ ID NO: 1823 - protein, 765 aa, synthetic construct
  REGION 1..765: note = TnsF-Tn7 System Protein
MSYRTPRQRTAQQELESIRAWVVARLCGAVGPALTAQAAQAAVEQAKGWGPLPVRELARYLEQTPDGLTVPVVTGPLSVVRLRNLLHAAGHGERVAKVTCVRCGRTHPLPTERSPEGRCCGWCRAQMNFRPCGRCGRVDQIVTRRQDGPICRRCYRSDPLVVTECAECHRMRPPGYRSEDGTALCCNCAPKTKRKCVGCGRVRKVNARTPAGPVCGACYEGPKRQCGVCGEVEQIQVRATDGQPDVCIRCYRGPKGECSVCGRWRHGGQVSQRGGAFHCRSCWPRPVRTCGLCGNDRRTKTIWPLGPVCSGCYQARRATPAPCSSCGDRRIMIGRAVDGSDLCATCCGRDDPGARCGRCDQPGDLFDDGQCPRCVLGGRVRDLLSGDHDAVPDHLQAMADALTSAVNPYPVLGWLRRSPSAKALAQLAGRAEPLTHELLDALPQGTTTRHVRSLLVVAGVLPERNEHLARLEQWLTSKLPALPGHQAMVIRPFAEWHVVRDARRRAARDRYSYGAASGDINDIQAAIRFLTWLDEREQQLGSLGQAEFDLWLTSYPTQQVVIGSFIRWAAARRLTSPLELPKRGRPFAMNFQTADEYDQQLRRCLNDTTLPREVRIIGALVRLYALPVTKIIEITTDRFHQDGTGAYLTIDRHPVLLPPRLGQLIKEQIAQPRTTTRVRRALDEASPYLLPGKFPHRPRNPHGVGNLLKQHDLPMLSARNTAMIEAVTTLPPIVIADLFGISPSTAETWAKYANDSWTHYLAARE

SEQ ID NO: 1824 - protein, 765 aa, synthetic construct; identical to SEQ ID NO: 1823
  REGION 1..765: note = TnsF-Tn7 System Protein

SEQ ID NO: 1825 - protein, 342 aa, synthetic construct
  REGION 1..342: note = TnsF-Tn7 System Protein
MQEGWARQQAARFLKTRTIDPRLRLVKRLEEFTGLYPWQWTPAEGEAFIAHLRSGTQPIQMSTARTYEVTIALFLEYLLDRRYGWVDTCLERFGEAPQEVFHEGNSVLHTVEYEADPRRRPLDYDEVQALFDAADARPAKVRGQGRKGAMTALRDAAVLKTIYAFGTRRTESSRVDLVDLRRNRRAPKFGAYGSMMVRFGKSSKGSPPKRRTVLTVPEMDWVVDVLDEWITEVRPHFSPGWHPALWVTERVGRLSPRSINEAFVAARQDAGLDEDLDLHCLRHSYITHLTEFGYPARFVQEQVGHSHAATTAIYMGVSNEYRNQLLEASLKGRLGDDWSVMV

SEQ ID NO: 1826 - protein, 355 aa, synthetic construct
  REGION 1..355: note = TnsF-Tn7 System Protein
MTWKRSARVATLLQSIASGQTPLTHEGLDSHRDTAAREADHLREILTHHGLLPHRDLYLARFERWIQDELPQLPAEVARPVEQFAKWHHLRRIRPMESPERNLHSQVHSAKQEIKETIKFLNWLWAVHERTAANCTQEDVDSWQASGPTTRRLIRTFLAFAQKTGTNTQVRVARPTSTNRPTITPEQRLLWIREFLEGNSDSLPYRVAGILLLLYAQPLTKVAAIRTSAVTVDEATGRLRITLGKHPLPIPPPFAELLKQHLRTRPNLGTGTSAQSPWLFPGGRAGHHLGPNTLAARLLDLGLNLRGARNTALDEHVIASPPPIIADALGYSYQVAHRHAEAAGDTWSRYIADRS

SEQ ID NO: 1827 - protein, 355 aa, synthetic construct; identical to SEQ ID NO: 1826
  REGION 1..355: note = TnsF-Tn7 System Protein

SEQ ID NO: 1828 - protein, 364 aa, synthetic construct
  REGION 1..364: note = TnsF-Tn7 System Protein
MGVDGSGRVHLVESLPLLHPEQQTFEEMLSGWRNQQLSRNLQFGTIDQRIRFVQRFMEHVNEFPWRWSPAHVEEYFGDLRSIRKLAHSTLRGQQSALRQFNSYVANPDYGWDVVCERRFGTHPAQVFFDWNTATHAEEFEGRPSKRPFTKDELQRLFDYADDQVEIIQASGRKGWKAAYRDSVMLKIAYSYGLRFNELRHLQTVDFSINPHIRRFRKVGVCKVRFGKARKGSPPKSRSVLTVFEWTPDILEDWLANGRGTLQTLDLFPSERGGLIVESTLLRRLRRYLDELGIASDGLDLHSLRRSYATHLAEDGWHSRFVQDQMGHEYASTTGIYQFVSDDFRIRTLQAALDRTVADALEAGR

SEQ ID NO: 1829 - protein, 255 aa, synthetic construct
  REGION 1..255: note = TnsF-Tn7 System Protein
MNADGTIHAQKIRKSFGPKTVLKNVDLDIASGEICCIIGPSGSGKSTLLRCINGLETIDSGILKVNGEDFGYYETDTAYHALPPKKLAQQRTRVGMVFQSFNLFPNMTARDNVMAGPVLVKHADKKQSAKHAQELLASVGLEAFGDCYPAELSGGQQQRVAIARSLAMNPEIILFDEPTSALDPEKVGEVLNVMQDLAKKGMTMVVVTHEMGFAREVADTLIFMDDGNVVERGDAREILTNPKEPRTQTFLKQVL

SEQ ID NO: 1830 - protein, 255 aa, synthetic construct; identical to SEQ ID NO: 1829
  REGION 1..255: note = TnsF-Tn7 System Protein

SEQ ID NO: 1831 - protein, 112 aa, synthetic construct
  REGION 1..112: note = TnsF-Tn7 System Protein
MKRQVEYTWRLAELMAARGLHNTTGLIPLLAERGIELSRPQVYRLVNQRPERVSLQVIAAICDIFSCGPEDLITVTAADVRARRSGTTNSPKVVDLNRTVRPRRARVINNDG

SEQ ID NO: 1832 - protein, 513 aa, synthetic construct
  REGION 1..513: note = TnsF-Tn7 System Protein
MTAEITPRIAIRGRPRTAGDFTCDRCSRTAGRHRASWSEGRICGTCFTVAMRTHGTCPDCRTERMLPGRSAAHGDQPVCVDCAGITQDYHCSRCGTETEHYRQNTCARCSLRDDLTALFRRSEASEATETTATKLLAALCGAQRPESILTWLRKPGVRDLLRRLASSEIPLRHEALDQEPNSLRVEHMRSLLTHHKLLPSRDHYLALFQRWLTSKLEDVDDADIQRPVESFARWHHLRRIRSLSADGKPTRGPVHSAKQEITETIKFFTWLKLTHGRTVASCVQADVDTWLADGPTTRHAIRTFFVWAVKNRTCTNITIGFRQAKTVPLLTQGQRLAMLKACLTDNIDTLHYRVAATLLLLYAQPVVKIAAMKSTDVILTPDGLRLSLAEGDPAPVPEPFASLLTQHLAARPNLRTGGSSGSEWLFPGYRPGQHIHPNTLMERLREIGINLLGARNASLRALVKEVPAPLVAEMLGYSYQVTQKHAAAAAEPWSRYPRIQATRIMTDTIGMDR

SEQ ID NO: 1833 - protein, 513 aa, synthetic construct; identical to SEQ ID NO: 1832
  REGION 1..513: note = TnsF-Tn7 System Protein

SEQ ID NO: 1834 - protein, 338 aa, synthetic construct
  REGION 1..338: note = TnsF-Tn7 System Protein
MLTGWRNQQLSRNLSFGTIEGRERLVTRFQESTNEYPWQWTPAHVDEFFGDLRSVKHAAQSTIRSYQAALRTFCAYAASPEYGWDRVCEQYFGTHPAQVCFDWNTAVHAQATESTPVRRPFTRQELQAFFDRADDEVDRIATLGRKGWLPAYRDAVLFKVAYCWGLRRNEVRHLQTVDFARNPHAREFGKYGVLQVRYGKAMKGSPPKRRSILTVFDWSAEIIADWLERGHPHMTDGLDLFPSERGTLVSETALNRRFNRYCEDLGLSPGLDIHSLRRSYVTHLIEAGMDPLFVQHQAGHEHASTTALYTSVSSDYRVKTLRRALDSTVRDALAGMED

SEQ ID NO: 1835 - protein, 110 aa, synthetic construct
  REGION 1..110: note = TnsF-Tn7 System Protein
MKREIDYRWRLAELMAARGMHNSTDLGPLLRERGIELSASQVYRLVTQRPERVSLMMVAALCDIFACGPEDLVTVTATDAKVRKVASDANVVDLNKTVRPKRARVIRDDG

SEQ ID NO: 1836 - protein, 390 aa, synthetic construct
  REGION 1..390: note = TnsF-Tn7 System Protein
MAERLSILLDDGTGRIRPQLIPFAEGLCRMSRPRSGLTWIANPHVQQMLRTLADPLTPITHETLNSLSPWRSVAYLRDLLMHHGVLPPADRQLVLFQRWLGEILAGIERPEHRQIVERFAAWHVQRRLRRFAERGPLTAKQSQQARAEIRRSIAFLAWLGDRGRGLGSCGQADIDAWYAGAYTARRLTHGFLRWAIRHQLLTPVTIPHQTTTNPAPITQKQRLATIHRLLTADDIPLLTRVAATLMLLYAQPLTRILRLSIDDVLHHGNQVSIRLGDPPSPVPEPFADLLLRHIDQRLNLTTATNPDARWLFPGRRGGQPMTPEALETRLRQHQIPGLRGRTAAIRQLVLQAPAPVVATMLGYHPDHTARLLTEAGATWSRYAAGDHTPR

SEQ ID NO: 1837 - protein, 809 aa, synthetic construct
  REGION 1..809: note = TnsF-Tn7 System Protein
MSTASAHLERAVSDPIGLIVGLIEAVDHALAPERIREVVIAVAGGRAKSRRLAAALAERPEVLTDGRSPAPRVVAELLLALRAAGATTVCPPCCAECGKHLRTFQRRGQRWYCSVCNRRTEPCAGCGNTRAISSRDRCGRPRCVTCPDHDGRDPITVIHQVIAELDPHAEWATVAAAVRRCASRPSYQHRVAWELEAQPGLLTGDGHLAPLRAIPRLIDLLAAAGVAGIIRPTCPRCRRVVRIDKPLEGVRVCRTCIAHSRIDECVRCAARREPVTRDDQGQPVCANCFITDPANLETCLHCGRRRPVDHRTPEGPLCPSCPTLPVATCAICGETTGCGISRVSGQPWCPACQRRSVTCSTCGHLRPIISGTLAQPLCAECSAPPAWLGCPTCSDPHPGHCGRCLINRRLDELMGPDTNALPPGLQALHENIATTAHHITAMRWLTKPAIAPVLADLAAGRLPLTHAAFDELGDSQALTHLRQTLVTVGALPERDEELVRLERFLTGFLASQHDRDRRKTLHRYTIWHLLRRLRSRNNGRPTSRQQALRIRSHARAANAFLDWLEAHTLTLGTCTQADLDHWLTDDSGAYRFETGTFLRWARTHKLTASHLVSLRWGGPTQLLDDHHRWDTARRLLHDETLKAEDRLAGLLVLLYAQGPTAISQMTTEQIQLNDHDVRLRLGRVPIHLPEPLATLARTVLANRKGHATIGALTPSPWLFPGGQPGRPISTARLTQRLTHLGIQPNQTRSTALFQLATEIPAAILARTLGIHTDVAVTWQRLSGSDWATYAADLNQRTTAPAGNSDSSNI

SEQ ID NO: 1838 - protein, 373 aa, synthetic construct
  REGION 1..373: note = TnsF-Tn7 System Protein
MGGRGDRFPGSAGLYLADGVALLHPEEQVFEAMLEGWRNQQLARNLSLSTINKRAVRLRAFLAHAEAFPWQWTSQHADEWFADLRAVRGCGHSSLRSYQDALRSFCSYVTDPAYDWLTECERHFGTYPVQVVHEGNAAAHVQEGEARPQKRAFTLEELQGFFDYADEQVIKARDRGRKGWLPAFRDATLFKVAYSYGLRRNETRMLDVVDIGRNPHGPEFGDYGLLHVRYGKAKKGSPPKRRSVATVWTWTAEILEEWVTEFRPLLAAPGTSALWPSERGVRIGLQRINSRFAAYRDALGLDPGLDFHGLRRSYVTHLIEAGRDPLFVQFQCGHEHASTTSLYTCVSSDFRTRTLRRALDDTLGAALEPTGRP

SEQ ID NO: 1839 - protein, 337 aa, synthetic construct
  REGION 1..337: note = TnsF-Tn7 System Protein
MDLAGAAHLELVCGVAQLRPEEAMLGAMLRGWRAQQAARGLREDTIIARERLVRSFVEFTNEYPWRWTPAHVDEWSLSLTGERHLASSTIRTYQCDLRLFTEFLTDNARYGWGAACEKEFGPGVHPVPIVHEWNSIAHLNAYEGNPEARAFTREELQRFLDYADDQVARAVRAKRKGALTAYRDATLFKVIYGWGLRRTEAARLDIADWGRNPAAAQFGRYGTLHVRYGKAKRGQPPRRRNVASVMAWAVEAVEDYVQNIRPRFGCDDQPALWVTERGGRIKPPEINARFEAYRDALKLPKALTPHSFRHSYVSHLTENGVDRRFIQEAYSAILIDD

SEQ ID NO: 1840 - protein, 111 aa, synthetic construct
  REGION 1..111: note = TnsF-Tn7 System Protein
MAAKLDYRWHLRTVMAERGLFATTDLIEPLGRRGIRLSSSQVYRLVVERPERLSLKILMALCDILDCSMTELIEPVTAGGAVTRKKKAAGAETSIGDLRPTRARIHGVERG

SEQ ID NO: 1841 - protein, 108 aa, synthetic construct
  REGION 1..108: note = TnsF-Tn7 System Protein
MTRQVSYQWRLREVMATHGMFTITELVPLLVDRGITLSVSQVHRLATGTPERLSLPVLAALCDIFTCTPSELIATKAENTAVRKTGSDEGVVNLNARRPTRARLRPEG

SEQ ID NO: 1842 - protein, 375 aa, synthetic construct
  REGION 1..375: note = TnsF-Tn7 System Protein
MSALKERLLESDRPTSVLTWMRSPKVKDLFRGLADGSITITHEGLDSAGRTGAVQHMRALLVDLKMLPTRDEGYVSFEHWVNRVVQDAPPSQRLPLTQYAVWHHLNRVRELVERGQDAHSPAHYAKQQITAASEFLQWLEEQNVTLINCGQGLVDEWLTTGPTTRYNVKLFLDYCTEHKLSSPLTVPRRNARSTRRMDSEERLRWIRFYCDATGLKLATRTAALMFLLYGQPLSRLSEMRVEQFTRTDAGELIVRFSGKDVPVPEPFASIVSEHLTGRARVRTQRVDDNPYLFPGMRAGKHITAQQLREELNVLGIDVLAAKNTSLDDLVTRMPAPLVAMALGFSFNAMDQHEIHQGVRFEEYVHGRFHDEKYTF

SEQ ID NO: 1843 - protein, 785 aa, synthetic construct
  REGION 1..785: note = TnsF-Tn7 System Protein
MNAAEHPADTHDLIRVQGARENNLKDVSVDIPKRRLTVFTGVSGSGKSSLVFDTIAAESRRMIDETYSAFVQGFMPSVPRPDVDVLDGLTTAIIVDQERLGANPRSTVGTVTDANAMLRILFSKLGQPYIGGPTAFSFNIPTQKASGVMTGPSGEKKIVKDAIYLGGMCPRCEGRGAVSDLDLSQIVDESKSLDEGAIMVPGYTADGWMVKGFSASGFYPADKPIASFSEKQRHLFLYGEVTKVKISGINMTYEGLIPKITKAMLSKDLEALQPHIRAFVERVATFAVCPECDGTRLTEGARSSKIEGVSIADACRMQVTDLAAWVRGLDLPGAGPLLQALSANLDAFVMLGLGYLSLERPSGTLSGGEAQRIKMLRHLGSSLTDITYVFDEPTVGLHPHDIQRMNGLLLKLRDKGNTVLVVEHKPETIAIGDHVVDLGPGAGSAGGEICYEGTVDGLKSSGTRTGNHLDDRAQLKDTVRSPSGAIEVRGATANNLQNVDVDIPTGVLTVVTGVAGSGKSSLIHGSVSRRDGVVAIDQGAIKGSRRSNPATYTGLLEPIRKAFAKANGVKPALFSANSEGACPTCKGAGVIITELGFMDTIETPCEDCGGKRFQAGVLEYKLAGKDITQVLDLPVSEARVFFSDGEAKIPAATAILGRLDDVGLGYLSLGQPLSTLSGGERQRIKLAIQMGEKGDVYVLDEPTTGLHLADVEKILGLLDRLVESGKTVIVIEHHQAVMAHADWIIDIGPGAGHDGGRVVFEGTPANLVSQKSTVTGEHLAEYVGA

SEQ ID NO: 1844 - protein, 785 aa, synthetic construct; identical to SEQ ID NO: 1843
  REGION 1..785: note = TnsF-Tn7 System Protein

SEQ ID NO: 1845 - protein, 253 aa, synthetic construct
  REGION 1..253: note = TnsF-Tn7 System Protein
MELFGTHPAPVFHYWNTARHIQEAEHGGRRRPFRHTELQAFFDRADDEVERIARTDRKGWAAAFRDATLFKIAYCFGLRRNEVRHLETFDFSRNRKAPEFGKYGHLNVRYGKAMRGSDYKQRNVLALYPWGSDILEEWLERGHPYLANQSGTELFTTERGTFVSETALGARFRQYRDDIGLGREVVMHSLRHSYITHLIEAGAPAYFVQKQVGHEYASTTALYTGVSDDYLTSTVRDMLSGTIGDALRNGSKD

SEQ ID NO: 1846 - protein, 93 aa, synthetic construct
  REGION 1..93: note = TnsF-Tn7 System Protein
MHNSTDLAPHLADRGINLSSAQIWRMVTGRPERLSLPLLAALCDIFHCTPADLITTWATDAAPAKRAVNEVTSLNAVGSRARPKRARVIADDR

SEQ ID NO: 1847 - protein, 481 aa, synthetic construct
  REGION 1..481: note = TnsF-Tn7 System Protein
MKFAVTWPEGSICRRCHQRITRIHGVCHGCGEQRLLPGLSPSGETVCVDCAQIPANFHCTRCGVEDEPVRTGLCARCCLKDDLGDLLRDEHGGIAEHMLPLYRALTTQANARSARVWMITNKPAKELLRALGTGSASLTHETFTQHPTPGKVQHLRKLMMSLEMIEERNGRIERFEIWLDQKLLKVPSPKHKRLIAQFARFVHLNRMRHLASQNSLKEGTLLSARQSTSTAIEFLGFLDGRGRDPGECTQEDINDWLAGGPTTRSLARTFARWAMEARHIPKLDFPYRVAKTLPRLSQDRRLELIRRALDDDELDSGDRAACLLMLLFGQPLTRVAAMKMEQFLHSDDGGLQVVFGEDPIEVPAVFIPAFKDYLANRPNTNTASNPGSPWCFPGFSPGEHISANRLMIRLREAGIDLQGAKNATLQELVLSMPPAIAADALGYSYQVMDIHEQRAGARWKTYPELVRSKARTNQGWQPQPP

SEQ ID NO: 1848 - protein, 481 aa, synthetic construct; identical to SEQ ID NO: 1847
  REGION 1..481: note = TnsF-Tn7 System Protein

SEQ ID NO: 1849 - protein, 371 aa, synthetic construct
  REGION 1..371: note = TnsF-Tn7 System Protein
MTGLPPGVVPLHLAQGLPVLHPEELVWEEMLNGWRNQQLGRNLSFTTIDQRIANIERFRRFAEKYPWHWEVKDMDDFSLELRGVRGVSHSTMLNYQGSVRLFIEYLTDSSYGWAEECLKRFGTHPAQIAFEWNTARHREDSMGGPKKRPYTREELQVLFDCADDHVVAAQRSGHKGWAAWFRLATMMKTAYAWGLRRNEVRQLELADFGRNPAAKSFRGFGMVYVRHGKAKAGSPPKHRTVVTVPQADWAVDCLRDWIDDIRPRIGSAQTNDYVFPSERNGAMTADALSRAFTVIRREAGLGDGLDFHSLRRSYVTHLVEDGYDAFFVQQQVGHEHGSTTSIYTGVSPDYRNRVVQQAFNQMAAELGQTAE

SEQ ID NO: 1850 - protein, 527 aa, synthetic construct
  REGION 1..527: note = TnsF-Tn7 System Protein
MAPLLIRKKPRTAPATTPEQKPKQAKKTAPMVREKLPGQRGWRGPGGGTAALLPAMKEYRGTTVQVCGLWPFSSGTSSPMIGVPLGRHEETQATVCCDPISWFQRAGLISNPSAFVLGKPGLGKSTLVRRMMLGLAGQGTHPLVLGDLKGEHVDLVRATGGQVIPLGRGRGYLNILDPGEALEAAERLTGDARARVLADAHARRLNMVIALITISRNQPPTDQEQTILDRALRWLDEHFDGVPVLADLLHVIQQGPDELQQVALNRGDWDLYQAETRGLEATLLGLTGGGKLGEIFSRHTTNPMRRDAAVVFDVSSIDETETDLQAAVLLACWSYGFGTVNVANALADAGLEPRRHYLIVLDELWRALRAGKGMVDRVDALTRLNRSYGVGQVMISHTMSDLLALPNEEDRMKARGFVERSGMVICAGLPASEMPLLTAAVPLSRQEQHKLISWQDPPAWDSRGVQAEPPGRGRFLIKVGGRPGIPVHIGLTNVEAKLNDTNKLWHQTDTPLMAEAPAAGTGGGEGS

SEQ ID NO: 1851 - protein, 527 aa, synthetic construct; identical to SEQ ID NO: 1850
  REGION 1..527: note = TnsF-Tn7 System Protein

SEQ ID NO: 1852 - protein, 113 aa, synthetic construct
  REGION 1..113: note = TnsF-Tn7 System Protein
MNRRIEYKWRLREIMAARGLNNISDLLPLLTDRGITLSDSQIYRLVGQKPERMSLALLGAITDALECSVEDLCHFEAVSSNSRLRRTVGSTAEPISLNETIRPRRARVRPTDR

SEQ ID NO: 1853 - protein, 371 aa, synthetic construct
  REGION 1..371: note = TnsF-Tn7 System Protein
MQAVEGALAATDAATGLNWVARTRTQRMLSALAAASGPVTHAQLDELTPATAVTRLRTILVDAGVLPTRDERLASLERSTARRIGRVKGPTSRKILRNFATWHHLRRLRAIASRQRLTHDQVTYAVNSLTAAANLLNWLHDRGRSLAACNQADIDDWLTNDSFSRSRSFVTWAVSRGHARGIEVPRFNNEPVREVFADHDERWSLVRRLLNDNTIATSDRVAGLLVLLYGQRAVRITQLTTEHVIINQDSVELLLANTPISLPRTLGGLVLQLLADRRSATTSDEEPWLYPAKRLGQPLSPSNLLVRLRTLGISPTLGRNTALMEMAAEMPAAVISRMLGISLDRATRWTQDAGNTRPGYAAELTRRATLK

SEQ ID NO: 1854 - protein, 371 aa, synthetic construct; identical to SEQ ID NO: 1853
  REGION 1..371: note = TnsF-Tn7 System Protein

SEQ ID NO: 1855 - protein, 99 aa, synthetic construct
  REGION 1..99: note = TnsF-Tn7 System Protein
MAARGMFSTTDIRPHLVERGITLSSTQIWRLVTEKPERLSLKVLVALMDILDCRMDDLIVPIAAVSRRAKAVGDNSSPDSGPHSGLGGIRPKRARITDS

SEQ ID NO: 1856 - protein, 262 aa, synthetic construct
  REGION 1..262: note = TnsF-Tn7 System Protein
MRESASTSRGAASASHYAKQEITVAGNFLNWLDDRGTTLRQCTQEDVDDWLSEGPTTRYAVKNFLTFAAKSRLSRPLIVPRRAVKSIRRIDADERLNFIRACLDADQHPAAIRLMALLLLLFGQPISRISTMAVDDVQVDDSGARIRFTDDWIELPSPFSELLARHLMDRAPTMTRSVDGNPYLFPGFRPGQHIRRDSIKSALNRLGLDLLGAKNTSLDALVAAMPAPLVADALGFSYGAMAQHESFGGLRFERYVSGRYSV

SEQ ID NO: 1857 - protein, 813 aa, synthetic construct
  REGION 1..813: note = TnsF-Tn7 System Protein
MTASDDVVLSPAERYAASRAKARTPEFERFRGRLAVELDDFQVEACRALEEGHSVLVAAPTGAGKTIVAEFAVHLALAAARAKVFYTTPMKALSNQKFSELAAEHGAEQVGLLTGDSNINSGARIVVMTTEVLRNMLYADSPLLGDLAFVVMDEVHYLADRFRGAVWEEVIIHLPREVRMVSLSATVSNAEEFGDWLQAVRGDTDVVVSERRPVPLEQHVLVGGKLTDLFDGAQSPDAPPRVNPELARLAIAGGRGAGAYRGGRPGRPPRSGGGQRDRVDRSEVARLLEQRHLLPAIFFVFSRNGCDQAVQQLLRSELRLTERWERDEIRHLVEERCAGLRDEDLGVLGYFSWLEGLERGIAAHHAGMIPTFKEVVEELFQRKLVKVVFATETLALGVNMPARTVVLEKLEKFNGEARVPITPGEYTQLTGRAGRRGIDVEGHSVIQWSSGLDPQAVAQLASRRSYPLNSSFRPTYNMAVNLIEQFGRERTREILESSFAQFQADRAVVDLARKIREQEKSLAGYAEAMSCHLGDFAEYARLRREVSDLERKQSRGHEGSRAERERRERRIAELRRRMKQHPCHACNDREAHARWAERWFRLKRDTERLSSQVRGRTGAVAQVFDRITELLLELGYLERDTHGALAVAASGRALRRIYGERDLLVAECLRGGIWEGVDAPTLAALASSLVYEPRREDAGIVREYPRGRFRAVFEQTQQRWAELSVQEEARKLPETEPLSAALASATSRWAQGGRLDAVLRDTDLAAGDFVRWMKQVIDLLDQLSLVADGELGRTARSAIDGVRRGIVAYSSVG

SEQ ID NO: 1858 - protein, 813 aa, synthetic construct; identical to SEQ ID NO: 1857
  REGION 1..813: note = TnsF-Tn7 System Protein

SEQ ID NO: 1859 - protein, 369 aa, synthetic construct
  REGION 1..369: note = TnsF-Tn7 System Protein
MAVDEFGRFQQATSRLPLLHPDETTFREMLRGWRAQQLSRGLSPRTVEVRAAIIERFVTITAAYPWRWTVDMVDEFFAERRSVHHNRRSTIRSYQNALQLFNDYLCTDAYGWVDRCIQLFGDHPSPVLHYWNTQRHVLEAEHGGRLRPFTRSELQMLFDRADDEVDSAAHRKTKGWAAAFRDSTLLKVSYLFGLRRNEVRHLQDLDFTRNPHAGEFGRFGHLNVRFGKASSGTDHKQRNVLAVFPWGSEIVQEWLERGRPLLPRSRDLFPTERGTLVSETSLNARFRQYRSDVGLGDEVTFHSLRRSYVTHLIEDGFDALFVQQQVGHDYASTTAIYTAVSSDYRVKALRMALDGTVAAALRLGSKDGS

SEQ ID NO: 1860 - protein, 111 aa, synthetic construct
  REGION 1..111: note = TnsF-Tn7 System Protein
MKRTISYEWHLAELMARNAMHNSTDLLPHLEQRGITLSSAQAWRLVTQRPERISIQMLSALCDIFRCSPADLITVIAADEATKARVNEATVRDLPDSRHRPRRARVIRDGS

SEQ ID NO: 1861 - protein, 496 aa, synthetic construct
  REGION 1..496: note = TnsF-Tn7 System Protein
MTDPDPPESPARRPRGRPRTSGHYRCDRCGRLAGKLRTRWPEGGICGTCFHHAVRTFGTCRCGHHGMLPGLDGLNNGHPACRRCAGITTDLDCQRCGVEAEHYRRGLCARCCLRDDLTALLPPAAPPAPPISRLINVLCEVERPESIHTWKRNPQVQALLRGLGDGTLALTHEAFDQADGAQMVGHLRDLLVHHGLLPHRDLTRFENWLHRRLAETHPAWVRRMLEQYATWHHIREIRGRISRGQDAGGRVHTAKQEITEIGRLLSWLDKKNTTLATCTQRQIDTWLAAGPSTRSAVRPFLHWAHRQRLAPKLTIVRRHAHSTPMITHETRMRWLALCLREEPATRAYRVAATLLLLYAQPLVRIAALRCDQILTTPTGPAILLGNEPAALVAPFDQLLLEHLKHRPNTQTGNTNSPWLFPSTHAGRHLHPNTLMSRLRTLGIDLRGARNAALKQLVQQAPPPIVASQLGYDPAVTQRHAEQAAQPDAHYAALIRG

SEQ ID NO: 1862 - protein, 496 aa, synthetic construct; identical to SEQ ID NO: 1861
  REGION 1..496: note = TnsF-Tn7 System Protein

SEQ ID NO: 1863 - protein, 371 aa, synthetic construct
  REGION 1..371: note = TnsF-Tn7 System Protein
MDEEVVGRVVPLRGLARRDRADQVVADMLEGWRRQQLARNLSFTTIDSRAQLVNRFLRHCNEMPWRWTVAHVDEFFGDLRAEHHLGRSTIRAYQNALRLFCDYLTDPRYDWDRVCERAFGTHPSQVVHEWNSVGHHQDNEQDPRKRAFTREELQAFFDRADDEVARIRRLGRKGWLPAFRDAVLFKVAYGWGLRRNEVRHLQTVDFSRNPHAREFGRFGQLQVRYGKAHAGSAPKRRGVLTVRSWSAETVEQWIRHGLPLLGGGLDLFPTERGTLVSEAALGARFRRYRDELELAAGLDMHSFRRSYVTHLLEDGVDPMFVQHQVGHEHASTTALYSCVSSDYRTRTLRHALDTCLNEALATAPRGRAGQD

SEQ ID NO: 1864 - protein, 116 aa, synthetic construct
  REGION 1..116: note = TnsF-Tn7 System Protein
MQRDVDYHWHLSELMARRGLHNSTDLAPLLRERGINLSPSQVYRVVTQRPERVSLKLLAALCDIFDCGIGDLITVTATNTARSRRAAGGDSTVVSDPNVVSMNELRPLRARVTRDD

SEQ ID NO: 1865 - protein, 503 aa, synthetic construct
  REGION 1..503: note = TnsF-Tn7 System Protein
MSDLRGRGRPRSTGDALCARCGSLVPRFRVHWPDGGICGPCYTSAVNTYGPCAHCNTDRLLPGRSPSGESICRDCAGIHTNLVCDRCGEEGERIRRGSCARCIIVEDLTTVLRPNDPPDLRLHRLIRELASTGRPQSIITWMRSATAAPLLQRLGNRELQLSHDAFDREPPSRSVEHLREMLTHHMILPSRGDIHLARFEAWLDQRLATFESLPHIHQSLERFGRWHHLRRLRQDPPPRNMDHATRAAKQEITEAGKFLLWLHEEQDTRIESIRQEHIDLYWSEGPSTRKHIRNFLQERRITGHRRPLTARARQAQTSPQLSDHERLEHIRHVLEADAVAPSTRVAAVILLLYGTPVGVIAGLRADSIVTTPTETSIQLGAQPAPIPIPLIPLFTSYLANRANTRTMNKGSEWLFPSTNAGQHINPNTLQLRFKIFGIHALAARNATLSDLSKDLDPTSLAALLGYSPSTMARHAARAGTTMAGYPAALSAVVNPTPNPPAAR

SEQ ID NO: 1866 - protein, 503 aa, synthetic construct; identical to SEQ ID NO: 1865
  REGION 1..503: note = TnsF-Tn7 System Protein

SEQ ID NO: 1867 - protein, 376 aa, synthetic construct
  REGION 1..376: note = TnsF-Tn7 System Protein
MDGRSDGVIGKLSWLPVADVRADPDGFLSEVLTGWKRQQVVSGYTMKTVARRNAAVLRMAAFVGSYPWEWLPGDADEFFAHLRGVENLALNTVRAYQGDVKLFLEYAGDPAYDWNENCGRLFGTVFSQVVTDLNRTRHVQETAEPTVRPFSARELQDFFDLADLEPERILRSGRRGALAAWRDAVAFKTLYAWGLRLNEMRHLILPDFSRNARRPEFHEWGVLRVRMGKAMKGSPPKQRTVLTVFDWSVDMIDHWVRVGRPRFDPEPATPLFPTETGKLLDGRNLRRKFHQLTDELGFAPGLDLHSLRRSYATNLQTVYGADTSFVQLQLGHEHASTTAIYTVAAPDYRSRHLEHLLTETLTRSGAVLPRPDRKDP

SEQ ID NO: 1868 - protein, 113 aa, synthetic construct
  REGION 1..113: note = TnsF-Tn7 System Protein
MKRQIEYQWHVRELMARTGMRNSRDLVGPLRDRGITLSESQIYRLAMQDPERIAFKVLVALADVFGVEVNELVTYTATSVRATRPKAVGAAADVPLLEAYRPVRARILGPDDE

SEQ ID NO: 1869 - protein, 293 aa, synthetic construct
  REGION 1..293: note = TnsF-Tn7 System Protein
MPDDGTRSSIQQYATWRHLRRIRGLEKAGGGHNPETATHAAKQEITEAGKLLLWLRETHNVGVADIRQAHVDEYLSTGTTTRRHIRNYVHWLDPAHRAHARRIDVPYRQAKSTPMVTQEQRLEMIRNCLNMEQVIISTRIAGLIFLLWAQPLNRIVMLRQANILRRVDGLYIQLGQTPTLVPDELAQTFGSYFDHPSNQQTGNTGTDWIFPGYRAGRHLHEATLGGRLKLLGIDPQRARNATLQNLAQQVDARSLIDLLGYSGKIITLHAARAGAPMSDYIELRRSAIGGQGA

SEQ ID NO: 1870 - protein, 427 aa, synthetic construct
  REGION 1..427: note = TnsF-Tn7 System Protein
MIWFFVVPPLEDVRRTTRLNPAMRSRSRPLLIRHSPEWTSAFRILCAILATTLDGGGCVIEDSENVLFAPFGGAAPDPEMFLSAVLDGWERQQRAKDFSPDTIRVRRSLVVKLVDSSGHYPWEWTFGDADDFFAHARGVRNLSHATVRSYQTAIRLFCNYATDPRYDWNEQCGRLFGRLFGQVITELNQITHTHPSETRTAKRPFTQRELQELFDLADLQVRRVLENGRRSPVAAWRDAVAFKTAYSWGLRSNEFRHLQLVDLSRNHRAPYFGDYGVVRVRWGKPHRGSAKKVRSVLTVWEWSVQVMRDWVRNGLPHYGEPTTDLFPTEPGAVVSENHLLDRLHAFLQELGYPPGLDIHSFRRSYATHLITGEGFDVSFVQMQLGHEHAATTSIYSIPSPDYQTRALQRVHEQTLIAAKNLPERTKP

SEQ ID NO: 1871 - protein, 115 aa, synthetic construct
  REGION 1..115: note = TnsF-Tn7 System Protein
MTRREVEYTWRVREIMARRHLFLAKDIAPLLHERGITLTTNAIWRIIRDDPERISLKLLVALADALEVSIDDLVTFTAHDAKSIRTRRAAGNGLPDLRDYRPVRARIIDDDDDGA

SEQ ID NO: 1872 - protein, 269 aa, synthetic construct
  REGION 1..269: note = TnsF-Tn7 System Protein
MPADAGELTVDQDQNVRVHITAAAQLLDDLAGRGTVLSACTQGELDDFMAHRATYPSRTAHFVRWAVAHRHAHHLTAPARRWAGPSGPHDEEQRWEVARRLLHHGGPVIADRVAGLLLLLYAQHVNTIRHLTLDHVQRDGDKLKILLGDRPIMMPAPLDALMEELIARRRGHTVLDEPGSWLFPGGLPGQPLSSDQLVIRLRALGIQPRQDRATALFTLASQVPAAILAGMLGIHRSVAVQWQQASGGDWAAYAADVAARSARTAAPSS

SEQ ID NO: 1873 - protein, 441 aa, synthetic construct
  REGION 1..441: note = TnsF-Tn7 System Protein
MIARGDDGEAICGPCAGLPGAYTCPGCGTGGRLYADGRCPRCVLKVRLEQHLGGPDGHVPNQLRPLADALAEADDARGVLCWLKRSPNAHLLAELAAAGRTISHELLDELPPGRYEHYVRQALVHTGVLPERHEDLDRIPAWLDTLLAERPAQHARLVRPYVHWFLLKQARRRASHRLHPARSGSFLRTRIRIALELLTWLDEHGLALATLTQADLDRWLVTGNTRTYTIRYFLGWAADRGLTPRLTVPAIPRQDPASILAEDDRWDQLHRCLTDTDLPLDVRAAGALLLLFGLPTSRIRMLRPEHLHDRDGGTYLTLGRHPLLVPPKLATLLGDLAATPANRTRLAAGAGWLFPGRVPGQPAGPSGFSRKLLDHGIDARPARNAALIALVEDLPAPILADVLGMHINTAVRWTQVARRDWTEYLIAREEDAKRGNTAPSE

SEQ ID NO: 1874 - protein, 441 aa, synthetic construct; identical to SEQ ID NO: 1873
  REGION 1..441: note = TnsF-Tn7 System Protein

SEQ ID NO: 1875 - protein, 106 aa, synthetic construct
  REGION 1..106: note = TnsF-Tn7 System Protein
MIKKMGIRWNLRQLMAAREMFKTTDLVAPLAERGVHLSREQVFRLVTQPPQRLSMDTLAALCDILECAPGDLIEVEVVNAQVRKTAGESTVPLPGPRRTKIRRPGQ

SEQ ID NO: 1876 - protein, 241 aa, synthetic construct
  REGION 1..241: note = TnsF-Tn7 System Protein
MRVGDFLAGIQEQGLTLARLRQDDLDHWIVTHQPRQRQLLKPFLTWAANAGHMPRLHVAPHRSGQRSPITQHRRIGLLRKLITDDTGELRARVAAILLLLYAQPLGRILRLTIDDIDTTGSDVLLRLGDPPTPVPEPVAELLLTLRDQRTNMRTATNRDARWLFPGRRAGQPLTTRTIAPLIRDLGVPTVPGRLAALHQLVLQSPAPVVAQALGFHHTTTHRHHAAAGGTWNRYSPSRNTL

SEQ ID NO: 1877 - protein, 111 aa, synthetic construct
  REGION 1..111: note = TnsF-Tn7 System Protein
MSMKRQVSYRWRLREMMAARGVFTATELVPLLHERGIDLSSSQVHRLVTGTPERLSLPVLAALCDILEVTPADLVVTTAANVAPRKAVAGAAPAPVDLATVRPRRARVRPD

SEQ ID NO: 1878 - protein, 444 aa, synthetic construct
  REGION 1..444: note = TnsF-Tn7 System Protein
MSEPEACWRCRTVPPGRRGRHPTCFPCRVTLRLQRLLDDGSGAPHPDLAPLIDHLKTDPDPRRMLGWLARPHTADLLIALASGQVRLAHEALHIWPHQVAVRRLRHHLIAAGILPDADPRLLDIEAWLHRRLDQLAGHPHEQLLRQFALWHLLPRLRATAAGRPLRTNAHQYATQQFTQAQTFLTWLHDQQLRPHQLRQADIDTWNLTHRVHQRELVRGFLLWAIDRGDMPRHLVAPRLTFQPGTPITQHRRLALLRRFTTDDSQPLPIRAVACLVLLYAQPLSRIHRLTTDDILDRDGEMLIRLGDPPTPVPDPFAALLRELAAAAPPAGWLIPGRFSHRPAHQRVLQDQLKDLGVPIQQARVAALRQLVLQAPAPVIAEALGYHPTATTRQHTHAGGTWNRYTALPRRPAAPISNTPRPSHIREGTEIRTDEPEHGTTTGPF

SEQ ID NO: 1879 - protein, 444 aa, synthetic construct; identical to SEQ ID NO: 1878
  REGION 1..444: note = TnsF-Tn7 System Protein

SEQ ID NO: 1880 - protein, 369 aa, synthetic construct
  REGION 1..369: note = TnsF-Tn7 System Protein
MSVTRAPQTAKHRLGRPTLAMLPRVADSLSFLYLESVQVTQDDTGVLAYVETPHGVEKTYLPTAALSCLLLGPGTSITQPALATLARHDTSVVCVGAGGIRSYANIQPAGLTTRWLEQQARTWADDTLRVQVAARMYRTRFATDVPESTTLAQLRGMEGQRVKAYYKLLAQKHRIPRFRRNYDPAKWDTQDPVNLALSAANTCLYGIVHAAVCALGCSPALGYIHSGTQLAFVYDIADLYKAKTTIPLAFALHDSPDPERAARSRLREEFRLIRLLPNIINDIQTMLDLSRDLDTDDDPGDRASLTADMVHLWDPDLGALPAGVNYSNDTPAAGNDTDAPRPSPPAGTIDNGDLEDDDVLINLGDPWPQ

SEQ ID NO: 1881 - protein, 376 aa, synthetic construct
  REGION 1..376: note = TnsF-Tn7 System Protein
MGHGSGGSPSGAAGLYLVDGVPLLRPDEQVFAAMLDGWRDQQLARNLSVSTVDKRLGVVRMFTAHADAFPWVWRPQMLDEWLSDLRAVRGRSRSTIRNYSLAVSAFCRYLLDPAYGWPARCEHQFGSHPVQICHEWNTAVHVQDTEADPSRRAFTLTELQTLFDYADDQVAHARAAGRKGWLSLFRDATLFKVAYSYGLRRREVVMLDLTDFATNPHAAEFGTFGVCRVRFGKAMKGSAPKPRSVLTVWPWTPDILTQWVDELRPLMPTAADSPALWPSERAGRITLSAVNRRLTEYRNALGLPAGLDVHSLRRSYVTHLIEDGWDPLFVQQQVGHEHASTTAIYTCVSSDFRTRTLRSALDATMRAAIGPGGARP

SEQ ID NO: 1882 - protein, 112 aa, synthetic construct
  REGION 1..112: note = TnsF-Tn7 System Protein
MTARRTVSYQWRLRETMAAHGLFNASDLAPLLAERGITLSAVQVWRLVTQTPERLSLPVLAALCDIFDVTPAQLIATRADNVAAPAKTANARPDGTADLNAYRPKRAQLRPE

SEQ ID NO: 1883 - protein, 236 aa, synthetic construct
  REGION 1..236: note = TnsF-Tn7 System Protein
MDTQNLTLSQARQADLERWLDLVLGHRRGLVAFIRWTRLRNLADLALPTPRSGLPQYFLDDVEMHTQLRRCMTETTLSLEVRLTGALVRLFALPVSRIAALTADDFTQDESGAYLTLGTSAVLLPPRLAAFVQDLIAQPHRLAAVAPSPAHDPGYLFPGKVPGRPRSSNALRDQLGRHGLLTLAARNTAMITMITDMPPQVVSDLLGFSPSTTTQWATYLQDSWADYLAARHAPEG

SEQ ID NO: 1884 - protein, 236 aa, synthetic construct; identical to SEQ ID NO: 1883
  REGION 1..236: note = TnsF-Tn7 System Protein

SEQ ID NO: 1885 - protein, 1055 aa, synthetic construct
  REGION 1..1055: note = TnsF-Tn7 System Protein
MGSDDLTAAGLDYLQRVGFTPPATGAASNLTTAPVSLRTMVRVTGVGRLNKGGSTSPGPSAHDAASDSGGPGVDGLSPISKDLLVALHNYMVPLAFLVSAEPGQAAVRIGTWLPGESSLQSPEHNGRLLTTSLHTLYPAVDLVADAPSVDQWPRGGMVMGIPTAKPPDAADGAAQVDRLLRALRQFRWETLILAQPVGEGLIRDLKLRLINEMRAVHTASTLGGVPSPLAQHYLELLTRQLKSFTDAQGAGAWRTAVYLLGDGDSYQQLASLWRGVYSGAHSLPEAVRVWDRDDVPTLAASWSMLDPGPDTNAPGSYRQPFQHQTLLTSTQLAAYVHLPNLETNGFSIRVAPAFDVVPEAITDERSIVLGRILHQGHTTGTPYAVSPKSLTRHAFVAGVTGSGKTNTIKHLLTEIHRCGIPFLVIEPTKTEYRALLTHPELAGQLNVFTPGKETVAPLRLNPLEVPPGTGIGEHLDLLRAVFGASFAMWGPLPQVLERCLHEVYEDRGWDLRTSLNRRLGPQETSWRAYPTLTDLSQKVKDVVPRLGYEPRTQDDIQAALLTRLDAMRKGGKGATLDTAQSIPMRELFNVPAVIELEGMGDDDDKAFLIGLLLIRLAEHRRAAGQSDDLTHVLVVEEAHRLITNVTRGGSEYLADPRGQAVETFTNLLSEIRAYGQGVVIADQVPVRLAPDVVKNTNLKIAHRVVAADDRSILGGAMSMTDAQERFISTLGTGQAAAFSEGDDAPLLITIPRAHHNGRAPHDTDVAQAMNRWRTRLRLQELYHPRPYCARTCHAAPWACTMARALIDDRYVQRTVARLALSTAEHSAALDRLWPEVVSVLRARRTEPVDEQRLLKAFAGHAADWYAQRRAAQASWPYRDTDALADILRAMLVQKVEGAQDPTVRERFQSQMRELHTRAHDPYPDCDRICDQAPLCLYRAAAGDVVASHRYHLQWQRAEDADARTDNGQRRQNTWNTATASSYDIVEQPHAGMSQDERARVAAAARRASLCFAQQMLADDERKVPSTARWIAGRLLNDADTNGGPSDNSAMGSELP

SEQ ID NO: 1886 - protein, 1055 aa, synthetic construct; identical to SEQ ID NO: 1885
  REGION 1..1055: note = TnsF-Tn7 System Protein

SEQ ID NO: 1887 - protein, 108 aa, synthetic construct
  REGION 1..108: note = TnsF-Tn7 System Protein
MIKKMGFAWKLRHLMAEREMFQTTDLVPLLAERGIVLSREQVYRLVTQPPQRLSMDTLVALCDILGCTPNDLIEPKVVNQQVRKTADGAAGPVEITPRRTVVRRPDRP

SEQ ID NO: 1888 - protein, 430 aa, synthetic construct
  REGION 1..430: note = TnsF-Tn7 System Protein
MKVLAFFDDDGTIVCAACAGVPSRFACKTCGSEEQLTGSQCGTCRLQERAQAVLAQDDGKIHPDLTGLYDILLSTPDKRTVVRWIKHDQVHGTLRAMATGGAPISHSTLNQLPPSPRIRYLRRLMVTAGTLPAVDVHLNDHEVFANCFLQTLAPNHATILRRYHQWHVLRMMRQESEAAPISPNVDYRRRRELKAIDYFLSWLDGRGTSLERIHQQDLDRYLAQPKGIEIRTFVVWARRHHLMPQLEIWARRTGRAQQAISDEARWTAINRLVNDESLSLTVRLAGLFVLLYAQPVTTCVRLLHSNVVCTQTSVAIRFASTAIEMPRPVAQLVKRYLQSPTQRAIYRSPEHQWFFEGLMAGTHMSEANMRLLLHNAGLEPLRARGAALRHLTVALPARIAADALGISTGTATTWARLSGGTWKDYPGLRR

SEQ ID NO: 1889 - protein, 430 aa, synthetic construct; identical to SEQ ID NO: 1888
  REGION 1..430: note = TnsF-Tn7 System Protein

SEQ ID NO: 1890 - protein, 365 aa, synthetic construct
  REGION 1..365: note = TnsF-Tn7 System Protein
MGDSPLHVLGNVRPLDEPAFIFNAMLQGWDDQQQSRGLSRQTIDVRTSFIRRFSAYCEKLPWEWAPVDLEDFSIHALSRARPLAKSTTRGYQVMVRAFCDFMMDPRYGWAGECEKRFGSAPQQICHDWNTVRHLAEYEGRPERRALTYDELERFFTYADGRVETIIQAGRKGALTALRDSQIFKTTYAYGLRRAEVVGLDVADLRPNPAAPGYGTYGCVEVRWGKASRGSGPRRRTVLTVPELDWVIEGLEQWVHEGRDRVATDAGDALWTTERATRVSLRYLDDRFAEIRDGAGLPRELSLHCLRHTYVTNLIEWGYSERFVQDQVGHLYASTTAIYTSVGNDYKNRVIARALSRIYGATDAHT

SEQ ID NO: 1891 - protein, 122 aa, synthetic construct
  REGION 1..122: note = TnsF-Tn7 System Protein
MPTPETPANTVAWHLRDLMAAAGMFKTTDLVEPLRKAGVQLSREQVFRLVTKPPARLNMEVLAALCLVLDCTPNDLIKIVPANVGFRKTGTTDAATSTGSSLGSLRPVPARIHRPSDPGPGS

SEQ ID NO: 1892 - protein, 204 aa, synthetic construct
  REGION 1..204: note = TnsF-Tn7 System Protein
MSQLIPWRWVACLRDLLMRSGVLPPADRQLLLFQRWLAENLSAIDYPGHRRLLELFATWHVQRRPHTLTDHCPLTSKQIHQARNEILLAIAFLSHLAERERTLADCTQADVDDWHAGGYTARRLTHAFLRWAMRCNHMPTVTIPHRSTSNPTPLAQHQRLILLRQAVNREDIPLQDRVAAALVLPPLRAAAHPDRAAHRPRCSP

SEQ ID NO: 1893 - protein, 204 aa, synthetic construct; identical to SEQ ID NO: 1892
  REGION 1..204: note = TnsF-Tn7 System Protein

SEQ ID NO: 1894 - protein, 497 aa, synthetic construct
  REGION 1..497: note = TnsF-Tn7 System Protein
MTENVIEHDCHGCNQSVSFIKKRYKGKKYCSTCYARIFKKRLCPSCGEFARLPRDDEQAICNECIKKQPCIRCNQTNKPIGKLTEYGVVCNSCSVYFRPIEPCERCGTPSQKLTRISRFNDDLRVCPKCATRDYETCPSCQKHRLLESDISGQRTCKKCRDKPQKSCKACHCMIAAGCADLCDDCYWHQNLWNKFDQNQKVFESSYLKQQYENYTGWLEKKVGSHKAALYINKHTHFFMKTEIDWNQSVPTPKQLLVRLRSSGLRKFELVMQWLEEVHDIRIDMDNKKSCSERDQMEKLVQRILQPSFAYDVVLEYKNKLEEKIKRGDTSIRSARLAIKPAVALMLSIGEESDQLPNLEHVKAYLADYSGQAAALTGFINFLNENYGISIDYLKLKKSSFLKTKQKKKLEMELVALTQTDLSDNELILSWVRNGLRYFHQLPYIDALKIKTEMITEIEDGYDVRFNGHSYWLPKPIELQKKQLAICFISKIFSKHLS

SEQ ID NO: 1895 - protein, 497 aa, synthetic construct; identical to SEQ ID NO: 1894
  REGION 1..497: note = TnsF-Tn7 System Protein

SEQ ID NO: 1896 - protein, 236 aa, synthetic construct
  REGION 1..236: note = TnsF-Tn7 System Protein
MKKLSDEYSPVRKAQTVYGSISGNYAFRGEKTIWFESTLERDFILKQEFNNNVIDVVGQPVVIPYITELGNQSTYTPDFLVQFSSSNCDDFEDFPVPMLIEIKPKKKLVEDWDKLKPKFRAAHRFAADKGWKFKIISETRLYDQYWENINFLKKFRRSHVDAVDQQLLLDTLQKLGQSTINQLPAHIFKDKTNVLKGIHQVWALVAKRMVTCDLYCPLTAETVIWVNQNDAFARNI

SEQ ID NO: 1897 - protein, 636 aa, synthetic construct
  REGION 1..636: note = TnsF-Tn7 System Protein
MIESNAVNIDRSRIILKPNVVVGYEGQPYKIVNVLNANDIVISSLDSVRSLQVNARSLTVFNGENTLTESLNKGDQDISNEAWQIALQRYEIIKPLIEYSTTELVENRANEYDVNRSTLWKWLKDYRENNSLMALIPKKRGWTTEKSRLSPQVSNIIKQAINDEYLNAKKPSISKTIEIVKAECSRLQLEAPHENSIRRRIEALNDYQVTKARLGSKAAIDKFKAAAGSFPNADYPLAYVQIDHTPLDIEIVDDEFREAIGKPHLTLAIDVFSRMIVGYYLSLEAPSTTSVAMCIASCILSKKRKLIELDIDAEWQVEGIMDSVHTDNGPDFRTNHISKACLKYGIHWEYRPIGGARFGGHIERMLGIVNLEMHVLDGTTFSNVQQRGTYDSAKQACMTLKELEYYIVYWITKVYHQKKHSALGTSPIVKWEEGVWGTKTTAGTGLKERVSDEDTLFIDFLPEFEATIQRTGVQKDNLFYFADCLRQWVNSIDPEDNNRKRKRKFLFKRDPRDISQIWFYEPFSNTYFKVPTAKREIPPISLFEYKQVQNYLKSERQDVQNQDEIYMAILHLREQLNQARSLTRKQRRSNQRKKENEKAITQLSEQNQSKKAVVSESLQTSDDLWNTPLTAFDDLR

SEQ ID NO: 1898 - protein, 306 aa, synthetic construct
  REGION 1..306: note = TnsF-Tn7 System Protein
MEKYEHLAEHVLEIMQLSDSERIETLFTDRWIGYKKAITIMNTLTDILNRPRKLRPECLLIVGDSNMGKTTIIHEFARQYYTKTVSDADMDLLSVTKPVLPILAPAKANVKELYINILNHFFVPFRASDPEAKLRNQAVHLMRKYETKMLIIDEIHNCLTGSAKLLPEVMNTLKNLSNELSLNIVGVGTREAITILHTDPQYASRFDVVNLPKWELNQDFLRLLVSYVRLLPLKKQSNLASKEIATLIFEVSGGNLGDLNRLLVECAKEAILQGDEEITYDIVHKFKWLKPTEGLRNIRNINLSLS

SEQ ID NO: 1899 - protein, 306 aa, synthetic construct; identical to SEQ ID NO: 1898
  REGION 1..306: note = TnsF-Tn7 System Protein

SEQ ID NO: 1900 - protein, 371 aa, synthetic construct
  REGION 1..371: note = TnsF-Tn7 System Protein
MSQPEQCWYIRTPIQQGEVFSSWLIRSALDVGCSPMVLIEALWGKWRALTIDLDKGVDAERFDALLSHSMESKQNIQQSMLSSVVSEIHTNYDPKQNTPWVLSLGTRNRSNTSGRQVCVECLKSRENPPYLRLMWRMGWHCSCVEHQVSLIDHCPECGVTIQPFKADMEHGCLAICTTCGFDLRHCEENKIINLNALDFQNKAEQVLKQKFGFYNQSPVTSQVWFEIARAWLSEIRFLVNTPNKNVIQLFESFDVNLHLPNPITPLAFEYLNTQERIVLLSILDQIMDIPCDLLVQRSNEYGVSRANFWDKRKKLPVQLQQMKDLMIKPTRRYPVSRVAITVTKPKSKATVQRQWLNLLRRSNNSGARHID

SEQ ID NO: 1901 - protein, 273 aa, synthetic construct
  REGION 1..273: note = TnsF-Tn7 System Protein
MHQAFSSYVRWAVVHTNAKRLCLALVRHAEFFTTLDQHPNAVWDDAFVLRVFGTARLRKYELPMRWLQDQHALALTPEAKQANAEIQTSRKLMQSLPAGSVAEAVLHAFFDELHARMKAGKIKPRTMRMALRPAVSLLFATSPEGAAMPNQAALNDMLRRAPGQRAATSTFLGFLKARYAIELLARQIPSHAVADAREKLGTQLSEIANSSRRDPKSRMQWDVAALRYFHRLSKRQAQEIIKTAKRALLPSGDELHMGGQVFWVPHPPWTVAS

SEQ ID NO: 1902 - protein, 162 aa, synthetic construct
  REGION 1..162: note = TnsF-Tn7 System Protein
MTRSGTKSIATPDYLVYYKVRDDAIGMEFKPMLVEVKERKEWLKHWREWLPKWVATRRYAREQGWLFRVMDETRIRTPAFDNIMFLRRYDDLDVCPHQSAAVVEDMRELGSVSIDYILAKHFAGSFRAQGIAHLWHLLATRQLDCDICDPLNEDTLIWAAYD

SEQ ID NO: 1903 - protein, 655 aa, synthetic construct
  REGION 1..655: note = TnsF-Tn7 System Protein
MIDKDYGDYFEETPSVVIKRRRIDVRSGALVRHRDGVFRIAEVLDFNTVTATSMQTGRTSVLLVSDLENVDQDPGSPSDIDINAIVEDDWRVAQTRFAAIEPLLTTKSPTRAAVQARAQELGVGIATLYRWISRYRSLDAVSGLVPLKRGWQYGKGRISKSVQLLIEDVINNYYLTPERPTAEKVVREVLRICEEQNVQAPSATAVRQRIDRIPEVERLRRRGQRERAKNKFLPTPGTTPGGDYPLAIYQIDHTPIDVIVVDDEHRKPVGRPWLTIAIDEYSRMVAGYYISFDAPSVVSVGMCLAHALIPKDMWLLKHGVDAEWPIWGRPKKVRWDNGPDFRSDSVRDVCNLYAIDAEFRPVKVPRYGGHIERLQGTLLRELHDLPGTTFSSVQERQEYDSEGRAIFTKSELEKQLLKIICNEYHRRNHRSLDMPPLRRFELGIFGHGGQLGTGMPPRPTDYLSIYIDFLPIIWRTVQNDGVDIDKRYYADVLRPWIGVIDPETGKGLKHPFRRDPRDISAIWFFDPELKEYFKIPLADPNFPSCSIWELKRAKQELKDAGFDPSDSTAVLRSITERRQLTKDSAAKTKQARKAAQRQADHQRVADEGPAPVQAPKVRASADRDIAPRPTAASRITALLPAASLLTDVVRGSDIA

SEQ ID NO: 1904 - protein, 306 aa, synthetic construct
  REGION 1..306: note = TnsF-Tn7 System Protein
MTKMELEPSAAPEATHIHESFRTALDLGPEERIRFLLEPRWIGYARAKLILDDMAALMRMPKVPRMRNMLVVGDSNNGKTKIIERFMELHGEGYVSEDSHSIRPVIIAESPPSADEKGLYVSILSQFWSPYKKNGTVTELRYDAISRLRLCHAEILIIDEIHSLLVGPSAKLRAVMNTIKMLCNELRIPIVCVGTRDAVRVLHSDPQHASRFDVYSLPLWKLDPEFQTLLAGFESVLPLKKPSGLASPEIATLLYDISEGNLGDLHRLLIECSKVAIQSGQECITREIVASKVWVKPTKGIREVQP

SEQ ID NO: 1905 - protein, 306 aa, synthetic construct; identical to SEQ ID NO: 1904
  REGION 1..306: note = TnsF-Tn7 System Protein

SEQ ID NO: 1906 - protein, 497 aa, synthetic construct
  REGION 1..497: note = TnsF-Tn7 System Protein
MSTDNHGRRTCDCCGRLLVKAHRIYKGTEYCQACYEQQFARGICPTCQAGVRYHVAEDQVPECQKCTLEKRECGRCHRPTPRAALIHTVQRPDSLGLNEGSVQSIAVCASCVPYFRDPEPCGICEELSSRLSGAAHLQAGVRACPICIRKDTHATCSRCRKHRRVASIDGDRVLCKACTGLSPASHPCPRCEVEVPGAGAHMCASCGIAVRLRREQDLRLPLFHQPWVAELFMGFGQWSHTRSPANPRVPANVVRSLEFFLALDQDTALERPLRAEDMLRLFDSKTLRANLNASTYLQQQFGFVIDATARSDAQKRSLIASKLSTAQLEPWHPYLQGYAQSLAGRAARTASQYLATAEAFCRQFQVSGPFSQEQIVAFLVDKPGARANLGPWVSYVKRELGWAVTLPPKVTAGIALKADARQLNQLLEQVRRQPEPDLSLLSKVVALAFGYSESELAREVTGISDSGDLITANGPVQVPGPLRSAVNGWARLRGWAS

SEQ ID NO: 1907 - protein, 632 aa, synthetic construct
  VARIANT 358: note = X can be any naturally occurring amino acid
  REGION 1..632: note = TnsF-Tn7 System Protein
MSLSNFFKVEPGAEVYVGPRKYRVTHMLSIDSVLAEDMETGTSAKLRIETLSTIIAAESANEAGGLPIHHYSKEEWAVAQKRFEALRPMIDHPVRTRSEVAKLAAQAGVHVATYYKWLAAYHDAGHVAALVPRKRGAIKGQKHLDPSQELVISSAVEDIYLKRQRHSPKEVVEEVARRCKLAKINPPAASTVRRRLKELSPALALRRRGHRDKARDTYEPIRGSFPGADFPWAVVQIDHTPLDVMVVDEVYRRPLGRPWLTLAIDVYSRMVVGLYVTLDKPSATSVAMCVSHAMSPKTEYLAALGIQGDWPVWGQIGTLHADNAKEFKCKAVTRGCEANHVDMQWRPVKKPHYGGHIXRYMGVVATELKKVPGATFSNTQQRKGYDSESEAVLTMGEVEAYLVEFIVNNYHQRPHSQLNSASPSKVWREGVLGSAGKPGIGYPPMIQDIDRLRMDFLPYFEITVQRSGVRLDNIFYYDPVLDPYIGATMPDDPGRKRKFLFARDPRDISQIYFLDPAANRYTPIPYRTLSHPAISASELREVTRLVKEQNKGEVDEERIFASIQRNRERIEASAASTKSARRQMASRPKRKRETQLPATTAEAPSPTESIVVTADASLFDQELDVFEVGELD

SEQ ID NO: 1908 - protein, 204 aa, synthetic construct
  REGION 1..204: note = TnsF-Tn7 System Protein
MLFLDELPEWNRSALETLREPLESGHIRIARAARSVQYPARFQLVAAMNPCPCGWAGDRSNRCLCSDERINRYRARVSGPLLDRIDLHISVARMDAVELRESTPLGEPSVAVRARVEAAHAWQQARGGLNAHLPPAALRACTKLSEADQDLLEQAIERLQLSARAMHRILRVARTIADLAGCEDIQTAHLAEAIGYRQLDRGNA

SEQ ID NO: 1909 - protein, 612 aa, synthetic construct
  REGION 1..612: note = TnsF-Tn7 System Protein
MTDFKHFPNDSRLWFTRWIERFSKPHKASTSTSVCCYLSPLPPSLSDPAKATPAQIASLFAQESETFETHILAGALPTYRVGEVFRQARRVGVLPAVDLNLGRAIAQGELSAKYGSDLTLDSVIARSAGYPIKAVPTRQLHLGHRIREGSQVLIVEHQDIEFIIPRALIFRTFYARSSFLASVFTSSAWSTAKHRALLLDKEYAGHRTGRNEEFGTFDVIMQRGMRLDDAHQMALLHFYEYGEAQANALFNPMLKAFQDTKPGKETSWFSNARLPLDPTLGPYEGKVAGYFLTPHTDQRRQLRTFLVTSIVGTSMPHDFKVTRRILVNDGSLDGDVEVTGGPRPYGAKPGSGGRRPNDKPSDDGHNGSTNHQSFDSPGDSFEWIKAPEPVELEKKHSKKYSQPRVPPESPVTEEGSYGDRDGSQGSQSSFEGRLITRDALTRFKMLMKAMDAMILDRVISSCEELFADDSTKRVSVGARVCWNFLDQAQRQTAPSQRYRRGWQFVHPIGKRSGGLERAALVLEVTLLDGRTAYWIEIQTRQGAMSPLLICDGSCKQEQISTALNIIAGARGANLEEAFDRPKAAYFFTHRYLSGGEGPWDLDWLKKFFSSIK

SEQ ID NO: 1910 - protein, 202 aa, synthetic construct
  REGION 1..202: note = TnsF-Tn7 System Protein
MVIIGMPATPDLSQLWSEILDSCAVTHRRSDTAPAKYSQVLAILRYLKTRVLAIDEFNNVVNARKGAADVLAGIRKLSNDLNLSIVAAGTEAAINALSFDAQMRSRFKPLALARWQMDRSYRGFLNTYEKLLPLAKPSGLAEMELASLIFKASGVAIGGTVYLIKEAAVMAMRSGEERITAEIVLQAELRLKQNYQGVVAAT

SEQ ID NO: 1911 - protein, 202 aa, synthetic construct; identical to SEQ ID NO: 1910
  REGION 1..202: note = TnsF-Tn7 System Protein

SEQ ID NO: 1912 - protein, 256 aa, synthetic construct
  REGION 1..256: note = TnsF-Tn7 System Protein
MPDATGTGPLAAMRAALAEAPDAGTVLNWLRGSRSARLLRDLMTSGCALSHTDLDATIEGRATAMTAEYLRGLLTAYQVLEPRDELAVRIVRHLERTVARHPEHGALLRAYVRWSLLPRAKRHQAARAGGVKHRIRWAYTRINLAAELLTTTADHGLTIATLDQSHLDVWLAAKPGTRYEARDFVVWAHRRHHARDLLVPHRPKADPVGLDEDSHWDLLHQTSPTPASTSTSGPPARSSCCSANTSLGSQHCPPPP

SEQ ID NO: 1913 - protein, 256 aa, synthetic construct; identical to SEQ ID NO: 1912
  REGION 1..256: note = TnsF-Tn7 System Protein

SEQ ID NO: 1914 - protein, 490 aa, synthetic construct
  REGION 1..490: note = TnsF-Tn7 System Protein
MVSTEVDLEAGCHECGRAMVKAKKVHDHCRYCANCYARLFKHRLCPGCGNVRRLPVFDPAAKCGPCERAGPCVRCGKPEFAIGMRSEYGPVCKVCVPYFRVAEPCQTCGKLSQRLAVSTKTGLRSCNTCREPAGATCPCCRRHRVLVVDHDGVSRCKACCGGREHPCDTCGAAMPAGRGKTCESCYWTSLFNRRVGVNLVGFTSVQVSELYEAFSRWLLARVGPHKAALTINGYYAFFAKLDKYWQGVPTYDDLVRTLGAAGLRKAENPMRWLQEVGAVTVSVERRDEHTEQRRVSDLLSELPDFWSKQLLHGYHSELVLRTERNQTDMRSVRLALRAAVNFLKIAALAPQAHPNMNALEAFWRRSPGQVAAVTGFVGYLNKTHNTELRARPDKQWLAKAKKDKAERELIALLDGTGVASETMWIAKALAYFHNVRRVSGKALKYRIESFNGTAGFSVEHEGRSLWVPSASSYIRPPKDTGAISEQHPRG

SEQ ID NO: 1915 - protein, 578 aa, synthetic construct
  REGION 1..578: note = TnsF-Tn7 System Protein
MSHPVKRVEFNYPRADVRHPDSGVARFREDHIVWWYNSIRANTRGVRTIPEVEVMFRKLNNGVPSSAPSWASVPLTSLPHYQIGTIWREGRCISDTEMEIRRFDVDFSPDKWRITSRAELLDTKQGNIFHPDDYPLKYRRDFSTLLIFSLPDKTTLIIPCIEYLVRAYARNMAVCKALTTLTLREVKSVFFKCQQRDAFRWIIKPTDVMQNADAVFLAHFLYDDYTESQVRMVNSSFVSKGPNSKVFPQVAPWFQGTGQLLCRGRWINEGKTFLCLSLLGSTQPQGHEIDLFRETFDSSGGEEEGRVAPPKVVRTARAEEFLEEESYSTPDIQSERLIVKTPPFETLGPKRAVRKITSVKESNRGIRGPRPENANSYSSGDAMGGGKGVGQSEHVSDVVLESEGFLLDIWNAFLSIKRDNPERVSEVSWYASPNHGTSSPPRILLFNRDDLGWAERNWVAFDPWEPERRRGFMILRIVIDNQAYYCFEIERMEPSKMHPEPRGFSGALMKAHTSDPEEFQKFVTEVCRRIRISKGVFKNIMPSFPKGSIVFTHHSADQEVLYRKGLIDAFIRVDVVLK

SEQ ID NO: 1916 - protein, 490 aa, synthetic construct; identical to SEQ ID NO: 1914
  REGION 1..490: note = TnsF-Tn7 System Protein

SEQ ID NO: 1917 - protein, 228 aa, synthetic construct
  REGION 1..228: note = TnsF-Tn7 System Protein
MTANRCDRPKQVRKIKSTWRSVSGFLPFRGVGGIPFESLLERDFLKLMRFDYRVETVIAQPVKVDFIDPSGRANTYTPDFLVYFHQCDTSPEEYIKPMLVEVKPAYEWRKNWRAWRGKWKTARRYARQEGWSFSIYDESRIRGTALENIVFLERFERYTFDKEDIDMVLNTIKGMEIAPVHYLLARHFNGIYRGRGVSLLWHMIAVGLLQCDINEPLDEFLELWVTAP

SEQ ID NO: 1918 - protein, 614 aa, synthetic construct
  REGION 1..614: note = TnsF-Tn7 System Protein
MVRREKEVFRIVQLVDFQVVIGLEVETGRCVSLRVPELRAVEQDKLDGLYVNHDVSTISSDDWAVAQKRFSAIKPFINHSIVTRDSVEMRAKEVGVDTATLYRWIERYRNWHEVLALVPRKRGWKAGSSRLTIQADKLISNVIDEVYLNPQRNSIPYCIREIEERAKAMGIEPPGASAVRARIKSIPQKIVLRRRGYADKAYNRHTPSVGSFPGADYPLAVVQIDHTPIDLIIVDDRHRRPIGRLWLTLAIDVHSRMITGYYLALEEPSAISVGMCLSHSFLPKENWLLLHKVEGEWPVWGFPRVVHTDNGADFKAEDIRRSCSNYNIENNFRPKKKPKYGGHIERLLGNFMTMLHELPGTTFGNITDRNGYDSDKRSALTMDEFERWLVITILRYHNERHTALYMSPSRKWHLGFFGNRELDPLVCVPPRPDDPHTVQLDFMPYYERTVQTYGVQIDVFYYSEALRHWINTKDPETGLARKFVFRRDPRDISVIWFYDPVLKQYFRVPVANQAFPAATVWEFRAAKQKAVDEGRKHIDEALISKLIAEQRAVVEDAVSTTKKTRRAAQKNKVHSKNRTPAEPHKPFSKPPTAPAIPAVEGLLLGDVEFDGVIQ

SEQ ID NO: 1919 - protein, 199 aa, synthetic construct
  REGION 1..199: note = TnsF-Tn7 System Protein
MLFLDELPEFERRVLEVLREPLESGEIVVARAKDRVRFPARFQLVAAMNPCPCGYLGDPTGRCRCSSEQVQRYRNKLSGPLLDRIDLHLTVARESTVLTHQPSGETSASVGQRVAEARALQQRRQGCANAFLDLKGLRRHCPLEPVDQAWLEQACERLTLSLRAAHRLLKVARTLADLEGAQSIARAHLAEALQYRPSA

SEQ ID NO: 1920 - protein, 152 aa, synthetic construct
  REGION 1..152: note = TnsF-Tn7 System Protein
MLIIDEVHSMLTGSAIKQREVMNALKLLCNTLMIPIVGVGTPDAVQILHIDPQHASRFDVVKLDTWKLDADFQRLLKGFEMILPLKKPSNLFQPELAQLLHSISAGNTGDLHRLLVECATEAITSGKEYIDRPLIESKSWTRPTRGIRHLVV

SEQ ID NO: 1921 - protein, 152 aa, synthetic construct; identical to SEQ ID NO: 1920
  REGION 1..152: note = TnsF-Tn7 System Protein

SEQ ID NO: 1922 - protein, 481 aa, synthetic construct
  REGION 1..481: note = TnsF-Tn7 System Protein
MKNTVKTTKKSRCDCCGKRNTIIQRRFKGEGYCPNCYRTWFVKKPCDKCGESNRFHKKESVNICRKCMRLEPCIRCGRDAFKNGANTQYGRVCQTCYAGYFRDKKQCFECGELKSNVSSYSTLMHNQPVCASCYQKHFNETCESCRRYRKLIDTDNGRICKKCHEQGLIPCCNCNKLMPAGLGERCWDCYWLDRLAHEIKLNSYLFSSDSVKNDYQEFVSWLSTNKGAKTAKLKNNNFIEFFIRCDELWGEIPSYKILVHEFKPEGLRHNLTVLRWLVDTNRVTEDLAVKSYVAEQERIIKLLNKFNSELPREVSQYHKFLMKRHHAKEIALKTVRMNLQPVVGLYTTFKIEAGYTPNQEQIDAYLLQRSGQYNSLIGFISFLNQEYDKNLRCNRPKQDEVAKATKKQLEKTLMEITSKSEPLTAKDKLTWCQVAMALFHNTTISIKSLKLAKTKDFGSDMQIIIYRNKEYCIPKPIGDKK

SEQ ID NO: 1923 - protein, 212 aa, synthetic construct
  REGION 1..212: note = TnsF-Tn7 System Protein
MKQTRKIPAVRRSVSGHISYRGEPIAFESTLERDFLIYHSFRDDVIDIVPQPISIPFKKNGRTYNYTPDYFVQVKSGYGKSLLVEVKPKKEWQENWREWSSKWKSAIAFCKEQDFKFSIYDEDRIHHYAFENLQFLAMYKNIAVSEDEVKAIIEDIRLRGFTTVEYILERYFKSELYRQHGRRLMWYLMINKLIKFDIWSDVRSEKLEVWYE

SEQ ID NO: 1924 - protein, 667 aa, synthetic construct
  REGION 1..667: note = TnsF-Tn7 System Protein
MNNDEDDIKAPVGIEVKSHFTPLERGYIQMVIGGLYVNKTDKKEYLLVEFLDDINQAVFKDLSTLSNHVLSVHDFENSVSESNVSVIVDLNEISDKDWQKAQRKYLAIKPLLGGVGFKYNGVKGYEKRAEEVGVSSRTLRRWVEQYQSTGSIGSLLDRKRGWSEGKARIEPETDNLINEVIDDFYLTIQKPTVQATIREVNRRCFKEGYEKPSPNTIRKRIHDISEEKILKGRGQRKRAKQKFTAKAGQFPNANYPLSVIQIDHTPIDIILVDDKYRKPIGRPYLTVAIDVYSRVITGYYIALDAPSVTSVGMCIARSILRKDELLTSFGIHDATWNVFGKPAKIHVDNGSDFRAESLKKSCAFHGIDIEFRPLARPEYGGHIERLIGTLMKQVHGLPGTTFSNIKEKDEYNSEKHASLTLHELETWLLTYITKVYHETIHSSIGRTPNEQWRIGLFGDGYDAGIGIPAVPENAQTLMLDFMPSIERTIQRNGVTIAGLQYYDASLNNYINATENEGSNSKTKRKFTFRQDPRDISNIWFYDPALKHYFNIPLANQALPAMSLWEYKILKNKVREQSGTVNEALIYQAWEDMQSLVESSQQATKSLRRQEQRRKSHKKSQKAYDGLKQEDKAQDILDKASITSGDKKNDTSIPDIDLNDDLYYEDID

SEQ ID NO: 1925 - protein, 145 aa, synthetic construct
  REGION 1..145: note = TnsF-Tn7 System Protein
MDLYARRIVGFKLSDSPNTALTTSALKMAYHIRLKPKGVLFHSDQGSHYTSEAYAQCVAECNGMRHSMSRKWNCWDNAPTERFFRSFKTEWMPKNGYEDIDEARQAVSAYIWNYYQNVRPHSFNEYLTPFEKERLYFNQNLLKTV

SEQ ID NO: 1926 - protein, 401 aa, synthetic construct
  REGION 1..401: note = TnsF-Tn7 System Protein
MSKTDQRFTQDYWLKTLPIATVQPLVFKTNFRKDESLTSWLIRASFNQFCPPLSFTWYHWRPLRLWVYDVDKGFEHIDAQIQKDIACLAEVDDEDVYQHTLAYFAKCIGANINSKVAYPWTTPLSKRNRYSRIGNHYCPECLESDDEAYLSILWRFSWVVCCTKHKIALQSNCPHCDAPYQPQLIPIDIGKINYCYICNEKMNALTAKLIPSETVCEYQATAISVYRTKKGIAFNQMVDIADWFESLLFLINMTKKAVNNIDHKFGKILLSLGVLHAIEEITVPRSRLSFDHLSVKERLFLLERAYRLMQIPLEQWILVCEQHDATQNSFHWSKDTIIPKPFLPVYNQLPKSNKAKRKVDSNLNNPTPPSVVINHWERLKRKMEMQKAYEKHRENNQEKQM

SEQ ID NO: 1927 - protein, 481 aa, synthetic construct; identical to SEQ ID NO: 1922
  REGION 1..481: note = TnsF-Tn7 System Protein

SEQ ID NO: 1928 - protein, 298 aa, synthetic construct
  REGION 1..298: note = TnsF-Tn7 System Protein
MNSTPYSHIHEKFRHIAHLPDDERIKFIHSPRWIGYKTANTILSLMHDLMNRPKQHRMPNLLLIGDSNNGKTTIIKKFNEKFGDTYVDDNDRINVPVRLIQAPPSANEKELYISLIDSLGLPFRSSDSGGILRHQVVHSFREANVRILIIDEAHSMLTGTARQQRTMMNAIKYLCNQIDLPIVLCGTKDAVRILHTDSQHSSRFDVAELPVWRNNNEFRRLLGSFEKILPLKEPSNLIDIEKTNLIHSISDGNLGNVKRLLNECAIEAIKTGEETITLDIIRGKSCLRPTKGLRKIIG

SEQ ID NO: 1929 - protein, 298 aa, synthetic construct; identical to SEQ ID NO: 1928
  REGION 1..298: note = TnsF-Tn7 System Protein

SEQ ID NO: 1930 - protein, 802 aa, synthetic construct
  REGION 1..802: note = TnsF-Tn7 System Protein
MAGVFAPAVVADPIGVIVDLVLGQQPEWDRPMVAGVVEAVAGGRAKRRQLAQALLDRPGVFADGRSPAPRAVADLLIALNKAGATEISAPMCAECGKELRTVQRRGEHWYCGVCGPHREPCAACGQLRRVSCRDRDGAPRCSQCPPDEGRDPTPLIVDVVAQADPTLSAEVIAAAAAAAAPQAGQRRRLAWALQDRPDLLTGSAATAPAPTVLRLIDRLCDAGASAITRPACPGCARVIQLHRPIGGKWLCRNCTAKSRAQPCARCGAVREAATRDEHGRPLCPTCLSRDPANQEVCVECHRRRPVSVRTDSGPVCAVCRPVRTMTCSICGHDGPCTVSAATGRPWCLTCHKRWARCAVCSRTRPIRGGTLDDPRCAECARDEPGFWRSCPGCGQPGRLHTNRCTRCNLHQRLRELLGDAHGHIRPDLCELFEALTATERPNTLAAWLDRGGGPTILRQLQAGQRVLSHETLDELPIGKPVEHLRSVLVAIGTLPHRDEQMLRLQRWTAELITSRTDPEERSLLHRYAVWHVIRRLRSRIGDGDTTYGQARAAKRSIKSAAALFDWLVAHDLTLATARQGDLDRWLTTAAPGDRRDSGNFVRWARRHKLTQLDHAAQRWDGPTGVIDTETRWEQARWLLHDDTIDTADRVAGLLVLLYAQTASTISQLTIDDVQLTNEQVRLRLGRDPILIPAPLDQLIRCLVATRSAHAVVGSRQATPWLFPGGQPGRHLSAFRMAERLRELGIHASRARSAALFQLATELPAAVLARMLGIHISVAAAWQRASAGDWTDYAAEISRRTYR

SEQ ID NO: 1931 - protein, 220 aa, synthetic construct
  REGION 1..220: note = TnsF-Tn7 System Protein
MRLTAGDTSSAARRAREAGLDAAMRPNSWDESAAVRYDRALWTDLTSLRFLDGPHGALLLGPVGVGKTHLATTLGHIAVRRRIPTLMLRADAMFKRLKASRLDNSTEAQMRRLAQIRLLLIDDFALQPMDVTATADFYELVVARHQRGSTVLTSNRSPDKAHLFARTCAEVASKRDTFALIRVQRAGRAIGRRRCDRRGRSSLLPVSSRMRPLRVSGRSY

SEQ ID NO: 1932 - protein, 220 aa, synthetic construct; identical to SEQ ID NO: 1931
  REGION 1..220: note = TnsF-Tn7 System Protein

SEQ ID NO: 1933 - protein, 160 aa, synthetic construct
  REGION 1..160: note = TnsF-Tn7 System Protein
MHFDRGPFGKLHVRFGKAALTSGPRPRWVPMLDGLDVLLRWFLADVRPKFPESPVLFADESGGALHRGTIRNRLRYLMELEGRPATERFSPHALRRACATHNYERGVDLVAIQQLLGHWTVSSTMRYVNPRELHQTGAFSQVACSVGWGNGAGAVSRHAG

SEQ ID NO: 1934 - protein, 802 aa, synthetic construct; identical to SEQ ID NO: 1930
  REGION 1..802: note = TnsF-Tn7 System Protein

SEQ ID NO: 1935 - protein, 104 aa, synthetic construct
  REGION 1..104: note = TnsF-Tn7 System Protein
MKIRWRLRMAAAQREVWTGTELRRLLAERAGLELSAASVSALLTKEPSQIKLSTLIALCTALDCTPDDLFEIDTTPVEQPAAPPRPVASELKTATARGRSMPPM

SEQ ID NO: 1936 - protein, 276 aa, synthetic construct
  REGION 1..276: note = TnsF-Tn7 System Protein
MLDKIQSYFGFTTMPFGRALAPGMLFRSGDHAQAAARIGYGIATRGITVITGEVGVGKTVAARAAIDRAEPARHHLIYIPDPTVGARGIHHHIVSALGGRPSFHNASLVPQARDTLAAEAAERGRVPIVCIDEAHLLCHDALEALRLPTNHRLDTESPFATILLGQPTFAAKMALGTLAALEQRITVRRTMTGMTSEETAGYLRHHLQLAGRSDPLFTDDAIALIHQSSRGKPRGINRLAIAALIAACTADKNLIDEASARTAVTETNHDLQPATP

SEQ ID NO: 1937 - protein, 276 aa, synthetic construct; identical to SEQ ID NO: 1936
  REGION 1..276: note = TnsF-Tn7 System Protein

SEQ ID NO: 1938 - protein, 341 aa, synthetic construct
  REGION 1..341: note = TnsF-Tn7 System Protein
MLRGWRAQQTARGLREETIVPRERLVRRFVAFTNEYPWRWLPGHVDEWTQSLMAESHLAPSTIRGYQTELRLFSEYLCDARYGWVAVCEREFGPGVHPVAICHEWNTIAHLNDYEGDPEARPLTRAELQRFLDYADEQVERAVRARRKGALAAYRDATLFKVVYAWGLRRTETSKLDVVDWGRNPATPEFGRFGMLHVRYGKAVRGQPPRRRNVPSVMGWAVEAVADYLDNIRPRFGGAEHPAMWLTERGGRIRPAEINARFVAYRDALGLPKVLTPHSLRHSWVTHLTEDGVDRRFIQEAVGHRCDTSTAIYTHVSGDFMNTALRKALDPAFDDQAAPRR

SEQ ID NO: 1939 - protein, 254 aa, synthetic construct
  REGION 1..254: note = TnsF-Tn7 System Protein
MQAALHDAVKTHGCPRNLYCDNGSAYSSNQLAWSVAVLDIRLVHSRPGRPQGRGKIERWNRTVRDQFLVEIQAAGGVDSLDELNRLFTAWCHQQYHRAVHSETGATPAARYHAEGRTHPPRPDTALLRRAFLWREQRRVTATATVSLHGNRYQVDAALVGRVVDLLFTPFDLTIIDVEYQGKTMGRAVPHTIGRHTHPAVKPSATAPAEATGIDYLHLLEQAHQADVGQAINYLALAGDDPEPTQHNQDDQENT

SEQ ID NO: 1940 - protein, 110 aa, synthetic construct
  REGION 1..110: note = TnsF-Tn7 System Protein
MTRKLDYRWHLRQVMATRELFATTDLIEPLAQRGIHLSSSQVYRLVVERPERLSLKILMALLDILDCTMDELIEPIAAAAPSGKKRTAGGADTGIGDLRPKRARVTAVES

SEQ ID NO: 1941 - protein, 863 aa, synthetic construct
  REGION 1..863: note = TnsF-Tn7 System Protein
MDEDLELERLVEDDPLGAVVHQLARIERGLPAERIREVAGQVLGGPATRRRVARELRDNPQVMATGRSPSIWSVGKLLAALSKAGAQQLSAPRCCDCGCETRTPASRRGGLWACGRCSRPKERCVRCGTPRCSACPLEEDPTAELVDLVAALDPALGRAEVERALAGCSQRASVWRRVCWAVLDRPALLTGDGHLAPTPTVLAFLGALADAGGGVVKRPCCAGCGTSEYLRGRREGPWICSRCEEQRRSQECSRCGKTRRICTRDDAGPVCGQCFRNDPANREACTGCGQRRVIKSRADGGRWCHRCSPHEARQCSMCAQAARCTISRTTGAPWCRSCRSRYIRCSTCAEVAPLKGGTLAVPLCARCVNPDPGFWDRCPTCQVTWQFGTEPCQRCAVDKVAGQLLGPEGQTGHLAPLRQALVAVERPDHAMAWLSKPNVRTLLADLSRDPRPVSHEVLDALPPGKTVHHLRALLTATGLLPARDEHLAALERWVQEKTAILTDPGQRRILHGYATWHHLRRLRRRTEAAATTTAQDQNVRVHVAAAVQLLNHLTDRGLTLGSCAQGDLDDFLVHHATYPSRTANFVRWALTHRHAHDLSAPATRWQGPCGPHDEDRRWAIARRLLHEDGPAVADRVAGLFLLLYAQHANTIRLLTTARLHRDGQTLMVRFGDRPIHLPAPLDALVEELLATRRGTGLLNDPGAWLFPGRLPGQPLSADQLVARLRALGVRPRQDRATALFTLARQVPAAVLARMLGIHRQVAVQWQQAAAGDWTAYAADVATRSSGRDPGTGRRRRSLDRAAEGDRREVFPGDRLRRRVRGDVDEVDLLHPHRRVAGSHLVAQHPLDLVGAFVLGVWQDRRRG

SEQ ID NO: 1942 - protein, 863 aa, synthetic construct; identical to SEQ ID NO: 1941
  REGION 1..863: note = TnsF-Tn7 System Protein

SEQ ID NO: 1943 - protein, 1550 aa, synthetic construct
  REGION 1..1550: note = TnsF-Tn7 System Protein
MYPVSADDSLRTAFVSFLKPDGAVVGGGVLVTDENAVVSVLTCAHVINMALGRHQFASDKPTSDSVTVAFPSVPGQRCSAHVTGWWPARSLRDEEGTLSGTERRWRGDIATLRVTDALPKQVRPVRLAAPSLGQSAWSWFGSGEPTSVVRVHVSAVADDWLVLSGAPTGHAVQPGYSGSPLWDRKLQAVVGILVSAHHSLPYSRLTTADITRQSYAIRADIIAERCLAHSPKQRLLPADVQSLLNAQRSAARAFPYRAVGLHGRDPSAVYVRQQVSTSDNAAAALATDPEHAGAAPDPVVLRPKTIEEALATHRHLFLTGVAGSGKSTLTLQLATRAVVLPRDGAAAATLLPVRLLARDLAARPGMRLLSAVSDALGASLVRFLARDLDPRLLERRVPGSRWLLVIDGLDEVTSRADRADLIERLRVFMEEEREYHVLITSRPLPDDERRTWDSDKELTHYAIEPFQHHQRAQFAHSWFADDVDLAESFLRELAASRLEEEASVPLLATVAAVVFAEAPSQPLPASRFDLYERYFSHLYDSRARQLLSDTQSRLAGRPMAEKLAQELVEARVALIEHLAPLALKARSLLSEALQWLADRGITPTPAPADWAEIVGSVLTSTGLLLPDGEGLIFAHHTFAEHICDLLDARRLPSRFDPDDPIWWKTLSLACTDGDLTAQRTILHRALINSDASELLDWLLAGNDIARELAAALVSRGVRATAGQHEALARTFDFWLWRALRGGNGRFVNQVISNQVVGALSLLRSLDHPLQRVIHGAAENAALPDVVREAAVHDLLRSGEPHRSRGLALFRRFACDPQLAGAVRVRAAQALEFAGALPAARESLTFLSQDEAFLHEHHRNMAEQLLSDAPGWISLPHRPAAGPSPIDLRPIPADLSIEEEYAEDLSTPPGFMESPRDSDQVVPWSAEAGLLDLPVDISALLSLSPTADEEKVAAAAVRAVAADLFCILRGQSPPGARQAASAWSRLAKWLGTRPAPLHSAHAASVIRLLEAVTGHQHQMDDRPGLLVSHPQRAVLAALLLRAQPEHQLAGLRLLTGPMAIWDVNVVRFLLQVAASYQPGLREQVVAQHCRILLDSRLPNLCRQDILMSVRSIDADAAATFLTQRCTADPYMVTTNVLWLGRQYRAEAVGYVQRRALGSLDGVLESWCNAASVLLGTGSRGDREEMARILKEVALRTEVGSTQALAVTAVLASHNRAEAGPCAGHIASSAAASDTHRMAAASLLARLGAGPDYESVVLNVLDRLDAQQPPQGAVAFAAEVACISSTVRDRSEAFLRTCLESGSVGLPTELVVAELASLGPSARARLCRDLVRLLRGSTDRRQWSGLLEGIALLGPDLHEATQTLLSSRVRTSETAADRFGAIDLINHLNWQGSGAQAAALLTTLADTESEPPTTRALAARRLYKYGPQHLPTALCTLQALAANHHILPPLLSIQIARELATVGAIEQAEQVLATLARNRALLEPDRVEAALLLLVLDPSCSGSTRQTLAAMAHDRRLSADTRSWAAEAPSALARSNRHAALLGQARRPAPHG

SEQ ID NO: 1944 - protein, 1550 aa, synthetic construct; identical to SEQ ID NO: 1943
  REGION 1..1550: note = TnsF-Tn7 System Protein

SEQ ID NO: 1945 - protein, 116 aa, synthetic construct
  REGION 1..116: note = TnsF-Tn7 System Protein
MANAKLDYRWHLRTVMATRGLFHTSDLVPLLAERGIQLSTSQVHRLVAERPERLSLRILMALLDILECRMDELIEPVTVQGAAVRPVKKAAAGGGPAPEAGLGALRPRRARITGGG

SEQ ID NO: 1946 - protein, 624 aa, synthetic construct
  REGION 1..624: note = TnsF-Tn7 System Protein
MSVAAPPRHICDQCGRLAPRAARTAEGGLCRTCYQRDPRRFEECAHCARRKVPSSRTPDGKALCNNCARPKRVCAGCGRLDHAKLVTGDGPLCQRCYTAPPRRCGKCGIVAPVAIRAGRRGDVDLCKRCFQSPELACGHCGRIRPAHTRWPLGPVCLPCYKLTLRRAQQCTQCGEPKILIGRDATTGARICGPCAGSAQDYSCIQCGHAGPQHFAGTCLRCSVGRLASELLTTTTETGPAVEGLQELPKLLAHRGDPASTMRWLIKPRTQSMLFTIARSAATDTLTHSTLDTCDQVRARHYLRAMLVELGLLPPRDEPIDRFETWINELAATLPAAHAALIHPYARWAVLRAARRRARRRGYTDGAANTDRERIRTALRLIEHIEAQGHQIRGLTQAMLDSWSGGNRDRTSHIAGFIVWLTRRGIVEDVAVHRVSTPPPSEIGDEQEHLALITEMLDDTSQVELSTRVAALLVLLYGSRLPQIQRLTTADVITTKKGTALTLAGHPLLLPAKVGALIDQVAAAADANPHARTLDCSAAYLFPGGRRHEPIHTTTLGRKLNKAGISVRVNRNRAMLALTSDLPAAIVATQFGLHISSATTWAKFAQRDQRAYLAARPQPLAAGGA

SEQ ID NO: 1947 - protein, 624 aa, synthetic construct; identical to SEQ ID NO: 1946
  REGION 1..624: note = TnsF-Tn7 System Protein

SEQ ID NO: 1948 - protein, 380 aa, synthetic construct
  REGION 1..380: note = TnsF-Tn7 System Protein
MLQTIAIRGYRSLREVILPLTELTVVTGANGTGKSSIYRALRLLADCGRGQVIGSLAREGGLQSVLWAGPEQPSDEAQGTTRTRVISLELGFAADDFGYLVDLGLPQMAGIGPTAFARDPEIKREVVFAGPVLRPASTLVRRANEYAEAAAQSGRGFDELSRSLPSYRSVLAEYAHPHALPELSAVSDRLRDWRFYDGFRVDADAPARQPQVGTRTPVLSDDGSDLAAAVQTIIETGAGDLESAVAEAFDGAGVSVAVTDGLFDVQLRQRGMLRPLRAAELSDGTLRFLLWAAALLSPQPPSLMILNEPETSLHPDLVRPLAGLITAAAARTQVVVVTHSHALLDFLGGATEIELYKQWGETRVTGQGMLDIPSWHWGKR

SEQ ID NO: 1949 - protein, 380 aa, synthetic construct; identical to SEQ ID NO: 1948
  REGION 1..380: note = TnsF-Tn7 System Protein

SEQ ID NO: 1950 - protein, 342 aa, synthetic construct
  REGION 1..342: note = TnsF-Tn7 System Protein
MLQGWERQQRARFLKDATITPRLRLVRRFVEFSGLYPWQWAPAEGEAWISALRSGSSPLRVSTARNYEIDIRMFCEYLLDQRYGWLTECTQQFGQVPQQVFHEDNSIIHVGEYEGDPSRRPLTYDEVQALFDAADARVESIRARGRKGALTALRDAAMLKFCYAYGLRRREVVHSDVVDLRRNSKADEFGRFGALSVRYGKSSRGGAPKRRTVLTVPEMSWIVEVLDHYLTDVRPLFPADKQQALWLTERGSRIGTRMLNTTFSTVRDEAGIDPTLDLHCLRHSYVTHLVEFDYPERFIQEQVGHSFSSTTAIYIGVSNEYRNRLINRSMQSRYGHLDGGPR

SEQ ID NO: 1951 - protein, 110 aa, synthetic construct
  REGION 1..110: note = TnsF-Tn7 System Protein
MKQMDYAWHLRAKMAEKGMFSTTDLQPHLADRGVSLSREQTYRMVTGQPQRLSMHTLVALCDILECTPNDLIEPQVTEVATKKVAGQSRNTVTALASARRTKIQRPGAGS

SEQ ID NO: 1952 - protein, 424 aa, synthetic construct
  REGION 1..424: note = TnsF-Tn7 System Protein
MCDIEAEPYRRGTCARCALHGDLTAMLVKPATDRATMLRLVEALCASDRPESIFAWLRPEPARELLTRLATGAIPMTHEGLDAEGESRRVEHLRSLLEHHGLLPKRDHHLALFDRWLAAKLSTVQEPEIRQPVERFATWHHLRRIRAIARASRPTRGPVHWSKQEISETIKFLSWLKDTHGRHLPECVQADVDEWLAAGPTTRHAIRTFFVWAKKARLCSGISIDFRQPMSERQLTQADRLSWLRECLVNESETLPYRVAGALLLLYAQPVVRIAGLRTSDVVVTPDGLRLTLGIEPVDVPEPFATLLRQHLTNRPNLRTGNHGDSPWLFPSTRAGRHLHPNSLMDRLRDLGISLLGARNAALRGLVAEVPAPLVAEMLGYSYQVMDKHAAATATPYARYVALPSRRSAPRQIEKTRRQVGSEG

SEQ ID NO: 1953 - protein, 424 aa, synthetic construct; identical to SEQ ID NO: 1952
  REGION 1..424: note = TnsF-Tn7 System Protein

SEQ ID NO: 1954 - protein, 264 aa, synthetic construct
  REGION 1..264: note = TnsF-Tn7 System Protein
MAAGRGTLLWRRHVGDGTSIVACEPHRRDPSAGSCGRDTLLDTAACEALASVPLENALPIREFFSWRGKRNYEGVWWSSTTRHHVRFESLLEREFLLSADFDGRVVAIASQPLAVLWPRGTEGHKSHVPDFFCRLSDGDGRLVDVRRPDRLDGSAKQSDLTRRLCERVGWQYKVFTGLPTPRLENLRWLSGYRQDRYRPSDACGPHILDAFSAGTSLRAGVLHAARTSGVSSEVVQANVLNLLFTGALRVDIDSPLSMETEISA

SEQ ID NO: 1955 - protein, 955 aa, synthetic construct
  REGION 1..955: note = TnsF-Tn7 System Protein
MHQVVSAPRPRDESAEGEFEASGQLSAALVAAHSQLQDQSPEAALMSAWVREPGREDFRFLIGARPGLPGVRASSLQPGRDAVPYPPGCLGLPLLPGALADLLEQFPCWLRCPGEPDVLWSENDAERARSRTGSFAEYASHLNYPFAWVVVAQPLPDSDVDRELLLLANDLPGLRLRVNSEADRVSLQRGEARFRELTRAQLSGLWNVHVLVGALTAGQARAAAAVLCSASDIDRLPYALVPGVAPGALDGAWAQQGNRGRAVSPFPASSDLVAALTAPPTRELPGIRLLQPNPFDVTPEDPAQDGMTLGTVLDRRHEPAGFLAVSRATLNRHTFISGATGSGKSQTTRGLLEELSRADPPVPWLVVEPAKAEYARMAGRLRGTTSVLRIRPGDPDVPPASLNPLEPAKDFPLQSHLDLVRALFLAAFEAAEPFPQVLAQALTQTYRSAGWDLVTGEMRTTARRGRVAGEQDTASPRYPRLDELQVMARRVVDDIGYGKEVTANVKGFIEVRIGSLCTGTPGRFFQGGHPLDVEDFLRRNVVFELEGITDDQDKAFLMGALMIRLVEHLRVRYGLTGCDTLEHVTVIEEAHRLLKRVDSGPAAAAVELFASLLAEIRAYGEGLVVVEQIPSKIVVDVIKNTALKVVHRLPSQDDRESVGGTMNLLEEQSRAVVALPPGTAAVAVDGMDRPVLIKVSSGAARDDAGPAHNQAPFTGTRSTTCAPDCRDSACTLRQMNQALHNAGQPELVLWVEAVLVAYLMGFVPPVARPHVRAILTDMPNRELDCTLSYLAERSISARRAPLHRYMDPASLELEVHAQLRHQLKFGAASPVPAATRWQAGPHLYRDVARKLRLRAQASQPVEAQLLQQWAQRGLDLAGLTTSTALKRVEDRQAREPADVVLGDPKASGLLTAIEATSGSASKAGVRAAISGICAENATVPVAVEVSRRLPTAPEG

SEQ ID NO: 1956 - protein, 955 aa, synthetic construct; identical to SEQ ID NO: 1955
  REGION 1..955: note = TnsF-Tn7 System Protein

SEQ ID NO: 1957 - protein, 715 aa, synthetic construct
  REGION 1..715: note = TnsF-Tn7 System Protein
MNPLTTTAFDLPEHLSPKSDPALITGDDQHFAAIAESLAQSIADLSDRLDAERRAPGGQGQAALDRDLEVHRLTARLRTLRRFGLDLCLGRIVSAEDPAPVYVGRLGLTDGTGRRLLVDWRSPAAEPFFGATHANPMGLVSRRRYRWTRGRITDYWDEVFTAEGLVGNAALDDQSAFIASLGSIRSARMRDVLGTIQADQDAIIRAGSAGALVVDGGPGTGKTVVALHRTAYLLYADPRLGHHRGGVLFVGPHQPYLAYVADVLPSLGEEGVQTCTLRDLVAEGATAGVEADPHVAELKSSAELVSAVEAAVRFYEEPPRRGTTVTTPWADVRLSADDWAEAFDAREPGTPHNEAREQVWQALLEIVRDGHDDDVPADELRASLDEDGDLRATLDRAWPLLEATDVVGDLWSVPAYLRTCAPWLSPADVRALQRRDPRAWTVSDLPLLDAARQRLGDPEASRRERRNAKAVAAQRERMATVIDDLIAADDSELLLMTTLRHQDLRDALVDESALSTADPDLLAGPFAHVVVDEAQELTDAEWQMLLLRCPSRSFTIVGDRAQARHGFAESWQERLERIGLDRVTLASLTINYRTPEEVMAEAEPVIRAALPDANVPTSIRSTGLPVVHGSVAELDAVLETWLATHAEGIACVIGDPTFRGTSRVRSLTPELAKGLEFDLVVLVDPQSFGGGIEGAVDRYVAMTRATQQLVVLTSC

SEQ ID NO: 1958 - protein, 715 aa, synthetic construct; identical to SEQ ID NO: 1957
  REGION 1..715: note = TnsF-Tn7 System Protein

SEQ ID NO: 1959 - protein, 298 aa, synthetic construct
  REGION 1..298: note = TnsF-Tn7 System Protein
MISIEHLTKRYGTHTAVDDVSFTCQPGTVTGFLGPNGAGKSTTLRALCGFTTPTSGMATVAGRRYRDLPNAGRRVGVLLDAGAQHSGRTGREVLALASSILGVPEERVDELLSTVGLAGRPAGKRVGQYSLGMRQRLGLAAALLGDPQVLVLDEPANGLDPDGIFWMRGLLRGFADRGGTVLLSSHLLREVEAVADQLVVIAGGRIVAQGGQQELLAGRGTLVRGPDRSALERALATARITVRPGAGDGLVADAPVDAVGRAVAAAGAVVTELRPGGGEGLEELFRTLTSAGTAEVAA

SEQ ID NO: 1960 - protein, 298 aa, synthetic construct; identical to SEQ ID NO: 1959
  REGION 1..298: note = TnsF-Tn7 System Protein

SEQ ID NO: 1961 - protein, 368 aa, synthetic construct
  REGION 1..368: note = TnsF-Tn7 System Protein
MTVDKAGRVFEFTSVRYLHPEDQAFAEMLSGWRNQQLSRNLKHETIEQRERVVQRFHEHTNEYPWRWHPAHVDEFFGDLRSEKHAKVATVRSYQAALRAFCAYISSPDYGWNPLCERLFGTHPAQICFDWNTAAHVQEADSQPAKRAFTRRELQDFFDRADDEVARITSARRKGWLPAYRDAVLFKVAYVWGLRRNEVRHVQTVDFSRNPHAREFGRYGVLAVRYGKAMRGSPPKRRSVLTVFDWSAEVVEDWLDRGHRHMTQGLDLFTTERGTLVSGATLLRRFRSYCDDLNLSPGLDFHSLRRSYVTHLIEAGMDALFVQHQVGHEHASTTALYASVSSDYRTRTLRHALDSTLSTALNGNERESS

SEQ ID NO: 1962 - protein, 876 aa, synthetic construct
  REGION 1..876: note = TnsF-Tn7 System Protein
MRASLEDNHDQERFDSKVGAATTWAEKYQEAAEFVYLNRDQDLLNSIIRRATLTACRTVTPAEARQLLFDEPELKRLETQGQWNLDPGVSALGQLLAAIPSDIRGPLITTNFDPLIEVSVREAGGQPAAHWLDDDGKIAASDQVGAIDVVHVHGLWRRGDTLHTQSQLRTPRPQLAGSLREALRGKLVVVLGYGGWMDSFTRSLLERVEQRDVLGMDITWASYSTLTADDFQSGILKELAALNRANFYGGVDVNKLLPQVVDRYTPKGAPSPTAGSLPRWTEVNAGFLQLATATANEQTRCAFFDGRPPDWTIAADRGVPRLSAVGRTRAHLKSLQKSSQKRIVLLAGPLGEGKSIALRQVVVDLIQESPDATILWREPGGTLTRSHLEQLPTDKRVILCSDEADLLVESLAALRADLEQRKNITLLLAAHERDWRNRGGFSRLHQLLDVVPVNGLASEDAAALVAAWEAAGTIGLGKLATSPSHEREGLLLAAANSPIASSGSLMGASLQLRYGDALSARVADMMSRMDNYKEVGSGLLSDAFLMICLLHATQQHSGQVTEPLSARILCEALSLESGALDYLVLGPLGQEAAAVAHGGYLYCRTSALAETALDVARDHRSDQLHSIIAKVVAAAVINSDTLGTFEADHGAVAYVSRRLGRSDESILAAQSAFDSGPRLSFATSLLATYRRYERFDEADEVGRTVLSQLDNFTDRTNLPGFFTDWATLSGQRGDAARNVLLDAFALDALRESAWTNNADKARGEAIKALLGLGVGLSKLAESSGDVRYVLGLQAVVDWVGRLAPTSNKDQRFLATHAAFVRQKLGATDRLTLEACRDRLQELLDDLAPATWKSVHASVDLKRPRLKAAYDLTRSTT

SEQ ID NO: 1963 - protein, 876 aa, synthetic construct; identical to SEQ ID NO: 1962
  REGION 1..876: note = TnsF-Tn7 System Protein

SEQ ID NO: 1964 - protein, 110 aa, synthetic construct
  REGION 1..110: note = TnsF-Tn7 System Protein
MKRDVDYAWRLPELMASHGMHNSTDLIVHLRERDIDLSASQVYRLVTQRPERISLKIFAAVCDIFACGPEDLLTVTAADARPKKAATGSNVVDLNKSARPRRARVVRDDD

SEQ ID NO: 1965 - protein, 516 aa, synthetic construct
  REGION 1..516: note = TnsF-Tn7 System Protein
MAHTGRPATGGNGSARPPTVTGLAEQHKRGRPRSTGDHRCDRCHQQVAKIRLHWPDGAICGRCFTEATHTYGTCPDCAEHRMLPGRSPDNQPICRDCARITTALTCTRCHREAERFRAGLCIRCALHDDLDAVLKPGDDLRLHRLIGLLTSSERPESIYTYMRGSKARALLEAIGERELPLTHDAFDQLPDSRAVDHLRALLTHHRMIPERGNETLVRFEQWLATRIADLPDDGTSQLIERYATWQHLNRIRAKATDPGTNLETVIHAAKQEITQAGKFLIWLHKHHHVPAGEMRQHHIDDYLSDGPSTRKHIRNFARWLNNQQGHPKGTLDVPFRKAQTTPMITQTERIQLVRNCLEHRNVIPATRVAGLILLLWAHPLNKIVMLRRDRLIAAPEGMRITLGTHAAQVPEALTELFWNQLSNPGNQNTINADTPWLFPGRTAGQHLHPGTLSKRLKVLGIDALRARNATLRDLSQELDARSLIDLLGYSPGIIAQHAARSGTPMADYIALKHQQP

SEQ ID NO: 1966 - protein, 370 aa, synthetic construct
  REGION 1..370: note = TnsF-Tn7 System Protein
MTHDDDNVTFAVFGDQAPDPDVFLESVLDGWARQQRAKDFAAATIGTRRKAVLNLVDFSGHYPWEWTLADADDFFSHARAVRNLSHGTVRSYQGAIKLFCDFACDPRYDWSDLSATQFGRVFAQVVTELNRVTHSEPTEARPAKRPFTQHELQALFDLADLEVERILDSGRKGAVAAWRDAIAFKTAYSWGLRSNELRHLQVVDFSRNSRAPYLGDHGVLRVRWGKPHRGSAKKVRSVLTVWPWSAEMIDQWIRHGLPRYGHPVTDCFPTSSGALVGASHLIGRLRSFVDELGFPPGLDLHSFRRSYATQLITGDNFDVTFVQLQLGHEHAATTSIYSLPSPDYQRLALERAHERTISAALGLPASEKNS

SEQ ID NO: 1967 - protein, 116 aa, synthetic construct
  REGION 1..116: note = TnsF-Tn7 System Protein
MSKRDISYTWRVREIMARRGVHTAKDLAELLHERGITLTPNAVWRIVAQEPERISFKVLVALCDALDVTPNDLITYTAADARTRRQQQAASGDDIADLRDFRPVRARILDDDGPHR

SEQ ID NO: 1968 - protein, 370 aa, synthetic construct
  REGION 1..370: note = TnsF-Tn7 System Protein
MLDALLAADPVGILDWLNRRPPRELLRAIAAAPTPVTHDYLDGLQHHKGLPHVRAGLVANGVLPPRDERMIALQNTISAQIDRLESNDSARVVRSFATWHHLRRLRTQLGDEHLGAQQTAVVRRDVRAAVDLLDWLHARHVSLAECSHTDIDDWLSTGSPSHYYARTFLLWSAKRGHSPKDIEIPILPSASAPEQISDDERWATVQHLLHDDSVDTVDRVAGLLVLLFGQPLSRIVQITVDQVSASGDSITLGDTPVQMPPPINTLVKELRGQRQGRALLGRHIDSPWLFPGWHTGKPLGTAQLMTRLKAHGIRARPARNTALMDLANQLPATVISRLLGLSIRTAARWSAEAGHQRAGYAAELAARPSP

SEQ ID NO: 1969 - protein, 370 aa, synthetic construct; identical to SEQ ID NO: 1968
  REGION 1..370: note = TnsF-Tn7 System Protein

SEQ ID NO: 1970 - protein, 820 aa, synthetic construct
  REGION 1..820: note = TnsF-Tn7 System Protein
MPDDHRTDEDGVVRNINISATDGGVAAYRIDQVIIDGLAELQAATTVLPLDALVVEASPFVGREAELTQIADRLSASGHDMSSSIVIVSGPPGAGKTALVRHAATVASEAGTFDRVLFVDLRGYADDPNDRVQPAVVLSKLLILLGVEDSEIAADPAEQAIQYQERLTALAAEGKSVLLWLDNASDPSQFGPLRPASAVHRVVVTTRETFASVPKPQVVDVGVMESDDAVELLVSAVEARIPDDARLIEDPQTALRLAELCDHLPLALQIVSALLADEPDRPISELVIELASEEDRLNSLDYGGELSVRAAFALSYRRLPDNLKRLFRLLSVVPGGDVGLVAAGWLIDASHTAVRPQLMALVRSHLIQQHVRNRWSMHDLLRLYSAELSAEHPEDAERALKVIVVKYLLGVGAAADWLTGVPNDTNRRYFPTAQHAAAWFEEEHPTASAIALSVAKRPEREYRELTLALAVGLGEILGSQRHWLKEFHDVAVVGASLVPAAENRHYAACVLNHYGSALRKMRQFDDALEAFRRAAEVAEEAGLEWVAGAARTNMGNVYLDQGRDVDEVVQFYWEDVRACQESDPPHRRGEAAALSNIGGALGDAGRYTEALSPLREAMSICRDLDDKPGIASAGKNLGAVLGRLARIEDNQAYLEEAIALLQEAAEIYKERGNYSGWAEVANNLGQAQCQLRRFSEGIPNLEAALRYFEESGQSDLAKNVREDVESYRMDASGGRPWSATTLEPDRYRFTNTSGGRLAQITLAPFGATQVMVENSPDPHIVPEPVANGGSFVAVVRGRGMRITATAMPSMVPVYLDFSPA

SEQ ID NO: 1971 - protein, 820 aa, synthetic construct; identical to SEQ ID NO: 1970
  REGION 1..820: note = TnsF-Tn7 System Protein

SEQ ID NO: 1972 - protein, 420 aa, synthetic construct
  REGION 1..420: note = TnsF-Tn7 System Protein
MPKEQSPGKPTTRRYSAEEKAAAVRMVRTLRAELGTEQGTVQRVARQLGYGVESVRTWVRQVDIDEGLAPGVTTSESKKVKELEQEIRELKRANEILKRAAKFLRGGARPPTQEIVDFIDDNRGEFGVEPICTVLRSAGLQVALSTYYDAKARVPSARALRDAVLGPALCQLWKDNYCVYGARKLWKTARRDGHDVGRDQVARLMRAAGIEGVRRGKRVRTTKADPAAARHPDLVHRNFAAAAPNQLWVTDLTFVPTWAGVAYVCFIIDAHSRMIVGWRVASHMRTSMVLDALEMARWSRGTTLQGLICHSDAGSQFTSIRYGERLAEIGAVPSIGTVGDSFDNALAETVNGYYKAELIYGPARSGPWKTVEDVELATLSWVHWHNTSRLHSYLGDIPPTEFEAAFYDAYRTDQPLIGIQ

SEQ ID NO: 1973 - protein, 341 aa, synthetic construct
  REGION 1..341: note = TnsF-Tn7 System Protein
MLEGWSRQQRGGRLILPKTIAGRLSVVRRFSKTVNEYPWQWTAAQVDEWMTDLIAQRGRAKSTIRLYQSALRVFCDYITSPHYGWIAECENRFGTHPVQVCHEWNTAAHLTDYEGRADRRPMTRDEIQRMLDYADDRVEQATRRGRKGALTAYRDATLLKVLYAWGLRCNEACQLDVTDFYQSAKAPELGRYALIHVRYGKRSRGSAPKRRTVHTVMPWAAEALADYLDNVRPRYRDSQDDPAVFLTERGGRLRPREVEERFAEYRDALGLDAALTPHCLRHSFVTHLIEDGADPKFVQEQVGHRFASTTAIYTGVGGDFMNTMMRKALDRALTMDTEKKS

SEQ ID NO: 1974 - protein, 269 aa, synthetic construct
  REGION 1..269: note = TnsF-Tn7 System Protein
MSTSAPSPRHYTHPVEVITEIVMTVEPKLDIESIKDAVSDCTSKPPALRKLARTLVLDGDLLISGRPEGPLHIQKLISALIDRGAVNVVRPRCARCGGEKSLPCINENGQRTCAYCDMLRRAKPCTACGQIKHVSNRDAAGRPFCRKCWRTHADGPADPVGAICDAVRALQPDLDRATIIDVITSVAGSPAKQRTLALAIQANPSLLTGQAHTGPPQLPTLVDKLIAAGADHLVAPKCPFLPEKSALVVQAERATLLQALLRGGEETPV

SEQ ID NO: 1975 - protein, 112 aa, synthetic construct
  REGION 1..112: note = TnsF-Tn7 System Protein
MTPKLDYRWHLRELMAVRGMYSTTDLRPLLAQRGIELSPSQTYRLVVETPERLNLKVLMALLDILGCTTEELIEPVASDAKRGRRTVGANGDDGKSSGVGDFRPKRARIVPG

SEQ ID NO: 1976 - protein, 378 aa, synthetic construct
  REGION 1..378: note = TnsF-Tn7 System Protein
MAAFVDTISVEKRARSSIRWMSRPGTAAQLRHLASLGRLPTHADLDQLPPSVSLHHLRHLLVYSGVLPDRLEPLERIEPWLDTLLASLPIHHATVIGPYAQWSVLRKARRRAVRRTYTFASADLDKLKIVTAAGFLEWLDSQQVSLQDLSQPLLETWLVNANNGKAAALVGFVAWFNTQHGVDKLEIRYRRRSEPTEFPDPQQQTDTIRTLLSKSCALPTDIRVASLLVLLYGVTISSICNLTVADLAAVKEKTFLVLSSNPVLVPPALASLLNELAANSRASKSATPRYLFPSSKRIGSHISAKRLTKRINDAGVHVRVNRNGALLTLAQDLPAPVLAELLGLHINTASRWCRIAQRDWSHYLSARTANRTDRIPPT

SEQ ID NO: 1977 - protein, 360 aa, synthetic construct
  REGION 1..360: note = TnsF-Tn7 System Protein
MLAANVVPLDEAAAVFRAMLEGWARQQRSRFFSEKGTIAPRVRLVKRFAAFTGLYPWQWTAAEAEAWISDLRSGPETVSISTARNYATEVRLFCEYLVDRRYGWGQVCAERFGQQPEVVFHEHNTSPHVLEYEGDPRRRPLSYDEVQSLFDAADARVDEKRTRGRKGATSALRDSAMLKFCYAYGLRRSEVSGVDLVDLRSNAKAASYGSFGMLAVRWGKPTKGSPPKRRTVLTVPEMDWIVEVLDHYVTEVRPMLVPKVFPALWVTERVSRLSPRAVNGAFVMARDRAGLDKSLDLHCLRHSYVTHLIEFDYPERFVQEQVGHSYASTTAIYTGVSNDYRNQLLMRSLSDRLGKDWSGQ

SEQ ID NO: 1978 - protein, 915 aa, synthetic construct
  REGION 1..915: note = TnsF-Tn7 System Protein
MIGGMGRDTLVGRRVEQLKLTELVDRVRGGGSAVLVLRGEAGIGKTALLLDVRDQAADVRVITLSGAESELELTYAGIQQLCAPLLGHIDRLPEPQKNALRVALGLRDGAAPDRLLVGLAVLSLLSDAAAERPTICIIDDAQWVDHASLQALVFAARRVSAEPVMMIFAARSVHGQPELSALPELHLAGLCDTDARALLSTILPTRLDDSVRENILAEADGNPLALLELSRALPPARLAGGYGLASAKPLETRIEQTYGRRLAELPLQTRTLLLIAAAEPTGEPTWLWAAAGRLGIGADAGIPAEQSGLVTVDTRVRFRHPLVRSAVYGGADSSERRQVHAALAEVIPGAVAQEHRVWHRAHAADGPDEAVARDLARSAEQASRRGGTAAAAAFLAHAAELTPDPVRRAERALAAALSKVDAGDPAAAARILAAVPGTESELFSARVDLVRAKIAFAARRGRDAPPLLLTAAEKLRPIDAALARDAYLEALVAAMIVGRLHADPAGSAAAIAAAARQLPPPTEPASADLLLDGLVVRLTKGHAAAAPLLGGAISKYLAEDAAGSADPRSHDITLRVLLDLFDQDTYNYLNARQLELLRNAGELTVLPAALTTYAGSCVTAGDFAQAQDLLEQSDAISAATGAPPHNSIKTYLAACRGQEQLARQLSQTTISEASERGEGSEITVVLFALAVLHNGLAQYDEAFTACATALEYDDVGMYGHLLNEMVEAAARSGEAHAAAAAAAQLMDRAEATDTATARGYAARAKALTSVGTAAEQQYRLAISELDGSPLKVLTARTHLLFGEWLRRENRRAEARTELRTALEMFLQMGADGFTERNRRELAAAGEPLEQHRPDTSTATLTTQESYIARLAGDGYTNAEIASHLFISPRTVEWHMSKIFAKLGVSSRRELRQHRR

SEQ ID NO: 1979 - protein, 915 aa, synthetic construct; identical to SEQ ID NO: 1978
  REGION 1..915: note = TnsF-Tn7 System Protein

SEQ ID NO: 1980 - protein, 106 aa, synthetic construct
  REGION 1..106: note = TnsF-Tn7 System Protein
MNKKMSYRWHLRRKMAESNLFHTSDLVPLLAERGVVLSREQVYRMATHAPQRMSMDVLVALCDILDCTPNDLIEPKVVNRQERKAAGEKSGKPTVRRTSIRRPESL

SEQ ID NO: 1981 - protein, 444 aa, synthetic construct
  REGION 1..444: note = TnsF-Tn7 System Protein
MRPLAWQLDDAIVCASCAGVASIFTCSECGREEHPYGFYRCARCFLRERLTELLTDPISGTIHHRLRPVFDELINADRPQTVLWWLRKKPGTGPQLLRDMACGTREISHDTFSDLPSDRAHDYLRSLLVAVGVLGPIDIRVERMLPWIEDVVAELPAEDAAIIRRFAHWHVLRQMRKASHENRLTRSMTDACRRRVRVAIQFMAFLHTHDATPATATQEMLERYQALHRRPLTAEYAFLVWLRQSRINTTLRVTDPPRSPPSVTVSDSQRWAAVGRLLHDDTIRRKTRIAGLLTLLFAQPLSRIVALRSSQISISDDHAVHVVFAAIPIQMPPLLDDLIREHLEQQCESRYTPSHTGWLFPGRLPGTHLSTENIRTQLVAVGVKPYEHRKAALFQLASDMPAPVLAELLAITTKNAAAWAKLAARDWTDYVTERGRSMPHRRRS

SEQ ID NO: 1982 - protein, 444 aa, synthetic construct; identical to SEQ ID NO: 1981
  REGION 1..444: note = TnsF-Tn7 System Protein

SEQ ID NO: 1983 - protein, 375 aa, synthetic construct
  REGION 1..375: note = TnsF-Tn7 System Protein
MSVPGSAHLVLASGVVHLDEASAVFEAMLSGWGRQQASRLLAAEATIEPRLALVRRFAEFAGAPPWDWTAGDVEDFTAALMSGPERKAPSTIRGYHMSLRMFCDYLLDSRYGWIAQCENRFGRIPSQVCHDYNTAAHLVDYEGKPARRPFTYDELETLFDFLDDRVDVLARSRNKGAFAALRDAQMIKTAYAFGLRRRELCYLDLADLRPNSRMPAWGTFGAVHVRYAKSRRGSSPRRRTVLAVPEFDWVIDGLRQWVDHGRPLLSPGNRQELWLTERRRRVATKTMDRRFAVARVQAGLPAELTLHCLRHSYVTHLIEFGYPERFVTEQVGHSYASTTAIYTSVSDDFKTKTLQAALRRVYGSSTTTGEGGDEH

SEQ ID NO: 1984 - protein, 110 aa, synthetic construct
  REGION 1..110: note = TnsF-Tn7 System Protein
MSTRTVLRWNLRQLMAQNGMFATTDLVAPLHERGVEISRQMVHRIATKPPQRINLDLLAALCDILSCTPNDLLELVAEQVREAPAVNDSGPGIGDLRPIRATIRRPHDNQ

SEQ ID NO: 1985 - protein, 255 aa, synthetic construct
  REGION 1..255: note = TnsF-Tn7 System Protein
MVVRREVKAAIQLIEWLRARSKSLATCTQHDIDDWLATDIWVRYLARTFLVWSVRNSHAHHVLIPIPPKDASMVLIERDQRWVHVRRLVKGDGVDTATRVAGLLLLLFAQPLSRTSQIRLDQVTRMEGGVALKLGSPPIELPPPLDALVLELVQQRHGSSTLGRSDDHPWLFPGTAGGQPISSRQLMRKLTALGIKARPARNTTLMDLSAELPAVVLSRLLGLHISRAEKWTKEAGSTRADYAAEFSRRGADAHT

SEQ ID NO: 1986 - protein, 255 aa, synthetic construct; identical to SEQ ID NO: 1985
  REGION 1..255: note = TnsF-Tn7 System Protein

SEQ ID NO: 1987 - protein, 277 aa, synthetic construct
  REGION 1..277: note = TnsF-Tn7 System Protein
MLDVRNLQKIYTGRNRSVEALRDLTFHIGAGELVCLVGPSGCGKTTLLKCMAGLIDPTDGEVRLDGRPVDGPPPGMAVVFQEYGRSLFAWMNVRDNVALPLRRKKLGKAREKELVDHALEVVGLADAHQAYPWQLSGGMQQRVAIARAVAFEPKVLLMDEPFAAVDAQTRAELEDLIRRLWRELGVTVLFVTHDIDEAVYLGQRTIILSTSPTVVLEDLTIDLPDERDQLHTRSSTRFAELRAHVYEQIQRAKHHNGDTHAAVADRSDELALHKSES

SEQ ID NO: 1988 - protein, 277 aa, synthetic construct; identical to SEQ ID NO: 1987
  REGION 1..277: note = TnsF-Tn7 System Protein

SEQ ID NO: 1989 - protein, 246 aa, synthetic construct
  REGION 1..246: note = TnsF-Tn7 System Protein
MNAATAILDELTSHRRVLADLQQADVDQWLAEGRVARRAELGAFLRWACSERLTTVAIGVPQWDGPADGVDHDRRWQQVRRLLHDDTLPTDVRIAGLLITLYAQTATRINTLRFDQIQTTSSGARITFGSTPIDLPPTLAALITSLSAEREDTDRAGTPWLFPGRPWSHSISAAMLRKRLAAAGLTARAARTAALIQLAVELPAAVLARCLGIDISSAVAWQRAAAGDWHPYAARAALRMNASPAP

SEQ ID NO: 1990 - protein, 246 aa, synthetic construct; identical to SEQ ID NO: 1989
  REGION 1..246: note = TnsF-Tn7 System Protein

SEQ ID NO: 1991 - protein, 303 aa, synthetic construct
  REGION 1..303: note = TnsF-Tn7 System Protein
MLVASGTIPELNAEEARFEYWKQIWLTTIEHPEDRTLLRRYSRWGLKSQSHQSVPSNPKAKYRRHRGALRQVAALLNAARDIDHTVATLPQRELDQFLNGSPAQQDALAHFTQWLRTTRLSRLVVAYRRNELEGYGFSTDHRWKMARLFIERAEIPIMDRVGALLILLYGMQATRVVAIERSQVSERNGKTMLTIGSEPIELPAPLDEAVQSLLKLSHLRSPRWLFVGRHPGEHLTARALSRRLATYGMSTGSARATALMELAQQMHPRVLSDLLGVSIATASAWWRLAGGDWAAYPPLREQR

SEQ ID NO: 1992 - protein, 168 aa, synthetic construct
  REGION 1..168: note = TnsF-Tn7 System Protein
MDFTRSGLTAAGFAGFVPFSSLPMADVPTGPGVYVVLRAVGSAPEFLAVSGAGWFKDKDPSMSIADLDSAWVEGAQVVYIGKAGAGVRGNRGLRKRLTEYHRHGAGEKVGHWGGRYIWQLADQAETLVAWQETPDDDPEDAETALIDEFVSFYGTRPFANRKLGRARI

SEQ ID NO: 1993 - protein, 400 aa, synthetic construct
  REGION 1..400: note = TnsF-Tn7 System Protein
MSQQPSPPRTQPLQRLRSLDGLRGVAAIVVVAYHSLLISPTLSEIVVNNKAAEPGSFWDLLLHSPLRIFIAGNEAVIVFFVLSGLVLTLQVRRERDFNWGNYFPRRLVRLYLPMFASIVFAVIVTLLLHRDREASDSAWVQFYTYPDFDWKFAIQAADVFNGTPDFNSPLWSLRWEVLFSLLLPVFVLIASRGRKLAWAAIALAPLLVLLGYEYTVLPLVYLPAFIVGIALAKLFSLRDDSADAAELAQRSAPWWGHIVWLVVAVASLFLLILHWLLQPGIGQNTHVAFASSALIVIGAAGIVTVAARWTPAVRVLSLPPIHWLGRISFSLYLVHAPILIATANVAHELPWPVQTLIGVGISFGVAELFTRFVDVPSHRLSKKIGRTAPASATPATPPAN

SEQ ID NO: 1994 - protein, 350 aa, synthetic construct
  REGION 1..350: note = TnsF-Tn7 System Protein
MANPESMVFDAMLLSWKQQQISRGMKPQSVRGNVAVVRHFREFVDKLPWEWNAGDVDEFTSDVVDRGLALSTLRHYHGAIRVFCDYITSRHYDWMEICEAQFGQIPSQVCLPWNTVAHRFDFEGRAARRPFTYDELQQLFDTADARVETLVSAGKKGGLAALRNAQMLKTAYAFGLRRTELVMLDLADLHHSSQMPEWGQYGAIHVRWGKAAGGGSPRRRTVLLVPEFDWWIDGMKQWIGEGRPKFSNGDPEAIWVTERRTRVTGGYLDKTFAELRDEAGLPKALTLHSLRHSFVTHLLEFGYAERFVQEQAGHMHASTTSIYASVSSDFKNRVLANALKRIVEGESSGD

SEQ ID NO: 1995 - protein, 98 aa, synthetic construct
  REGION 1..98: note = TnsF-Tn7 System Protein
MASRGIFQTSKIGPLLSERGVQLSREQVYRLVTNAPQRVRIDVLTALCDALECSLDELITVKRRDAAPVREAVGETAQGPIGDLRPIRASIRRPSIER

SEQ ID NO: 1996 - protein, 465 aa, synthetic construct
  REGION 1..465: note = TnsF-Tn7 System Protein
MTRLPHGYICTSCRRRRHYHPEVCPQCNVVRPLAWPRDDRLVCASCAGVQSIFACCECGREDHPYGYRRCARCFLREALTELLTDPSTGLIHHQLQPVFDELVNSERPQTGVWWLRKKPGVGPRLLAQMACGAVEISHDTFRSLPSDRSHDYVRSLLVAVGVLGPIEIRIERMLPWIDRAVAELSARDTELIRRFAHEYVLKQMRDSARESLLTKSIADACRQRICVAIEFVTFLTAYNSTPATATQDLLERYLRSVKRAPCHQYAFVAWLRENGINTTLRIADTTRRRPTTTVSDAQRWAAVDRLLHDETLRHYTRIGGLFTLLFAQPLSRIVAMRTSQVDIAGDKSAHVTFDAARVQMPPILDCLIREQIARRGKSLYASRGTSWLFPGGMPGHHIATENIRSQLVAIGIKPYENRKAALFQLAGEMPAPFLAELIGITNKNAADWARLAAHNGTGEIAARTV

SEQ ID NO: 1997 - protein, 465 aa, synthetic construct; identical to SEQ ID NO: 1996
  REGION 1..465: note = TnsF-Tn7 System Protein

SEQ ID NO: 1998 - protein, 324 aa, synthetic construct
  REGION 1..324: note = TnsF-Tn7 System Protein
MANAEYLTELVRAHYTGDDRRFSNLLNQVIAAESRAGHSRLAERLRELRIEATRTDAPARATPLARAPRNLEQILAVAYSNTKLADLVLTSQTRNSLDRYVIEQRRAQVLADHGLRPRRRLLLHGPPGCGKTMTAQALAGELKLPLVRVRLEVIFSRYLGETAGTLTEVFAEVARVRGVYLFDEFDALGRTRLDDSDVGEIKRVVTTFLQLLDADISDSLLIAATNTGNALDAALFRRFDDVVELPEPTDEQRRELLNRLMRPWRLKTTSAVLNEASGLSFADIRAAVEDAYKDAILSDSERPTREGIAARLAEREARAPKPKL

SEQ ID NO: 1999 - protein, 324 aa, synthetic construct; identical to SEQ ID NO: 1998
  REGION 1..324: note = TnsF-Tn7 System Protein

SEQ ID NO: 2000 - protein, 523 aa, synthetic construct
  REGION 1..523: note = TnsF-Tn7 System Protein
MSTNGETDKKSVAARLVGMAQERYILGVSDDGEPFGADRTRPHLAMFLRGGRAGLRADLAARYFAETGAVAGGQALTDSTLILEGHAASQRPERLYLRIAEHEGMAYVDTGRTDGQIIRIGGGRWTMTDAAPVRFLRTKLTGGMPLPAPDGDLARLWDFVNVSAEDRPVLLAVLVAALVQCDVPHPVLALFAEQGSAKSTTTRMLVDLIDPSPVPLRQAPRDADSWVIAASGSWVVALDNVSAIPPWLSDSLCRAATGDGSVKRALYTDADLAVLKFRRCVIVNGIDVGAVRPDLAERLATVELRRIDRQRRQAEATLRHEWQQALPGILGGLLSLAAVVHQRLETISLDAPPRMADFGRTLAAVDEALAADGLRRYLSRADQLSEDSLSADPFIERLRTSTLEPIIGKSAGELLAMTTPAGDQWRRPKDWPKNGRDITAILRRHAPALRSLGWTIDDDGARNHRNVLLWTISPPQEDSMMKENSQPSRSSWLCSTSTLPEATHVSVLYSGNPHGPECAAEAS

SEQ ID NO: 2001 - protein, 523 aa, synthetic construct; identical to SEQ ID NO: 2000
  REGION 1..523: note = TnsF-Tn7 System Protein

SEQ ID NO: 2002 - protein, 816 aa, synthetic construct
  REGION 1..816: note = TnsF-Tn7 System Protein
MIQIKAIHIEEFRGIRVLNLQLDGQSFVVAGPNGSGKSGVVDAIDFALTGSVARLSGAGTGGVSLAKHGPHVHQRNNPAAASVALTIVDTASGQTGVLTRCVKTAATYKLEPDTPELQAAVSWAAQHPELILSRREVIKYVYAEPGRRAQEVQALLKLDRIDEVRRLLRTAMTKTSGDEKQATTEVGNAEDALRRHLDLTTLLEAQVLDAVNRHRQVLGIAVLESLQPDTDMTVEAQAAGEQSSFNKTSALRDVNELSAFTADHRDLANAAQDLVQALAELEHEPSILDALTHRELIETGLPLVTEAACPLCDQPWKDVQTLRLHLQAKLTRSEAAKTLEQRILQAAARTKAQVQRAETLIRAAQPHALRVGRNDDQAVLIDWLADLAAFAATLDHLTTIREQATRVGADPLALPPGVTALLVGMRQDIEALPDQSATANARSALTVAQERWTRLRQARATHVKACAAHNTAKAVYEIYNDVADAELTRLYATVEHDFSDYYRRINADDESSFKAGLAPSAGKLDLEVDFYGLGMFPPMAYHSEGHQDGMGVCLYLALIRQLLQDDFRLAVLDDVVTSVDTNHRRQFCRLLKDTFPDVQFILTTHDEVWARQMQSSGLVGTKAHARFHGWTVDRGPVYGQGEDLWAQIDADLADDDVPGAAHKLRRNLEASMGDIVAALQGKVIYRPDNNYELGSLFAAAKSRYGDLLKKAGVSAENWSNQAGKQQVEDLKAARQQAMLAQDGENWAINALVHNNDWAAMAKEDFVPVVTACKDFIDLFRCSNSACGGWLYVNGFPGREDALRCPCGTLNLNLRTK

SEQ ID NO: 2003 - protein, 865 aa, synthetic construct
  REGION 1..865: note = TnsF-Tn7 System Protein
MTDFIINAIRTADPTIAIGTLEQALERHARGATARCRLAEELRDHPKRLTTDDPRTSPVLAEVVVTLRAAGHDGLVQPTCPSCGRPRRYAYPSADGMRVCRVCHPFPTEPCAECGRTRKVARRLPDGTGLCSTCRTRDVAKFERCSACGQERWVATRDEDGRPSCHPCYKGQQPDRTGRWTGNAATRRAARTLAMLDLIGAIAPDVPKDELETTLERLAPAAIAHAGLANWLLDHPDALTDGDNSAPPIVFRLIDELLSLGAPVIRPRCASCGRNDQRLPHWLDGARICPACYLSHHAEPCSGCGATAPVQRRLDDGKPLCRRCAEPYRKLVTCAACGRQRQAGTTVDGVRLCSTCKRRDARFHEECSTCGRLRPVSARDHDGGAICPNCAHRARTAACFVCGRTRPIAARFEGHPYCATCRPRRPQQCARCGEHRICYRVLTPVVDAVAASREASAVCGTCLARERLTALLSRTTGDLDPHWVPLIEALVATPTPHALLEWIRDRATARLLRDLAHRNRPPTHEDLDQLALTARYTAEQARALLESAGLLDRHDLRRHRLATRAKLRIDHEAPAEDRLLLHAYLRWSLLPAAERRARRAKRPIRANNISDLAAVIAYLTDLRAHGLSLLARHQPRFDSWLHAHPSHRVPLKRFLVWAVRNGHSTPIAVPQVPRRDPTEFMADEHRRRLIGVAVTGSDPTWTLADRVAVLLVLLYGQPPLRIVALSHTHVSTTPEGGTQLRLGRDPIDLHPPVASLVAQLASRTAPTQPLRDLPSPWLYPGHSPGRHLHPASLSRRLKLLGVPARAAHNTTLLDLAKSAPTAVLADLLGMHPSTIESWNNASGARWVHYATRAVAQPEPLPHEGP

SEQ ID NO: 2004 - protein, 865 aa, synthetic construct; identical to SEQ ID NO: 2003
  REGION 1..865: note = TnsF-Tn7 System Protein

SEQ ID NO: 2005 - protein, 386 aa, synthetic construct
  REGION 1..386: note = TnsF-Tn7 System Protein
MDVGVRSDLAPGAALRVLPAGVALFSPEESVWQAMLTGWRTQQLARMLRVSTVEGRVRAVERFQQFTGTYPWSWAADDVESWLVSLRMPGLEGGGRSVGTLRNYQSTVAWFCSYLVNPAYGWTDLCGERFGEHPTQICHEGNAIQHIVESEADPRVRPFTRHELQRLFDYADDRVARLDGSGRKGWLAAFRDATILKFIYAYGLRRNESLRVDTVDFHRSPTTPEFGDFASCSVRYGKASKGSPPKRRTVLTVLPWSVEVLQEYLTEVRPRYEPDGNHLFPTERGGRVSGTYLDTRFAEYRDAVGLPPELHLHCLRHSYVTHLVEDGFDPFFVQQQVGHAYSSTTALYTGVSNDFKNRTLRRALDRYIDPHLTAETHDLEMEGDQA

SEQ ID NO: 2006 - protein, 111 aa, synthetic construct
  REGION 1..111: note = TnsF-Tn7 System Protein
MRVLDYEWNLRPLMAQRGMYATTDLDPLLRERGIVLSSTQVYRLVTGKPERLNVALLVALCDALGCESGDLIRPLVVSTARRKKATGTAGSTPPRRPTGTRPVRARIAPVE

SEQ ID NO: 2007 - protein, 390 aa, synthetic construct
  REGION 1..390: note = TnsF-Tn7 System Protein
MSILLDDGSGSLCQELTPFYEAVIAQPRPMSAMIWLRNGHVRQVLRSLAHGESPIEHETFESYGEYAKVKHLHQLLTKLGVLEYRDPNLQLYTRWLERTMDACDLNDEHTTVVRQYARWHHLRRLRELSGKKSLREGHVRTSKQDTTVAINFLNWLEKRSLSLSRCRQAHIDEWFATGNTTRTRVKSFMKWSLRNGYVSRIDLPGSTVFRSPDIDQDKRLNLMAELLDNKQIPLPCRTAAILFLLYGQPVTRLVRLTLNDITVKEDVIEILFGDHPVQVPHPFDEILRLYVQSRPNINTAGNADSSYLFAGICPDQPLSANYLMKQMRKHGVELRAMKAAAIRDLVREMPAVVAARTLGFKPASLEAHAARAGMTWASYPALHRSGRENS

SEQ ID NO: 2008 - protein, 390 aa, synthetic construct; identical to SEQ ID NO: 2007
  REGION 1..390: note = TnsF-Tn7 System Protein

SEQ ID NO: 2009 - protein, 351 aa, synthetic construct
  REGION 1..351: note = TnsF-Tn7 System Protein
MLDGWRNQQLSRNLGFGTVNAREAIVRRFHAFAGSEPWEWSAADVDEFFMQRRAIHGLAQSTLLGYQLALRAFLAYLVDPAYGWSEACEKRFGTHPTQVCHEWNTARHTQDAMARPKKRALTWEEVQDLFDHADNRVERILAQGRKGAIPAFRDAVLLKVAYAWGLRRNEVRMLDTIDFGFNPKAPAFGRYGVLYVRYGKAMKGSPPKRRSVLTVPEMDWAVESLVQWIEDIRPRVSHEDNPALWCTERSSRIALGSVSNTFNQFRTELGLASGIDFHSLRRSYVSHLIEYGYEARFVQEQVGHEHASTTSIYTHVSSDYRTRVVQNAFERIAGRAVRQGSHERRNRESTS

SEQ ID NO: 2010 - protein, 337 aa, synthetic construct
  REGION 1..337: note = TnsF-Tn7 System Protein
MTHAAFDTHPAPERVAFLRTLLVEHGILEKTDIEVQKFDAWVTTEVSSLPAGDKQIILQYARWVHVRRIRDLLSAGKFKPGSVLYSRQSITAAIDFLAYVGSRHTLRRDLEQIDIDEWLSEGPTTRSLARPFVRWCIQHNHLPPVNFPYRVAKSVPILTQQERLEHLRRVASDEAISTYLRVAGALLLLFAQPITRIAAMTLDQVEVGEVIVLRITQDEVIVPPPFDRLIREHIVALPNLNTSAHRDNKWLFPGGSPGKHLSSNHLMTGLRNDGIDLRAAKNAVLRRLVLELPAPVVADSLGYSYNVAERHRLDAGAMHLGYVSLMVADEPDAGADG

SEQ ID NO: 2011 - protein, 337 aa, synthetic construct; identical to SEQ ID NO: 2010
  REGION 1..337: note = TnsF-Tn7 System Protein

SEQ ID NO: 2012 - protein, 785 aa, synthetic construct
  REGION 1..785: note = TnsF-Tn7 System Protein
MTAAEHPADTHDLIRVQGARENNLKDVSVDIPKRRLTVFTGVSGSGKSSLVFDTIAAESRRMIDETYSAFVQGFMPSVPRPDVDVLEGLTTAIIVDQERLGANPRSTVGTVTDANAMLRILFSKLGQPYIGGPTAFSFNIPTQKASGVMTGPGGEKKIVKDAIYLGGMCPRCEGRGVVSDLDLSQIVDESKSLDEGAIMVPGYTADGWMVKGFSQSGFYPGDKPISSFTDKQRHLFLYGEVTKVKISGINMTYEGLIPKITKSMLSKDLDALQPHIRAFVERVATFAVCPECDGTRLTEGARSSKIDGVSIADACRMQVTDLAAWVRGLDLPGAGPLLQALSANLDAFVTLGLGYLSLDRPSGTLSGGEAQRIKMLRHLGSSLTDVTYVFDEPTIGLHPHDIQRMNGLLLRLRDKGNTVLVVEHKPETIAIGDHVVDLGPGAGSAGGEICYQGSVEGLTASGTLTGQHLDDRAQLKDAVRDRTGAIEVRGASTNNLQNVDVDIPTGVLTVVTGVAGSGKSSLIHGSVTGREGVVAIDQSAIKGSRRSNPATYTGLLEPIRKAFAKANGVKPALFSANSEGACPTCKGAGVIITELGFMDTIETPCEDCSGKRFQAAVLEYKLGGKDITEVLDLPVSEARVFFSEGEAKLPAAAAILGRLEDVGLGYLSLGQPLSTLSGGERQRIKLAIQMGEKGDVYVLDEPTTGLHLADVDTILGLLDRLVDAGKTVVVIEHHQAVMAHADWIIDVGPRAGHDGGRIVFEGTPAELVADGSTLTGEHLAAYVGR

SEQ ID NO: 2013 - protein, 785 aa, synthetic construct; identical to SEQ ID NO: 2012
  REGION 1..785: note = TnsF-Tn7 System Protein

SEQ ID NO: 2014 - protein, 358 aa, synthetic construct
  REGION 1..358: note = TnsF-Tn7 System Protein
MVYFDEKEAVWRAMQAGWAAQQMARNLSSATVVGRTSILNRFFKFAEKYPWQWNVEDVDSFFLELRTVRHAAHSTVLGYQNALRMFLAYVTDARYGWVEECGKRFGEHPAQVFHEWNTARHVQEAMGRPGKRPYTRDELQDLFDCADDRVARIRESGSKGWIPAFRIATMMKVAYAWGLRRNEVRSLEVVDLAANPQHRRAFRNVGFVYVRFGKAMRGSPPKRRAVATLPQFKWAVDCVEEWLEDVRPLIAGAGSMSLWPSERGGGLAPITADSVSRMFTAVRREVGLDDGLDFHSLRRSYVTHLVELGYDAFFIQQQVGHEHGSTTSIYTGLSPDYRARIVTDAIARMADEMDSEAD

SEQ ID NO: 2015 - protein, 335 aa, synthetic construct
  REGION 1..335: note = TnsF-Tn7 System Protein
MASGQVPISHEGVNRFPQSRRVNYFRQLLVSSGTLPPIDVRLNEFEIYAKSFLAALPPSNAAILGRYHRWHVLRRLRQQSTLEPLSQAVLDKRRGDLRAFSAFLSWIDAQGVSLATANQGHLDYFVANVGTGNNALSAFVSWACANGHAFGIEVPINKRFSPAAAMSADELWQAVDHLLVDETIEMAARVAGLFILLYAQPLAACVRLRRSDVVLTDQGVAVRFASEPIQLPDSVAQLVRRYLEMPSGRAIYRNSETNWLFGGLLPSSRVTAAHLGRIVSGAGVPPRLAKEAAMRQLATSLPARVVADAIGVSVGTASRWSRMSGGTWNDYPGLR

SEQ ID NO: 2016 - protein, 585 aa, synthetic construct
  REGION 1..585: note = TnsF-Tn7 System Protein
MKFLSNAPRFLFFTGKGGVGKTSIACASAITLARAGKKVLLVSTDPASNVGQVFGVSIGNTITPIPAAPGLSALEIDPEQAAAAYRERIIGPVRGLLPEKEIVAIAEQLSGSCTTEIASFNEFTGLLSGSDEITAGFDHVLFDTAPTGHTIRLLQLPGSWTEFLDDGKGDASCLGPLSGLDKQRALYAAAVAALADPQRTRLVLVSRAQRSTLAEITRTHRELADIGLTHQHVVINGVLPEPADDTDPLATAIRRREQAAIAALPTELAQLPTDQVPLKAANIVGIDALESLFTPNPSLVSAASTVPGRHLPSAPLASLIDELDTDDHGLIMCMGKGGVGKTTIAAAIAVALAERGHQVHLTTTDPAAHLTDTLGGELANLQVSRIDPAEATEQYRTRVLTTKGKNLDERGRANLAEDLRSPCTEEVAVFQAFSRVIHESSRKFVVVDTAPTGHTLLLLDATGSYHREIARQMGENTNFTTPLMRLQDPNATKVLLVTLAETTPVLEAAGLQADLQRAGIEPWAWVVNNSLAAAEPTSPLLQQRAAGEVSEIGSIANKYSQRTAVVPMLAEEPIGEAALAALSKA

SEQ ID NO: 2017 - protein, 585 aa, synthetic construct; identical to SEQ ID NO: 2016
  REGION 1..585: note = TnsF-Tn7 System Protein

SEQ ID NO: 2018 - protein, 335 aa, synthetic construct; identical to SEQ ID NO: 2015
  REGION 1..335: note = TnsF-Tn7 System Protein

SEQ ID NO: 2019 - protein, 362 aa, synthetic construct
  REGION 1..362: note = TnsF-Tn7 System Protein
MSLRLAGNVRPLNEPEFVFGAMLDGWRDQQLSRGLADHTVGVRTQFIRRFAEYCEKFPWEWEPGDLEDFTVQAVSASRPLAKSTIRGYQVTIRLFCDFLIDARYGWGVECETRFGARPQQICHEWNTVAHLIEYEGRAQRRALTYDELEQFFAHADARVASIVRAGKKGSLSALRDAQIFKTVYAYGLRRAETVGLDVADCRPNPAASQYGTYGAVEVRWGKASRGSGPRRRTVLTVPELDWIVEGLAQWVNLGRVRFPDHPGGGLWTTERGTRVSMRYLDHRFADLRDGADLSSELSLHCLRHTYITNLIEWGYSEKFVQDQVGHLYASTTAIYTSVGNDYKNRVIAQALSRIYGAHDAES

SEQ ID NO: 2020 - protein, 116 aa, synthetic construct
  REGION 1..116: note = TnsF-Tn7 System Protein
MPNPDTAITWRLRELMATAGMFQTTELIEPLRNVGVQLSREQVFRLVTRPPARLNMEVLAALCTILDCTPNDLIEIHPVGIGQTIRTGTTNRPEVSGPSVGSLRPVPARIHRPPRD

SEQ ID NO: 2021 - protein, 471 aa, synthetic construct
  REGION 1..471: note = TnsF-Tn7 System Protein
MKFNAIWPEGHICRRCYQRATRIHGTCPQCNQEHLLPGLAPDGQAICSDCAGMPNNFVCTRCHEEDELSAKGFCSRCLLKDHLQALLQDDNGRIPEHMRPFYDAVTTQPNARSATVWLKTNPATRKLLGDLASGKADLAHRTFIEHPEPAKVNHLRRILTSLEALEDYGSRVERFETWLEAKLSDVPNRAHQKLIQQFATFVYLNRLRTLESQGQLEEGTLLSARQSTTVAIDFLAFLQERRKSVAGCTRQDIYDWLASGSTTRSIARTFVRWAIQARHIPKLDFPYRVAQTDPRISSEERNELILHALESPEFGAGDRAAAIFLLIFGQPLSRIAALKVDQFEYSDDGRLRVTFKASPIEIPPPFDEIIKEFLASRMNQNTVANQNSSWCYPGYVSGEHLNANHLMQRLREAGINLRGAKNAALQELVQRIPPAIVGETMGYSSQAMEMHQQRAGAKWMVYPALIDETNP

SEQ ID NO: 2022 - protein, 471 aa, synthetic construct; identical to SEQ ID NO: 2021
  REGION 1..471: note = TnsF-Tn7 System Protein

SEQ ID NO: 2023 - protein, 378 aa, synthetic construct
  REGION 1..378: note = TnsF-Tn7 System Protein
MESSNLTPFDAVILMSFGGPEKDEDVLPFLQNVTAGRGIPDERLVEVGEHYYGFGGKSPINDQNHQLLEALRQEFEQRGITTPVLWGNRNWDPYLTDTVREFAERTGGSRFLAIDTSAYSCYSSCRQYREDFAQTQNVLAQEGIEVSFEKIRQYYNHPGFAYAELDCVHRGLTDLIQKVGALDPQKHRLLYVTHSIPLAMQEASERQTVGYREQHLQLIEWINRELGEKQPLNAELVFCSRSGSPRTPWLEPDINDRLEELASSGVEGVVVVPLGFVSDHMEVKYDLDTEAVQTAKDLGLDYVRAATVGVDPVFVSGLVDAALERVAQYRGDPVDSPAVTPEGPLSPGSGSCSTTCCMGRDQKPTTPNWDSLTASNRP

SEQ ID NO: 2024 - protein, 372 aa, synthetic construct
  REGION 1..372: note = TnsF-Tn7 System Protein
MRDLLPGLVPLRLTQGLPALHPEELIWLEMLDGWRNQQLGGNLSPHTIDQRISNIERFRSFTEKYPWNWEASDMDEYSMELRGVRRLSRSTMLTYQVTVRLFMEYLTDSSYGWSEECFRRFGSYPAQIAFEWNTARHRSEVMSDPKKCPYSREELQSLFDCADDHVARARRAGRKGWIPWYRTSIIMKTAYAWGLRRNEVRQLELSDFGHNPAVKKYKDFGTFYVRHGKAKAGSPPKRRTVLTVPETDWAVDCLSDWINDVRPRMSVALSCSYLFPSERGGPLTADALSAAFSSIRKEAGLADGLDFHSLRRSYITHLVESGYDGLFIQQQAGHEYGSTTAIYTGVSPDYRNKVVQQALRSMATDATHQRNE

SEQ ID NO: 2025 - protein, 784 aa, synthetic construct
  REGION 1..784: note = TnsF-Tn7 System Protein
MSDPPCAGCGRQVTLRGASLHGRICTACVARAHQGLCASCGRHRKLVGRNGDGAPWCDACYRAGGAGRLAARRRAVILAVAAAEPALAEATVLRVIDQMADGRRLGQLADHLLANPGVLVIGPNSRPPVLDRFVGALVAAGAETITSIHPTCRECGRTRPAHHQLPGGATICSACYARRTSARPCGGCGRRRRPYARDEAGHPRCRSCTDRARAEVEQAEALEQLTSVLTGQVSLDHAQLTGVLTAVAPRGHDLRTLARLLDEHRLTDPGLPFVVARLVIALRVAGADLPFPPCQSCQQPCGSDASVYGARVRCRTCVRHCPGCARPARREDERVCGRCRRDAHRRRGRCATCAQPDRVLDDRGLCRGCRERAARRCADCHQNRPLTAVAGQQLCDRCALVRTVDGLLVDHPPGALHALRAPILAAEPMTTGRWLRRPTITALLAALDSGRLPLTHATMDAQPPTRAIEHLRDLLLASGALAPDPDRPIDRLQHDSDQMLAALDVNDARVVRSWLRWQVLPRLRHHHEGTVDLGAAVANARRTLRSVIAFLATIEATHRTLASVHQGDIDSWFASLRARPHQVRPFLTWARRTRVLPPAIILPPAFSGRGDLRTDPEHRWTIARRLVRDDDLDPLDRVAGALVVLYAQPLVRICALTTDDIATDGDIVTVRLGGDRLELPEPFATLIQSLPLRRRQGVAEQFPGDWLFPGQRAGRHLAATSLGRRLRTIGIEPRRTRLAALDQLSAEIPPAMLAGVLGLKTSHVVRHTTYAGGDWGRYAADRAT

SEQ ID NO: 2026 - protein, 784 aa, synthetic construct; identical to SEQ ID NO: 2025
  REGION 1..784: note = TnsF-Tn7 System Protein

SEQ ID NO: 2027 - protein, 370 aa, synthetic construct
  REGION 1..370: note = TnsF-Tn7 System Protein
MPADRSLRVAVPGSAASVLAAGVSFLAPEEAVVEAMLAGWAAQQTSRLLAATTIEQRLLLVRRLVAFTNAYPWAWTPGDVEEWTTALVGRGLAHSTLRNYQMAVQLFCGYVTDRRYGWDEVCEQRFGTHPVQVFHEWNTAVHRDQSEARPGNRPLSRQELQRFFDYCDERVVAVGRSGRKGWLAAFRDAALFKTVYAFGLRRREVAMLDLADLSGNPHAEQFGRYGAVSVRYGKAMKGGPPRRRTVLTTMGWAAETLAEWVEEIRPAYASTSTTLWPTERGARISTDHINTRFAAYRDQCGLPGELGPHCLRHSYITHLIEDGFDHLFVQQQVGHSWGSTTAGYTTVGSDYKNHALRRALGRAFTDPAGA

SEQ ID NO: 2028 - protein, 115 aa, synthetic construct
  REGION 1..115: note = TnsF-Tn7 System Protein
MAPARKLGYAWHLRLRMAEHNMFATTDLVPLLAERGVVLSAAQVYRLVTQTPERLSLLTLMALCDILACSPNDLIEPVAATRRTGATGTSGSAAIASADGRRGQVPRRAEIHRDR

SEQ ID NO: 2029 - protein, 502 aa, synthetic construct
  REGION 1..502: note = TnsF-Tn7 System Protein
MSPYKRKQQKRTCARCGRFGSFCAVWPDGSVCRGCECRALRVRGECPGCGEHRALPGVRPGDGTAICTQCAGFRPSYVCSRCGEEDQMHARHLCTRCTLSDRLSEALDDGTGRIRPELEPLHAMLVKVDNPRTLLTWLYGYPPKVVGAAVLLRQLGRGEVALTHEAFHRLQPWRGAAHLRDLLMSCDLLPTVDKQICMFEHWLVRHLDGMTDPAQEQLVRRFATWDILPRLRARAERKRITPASCKGAGEQVRAATAFLGWLTARDLDLADCSQADIDIWHVEHKQHERVALRRFLLWCMDNKSTRRFDLRAAQTNQRPPLTHSRRVDLLGQILTNTETPLRSRVAAGLLLLFAQPASRIVQLTTEDVIQDQDQVLLRLGEPPLSVPEPFASMLLDYTASRTNMRTATNPGSTWLFPGRRANQPLHQDYLAKLMGQLGVPTVAGRTAAIRQHVLELPAPIVADALSYHPVTTTKLATRAGTTWSRYAPGDHSSLKRPGIGDT

SEQ ID NO: 2030 - protein, 502 aa, synthetic construct; identical to SEQ ID NO: 2029
  REGION 1..502: note = TnsF-Tn7 System Protein

SEQ ID NO: 2031 - protein, 373 aa, synthetic construct
  REGION 1..373: note = TnsF-Tn7 System Protein
MRPTSVAPGAASLHLIDGVALFRPEEQVFEAMLKGFANQQLARNLARGTVEGRENTVKAFSAYTNAFPWQWSAAMVDEWLGDLRSLRDLKRSTVRSYSEAIRSFCHFATDPAYEWSATCEDRFGTHPIQIVHEWNTAVHVQANEGDPKKRAFTKKELHDFFAHADEQVALIRSRGRKGWLPAFRDATLFKVAYAYGLRRNETRMLDAADFARNIAGPEFGEFGLCRVRFGKAKKGSPPKQRSVMTVWDWTRDVLDEWFTEVRPWFGADDNPAAWPSERGLRVGCQRLNSRFIAYRTELGLDDGLDFHGLRRSYVTHLIEDGWDPRFVQEQVGHEHASTTSIYTCVSSDFRKRTLRRHLDGLVAEALGGQEAQG

SEQ ID NO: 2032 - protein, 111 aa, synthetic construct
  REGION 1..111: note = TnsF-Tn7 System Protein
MKRVVGYTWRLREVMAARGIFTATDLIPLLQERGIMLSASQVHRLVSGTPERLSLQVLSACCDILGCSPAELIIATAENAGVRKTATDDQPAAPSTVTKLRPRAARILPDS

SEQ ID NO: 2033 - protein, 409 aa, synthetic construct
  REGION 1..409: note = TnsF-Tn7 System Protein
MFGKDDHFGGAAHQVAEALLKCDAISVLRWAARTNSRGQLAAGIRDLGDSLTHDALDNLPPSKSVEWLRNILVEADVLPPRDPYLRRTELFIHARLKTLNSREDRTAARAFTEWHHLRQLREQADRAPLKRGHGLGAQHEITAITAFLIELESSGLTLASCRQAHVDDWLVRNPTLGRIHHFLAWAVKRGHAHDVIAPTPQTRRTRHTLPGDDERWRLIQHLIEFPDLQTRDRAAGLLVLLYSQQTSRLVTLRVSDVTIAEDRVTLALGDVPLLVPPPVDRLLTDLVELRRGYAAVDVGTNPWLFPGGRSGTHLSSSQMGVRLRRIGIPPRLARNTALIDLAGELPAVVLAKLLGFSVKRAVTWNAEAGNTYPRYSAAVVRQRPGQRPGHGQASVEFPVGGRRFDQDQC

SEQ ID NO: 2034 - protein, 409 aa, synthetic construct; identical to SEQ ID NO: 2033
  REGION 1..409: note = TnsF-Tn7 System Protein

SEQ ID NO: 2035 - protein, 356 aa, synthetic construct
  REGION 1..356: note = TnsF-Tn7 System Protein
MAAGLRHLHPEDAMLRAMLSGWGKQQLGGRLCNEKTVKVRAASIGAFIEFCGAYPWDWTARMMDEWSAHLVGSLARAKSTIRQHQGAMRLFCDYITSPYYDWPAQCESWFGEHPSQICHEWNTAAHLVDYEGDPGRRPFTRKEIQEFLDCADERVEKARKSRRKGDLGAYRDATMFKTMYGWGLRINELCRLEIADMYRNPHAPELGRCGFLHVRYGKASRGSPPKRRSVPTLMPWAAEALLDYATNIRPLYEPGNKRPMWLTERGSQVKVRTLTETFDEIRDRIGLDRKLTPHCFRHSFISHMTEDGIDPRFLQEISGHRFASTTGIYTHVSGEFMNKMLKDALARVTTLGEVQR

SEQ ID NO: 2036 - protein, 100 aa, synthetic construct
  REGION 1..100: note = TnsF-Tn7 System Protein
MAERGLFNTTALRPLLAERGVQLSASQVYRLVTETPERLSLATLVALVDILGCTMEDLIEIVPATAAKKAAGIRDRKNPRRTTEIGDYRPVRAKIVDTDP

SEQ ID NO: 2037 - protein, 487 aa, synthetic construct
  REGION 1..487: note = TnsF-Tn7 System Protein
MMARRKPAPEPDRYEPCERCGEAYLTAAWWQDTPICCYCYNQAKRVVGQCVECAHSGIVPGRTPTGQYLCRTCSGIQLNVDCVECGAEAELYRRGHCWRCELAHQVDELLTNPHTGVVNPQLAGLAAALKQMPRANSGVTWLRNPTVRAVLQQIAAADTVDQRLLAALPVNRSSVHIRALLDEHGIDGARVDFRTRFTAWADSKLATLTNPDNQLVIRSYIRWHVSRRFDDKCTNGTFLAAKQGVTVAIDFLNFLDMLQISVTDVDQSQVDTFVASGTETNRLLSRFLPWVVATYRLPPLTIAPHQRGTTRALTETMQVEQLTRLFANDALTPRDRLAAALIVVFGQPTHKVAALRWDQINREETCTITLGKHPIVLESPLDRLVAEVAEATTNRQTAAHSESVWVFPGYQPGNHLNESHLRRRLKALGFPSLTTRLGTWQTITQTSPPPVLADALGIHTQTAINHALRGSSQFGAYVAARNGQREQ

SEQ ID NO: 2038 - protein, 487 aa, synthetic construct; identical to SEQ ID NO: 2037
  REGION 1..487: note = TnsF-Tn7 System Protein

SEQ ID NO: 2039 - protein, 423 aa, synthetic construct
  REGION 1..423: note = TnsF-Tn7 System Protein
MARKHYDEEFRRNAVDLYETTPGATVRSIAGDLGIERGTLRGWLDKYGTGRKTGADGTPTTSPLHRRTTDEVPDGETPEEELVRLRARVRALEVETTKLTTEREILRKAAKYFGGGDELVSRFQFVADNSATYPVKWLCDLLEVVRSSYYAWRKAAPGRERRAATDDALLKEITAVHDEDTSYGAPRITADLNDGKPAGERVNHKRVERVMREHGIAGYRKRRRVKTTVPEPAEQKYPDQVKRDFTAPAPNKVYVGDITYLPLAIPGIDGKAKNLYLATVIDCFSRRLVGWAIADHMRIELVIDALRAAERDRGSLRGAIFHSDHGSVYTSKDFADACQDMGVTQSMGAVGTSADNALAESFNAAFKREVLRDSASWPDERTCRRQAFRWLTRYNTRRRHSFCNNMSPNDYERSVSDRIGDAA

SEQ ID NO: 2040 - protein, 383 aa, synthetic construct
  REGION 1..383: note = TnsF-Tn7 System Protein
MSGEHPLPGSAPLRLVSSGAELLRPEEQIWTEMLEGWKSALMARTLGASTIYGYLRVLQDFQAVSGDYPWRWMPQDVDEYVTTLNARNGGTAAKSTIRAYLMVVRGFCSFLCEPVYRWPDLCAQVFGEYPSQICFAYNLPVHVSDNEAEPERRAFSRNEVQTLFDYFDDEVERLYAKNNKAWLTTLRDSCIAKVAYGYGLRRQELLRLQIHDFGPNPHVPQYKAFGAVYVRYGKGSRGSAHKRRTVLTVPLMDWGPDVFEAWVGAEGCRQLMGHAADSPWLWPSERGDQLTLNSYATRFTGHRRRAGLPDGLSLHGFRRSYVTHLIEDGYDPLFVQQQVGHEHSSTTALYTQVSSDYRQKTLQRMIRERLASAAVPYGESNQA

SEQ ID NO: 2041 - protein, 270 aa, synthetic construct
  REGION 1..270: note = TnsF-Tn7 System Protein
MLRACAERSNITPSVRRNAADQIKYATAFLIWLNTRDRTLASCRQSDIDAWYAENPVHARAQVRTFLAWAMQSRQGSRSLSLPAGKTSRQAPMTEEQRLAALRRLLIDADVPPLLRVAGIIVLLYAQPLTRVVQLTVDDLFRDGEDVFLRLGNPPSPVPEPVASLLLDYIAARDNMNTATNRDSRWLFHGRRAGQPCRPDHLSALLRKIGVPAAAARGRRHPAAAPRDACPRRRRRTWLPRWDHCPSPQRRRWNVEPLRRRETRKITVRA

SEQ ID NO: 2042 - protein, 1078 aa, synthetic construct
  REGION 1..1078: note = TnsF-Tn7 System Protein
MVFIRVLGAFAAEVDGAAVHLGGPRQRGVLALLVAARGQVVPVDRMIEDLWRGEPPARALMSLQAYVSNLRRLLEPGRPPRTPARLLVSAAPGYALRLPPEAVDAWRFEGLLGQARTDTDLRAAQARLAEALGLWQGPAFAEVADEPWAAAETARLNELRLVATELHIAAGLRIGDPAAVVPEAERLTRDEPLREEGWRLHALALWSSGRQADALATLRRARGILAEELGLDPGPDLTALEEAILTQRTDVLRATVPPPPPPLTAPLPQVAPLPGTAPIVEAPFVGREAQLSALVTAATGAAADGARIALVTGEAGLGKSTLLEHLGRRLERDGWLVAVGRCPEVDSAPPAWAWTEALRAVAATTSPGEFADDLAPLLTDTGPVNADATAGRFRLRQAVWKWLAAVATERPVAVVLDDLHWADATTLELLGGGLGMRAPILVVAAYRADESGHLTETLASLARATPLRLALPGLNDEAVAELVRAECEADEETIAGIAERTGGNPFYVRESARLLNGEGALVALSEVPEGVRDVLRRRLARLPEGGVSVLRLAAVAGRESSVDVLVKAADTDEDGVMDALDAGVIAGLLDEPGPGLIRFVHALVRDTLIADVSRLRATRMHARIAAALEGTDDIAALAHHYARAGSPKAVGYCVQAAELAEARYAHDVAADLLADAVTNSTGPDERVELLGRLLRAQIRAGAVAAARETRREAVEYAESLGRDDLMIAAFTAWTEPTPWQARTYGTVDRPIVDRLSRLLKRELTPSVRSRLLTAYAHELVGEDDPTVVEAAQEALDLATGPRLRAAALEILAGVHGDAELCRELVEIGTEHDLPVYRVTGLLNHAAVAAAANDPVTMHQVTTEALELARTYRMREAIAVTEITLASLALIEGRFADAELLYIKADEGMRRIGSVHATGFLQLALATIWLNDGTLGAHLDDVRALHAALGPMTSDLLALALHANGLDAEAREVRASPSPIRPDFFFTFLTTLRAMAIIALNDRDAAEEIYATLLPHRNGPPAGAASLSVALRPVAHTLGELAVLLGRTEAAAHFTQAATIADRWNAPHWAAEARSRTTT

SEQ ID NO: 2043 - protein, 1078 aa, synthetic construct; identical to SEQ ID NO: 2042
  REGION 1..1078: note = TnsF-Tn7 System Protein

SEQ ID NO: 2044 - protein, 171 aa, synthetic construct
  REGION 1..171: note = TnsF-Tn7 System Protein
MRAVMLGGAPGVGKTTVARRLLDLVQAGQQLVQWLDVDSLWQHQPWRVNERMTTMVRANPRAVAEHAATAEVDILVINWVFQSTEMHRLVAGLLPSGTPAISVQLHASRETWHQRFESDPERPGLTDFYRSRYIQAQTTVVDHVVDTDGLTPFEVARRVTEVTGVLQPGPS

SEQ ID NO: 2045 - protein, 171 aa, synthetic construct; identical to SEQ ID NO: 2044
  REGION 1..171: note = TnsF-Tn7 System Protein

SEQ ID NO: 2046 - protein, 479 aa, synthetic construct
  REGION 1..479: note = TnsF-Tn7 System Protein
MTSTGLPAPCCDNCHRAGKKIHRVHRGRRFCSTCYSRLFKRSLCRGCGNFARIYTLDTHGLCLSCEAKAPCVRCSGVGKPVGLMTEYGPACNSCAHYFKAPEPCERCGTLSTRLTRVSKKNDNVRYCPRCAREDAGTCPDCRRHRFLVLGADGRLRCKLCTENGESQCLTCSRPMPAGRGKECDDCTWKKTFERRVRIQIEGYDRASVRKHFAEFCEWLCTQMGARKAALKLKHYLVFFSFLDTHSAELPSYVSLLNHFEADGLRRMRTPMLWLSERYGIQPDATMREEHSDKRRIQEMINSMPSGAAQTALSGYRAYLMSRQGQGKTTIRSVRLSMRAARDLLAAGSELLEALPVQQAVTDYLIHKPGQRASSRGFIAYLNRTYELDLNADVSKRAQSRARSQRLEADIHAMYDSREQGEAFERNWIKTALMLFHKLPRVSKKMISYTPFTVEGQCGYSVALNGKTYWVPGPWKPLVE

SEQ ID NO: 2047 - protein, 580 aa, synthetic construct
  REGION 1..580: note = TnsF-Tn7 System Protein
MPQRILRTQRRENLTEAGDRGAVAHMRGTFVVWSYERVTANMNAPSIPLVDVICRHLDRNDKPWRYEPVRMGISRLASFRIGTIWQNGECIAETDLGDDKEFSLDFTEGSWSHLGLPGNQQHPFFKQDYPLRPLITGDELTHFLNFPLSSKENLLIPCLEFLVRGYASTPDIARLLATYPLSTVQQRLYASLEQDRRTWLVHPARHVHDDDALLLASMLYDPYTRDAASEIYAQLDVARGRKNQHVSLEVRPWFQGSAEIRARGRWVNGGTTFLCYELTGMSEPQSHPYEIRRPSYTKEDPLAEVVTVVNRERDEIPKPDDPFEITDIDEPHKDAAEWRKPDPGFARLGPRCPVTRSIQQRPYSEKKILNTPPAKTTDLSTGDRVGNSDVGRRKNYAKRVAGDGGVLKGIWDELVRLKKLQPGFSHLEYFSNFSFQSGPVFKLQTLRPFNDLDEPTPEAVRWLKHNGNASRTRGIMIVRMVIGGRSFYLFEPQRKQKLRKDTYYEESSFGLLMEIPDPRSAEEQISHICDKIRFHSGKFGALEGLKDHHNLVLHITRQARFYANSTLRNAFLKRGVELVR

SEQ ID NO: 2048 - protein, 479 aa, synthetic construct; identical to SEQ ID NO: 2046
  REGION 1..479: note = TnsF-Tn7 System Protein

SEQ ID NO: 2049 - protein, 188 aa, synthetic construct
  REGION 1..188: note = TnsF-Tn7 System Protein
MAFESALERDFLRRMDFRLDVLHAISQPVTLDFVARNGKAYTYTPDYLVRFHSHTGRRPMLVEVKPEEKWRKYWREWLPKWKAAWRYARQQGWDFHIYDESRIRGQSLKNIQTLERYRYADYAQVDLDAIVRTVALKGFASVDYLTALHFQGDEALGQSHVLHLIATRQLDCDISGTLSGSLQVELAQ

SEQ ID NO: 2050 - protein, 636 aa, synthetic construct
  REGION 1..636: note = TnsF-Tn7 System Protein
MSDSKSPEPQGLKIDRSFVKIELGELVCHRKSTYRITQVLDFNSVLGLDIEMGRPKVLRIQELKPFIGSKIVGPYADYDLEDIGTEEWAIAQKRYTVIQPLLRYEGQPKKIVEERAKESGVDPVTIYRWLRRYKERGELTGLIPSKRGWSPGRSRISPEVEEVIKTVLDEYYLTPQRPDVASTVYQARKACRALKLPQPAVRTVQARINNIPERVRLLRRGDIELANNKHAARVGSLETEYPLQIVQIDHSPIDLIIVDDVHRKPIGRPWLTIAICVHTRMVTGYYLSMQAPSALSVAMCVVHSILPKEQWLAQHGISGEWPVWGKMTTLHSDNGRDFKTENLIRSLNNHAIHKEFRPKGEKHWGGHIERYINSNSRHSKRDKGATFSNPLERREYDSDGEAIYTFAEFEARLIRNILKYHEQFHNGLGMAPIRKWNLAFFGDKEHTPISPLPPRVADPWSFQLDFLPSAERVIHPYGVEMDAMYFAEALRPWVGATDPATGKQRKFLFRRDPRDINRIWFKDPALNEYFEVPILRARYQGGTVAEYVNAKKKSRAAGLGAVNEELVDRFSDENKRQEIEAAEKTKQARKSAQSRANNMKQSTPARPSPIPEPTVELPASSEMLSIDEVDTFGDVW

SEQ ID NO: 2051 - protein, 202 aa, synthetic construct
  REGION 1..202: note = TnsF-Tn7 System Protein
MLFLDELPEFERRVLEVLREPLESGEIVVARARDRVRFPARFQLVAAMNPCPCGYLGDPTGRCRCSSEMVQRYRNKLSGPLLDRIDLHLTVAREATALSPTHNDGPDSATLARQVALTRERQQQRQGCANAFLDLPGLRRHCGLSTADEQWLETACERLTLSLRAAHRLLKVARTLADLEEVENIRREHLAEALQYRPAGQE

SEQ ID NO: 2052 - protein, 372 aa, synthetic construct
  REGION 1..372: note = TnsF-Tn7 System Protein
MHAPYEYQWTAGAGPVNALWPLAPALLEDEVISSWLVRCALAHDCEPTTLTGDVWLGVRAWCVDIDRELSRGQLAALHARSGLTVGALEASTLVRFWAQMTGAEHFPHGIAPWILCLGVRNRRRCGGLQYCPLCFDTHQPHYLLQGRLAWHTVCPIHHAGLLDHCEHCNAPLCPHLLLPPELDLGHCHRCGFELKCARPGPVLENALRFQNATDSLFSGPPLFYGQAHLPLVEWLSLAKWMLGLLRNGARGRGSCTDSFFKKLGVSFEDAPPLGTGLPFEYLAPGERADLLSNVWIMIQAGPDRLIRAARDEGASPSLLLSRGGKLPETLAELTSVMHSRWQRHAPETHSDKPRLPKSVLLQWHRLLRKFQR

SEQ ID NO: 2053 - protein, 297 aa, synthetic construct
  REGION 1..297: note = TnsF-Tn7 System Protein
MTDYLHIAPKFRDVMFKSDDERILFLDSPRWIHYRAGAALLDILDGLLRKPTRPRMPNLFAVGASNSGKTTILHRFMDSSGQSYISDDATSVRPVICVEIHKPDERELYNAILSEFWAPHNPTAPLSKLRHQAMHMMREARVRMLIVDEAHTINNGSPAKRMDTMNELKMLGNVMSISLVLVGTRTALQLLVLDAQYASRFKVVSLPAWSANAEFQGFLKSFESVLPLKNPSKIYSPELATLIHAISDGNTGNVEYLLRECAKEAIRNGSEVIDRKLLEKNRCMRPTSTNGLQEQVL

SEQ ID NO: 2054 - protein, 297 aa, synthetic construct; identical to SEQ ID NO: 2053
  REGION 1..297: note = TnsF-Tn7 System Protein

SEQ ID NO: 2055 - protein, 308 aa, synthetic construct
  REGION 1..308: note = TnsF-Tn7 System Protein
MPAGRGQECEACYWLRVFNKRLAINAKGFNSDQVAGLFTQFGQWLLDRAGAHKAALSINGHYRFFQAIDSNWASVPSYEQLLQHFGAAGLRKAENPMRWLTEVGVVVTSVLLREQHTEQRRLEAILAELADSWSTQLLGEYVAGLTGKMKLGGTDLRSVRLAARAAANLLKSAKLKVGAVPTQKALESFWREAPGQVAAVTGFIGHLNKRHGLDLQAKPDARWLSVAKRQKAERELVALLREATQEDFEGRWIVKGLAYFHGVTRASRKKLVYQPQDYRGVAGYNITYENQVLWVPSASSYKRGDHTG

SEQ ID NO: 2056 - protein, 542 aa, synthetic construct
  REGION 1..542: note = TnsF-Tn7 System Protein
MWWYGPIQQNTRPRSIPLAKVYFKQLIDDEPRAFSWAVVPLSSLPHYRIGTIWRDGKCISDTKMDEGTFDVDFDEGGWTVTSRSDLSKQGKAHVFHDSEYSLKYPQDHGQLLSFNLDDGKNLLIPCTEYFVRAYARNMEVCRALATLLWSDVMSVLFDDPRRDEHRWLVKPSRPMRNYDAVFLAHLLYDDYAARCIKNINAQFISGDPSTKIFLKATPWFKGKGQVLCRGQWINEGNTFLCLDLVGSNQPDGQEIEWQRKKFDNSEGQEGGRIVLPRPVRTAEAEQFLSEHSHAAPDSHSELTIVKPPPFKVLGVRRKVKKTKEVIKTDRGRLGPQPPEATSHSSGEGRGAGKNIGKLEHAADAELETQGFLYDIWNAFRSIMADNPDRVTHVNWYTPTRFREQGPPRLILLQPPIEWPFEDKSGRRWVYLDREAGVCRGLMVLRIQVDGHNYFCFEIQPNKPEKPEYCGVLMKSHLSSPEEFEDFVQKLCSKVRFVTGTFNKMKSFFPPGTKIFRHHRNDLKVLYRNRLINLFKEVDVELK

SEQ ID NO: 2057 - protein, 308 aa, synthetic construct; identical to SEQ ID NO: 2055
  REGION 1..308: note = TnsF-Tn7 System Protein

SEQ ID NO: 2058 - protein, 191 aa, synthetic construct
  REGION 1..191: note = TnsF-Tn7 System Protein
MLERDFLRRMRFSHRVESVIAQPVRVDFLDSLGRAQTYTPDFLVYYRQPAGADYMDYVKPMLVEVKPAYEWRKNWRTWCGKWKAARRYAREEGWTFSIYDESRIRGLPLDNITFLERFELLEFDREDIEMVLKTLQEMEFAPVHYLLARHFKGVYRDRGVALLWHLIATGRVQCDITEPLNEYLELWAATP

SEQ ID NO: 2059 - protein, 640 aa, synthetic construct
  REGION 1..640: note = TnsF-Tn7 System Protein
MNIYEIDTDEHFVPFEPSRERVRVEVGSMVRCDKQVFRIVQLLDFQNVVGMEVETGRSHSLRISELKPVEQERIDGLYVNHDISTISSDEWAIAQQRFSAIKPLLHNSVLPRASVETRAKEVGVDTATLYRWLERYRSWNEVLALVPRKRGWQSGNSRLTAQAEKLIEQVIDEHYLTIQRKTVQSTISEIESQAKALGITPPSASAIRARVSRIPEKIKLRRRGFADKARNRHTPSVGTFPGADYPLAIVQIDHTPVDLIIVDDRHRKPIGRLWLTLAIDVHSRMITGYYLALEEPSEISVAMCVAHSILPKEAWLNLHGVQGEWPVWGFPRVVHSDNGPDFKAENFRRSCANYNIENQFRPVKRPKYGGHIERLLGTFMRELHELPGTTHSSVTKREGYDSDKHSVLTMNEFEEWLVRSILLYHANYHSAIYMSPARKWHLGFFGNREADALVSIPPRPADPLTVQLDFMPSDRRTIQHYGVQLDLYYYSEALRHWIGTTDPDTGNARKFVFRRDPRDISIIWFYDPVLKQYFRVPVAYQAFPAATLWEYRAAKKQAVEEGRQHIDDALIARLILERRQIVEEASASTKKARRDAQKHKTHSKKSTPARPVNAPAETVPSIPASEGLLLDDVDLIGDIQ

SEQ ID NO: 2060 - protein, 296 aa, synthetic construct
  REGION 1..296: note = TnsF-Tn7 System Protein
MTEYAHIHADFRPVLQMSARERIRFMGEPRWIGYKAAHHILDSLECLLDTPKRPRMPNILIVGASNNGKTTIVRHFEKTHGQGYVDENSEPVRPIILAEAPPSADEKDLYIAILDRMWMPYRTTDSKVTLRFQVIHALRELKVRMLIIDEVHSMLTGSVMKQREVMNALKMLCNTLVIPIVGVGTPEAVQILHLDPQHASRFDVIKLETWKLNADFQRLLKAFEAVLPLKRSSDLHKPDLAQLIHSISGGNTGDLHSLLIECATEAINSGKECIDRQLIESKSWKRPTRGIRERVV

SEQ ID NO: 2061 - protein, 296 aa, synthetic construct; identical to SEQ ID NO: 2060
  REGION 1..296: note = TnsF-Tn7 System Protein

SEQ ID NO: 2062 - protein, 299 aa, synthetic construct
  REGION 1..299: note = TnsF-Tn7 System Protein
MDSSAFSTPGLAQSFEAFGHWLGGKVGGHKAALAIHRYLPFFVEIGHQWGNIPSYDELLRHFGTQRLRRVLLAMRWMEAAGLIFVRVGAKEEESEKRRIANTLNIFPAVSPERAILDGYHKSLQGNLLKGETTLRSIRLALSPAAALLLKAKEIEVMPPDQRALAAYLEIAPGQRAAVSGFVRYLREVMATEIALPKFDAEKARRNRIQQLEAKMLKLMRVGTDDKTNNRRWLSISLAYFHGLSVNAGKNLSEEQISIHQDGGYTVTLNGEKYWVPRVDLLSERPGSSTPTRSIREDSA

SEQ ID NO: 2063 - protein, 299 aa, synthetic construct; identical to SEQ ID NO: 2062
  REGION 1..299: note = TnsF-Tn7 System Protein

SEQ ID NO: 2064 - protein, 231 aa, synthetic construct
  REGION 1..231: note = TnsF-Tn7 System Protein
MANCCDKIISPPLARRIGPTRRSVSGVYAFRGETSIQFESTLERDFLIRNEFSSAVLAVISQPVQIPFVGVNGRSYTYTPDYLVYFRLGNRHYDDYPKPLLVEVKPEKEWRKNWREWLPKWKSAYRHAKEQGWAFHVHDESRIRDQAFENIRFLERYKRMQFPVEESRWVVENVRQMGSAPLHYILARHFMGMYRAEGIAHIWHLLSIRQLDCDISQPLNDATEFWVPTDE

SEQ ID NO: 2065 - protein, 619 aa, synthetic construct
  REGION 1..619: note = TnsF-Tn7 System Protein
MGRLVCHGSAVYRISQVLDFESVIGVEVESGRSSPLRIGDLRPMNQAVLASSDSGKDLADIADEDWRIAEQRFAAIRPLVNEMMLGRSAVMHRAKEVGIDTATLYRWLGRYKAYGVVSALIPKKRGWKPGNTRIPAFAEDVIRQVIEDFYLTPQRPTAQKAVTEVFRRCQLRGIEAPSASTIRARLSKVSEKQRLRGRGFKEKAKNKFLPAAGSFPNADYPLAVVQIDHTPADIILVDDVCRRPIGRPWITLAMDVNTRMVTGYYLSFDPPSETSVAMCVAHSVLPKDEWLLLHKVDAQWPVWGLPKTIHVDNGADFRSNTFQQSCLMHGIHLEFRPVKQPRYGGHIERMLGTLLNEIHDLPGTTFSSIKEKDEYDPEKYATMTKGEFEAWLVTFICKVYHQSMHSSLGMSPLRKWEIGIFGNSEVQGIGIPPRPADRFSILLDFLPAYRRTVQAFGVTIEGMTYYAEALRPWINAEAPNAKGEKRKFIFRRDPRDISVVWFSDPALNQYYKVPFADQSLPPMSVWEYRQAREVLKRAGKDSVNEYQLLQTITELRSEVEKTKENTKKARRLAQRRKEHEKRVSPADPMPGRQSRAPGPALVQASGLVDGDIKPFGEIA

SEQ ID NO: 2066 - protein, 301 aa, synthetic construct
  REGION 1..301: note = TnsF-Tn7 System Protein
MDVSPRNAYTPETLLRVGPMRRASGGEIILSQQLAIASAPVAANPSDSSRQLQHKIARSVAPQQAVFAYILTYDSGVNPRPGEVSLAHRGVLFLDELPEFKKHVLEVLRQPLEDGRVTISRAAQALTYPADFMLVAAMNPCPCGYLTDDRHVCSCQPLSIHRYRSRISGPLMDRIDLQVEVPAVPYEDLKAPRGTRDSATMRAGIVKVRAIQAERYKGSNIRLNADLQGALLERWCKVGEAEHSFLEQAVRRLGLSARAYTRVLRIARTIADMEDAEHIEIPHLAEAINFRTMDRVNAPQG

SEQ ID NO: 2067 - protein, 398 aa, synthetic construct
  REGION 1..398: note = TnsF-Tn7 System Protein
MCNRDDQDGQGTDRQDGHREQSMVAAYSWHPGACCVAPLWAIPVSVLPDEILSSWLVRAALAQGCDPLALTGVFWPKWRAWTRDTDRAIAENRLSQLALVSGISTRHFQAGTLQAVASCIQGGLPSNKAIWPWILALGARNTKRRSGQQYCPMCLSTDTIPYFRLHWRFAWQTGCEWHNCALADRCWNCAAPIEPHRLRADAIHVAICPTCKADLRDSVPEGCLVSALTFQREVDRVVHEQRGQMFGRPVKAAAWLGVADFFVSLIRRASRSGTTGLMSLIDRMGASIPQTMPTMAGAGLELLRVHDRQGIFEATWYFLAADKGSFQRALKGSGITRQGLCGKGEPVPALIAEFAESLPNKLVSRKRRSAPGATSPRPRHEVLRMMARLERRMEMVLR

SEQ ID NO: 2068 - protein, 298 aa, synthetic construct
  REGION 1..298: note = TnsF-Tn7 System Protein
MSISSYEHIHPDFRHIMGLPDKARIEFMDQPRWINYKAAQQIMDTLQGLMHKPQRPRMPNLLVVGDSNNGKTTIIRRFRELCGQGYVNEDSEPVKPVILAEAPPSADEKGLLISILERFFTPYRASDPVSKLRYQVIHLLRMCHTRVLIIDEFHSLLTGSPIKQREVMNALKLLCNELAIPIVGVGTREAVRVLHTDPQHASRFDVMALPLWELNEDFQRLLAGFETILPLKMPSRLYQPELAAQLYTISEGNIGNLHRLLVECATETIKTGKEQIDKTVIESKAWLRPTRGIRELVA

SEQ ID NO: 2069 - protein, 298 aa, synthetic construct; identical to SEQ ID NO: 2068
  REGION 1..298: note = TnsF-Tn7 System Protein

SEQ ID NO: 2070 - protein, 307 aa, synthetic construct
  REGION 1..307: note = TnsF-Tn7 System Protein
MPAGYGKTCEECYWLAVFIRRRNINSALFSSKAVASCYDTFCVWLGKNYNSRMAARLVDRYSAIFFRLEQLQNGVPDWLALFCTLSPGELRKYPLLERWIGDDDPLLNLATVKALSAERHYTEAILARCIGSQIEGIAQQYACHLYGKAAKGNLCMRSVRLALNAAVALLELSLAAGHYKPAQRDVVRYLHKAPGQKACLWGFITFLNRSYHADLSVPADYDGTQAKRQQKRLEARLRDLMDDAGSFDETKWLRVALAFFHGVSLKRADWLLKNGELKRSEDGFILAIGGDEYWMPAPKLYPTHRER

SEQ ID NO: 2071 - protein, 588 aa, synthetic construct
  REGION 1..588: note = TnsF-Tn7 System Protein
MQFRFRRANRTVTRSELFVDDKPWIVWWYRGFVPNTSSRNYQPGIETEFRQVGKSGEVLPIIRYIRILVSDISFFSIGSVWQNGICIQESQLQENTFALDFANGWRFRSLFPEQPFPTELYKPDWYRLNESWMLEFDLKIGGKLLIPCIEFFSRCYGFSGEVKRILTTYPWDECVNRLYVPPERPDESGKWNICIATRIPDCDAVMLASARYRQETQRALSSIHSQLIAQFTNQKLLGKNEHRPVPMKVAPWYHQPAKLIVEGMSFGPNNTSFIGLRITGFSEPDGPPIFLSHQKGDKAENPAPPDSKPAWDGARTTTRIQVPDSVVVTGFTDPEPGMQRVEAETPSLKIIGKRRAVHTVVSHQALYSTGKAISGEEASLFSSCMVEKNGQGVGELSVQTRGISVMDSEGVVRDLWNALQTLKETKPELIRELEWYTPKNGFSSSSSPEYIAFAPGSKLMAKLYNWCHTDSYQLHPRGALLIRLTLSDVTAYIVEIERRPPRSQDENAQEDETFRGVIFTHTEEIDIPTWIEKFMRLARLHEGRVVKFIGEMPGQAFIFKHPSAKNDMHPGFPSVRNALDKIGVAVTL

SEQ ID NO: 2072 - protein, 504 aa, synthetic construct
  REGION 1..504: note = TnsF-Tn7 System Protein
MATPQAALLAISGLSVEFPGVKALEQVDFTLQRGEVVALLGENGAGKSTLIKALTGVYQRSAGEIWLEGTAIAPQNTAQAQSLGIGTVYQEVNLLPNISVAANLFIGREPTRFGLIDQKTLLRNARKLLEGYGLPLDVSQPLGNYSIAIQQIVAIARAVDLSAKVLILDEPTASLDAKEVTMLLDILSQLRSQGMGMIFVTHFLEQVYRISDRITVLRNGKLVGTRVTAELPRLELVQMMLGHSFDETLLKRSEHQAVQAPPLVEFSGYGRRGMIEPFDLAIRPGEIVGLAGLLGSGRTETAQLIFGIKARDKGIAKVEGKTVAIPTPRKAASLGFGYCPEDRKTDGIVGAATVRENIILALQAQRGWLRPIPLREQIRIAEDFIKLLGIRTPGPEQQIQYLSGGNQQKVLLSRWLATKPRFLILDEPTRGIDVGAHAEIIRLIERLCDEGLALLVISSELEELAGYADRIVVLRDRKHVAQLEHDAITVPAIMQAIAVQQGAA

SEQ ID NO: 2073 - protein, 504 aa, synthetic construct; identical to SEQ ID NO: 2072
  REGION 1..504: note = TnsF-Tn7 System Protein

SEQ ID NO: 2074 - protein, 307 aa, synthetic construct; identical to SEQ ID NO: 2070
  REGION 1..307: note = TnsF-Tn7 System Protein

SEQ ID NO: 2075 - protein, 230 aa, synthetic construct
  REGION 1..230: note = TnsF-Tn7 System Protein
MYRNSSDSMRKQQRKIAPTRRSVSGAYAFRGHTAVEFESTLERDFIMQAEFSLNVLDIIPQPACIPFYGVNRQEYTYTPDFLVYYRLGSRSYHNYPKPRLVEVKPEAEWRTNWRKWLPKWKAAYRFAQQNGWEFHIHDESRIRNQALKNIRWLSRYKNMQFPAEETLMLIDTVRETGSVAFSHLLSRFFLGMYQATGQAHIWHLIATRKLDCDITKPFTQNTELWIAEYE

SEQ ID NO: 2076 - protein, 647 aa, synthetic construct
  REGION 1..647: note = TnsF-Tn7 System Protein
MSEQHNHRDTEGAFEPQRVMISVKIDELVCHNDGVFRIVQVVDFGTVVGVHLETGRHASLRIAELRPLEGAEAVFHANATDIEDIADEDWKIAQRRFAAIQPFLGQMVSGREEVKRRAQEVGVNAATLYRWLQRFNSYGTVSALIPMKRGWSTGKSRLSAEMESIIEDALQNFYLTRQRNSASKTIEHIYEVCRRRGIEPPNHMSVRARIARLPEKSVLRGRGFIEKAHNLFYPTPGSFPSADYPLSVVQIDHTPADVILVDDVYRKPIGRPWLTLAIDVYSRMVTGYYISFDAPSETSVAMCVAHSMLPKEEWLMLHETDAEWPVWGKPTTIHVDNGPDFRSDNFRKSCMAYGINLEFRPVKTPRYGGHIERLLGTVLRRVHGLPGTTFSSIKDRVEYDSDNNAVMTKSDFESWFLTYITKVYHQKLHSGIGLSPIKKWGLGIFGNAETPGAGLPPRPADRMTLQLDFMSSVTRTIQPFGVTWNDMKYYAEPIRSWINATDKATGKKRSFLFRYDPRDISSIWFFDPALKAYFRIPFADLSRPSMSLWEYKQVRQKLKSEGINSVNQHTIDAGLAEMRQKVEEASLTTRKARRQVQRRKEHESGVTPASPISKGRERSSVNKSAAEASDYIDGLIKGDIDPFGDFA

SEQ ID NO: 2077 - protein, 296 aa, synthetic construct
  REGION 1..296: note = TnsF-Tn7 System Protein
MNDLSHIHSEFQHVMMLSDDERMDFLDAPRWIGYTRAKLALDTLQGLLRKPARPRMTNLLLVGDPNNGKTTIARRFFELCGKAYVNDKAEAVVPVVLAEAPPAADEKGLYISILERLYTPYRATDPVSKLRYQVIHLFRSCHVRMLIIDEFHSLLTGTALKQREVMNAIKLLCNELAIPIVGIGTREAVRVLHTDPQHASRFDVLTLPAWELNADFQRLLAAFEKLLPLKNPSRLHEPELALQLHAICGGNIGNLHRLLIECSKEAIRDGSELIDKSIIEKNSWCRPTKGVREIHF

SEQ ID NO: 2078 - protein, 296 aa, synthetic construct; identical to SEQ ID NO: 2077
  REGION 1..296: note = TnsF-Tn7 System Protein

SEQ ID NO: 2079 - protein, 474 aa, synthetic construct
  REGION 1..474: note = TnsF-Tn7 System Protein
MMSICHGCGLEVVRIHRRYREECFCQACYSQLFLRRYCPSCGCMARLYIADISAVCRSCERAAPCIRCGRIGRPIGKLTRDGPVCNSCAHVFRELRSCACCGRMSNNLSKSSASGFEGLLCTCCARSHYGSCQMCGRYRELSSSLDHRRVCLKCARLGYISCTVCGEIMPGGYGRRCQECYWRSRFSQRLEKGCLIIGNSKVGNRYRQFCLWLCKTYGNRLACIKMGRYGIFFEEVNALKIAIFNYQLLLTSFGAARLRRFPLIAKWLQVNEQSPEICIMKILASEQLRIQYILSKTRSPQAQKVFEAYMLTMKKRYDAGNITLTSLRFALAAASNLFANSEHRGHLLPVQSDLNSYLRKSPGMRAQLTGIVNYLNSNYTNQLVLPRKRTWNAIRRHRKTRYINIMKRLITRSAKPEKMKWIRIGLALFHNMTLTQARRLLERASVLDNDKSYIVRVSEGDYLIPYLSTYSGLH

SEQ ID NO: 2080 - protein, 180 aa, synthetic construct
  REGION 1..180: note = TnsF-Tn7 System Protein
MEKRLRWYWRNPSDLCPRHIDETDVKVNGRWAYLYQAADNRGRTDDFYLSPQRNSKAVYRFLGKILNNVKKWQTPRFINTDKAHTYGRALALLKHQGQCQFDVEYRQIKYRNNVIECDHGKLKRIIDATLGFKSMKTAYATIKGIEVMRTLRKGQASAFYYGDPLGEMRLISRVFEMKGL

SEQ ID NO: 2081 - protein, 323 aa, synthetic construct
  REGION 1..323: note = TnsF-Tn7 System Protein
MARADLVLNLVETGIKGDLPRFKKTAEAIAAEATARHQYQLADKLKNILTNTVSGEARRYTYDTDLQNAFYEIHPRKILDDLIIPDAVITQFMELIEEHARRDLLRSYNLEPRHKLLLSGPPGNGKTSIAEALANHLSLPFFTVKYEGIINRYLGETAQQIDKLFEFVKTQRCVLFFDEFDAIGKEREDTNDNGEMKRVVNSLLKQIDLLPSHVVVVGATNHESMLDKAIWRRFQLQITLPAPTQRMATKWFEEFEKRVGHSLGLAPSTLARKLSGLSFAELEEFALDVQRKYVLGLPASENKLKDISAHCLKHWTERYRQEN

SEQ ID NO: 2082 - protein, 323 aa, synthetic construct; identical to SEQ ID NO: 2081
  REGION 1..323: note = TnsF-Tn7 System Protein

SEQ ID NO: 2083 - protein, 609 aa, synthetic construct
  REGION 1..609: note = TnsF-Tn7 System Protein
MSGKQYYTLVPTTRSVNIEKLRGRDRRMVAWWYCGFITNGVDGHQPSIKVEFRYVYDNNTVSENFCHIAIPVSFLAHVTIGSVWNKGICTEEIKFEQRHCDIPHPEDGDGWETIRSSDSPTPLFPVGFHRDYPADRNWLLSLQTRQGNRLLIPVEEFFIRCFGISQEVKRVLTTYRFQTAVHERLYAPPTPNEQEEFGPNVWPIRLRQRMKKDDAVMLAHAKFTDHGYQVLASIYTQLSHQFTNLNRRAYTPAFIKVIPWHKEDFKLQVRGIPFDNGRSFLVLRILGSSAPQCGGNTIERSMDTGDDFELPADKDDATAYTGAMITTLINPPDSILITDDINPDNNTQKKEVETPGLILIGKPSPVRDRVKRQADYTSGKKVRGESSNIYSSGRPENTGQGAGEFKSDTPLVIDTQGMLRNMWNACRELHRLYPREIISAEHFTFENGFSAGEEPCFISLQPLMESEPLAEKWCYVSEGIDKRLKCALIIRMQTVWGDAYIAETERSLTKFTNTAGATRHKEIPGRGLAFTLRQSDAIASLVKEYLSQIRYVKGIVHKLPPILTSEYTDQIMPFNHPTPKGPSFPALPALFNALRKLDIPLDDSRVKTW

SEQ ID NO: 2084 - protein, 474 aa, synthetic construct; identical to SEQ ID NO: 2079
  REGION 1..474: note = TnsF-Tn7 System Protein

SEQ ID NO: 2085 - protein, 232 aa, synthetic construct
  REGION 1..232: note = TnsF-Tn7 System Protein
MYRNKNHEVIPKQQRKIKPTRRSVSGMFPFRGHTPVAFESTLERDFLILTEFSMVVLDIIPQPAEIPFKGLDGRNYSYTPDFLVYYYLGEQSYKNYPRPRLVEVKPEEHWRAHWREWLPKWKAAWRYAQTQGWEFHIHDESRIRNEALKNIRTLARYKNTHFELSESERILATVREVGSASVDYLLSRLFLGMYRPQGIAHIWHLVAIRQLDCDISQPLTMNTELWVTSDDR

SEQ ID NO: 2086 - protein, 656 aa, synthetic construct
  REGION 1..656: note = TnsF-Tn7 System Protein
MIDEADGFDWKNTYDEDAFEPRRTMLSIEIGSLVSHLNQTYKIIQIIDFQSVVGVNLISGRHASLRINELRALEAPQAASDALNVDLDEIADEDWKMAQKRFEAIRPLIDQGSVSKAQMESRAKEYDVTSMTLYRWLRRYNSTGSVSALVPMKRGWVAGKSRLTPEIESIIVEIIDGYYLQPERPSARKTIREVENRCKQLGIKPPNHTSVRKRIANLSEKTVLRGRGRAEKARNKFVPKPGSFPNADYPLAVVQIDHTPADVILVDDIYRKPIGRPWLTLAIDVFSRMITGYYISFDPPSQTSVAMCVAHSMLPKEEWMMLHTVDADWPVWGKPSTIHVDNGPDFRSENFKNSCLAYHINLEFRPVKRPHYGAHIERLMGTVMGEVHDLPGTTFSSIVERMEYDSDKNAVLTMSEFEQWLVTYITKVYHQRLHSGIGLSPVKMWERGIFGNATDFGIGLPAKPADKLTTQLDFMPSFRRTVQTFGVTHENLAYYAEPLRPWINVKDRETGQTWKHLFRYDPRDISTIWFFDPELRMYFRIPFANQALPAMSLWEHQQITEKLKAEGVRSVNETLLLAGLTEMRKIVDEASSKSRKARRQQQRRKVHESGVTPATPVPPLNTDHPTNSKNRDSGRDFSLYPDGLIIGDIEPPGDIA

SEQ ID NO: 2087 - protein, 704 aa, synthetic construct
  REGION 1..704: note = TnsF-Tn7 System Protein
MSKSTFKQLVRQLDLRLRHRVPMVHQTESSECGLACLAMICGSYGKNIDLIALRRQFSLSTRGATLVGLTGIAEQLGLSTRPLSLDLDELGALKMPCILHWEFNHFVVLVSVKGNRAVLHDPARGRRTVSLTELSRSFTGVALEVWPGSAFTADSIRHQIHLRTLIGSVHGLKGALGKIFCLSLVFETINLVMPVGTQLVMDHAIPAGDRGLLVLICAGLMIFILLRAAIGMVRAWSGLVMSTLINVQWQSGLFTHLLRLPLSYFERRKLGDIQSRFGSLDTLRSTFTTSIVGAIMDCIMVIGVLVMMILYGGWLTWVVIAFTALYVLMRLLTYGYYRQLSEEALVRGARAGSYFMETLYGIATVKMQGMAERRIAHWLNLEIDTINTGIRLSKMDMLFGGINTFVAACDQVVILWLGTRMVIDNQMTIGMFVAFGAFRGQFSDRIGSLTAFLLQLRMMSLHNERIADIALHPREDRKPDLPYVPGLQPMGLSTHALSYRYDSQSPAIFDALNITIAPGESVAIVGPSGAGKTTLMKVLCGLFPPDSGRIEVNGTDIRQLGINNYHKMIACVMQEDKLFSGSIRENICGFADEVDDAWMAACARASYLHEVIMRMPMGYETLIGELGEGLSGGQKQRLFIARAIYKKPAMLFLDEATSALDKESEAMVNQAIKALSITRVIIAHRETTIASADRIITLTNNAEQ

SEQ ID NO: 2088 - protein, 704 aa, synthetic construct; identical to SEQ ID NO: 2087
  REGION 1..704: note = TnsF-Tn7 System Protein

SEQ ID NO: 2089 - protein, 215 aa, synthetic construct
  REGION 1..215: note = TnsF-Tn7 System Protein
MAHNGVLFLDELPEFERRVLDALREPLESGEIVISRATAKVCFPARVQLIAAMNPSPTGHYQGMHNRASPQQVLRYLGRLSGPFLDRFDLSIEVPLLPPGVLSKRRIAGESSAQVRERVLLARERQLERAGKINALLNNHEVERDCALSEADADFLETTLNKLGLSVRAWQRILKVARTLADLAGDREIDKRHLSEALGYRSMDRLLLQLHRSLE

SEQ ID NO: 2090 - protein, 296 aa, synthetic construct
  REGION 1..296: note = TnsF-Tn7 System Protein
MTGMAHIHKEFRHIAELSARERIDFIEEPRWIGYARAHFILDTLQELMRKPRRPRMTNLLLVGDPNNGKTTIARRFYQSNPPLLSEDMTETTNPLVLAEAPPTADEKGLYISILERLYTPYRASDATTKLRYQVIHLLRACKVRMLMIDEFHSLLTGTALKQREVMNAIKLLCNELEIPIVGIGTREAVRVLHTDPQHASRFDVITLPSWQLNTDFQHLLAGFESVMPLRGASRLHEPELAMLLHAICGGNIGDLHRLLMECCKEAITTGQEHIDKSIIESKSWCRPTKGIREIIL

SEQ ID NO: 2091 - protein, 296 aa, synthetic construct; identical to SEQ ID NO: 2090
  REGION 1..296: note = TnsF-Tn7 System Protein

SEQ ID NO: 2092 - protein, 474 aa, synthetic construct
  REGION 1..474: note = TnsF-Tn7 System Protein
MLTKVVDQHCDSCGKCVVNIKKKYKGKKFCATCYARVFSKKLCLGCGAFARLPKNDDEARCNECIKKQPCIRCNLSNKPIGKLTEYGPVCNSCSVYFRAIESCERCGKSSQKLTRVARFNDDLRVCPKCASRDYETCPSCHKYRLLELTPNGLKVCKKCQHQPEKQCLNCEEVIAAGCGDLCNSCYWHKNLRFKVNQNSNLFESNYLKNIYVQYIEWLENKVGANKAALYISKHTHFFVQTESLWKDSVPTAHQLLAILRSSGLRKFELVVLWLHEHFSIQISIDKKHDVSEIDQLEKLIASLPQPSLGFETISAYKNQLENKISRGKTSMRSARLAVKPAVALMMHMNQGCDQLPSLKDVKSYLTEYSGQAAALTGYINFLNENYDTSIDYLALKKSDFLYRKRKENLERTIVNLVSLNDPKNVLEWVKAGLQYFHQLSYAEALKVKSEMILKEDSGITVLYRGQSYWLPKNQ

SEQ ID NO: 2093 - protein, 474 aa, synthetic construct; identical to SEQ ID NO: 2092
  REGION 1..474: note = TnsF-Tn7 System Protein

SEQ ID NO: 2094 - protein, 236 aa, synthetic construct
  REGION 1..236: note = TnsF-Tn7 System Protein
MKRISEEYDPVRKAQTVYGSISGNYSFRGEKTIWFESTLERDYLIRQEFNNNVIDVVSQPISIPYVTDLGNASTYTPDFLVQLSSASYDDLDLFPAPLLIEIKPRKKLVEDWSKLKPKFRAAHNFASEKGWKFKIIDESRLYDQYWASISFLKRFRRSHVDELEKQVLLETLEKLGHSTVNQLPAYIFKDEKNILRAIHKIWALIAKQAIGCDLHQPLTTETVIWVNTKHTTIGAA

SEQ ID NO: 2095 - protein, 637 aa, synthetic construct
  REGION 1..637: note = TnsF-Tn7 System Protein
MIQTDVVDINRTRLIIKPYALVGYKGKQYKIINIISSDDVVISDLDSSRCLQVSIKDLKVVNLTDEQIAELNIGDEEISDKAWDTALFRYELIKPLIQYSSVDAVLQLANEQSIHETTIWKWLKAYRVNNSILALVPKKRGWTSKKTRLSPQLTHIIQQAIQEEYLNARKPSIAKTIYFVKAQCSRFKLDPPHDNTIRKKIEALNEYTVTKARFGKQAAQDKYQAAAGSFPNADYPLAYVQIDHTKLDIEIVDDEYRQAIGRPFITLAIDVFSRMIVGYYISLEDPSATSVAMCTASAILSKKRKLIELDIDAEWDAEGLMDSLHSDNGADFRTNHLSKACLKYGIHWEYRPIGGKQFGGHIERMLGSVNGEIHTLDGTTKSNIVQKGIYDSAKNACLTLSELEYYLVYWITKIYHNKRHSHIEMSPLKKWNEGIWGNKFTAGTGLKERVADENTLFLDFLPEFQSTIQKTGVKKDKLFYFADCLRPWINHLDPDDSSKRKKKKFLFKRDPRDISMIWFYEPNSNRYFKVPTTIREIPPISLFEYRQVQTYLRSESRDDENQEEIYQAILHLREKVDEAKSLTRKQRRANQRRKENSKVNIDHHSQINNEKPSVQVQIDQSSNDLWQTNLTAFDDLR

SEQ ID NO: 2096 - protein, 341 aa, synthetic construct
  REGION 1..341: note = TnsF-Tn7 System Protein
MEYIKLSYHHLNFEDRTALMLESRKEGFSARKFAELIKRHPSTIYRELKRNSINDVYQARYASDNTFARRRRGHRKLKIDSILWKFIVEAIRCLWSPQQIAKRLKTFPDLDQTMNVSHTTIYSTIRALPKGELKKDLLSCLRHENKKRKANGEPKKDSILQDIKTIHERPAEVQERKIPGHWEADLIKGKDNKSSIATLIERNTRLCILATLPDAKAESVRKALTEALKYLPAELRKTLTYDRGREMSEHKILEEDLGIDVYFCDPHSPWQKGTCENMNGLIRQYLPKGIDLNQADQHYLNQVAMSLNTRPRKALDWLTPLEKFAQLVDYHMAFETVAPHV

SEQ ID NO: 2097 - protein, 341 aa, synthetic construct
  REGION 1..341: note = TnsF-Tn7 System Protein
MEYIKLSYHHLNFEDRTALMLESRKEGFSARKFAELIKRHPSTIYRELKRNSINDVYQARYASDNTFARRRRGHRKLKIDSILWKFIVEAIRCLWSPQQIAKRLKTFPDLDQTMNVSHTTIYSTIRALPKGELKKDLLSCLRHENKKRKANGEPKKDSILQDIKTIHERPAEVQERKIPGHWEADLIKGKDNKSSIATLIERNTRLCILATLPDAKAESVRKALTEALKYLPAELRKTLTYDRGREMAEHKILEEDLGIDVYFCDPHSPWQKGTCENMNGLIRQYLPKGIDLNQADQHYLNQVAMSLNTRPRKALDWLTPLEKFAQLVDYHKTFQTVAPHV

SEQ ID NO: 2098 - protein, 734 aa, synthetic construct
  REGION 1..734: note = TnsF-Tn7 System Protein
MLTGIHISNVATYNVPTKLDGLKPINFIFGANGSGKTTIGRILDQTSGYTHCLLQWVGGEPIKTLVYNRDFIDRNFNQENTVKGVFTLGDDQVDAERQIALLRPQIDKATDDIRGLNILLNGEANQGGKVAERAALDPEIQAKCWQQKQLHDSYFQEAFTGFRNSAERFKEKVLLEKQSNTSTLLSLEVLKEKASTIFSSNVERYEAIPTFDASTLIDAQLNPILQKNIVGNQDVNISKLIETLGNIDWIKQGREHFEKSYPTCPFCQQITPPSFSEELIQFFSKTYEQEVGIVERLYNQYIDSSVRVLNTIQSICSQNRPFLEIEIFQSEAQILHERLERNKGNLQKKLSEPSLKISLEPLEAIINKILKLIKDANQKIIQHNQVVQNLTTEKQDLTNQVWKYLINELDSDLNSYIKNRTTLDNTIAGMNSSLAKKRELLHTLNAQIQEHEKRSTSTIPTVNEINELLLSFGFTSFIISPVDDYGHYRICRANGDDASRSLSEGEKTFITFLYFYSLIKGSHSSSGITENRIVVFDDPISSLDSDILYIVSSLIKRVFDNVRSNGLIKQVFVLTHNVYFHKEITFNNKRNQILNEETFWMVKKTSNGSTIEKCSENPVRSAYELLWSDIRTNNQSSLTIQNTLRRILENYFTMWGGMSKDAICDLFEGNEKLICQSLFAWVNDGSHSIHDDLYINHGQQTNDSYLAVFKEIFNRSGQLGHYQMMTGSSTDVTS

SEQ ID NO: 2099 - protein, 734 aa, synthetic construct; identical to SEQ ID NO: 2098
  REGION 1..734: note = TnsF-Tn7 System Protein

SEQ ID NO: 2100 - protein, 228 aa, synthetic construct
  REGION 1..228: note = TnsF-Tn7 System Protein
MPLEFIVVNDSGSHPKPGEITLAHLGVLFLDELPEFDRKVLEVLRQPLESKEIVISRASRQITFPASFQLIAAMNPCPCGYAFNQDIRCQCSAESIKRYQNRISGPLLDRIDLHIDVPPLQAHELHDKTAVENSDTVRQRVIQAYEQQMQRQGMLNMNLSPKQLEQFAALATPAQNMMDLAQQRLNLSARAYHRVLRVARSIADLAESSEIQTAHLSEALSYRAQSSP

SEQ ID NO: 2101 - protein, 306 aa, synthetic construct
  REGION 1..306: note = TnsF-Tn7 System Protein
MDQFKHLAEHVIETLALNDQDRISSLYADRWIGYKKALTVLNVLTDILNRPRKLRPECLLIVGDSNMGKTTIIHEFAKKYYTQRVDDVDMNLLSLTKPVIPIQAPAKPNVKDLYINILEHFFVPYRATDPEAKLRNQAVHLMRKYQTKMLIIDELHNCLSGSARQQQEVMNTLKTLSNELSLNIIGVGTREAPLILHTDAQYASRFDIVDLPRWELNEDFLRLLLSYVRLLPLKKPSDLASKEIATLLFEISEGNLGDLTRLLVECTKEAITSGKEEITLQIIKKYSDLKPTVGARNIRHINLNRV

SEQ ID NO: 2102 - protein, 306 aa, synthetic construct; identical to SEQ ID NO: 2101
  REGION 1..306: note = TnsF-Tn7 System Protein

SEQ ID NO: 2103 - protein, 370 aa, synthetic construct
  REGION 1..370: note = TnsF-Tn7 System Protein
MSHLDQRWFIRTPIKDGEVFSSWIIRSALDMGCSPLILVEALWGKWRGLTVDLDRGIDGERLDALLQHCFESKRNIQQAMLSNIFPQLHQRFDANHNIPWILTLGIRNRSNLSGRQVCSACLNEMGASPYLRLNWRMAWHCGCQKHHLCLIDRCPECGVAIQPFKIDLEHGSLAVCASCHYDLREAQVGKVNPSALNFQKIADHVLESGIGVYNQSLVSSQEWFAIARAWLSEIRILMMTQNQNLIQMFKSLDVDLGILLPLTPLSFEYLNTQERMGLLSILNQVMSIPNDKLVQAAYQYGISSANFWDKRKQLPIQLQQIKDAMIQPVRSSVPIRVSPSLNHPRSKASVQRMWLKLMRKANKTGVKYFD

SEQ ID NO: 2104 - protein, 414 aa, synthetic construct
  REGION 1..414: note = TnsF-Tn7 System Protein
MSQPCTRCGGEAVKDGANTEYGRVCQTCYQYYFKTKKECFECGEFKRNISRYSKLSHDHAICTRCYQSHFMQSCSLCGRYRELVESEQGKICQKCHEFGEIPCETCHKPMPAGMGKRCGDCYWSQRLKHEAEINTYLLTEGVMRQAYTSFTIWFEAELDSKTAALKHNNYIDFFVRCDELWGKIPNYESLVQEFKPNGLREYLTALRWLIKTKQIVVNPDVKSQIAEEERIVNLLAKFDDKAPYCINDYHNYLEQKLLLGKTSLKSVRLALQPAIDLCTQFKLEGSNIPIQEQIDGYLLVKQGQRNALYGFVMFLNKKCGSSLVCEKPSKDVILKANRNQLEKQIIKFINENKMLSKDNELQWFQLSMMYFHGIKVSLSSLKNSKTQLSGNNDMITLDYCGKQYSLPNFKTGSF

SEQ ID NO: 2105 - protein, 560 aa, synthetic construct
  REGION 1..560: note = TnsF-Tn7 System Protein
MFDTLFENNGKKVKYMGMVDIQSYFKVCLGRFYKPKTEYIVLWYGQIYYHRGLRSVQVYFLDSSTNKQVVVGVSIKSILKLPIGSIWVGGRCEEKYEFETLYTTLDAYDNEKYKRPNLAYTNHFGISKDKDEYILKPDSYPVDDIKTDSNTNLVVQTDTVKIIIPSVLFFVAHYGVSKEINKVLISWHKQEVEERLNINDNCGDLITIPDRCVIADAVFLYYLKTNNHTKGVVWSLNKRMLNNNKQYHSLKAEPYHKQELQLKIVGLRINDQTMLCTEILGISMPQGDAIEYRIDKPNSATYGDGTDPQTLKFRAIYNTIESDEIILEAERDANNVTTAVVRHRVEQIGLIRKLVKYKNLALNEAIDSCNSKIIRLPQNTPDAFADGENGNANGDIGRVQVLADIGAMPSIKNNFERILRYAQNLKVTLAYAPVVIDCVNLAHDDIFIGEIVRGMRRRKNDSDVKVVFVMRLITKLGVFYLFDCKKIGSQTSGVVIRVKEQNAFTEESIRQVLGQLFSGNGRLSDVNAISEFGIVRYFKHTNGDDINWVKQAIGNCLKKK

SEQ ID NO: 2106 - protein, 215 aa, synthetic construct
  REGION 1..215: note = TnsF-Tn7 System Protein
MFKHQTRKIKPTRRSVSGVISYKKKPLAYESTLERDFIIYHAFRKDVKNIVPQPVKIPFNKNGRTYHYTPDYYVELDAKSGKSFIAEVKPKSEWQENWRDWSDKWKEAIRYCKQKGIRFIIFDEDRIRHEALDNINFLRTYETIRVSKEEVEVILADIKQRGVTSVDYILERYFKSELYRSDGQALVWHLMANKQIGFDIWSDIKDPQMEVWHVE

SEQ ID NO: 2107 - protein, 218 aa, synthetic construct; identical to SEQ ID NO: 1431
  REGION 1..218: note = TnsF-Tn7 System Protein

SEQ ID NO: 2108 - protein, 660 aa, synthetic construct
  REGION 1..660: note = TnsF-Tn7 System Protein
MSSHFDTSSKYSRDHIQMVLGGLYRNKSDNDEYQLIEYLDDLNQAVFKNLKTLSNQVLSIHDFDNVTDGANTSFVVDLNNIGDDEWQEAQKKYLAITPLIMEDDWYGEDNYRGEQGYQRRAEEVGVSSRTLRRWVDAYQSTSSIGSLIDQKRGWRKGSKRLNNETEKIISDVINDFYLTVQRPNAQATIREIHRRCYSEGIEKPNKNTIRNRIKEIKEKDLLRGRGQRKRAKQKFTPKAGQFPDANHPLSVIQIDHTPVDLILVDDKHRKPIGRPFITVAIDVYSRMVTGYYISLDAPSVTSVSMCISRSILPKDELLLEFGLSDVKWDVFGMPKKIHVDNGSDFRAESLQKSCAFHGINLEFRPVARPEYGGHIERLIGTIMKRVHELPGTTFSNIKEKDEYNSEKHASLTLHEFEKWFLTYITMDYHESIHSGIERSPKEQWRIGIFGDEFERGIGLPPIPSDRHTLVLDFMPSTLRTIQRNGATIDGLQYYDPCLNNFINHTDDNGNKTKFIFRQDPRDITRIWFYDPKLLQYFPVPLANQVLPPISMWEYRRVYKQVKQESGTVNEALIYQALQDMQTLVEESKSATKKALRSEQRKKSHTKSQVMYDNLRSDEEQEVDILNTLPESTRLLSKKAVEVSLDESDDNNDGLYFEDID

SEQ ID NO: 2109 - protein, 659 aa, synthetic construct; identical to SEQ ID NO: 1432
  REGION 1..659: note = TnsF-Tn7 System Protein

SEQ ID NO: 2110 - protein, 353 aa, synthetic construct
  REGION 1..353: note = TnsF-Tn7 System Protein
MVRAALKHGCSPLTFTYYYWPQYRIWTYDVDKGFDNIDEQITYDIAVLTDDNGDAFDNLILIDFLNNTSVKSDKKTPMLWTAPLSKRNRYSLIGYPYCPDCMSNDKEAYLKLQWRFTWSVCCTKHKSFLQVDCGHCNHPYQPQLLSPEQRFINRCHSCFGKLDQAISDISPSEAIDDFQQLADKAYYSKQGVILGQVVSMNQWFEYLLFLINLVRKGLKNPNYMFGKLITALGIDTNTLSLPKTALRFDFLPVNERVALLECAYHLLQIDADDWIVVCLAFNITQNSFQWSKSTVIPKAFSAVYNQLHRVPTRSYEAQSENIQPASPKVVMVSWNRLKRKMQMRESYDKHKES

SEQ ID NO: 2111 - protein, 414 aa, synthetic construct; identical to SEQ ID NO: 2104
  REGION 1..414: note = TnsF-Tn7 System Protein

SEQ ID NO: 2112 - protein, 182 aa, synthetic construct
  REGION 1..182: note = TnsF-Tn7 System Protein
MKQEIPYTHIHPKFRHIALLPNEERLRFIDEPRWIGYDKANQSMETLQGLMNKVKQHRMPNLMIIGDSNNGKTTLINQFHKKFGLPYIDDFKDSIVPVVLIQAPPSPSEKELYISLLERLALPYRSTEPTTKLRYQVIHAFRCCNVKMLVIDEIHSLLTGTARQQRQIMNVIKFLVVCQKVC

SEQ ID NO: 2113 - protein, 182 aa, synthetic construct; identical to SEQ ID NO: 2112
  REGION 1..182: note = TnsF-Tn7 System Protein

SEQ ID NO: 2114 - protein, 297 aa, synthetic construct
  REGION 1..297: note = TnsF-Tn7 System Protein
MSESLYTHIHEKFRHIAYLPDKERIEFIRSPRWIGYNTANQVIGVMQGLMNHVKQHRMPSLLLIGDSNNGKTTIINRFYDKFGENYTVDETLVIPVVKIQAPPTASEKDLYISIIEAFMLPYRPTDAASKLRYQVVNAFRHTNVKILIIDEVHSMLTGTARQQRAIMNVIKFLCNELLIPIVLCGTKDAIRILHTDPQHASRFDVAELYLWSNDKEFKRLVGSFEKILPLKKPSNLIETEKVNLIYSISTGNLGDVKRLINDCAISAIESGEEEITVENIRGKSCLKPTKGLRKIIG

SEQ ID NO: 2115 - protein, 297 aa, synthetic construct; identical to SEQ ID NO: 2114
  REGION 1..297: note = TnsF-Tn7 System Protein

SEQ ID NO: 2116 - protein, 502 aa, synthetic construct
  REGION 1..502: note = TnsF-Tn7 System Protein
MARPKSAEDPELHPEPCGRCGEHRALAVRWPDGKVCQNCRRKAIRTMGRCVECGHEGVLPGVSADGPTCRNCSGITLNVDCVRCGKEDELYSGGRCWRCTLSDLVDETLAHPATGTIPPSLTPLAAGLKQMERANSGLTWLRQPHVQTFLRTLTCTPTTHEALDQLPPSATLDYVRALLVEHCALPRRDEYLATFNRWLTGVPDRLLNHDDRDILLRYVRWDHLRKMHQEAPISRGMFLRSKQSITVGVEFLNWLAERKVDLQDLSQSDLDDWVAGGKTTRLVADRFLNWARRSRLVNTDLKMARHRRGTASRMSLAEQRQANADLSDADAVDLRDRAAGVLVLVFGQRVEDIVRLTWSDVTITRESVTIRLAGMSLPIPSPFDDLWRQLRQTPRHQQTAAHPNSTWIFPGQKPGQPVNPDHLANRLRQHLQVRAARLGALNELTKLAPVTIAAEALGYATTTLERHSVDSGATYARYIATVKAMGGAPLPREAAAGSHKTS

SEQ ID NO: 2117 - protein, 502 aa, synthetic construct; identical to SEQ ID NO: 2116
  REGION 1..502: note = TnsF-Tn7 System Protein

SEQ ID NO: 2118 - protein, 337 aa, synthetic construct
  REGION 1..337: note = TnsF-Tn7 System Protein
MLARGLEVSTIRPKLALVKRFQEYAETFPWQWSPVDFEQFASEPKANGEPRARSTVRMYAGSIGEFCSYTTNPAYGWVDYCEGTFGDVPSQIVFDWNSPHHTSDNAVPASRRALTRPELQTLFDHMDDAVDREYAAGSKRWMSLLRNSVAFKLCYAFGLRKRELAMLELVDFGPNPHVPAYGIHGALTVRWGKGTAGSGPRRRTVLTVPEFEWVIPLLEFWLSPGQRDRFPKAERGTALWPSERQARVGLSTFGNAFVKARAEAGLPAGLGLHCLRHSYVTHLLEAGYDPTFVQTQVGHQNASTTGIYTSVSADFKQKEVHRMIAQRAAQLQEDRSA

SEQ ID NO: 2119 - protein, 410 aa, synthetic construct
  REGION 1..410: note = TnsF-Tn7 System Protein
MTRLHHRGLCPSCALADLLDHLLAGPDGTVPSRLGPVAACLMRGEPTPMLRWLQTHPGPPAALKAMAASGEPVTHRLLDGLRPAATVAYLRAALVADGVLPPRDEQLATLERWLPRELARLETAVDRQAVHSFATWHHFKRLRRLPSTTPTTYYQALSARRDIQAATALARWLRDRGTSLADATQHDIDAWLTGTYYLRYVASTFVSWAVAHRRAQTIAIPRTSGDGPMPVIGHDRRWALVRRLLHGADLPAATRVAGLLLLLYAQPVSRAARLRLGQVTRTGDAVYLALGSVPTALPAPLAKLVLDLVGRRHGHGTLGRSPDHPWLIPGLSAGEPISAARLTISLNKLGIRARPARNTTLIELTVDLPPVVLARLLGLNINSAERWAAEAAASRTTYATALARRPDPRP

SEQ ID NO: 2120 - protein, 410 aa, synthetic construct; identical to SEQ ID NO: 2119
  REGION 1..410: note = TnsF-Tn7 System Protein

SEQ ID NO: 2121 - protein, 370 aa, synthetic construct
  REGION 1..370: note = TnsF-Tn7 System Protein
MGLRLLYLILCRLLGCLLLLGRSAAANNAEILVLRHEVAVLRRQVERPRFSWADRAVLSALARHLPPVFRRHRLVTPGTLLTWHRRLVRWKWRQPPTGPGRPPLAEETVALIQRLARENPTWGYVRIQGELRRLGHRAAAATIRRVLRRLGLPPAPQRASEQTWRSFLRSQAHTLLACDFMHVETVFLKRLYVFFVMEIATRRVHVLGVTARPTGTWVTQLARNLLMDLEDRAGRFRFLIRDRDSKFTAAFDAVFAGNGTAVIPTPPQSPRSNAFAERWIRTVRTECTDRLLITGERHLRTVLNQYAEHYNAGRAHRSIGLRAPDDDPNVIPLPAATVRRHQVLGGLLNEYLTTSPRLPHHPQETPSSAS

SEQ ID NO: 2122 - protein, 363 aa, synthetic construct
  REGION 1..363: note = TnsF-Tn7 System Protein
MLLRLAYLTATNALAFLRLLPMSDRDKDIEILVLRHQLLVLQRQVGKPTLTDSDRAILAGLLHHLPKDRLRHLLPLVRPDTVLRWHRNLLRRRHATTCVPKRRGRPRTIRSIRALTLRLARENASWGYRRIHGELAALGIRVAASTVWEILREHGVPPAPARQSTTWADFLRSQAKALLACDPFEVRTLTGARLYVFAVIEHTTRRIRILGATAHPTAEWIVQLGRNLLMDLEDAGARARFLIRDRDSKFTTAFDVLMADAGLKVVTTGIRIPRMNSVMERWIQTCRTELLDRTLIWNQSHLLHALREYESFYNEHRPHRALEQAAPCRPLPAPITQQAQLAHLKIDRRDRLGGTLHEYGRAA

SEQ ID NO: 2123 - protein, 425 aa, synthetic construct
  REGION 1..425: note = TnsF-Tn7 System Protein
MSAAPLVCSDCGTQGRRYRRGLCGHCALTEDLRAVLDDGQGGIRPELTPFFEGVRRMRNPRAGVNWISRPHVHAMLRTLADPSFPVTHETLDSMRPWRSVAYLRDLLMLHGVLPHADRHLMLFQRWLRDTLDGIGERESRQLVERFATWHVLHRLRRFADRGPVTEKQTQQARDEIRQAIAFLAWLRERGLLLAACRQAEVDAWYASAYTARRLTHAFLRWAMRNKLLARVTIPHQDTRNPAPLSQHHRLALIRRLVTDEDIPLLTRVVAILMLLYAQPLTRVLRLTVDDVLHENGEVSIRLGEPPTPVPEPFAGLLQQHIQQRLNLTTATNPDARWLFPGRRGGQPMTTDAVEHRLRQHGIRTLTGRTAALRQLVLQAPAPVVAKMLGYTLDHAARLATEAGGAWARYAPMTTPGDTGQRTRDS

SEQ ID NO: 2124 - protein, 375 aa, synthetic construct
  REGION 1..375: note = TnsF-Tn7 System Protein
MAGREDQIPGAARLHLADGVALLRPEEQVFEAMLDGWRNQQLARNLALSTIEKRAGRLRAFFEHVGAFPWQWTPQHADEWFGDLRAVRGCAHSTMRSYQDALRSFCQYVCDPAYDWSSICEQRFGTHPIQVVHEWNVATHLQEVESRPEKRAFTIDELQDFFDYADEQVTRARDRGRKGWLPAFRDATLFKIAYSFGLRRNESRMLDLTDIGRNPHGPEFGDYGLVHVRHGKAKKGSPPKRRSVATVWTWSAEILEEWVTEFRPKLALTGSSALWPSERGERIGLQRINSRFAAYRDALGLDPGLDFHGLRRSYVTHLIEAGRDPLFVQFQCGHEHASTTSLYTCVSSDFRTRTLRQALDQTMATALDEPTRRSQ

SEQ ID NO: 2125 - protein, 108 aa, synthetic construct
  REGION 1..108: note = TnsF-Tn7 System Protein
MKREVSYQWRLREVMAAHGMFTISDLVPLLVDRDINLSVSQVHRLATGTPERLSLPVLAALCDIFNCTPADLIATKAQNAAARKTATDDGVVNLNARRPKRARLRPES

SEQ ID NO: 2126 - protein, 435 aa, synthetic construct
  REGION 1..435: note = TnsF-Tn7 System Protein
MIGHSAQSQPCCGPCAGVNRRYICPQCGGGDIGRQGSCARCLFGTELHRHFGDTELLAPLVADLERSEHPEAVLYWLRREDSGAALLRQLLAGGSELSHELLDTFPGRTAAVHLRQLLVSHGILPERDELIARTEAWMHRLLEEMDPRHRAVLQPYATWVVLRRIRQNARTRALTDSSVTFARERVRCAVAFLRWLDEHDVALEQATQHDVDRWLTAGTTTRLRLIDFLRWTRRCGLSQELTVPAMPEGEPVNFLDEDHHVALLYRCVHDTTMPTDVRAAGALLLLYGAKLTRIARLTHGDVLRSGDQASVALGEDPVVLPPAVEQLLAAQSQRRPRSLSQHTTTPVEQAWMFPGALPGRPTSAHRLRQRLSDHGIDVRPSRNSAVLALAQDLPAPIVSSLLDLHINTAVHWAKRGKRDWADFLAMRRADPIWRP

SEQ ID NO: 2127 - protein, 435 aa, synthetic construct; identical to SEQ ID NO: 2126
  REGION 1..435: note = TnsF-Tn7 System Protein

SEQ ID NO: 2128 - protein, 235 aa, synthetic construct
  REGION 1..235: note = TnsF-Tn7 System Protein
MRTRTREPQTLGSEGTLDRMARILAARNIDPATVAALAEEHEPFSLLDLLSAGMPPRYQGAVADHPTVLAWARDVAEAAVAPSVGARRQVTTGPSLLMAGVVGAGKTYQAYGAVRHLVQSGLGVRWRATTAADLYAELRPRPGTDSERELAAVARCPLLILDDLGAAKASDWTEEITYRLINRRYTHMLPTLITTNLRISDLRAYLGDRVASRLVEMTTRVEFEPVDRRRHRTAA

SEQ ID NO: 2129 - protein, 235 aa, synthetic construct; identical to SEQ ID NO: 2128
  REGION 1..235: note = TnsF-Tn7 System Protein

SEQ ID NO: 2130 - protein, 374 aa, synthetic construct
  REGION 1..374: note = TnsF-Tn7 System Protein
MSRAVDLPGAAHLVLADGVVHLDPEPAVFEAMLDGWTLQQRARFLDWEQTIKPRLRLIRRFAEFTNEYPWQWTPMEAEAFIDHLRSRRERFAVSTGRSYQNALRLFCDYVTDARYGWPLRCHERFGAVPAQILHEWNTITHSSDYEGRPERRPLTYDEVQALFDAADGRVEEIRARRRKGSMAALRDSVTLKTVYAFGLRRQEACWLDLPDLRRNPKAAEYGRIGALFVRYGKASKGGPPKRRTVLTVPEFDWIVEVLERYLEEVRPAFAPAQHPALWVTDRRGRLSLRRLDEAFETARVLAGLPEELDLHCLRHSYVTHLVEFDYPERFVQEQVGHLYASTTALYTGVSDDYRTRLVQRALQARHAGLWEAKA

SEQ ID NO: 2131 - protein, 109 aa, synthetic construct
  REGION 1..109: note = TnsF-Tn7 System Protein
MIRKTGFHWNLRKLMAQQEMFQTADLVPLLAERGVRLSREQVFRLVTQPPQRLSMDTLVALCDVLGCGVEELIEVVAVEEKVRKTGTGPDRAGPAPEPRRTTIRRPGPA

SEQ ID NO: 2132 - protein, 514 aa, synthetic construct
  REGION 1..514: note = TnsF-Tn7 System Protein
MTGTGAAGGTEPERCARCGRLVGTARARNQAGGVKVLAVMRRWPEGPICSGCFANAMEIYGICDGCGTDRLLPGIGPDGQRWCTDCGGGLGDYTCTRCGREGWREHAGICGWCVLRDQVDELLDDGTGRVRVELTPLAALIVSMKRPRSGIRWLTRPGPCGILRALARGEVPLTHEGVHSLPPLKSSIYIRDLMVTAGILPPVDKFMFLFEQWWPAWLDTITDPEHRATLRLFLTWHYLRVFRAKIAARGELGYGLPQLARARLRLTAAFLNDLASRGRTLAETTQADLDRLFAQSSPHQRNALRPFLRWAMNTRRMPQLDLPPQQERPVTLVTQRQRIQLIRRIHDGDGMELTDRVLALLVLLYAQPLARIQQLTVTDIATGDDGHLHIRLGDPPTPVPAPFDQVIRQHVTARRNQMTAANTTSPWLFPGRASGQPMHTTSLRLRLHNLGIPNLTNRSRAIREMLRQAPPIIIAGMLGYSATGAEKIAAEYGTHWQHYVGLDRQPRRPPRLTE

SEQ ID NO: 2133 - protein, 514 aa, synthetic construct; identical to SEQ ID NO: 2132
  REGION 1..514: note = TnsF-Tn7 System Protein

SEQ ID NO: 2134 - protein, 1596 aa, synthetic construct
  REGION 1..1596: note = TnsF-Tn7 System Protein
MLTGGAFPGMGDGFTIVEIRPQAGEKGVVDDFFVTGRSGSGVQRTIAVAARHAPNITKSDSPTQRLLKTFVLEALRNNESVENGLFGLVLATASIEPSVRELQKLAGIARAAGAAPDFRARVQPGAGHTKEAERKRLIHFDELVAIALKDINPTSMPEDTSWEVLRALSVHEFRLDAEDPTDCIAAVNALRSVVPDRRLELAGALFEKLAFMVGDLAPAAAVVTEGDLRRRLVGTPLSFSPRLPVARRTIEGLQVSARGSVGLKLGPAGPTIPRHRALEALHTFIGQLGAGEAGVITGEPDVGKSALSFELVEPSAADGRASLFLNAQDLPDDVGTFLGLLDASIEDVLGGYRWGEASLLVIDGAEAAIAGRRRVLQNLAASALRLGWSVVLVARSDHALEMKALLSSCLDQSGLATDVAEHLVQGLDERERAAAVTSVPSLERFSIEPRNVWLLERVGLVDLLLRLQAMDSLPDGVFTEHEVFHAIWQSMVLGRGSSALSAEPDYAREAYLLNLARHHLGIQATFHRSDDGRARDSLEADGLIRSRQGIRGQYELPGFSSDLIQDIAVAHLLLKDGWGTLLESDGPRSALRAARVAVEATLSDGDPAYEWPILETALTRVADVHGPRWAEVQFEAALRLCDSELLCVSLLKELVADDGNGLRRLLQIAATSNVAGGSETVRILAPLVAVFECSRQWRDGLTAAATEATDELLQTITLAWLASAMLSTRASIPLRRTLREQLLASDMGRASDFVLSALASLSTDLNDQAADAIRGIGVQRPEKLAAVVESGWCGLALARSNPELLAELAEKYYFMPDPAAGLREFRHHQGAIRHHEFRYKTDGGIRPSADNGPFYSLARTNLFIGICFVNRMLNWEAEHRHAHRDTSPTTARRVNLPLLGEREILGDDGDWLCSVGRSAAPEACASALLAVELVINELIAAERISAEQVVRLLLEECRSMAMLGLVTGILCRMLPRSFDLLEPLLGYVFVWQGETPRFIAERLQNPRERPASPLFWELMFSFVGRAVLAKNEPMLKRLNSLSVKLLEDAGVEFESAQPPDVIQGWASLLNPTSYEVHVLPDGQTEIEYTEPTQLTVRRREYQVEADRGLEETMLSLRYVWGNESLEADESLLSDVGIARGIDSREQEGRSTDIVISVAAAALSAVYRGTVELAESDLAWAVERVLEQASRDSSDDEPSALHADAREADRAAARALPFLLTDPSLFGTGDGQALRLAVERLSTRSGGDVVDVLADGLSTFWCTPCSVRERTCLHAHVWHSLIANLAFSIRSDWQEEPADPTLAEPYAITLSEVPDYQVSATVLVAPMLASWDASRSETCVMDDAKELYETLKTTWRRHIKWLVEVRGGYSDDGEGLRIATRLAEVAIRGETAPMFGLLHWAAGDPGLLMSAVDDLTEALTAASRAGADILTAWLAMSNTVIDDLDSGITLDKSDMGTPYVFGSLLVKPNYPRKTEFTAERRALTLAKWPHPSTFAPLFERWVPYASGMRQSVDAVAIVAEGTSLDWQLGTGLAWLERAIGGSYESLAGRTNAPIWLENLRPDLENQPAELATWLRIVDGLAAYGDPRAHALQRKEEG

SEQ ID NO: 2135 - protein, 378 aa, synthetic construct
  REGION 1..378: note = TnsF-Tn7 System Protein
MTGDEGVLSGSARLALVDGVSLLRPDEQVFDAMLEGWRNQGLARNLALSTVLARERQVRAFQAHAGVFPWEWTALHADEWFADLRAVHHCTRSTLRGYQVAVRGFCAFSTDPAYEWGAQCLSRFGSHPVQIVTDVNSAQHVADVESQPGKRPFTRRELQDLFDYADEQVEFKRSQGKKGWMAAFRDATIFKTAYAFGTRRAETQMLDVSDFGRNPEAPEFGGFGAVHIRHGKAKRASPPKRRTVLTVWPRSVEALEQWFTEVRPLFGTDGNPAAWPSERAPRVSVALLDHRMAAYREAVGLDPVLDFQSLRRSYVTHLIEDGWDPRFVQEQVGHEHASTTSIYTGVSSDFRVRTLRRALDAIVADAVGDAHTHREGTR

SEQ ID NO: 2136 - protein, 109 aa, synthetic construct
  REGION 1..109: note = TnsF-Tn7 System Protein
MVSYQWRLREVMAAHKLYATTELVPLLAERGIVLSASQVHRLVTTIPERLSLPVLAALCDIFDVTPAELIPTDAVNVGVRKIAAGDRPATAPDIGELRPVRARIVHPGE

SEQ ID NO: 2137 - protein, 339 aa, synthetic construct
  REGION 1..339: note = TnsF-Tn7 System Protein
MTAPDELDHAALDALPQGHATSYVRILLTTAGLLPPRDENLALLINWTDRTLAKLPGHQATLIRPSPSSTSSATLVGARRSARGRYTYTAHKGDCANIRAAIDFLTWLDTQQHTLQSLTQEDLDIWAPTLRARSIPFIRWAGARHLTRAGLTIGHPPSQLPGQFQIEEDHYEELRRCLTDPTLPSDVRIAAALIRLYALPLTRIVELTTDHLHHDAVHTYLTITRHPVVLPPKLARLIDDHLEDGSRHGNEATRYLVPGRATGRPRNPAGLSDKLKRYGLPARAARNAAMMQALADLPPVVLSDLIGIQPRTAERFAAMTGENWSDYLAAARPHPHQTS

SEQ ID NO: 2138 - protein, 339 aa, synthetic construct; identical to SEQ ID NO: 2137
  REGION 1..339: note = TnsF-Tn7 System Protein

SEQ ID NO: 2139 - protein, 384 aa, synthetic construct
  REGION 1..384: note = TnsF-Tn7 System Protein
MATETEADPYPILAWLYRAEWAKLLGRLADEHDHITHTVLDALPPRRHVQYLRTVLVNSGVLPQRDEHVDSTTPWLNEVLADLPETTVRIVRPYAMWSVLRQARSRARRRSPTRSVRKYIRSRILLVIRFLKWLDTNGLSLETLTQHELDTWIDSGSVNHYRLRGFINWANARSLTTHPLEVPWVGGEDPTEFLDEDQRWALLKRCLDEEGIDLHLRVAAALLLLYGFIPTQIVRLTTEDISQVEERTYLLLDSHPVLLPPRLAELLARLADSPSFSRRPIVENAASQGKWLFPGFQPGIHMDHGRLTAELNQKLGIRVRTARNSALCALAADLPAPVLADLLRLHISTAVRWTHLVRRDWTSFIAAQKARSSGAVSAHTARSE

SEQ ID NO: 2140 - protein, 384 aa, synthetic construct; identical to SEQ ID NO: 2139
  REGION 1..384: note = TnsF-Tn7 System Protein

SEQ ID NO: 2141 - protein, 811 aa, synthetic construct
  REGION 1..811: note = TnsF-Tn7 System Protein
MPSADHSRTGREPRQTSPVERLRARYYRHPPRNRLLAGAAVIVAVAVLAFLLGVPVPAAVGVTLASLLVFAALMRSTEAVATTSVSLVWLGLAFVLFQVPIPTADSAVLLLLPLLPLSVSVVATRIPEFPVWHTTLLALLVGLIVGLAVALAGMLTSAFPPALGLVLTAAASGAALGWRFVAAYRLRRGMHNRDGTATRRPDDANRRPRFRPGSTVPARGASGPSAANAPGDGDDPPAVSADEALAELENMIGLEPVKQEVRALAASIEAARLRADAGYSVERPLRHLVFSGPPGTGKTSVARTLARVFHAFGLLPSSRVVEAQRADLVGEYLGATAIKTNQLIDSALGGVLFVDEAYSLVNDGDGQPDRFGNEAVQTLLKRAEDDRNGLVIILAGYRDEMERFLASNPGLASRFDTRVTFPSFSAAELQRIAESLLEQRGEAIAEEARPALQRRFEQVQQREVVDELGNGRFARSLVEKATEARDVRVVTAQQGRNRPDTGELVTVRATDITSAFTELTGRLSGFAEPPDVEEALAELDDMIGLEPVKRQVRSIVAQLQVAKLREEQGLRNQPPMRHFVFTGPPGTGKTSVARILGRVFAALGLLSRPDVVEAQRLDLVGEHLGATAIKTGKLVDRALGGVLFVDEAYSLDNPGYSGGDAFGAEAVQTLLKRAEDDRSRLVVVLAGYPAEMERFLASNSGLSSRFNIRVGFPSYTPGELTEIADGVAESAGDVFEEAARADLRRIFDYVCSAGWIDELGNGRFVRSLFEKACAHRDLRVSQDYGNSATAAELTVVTREDVRNAYAEVTQG

SEQ ID NO: 2142 - protein, 811 aa, synthetic construct; identical to SEQ ID NO: 2141
  REGION 1..811: note = TnsF-Tn7 System Protein

SEQ ID NO: 2143 - protein, 381 aa, synthetic construct
  REGION 1..381: note = TnsF-Tn7 System Protein
MQRGFLVGISADLPGSARMELVEGVVHLDPAPAVYKAMLAGWARQQRTRYLKDSTVETRTAAVQRLERFSGQYPWEWGPAEVEEFIADLRSPGRRHPITVSTARGYENSLRLFMDYITDPRYGWPDICEAKFGRRPQQILHEWNTIAHTGDYEGRPGRRPLTYDEVQALFDAADGRAEQIRSRGRKGGLAAIRDAALLKVVYAFGLRRQEARGLDLADLRSNPQCREYGKFGGLYVRYGKSSRGGVPKRRTVLTVPEMDWIVDVLDHYVHEVRPLFGPGKIPALWVTERRSRLSRRSASDAFETARQLAGLPGELDLHALRHSYVTHLVEFDYPERFVSEQVGHSYASTTAIYTGVSDAYRNRLLERSLKERHGELWGASI

SEQ ID NO: 2144 - protein, 108 aa, synthetic construct
  REGION 1..108: note = TnsF-Tn7 System Protein
MNKKMGYRWHLRQLMAAKEMFQTTDLIPLLAERGINLSREQVFRLVTQPPQRLSMDVLAALCDILDCTPNDLIEVEAVNQQVSKDATTGARPPAPGAQRTTIRRPEGL

SEQ ID NO: 2145 - protein, 357 aa, synthetic construct
  REGION 1..357: note = TnsF-Tn7 System Protein
MAQGLLPINHETLDEAAGSRRGRATAIEHLRRLLVAAEVLPQRQEHLTRLEREISARLAALHPHDAAVMRRFVTWYTLPRIRRRIAQGRDPETTCQLARNSLTGPGRFLTHLRRREITLAGLGQGDLEEWVADNPGYVSATVIFLRWAQRQKLVPVLVLPTQRRNTPREFSDAQDQWMIAKRCLTDHSLPHRLRLVGALVLLYGQQSSTIARLRRSDIVNSAGVTSIRLGRDAVLLDEPLATIALELATAAVPDARPRGLARAFNTDGDGWLFPGRGPGKHLGDAALRRDLIKLGVRTRSGRNTALLALARDVPPMVLSDLLGVGSSTAERWRGYAGGAWATYIASSIQPVDDHPKS

SEQ ID NO: 2146 - protein, 357 aa, synthetic construct; identical to SEQ ID NO: 2145
  REGION 1..357: note = TnsF-Tn7 System Protein

SEQ ID NO: 2147 - protein, 406 aa, synthetic construct
  REGION 1..406: note = TnsF-Tn7 System Protein
MISTIAIGGYRSLRDVALPLGRLTLVTGPNGSGKSNVYRALRLLADCGQGRVIGSLAREGGLQSVLWAGPETLAGARRRGHPVEGTRRSGPISLLLGVAGDDGGYLVDLGLPVQAGSAFDRDPEIKREIVWSGPVMREATVTAARAWSRVRLRDDWGSLEPSPARLPTHRSMLTELADPTLAPELCAMREQLRGWRFYDGFRVDADAPARRPQVGTRAPVLADDGADLAAAWQTIVEFGQGGHDAAVADAFDGSRVEVSARDGLFELTLHQPGMLRTLRAGELSDGTLRYLLWVTALLTVEPPPLMVLNEPETSLHPSLIEPLARLVVGAAARSQVVVVSHSEPLLGAIEAAAQAVPAAGPAGTHSPAVDVSRIGLHKDLGETFVDDQGLLTRPEWHWGKRQRATR

SEQ ID NO: 2148 - protein, 406 aa, synthetic construct; identical to SEQ ID NO: 2147
  REGION 1..406: note = TnsF-Tn7 System Protein

SEQ ID NO: 2149 - protein, 373 aa, synthetic construct
  REGION 1..373: note = TnsF-Tn7 System Protein
MGEDREELSAAKLVPSSVVHLHPEDAVLDGMLRGWAAQGRSRGLASGSIVTREGLVRRFMAFSGEYPWRWSPEDVEAWSSHLRDGGLALSTLRGYQAMVRHFCDYVCDSRYGWGALCWDRFGTHPVQVFHEWNSVVHVSEVEARPAVRPLSRQEIQMLFDFADDRVEAAQRSGRKGWLTAWRDATMFKVAYGFGLRRRELARLELADFHSNPKASEFGRFGVCNVRWGKAVRGGHPRRRSVLAVMPWTSGVLEEFLEVRAEYADRAGTWLWPTERGAGVSVDYVSRRFAQYRDELGLSGELHTHCLRHSYVTHLLEDGFDPYFVQQQVGHRWGGSTGLYSGVSSDFKNRSLRSALDRITQRPGEDGVDRDARG

SEQ ID NO: 2150 - protein, 111 aa, synthetic construct
  REGION 1..111: note = TnsF-Tn7 System Protein
MREVEIDWRLRQVMAQRGLFSTTDLQPLLSQRGVNLSATQVYRLVTQCPERLNMRVLAAACDALGCSPDELIGVRTVEKATPQVANAGPRARAKATGQVQRPRRVTVTPEE

SEQ ID NO: 2151 - protein, 387 aa, synthetic construct
  REGION 1..387: note = TnsF-Tn7 System Protein
MTAPRLHHLLDDGTGRTRPALARLAWELTSMPVPYRGLAWLDNNPLVSDYLRGLARGTIPLTHQGLHDLDSWRTAAHLRDLLMATGALPAVDRQIMQFERWCLHRLTEITDPEHAQFLRGFARWRLLPHLHSKARRGPVGVGSRNWAAGSLNSAAVLLTWLSDRGTTLKTMCQADLDVWFAAGPDPHRTRAFLRWAMTTGHASRMVLPTARRAPVAPISQDRRLHLLRRFLTEDTIDLRTRVAACLILLFAQTITRLLRLTLDDLLDQDERMFLRLGTPPTPVPKPFAALVRDLADQRANMNTAANPQARWLFPGGRAGQPLSVTALSQHLQALGFPTVATRTSAFRQLVLQAPAPVIADALGYRHSTATKHFIAAGGSWSRYAPRR

SEQ ID NO: 2152 - protein, 627 aa, synthetic construct
  REGION 1..627: note = TnsF-Tn7 System Protein
MARWNGSWRYALIWWVGVTGVIGLLALIVWGLSGKDGLQTGANLAQLVSVVLVVPTLLVPLWLWRRRLSGPSVLTSEQVSLAKDALAGLVEQQWKTEATRRSLDDPDPIPVIWRQTAATAVMDHPANLTPGVQRLTASSDDIAALTGKFRSMRRRRLVILGAAGTGKTTLAVQLVRELLATRAAHPGEPVPVLMPVAGWDTEVFPRLHQWLASRLDQDYPALRSPDLPARMGEELAVRGHILPVLDGLDELSPAVQQAVIVALNRSLADTDQLIVTSRTAEFAEAVDGAGDVLTSALVIEPQPVTPKTAAAYLKRCLSPQPAAGWEQTLSVLRTAPATTTGPDPGKTLAAVASTALGLWLLRVIYIDGRIDPAPLLDPGRFLGPDQLRGHLFDQLIPALIATRPPSTDPADPFRPHRHHDPDQARRWLAYLARTMTHPPDGSPPTRDLAWWRLAQTTRSITTTTRLAFGLAFGLVFGLVFGLAFGLAGGLTIGSWPSHEPGFANLRLQGREALLTRRLVFGLVVGLVGGLVFGLVGGLVGGLVFGLVVGLVFGLVVGLVVGDHRAWLAYLVATYRLAWAGHLPRTLMPFLDDAHRLGLLRAIGPIYQFRHAEFQDHLAADPRGGRRA

SEQ ID NO: 2153 - protein, 627 aa, synthetic construct; identical to SEQ ID NO: 2152
  REGION 1..627: note = TnsF-Tn7 System Protein

SEQ ID NO: 2154 - protein, 770 aa, synthetic construct
  REGION 1..770: note = TnsF-Tn7 System Protein
MPLEGDVEGIVARFLELPHRQLVVIGAAGAGKSVLAILLTLGLIEHRATSEPVPVLLQIGGWNPEREHIAAFLARRLAGEYPHLAEPAGENRNLAQALIAERLVLAVLDGLDELPAEHRAAAVEMLHDYASAGNPLVVTCRIVEYENAVSASDTFLARAAVVEIEPVGVDQVIAFLSQSPPAPERWEPVFMHLRRHRDGPLASVLSTPLMVSLARTAYGTTAAQPADLLGHVDRDAIASILIGTYLTSVYETGRPTPPDGRKRRAYAPVQATRWLTCLAHHLHESYAPNLRWWHLPVELMAARPQRTRSLAALGITATGAAILGMTAGLLVGPLPGLAAAALAAVILTIARRDPFGEELFIPTSALDRELPPCQALTPRIAFTVGVGVGLVSVDLLAGIAGGAVAWLATRMMPLPIVARPREPTPEAAFRANHRTALIAALRYSPVNALTFAAAAFLLPGGPDPATTAACAMVAYGAAAAVLAGGWAWIWFRTAHLLLAVQGWLPLRLGVFLRDAHQRDVLRQTGTAWQFRHLLLQDHLARAPYDDLLRARAAHGDPGAVSQLAGVLADQGRTEAAITLLAAHAGDSNLAQQLTNLLAKDGRIDRIRAAADSGDRHASWHLARMLAAQGQMEELRARTDDGDPLAAQGLARVLAERGRIEEAVTVINSLPNSGEDHPAYGLAHVLAENGHMDAALAILRGRGNHREQADLLARHGRSDEAISLLRAHADSGDGHASRQLAELLAEQGKVQELRARAEQGDPHAARRLDRP

SEQ ID NO: 2155 - protein, 770 aa, synthetic construct; identical to SEQ ID NO: 2154
  REGION 1..770: note = TnsF-Tn7 System Protein

SEQ ID NO: 2156 - protein, 387 aa, synthetic construct; identical to SEQ ID NO: 2151
  REGION 1..387: note = TnsF-Tn7 System Protein

SEQ ID NO: 2157 - protein, 245 aa, synthetic construct
  REGION 1..245: note = TnsF-Tn7 System Protein
MLITRLSARQLPDSWCAALPAVRHLADRGLPLTAPVTFLVGENGSGKSTIMEAIADVSKINSEGGKAGTKYASTGPATPLGEVLDAELTVAGGRLLHGPRLKRRAFFFRAETLFNLARGVITKEGKGFWEDDLTTQSHGEGFFTVLAYMADGPGLYLMDEPEAALSFHSCLRLAALMHRVAGEGGQIICATHSPILTSLPGAQIIELGDHGCRVTEWAELPLVDDWRRFLARPELYMRHIVDREI

SEQ ID NO: 2158 - protein, 245 aa, synthetic construct; identical to SEQ ID NO: 2157
  REGION 1..245: note = TnsF-Tn7 System Protein

SEQ ID NO: 2159 - protein, 389 aa, synthetic construct
  REGION 1..389: note = TnsF-Tn7 System Protein
MQWLTNPRGGARVLRELLDRGITISHDALDTFDEREVWSLRRTLVDLEVLPPRHDPVARLDVITEKSTADLPPHTRAIVRAYASWWYLRRARRRYEQTGKFTYSQFRNAWRRILAVSAFLQWLDARGVPLEALDQPNLDIWLERVTHDQRTATGDFLRWATRRRLAAELTVTFPERTEPTILLSEEQRWSQLRRCLTDTTIPDDVRAAGALLLLYGIPLLRIIELTRDHLVIEDDTAPVTGFRMSIGAPTITIPPRLGRLLARLPAPVPLGAAPLIETRASGPTWLFPGRGTAGHVSFTGLSHRLRTHGLSVRQSRNAALIGLASDLPAPVIGDLFGLSVAASVLWTRRAARDWTGYMHLVAQRERQSPAPVGRPEGDWGHAARSPASS

SEQ ID NO: 2160 - protein, 395 aa, synthetic construct
  REGION 1..395: note = TnsF-Tn7 System Protein
MLTSTLLHPCLNVVVDATVVETSNRPDLPGAARLVLVDGVGLLQPEQAVTEAMLEGWARQQRVRFLKGTTISHRLRMVRRMVEFSNLYPWQWTAAEVEEFISGQSGARQVSTARSYTGDLRMFLEYLTDSRYGWVSVCLERFGQAPRQVLDEWNSVVHSSEYEGSPGRRPLTYEEVQLLFDAADDLVDTVRARRRKGSLAAQRDAAILKTVYAFGLRRREAWGLDLHDLRRNPKVPAFGRCGALYVRWGKARRGGVPQRRTIMLVPEMDWIVPVLEQWIEEVRPRFDPGKHPAVWMTERRSRLDWRGINAAFAKARDAAGLDATLDLHSLRHSYVTHLVEFDYPERFVQEQVGHAYAATTAIYTGVSDAYRNTLLRRAITANQPDLWLGPEEEAP

SEQ ID NO: 2161 - protein, 110 aa, synthetic construct
  REGION 1..110: note = TnsF-Tn7 System Protein
MIKKMAVEWDLRLRMAERGLFATTDLVPLLAERGVHLSREQVYRLVSSTPQRLSTDTLAALCDILECAPNDLLRVVVVDEQIAKPTGTKGPAGAAPAVQRTRIRRPDHNG

SEQ ID NO: 2162 - protein, 351 aa, synthetic construct
  REGION 1..351: note = TnsF-Tn7 System Protein
MSGTRAHAEALHGQVAAILAEVGSAWRRTRRKSPTSTEVSTCAVPYTARHQAGRREERIVPWLRGILTELPKQHAELIDRFARWQLLRRLRLLAERDRVTRGGVQHARAAIIGAARFLRWLDEQDTTLATATQAQLEDYLARFSGRGSSLKVFLDWTHRSSLGAELQIPAHERPLPQVTLSDQHRWQQVERLLHDDDIRLYVRIGGLFLLLFVQPLARICRMHADQITQRPDGAVTVTFDAAPIELPDPLDRLVLDQLARRGQVSYASRPDRWLFPGGLPGKHLVTENIRSQLVALGIQHSTARKAAMFDLAAQMPVPIGAELLGLSPHTATRWAALAARDWSRYAAMCRA

SEQ ID NO: 2163 - protein, 351 aa, synthetic construct; identical to SEQ ID NO: 2162
  REGION 1..351: note = TnsF-Tn7 System Protein

SEQ ID NO: 2164 - protein, 484 aa, synthetic construct
  REGION 1..484: note = TnsF-Tn7 System Protein
MSAPRGWSTTTCGQCGELRPCHRKILEQRVCQRCMLRFRRTAKPCPGCGQLKVLAFYDPQRRPACAGCTGHEPVYACPSCGREDSPFGRHCGPCTLRQQLTELLTDPTGDIHPKLQPVFDALMAGPRPQTTLYWLTRASARPDILRDMARGELEISHAAFAALPATRSVDYVRDLLAALGVLPPYQLAVERIVPWLRELLTDLPKPHAEVIDRFARWQLLRRLRLLGERDRVTRGGVQHARAAVLGAARFLRWLDEHNATLATATQAQLDDYLVSHPGRGRSLKVFLDWTQRSGVGSDLHVPGAERPLPQVTLSDQRRWQQVERLLHDDDIRLYVRIGGLFMLLFAQPLARICRMRADQITTEPDGAVTVTFDAAPIQLPDPLDRLVLDQLARRGQASYASRPDRWLFPGGLPGKHLVTENIRSQLVALGIRPSAARKAAMFDLAARMPVPILAELLGLSTNTATRWAALAARDWSQYAAMRRA

SEQ ID NO: 2165 - protein, 278 aa, synthetic construct
  REGION 1..278: note = TnsF-Tn7 System Protein
MTTTGKTPDGPPVVSGEDVSIEYGDRNRARFLAVDGVTFQIHPGERFVIIGPSGCGKTTLLMAMAGFLRPLRGTLSSSGHPITGPGPDRAVVFQDFDQLFPWRTILGNLTYALQVTGRAKGQEATRIAEQFLEMVRIGDAAHRYPHQLSGGMKQRAAIARALAIEPSVLLMDEPFGAVDEITRTALQRELDRISRATQVTLVMVTHSIQEAAYLGDRVMVMAANPGRVRAIVDTSGVSDLDSPGFAEAVTQLRTLLEGRPATDPAIEQETRVAVGGQP

SEQ ID NO: 2166 - protein, 278 aa, synthetic construct; identical to SEQ ID NO: 2165
  REGION 1..278: note = TnsF-Tn7 System Protein

SEQ ID NO: 2167 - protein, 197 aa, synthetic construct
  REGION 1..197: note = TnsF-Tn7 System Protein
MTPSGAAVKLTNVHHGFFHGDKFVRALWDFSLEIQPGQLLLVVGPSGCGKTTILTMVSGLLQPGRGTVTVDGAPVTSPRPVIAYMQVRDALMPWRNVQQNVEFGLEVHGAKPNECREKAAEWIKRVGLKNFARSRVGQLSQGMRQRVAIARTLAQETQMHSYGRTVRSSRRPKSGPTERGIPVPLVGAGSDSHLRDA

SEQ ID NO: 2168 - protein, 197 aa, synthetic construct; identical to SEQ ID NO: 2167
  REGION 1..197: note = TnsF-Tn7 System Protein

SEQ ID NO: 2169 - protein, 383 aa, synthetic construct
  REGION 1..383: note = TnsF-Tn7 System Protein
MPGSAGLVLVEGVAHLDEPAAVFEGMLTGWARQQKSRMLSDATVSSRLSLLRRFTEFAGSYPWSWTPADVEDFTVGLTSGERRMAPATIRGYHLTLRMFCDYLTDARYEWPRQCRDRFGQVPSQVCHEWNTVAHLTEYEGQPARRPLSYDELEQLFDHLDRQVDVIVKSGRKGALAALRDAQMIKTCYAFGLRRNELCRLDVADLRPNPHVPDWGGYGSVHVRYGKAIRGGVPRRRTVLAVPEFDWAIAGLRQWAEQARPILRPADHPALWVTERLTRVSTKHLDKRFAVLRAGAGLAPELTLHCLRHSYVTHLIEFGYPERFVQEQVGHAYASTTAIYTSVSNDFKNKTLQAALGRVYKPPSTTTEATGATTGMTTGTEVRR

SEQ ID NO: 2170 - protein, 114 aa, synthetic construct
  REGION 1..114: note = TnsF-Tn7 System Protein
MTRRLVMRWHLRQVMASRGIFQTSELVPLLAERGVHLTRQYVHKLVTTPPQRVNVDLLAALCDILGCTPAELLEPVVEQAEQAKTGTVDAAREGLGIGDLRPIRATVRRPHEDR

SEQ ID NO: 2171 - protein, 375 aa, synthetic construct
  REGION 1..375: note = TnsF-Tn7 System Protein
MKNPRTGLSWLGGRPPNVGAAVKLLRGLGDGDIELTHEAFHHLQPWRAAGHLRELLMSCGVLPLIDKQICSFERLLGEYLGGIGIPDHEQLARRFATWEVLPRLRRRAARESLTPSTRYFASGQVKAATEFLGWLSNRGHTLETCCQADIDAWHTGRGQHERGRLRGFLLWAIVSKLARPMQLPAQTITRNAPLAERERIARLGRLLTSHDLPLRSRVAGVIVLLYAQPPNRPTAQPLSRIVRLTVDDLTRDGDQVLLRLGEPPSPVPAPVAELLLTWIGQRDNMNTATNPNARWLFPGRRAGQPMHPRSLGALVTKLGVPTTTGRTAAIQQHVLTMPAPVVADALGYHPVTTTKIASRAGIAWSRYAPGDHSPP

SEQ ID NO: 2172 - protein, 375 aa, synthetic construct; identical to SEQ ID NO: 2171
  REGION 1..375: note = TnsF-Tn7 System Protein

SEQ ID NO: 2173 - protein, 392 aa, synthetic construct
  REGION 1..392: note = TnsF-Tn7 System Protein
MLTEQFAGASSQLSPQAQIVTDALAASRRPHSVMQWLAQPTGGAEVLRTAYRRGEDVTHEFLDQYHGRTVWSLRRTLVDIGVLPSRVETLAQLEVRITTITKELPASQRRILLTYGTWWVLRHAQRQHERTGRFTSSQLRGAQHRLTAAAHLLGWLDAHHLTLEQLSQPHLECWIEDYPLWQHVADFLRWTRRRGITRHELRLPPRVTQDPEIVLSDADRWELLSRCLHDGDLAVDLRAAGALLLLYGFQLTRIVELTNEHLTPTGRRPTLTSPVIAVPPSMRRLLDQLPAPPRDPSALALISAPTNGGHSWLFPGRSTKGHINASVLSTHLRQQGISVRASRNAALIALAADLPASVVVSLFGLNITTALQWARRAGRDWNAFVAATAELR

SEQ ID NO: 2174 - protein, 379 aa, synthetic construct
  REGION 1..379: note = TnsF-Tn7 System Protein
MTDRPVELPGAAHVVLVPGIGLLQPERSVLEAMLEGWSRQQRVRFLKADTLRRRRRVVERLVDFSGLFPWQWTAAEVEAFVDHLRSNAGIGPSTARGYVIDLRLFLEYLTDGRYGWQPVCVERFGEAPQQVLDEWNMVLHLDQYEGAPGRRPLSYDEVQALFDAADDRIDRAAAGGRKGVLAAHRDSVVLKTIYAFGLRRQEAWGLDLVDLRRNPKVPAYGDLGAVMVRWGKSSRGGQPKRRTVLLAPQMDWIVQPLRLSIDELRPRFDPGGLGALWVTERRSRLAMRGLNEAFAAVRDLAGLDPVLDLHCLRHSYVTHLVEFDYPERFVQEQVGHAYASTTAIYTAVSDAYRNTLLRRSLAARHPDLWNDDIDGEAGQ

SEQ ID NO: 2175 - protein, 110 aa, synthetic construct
  REGION 1..110: note = TnsF-Tn7 System Protein
MNKKMGIEWNLRLRMAERGLFSTTDLVPLLAERGVQLSREQVYRLVTSPPQRLSMDVLAALCDILDCTPNELITVAVVNQTVAKQAHGAGGPDGAAPRPRRTTIRRPDST

SEQ ID NO: 2176 - protein, 441 aa, synthetic construct
  REGION 1..441: note = TnsF-Tn7 System Protein
MDRYAEGEPTPRQPKGRAGEDGSRGSSANRGSARDKSMSDDAARDGSPGQNADRDGSLGSTDDGRSANGRCARCGMKVDADERGPCDRCGLKVRAKELIAPDTPEIPERWSRVYEAICAAPNPRMTERWLREGATPRILTDVATSVAPVTHGVLDSYQEHDAADYVRYMLVRGGVLERRDEGLERVRRWVFRHLRTVRDARNRQTVKEFWSNHVGPNVAAADEAATRQLGTVRAKRKVRGAVDFLVWLEHRGLGLHELRQMHVNEWLRRGSQANDVASFVMWAGTQGYCVRVRVPTAEDLLRLDDDVERYWNMVDRFLDDEGLDVADRVAACLVLLYGRRTEEIASLTSREVIVDGSEVRMTFDGVTVALVPSLAGLMVRLMRGEGAHGGTTTPDDRRSLFGGPWYREHITPFRLAERLSEHGLGGVADLMTRKNTDGSPE

SEQ ID NO: 2177 - protein, 479 aa, synthetic construct
  REGION 1..479: note = TnsF-Tn7 System Protein
MPSSPISPCPSSVTDAEWAIVEPLLPAPGSTAGRGGRPEKYCRRVIVDAILYIVRGGIAWRQLPMEFPPAGTVYAVFARWSHSGISDTGDIRHELQQFHDILAGHERPATVLRWLNHNKDSTALRQLATDARPLTHDLLDELPDGKPLEHLRSVLVSTGALPPRDENMVRLEQWITATVAERSDPDQQQVLHRYAVWHVLRRLRSRLRGADTTHGQAVSAQRIINAASVFLDWLTDQGLTLATVGQGDLDAWMVSAKPSHRNGAGNFVRWARRQKLTSLDLPANRWSGPSGVIDTETRWQQARWLLHDDTVEPEDRVAGLLVLLYAHWPAVISRLTLDHVDTTDDRTLLRLGAEPVVVPEPLAGLLRQVTETRRGHAVIGDQGTSAWLFPGGRPGRPISAERLTERLRELGIRSGQSRSAALFQLATDLPAALLARMLGIHIGVAVAWQRASSGDWATYAAEISRRKPANDRHSDSSNI

SEQ ID NO: 2178 - protein, 479 aa, synthetic construct; identical to SEQ ID NO: 2177
  REGION 1..479: note = TnsF-Tn7 System Protein

SEQ ID NO: 2179 - protein, 360 aa, synthetic construct
  REGION 1..360: note = TnsF-Tn7 System Protein
MRHPVPALEISDGQRVLLESLARSQTGAHREVVRAKALLMASEGVPNTAIAQALSVSPGSVANWRTRFAEDGMARLGEVRKGRGRKPSIPQEKIDEIVDLTQNYRPKGETHWSCRTMAEVVGVSKDTVQRVWSARGLKPHRVETFKLSNDPRFEDKLVDVVGLYLNPPERAIVLCADEKSSVQALDRTQASLPMIKGRGETMTHDYKRHGTTTLFAALDVLTGTVIGQCLPRHRHQEFLRFLRTIDREVPKDLEIHLILDNYATHKHEKVRAWLDKHPRFHLHFTPTSSSWLNLVERWFRELTDKALRRGVFHSVPHLIASIEEYLDAHNENPRPYEWTATAESILAKVARGRVALEKIN

SEQ ID NO: 2180 - protein, 372 aa, synthetic construct
  REGION 1..372: note = TnsF-Tn7 System Protein
MSRLVDVLSAARRPESIRTWMRSAKVQALLTDVASGAVPLSHDGLDAYASGTHVEHLRALLEHHQILPAREHFLALFEQWLERKLASLRREIAQPVEQFARWHHLHRIRAIDPGDRTLRGPVHHAKQEITETIKFLTWLDVMHGRTAATCLQSDVDAYLHGGPTTRYFIRTFFVFANARRINPAVTVPHRMARSRPSMTQDQRMAWIRELLTGESESLPFRTAGMLLLLLAQPLVKISALRVDAVHDSPGGMSLALGKHPTPLPEPFAALLRAHVHARPNLNTASHASDWLFPSPRAGRHLHPNTVMDRLRRLGVELRGARNRALDDLVNEIPPPVVADALGYSHATAFSHQQADAGNWARYVAAHRPQPHS

SEQ ID NO: 2181 - protein, 372 aa, synthetic construct; identical to SEQ ID NO: 2180
  REGION 1..372: note = TnsF-Tn7 System Protein

SEQ ID NO: 2182 - protein, 336 aa, synthetic construct
  REGION 1..336: note = TnsF-Tn7 System Protein
MLQGWRNQQLSRNLQFATIDQRLRYVRRFSEYVNEFPWRWTPLLVEEYFGDLRSVRHLSHSTIRAHQAALRLFTSYISSPDYGWDLECERLFGQHPAQVFFDWNTATHVQEYEGGPSKRPFTHGELQRLFDHADTEVERIAKAGVRGWQAAYRDATMLKVAYSYGLRFNELRHLQLVDFARNPHAAEFGKYGVCKVRFGKARRASPPKPRAVLTVFRWTPDVIRDWLANGRGSRDTLDVFPSERGSLVTEPTLLRRLRRYCQALDFPAGLDLHSLRRSYATHLLEDGWDPLFVQAQMGHEHASTTGIYTFVSSDFRTSTLRQALNRTTREALEGRT

SEQ ID NO: 2183 - protein, 111 aa, synthetic construct
  REGION 1..111: note = TnsF-Tn7 System Protein
MKRDVDYTWRLPELMAARGLHNTTELVPLLAERGIELSRVQVYRVVNQRPERVSLHLLAALCDIFQCEIGDLVTVTAADARARRKAATAGENVVALDRSVRPRRARVLDDE

SEQ ID NO: 2184 - protein, 355 aa, synthetic construct
  REGION 1..355: note = TnsF-Tn7 System Protein
MERPNSGLTWIRQAHVKTFLKALAAQKEITHEAVDTLPPSRTTNYVRALLAEHGVLPVRDELLARFEVWAINKQAKVIDTEQQMIIDQFRRWGLLRHLRSSSPISNSAFLRAKQSFTVAIEFCNWLTLERGLTVTQISQHELDAWQAGGTSTRGHVYRFIRWAIATRIIPSYLTLVPHRRGTAARLDAESQTAAVDKAVYADDLTDRDRLAAILIIVFGQPVEKIANLTWDDIVVTDPAVVLHLGEYPIKLPPPLDIPARTLAAGNVNGQTAAHPRSPWVFRGYTPGAHLDPAHLRLRLKPLFAALAARLGTLTELTKTTPVAILAQILGYDATTLEAHARMAGAGYAEYIALRD

SEQ ID NO: 2185 - protein, 355 aa, synthetic construct; identical to SEQ ID NO: 2184
  REGION 1..355: note = TnsF-Tn7 System Protein

SEQ ID NO: 2186 - protein, 387 aa, synthetic construct
  REGION 1..387: note = TnsF-Tn7 System Protein
MPKPYPREFRDDVVRVARARESGVTLAQIARDFGVHEMTLTKWLRQAAVDDGERPGTSTSESAELREANRRIRLLEQENEVLRRATAYLSQANLPKRLYPLVKELAADGIPVAVTCRVLQLARQPYYRWLAVPVTAAELVEAYRANALCDAHRDDPEFGYRFLTDEAAAAGQAMASRTAWRICRSNRWWSSFGKPGRGKNRRPGPPVHDDLVCRDFTADKPNQLWLTDITEHRTGEGKLYLCAVKDVCSGRIVGYSMDSRMKSRLAVAAINNAVARRDDVAGCIVHSDRGSQFRSRRYVHTLNVHRLVGSMGRVGAAGDNAAMESFFALLQKNVLDRRPWATREELQIAIVTWIERTYHRRRRQDRLGRLTPIEFETMMTTAVTQAA

SEQ ID NO: 2187 - protein, 374 aa, synthetic construct
  REGION 1..374: note = TnsF-Tn7 System Protein
MSEELPGFAPKVFSTSDVGLLRAEDRVYEAMLAGWRSQQLARGLVPATITPRCQLIDRFFAYTNEYPWNWRPQDLDDYMAERRLVNSAVTVRTLRTYSNAIAMFCEYISDPRYTWTEVCDKYFGTHPTQIRFEWNTPRHSAEDAMPTRRRAFTKAELQQLFDCIDDYVDDLHARNRKQWRTVMRDSMAFKVAYAYGLRRRELTMLDTIDFGPNPYVPHYRRYGALTVRWAKGTRGSGPRRRTVLTVPDFDWAVDLLEYWCADGREVFTTADRSRAMWPSERGDRITIGALGRSFAFHRERAGLPSELCLHALRHSYTTHLLEADYKEQFVQQQLGHLNSSTTALYSSVGDDFKNRKIQQMINRRIAKGGNQNDG

SEQ ID NO: 2188 - protein, 123 aa, synthetic construct
  REGION 1..123: note = TnsF-Tn7 System Protein
MTGEQRRIGFHWHLRKVMAAHNLWKSTDLRPLLQSRGVNLSDAQIYRLVTTEPQRISSRTLAALCDIFDCSPGELFEPFVEMRAAKTAQAPSGRALGLGLGPSPSGPIAHRIRVVEDSDGQTT

SEQ ID NO: 2189 - protein, 387 aa, synthetic construct
  REGION 1..387: note = TnsF-Tn7 System Protein
MISDENGIPNTQLLPLEKYLLRDGENSQAVLTWLRRSPMARVAKAMATGQTPISLHAIASLPLSRATGYFAALLMEAGVVPTENFDRIRLEVWEKDFFETISQPEVRSVLQRYAAWYVNPRFSNQAHLSRTDESLRFRQSKAHLTAVAEWLLYLDTANMDLGNVPHRIFDDYVATHGLRGDTLTSFVRWARTQGLTRLRSDYRPRSSPGSTAVPDKERWDWVKMLLDGEDTQTASRVGGLLVLVYGISATRVVSIRRRDVTIAGNTTRISLGKDPIELPDAIGSLVRRLVAATEISATSDSIWLMPGRRPGRHLTTTAMSAPLRRQGINLRAGRSAALINLARDVPPSVLSDLLGISITTATRWSTLSSRDWIDYPKTRLPGVTESG

SEQ ID NO: 2190 - protein, 429 aa, synthetic construct
  REGION 1..429: note = TnsF-Tn7 System Protein
MYNVLVCAACAGEHSVFACAECGREDHPYGATRCARCILNEQLTGLFTHPLSGEFCDELRPVFEELMRARRPQSVISWLQKPPATGARVLGQMARGEAPISHDTFQHMPAGRSESYLRDLLTATGVLQPYQPAIERMERWLDERLRGLPVDDAQLIGRYARWHHLRRLRSLAECGEVTKPVIYRARSNVIGAVRLSAWAAREGTTIALLTQPQLESYLAAHPGGRNTQQGFIAWLHRSKENTRISLPWRSFTPPEVVVSDSERWDSVERLLHDDTITLYARIGGLFMLLFAQSLGSIVKMKTAQVVLEPDGRVLVAFDGTFVEMPPGLDTLIRDYSQNRGTPTISGRDHGWLFPGRHPGSHLVTDVFRSKLVTAGIHPGDARKAAMFSLAGQVPAPVLADLIGVADKTAVKWAVLAARDWSGYVAQRRL

SEQ ID NO: 2191 - protein, 429 aa, synthetic construct; identical to SEQ ID NO: 2190
  REGION 1..429: note = TnsF-Tn7 System Protein

SEQ ID NO: 2192 - protein, 1179 aa, synthetic construct
  REGION 1..1179: note = TnsF-Tn7 System Protein
MRVMSAGDGYKYLLKTVAAADGDRPLSTPLTRYFIEEGTPPGRWLGKGVASLGKGELVVGDQVSEAQLQLLMGMGHDPITNAPLGRAFPAYKDAPKRIEARIAALDATLTPGAKGEAVALIVVEENARAGRRAVAGFDFTFSIPKSASVLWAVADAGVQAMIGAAHHRAVAEVVAFMEREVAATRTGATAGDGAVAQVDVEGLIATAFDHFDSRAGDPHLHTHVVISNKAKTTLDGKWRSLDGRPMHAAVVALSELHEAVFADHMTLIFGVEWEARDMGRDRSPAWAITAVPESLVTEFSSRARHIDIETDRLIDEYVAAHGRRPTPAALMKLRAQATLLTRPDKHVRSLADLTAEWRTRATTILGRDATRWAIDTTDNDRPLLLRADDIPLDVIRDIGCSVVETVGEKRSTWRKWNLMAEASRQTMGWRFATMTDRETVITMVTDAAQLASLRLSPPELSLSPVVFRRGDGTSVFRPVNSAIFTSEVQLAAEDRLLERSSDLTGPTVALAAVARVTRKPDADGLVLGEDQAEALTRIAVSGRMLDVLVGPAGAGKTTAMNALRRAWEAEHGTGSVVGLAPSAVAAQVLADDLGIETENTAMWWQNHLTKGLNFTAGQLVIVDEASLAGTLSLDRIAGLAQQAGAKVLLVGDYAQLQAVDAGGAFSMLAHDRTDTVELIDVHRFHQPWEKLASLGLRHGHSAVIDTYLAHGRIRDGDTKTMTDAAYTAWRADRDAGRITVLIAETHEQVTALNERARADLLIDGTLTQDREVELRDGTHAGIGDTVITRRNDRKIAASNGNDWVRNGDIWTITDVRGDGSLTIRRPGRSYGGAIVLPAAYIAEHVDLGYAVTAHRAQGVTTDTAHVLVEPTATRENFYVSMTRGRAANHAYVILDRTDDHQQPHPGDDPNVSSRSVLAGVLQHVGAELSAHETITAEQEQWGSIAQLAAEYETIAAAAQYDHWASLVRASGLNEEQAQAAVESEAFGPLTAELRRAEANHHNIETLLPRLVAARGFGDADDIAAVLHYRVAHATARPAGSGRARKAPRLIVGLVPHADGVLDPEMRAALDERAALIEARADAVLDRALADKAPWTKALGTLPGDARRAAAWRNTARVVAAYRDRYRITDDTPLGAVSASETQRLGAARAHAALDRAFSLGLGPVNRFQQTAGRPVSPSL

SEQ ID NO: 2193 - protein, 1179 aa, synthetic construct; identical to SEQ ID NO: 2192
  REGION 1..1179: note = TnsF-Tn7 System Protein

SEQ ID NO: 2194 - protein, 111 aa, synthetic construct
  REGION 1..111: note = TnsF-Tn7 System Protein
MRTIEVQWNLRQVMADRGMFQTSELMPLLEERGIHMTREYVYRLVTKTPQRLNTEVLVALCDALACSPADLITGVIQEQQRAKTGTSEGGPRIGELRPIRAKIRRPEGVTE

SEQ ID NO: 2195 - protein, 241 aa, synthetic construct
  REGION 1..241: note = TnsF-Tn7 System Protein
MGRLDLAAAGQEDLDLWLTTHATRRRSIGAFIRWVKARRLNSTMALTAERTSLPTQFITETALNEQLKRCLNDDQLPLDVRIAGALIRLYALPVVRLVELTTDRFERTGDDAYLTIERNPVLLPPKLALLIEQQIARPTVRSMLRPPQDGRPTYLLPGVPAHRPITAQRIVNKLRKHGLEVISARNTAMLEAVADLPPIVISDLFGVSAGSAHRWARFAQDSWTDYLAACTNDDAKPPERS

SEQ ID NO: 2196 - protein, 353 aa, synthetic construct
  REGION 1..353: note = TnsF-Tn7 System Protein
MSLAVVAPIRSRPLLESPQDIADFEQDLLSEFVLARAAAGIADETISGDVDALMEVRGWCGRPLWELIPTDLDRFFGEDQRRLATLTKVRKAQALSTYFEFLEVRHQADIHAATGVLVQCPVDEINRPRGKTNMRVRIPPPAADVDRLFAGWRDDLHSARKYAPCVRNYTACRLASLIGPRVSELCLLEVHDIRWDLGTFGKVLLRGKGSRGQKKERLVPLINGSRELLEWWLQGPRWEFDGHLDEPGAPLFPSERRDPGGRCKRVSTSAIRGAMAEAVERHLPRWSGRATPHALRHFAASDLYAQGMNVVAIQELLGHRWINTTMIYVHVNKTHIEDAWVSAGQRVASRFTG

SEQ ID NO: 2197 - protein, 437 aa, synthetic construct
  REGION 1..437: note = TnsF-Tn7 System Protein
MQRQFWRLIATGVTTVEASLAVGVSWPVGARWFRHAGGMPPISLAEPSGRYLAFEEREEIAILRAMSKGVREIARALGRDPGTISRELRRNAATRGGKQEYRATVAQWKAQQAAKRPKTAKLTGNDRLREYVQDRLAGSVRRPDNTIVPGPRTPAWKGLNKPHRQDRRWAAAWSPEQISHRLHADFPDDESMRISHEAIYQALFIEGRGALKRELVTCLRTGRALRAPRARSQNKPQGHVTADVVLSERPAEAADRAVPGHWEGDLIIGTGRSAIGTLVERSSRSTLLVHLPRLEGWGGNPPVKNGPSLGGYGAIAMNTALTTSMTQLPEQLRKTLTWDRGKELSGHAQFALDTGTKVFFADPHSPWQRPTNENTNGLLRQYFPKGTDLSRWSSTDLEAVAMAINNRPRKVLGWRTPAEVFEEQLRSLQQPSVATTG

SEQ ID NO: 2198 - protein, 106 aa, synthetic construct
  REGION 1..106: note = TnsF-Tn7 System Protein
MKWNLRLAAAQRDIWKSSQLQAMLADAGLVISAGKMSNLWAGQPVTIRLDDLDVICEVLGCEPNDLLVPEPEKARAQRTATAPGHAAVAGERPTIERRAGRTEPPL

SEQ ID NO: 2199 - protein, 270 aa, synthetic construct
  REGION 1..270: note = TnsF-Tn7 System Protein
MTVAVGYLRGLMPGQSTPPTVPAMKAEDISGPALRVGSAAERDQEVVRVNGLRKEYGDTVALNGVSLEIGAGEAVAVMGPSGCGKSTLLNMIAGLDRPSAGLVRVHGEDLGGINERGLALFRRRRIGMIFQFFNLIDDLPAIDNVALAAQLTGTSARQARRRALELLDELGIADRKNVYPAALSGGERQRVAVARALMNRPALLLADEPTGALDSHAGEQVMDLLIDLNELGQTLLLVTHDHRLATRCASRLVTMADGRITGERALERTA

SEQ ID NO: 2200 - protein, 270 aa, synthetic construct; identical to SEQ ID NO: 2199
  REGION 1..270: note = TnsF-Tn7 System Protein

SEQ ID NO: 2201 - protein, 229 aa, synthetic construct
  REGION 1..229: note = TnsF-Tn7 System Protein
MKELATGGIPVTVTCRVLKLARQPYYRWLERPVTDAEFEQATRANALFDAHREDPEFGYRFLADEARSAGSVMADRTAWRICRDNNWWSVFGKRRGRIKRAGPPVHDDLVRRDFTATGPNRLWLTDITEHATGEGKLYLCAIKDVFSKRIVGYSIDTRMKSRLAVTALNNAVARRGHVAGCILHSDRGSQGGFNWSSQHPDLGGVRRGYGGLEFEDRRCSGGAASAVAC

SEQ ID NO: 2202 - protein, 375 aa, synthetic construct
  REGION 1..375: note = TnsF-Tn7 System Protein
MSNGARPTITGAARLELVDGIALLHPEDAVFEAMLSGFAKQQRGGRRLQKRTVEGRDGQLRRFAKFTNEYPWNWTASHMDEWMVSLISEKGLAHSTLRSYQLTVRLFCDFLISPAYEWATECEKRFGTHPVQICHEWNTIQHLTDYEGQGQRRPFTRDELQKFLDYCDDRIDVAARSRRKGTLAAYRDATLFKVLYGWGLRRNEGCKLDLVDFHRNAAAPELGRYGMLQVRWGKATKGSPPRRRNVASVMPWAVEAVEDYVVNVRPRFGTPDHPALWLTERGGRLQPREVNDRFTAYRDAIGLPPELTPHSLRHSHVTHQIEDGVDPKFVQDQVGHRYASTTAIYTAVSGDFMNTMMRKALDRAFERDADMGDTG

SEQ ID NO: 2203 - protein, 307 aa, synthetic construct
  REGION 1..307: note = TnsF-Tn7 System Protein
MARRVCVDGNVAEEVLQEAFLALWPEPSRYDPARGSFASWLLTVVHHKSVDAVRRKSATRHRIVSNVDEHQRSTPPGPEPFLNWASRRQLLNVHPPRQPAPQPREFADDERRWALARDLLHNDTHPVVDRAAGLLVLLYAQRVSRITRLTADDLHRGDGSIYLSLGRDALALPEPLGQLVTQLPDHRPVGMAGHLHAQRWLFPGRQPDRPMHPSTLAVRLNRLGIHARRHRNAALLQLAAELPIPVVADLLGVHISTASNWADHSGSNWRHYAAQRGLAKTPEIVLITDQMQGMGAEVTGVGVSATR

SEQ ID NO: 2204 - protein, 307 aa, synthetic construct; identical to SEQ ID NO: 2203
  REGION 1..307: note = TnsF-Tn7 System Protein

SEQ ID NO: 2205 - protein, 486 aa, synthetic construct
  REGION 1..486: note = TnsF-Tn7 System Protein
MTQQAHDFQMCDECGKDVAKIWRVHKGHKFCSTCYARVFKRRMCPKCGNFAKLPKNDADAVCMSCQVDKPCARCGAIDYIVGKITQYGPVCNSCAPYFRIKEPCEICGALSNRLTRVSRFDHDKRVCQKCARSDHGNCGACNRHRLLEKSPDGRMLCHACLTVGEISCPKCSQSMPAGRKKQCEPCYWKELLGKRIAIDSAGFSVPSMGLHFSNFGAWLGEQVGIHKASITIHRYLSFFLDIEKQWQAIPEYTILLKYFGTPGLRKVLLPMRWMMETGLVVMDAVAKAEDSEQRRVAATLEKFKTGTAQRAILDGYHDQLLTGQKEGKTSWRSIRLAMTPAAALLLQAATKEVCPPDQKMLDAYLGTTPGQRAAVSGFVGYLRDGHKVNITLTPAYDKAKKTKKKRLETELLRLLAENDRSQSEQLQLLAVAMAYFHGVAQKEITAAVMKSAVASTDNAGDTFTINGVDYWLPSEFKRKKNDLALD

SEQ ID NO: 2206 - protein, 486 aa, synthetic construct; identical to SEQ ID NO: 2205
  REGION 1..486: note = TnsF-Tn7 System Protein

SEQ ID NO: 2207 - protein, 232 aa, synthetic construct
  REGION 1..232: note = TnsF-Tn7 System Protein
MQIQCDSVKPKQTRKIKPTRRSVSGTYPFRGETAIPYESTVERDFLIRKEFSLYVLDIIPQPVQIPFTSKNEQTYTYTPDFLVYYRTHKNASFAACQKPMLIEVKPESEWRKHWREWMPKWKAAYRYAKEQGWEFHIHDESRIRDVVFDNIGFLSIYQRMNFAVEETKWVLENVRAMGVAPYHYILARHFMGSMFERQGRAHIWHLLATRQLDCDMTRPLDDFTELWIPTNE

SEQ ID NO: 2208 - protein, 370 aa, synthetic construct
  REGION 1..370: note = TnsF-Tn7 System Protein
MSDSGDMQNPEFEASRKRLDVQVGALVKSENVIYRIEQIIDFESVVGTAVETGRSRPLRILELQPVGDNGAAGKHDSHSDLAEIGDSDWKVAETRFAAIQPLIVAFSPGRREVELRAKEVGVDTATLYRWLQKYKGMKTVAALIPQKSGWTQGRGRIPIQAEAVVADVIKKYYLTPQRPTATKTVEEVLRQCQLRGVEPPHPTTIRSRIADVSEKERLRGRGFKEKAKNKFLPVPGHFPNADFPLAVIQIDHTPVDIILVDDTYRKPINRPWISLAMDINSRMITGYYLSFDPPSETSVAMCVAHSILPKDDWLLLHKVDATWPVWGVPKKIYVDNGADFRSDNFQQSCTMYGINLEFRPVKTPPLRGPH

SEQ ID NO: 2209 - protein, 235 aa, synthetic construct
  REGION 1..235: note = TnsF-Tn7 System Protein
MVVIVASYSKSHSGSPPRPGEISLAHNGILFLDELPEFPRAALEALREPLETGRISISRAARRADFPARFQLIAAMNPCPCGYLGSTQKTCRCTPDQVARYQGKLSGPLIDRIDLHVEVPAVNTAELMNAPPGESSASIQTRCVAARERSMARQGMSNQALQGQALEQHLHLDDAAAKFFNVAAARLGWSARSTHRALKVARTIADLGGAHHTQVTHVAEAMQYRRALQTRQGQE

SEQ ID NO: 2210 - protein, 290 aa, synthetic construct
  REGION 1..290: note = TnsF-Tn7 System Protein
MVRTALMQGCDPMTLTFAVWPRWRIWTHDADRFANEDRLDRICVLSGIEKGTLRAASLFPIAKQIYGRTPPEKATWSWIVAPGARNTKRHSGIQYCPACLKNDVRPYFRIHWRFAWHTCCKVHGHALLDRCHACNSPVEYHRLEAEDELITVCATCKADLRTASSRGCVSDALKFQLVADDVLLNGIGTFQSSAMSISPWFELADYFVSLIRVAQRGENQTLSEFLKLIGVQLPMSPPMQPGNHLETLQTHDRERLLAALLPIMSVSKDKFDGGASKNQTFQNKVLQVTG

SEQ ID NO: 2211 - protein, 299 aa, synthetic construct
  REGION 1..299: note = TnsF-Tn7 System Protein
MSATTKYEHVHPDFRHIIGMTDKQRIEFMDQPRWISYRLAQQILDNLQGLMHKPSKPRMQNLLIVGESNNGKTTLVRRFKDLCGQGSVDENSDPVKPIIVAEAPPSADEKGLYISLLECFFTPYRATDPASKLRYQVIHLFRQCHVKLLIIDEFHSLLTGTPVKQREVMNAIKLLCNELAIPIVGVGTREAVRVLHTDPQHASRFEVMNLPLWELNKEFQQLLVGFEKVLPLKNPSKLHTPELASLLHTISEGNTGNLHQLLIKCATEAITSGKEQIDKAIIEGKAWLRPTRGIRELVL

SEQ ID NO: 2212 - protein, 299 aa, synthetic construct; identical to SEQ ID NO: 2211
  REGION 1..299: note = TnsF-Tn7 System Protein

SEQ ID NO: 2213 - protein, 262 aa, synthetic construct
  REGION 1..262: note = TnsF-Tn7 System Protein
MEKTRDSGIASRKVISSFDIFVFLSQWFEKHNSLPSYDEYASHLTVAKTRKHLTVTYFLDEMELIPLDHTRKLEIGNLDCVDRAYDRIPKISPLFKYMDSYHEQIIKKYVSGKNTAHTARLGFGTAVNFLELGDYQNKNEPDTELIRQYLWLHSGQRASLWGFITYLRKHHQLDLPSLDDKVYKLALERSDESVERSKQKLIELLRSETFSREDYIELALAYLHQVKLPSELKKIREKISVNNCEIKLSKHIIYLPDTSAVL

SEQ ID NO: 2214 - protein, 233 aa, synthetic construct
  REGION 1..233: note = TnsF-Tn7 System Protein
MHNIQPVRKHLTVYGSISGNYPFRNEKIIWFESQLEKHFLRKLEFNDAVLDVVTQPVEIPYTTEKGNKSTYTPDMLIIFSSRGFYHPESTPKPILAEIKPHKKLKENWPDLRTKFKAGLAYAKEQGWLFHIYDEKRIHDQYLENLNYLKRFNKGQYNQDILDQLVDTLEKIGHCKVNELAAYLFKSETNLLIGIQHTWNLIAKKKISCEMNQPLSNNTVIWVNNPEATYYGGI

SEQ ID NO: 2215 - protein, 628 aa, synthetic construct
  REGION 1..628: note = TnsF-Tn7 System Protein
MTVGVTLDRRRVTIKKGSIVQKGKQQYIITDVISFSEAVGQNLDNNRAKLLNIDELSPVDNPALEAKLSKDDSDIPDEHWQIAYNRFEIIEPLVKKSSRSEIESIANEHGVHYTTIYNWLRAYRESNSISALIPDKRGWKPNKSRLPKTLEDIIEEGINNFYLTTQKPTISKVVQYIMATCQRKGIDAPHPNTIRNRINDISLYKRMRNRGQKDLIKDKLSPAVKEFPGADYPLAYVQIDHTKLDIILVDEEHREPIGRPWITLAVDVFSRVITGYYLSLDAPSTTSVAMCTTMSILPKNKKLIDLDIDATWDVWGMMDSIHTDNGADFRTTDLQRACLKYGINWEYRPIGGKQFGGHIERLIGSLNKEIHTLPGATFSNVSQRGSYDSDKESSLTFAELEKWIVTWITKVYHHQKHSELRMSPLQKWEDGIWGTLAEPGVGLRDKPSDEDTLIIDFLPEFERTIQRNGISIDSLYYYSDVLRIWIGSKGDDGKTPRKFIFKRDPRDISYIWFYEPKLKKYFKIPTGRQEIPPISLWEYRAVQEYLNTQNKKPSNQIAIYDAIYELRQQADEARKRTKKTRRISTQKKLHEKTAVTQTLAPSPETSRANPSFDDDLWSQDIESFEDIR

SEQ ID NO: 2216 - protein, 680 aa, synthetic construct
  REGION 1..680: note = TnsF-Tn7 System Protein
MHSLNPRQLEAVLHIDTPLLVLAGAGSGKTRVITEKIAHLVRKHDYKPHNIYAVTFTNKAAREMKERVSKLMVDEPIKGLNVSTFHNLGLNIIRQEYKALNYKANFSIMDSTDTGQILKELMRKNDLDPEELDGVQWTISGWKNQHIAPQTALELAENPLEQARARLYGAYQKQLHAYNAVDFDDLIGLPVRLFNENPEILTKWQNKVRYLLVDEYQDTNAAQYQLVTQLVGLGGKLTVVGDDDQSIYAWRGAQPENLALLQQDFPGLHLVKLEQNYRSSQRILNSANQLIANNPHVFDKLLWSEMGLGDPIRVIGCANENQEAERVVSEIIVHKFKYRTKNRDYAILYRGNHQARLIERALREQNLPYILSGGQSFFERAEIKDVMSYLKLIVNPDDDAAFLRIINTPRREIGAGTLEKLATYATNRGISLFDASQEFGLTQILKEKSLKRVQYFGALLLEWVKEAENVEGKDLIPFVRSVLDKIEYDNWLMETASSVKTAERRIENVRDLILWIERIVTKAHEEDGEELKLAKVVSHMTLMDILERNEEEADHDMISLMTLHASKGLEFPHVFLIGVEEEMLPHKQNLESPGLEEERRLAYVGITRAQRSLTITYAQKRRKYGEDTPCEASRFLHELPEDALHWEGKPGVELSQEEVKDHGNAHMANIRAMLASKLDD

SEQ ID NO: 2217 - protein, 356 aa, synthetic construct
  REGION 1..356: note = TnsF-Tn7 System Protein
MKTPYWPIQIPIEPDELLSSWLIRTSLENGSDPMTWTWYFWGKWRAWIADFDRHCDDEKLQRISFGPFNLERLRNATLYPTVQQLTTRELHPNTNWLWVIPQGSRNRERSVGMRFCPECLKDGTPYFRKSWRLAWNHSCPKHKLLLINQCPKCGLPISPHKASQDQTDICICLRCQFDLRTANTIQTSDEALSAQEILSHAINEDDSLPWDTKTPAELFETVHLILGLFQYATRRTDTIKKFREELGLPICMDARLSGHGIEQLSPESTSSLFISLNSLMKLGIDELIELFIETGVTQNALFRKSPLTNDTLKVIAYQLTTNENSSSSTRISTERIIKPRSKSDVLKMWEDLQRYL

SEQ ID NO: 2218 - protein, 234 aa, synthetic construct
  REGION 1..234: note = TnsF-Tn7 System Protein
MVRSVAFISRNDSGQNPKPGALSLAHYGLIFFDEMPEFNRDVLEALREPLETKQVHIARVKQHITFPCDTLFIGAFNPSPSGFFADDPRCKDTPDQIARYQRKISGPILDRIDLHLQVPAVEVDQLTAAPDENAETSAQVRVRVSQVRARQIQRQGCLNAELSVSQLEQQVALSDEAQAFLKQGIERLGLSARSYHKILRIARTLADMASSESVENQHLAEALGYRSLERQGLA

SEQ ID NO: 2219 - protein, 309 aa, synthetic construct
  REGION 1..309: note = TnsF-Tn7 System Protein
MTTDTIEQNYPHLLERIRPVVDLPDKERLFFIEEDHWIGYDRAQKILNLLEDLLARPKKVRPQSLLIVGDPNMGKTTIILEFVKRHYTEVIEEPDSSFKVVKKPVINIAAPTSSDEKSLFIAILDHFFAPFRPTDPKAKLRQQAIHLMQRFQTRMLIIDELHNFLSGGPAGQRESMIALKNLSNELGLSIVGVGTKDAVQVLHTDPQHASRFDVAELPKWDLDTNFLKLLASYEKLLPIKYESDLKSKELATTLYQISSGNLGDLNKLLVACAKSAIETGEEKITHAIIMSHKDIKPTKGQRNIRYIDL

SEQ ID NO: 2220 - protein, 309 aa, synthetic construct; identical to SEQ ID NO: 2219
  REGION 1..309: note = TnsF-Tn7 System Protein

SEQ ID NO: 2221 - protein, 775 aa, synthetic construct
  REGION 1..775: note = TnsF-Tn7 System Protein
MEAVAGLDATRTRTVVETVSRGRKGLSMLHRHLTAHPDALISGESDCSTVFLRLVNTLIDTGYRVTPLRCVGCGRHGLTLASRVEGGRMCGTCANRRRAQLCRRCGLIRTVYARVDGDAVCVSCYSTDPTTGTRCSACGVLARIARRTPCGDPLCESCYQPPTQPCIHCGHIRIVSMRTDAGPVCSNCRRHPPRRCAQCGRNSKIVTKTSGRELCRDCFNPATGRCDHCGNQAPLITRRSSDTGALCRTCYSRAPAECSGCGQLRRCRRSKHPDAPVLCGDCRPTWAERCARCGRAKRILATWPIGRVCASCYAYVRKHPATCGLCGLSRPLIGQGPAGQSICGPCAGRADLDYTCPRCGESGFAPTAGTCLRCAVADRVIELLRGPNNAIPDGLRPFATALTEVDSPEAILHWLRPGQPAAHLLAAISVSQEPVTHDLLDDFPPGLAVHRLRQTLVHTGILTDRADYLERIEPWLDRQLADQPADHAQLIRTYTNWVLLRRARQRTNASQPFTPGAANWARTRIFASLRLLEWLRQHNLDLGAARQDDIDTWLTTGKPESTYPAREFLHWAKRRRLTTVAIPKKQHQTALAPITEDERWHQLRRCLHDTTLPTAVRAAGALVLLYGLPVSRVTTLRHNDIQHDPTGQTWLRYGGHRLQLPPAVATLILNQRDGASTVSVVGRSRPQDHQWLFPGGFPGRPARDAIYRALRSHLGLHLRRARSAALASLAAQIPAAVLAQLLDININTAIAWANYAQHDWTTYLTARNKAAANHT

SEQ ID NO: 2222 - protein, 775 aa, synthetic construct; identical to SEQ ID NO: 2221
  REGION 1..775: note = TnsF-Tn7 System Protein

SEQ ID NO: 2223 - protein, 663 aa, synthetic construct
  REGION 1..663: note = TnsF-Tn7 System Protein
MATRARIGRGNRGPTTRAAARESIHNRVHNPVHGAAAFTPDSLSVGARHLEVGGEWVSSFGITGFPREVHPGWLSPLLTYPGRVDVSLHVEPIDPATAAARLRKQLAKLESGRRHTAEHGRLHDPHVEAATEDAYDLSSRVARGEGKLYRVGLYLTIHAISERSLADEVAALRSLCASLLLDAKHTTYRSLQGWVSCLPMGLDLIGMRRTFDTSALSAAFPFTSPDLPAADPTSVGAPSGVLYGYNVGSQSLVHWDRFAPAMHNHNSVILGRSGSGKSYLVKLELLRSLYRGIEIAVVDPEDEYARLAAAVGGTYVHLGGAGVRLNPFDLPIHTRADGRRTAPKDALIRRSLFLHTVIGVLVGTELEAAERAALDRGIAATYQAVGITADARTWTRPAPTLRGLRDQLAAAGQAGDRAAAELAARLHPFVEGAFKQLFDGQTTTNPEGHLTVFSLRDLPDELKSIGTLLVLDAVWRRVSNPAIRRPRLVVVDEAWLLMKEKTGAEFLFRMAKAARKHWAGLTVATQDTADVLGSDLGRAVIANAATQVLLRQASQAIDDITTTFDLSAGERQFLLSADRGQGLLSAGTQRVAFHTLASPTEHYLVTSNPAELAGYAADGYVDDSDDTSQSYVDLGFGDDHDDIAGADEFGSIDSGDQVDLDAA

SEQ ID NO: 2224 - protein, 663 aa, synthetic construct; identical to SEQ ID NO: 2223
  REGION 1..663: note = TnsF-Tn7 System Protein

SEQ ID NO: 2225 - protein, 869 aa, synthetic construct
  REGION 1..869: note = TnsF-Tn7 System Protein
MRSWISAALHHPAPSTTPTGIRSGGVGDGWLGDYLRDPGGAALALLERLREWAIAWGPIAAPLLLASGAGFVVGRRWWVRRCHAQLVADARQVTVLAPPTVDPAGGTALWGNLVGLLRPAWRRWFTGQPHLACEYVFSEHGVAIRLWVPGVIPPGLVERAVEAAWPGSHTRVANPAQPPLPAPGEGQRRLVVAGELRLARSEALPIRTDFDADPLRALIGAPVGLGRDEYACVQVLARPVTGRRVTRARRAARRVHTDGSTRLVGRVLDMLTPGMKTSSPAEGRTKAGTLHSDPQTSLEYAAQNRAIVGKQRGSQFETVIRYAVATLLPADAADSEMRRARDVARGRAHALAASFASYTEHNRYARRRLRHPGPTLAARSLGAGDLLSVDELAAIAHLPVDEAIPGVQRAGARAVAPPPGIATPGPQAKPIGVTDTGHERPVALRVPDARHHLHVIGATGSGKSTLLGNMILADAEARRGIVLIDPKGDLVTDILSRLPKSAGDRVVLFDADAKSRPPCLNPLDGGETDLTVDNLVSVFRRVYSAFWGPRTDDVMRAACLTLRTQEGVATLADLPKLLADPAFRARVTAGVADPVLRGFWSWYEELTDSQRSHVISPLMNKLRAFLLRPFVRDAIAGGHSTVDMPDVLDGGICLVRIPKGSLGEETTRLVGSLVVARTWQATTGRARIPQRRRRDASMVIDECHNFLNLPYPIEDMLAEARGFRVSMTLAHQHLGQLPRELREGMSTNARSKIFFNASPEDARELSRHTAPRLSDHDLAHLGVYHAAARLVLNGEEAQPFTMRTQPLPRAIPGRAREIRGIARRALRDRTTAPSSGAPPQQTGSSRPATGERRNRPAARPRTADPRRHP

SEQ ID NO: 2226 - protein, 869 aa, synthetic construct; identical to SEQ ID NO: 2225
  REGION 1..869: note = TnsF-Tn7 System Protein

SEQ ID NO: 2227 - protein, 359 aa, synthetic construct
  REGION 1..359: note = TnsF-Tn7 System Protein
MLPEGVRHLDPETAVFDAMLSGWERQQQSRFLRPETMAPRVRLIRRFAEFAGLYPWRWTPGEVEAFTADLVSGARPRAHSTIRGYQLTIRLFCEFITDPRYGWPTECEQRFGQVPAQICHEWNTVAHLSDVEGQPGRRALTYEEVQALFDAADARVEQIRSRGRKGSLAALRDAAILKTTYAYGLRRREVARLDLADFRLNSRAAGYGLFGSVQVRYGKASRGGPPKRRTVLTVPEMDWIVEVLNQWREEIRPLFSPAAHPAMWVTERRGRISINYLNEMFTRTRQDAGLDGVHDLHSLRHSYVTHLLEFGYPPLMVQQQVGHAYQSTTALYTSVSDEFRNRLLEQSLHDHPELWETAP

SEQ ID NO: 2228 - protein, 105 aa, synthetic construct
  REGION 1..105: note = TnsF-Tn7 System Protein
MSYTWHLRAKMAENGMFQTSDLMPLLAERGIHLSREQVYRLVTQPPQRLSMDTLAALCDILGLSPNDLIEIKVAPTQVRKTGSGDVTSPSKPAARRTTVRRPPGL

SEQ ID NO: 2229 - protein, 783 aa, synthetic construct
  REGION 1..783: note = TnsF-Tn7 System Protein
MIEEFHKWSQKYDSCLICGTTEKRHFAKGLCITCYSREYEKNKSLSICDICNNQGRISKVLDNLKICRKCYQKYYRIKRECDICHSISYITKSSEGKSICQTCYRKLYAPKEVCSICHSLERVASRKGGKIICTKCYKNSLPSRVCSVCNTEKQIEYVKNGKYVCSTCYNNIYRPKTYCSNCGKLDITKFNIANMSICPTCYYRYYRPTRICSICGKKRIIVKIIDNKSICDNCYINYAPKRTCSICQQLKPIKKKYDEKEICGDCYIKLQNTCSECGHVVVSFNYTLNICDNCAYKKKVIMLTEDIRNKFSSEEISQLYKEYIFTLIKNNYAGVKLYYKLNNDYKIFKFIDENGLINAKEKINDLINKIHIPLSIQNYFYMKGILKVESDIDIFTKIHFRFIDKVAPEFNNVFTSYSLSLIEIKRKFIDRGWNNKFSSKYYFQCLREACLFFKFLCKNDIKSINELNQNILDEYVLNFCGYVFQLKKLIIYINKNMKLFRTLTVQNVKIYTSLKNRSYSQNEQEAIFNLLNSSEINTRDKIIGFLVLVYGIKISEIVNISFDDIKISNNKYYLYARNTWITLNNDIGKMIWSYIKNDRKDQLSLGCQKEWLFTGSKYYKPIGSKYISSILTKFGIYVRRSFPTLFKNYFLNYDISPSLLIRGLGTNIATTINYYNYYNINGIHEVHVDKDRLAQTNNISNFKVYILSCSDGTYYTGYTSDLQKRLQQHQEGHGCTYTKTRTPVELVYTEELPDKPSALKREKQIKKLTIFDKEKLIEKSRAN

SEQ ID NO: 2230 - protein, 783 aa, synthetic construct; identical to SEQ ID NO: 2229
  REGION 1..783: note = TnsF-Tn7 System Protein

SEQ ID NO: 2231 - protein, 632 aa, synthetic construct; identical to SEQ ID NO: 808
  REGION 1..632: note = TnsF-Tn7 System Protein

SEQ ID NO: 2232 - protein, 380 aa, synthetic construct; identical to SEQ ID NO: 811
  REGION 1..380: note = TnsF-Tn7 System Protein

SEQ ID NO: 2233 - protein, 845 aa, synthetic construct
  REGION 1..845: note = TnsF-Tn7 System Protein
MTQQHDQPPRFLTEPTAVIAEVVLAIEPELSPAVVAEAIASTAKIKSRHRKLAEALSRDPDLLTSGRPEGPVTIQKLVRALQAVGATRVVLPRCAHCGKQHRLPNLDGDQRICAYCQMKRAAAANPCVICGRTADVASHDHLGRPRCVLHPDTGNQDPVDVVCDHVAAVDLGLARDEVAAAVRATCQLPAHQRQLALALEDNPRLLTGEGAHGPHKFILLIEDLLARGARNIVLPACPFCGTDRKLRHVLHGQRVCRACYEKFRVLPCSRCGRTKPVATRTVDDQPVCHPCTRADPVNHETCTSCGRTVNIVRRKGDQRLCGRCFRPPTAVCADCGRTRPCYFAQSEAPRCEACSNRLRPPQTCSRCGNERSVKARLPDGGPLCHSCIRVPVPCHICGRLKPLTGRGPNGEALCRVCYDKHPIARRSCVQCGVLERLYHHGLCNSCALDRQLTGLLGGPDGIVRPDLEPVFQCLHRGDPLSLLYWLREPVPRRLLAALAAKEEPVTHDLLDGLQHPVKAVRHLRAALAADGVLPARDERLAELERWLPRAVARIEDPSERQVVRGFATWHHLRRLRRDAEKRAVTLHQAVVVRREVKAAILLIEWLRARSTSLATCTQHDIDDWLATHIWVRYLARTFLVWSVRNGHAHRVLIPIPPKDASMVLIEQDQRWAHVRRLVKGDGVDTATRVAGLLLLLFAQPLSRTSQIRLDQVTRTEDGVALKLGSHPTDLPPPLDSLVLELVQQRHGYSTLGRSDDHPWLFPGTASGQPISSRQLMRKLTALDIRARPARNTTLMELSAELPAVVLSRLLGLHISRAEKWTKEAGSTRADYAAELSRRKGFRRSQ

SEQ ID NO: 2234 - protein, 845 aa, synthetic construct; identical to SEQ ID NO: 2233
  REGION 1..845: note = TnsF-Tn7 System Protein

SEQ ID NO: 2235 - protein, 355 aa, synthetic construct
  REGION 1..355: note = TnsF-Tn7 System Protein
MILVDGVALLHPEDAVFDAMLEGWRRQQRGGRRLQPKTIGDRLSVVRRFMEYANEYPWTWSAGDLDDWMTELIAAGDRAESTIRNYQGSIRQFCDYITSPYYQWPEICEERFGTHPVQICHEWNTVAHLTEYEGSADRRPMTREECQALFDYADDQVERAIRLGRKGAMAAYRDATVFKTIYGWGLRATEVSRLDTTDFYKNPKAPEFGKFGALHVRYGKRTKGSPPRRRTVLSLMPWAVESVADYLLNLRPRYRASDRPALWLTERGGRLQPREIEDRFAEYRDALGMDEDLTPHCLRHSYVTHNIEDGADPKFIQEQVGHLYASTTAIYTGVSGDFMNTMMRKVLERALTADQ

SEQ ID NO: 2236 - protein, 109 aa, synthetic construct
  REGION 1..109: note = TnsF-Tn7 System Protein
MTAKLDYRWHLREVMATRGMFSTTDLRPLLAERGIDLSPSQTYRLVVERPERLSLKTLMALLDILGCSMEELIEPVAVAAQRRKAAGGASETHGGLGGLRPSRARIVRE

SEQ ID NO: 2237 - protein, 290 aa, synthetic construct
  REGION 1..290: note = TnsF-Tn7 System Protein
MFQKRLQINIEALTHDGFREAYTEYGAWLLDRAGPVRAALLINRHLDSFREMNALWMRLPTYQELLKAKGALWIRRAKLPVQWMIEKHGMQVDAALKTELTEKRRIEGILASVPSEMGRNLLENYRLHLESKPHRRANSLRSVRMALRSGANLVLASEAAGNSMPTSHSLRSLLAETPGIVASLSSFVSFLNKFHGAAIEFPKDNRNAIMCRRSRFERELRLLMGEAAAGKSVLDRWHVAALGYFHGVAKVHKKDMPLMTIPDQEGLLVKLRGQDYWIPLPIGAGGQGHG

SEQ ID NO: 2238 - protein, 227 aa, synthetic construct
  REGION 1..227: note = TnsF-Tn7 System Protein
MASNNRDKPRPSSVRAIKPTKRSVSGVFPFRGEGGIPYESLLERDFILRTEFSMDVLAITSQPVAIPFSVNGRTYTYTPDFLVQFRLGDRGPENWPKPLLVEVKPEAEWRKNWQAWLPKWKAAWRYARDQGWIFHIHDESRIRDTALQNIKFLERYERMTFAPEDSDWIIGTVKKMGVAPVHYLLALHSCDYYRAECISHLWHLIATRRLTCDIRLPLNNFLEVWVV

SEQ ID NO: 2239 - protein, 639 aa, synthetic construct
  REGION 1..639: note = TnsF-Tn7 System Protein
MDSENPDSQLVPYEPDRSQVTIEVGAIVAHGDSAYRISQILDFRTVVGVELDSGKAAALPIGSLRAIKRERVDGLYANYDISLIGSEDWAEAQRRYAAIQPLLGSTVVGRNDAIARANATGVDVATLYRWIKRYKDWGEMLALVPRRRGWQEGSSRLSDEVDQIIEKVITNFYLKPHRPTIPATIQAIVDACEEAQLPTPGKTAIRARLKGIPDKAYLRGRGFAELARNKYTPTPGSFPDADYPLAVVQIDHTPMDILLVDDVHRRSIGRVWITFSIDVFSRMITGYYLSLDAPAGISVAMCVAHAILPKEEWLLAHGVEGEWPVWGKPKILHADNGPDFQSQDVKKSCSNYGIENRFRPVKRPRYGAHIERLMGTFAQTLKDMPGRTYSNKADRDGYDSERHAALTFDEFETWLIREILIYNESYHSKIFMSPRRKWHIGVFGNSDQDPLVGIPPRPTDPFTLQRDFLPSFDRTVQHYGVQIDLLYYSEALRPWINAKDQDTGKAQTFVFRRDPRDISFIWFFDPLLKQYFKVPVSNQAFPAASIWEYKAAKKRAVDEGRADINEMLIKRYILENRELVAKAEAQTAKTRRQAQRHRVHSKGKTPAEPSPQKVKIAPAPAGTFVNMVDGDLDDFGDIS

SEQ ID NO: 2240 - protein, 238 aa, synthetic construct
  REGION 1..238: note = TnsF-Tn7 System Protein
MDREAIEHARRLKSTMQSAIDAGLIRTRQQLLAVAASNDLSVTRNGRDYAGFLCKSGKRLRVRFDFKDRPPPGPEKVLRRTETAGYWIYALTAQSNDGIRKACYIGQAANLRKRLREHFNHARVGHSSYALFEWAKHEQVEVRAAVLTWVAGTQSNATYFEGYWLERALKAGFEAPDVHNWGRLPKLESLPGQPRSWPGTEVQAKSIPLADIIMKKLTLQPLYAKEAPPHQAEMDFDT

SEQ ID NO: 2241 - protein, 603 aa, synthetic construct
  REGION 1..603: note = TnsF-Tn7 System Protein
MRVARLQIENFRGIKRADVLLPKHAVVVGDNNIGKSTLLEAIDLVLGPERLSRRPVIDEHDFYAGEYVDPQGQPVNITIEAVITDLNQDQEMRFRDHIEWWDNGTGDLLGGPPTEGTDEQMVQACLRVVFVGNYDADEDDFAGTTFFCSPMKQDGSYDFFRTADKRVCGFLYLRTIRTGSRALSLERGSLLDIILRLQDDKNFKIWEGLLVELRQLQVAADPEIGINDILANVQSSIRGYMPSDDGSDPQMRVTQLTRESLRKALTVFMVTGAQRSDGEAHAAPFQSQGTGTINMMVLALLSLIAELKQNVIFAMEEPEIAIPPHIQKRIINGVRSKSAQALFTSHSPYVLEEFEPEQVIVISRNDGTLSAMPAGLPPGIKAKMYRQDMRLRVCEALLARRVLIAEGRTEYDAWPAVARLLHQQEPESFMPLEALGIPIIDATTDSLIAPMGAYYRRLGKKVYAVFDEQSPEQLEAIKASVDYPYQAPEKGFENVVLKGTNEDVLRAWVVSLIDSGAWPSDLRDKAPGVDATTDEVVAILGVLLKRWKGDGAAASLLCTAMTRHHLPEFIVSTLESITATIVPKKPEPELPELNDDLLDLVGP

SEQ ID NO: 2242 - protein, 603 aa, synthetic construct; identical to SEQ ID NO: 2241
  REGION 1..603: note = TnsF-Tn7 System Protein

SEQ ID NO: 2243 - protein, 564 aa, synthetic construct
  REGION 1..564: note = TnsF-Tn7 System Protein
MLDPYSIRKPGIGSSNLHVEELAKVRGQVVVCWHGGLQKNHSPNTVPLAEVTFRTLHPDNNFGSLVHHDVVISHLGSLRVGTVWKQGNLIGEIGMDRLRPQRVNFDPRSWQLVTAKSASLFESYMQQFPKRCGSSWLIKLTTASGETILVPCLEFLTRCYGRSSETARLLVTYGLKTIQDLYFYEFNPNPERLLLPLERGVSVREAPFLAHAMYDDYTRDICQILHNKLQAEFKPGNQAFIQVPPWFKGWGQIEGQGYWIDDKTFLLLRIDGLSEPDGPPITVEYKRYTKDAAEQGTSAGRPYSRKLPLGASTVAVSITGTEAPNSKTSQTVYDPPFRTLGTKRKLHHRKKSIPGQAGRPVPGCEKDRLAPGDPRGNGEGGGKSEHVSPEATPEGIVALMWQTCLSLAQSLPTYISELGWYTKAFGFQTEGVPRFEYLSFPTKKKGAPIRLPKPVLIIRMMVGGRHIYILEIHRNPRKSEDEKGITKHVEDSYRGLMVELPPNGKVADIELAVIFKNIIANNCRIKKSQMSNYPHVTFVHRPKEEGCQPFGKVVLKHLSKLIGH

SEQ ID NO: 2244 - protein, 370 aa, synthetic construct
  REGION 1..370: note = TnsF-Tn7 System Protein
MASTYSWHSRIDVVSPQWPNARSLLADELLSSWLIRNAFAHGCSPMTLTGSLWPGWRCWIVDVDRGIASEHALPLAKMTGVGTSDICTATLHPIASAINPSLDSKKGIWPWILALGARNRRHAGGLQCCPVCMLEGTPYYRISWRLAWHTCCEKHLVRLIDRCPRCDSPLQPHNLQQIDSNCAHCDRCHAPLSTSSHELGFAPGALAFQCAGDDAIHGVNHDTGAPCEPDVWFQRARFIFGVLRVSSTNNSKTFACFRDAFNLGHLVRPDSGLPIELLSVRERMDFLSAVWKVLEMGEHQLIEVIQACSLPRHSVPIPAGNISPALQEMLKKLTPGSVRAPTAKRARSPVSRQTVKKLWARLKRKVYRDG

SEQ ID NO: 2245 - protein, 290 aa, synthetic construct; identical to SEQ ID NO: 2237
  REGION 1..290: note = TnsF-Tn7 System Protein

SEQ ID NO: 2246 - protein, 572 aa, synthetic construct
  REGION 1..572: note = TnsF-Tn7 System Protein
MMVLDQSRRDVIDSPSHLVVMGGPGSGKTTVALLKAEAFLGRLDLTEYQQVLFLSFARATVARVAEQAGKMLPKLEQARLEVNTYHGFTWNLLRSHGYLLRNGRPLSLLPPPEAAARLSTLSQEQIALEKARLLEEEGLLHFDLFASNAAMLLERSQSLQRIYGNSYPLIILDEFQDTNEDEWRFIRALTRHSQVLALADPEQRIYEFRGASANRIQEFEEAYRPASFSFGMENHRSTGTDIVQFGNDLLTGTNRSRAYTHVSVTPYAPRKGMLHRAFKFAVLTAIARLNRDGRDWSLAILVPSKSFMAEVSAYLSSDSDNLPRLSHEVAFDQEAAALSATAIAALLEGGATAEIIAERLLRNLCAHLRGRKGEKAPSKPHLELVLALEQLFGGQPLRRVPHKRVLAAAQVIAAQRLDLQLTGDPQLDWIAARHLLDSNTEQVFNQIGIDGRYVRLLGKGSLLRSRLSELWRSAGGYPGAERLVRDALIQDHFQTVTKDWKGIHLMTMHKSKGKEFTEVILYEGVMKGRFLPTEATADRVLQTRLAMRVAVTRAMKKVTILTPIGRKRSPLL

SEQ ID NO: 2247 - protein, 572 aa, synthetic construct; identical to SEQ ID NO: 2246
  REGION 1..572: note = TnsF-Tn7 System Protein

SEQ ID NO: 2248 - protein, 1695 aa, synthetic construct
  REGION 1..1695: note = TnsF-Tn7 System Protein
MLDECLVLVSVDNDPAIDEHWLSRCTTVALGQEGELCHFCLFDTETRQSWHAIRAPVESPAACQRLERDYRLALDPAWAVLPAAYVRSAEGPLLVYPTGLSVADLIDQGRLFLERFLHVAVNAATTLAKAHQGNAVHGALRPRQLLIGNDGQVRIGGFRADASDIPSTQPDSWTYLAPEQVCPHGTHTDRRSDIYALAAILYQLLLGQLPLAGRDIQHWRQLHAGVQPRPAGELDPTLPRVISQILGKALAKEPDARYQSAEALAIDLAHCQRQWAAHGDIAPFTPGCADLVPAAGERLYGRDGEQQTIARLLDSLRRDNTPQGLLVNGATGMGKSSLVHTSLKVHANGYWASGKCNSLEQAVPYAPWIEILGTLATQLLARNSSDLDATARDIRQRLQGRGQLLSQLAPDLQLILGPSADFSIQASRLTLEKEHRAIVEVLEVFSSPGQPLAIFLDDLQWADDASRYLLQALLAKPPRGLLLILASRSDGSAMSLIDLPATPTALRCQSLTLQPLPVAAIVELIVTRYHVNAAEALPVAERVHAKTAGNPFFVRQILRAMVEDRLFVFDTHAMRWSWSIDAVAHHRYADNVADLMVQRLTRLPSGQRELLRLAAAAGGRFDVALLRRLAGQPDERLDGRLKALREAGFLASTAHGLAFAHDRVQEAAYQLTPEHERSAQHARIAQAMWQAWADSPREGLFELANQLQRAATDRFTAQQCATFLALLLRAATQARDAASHEQAAGYLQAAHALQQRCPIDARQAFTLACMATECDMLLSRTGRAEAGIAACHRHARTALERATAHRLAARLNTLRSDYPAAIDEAMRGLQLLGIELNHGDEPQPVERQYATVRRLIEQRGRHCLEALPRATSEPVEVAIALLATLSSSFFVRDEIRFLHLSRILELSLAHGVAPGSTYGLAWFGVMCAERFAAYHDGHAYCLAALKLIERHGFECDLTSTLLALDQVSAWTSPMEFARRTALEAIDSANLSGDLAMACYACCHAVSDALVMGKHLDAVNQEVERGLATVRRYGYRDVEFILLAQQAFVADLCGAPATHDERNAVRLHDTPSACISSSTTRFFQSLFAGMAAFYLGDIGQATAHLEQADGHVWAVPAHINLADFHLFQALTLGSPQAPGTLEAKLERLARLRLVFSQWAQFNPVTFRNKVLLIEGLIARLQGDGLSAIRCFDQAQIAATAAGFIHEQAIAHEQLAEVCIPSGLISGANLHLRIARDCFHLWGATGKVRQLETLHPFLRTQPIQETFCTTSQANLDLEAGIEAARALSEETLLEGLIETLMGQLTQHAGADHGALLIVSGAEYQMAALADIDDAGLRVSMEQCQKFMTQAPRSIINATLRTKKTLLLHDAQVDCPEAFRQDLHARGARSVLCLPLVIQGVLIGLVYLENCLVPNLFGGQRLAMLEILAAQAAVSLQTAKFYTRLAEEHQTRAQMEAELRRSRAELARSAHLQVMNELSASIAHEISQPLLGIASNAAASLRWLRRDTPDLDEAMAGLEDIRADSERAANIVRALRSLAKQTPMQFKTLKLDDLILQVIRLASADARKSAVKLQAQLDAGVTVLADPVQIQQLVFNLLTNALEALAGYRGDGVVRISSCRCGDEVQVQVDDNGPGIDAQDREQVFEVFHTTKPGGLGMGLAICMSVVQAHGGRLQALDSELGGCCIRFSVPVAGTQAG

SEQ ID NO: 2249 - protein, 1695 aa, synthetic construct; identical to SEQ ID NO: 2248
  REGION 1..1695: note = TnsF-Tn7 System Protein

SEQ ID NO: 2250 - protein, 295 aa, synthetic construct
  REGION 1..295: note = TnsF-Tn7 System Protein
MTHYKHIHPEFRAVMLQSDQERIDFLYEPRWIGYPVAQKLMDLLHHLMSVPKRPRMPNLLVVGSPNNGKTTILARFDSLHGQGYTDSEGEPVKPIIRIDAPPSADECALYCAILERFWTPYRTTDSKLKLRYQVIHQMRQNQVRLLLIDEFHSMLEGTPRQQRGMMNVIKSLCNELAIPVIGVGTEDAVRVLHTDPQHASRFDVFTLQNWRMDVEFQRFLKGFESVLPLREASGLFTPHLAGLLHGISAGNTGDLHRLLVECAKEAIGSGREKIDADIIKSKSWLQPTRGIRELM

SEQ ID NO: 2251 - protein, 295 aa, synthetic construct; identical to SEQ ID NO: 2250
  REGION 1..295: note = TnsF-Tn7 System Protein

SEQ ID NO: 2252 - protein, 511 aa, synthetic construct
  REGION 1..511: note = TnsF-Tn7 System Protein
MAYKSCSYPFGSGRRWRMSIDKKYGRYCDGCGDTIQKAHRIWDGKDFCATCYKRHFVSRPCLRCGASARVHKNSHEDAICRKCSLEGRTCQRCSKPIVGKAGMISAGMPVCPSCTPYFREPRPCEQCGRPSTRLSSMPQMGIHAKICDRCRNSASCKTCSVCKKSRKVAGYTDANSPYCAQCVPGQESTHACPGCNTTLPGAGNAKCRPCINKDRILKDAVMLAATLDHAWAKDFCVNFAHSLWERKKDSPGLAKLYQAHQPMLQRLDATYAEIVEISPDTLLRDFGTATLRKHLLVRRYLEEALSIKVCQSSREDAADRDRIKVKLAEHGGKPWGPLLKEYASWLEGLEISTRTRRLYIATAATFCAEIKVGPSGWTESQAQRHLLRHPGAYLNLLRFVGFCSEIRGWRVVMPPQSHVLNIRTKPPATVARLRKLLDMVDAEGPEHVQDSVLCRVLALSFGLTIAKMKSIPRENFTSDGNCLKFKVDSDSVEIPTGLLAIAQAYLQRMAA

SEQ ID NO: 2253 - protein, 640 aa, synthetic construct
  REGION 1..640: note = TnsF-Tn7 System Protein
MVGISRNFFKVDVGTLVQCEGRGYRVTHLISANSVVAEDLETKESKRLFIDALKILQEKGESDEKHEVAAPDSLQYSNEEWAEAQRRLKAIKPLLQEPIRTRARVEIIAKEHGVHAATLYKWLNLFQSAGHVSVLIPSKRGRKTGTTFLEEHLETIISSAIQDEYLTKQRGTPQDVIDEVIRRCRLARVVPPHANTVRNRLAALKPASTLRARGFRDKARDKYDPIQGNFSDGTYPLAAVQIDHTPTNVVLVDEKYRQPIGRAWLTLAIDTFSRMVVGLFISFERPDASAVGICMARGICTKREYLAQLDVPGDWGVWGVPAIVYVDNAKEFRSMALERGADEYGIDLQWRPVKTPNFGGHIERMMGNVGNHDRKLPGATFSKPEQRVGYDSDAEAALTVREYEQKLVDFIVNIYHQRRHSALGMSPAKRWELGVNGDGQSMGTGSMPIPENPVRIEIDFMPFFERTVQRYGIQIDNIFYYSRALDRYINAADPDAPDTKRNFLVRRHPSNISKIYFLDPADNRYIEIPYRNIGHPPITIWELRHVLAILKKQSEDDIDEDRIFAAIERMRTRVEQAVATTKAARRQQARNPASESRPVSAAIPGHTAAAAKPQKEPAGAAADDPFAMEILPFDQVTSQR

SEQ ID NO: 2254 - protein, 241 aa, synthetic construct
  REGION 1..241: note = TnsF-Tn7 System Protein
MNIAPPQEESQVFTVASINRNDSGSSPRPGEISLAHHGVLFLDEIAEYPRSVLDVLRQPMESGHIVISRAARQARFPARFQLIAAMNPCPCGLHGDPQGRCRCTPEVVKRYQARLSGPLLDRIDMQIHVSALSPAELASQQPGESSAAIAERVAHAFERQWQRQVKPNSQLGGSQIDRYCQHDDAAAQLLQAAMLRLNWSARAYHRVLKLARTIADLADAQHILQAHVAEAVQYRRVLGGY

SEQ ID NO: 2255 - protein, 302 aa, synthetic construct
  REGION 1..302: note = TnsF-Tn7 System Protein
MNTQAQKNPQFPHLSADTGDAMYLTTAERIEFCRQDKWIGYTRAEWVLNKLDELLIYPRTMRMPSILVVGRGGNGKSAILERFLNRCPGQVTASGDPVMPVLSFDMPETPDEGELWSTILWQLGISHREKDPPHLKKREAKSALQYAQVRILVIDEFNNLQNMGKRAADILAAIKGISNDLKLSIVAAGTSEAINALNTDPQMKNRFEPLALPRWPLNADYLRFLASYETLLPLAKPSNLISRPIGMKIYGMCGDTLGATVKLLKNAGAYAIENGIEQITEEVLDSVKWTGPEGWDEVARTI

SEQ ID NO: 2256 - protein, 302 aa, synthetic construct; identical to SEQ ID NO: 2255
  REGION 1..302: note = TnsF-Tn7 System Protein

SEQ ID NO: 2257 - protein, 288 aa, synthetic construct
  REGION 1..288: note = TnsF-Tn7 System Protein
MREHAEVFRDFARWLCTEVGAQKAAVTLLKYLQFFVEVASLGVKTPPYPELLQYFSTMGLRRNLLPMRFFELTSRVVVDEQQKQDASDQRRIEATLSGAPSASCLRELLHQYHGALRRRLAAGKTSLRSVRLSLTPAAALLTIAAESGRSLPTQDDLLQYLSSTPGQWAAVTGFVNFLSVEHGAPLQMPAKTERRSTFRLRRGLERAIAKQLESDLSEPAARAALLESTLRYFHHMPARVAKQAVAGGSLTASTDGSAFVFHAGTSYRLPLEVSRRLLASPVKSSACS

SEQ ID NO: 2258 - protein, 288 aa, synthetic construct; identical to SEQ ID NO: 2257
  REGION 1..288: note = TnsF-Tn7 System Protein

SEQ ID NO: 2259 - protein, 646 aa, synthetic construct
  REGION 1..646: note = TnsF-Tn7 System Protein
MDNKNIDVGSTAGIALNRQKLDLTPGKLVSQNGVVLRLTEILDFDTVVGVEVESGRSRALRIQELKPVTDASAELQRVAACDAEDIADEDWKIAERRYAAIKPLINTQDSGRRAVEERAKEVGVDPATLYRWLLRFRSLGVVAALIPRKRGWKPGNSRISKHAETIIQEVIKDTYLTHQRSKPQKVVLEVMRRCQQRGVEAPHANTVRARVSALSERVRLSSRGFKERAKNKFMPAAGTFPHADYPLQVVQIDHTPADIILVDDIHRKPIGRPWITLAIDIHSRMVAGYYLSFDPPSETSVAMCVAHAILPKDEWLAVHGVDARWDVWGVMDKIHTDNGADFRSGNFKRSCLMHNIDLEFRPGAQPRYGGHIERMLGTLLHEIHDLPGTTFSNIKAREGYDSEKNAAMTKSEFEEWLVTLICKVYHQRMHSAIGMTPAKKWEIGMFGNADASGRGLPPRPSDRHALLLDFLPSFERTIQADGVTIDGLNYYTDVLRSWINAADEKSPKQKRVFTFRRDPRDISTIWFYDPDSKLYFKVPFANQALPSMSIWEYSQAKAVARKEGMRSVNESQVLRAITELRDKVEESKEKSKKARRMSQRRREHEKGISPANPAGVSKVLPPSPAAPAQSFAGLLDDDVAAFDDIA

SEQ ID NO: 2260 - protein, 379 aa, synthetic construct
  REGION 1..379: note = TnsF-Tn7 System Protein
MAPSYSWHPGAFRLASRWAVPTSLFPDEILSSWLLRAALANGCDPLAFMGAIWPMQRVWTMDLDRHPKAELIDKLSDLSGATAASLKHATLHPIAQLVLSTAPPSKQSWPWILSVGSRNRRRIGRAQYCPRCLATDESPFFRLQWRFAWHSVCTRHDCQLLEACPHCSSALEPHRILVTGNGLDYCMECDRSLSREVPSQTPLPDAQRLQLATDEVLRAKQTVYLDKEISVASWFAVVKFYIDLVRRALRAQTISLEAFAPELTVTFRNDLGFVPLEKLALRQRAHLLDCAGRFMLLPFEQLVSEFSAAGLSRQAAFPSGMPDVPPLRTLAEALPDQGIRRPVTQRNPLRASHFRPRSQREVERMMRVLRRRTSADTDS

SEQ ID NO: 2261 - protein, 296 aa, synthetic construct
  REGION 1..296: note = TnsF-Tn7 System Protein
MATYDHLHQDVVAAMALSSAERIAVMDQPRWIGYTRATEILDVMQGLLNKPQRPRMPNLLIVGDSNNGKTTLIRRFGDLCGKSFVDENSNPVRPIILAEAPTSADEKALYISILERFWTPYRATDQVAKLRYQVIHLMRACQVRMLIIDELHSLLAGTATKQREVMNALKLLCNELCIPIVGVGTREAVRVLHTDPQHASRFDVASLPTWSLDKDFQRLLASFERVLPLKNPSRLHAPELASKLHSISEGNIGNLHRLLIECAKEAIDCGSDQITVEIIEKKKWLRPTRGIRELFG

SEQ ID NO: 2262 - protein, 296 aa, synthetic construct; identical to SEQ ID NO: 2261
  REGION 1..296: note = TnsF-Tn7 System Protein

SEQ ID NO: 2263 - protein, 520 aa, synthetic construct
  REGION 1..520: note = TnsF-Tn7 System Protein
MTQIPTHDPAQEIRIEAVHRGFLYQHLYAAACLLTSGQIGAISVVVERDEDIELVTPTGRTYIQVKTRGQAIMPSDIKSALERFDALRQEHAQGRRAGRATFVVVVNRALGPTLADQARTGQLAGDVNILWPGRVCTDALGQLPPAWSGIDEAVSWFVDRAATVPLAMLAPDSLVWKLAGRVQAAAAGEAPHADHTFLVADLPSLLDQILIQLQDFPAPPEQYRPQENEPQIDFSSRVRIVSGFSGAGKTAWASQAATFSRHNCAYFDCSETPGEALALSLVRELAAKLVGADPDAVRKVLLPGATGVESLRQLDIYLMHEGLSPIVVVDNVHRVSAESLKRMVDVTSALKFVLLAQPLGTLPEIEALLGLAREPLNGWGVDDVAAAASAWGCRGDAATMGRLKTLTAGMPLFVRSAATIAREEYGGRIDQICDAVDALTNLAQTAQEVILAKVFDAFPHAGQQTIAVLSLSDIGLLPAEINKLLDAALEMDERAVAGVIRALRAAGVVEIYGNKEIRLH

SEQ ID NO: 2264 - protein, 520 aa, synthetic construct; identical to SEQ ID NO: 2263
  REGION 1..520: note = TnsF-Tn7 System Protein

SEQ ID NO: 2265 - protein, 212 aa, synthetic construct
  REGION 1..212: note = TnsF-Tn7 System Protein
MRFLAETGAVTVIAQLRDQDTERRRLAAILLEPADSWSAQLLNEYVDTLKAKMAHSRTDLRSVRLAARAAANLLKSAQLKLGALPTQKSLESFWRGLPGQVAAATGFIGHLNKRHGLELQVKPDARWLTRARRQKAERELVAMLSEAVDDDFEARWVVKGLAYFHDLPRVSRKSLIFQPHEYRGVAGYNVTHEEKTLWVPSASSYQRGDRPL

SEQ ID NO: 2266 - protein, 327 aa, synthetic construct
  REGION 1..327: note = TnsF-Tn7 System Protein
MASGEHLKALLRSHIKGDDSHFLAVAMQMAAHEAKQGHGKLAEDLRALIDSAKKNRLPSGQPVPIGQPRGELSNLLSTALPKTRFSEMILDDTTHARLGRIISEQRNFEKIRAHGLSPRRKLLLVGPPGTGKTMTASALAGELGIPLYIVRLDSLITKFMGETAAKLRQVFDAIRDTRGIYFFDEFDAIGSQRGLANDVGEIRRVLNSFLQMIEQDQSNSLIIAATNHPEILDYALFRRFDDVIEYGLPNQEQTKAVLKSRLANFSKSIRNWSSLCKVADGLSYAELTRAADDAIKDAIIHDRPEVASKDVERHLEERKAFHGRQRS

SEQ ID NO: 2267 - protein, 327 aa, synthetic construct; identical to SEQ ID NO: 2266
  REGION 1..327: note = TnsF-Tn7 System Protein

SEQ ID NO: 2268 - protein, 212 aa, synthetic construct; identical to SEQ ID NO: 2265
  REGION 1..212: note = TnsF-Tn7 System Protein

SEQ ID NO: 2269 - protein, 182 aa, synthetic construct
  REGION 1..182: note = TnsF-Tn7 System Protein
MRFSHRVESVIAQPVQVDFIDSLGRAQTYTPDFLVHYRQPGGVDYMDYFKPMLVEVKPAYEWRKNWRTWLGKWKAARRYARQEGWTFSIYDESRIRGLPLDNITFLERFERLEFDREDIDMVLKTLQEMEFAPVHYLLARHFKGVYRDRGVALLWHLIATGRVECAITEPLNEYLELWVATP

SEQ ID NO: 2270 - protein, 640 aa, synthetic construct
  REGION 1..640: note = TnsF-Tn7 System Protein
MNIYEIDTDEHLEPFEPSRERVRVEVGEMVRCDKQYYRIVQLLDFQNIVGVEVESGRSVSLRIAELQPVEQERVEGLYVNYDISTISSDEWAIAQQRFSAIRPLLRDSVLPRGSVEERAKEVGVDTATLYRWLERFQSWNEVLALVPRKRGWQSGNSRLSAQADKLIDDVIDQHYLTIQRRTVQSTIKEVETRAKALGIPPPSASAIRARIKRIPERVVLRRRGYADQARNRHTPSVGKFPGADYPLAVVQIDHTPIDLIIVDDRHRKPIGRLWLSLAIDVHSRMITGYYLALEEPSEISVGMCLAHSILPKEAWLNLHNVRGEWPVWGFPRVVHTDNGPDFQAENFRRSCANYNIENQFRPVKRPKYGGHIERLLGTFMRELHELPGTTHSNVPDRDGYDSDKHAALTMGEFEEWLVKTIILYHNDVHSAIYMPPARKWHLGFFGSRGVDALVSIPPRPADQLTVQLDFMPSYRRTVQHYGVQLDVYYYSEALRHWIGTTDPETGQARKFVFRRDPRDISVIWFYDPVLKQYFRVPVANQAFPAATLWEFRAAKKQAVDEGRQHIDEALIGRLILERRQIVEAASASTKKARRDAQKLKVHSKNTTPARPVKAPVKAVPSTPTDEGLLLDDVDLIGDIQ

SEQ ID NO: 2271 - protein, 373 aa, synthetic construct
  REGION 1..373: note = TnsF-Tn7 System Protein
MEASYTWHPGARCLSPRWPLTPPILPDELFSSWLVRTAHAHGCQPRTLTSVVWPGTNAWVFDLDRVHSWVNNDVLAALTGLSAQDLLTSTLWPIIQLLHPNHEVQQSSLLLWILPLGCRSGFHAGGLMCCPRCILDPFPYYRQQYRLAWHTACPWHHVMLIDRCPHCYSALQPGRLPADQPLSRCYHCGHSLDIACPEPAIESALAFQAFADAASHSTTVYGRVPLSFSEWMCIARVMISFLKNATRQLTIGARQFCQAIGVDASQLKSSSLGLSFEYAMPAERAGLLGQAWVIMQAGPERFVAFAAEAGLPVTAFPLPALGVPEILKQMVSALSQHSPHKPGRAGPSHTRAPLEVWHMWHRLQRRTRRNDIS

SEQ ID NO: 2272 - protein, 296 aa, synthetic construct
  REGION 1..296: note = TnsF-Tn7 System Protein
MTEYAHLHADFRPVLQLSARDRIRFMGEPRWIGYKAAHHILDSLECLLEAPKRPRMPNMLIVGDPNNGKTTIVRHFEKTHGQGYVDENSEPVRPIILAEAPPSAEEKDLYIAILDRMWMPYKTTDSKVTLRFQVIHALRELKVRMLIIDEVHSMLTGSATKQREVMNALKMLCNTLVIPIVGVGTPDAVQILHLDPQHASRFDVIKLETWKLNSDFQRLLKAFEAVLPLKQPSELYKPELAQLIHSISGGNTGDLHGLLLECATEAINSGKECIDRQLIESKSWKRPTRGIRERVV

SEQ ID NO: 2273 - protein, 296 aa, synthetic construct; identical to SEQ ID NO: 2272
  REGION 1..296: note = TnsF-Tn7 System Protein

SEQ ID NO: 2274 - protein, 348 aa, synthetic construct
  REGION 1..348: note = TnsF-Tn7 System Protein
MNKQICFSCKYTRPCYFYDLNKKPICNICANEVYRCCKTCGKKIPAGFGNFCNGCTSMNGIYRKLRSYEFKLQNTMKLFVKFCLWLARYRDPHYSSININRFHKHFMIIDHTIMKLQKFPSFKDICSEYINISQSCSSTVLKFLKIKKLINISNQDKKEYHLQKTIHTYFKKHKHSQSIFSFAFLKYHEYLNSKPKIALSAIRQALTSANSLIEILIFYNLKDFNKEAISSFIFIYPGHKSSITGFINFLHKKNFIDYSMKTLPRTELTRPSLSEKHLEFQLLRILRFKKHSYKQKQRFLHLSLSYFHRLQLPKYSYISNRILIHTNGKYYIKLYNTIFYIPLVLQST

SEQ ID NO: 2275 - protein, 568 aa, synthetic construct
  REGION 1..568: note = TnsF-Tn7 System Protein
MIGYIYLTIKAFPEDNVPRVVCLYTGICKGTITDPQAYVLIRKFIDGVVDLDSTEFIKVSVSLLDDCRMGSVWVNQKKIANCIEKIDTGSDNLNAIVEESFKVDFSQKDCSLYKLGKNIDNRVYSFIFGDTRKPCDQIAKSKMVFLSTTNGINIHIPSLEVLTSMICPKDKVLRSKLLQKSIYDITKEYLLKFERDEDIYCIRPKNGKKDSNLVLLAYLALNHETKRKISKIYNYLVKSKEYTFDPVMVGILPYHPEKVELEVRGIRFGSDFLVLQVIDCSLPLEKSICVEEVEYISNGKYKDEKPFGVRKNSERKESLPIINNNPGMNAGTVYSTSEILNRIGEPVNIIRKTLLVESENNQPRKPLKENEALGIGTGDESSDKASENLAKLRDSEACEDETNLETFYKTLQDTVDGEEILSVCCINKDGKSSLDFKAIDFPTTNHGKKVHWAIRNGRARKFILAKVECVNNRSAYILEIEKTGEESSLYTLLFNFKERVFNPKELYELVLFIIRNRGSYTKREGRTNVFRRVPLYKYLLISHKKINDSYKLKLVRDIKKGINKDIFM

SEQ ID NO: 2276 - protein, 230 aa, synthetic construct
  REGION 1..230: note = TnsF-Tn7 System Protein
MKIKSNYRDIHYTYSSVSGNYPFRLEKTISFESTLERDFITLMEFNPLVLDLTEQPITFQYNNFNNREASYTPDFKVDFSADTSLPSSYIVEVKPRKFIKANWPKLREKFRLATKYAKENGYIFKIYDENKIRSQYLENIKLVNARKYIEYSLEEEARILEHLSLSGYLSIDEILEYLYVTREQKGIALGQILNLIAKHCICCNMNLPISRSTIIWCKNKENFYESIHYR

SEQ ID NO: 2277 - protein, 619 aa, synthetic construct
  REGION 1..619: note = TnsF-Tn7 System Protein
MSQYTIDRSKVVIKPKQYVKVKNDIFRITQTIDFETVVGVNIKTGKAKSILVHEIKNIIDKNEIISNEQDVSSYTDTQWQEIERRFEIIKPLLGVSTTKEDIETVAENNNIHFTTIYRWLRNYRISGAITSLLKQKPGSEVGSSRISQIADMLIEKTIEEYYLTKQKPCIQRIIELVHIECHNKNITPPSKNTIRSRIAKISNEERLKKQGNKDIARNIYSPAAGSFPHATNPLSVVQIDHTLMDIILVDDENRLPIGRPWITLAIDVYSRMITGYYLSLEPPSEASVALCLTCSMLPKDKLLLQYEVDADWPVWGIMNTIHVDNGADFRSDSLRKSCLSYGINIEFRPVGKPNFGGHIERLIGTIVKKVHSLPGTTFSNISERGNYDSDKNACLTFKEFEKWLLLFITKVYHQKKHSSLGMSPLQKWEDGIFGTSEHTGCGYPTKPNNQDTLLIDFLPIFNRTIQRAGVNIDGLNYYDNCLRPWINHISSSSKQKEKFIFRRDPRDISYIWFFEPQLKQYFKITLADQSIPPISLFEYKSVKSTLKTQRAKITSSNVLLALEEMQHHVKASASVSRKIRRQKQRKDNIKEQLTIKKTPITNSTNHEDDLWDDDVEAFD

SEQ ID NO: 2278 - protein, 355 aa, synthetic construct
  REGION 1..355: note = TnsF-Tn7 System Protein
MDSEKENKWPIILQFKKNELLSSWLIRNSIANGSDPINFTGAIWNNWRCWSIDIDVNISTKYLKALANSTNIPISRFKESLLHEIFLKINKSSSRYSWLVPLGSRNRIKTNGYFYCPECFKENDFSLKKSYRLAWVVTCTKHKCLLSNTCPNCSSPFLPHILSFDKGKVQNCFYCDYSLANYKSVPADKLVIQIQNHLTHSIYAKAFLLFGTKCCKEQFELIRVILSMIIRAIRSPKPFSYFLKRFAFDIELKSCSFSNKAFEYRNILERYTILKILARIAFLTKEELIQVLKDSSISKSMFIQKESSFEIINFIKGSLVDNSKNSVSKKIVKKEFIPTPEDIVDNMLKDLISRL

SEQ ID NO: 2279 - protein, 265 aa, synthetic construct
  REGION 1..265: note = TnsF-Tn7 System Protein
MLFISTNSWIIDIFYGRLSLILGIVSNKVIDLYRSILALIVGIDRGSNPMPGEISLAHNGVLFLDELPEFDRKVLEVLREPLETGIVNISRAKCQVEYPANFQLIAAMNPCPCGYLGSQYKECSDSIQSIRRYQSKLSGPLLDRIDLQVEVLELAKEDLTNQELRGEKSSIIRERVKKARDIQITRQGKINSMLTSKELDEVCDLDEESKKMLTLAIEKLGLSARGYYKILKVARTIADLSGCKKIEKLAIQEAIGYRKMDKFFK

SEQ ID NO: 2280 - protein, 298 aa, synthetic construct
  REGION 1..298: note = TnsF-Tn7 System Protein
MSEYLHLDEETKKIINESTDKKIDYLYRPVWINYPKTIDIVKLLNSLLRRPKQPRMQNLLLIGESNMGKTSLINYFQSLHPCQIIEDTEKMSHAQKTLVVAQSPVSADEKALYIAILDKFWTPFRTTDTTAKLRHQVIHLMKQCDVKMLILDEIHNLLSGTAAKQRIVMNVIKNLSNELFIPIVGVGTHDAALILHSDPQHASRFDIVTLPKWDLNKDFRSLLKSFEKGLPLRIESNLASKEKATLLYTISEGNLGDLHKLLIECCITALETKTEYISIEIIEKHKWVKKTHGLRKRK

SEQ ID NO: 2281 - protein, 298 aa, synthetic construct; identical to SEQ ID NO: 2280
  REGION 1..298: note = TnsF-Tn7 System Protein

SEQ ID NO: 2282 - protein, 835 aa, synthetic construct
  REGION 1..835: note = TnsF-Tn7 System Protein
MPTLFPTMKREAALDDIAELIHRIEPGLPRPRILQVVARTVAARPAVPELLSVLQNDIRFLTSGDDTMPSSLAGIIDQLIHEGATTLKRPRCHRCHEQRRLPNRRGGHGICASCYSLDRRVHIECSRCGQRRKRRAVVDGQEWCGTCWEGQLGQVEAVFRTAVLGSGCGITARQFETVAATVHSTWKAGAILRLSLELNTRSEQWFAQPAAGSVLFLRFHAALEKAGVKVTPVACGRCGREATLANILGGLRCCARCYSASKRETCSQCGREQVLVLHAADGTGICQTCMKKLPDRTATCIDCGQRRYVAWNGPDGPVCSKCRPKHRIDYCPGCQRQKPCLFAGTSRARCHECSRRKETCALCGTQVRAATRNDQGIAICGRCSRKPEPCSDCGRHRIVVGRAQGKPLCDYCYPKDPVSFRDCGRCGRHENLQVADLCQHCAADDELERLVPLEARANSPVAQAIHDLCQDAKPQSILAAARNSSMGLLRSIIDSQIIPTHEFLDHAGADQATRAVRSLLIDAGLLPYRDNNLARFEEWITRTAQRITDPQQRAAFVQFARWRHVRELRKRKSPVHSSLTTSRRRELRLVMELLAWLQQQNRALVSLTQSDMDRWRANGSAERHRVKPFLAWAHANGRVRSIEILRKPGNALDVAGTPANERAHLLHGILDPGCTSQVAVRFAAALVLLFGAGPQQIVELRVSDISTNDERVYLKLGNEPLLLPDALVDLAIGTHENRMAPRLFAPTRDTDWLFPGIRTGYPLSASTLIGSMKQLGVSASRGRTGAMAELAQELPPAILARLTGNSTTTAIRWSIAVAASNARYAALAMPATPLG

SEQ ID NO: 2283 - protein, 835 aa, synthetic construct; identical to SEQ ID NO: 2282
  REGION 1..835: note = TnsF-Tn7 System Protein

SEQ ID NO: 2284 - protein, 193 aa, synthetic construct; identical to SEQ ID NO: 1033
  REGION 1..193: note = TnsF-Tn7 System Protein

SEQ ID NO: 2285 - protein, 193 aa, synthetic construct; identical to SEQ ID NO: 1033
  REGION 1..193: note = TnsF-Tn7 System Protein

SEQ ID NO: 2286 - protein, 213 aa, synthetic construct
  REGION 1..213: note = TnsF-Tn7 System Protein
MIITTGSLKGGVGKSTVTVNVATELCRLGRKVIVVDADPIATTSRWIGDREERSPDHALIPGIQKRGNLRQTLLELDSTYDYVLVDVGGYDSPEMRTAATTSDQLIVPMKPSPPDLDILPEFVDLINQFLDFNPELSVRGLFTQAPTHSTSRKLGDSKSILLDYPEIPLFDTTLYQRAAYMDVMPLGRGVVEWSTSKAKAEVQVLVQEMIANG

SEQ ID NO: 2287 - protein, 213 aa, synthetic construct; identical to SEQ ID NO: 2286
  REGION 1..213: note = TnsF-Tn7 System Protein

SEQ ID NO: 2288 - protein, 342 aa, synthetic construct
  REGION 1..342: note = TnsF-Tn7 System Protein
MLEGWQMRQRGGRNLKESSVRGTVSQISQFQAFTNDWPWNWSAADFDEWMMHLVAVKQLAPSTIRTYQYAVREFCSYLCSEHYGWVEECSSRFGNYPSQVCHEWNSVAHLQEYEGRPGRRPMSRMEIQQLLDRADERVEDCIAARRKGAVSAYRDSTMLKVIYGWGLRINEAVQLDVNDFYANPHHPEFGRFGVLQVRHGKSSAGSAPKRRSVMSLHPWAVDAVRDYVENVWPQVRTKDSDALWVTERGTRTSTHELRKTFGQLRDGLGLEKALSPHCLRHSYVTHLIELGIDPVFVQQQVGHAYQSTTAIYTAVSGDFANKMMHQALAKLLPESPKTKGAT

SEQ ID NO: 2289 - protein, 116 aa, synthetic construct
  REGION 1..116: note = TnsF-Tn7 System Protein
MKTIGYEWRLREIMAAAGIFTTTKLNRELKERGIELSSSQAYRLATEKPERLNLHVLVALMDIFDCSADDLVQRVELRHSSAKTGTEDQDTTGTADFLRKEGFRPKRANIVPDHEA

SEQ ID NO: 2290 - protein, 706 aa, synthetic construct
  REGION 1..706: note = TnsF-Tn7 System Protein
MTAARAGREPRQTVLDRAAARVCAVVPGLDPTAAARFVERATVAHTLRRLEAHLAHHPDALTSGSSDAPITLQRLAGLLADAGHPTVVVPGCLRCGKPALLPHLVDGGRVCDHCRRFYHRAPCGRCRRDRPIATHTDRGDPLCHSCIPRRREPCGTCGRVLRVQTRRADGAAVCPNCYRTPQRRCCRCEHITPTYAHTDHGPICKSCYRRPLRRCGACGEQRRIDRRATATTPDICIRCRTRRLRSCTVCGTAYPAHPRAQHPVCLPCRDAGHVLEPELTESPDRIRRRRHETSHDALITTLHAVITDPHRGIAAPLTALDEVFRTVPNPEIIRYWLHRRRGGAALLHQIALRAHDEPITHQLLDSYPHSAALPRLRALFVYAGILPERTDLLERIGPWLDEILEGRPAHHGALVCPFAHWHVLRRARRRARSRPVTDNAAAYARSQITLALDFLSWLDEHDTTLATATQADLDRWLDGGSRYRYFLTNFIAWAAAHQQCTDLVVPQPHSGEPSHIITDDDRWAMLARCLHDETLPIQVRASGALVLLYGRTITSIADLTTDDIAGAVADADADTYLRIGDSTVLLPPALATLLQTLSDDAAGRAAFQSLDPTTRFLFQGRGIGKPTTPKVLARNLRAHGIDPRPARHAARAAWASEIPAPIAADVLGINITTATRWAGRTRRDWTTYLAARTDTAGHTHDNPGKT

SEQ ID NO: 2291 - protein, 706 aa, synthetic construct; identical to SEQ ID NO: 2290
  REGION 1..706: note = TnsF-Tn7 System Protein

SEQ ID NO: 2292 - protein, 476 aa, synthetic construct
  REGION 1..476: note = TnsF-Tn7 System Protein
MVDASARALRQAAADRLAALDERGELTSDHVRLSAQTLAVAERTVWRWLAARRAGIGPVPRRRFRLDDGLRVRLAYWRGNVMALHRELLAAEKVGGAPAPSKSALYRAVAADISAGDRAGLRAGERARRRFDVFLQRPPSHRNAAWEADHVEAPVQVEADGRLVKPWVTWFVDAAHDVILGVAVTPRTPNRESVLAALRAAVMRREPYGPAGGLPAVVRIDRGKDFLSRTVADALGALAVRVDDLPAYGAHLKGTVETINGAAERMLFAGLPRYTHRQTRVSGGPVDPDQPPLSFEAFTAEVLSWVRWWNTEHILTDLGDRSPLQSWSDDPTPIHDADETRLWMFTLDDDRRHRTITTKGVAFGRGRHYIADWMVGLVGTQVRIRYMPHHTGEIEVFDAGTGVHLGTAVLADAAPPQTRARVQQARARKARAQRRRGLCCTPPSSSRKPAPFLLTGCSPTRSGGPADCTAPPATAG

SEQ ID NO: 2293 - protein, 375 aa, synthetic construct
  REGION 1..375: note = TnsF-Tn7 System Protein
MDSVVDPPGAAHLVLADAVVHLDPEEAVFEAMLAGWQRQQRTRFLSESGTIGPRVAVVRRMAEFTNSYPWQWEPADGEDFITYLRSQTRARPIVVSTARSYEMAIALFVEYVTDRRYGWPAVCEQRFSRVPQRIFHEGNTIAHVADVEGQPGRRPLTYDEVQALFDAADARVEQIRGRGRKGALTALRDAALLKTVYAYGLRRREVHGLDLADRRHSPAAAQYGRYGAWFVRWGKASKGSPPKRRTVLTVPEMDWIVEVLEHWVTEVRPLLRPGPLAAVWVSERAGRMSMRSINEAFVAARQTAGLPTELDLHCLRHSYVTHLIEFDYPERFVSEQVGHRYASTTALYTGVSDEYRRRLIRRALHSRTELWEQRR

SEQ ID NO: 2294 - protein, 108 aa, synthetic construct
  REGION 1..108: note = TnsF-Tn7 System Protein
MIRKMGYRWNLRRRMAEQDMFATTDLVPLLADRGIHLSREQVYRLVTAPPQRLSMDTLAALCDILACTPNDLIEIDVVNTPVAKTVGPAERIVPPQARRTTIRRPRAT

SEQ ID NO: 2295 - protein, 724 aa, synthetic construct
  REGION 1..724: note = TnsF-Tn7 System Protein
MLICSCHERRRAAEQLATKRADQLAIVTGLLLARDPTVTPESVGDLMAQVAPAPGARAALTRHLVAHPEALTAGGSRMPKVVAEFIYAAIAAGITGLTSPGCALCGRPRTLVHTHGDSERICTTCYSRLLTATCSSCGRDGHRIRSRDVDGQPVCPRCHDRARPLEVCAGCQELRGLKRSTRDGLGYCRSCIARRAPTEPCSICGRDRRVNARTATGGAVCTGCYDKTRTGTVACDECGQVVPLAARADGRIGTGTGKNLCAGCYRHPERECGICGRTRRVALRATTVSPDICATCYQAPIVDCSVCGQHALGRRATRNGRPWCFGCQATDRIDRLLAGPDGTIPIGVKEVRDVLVATHRPRSILNNWDRIESLTLLAHLARQHDELSHELLDAEGDRFSVGYLRALLVATGVLPDRDEHATRLRRFAAAVIDEIADPRHQQTLGRYVRWHVIARAKPDRHGRLNATISDRCRQEIRTAQRFLDHLTRRGRTVDDCTQADLDTWLSTRRATRIRFPRWLLDHGHLPGLALPDAVPAAGPRTQLDQDEHWALVRRMLHDEDSASIEDRAAACLVLLYAQPLSKIVSLTTDDLTLDDDGTYLRLGAEPLLLPPPLDALVTSLPIAKPFGAASTLADQRWLFPGKWAGHHQNPTSMMGRLNKLGITTRTSRNSAMLHLAATVPPAVFASLIGISTGAATKWAGYAGSNWTTYAANRTNATANPPQNQ

SEQ ID NO: 2296 - protein, 724 aa, synthetic construct; identical to SEQ ID NO: 2295
  REGION 1..724: note = TnsF-Tn7 System Protein

SEQ ID NO: 2297 - protein, 1966 aa, synthetic construct
  REGION 1..1966: note = TnsF-Tn7 System Protein
MSLHKLTAGSGYDYLTRQVAAMDATDKGHTGLASYYTEKGETPGVWVGSGMAGIEGLDAGDVVTADHMQSLFGSGHHPLATQRTKELDLRIGRDDVARPTEGDYKTAVRLGTPYKVYENDISPFRIEVAKRIAALNEAAGLPGDWPVPAADRAKVRTEVTTEFFRAEHGREPVDARELAATIAKHSRPKTNAVAGYDLTFSPVKSVSVLWAIADPQTAAVIERAHQAAIKDALDFIESKALFTRRGTNGVRQVDVRGLVATAFTHRDSRAGDPDLHTHVAVANKVQTLDGTWLAIDGRPLHKAVVSASETYNTALERHLVDALGVRFEERPNEDARKRPVREIAGVDPQLNRRFSKRRLNVEDRRKVLAAAFQATHGRPPTPVETIQLSQQATLETREAKHEPRSLAEQRETWHREAIEVLGTPQRVKQMVHGALNPKGAARSLADSAWFAKTTDRIVATMEGARSTWQYWHVYAEVQRQVRGANVPTTQVSQVVDLLVSEVLDGRSVSMARPWDTISEPVELRRADGASVYTQAGAELFTSGKVLAAEQRLVEVAGRHDGYAVEASSVDLALLESTANGITLNAGQATLVREMATSGARLQLAIAPAGSGKTTAMRALASAWADGGGTIIGLAPSAAAADALRSQIDTQTDTLAKLTHSLEQARESGAAMPAWVAGIDSFTLVVIDEAGMADTLSLDTAVSYILERGGSVRLIGDDQQLSAIGAGGVLRDIRATHGALQLTELVRFKDPAEGAASLALREGKPESLGFYLDRDRVHVGDLATMTEDVFAAWQADRAAGLDSIMLAPTRDLVSELNQQARAHRLEGIDPADVAASGPVRRLADGSEASIGELIITRENDRRLRTSATDWVKNGDRWNVLEIHDGGDLTVQHSQHGRTVRLPADYVARSTELGYACTVHTAQGVTADTMHGLATGSESRQQLYTMMTRGAHANHVYLEVVGDGDPHSVIHPTLVRPLTPTDILESMLARDDTQRSATSLLREQADPATRLGAAAQRYLDSLYVAAEDLLRHDHVGQDANGAPINVVDALDNAVETLVPGLSEEAAWPTLRAHLLLLGAAGENPVEALRAAAGDRELETAHDRAAVLDWRLDASGLRNAGAGPLPWMPGIPARLAQDPHWGAYLAQRAHLVEQLAEQVHTRAAEQASLPVWAQNGLRPEAATVADVEVWRAAMQVPVDDRRPTGAPQLQKASATWQRRLNKAVTGDHTPALKEWRQLLYTLAPQVHDDEFTPLLAERLAAMSRAGVTAHQLLRTATAPDHPAGPLPDEHAAAAVWWRMARQLTPAVAAQIGDGSHGDSVTTDWAPRLADLFGPDRAASLQASTWWPALVSNVDHGLQRGWQLEALLGAGRAMPSDGWDGVDECQALVWRTSIALETAPDEHAHEVHFDEPPADLWEGVEPDPAAFVDHPDDAPWPLADDPGPEPGPPVDVVDAHQVDALEAVDEDQFVEPDLAVAAYLRDLGGTRLEPTDADIRLMYQRADEWHSTPVSRERMVEINELTQAFFEARFTDSWGRDYLAGRFGVDLAGDARFRPGQAPAGWTNLVDHLRGRGVSDAEMLATGVAVEASTGRLIDRFRDRVMFPVIHQGEVLGFVGRRRPDLTDADKGGPKYLNTADTPLFHKGAQLFGVVHELLAEGAVPVIVEGPMDAVAVTIASAGLYLGVAPLGTSLTDEQAAQLAAVGRDPIVATDADLAGQVAAERDFWMLTPHGMDPGYARFPDGLDPADMLAQRGPAALTAAVASGQPAFRALGDQLLTERLDHLAPEQARVAAMRVISARPSRAWEPGVTQVRARLQLSQLQARRDLRDAVKSWDADPRKAAQAELHKSSEVRARLSAAAEQTPVERWAPLARELDPRLLEQGDWPATAAMLQQAHEQGHDVGAVSRALVAEKPLRDSPARDLRYRIVSRLEIPIDDTGAGSPAPTRSQGAARDRQDANRPRPPRRGTPRR

SEQ ID NO: 2298 - protein, 1966 aa, synthetic construct; identical to SEQ ID NO: 2297
  REGION 1..1966: note = TnsF-Tn7 System Protein

SEQ ID NO: 2299 - protein, 375 aa, synthetic construct
  REGION 1..375: note = TnsF-Tn7 System Protein
MGSREDGGHGSVVVLRPGNVSALRPAEQMFDEMLAGWAGQQSSRLLASRTIQTRESQVRRFADFCASSPWEWGAADVEEWTSELLSGTRPLTPSTIRAYQNSVALFCAYLIDGRYGWADQCMELFGTHPVQVCHEWNTVIHVADHEARPAVRPLTRGEVQALFDHADDHVDFARTSKRKGWLTLFRDATLFKVIHGYGLRRREAAMLDLHDFTRNPKALEFGRYGVCNVRWGKASRGSQPRRRAVLTVFDWTRPVVEEYVEEVLPRFGLADPAVLWPTERQGRIRLAHIDDRFADWRDQLALDRVLHPHCLRHSYVTHLIEDGFDPLFVQQQVGHRWGSTTALYTGVSGDYRNRVLRNALDNAFTSPPDDGSEQP

SEQ ID NO: 2300 - protein, 518 aa, synthetic construct
  REGION 1..518: note = TnsF-Tn7 System Protein
MTTQTKATRRNRRGADRGRDMAALLSDFGHDLPTIPAPSPEAKEPRIFKYAPRRGAARRGRGWAAAKAPASAWRMTSDQAPVFWPFVSAPALPPTGAQMGVDQLSGGSFYCDPFGWVLRDDVPATNPNIFQFAKPGSGKSGTTKAFCTRMMPFGYRTLVTGDVKDEYESLCRALGVEPFVIAPGFWARVNPLSMGPLGDGWEKLSAEEAQRRTTIIFKRWLVLVRGLVGSMKIDDERRVPFGPDESDVVRNALAILTGYAAGNTVLQETTIPRLWDLLRNPTEELVRACEYANTRVFLDETRLLRNALGELVTGTLAGLFDDFTNIEVDWRAPIQSFSLSRLDGLGDEAVGIALLCMNSWGRGLREIAEPGDLRIVVRDEVWKQMRLGTAAVASFDADLRLSRGMAGKGGDIQFCNLHKPSDLLSVGDADSQAAMIAKDLLELADIKILGAQKPRVARELDSMLGLGPIAQDLVSGWAMQDKGRALWCIGDATYKVQTVLHPLEKQLYYTNEAIEAAA

SEQ ID NO: 2301 - protein, 518 aa, synthetic construct; identical to SEQ ID NO: 2300
  REGION 1..518: note = TnsF-Tn7 System Protein

SEQ ID NO: 2302 - protein, 115 aa, synthetic construct
  REGION 1..115: note = TnsF-Tn7 System Protein
MTKSVAYRWHLRKVMSEAGLHNTTELVPLLADRGVVMTSTQVYRIVTGEPERLNMRLLAALCDIFGCTPNDLIEPYVIATSKRGRKAAGAAPATGTGPVSKNRPRRATITGASDA

SEQ ID NO: 2303 - protein, 467 aa, synthetic construct
  REGION 1..467: note = TnsF-Tn7 System Protein
MTDLGCEICGAAKEPGKRICGNCFKGIGRTRATCQTCGQANRWLDHELRCRRCRDNSTRRCADCQSTSSGLFTWNEVRLCAPCALRRELDRTIPAEPGGALVRLRPVILAAEPVTTRRWLRRAHDLLTGLDQEHISLDHTTLDGLPHPKSVEHLRALLIATDILPADPAGPIRRLQTRLEHLPAGLEQTDRRVVSRWVRWQVLPPLRQQAEQARQLGTSVANARRRVEQTVAFLTVLQDQGRSLAETTQDDIDQWFARPGAARWNARPFLAWSQQHRHLPAQLELPAQRHGNPTAPADPEHRWTIAARLGSDDQLDPADRVAGLLVVLYAQPLSRIATLTRDDVLILEDRVHLQLGPDPLELTEPLASLIRTLPLARRRSTAQQLPNHWLFPGGHAGKHIEATTLGARLKRIGIEPRRMRLAAAEQLSRDVPPAMLAGILGLRIATVAQHVSRSGGNWANYAATRQP

SEQ ID NO: 2304 - protein, 467 aa, synthetic construct; identical to SEQ ID NO: 2303
  REGION 1..467: note = TnsF-Tn7 System Protein

SEQ ID NO: 2305 - protein, 1132 aa, synthetic construct
  REGION 1..1132: note = TnsF-Tn7 System Protein
MTSNFDFLAAEWTDVHPDAVRAESYGRTDPRTAVFYARRVIEQVVEWIYDLENLREPYRDDLAARLADDGFLRAVGVRVAETAHAIRKVGNAAVHRAQPISEAVALGVLRELHRFTAWAATRYTTDPNWRRPAPFDAALVPGPQPTSPPPRTASEIESLRAQLDQRDAAMAAQRAERDDLQAELDALRAQIAAAQAAQTHPADVDDFDEADTRALFIDADLLEAGWDLAEARDREYPITGMPNIGGEGFVDYVLWGADGLPLAIIEAKRTRRDPIVGQQQAKLYADALERMTGRRPVIFFSNGATHHLWDDSAGYPPREVAGFLTRDELELMIQRRRTRLPLATVPVNSNIAGRHYQLRAVRAIDDALEARRRRALLVMATGSGKTRTIIALVDQLMKAGWVKRVLFLADRVALVNQAAGAFKTHLPDAATVNLVTEKTGDGRVFVATYPTMMNLVDSYDDPGRRRFGPGFFDLVVIDEAHRSVYAKYGALFSWFDAYLVGLTATPKDEVDRNTYGLFHLEDGVPTDAYSLDEAVAEGYLVPPVGVSVPLKFMRAGIHYDQLSEAEKEHWDSLEWSDDDEVPTDIDPEELNRWLFNTDTVDQALKVLMERGHRVAGGDRLGKTIIFAKNNDHAKFISERFDLAYPEFAGSFARIVTYRTEYAQSLIDDFSKPDSAPHIAISVDMLDTGIDVPEVVNLVFFKLVRSASKFWQMVGRGTRLSPDLFGPGLDKQNFYIFDFCMNLEYFNQPGAGAEGSVQKSLGQRLFEARLKLVSELDEVGSSEFDELRFDTAAELHRIVAGMNLDNFVVRPHRALVQKYTDASAWARLDAGSVSEIAGSLAGLPSTVRDDDEDAKRFDLIMLTLQLAVLGGDRLDFEAGRTRVQGIASRLLTQTTIPVIAAQVAVLADLAGDEWWVDVTLPMLEFARRRVRALVKFLPKGERKIVYTDLADELGESSEIELRGISVGTNWERFKAKARAYLREHEDNIALHRLRHNRQLTPTDLEALQGLLEASGAGTAADIEKAAQESNGLGLFVRSLVGLDRAAAAEAFSEFTAGSDLSADQLRFIELIIEHLTANGTMPARRLYEAPFTDFAFGGPEVLFVDADVTRLIGLLRRVDSTASDDPGSRLRLL

SEQ ID NO: 2306 - protein, 1132 aa, synthetic construct; identical to SEQ ID NO: 2305
  REGION 1..1132: note = TnsF-Tn7 System Protein

SEQ ID NO: 2307 - protein, 278 aa, synthetic construct
  REGION 1..278: note = TnsF-Tn7 System Protein
MAVSLFCGYVTDPRYRWAEVCEQRFGSHPVQVFHEWNTVVHRSEYEGRPGNRPFTRDELQTFFDYCDQRVATVAAGGRKGWLAAYRDATLFKVIYAWGLRRREAAMLETVDWSANSTAARFGRYGALSVRYGKALKGSPPRRRTVLTTMGWAAEAVAEWVEEIRPAYGTSGIGMWPTERQARISTDALSQRFQAYREAAGLDPMLGPHCLRHSYASHLLEDGYDHLFVQQQLGHAWGSTTAIYTSVGADYKNQALQRALSRAHQQPRQPVEDSDAPSP

SEQ ID NO: 2308 - protein, 557 aa, synthetic construct
  REGION 1..557: note = TnsF-Tn7 System Protein
MSRVRLCEHCGVNPIAYYGRRSCYVCVPRVWKRPVRCKRCGSEKDYFTAGLCRHCHRQAPLVTHCRDCLAWGITRWHGGVCQACRGWNQRFPTPAPCPSCRRTLPLNERGYCRLCCRQAHLVRMPHQAIDVVEANRHGQQLFIADLFRQKRPTPPPTPVAGPPGHFPVAHRQLALFDLDRDYTAVRPTELALPLPELAIAIEDVLTDHARRHGWGTGLQSMTRNAIRMLLATQDTPGAPIAASVAAAVTTGRSLDNLKSVLEILAAAGMLDDDRRPTLDIYAERQFADLPEPMADEVREWFRAMRDGSTTPPRSRPRNPATIRSRITHAAPAVRTWATSNGYSSLREVDRDDVIAVMPAEAYRYRQTLTALRALFRFLKARRLVFTNPTLRLRGPQAGNHPLPIDLTPVRDAMLSTKPVRAALATLIAFHALRPKDVCALLLTDLRDGRLYLDGRTILLADPVRASLSAWLAERARRWPHTINPYLFINLHTAVRTCRVDPTWISTTIGFSAQAIREDRILHEAITTGDVRRLSDLFGLTIGGAERYTHTHQPATTD

SEQ ID NO: 2309 - protein, 767 aa, synthetic construct
  REGION 1..767: note = TnsF-Tn7 System Protein
MTLRSINSFAEAVHRLRRRRGMTIGDIAARTNYSASYLSKMLHGARPLAPALVSEVDRALRAEGELEKLAREQDEARRPPARPMQLPPAAADFVGRETYLHQLDAALITQTRPGAAVTAVIEGGFWVGKTSLALHWAARVQERFSGGCLFADMRGLAPGSAVDPGEILDGFLHALGAGIDAQRGTIDERAARYRSLLAQRPAVVVLDNIASYDQVRHLLPGAGSVVVLTSREHQPSLLLHSGGLHIDLPPLTTEEALTLLRARIGEARVGAEREAAEAIVRRCGRLPMAVLVAAERIQQHPHDSLQDLADQLASENRRLDVFTSSDPTVNIHGVIDLSYLALSPRERRVFRLAGIIPASFISAEAVAAQSGLSPDGVRETLDVLRHAHLLEAAPVGAGRMRMNHLLRAYAYQRAVVEEPLNELERAHDRLLRWYVATAWTASNALAPNWAGSGLTLDVELDTAFGVAAPFPAGDYHGALAWCETEAATAIELARHARSRGAGDAAWMLPALFLPYFYLTKNWSAWLTASTEGLAAAHALKSVPGVARSTQSVGWVLHELGRTEEAIEHLRRAIELQAELGDDRARAWSEFGLAAAYTAFDRHDDAKAAYELAETLFARVGLDLGVAVVRAMLSGTHQNLGNTDDARALAEDALARALAIAPKQPVASLAHHQLGLVLLQQHHARAALTHFDAALAVRRIGRERWGEAETLVARAEALAKLGDADGARASYRAAGAILESLQDPRALDIQAQIATINVCLGVRGEPCA

SEQ ID NO: 2310 - protein, 767 aa, synthetic construct; identical to SEQ ID NO: 2309
  REGION 1..767: note = TnsF-Tn7 System Protein

SEQ ID NO: 2311 - protein, 360 aa, synthetic construct
  REGION 1..360: note = TnsF-Tn7 System Protein
MVVTVVRSLGSARRPRTAQELEDFEQELIDQFALALAGSGVSDDVVASDRSVVFQFLKFVGRPVWTVETADADRFLVAQRKRGLARSTVYQKAVRLAVFFDFLIARYQGDIHALTGYVVTQPIDEFNRPASTDRGMLRIPPAEDEVDALFAAWRDSLPETRKFLPAARDYFAASLWRRIGLRISESAMLDIRDWRPDLGEHGKLHVRFGKGSKGHGPKTRLVSAINSVDALVEWWLTDVRHQFGDDWADPDAPLLPSERRDRSTGRCLRAGPNALRAGFSDAVALWLPSWAGRLTPHVLRHFCASSLYARGMDLKAIQELLGHEWLSTTTRYIHVHDEHVERAWAAANDRVAARLHGEEE

SEQ ID NO: 2312 - protein, 107 aa, synthetic construct
  REGION 1..107: note = TnsF-Tn7 System Protein
MRWNLRMKAAEAGIWKSTEMRRRLAEAGLEISAGKMSALWTGTPTTIRLDDLDVICSVLECQPTDLLIHEPEKVAARRPKKAAATTGAGGVPVITPRLGRHRSVPPA

SEQ ID NO: 2313 - protein, 459 aa, synthetic construct
  REGION 1..459: note = TnsF-Tn7 System Protein
MTRTDYPTAPPTAPGGPEDAEHRLRAWLRQALTTDLPGRVEAATRTNDGPLPLARRREIGREVLDTAVAAHSEAELLAGRALVDSATEQRVVDQVLDEVFGLGGLQPLLADPSVETIAVNRYDRVFVQYSDGRRAQVAPVAASNEELTDLIRTLAARASSEERRFDRGSPALNLQLPGGERLFAVLGLTAGGVTACTIRRHGYLTATLAQLRRRGTLDVGLERFLRAVVRARKNVLNTGGTGAGKTTLLRAMAAEMDPMERIVTVEDAFELGLGLDPELHADVTALQAREPNVEGEGAIDQAELVRWGLRMSPDRVIVGEIRGAELIPAFNAMSQGNDGSMATLHASSSKIAFTRLASYAAQSRERLPLEATALLIASAVHFVVHLDRATDRTTRVIASIREVVGAEDGSVISNEVYRPGPDGRAVPVAGALRADTLDDLVAAGFDPDLLSRPEGWWTP

SEQ ID NO: 2314 - protein, 459 aa, synthetic construct; identical to SEQ ID NO: 2313
  REGION 1..459: note = TnsF-Tn7 System Protein

SEQ ID NO: 2315 - protein, 353 aa, synthetic construct
  REGION 1..353: note = TnsF-Tn7 System Protein
MRWLQNVQVRDLLSGLARGDVDATHESLDQLPQNASLAHIRALLIDRGQLPSRDEALARFTAWIPMKIDTVRAPESRDALRRFATWHHLRRVRMSAEKDRGATSAAHNAKQEITVAANFLNWLGDRGTALSSCGQEHIDLWVSNGPTTRYTVRNFLTYTAASQLSRSLVVPRRTVKSIRRVDKLERIEMIRRILDDRSHPTSHRLAALLLLIFGQPITRIVSMTIDDFNLADTGAQIRFSDDWIELPPAVAKLVADHLENRAPTMTRAVDQSHYVFPGSRPGQHIHRDSLKTALNRLGIDLLGTRNTTLDELVAAMPSPLVADSLGFSYSALAQHESFQGLRFERYVAGRYSD

SEQ ID NO: 2316 - protein, 92 aa, synthetic construct
  REGION 1..92: note = TnsF-Tn7 System Protein
MHNSTDLAPHLEQRGITLSSAQIWRLVTQRPERISIQMLSALCDIFHCSPADLISVTAVDEAARIQVNQRPASELPESRHRPRRARIIRDGD

SEQ ID NO: 2317 - protein, 537 aa, synthetic construct
  REGION 1..537: note = TnsF-Tn7 System Protein
MLAIKARRSDGAALCPNCYRTPHCTCIRCGEDAPTYAHTDDGPICKSCYTRPKRRCGGCGEVRGIDRTARGTEPDLCNRCLTRPRHPCVICGAAHPAHPDAQQPVCLRCRDDGHVLEPQLTESPTRVRRRQHETAHDALEAKLRIVLSHPEHGIAEQLVPLIAVFAHVPNPSSMMRWLHRRAGGAKLLHELAQRAHHESLSHELLDQCPPSYALHRLRDLLVHAGILAERDELLERIEQWLEHALGERPAHHIALVRPFATWHVLRRARRRSNRRPVTVSAATYVRSQIAISLEFLTWLDERGKTLPTTDQADIDVWLDGGSEYRYFVTTFIEWSKGRKLCSDLTVPQRPSADPSNLLTEEDRWDMLDRCLHDDELPLDVRVTGALVLLYGRTTTSIATLTCGRIDVVDQETYLRFDEGPALVPPALAALLTTLRDNRVGRETFYQTELATRFLFPGRSPGRPMASAVLARKLRHHGIEPLPARHSARSAWARDIPAPIAADLLGVNISTATKWSSRTRRDWADYLLARSEEQQDES

SEQ ID NO: 2318 - protein, 537 aa, synthetic construct; identical to SEQ ID NO: 2317
  REGION 1..537: note = TnsF-Tn7 System Protein

SEQ ID NO: 2319 - protein, 403 aa, synthetic construct
  REGION 1..403: note = TnsF-Tn7 System Protein
MPDDAYVRPWPLHPQPLPGEALSSWLARICELYPHIRPSDLLADLDIDCAVEDLDRYTPEPILAELAVRGAVPVERVRMMTLAGWTPWLLDSTDPADCDFDTYVHQFSILLPADLAREDRRRRTPTSEAWLPWASTPRSRACPACVDSLESTADINMTLLRQYPVLSSCLDHRCRLEPCSAFPGHAIFWDQVRFGSDERVSPVPVSSAVTDLDRRSTEALTTGWVELGSGRVHAAVWFRLLRTVVDEVSSPLVRTGRWATRLVAIWRAAGRSRPLRTAWVPFEDLHWDEQAKVLEAAAIGIAMVESGEINAGGAHASLLRPRPYEPVDPGTPPTRSSYPAPERDLWADAHAAAEAAIEAARVDPASASSLYNFLRWGCRTAAELDETVRLFVDHGIPLQHPPT

SEQ ID NO: 2320 - protein, 403 aa, synthetic construct; identical to SEQ ID NO: 2319
  REGION 1..403: note = TnsF-Tn7 System Protein

SEQ ID NO: 2321 - protein, 403 aa, synthetic construct; identical to SEQ ID NO: 2319
  REGION 1..403: note = TnsF-Tn7 System Protein

SEQ ID NO: 2322 - protein, 559 aa, synthetic construct
  REGION 1..559: note = TnsF-Tn7 System Protein
MDPDKLDVVETGVLTASGERWSQAETRFAVLAPLLEMHPVRSEAVDDAAQRLGLSRRQVYTLVGRLRNGTGTVTDLLTKVSSGGRGRSRVTAEVEDVIGDHLTRYFLHRQKLSVAALHRRIALACHRAGLPVPARNTVTARIAALHPASVARSRGGPDAARPRQSAGDSPPTVSGILDQVQIDHTVVDLMVVDEYERQPIGRPYLTIAIDVFSRSVLGFVVTLEPPSSISVGLCLGRVCCEKQTWLEACEFAEQVHWPMAGKPKQLYLDNASEFKSEALRRGCAQHAITLEYRPPGRPHYGGIVERIIGTAMTAVHELPGTTFSNPADRGSYDSDKHAALTLRELERWLVLAIASYHASVHTGIGNTPAAVWAGAVAAVGHAPRVVLGETAFLVDFLPVIRRRLTRTGFVLDHVHYFSNALKPWVARREDLGRFVIRRDPRDLSRIWVLEPEGAGYVEVPYRTMSHPAVTLWEHRAAITRLREQGRSNVDESALFSMIEQMREVTDRSQKATRKARRNRARRMHLTGVASAPIPAIHPPEEPRADGGTATPVFSDIEEW

SEQ ID NO: 2323 - protein, 374 aa, synthetic construct
  REGION 1..374: note = TnsF-Tn7 System Protein
MGETEIPGAAHLVLTDGVVHLEPEQAVFEAMLAGWERQQRTRFLSDEGTIAPRLSLVRRMAEFTNSYPWQWEPADGEDFIVHLRSSVRRKPIVVSTARSYEMSICLFMEYVTDSRYGWPAQCWDRFSVVPQQVFHEGNTIAHAADFEGGPGRRPLTYDEVQTLFDAADGRVEQIRKLGRKGSLTALRDAALLKTVYAYGLRRREARGLDLSDRRRAPKAAQYGQYGAWFVRWGKASKGSPPKRRTVLTVPEMDWIVDVLDHWVEEVRPLMKPGALTALWVSERAGRMSLRSINDAFEQVRQAAGLPVELDLHCLRHSYVTHLVEFDYPERFVSEQVGHRYASTTAIYTGVSDEYRTRLIRRALQSRDTLWKGAP

SEQ ID NO: 2324 - protein, 312 aa, synthetic construct
  REGION 1..312: note = TnsF-Tn7 System Protein
MTASMGSSDEPTESSGEGLGHLRESVRPLTVLDDAERIRLIRSERWIGYPQARTVIDHLETLLSWPDRQRMPNLLLLGPTNNGKSMIIEKFRRTHPPISLSDREQIPVLCMQMPPDPSPGRFYLALLTALGTPTRPRNRVHELEQQALMLLRATGVRMLIIDELHNVLAGRDNVRREFLNVLRFLGNELRIPLVAVGTRDAYLAIRTDPQLENRFHPMTLPVWTNTADARSLLASFTTSFSLRKPSHLTSPEMTDYLLTRSEGTIGELTTLLTAAAVTAVDSGEEAITSSVLTRTPYVGPTERRRQFERHLA

SEQ ID NO: 2325 - protein, 312 aa, synthetic construct; identical to SEQ ID NO: 2324
  REGION 1..312: note = TnsF-Tn7 System Protein

SEQ ID NO: 2326 - protein, 110 aa, synthetic construct
  REGION 1..110: note = TnsF-Tn7 System Protein
MIKKMGYRWNLRRLMADHEMFQTTELGPLLAERGIHLSREQVYRLVTAPPQRLSMDTLAALCDILGCTPNDLIEIDVVNTAIKKTSNGSTGEHPAPPRARRTTIRRPETT

SEQ ID NO: 2327 - protein, 350 aa, synthetic construct
  REGION 1..350: note = TnsF-Tn7 System Protein
MSTPGGGSAPCPSCALERRIKKRVNLNLELFEAHWCRTLFLEFCSWDKLPRQAGNMTMRIDNYARFFVILERHTLSVRGIDQQHLFNLFGAEKLRRSFHVVNFLVEKIGIVWDNEEQEQLIENKRINDILQCCKEQPWHREIVTYAKDLSERITYKETPIKPLTVRNYLRAAIELLISAKVTSIQELPEDAIVSHVNNRPGHRASLTIFRTFAKEKYAVNLVLPEKKNKGISNKQKVKKIKAVIEKLVSTPNEREARALMPAAISMLYQLPLKKVLMLRYEHVLHSNRKVFITVDDERYELLGPLPHLMKEYQLGVDPKAFIFAGRSRMQPMSTMTVRYHIRKLEALKGM

SEQ ID NO: 2328 - protein, 611 aa, synthetic construct
  REGION 1..611: note = TnsF-Tn7 System Protein
MLDTATLLAKDTDTGEVHRLSAHQLRPVTDIELEEGGVAEGKDLSEIDDEDWQVAQQRFAAIRPLLDDPFRTRAKAEQLAEEAGVHVATLYQWVKDYHEAGHISALIPAPRGRKPGTKKLDKKVEAIIEGAINDLYLSRQRYKPSDVIVTVKAHCKQAGLPLPHANTIRNRIKQISTRETMRRRGLRDKARDTFAPIRGEFPNADFPLAVVQIDHTPADVILVDEEHRLALGRPWITLAIDVFSRMVVGIAVSMEKPSAVSVGLCVSNAMLPKHEYLANLEVGLEWPVWGKMRVLHADNAKEFRGKMLRRACEQYGIDLHLRPVKRPHYGGHIERYMGTAANEIHTLPGTTFSNVEQRKGYDSEKESALTIRDFEQHLVEFIVGVYHQRKHSELNMPPMRKWQLGILGDSKQPGLGMPPIPTDPTRLKLDFLPLYSRSVQRYGIQLDEINYYHEVLNPWIGSKDPENQTKARSFTIRRDPRDISKVYFFDPESEIYYMVPYRDPTRPAISVWELRAATRRIREEGLRHVDEDVIFETILKMRHRVEQAVTKTKQARRQMARINTTKKLAKKAEPFENQSPAESSFPDPSQTEVQSEIDIFALPIEPFDDDA

SEQ ID NO: 2329 - protein, 596 aa, synthetic construct
  REGION 1..596: note = TnsF-Tn7 System Protein
MRVATLKLENFRGVRTGSIHFGKHPVFVGDNNTGKTTLIEALTLLLGRDRLVRELTEHDFYGSCPQPADRIKLVATITDFPNDDPEQSSQWFREGRAVVKWLDEATGMVHPLRESEAYKLCCQIAVQARFDHDSLAVEVLRYFHDHDEPVDPFAEDAPAAVPGKLIQELSFYLVRASRTWDKVFSWGNELFKRTVLAAAAQPAAALLAERDRLRAPDQPIDADPGIEPLIQNLNDELALSFPNSPQVRLRLTRTDSRSVMEAVSAHFSTEDGFNIPAARQGSGLVSMQGLLLLLELGRARAASGGEFLMALEEPEVHLPPSAQQRLVQRVQALSTQTFVTTHSPLVASMADPTSVLILKKQGGVLSAEPFLEAPLPATAQNWQRKFFQHSRIDVLSALMQPSLLVPEGRSDFQLLRCILKPLMMTAGWVDSMARPFSIEVGVVPTEDAKVVETHQFMARVHSQVCCLVDGDEEGLRYVDRLQATSTPPATVIRWNDGAMIEDAIGWILAADEAAAVTELNALGHVKSQTATDVVNYLKAKKMDIIAYELVAEAIATTPPCRARAADLLSGLACACVGSSATQRFSQDDNKVWVFQP

SEQ ID NO: 2330 - protein, 596 aa, synthetic construct; identical to SEQ ID NO: 2329
  REGION 1..596: note = TnsF-Tn7 System Protein

SEQ ID NO: 2331 - protein, 420 aa, synthetic construct
  REGION 1..420: note = TnsF-Tn7 System Protein
MTVHVFTGGAGCGKTYHLMKSLRDHLEVTPLSEGQKVLALTFMHGSRRRLEERLGQLHPLKVRTDCSTIDSFAWRLVRRWLSLANALGFVDIESDQYERVCDAAGALLRIKEVCSWVAATFPILLVDEAQDLTENRLHIVERLASRLEVFAAADEFQCLREDLRPNPACEWLSQVGTVKELTQPRRTNVQELLDAANEIRKGKPPVSGKVFKVSLTAKPPLAGAWINGNLHWYGGRKSVAVITPTLGTFAKGAVKWAAENKTKKGSGPYSILWEESESKAALNFLSEIPLQDVNDISSAIALLTAAGDHRATRDLADWMDMQRRARAKTSFSKNEIELAIKQGFAQRRHARKDNESGWRGMTVHGAKNREFDNVIVLWPAAVGGSDDQKRRLLYNAVTRAKKRCLVLVQAKSCLEQAPFK

SEQ ID NO: 2332 - protein, 420 aa, synthetic construct; identical to SEQ ID NO: 2331
  REGION 1..420: note = TnsF-Tn7 System Protein

SEQ ID NO: 2333 - protein, 296 aa, synthetic construct
  REGION 1..296: note = TnsF-Tn7 System Protein
MAHFDHLKPEIAETLTWTTEDRIFFAQQNHWISYPRAKEIMTRLEDQLAHPRVQRMPNTLLVGESGNGKSTLIDRFREKHPVKILPSGEPLAPVIVMEMPSEPNEGRFWTELLLSLKIAHRDTDPVQRKENQAISVLTYVQAKMLIIDEIHNVLHGSARQQRHFLGMLKRLSNKLQLPLVAVGTRDSILALHTDTQLSSRFEPLALPRWQLDVSFLRLLASFERLLPLADPSQLSSQDIAIKLHSMSGGTIGGVASVLKRATVKAIREGKEHIDAKLLDDIGWVKLSDYGKEALKL

SEQ ID NO: 2334 - protein, 296 aa, synthetic construct; identical to SEQ ID NO: 2333
  REGION 1..296: note = TnsF-Tn7 System Protein

SEQ ID NO: 2335 - protein, 484 aa, synthetic construct
  REGION 1..484: note = TnsF-Tn7 System Protein
MVCSTCRNDALEVQGRCASCGAQRMTPGIAAGGGRLCVDCAGIPGNFFCIRCGHEGLRQRDHVRRRCILTEMLRDVLDDGSGQVSSTLRPLFDRLRQVERPLGCQTWLRQEHVQRMLRSLARGRTPLTHEGLSTLGAPRTVAYLRDLLMKYGLLPARDRHLLMFESWPAGHLAAVDDAEQRKLLNQYATWDVLRKLRESAARGSLGPSRDSTARDRLRKATEFLMFLSGRSRTAAQCTQADLDAWHAEHRLARRHAQQFLRWCIRTGNMPRLTIPNISTRNPAPLDQHRRITLIRRAVTDEQIPVMDRVTAMLLLLYAQPITRIVQLTLDDISHHDGQVLLRLGDPPTPVPEPFAILLLGYAAARPNTKTATNPDGRWLFPGRRAGRPIHPAPSKSGSATGASPRAGPAPQRSATSSCKPRHQSSRACSATTTKASPSSPPKPPAPGDATHPETIGGDQLRPPLKGIRAPIGHESLRVLDPFRD

SEQ ID NO: 2336 - protein, 484 aa, synthetic construct; identical to SEQ ID NO: 2335
  REGION 1..484: note = TnsF-Tn7 System Protein

SEQ ID NO: 2337 - protein, 129 aa, synthetic construct
  REGION 1..129: note = TnsF-Tn7 System Protein
MTVWPWSAEIVEQWVTEARPLMAAEGNPALWPSERGRRIGVKRLDSRFAAYRDELGLDPGVDFHSLRRSYATHLIESGMDALFVQAQLGHEVASTTALYTCVSSDFRTRTLRRALDQTLDAALRDRSAR

SEQ ID NO: 2338 - protein, 241 aa, synthetic construct
  REGION 1..241: note = TnsF-Tn7 System Protein
MGTDLPGSARLQLAAGVPLLQPEEQVFEAMLTGWRNQQLARNLAFSTIEGREKRVRAFARHCEAFPWEWSHQLADEWFTDIRAVRGNARSTLRSYQEALRSFCTYLVDPAYGWVDQCQTRFGTQPVHVVTEVNTAVHVQEYEGEPTKRAFTIDELEAFFDHADQQVSRIRGRGRKGWLPAFRDATLFKVAYAFGLRRNETRMLDVADFGANPQGPEGGEYGVLDVRCGKPRRAHRPSAAAC

SEQ ID NO: 2339 - protein, 112 aa, synthetic construct
  REGION 1..112: note = TnsF-Tn7 System Protein
MSAKRQVIYRWRLRELMATRGMFSTTELVPLLADRGIRLSASQVHRLVTGIPERLSLPVLAALCDILEVTPADLIATKAENRDVRRTGTTGDLHAVDTTAIRPKQARLRPEP

SEQ ID NO: 2340 - protein, 395 aa, synthetic construct
  REGION 1..395: note = TnsF-Tn7 System Protein
MTQQLEQLLKPHSPPDMRIKRLIVELAAVPRPESILTWMRNADTANLLAQVGARELQLSHDAFDALPPSRNVEHLREMLVHHRMMPSRGDPIMVRFEAWVDQRLKSLDNTPVIHAPIEQYARWHHLRRLREPSQRPRNMANATGFAKQQITEATKFLRWLLDEHGTVVDDLRQDQIDSYLSEGPTTRAAVRNFVRWRAAAGIAGRFETRYRTAEHTPLMTSARRLALIKTMIEADHIVPSARIAGLILLLYGVPVSRIAELTVDDIEAGADGTSIKVGALAAPIPRALLPLLHDYLNARKRGTMNHGCRWLFPGLNAGQHTTEQTLMQQLRGLGIDIKAARNGALHDLIKEIDPASLADLLGYTANTLNIHAARAAVPMATYPAIGSLRSGSREQ

SEQ ID NO: 2341 - protein, 395 aa, synthetic construct; identical to SEQ ID NO: 2340
  REGION 1..395: note = TnsF-Tn7 System Protein

SEQ ID NO: 2342 - protein, 373 aa, synthetic construct
  REGION 1..373: note = TnsF-Tn7 System Protein
MEGSMGRLVYLPAGVAGPDPDAFLNDVLTGWRRAHLAQNFSAETVRRRIASVHRMADFVGSYPWQWTAADADDFFSHLRGVRNLAHTTVRAYQTDVKLFLDYATDPAYDWNEHCGRLFGTVFGQVITEFNRAKHVQANDARPLKRPFTLVELQQFFDLADLEPERILNAGRKGALAAWRDAVAFKSLYAWGLRRNEVRHLQCVDFSRNIRAPHFGDWGLVRIRHGKGTRGSAAKQRTVLTIFDWAAEGVADWVERGLPRYGEPVNDLFPTEKGGLMPNRNLWQRMRSLVDELGFPPGLDLHSFRRSYATHLQIEHGYDVSFVQLQLGHEHASTTSIYTLASPDYRARELERVLNATVARSNAGLADPTTEESS

SEQ ID NO: 2343 - protein, 112 aa, synthetic construct
  REGION 1..112: note = TnsF-Tn7 System Protein
MKRDIQYHWRVREFMARAGMKSSRDLVGPLRERGITLSESQIYRIVGQEPDRIAFKVLVALCDIFGIEAGDLITYTAADARQSRDKAVNSAKDVPLLNAYRPVKARIVSDDD

SEQ ID NO: 2344 - protein, 376 aa, synthetic construct
  REGION 1..376: note = TnsF-Tn7 System Protein
MPPTADGLLEPLRDAIMQAEPKTTRRWLNRNTDLLRGLHDGTIPLTHGSLDLLPRPKSVEYLRSLLVATGILDPDVHRSLRRLEAELQHLLDGLDTGHRKLANQWTHWAVLPRLRGLDETRRPIGTAVQNARCQIRQVIQFLNTLEQRGTEMPRCTQYDIDAWFAEPGASRWHVRPFLTWAQRTRHLPKEIALPKERRVDAELPTDAEDRWQIGRRLVHDESLDPVDRLAGALVALYAQPLGRIVSLSTADVIATATTTGLRLGPTDVLDLPDPFAAIARTLPLRRRTGTAEQLPTTWLFAGGHAGRPLSATSLGNRLRAIGIEPRKLRLSATEQLARELPPSVLAGILGLNAHTVAKHTLRTNGQWANYAADRRT

SEQ ID NO: 2345 - protein, 376 aa, synthetic construct; identical to SEQ ID NO: 2344
  REGION 1..376: note = TnsF-Tn7 System Protein

SEQ ID NO: 2346 - protein, 116 aa, synthetic construct
  REGION 1..116: note = TnsF-Tn7 System Protein
MQQPRLNYDWHLRRLLAERGIFATTGLGPLLAERGISLSEAQVYRLVTGTPERLSLRTLAALCDILSCTPNDLIEPVAERATVRATGTTTHRTKTAATPPDAKTRTPRRAEINRKK

SEQ ID NO: 2347 - protein, 450 aa, synthetic construct
  REGION 1..450: note = TnsF-Tn7 System Protein
ARLPHPTPTQPRAARLPAAPRARVPRPGEQADLRRCAGEKPTYSCRQCGREDNCYGRNCGPCTLTERATELLTDPDTGQIHQQLQPIFNALMNVDRPQTTLYWFRRSEGPRILHRMATGELQISHETFEQLPSNKTTNYLRDFLTALGVLPHYEARIERMLPWLEDLLDTIPKSDADIVRRFAQWRVLRHLRQKSAHDQLTKSMVLQGRAQIKGAARFLAWLTRHDTTLAGMGQADLERYLITHPGSETAQHAFIGWVRTSGINTSLRIPKQPRRFSSVTMSEEERWGHVQTLLHDQTMRHYTRIGGLFMLLFAQPLTTICRMHADQVTVTDDGQVTVTFERTPILMPEPLDRIIIEHMNRRGQASYASRNSRWLFPGGIPGNHLATENIRGQLVDHGIKPYNSRKAALFQLAAEIPTPILAELLGISTTTAVRWAELSSRNWNAYIAQR

SEQ ID NO: 2348 - protein, 450 aa, synthetic construct; identical to SEQ ID NO: 2347
  REGION 1..450: note = TnsF-Tn7 System Protein

SEQ ID NO: 2349 - protein, 426 aa, synthetic construct
  REGION 1..426: note = TnsF-Tn7 System Protein
KWLYESAGEGAGHRAERFFDTERRLTNPVAKSSPQTALLAQKAAWLSAEQDRWRFHPNQLVVVDEASMVSTLQLAALVEQARDAGAKILLVGDPGQLDAIDAGGVLGWLDRQGKTARLSTIWRFEHPWERDASLKLRAGKVAAISDYEQHQRIRHGTYLDMVDQAYLQWQSDIRAGRSSILIAADNDTVGMLNERAQADRVIQGLVDAEETALLADTLCAGRGDTVIARRNDRTVADSNGDFLRNGTLLDVVRAGRRDGSLTAVRRDTGAIVTLHRDYVESAVELGYATTAHRSQGITVDTGHTVVTQGRLTRELLYVSMTRGRGGNYAYVSENDPTDHEPLDPALQPQWQEILAEVLAAEGAERTAHEVRDAEQSKADSLERLSAEYDYLAQIAAAEDLTRFIKARTPEIDEVLQQSPSWGAAVA

SEQ ID NO: 2350 - protein, 426 aa, synthetic construct; identical to SEQ ID NO: 2349
  REGION 1..426: note = TnsF-Tn7 System Protein

SEQ ID NO: 2351 - protein, 374 aa, synthetic construct
  REGION 1..374: note = TnsF-Tn7 System Protein
MGVEVAEAPGSARLVLVDGIAHLDEELAVFEAMLTGWERQQKSRLLADTTIAPRMALLRRFTEFSGSYPWEWTAGDLEDFTVSLMSGSARLAPSTIRGYHFTLRLFCDFLTDGRYGWIQACADRFDQIPSQVCHDFNTVAHLHDYEGRPERRPFTYDELQHLFDFLDTRVEQVARSGRKGALAALRDAQMIKTTYAFGLRRNELCQLDVADLRPNPHMPHWGTYGSIHVRHGKSSKGGTPKRRTVLAVPEFDWAIEGLKQWVEQGRPIVRPKNHAALWVSERLSRVSAKHLDKRFNRLRSEAGLDEALTLHCLRHSYVTHLIEFGYPERFVQEQVGHSYASTTAIYTSVSNDFKNKALQSALKRVYTPTPTKEP

SEQ ID NO: 2352 - protein, 111 aa, synthetic construct
  REGION 1..111: note = TnsF-Tn7 System Protein
MARKLSMQWNLRQLMAAKGLFQTSELIPLLEERDVHLSRQYVHRLVTKPPQRVNIELLAALCDILGCTAADLLEFRIEEVRELRHVAGDTGPGIGELRPIRATIRRPHEPQ

SEQ ID NO: 2353 - protein, 871 aa, synthetic construct
  REGION 1..871: note = TnsF-Tn7 System Protein
MGDEVRDALVAAITEVEKTVARKVIAGVVDRTVLQEPAGRRLLAQLTEDPGMLLSGSTRIPRLLDRILLDLAAAGARTVRPPGCAHCGRVVLLSRRDGLDRICEACGRARLAVLIDCVECERNGQLRHAQVGDRAYCRSCWRALKGVADERLDRFVAEQIPGGTLSMMLSATEGWKADRRLRLALECELFGVNWIADPPAASVLFATFYERLRGLGARVRALACGHCGRIGRLPDRLNGRMCCRACYKAGHMAVCDGCGDTAHLELRRPNGDRFCQSCTNRLPESSAECIGCGIHRLIAVRTPDGPMCSGCRTAPGADVCTVCGTSGRCRFPGTSKAICVGCYAAARVDVCHRCGRERECRFASTAKAICTPCALQRKPCSVCARVVLPIRHTPDGEPLCWSCAPHIVEACIGCGRDARVSARTDKGPLCQRCARTSPLMFRDCRRCGAHGRLHRRRWCDRCYADDKIRELLSDDVVAANPMLGPLRDRFLAADERRTLDAFRRNTTVAILREALSGGELLSHALLDRLGSPGSTAPVRALLAEHGLIPARDEQLVRFDTWCQVRSAQIVNPDHRRLFDRYVRWRHLRQLRDQTDQVTPSQSNGRRQELLRVLDLMSWLTGRSESLAVLDQPRLDLWLLDGPPLRRRVAAFLEWAARSGTCPRLHVPPLGRTSNTPTGASVDERWELLGGVLTARGDDPRTRLAGALLLLFGIPVARLHLLRVTDITAADPVMIRLGPDPLELPEAIGQLAIAARAHRDAPRLLTDAGESDWLFPGQHHGAPLSRDSLTDRLAKFGIRARHTRAGALASLAQELPAPVIARLTGLHITAATRWAEAVVASNARYSALTDRHNPEPRVNHSAMSTACSIMGP

SEQ ID NO: 2354 - protein, 871 aa, synthetic construct; identical to SEQ ID NO: 2353
  REGION 1..871: note = TnsF-Tn7 System Protein

SEQ ID NO: 2355 - protein, 381 aa, synthetic construct
  REGION 1..381: note = TnsF-Tn7 System Protein
MGAIRVVSGLVAHGVAGLYLASGISFLRAEETVFEAMVTGWRAQLMGGRGLREDYVAGTVRAVRQFHAHAGSWPWLWSAGLFDEWMLDLVTVRHLAPSTIRGYQQAVRQFCEYLISEHYGWAAECELRFGTHPVQVCHDWNTTRHLQNYEGRPGRRPLTRSELQALFDRADSEVDRCLESGRKGALPAYRDAVLLRVMYAWGLRANEAVHLDVTDFYRNAHAPEFGEFGMLHVRYGKASKGGPPKRRSVVTLRDWAVEAVQDYLDNVWPLMRPDGERAMWFSERGTRLRTRELSDRFAAYREDLGFDRVLSPHALRHSYVTHLIEEGVDPVFVQRQVGHQHQSTTSIYTGVSGDFANKMMRDALGRLRPQEEGGADEGDRV

SEQ ID NO: 2356 - protein, 116 aa, synthetic construct
  REGION 1..116: note = TnsF-Tn7 System Protein
MKVIGYEWRLREVMAASGIFATSKLVPLLRERGIELSASQIYRLATDKPERLNMHVLVALMDIFECSADELVRKVDLGASAAATGTDGEDQPARGAAMLRAKGLRPPRARVLPKDG

SEQ ID NO: 2357 - protein, 352 aa, synthetic construct
  REGION 1..352: note = TnsF-Tn7 System Protein
MRGKAAADLLEKIGNRELALSHSAFDELPPGRHVEHLRDMLVWYHIMPDRGDPRLARFEMWLDNRLDSLADRPEVRAPLEQFARWHHLRRIRDNQVRNMDNATRNAKQEITETGKFLIWLGDEYQISVDSLTQDHVDEYFTTGTRTRMAARNFLQWRAKTGIGKRYTLKYREAQDTPVASSRERLQVIRKVLESDTVVLGNRIAALLFLLYALPVRRIAELRIDQIDVTPTGLTLSIGDQPAPVPGPLLPLFHEYLASRAHRGTTNNESPWFFPGTRAGHHVTEQSLLKTIRDRFGINIRAVRNAVLHDLTQEIDAASLAGLLGYSSQIMNIHAARSGVPMANYPALHSPGK

SEQ ID NO: 2358 - protein, 389 aa, synthetic construct
  REGION 1..389: note = TnsF-Tn7 System Protein
MSQSEAAARVGVNVRSARDWDQGVRHVSNSRIYPDGTVIDYNTGMTMQVEVPALPAVEAVLHPRYLSLEERETIADLYRSGMSLRAIGRVLGRPASTIKRELDARSEDGRYQPYLAHRAWAASRSRPKSSKLVTHVSLREYVQEKLSVRWSPEQISHTLRKEFPDDESMRVSPETIYQALYVQARGGLKREVAETLRTGRTRRKPRKHPGQRMSRFIDEMVMISKRPPEIEDRAVPGHWEGDLIVGPGSASAIVTLVERTTRYVLLGHLPGGHTAGEVRDVLIGLIGTLPEHLRGSLTWDQGAEMAAHRQFSIATGVPVYFCDPHSPWQRGSNENTNGLLRQYFPKSTDLRPYGSEDLEHVAQELNGRPRKTLGWDTPAERLRDLLMMP

SEQ ID NO: 2359 - protein, 140 aa, synthetic construct
  REGION 1..140: note = TnsF-Tn7 System Protein
MIAFIDTYRDQFGVEAICRVLQTADCGFLTSRGYRAAKSRPASTRAVRDRMLIEDMQRIHAENYSVYGYRKMHHAMRRAGWDIGRDQTARLMKTAGLHGVRRGRTPMTTTRAESPDGRPDLVKREFAAAGPNRLWVADIT

SEQ ID NO: 2360 - protein, 429 aa, synthetic construct
  REGION 1..429: note = TnsF-Tn7 System Protein
MAAGTKHYSAELKRDAVTMVVELVGQGSTEWAAMKKTADLLGVGAAETVRQWVRKAPGVGAASVSSGGASADTAEEVRRLRKEVAELKRANGILKAASGFLRGRDRPATSLIVGFIGAHQGNRVGADGLVWGVDSMCQVLTEHGMAIAPSTYYEYRRRSPSARMRADARVIDAIFTMRRQHPLTRVLGSRKTWIILRSNGIDVARCTVERLMSEMGWRGASKKKSPRTTTPNPEHHRPADLVDRHFYAAAPNRLWVADFTYCRTVGGWAYTAFVTDVFARKIVGWKVAAEMTSDLVTTAIDNAIDNRKRCGTTAFDHLIHHSDAGSQYTALAFGQRLAAAGIAASIGSIGDSYDNALAESVNADYKNELVDNQPRFHGVAELSLATAEWVAFYNRQRPHSYCHDLTPDHAERLHYDRIATLNPEEALTT

SEQ ID NO: 2361 - protein, 379 aa, synthetic construct
  REGION 1..379: note = TnsF-Tn7 System Protein
MAERDIGGRLIYLPAGEAGPDSESFLRDVLEGWRRAQLAQNFRPTTADRRIKLIQRMADFVGSPPWQWSPSDADEFFAHLRGVRNLSHATIRAYQSDVRLFLEYATNPSYEWNENCGRLFGTVFSQVVTEFNRATHVQTNDTKAKRRPFTLPELQQFFDLADLEPERILHSGRKGALAAWRDAVAYKTLYGWGLRSNEGRRLQLVDFSRNARAPGFNECGLLRVRHGKPMRASPAKQRTVLTVFDWTAEAVQHWVTFGLPRYGRPVNDLFPTDRGGIVAGRDLLKRMRNLVDELGFPPGLDLHSLRRAYATHLQTEYGYDLSFVQMQLGHEHAATTSIYTIASPDYRSRHLEQVLAETLRRSSGDNGVGSATGRTDSET

SEQ ID NO: 2362 - protein, 110 aa, synthetic construct
  REGION 1..110: note = TnsF-Tn7 System Protein
MKRRVDYTWRLAELMAARGMNNTTDLIPLLAERDISLSRPQVYRLVNQRPERVSLQLLSALCDVFSCGPDDLLTVTAVNAREHKKASNAGPNVVSLDRTARPRRANILDE

SEQ ID NO: 2363 - protein, 99 aa, synthetic construct
  REGION 1..99: note = TnsF-Tn7 System Protein
MARVGMKNSRDLVEPLRDRGITLSESQIYRIVGQEPERIAFSVLAALCDIFGVEAGDLVTYTAIDSARRRDKRAVNSPTDVPLLDAYRPVRARIVDDDD

SEQ ID NO: 2364 - protein, 484 aa, synthetic construct
  REGION 1..484: note = TnsF-Tn7 System Protein
MARPRKPEDPGRWPTACARCRGHYQLVARWPDGSICGYCYQAAKRTVGICACGHQGVLPGLAEGRPSCRRCSGVRLNVDCTGCGDEAELYSGGRCQRCGLRETAQRLLAHPDTGVIAPQLQAIVDALAEMDRPNSGLTWIRQAHVQRVLKELAAHPTLTHEVLDHLPPGRTTDYVRSLLVEHGALASRDERLARFQSWAVTAQQRITTDEHRKLLARFIRWSLEKRLRSMNVVTDSAFLRAKQTLTVTIDFCNWLATEHGTTVEQLTQAHIDLWQATGPSTREHLLRFIRWVKTKLIPSDVEMTPHRRGTAPRMPIDQQNAVIEKVAHQQTLHPRDRLAAILIIVFAQRAEDVAALTWKQIAISADTVTISLAAMPIDLPPPLDEPVRALAASNYNNQTAAHPNSPWVFRGYRPGMHVAPTHLRARLRAVLAALEARMGTLNELTQTTPIAILAETLGYSPQTLEAHARASGSTFARYVATRLD

SEQ ID NO: 2365 - protein, 484 aa, synthetic construct; identical to SEQ ID NO: 2364
  REGION 1..484: note = TnsF-Tn7 System Protein

SEQ ID NO: 2366 - protein, 120 aa, synthetic construct
  REGION 1..120: note = TnsF-Tn7 System Protein
MAEQRRIGFHWHLRRVMAAHNLWKSTELRPLLRSRGINLSDAQVYRLVTGEPQRIPARTFAALCDIFDCSPNDLFEPYVEMRAAVTVDAPRPRDLGIAPGNPVAKRIRIVQDDDGPAPQT

SEQ ID NO: 2367 - protein, 457 aa, synthetic construct
  REGION 1..457: note = TnsF-Tn7 System Protein
MSKAKKIHQEKRFCETCYARLFKRKLCPACNNFARLPLFDTSAVCRTCEVNKPCVRCHRSGLKIGRLTAQGPACASCAHYFRSPQPCERCATPSTRLVRIQVGDHVLRCCPACHSSLRTACCSACRKPRVIVSAEGPALCKKCFELGEVPCPKCNRPMPAGLGNACMACYWASSFEVRRSDLLSAIEDERLRTAMGGFSVWLKARRGAQFAALNMQRYLPFLKALYGLWATLPSYADMVAHFGAETLRRSRSVVNWLAETDGLVVDPEARENTSDQRRISTSLQHFPEGIARDALHTYRQDLLGRSVKLRTVRMSISSALRLLQHCDETGQTLPDQQALRLLLRNRPGLHASLFGFVGFLNRHYGLGLDARFNRRWLAKAARHLAEVKLTELYATAEGNMTAQEWIRAAMAYFHRLKLPLNSPLHYEEQPQGDQPGFTVRFGGEEYWVPGARDHYSG

SEQ ID NO: 2368 - protein, 614 aa, synthetic construct
  REGION 1..614: note = TnsF-Tn7 System Protein
MLTRIKREKVLSPSARANLYEYDSNLPMGSWVVWWYGRLIKNFADNTVPLVMVTLQRVDGDLLTEEFETCQIAISRLRFYPQGLILEDRLPVAKIALETLWFKVGFGYKDWNFRTAKELHRCSSQHELSLPDECANDWSLEFKQPKGALMLNCVDYLVRGYSIRSEIPRILTTYRWNEAKNRLLKHDTPSNEKNLPDSLVVYPHPDMVKEDEVFLALLANDDRRTRKAAQSIFSEIDTPSFKAGNPHTLQVLPWFDGPTELACRGLWINGGKDFVCMELRGYIEPTGKRIDNRGYRPSKKAKHVEDRRGVPPIKRFLTEADLDIGMTDTYQPRSPYPREDVVHDDFHIVSTREKTRTLLDSPDEETQAHSVDELPPSKYSTGDSLGEKDDDTAKFTMTAEPVDADYNGALAEMWKSFTRLHAAGQIDEVRWYLNKEFYEKGPPRLFELSDRQYTEKDDPERKLEKWLNLHSRRRRGVMFIVIKVNGKYYLVVETERRHWVNKDGEQQEESSRGLICAVSGAREIQSVCEFIDAELPKHAGVFKNLAWTLDNRFALYSHRPSEDKATWLDGAAIHALRQIGVTLRKPVKHSTATEANKSDVSEADRDQLANAALS

SEQ ID NO: 2369 - protein, 457 aa, synthetic construct; identical to SEQ ID NO: 2367
  REGION 1..457: note = TnsF-Tn7 System Protein

SEQ ID NO: 2370 - protein, 225 aa, synthetic construct
  REGION 1..225: note = TnsF-Tn7 System Protein
MSSTVYMGQEISQTRKSRSMTRSLSGVFPFRGQGIYYESGLERDFIRIWSLSPEVVALVAQPVQVPFTAHNGRAYIHTPDFFVQFDDELNLKPLLVEVKPREDWKENWRLWLPKWKAAWRFARDQGWEFHIFDESRIRGTRLKNVEFLQRYRNMALDPKLTEVILGKLAMMRRAPFHALLALHFHGHEAIGRSHLWHLIATGQVWTDLDQELDEFSVMRCHDERF

SEQ ID NO: 2371 - protein, 637 aa, synthetic construct
  REGION 1..637: note = TnsF-Tn7 System Protein
MSASEVQSHALNRAALKIQVGEFVRHHKHTYKIALLVDFHHVLGQDVESGISKLLPIAELKRPEGKNGRVYASGLDLARIADKQWAIAEQRYAIIAPLLAKDMHVEGAVIKRAKDSGVSKATVYRWLYAYTEGSRFLSLLPQARGWKKGNSRVCTEVEDIIGNVIQTLYLSTRRYTIKDVHDEVAKICRLRGLPAPSIPTVSLRIKKVPARQVLKARGYADIASDTYEARPGKYSADYPLHRIQIDHSPADVMIVDDVHRVSIGRPWVTMAIDMYSRMVVGYFISLDAPSAVSVAMCLVQAMLPKHEWLTHHQVSGEWPVWGLPYEIHSDNGPDFKTKSLIMACTAHNIERQFRPRKRPHWGGHIEALMEENAKVFSKLQGATQRNPDSRGDVDSDKEATMSFDALEKWLVHTILIYNNKPHSGILFKPPIAMWNQAFWGPKAFCGMPPIPEDPLSLQLDFLPSEYRTIQTYGVEWDAMYYAEALRPWINQMDPKTGKKMQFLFRRDLRDINFIWFFDPGLNRYFRVPLADGRFDSVSVAEYVKTKRELKKENLASVDNDTIRQHIEKRRLIEEEEAVKTKAARRSAQKTKNNAKGKTPATVFLGQQEDSPPRPLPAIPVEDAWGDDDDVPLYGGVA

SEQ ID NO: 2372 - protein, 219 aa, synthetic construct
  REGION 1..219: note = TnsF-Tn7 System Protein
MSHGSKPQPGEITLAHHGVLFLDELPEFDRKVLEVLREPLESGHIVISRAKDRVRFPARFQLVAAMNPCPCGYLGEPSGRCSCTPDMVQRYRNKLSGPLLDRIDLHLTVAREATALNPALKPGDDTATAAELVADARERQHKRQGCANAFLDLPGLRRHCKLSTADENWLESACERLTLSLRAAHRLLKVARTLADLEQADGIRREHLAEALQYRPTTL

SEQ ID NO: 2373 - protein, 381 aa, synthetic construct
  REGION 1..381: note = TnsF-Tn7 System Protein
MVSRCFWHEEVRPVGQQWPWVPVLQRDELFSSWLIRCALCNACDALEIAHHIWPQRRIWTGDCDLGICSLCLGGLQELSGIPSSALIQSSLVPVCRLMGLKLPPVGITSWVLSLGGRNLRRAGGLQYCPCCFADSPFYRLQWRLAWYTCCPDHGVKLRDSCPHCSAVVSPHRLDYRARDLMRCHECGGMLAEVDTQDAATDELQLIRQAELILQGAPADLNWPWMTIAERFSLLKGLFRLVRALAISPSAAGQQFLAALDVDIASLKPTVDAGLKLECLSNAERSHLLSAVSRILSAGADRFRAAAEDAQLCPSIRDAASSSAQLSQLMPRRPSRAYVRTVLASSRRPRSPRSVLKAWLRFKRKVLRSKAVQVGHCEGPAL

SEQ ID NO: 2374 - protein, 292 aa, synthetic construct
  REGION 1..292: note = TnsF-Tn7 System Protein
MSNYPHLLQEFRPIMDLCDAERLAFIKSRWIDYELSETLFEQLYAKLCGHRDVPDFFIVGESRMGKSSLVDRFIAVHGAEYVNEDGCRVRPIIKVEVSKPSLRMFYCSILNCSNSPFNPDASEMKLRYKVESLLTSSQTRMLIIDEIQTIANGTSRQVADFMNEIKCLTNTLKLAVVGVGMPSANKLLMLERQYAARFVTVELPVWAPSIGFRQLLKGFESWLPLKQPSNLASKETAALILKRSQGITGYVEEILFHSARKAIETGKEKIDLELLEKYQWSPDVSGMRKYVR

SEQ ID NO: 2375 - protein, 292 aa, synthetic construct; identical to SEQ ID NO: 2374
  REGION 1..292: note = TnsF-Tn7 System Protein

SEQ ID NO: 2376 - protein, 821 aa, synthetic construct
  REGION 1..821: note = TnsF-Tn7 System Protein
MNPSMDSDDLDRTELDARGVLIEILGAVEPSLDTAVVGECIDAAAPNRAIRRKLARTLAADPELLTSGRPEGPVSLGRLIRSLRERGAHRVVVPCCSDCGKPNPLPGSVGRLRICTGCEAKRRAAREAPCSGCGRHMVCRYRDRHGGSLCAGCRPKDDHLVLDQLCTLIGKSVTDLEAAVVRAAVTAALKRPHYQQQMTWELEDNPKLLTGAGAQGSAKAITLIETLAAAGSHQVIVPPCPVCGQHAPLRASIDGKRACERCYGRTRQQNCGRCGRNDKVSGRGSAGEPLCRSCVHRDPRNHETCARCGRRRPVVSHTETGEPLCGSCNSPPVAVCEICGVSKPCYGVVVGRPRCEPCTRRVEPCIGCGKTLQVRARTPRGAMCTACYRKNPESFRQCTGCGVLERLHHHGLCKRCAADRILTEILAATDSDLGRTLQPLHAALVATDPRALLEWLGKRGRRSSNPTGAELLRSLATGRLPLTHEAFDAQSTPRIEHLRALLVYAGILPERDEHLAALNRWTITTLAAIPNHRDLLVVRAFVTWHSLPRLHRRLGDRQASASQIAFVRNRITIAIEFLDWLRFRNQTLDTIAQGDIDEWLTTGASTRYQLRTFLRWAVHNHYTGDLEIPHRKTIGHIPALDADHRWDLAHNLLHNNEIGLTYRVAGLLVLLYAQPMIAIIAFTMDQVVRDADGVLLSLGEIPLELPPPVDELVVRLMDEPHGHSSVGRQQRSRWLFPGAHPGRHISYNRMVTELHRLGIKALPSKAAALLDLCAQLPPAVLSRLLGISVTTADVWSRDGMRAGYANALAQRSKEGPRRPVV

SEQ ID NO: 2377 - protein, 821 aa, synthetic construct; identical to SEQ ID NO: 2376
  REGION 1..821: note = TnsF-Tn7 System Protein

SEQ ID NO: 2378 - protein, 1393 aa, synthetic construct
  REGION 1..1393: note = TnsF-Tn7 System Protein
MNIPDIDFTRIRSLGPGGQRDGYEEFICRQVAQEPPTAAAKFVSLHGDGGDGGVECYWTMPNGGEHGWQAKYWTNHTDVDKAQLDTSVDAALKQHPNLTKYTIAIPVKPTGPTGGRGKSLLEKINGQRGWLAGWISMATARGMTVEFEFEWETNIITRLERLDITGVQRRYWFDADILAAPWWEARRQETIDAARPRYIPELNIDVPAAKCIAALCSDEEWWTVVSDHTDQVNESAENIRGARNQALAADLDTVLEAVTEVIDALAIWHTSRTTAELHDLDRALGEAMNIVSVQETAEAAAMDRQYPDVDWDTRNWRQFQAEYQGWFPAQAIDALRKLGKKLTAVIELLINPVGRLSGAQVALMTGAAGTGKTYLAIDAVVRRLGCGRPSVMLHGRWFTDRDPLTHLRDVLKMPSDLTSEEAVALLDESARVAGVPILLVIDALNDTRPRSTWRDNLERLITTVGRYTNVRLLLTARTHYVGQVLPPGLTLPRFEHTGFEGVEFEAVSEYAAFYGLEPPTSPPIHGEFDNPLYLRLVCEALKNNNRLSLDQAAMGINELTEMVLDNANHVVSDRIDAPPSDRVVQQSMYALAAAIADGDTPWLTRAQAQAQLTTIWPDRSAEKSLLDALIAQGLVEEDIVPDDSPYGADIITITFERIGHHLIVADALAAVTDVAGITAELCGRLGRIIGLDGTTDLGLLEATSVILAERFGLELTEFRSEIDDDAALAAAVVAGTGWRNDASITVATRRIVVDALRWADVRSDALTMLFRLAARPSHPLNADYLHEFLSGLNMGARDSVLPAWFHRTHGTSGAVDRLIRWAREKPLDQVGAHTSRLWVTALLWTTSASDRRVRDPATIAAVRLLSRHPSEVSGLLARFTAIDDEWVTERACEVAYAALLANGTHDHWAAAAEAVWNTIFSVPSAVTPNATVRDAARSILEAANERGALPAGVTIDQFRPPYTSDWPLTWPTNADIATYNNSSYPKLVRSATNDDFFIYKLSPELQGRPGIDPAAAARWVVAEVVRLGYEPRHHAPFDWYVIAEFGMGRSTPGWIERIGKKYQWIALNRLIGIVSDHAPKTPSRWDPPAPSVPEPHTTISRQVDPTVVEFTPTDPTTRPWVPIYDWAPTVAKTDVEWIADDTDLPDIAVNEAVLEDRPHIVLSGDYDWTNSPDTNTRTRRIWTQLTTHLVATRDLATAITELSGRDLLGETIIQKPEICRIHCGYVGEYPYGHHTEANLHVIRHEWAEPLTVPTQPAAWHFFAQYDYAPGDQNALSLDMPAPEFFGSAPGELRWNGHNGWTDHTGQLVAIVRHTINADQNELLADANWLEQWLTEEQKSLIWIENTGKDAYVRPGARRNHPGSLTRTRVRSWSPGKRTQTAAPGWNRTPASQC

SEQ ID NO: 2379 - protein, 1393 aa, synthetic construct; identical to SEQ ID NO: 2378
  REGION 1..1393: note = TnsF-Tn7 System Protein

SEQ ID NO: 2380 - protein, 301 aa, synthetic construct
  REGION 1..301: note = TnsF-Tn7 System Protein
MFDLCFECSRYTADSRYVSGGHRSCPGCVERFDTCAHCGTLTRRGRSCDCRTRREHVWHYSYKPDPRFHGEGPLFLGLELEIIVPGYRYGECVSVAAAHLGRLGYLKQDSSIRPTGFELVTHPMSYRYAIERFPWPLLAALEGLDCETDSTVGLHVHASRDGFDSPAHIYRWMKLLYRNESAVSTIARRRSHYAPFDRAARARARDTAKGPQHALGLERYQAINPHPRKTLELRVFASSLDARRVQAALAFTAASIDYTRRLRVTDVRAGGWEWGRFAAWVADHPDYQPLWAEMEDLSCAC

SEQ ID NO: 2381 - protein, 406 aa, synthetic construct
  REGION 1..406: note = TnsF-Tn7 System Protein
MPASTLAEPVCEECSARVTAGHLISTIGGDRVCADCAAGLSRCDECAVHARADTLARTVEDTLLCRECLTGWQQCGECDIYTRDIRTVIGAVADVCADCASGYETCEDCGELATEVYRVEGGSRVCERCEDEDYRECFDCFTLVPRDQGYCDSCAHSSSAHDGVHDSYYTPELRFHGEGPLFLGMELELKTPDRSYRDAVDTALAHVKDLAYLKEDGSISCGFELVTHPMSYEYALARFPWQLLNRLRLLGCYTDEGVGIHVHVSRAGFSSPAHAYRWLKFVYRNEGSVTTLARRASSWAEFSPHQRSSAQDYAKGSQDGYGRYQAINVCPEDTFELRVFASSLHPHQVQAALAFAAASVEYTRELSAADIARRRGWEWTAFTTWVRSRPEYSPLLAEMEALACAS

SEQ ID NO: 2382 - protein, 98 aa, synthetic construct
  REGION 1..98: note = TnsF-Tn7 System Protein
MATRGLFTTISLQPLLAERGIELSSSQIHRLVTERPERLSLRVLMALLAILDCSMEELIEPIATAQQARRKAASAESAAEPGLGSLRPKRARITRLDS

SEQ ID NO: 2383 - protein, 537 aa, synthetic construct
  REGION 1..537: note = TnsF-Tn7 System Protein
MRLKPCATCGAPVRYRARQLCCRCHRRAAAEAAKATCPACGKSRVLLAGTGRCVCCSRVCASCGRVIRRGATHCRGCRRHLAAEAARRPCPRCGRPGRLRAETGWCGTCSRPRPGKKPPRVCTACSELRRHVGLGMCGRCWQRDPGRPFRQAERLAARLEDPPTWLAGFVAYAAARHCVGRTCRMITRVGQLLLADGGPTHPQALLERVRLTGRSMGTLARTLEGFFVEERLAFPLDHAARLAAGRREHRVRGTPKPLRPAVARFADAQLQAQQRAGRARTRARADRTIETNLAIVRDFGRFLAARGKLDWSTVTAEDVEAFLAAAPRNRQSRLGMLGVFFRWAKASRAVLVDPTRRLSARAPRGFQGRVLSRTEQRCLFRRWTTAGDAHPHECLVGVLALVHGASNAELRGLTVDAVDAARRTIRLGRRPHAMPLDPSTRAVLQQALDHRAGLGTYNPHVIVTRVTKTGYGPASEAYLAHVLDPAGVRPRVLRSTRLVDLVTVLDPKVVSVAFGMDDESVIPYLADHVQDARIADL

SEQ ID NO: 2384 - protein, 350 aa, synthetic construct
  REGION 1..350: note = TnsF-Tn7 System Protein
MDGSRLKVVPGAAPVPVEDPSDPDAFQTRCVEEYVASQVARGFSSVTIENGTGVLERMLGLLGRPAWEVTREDVDRVVGGLAAQGMAASTRRGYVQAFKGFHAFLVGRKAPLIERAFGARLESPLDEFNAARHVADDSPANRPPPTPERMETFFEFLRERIATARKYASAGRDYALFRTLYHAGLRADEAATLEAADLHFNRGPFGKLHVRFGKAAKTSGPRPRWVPMLDGLDLILRWYVDEIRPRFRDSKGLFCDEGGGPLHRGTIRNRLRYLLELEGAPPGERFSPHALRHACATRNYERGVDLVAIQQMLGHWHVGTTMRYVSPSATFIEDAYRRAVSDALGELEEG

SEQ ID NO: 2385 - protein, 102 aa, synthetic construct
  REGION 1..102: note = TnsF-Tn7 System Protein
MDIRWRLRMTAAQREVWTGAQLRRLLAERAGLELSSASVSALLTKQPAQVKLSTLAGLCTALECTPNELFEVDTTPVAPAKKPARKRPEPERAARGRSMPPL

SEQ ID NO: 2386 - protein, 186 aa, synthetic construct
  REGION 1..186: note = TnsF-Tn7 System Protein
MPPEDRIAVIGRVLTDDDQPLRSRAAAIIVLLYAQPLSRIVRLTIDDVVHDGDHVLLRLGEPPSPIPQPAADLLLAWIDNRTNMNTATNRDSRWLFPGRRAGQPMHAATLGGLLRDLGIANVAGRTSAMRQHIQQMPAPVVADALGCHHVTTTRLAAEAATTWSRYVAAPRFRSPDGWTPARTHDS

SEQ ID NO: 2387 - protein, 577 aa, synthetic construct
  REGION 1..577: note = TnsF-Tn7 System Protein
MSHLRPRSCKQCGEKIAEYGRARCFSCLHPNLPPPNCKACGSDAHYAGGFCRRCHPRVPSPDSCSDCLAWGLWRRHGRCAACTSLRNRGHQTGTCATCRRTVPLFKQGMCRLCRCQALAVPRTWQRPDWSTAANTGQQLFLADLVRRVHLAAAARPQGYGAPAAHQQPDIAFWATPRWRQEPLFIAARDMSRVTVTDVTPIDSAFTAYVATQADASAETQGWSPALRERVQKSLYLLTAVHGPHETIKASTVASLPRQQNRRAVIRVTEVLAHLALLDDDRIDPLDAWIHRRLASVHPEIREEALVWIRIVRHGGPRRRPRSTTTVRNQANSAIPFLLACSQRYRTLRQVSRADVTEWLAQCAAPHTEAVALRDMFKTLKSERLLFANPARGVSLGSRPSSVPMPLSPETIQRLTAAAETNPALKLLIALVGIHALYPHQARALPLTAIDFTRGWLTLGDIDHPLDAFTQQAAVDYIHLRHQRWPHTRNPHLFISSQTAHTRAPVTTGWMQPLLRGLPVTAQQLREDRILEEAAVTGADPQHLCAVFNITPETGLRYTRFFHPDPTDSADASGWVTG

SEQ ID NO: 2388 - protein, 353 aa, synthetic construct
  REGION 1..353: note = TnsF-Tn7 System Protein
MSLAVVAPIRSRPLLQSPQDVADFEQDLLSEFVLARAAAGLADETISGDVDALMEIRGWFGGPLWELVPTDLDRFFGEDQRRLATLTKVRKAQALATYFEFLEVRHQADIHAATGVLVQCPVDEINRPRGNTNMRVRIPPPAADVDRLFAGWRDDLHAARKYAPTVRNYTACRLASLIGPRVSELCLLEVHDIRWDLGTFGKVLLRGKGSRGQKKERLVPLINGSRELLEWWLQGPRWEFDDQLDEPGAPLFPSERRDTGGRCKRVSTSAIRGGMAEAVQHHLPRWTGRATPHALRHFAASDLYAQGMNVVAVQELLGHRWINTTMIYVHVNKTHIEDAWISAGQRWTSRFTG

SEQ ID NO: 2389 - protein, 106 aa, synthetic construct
  REGION 1..106: note = TnsF-Tn7 System Protein
MKWNLRLAAAQRDIWKSSQLQAMLADAGLVISAGKMSNLWSGQPVTIRLDDLDIICEVLGCEPNDLMVREPEKARAQRPASTPARAAVAGERPRLERRVGRTEPPL

SEQ ID NO: 2390 - protein, 181 aa, synthetic construct
  REGION 1..181: note = TnsF-Tn7 System Protein
MTSGADTEKRQEAVADLAAVLTSRLPDADIDGLTEQIGDVHLTTPQARAVLDHLRAHPGGLTSGSSDGPAGLERLLAALAERYPQVHRMRCANCGDVRALPYRRDEAKICGRCYGRTHLIGCARCGRQGHPAVRDPGGGTVCIRCTRTDPARHESCARCGKTTPVAYRIDGAPFCQSCGPR

SEQ ID NO: 2391 - protein, 371 aa, synthetic construct
  REGION 1..371: note = TnsF-Tn7 System Protein
MADTADRPGVAHLVLAPGVAHLDPETAVFGAMLDGWAAQQGARFLQPATIEQRRALLRRLAEFTNDYPWNWQCADLEEFIASCRRGTKPIVVSTARIYEITLRQFLTYVTDPRYGWPSECRERFGVAPRQLLHEENSIVHVTEHEGDPRRRPLTYDEIQALFDAADARVEQIRAHHRKGAAAAMRDAALLKTIYAFGIRRREAWGLDLTDLRHNPKAPQFGRFGALFVRWGKSSRGSPPKRRTVLTVPEMDWIVPVLEQWCTEVWQRFGATAHPAVGVTERADRMSLRRINEAFTAARDAAGLDPSLDLHCLRHSYVTHLIEFDYPEKFVSAQVGHSYAASTAIYSGVSDEYRNRLLQRSLAKPPDLWGQT

SEQ ID NO: 2392 - protein, 181 aa, synthetic construct; identical to SEQ ID NO: 2390
  REGION 1..181: note = TnsF-Tn7 System Protein

SEQ ID NO: 2393 - protein, 109 aa, synthetic construct
  REGION 1..109: note = TnsF-Tn7 System Protein
MTKKLGCRWHLRNVMAEHDMFATTDLVPVLAERGVHLSREQVYRLVTKTPQRLSLDTLAALCDIFDVGVEDLIEVAVTDEPGRTKASGTGAAAPPPLVRRTTIRRPRGL

SEQ ID NO: 2394 - protein, 194 aa, synthetic construct
  REGION 1..194: note = TnsF-Tn7 System Protein
MRSHRSKAEPELLDEDTHWDLLQQCIHDEELPLDGRVAGSLLLLFGQHLSRIVILTTAYLDTTGGRTTLRLDDTPIHLPDPLDRLLCRLAEQQFQHGWAATSSSWLFSGARPGAHRSTGPLSRALAAYGISVRPSRATALIQLAQDMPPAVLTPLLGMHVITAQVWRRRTGSDWTAYLQVRRRAPGITRPPYVQ

SEQ ID NO: 2395 - protein, 328 aa, synthetic construct
  REGION 1..328: note = TnsF-Tn7 System Protein
MEARSALVLAEAEHRQVLAERLPGWTRGAVPQEHPVVVVVAGQPGAGKTAIADLVQAALERRGGAVRIGRDLYKPAHRDYAAALAADVRTAGAAVRPDTTAWQAAVEDHVRRLRFDAVIESALADLDEFRGSSAAYRRSRHRIEIVALATAEAWSQLGILDRFLTEGRRYVSWENHDTCAAGMLTVLAAVEAEQLADRITVVTRDGTVLYDNELTGGTWRRRPAADHAVARGRGRPWSARETAAFRCGIAAAEVRVHRDVADEDERLAVARDAARAAALAEPVRRIAQPRRRAPGVDYHRLSPAEHDWIFDELGRVLKIGSVPHPASR

SEQ ID NO: 2396 - protein, 328 aa, synthetic construct; identical to SEQ ID NO: 2395
  REGION 1..328: note = TnsF-Tn7 System Protein

SEQ ID NO: 2397 - protein, 225 aa, synthetic construct
  REGION 1..225: note = TnsF-Tn7 System Protein
MADCTQTDVDAWCVERTASDRVNIRGFLHWSAKTRITRRFALPTTARRGGKPLPERDRTALLGQVLISQHAPLRSRTAAAILLLYAQPISRITRLTTDDIVCDGDQILLRLGDPPSPVPAPVATLLFEYLGQRTNMRTATNHDSRWLFPGRRAGQPLHPNTLAALVHSLGVPTTAGRAAAIRQHVLDMPAPIVATALGYHHATTARLATEAGTTWSNYAPGDHGR

SEQ ID NO: 2398 - protein, 383 aa, synthetic construct
  REGION 1..383: note = TnsF-Tn7 System Protein
MRVTEGGQRVGVDGSAPGAARLRVVDGVPLLRPAEQVFEAMLDGWRNQQLARNLAVSTVEGRRATVRAFAAAASAFPWRWAPQMLDEWLGDLRSVRHVKRTTIRSYQDAVRSFCQYVTDPAYGWAAECETRFGSHPIQVVHDWNTAVHVQESEADAAKRAFTRRELQTFFTYCDDQVARIRGLGRKGWLPAFRDATLFKVAYAYGLRRNETRMLDAADFGRNPRGPEFGEYGVCYVRHGKAKKGSPPKRRSVLTVFDWAPEVLDEWFTEVRPSFEVEGNPATWPSERGRRVGCQRLNSRFAAYRDALGLDAGLDFHSFRRSYVTHLIEDGYDARFVQEQVGHEHASTTSIYTCVSSDFRTRTLRRHLDATTAAALETQAGRQA

SEQ ID NO: 2399 - protein, 110 aa, synthetic construct
  REGION 1..110: note = TnsF-Tn7 System Protein
MKRKVGYTWRLREVMAQHQIFTATELVPLLRDRGIDLSASQVHRLVSGTPERLSLQVLSAFCDILGCTPADLVTTTAQNAGVRKTAIGDLPAPPTAAKLRPRPARILPDE

SEQ ID NO: 2400 - protein, 252 aa, synthetic construct
  REGION 1..252: note = TnsF-Tn7 System Protein
MRWLSKGIVSTVLSDLGSGRRPLTHEALDELPEGKVVEHIRSVLVATEALPRRDEQMVRLERHVKDLVASHATAEGRKMLHRYATWHLLRRLRRRSRGKETTHSQLAVARQHLRAAVYLLDWLEEQNLTLATCRQADLERWMTSDDVRLRREAGHFVRWALSQKIARDLSFPAERWNGPSQPMDDEARWTPPVACCTTRPSSPKTVSLACCCFSMPSGPQRSPASPSTTSRRRTEPFASASRRSGRASRTRR

SEQ ID NO: 2401 - protein, 252 aa, synthetic construct; identical to SEQ ID NO: 2400
  REGION 1..252: note = TnsF-Tn7 System Protein

SEQ ID NO: 2402 - protein, 422 aa, synthetic construct
  REGION 1..422: note = TnsF-Tn7 System Protein
MTTADQLDRAVADPIGLITDLVTDVEKELDAERIRAVVTAVAGGRAKSRSLAKALAMRPALLTDGRSPAPRAIGDLLIELRKAGASAIAAPVCAECGKKLRTLQRKGQDWYCSVCGQERAECTACGNVRRVSFRDRKGLPRCKMCPDNDDRDPAAVVHELITAIGPGADRDVIAEALRRTAPNRPTYRQRLVWALEENPRLLTGEGFLAPHRAILWFIDLLHEAGVAGIVRPACPRCHRVVRIDKPLDGQRVCRNCIAKSRFEECVRCGARREPATRDGERRPLCPSCLVKDPANLETCIVCGESRMVSNRTADGSICPNCRPLPILLCSICGRTAPCMLSKLTSLPRCGGCDRRQAHCTVCGRMRGIHSGTADAPVCGPCTTPDAELWRPCPTCGQTERLHAPGTVPPLHPQAAAPRTPRR

SEQ ID NO: 2403 - protein, 208 aa, synthetic construct
  REGION 1..208: note = TnsF-Tn7 System Protein
MRKYLTPDQIRLREDLAGARDRIIVLLNLAVGESLGMEQAQEFVEKARAWSGANAFRLLRYLASRPDALSAPTPDCPPCGVRLIALLIAGGHGENVGLVPCANCGRTNPLPTYAGPEGRLCHGCSSRRLAVPCARCGKLAKAVARRPDGRICQVCKEKEPGSRKECVSCRRMMIPTGTCPRAPTCARPAPPRSSRRAAAVAAGGGRTR

SEQ ID NO: 2404 - protein, 338 aa, synthetic construct
  REGION 1..338: note = TnsF-Tn7 System Protein
MFDAMLRGWRAQQKSRGLKDDTIEPRERLIRRFLDFTNEYPWRWTPAHLDEWSASLTSERHLAPSTVRSYQGTVRLFTELLIDARYGWVPACEEAFGTFPVAICHEWNTLPHLQDYEGDPEARPFTREELQLFLDYADDQVERAVRAKRKGALAAYRDATLFKVIYGWGLRRTETSKLDVVDFGRNPQARQFGRYGTLNVRYGKAKKGQPPRRRNVLSVMDWAVEAVADYVENVRPRFGFPDHPALWITERGGRLQPGSINDRFEAYRDALGLTKELTPHSLRHSYVTHLTEDGVDRRFIQQQVGHECDSSLAIYTHVSDDFMNTSLHKALAPAFAGA

SEQ ID NO: 2405 - protein, 347 aa, synthetic construct
  REGION 1..347: note = TnsF-Tn7 System Protein
MKEGWARQQHARFLKASTIEPRLRLINRFEVFTGLYPWQWTPADGEAFIAHLRSGANPIRMSTARTYEVTITLFVEYLLDRRYGWVDACRERFEQTPQVVFHEANSVVHTLEYEGDPRRRPLTYDEVQALFDAADARPAQIRGHGRKGTLTALRDAAVLKTIYAYGTRRTESSMVDLVDLRRHRKSPQFGQFGSLAVRYGKSSKGAPPKRRTVLLVPEMDWVVDVLGEWVHEVRPRLAPGRHPALWVTERAGRMSPRSINEAFTTARDAAGLDGALDLHCLRHSYITHLTEFGYPARFVQEQVGHSHGSTTAIYMNPRELHQTGEKPQVAWSRWEVERVPRVYGLAS

SEQ ID NO: 2406 - protein, 116 aa, synthetic construct
  REGION 1..116: note = TnsF-Tn7 System Protein
MAAKLDYHWHLRKVMADRGMFSTTDLLPPLAERGITLSTSQVYRLVVERPERLSLRILMALLDILDCTMDDLIEPIAAAGAVKKPKKAAAGGSVPESEGLGGLRPKRARIRGVDRP

SEQ ID NO: 2407 - protein, 502 aa, synthetic construct
  REGION 1..502: note = TnsF-Tn7 System Protein
MRECGRCESSKYRIRRVERGVPYCEKCYTHMFPLTSCCRCLAEARIFKFDEIKICRKCRNVSLNCARCKKGIDKASRRVGDSPLCGSCANVFYREETNNKSVYESVGGKNSEFKKLGVSTKFITCKHCGKHRKQSPSYNENGLCIECFERGCPHHDCPQCGNAVAGIGNSICSYCDRKNKVQARIILNVEMLEGEDFRERFLVAAKHILNKSSSVQLVGRVDRLASAFRFLEVRSKNAESVDQKLIMDSIEDEISRSYSTLANILCEAFFVEWNAEIESDIQESRRIQDIISRNDERATVVLKKYLDYLLCKGSKNYKKKTIRVYLRCAEAFLYSLCKSNTLLECSPESVRNFQLRNPGLRASLRVFFNFVEYFSGVRYASLSIRKTDEKKLDRLLREKCRVLSARIDKSSDLSERKALTAKMLSLLYGIPLGLVVNQTVDSFFVDGAKVYWRIDESIILIPQIVSSYLIESISSEKSRFVFWGDGKERPMSTASVNYWSTI

SEQ ID NO: 2408 - protein, 614 aa, synthetic construct
  REGION 1..614: note = TnsF-Tn7 System Protein
MVTRINPCEWKPQGVDDLEPNAWEGLRENKQHAAVLAGAGAGKTEFLAQKAAYLLQTGICSDPNRILAISFKNDAARVLKERVNLRCAPEQSRRFESFTYDGFTKFLLDRFRLAIPEPYAPPPDYNIYFPNKGTFQEFLNNQKIRGVNVYQLQKDIANLPLPAGQHNYLALKSYWQCRLTSDEVALSFQMINRLIEYLIRSNPNIKHALRSTYPFVFLDEFQDTTSPQYELLKFIFLESNSLITAVGDDKQQIMGWAGALPEAFNVFNQDFGAKNFDLVSNWRSHPELVSMQHAIAQMITPGLTQPEAKNTKNMKGDVAAIWGYSDRNDEIQGVSNWISEQINSGTKAHELAILVRTHADKLEVEIAPHLLNKGISIRNVARIVDGIAIQDILTEKLTTIILPFLYLGVLERSPENWNRALISLCALEGVDFVDERAHSQQQDRLQYFSRLLRQDLSNGNFHKGRINPTISSILAFLTEDAIRSSISEYKQDRDYNRVLNGIVSLLEECADCSSSWLEALDRFQGVDQVPLMTIHKSKGLEFQTIIFFGLDAKTWWSLTPDNPEELRSFFVAFTRAKQSTFFTSCSQTGNPVTWIEEILTSVGVNKLAGPGCEN

SEQ ID NO: 2409 - protein, 614 aa, synthetic construct; identical to SEQ ID NO: 2408
  REGION 1..614: note = TnsF-Tn7 System Protein

SEQ ID NO: 2410 - protein, 233 aa, synthetic construct
  REGION 1..233: note = TnsF-Tn7 System Protein
MSRLTSKGGARSIPKNNRSITGRVSFRGAEESQPFESSLERDLLQVVSFDRAVTKAVSQPVEIAFDGHRRYFPDLLVEYESFKPVLFEVKYRKDLMENWRELKPKFKAAISFASERGMIFRVITEKEIRGNSLVENVRFLRGFMDIPVELGVKKSIVETLRVLGPCATPKILLEAAFDSDEWRLKGLRCLWFLIANQQVKTDLFKKLSMTSSIWINERSTCQIPLSYRLRLAR

SEQ ID NO: 2411 - protein, 611 aa, synthetic construct
  REGION 1..611: note = TnsF-Tn7 System Protein
MDTVLGENLNDKTVKKLRIDRLRRLTEAESGEALIETVDINEFSDDEWKVAQFRFECIRPLLDDPFRTRKKAESVAEEAGVHVATLYSWLRAYQNDGHLSSLIPQARGRKEGKTLIDPVLEEIIASAIDEFYLSKQRYTPADVIEEVKVMCRIAGVKPPHANTVRARIKKISEKEVLKRRGRRDKARDLFDPIKGPFPGDDFPLAVVQIDHTQANVIVVDEKTREELGRPWLTLSIDVWSRAILGVYVSMDAPSATAAGICIARSTLPKTEYLANLDVPGEWPMCGKMRAIHVDNAREFRGEMLRKSCQQYDMDLTLRPVKTPHYGAHIERYMGVASRLLHKLPGTTFSKPEDRKGYNSGKEAVMTLHEVEQHLVDFIVNVYHQRIHSSINVTPKRMWELGVLGDDDRPGVGLPDIPADPDRFVLDFLPYETRSVQNYGIQIDCINYYHEVLNRWINSKDPNDDRRKRKFTVRRDPRDISKIFFFDPDIKSYYVIPYRNTSFPPVSIWELREARRKLIEDGVKHVDEDLIFNALIRMKDRVDEAKKKTKLTKLKAHRNERAKKLSKVTSPSEIISVALPKPNDEKFFVQDQEESEDIFSMREEFFSDIRRK

SEQ ID NO: 2412 - protein, 672 aa, synthetic construct
  REGION 1..672: note = TnsF-Tn7 System Protein
MTTLNPRQKEAVHYIDGPSLVLAGAGSGKTSVITRKIAYMIQECGIPARHIAAVTFTNKAAREMKERVTKLVKGSAARGLTVSTFHNLGLNIIRREHKTLGFKSGFTIFDQEDARGLIKEIMLKDGDTNTDMIDLVQSQISNWKNGLIEPDEALSKAQSEGEQTWALVFERYNKALKAYNAVDFDDLIRLPSKLFSEHPEVLNRWQQRIRYLLVDEYQDTNSSQYKVVQQLIGDRGTLTVVGDDDQSIYAWRGARPENMSLLKVDFPSLHVIKLEQNYRSTARILKAANVLIANNPHEFDKTLWSDLGMGETIRVIKCPTEDAEAERVATEILTQRLRRQCKFKDFAVLYRGNHQARLMELKLQHHQIPYNISGGTSFFARAEIKDIMGYLRLIANPADDNAFLRVVNTPRRQIGTGTLEALGRYSTERDISLWAACDEMGLQALIPKQGLERIRKFSGWLNSVRSNCHNGDPVQAIREMIDDIDYEGWLHQNASSPKVAEKRFENVNILVESIKNSLERDENEDADGEERINTAISKLLLQDMLERQEEEDETDRVQLMTLHASKGLEFPHVFLLGLEEEILPHRNSIEEDNIEEERRLAYVGITRAQRTLTMTLAGTRKQFGEKQTTTPSRFLDELPPEDVEREGFSEATPEQIEKKGKETLSSLKGMFD

SEQ ID NO: 2413 - protein, 197 aa, synthetic construct
  REGION 1..197: note = TnsF-Tn7 System Protein
MDELPEFPRQVLEVLREPLESRHICISRANAQVTYPADFLLVAAMNPCPCGYHNDGTNRCRCTPPQVERYTNKISGPLLDRIDLHVPVRAMPIEELQSKPDGEPSAAIRARVRESRNRQLQRQAKPNSELSGKELKQRCELGDAERHLLAQAMQKLNLSARAYDRTLRIARTIADMVGEEQINMTHLSEALGYRTLS

SEQ ID NO: 2414 - protein, 293 aa, synthetic construct
  REGION 1..293: note = TnsF-Tn7 System Protein
MFEHLDESVVPIIGQSLKDKLDWVRSDFWVGYTRADEILGYLEDLMQYPKSIRMPCALLVGEPGNGKSTIVEEFSARHEVTFKETGEPIKPVLVMDMPSRPKDSEFYSQILFALRVAHKTSDGVESKKDQAHRMLLALQTRIVILDEFHDILHCTSREQRAFLAVLKKLTNLLKIPIVGVGTREAITVFHTDTQLSSRFEAIGLSKWKLDKEFIKLLVSFERLLPLAEPSYLNNREIATKLFNMSEGTIGGLNRVLVMATTEALREGKEKITLEILNKINYVKLKDYGLQANK

SEQ ID NO: 2415 - protein, 293 aa, synthetic construct; identical to SEQ ID NO: 2414
  REGION 1..293: note = TnsF-Tn7 System Protein

SEQ ID NO: 2416 - protein, 1277 aa, synthetic construct
  REGION 1..1277: note = TnsF-Tn7 System Protein
MTIAIIGQKKYDFQDRACIAIMLHFYDCDNAEFFVEREGCEDGVLYLNDQHNHIVEIQVKGADKPVTMDFIVECLAHMPDRSAKDTLLEKLIENDHLYVVLVMTGRCDDETSIYTHPWGWKLEAHKSGKIQNKNASILLDNLSSAKIYQSATPSKLMQERAKHCNDLAGRLTPANLAKILHKLIVIERTDDQTINSICCNILQQKHHVPQDQHENVLLKLYQAVKDAKDTKNIIDAFPSVRTIIDEAKPAPVLLGKYVLRGDEDNFHKILATENVLLLSGSPRTGKTFLARKLATDYQSKGYNVLLCNDIEEAERFLYHMSHHPRLAFLDDPFGGTQLIANPIQALTKLKQLATTLSSKRKLIVAQSQDQLLFTTNQNKIEDVQLHANSFFQSKYYTSTFLVNLWLSLCDTYTVDPSLKKIVITGLQNNDIDLEPGCLNYLAINHHELNDNYALENITRHARTDAKDLSLALTNNGYEQLLQSLAITSSTMHGIDEKDLAFILCDEVQLPEYEEDCHTFSLGAGTPKGFEPPCYDKEYTLSEVHQSQLDDLEKRNIINIDDNGTIRITHAFYQSAAELTLENPSARLAQKIINITERGLRTITPITSRSTARNLHWVYTYLGKRLKQQEELLKLAESGLKSFFPATRDLCFDFLLNPKVSLNDGMQKDLQEWVNRVSFHSLDNITWVNGEAVIDTSHSTDSFFRQYQHVNEGEVIDYLQTLDGNSETFLTPEQIEKILRFYSAQPDKISHHAVKTLLSNDVAIIRSEVARIWLSITRTDDNDILERIFQENHPSVALAVLNATIISWETLTQERQDKLIAGLIQMSECVSNAIAMMNPLVIFERTQEEYDITPPWPVFEAIMPIVISKLPINATFSDARMFNVFREAVPHVGANTMLAICDSWMGYLENQLDNQMLPSNFSLGVAKILMSTTKKYPEKREKRIERLLSFTSTPALMAIISDLVDDWQHLTIEEREALTDTLTGNRTDKIWLQAIVITSANVPASLQKVILGTQLSLDDSPNTILEIMEPSLLNASMKVFCGNPQPLWWIGCHHNSTKEWEPIIELIARSPDHDLFELAWSEITFGGDGKRVASVINDVGVKHAERMLDLLLKIKLDCTGNYMPEAWSALFSLAPNKETKQQWFEIVDPYLPDILDDPFDIELWLSDKDVFELACEMLQEDFHNLRLYSQLLKAKENNDVSLYAEYIKLLDKVFDSYPPRLFGTCDCILRILKKIPNIPPKISNAVQAKRKAILDAKHDDSTKPKLKFDDITDWSKSP

SEQ ID NO: 2417 - protein, 1277 aa, synthetic construct; identical to SEQ ID NO: 2416
  REGION 1..1277: note = TnsF-Tn7 System Protein

SEQ ID NO: 2418 - protein, 307 aa, synthetic construct
  REGION 1..307: note = TnsF-Tn7 System Protein
MPSTPIWDRDIDRYTPAKLNEKLSIYSGESIETIESMTFRKMQKNVPSNWLDVEAITPMILSIGIHGRSRNNFGLQYCPYCLGENPYFRKHWRFAFYTYCDRHSFQLLDACQYCEEKIIPHKSERVDLCWSCNRSLSLIRPNDTNFLSLRRNQLLTVSSEGVVGCNLSIDFSTTNFLRNIRNLIKVIVEVDGGELTSSLKGKKLQYELLRVDARRKITKILEEVMAEWPVSFHKYMVGNNVTQRKFERSVFDEFIMREIDKLPVGRKVYRAYNPVVYTQELRNLKRRSKSQYRVDRANLLLKDCNGG

SEQ ID NO: 2419 - protein, 491 aa, synthetic construct
  REGION 1..491: note = TnsF-Tn7 System Protein
MAIDVNPRNTVRGRPRTDGSFVCDRCGREAGKPRARWPEGAICGTCFHAAVRTYGFCGGCGFERMLPGRDEDRAVCVDCAGINTDFHCATCGVEAEHYRHGTCARCALRNDLTTLVLHDAADPVAMSALVEALCAADRPESVHTWKRSTTVQDLLIGLSVGDIPLTHEGLDAVGNDRQTAHLRRVLEHHELLPPRDRYLALFEAWIDHKLTAIEHTSVLRYAEQFATWHHLKRVRGIAAAGKPTRGPVHASKQDITETIKFLTWLHDTHGRDATTCTQQDVDHWLAEGPTTRHLVRTFFVWATAARINRTVTIGHRQPEPPATFTQDERLHWIRELLIGTSESLPYRVAGVLLLLYAQPIAKIAALRAEHVTQAGHGLQIALGTEPVSVPEPFARLLRQHIATRTTLVTGTDTGWLFPSRFTGRHLHPGTVTDRLRALGIPLLGARRAALRELVIHVPPPIAAEMLGYSYSMVHRHAELAAQQWNRYPAQR

SEQ ID NO: 2420 - protein, 306 aa, synthetic construct
  REGION 1..306: note = TnsF-Tn7 System Protein
MTDKLAALTDSDSRQIIERFARWHHLRTLRAHARTREVDAGPFLRAKQSTSMAISFLAWLGEHDTSLTGCTQHHIDRWYASGPSTRQHTERFLYWARTNKLTPRLDIPRHARGAHELVSEDKRLQIIRTLLLHDDLPTSHRIAGCLLTLYGQSISRIVNLTIDDVEITDQGVRLKLADTWIELPEPIAAIVQLHMANRPNMNTATNTNSRWLFPGFMPGEHLNRQTIIDTLRRTGIPVRATRNTTWQQLVRQAPPQVLADTLGISAATAMQHAEKAGSDWTRYASTRSPEPGPAQCSDRLSKSAET

SEQ ID NO: 2421 - protein, 306 aa, synthetic construct; identical to SEQ ID NO: 2420
  REGION 1..306: note = TnsF-Tn7 System Protein

SEQ ID NO: 2422 - protein, 491 aa, synthetic construct; identical to SEQ ID NO: 2419
  REGION 1..491: note = TnsF-Tn7 System Protein

SEQ ID NO: 2423 - protein, 491 aa, synthetic construct; identical to SEQ ID NO: 2419
  REGION 1..491: note = TnsF-Tn7 System Protein

SEQ ID NO: 2424 - protein, 286 aa, synthetic construct
  REGION 1..286: note = TnsF-Tn7 System Protein
MTDDPSLRGSVAAQLIAMSVPGGRLHTDASDNSSVLYAGEIERFAFRKRVIADYLDRENPPRDGYSAVVTAGAPGAGKTTALHRFRGDDLAGFRVLDPDIVKDHLIEQAIRDGIYDDILATPLADGHAVAPRELAALVHHESTQLIDQIRRICTSRRENIVIEGTLSWKGLPTRLAAELTQADYRSIEVIAIDADRRTCHEQALSRWWSGRRQWVEGTHSLGGRFTPPAAIDICYSDTESSLCTAHAIELEELAAVTFDTSRVAVLRQSTTGDLDVMFERMHPSTE

SEQ ID NO: 2425 - protein, 286 aa, synthetic construct; identical to SEQ ID NO: 2424
  REGION 1..286: note = TnsF-Tn7 System Protein

SEQ ID NO: 2426 - protein, 286 aa, synthetic construct; identical to SEQ ID NO: 2424
  REGION 1..286: note = TnsF-Tn7 System Protein

SEQ ID NO: 2427 - protein, 286 aa, synthetic construct; identical to SEQ ID NO: 2424
  REGION 1..286: note = TnsF-Tn7 System Protein

SEQ ID NO: 2428 - protein, 295 aa, synthetic construct
  REGION 1..295: note = TnsF-Tn7 System Protein
MPADSATSVSVELEAWCRPGGVLDKDGLRASMNIFDPVPRRRTRDGIVEAYLSEQTEVSIGRQCLALATAGPPGVGKSSSIERRHLAGRGWRVLDADRVKDYLLRDALDAGVYDDLLARTLSDGYRVLPRELATLVHSESTKLLDAITDICISRGENVVLEGTFSWPGLGPRLLSDLASSGYDKFTILDVEAPADITRVRALTRWWRGRVAAVGGGDPMGGRFTPGFVIDALYTPGFDRTICARNARAAFDHPLAEHIPTVELLIEHLGGDDETWVKEAGVVVYSTATTQGPSTS

SEQ ID NO: 2429 - protein, 295 aa, synthetic construct; identical to SEQ ID NO: 2428
  REGION 1..295: note = TnsF-Tn7 System Protein

SEQ ID NO: 2430 - protein, 295 aa, synthetic construct; identical to SEQ ID NO: 2428
  REGION 1..295: note = TnsF-Tn7 System Protein

SEQ ID NO: 2431 - protein, 295 aa, synthetic construct; identical to SEQ ID NO: 2428
  REGION 1..295: note = TnsF-Tn7 System Protein

SEQ ID NO: 2432 - protein, 369 aa, synthetic construct
  REGION 1..369: note = TnsF-Tn7 System Protein
MGVDGSGRVILVGAVTPLHPEEQTVEDMLTGWRNQQLCRNLQLHTIEQRQQMVRRFLDYTNELPWRWTPGLVEEFFGDLRSIRRVAHSTIRSYQTSLKLFCSYISNPDYGWDRLCEQRFGTHPAQVFFEWNTAAHVQANESRPSKRAFTKTELQSLFDHADTQVELVAASRRKGWLPAYRDAVMLKLAYSYGLRFNELRHIQTIDFARNPQAREFGRFGVVHVRYGKAQRGSPTKRRSVLTVFDWTPDIVSDWLAHGQPYFDTGLDLFPSERGTLVAESTLLRRFRRYCTELGLSPGLDLHSLRRSYATHLIEDGWDPLFVQHQMGHEHASTTSLYTCVSSDYRTRTLRRVLDSTVADALDLAEDGEIS

SEQ ID NO: 2433 - protein, 369 aa, synthetic construct; identical to SEQ ID NO: 2432
  REGION 1..369: note = TnsF-Tn7 System Protein

SEQ ID NO: 2434 - protein, 376 aa, synthetic construct
  REGION 1..376: note = TnsF-Tn7 System Protein
MVERWTVPGSAPALFLAGTSRLLRPDEQVFEAMLEGWRDQQLSRNLGRSTIKPRLDLARRFLRYTNDFPWNWRPMDVDEFFADLRGERRAHSTLRSYQSSLHMFCDYIADPRYHWTTVCENLFGTHPAQVFFEWNTATHTTDYEGRPARRALTKQELQDLFDYADDQVQIARRSGNKGWFAALRDAAALKTAYAWGLRRREVAMLDLADFGSNPHAPEFGVYGVLYVRWGKAGKGSTPKRRSVLTVFPWSVRVMSQWIEQCHDLQSSGARNSALWPSERSPRVSKEKLGARFAEYRDALGYPDELTLHCLRHSYVTHLIEDGYDPLFVQQQVGHSHASTTALYTSVSSDFRTRTLRKVLDDSITRALALPDSGADS

SEQ ID NO: 2435 - protein, 376 aa, synthetic construct; identical to SEQ ID NO: 2434
  REGION 1..376: note = TnsF-Tn7 System Protein

SEQ ID NO: 2436 - protein, 114 aa, synthetic construct
  REGION 1..114: note = TnsF-Tn7 System Protein
MTPTRRLDYHWKLRQQMAAHQMWKTTQLAPLLRERGIDLSAAQVYRLVTDKPERLSMKVLVALCDIFDCSPNDLITPEVVTGRVRRTAGTAAATVTALDSELRPERARITDPDR

SEQ ID NO: 2437 - protein, 114 aa, synthetic construct; identical to SEQ ID NO: 2436
  REGION 1..114: note = TnsF-Tn7 System Protein

SEQ ID NO: 2438 - protein, 113 aa, synthetic construct
  REGION 1..113: note = TnsF-Tn7 System Protein
MKRTVDYTWRLAELMAANGMHNSTDLIPRLLERGIDLSRPQVYRLVTQRPERVSLQMLAALCDIFGCGVDDLVAVTAADARKKKAVSSTSSPNVVELNRTVRPRRARVIRDGD

SEQ ID NO: 2439 - protein, 113 aa, synthetic construct; identical to SEQ ID NO: 2438
  REGION 1..113: note = TnsF-Tn7 System Protein

SEQ ID NO: 2440 - protein, 409 aa, synthetic construct
  REGION 1..409: note = TnsF-Tn7 System Protein
MTTDQAVCWRCLLSDAVHTLLAGPDGSIPELLQPLARAIIDMPRPNSGCTWLYQNPRVRELLRSLAHGTVDLSHQALDGLPSSRTVQYIRGLLVTHGCLPPRDEHLAAFNLWTIPKLNAIEDVGHRRLIERYIRWHLKRRLEDQSRTAPVTAGAFLRAKQHTTVAIQFLDWLGQRGRQLRECTQHDVDAWFGAGTTTRQHANNFLYWAIRQRLVRHIAVPVTTNRNSPLTSEEEHLTALRTLLLHDTLPASHRAIGLMLVLFGQPLAQIVKLRTDQLRDGPDGLQVTFGSEWLNVPEPAATVIRVHLAARPGLNTAANPTSQLLFPGFMPGRPMHIYSVSNRLRALGIRPLATRSRSWLQMVREAPPSVLADALGISPKTASRYAERAGTDYLAYAPLKHPDGPLTPGE

SEQ ID NO: 2441 - protein, 409 aa, synthetic construct; identical to SEQ ID NO: 2440
  REGION 1..409: note = TnsF-Tn7 System Protein

SEQ ID NO: 2442 - protein, 489 aa, synthetic construct
  REGION 1..489: note = TnsF-Tn7 System Protein
MPFSPTDEQTAALEAFRSGGHLAIQAGAGTGKTSTLVFLTEQMPLRRGRYLAFNRAIALDAAARFPSAVQCKTAHSLAYAALGHRFRGRLNAPRRPGWRIGQDLGLNTPAYIGRAGLMPATLSNATLRTVTRFCQSADMQLAHHHVPRLRGLDDEDHAELADLILPYAAKAWTDLQDPYGGAVRFEHDHYLKMWALTEPVLHGDFLLLDEAQDTNPVLEQIVLAQQDRTQIVMVGDSAQAIYGWRGARDVMARFTGQHLTLTRSFRFGPTLATEANRWLTLSNAPIRLTGTSDIPTTIGSGAGRPDAVLCRTNIGAMTEVLALIAAGIATALVGGGDSLRALAWAARDLIQGRRAHHPELVLFTTWTALRDYAEHDPAGSDLQPFANLVDEHGPEAILQTVDRLVPEDAAEVTVSTAHKAKGREWARVRIAPDFTPPADTDEVDAQGHPVPQPVDEAEARLAYVAVTRARHHLDPIGLAWINQHPDNPA

SEQ ID NO: 2443 - protein, 489 aa, synthetic construct; identical to SEQ ID NO: 2442
  REGION 1..489: note = TnsF-Tn7 System Protein

SEQ ID NO: 2444 - protein, 1189 aa, synthetic construct
  REGION 1..1189: note = TnsF-Tn7 System Protein
MERTLNLPALRDALGPPQPDALPSPEQLIRLIADIEVGAIMNRFVIDDQVLTTAWYLHGVCALSEAAELYTPTRQRHAFAVSAHIFDLALAGTARAPAEQLSLAFAAQVGYRRAGQDPNATAVFRRVSHLCHGRAELAGVDLGGEPQVTVRDFIETLALEAGVAFLGLQTTAVRTLVRYWRDELAYLAEELQEPDLSGTLFGPAAAVVDAVAAMANFLTYGARNRLARAETALRSVLSGEAGSGDLNARWVAAHLLHLIGDLADGSLHSLLPPGTPRAVAQAFTLTSPPVLTLWPPQRELLTRPAANPLDPATDRLLVSVPTSAGKSLVSQLIMCTHLATVPGRVIYVSPLRSLSREMRRSLRDRLRVLDRELGVDTPDFPLWGEPVAEQDDDEADIDVVTPERLMHALRHDPQNALRDVTLIVIDEAHHLAQDQRGFLLEGLLAFCQAHPDAPRLVLLSAAIGNGAALAQWLDPDEPDVLFTSPWRGPRRLHGLLTTNPLWDQKTTVARRSKTKPWTTRVPVSVRISIRPAQAARIAELTTSHDDPLGELVFGQSDPKDWSSKDARSTPAYKMFARAANYLLPAGPMLVVTSTRQLAQNTARAMADHLPEHEPAHPLAEELSAQLGEAHPLIACTRHGVAFHHAALPTDVLEAIEGALRNDCIRAVVSTTTLTDGVNLPVRTVVITAALSEDQRSQANGVPGLDAAKLLNAVGRAGRAGQESEGWILLALNRKIDASDHDLFTPTEADLEVQSALTTERALNALAAAEELIAQSADGVLAVAQSLASDFISYVWFVLDADEQLAAGNPLQAIARLLAMQQLPDDLKTRWQHLAEQTHQRYLTTSPTARRRWTTTGTSLKSSQMLDRLAGQLAERVLRDIDPESVSAWDIIEPDILTLAQTLQVLDEERAFDVLLELPERRQAWVFHDRRAPRGRIRVQVDLQEAMHAWIDGTPIPELARQWLPQAPADWALEQTVANISETFEHYLSWTLGALIHLTNDHLTKESAPVRLRPDTAWCLRYGVDTEQALHLLTSGIHSRTLAHAIGRRAEVEGVAPTGLRRWLADQHITQWRTLYQAIDLEIDDLIEYVRTRRRSLLRALLQDSSVELAVDAYDRDAYLPWEAFESEVSLHWPESGPAEEIEITDAPGNSRGRVRAGDHADLVAVLRSGLPLAFTLQGDQLSISQADVE

SEQ ID NO: 2445 - protein, 1189 aa, synthetic construct; identical to SEQ ID NO: 2444
  REGION 1..1189: note = TnsF-Tn7 System Protein

SEQ ID NO: 2446 - protein, 393 aa, synthetic construct
  REGION 1..393: note = TnsF-Tn7 System Protein
MNDSFALLAAYWGLVVSGSSWNVPGAAPSLFVVGGTPLLHPEAQAFEAMLAGWRDQQLARSLAKTTVEDRLAAVRRFQRFTNEWPWTWRPQDVEEFTAHLRSDGQDRALSTIRSYQGHVRLFLEYAADPRYQWTTVSERLFGTHPAQVFFEWNTAVHAADYEGRPQRRALTKAELQRLFDYADDQVAAARASGRKGWLTAMRDAVALKAAYAWGLRRREVIKLELADFGRNPHAPEFGDLGVVYVRWGKASKGSAPKRRSVLTVFPWSVKVMQQWLDGYRELFDTAAGSTALWPSERSRQLDMGALSDRFATYRDALGLPAELSLHCLRHSYVTHLIEAGYDPLFVQQQVGHSYASTTSLYTSVSSDFRTRTLRRVLDGTIGRALDATGKEGI

SEQ ID NO: 2447 - protein, 956 aa, synthetic construct
  REGION 1..956: note = TnsF-Tn7 System Protein
MDGGRGAARGFHYQYLRTLERLVAVIDDPEVACVRVEGPPPGDTVVDKVDFDVVGADGTVREAVQVKSRVAGGSMSGALALGVLLDMLNGSQEAGRYCLLTNARPGARGDRLEEVLSARFEPHMLLDTLLELFHDAPQRRDQLTRLSADGLARLARCRLEFDARDDSEILEELRNCLRGIRNRAHQGLGDASAGLLTGYLISEIHGRAADMTGESAAFSLAELRSLILVDAQTLAQSIGTRDWGTIAGKIPAIPDVRRPRLIEPLLAAFPATHKQPTRRATLVGPSGIGKSSAAALYIAERADAYDFIGWIDCETTASTHGSFLRVLDALDPNAAARPEARPEQTQQAVQRALGRLPGRWLLVFDNVAVMRQAEPWVPTASRGDVIVTTLNAATNLGPGEVVHVSAMERPESVQLLTRRLHLDDADEAPWQGALDRLARELGDWPLALELGAGYLYTCGLGLDQVDHYLKALKLRSYADEEMVPLGYPRSLAAAHTMCIEQIEARIRPGTVLDVAAVAVQMFYAAAYLASQQIPAHLLLAAAISRVEDLDAKHRGPVLIPPETVNIGEALRELARFSLIKNDLPLPPSYGETMPGADRSLSVNTVSQELMRERLSRHPAQATAVDQLAGHMERWLTGPVQLGELERVRVMQSHAEMLLEHIDRLDLPSERAALICGNLAAPYYLQGDVVRAEELYLRELDFLARAGSDNDALVVQTRFALAVMRIQVYELGNDRRPTLKTTLEEAVAHLEFVLYQAQSWVFEYPKAAMKLAIDSRLLLQGSSVPEALSPRLALLAEAFTDLESRIEPTPYAAQYGALEQAEDCLRNNRHAEAESYCRGLLDQGVSGPLEVETRRRLVEALAGQAKWDEAISEVTYWQDDAMAPRLFRHAIVDLIRNVCVSCAEAFAEGDAGSLRLLDHVVDWPHLDEFIVMGSDADNRAITSARALRDLIRKALGG

SEQ ID NO: 2448 - protein, 956 aa, synthetic construct; identical to SEQ ID NO: 2447
  REGION 1..956: note = TnsF-Tn7 System Protein

SEQ ID NO: 2449 - protein, 108 aa, synthetic construct
  REGION 1..108: note = TnsF-Tn7 System Protein
MVRRLSYHWHLRRIMAAHNIWKTTELIPLLRERGVNLSTAQVYRLVTDRPERLSLPVLAALCDILACSPGDLIEPYVEADRRKWTADEAAVIDLKPDFRPERARILED

SEQ ID NO: 2450 - protein, 212 aa, synthetic construct
  REGION 1..212: note = TnsF-Tn7 System Protein
MRFLTETGIVTVSAQLRDQDTERRRLAAILMEPADSWSAQLLSDYVDTLRAKNQQGGIDLRSVRLAARAAANLLKSAQVKSGTLPSQKSLELFWRDSPGQVATVTGFIGHLNKRHGLKLQVKPDARWLSTAKRQKAERDLVAMVGDTADDDFEARWIVKSLAYFHNLPRVSRTGLVFQPQDFQGVAGYNVSYQDKTLWVPSAESFLRADPVV

SEQ ID NO: 2451 - protein, 576 aa, synthetic construct
  REGION 1..576: note = TnsF-Tn7 System Protein
MAERLQRIDLTYHRTKLKHPDSGVKMLQGDQLVWWYGPIWNNTRARSIPLVKVHFKQLFNDTPGPNTSAVVPLSSLSHYRKGTIWRDGLCVSDTTLASPPETFEVDFDVDGWSTTSRAELVQKNEAHIFHHDEYPLKYQLDRTRLIDFKLAGGKNLLIPCTEYFIRAYARNMEVCRALATLTWRDAMTVFFDDPRRDAFSWVVKPSRAMRFYDAVFLAHLLYDDYAAARIRHINSQFTSQAPLTRIFMNVAPWFRGKGKLQCRGRWINSGNTFLCLSLLGSSQPSGQEIEWLTKKFDNSDGKEGGQLIMPRPVRTAEAEEFIKESSYTTPDGHAETVIVKPPPFKLLGEKRPIKKKKEVIKTDRGRLGPNPPEADSHSSGDGSGKGKNVGKLEHAAEAELETHGFLRDIWNAFRCIMADNPDRISKVNWYTPSKFRDQGPPELIRLQPTIDWAPDDKSAPGWVYLDKKTGERRGIMVLRIEVDGTNYFCFEIQPTKPDKAEYSGVLMKSHISSVEEFDDFLQKLCSRIRYVVGRFKHMESFFPPGAKIFKHHQKDAEVLYRSRLINAFREIGVVLD

SEQ ID NO: 2452 - protein, 212 aa, synthetic construct; identical to SEQ ID NO: 2450
  REGION 1..212: note = TnsF-Tn7 System Protein

SEQ ID NO: 2453 - protein, 182 aa, synthetic construct
  REGION 1..182: note = TnsF-Tn7 System Protein
MRFSHRVESVIAQPVQVDFIDPLGRAQTYTPDFLVHYRQPEGIDYMDYFKPMLVEVKPAYEWRKNWRTWLGKWKAARRYARQEGWTFSIYDESRIRGLPLDNITFLERFERLDFDREDIDMVLKTLHEMGLAPVHYLLARHFRGVYRDSGVALLWHLIATGRVECDITEPLNEYLELWVATP

SEQ ID NO: 2454 - protein, 640 aa, synthetic construct
  REGION 1..640: note = TnsF-Tn7 System Protein
MNIYEINTDEHLVAFEPSRERVRVEVGEMVRCEKLYYRIMQLLDFQNVVGVEAESGRSVSLRISELQPVEQERVDGLFVNYDISTISSDEWAIAQQRFSAIKPLLRDSILPRSSVEARAKEVGVDTATLYRWLDRYQSWNEVLALVPRKRGWQSGNSRLSAQADELIGSVIESHYLTNQRRTVQSTIKEIESQAKTLGITPPSASAIRARIKRIPEKIKLRRRGYADEARNRFTPSVGKFPGADYPLAVVQIDHTPIDLIIVDDRYRKPIGRLWLSLAIDVHSRMITGYYLALEDPSEISVGMCLAHSILPKESWLNLHNVRAEWPVWGFPRVVHTDNGPDFQAENFRRSCANYNIENQFRPVKRPKYGGHIERLLGTFMRELHELPGTTHSSVPDRDGYDSDKHAALTMSEFEEWLVRTIILYHNRVHSAIYMSPARKWHHGFFGSRGVDPLVSIPPRPADQMTVQLDFMPSYRRTVQHYGVQLDVFYYSEALRHWIGTKDPETGQLRKFVFRRDPRDISVIWFYDPVLKQYFRVPVANQAFPAATLWEFRAAKKQAVDEGLQHIDESLLARLILERRQLVQDASASTKKARRDAQKHKVHSKNTTPARPVKAPLEAVPSIPADEGLLFDDVDLIGDIQ

SEQ ID NO: 2455 - protein, 373 aa, synthetic construct
  REGION 1..373: note = TnsF-Tn7 System Protein
MEASYTWHPGACCLTPRWPLTPSILPDELFSSWLVRTAHAHGCEPCTLTDIVWPGSNAWVSDLDRLHPWANREVLGAVTGLSAQDLLACTLWPAIQLLHPQPAVQRSSLLPWILPLGCRNRSHAGGLLCCPRCIMDPHPYYRQQYRLAWHTACLRHRVLLIDRCPHCYSALQPGRLPAGHPLSRCHHCGGSLGGGCAVPALESALSFQTFADTASHSTVAFGEVSLSFSEWMCIARVMISFLKNATRQPTVKMLRFCHAIGVDACQLRSSSLGLSFEYATPAERAGLLGQAWVIMQADPKRFAELAADAELPVTAFPLPAFGVPEILRHMLKALSQHPPRKCSRPGPSHTRAPLEVWHMWHRLKRRMRRHDIS

SEQ ID NO: 2456 - protein, 296 aa, synthetic construct
  REGION 1..296: note = TnsF-Tn7 System Protein
MTEYAHLHADFRPVLQLSARERIRFMGEPRWIGYKAAHHILDSLECLLEAPKRPRMPNMLIVGDSNNGKTTIVRHFEKTHGQGYVDENSEPVRPVVLAEAPPSAEEKDLYIAILDKMWMPYKTTDSKVTLRFQVIHALRELKVQMLIIDEVHSMLTGSATKQREVMNALKMLCNTLVIPIVGVGTPDAVQILHLDPQHASRFEVIKLETWKLNADFQRLLKAFEAVLPLKQPSALYKPELAQLIHSISGGNTGDLHGLLLECATEAINSGKECIDRQLIESKSWKRPTRGIRERVV

SEQ ID NO: 2457 - protein, 296 aa, synthetic construct; identical to SEQ ID NO: 2456
  REGION 1..296: note = TnsF-Tn7 System Protein

SEQ ID NO: 2458 - protein, 392 aa, synthetic construct
  REGION 1..392: note = TnsF-Tn7 System Protein
MLDSLAAAEDARAVLCWLKRSPNARLLGELAAAGRPLSHDLLDELPPSRYEHYVRQTLVHTGVLPERHEDLDRIPAWLDQLLADKPPQHARLIRPFVHWFLLKRARRRAARRRQPAMAGSYLRTRIRVALELLTWLDEQELVLGDLTQEHLDRWLADGNTRDYTIRYFLGWAANRGLTQTLAVPGIPRQEPAHILNDDDRWVQLKRCLSDTSMPLDVRAAGAIVLLFGLPTSRIRHLRAEHLHQQDGETYLGIGKPPLLVPPKLAVLLHELVETSPVHQSRIVDDQPGPKWLFPGLLPGRPAGPSAFSRKLVDHGIDARPARNGALVALVADIPPPILADLLGLHINTAVRWAGIARRDWTDYLVARAADAAEDRRGGESHPRTSIHGPRTS

SEQ ID NO: 2459 - protein, 392 aa, synthetic construct; identical to SEQ ID NO: 2458
  REGION 1..392: note = TnsF-Tn7 System Protein

SEQ ID NO: 2460 - protein, 375 aa, synthetic construct
  REGION 1..375: note = TnsF-Tn7 System Protein
MSEATGLAGSVRLELVDGVVHLDPAGAMLEAMLQGWERQQRTRFLSEEGTIKPRVSLVRRLVGFTNEYPWNWSPADGEAFIAHLRSPNRKQPIVMSTGRGYETTLALFMDFITDRRYGWAAECLERFGQVPQQIFHEDNRVAHVLEHEGQPGRRPLTYDEVQALFDAVDGRVEEVRARGRKGALTAMRDAALLKTVYAFGLRRNETRMLDLADRRRQPKMPQYEQYGGLFVRYGKASNGSPPKRRTVLTVHEMDWIVDVLDHWVTEVRRAFRPGRLPALFVTERSSRMSLRGLNTAFEQARKAAGLPEELDLHALRHSYVTHLVEFGYPEKFVSLQVGHDHASTTAIYTGVSDEYRTRLVLNALKNRHPDLWEDQ

SEQ ID NO: 2461 - protein, 106 aa, synthetic construct
  REGION 1..106: note = TnsF-Tn7 System Protein
MIKKMGISWNLRKLMATRDMFQTTDLVPLLAERGVHLSREQVFRLVTQPPQRLSMDTLAALCDILQCTPNDLIEVQTVNAQVSKAVGDDARPAPQARRTTIRRPGQ

SEQ ID NO: 2462 - protein, 362 aa, synthetic construct
  REGION 1..362: note = TnsF-Tn7 System Protein
MLTDAENPYQVLKWLRRSPAAHLVKRLALSPETLSHGALDALPQRAASAYVRGLLVTAGILAPRDENLALLTNRVTRTVADLPARQANIIRPFAEWHIVRDARRRSSRGRYTYAAYKGDYGNVTAAIDLLNWLDSQSLNLRRLQQPHLDTWATDRPTLRARAIPFLRWGIARHLCPPDLVIDRPDSQLPGNFQAEDDARAELTRCLNDATLPLDVRIAGALVRLYALPLTRIVELTTEHISRDREHTYLRVKQHPFLLPPKLAGLIADQIRCSTPGHSAVTGPRHLLPGQSPGRPRNPIGFADTMRHHGLSARAARNTAMLNALTDLPPMIIADLLGIHPKTADRWATLAGNNWSEYVSSRS

SEQ ID NO: 2463 - protein, 362 aa, synthetic construct; identical to SEQ ID NO: 2462
  REGION 1..362: note = TnsF-Tn7 System Protein

SEQ ID NO: 2464 - protein, 497 aa, synthetic construct
  REGION 1..497: note = TnsF-Tn7 System Protein
MQFTVLEYSEPMPDRPGAYLMVDSWNDGGFITTFELSIRLADARVLRIGYLRIGHVSMRSDGTRRTADLLPPAFTALGDEFFSLAHEDDYYEKLRELPDAGMGYEVLRALNDVVFDSSAHRTARILDVYQKSLLRGRTEQQLYAANLIATGMRARVVPFRWSYTPDQKGLLPAHKFDFHAEPGSKPPTNLHALIGRNGVGKSTLLHRLAEAATEGRIAVHSPSEYEDNNFTGCVVVSFSPFDRPYDLAPAGLSFHFIGLRHAEGVRLKTAAEWRKEFVDSFATVRIGSRGARWRKAVDTLSYNASGFLDEHMPVIDAMVREGSDLKFKERMGNIFDSLSSGHAVVLLMMTRLMEVVGERTLVLIDEPETHLHPPLLAALTRTLSDLLSDRNGMAVIATHSPVVLQEVPASCVWMLSRHGDELTAHRPTTETYGESVGELTFEAFGLEVDSTGFHAAIAREVDRGGTYEEIAGRFTGLGSEARALLRAMTFERARGAR

SEQ ID NO: 2465 - protein, 497 aa, synthetic construct; identical to SEQ ID NO: 2464
  REGION 1..497: note = TnsF-Tn7 System Protein

SEQ ID NO: 2466 - protein, 370 aa, synthetic construct
  REGION 1..370: note = TnsF-Tn7 System Protein
MVAEAPGSARLALAPNVILLDPEPAVSSAMKEGWARQQSARFLQPSTIQPRLRLLQRFEDFTGLYPWQWTPADGEAFIVHLRSGAKPIQLSTARSYEVVIELFVEYLLDPRYGWGKTCRERFGLSPQAVFHEGNSVLHSVEYEGDPRRRPLTYDEVQALFDAADARPRRVQGQGRKGTLTALRDAAVLKTIYAYGTRRTESSKVDLVDLRRHRKAPQFGQAGSMAIRYGKSSKGAPPKRRTVLLVPEMDWAADVLDEWVQELRPRLSPDRHPALWVTERVGRLSPRSINEAFVTARRDADLDEDLDLHCLRHSYITHLTEFGYPARFVQEQVGHTHASTTAIYMGVSDEYRNQLLEASLKRRLGDDWDLK

SEQ ID NO: 2467 - protein, 542 aa, synthetic construct
  REGION 1..542: note = TnsF-Tn7 System Protein
MGRDEKPLDPRQSPVARLAFDLRRLRREAGGPTYAAMVRRAGYSVATLSRAAAGEQLPSLPVVRAYATACGADPGEWEERWYAVSRELTVREQADDAPSPYRGLARFEPGDEDLFFGRDTLGAELLNLTREHRVVALLGPSGSGKSSLLRAGLIPRLQRAVRSGEHGAAARPAAIRVLAPGARPLDRYRSALVPATGEGETWVVVDQFEELFTLCPHPAEREEFVAALLAAQDPGSCLRVVLGIRTDFAMRCHQYSGLAEVMRGASLTVTRMSTAELRETVVGPARAHNLVVERALTARLIADVTESGSALPLLSHALLETWKRRSGRTLTLASYERAGGLQGAITKSAEGVYARFDATRADTARRILLRLITPGTDNTPDTRRSTTRAELEALSGAPEADGVLEALARAGLITLDGAGVYLTHEALINAWPRLDHWIEQNREKLHFQRWLTEAADAWEAIGREQGVRISPIRLAQLAALASGAEQDDITPLEADFLAAGMATHRRTLRNRLVTLAMGSLLVATTLLTAAMARRQRRLLRGH

SEQ ID NO: 2468 - protein, 108 aa, synthetic construct
  REGION 1..108: note = TnsF-Tn7 System Protein
MIKKMGYEWCLRATMAEHQMFQTSDLVPLLAERGVTLSREQVYRLVTQPPQRMSMDTLVALCDIFECTPNDLIKPKVVNAQVRKTADGQGEPLPLKQPRTTIRRPGQP

SEQ ID NO: 2469 - protein, 485 aa, synthetic construct
  REGION 1..485: note = TnsF-Tn7 System Protein
MARPRKPEDPQRWPVPCDRCGRHYQLVANWPNESVCGYCYQAAKRITGICVCGHQGVLPGIIDNRPACRRCSGVTINVDCVSCGDEAELYSGGRCQRCVLGATAQRLLTNPATGAVAPPLQIIVDALTTMGRPNSGLTWIRQAHVQAVLRDLARHQTLTHEILDGLPAGRTSDYVRSLLVEHGALPSRDDRLTRFQAWAATALERTTTADHRKVISRFLRWNLEKRLQSMSPVTDSAFLRAKQSLTVTIEFCNWLAAEHNTGMDQLTQAHIDLWQSTGPTTREHIARFIRWAIKSRLIPADLEVTPHRRGTAPRMPITEQNAVIEKVAHQQTLHPRDRLAAILVIVFAQRMEDVAVLTWDRVTITAEAATITLADTPIELPPPLDEPLRALAASNYNNQTAAHPNSPWIFRGYRPGMHLTPTHLRNHLRPVLASLEARLGTLNELTQTTPIAILAETLGYSPQTLEAHAKASASTYSRYIATRLD

SEQ ID NO: 2470 - protein, 485 aa, synthetic construct; identical to SEQ ID NO: 2469
  REGION 1..485: note = TnsF-Tn7 System Protein

SEQ ID NO: 2471 - protein, 414 aa, synthetic construct
  REGION 1..414: note = TnsF-Tn7 System Protein
MLSVEDWAEIRRLHRAEGLPIKAIVRVLGISRNTVRAAIASDAPPKYERTPAGSIVDEVEPRIRELLQSYPRMPATVIAERIGWERGLTVFKERVAELRPVYLPPDPAGRTTYVAGEIAQCDLWFPPIELPVGFGQVRRPALLPVLTMITGYSRWLSALLLPTRSAGDLFTGWWQLIEALAAVPRVLVWDGEGAIGRWRAGKVELTEQCQAFRGTLGARVLVCKPADPEAKGLIERCHDHLERSFLPGRSFASPMDFNVQLQQWISLVNTRRRRALGCAPTERITADRQAMLALPPVPPATGWRSATRLARDHYVRLDGNDYSVHPSVIGRRIEVIADLARVRAVCDGRVVADHERIWAWHQTISDPEHVAAARSLRRERVAVLHPVAELDVEQRALSDYDTALGIDGLDGGVA

SEQ ID NO: 2472 - protein, 373 aa, synthetic construct
  REGION 1..373: note = TnsF-Tn7 System Protein
MAAEQLPGFVPRILRADDVSLLRADETVFDAMLDGWRAQMLARGLEIDTIKARCRVIARFVEFTNEYPWRWRANDVDQFLAELRSQATPIALSTLRSYSNAISMFCSYVSDSRYGWVDFCEKQFRDVPSQIVFEWNTPQHTTGDAVPPGRRAFTKAELQHLFDVVDDFVDDAHSKGSKRWLTALRDSTAFKIGYAFGLRRRELVMLDLTDFGPNPHVPRYGNFGALTVRWAKGTKGSGPRRRTVLTSPEFPWAVDLLQYWCSEGRQLFATADRSPALWPSERGDRLTLGALGRSFTSFRRLAGLPTELSLHALRHSYTTHLLEAGYDPLFVQQQLGHSYASTTSLYTSVSSDFKQKVIQQMITRRLQMGETNG

SEQ ID NO: 2473 - protein, 268 aa, synthetic construct
  REGION 1..268: note = TnsF-Tn7 System Protein
MAARASAAKPARDLTAEVAYLTRALKAPTLRESVDRLAERARAESWSHEEFLVACLQREVSARESHGGEGRIRAARFPARKSLEEFDFDHARGLKRDLIAHLGTLDFVVAKDNVVFLGPPGTGKTHLAIGLAIRACQAGHRVLFATAADWVNVLAQAHHAGKLQAELVRLGRYPLLVIDEVGYIPFEPEAANLFFQLVSSRYERASLIVTSNKQFGRWGEVFGDDVVAAAMIDRLVHHAEVIGLKGDSYRLKNRDLGRVPTAATTTED

SEQ ID NO: 2474 - protein, 268 aa, synthetic construct; identical to SEQ ID NO: 2473
  REGION 1..268: note = TnsF-Tn7 System Protein

SEQ ID NO: 2475 - protein, 121 aa, synthetic construct
  REGION 1..121: note = TnsF-Tn7 System Protein
MAEQRRIGFHWHLRRVMAAHNLWKSTELRPLLRSRGINLSDAQVYRLVTGEPQRIPSRTFAALCDIFDCTPNDLFEPYVEMQAAASANAPQPRELGVTPGNPVAKRIRIVQDDGDGTTPEA

SEQ ID NO: 2476 - protein, 306 aa, synthetic construct; identical to SEQ ID NO: 2420
  REGION 1..306: note = TnsF-Tn7 System Protein

SEQ ID NO: 2477 - protein, 306 aa, synthetic construct; identical to SEQ ID NO: 2420
  REGION 1..306: note = TnsF-Tn7 System Protein

SEQ ID NO: 2478 - protein, 306 aa, synthetic construct; identical to SEQ ID NO: 2420
  REGION 1..306: note = TnsF-Tn7 System Protein

SEQ ID NO: 2479 - protein, 491 aa, synthetic construct; identical to SEQ ID NO: 2419
  REGION 1..491: note = TnsF-Tn7 System Protein

SEQ ID NO: 2480 - protein, 491 aa, synthetic construct; identical to SEQ ID NO: 2419
  REGION 1..491: note = TnsF-Tn7 System Protein

SEQ ID NO: 2481 - protein, 286 aa, synthetic construct; identical to SEQ ID NO: 2424
  REGION 1..286: note = TnsF-Tn7 System Protein

SEQ ID NO: 2482 - protein, 286 aa, synthetic construct; identical to SEQ ID NO: 2424
  REGION 1..286: note = TnsF-Tn7 System Protein

SEQ ID NO: 2483 - protein, 286 aa, synthetic construct; identical to SEQ ID NO: 2424
  REGION 1..286: note = TnsF-Tn7 System Protein

SEQ ID NO: 2484 - protein, 286 aa, synthetic construct; identical to SEQ ID NO: 2424
  REGION 1..286: note = TnsF-Tn7 System Protein

SEQ ID NO: 2485 - protein, 295 aa, synthetic construct; identical to SEQ ID NO: 2428
  REGION 1..295: note = TnsF-Tn7 System Protein

SEQ ID NO: 2486 - protein, 295 aa, synthetic construct; identical to SEQ ID NO: 2428
  REGION 1..295: note = TnsF-Tn7 System Protein

SEQ ID NO: 2487 - protein, 295 aa, synthetic construct; identical to SEQ ID NO: 2428
  REGION 1..295: note = TnsF-Tn7 System Protein

SEQ ID NO: 2488 - protein, 295 aa, synthetic construct; identical to SEQ ID NO: 2428
  REGION 1..295: note = TnsF-Tn7 System Protein

SEQ ID NO: 2489 - protein, 369 aa, synthetic construct; identical to SEQ ID NO: 2432
  REGION 1..369: note = TnsF-Tn7 System Protein

SEQ ID NO: 2490 - protein, 369 aa, synthetic construct; identical to SEQ ID NO: 2432
  REGION 1..369: note = TnsF-Tn7 System Protein

SEQ ID NO: 2491 - protein, 376 aa, synthetic construct; identical to SEQ ID NO: 2434
  REGION 1..376: note = TnsF-Tn7 System Protein

SEQ ID NO: 2492 - protein, 376 aa, synthetic construct; identical to SEQ ID NO: 2434
  REGION 1..376: note = TnsF-Tn7 System Protein

SEQ ID NO: 2493 - protein, 114 aa, synthetic construct; identical to SEQ ID NO: 2436
  REGION 1..114: note = TnsF-Tn7 System Protein

SEQ ID NO: 2494 - protein, 114 aa, synthetic construct; identical to SEQ ID NO: 2436
  REGION 1..114: note = TnsF-Tn7 System Protein

SEQ ID NO: 2495 - protein, 113 aa, synthetic construct; identical to SEQ ID NO: 2438
  REGION 1..113: note = TnsF-Tn7 System Protein

SEQ ID NO: 2496 - protein, 113 aa, synthetic construct; identical to SEQ ID NO: 2438
  REGION 1..113: note = TnsF-Tn7 System Protein

SEQ ID NO: 2497 - protein, 516 aa, synthetic construct
  REGION 1..516: note = TnsF-Tn7 System Protein
MTDRPHATAEQYERWYKRDCARCGRHRDFAAHWPDGHVCRTCHDRALRLRGHCPSCGQDRILPALAESRPVCTRCAGFRQSYTCSRCGSEGKLHGGRRCTRCTLDNRLAELLGDGTGEVRPELRPLHAALVAMDNPLSGLTWLYQPYVPVFLRGLGTGEITLTHKAFDELEPWRAAEHLRELLMGCALLPPVDKQILLFERWLHGYLPDLPDPSRARILRQFTTWQVLPWLRRRAEGRPLGTHTRNSAAAQVRRAAEFLAWLAREGRTLAECGQADLDRWHVAHRDHEHHSLRPFLRWAMHTEQMPALTIPRHEIRQQAPISQHRRIGLLRRLLTDDTPALRTRVAAVLVLLYAQPLSRIVRLTTADILLDGDQVLIRLRDPPSPVPEPFAALLLALRDSRTNMRTATNPNSPWLFPGRRSGQPLRPEGLATLLRELGIPTRLGRTAALRQLVLQAPAPVVASTLGFHHSHTARLVGDAGGTWSHYAPGDHGTRGGKSDSPVPTARHRPVHTETET

SEQ ID NO: 2498 - protein, 516 aa, synthetic construct; identical to SEQ ID NO: 2497
  REGION 1..516: note = TnsF-Tn7 System Protein

SEQ ID NO: 2499 - protein, 373 aa, synthetic construct
  REGION 1..373: note = TnsF-Tn7 System Protein
MGHEGRAPGAAGLHLARGVPLLRPEEQVFAAMVEGWRNQQLARNLALSTIYGREKAVQAFARHADAFPWQWTAAMVDDWLGDLRAVRHLRHSTVRSYQEAVRAFCHYLTDPAYDWSAECERQFGTHPVQVVHAWNTAVHVQDNESAPGKRAFTLDELEGFFDHADGQVARVRAAGRKGWLSAFRDATLFKVAYGYGLRRNETRMLDVADLGRNPHAPEFGDYGVLYVRHGKAMKGSPPKRRSVLTVWDWVPEILDQWVHEVRPLLAVSGSAALWPSERAERVALSQIDARFAACRDAVGLDRNLDFHSLRRSYVTHLIEAGRDALFVQHQVGHEHASTTSLYTCVSSDFRTRTLRRVLDDTMTAALRPAQEAR

SEQ ID NO: 2500 - protein, 107 aa, synthetic construct
  REGION 1..107: note = TnsF-Tn7 System Protein
MKRQVSYQWRLREVMAAHGIFSTTELVPLLADRGISLSVSQVHRLATGVPERLSLPVLAALCDIFACSPAELIVTKADDVAVRKTATDDAVVDLAALRPKRARLRPQ

SEQ ID NO: 2501 - protein, 296 aa, synthetic construct
  REGION 1..296: note = TnsF-Tn7 System Protein
MAAEPDPLGTLRWLRRAQNAALLTALARGQVPLSHDGLHGWPHQVAARRLRHHLIATGVLPAADPRLLDIEAWLHRRLAELAGHPHEQLLRQFALWHQLPRLRATASRRPLRTTAQQYATQQFTQAQAFLTWLHEHQIDPRGLRQADIDAWYATHRVHQRHHVRGFLLWATDRGDLPRGLVAHQQTFQPGRPITQQRRLALLRRFTTSDTDPLPARVAACLVLLYAQPLSRIHQLTANDVLERDGETALRFGDPPTPVPEPFATMLRELAATAPPDGWLFPGLIPGQPVAHRALQR

SEQ ID NO: 2502 - protein, 743 aa, synthetic construct
  REGION 1..743: note = TnsF-Tn7 System Protein
MGGSSRDRVRRTGIVAVLLLVGSVVAAVVLARRYQLGSGTALVGLVGGVTGLTGLWLAWSAYRADREEAAVGELDLAGVADQLAAAVRRQWEDEAALRRLNDPYPLPVRWAPADGGLVEEWSSLVRLATSGAGWPPPPPSGTWAAGPAGLAGGDGDLAGLLDRVPTGRLVVLGEPGAGKTMLTVRLVLDLLADGRRALGGPVPVLVSLASWNPSEQSLYGWLEGRLVADYPGLTVPAPGDSGASRARALLDAGLILPVLDGLDEIADAVRGAAIARINDATRPGQRLVLTSRTNPYRQAVSPPREPEVRLTGAAGIQLCPLEAGVVADYLRRSAGGPAGAARWDPLLAAWPTPIAQALTTPLMATLARIIYNPRPGEPALAVGNSPAELLDPTRFPTRTTVEQHLFDGFLPAAYRPHPDPGQRCPWTATDAERWLVFLARHLDHTLHGTPDLAWWQLPLALTPRQRRLVVGPAFGLVVGLAVGLAFGLVVGLSVGVIVGPAVGVAVGVAVAVMVGLVVGFVVGPDFGLTAADRLPQRAVRWRIPPGSDLVFGLVFGLVVGLSVGVIVGFVVVVVVGLVVGLVVGFVVVVVVGLVVGLVVGLVFGISSVPADLAEASNPTSVLHQDRSAAGVNGLVVGLAGGLAGGLVVGLVVGFVGGLVVGLAAGLVVGVMFGVMFGFVFGLGDYGAWALFTLTRAWLAARGRLPRNLMAFLADAHEKRGVLRQVGPVYQFRHLELQHRLARR

SEQ ID NO: 2503 - protein, 743 aa, synthetic construct; identical to SEQ ID NO: 2502
  REGION 1..743: note = TnsF-Tn7 System Protein

SEQ ID NO: 2504 - protein, 296 aa, synthetic construct; identical to SEQ ID NO: 2501
  REGION 1..296: note = TnsF-Tn7 System Protein

SEQ ID NO: 2505 - protein, 330 aa, synthetic construct
  REGION 1..330: note = TnsF-Tn7 System Protein
MWWISDPQDLHRIEDRISSLYVEKCHVDRADNAVVLVNKERTVRVPAAFVATLLLGPGTRITSGAVRLLADSGTAVCWVGERGVRMYAAGLGPSRGAGLLMRQAYLVTRTKERLGVSRRMYGMRFPDDDVSDATMQQLRGREGARVKKIYRAHAQRTGVEWNRRDYKPGEPFAAGDDINRLLSAGHSCLYGICHAAIVGIGASPALGFVHTGGATSFVLDIADLYKAEYTIPLAFDLAAHGQTDERAIRTAFRDKVADGHLMARIVRDIKTLLLGDDADIPDQDSLHLWDEFDGAVPGGINWAADLADLSPENSIVGVTGPDIDEQPPPW

SEQ ID NO: 2506 - protein, 372 aa, synthetic construct
  REGION 1..372: note = TnsF-Tn7 System Protein
MGGPQAGSSALHLVDGVALLRPDEQVFAAMLAGWEAQQLARNLAASTVEKRLGAVRAFAVHADTFPWMWQPQMLDEWLGDLRGVRGLSRSTVRNYAGAIGAFCRYLLAPAYGWAARCEQQFGSHPVQVCHEWNTAVHVQDVEAEPVRRAFTVAELQALFDYADDQVAQARAAGRKGWLALFRDATLFKVAYSYGLRRREVAMLDLADFGTNPHAGEFGDFGVCRVRFGKAMRGSAPKPRSVLTVWPWTVEVLDQWIGELRPLMPTAAESKALWPSERAGRITLSTINRRLAAYRTALDLPAGLDFHSLRRSYVTHLIEDGWDPLFVQQQVGHEHASTTAIYTCVSSDFRTRTLRTALDAIMRAAIETGGARP

SEQ ID NO: 2507 - protein, 112 aa, synthetic construct
  REGION 1..112: note = TnsF-Tn7 System Protein
MTARRTVSYQWRLRETMAAHGLFNASDLAPLLAERGINLSSVQVWRLVTQTPERLSLPVLAALCDIFEVTPAQLIATRGENAAAPAKTVNAAPDGSVDLDAYRPKRARLRPE

SEQ ID NO: 2508 - protein, 387 aa, synthetic construct
  REGION 1..387: note = TnsF-Tn7 System Protein
MDRANSGLTWINQPHVVAFLRELVASPNLSHNHVDRLPESRTREYVRGLLVEHGALPRRDERLELFKRWSETAVLRLPEGPQRDAITQYIRWHLLRRMNAMEAVSESAFLRSKQTVTVAIDFLVWLAFERNSSLGEACQADVDEWQAGGSSTRQIVERFLGWAKRARLVSVDLKVYPHRRGTARRLSVQEQQEVISTVLHPRAVSPRDRLAAVFVIILGQRIEHVARLRWDAVVITEEAVTVKLGTERLRLPAPLDEPLRELADQARRCNTAAHPSTAWVFRGANPGAHINSAYLRGRLRGLFPVRAARLGTLEELVKTTPVPILAEALGYHPATIEQFAHNGGATFGGYVAARLEDLGTEPPREEGASSTDAEVQAAHRFGRRSAN

SEQ ID NO: 2509 - protein, 387 aa, synthetic construct; identical to SEQ ID NO: 2508
  REGION 1..387: note = TnsF-Tn7 System Protein

SEQ ID NO: 2510 - protein, 558 aa, synthetic construct
  REGION 1..558: note = TnsF-Tn7 System Protein
MVNFLAPLALLEGGPRGLTHATERALWHLGFSDVRMIDGSGDEGADLLAVRDRQEWVIQCKHSSRGPVGRTGVDDAERARARYGADRAVVVTNTSLNSVAEARRRALSRIGIEVESWTGSTLAELFDRMPSRVPAQYALRGYQVEAIERVETELAGTGRALLVLATGLGKTVVAGEVIRRFVESHPGSPVLVVAHVRELVEQLEKALWRHLDKTVPTQVLTGDSKPPSFEGVTVGTIDSALGLVASGFRPGLVLVDETHHVGEAGMFAQLLDTCDDALQLGVTATPWRGDNFDITARFGPSAFSMGIAEGMAAGYLASVDYRMYVDNLDWDFVHHMSQKGYSLKELNRALFLPQRDDEILDSFRSAWRETLEPRAIVFCQTIEHAERMAHLLAGSEPSWRRAAYLHSGLKRQQRQILLNAFRLGRVPILTCVDVFNEGVDVPDVNLIAFLRVTHSRRIFVQQLGRGLRLREGKERLRVLDFVTDIRRVAAGLDLKRSIAALRGGEVEELRLPLPGAARIEFSDATAGSLLDHWIRDAADLETAADEVRLQFPTAIGLD

SEQ ID NO: 2511 - protein, 558 aa, synthetic construct; identical to SEQ ID NO: 2510
  REGION 1..558: note = TnsF-Tn7 System Protein

SEQ ID NO: 2512 - protein, 375 aa, synthetic construct
  REGION 1..375: note = TnsF-Tn7 System Protein
MAEIPGRVPVLLADPDIALFRAEDRVFDAMVDGWRTQMLARGLTVGTISGRCAVVTRFQSFTNEYPWKWNFEDIESYLATLRGRGGDALSLTTLRSYSNAIGMFCGYVADSRYGWVALCDRTFGDVPVQICFEWNSPHHTADDAVPPKRRSFTKSELQTLFDCVDDFVDAEYAEGSKRWLPALRDSIAFKVAYAYGLRRQELAKLELHDFGPNPHVPQYGRFGALQVRWAKGTAGSGPRRRTVLTSPEFDWVVPLLEYWTSPLGRGRFATSARSAALWPSERDAIITPNSLGASFTSFRALAGLPSGLGLHCLRHSHVTHQLEAGYDPTFVQLQVGHKNSSTTALYTSVSSDFKQRSIQQMIERRLSPSSEEIDE

SEQ ID NO: 2513 - protein, 500 aa, synthetic construct
  REGION 1..500: note = TnsF-Tn7 System Protein
MSPAYRTPEQRERWHKRTCARCGRFGFFAAVWPDGQVCRTCECRALRVQGRCPECGEHRLLPGLRPADAVAICTGCADFRPSYACSRCGQESQLRAGRLCLRCTLSDQLAALLDDGTGQVRPELVPLHRMLVEMKNPRTGLNWLDGRPPNVGAAAKLLRGLGNGDIELTHEAFHRLQPWRAAAHLRELLMSCGVLPLVDKQICSFERWLRTHLDGISVPDHEKIVRRFITWEVLPRLRNRAAHRPLTPSTRSFASDQVKLATRFLTWLADHERTLELCNQAGIDDWHASHSEHERRSLRGFLIWGMTSKLLRPLRLPAQLITRKAPLPEPERIALLGRLLSGHDLPLRPQVAGVIVLLYAQPLSRIVRLTVDDLTRDGDEALLRLGEPPSPVPAPVTDLLLAWIAQRDNMNTATNPNSRWLFPCRRAGQPMHPRSLGMLVIGLGVPTTTGRTSAIGHHVLTMPAPVVADAVGYHPVTTTKIATRAGTTWNRYAPGDHDRV

SEQ ID NO: 2514 - protein, 500 aa, synthetic construct; identical to SEQ ID NO: 2513
  REGION 1..500: note = TnsF-Tn7 System Protein

SEQ ID NO: 2515 - protein, 376 aa, synthetic construct
  REGION 1..376: note = TnsF-Tn7 System Protein
MAGVRPIGVAPGAASLQLVGGVSLLRPEEQVFSAMLAGFANQQLARNLARSTVEGREHTVRAFSHYVNAFPWQWSPAMIDEWLGDLRSLRELKRSTIRSYSEAVRSFCHFVTDPAYEWTATCEERFGTHPIQVVHEWNTAQHVQASEADAKERAFTRKELHEFFAYADDQVARIRAFGRKGWLPALRDATLFKTAYAFGLRRNETRMLDAADFARNVAGAEFGEYGLCRVRFGKAKKGSPPKQRSVMTVWDWTPDILDEWFGEIRPLLGADGSPAAWPSERGARVGCQRLDSRFVAYRRELGLDDGLDFHSLRRSYVTHLIEGGWDPRFVQEQVGHEHASTTSIYTCVGSDFRERTLRRHLDSVVAAALAGPEVLS

SEQ ID NO: 2516 - protein, 111 aa, synthetic construct
  REGION 1..111: note = TnsF-Tn7 System Protein
MKRKVGYAWRLREVMASRGIFTATELVPLLQERGIDLSASQVHRLVSGTPERLSLQVLSAFCDILGCTPADLVAITAENAGVRKTATDDRPASSAAVARLRPRAARILPGE

SEQ ID NO: 2517 - protein, 416 aa, synthetic construct
  REGION 1..416: note = TnsF-Tn7 System Protein
MTRSFECGTCGDEALIYRDGNCRRCALRLQLTELLHPEDHPGGRALLLEFAKVERPASIMTWLLNPKATELLAGLGTGAIAYTHEALDELPHSKTTEHIRDVLVQAEVLPARDRHLPGFLRWLDLKLAAIPDGERRRTIRQFARWKFVVAIRKLVDEGRPTHGAIAHARQSITVADQFLTWLHEQHQPLATTTQLDLEQWLATGNSTRTRVRPFIAWAVQSRTATGLTMPGTKSNDGPEMDHHHRLEWIRRCLTNTDVPRDERVATLLLLLYGQPLTRIAALPVSAVEVDESGNTFLRFQRVRTPVPEPFATLLLEHRDHRSPTRTTSGVESPWLFPGIRAGQHVTAQTMMAKIRNNGVDLRAARNAALRTLVREAPAPLIAKSLGYNDNTIHRHAAIAASQFQQYAASRPTRASS

SEQ ID NO: 2518 - protein, 416 aa, synthetic construct; identical to SEQ ID NO: 2517
  REGION 1..416: note = TnsF-Tn7 System Protein

SEQ ID NO: 2519 - protein, 339 aa, synthetic construct
  REGION 1..339: note = TnsF-Tn7 System Protein
MFTGWRNQQLSRNLAFATIDGRERLVRRFVDHSQAWPWTWTHQHVDEFFADLRAVQGRRHTTVRAYQNALRLFCAYVAHPDYGWDRMCESLFGSHPSQVVFEWNAAVHAQVGESDPRKRAFTKQELQAFFDRADDEVDRIRALGRKGALPAWRDAVLFKVAYAWGLRRNEVRRLQRVDFSPNPKAREFGRYGVVAVRYGKAQRASAPKRRGVLTVFDWSVDVVDQWIQEGLPRFGGDGMDLFPSEQHGVVGAAIGDRFRRYRDDLGLDEGLDLHSLRRSYVTHLIEDGFDPLFVQEQVGHEHASTTAIYTCVSSDFRTRTLREALDRSLTQALSKQESS

SEQ ID NO: 2520 - protein, 113 aa, synthetic construct
  REGION 1..113: note = TnsF-Tn7 System Protein
MKRQVDYQWHLAEVMARHGLHNSTDLGGLLHQRGITLSTSQVYRLVTQRPERASLKVLAALCDIFDCELADLVTVTAADAAPRKRASGQAGNVVDLNQTIRPKRARVVHDSDS

SEQ ID NO: 2521 - protein, 340 aa, synthetic construct
  REGION 1..340: note = TnsF-Tn7 System Protein
MATGRAPISHQTLNDLPESTRVRYFRRMLMSAGTLPTIDVWLNDLELYAARLFASLAVEHASIMTRYFNWEVLRKLRQRSASTPLTTGAANMRRAELRRIAELLAWLDAHGRSLSTLDQAAVDHFLAHRDPHKVVATFIRWSARHRLTGHIDVTIGRAAPPRPLIPEEIVWNKIDRLVDDESLALPIRIIGLFVLVFAQPLMNCVRMRQADIVEEGATMRITFGKTPIVLPLPIADLLRRHLATRNDRRVFLVAESEWLFEGNMPQHHTSEANVRLQLTALGIQPRDMKRTRIDQLVQEIPASVVADVVGISVGTALHHAAQTNAAWGVYPALRTLVRDE

SEQ ID NO: 2522 - protein, 340 aa, synthetic construct; identical to SEQ ID NO: 2521
  REGION 1..340: note = TnsF-Tn7 System Protein

SEQ ID NO: 2523 - protein, 373 aa, synthetic construct
  REGION 1..373: note = TnsF-Tn7 System Protein
MAKESGGGASALRLIGNVRALDEGRFVFDAMVAGWGDQQASRGLAESTVWSRVLVIRRFGEFAGRYPWEWSPGDLEDFTVHAISGPRPAAKSTIRGYHAIIRLFCDYLTDARYEWMPECEQRFGSIPQQVCHEWNTVAHLADYEGRPTRRALTYDELEQFFSATDARVEAIVQQGRKGALAALRDAQIFKTIYAYGLRRAEAAGLDIADLRRNGQAPRFGRFGAVEVRWGKGSHGSGPRRRTVLTLPEFDWVVEGLAQWVDLARPRFTDTPGGPLWPTERGSRVSLRYIDQRFAAIREELGLPSELSVHALRHTYVTNLIEWGYTEKFVQDQVGHAYASTTAIYTSVGDDFKNRMITRALARIYGGPDAEPRP

SEQ ID NO: 2524 - protein, 115 aa, synthetic construct
  REGION 1..115: note = TnsF-Tn7 System Protein
MPNPDRDAPITWHLRQLMAAAGMFQTTDLIEPLRAQGVQLSREQIFRLVTKVPERLNVEVLAALCRILSCTPTDLIEVRVAHAEPRRASSSGRMPSGPAVGTLRPMPAKLHRPTE

SEQ ID NO: 2525 - protein, 232 aa, synthetic construct
  REGION 1..232: note = TnsF-Tn7 System Protein
MADGRGTDLASCAQADLDGWHAEVFLARRPAQKFLRWAMASHLMPRLHIPHRSTANPAPLSHNKRMQLLRRAVEDEELDLMDRVVVVLALLFAQTLSRICRFTLDDLVEEDGRLSIRFGDPPTPVPEPFAELLRDFATRRPNLTTATNPGARWLFPGRRAGQPMDTSTLAGRMRKNGLPTFHGRTAAIRQLALQAPAPVVARMLGYHHVHITALAAEAGSPWSHYAPDDHAK

SEQ ID NO: 2526 - protein, 384 aa, synthetic construct
  REGION 1..384: note = TnsF-Tn7 System Protein
MSRDALAPGSAGLHLVGGLSLLRPEEQVFEAMLEGWRNQQLARNLAFSTIDGRHKAVKAFTRHADAFPWTWSAQMLDEWLGDLRALRDLKRSTLRGYSEAVRSFCAYLTDPAYGWPTECETRFATHPIQIAHEWNTAVHLQEAESDPAKRAFTRAELAAFFDHADGQIHHIRGHGRKGWLPAFRDATLFKTAYAFGLRRNETRMLDLVDFSRNPHAPAFGDFGVCQVRHGKAKKGSPPKRRGVLTIGPRHGTGGMDWIVDVLEQWTEQVRPAFAHADSPALWPSERGPRIGFTQMNTRFAAYRDAIGLDPALDFHSLRRSYVTHLIEDGWDARFVQEQVGHEHASTTALYTCVSSDFRIRTLLKALDQTTHAALNSTGKKGNTR

SEQ ID NO: 2527 - protein, 111 aa, synthetic construct
  REGION 1..111: note = TnsF-Tn7 System Protein
MKRQVSYQWRLREVMAAHGLFNASDLEPLLHERGIKLSSVQVWRLVTQTPERLSLPVLAALCDILTCTPAELIATRAENAAPRRTATGETNANLTEMAPIRPKHARILPES

SEQ ID NO: 2528 - protein, 356 aa, synthetic construct
  REGION 1..356: note = TnsF-Tn7 System Protein
MKEKGSCPKCGEITPNKGNRLCATCYWIPRAQHSAKLQLARLEQPWVQELWRAFEIWLLRNFSPYNAWKWMFPSGDAFAEFDERFCSAQDMTTESVLAIGGPEWLRKHGYVSRFLAHTKIVDITDRERNEWAELRRIQDILDASTGENRQILNAFINYCRRGKGIQSKTLRVYLKAGQSFLQSTKSPICEVSEKTIYNFLRRHPGHRSSLFRFVTFLREAGYAPEAAVPKRPKKYRSGYSARVIGRIEAFSKEFDATGSIPRKRALCAAAIAEMLGVPLEYCLRLHRQDINLEVQSCEVRVQEDWYSCAMVIDRLIREVAKIDIGDDRLFPGKLPSDTLSAVGAAYHVKIALKNVI

SEQ ID NO: 2529 - protein, 228 aa, synthetic construct
  REGION 1..228: note = TnsF-Tn7 System Protein
MTYKFNVIARTSKRTLPGCYRSSSGYLHTPAGKVAYESGLERDYFTQLSVHPGFRRITWNPIELEYTDSYGKRRTYTPDALVEFGLGSGMPPCLLLELKPRKALKENIDQLRDGFYAAREYASSMQGWRFEVRTELSLIPALVSNANFLARYHAISLEDQFPDYPKRLFEELSARGRATPEILITACCSTFEEKAMALPYVWAMLAQRIVAFDIYSPIDNRSPIWIPS

SEQ ID NO: 2530 - protein, 355 aa, synthetic construct
  REGION 1..355: note = TnsF-Tn7 System Protein
MIHLFRWPREDETLSSWLYWQSRLHGLSPQTYTAMSLPGLEIWTRDADRWLSDIAIQKIACCLGQSQATVKSMTLAGRYGEVLGEIRQYNSVHWIMPIGVYHRRRRLHGQQFCPECYLEGSVLKLSWRLAWNSFCEKHQCPLIDACPACDEPLTLFYTDPYHHNVCFNCGRYIASPGQKERHYDLCMAFSRRFSSAVRADAPDPGSLRTLMTLQLGQSQGRHLQSTWRSRIGAVPSATARGRWEYVRTAERRVLIPATEAALQTGLKRIVDDLIGHRITRECLRNHQVGQNLWLEKYVYPELDTKQRSPKSRSNYKAEMADPLREIQRRHTSASRRTRREARAHCIDIMLGIPRQ

SEQ ID NO: 2531 - protein, 641 aa, synthetic construct
  REGION 1..641: note = TnsF-Tn7 System Protein
MDSFLKREGTPATLPLKPGTLLDYQGRTVKVIETISLERVMVNDESSGQIINAPIYQLKPLIVSDSSTATLTASSSRDYADYGDKEWTEINRRFDIIFPLLSAQSRTLDDVKAVSESSGFSVAMIYNMIKRFEATQSKTSLLPRKRGRRKGTRLLDAKVEAVIAEGIRLHYLTAQKKSVVRVADFIETRCRTLSIEPPSVGAVRKRINDLEPKKTKRARHSHSESKQEIDQVETGIPGAERPLDFIQIDHTQVNTIVVDEHDRMPLGRPWITLAIDVNTRCVLGIYLSLDSPSFVSVGSAISNMLLTKHDYLASLELSVEWPMYGAPRKIGADNGADFKSNYLTRSVEDYPFSIEWRPLGGTNFGGHIERLMSTFSLWVRELPGATFANPKERGDYDSESQAAMTLYELEQFIVRHICEKYHKTPHKGLRGATPYQEWERGILGSPGQPGVGMPSVYSDPNRVRIDFLPFFYRTITRSGITYKNIPYQDIELFGSERLARERKSEEERKSLFRIDPRDITRIWMWDPVLEGYHVIPCAVRDMPAISLSEFKAHERELKNRNEAHDAFSIARHAEDNYQLVEDAKEKTKQAKAKRKSTERRKYNAMKSVKPESSLPNEASPLQSTNGFVDVDIAAFEGAEEW

SEQ ID NO: 2532 - protein, 232 aa, synthetic construct
  REGION 1..232: note = TnsF-Tn7 System Protein
MRVSYSGSSPRPGEISLAHRGVLFLDELPEFERRVLEVLREPMETGEISISRAARQVNFPARFQVVAAMNPCPCGYSGHPTIECQCTPQQVTRYRSKISGPLLDRFDLHVEVPVQGGDVLMQSGGDGETSATVRERVLIARARQSERGCLNAALSGRALQAACRLDRQGEQLLTGAMEKLGLSARALHRILRVARTLADLEGSEELRQSHLVEALGYRQLDRQQGRNSVVSA

SEQ ID NO: 2533 - protein, 297 aa, synthetic construct
  REGION 1..297: note = TnsF-Tn7 System Protein
MVAAEGRKLDEEALKMLDQGNASRIAYIKQDRWIGYPAATRIAQGLNDLITHPTSSRMPSMAIVGRPNNGKTTLVRRFISMHPSQNTENGIRTPIVLTYMPASSDEPKFWTSLLTQLMVVHRPAASARALQNQAERVLREMGVRVLIIDEFHHLASAPLRQQENVLAALKNLSSSLSLSLVLVGTQALLGALRADDQLATRLTPYVLERWEANQNYQKLLFKFEKQLPLQNPSNLADPKLANEIFSRSMQTIGGTKSVVIEAAIKAIESDTEVITPDIVRSVDVVTHHDFGKLMKKI

SEQ ID NO: 2534 - protein, 297 aa, synthetic construct; identical to SEQ ID NO: 2533
  REGION 1..297: note = TnsF-Tn7 System Protein

SEQ ID NO: 2535 - protein, 190 aa, synthetic construct
  REGION 1..190: note = TnsF-Tn7 System Protein
MRDNAVQLSQLRQADIDQWLLTGPPTLRREIADFLGWTAARKLAPPLTLADAAHREGPALSEQDYWRLAQRLLHDPDIVTVDRVAGSFVLLYGQQLSRIAAMTRSQVHDRGDNLSIRFGTGDVEVAEPLAGFVRAHLDAPRRHTSIAAPPDSNWLFPGHLPSRPITPARLGQRLAQLGIDCQTGRRAAML

SEQ ID NO: 2536 - protein, 699 aa, synthetic construct
  REGION 1..699: note = TnsF-Tn7 System Protein
MPANETGCPACANGRLCTGCGRTRIITAVAARTPDIPMGVLTAALDAVAGHAAVIRSLAAALAADPDALTVGAPPVVGRLVGELQARGVDLPDPVCSRCGRTGKPLTRSPAGGVCARCRRRQLATACLRCGVVKPVAGRDGQGQPVCARCADRPQRVCGKCGRTRRIARRARDGQPDICDSCFRGPEAVCSRCGRRRPCSFASGPSPVCARCAPRATATCAHCGADRPPTARWPEGPVCDPCYIAALRRRGTCATCRTGRRLVHPPGPNATICADCAGVPVSHTCTDCGIEDRAYERGRCASCALNRRTAAALSGPDGQNRPDLEPVYQAITATDAPRTALNWLRNSAGAALLTQMASGAVDLTHQALDEYPRPGVAGYLRAVLVANNVLPQRDEQLTATEQFLTRTLAGVTRDSDRRLVHSYATWQVLRRLRVTAAQGDRPRTYTHHARTNINAAIDLLNWLADHETTLADTGQADIDTYLAGQPPSRYRVRDFLQWAAATGHTGPVTIATPGRNAGPATDHDQRWAQIARLLHDDTIELTDRVAGALLLLYGQHLTRIVAITHDQIKTQGPQVFLRLGTDDLHIPEPLAELITALARDGRPYTGVGTPSTTRWLFPGLQPGRPLTAARLGDRLRKLGIRAQPGRRAALTHLAAQLPAAVIADLLGIHPTTAVHWVHDAGGDWNRYAAQLTHDASHQP

SEQ ID NO: 2537 - protein, 340 aa, synthetic construct
  REGION 1..340: note = TnsF-Tn7 System Protein
MLAGWRAQQRSRLLADATVLWRERIMRRFAEFTDGVPWTWTASDVEDWTSSLLSRNGHVHTTIRSYQGAVACFLDYVVDARYGWVAECEARFGTHPVQICHEWNTAVHVADYEGRPGRRPFTRAELQALFDYADARVGEVRATGRKGWLAAFRDATLFKVTYAWGLRRREAAMLDVADFTTNPAVPELGRFGTLAVRYGKAMRGSPPRRRQVATVMPWAAEVVEEYVTEVRSCYPAADHPGLFLTERGERISVRQVDDRFAVYRAGADLPENLTPHCLRHSYISHLIEDGVDPTFVQRQAGHSWASTTAGYTTVGADHANRMLRAAVDRAFVAAPQGNLP

SEQ ID NO: 2538 - protein, 334 aa, synthetic construct
  REGION 1..334: note = TnsF-Tn7 System Protein
MLDGWRSQQLARRLGESIIGARERTVRRFGEFTGGWPWSWTAGQLESWIATGGWAHSTVRSYQGAVAVFLEYVCDSRYGWVVECEQRVGARPAQICHEWNTARHVCEYEGRPARRPLTRAELQAFFDAADDRAEQAITSGRKGWLAAFRDAALFKVCYAFGLRRREVAMLDVTDFTANPAAPELGGLGVCQVRFGKAMRGSPPRRRSVAAVMPWALEALEQYLTLVRPRYAAAAHPALWLTERGGRISPRQVDDRFARWRAAAGLPAELSVHCLRHSYVSHLIEDGVDPLFVQQQVGHSWASTTAVYTQVGADAKNRMLRAALDAAFGAESSPG

SEQ ID NO: 2539 - protein, 94 aa, synthetic construct
  REGION 1..94: note = TnsF-Tn7 System Protein
MAAAGMFATTDLVPLLAERGVVLSREQVYRLVARVPERLSLTTLAALCDILSCTPADLIEPYRPTRSRPTRRDQAGPAAPQRPTRARVLPDTGR

SEQ ID NO: 2540 - protein, 116 aa, synthetic construct
  REGION 1..116: note = TnsF-Tn7 System Protein
MSRVVGYRWHLRLRMAERGMFATTELGPLLAERGVVISREQVYRLAAGTPERLSLHTLAALCDILECTPSDLIEPVVESKSGAKRAAGAKTTTAQSVPRELRPKRARIISDPEDPR

SEQ ID NO: 2541 - protein, 368 aa, synthetic construct
  REGION 1..368: note = TnsF-Tn7 System Protein
MADTPLCFPCSVGAHHSCPICGEIVAGDGQAPCYPCGQRRRSEAQITHDAETIELPWLAELFTGFCRSGRIPLANSRATRRIVRAASACREIAFYVRIPSDLTTDMLHMAIGAEGLRRVAPLIAYLAEVGALQWERGRLQVLVEHDRVATILERHRYGPHGPLLQRYRDHLDAKGRKPITQRTALTAAVALLATLKDAPLADLSPRHLARMLRKTPGHRAAIQGFLSFLAAEGGPKLGLRPAARPDAVALERKLRAEIRTCRKRLANARNHAEARALLAALIARVYGLPLSRVLAIRRDEVAVTDNTVTFWPDGDALGLAEPLAHAFYQWIAWSGLWQSFGGPFVFPGRHRHQPLSEAAVAYHLSDKI

SEQ ID NO: 2542 - protein, 287 aa, synthetic construct
  REGION 1..287: note = TnsF-Tn7 System Protein
MSRSAVPRGGARRNSSRPPPISASSPSSIVRSSPARVIGTSHRAMRGEVQVKGAPVAYESGLERDLLITLDFIPTACDVRGQPITMTYTDPATSHRRRYTPDVAVRFNPPIEPAHPNGLIIEVKYRDELFASWSTLKPKFKAARAYAADHGARFAILTEREIRTPLFHNIAFLRPYLGRPEHVGFEEKVIATLMAFEEATPEIVMLASFACADNRMRALPTLWRLIAQGRIGTDLTRPLTMTTPIWVAGEEAATWTDPHSYVLRPLLRCAADRERIASHMRSIWTVS

SEQ ID NO: 2543 - protein, 353 aa, synthetic construct
  REGION 1..353: note = TnsF-Tn7 System Protein
MAPLWPLRLAARDDELLSSYLIRAAHRHSLSPGAFTALWWPDRPVWNRDLDRGEDTAWLADVAAHTGLSLDRVRAMTLDAPRRRFGWGSGDTPLILSAGIYHRTRVRHAVQFCPWCLTDEVPYLRRGWRYSFVLTCPTCTTPLLDACPHCREAIVPHRSFRWSLDACHACGLALGQRDLRGAAVPAAVHGLQTRLLARLASDTGATVGPWGGDDAFAGVRALIAIARHPDVLPALRSALELDDATISASRFERMRIADRAVLLETVAHWIADWPRTFFIAAGNAALTQRTFRRIAQPGDLARQVLRLPDGSPRDRTFVPVLQDPALKRLRRRNRDGYRRVRAARLLDATAQRR

SEQ ID NO: 2544 - protein, 675 aa, synthetic construct
  REGION 1..675: note = TnsF-Tn7 System Protein
MALDCPGSDRDRSDETIDDDDPDLGRWRGGCHVDRPAFLRLTASSQVRCGSGTYRITHEIDLDSVLAVDVATGERKRLHVHEIEAVVPETPGPGGGADDGAPGRTSNDYTDAQWAEAQRRYGFIKPLVDHSLPSKEQIAEVAARAGVSVSTIYRWRSLFSHSEHVSALVPGQDGRPVGTRLITPEQEEIIRASIEDRFLQRQKFKPSDVITLVHERCAAAGLKPPAAGTVRDRIAELHPALVLRRRGERAKARDTYDPIRGRFPGADVPLAVVQIDHTLLDVIAVEETTRKAMGRPWLTLAIDVYSRMIVGLYLSMERPNANAVGLCLTMAMLPKDAYLRRLGVPGSWPVWGTMGKLLCDNAKEFRGKMLSRACQEWGIDPEFRPVKLPHYGGHIERLMGTVANEIRTLDGATFSNPKDRGSYDSEGRATQTLEEIERHLVDFFVTGYHERFHHGIDGSPKARWRLGIQGDGTKPGIGLPDLIADTQKLRLDFTPAEERTIQEYGVALDHVQYYDDVLRRWINATDPNQPKLARKFLFRRDPRDISRIWFFDPEVQRYYPIPYRNVTRPAVSLWEIRAAKAELIRDGRSKIDERILMEGALRRRGLAEDAREKTKAARREHHRATRLAATAGADAQVAVVTVPTPRQDPTRTSAVDDIFAEPPPVFTIRPNTNVR

SEQ ID NO: 2545 - protein, 582 aa, synthetic construct
  REGION 1..582: note = TnsF-Tn7 System Protein
MPHSAEVEAEDDDLHDLNAVEARADYIDEDQIIAVTSMGDWFEAIHNELLTVQTVLIVGPRGCGKTHMMRYTWMKCRRSEDLPLAIYVSFNRYLRLEPWMHRRVDAMKLFNAWVLAQIVDATLDVMEKLTGQAFNLAPDFLFDRHDLKLAYARLESHIAGDGLNDKDEEVIRDLTVPRVIDLIRRACAHADRRRAVVLFDDAALTLTPAFMTDFFDVVRAIKQRDIAPKCSVYPGTTQYGSRFHVHQEAYVVPVWLDVGADEYGAIMETIVQLRNPQAAAFIKPDVSRMLMFAAFGVPRAYLSMMGRLLKLGKQGQPEINKVIQALRTHQLGEFRSIEQKLPQFKTLIQTGEIFFQRIVEAVVEEGLKRKQIENEKNWLLLFEKTEMPNLATRMIKFLIEAGLLYEGQEVMHGGLERVYTKYTPHLSALIAARAFAGGSRGTSPAAFTEYTKRKAMHHGARRKLTTLLKKPEIHGLRFDLPACPQCGAERLSETQKFCHECANTLPRPSTYFRLMGLPIDKVPILTRWARDRLKEQGISTIQDLMSFEDPGTELRKIHRVGPKRARRYIEIIEDHVNESLLS

SEQ ID NO: 2546 - protein, 582 aa, synthetic construct; identical to SEQ ID NO: 2545
  REGION 1..582: note = TnsF-Tn7 System Protein

SEQ ID NO: 2547 - protein, 300 aa, synthetic construct
  REGION 1..300: note = TnsF-Tn7 System Protein
MSERYSHLLPDVRVLVDRSRQERIEFVQSDQWIGYPAANAAMDRLESLLTQARSPRMESGLLVGNAGNGTTTILETFAARHGDPQRLRDAEGRPSHRPLPVMVITIPREAGDAAVWTAILDRLRCAPPRKAEALKPYACAIMDQMQVRMLILDEVHSIASLRPSAQRDRLRLIAGLADDLRLAIVAAGNSQAQAVLANDPQTAGRFTPFVLPRWQNNQDFRDFLASYERLLPLPEPLRLTEQAPLEALLAASGGILGHVVRILRRAATAAIRDGRLYIDLRLIEATIDDPFGRQSHRTVG

SEQ ID NO: 2548 - protein, 300 aa, synthetic construct; identical to SEQ ID NO: 2547
  REGION 1..300: note = TnsF-Tn7 System Protein

SEQ ID NO: 2549 - protein, 301 aa, synthetic construct
  REGION 1..301: note = TnsF-Tn7 System Protein
MSEPYSHVAPEIREILDGSPAERIAVAQADQWVDYPAATAALKRLEDALKHTRASRMENCLLVGDSNNGKSAILRTFAQRNPSRGWMTDVDGTPQARAIPVLLMEMPTQRHEEFFWKAMLKGLACAAPRRNVDLEPFACSLLEQFEVRVLVIDEVHNLLLGGSPKDHRTRLKQLKSLSNRLRLPIVVAGTHEAEVALATAEEVDNRFEPFVLPRWNLDRNFRGFVAAYERMLPLKQPSRLAEKETLIPLYTVCDGTIGRLVKVLQRATVAAIESGAERIDADLIAKIATLPYGKERSRAVG

SEQ ID NO: 2550 - protein, 301 aa, synthetic construct; identical to SEQ ID NO: 2549
  REGION 1..301: note = TnsF-Tn7 System Protein

SEQ ID NO: 2551 - protein, 492 aa, synthetic construct
  REGION 1..492: note = TnsF-Tn7 System Protein
MSRPRPPSDPVTWPTPCTRCRGHHQIVVTWPDGPVCRYCYQAAKRTTGTCACGHVGVLPGRRDGHPACRNCTRISLNLDCLTCGAEAELHSHGQCWACVLAATVDRLLTDPRTGQMHPALAPVAAALKTMSRPNSGLTWLNQDHVTAFLTNLAATGDITHEALDALPASRTRDYVRGLLITHGALPARDELIIRYDAWATTALARVTTGDHREVVRRFIRWHHRRRLQEMTPVPYGAFLRAKQSVTVAIDFLNWLTDHGIQLPDVHQAHLDQWQAHGPTTGEIASGFLSWAITSQLVDPALTMTPHRRGTSPRLSLPNQHRALHQATVSADLPTRDRAAAILVLVFGQQIEDIVKLTWEDVTVTDELVTITLGADPIALPTPLDEPWRALAAAPSHDATAAHPNSPWVFRGSFPGRHLHAGHLRNRLRTHFSARAARLGTLHELTKHAPVAIIADALGYAPTTIAHHATDSSAGYAQYIAAIRATQKIEPAP

SEQ ID NO: 2552 - protein, 492 aa, synthetic construct; identical to SEQ ID NO: 2551
  REGION 1..492: note = TnsF-Tn7 System Protein

SEQ ID NO: 2553 - protein, 945 aa, synthetic construct
  REGION 1..945: note = TnsF-Tn7 System Protein
MSSYADRYLAAKQRAAHARTELAVFQHRLEFEMDDFQTTACGALEEGRGVLVAAPTGAGKTVVGEFAVHLALSRGQKAFYTTPIKALSNQKFHEFSRAFGAERVGLLTGDTSVNSEADVVVMTTEVLRNMLYADSPTLLNLGFVIMDEVHYLADRFRGAVWEEVIIHLPDSVQLVSLSATVSNAEEFGAWLDTVRGDTDVVVSEHRPVPLWQHVQVGGRLLDLFLDDTTVEEAAERLEGPGSDEPDVNPELLQLARAEHPRGGRRGGRGPGGRSRDRFSRRNGGEGFRPSPETRRVSRPQLIRRLDAEGLLPVITFIFSRVGCDAAVQQCVAADIRLTGEKEQQTIRARVAETAASLEAADLNVLGFYEWRDGLLRGVAAHHAGMLPAFKELVEELFAEGLVKAVFATETLALGINMPARSVVLEKLDKFNGESRVDITPGEYTQLTGRAGRRGIDVEGHAVVLWQPGMDPHAVAGLASKRTYPLNSSFRPTYNMSVNLVAQFGAHRSRKILESSFAQFQADRSVVGLARRVRSQEESLKGYEEAMTCHLGDFSEYAALRRELKDLERAEEKAGSRQRRSDAVASLHDLLPGDVVEIPRGRNAGYAVILSTDPNRDDPRPSILTLDHQLRRVGAQDLDGPLEPVSRIRIPKQFTGRTPKERRDLASSVRNALHEHRPPRGGGRGHTIQFDRGTSAAERRITEVRKALRGHPCHGCSDRESHARWAQRWWALRRDTDGLLRQIESRTNTIAKTFDRVSEVLGSFGYLETLPDGEVRPTRAGEQLRRIYGDRDLLLALSLRDGFLDDLDPAATAGLVTLLVYQAKREEQGIQPVLPTAAMDRAAQTVVRNWSLLTDREQERHLPTTAEPEFGLVEAMHLWARGATLSAALSGTELAAGDFVRWAKQVIDMLDQLAKIDLLDAGTRAQCQRAIALVRRGVVAHSAFED

SEQ ID NO: 2554 - protein, 945 aa, synthetic construct; identical to SEQ ID NO: 2553
  REGION 1..945: note = TnsF-Tn7 System Protein

SEQ ID NO: 2555 - protein, 375 aa, synthetic construct
  REGION 1..375: note = TnsF-Tn7 System Protein
MAMERLPGHVPGFLVDDSVGLLRAEDRVFEAMLDGWRAQQLARGLSPAFILASCRLVARFQEHANEYPWRWSSHHLDEFLADRRNKDRPVSLATLRANAGAIRMFCSYLTDPRYGWAGFCEQVFGDVPAQVVFEWNAPRHRVDDAVPPARRSFTKVELQRFFDTVDDVVDAEYAKGSKRWLPALRDSTAFKVAYAYGLRRRELAMLEYVDFGPNPHVPAYQGFGAVEVRWAKGVAGSGPRRRTVLTVPEFDWVVDLLQFWLSPAGRPRFATADRSALMWPSERAGAAAVRSFDRSFQRVRQLAGLPEELSLHGLRHSYVTHLIEAGYDPLFVQQQVGHSYSSTTALYTSVSADFKHKTVQKMIAARLATPHEETP

SEQ ID NO: 2556 - protein, 182 aa, synthetic construct
  REGION 1..182: note = TnsF-Tn7 System Protein
MDEWLATGTGTRRTAATFVHWAVRTHVMAPVDFPWIRSANLDSIGQSERLNVLRRIAEDSSIRLETRVLGLLVLLFAQPVTRISRMSVDDITGEVITVHLTGGEPVPVPHPFDQLFCDYLPQRRHTTTARNNRTRWLFPGAVPGQQWHPRPSTKPSGTATSPSAAGETRPCAISSWRCRRHW

SEQ ID NO: 2557 - protein, 404 aa, synthetic construct
  REGION 1..404: note = TnsF-Tn7 System Protein
MEIVILAVVIAVVVIGALGGLVVGSRKKKQLPPPPPSVPDITAAPPTEPHVGDEAETPRDEARRTIEEVDLPVTDPVTEEVTEEEPAAPAAPEIEVPEPTAGRLVRLRTRLSRSQNALGKGLLTLLSREHLDEDTWEEIEDTLLTADVGVQPTQELVERLRARVKVLGTRTPDELRALLREELLALLVPEFDRTVKTDSNLDTPGIVMVVGVNGTGKTTTTGKLARVLVADGKNVVLGAADTFRAAAADQLQTWGERVGARTVRGPEGGDPASIAFDAVKEGIEAGADVVLIDTAGRLHTKTGLMDELGKVKRVVEKHAPLDEVLLVLDATTGQNGLVQARVFAEVVDITGIVLTKLDGTAKGGIVVAVQRELGVPVKLVGLGEGPDDLAPFEPEAFVDALIGE

SEQ ID NO: 2558 - protein, 404 aa, synthetic construct; identical to SEQ ID NO: 2557
  REGION 1..404: note = TnsF-Tn7 System Protein

SEQ ID NO: 2559 - protein, 361 aa, synthetic construct
  REGION 1..361: note = TnsF-Tn7 System Protein
MTRAYATDEQYERWYMTECCRCGRRRHKAGTWPDGYVCRTCSDRAVRTRGTCPGCGQDRALPGLRPGDGVPICTTCAGFSRTFDCSRCGFEGKLLGGRLCERCALSDRLTALLDDGTGRIRPALVPLFNLLVAMDKPSSELAWLAMRRSQPTNASRLLQQLGLGQISLTHDAFHGLQPRRTAAHLEELLMTSGVLPTVDKYLCSFQRWLPGHLASITDPEHVKTIRLFATWRVLPRLRARAERSHITPSVRRFAAEQIKYATAFLQWLGQRNNSRAGQPARPDHLSALLNEAGIPAAAARGAAIRQQLLELPAPVVADALGYHNKTTSRLVRETGGTWSRHAAGDHTRSPTSRPPREAGDS

SEQ ID NO: 2560 - protein, 361 aa, synthetic construct; identical to SEQ ID NO: 2559
  REGION 1..361: note = TnsF-Tn7 System Protein

SEQ ID NO: 2561 - protein, 1066 aa, synthetic construct
  REGION 1..1066: note = TnsF-Tn7 System Protein
MNEGAFAADATGTGTGTGTGTDGPRAESALTDGPRAELARTNEARTNEARTKEARTDESRAAATHGADAAATTGGNDIPAGPDAARAGLVGRGGELARLRAALRRAPSVVVVRGEPGVGTSRLVAEALADPAAGDRVQLRGVCPDLRRPAPLGPIVDALAGLPCRPDVPLPPVTGAVAWAVPELAQWLPEPPAPAPRPSDRPGLLRRAIRALLAAQGPVALVVEDAHAADEATRDLLHHLLADPPPHLRLVLTEHHAPGLPRLGLHAPGHVPVEEITLRPWTVDEVRDAAGRWLGERAAEPELVELLHARTRGLPGAFEALLRGVGDHATAPDSLVAAVREVGVPARLRRELARRREWLTDDARHLVEAAAVVGRPVPVDVLAEVAGLTPDRAERAVHLALRRSVLRAEGPCPTFRHPLDRQAALDEVPPPRLARLNLRAARALHRHGRLVPLADLAGLYLAGGRAREGLRYLTAAADRAAADGDYAAATHLYTRAIDHDPRPAGRIRSAAKLARTAQLARADERVVNAVRRVLDEDDPPPQLRGEIRLHLGVLLRNQSGGALDSLAEIARAIPDLEQTDPQTAARAMLVAAIPSIKGWPISRHRAWLERAETFTEQVTDPVARAAVAANRATALMLLGDHRAWAAADVLSQPPGSAMEATQYARGWTNLAHAATALGHTARAWEFLHRAAAGLADSSSPYVEGLTQTARLVLSWHEGRWDDLHAAADHTTRLYREIPDLTAEAMLVRGLAALHVRGDVPHARRDLADAARITCFDTGFILTASAAALARVHLEAGRPGQASEAVEATLHRLERTGGWVWATEVVPTAVEALHGSGQPARARQLVEDFAAGIHDRDAPAARAALTVGRALLAEADHRYDEAATLLAQAADDWRRLHRPFDAARATEARGRCLLHARQAREDRGRSDGPGHAGQERQAAGQAAGRAAGEEAEGQKAAVGIILAAIEAYRALGARWDVARCHRLLRRHDIITTHRRGRLGYGDQLSPREREVARLVVQGRANRDIAESLVLSPRTVEHHVASIMRKLNVTSRTGIAAAHLAAHAAPEP

SEQ ID NO: 2562 - protein, 1066 aa, synthetic construct; identical to SEQ ID NO: 2561
  REGION 1..1066: note = TnsF-Tn7 System Protein

SEQ ID NO: 2563 - protein, 111 aa, synthetic construct
  REGION 1..111: note = TnsF-Tn7 System Protein
MKRKVDYTWRLREVMAQHQLFTATELVPLLRERGIDLSASQVHRLVSGTPERLSLQVMAALCDILSCTPADLVDTTAENAGVRKTATGDLPAPPANVAKLRPRAARILPDA

SEQ ID NO: 2564 - protein, 454 aa, synthetic construct
  REGION 1..454: note = TnsF-Tn7 System Protein
MCRHRSAGRPARGPCQHCGRRRTLDAETRRCRACADPATAPPPACCERCGTDGQWAKGLCKRCYEHAPHTVITRAAGWAGRMPAVPPWWSDFAAHLADHRHPIYAADVVATTARLIIATTTGDPHTLLAHARNNAPELVGALTDFFRIHGHLDPPPGLADRRAAARRTRRIEATPAPLRPQVDGFADFLLLQRERAQQLGLHPNQLKTIEIRLDTIRDLALHLHPEGHTSWASVTTADLESFLALAPDRRASHLAGMRQFFAHAHHSKAILHNPTDPITAVQQRGFHGPTLPPARQRTLYERWAANQNIHPHEAFIGLTALLHAATITELRQLTDADTDSDRHSVRFPGRSVHLPLDSATWTALQRCQEHRRRLGTDNPHLLVTRLTRTHHGPAGAAHIRDSLAPVGLLPRILRSTRLLALADELDAKILTVSLGMSYAGVAHYRPYPKLTRPV

SEQ ID NO: 2565 - protein, 553 aa, synthetic construct
  REGION 1..553: note = TnsF-Tn7 System Protein
MRGGLPSSSLSALRGPAVRRLLALRQDQKLTTRHVRLMAQSLEVTERTVWRWLAAAERDESAAAEPGARAQSKDRFSVTPEVRRLLALWKGNVAAVHRELIARAAMGEGEPPPSIPTLHRAIQRDLTPGERAGLAGGERAARKHDVFLARPRGWRNQVWETDHMQAPVLVDVDGKARRPWITWFTDCATNAITGVAVTPGDPSRESVLAALRSAVLREDPYGPFGGLPEKVRVDRGKDFLSRTVTAAFDLLDVTVEDLPAYTPHLKGTVEGLNRAVESMFLAALPGYARQPRPGKRASRPKDEVLLSFEDFTARLLAWTVWWNTEHRPAPLRGRTPLEAWQDDPTPLRDVSAADLWTFTLEDAGTRTLTTRGIRFRRRDYVGPWMTGQAGIQVRIRFMPHHDHRIEVYHAATGRYLGPADLADQATDEQVSAVRRARAARARRLKKDLEASQRERYAAVNQPEALQRLGALTTAQAEAELAQTADADLARLAMPDLIPHAAPPADWRTPASLAALTAPGTPVRYPSGRDGACAPDGPGGRAALPTTDEDGDAS

SEQ ID NO: 2566 - protein, 394 aa, synthetic construct
  REGION 1..394: note = TnsF-Tn7 System Protein
MVVRRLLERQQAGELATRHVRAVAETVGVSERTVWRWLEQAKATGRAEAPVRQGYAVSDEVWALLGEAGGNVSELRRRLVATGGEVPVPSMSTLSRVIRRDRRAGRALLTGREPDVAGSRRPDALSELGLNVVAEKGVGGQVFLREQKHLAQVPVLVPDAQVVHTPAVRSVLRTVAHAAAVGAVVCLYGDAGQGKTVALQYALSQLPHPARVRRVHVGVHPTVPELRRVLADALELGRRLPRGAGEADLMLVNALRQPRVLVLDEAQRLPGPALEFLRGLWDHPDTDTALVLAGAGSERALRRVPALASRVLTWELVPRLGPREVATVMAAFHPLWEDVSEDDVAWVDEHVGHGNFRTWAKLTSHLTAETYGRSRAVVDRRMLERACARLMGPL

SEQ ID NO: 2567 - protein, 394 aa, synthetic construct; identical to SEQ ID NO: 2566
  REGION 1..394: note = TnsF-Tn7 System Protein

SEQ ID NO: 2568 - protein, 334 aa, synthetic construct
  REGION 1..334: note = TnsF-Tn7 System Protein
MEGGLTDLALDTSPARDVWAFQAGCIQAFAATWVCRGFAPTTIGAYTSLLPRVLAHFDRPVWQIESAHVDAMLHDLLLAGRAAGTRRRYLDMLRAFHTFVRLRYAAEIRALYGATVGDPLDRFNRLRHVWDEPSRRLPPTAERLAAFFAHARARLAVTSDYPAAARDYALLRTLYHSAPRLSEALCLELCDVHPELGPSGKLHVRFGKAANASGPRPRWAPMLDGLDRILAWYQSDIRPLFPDTAALFCDAHGQPLRPETVRDRLARLLDTEGRVEGDRFTPHDLRRACTTNRAWTCSPSSSCSDTSTSPPPWPMSAPASPSSRTPGAVPRPQP

SEQ ID NO: 2569 - protein, 156 aa, synthetic construct
  REGION 1..156: note = TnsF-Tn7 System Protein
MPTTNTGPKLAPLPMQVRPVLGEGIASYIQRLAQANHLSPDELTAVLCPRGRARPPELHLLAQLTNSTVDALRRALPDAPGRVNTDPNRAGPFPQRVDHALPSLFDRVDLLMALGEALHFGVHRNVLRHRYPRLRRHLLRLALQHQPRQHRPPHLR

SEQ ID NO: 2570 - protein, 100 aa, synthetic construct
  REGION 1..100: note = TnsF-Tn7 System Protein
MTAAQRGIWTGTQLRRLLVERAGLELSAASVSALFTKQPSQVKLSTLSALCAALDCAPGDLLTLSDSTAPSNLPPRTAPDPASHPPQQQPVCHHRSLPPL

SEQ ID NO: 2571 - protein, 336 aa, synthetic construct
  REGION 1..336: note = TnsF-Tn7 System Protein
MTHPQNLLDPSADEPQEPDQHLTTLAGWRAFVADQPVIPELLSDTDHAKLTPAERTRYDEDRIDHHTRLLVVATSTVQHTVTCGRRLVLLNRHAVSARRGLIVSGPAGTGKTTAITQLGRAHELLDRARHPGVSDRIPVVYITVPPAATPRMVTVEFARFLGLPTRSRSNITDILESVCGVLTDARVGLVLVDELHNISLATRSGAEVADTLKYFSERIPATFVYAGINVERNLFDGTRGQQIAGRFTLIPTAPLPYNSEWQGLVATLENSLRLHAHKPGSLTGLDRYLHDRTGGMIGSLSHLIRGAALDAILTGSEEITEQSLQAIPLDHSSDSR

SEQ ID NO: 2572 - protein, 336 aa, synthetic construct; identical to SEQ ID NO: 2571
  REGION 1..336: note = TnsF-Tn7 System Protein

SEQ ID NO: 2573 - protein, 135 aa, synthetic construct
  REGION 1..135: note = TnsF-Tn7 System Protein
MTAATYQYVDLPDASVVTTRALLTARENITDTVAARAMMCIHGGAGFGKTLAVNTCLRALEPGEDVRKITFRARPTARAVRYELFTALDLAGEPPRHPSEFDRLLKTALAERPRTFLVDEAQWLNGEACGARGCS

SEQ ID NO: 2574 - protein, 962 aa, synthetic construct
  REGION 1..962: note = TnsF-Tn7 System Protein
MGEPVRAYGDPVLSAFDLDFLDGGQRRRTALGAGWNVRFEAVPPVRGFRWNKGDRSFPGWYYAVTTGDHVGYESWLERDRLILLDFDPDVVGIASQPFWLQWRDGGAKRRHAPDYFVRLADGRAQVVDVRAEDQVDERTAEAFAATERACSAVGWEFVHAGVPDPVLMANLRWLARYRHRRCGREADVAEDLMGIFRQPRRLRVGAEEAGDVLRVLPVLFHLLWTGVLRADLGGALLSSGTVVRAPNGMAGGLGHGGRGHGPLLRPRPGTRREESQMRRLSRPASIGVGDRVRFTGQSRAVLAVSAQAVILSDEGGSPREVPLAMLLADDSFKVISSPERMPLPPVSLLEALPQRAREKALWWEGHILEVLHGIDPTAGEDARPRPEYDPARHSLTARERAKAAELTAAGYRVSVSTVGNFRRRYQAEGLLGLADRRPVRKRPRFGTVDDAVVEAMRQAIKEGEDDSTRTGTYIIWRTGEILKEAGEPVELPSQATLYRLLAKLSQGNPVSATARNRRSRAHGATAPFGQWTVFAPGEVVQIDSTPLDVLVRLDDGVVGKVELTGMVDVATRTVTAAVLRPTTKSVDASVLLARTVTPELMRRGWVDALRMSRSVLPYRRLLDIDERLEHAAAKPVIVPEMIVCDHGKAFISRNFRASCRFLEIDFQPTHKAAPFQKGHVEKMLDSVGTLFAQFVAGYTGRSTDHRGRHLEKQPLWSLPELQELLDEWLVAKWQNREHDGLRDPLHPGRSFTPNEKYAALVEACGSVPVALSAEDYIELLPSTWRAVNDYGIRIKRRTYDGPDLIRRQHSGVTEKKGLWEVHYDPYDISRIWVRNHHGQGEWIEATWKHLRHTPVPFGELAWDHAARGLPEGTEAEIAQAAAALLTRAHAGPQDTAAKPKKRTRRDKRVAARTKATPPVPTPPPAPHPAPEPEPQRAEEEEPLAKVIPLGLFDPLADPWKTR

SEQ ID NO: 2575 - protein, 484 aa, synthetic construct
  REGION 1..484: note = TnsF-Tn7 System Protein
MARPRKASDPASFPEACGRCGQHYQVAARWPDGPVCGYCYQRAKRTRGTCACGHTGVLPGIADGQPACRQCSGVKLNVDCRTCGAEDEVYDGGRCWTCVLAATVDRLLTNPATGTVSPELVPMVTALKSMERANSGLTWIRQPHVTAFLQHLAVAPAITHEALDELPASRTRDYVRGLLVEHGALPRRDELLVRFTAWSRQALDRLPAGEHRDIADRFVRWHLIRRMNAAPGAVTQGTFLRSKQTTTVTIDFLTWLTARGTPLDRLTQADLDAWQAGGPTTRELASRFLAWAIKAHLVDPDLRMQPHRRGTADKLPSVEQTAAVQAVVHHDDLTARDRLAGILVLVLGQQVEDVVRLTWNDATVTDDLATITLGKAPITLPPPLDEPLRQLLEEPGHGRTAAHPHSPWIFRGRSPGHHLGAAHLRQRLKTVCSTRAARLGTLAELARTSPIPVLAEILGYHQTTLERHAVASANAHSRYIAARR

SEQ ID NO: 2576 - protein, 484 aa, synthetic construct; identical to SEQ ID NO: 2575
  REGION 1..484: note = TnsF-Tn7 System Protein

SEQ ID NO: 2577 - protein, 377 aa, synthetic construct
  REGION 1..377: note = TnsF-Tn7 System Protein
MELVPGRVPDFLADNGVGLLRAEDRVFEAMVDGWRAQLLARGLTTAFIQSSCRLVERFQEHSNEYPWTWSAHHVDEFFADRRSGERPLALSTLRAHSGAIRAFCAYLTDSRYGWARLCERVFGDVPSQVVFEWNTPRHTTDDAVPPRRRSFARGELQTFFDTADDLVDAEFAKGSKRWLPALRDSIAFKVAYAYGLRRRELALLESVDFGPNPHVPDFGRFGSVQVRWAKGTKGSGPRRRTVLTVPEFDWVVALLEFWLSPDGRARFATADRSTLMWPSERAGGAALRNFDRSFQRLRELAGLPAELSLHALRHSYVTHLIEAGYDPLFVQQQVGHSYSSTTALYTSVSADFKHKTIQRMIARRIGADDGTDGSSHE

SEQ ID NO: 2578 - protein, 386 aa, synthetic construct
  REGION 1..386: note = TnsF-Tn7 System Protein
MFTDAQGNILNGAEPVIAALAASDPTSLLNWINKSSASQILEELVKQNGQITHELLDKYRHDRTVPIMRAALVAGGLLTPRDEYLARIEHWLKDFCETIDDPTHRTLIRNWGSWNHLRRYRHQSRTQSPVTYNQVAKARGELTLAKRFLDRLATQNITLGTCRQADIDAFLADGTPYLRNIRGFLMWAAKTGDAPKLAVPYRETGKARTPIEADHRWRMTKHLLHQDDLESSDRLAGLLILLYGQRVSNISKLTTSDLCHADGKYILNLGTTPLELPTPLDQIAQQTVEQRQHHVKLGRANEDSAWIFPGGLPGTPLSAPHLAARLKAIGISPRPSRNAALIDLAARMPAAVLSKLLGVHTSTATKWSEIGAQSYGNYAAQRIQVR

SEQ ID NO: 2579 - protein, 386 aa, synthetic construct; identical to SEQ ID NO: 2578
  REGION 1..386: note = TnsF-Tn7 System Protein

SEQ ID NO: 2580 - protein, 90 aa, synthetic construct
  REGION 1..90: note = TnsF-Tn7 System Protein
MLAERGIVLSSSQVYRLVVDRPERLSMKVLMALIDILGCRMDELIEPIAVSDSRPKKRAAGIAASAELATGSGVGTYRPKRARITPPRTQ

SEQ ID NO: 2581 - protein, 463 aa, synthetic construct
  REGION 1..463: note = TnsF-Tn7 System Protein
MFLDQRFCDACWARRRRATQTCPGCGQTKVLAFYDEHQRPACTSCTGNTSSFGCNNCGREDNVFGACCATCTLADRLTTLLADTTSRVHPQLQPVYDALLAGPRPQTTLYWLTRRSARPDILVMMARGEIAISHTAFYDLPCNRNVNYVRDLLTATGVLPPYQPLVARIPSWLRALLDAEPKHRADLVHRFARWHALRRLHMLGDRVTRGSVLQARNAILSTIKFLTWLDDHDTELADLTQAMLDDYLLAHPGHAAMLRPFIEWTARTALTSELELPKQPTTQPEVMLSDEQRWDHVETLIHDNTIHLYARIGGLFMLLFAQPVARICRMRANQITIDSDIVTVTFDTEPIELPAPLDQLVRDHLNRPGWASYVSRPNTWLFPGGVPGKHLTTETMRSRLVSRGIHPNHARKAALFQLAATMPVPVLADLLGLDPNTAVRWAALSARDWGQYTAIRRETDMPS

SEQ ID NO: 2582 - protein, 463 aa, synthetic construct; identical to SEQ ID NO: 2581
  REGION 1..463: note = TnsF-Tn7 System Protein

SEQ ID NO: 2583 - protein, 2206 aa, synthetic construct
  REGION 1..2206: note = TnsF-Tn7 System Protein
MMSGPHALHAGDGYEYLTRQVASGDRERDRARDLTDYYTEHGTPPGKWFGKGAEQLGISGEVTERQMQALFGEGLHPDADRIIAEALAQGKTAQEAVEAAKLGAVYSEFTSKKTPISEIYDRRLDQWIEENHARPNHDVRMMLRTDAAREFLHGKLGRKPTTEEINNALATEKKQTKRAVAGFDCVFTPPKSWSVAWGLGDDKLRRALYECHRDAVLITLGWAEDHFALARRGKGGEKQIDADGLTIAMFEHYDNRTGDPNPHTHCVISTKTSADVLDKDGNPVLDKNGNPKKKWSSLDARSLFGGATALSCMYNAVSVDLAKRRLGFDFVAEDRGRGKEPVLEIADIPRELREEFSRRADIVRRTEELAADYRAKHGRDPSKRIQHKLAQQATLDTRNAKPVPKSLREMITEWNDRARGLLSGLSGAEFINRVRRWHTDPSSRPFDPERVAISVGVALGGKLATIASDPVERSRVIESQLVPFEFASRAARDDAWWEVAQLLDPRSTNNVLDKVARAAQDAKDRVYDREEVSRQVLETVSRRRATWNEAHIRAATYDRLARCDFSDDSGLRTAAEEVVATVRDRHSILMTIDPDEPPKRVQRRNGESQYNTLNMTTVLYTSQAVLDAEDFVREATRTPTAHILTRAAVDAAIGEVERSGQQKHGSDYRLNDGQKAIVRHLCMSGMRHDVAVGPAGAGKTTAMEAVVKAWLNDGRDVIALSPQKSAAEVLAADIGIPATTIDSLLVRMRTGNHPGIQPGTMMLVDEAAMASTAQLYQLQKIADQHGAVVRCIGDPYQLSAVESGGLMRLIAQETKAPILSDVVRFTTSGEDKASLNVRNGDPVEAFEWYQDHERITSGMTDDLRSKILHEYLRDQATGTRSLMMAATLADVAALNGAAQAALGLSGQVAVKGASHRLADGHRGYVGDIIVTRRNTNKLRVTGGKKNGASVDNGNLWTIKKVHRDGSLTAVGVGHRGKVHLPSEYVKADVELGYATTVHRAQGMTVERAYLLLNKTLGRALAYVGLTRGRRYNGVYVATDAVPDPAIEIQPDDEGDELTELELWMRVMACEDDNLTATEVMRREQARMNDPKRTRAIYDDVTAMLAEQRAHALLERALPTALWREVSTSSHLQTLIDTIAVADHHRLNTQAMVTSIATNDDADLGESLAEAKDLTAVLRARADRWIRERIQPLAAPISTAAVETFAVDPLLDQSALIASVTATNTTSESLSTTERGGRFYAVRDALVSGVPPVPPRHSGMDPELLDYAEELRTRLIGGTTAPTASHPPAPTNPTERAAELDSYNDTVDPAARRAKIRRDYESYVAELVRDHARYLLDRALPAALLRTVEHGRSFRDLLDTIALADAHRLNTAALVADITSNGGRDYGESLLTARDAAALLRARADDWIHRNLVNVSVDNPTVATLAVTDDTDTAAITQSIIASNTGTDVFAVSAQPGKFRALDDLPLPRGLRPIPAEYPGMDVSVADYADELRRRLLGLPDDAPDWRARAAQQQPPEVDETDEFDLADDDWLAAPQPDLPYPELDSGERVRRLRAELEAARTQVALLNNPAWDAAIPHILAIEPILDHVRARRDELAAPLRRLRSIRAEWEEAERDAEAAEDTLERALRSDPEPIDEQWLALIESEADPTVGDQLSAALDELRTAMEQTAVAQRDATIAQAQLVADSARSWADELRTQVDAAQRELDTAAAGRIVADSRDVGYIRDYAAAIATADLVAARERVIPLNHYLARARAIAIDELVDQTGLTRGAAALEVDTRFQPTREEIDAALTTVVGRGQPQSSTDLTGLDNNGTADATIEAARRHLAEVASAVDNGLNPPPIGDEPVARMVRAHADALMPWAVAAHAAELAATIAETQALDAETDYARLRNAEPNPWAEKDPFLTQLAADLAALPEDAPQRDQLSAMLDQYHAAAADSAAATTQARLHNAEQTAAAARAHADQLRAEAERARQELANHLADPLGSDTRTPVQTFTDTEAAQPTRSVTISTRPHIDLLTQPEITVDTPLNQAAAIYLATLNRDGHIESGQRDHHAPAWLPAPPPVENTTAIADLARRQYSAITARTTALAEQATDTQPDWTAHLGPIPHGAVARAEWIDLAGQVAAWREQFSITTQTSLLGEHPDDENQAEIWERLTAHAAELRTRAIERHQRDHQHQSERGRQEREHDTQRRPIQPNPPDHHRGIDI

SEQ ID NO: 2584 - protein, 2206 aa, synthetic construct; identical to SEQ ID NO: 2583
  REGION 1..2206: note = TnsF-Tn7 System Protein

SEQ ID NO: 2585 - protein, 375 aa, synthetic construct
  REGION 1..375: note = TnsF-Tn7 System Protein
MLSKIPGAAGLVLVEGVRHLDEPAAVFSGMLQGWTKQQASRMLSPGTIDPRISLVRRFVEFTGSYPWAWTLGDVEDFTVSLKSDSGGRLAPSTIRGYHLTLRMFCDYLTDTRYEWVRQCRDRFGQVPVQVCHEWNTVVHLTDYEGRPGRRPLSYDELQKLFDYLDDRVEKIAGSGRKGALAALRDAQMLKTAYAYGLRRNELCRLDVVDLRPNPHVAEWGTYGSVHVRYGKATRGGVPRRRTVLTVPEFDWVVAGMRQWVEHARPIFSPADHPALWLTERLTRVDAHFLEKRFARIRSEAGLDADLTLHCLRHSYVTHLIEFGSPERFVQEQVGHHFASTTAIYTSVSSDFKNKTLRSALSRVYAPKHDTVKEDR

SEQ ID NO: 2586 - protein, 113 aa, synthetic construct
  REGION 1..113: note = TnsF-Tn7 System Protein
MTGRRLVMRWHLRQMMAARGIFQTSELVPLLADRGVNLTRQYVHRLVTTAPQRINTDLLAALCDILDCQPNDLLEPAVEHDELTATGTGGADCEGLEIGALRPIRATVRQPHH

SEQ ID NO: 2587 - protein, 395 aa, synthetic construct
  REGION 1..395: note = TnsF-Tn7 System Protein
MIAKITALLGGGAVRDTQLRSLFDILGAVSSASVQHWLRSEESLGLLAALARDSDKITHEALDALPQNGRTHHIRAALVSATMLPPRNEPLAQLQLWVNRTIPTLASHHQPVVRSYAEWHIIRRARQRAARGPFRPGADASNRQRIRCAIAFLHWLDNSGIALTDLGQRHIDTYFDTRPSNPKAVATFLSWMRARRLITGIDIPHPKDALPLKFQDEIDHIEQLRRCLTDVTLPPHVRIIGTLVRLYALPVARIVELTTDRFHRDDTHAYLVIDRHPVILPPSLAALIEDFIGASDPDSDLTERHPARPAYLFPGRPSSRPRNTTSLGRELSKFGLPTRAARNSAMIANILDLEPAVISDLYGLAPQTAHKWAQFAQSSWAAYLAARSDQTRTSL

SEQ ID NO: 2588 - protein, 395 aa, synthetic construct; identical to SEQ ID NO: 2587
  REGION 1..395: note = TnsF-Tn7 System Protein

SEQ ID NO: 2589 - protein, 342 aa, synthetic construct
  REGION 1..342: note = TnsF-Tn7 System Protein
MLEGWRRQQSARFLGIETVDRRLRLIHRVVEFTGLYPWQWTPAEGEAFIDHLRGLDPPRALSTARGYEVVINLFLEFLLDPRYEWATACEERFGDVPQLIFHDGNSIVHRVEYEGDPRRRPLAYDEVQALFDAADARPSKIASRGVKGGLGAARDAAVLKTVYAFGLRRTEASMLDLVDLRRNPKMAQFGRYGSVMVRYGKSSKGSPPKRRSVLLVPEMDWIVEVFDQWLTELRPRFSPGRHPALWVTERVGRLQPRSINEAFVAAKRDAGLDEHLDVHCLRHSAVTHWTEFGYPAQFCQEQVGHSHAATTAIYTGVSNEFRNQMLAASLKGRLGVQWDVPV

SEQ ID NO: 2590 - protein, 108 aa, synthetic construct
  REGION 1..108: note = TnsF-Tn7 System Protein
MNKKMGYQWRLRDLMADAQMFQTSNLVPLLAERGIVLSREQVYRLVTQPPQRLSMDVLVALCDILDCTPNDLIVPEVVNAQIRKTATDELDSGPVQPRRSVIRRPGAQ

SEQ ID NO: 2591 - protein, 472 aa, synthetic construct
  REGION 1..472: note = TnsF-Tn7 System Protein
MHWPDGAICGICHYDATHTRGQCPECRSDRMLPGRNGAGQPVCVECAGITQRYECSTCGNERPPFRTRQCIQCSLESDLNDLLRPNASTKTRELTTLRDRLVSVSRPESIHTWMRNPQVQGLLTHLGDDATALSHEALDALPRNNAVQHFRAILVDLTLLPPRDEAISRFEHWLEQKFTPLEPSIKKPVERFATWHHLRRIRNASSDHSNSHAAVHNAKQEVTVAINFLTWLANNRGRGIAACTQTDVDRWLADGPTTHFTVRSFLVFAVDKRLCPQVDVPKRAARSTRRLTAEERLDWIRTCLVDDVDTVAGRCAAMLVLLFAQPVVRVVGLRADALSTINGRLHIRFADEPFEVPELFARLLRTHVAKRARTRTQTSASNPYLFPGGRAGTHLTQGHLRNRMTDLGINVLAARNGALDQLVKEMPAPLVADALGYSYAATTLHEQHVGKGFERYAALNSAHGTRADLLER

SEQ ID NO: 2592 - protein, 472 aa, synthetic construct; identical to SEQ ID NO: 2591
  REGION 1..472: note = TnsF-Tn7 System Protein

SEQ ID NO: 2593 - protein, 422 aa, synthetic construct
  REGION 1..422: note = TnsF-Tn7 System Protein
MQDVVGQDHLLTADAPIGRMVDAQRLVSMVLWGPPGCGKTTIARLLAEQTDLAFEPLSATFSGVADLRKVFSAAQRRRELGQGTLLFVDEIHRFNRAQQDSFLPYVEDGTIILVGATTENPSFELNGALLSRTQVFVLKRLDDAALETLITRAEDLLSAPLPLTDDARQALVAMADGDGRYLLNMIEQVHGLPAPVDTAVLAAAVQKRAPLYDKAQEGHYNLISALHKAMRGSDPDAALYWLARMLDGGEDPLFIARRITRFATEDIGMADPHAVQQALAAWDVYERLGSPEGELAIAQAVIYLATAPKSIGVYRGFNKARAAAKRTGSLMPPAHILNAPTRLMKDLGYGDGYQYDPDTETGFSGANYFPDTMPRETFYEPTTGGYERAISERLHHWARLRAAPPVPQTPHASDTSSKGPVT

SEQ ID NO: 2594 - protein, 422 aa, synthetic construct; identical to SEQ ID NO: 2593
  REGION 1..422: note = TnsF-Tn7 System Protein

SEQ ID NO: 2595 - protein, 278 aa, synthetic construct
  REGION 1..278: note = TnsF-Tn7 System Protein
MFCDYVSDPGYGWDRWCLQYFGTHPTQICHEWNTATHVQDAEHGGDKRPFTRSELQLLFDRADDEVDSIARWHRKGWLPAFRDSVILKIAYAYGLRRNEVRHLQTVDFSKNPYAPEFKGFGHLNVRFGKAMKRSGHKQRNVLATLPWSTSILEEWLERGHQQLSGSGPDLFTTERGSLVSQAALSARFRRYRDDLGFGPELDFHSLRRSYVTHHIEDGWDARFVQEQVGHEYASTTSIYTGVSSDYRTKILRATLDGTLGAALQRRNDDKDEDDETHR

SEQ ID NO: 2596 - protein, 90 aa, synthetic construct
  REGION 1..90: note = TnsF-Tn7 System Protein
MHNTTDLASHLKERDINLSPSQVYRLVTQRPERISLQILAALCDIFHCTPADLVVTHAADNQIKQAVNAPVIDLNAQVRPRRAHVHIDDD

SEQ ID NO: 2597 - protein, 488 aa, synthetic construct
  REGION 1..488: note = TnsF-Tn7 System Protein
MARPRKLGDPTKWPHPCQRCGEHHQIAATWPDGGICGYCYQKAKRTRGVCACGHDGVLPGRIDDQPACRRCSGVQLNVDCRVCGNEDELYSGGRCFGCTLGATVDRLLTNPESGVMATELEAIATALKSMKRANSGLTWIQQKHVTTFLTDLATAPTITHETLDQLPPSRTLEYVRGLLVEHSALPRRDEALIRYQQWSNDALTRVATPQHREIIRRYIRWYHLRRMHSMDSVSPGTFLRAKQTLTVAIEFVNYLTERDVELADLQQHHLDTWQASGTTTNEIASRFLRWAITTKLVDPTLTMTPHRRGTSPTMDADGQTDVVQRVTRTGNLNPRDRAAAILVIVFGQQIERVVTLTWNQVTVTDELVTIQLGDTAIALPEPLDEPFRQLHTSPTHDLTAAHPNSNWVFRGNTPGRHIHAASLRNQLRDLFSTRAARLGTLHELTKLAPVAIIAETLGYSTATIERHAMASSASYAQYIAARKDGSKD

SEQ ID NO: 2598 - protein, 488 aa, synthetic construct; identical to SEQ ID NO: 2597
  REGION 1..488: note = TnsF-Tn7 System Protein

SEQ ID NO: 2599 - protein, 372 aa, synthetic construct
  REGION 1..372: note = TnsF-Tn7 System Protein
MEIVPGGVPAFLADGDVGLLRAEDRVFEAMLDGWRSQLLARGLTIAFIKSSCSVVTRFQEHSNEYPWTWSAHHVDEYFADRRSGEKQLALSTLRANSNAIRAFCSYLTDPRYGWVTFSERVFQNVPSQVVFEWNSPRHTTDDAVPPHRRSYTKPELQTFFDAADDLVDYEFSKASKSWLPALRDSIAFKVCYAYGLRRRELAMLEYVDFGPNPHVPTYGPYGACQVRWAKGTKGSGPRRRTVLTVPEFDWVVDLLKFWISPEGRERFSTADRSRLLWPSERADAAGIRNFDRSFQRVRQSAGLPPELSMHALRHSYVTHLIEAGYDPLFVQQQVGHSYSSTTALYTSVSADFKQKTVQQMIARRIVTGDENQ

SEQ ID NO: 2600 - protein, 361 aa, synthetic construct
  REGION 1..361: note = TnsF-Tn7 System Protein
MLFWLRRSRTPALLAALAATGEPITHDTLDAFDPSPARAYVRELLITSGILPPRNEFLECLPAWADTLLAGTPAQHRQILSPFVHWFLLRRGRRRGSTSRGSAAFLRSRLRRAAELLAWIDEHQLTLGTLTQGEFEQWLSEGTTTRANIDAFISWAEARSLIADITLPRKARHGPLGVLDDEERRNQLHRCLNDAALPLSLRVAGALILLFGLEGTRVTRLTRDDLHDDGNRLRLAIDDHQIDLPPKLANLIRELRDAPATPSLMNRAVGGSAWLFPGRYPSRPIDRSGFGRVLASHGITVRDGRNSARYALASHLPAAILADLTGTNIKTAVEWTRWSKRNWFDYIAIRANDQTNTAQFE

SEQ ID NO: 2601 - protein, 361 aa, synthetic construct; identical to SEQ ID NO: 2600
  REGION 1..361: note = TnsF-Tn7 System Protein

SEQ ID NO: 2602 - protein, 416 aa, synthetic construct
  REGION 1..416: note = TnsF-Tn7 System Protein
MPTAVLDIPVDFAECESCSTRTPPDDLIHTADAEEVCASCASELDLCQSCDRPSRDVAQTVDEEDLCAECRSGLSECDDCSRYTDHITAVLSGGDVCPDCAEEYSTCFDCNLVVADPVSINGDYAVCPDCREDYDRCRGCQWLFRGCEYYCEDCARPDHSRVHDSDYKPAPDFHGLGPLFLGLELEVRTSYTGYDDSVKAANTQLDSLGYLKDDASVSDGFELVTHPMSFDYAMANFPWSLLPRLRLLGCYTDGEVGIHIHLSRAGFDSPAHIYRWLKLIYRNEPAVTALARRRYSEWAQFDPGIRAMAKALAHGDHGWGRYHAVNARPTDTFELRVFASSLRTRQVQAALAFADASVEYTRRLRSGDVARGGWDWSAFTAWVSTRPQYAPLTAELSALAATGAFIDLEEAYPCAS

SEQ ID NO: 2603 - protein, 404 aa, synthetic construct
  REGION 1..404: note = TnsF-Tn7 System Protein
MPDVELPDPCGVCRTREPGTRYTIDGGPVCEGCVYRCPQCNRCGARAITLTSTTCAGQLCSDCVSRLRPCVVCAEVTSATQRVDTGGVVCEICARLFDLCFQCERFTRHSRYVVGNQRACAECARDLRSCSDCGTLIRGRGQCDRCADPYRVWNYFYRPDPIFHGDGPLFLGMELEVIVPQDRYEDMVAIAVDALGPLGYLKRDSSIQPAGFEIVCHPMTYQYALTGFPWQMLDDLHVLGCRTNTSVGLHVHASRAGFTGPAHIYRWMKLVYRNHAEVTALARRTSRYAPFESGTRARAKDLAKGAHRALGLPRNQAINPHPRDTLELRVFASSLEAQQVQAALAFTDASIRYTAELSVSQIRAGGWDWDRFTDWLSRRLEYRPLVAELADLADDPQEVVLCAS

SEQ ID NO: 2604 - protein, 371 aa, synthetic construct
  REGION 1..371: note = TnsF-Tn7 System Protein
MAERIDVPGAAHLVLADGVAHLDPAAAVHEAMLEGWARQQRVRFLKADTIDKRLRLVRRVVEFSNLYPWQWNYAELEASIDSLRSRAKPIEMSTGRAYLVELRLFLEYASDTRYGWTGICLDRFGEAPRQLLGEWNMVAHVSDYEGRPGRRPLTYDEVQALFDAADSRVDTIRARGRKGSLAALRDATLLKTVYAYGLRRREAWGLDLPDLRHNPKAPQFGRVGALFVRWGKSSKGSPPKRRTVLTVPEMDWIVDALEYWIEEVRPLLAPGKHPALWVTERCGRLSKRGINEAFEQARVDAGLPKELDLHSLRHSYVTHLIEFDYPERFVSEQVGHAYAATTAIYTGVSDDYRNRLLTKAFRAQHPELWEE

SEQ ID NO: 2605 - protein, 107 aa, synthetic construct
  REGION 1..107: note = TnsF-Tn7 System Protein
MIRKMGITWHLRLRMAEKGLFQTSDLVPKLAERGIHLSREQVFRLVTQDPQRLSMDTLAALCDILDCTPNDLIEISAVNAEVRKTADQKAGPKPESRPTTIRRPKLT

SEQ ID NO: 2606 - protein, 378 aa, synthetic construct
  REGION 1..378: note = TnsF-Tn7 System Protein
MPAPHLAGFWLLLIAMPNPVRGLTWITNNSRVPQYLRGLADGSIPLTHQALHELASWRTAAHLRDLLMAVGALPRLDRQILLFERWYQHRLAAITDPEQARLLRRFAGWHLLPKLHTQASRRPLGPASRNVAASRLTTAATFLTFLTWLAARQHRLDQAGQADIDRWYAGQPDPDRARAFLRWAMADGHMPLLRLPTRASRPLVPISQHRRLALLRRCLTDTTIPLRTRVAACLVLLYAQPVSRLLRLTLDDITDSDGQTFLRLGTPPTPVPEPFATMLTALGTARANMNTATNADARWLFPGGRVGQPLTSNALLPQLRALGIQATQTRTAAFRQLVLQAPAPVVADALGFRPSTATKHVTVAGGTWNRYPLTRPPR

SEQ ID NO: 2607 - protein, 378 aa, synthetic construct; identical to SEQ ID NO: 2606
  REGION 1..378: note = TnsF-Tn7 System Protein

SEQ ID NO: 2608 - protein, 382 aa, synthetic construct
  REGION 1..382: note = TnsF-Tn7 System Protein
MTLPSNPAHPGHLQGDGRAEASGPRAVAVGGELSGSVFTGDIRLLARRSLPDASRVEEPEALVGLPRRPVAAFVGREHALSALREALITGPGIISQAIVGLGGVGKSELALQYAYQHRADYRLVWWMEADSPAQIQASLAGLTRAMVAGIDSVAAEQATTEEAAAWALAWLSSRTGWLVVFDNVEEATHIDPCLARLSCGHVLITTRRDIGWQHLGITPVRLDLLDRQASVDLLADLIGPPAESQAKLLDELALRLGDLPLALTQAGAYITRTPRVTLARYLHLLTHMPVRLLAAAPTGGDAARVVAKVWALSHQRIGAVNPLAVHLLKLLACYAPDNLPITVLDETNELAVDEALALLVSYSMITITVARKKTPGMVRKSW

SEQ ID NO: 2609 - protein, 382 aa, synthetic construct; identical to SEQ ID NO: 2608
  REGION 1..382: note = TnsF-Tn7 System Protein

SEQ ID NO: 2610 - protein, 882 aa, synthetic construct
  REGION 1..882: note = TnsF-Tn7 System Protein
MTDDQGGGDATRNKITGGTFYAPVTLARDVTMQVAGPAPQALAGLPAAPTGFVGRTHALQEVLGFLDPAGEGGAGMLVSAVAGMAGVGKTALALMAAHQAMEQGWFGGGVFFIDLRGYTPDPGERVPASAAAGQLLRAMGIRDTDLPPTGEEQLGLYRSVLADRAHQGLPVLVVADNAAVTGQVEPLLPAQPCHRLLITSRHTLTLPAQLVDLAVLPEAESLDLLRTALQAGRADPRAGAEPEPAKEIARRCGQLPLALQIIAALLRAEPDRTLAEMATELADTRQRLDALDSGDRDQHGRPLAVRAAFDLSYQHLLADQPEQAQLFRLLALNPGPDISLPAAAALTGTSEPMARRQLAALARAHLLTAPVTGRWGMHDLVRLYADQHGHAQAAADDRGQALDRLLDHYLSTAWFADAHLRALPGQPVPDRFTGRDDAMAWFDTERANLVTAVTLAQSTARHHIAHRLPADLNAYLSWRRGFDDLLAVNAIAVTASVQLGDRHGEGQALNNLGLALCEVRHFEEAITVLQDAVAIYREVGDRHKKGRALNNLGLALREVRRFDEAITSHQDAVAIFREFGDRHGEGMALNNLGLALREVRRFEEAITVLQDVVAIYREVGDRHKKGRALNNLGLALREVRRFDEAITAHQDAVTIYREFGDRQGEGMALGNLGIALGEVRRYGEAITVLQDAVAISREVGDRHGEGKALDGLGIALREVRRYGEAITVLQDAVAISREVGDRHGEGKALDGLGIALREVRRYGEAITVLQDAVAISREVGDRHGEGKALDGLGIALREVRRYGEAITAHQDAVAISREVGDRHGEGMALNNLGIALHEVRRFDEAITAFKRAMSMFDFTKDDYSRAIAQASLTETEQQQAGG

SEQ ID NO: 2611 - protein, 882 aa, synthetic construct; identical to SEQ ID NO: 2610
  REGION 1..882: note = TnsF-Tn7 System Protein

SEQ ID NO: 2612 - protein, 845 aa, synthetic construct
  REGION 1..845: note = TnsF-Tn7 System Protein
MTLPSNPVRPDCHNGGGHAEASGVRAVSVGGGLSGVVFTGDIQLLSRRPLPDTNRVERAEALVGLPRRPVAVFVGREQALSSLLDALATGPGIISHAIIGLGGVGKSELALQYAHRHQDDYRLVWWMEADSAAHIQAGLAELARALVAGVDSVAAEQATTEEAAAWSLAWLSSHTGWLVVFDNVEEAVDVDSYLARLTRGRVLITTRRDIGWAQRGITPQRLEVLDRPASIALLADLIGTSTADHSLLLDELGGQLGDLPLALAQAGAYIARTPRVTPARYLQLLKETPARMHAAVPVGGESARVMAKVWALSHGHIQTLNPLAVHVLNVLSCYAPDNLPVTVLDGLDEDDSLAVDEALELLASYSLITLTTSSDLDLSDAPKDLVSVHRLVQTVIFHQFASGQREALRRRAAFLLQAALPDDADSPVNWPSYRHLLPHARAILPLDSPGLSKVLHYLDASGDHATALALQRQIHAHHLHTSGPEHPQTLITQANLAFYIGKVGGFAAARDQFATLLPTIECVFGANHPDTLATRHELARWTGEAGNAAAARDQYATLLPVCKRILGTEHPDTLTTRQRFADWMGKAGDLAAARDQLAALLPIRERILGTEHPDTLATRRHLANWTGHAGDLAAACGQLAALLPVSERVLGNEHPDTLTAHHDLAHWMGQVGDGLAARGRLIALLSIRQQILGSEHPDALATHSAIANWTGQLGDAAAARDQLAALLPIRERILGTEHPTTLTNCHNLAHWTGKAGDAAAARDQFAVLLPIREHTLGAEHPDSLIARHSLAYWTGEAGDAAAARDQLAALLPIRERILGIEHPDTLDTRHELARWADLAGWRRAT

SEQ ID NO: 2613 - protein, 845 aa, synthetic construct; identical to SEQ ID NO: 2612
  REGION 1..845: note = TnsF-Tn7 System Protein

SEQ ID NO: 2614 - protein, 111 aa, synthetic construct
  REGION 1..111: note = TnsF-Tn7 System Protein
MKRSVGYRWRLCEVMAQHGMFRVNDLIPHLAERGITLSTSQVHRLVSGTPERLSLPVLAALCDIFALTPSDLIVTTAENVVRPRAASTAEGGPVVDLADLRPTRARIHPEP

SEQ ID NO: 2615 - protein, 388 aa, synthetic construct
  REGION 1..388: note = TnsF-Tn7 System Protein
MPQELQPLIALLTKSGRPIRLLAWLQGSNSARLLGHLAATGRPLTHEILDELPPSHAECYVRSLLVRTHVLPKPEESLERITPWLARVLTDRPAGHARLVQPYTQWVLLRKARHRAARGRAVHRAGNRIRAEVLLIPSFLAWLDERKLSLTTVRQGHLEDWLAAGPGRRHDICTFLTWAFRRGLTGKQDITHAPAGNGPPPLTDEQRWSELRTCRNSGALTLRVRVARALTLLYGLSSERIRRLAVDDIKKRGDEIHLRLHRQELFIPPRLARLLRQLAEVAAEETLLPADDGAKLWLFPGIVPGQPLSAAGFSLLMRQSGFHAVPGRSAALVSLAEQLPAAVLAHLLEINIQTAHKRASYSQPNWSAYLAVRDQEDARPSRNTAPSE

SEQ ID NO: 2616 - protein, 388 aa, synthetic construct; identical to SEQ ID NO: 2615
  REGION 1..388: note = TnsF-Tn7 System Protein

SEQ ID NO: 2617 - protein, 679 aa, synthetic construct
  REGION 1..679: note = TnsF-Tn7 System Protein
MADLLSQLRKTAGTPSLREIAARTNNLMQRHQAQGASRLTGPHVQPTRVPLVTLSRLFKGELITQWAQVYTTLWALGDSQQRPPQAQVEALRRLWNARYDAERGGEAVADDREAVVYRRDIHLACGSLLRGPLLPLTIWQPSHGTADAREALRTWLASTQRLSTVVGGVGYGKSMLAMWLADELAQEPNGPVPVRVSARRVLGNTGQDTSAVSDTDMSLLRFAHPPLPKRLRESIGGGDTDAVVILDDLDEVGALTATGFDSSRRVLHQAFTSLGSNIRIVVCCRAVALNYSDPSHATEQRALMEETEFAVRQVIDPDVTGSTLLGIDAVEQDEAEAFLRQRGVSDEWFASVGWPLPIELTPQLIQLLVTLGRTSRGKAHELSLDQIYEQVAFAWKRSVPILERAERRDWSALLTYLEQRSASFMRPMRVSPELDRLAELAGFLSSDQLGSLRFTHFSWQEFFLARYLAAEILSNRAALLSRLNLLFDSNINRFLVPQLLRGRRYRAITTSQQLRVVTVGDFKEFLADTKWRGGIGWGVHPAGERIRDRWRPPGDMTGSLSAEGGPPLGAADNDPVTHVSWYDAERFAAWMGGRLPLGDSPAPRSHKQTAPRYAWTERWAEESMAEMELQPLQQNLTAQKTSRNPDFRSPQIGIAVMTTMPYWSGFNLSGSTTSHLEGG

SEQ ID NO: 2618 - protein, 679 aa, synthetic construct; identical to SEQ ID NO: 2617
  REGION 1..679: note = TnsF-Tn7 System Protein

SEQ ID NO: 2619 - protein, 589 aa, synthetic construct
  REGION 1..589: note = TnsF-Tn7 System Protein
MYRLTTGHRTSVVVATVLTLVGSALGLAQPLVAKQIVDASGHGRAYWPLLLVLAVLFVSEAATGAIGRFVLERMGERVVRQLRHGLVARLLRLEMREYDRHRTGDLISRVTTDTTLLREVVSQALVDLVTGALVAAGAIALMMWIDPLLLALVALTVATAAAVVASLLKGIRAASEHMQTSVGAVAADLERALGALPMVRVHRAEDREARRIGERVESAYDAGVRTAKLASVMSPAVELAVQGSFLLVLVIGGLRVTGHANSLGDLVAFLLYASYLVLPLSSVFRAVGLIQRGMGAYQRIEEALRLPAEPAPAGRLSVQHRTSEAAPDEAPALELRDLTFGYDPGRSVLRGVTFSVPHRRQTALVGRSGAGKSTIFALVARFYEPDSGTLLFDGRPTTELTRADCRARIAVVDQNTHVVHGTLRDNITYAVPDASDTEVRRVIELAQLDHVVRRLSGGLTGMLGDRGNTLSGGERQRVALARALLARPALLLLDEPTSHLDAINETALTTVMKDVAQECALLVIAHRLSTVQHADRIVVLDDGRTTAHGRHEELLIASPLYRELAAGQILRPAAAHPLPARTAHTHPPP

SEQ ID NO: 2620 - protein, 589 aa, synthetic construct; identical to SEQ ID NO: 2619
  REGION 1..589: note = TnsF-Tn7 System Protein

SEQ ID NO: 2621 - protein, 225 aa, synthetic construct
  REGION 1..225: note = TnsF-Tn7 System Protein
MVSTARGYEVSIQMFCAYISDPRYDWPKECERRFGTVPQQVFHEWNTVLHVTEYEGDPRRRPLHYDEVQALFDAADSRVEQIRARRVKGALPAMRDAALLKTVYAFGLRRQESAGLDLVDFRRVPRTARFGHFGAVYVRFGKASRGSAPKRRTILLVPEIDWIVPVLEQWVGEVRPLLRPGAHPALWVTERGGRLDRRSVNDAFVTVRDLAGLPTELDPHRLRHS

SEQ ID NO: 2622 - protein, 403 aa, synthetic construct
  REGION 1..403: note = TnsF-Tn7 System Protein
MQDRLSALFNAAPDSDTSQYAHMRAALADCPEPGTALNWLRNSRSARLLADLIATGRPLTHADLDATATGSRSGAMIADYLRGLLVTYQVLPERDELSARITRHLDEIITRHPHHAVLLRSYVRWSLLPRARRRQRLRGGGVKHRIRWAYTRINVAVEFLTTMAACGLSLGEVTQHQVDAWLAGNPGTRYEVRDFVVWAHRRHHARALEVPHRPKADPVGLDEDSQWDLLHQCLTDPELPLDVRSAGAILLLFGQHLTRIAALTTSALSTADDNTTFLTLDRTPIPLPASLARLLTDLVERPEPTGWAANTPSGWLFPGHLPGAHLSAAVLGRRLAAHRIPNRPARTTALVAVAQELPPAILGPMLGLHPITASLWRRRAGTDWTAYLAARTNGAQRNTARSE

SEQ ID NO: 2623 - protein, 374 aa, synthetic construct
  REGION 1..374: note = TnsF-Tn7 System Protein
MSGVDLPGAIRLVCANNVRALDPAPAMFDAILRGWEQQQRSRLLARKTISDRLSLVRRFAEFTGTYPWDWTPEDVEAYFSARLSRGEVVWSTVRGQQGDLEMFCAFISDSRYGWTKACLEEFGRFPVQVCHDWNTAQHVTEFEGCPGRRALTYDELQTFFDAADDRVEQIRKKGRKGVLAAWRDSVLVKQVYAYGTRRRETSMLDLTDLRHNPRAPQYWRLGALEVRYGKASRGSPPKRRTVLTVPEVDWIVPVVQEWVEEVRCGFSPARHPALWVSERCGRLGVRRLDEVFAAIREHADLPADLDLHCLRHTYITHLIEFGYPERFVQEQVGHAYASTTALYTWVSDEYRNRLIEDALQRRLKRGGGGVLMPQ

SEQ ID NO: 2624 - protein, 111 aa, synthetic construct
  REGION 1..111: note = TnsF-Tn7 System Protein
MMQRMGFTWNLRRLMAERDMYQTTDLVPLLADYGVHLSREQVYRLVAQPPQRLSMDVLAALCGILDVTPADLITVTEVRAQVAKPTATGENASAAKAPPARRVRVRRPSEQ

SEQ ID NO: 2625 - protein, 295 aa, synthetic construct
  REGION 1..295: note = TnsF-Tn7 System Protein
MDREVTLTSAIFRHEWAATLWGRFSLWLYSSHRANPNLLGLIRSHQIYFERIDAAFSSVLDLTDQSLLRLFGVTVLRTHLLPTRFMNEQLGIEISDEDKLDAVERSRIEEVILASKRESWGWIVQAYLAELDKKGLSLRSIRMYISTANQFAKSVRLERQAWTTGQIERFLASWPARRNNLSGFVSFCRQSQKWDVTLPAKGAVIAPVRNPLAVVSKLTKLIAKVDVMGIEQADKKVLEKILAAALGIPVRMVKAMSIDQINIEETGIVFSLAEKEVLLPPELEPYGRRLASYLA

SEQ ID NO: 2626 - protein, 229 aa, synthetic construct
  REGION 1..229: note = TnsF-Tn7 System Protein
MKTGLNARLDCLAPVRPLRMSRRALTGRITVDGTERAGFESSLERDWLICLDFDPAVTLIREQPFSILYDANGRELRYTPDILAQYLYPGRDPIVIVYEVKPIENLAQDFLTFRPRFKQAVAACRDVGWRFKIVTEKHIRTPFLKNAKFLRKYRGMAVQQLYQDQLLYSLRILGPTTPQALLAMAYTDDERRMAALTELWRMVANREIATQLELPLNMQSRIWIGTDDE

SEQ ID NO: 2627 - protein, 367 aa, synthetic construct
  REGION 1..367: note = TnsF-Tn7 System Protein
MGRHRATSIEVVPWYAHVVPGRDELISSFLVRSAHRHGLSPYRFTAVTFPENVIWTRDIDSSLSDQALSLIAHYYGLTIDDVVAMTLFGFMGCASSSDPQWPACQRWINVIGIYHRLRLRFGLQFCPLCLKDEPVFQRAWRLSFVFACPKHGIFLRDCCPSCEMAVMPHRCKHEPTRCWQCGTVLHSFDGKDKGSADTALAVQYRMLRCLDGHGYCLGPELLSTPEFIHGASIMMRLIKQQLQSHPDLRPIHICTVDIREETRRLRTHSREALFSVLNELLEDWPVNFLHFAHAAGMTQLAFRTCGELPNWLTAAVALLPERLRTRPRNNDKWLIDHVCRLEHVGGAVSWALRAQALMRAAKGIYEC

SEQ ID NO: 2628 - protein, 634 aa, synthetic construct
  REGION 1..634: note = TnsF-Tn7 System Protein
MNKIPKGFFEMVPGQLVRSAGKKYRITHLVTVDTVFAQDEETLESTRLRIDTLEAFVEDDSKDIPLTKDLSLYSEKEWAIAQRRFQAIKPLLDNPIRTRLDAEAIATAQGVHAATLYKWLSAYQKAGNVSALVPTKRGRATGTRMLNAEQEKLIASVINEDYLTKQRKKKQDVIDEVQRRARLAKISAPHGNTIRSRISMLPVAETLRRRGQREQARNLYEPLQGKFPGADFPFAVVQIDHTPADIILVDEIYRQPIGRPWLTVAIDVNTRMVAGLYVTFDKPNSTAVAMCLSHAICPKREYMAGLGVSGDWPVWGVMNVVHSDNGKEFRGAALERGCDEYAIDLQWRPPLRPHYGGHIERYMGTLANQIHKLPGTTFSNPRHRAKYDSEAESALTLKEFEYHLVEFIVNVYHQRNHSELGMPPRKKWELGILGNATSPGIGILPVPTDPVKLLLDFLPFFERSVQQYGIQIDLINYYDPVLDPYINSVDPNNPNARRQFLVRRDPRDISKIFFFDPIAKAYFPIPYANVGHPPISAWELKEVRRTLKEQGKHDVDEDVIFEALGRLREAVEKSLHKTKSARRHAARSPLKKQAEAVEETKTPRLSPPLKSLFDNEEDPFAHPVNPFDDVSLTR

SEQ ID NO: 2629 - protein, 250 aa, synthetic construct
  REGION 1..250: note = TnsF-Tn7 System Protein
MLSVVFFVVWCRRTIEYVKIISVVNLDRIDSGNVPRPGEISLAHCGVLFLDEIAEFHRRVLDVLRQPMESGVISISRAARQAEFPARFQLIAAMNPCPCGYLGHASGRCRCTPDAVLRYHNRLSGPLLDRIDLQIEVAAMAPAALGRRAGAGESTQAIAARVAAAFALQLARQGKSNQRLSNTEIEQHCRLDAHGEQLLLGAMARLHWSARTYHRVLRVARSISDLAGSPAITPPHLAEAIQYRRVLREL

SEQ ID NO: 2630 - protein, 292 aa, synthetic construct
  REGION 1..292: note = TnsF-Tn7 System Protein
MDHLEPETAAMLELPTDERVMLCKTDRWVGYTRATQIMNRLDQLLVYPKSLRMPSVLIVGRSGNGKSSIVERFCSRYPVQMTATGNAISPVLQISMPETPSESEFWSEILWAMGISHGDKDSILLKKKQAKSILIQVGIRVLVIDEFNNLTTAGKGAGDLLAAIKGISNVLKISIIAAGTQAAINALNLEPQMKSRFDPAALDRWKLNVEYLRFLTSYQRLLPLAEPSDLASRELAPIIYSMAGETIGSTVNLLKAAASHALLSGKERIDRDVLKDVVWTAQDEWDDIARRV

SEQ ID NO: 2631 - protein, 292 aa, synthetic construct; identical to SEQ ID NO: 2630
  REGION 1..292: note = TnsF-Tn7 System Protein

SEQ ID NO: 2632 - protein, 363 aa, synthetic construct
  REGION 1..363: note = TnsF-Tn7 System Protein
MQHSCPECGADVPGGGSSRCEACALKDRIRRRVRLNAELLEQPWVRSLFGGFCAWQGLPKKAGNMTARIDRYAVFFADIDRHCMVPAEITQGRLFEIFGAERLRRGFLIVSFLCERLDIEWDMVALEDMIEAKRMRLQAQAWRDRPWALGLQRFVEELEQRKGPVLKRKTIRMYQAAAGGFLEKAGVNSPEELTQADLHQYLKRYPGQAANVSIFVRHLNATLGIELEVKYKPQTSLMSKGRKLVDRVQAIAKQLDEEGDESRCKVLLVGLLADLFRIPVKEVLFLKIDDVVEDSSGFLLWPESHGLRIEGCLAEHFRRCVFTHSEGEMGFLFKGRNRRQPLSYDTVRYHLRASSKEIPDASQ

SEQ ID NO: 2633 - protein, 226 aa, synthetic construct
  REGION 1..226: note = TnsF-Tn7 System Protein
MEQEINGLTSRRPVRSIGTSRRSVTGRVAFGGKSIPFESSLERDFLVLLDFDLAVEDVLEQPCRITFTDANGRERHYTPDFLVEYGDGERVIFEVKYRANLKDDWTSLKPRFRAAIRYAKQNGMRFTIATEVEIRGGAYLANARFLRPYRDYKWTPAIDEHLLKTLVTLGETTPESLLAAAYWTLENRIKAVSSLWRLVATRRIHADLYEPLTMATPIWTTLEDGL

SEQ ID NO: 2634 - protein, 355 aa, synthetic construct
  REGION 1..355: note = TnsF-Tn7 System Protein
MIGDTWPYCVPLQEDELLSSFLIRNARAHGTTPYCFMSYYWPGRHFWDRDTDRAADADWLKELGVLAGVPAERLEASTLLPFRRVLGSTLRSGDTPLLLAVSLFHRTRRRHGLQFCPACFAEGRQWFRRIWRLGFVFVCPEHQITLLDACPACGAPVVPHRSLSLDQGRCHQCGAFLAGGIARQQPITGVLEWQKILLDTLMGVSDTGPFERLETFTSVRALLSVLTARCVLTAIRDAFHLSPATLTAERLQFEHVRTADRAVLMETLAAWLSDWPSSFRIGANAAHLTQRTFHRLNQSSSRLRQEVERLPVGGKRDRRYVVKVLDAELVRLARVDKKAYRALRARRLQALSGLS

SEQ ID NO: 2635 - protein, 644 aa, synthetic construct
  REGION 1..644: note = TnsF-Tn7 System Protein
MSEPAFLSMKPGSFVISEGKRFKITHMLGVDSVLAKNLETNAVERLRVDLIRPFKEEDLPDGVVAAGRDIEDICDEDWKEAQRRFAVIKPLLDDPGRTREKVRLAAEVEGVATGTLYDWIRAYNESGQLSALVPQKRGRKPGQTGLDSDIEEIIEAAIQEIYLSKQRQKPQDVVDHVALLCRNAGIKPPHANTVRNRLKRLRPTRVLRARGMGDKARNLFTPIRGNFPGAEFPLAVVQIDHTEADIIVVEEGTRQPMGRPTITLAIDVYSRMVTGCYVSMEKPSAVAAGMCLARSMMPKNEYLADLEVPGDWPVWGKIGTVHCDNAKEFRGAMLSNACEQYGIDLQMRPVKVPHYGGHIERLMGTSAGEFRKLPGATFSCPKERKGYDSEKESALTLREFEQRLVDFIVNVYHQRVHADLNVPPRRQWEIGLLGDTSQPGKGIPEVPSDPRRLRLDFLPFVERTVQPYGIVVDEIFYYHEVLTPWINAREPKRSKEKRKFIVRRDPRDISVVYFFDPEAHQYYEIPYRNTAHPPISVWELRAAQQRLKEEGRAHVDEDTIFEAISRMRERVEEAVTKTKAARRQQHRIKTTQKSAQARQKTADTSAPAEEPLPAGGNAPTAAPADADDIFSMPIQPFDDLAVKQ

SEQ ID NO: 2636 - protein, 296 aa, synthetic construct
  REGION 1..296: note = TnsF-Tn7 System Protein
MSDLDHLEPSIRGAMSLPTEERIAFAQQDRWIGYTKAQEALRTLSDLLAHPRTLRMPNLLLVGESGNGKTTIIDKFRELHPVVSQPGGEPLVPVVTMGMPSEPVEARFWTELLLALKIAHRDSDPVQRKKNQAHSILTYVQCRMLVIDEIHNLLYGHARQQRHFLGVMKNLSNDLKLPIVAVGTRDAIRALHTDTQLSSRFEPFGLPRWQLDAEFLRLLASFERLLPLAKPSNLASRELAIKLHGMSGGTIGGLARILKRATVQAIRDRSEQITLKTLDQLDWVKLSDYGKQAQTL

SEQ ID NO: 2637 - protein, 296 aa, synthetic construct; identical to SEQ ID NO: 2636
  REGION 1..296: note = TnsF-Tn7 System Protein

SEQ ID NO: 2638 - protein, 276 aa, synthetic construct
  REGION 1..276: note = TnsF-Tn7 System Protein
MREDLTTLLTPVPHDGETPRAENTRILTEALCAALRPESILTWLRNPDLRLVLSRIANGQLPLTHEAFDAEPAGTRIEHLRSLLIHHGLLPERDQYLFRFEAWLDDKFKAIADSEIRRPVEQFVRWHHLRRIRSLSQEGRPTRASIISSKQEIIEATRFLTWLFHTCARTAEECTQADFDTWLADGTATRRAAKPFIRWAVKNRICGPISTGRHITKTVPMLTQDQRLEWLKRCLTSEIDTLAYRVAAVLVLLYGQPLARIVKMRTTDIVSIPAGP

SEQ ID NO: 2639 - protein, 276 aa, synthetic construct; identical to SEQ ID NO: 2638
  REGION 1..276: note = TnsF-Tn7 System Protein

SEQ ID NO: 2640 - protein, 365 aa, synthetic construct
  REGION 1..365: note = TnsF-Tn7 System Protein
MAIDSSGRVLEISSVRFLHPEEHVFTEMLSGWRNQQLSRNLAHLTIEQRERLVKRFLSFTNEYPWHWSPANVDEFFGDLRAEKKARQSTVRSYQAALRAFCSYVSDPVYGWDRVCERQFGTHPAQVCFDWNTAVHVQASESAAEKRAFTRRELQLFFDRADDEVSRIASLERKGWLPAYRDAVVFKTAYAWGLRRNEVRHLQTVDFARNPHAREFGKHGVLQVRYGKAMKGSAPKRRSVLTVFDWSSEIMEDWLENGHRHMSGGLDLFPSERGTLVSEAALLRRFRRYCDDLDLSPGLDFHSLRRSYVTHLIEAGMDALFVQNQVGHEHASTTALYTSVSSDYRVKTLRRALDSTMKNALSGMED

SEQ ID NO: 2641 - protein, 110 aa, synthetic construct
  REGION 1..110: note = TnsF-Tn7 System Protein
MKRETDYRWRLPELMAARGMHNSTDLAPSLRERGIDLSASQIYRLVTHRPERISLKMVSALCDIFSCGPEDLIIVTAADARRKKTATDANVVNLDKSIRPKRARVSRDGH

SEQ ID NO: 2642 - protein, 837 aa, synthetic construct
  REGION 1..837: note = TnsF-Tn7 System Protein
MRESQTVSFCTGELSHIIGEMESSLPTVLIAEVVRRLKLSAPALARLHAHIISDPLVLTRGLDSTPATVTRLIRDLRDSGARVVQLPRCAKCADVRPLVRTASVGKVCARCDYSLRRTDVECGLCHRIRQRRGQVLNTQICQSCWRLGSITGAEDFVTAVLFRTRSAGSRTEFEARLRQATNGMSASICLRTRLEIELSSRDLFADPQFGSANFGTMYDLVRSVGAILPVRACGHCSRQVPLTEKLDGLRTCDRCRRRANMAPCDSCSQPSITSRIMVDGTRLCISCVNRLPQNFGTCSRCGRTKQIGSERPEGLLCRTCRMKERSGTCTSCGHVRPCRFAGTARAICENCALSKEPCSQCRRNKVPANRLADGGSLCATCSPKVIEACADCGKDRQVRARIDGAPYCWECGERNPLFHQNCLRCCRFEYLSQLGLCPFCKAADLVDSLFEGGPSPVANGRDLLREALRAAPPQAVFTLFQRRKSVAVLRSLIAHPGGISHDSLSQVASGSSEVVVRAFLVEHGVLAWRDENLARLEAWIAATADEVADPSERRAFLQFGRWRHLSRLRRQTDPAGDGQVSGIRTELGDIIEVIGWLRSRGSSIEGVNQSLVDNWLSRGPGTRIRVKHFLTWCYENNLASAKVTIPAARATALTVAGITSTEVWTVLDQFLDPSKMISGQTRLAGCLLLIYGIRLGRIAELRLSDLREHDGKYSILIGTDPLELPSSLDIAAIHAQHDRSAPRLMTPATDDDWLFPGGVPGRHLTSTSLAARLRKLGVHNPTKYRKAALTPLAISLPAPVLSRLLGLSISTATTWATAVSSSNASYAAARLSTRPGL

SEQ ID NO: 2643 - protein, 837 aa, synthetic construct; identical to SEQ ID NO: 2642
  REGION 1..837: note = TnsF-Tn7 System Protein

SEQ ID NO: 2644 - protein, 252 aa, synthetic construct
  REGION 1..252: note = TnsF-Tn7 System Protein
MRYDQHPVAPSQQNHVPRLSAAGLQVRYGDAVALNGVSFSVHDGESVAIMGPSGSGKTTLLHTLAGIIRPDDGTVALRTLDGQGRSQIVRVDELSDPARSELRLQEFGFVFQQGMLIPELTAMENVMMPLLLTGVTKSEANSRAGQLLQELGMTGLEQRRIGQLSGGQAQRVAIARARATQAQVVFADEPTGALDSRTAADVLALLLRSTSEQGRALVLVTHDKDVAAACSRVVRLRDGQIVEQLSDRQADG

SEQ ID NO: 2645 - protein, 252 aa, synthetic construct; identical to SEQ ID NO: 2644
  REGION 1..252: note = TnsF-Tn7 System Protein

SEQ ID NO: 2646 - protein, 125 aa, synthetic construct
  REGION 1..125: note = TnsF-Tn7 System Protein
MLLCFYDPCSGEITVGGRLVEELSRQDVRAHISYLPQNGGIIDGTFRENVEIGNPGLDEKAAPALLTGLGLDALNGFADKGMALDVSEQGAHLSGGERQRLALVRALLRQTPIILLDEPTSSLDG

SEQ ID NO: 2647 - protein, 125 aa, synthetic construct; identical to SEQ ID NO: 2646
  REGION 1..125: note = TnsF-Tn7 System Protein

SEQ ID NO: 2648 - protein, 300 aa, synthetic construct
  REGION 1..300: note = TnsF-Tn7 System Protein
MIRFQFVDDHRNTYEVKRMCSVLGIQRSSFYKWCASRTARAARQAADDALCERIEHHFEFWDHTYGYRRITAELADDPHVDEPVNRKRVARLMRNNGMVGIHLRKPKTTTISDPGAQVFADLVGRDFSAAELGTTYVGDITYLPYGDEGKFLYLATVIDLYSRRIVGWSIADHMRSSLVEDALQNVTNNRETLKGTIFHSDHGRQYTYSSFQAMCRRFGVVQSMGKIGSSADNALAESVNAALKRETLQGAKRWSCEFQCRREVFRWLVRYNSRRRHSALGYRAPVDFEVDYTSMMDVAA

SEQ ID NO: 2649 - protein, 416 aa, synthetic construct
  REGION 1..416: note = TnsF-Tn7 System Protein
MQEYKRDLSREGITGWSCSRLIPCLLTLYLHPMHDYPLRRMVVMVKQGVPYGESSLYLAPGVAFINEEEAVFAAMVEGWTDAQVGGRLNKRQSADSNVARAVALQEFTNEFQWNWTAGMFDEWMMHLISERKLMRSTLRVYQASIRAFCNYLISDHYTWAQQCEQRFGTHPTQIVHEWNSARHILDYEGRPGRRPLARDEVQRLFDHIDSSVDSRLDQHKKGALQVYRDATIMKVIYGWGLRADEVANLEVTDFYRNPHAPEFGDYGILQVQFGKGSHGSGKKRRSVLTLRAGAVAALKAYVDEVWPTVRMSGSNLLWVTERGNRLQAKEITERFAVYRDEIRLDSVLSPHCLRHSYATHLAEEGFDPRFIQEQMGHQWGTTTGIYTHVTGNFMNTMMRQALEKNQQARPTKGPGK

SEQ ID NO: 2650 - protein, 116 aa, synthetic construct
  REGION 1..116: note = TnsF-Tn7 System Protein
MKIVGYEWKLREVMATKGLFSTTDLIPLLQERGINLSSSQVYRLAAEKPERLNLHVLVALLDILECSSDDLIKGVDLGSAVAATGTESSTARDRSAAVKLGGLRPVRMEVPGAPDA

SEQ ID NO: 2651 - protein, 499 aa, synthetic construct
  REGION 1..499: note = TnsF-Tn7 System Protein
MARPRSPEDPAAYPEPCSRCGEHRQLANRWPDGSVCHLCRRKAFRTRGTCAQCGHEGILPGVSVDGATCRTCSGIRLNVDCRSCGAEDELYSNNRCWRCALGALVDEALTSADTGEISAQLVPLADALKSMKRANSGLTWIRQAHVQDFLARLAATEHVTHEQIDELPSSPTREHVRGLLVVHGALPQRDSYLATFNDWLGDLPARLSNSEHRNVLDRYIRWDHLRKMHANAPVTRGMFLRSKQTLTVAVDFLNWITDEGLDLAGLAQDDIDVWASGGPTTRLLAERFLNWARKNRLVETDLKMPRHKRGTAPRLGILEQQSASERLLDPSSMDPRDRAAGVLILVFGQQLEHLVRLKWEDVIVRQDAVVIEFGGEPMTIPEPFDEVWRTLYANPTNNQTAAHPSGDLVFPGYRPGKPLNPGYLGDRIKVMLQARAARLGALNELTKLAPMVIVAKALGYSATTLENHARDAGATYARYLGVVKSLAKDATLGIRVHDL

SEQ ID NO: 2652 - protein, 350 aa, synthetic construct
  REGION 1..350: note = TnsF-Tn7 System Protein
MRLPAAQHLLGMLGDRSLKLDHAAFDALPPSPAVEHLREMLTHHHILPDRGDIHLARFLPWLDIKLSKFQDRPHIHQPLEQFGRWHHLRRLRADPAPKNMDYATRTAKQEITEAGKFLAWLDEEQHTKVDDLKQEQIDLYWSEGPSTRKHVRAFLQQRKLTGRNRPLTARARTAESSPMVTAQERLDAIRLVIESKNVIPGTRLAAVIFLLYGTPIGRIVALPADSIRSTLDGMTISLGSQPAPVPELLIPLVNEHLNNGARSRSMNKDSPWLFPSTKSGQHISANTLWNRLKIFSIQPLATRNATLFDLTKELDAATLGALLGYSTQIMAAHAARSGNIMGHYPVLKLE

SEQ ID NO: 2653 - protein, 350 aa, synthetic construct; identical to SEQ ID NO: 2652
  REGION 1..350: note = TnsF-Tn7 System Protein

SEQ ID NO: 2654 - protein, 499 aa, synthetic construct; identical to SEQ ID NO: 2651
  REGION 1..499: note = TnsF-Tn7 System Protein

SEQ ID NO: 2655 - protein, 499 aa, synthetic construct; identical to SEQ ID NO: 2651
  REGION 1..499: note = TnsF-Tn7 System Protein

SEQ ID NO: 2656 - protein, 1229 aa, synthetic construct
  REGION 1..1229: note = TnsF-Tn7 System Protein
MDVNEAPSADSSGSERARPLIPLTPDYNADRHGTYADALEQAIRGGEVSNVALAGSYGSGKSSILRSIVDRFPGQVVEVALSPLPASGATSEPDEGDFQKEIVKQLLYVVDPARARASKFPRASKDRWVRSIGWALGVGVVGVALQTIVAVAVVLLGGGQLTLDLAMSAATFIAVTALAFTFRVLTAGQWSIRDIKAGPTGLTISKEEVTYFDKYLDEIVYFFQLSKKRVVVFEDMDRFGGTEIFASLRALNLLLNNAAQLKPRLVFSALDRLRESRGGHRGQHRPLVDGPIVFIYAVRDSLIPVPTSSALEGADTDPFVRTKFFDLIVPVVPFVTPSNARETLTKEFESLGEHGVSSELRQAVAQYFPDLRQLRNIRNEFQIYRERLLRPGRSLDQLDPDRLFALIAYKNADPADFEMIRLGTSKLDHARDFAALLRAEHLAAVTARLEVPTADRLREHAARFGQTLASRCQVLGVSLSNFDTGVYFTEEQLTSLDVLRDIASETLRVGSNGSLMAVEVVEAVSGMSLNFARQTSSDGIELEREQLREEQTALEHATWRSLYDMAQYAYTANSGGDSRFASFDGYNFARYVHKRFGEGLVPGLISRNMLTRDFALLITEYAGQHISVTARSFVNGVLENPVRTVGASISGADVDQILQEYTEDILSRRGMVNVFVLDHLLAHRYSSADRVVRQLVQMTPEDETFLDAYFSNAVESGGADASRELVLALARSSGAILDYLARSAIFEPAQCLDLFGRALGVVRISTLSNSDLVAARVYAAQRQDEFKVLREAGQVAANAAAAVVRLGVTIQDVERLSMDARDVILQLRGFALTSHNLAVLNDVTPLGSLALDGLMHANRPLYDAVIERLDEYLALDGSQVDLSIKAAAGLLDVLTSLDDQIADNESARASLRAVAELASADVAVDDVRDLPPRVVDALFSTFRAAPSVRNLTEVTSAGRLPVSVAQFLVHERRVDSATATSGECSWLANRIVELATAHSDELPPKIVVEILGSFQLQEPLDISVIAKAPAALVAALTRAMYVSANELLSIVKPSSPWELREALLEQFPEGAWELAVPLVSTSDVPALLANRAISTGTKQEALQHVTFLFESTGGDTSAAADALVAFADRHGSRVLATDLAALASHTTEPVRILRIMLLDVNEDSWDLAFYILGELGEPYAAIFDLNLNSPKFPADKTHRRFLRRLEERGYVYQLPQKNGEEFLSVKRIR

SEQ ID NO: 2657 - protein, 1229 aa, synthetic construct; identical to SEQ ID NO: 2656
  REGION 1..1229: note = TnsF-Tn7 System Protein

SEQ ID NO: 2658 - protein, 397 aa, synthetic construct
  REGION 1..397: note = TnsF-Tn7 System Protein
MAFRGYALHSLQFVCNICRREDGRVKDKLGQVTYLPTVVSAADPDEFLSEVLNGWKRQQLAQNFSLETAKRRTRSVMRMASFVGKHPWQWLPADADDFFSHLRGVENLSHNTVRAYQTDVKLFLEFAGSPAYDWNERCGQLFGTVISQVITEYNRSTHSDETGEATKRPFSTRELQDFFDLADLEPERILNSGRKGALAAWRDAVMFKTIYAWGLRFNEARHLIPADFAHHIRTPAFGEWGLLRVRHGKAKKGSAPKQRTVLTVFDWSVDVLDHWSRVGLPRFGGHRASPLFPTDNGTMVDNAALRRKFHGLLDELGFPAGLDIHSLRRSYATNLQTELGFDVSFVQMQLGHENASTTGIYTIASPDYRSRELGRVLSTTLERSRAVFPSPNTKESR

SEQ ID NO: 2659 - protein, 397 aa, synthetic construct; identical to SEQ ID NO: 2658
  REGION 1..397: note = TnsF-Tn7 System Protein

SEQ ID NO: 2660 - protein, 388 aa, synthetic construct
  REGION 1..388: note = TnsF-Tn7 System Protein
MPEEMKGRVPRQFRDASISLFRADERVFEGMVEGWRTQMLARGLTVETIKGKVSTIRRFQQHAGAFPWQWGPADVEQYFAEARGRAEKPLSVRTLRQYSGSIGMFCSFVTNPAYGWAEYCESTFGDVPSQIIFEWNSPRHTADDDVATSNRALTHDELQILFDYIDDLVDRERAAGSKRWRSLLRDSMAFKLCYAYGLRRRELAMLELADFGPNPYISDYGVFGALTVRWGKGTEGSGPRRRTVLTVPKFEWAVPLMKTWLAPGRRNEFPTSEGSPALWPSERQARVGLSTFGNSFSRLREEAGLPQNLGLHCLRHSYITHLLEAGYDPAFVQVQVGHKNASTTGLYTHVSSSFRQKEVQRMLTKRAAQLTSGTPRDGTDDRAAPHWI

SEQ ID NO: 2661 - protein, 388 aa, synthetic construct; identical to SEQ ID NO: 2660
  REGION 1..388: note = TnsF-Tn7 System Protein

SEQ ID NO: 2662 - protein, 119 aa, synthetic construct
  REGION 1..119: note = TnsF-Tn7 System Protein
MIEQRRIGYNWNLRQIMAQRNLWKSSDLMPLLKARGINLSESQVWRLVTGTPEKFTGRTLAALCDILECGVGDLFEPYVEMKAARTATAPRAGEKPPSPAGGPSLTHRIRLVEDDDGQT

SEQ ID NO: 2663 - protein, 119 aa, synthetic construct; identical to SEQ ID NO: 2662
  REGION 1..119: note = TnsF-Tn7 System Protein

SEQ ID NO: 2664 - protein, 115 aa, synthetic construct
  REGION 1..115: note = TnsF-Tn7 System Protein
MRREVEYHWHVRELMARMGMRNSRDLVEPLRDRGITLSESQIYRIVAQDPERIAFKVLVALADIFRVEVNDLVTYTATDARAQRPKKVAGAAAEIPLIEACRPIRARITKAEDDD

SEQ ID NO: 2665 - protein, 115 aa, synthetic construct; identical to SEQ ID NO: 2664
  REGION 1..115: note = TnsF-Tn7 System Protein

SEQ ID NO: 2666 - protein, 296 aa, synthetic construct
  REGION 1..296: note = TnsF-Tn7 System Protein
MARAEGTWYLPLLGDFRLFLRLVSERYERRGWRGKRRRFGERTVTSALRSAVRFLSSMDSTVASVQQIDQTALDHFIMRNPGYRNGVRAFVRYLNRYKKLFRKIKVETVNRGIPQGLFLDHKRHAELLGKWLNPDEGSLKESLICVLMLLYAQKVKNVVRLKVSDLLHGRDGVYRVAFGRTEIALAGPVCKLLDRWLVARRALSAVDDERENEYLFPGRTRGSHLTEAAVTYYLNKHGVNAETLFATAIHQAYLNGLKHPKALSRAFGITDFTAIKYLDLINPRLRDEVEKVVSNG

SEQ ID NO: 2667 - protein, 374 aa, synthetic construct
  REGION 1..374: note = TnsF-Tn7 System Protein
MGDETVLHVVGGDAGKLEIHHVLPKDEAELFARIVEAYMSRQLGALRHSPKTVMRDMAAVKDFVMHSLKAPWRWTEEDFDKWCEHLVRDRNIVGSSERTYQGAVRRFLDYLTKNVRFRNEIQRFYKITPVQICNEDNCIPHACERELSRERPAITHGEIDHILEVFDKEIISAGKFGSKDFYPLMRDKAMFFTTYTGGLRASECLGLDITSFSPNPKIPDLGDYGFMSVWGKGSKGSGKRHRYVPVTNLDFPSLMDWYLTKVRPRFLLNADPNEVALFLSERGKRMALSTFEARFKHAMELSGLEGRGFSPHCLRHSSVSHESLRMSLEANRRKHGHVYAATTQGYTHIPDEIVSEEMRAIIEKQISQIKGEGE

SEQ ID NO: 2668 - protein, 374 aa, synthetic construct; identical to SEQ ID NO: 2667
  REGION 1..374: note = TnsF-Tn7 System Protein

SEQ ID NO: 2669 - protein, 263 aa, synthetic construct
  REGION 1..263: note = TnsF-Tn7 System Protein
MKRAQAVHDGISYCPACYKREFRPVPCESCGETTRTPGGRTPALCKKCRSKGRPCARCGKDTPHAALILEDGRVACASCAKHFKEPKACPVCGQLSIYLARDFKAGFTEPVCQICRRKGHITCPCCGKNRRPEGVTTDGRVVCKDCLKTDGKPWICPKCGKEGKRHSKTRCEDCYWRESVDERLSDAMALVNREWVWESFSKFMIKLADRIGAKKAALRLEKYFLFFAVLDASFDFPDAVTPDALPGCLGRKGCVVTRSPTGF

SEQ ID NO: 2670 - protein, 263 aa, synthetic construct; identical to SEQ ID NO: 2669
  REGION 1..263: note = TnsF-Tn7 System Protein

SEQ ID NO: 2671 - protein, 91 aa, synthetic construct
  REGION 1..91: note = TnsF-Tn7 System Protein
MADSWWLYMIECEGGGMYVGIAKDVQARYRQHEEGKGALYTKLRRPLRLLAAREYPSHKLAAQAEREMKKLPAWEKWRWAYALGGGACADN

SEQ ID NO: 2672 - protein, 91 aa, synthetic construct; identical to SEQ ID NO: 2671
  REGION 1..91: note = TnsF-Tn7 System Protein

SEQ ID NO: 2673 - protein, 228 aa, synthetic construct
  REGION 1..228: note = TnsF-Tn7 System Protein
MALDQLGQAEIDRWHATHRPHEQLALRAFLTWARNSDRLSSRPRFPRLAITEGQRLTQHRRLELLRRILDENAGPLRSRAAACLMLLFAQPASRIVLLTTEDLTQDANGQVLIRLGDPPAPVPEPFTDLLLQARDQRTNMNTNNRDATWLFPGRRAGRPLHPHGLADLIRDIGVPGTAVRTSALRQLVLQAPAPVIAQALGFHSKTTTRVVSQAGGTWNRYAPSDHTQ

SEQ ID NO: 2674 - protein, 720 aa, synthetic construct
  REGION 1..720: note = TnsF-Tn7 System Protein
MGDGVNSLTTSAFDLPDHLSPKADPTLIAGDEQHFAAIAESLEQAIADLSDRLDAKRKAPGGIGREALDRDMEIHRLTARLRALRRFGLDLCLGHIVSADDPEPVYIGRLGLADSAGRRLLLDWRSPAAEPFFAATHANPMGLASRRRYRWTRGRISDYWDEVFTADGLEGHAALDDQSAFIASLGGNRSARMRDVLGTIQADQDAIIRAGSRGALVVDGGPGTGKTVVALHRTAHLLYSDPRLGHRRGGVLFVGPHQPYLAYVADVLPSLGEEGVQTCTLRDLVAEGATAAIETDPNVALLKSSANLVKAIESAVRFYEEPPTKGMTVTTDWSDIWLSADDWAEAFEALEPGTPHNEAREQILEELLAILMDKHDDDDVSPDLLRMSLLRDTELIRTLNRAWPLLEATDLVGDLWSVPAYLRKCAPWLSPDDVRKLQREDAQAWTVSDLPLLDAARQRLGDPEASRRKRRYNASAAAERERMSHVIHDLLEADDDGEGVVTMLHGQDLQDSLIDETALPGTAPDLLAGPFAHIVVDEAQELTDAEWQMLLLRCPSRSFTIVGDRAQARHGFAESWRERLERVGFDRIDLASLSTNYRTPEEVMAEAEPVIRAVLPDANVPTSIRSSGVPVVHGSVSDPGSVLDTWLAAHADGTACVIGDPTFRATPRVRSLPPDLAKGLEFDLVVLIDPEAFGKGIEGAVDRYVAMTRATRQLVILTSS

SEQ ID NO: 2675 - protein, 720 aa, synthetic construct; identical to SEQ ID NO: 2674
  REGION 1..720: note = TnsF-Tn7 System Protein

SEQ ID NO: 2676 - protein, 360 aa, synthetic construct
  REGION 1..360: note = TnsF-Tn7 System Protein
MRPEEQVAEAMLEGWRNQQMARNLALSTIEGRHNAVKAFTRHADAFPWQWSAQMVDEWLGDLRAIRHLKQSTLRNYAEAVRSFCAFLTDPAYDWAAECEKRFGTHPIQVCHEWNTAHHLQESEADPSKRAFTRAELLAFFDHADDQVHRLRGAGHKGWLPAFRDAVLFKTAYAYGLRRREVRMLDLADFGPNPHAREFGGYGVCYVRWGKAMKGSPPKRRSVLTIGPREGIGGMDWIVDVLDQWVEEVRPACTHAGSPALWPSERGPRIGFSQMSTRFAAYRDAIGLDPGLDLHSLRRSYVTHLIEDGWDPRFVQEQVGHEHASTTSLYTCVSSDFRTRPLLKAMDATMKAALDTGRTKR

SEQ ID NO: 2677 - protein, 112 aa, synthetic construct
  REGION 1..112: note = TnsF-Tn7 System Protein
MKRQVSYQWRLREVMAEHGMFTATDLARPLADRGIALSSVQVWRLVTQSPERLSLPVLAALCDIFECTPTDLIATRAENAAPRRTATGETSGSADGVVPLRPKRARIDPNGG

SEQ ID NO: 2678 - protein, 180 aa, synthetic construct
  REGION 1..180: note = TnsF-Tn7 System Protein
MLASGHTPSCWTQPKLEPLSAFLRWFRDRGTVGDLDLIARQSTYGPAKEFQELEDYQNQLRRCLTDDSLALDVRVAGALIRLYGMSLDHIVELTKDRFQRADEHDAYLTISNHPVLLPPSLARLVEQLIAQRVTRALLPTVAESRYLFPGTPPTRPRTLVLYVSCLPTMDCPASPHATPR

SEQ ID NO: 2679 - protein, 481 aa, synthetic construct
  REGION 1..481: note = TnsF-Tn7 System Protein
MSLAEINIEQLCNGCEKSVTQLKKRYKGKKYCSTCYARIFKKCLCPKCGLSARLPKNDDQAICNECIKKQPCIRCNQVNRPIGTLTEYGVVCNSCSVYFREVERCERCNVQSQKLTKISRFNDDLRVCPKCSTRDYETCPSCHKYRLLELDEKGNKVCKKCITQPNKPCIECKTMISAGCGDLCDDCYWIKNLWSKFHQNIYLFESSFLKKQYENYVLWLVDLVGAHQAALYLNKHTHFFIKTEMLWESNIPDADQLLLTLRTSGLRKFELVTQWLDQMHGVKISTINKNECSEIDQANKLIDQLPQPSLAFDVVFAYKQKLDEKMHQGKTSARSVRLAMKPAVALMLSIQDKQLLPDLAKVKAYLNEYSGQAAALTGFINFLNDQYDTDIDYISLKHSNFIKEASKRKLEKELISMLSPNTDFNVMVWVKNGLQLFHEMSYQDSLKIKLEMIVEIKDGYNVLYNNQNYWLPKNIDPSFKK

SEQ ID NO: 2680 - protein, 481 aa, synthetic construct; identical to SEQ ID NO: 2679
  REGION 1..481: note = TnsF-Tn7 System Protein

SEQ ID NO: 2681 - protein, 236 aa, synthetic construct
  REGION 1..236: note = TnsF-Tn7 System Protein
MKRISDEYSPVRKAQTVYGSISGNYSFRGEKTIWFESTLERDFLFKQEYNSNVIDVVEQPISIPYITELGNESVYTPDYLVQFSSAIYNDIDFFPAPLLIEIKPRKKLKEDWNTLRPKFRAAYALASEKAWKFKIIDESRLYDQYWENINFLKRFRRSHVDEVDQRVLIETLLKLGFSTVNQLPAYIFKDEKNVLKAIRQIWVLISKNILACDLYNPFTTETVIWVNDGSKAQGVI

SEQ ID NO: 2682 - protein, 602 aa, synthetic construct
  REGION 1..602: note = TnsF-Tn7 System Protein
MTSIDSFPDDEIERVVYLYSCLKLNSSSESDNILIEVLLVELDAANPNRLNVSENSYNKYDVTFRDLDTVQIGTIWKGQTRIEGRKFSFNNCLRTVNFEFDFSINEPKIIRFDAKIPDSDEYYLYNEKIFIPKNEYSANVPFRYYPFLMSKYCILKSNDNIEVLTSCIHSLHAFYIPARKDIRGHIINENYSISHIVDLFLEKYEIQNVENVENVEKISVVLKKNMVKTIGKEAITFLANLALNKNTQEKVLNIRNSLNDIKLDKTGKPYPSRFPSVIPPHSTTMSLTAEGIWLENGKRFLITHVSKVSPIADFPIVAYAPVTESEEQIETIDKDKVHRQGRNKKKRNNTRINTQEDPSHNRGENKKQTDISVDFTDFDIEIIEEVIETESNIQYIESKEKNENKDEESSGNRYGNRKNKPTKSENSEKKPNKLDVDDLALIFSSLKNIEAKKDSTKLTKVSCIDQSGNLSDTFSLLQIKPIVKFPIHNTWINDDVGRLLLFLKLELAEFHDHLYLIDIKKNNKNNEAFCFFLFITKEMLNEKNITMICEAIEGKKGTKKWFDICKTNFNQKRAMKHMHTDQADWVASFNKIFKILIKKKKL

SEQ ID NO: 2683 - protein, 634 aa, synthetic construct
  REGION 1..634: note = TnsF-Tn7 System Protein
MIQDDSVKIDRKRLVIKPNAIVGYKGNKYKIINILNAKDVVIANLESARSLQVSIRELSVLSEDNSKLNQGEDISAESWQIALDHYEIIRELIDYSTVEAVKKTASEHNLHVNTIWKWLKAYRENKSILALVPKKRGWTTEKTRLSPELNHIIQQAIHTKYLTSLKPSVAKTILEVKLECFKRKIEPPHDNTIRYRIEALNGYEVTKARYGKKAAKDKYEASAGTFPNADYPLAYVQIDHTPLDIEIVDEQYRETIGKAYLTLAIDVFSRMIVGYYLSLEAPSATSVAMCISSAIISKKRKLLELDVDGEWDIEGIMDSVHSDNGSDFRTNHLHKACLKYDINWEYRPIGGAKYGGHIERLLGIVNLEMHVLDGTTKSNIFEKGTYDSAKNACLTLRELEHYIVYWIVNVYHKSKHSILEIPPQQMWEEGIWGTKFKVGTGLKERVADEATLFLDFAPEFESTIQRTGVKKDKLFYFADCLRPWINAIDPTDDEKKRKRKFIFKRDPRDISMIWFYEPNTNTYFKVPTAKREIPSIGLHEYRQVQAYLKSERLDTVDQDAIYRAIIYLREKVDQAVTLTKKQRRMNQRKKENGKIVAALHHENKNNSVIHTNVDAPKSQNSLWDQNLTAFDDLR

SEQ ID NO: 2684 - protein, 227 aa, synthetic construct
  REGION 1..227: note = TnsF-Tn7 System Protein
MPLASIIVNDSGSHPKPGEITLAHLGVLFLDELPEFDRKVLEVLRQPLEGKEIVISRASRQITFPADFQLIAAMNPCPCGYAFNQDSRCQCSSDAIKRYQNRISGPLLDRIDLHIDVPPLKAQELQSNTEVENSATVRERVLRAYDFQIPRQGATNQSLSPQQLEAHAQLNQASKNMLEIAQQRLNLSARAYHRILRVARTIADLSQSSDIETAHLSEALSYRKQET

SEQ ID NO: 2685 - protein, 306 aa, synthetic construct
  REGION 1..306: note = TnsF-Tn7 System Protein
MKQYDYLAEHVLDTMILSDAERINILYEDRWIGYQKAIAVLNTLTDILKRPRKLRPECLLIVGDSNMGKTKIIHEFAKEYYTKRVDDMDMQLMSLTKPVIPIQAPARANVKDLYINILDHFFVPFRVTDPESKLRYQATHLLRKYETKMLIIDELHNCLSGSARQRQEVMNTLKTLSNELSMNIIGVGTRDASLILHTDTQYASRFEIIDLPLWKLDADFLRLLLSYVRLLPLKKLSNLASQEIATLLYEISGGNFGDLNRLLVECAKEAILTGKEEITLEIVKKFKWLKPTEGARNIRTIQLNSI

SEQ ID NO: 2686 - protein, 306 aa, synthetic construct; identical to SEQ ID NO: 2685
  REGION 1..306: note = TnsF-Tn7 System Protein

SEQ ID NO: 2687 - protein, 368 aa, synthetic construct
  REGION 1..368: note = TnsF-Tn7 System Protein
MPNYAQNWFIHTPIEQGEVLSSWLIRSALDMGCSPLTLIEALWGRWRALTIDLDRGMTEDRLELLFVHSFDDKQKILKTMLTNVAPYLVKSSNSGWVLSLGQRSRSNFSGRQVCTQCFESDGRSAYLRLMWRMGWHCCCEKHQINLIDHCPNCGVVIQPFKIDLEHGSLAVCFSCHFNLTLYQPQPSNIQILDFQKNADNVLKQGSGLYNNQNISATEWFAIARAWISEIRLLVDTDNIQLIEMFKSFGINLNTITPFTPIAFEYLNTNERIILLSILNEIMKIPCELIIDRSYEYGISSANFWDKRKKLPIQLQQMKSAMIKPIRVYALQRVSSHNGKPKAKKTVQRKWLNLLRKSRKKRSHKLGGD

SEQ ID NO: 2688 - protein, 469 aa, synthetic construct
  REGION 1..469: note = TnsF-Tn7 System Protein
METSKTKICDQCGRFVDQFTRRYKEQTYCANCYLRCFPLTTCSNCNQQKRIHQDDKKRLCCDCYPRVTPCVRCKRTGRKISKILAAGPFCSSCYRYIKELKTCSVCGKQDVVSRGLSVGVNSPICDGCRHKLRPKCPQCGIRRKLYTLDNGALMCYRCRDNIKYYCIGCDAELTGKEKTICQLCSAKRLNKIRKQQNALGFDTPSGKSLFIEFVNWLEKTRNSFDAAHKQNRYIPFFEKIESFPNDWYLTLGLLKQIDGGYLRRSSMPRQFLESKGVIFDEMLLVTAMDLRTIDMNTLIFEKAKSSALQEAILEYTSLRQSQLEKGDIKTRTLRFETSAMKSLIGHNRWAERPQKALESLLRESPGQRASIFKFVSFTRENTNLGIFMPSSNAENGVVASLKRYSKKPSSKAFRLYAFFALDYFHDFYLPRNAHIHIKEVGDGLEVTFKSHTYWVPSPTRLQKLNKNLL

SEQ ID NO: 2689 - protein, 380 aa, synthetic construct
  REGION 1..380: note = TnsF-Tn7 System Protein
MAHKRNLWELDSHTKGKHLVLKQYLDAWLPIVGTVSDNLVIIDGFSGPGEYKNGDDGSPQIMLKAFQEHYYKDLILGKVTYHFVEKHAGRFEHLVKILDTKYSNLPKNLTYELHNKPFNEELCTHLLKDYDNCVTKKSCFIMIDPFGVSDIPMRMISRLMTRPKTEVFISVMYEHLNRFKKQKEFEPHLTALFGTDEWKKSIDIEEAHDRKRFLMRLYREQLKLNGASEVIHFDLYRGNKLIYTIFFASTHWKGADKMKSAIWKAIPDGSFKYIGGDGGLLANGYKKNYDPLIEQIQKHFNKQVLTTAEIIEYIGSDKTGFPTDGVKKNVLRRMEEEGNIEPINDKRARKFSYPDDFSFRVLVRDSSDLVDPLTQNISLF

SEQ ID NO: 2690 - protein, 578 aa, synthetic construct
  REGION 1..578: note = TnsF-Tn7 System Protein
MIDNIKIEGLPLDDEEWLIKEYGGIKWNASVSDEPLVNVLLENVNTGEFSDSDVAKSYTKLLEKGSIWKNGEYVREQKGLIEKVFRFSFGADDKELFTGAWDRDKDDELPDETLEKNRKRYVFPPHVYKVPKSFSEAQFFTVKTDCGVELLTNSLTVFDKTYGVSGFLQQVVLSHYASLAIKKLEFTEFEEKDFSNERKENECILGLAKDVLDSDRYFVYSLKHSEYTMKTVNYIATQLNKNRKGSTFLRVRPWSSGYHQWKVSGIWLVPEKRFLALKIKKYLLPKFSNFFLVRENSNIVSENGNQAEKRCSGKNRNASKNVTGTSKSCPASDSIGEDIPINGTENWGETDVRKAIPKENKSKRQYNDRKPVHREKVSPSSHTGSNPDVGKINLRDAPEEHDPVKNSPNTINLLWSALHKLASDKASEVSPPDSLTSTNGQYTFVAGQLCLIEPDNSEAWCFRKEHRKYRRRHYQTFPKRKFGTFHLVFQGCHFFFVCIERFSSEKFRTCIFSFDSESEFLDVLPTVLSDIVAAKGVWKKASRAMSRGVTQITHRGEKNEIAGQIARKLELLTENKAK

SEQ ID NO: 2691 - protein, 222 aa, synthetic construct
  REGION 1..222: note = TnsF-Tn7 System Protein
MDFKTPVRKIKPTRRSVSGYFSFRGKEPTPYESTLERDFVMRMDYDRSVERVVSQPARLFYIDANGIERRYTPDYLVYFTNPMRKPLLVEVKEKQELESDFHKLRYKFSAAFAFAKQNGWAFKLYDERRIRDSILENLQMLRNFASRKVSSDIANEIKSTLESMLLPIAVRRFTQRFNSEKKTPGIRENDIWRLALDHKLELNLSEPLSEETEIVGVNHGNF

SEQ ID NO: 2692 - protein, 643 aa, synthetic construct
  REGION 1..643: note = TnsF-Tn7 System Protein
MATSNGHQLKRRRFKLTPGTSVIMGGDEYLVKEILNEKECIVKNVTSNTADIVAINKLIEHATTVTSDLMPAEPDLDDISEADYKIAKNRLEAIKPLLELDQPKKSHVRLRAAEVDCHYTTLYNWLRAYQSTQALTSLIPKRRGWSYNRKRLDSNVNAIIDHYIENLYLTIKQPSPKKVYSEIKRACLKADLKPPHQATIYRRIDRIPEEKRLRGRGRIEEANNRFSVKAGKFPGADTILNVVQIDHTPLDIIIVDEETRQSIKRVWLTVAIDVFSRVITGVYLSLDAPSLTSVAMCISHSILPKDKWLKHIGVEGEWNVWGFPKKIHTDNGADFRSINLSEACATNGIDIEFRPVKKPNYGGHVERYLGTFSKKIAELDGKTFNSAGKRESYDPEKNATMTIDEIERWLVHAIIEYHHTPHSSLGIAPITKWRMGIEGAPGIMATGLPDIPDDPLTLELDFLPRTMRSISGEGVVWDRIHYYSDGIRHLIGERDEHGKNRKYIVRRDPRDITKVWVYDPFQKLYHEVPYADPTHPYTNKWELEKARKYLKSLDDTLINEQAIFQAIESMREIEEESRTTTKKARRSGAANIRRKTQSSPAQIYTGTNNTKGSSTSSPQRSSDESSDPTDDIWGTDIESFEIE

SEQ ID NO: 2693 - protein, 371 aa, synthetic construct
  REGION 1..371: note = TnsF-Tn7 System Protein
MVHPNERTERNQTHLRPWPIQTKPFEDELLSSWLIRASFDNFTKPLILTSYLWDKWRAWTLDLDRELTKPRLHRLSIYSGIPEERIEQMMLRSTLEKISRAKLISQTPWPWVVARGTRNLNTYRYQPFCPECLNNDSEPYFRRMWRLSFITMCPKHQCLLQDCCPYCKQSVEPHQLKKKTLRACKHCQMDISSHPSKKANEELTNTTHELVRLINEPNTDTQDRFHQLDFWIAMLRKLSLGRTEAHREVFADLVNRKDRALIASCSGVNFDFLTVETRAVFLKYCEAMDSNSFSKEIAQLAPRGLSQSFMRSLLTVTPPPVLKILGVEQSSKPKEKKNNKPSVIFSKKPCSRPVVEKKWELLIRKHNLGNL

SEQ ID NO: 2694 - protein, 469 aa, synthetic construct; identical to SEQ ID NO: 2688
  REGION 1..469: note = TnsF-Tn7 System Protein

SEQ ID NO: 2695 - protein, 297 aa, synthetic construct
  REGION 1..297: note = TnsF-Tn7 System Protein
MDEFKHVDKKYRQVVLLPNKERVSFINQKRWISYPIAIKAIQELKNLMDQPKQQRMRSALLIGESNNGKSSVIEKFCEAYGQPIVDEEDEILKKPVLVTEVSAPKVKDIYISILEEFWAPFKTTQTESELRKQAFDLMRVCEVKMLILDEFHTLLAGTAKQRKNALAELKMISNKVKIPIIGAGTKDALSVIQNDPQLQSRFWVMKLPKWERNKDFVQLLSSFEKALPLKQKSNLTSKELGERILKISDGNLGNLHELLKVCAIEAIHSGKEKIDIDIVEAFSWFTPTKGQREIKLT

SEQ ID NO: 2696 - protein, 297 aa, synthetic construct; identical to SEQ ID NO: 2695
  REGION 1..297: note = TnsF-Tn7 System Protein

SEQ ID NO: 2697 - protein, 298 aa, synthetic construct
  REGION 1..298: note = TnsF-Tn7 System Protein
MPAGRRNRCERCYWTSTALKRIEIDAAAFSSPATAAAFRDFGLWLINATGPHKAAQKIHRYLQFFLNINDQWPSCANYHALLDIFGAEGLHLARLPMRWLRETRGIVADPALREADSERRRIDAIHASLPKGSKGSNALVAFANTLRTRHAEGKTSLRSIRLALSPAASLLRRCDQDGRKLPSQAELDVFLSASPGQLAAITGFANFVNNAFGGKLIPRVDQLQIVKARRSALEGKLTNLLRQDLGTDDVLKRWIPCAMEYFHNVPARAVLTLTERDVTLDDAGAVVTLKGIKYWVPI

SEQ ID NO: 2698 - protein, 431 aa, synthetic construct
  REGION 1..431: note = TnsF-Tn7 System Protein
MSTIRAKDRDAVIQSLRAGVVPRVGQHLIQVGRVKELEALMKDVERIADAGSGFRVVIGEYGSGKTFFLNLVRAIAMEKKLVTMHADLNPDRRLHATGGQARSLYAELAKNVSTRTKPDGGALPGIVEKFIAQAKSEAKTSGKPSEAIVRERLDHLSEMVNGYDFAEVIAAYCRGFDEGNEQLKSDAIRWLRGEFTTKTDARAALGVRTIIDDASIYDQLKLLARFIRLAGYSGLMVCLDELVNLYKLSNTQARNANYEQILRILNDSLQGSAEGLGIVLGGTPDFLMDTRRGLYSYTALQSRLAENTFAKAGMVDYSGPVLRLASLTPEDFYVLLNKLRHLYASGDRAKYLVPDEAIPAFMAHCAQRLGDAYFRTPRTTITAFINLLAILEQNPSADWTELLGHVAVEKDMGGAADTAVEDDDELASFKL

SEQ ID NO: 2699 - protein, 431 aa, synthetic construct; identical to SEQ ID NO: 2698
  REGION 1..431: note = TnsF-Tn7 System Protein

SEQ ID NO: 2700 - protein, 298 aa, synthetic construct; identical to SEQ ID NO: 2697
  REGION 1..298: note = TnsF-Tn7 System Protein

SEQ ID NO: 2701 - protein, 184 aa, synthetic construct
  REGION 1..184: note = TnsF-Tn7 System Protein
MRTEFFLSVLDVIPQPVEVPFTAANGNRYTYTPDFLVYYRLGDRSYNQYPKPVLVEVKPAVAWRKHWREWLPKWKAAWRYAQEQGWEFHIRDESRIRDQALDNIRFLEPYKRMQFPPQESQWIIDNLREMGASTIDYLIARHFMGLYRAEGLAHLWHLLAVRKLDCDINRPLNNFTEVWLPDID

SEQ ID NO: 2702 - protein, 642 aa, synthetic construct
  REGION 1..642: note = TnsF-Tn7 System Protein
MDECDDFELPNEAFAPNRKSVNIEVGAFVQRGETIYRVTQVLDFESVIGVEVETGRSVPLLIGDLRCLQDDADPKLAVNQDLAEIADDDWRIAQQRFAAISPLVGKTLWGRDEVERQAKACNIDPSTLYRWLKRYNAYGSVTALIPKKRGWLEGKSRIPPHAEQVIEETIRDYYLTVQRPTAKKTIQEVQRRCAERGIQAPNHMTIRSRITKLSEKERLRGRGFKEKAKNKFLPAAGRFPNADYPLAVVQIDHTPADIILVDDVFRKPIGRPWITLAMDINTRIVTGYYLSFDPPSETSVAMCVAHSMLPKDDWLLLHTVDAQWPVWGKPRTIHVDNGADFRSNNFQQSCLAYGINLEFRPVKQPQYGGHIERMLGTLLREIHGLPGTTFSSIKERDGYDAEKHAAMTKSEFETWLVTLISKFYHQRLHSAIGMTPLKKWEIGIFGNAEVQGIGVPPKPTDRLTVLLDFLPAFRRTVQTFGVTIDGVTYYAEALRPWINSTDSETGKKLDLVFRRDPRDISTIWFFDPTLKQYFKIPFSDQALPAMSIWEYEQAREKLKREGLKSINEFALLRAITELRSQVEDAKEKTKRARRQAQRRKEHEKNISPAVPLPPKQPSPTQSSVQAFAGLVDGDIDTFGDIA

SEQ ID NO: 2703 - protein, 244 aa, synthetic construct
  REGION 1..244: note = TnsF-Tn7 System Protein
MQHKPSSPLLQLKNLQIAYGGIHAVKGIDLELAKGELVCLIGANGAGKTTTLNAIAGLLPLEGGDILYNDASINSLPAHKRLRQGIALVPEGRGIFTRLTVEENLRMGAYSRKDNDGIEADLEKVYTMLPRVKERLEQVAGTLSGGEQQMVAIGRALLSRPKLLLLDEPSMGLAPLVVEKIFEVVQSVAKEGVTILLVEQNANLALEFSQRGYVMESGKITLTGSGDELLADPKVRAAYLGEAA

SEQ ID NO: 2704 - protein, 244 aa, synthetic construct; identical to SEQ ID NO: 2703
  REGION 1..244: note = TnsF-Tn7 System Protein

SEQ ID NO: 2705 - protein, 743 aa, synthetic construct
  REGION 1..743: note = TnsF-Tn7 System Protein
MTTNSPASSSDSQAFQLLDARIQRWIWREGWTALRDAQEKAIPALIDADRDVIVAAATAAGKTEAAFFPILTHMLRHEPDIGSVLYIGPLKALINDQWGRLSDLCESLDIPVVAWHGDIAASKKHRFVKDSRGVLLITPESLEALFVRRGSAMPGLMSRLRYVVIDELHAFIGSERGKQLQSLLHRLERTVGRRLPLVGLSATLGDMGLAASFLRPDGVDSVELIVAKSGGQELKVLIKGYVEKPPRVEEDPNIEDPEMEDLVKGCTLEVAEQLYKALRGSNNLVFPNSRRQVEIYADLLRRACERNNIPNEFWPHHGSLSKEFREEAERALKDGTKPATAICTTTLELGIDIGSVKSVCQIGPPPSVASLRQRLGRSGRRKGEPAILRGYCIEPELTSKSGLSDCLREGLVQSIAMVRLLIRGWFEPPRVDGLHASTLVQQILSVIAERGGATAAELWATLVKDGAFSNITRDDFVLLLCHLGDKQLLIQDSSGLLLHGELGEKLANHYEFYAAFASDEEFRIVCDGRMLGSLPVSHPLVPSQRIIFGGRRWRVIDVDSEKKIIVVAPDKGGAPPAFDGGACMVHDVVRQEMRQVLMEADPVPFLDAGAAALLNEAREFYQLADLSNNWLFNKGNDVVLLTWRGDWVNDGLVMLLAHVGLSATNEGVALTVSGISSDRLSDALADIAELPAPDPIQVLAEAKNLLREKWDWALPEPLLRGAFASLHLDLIGAQTVAQALSSP

SEQ ID NO: 2706 - protein, 296 aa, synthetic construct
  REGION 1..296: note = TnsF-Tn7 System Protein
MSDYDHIHSDFRHIMSLSDAERIAFLDEPRWIGYKSAQQVLETLQGLLHKPVRPRMPNLLLVGDPNNGKTTVVRRFQDVCGQGYVNEDAEPVKPIILAEAPPSADEKGLYISILERFFTHYRATDPVSKLRYQVIHLFRACHVKMLIIDEFHSLLTGSAIKQREVMNSIKLLCNELAIPIVGVGTREAVRVLHTDPQHASRFDVISLPVWELNQDFQRLLAGFEKVCPLKNPSRLHQPELAALLHAISEGNIGNLHRLLVECAQDAIKTGREIIDKPVIQGKAWVRPTRGIREMLS

SEQ ID NO: 2707 - protein, 296 aa, synthetic construct; identical to SEQ ID NO: 2706
  REGION 1..296: note = TnsF-Tn7 System Protein

SEQ ID NO: 2708 - protein, 309 aa, synthetic construct
  REGION 1..309: note = TnsF-Tn7 System Protein
MMPAGRGSQCELCYWTDLLTKRVAMALELFSRPSMQELFRQFGDWLSRRVGAHKAAITVNRYLPFFQELAQLGDVLLNADLLLEHFTTQGLRRNLLPMQFLEDVRGLVVDGGAKEQASERRRIADLLQRLPKDGNAQQMLLGYQTALMEKVTSTGMSLRSVRLALLPATSVLLLMLERRCAQPTQEVLAEYIEHAPGQRAALSGFVRYLREVHEVNVHLPKRKKPSERLARSCIEAKLATMLANGAVDMAQQRTLLELALQYFHGLSEADALTVCKASSAPVNVSGDWALIHEGRSYWVPPEVGSMWHH

SEQ ID NO: 2709 - protein, 309 aa, synthetic construct; identical to SEQ ID NO: 2708
  REGION 1..309: note = TnsF-Tn7 System Protein

SEQ ID NO: 2710 - protein, 223 aa, synthetic construct
  REGION 1..223: note = TnsF-Tn7 System Protein
MQQVRKIGPTRRSVSGVYAFRGERSIEFESTLERDFLMRVEFSQMVVDVAPQPVELRYRADNGREYRYTPDFLVRYRAADCPFGVGPKPLLVEVKPREKLRKHWCEMRPKFKAALRYAREQGWDFRIYDESRIRDQVLANIFFLQRYLRLQFPTEDVRAVLENLSAMGQAPFHYLVGRHFSGIADRAVGVSLLWHLLSTGLMECDMTLPLNNNTVLWTPHHER

SEQ ID NO: 2711 - protein, 630 aa, synthetic construct
  REGION 1..630: note = TnsF-Tn7 System Protein
MERQKLDLTPDAFVARAGTIYRLVEVLDFDTVVGVDVGTGRTQALRIGELKPVSSADDALQVVAARDIEEIADDDWRIAETRYAAIKPLLDKSVGRAGVADRAAQVGVDTATLYRWLKRYQSLGVVSALIPRQRGWRTGESRISAETEAVITEVLRNKYLTEQRSSPQKTIREVLRLCEERGIQPPHPTTVRNRIAALSERHTLHARGFKERAKNKFLPAAGRFPNADYPLAVVQIDHTPADIILVDDIHRKPIGRPWITLAIDVHSRMVTGYYLAFDPPSETSVAMCVAHSVLPKDEWLALHGVDARWDVWGMMTTIHTDNGPDFRSDNFRHACLMHGINLEFRPVKQPRYGGHIERLLGTLLSEIHDLPGTTFSSVKVREGYDSDKHAALTKSEFETWLVTLICKLYHQRLHKGIGMSPARKWEIGMFGNAEIVGRGLPPRPTDRLSLLLDFMPSYRRTVQTYGVDIEGLRYYADVLRSWINATDPDTPSAKRKFVFRRDPRDISVVWFRDPDLGQYFRIPFANQALPPMSAWEYEQAKARAKAEGVQSVDEPQILRALTEMRSQVDEAKEKTRRARRQSQRRREHEKGISPAAPVAANAIPVTMMRPLDPAGVGLVDGDIDAFDDIA

SEQ ID NO: 2712 - protein, 381 aa, synthetic construct
  REGION 1..381: note = TnsF-Tn7 System Protein
MDTPHTGHPGAICVRPIWTIPVDLQSDELLSSWLVRVALENGCDPLALTAALWPSRRAWSSDIDRYLPEFCQQVLVAKGGIDSNVIRGAMLVDVARCICDNVLPMHGRWPWILAVRARNRRRLGGLQFCPDCLAADQRPFFRRRWRFAWCAVCLRHGRLLLDHCPHCHAAIEPHRLTAELKSVAQCATCTALLTDAGQGAPAEPFAAQLQASTELALAGNGIEYANAHLSITEWFAILDTWLGLARRAALAKEQGLMRLVAMLGFPPLPWTETRTWESFDAAERAALLTVVGKLISLDASQLVASFLDAGLSRQAAFPRGVPPIPVMRDIAGALPDRLRHRRCSTRMRCDKKLPEPRSRREVARRMERLRRAVARVQAGAH

SEQ ID NO: 2713 - protein, 586 aa, synthetic construct
  REGION 1..586: note = TnsF-Tn7 System Protein
MGDNEVIAKLVAALTHFKPGAPLKNYIAYAVFPKFKNLEEGTRIDFNFPLTALVGPNGIGKSSVLHALWGMPYKYSTSKFWFETALDPIGHPQTYFYGHWSDSFGGLVETRKARVGAKRDYWEPARPRLSDGMLPIPPGKYEGKALDRWHPVRREVRYINLKAVFGSFDRYFYFDDDRSGGDRREAMLREALRLKSVKDRNLQSYKLGRGQERLFENRDLTKNELESVSKILGRNYDSARIIRHSLYPGNRGRDLSVVFRRGSEYSEAFAGSGEIAAVSAVVEILKAKDYSLILLDEPETSLHPGAQRALLRFLLEQIQEKNHQIVMSTHSDEFIKNLPHDAIKVFEENGQFRSRILPRSSPDAALLRLGKLPENVRRVLVEDPVAAALVLHAAKSLDHGDAAALEVRVAPGGAESILTYMGPSAMVSGDNIFFMLDGDKRKVDSFSDPDMIPPAKHNDLEDLIKKEIGCKPRYQIPGGDDKHGHSNAKVTAQLNYLRWLRKRVSYLPRLVPEHVLLAAMEPKGGHEDKTAKQAKVALKGLLTKGSKFEPSGDELRALIKIEIGKIPFDNADIVVIRDQLQRWLHG

SEQ ID NO: 2714 - protein, 586 aa, synthetic construct; identical to SEQ ID NO: 2713
  REGION 1..586: note = TnsF-Tn7 System Protein

SEQ ID NO: 2715 - protein, 296 aa, synthetic construct
  REGION 1..296: note = TnsF-Tn7 System Protein
MTQYMHVHPDFLPIMALSGEERIAAMDQPRWIGYPRAIEILDLLQGLLTKPKRPRMPNLLIVGDSNNGKTTLIERFRELCGTSYVDGSGDPVRPVVIAEAPTSADERSLYVSVLERFWTPYKPTDSIPKLRYQLIHLMRACNVQMLVLDEMHSLLTGTTTKQREVMNALKLLCNELRIPIVGVGTREAVRVLHTDPQHASRFDVASLPAWSPDKEFQRLLASFERVLPLKHPSRLHAPELASRLHAISEGNIGNLHRLLVACATQAIRAGSEQIDVAIVEKNQWIRPTRGIRELFA

SEQ ID NO: 2716 - protein, 296 aa, synthetic construct; identical to SEQ ID NO: 2715
  REGION 1..296: note = TnsF-Tn7 System Protein

SEQ ID NO: 2717 - protein, 493 aa, synthetic construct
  REGION 1..493: note = TnsF-Tn7 System Protein
MSTDKQGRRTCDGCYAPMINAHKLYKGSEYCGTCYSSKFVSRSCPTCSGTVVHHASEPQAPSCGACLRNQRRCIRCDKPAPEARIIRDTTPGPDGGSPITHEHFVCPSCFPYTTPEIECPICKRPSQRLAGAAHLPDNLKACPSCLNKHTHATCVRCRRYRKVVSVTEEGRPLCIGCGGDQPAEHTCPDCGSTVKGAGAARCDSCSIAARLRREVALCAATIEREWVASLYTAFGEWLLARNLATGGLPRRAVQAAPFFRAIDLDAGTHQPIVAADLLRLFDSKQLRANLNVTRFICERYGFQIDENARARARDIALIERGQEESASKPWARYLTDYRTWLAGKPTRTQAQYLRTAQAFCEAADLGGPFAQEHLVRYLDSAPGSRANLSVWVGFVRARYGWAVTMPPKVAKKASLRRDAQKLMDLLPRVRVPGTASDEDLAATIALAYGFELSTLRRQVTGVTDVGDLITRDGIVEVKMELRAVVAEWSRRAF

SEQ ID NO: 2718 - protein, 189 aa, synthetic construct
  REGION 1..189: note = TnsF-Tn7 System Protein
MAGFESSLERDLLLILDFDRTVMSVKEQPFSLTYIHEASVRRYTPDVMAEYDRDVLPTVVFEVKPIEKLRADWVSLRPGFKAAVAHCRLRDWQFKIVTERHIRTPYLANVKFLRRYRDLAPLLLRQAQLRYTATAVGPTTPQGLLAAAYWPKEEQAQAIPALWQMVAAGEFDIDLTKPLSMRMPIRLVE

SEQ ID NO: 2719 - protein, 345 aa, synthetic construct
  REGION 1..345: note = TnsF-Tn7 System Protein
MRIVWPPQVPDELLSSYLARIAIAYGISSHKLMALHAPGFQVWTRDVDVCASEALLERLRCPSGRSLQMLYGLSLGEWNAVTRRTCDPPQGVYHWINSMGVYHRTRLRHGLAFCPECLEENGAYLRQWRLSFWTVCPLHQRALQDACPYCGAVVQPHRHGFDLRRCWYCNRFLTTSATAAMHALPLQSFLFRCLMDPSNEIEFNGHFCSGAEVLWGSDVLLHALKPVCRTMGMGPERGPRIELRRVPDRHADMELLSHLLDLGPAGLVAMGESMGVTQRCFRQQMPPWIRRLAEQFSAGRVNRGPISSRAELRSAGEAQRKRVSGWREMRADVLFKMIGRSNEYR

SEQ ID NO: 2720 - protein, 632 aa, synthetic construct
  REGION 1..632: note = TnsF-Tn7 System Protein
MVSSNFINISPGVEVMVGQRRYRITRSLDINSVLAEDVETDKVARLRIETMSRVLEVEDGDETPNFSVHHFSDDLWAVAQRRFEAIKPLLDNPRRSRSSVAAAALSAGVNTSTLYKWLALYHDHQHVAALVPTRRGRNRGTRFLQADQELVIASVIEDFYLQKQKPSPKSVVDEVMRRCRVAKIDPPHPNTVRNRIADIRPATALRRRGQKDKARDKYEPIRGSFPGADFPLAVVQIDHTPLDVMVVDEEHRKPIGRPYLTLAIDVFSRAVVGLYVTLDAPSATSVAMCISHAMNTKNEYLRELGVEGDWPVWGQIGTLHADNAREFKCKAVNRGCEANEIIMQWRPVKKPNYGGHIERYMGVVATEMKKVPGATFSNIQEKGNYDSEKEASLTLREVEHYLVNFIVNNYHQCVHSQLDAAPIKVWEDAILGDEKPGVGRMLPADPDRVRMDFLPYFRVTVQRYGVRIENVFYYDPILDRHIGATDEDNPKLKRKFIFARDPRNISEIYFLDPNSERYIAVPYRNVAHPAISAGELREAKKRIKAEGKDAVDEERIFQSIESNRKLVEESKAKSKAARRQAAKAPKAKPSSIASQSAQSSQATPPPHQSASKAPDRSIFSQPLEVLEIGEIN

SEQ ID NO: 2721 - protein, 206 aa, synthetic construct
  REGION 1..206: note = TnsF-Tn7 System Protein
MLFLDELPEWNRSALETLREPLESGHIRIARAARSVQYPARFQLVAAMNPCPCGWAGDRSNRCLCTDERITRYRARVSGPLLDRIDLHISVARMDAVELRESTPLGEPSASVRERVEAAHARQQARGGLNAHLPPAALRACTKLSEADQDLLEQAIERLQLSARAMHRILRVARTIADLAGCEAIQTAHLSEAIGYRQLDRGKPGG

SEQ ID NO: 2722 - protein, 652 aa, synthetic construct
  REGION 1..652: note = TnsF-Tn7 System Protein
MTDLTDFPDDTRVYFIRHIDGYTQPHKGTESTSVRCYLAPIPHGWGSDPSKLDDRQIARLFSDKNPEGFISTIFAGSLATYVAGQCFIRGEDGRGVYAGMLIPKQRKLGNALAFGEESRLYKEYEEDHESGLFPSTKVGERTTGEAVVALPQSQLHLQEALSYGSRILVARDTRSRDERNQVEYIIPRTVIFRAFYAFNSTIADIFTAGPWSTVRSKAISEQEFAGHVTGIDEQSGYWKIVLALGMTLDDGPMMALFRFDHYAEARAKRIHEPILRAQLDAALWGAEDSHWCSNAEIPLNPFLGPYQGTVSGYFLNRRKDGGFAGRTFLVTAIHQMSFSKRLPAIATILVNDATEGEKVIHTGGPRPHNNGNRPRSPRPNGKPTVDTHEATERKPGFDMPSISFAFHPKPKIIRLKKDQSFKYSSKRKKDSQEPTTEISGGRKAGKQEDLSHAHSAHEKRDASELLTELMAILKVLKTKGTIAEYQVVAPVDSEQRVQVGAYPCWNFLGEDERKAVRIGKADWGTRSWMYLQKAESHYRALARTAFVIRLLLPNGLAGLWIEVERRSKRDKSNESIASAFVVSDDLAIRAETQAALSIIRSVQGVSLGKAFERKGRVCYTHPHYMEKPGSEKWSLAPLEAFLKSIGNGQPQP

SEQ ID NO: 2723 - protein, 293 aa, synthetic construct
  REGION 1..293: note = TnsF-Tn7 System Protein
MSSYPHLHDQVAAYMGASNEERIAVARKDRWIGYPKAMTVLDELDQLIVYPSTQRPPCRLIVARGDNGKTALLRQFQLRHPAVQLGDGGTSLPVLRINMPAQPDLSQLWSEVLTRCATTHRRGDPASAKYTMVVSVLRVLKVRVLAIDEFNDVALARKGTSDVLAGIRKLSNELNLSIVAAGTEAAVHALAFDAQMRSRFNALSMPKWAMDLPYLNFLNTYERLLPLAKPSGLAGETLAPVLHSAGGEAIGGTVTLLRSAAAMAIRSGEERITIEIIRAAQESASHASALAEI

SEQ ID NO: 2724 - protein, 293 aa, synthetic construct; identical to SEQ ID NO: 2723
  REGION 1..293: note = TnsF-Tn7 System Protein

SEQ ID NO: 2725 - protein, 464 aa, synthetic construct
  REGION 1..464: note = TnsF-Tn7 System Protein
MAREGGRSGHRKNVCGKRYRHPKRECGMCGRTRRMALRATENSPDVCPTCYWAPVVECSECGDQALGRRTTRNGRPWCFACQAPKRIDELLVDESGRVRPGYDDLWTALLGVVRRGLLSNWARTESLTLLARLLDEHGRVPHQLLDQEGNRTGVHYLRALLVSANVLEERDEHMSRLRAFCREYVAEVDDAETRHVLSRYAHWHIVSRKQVGPHGLTVSQHYNARQAVRTARGFLDHLGARGLTLKECTQEEVDRRAGEASTLTFLHWLQGQRLLAPDLEVPEHSFESAVNTADPEAQLALARRLLHDPDSGGVKERAAGCLVLLYAQPLTKIVQLTIDDLFVRNGSVQLALGPDPLDLAPPLADLLRQLPIRKPFWAARALADERWLFPGKNAGRHRHPTSLMHALRAVGIPARTSRNTAVYHLAGRVPPAVIASILGIHPNTAQRWAEQAGANWLTYGPHRS

SEQ ID NO: 2726 - protein, 464 aa, synthetic construct; identical to SEQ ID NO: 2725
  REGION 1..464: note = TnsF-Tn7 System Protein

SEQ ID NO: 2727 - protein, 725 aa, synthetic construct
  REGION 1..725: note = TnsF-Tn7 System Protein
MARQSLNRTTRREPLGVGMDVNSQPGAPKIVGITRDAEGRVVVLLDHGDHRTRVPWATLVKERLADRPERRADAVDEHPAPMLAELPDDERAAVIERYRDLLQIKYGSRTGNAEGDRRAGILNPDYDPETTTRAQRIAAKQREWRARGEARTDRSTVYRHLRRLDEGPDFLVHGNRRTISQRLSDYAPAVLEIVRAEVAAERDRPHKSQRKLMARIRSRLNTEGVGQAVTLHQLTVLIGETSRGLGLHHPAKTRRSEASRPVAVYGTQRVSRPGELVQVDATPTTVAILGPQGVLVPAVILSAIDVYTRCFVALRVCVGAATSRDVCALIAQMGRPTATRAGYPYELEHWHGIPRLIAINDDPEGEKTSLQKVIGRKPAIYPSTIVFDHGSENASDHAMRYAAECGIDIVFCPPRKGHAKGIVEAVHRVLGGVESAMPIHKGQNVLNRPTEFENAVPIKPQDLQDMLWEYVIDVYSNEEHRALTEAHGSDQPLSPAMVWSDYVTSYGELDAPADPWVFLKGLERRQRQLSPEGIRLHKVTYNSSQLQQLRPVVMKGIGVKARPLTVFYDRLDTTRIFLVHPVERHWMVVPRAIDRNGSIAPMSGLVRQVALNAAEQDTRRPLTEAETHHLEAALLTRWFDGVFTGRQDARYAAIEGARRRTYAHDLEEASQEVRALAFPAPELSEEPQEYPDTRDDDEEIDYDEEITFDVDVEESIQDESVWGLS

SEQ ID NO: 2728 - protein, 339 aa, synthetic construct
  REGION 1..339: note = TnsF-Tn7 System Protein
MGAVMSTRVGTRFMPQDIDDWPHLVMGQNPRPELGGPISDDLRRRVDAYNQRIGTVTTRDTTAVAEAIRRAHFENDHSAYGSATCVILDGKPMSGKTHAALSAAFSETKQIWSALGRAPDDRKYDRSVPWIYVEVPKLARGLSLLKAIWSFLGPPPLPQGATTADYLEALRKIAPRVGLRGIIIDDGHGIGAGQNKDSRLLADVLKGIITGLPATIVLIGTGFSESGVLHGAAGDQVRLRGARWIDIGRWEPPSPGKIGDWEYLARSLNERLFLPADATRVRLTTRGAVHILHEGSRGRPGLAVEWAKRAASYAVWNDTDLDAAALDATRSGLLTQERP

SEQ ID NO: 2729 - protein, 445 aa, synthetic construct
  REGION 1..445: note = TnsF-Tn7 System Protein
MTTHLPLRIDPLPGEWWRGYVARVATVYRVLPTALLSRAPGATVIPRYRLTWSGTVATREAVLQLADLFRLDPDEVDRMHLSAFNGSAIRMADSDRDLFDPTSPHRASKHPTQKIGLIVSGGQDRWCPQCVAELPGYRAMTWRLQTHLICLTHGELLRSVDQSPVPFTLTAEIAEAQANVLSRLRPTADNAAFFMDVEGHLRRANRRGWEPLHRRATQDPEAALADLTNAVRMALARGYPDAQGMTSMPVQARTRHIRAPDSLGFPGDWNVFAHLLPTPMFVGGFSDLLYPARIRDGRAIAALGTLMSATGCHLYEAIELMPPRRRSSNLFKFFQQLVRLEQEGRAEHFWRECRAAVSALIEDRVDYRLRETVCSDPGAFLASINAAPEAHQGMVRTWLVDQWACTYTSSRVRPSVLDRSIEDFDRCYGPRMRVALEQLVGECAA

SEQ ID NO: 2730 - protein, 392 aa, synthetic construct
  REGION 1..392: note = TnsF-Tn7 System Protein
MTRLPLVLAPLQDESWSSYLTRCAAQHHTTVASLGGHLGLRDARGRWPGRFGVNMDDTNVQRVAPLMGLEPNQVQQMHLAAYDQLALDLGGLAHGTAIAGTRATAHSAWVWLAGTTFCPPCLEEDGAWRLSWRIPWITTCLRHDVHLRGACSLCGGVSGHGNKFHASAPPRVAAAPDGRRCTCPQAGGRVCGADLTDQPALAADPGRLRRARLLADLAAGERGSVAGIERTSLQTLRAWQSAIGVAVRLGAVDAGSWGRTHRWANPPRDPDLIDQLLGAVEPLVTAADVPAAADVLDHWIRGAGIRSPHANTFSRITQPSAALRPVIDELLRRHGRVHTLMQRRLVTDDGLPIGHKDWGVDDIHNSCGLVRCPCICATPPGRTSASSVPSSP

SEQ ID NO: 2731 - protein, 691 aa, synthetic construct
  REGION 1..691: note = TnsF-Tn7 System Protein
MNAESVVDAEGALLGGSDRLLRLVLECTAFGEWFTAPEQASRLFAGFHQRLRDGGALLAERVCGHCRLPTSAMNRLDGLLCCRKCYRAGHLVVCDGCGRHQSLERRLPDGSRLCQRCTNTLEDERTDCSSCGNIRIVAIRTPAGPLCDSCRRLELVDSCRRCGRETACRFAGTPEAICEVCATKRETCSSCGKARIVHNRTEAGLPVCHGCAEPIIEPCTGCGRERRVHGRVDGVPFCSTCYARTPGSFRTCSRCERVAHLRASGLCDRCTADDRIHVLFPPELVTADPAIERMRNACLAADAAVSLGVFRRKTSAALLHRALTTPGGPSHEMLDQAGSDSATRAVRSLLIEHGLLPGRDEHLARLERWITATAGSILDPGERRGFIRFARWRHLRFLRESGAPTRVGQASSRRRELALVVELLTWTRSRGRTLATLEQGDVDRWRAAGPQERHRVKAFLEWTGRNHHSNRIVINFRDTRLPAVTGVDEDHRWQLLASILAAASTVDPSTRLAAALVLLYGIRVSKLVELRTDDVTRRDGLILIRLGREPLALPDELGDIADGATRSRTAARLFGAVQDHDWLFPGIRAGRPLSTDTLTARLNALGISAGRARASALASLAQQLPPPILARLTGMHTATASRWAEAVSASNGHYAALKLSPQPILNSRRHRGDEVGSSSALPDQPCVNQGE

SEQ ID NO: 2732 - protein, 691 aa, synthetic construct; identical to SEQ ID NO: 2731
  REGION 1..691: note = TnsF-Tn7 System Protein

SEQ ID NO: 2733 - protein, 515 aa, synthetic construct
  REGION 1..515: note = TnsF-Tn7 System Protein
MAIGRTSAVALLGMNGAIVHVEADISSNLPGFLLIGLPDASLNEAKDRVRAAATNSGCDLPTRKITVNLSPAALPKHGAGFDLAIAIAVLAAAGSVSAASVERVVHIGELGLDGRLRPMNGILPSVLAASRAGSGVVMVPAGNADEAALVPGMRVVAVASLRDAAIWHGGEFDPLPADPILRDAGLPSTPDHEPDLADVIGNDDAVEAMQVAAAGGHHVFLLGPPGAGKTLLATRLPGLLPDLDAEAALEVSSIRSLAGLPVGTSLVTRPPIEAPHHTATAAAIVGGGSGAIRPGAAARASHGVLFLDEAPEFASAVLDALRQPLESGLITIHRANAVAHFPGRFQLVLAANPCPCGQYGANDMECTCAPNARRRYLARISGPLLDRVDIQLRVSRITSAQLRVARDESARPRLSTAMARERVIQARARTRQRLAGTPWKLNSEVPGAWLRGPDVRLDVSTTRSIDRALERGGLTMRGYDRVLRIGWTLADIDGAERPTADHIGRALYLRRAIAA

SEQ ID NO: 2734 - protein, 515 aa, synthetic construct; identical to SEQ ID NO: 2733
  REGION 1..515: note = TnsF-Tn7 System Protein

SEQ ID NO: 2735 - protein, 299 aa, synthetic construct
  REGION 1..299: note = TnsF-Tn7 System Protein
MRCYNRRKVHSSVNLAALGLERPWSRTLLDQYGHWLCAQHPTKPALHRLLEKHVPFFARIDTTFAEPRQITSQALLDHLGSAYLRQYLLASRFLQASLQAPVDRSARQQVAEQATIDKLIVQAKHAQVDVVVQRYAAWLHMQGIALRTQRLYLSSAVAFAIRTQLQPTQEPGPYAIEHFLKERPGLRANLTKFTRFTRDVLGWKLKAGPARASNKRPVTVRRMQTLLAKLPAGDPQQAQTADLTDVLALALGFPKGALAPHPQLTRDEHLHFVLHHGDEQVAIPEVLQHVAETLWMRQP

SEQ ID NO: 2736 - protein, 696 aa, synthetic construct
  REGION 1..696: note = TnsF-Tn7 System Protein
MNYRISISVFIRNKRVTACLISHPRIERKGNFFSEEYMAGMTRSKLVRITVRNIGCIGNEGTTIELDNIVCLVGKNNAGKSTILRAYELAKGTASFDVQRDRCQYAPENEPSEVVLEVHIPDGIGNVDAKWKSPQDGLLIVKSRWQWSPADGFDKNRTTWLPSHEGGGPGDWSQESKAGGADAVFTSRLPRPLRIGSLEDAAKTEEMLLTLALAPLSSALEKERLNPESVLSKSILGISQQVDILRGDHEKHFNEIAGKVADGFRGVFPQLGVKLEIGSAPLTPKLGDLLKGGSKLKVQDGATETELSQQGTGARRALFWSMLQVHNELTRNKEIRTDYRVGLVKALADATKRIGKAKDAERPALEEILATYPTLMEAHDQGAPIPEDANDPALPGYLLLIDEPENALHPMAARAAQRHLYKLAQNPDWQVIMTTHSPYFVNPFEDHTTIVRLQRAGDGEAAPITPKTYRSDLIQFEGDDKQRLQALQNIDPSFSEVFFGSSPILVEGDTEHAAFMSSIIQRQHELMDKVTVIRARGKAILVPLVKVLTHFQIDFSLVHDADSPFNKVGNKNGMWTENRKIRDAIVAARTAGLQVRHRISVPDFERFLGGEEESKDKPLNTYLVVTHDQGRAEQVQGLMTALLRSEQHEPFAEGELGTGDYLTWLNGLVQGWAGQNGQSEELRFSGVKKAEGAGAA

SEQ ID NO: 2737 - protein, 696 aa, synthetic construct; identical to SEQ ID NO: 2736
  REGION 1..696: note = TnsF-Tn7 System Protein

SEQ ID NO: 2738 - protein, 221 aa, synthetic construct
  REGION 1..221: note = TnsF-Tn7 System Protein
MARLASGTPVRTFRVKKRGVTGKVQLSEGGRLRSESTLERDLIIALDFRTDVRAVIEQPVRIDYEHEGQRRRFTPDVLAEFDAAGGHAPRIVLYEVKFHQELQEHWGELRPRFKAATHYCRQRGWRFKLITERQIRTPFQKNAQFLRGYLGIGDDPVTRGQLLYMFRALGPTTPQALLAAAYWDEQSQMKALPYLWQMVAERVIGVDLHQPLTMVSTIWMD

SEQ ID NO: 2739 - protein, 643 aa, synthetic construct
  REGION 1..643: note = TnsF-Tn7 System Protein
MSGISKEFFQFAPGQFVNFAGKKYEITHMISVDSVLARDEAGISNRLRVESITAWREPQTQAPEVPLVPRDVIGFSEAEWAQAQKRLQAIKPLLENPLRTRAAVEEQAQKFGVNAATLYSWMSIYQQAGSVSALVPAKRGRKLGSRNLGEIQELIIRSAIEDMYLTPQKQLPHVIVEEVDKRCRLAKVAAPHANTVRRRIQELDPAHVLRKRGRPDLARNLYDPILGEFPGADFPLAVVQIDHTEADIILVDEVHRQPIGRPWITVAVDIYSRMVHGFYATFEKPSAYSTGMCLARAICPKSDYLASLGVGGEWPIWGKMNTLHSDNGADFRGTVLERACAEYGINLDFRPGGQPHYGGHIERIMRTLATEIRKIPGTTFSNITERKGYNSEKHSAMTLREFEQYMVDFIVNVYHQRVHSSLHMSPLSQFRAGIMGSVESPGRGVIPIPSDPLRVRLDFMPFFHRTIQQYGVQIDHIHYYDPILDQYINSTQPDNPEEKQEFLFRRDPSDISKIYFLDPVSNCYVSIPYRNLGRPAVSAWEAKDALTKLKAEGRRDTDENLLFQAIDRLRARVEVSVSATKSARKKDTRNPAHRRVETPAPAPKKHGAVLRPAPTATSTPTARPPTPTVQSDDIEILPFDEYS

SEQ ID NO: 2740 - protein, 281 aa, synthetic construct
  REGION 1..281: note = TnsF-Tn7 System Protein
MTLPNAERVQACEMDHWVGYSRAIQVLDHLDNVMTYPRSLRMPNVLVVGRSGNGKSAIRHRFVHRYPIQITERGEAVVPLVDIEVPGTPDESEIWSEFLLRLGIAHSSRDTPTVKLQRLKQALIDVNARVLVIDEFNNFTRAGKAAGDLLASLKNLSNVLNLSVVAFGTQEAINALNTDPHMKSRFDPLALDRWLCNVEYRRFLTTYERLLPLAEPSKLASPLLAAQIHYMAGDTIGGTVKLLKRSAAEAIRNGIEKIDKQLLDTIQWTRTDDWDQISRRV

SEQ ID NO: 2741 - protein, 281 aa, synthetic construct; identical to SEQ ID NO: 2740
  REGION 1..281: note = TnsF-Tn7 System Protein

SEQ ID NO: 2742 - protein, 824 aa, synthetic construct
  REGION 1..824: note = TnsF-Tn7 System Protein
MSLPAPEVLADPLGMVVDLVAAREPALGRAVITDVVGAVAGGRAKQRRLARALADRPEVLVEGRSPAPQVVGDLLLALRTAGARTIAAPVCAECGKALQALTRRGENWVCAGCGRLPKRQCAGCGREQQINSLDRHRRPRCKQCPDRDGRDPLAVLTEVVATLEPSLSPETLTATAGRVCGTPAGLRRLAWTIEDTPGLLTGDGAQAPVPSVLRLIDALCTAGAQTITRPACPRCERVISLHRRIGGQWLCRNCVATSRAQPCSRCGAVREPGARDEHAAPLCANCVAAEPANHEACISCHRQRRVAVRTPEGPFCDTCRPWTSATCTLCGRHGPCAISTTTGQPWCRACKKRWARCTGCGKDQPVRGGTIDAPLCSSCTRPDPEFWRACPGCGQPGRIQLGYCARCVVEQRLRDLLGDHTGTIRPELRALYHALAGTDRPATVKDWLDASAGPALLRALGRGLDSGQPLTHTSLDQLPAGKAVEYLRAVLVSTGTLPGRDEQIARLERWITTTIAERADPDEQHLLHRYAVWHLLRRLRRRVGSGHTSPGQAVTVRRHVRAAIALLTWLAEHDLTLATAGQGDIETWLASDDATHRREAGGFVRWARREKLTSLDMAAIRWPGPTRVLDTEARWDHARRLLHDDTLTPEDRVAGLLILLYAQWPAAISRLTLEHLDITDHDVRIRLGHEPVVLPEPLAELVRQLVATRRGHAALGDPGTSRWLFPGGHPGRPISAPQLRKRLRTLGLRPGQARSTALFGLATDLPAALLARMLGIHINVAVAWQRASAGDWTAYAAQVSRRAATTELHPRTTGDSDHASGEQR

SEQ ID NO: 2743 - protein, 824 aa, synthetic construct; identical to SEQ ID NO: 2742
  REGION 1..824: note = TnsF-Tn7 System Protein

SEQ ID NO: 2744 - protein, 374 aa, synthetic construct
  REGION 1..374: note = TnsF-Tn7 System Protein
MRRGDLAGAAHLELVDGVVALRPQDAMLEAMLTGWRAQQSSRGLREVTMARREQLVRRFVAFTNEYPWDWSPAHVDEWSQSLVGERHLALASIRGYQGSLRSFSDYITDGRYGWAVACEKQFGPGRHPVPICHEWNTIAHLDDYEGSPEARPFTREELQRFLDYADDQVGRAVTAKRKGALAAYRDATLFKVIYGWGLRRTETAQLDLADWGRNPAAAEFGRFGMLHVRYGKAVRGQPPRRRNVPSIMGWAVEAVADYVDNIRPRFGGAERPGLWVTERGGRLKPVEINARFAAYRDALGLPRELSPHSLRHSYVTHLTEDGVDRRFIQEAVGHRCDTSTAIYTHVSSDFMNTALRQALAPALGDRGPEREERR

SEQ ID NO: 2745 - protein, 110 aa, synthetic construct
  REGION 1..110: note = TnsF-Tn7 System Protein
MTRELDYRWHLRQVMAARGLFATTDLIGPLAERGIRLSSSQVYRLVVERPERLSLKVLVALLDILDCSMSELIEPVAAARPAEQPKAAGGGKAGVGDLRPTRARIARAEE

SEQ ID NO: 2746 - protein, 510 aa, synthetic construct
  REGION 1..510: note = TnsF-Tn7 System Protein
MNDSAGNRPRTKGRPRNNTGKYSCGRCGLKFNHGIANFPEGRLCLTCYRKATDTYGRCPHCGQHRMLPGVSPATDNPICAECAGITRNLHCKTCGKERRPYRGGSCATCALRADLYEMMGKQADVDKFAILTEALCAADRPESVLTWKLNPKVSQFLKFLGAGNFEWAHTTFDEYIRENPKSKREVEHVRAILIKNEALRARDYDLHAFGQWWKNKLQTVDSPSFRKVLNQFISWDVTPRINESIKDGRNTRRATHAAKQHVSTTIDFLNWLHSQGFEDLSRARQPDVDFWLTSGPSTRRNLRPFLSWTSRNGYTRKLKVPVFEASNHKLISKDERSYWIMTFIEDDSIHLHVRVAGLLLLVFAQPLANIVELEINDVTDLDGKLFLKLGSQAVPIPSPIVGLFRDYLDHRPNLRGANAGSSWLFPGVKAGRFITVDSIKEQFRKIGFTQFLGARSSSFEELLAIAPAPLVADALGYSYKSADKHSLVTNQSWAHYVGVRTKRETEQKEP

SEQ ID NO: 2747 - protein, 510 aa, synthetic construct; identical to SEQ ID NO: 2746
  REGION 1..510: note = TnsF-Tn7 System Protein

SEQ ID NO: 2748 - protein, 368 aa, synthetic construct
  REGION 1..368: note = TnsF-Tn7 System Protein
MKRRRCASVDHVVKLVRPLDPAEHYFREMLSGWTNQQMARNLNTSTIESRSSIVQRFVLSTETYPWEWTPKVVDEYFSDLRAENQLQRSTIRSYQGALRAFCSYVSEPSNGWVDLCIEEFNDHPTQVFFDWNTAQHVQDYEGSPTKRAFTKTELQDFFDYADDQVDRILRNGHKGAIAAYRDSMAFKIAYSYGLRVNELRHLRQEDFSRNPHAREFGRFGQLNVLHGKASRGSSPKRRGVFTVFSWTPDIVEDTIGLAGDKYGERSLLFPTERGTFVSSSVLWRRFRLYCDELELPPGLDFHSFRRSYITHLIEDGWDPLFVQKQVGHEYASTTAIYTCVSSDFRTRTLRSALNDTIVRSSDRKNNLQ

SEQ ID NO: 2749 - protein, 96 aa, synthetic construct
  REGION 1..96: note = TnsF-Tn7 System Protein
MARQGIRNSTDLVPLLAERGINLSRTQVYRLSHQKPERVSLVVVGALCDIFSCDIGDLLTFTVAAKPIARTGTTASRGSKSGSTLAPRRVKITDDE

SEQ ID NO: 2750 - protein, 492 aa, synthetic construct
  REGION 1..492: note = TnsF-Tn7 System Protein
MSPANVSREQYERWHIRTCARCNRRAPKSAEWSDGPICRTCFERAMRVRGRCPGCDTERLLPGRDTCGIAVCRDCAGISRDFFCDRCGFEGMLLGGRLCERCTLADKLTTLLDDGTGRIHPPLVPLHDLLTSMDRPKSRLIWLRNPQVSGLLQDLAAGRVALTHEALQQVPTWRTATYLRDLLMDSGALPSVDRRLLLFERWLAERLGSITDAEQARLLQHFSIWHQLRKLRAKASKGPLGPSTMNECRQQITQASAFLVWLTERGVELPSCAQADLDAWHAEKYATRRPARVFLRWCMTTRRMPTLTIPDRITTNPNPMGQHRRITVLQRILTDDTPPLGARIAACLVLLFAQPVSRIVRLTVDDVLHDDEHVAFRLGDPPSPVPEPVADLLLSYVQALQDNTSATNSNPRWLFPGRRTTRPMNPTTLRDALREIGVPVERGRTAAIRQLVLQAPPPVVAQALGYHDKSTTRIAAEAGGTWKKYAPGDHPR

SEQ ID NO: 2751 - protein, 492 aa, synthetic construct; identical to SEQ ID NO: 2750
  REGION 1..492: note = TnsF-Tn7 System Protein

SEQ ID NO: 2752 - protein, 938 aa, synthetic construct
  REGION 1..938: note = TnsF-Tn7 System Protein
MADGATYGRPVGRDAELGLLAGAVSGAADGALRAVAVRGDPGMGKTRLLAELADLARARGFTVHHGQATEFERNVPFGVYLAAFEPQRGDPGRDAHGALTELLMDATGPSEARREGLGRYRLFQRARRLIEDQGAAGPLAIVLDDLHWADQSSIELTEYLLRRPPRAPLLLATAYRTAQVPPGIARAVAQLGDAAVHIGLAPLSESDMAALLPEADRGRRRLLYRTTRGNPLYLQVLADAGVETLTALAEAGDAATGAPERALLAVLSTELTALTPEVRQVACAAAVAGEPISLDLVASITELPEAALDRAVDHLVGVGLVVEADASLRFRHPLVRASAYWMAGAAWRSRAHDRAAKHLRGNGGPLQLLAHHTARSAQHGDVQAVRTLEAAAAAAVEAAPSTAVRLLRTAIRLLPDEADHALWRIQLQWALGRALGVTGELAASRQILQEVMRTPGPLRIAAVSFSSMIYRLLGDYDEAKALVSTELTRPHARDRPTSLAQVGLAAVELMGREPGKARLAAADAIRSLRDADDEALESAARSIHALASLRDGHVAQSRRETDRAAWLTDALTDDVLAPHLELVAPLAWVEIHLRRHDDAARHLRRGLDIAHRAGRSHSVPYLLIALSALYERQGRLREAVTAAEEAREASRLIHSRETLAMSSILLLRPLLWRDGPRAALELAERISGTLPRSGWWSGLARLDLTMVYAEAGQPDRALAALTGEYPADEPTRTYCLALQAVIMATAGTGSEAGSLAEHALYRAMKSGLPHSLGFAHRAQAKVLMLSGRPKEAAVHAARGADHFAAAGAPVEEGLTRQLAAELYAAQGSVVTARDELGRAKSLYATAGAAWLSAAATRDERRLAARVPRGQRKPAGPLSALTARERQIADLAVGGLTNQQIAERLYLSPKTVEAHLSRTFAKLGIQSRATLTQHLTADD

SEQ ID NO: 2753 - protein, 938 aa, synthetic construct; identical to SEQ ID NO: 2752
  REGION 1..938: note = TnsF-Tn7 System Protein

SEQ ID NO: 2754 - protein, 349 aa, synthetic construct
  REGION 1..349: note = TnsF-Tn7 System Protein
MAHSRIPHQRLLSLDARLAQAAARPVIVPETVVVDRGAVFLSETFLRACRKLGISVQPAHPGTPTDKGNVERTFGSINTLFCQHVAGYVGSNVTMRARDAEDTAVWTLPQLQELFDEWVVAGWQTRPHSGLRDPQRPVRELAPNDMYAALLTVAGYVPLPLAGADYIELLPVEWRRITADGIQIDYRTYDCRDLGPYRHQPSGVTGKGNRWEVRYDPYDLSHIWVRDTRRGGWITVPWTHLPMISPPFADFTWRAARQIVTDAGADSSDETAVARALNNLLTRASQGPSRRRIAAKTKAAPSALPAVAAPVLEVGPSNSTDDEGDSGEPLLGTAVPFGIFDPTAEDPYR

SEQ ID NO: 2755 - protein, 333 aa, synthetic construct
  REGION 1..333: note = TnsF-Tn7 System Protein
MPLGTLTTRAGWAAFVDQPPSSLDLLGDDERKHLTDAERDTYDQARHLHHSRLAVVATPTVNKVTKLGRRLMLLNRGQLSARRGLIVNGAGETGKTTAISQLGKHHEHLARRRRVAPGPFLPVVYVSVPPASTAKMLAAEIARFLDLPLPKSFNQVAITNAVCEVLHTMSTELVLVDEIHNLSLSTRPGAETSDQLKYLSERIPATFVYAGIDVEGAGLFSGLRGQQIASRFTVVATQSFAYGTSRQRAEWAALVATLEQVLRLHRHEPGTLLRHAEYLYRRTGGMIGSLSALIRDAAIEAIIDGSERITLDLLEAVELDRTAENQRSTTSKR

SEQ ID NO: 2756 - protein, 333 aa, synthetic construct; identical to SEQ ID NO: 2755
  REGION 1..333: note = TnsF-Tn7 System Protein

SEQ ID NO: 2757 - protein, 214 aa, synthetic construct
  REGION 1..214: note = TnsF-Tn7 System Protein
MSFDHADEQVVQVQERGRKGWLPAFRDAMLFKTAYAFGLRRNEARMLDAVDFGRNPDGAEFGEYGVVYVRHGKAKKGSPPKRRSVLTVFDWSAEILQQWNEEVRPLFATAGTGALWPSERSARVGFSQMNARFAAYRDALGLDEGLDFHSFRRSYVTHLIEDGWDARFVQEQVGHEHASTTAIYTCVSSDFRTRTLRRALDATMEAALRPARRA

SEQ ID NO: 2758 - protein, 111 aa, synthetic construct
  REGION 1..111: note = TnsF-Tn7 System Protein
MKRQVSYQWRLREVMATRGIFAASDLSPLLAERGIELSSVQVWRLVTQTPERLSLPVLAALCDILDVTPAELIATRAENVAPRRTAVSGGAEVVDLAATIRPKRARITGNK

SEQ ID NO: 2759 - protein, 400 aa, synthetic construct
  REGION 1..400: note = TnsF-Tn7 System Protein
MTSPRSTALLDNISALLDHGDPWTTIGEEGVRSLLEQLAPTTMGQAHLRRFLADANANWTTDADPNLPRQAQRLLRMLRERGISVVLPLCSGCGRDQLLTQTLEDGRRVCNNCRDARYTRRCDGCDKVRVISHRIDGKSLCGTCRRQRPEAKETCIRCGHDRLVQNRTPDGPVCSQCAPGKIEPCVHCGHKRRVRVRFRGGATCEPCFNVIRRTRRPCPRCGAVGLVASVADDGTLACSTCTGVRSRFICADCGVEDVRNGKRCFPCLARIALDDLFAAGTSARRQALEPLRQRLLRHPEPKSMARWPGRSASAKILREILTERIDLTHEALDQQASVQAVSLLRHALVDVGVLDPRDTAWVQFVAWIETFLEGHPEQMVRILGPLRLSRESASSPERRA

SEQ ID NO: 2760 - protein, 400 aa, synthetic construct; identical to SEQ ID NO: 2759
  REGION 1..400: note = TnsF-Tn7 System Protein

SEQ ID NO: 2761 - protein, 108 aa, synthetic construct
  REGION 1..108: note = TnsF-Tn7 System Protein
MTRQFDWHLRRQLAERGIYKTTELVPLLAAQGVQLSREQVYRLVTSPPQRLSIEVLDALCVILDCTPNDLIGFTVAARKQPKAVGGATVTDIGTLKTVPARITRPDRS

SEQ ID NO: 2762 - protein, 486 aa, synthetic construct
  REGION 1..486: note = TnsF-Tn7 System Protein
MSRPKQAQDPVRFPEPCARCGEHRRQAARWPDGCICQNCYRAAHRTTGVCALCGHDGILPGVNEGQATCRSCSGIRLNLDCRRCGAEAELYSHGQCWSCTLADLVDQALTDPRTRVVPPQLIPLADGLKSMKRANSGLTWIRQKHVQEFLAHLAATGNVTHQQLDALPESRTRNFVRGLLVEHEVLPRRDHYLALFDRWASDALDRVENPRHRDIIKRYVRWQHLRRMNQMHEVPRGTFLRSKQATTVAIEFLNWLTDHGILLDELQQAHLDAWANTGPTTRLIAGRFLRWAVKTRQVARDLRMAEHRRGTAPRMNFEDQDHATHRVVHTDELTARDRAIGILVLVFGQQIEKIVQLSWDDLTVTEETVTIRIGAIDIALPSPLDEPWRRLAADPGNGLTAAHPNTPWIFRGISPGQPLNAHYVTRRLKHVFAARAARLGTLHELSKLGPVPIIAEALGYSPTTIERHRIDSAAAYSQYIAGIRGS

SEQ ID NO: 2763 - protein, 486 aa, synthetic construct; identical to SEQ ID NO: 2762
  REGION 1..486: note = TnsF-Tn7 System Protein

SEQ ID NO: 2764 - protein, 375 aa, synthetic construct
  REGION 1..375: note = TnsF-Tn7 System Protein
MVELMPGSIPKLLTDPSVGLFRADERVFEAMVEGWRSQMMARGLTTAYITNRLSVIRRFQAFTGTFPWQWNPADIEDYLTDRRSRATPITLSTLRGFSNGVAAFCSFVTNPAYGWAQFCADTFGEIPSQICFEWNTPRHTADDAVPPRRRAFSKVELQRLFDHIDDLVDREHASGSKRWLRLHRDSVAFKLCYAFGLRRRELTKLEIGDFGPNPHVPAYGRFGAVTVRWAKGTAASGPRRRTVLTVPEFEWVVPLVRDWLSPGRRDRFKTADRSDALWPSERGSQVTVSALGDSFAELREEAGLPAELGLHCLRHSYVTHLIEAGYDPTFVQTQVGHAYASTTGIYTSVSADFKQKAIQTMIAKRVATREDRADA

SEQ ID NO: 2765 - protein, 498 aa, synthetic construct
  REGION 1..498: note = TnsF-Tn7 System Protein
MARPRPAPDPERYAACARCVQAYKPAARWPEGMVCQYCYLAAKRTEGSCAACDHRGVLPGRDAAGRATCRACSGITLNVDCVGCGREAELHSRERCWACVLNDQVRDLLTGPAGRVPEALEQLARALGGMPRANSGVTWLRSVRVQQLLRGMAAGTIPLTHEALDALPTSRTVEYIRGLLVEQAVLPRRDRRVADFERWLERRLATIERPEQHRTLERYARWHHLRRLRAQSATAPVSEAAFTRAKQCVTVAGQFLLWLTDGGLTLDQVRQQHIDQWYSHSTGTAVHVETFLYWARQQRLLPREITIPRRAKDAPVTLGEQQRLTALRAILVEDRSPLQVRVLAGLVLLFAQPVNRLTRLTVDDVDLTSEAVRIRFTRHWAEVPEPFASLLAAHVAARPNRSTAANATSHWLFPGTMPGQPLKPGYVTTLLSEAGVPALPTRAATWRQLARQAPPAILAEMLGASPSTAMRYAELAGADYLHYAAPVERREAGHRFAT

SEQ ID NO: 2766 - protein, 498 aa, synthetic construct; identical to SEQ ID NO: 2765
  REGION 1..498: note = TnsF-Tn7 System Protein

SEQ ID NO: 2767 - protein, 953 aa, synthetic construct
  REGION 1..953: note = TnsF-Tn7 System Protein
MAARPMSTPLVGRAAELGRLREGLARAAAGEPSVLLLAGDAGVGKTRLLREAAVTAEARGAVALVAHCVDLGDVGLPYLPFAEALAHLRDAEPEAVAAAVASHPALARLLPGGAGEVPEDGSAQRLQLFDGVLALLTAVGAPGRPVLLALEDLHWADDASRDLLRFVTARLGGQHVLLVGTYRTDDLHRRHPWRPVLAELLRHPRVERVELPPLDPAEVRALARQAGPLPAAVVERVVERAEGNAFYAEQLLLAGAGPELPGTLADVLRGRVERLDPAAQSLARVAAAAGRRVTEPLLRGAAVRWDPGLPFDASLREAVASHVLVVDEGHVAFRHALLGEAVAADLLPGEVSALHRAYLRALADEPALGSASEVAAHALLAPDLPAALVASRRAADEARELLAPAVVLRHLETVLRLWDGLPDAAELLGEPQDEVLAAASRAAGQSGRVDRAVQLARAAVAATPGVLRAAEHRTQLARHLLAADRVPDALRESTRAVADLAGTSGRAAAWALATHARVALNLDHEDEAELAATEAVALARAVGAPDAESDAATTLAAALVGEPTRALEMLTAALAAARRSDDVETELRVRYNLGMRRFEAGALDEAAADVAEGLARARAAGATRAVYGVQLDYLDRLVRYHRGDLAPVGAPADVDDDLAAVTQAVDLYAAVARGDEDAVARGLALRPAWARDGLVVLVAGGCTADALTRTGRPAEALGVLAAAVEHLERLWSPAYLAGIWHAALGLAAWADLRAAGHDAPVADGVVAVEALRERAERTAARGPLGPEGRAWLLRARAEHARATGVPDVAAWRAAAEAFDYGYRVEAARSRHRLAEALLAVGDRDGARGAAAAALAEAEATGAVPLAAAVRDLCRRARLDVPGTRAPVADVLTAREAEVLALAAQGLSNRQIGERLYISGKTVSVHVSNVLAKLGASGRTEAVALAHRRGLLDA

SEQ ID NO: 2768 - protein, 953 aa, synthetic construct; identical to SEQ ID NO: 2767
  REGION 1..953: note = TnsF-Tn7 System Protein

SEQ ID NO: 2769 - protein, 366 aa, synthetic construct
  REGION 1..366: note = TnsF-Tn7 System Protein
MLRPDEQVFAAMLDGWRDQQLARGLSRGTLEPRLAMVRRFQAYTNDWPWAWRPVDVEEFLSELRSGPRPAASSTIRAYGGTLRLFCDYVADPRYEWTSTCEQLFGSHPAQVCFEWNTAVHSSDYEGRPQRRSLTRPELQRLFDHVDDEVEALRRRANKGWLTALRDSAALKVAYGFGLRRRELTMLDLEDFGPNPHAPEFGSYGVVYVRWGKATKGGPPRRRSVLTVFPWTVDVVAEWVGTYRRLLPTAARSSALWPSERAARVELSTLGARFARYRDDVELPPEIGLHCLRHSYVTHLIEAGYDPLFVQQQVGHSYASTTALYTSVSSDFRTRTLRRALDQDVSRALSATAPGNLDATVTEGSSA

SEQ ID NO: 2770 - protein, 115 aa, synthetic construct
  REGION 1..115: note = TnsF-Tn7 System Protein
MTRRLGYHWHLRRIMAAHDMWKTTDLAPLLRERGVNLSAAQVYRLVADKPERLSLHTLTALCDIFGCTPADLVEPYVESAGRKGTAEQTGHGAPVTELHTSLRPTRARIVDPERD

SEQ ID NO: 2771 - protein, 500 aa, synthetic construct
  REGION 1..500: note = TnsF-Tn7 System Protein
MTDEPLAVSARATQRGRPRNTDGPSTCDRCRRPMRRHRVRWPEGDLCGICYHHATRTHGTCPGCGQERLLPGKDPATGQDLCSDCAGIGVDFHCQRCGLEAEPYRVRTCARCALRHDLTELFPEAAPPPLHDLLERLCASERPESILTWKRSSIVTQLLHQLAAGTTPLTHAGLDSAGAGPDVEHLRSLLIDIGALPPKDPDLARFERWIDTKLDGLAADVEQPVRQFATWHHLKRIRAKCADGSPARGPVHAAKQEITETLKFLTWLNQEHQRTAATCTQLDVDAWLAPGPSTRYGIRTFFVFARKARINTTIRVPHRTPKSSPTLTQQQRLGWINELLHGTSETIPYRTAGGLLLLYAQPITRIANLRLDDVLIHDNETTIRLGARPIPVPAPFDALLHQHLGNRPHQRTGGGQDNPWLFPSTRAGQHLHPNTIMVRLRELGIDLRGARNRAMADLVSELPAPIAAEALGYSQAVAHKHATAAGANWARYAGTRMTTP

SEQ ID NO: 2772 - protein, 500 aa, synthetic construct; identical to SEQ ID NO: 2771
  REGION 1..500: note = TnsF-Tn7 System Protein

SEQ ID NO: 2773 - protein, 316 aa, synthetic construct
  REGION 1..316: note = TnsF-Tn7 System Protein
MTVPHGEQLDLDRIEALYRAHVSPMVFRRARAVGRPTAIFVGAQPGAGKSSILTRLRGRFRGNVALISGDDFRQFHPAYTRLRDTDPVAMPNVTQAFSGPAVERAIREAAERRVNIIVEGTYRDPATTFRTMQLYADAGYRTELVTVSTSIYASQIAAQQRYLDALREGYDARWTPRSALRRGYEESASILTAALGVAACHRISVVDRDSVELVRVTRDADGQWPKGADPEEVCREHRELSRPDADQYAEQIEGIAAGAAAVGVDGPEFQAVLDELAKVVDMLRDDLVEESFEGRLESVVAEVRGTVVHERDYDAD

SEQ ID NO: 2774 - protein, 316 aa, synthetic construct; identical to SEQ ID NO: 2773
  REGION 1..316: note = TnsF-Tn7 System Protein

SEQ ID NO: 2775 - protein, 233 aa, synthetic construct
  REGION 1..233: note = TnsF-Tn7 System Protein
MTAASSALSSIPAAGARRSIPVSAELKFFYGPMDCGKSTLALQINHNHARQGRKGLLLTQKDRSGEPVISSRMGMAGGAIDVSDVPDLRRVVRDRWTAGQRVDYLIVDEAQFLSVEQVDQLAELVDEADVDVYAFGLATDFRSLMFPGSKRLFELADVVTPLQVEVLCWCGREGRYNGRVVDGVLVKQGEQVLVADTAAGESAQVRYQVLCRRHWRSGDLGSNEDVQPSLPLE

SEQ ID NO: 2776 - protein, 233 aa, synthetic construct; identical to SEQ ID NO: 2775
  REGION 1..233: note = TnsF-Tn7 System Protein

SEQ ID NO: 2777 - protein, 365 aa, synthetic construct
  REGION 1..365: note = TnsF-Tn7 System Protein
MEVDEVGRVHLLQSVPLLHPEQQVVADMLQGWRNRQLSRNLQFATINPRVRYVQRFIEHLNVMPWEWTPRMVEEYFGDLRSIRRLSHASLRAHQSALRDFTSYISNPDYGWDRVCEGLFGTHPAQVFFEWNTAVHVQEFEGRPAKRPYTKRELQQLFDHADNEVARIVAAGRKGWFPAYRDAAMLKIAYSYGLRFNELRHLQTVDFARNPHAPVFGAFGVCKVRYGKSRSGSPHKPRSVLTAFTWTPEVLQDWIANGRGPRDGLDLFPSERGGLVVESTLLRRLRRYCDELGFPDGLDLHSLRRSYATHLLEDGWDPVFVQRQMGHEHASTTGIYQFVSDDFRNAALRAALDRTIKDADEQRPEA

SEQ ID NO: 2778 - protein, 110 aa, synthetic construct
  REGION 1..110: note = TnsF-Tn7 System Protein
MRREVDYTWRLAELMAARGLHNTTELIPLLAERGIALSRPQVYRLVNQRPERINLQVVAAICDIFECGPEGLVTVTATDARRRKTASAPQKNVVDLNRVARPRRARVIDD

SEQ ID NO: 2779 - protein, 503 aa, synthetic construct
  REGION 1..503: note = TnsF-Tn7 System Protein
MTISPNRRSTKRGRPPVIGERFRCSRCQRMANQRRASWPGEQLCYSCFYTAMRTRGICPRCGHNGVLPGLGSDADRQPICLSCAGIPADFICRSCQTEGNFYRRRTCARCALRQDLTALIVDNAQCPEAIAPIVDALCRVERPATILSWKRSPRVRELLTGLACGQIPLTHQGLDKAGTDGAVNHLRSLLEHAGILAARDEPLARFEHWLTQKLEAVTQPAVRAPVEQFATWHHLRRLRRASFPGQNSDAAARDAKQEITETIKFLTRLHSTHSRTLASCRQHDVDEWLASGPTTRRKIRNLLAWAKKARVNKSVQITHQQPPPSSALTQEQRLAWLRELLTGDSETLTYRVAGSLLLLFAQPMTKIAALPTSAITLAENEVRITLAQEPIPVPRPFADMLVNHMGNRPNLRATGGVKDSPWLFPSLRPGRHLRPQDIRERLEQLGINLLGARNTTLQSLVASAPTPLVAELLGYSYNTAQLHAEIAAQPWARYVTKTAVGSN

SEQ ID NO: 2780 - protein, 503 aa, synthetic construct; identical to SEQ ID NO: 2779
  REGION 1..503: note = TnsF-Tn7 System Protein

SEQ ID NO: 2781 - protein, 416 aa, synthetic construct
  REGION 1..416: note = TnsF-Tn7 System Protein
MEDWAEIRRLHRAEGLPIKTIAKTLKISRNTVRSALASDAPPKYVRKPAGSAVDVFEDAIRAELKQVPTMPATVIAERVGWTRGMTVFKERVRELRPAYLPPDPASRTSYEAGDIGQCDLWFPPVTIPVGYGQRRTATQLPVLTMALGYSRWLSGMLIPSRRAEDLFAGWWQLICGLGAVPRTLVWDGEGAIGRWRSGRIELTEDCQAFRGVLGAKVVVLKPAEPEHNGIIERAHDYLERSFLPGRTFSGPGDFNHQLQHWLNTVNARTRRVLGCAPTDRIGADRQAMLTLPPVPPVTGWRHTTRLARDHYIRLDSNDYSVHPGVIGRRIEVVADLDRVQVFCEGKVVADHERVWAWHQTITDPEHRAAANMLRRNRIGALRPVREPEDPITVEQRSLTDYDSALGIDLGEDGLVS

SEQ ID NO: 2782 - protein, 1948 aa, synthetic construct
  REGION 1..1948: note = TnsF-Tn7 System Protein
MMGLHKLTAGDGYVYLIRQVAAADDSHRGRPGLADYYSSKGETPGRWMGRGLAGLGRPVSRDPSDPLIAQLWSVRQGSEVTEEQMKALFGEGLHPNAERITKHLTGFGVAKAGAIAAARLGRPFRVNAAENEFIRRLRGAYGDYNATLGRERNTSLDPEVRARIRTAVGRDMFTETHGRAPADERELSGFIARHIRSQTTAVAGYDLTFTPVKSVSALWAIAPRSIATKIEECHHQAVAETLAFIEEHACFSRMGADGIAQVNTTGLIAAVFDHRDSRAGDPNLHTHVAISNKVLAIGPDGIPRWLALDGEPLYKIKVAASEFYNTRIEALLIEKVGVLFAAVAAKAGKRPVREIVGIPTRLLERWSSRRSAIEHRVGQLAKEFQVEHGREPTAVEMVALSQRATLDTRQAKHEPRSLAEQRHMWRGEAIEVVGGQRELTAMIAEVTQQADRQRVAITDKWVYEQAAKVIATVSQTRANWQINHVRAEAQRLLRYTDHVGGPDVVDRIVSAALGDHSIALTSHADTEMGEPAALRRRGGASVYTRHDATVYTGADIMAAERRILAAAGRRGGRVVDDTSIRLALLDHHAKHGIKLNDGQVALVREMATSGARVQLALAPAATGKTTAMAPLAEAWRNNGGTVIGLAATASAAEVLAADLAAPTDTIAKLVQLADPRSGLPASLDDPARKWFDIIDQNTLLIIDEAGMASTLDLDKVIGHALARGASVRLIGDDQQLASISAGGILRDLADRHDVITLSTVVRFTHPDTGQAEGAASLAIRAGDPAGIAFYVDQQRVHVGADAVSKDMAYHAWAADLAAGRDSILLAPTNELVAELNERARLDRLTANPQAASAATVTLADGLAASAGDWIITRKNARWLRATGRGTWVKNGHRWIIRDVNKDGSLSVSPLRGPNTNTLIRLPADYVAAHTTLGYASTINTAQGVTAGGRGIEGTCHIVGSDQLTRQQLYVATTRGSTENHIYFSTSEADPHRIVSPKATHPPTAVDILSAILRRDGAQISAHTAAAIDADPFSRLHRAAAMYADALSAGAEQLAGTNAMARIDAAANAIRPDIADAEAWPVLRRNLAVLAIEGHDPIAALYDAAAAPLGNAKDPAAVLDWRLQPPPGSAAEKVGPLRWLAAIPDPLANDPRWGTYLSARAQLVSELADQVRDIAREWTPATAPAWARPLAGQRPALLAEIAVFRAAHNVDPADTRLTGPEQHANRSAALQHAIHARVDAALTRAHPSAQRWRNLADQLDKHITTDPFWPRLAAHLDEAARAGADVAGLLNTAVSQHGPLPDEMPAAALWWRLAGTLAPATLDRPDTTLRPPWTAELHHLLGTRIAEAVITDPAWPGLVAAVAACGWPPHDILAAATEHLRDIAATQPLRPDEYARLLTYRVELLTHHAETIDLDIPHPAEYADQPTPDEQLHLFTDPDGGDIGDLQVPPPDPYDYPYGFAEEDLGGLDFADLPLHRPTPTQRGDDIDIPALRARRDAARGRAQQLQDAILGGPGGPAEQAAAADLAELRRRHTQQRPNHHALAYAHTDWVRAEDAAELHHQLLNQLGATITAAAQRGDTAAVARYRHHRDQIAQQTPRFDTAVQTARTRLDTARTVLIRAAGGVDNIVTERDIHNRRAAALNADTEALTAARAEALDLDNQLARAEAIAARAFAENPAHNYDLAAELPQLRAEIDFIDAAGRARAAAAGYTTPDETVAHLDQTSRAAVTTITGSYQAVHSLQLHPGADKPAALAAIAAAGHHDNHRVLALPATTEATQYAGANRYADTTSTAQSARDNLETGRWKLPLGSLVVVDDADQLQPELLQWLAENAARTNTKLLLITTSDTREPAHTLLAALNTHLPWAQHLGTPEPSRQRPQTAIERADHHLATTGGTSMSRTEATQLLERRGQLLDHFRELAEAAAQLDATAIADRGRRRGRGREDGIGL

SEQ ID NO: 2783 - protein, 1948 aa, synthetic construct; identical to SEQ ID NO: 2782
  REGION 1..1948: note = TnsF-Tn7 System Protein

SEQ ID NO: 2784 - protein, 304 aa, synthetic construct
  REGION 1..304: note = TnsF-Tn7 System Protein
MRCDCSVLNVSDPDYGWDRVCEQRFGTHPAQEFFEWNTAAHVQDNEQSPTKRAFTKRELQDFFDHADDQVSLIAASTRKGWLPADRDAAMFRVASSYGLRFNELRHLQTVDFSGNVHAREFGRYGVVQIRYGKAKKGSPHKRRGVLTVFKWTPEVIADWLAHGQPGMTEGIDLFPSELGALVAGNTLLRRFRRYCRNLELPDGLDLHSLRRSYATHLIEDGWDAKFVQDQMGHDMPARRRCIPACPATTASARCAGCWTPPSTPHCRWGRRRVHEAASRLHLKIGRADGRSWDVQQYRSNSSSC

SEQ ID NO: 2785 - protein, 269 aa, synthetic construct
  REGION 1..269: note = TnsF-Tn7 System Protein
MTTKTRATAVSSNNRDLTAEISFLTRALKAPTLREAVTRLAERARAESWTHEEFLVACLQREVSARESHGGEGRIRAARFPSRKSLEEFDFDHARGLKRDTIAHLGTLDFVAARDNLVFLGPPGTGKTHLAIGIAIRACQAGHRVLFATAAEWVARLAEAHHAGRLQQELIRLGRYPLLVVDEVGYIPFEPEAANLFFQLVSSRYERASLIVTSNKPFGRWGEVFGDDVVAAAMIDRLVHHAEVIALKGDSYRIKDRDLGRVPGSTTDE

SEQ ID NO: 2786 - protein, 269 aa, synthetic construct; identical to SEQ ID NO: 2785
  REGION 1..269: note = TnsF-Tn7 System Protein

SEQ ID NO: 2787 - protein, 189 aa, synthetic construct
  REGION 1..189: note = TnsF-Tn7 System Protein
MRLKLNEEWTVGDRLGEGGFGAVEEHFDTRKVELGTCGRPYASDCRHEHACIRCPVPRVNPQMAFRLEEIETDLISTCRPRPLVPCPVCSKNSPVCARWPLGPVCKPCYALARREPGPCPCCSTVSVLIARVDGQRACGPCAGHPDPYVCPRCGGPSSPVTGDSCDRCAVRYHLEALLHGLPPEKRPLN

SEQ ID NO: 2788 - protein, 189 aa, synthetic construct; identical to SEQ ID NO: 2787
  REGION 1..189: note = TnsF-Tn7 System Protein

SEQ ID NO: 2789 - protein, 255 aa, synthetic construct
  REGION 1..255: note = TnsF-Tn7 System Protein
MSNRCDLCLEIKNTVRPSKFSVFELCFDCRQREKNEKENPLSQNQNVVLPEISLKQKIVNYRAKNGTMSFSKNYKRKKYCPKTIICNSCNKQKLFYGRDEQKNEFCRTCYRQKFSLIVCVICKQKKPLHIWLSEVDAICSTCYLREVYDHKKFKCSFCQGYYIIVKNLLDGRKMCRKCYNKKGNKKKCFGCNKIRSVRYRDPENMPYCHTCYQRIFIPKNYGKCGICRHQRRLKYRDFEQGKICSVCYRKKNKSV

SEQ ID NO: 2790 - protein, 205 aa, synthetic construct
  REGION 1..205: note = TnsF-Tn7 System Protein
MAARDPRAVVRWLRRSPIGKTLRAMATGEVQISHDTLDALPLSPRVRYLRHMLISAETLPTIDVRLNDLEILAEHLVNDLPSHHAQIINQYFRWQVLRQTRQRRAQKPLTVGMFNARWSALRKIASFLVWLDDQGVQMGTLDQRSVDRFFTHHRSQGAVATFLNWAIRQKLTRPLMPPHRPQARPAPSVPEDTIWRKVDELLDDT

SEQ ID NO: 2791 - protein, 205 aa, synthetic construct; identical to SEQ ID NO: 2790
  REGION 1..205: note = TnsF-Tn7 System Protein

SEQ ID NO: 2792 - protein, 348 aa, synthetic construct
  REGION 1..348: note = TnsF-Tn7 System Protein
MFEAMLSGWADQQISRGLTERTIGGRELVVRRFEEFVGRYPWEWSPGDLEDFTTRAKSGQSPATPSTIRGYHSIIRLFCDYLTDPRYRWAADCEERFGTAPQQICHEWNTLAHLVDYEGRPQRRALTYDELEQLFAVADHRVETILRQGRKGALAALRDSQIFKTIYAYGLRRAEAVGLDVADLRPNGAAPRFGRFGAVDVRWGKGSHGSGPRRRSVLTLPELDWITEGLAQWVDQARSRFTADLSGPLWPTERGTRVSLRYIDLRFAQLRDEAGLPPELSVHALRHTYVTNLIEWGYAEKFVQDQVGHAYASTTAIYTSVGDDFKNRMINQALSRIYGGPDADDSRL

SEQ ID NO: 2793 - protein, 116 aa, synthetic construct
  REGION 1..116: note = TnsF-Tn7 System Protein
MPTTPDSDIPITWNLRPMMAAAGMFQTTDLIAPLRAQGVQLSREQVFRLVTKTPERLNVEVFAALCRILECTPNDLIEIPKVQSVRPRRVAGAPEASGPAIGELRPIPAKLHRPHE

SEQ ID NO: 2794 - protein, 381 aa, synthetic construct
  REGION 1..381: note = TnsF-Tn7 System Protein
MGVEGLADDDEHVRVVGALLAGCVDLGEGLVGPVSGEEELGVVAVDAACDVAAVFEGGAEEFLGGFVVAGGGVVFGALPTDQNERLAAGRRARRVEAVPQPLRPAVASFCEAMLAARARARCAGTRPRSDNTIEHALATVRDFATLLISRGNTDWSLVDVTDVEAFLSDPPKSRKRRLGVLRQFFAHARDRRLVMIDPTRGLSAKEPRGFRGHALTIGQQRDLFRRWTRDVQAHPHECLVGMLALLHGASSQEGRLLTLDRIDTAGHNVRLGERPLPVPLDPASWQVLQKALEHRAEQRTDNPHVIVTRDTKAGRSPASAAYLSHVLDGCGIAPRTIRNTRLLELVNTMDPKLVAAAFGMDPQGVMLYLSDRVDDARLADL

SEQ ID NO: 2795 - protein, 387 aa, synthetic construct
  REGION 1..387: note = TnsF-Tn7 System Protein
MKERRCQDDDVQHVWTVGASCLFQEERPGPQELDTGSEDHSIWVERQAAVQATFVQKILVDLDGDASRIGAAAERCRTHVTEHGSASEMGSAYARAASLCVRALDLLKESGADTDTHIRDLILAHCRHDATIAFLGGATGIRELAAERLRADLEVLNEQAISSLRLLPETLNYPGPSYDPETGLFETGTDADGNRISWRLHQPGGGVEHGVIVGPAGSGKSNLVSILIVEALHSLRFLLLLADPSGRGQLPGPFAKVAYQGAGDAPGTLKLLRGALAIVRHRAKASGQVEPTPERAGLLLVIEECQHVFTPYAEATRIAETIINKGAAAGVALVVTAPSSNLEHFGSSELLRAGLARGNSAVMGGPDMLGQSLTLQNAAAAGPGQHR

SEQ ID NO: 2796 - protein, 387 aa, synthetic construct; identical to SEQ ID NO: 2795
  REGION 1..387: note = TnsF-Tn7 System Protein

SEQ ID NO: 2797 - protein, 1062 aa, synthetic construct
  REGION 1..1062: note = TnsF-Tn7 System Protein
MTGDGELQDPRIDGIPEDLRNAGPRSRAGFTYQDECAALALLGHLGHRDLEGIVVERSTDLILLPREPARPELVSVKHREANQSSDSRWGWSDLKKERVLADLHAKWNAAGRSCTVAFWSNAGFSDATHELWLSCTKQRTASPKLIARIQEHIGESNPDEALEFLAALRLPLEPLPRRAEITDVGIRRTVDLLKEHRPRSAEAAPRCYERLLTLLHYASNESRSPLQPVAAAGATLAAAHEFRAAMRSRKTYLARETIVRELVATCDRLEAQLLPDVGWHMWEEDDQFTGRDEYVLRLDALLEPGNPVPVSPVVIHGVTGSGKTSLATHYAASRAASFRPIFINGATRAGVIRSLVQLAGGGDNDAWNDELARAAGPVTAKLPGNCATLIVIDGVDDVTLLRGIVSRKSLCRVLITTTRGHLDQGYEHVELGPWSIGDASRFVESVLPASLPDLRDRLVRVLGGHPLALTQAVNYCQATRRPIEHFLRKLTTKPLDALGLGSASGHPEPVVQSVALNIEAAREREPAAFELLGLLAYMSADPFDETLLGSHGGHAYVYVASDGLEPTEPSASATAIRRAVRDEDALEEAANTLVGMSLAERRDTGLVVHPLVALITRGLGGDPQPWLEVGLAPFIDLLNKDAAELDERAERHLSHALRLAEHAMSAGLFGPAVALTCINLAQYLSIHGSWGAGLVGISGTPSQFTDRVTRVFWDRALAGQLQWQLAFQLRIIHACVLYRDNLKQDAEDVLFDVINEAGLRGDANAHLRALLTVSSLVITADPARRSELVLMQLERIPEALATQSPWTIASIAHIKTEALIRLGRIEEAEAVNRDALARARNADIPEATRAELHSDAVSLARYAGNAQALLEQAKAVYEIRKRNSHDRPNWLLIDGLQQYADAAIDAQEFQLAEQRITEAEELTREYFTTDCAQYAKVLGIRGRLHLVTLRLTAAEADLSRAATILRGGSEEDEQHLPAVLVHLALVTASSGRRPEALELIDEAIALDTYIYGEQHPETQFDIEVREIIQRGASIDPPALWSTTPSAQGLSWVFQRLTRPVEG

SEQ ID NO: 2798 - protein, 1062 aa, synthetic construct; identical to SEQ ID NO: 2797
  REGION 1..1062: note = TnsF-Tn7 System Protein

SEQ ID NO: 2799 - protein, 1203 aa, synthetic construct
  REGION 1..1203: note = TnsF-Tn7 System Protein
MFGCFTGQVLNLSGSGVHLVVGPNEAGKSTIRHAIAELLYGIDERTSYDFVHQYSDLRIAARLRAADGSVTAAVRHKRRNNPLTTPDGSPLDQRILTALTSGMERSEFTESFAIDHAALRRGGEALLAGQGNVSRALFESQSGMRLTGVLASLDKAIEDLFKARGKNPKLNAGIVRHREARARFRDATLKPEKYDAKAAEVAHARKQRDRIEEELKRARQEFSRLERVQRALPVLRRLEDAEAARVRLLEAGPLVGAEIGKTLADLRGGRQQAEETASAAAARRDRIAAQLADPALVYDARLLDQAEAIETLFDERQAVQEEEGRAALRRADALALRGEIDALLSAVRVSANLDTADIADDVVLRPGLAEQVAGLQEARTRLEAALEAAERQARKRREAHAKALNAVPADTGESGVSAENLKILIKAVPAGLGDRIADQRKQLAASRKKAEGHAARHGLPSGVETATLPGPEQVADHRARLEAAADDAGRVRQRIEDLTSTLDANRRKHAALLAVDPPPTEGLLETSRQQRDRLWADIAAALTQSPMTPLKAGASAEYAAAVAAADDIADRMRRDSQRVAERLQLEIDIDADQRLLARAETAAGQQAEERAAIEERWALLWAASGLAVPEPSAAPAVLAAVDNLRSLYEEIDEDLAALDLDVAAAVRWAGKIRAALPGTPLAADDVPVEADLGELLVLLEQRHETTLAALRAREKREGKIADAHAELASADQDLADCRARRDGWDRGWERFLADNQLTGDPAGVSATIAAYDEIARKRAEADEAEHTVRAADERVQAFTDNLVGVLDACGRPALADRARRYADVASLRKALIEHRALADRQSDLAARLAQADEEFAEADGSRLGFERALAALIAESGVDDEEALGRAVERTAAVDGLDGRIGTDVSTLADFTSVPLPTLRVEAAEWEDDPDRLRAWIIDAQASVDHHDAELKSQIKALAELEVDLNAMDGSGRAAEASETAAEELAAVVEDSEDYLRLHVARSILVQCMEDYREANQHPVLTRAQQVFGWLTGGRFREFVTDTDAKGAMVFRARRADGTDVEVAALSEGTRDQLYLALRLASLDRYAEAGRAMPLLLDDVFMTFDDIRTEAGLAVLDEMADRFQVIMFTHHQHLVDLAASVLPMGRCHVHELSVFVPRPRVQAEPESGSRRDAGERLCRDCGGPLPAPVGRGRPAVRCDECRG

SEQ ID NO: 2800 - protein, 1203 aa, synthetic construct; identical to SEQ ID NO: 2799
  REGION 1..1203: note = TnsF-Tn7 System Protein

SEQ ID NO: 2801 - protein, 553 aa, synthetic construct
  REGION 1..553: note = TnsF-Tn7 System Protein
MPQVDFCFACWPGGPVIPPPCLRCGSRHGYFAAGLCARCHPYATPPVESCRDCYAWGVTRLHSWRCHGCNTWRAKYETVGDCLTCGREVALGAEGVCRLCRKQATLVRTGRDKLDVIAANRNGQQLFLANMFSDGSRFQPRPPSVEPHQPLRPPVQHQQLLLFPTQRNLAACGRAAMPAPPDQALADSLDRHTRAYAAARRWGKKHTDEARWGVRILLGLQDTPGAPINATDVLQLRAAGLRTWTVLEVLADVGLLIDDRPSAIDTWFHSQITGLPQQMTTELLTWFEVMRHGRSTSPRRRPRSETTIRLHTRWALPALCAWTANGRTTLREITKDDVLDALPASGNARSTAGQGLKSIFRVLKEHKVLFADPTRRVKTGEHEARQPVPVDLNAIRQALNSSNVARAAVVALIAFHGLRPGHIRRMRTTDLRDGRLHIDGRIIVLAEPVLIRLKRWLDYRDTRWPNTLNDHFFLHYRTACRPDAAVGQRWIWLVTGEGLSGTAIREDRILNEAHATDGDVRRLVDLFGLSVQASTRYTATVDHRDLVKHADQK

SEQ ID NO: 2802 - protein, 362 aa, synthetic construct
  REGION 1..362: note = TnsF-Tn7 System Protein
MALAVVRSIDSPRRLRTAAELEDFEQELVDQYALASAASGITDGQIRKERYVLFEFVRFLGEPVWMCQPGDADRYLVHLRKDRGLAASTVADKALVLAQFFDFLLTRYQGDIHALTGQVLVQPIDEYNRPPKPYTANARVPPSDGDVDTLFGAWREALPHARKYLPAARDYVAASLWRRAGLRITETAMLDIRDWRPDLGELGKLHVRFGKGSHRRGPKARMVPGINAVSELLQWWLVDVRHQYGHDWEDPHAPLLPSERRDPVNGRCERIGANALRNGLAAAVGRWLPRWQSRLTPHVLRHYCASSMYARGVDLKAIQELLGHSWLQTTTGYIHVHDQHIEHAWVKANERVAARLSETTGG

SEQ ID NO: 2803 - protein, 106 aa, synthetic construct
  REGION 1..106: note = TnsF-Tn7 System Protein
MRWNLRMKAAERGIWKSTELRRMLADAGLDVSAGKMSALWTGTPTTIRLDDLELICAVLDCTPTDLLICEADKVAARRPVKAAVASGEAATPIAPRLGRTRSAPPV

SEQ ID NO: 2804 - protein, 510 aa, synthetic construct
  REGION 1..510: note = TnsF-Tn7 System Protein
MRFEPVSSDPRRQPPGATSTAPPLPPVNGRHHQPVQAPVPVSAPPSPPPRPKVDFQVVRELRRQLSERLTRWQRGREFSVAEEDTERARLAVELVAEYADAVRRAGTPMAAGAERLLLDQVTAELAGLGRLQTLLVDDTIEEVHILGCDQVRITRHGGGVDWVDPIADSDDELVEILQAAARRAGATERSLSTSKPTLDLQLPDGSRLAAVFLVSHRPYAVIRKHNTLDVTLDDLAGGRGDLDEMIDPLLRDFLRASMRAGLNVMVAGLAGAGKTTVIRAMMNEIPPDEPYVLLEESRELLPARRGDRHRAVMSFEAREGHGERGPDGRPAGEVSIADLIPVSLRMGVLRIIVGEVRSREIVPMLQAMTTSRGSMCTIHARTPAGVGERIVELALSHGREMTVDQARRMAGNALDLIVYVTVDDETGIGGRKHRFVSHVEEVLGVGESSRITTTQVFGPGRDGRAVPRHLPERVRDQLLRVGYDARLLSRWIEAGQGAWRRPRQTRLGRR

SEQ ID NO: 2805 - protein, 510 aa, synthetic construct; identical to SEQ ID NO: 2804
  REGION 1..510: note = TnsF-Tn7 System Protein

SEQ ID NO: 2806 - protein, 480 aa, synthetic construct
  REGION 1..480: note = TnsF-Tn7 System Protein
MPQCDECGDAVEKIHRLYKQRNYCHKCYVRVFKKQDCPSCGKSSRLYKADNLAVCQQCETNRPCIRCQRIDYPIGKITEQGPVCNSCSVYFREFQACERCGVTSQRLSRISRFGDNLRVCPKCATRDYQTCQSCRRYRLIEQDVVSGKMLCKKCLTCPPLQCLTCQQQIPAGYGKYCELCTWRRILGNRIKELVNTLVNPSLKGYFKDYMNWLDHEVGPHKAALLIRKHIHFFEKTSDLWGDQIPDNDSLLHRLRTSGLRKYELPIRWLVAVHHLHIDTQSKGHCSEFDQLRKLANSCPGSSLSAQILQNYYQVLINKMDLGKTSIRSARLAMKPASALMLLVSQSRLDLPTMWHVKYYLFKSPGQACAIVGFLNFLNKNYDTNLDTSWVLDEKITEKSNMKKLEKQLLAIMKAPEENFNELEWIKLGLMYFHNLDKSFFNQMDSINYRGLNDGFEVRFGDQQYWIDPRQYRGQPAPLNF

SEQ ID NO: 2807 - protein, 480 aa, synthetic construct; identical to SEQ ID NO: 2806
  REGION 1..480: note = TnsF-Tn7 System Protein

SEQ ID NO: 2808 - protein, 231 aa, synthetic construct
  REGION 1..231: note = TnsF-Tn7 System Protein
MNNQSCDTVNIVPARRKIGNTRISVSGLYPFKKDSAVAFESTLERDFLIRLEVDPNVLAVESQPFTIEYFDNGQKRVYTPDYLVTYKHDDFLPFIAPKLVEVKPTDELQLNLHLWKARYRAAMRVCKEEGWKFHIAHEGRIRDQLWSNAMFLQKYRKMEFPPADSKHLLDYVRDREVVTFETLLARHFLGKWDRANGISQIWYLVAHGYLVCDLSAPLQPSTELWVSGSLS

SEQ ID NO: 2809 - protein, 629 aa, synthetic construct
  REGION 1..629: note = TnsF-Tn7 System Protein
MNDRRVNIKIAAGEPVQIKGIPHTIIEVIDLKSVFVENNNTGRKNIAAISELRPSIAVEQHEDLELIADKDWIEAERRFNIIRPFIEGGVSGRKEVELRAQEHDINPATIYRWLKIYKAYGTIDGLRPRKEGLPQGKKIINKHAEAIIEKAIKDLYLTNQRISVQKVVLEVKRLCHEYHILEVPHANTVRNRIAAISQRDSLRKRGHKEKADNKFTPAAGKFPHADYPLAVVQIDHTPVDLILVDDFSRCPIGRPFLTLAIDVRSRVVVGYYLSLDAPSVMSIAMSVSQAVLPKEKWLASRKIQAEWPVWGIMNTIHVDNGPEFHSETFRNACMAHDIRLEYRPVKKPRFGGHIERLMGTFATDIHAVPGTTFSNIFERKGYNSDAEAVFTFSEFEDWLIDFICNVYHKRKHSALGTSPLHAFELGIFGDKNTLGSGAARLPANDHNFFLDFLPSFERTIQTTGVTIDGLAYYADVLRGWINAVDPDNQKEKRKFIFRRDPRNISEIWFFDPEIKNYFKVPLADQSIPPFSIWEHKKIQELKKETGEYLKDHELGQALAKLRERVQEASTKTRRARRSHQRSTQHQQSVNPASIQGKKPQQESTILEQQLENVYGLLPLDELENDEDIS

SEQ ID NO: 2810 - protein, 386 aa, synthetic construct
  REGION 1..386: note = TnsF-Tn7 System Protein
MAKRFSPEFKQQAIDYALSNSHESVAAIAQKLGVGYSTLDKWIRETNPAGSSKRQLSPEQQRIVELEKEVKQLKEANDNLKKSACVLSNRSCQEKYTVIQDLDMNEVTVSSACKYLCVSTSGYYAWRKRQANTAQKYNDLKAVYWQHHARLGAPSLVHDMHDLGYNMSERTIGRMLKKLGLRSRIARKYKHTTDSTHRLPTAPNLLDRQFTVTQPNKVWTTDITYIRTKEGWLYLCVMLDLFSRRIVGWQTSHRIDRQLVCDTFNYAMARQGYPTGVMVHSDQGSQYCSRDFRALLLKNDCTQSMSRRGNCWDNAVTESFFHTLKGHVVHGSVFSTRKEANAVLFDYIEIYYNRVRRHSANGWLSPEAFEQKYIKSLEGLVVHDTV

SEQ ID NO: 2811 - protein, 363 aa, synthetic construct
  REGION 1..363: note = TnsF-Tn7 System Protein
MISATEIHSWFIPTDLKQDEALSSWLIRAALDSGCDPLSLTGVLWPKWRIWSVDVDRGLSAEQVQVLINTTKIDESQFNSATLRNFLIKYNLDNQTLDAWYLVLGTRNRKHRGGWQYCPECLSEDNVAYFRLPWRFAWHTGCIKHNQHLHDQCPHCHNAIQPRRLEAPDQVMTCCSICKKSLLEVNKSLVDCHALAFQKIFDQFLEQGCATYQDKLISVTDWLTVIKLFSQFIRKALAGSVNGKGWAFLEQLRIQVPHPELISNGLAVNQLPVTERERLFSCIYQLLIIPQEKFIETAKSLNMNRSSFWDKRNQLPAILRPVEEQLGSIYRNYPPKRALVATFKPKSKETVIRKFLRLKRKLG

SEQ ID NO: 2812 - protein, 283 aa, synthetic construct
  REGION 1..283: note = TnsF-Tn7 System Protein
MSNYSHVFQEFRPIVEQSNEDRLYFLEEDRWIGYPAANDLLDQLKGFLTLPKRSRMPNLLVLSKPNNGKTSIINQFFKLYGEGYVNAENNAVKPVIIVQAPVSPDEKALYMAILDKFWVPFRERDPVAKLRYQVVHCLKLYEVKLLIIDEMNSLLCGSPIKQRTVMNAIKYLCNETQIPIVGFGTEEAISVLRTDPQHVSRFRVVNLPLWKLDKDFQAMVNKFEKVLPLKQASKLAEPATVKYLHDITDGNLGNLRTILRDAAKKAVVSGQEFIDRSLLESVK

SEQ ID NO: 2813 - protein, 283 aa, synthetic construct; identical to SEQ ID NO: 2812
  REGION 1..283: note = TnsF-Tn7 System Protein

SEQ ID NO: 2814 - protein, 472 aa, synthetic construct
  REGION 1..472: note = TnsF-Tn7 System Protein
MNAERTRTCDECGRPMQRAFRRRKGVAYCPACYARVFKRRMCPRCGNFARLPKKEPEAVCRRCENAKPCLRCRKTEYEVGKITPYGPVCKACSVYFREPEPCEACGRPSSRLTRVRRLGHGLRLCPKCARADHGTCPACRRHRLLSAGPDGRLLCRVCREKGEIPCPSCGKPMPAGRGKVCETCYWTDTCRKRIRLDRAAFSTAGMEKDFGEFGEWLIGDKGPHKAALTVHRYLSFFLEIEREWKNVPPYRELLAHFGAEGLRRARIPMRWLREAKGVKVDAAAREEDSERRRIEGIVGTFGQGTEAHRILVDYAGKLMQRVEEGKTSLRSVRLALTPAAALLRRAAQKGGGLPDQTLLDRYLLDAPGQKAAATGFANFLRKTRSLKLSVRTDAKKAKEAQRRTLKKKIVAMARHPEEGEDFIRRWIAAGLEYFHSVKFNRKALEAVSAKVDEGGLRVVAGGRTYWLPNWRE

SEQ ID NO: 2815 - protein, 472 aa, synthetic construct; identical to SEQ ID NO: 2814
  REGION 1..472: note = TnsF-Tn7 System Protein

SEQ ID NO: 2816 - protein, 236 aa, synthetic construct
  REGION 1..236: note = TnsF-Tn7 System Protein
MQRNPKMDSNGCNAVRPVQARRIGPARRSVAGIYAFRGKKAIPYESTLERDFLIRCEFSLAVVDAIPQPVQIPFVSGGRSYVYTPDFLIYYQCVGQISPGGPRPSLIEVKPEGEWRKHWRRWLPKWKAAYRYARGQGWEFRIHDESRIRDQTLRNIRFLERYKRMRFPPKESCLVLEGVREAGGAAFRDVLARQFPRLSRVEGAARIWHLLATRQLDCDIGRPLGDFTELWVPGDE

SEQ ID NO: 2817 - protein, 637 aa, synthetic construct
  REGION 1..637: note = TnsF-Tn7 System Protein
MSDENKSGVPSRGIPSDRRNICLREGEFVQVENAVYQIEKVLDFKSVVGVDVKSGRSSLLRVGELRPMDSGPMPPVPDLLEIMEEEWRIAQERFNAIRPFVDCHRIGRSEVENRAKDLGVDPVTIYRWLRRYRAQGRLTALIPMKSGWRRGRSRIPKDADGVIQEVIRDFYLSPQRPTAQKTVDEVRRRCWERGVSPPSPSTVRARIAGIPERERLRRRGFRERARNKFRPAAGSFPNADFPLSVVQIDHTPADIALVDDLYRKPIGRPWITLAVDVFSRVVTGYYLSFDPPSETSVALCVAHSILPKEEWLLAHGVKSSWPVWGYPKTIHVDNGADFRSDDFKNACLDNGINLEFRPVKRPNFGGHIERLFGTLLEEIHHLPGTTFSSVAERDEHDPEKTAAMTKTEFEEWLVRIICEVYHQRIHSEIGMTPLRKWEIGIFGTGGVPGIGVPLRPADPMKLLLDFLPSFRRTVQAFGVSIDGLTYYAEVLRPWINATDPMTKRKREFIFRRDPRDISVIWFRDPEIKQYCKVPFADQSRPPLSLWEYREVRQELRKEGIRSANEHQIFRALTELREKVAESQEKTKRARRQAQRRREHERKASPAAAVDPPVKTTTEALLGGLLSDENIEPFEDIA

SEQ ID NO: 2818 - protein, 233 aa, synthetic construct
  REGION 1..233: note = TnsF-Tn7 System Protein
MIAKNDRGPRLLPGEVSLAHHGVLFLDELPEFGRNALEALRQPLEDGRLTLSRAAGTVTFPASFMLVAAMNPSPTGGFDDAARGKCTPAAMRRYLNRISGPLLDRIDLHVEVPAVDRQLLLQSESAESSAAIRSRVEQARASQAQRLASGRRKIHNNARMGPREIARFCILSPACGNFLATALSELGLSARAFHRILKVARTIADLAGRGELREEDLAEAIGFRSLDRRIWGE

SEQ ID NO: 2819 - protein, 362 aa, synthetic construct
  REGION 1..362: note = TnsF-Tn7 System Protein
MIRPWGFPIPLLPDELFSSWLVRAALVQGCDPLVLTGSVWPRWRVWTGDPDRGIAADRLAALARASGIAATVFEAATLRTIASAPAGGFPDGKAVWPWVLAAGSRNRRRRGGLQYCPACLAEDKKPYYRLRWRLAWHTACLRHGRILRDCCPHCGGTVEPHRLSAEDRHLALCARCKGDLRKADEAQADGDALAFQSAADEAVQRREGIYGQERISCEEWFALSRYFVGLLRRAAMGKSDILNEMLRAFDIDAGDLEAPATGLVLELLLTRERAALLGRVRRMLGAGPEAFGRAAKKAGASVQTLCEMRQKLPHCLEKAVAGLPDRSPERLRRKRAATGRPRSRRSVARMWARMRRAMLADS

SEQ ID NO: 2820 - protein, 296 aa, synthetic construct
  REGION 1..296: note = TnsF-Tn7 System Protein
MTNAEHIHPDLRHVLGLPDKERIAFMREPRWVGYERAVRILDTLRDLMNQPPRPRMQSLLIVGEPNNGKTTIIRRFQDLFGRGYVNEDADPVKPVVVAEAPPSADEKGLYISILECFHPSYRASAPAAKLRYQTTTWLQSCHVRIIVIDEFHSLLTGSSREQRKAMNAIKFICNVAAVPIIGVGTREAVRVLHTDEQHASRFDVATLPLWELNKDFQRLLASFEKILPLRKPSGLHRQELAIPLHAISDGNLGNLHRLLTECAAEAIKSGKEQIDKQIIESKAWVRPTKGIREIAA

SEQ ID NO: 2821 - protein, 296 aa, synthetic construct; identical to SEQ ID NO: 2820
  REGION 1..296: note = TnsF-Tn7 System Protein

SEQ ID NO: 2822 - protein, 476 aa, synthetic construct
  REGION 1..476: note = TnsF-Tn7 System Protein
MINIKKAKHRCDSCGNKDVEIKRRYKNDTYCANCYRIWFIRKPCSQCGEINRLHKKEAFAVCRACRMNQPCTRCGGEAVKDGANTEYGRVCQTCYQGYFKTKKQCFECGKFERGVCSYSKLSHDHGVCVSCYQSHFRETCPLCHKYRELVTTDTGVMCRKCHEFGEIPCKSCHKLMPAGMGKKCDSCYWSQRLKHEAEINTYLLTDGVMRQAYTAFTIWFEAELDSKTAALKHHNYIDFFVRCDGLWGVIPDYESLVNEFKPNGLRKYLTALRWLIKTKQVVVDPKIKNQIVEEERIVSLLAKLDGDAPRCISEYHTYLEQKLLNGKTSLKSVRLALQPAIDLCTQFRLEGSNTPNQEQIDGYLLIKQGQRNALYGFVMFLNKKCGSSLVCVKPSRDAVLKANRSEIERQLMALNNQSKPLSDKDQLIWLQLGMAYFHNTQISLKTLATITIKHGGDEMNILTYKKQDYWIPKYIA

SEQ ID NO: 2823 - protein, 215 aa, synthetic construct
  REGION 1..215: note = TnsF-Tn7 System Protein
MFKHQTRKIKPTRRSVSGVISYKKKPLAYESTLERDFIIYHAFREDVKNITPQPVKIPFTKNGRTYHYTPDYYVELDAKLGKSFIAEVKPKSEWKLNWRDWSDKWKAAKRYCKEKGVRFIIFDEDRIRHEALENINFLRAYESLSVSKEEIEVILADIEQRGITTVDYILARYFKSALYRPDGHALVWHLMANKQIGFDVWSDVRDLQMEVWHVE

SEQ ID NO: 2824 - protein, 671 aa, synthetic construct
  REGION 1..671: note = TnsF-Tn7 System Protein
MLNNEVVTKPIGLRMSTHFDTSSPYSRDHIQMVLGGIYRNKSDDDEYQLIEYLDDLNQAVFKNLKTLSNQVLSIHDFDNVTDGANTSFVIDLNDIGDDEWQEAQKKYLAITPLILEDDWYGEDHYRGEQGYIRRAEEVGVSTRTLRRWVDSYQSTGSIGSLIDQKRGWRKGAKRLDDNIENIIGDVINDFYLTVQRPNVQATIREIFRRCHLEGIDKPSKNTIRNRISEIKEKDLLRGRGQRKRAKQKFTPKAGQFPDAKYPLSVIQIDHTPVDLILVDDKHRKPIGRPFITVAIDVYSRMVTGYYISLDAPSVTSVSMCISRSILPKDELLLEFGLSDVKWNVFGVPKKIHVDNGSDFRAQSLQKSCAFHGINLEFRPVARPEYGGHIERLIGTMMKRVHELPGTTFSNIKEKDEYNSEKHASLTLHEFETWFLTYVTMDYHESIHSSIDRSPKEQWRIGIYGDGFESGVGLPSIPSDPHTLVLDFMPSIDRTIQRNGATIDGLQYYDACLNNFINHTDDNGNKTKFIFRQDPRDITRIWFYDPELLQYFPVPLANQVLPPISLWEYKSIYKQVKQESGTVNEALIYQALQDMQTLVDESKSATKKMRRSEQRKKAHIKSQVMYEQLKTDESEEVVVLNDLPESTRVLSKSVNLDESDDNDDDLYFEDID

SEQ ID NO: 2825 - protein, 385 aa, synthetic construct
  REGION 1..385: note = TnsF-Tn7 System Protein
MFKTNQGATQNYWVKPLTFATPFLYGESLTSWLVRAALKHGCSPLTFTYYYWPQYRIWTYDADKGFNHFDEQIISDIAVLTGHNVDTFDDQILIDFSKDTSVVLDKKTPLQWTAPLSKRNRYSRLGYPYCPDCMEDDKEAYLKLQWRFTWSVCCAKHKTFLQVDCGHCNQPYQPQLLSPEQQFINRCHACYDKLDQAISGIKPSETLYEFQKLADQAFFSKQGIVLGQVVSMCQWFEYLLFLINLIRRGLKNPNYMFGKLIAALGIDTTTLSLPKTALRFDYLPVDERTVLLECAYHLLQVDTDNWIKVCLDLDITQNSFQWSKSTITPKAFSDVYDQLHRVPTRRYEVQSEDIKPASPEVVMASWNRLKRKMQMRENYDKHKKS

SEQ ID NO: 2826 - protein, 476 aa, synthetic construct; identical to SEQ ID NO: 2822
  REGION 1..476: note = TnsF-Tn7 System Protein

SEQ ID NO: 2827 - protein, 297 aa, synthetic construct
  REGION 1..297: note = TnsF-Tn7 System Protein
MSESLYTHIHEKFRHIAHLPDKQRIEFIYSPRWVGYSTANEIIDVMQGLMNHVKQHRMPNLLLIGDSNNGKTTIINRFYDKFGDNYTADEELIIPLIKIQAPPTASEKDLYISIIEAFQLPYRPTDAASKLRYQVVNAFRHTNVKMLIIDEVHSMLTGTARQQRAIMNVIKFLCNELLMPIVLCGTKDAIRILHTDPQHASRFDVAELSLWRNDKEFKRLVGSFEKILPLKRPSKLIETEKVNLIYSISTGNLGDVKRLINDCAISAIESGEEEITVENIRGKSCLKPTKGLRKIIG

SEQ ID NO: 2828 - protein, 297 aa, synthetic construct; identical to SEQ ID NO: 2827
  REGION 1..297: note = TnsF-Tn7 System Protein

SEQ ID NO: 2829 - protein, 489 aa, synthetic construct
  REGION 1..489: note = TnsF-Tn7 System Protein
MIPSLSLGQFCDQCAQDMQKAQRLYRGKRYCSHCYFKLFRPRQCPQCDQTARLLITDLTSVCSACEKSMPCTRCGKINYAVGKMTAYGPVCNGCAIYFRIPSTANHAARPAQELAVSTTGSNTSYATCRSCRRHRRIASQIDGFPLCKACSENGFIPCPCCGSEMPAGRGERCETCYWSATFFKRLAIDKAGISSSGMESIFHAFGDWLLQQVPAKKAAQSIHRYFLFFYEMDKRWGAVPSYDDLLRYFTAEGLRRVRLPMRWLSEAELVAVNAVSREQASENRRIEAIASLLQPGKATTAIFFAYKEALFSRKASDKTTLRTVRLLLQPAAALLDQCSSHGLLTPDQTSIDRYLAAVPGQRNNMSGFVSFLNSTYALCLRIDHGGKQAAARRAKKLEMDIIHLLSEDDRDDKFIRQWLSLTLAYFHGLPRKAGVELDQKKVLFFGAEGFNITVNTKEYWVPHWDTRAISDNLSHHDKTRLIKKETLIR

SEQ ID NO: 2830 - protein, 489 aa, synthetic construct; identical to SEQ ID NO: 2829
  REGION 1..489: note = TnsF-Tn7 System Protein

SEQ ID NO: 2831 - protein, 252 aa, synthetic construct
  REGION 1..252: note = TnsF-Tn7 System Protein
MRFSEIDAIEIRKIAATRLRIIDNRCDKTMLQQTRKIKPTRRSVSGVYPFRNDTSVPYESTLERDFLIRTEFFLDVLDVIAQPVQISFVGSNGNTYTYTPDYLVYYRLGTQSYNEYPRPLLVEVKPEAAWRENWRDWLPKWKAARRYAHIQGWQFHICDESRIRDSVFMSVNFLEQYKRMNFSNEESQCVIDSVQEMGSAPIHYLLARHFMGLYRAQGIAHIWHLIATRRLDCDVSKGLNEFSEVWIPTYVY

SEQ ID NO: 2832 - protein, 640 aa, synthetic construct
  REGION 1..640: note = TnsF-Tn7 System Protein
MSIEEYEPPNDAFEPVRERINVSVGALVQRETTIFRIVQVLDFETLIGIDVDTGKSAALRIGDLRVLSRAADYAPSAPQDLADIADEDWRIAQERLAAIKPLLEVSRIGRDIVEARARELNINAATLYRWLQRYKACGVISALIPQKRGWRPGNGRIDEDAEAVIEQVIREFYLTPQRPTAQKAITEVLRACQSKGIAAPSATAIRARISRIAEKTQLRGRGQKEKAKNKFLPAAGSFPNATFPLAVMQIDHTPADIILVDDVYRKPIGRPWITLAMDVHTRMVTGYYLSFDPPSETSVAMCVAHSMLPKEEWMLLHKVDAEWPVWGVPRTIYVDNGADFRSNNFKQSCLMYGIRLEFRPVKQPRYGGHIERMLGTLLREIHDLPGTTFSSIKERDGYDSEKHAALTKTEFEEWLVTLITKLYHRRLHSAIGLTPTRKWEIGIFGNAEVAGIGVPPRPADRLTILLDFLPFFRRTVQTFGVTIEGLTYYAEALRPWINAQDEETKKKKDLIFRRDPRDVSTIWFFDPKLEHYFKIPLADLALPSMSIWEYRQAKEQLKRAGIASVNEHQILGAITELRSRVDEASQKTKAARRQAQRRKEHAKNVSPAQPLAKPAAPPPPVAPHAAGLLDTEINDFGDIA

SEQ ID NO: 2833 - protein, 809 aa, synthetic construct
  REGION 1..809: note = TnsF-Tn7 System Protein
MTPRITSLIATDFRSLRGTVTIPMDSPIVLIHGRNGAGKTSLLTAMELGLTGHLASLSRLDPQLREHLVHKEAVSKTASVSIGVHGLGAEFPAGNFDIHGSEFTGKAALDPVLTKHFSERCYLAQSTLTRLLEFYEDKSTNGTELTRFVKELLGLDALDALIDGLHDAGDVRRLRGHAVSFWDMREQLPSLDDELSRLAKELTSAEGQAMQLTQSARERLIPHWPDVASLSAQAMLDLLKEQSHEPEQQRLTQLRRELNDTVSQSQKAVSAVAADRRSTIETAAVAADAALHSWLGTSGQRMTELFENLGGYFSDLPSPIQNRPEYARAYAHRAVSNEVARCQQVQAKDQTAQQQVSKLQTDRQGLATRLEDIDKQIVQHSREAGQFAQTLSALVPHMHTEECPVCSRDFREVSSSPLLGHLTARIASLTQSAGLLSALSQERANTGSAVAARDREIGVAQAQVHTAEVRTEYEQRLATLEQALQDLASLEGEAKAGETLFGQAANAAQALASIRAVDQQSTAIRDTAGRYATVLSVDPIGDSESLQAALQRFLAEVTARLELLTAKESARRDGQAALRELLLKQQNIEAIKARQLERRTTRQGLQAAKEAGERTIEQARELLKLAQLERSRVVGQVFNDSLNAAWRDLFVRLAPDEPFIPAFALPQTTKGGVEARLETLYRDGSKGGNPRAMLSAGNLNTAALTLFFALHLSMKPQLPWLIIDDPVQSMDEVHISQFAALLRTLSKQHGRQVIIAVHEKPLFDYLCLELSPAFDGDRLITVELGRTANGESVANTTVRDWKQDLAIAA

SEQ ID NO: 2834 - protein, 809 aa, synthetic construct; identical to SEQ ID NO: 2833
  REGION 1..809: note = TnsF-Tn7 System Protein

SEQ ID NO: 2835 - protein, 217 aa, synthetic construct
  REGION 1..217: note = TnsF-Tn7 System Protein
MPRPGEISLAHCGVLFLDEIAEFQRRVLDVLRQPMESGVINISRAARQAEFPARFQLIAAMNPCPCGYLGHASGRCRCTPDAVLRYHSRLSGPLLDRIDLQIEVAAMAPTALGRHAGAGESTQAIATRVAAAFALQLARQGKANQRLSSTEIEQHCRLEAHGEQLLHGAMARLHWSARTYHRVLRVARSIADLEASPGITQPHVAEAIQYRRVLREI

SEQ ID NO: 2836 - protein, 374 aa, synthetic construct
  REGION 1..374: note = TnsF-Tn7 System Protein
MVTSHSRYSRTDWVTPSWPVPVRLETDELFSTWLIRVAFAQGCEPLVLTGALWPAWRAWTIDLDRRITLDRLSVLAKRTGEEVATLDAATLRPIAMAMGNGSDKAAILPWILALGSRNRRRCGGLQFCPICLQGDRFPYYRRHWRLAWHTACSRHGIELLDRCRQCGAILEPHRLSLSQAILSTCATCGNDLRTCSAALAGASLMAFQYSADDVIKCGYGKVHDTLLPAAEWFALSRYFLMLVRTATRFQSGKLAGWLTALGIDIAAMQPAATGLAFELLPPHERAVILPAVSKLLSTDPQRLLEFACALAVAAEAFQQGRQDLPFPMCDVVASLPLHHRRRRAKTSSQKNMPLPPISVLRKWARLQRKMGRIL

SEQ ID NO: 2837 - protein, 296 aa, synthetic construct
  REGION 1..296: note = TnsF-Tn7 System Protein
MSTYEHIHPDFRHVMALSAEERIEFLDQPRWIGYTVAQNILDTLQGLLHKPKRPRMPNLLIVGDSNNGKTTVIERFRHLCGVSYVNADSEPVKPVIVAEAPPSADEKGLYISILEQFFSPYRATDPTSKLRYQAIHLFRACHVRMLVIDEFHSLLTGSPVKQREVMNAIKLMCNELAIPIVGVGTREAVRVLHTDPQHASRFDVMTLPLWELNVDFQRLLAGFEKVLPLKTRSNIHSPDLASLFYTISEGNTGNLHRLLIACAQEAIRSGKEQIDRAIIEKKAWLRPTRGIRELIG

SEQ ID NO: 2838 - protein, 296 aa, synthetic construct; identical to SEQ ID NO: 2837
  REGION 1..296: note = TnsF-Tn7 System Protein

SEQ ID NO: 2839 - protein, 398 aa, synthetic construct
  REGION 1..398: note = TnsF-Tn7 System Protein
MGKITQYGPVCNCCSIYFREKKACESCGQLSNKLSHTNKNGLGLSLCPSCYSTAKGYQSCPCCGRYRSLQETENGLMCKKCAKLGNIPCSRCGQDMPAGFGKICQDCYWIGKLARRLNILKIDIRGKAWQQQFEIFTEWLAQDIGNDKAAMTLVRYLPFFVEASERWKEIPAYSEIMLHFKPKKMRQYLKVKQWMEANWHNDVDDSVRVDLAEQDRIKTFEARLEDFPKAKALFGSYQNVLMKKCESGKTKLKSVRLALQPTVGLLEKTGRLPIQTEVDAYLKEKPGQRAAITGFLNHLNKEYGLNLKAIAVVNKRQQQGRQKAAMERKLIAYMIKCREKPSAFKQRIWLKMAMPYFHKCALESRSRITQVGDMYRIEQSGQVYNVPCFYQKNRILDA

SEQ ID NO: 2840 - protein, 398 aa, synthetic construct; identical to SEQ ID NO: 2839
  REGION 1..398: note = TnsF-Tn7 System Protein

SEQ ID NO: 2841 - protein, 215 aa, synthetic construct
  REGION 1..215: note = TnsF-Tn7 System Protein
MIKQVRKINPTRRSVSGHYPFRGNESLPYESSLERDFIMLQEFNASVVRVVPQPVEIPFNLGTRKYKYTPDFLVLLNSNSCKGILVEVKPEIEWRKHWRKWLSKWKAAYRWAKEHDFIFHIYDENRIRGQVLQNIKMISSFKRGNLVPAHADAAVIRQFFSQNPRRISDYLYLLPNHEKSNQYRLILTMLANNILSADFNKPITSDSFIWVTENG

SEQ ID NO: 2842 - protein, 639 aa, synthetic construct
  REGION 1..639: note = TnsF-Tn7 System Protein
MDNKQIDEKSVSPIKKGRLSLEINDYVLHIPSGKEYRITKQIDFAQILGKDQSGRERVLLISDLAIPESDFVPCSSDLADIDDELWNEAARRHELLTPLLNGEIKGRFAIETYAREKGVGYATLYRWYKAFNAYNTLSALIPKQRGWHKGQSRLDPKIDNIIQEAIQQYYLSGQRLSQKKVIQQIHVICLQNGIKPPAENSIRKRINELSEKEVLNKRGYKEKARNKFQPKPKHFPNVSYPLDVIQIDHTQVDLILVDDKTRQPIGRPWLTLAIDVYSRMICGYYLSLDAPSETSVGLCVSYAVLPKESWLEAKKIGGKWEVWGLPNKIHVDNGSDFCSNTFRRACAEYGINLEFRPVRKPHYGGHIERLIGTMMEEVHQLPGTTFSNVKHKDNYDSEKNACLTIDEFETWLLKQIVHVYHKKIHSALGMSPETKWEEGIFGTDEAIGRGLPPIPSSPETLMLDFMPYAERTIQNTGVTWDGLRYFDFVLLPYIGLTDNGKARKFIFRRDPRDVSKIYFYQPDSKQYIPIHTADQSFPHMTLWELKNAKQRLRDRGRKKYNEYQVLETIKEMQQHLETAQAKTKKARRLQQSKTLYQRNTTPVEPAISPPTDNTQLIEQPLISEKPDDIVKPLSGDDIE

SEQ ID NO: 2843 - protein, 962 aa, synthetic construct
  REGION 1..962: note = TnsF-Tn7 System Protein
MNLDSKNKLSVISAKPTFWGKWFGSIKVITLRSDKIICTTKKNVCTEYELSNITDLPRIEHSFFGTKIIFRYNNNDIVFTKLSKIQTIALFDILIKQVKSNVQKILDKILNIFATYAEYQYLRDSNVAILEQDLNPFFSWYETQKAWFIEQFDSKLNERLNYISSFFPLSKANIKKIRKVYENHILQKRKHFFDVIESNSLTEQQRLAVIRNNDINMVLAAAGTGKTSVMVAKALDLIDSGAVQGNEILILAYNRAAAKELTQRLKERSEKAGILLSRQPFISTFHTLGRQIIKNCGYSVYLSKFEEDSKLVDIWLNQWIENYIRKSSKNLKTFLRFSFHPADPLEFQTQEEYECYIRDNEYRTLQGERVRGYQELLIANWLFLNNVPYKYEARYCSKRRIEIGIDYKPDFYLGNGIYLEHFGIDRKGRTRIGIDAKKYNENIIEKRNLHNECGTTLLETYHYNWTEQTLYSRLEELLKQQSIPLTPKTQEEIIDALKKLSVFERNQSRYSKCLKAIRTERLNHEQIVERLQKQKISHASEYATFLMEIHDAYVEELYKANEIDFDDMILQSERLINSGKFRPFWKHILVDEFQDISMARLELLRAIYSKGPHPVWTVVGDDWQSIYRFSGGKLEITTRFDSLIGKHSLTKLEKTYRYNNSIADTAGRFIMANPEQYKKNVETHTKVGFSCVHLHDNYYNGVRDVGAKTLQIFNEIRSIYPNSSIAILARYNYLLREARDKIKNKKNVHFWTFHGSKGLEADYCILLGFSQGKLGFPNQNREEAVVEALLPTLDPYPHSEERRLFYVALTRAKKECYIIADADSPSEFINELLSPEYDIDVMSEKFEKKNRDIFKCPNCSTGYFVKKNSSVSRNGQAKEFYTCSSWPLCGLSPRVCTKCGSPSVDEKTQSICQNPICGHTMPICDKCGRPMVLRQGKYGQFFGCSGYGIKGDSCSNIRKIKV

SEQ ID NO: 2844 - protein, 962 aa, synthetic construct; identical to SEQ ID NO: 2843
  REGION 1..962: note = TnsF-Tn7 System Protein

SEQ ID NO: 2845 - protein, 216 aa, synthetic construct
  REGION 1..216: note = TnsF-Tn7 System Protein
MGGSSGPGEISLSHNGILFLDELPEFDRKVLEVLREPLENGEIHISRASHKAVYPAKFQLVAAMNPCPCGYLGHPSKPCRCTPESIARYRGKISGPLLDRIDLTIEVPALSSAELMQQEPGESSAEVRRRVEDARERQYQRQGKINAALSVTELDNAAMVSKEAAETLGSLLEKLSLSARSYHRIMRVARTLADLKGDETVTKQHVLRAVSFRRAL

SEQ ID NO: 2846 - protein, 359 aa, synthetic construct
  REGION 1..359: note = TnsF-Tn7 System Protein
MMKKPLLRTPAILPDETLSSWLIRTALHHGCDTLTLIRYIGWPMRKWARDIDRYLPTEFLGRLSERTGIPINILDEMQLFHLSRIHTNVDLNPKKINWNWFTPSNVTRMSDGVRLIFCPHCFAEGTPYLRRHWRMSWATACTHHGIKMHHSCPECGMYFIPSKLIGLEKFISVCRHCGYDLKDMEGIPVDTDFQKTAESILINNEAVFDGKKVTPQEWFETARYFVSVIRDATNFPNGTLTHFLGDFGIHPVSTRCGGYFEHLFPDERHELLRSCAILMRQSTEDLLRVSTRYGLSYNTIYSAAGRSSTALLQPWLSHLAINSVNHCSPNKCPSKPTPESVVRRKWARLQRKMERQILS

SEQ ID NO: 2847 - protein, 293 aa, synthetic construct
  REGION 1..293: note = TnsF-Tn7 System Protein
MEKYEHIYPQFRPIMALSDSERIDFARTSRWIAHTQAKAILQQLEDLLTFPKRPRMPNLLLVGEPNNGKTTLINKFCSIHGEPYETEDMDLVIPIVKIEAPSTASEKALYMAILEKMVAPYRDSATAEVLYTQCLHLMRTYAVKMLVIDEFHSMFSGSARKQREMMNALKRLCNELQIPIVGVGTPSASDILYTDSQFRSRFDIIHLELWENNDEFREIVATFESCLPLKKPSKLSQKALSSQIHRMTKGNLGNLSNLLSACAVEAIRNHQETITAEMLANQERYISTERRIR

SEQ ID NO: 2848 - protein, 293 aa, synthetic construct; identical to SEQ ID NO: 2847
  REGION 1..293: note = TnsF-Tn7 System Protein

SEQ ID NO: 2849 - protein, 471 aa, synthetic construct
  REGION 1..471: note = TnsF-Tn7 System Protein
MARCDACGQDTPRFSRRYREEFFCSSCYAQLFRPKICPGCGRLARIYIADRSAVCRFCEASAPCIRCGRIGKPAGRLTRTGPLCSVCARATREPEICAGCGRVARCVCRSDIPDKPGYLCSRCARTQHETCQMCSRHRPILIQPDGRRLCRKCAELGTISCPQCGGKMPAGFGSRCQACYWSVRFSMRLEQQVPTLPDDNARTAYRRFCQWLSNRSGNRVAFIRMARYVEAFRKIRLADAPGISFTSLIIDTGPAALRRYPLLEEWLTGREHRLEVKRLKKTEAEQRRIHRMVNDVRCELAQQVYVSYLTVMQARYDAGYITIGSLRYAMGAASRLLALAARRGHVLPEQSDLNSYLRTSPGMRAQLSGITIFLNHNFATSLILPVKRSRAAMQRHRMEKYIRKMRHMMVSGRVPEMRTWLRLGLACFHHMTLNAAKALLSDAVISRTASGYVVRAAGEEYTIPFFRLTIP

SEQ ID NO: 2850 - protein, 471 aa, synthetic construct; identical to SEQ ID NO: 2849
  REGION 1..471: note = TnsF-Tn7 System Protein

SEQ ID NO: 2851 - protein, 231 aa, synthetic construct
  REGION 1..231: note = TnsF-Tn7 System Protein
MYRNNCYEDVPEQQRRIKPTRRSVSGVFSFRGHTPVAFESTLERDFLILTEFNLNVLDIIPQPAVIPFRTPDGRNVTYTPDFLVCYSLVDGSHKKYPRPRLVEVKPEEQWRTHWRDWLPKWKAAWRYAQEQGWAFHIHDESRIRNDALQNIRQLARYKNTWFEPADSERVLNVLREVGSASVDYLLSRMFLGMYRAEGIAHIWHLLATRKLNCDISQPLTMSTELWVVENE

SEQ ID NO: 2852 - protein, 661 aa, synthetic construct
  REGION 1..661: note = TnsF-Tn7 System Protein
MNSQQKNNAMNIQQEHYDGEAFEPRRALLSIEIGALVSHLNESYKIIEIIDFQAVVGVNLLTGRHASLRINELRALEGTQTVSDALSIDLDEITDEDWKTAQKRFEAIRPLIEHTPVSKALMEVRAQEYGVTPMTLYRWMKRYNSAGSVSALVPMKRGWASGKSRLSPEVENIIVEIIDSFFLKPQRPSARKTVLEVENRCKQLGIKPPNHTSVRRRIASLSEKTVLRGRGRAEKARNKFTPKPGSFPNADYPLAVVQIDHTEADVILVDDIYRKPIGRPWLTLAIDVCTRMITGYYISFDAPSQTSVAMCVAHSILPKEEWMMLHDVEADWPVWGKPSTIHVDNGPDFRSENFRHSCAEYGINLEFRPVKRPHYGAHIERLMGTVMGEVHNLPGTTFSSIVERMEYDSDKNAVLTMSEFEQWLVTYITKVYHQRLHMGIGLSPIKMWERGIFGNATEFGIGLPAKPADRLTTQLDFMPSFRRTVQTFGVTHESLKYYGEPLRPWINVKDRDTGQAWQHVFRYDPRDISTVWFFDPELKMYFRIPFANQSLPSMSLWEHRQVMQKLKAEGVKSVNESLLLTGLTEMRQIVDEASSRSRKARRQQQRRKVHQSGITPATPGAVSEKVTSSPTPLCEQEDTRRSLPFADDLITGDIELPGDIA

SEQ ID NO: 2853 - protein, 156 aa, synthetic construct
  REGION 1..156: note = TnsF-Tn7 System Protein
MKTQRCVLFFDEFDAIGKEREDANDNGEMKRVVNSLLKQIDLLPSHVVVVGATNHESMLDKAIWRRFQLQITVPAPTQRMATRWFEEFEKRVGHSLGLAPSTLARKLSGLSFAELEEFALDVQRKYVLGLPASKNKLKDISAHCLKHWTERYRQDI

SEQ ID NO: 2854 - protein, 156 aa, synthetic construct; identical to SEQ ID NO: 2853
  REGION 1..156: note = TnsF-Tn7 System Protein

SEQ ID NO: 2855 - protein, 215 aa, synthetic construct
  REGION 1..215: note = TnsF-Tn7 System Protein
MAHNGVLFLDELPEFERRTLDALREPLESGEIVISRASAKVCFPARIQLIAAMNPSPTGHYQGMHNRTPPQQVLRYLGRLSGPFLDRFDLSIEVPLLPPGTLSKQQEPGESSQQVRQRVIAARERQLQRAGKINAILGKREVDRDCPLCDADAHYLETTLLKLGLSVRAWHRILKVARTLADLAGEKHIARHHLSEALGYRRMERLLIQLHRSLE

SEQ ID NO: 2856 - protein, 368 aa, synthetic construct
  REGION 1..368: note = TnsF-Tn7 System Protein
MSISPLTHMPMKYPNFVRSEPGEVLSSWLVRSALYYGMDPLSLTGLIWPEWRALLCDIDRGLSPEAISLLEWFTGAEPAHINSLMLSGSYSALFTDEPSSSSVLPWVVSRGIRGRVCLMGMPYCPQCLAEDSVPYFRRVWRMAFTIACIRHRCQLRSSCWHCGCAVQYSLLSAENVHLDCCWRCGANLSEASREPCNPVALAFQRVAVNVLSRNAGYYGDHLLSATQWFTVNRYMVSLVKAAGWRRHSSLLRALLTLPGCSGMTLPVTGCLPFESCTPSVRAALLAAARMFFMAGPLRLSNAMCSLGVTQSLLNEIGIHMPDVLLPYFSCLKAGNYPAGTMRQSHCGPSSPQSVARCWKRIRRKLGAG

SEQ ID NO: 2857 - protein, 296 aa, synthetic construct
  REGION 1..296: note = TnsF-Tn7 System Protein
MTGLAYLHKDFRHVAELPDKERLHFIDEPRWIGYPRAHHILDTLQELMQRPRRPRMTNLLLVGDSNNGKTTIAHRFYHSNQPVLSDDLSESTNPLVLAEAPPVADEKGLYISILERLYTPYRTSDPVTKLRYQVIHVLRTCKTRMLMIDEFHSLLTGTALKQREVMNAIKFMCNELTIPIVGIGTREAVRVLHTDPQHASRFDVITLPSWELNAEFQRLLAGFEAVMPLKKASRLHEPEKAMLLHAICGGNIGDLHRLLMECSREAILSGQEYIDKSIIESKSWCRPTKGIREVTF

SEQ ID NO: 2858 - protein, 296 aa, synthetic construct; identical to SEQ ID NO: 2857
  REGION 1..296: note = TnsF-Tn7 System Protein

SEQ ID NO: 2859 - protein, 327 aa, synthetic construct
  REGION 1..327: note = TnsF-Tn7 System Protein
MIVSVDGPALCKKCFELGKVRCPSCDKLMPAGLGNACMACFWDSSFEARRDLLICKIEDERIRAAMGSFSVWLKARRGAHFAALNMQRYQPFIESIHLHGASLPPYSELVAHFGAETLRRSRSVVTWLSERGMLVVDAQAREDSSDQRRINQFLQYFPAGVGKEALQAYQRELSERSVKLRTIRLAIGSALRLLRCGDEAGKALPSQRVLRLFLRTRPGLHASLSGFVSFLNRHYGLRLNASVDRRWLAKSANHVAELKLAQLYVMSAGEFTEQKWIRAAITYFHRIKLSSRDLLQYHEEIQGDQRGFSVKLKGKVYWVPEGRAPRE

SEQ ID NO: 2860 - protein, 618 aa, synthetic construct
  REGION 1..618: note = TnsF-Tn7 System Protein
MNLPTMEISLDSAQEIAVPHQILREKLALSRSRRRSKELDLKLPPGEWIVWWYSKIVRNLADNTVPLVKVVFRALDGSKLTGETEVRDIALSRLRLYQMGVILQDGYPVAKVGMTTEYFDVDFSNGWKLSRVSRHQLCAPSSPYLLPEECDDDWLLRFSLPDRKSLIVNCIDFLVSGYSLGSEIPRILTTYEWPEVMSRLLAQSTPLEERNLPDQLVVYPHRDMLQKDRAILALLANGDGCATRAAKHLFSQVNPKSFKSGQPHSLQVRPWFLGATTLKCRGFWTQGKTHFICTALVGTREPPGLKIDIRRVANARDENAPGDLATPLEKGRRLAESDLDIVMTDSHQPISDYIHEDIEAEEFEFITTRESTRTKVEKPFGQVRFVPKDMDLPEKYGTGDSQGQGDATTGKMTASAITIDIEVQGALIEMWKAFSRMAQGGKIKGLSWYVPDHAHTEGPPKCIAFSDRLELGPSWEHRDPQARVEEFERQNKWITIKDDVRRGMMYLLVTEGTDLYLVAEIQRHRWIGKDSKPKEQSFCGLICHIHDHDIARIKQICGHIDQALPEHNGVFKNMSWPFDYQCYIFPHHWGSDPNALLDKAAANALNGIIDLKHRRMRT

SEQ ID NO: 2861 - protein, 327 aa, synthetic construct; identical to SEQ ID NO: 2859
  REGION 1..327: note = TnsF-Tn7 System Protein

SEQ ID NO: 2862 - protein, 206 aa, synthetic construct
  REGION 1..206: note = TnsF-Tn7 System Protein
MTRSLSGVFPFRGQGIYYESGLERDFIRIWSLSPEVVALVSQPVQIPFTAHNRRDYIHTPDFFVQFDDELNLKPLLVEVKPREDWKENWRLWLPKWKAAWRFARDQGWEFHIFDESRIRGIRLKNVEFLQRYRNMALDPKLTEVILEELAMMRRAPFHALLALHFHGHEAIGRSHLWHLIATAQVWTDLDQELNEFSVMRCHDERF

SEQ ID NO: 2863 - protein, 638 aa, synthetic construct
  REGION 1..638: note = TnsF-Tn7 System Protein
MMSASDIQSHALNRAALKIQVGEFVRHHNDTYKIALLVDFHHVLGQDVESGISKLLPIVELKRPGGKNGRVYASGLDLARIADKQWAIAEQRYAIIAPLLAMDMHVEGAVIKRAKDCGVSKATVYRWLYAYTEGSRFLSLLPQARGWKKGNSRVCNEVEDIIGNVIQTLYLSTRRYTIKDVHDEVAKICGLRGLKAPSIPTVSLRIRKVPARQVLKARGYADIASDTYEARPGKYSADYPLHRIQIDHSPADVMIVDDVHRVSIGRPWVTMAIDMYSRMVVGYFISLDAPSAVSVAMCLVQAMLPKHEWLTHHQVSGEWPVWGLPYEIHSDNGPDFKTKSLILACTAHNIERQFRPRKRPHWGGHIEALMEENAKVFSKLQGATQRNPDSRGDVDSDKEATMSFDALEKWLVHTILIYNNKPHSGILFKPPIAMWNQAFWGPKAFCGMPPIPEDPLSLQLDFLPSEYRTIQTYGVEWDAMYYAEALRPWINQVDPKTGKKMQFLFRRDLRDINFIWFFDPGLNKYFRVPLADGRFDSVSVAEYVKTKRELKKENLASVDNDTIRQHIDKRRVIEEEEAVRTKAARRSAQKTKNNARGKTPATVFLGQQQDSPPRLQPALPVEDAWGDDDDVPLYGGVA

SEQ ID NO: 2864 - protein, 374 aa, synthetic construct
  REGION 1..374: note = TnsF-Tn7 System Protein
MVSRCFWHEEVRPVGQKWPWVPVMQRDELFSSWFIRCALCNACDAVEMARYIWPKRRIWTGDCDLSICSLCLSDLQDRSGISASALIGSSLVPICESMGLKLPPVGITPWVLSLGERNLRRAGGLQYCPCCFAESPFYRLQWRLAWYSCCPDHGVKLRDSCPHCSAAISPHRLDYQARTLARCHECAGLLSAVDIQDGGADEIELIRQADLILQGRPVGLTWPAMPVAEGFSFLKGLFRLVRVLANSPSAAGKQFLAAVDVDSASLTTSLDVGLKLECLSSSERSHFLSAVSRILLAGADRFRTAAENAQLCPSIRDAVVSSDEPYLAQLLPQRPRRGYVRTLPALCPSPKSPRSVLKAWLRFKRKMLRTEGRL

SEQ ID NO: 2865 - protein, 292 aa, synthetic construct
  REGION 1..292: note = TnsF-Tn7 System Protein
MSNYPHLLQEFKPIMDLSDAERLAFIKSRWIDYELSENLFEQLYAKLCGHRDVPDFFIVGESRMGKSSLVNRFIAVHGDEYVNEDGCRVRPIIKVEVSKPSLRMFYCSILNCSHSPFNPDASEMKLRYKVESLLTTGQTKMLIIDEIQTIANGTSRQVADFMNEIKCLTNTLKLAVVGVGMPSANKLLMLERQYAARFVTVELPVWAPSLGFRQLLKGFESWLPLKQPSNLASKEIAALILKRSQGITGYVEEILFHSARKAIETGKEKIDLELLEKYQWSPDASGMRKYVQ

SEQ ID NO: 2866 - protein, 292 aa, synthetic construct; identical to SEQ ID NO: 2865
  REGION 1..292: note = TnsF-Tn7 System Protein

SEQ ID NO: 2867 - protein, 796 aa, synthetic construct
  REGION 1..796: note = TnsF-Tn7 System Protein
MTVTQLTTAPTETDLEAEIHSAIRLAFPLMPAHAIRHQIQFQFKFGHAAIKVDGSKPTSVRSRADVLLFVEDKPLAVLELKRMSEELQPDDGQQGLSYARALNSTPPLVVVSNGIETRYLETHTGGVWVAVDKDAQAFTALVDSASKAAKADLKLAIQTLMGTNSSVWMQAVLHASSANMEELTGSIEDTDQPFGRNFLIPRRPTKKVVDFLRKNQKLVLLEGSSLVGKSNVLRELCELTVSNEVGATLYIETETGSSILQCIADALESHLNWPVTVDEARYWLKQVSDANGPDLILAIDGLNSDDRVVRKEIEDLSSTKFGNHLKLVVALDTTVASRIVITNGRNKSPIGRRAVRVEVEPLDNDEFAHAVQTLLDKRLVLMQGAFYTPDYRHPWVLRSVAALALASLEDESQETFLAILPMLNTDLIQYARDRFEDIDLLRTFAKVAQAMIIESRDAARHPTLIAECNRTFGIRRATLSELLSSDELNLLEEAGYLKPAIHQVTAEHISYVRQPALLASEISRFIKSEIIRRSEKDPADAATWLIDAASRLPLGDVIAAHALLEASTEDEGLPIGVMLKLLKTKPQSKSPTPGTTYAGLHPEIGYIKFRVVRDTVIELFVKGGSKILDLGVPVGELLEDITPWQILSHVCGVRTEIMDESGSLVRIEQSFLIDIASASFPLLSSHPMLGQLPHHDLLTGGSVVCHAVGIVEPITQSLLSYLRQDLNDSKAWVEWALTRKSGALLARLHIALREIARMTDPDFAEWAKTTLTNQVIPELQQQLRCCGQHLLDEESQ

SEQ ID NO: 2868 - protein, 796 aa, synthetic construct; identical to SEQ ID NO: 2867
  REGION 1..796: note = TnsF-Tn7 System Protein

SEQ ID NO: 2869 - protein, 292 aa, synthetic construct
  REGION 1..292: note = TnsF-Tn7 System Protein
MQLAELFHHEPVRQAFSDYVLWAVAHTDAKRLCLAMKRHVDFFVILDRHPGAAWDGAFLLDVLGTSGLRRYELPMRWLKLTHQIEISQVAKLGNAEAHRSRQLLETLPPGSMARSMFQAFYDELHERVTAGKIKARTMRMALRPALSMLVAASPQGEVPPDQKALDSLLHKAPGQRATASTFIGFLRSRYGIELVSRLQPARTHAATRSRLGTTLALLANTDKRDAKAMELWMLTALRYFHRLTKRQALEVRKNATAVGLDDGMELRVDDSVYWIPLPPHRGLDKELIWQKS

SEQ ID NO: 2870 - protein, 230 aa, synthetic construct
  REGION 1..230: note = TnsF-Tn7 System Protein
MFNRRDNPNLMRSVRKIPTNRRSVTGFVSWRGQESVPFESTLERDFVLRQEFNLGVASVVSQPCHVPFATRSGVKSVATPDYLVYYKVRDDALGMEHKPMLVEVKPREDWRRDWREWLSKWVAIRRYAREQGWVFRVMDETRIRTPAFDNIMFLRRYDDLDVCQQQSAAILEDLGELGAVSIDYILAKHFGGSFRAQGIAHIWHLLATRKVDCDICDPLNDETTIWVAHD

SEQ ID NO: 2871 - protein, 656 aa, synthetic construct
  REGION 1..656: note = TnsF-Tn7 System Protein
MTDRANQEHEDGPHSVVIRRRRIDVSSGVLVRHDAGVFRIAEVLDFNTVTATSVQTGRTSVLLISDLEHVDQDPQPVSDIDINAITEIDWRVAQTRMAAIEPLLKTKSPTRAAVEARAQELGVGTATLYRWIGRYRSLDAVSALVPLKRGWQHGKSRISRSAQSIIDEVINTYYLTPERPTAQKVVREVQRICLNSGVDAPSATAVRQRIDRIPERERLRMRGQRERAKTKFMPTPGTTPGGDYPLAIYQIDHTPLDVIVVDDEHRKPIGRPWLTIAIDEYSRMVAGYYMSFDAPSITSVGMCLANALVPKDMWLLKHGIDAEWPIWGRPKKVRWDNGPDFRSDSVRDACNLYNIDVEFRPVKVPRYGGYIERLQGSLLRELHDLPGTTFSNVEQRQEYDSEGRAVFTKSELENQLLRIICNEYHRREHRSLGMPPLRQFELGVFGHGGNPGTGMPPRPTDYMSIYIDFLPTIWRTVQNDGVEIDKRYYADVLRPWIGALDPETGKGLKHPFRRDPRDISSIWFFDPDLKEYFKIPLADPSFPSCSIWELQLAKQQVKAAGFDPSDSKAVLRSITERRELTKESAARTKQARRAAQRQAEHQRIAEEGPAPVQAQKSAARGDRDLAQRPASASLRSTLTQLPSSLVQGVVRGSDIA

SEQ ID NO: 2872 - protein, 305 aa, synthetic construct
  REGION 1..305: note = TnsF-Tn7 System Protein
MNIDIKPDSSPEAKHIHEGFRGVLELSPQERVRFLYEPRWIGYARAKLILDDMAALLRMPKVARMRNMLIVGDSNNGKTKVIERFKELHGQGFVSEDSESIRPVIVVESPPSADEKGLYVSILSQFWSPYKKNGTVTELRYDAISRLRLCRAEILIVDEIHSLLVGPAAKLRMVMNTIKMLCNELRIPIVGVGTRDAVRVLHSDPQHASRFDVYALPLWKLDPEFQTLLAGFESVLPLKQPSHLASPEMATLLHDICEGNLGDLHRLLIECSKVAIETGKECITREIVTSKAWVKPTKGIREVQP

SEQ ID NO: 2873 - protein, 305 aa, synthetic construct; identical to SEQ ID NO: 2872
  REGION 1..305: note = TnsF-Tn7 System Protein

SEQ ID NO: 2874 - protein, 753 aa, synthetic construct
  REGION 1..753: note = TnsF-Tn7 System Protein
MTAPLRLGEAHRQVVAHLATRLTGVTGEQAAEALERGKITARSCVGLARHFQQHQDALTNPGPTPPQNLVRLAHALAAAGHGPVTLSTCAGCGKISRELTHRLPAGHCCSSCAYRVRPPKTCSDCGRQMRINGNGPNGPLCGTCYGKQVATACGQCGRVRRATYRMPDGSVRCQGCHPRPERTCVGCGVQAPVQAISADGPVCRRCYRQPERRCGSCGEVRTVDRRGGDDRPDLCSRCYHAPPVACASCGRLRTCARRVAGKPFCQSCCPRPTGPCARCLHDRPVHAYWPMGPVCKHCYTAVRARPGTCAQCEKRRPLIGSTEAGAGICGPCAGVDLTYACQRCGTSDRILREQLCTRCFATKQLTEALGGKDATVPAQRQNFHSALAAAGRPRRVAHWLTRAGVPALLSQLATSDEEITHQQLDDLPNTPTTRYIRDVLVVAAVLPPRDERLEALPRWADALLAQTPLPQRQLVTPFTHWYLLHRIRRAHRHRPLRASTQHQMRSRLRRALELLDWLDEHGTTLGELTQPELEMWLEEGSVERREVRAFVTWARGRGLAGELVVPRARIAAPSVFMTDEEQTEQLHRCLGDDALPLDVRTAGALTLLFGLQHTKLLELTVKDVIDDNAMVALNLAGHRLPLPPEVAQLVRALRAQCQARWQLDQTASTTPWLFPGQEPARPLGAAYLNLKLRRHGIAPLASRNNARRALATDLPASVLADFTGTSISNATRWTGYARRDWLDYIASRTQDRP

SEQ ID NO: 2875 - protein, 753 aa, synthetic construct; identical to SEQ ID NO: 2874
  REGION 1..753: note = TnsF-Tn7 System Protein

SEQ ID NO: 2876 - protein, 120 aa, synthetic construct
  REGION 1..120: note = TnsF-Tn7 System Protein
MYLARQGANGPLVYVGVGAGERKAGGLRGRLRRYTSGKALASGLGEAVFDRALADPQWLRERVAEVECGRATRATGWGKAALLWADLHVCWSVTNSREDAVALEKRVLAIEGVDWWNRAR

SEQ ID NO: 2877 - protein, 376 aa, synthetic construct
  REGION 1..376: note = TnsF-Tn7 System Protein
MSAVVDMPGAAHLVLADGVVHLDPEPAVLEAMLEGWALQQRTRFLNWESTIRPRIALVRRLTRFTNEYPWQWDPAEVEAFFDHLRTRRPGRPLAVSTARNYQNDLRLFFDYITDTRYGWPSMCNERFGRAPVQLLHEWNTITHTSEYEGAAERRPLAYDEVQTLFDAADGRVGEIRARRRKGSLAALRDAIVLKTVYAFGLRRQEACGLDLCDLRRNPRVADYGRFGAIFVRYGKASKGGPPKRRSVLTVPEMDWIVGVLDQYVSEVRPAFMPGKHPAFWITERRDRMSLRRLNEAFETARQAADLPPELDLHSLRHSYVTHLIEFGYPEKFVQDQVGHAYASTTAIYSHVSDEYRNRLLRRSLQARHGDLWGQET

SEQ ID NO: 2878 - protein, 107 aa, synthetic construct
  REGION 1..107: note = TnsF-Tn7 System Protein
MIRKMGIDWQLRIRMAEKGMFQTTELVPLLAERGVHLSREQVFRLVTQTPQRLSMDTLAALCDILACEPNDLIRVEVTNAEVRKTAGEQPVSRPQARRTTIRRPGAQ

SEQ ID NO: 2879 - protein, 500 aa, synthetic construct
  REGION 1..500: note = TnsF-Tn7 System Protein
MASDQASTTPTCCDCGRAMLKAKKVHEGQRYCATCYPRLFKRRMCAGCGNFARLPIFDLSARCGGCARNRPCVRCQKVEFKIGLMTQYGPACKACARYFRVPAPCEVCGKLSRQLAQNQITGLRSCPKCSGPDAATCPSCRRHRVLVESAQGEKLCKPCSYEGTRPCGTCGTDMPAGRGHECEHCYWRRTLRSRLAIDQQGFASPEVGALFVSFGEWLEREMDVKKAAARVHTYFDFFSQIDHLWGRIPSYEALLEHFHAGGLRRAEVPMRWLVEAHGVRATADAREAHSEQRRLDELLSQVTGQWESDVLTKYHRALIAKLSQHDVQLRSVRLAIRSAVNFLNQVQLTGGALPTQRTLESFWRHWPGQVAAVTGFINFLNKTLNLKLDPRPNEKWLKAAKRHKSERELIDLFKNRYEVRDFEAKWIVKGLAYFHGIRRANRKSLDFRPASFREVAGFEVDFAGSTLWVPSAESYGSTHVDAETLGAATLLIAGSGDHAR

SEQ ID NO: 2880 - protein, 577 aa, synthetic construct
  REGION 1..577: note = TnsF-Tn7 System Protein
MGPVKRVEFSYPRSDLTHPDSGVARLSGNYIVWSYAQIRHNIRARSMPLVDVYFRSLKKNVPSAGQFVSLPLSTIPHYRIGTIWRRGKCVSDTLMQERKFDVDFSPEGWSLTSRLELNQMGMGHIFADQDYPLHYGERDSMKLINFKLPKGNLLVSCVDYFARAYARNMDVCRALTTLKWSDVMDVLYEDPRPSAHQWLVKPSRRMRNYDAVYLAHLMYDSYTEMRTKKINSQFASRSPLQKVNLEAEPWFTGPGTLECRGKWINGGKTFLCLDLVGSSEPIGEDIQWQALKFDSTDGKEGAGRLVMPRPLRSAHAEEFLQEQSYVEPDKHSEITIVKAPPFKALGKRRKVVKTKKIVPTDKGRLGPNPPRPDSLADGDGVGSGKNVGKAEHVAEAKLESHGFLRDIWNAFASLKKCEKNKITRLDWYTPTDGFNSSEPAKVLVLAPIENSKIPSDVRSWVYLDRGTNQLRGLLVLRIQIANVDYFCFETQRKEIEGDQSSGRAGLLMKSHVSSEEEFSQFVEKLSSSIRYKKGVFKNMANFFPQGFETFNHTQKDKQVRYRNRLIGAFRKLGVELV

SEQ ID NO: 2881 - protein, 500 aa, synthetic construct; identical to SEQ ID NO: 2879
  REGION 1..500: note = TnsF-Tn7 System Protein

SEQ ID NO: 2882 - protein, 228 aa, synthetic construct
  REGION 1..228: note = TnsF-Tn7 System Protein
MSTNNCDQPKQVRRIKPTRRSVSGVMPFRGAGGIPFESLLERDFLKRMRFSHRVSSVVAQPVRIDFIDPHGRPQTYTPDFLVYYHQGGHSHVDYIKPMLVEVKPAYLWREHWRAWSGKWKAARRYASEQGWSFSIYDESRIRGLPLENIIFLERFERMTFDREDIDMVLNTLQETEISPVHYLLARHFNGIYRERGVSLLWHLIATGRVECDITEPLDQFLELWIPHL

SEQ ID NO: 2883 - protein, 641 aa, synthetic construct
  REGION 1..641: note = TnsF-Tn7 System Protein
MNIYEIDTDEHLIPFEPSRSRVAIEVGAMVRRDKTIYRILQILGFDTVIGVEVETGVSASLRVPELRAVEQERIDGLYVNHDVATINSDDWAVAQQRFSAISPLINETVNPRYTVEARAKEVGVDTATLYRWLERYQNWNEILALVPRKRGWKSGATRLTIEAEKIIRDVIDDHYLKSQRPSIQSTIAEVAMRAKAQGITPPGASAIRARIAKIPEKQVLRKRGFADQARNRYTPSVGKFPGADYPLAVIQIDHTPIDLIVVDDLHRKPIGRLWLTVAIDVHSRMIAGYYLALEEPSEISVGMCIAHAVLPKEDWLNVHQVEGDWPVWGFPRVVHSDNGPDFRAENVRRSCSNYNIENVFRPVKVPKYGGHIERLLGTFMRMLHELPGTTFSNTSDRDGYDSDKNATLTMGEFERWLVRAILRYHQSPHSAIYMSPARKWQLGFFGNRELDPLVSVPPRPDDALTVQLDFLPSFHRTVQTYGVQIDVFYYSEALRHWINTTDPETGLARKFIFRRDPRDISVIWFFDPLLKQYFRVPVANQAFPAATVWEFRAAKKKAVDEGRENIDEATISRLIMENRELVKSASQMTKKARRDAQKLKVHGKNVTPASPKRSVAQVVADLPASPDGLLLDDVELIGDIS

SEQ ID NO: 2884 - protein, 201 aa, synthetic construct
  REGION 1..201: note = TnsF-Tn7 System Protein
MLFLDELPEFDRKVLEVLREPLESGHIVIARAKDRVRFPARFQLVAAMNPCPCGYLGEPSGKCSCTPDMVQRYRNKLSGPLLDRIDLHLTVAREATALNPQVKPGEDSASAAALVAEARERQQKRQGCANAFLDLPGLKRHCKLSTADETWLESACERLTLSLRSAHRLLKVARTLADLEQVDAIKREHLAEALQYRPATP

SEQ ID NO: 2885 - protein, 371 aa, synthetic construct
  REGION 1..371: note = TnsF-Tn7 System Protein
MAASYTWHPGADGVAPVWPLSQSLIADELLSSWLVRVALAHGYSPSNLASVVWPAFRIWTQDFDRGIELRRLEVLAAYTGITATTLQCSTLDRVAKLLVNDPSKRTGVWPWVLVLGCRSRFHAGGLQCCPECFTQGKTFYRIQWRLAWHTSCPIHNVGLIDCCQRCHSPLQPGLLQASELMGQCHACGALLGACARVAALPDALAIQQYADQLVTAPGSFGNITLDFTQWMRVARAMISLLQVTARQRSQTLLLFCKNLGVDTTSLTPASLGLPFEYLAQPERAKLLGGAWALMTAGPDIFIHEAKRLALPLYALHVPPHGAPDILIRMASALKVHSPHLASQRNDDHPRTQMEVLRMWLRLTRRMRRNGL

SEQ ID NO: 2886 - protein, 296 aa, synthetic construct
  REGION 1..296: note = TnsF-Tn7 System Protein
MSEYAHLLPDFRPVLQLSDRERILFMGEPRWIGYGAAHNILENLGYLFDMPKRPRMQNLLIVGDSNNGKTTIVRQFMKTHGEGYVNENADPVRPVILAEAPASADEKDFYIALLDRLWMPYRTTDSKVSLRYQVFHSFRELNVRMLIIDEIHSLLTGSAIKQREVMNAIKALCNELAIPVVGVGTPDAVRVLHHDPQHASRFDVVKLNLWKLNPDFQRLLKAFEAILPLKRASELYKADKAQLIHSISGGNTGDIHRLLVECAKEAIVSGKEHIDRELIESKSWLRPTRGIRELMG

SEQ ID NO: 2887 - protein, 296 aa, synthetic construct; identical to SEQ ID NO: 2886
  REGION 1..296: note = TnsF-Tn7 System Protein

SEQ ID NO: 2888 - protein, 289 aa, synthetic construct
  REGION 1..289: note = TnsF-Tn7 System Protein
MAKEFGSFGDWLLTTYGGKTAALSIHRYLTFFLEIEKVWGSFPDYRSLVGHFKAEGLRRVQRPMRWLSAIHEIKPDPEIREETSERTRLDNILALYPSSTIAGQAIHGYVARLKRRQHEGKTTTRSIRLALTPAVGLSQLVIRAGHDLPNQKLLDAYLTDHPGQKAAIIGFINFLNREYQIDIKARVDPKLTRRNRRKKLEAALSAMMQNGSNDAGFLRKWTPVALEYFHDVKIPRRMLRSLLESAEYVDELGVNLVVNSRRHYIPVPTSILSKNSGAFRQTLSKPLKK

SEQ ID NO: 2889 - protein, 777 aa, synthetic construct
  REGION 1..777: note = TnsF-Tn7 System Protein
MGIELFQFQQDAASQMADRYVEYVADPIEFGRSSKRRAVPFYQALSSITGSGKTSILAQAVSEISSLLEVPPVILWLSKGKVVVQQSYANLAEGGKYNHLLSDITVRLLGEYDPEDVANSSEALLYFATVGTFNQKDRETSNLKIFSIDTDNIESTRWEALKVRETADGQQRPLVIVYDEAQNLSDQQTTLLLEQQPSVFLLASATLRFPAQFDTEVVQPLRTEGKYSDEDLITKVKSSTVVSSGLVKGMISLNGLNVPMQETISEMLSDMREAEAAAKAEKLNFLPKAIYVCNTNILAHDAGQTDDPKQPFEQRQAPPILIWRYLTEQCGVAPEEIAIYADLKTHQDFPLPPNFVLFSGGENDYDDFVAGDYRHIIFNRTLQEGWDDPKVYFAYVDKTMESSVQINQVIGRVLRQPNVMHYESDRLNTAHFYVRVDRNDTFTQVIEDVRKGLGGDAPEVRILTSPPGTEVPESLAPKESLSVPRTAIDNKATVQPVERVLEKVHDYSQDMVNTRGVGRRRTVKQAIGISESLDSEWVSFEQSNRVNARWVFCREVARRYRPALMVMNTDGKKFDAKVGVGSSAYSSLADNAAEAVDEYLRHAVIKQLKPKPYEISSTLVRRGSMEHFNNALHEGYDGLNSFEQHFARALDRTGLTWARNRSQTGYKIPMVTLGQTVWFFPDFLVWAGETVICVDTKGSHLVEADARRKLLSIQPHKNVPTTVDVKFVVEGRWKSDGTPDSKEGFSVWELGSGRELRTIPHEELESVVKSFIPSQED

SEQ ID NO: 2890 - protein, 289 aa, synthetic construct; identical to SEQ ID NO: 2888
  REGION 1..289: note = TnsF-Tn7 System Protein

SEQ ID NO: 2891 - protein, 232 aa, synthetic construct
  REGION 1..232: note = TnsF-Tn7 System Protein
MNVNNRDMLQIRESVRQIGTTRRSVSGTYMFRGETPIQFESTLERDFLIKKAFSRSVLDVISQPVRIPFKTRDGRSFQYTPDFLVYYRLGCRDYLDYPCPVLVEIKPASEWRARWRDWLPKWKAAYRYAREQGWLFTIQDESRIRDQALRNIKFLERFKRMSFPQAEKEEVLQNLTEMGSAPVHYLLSRHFMGIYRPEGQSLIWHLLATQELESDLSRPLNDTTTLWVPTDE

SEQ ID NO: 2892 - protein, 644 aa, synthetic construct
  REGION 1..644: note = TnsF-Tn7 System Protein
MSKESNDSTSSEAVIPIRQRINVNVGNYLQHGENVYKITQLLDWESAIGINVETGRSAPLRIKELRPVIDASDENNQVYEDLEEIADSDWAIAEKRYAAIKPLVNECSPGRAAVAERAGEVGVGTATLYRWLNRFKSVGVVSALIPQQRGWKSGKGRISGLAERVIQEVIDEVYLTPQRPNDQVIIMEVKRRCYNQGIDAPSASAVRSRLARIPERIRMRKRGFREKARNQFQATPGHFPNADYPLAYVQIDHTPVDIILVDDEFRLPIGRPWITVAIDVFSRVVTGYYLSFDPPSATSVAMCIAQSILPKDDWLTLHGVEASWPVSGIPVTVHVDNGADFRSETFRRACEVYSINLEYRPVRAPRYGGHIERLLGNFMKKVHAVPGTTFSSVPERDEYDSEKHAAMTKSEFERWLVTLIARHYHYDRHSALGIPPIKQWEIGIFGNGLTSGVGVPPQPADRSTLLLNFLPAFRRTVQSFGVTIDGMQYYDEALRAWINAKEPANSKTKRQLVFRRDPRDISQIWFFDPDLKQYFKIPFADLSLPAMSLWELRQAKEKLKAEGKKVFNEHLVLEALTDLRKQVEESKMKTKQARRQAQRRKEHERKITPVEPVKAQQSEPSVSTSWDDDLLDDSADIRGFGDIS

SEQ ID NO: 2893 - protein, 376 aa, synthetic construct
  REGION 1..376: note = TnsF-Tn7 System Protein
MAAAYSWHPGSHAVGAQWPLPTPLLPDEILSSWLVRAALKQGCSPMTLAATLWTDWRMWTIDTDRNLSSGRLKVLSLRSGIREDFIRAATLAPTIGKTQHRPLSKNITWPWTLTIGARNTKRRNGLQYCPLCLTGDASPYFRINWRFAWHTGCERHQCALLDRCWYCQSPVEPHRLTELSSSAAVCSSCNKALAEGPQSKGCPYALAFQQACDQVLTTGFFKQPIGEGTLVEWFPLANFFVTLIRRTACTQTEAQISLFNLLNIEIPPGFPIALGTNKEWLSVKHRQVLFNTAWQLMITDREDFRSKLLESGISKQGFAEQIDFVPPALQELLDLLPDARHKQRKPRRSKKPGPRPRREVERMMARLQKRLAMRQQ

SEQ ID NO: 2894 - protein, 298 aa, synthetic construct
  REGION 1..298: note = TnsF-Tn7 System Protein
MSDEKYGHIHPEFRHIACLSMEERLNFLDQPRWIGYSAAHQILDTLQGLMRKPKQPRMPNLLIVGDSNQGKTTLIRRFYELCGTPYINDEADPIKPVIVAEASSTADEKRLYCSILERFHAPYRATDPTTKLLYQVIHLLRECQVKILAIDEFHSLLTGSAIKQREVMNAIKLLCNELAIPIVGVGTRDAVRVLHTDPQHASRFDVVQLPRWELNKQFQSLLVDFESVLPLKRPSQLHKRELAKLLYSISEGNLGNLHRLVTQCAGDAIRIGQEQITQEIIKGNKWLQPTRGIREVML

SEQ ID NO: 2895 - protein, 298 aa, synthetic construct; identical to SEQ ID NO: 2894
  REGION 1..298: note = TnsF-Tn7 System Protein

SEQ ID NO: 2896 - protein, 252 aa, synthetic construct
  REGION 1..252: note = TnsF-Tn7 System Protein
MPIGSFELIGIFWVIKKPPQWRLGEIPNYDLLVAEFKPEGLRHNLTVLRWLIATKQVTINEALKEQMAEEERITNLFAKLGEETPDIVKEYYDYLLVRQQQRGTALKTVRLSLQPVVDIYHQFDLKNAQTPSQEQLNSYLVVKQGQKNSLFAFIVFLRKKHGIELRVKQPTSKEVLNIKKKDAERGLMELAKLPKPLSRENYLQWLQFGMVYFHGVNITLKNLKDCSFNEDDEEGILCISYNDKNYPLPNAI

SEQ ID NO: 2897 - protein, 390 aa, synthetic construct
  REGION 1..390: note = TnsF-Tn7 System Protein
MLFTYLYIDNFYNFSKTSIDFTLKRELKDSLIDGEYLEERPKFRFKRVCILSGANASGKTSLGHILLHIQHFILSPNIKLRKINHKEKVGSIKVEFVFPQTNTIHYLEIRESSKEEDLPSITYASIPILQNSTAYATRKRLKLYIEKKGAANIKGEFFTNEDNPDELYTFKSIRSLVSNDLFFYYMFSHNVDKNKVTVDNLSTDILEKVLQTFDSSITSVDEIITKGVLDGYSIHFSNKDTILIGKNGEMPNTDRLSKGTFDSIQVAEFVAYIIGTSNAQKYRDICTTYFLDEKMAYSHSELEQSIVNLIIQKMGRYSQFFYTTHNYDILDLNLPVHSYLFLRKDGDKAEFVQPEDVFSKNDRSLLNYVRNDIFNTVPDISLIDSLLFED

SEQ ID NO: 2898 - protein, 390 aa, synthetic construct; identical to SEQ ID NO: 2897
  REGION 1..390: note = TnsF-Tn7 System Protein

SEQ ID NO: 2899 - protein, 226 aa, synthetic construct
  REGION 1..226: note = TnsF-Tn7 System Protein
MAIVTMILGNSGEGKSYSLKNLDPKFAGLINVMNKPLPFRGGKDIKKMATDNPDQICSMLPRFKAPIIVIDDFQYIMGNEYIKGANQQYKGDAAFQRYNVMAYNAWNVINTAITQVSNDTRIYILAHVQEENGRTKIKTIGKMLDDKIVLEGMVTMVLQTAVREDGHFFMTQNNGFNTVKSPEGMFDSDLIPNDLNAVDDAICEYYGIPKTGSLPAQDQSQQLQTA

SEQ ID NO: 2900 - protein, 252 aa, synthetic construct; identical to SEQ ID NO: 2896
  REGION 1..252: note = TnsF-Tn7 System Protein

SEQ ID NO: 2901 - protein, 761 aa, synthetic construct
  REGION 1..761: note = TnsF-Tn7 System Protein
MKAAVAELTSAVPTLTQASAAAALEVAVPIPVRGAARFLEELAAHLADHPDALFSGGSHCPPALIRLTHVLHDGGHPVTRIVCAHCGKPTTELRQMRPEGRICGTCDGRSRRSTCARCGQDGVRIAARRPEGKICYRCYSHDPEPFEECSHCGRVDKPVSRLDDGSMLCKRCWQRPEHRCIHCGQTKPAALIDNQGASCHLCYNRFRRPRRICGQCGRERTIARNADGDRPDLCHSCYRGPKVICSNCGKLRPCHGIGTGHPICQSCYRRPTHTCCRCGRQRRINAHWPMGPVCDLCYTAVLRDPGECASCRTTRALIGRDTDGNSICGPCAGYDADYTCRRCGRAGNPYGREGCAHCVLADRVHELLASPDGQVSSELWPLVDALTRTQSPFKQIHWIKNSPNAHLLAQLVTDGRPLSHDLLDEFPPSRNVHYIRQMLTQTGILPERHEDLDRLPAWLDHHLIGKPADHANLIRPFAHWHLLRRARSRARVRRFPASAGRDLRRRILVALDLLVWLDEQSLTLASLRQAELDRWLDEPGTQRRNLVRYFLNWTSKRRITEALVVPSIPRQQPAELLDDEQRWRLLRQCLNDDELPVDVRAAGALTLLFGLSTERLRHLTADQLTHKDGQDFLTAGHRPILLPPKLAKLLWMLGRDPQRRLAIPEGKQRPHKLFPGLVPGQPIANHALTTRLARYGIRVRTARNGALAALAADLPAAVLADLLGMHINTAIRWVDYAGGDWTDYLAARAAERARGSAGGRE

SEQ ID NO: 2902 - protein, 761 aa, synthetic construct; identical to SEQ ID NO: 2901
  REGION 1..761: note = TnsF-Tn7 System Protein

SEQ ID NO: 2903 - protein, 338 aa, synthetic construct
  REGION 1..338: note = TnsF-Tn7 System Protein
MFDAMLRGFRAQQMSRGLKESTIAPRERLVRRFLEYTNEYPWCWTATHMDEWSACLVGEKRLAPSTVRSYQGDVRLFSEFLIDGRYGWGPVCEDAFGTYPVAICHEWNTLPHLQDYEGDPEARPFTREELQRFFDYADEQVERAVRAKRKGALAAYRDATLFKVMYGWGLRRTETSKLDVVDFGRNSKAPKFGRYGTLNVRYGKAKKGQPPRRRNVLSVMDWAVESVADYIQNVRPRFGLEDHPALWVTERGGRVQPPEINARFVAYRDALKLPKALVPHSIRHAYVTHLTEDGVDRRFIQQQVGHECDSSTAIYTHVSDDFMNTALSKALAPAFAEV

SEQ ID NO: 2904 - protein, 375 aa, synthetic construct
  REGION 1..375: note = TnsF-Tn7 System Protein
MSRAADLPGAAHLVLAQGVVHLDPATAVFEGMLEGWVRQQRTRFLKWDSTIKPRLSLVRRLAAFSNQYPWQWQPAEVEAFFDHLRSNNPNFTVSTARQYQNSLRMFCDFICDGRYGWQAICQEQFGQVPVQILHEDNSVVHVSEFEGQPGRRPLSYDEVQALFDAADGRVEEIRKRRRKGALAAMRDSALLKTFYAFGLRRREGCGLDVTDLRHNPKAPQYRRYGAVFVRWGKSSKGSPPKRRTVFTVPEMDWIVDVLDHYLIEVRPRFDVGNHPALWVTERCGRLSKRSANDAFQACRDAAGLPADLDLHALRHSMITHLVEFDYPERFVQDQAGHATASSTAIYTGVSDEYRNQLLRRKLAERHAELWEDDPS

SEQ ID NO: 2905 - protein, 114 aa, synthetic construct
  REGION 1..114: note = TnsF-Tn7 System Protein
MTARLDYRWHLRKVMAERNMFSTTDLLPLLKERGIVLSSSQVYRLVVERPERLSLKILMALLDILDCTVDDLIEPIATAGTATKPTKKAVGGTAANEGVGDLRPKRARITGIDR

SEQ ID NO: 2906 - protein, 107 aa, synthetic construct
  REGION 1..107: note = TnsF-Tn7 System Protein
MIKKMGYRWNLRRVMATKDMFQTSDLVPELAERGIKLSREQVFRLVTQPPQRLSMDTLAALCDILDCTPNDLIEIQAVNAEVRKTAGDNHGPAPAVRRTSIRRPQGL

SEQ ID NO: 2907 - protein, 715 aa, synthetic construct
  REGION 1..715: note = TnsF-Tn7 System Protein
MDALLAEHPGALVTTPAAYPLALVRLAHALIEAGYQAVAAPACAGCGKITAGLRHKTASGRVCGTCAARGSTGTCARCGRARRINARRPEGGICSACYDKDEQVVTECGGCGRTRRAVARMPDGTARCQFCATRLARTCSACGQQRTVAGTTDVGPVCASCYQAPQGPCGRCGRTRKIARRATAATPDLCYGCYQGMVAVCSACGKTRPCQRISSGSPICRSRRTRPPRPCFRCGRDRPVQAEWPAGPVCVGCYEHVRRHPAECAGCGVFRPLIGSDEQGGPVCGPCAGAPGLDYTCRECGRGGEIHSSRRCFRCVLAERTQTLLAGPGGEVSAQLLPLIEALTAVTNPATVVKWLGTSRSARLLGHLARTGDPITHDLLDDLPQTQALHYVREVLVSSGVLPARNEHLERLAPWLENLLAGKPAHHARLIRPFTHWFVLRRARRAAARRSFTRGSADFARARVLAALDLLSWLDQRGQALHDLTQPDLDQWLAGGATTRRTVRYFLQWAHGRGLASNLTVPLPPRPEPARLLAEDDHIRQLDRCLTDEAMPLDLRAGGALVLLFGMLVSRITQLTKDSVVEDGQATYLAIDGHCLMLPPRLADLVRQLRDQDEPRWTLGRLGTPAPWLFPGQSPARPAVDILFGVRLRRYGIDAHAGRNTGRLALAAELPASVLADLTGISISTAERWSHWAKRDWAAYVGQRAADVTAEPGTL

SEQ ID NO: 2908 - protein, 715 aa, synthetic construct; identical to SEQ ID NO: 2907
  REGION 1..715: note = TnsF-Tn7 System Protein

SEQ ID NO: 2909 - protein, 814 aa, synthetic construct
  REGION 1..814: note = TnsF-Tn7 System Protein
MLPHDRIQSAARDRQGRVARMLWAAARAPLWLKIVLFAAAVFLSPVVLPLLLLAALGYGIVAVAEGRRSRAATVSAAVWGMVAFGALSGLTSSRPGWLLAVLVLPFAVAVAAHAKTLARWHAPCRTVAWALVWSVPVGVGLLRASPAHPMIGVIAAWLLAAAVLGWRVAKSMQDARMYAPGGMPGPGGAVLPPRGGHPGGTAPPGAHSPVHYGMPARGAAQAYADHAAREQQPAAPARQRPPISVEDAMAELDAMVGMAPVKEQVRSIAASIEAARRRAVAGVSTEKPMRHFVFLGPPGTGKTTVARVIAKIFYAFGLLDMPEVVEAQRADLVGEYLGATAIKTNELIDSALGGVLFIDEAYSLVNEGDGQTDRFGIEAVQTLLKRAEDNRENLIIVLAGYEKQMETFLASNPGLASRFATRVRFPSYSPPELLALADSQLGNKGETLHPEARPVLWRILEEVGRRRITDELGNGRFIRSLLEKAGQARDVRVMSAAAEPEPEDLITIRAADLERAFAELTSRLRGYEDTPTLESAIAELDELVGLEPVKQQVRAIAAQLRVAKLRDRQGLTSQPPARHFVFSGPPGTGKTTVARILGRIFAALGLLVRPEVVEAHRADLVGEHLGSTAIKTNKLIDSALGGVLFVDEAYSLHNDGYSGGDAFGAEAVQTLLKRAEDDRDRLVIVLAGYPDAMDRFLRSNPGLGSRFNSRVQFPSYAPEDLSSIAVLLAEQTGDMFEPGALQALQEIFERACASGRIDELGNGRFARSLFERACAHRDLRVVRLGEGATAEDLTTLTAGDVRGAYSELAVHGSV

SEQ ID NO: 2910 - protein, 814 aa, synthetic construct; identical to SEQ ID NO: 2909
  REGION 1..814: note = TnsF-Tn7 System Protein

SEQ ID NO: 2911 - protein, 233 aa, synthetic construct
  REGION 1..233: note = TnsF-Tn7 System Protein
MTEFEGQPHRRPLTYDEVQALFDAADGRVEEIRSRGRKGALAAQRDAALLKTVYAFGLRRREAWGLDLADLRHNPQVRQFNRYGAVFVRWGKSSNGSPPRRRTVLTVPEMDWVVPVLQQWTEEVRPLFAPGAHPALWVTERRGRLSRRAINEALEAARGAAGLDPVLDLHCLRHSYITHLIEFGYPERFAQDQAGHSYASTTAIYTGVSDEFRNRLLAKTLRERYAGPLGEQS

SEQ ID NO: 2912 - protein, 108 aa, synthetic construct
  REGION 1..108: note = TnsF-Tn7 System Protein
MTKKMGIRWHLRLRMAEKGLFQTSDLVPLLAERGIHLSREQVYRLVTQVPQRLSTDTLAALCDILDCQPNDLIEIEVVSKQVRKTAGEPGRAAAPPVRRSTIRRPDLS

SEQ ID NO: 2913 - protein, 874 aa, synthetic construct
  REGION 1..874: note = TnsF-Tn7 System Protein
MILEVLVTAEPDLPLEVLAQSVDQVADTRAKLRRLAQALEIAPDLLTSGRPEGPRLVELLVRTLRTHGASHLVLPRCAECGKAKPLSRTDGDRRLCSHCGNLLSGVKRRPCAVCGQTRQVSGWDREGRPRCQRHRPEVTGDVEVICTGLQKLDTGLDGQILVRVVELALPLPFQRRKVAEELSRRPELLSGQGAYGSTRVVALIETLIAHGARSVVLPACPFCRRTVTLRFRRDGARCCRRCYDQTRLQPCSRCHLATAVATRTAQGEPLCTTCSRRDPVNHETCAECGRRALCTHHTEDGGALCKRCWRPPLATCSICGIHKPCHHADTDSPRCPSCTARLNPEACVNCGRSRPVWARIDDGNPLCESCSRRTEPCANCGRVRRVHGRTHSGPLCKSCYPKDPVSFSACVECGVVERLHHFGLCARCAAPRQLRSLLTGPDGTMRLQLEPIVTAVAGSEPSSVLLWLSRSGPRQLLSALAAGSGPVTHEVLDNLTDTKAVRHLRAIMVANAVLPERDEFLVRFEQWLEPTLQQVEESDERRELQSFSTWFLLRRLRRRSARHPLSHGQMSTAQNDLRSAIRLLDWLHGRGTTLSACTQSEIDAWLASGGREKSDARNFLVWSVDRGQAHGVAIPSVRSTRGQAILPEPDQRWRLSRRLLHDTELATVDRVAGCLVLLYGQPCTRITNLTTAQITDTGKALHLMLGTRPVEIPEPLSALIRELVRTRKGYAVVGHTDAHPWLFPGGLPGRPISPAHLKHRLGLARNTYPSFTEIPLSWTLQGSFPRWSSADSSASTSTPPPCGPKTLETRAQATQPRSLVGHSAMSEDQKSRVLPNTTSACDSSTRHDTIKDPLFAPRIMAFIPSRLANEPHML

SEQ ID NO: 2914 - protein, 874 aa, synthetic construct; identical to SEQ ID NO: 2913
  REGION 1..874: note = TnsF-Tn7 System Protein

SEQ ID NO: 2915 - protein, 806 aa, synthetic construct
  REGION 1..806: note = TnsF-Tn7 System Protein
MRHWDWSLPSGHTTFLGYATETAISTVALAPVTGLPWQAAALTLGGAAAAGTVHDLRVGTTIGTLTTRAISWLTASAWASWALATAPLTTTGWATGVGLATIGIAANASANRTESTRSERKKLLKLRRESVGILRGWEDRMARVARIENCQGKEVEHWPGKVGYTVEMDLPSGGTNVDDLNGYGPKFASDLRLPDGCGVELFPGANRGTILIEVTLKDVITADIPYPEDYSEISLTERFPFGMYRNGEFALGSLCNDCGILVGETDAGKTNTLRVVTAQLARMPDALIWAIDTTGGGVALPWITPWATEGLASAPIVDWIAHTDDEARLMLKMAAEIIAARKAGYQQLMREKKSDNKLPISAEIPGIVIITDETASLPYDIKEMIDKIEQEGRAMRVRMLVAALRATQDAITAMMKLMSKWRVGMTVSDPEELAYLFPGYIKIDPKDAPVAGSGWNMHTRLGPKKPTAMKVWRLVDELMDTICAATAGRRPKLDDLSAAVDTGEHYPQRWARTLPDLYKGQKLTESAQHAVDNAGEIIAAATLLASDPVPTGTGVAAPAAAAVVPSGFEGFGAAELFAAVTAQLDPSIVPATVPTGPAPAAPQAAPLPRPTRPVDPREQGWELLVAAGETGYTPKLLHEALQQLLGKATPAPRTVGGWLIKWAEDGKAIKDDSGQYTRYVAREAAAQQPSTAPAAVVGPETAALPEGLDAALVLQAIDLVVSTQFGSASMLQRKLRIGFAPAQNLMDFLHQLGIVGPSDGSKAREILVSTGDLEATMMRLADELGYTTRDLGAMGLAAAAASHAKE

SEQ ID NO: 2916 - protein, 309 aa, synthetic construct
  REGION 1..309: note = TnsF-Tn7 System Protein
MNSLVVLIGPSGAGKSTLARTWPASQVLSLDALREAVSDDAGDQGATGDAVAALHLLLEARMRRRLFTVVDATNTTREAREPLVAAAKRHNMVPIAVMVTTPASVCIERQGPRPANRTVPEATIIKQRQDMVDSHQTFSSLGKEGFATAFSDRFDRLLPFLERLSGARQADLGLNGGAGLGDLNLVARTFGKEIVPLWRWKPGSNIAGGDRVAEIRLGQQYLTLALRTDIDGEGDIGFDVAVPCPHDDECTGRAWAPAYSITSLYRALNGDLDDDEDIVCTVHGPNHADDQDDADTPGLEERDLEAVHG

SEQ ID NO: 2917 - protein, 309 aa, synthetic construct; identical to SEQ ID NO: 2916
  REGION 1..309: note = TnsF-Tn7 System Protein

SEQ ID NO: 2918 - protein, 384 aa, synthetic construct
  REGION 1..384: note = TnsF-Tn7 System Protein
MHDSTFRCKGVGVARHDEESPGSARLELVDGVFLLHPEDAVLDGMLDGWGKQQRGRRLEPDTIDERHRLIRRFVEFSGEYPWNWAAAHMDEWSFSLIAEQGRARSTIRSYQGAIRLFCDFITSPHYKWAEECVKRFGTHPIQICHEWNTAAHLEDYEGDAERRPLTREECQALFDYADNRVEEAIRLGRKGALTAYRDATVFKTIYGWGLRAREVSRLDLTDFYRNAKAPELGKFGMMNVRYGKATKGSGPRRRMVASVMPWAVESLEDYLVNIRPRFRDHADRKAVWLTERGGRLQPREIETRFAAYRDALGFDKGLVPHCLRHSHVTHQIEDGVDPKFVQEQVGHRFASTTAIYTGVSTDFMNTMMRNALDRAFTSEELETV

SEQ ID NO: 2919 - protein, 113 aa, synthetic construct
  REGION 1..113: note = TnsF-Tn7 System Protein
MTAKLDYQWHLRELMATRGMFSTTDLRPLLAERDINLSSSQVFRLVTEKPERLSMKTLVALLDILGCRMEELIEPVRLTGRQRRTASGETAASDSEAPDPGVGTFRPKRARIL

SEQ ID NO: 2920 - protein, 477 aa, synthetic construct
  REGION 1..477: note = TnsF-Tn7 System Protein
MMDSTDTERCCDGCGKACKKFHRRYKEKRYCQSCYQLLFRKQTCPSCGRAVRLYVEEPGAVCSDCEKKKPCVRCGRTGYRLGKFTRYGPVCSVCVRWFGEMKTCSRCGKPSRFSALVTRSGITEFVCPACAREDHARCQMCTRWRLLKRNAQGLLICRRCDLLGYIRCEQCHERMPAGYGRICQECYWQGVFDKRQSINGALLTRTITREGYFSFCCWLKDKKGVRLAAMHLNRYATLFAEAERYHLDPADWMGLAQYFSPGQLRGYPFLERWYQSRGNPCATNKFKKEKAEAYSLSKKLQQCGASASHRLLTDYYAVLNERVTSGRMTVRSCRMALHAAWSLMNVCTLFCHQLPLKEDVRRYLRKAPGQRNNLQGFISYLNVQHGTALQLPRKKIHFHERSRRKLEKQLIALIREGSVNFQDAPSLRIALACFHHLTLSQASQIVAQGQLTRTNDGLTVTWEGKRYWVPAIIKKVP

SEQ ID NO: 2921 - protein, 595 aa, synthetic construct
  REGION 1..595: note = TnsF-Tn7 System Protein
MMLRFRRALRTINCRDYFRDEKRWMVWWYCGFKANKRTSNYYQPMVNTAFVEVLDNGQLARTKRFIPIPVSEISLFSLGTVWQNGICILERVLEERTFELDYSPDGWDFTSFRERYPGGPYPHELYPYYDKDKNWMLEFCLQKGGTLVVPCQEFFSRCYGFSGEIKRVLTTYPWDECLVRFFGDNRGKTTGPVMVRHNIKERDILMLDYARRHPDSCNALKGIYTHLITEFRSQDPYNPVPAFIQIAPWHRQRALLRVQGLAFGENGRSFLGLRITGASDPDGPPVEYVRLNSGSAENPAPEGSPSAWGGAGKTLQIKVPDSVTVTGQADPEPGVRKAEVESPDIERLGKPRAMHSLKPLQAQYSPGKRLPGQNTDTFSSGIPQHSGQGVGELSTMTGGDNVLDSEGTVKDVWNALVLLKNTQPELVKSLEWYCPHRGFIADESPAFVAFEPGISSHLRLHNWCYTDTLAGKRRGALFLRITTPEVSACIAEIERRQPKGDDPTTREDEAFKGVIVVCDHNFEPDSWIKAYLENARLNEGRVGNFVTALPGQVFSFKHSTTKNMHHPGIPAVRNALSKVGITAFRNGSWTVEPDL

SEQ ID NO: 2922 - protein, 477 aa, synthetic construct; identical to SEQ ID NO: 2920
  REGION 1..477: note = TnsF-Tn7 System Protein

SEQ ID NO: 2923 - protein, 230 aa, synthetic construct
  REGION 1..230: note = TnsF-Tn7 System Protein
MYSNSRDNKPVQQRKIRPTRRSVSGVYAFRGETGIEFESTLERDFIILNEFNLNVLDIIPQPAQIPFTDANGRQYSYTPDFLVYYHLGNRSYQNYPKPCLVEVKPAKEWRENWRKWLPKWKAACRYARHNGWEFHIHDESRIRQQRLENIRWLSRYKTMFFQNEEKNMVMDIVGQAGTVTVDYLLSRCFAGFYEATGQSLIWHLLSTRKLDCDISQTLNRSTVIWIPQHE

SEQ ID NO: 2924 - protein, 646 aa, synthetic construct
  REGION 1..646: note = TnsF-Tn7 System Protein
MNDNDEYPCSDDHFEPQRAMISISVGSFVCHGDVVYRIAQLLDFSTIIGVNLDTGRHTPLRIGELRPVEHPEAISYAHATDINAIADEDWKVAQERYAAIQPFIEGRYSGRKDIKKRAEEVGINVATLYRWIQRYSSYGNVGALIPMKRGWGPGKSRISPEVEAIIEDALLNHYLTSQRLSVSKTIELIESNCRKKGIQPPNHMTVRGRIARLPERTVLRERGHKEKARNKFNPVPGTFPNADYPLSVIQIDHTLADVILVDDVHRKPIGRPWMTLAIDVYSRMITGYYISLDAPSETSVAMCVAHSMLPKEEWIMLHKIDAEWPVWGKPATIHVDNGPDFRSDNFRKSCSAYGINLEFRPVKRPRYGGHIERLMGTVLKKIHGLPGTTFSNIRDRVDYDSDKHAVMTKGELETWLLTYITKVYHQKLHAGIGLSPLKKWDNGIFGDTQIPGAGMPPRPSDRMTLQLDFMPSITRTIQAFGVTWKGLRYYGEPLRPWINFSEPTTGKKREFIFRYDPRDISTLWFFDPELKSYFRIPYADQSLPSMSLWEHQQVRQKLKEEGKRSIDQHTIDAGLAEMRQLVETASQHTRKARRQLQRHREHQSGITPAAPSGKVIAANLKTNITENTADINGLQAGDIDSFGDIA

SEQ ID NO: 2925 - protein, 893 aa, synthetic construct
  REGION 1..893: note = TnsF-Tn7 System Protein
MSVGSRWYKFDFHNHTPASEDYREPGITDREWLLAYMRQQVDGVIVSDHNSGARIDHLKSELQQMARDAQTGDLPGYRPLTLFPGVELTATGNVHILAVLHTECTGADVERLIGQCNNHSPVPRNEPNHQLVLQAGPAGIISTIRRNPEALCILAHIDAAKGILSLTNQTELEDAFSAGPHAVEIRHQPDDITNGTHRRLIKNLPYLRGSDAHHPDHAGARTCWLKMSSPDFDGLRHALLDHENCVLFDVPPPDEPALQLRSLRLRTRLCSPPDNETANVVFSPFYNAIIGSRGSGKSTLIESIRLVMRKTEGLSAERNHTLAQFRQIGQGMHTDSVIECVFRKDGADFRLSWRPGDVHALHTLKDGEWVEDTDWAADRFPLSVFSQKMLYELASDNNAFLRVCDDSAIVNKRAWAEHWDELERSFKNEQIMLRGYLARRESASSLSGMLADAERAVSQLSESAYYPVRQRLAVAERELSAATSAMDLHAERIAALQAIVTDSQLKEENTEQSGGLAEFLQRLLSLQQRFARDAGNLLTISTSALEELKAGPLLSVLSAAVETERDNVARESASLRSQGLNPNTLNELMERCERYRNELKNYEGLEEAITASEARTQILLGEMRAHRMALTKKRREFLASLQLQDLEIKILPLCAPPECVLRDYQSITGITNFADRIYDGEAQSGLLHPFISNRPFNPAPAVTEAKYAQLDVIKTLHQSIKHNETDAGQALHGAFRNRLKILQDETLDALMCWYPDDGIHIRYCTPGGTMEDITTASPGQKGASMLQFLLSYGTDPLLLDQPEDDLDCLMLSQSVIPAIAANKKRRQLIIVSHSAPIVVNGDAEYVISMKHDRAGLRPDLCGALQEKEVKALICSQMEGGEKAFRSRYERILN

SEQ ID NO: 2926 - protein, 893 aa, synthetic construct; identical to SEQ ID NO: 2925
  REGION 1..893: note = TnsF-Tn7 System Protein

SEQ ID NO: 2927 - protein, 289 aa, synthetic construct
  REGION 1..289: note = TnsF-Tn7 System Protein
MTLPSRTGCINSSSRSELADNTDWILPLSIRNRTCLNGYQYCPLCLEESESSFFRLDWRFSFSTACLDHLCLYRRTCSHCHVPVQFPRLSARHPGIAYCFNCDRALYEATPQLVPESALHFQRTALWATEQCHALSGTSRVTSQEWFSLCSYYIRLMRVASGRSEGRLARMLAGLGIQIPAGQTSLVPFEQLSAENRLCYFEAILPLLEHGLTCLPGLARESNLNRNTLLNCRLSPPEILATLLRSLPVRPVIRQTRSQPRLLAPHSRRAVLRHLEQLLRKINDGQYRH

SEQ ID NO: 2928 - protein, 296 aa, synthetic construct
  REGION 1..296: note = TnsF-Tn7 System Protein
MNAFSHIHPEFHHIMLMSDADRLAFLEMPRWIGYPKARFILDTMQTLLRQPTRPRMMNLLIVGDPNNGKTTIARRFFDQCGKPYVDENVEPVSPVVIAEAPPTADEKGLYISVLERMYSPYRATDPVARLRYQVIHLLRASHVRMLIIDEFHSLLTGTAIKQREVMNAIKLLCNELAIPIVGVGTREAVRVLHTDPQHASRFDVLVIPPWELNQDFQRLLAAFEKVLPLKKPSRLHEPELALRLHTISQGNLGNLHRLLIECSKEAISKGNEQIDKAIIENNAWCRPTQGVREIMY

SEQ ID NO: 2929 - protein, 296 aa, synthetic construct; identical to SEQ ID NO: 2928
  REGION 1..296: note = TnsF-Tn7 System Protein

SEQ ID NO: 2930 - protein, 457 aa, synthetic construct
  REGION 1..457: note = TnsF-Tn7 System Protein
MGKQKQCEQCLQYADKFGRKYRGKRYCMDCYLYFFVKRACSHCGELKRIHRDEKKPLCYRCYSAITPCVRCHRVGRPVGRIESFGLLCNSCANVVLKPYRKCSMCGKSSRLSIDKKNGTNKPICQSCRYKMYAKCPQCGIKAALYKTSDGRDLCYRCVNGIHYYCSKCGAETYRSNKTLCQRCQACNRNDKRTIFNAELLGNSDIRAMFVDYVAWLTVNVGPAKAASVQNSYFDFFEALQTAPDDWERNVEFLTGLDGGHFRKSSLLKRYLDSLGINCDPSTLKAAMDLRTIHKNISTVLTLCPLGHQFIITEFFNERIAGYKKHRIKLQTIRVESSSIKRLYEHWAQSNDLNTAIRQLAAETPGTRCSLTKYINFATPTIQLTWPSVEASTEYRLAYLTNKYRYGGLTNAELQDYVKCFLFHFYGVSVTTGAFSIASSNSDITALFNHQKLWIAKP

SEQ ID NO: 2931 - protein, 592 aa, synthetic construct
  REGION 1..592: note = TnsF-Tn7 System Protein
MTNALDEIRFSELPDDGNHWVVIEHGAVRWNNDAQDEPLVDIAFRELGSDKVAIRQIAKSYTAYLLRGSVWKNGLLVGERDDLVDMTLDFDLHQLKDIHYITAHSKDIELKRALNRSSGAIHDDPLYAISPKQYPIPSQLKRTKYFPVRTNQGVELIVNCLTVFDALYGHGQFMRKTLFNYYSDKALKLLEFKDYDINEFENPPRAEQYQIGVKTKVLDADVPLVFGLKEFESLQKSVNYLSSQLTRKAEGGDRYLSIRPWFEGNHQWHVTGLWLEPGKRFLALRINKFKYPQLPSFYLVRENRNAQAQEPESGSGTVNLPLYNTDKKPKTSGKGKSNSRSRSTKLFSGSAEMWGEPDIEKPRPKKTENDKGSGKTEPKELNTVSPSDMNSAKSNAGKVDVDRDKQQDNPNKQLSEEESREALYAINLISKALAMIQREQSVNAQVHTLNDSLGWTQHDLLDLSFHHFQGVNNWCLNKRLADRHDEPHKCPKRKYVVLRLRAKGMVFYFVALERFKNNRFRTGILSFSSDQELLEKLPLIEKALIDKKGVWRNINAPFLFSTVSHGAESVTVAKQICRKLGLSLKLGEGDIS

SEQ ID NO: 2932 - protein, 181 aa, synthetic construct
  REGION 1..181: note = TnsF-Tn7 System Protein
MRMEFDEHVEKVVSQPIELSYTDLNGRTQRYTPDYLVYFKTPERKPMLVEVKEREELLSNFQKLKPKFAEAFAVAKQEGWIFKIYDERRIHGVLLDNIRKLRNYSVSSVTDEAQHFLLDSLNKTQLPITVKQFLESFTKDRDEYLQTIGRIWWLARHHLVYLDLSSPLSQNTQIVKAKKYV

SEQ ID NO: 2933 - protein, 641 aa, synthetic construct
  REGION 1..641: note = TnsF-Tn7 System Protein
MSDQHKVSKAKTKLTKGQVIRLDNGDYLLKEFLSKSEVLLVKLDDSKTIEVVKLSDIITAIVPADTSGQVVHDDILAIPKKDLKTAKERLKAIEPLLELGSAFKVRDAKIQAAKVSVHYNTLLRWLKSYNATQSLVSLAPRRRGWNRDKTRVDEETDQIINHCIDNFYLTKARMTPKAVYLRVKEACENANLKPPSQSTVYRRISRVPEERRLRARGHTDIADNRFLARAGKFPGADTILSVVQIDHTPLDIIIVDDEQRESIKRVWLTMAIDVYSRMVTGFYLSLDAPSTLSVAMCLSHSIIPKENWLKHLNLDLEWLVWGIPKKVHVDNGADFTSDTLRLGCMENNINLEFRPVAKPRWGGHIERLLGTFQQNLKDLDGKTFNNPKARGSYDSEKNAIFNFEALEHWLINAIVGYHHEKHDVLGVPPATKWSMAVYGELDDIPHGWPDLPSDPLSIELSFLPYERRTIRSQGIVWDGLYYFSDNIRHLIGAYHPETKKPKQFIIRRDPRNIKRIWVYDDKAKIYLKVPYADPSISFRTVWELREAKAYLKQLGQTDYNQSMLSRALSNMKRIEDESRKATTDARRKAQRDKNHKKSKTPAAFAAIEPVIDEKDATKSETRPTPQDEELWDEDIDDFDIE

SEQ ID NO: 2934 - protein, 228 aa, synthetic construct
  REGION 1..228: note = TnsF-Tn7 System Protein
MTGSPPRPGEISLAHHSILFLDELPEFSRHVLDSLREPLESGHVTISRAAHQVQFPANFQLICALNPSPCGQFDGSLGSCRSTPDQILNYLNKLSGPLLDRIDIQVAVPRETSSLRLDGTQVTGETSEQMKQRVIAARQQQYRRQGCLNSELKASEVVSHCMLTDADHEFLITAIEKLKLSHRAYHRTLRLARSIADLDNQKKVQKPHLAEAMGYRALDQLIDQVRSL

SEQ ID NO: 2935 - protein, 367 aa, synthetic construct
  REGION 1..367: note = TnsF-Tn7 System Protein
MLHAHGRAKVHRVVRGPWPARIKPLENETLSSWLVRASLANFSSPSTVVNYIWPGWRAWTRDIDRELTPDQLKALQQVSSLSESEIDSMLLKPVIMRVNQDTKLNRTNTWPWVIQRSTRNKNTIRSTQFCPLCLMEDVKPYLRRQWRISFITICTKHRINLHDSCPHCGASVEVHKLTRGKLKQCAHCRWDMSDIKPASANNELASVTGMLEKQAFSEQDYSPTHFQRLRYLISLVRRLSAKQSIPQSAATLFQCNEERFYAFADFSSLAFDWLTTDDRRSLLETVAPLMSMGTAQFALSLLESDIPLSLLNNCADTIPEELQQYLPEKRCFDARARNETQNPVKKLPSRRAIERRWQAFLVKHGID

SEQ ID NO: 2936 - protein, 457 aa, synthetic construct; identical to SEQ ID NO: 2930
  REGION 1..457: note = TnsF-Tn7 System Protein

SEQ ID NO: 2937 - protein, 296 aa, synthetic construct
  REGION 1..296: note = TnsF-Tn7 System Protein
MDQFKHLHPKFREVAALPDEQRKQFIKQKRWINYPVATRAINILAETLNYPKQARMPWLLLTGDSNNGKTSIIERFCKLHGEEYVTEEEEILIKPVVVIEQSGPSIRDLYYTILKNFWAPIGPNTVISTMRNEALSHLLQSKTQMLIIDEFHTLNNGTARAKNDALAEIKRISNTLRIPIVATGIPAAANIIREDSQIQSRFTSMQLPKWRLNKDFRSLLNAFEKVLPLREPSELASKKLATEIHAISQGNLGNIHELLKVCANSAITKGTEKIDVDIVESFSCYTPTDGPRYIEL

SEQ ID NO: 2938 - protein, 296 aa, synthetic construct; identical to SEQ ID NO: 2937
  REGION 1..296: note = TnsF-Tn7 System Protein

SEQ ID NO: 2939 - protein, 497 aa, synthetic construct
  REGION 1..497: note = TnsF-Tn7 System Protein
MVTDSQGRRTCDCCERVIAKAHRIYKGTEYCQSCYEKHFVPGRCPTCGSGTRYHRAEREQPECEECLRDKRQCGRCHRPTPRAALIVQVQVPVGTDGRLSPAQSIAVCPSCVPYFREPEPCGICEVLSTRLSRAAHLPADVRACPVCVRKQRHATCSRCRKHRKIESEDGGRPLCKACSGASPVSHSCPECGAAVPGAGGHMCDSCSIATRLTREVELRLPHFQQQWVADLFTGFAQWSRMRRPRDPRLPANVVRSLDFFLQLDRDMTAQPPLQADDLLRVFDSKALRANLNASTFLQQQYGFLVSAEARVAERKRSLTASKLVDAQGEPWELYLQGYAQSLSGRAPRTVAQYVTTAEAFCRRFQISGSFGQAELVAFLSDKPGARTNIGPWVSYVQKELGWPVTLPPKAPGPVALKQDSRRLDRLLKQLERQGEPDRTLLTQAVALAFGFSEPELAREVIGLSESGDLVTTNGPVEVPPALRLVVSHWARACGLLD

SEQ ID NO: 2940 - protein, 671 aa, synthetic construct
  REGION 1..671: note = TnsF-Tn7 System Protein
MRSPIHLPVVDRLQVSNYPLYPGISKQGLNLVFSPGVTVIAGVNGIGKTTLLNLILRMLLGASNPSKAATRDIGKASRRSLVNTKKFKFFVDRVPDLPATASATLTFMIGTSKVVIKRSLVDLSILKLTIGKESIKDIDNAKFLSRMSELAGLSSAYDYHMVVRYVQFFTEERLPLLWSATAQVELFKMLFAESQTMDNLNALYKDIQKIDSDYRNRKYQLNDRLKAHKQVVAAIGLDTTGVEDVRRKLEQSKAELENVQKALLTANEEVNSIVVGQDKARKEIEDLQNKLDIEIHAFHQLDAAYIAQILPGQNDKRDLLMQGLGSNLGCFVCGKAGRKEMAEINRRLKGHHCFVCNGRLPDSKGSEAPASADSLALAESRIDELVSQIDARKSSQNEGDRLYSAALAAVRPLAVRRNELVHELEAMAVQWPNEVMATNGSVPGELASEELALQLLSEERSKKNQQYKAQIADLSSQMAKYENDLGQRLTKYAEEFLHETVQVEFSRNASVKIVTGAVPIKVPTFRISMTSSTHLATHERATPTSVSESQKEFLDLAFRMTLLDMIAADAGTMLVMETPEASLDSWFMARAAQMIRRFAPEDGKSKLIATSNVNGTTMIPDLLGIKQGAKLAQSDRHRLINLMELAAEPGVLKQKKAKAELTAELRGYAGG

SEQ ID NO: 2941 - protein, 671 aa, synthetic construct; identical to SEQ ID NO: 2940
  REGION 1..671: note = TnsF-Tn7 System Protein

SEQ ID NO: 2942 - protein, 220 aa, synthetic construct
  REGION 1..220: note = TnsF-Tn7 System Protein
MTRLNSNIPARPLKNSRRALTGRLNLANGGMAGFESSLERDWLRVLDFNPLVQAIREQPFTIYYDSQDGRRRYTPDVLVELREEKRVRTCVYEIKPLEQLRAEWQELRPRFKAAVAHCKRQGWQFKIVTETHIRTPTLANINFLRRYRSMEPLLVRQAQLKYTASVLGPTTPQALLAAAYWSAEEQAMAIPALWQLIERGELIADLNKPLTMSTPIRLGA

SEQ ID NO: 2943 - protein, 343 aa, synthetic construct
  REGION 1..343: note = TnsF-Tn7 System Protein
MRAGWPPLEPDELLSSYLARSAQIRGLSAQSLVALNFPGSDVWNRDIDANPPESLLLRLAQATDCELTAVREMTLMGMGGPTETLGGSGVCRWVNAIGIYHRSRTRYGLCYCPVCLDQTRYFDRHWRLSYWTVCPVHGLLLRDACPHCNAPLAPHRQQLDICRCVNCHQLLTSSPFRAAIPTDSQGAITAAMQLPALHRYQPCLSATGQEYGAGMHLLLSAFLDARVRCWDAVGHARDRIELRRIHQRHLDLQLLDEIVCRWPYSMLSMAQRFHLTQRSFRQPCPDWVAQQVRQLPLGRMNGLGSPSLTRLRQARVAQLARSLGWRTIRAQILIDIAGKRDGY

SEQ ID NO: 2944 - protein, 633 aa, synthetic construct
  REGION 1..633: note = TnsF-Tn7 System Protein
MSLSNFFKVEPGAEVFVGPRRYRVTHMLSIDSVLAEDLDTGVSAKLRIETLSTIVAAESAADAGGFPIHQYSKEEWSVAQKRFEALRPMIDHPVRTRIEVAKLAAAAGVHVATYYKWLAAYHDAGHVAALVPRKRGAVKGQKHLAADQELVISSAVEDIYLKKQRHSPKEVVEEVLRRCKVAKISPPAPSTIRRRLKEISPAMALRRRGHRDKARDNYEPIRGSFPGADFPWAVVQIDHTPLDVMVVDSVYRQPLGRPWLTLAIDVYSRMVVGLYVTMDKPSATSVAMCISHAMTPKTDYLASLEVQGDWPVWGQIGTLHADNAKEFKCKAVTRGCQANSIDMQWRPVKKPHYGGHIERYMGVVATELKKVPGATFSNTQQRKGYDSEAEATLTMREVEQYLVEFIVNNYHQRPHSQLNDASPSKVWREGVLGSAGKPGIGYPPMIQDVDRLRMDFLPYYNITVQRSGVRLENVFYYDPVLDPYIGATMPDNPGQKRKFLFARDPRDISQIYFLDPAAERYTPIPYRTLSHPAISASELREATRLIKEQNKGEVDEERIFSSIQRNRERIDASAASTKAARRQVAKRPSKKPGKADDAGQSPANLPAAAPIAMAPDANLFDPEVDVFEVGELS

SEQ ID NO: 2945 - protein, 209 aa, synthetic construct
  REGION 1..209: note = TnsF-Tn7 System Protein
MAHHGVLFLDELPEWNRSALETLREPLESGHIRIARAARSVQYPARFQLVAAMNPCPCGWAGDRSNRCLCSDERINRYRARVSGPLLDRIDLHISVARMDAVELRESTPLGEPSAAVRARVEAAHARQQARGALNAHLPPAALRACTKLSEADQDLLEQAIERLQLSARAMHRILRVARTIADLAGCEVIQTAHLAEAIGYRQLDRGKP

SEQ ID NO: 2946 - protein, 615 aa, synthetic construct
  REGION 1..615: note = TnsF-Tn7 System Protein
MTDLTHHPSDSRLWFIRWMDRFNKPHKASTSTAICCFLAPLPEQTVDPAALSPDEVAGLFAQDTELFEAHIQVGAMPNFRVGQVFRQGRRIGVLPAVDLDLGEAIAQGEMSAKYGADLTLDSVIMRSSGFPIKAVPTRQLHLGHRTRAGSQVLVVEDKGIEFIIPRALIFRSFYARSTFLASVFTSSNWNTAKHRALLLDKEFAGHRTERNDELNTFNVVMQRGMRLEDAHQMALLHFYDYAQAQANALFNPMIKAFQDTRPGKETSWFANARLPLDPALGPYNGKVAGYFLKPHTDHRRTLRTFLVTSLVGTSLPNDFRQPGRILVNDGTLKGDVQVTGGPRPYGGSPGNGGRRPDDMPIADTNNGSTNHESYEAPGDSFEWIQAPEAIDLEKRHSKKYQGDRNRNSPPDTENGSQGDRDGSEGSDTPVNGHVASRRDEEHFNELVRAMEAMISQGVLRNYKELYPDDSTRVASIGARSCWNFLDKLQRDTAPAKRLRRGWQFLHPPGKKSGGLERAALVLVITLLDGRKAFWIEIQTRQGAMSPLLIDDGSHSQEQVGTALNIIAGARGANLEREFDRPGAAHFFTHRYVANGEGPWDLSWLKKFFTDIRPPR

SEQ ID NO: 2947 - protein, 295 aa, synthetic construct
  REGION 1..295: note = TnsF-Tn7 System Protein
MSAYPHLLEKVAGYMEASIPERVEFTRSDRWIAYPVAKDVLDDLDQIITYPTIQRPPCRLIVGRGDNGKTAVLRQFHSRHPILLREDGTTNAPVVIIGMPATPDLSQLWSEILESCALTHRRSDTASSKYAQVLAILRYLKARVLAIDEFNNVVNARKGAADVLAGIRKLSNDLNLSIVAAGTEAAINALSFDAQMRSRFKPLALARWQYDRSYRGFLNTYEKLLPLAKPSELASEQLAPLIFKAGGVAIGGTVYLIKEAAVMAIRSGEERITAEIVLKAEERLKQNYQGVVAAT

SEQ ID NO: 2948 - protein, 295 aa, synthetic construct; identical to SEQ ID NO: 2947
  REGION 1..295: note = TnsF-Tn7 System Protein

SEQ ID NO: 2949 - protein, 757 aa, synthetic construct
  REGION 1..757: note = TnsF-Tn7 System Protein
MSTGPAAAARGRVVAVLSTLPGLDETQALQVLTDVNAHRHVALRQVDAYLSRHPDALTTAPSDAPVGLFRLLRRLEAAGIPVQVPVCASCRQRRSNLPERDAAGQRICLGCATDARRKVCSRCGELNRIAMIDEAGAVCDRCYARDSARYEPCALCGRDRRVSHRRPDGSAVCNACHRKPLHRCADCGTSAPASARTPDGPVCSRCYERNHRPRRHGRCGRCGELGVIQVHGRDDTPDLCQRCSRGEQARCAGCGELRFCTGVRTERPLCYQCRPVTTAPCARCGHDRRIVIRWPIGPVCRPCYRRARSHPAECARCKQTRVLIGLDAQQRAVCGPCAGAERDYLCRQCGGGEERFRDGRCVRCVTRQRLEEHFSDNDGDVPAALIPVVEALAAARRPRSVLQWLRNPTSGARLLQMLIRDGRPIEHATLDALPDRPSVIALRHMLVHLGVLPTRNEHLERLPGWLSRLLATVPTGHRGLVRQYAVWSELRRARRRAARHRFTELSARHTRIKITVVVGLLTWLDHHNLTLDTLTQPDIDRWLDNGGSYQIAGFVRWARRQGLIGDLQVPYPQRGEPQITMSDDRRWSLLTRCLQDLTMPVDVRAAGALLLLYGLPLTRIIELSTDQLTEESGCRYLTVQAHRAIIPPALSQLLDALPARLPTDALVSTGTRGWVFPGRQAGRPVSAGGMRTRLRRHGIEVRPARNAALIWMAAELPPAVLADVLGISISSAVGWARRAARDWTPYLQARLQQLPEP

SEQ ID NO: 2950 - protein, 757 aa, synthetic construct; identical to SEQ ID NO: 2949
  REGION 1..757: note = TnsF-Tn7 System Protein

SEQ ID NO: 2951 - protein, 308 aa, synthetic construct
  REGION 1..308: note = TnsF-Tn7 System Protein
MRFIHEHRDQFAVALLLRVLNIGASTYYAWVKQAEQPCDRDVVDLGLISNIHEIWETSGRTYGADRVHRQLRRDGIRVGRKRVERLMAEQGWQGAFLRRGWRGGSTKQDPRHTPAPDLVNRQFTADGPNRLWVADATRIPCGEGVFWLAAVRDAFSRRIVGWKTSDRCDTDLILAALEYGIWSRDVRDGQLIHHSDRGSNYTSFRFAERLQDNGILPSMGSVGDSYDNALMENFWSTLKIELVYRTSWRTRDEAENAIFAYIDGWYNTRRIQKELGYLSPNEYETAWHTRQPQPAEPPIATPAPAGSR

SEQ ID NO: 2952 - protein, 921 aa, synthetic construct
  REGION 1..921: note = TnsF-Tn7 System Protein
MLPVVPGVVRGARRVVLFGPPGIGKTAAAGVLGQQLGMPVLRLAPSPQDAQVPYTGLLELALALQPLPAARELATGIDKAVGVPGSADPAGTALRLRRLTATLLLDTPPLTLVVDNAQWLDTASAAVLRWALRLAPDLPVIAAERIWRPGSEGHWCGEDPCAVRIPALTPDQVATLLSPYRLTPYEVTQTHIRSGGNPALALAFAGARSRATDLPAAQGLVDDLVLPPAARRLVNEWLGTVSAEVQELLTVAALDDRPDRELLSRLAGPPAENLLAEAEAAGLINIGQVDGKIRFAAAAIGAELAARPPVATRRLLHARLAEASRDSIRRDRHTTLAADTNDPQSADCADRAAARARLRGEPALAAELSLLAAERTPETDADLLTERALTAVRDAAHNGDLPRGQAAVRLVLNHDSSPANRVNALIALIDSGGQHLYNGDKLFADALHEAAGHPDLTAQILVRQAIWANVNGDPDRACAQAARAASLARSAGDTATTAMALTMQARIQRILGRPQAETTLGHALSLPRSTHIPVNARPEQLSARHAIFDDRLDEARSALLPLLVEAERTGDAEATVDVLRSLAEVEIRAGRCGLALDYAGRALSLTDRAALDPAPTCYTSALVEGTASCTDSALAHARRGADTSRREDNKVFLSRNLFVLGHLLLVTGRPKEALEALEEVRTLEKRQQVRDPSVLRWHADLAQALISLGYLDQARKLLTDTRRTATDLDRSCVLPVLDRSQALLEATLGNYDAAADLLTAAADHLRHLPIEHGRTLLALSHTERRGRRRASARTAAQSAADLFSTHQAHPWIEAATRTLHQLEPVPAHSSTLPCLTSAEQRCVELAASGATNRDIATALTISVKTVEANLTRVYRKLGIHSRVQLAHLAALTAAPAEALQPGLAHQPGNAFAPTSDSGAQA

SEQ ID NO: 2953 - protein, 921 aa, synthetic construct; identical to SEQ ID NO: 2952
  REGION 1..921: note = TnsF-Tn7 System Protein

SEQ ID NO: 2954 - protein, 351 aa, synthetic construct
  REGION 1..351: note = TnsF-Tn7 System Protein
MDPPAAVFEAMLDGWARQQRVRFLKSETIGRRLELVRRLFRFSNLYPWQWSASDVEAFIDGLRSGPRPIVVSTARGYLADLQMFLEYATDARYGWPAVCIERFGEAPQQVLGEWNTVPHTDGFEGQPGRRPLTYDEVQSLFDAADGRVEQIRSTGRKGALAAQRDAALLKTVYAFGLRRREAWGLDVVDLRRNPKVPAFGQCGAVMVRWGKSSRGGSPKRRTVLLVPEMDWLVPVLEQWLTAVRPRFAPGAHPALWVTERRARLAWRGINEAFVAARDAAGLDPALDLHSLRHSYVTHLVEFDYPERFVQEQVGHAYAATTALYTGVSDDYRNRLLTRALRDRGGILWETT

SEQ ID NO: 2955 - protein, 103 aa, synthetic construct
  REGION 1..103: note = TnsF-Tn7 System Protein
MGIGWQLRLRMAERGMYSTTDLVPLLAERGIRLSREQVYRLVTTPPQRLSMDVLAALCDILTCTPNDLIAVEVVNAQVAKEAGAAGGPPPPVQRSTIRRPPAS

SEQ ID NO: 2956 - protein, 488 aa, synthetic construct
  REGION 1..488: note = TnsF-Tn7 System Protein
MSQCDECGRSVEKIHKNYKSIKFCHTCYVRVFKKRACSSCGKLARLYKYDNSAICQKCENNRPCIRCQRVDYSIGKITKYGPVCCSCSVYFKEFQACERCGCFSQKLSRISRFSDNLRVCPKCATRDYRTCPSCRRYRLLEEDVKSGQMYCKKCLNSPPHYCLICKLKIPAGRGNYCESCSWHQILERRVGKLANNLEDIHLQKHFKNYIKWLEQRVGSHKAALFTAKHIKFFEETDDLWIEQVPAYTELLGRLRTSGLRKFVLPMQWLTQVHHLQVDIQAKEFCSELDQLNRLKNICLEPTFPAQILQKYFDTLMNRVSDGTTTIRSARLAMKPASALMFLVSNSRFNLPRIWHVKHYLSHHPGQAAELIGFIIFLNRNYDTNLNFSFIKNSNFIKAIKNQKLEKEIIKLSKLTKNRFELLLWVRLCLMYFHKFEITHSKQIELNMINEIEDGLEISFRNEIFGYLKLIIFLILAKNQHRYIIDRSC

SEQ ID NO: 2957 - protein, 488 aa, synthetic construct; identical to SEQ ID NO: 2956
  REGION 1..488: note = TnsF-Tn7 System Protein

SEQ ID NO: 2958 - protein, 224 aa, synthetic construct
  REGION 1..224: note = TnsF-Tn7 System Protein
MYNQLCDTVKIVPARRKIGNTRISVSGLYLFKKDSAVPFESTLERDFLIRLEVDPNVLAVESQPFTIEYVDNGKKRVYTPDFLVTYKHDNYLPFIHPKLVEVKPAAELELNLNLWKSRYRAAMAICKEEGWKFHIAHEGRIRDQIWSNAMFLQKYRKMFFSFADSKFLMDYVRDREVVTFDTLLARHFSGKWARANGISQIWYLVAHGFLACDLSQPLLPSTEL

SEQ ID NO: 2959 - protein, 629 aa, synthetic construct
  REGION 1..629: note = TnsF-Tn7 System Protein
MNDRRVNIKIAAGESVQVKGIPHTIIEIIDLKSVFVENKNTGRKGIAAISELQPALPTEKYEDIDLIPDKDWEEAERRFNIIRPFIEDGVSGRKEVELRAKQHDINPATLYRWLKIYNAYGTIDGLRPKKEGLPQGQKMINKHAEAIIEKAIKDLYLTNQRISVQKVVLEVKRLCHEYHILDVPHANTVRNRIAAISQREVLRKRGHKEKANNKFTPAAGKFPHADYPLAVVQIDHTPVDLILVDDFNRQPIGRPYLTLAIDVFSRVIVGYYLSLDAPSVMSIAMCVSQAVLPKEKWLALRKIQAEWPVWGIMNTIHVDNGPEFHSETFRNACMAHDIRLEYRPVKKPRFGGHIERLMGTFATDIHAVPGTTFSNIFQRKDYDSDTQAVFTFTEFEDWLIDFICNVYHKRKHSALGTSPLHAFEQGIFGDKNTLGSGAARLPANDHNFFLDFLPSFERTIQTTGVTIDGLSYYADVLRSWINSIDPDNHKEKRKFIFRRDPRNISEIWFFDPEIKNYFKVPLADQSIPPFSIWEHKKIQELKKETGEYLKDHELGQALAKLRERVQEASIKTRRARRTYQRNTQHQQRINPASIQDKKSQYESTVMDQQFESLYGLLPLDEVENDEDIS

SEQ ID NO: 2960 - protein, 291 aa, synthetic construct
  REGION 1..291: note = TnsF-Tn7 System Protein
MVQIVETHSWVIRRLPYEDEALSSWLIRVALESGCDPLSLTGLLWPKWRAWAVDMDKGLDQEYLDILVRKAGTSPDHFNTSTFKTLFLQNSEINLEPWILALGTRNRKHKSGWQYCPKCLESDPVAYFRLNWRYVLHVGCIKHNQRLLDQCPHCHKAIQPRLLEAPDQTLSCCAVCKEKLFDVKANVIDHNALALQKDFDLFLKQGYAIYDDTLIPISEWLSVIQLFNQFIRKVLRSSLNSKGWAFLNALDIRVPHPQLSSTGLILSQISVLEREKIFACISQLLNVSQIK

SEQ ID NO: 2961 - protein, 283 aa, synthetic construct
  REGION 1..283: note = TnsF-Tn7 System Protein
MSNYPHIFQEFRPIVDQSNEDRLYFLEEDRWIGYPAANDLLDQLAGMLTLPKRSRMPNLLVLSKPNNGKTSIINQFFKHYGEGYTNELNNAVKPVIVVQAPVSPDEKALYMAILDRFWEPFRERDPVAKLRYQVVHCLKLYEVKLLIIDEMNSLLCGTPIKQRTVMNAIKYLCNETQIPVVGFGTEEAVRVLYTDPQHVSRFRIVTLPLWQLDKEFQAMVNKFEKVLPLKQPSRLAEPATVKYLHGITEGNLGNLRSLLREAAKKAIITGQEYINYQLLESVK

SEQ ID NO: 2962 - protein, 283 aa, synthetic construct; identical to SEQ ID NO: 2961
  REGION 1..283: note = TnsF-Tn7 System Protein

SEQ ID NO: 2963 - protein, 311 aa, synthetic construct
  REGION 1..311: note = TnsF-Tn7 System Protein
MWAGEGKRCHHCYWSDKLTHQVKLNQYIFHHQTIKQGFYEFVQWYANKRSNAVVSMKINNHIDFFSKCDELWSDFPNYETLVSEFKPEGLRHATNVLRWLVDSKRIILNEELKTQIAEEERIVKLFEKLGEDLPIFIEKYHHYLINRQLKRKTALKTIRLALQPVIDIYYQFDVQNAHIPTQEQIDIYLSQRPGQKNCLSSFIVFLRETQNKNLCINSNPKTNNAKVTVLSKKSETEKIMIKLINQSSPHTENDRLQWIYLSMLFFHGITLEMGKISQYQTEVNDTSKMMVLYYQNMNYFIPMLTKREQLT

SEQ ID NO: 2964 - protein, 311 aa, synthetic construct; identical to SEQ ID NO: 2963
  REGION 1..311: note = TnsF-Tn7 System Protein

SEQ ID NO: 2965 - protein, 293 aa, synthetic construct
  REGION 1..293: note = TnsF-Tn7 System Protein
MTKLNPINEPEELLSYKISQSYVDFSEFLRRRTGKRKFVAPAHRFLKFFEECDVQWGKIPSYEIIIHTFDDQFVQRNMPVLGWMVKTHQIRDDDMTEQILISQAAIQEMFVAFGDNPPSILQEYLLFLNKRQEQRKSKPSSVRTVFQPIIGLYYHYGLKDNQTPSQAQIDRYLVKNKGHITAIVSFTHYLNTHHQFSLICKRATKRILDKSTYRVVGDKDRKKFERQFIFLAMLEKPLSDKQKIQWINNGIKYFHRFFIDVKALSDVHIRPCEYYEGLMIVQYGDKLFALPKF

SEQ ID NO: 2966 - protein, 214 aa, synthetic construct
  REGION 1..214: note = TnsF-Tn7 System Protein
MKQMRKIKPTRMSVSGRVPYKGSSVPYESTLERDLIIVHAFREDVEDIVAQPITIPFVKNGITYKYTPDFFIKFVEDIDKPNMIIEVKPYDLWQENWRDWSDKWKTMQRYCKDNGYIFRIYDESRIRNTALNNINFLMTFKNSAIEREDQEAVLEQVRLMGTTTIDYLLTRFYTGSLLRNHGLRVIYHLLATKQLKFDLFIKINDLTEVWVDDE

SEQ ID NO: 2967 - protein, 717 aa, synthetic construct
  REGION 1..717: note = TnsF-Tn7 System Protein
MMNNNKVLESNSSIFNRHLDDFQKIGVEVDIINESMPTIEGYGFMVDHDEEGLNKFDIKRGRIDLRKGKTYLNKADNKHYELVEYLNESIEVVVRSVETGKTSIVHIRSLSNIEDQNNDHINVDISAIGDEEWQKAQVKFEAIKPIINTEHKYNHRKLIIKRSKETNVSIRSLYRWTKQYQSVGSIAGLVEKKRGWKEGGSRLTKEQDGVIQRAIKAFYLTKQRASLEQTYREVFRICSMERIDKPSKKAIRLRIDQISEYEQLKKRGQIEQARKKFKPTPHSFPNADYPLSVIQIDHTPVDLMLVDNEHRKSIGRPYLTLAIDVYSRMITGYYLSLDPPSATSVAMCVARSILPKESLLLEHGIDHTEWQVYGYPQKIHVDNGADFRSNTLARSCEVHGINLEFRPVARPQFGGHIERLIGTFMKEIHGISGTTFSNIKEKDNYDSEKEAALTLDEFEVWLLTFITKVYHKRIHSTLGRSPTEQWSLGIYGDGENIGTGLPSLPEDSKTLLLDFMPSFKRTIQHFGVTVDSLRYYDPCLNIFINSTNKDGSKRHFLFRRDPRDISKIWFYDPNLHQYFTVPFANQQLPNMSLWEYKKIRKQIADKGNEYINEHQIYEALTEMRDLVANSSKKTKSARRQAQLQKTHAKSQTIVARTMMASKKSQLPNNESVELNDADEIEASLQSSTQASKKPAKNIVEQNGLLLDTDDFDFGDIE

SEQ ID NO: 2968 - protein, 299 aa, synthetic construct
  REGION 1..299: note = TnsF-Tn7 System Protein
MKLSNRIAELTHALDRVSTIFQGFQPQNQVEIETLLIENIAFRWQRGQGVFSQGHLIAISSPQLITFEELSGIDRQIEKLYQNTNQFLKGYPANNVLMTGARGTGKSSLVRACLSSFHNEGLKLIEVDKKHLDDLPDIVEIIKGKDEKFLIFCDDLSFEEGDDGYKGLKTVLDGSVAGPSSNVLIYATSNRRHLVTERMNDNHDLRKDDKGEIHPGDSIEEKISLSDRFGLQLHFYSSTQNEYLDIVAKLLNQYELELNEKIQLLALQWATQRGSRSGRIAVHFVKDYVGKKLMENSRK

SEQ ID NO: 2969 - protein, 299 aa, synthetic construct; identical to SEQ ID NO: 2968
  REGION 1..299: note = TnsF-Tn7 System Protein

SEQ ID NO: 2970 - protein, 596 aa, synthetic construct
  REGION 1..596: note = TnsF-Tn7 System Protein
MNQFFKINNPREKHKNFFRLNYYIERSRNSTIQHFKNNFEYVVVWYEKEFITLSNADDAIIYVNVIFANLTQPTYLKETKGGTKESTSYLTVSIPVNYIHKLPFGSIWKNGKSKERFSLDTYEVLVDNNYEIYSYSKANRDMKYSHEEDRIRELPFDTEQYFDKIISYDKSQLINIKGTDQDFVIHPLSLFIIHYGYSTDIKRIITKYSLEDIFKRLIIEDKDVDVRMKARGIEEYVILPLNFTQRDSVFLHELKYNNDVKEKVRAIHNAVQLDKTSGEATIKIDFWHKPLTIRLKGIRIGGKVLCANIINIDEPDIAPVNFVVKPKRKLSIGNSKESQDVLNVRQHTVPDNVEDIDFTDNQVNNLGTLLIVEKIEHQGRLVTINRIIDIGDTKIRSIDRNTKFVKAESPQSFSLGDKHGNGFTGLANTRFEVEGSPKSQSRFARIWENAKAYAEEHQGNAQWFTFDQGFKSIDELSMMSLTSFHEPSEKNPLPHRVLVIEIKMNEDKYYLLEFGQVKFKNSDKLKGFNGIVYKADIDEDFTSRQGLLLNILMRVALLNGTLTYEFPDLYEGKLALFKHHEKDTSDWVKNGIENLL

SEQ ID NO: 2971 - protein, 386 aa, synthetic construct
  REGION 1..386: note = TnsF-Tn7 System Protein
MFSVKSLPVATRLLDNESINSWLLRASLNQGCNLSTILFYHWSKHNLRHHDFDKGFNHIDKQIHQDMAMLAKTNVSSFDNRSLIKLNSDIGLEYQPNSSLTWILPIPKFHSKTMVGHQYCYQCMHEDKNAYLKIKWRFSWFVYCKQHLISLQNTCASCGLPYQPHLIKADHQFINKCPHCREKLCAHIEKGPICLDTYQFQTMAEQALFTNQATALERQITSADWFELMLFFINLIRKSTLEKNLIYYNLIKTFGISVDNLKLSKTRTGLKFDYLSYDERVMLMAYANQMHKITFDNWLSACEKNNLTQNSFRLGKRPVIPKAFLPVYEELPSVTRSQLEGQRTILKPKSSKAVNTSWERMQLRIEKLRIYDQTKPNKRTRRVTKL

SEQ ID NO: 2972 - protein, 299 aa, synthetic construct
  REGION 1..299: note = TnsF-Tn7 System Protein
MNDVTTDEAAAYTHVYKDFRHLVEYSDEDRLDFINEARWVNYEIADNIILELNGLLKFPKRLRMPNLLIVGDSNNGKTTIAHRFFRKHGMPIEENGVLIKPVIFANAPASTNEKDLYMSILEALHMPYRTKDSASSLLYQVLHLCREYQVKMIIVDELHSLLTGTPRQQRQVMNALKTLCNELQIPIVGIGTQDAKRVLHTDPQHASRFDIVEVPLWKLDKRFQELLFRLEGVFPLKKPSQLHLPKSASLIHTISQGNLGNIHRLLSVCAKDAILSGTEQITEDILTKNKSVRPTEGLR

SEQ ID NO: 2973 - protein, 299 aa, synthetic construct; identical to SEQ ID NO: 2972
  REGION 1..299: note = TnsF-Tn7 System Protein

SEQ ID NO: 2974 - protein, 492 aa, synthetic construct
  REGION 1..492: note = TnsF-Tn7 System Protein
MVGVKQSDCTGCGAPVGFIDRHYCCRCTASQKEAAARAACPRCGRQRVLQADTGRCITCSRPRQGKQPPRVCEQCGRVRKHTGLGLCSACWQRHPDRPFVRAEHLTAELDQPPDWLRDFAADLAAKYSVGRACTMITSLGRLLLDGQPNHPQAVLERSRRPGRSMGTLARALETFFTMHGLAMVTDQAERLAAGRRRRRIDAVPQDLRPPVQAIADFMMHSRERARRAGTRPRSDATVEAALAIVRDLARFLAGHRGKHDWALTDVHDIEAYLTNQPKARKRRLVVLGQFFRFARSRKIVLVDPARGLTSRGPSGFTGATLTLDQQRALFRRWTTAPDIHPHEALLGVLALLHGVSSREVKMLQTGDLDLRARTARLGDRPHPVPLDPASWSVVERCLAHRGAQRTNNPHVMVTRQTKSGRGPASTAYVSHVLDDCGFPPRMIRCTRLLDLVNTMDPKLVAAAFGMGPEATMIYLADHIDETRLSQWETPRT

SEQ ID NO: 2975 - protein, 354 aa, synthetic construct
  REGION 1..354: note = TnsF-Tn7 System Protein
MTAQLRVVQGGAVLLEPVTADPWEFQAECVEAFVGSWRARGFSPVTVENDIGLLERTLTALGRPAWDVTPEDIDRVVGDLALAGRAVSTRRDYVQIFKGFHRFLQVRKAIEIEAGFGVRLVCPVDEFNASRHVGDDSPAQLPPPTPERVAEFFDFLKARMPTARKYAPAARDYAMFRTLYHAGLRSEEASLLDRPDVHFTRGPFGKLHVRFGKGARTSGPRPRWVPILDGLDLVLHWFLDDVRGKFPDSPVLFADESGGILHRGTIRNRLRYLMELEGRPATDRFSPHALRRACATHNYERGVDLVAIQQLLGHWTVSSTMRYVRPSATFIEDAYRRAVTTTLGELTAEGDSSA

SEQ ID NO: 2976 - protein, 1374 aa, synthetic construct
  REGION 1..1374: note = TnsF-Tn7 System Protein
MAGAGAADGLAAAVAQVRDEAGLVVGAGFLVAKDLLVTCAHVLADGRYGPGSTVTLAFPRAHGAPEVTGRVLEGTWRDPDEQDVALVRLDHPVGVEPLLLGSAAGARGHHVRSFGFPVQAPPGGHFGFATAGGILPDDGKVGEVLQLTGANDLTQGFSGGPVLDETTGLVVGMLTAITDPDSHDRGQAIAYVTPTSVLREVWPALGESDVSPYRALEPFTAEHARWFRGREEAVRQVLEGLRGGQRVVLLLGPSGSGKSSLVQAGVLPALTAGSLPGSDRWHQVLTRPGPDLPTALTRAGLPESEPKDAGTDTTGGADSGSGDAGATPDSSRVVLVVDQFEELLAPSEGPEALQALARITAAIRSDAPLSVVLVMRDDFYSRLSALAPDLLDTALQRKGVLNVPATLSPADLDAIVTGPAHDLDTPFEPGLAEQIITDVLALNPGTAATGGAPVTALPLLEVALTRLWERRLEHDGRLTRDAYRRIGAVTGALTDWCENALSELDQGQRDIARRILTALVRPADPSLNIPAARQQLPISDLRQLAADDDTPDALRAVDKVLAVLSRHRIVTTHRLHGHARPDGPQDVEGTAVAELVHDALIRDWHTLRDWVEEDLRFLDWLRRARDQYDRWKEHRNPRDLPTGTLLAEGTDWSRQRRRLTTDLDNFLTAGRRRGRRLNTILATTLALALIASGIALWKWQTEITTRQRAVTAQQVAQSRQLAAQSVSLTVSNPELAALLAVAAYRTSPTSEAATALSDSARIPLRHRLAVASIGGVDSVAFSPDGKTLVTGSSGSTVRLWNVATGKAVGGLSGPPGDLAATSAAFSPDKHTVATVSKQGALRLWDPTADTIETLTADAGTTSSVVFSPDGSTLATGGHNGRAQLWDAATRKATTAAPPSEASVVWSMAFSPDGKTLAIGGDRGPVQLWDRTTGRITLTGQRDVVWSVAFSPDGKTLATSGANGFVQLWDTATGAGRATFTGYTGVERSVAFSPDGKTLAIGCDDGIVRFWDTTAGTTATATATVASHTDNVRSVAFSPDGKTLATGGSDGSVRLWDTDAIKAVTTFTGHSSSVRSVAFSPDGKTLATASKDGSVRLWDATTGKSTATLTPATVNGKLAESVESVMFRPDKHTLATASSVGRVRRWDPATGETTDLTGPNGLTDDVTSVAFSPDSQTLATGGKDGFVRLWDRASGETTDLTGPKGPTSAVTSVAFSPDSQTLATGGRDGFVRLWDRASGETTDLTGPKGPTSAVTSVAFSPDSQTLATGGEDGFVRLWERAGHKNLATFTGRGPVTSVAFGSDNSTLAAGNDDATARLWFYTPPDTAISTICAAVARDLTSKEKYTYLPESSEPVCPLMTAPTTALPRTPSSALP

SEQ ID NO: 2977 - protein, 483 aa, synthetic construct
  REGION 1..483: note = TnsF-Tn7 System Protein
MNEITDKSCDECGKNVLKIHRVYKEHRYCSTCYARVFKKRICPRCKALKRLPSTDPKALCTSCEASKPCVRCERIGRPVGRITVYGPVCNSCSPYFRIAKRCEGCGTPSSSLSKITRLGNDLRLCPQCQRRDYRTCPDCHRYRLLIPDGDNGKKRCRACKEKGKIPCMYCGALMPGGRITRCEDCYWLEVAHKRIYINQQAFSSRFMADAFGKFGAWLISQSSAQNAACSLSRYLPFFRDIEQIWGTFPHYPALVNYFKPEGLRRVRRPMRWLCETTDCVIDPNIRKNASEENRIANILATFTSTTVAGQALREYEKLLRVRQQNGKTSVRSIRLALTPAVKLLMTSNDIKKTLGNLPEQDALDHYLLKCPGQQAAITGFINYLNDAYSLTLMSKVNRRKTREFRRKKLEEKLLLFLRDKRPNDTTDLEQWVLIAIEYFHDIRLTKRELRSVLSTIVSTEHSGISLKIANTEYYLPLPNLTHK

SEQ ID NO: 2978 - protein, 603 aa, synthetic construct
  REGION 1..603: note = TnsF-Tn7 System Protein
MHLGRELKRVSCATRLKEFLTGNSEKWITWWYCGIYKNQRAGSQPNVLVGFRELSDDGSLSDDLIFRRVPLTSLGQMRVGTVWRNGECLQETLYDTQIFDVNFDQGNWQVTSFQYAAHSDLPPPYPFALYPLKIKKDRNWLLEFRLRSGGKLVVPCLEFFSRCYGRSQELKRVLTTYAWNGIDGGVENRLYAPLDQPEENGKWKVKLRKRMVNGDTIFLAHAKYDRYTERQAKQVYAQIEANYDPNGKVPAFVKIEPWFRGDAQLKVKGIWFDEGKSFLALQITGGSDPGGVLIERNRENSNKAELPADNQESGQAWLGAPERNLVKPPEIIDLTDELEPDHGVSPIEIHDPDFEVLGQPRAVIDYKNKKAQDSAGDKGIGGYSTTFSTGEPYGGGKGIGYAAIHARPVMESQGTLRDMWNALLYYKDNSPKSITSVEWFTFEDGYKYSEEPKIIGIPEFTEQELLDPLHTLTTAIKNWPYMDSTTKTEVRGVLVARLHINNEYIHILEIQRRPRKKKDADGQVRDSEESFKGFIFKIKNQNEIEVYLRDFLSDVRHVKGIVQHLVNRCPGRAATFNHSVANDDRFPCESSVLNALAKMDMIL

SEQ ID NO: 2979 - protein, 483 aa, synthetic construct; identical to SEQ ID NO: 2977
  REGION 1..483: note = TnsF-Tn7 System Protein

SEQ ID NO: 2980 - protein, 235 aa, synthetic construct
  REGION 1..235: note = TnsF-Tn7 System Protein
MEPIMPTNSCDKVHHRQTRKIGPTRRSVSGRLAFRGQTSVSFESTLERDFLIKAEFNLSVLDVISQPTSVSFYGVNGQHYSYTPDFLVYYRLGDRAYGDYPKPILVEVKPENEWRNNWRKWLPKWKAAWRYAQSQGWEFHIYDESRIRDQTLNNIRLLERYKRMQFPTEECQTIINTVKQMGCSTADYLLARHFLGIYRAEGISLIWHLLATRQLDCDIGLPINELTNLWVPDYE

SEQ ID NO: 2981 - protein, 640 aa, synthetic construct
  REGION 1..640: note = TnsF-Tn7 System Protein
MNNSYESYNESFEPRRGKVNIEIDALVQRDGAIYRIVQILDFESVIAVDVETGRTVPLRIGELRNIQESISTHSHSETLQDLSDIADEDWQVAQKRYAAIRPLIGQLYIGREGAERRAKEVGINVATLYRWLKRFNAYGSVTALLPMKRGWKEGNQRISKEADDIIHQVIRDYYLTPQRPTVKKTVIEVFRRCNERGIQSPSHMTIRARITRVSEKDRLRARGFREKALNKFSPVPGSFPNADYPLAVVQIDHTPADIILVDDLYRKPIGRPWITLAVDVHTRMVVGYYLSFDPPSETSVGMCVANSILPKEEWLLLHNVDTQWPVWGIPNTIHVDNGADFRSNNFQRSCLAYGINLEFRPVRQPRYGGHIERLLGTLLREIHDLPGTTFSSIKDREGYDAEKHASMTKSEFETWLVTLICKVYHQRLHSSIGMSPMRKWEIGIFGNNQVQGIGLPPRPADRMTALLDFLPSFRRTVQTFGVTIDGMRYYAEALRPWIGSKDLETGKKLDLLFRRDPRDISSIWFFDPDIKQYFKIPFADQAIPPMSIWEYQQAREKLKREGIDSVNEHQVLRSITELRAQVDEAKEKSKKARRQAQRRKEHEKNLIQNKTLAAQKVAPSSSEKLNGLIEGDIEIFGDIA

SEQ ID NO: 2982 - protein, 378 aa, synthetic construct
  REGION 1..378: note = TnsF-Tn7 System Protein
MAPANSGDSRDRYVMCLWALRVGLLPNESISSWIIRAALMQGCDPLTLTGYVWPRWRAWTLDLDRGIKNERLEILSQVSGIPVAVFEQASLQNTVELIAGHRLESNGTWPWVLALGSRNRKRVAGMQYCPTCLFDDSKPYFRKGWRFAWQTACLHHKVRLLDRCWSCGAPVEPHRLQANDRHLAICVECKADLHKAQRIPINQITRNFQINAEAVILNAQGLYNTETITSHEWFALARFFTGMIRYCARNQASNIAKALFELRVSMALDDSPPIFSLPLEMLSPEHRETLFASVAELMAFSGQDLFYAFNNAGVSKNSLQAISRTLPTTFNLVTDRLPVNKRLTRIKRRDRCKTPKSKRSVLMSWARLQRKIGPISDE

SEQ ID NO: 2983 - protein, 296 aa, synthetic construct
  REGION 1..296: note = TnsF-Tn7 System Protein
MSGNDHIHTDFQHILGLTQQERLDFLDEPRWIGYKSAQLIIDSLQGLIQKPKRPRMPNLLIVGDPNNGKTTVVHRFFELCGKGYVNDDTEPVKPVILAEAPPSADEKGLYMSILERFFTPYRATDPVAKLRYQVIHLCRACHVRMLIIDEFHSLLTGSPVKQREVMNAIKLLCNELAIPIVGVGTREAVRVLHTDPQHASRFDVLSLPVWQLDHDFQRLLASFEKVLPLHMPSRLHYPELAAIFHSISGGNLGDLQRLLVECSREAILTGAEHITREIVESKAWLRPTRGIREIVT

SEQ ID NO: 2984 - protein, 296 aa, synthetic construct; identical to SEQ ID NO: 2983
  REGION 1..296: note = TnsF-Tn7 System Protein

SEQ ID NO: 2985 - protein, 463 aa, synthetic construct
  REGION 1..463: note = TnsF-Tn7 System Protein
MKDCSQCGKSVIKYHRIYKGEGYCHTCYVRVFKLLPCSKCGEIHRLYYKEEQAICEACRHNKPCIRCGKEGYEIGKITAYGPVCNSCSPYFREKKPCGYCGVLSSKLTKTEKNGTGLSICPKCYRKEKGYETCPQCHKNRLLIETEHGKMCKKCHEVGLINCQTCGIKMPAGMGSICDSCSWLKRFKQRVHLLKFTISAEQIRAAFIEFSKWLLQDVGNHKAALTIELYVPFFVEITRYWNKLPSYEVILHHFKPKGLRKYLKVKQWLHILYQGNIQDSKKTDLAEESRIDALFADQPIACELLQGYRAELMARLYAGRTTLKSVRLALQPAVGLLLQMISQIPTQSEVGRYLAERSGQQAALTGFINYLNKKYELKLVCKHNEKDRIQVQQRKQKNLENEMIAFVIKSREEPNSIHVIDWIRLSMQYFHDCSYKKTSKFEVKQEQCIVFQDGKKYTVPSFIL

SEQ ID NO: 2986 - protein, 1630 aa, synthetic construct
  REGION 1..1630: note = TnsF-Tn7 System Protein
MIKINASNLSAQQKNLISKLNIEIQKQPKNKQWQGFSFFARSFGNQKQQYDLVLLTNANILCVEFCNVNGQITSDQYNNWWVNNERLSPSPLTIGGKKARKLTTEIEAIKHQLHNADQLVKNPHFLPKVLNLVVMTGKADWSALNGIPFVDRILSFEDFCQLIPNEDFYLHFSKSKKPLPMNAKQLNRDFNVLTKILTHNMEPITSQSIEGYELGSLLIMHSRKLYKVYSAESMGNDNAVIKQWDFFSHTVTDKHRKAIINNGINTVNSIKIKNPQLYEKCLISLETNPQDNVDQYYDEVIELPDTNHITLKSYLETCPQGLTTKKLDLIQSMIYVVSELHKLGIAHGDLNSFSIWVDSTNKIKLSQFTSAFNPDFKVDNAVRTILPLHNQNIFDEYSLTPYTKDVFWIACLAWHIIEGLKVTPHSISAFKALNHSDWLTDLFSQAANFAYTDASDFLAAFLNSRPPSDIEHQVSPEILSSYIRNESLEQYSNIVFETLPNPLSSYDCLYYKAKLDKLDILKNQGVKSYIPEITAFGIIEQDNQKIFFSVIQSINTPRWNDCDLGSLCFEDKKQLAVNLIKALQHYHHLQYSYGQLSGETIHVDLADLTIKLSNVLEPEPAHQGLLDPSDVEMPTVQQRDNYAVLQMLNALFREELEYEDFDWLCEAFLLEFEQKQGKYLDLSRFLDTLLVEGQEEQVPTLIVNGSGWSNGDDDSSPNNFNYILPDNGKIYGHIKQQSGRDLEVELWGVGGKVSFFYTDYQQNPGLRPRYVQQKSFINKKFIDNSVFELNIRIKVEDERSFYRSNLPWLTDFLIQNDDFNHALQEFKTEENSSKEYVEFSEEVVDILDSNEMSTKALWRLIKDTEEEALPIVELTDVLKPIRSNHYINYYKANYDPVESNDVLDRFQKKDKVQALLVTENRDGEFETKLVGEVDMIKSTRGALYIKNCKLTRLNEGSRLTLQNIAEQSSNRRRKIAIDNILRNRSVIPNLIEYFEKNSSSEVVKYDVDFCDQQLDYYNSTTREGKTIALNATQRQAFEQIITSGPVNVLQGPPGTGKTEFISAFVHYLFHHRLVKNILVVSQSHEAVNTTVERIRQRFTGHKQDVSIVRISNKAELVSKDLLDTYSGSIIESQQAFFQETLIHRILTLGSHLKLKEDYLTDLIRVKVEIFEKVKQTRSKISDEEDAGTVSLAAFKQFVLYKLESLHKIYELDTDDLGLDITSEAFWEIIEKAVMNALAEEYAVDPENSAKAQALIRLAKDCETLIDAPYAHYERFLAQTRQIVCGTCVGIANNSVDISNQVFDFVIIDEAARSTSSELAIAMQTGKRIVLVGDHKQLPPLYTSEHSNLLKKKLGISNHKELDDVLKSDFEHVFNSPYGKRISAQLLQQYRMAPAIGNLVSDCFYEGKLQTAVCEPPFDKKDNSKRVVPSIYHSNKVKELQSTVTWVDTGGKGAFHQKISDEKTSLYNPHELNEIMNFLRRIDSDPALLERVNQNVKKDEAAIGIICAYAEQKKQLIKRFAAGNFSTLLQNSVKIDTVDSYQGKENRIVVFSVTRNTPDFSSAFLASENRVNVALSRSMDRLVIFGAMEMWEHEKNSNSPLYKTLAYIKKRLSQPEYKILKRRNENVQGEK

SEQ ID NO: 2987 - protein, 1630 aa, synthetic construct; identical to SEQ ID NO: 2986
  REGION 1..1630: note = TnsF-Tn7 System Protein

SEQ ID NO: 2988 - protein, 463 aa, synthetic construct; identical to SEQ ID NO: 2985
  REGION 1..463: note = TnsF-Tn7 System Protein

SEQ ID NO: 2989 - protein, 215 aa, synthetic construct
  REGION 1..215: note = TnsF-Tn7 System Protein
MYKSVRKIGPTRRSVSGYYSFRNTASIPYESSLERDFVMLHEFDDNVVEIISQPVSIPFTLNGCNYQYHPDYLVLFQNCAKSGMLVEVKPEDEWRENWRIWRTKWKAAARWAKERNFLFHIYDESRIRGQELENIKTLNSFKRTAFNEQEIKEAYDFIHSSGMISVADYLVHFPVAQHARQSQLLWQLLAKRILVTDLSLPLNKNSTIEVSGYGR

SEQ ID NO: 2990 - protein, 636 aa, synthetic construct
  REGION 1..636: note = TnsF-Tn7 System Protein
MEDNSKDNPISLNREQLDFSIGSSVIHIPSGKTYKIKRQIDFSYIECQCAETGRVEVLPIGSLKKANHPVEMNYPDLINIEPDDWKEAERRYNLILPLLKQEIVGRKEIEEYAKEKGLGYVTLYRWFRSYKATGAVTSLIPKQRGWQEGNSRLTPEQDKIINDVIHEYYLSPQRISQHEVFEQVKIVCSQNNIPRPTQNSVRKRILDLSAKAVLYGRGQPKKAKDKFSPKAGMFPNVFYPLDVIQIDHTPVDLMLVDDVNRQSIGRPWVTFAIDVYSRMILGYYLSLDAPSEISVAMCIAHAVLPKEEWLAAKEIEGEWKVWGIPKKIHVDNGPDFRTETLRRACLEYDITLEFRPVKVPNYGGHIERLVGTFMEKVHRLKGTTFSNIKERAEYDSEKYACMTFDEAERWILKQIVMIYHKEIHSALAMSPTSKWRDGIFGTGDEIGCGLPHVPSNPKTVMLDFMPFEERTIQNTGVTWDGVRYFDFILAPYIGLQGADGKARKYIFRRDPRDISIIYFLNPNTKNYIPIPVANQNLPSTSLWQLRASKKRLKERGLKDYNEHQIIETLIEMQQLVENAEAQTKKMRRIRQRSKIHQKNITPVQPIEKQQRPENVVTPKMDGLLDADVIQPFEDIQ

SEQ ID NO: 2991 - protein, 360 aa, synthetic construct
  REGION 1..360: note = TnsF-Tn7 System Protein
MKISILRTPHLIVDETLSSWLVRSALYQGCDPMVLSWRIWDKYRIWTIDFERNLPYEHLFALSKATGLGVDVLNEMLLIHQAKKCVHDFNTESAIWSWVLCQGNRNRKKSVGQQYCSHCLAEGTPYLRKEWRMAWATVCTKHQVLLQDSCPECGFYFSPHKLKGLEQVLSICHHCGFDLRTSKGIQGNSAFQKAAQAAIQQGYANYGNTSLLTAEWFSVAKVFVLLLRKAAAHQDGRFANIFADLGICIEKLVLPRTVGTFEWLPIAERHGLLRDCYTLLRQPLETFIAVAQSHSLTANAILNVVPQDKLPKTLFPLVNSLELQSKNYSKRQLGNEPASEKSVMRKWARLQRKVQRIVAS

SEQ ID NO: 2992 - protein, 294 aa, synthetic construct
  REGION 1..294: note = TnsF-Tn7 System Protein
MMQNFTHIHPKFQHIAVLSDAERIEFINTARWIGYQSAKDILQRLEDLFSFPKRPRMPNLMIVGESNNGKTTLIQHFYEKYKEPYETEDLELVIPIILIEAPSTANEKALYISILEKMAAPYRQTASTEILYTQALHLMRTYRVKMLIIDEFHSMFTGTARKQREMMNALKRLCNELQIPIVGVGTGNAVNILFTDKQFASRFEVAELPVWPLNADFQRMLMSFEQILPLKHKSNLHEPSVAQAIYYKSEGNLGNISNLLARCAIKAIRNGSEIIDLDLINAQKDFLSTTRGRV

SEQ ID NO: 2993 - protein, 294 aa, synthetic construct; identical to SEQ ID NO: 2992
  REGION 1..294: note = TnsF-Tn7 System Protein

SEQ ID NO: 2994 - protein, 809 aa, synthetic construct
  REGION 1..809: note = TnsF-Tn7 System Protein
MNASDPLLDPLGAVTAAVTEVDPDADREMVRRVVEDVGGGRAKRRRLATAVTGNPTVLSTGRSPAPRVVGDLLLALRAAGATRIAAPRCARCDREVTAMQRREDDWFCSPCFVHPQVCACCGQQRQVTFRDRHGRPRCGQCPDHISGDPVAALVAIVTSIDPGLTADAAATAITATIVKAGHINKLALALEATPALLTGDGATAPFPMVLRLIDKLCDNGATIIRRPACPRCDRVITLSKQLDDVRVCRNCYARARAVACSRCGTVREPATRDSQGRPLCPNCLIDDPINREECIGCGRRRRVAQRSDDGPLCPTCVPKTISICSVCDRTRPCRISTITGQPWCSNCSHSWATCSSCGTLAAVRAGNRTAPLCANCTIADPTIWKTCPSCGDSGQLLAQDCSRCRLRSRVDELLTDADGTIRPELHTLHETLIGVDRPGTALNWLTRSTAIAVLGELAAGTRPITHAALDQLPPSKTLAHLRAVLVATHALPARDEHLTQLEAWTTRTVAARSDPDEKQVLHRYAVWHVLRRLRQRTRDTHTTANQAAFARGHIHAAATFMDWLTANELTLATCTQLDLDGWMAVATAAQRGRTGAFIRWAKRQKLTRLDFPATAWTGPTGVLDTEGRWEQARQLLHDDTVDPEHRVAGLLVLLYAQQTAAICRLSIDDIDITDDHVAVRLGREPVVVPEPLADLVRQLVANRQGHARIGEHGGSRWLFPGGRPGQPISSFQLTERLRQIGLQSGQARSTALFQLASELPAAILARLLGIHISVAVKWQRVSSGDWTNYAANVSRRHNQSPDPTERREA

SEQ ID NO: 2995 - protein, 350 aa, synthetic construct
  REGION 1..350: note = TnsF-Tn7 System Protein
MATLAVVRNIGSAAALRGDDDIAAFAQEIIDQYALAMAAAGLSDDYISATRRVIFEFAASLSGPLWSGSCDDADRFLNEQRRVGNAPSTRSTKASMLAQFYAFVIARYQGDIHALTGWVVEQPIDEFNKPASVLVGRVRVPPSDTEIDELFAKWRSTLPGARKYLPAARDYFAASLWRRLGLRINETVMLDVRDWRPDLGGLGKLHVRHGKGARGRGPKARLVPAINGADELIDWWLADVRHLFGNDWSNPDAPMMPSERHDPVLPRSRRVGSEALRQGLVRQTAQWLPAWSGRLTPHVLRHYCASSLYASGMDLKALQDLLGHEWLSTTTHYINPRELHQTREKVLVAC

SEQ ID NO: 2996 - protein, 809 aa, synthetic construct; identical to SEQ ID NO: 2994
  REGION 1..809: note = TnsF-Tn7 System Protein

SEQ ID NO: 2997 - protein, 689 aa, synthetic construct
  REGION 1..689: note = TnsF-Tn7 System Protein
MNSIMTEADDDYLTIAQAAAYVGLSAATLRRWDSDGRLKAVRRAGSKYRFYRVADLERFRLEYGTADTAKDAVAGFFSEAKARIGDNLQLREPQREAFDATVEHFEGGGGPAIIQLPVGCGKTGVAAILPFGLSNGRTLIIAPNTTIREGLYADLNISNASCFWKRTGVLSNFSAGPFTALVDGPKANIDDCINSHIVVANIQQLASRADRWLSQFPSDFFDLVVIDEGHHVAAESWQKVVRAFPNAKFVSLTATPFRTDNKDLLGELVYRYPFARAMLNGYIKHVTSASAHPEEITFTARGESDTYTLEQITELKEEAWFRRGVALSDECNRHIAEKALEKLQLLRSATGFPHQIAASAMSIDHADQVRAIFEEMGLQAATIHSGMPDDRKDAVFAKLRNNQLDCIVHVAMLGEGFDHPPLSVAAIFRPYRSLSPYIQFVGRVMRTVEPNDPSNPNNQGFVVSHVGLNNEEQWDDFRELDTEDQQLVKGWTRGEASNGRSRSDDGEQLSYRFDDPVAEDEKLSHFLNRPFLDSSDDRVIEEMLDIKGPGGFTYRELGITAEQLRALQADRVEHNEAPAAQVTVQPQVRRQTLRSRLDSRSKSIHQRILTDLGLARAGFDISRAVRQARGNNADALFAILNKEVNNFAGEENASRQKWTVDQLQAAYDALDEIGDEVVATIETALREQK

SEQ ID NO: 2998 - protein, 689 aa, synthetic construct; identical to SEQ ID NO: 2997
  REGION 1..689: note = TnsF-Tn7 System Protein

SEQ ID NO: 2999 - protein, 106 aa, synthetic construct
  REGION 1..106: note = TnsF-Tn7 System Protein
MRWNLRMKAAERGIWKSTELRRMLAAAGLEISAGKMSGWWTGTPNTINLNELDVICVVLDCEPSALLIPEPDKVTAARPPTARTADGTSTGRVTPRFGNPRSEPPV

SEQ ID NO: 3000 - protein, 435 aa, synthetic construct
  REGION 1..435: note = TnsF-Tn7 System Protein
MTTRHAGGGAAVDDRLPLWRPANGLRIERHRATMAHLASVYPCHTDTSIGERGPYIGVNVTGGGSGWYFDPFELYGTGVLSNPNCIVTGDIGSGKSALVKAFLGRELAVYGRRRMVTILDPKGEYTPFARAHGLPVIRLHPGGTDRLNPMDHRGNPAETVGRQGLATALVSGVLGRTLDATEDALLGWSVATLALTGKAFTLADVAATVADPAEELVALSRRTPLELAQAATPVVFALDKLLTRTLAGMFDGPTTVNVDWTDGPGFVIDLSAVYGDDDALPLVMLAATSWLAAALQRDSDRRVLQVIDEAWAAVRHGARHFQGSLKLSRTYGVSTWLICHRPADLTAQSDDGTAIAKISAGLLSDIQTRIILRQPPDQVGVATEMFALSERERSWIGQLVRGRALWRLQRRGAVVQTVLTTTESQACDTDAAMVT

SEQ ID NO: 3001 - protein, 435 aa, synthetic construct; identical to SEQ ID NO: 3000
  REGION 1..435: note = TnsF-Tn7 System Protein

SEQ ID NO: 3002 - protein, 347 aa, synthetic construct
  REGION 1..347: note = TnsF-Tn7 System Protein
MVDAMLRGWRAQQNARGLREETMFGREQLVRRFVEFTNEYPWNWLPGHVEEFTLSLCGERHLAPSTIRNYQVDLRLFSEFLIDARYGWAAACEEAFGAGVHPVAICHEWNTIAHLNDYEGDPEARPFSRDEMQRFLDYADEQVDRAVRAGRKGALAAYRDATVFKVMYGWGLRRTETSKLDLVDWGRNPAAAEFGRFGVVHVRYGKAKRGQPPRRRNVLSVMPWAVDAVVDYVDNVRPRFGCGEHPAMWVTERGGRLRPAEINARFVAYRDALGMPTALVPHSIRHSYVSHLTENGLDRRFIQCQVGHEADSSTAIYTHVSSDFMNTALRPALAPALEPSLAEIDER

SEQ ID NO: 3003 - protein, 105 aa, synthetic construct
  REGION 1..105: note = TnsF-Tn7 System Protein
MTQRLDYRWKLRQVMASREMFATTDLLGPLAERGIRLSSSQVYRLVVDRPERLSLKILMALLDILDCTMDDLIEPVAAAQPTKSKAAAGGETGIGALRPKRARIT

SEQ ID NO: 3004 - protein, 743 aa, synthetic construct
  REGION 1..743: note = TnsF-Tn7 System Protein
MPRPEAQPCSDCGRARSGRAPGVLLCRCHEKRRAAEKLAANRSAQLATVARLIVELDQTVTPDQVEDLLAQVAPAAHAHTLLLGHLANHPAVLTSGGSSMPKLVGEFLYAAIDAGIAGLAAPSCALCHRPRPLFHTHDDGQRICTTCYSRLRVATCSGCGRENQRIKVRTSDGSPLCPRCHDHARQPEACAGCGQLRLLKRSTADSLDYCRGCQSRRSPTEPCSVCGQDRRVNARAADGSAVCTTCYAKSRTSTDVCHECGAVGPLNARAGGRTATGKDVCIRCYRHPKRECGICGRARRVALKATGTSTDVCPTCYQAPMIDCSVCGQHALGRRTTKEGQPWCFACQATERIDQLLAAADRSIPDGLKDVRDVLVAGPRPRSILSNWNRIGSLSLLAKLAREHTDLTHELLDAEGNRFSVNYLRAVLVATGALPARDENLARLHRFAARIIAEVSYAQDRQNLSRYARWHVIARVQVDRHGQLGHGAADRCRQEIRAAQRFIAHLADRNRIIGDCTQADIDAWLTKQPDKGIRFVRWLRDNGHVGDVALPGPVPKAGPRTHANPDEHWALVRRMLHDEHSASVEDRVAACLVLLYAQPLAKIVALTVHDINTAEDGTYLRLGTEPLLLIPPLDALVTALPIAKPFGAARTLADPRWLFPGKNAGQHQHPTSLMGRLNRLGITTRASRNTAMLHLASSVPPAVFASLIGISAGAATKWTEHAGGNWTTYAAVRKNSTRPRHND

SEQ ID NO: 3005 - protein, 743 aa, synthetic construct; identical to SEQ ID NO: 3004
  REGION 1..743: note = TnsF-Tn7 System Protein

SEQ ID NO: 3006 - protein, 366 aa, synthetic construct
  REGION 1..366: note = TnsF-Tn7 System Protein
MALRPGNVSVLRPADHLFDDMLAGWAAQQSSRLLSRTTTRTRESQVRRFAGFCSTPPWEWTASDVEEWTSELLSGSRPLTVSTIRGYQNAVALFCSYVTDLRYGWVDQCMAMFGTHPVQVCHEWNTAVHVADHEARPPVRPLTRAEVQALFDLADDHVDFARSSKRKGWLTLFRDATLFKVIYAYGLRRREAAMLDVHDFTRNPKALEFGRYGVCNVRWGKASRGSQPRRRAVLTVFEWTRPVLEEYVTDVLPRFELADSAVLWPTERQGRIRLAHIDDRFADWRDDLGLDPVLHPHCLRHSYVTHLIEDGFDPLFVQQQAGHRWGSTTALYTGVSGDYRNRVLRHALDEAFAPPTSPTDQGGTPR

SEQ ID NO: 3007 - protein, 119 aa, synthetic construct
  REGION 1..119: note = TnsF-Tn7 System Protein
MTNPTTKTVAYRWHLRKVMSDHGLHNTTDLVPLLADRSVVMTSTQVYRIVTGEPERLNMRLLAALCDIFGCTPNDLIEPYVVATSRRGRKTATAAQPTTRDTTSKTRPRRATITPTDND

SEQ ID NO: 3008 - protein, 371 aa, synthetic construct
  REGION 1..371: note = TnsF-Tn7 System Protein
MGFEKPVCDKCFFSYRATCSSCGRHRKLTQAEDGKHYCKLCSEKGTHNCKQCSQIMPAGYGSVCQNCYYENLFNKRVVTCLAGLNNKFYSDLFLEFSVWLKNDVGTHKAAITLNKSFPFFYFLNLNFPNKVPSYNELIVHHGEINMRINSFPISFLCETQRMRITHKEKDAAANRRTIEKMLASKTGIPALDKLIFDYYQHLMKKLANNKTTLRSIRLAMSPAIAFVEKVAASGKMEVEQIALNQYLAKKPGQYSALIGFVLFCNGRGLKVEMPNKATLSQVNNRAEFERLLIQHIKKGDDLLTNIKFRIVALAYFHGVSPHLSKSIVKQGTVFKSSDGISIDINGVIYLIPNLLNTMQLRGKDKLKIEEI

SEQ ID NO: 3009 - protein, 513 aa, synthetic construct
  REGION 1..513: note = TnsF-Tn7 System Protein
MQLNPSEISELIKNRIQGVDDSANLRTQGTVVSVTDGICRIHGLADVMQGEMLEFPGNIFGLALNLERDSVGSVVLGEYESISEGDIVKCTGRILEVPVGPELLGRVVDALGAPIDGKGPINAKLTDVIEKVAPGVIWRKSVDQPVQTGLKAIDAMVPVGRGQRELIIGDRQTGKTAVAVDTIINQKGKNLKCIYVAIGQKASSIMNVLRKLEEHGAMEYTTIVAASASDSAAMQYLAPYAGCTMGEYFRDRGEDALIIYDDLTKQAWAYRQISLLLRRPPGREAYPGDVFYLHSRLLERAARVNEDYVEKFTNGEVKGKTGSLTALPVIETQAGDVTAFVPTNVISITDGQIFLETDLFNAGIRPAINAGISVSRVGGAAQTKAVKKLSGGIRTDLAQYRELAAFAQFASDLDEATRKQLERGRRVTELLKQQQYKPLQVWEMSASLFAANNGYLDDVEVKDVLSFEKGMLDFLKTSHGALIDRIESTKEVSKDDEVALNDAIKAYKQVAAF

SEQ ID NO: 3010 - protein, 371 aa, synthetic construct; identical to SEQ ID NO: 3008
  REGION 1..371: note = TnsF-Tn7 System Protein

SEQ ID NO: 3011 - protein, 235 aa, synthetic construct
  REGION 1..235: note = TnsF-Tn7 System Protein
MNTNNCDKVQIPHQTRRIKPTRRSVSGSFAFRKQTAIPFESTLERDFLIRKSFSPLVVDIIPQPVQLEYTTKNGRAYRYTPDFLVYFRSGNYADEAELKPLLVEVKYRDELREKWPDLRLKFKTALKYAKEQGWEFRIYDETRIRDQVLANIVALKRYKNMAFPPEETAAILNHLTIVGQAPFSQLVASQFVGKWDTATGIAHIWHLVASGLIECDMTIPLSNNTVVWRSIYGQI

SEQ ID NO: 3012 - protein, 645 aa, synthetic construct
  REGION 1..645: note = TnsF-Tn7 System Protein
MAKYNPDESGLVLNRQKLTLDIGNLIKHDNIIYKVVEILDFNTLVGTDVDSGRSKALRINELSPVTTATDELRAVANLDTNSIEDADWVLANQRYEAIKPLLANNGGREAVNQRAIEVGVNPATLYRWLKRYTSLELVSALIPKQRGWREGSSRISDHAEALIKEVINDTYLTKQRSTAQKVIIEVKRRCLARGIEAPHPNTIRARINAISERHVLRGRGYREKAINKFMPAAGHFPETSYPLEVVQIDHTPVDIILVDDIHRRPIGRPYITLAIDIHTRMIVGYYLSFDPPSVTSVAMCVAHAVLPKDEWLALHNVEASWDVWGMMTTIHVDNGADFQSNSLKQSCLMHGINLEYRPVKQPRYGGHIERLIGTFAQEIHDLPGTTFSSVAQRDGYDSEKHAALTKSEFESLLVELICNVYHKRLHTTIGMTPERKWEIGLFGNATTVGHGLPPRPVNRMSLLLDFLPSFSRTVQQTGVEVNGLRYYSDVLRGWISATEPDDKSTKRKFIFRQDPRDISSIWFYDPDVKEYYQIPFANLSLPSMSIWEYQQARTEAKKEGMKSVDEHQVLRALTDIRNKVDESKAKTKKARRQYQRRVEHEKGISPANVPAPQINQTQPVTRNKLPIPNSNLLLEDDIEPFSDIS

SEQ ID NO: 3013 - protein, 374 aa, synthetic construct
  REGION 1..374: note = TnsF-Tn7 System Protein
MGTTYSWHQGVVRLKSKWAVPTSLLPDEIFSSWLVRVAFANGLEPMALTGSLWAKSRLWTIDIDRHLSQHQITTIAECSGMNQQQIYMSLLPSIIDKYTPNVETKEPAIAPWILALGSRNRKRYGGMQYCPKCLAEDEIPYFRINWRFAWHTCCLKHSCVLLDRCPHCKSAIQFHKRTYQTPSMRHCAVCKGDLIENDLQIAPNLAMQLQDTADQVLLLGDTSKSVDYFLRLRVFELLVRRYLLNNHQAINKLCNFVGLHSRDDFQFTPLGFTFEILSTEERLFYLDMVQTFMGLSDDNLTNHLMSAGLTQQSLCPSPIVIPESLQHIFNQLPNSQRKAKRVRSSAKSFEIPPPRSEKQVMRTFERLKRKIRAL

SEQ ID NO: 3014 - protein, 301 aa, synthetic construct
  REGION 1..301: note = TnsF-Tn7 System Protein
MNTTNHTERSHLHPDLLAVIDMPAQDRIRMMDSPRWIGYSRATEVMDFLQGLLIKPQRPRMPNLLLIGDSNNGKTTLIRHFVEVCGQGYVDENSEPVKPIILAEAPPTADEKALYISILERFWTPYRATDPVTKLRFQLIHLMRACHVRMLIIDELHSLLAGTAQKQREVMNALKNLCNELCIPIVGVGTSEAVRVLHTDPQHASRFEVARLPSWSLDKEFQRLLASFERILPLQQPSKLHAPELAMRLHAISEGNIGNLHRLLIECATEAINSGEERITLPIIEKNKWVQPTRGIRELFG

SEQ ID NO: 3015 - protein, 301 aa, synthetic construct; identical to SEQ ID NO: 3014
  REGION 1..301: note = TnsF-Tn7 System Protein

SEQ ID NO: 3016 - protein, 284 aa, synthetic construct
  REGION 1..284: note = TnsF-Tn7 System Protein
MLSSHTAHLLQGFSDWLKQRRGAIYASLKLQRYYKFFSKLDQVAKELDRFPTYEEMVQFLSVMEARKYLLVTLYLQDIKQIIIDKAVQEEYASLDMIDRLLQYFEKDDYRYKLLFEYYTALRTKADQGKTSIRSIRLALTPAEKFLKYCDHFEKSEISDEALSGYLWVYRGQKSAIFGFVSFLNQKHKFSLEAHRNLLPIKTPRYSRKQLKQKFIELLQNPQDDLKYQQKLLRFSLGYLYHIDIPNNAFINQKDIQKDKNDAYCLRLVGKKFYLPNEITRLMLD

SEQ ID NO: 3017 - protein, 608 aa, synthetic construct
  REGION 1..608: note = TnsF-Tn7 System Protein
MEEYENLPRIGGLPDDKVKRVVLAGGAVFYNDRNPEIPLVEVLLVEADKYECEEKLSDKTYLAKIGAPQVDTVRFGTVFIGNRRTRQIWTDFKGYRENVNFSFDFRNNEPESIHFGAKNQDGQYYIWKSKFSFDAISDKAVKARFLRSPLTKLTTDNGVSVLIPSYEVLTALLVPAEQSIRSKLIINPMDFIVNEYLKSYRHDADSNTYVVEYFGNSKQETNLSFLAYLAMNEISRARISKIYSSVASGSRYSPKYPVVLPYHPSGLNIVCDGIWMDNKTFLCLRVTHMDLPRDFNLKEESEREKKPIEKENTPVESSPKQQVQDFDIDDLPVTPENNPNPRSPRVYIGSEVTVGSIKDIVSKEIITKESDTPIKVSDNKTDQDEPTIKEAPNNLSSGDDQNSQDTQGTGKLNQVEKTIDNPQECIDESDMFTKVIKSLSLLKDDENCPLTDFLYIDNKSNRSSEAALCSFLYKEAKLANSGTKWAYKEYDRKKKIFKPRGALVLELLLKDGERVYLLEIEQKAEEKGFSGLMFHPISVILSASDIKKLLLEIVQLRGRFRTKNGSLQAVDLESVAKSIPYTHYKDKYTKLFVMLFSKMIDDINNEFY

SEQ ID NO: 3018 - protein, 237 aa, synthetic construct
  REGION 1..237: note = TnsF-Tn7 System Protein
MKISLKNRTAAYTYGSSSGYYPFRGEKSIWYESLLERDLLILLEFNDMVLDVEEQPVTIEYENKNGKTVTYTPDFLVTFKSLPQYDSQSIYPKSLLIEVKPHEILKKKFHELRPKFKIATRYAQENDYIFKIYDDNKIRGIELENILLLKRYKKMSFDQREESRILEYLQAVGHTQIDHLIEALYATKTLQAIAISQLYHLIVHKKIAIDIGQEINAWSTIWLNIDETYEEGILNEL

SEQ ID NO: 3019 - protein, 639 aa, synthetic construct
  REGION 1..639: note = TnsF-Tn7 System Protein
MNSENSYKIDRRKLKLLANEYVQYNNDIYKITQILDASELIGVNIKTKKAKRLLINDLKPVDMEQIPENDFIHRDLSDISDSDWKEMEKRFTAIQPILNNGSREEVEEYAKKAGAHFTTVYKWARGYASTGTLTGLLPRKRGRSKGEVRIEQQAEKIIQKAIEEHYLKRIKPSVQYVINVVLAECQKKNLTPPSKNTIRNRISQISEYQRAKRRGSKSETRTKFEPAPGEFIADYPLQIVQIDHTKMDVIIVDEETRRPIGRPFITLAIDVYSRMITGYHMSLDAPSGLSVAMCVANSILPKNEWLMKMGIESNWDVWGFMDTLHADNGADFRAEALTEACRIHEINLQWRPVNKTNYGGHIERLIGTLMKAIHTIPGTTFSNIRERLDYDSEGNASMTFHELELWLVTFITKIYHKQKHSTLGMSPEAKWEEGVFGTPAHKGTGLPPRPADAETLLIDFLPLVKRKIRKTGVHINSLKYYDFVLRSFIEEENSANDTSKKDYTFRIDPNDISYIWFYEEKSRLYHKVSLANRAIPSMSLSEYNAIKANLTPQQKSSAYDAQIIRAHEELREMASDSAKKTKKVRRAEEKKKIRQKSNSVTNLHIQKMKPLKEEAESVEEFDEGDIPVFDVFIEGGDNA

SEQ ID NO: 3020 - protein, 363 aa, synthetic construct
  REGION 1..363: note = TnsF-Tn7 System Protein
MYYTATPLPDELLSSWLIRSSILNGTDPLGFADGLWFNQRIWTKDLDRHLSTDQIMQLKKNTNLSFEQIENMTLEPIYKALVHPHTVNPKKSWEYIIPTGIRNRTATNGLHFCPMCLQEPNPYMKKQWRLSWNCICEKHHILLQLACSKCGHCFAPHLIAYTDTDFSRCQYCQSSLIRGKMIPVSKSVLNLQSFLNRTIKERQIPPHTYPIIDENAADLFATARGLMLFFRDLIHAKIFQPHAEYLFKEIGYHYEPVKREDDSRQLSIDALSSEKRHQLLDMVSHLLYFSLSDIVAILREADISKQLFMRSIKLHSPTLSHIANSLKERKRTANKEILRTYSDFQPRPKEEVELLMDEIRKYL

SEQ ID NO: 3021 - protein, 309 aa, synthetic construct
  REGION 1..309: note = TnsF-Tn7 System Protein
MPETYAHLLPESKEVVIHKNTEERIEYLENKVWINYPLAQKVILYLNDLLKYPKQDKMPGLLIVGEPNIGKSAIVSQFAKLHPDKTLEDDTGMSKAMKTVVVANMEGGDDRTLYISILEQLWTPFRPTDTTQKLRHQTIHLLRELNVKMLILDEIHNLLKGTAIKQRAVMDAIKNLTNSLKIPIVLVGIMDAVTVLNEAQHVSRFEIVQLPKWSNDKEFAGLLAAFERWLPLKKPSGLYKAEMKKLLYEHSNGNLGHLRRILITCAKYAIQNDVEQITPWIIKNVPTKNSKNPMERIVNLDVLYGDTST

SEQ ID NO: 3022 - protein, 309 aa, synthetic construct; identical to SEQ ID NO: 3021
  REGION 1..309: note = TnsF-Tn7 System Protein

SEQ ID NO: 3023 - protein, 704 aa, synthetic construct
  REGION 1..704: note = TnsF-Tn7 System Protein
MSAARGAPSLDSVDPAHAVVAVVRRLDPGTDRAQLVDLIIGLVPQTKSRRALATKLQKRPGLLTGAGARGTPMVIRLIAALLSHGVTGVVAPPCPFCHRDVPLSRGHEGLRCCKSCWDRIHAKPCTRCGTITQMARRTPEGQSLCDACARTEPALLEPCDTCGRMRLPARRRDGLVICHACCAPPVATCSECGKRKPCHFVDIAAPLCKNCSANRRAQPCSRCGQQRVVHTRTSSGKPLCKTCGSLGLCAGCGRERPIRARTEAGDMCQTCYKNDPLSHRQCNRCGVLGPLHRFGLCAICAWPDVIRKLLAGPGGEVRADLEPVRAALNTIDARTGLNWVARARTQQMLSALASGSGPISHAVLDQLTPSAATAHLRTILVEQAVLAPRDEGLAGLEQAVKRRISRVHDPVDRKILQSYATWHHLRRLRAIASRRRVTQDQVVYACNALTAAAALLNWLHERSQHLATCTQDDIDEWLGIDAFSRSRGFVAWAVSRGHAKDIEIPPFNNAPVRQVFNDHDQRWALARQLLHDDSIALEDRVAGLLVLLYAQRAARIAQLTIDHITITDNGVELTLGQTPITVPAAFADLLEAFVNDGRVSAAFRPEENTWLYPASRLGRPLASRTLLQRLRAIGIQPTLGRNTALMQMAAEMPPPVLNKLLGISLDRATRWTQEAGNNRPGYAAAVARRTGVTCESAWMGDPPP

SEQ ID NO: 3024 - protein, 704 aa, synthetic construct; identical to SEQ ID NO: 3023
  REGION 1..704: note = TnsF-Tn7 System Protein

SEQ ID NO: 3025 - protein, 352 aa, synthetic construct
  REGION 1..352: note = TnsF-Tn7 System Protein
MALLHPEDAVLEAMLSGWEKQQRGGRRLQPDTVESRKSIVRRFVSYTNEYPWRWSAGDMDEWSAQLVMIDRLAESTIRSYQGAIRMFCDYITSPHYRWANECQARFGTHPVQICQEWNTTAHLVEYEGGPGRRPLSRQECQALFDYADEQVERAIRLGRKGALTAYRDATVLKVIYAWGLRCTEASKLDRHDWYRNPQAPELGRFGMLNVRWGKRSRGSAPKRRMVASVMPWAVVAVEDYLTNIRPRFGLKDHPAMWITERGGRLRSREIEERFATYRDALGMDEDLTPHCLRHSHVTHQIEDGVDPKFVQEQVGHRFASTTAMYTGVGSDFMNTALRRHLDAGLVSKEEER

SEQ ID NO: 3026 - protein, 747 aa, synthetic construct
  REGION 1..747: note = TnsF-Tn7 System Protein
MEATTSGQGRVQQAGHDQIINETTVLPEAAVRPVTDVAAPPRLVNLPRHTRTFVGRGAELARLAAALHGGGEVVVAAVHGLGGVGKSTLAAHYALAQAARRDGPGLNPVWWITADSGPALEAGLAGLAVALQPELATVLSLEALAERARAWLAAHQGWLLVLDNVVDPADVRPLLERTLAGQVLVTSRLGEGWHRLDAQLLHLDVLGEREALDLLTRLAAPGLAPDVAQAVLDGHPPAELDGAAELVRELGLLPLAIEQAGAYLHQTRLTPRAYLELLRHQPAVMYDRTARGADAERTIARLWRLSLDQLAGTPLAGDLLRVLAWYGAEPIPRPLLDGLDAEPSEVQHALGELAAYNMITLDGETITVHRLVQAVARSPDPADPHRRPTAIDTARDQATHLLNDAVPAPPWDPAGWPLWRMLLPHITTLTDHASPTADTATTARLLNRTGLFLSGQGVISSTIDVHARALAAYERVLGSDHPDTLASRNNLAYAYRSAGHLDRAIPLYEATLADYERVLGTDHPSTLNSRNNLAYAYRSAGHLDRAIPLYEATLADYERVLGTDHPSTLNSRNNLAYAYQSAGDLDRAIPLYKQTLADRERVLGSDHSSTLNSRNNLASAYQSAGDLDRAIPLHKQTLADRKRVLGTDHPDTLNSRNNLASAYQSAGDLDRAIPLHKQTLADRKRVLGTDHPDTLNSRNNLASAYQSMGDLDRAIPLYKQTLADCERVLSSDHPLTKTVRANLSAIE

SEQ ID NO: 3027 - protein, 747 aa, synthetic construct; identical to SEQ ID NO: 3026
  REGION 1..747: note = TnsF-Tn7 System Protein

SEQ ID NO: 3028 - protein, 117 aa, synthetic construct
  REGION 1..117: note = TnsF-Tn7 System Protein
MTAKLDYEWRLREIMAARGMFNTTDLRPLLIERGITLSATQIWRLVTEKPERLSVKVLVALIDILGCPMEDLITPVVSPTGSRNRAAGQTGAVGGEPGAGRESGVGGFRPKRARITE

SEQ ID NO: 3029 - protein, 602 aa, synthetic construct
  REGION 1..602: note = TnsF-Tn7 System Protein
MCSSGRQKHTICSCCGNPIKKAHAVHEGKGYCQNCYYRLFKPVECSGCGKTTRSFGGMTPAYCRSCRTIGRTCLRCGKDVPHAALIVEGGVACPSCARFFKEPQACPACGQFSLHLARDFKNGFTEPVCQRCRRKGHITCPVCGKNRRPAGLTSEGVLVCVDCLATDGKPFICPKCGKEGRRHSKSICQDCYWQAHVVKKMKDAVFLLNSNWTGKLYHDFMVELAERIGAKPAALRAEQYFIFFARLDTLFEAPEEITEVRMITIFGKEGLRRHAVPYGYLKRVGIIPDADSYAAREAAERRKQQSYLKKAENKWHEPLIKEFIANQWAISYRYRDRGWTGNLERFVPKTITENLKAAVKFLGAVEETIIAVQQIDQVCLDGFIAANPGSRNGIRSFVRFLNLNKKLFKKIKIQNVPTQPPVNAILNYQKYSSLLEAWLDPPENEIKESLICLLMMLYAQPANKLVKMRLSDFSKGNDGIFRVVFGSSEISLDERVGKLLRSYLDSRIALATMEDDWHNEYLFTGRSYGFHLTEAAVTYQLKKYNVTAEQLFSSALFYAYQSGLQHPKVLVKAFGITDQTAIKYINLLNPKMMNAANRVANG

SEQ ID NO: 3030 - protein, 374 aa, synthetic construct
  REGION 1..374: note = TnsF-Tn7 System Protein
MGKRKLFLLGQTALQQKDDLFVLPDRDLDLYLRIIEAFTNKHYSLNHQEKSVNRDLAVIQDMLTFARKSPWQWTEEDFERWGADIGRNRKLATATQRHYQGVIRGFLKYIVENIRFSEEIYRQFGIRIRQICTEENCIPHVHDRELKKERPAIPREEVDLIFATFDRAISECASFSSKDLRPLQRDKTMFFSVYSLGARASETIGLNINSFVKNPGCPQFGEFGIVSVYGKGSKGSGPKHRYIPVIQPEFVDLIAWYIKSIRPLFLMNADPNEQALFLSERGRRLSLSAFEERFQHIMRLSGLKERGYTPHCLRHSSVTDKKEHLSIDTIRRMHGHVFEATTQGYTHIPDSDVEREIKRCQQNLIKRIQEKENV

SEQ ID NO: 3031 - protein, 602 aa, synthetic construct; identical to SEQ ID NO: 3029
  REGION 1..602: note = TnsF-Tn7 System Protein

SEQ ID NO: 3032 - protein, 315 aa, synthetic construct
  REGION 1..315: note = TnsF-Tn7 System Protein
MLAKVLSSAVIGIDALQVEVEVDITQGLPQFATVGLPDGAVKESKDRVKSALKNSGYDYPQRRITVNLAPADIRKEGASFDLPISVGILAATGIVKGNRLKEYLLLGELSLDGRVKPIRGALPIAVNARESGLSGVILPAENACEAAVVEGIDVIGVTELAEVVEFLNGTTEIPPHRLDLEELFNREAGFGDDFAEVKGQEHAKRALEVAAAGGHNILMLGPPGSGKTMLARRIPTILPPISFAEAIETTKVYSLMGLLERDKALITSRPFRSPHHTISDIGLIGGGNTPKPGEVSLSHNGVLFLDELPTFQYYQ

SEQ ID NO: 3033 - protein, 315 aa, synthetic construct; identical to SEQ ID NO: 3032
  REGION 1..315: note = TnsF-Tn7 System Protein

SEQ ID NO: 3034 - protein, 105 aa, synthetic construct
  REGION 1..105: note = TnsF-Tn7 System Protein
MGEPWWVYMIVCKGGGIYTGIAKDVDARYQQHITGKGARYTKMNPPVALLAKQQYATRREAAQTEWMIKQMSPADKRQWAFAMRGCVGFSESSYVLTETLSPGDQ

SEQ ID NO: 3035 - protein, 317 aa, synthetic construct
  REGION 1..317: note = TnsF-Tn7 System Protein
MCKACCDQGEITCPSCGNQMPAGRGDACESCYWSKTCRKRIAIGQAAFASRELSIEFGEFGEWLISATGPHKAALKINRFLSFFLEIDQKWQRIPSYPQLLNYFDAEGLRRVRLPMRWLHEEKGIEPDHQAKRINSEKRRIYECLSSIPPASLLGGALQSYWHQLEARIESGRTSYTSARLAVRAAATLLLKTDQAGQRLPGQTDVDLYLNTAPGQASTLTGFTNFLNREYGTSLKPVIDTRRAKKRRKEKLARSIMQMTTSAEKDDAWMSQWVRLGMEYFHDRKISIKTIGQRNIETSVDGVLITLDGERYWLPTA

SEQ ID NO: 3036 - protein, 1140 aa, synthetic construct
  REGION 1..1140: note = TnsF-Tn7 System Protein
MKQLKRISLVQFYLHEAVDIEIEGTTAFLGPNGSGKSSTLDAIQIAMLGGNQQYARFNTQSVSSKQRRSLASYCLGMLRNPEKDSEVIGRARDEARTYIVLVFGDGTEKGWISAGICIEADADTYDHEVKGLFVLPGQALKADDCIVYDGNDRRPISFADFRENMREQARKNGRTPIFTDKSSEYVQEMLYALNGERMPDARRFMSSFVKSMTLKNVDSIDQFVRDYVVESNPVDIATFRKQVEQFVALRDLILKTKARISRLTGILSEFNRARQAERRIAALEAIKTIFNVEWLGKQVDDLDAQIDTLESQKKTAMEFAAKAKSGRDLKQKEITNLEVRLEGDQNEQIRKRLEEQINFQREVISAYQHPAMSRANQLINALKESLDDQNFSGIRSVMATAINKLEHARKHDVSDNALIKEIGRLDAQLSQIRAISKTSLATIQKQHVELTEELEAIRRRISAVTQTGRLLSDGAALLLEILNRADMNAQPLSALLRISDPSWAPALEAYLGGDRDALVITDGNTRDAVKLLREAMRQGHRMNGAAIIQPYHLRNVETHVKGDDVALGIFDSDDDTARRFIWQKFGNMRLVDTELDLEIHSRAITRDGMLSQGGVTKSIRIAPISDLRIGKELRDTSKLSRHAAELKGDLDKLEKQRDCVERLEKALAPSASDDDSNVSWKLSEAEQAIVQAQQQLSGLDVSHLEEYRSQLDAAGEKYNELDKQYTTHDHLAVGFKHQIETRSEEREKLRQQLPATIEAQKTAVASPLVDSEWLDSTKDEIERAETDYKRRLSDVERKLEHNRPRLRKAAENASLELARYVQDERLDVQVTYMDWHDRHNWAFEEKTKLTNTELHHYEQEAELARQASEETLRSDIAMSLHDRFKEMELERRERNRILESCPSFTGGERYKFTTSVVPHYEALVRYINQIAHNDNNLSLFSENPDELNETLRNLVEAAAESGNAGGVLDYRQFYTFDLDILVDGKRVDRMSNRQGAGSNGEHIAPMYIAAGAALAKAYRLHSNKGKQSGIGLICLDEAFEGMDTINAMATARFLQNIGLQLIMAGPELERTKLAPVTQTIYDLDREGLDLQMERTKFKEAANKLLVSDMPEENPEVMKAAYQQLGLEQPVEHPLADHGRQ

SEQ ID NO: 3037 - protein, 1140 aa, synthetic construct; identical to SEQ ID NO: 3036
  REGION 1..1140: note = TnsF-Tn7 System Protein

SEQ ID NO: 3038 - protein, 317 aa, synthetic construct; identical to SEQ ID NO: 3035
  REGION 1..317: note = TnsF-Tn7 System Protein

SEQ ID NO: 3039 - protein, 904 aa, synthetic construct
  REGION 1..904: note = TnsF-Tn7 System Protein
MTLPARSLSEAITTAQGPLLVPESFQFTLIDNITDVIQSSAEPPCLLRAPTGSGKTFILSRVLGNVSTLHDVLWLWFVPYVTLLQQTLDALATNATELSGQLLSHGLNQQPAPGQVLLSTTSGVSRASWRRAGYDAGGGESLRTPAAFIALARANGMRIGVVVDEAHIALDEATEFGQFVKWLKPRYLAMATATPKSQRINQFLASAGKSSFESFGVSRSDVVKARLNKAYIEAVMYQLGQATHDVTDLKATVIKQAWRRNQHLQRQLVDAGIAMEPLLLVQVENGEGAIESAEKILMHECGIPPHAIGKHSADAPDPVMMSAIANDTSKKVLIFKQSAGTGFDAPRAAVLATTKSVNDPDYAMQYVGRVMRVAKPIRQAYANVEDIPPDFNTAFIYLANAEAQAGYQAAVNNAMAVKSRLEGETEKMVLRNTRSGAQAFTNQTTKQKPLSYALGAPTSHGQGATGSVAEHASPTTPESGIPSSSNNSGHSQGHLFTDEDLDTIVYGEKDVIKPSPLDALTEDELEERLRSFGIRLYRCQRTLPNVPLSLRRENRPNALDMAKITERAATQVPISPSLMREAQLAARDRLKEIERHVEMTQQKVSTQSVRISLDRNALAKQANVVMSRLPNVEQEDRRILVSIMARQAEPHVRDALEDADQDVDESEIQRMCRYAAHWIIRASATKLSEAFWAALAEHAETAEAEALPDALLFAESMPLLSSEKHIYGVLPPDAQQLGELDQHLEYDAQRLMDTATWNLETGVFRTGRFDFTYALNSDELRFAEALDRAEFVTWWFRNPEKKRYAVRVMRGDHKNYFYPDFVVCLTHIPGDPPLQRLVETKHDIKDAVRKARHTPPSYGKVMFLTQDGGHYHIINSDGSLGEEVDFGDLASMREKFKQTIGSVM

SEQ ID NO: 3040 - protein, 326 aa, synthetic construct
  REGION 1..326: note = TnsF-Tn7 System Protein
MLCMDEGIRICEICSQPFPAGYGKVCESCYWIGVFKQRKSVTSHLFATQAVKDIFANFSDWLRERRGAAVAAMQLNKYSQLFYEIECQWGKVPEYRALVDYFSVAKMRRFKRFFDWLAESGAVKVDKVVKAEDSERHQIRKILDSANTGRKLSSILSSYYEYLTNPKKKHPLSLRTVRLYLRAATSLIKHSSTAGDVIPRQSDVNSFLATKPGQQASLSPFIIFLRMKGLCNLTVYRQPKASIIKSNRNQLKKSLFKVLAVAATGDLTVEGEWGALALQYFHGINKKDCHRILNGTTASAGDDGVTYIFVKQNVWIPKLSYGINLI

SEQ ID NO: 3041 - protein, 326 aa, synthetic construct; identical to SEQ ID NO: 3040
  REGION 1..326: note = TnsF-Tn7 System Protein

SEQ ID NO: 3042 - protein, 230 aa, synthetic construct
  REGION 1..230: note = TnsF-Tn7 System Protein
MSSNSRYQPIPKQTRKIKPTRRSVSGVYAFRGESSIAYESTLERDFVIRHEFNLDVAQVIPQPVAIPFRTPRGRTYSYTPDFLVLWSLGSNFSISSNYPKPMLVEIKPSEEWKKNWREWSVKWKAARRYAREQGWEFRIYDESRIRDQVLKNIMFLSRYQRLEFLNEDNLHIIESVKERGVVEFHSLLARHYMGIYRATGISHIWHLVATHKLKCDLSVPLSDYSELWVN

SEQ ID NO: 3043 - protein, 645 aa, synthetic construct
  REGION 1..645: note = TnsF-Tn7 System Protein
MEKERENQNEVSSFPVNRAVVDTNIGSYVVHDTNIYRISEVLDFESVLGVSVETGKSKPLRIKELTQFKPYSARNEFIDLDQAAIADKDWLIAEQRYLAIKPLLNKSFVSKAEVEARAKDTNTSIATLYRWLSRFKAYGVVSALVPRKPGWKEGNKRITHVIEDIIDSAIKSVYLTQQRSRVNKTVQEVRRVCSLRGITAPAGNTIRERIKAIPERVRLRARGESEKAKNKYTPTPGRFPNADAPLQVIQIDHTPVDIILVDDEYRLPIGKPWITLAIDVYSRMVTGYYVSFDPPSETSVAMCVAHSICPKDEWLLLNDVNAEWPVWGKPRTIHVDNGAEFRSGNFRNSCLMHDINLEFRPVRVPNYGGHIERLLGTFLFEVHDLPGTTFSSIKERAGYDSDKHAAMTKSEFETWLAGLICRVYHKRIHAELGVTPLRQWEIGVFGNDRVIGVGLPPRPADRFTLLLDFMPCEKRTVQTSGVTNDHFTYYADVLRPWINSPDLDDPSKKRKFIFRYDPRDISKLWFFDPQIKQYFKIPFSDLTLPPISIWEYRLAKERLKAEGKSSFNEVEVFQAITDLRAHVEASKEKTKRARRLAQRKIEHEKSRKEIPVLFQGSEPPVIRTAEPTLSNDLLDGDIEAFGDIL

SEQ ID NO: 3044 - protein, 296 aa, synthetic construct
  REGION 1..296: note = TnsF-Tn7 System Protein
MNSLEHIHQDFRHVVGFSDKDRIHFINEKRWIGYDQAHLILDTMQNLMLMPKRTRMPNLLIVADSNNGKSTIVERFEDIYGQGYVNDNFEAVRPVIVAESPPVADEKGLLISILEQIYAPYRPTDPATKLRYQTIHLLRSCHTKILIIDEFHSLITGTAVKQREVMNSIKLLCNELKIPIVGVGTREAVRALHTDPQHASRFDVITLPTWELDKSFQRLLAAFEKVLPLKLPSQLHLPESARLLHTISEGNIGNLHTLLRQCAIKAIKSGQEQITKAIIEEHKWIRPTRGIREVQL

SEQ ID NO: 3045 - protein, 296 aa, synthetic construct; identical to SEQ ID NO: 3044
  REGION 1..296: note = TnsF-Tn7 System Protein

SEQ ID NO: 3046 - protein, 696 aa, synthetic construct
  REGION 1..696: note = TnsF-Tn7 System Protein
MSAATAGAPGNLAVIVRACQAAVPELPESAIIATALDSGGRRALTRLAGELVSRPDLLVSGRSDASPTAQRLIRGLRAQGFDRLQLPRCSSCGRAMWLSHRDGKGGKHCDKCNRDARNRACTSCDQRRPGGYRMLDGQPFCRTCFRRDPRSRETCSVCAEKGEPQARIDAGPICRRCYSAPPLICTLCRRERPVATRRDDQPLCMKCYQALRRTPRTCSGCGERRISPHLSEQGPICAPCAGTDRSGGCVGCGDDQRRLNGIYCARCIIPGKLRSLISDGQGRPHRQLFALEQYLLRDEENAEAVLSWIRRSPMSRVVHDMAAGRTPISLRAVAELPATGASGYLAALLMESGVVPIENFDRVRLEVWEREFLKTLVNPDIRAVLHRYAAWIVNPRFSDKAHLSRSDDSRRLGASKAHLTAVAELLEALDAQGLDLGTVPQRSFDDYVVARGRKGKELTPFVRWARSQQLTRLRSEYLQSSPGAPALSEDQRWAWVKDLLNADDLGIASRVGGLLMIVYGITATRSVSIRRDAVDLAGGRTRITLGTDPIELPDAIGALVRQLIDTGPALSKTDSIWLFNGRRAGRHLTTAALNGPLAKRGINLRAGRSAALLNLARDVPASVLSDLLGISIYAAERWGSLSGRDWVDYPRTRLTEVGSSVVGEAGLSEDRGSDWGHRRNYAEEPALISCHPSAGV

SEQ ID NO: 3047 - protein, 337 aa, synthetic construct
  REGION 1..337: note = TnsF-Tn7 System Protein
MLGSWGQQQRSRSLASDTIESRVRIVRRFSDYAGSYPWQWQASDLDEYTGLLRSKGLAVSTIRQMHGALSLFCDYLTSPAYDWVEICESQFGDTPSQICLPWNTTKHVQDYEGHPSRRALTFDELQQLFDYADSRVESAMKQGRKGALAAFRDAQMFKTAYAFGLRRAELRGLDLPDLHFNAKVPQWGQYAALHVRWGKASKGSAPKRRTVLLVPELAWWIDGMRQWVEDGRALFAPGDLPAMWPTERGTRVSLEYIDRRFTALRRELGLDPALKLHCLRHSYVTHLIEYGYADRFVQEQVGHRHSSTTSIYTSVSGDFKNRILADALRRFKTLEVP

SEQ ID NO: 3048 - protein, 335 aa, synthetic construct
  REGION 1..335: note = TnsF-Tn7 System Protein
MTGHLGVVRACRLVGRSRATHHRQAAPKPRMHGPWPKAQHPAELSPAERAEILSVLNRQDYANLSPTQVYVRELDEGRYWCSQRTMYRVLADAKMGGERRRQATHPTKVIPELMATKPCEVWSWDITKMRGPAKGIWYHAYVVLDIFSRYVVGWRIERIEDGQLAADLVQEIVAETGGNPPGYLHADGGAAMTSKALASMLVDMDITRSHSRAHTSNDNPFSEAQFKTMKYTSDYPERFDSVNEARTWMEGFTAYYNHEHRHSGIGYHTPASVHYGTAEDVREQRQHTLDRAYGAHPERFVRRPAAPPLPLKAAINDPAKRAAPSVHLQQPLRLI

SEQ ID NO: 3049 - protein, 112 aa, synthetic construct
  REGION 1..112: note = TnsF-Tn7 System Protein
MSTGIETVWHLRRIMAEHGLFKTTELIPLLEKYGVHLSREQVFRLVTQTPERANLHVIGAVCAALGCTPADLIEVRIVEEKAVALEQTRGSLGSLRPKPARIHRPRSVSPEE

SEQ ID NO: 3050 - protein, 304 aa, synthetic construct
  REGION 1..304: note = TnsF-Tn7 System Protein
MPTKIAKVHAAESRKVLSAYVTWHLLRRLRASSRRRPVTQTQVHGVRAYVIQVVRLLNWLHEQGVVLSSCTQDLLDVWLDDHPARGPRVHGFLVWTSRKGHTRTLTVDVPASAFTGQLIAQDVRWRLVDRLIHDNEITVADKAAGLLALLFAQGPFRITALSDVHIEFRGDEVSLRLGKVPILMPPPLDGYLRTLHAEAMDRDTAAERWLFPGRFPAQHLSSGRLTNRLRLLSIHPRMGRNTALIELASELPAVVVSRLLGIHQNTADAWQRLTGQDHTYAAEITHRAGHPSQDPGLGAPDKPG

SEQ ID NO: 3051 - protein, 186 aa, synthetic construct
  REGION 1..186: note = TnsF-Tn7 System Protein
MATYPDDDTRWVLARRLLHEDTLATVDRVAGLLVLLYGQMVSRIASLTIDDITATDGVVRLRLGREPLLLPSPLDVLIFELVDRRCGNASLGHTDDHRWLFPGGMPGRPMSAAHLGKRLRAVGIAGRVSRNTALMETAATMPAKAMSELLGIGVTSATRWSELASASRADYAAEISRRHISPHSAE

SEQ ID NO: 3052 - protein, 211 aa, synthetic construct
  REGION 1..211: note = TnsF-Tn7 System Protein
MIINPSDPLDWTGRPWANANKLTTVYLSARQWGGPGAPIDSDRRWEIARRLLHDHTIDLADRVAGLLVVLYAQNAADVSRLTLGHVQVTDDSVRIRLGDRPIEIPEPLAALTRELVTARTCSHTHAGSQTWLFSGRLAGRPITDGALRDRLARIGIRITEARTAALFQLATDLPAAILARVLGIDIKGAVRWQRACAGDWTTYAADVSRRR

SEQ ID NO: 3053 - protein, 975 aa, synthetic construct
  REGION 1..975: note = TnsF-Tn7 System Protein
MVRQANIDASHLPALSVPRFVGRTRELLALGEALGQPPVVILLEGEAGIGKTRLLREFLAAPSEGERRALVGACPPLREPYTLGAVVDAVREGVGNGSDLRLSGLGGALRPLFPEWAANLPPAPEPLEDATAARHRLFRAFVELLSRLDVAVLALEDVHWADEATLEFLLFLVSRRPQPVSVVLTYRPEEVPPDSLLLRLSSRLPADAHLVRLTLKPLGVGETATFVSSMLAEEHVSAEFASFLHARTEGVPLALEESVRLLHARADLIRQDGGWARRRLDHIEVPPTIRDAVLERVGRLRPDTRTVLHAAAVLAEPADYAILTAVTGLPEDRAMAQVADVVGCGLLREDERGQWSFRHSLACRAVYEAIPVQERRLMHRRAGQALENTALPPVAQLARHFREAGDAEASCRYAERAADLSTQSGDVVTSALLLHNLVTAVALPVEPLVRLVAKIHFQSLPGFDPYSKIIESLRTALHAQVLTPEQAALVRFQLGRVLMVAGAMEAGRIEIAEAVAHLAPDSLEAARARIFLAIPLADARPAAEHLRWLREAPAVAPSIAPHERLRLFLERAFALIMLGEEAGWVEARQFPEDPASAREAVLVAIGQTNVGEAAMRWGRYDEARARLAKALALVEKHELLGHAGSVASTQAHLDWFTGAWSGLADRVAALLDDDGVRLKDRAEAALVAGLIHAAAGDRERAEERLRLAGHDDQQRVEAAAALAQLHLHDGNVDEALRLTDEPAEIAVRSGVWPRATEVAPVRVAALVAAGQLDGATDLVTAFERAMGDKDAPAPQASLVVCRAILAEADGQFARAAALFARAAAAWQALPRPYDALLARERHARCLIAVGQHDVGRSALSEVSRALSDLGAHNDTDRVARSLHERGCETRVTRGRGRPSYGNQLSPRELEVARLLVGGRTNRQIADALVVSTQTVASQLKSAMRKLRVPSRTALAIRVVELGLVGEQGQPPAVDE

SEQ ID NO: 3054 - protein, 975 aa, synthetic construct; identical to SEQ ID NO: 3053
  REGION 1..975: note = TnsF-Tn7 System Protein

SEQ ID NO: 3055 - protein, 201 aa, synthetic construct
  REGION 1..201: note = TnsF-Tn7 System Protein
MSFPAIKWHGPARALDDQARWDTARRLLHDGTLNPRDRLAGLLVLLYAQPVARISRLTTSHVTIDGPAVKIRLGPAPIALPGPVADLTRQLLDGKRGHATTGAGQPSPWLFPGGQPGRPISASHLGQRLKDLGIQPGQARSTALFQLAAELPAALLARMLGIHIDVAVAWQHASAGDWTRYAADVSRRLQHQPAAGSVIAR

SEQ ID NO: 3056 - protein, 288 aa, synthetic construct
  REGION 1..288: note = TnsF-Tn7 System Protein
MRELRTPPRGEHPQPARAAVSRLPALPVLTCSICGQDRPCGTSRLTGLPWCPPCQDRFARCVSCGQVKPIGSGTLAEPHCRGCTVPAFPGYPVCATAPRPGQCARCRLELRLRELLTSPDDGIHPSLHPLKDALAATDPPGTALRWLAKKPVATALTGIAAGRPQLAHAELDHLEQTPILAHLRSVLVVTETLPPRDEQLARLECFISGVIATRTDPDQRQILRRYAVWHLLRRLRRRNNGQPATIQQYGVVHQQVRAAVALLDWLTAQHLTLASCGQADLDRVADRR

SEQ ID NO: 3057 - protein, 213 aa, synthetic construct
  REGION 1..213: note = TnsF-Tn7 System Protein
MGRESAASGTARLQLAEGVPLLRPGEQVFTAMLDGWQARQLARNLAFATIEKRTSVVRAFAAHADALPWQWQPQMVDEWLGDLRAVRHLRRSTIRNYAGSVAAFCDYVTDPAYGWPGECEQRFGSHPVQVCHEWNIAVHAQDAEGDPARRAFTIEELQGLFDYADEQVDRIRGAAARAGWRHSATRLCSRSLTGTGCSLGSHNGVNGTSVWFR

SEQ ID NO: 3058 - protein, 208 aa, synthetic construct
  REGION 1..208: note = TnsF-Tn7 System Protein
MRTKLLPRLALPHHPTTNPAPISRQQRLAALRRLLDDEQIPLLTRTAAVIVLLYAQPLTRILRLTIDDVLHHDGQVSLRLGDPPTPVPEPFATLLLDHLGQRLNLTTATNQNSRRLFPGRRGGQPMTTDAIEQRLRTHQIVTLNSRAAALRHLVLQAPAPVIARMLGYTDQQTRRIATAAGSPWSRYAPGDDHSRDDHELHHSQIGDS

SEQ ID NO: 3059 - protein, 160 aa, synthetic construct
  REGION 1..160: note = TnsF-Tn7 System Protein
MKRQVSYRWRLCEVMAAHGMFTISDLVPLLVERGIDLSVSQIHRLATGVPERLSLPVLAALCDIFTCTPTDLIATKAENAVVRKTATDDGSVNLNAQRPPARRPAPDAVPAVAARHPQPDHRTRSPADGGQIRYLALPPPTPAVRRKETDHREANPAGPR

SEQ ID NO: 3060 - protein, 284 aa, synthetic construct
  REGION 1..284: note = TnsF-Tn7 System Protein
MEINSALFQTKQVTQDFGSFGTWMSLRSGYKYAALRLNRYACFLQEIERQWRCVPEADSLVRSFGPEYMRRHRLFTQWLGEVHSLTVSTEAFRHAAESRQIQNLMDQLPANSSYRQLAEDYLRVLEQRHAAGRTSLRSVRLALTPAIALLKAAGHSILGQRHLNRYLEAKPGQRAAIAGFIHYLHKKRGYGMNMPPKASLQKQRRNIEEKLLVIMTELPSGKSTLSDWVRLGLMYFHNVPAQSARRMAAASTETHSRQGITVNIGDKAYWLPAYPITIKETRKE

SEQ ID NO: 3061 - protein, 376 aa, synthetic construct
  REGION 1..376: note = TnsF-Tn7 System Protein
MAAAYTWHSGSHALKAQWPVPTPILPDEILSSWLVRTALRQGCSPMTLAATIWPGWRMWTIDTDRSLSFDRLRILSMRSGIDPDAIRAATLHPTISKIQQNPLTNKATWPWALTIGARNVKRRSGLQYCPLCLAEDASPYFRLNWRFAWHTGCQRHQCTLLDRCWNCQSPIEPHRLTELAPNATTCPTCGELLADALTEGIDPYAAALQQATDQALVTGFFRQPIAEGTVFDWFQLLNFFVSLIRRSACTNTDTQSHLFQLLDIDVPDGFPLHSGTNTEWLPIASRQALLRTVWSFITVSQEDFKSKLIESGISKQGLTEDIDSVPPAIQDLLHQLPDAKRKPRKTATTRKPGPRPRREVERMMARLQRKLEMRQR

SEQ ID NO: 3062 - protein, 298 aa, synthetic construct
  REGION 1..298: note = TnsF-Tn7 System Protein
MSEQLYDHIHPEFRHIACLSMEERLEFLDQPRWIGYQAAQQILDTLQGLMRKPKQPRMPNLLIVGDSNQGKTTLIRRFYELCGTPYINDEADPIKPVIVAEASSNADEKRLYCSILERFHAPYRPTDPTTKLLYQVIHLLRECRVRILAIDEFHSLLTGSAIKQREVMNAIKMLCNELAIPIVGIGTRDAVRVLHTDPQHASRFDVVELPRWELNKQFQSLLVDFEAVLPLRNPSKLHQRELAKLLYSISEGNLGNLRRLVNQCAEDAIRSGQEQITEEIIRKNKWLQPTRGIREVML

SEQ ID NO: 3063 - protein, 298 aa, synthetic construct; identical to SEQ ID NO: 3062
  REGION 1..298: note = TnsF-Tn7 System Protein

SEQ ID NO: 3064 - protein, 309 aa, synthetic construct
  REGION 1..309: note = TnsF-Tn7 System Protein
MPAGLGKECDDCIWEKSFNSRANILVESFEHAPTRQRFTDFCQWLKAKMGAHSAALKLKNYLDFFSFLDKDPGGVPSYLSLLEHYAADGLRRMQTPMLWLKVRYGVEPDAVMREEHSDKRRIEQMLDSIPAGVAANALKGYRAYLQSRQAEGRTSLRSVRLSLRAATNVLAATSSAFDMLPTQKSVTAYLTHTPGQAAALQGFIGYLNRSNDSDLSIQVDGLAAAQARTHKLEAQLLALYKSVSEGEDFERSWIRTALMLLHGVASVNKKTLAYRADAFQGKRGFTVTLKGQQYWVPSPEDRPTLATAK

SEQ ID NO: 3065 - protein, 593 aa, synthetic construct
  REGION 1..593: note = TnsF-Tn7 System Protein
MSQRIKRIQPRDNLCTTNDGEAIEHVHGTVVVWWQERISANPDVATIPMVDVVFRFLDKNDQVSGVTVVPIGVSRLGSFRMGTIWHGGKCIAEVDFGKVEEFTVDFTDGAWSYLSITGKHDIPYFKKDYELRRISTDEVVSDLLNFRLPDGKRNLLIPCIDFLYRCYGATSDVARILMTYEWSDVLTKLYATFEHDDPETWAVSPQRDIDDSDALLLATMRYNRKSELAAKGLYAQLDHARSEKRYKSSLKVPPWFEGPARLKARGRWINNGMTFLCLEITGLSQPQHHAYEIRREEWSGDDPEQAGPSLPWVKTIIDVPKDQDPYPVTDKMAPGGNAGSWGKPDPDFEIIGPACPVSRKPIERRYMKKEPMTVEVHPPSRFSTGDPAGAPNGTSHIYHHAKRVMGNGGVLGALWTELQYLKEIYPGFTSLAWYSEAQGFVDSPDFRLYALKPFDDDDRVVDGARAWLRYTDNATLRRGLLIIRAVVNGQTLYLFELQRKKKREGEAFRDEQISGMSMNINDPQQARRVISTVCDKIRNAMGKFAQLEGLDVAPNIFRHYSRHGVFAADITLRKALEPFGVYLPLRKKSKPPQ

SEQ ID NO: 3066 - protein, 309 aa, synthetic construct; identical to SEQ ID NO: 3064
  REGION 1..309: note = TnsF-Tn7 System Protein

SEQ ID NO: 3067 - protein, 222 aa, synthetic construct
  REGION 1..222: note = TnsF-Tn7 System Protein
MDSNSCNQIPFSVARRVKSTTRSLSGVFAFRGEGVAFESGLERDFLSRMEFRTDVLSVVSQPIQLDFVAHNGRSYTYTPDFLVRFHSQTEQNPILVEVKPEENWRKSWRESLPKWKTALRYAKQQGWGFHIYDESRIRGQSLKNIQYLERFKRAAYEEVDLEAIIRTVAFMGIATVQYLVTLHFNGAEALGKSHIFHLIATRRLDCDVSEPLDDSLEVVMPQ

SEQ ID NO: 3068 - protein, 636 aa, synthetic construct
  REGION 1..636: note = TnsF-Tn7 System Protein
MTKNSEIRTGTKLDRSFVNVLPGSLVCHQKETFRITQVLDFHSVLGINVESGRASVMPIAELKPFLGNKIKGAYADYDLEELGAEEWATAQKRYSIISPLLGIEGQSRSVVEQHAQAADVDPVTIYRWLRRYKEQGEITALIPIKRGWSKGRPRISEEVERVIGETLKEFYLTEQKPNAKATYEEVRKRCKALKLRAPNITTVQARIRKIPDHIRLRKRGDKELAGNKYDPRPGGLYTEYPLQIVQIDHTPMDVILVDDVHRRPIGRPWLTLAIDVYTRMVTGYYFSMDAPSAVSVAMCVVHSILPKEQWLALHNVDAKWPVWGKMGTLHSDNGADFRSHSLIQSCILHEIKREFRPKKNPHWGGHIERLMGTFAGMAKRDRGATFSNPVERSEYNSEEKATYTFAEYEERLVKNIILYNNKYHEELDFSPIKKWDTAFFGDKETNPQLPLPPRVSDPWAFQLDFLPSSRRTIRPDGVEMDAMYYAEALRPYVGAIDPATKNPRKFLFRRDPRDVNRIWFYDPGLREYFEIPILRGRYAGVTVSEYVAAKKKAKQMGRDAIDHDLIERLIEENRQQETEAAARTKQARKNTQKRTNNAKQSTPARPKSDLPSPPPKPVDVPGLLSIDDVDTFGEVW

SEQ ID NO: 3069 - protein, 297 aa, synthetic construct
  REGION 1..297: note = TnsF-Tn7 System Protein
MTEYAHIAPQFKEVMVKTDLERLDFLEQSRWIDYPAAQKLRAILDGMLRVPERTRMPNLLLVGPSNSGKTSVVSRFRDTTGKPYIADDAVNVRPVMYVEVHKPDERELYSAILREFWAPHNPAAVLSKLRDQAIHLLRKARTRMLVIDEIHTVNNGSSRKAMDVMNEIKMLSNTLHIPLVLVGTRTALQLLMLDPQYTSRFEVVALPEWKVNPELQAFLKAFESVLPLKKPSRLFSPDLTTLIHAISDGNTGNIGYLLRECAKEAIATGAEIIDRALLEKNQWMRPTSADGVRVRTL

SEQ ID NO: 3070 - protein, 297 aa, synthetic construct; identical to SEQ ID NO: 3069
  REGION 1..297: note = TnsF-Tn7 System Protein

SEQ ID NO: 3071 - protein, 605 aa, synthetic construct
  REGION 1..605: note = TnsF-Tn7 System Protein
MTDQHDHKHCDGCHRPIKKAHAKHGGKSFCGTCYKREFKRVECAECGKGTYAYHGKEPAYCKTCRNKGRTCAGCDKPLPRASKIIDGEAFCWPCAAKRQEPEPCALCGQLSLRLSRAPEIGIDERICWKCRTKKTHFTCTSCGKYRKPAGIDSQGRVVCKSCLTEEEYRCPRCGEPGKPHSKTRCQACYWSDHAQEAIAQGVAALSRPWTRHAYRAFGESLITAYGSQKASHTIPKYLPFFISLDMRYQKSQAITPRGLIKTFGAEGLRRNNRATTFLAREGIIPAFCDIELQHYNEIAKQERLVEEATDTWYGSFLARFHDHCLRLQQTSLDRGNKSPKSKTVYSWISAARAFLAYVDQKGIKALSQIETHHYDQFLIDFGGYEASVRRFIKYLNKEGKLFKKVKMESIIIKNIAHLLLPQKRFDELTDKCFDPGTPAKEALIGVLMLYYAQTASNIARLRLDQLGRNEKGLRTIRFYRVDVEIIPEFEPIFDRWLKERKSLSALTSKHDNKFLFPGRRFGCHTSPASIKYYYDQWKVTADQLLASSLFQMYCNGVRHPNAPHNAFGLSKAMTGKYMDIFDAHYHDALDHFREQEKKKKAKVGK

SEQ ID NO: 3072 - protein, 389 aa, synthetic construct
  REGION 1..389: note = TnsF-Tn7 System Protein
MKENKKVVHLHNDQKVAPSRAPDQQAAQTLFKQMLDGYEKYKTGTKRNTPKTVAADLRIIKQLAEHSGLYPWEWRLDDWDAWNTDLVARKGISVGTQRKNGGSIRNFLKYVSTREVFQREVKQQFNAEVTEFIDEDEILHHLYETEQKEPRPAFTEALSDQFFDALKAEIKLEASHPSRKLLNLQRDLAFFYPMKVTGLRVGSMIALNIDSFGPNPKAPEMGEYGAVYTIGKGSAGSGPRPISTWFDDPKIPQLLEWYIKEIRPQYLKPNNPDERALFLSERGTRLSYASIWDRLQKRLDDAGLKGRKLCNHSFRHGKASEGGVRYGTETTRRMLNHKYGSTTQGYMAIDDEYSQQQIADAIREQIDQKAKRDAKKANQSDNDKDGDRP

SEQ ID NO: 3073 - protein, 1044 aa, synthetic construct
  REGION 1..1044: note = TnsF-Tn7 System Protein
MLENDLETACLSWLSDLGYTCLTGDDVSVGGDHEARQKYLEVVLAPRLRESLDRLNPSLPSSAVEEAFNKLTTYGAQSLAEGNREIYGWLRNGVPVEVEDSDAHKSTVLATVLDLENEGNNDFLAVQQFTVHGEKVRRPDIVLFVNGIPLAVLELKNPADINADIESAFNQIQTYKNDISQLFTYNLLNVVSDGTVARYGSLTAEYGHYSPWRLIDDEKAPEGMLELEVLVRGLLAPKTLLRFFKGFVLFMSQDGAPSIKIIAQWHQYHGVLKAVSRALDAYLHKKDGKGGVIWFTQGSGKSLLSVFYVMAIREIADFANPTFVIVTDRNDLDGQLYGTFSACEKSLRATPQQATDRDDLEEKLSTVQAGGIFFTTINKFAPKKGEKSVRRLCERENVIVITDEAHRTQYGFKAKLDEQTGETKYGLAKYMRDSLPNAIYLGMTGTPVSLDDRDTQSVFGTYVDVYDMIAAQKDNAVVPVHYESRIIELQFNEAEKQALMDEFIEATEEDDTDSQNRTVSRLTRLEALAMADGRLERLSGDLVNHWETRKESMPGKAMIVAISREAAVRLFDEIVKLRPDWKGDDLNAGKIKVVMTGNNASDPPHFQPHQTDKADRKLLEKRFKSASDELEMVIVRDMWLTGFDAPPVHTLYVDKPMQGHGLMQAIARTNRIWKDKPGGLVVDYIGIGEELKKAIKSYTRDSGTDKPPVDVSGEALAILLDTLDVIRKEFFHGFDYSQFSNPQQALALLGPAMEHITKLRPDPDEKGRNQGIHEYLDQVAKLTKAQALAGTRSEALALRDEIAFFQAVRVSLIKLTRVGSGKSRVEKEAALRQLVAKGVLVEGVQDLFGTLGLEKPDISVLDESFLKQISEMPTKNLAAELLQRLIEDEVKARSRRNVVQAKEFTDKLEEAINKYRNRGLTTAQVIEELIQLAKEISAARPPEGMGEDEFAFYQALCENESAVRELGDPILRALAHELTDKMRKSATIDWQKRQSARARMRMLIKVLLTKYRYPPDKQPAAVEKVIEQAELFADEWGIEHPSVA

SEQ ID NO: 3074 - protein, 605 aa, synthetic construct; identical to SEQ ID NO: 3071
  REGION 1..605: note = TnsF-Tn7 System Protein

SEQ ID NO: 3075 - protein, 15 aa, synthetic construct
  REGION 1..15: note = TnsF-Tn7 System Protein
MAHRGVLFLDELPSL

SEQ ID NO: 3076 - protein, 95 aa, synthetic construct
  REGION 1..95: note = TnsF-Tn7 System Protein
MNEQWWLYLLECEAGMTYVGTASDVEARFRKHAEGKGSRHTRINKPLGILGAQPFPDRSSACKAEYALKQQSMAAKLSWAEKWPWQGSQTPTDTD

SEQ ID NO: 3077 - protein, 404 aa, synthetic construct
  REGION 1..404: note = TnsF-Tn7 System Protein
MKDCSQCGKSVRIYNRIFNEMGYCTACYNWEFKHKPCAKCGVIYRLPHREKDVVCDKCQKNRPCLRCGKEHYSIGKLTQYGPVCHACAVYFREKKICSVCKKQSFGATRLGKSGTGAWFCPSCYGKAKGHASCPKCGRHRMLQKTEHGTMCKKCATEGHTNCTICHAEIPAGKGKKCDNCAWAERLAHRINLLKVSVRKGAIRDAFPVFALRLAQDVGNDKAAMTIERYAPFFRVAAQQWPTLPDSPTILSHFKPKGMRRYLKVKQWLEQLPNQKTDKTLAVNLAEQDRIRVLRGKLAGNPVAESLFDSYHDKLLAKHHTGKTSISSIRLAMQPVVGLMQGFNHFPIQEDIDAYLRKKPGQRAALTGFISYLRREYALDLHISKVTKKDQQRMKVAKRNALEKR

SEQ ID NO: 3078 - protein, 404 aa, synthetic construct; identical to SEQ ID NO: 3077
  REGION 1..404: note = TnsF-Tn7 System Protein

SEQ ID NO: 3079 - protein, 293 aa, synthetic construct
  REGION 1..293: note = TnsF-Tn7 System Protein
MERYSHINPKFRHYLSLSDEERITFIRDSRWIGYSQAREILQLLEEMLNYPKKPRMPNILLVGESNNGKTTLIHHFYKKHGEAYGNEDQNLIKPILMIESPATASEKALYMAILNELMAVYRDSAAVETLYTQTLHLMRTFGVKMLIIDEFHSMFSGTARKQRDMMNTLKRLSNELQIPIIGVGTENAVNILHTDKQFASRFEVWELPAWEFNEDFLRLVMSFESVLPLKEASNLASPDMARAIFYKSKGNLGNVSRLLERCAVEAIRTKTEKINLKTIEKQKDFMSTINGLI

SEQ ID NO: 3080 - protein, 293 aa, synthetic construct; identical to SEQ ID NO: 3079
  REGION 1..293: note = TnsF-Tn7 System Protein

SEQ ID NO: 3081 - protein, 764 aa, synthetic construct
  REGION 1..764: note = TnsF-Tn7 System Protein
MTSRPPPNAEDTCAEIVALLTERIPGSDPDRLHTQIAALGLLPANARRLLTYLSEHPGALTAGDPAGPAVLRTLLDLLAAEHPSVRRVHCHRCGKVRTLPYRDDGAGICRSCYNKTRLTTCVRCGELGIPTVREPGGTICSRCAARDPNRIHTCHICGKAARIYYRVDGNPVCQNCGPRKLHTCSSCGRENTPAHALTEHGPLCSRCYHRGRVHQCCECGQETEYARRVTETMDAWICYRCWVPPTRTCSVCGADKPCGRKTSGKPICSTCRARRQQKRRCVQCSRTVKIQTTLPIGAICGSCYRHLRRTPAPCAGCGQSRPLVGIDTHGNRICGPCSGDCRNWRCRHCGIVGLLIENTFCLSCSVESRVRDLLTGPGGRVHPQLASVATFLLDETPRERSHQLLNRAQWVTLLRSLVESGDPITHASLDRLKQGTHVRHLRTVLVYTGVLDDRSHDLDAVDAWIDELLDGLPRDIALLLRPYAAWSVLHRARHRAQGGGAHPPAAGSVSRYARARITAAAQFLTWLTDHDRDLAGARQADVDRWLDDGTTTRWRLRDFLLWANSHHLTADLHVPSLGREGLPQHILGDDQRWALLRRCLRDPNLDLTLRVAGALLLLYAQIPTHIVELTADDVVTDDTGMHLILHTVPVLIPPPLASLVAELLEENEQQPRQQPPDAPVWLFPGYRPGTHFSGSRLSTNLNKTAGIFTKPARGAALCALAADLPAPVLADLLGVSVAAATRWSALAGRDNAEYLAARIDNPPE

SEQ ID NO: 3082 - protein, 764 aa, synthetic construct; identical to SEQ ID NO: 3081
  REGION 1..764: note = TnsF-Tn7 System Protein

SEQ ID NO: 3083 - protein, 383 aa, synthetic construct
  REGION 1..383: note = TnsF-Tn7 System Protein
MLTVQQCCIVYNMVDTVDLPGAAHLVLAGGVTHLDPHTAVFEAMLAGWALQQRTRFLKAATIDSRLILVRRVMEFANEYPWQWTCADIEAFIGHCRSRPQPIVVTTARLYETTLRMFLQYLTDPRYGWTTECLDRFGVAPSQVLHEWNSIVHVADYEGDPRRRPLTYDEIQALFDAADGRVDDIRAHRRKGSLAAMRDAALLKTIYAYGLRRREAWGLDLADLRHNPKAPAFGRCGALFVRWGKSSRGSAPKRRTVLTVPEMDWIVPVLEQWCGEIRPAFGVGAHPAVWVTERAGRISLRRINEAFVTARDAAGLDPTLDLHCLRHSYITHLVEFDYPEKFVSTQVGHTYAATTAIYTGVSDEYRNRLLLRALSRHPDLWEQP

SEQ ID NO: 3084 - protein, 109 aa, synthetic construct
  REGION 1..109: note = TnsF-Tn7 System Protein
MNKKMTYRWNLRQLMATRNMFATTDLVPLLAERGIHLSREQVFRLVTTTPQRLSLDTLAALCDILDVGVADLIDITAADHQVPKTSGDTHAPRPQPVVRRTTIRRPEGL

SEQ ID NO: 3085 - protein, 299 aa, synthetic construct
  REGION 1..299: note = TnsF-Tn7 System Protein
MTREIRLQELALSKAWTRELYAGFGEWLVKERPSHRHLLTVLARHFAFFQTLDVVCDRLEEVSGDLLLRRFGVAELRAHTLPVRYLSARRGIEIGDDEKAGCAELHRISVILEESRAKSWGMVIVRYDRWLESKKIAIRTRRGYLSAATRFCHAAAIKEDGLYTADQIRHFLRRYPGLRASLYRWNSFAAEALGCEVSMPATRQRRNRPKTVRDLAKLLSRINDSGPDLASVRILQRTIAKAFGYSVARFGLYKWSTEEQEGKVWLCREGERLLILGRLVPIVVSWARRVRAGSSQSSD

SEQ ID NO: 3086 - protein, 181 aa, synthetic construct
  REGION 1..181: note = TnsF-Tn7 System Protein
MVLDLDPAVQSIEVQPFTLLYEMGGVSSKYTPDVLARFDGSKRNESVTVYEVKPADELRKNWAMYRPRFKAALRYCRAQGWRFRIVTERQIRTPMLTNARFLRRYRSIPVDSLACKQLEYALHALGPTTPQALLAGTYFSPESRLAALPMLWKMIACRQIAADLDNPLTMGSRIWLAGDFP

SEQ ID NO: 3087 - protein, 349 aa, synthetic construct
  REGION 1..349: note = TnsF-Tn7 System Protein
MTGMRWGFRPEPLDGELLSSYLVRSAGLHGVPADRFCVFHFPEFRIWTRDIDRSATTPFLDALSAKAELSLECVERMTLRDWEPLVSNRAHRGMASWINALGVYHRVRLRHGLQYCPMCIAGVPAYKKTWRLSFVTTCEIHGCVLFDACPCCDAPIIPHRQLAGALRCHNCHRSLIGTLLPIPEQSLPVTALQNECLHALGTGFADVGGARVRAGAYFRGLRILASVSLERGCGKSQGDAVSCGLPMECMRTANRVAALCALASLLAAWPKSFRHRAADWCWTQRMFCRRSVPAWLYREVRRLPRGRVRRTRARQSLRAKLTSLGRWKPEGWRGTRAVLLVCAAQECRR

SEQ ID NO: 3088 - protein, 635 aa, synthetic construct
  REGION 1..635: note = TnsF-Tn7 System Protein
MRFVSKKFLAFQIGQIVRCGEARYEITHLISVDSVLARNLETAQSERLRIESLASAEIDPAPVSADGSRNERDITQYSEVDWAEGQRRFEAIKPLLENPIRSRASAEQAAEKAGVHVATLYQWLRLYQAAGHVSALVPHKRGRKPGTRLLTDAQEAVIEKAIEDVYLHKQRHAKQDVVDEVLRRCRLGKIAQPHPNTVRNRISVVDPALVLRRRGQRDEARKYQAFPRQFPGADYPLAVVQIDHTPGDVMLVDDVHRLPLGRPWVTLAIDVFSRMVVGIYISLEAPNAAAVGMCLAQALCSKREYLASLGVEGEWTVWGAMATVHSDNGRDLRSESIARACQEYGIDIQWRPVTQPHFGGHIERLMGTAAKELHKLPGTTFSNPKDRKGYSSEDEAVLTMKEFEQLLVDFIVNVYHERRHDGIGMSPQRKWSIGISGDENTPGTGVPPIPEDPIRVQIDFMPYEERTIQQYGVQIDNIRYYAPELDPYVNAEDPENPKAKRAFLFRRNPRDISKVYFLDPKDNIYVTIPYQNIGLPPMSLWELREILKHLKAEGLKDINEHRIFEALERMRGRIARATAKSKAARRKAARMPPPKNVPKAACINKDELPSRPAASPEADPFAMAIKPFEEVSLVR

SEQ ID NO: 3089 - protein, 295 aa, synthetic construct
  REGION 1..295: note = TnsF-Tn7 System Protein
MSEFDHLAPEVRNVLELSTAERIAFCREDRWVGYTRAVEVRNKLDDLVAFPRSLRMPNLLIVGRNGNGKSAILEHFARSHEVQATEAGTPVMPVLLIEMPDTADASEFWSEILWKMLISHREGDHPRNKKRQVKSILQYAQVRVLVIDEFNNLVNAGRKAGDLLASIKELSNALKLSIVAAGTQAAINALNSDPHMKSRFSPVALNRWSLNAEYLRFLTSYEKLLPLAKPSGLATRELAPRLYAMGGDAIGGTVNLLKAASKRAIETGTECITVPLLEKLDWTGPEGWEEMARAV

SEQ ID NO: 3090 - protein, 295 aa, synthetic construct; identical to SEQ ID NO: 3089
  REGION 1..295: note = TnsF-Tn7 System Protein

SEQ ID NO: 3091 - protein, 675 aa, synthetic construct
  REGION 1..675: note = TnsF-Tn7 System Protein
MICDPCQPVSVVPESEPLNSQLTEILAALPGPTSQAGTTTLKAWIETLVSSTRAMGILGKYAQQVPDFATNGDPHMPRLAQRLLRDLQSTGTTGIVLPLCMACNEERLLVKTLPDGRRVCARCERRLVLRPCGICVKETIIVARMDGVAHCKPCWRKNPASFKQCSRCGALGGMDKRTPEGPLCPRCAPGTVLPCHSCGTVARIAGYRLGGPQCRSCFRQIKTTAQSCPGCGDKRIIAYLSPNNTPCCASCAGVPAHYACIDCGSEDNMHGKRCYTCVAKIRTLELITDKTGVINTAFEPLRHRLLQARTMTAVADFVRNRPAADLIRALVNNELPLEHTTLDQWPRPKSAEYVRSLLTASGLLPTRDENLRLFETWAKHFLQTQPPQARSVLEPYLSWNVGRNLRIKARRAPLSRNAQHYGRDKLAMAARYLEHLAASGLKLGEANQTHLETCLLEIPGRRLRTHLPAFLSWASINALMPSLTMDYNKTDNRASMMTEADYRWTVQRLETDTSIPLRLRITGLFVGLYAQRLTRITALTNDKITTDGAETRLWFGISHILAEPALADLIQQYRQETHSYRSPESTGWFFPSRNAGRHLSSSSLTRGLSQLGIDTRQLRGAALTNLAAHLPIRLLCDLTGLEAQAAVGWADIAARSWNAYPQLRSENYSNSARIE

SEQ ID NO: 3092 - protein, 675 aa, synthetic construct; identical to SEQ ID NO: 3091
  REGION 1..675: note = TnsF-Tn7 System Protein

SEQ ID NO: 3093 - protein, 369 aa, synthetic construct
  REGION 1..369: note = TnsF-Tn7 System Protein
MVRSLRAAGLPANVVPLDPLEAVFVGMLAGWERQRLSRGLDPETTRGNIALVKRFARFTGEYPWQWKPADVEDFTVSLINRPEPASHSTLRGYHGVIRTFCTFITDPRYEWPEVCQERFGSHPVQICHDWNTRHHVAEFEARPAKRPLTFDEAETFFAHADLRVERIIAAKKKGALSALRDAQFFKTVYAFGLRRREACMLDLADLRSNPNNPEWGSYGSVHVRHAKAIKGGPPRRRTVLAVPEFAWAVDGLRQWIEAARPKFRPGAANPVWVTERRSRLSVRHADEKFALLRDEIGLDPRLTLHSLRHSYVTHLVEYGYPERFVQEQVGHSYASSTAIYTDVSDDYKNRILAKALARIRHPEQQGLQQ

SEQ ID NO: 3094 - protein, 113 aa, synthetic construct
  REGION 1..113: note = TnsF-Tn7 System Protein
MTNAYVITWNIRQLMAAKGLYQTTDLVPLMAEHGVSLSREQIYRLVTSTPSRLNLEVLAAFCDILDCTPNDLITFTRATTAAPAERTASGETAGLQPIGDLRPVPARIRRPGE

SEQ ID NO: 3095 - protein, 305 aa, synthetic construct
  REGION 1..305: note = TnsF-Tn7 System Protein
MEVAGNGQSHCDDCLIISRLGREVELRLPLFEQSWVAHLYKIFGEWSINRGVRTPRLPESVAKAMDFFLILDRAKDLHQPLTADAMVKVFSSKELRSNLNAATFLQQQFGFIIDGKARAEGQSIALIEDKLAAAAGNPWHPYLLSYRSWLADKPARTVAQYMGVAEAFCRQFQISGPFSQQELLEFLASKPGARTNLGPWVSFVQKHLGWPVTLPPKVIPAPALRKDAARLGKLLGAIGGAAEASTQDIEDAVALAFGFNRRELDKEVLGSSGPRHLQTRNGLVEIPDAMAGLVVTWLQRRSGPA

SEQ ID NO: 3096 - protein, 220 aa, synthetic construct
  REGION 1..220: note = TnsF-Tn7 System Protein
MTRLSSAAPVRALKNSRRALTGKVTLGGGEMAGFESSLERDWLRLLDFDPNVIALREQPFTIYYESEGRRTRYTPDVLAEYSQPGQTRTVVYEVKPLETLRSGWQLLRPRFKAAVKHCRAQGWQFRIVTERHIRTPLLANATFLRRYRAMTPMLVKQAQLKYTATVLGPTTPQALLAAAYWPVDEQAQAIPALWQLVASGEIEADLSKPLTMATPIRLRG

SEQ ID NO: 3097 - protein, 344 aa, synthetic construct
  REGION 1..344: note = TnsF-Tn7 System Protein
MRMGWPPLAGNELLSSYLSRAAIARGMSAQSLTSLICPGHAIWTRDVDTNARARTLEALAAAIGEPLRRIKDMTLMGLSYPEPGRPGWQGTHHWVTAIGVYHRSRRRHGLCFCPVCLAEGPFFRRQWRLAFWTVCPHHQVMLRDACPSCGGTLEPHRQQYDLRLCSRCNRSLVSGDCVAAVPSSLQDELYRACVQPHLAQDWSPARCNGREYLAGMDALLSGFGVARMPDVHRGRQCRERLEMRRVDQRDADLRLLEVLCQAWPQSLRAASRQYHVTQRCFRQQCPDWLAQEIDQLPPGRINGQANASRRALRIAAEAEQRRKPGWRSLRAKTLLKMITPFNEH

SEQ ID NO: 3098 - protein, 630 aa, synthetic construct
  REGION 1..630: note = TnsF-Tn7 System Protein
MSLSNFFKVEPGAQVFVGPRKYRVTHMLSIDSVLAEDIETGASARLRIETLSTIVSAETASDAGGFPIHQYSKEEWSVAQKRFEALRPMIDHPIRSRSEVEKLAKGAGVHVATYYKWLAAYHDAGHVAALVPRKRGAAKGQRHLAADQELVISSVVEDMYLKKQRHSPKEVVDEVLLRCKRAKITPPAPSTIRRRLKELSPAMTLRRRGFKDKARDVYEPIRGSFPGADFPLSVIQIDHTPLDVIVLDEVHRKPIGRPWLTLAIDVYSRMIVGLYVTLDKPSATSVAMCISHAMTPKSEYLAALGVEGNWPVWGQIGTLHADNAKEFKCKAVTRGCQANHIDMQWRPVKKPHYGAHIERYMGVVATELKKVPGTTFSNTQQRKGYDSEKEAVCTMKEVEAYLVEFIVNNYHQRSHSQLQEASPMRIWQQGIVGTSERPGIGAMPIVGDPERIRMDFLPYFEITIQRSGVRLENVFYYDPVLDPYIGATMPDDRNAKRKFIFARDPRDVSQIYFLDPKADRYTPIPYRDLSHPPVSASELREVTKALRAENKGEVDEHRIFSSIQRNRDRINASTESTKAARRQAASRPQAKPVPAQVQAAAQPPAHERAAEPALSIFDQELEVFEVGELN

SEQ ID NO: 3099 - protein, 208 aa, synthetic construct
  REGION 1..208: note = TnsF-Tn7 System Protein
MLFLDELPEWSRHTLEVLREPLESGQVVVARASRTEIFPARFQLVAAINPCPCGWAGDRSGRCRCAADGIQRYRGRVSGPLLDRIDLHVEVPRLKPHELRDEQPHGEDSEAVRTRVVAARTVQLGRSGKPNAQLLPAELAQHCRLSNDDRALLEDAVERLQLSARSMHRILRVARTVADLDGTADIATAHVAEAIGYRQLDRGTGIHC

SEQ ID NO: 3100 - protein, 295 aa, synthetic construct
  REGION 1..295: note = TnsF-Tn7 System Protein
MAAYPHLLPQVAERMEYSESERIEFARSDRWIAYPVAKGVIDELDQIIAYPTTQRPPCRLIVGRGDNGKTAILRQFRQRHPITMREDGSPNSPVVAIGMPATPDLSQIWSEILQSCAITHRRGDPAHAKYAQVLGALRYIKARVLLIDEFNNIVNARKGASDVLAGLRKLSNDLNLSIVAAGTEAAINALSFDAQMRSRFKPLALTRWSLDLAYLSFLKTYERLLPLPAASNLAGKELAQVIFNAGGVAIGGSVSLIKEAAVTAIRSGQEHITSATILDTQERLRQNYEGVVAST

SEQ ID NO: 3101 - protein, 295 aa, synthetic construct; identical to SEQ ID NO: 3100
  REGION 1..295: note = TnsF-Tn7 System Protein

SEQ ID NO: 3102 - protein, 493 aa, synthetic construct
  REGION 1..493: note = TnsF-Tn7 System Protein
MGRTPAPTTDCAHCGQLKRCTRTILGQRVCPNCVLRFRRAPGCCPHCGQAKVLAFHDDQHRPSCASCTGNDPIYACPRCGREDRPYGHLCSVCTLQDRATALLADPSGHIHPRLQPVFDAWMVGKDPRSTLQWIRKRSSSPEILRAMALGELPISHTTFDDLPSTRPVNYVRDLLTATGVLEPYQPLIARTTHWLGEVLELLPKHHADLIHRFARWHLLRRLRLLEAQDKVTRGAVQNARATVLTAIRLLIWLDEHGIALLDATQDHLDAYLASHPGRGVVLVRFIDWTNHTGITHDLRIPPQQRPDLQVQLSDDQRWHYVETLLHDNTIRRYTRIAGLFMLLFAQPLSRICRMRHDQVTLQPGGTVTTIFDTVPIEMPEPLDQLLRDHLTHGGPASFANQGIWLFPGRLPGKHLVTENIRAELVSHGIHPKHARHAAMFHLAADMPTPVLAELLGLSPITATRWAILSSRNWAQYTAMRHTSHQARGEEQLR

SEQ ID NO: 3103 - protein, 493 aa, synthetic construct; identical to SEQ ID NO: 3102
  REGION 1..493: note = TnsF-Tn7 System Protein

SEQ ID NO: 3104 - protein, 2006 aa, synthetic construct
  REGION 1..2006: note = TnsF-Tn7 System Protein
MTATIHKVVAGNGYQYYLRNVAAHDASSRGRDSLADYYSAHGEATGVWHGAGLTALGIADGAEVSEEQMKSLFGLGRHPNAEQIEAEVYDEQIRLGAKHKDAARAADKASRLGNPYRIYAEVSAFRKRCAKAFEQHNIAHGADPHDAIPEAERARIRTHVAFEMFCEEYGRAPLDARELSGWVAKNSRPNTTAVAGFDITFSPVKSVSALWAVAPRAVADKIELAHQRAVRDALRWLEQHGTFTRLGRNGVRQVDVDGIVAACFTHRDSRAGDPDLHTHVLIANRVRTLDDKWRTVDGAAIYQAVVTVSEIYNTRLEHHMEDLVGVEFAERPAADPAKRPVREIVGVPARLIEAWSRRETAIKTRVGELAADFQQRFGREPVPAEMYELAQRATLETRPAKHHLRSLAEQRADWRAEAMTLLRGREPVAQMVAAALNPQRTPRVAASSQWITRTAERVLEVVAEHRSTWRPNNVRAEVERQIRGHIRGQEWEQVTEAVVAVALSPAHSIARGDPDIADAPELGHVPELLRRRQGASVYTAVNSQLYSSKRVLSVEQALIELSVQSGARQLSLETVGDAVRAYNAAYPERPLNAGQVSVVEGFATSGLRVHTANAPAGTGKTTAMRVLTDAWHASGGQVLGLAPTAAAAAELGASIGARVETVDKLLDVLSRHTLHPDNPAFERDAPPTLPEWVLQIDAGTLVIVDEHVKLGNLKRLRLLQFVTGRGATVRCIGDDHQLPAIEAGGADADMHAAAPDQTLTFTHVVRFTSSAEATASLQLREGDPAALGWYLDNGRVHGGHHGATHDDAFTAWMNDHLAGRAAIMLAANHEVVSALNARARADRLAREGGTVEAECRLADGLAASVGDTIRTRRNNRRLRVGARDWVRNGDTWTVTAVHDDGSLTAARVRSGDGEPGERVRFPADYVAAHVRLGYAATIDSAQGITADACHVALTGGESRQQLYVAMTRGVHANHAYIPTALDGSEGSFWSEPAVFPRTAVEGLVRILGRDGAQKSAHTQLRDALDPHIRIGRALDIYLDAIGVAAEAALGPGGLERIDRAAEALRPHLTDSPAYPVLRQHLATIALSGHDPVAALHTAAGARELDTADDIAAVLDWRLDPTGTHSTGTGPLPWAHGIPRGLRDDLDSTQLTARATIVGDLAEQIRTDAQDWTPSTAPHWARPLIGTDPTLLGELAVWRASLHVDDRDMRPTGPTRYSALEREHQQLLNARVTDAIGDIRRPVNRWAPTLERLDARIVADPYWPVLADKLDVAARAGIDIEPLLTHAAALRPLPDEMPAAALWSRLQLEPSALDTATSHRNLRPEWITDLHAVLGDDTAERVITDPAWPRVVAAIDRATATATGWTPHQILSTAHELLLTAQPDNTNALRPDQLANALAWRIDALLHHTPAPANDTASSHEPHPTTMPESTNRPASQSNSDLEHSRNDSPRLKAEAAQAPGPEPAADTALWTGLPEHVRTLAQLMHTGQITAAVEMLADLTDIATEDQRAILADIAETLYRNSFPVARARLRWAGERYPQHRALIEACTPDTDPHVYQPGTTRTEPAYRRERRHEAARDRHEYINPAQRRDPLTDAQIVARRGEQDYVDTRAHVDDLPYDRVIPDGVVHHYYREALPDDRPKYYALDYDLAAVPHTRWLGCVACGLERTRTDATPVPPRRADDGLCGECRDNHVPGIPDHDPTDHITARCDHITTTNPAPAALAMLRRDWRATHNPTHRVAIEAWLRDHPLPNTATESTSDGSATADPSVNNPLFALTDAQLDERIDQLHQSLALADTDDFLYSPAQHTPDHEPDTDERIRRHTAAQQAIRDARIAEQHLHTAAKHFHAIATQLAETRATLEATPSFRRSTRRALQTRVDALVREQINRSREHTTARGAARQANRAAILLAGAADNWDHLLHSDPAAVLDRRRSTRADTEAEVAHTTYIYQQLDECRAEQHRRRTLDPAQLAREQRRRPARPADDIDRELNESRAETHRQRDDELGL

SEQ ID NO: 3105 - protein, 2006 aa, synthetic construct; identical to SEQ ID NO: 3104
  REGION 1..2006: note = TnsF-Tn7 System Protein

SEQ ID NO: 3106 - protein, 376 aa, synthetic construct
  REGION 1..376: note = TnsF-Tn7 System Protein
MAKIPGSAGLVLVEGVRHLDEPAAVFEGMLTGWANQQKSRMLAPSTIEPRLSLLRRFAEFTASHPWSWTASDVEDFTVSLTGETGGRLAPATIRGYHLVLRMFCDYLTDPRYEWLRQCRDRFGQVPEQICHEWNTVAHLVDYEGRPGRRPFSYNELQGLFDYLDERVERIATSGRKGALAALRDAQMIKTCYAYGLRRTELCRLELVDLRPNPHMPQWGSYGSLHVRYGKATRGSTPRRRTVLTVPEFDWVVAGMRQWVEQARPILNAADHPALWVTERLTQVDGCFLEKRFSRIRAGAGLAPELTLHCLRHSYVTHLIEFGYPERFVQEQVGHHFASTTAIYTSVSNDFKKQTLRAALHRVYTPNPAPTTPQEVR

SEQ ID NO: 3107 - protein, 111 aa, synthetic construct
  REGION 1..111: note = TnsF-Tn7 System Protein
MVMSWHLRQVMATRGIFQTSELVPLLADRGVHLSRQYVHKLVTTAPQRINTDLLAALCDILHCQPNDLLEPVAAHTEQTRTGTDGHHLEGLGIGDLRPVRAVVRRPHEPNA

SEQ ID NO: 3108 - protein, 813 aa, synthetic construct
  REGION 1..813: note = TnsF-Tn7 System Protein
MTDTVDEALADPVGLIVRLVATVEHGLDAARIHEVVVGVAGGRAKRRRLAQLLSDCPQVLTTGGPPVAWSVGQLLRGLREAGATSIAAPRCGECGRTLTYMISRRGYLLCSPCRDTAQTCAACGDQRRVSTRDRHGQPRCDQCPDDQGDPTALLAEAVAVISPGFEATDVMAALGRATARPAGQRRLAWAIVNQPSLLTGAGSDAPTPAVLRFIDELLAAGARNIARPSCPRCSRTVALSKLLDGQRVCRTCFAHHRAVPCAGCGSVREPATRDAEGRPLCPNCLSSDPINLEDCRGCGRRRRVAARTADGPWCERCRPRTAATCAICGRLTPCEISAATGEPWCERCQSWWARCSGCHTVASIRGGTRKAPLCARCLNPDPDFWERCPICKTTWQTSAHRPCHRCTLTQRADEVFAGPDGSVRRELAPLHAALTSIDRPVTAVAWLSRPVVAGLMKEIASDQRAVTHDVLDELTAGKTLDHLRAVLVAGGMLPDRDERLVKLERWTSRTVASRDDHEERAMLHRYAVWHHLRRLRGRLGTGHATHLQMANVRSHITAAANFLDWLTGRGLTLASCTQPDLDQWKAGEDLSYRDQTGHFIRWATKNRLVKGLTFGAERWKGPVGPHDSEGRWDDARRLLHDTTLTTADRVAGLLLLFYAQRLSMISSLTVDQVAEANGRVSIQLGTSPTVLPEPLAALVLDLIATRRPYTVIGHADQTPWLFPGQRPGQHVSADRLGLRLIAVGIQPGQARSTALFALAEEVPAAILARMLGIHIQVAVQWQKASAGDWAAYAADVSRRSTAALSPRTSPAPR

SEQ ID NO: 3109 - protein, 813 aa, synthetic construct; identical to SEQ ID NO: 3108
  REGION 1..813: note = TnsF-Tn7 System Protein

SEQ ID NO: 3110 - protein, 326 aa, synthetic construct
  REGION 1..326: note = TnsF-Tn7 System Protein
MQQRTAALAGAAQLELVSGVIQLRPEDAMVAAMLRGWRAQQMSRGLKEDTIVARERLIRRFHEFTNEYPWQWLPGHMDEWSATLTGERHLAPSTIRSYQGEVRQFTEFLIDGRYGWATACEDAFGTHPVAICHEWNTIAHLNDYEGDPEARPFTREELQRFLDYADDQVDRAVRSKRKGALAAYRDATLFKVVYGWGLRRTETSKLDLVDFGRNPKARQFGRYGTLNVRYGKAKRGQPPRRRNVLSVMDWAVDAARDYVENVRPRFGCEEHPALWVTERGGRVKPSEINARFVAYRDALKLPKALVPHSLRHKALICHTFDRKWYR

SEQ ID NO: 3111 - protein, 113 aa, synthetic construct
  REGION 1..113: note = TnsF-Tn7 System Protein
MAAKLDYRWHLRHLMADHGMFSTTDLLPPLAQRGINLSSSQVYRLVVERPERLSLKILMALLDILDCTMDDLIEPIAAAGAAQRSKRAAAGGTAAESIGDLRPKRARIAPVDQ

SEQ ID NO: 3112 - protein, 328 aa, synthetic construct
  REGION 1..328: note = TnsF-Tn7 System Protein
MNFWTEDREAICKLCYRKECNQAPCSRCGDVRMVSFRTKKGRAICKNCYRSKIHTRVCASCGGKKEVTFRSDDGRPFCGSCYRRDIQPKAPCSICGAIRPAKSRTNQGLPVCDTCHSSLKYVAPCTLCGRRRRIAARDDEGQPLCGTCYNHESRVRETCVICGAERTAKVRLADGSPVCASCYNRDLKKREPCSICGRVRTVDLRTDPGAPVCASCRMREFAPIGRCAVCRKEKRLREHRASGRKVCGACYSREVRPREPCAFCRREQVVVKRLEDGRAVCGACYGRELKRELCAECGEVKPIGRRLGDGGAVCAVCAQRARREARRA

SEQ ID NO: 3113 - protein, 329 aa, synthetic construct
  REGION 1..329: note = TnsF-Tn7 System Protein
MARSDLLISLIRSGSRGDRAVFQKTAEALIAEERAKRHDVLADQLAAQLRPNGHAEPTRHGFLESGSDLLLEAKPRRSLSDLLLSEHVRSACEELLEEHHRVDLLRSHNVEPRHRILLAGPPGNGKTSLAEALAGGLATPLLTVRYDTLVGSYLGETAQRLRRLFERARLDHCVLFFDEFETIGKERGDLHETGEIKRVVSSLLLQIDALPSHTVVVVASNHPELLDRAVWRRFQLRLELVPPNATAVREMLRRFEDRLGGRLGVKHDTIVQALAGASFAEVEDFCADIMRRYVLSLPDANLPLITRSRLAQLRSRFELSSTRKRTRRG

SEQ ID NO: 3114 - protein, 329 aa, synthetic construct; identical to SEQ ID NO: 3113
  REGION 1..329: note = TnsF-Tn7 System Protein

SEQ ID NO: 3115 - protein, 840 aa, synthetic construct
  REGION 1..840: note = TnsF-Tn7 System Protein
MDGIDRQSLLEAAIRQGEERLRILAAEQADVTAQLAKLRGEHAGMAPAHPAPPEPLSASADGPRTPADKVKLFRAFFRGREDLYPVRFVSKKTGKPGYAPVCSNKFVPGVCELPKVKCGDCTRQAFLPVDDEAVLGHLRGQHVMGVYAVLPDETCWFLAVDFDKSTWREDTRALVERARLHDLPLAIERSRSGQGSHVWFFFSAPVAAVTARKLGCHLITEAMATRHELSMDSYDRLFPSQDTLPRGGFGNLIALPLQHGPRKDGNSIFLDHDLAPIPDDQQWAHLASIQRIDPATVDRIVSAASRAGAIMGVTTGEGSDPYEAAPWSRPPASGVPLVRVDGPLPVAVAAVLAQRLYVEKAGLPSALLNLIKRTAAFQNPEFYKKQSMRLSTALTPRVISCAEDLPQHIALPRGCRSRVEDLLREHGVRLDVDDQRCLGAPLDLRFHGALTALQDQAARALQTHDGGVLVAPPGVGKTVLGTYLVAARGCSTLVLVHRQPLLEQWRAQLALFLGVDPKDVGQIGAGKQASNGRLDVAMIQSLVRRDSVADLVASYGQVIVDECHHLPAVSFERVLSEAKARYVVGLSATPQRRDGHHPITEMQIGPVRFSVDPKVSAARQPFEHRLFVRETSFRLAAPAEAPSIQAIYGAIAADQRRNEAILNDVIGALEAGRSPILLTERRDHLEYFERHLARAARHMVVLQGGMGVKAQRTARQKLAEIPDGEERLLLATGRYIGEGFDDARLDTLFLAMPISWKGTLVQYAGRLHRLHPKKREVQIYDYVDREVPVLLRMFEKRLRGYRSIGYARGEAPLGYAEPLEESVIEYDEGVVRTLDRRPVA

SEQ ID NO: 3116 - protein, 840 aa, synthetic construct; identical to SEQ ID NO: 3115
  REGION 1..840: note = TnsF-Tn7 System Protein

SEQ ID NO: 3117 - protein, 362 aa, synthetic construct
  REGION 1..362: note = TnsF-Tn7 System Protein
MSEARRGQVVLADIAKRYGDAVAVERISLRIEPGTLLSLVGPSGCGKTTTLRMIAGLEIPSGGIITIGGRDVTRLPPSARDVSMVFQSYALFPHLDVLANVSYGLESKGLPRAEAAQKAKDGLALVGLATLEARLPSELSGGQQQRVALARALVLEPQVLLFDEPLSNLDAKLRRKMRLEIRQIQQRVGITAVYVTHDRDEALAISDSILVMDQGRVVQSGTPREIYERPESQFVAEFMGEANVLDGALTRAEGAPKGRVQIGPFALDLEHRGLSAGPVKVVVRPEAVRLDRGGEGAPGEGALGQGARGEVVAAAYLGDRIEYEVKTAAGELFVVARDLASPFERGQSVRVVLEPWGAALLP

SEQ ID NO: 3118 - protein, 362 aa, synthetic construct; identical to SEQ ID NO: 3117
  REGION 1..362: note = TnsF-Tn7 System Protein

SEQ ID NO: 3119 - protein, 1093 aa, synthetic construct
  REGION 1..1093: note = TnsF-Tn7 System Protein
MALSNRERVQRALHVLRDGLSPFVKREVEARLGERGRPQAVEQEPNEEPAAHAGRLLGIMSDTWLDAFAATLGSVEHGFVIELRNVADGLARERPFSSDDADRALDTMKRLLDAVSAGTQAASILEMRLDLQRTVFAEQARNKTRYQLSLEGMPSPGLKPWREVVTPHPDVASGRYMQAEFAADLAQVHQKLGSDEYRDPAEFFRRTFITAGLEDLLVGALQRLTNAGGDPVVELQTNFGGGKTHSMLALYHLFGGTPSNELFGMERVLEKAGVARAPQANRAVLVGTHLSPGQIVPKSDGTMVRTLWGELAWQLGGSAGYKLVSDSDAQGVSPGSGVLAELFRRHAPALVLIDEWVAYARQLVGKRDLPAGDFEAQSSFAQALTEAAKAAPGTLVVASLPSSKIEIGGDNGEFALATLQDVFERVGKPWRPANADEGFEIVRRRLFEPPRDKTAFAHRDAVINAFSKMYREAGADFPAPCGEQSYRRDLEAAYPIHPDLFRRLYDDWSTLDRFQRTRGVLRLLAKVIHRLWESQDASLLIMPASIPIDDPAVKSELTRYLEDVWEPIMSQDVDGPTSLPLDIDRQNPNLGRYSASRRVARTMYIGTAPGARGKNPGIDDRAVRLGCAQPGETPAVFGDALRRLADRGRYIHQDGNRYWLSTNPNMNRLAEDRATALLREPEALHLEIVRRLRADKERGDFAAVHVCPETTGDIPDETAARVVVLGPVTTHRQGQSESPALVEAKRSLATRGTASRINQNTLVFLAPDAKALDDLLQATAQYLAWTSIAAEEEKLNLDAFQRNQAKTKKKDFDETVDLRITATWIHLLVPAQPDPQGPIQWDALKATGSGGLAKRVCARLKTEGQLLPAWSAVSLRHELDRRGLWADKPHLRFADLAEWYPRYVYLSRVANRDVLEAAVGGALRETSPDDAFAIANRFDDGKQRYSGLRLAGTGGDVTVENTTLIVKPEIARAQVERERGASITTTGSRGQAPAGEGRSTTGDLHPTGGVAPARVLPRRFHGSVEVDTGRLVRDAGRIADEVVARLLDVADAKVRVTVEIEAVSDEGVPDDVVRTVTENCTTLKFSSHGFERE

SEQ ID NO: 3120 - protein, 328 aa, synthetic construct; identical to SEQ ID NO: 3112
  REGION 1..328: note = TnsF-Tn7 System Protein

SEQ ID NO: 3121 - protein, 484 aa, synthetic construct
  REGION 1..484: note = TnsF-Tn7 System Protein
MVAKIRVRWPDGAICGRCFTDAVRTVGRCAQCGEERLVPGRDNLGRSLCRDCAGIDTNMTCDTCGAEAERYRGGSCVRCVIRVDLIAILKPNDPPDLRLRRLIDVLADSGRPESIHTWMRGGAAASLLAQLGERTLRLDHEAFDALPRSAAVEHLRDLLTHHHILPRLEDKYIATFERWLARRLHELEPYPQVRSSIEQFATWHHLRRLRSADADTATVTAALAARQEITEAGKFLIWLAEEHQTDPADINQAQIDQYLAEGTSTRKHIRNYLHWLNHQRPRSAHVTAPYRTAQTTPLVTQDQRIRMVRNCLTYDNVALSTRVAALIHLLWAQPLNKIARLHTDAIELRPAGMRLHLAAVSSDIPEPIARLFWTHLRAPSNQRAGNTGTHWLFPGFRAGQPVHPNTLSQRFLALGINTQRVRNTTLRTLTQQLDAHSLANLLGYDAGILAEHARRGGLVMHTYPSVLLERSRSQRTPPAAPIQG

SEQ ID NO: 3122 - protein, 793 aa, synthetic construct
  REGION 1..793: note = TnsF-Tn7 System Protein
MTTATSAATDAGGPERADSHDVIRVRGARENNLKDVSVELPKRRLTVFTGVSGSGKSSLVFGTIAAESQRLINETYSAFVQGFMPSLARPDVDVLEGLTTAILVDQERMGANARSTVGTVTDANAMLRILFSRLGQPHIGSPQAFSFNIPTVRGAGSIAIEGKGTVKRSFEQTGGMCPRCEGMGTASEIDLTQLYDESKSLSGGAITVPGYTADGWSVRMFSESGFFDAAKPIRDYSETELHDFLYKEPVKVKINGINLTYEGLVPRVQKSMLSKDVDAMQPHIRAFVERAVTFAPCPECGGTRLNEGARSSLIEGVSIADVCAMQLSDLAAWVRGLDEPSVAPLLANLQGTLDSFVDIGLGYLSLDRPSGTLSGGEAQRTKMIRHLGSSLTDITYVFDEPSVGLHPHDMRRMNELLVQLRDKGNTVLVVEHKPEMIVIADHVVDLGPRAGTAGGEIVYEGTIEGLRGSGTLTGRHLDDRAAVKDAVRTPSGVLEVRGATSHNLQDVDVDIPLGVLVVVTGVAGSGKSSLIHGSVSPRENVVSVDQGAIRGSRRSNPATYTGLLEPIRKAFAKANGVKPALFSANSEGACPNCNGAGVIYTDLGVMAGVSTVCEVCEGKRFDASVLEYRFGGLDISEVLALSVEDAETFFASGESRIPAAHAILQRLTDVGLGYLTIGQPLTTLSGGERQRLKLATHMAEKGGVYVLDEPTTGLHLADVEQLLGLLDRLVDSGKSVIVIEHHQAVMAHADWIVDLGPGAGHDGGRVVFEGTPADLVASRATLTGQHLAEYVGG

SEQ ID NO: 3123 - protein, 793 aa, synthetic construct; identical to SEQ ID NO: 3122
  REGION 1..793: note = TnsF-Tn7 System Protein

SEQ ID NO: 3124 - protein, 399 aa, synthetic construct
  REGION 1..399: note = TnsF-Tn7 System Protein
MRVEVLTGIFIAVYFILCNDHAKRATIGVGVNDEMGRVTVVTFGSQAPDPEVFLERLLESWVRAQTSSDRSKQTVRAKRARVLDLVEFSGHYPWEWSVADADDYFSHCRGVRNLAHNTVRNYQGAIRSFCEFACDPRYDWNTDCARLFGAVFSQIVTEWNRIPHSQPNASKPEKRVFTQWELQQLFDLADLEPERKLASGRKGALSAMRDAALFKTLYGWGLRIDEGRHLQRVDLSENAGAPQFGEYGVVRVRWGKSHRGSAKKTRSVLTVWEWTASALQNWVEFALPLYGKPLTDLFPTTGGRVVAESHALRRLRGYLDELGFAPGVDLHAFRRSYSAHLITGLGADVSFVQQQLGHAHASTTSIYTLASPDYQRESLKRLHEKTLAAAMTSRKGSTR

SEQ ID NO: 3125 - protein, 115 aa, synthetic construct
  REGION 1..115: note = TnsF-Tn7 System Protein
MKREIHYEWHTRELMARNHFRRGKDLIEPLRERGITLSPTQVWRLVDQTPERISLQVLVALADIFGVEVSEVITYTAADKSTQRRKTAQSGALPDIHGYRPVRARIVDEDDDDGA

SEQ ID NO: 3126 - protein, 631 aa, synthetic construct
  REGION 1..631: note = TnsF-Tn7 System Protein
MTRTPALIVCAGCGHQAAHHAKGRCARCYPSTRARMITCPDCGEARAHHRGGRCVRCYRHARTVLADCAVCGEHRATRAGTCQRCKQRRRAAAGTCTGCGRPVARLWSRRCARCAKTSWTVGSCADCLAWAASIAAGRCRACREFARRGATGRCRSCRRELAINRHGRCRLCVASRRAPRPGGEYDRDLEPGERAGIQLFLGDMHGQGRPSPSAGDQTGPSISGDDHGDRDDRDGQLELFAQPRVHHLDTLFADWVRSPTGAALQADLAGFAAARGWPSATTRAVGRGLARAALTEPAFDLADVALMTWLRRYRVPIGRLREFVAAHDLQPPPADPAGTTGRWAGPLGAGLPAAMATEVTAWLEVLTATSGRGRARARATIDHYTAAVAPALTEFAARYDSLLQVNEHDITAVLEPLRAAARSTTAVALRSLFATLKSRRLIFADPTRRVHPGRFPRRPVLGLDPSTRAGLLDQLTRPDHRLVVLLAGVHALPRADITGLRIDDVALPTGGGTATITVHGTRRGLDEPTGAALADWLRERRRRWPASANPHLLISTRSALGLGPVSTGYLRGVTAELPVTLHQLRADRLLTQARDTGGDPLSLHRLFGLSADTALRYCAELDPPKHATDSR

SEQ ID NO: 3127 - protein, 336 aa, synthetic construct
  REGION 1..336: note = TnsF-Tn7 System Protein
MDTPAAAADYQQDLLAEYVLARSAHGVTDATVRGDLAAVEEFLTWAGCWAWEVTSRHGDRFLAEAQRGKAVKTRQVKAARIAGFYRFLEIRYQGEIHALTRHVVASPIDAVNRPTNGGEFAVRLPPSVGELVGFFARWRDGLDEARKWRTAARNYAMARLIGEVGLRAAELCGLCLDDLHFDHGTLGKIHVRLGKGARGSGPRERLVPMLGDARPLLVWWVGEVRGGFGDDFDRPRAPLFPSERGGPADDDAFRQALAAAAAQHLRGSVRILSPHVLRHACASRLYGEGLGLAAVQQLLGHRWLTTTMRYVHVSAETLEAEYAAAAARAGARFTGR

SEQ ID NO: 3128 - protein, 106 aa, synthetic construct
  REGION 1..106: note = TnsF-Tn7 System Protein
MRWNLRMVAAQRGVWKASDLRRALAEAGLVVSAGKMSHLWSGRPISVRLDDLDVICAVLECTPAELLLPEPPARQAPAPDRQADAAAPATSIRPARTGHRRSTPPV

SEQ ID NO: 3129 - protein, 516 aa, synthetic construct
  REGION 1..516: note = TnsF-Tn7 System Protein
MTIEPQRRSTVRGRPKVTDGSMECARCHREMRRTAATWPDGRICNSCYYEATNLYGDCPSCGFHRLLPGRLDIGDQAVCRDCARIRQNFYCTSCNEERRPYRGNVCARCSLREDLELAFLHSDSPASFTQLIDALCAADRAESIITWKRSDKVQGLLRSLGDGTTPLTHDGLDQYEPAGRHVDHLRAILQHHDVITARDKYLAYFERWIEDKLRPVSDAEIAQPIRQFATWHHLKRINELALAGKPTRGPVHASKQDITEALKFLEWLRTEHGRTIADCTQQDVDLWVAGGPTTRHLIRTFIIWCKKMRVNRSITLGHRQAKTVRVLTQDQRLEWIRELLSGDSESLPYRVAGTLLLLYAQPLVKVASIPMSKVLVSPDGLSLELGVTPSPVPEPFAELLKSHVINRPNLRTAGADNPWLFPGYRPGEHLHPNTLMDRLRWLGMDLLGARNAALRELVTQVPPPFVSEMLGYSDQIVIRHASAVSAQWDRYASGRGNRRPIGAASRYPGRQQSDPE

SEQ ID NO: 3130 - protein, 516 aa, synthetic construct; identical to SEQ ID NO: 3129
  REGION 1..516: note = TnsF-Tn7 System Protein

SEQ ID NO: 3131 - protein, 505 aa, synthetic construct
  REGION 1..505: note = TnsF-Tn7 System Protein
MKSAKDRMDIISAYYELGSYRGAADKCGTTHKTVKKTVDRYEADQAGVAPAPRAERAHNYDTVAELVAERVEKSAGRISAKRLLPIAQAAGYEGSARNFRRLVAQAKALWRSENHRGRRPAVWSPGQYLVIDWAQAAPGLFLFCAVLAFSRWRFVRFATDQKASTTLALIAEALTAIGGVPARVLADRMACLKAGVVANVVIPTPDYVRLASHYGFVPDFCHANDPQSKGVVENLCGYAQRDLAVPLLTQAAVDGVTLDLREANAAARVWCAEVNAAPHSEIHAIPDERLIAEHQVLQPLPSLRLQIGAPSVLRKVDRLSCVRYGSARYSVPTRLIGATVAVVVDHGAVCLVEPATGMMVAEHELIAPGAASVLDEHYDGPRPAPSRGPRPKTTIEKQFCDLGADAQAFLVGAAAIGNTRLASELEILLALGAAHGTDALVAALHRAVAFRRFRAADVRSILAAGTGTPQPRPAGDALVLDLPVAPTRSLDAYKITAAVDGEVIS

SEQ ID NO: 3132 - protein, 260 aa, synthetic construct
  REGION 1..260: note = TnsF-Tn7 System Protein
MTTHRSKKPAALPVNDAPYTKILYVDPDTGRRVRSRIVAEVGQVRFEASAPIRVFPAYRGRRSHQGRYWFSRSSSHVHFESRFEMTALMVLDFQGEAIAVSSNPFWLLWPRGAKPVRHAPDFFVRRRDGSVLIVDVKPAERITDKDREQHDLTRQCCTEIGWEYEEFTSITTPVERNLRVLSGYHHPRFAPAESARTLIVSRVREAGDHGVRLAALIDAAGAATGLPDDQLLCAVYHMLWTAQLHIDLNHLLAWNAVVRS

SEQ ID NO: 3133 - protein, 369 aa, synthetic construct
  REGION 1..369: note = TnsF-Tn7 System Protein
MAVDDVGRAYLVDAVRPLHPEEQTVAEMLQGWRNQQLSRNLQFETIDARIKQVQRFIEHSNEFPWTWTVAMVDEFFGDLRSIHKLAQSSIRSYQVGLRQFCSYVSNPDYGWDRVCEALFGTHPSQVFFDWNTARHVQENEAQPEKRAFTKRELQDFFDHADEQVSAVVASGRKGWLPAYRDAVMFKIAYSYGLRFNELAHLQTVDFARNPHAKEFGKFGLVHVRYGKAKKGSPPKRRSVLTVFDWTPEVLVDWLENGQHHMDDGIDLFPSERGNLVSETTLIRRFRRYCDDLDLSPGLDLHSFRRSYATHLLEAGWDAMFVQHQMGHEHASTTAIYSCVSSDYRTRTLRNALDATIAAALQPKQNGGAG

SEQ ID NO: 3134 - protein, 688 aa, synthetic construct
  REGION 1..688: note = TnsF-Tn7 System Protein
MIEIKVGDLIEFRCQTWQIRDRDAVALQLKCLDDGSELTLPTAMVTSDDTFVGPDAGGPSVADQRLLDLASPQRRADAEFWYGHMFEVKYGISLQDRGILAPVEPTSTVAARLSDKRRQLRDLGITVSMATMWRKWSGFNRRGVVGCMDLRGTPGHVRLSGFDQRIEIVLDAVRTHFIDKSTPTKKQVIEIAKHRLTDDGIEMPKKTSMYKLLDRLDRGEHITGDATARRSHANSPDRAFSKIVALFPGEEVQVDSTPLDAMVLMADGHPGTVDLAAGIDVATGTVLCPILRVNACKTVDVMEVWANSAVPQQKVPGWKENMAIARSYLPDVMASEEDLDAALADKPLIDVRGLVVDRGKIFVSDTFLRAAEARGVNYRLAPPYTPTAKPHIERLLKTIADDFVRWIPGYKGRSVNHRGRHPEKDAVWPLPLLQALLDQWVIMVYQYRRHVGPQTAFAPRMQLSPNAIYRALSQSAPTPVRILTREEWICLHPCAFRRINRYGINFKNLTYNDDSPEFHRLRRRKSPNKKKNGQWEVRYDPNNLLQIWVHDESLDYDEDGHQTVKDNGWIECRWVLAKFVSVPFGVDILRAIKDDLGNNISDKQVLERAEHIHRQLLGGPPEPRRRPLTRTETVAARANLARQELRAGPPEPDPQLESDQAEAAAETITPPAASRVEPMRPMRLSEGW

SEQ ID NO: 3135 - protein, 111 aa, synthetic construct
  REGION 1..111: note = TnsF-Tn7 System Protein
MKRDVDYQWRLAELMAGNQMHNSTDLIPRLNERGITLSRPQVYRLVHQRPERVSLKLIAALCDIFDCGPDDLVTVTAADARKKAASAGRENVVELNKAIRPKRARILSDDD

SEQ ID NO: 3136 - protein, 257 aa, synthetic construct
  REGION 1..257: note = TnsF-Tn7 System Protein
MHIQNYYIFFQELDDVAKELNRFPSYTEIVQYLTVAKSRKYLLVTIFFQEIGKISIDKVVQEEYANLDMIDRLLQYFSNEDDRYSILYSYYSIFERKSKTSIRSVRLALTPAAKFLKYCEHFKNMEITNESLSGYLWVYRGQKSAIYGFITFLNKHYSFSLDSHRMLIPIKAPRYTKKQLKQKYIDLLKYPKSEKKYHQELLRITLGYLHNIDLPNNAFISPEDIKKEKDDAYYLRLVSKKFYLPVETAQILSYAEY

SEQ ID NO: 3137 - protein, 618 aa, synthetic construct
  REGION 1..618: note = TnsF-Tn7 System Protein
MEEFEKLPKVEGLPKDKKKRVVLASGAIFYNNLNSAIPLAEVLLAEVKLVNDKEELSDKVFIAEIGIPQLDSVRFGTVFIGERRTKQIWTAFNGYREHMSFSFDFREYAPSTIHYGAKKQDGKYYINPYKFSFSMIENTEVKSRFLNSKLTKLMTHNDVSVLIPALEVLTSLITPAEQSIRSKLIMLPMDDIAIKYLKKYEYDPTNEEYKIQYHEKSKKESNAAFLAYLSMNSIARGRISKIHDSVKLGKIYERKHPTILPYHPTTLNMTADGIWMDNKTFLCLRIRYMEPPRDYKITEIQEVEKKKPSDKVDLPEDEEGGKNQETKPYDIDDLAVTPGNNPSKRSPRTHISTEVTIGSIKDIMSKETIIIESEDEDTPRKKKINADNEDEESEEKESPKKLSSGDSEDTQDSKGTAKLEQKENLIENPKECIDESDVFSKVIKTLIVLKNNEKSTLENFFFIDNMGNKSSEISLCSFLYPETKYRKSKTKWAYKIHNKKEKIFIPRGALIIELVLEDGKKAYILEIEQKTKGEKFAGLLFNTTDGMLSKIEIKNLLIEIANLKGVIREKKDKSLQAVVLKNVNFSEPYTHYKDKDTGLYLGLFSKFISEKTYNVIFN

SEQ ID NO: 3138 - protein, 363 aa, synthetic construct
  REGION 1..363: note = TnsF-Tn7 System Protein
MYYMVTPLADELLSSWLIRSSILNGTDPIGFTESIWYNERVWTKDIDRYFSKDKIQFLQEHTSPSLTQIYYMTLEPIYTKLTNPQTINPKKQWQYIIPIGIRNRTKTNGLHFCPLCLKESIPYLKKQWRLSWNCICEKHQIMLELHCHECNRCFSPHLIDYTNIDFTKCQYCNASLTDIKYTHAKESVFDFQNFLNISLKQNIILGNKYPIIDNKVFELFATVRGFMLFFRNLAHSDVYSSFRDYLFEQMGYQYKPIEKDMSLRQSSIDALPVKQRYQLLDMVTCIFQFNLPEVILMLTKADVSKQLFTKSITLYSPTLIHISNSLKNRPKTIKKKVIKTVSAYQPKSKYEVEALMEEIRPYL

SEQ ID NO: 3139 - protein, 507 aa, synthetic construct
  REGION 1..507: note = TnsF-Tn7 System Protein
MTTDKPEGLSPRSTSRGRPRTTGTATCARCRRAAGRTRATWPEGRICGPCFTTATRTQGTCPECGQHRLLPGPPESSGGPRCAPCAGILHDFHCTRCNVEGEFYRRGICARCALREDLNELLSPGSSGPGPETTRKIVDVLCKADRPESIITWKRSLKVQALLGSLLRGETPLTHEGLDAAAESANREANHLRALFIHHGLLPYQDPYLARFETWVDDKLRDLPEEVAKPVAQFATWHHLRRIRSITTPEKSAQAPVHSAKQEITETIKFLDWLWATHQRTAANCTKQDIETWLATGPTTRKAIRTFIVFIKNTGTNHRVDMGHYTAKTRPAIPQDQRVAWLRELLTGTSESLPYRVAGILLLLFAQPLVRVAKLRTDAIETNETTGNMWITFSAHPVPIPKPFAELLREHLKSRPNLRTGSDTQSPWLFPGTRAGQPLHPNGIMDRLRRLGIDLRGARNSALDEHLLVSPPPLVADALGYSHQIAFLHADAAGDAWSRYVNLRAKP

SEQ ID NO: 3140 - protein, 507 aa, synthetic construct; identical to SEQ ID NO: 3139
  REGION 1..507: note = TnsF-Tn7 System Protein

SEQ ID NO: 3141 - protein, 368 aa, synthetic construct
  REGION 1..368: note = TnsF-Tn7 System Protein
MAVDASGRVLQLSAVQLLHPEEQTLEDMLTGWRNQQLSRNLQFDTIDKGIECVRRFVNHVNEFPWNWAPEHVEEYFGDLRSIHRLKHSTVRGYQSTLRRFTSYVSNPDYGWDRVCEQRFGTHPSQVFFDWNTASHTQEYEGRPSKRPFTKTELQMLFDHADDQVEVIAASGKKGWQAAYRDAVMLKVAYSYGLRFNELRHLQTIDFATNPQARRFGKAGVCKVRFGKSRKGSPHKPRSVLTVFDWTAGVIEDWLANGRGTLDTLDLFPSERGGLICESTLLRRLRRYLAELGLPMDGLDLHSLRRSYATHLLEDGWDPRFVQHQMGHEHASTTGIYQFVSDDFRNATLRAALDRTMDEVLGVQMRGQW

SEQ ID NO: 3142 - protein, 111 aa, synthetic construct
  REGION 1..111: note = TnsF-Tn7 System Protein
MRREVEYKWRLSELMAARGLHNTTDLIPLLAERGITLSRPQVYRLVNQKPERVALQVIAAICDIFSCGPEDLITVTAADARARKTGTSAPNVVDLNRTVRPRRARIIDDDH

SEQ ID NO: 3143 - protein, 495 aa, synthetic construct
  REGION 1..495: note = TnsF-Tn7 System Protein
MIEVTPRSTRRGRPRTTGDASCDRCGRQVGRIRARWPDGAICGTCFYAAMRTHGHCPICGLERLLPGRLDSHDGPICGPCAGITDDLACSRCGVEAEHYRRSICARCALRDDLTELLVVDSADPGAMTAFVDGLCRDERPESLITWMRPAQVREMLRKLAVGTISMSHEGIDELGHGHRASHLRGLLEHHGLLPERDAYLARFEHWLRVKLDAIGEAAVRQPVEQFATWHHLRRIRDISATGSSTRGPVHAAKQEIAETIKFLDWLLAAHGRVASTCNQRDVDEWLAVGPTTRHCIRTFFVWARRARVNTTILISPRRARSSPTITQDQRIAWLRELLTGNSESLPYRIAGTLLLLYAQPIARIASHRTSDVLLASDGPYLVLGTHPAPIPAPFAGMLTEHLAQRPNLHAVRDGDSEWLFPGRTPGRHLHPNTIMDRLRALGIDLLGARTTAIRTLVSEVPAPVVADMLGYSQQIAHRHAAEVAQPWAGYAADHR

SEQ ID NO: 3144 - protein, 495 aa, synthetic construct; identical to SEQ ID NO: 3143
  REGION 1..495: note = TnsF-Tn7 System Protein

SEQ ID NO: 3145 - protein, 336 aa, synthetic construct
  REGION 1..336: note = TnsF-Tn7 System Protein
MQIADLDHLKLSIRAIAREIDRAPSTVKRELDRHRDSQGRYLPHVADETARRNRSRPREHKLLANDVLRGVVQRKLDRFWSPEEISGWLKLKYPEDSSMWLCMETMYRALLVPGGKGLDKKYAAKLRSGRSVRKPRWLGSARSLGAVRNMTMIGDRPEEVDAKAEVGHGEGDLILGLRCRSAMMTLRERKTQYGIIVNLSVDHTAESVKNAVIKAFSGLPKRMRRTLTWDQGTEMCLHREISAALDLKIYFAERSSPWQRGANENFNGLARQYFPKGTDLSVHSHAHVRSVTRELNTRPRKNLEYATPATVFNAERRATAHRRRTALELAMSTAVT

SEQ ID NO: 3146 - protein, 367 aa, synthetic construct
  REGION 1..367: note = TnsF-Tn7 System Protein
MGVDDSGRVHLVDAVPMLHPEEQTVAEMLQGWRNQQLCRNLQHATIEQRERCVRRFLHSTNEYPWQWTPAMVDEFFADLRSIRHAKQSTVRNYQVALRLFCSYVADPTYGWDRVCEQRFGTHPSQVFFDWNTAQHVQDNESGPSKRAFTKPELQALFDRADDEVARIAASGRKGWLPAYRDATMFKLAYAFGLRFNEIRHLQTVDFARNPHAREFGRYGLVHIRYGKAKPGSAPKRRSVLTVFDWTSEVAADWLANGQRHLDDGIDVFPSERGTLVAENTVLRRFRRYCTELNLEPGLDLHSLRRSYATHLIEDGWDALFVQQQMGHDHAGSTAIYTCASSDFRIRTLRRALDASMDAALSDEGRFS

SEQ ID NO: 3147 - protein, 109 aa, synthetic construct
  REGION 1..109: note = TnsF-Tn7 System Protein
MKRTVDYTWRLAELMAARGLHNSTDLMPLLHERGIELSRPQVYRLVTQRPERVSLQMVAALCDIFGCGVDDLVTVTATDTRRKRAASTADVVEMNKAARPRRARVISDD

SEQ ID NO: 3148 - protein, 753 aa, synthetic construct
  REGION 1..753: note = TnsF-Tn7 System Protein
MPPRDLGEIRERLIDALQQVAGPRLTAEHAQELLEEACAWNQSGNARDLDRHLAEHSDAFTAPSPNCPLALERLLKLLTANGFGDSVVLLGCARCGRTDKLLKRRTPEGRCCERCLERVERRQCARCGKSARIVTRRSDGPICRRCYAHDPARQAKCTRCGEVRPLMARTEDGSPLCSKCTPRPEKPCVQCGRVARISANTPKGPVCKHCYRSPPRLCGICGQVRPIQRRGDGGDRPDVCYECARMGECAGCGRRRGGGRYRGGPFYCSTCWPKPQQPCAICGETKAISARWPLGSVCQRCYRSRLERPEPCADCHATRILVCVDEGGSFTCTRCGGVDLDFTCRSCGEEGPGFRDGKCNRCLVMTKIGRLLDIDDPASNSYLQPLFTALATVDPGSVHTWITNEASLALLASLAARGADIAHEKLDLLPQNARTHHIRESFVCAGILPRRNEALAQLQLWADRTISALPPQHQPLIRSYSEWHIIRRARCRAARGTFREAANRSNRQRIRCAIDFLRWLDSAGTPVGGLTQQHVDTYLDMSPANVQALFTFISWMGARGLIAGIDIVRPKDALPQEFQDEEDHAEQLRRCLTDSSLPLEIRIVGALIRLYALPVVSIVELTTDRFHREDSAAYLTVDENAVMVPPSLAVLIDELLRRSTDNVRRTNARHPAYLFPGRPSSRPRSTQVLWRQLKQHGLPTLAARNTAMIANVTHLDAVVVSDLFGVAPQTAHKWAQYASTSWATYLAAQGNPR

SEQ ID NO: 3149 - protein, 249 aa, synthetic construct
  REGION 1..249: note = TnsF-Tn7 System Protein
MNEPAPHSTVLHLQEVGRTYQSGKGTLTALDRITMGCRRGSWTAVMGPSGSGKSTLLNCAAGLDTPDSGQVLLGGRDIAGLSDDVLTRMRRTEIGFVFQQFNLVAALTAAQNVTLPLRLAGRKDADTIAAEALNSLGLGDHSHHKPRELSGGQQQRVAIARALAIRPSILFADEPTGALDSRSADTVLDLLRVLVDEQRQTILMVTHDPHAAARADHVVFLRDGRLVTTLDGATASQIASTLADLETLR

SEQ ID NO: 3150 - protein, 249 aa, synthetic construct; identical to SEQ ID NO: 3149
  REGION 1..249: note = TnsF-Tn7 System Protein

SEQ ID NO: 3151 - protein, 360 aa, synthetic construct
  REGION 1..360: note = TnsF-Tn7 System Protein
MLADNVIHLDPAPAVFAAMLEGWRRQQSARFLKEVTVVQRLRLMRRLAAFSGLYPWQWTPTEGEAFIDHLRGGNEPLALSTARSYEVAISMFMEFLLDSRYGWAQECQDRFGEAPQQIFHEGNSILHKDDYEGDPRRRPFTYDEIQALFEAAEARPAKIAERGVKGALGAARDAAILKTIYAYGLRRTEAAKLDLADLRRNPKMPQFGRFASVMVRFGKSSKGAAPKRRSVLLVPEMDWAVEVLEEWVTALRPRFSPGQHPALWVTERLGRISPRSINEAFVAIRRDAGLDENLDVHCLRHSAVTHWTEFGYPPRFVQEQVGHSHAATTAIYTGVSNEFRNKLLVASLKERLGSDWDVRV

SEQ ID NO: 3152 - protein, 753 aa, synthetic construct; identical to SEQ ID NO: 3148
  REGION 1..753: note = TnsF-Tn7 System Protein

SEQ ID NO: 3153 - protein, 108 aa, synthetic construct
  REGION 1..108: note = TnsF-Tn7 System Protein
MIKKMGYRWRLRDLMADQQMFQTSNLVPLLAERGILLSREQVYRLVTQPPQRLSIDVLVALCDILGCTPNDLIEPHVVNHQVSKNAGDLTEPTPIAPRRTVVRRPGQR

SEQ ID NO: 3154 - protein, 487 aa, synthetic construct
  REGION 1..487: note = TnsF-Tn7 System Protein
MSRSRVPASARFCTRCSRAVRSETNHWPEGYICQTCMTRALETYGTCVGCRVERLTPGLAPDGGKLCTDCAGGLGDFTCERCGQEARRYRRGICGRCVLTERLQEFLDDGTGSVRVELLPLFDALRQIKRPWGGLTWTGHPHVQRNLRALARSEVPLTHDGLSQLTPWRSVAYLRDLLMQTGILPPADRQLLLFQRWLAEKLTTIGDTDHRRLLELFAAWHVQRRLNTLADRGPLTSDQIRQARDEIRLATTFLAHLAQRGRTLADCTQADVDAWYAGGYTARRLTHAFLRWAMRSKHTPTLTVPHRSTSNPAPIAQHQRLALLRQAMNREDVPRRDRVAVILVLLYAQPLTRVVRLSTDDILQEDGEVLVRLGDPLSPVPEPFAGLMLTYLNERPNTMTATNPEARWLFPGRRAGQPMTSDTLELRLRRLGFPTQRGRTAAIRHLVLQAPAPVIARMLGYHDETTAQLAAEAGGTWRHYVPGDHTR

SEQ ID NO: 3155 - protein, 487 aa, synthetic construct; identical to SEQ ID NO: 3154
  REGION 1..487: note = TnsF-Tn7 System Protein

SEQ ID NO: 3156 - protein, 382 aa, synthetic construct
  REGION 1..382: note = TnsF-Tn7 System Protein
MRSTERDDLVEKNGTAPGAARLHLADGVPLLRPDEQVFEAMLDGWRNQQLARNLALSTINGRERKVRAFAAHADAFPWTWSSHLADEWFGDLRAVRGCVRSTLRGYQEAVRLFCDYATDPAYGWATECERRFGTHPVQVCHPWNTAVHMQECEAESPKRAFTRDELQAFFDHADDQVSRVRGRGRKGWLPAFRDAMLFKTSYAYGLRRNETRMLDTADFGRNPEGPEFGEYGVCYVRHGKAKKGSPPKRRSVLTVWEWSAEILDQWTSEVRPAMRHADGSALWPSERGRRVGLQRLDSRFATYRDDLGLDPVLDFHSLRRSYVTHLIEDGWDALFVQQQAGHDHASTTSIYTCVSSDFRTRTLRRALDATIEAALKPAKKGA

SEQ ID NO: 3157 - protein, 108 aa, synthetic construct
  REGION 1..108: note = TnsF-Tn7 System Protein
MKRQVSYQWRLRELMASAGMFTTSELAPPLAERGISLSLSQVHRLVTGTPERLSLPVLAALCDIFECTPADLIATKAENATIRKVATGDAVVDLSAVRPKRARIRPEG

SEQ ID NO: 3158 - protein, 660 aa, synthetic construct
  REGION 1..660: note = TnsF-Tn7 System Protein
MMKAHLRLLDDGAFTDRVIQLLAAAGVHAGTEVLESAIPRIVTPPSRAGTLRQLKSSTFAPSHLPPDTPILLQVLLANLQRNGATGIGLPACPQCHQHRVLRRRNSNGDRVCHRCAERRYYGECPICQRMKKLTATTGQGRVCERCSPNGINLVTCDRCGKDVAATVAMNGQRLCLNCYPRKLRTCAGCGQEKKIASRILGSPHCFTCHNRVLRNPKPCPQCRDNRILAFLNADSIAVCAGCAGQPARYACRRCGDEEHQYGRLCGRCTLDDRLHEVLTGSDGRITEPLRRLQVYLLQQPRPAQIVKWLHRGPHVGLLRAIALGNKPLEEGSFADPNGGKGLLYLRSLLADSGALPANDTELTRLRHWGEHEISPLPTSRRLILTQYFNWVLLPRAKRDQTTSDLLPSAANHVRVATRGIAGFLGWLDTEHNIDLCDLTQRQVDEYTSTRSTSRWLPRFLAWATHNNHSTNSVKAPNPVPSLPAVTLSEQQADAIVTHLITNTTITAGTRFALLLIAIYGIPATRVVGLERTQVVITGSQVALIMGDHRLSLPGPVANLAMSHRAEIDRSPGRWLFPGRQPGKHVNVQILRRRLDAYNVTLAELQTAARYRLAAAVPAKILADTLDFNISTVQKYAHLSNGTWSDYPGLRATPQSAPEPD

SEQ ID NO: 3159 - protein, 660 aa, synthetic construct; identical to SEQ ID NO: 3158
  REGION 1..660: note = TnsF-Tn7 System Protein

SEQ ID NO: 3160 - protein, 295 aa, synthetic construct
  REGION 1..295: note = TnsF-Tn7 System Protein
  VARIANT 246: note = X can be any naturally occurring amino acid
MDDGLRVSGSSDPDGLRARGSSAVEFVLVAHGTRSAAGVENIAALAEAVSLRVGAVRTAFVDVLGPTPSEVLSTIEGPAVLLPAFLASGYHVHHDIPQHVELSGHPDVAVTAALGPDPVLARVMTERLREAGWRRGDAVVLAAAGSSDPRARHEVHTAASMLERHTGPVSVGYVATGEPRVPDMVAAARASGKRVFIASYLLAQGLFQERLAECGADGVAQPLGVHPEIVNLLVRRFASATVDSGXLFQERLAECGADGVAQPLGVHPEIVNLLVRRFASATVDSGALEAVADVA

SEQ ID NO: 3161 - protein, 369 aa, synthetic construct
  REGION 1..369: note = TnsF-Tn7 System Protein
MNVDTLRLAELRRAGVAILDEPALVFQEMQDGFARQQASRGLAKSTIDVRRSQLLRFYRFTQIYPWQWKAGDLEEFTSQLLSGESCRSHSTVRGYHVTIRLFCGYLTDQRYGWVADCRSRFGDVPTQICFEWNTIAHLAAFEGRPERRPFDYDELERFFDLADDRVDLRARGRKGALAALRDAQLFKTLYAYGLRRREALGLDVGDLRTNAKVPRWGRFGLIHVRYGKASRGTPPKRRSVLTLPEFDWVTEGLDQYLTQIRDKFHPGDSAALWPTERGTRVGEKYLNRRFAELRDEAGLSKDLTPHSLRHSYVTHLVEFGYSEQFIQMQVGHAYASTTAIYTSVSDNYRNSVVTAAVNRFYFLDKDVNL

SEQ ID NO: 3162 - protein, 109 aa, synthetic construct
  REGION 1..109: note = TnsF-Tn7 System Protein
MTASIEWRLRSLMAERGMFKTTDLIGPLHDAGVALSREQIFRLVTQTPQRLNMEVLAALCAILDCGPNDLIRVMTVAEQSPKRTGTSGPINDIGQTRPVRARINRPRHE

SEQ ID NO: 3163 - protein, 387 aa, synthetic construct
  REGION 1..387: note = TnsF-Tn7 System Protein
MLDDGTGTINPSLSPLYTALTSQKHARSARVWLIVSPDVTDLLRGIARGEHPIRHTTFTQHPRPKKVAHLRELFIELGLLDPVPLDIERFQTWLEKKLETEPPPLARLIKQYARWVHLNRMHHLAETSTLRRGTLLSARQSTTAALEFLRYLDEHGHTANQCTQSDIDNWLSTGPTTRSLARGFVRWGITQGHIPPVDFPYRTAKTEPIISQEERRRLLLRTLDADAPATNADRAAAILLLLYGQPLTRIVSMELTQITVTETVIIRITDDDLTIPPPFDAVLRRHLNTLPNQNTSAHREQQRLFPGVSPGQHLHQTTIMNRLRDSGMNLRGTRNASLRSLALEVPAPIIADSLGYSYQVTDKHRRNAGATFTDYVSRHALSNKKPS

SEQ ID NO: 3164 - protein, 387 aa, synthetic construct; identical to SEQ ID NO: 3163
  REGION 1..387: note = TnsF-Tn7 System Protein

SEQ ID NO: 3165 - protein, 394 aa, synthetic construct
  REGION 1..394: note = TnsF-Tn7 System Protein
MDYQLNPFKPGAGRIPPELAGRADLVAEYRRLLYQARETGEGDRPWILTGLRGVGKTVLLNQFGKEAADLKLMFIKVEASGDTPLAQSLTKELHLALRRVMSASDKARRTWHAAARAFRSFQLRVDPTGSYAFGVTIEPSLGVADSGDLAVDLRELLEQIGLAAREVNTVLLLAVDELQEASANDLASLNRALHKLGQEISPVPVVFVGAGLPSLPAVLADATSYAERLYDYRRIGLLDVAATTDALAVPVQSGGAEWSEDALGEAVDATGGYPYFIQAYGSYIWAARATNLITLDDVEIGVEAARAEIDRGLYQSRWERSSPTQQAFMAAMALDAGDPSAMSDLVVRLGKRSTTDISVNRRDLIRSGLIFTPQRGVVAFTVPGMDDFISRQEL

SEQ ID NO: 3166 - protein, 394 aa, synthetic construct; identical to SEQ ID NO: 3165
  REGION 1..394: note = TnsF-Tn7 System Protein

SEQ ID NO: 3167 - protein, 374 aa, synthetic construct
  REGION 1..374: note = TnsF-Tn7 System Protein
MRTISDSTAGAVPTHLRARVAVLNVEESMWVGMLDGWAAQQLSRNLSASTVEKRRSVAIRFRYFAECYPWSWSAKIVDEFFLELRALKGASHSTVLGYQNALRLFLEYLTDPAYGWAEQCWERFGDHPAQVFHEWNTARHSQDAMASPGKRPYTRDEIQDLFDCADDRVLRIRRAGAKGWIPAFRIATIMKAAYAWGLRRNEVRQLDLVDLASNPKARQFGDVGIIYVRFGKAMKGAPPKRRTVLTLPEFDWIVECMREWKEEVRPLLAPPGSTSLWPSERSGMLAADSVSRAFNEVKREAGLDDDLDFHSLRRSYVTHLVEDGYDAFFIQQQVGHEHASTTSIYTGLSPDYRARVVDDAIARMAAQLATKENK

SEQ ID NO: 3168 - protein, 298 aa, synthetic construct
  REGION 1..298: note = TnsF-Tn7 System Protein
MPERTWRRWQAKARTSRPPKGPWPRPARAGARELVVKHAAAHPAWGHRKVWAMTRHDGHRVSQATVLRLLRDEGLILPADYQRERRKLAERRKAAFAQEPTGPNQVWQLDFSDYETTTGGVWRIAGCRDYWSKYEYDCHVSPTSNQHDQVAAIELALTEAEQLLGHPLIDDAVADPETGEIRPVLTIVTDNGGPFRSFRFEAFITAHPELRHVRTRVRTPGQNGSRERGFGSMKYEWLFREEIEHSLSLIEQIKAYRQDYNHVRPHDAIAWNRPAEVHAGLADPTIPNFEKEETLPTT

SEQ ID NO: 3169 - protein, 108 aa, synthetic construct
  REGION 1..108: note = TnsF-Tn7 System Protein
MQRRIQHTWRLRELMAARGMNTISDLIPHLSDRGIHLSDSQIYRLVGVTPERMNLGLLGAILDTLDCTFEELCPITVQAIPDRATGTTDTTMTKDAFRPARARVRRPE

SEQ ID NO: 3170 - protein, 459 aa, synthetic construct
  REGION 1..459: note = TnsF-Tn7 System Protein
MCSTCNAAREPCKHCGKTKKVITRTADGPLCSTCYRKDPASFRTCSRCGRFERPYRRGVCIACVASAQLRALFTRDDGTVPDRTEPIIAALATSDPASLLYWINKAESAQILQELVADDQPITHKALDKHRANRTIPILRAALVAADILPNRDEHLAALEHWLSATVKEIADPVHRRLIHSWATWTHLRRLRQQSTRQPLAYNQIGTVRYEILLVKRFLEHLATLDLTLRTCRQDDVDDFIARGSRRRADIRRFMKWAAKNGEAPTFDIAYPANKRSRESLEDDHRWGLVNRLLHQEDLDPGDRLAGLLVLLYGQRATRITTLTITDLSFDDDKTTVALGNRPLELPEPIDDIAKQLVEHRRHHILLSRPADTPWLFPGAMPGTHLSDTHLSRRLRKLGIQLRRGRNAALIDLAAELPSTVLANLLGIHAYTATVWADVGAKSKAAYAAERMSQAKKPT

SEQ ID NO: 3171 - protein, 459 aa, synthetic construct; identical to SEQ ID NO: 3170
  REGION 1..459: note = TnsF-Tn7 System Protein

SEQ ID NO: 3172 - protein, 340 aa, synthetic construct
  REGION 1..340: note = TnsF-Tn7 System Protein
MLSGWAKQQRGGRGLETKTIADRRRVVERLIEFTNEYPWRWTAAHVDEWMTSLVSEERKAKSTVRNMQSGLRLFCEYIISPHYAWPSECEERFGTHPVQVCHEWNTVAHVTDYEGDPARRPMTRDEIQRLFDYADDRVERAVRSRRKGALTAYRDATIFKVLYGWGLRCHEATGLDLADLHRNPEAVELGRCGALHVRWGKASRGSPPKRRTVLTVMPWAAEALEDYVANIRPRFGLEEHPAIWVTERGGRVQRREIEHRFATYRDELKMSEALTPHCLRHSYVTHQIEDGADPKFVQDQAGHRFASTTAIYTNVSGDFMNKMMRKVLDKAFERDQERKK

SEQ ID NO: 3173 - protein, 111 aa, synthetic construct
  REGION 1..111: note = TnsF-Tn7 System Protein
MTAKLDYRWHLREVMATRGMFSTTDLRPLLIERGIDLSSSQVYRLVVERPERLSLKVLMALVDILGCHMDDLIEPVAAAGSRSRRTATASGARVDDAGVGSFRPKKARITP

SEQ ID NO: 3174 - protein, 477 aa, synthetic construct
  REGION 1..477: note = TnsF-Tn7 System Protein
MTSASSPTCARCGRNLRGKAAHRFPEGHVCTTCHTWALETYGVCSGCGVDRMIPGIAPGGGRLCTSCAGMAGRSFFCLRCGAEGRRHRQGVCARCVLTDQLNDILDDGTGRVRAELLPLFEALRNMGRPRSGLTWVGYDHVQKMLRSLAYGEVELSHDGLNQLTPWRSVNYLRDLLMANGILPAADRHLLSFQRWLDQHLTAIEVPEHRQVLQRFATWHLLRKLRTAADRHPLGESRDRQARRVMTKSQEFCAWLTDRGVDLPDCGQHDLDAWHAEQFIARRAAQMFLRWAMTTGHMPPLAIVNRQTGNPSPISQHRRLALLRRLLDDEQHDLLDRVAAILVLLYAQPATRISRLTVDDLVHTGGELHLALGDPPSPVPEPFAGLLDRYLQSRPNTMTATNPDARWLFPGRRAGQPLTPDTIQLRLRRIGVTARDSRTSTIRQLVLQAGNPLVSWRVPLSGPSLLPGLGHVALIVNR

SEQ ID NO: 3175 - protein, 477 aa, synthetic construct; identical to SEQ ID NO: 3174
  REGION 1..477: note = TnsF-Tn7 System Protein

SEQ ID NO: 3176 - protein, 297 aa, synthetic construct
  REGION 1..297: note = TnsF-Tn7 System Protein
MMIAAFISSQRTDHHVPHALACRALGVSESWFYKWRDRPLTPRQARRVELDAAITKAFTDSQRTYGSPRVTLDLWDAGWKVSVNTVAGRMAALGLAGRVKKKRRNLTKPGKKSAARDHVRRQFHAPAPNVLWCGDLTEIVTEEGKMYLATVIDLFSRRLLGYAMSPHHDAEVAVASLQMAATTRGGDVEGVIFHSDRGSEYTAEAFEKACGKLGVTQSMARVGSALDNAAAEAFNSTVKVEYIHRQYFRTRTEARLKISTWIVDFYNHRRRHSACDGMSPVNYERYMAEARQQARAA

SEQ ID NO: 3177 - protein, 372 aa, synthetic construct
  REGION 1..372: note = TnsF-Tn7 System Protein
MVGEGLAAGAAGLHLVGGVALLRPDEQVFTAMLDGWRNQQLARNLAFGTIEGRENAVRAFTQHADAFPWAWTPLLVDEWLGDLRAVRNLKRSTLRNYSEAVRSFCSYVTDVAYGWPIECEERFGSHPVQVVHEWNAAVHVAEAESDAGKRAFTREELQALFDHADAQVERIQAAGRKGWLPAFRDATMFKTAYAFGLRRNETRMLEVADFGRNPQGPEFGEYGVLYVRHGKAMRGSPPKRRSVLTVWPWSTEILDQWITDARPLLAASGSGALWPSERGPRIGFTQMNTRLASYRDAIGLDPTLDFHSFRRSYVTHLIEDGWDPRFVQEQVGHEHASTTAIYTCVSSDFRTRTLRRALDQTLEAAMRPARRA

SEQ ID NO: 3178 - protein, 110 aa, synthetic construct
  REGION 1..110: note = TnsF-Tn7 System Protein
MKRQVSYQWRLREIMATHGMFTATDLVPHLADRGVTLSAVQVWRLVTQTPERLSLPVLAALCDIFGCGPAELIATRAANAAPKIAATGGANVVDLAATLRPKRARIRPEG

SEQ ID NO: 3179 - protein, 332 aa, synthetic construct
  REGION 1..332: note = TnsF-Tn7 System Protein
MIRSLRKKTDALAGILQNADARRLLGKYVDWIVERQSVSKALRPLPKVAEMLGRVERLAQNDGAMTSEIIGKSLTTEEIRRAGLFGMFLAERGFITGSVQDRVAASDARRIDTALSEIRGRPWEKAIRQYADELSGPVKKLSLRSRRVYLRAAVELMTFAHVEGMSELTDRHIKHFLRSKPGHRASLFPWLSFVRERSGHELCIPKKAVRKEPTVKAVANGVGHLVSAIKAAPTKEARRALVAKLLSILYGVPLEHVLSLERKNMEELNGKVRLRFDDDWVTVDAPIDDLLSEAVSYSANNMGSARLFPGRMMNDGLSVGAVQHYLQKLSNA

SEQ ID NO: 3180 - protein, 230 aa, synthetic construct
  REGION 1..230: note = TnsF-Tn7 System Protein
MDFTVLDATDRKGVRNVISNRRVITGFVSIAGVGLVPYEGALERDFLELRDFDRSLSYVGAQPLRLIFKGDKRRRYTPDFLCQFNPVGNRPAFSPALYEIKLRAELREKWAELRPGFQRASLLCRQRGWRFRIATERIIRIPRLRQIKFLRGFLDRPDHDCIGQILYRVMNDLKVSTPAELLAASFASKDRRLEAVGILWKLVADGRIKIDLSRPLNMETPIWSMWHERR

SEQ ID NO: 3181 - protein, 367 aa, synthetic construct
  REGION 1..367: note = TnsF-Tn7 System Protein
MTASVAHVPRIQHDEALSSVLLRLARNHSASGHELCTLLWPSFQFWTRDTDRTASDALLDDISQVTGIDRVVLRQATLSELVKATGFREWISGCQRGILPVGVYHRVRHRFGQQYCPACLAEMPAYLRKLWRFEFMVACQAHGILLRDSCPACDAPFIPHRNHALTRAQCHLCAASLTIGECAKPTASAAMLQKAVLDALADANNHAATATDDGANERVGWHFLGDIGNAAYLDGVHRLCRLAARASDALPCQSGRSRTVWTLLRVTERAMVMAKVGRWLSNWPKEWVSWAGVSDLTQHYLEKEYGPWPGWVKPAIAQLPYSHGPVNVRRPRQKRCLSRLRKEHKSLAVYRQARAALLLTKAGLQSA

SEQ ID NO: 3182 - protein, 667 aa, synthetic construct
  REGION 1..667: note = TnsF-Tn7 System Protein
MSVARSLLTPGGYLELAQGAFVSFRGKACKIRRVMSLDSVVIQYVDGGETDRVHPIELRPVEEAVVESAMQPTPVDEGDAEVSPDAKSDKRDINDISDAEWEEAKALYEVIKPLLENPKRTRADVVAVATARGVQASTVYRWMGDYGSTGHVSGLIKGKRGRKKGTRLLTPEQEAIIDEALEEFLDPQAITPATLIEDLNGRFDDAGIVRPHPNTIRNRVVDIPLKRKMSARGNKELAKQRFDPTPGKFPDGTFPLECIQIDHVRLDMKVVDAETRQPIEKRPWLTLAIDSYSRMIVGYFLSLMSPSAFGAGVALYMGMMPKRDLLTTLDLPGRWPVFGKFRKVFADNAKEFKGTVLQRACEEHQIDLQLRPVKTPRYGAYIEAMVGNVNKQLHKKRGTTHRSPDVSPDYDSSEKSAFTLAALECDIVDWIVNSYQVDRHSAFNTTPLHKWEQGLLGDSRMPGVGLPPIPMNPEKLRLDFLPFERRAVHPYGVELGSLMFYHEVLNRWIGAADPGIPKEKRKFIFHYDPRTIRKIWFWDPEVKQHYEIPLKDTTWPDISWSEFDEYRKAMIKQGHQHVDEAAIKGYVQRSKIREQHEVEQTQAFRKGKTKPANRSAQGKPANTAPGSNHYAATPATTIQTPVNDVGYNNQHDDLFSTPAQPFADIEI

SEQ ID NO: 3183 - protein, 292 aa, synthetic construct
  REGION 1..292: note = TnsF-Tn7 System Protein
MSFDHLLGVAKDAVLWTPEDRIDFINEDRWIGYSAAATILTEFDDLVEHPRNLRMPCRYVVGDPDNGKTMLLHQCIKRHPFREKEGDESHVAVLVFETPPVPDEGRLYSQILKALRVAHREDAPPEKLLAKVIERFSELGIRLLMADEFHNMLNGSASHQRQFLASLKSLINTLRVSFVAAGTEDITRALATDSQFITRFEKLALPTWGINKETRSLLSSIEKTLPLAEPSGLADDRDLALGIILGGKGKIGGIVKVAKKAAIAAIRGGKEKIAKDIVDKVVAELREREFAA

SEQ ID NO: 3184 - protein, 292 aa, synthetic construct; identical to SEQ ID NO: 3183
  REGION 1..292: note = TnsF-Tn7 System Protein

SEQ ID NO: 3185 - protein, 807 aa, synthetic construct
  REGION 1..807: note = TnsF-Tn7 System Protein
MTAEPHALLPDPDDIVVSVMAGIEPDLAEEVVRQALTEAAVSRAKRRRLACALTDDQDLLTSGRPDGPRVVGEFARALLAHGSRRAVLPKCADCSSTGKLTSLRADGKRICQPCDHKARAASLSCVECSRPARVYRRTRIGEAICRDCWRLPDGDPIALISAAVTTIAPDAAPATVRQAVESVAPVGNVYLMFRLLWEIEDTRGLLTGEGAKASARAARLITALTDAGVSVTAPACHGCSEVRPLTHVLDDLRCCMTCYRKAHSATCGRCGRDLPVATRRTDGTPLCSSCLRHEADQMITCVLCDRVRPVGRRTTDGPLCGACYQPTLLTCSFCGKGPRRCYRAATGMPRCDTCSRTRRTCVGCGKNKYALARTEKGHLCGDCWRKDPASYNSCRLCGTVEYLHSYGRCHSCVRDQHVRDALSRDGAIPSDLQPVHDILVADGAKAGLKRLTRPSFQTILAALVDGTCPLTHEGLDGLLPNKSVAFFRAALVASDVLPSRDEQFAALEQWITSATKAVTDDSERKLVRRFATWHHLRRLRREAERHPLSPPQAATARAGIRAAIALLAWLREQGTELARCTQTHLDAWIDNGNTTRYNARGFIEWCRKNRHIGRGLAIPAFEKLSHVRPTDEEERWAITRRLMHDEDIAIEDRFAGLLVLLYAQHITAVSQLPITAVISEGLQTSLLLGTTPLLLPDPLDRLARKLLARRRGHTTIGTSSDSPWLFPGAFAGQPLSSYHLGTRLKRLGIYSRPGRTSALMGLSTQLPATVLTELLGISPDTATAWTQSGGNWARYAAELHDRPHPSA

SEQ ID NO: 3186 - protein, 807 aa, synthetic construct; identical to SEQ ID NO: 3185
  REGION 1..807: note = TnsF-Tn7 System Protein

SEQ ID NO: 3187 - protein, 375 aa, synthetic construct; identical to SEQ ID NO: 2202
  REGION 1..375: note = TnsF-Tn7 System Protein

SEQ ID NO: 3188 - protein, 110 aa, synthetic construct
  REGION 1..110: note = TnsF-Tn7 System Protein
MTAKLDYTWRLREIMAEQGMFTTAALQPLLAERGVKLSTSQVYRLVTEKPERLSLKVLMALIDIFGCPMDDLIKPIAAAKATRAKRTADGAEAGIGTLRPPRARITGPEK

SEQ ID NO: 3189 - protein, 389 aa, synthetic construct
  REGION 1..389: note = TnsF-Tn7 System Protein
MRTTPGSRPVPTRTDHAALQRLRTAILAAEPDSTRTWLTRPRAGQLLAALHNGSVECTHAALDALPPGRDLQHLRALLVASGALPTDSHRLVDRLGAELLTLLRQLPDGDRRTVQAWLRWRVLAQLRRSADAGRDLTTAIYNARATLTQVVAFVTALHQAGRQLGTCRQADIDGWFAAPPTTRAHIHSFLTWTHRRGHLPKALLLPASRRSAPAMPADSEQRWAVARRLVHDDTLDVADRVAGALVVLYAQPITRIVLLTTEHVQATSGQVTVALGPDRLALPEPFATLITTLPRHRRVGTASHLPNHWLFPGARAGQHAAPGPVAKRLRRIGVTGRGMRHAALMQLAAEIPPALLAGILGIHPTTAVKWTRLAAGDWTHYAAIRTSPK

SEQ ID NO: 3190 - protein, 389 aa, synthetic construct; identical to SEQ ID NO: 3189
  REGION 1..389: note = TnsF-Tn7 System Protein

SEQ ID NO: 3191 - protein, 99 aa, synthetic construct
  REGION 1..99: note = TnsF-Tn7 System Protein
MATRGMFSTTDLAPLLAERGVVLSAAQVYRLVAQTPERLSLRTLVALCDILDCTPADLIEPTVQAAPLRATGTTGGGGGEVPEAVRERRPRRAEVRRAP

SEQ ID NO: 3192 - protein, 380 aa, synthetic construct
  REGION 1..380: note = TnsF-Tn7 System Protein
MLTHPDTGSMSAQLAQVAAALKSMRRANSGLTWLNQPHVTAFLSELALAPTISHESLDQLPASRTRGYVRGLLVEHGALPRRDELAARYRDWATQALTRVVGDHHRDVIERYVRWHHQRRMNSMDRVTQGTFLRAKQSVTVAIELLNWLDARGIAIEHLEQAHLDTWQAEGPTTREIASRFLRWAINTRLVAPTLAMTPHRRGTSPKLSAAEQDGALQRVIAPDGLDPRERAAAVLVLVFGQQIEHVVRLTWNDVTVTPELVSVRLGGVDIALPPPLDQPWRHLAVEPGHDLTAAHPHSNWVFRGCSPGQHIRAASLRARLRDLFSTRAARLGTLHELTKLTPVAIIAEALGYHPATIERHAIGSATTYARYVAARANTS

SEQ ID NO: 3193 - protein, 380 aa, synthetic construct; identical to SEQ ID NO: 3192
  REGION 1..380: note = TnsF-Tn7 System Protein

SEQ ID NO: 3194 - protein, 233 aa, synthetic construct
  REGION 1..233: note = TnsF-Tn7 System Protein
MSALLEVRGVESGYGRSRVVQGVDLDVPAGEVLAVLGRNGAGKTTLINTLMGMVRLRAGSVTFDGADISGQAPNRIARAGIGFVPQGRRVFAPLSVEENLRIAVRSSGPWTLQRIYELMPNLARRKNNGGHQLSGGEQQMLAIGRALLGNPRLLLLDEPSDGLAPAVIRTIGDLLSELTSSGMSAVLVEQDLRLAFSVAGQVAVMAKGTIVHRASTRDFRHDKDTARRLLGVG

SEQ ID NO: 3195 - protein, 233 aa, synthetic construct; identical to SEQ ID NO: 3194
  REGION 1..233: note = TnsF-Tn7 System Protein

SEQ ID NO: 3196 - protein, 272 aa, synthetic construct
  REGION 1..272: note = TnsF-Tn7 System Protein
MTGTPATSTTWAALRGSPVALSLRRVGCRYGKIDAVRDVSFDVAVGSRHAVIGPNGAGKSTLFGLIAGTIPLTGGSVWLGDRDVSTRPVHDRAVLGITQTFQTSSLFLDLSVLDNVVLAGQRRAGISFRMIRRTRERLVVETARGHLARVGLARREDDLVADLSHGERRQLEVAVSLATAPRVLLLDEPTAGMSPVETAGLVELVRSLPRSLTIVIVEHDLDVVFSLADRVSVMVTGRLLADGTPEEVRTSAEVQHAYLGAADDTDLFLETE

SEQ ID NO: 3197 - protein, 272 aa, synthetic construct; identical to SEQ ID NO: 3196
  REGION 1..272: note = TnsF-Tn7 System Protein

SEQ ID NO: 3198 - protein, 384 aa, synthetic construct
  REGION 1..384: note = TnsF-Tn7 System Protein
MFAKNGELSGAAGRIVEALLQCDAMPVLRWVRRMRSNSELPAQLAELGDTLSHHDLDDLPASKSVEWLRNILVNAEVLPPRDPYLHRTEQYIAARLATISNRDDRAAVRAFTEWNHLRKLRARADQGPLKRNHGLAAQAMTAAITDFVSELNAHGLALASCQQAFVDDWLVRNPTRRQIHQFLAWAVHRGYAHDVAAPVPQTRRTRHTLPGDDERWRLIQYLIEHPDLETRDRVAGLLVLLYSQPAARLVTLKVADVTITDDAVQLTLGAVPLTVPSPVDRLLADLVQQRRGYAAVTVGTNPWLFPGGRSGGHLSANQVGLRLKRIGISPRIARNTALIDLAGELPAVVLAKLLGFSIKRAVTWSEEAGNTRPRYAAEVARRNS

SEQ ID NO: 3199 - protein, 384 aa, synthetic construct; identical to SEQ ID NO: 3198
  REGION 1..384: note = TnsF-Tn7 System Protein

SEQ ID NO: 3200 - protein, 356 aa, synthetic construct
  REGION 1..356: note = TnsF-Tn7 System Protein
MAPGVRHLHPEDDMVRAMLSGWAKQQLGGRLCAENTVKVRASCVGEFIEFSGAYPWEWTARMMDEWSAHLVGSLSRAKSTIRQKQGAVRLFCSFITSPYYDWPTQCELWFGDHPTQICHEWNTSAHLVDYEGDPGRRPFTRKELQDFLDCADAQVEKARRSRRKGTLAAYRDTTMFKVMYGWGLRINELCRLDLADMYRNPHAPELGPCGFLHVRYGKASRGSPPKRRTVPTLMPWAAEALLDYVNNIRPLYEPGQKQALWLTERRSQVKVRTLTGTFDDIRDEVGLDRKLTPHCFRHSFISHMTEDGVDPRFLQEISGHRFASTTGIYTHVTGEFMNKMLTDALGRVSSFGEGHQ

SEQ ID NO: 3201 - protein, 114 aa, synthetic construct
  REGION 1..114: note = TnsF-Tn7 System Protein
MTADYHWHLRRLMAERGLFNTTALRPLLAERGVQLSASQVYRLVTEKPERLSLPTLVALVDILGCAMDELIEIVPATAASAKKAAGAAERSKPVRTRELGGHRPVRAKIVDADS

SEQ ID NO: 3202 - protein, 277 aa, synthetic construct
  REGION 1..277: note = TnsF-Tn7 System Protein
MIKPFAEWQIIRDARRRAARGPYTAGAAHADRLDIKAAIAFMTWLDEHGRTLHSATQHDLDLYLTTHPAKHRTLGAFLRWAVARRLTAGLVPPKKPWARPSRFLTEQEQLDQLRRCLNDTSLPLEARIIGAFVRLYAQQVSRIVEFTTDRYTRQHDRAYFTFAHNPVLLPPTLATMVEQQIAEPRLNDILAPASDRKFLFPGRPPSRPRSAASVLSLMRANGLPILSARNTAMIEAVGDLPPVVVSDLFGVAATTAHRWGQLAGESWAGYLAARQAE

SEQ ID NO: 3203 - protein, 239 aa, synthetic construct
  REGION 1..239: note = TnsF-Tn7 System Protein
MESASPSYRGHRYPVEVISHCVWLYHRFPLSFPEVEELLLQRGVIVSYETVRRWCAKFSQAYANGLRRRRPRPGDEWHLDEVFIKINGERKYLCRAVDQDGNVLDILVQNRRDKAAARRFFRRLMKKTGTVPRVVVTDKLRSYGAAHREVMPSVEHRSHKGLNNRAENSHQPTRQRERAMKGFRSIGGAQRFLSAFSGISPHFRPQRHLMTAPDHRAEMTIRFAIWNQITGAAGRPTTV

SEQ ID NO: 3204 - protein, 200 aa, synthetic construct
  REGION 1..200: note = TnsF-Tn7 System Protein
MGTSTTQECRRQTTQAGAFLVWLAARDVALSACTQADLDAWHAEKYSTRRPAQAFLRWCMDSRRMPRLVIPNRPTANPHPMGQHQRVAALQRVLADASTPLRVRVAACLVLLFAQPVSRIVRMTVDDVLREGQHVALRLGDPPTPVPEPVADLLLNYLQALPASAPVIARALGYHDKSTTRIAADAGAPWKSYAPGDHSG

SEQ ID NO: 3205 - protein, 384 aa, synthetic construct
  REGION 1..384: note = TnsF-Tn7 System Protein
MRDEAGLPVVIVAGLHSEARRKVVDQLLRLVPDSVALHHDLSTAADGTVLRQVRDASGELSRGDAPLVNDCACCALREDLVPELERLADAGLTRLAVVELWDSVEPKGMAETVVQHGADAVRLTNVITAVDPALALPCLGNGDDLAEAGLAAAAGDQRTVGDTWARQVEYAPVLAVVESEDTDDEDRALLSQLHPVARQVSANSPELARLAFAGFDVEAAAAAQHPACALLPQEADEAGVTTFVWRRHRPFHPERLYQALEDLCCAAARSRGRFWLADRPDTLLAWDAAGGALCVESAGPWLASLPDAAWEMVPPVRRAAAALDWHPEHGDRCQHLVFTSPGLDRDGLARVLESCLLTDAEYTAGPEAWKQLPAAFDSLLDPVA

SEQ ID NO: 3206 - protein, 384 aa, synthetic construct; identical to SEQ ID NO: 3205
  REGION 1..384: note = TnsF-Tn7 System Protein

SEQ ID NO: 3207 - protein, 458 aa, synthetic construct
  REGION 1..458: note = TnsF-Tn7 System Protein
MIGTDSADTPICGPCAGQSDRDYTCPRCGESGFAQTIGRCLRCEVGDRIHELLADADGVLRLDLQPFVTALATVDSPNAVLQWLRPGQPAAHLLEWIHAIDVPVTHDLLDCLPPGLAVHRLRQTLVHTGVLPERDEYLERLVPWLDNLLADQPATRAHLLRTYATWTVLRRARYRARSKQFTPGANNWARSRLRAALRLLCWIDEQGLELGSIRQDHIDQWLLTGRPESTYPAREFLHWARQRRLAGAVAIPKKRSRTTLAPITDDERWQQLRRCLHDNTLPTPVRAAGALVLLYGLPVSRVALLRCDDIHIDTDQCAWVHYGRHRLRLPPAVAAVVLAQRDQATTVSPVGRSHPGGVAWLFPGGFPGRPARDALYRGLRLHLHVHLRRARSAALAGLAAELPAAVLAQLLDININTALTWTRHTQADWTAYLAARRNTTDTKPCLTNKVGLIRGPAE

SEQ ID NO: 3208 - protein, 458 aa, synthetic construct; identical to SEQ ID NO: 3207
  REGION 1..458: note = TnsF-Tn7 System Protein

SEQ ID NO: 3209 - protein, 256 aa, synthetic construct
  REGION 1..256: note = TnsF-Tn7 System Protein
MRQVRSMPVGVASVRSESDLLVRYRGSDGGFVDTSLDRLSVDDVLAGLPVREFRSYRGRRHYSGWYWSATTGGLVVYESRLELARILLADKDSDVVAIAAQPFLVDGFDGERTRRHVPDVLLGHADRAVTVVDVKAASRLDDPKVSAQFAWMKRLCEQQGFRFEVWSGTDPVLLENVRFLAGFRRPALVAQELVPLVLEAAVSPCTIAELERQLAGPARWDRIRPVILHLLWRSRLTANLFRPLDGDTIVRTGVAA

SEQ ID NO: 3210 - protein, 342 aa, synthetic construct
  REGION 1..342: note = TnsF-Tn7 System Protein
MSDLSQMRSLAGEEELADFETDVLAGLVLARSSAGLADGTIRKEVGQLEQIRSWFGRPLWEMGASDADDYFGRILRTSPSGTRLARSQALTVYFAFLELRYQAELHRMTGRVVTCPLDEMNRPRGRKDAKLRIPPNEYQVAAMFTGWAAEMATCRKFAPTARDYAAARLMAEVGLRVNELRHLDLADIKWDLGRFGKLHVRLGKGARGSGPRERMVPLINDAGRTLRWYVEDVWGHFGGDHTRPGVPLFPSERKTRDGSCARLGADALRTGLAEAAAMYLPDWPDKLTPHVLRHFCASQLYLHGMDLVAIQETLGHAWIATTMRYVNSQKLHQTGEKPQVAC

SEQ ID NO: 3211 - protein, 401 aa, synthetic construct
  REGION 1..401: note = TnsF-Tn7 System Protein
MSARTVTIAVGASLLVDGEMARVVEFDGRAVTLQLSNGRYSSMAVAELVRRARGPDHVASGAGGGNDPGVVLAGLSATERERVAQRAAHVREVLTGYTSGHAETARPGEPRTAFAKGTPLTVRYAAKATELSVTARTVQNWVAAYRDGGEAALVDDRHRRGWSTVDPRWDAAVRSELAAGVSASTPTRSAVLMRAAARLEREHGPGVVAVPSKTTAYRRLASLTRGTNAVSGSAAGRRSIAERPQGVYGRLRATRPGEYLILDTQDLDVFAMEPVTCRWVRAQLTVAQDLFDRQILGLKVTPVSTKAVDIAGVLFEAVTGRGSGRPALGPMHGLPERLVFIEIGADEPVWCPPETLVVDHGKAFLSAHVIGVCARLGISIQPAQPRKPTDKQLASDCAPCG

SEQ ID NO: 3212 - protein, 372 aa, synthetic construct
  REGION 1..372: note = TnsF-Tn7 System Protein
MRQVDLPGAAHLVLDSGVRYLDPAPAVFEAMLEGWARQQKSRFLSEAGTIVPRVRLVRRFAGFTDQYPWEWTPGELEAFTVDIMSGAHPAVQSTIRSYHGALRMFCEFVADARYGWLAECEQRFGQFPVQIAHEWNTVAHVVDYEGQPGRRALTYDEVQALFDAADARVERVRRRGRKGVLAAWRDAAILKTVYAYGLRRRELARLDTVDFRRNPRAVQYGTYGSVQVRYGKASKGSPPKRRTVLTVPEMDWIVDVLTEWCEEIRPLLFPGSHPALWVTERRSRISMRSVNEAFRDARLDARLPEELDLHALRHSYVTHLLEFGYPALMVQQQVGHAWGSTTALYTSVSDEFRNRLLEQSLQTHPELWTETT

SEQ ID NO: 3213 - protein, 256 aa, synthetic construct
  REGION 1..256: note = TnsF-Tn7 System Protein
MNELVTTRIRSTATRLGLNHLPSQLDTFARRAEDNQMGYLEFLDLVLEEEAAVRDERRFRSALRLSKLPHHKTLDDYDFSFQPELDPRKIKDLATLSFIEDKGNAALLGPPGVGKTHIAVALAVAACRAGYTVYFTTLDDMVRRLKAADAIGRLTSTLRTYLRPNVLVIDEVGYQPLERAEANLVFQVISKRYEKGSVILTSNKNFGEWAQVFSDEVLATAILDRLLHHCDVIPINGPSYRLKNRLAAITDTATVA

SEQ ID NO: 3214 - protein, 256 aa, synthetic construct; identical to SEQ ID NO: 3213
  REGION 1..256: note = TnsF-Tn7 System Protein

SEQ ID NO: 3215 - protein, 108 aa, synthetic construct
  REGION 1..108: note = TnsF-Tn7 System Protein
MTRSMSYVWHLRAKMAERGLFQTSELVPLLAERGIQLSREQVYRLVTQPPQRLSMDTLAALCDILDVTPNDLIEITAAANQVRKTASGRGTRRAPTARRTTIRRPDGT

SEQ ID NO: 3216 - protein, 340 aa, synthetic construct
  REGION 1..340: note = TnsF-Tn7 System Protein
MTCGEVPISHTTFQALPPAKPYDYLRNLLVAIGILEPWEPHIDRFTVWFEAQIIPTVANEHVHTIRRYASWHILHGLQRHARRGTLTQAAANSARIRVRAAIEFCELLACRGITIEDATQTDLDELIAITPGYNRAKTVASFVAWTRKTRINTKLSTPGEPWPHAAVTISTEQLWSDVERLLNEDHHRSHVRLAGLFTMLFAQPLNRIIAMKTQQVRIADDDVFVTFATDAIQMPPILDDLVREHIANRNVPVNVGTDPGWLFPGSQPGQHLVTEVFRRDLKAIGIKPHESRKAAMFHLAGTIPAPILAGLLGTTDKNAATWAELAARGWSSYIHDRFES

SEQ ID NO: 3217 - protein, 340 aa, synthetic construct; identical to SEQ ID NO: 3216
  REGION 1..340: note = TnsF-Tn7 System Protein

SEQ ID NO: 3218 - protein, 320 aa, synthetic construct
  REGION 1..320: note = TnsF-Tn7 System Protein
MSTNTQPLAISARSLVKKYGDSEVVSDIDLQIDSGNVFGLLGPNGAGKTTTIEMIAGLRQPTEGTVRVLGLDPAIERDRLTKRMSVQPQAANLFPTLTVTETLDLFASFYEDSRQTDKVVGLVGLEASRNVRVANLSGGQARRLLIGVAVIGRPQVVILDEPSAGLDPAARRELWGLIRALRDQAVTVVLTTHHMDEAMELCDQLAIMVSGRIVAEGSPDQLIAEHTATSTVKFMVPAGTDPADIFEVSDDEEPEITPDSGALLVRIGTTAPDALLRRVTMHPGFRATKFRVEPASLEDVFLKLAGESHLEWSDGQPKDR

SEQ ID NO: 3219 - protein, 320 aa, synthetic construct; identical to SEQ ID NO: 3218
  REGION 1..320: note = TnsF-Tn7 System Protein

SEQ ID NO: 3220 - protein, 496 aa, synthetic construct
  REGION 1..496: note = TnsF-Tn7 System Protein
MAGKIVSIEACVSAGLPGIDIVGLPDASVSESRKRLRAALAYLGIPVASQHLTINLTPGTVPKIGTGFDLGIAVAVLKAQGIITATDTESIIHCGELGLDGRIRPVTGVLPSLHSGLQAGFERFVVPVGNSQESALLGGGGVKAVASLAELINIYGGSLAVPELPPVVEAETISPEASDRHDLVEVQGQAEARFGLEVAAAGGHNLLMRGTPGAGKTLLAQCLPGILPPLDDEQAIEAAAVRSLRGELNGGEGLDRTPPFEAPHHRSTASALIGGRRPGSIGILSRAHRGVLFMDEAPEFSRDVLEALRQPMESRQVHIHRAWGSMVLPASFQLVMAANPCPCGVGMRGAESTCRCTPMDKRRYRNRLSGPLLDRVDLQLELFPVSPADIRLGGGQEDSATVAARVHLARQRQAERYVDCEWTLNSNAPGAWLREHFALSPNSLRDLDRALDTGRITMRGYDRVLRVATTLADLEGAGAPTPDKITAALALRTQES

SEQ ID NO: 3221 - protein, 496 aa, synthetic construct; identical to SEQ ID NO: 3220
  REGION 1..496: note = TnsF-Tn7 System Protein

SEQ ID NO: 3222 - protein, 300 aa, synthetic construct
  REGION 1..300: note = TnsF-Tn7 System Protein
MEDFTLSLMSGSKKAAPSTIRGYHLMIRMFCDYLLDGRYGWIEECEKRFDQIPSQVCHDYNTVAHTTDYEGHPARRPFTYDEIQHLFDFLDTRVERIRVSGRKGAWAALRDAQIVKTIYAYGLRRREACMLDIADLRPNPQMPQWGTYGAVHVRYGKAVRGGVPRRRTVLTVPEFDWVVTGLTQWVEQARPLIVGGNHNGRVELWPTERRGRIDPRTLDLRFAWIRKEAGLPEELTLHCLRHSYVTHLIEFGYPERFVTEQVGHSYASTTAIYTSVSNDFKTKTLQAALGRVYSSEKGPQ

SEQ ID NO: 3223 - protein, 120 aa, synthetic construct
  REGION 1..120: note = TnsF-Tn7 System Protein
MNSASSKLPTPDRKVSLKWNLRQIMASAGMFKTTDLVEPLAARGINISKQMIYKVVTGTPQRINVDLLAALCDILDCTPNDFLELTYEQKPKPRVPAGTAGIGDLRPVRATIRRRRAYDS

SEQ ID NO: 3224 - protein, 245 aa, synthetic construct
  REGION 1..245: note = TnsF-Tn7 System Protein
MRSAKQEITETVKFLCWLHETHGRTIQTCTQNDVDQWIAAGPTTRHAIRTFLVVSKRDRLTTVTLDHRYAQTCPALTQEQRIAWIGELVTGGSETLPYRVAGVLILLYAQPLKSIVRTRMTDIVDEDPMAITFGKHPVDVPEPFATLIRELVHSRTNLRTSNNDNPWLFPGTHAGDHLHPDTIMHRLRRIGLSNLGARNRALDDLVVECPPPVVADALGYSHQVAFHHAERSAKTWARYTGRRIR

SEQ ID NO: 3225 - protein, 245 aa, synthetic construct; identical to SEQ ID NO: 3224
  REGION 1..245: note = TnsF-Tn7 System Protein

SEQ ID NO: 3226 - protein, 309 aa, synthetic construct
  REGION 1..309: note = TnsF-Tn7 System Protein
MTTSQEQAGRGDLAIDIVGLNKSFGTFRALTDLNLTAERGQVHGFLGPNGAGKSTTIRVLLGLLRPDSGTVRLLGGDPWRDVVDLHRRLAYVPGDVSLWPSMSGGEAIDLLGSLRGGLNEQRRADLIDRFELDPTKRGRQYSKGNRQKVAIVAALASDVELLILDEPTSGLDPLMENVFQQVVAEAAERGTSVLLSSHIMSEVEALTDRLSIIRNGTIVRTGSLAELRSHTRTTVRAELTTVPRDTDLRSLHDVTLDGARLTATVDPEQLTEAMRSLSAVGLRSLTMEPPSLESLFLELYSDDETAGRS

SEQ ID NO: 3227 - protein, 309 aa, synthetic construct; identical to SEQ ID NO: 3226
  REGION 1..309: note = TnsF-Tn7 System Protein

SEQ ID NO: 3228 - protein, 366 aa, synthetic construct
  REGION 1..366: note = TnsF-Tn7 System Protein
MRWLDRPIPKALLASLASGQTITHSSLDRCPSGQAREHLRSLLVAAMILPRRDENADRLATWTDEFLAGLPRHHVALVKPYAHWMVLRLVRRRARRRRTSFGIATAARERVRCAVRLLRHLDNRQEAITDLSQATLDDWLAGNRARTGNTAPFIKWLNGRGITDDLFVAVPKRTKPTRVNSDEQQQAQIRELLVARDQEVALPERVAGLLVLLYGARLERIHRLTTAELTRHNDRLHVALSDHPTEVPTELAVFIERLAADAATAPRARTFTGDANYLFPSTRRPHAPLHPGTLGRKLARIGVLPQTTRNTAMVALASDLPAAVISTQFGLTPESATRWAAHARRDSIEYLVARVEVPRPSDDTAQ

SEQ ID NO: 3229 - protein, 408 aa, synthetic construct
  REGION 1..408: note = TnsF-Tn7 System Protein
MKAGESRTAVADAGTAAVIDASFAVNRGEIFVIMGLSGSGKSTIIRMLNGLHDVTSGTVTVNGDPITGIPASRLREIRRDRISMVFQHFALLPHRTVAANVAYPLELKGTPKAERLAKAEEILSLVGLEGQGEKLPSELSGGMQQRVGIARALAADSDILLMDEAFSALDPLIRREMQEQLLELQQKLQKTIVFITHDLNEAMFLGDRIAVMRDGRIVQIGTPEDILMDPANDYVEQFVQDVDRARVLTAANVMERPRPVVPHTAGPRTALRQMRDAYMSATYVVGRDRQLVGVVTDRDAVKLVRNGATTLDSIIKPVPQSVREDEVLMNLFVPAVESPLPLAVTDAEGRLAGVIPRVTLLAALGPGPGATEEITLPMMPMPQAEIDAVLDDGWTADPADAPTTEEVR

SEQ ID NO: 3230 - protein, 408 aa, synthetic construct; identical to SEQ ID NO: 3229
  REGION 1..408: note = TnsF-Tn7 System Protein

SEQ ID NO: 3231 - protein, 330 aa, synthetic construct
  REGION 1..330: note = TnsF-Tn7 System Protein
MTTVIDTRNLTKHYGHVHALDGLDLTVEHGQVHGFLGPNGAGKSTTIRILLGLARRTGGEATVFGEDPWNRAVDLHRRIAYVPGDVSVWPNLSGGEAVDLLARLRGAQTKDAAYQHEKKRLMEAFQFDPRKKGRAYSKGNRQKVALIAAFAVPADLYILDEPTSGLDPLMAVIFQREVARAHANGATVLLSSHIMSEVEQLCDRVSIIRAGRIVETGTLAELRHLTRSDVSFTPSGATLEQVARIPDVHDPEQQGDRIRLAVDSDRTATVLPALAALGISDLRVAPPSLEELFLRHYGDDLATLEAAEDGGPSDQPTGSRRERRMQKERA

SEQ ID NO: 3232 - protein, 330 aa, synthetic construct; identical to SEQ ID NO: 3231
  REGION 1..330: note = TnsF-Tn7 System Protein

SEQ ID NO: 3233 - protein, 362 aa, synthetic construct
  REGION 1..362: note = TnsF-Tn7 System Protein
MLAARNIAHLDPESTVFEAMLEGWRAQQSARFLKLSTMRARERLVRRFMSFTGQYPWQWTAAEADAWIAELRSGSRPLRLSTLRGYEIDLKMFCQYVADPRYPWAQECSERFGSGPTQIFHEDNSIAHVSEFEGDPSRRPLTYDEVQALFDAADSVSAQARLRKRKGALPALRDAALLKCVYAFGLRRQESVMLDLVDFRRNARLPQFDRFGSLSVRYGKAGRGGPAQRRTVLTVPEMGWIADVLGHYLHEVRPALSPKSMDALWVTERGTRLSRRAANEAFCRARDLAELDPTLDLHSLRHSYVTHLIEFDYPERFVQEQVGHSFSSTTAIYVGVSNEYRNRLLSQSLHTRYGLTFEEDTR

SEQ ID NO: 3234 - protein, 116 aa, synthetic construct
  REGION 1..116: note = TnsF-Tn7 System Protein
MREMAYVWHLRAKMAEQGMFATTDLQPLLGERGVVLSREQTYRLVTGHPQRLSVMTLVALCDILGCTPNDLIEPQIVEVSHRRVAGEALAVEDGVPEASRPVTSLRTKINRPGTAR

SEQ ID NO: 3235 - protein, 409 aa, synthetic construct
  REGION 1..409: note = TnsF-Tn7 System Protein
MTRLIAKLCPHCRADQMIREMIPDDLAASDARIAHLRERWFQGAPSKIIYAFERGTVACTLITRVLADPRLCTHAYLDEAGSEFQTRAVRSVLIDHGLLPPRDELLARFELWLPDALAEIPDPSERRTVTQYARWRHLRALRRNTMPSRSGQLSWRRIEIMGIIELLAWVHGRSGSLASLAQADVDEWLVGGPRPFLHHFLTWAGRDGSSRQLAAPRPSSGGLNPQALSDDERWRLFADVTSDASIDPHTKFAAGLMLMFGVRAAKIVQLRAEDVAVTDQAVIVRLGTEPLVLPAELAPAAAGAASNRTAPRMFVESIEQEWVYPGARAGHHMAPDTLNSRLRAVGIPPRLARTSALIALAQELPPVVLSRLTGLDISSAIAWSNAIGANNNAYATAVIERVGMPLPTL

SEQ ID NO: 3236 - protein, 409 aa, synthetic construct; identical to SEQ ID NO: 3235
  REGION 1..409: note = TnsF-Tn7 System Protein

SEQ ID NO: 3237 - protein, 158 aa, synthetic construct
  REGION 1..158: note = TnsF-Tn7 System Protein
MDQVILMCGPAGSGKSTYARGLEARGYVRVSFDGEAWALGHRTHPIGDDARQVVNGTLQDKLVDCVKQGKGVVVDSSFWSRASRDEFRRLCAPLGVVPVVYYLDTRRSILLDRLAQRENSGPDDIAVSRERAIAYIDGFETPTPEEGPLRIVHVTSPM

SEQ ID NO: 3238 - protein, 158 aa, synthetic construct; identical to SEQ ID NO: 3237
  REGION 1..158: note = TnsF-Tn7 System Protein

SEQ ID NO: 3239 - protein, 875 aa, synthetic construct
  REGION 1..875: note = TnsF-Tn7 System Protein
MDMNSLTQKSQEALTSAQSIAVLAGQIETDEEHLLLALLQQEEGLVPRLLQTAGADVEAVRADVEAEIARKPSVSGSSPQTGQVYLSRSLTSTLERAEREAKRLKDSYISVEHLVLALADDSSNRAASRVLRGHGVTRESFLSALTKIRGNQHVNSATPEQTYEALEKYGRDLVADARLGKLDPVIGRDAEIRRVIQILSRKTKNNPVLIGEPGVGKTAIVEGLAQRILREDVPEGLRDKTVFSLDLSALVAGAKYRGEFEERMKAVLAEVKAGEGRILLFIDELHTLVGAGATEGAMDAGNMLKPMLARGELHLIGATTLDEYRKHIEKDAALERRFQTVMVEEPDVEDAISILRGLRERLEIFHGVRIQDSALVAAAVLSHRYISDRFLPDKAIDLIDEACARLRTEIDSMPAELDELTRRVTRLEIEEAALSKETDPASKKRLEELRRELTDLKAEADSKRAQWEAERQAIRKVQELRGELERLRREAEEAERSYDLNRAAELRYGAIADAERRLRAEEERLTSKQGGQRLLREVVTEDEIAEIVAAWTGIPVARLQEGERNKILTLDATLKERVVGQDEAITLVSDAIIRARSGIRDPRRPIGSFIFLGPTGVGKTELAKALAQALFDSESAMVRLDMSEYQERHTVSRLVGAPPGYVGYDEGGQLTEAVRRHPYSVVLFDEIEKAHPDVFNTLLQVLDDGRITDSQGRTVDFRNTIVIMTSNIGAHHLLGSDGGAIPDDVRNSVLGELRAHFRPEFLNRVDDIVVFSPLGREQIRDIVELQFTDLRSRLAERQIRIELTPAARQLIADRGYDPVYGARPLRRYISHEIETRLGRALLSGEVMDGSTVTLDVHDGDLVFNIAAPVEEEDTA

SEQ ID NO: 3240 - protein, 875 aa, synthetic construct; identical to SEQ ID NO: 3239
  REGION 1..875: note = TnsF-Tn7 System Protein

SEQ ID NO: 3241 - protein, 381 aa, synthetic construct
  REGION 1..381: note = TnsF-Tn7 System Protein
MKPALDAMLATRRPKTAINWIRRSKAKPVLRGMALGEIPITHEALDELPRTPTLDHLRDFLITSGVLPAQHVRLERLVPWLNEFLTDQPAEHARIVRLFATWTVLRRARAKANRAPFSQNQAARARSTIRTALRLLQWLSAQETTLAQLRQPLLDHWILDCAQNERHYTKAFLRWAHQHQLAAELSITRHPDPQPTTTMHNDDRWALVNKLLHDDHIALELRICGLFVLLFGQHLSRVAKMTADQVTDTQTQLHVRFTTEPITMPTPLDTLIRHLMHHRGHSSYPDPAQKWLFPGGFPGRPITPATLGQRLHQIGIHDTRQARNAAMMHLASEIPAPVLADLLGLDPGRAVVWARLAGRDWASYAANRTPNPLRTNTAQEQ

SEQ ID NO: 3242 - protein, 381 aa, synthetic construct; identical to SEQ ID NO: 3241
  REGION 1..381: note = TnsF-Tn7 System Protein

SEQ ID NO: 3243 - protein, 372 aa, synthetic construct
  REGION 1..372: note = TnsF-Tn7 System Protein
MRRLDVPGASHLVLVDGVIHLDEAAAVFEAMLEGWARQQRSRLLAATTVDSRLALIRRFRAFTDENPWTWSPGDVEQFTSWLVGGGTPLAVSTIRGYQMTLRLFCDYLSDPAYGWQEDCVRRFGSAPIQICHEWNTVAHLADYEGKPERRPLTCDELETLFDFADSRVEAIVSSRRKGALAALRDAQMLKTAYAFGLRRQELCRLDLVDLRPNPHAKAWGRYGSLHVRYGKASRGGPPRRRTVLTVPEFDWVIDGMRQWVTEARALFNAGDHPALWVTERANRVSVRYFDKRFAQLRDEAGLPKELVPHCLRHSYVTHLVEFGYPERFVQEQVGHRYASTTAIYTSVSNDFKNRVLAQALARVYSPEKGEQS

SEQ ID NO: 3244 - protein, 114 aa, synthetic construct
  REGION 1..114: note = TnsF-Tn7 System Protein
MTRKMAYRWHLRQLMATRGMFQTSDLVPLLAERGVRLSREQVYRLVTQTPQRMNMDVFTALCDILACGPSDLIEVVAEPTQIPKKAAAGEATNAGIGQLRPVRARIRRPNQGSD

SEQ ID NO: 3245 - protein, 271 aa, synthetic construct
  REGION 1..271: note = TnsF-Tn7 System Protein
MLTHELLDELPPTQNQRYIRQLLVHTGALEERNEVLERIPGWLEHELADKPTAQANLARTFLHWFLLRRARQRAATRRYPASADRDLRRRISGALEFLAWRDQRGLVLARLTQEHIDEWITGATSQRRSLIRYFLKWTASRRLTRELTVPSIPRQEPQDLLDEDDRWRLLQCCLTDDTLATDVRAADAITLLFGPSAERLCHLTPEHLKFGDKYAHLVLGRHPVLLPPRLAELLRHLADQPQPRPQLARANPGLNGSFQAWSRASPSRHTG

SEQ ID NO: 3246 - protein, 392 aa, synthetic construct
  REGION 1..392: note = TnsF-Tn7 System Protein
MLADTDGSVRPELRPLEKYLLEGSTRADSLVGWQRHNTVSAEVLRDLATGELPLEFEAIFTRSGGKQGAAFLLNMLVASGVLTGIEINEERYYLWLASWLAEQTNSAHRLLLRRYAQWGISTKPWAGHATLPSDANNRFNRLRVRLQTGAEYLKFVEAQGYTTLTMPQRVLDAYVAGSADRQDHLSHFTRWLKDNKLATAVAAYRPRNKIMPSIAPDERWRLARWLHRDETIEPQDRVASLLVLLYAQPVTRIVAIPRAAVHFNTRGVTMTLADDPIELPEQLGHAVTLLYQNPPRTHRDINGTWLFPGRLPGRHLTAGALGSRLTRLGIPVQQARSAALLELAAEIPVPLLSELLGISTASAARWATAANRDWSTYPALRMTDWAEKPEGG

SEQ ID NO: 3247 - protein, 392 aa, synthetic construct; identical to SEQ ID NO: 3246
  REGION 1..392: note = TnsF-Tn7 System Protein

SEQ ID NO: 3248 - protein, 349 aa, synthetic construct
  REGION 1..349: note = TnsF-Tn7 System Protein
MATPEATIFKAMLGGWEDQQRSRGLRVHTIVTRCRLILRFQEFSGKMPWEWNAQDVEDFISGPDQRLKSLSTMRHYHNAIKTFCAYIIDPNYDWVELCEQHFGTHPVQVCHPWNTVAHKAQYEGAGKRRPLTFDEMEMLFDTADAKVEELATSGKKGALAALRDAQIFKTAYAFGLRRNELAQLDLTDLHYNAAASQWGRYAALHVRWGKAAGGGAPRRRTVLLVPEFDWWVPGMQQWVEQARDRFDPGDLGAIWVTERRTRISVGYLDRRFAELRDEAGLANELTLHSLRHSYVTHLIEHGYADRFVQEQVGHQHSSTTSIYASVSGDFKNRVLAQALRKLTDEETTR

SEQ ID NO: 3249 - protein, 256 aa, synthetic construct
  REGION 1..256: note = TnsF-Tn7 System Protein
MTTSVKAHNTTPATARAAVDLQDVSLVYPDGYDADGTPVTVSALDRVDFTAAQSELTALVGESGSGKSSLLSVIGALVQPTSGTVMVGQTNVRELKEKRQAALRRDAVGLIFQQPNLLSALGVRDQLLVTDHLRGLRGKKLKQRRSRADELLDVVGLGDMSNRKIHTLSGGQRQRVNIARALMGSPQVLLADEPTSALDQSRSHEIMQLLQNLTKEFSVATVVVTHDRGLVQYADQQVTLSDGAVVSAERLGSSVS

SEQ ID NO: 3250 - protein, 256 aa, synthetic construct; identical to SEQ ID NO: 3249
  REGION 1..256: note = TnsF-Tn7 System Protein

SEQ ID NO: 3251 - protein, 109 aa, synthetic construct
  REGION 1..109: note = TnsF-Tn7 System Protein
MIALETTWNLREIMASKGLFQTSQLRPLLAERGIELSREQVYRLVTTTPRRLSLEVLSALCDALECSKDDLITTERREVNAPKTAAAEGSKAPIGDLRPVRANIRRPKQ

SEQ ID NO: 3252 - protein, 437 aa, synthetic construct
  REGION 1..437: note = TnsF-Tn7 System Protein
MTAPEVLCCDCGTVPPGRRGKPPVCPSCQLTRRLAKLLDDGTGAPAARLNALATHLHATGAPEKTLHWLARSGPAELLRALATGQLELTHEAFHSWPRPLAADHLRRHLIACNLLPPADPHLLAIEAWLHRHLAAIAEHPHEQLLRRFAVWHQLPRLRADAATRPLRATAKQYATGQFTQAELFLSWLHERDINPSHVTQSTIDNWYVTHRVHQRHLIRGFLLWATEHHHLPLHLIPHRVSFQPGSSLTQQRRLALLRRYLSDDTAPAPARAAAVLMLPYAQPLSRVQHLTHDDLLDIDDEPHLRLGEPPSPLPPAVAQLLDRLISKRGDDQWLFPGRLPGQPVAYNTLHRWLRQLDFPLVGARVSALRQLVLQAPAPVIADALGFHQTTTTRQRAHAGATWNRYPASRHRPDLTDAESRQAVEEACSGFGRPYLTP

SEQ ID NO: 3253 - protein, 437 aa, synthetic construct; identical to SEQ ID NO: 3252
  REGION 1..437: note = TnsF-Tn7 System Protein

SEQ ID NO: 3254 - protein, 346 aa, synthetic construct
  REGION 1..346: note = TnsF-Tn7 System Protein
MFATMLDGWRDQQAARNLSLATIASRLRVIRAFSDYVTSYPWQWLPQMVDEWSMDLRSVRGLRRSTLRGYQEAVRLFCDYLTDPAYGWAKECEQRFGSHPVQVCHEWNTAVHVQDNEADPAKRAFTAAELQALFDHADEQVTRIRGAGRKGWLPAFRDAVLLKTAYAYGLRRNETRMLDVADFGTNPYAAEFDGFGVCYVRHGKAMKGSAPKRRSVLTVWPWAVDILRQWTTEVRPLLALDGNPALWPSERSSRIGLQQINSRLSAYRDALGLGPGLDFHSLRRSYVTHVIEGGWDPLFVQQQVGHEHASTTSIYTCVSSDFRTQTLRRALDQTLHQALEPAGAIG

SEQ ID NO: 3255 - protein, 113 aa, synthetic construct
  REGION 1..113: note = TnsF-Tn7 System Protein
MKRQASYRWRLRNVMAEHNMFNTTELVPLLADRGIILSASQVHRLVSGTPERLSLAVLAALCDIFDTTAAELIVTTAENLAPRRAAAAGSVNDTNAGNSGTVRPLRAILRPDP

SEQ ID NO: 3256 - protein, 508 aa, synthetic construct
  REGION 1..508: note = TnsF-Tn7 System Protein
MPTPNEDGTPRCVSCYAAARVPCTRCGTLAKAERRWPEGPVCLPCTDEVRFTHDHCHHCGKLAAVFRHEADGPLCPDCAGVTFAYRCPTCHSMGRLLQGECPRCRALRELNETFTGPDGFRSAQLAPLAEVLERYDNPYSLVLYLRRPGGQLIRAMAGGEIECSHEALDDLRQTTSVQQLRGLLVLSEVLEPRDEQLAQFKRDVRLCLDEVTHTHDRSILARYAQWHLMPLAHHRLERAGFNRFQRENLRRRLQTARQLLGYLRSRGRTLDKASQAIIDRWITANRPRQNYARPFLLWAATCGLAPENVAIATAIKTVDRSIMSDADRILTALKLETDTSQDIVDRVAGCLVLQYGQRADRLVGLTTDQVLVHPQEPGVLGLQLGRDPLWLRPRLSALLQQLIDERRPLAAPLRTHETPFLFPGLRPGQPMNPSTLQNRLSRLGIPSISLARNGAWLALVGAVHWKMLADILGTADGTAHAWHQHNGADRASYVASRLRAAQAPSGPE

SEQ ID NO: 3257 - protein, 508 aa, synthetic construct; identical to SEQ ID NO: 3256
  REGION 1..508: note = TnsF-Tn7 System Protein

SEQ ID NO: 3258 - protein, 240 aa, synthetic construct
  REGION 1..240: note = TnsF-Tn7 System Protein
MDPEIKRLKAAGHKGALAAARDLAMFSTTYGWGLRRRETARLETHDWRRQAKLPEFGDYAGLAVRWGKAAGPGQAPKRRMVISVWPWAVQTVQLYTEHIRPLFYVDREDDGVMFPTERDEMISERAFNQRFQHWRELGKLPDALGPHCLRHTYVTRLIESGYDGQFVTDQVGHSHAATTAIYTALSSDFKNLKVREFLDASEAVQLAAAFALADAEADMDDDFSDQSADEPVGAGRPRRM

SEQ ID NO: 3259 - protein, 387 aa, synthetic construct
  REGION 1..387: note = TnsF-Tn7 System Protein
MLDDGTGSICSVLLPLKSYLLTAYKPKNINSWLRREPAATTLPSMATGIMPITHRGVNQLPLTASTRYLRRILISAGVLPSIDVYRNDLDVYATHFLADLPAEHAAILKRFYRWHILPTIRRRLAGKEMTIGMYKNWRTELRNHRRLLQWLAQYGFTLATAHQSAIDRYVAEHPPTHSTGVFLNWATTAGLCTKLTAVVVDQHHARPRLSDTDLTTIVDEVFNASTMPLPARLVALFAVIYAQPIQRSAALRRSCVRDNGAGNLVIAFAQTPIRLPDTLERLVREQLNNLDQSHQTLPGGQDWLFPGVMPDQHVSPGRTRDIIAEAGFNVRLLKDSRLQHFAQTIPASIIADVTGISVEQATKHSRNAGGTWAGYPASRQGPPNLRE

SEQ ID NO: 3260 - protein, 387 aa, synthetic construct; identical to SEQ ID NO: 3259
  REGION 1..387: note = TnsF-Tn7 System Protein

SEQ ID NO: 3261 - protein, 364 aa, synthetic construct
  REGION 1..364: note = TnsF-Tn7 System Protein
MLSPTLPVQLIANVVPLNQAQFVFDAMLDGWGDQQFSRGLKRQTVNVRRQLIVRFQRFTDTYPWQWRPGDLEAFSVELASGARPLAKTTLRTYQRTVWQFCAFITDSRYGWVAVCRDRFGDTPMQICHDWNTLTHLTEYEGRPQRRALTYDELERFFDAADERVSRIQRAGRKGALSALRDAQIFKTTYAFGLRRAEVAGLDIADVRSNPAAPVFGNCGAIYVRWGKSTKGSGPKRRTVLAVPELGWAVEGLHQWITEDRQHYGATESTVLWPTERQTRVSLRYLDVRFAEIRDETGLPPELSLHALRHSYVTSLIEWGYAERFVQEQVGHAYAATTAIYTSVGDDFKNRVIAQALSKIYGEPT

SEQ ID NO: 3262 - protein, 115 aa, synthetic construct
  REGION 1..115: note = TnsF-Tn7 System Protein
MNDTPTPAIRWKLRDVMASAGMFQTTELREPLRRHGVNLSREQVFRLVTKPPERLNMTVLAALCQVFSCSPNDLIEPVEVAAAPAPRVVGDTVERDLPELRPVKARIHRPTDGPV

SEQ ID NO: 3263 - protein, 479 aa, synthetic construct
  REGION 1..479: note = TnsF-Tn7 System Protein
MSVILNQGKGIKHCDWCGKNDVKIQRRYKGQGYCANCYKTWFIKKNCFKCGDIHRLHKKEEHSICSECLRKSPCIRCSKDAYVNGINTRYGRSCQVCYNGYFKDKKQCFSCGDFKRNISRYTELKHDQPVCTSCFQRSCHESCPQCKRFRKLLDTPDGKKCKKCHELGYITCNDCEQLMAAGRGLRCENCYWLKKLTDAVELNTYLFYSESIKTSYRDFIDWYVNKLSAREAFLKHDSFVDFFVVCDDLWGELRSYESLVGHFKPSGLWHNLTVLRWLVDTDQVIVDEKLKIELAEKSYIENALSVFEEIPKCLYMYHEFLLMKQIKNNTITRTIRLALRPAIDICTTYKVLGSEKPTQEQIERYLADKRGQYSNLYGFVTFLNREYELKLICKRPEKQGLSYNNVRKEQEKQIQQLIKKESLTETDVILWYQLCMAYFHDIKVGKNYIQNFKFEVFSSDNLVKFEHKTKVYWLPNHTK

SEQ ID NO: 3264 - protein, 573 aa, synthetic construct
  REGION 1..573: note = TnsF-Tn7 System Protein
MSNFKPFIGIDLVASKSSIDISDFLNLTDYEKGVKKRFFKNSLYQVIWYKNLYDLGEGKENKRVEVVFVSSNGFQISVKLPLDIIIKVPVGSVWKNGLMVKELDTGQYVFSLQEAKGKSFHRPNVRYISQFYEKKQEGKQEDEQKKYRANLILREKDYPVRGSEANTLIIVEQGELKFIIHPLIFFLTHYGSSKHINNVLVSHPWGDVNNSDHSTVKNLLELDYKNTKCSKAVLIPKSCLVSDAVILHYLRENEYTKRTVKEFNATTRQKLNDNKNKSGGISVKPYHQQSIEMLVKGIPLGGGIILCSEVIGMSLPRGEEIFYDFENSIQVVGASNAQSFRPMYINIEKETIVVADTRGPNNSTTAVIRQKQKVLGDIRKISRNEGISLDEAFKYETKSIPLREPIPDFFAPGSLVNTAGSVGMLKVFVDSGVEEYTDTNPHKILRYARQLKHYYKSVKIDCYLIEQGYKGEVVKLQESNDDRFPKTIYILRLIIDGKYYFVFDSQPLSILNVSGISGIIVKVISSFDPEDSIYELFNNEGKFHNMDKDNIRIFNHMTKAKKTNWLRNALIRF

SEQ ID NO: 3265 - protein, 213 aa, synthetic construct
  REGION 1..213: note = TnsF-Tn7 System Protein
MKQVRKIKPTYRSVSGHFAFMGESLAYESTLERDFLRYQTFRKEVIDIVPQPISIPFEKNGRTYSYTPDYFVQLSEDHGKSVIVEVKPKLEWQENWRDWSDKWKAAIKYCKNQGFRFAIYDEDRIHHLAFHNINFLRKYKNLYAAPEEVKAVLADLELRDNTTVEYILERYFKGDIYRPRGRQFIWYLMANKLIGFDVWNDIRSEKVEIWHAE

SEQ ID NO: 3266 - protein, 647 aa, synthetic construct
  REGION 1..647: note = TnsF-Tn7 System Protein
MPNNMKNLTNMTRESFYERQPERSYVQLALGGVYTNRQDKEDYQLIEFMDDMNQALFKKLSNQCNKVMSIHDFQNVVDTNNVTIKFDINEVSDDDWKKAHERYIAIKPLLNSTSITLDERASEVDVSARTLRRWRDAYLSANSIASLIDRKSGRRKGDNQLKPHVEKLIQDVINEHFLSIQRPTEESTIREVLKRCYELGIDKPGKNTVRRRISQISEKNYLKGRGFRKRAKQKFTPKPGTFPGADYPLSVIQIDHTPADIILVDDKHRKPIGRPYITLAIDVYSRMVTGYYISLDPPSVTSVGMCLSRSILPKTELLLEHGITDASWDVFGFPTKIHVDNGADFRAESLRKSCMFHGIELEFRPVARPEFGGHIERLIGNVMQKVHELPGTTFSNIKERDTYDSEKNASMTLAEFEQWVLTYITKVYHETTHSALETTPNEKWKIGIFGNDYEAGTGLPAIPSDPQTLTLDFMPSLERTIQRYGVKIDGLIYYDPCLNSFVNELEDKSSQKKTKFIFRQDPRDISYVWFFDPLIKSYFSVPLANQATPAMSLWEYKFLKKQVKEASGTVNDELIYRAWDDMKSIVSESQSATMSERRKEQRRKSHVQSQEIYEPLKEQQNADSNTYQPNAVSDIDDSGLDYFEDIE

SEQ ID NO: 3267 - protein, 242 aa, synthetic construct
  REGION 1..242: note = TnsF-Tn7 System Protein
MYENTPMLKRVDLLNTIPHDFPFMHLYPLCFTKNITVITGENGAGKSTILEALAVKLGCPAEGGSINFHYETENTHLDYTKHLRISKSGKKIEDIFFYRSETYYNLLTEMRNLDSELSFDPKINSYYGGRDLHTISHGESMRALFFNRFRGGGLYILDEPEASLSIASQIDFVERIIQLAKEGAQFIIATHSPVIMLMPDIDLIQITENNYRYVDFINTNIYYLYKEILESKGEFLKNIINT

SEQ ID NO: 3268 - protein, 242 aa, synthetic construct; identical to SEQ ID NO: 3267
  REGION 1..242: note = TnsF-Tn7 System Protein

SEQ ID NO: 3269 - protein, 395 aa, synthetic construct
  REGION 1..395: note = TnsF-Tn7 System Protein
MVTTKKRNSHNYWIKPLTFSTPLLEGESIGSWIIRASLSQKCTLTTFMGFYWQHVDDRLDRYDFDKGFEHVKPDVHEDMAILAETTVDRFNKQTLTSFAREQGLISHSSSALKWTLPLSRRHLYGRFGHPYCPDCMADNEKSHLKLRWRLAWSVYCDEHHRVLQTNCPHCDIPYQPLLAKIENRYINFCCHCDGKIDKAIIPTEHIDNDVLKFQQLAQMVWLNKYGYVLDEKVSSGEWFEFILFAVNMVRVALKNSEYMFGRLLAEFDIDIAHTKRPSTGSRLELLPAVERVELFKLVSQLLQVSKEQWLKSGEIVGLTQNSFNWNKKTEIPKAFIPVYMRIKSSPKREYKQRERSNEPKSFETTLMEWHRLKRKLEAREQYERHLESRQRDQTL

SEQ ID NO: 3270 - protein, 479 aa, synthetic construct; identical to SEQ ID NO: 3263
  REGION 1..479: note = TnsF-Tn7 System Protein

SEQ ID NO: 3271 - protein, 298 aa, synthetic construct
  REGION 1..298: note = TnsF-Tn7 System Protein
MNKLPHEHIHEKFRHIATMSNEERIKFIDTPRWFGYDKANRIIENMQGLMNMVQQHRMPNLLIIGDSNNGKTTIIKQFVKRFGDSYIDDDLNLVIPVISIQAPPSASEKDLYVALIDALSLPYNISNSTTKFRYQVVHSLLETQVKIIVIDEIHSMLTGTARQQRQIMNTIKYLCNQLQIPIVLSGTKDAVRILHTDPQHASRFDVAELLLWKNDREFRKLVSTFEHVLPLKNPSNLIEPAKLNLIHSISGGCIGNVKRLMVECAKEAIINGTEEITIKSIEDKSWLRPKRGIRTIIG

SEQ ID NO: 3272 - protein, 298 aa, synthetic construct; identical to SEQ ID NO: 3271
  REGION 1..298: note = TnsF-Tn7 System Protein

SEQ ID NO: 3273 - protein, 285 aa, synthetic construct
  REGION 1..285: note = TnsF-Tn7 System Protein
MEINSALFQTKQVAQDFGSFGTWMSLRSGYKYAALRLNRYACFLQEIERQWRCVPEADSLVRSFGPEYMRRHRLFTQWLGEVHSLTVSTEAFRHAAESRQIQNLMDQLPANSSYRQLAEDYLRVLEQRHAAGRTSLRSVRLALTPAIALLKAAGHSILGQRHLNRYLEAKPGQRAALTGFISHLRKQHAYELTMPAKSSLPNQRKRIEKRLLELLETGVKSQTAKKEWIYLGLRYFHNVTARKAQKAVSGARQPALSQGINAHLEGKIYWLPAFPAPSDALSAGH

SEQ ID NO: 3274 - protein, 203 aa, synthetic construct
  REGION 1..203: note = TnsF-Tn7 System Protein
MFRGETPIQFESTLERDFLIRKAFSRSVLNVVSQPIRIPFQTRGGRNFHYTPDFLVYYRLGSRDYLDYPLPMLVEVKPESEWQARWRDWLPKWKAAYRYAREQGWLFKIHDESRIRDQALRNIKFLERFSRMSFPETETGDLIQNLSEMGSAPVHYLLSRHYPGIYRPQGLAHIWHLLSTHKLECDMSRLLNDTTTVWVTADE

SEQ ID NO: 3275 - protein, 644 aa, synthetic construct
  REGION 1..644: note = TnsF-Tn7 System Protein
MSEEHNYEPSNEALEPIRQRISVNVGNYLQHGDDVYKITQVLDYDSAIGINVATGRSSQLRIKELRPANNAGEESDHTYQDLEEIADSDWAEAEKRYSAIKPLVNELSPGRAVVAERAKEVGVGIATLYRWLNRFKSMGVVSALIPQQRGWKAGKGRISGLTERVIQEVIDDVYLTPQRPTDQTVVLEVKRRCHERGLKAPSATAVRSRLAKIPERIRMRKRGYREKARNQFQATPGRFPNADYPLAYIQIDHTQVDIILVDDDLRLPAGRPWITLAIDVFSRMVTGYYLSYDPPSTTSVAMCMAHSILPKDDWLTLHGVEADWPVYGVPSTVHVDNGADFRSETFRKSCQMYGINLEYRPVRAPRYGGHIERLLGNFMKKVHELPGTTFSSVPERDEYDSEKHATMTRSEFEKWLVTLITRYYHNDRHSGLGIPPIKQWEIGIFGDKFTPGIGIPPQPGDKTTLLLNFLPAFRRTVQSFGVTVEGMHYYDEALRPWINAKDPDNSKRKRQLVFRRDPRDISYLWFFDPDLKQYFKIPFANLSLPPMSVWELRQAKEKLKAEGKTSYNEHLVLEAITDLRNQVDDAKHRTKKARRQAQRRKEHERKISPAEPIPSEAPKSAVNESWDDDLLDDSAEIRGFGDIS

SEQ ID NO: 3276 - protein, 376 aa, synthetic construct
  REGION 1..376: note = TnsF-Tn7 System Protein
MAAAYTWHSGSHALKAQWPVPTPILPDEILSSWLVRTALRQGCSPMTLAATIWPGWRMWTLDTDRSLSFDRLRILSMRSGIDPDAIRAATLHPTISKIQQNPLAKKATWPWTLTIGARNVKRRSGLQYCPLCLEEDASPYFRLNWRFAWHTGCQRHQCTLLDRCWNCQSPIEPHRLTELAPNATTCPTCGELLADALTEGIDPYAAALQQATDQALVTGFFRQPIAEGTVFDWFQLLNFFVSLIRRSACTNTDTQSHLFQLLDIDVPDGFPLHSGTNTEWLPIASRQALLRTVWSFITVSQEDFKSKLIESGISKQGLTEDIDSVPPAIQDLLHQLPDAKRKPRKTATTRKPGPRPRREVERMMARLQRKLEMRQR

SEQ ID NO: 3277 - protein, 298 aa, synthetic construct; identical to SEQ ID NO: 3062
  REGION 1..298: note = TnsF-Tn7 System Protein

SEQ ID NO: 3278 - protein, 298 aa, synthetic construct; identical to SEQ ID NO: 3062
  REGION 1..298: note = TnsF-Tn7 System Protein

SEQ ID NO: 3279 - protein, 772 aa, synthetic construct
  REGION 1..772: note = TnsF-Tn7 System Protein
MTDAWKEARRAQQAERYESAIAAAVTQLMTLLAALDVAAAESALDDARPISSRILEDLAAHLAAHPDALTSGDSHCPPVLLRMVHVLHAAGYEVVRPGCASCGGVRVDLPKIRAEGRICSPCDNRTRRGTCARCGRTDTHIAAKRPEGVICSSCYRTDPQVVEECRDCGRLRSPARRLPDGSALCGKCWERPEQPCAACSTAPTTAGEVCYECFSGFRRVRRPCGRCGRMRIIARNATGTCPDLCHSCYRGPQATCTRCGRERPCKGIAAGTPVCESCSARERPPATCSRCRRDRLITAHWPMGPVCDSCYVTILRTPAECPRCGDSHPLIARDGDGAEICGPCVGFTIDYVCRACGRSGHPFGKNRCAYCVLGDKLRVMLTGPDGHVPERLEPLIDAFCQVRVPAEAIRWTTRSPNAALLARLVADGRELSHDLLDELTPGRNEAYVRQVLVQTGVLPKRDEDLERLPSWLEHLLAGKPQAHARLVRPYLHWYLLRRARNRRARQRYPTAAGHELRRRVHVALEFLSWVDERKIPLRALRQRDIDQWLADGTTTRYLIRYFLAWTAQRRLTTQFTVPTIPLQQPVEFLDEDDRWSLLKRCLTDEEIPLDVRAAGALTLLFGLSNERLRYLTANQLRQRGQHFYLTVGNHPVVLPPRLGNLLQQLADQPLERPLLTSPPAQTRLLFPGMVPGRPIAARPFSRKLARYGINVRPARNAALAALATDLPAPILADILGMHTTTAVRWVTYVRRDWTAYLAARTDIQREQPATGD

SEQ ID NO: 3280 - protein, 820 aa, synthetic construct
  REGION 1..820: note = TnsF-Tn7 System Protein
MISEIVRSADPACERIDVAAVLQAVFRQRPQLRTLAEVLQARPDLLTSGRPEGPRAIERLVRALRDAGAEQLVLPRCGDCGRERPLTALGDGARICGACSNRRVARANPCVICGSITLAGRDRAGRPRCRAHPPWGATDPAQELAKLIAAGPFGISPATALQAIRQVERTRPGQLRLLWALEDTPGLLTGRGAEGPPKISVLARALIDHGASGVVVPSCPFCRRSTNLKQRRDGVRCCRPCWSESKIENCAVCGRARPIGGRRFDGRPVCGTCRQHDPFNHRPCSVCGMLRLRKSRTDDGGVCTACREIPTAICATCGQQGRCYFASTDAPKCLSCSAKERKQAVCVGCGKHRRVNNRTATGEPLCGNCGNKPKPCAGCGGTFRASGRNPEGEPLCQTCWAKHPAAHRPCSKCGSVERLYRHGRCAACVRSTDLREVLSSPGGTMRPELTPIFQALLAPPPRTVLRWIHKVPARRALLQALATGNGPVTHEALDRFAAAPTVEYLRAALVAAGALPARDEQLARLERWLAKTIARVSCTDERRILRNYTNWQPLRRLRSLPSGQLVTHGRAETVRVEIRNVARLLEWLHDGGTTLAACTQDQVDAWLGEGPTARATVRGFLLWTSRRGHSRPLTAPVISTYFAARTISKDHRWTLVRRLVRDEQLQVADRAAGLLLLLFAQPVGRISRLTTEHVLDRGDTLALKLGRVPVEVPAPLDDLVRQLVERRKGRAATVPLEEPKWLFHGIYPGQPIDPHTLGRRLKAIGVPPQLARHASLMDIASELPAVVISRLLGFHQATGDNWTRESQGFGADYAAEIGRR

SEQ ID NO: 3281 - protein, 772 aa, synthetic construct; identical to SEQ ID NO: 3279
  REGION 1..772: note = TnsF-Tn7 System Protein

SEQ ID NO: 3282 - protein, 368 aa, synthetic construct
  REGION 1..368: note = TnsF-Tn7 System Protein
MPGAELREASAQLVLLQGVSLLHPEDAVFEAMLEGWGRQQRGGRRLQPDTISDRQSAVRRFAEYTNAYPWQWSASDLDEWMTYLIAELKRAESTIRGYQGAIRMFCDYVTSPHYQWPAECETRFGAHPVQICHEWNTVAHLADYEGGAQRRPMTREEIQLFLDHADAQVDRAIRLGRKGALAAYRDATVFKLMYGWGTRCTETSRLDVTDFYRNPKAPELGNFGSLHVRYGKRTKGSPPRRRTTLSVMPWAVEAVEDYVINARPRYAAAPEQSALWLTERGGRLQAREIEERFAAYRDALGLDKSLVPHCLRHSHVTHQIEDGADPAFVQRQVGHRYASTTALYTGVSGDFMNTMMRKVLDRALQGGQ

SEQ ID NO: 3283 - protein, 374 aa, synthetic construct
  REGION 1..374: note = TnsF-Tn7 System Protein
MSQARDFPGAAHLVLADGVVHLDPEPAVFEAMLEGWARQQRTRFLKWDATIKPRLSLVRRFAEFADQYPWQWQPAEVEAFFDHLRVKNPTFTVSAGRNYQNQLRLFCEYITDTRYGWPDTCRARFGQVPVQILHEWNTVTHVSEYEGQPGRRPLTYDEIQALFDAADGRVDEIRSRRRKGALAAMRDSALLKTFYAYGLRRREACGLDMADLRRNPKAPDYGRHGALFVRWGKSANGSPPRRRTVFTVPEMDWVVGVLEHYLAEVRPRFEPGKHPALWVTERRGRLSRRSANEAFETARQAAGLPPELDLHCLRHSNITHLVEFDYPERFVQDQSGHLYASTTAIYTGVSDEYRNRLLQRKLTERNTELWEDGF

SEQ ID NO: 3284 - protein, 114 aa, synthetic construct
  REGION 1..114: note = TnsF-Tn7 System Protein
MTPKLDYRWHLREVMATRGMFSTTDLRPLLAERGIDLSPSQTYRLVVERPERLSLKTLMALLDILGCSMDELIEPVAAAGSRRRHSAAAGGGAAPGKDTGLGDLRPKRARIVPE

SEQ ID NO: 3285 - protein, 107 aa, synthetic construct
  REGION 1..107: note = TnsF-Tn7 System Protein
MIKKMGYRWHLRKLMAEREMFQTSDLVPLLAERGITLSREQVFRLVTQPPQRMSMDTFAALCDILDCQPNDLVEIQAVNVEVRKTIGGASGPAPMARRTSIRRPEGM

SEQ ID NO: 3286 - protein, 473 aa, synthetic construct
  REGION 1..473: note = TnsF-Tn7 System Protein
MNNNEHLPVIRCDECGRKMCKTHRKCNGHRYCSTCYLREFKKRPCPKCGRQARLLKREPNTVCRRCETDLPCIRCGKKQYPLGKITPYGPACASCSLYFRSQESCEVCGTLSSKLTRLSRFADGLRRCPKCARADFRTCPGCQKFRLLQPSQDGTLCRYCIRGRNICGTCGQSIPGGKGIRCDTCYWLDVANKKIKMNRNAFSNPLMASHFVNFGHWLMTYSGAKTTALCIQRYIPFFIEVEKKWGEIPSYEALVSYFHPERLRRVRRIMMWMEKTGLLHVIPQAREYAADSIRITNLLSKYSPHTTFGRLLAEYGSELQKRLSAGKTTIRSIRLALTPAVALVNLTEKFKTTYPTQAILDQYLLESPGQKAAITGFINFLNNKYSLHLIPKVDKAKVRKKRKTQLEKKLIQLTHEKSDPDFLAKWIPIALEYFHNFKTTKQTRSTIMNSEFTRDGDGIMLVLSQQEYFIPLP

SEQ ID NO: 3287 - protein, 637 aa, synthetic construct
  REGION 1..637: note = TnsF-Tn7 System Protein
MRQYNNKCDRLAFFITHEVVVPIAVLTATGLFEVSMPIQLPGRILRTNPSPRLVDSLADLNGNMVAWWYCGLYKNQKAQSQPLALVAFRELGKSGDLSDQLTYRRVPITALGQVRHGSIWSGGMCHGVHEFETERFQVDFLQGGWKFTSFNQAYEEERTSPFPNEIYPLEYDRDRNWLIQFFLPDDGTLVIPCLEFFTRCYGYSGELRRILMTYPWEGTGGCEDRIFCPIDEKEEQGKWKIKLSRDLRNGDAIFAAHAKYDGYTKFAAKEIYSRLESSFDPYFKKPSFIRIGPWFRGPALIKVRGISFNSGKSFLGLQIVGSSDPGGVPIIRDRVNRNNAETPAGPDAPGNAWHGAPNRQVWPSAEILDLTAYQEPDHGSATVDVEDPEFEVLGEPRIVHTRMDQQAQDTGGPSVESSDTTTVSAGEPHGDKKGIDRASIHSRPVMESHGTLRDMWNAMLYLSKKLPETITSVEWFSFSEGFQKDEEPHLIALEAFASKDDVDKTTRSWPYMDPKTQKDIRGILVARINCLGKHIYIVEIQRRLTRKKNKKGEFVDKETYRGLVFILNDNIDDDQRDKWIRFIQSEVRKVRGVVQKLTKYCPGKAASFKHNPSSRDTISCEGTLGNALEKMGIVLTR

SEQ ID NO: 3288 - protein, 473 aa, synthetic construct; identical to SEQ ID NO: 3286
  REGION 1..473: note = TnsF-Tn7 System Protein

SEQ ID NO: 3289 - protein, 474 aa, synthetic construct
  REGION 1..474: note = TnsF-Tn7 System Protein
MKINVIKPQEEPCSACGKISRIWRRYNGEGYCANCYAKWFPKKECSCCHQPKRIYLSSTVCWDCEKQTDCVRCGKAAGTFKIGKITRYGAVCNVCSRYFREERECFECGQLSRTMLRASESGHSELLCLKCFQKYRFATCKNCRRYRKVHDRDNQLCRKCSEQRTSQCPKCKQDMPAGYGNICADCSRRTLLFNLIRMNVHLFRHKKVKRAYKKFIFWYLAKCGVSVVLKKSDDHVLFFMRCDENWGNIPDYRELVTFFKPNGLRTHLTVLRWLLDTNQVKVDESLKEEMAELERIQSLFNKLSDSVPCLANYYTQLQHKYEAGKTSLKSVRLALQPAIDFISSESVSLLPTQEQLNSYLVAKTGQIAAITGFINHLNREYHCELEIDCSLIQKMKEKQLKQQAKQRLAILYKQEKLSIKEQNELLSVVLLNLHNIWIKSPKKLSISEIDGIAYYVDNEKKYFIPKDIHIRLME

SEQ ID NO: 3290 - protein, 220 aa, synthetic construct
  REGION 1..220: note = TnsF-Tn7 System Protein
MRKTHSFQQVRKIKPTWMSVSGHIPFKNGVSIPYESTLERDFLMYFTYLPSVDEIVSQPTTLPFVKNGITYTYTPDFFLSFTDGRKPMLIEVKPKAKWQKHWKEWKEKWKAAICFCQENGYVFHVYDEDRIRHLALFNLNYVQRYKRIQHEQEDIDVILAQVKLMGNTTIDYLLSRFFAGSLYRMKGLQIIYHLLATKQLHCNWFLPLNEFTEVWGNNDE

SEQ ID NO: 3291 - protein, 642 aa, synthetic construct
  REGION 1..642: note = TnsF-Tn7 System Protein
MMSNSGFTEKRYHHRLDRGRIILQKGNIYLNREDGEQYELVDYMDEPSQLLVRNLNTRTTKVVSIHQLENFKMNERTDLSVDLTAISNEYWEKAQQKYEAIKPLLGMDQHRPYAVKARAEDVGVNPRTLYRWLQAYNSIGSIAGLVDQKRGWQQGNSRLTPEQDKLIVQVINEFYLHKQRPTTEQTIREIRRRCKIEKVESPSKETIRMRILHISEEERLRKRGQREKARNKFKPKPNSFPDADYPLSVVQIDHTPVDLIIVDSKYRKPIGRPFLTVAIDIYSRMIVGYYLSLDAPSVTSVAMCIARGILPKERLLLDLGLQGSEWNAFGYPVKVHVDNGPDFQALDLSKSCSAHGIHLEFRPMGRPEYGGHIERVIGTFMKEVHSLAGTTFSNIKERDSYDSEKEAIMTLDEFEKWLVHYIVNVYHKRVHSALGISPEQKWKIGIFGDENEVGCGYPQLPVDEQTLLLDFLPSITRTIQHNGVTIDGLRYYDVALNMYISDSDESGKSKEFLFRRDPRNISKIWFYDPKLKRYFPIPFANQAMPEMSIWEYREVRSRIANKGDKYINEQQVLDGLTEMREMVAESAQRTKKARRQAERQKMHKASKPIIETKVETKAVVPVVVTSNLLALDDESLSFGEVD

SEQ ID NO: 3292 - protein, 603 aa, synthetic construct
  REGION 1..603: note = TnsF-Tn7 System Protein
MFYLNDTNFKREPYRGYCPTHLEKHFTKPRLDIRGNGYYSPNNEYVVAWYESDFIFKSDKAQAHAKVKFVNLTCPKYTGKNGAEYLSVLYISVPLNYLHYFTIGSIWKGGVAKEQFAFEEFYITVEPENQDGKRENLSIVLFGESKENGLEKPFDYTIYTIPTEYHNYGDDLNRLLSISYQNQKFIIHPLHIFMMHYGYSTDIKRILATYPLDEVRERLFIDKVVENFDVERYVVLPKYFVKKDAIFLYHFKYDKETTGTRVKNLVSQFRLNIRNQTYPIEIDFWHTQKVELKIRGIRLGNTVLCAEIIGLNQPEGEDITLVLSQSKREKSGDKTEEQNNDINHVPITRVYTREPELDELPLTDNSPDNRTVEYNKRQFELLGRQRQIRALKKAREESNRKMKVLTPDEIDSLGVGESDGRNGSVGLAFCFLDDTPVGKSSKLYKLWQHAKAVAEWNHGEAHWYTPNLGFKNEDELVPVSLETNKCFDYPEIAVIIRLQIYGETFFLIDFSMKQRDISIRGLGYKPDPNEDFLYESDMNKSELSELLSAVHHHEHLPKEYIEEKNKEKTKLTTFNHSEAESSNWAYNAVKKLTSKAITKPTYF

SEQ ID NO: 3293 - protein, 368 aa, synthetic construct
  REGION 1..368: note = TnsF-Tn7 System Protein
MGTTNKRLSQNNRIKKGVIHTPIYPNESISSWLIRAAFDCGTDPLTFTGFYWEKHRLWTLDLDRGLENIEPTIYDDVQALSGKIQLSEYSLCRRLYPINADETLAKGQVRWVIPRSARNRTHHIGQQYCPLCLDESPHLRNDWRLAWNFGCLKHNMMLANRCFCCGTLYQPHLLSAEKRHLNHCHQCGGKLEQGTMEMSLAEKLTLQGINQVLEKDSGICFGYTVSGKVWFDMLRYCINLLRRTSDRPNHALAKFVVNLQIDVENICSPKTGLSFEQLPLGERTNLLVNAYHILGMEAGSIRSAIYLCGGTQKTFMFEKYPDFWQEFMALAPAGPNRTRKRTKPQNESITAINRRWERLKRKLHLNNE

SEQ ID NO: 3294 - protein, 474 aa, synthetic construct; identical to SEQ ID NO: 3289
  REGION 1..474: note = TnsF-Tn7 System Protein

SEQ ID NO: 3295 - protein, 295 aa, synthetic construct
  REGION 1..295: note = TnsF-Tn7 System Protein
MQYEHVHEKFRHLVTADNQERIAFLDEPRWLGYGVAKDIMDNLVSLMNKPKRPRMLNLLIVGDSNNGKTTLIRRFFDLYGQAYIDSDSNAIYPILLAEAPPSANEKELYISLLERFYVPYKPTDTIAKLRYQAIHLFREFRVKMLIIDEFHSLLVGTPRLQRQVMNAIKMLCNELQIPIVGVGTRDAIRVLHTDPQQASRFDVAELPTWKLDKEFQKLLFQFQGILPLRKSSNLQSPELATKIHTISGGNLGNVHRLLTACAVQAITSGTEKITLDIIEKNSWVQPTNGYRKIIG

SEQ ID NO: 3296 - protein, 295 aa, synthetic construct; identical to SEQ ID NO: 3295
  REGION 1..295: note = TnsF-Tn7 System Protein

SEQ ID NO: 3297 - protein, 343 aa, synthetic construct
  REGION 1..343: note = TnsF-Tn7 System Protein
MLYDDGAGRLLCKRCLTKGTVACRTCGKPSPAGRGGECDDCYWNRLLSKRIDIAAVVFDRKENAEIFRAFGEWLREDAGAHPAAIKINRYFEFFLEMWSSGENIPDATTLLKHFSAGLLRKNFQPLRFLEEKGLVKITATDRMEVTERKRIKEIMAQSAETGSAHIFMIRYHDRLTERMREGVTGLSSVRLALSPALALLKTAIMNGRELPCQEDLLEYLGTAPGQRAAVSGFVCLLRDEFGAELALPSVKSLRCKIARRRPENRLDLERELMELMRSVDKSEKDRRKLVELSLRYFHRIPARMARKMAVEDQLVEIDGGDMAVLSGKKHYWLPKQLYYVTSF

SEQ ID NO: 3298 - protein, 343 aa, synthetic construct; identical to SEQ ID NO: 3297
  REGION 1..343: note = TnsF-Tn7 System Protein

SEQ ID NO: 3299 - protein, 248 aa, synthetic construct
  REGION 1..248: note = TnsF-Tn7 System Protein
MTAIKATKITKITATDFGNNKNSCDEVKEPHQVRRIRPTRRSVSGAYPFRGEESIPFESTLERDFLIRKEFSRFVMKIVPQPARIPFRASNEQEYHYTPDFLVYYRAEDYPGGLIPLLVEVKPRSELREHWHEMKPKFKAALRYAREQGWNFRIHDETRIRDQVFQNIYFLKRYKRMEFPAEEAALILDYLDRVGQAPFRHLIDIHFIGRTDTIVGISHVWHLLATGRLECDMTTPLGNDTVLWRPYD

SEQ ID NO: 3300 - protein, 638 aa, synthetic construct
  REGION 1..638: note = TnsF-Tn7 System Protein
MDTAGDEAGIGLDRRKINLTPGAFVLCGGVVYRIFEVVDFETIIGVDAESGKSRPLRLQDLKPCSDPGWDRHAAVLSDLEDITDLDWKVAEQRYEAIKPLLASDSGGRMSTVERAREVGVDPATLYRWVKRYRSIALLSTLIPMKRGWRSGAMRISKHAEAIIGEVLQDTFLTAQRPSPQKAVLEVLRRCRESGVDSPHPNTVRARIAALSEKQRLRGRGFKEKAKNKFLPAAGRFPNADYPLAVVQIDHTPADIILVDDIHRKPIGRPWITLAIDVFSRMVAGYYLSFDPPSETSVAMCVAHAILPKDEWLAVRGVDVRWDVWGVMDTIHVDNGADFRSNNFRQSCLAHGINLEFRPVKQPRYGGHIERMLGTLMKEIHSLPGTTFSSVREREGYDSEKHAAMTKTEFETWLVTLICKVYHQRLHAGIGMSPVKKWEIGMFGNAEVVGRGLPPRPADRQALLLDFLPSFRRTIQTYGVSIEGLNYYADVLRSWINSSEPKKPGSKREFIFRRDPRDISVVWFYDPDSRQYFRVPFANQALPTMSVWEYQQARSAAKREGMKSVDENRILRAITELRAQVEESRERTKKARRQSQRRREHEKGVSPARPEGMRPVQGPPAAALDNLLEDGVEAFDDIV

SEQ ID NO: 3301 - protein, 399 aa, synthetic construct
  REGION 1..399: note = TnsF-Tn7 System Protein
MRQGRHPNRRRNDHAGDNREQAMDSTYSWHPGTVRVTSRWAVPIDLLPDEIFSSWLVRAALANGCDPMVLTGAVWPRWRVWTGDLDRTIPDERLVVLAKESGIRSEAFKGVLLWPVFLAIMGEEPPLNGIWPWLIPTGSRNRKRSDGLQYCPRCLAEDRIPYYRLQWRFSWQTVCAKHGCGLLDRCHHCDAVLEPHRLILGTPHIGVCFTCRGTLADASTEIPKERYALRIQAATDNAIRNGGGEAFGDRVSVRSWFTALRFMREFVRLTMRSGTVAMTALAQRWPSAVDRRLDKTSFEGLRVGKRRAALDNIGWMMSMSFDELLDMMRSVGLSRRNLLGAGMPPSPAFRLLADKLAIGEDPFGKNRGVKGARRSPPPPKSRRQVEWQMTLLRRKMAGE

SEQ ID NO: 3302 - protein, 296 aa, synthetic construct
  REGION 1..296: note = TnsF-Tn7 System Protein
MYDYNHLHPEFFAVMGMSDEDRIAAMDYPRWIGYTRAAEILKVLEGLLKKPQRPRMPNLLVVGDSNNGKTTLIKRFGELHGVSYVTEDGDPVRPIIIAEAPTSADEKSLYVSVLERFWTPYRSTDSVAKLRYQLIHLMRACSVRMLIIDELHSLLTGSAVKQREVMNALKLLCNELSIPIVGVGTREAVRVLHTDPQHASRFDVASMPPWRLDPDFQRLLASFEKVLPLKKPSKLHVPAVAGRLHAISEGNIGNLHRLLVECAKDAIRTGEEMITPEIIESKQWIQPTRGIRELFG

SEQ ID NO: 3303 - protein, 296 aa, synthetic construct; identical to SEQ ID NO: 3302
  REGION 1..296: note = TnsF-Tn7 System Protein

SEQ ID NO: 3304 - protein, 636 aa, synthetic construct
  REGION 1..636: note = TnsF-Tn7 System Protein
MTDKTTSLSCDGCGIPLTGRIFSKRNAPKNGFCTSCYKKLPQVVCISCGKKHRTLKRAAFKCNACNTKERACVHCGENAFKGGRVIDGEITCAKCAHRVLSIRPCSVCHKKFKGTADWPESRPVCPECRNRLRKAKACAHCGTFSLFTSSDSKAGIHEPICSRCKTNARITCPSCHKYRRPAALDSKGRQICKDCHERGNKKFICPQCGKAGIKHSKSRCEDCYWLDYTIKTVSRCQSLLSNQWAKSCFADFIQSLVELKSPNQAAMKVERYFPFFAKIDTIFSSLDSLNAYALLDNFGPEGLRLFSMPYDYLSKEGLITPLTRDEINADSEKRAHINLINKADGKWYEKDVLAFYNHLETMAKRYADRGWKGDLARFKPRTITAALRAAILFYDHADAYNITSTRQVDQNIIDEFIYANPGYKNSLRALIRYINRHGKIFRKLKVEFHGRNIDANAFIPPKKYSDLIKKFLASEGKDTKKALIGIFMIMYAQPASRLVKLRMSDVLKGENGTFRMLFGEVELDLEPRIGDLFDRYLEHRHALSVMERDLDNEWLFPGRKYGCHISTAAVSCMIKEFGVTADQMYATAIFNFYQSGMRHPKVLVRAFGISVVTAIKYLKMINPRMFEEAESRQHAS

SEQ ID NO: 3305 - protein, 371 aa, synthetic construct
  REGION 1..371: note = TnsF-Tn7 System Protein
MSRKHLHVVDSSSFELNIPEAELELMEEMISAYEVRRLGSRNHKQKSVSSDTAVIRSFLTFIQKAPWNATTDDFDAWCYQIGREQKVATNSQRKYQSAVQGFYRYIVDNVKFQAAVLDRYNLRIIQLVTEENKIPHVHERQRTNERPAFTHQDFESFIGAIDVQIVEAYKFNSKEFLALQRDKVMFYSMYVMALRNSECCDLNLSSFRSNPNLPEFGDYGFASVWGKGSKGSGPKQRAVAIDHADLPPLLDWYVNDIRPQYLQKPHCDPNEEAFFLTERGSRMKSGSLNYRFKKILGYAGLSEKGFVPHCLRHTFTTHASSAGMSLEYSKIKLGHEYAATTQTYTHCGDEFVNREAVRYAQSIINRLSDDE

SEQ ID NO: 3306 - protein, 246 aa, synthetic construct
  REGION 1..246: note = TnsF-Tn7 System Protein
MRHKVAELLENLRLHGMGQTLEAELDRAERDGNAFSETLYRLLMEESRYRSEKSMANRLKQAKIPWDWTLETFPFKRQPAVNKGQIQELSGLNFIRRAENIVLIGSSGTGKSGLAIGLLRQALLAEYRGRFYNAQDLMDELYASLADASSTKLLKRLAAYDLLVIDELGYLTLKPEQANAFFKLMDQRYNRKATIITTNLDYPEWYNLFHRKPLVDALLDRLQHHCITLRINGKSLRAPESGNTSA

SEQ ID NO: 3307 - protein, 246 aa, synthetic construct; identical to SEQ ID NO: 3306
  REGION 1..246: note = TnsF-Tn7 System Protein

SEQ ID NO: 3308 - protein, 332 aa, synthetic construct
  REGION 1..332: note = TnsF-Tn7 System Protein
MRRRVRLNVELLEQTWVRSLFEAFCAWEELRKEAGNMTARIDRYAVFFAEIDRHCMAPGEVTQSHLFNIFGAERLRRGFLIVSFLCERLEIEWDAGALEDMIETKRIRLQAQSWQDRPWALDLQRFVEELQHRKGPSLKRKTIRMYQTAAGGLLETSGVNSPGELTQAGLQRYLKRHPGQAANLSAFVRYLREGSGVLLDLRYKPQASLLKKDRKLVEHVQAMVKQLEAETNELRAKALLVGLLAALYRVPAKEILTLTENDVLEDSEGFLLWPKNYELRVEGRLAKLLKRWVPSSTEGVNGFLFKGRNKVQPLTQDAVRHHLSISSKEVTD

SEQ ID NO: 3309 - protein, 226 aa, synthetic construct
  REGION 1..226: note = TnsF-Tn7 System Protein
MEQEINGLTSMRPVRSIGTSRRSVTGRVAFGGKSIPFESSLERDFLVLLDFDLAVEDVLEQPCRITFTDANGRERHYTPDFLVEYGDGERVIFEVKYRANLKDEWTSLKPRFRAAIRYAKQNGMRFSIATEVEIRGGAYLANARFLRPYRDYKWTPAIDEHLIKTLVTLGETTPESLLAAAYWTLENRIKAVSSLWRLVATRRIHADLYEPLTMATPIWTTLEDGL

SEQ ID NO: 3310 - protein, 356 aa, synthetic construct
  REGION 1..356: note = TnsF-Tn7 System Protein
MIGDTWPYCVQLQEDELLSSFLIRNARAHGTTPYCFLSYYWPGRHFWDRDTDRTADTDWLKELEVLAGVPAERLEASTLLPFRRVLGSTLRSGDTPLLLAVSLFHRTRRRHGLQFCPACFAEGRQWFRRTWRLGFVFVCPEHRIPLMDACPACGSPVVPHRSLSLDLSRCHECGAFLGGDYRGELPAAGVLEWQKMLLDTLVGSRVGVGPFERSEAFAAVRSLLSVLTARGVHKAIRETFRLPAATLGSERLQFEHARAVDRSVLMETLAAWLSDWPSSFRVGANAAHLTQRTFRRLNQLPSKLGLEVEGLPPGGERDRRYVPKVFDAKLMRLARLDKKAYRALRAQRLRALSGLS

SEQ ID NO: 3311 - protein, 644 aa, synthetic construct
  REGION 1..644: note = TnsF-Tn7 System Protein
MSEPAFLSMKPGSFVISQGKRFKITHMLGVDSVLAKNLETNAVERLRVDLIRPFKDEDLPDGVVAAGRDIEDICDEDWKEAQRRFAVIKPLLDDPGRTREKVRQAAEVEGVATGTLYDWIRAYNESGQLSALVPQKRGRKPGQTGLDSDLEEIIEAAIQEIYLSKQRQKPQDVVDHVALLCRNAGIKPPHANTVRNRLKRLRPKRVLRARGMGDKARNLYTPIRGNFPGAEFPLAVVQIDHTEADIIVVEEGTRQPMGRPTITLAIDVYSRMVTGCYVSMEKPSAVAAGMCLARSMMPKNEYLADLEVPGDWPVWGKIGTVHCDNAKEFRGAMLSNACEQYGIDLQMRPVKVPHYGGHIERLMGTSAGEFRKLPGATFSCPKERKGYDSEKESALTLREFEQRLVDFIVNVYHQRVHADLNVPPRRQWEIGLLGDTSQPGKGIPEVPSDPRRLRLDFLPFVERTVQPYGIVVDEIFYYHEVLNPWINAREPKRSKEKRKFIVRRDPRDISVVYFFDPEAHQYYEIPYRNTAHPPISVWELRAAQQRLKEEGRAHVDEDTIFEAISRMRERVEEAVTKTKAARRQQHRIKTTQKSAQARQKTADTPAPAQESLPAGGNAPTAAPSDADDIFSMPIQPFDDLAVKQ

SEQ ID NO: 3312 - protein, 666 aa, synthetic construct
  REGION 1..666: note = TnsF-Tn7 System Protein
MINFPIFENLDVSGYGLYPGRPDGEDGLRVDFAPGLTLILGTNGLGKTTLVTILYRLLTGPWEIPGLADRGPLGSVKLKPTKLSSSARRIFAKRVADGAAGATATLAIRLGDDRLRIERRLSDLALISFFVNDEDKGATEDAFQNEIKARVGVWSFGDWILLLRHLIFYFEDRRALVWDATAQRQILRFLFLQPSVAQEWTERERSILALDSRVRNLGAALSKEESTLSDAESAVAESGGVREELKTLGDLQQIDLAKRQEVDEALVDVESQRAEARLRLLTFEQERESCFRNYERAKLSAIEAKFPEKSETARYILAHLLTESDCLVCGNVAPDAMQAYQDRIINARCVVCNTDLSGTSATTTPSEMASARIEKAQAALLGAEKALSGAREHLEAAEKDYKTIRREIESLTAATSRRAQKIDRLVRSLPPEEAELHEQRSELRAMRARVLSLKSGLAEKRRDFHSFVEEVNFQIVRKSEQIKTTFDQFASGFLLETCHLVWSPQRARIGQTGDFFEFPAYELEMTGADFSAAVSRTGPEQVSESQREFIDLAFRMALIKVSASNQAGSLVIDAPESSLDAVFVSRAADVLGRFADPETQNRLVITSNLVEGRLIPDLLQKTTTTANRRTRVVDLFELARPTAAVQVLRTEYEDVRNRLLNSEFKE

SEQ ID NO: 3313 - protein, 666 aa, synthetic construct; identical to SEQ ID NO: 3312
  REGION 1..666: note = TnsF-Tn7 System Protein

SEQ ID NO: 3314 - protein, 296 aa, synthetic construct
  REGION 1..296: note = TnsF-Tn7 System Protein
MSDLDHLEPSIRGAMSLPTEERIAFAQQDRWIGYTKAQEALRTLSDLLAHPRTLRMPNLLLVGESGNGKTTIIDKFRELHPVVSQPGGEPLVPVATMGMPSEPVEARFWTELLLALKIAHRDSDPVQRKKNQAHSILTYVQCRMLVIDEIHNLLYGHARQQRHFLGVMKNLSNDLKLPIVAVGTRDAIRALHTDTQLSSRFEPFGLPRWQLDAEFLRLLASFERLLPLAKPSNLASRELAIKLHGMSGGTIGGLARILKRATVQAIRDRSEQITLKTLGQLDWVKLSDYGKQAQTL

SEQ ID NO: 3315 - protein, 296 aa, synthetic construct; identical to SEQ ID NO: 3314
  REGION 1..296: note = TnsF-Tn7 System Protein

SEQ ID NO: 3316 - protein, 596 aa, synthetic construct
  REGION 1..596: note = TnsF-Tn7 System Protein
MSTTPGANSRFRPPRTCFSCGVNKAAWTWPRVEYCYDCMPGGPFPAPPCERCGSSAYFSQGLCDRCHPGGPDHLGACRGCLAWGVYRQRSWLCSSCIWWRTHYPRGVCAYCHRESRIADQGACRLCVEQARMLQEPGRALDLAGANKHGQQLFFANMAFQRRRTPRAALTPDARPKGWKTPGGWNRPGPAPTTLIVSEWVQPTLIDVDPDPELVLQRTLIENSELTRYCAGIVREHAERFGWSKRQRNDVVRSLRLLQTLRDSPTAKIRASDALQLPRWGGSIVSTIDVLDAAGLLVEDRPRPIESYFTSKTTGLPAVMREQLDVWFQIMRHGSTTPPRRYPRHDQTIRTQLLGIAPILHTWAGAGITSLAQINTRMVNDALPDDLTQRHWADRGLRSVFLILKARKLVFADPMRQLPIVNTRATIPLPLDPAAVRTALNHPDPATALGIALVAFHALTNAQTRAIQLTDIIDGRLTLPDGRVIPLAGPVRVRLSAWLDQRTARWPRTINPHLFVTQHTAGRMNAPGHTFPWKKAGLNPQSLRTDRILAEIHATGGDVRRLCDLFGIGIESASRYAATLGHPTFREELPDPRPRLD

SEQ ID NO: 3317 - protein, 361 aa, synthetic construct
  REGION 1..361: note = TnsF-Tn7 System Protein
MALTPLRAVSGAPGAALRSPQALEDFEQELVDQYALAMAAAGISDGFITSSRATVFEFARSLSGPIWTAGYADGDRFLAEQRRLGRAQTTRAGKAGVIAQFYEFLVTRYLGDIRTATGAIVEQPIDEWNRPSGVSLGKVRVPPSDVEVTGFFERWRASVADARKYLPAARDYFAASLWRRLGLRISESVMLDIRDWRPDLGLTGKLHVRFGKGSRGRGYKPRLIPAINGADALIDWWLAEVRPQFGEDWKDPDAPLLPSERIDRERERPLRVGPNALRRALAEQTTLWLPSWEGRMTPHVLRHYCASSLYGAGMDLKALQELLGHNWLSTTSGYIHVRSEHIENAWQQANARTERRLGGEG

SEQ ID NO: 3318 - protein, 400 aa, synthetic construct
  REGION 1..400: note = TnsF-Tn7 System Protein
MITLEDWALIRRLASDGVPKAQIAARLGISRTTVIKAVNSDGPPKYERSPRPTSFTPFEVRVRALLAEHPRMPATVLAERVGWEGSIRWFRDNVVRLRPEHHPVDPADRLSWAAGDAAQCDLWFPPRKIPLEDGTTALLPVLVIVAAHSRFVTARMIPTRKTEDLLLGHWDLIQRLGAVPRRLIWDNESGIGQRGRLAQGVAAFAGTLATKVVQLRPYDPESKGIVERRNGWLETSFMPGRTFTSPADFNAQLEGWLERANARVVRTIKARPVDLIGHDRSRMLPLPPIPLQLGWRERVRLGRDYYVRLDASDYSVDPAAIGRFVDVIADLDRVRVRLEDRLVADHARVWARGSTITDPAHLEAAKRLRQQFQTPRPDPVDDLARDLADYDRAFGIEGVA

SEQ ID NO: 3319 - protein, 107 aa, synthetic construct
  REGION 1..107: note = TnsF-Tn7 System Protein
MLWNLRLKAAERGIWKSAELRRMLADAGLELSLGKMSALWTGTPTTVRLDDLDVICHVLACQPSDLLVPEPDKVAARKPAREKIAGASDVAPIVRPRPGNPRSMPPL

SEQ ID NO: 3320 - protein, 265 aa, synthetic construct
  REGION 1..265: note = TnsF-Tn7 System Protein
MATSKTSESVKQITYLAGALKAPRITEAAARMADQARDAGWSFEDYLAAVLEREVSARNASGAELRIKAAGFPSRKTLEDFDWDAQPATRQQIAALASGGFLLEAQNVVLLGPPGTGKTHLATALGIVAARHGHRVLFATATDWVTRLTDAHRQGNLPKELARLRRYGLIIVDEVGYLPFEQDAANLFFQLVSSRYEHASLILTSNLPFSSWGGVFGDQAVAAAMIDRIVHHADVLTLKGASYRLRGRGIDSLPSIRTTTDETPS

SEQ ID NO: 3321 - protein, 265 aa, synthetic construct; identical to SEQ ID NO: 3320
  REGION 1..265: note = TnsF-Tn7 System Protein

SEQ ID NO: 3322 - protein, 587 aa, synthetic construct
  REGION 1..587: note = TnsF-Tn7 System Protein
MEKAHSVHEGKGYCGTCYKREFKKIPCEQCGKTMRTLGGVGPAICKTCRTVDRKCVRCGKDVPRAGLIVEEGVVCSSCAKHFKEPQRCPVCGQLSLYLSRDLKNGFTEPVCQQCRRKGHINCPCCGKNRRPAGVTTDGRVVCAKCLETDGQPFVCPKCGKTGKRHSSTRCEACYWEEYVEKKLRAAVSLLSHSWAKDAFSKFVPALIDRVKPQGAAMRIERHFLFFAKLDACFASPAEATSVAMTSIFGQDGLRRHGAAYGFLVKEGVIPKQSADEIKAADAVIKQMRMVDACSGAWYHDIIKGFYTHLDQLSARYAKRGWTGDRTRFGHRTIIAALRAGIKFIASLDQEKVHSVQQIEQIHLDRFIANNMGYRHAVRAFVRYLNKTQKMFRKLKIDSVSTNLPPHIFLGHDRYVVLLQEWLNPTDETLKESIICLLMLLYAQRGNKIVRLRLADIMHGNDGSYRMQFGRTEITLDRRIGALFDRYLPARKALATMEDAWENAYLFTGRAPGDHLKEAAVSYYLKKYNVTAEQLFSTSILYAYLSGLRYPKVLVKAFGITDFTAIKYMNLINPRMRDELESKMAANG

SEQ ID NO: 3323 - protein, 378 aa, synthetic construct
  REGION 1..378: note = TnsF-Tn7 System Protein
MKQRDHLKVVEGDYVPSGELKQIIPEVDARLFAEIVEAYTVKRRGGQRHKIESIEDDLAQVNSMLLFTGKPPWYWTREDFEAWCDYKATSKRIAVTTQRKYQGGIRKFMEYLSGSVKFVADIQRLYGIRPVQICDSENCIPHVYERELSKERQPLSHDQIVTLLDAIDNAILEAIRFSSKDLRPLQRDKAMIYTMYVGGLRISEATGLNVGSFMPNPAFPQFGDYGFMSVWGKGSRGSGLKQRTVMIDHPLLPQLLDWYVTKVRPYFLRNADGNETAMFLSERGNRIRVNTAEARFQHVLELANLSGLGFSPHCLRHSSVTHGTVAGKSSEAMRRKHGHADAATTQRYCHMPDEFVRDEMENAISDHLDLILAAKEKK

SEQ ID NO: 3324 - protein, 552 aa, synthetic construct
  REGION 1..552: note = TnsF-Tn7 System Protein
MSFLTDDIMKGTDWRAMERAVARLMSHCGWGDVAIIGRSGDMGADIVGARDQSGARRTWVVQVKAIMGGGYVGKKGLDEVMQAQSVYGAHVAALATNGDFNTSVDKRKKELEKVGFEVKLWNGTFLRSLLEKWPEKHHLNRPLRKYQKDIADKSIQIFEEGGRRVQYVVATGLGKTVIAGEIARRLWDRGCRKILVLCHAQDLALQLEQGFWPQIGKSVPTRYFFDGAPPLIYEGVNFGLYQSLVGYLNGVEPGSFDVVIVDEAHHALSHGFRKCVEHLEPRFLIGMTATPWRGDGKSIDDLFGEPIARVSLVDGMAMGFLSQVDYRLYCDNIDWDAIPTLSRERHSIRDLNKRLFLPQRDEAVISEISRIAGEIRNPRIAVFSPSVAHAETFAKMLTARGLPCESLSISDRVERRKRLLAFSGGKLSAVTAVDVMNEGIDVPDVNMLVFLRATHSRRIFVQQLGRGLRLAHGKDKVVVLDFVSDIRRMAEVAELDQEARARGRKAENLFLRDGVVSFSDPAGQKFIEAWLADVADLSEAGDTEKLKFPEGL

SEQ ID NO: 3325 - protein, 552 aa, synthetic construct; identical to SEQ ID NO: 3324
  REGION 1..552: note = TnsF-Tn7 System Protein

SEQ ID NO: 3326 - protein, 587 aa, synthetic construct; identical to SEQ ID NO: 3322
  REGION 1..587: note = TnsF-Tn7 System Protein

SEQ ID NO: 3327 - protein, 319 aa, synthetic construct
  REGION 1..319: note = TnsF-Tn7 System Protein
MLAKVLSATVVGIEAILVDVEVDIAQGLPQFATVGLPDGAVKESKDRVKAALKNSGYDFPPKRITANLAPADLKKEGAAFDLPISIGILAATGVITGERLNHHALLGELSLDGSLKPVRGALPVAVAARKAGLAGLILPVENAAEAAVVEGIEVLPAATLGDVVQFLRGELEISPKQVDLHQLFQQQEEHGEDFCEVRGQDHAKRAIEVSAAGGHNLLMIGPPGSGKTMLARRIPSILPPLGFDEAIETTAVFSVSGLLESGHALVTTRPFRSPHHTISDVGLIGGGSSPRPGEVSLANHGLLFLDELPSFQYCQYSFQ

SEQ ID NO: 3328 - protein, 319 aa, synthetic construct; identical to SEQ ID NO: 3327
  REGION 1..319: note = TnsF-Tn7 System Protein

SEQ ID NO: 3329 - protein, 100 aa, synthetic construct
  REGION 1..100: note = TnsF-Tn7 System Protein
MAESWWLYMIECRGGGIYTGIAKDVQARYEQHAKGKGAKYTKMNPPIRLLGQVEFLSHKEAASEEWKIKRLTRAEKLNLLSSLYHTDSDEGSLLRIPNGT

SEQ ID NO: 3330 - protein, 799 aa, synthetic construct
  REGION 1..799: note = TnsF-Tn7 System Protein
MSGDLPQVLTDPVSVAVDIVHRADPLLDEGLVEKIVMGVAGRRAKRRRLAQALLDRPSVLTDGRSPAPRVVGDLLIALRAAGAVGTSPPVCATCGKHLRTQQRRDQDWYCGTCGPRREQCASCGNDRPVSSRDRDGRPRCVRCETHDDPLPVLLAVVATLDPNVNAGTIATALDAVSKRAGQRRRVAWIVQDQPELLTGAAADAPASSVLRLIDHLCQAGVNGVVQPPCPVCLRVVPLHRRIDGRWLCRSCVGKTRMIPCGRCGVRRQPCTRDSDGQPLCSSCVSREPANLEECTGCERRRPVAARTPDGPFCDTCRPWPVLTCASCGQTRPCKISQTTGQPYCKTCTSRWARCTNCSQVRPQRGGTKDAPLCAPCTRPEPGYWRTCPTCGQAGRRHTNRCARCTLHQRLDLLLSDEHGHIRPELQPLRDALRATERPGTLATWLSNDTRATLLQDLSTGKPVTHDVLDELPAGKTVDYLRAVLVAVGTLPERDEHMVRLERWIKRSLSSRDAPEDQQQTLRHYATWHVTRRLRRRTEGHHITFNQFVTAREHVRAAMLILDWLTARDLTLATCRQNHIDDWHADDTTTRHREAGQFLRWAKNQKLTTVEAPTSRWAGPTQALDSEARWEQARRLLHDQTVSTEDRVAGLLVLFYAQWTSAISRLTLDHIAITDGQVALHLGAQPILLPEPLAGLMLDLVRDRRSHPVTGQATSRWLFPGELPGRPISGRQLGERLRRHGLRPRQARSTALFQLATDLPAAVLARMLGIHISSAAAWQRASAGDWTSYAADIGRRTTKR

SEQ ID NO: 3331 - protein, 553 aa, synthetic construct
  REGION 1..553: note = TnsF-Tn7 System Protein
MIPPDQWHPVDGLTLEPNAMKAATMSNENVVVAAGPGAGKTELLAQRADFLLRTGQCPYPRRILAVSFKVDAARNLRERVRRRSGSQLAARFDSFTFHAFAKRLIDNFRPALTGQNALNPDYRIDPDTRIAREQITFADLVPLALEIVEANAYARGGIRQTYRHVFLDEFQDCTTQQYRLIKAAFGQSPALLTAVGDTKQRIMVWAGALDGVLQTFAEDFSARPLPLYQNFRSAPRLRRMQNRMIAQMDPEAVSPAQDLAGDDGIIEVLHFDTEHDEAQAVADLIEGWLKESVAPSEIAILVRQQPHLVAAALGSELRGRGIPFRNEQESQDLAAEPAAALVFNFIRVVADDRQPDAYAELMRIANRLSASEEEASRFDSQLKRMLGTARAAVRDPAFEAEKPGAWSPLVHEFLQLVSRPVLTALLPGYQQGKRLDDVIEQALEAFGRELVVDGNAVQALRRLSEVEAIRFLTIHKCKGLEFEKVVVLGVEEQLFWGSNLTTIMSEFFVAISRAKHHLVLTHASYRKRPEGTATRWDEWRIPRRELLRFSQED

SEQ ID NO: 3332 - protein, 553 aa, synthetic construct; identical to SEQ ID NO: 3331
  REGION 1..553: note = TnsF-Tn7 System Protein

SEQ ID NO: 3333 - protein, 799 aa, synthetic construct; identical to SEQ ID NO: 3330
  REGION 1..799: note = TnsF-Tn7 System Protein

SEQ ID NO: 3334 - protein, 645 aa, synthetic construct
  REGION 1..645: note = TnsF-Tn7 System Protein
MKITRLRLSNFQSFGPEPTAIDLDGLTYVLGPNGSGKTAALEALSRLFSPLAAERKIRLEDFHVPVDQRASEVQSGEPTLWLEVDVECPEAGADGQHASVPPNFSHMAIDTADGVPRIRVRLTASLAPDGVIDEKIEYVLEADEAGEPARCADMSRYDRGHIEVHYLPARRDPADHIAYTTASLIGRSLRAADWTTERKTLSDLTAQITASLATNTAVAGIGVQLTNEWLGLHRGTYFKEPSIAFGRGELEGVLRQLTVTFSPSHDGAPLPFERLSDGQKSLLYISLVLAWQSLARRVLNGEETSLDADRLRPPVHTVIALEEPENSLAPQYLGRIIRQLRGACSHGDVQSLIATHAPTLLRRVDPHSICFLRLNAARETTVHRIVLPDDDESAAKYVREAVQAYPELYFSRYVVLGEGDSEQVVLPRVLAAAGIAEDDASVSVVPLGGRHVNHFWRLLNELQIPYATLLDLDSGRYHGGWGRVRNALKQINKVRPGTYTEAQLSKLPKWDDDQDFPTLVDPGFKDGHGPIEALEQQGVFFSHPVDLDLMMLAAYPDAYGVDPKAPDEKTIVAVLGKSHVNETRLPDNVLELFDDYHGKFDLGSKPATHLAALADLSDEELLQELPDALDRLVEHVRASLAGLPE

SEQ ID NO: 3335 - protein, 645 aa, synthetic construct; identical to SEQ ID NO: 3334
  REGION 1..645: note = TnsF-Tn7 System Protein

SEQ ID NO: 3336 - protein, 304 aa, synthetic construct
  REGION 1..304: note = TnsF-Tn7 System Protein
MNRADVYRFIDAEKTTYPVRLLCRLLGVGHSAFYQWLRAGRQRATDRERHDHARVELTRQAWSEHRGVYGARRLTAELHERGHRWNRKAVARLMRLAGIEGAHRRRRGKPRRKAASTATAPDLVQRQFSTTAPNRLWVADISYLRTWEGFLYLAVVVDAYSRRVVGWAMADHLRTELILDAVGMAIQHRRPAREQLVHHSDRGTQYTSFEFGRTLRSCGVLASMGSVADCYDNAMAESFFATLKTELVYTRAWPSRHELEMEVFSYIEGFYNPRRRHSRLGNVSPDTYEKLHQESLTDIEVSGR

SEQ ID NO: 3337 - protein, 91 aa, synthetic construct
  REGION 1..91: note = TnsF-Tn7 System Protein
MFATTDLASPLAERGITLSASQIYRLVVERPERLSLKVLVALLDILDCTMEDLIEPVAAAKATRTNRAATGEEAGVGALRPKRARIVLAGD

SEQ ID NO: 3338 - protein, 486 aa, synthetic construct
  REGION 1..486: note = TnsF-Tn7 System Protein
MTSAGPPLLLCDECHCSGKKIHRIYKGRRFCSNCYVRLFKRTLCPGCGNYGRLPLFDTNSVCVRCESKAPCVRCQKIGKPVGLMTSYGPACNSCAHYFKEPETCDKCGELSSRLTRLLDLDSDVRCCPRCAREGAATCPSCRRHRFLIAGPDGQMRCKLCLANSDSQCLSCNKLVPAGRGNECEDCAWEKSFERRVRIHVEGFENIDTRERFSDFCRWLREHMGAHKAAVKMKHYLSFFSFLDTHSTEIPSYVLLLGYFGADGLRRMKTPMQWLKVRYGVEVDETLREEHSEKRRIEEMVASVPAGKGAEALTGYRAFLLNKQGEGGTTIRSVRLSLRAAKSVLAAASTTFEALPTQKSLSAYLTTTPGQRAAAQGFIGYLNRTHALSLKNEVSDRAVARAKIQKLESTMYAMYLSAGESEHFERTWIKTALMLFHGLPIVNKKTLSYSPLTEQGVAGFSVVVQHKTYWVPSPASAPNFIGLPNEE

SEQ ID NO: 3339 - protein, 465 aa, synthetic construct
  REGION 1..465: note = TnsF-Tn7 System Protein
MSIDGRNHQYPLFTKEYPLRVLPTDDVLSDVLCLTSSKGQKVLIPCIEFLYRCYGSTSDMARILVTYPWDRVTDLLYADTRKDAESWLVQPRPYIPNDDVLFLAWARYDTYAQNAAKLLYAQLDNARGREMKAASLQVKPWFQGPAELRVRGLWSEHEDTFLCLEVTGMSQPQSRSYDIRRDILSAQKQEDEAPHKIGRVKRELPKQHDPFAITDLLEPDKDSFTWSKPDPSFQILGPQCSYTTSFEERPSPPRRSVRVPPGDKSLLSTGDPTGYQKDVNKITAVAKRVVGDGGILTAMWEELIRLKGANKGLSSLAWQSETQGFVQEADFRLVSLPRFSEADSPSDAAWRWLAYPANANHARGMLVIRATIGNRTFYLIEFQRKKVLKKNVYGEEKISGLLMEINSATEAKLVISRIRDEIRFCSGNFRKLKTPINHPHWIYRHSPSTSKTVYHAFDHLNVSLA

SEQ ID NO: 3340 - protein, 486 aa, synthetic construct; identical to SEQ ID NO: 3338
  REGION 1..486: note = TnsF-Tn7 System Protein

SEQ ID NO: 3341 - protein, 129 aa, synthetic construct
  REGION 1..129: note = TnsF-Tn7 System Protein
MLIEVKPEENWRENWRNFLPKWKAAWRYAKQRGWDFHIYDESRIRGQSLKNIQYLERFRHADYAEQDLDAVMRTVAFKGIASIQYLLALHFQGEEALGKSHIFHLIATRQLDCDISGFLGDSLEVMVAE

SEQ ID NO: 3342 - protein, 638 aa, synthetic construct
  REGION 1..638: note = TnsF-Tn7 System Protein
MSDVVIEKPQGAKIDRSFVTISVGALACYQKETYRITQVLDFQSVLAINVETGRPAVLRIGELKSFLGDKVRGPYADHDLEDIGAEEWATAQKRYSVIAPLLGIEGQSRIVVEQRAKEAGVDTVTVYRWLRRFKEQGEVTALIPHKRGWGKGRPRIAQAVENIIAQTIDDYYLTEQRPDVASTAYEVRKRCKALKLSPPTVTTVKARIKKIPDRIRLRKRGDRELAGNKYDARPGGLDTEYPLQIVQIDHTPADMIIVDDVYRRAIGRPWLTLAICVYSRMVTGYYLSMDAPSAVSVAMCVVHSILPKEKWLALHGVEAEWPVWGKMGTLHSDNGADFKTVSLVQSCVNHDIQRAFRPKKSPHWGGHIERWMGTFAGINKKDRGTTFSNPGERREYDSEEKSIYTFEEYERRLVRNIIKYNNQFHEEIGEPPIKRWNSSFFGDKENDPLVPLPPRVADPWTFQLDFLPSVRRVIHPYGVELDAMYFAEALRPWIGATDPKTGKARKFLFRRDPRDINRIWFYDPALKEYFEIPIIRGRYTGVTVGEYVAAKKKARKLGRDSVNHDVIERMLDENKLQEVEAAQRTKSARKSAQKRTNNAKQTTPARPTPHVKPTPPPAVLPASGLLTVDDVDTFGEVW

SEQ ID NO: 3343 - protein, 244 aa, synthetic construct
  REGION 1..244: note = TnsF-Tn7 System Protein
MHNLWVNHTTECGLKSSSVASIAKCHSGSKPQPGEITLAHHGVLFLDELPEFDRKVLEVLREPLESGHIVISRARDRVSFPARFQLVAAMNPCPCGYLGEPSGRCRCTPEQIQRYRNKLSGPLLDRIDLHLTVAREATALNPLPQDGDNTATASTEVAEARERQQKRQGCANAFLDLPGLRKHCQLAKADESWLESACERLTLSLRAAHRLLKVARTLADLERVENIARHHLQEALQYRPAAMG

SEQ ID NO: 3344 - protein, 372 aa, synthetic construct
  REGION 1..372: note = TnsF-Tn7 System Protein
MDAPNQCRWSARANPVDAVWPLVPTLLQDEVISSWLVRCALAQGCGPTTLTSEAWPERRFWCNDPDRELTPKNIIILSRLSGIPTDALLASTLQPLYRLMAGTSLFPRGTVQWFLCLGCRSRRRCGGLQYCPLCFREQTPHYRIQSRLAWHTVCPAHGVSLLDHCESCLAPLCPQLLHPPEETIGRCHRCGYDLSRASPKVASDNALKFQSATDVIFFGAPARYGEYRLALAQWLSLSRWMIGILRSAMKAQSPCTKNFFRELGVSLESLRPPSTGLPFEFLGPSERADLLTNVWNMLQAGPDRMMLLAEQERIRASLLLPRSGEVPIPLAAFARPLQTKKRHSSIQSRLDEPRPPKSVLMRWHRLLRKFQR

SEQ ID NO: 3345 - protein, 297 aa, synthetic construct
  REGION 1..297: note = TnsF-Tn7 System Protein
MTEYAHISPQFRGLMVKSDLERIEFLDAPRWIDYQAAKSLMEILDGLLRKPERPRMPNLMLVGDSNSGKTTVVTRFRELSGQPFISDDAVSVRPVICAEIHKPDERELYNAILREFWAPHNPVAPLEKLRHQAIHLLRNARTRMLILDEVHTINNGSASKRMDVMNELKMLSNLLHIPLVLVGTRTALQLLVLDSQYSSRFEVVSLPNWSVNADFQRFLKSFESVLPLKNASRLYSPELTTLIHAISNGNTGDMEYLLRECAREAIRTGAEVIDRKLLEKNQWMRPTSADGVRVRIL

SEQ ID NO: 3346 - protein, 297 aa, synthetic construct; identical to SEQ ID NO: 3345
  REGION 1..297: note = TnsF-Tn7 System Protein

SEQ ID NO: 3347 - protein, 338 aa, synthetic construct
  REGION 1..338: note = TnsF-Tn7 System Protein
MSLGADGKMRCKLCIERGEIECLTCNKSMPAGRGKECEDCTWEKTFTRRALIQSEGYEHASVRAHFTEFCMWLNAHMGAHKAALKLKQYLPFFVFLDTSPTELPSYASLLEHFYADGLRRMQTPMLWLRERYGIQPDEALREEHSDKRRIEALIDSVPDSLGASALLGYRAYLMVKQRNGSTTIRSVRLSIRAAKSILASASETFDALPTQQTVTEYLTQTPGQKATSQGFIAYLNRTYDLSLNTNFSARAQLKARNKKLEAAMREMFMSKGEGDAFERRWIKTALMLLHDLPNVNKKALSFSPFSAQGEDGYKVVLGEKNYWVPRPGKLPWTAINFE

SEQ ID NO: 3348 - protein, 594 aa, synthetic construct
  REGION 1..594: note = TnsF-Tn7 System Protein
MRQRLKRISPRHNLCTTNDAEAIQGLPGAVVVWRYERIRKNFDAESVPFVDVHFKSLNHRDEPTDTHVIPIGIGRLASFRPGTIWQNGKCIAETDFGEDKEFTVNFTEDTFSYVSVAAEPGHPSYIADSVRGSAQTAPTVTDFLSFPLPDEKYLLVPCIEFLVRCYGSTPDIARILATHEWSSVQTELYASVEPNPETWLVWPAKHVHNDDALLLASMLYDPYAQIAAKEIYSKLDNAWGLKMKEMSLRVRPWFQGPATIQVRGRWVKGHKMFVCCEITGLSEPQNHPYDIRRIKYSRKDPRAEVVTEINRISVEIPKPQDPFEMTDMSEPDRNAAEWGKPDPGFRTIGPKCRFTLTPEERSYSERKVITHPLSPPAVVSTGDKVGNDTDVDKVRSTARRFAGDGGILNAIWTELRWLKGAVPGFSKLEWYSNHAFHEGPTFKLQSLPKFSDEDKPTEEARRWLAYADNANGSRCMLVICAVINSRSFYLFETQRKKIRKDKIYEEEASFGLLTEINEPALALEEISIICDKIRFCSGKFLALDGLNSTPLVFRHITGNSKFKANATLCSAFAKMNIELKRRGPDPEQAAGSTG

SEQ ID NO: 3349 - protein, 338 aa, synthetic construct; identical to SEQ ID NO: 3347
  REGION 1..338: note = TnsF-Tn7 System Protein

SEQ ID NO: 3350 - protein, 222 aa, synthetic construct
  REGION 1..222: note = TnsF-Tn7 System Protein
MDRNSCNQPPFSVARPIKSTTRSLSGVFAFRGASVAFESMLERDFLRRMEFRKDVLHVVSQPIAFDFVAWNGRSYTYTPDYLVRFHSHIRRRPMLIEVKPEENWRKNWREYLPKWKTAWRYAKQQGWEFHIYDESRIRGQSLKNIQFLERYRNADYAEVDLDAIVRTVAFKGFASIEYLTALHFQGEEELGKSHVLHLIATRKLDCDISGALDDSLEVVVAQ

SEQ ID NO: 3351 - protein, 639 aa, synthetic construct
  REGION 1..639: note = TnsF-Tn7 System Protein
MNKASSTEVQGLKIDRSFVSVNVGELVCHQKAVYRITQTLDFNSVLALDVETGRPVVLRVSELKPFVGNKTVGPYADYDLEDIGAEEWAIAQKRFAVIQPLLGIEGQSKRVVHARAKEAKVDPVTLYRWLRRYKEQGELTGLIPIKRGWGKGRTRISEDVEKVITDTLNEYYLTENRPDVASTVYQVRKRCRSLKLPQPAVSTVQARINKIPERTRLRKRGDIELASNKHDVRVGTLSTEYPLQIVQIDHSPIDLIIVDDVYRRPIGRPWLTVAICVNTRMITGYYLSMQAPSALSVAMCVVHSILPKEKWLALHGVNGEWPVWGKMTTLHSDNGRDFKTENLIRSLNNHAISKEFRPKGEKHWGGHIERFINSNSKHSKKDKGATFSNPLERREYDSEGNAIYTFAEFETRLIRNILKYHEEFHDELDMAPIRKWNQAFFGDKEYTPILPLPPRVADPWSFQLDFLPATHRVIHPYGVEWDAKYFAEALRPWVGVTDPETKKAQKFLFRRDPRDINRIWFKDPALNEYFEVPLLRSRYQGVTVAEYVTAKKKARTDGRGAVNLEIVDKYVDENKQQEIEAAEKTKSVRRRAQSRANNSKQSTPARPAPHAETTTGPKPIPPSSEMLSVDDVDTFGDVW

SEQ ID NO: 3352 - protein, 297 aa, synthetic construct
  REGION 1..297: note = TnsF-Tn7 System Protein
MTEYAHISLQFRDIMLKSDLDRIGFMDYPRWIEYRAGSALLDILDGLLRKPERPRMPNLMVIGDSNCGKTTVIRRFKDSSGKPYVSDDATSIRPVIYIEVHKPEERELYTAILSQFWAPHNPAAPLAKLRHQALHLLRQSRTRMLIIDEAHTINNGSPTRRLDTMNELKMLGNVLSIALVLVGTRNAAQLLVLDSQYASRYELVSLPAWSPNAEFQRFLKSFESILPLKQPSKLYSPELATFIHGISGGNTGNVEYLLRECAKEAIQKGCEVIDRKLLEKNQCMRPTRTDGTRERTL

SEQ ID NO: 3353 - protein, 297 aa, synthetic construct; identical to SEQ ID NO: 3352
  REGION 1..297: note = TnsF-Tn7 System Protein

SEQ ID NO: 3354 - protein, 286 aa, synthetic construct
  REGION 1..286: note = TnsF-Tn7 System Protein
MDQSALSMRIMSDAFGEFGTWLLARVGARKAAITIHRYLPFFMEMEREWQGIPTYSCLLWHFGAERLRRVRLPMTWLSEAKGLVPDVVAREENSEQLRIDAIVGSVLSATPAAQALNTYKQALAVKVAAGKATLRSLRLALRPAASLLLAADPKGQKLPNQAALDRYLLHAPGQKAAITGFVKMLNQCYNAGLVVRVNEKRVAVARRRGLEAELIALASGGMDERGLREKWLPVALAYFYRLPRSVCKAIAPSQIAIVAGECMAFTWNGEKYWIPVPSGKVVCRAT

SEQ ID NO: 3355 - protein, 286 aa, synthetic construct; identical to SEQ ID NO: 3354
  REGION 1..286: note = TnsF-Tn7 System Protein

SEQ ID NO: 3356 - protein, 226 aa, synthetic construct
  REGION 1..226: note = TnsF-Tn7 System Protein
MPVPSQTRKIGPTRRSVSGVYVFRGEAAIPFESTLERDFLIRTEWSVTVLDVIPQPCRVPFVSRDGRAFEYTPDYLVYYRLGDRAYPDYPRPALVEVKPAAEWHRRWRDWLPKWKAAWRYAQQQGWSFHICDESRIRDQALTNIRFLDPYRRMAFPAEESRMVVETVRRMGSSALHYLLARHFMGIYRSEGVAHIWHLLATRRLDCDIHKPLTEFTELWVPTDESA

SEQ ID NO: 3357 - protein, 640 aa, synthetic construct
  REGION 1..640: note = TnsF-Tn7 System Protein
MNQHNDPEVLREAFEPIRCAVDVQLGCLVQSGGKVYRISQVLDFESALGIDVESGRVTPLRIAELRPLDNALPPAAVDLSEIADEDWIIAERRFAAIKPLVTVLAPGRYEVEQRAGEVGVDASTLYRWLQRYRAYGDVSALIPKKRGWKAGNTRISPSAEEVIREVINDYYLTQQRPTPQKVIVEVKRRCEERGIVLPSPSTIRARIASIPERAHLRGRGFREKAKNKFLPAAGSFPNADYPLAVVQIDHTPADIILVDDVYRKPIGRPWITLAMDIYSRMVTGYYLSFDPPSETSVAMCVAHSMLPKDEWLLLHKVQADWPVWGRPRTIHVDNGADFRSNNFQRSCLAYGIHLEFRPVRQPRYGGHIERMLGTFLKEIHDLPGTTFSSIKDKEGYDSEKHAAMTKSEFEEWLVTLICKVYHQRLHAGIGMAPRKRWENGIFGEGGTPGVGLPPRPADRLTILLDFLPAFRRTVQTFGVTIDGMTYYAEALRPWINAQDPDDRKKKREFIFRRDPRDVSAIWFRDPDINQYFKIPFADQSLPSISIWELQAAKEQLKKEGAKSVDERQILRAVTELRSKVEEAQEKTKKARRQAQRRKEHEKRISPASPLSPPAAKPREPLPAMSSQLVDGDIDAFGDIA

SEQ ID NO: 3358 - protein, 668 aa, synthetic construct
  REGION 1..668: note = TnsF-Tn7 System Protein
MINFPVFEQLEVNDYGLYPGTSEQPGINIHFQPGLTLILGANGLGKTTLITILYRMLAGAYDLPRATLEAAELGGASLDVKPLNAWDKALFASRVQDLAAHATATLRLTIAQKTLTIRRNLKDLSLISFQYDKEKPVYDEAEYQKLLPKLSGVSSFGDWLLLLRHMVFYFEDRRELVWDASAQRHIYRMMFLSPEEAENWYSRERRILSLDSQYRNDTASLNRLKKRILAEDKALGDEASLRAELTSLTSLQEEDETRHTALSTDADALDAKRHELRRNLLAAELDVDRRARALESEKLALLRSYFPSDKQTAQHLYSLVIAQNHCAVCGHEAPAAAAELSERVAHLRCIVCGTDLAPDSSSGNVVSLSKEKVQSLYEKLDADRLRVTVLKSELENVSKKYDAVATRLIETRADIAERAKQISRIENALPQGNEKQAKAKSDLSSLSEALAGDKAELTKLADSFRDIVDKANTRILQHSDAIKRSFASYAGGFLAEDAQLKWSPISTTLGQTGIGKVSFPAFNLEMSGSNFTERTPRTGPQAVSESQREFIDLAFRMALIQVAGEGTGGSLVIDAPESSLDAFFVKRAASVLCRFGKPDTNNRLVVASNLIDGQLLPEMIKGGITPEDKKQRLVNLMSIAIPTAALRDNRSEYEEELQKILSSGGLHG

SEQ ID NO: 3359 - protein, 668 aa, synthetic construct; identical to SEQ ID NO: 3358
  REGION 1..668: note = TnsF-Tn7 System Protein

SEQ ID NO: 3360 - protein, 248 aa, synthetic construct
  REGION 1..248: note = TnsF-Tn7 System Protein
MISIATISPILTAVARICDDIVAAISKSNSGSTPRPGEISLAHHGVLFLDELPEFDRRVLESLREPLESGRIHISRAARQAEFPARFQLVAAMNPCPCGHHGAPSGRCRCTPEQVARYRGKLSGPLLDRIDLCIEVPAVPAESLQQAPDGEPSQVVRARVAAALVRQHARQGKPNAQLAPHEIDAHCRPDAAGAALLQQAAARLGLSARAFHRVQKVARTIADLAGADSIAAAHVAEAVQLRRQASQE

SEQ ID NO: 3361 - protein, 377 aa, synthetic construct
  REGION 1..377: note = TnsF-Tn7 System Protein
MGAPYTGHPGSDGVNQRWAIPVRLLPDELFSSWLVRASLVQGCDPLILTNAVWPRWRVWARDPDRGLSPTRLQALTEVSGIDEAVFEAASLLPTAQTVTGGSVAEFAIWPWVLAIGSRNRRRHGGLQCCSACLANDVVPYYRRQWRFAWHTSCRKHGVMLIDRCPECGAPLEPHRLVAEDSHLAICATCKFDLRRFASSRTDASAEAFQVAASETLAMLEGRYGEECLDPSEWFGLARWFVGLLRVAALRRSAMLATLVRALGVPPETLPVPITGLALELLPVRERADLFAAAWRLMIAGPDELLAAALAAPVTAKSVRQLRKPLPACLDEIVCNLPEGASRRRAKCQTPFTRPRSRRAVMRMWARLRRKAGMPLPC

SEQ ID NO: 3362 - protein, 296 aa, synthetic construct
  REGION 1..296: note = TnsF-Tn7 System Protein
MTNFDHIHPDFRHIMALSDKERMAFMDEPRWIAYPAANRILDSLRGLMDKPARPRMPNLLIVGDPNNGKTTIVRRFRDLHGEGYVNDDAEPVKPVIVAEAPPTADEKGLYISILERFFTPYRATDPTSKLRYQVIHLLRLCRTRVLLIDEFHSLLTGSAVKQREVMNAIKLLCNELAIPIVGVGTREAVRVLHTDPQHASRFDVVSLALWELNQDFQRLLAGFEKILPLKHASRLHQPELAAALHSVCGGNIGDLHRLLIECAKAAIESGKEQIDKGVIEDKAWVRPTRGIREVTA

SEQ ID NO: 3363 - protein, 296 aa, synthetic construct; identical to SEQ ID NO: 3362
  REGION 1..296: note = TnsF-Tn7 System Protein

SEQ ID NO: 3364 - protein, 479 aa, synthetic construct
  REGION 1..479: note = TnsF-Tn7 System Protein
MTEKSIICGGCDHAIDRAHKVYREIPYCNTCYSRLFKRRLCGGCGMFSRLFVREPDAVCTACIKKQPCVRCRRFGQPLGKLTANGPACSSCRTYFVDEEPCERCNRPSARLSRRHGNPEAPRLCPGCNSDHHTCSSCRRSRSCTATADGRWICKKCAENPSAPCGACGSAVAAGANGRCECCYWTQKCSIDADQLSHMVPRASIQKRFKEFAAWAATTTDPKRTALSLPRHVAFFVKLAALPERNDGGWRSDDLLGHFGTQGLRTHLLAARWLSEVLGVEIGAKKKIQASEARRFEEQLSELPEQPLPRQALMAFHQFLSKRVAQGDISVRTARLSFRPALDLASLAGDQLPAQDDVTHYLMKAPGQRAALFAFATFLRETLGVNLAVPKSSARTIFHRRRRQLEVQIRQMLFEEDRSTDFDQRWRPVALMYFHWISLKQAQRLLAEGKLSTAYGGVELEHGAERYWIPDPSPMYRGSR

SEQ ID NO: 3365 - protein, 479 aa, synthetic construct; identical to SEQ ID NO: 3364
  REGION 1..479: note = TnsF-Tn7 System Protein

SEQ ID NO: 3366 - protein, 243 aa, synthetic construct
  REGION 1..243: note = TnsF-Tn7 System Protein
MSKLAATAQKTSSNKCDSTDLPRSVRKIPRSYRNVTGHVFFRDGEPGVPFESPLEKDYLLLQRFSLAVAHVVSQPCAVAFVGPSGRKYTYTPDFLVTYRHTPGSLKQQRKPLLVEVKPTADWKANWREWSAKWKAARRYAIEMGWRFTIMDDRRIRTLALDNIKFLRRYEDLEFEEALNLCILEDLEELGLIEFEYLLNKYFTPAHRAEGVAQLWSLVANRRIECDVCWPLNLNTELWIPTNE

SEQ ID NO: 3367 - protein, 653 aa, synthetic construct
  REGION 1..653: note = TnsF-Tn7 System Protein
MSEAIESEAGSTSAVTKNLATFSTGPGALVKHASGIFRVVEVLGLESVFARNVDTGRPDVLRLFELEPLGNEIPPMSMEDIAAVNDEDWQVARARFEIIRPLIEAGHLTRSVVSEHAARVGKDTSTLYRWLSKYRNFDAVSSLLEGKRGWKKGNWRLDAHAERALRAVIDEYYMTAEAPSLTKTHRLLAIKCREYKVEAPSPTALKARIDAIPLEERMKKRGKKEAAKQRFQATPGTAPDVDFPLSRVEIDHTRVDVILVDDVYRKPIGRPWITLAMDGFSRMVLGFYLSFDAPSRTSSAMCMAHAILPKEEGLLKLGIDAVWPAWGRPKLIVSDNGPEFRSSDFIRACTELGIDLHWRPACTPRFGGRIERLQGTLMREIHDIPGTTFSNVEQRGEYDSEGRAIMNLSEFERQLVKVICNEYHRRPHSAIGMTPLRKWEQGLLGGPTARGTGLPSRTQDKHALMLHFMPSFERTIQKDGVTLDNLRYFDHCLRPWIGQEDTETKASPKLRFRRDPRDLSALWFFDPDVKQYFRVPWVYTEDSISIWEHRRAQKELKDQGFDPGDVDAVFESIKSRREDIAESAAKTKRARREQQRNSEHRKVAKSAGSPAPSASPPAGKGFVSSSPPTARQSGEVGFSGMTDAPIAPTLDIG

SEQ ID NO: 3368 - protein, 611 aa, synthetic construct
  REGION 1..611: note = TnsF-Tn7 System Protein
MQNPRKDVALPHIEVLFRDLRPDNTFGEFFSRTMAITSLPLLSIGSIWSNKRSTSQIRYQRRLFTVDFSDGKYDFVSMAGSGGNLPFPPEKYLLRKHGRDRSEMVRLTTAKGLTLLIPAAVFLARCYGRSGRLTRLLTQHSLKNCLPMMCSTILGSSSSRWQLRLHPGMYQDDALLLGHLLFEEQTRERVNELFQQLQAVVRPRKPATATTGSADGRWSEHESEDWFREVAFPKIHPWWHGTAQLEVEGLQVDEQTFLGLRITGMSQPSGPPIEVVRDQALTEEDDGVDERRENGEIGPGGYYRRQFDADDKAEASLVDLEAPTTSSSSVLMRDPKMQILGVAREIVSRSQEGGERKPRGTLIPQEEPADQASAAERGGSQAGGVSYASHHSAIELKSYGTLRDLWEGLRFLATEHPQQVMTLSWFTREDDFVDVNPRWDSRPPRLQPLRIPGLSDHEALPGGDSWGYVDVDGRTPRGVLIARVQTPDRTIFILDVERRSKATPEGGLEELENDKYSGLAIALKRPNDIDAWLPRLLEAIREHRGVMERVLPYCPGDPKVDFRHSKAQGERVSGHAAALNALRKAGLELGKLQLKRDTKGPISGPRRHGTG

SEQ ID NO: 3369 - protein, 347 aa, synthetic construct
  REGION 1..347: note = TnsF-Tn7 System Protein
MPSAPEACTAPRSCEARLPEGDCVIRLAPIQVDETLSSWLLRSAVAARCEPLTLTGVIWPGWRAWTVDLDRGLSDARLDALHRACGVDAERIRACEMRDLLRPLGASLSHAEPVWPWLAARGMRNRRNAGGQPFCPECLASDVRPYLRRAWRAAWNVGCLNHGCELLEHCCKCLAVHQPFRDTPRPVSLTSCWNCQFDHRSAIASRLDPWAAEMQARADTVLKCGTGALGSLEVATPAWFGVLQHCVRLKQPKELMVNGNPPVPIGPGLRFELLSVRERHLRLGRVASQLAQMTSQDVSCLLAGPQHPRSGEKRRSPTFRPNSGARPAGLVRQEWARLLRRMHRAYL

SEQ ID NO: 3370 - protein, 301 aa, synthetic construct
  REGION 1..301: note = TnsF-Tn7 System Protein
MSSPTSSGPYDHVNEKFRHVMQLTDAQRLAFIEEDRWVGYGRAKEVLDVFTGVLNAPSRIRPKNYLLIGEPNNGKTTLMYRFAQQCGEPFIDEEREAVKPVIIAQAPPTPDEKGLYATILDQFWTAYRATSPAITLRNQVVQQLRDCKVRMIFIDEFHSLLGGTRKKQGEVMNAIKYLSNVCGVPIIGIGTANAVQVLYTDPQHTSRFEVLPLPLWDADEKFQTLLAGFESVLPLRKASHLSTVRLASLLHTNSGGVLGDLQFLLQELAKNAIKTGIEQITEDAIRARGMYRTAKLRGKAA

SEQ ID NO: 3371 - protein, 301 aa, synthetic construct; identical to SEQ ID NO: 3370
  REGION 1..301: note = TnsF-Tn7 System Protein

SEQ ID NO: 3372 - protein, 285 aa, synthetic construct
  REGION 1..285: note = TnsF-Tn7 System Protein
MFADSFSSPHMAKRFEDFTSWLVATTGAQKTALKLERFLPLFLDIEQRWGDIPNYAELVAAFGVVRLRRSLLALRWMEETGRLVVDEKVKREGSDRRRILTTLAMFDRSSHGFALLSGFHNVMIAEQQLQGTSMRTVRLSMTAAAGMLRRASVMKLMPPTQAVLDSYLTRTPGQRAAVTRFVRYLVEHTAIEMQIPPTNPARAHQLKRRRQERRVLRLMDKPLTDAVSTRRWLGAALSYFHGLDAAVARAVKLEQISRRDGGLLVEWKGDEYWVPIVGRAANSGP

SEQ ID NO: 3373 - protein, 285 aa, synthetic construct; identical to SEQ ID NO: 3372
  REGION 1..285: note = TnsF-Tn7 System Protein

SEQ ID NO: 3374 - protein, 222 aa, synthetic construct
  REGION 1..222: note = TnsF-Tn7 System Protein
MTINKDDCHTEDNAPPARKIGPTRRSVSGQYVFRGKKGVAFESTLERDFIIRMEFILAVDGLRSQPVTIPFTGHQGRTFPYTPDFLVRYRRGLAQTELYEVKSYAEWSQNWRKWKSKWKAARRYAKQQGWRFRIFDESRIHDVVFENARYLERYKAMTVPPDTTEPVLSSVPVHQKISIGRLLDEHPRHVVLHLIAIRTLDFDVNEPLDPLDLGLTVWRTES

SEQ ID NO: 3375 - protein, 644 aa, synthetic construct
  REGION 1..644: note = TnsF-Tn7 System Protein
MENRVVKKRGEIKRIEIDRSSVPLSVGSFVKSGEATYQIVYVVNLSNVIGRNTSSSEEEVLKIDSLEPVPEPGAASREGTNEELVLIENAYWEKANKRFEAIRPLTDKPNRSRKDVVLRAQSLKMDPSTLYRWLTRYERFGTVLALVPKKRGWKKGASRISPEVEHIIKGVIEDYYLTSERHSTAKAIREVELRCRAQKIEPPSHMTVRMRIDQISERKKLQKRGFSEKARNKFAAVPGTFPNATFPLAVVEIDHHLMDIQLVSDDLRLPIGRPWLTLSIDVFSRMVTGWFLSMDSPSEYAVGQCIATSILPKEKLLEALGVEADWPVWGKPKTIHADNGSDFRSTSFMRSCENYGINLEFRPVKRPHYGGHVERFFRTLAQNVESLPGRTGSKHTSKGDDDPEKNASMTRTEFERWVVDFICNQYHLSRHSELGVPPYMQWKFGIFGGKNQPPLGMQNRIADSQTLRLDFYPSVYRVVKRTGVSLNNVTYYHDVLDPFINQTDPKGKEKIKSLFRYDIADISHIWFFCEKTRKYIQIPSFPKIKHGTSLAEYDRSRKELAAEADSHDFVEKIDLSVERNRRLVEDSQAKKKSARIEQQKSVDRKKSVVRRTVLAPISAPVGASKTAGSHFVDDSLIEPPEDVR

SEQ ID NO: 3376 - protein, 293 aa, synthetic construct
  REGION 1..293: note = TnsF-Tn7 System Protein
MNEYPHVAGAFQYVFNMPDEDRMRFIDEDRWVPYSAAKEIVDELVELLRMPRRNKMDCLVIVGESNIGKTQLIRQFVKEHGQPYVAGDETIFPVVLVESPATPSEKGLLMAILESMKAPYSGRDNREKLKYQVENLFARCKVKMLIIDEFHSMGRGSPLKKQEALNIIKSLCNVLSLPIVGVGTSDVESFLSVDKQMESRFQTRRLRRWEANRDFQKLLSGFEQTLPLRNASNLKNGGSAELLFELCKGNLGDLHRFLRKCAKHAIQTGAEVIDVNLIKEVRDRESRLALGSR

SEQ ID NO: 3377 - protein, 293 aa, synthetic construct; identical to SEQ ID NO: 3376
  REGION 1..293: note = TnsF-Tn7 System Protein

SEQ ID NO: 3378 - protein, 544 aa, synthetic construct
  REGION 1..544: note = TnsF-Tn7 System Protein
MGKGQRDCATCGAPVGYKDRSLCWRCSRMAREAAARHPCPGCAKARILLPGSGMCAVCSRRCQSCGARVRRLEPTLCKTCRRKAAAAAAKSPCPRCGRPGIIREATGWCGTCSRPKPGRRAPRTCGQCSAATTHPTNGLCPACWQRHPDRPRIRAQHLIDRLEVVPPWLAGFAENVIDVYCPARAAQLIARLAQLLDGEQSQRPHDVLERARTPGRSIGPLARALQDYFVRNHLALATDHDALLAQGRRQRRIDATPEPLRPAAAAFAASLLTANDRARRARTKPRSDSTIQHALATVRDLAIFLNDGGNTQWSLVDRGDVEAFLATVGTGHRPRSLTVLRQFFQWARTNRLVLVDPTTGLRIRQHRGFTGCTIPVDRQRALYRRWTTDTSTHPHEALVGLLALLHGVSSLEARTLTVHDIDTSTRAASLGNRPYPTPLDPATWDALQRAVQHRDSLRTANPHVIVTRGTKPDSRPASPAYLAHILDPVGLSPRALRVTRLADLVNTMDPKLVACAYGLNPEGVLDYLADHVDPPRMHDPGPNP

SEQ ID NO: 3379 - protein, 354 aa, synthetic construct
  REGION 1..354: note = TnsF-Tn7 System Protein
MDGAGLRLVKGEPMSVSAAVRDPEVYQEECLRAYVASWTARGFSATTIENEQGVLARALDLLARPAWQVGAEDVDAMVAALAEDGLAASTRRGYVQAFKGFHRFLQVRRAAEIEALFGARLSCPVDEFNAARHVGDDSPAVLPPPTPARVEEFFEFLKGRIATARKYAPAARDYALFRTLYHAGLRAEESSALEIADVHFGRGPFGKLHVRFGKGARTSGPRPRWVPMLDGLDLVLRWYLSDVRGRLPDTAVLFADESGGSLHRGTIRNRLRYLMTLEGKPATEWFSPHALRRACATHNYERGVDLVAIQQMLGHWTVGSTMRYVRPSATFIEDAYRRAVSDTVSVLAQEGDRS

SEQ ID NO: 3380 - protein, 911 aa, synthetic construct
  REGION 1..911: note = TnsF-Tn7 System Protein
MHGGVKFYRGSAAAARSYVEADHSRADDYYLAEGSGLAQHHVATVDGDDTARLERHPDLDGDGYERWVAGYDTATGRAKGRLRDDEHALRFVEVVVNGPKTWSLAAALHPEIAEAYDSAQSRAAGEIIGWVAEHSTTRVGTRGRQVQVPVEEIEAAVVRHYTSRAGDPHRHLHLQINSRVFAAGAWRGLHSVGVRDSIEAINGIGRAAMMCDPEFRAGLAARGYTLDDAGEIRELAPFAARFSERATQIARNVDRYEAEWRASQPGQEPGPKLRRSWDRRAWADARPDKVFPTSGADLVVRWNEVLHDLGFHETHQAVSVQSTPIGAIDRDVAVEVILSRLGAKRSAWNAADIRGETEKLIASVGIVAEHPARTELAEDITSRAVAASRPLLERDDVPDHVRALTSTQVLAIEAALIQRLAIRAEQPVTPARRVRLPAGLVDRLDPGQRRAVAALAGHAGLLVIEGAAGTGKTTTLAAARAALDAQERRLVVVTPTLKAAETARQQVGADAFSAAWLAHQQGHRWDEDGHWTHTTPPPEHIAPEARLLPGDVLLVDEAGMLDQDTAHALLAIADHASAGVVFLGDRHQLPAVGRGGVLDLATRWAPDQARLELGAVHRFIDPAYADLSLLMRTGERSDEVFDELVERGQIVLHPTEVERTAALAAVEGLVIADTREQVSALNAVIRDDHHRCIQSSGPNGEPSGERSSARPGEPVTGAGERIGLGDRVATRRNDRGLGVANRDTWTVAGIGVEGSLLVTGRTGERHLPADYVRDHVELAYCTTVHGAQGDTVDYAHFALGETTGAAAAYVAMTRGRHTNTAHLVADDLDAARRQWVEVFSRDRADLGPAHAAEIAAEGIERYGPRAPTRAHAGPAALQAGALPAPPRCRPRPPEPPLAQPPAHRHGPGIGF

SEQ ID NO: 3381 - protein, 911 aa, synthetic construct; identical to SEQ ID NO: 3380
  REGION 1..911: note = TnsF-Tn7 System Protein

SEQ ID NO: 3382 - protein, 104 aa, synthetic construct
  REGION 1..104: note = TnsF-Tn7 System Protein
MRIKWRLRMAAAQREVWTGAQLRRLLSEKAGLEMSSASVSVLLTREPAQVKLSTLLALCTALECTPNDLFEIDTTPVEQPARPVASATPKPATAAGRGRSMPPL

SEQ ID NO: 3383 - protein, 611 aa, synthetic construct
  REGION 1..611: note = TnsF-Tn7 System Protein
MTTASEHPCSECGNRAPRVKRLPGGGGLCRPCYNVSRRVECSHCGRVRPPSARTENGAPLCGHCARPKRACARCGRVDHVTAIVDGEDLCQRCYPAPVRACGHCGRERRIATRRQDGVADLCHRCYRTTIAECVICQEERAIHTTWPLGPVCGLCYRHELRNPDDCGSCGQVKVLIGRNDLGERICGPCGGSERDYLCGTCGAAGDQHFENTCVPCSVIRAAGDLLAAATGVIPARLAGLPDALAHRGRVDSTMRWLLKPTPRALLQAIGTEESITHASVDACSPGQARHHLRALLVDVGVLPVRDEQTQRLETWAEEYLTQLPPHHAAVITPYAQWRVLRTVRRRAARRRTSIGVADSARERIRAAARLLHYLEQDGDGLFSLTQDALDRWTGGNAARSAAIAQFISWLSSTGLHPGLRVERGKMVKPSEISDAEEHHALIRSFIAGSDDTVNLATRVAALLVLLYGARIDRIHRLTTADTSTGGGRTYLALSAEPIELPGPVAQLLARLVGDAERDSRALRRDGEGSHLFVSPRRQHEPIHPTTLGRWMARAGVSPRIARNYAMLALTSDLPAAVVATQVGITAQAASRWAQFSQRDSAEYIAARVGLL

SEQ ID NO: 3384 - protein, 611 aa, synthetic construct; identical to SEQ ID NO: 3383
  REGION 1..611: note = TnsF-Tn7 System Protein

SEQ ID NO: 3385 - protein, 683 aa, synthetic construct
  REGION 1..683: note = TnsF-Tn7 System Protein
MLPRRQVTGIFPALVVMAAAVVLTGVNMQSRFTDAIAWVWVAAVVIATASIASGIRTYQRQSRLDPGIEAVLPSLGAQRPSRDLVRAVKWTRGWVGVPRKVTIRYASHVDDRDVRFVDQIVTSFSRRIGEEYRVLKHVPRRCLLVLELAPPTTPVSREYQRAEQVAKVLLGESSTVDITADPDNGEVQRMKVKYDMGPRLAIPARRMQIEKLLSSMLPGRWRAHWDLEGDEVTFEIRPPMPDLVLHEPAPSTKQLTHAEYKAFMIPIGIDEDGKCQYWQPSVSPHMLVIGGTGSGKTSFQHTVLTHLAQARWRVWVLDGKRIEFAGFRTWPNVELVAARVEHQVRMLHAAHELMEQRYTQLEQGTARLEDFEPLALIIDEYATFKARVQRWYKTVKPKGAPTQAPVLELLSDLARLARSAKIHMLLGIQRPDVEFLGGEMRDNFGARLSLGRLSPQGAMMMWDSPAIGVALPRNRRGRGVTLSAESLPVEVQTFYTPDPAKLDKSDTRDWEHLRTLTPLETDHPRKTIAEPSSLIDGDEEIPPTYNDWSTTRITLFDGIEQPAVEPPAALPSNVVALGARKPGNVRFEPEPVDVEDDDAAAAAADDDEGYGEISEGLAGDLEVGDLVLSDSTLGVWVVVESVEPDIVDEDAMAIEYRELDSGDEGLMTVSDNEVLTYRRPAAA

SEQ ID NO: 3386 - protein, 683 aa, synthetic construct; identical to SEQ ID NO: 3385
  REGION 1..683: note = TnsF-Tn7 System Protein

SEQ ID NO: 3387 - protein, 316 aa, synthetic construct
  REGION 1..316: note = TnsF-Tn7 System Protein
MDFTGMYPWQWTPAEGEAWISDLRSGAKPLRVSTLRGYEIDIRMFCEFISDPRYPWTLECEEQFGVAPQQVFFEDNSIVHVSEYEGDAARRPLTFDEVQALFDAADGLAARIRSRRRKGAVQAVRDAALLKSVYAFGLRRREAVMLDLVDLRRNAKLPHLDRFGAVSVRHGKASRGGPSKRRTVLTVPEMGWIAESLAHYLEEVRPALSSAPGSSPALWVTERGTRLSRRAANEAFCSARDAAGIDSSLDLHSLRHSYVTHLVEFDYPERFIQEQVGHSFSSTTAIYVGVSNEYRNRLLTQAIHTRYGADFEEAAR

SEQ ID NO: 3388 - protein, 106 aa, synthetic construct
  REGION 1..106: note = TnsF-Tn7 System Protein
MDYVWHLRAKMAERGMFATTDLQPRLAERGLALSREQTYRLVTGQPQRLSMATLIALCDILECTPNDLIEPRIVEASAKKVAGDVNPVKSRVSARRTTINRPGHAQ

SEQ ID NO: 3389 - protein, 460 aa, synthetic construct
  REGION 1..460: note = TnsF-Tn7 System Protein
MCGPCFYEAMRTFGACPGCGVDRLLPGRVDNDDQPVCVACAGISDDFHCRVCESEGEFYRLGICARCALRDDLTTLLLKDAADPTAMEKLVDALCSVDRPESIFVWKRPAQVQDLLCRLATGALPLNHEAFDAEDGGPRVNHLRRVLEHHGLLPSRDERLAHFEAWLAAKLDLITEKAVRQPVEQFARWHHLPRIRKLSAAGKDTRGPVHASKQDVTEAIKFLTWLKDTHNRSVQDCNQQDVDEWLGTGPTTRHLVRTFLVWARKARINQSVSIGHRQAKTVRTLTQEQRLEWLRELLTGTSESLPYRVAAVLLLLYAQPLVKIAALRTTDVVVTPDELRLALSSEPVPVPAPFDQLLRQHLASRPNLRTTAGTTSDLMFPGYRPGQHLHPNTLMTRIRDLGIDLLGARTTAIRTLVTQVPPPLIAEMLGYSHQIAHKHAALAAQPWTRYAADRAASATD

SEQ ID NO: 3390 - protein, 460 aa, synthetic construct; identical to SEQ ID NO: 3389
  REGION 1..460: note = TnsF-Tn7 System Protein

SEQ ID NO: 3391 - protein, 252 aa, synthetic construct
  REGION 1..252: note = TnsF-Tn7 System Protein
MTVLKESGPDPTDALSSVPVAGSRRGVPVVGKLKFCYGPMDCGKSTLALQIDHNHARQGRRGMVLVRHDRSGEPQITSRIGLTRKATEVGNDTDLRLLVREQWAMGRHVDYLIVDEAQFLSPDQVDQLAELADDVQIDVYCFGIATDFRSMLFPGAARLFELADELQPVQVEVLCWCGQTGRFNARISDGEVLRAGDTVVVADTEQSVVESSSTSRSEGDPNTVRYQVLCRRHFRLGDLGPTSAQHGQLRLT

SEQ ID NO: 3392 - protein, 252 aa, synthetic construct; identical to SEQ ID NO: 3391
  REGION 1..252: note = TnsF-Tn7 System Protein

SEQ ID NO: 3393 - protein, 368 aa, synthetic construct
  REGION 1..368: note = TnsF-Tn7 System Protein
MAVDKSGRVRLVDSVPLLHPEQHTIDEMLTGWRNQQLSRNLQISTIDQRIRFVQRFLEFTNEFPWTWTPAMAEEFFGDLRSLHHAKQSTVRGYQVALRLFCSYVSNPDYGWDRVCEQRFGTHPAQVFFDWNSAAHVQHNESGPTKRAFTKRELQTFFDHADDQVAVIAASGRKGYLPAYRDSVMFKTAYSYGLRFNELRHLQTVDFGANPHAKEFGRYGLVHVRYGKAKRGSPPKRRSVLTVFDWTPEVVADWLCHGQPHLDDGLDLFPSERGTLVTEATLLRRFRRYCDDLGLSPGLDLHSLRRSYATHLLEDGWDPMFVQHQMGHEHASTTAIYTCVSSDFRTRTLRNALDATIADALTPDEGEAG

SEQ ID NO: 3394 - protein, 110 aa, synthetic construct
  REGION 1..110: note = TnsF-Tn7 System Protein
MKRQVDYTWRLAELMARHGLHNSTELIPLLSERGIELSRPQVYRLVNQRPERVSLQMVAAICDIFSCGVEDLVTVTAADARRRKTGSAPNVVELNKAVRPKRARVIADDD

SEQ ID NO: 3395 - protein, 870 aa, synthetic construct
  REGION 1..870: note = TnsF-Tn7 System Protein
MAMPKAAGWAAEVLADPDAVISAAVRRAEPNLHESTCADALTEVASSFATRRRIAQALFDDPELLTSGAPQGSPALDRLITALQRRGSSRVVLPRCGRCDRHRRLTNRDGSIRVCGSCDGRRRKTNQRCSVCGQQRHAESTTWDGSPVCAKCDRLAHNVDHLERLVVHIRQISPAAEPDDVRRLVRSVLPSTRSQRRVADELSAHPRRLTGEAVHATAPTWSLLGAVVDAGISGFAIPPCAFCDRTVALSKVSEKVRCCRRCYERHRTEVCVGCGAVRPVTSRGLAGEPMCQVCHNRQPVNQEICPDCGDRARLHRVSENKRCCRRCQRAPIAVCTLCQRPRPCYFADTDTPRCEPCSNILLRREPCSRCDKTRIVGARTVEGQPLCNRCGRVKARCRDCNRNMLVRAWHDDGPRCTTCHRKHPASLKPCRQCGTVEFLHRAELCAGCACLQLLHDVLGDDDGVPARLRPVFDALARSTPEPTLLYLERGGGVPLLEALRESGQPITHDLLDTLSARPPTRALRDALVCAGALEPRDEILLALDRRLQTVLAEIGDNDDRHLLRGFVTWRLLRRLRTQSGSRLITKSQAVYAHRKLLIAIDLIEFAHQHDRRLDEVDQQLVDRWQDRQPQAALCRDFLAWASAQRRCRSGLHVTPRPHTRSSLRLRGDERFELSRRLLHDDNIDRGDRFAGLLVLLFAQPASRIVRLRTDAITQRVDNRAVFLLLGSEPVRLPTPLDQLALDLVVNRYRGRAALTRATDHDWLFPGLRAGIPMTSTHLNARLKRLGLPARAARQTTLMDLAGQLPAVVLSALLGIDVVTAQSWVAEAGQRSNYAAVVAARRGPAASEADGRRRHEAVRWNLGEDARSEWD

SEQ ID NO: 3396 - protein, 870 aa, synthetic construct; identical to SEQ ID NO: 3395
  REGION 1..870: note = TnsF-Tn7 System Protein

SEQ ID NO: 3397 - protein, 341 aa, synthetic construct
  REGION 1..341: note = TnsF-Tn7 System Protein
MFRGWAQQMSGGRRMAHRTIRARLGVVQRFSVFTGEYPWRWSAAHMDEWMAELVGAQQKKKSTLRNYQGAIRDFCTYLTSPHYGWVGECETRFGTHPVQICHEWNTAGHLVDYEGDPARRPLSRDELQHLFDYADDRVERAVRLGRKGALAAYRDATVFKVIYGWGLRAREVSRLDVTDCYRNPSAPELGKFGQLHVRWGKASRGSPPKRRMVCSVMPWAVEALEDYAVNIRPRFADDGGGGALFLTERGGRLQPREIDARFAEYRDALGLPRALVPHCLRHSYVTHLIEDGVDPKFVQEQVGHRFASTTAIYTAVSGDFMNTMMQHALGRAVTADEEWTG

SEQ ID NO: 3398 - protein, 111 aa, synthetic construct
  REGION 1..111: note = TnsF-Tn7 System Protein
MNSGKLDYTWHLRTLMAARGMFSTSDLRAPLAQRGVELSTSQVYRLVVERPERMSIKTLVALMDILDCRMEELIEPVTAVRERRQRAAGGNDTASVGDFRPKRARINRTDN

SEQ ID NO: 3399 - protein, 555 aa, synthetic construct
  REGION 1..555: note = TnsF-Tn7 System Protein
MASTIVLGTCFRCGRVKNLRWNHALDRGECRACRARRAQHELCTGCGRTRRVNARTKDGGAVCVTCYARTRAAEDACDDCGRVGPLATRASGTSGPSARSLCARCYRNPHRPCGVCGRSRRVALKATATSPDVCPTCYQAPVIDCSICGQHALGRRTTNHGRPRCFACQATQRIDAALTGHDGMIRPELIPVRDALVATERPRSLLNNWHNLASLHLLTDITQGRIELSHDGLDAMPQVFSVTYLRAMLVTAGALPSRDENAARLHRYVSDIVAEVSDPELRGMLSRYARWQVAGRAKTNRHGVISAATADRCRRDIQTAKGFLDHLAVHGHGPDDCPQACLDAWLVTDRSGRLDFIRWLKRGGHLIRCALPHPVPQKNPGHEVDPEAQLALARRLLHDPDAASTEDRAAACLILLYAQPVAKIVALTTNDLLTRDDGTYLRLGPEPILLIPPLDGLLTALPAAKPFGTASTLADARWLFTGKNAGTHLHPASLMARMNRLGIRARASRNTAMLHLASTTPPAVFAELIGISIGNATRWAELSGASWNRYAAQHR

SEQ ID NO: 3400 - protein, 555 aa, synthetic construct; identical to SEQ ID NO: 3399
  REGION 1..555: note = TnsF-Tn7 System Protein

SEQ ID NO: 3401 - protein, 375 aa, synthetic construct
  REGION 1..375: note = TnsF-Tn7 System Protein
MGLNDEPPPLSGGVLPLGNVSLLRPAEQFFDEMLAGWTTQQTSRMLAAQTIKTRASQVRRFADFCNTPPWEWSPADVEEWTTSLVSGPRPLAVSTVRAYQNAVALFCDYLIDHRYGWVDRCVDLFGTHPTQVCHEWNTVIHTSDHEARPAVRPLCRAELQAFFDYADDLVDRARSSGRKGWQTLFRDATLFKTIYAFGLRRRKAAMLDLHDFTRNPQGWEFGRFGVCNVRWGKAMKGSPPRRRAVLAVFDWTRPVIEEYVTEVRPRFDIANESILWPTERQTRIRLEHIDDRFADWRDDLGLDPVLHPHCLRHSYVTHLIEDGFDPLFVQQQVGHRWGSTTALYTGVSGDYRNRTLRRALDAAFTPPEAIEGGSR

SEQ ID NO: 3402 - protein, 114 aa, synthetic construct
  REGION 1..114: note = TnsF-Tn7 System Protein
MTKTVAYHWHLRKIMGEHGMFATTDLVPLLADRGVVMNASQVYRIVSGTPERMNMQLLAALCDIFGCTPSDLIEPYVAASSRRGRKTGTTDKAKPPTSGSKNRPTRAVIKPAGD

SEQ ID NO: 3403 - protein, 391 aa, synthetic construct
  REGION 1..391: note = TnsF-Tn7 System Protein
MLDERVSDLLTDDHGTIAAQLRPLHAALTNTDRPESVLTWIRRPRTRTLFAFLAAHPDDLSHELLDELPAVQHLHYLRKLLVLADVLPTRDEHLERTRTWLNQTLTELPPEHRQLVQPFGLWHVLHRARRRSHQFGPRTVQAAAKDRRYIHTAAAFLAWLDTHNLTLPTINQQHIDEWIDTGPAARHLRPFIKWTNQRRLTTALDVPNRPSSMPSRFLTDEQRWTQLRRCIVDTTMPTKARVAGALVLLFGIALTRVLYLTTTDVTFSKDVPTGITFGKQPIPLPPKVAAIVAKLINDRGRPALSNHEPHLLFPGRPATTPITLQALSRTLTRNGITAHLGRNAAMLDLAADIPAAVLADLLGMSASTTHKWNRLTSRDWTHYLQARTDTT

SEQ ID NO: 3404 - protein, 391 aa, synthetic construct; identical to SEQ ID NO: 3403
  REGION 1..391: note = TnsF-Tn7 System Protein

SEQ ID NO: 3405 - protein, 371 aa, synthetic construct
  REGION 1..371: note = TnsF-Tn7 System Protein
MDLTGAVHLTLASGVAYLDPATAVFDAMLEGWQRQQRTRFLKASTIAGRVLMVRRFHRYTNQYPWEWESAEVEAFFDHLRSAGPRPITVSTARSYQTTLRMFCDFVTDARYGWVGECLQRFGRAPTQILHEWNSIVHVTEFDGQPGRRPLTYDEVQALFDAADGRVEQIRTHQRKGVFAALRDTAMLKTVYAFGLRRAEACGLDESDFRHNPKAKQMGQFGGVFVRWGKSSRGSPPKRRTVLTVPEMDWIVPVLDQYSSEVRPRIIGQAHPALWVTERSGRMSLRRLNFAFAEVRDLAGLPQELDLHCLRHSYVTHLIEFGYPEKFVQDQVGHAYASTTAIYSGVSDEYRTRLINRKLEQHKDDLWGRERA

SEQ ID NO: 3406 - protein, 103 aa, synthetic construct
  REGION 1..103: note = TnsF-Tn7 System Protein
MGIRWQLRLRMAERGMFATTELVPLLVERGVHLSREQVFRLVTQPPQRLSMETLAALCDILGCQPNDLIEVEATEERTRKTATAGGPAPTARRSTIRRPEPAP

SEQ ID NO: 3407 - protein, 495 aa, synthetic construct
  REGION 1..495: note = TnsF-Tn7 System Protein
MTRPRKPEDPIRWPIPCARCHQHHKTVARWPDGGICGYCYQQAKRTKGACACGHEGVLPGLIDDQPACRQCSGVRLNVDCEACGAEDELHSGGRCWSCVLAAIVDDLLTDPARGILAPELMPLAAALKSMKRANSGITWIQQKHVTAFLRDLAVVPTITHEVFDELPDSRTREYVRGLLTEHGVLPRRDELRTRYESWSAQALDRVNKAEDRDIIRRYIRWHHQRRMNQMDEVSRGTFLRAKQQVTVAIELLNWLADRGTSLAGLTQAHLDLWQADGPTTRRIAEHFLKWAIKAKAAPAGLTILSHRRGTSAKLDKTGQDEALSRVLNANEQIEARDQAAAILILVFGQQAERIARLTWGDVTVTEELVTIQLGTIQIALPDPLDAPWRELAANPGHNLTASHPNTDWVFRGTSPGRHIHPGHLTTRLSKLFSTRAARLGTLHELTKLAPVAIIAETLGYSPTTIERHATDSAAAYAQYVAAAKKSLGSLENAYR

SEQ ID NO: 3408 - protein, 495 aa, synthetic construct; identical to SEQ ID NO: 3407
  REGION 1..495: note = TnsF-Tn7 System Protein

SEQ ID NO: 3409 - protein, 247 aa, synthetic construct
  REGION 1..247: note = TnsF-Tn7 System Protein
MSAGRGKVCRDCSYRNRFLKRVAINKTALSPLWREYFSTYANWLLNHAGSLRASLLINQHWPFFRKLDRITQEIGQIPTHPELMRYMTVLEMRRSLLVTQFLDESNIITQDAQTKADAAEWDYMDRMKLRLATNKALEAIFVGYQDYMLKRVETGKTSLRSVRLAMTPAARLLELSGLMNTSLPDQSVLIQFLWQHAGQRAAISGFVNYLNDKHGTALVLPKKGEDIRLVLKHPKEGRENMLRKKLI

SEQ ID NO: 3410 - protein, 247 aa, synthetic construct
  REGION 1..247: note = TnsF-Tn7 System Protein
MKSPNSVRQIGNTHGSISGVFPFRGEKMIPYESTLERDFLIKASWSDSILDIQEQPLTIPYKTSTGRDSTYTPDFLIHYKTTSLGLTPQSILVEVKPKMKLDKEFKSLRLKFKAGIRHAKNQGWRFKIYHEARIRDAMLANITFLQRFYKMSFRAADAQYLLNGLAEMGHCEMDSFLAIMYAKQLERAQAQSLIWHLIATKQLSCPMHEPLRPRMAIWINSDPGYLPRVDGDEQEEFSPSEFYDDYE

SEQ ID NO: 3411 - protein, 658 aa, synthetic construct
  REGION 1..658: note = TnsF-Tn7 System Protein
MSKKNLVQASSMMTTNNLPEQVAAKHAVHKISVGALVNFEGETYEVIALLDHVEVTAKNTATNRHRTLRIDSISPVNMEEVKNHELSDIGDAQWQEAQRRFAIIQPLLGSNVGRRKIEEAAKENGVFFTTLYRWIAKYKETGSCTNLVDLKRGRKTGHLSIASEVEAVIKDAIDSVYLTVHRPSIKHTINEVLIQCRKRGLIAPHDSTIRRRIAQLTEYDMLRARGQRKKARDMYRPASGSFPGADSPLAVIQIDHTPLDVMVVDDEYRQSIGRPYLTLAMDIYSRMITGYYLSLDEPSAVSVAMCIAQSILPKHELLMGMGVSHDWPVMGIPSKIHMDNAAEFKSETLQRACATYNITTEYRMPGMPQTGGHIERVIGTILKETHNLPGTTFSNIKERDNYQPEKHAIMTLSEVEKWLVSFITGVYHQSIHSELKMSPLKQWEIGIFGDGKLTVGSGLPPLPANHHTLLISFLPLYHRSVQTQGVSIDGLHYYADVLRQWIKSKDPFDGNKARKFMFRRDPRNISIVWFFDPLTEQYYRIPCSDQRIPAISHWEYQNAIKHIKEAGINSVNPDRILDALEDLRTQAEASAHKTKQARRLLQRSKEAEKSRKNDAPAVNEETGEAISHQSAPALTYAPSTIDNDLWGDLDDLKPFHIE

SEQ ID NO: 3412 - protein, 363 aa, synthetic construct
  REGION 1..363: note = TnsF-Tn7 System Protein
MMTERWPIHTDLKDDETLLSFIVRTAILNGSYPHVLFQYWRNLQHSFVSDIDKKVDQNALNRLSSHTGVSVCVLQNSLLDKLIEKLIDQEQYENIRLWRYVMHIGARNHRRSFGYGFCPECMAHDHSRYYRRHWRLLWHVGCSEHKCQLVFDCPHCGNENKPHTLSFQARSINECSHCGHSLSSATKTDVHTDALSVASWLDHYIDTGINTSKWSFTDVQEAALTLRQLMSIVRSALNKPHIRYNMAMLASMNIDAGLPIDRKSITHEQWSVSLREVTLRGAWRLLNVDPESLITLCQSNNISQKFWLYDNKLKTTAIHRIADHLAVDKRTTAKAGISNSLIEPLSRAEAESRWLSISDQLKK

SEQ ID NO: 3413 - protein, 363 aa, synthetic construct; identical to SEQ ID NO: 3412
  REGION 1..363: note = TnsF-Tn7 System Protein

SEQ ID NO: 3414 - protein, 298 aa, synthetic construct
  REGION 1..298: note = TnsF-Tn7 System Protein
MEHLHESTLSIMGCSDSERISYLYEPRWVSYERAENILALLQELLNRPKKPRLENLLLIGDSNSGKTTLINKFYKDNPYKILNGFTAADIGAKVVRPVILCDAPSKPDEKALYGAILEKLGAPFRATDITAKLHHQLVALMRQLEVKMLIIDEIHNVLIGTPVKQRELMNVIKNLTNNLNIPIIGVGTIDAVQVLHTDPQHASRFDVVELPRWDIDKAYLRLLMSFESILPLRKPSGLHHKEIAMKLLAISRGNLGDLHRLLIECARDAIQSKVEQITPEIIEKHKWVQPTQGIRKRL

SEQ ID NO: 3415 - protein, 298 aa, synthetic construct; identical to SEQ ID NO: 3414
  REGION 1..298: note = TnsF-Tn7 System Protein

SEQ ID NO: 3416 - protein, 484 aa, synthetic construct
  REGION 1..484: note = TnsF-Tn7 System Protein
MDVAKIRVRWPDGAICGACFTSAVHEYGRCSGCGEERMLPGRSPAGEHICRDCAGITTLLVCDRCSHEAERFRKGVCARCVVREDLESRLNPNSPADVRLKRLVAILADSARPESVYTWMNLKAPKHLLELIGRRELDLTHEAFDAYSPSPAAAGHLREILVHHGMLPNRASLPFALFEQWLAGRLTELEEWPDIHGPIERFARWHHMKNLRRKLDAGAANMNTATLSAKQEITEAGKFLRWLLEEHGVVADGIQQAHIDQYIAEGTSTRKHIRNFVHWLQPGRPRRRTVTVPYRTAKSIPMLTQSQRLELVRNCLEFQQVALSTRVAGLISLLWAHPLVKIVALTTDRLERLPEGMTIKLGDNPAAVPELVAPLFWEQLSNRGNQQTANTGTDWLFPGFRAGQHIHHRTLGERFLVLGIDPQRARNTTLQDLVRQVDARSLIDLLGYSGTIVTQHASRAGAPMSDYVDLRKSHADRQGNDKVD

SEQ ID NO: 3417 - protein, 785 aa, synthetic construct
  REGION 1..785: note = TnsF-Tn7 System Protein
MTSAQHHADSHDLIRVQGARENNLKGVSVDIPKRRLTVFTGVSGSGKSSLVFATIAAESQRMINETYSAFVQGFMPSLARPDVDVLEGLTTAIIVDQERMGANSRSTVGTATDANALLRVLFSRLGDPQIGPPNAFSFNVPTTRVSGERTSSTGETVTIENEIYLGGMCPRCEGMGAVNDIDLAELYEASTAINDGAITVPGYTADGWMVRIFTESGFVDGTLPIRDFSPEMLQDFLYKEPTKVKVSGINMTYEGLVPRIQKSMLSKDVDAMQPHIRAFVERAVTFTACPECEGTRLSEAARSSRIDGVSIAEACAMQISDLAIWVRAIDAPGVGPLLTTLQGALDSFVEIGLGYLSLNRPVGTLSGGEAQRTKMIRHLGSSLTDVTYVFDEPTVGLHPHDIQRMNELLKRLRDKGNTVLVVEHKPEAIAIADHVVDLGPRAGTAGGEIVFEGTVAQLRGSGTLTGRHLDDRVTLKTTVRTPSGAIEVRGASSHNLEAVDVDVPLGVLVVVTGVVGSGKSSLIHGSVAGRDGVVAVDQGAIRGSRRSNPATYTGMLEPIRKAFAKANGVKPALFSANSEGACPTCKGAGVIDTDLGMLASVSSPCEDCGGRRFQASVLEYRLGSATITDVLEMPVSEAVEFFAAGESRVPAAHAILERLNDVGLGYLTIGQPLSTLSGGERQRLKLAMAMADTGRVLVLDEPTTGLHLADVEQLLGLLDRLVDSGTSVIVIEHHQAVMAHADWIIDLGPGAGHDGGRIVFEGTPADLVADRATLTGQHLAEYVGA

SEQ ID NO: 3418 - protein, 785 aa, synthetic construct; identical to SEQ ID NO: 3417
  REGION 1..785: note = TnsF-Tn7 System Protein

SEQ ID NO: 3419 - protein, 370 aa, synthetic construct
  REGION 1..370: note = TnsF-Tn7 System Protein
MPDGSGNVAYLPVASDAQNPDAFLERVLEGWERAQRASDFSPNTIRTRRAVVIKLVDFSGHYPWEWSIGDADEFFAHARGVKNLSHSTVRAYQGAIKLFCDYACNPRYDWSVACAKLFGTVFIQVITELNRVAHSQPSETRPAKRPFTQSELQQLFDLADLEVERILNSGRHGALSAWRDSVALKTAYAWGLRSNELRHLQVVDLSRNYKAPYFGDYGVMRVRWGKPHRGSAKKPRSVLTVWEWSVEVLRDWVERGLPRYGTPLTDLFPTSTGAILGGTHLLDVLHRLLDELGFPPGLDLHSFRRSYATHLITAEGFDVAFVQMQLGHEHASTTSIYSIPSPDYQRLALERVHNRTLDAARALPPRKRNP

SEQ ID NO: 3420 - protein, 113 aa, synthetic construct
  REGION 1..113: note = TnsF-Tn7 System Protein
MTREITYEWKVREFMARSHIYNSKELTELLRQRGITLSPTQVWRLVTKDPERISFAVLGALCDILGVQVNELIVFKAADARTLRRKAAGGTDLPDLRDYRPVRARIVTDDVDE

SEQ ID NO: 3421 - protein, 397 aa, synthetic construct
  REGION 1..397: note = TnsF-Tn7 System Protein
MNRVDLSEYLRLDRPAADPALDRLRDRLLSADRQASIYQWLRLKRPRDLLHALGSGELPLTHESFDALPQNAAVRHMRALLVDVDALPRRDEPLAQFEMWITSKIASIDDKTARDAVDRFARWHHLKRLRAGTERWDSQRSVHNAKQEITVAVDFVGWISSRGMPLAQCSQADVDEWLVTGATTRYTVRQFLLFASRAQDTVPLDVPRRPARSTRRISQQERLAAIGSFLQDETVTPADRVAMLLLLVFAQPVARIVEFPLTVIRELDDSRLVLEVVSDQVPIPEPFASLVRDHLAARSRDRTGNVARNPFLFPGTRAGSHVTQNHLRTVIAGLGVNVLAAKNGALDELVAAMPAPMVADALGFSYTALGQHERYRGSQYERYVSARQGLEARRPRR

SEQ ID NO: 3422 - protein, 813 aa, synthetic construct
  REGION 1..813: note = TnsF-Tn7 System Protein
MTTGLSPAERFQAAKVRNRSRNLELFRTDLRFDLDPFQIAACDALDQGRSVLVAAPTGAGKTIVAEFAIWLAMRQPTAKVFYTTPMKALSNQKYAELVAEYGESEVGLLTGDTNVNPRARVVVMTTEVLRNMIYADSELLDDLAWVVLDEVHYLADRFRGAVWEEVILHLPTEVRLVSLSATVSNAEEFGDWLQTVRGDTDVIVSEDRPVPLEQHVLVGTKMVDLFDSSGAAATNRVNPELLRLVGGGARSERNGGGHRGRRGRGGYPERRGPRTEKMYREQIAKVLDERMLLPAIFFVFSRNGCDQGVRQVLRSGISLTTADERNEIRETAEYHCRTLLDEDLAVLGYWEWLEGLERGVAAHHAGLLPAFKEVVEDLFRRKLLKVVFATETLALGVNMPARTVVLEKLEKFNGEARVPITPGEYTQLTGRAGRRGIDVEGHSVIQWSDGLDPQAVASLASRRTYPLNSSFKPTYNMAVNLIEQFGRQRTREVLETSFAQFQADRSVVDLARKVRSQQESLDGYQRAMECHLGDFTEYAALRRRLSDLERTNVPGGREASHGARQERQAAITDVRRQMQRHPCHACPDREAHARWAERWYKLKRGHDKLVQQIRSRTGAVATTFDRVTDVLLQLGYLVVTGDDEATVAAGGRRLQRIYGERDLLVAECLEAGVWKDLTPAQLAAMAATIVYQPRREDAPGTEHALPRGAFRPALDETLTIWARLDDIERDARLAGSQPPTPAMSVGMFRWASGSALDDVLRTLDMPAGDFVRWSKQVIDLLDQVRNAGDDDLAQTARRATDAVRRGIVAYATV

SEQ ID NO: 3423 - protein, 813 aa, synthetic construct; identical to SEQ ID NO: 3422
  REGION 1..813: note = TnsF-Tn7 System Protein

SEQ ID NO: 3424 - protein, 368 aa, synthetic construct
  REGION 1..368: note = TnsF-Tn7 System Protein
MTVDDRGLFVVDPHRLPLLRPDAQTFEEMLHGFRNQQLARSLALKTVEQRERLVRIFVDHAGTYPWDWTLQSVDEFFADRRSVHHNLHTTIRSYQNALKLFCDYVCDPGYGWVERCLELFGTHPVRVINDWNTARHVQDVEHGGGRRAFTRGELQSLFDVADDDADRIARLGRKGWMTAFRDATVLKTAYMFGLRINEVRHLQTVDFTRNPYAPEFGKYGHLNVRFGKAMKGSGYKQRNVLAVLPWGSEILSEWVERSARFRGESLDLFPTERSTLVSEATLQSKFRRVRAEIGLGEEVTFHSLRRSYITHLIEDGFDALFVQQQVGHEYASTTAIYTGVSSDYRTSTLRAVLDGMMGDALQTTTGSS

SEQ ID NO: 3425 - protein, 110 aa, synthetic construct
  REGION 1..110: note = TnsF-Tn7 System Protein
MRRDTDYTWHLAELMARNGMHNSTDLAPHLVERGINLSAAQIWRLVKQRPERISMPVLAAICDVFKCTPADLITVTAVDAALTKAVNAAPRYDAPDAKARPRRARVTRDD

SEQ ID NO: 3426 - protein, 440 aa, synthetic construct
  REGION 1..440: note = TnsF-Tn7 System Protein
MCSTCGHAGPQHFEATCLGCSIRRLTSELLTSDNGVIADGLDRLPDVLVQRGRPESTMRWLIKPRTQSALRILAEAEGSITHETVDACPTGQARHFLRAMLVDAQVLPRRDEPIDRLETWIEEFTADLPARHAALLEPYARWGILRIARRRAARRGFSSAAADSGRERIRLALRFIEHVESTGRQINDLTQSILDDWTAGNRDRSRRIAGFVTWLNKRGIVSDVAVPRFRSSQPCEISDENDHIRRLNNLLDENSRIDLPIRVAGLLVLLYGARISQIRSLTTADVAVTPQRTSIALAEHPIDLPEPVATLVERLAQQAADNPRAQTPDSDAHFLFPGARPHEPIHPRTLGLKLAEVEVPPRLSRNYAMVALTNDLPAAVVAAQLGLDASTTNLWAKFGQRDRAEYLLARRETRTTAEHSSRKDEVAVRNQTQAKVGAAR

SEQ ID NO: 3427 - protein, 440 aa, synthetic construct; identical to SEQ ID NO: 3426
  REGION 1..440: note = TnsF-Tn7 System Protein

SEQ ID NO: 3428 - protein, 390 aa, synthetic construct
  REGION 1..390: note = TnsF-Tn7 System Protein
MLQTIAIRGYRSLREVILPLAELTVVTGANGTGKSSIYRALRLLADCGRGQVIGSLAREGGLQSVLWAGPEQPNAQTQGTVRTRPVSLELGFAADDFGYLVDLGLPQMAGTGPTAFAQDPEIKREVVFAGHVLRPASTLVSRTRDYAEVAAQSGRGFDELTRSLPSYHSVLAEYAHPHALPELSAVSDRLRDWRFYDGFRVDAAAPARQPHVGTRTPVLSDDGADLAAAVQTIIEAGFDDLERAVAEAFDGATIAVAVNDGLFDLQLRQRGMLRPLRAAELSDGTLRFLLWATALASPRPPSLMVLNEPETSLHPDLVRPLASLIRSATKQSQVVVVTHSHALLDFLDTTPAADEDRGNAIEVELYKEWGETKVTGFGMLNTPSWHWGKR

SEQ ID NO: 3429 - protein, 390 aa, synthetic construct; identical to SEQ ID NO: 3428
  REGION 1..390: note = TnsF-Tn7 System Protein

SEQ ID NO: 3430 - protein, 253 aa, synthetic construct
  REGION 1..253: note = TnsF-Tn7 System Protein
MTGRTPTGGLIYGVRLRSESVYRYVGLTTKTAQLRLRQHLQVAAAGRKTPFYDWLRKQQREDLIVDPLDWTDGLDELGEAEIAWISLLRQEGHPLLNLADGGLGPTGVVWTAEMREAARIRSTGRKMPSRFGEEAPFYQREHSAEQRAKWSAARKGTNVGADNPNYGKFGADHPSFGHVMSEEAKSRLSEMRMGAGNPNFGHSASEETRAKMSAVRKGRPMPSSRRSAHTRYHTNRGIKKDTCQYCIEDSGQA

SEQ ID NO: 3431 - protein, 345 aa, synthetic construct
  REGION 1..345: note = TnsF-Tn7 System Protein
MVEGWERQQRARFLKESTISARSRLIRRFAEFSGQYPWQWTPTEGEAWISTLRSGSSPLRLSTLRSYEIEVRMFCEYLRDARYGWANQCSDRFGRVPEIVFHDDNSIVHVSEYEGDSSRRPLTYDEVQALFDAADSRVDKIRANRRKGALPALRDAALLKFVYAFGLRRREAAMADLVDLRSNPKFPDFGRYGAVSVRHGKASPGGPAKRRTILTVPEMSWVVEVLHHYVDEIRPALIRSSRSSALWLTERGGRISTRVANDAFIAARTAAGLDDSLDLHCLRHSYVTHLVEFDYPERFIQEQVGHAFSSTTAIYVGVSNEYRNRLLTRSMHSRYGEQFGRRPSK

SEQ ID NO: 3432 - protein, 109 aa, synthetic construct
  REGION 1..109: note = TnsF-Tn7 System Protein
MKQMDYAWHLRTKMAERGMFSTTDLQPHLADRGVSLSREQTYRLVTGQPQRLSMDFLVALCDILDCTPNDLIEPKITEVTARKAVGQQDASVTAIKPRRTTIRRPGGAS

SEQ ID NO: 3433 - protein, 200 aa, synthetic construct
  REGION 1..200: note = TnsF-Tn7 System Protein
MDNATRTAKQEITEAGKFLSWLSENHHVTVDALTQAHVDEYFSVGTTTRMAARNFLQWRAKTGIGKRYHLKYREARQTPLASSHERLALIRTVLESEAVVLNNRIAALMFLLYALPVRRIAEMRTQQVEVTPTGISLHLGEHPAPVPEPLLPLFHEYLTSRANQRTTNNRSPWLFPEMTRLSEIPQPRSPKFPTRERSSL

SEQ ID NO: 3434 - protein, 394 aa, synthetic construct
  REGION 1..394: note = TnsF-Tn7 System Protein
MQFTLFKCRICRQTKGADVDRRDVGGRLIYLPADSSASSETFLDDVLVGWRRAQITQNFRASTADRRIKLIHRMADFVGSPPWQWSPHDADEFFAHLRGVRNLSHATIRAYQSDVRLFLEYATNPVYEWNENCGRLFGTVFSQVITEFNRATHVQPNDTQDKRRPFTKAELQQFFDLADLEPERILNSGCKGALAAWRDAVAFKVLYGWGLRAGEGRQLQLVDCSRNARAPGFGEWGLLRIRHGKAMRGSPAKQRTVLTVFDWAAEALEHWVNYGLPRYGQPLADLFPTDRGGVVAGRDLWKRMRNLVDELGFPPGLDLHSLRRAYATHLQTEYGYDLSFVQMQLGHEHAATTSIYTIASPDYRARHLEHVLSNTLRRSVGEREGARGKADDET

SEQ ID NO: 3435 - protein, 280 aa, synthetic construct
  REGION 1..280: note = TnsF-Tn7 System Protein
MVDKKTGDRMPAPNTAEAASLYQRLRGHLAVLKLHDAAEALPSVLDQAAAEELSMTAALDRLLSIEVEATEARRLTGRLRFACLPTPASLEDFDYDAAAGVDRKLIDELATCRYLETATNVLLIGPPGVGKTHLSVGLARAAAHAGYRTYFTTAADLAARCHRAALEGRWATTMRFYAGPTLLVIDELGYLPLPGEAASALFQVVSQRYMKTSIVMTTNRGVGSWGEVLGDNTVAAAMLDRLLHRSVVLNLDGDSYRLRDHNARSEKLRKATTGTRQPLQ

SEQ ID NO: 3436 - protein, 280 aa, synthetic construct; identical to SEQ ID NO: 3435
  REGION 1..280: note = TnsF-Tn7 System Protein

SEQ ID NO: 3437 - protein, 113 aa, synthetic construct
  REGION 1..113: note = TnsF-Tn7 System Protein
MKREIQYRWRVREHMARVGMKNSRDLVEPLRDRGITLSESQIYRIVGQEPERIAFSVLVALCDIFGIEAGDLVTYTATDASRRRDKRAVNSTRDVPLLDAYRPVRARITDDDA

SEQ ID NO: 3438 - protein, 705 aa, synthetic construct
  REGION 1..705: note = TnsF-Tn7 System Protein
MTQPPSKAARRQQDRLDAIVAVVTATDAAITVPLVHETVKRVATTPGARARLAGYLVEHPEALTAGHSRPPKVVGALILALVEAGSQVLVVLRCAGCGRAVELLHTRGPDARICGRCWRRNHTAECVDCGRTKPVYGRTVDGQARCASCDNRARAEPCRTCGRVKPVDRRYSDGSAACSGCARRDTSAWEDCAGCGRRRPVNARTEGGEALCVSCYIPPGAVCAGCGETRPIASRRDGEPRCPGCYRQPERECGGCGRIRRIALRGRNGRPDLCGSCHQAPVLVCGVCGVEDRCRTTTVDRSPICFRCQLVRRLAELLTGPSGRIPELLIPLHDAILAVDNPRTALDWLRRSPAVDVLTAMANGERALAHATLDSAAGTRRGRAFAVEHLRQMLVTCGALPARDRHLARLEVALQELVESAHPEDQQPLRTYATWWLLHRLRRRAEQGQPTQFAAHRVREQTAEAARFLGWLREQNRPLALATQGDLDTWLTIRPQARRRLPGFVRWAKARGLLAELDASYPPAGDPVSFVGDDRRWAIARRLLVDDTVDARDRVAALLLLLYAQPAARITRLTRANIQVDDHDVRLRLGEDHVLLPPPLSELIQRLPEQAPAGIAGNLAEGDRWLFPGRSPGHPMSPTTMSTRLRKLGIEPRAARNTALLQLGAELPSLVLADLLGVHINTAERWNAAAGARWTNYVATRSSPR

SEQ ID NO: 3439 - protein, 705 aa, synthetic construct; identical to SEQ ID NO: 3438
  REGION 1..705: note = TnsF-Tn7 System Protein

SEQ ID NO: 3440 - protein, 417 aa, synthetic construct
  REGION 1..417: note = TnsF-Tn7 System Protein
MGLDVIEELIKSEAEALVSTGRPPWTKDQEKALKSALHAALFGLGRLQPLVEREDVENIIVIARGPVCSVWLELVDGTLVEADPIADSEDELREFLADLGARQNRPFTEARPHLDLRLPGGARLAAGAWVMAYTSVVIRRHGMREVSMDEMVYDRKACSPVLADFLAACVRAGKSIVVSGVQGSGKTTWVRALCSCIPPWEMIGTFETEFELHLHELVDRHKIVHAWEHRPGSGEVGIDGRQAGEFSLEEAIHHSFRFNLARQIVGEVRGPEVWNMLKAMESGPGSISTTHARSAEHTIEKLVSCAMEKGPQVTRELAISKLAAAIDIVMYLRSEVVPNDDGTFRKQRWVEEVLVVQPSIDAARGYATTPIFAPNQLGQAVATGKLDNFLAQELARHGFDLEAYTAESQANPGVATS

SEQ ID NO: 3441 - protein, 417 aa, synthetic construct; identical to SEQ ID NO: 3440
  REGION 1..417: note = TnsF-Tn7 System Protein

SEQ ID NO: 3442 - protein, 424 aa, synthetic construct
  REGION 1..424: note = TnsF-Tn7 System Protein
MLPNPYAPGELPRVLAGREQQQDRIRGYLSRIGTYGEMGGPLLVFQGPRGVGKTSLLREAQRDAEEHGFITAWVACRRNAPFLPDLVSRVGKAIDTADILPRAEKSSWKLRLESIGLEFGLPSGVKLSATAAADHSGADAHPRGAQISAMEDLLHETSSQVRARGGAGLVVFVDEMHAAARDDLAVLLNAMQNLAGRREDNPLAIIGAGLPSTPGVLVNAATFGERSTFLTLPRLEPSAAAAAVAGPAGELGVTWTPAGLQAIAAEAQGFPYLLQVLAHATWEVAKPSGTGDLLDVGEVQAGLPLADDQLTSMYAARWAAATDLERQIMAVMAQVGTPTVTRAEIAEQLGRSTQALGVPRERLIDKGIIEPAGRGEVRFTMPGFDRYIRETLAGAPADPDQLTTGRRRRELPPASDPGRGTTRR

SEQ ID NO: 3443 - protein, 424 aa, synthetic construct; identical to SEQ ID NO: 3442
  REGION 1..424: note = TnsF-Tn7 System Protein

SEQ ID NO: 3444 - protein, 360 aa, synthetic construct
  REGION 1..360: note = TnsF-Tn7 System Protein
MLSSSVVHLHPEEAAFEAMLRGWAAQQAARLLAVGTVESRVATVRRFAAFTGEYPWRWQPADVEEWTVSLRRGGARAHSTLRNYQNTIAMFCDYLVDPRYEWAKECLERFGTHPVQICHEWNTASHLADHEGRPTVRPFTREELQVFFDHADAQVDRAQRLGRKGWTAAFRDAALFKTIYAFGLRRREAVMLDVTDFHTNSAAAQFGAYGICSVRYGKAMKGSPPRRRSVLTVMGWSVDVLAEYVEEVRPLYGVGQRPMLWPTERGGRVSTDYVNVRFREYRDALGLPTELHPHCLRHSYVTHLIEDGFDPFFVQQQVGHAWGATTAMYTGVSSDYKNRALAAALGPAFAQSSEPEAESG

SEQ ID NO: 3445 - protein, 116 aa, synthetic construct
  REGION 1..116: note = TnsF-Tn7 System Protein
MSRVREVDYRWHLRQLMATRGLFSTTDLAPLLAERGIELSAAQVYRLVTGTPERLNLYVLAALCDALGCTPDDLVEPVVVADAKRTRRAAGSKDSGQLSAAGKATRPTRAKIVPDK

SEQ ID NO: 3446 - protein, 632 aa, synthetic construct
  REGION 1..632: note = TnsF-Tn7 System Protein
MTAAIAKVTTAPRHLLNLAWELQDRPTLLTGDAVHGSTHLIRLITELRRVGARRIVVPLCPVCHRDVALTNILDGQRVCGSCHKRARPTKLCAHCGRDRHTVARTADGKPLCQSCYRRIALLHEECTRCHEQRFIIRRRGEERLCGNCFRRPTATCGKCGRHAVCLGVAAGRPVCETCAARKWPCARCGKTLQIAARVPDGRLCHTCYEKDPLSFRACTGCGSVERLYHRELCPRCALARRLDELVHHSSAVDRTELAALHQVLFTTGSPASTLRWLAESAASRTLTDIITGACPLTHDAIDARLPRKSSRHLRAILVSAGLLAPRDEHLANLQAWIDKTLAAVDNPERRNLLRRFVTWHHLARLRRKLRGEFAEHNQVDAIRVSLRAAITFLGWLDQQNQTLATCRQADIDRWIADGPSTHYRIRDFVHWSVAKRYAHPLQVPKYQQASQTNPLDAERRWALARQLLDDHTIAAKDRVAGLFTLLYAQPATNIVRLTAADITISSTDTYIRFGTVPLKLPEPVAVLLDEHLRTRTCRTVFGRSDESTWLFPSGTDPARPMSPGHLGRRLSRIGIQSRPGRQAALLDIATQLPAAVIADLLGISTSAADGWVDRSGASWANYAALVHRRTTH

SEQ ID NO: 3447 - protein, 632 aa, synthetic construct; identical to SEQ ID NO: 3446
  REGION 1..632: note = TnsF-Tn7 System Protein

SEQ ID NO: 3448 - protein, 1006 aa, synthetic construct
  REGION 1..1006: note = TnsF-Tn7 System Protein
MSISARIPADVDRRDKLIGPFTARQLAILAVTALALYAAWLFTRTLVAPPVFAAAAVPIGALMTGLVLTSRDGLSGDQLVVAAVRHRVRPHRLVAAPHGLTAAPRWLTTHATSEPKSSAQQPITTSTAHLPQQISTAGEVGIVDLGTDGVAAVAVASTINLALRTLEEQAALVAQLGGWLHSLRQPVQILIRSTRLDLTGRITTLQSAAADMSPELAEAATDHARFLTELAVTEDLLHRQVLLVWREPHHNVTAASPGLAGPSARTLAAALLPSGRRAAREVSAAARRAAETRLLRRVAEATDLLNPLGVAVTALDDAQATAILASSTNPGSLVPHSADIAAPDAVITTASTTDTATTVADPKETPGVVVAERRRRKLLGRIRFGTSSRFAPQSLGVGARHVEVGSDWVATLAVTGYPREVAGGWLAPLLAHPGRVDLSLHIDPIDPVTAANRLRRQQARLESSRRHNASYGLLADDVLEVAAEDAADLSSRVARGEGRLFRVGLYLSVHASSETELAEEVAAVRALAASLLVDTSHLTYRAVAAWTATLPLGLDPVKVGRTFDTDALAAAFPFTSPQLPVADPVTAHRPQGVLYGRDAASGLVFWDRFAEDIHNHNMVVLGRSGSGKSYFVKSEVLRSLMRGIEAIVIDPEDEYRPLADAVRGTYLQLGAAGVRLNPFDLELHTRPDGRRSAPADALTRRKLFLHTMIRVLIGEQSPAQRAVLDTALIATYAAAGITEDPSTWTRPAPTLAVLAEQLRVCGSSVGTELAQALSPFVHDGAFAGLIDGETTTAPEGAFVVFSLRELPDELKTLGTLLALDATWRRVANPGLRRPRLVVVDEAWWMLSQQAGGEFLFRAAKSFRKHWAGLTVATQDCADVLATELGKAIVANSATQVLLRQAPQAIDEIAAAFALSDGERGFLLAADRGQGLLAVGTDRTVFASLASDFEDSLITTSPQFATGEDLDDLGIELPGEPAGTPDDLAPNETTTGVDEDTDVFLDLPEAA

SEQ ID NO: 3449 - protein, 1006 aa, synthetic construct; identical to SEQ ID NO: 3448
  REGION 1..1006: note = TnsF-Tn7 System Protein

SEQ ID NO: 3450 - protein, 372 aa, synthetic construct
  REGION 1..372: note = TnsF-Tn7 System Protein
MGVAEDFHGPGTAHLELVDGVSFLHPEEAVVEAMLRGWEHQQRGGRLLQPKTIRAHVQLVRRFASYSNEYPWNWTAAHFDEWMSHLVGELGLAESTIRGYQSVIRGFGDYLTHRAYGWESECEKRFGTHPVQIVQEWNTLTHLLEYEGSPGRRPFTREELQRFFDYADDQVDRAERSGRKGALTAYRDATLFKTIYAWGLRRTEASRMDTVDFYRNPHARELGRYGMLQVRYGKRSRGSPPKRREVPTTMPWIVPVIDDYLVNIRPRFRVPEHPAVWLTERSGRLRPAEINDRFGRYRDALGLPKELTPHCLRHSWVSHLIEDGADPKFVQAAAGHEFSSTTAVYTTVSGDFMNSMLRATLDRVFAKEGSRT

SEQ ID NO: 3451 - protein, 96 aa, synthetic construct
  REGION 1..96: note = TnsF-Tn7 System Protein
MATREMFSTSALRPLLAERGIDLSPSQVYRLVAERPERLSLKILVALLDILDCSMDDLIEPIAADSAPRSRKTVGASKGTDTGVGSFRPKPARITR

SEQ ID NO: 3452 - protein, 373 aa, synthetic construct
  REGION 1..373: note = TnsF-Tn7 System Protein
MADRRVCFPCSVGTSHTCPICLEVIAGSGQAPCYACSQRRRSERQIAEEAAGIPHSWLADLFTAFCQSGAIPLDTGIANGWIARASEACRRIALTVSNPGGLTTDSLHAALGADDLRRVAPLIAYMTQTGVLRWDRARLKTLIEGDRVEAILEAHRDGPHASVLRAYRNHLASRDRKPITQRTALNAALALLGTLGDAPIADLGQRHLTATLRRSPGHRAALQGFLGFLAAHGGPRLTLTQPRPDPVVQERRLRADIRTWRKRLRDPRTSAEARALVAVLITRIYALPLNSVLTLRRDEARRVGSSVVLWPDADAVVIEQPLAGDFLRWTTSNPQCGLGGTWVFPGRHGHQPLSEAAVAYHLSAKGKNGSEAS

SEQ ID NO: 3453 - protein, 1081 aa, synthetic construct
  REGION 1..1081: note = TnsF-Tn7 System Protein
MSTLHHEKNLEAYIVDQLVQRRWRVGASKDYDRDFALYPEDLVGWIQDTQPTKWDKLVAFHGDKAESALKDRLEKALDKVGTVQVLRRGFDIAGCGHIDLSEAAPEDSRNKAILDRYAANRLRVVPQLRYHPCKDYEIDLVLFLNGLPVATVEIKTDFTQSVEAAKDQYKTDRLPVDPRTKRKEPLLTFKRGAVVHFAMSDSEIWMASELAGDNTVFLPFNRGRDGHAGNPPRSDGEYPVAYFWEDICQRDAWLRIFHSFVYVEKKDVVDLKGNWTKKETLIFPRFHQWSAVNAMIADAAQNGPGQTYLCEHSAGSGKTSTIAWTAHDLIKLRREDGTPIFKSVIVVTDRTVLDGQLQDAVQQIDHQTGLIAAIDREKSSKSKSQQLTEALLKGVPIIIVTIQTFPYAMEAILTDQSLQDRNFAVIIDEAHASQTGTTASKLQATLALTSKQVMDKMTVEELLTQIQNARVRPKNISQFAFTATPKHSTLMLFGRPKDRSKPASDENLPEAFHLYPMRQAIEEKFILDVLEGYVPYKTAFNLGKDLVDTKRVDGKAAKRALAKWMTLHPTNVIQKVQFIMEHFTKNVAHLLDGKAKAMVVTSSRAAAVRYKKAFDAFIDKHPQYKDIHALVAFSGELTGKEVMHFDDDQLKGDVFVVGDDEKFSEDTMNPAVKGQDLRIAFDRPEYRIMLVANKFQTGFDQKKLVAMYVDKKIANDVEIVQTFSRLNRTFTGKDRTFIIDFVNDPEVVYRAFKRYDDGAVIDDVQDLNVVYELKDRLDTAGIYHDVDLAAFKAARFKVASDFVSNKEPQHKELTAATQGPTDHYNQRLKGYREEVRAAEVDYQKAKDAGDDDGMKAADHRRTVVDGAIRILADFKSGLSRFARTYGYIAQLIELNDPELENFAAFTKLLAMRLNGVATEAVDLKGLTLTGFDIKARTPVQNGGSNDDKPEDLVLKPAKGGGASAPAGKPIYLQELIQRLNSLFGQAAPLRDQAHFVNQIAAIAQENQVVMAQVNQSGKDLAMKGNLPGAVQGAVVRAMTSNSSLATLLLKNDRQAMGILTNIIYDILKSGEKLDLDVLEET

SEQ ID NO: 3454 - protein, 809 aa, synthetic construct
  REGION 1..809: note = TnsF-Tn7 System Protein
MTDTIPDVVADPIGVMVDLVAAVEPALGRPVIEGLVRAAAGGRAKQRKLASALADRPQILIDGRSPAPRTIGDLLIALRSVGAVVISPPVCAQCGKHLRSLQRRGEDWYCGICGERREPCSACGKTRSVQVRDRDGQPRCGKCPPDDGRDPIQTVIEVVAAIDPDLPVQAVVAAVESAVPTAGRRHALAWALADRPELLTGTGATAPTPAVLRLIDGLCDAGSQSIIHPACPRCQRVLRLHRRIDGQWLCRNCVAKSRAQPCSRCGAVREAATRDEHGRPLCPYCLISDPANLENCTVCARRRRVSVRTPDGPICETCRPIPTVTCSICSREAPCVISKATGQPWRHACAQRWARCDQCGQVRRIRSGTITKPVCSTCTREDPEFWRSCSDCGQPGRIRAGRCARCTVDRRLHELLADADGRIRPHLEPLYQTLAKAERPGTVAAWLDKGGAPAILRELEATDQMLTHQALDSRPAGKPVEHLRAVLVAIGTLPPRDEQMTRLERWITATIADRGDPEERGLLHRYAVWHLLRRLRRRSDGENITHNQLVAVRQHLRAATVLLDWLTGHGLTLATCTQGDLEAWLCEPEATHRREAGHFVRWAKNQKLTGVDLPAVKWGGPTRAIDTEARWEQARRLLHDDTIAPDDRVAGLLVLLYAQWPATISRLTLDHVQTTDEQTRLSLGHEPLVLPEPLAGLVRQLVATRRGHATLGDAGNSRWLFPGGQPGRPVSAYQLAERVRQLGISPGQARSTALFGLATDLPAALLARMLGIHISVAVAWQRASNGDWTGYAADVSRRGTTATSTNRTP

SEQ ID NO: 3455 - protein, 809 aa, synthetic construct; identical to SEQ ID NO: 3454
  REGION 1..809: note = TnsF-Tn7 System Protein

SEQ ID NO: 3456 - protein, 107 aa, synthetic construct
  REGION 1..107: note = TnsF-Tn7 System Protein
MKWNLRLAAANRGIWKASDLQRSLAEHGLVISAGKMSGLWSGQPASVKLDDLDIICAVLGCQIGDLLIPETEHVARLDDQAWPAAATGTSGLTVVPRRRDGRTLPPL

SEQ ID NO: 3457 - protein, 187 aa, synthetic construct
  REGION 1..187: note = TnsF-Tn7 System Protein
MAMLILTVGLQGAGKTTRARQLATKLNALRLTPDEWMIPLFGEPEADGKRDVLEGQLLKLALEVLRLGNTVVLDFGCWSRDERYAIRHLAEDAGGSFELAYMPVDEETQRVRVAHRQATAPHETFPMSDQELADARAYFQEPDNAELSMGQIIDPPKGWHSWNEWAADRWPSFGDDRESAGKPVQAG

SEQ ID NO: 3458 - protein, 187 aa, synthetic construct; identical to SEQ ID NO: 3457
  REGION 1..187: note = TnsF-Tn7 System Protein

SEQ ID NO: 3459 - protein, 110 aa, synthetic construct
  REGION 1..110: note = TnsF-Tn7 System Protein
MTPRLDYRWNLRQVMAARGMFATTDLAPLLTQRGIELSSSQVYRLVVERPERLSLKVLMALLDILDCSMEDLIEPVAAAGAAGKKRTASGEEAGVGDLRPRRARIAKVDD

SEQ ID NO: 3460 - protein, 298 aa, synthetic construct
  REGION 1..298: note = TnsF-Tn7 System Protein
MAASIEHLWCRELWNDFAHQLIESPGRVNKAAKVLMASIDYFQSLEKLYEDRSLLTTASFHERVSSLEHRRHLLAYRFLLSRLGACGVDNEREKSNEKRRLHAVFARARGRPYAPLLEGYVNALRAGHVSERTIRLYAAVTQKFCESAAVDTTVPCSSGAIAQYLAHSPGSASSLSRFICYCRDVLGWQISMPSKATLAFNDVTAQRSLIGLRNALEAVAGRSVGDLRLVEVVRIISVATGLSKKYLLRSGAVDPLEKGVVLISKVARIESGHLLYPYAVRWRELIAKRESFIDISGP

SEQ ID NO: 3461 - protein, 639 aa, synthetic construct
  REGION 1..639: note = TnsF-Tn7 System Protein
MKKVLEETQALHTGLWLLKWIDGISLGRGLLSSPRIHLVLQKLDQSDLAELAHLSPREISYVIGRRPGAAAEHAITWASPRPVLTGMLPLLNIGDILCGTSVVGALRQEEQRISLSESSHVAYCGIFDESSPPDGWSSGSYRVLNRFEFELGRQREAIGSRCMRIRTGRLEYIIPCSVILRTFYGFHTKLANAICSGPWDTTLNAVISTARYDSGIGTYRNNETGAWNIVVQAGLTRDHAVRLALLYFDEYARACANAIHASADRQTHSVRADGARHWFADAKMPYQWSNKPFEMLIRGFSLRAHRPSAEAGHRFLVTSIEGTSWPFPDQQIFSEIANSNLRSPNPNPERIPETYHAGNRRLVLLNEDIVLDHHSDAFKGAPDNRVEGAAFEFLNRPLHELQKKLSHKEYLGTQRPPAAPPALTLSAGSTAPGEEKPAPLVAESHDRRLAPHLQLFLDALDALQEAGRISAYEVIAPPEFSKLKQARNGVNCWSLASEDQLSALRLGLPVQGWEFVFSAPRGLGILRHPIPRCLLIVRVNLDGHELLVFEIEPRLGETAYRFYALEPTEPITLQAIETCIINVRAYSGSIPHSKIKLAFCTLTHGKVLALNHYYNRNFNQEIASINTESLRRQLARTYV

SEQ ID NO: 3462 - protein, 195 aa, synthetic construct
  REGION 1..195: note = TnsF-Tn7 System Protein
MPSKQSAGHESLLERDLLLMLAFDRRVKSVLEQPFRLVYEFNGAQRRYTPDVQAFFADKGQEWCLVYEVKYRDDLRANWSQYKPRFKAAVAHCRANGWRFKLVTEHEIRGPQIANIQFLRRYQDLPEQELHRVALLQRLAIAGPTTPKALLAVTWSDPERRMAALCELWRLVAVGEIAVDLGMPLTMSSPIWKGD

SEQ ID NO: 3463 - protein, 657 aa, synthetic construct
  REGION 1..657: note = TnsF-Tn7 System Protein
MASGIAVQFFEITVGAIVVYGATRYKVTHLISVDTVLAVDLTSGETCRLPIEQLRLEPNEEEQASAAQEHVPRDLSLYSADEWREAQRRFDAIKGLLNDPFRTREEAKALAEQAGVHVATLYRWLHEYLRVGNVSALVPARRGRKTGTRLLSVEVEAIVDSVIEAFYLDKQRHTPHDTIEEIQARCRLAKLEAPHPNTIRNRIRQIPEIVRLKRRGRREEATNRFTPIKGTIENATHPFAVVQIDHTPMDIIVVDEVYRQPIGRPYLTLAIDVFSRMVAGIYISLAPPSSASVALCLANAICPKREYLASLGVSGSWPVWGKPAVVHVDNAEEFRGLALERGAAQHGIDLQFRPPATPNYGGHIERLIGTTMRWVHKMPGTTFSNPSQRKGYDSEAEAALTMKELELEVVDFFVNRYHQRPHTKLGVPPIKKWERGIVGTDEEPGLGLMPVPDDPHRLLIDFMPMITRTVQRYGIQWDNITYYDPVLDPFINAADADDERRKQKFVVRRDPRDISRVYFYNPDAAAYTPLPYRNISHSAMSLFELMEIRKRLTEEGHRDIDEGLIFEHLERFRRRVAEAVHKSKKARKAQARGPVDARPVVASIPSARGGSTPVPVPVQPGSNDRSQPSAPLPSESAVEEDIFAAPIRPFDNLGMRQ

SEQ ID NO: 3464 - protein, 296 aa, synthetic construct
  REGION 1..296: note = TnsF-Tn7 System Protein
MTSVQDHLRPEARAALELPQPERIAFCRADRWVGYTRAEQILRQVDDLLLYPRSLRMPCLLIVGRSNNGKSSIVEQVLRRHPYIVKDDGTPGFSISWIALPATPTESNFWSEVLWSRNISHRVQERPDAKRLAAIDAMRFANTRLLIIDEMNHLANAGKEAGKLLAGIKNATSALRIPIVATGTQTAIHAMRSEPQMMTRFEPIVLDRWTLNTEYLRFLASYEQLLPLAEPSQLASRELAPLIYGMAGDVIGGTVDVLKELAVFAIESGVERIDISLLTKFKKTRLPDWEDAARRA

SEQ ID NO: 3465 - protein, 296 aa, synthetic construct; identical to SEQ ID NO: 3464
  REGION 1..296: note = TnsF-Tn7 System Protein

SEQ ID NO: 3466 - protein, 478 aa, synthetic construct
  REGION 1..478: note = TnsF-Tn7 System Protein
MASLNRPSHCDECGKPIAKAHRVLKGHRYCSTCYARVFKRRMCPKCGNFARLPKKDPNAVCRRCEVNRPCARCGKTEYEVARKTPYGPVCNVCEHYFREPEPCEICGTPSTLLARVARLGHDHRVCPKCARIDHRSCQACRRHRLLGEAPDGRMLCKPCLEKGEALCPSCGRPMPAGRGKVDCETCYWEKLFRKRLDIDRAAFSSPGMEEVFGEFGEWLFNEVGAQKAALSIHRYLPFFMEIENRWRAVPAYDGLLAHFGAEALRRVRLPMRWLEKAKAIVPDAVAKNEDSDRRRIREIIDSIPDGTPAGTALRSYNDMLMVRVEAGKTKIGSVRLALRPAASLLSRTDPSGKKLPDKAALDGYLLEAPGQKAAITGFINFLNEKHGLGLIPEVSRQRVAEARKKKLEKELLALARQGGEGEEFKHAWLSTALAFFHGLSRNVGKKLDDSQIAIEEDGGFEITWDGQNYWIPKWDRNR

SEQ ID NO: 3467 - protein, 478 aa, synthetic construct; identical to SEQ ID NO: 3466
  REGION 1..478: note = TnsF-Tn7 System Protein

SEQ ID NO: 3468 - protein, 230 aa, synthetic construct
  REGION 1..230: note = TnsF-Tn7 System Protein
MSKNTENKCDCVEVSQVRKIGPTRRSVSGVYMFRGKTPIQFESTLERDFVIREEFSLAVQRVVPQPCQIPFLTTKGRTYKYTPDFLVVYGPGSCYSKPKLVEIKPEKEWRAHWREWLPKWKAAWRYASDLGWDFHIHDETRIRDRTYQNIRDLDRYKRMRFGDEKSRAVIEIVLQAGRIPLHQLLTNSSMGENPMENVAHIWHLLAVRQLDCDMSGPLNDSTMLWIPGNE

SEQ ID NO: 3469 - protein, 645 aa, synthetic construct
  REGION 1..645: note = TnsF-Tn7 System Protein
MSKKNQNAQSAPTGLKLSRQKIDIREGNLVGCDGVVYRISDVIDFESILAINVETGRKCPLCIGDLMPMESLETGDPPRPEVDIDEIADADWKIAEQRFAAIEPLIKHPNLKRHDVDSRAKALGIHPTTLYRWITLYTAFRSLSTLIPKKRGWKTNGSRLSKSADAIVEEVINNYYLTIQRPTVKETIKEINHRCDLCGTKPPAASTIQSRIEKIPEKERLMKRGYKEKAKNKFLPAARKFPNANFPLQVVQIDHTPVDIILVDDFYRKPIGRPWITLAMDVNSRMVTGYYLSFDSPSETSVAMCVAHAMLPKDEWLMLHKVDAKWPVWGIPVTIHVDNGPDFRSDNFQRSCQMYGINLEFRPVKQPRFGGHIERLLGTLLKEIHALPGTTFSSIKEKDEYNPEKHATMTKSEFEEWLVTLICKVYHQRLHSTIGMSPLRKWEIGIFGNAEVQGIGMPERLTNRHTVHLDFLPSFRRSVQPTGVRIEGMKYYAEALRSWISAADPESPDKKHEMVFRRDPRDISVVWFFDPVVKEYYKVPFADQSLPSMSVWEFRQAKELLRKEGIKSATEHQINEAITELRSIVEAAKENTKKARRQSQRRKEHEKGITPGNPLAAETVKLATHPPEFFSGLVDGDVEAFGDIS

SEQ ID NO: 3470 - protein, 338 aa, synthetic construct
  REGION 1..338: note = TnsF-Tn7 System Protein
MTRAALTQGCDPLVLTGDIWPKWRVWTLDPDRGVTGDRIEALSRLSGIAKEAYEAAMLRPIAEVVSGNSLHDKSTWPWVLALGSRNRRRRGGLQYCPRCLAEDRRPYFRLHWRLAWHTGCPRHGCRLLDRCPHCTSPIEPHRLSAKELTMAVCAACENDLRMVGPVDADADGLAFQRAADEAVASLEGHYGGKALPASEWFSLARYFVTLLRKMGMGKTEGLMALARSFGVDTDALQAPATGLAIELLPVDERAALLGDAWKFMSGNPNDFLKAAQRASLTVQSLREPRQRLPATIEKLVIELPDKRTVRVGRAEREPFKPYSRQAVMRMWARFQRKM

SEQ ID NO: 3471 - protein, 296 aa, synthetic construct
  REGION 1..296: note = TnsF-Tn7 System Protein
MMDLSHIHPDFRAIVGLSDRERIKFMDEPRWLGYRIAQKILKRLEDLMEKPTRPRMPNLLIVGDSNHGKTTIIQRFNELHGQGYVNQDSEPVKPVIIAQSPPSADEKGLYISILRRFFVPYRVGDSVLKHRDQVIRVFRECHTRILVIDEIHSLLTGSATKQREVMNAIKLLCNELAIPIVGVGTREAIRVLHTDSQHASRFEVATLPLWSLDKEFQRFLASFEMVLPLKKPSKLSQPELATLLHTISDGNTGNLHTLLVACATEAITSGKECIDKGIIEGKVWLRPTRGIRELRL

SEQ ID NO: 3472 - protein, 296 aa, synthetic construct; identical to SEQ ID NO: 3471
  REGION 1..296: note = TnsF-Tn7 System Protein

SEQ ID NO: 3473 - protein, 483 aa, synthetic construct
  REGION 1..483: note = TnsF-Tn7 System Protein
MADSEESRSSVCEGCGASFFTVKKIYKQQRYCSTCYARLFKRRACPRCASVARLPTFDSKAVCQRCLSGSPCVRCGRTGRRVGRMTPYGPACNSCAHYFTQPQPCEICGTYSTRRSRVVADGRTVKACPKCARIGFETCALCRRNRQLTLRPDGRKLCWLCSTVGTISCWCCGADMPAGVGKECNECYWQRTFRKRLAMDVEALRSAEVKDDFLRFGDWLPSHTDYKKAARSINRYLLFFREVEKHCSWPPAYSDLLTHFGAESLRRTRLPVTWLIENRGVAVDGRARALDSEQRRIEVCLASGVGGQQREALSGYYNLLMSRVSTEQTSLRSVRLALSTATSLLIEVHRHTDELPDADEISRFLRHAPGRMASLTGFIHYLNLRFEAEIDIQILRGKAKSFGRRNLEHELFTLFKRTRAGEDVTERWILVGLKYFYSLTRRSMRGITVRPLADGNGFEVSFERQNYWIPSPCDAAQRSTDRF

SEQ ID NO: 3474 - protein, 483 aa, synthetic construct; identical to SEQ ID NO: 3473
  REGION 1..483: note = TnsF-Tn7 System Protein

SEQ ID NO: 3475 - protein, 229 aa, synthetic construct
  REGION 1..229: note = TnsF-Tn7 System Protein
MDKNSCDIPRPRPTRAIKPTKRSMSGVFPFRSEEGIPYESMLERDFLARTAFSRDVEMIVSQPVKIDFAGRDGRPFQYTPDFLVYYRLGNRSFEQYPKPLLVEVKPEADWRANWRKWLPKWKAAWRYANEQGWSFHIHDESRIRDTAFANVQFLERYKRFHYPPENTAWILETVRQMGVVPFHYLLARHFGGIYQAEGIGHIWHLVATRQLDCDIRLPLNSFLELWIPE

SEQ ID NO: 3476 - protein, 642 aa, synthetic construct
  REGION 1..642: note = TnsF-Tn7 System Protein
MSDQDKKNDELVPFVPDRARVDVNINSMVTHANHVYRISQVLDFKTVIGIDVESGRAASLPVAALRPVPRDKVEGLYVNYDIEMIAAEEWAVAQTRYAAIQPLLGNSVVGRKEVEKRAKEVDVAPATLYRWLERYRTWGELLALIPRKRGWQQGNSRLSKVAEDIITSIINDFFLTNQRPTVQEAVARVKEACENANVTPPSPSAIRARIKQVSDKDYFRGRGFAEIARNKYMPSPGSFPGADYPLSVVQIDHTPIDVMLVDKVHRLSVGRMWLTLAICVHTRMITGYYLAFDEPSGISVAMCLVHSALPKEDWLTVHGLEGEWPVWGFPAVLHSDNGPDFQAESLKRSCSLYGIENRFRPVRRPKFGGHIERLLGTFMKKVHSLPGTTFGNVDDRDGYDSEGKAALTAEEFEIWLVREILKYNQEYHSKIFMSPARKWHIGIFGNVGVDPLVGLPMRPADPFTIQRDFLPSFERTIQHYGVELDVRYYSEALRPWINVKDGATGKTRKFIFRRDPRDISALWFFDPLIKQYFKIPVANQAFPAASIWEYRAAKKRAVDEGRSQINEELIKRYILENRKLVESSKALTKKVRREAERHHRHSKNVTPAAPQPQSVERKQETFAKGIPEGMVDFELEGFGDVS

SEQ ID NO: 3477 - protein, 585 aa, synthetic construct
  REGION 1..585: note = TnsF-Tn7 System Protein
MSFFTDPYRYQKASKSNVNFAGVLQEKDYDLLVWFYGGVWKSPNKSHEPLVDVVFRRREADGVLGTVEVLPVALSFLGHLRIGSCWRGGRWVGAMELEVLPLTFVDFKDGEKWRLVQARDTVLMGNAVHGIPWREGTTWLVEIDFGRTKKLLIPCLEFFTRYYGRNSESARVIATYPWDTVLERFFYDFPMEPDDQRVCLKNWVSSVEAVFLWHLLYDPHTQKACRSIYSELEVQFGSAASSNKAQLKVGPWFEGSAMLTGAGKWLDDNTFLCLDLTGVSEPKGPPVKIERSSFATDGTLDGGWCREHRIKQLPEDQRVSLTDVEPPDVDSEKLRVPNPEIILLGERRRIIKSRRTHAGVRGRTIPSSTDHPLHAPGEGQGTDKGVGSVVFYTEHKWERQGDLKDIWEACGRMADKYPLITSVQWFTFKRGYQQIGPPELELLRPMEDTNVSPKVRNWAYLDVREKVLRGLLIIRIRADSRSFFLIESQRRPRFVSEKKSDDAKGHQGLLLEINASRTDTEQALREVCSSIRYVEGQVKNMRLEAGFPKTTFNHSPRARGDFLFEGVLIGKFAELNLTLQSEPVG

SEQ ID NO: 3478 - protein, 368 aa, synthetic construct
  REGION 1..368: note = TnsF-Tn7 System Protein
MATPYTWHPRIDLGNSVWPRTPPIMEDELLSSWLVRTALAHGCAPLALSGIVWPKWRAFGNDLDRGMRTERAASLGRLAGCTVAQVESCSLHSLVETLTDKPTAPVGTWPWILARGSRNLRCAAGLQLCPSCFAEAVPYYSIRSRLAWHTVCARHQTWLIDHCPNCWAALQPHCLLPPHQDCCACHRCGYLLSTTLVEKAPDSFLAFQQAADECLAGRQVTQCQSMATHDWFCWARSIVSFVRFASLHPSRSLIAVLDELGIGTIGVNCSGLAFEALPVRDRAVLLRQAWKIMSLDPMILVKVFRAHELPRSAIQLPRGSSVPSSLSIIVQALRDGPKKHRSRRVSGGARPNAAKAWARLLRKFSRDG

SEQ ID NO: 3479 - protein, 295 aa, synthetic construct
  REGION 1..295: note = TnsF-Tn7 System Protein
MTQYTHVHPEFRAVVQLADSERIHFLDQPRWIGYPAAQKILDTLLHLMQMPARPRMRNLLIVGDSNNGKTTIVRRFMALHGEGYVNEEGDAVKPVILTESPPTSGEKGLYIAILDQFWAPYRESDSVTKLRYQVVHMFRSCSVRMLIIDEFHSLLTGSAIKQRETMNALKFLCNTLAIPVVGVGTADAVLVLHTDPQHASRFDVMPLNTWQPNAEFQKLVKGFESVLPLREPSGLYRPHLAQLLHSISGGNTGDLQRLLLECATDAIKSGKEHIDQSIIESKSWLRPTRGIRELI

SEQ ID NO: 3480 - protein, 295 aa, synthetic construct; identical to SEQ ID NO: 3479
  REGION 1..295: note = TnsF-Tn7 System Protein

SEQ ID NO: 3481 - protein, 443 aa, synthetic construct
  REGION 1..443: note = TnsF-Tn7 System Protein
MTCYVRMFKRQLCSGCGNFSRLPVFDAAAVCRNCELQKPCVRCHRVGRKIGKLTPDGPACASCAHYFREPEPCERCSKSSTRLVRQEIDGQVLRCCPTCISGQTRSTCSSCRLPRVAVNAEGPPLCKRCALLGELPCPICTRMMPAGRVQSCQACSLDRSFETRLKRLQASTENSRLQVSLSGFAIWLKARRGAQFATFNLQRYVPFLAELHQRWAEIPSYAVLVDHFGAEGLRRVRSVVFWLQDTGQLHVDPVLRERASERRRIAHLLKVFPDGPACTALLGYHSFLGRRMELGQLQLRSMRIALSSAVRLLFSTDAGGQRLPAQKDLLQLLRKRPGLWASLYGFVGYLNRRHSVKLTPWVDPAWLTRAAHALKESRLLALYAKGGTDEAHERRWISMALSCFHGVGRIGMKTFQYRPAEHEGYSGFTVLLRGAEYWVPAVV

SEQ ID NO: 3482 - protein, 327 aa, synthetic construct
  REGION 1..327: note = TnsF-Tn7 System Protein
MASGEHLKALLRSHIKGDDDHFLTVAMQLAAHEAKQGHGKLADDLRALIDSAKKSRLPPGSLVPIGQPRGELSNLLSVALPKTRFAEMILDEATQNRLARIINEQRNFEKIRAHGLSPRRKLLLVGPPGTGKTMTASALAGELGIPLYIVRLDSLITKFMGETAAKLRQIFDAIRDTRGIYFFDEFDAIGSQRGLANDVGEIRRVLNSFLQMIEQDQSNSLIIAATNHPEILDYALFRRFDDVIEYGLPNQEQTKAVLKNRLSNFSKSIRSWDKLCKVAEGLSYAELARAADDAIKDAIIHDRAQVAVTDVERHLAERKAFHGRQRS

SEQ ID NO: 3483 - protein, 327 aa, synthetic construct; identical to SEQ ID NO: 3482
  REGION 1..327: note = TnsF-Tn7 System Protein

SEQ ID NO: 3484 - protein, 568 aa, synthetic construct
  REGION 1..568: note = TnsF-Tn7 System Protein
MALDGILTSTLKIGVVSSVSAQLIKTNLAHAGEVSGHYLGKNRYGKGEVGELVLIEGQQAVLLGRITEVNLPDRDRTEISQDFAGIRQIDAIGFIRLLGSINPHTLKVTAGVSSYPRLGDRVYSAPGEFISQIPVLTSAGVDAELPRVTLDLGHVAGDNGFPISVTPEKLFGRHCAILGSTGGGKSWTTSKLIQECRKFSCKLVLIDATGEYRSLNGADTVHCHLGEPIHRSAESIEVSIPPTSFSETDFIALFQPSGKTQGPKLREAIKSLRLAALAPDLFPNGIVRKVSQSKNIYREAMRRDNNASLVGNPSQPFEPKNLVQQVVQECCYPDAGADKMDRWGGASNELSYCSSLMTRIMSIMNSRSLGCVFSPGDNLPSLVDNLDAFLEGEKRLFRICLSSIGYEFNAREVIANAIGRVLLQRARSEVFRQRPLIVILDEAHNFLGKTLGNEDDLQNLDAFELIAKEGRKYGLNICLATQRPRDITEGVLSQMGTLLVHRLTNDRDREVVERACGEIDRSAAAFLPNLKQGEVAMVGVDFPIPVTIQIGRPSQPPMSDGPSFQELW

SEQ ID NO: 3485 - protein, 568 aa, synthetic construct; identical to SEQ ID NO: 3484
  REGION 1..568: note = TnsF-Tn7 System Protein

SEQ ID NO: 3486 - protein, 443 aa, synthetic construct; identical to SEQ ID NO: 3481
  REGION 1..443: note = TnsF-Tn7 System Protein

SEQ ID NO: 3487 - protein, 641 aa, synthetic construct
  REGION 1..641: note = TnsF-Tn7 System Protein
MKGAETEGLAPRRASVSLQIGEFVCHKGENYRLSGNMDYHHMVGIHVVTRISKALPIAELKRVTSEEARADSISYSLDHVADKDWAEAERRWAIILPLIKGDLYKSGAVEARAKECNVSRATIYRWIERYKSTGEYLALIPKSRGWKEGSSRLCDKVELIISNVIQSFYLTTRRPSKLEVHGVISDACKLQGLPSPSLPAVSRRIEQVPPKVRLKARGYGDVARDTYEPTPSRYEADYPLHRIQIDHTPADVIIVDDVFRRAIGRPFLTLSIDMYTRLINGYYLSLYEPSALSVAMCLVQAMLPKHKWLNHHGIDGEWNAWGKPYEVHSDNGPDFKAKSLIQSCTVHNIEREFRPVKTPHWGGHIESLMNTKAKAFATLPGATWRNINERGEVNSDGKAALTFAEFERWLIAEIIKYNNKPHSGIAFMSPASKWHEAFFGSSLRRPICGLPPVPECPITLEIDFLPSAYKTVQTYGVEWNACYYAEVLRPWIGRKDPSTNKTQKMVFRRDPRDINYIWFFEPVEGKYHKIPILDDPYPGVTVAEYRKAKLQVKKEGLNMADSGVVRKMIALQKSIVEEASAKKKSLRREGQKTKNNAKSRTPAVVFTGDSVPASNPVNVTPKVIGDEWGDDGEVTLYGGVV

SEQ ID NO: 3488 - protein, 201 aa, synthetic construct
  REGION 1..201: note = TnsF-Tn7 System Protein
MLFLDELPEFERKVLEVLREPLESGEIVIARANGRVRFPARFQLVAAMNPCPCGYLGDPSGRCRCTPEQVQRYRGKLSGPLLDRIDLHVSVLRESTSLQPGHGETATAEVSERVGAARQRQLARQGCANAHLDLQAMHRNCALAEADRRWLEAAGERLELSLRALHRILKVARTLADLERIDAIERRHLAEALQYRAMTST

SEQ ID NO: 3489 - protein, 374 aa, synthetic construct
  REGION 1..374: note = TnsF-Tn7 System Protein
MEEGHQLWHTGSSVIDPRWPLVPALRQDELFSSWLIRCALCHGCDPLELAQLIWPARRIWTRDCDLVVCGISLAALSKQSGLRERSLRDATLEPVCKLLGHELPRAGITPWVLALGGRNTKRAGGLQYCPICFMDARPYYKVQWRLAWHTYCSEHGVMLRDRCPHCQAVLSPHRLDYQAVDLRRCHQCHGLLSEVDPALPPAGAKELELFADSIVRGRSDGFGGLRLGPEDWFALIRGLHRLMRALSIHRTGPAKDFLALLDVDLDALPSVSLGLALESLPVSDRVTYLSAVNSILNAGATRFSAAAEAMHLCHSSCQAAGIGTLACLAQLLPKTSPRAHVHGASERLSPRSKNTVLRSWLLFQRKACRAGVIR

SEQ ID NO: 3490 - protein, 293 aa, synthetic construct
  REGION 1..293: note = TnsF-Tn7 System Protein
MTNYSHVLPEFRWQFGLSDSERLSGISRRWIDYEFADKLHAMLYAKLCGHRDQPDIFILGDSRMGKTTLVKRFIETRAPEFINSEGIREKPALMIELDQPSPKQFLIEILSTSISPFNPDATFENLFFKAMNMLENCKTKMLIIDEIQSLNQGTAREVTAISRLIKRVSNKTGISIVGVGVKSARQLLVKDEQYANRFVAVNVPEWTASTAFRQFLKGFESWLPLKQPSHLSSKEKAALILQMTGGNTSKVEELLLDCARLAITTGKECIDLDLLGLPRWKKDISFGIREAVL

SEQ ID NO: 3491 - protein, 293 aa, synthetic construct; identical to SEQ ID NO: 3490
  REGION 1..293: note = TnsF-Tn7 System Protein

SEQ ID NO: 3492 - protein, 586 aa, synthetic construct
  REGION 1..586: note = TnsF-Tn7 System Protein
MTKATAIADGLAYCGTCYARLFKKVSCNQCGKTMRTLDGRTPAICRSCKVKNRQCVRCGKPVPRAGLTVDEGVVCPSCVRYYKAPQPCILCGQLSLRLARDFQSGFMEPVCDRCRRKSFITCPSCGKHRRPAGPDGQGRLVCKTCLERTSPFLCPQCGQEGRAHSKTRCEACYWKDLVAKRLQGACALLTHAWAKEAFTRFIQALRERIGAQPTVIRMDKYFLYFAKLDLLFATAGEISAETLISTLGREGLRRYAVPQGYLVRQGLVPAMSDERLQAVSAEAAQTILLKASEGQWYAGLLQRFQAHLGEINARYQARGWHGKQQRFGPRTITSALRSAKRFLDTLAIGPAPGVQHIQQMQLDHFLVEHPGYRDSLRAFVRYLNRKEKIFRKLKIESVQRHLPKGLILDRARYVQLLQDWFQPNDADLKAALISILMLLYAQTAKKIIRLRLSDLAQNTTDGLYRVVFGRAEITLDHRVGQLLDRYLAQRRALAPLENTDDSDWLFPGRRHGGHLHEAMVSYYLKKQGVSADSLFSTAIYYAYLGGLRHPKVLARAFGIADHTAVRYLEMLDPRLTAEVEARIARR

SEQ ID NO: 3493 - protein, 379 aa, synthetic construct
  REGION 1..379: note = TnsF-Tn7 System Protein
MTVRRLKTRPSTDTAAPQQTPTVCLPTQDADLFQGMLAAYVTRRRGALRHQHKSVDRDTRIILEFLQFCGKAPWYWTEEAFEQWSYEIGVVRALAVSSQRHYQGAIRGFLAYLIENVKFRNVVRQKYGVDLAQICHAENCVPHISERELSRERPALTHAEIDQFFAAYDTAIQESFLFHSKDYRPLQRDKVLFYLTYVAGLRASETLALDVSSFQPNPDIPALGDFGLISVWGKGSRGSGPRNRTVPITHPPASDLLAWYVASVRPEFLSAADANNPALFLSERGRRLSLSTLEARFQHGMDLCGLKDRGFTPHCLRHSSVTHESMRFSAEMVRRKHGHTYQATTQGYLHVPDDFVNDEINRTVGGHLDKVFKPTKTGA

SEQ ID NO: 3494 - protein, 586 aa, synthetic construct; identical to SEQ ID NO: 3492
  REGION 1..586: note = TnsF-Tn7 System Protein

SEQ ID NO: 3495 - protein, 108 aa, synthetic construct
  REGION 1..108: note = TnsF-Tn7 System Protein
MPGDKIWWLYLIECRGGGIYTGIALDVEKRYQQHKAGKGARYTRLNPPERLLATQAYPNHRQAAQAEAAFKKLPASEKWRRVAAWSPPSTASSSLIPGVASPTTVAKF

SEQ ID NO: 3496 - protein, 299 aa, synthetic construct
  REGION 1..299: note = TnsF-Tn7 System Protein
MPAGRGDVCEACYWGRTCRKRITINQAAFKEPEMSRLFVEFGAWLMHTVGSKKAALKINNYLAFFLDIETTWQQVPSYSQLLHHFGAEGLRRVRLPMRWLDEAKGIKPNAQAKRLHSDKRRIRECLASLPPSSQANKALHSYWGQLESRIKSGKTSYTSARLALRVAASLLRHTDTAGQRLPAQRDVESYLDAAPGQAATLTGFTNFLNQQQGTALKPVVNAARICKQRKEKLARSLMKMAKQPEKNEAWQWEWLMLGMEYFHERKISKKAIRQQEIETKDDGIWVTLEGSKYWLPSSQ

SEQ ID NO: 3497 - protein, 299 aa, synthetic construct; identical to SEQ ID NO: 3496
  REGION 1..299: note = TnsF-Tn7 System Protein

SEQ ID NO: 3498 - protein, 225 aa, synthetic construct
  REGION 1..225: note = TnsF-Tn7 System Protein
MKLPASVRKIGPTRRSVSGYHAFRGEESIAFESTLERDFLIRAEFDLDVLGVISQPCEIPFQNPITGRCYTYTPDYLVYYQLGNRHYEDYPKPLLVEVKPQAAWRKQWRDWLPKWKAALRYAKDQGWTFRLADESRIRDATFDNITFLMRYKRMTFSPEESQEVLKTAHKMGVVTLDYLLARHFMGIYRAEGISHLWHLLATRQLDCHMALPFSPFTEVWVPNYE

SEQ ID NO: 3499 - protein, 642 aa, synthetic construct
  REGION 1..642: note = TnsF-Tn7 System Protein
MSENSANTPSPDSGVTQTRQQVKVVVGEYVQKGETVYRITEVLDFSTAIGVAVETGRSSPLPVTELMPIDSNLTGPAPDLTEVGDSDWHEAERRFSIIQPLVDQLLIGREVVSARAKETGVDTATIYRWLQRYRAMGTVLALIPQKPGWKKGNTRIPAHAEAVIKEVINEVYLTPQRSTAQKVVLEVMRRCHERKIDPPSPGTVRSRLRSVPERDRLRAHGFREKAINRFQPAAGHFPNADYPLAVMQIDHTPADIILVDDVHRKPIGRPWITLAMDVFSRVVTGYYLSFDAPSETSVGMCVAQSMLPKDEWLLLHNVEAEWPVWGTPRTIHVDNGPDFRSESFRRSCLAYGINLEFRPVRQPRYGGHIERLLGSLLKEIHDLPGTTFSSIKEKEGYDPEKHAAMTKSEFEEWLVTLICKVYHQRRHSGIGMSPMKKWEIGVFGNAEIQGVGLAPRPVDRLSVLLDFLPSFQRTIQPFGVTIDGLRYYDEALRAWINAVESDNPTNKRSFVFRRDPRDISAIWFKDPALNQYFKIPFANLSLPSMSIWEHAQARASLRKEGIDSTDESQLLRTISEMRSHVEESKARTKRSRRQAQRRKEHEKKVTPADPLANTAKAQPPIAPQSSFDGLLSGDIEVNWDIE

SEQ ID NO: 3500 - protein, 360 aa, synthetic construct
  REGION 1..360: note = TnsF-Tn7 System Protein
MPWTLRVPLLADEALSSWLAKAALRQGCDPLALTGAIWPGWRVWTRDIDRGIPDARLDPLVQVSGIPASDFEQAALRGVYEQISGHPLAENRSWPWLLALGTRNRVHHGGQQFCSLCLTQDITPYFRRAWRMAWHVGCPLHDVLLLDACPTCHAPIEPHRLVAEDKHIAQCARCKLDWRHVACTPISQDALRFQQLADEVLQRDHAVLGDKAISASEWFAVNAFLLGVIRRASRWPASELTFALQSLGISVTERLLPVTGLSFELLPVSERSAMLTTIQRMLDIGLDEMFEAFHRNEVMATALHDPRKSPPEVIRPMMVNGSPRQKTSRGDLQSGHQPKSERAVRAAWARLKRRMKTEMP

SEQ ID NO: 3501 - protein, 294 aa, synthetic construct
  REGION 1..294: note = TnsF-Tn7 System Protein
MSTHLHPDLRYVLGLSAEERIAFMDQPRWIGYPLANRIIEAMRGLMEKPSRPRMPNLLIVGESNNGKTTIVQRLSKLHGQGYVNEDADPVKPVIVTQSPPSADEKGLYIAILESFWAPYRPTDPVSKLRYQVIHQLRACHTRLLIIDEFHSLLTGGAVKQRETMNAIKLLCNELMLPIVGVGTRDAVRVLHSDPQHASRFDVVTLPAWTLTEDFQKLLAGFEKTLPLKQVSQLHKPELAFSLHAVSGGNLGDLHRLLIECANEAILSGKERIDGDIIQSKAWLRPTRGIREVTL

SEQ ID NO: 3502 - protein, 294 aa, synthetic construct; identical to SEQ ID NO: 3501
  REGION 1..294: note = TnsF-Tn7 System Protein

SEQ ID NO: 3503 - protein, 820 aa, synthetic construct
  REGION 1..820: note = TnsF-Tn7 System Protein
MPSSIASDMLTDPNGVIVDLVLGHEPGLDRLTVVGIVEAVAGGRAKQRRLARALLERPTVLTDGRSPAPRGIGDLLIALNHAGASGISAPLCAGCSKQLNTLQRRGPDWYCAACGPRREPCVKCGSTRPVYLRDRDGGPRCSNCPLDDGRDPTPLIVDIVTRVDPTLAPEVITAAIDAAVPRVGRRYRLVWTLQDRPDLLIGAGAEAPDPAVLRLIDRLVEAGAHKIVHPACPGCGRIIHLHRPIGGTWLCRNCTAKSRAQACARCGAVREAGTRDEQGRPICPTCLVRDPVNQETCAGCGRRRPVSTRAPDGPRCETCRPRTTTECAICGRTAPCTISVATGSPWCDACHKRWARCVSCGEIRPVRGGTVDEPLCAECVRDEPGFWRTCPGCGQRGRLHTSRCARCTVQQRLRQLLGDEHGAIRADLQALYQALAAVERPDTVAKWLDDGGGPAILRALEAGRRLLSHEALDELPPGKPVEHLRSVLVAIGTLPHRDEQLLRLQRWTAELVAMRTDPEERSVLHRYAVWHVIRRLRSRIGDGDTTYGQARAAKRHIKSAGALLDWLAAHDLTLATAGQGDLDRWLSTAAAGDRRDSGNFVRWARRHKLTRLDHAAQRWDGPTGVIDTETRWEQARRLLHDDTVETTDRVAGLLVLLYAQTASAIAGLTIDDIQFTDQQVRLRLGREPILIPTPLDQLVRDLVQTRAGHAVVGGRHASPWLFPGGQPAHHLSAFRMAERLRQLGIQASRARSAALFQLAGELPAAVLARTLGIHISVAAAWQRASSGDWLAYAAEISRSQKRPVAATPSDPIPATEADHR

SEQ ID NO: 3504 - protein, 820 aa, synthetic construct; identical to SEQ ID NO: 3503
  REGION 1..820: note = TnsF-Tn7 System Protein

SEQ ID NO: 3505 - protein, 345 aa, synthetic construct
  REGION 1..345: note = TnsF-Tn7 System Protein
MLSGWRAQQTARGLREDTMAPRERLVRRFVEFTNEYPWRWLPGHVDEWTQSLMAESHLAPSTIRGYQTDLRLFSEYLCDARYGWVAMCQEQFGLAVHPVPICHEWNTIAHLSDYEGNPEARPFSRAELQRFLDYADDQVDRAMRAKRKGVLAAYRDATLFKVVYAWGLRRTETSKLDVVDWGRNPAAPEFGRFGMLHVRYGKAVRGQPPRRRNVPSVMGWAVEAVADYLDNIRPRFGCDEHPAMWVTERGGRVAPAEINARFVAYRDSLGLPKTLTPHSLRHSWVTHLTEDGVDRRFIQQAVGHRCDTSTAIYTHVSGDFMNTALRKALSPAFDQTTDFESRKES

SEQ ID NO: 3506 - protein, 110 aa, synthetic construct
  REGION 1..110: note = TnsF-Tn7 System Protein
MARKLDYRWHLRQIMASREMFATTDLIEPLAQRGIHLSSSQAYRLVAERPERLSLKILMALLDILDCGMDELIEPVAANAPMPKKRAVGGTDAGLGGLRPKRARISGVES

SEQ ID NO: 3507 - protein, 765 aa, synthetic construct
  REGION 1..765: note = TnsF-Tn7 System Protein
MTSRADIEKRRAAVADLAAVLAARLPDADREELVEQIVVLHLTTPQAQAVLDHLRAHPDALTSGSAEGPAGLFRLLDSLASRYPSVHRMRCARCTDVRALPHRHGTTRICNRCYARTHLITCVRCGRPGRAATRDTDGGTVCDRCFKADPSRREPCAGCGKTAPVAYRIDGQPFCQSCGPRKRYTCSGCGRQNQIAAAVTDDGPLCPRCYRRDHVHDCGRCGRSTRNVRVDDRTAGTWICYRCWTPPTAACSSCGREKPCDRRTTEGRPICSSCRTRQRPSHRCAQCGDIRPIHTTLPLGRICGPCYRHLRRNPAPCTHCGQCRPLVGDDGTGGQVCGPCSGDGRNWHCARCGRVDLLIAGTHCLACDTALRSHELLIGPDGQISPQLTGLHTLFTEPDATEATHRQLAGNSTWIRLLRELVVTGDPITHAALDDHGTGASVEHLRSVLVHTGALAPRDDVGSLRPWLDTLVADLPTALSTTLHAYASWSVLRRARRRAARGHLTVSAPKYARARLQVATNFLTWLTEQGRTLADATQADVDRWLGEGASTRHRLRDFLRWAHSRGLAADLHVSWLGRDGLPEHLLGDDERWSSLRRCLTHDDLDLRVRVAAALVLLYGQIPTRIVELTTAHLSTDDRGGSFLRLRDRPVLLPPALAALITEFTNRPDHRRSAAPAPSTTPEWLFPGRRPGSHLDPGRLALLLRRAGFTVRSARGAALVALAADLPAPVLADLLGISIGAATRWSALAARDHADYLAARTAHPPR

SEQ ID NO: 3508 - protein, 765 aa, synthetic construct; identical to SEQ ID NO: 3507
  REGION 1..765: note = TnsF-Tn7 System Protein

SEQ ID NO: 3509 - protein, 371 aa, synthetic construct
  REGION 1..371: note = TnsF-Tn7 System Protein
MADTADRPGVAHLVLAPGVAHLNPETAVFGAMLDGWAMQQGARFLQPATIEQRRALLRRLAEFTNDYPWNWQCADLEEFIASCRRGTKPIVVSTARIYEITLRQFLTYVTDPRYGWPQQCRERFGVAPRQLLHEENSIVHVTEHEGDPRRRPLTYDEIQALFDAADARVEQIRAHHRKGAAAAMRDAALLKTVYAFGIRRREAWGLDLADLRHNPKAPQFGRFGALFVRWGKSSRGSPPKRRTVLTVPEMDWIVPVLEQWCTEVRPRFGATSHPAVWVTERADRMSLRRINEAFTAVRDAAGLEPSLDLHCLRHSYITHLVEFDYPEKFVSAQVGHSFAASTAIYTGVSDEYRNRLLQRSLAKLPDLWGQT

SEQ ID NO: 3510 - protein, 109 aa, synthetic construct
  REGION 1..109: note = TnsF-Tn7 System Protein
MTKKLGCRWHLRNVMAEHDMFATTDLVPLLAERGVHLSREQVYRLVTKTPQRLSLETLAALCDIFDVGVEDLIEVAVTEEPVHKKASGAHAAAPPPPVRRTTIRRPRGL

SEQ ID NO: 3511 - protein, 231 aa, synthetic construct
  REGION 1..231: note = TnsF-Tn7 System Protein
MQSKLKGATGKPWAADLQAFDTALAQRQKPLNVRSRKSYLSAAIALLTAAKVGRATQLKQEAVDALLRSKPGLRASLTPYLSHLASRHGMRLKVPGKRTAPRQSLLPQARYARLLMDAIAGKPPRPTELSLTATLLAHLLNVPLTQILQLRHQDVDWATGLQMRLKDRWMEVPQEVGAFVRALQSPEHLGGSDFNPWVFPGRLISDCLSTSAVSYHLRKYEIPTNRKQARH

SEQ ID NO: 3512 - protein, 327 aa, synthetic construct
  REGION 1..327: note = TnsF-Tn7 System Protein
MARADQIKALFRAYAGNEDAQFISVALQVAADEARRGHSKLAAELRELIEKARAPAAPRARARTLPLVQPRGELAELLTAQYPQHPLKHMVLSREVEQKLQRVLLEQRQHERLSEHGLTARRKLLLVGPPGTGKTMTAAVLATELKLPLFTARFDSLITKFMGESASKLRLVFEALKITRGVYFFDEFDSLGMQRGGQHDVAEMRRTLNMFLQLIEQDTSDSIIVAATNHGASLDTALFRRFDDVIRYATPDEAQVDELLRNRLAMMAPADLNWSNLVPRAVGLSHSEITKACEDAIKDAILEERSSISEKSVLTHLQERAASQLHN

SEQ ID NO: 3513 - protein, 327 aa, synthetic construct; identical to SEQ ID NO: 3512
  REGION 1..327: note = TnsF-Tn7 System Protein

SEQ ID NO: 3514 - protein, 216 aa, synthetic construct
  REGION 1..216: note = TnsF-Tn7 System Protein
MNYRSVTGRVQTLDGQTVSFESTLERDLVLLMDFDPRIARITHQPMKIRYRLESGEERSYTPDYLATSRGSPLRKPARPLLFEVKYLDELRDRWSDLEAGFRAARMVCAQRRWGFQVVDERYIRDDYLKNVTFLRDYRSYPSDGKSALMLLQTLQELQVSTPSELLAATFMDLTNRMQAVGAMWRMVANGSIGANLRQRLTMKSEIWYEEPTLYGK

SEQ ID NO: 3515 - protein, 649 aa, synthetic construct
  REGION 1..649: note = TnsF-Tn7 System Protein
MANELHASGFAVSPGAPVVFKQKACIVRRVLSTDRVIIEDIDTGRSEVAFINQLSSITTLVPEHEAGATGEMVAGPSALPPALLAFTAAEIAKAEKRLDVIAPLLAMRKRSRKDVEDHARQSGVSAVTLYKWIKNYNGCGSLVGLMDGKRGAPSVKKLDERVEQFIQEAIDQLYLSSQQLTPRDIYQTVKDRCELERKPVPHENTVRNRIAALPLNRVRRKRGQVALADKDMPTPGVFPEPVNPLNPVQIDHVQLDMIVVFSDTRMPWGRPWLTLVIDCLTRVIIGFYLSMDRPSAVAAGMALAMGMLPKQDYLASLGLPGRWPVHGKIRKVLCDNAKEFRGEALKFGCKENAIDLELRPVKQPRYGAYIERLVGNVNMMLRKKPGTTFSNPQQRGTYDSKKKSAYTLHELEIEIADWVVNHYHVHKHGALMKPPLIVWEEKILGTDGAMAAGLPIQIADPEKLKLDFLPLESRVVSPSGVRMNKADYYHEALNRWINASDPDHPSEKRKFTVKYHPRRRREVWFLDPEVKQYVKLDRYPFQAPGDDEVDGYVGVEEHIAIEARRQHEGSQLEDKKAKAGYRLRSAHREANAVADTKRVRRKPPSSSPRSGGADRSVVETQMQPAREPVGSGANPFEAFLSKKITGFNA

SEQ ID NO: 3516 - protein, 899 aa, synthetic construct
  REGION 1..899: note = TnsF-Tn7 System Protein
MTHPTDGCIRVRGAREHNLKNVDVVIPRNCLVVFTGVSGSGKSSLAFGTLYAEAQRRYFESVAPYARRLIDQVGVPQVDGIDGLPPAVALQQHRGAPTARSSVGSVTTLSNLVRMLYSRAGAYPAHQPMLYAEDFSPNTPQGACPHCHGLGRLYDVTEASMVPDDSLTVRERAVAAWPSAWQGQNLRDILTTLGHDIDVPWRNLPRKTREWILFTDEQPTVPVYPGLTVDEARRARQAGQPPSYMGTFTGARRYVMQTFATSQSAMMKRKVSKFMVGTRCPVCHGKRLKPESLSVTFCGLDIGDLARLPLDALADVLRPVAEGATTPTVTGDAGAAMTAAARKRAALQRKADGACAHAAAPDVRRTPHLSPEKQLAAQRIAQELLVRVQALTGLGLGYLSLDRATPTLSPGELQRLRLATQLASQLFGVVYVLDEPSAGLHPADTASLLTALQRLKDAGNSIFVVEHDVTTMQRADWLVDVGPGAGERGGRVLYSGPPEGLAEISESQTRRYLFEDGTRSRRERRTLNPENRTQGWLTLQGVHRHNLRGVDVAFPTACLTAVTGVSGSGKSSLVSQVLLELVTAHLGQPLASSEGESLADGPPDATADGDDPVSIRMTNEGATTSGRLGGATDHVRRLVRVDQQPIGRTPRSNLATYTGLFDAVRKLFAATPAARKRRYDAGRFSFNVAKGRCSTCEGEGFVSVELLFLPSVYAPCPTCHGARYNSDTLSITWNGLSIADVLGLTVDAACEAFAAEPAVLRPLHALRDIGLGYLRLGQPATELSGGEAQRIKLATELQRTQRGHTLYVLDEPTTGLHPADVDRLLLQLDALVQAGNTVVVVEHDMHFVASSDWVIDIGPGAGAQGGHIVATGTPHQVASCTASRTARYLAAALNNTIAN

SEQ ID NO: 3517 - protein, 899 aa, synthetic construct; identical to SEQ ID NO: 3516
  REGION 1..899: note = TnsF-Tn7 System Protein

SEQ ID NO: 3518 - protein, 583 aa, synthetic construct
  REGION 1..583: note = TnsF-Tn7 System Protein
MSPVSDPQFSRLPLNDTLYRLVGAAKILPKIDEMETPRVQLWFAEIDNHEPERLAYARRASGAYSLLSVIESAGSLPAFPLGSFWHDMTRQNGLIMGDQIKIENLRIPPQKWILVHPKDYIRIHGHYGIQEFPLSGEDRAGQLHDLRDAPYYRCYSDTGLELIIPAYEVFRRFYGVCSFLSNALLSNHWNNELENLIVGSETGFTPEGDAYKILTKQKLSSISCRAIAHFQTSEYANKQAQGIFVGIQNSRRSGVTHPWVQVHPHWTEDKEKDDITLSFLGQQLSSGAILVLWIYNSEFPPPPVPLVRVLANQKIPINSQQSSQAFSEPAGQPKGLNGDPVVIHPPADTRLGNYVSHLAINEMWSDLPDMRIEYKKVTFTDQALKSDEKSNKRKRNHGTGHKSSSGSLSSASLSAHAQSGIKNRFSALAACFMQLEKEKVIKQRLDYALINPVAVGGAVYCMLPTKLGTTDIPWAIVGRGDDARGRLCWVSEIELPDGSLQYFFELEVLDEEAFYALIVKPIENDARLPEESLSEILKLAVLTKGRWNNGDWRNLENTIVRGRIKHKFENGVLSADYVRRKFL

SEQ ID NO: 3519 - protein, 410 aa, synthetic construct
  REGION 1..410: note = TnsF-Tn7 System Protein
MSKKSNKFSPEVRERAVRMVQEHRGEYPSLWAAIESIAPKIGCVPQTLNEWVKRDEIDTGARAGVTTTDLQRLKELERENKELRKANEILKLASAFFRPGGARPPSEVLKGFIDQHRQAYGVESICKVLQIAPSGYWRHAAQQRNPTLRCQRAQRDGALAPHIERVWRANMQVYGADKVWKQLNREGISIARCTVERLMKRLGLQGVRRGKVVRTTVSDGKAPCPLDRVNRVFKADRPNQLWVSDFTYVSTWQGWQYVAFVIDVYARRIVGWRVSSSMRTDFVLDALEQALYARQPERDGSLVCHSDRGSQYVSIRYSERLAEAGIEPSVGSKGDSYDNALAETINGLYKAELIHRRAPWKTKESVELATLEWVSWFNHHRLLEPIGYIPPAEAEANYYRHLANQAATAA

SEQ ID NO: 3520 - protein, 297 aa, synthetic construct
  REGION 1..297: note = TnsF-Tn7 System Protein
MNQFPHLHEATAQMLEASLPEKLEFVRSNHLFGYPAYDHILRDLQDLVAFPRSLKPECRAVIADSDNGKTTLTRQFIANNPIVLDEAGYPITKVLWVETPASADERRLYSAILSALNVTHRPDAPPARLEALAHEELAVQRTSVLVLDELHAMLNSPARQQKQFMASLKRLSNMRQLSIVACGTVDVSRALAIDTQFVSRFTRLALPRWQADESFLKLLASFERLMPLARPSNLTAPKMALEVFKSCDGTIGSVRKITLQAVERVLKDGGERVTFEILQGACQSFTRSRLVTAPRPS

SEQ ID NO: 3521 - protein, 297 aa, synthetic construct; identical to SEQ ID NO: 3520
  REGION 1..297: note = TnsF-Tn7 System Protein

SEQ ID NO: 3522 - protein, 251 aa, synthetic construct
  REGION 1..251: note = TnsF-Tn7 System Protein
MAFLIWINRRGTALNHTRQTDLDLWQSENYSTRRSSNAFLTWCMKIGTMPVLTVHYRKSSAQTPMGQHHRINAIQRLLTEESIPLPARIAGLLVLLYAQPVTRILRLRTSDITTDGGTTTIRLGDPPTPVPEPLARILHDYVANRPHMDSATNPGSCWLFPGHRAGEPLHQSTLLSFLHKLGIPPQRGRISAIRHLALQIPAPVLAQALGYHHTSTTRIAAEAGSPWSGYAAGAHDPSATAGTPHEYRPLE

SEQ ID NO: 3523 - protein, 373 aa, synthetic construct
  REGION 1..373: note = TnsF-Tn7 System Protein
MVGNGFERGAVGLHLLGNLPLLRPEEQVFTAMLDGWRNQQLARNLAFSTIEGRENAVRSFIHHADAFPWTWTPQMVDEWMGDLRSVRNLRRSTLRNYQGTIRSFCAFITDPGYGWATVCQERFGTHPIQVIHEWNAAVHVQEAEAGPAKRAFTRDELQAFFDHADEQVSRVRGQGRKGWLPAFRDAMLFKTAYAFGLRRNETRMLDVVDFGRNPRGPEFGEYGVLYVLHGKANKGSPPKRRSVLTVFDWSAEILQQWNEEVRPMFPTAKAGALWPSERSAHVGFTQMNTRFGTYRDSLGLDQGLDFHSFRRSYVTHLIEDGWDARFVQEQVGHEHASTTSIYTCVSSDFRTRTLRRALDTAVAAALKLERKPQ

SEQ ID NO: 3524 - protein, 110 aa, synthetic construct
  REGION 1..110: note = TnsF-Tn7 System Protein
MKRHVSYQWMLREVMATRGIFTATDLSPLLLQRGIELSSVQVWRLVTRIPERLSLPVLAALCDILDVTPAELIATRAEAVAPRRTATAGAEVVDFTATIRPKRARITPEP

SEQ ID NO: 3525 - protein, 281 aa, synthetic construct
  REGION 1..281: note = TnsF-Tn7 System Protein
MQWHVLHRARRRTRRHGHQYGPGAAGAIRQTILVSLEFLDWLDLHGLALDSLTQRHIDMWLTSGTGSRPYFARDLVRWAITKKLAPATLTVPALKVAVPKDFTDLGDYTQQLHRCLHDRSIPIDVRAGGTLILLFGLRMSHVLALRADQLLHRTGSHYLRLGDHELLLPPLLAELLGQLPRERFNQSVLPPVSDGSSPLMFPGFDRRWPIGRGVYGDRLKQHGITPHTSRNTAMITLAAELPAAVLADLLGLHPGTAVRWVRTAKRDWHIYLAERRATTNH

SEQ ID NO: 3526 - protein, 281 aa, synthetic construct; identical to SEQ ID NO: 3525
  REGION 1..281: note = TnsF-Tn7 System Protein

SEQ ID NO: 3527 - protein, 386 aa, synthetic construct
  REGION 1..386: note = TnsF-Tn7 System Protein
MSGPEIDSASATTALTLAPNVIHLDPETAVYESMVAGWCEQQRARFLRTQTIEARISVVRRFATYTGLYPWQWRPAEAEAWFAHLASGTPSPAFSTVRGYQLTLRLFCDYLTDRRYGWIELCANRFGETPTQILHEWNSIVHVTEFEGRPGRRALTYDEVQVLFDTADSEVERVRGLGRKGSIQALRNAVLLKTVYAYGLRRSEAVGLDLADLRTNPSARDYGRFGGLYVRWGKSSRGSPPKRRTVLTVPEMDWIVEVLEHYFTQVRTLFGADRHPAVWLTERCGRITTRSANDAFTAVRDAAGLPQELDLHSLRHSYITHLIEFGYPERFVQAIYSPEMGVRHVHHAEKNQMNRRRGGGYLLPSITQISRRFDARTEGADARFAA

SEQ ID NO: 3528 - protein, 104 aa, synthetic construct
  REGION 1..104: note = TnsF-Tn7 System Protein
MGYAWHLRRLMAEHEMFHTSDLATPLAERGISLSREQIYRLVAQPPQRLSMDVLAALCDILGCGPGDLIEVRVENISVRKTGTGPEGSAPAAHRTTIRRPTPKS

SEQ ID NO: 3529 - protein, 514 aa, synthetic construct
  REGION 1..514: note = TnsF-Tn7 System Protein
MRRTATELGIGAADVTVGLRPAGALEGNSCDRCGKTVKAISTRRTGERICKTCAMRPQLICVDCGHPREHDPKTTQDACPGCRGTARAQCRQCSRSIFALLPAKAQPRCLFCRARQWVRARLGETVSEPVDPRLNSFIVRLAATHDFPQLRQWFLRSPAATTLLTRMAHGQVPIDHDTLDAAAGDRGGRAISVEHLRRLLVAAGALPPREEYLARLEAAFARVIEHTPGEDQMVIARYVHWHVLPGVRRRLATGRDPQRTCTLARGMLYGPRRLVDELHSRGEHIGSLRQPVLDQWLARRRSDAISVSVFLRWAARHRLASSVNLPVPRMNDPMDFNDPDQQWELLRRCLHDHTLSPRTRLAGTLVLMYGQHASTIVQLRASHVTPGPPTTLRLGTDAVEISEPIATVLRHAATGTISTLAERGIANSFETSEDRWLFPGRGPGKRLGTEALLNELRRAGIRSRQARNTTLLTLARELPPAVLADLLGIGTSTADRWRQWAGGTWAAYEVPSHR

SEQ ID NO: 3530 - protein, 514 aa, synthetic construct; identical to SEQ ID NO: 3529
  REGION 1..514: note = TnsF-Tn7 System Protein

SEQ ID NO: 3531 - protein, 510 aa, synthetic construct
  REGION 1..510: note = TnsF-Tn7 System Protein
MLRNRSTLLYPVSPDPATLGRRPPDDTLGDLNLDQVFAAISAGCEEYRFEEFFDRPSDDLDVIGHRHEVFADLEDAATAEVIKSFVADAAAVRTRLAEKLYDPMQADRWFLGAAAAHCDAVTAASQGLDAAPLQSVGLRDLRDRLSAYRSSSEFQALRDEADHLEQGLDDVRFVVHTHAGKITVAAPGDEPDFAGSVLETFARFSAPTGVDDTAERRGAHQLDRVETAVLHMLGQLFPRLFADVAAFHRTHAQFLPQWYRDAEREAAFYLQYLEFMRTLRPAGVKWTLPRLSRQNRAERIVAGCDVALARQRAGDQERCVSNDLQLTPPEQILAISGPNQGGKTTTARLFGQLHYLASLGLPVPAAQAALFLPDAVYTHFERAESIETLSGKLEDELRRARTLLEHATGDSVVIFNETFGSTSLADAYALGATILRQVIDTGALGVYVTFVDDLTRLDEHVVSMMSTTDPADDAVRTFKVVRKRADGKVHAAAIARSHRLTYDDIRQAVS

SEQ ID NO: 3532 - protein, 510 aa, synthetic construct; identical to SEQ ID NO: 3531
  REGION 1..510: note = TnsF-Tn7 System Protein

SEQ ID NO: 3533 - protein, 545 aa, synthetic construct
  REGION 1..545: note = TnsF-Tn7 System Protein
MRPHLLFPDRDLAAPDDETPPLLADLVADLELPVVLRAMSGDDPLMYAVCAQVLTATDTAPRIVRHRRAVLADAMAHPDEFADLYTIASEAIADEKKIYRSTFMVRPESTLRRSVEVLKRLLDAVARVRRVSDALLRTARSDAVRTMCTVLAEQLDDAYLQEAGEQVRELELAHGLLVSARLDRNDTVSGMRPLLARTSGNWLIGRRPSLRKPTFSYTIAERDQAGMEAFGAFRDRSLTQVADAADTSATHILNFLSCLQREVAFYLGCVRLRDTLHELDVSTCVPDVCDEHEREGETELSASGLCDVPLALQSKQAPVPVTVAAGPARLVVLTGANRGGKSTTLRGIGVAQLMAQAGMFVAADEFRFAVCSGVFTHFKREEDAAMERGKFDEELERMSRIIGAVAPGGMLLANESFASTNEQEASDVGFDVLTALVDSGVSVLLVTHLFTLAQRLFDDSRASVFLRAERGADGQRTYQLIEAPPLPTSFGGDVYRTVFGKPLNTIDTDIGAGVKDQQHGVKDQQQQQDSAATDDHAPSPATQTS

SEQ ID NO: 3534 - protein, 545 aa, synthetic construct; identical to SEQ ID NO: 3533
  REGION 1..545: note = TnsF-Tn7 System Protein

SEQ ID NO: 3535 - protein, 499 aa, synthetic construct
  REGION 1..499: note = TnsF-Tn7 System Protein
MADVFRCHERSGQRWTTWPRPSLTTPGARWPQHPASGRRSPWQRRPRPLPETRHRRRGCSRWVHSVVPPSRTPTGNSIKSDKSNVLSEIIWEDPMQPSPYTPGEVARSVPGRSVPLGQIEERLAYLSDLQRLVGRIRVDQGPRGVGKTSLLHEASLMATRRDILTIWVTAGEASGLATSIAREIDRATGEWSGRRDLTERLRGLDVGLQVGVPGVASVKASWKPDDLPDAGPPAGTREFEDLLVATHAVAVEHGKKGLVLFVDEIQDADLLSLKLLGYGWQDFQRERPDLPAAVFAAGLPSSKQVINDAVSPSERFAFKTLGGLSADAAMIALAGPARELGVEWDHDAVQLAVDYTKGYPHAVQLLGSYAWEAAALPDPGARITRDHVRDAIQHTDDDLQELYDSRLSRIRVPSERDFVRVMSALGDGPIHRNAIAHELGQATTSISSTRQALLNAGVIEEAGRGYLQFTVDGFAAFARQHFGFSTAAERLKEEPNEDS

SEQ ID NO: 3536 - protein, 499 aa, synthetic construct; identical to SEQ ID NO: 3535
  REGION 1..499: note = TnsF-Tn7 System Protein

SEQ ID NO: 3537 - protein, 336 aa, synthetic construct
  REGION 1..336: note = TnsF-Tn7 System Protein
MLTGWRAQGQSRGLAALSLKNRGDLVRRFMSFTGEYPWAWTAEDLESWSSDLRDRGRALTTIRGYQAALRKYCEYVTDPAYGWGELCWERFGTHPVQICHEWNTVAHVAEVEASPAVRPLTRDEIEQLFDYADERVAAACQSGRKGWLAAWRDSAMFKIAYAYGLRRRELARLETVDFYRNPKAPEFDRCGVCHVRWGKAVRGGHPRRRSVLTTMPWAPQVLQEWLEIRAEYGDVAGRWMWPTERGAVVSPAHAGRRFAEYRDAAGLPSELHLHCLRHSYVTHLLEDGFDPFFVQQQVGHRWGGSTALYSGVSSDFKNKALRASLDQLAGGSMEGF

SEQ ID NO: 3538 - protein, 116 aa, synthetic construct
  REGION 1..116: note = TnsF-Tn7 System Protein
MTTDVTIAWKLREVMASRGMFATTDLVPLLEARGVHLSATQVYRLVTQVPERLNMRVLAAACDALDCTPADLVQVVRAAQEKPKRHAAGGVSPVARATPDGRTRKPARVSVRRTDQ

SEQ ID NO: 3539 - protein, 494 aa, synthetic construct
  REGION 1..494: note = TnsF-Tn7 System Protein
MHTRWPIGPVCSPCYIVVLDAPAACTGCGRHQPLIGTAEDGTGICGACSGTAFDYTCRTCGLGGRTYADAQCARCVLTVRLQQLLAGPAGHIPEQLQPLRDTLALAERPRGILHWLKHSPNAALFASLAASGEPITHQRLDQLPPSRHLHYVRHTLVHLGALPARDEELDRIPAWLDTVLADRPAGHIRLVRPYAHWHLLRRARRRAAQRRRPAEPGSFLRTRVLVTLEFLTWLDEHGLDLGGLLQDHLDRWLDAGNTRIYAIRDFLSWTTGRGLTANLTVPSIPRQQPSRLMSEDSRWQLLKRCLTDSTMALDTRAAGALILLFGLHASQVRHLTATQLTHRDGNSYLTVDRHPILLPPRLAGLLHQLAEAPHTRAALTRTNRGEPWLFPGLVPGRPTSQSGLSSKLLARGIDTRPARNAALVALSGDLPAPVLASILGLHLNTAVRWAGFAKTSWADYLAARAHDMQRHPGKDVQDGVARPPSSRNTQDNCH

SEQ ID NO: 3540 - protein, 494 aa, synthetic construct; identical to SEQ ID NO: 3539
  REGION 1..494: note = TnsF-Tn7 System Protein

SEQ ID NO: 3541 - protein, 720 aa, synthetic construct
  REGION 1..720: note = TnsF-Tn7 System Protein
MSNEELRTTADSVLARLVGDPTGSARLREDQWLAIEALVAEGRRALVVQRTGWGKSAVYFVATALLRARGAGPTVIVSPLLALMRNQVEAAARAGISARTINSANPEEWDEVQAQVAAGEVDVLLVSPERLNNPDFRDNVLPKLSAATGLLVVDEAHCISDWGHDFRPDYRRLRSMLAELPAGVPVLATTATANARVTADVAEQLGTGSGSDALVLRGPLDRESLSLGVLRLPDSAHRLAWLAEHLDELPGSGIIYTLTVATAEEVTAFLRQRGHTVASYTGRTENADRQQAEDDLLANRMKALVATSALGMGFDKPDLGFVVHLGSPSSPIAYYQQVGRAGRGVDHAEVLLLPGREDEAIWTYFASLAFPPEDQVRRTLDVLAAAERPLSLPALEPLVELRRSRLETMLKVLDVDGAVRRVRGGWVSTGEPWSYDSERYAWVAKQRAAEQQAMREYAGTGGCRMEFLRRLLDDEEAAPCGRCDNCAGPRFGGDVSTTSLEAATGELRRAGVEVEPRRMWPTGLASVGLDLKGRIPPGEQAAPGRALGRLSDIGWGNRLRPLLAPDAPDEPVSEEVTRAVVGVLADWAKGPGGWASGDADAPARPVGVVTVPSRRRPRLVGALGARIAEIGRMPLLGSLELTPEAAERMPSRSNSAQRLRALEGSLTVPAELAGALAATPGPVLLVDDTTESGWTLAVSARLLRRAGAQAVLPLVLAVEG

SEQ ID NO: 3542 - protein, 375 aa, synthetic construct
  REGION 1..375: note = TnsF-Tn7 System Protein
MSRGVDLPGAAHLVLADGLVHLEPEPAIFEAMLDGWARQQRTRFLDEDGTIKPRLSVVRRFAEFTNQYPWQWESAEVEAFIDHLRSRRKKFAVSTGRNYQNALRMFCEYVTDARYGWPLRCLDRFGQAPAQILHEWNTVTHSSEYEGDAGRRPLTYDEVQALFDAADARVDEIRARRRKGSLAAHRDAILLKTVYAYGLRRQEGCGLDLADLRRNPKMPQYGRFGGLFVRYGKASKGGPPKRRTVLTVPELDWSVELLDQYLEEVRPAFAPGKHSALWITERRGRMSARRLDEAFETARKAADLPEELDLHGLRHSYVTHLVEFGYPERFVQDQVGHAYASTTAIYTGVSDEYRNRLLQRMLKERHAELWEDDET

SEQ ID NO: 3543 - protein, 108 aa, synthetic construct
  REGION 1..108: note = TnsF-Tn7 System Protein
MIKKMGYQWHLRQIMATRQMFQTTDLVGPLAERGITLSREQVFRLVTQPPQRLSMDTLAALCDILDCQPGDLIEVRVVNEEIRKTADEAPLRRLPTARRTTIRRPEGL

SEQ ID NO: 3544 - protein, 206 aa, synthetic construct
  REGION 1..206: note = TnsF-Tn7 System Protein
MEATCEVCGQHKEGVAKNKKTGLETCRSCYREHNQPKHYCILCFQLAPAGFITEDKKAVCAGCVAKMRNRGWTIEEALKFPKVFNPKVRVRHRQKTKNYPVHGGLCEVCGHEKKDVNKNRKTGKMTCYGCYVRTHCPKEPCVLCGKLKRVAARSNGRPACKGCLEHKICREICAVCCKKKRVQTRNSEGRAICPRCAEKANKKKAS

SEQ ID NO: 3545 - protein, 639 aa, synthetic construct
  REGION 1..639: note = TnsF-Tn7 System Protein
METPDGRRPPRGLDRHPAATAARREGRIGTVLGVGVGVVHQTAQPDQADHPDRAVHRLGLHTERPVRHRYHPSRTTDLVEPDQGRGERHTGIAAGPVDAADLSMTLRIRDCRRCGRAVGKPDRDLCARCHWAASHAPVKHRCPGCGADRVLQPDTGRCERCSRTCRICDAPVLFVARDLCKECLRRQRRDADRAECPRCSKRRILRSDAGYCGPCSHPGRPPNPDAACVDCGRVTRLTGAGRCRPCWERSPHRITVRAANLAEALDDPPSWLGGFAAYLVGRHHPSRACAMLTRLGKHLTDDAPVHPQALLDAVAADVPLARALEDFLTASKLALPPDREERRAAARRQSRIDAVPAPLRPAVIGFAEHLVAGRDRARRTGTHPRGHATLEARLTALRDFTEFLTTRRGKTDWAVVDVGDIEAFLHAHPRRRSFYLTGLRQFCRYALRRRLMLINPTAGVQAPQTMAFRGPTLPVDRQRELFRRWSTDPHVHPHEAFVGLAALLHGATTQDLQHLADDDIDHDQHRIRLGRRPHPTPLDLWTWTALQRCLQHRRNLGSSNSHVLITMQTKATRTAASDSYVKHTLRAVGIQPRILRSTRLVDLVGTVDAKLVAAAYGMRNEAVIAYLSDHVDTARLPNP

SEQ ID NO: 3546 - protein, 582 aa, synthetic construct
  REGION 1..582: note = TnsF-Tn7 System Protein
MTSKDLQKARELFLADDGLDSSVRQPISYSWQRSKSLKVRPDQLDLPFVREPNLDCPLVAAAEPVLRQLADGLVDEPVSVILTSADGVILTRITASRRLNRTLDDVQLIPGYSYSEEFVGTNGIGTTLETRQPTLVTGAEHYADCLGQLACAGVPITHPMSGALVGALDLTGWVEDGGPLLATLAKSATAQIEGRLLAQASADQTALLNAYLKACRRSPRTGVLALGDDVVLVNRKLRVALDAQDQGALLEHAVDLSGAPAIQRHIVALPSGQTARLSSVEDFGLGARRQLALFYVHLLEIPTSGSPALESIRVLPGITGNSASWRRSCQQIARCAREQQWVTVSGEAGSGRASALKAVAIEHIPIRTRIFTVAELAGDSAGLPALEQELGQDRFSVILRDIDLLGESQLRTVADLVQGREHAGWIGATIGGTDHNTDLDTLILPHFSHTVTMPALRHRIDDLHSLVPHLLRQLGRGADLSLSPAAMRQLCKYSWPGNVTELRQVLHDVVQRQRSGVVEVEQLPPMCRALSRHTLTQIEALERDAIVRSLEENHGNKKAAATALGISRATIYRKIKEFGIDI

SEQ ID NO: 3547 - protein, 582 aa, synthetic construct; identical to SEQ ID NO: 3546
  REGION 1..582: note = TnsF-Tn7 System Protein

SEQ ID NO: 3548 - protein, 350 aa, synthetic construct
  REGION 1..350: note = TnsF-Tn7 System Protein
MGDGRLRVIPGEVTPGVAMRDPQRFQAECVEAFVASWTARGFADSTITNDVGVLERMLAGLGRPVWEVTAADVDRVVGELASSGRAVSTRRNYVQVFKGFHRFLEVRKAAEIEAAFGVRLACPLDEFNAARHVGDDSPTANPPPAPERVAAFFEFLKARIATARKYGPAARDYALFRTLYHAGVRAEEVVMLDRGDVHFGRGTFGKLHVRFGKGAKGSGPRPRWVPMLDGLDLVLRWYLDDVRGRFPDSSVLLCDESGGRMAAATIRNRLRHLMSVEGRPEAEWFSPHGMRRACATHNYERGVDLVAIQQLLGHWTVASTMRYVRPSETFIEDAYQRAISATLTELTGQE

SEQ ID NO: 3549 - protein, 546 aa, synthetic construct
  REGION 1..546: note = TnsF-Tn7 System Protein
MHSQLCNACRARKMRTPRNCDNCGLFRRQVAKGLCATCYRVSRLHDGLCPGCNKVRPIEGKHALCEACERRSRARAGTCTDCHRDFRRLYGARCRQCQRRAANPTGRCQDCGETGEIIAGRCKNCYEHFRRHGTGDCPACGQRFPIGANGLCRNCTNKRRAIHVRNTPTGKLLLAQMTMYGRARGWSPGVLTVARTSLRIVLAGSDVLGPPPWTSNAIKELLDTTASHRANNAVQRVIDFLTDEGLATSSTEATFQLWLDTQFADLCPQIRSELHIWTERLLGRGDRPQKPLQYQTIRSYVWILTTPLANWSQTYDSLREVTPEGIDEQVATFSGAKRGLAASAMRSLFKTLKTQRIIFANPTRHLSGQNIKTAAPIGLQPQDRARLFADDLRPDEHLMVLLAGVHAMRAGQIVTLRIDDVDLTAGTIAVAGKPRALDSLTGQYLIAWLEYRRQRWPNTANPHLLVNYQSANTVAAVPTGHISATFRRLGYTAHQLRVDRFLDEVHNGNADPLRFAHLFGVTAPTALHYCADATALDHHDDGRDTD

SEQ ID NO: 3550 - protein, 350 aa, synthetic construct
  REGION 1..350: note = TnsF-Tn7 System Protein
MLNVVRDLRSPRSLTDPDGVAAYQEHLMAEYVLTRMAHGVADSTIRKEIAAVEEFLTVAEVPAWEIEPVHADRFLGQHQRKNAPATRMGKAVAVDLFFAFLELRYAGEIHELTGRVVASPIDSCNRPRHRGEFKVRVPPSSRDLAAFFVAWRDSLASQRRWLTATRSYVIARLAAEVGLRLQEVCMLAIEDLHFSHGPLGKIHVRMGKGSRGSGPRERLVPMLGDTRPLLTWWVQEVRGEFRDDWTLPRAPLFPSERDGPISGSVFAKALGEAAERHLQGPVRTLTPHVLRHAAASRLYGEGVSLDAIQQLLGHRWLSTTVRYVHVTDGTIEAEYLAAAERSASRFKETS

SEQ ID NO: 3551 - protein, 267 aa, synthetic construct
  REGION 1..267: note = TnsF-Tn7 System Protein
MTTPPKLRLRNVTKQFEIRGEKTGFTAIEDISIDLATGEFLVLVGPSGCGKSTLLDLLGGLSAPTAGEILLDGHPVSGPGLDRGIVFQQYALLPWRTARKNIEFGLEAKGLRAAERRGLAEHYLELVGLQAFADRYPHELSGGMKQRVAIARSLAFDPEVLLMDEPFAALDAQTRESLQGELLRIWQATGKTILFITHGIDEALYLGQRVAVLTSRPGRIKTIVDVDIDRSAEDVRSSEGFRAQRHHIWTLLHDEVERAQSQEVQHV

SEQ ID NO: 3552 - protein, 267 aa, synthetic construct; identical to SEQ ID NO: 3551
  REGION 1..267: note = TnsF-Tn7 System Protein

SEQ ID NO: 3553 - protein, 105 aa, synthetic construct
  REGION 1..105: note = TnsF-Tn7 System Protein
MKWNLRLVAAQRSIWRASDLRRLLAEQGLVISAGKMSHLWAGEPISIRLDDLDIICSVLDCEPGELLIRDSEAAKRTSPQSAPLAANGPAVQPKARRGHRPAPPV

SEQ ID NO: 3554 - protein, 474 aa, synthetic construct
  REGION 1..474: note = TnsF-Tn7 System Protein
MSATVALPHVGICFNCRRYRQYHPSICPDCLSLKPLGYLDAAGETVCAACVGQDSVFACTQCGREDHPYSFARCARCVLHDRLTVLLTDPTTGAVHEQLKPVFEVLINGPRPQTAIYWLMRRQRIGPGLLGQMARGEIPISHHTFNQLPMDRTRNYLRDLLVAVDVLEPYEPLIERMIPWLATLGDPLDAHHKPILDQFAHWRVLRHLRRQADVGRLTKGTFQSARSRLRRVVTLLTWLESHGRSIETATQADLEDHLATQPKSVAAELSQFLIWTHDAGLNRSLTLAHRATTEPQVTMSDNDRWTHVNTLLHDATIPLPTRIAGLLMLLFAQHISTICAMRTEHVDTTSEDRVLVTFKSTPIEMPDPLAQMLRDHLKRRGPASYVSRDNGWLFPGGNPGRPLATESIRHRLVARGIPPHSARHAALFALSGQVPHMILAQTLGISHTAAARWAALAARDWGQYVSQRTQQIPH

SEQ ID NO: 3555 - protein, 474 aa, synthetic construct; identical to SEQ ID NO: 3554
  REGION 1..474: note = TnsF-Tn7 System Protein

SEQ ID NO: 3556 - protein, 594 aa, synthetic construct
  REGION 1..594: note = TnsF-Tn7 System Protein
MTTAIDTRAAVQTKRPGVWGKLLRNPFAVLAMAWFAVVLITAAFAPFLASGGPNVTDLGAANVPPFTEGHFLGGDAAGRDILDRLIWGSRSTVMAVAIVTVVSITVGVTAGLISGFYRGRFETVANFVTDVIMSLPGIVLIIALYALTGSNIPVAMGVFGILLAPSYYRLVRSIVVSVRNELYVDAARVVGLSDVRIVGRHVLWAVRAPVIIQSAFTMAAGIGIEAGVSFLGLGDPTSSSWGIMLQQSFQSIYNNPISILWPSLVIAFTVLLLILFGNALSDALQSSARSKVLPRRKREAAVAASVETLRMEHDDTSIEQRELGSAEDVILAIRALRIGYPAPDGTVTEVVHGANLDIRRGEIHGLVGESGSGKSQMAFSTLGILPREAIILGGSVLLDGVDLLADPKRQGEARGTRIGYVPQEPMSNLDPSFTIGRQLTKGLRSAVPMTKADAEEKLIALLKRVGIRDAERVMGLYPHEISGGMAQRVLICGAIASDPDIIVADEPTTALDVTIQAEVLEILRGLSEERGLAMILVTHNLGVVADLCHTVSVMKEGRVVEHADVEAIFESPREEYTRTLLASSRRVELMEIQK

SEQ ID NO: 3557 - protein, 594 aa, synthetic construct; identical to SEQ ID NO: 3556
  REGION 1..594: note = TnsF-Tn7 System Protein

SEQ ID NO: 3558 - protein, 1055 aa, synthetic construct
  REGION 1..1055: note = TnsF-Tn7 System Protein
MTASLHKLTAGSGYDYLTRQVAAMDSTEKGHASLTSYYTEKGEVPGRWVGTGLQALEVEPGSGVSAEQMQSLFGAGFHPDMAARLAALPVGATREQVRAAARLGSPFRVHEAASAFQQEVSTRCSVWAVEHGLAADESVPLEVRARVRNEVATEGFAARMGRPPSGLELSSEVARLSRNATTACAGFDVTFTPVKSVSALWAVAPQAMAAQIEEAHNAAVADALAYLEERVLFSRRGAGGVRQVEVTGLIAAAFTHRDSRAGDPNLHTHVAIANKVQTLDGAWLAIDGRPLFAGLVSISEVYNTQLEAHLAARLGVRFAADAVRDPAKRPVREIVGGPAELREAWSSRRAAIVARQAELAVDFQHDHHRPPTPAEAIALAQQATLETRQTKHEPRTLTEQRSAWAAQAAAVLGADGVDRMLADVTAAGRVTRPEPTAEWIESAADEMVTRMGLSRASWTVWHLQAEASRRARERATTPDQAAQLTAQLLDAATDRCIALEGWVDPISDPQVLRRTDGESVYTTVGSRRFTSTAVIQAEQQITHAATLLDGRTASEEDVSLALLAATANGINLTTGQVSLVRQMATSGRRVQLALAAAGSGKTTALATLGQAWRDGGGTVVGLAPSAVAARLLADHVGHAITLAKLAWDLHQHPRAAETLIGPDTLLIVDEAGMADTPTLAAVIGFAIQRGASVRLIGDDQQLAAVGAGGVLRDLAHTHPAIHLTEVMRFEDPAEAAASLALRDGRPEALGFYLDQQRIHAGSDETVLRDALNAWLKDKEAGLDSVMLAGTRDQVAQLNKWARDHRLGATHGDVEGPVAVLSDGNHASIGDVIVTRLNDRRLSISATDWVKNGDRWTVAGVDPSGAIHAHHLVTGLRMTLPSSYVTENVELGYAVTVHGAQGITADTTHTVLTGTETRQQLYVAMSRGRQANHAYIQVVDGGGENSPIHPTTLQPVTAGDVLEQVLARDGSARSVTTETRQAVDAYTRLGLAVARYSDAVSVAVEHLHADTARELDQHADEVVDQLTSSPAWPTLRAHLLLLSATGDTGPTAAAAA

SEQ ID NO: 3559 - protein, 1055 aa, synthetic construct; identical to SEQ ID NO: 3558
  REGION 1..1055: note = TnsF-Tn7 System Protein

SEQ ID NO: 3560 - protein, 371 aa, synthetic construct
  REGION 1..371: note = TnsF-Tn7 System Protein
MGEFPGSATLMLAPGIVHLNEPTAVFEAMVTGWSRQQKSRQLGQGTVRVREALVRRFTEFAGTYPWEWTPGDVEDFTVSLTSGTGRLALSTIRGYHLTLRMFCDYLTDGRYEWAKQCRDRFGMLPSQVCNEWNTVAHLNDYEGKPERRPLTYGELQRLFDYLDDRVDSIARSGRKGALIAMRDALMIKTAYAFGLRRNELVRLDIADLRPNPHMRDWGTYGSVHVRFGKATTGSLPRRRTVLAVPEFDWIVAGLRQWVEEARPLFDAPGNPALWLTERLTRVSGRHVDSFFAQARTDLGLDEHLTLHCLRHSYVTHLVEFGYPERFVTDQVGHLWGSTTAIYTSVSNDFKNKTLQAALARVYQPADDGSTR

SEQ ID NO: 3561 - protein, 261 aa, synthetic construct
  REGION 1..261: note = TnsF-Tn7 System Protein
MTEVIHGLSFDLHAGETLSLVGESGSGKTTIGRAILGLAPVSAGSVSFRGETISNVSRAERRRLASDIQVVFQDPYTSLNPSMTVESILVEPLQAAGVEGGKHRVRELLDAVGLPADAGSRYPREFSGGQRQRIAIARALALSPAVIICDEPTSALDVTTQATVLELFRELQQNTGVAYLFISHDLGVVHSISDRIAVLYQGEIVELGDAHQVATAPTHEYTRRLQMAAPVADPKKQRERRAERNRLLQLSMDAAETSRAS

SEQ ID NO: 3562 - protein, 261 aa, synthetic construct; identical to SEQ ID NO: 3561
  REGION 1..261: note = TnsF-Tn7 System Protein

SEQ ID NO: 3563 - protein, 111 aa, synthetic construct
  REGION 1..111: note = TnsF-Tn7 System Protein
MRTIAMQWNLRQVMADRGMFQTSELLPLLEERGIHLTREHVYRLVTKTPQRLNTEVLVALCDALGCTPNDLIEPIVEQHQQLARTGTEAGPKIGSLRPVRATIRRPEGVDG

SEQ ID NO: 3564 - protein, 343 aa, synthetic construct
  REGION 1..343: note = TnsF-Tn7 System Protein
MTSLAAAHGPVTHAVLDTLSPERQIFRLRQVLVTAGHLPARDEYLIRLERWLEPTLEAIADTADRGLVRRYITWVHLRRLRRSSPITNRQQTVVRVEVSNIVSLSNSLQDNGRTLATCRQTDVDAWLDDGPTTRFTIRQFLSWAARHGAGRRLVVPARTCPEHRTVFTDADQRWTLARRLLHDDSIDDRDRVAGLLLLLYAQHLSKTVTLTTSDVISDEHGVHLKLGSKPVQLPAPMSELVLRLVNNRRGHGAFGHTDDHPWLFPGGIPGRHLTAMHQMQRLQPLGIPARIGRNSALMELAAELPAAVISSLLGLSIPTAENWTTAAGNTHHGYAAELVRRQT

SEQ ID NO: 3565 - protein, 343 aa, synthetic construct; identical to SEQ ID NO: 3564
  REGION 1..343: note = TnsF-Tn7 System Protein

SEQ ID NO: 3566 - protein, 1010 aa, synthetic construct
  REGION 1..1010: note = TnsF-Tn7 System Protein
MSTPVRIPADVDRKDRLIGPFTARQLAVLAVTTLLLYFAWTATRDVIAPAAFLAGAVPIGTAVAVLILTTRDGLSGDRLLLAAVRQRLRPSHLVSAPEGIVAAPRWLTRAAGRGKKPPVPQPLSATALNLPESVTGAGGVGVVDLGPDGLAVVAAAGTVNLALRTPEEQDALVSQLGGWLHTLRQPVQILLRSTRLDLTGQLQSLWDSVGEMSPELAAAAHGHADHLAGLAAGEDLMHRQVLLVWREPLDLPASNDHLGGPTPAAMLGWLVAGRRRARRELSAAARRAAEARLLRRVHEAADLLAPMGVAVTPLDDAQATAVVTGACNPGSLVPSSADIAGPHTVITTDGADTATFGDIEPAEDMNEPTQRRGFLRRRGRQIAGTAHGFGPDALAIGARHLEVGTGWVATLAVTGYPREVTAGWLAPLLSHPGRLDVALHIDPVDPVTAASRLRRQLARLESTRFHDASYGRRTDPLVEVAAEDAADLSSRVARAEARLFRIGLYLTVHARSETELADEVAAVRALAASLLVDTCHLSYRTTQGWISTLPLGLDLVKVHRTFDTNALAAAFPFSSPQLPVGDPARAASPEGVLYGRDAASGLVFVDRFGPEAHNHNAVVLGRSGAGKSYLVKTDILRSLYRGIEQVIIDPENEYRALTEAVGGTYIHLGTPGIRLNPFDLEVHTRPDGRRTAPSDALNRRKLFCHTVIRVLLGDQTAAQRATLDTAVTATYASVGITEDPTTWTRPAPTLGVLCEQLAALGSVVADDLAASLAPFVGEGAFAGLLDGPTTVSPDAAMVAYSLRELPDELKTIGTLLVLDATWRRVSNPANRRPRMVTVDEAWLIMRQTAGAEFLFRAAKSFRKYWAGLTVATQDCADVLGTELGKAIVSNAATQILLHQAPQAIDEVATAFKLSDGERQFLLSAARGQGLIALDGTDRAVFASMASVEEHVLVTTDPSELADTTDAEESGLDLTEPTPFTPNVTDDEDINAASADDEDGDGDLYVDVQAA

SEQ ID NO: 3567 - protein, 1010 aa, synthetic construct; identical to SEQ ID NO: 3566
  REGION 1..1010: note = TnsF-Tn7 System Protein

SEQ ID NO: 3568 - protein, 307 aa, synthetic construct
  REGION 1..307: note = TnsF-Tn7 System Protein
MAFENWLAHRFDNHPDDVQKILNRFAAWHHLRRLREMDRNGRLHVGPVHNAKQEITVAANLLTYLAEQGHTLQEMRQHHLDTWLAPGPSTRYTARTFVIWAIANNQLPKIKFPHRHPKQTPVLDQQERLRLLDNCFRDTNDALGYRAAAILLLLYAQPVTRISQLQIGDITTDDNGETKIRFGREHIPLPPPIAAILLRHIDNRPNTATAANHDATWVFPGTSPGQPIHRDRLMQQLRAMGINLRGARNSALRQLVLDMPAAIVAHTLGYSDQVIEKHAKHSGTVFAGYARRNVIGAGTTPTRGQEV

SEQ ID NO: 3569 - protein, 307 aa, synthetic construct; identical to SEQ ID NO: 3568
  REGION 1..307: note = TnsF-Tn7 System Protein

SEQ ID NO: 3570 - protein, 315 aa, synthetic construct
  REGION 1..315: note = TnsF-Tn7 System Protein
MWAGPNLPDPSHATLIAPYARWAVLRAARRRATYTSAAANSGRKRTRLAARLLNDLAEQGKTVDHLTQAALDQWTAGNRQRARGINGFVVWLTARGHLSNVTPYHVKPTPPSELGSDNEHFARITELLQEPSPFDLGDRIAGLLILLYGERLSRIRTLTTADVNVDGNTTTLTLGSHPLNLPAPLGTLIRRRATHVHGSARARVLGDAAKSYLYPGGRPHEPIHTTTLGRRLKAIGISPRIHRNHAMFALTSDLPAAVVATQFSLTIDTAWAAHGQRDQSDYLAARTASPGRRPAPRYAPLNIATPQRRRKETPR

SEQ ID NO: 3571 - protein, 411 aa, synthetic construct
  REGION 1..411: note = TnsF-Tn7 System Protein
MSDNRLPVTVLSGFLGAGKTTLLNQILRNRDGRRVAVIVNDMSEINIDSAEVEREITLSRSEEKLVEMTNGCICCTLREDLLGEISMLAAAGRFDYLLIESSGISEPLPVAETFTFIDPFGHALDDVARLDTMVTVVDGSSFLRDYQTGGMLDADAPEDQRDLSDLLVDQVEFADIILVSKTDLVTEQHLTELVGVLRSLNVSAQIVSMSYGNVGVDTIMNTGLFSLEKAATAPGWLRELQGEHTPETEEYGISSVVYRERAPFHPQRLHTFLTTEWDNGNLLRAKGYFWNSARFTETGSISQAGHRIRHGYIGRWWKFLPESSWPADDYRRQAILDKWEDPVGDCRQELVFIGQGINPDVLRRDLDACLLTTAEIELGPDSWTSWPDPLGPGESETVTSHVAQTSTAQPA

SEQ ID NO: 3572 - protein, 411 aa, synthetic construct; identical to SEQ ID NO: 3571
  REGION 1..411: note = TnsF-Tn7 System Protein

SEQ ID NO: 3573 - protein, 144 aa, synthetic construct
  REGION 1..144: note = TnsF-Tn7 System Protein
MNTPVDPICAALRDTTAQIAASTVRVHLSRQKTEAPRAVRDREMRGEIRTVHVDNLGVYGARKVHAELCRKGFGGARCTVERLMKADGLQGIPRLKTRKTTRSEGAETPQRADRVTRQFTAQAPNTLWVADLTYIRTHSPSSCP

SEQ ID NO: 3574 - protein, 238 aa, synthetic construct
  REGION 1..238: note = TnsF-Tn7 System Protein
VTETIKFLTWLHDTHHRTAADCLQQDLDEWLASGPTTRHKTRAFFAWAKKSKINTTVRFVNQQPKHVPMLTQEQRLTWIKALLSGNPGSLHYRVAGLLLLLYAQPLVRITALPATAVAVTTNDVRISLGNEPVPVPEPSAGILVELVHRRPNLRTAGGGIANPWLFPAQRPGKHLDAITLQHDLTRAGISVLAARNSALRTLVAEMPPPIVAKLLGFSDNCTQRHAQLAAQPWSRYVT

SEQ ID NO: 3575 - protein, 238 aa, synthetic construct; identical to SEQ ID NO: 3574
  REGION 1..238: note = TnsF-Tn7 System Protein

SEQ ID NO: 3576 - protein, 254 aa, synthetic construct
  REGION 1..254: note = TnsF-Tn7 System Protein
MSVQNRTPSWPGEQLCNSCFYTAMRTHGVCPRCGHDGVLPGRANRTDPKPVCLTCASIPEDYRCRTCAAEGQIYRGGRCARCALRDDLTALIVDGAADPATMSTIVEILCGVERPESILTWKRSPKVRSLLSSLSSGEIPLSHDGLDAVSQRTQEVSHLRSLFEHHGLLPHRDEYLARFESWLTAKLDTIAQPAIRAPVEQFATWHHLRRLRGNSTPGHASERSMLSAKQQVTASDRDDQIPHLAARHPPSHRS

SEQ ID NO: 3577 - protein, 356 aa, synthetic construct
  REGION 1..356: note = TnsF-Tn7 System Protein
VRVGARGHGPGVRQLASRLMRTVPPGVDDEEAFRTAIHEALAAVGQGTELRFTDATVPTEADSAHRLAEVDHLPNGDGLVLDEKVMDQLQEVVAERRFRDLLHRASLSLTRTVLLSGQPGVGKTMAARWLAQALGWPLVTLDLSSVVSSYLGTSGRNIKAVLDYAKSGPCVLFLDEFDAIAKRRDDDTDIGELKRIVNVILVELDRWPDSSLLVAATNHPQLLDHAVGRRFDRAIELLLPGIHERRLLLHGLAVGVDDIDGRVVDLVAELTEGTSGSDLTRLWELCRRRAILRAASTTDMLIEELARRTGDSGPGRDTLFAALSTRLNLSNRQIAAVAGVSHPTVATAIKRARARG

SEQ ID NO: 3578 - protein, 356 aa, synthetic construct; identical to SEQ ID NO: 3577
  REGION 1..356: note = TnsF-Tn7 System Protein

SEQ ID NO: 3579 - protein, 498 aa, synthetic construct
  REGION 1..498: note = TnsF-Tn7 System Protein
MEILEAFDLTGGLRAAAALAGCDHKTVAHYVALRDAGLSPEERPRRAMAIDPFLDKIEEWVDHSQGLIRADVAHDKLVAMGFGGSERTTRRAVAAAKKSWRSGHRRVFRPWVAEPGLWLQFDWGQGPTVAGRPTLLFCAWLAWSRFRVVLPTWDRTLPTLLGCLDATLRVIGGAPTYALTDNEKTVTVEHVARVPIRHPDVVAAGRHYGMTIRTCVPADPQSKGGAEATVRIAKADLVPTEANLLDAYATFAELAQACRDFCEQVNARPHRVTGQVPAELLVEERARLHVLPAQPVAIAFGLTRRVGWDSTISVEGVRYSVPHHHIDERVWVRWCGEELVVTVIDEAGPVEIARHGRGQRGRPQIRDEHYPSDHPGGRALPGDRTPRAANPAEAAFLAIGDGAAAWLTEAAASGAARVRSKMAEAVAFAKLHGSVAVDQALGTAALAGRFADADLAAILTHQQHGPNGPPTRATETHSLQPGTAGWSGFGATNPGGEK

SEQ ID NO: 3580 - protein, 367 aa, synthetic construct
  REGION 1..367: note = TnsF-Tn7 System Protein
LGVDKSGRVYVVGAVPLLHPEVQTVQEMLEGWRNQQLCRNLAHDTIEDRIRLVERFLAYTNEFPWTWTPAMVEEFFSDLRSVKRRRQSTIRGYQNALRLFCSYVSDPDYGWDRVCEQRFGTHPAQVFFEWNTAMHVQDNEQAPTKRAFTKRELQDFFDHADDRVALIAASARKGWLPAYRDSVMFKLAYSYGLRFNELRHLQTVDFARNPHAREFGRYGLVHVRYGKAKKGSPHKRRSVLTVFDWTPEVIGDWLAYGQPNMDDGIDLFPSERGALVSEDTLLRRFRRYCTDLELSAGLDLHSLRRSYATHLIEDGWDPMFVQHQMGHEHASTTALYTCVSNDFRTRALRRALDATIADALSWGEESS

SEQ ID NO: 3581 - protein, 116 aa, synthetic construct
  REGION 1..116: note = TnsF-Tn7 System Protein
MKRQVDYAWRLAEIMAAHGMHNTTDLIPRLAERGIQLSRPQVYRVVHQRPERVSLQMIAALCDIFGCGVEDLVTVTATDVRRKKTASARAAASAPNVVDLNKSVRPRRARVIRDDQ

SEQ ID NO: 3582 - protein, 366 aa, synthetic construct
  REGION 1..366: note = TnsF-Tn7 System Protein
MEQPRSGLAWLAMRRDQPGNAAQRLRELALGQLPLTHDAFHQLQPWRAAAHLEELLMASGVLPLIDKYICSFQRWLPGHLASISDAEHVKTVRLFATWRVLPALRDRAEHSHITPGVRRNAAEQIKYATTFLHWLATRDRTLASCRQSDIDAWFTENTEHGRTRLRPFLNWAIQSRRCPRSLSLPPMKASRRAALTEDERLAALRRLLTDAEIPQILRVAGVIVLLYAQPLTRVVRLTIDDLVHDGEALFLRLGEPPSPVPEPVASLLLAHIEDRDNMNTATNKASRWLFPGRRASQPCRPDHLSALLNEIGIPVAAARGAAIRQQLLEMPAPVVADALGYHDKTTARLLNEGGAAWSRYASGDHG

SEQ ID NO: 3583 - protein, 366 aa, synthetic construct; identical to SEQ ID NO: 3582
  REGION 1..366: note = TnsF-Tn7 System Protein

SEQ ID NO: 3584 - protein, 980 aa, synthetic construct
  REGION 1..980: note = TnsF-Tn7 System Protein
MPEDDGTSPTVSTPHFVGRDREMAALRVALARPPAIVLVEGEAGIGKSRLLREWLATPDQRTALVSVCPPLRESLTLGPIVDAFRGIDRPVSRLRLTELAGALRPLFPEWSSDLPPALQPLDDAKAARHRLFRALDELLRALRVDVLVLEDAHWADEVTLEFLLFVASRQQSDGPSLVISYRPEEVDVGSLLLRLTSRLPAGVTQLRIALAPMRPNDTAALVSSMLDGNPISQEFTTFMHERTGGVPLVLEESVRLMCDRADLVFRDGQWVRLKLRKLQVPPTVRDSTRERVGRLSPTAQQVLRAAATLAERSSVATIAMTAGLSPAVCRGAIAEAADAGVLDGDDRGQWRFRHVLAATAVYEAIPLTDRRHFHLLAGRALEDIHPPPVARLAHHFREAGETRSWARYAEQGAELAMASGDHTKAVDLLVDLFSWSELPPADRARVARIAGVAALGRREPVDEVYHRVIRTLRSVLETPGLSARQQAEIRNPLGRLLIIGGEAQAALSELEQAVANLDHDPVEAARAMTYLGWAYAGPWPASTHRRWLDRAAELTAEVDSPAERLNLAGNRAAALLMLGEEEAWDVVADLPIDGAASAERLDVARIHANVGTGALIWGRYADAEKHLTVAMRLAEAEQASRLQHNVRLEQTNLAWLTGRWEGLAERSAALADADRDRPAYYLGSIRLAARLAAAAGRRRAAGEQFRLVLEESARLGAADDTMEAAAALARLWLTDGNSGRALQITNEPMDTVQRKGIWVWATDLVPARIEAHLAAGDLEAATRLGDQFARGLRGRTAPAPRAALTVCRALLVAAAGDHARAARAYDRAARAWNALPRPYDAMLARERQAEALMAQGQIEQGRELLAAQYEQLFRLGARGDADRVAQRLREHGAEVPRLWRGGRRGYGDRLSPRELDVVRLVVAGKTNREISRILAKSPATVDQQLRAAMRKLKVSSRTALAVKAVEAGVFAEEDSLDDPS

SEQ ID NO: 3585 - protein, 980 aa, synthetic construct; identical to SEQ ID NO: 3584
  REGION 1..980: note = TnsF-Tn7 System Protein

SEQ ID NO: 3586 - protein, 353 aa, synthetic construct
  REGION 1..353: note = TnsF-Tn7 System Protein
MRPEEQVFTAMLAGFANQQLARNLARSTVEGRENTVKAFAAYVNAYPWQWAPAMVDEWLGDLRSLRELKRSTIRSYSEAVRAFCHFVTDPLYEWAATCEERFGTHPIQIVHEWNTAVHVQEHEADAAKRAFTKGELHAFFAHCDDEVARIRAFGRKGWLPAFRDATLFKTAYAFGLRRNETRMLDAADFGRNPHGTEFGEYGRCQVRYGKAKKGSLPKRRTVLTVWAWTPDVLDEWFTDVRPLFGTDNNPAAWPSERGLRIGCQRLNSRFLAYRQALGLDDGLDFHSFRRSYVTHLIEDGWDPRFVQEQVGHEHASTTSIYTYVSSDFRTRTLRRHLDATIAAALQAQTGGES

SEQ ID NO: 3587 - protein, 111 aa, synthetic construct
  REGION 1..111: note = TnsF-Tn7 System Protein
MKRKVGYAWKLREVMADRRIYTATELVPLLRERGIDLSASQVHRLVSGTPERLSLQVMSALCDILSCTPADLVATTAENAGVRKTATGDLPTPPTGVEKLRPRPARILPDA

SEQ ID NO: 3588 - protein, 295 aa, synthetic construct
  REGION 1..295: note = TnsF-Tn7 System Protein
MGREVSLHLGGLERSECRGWLPDFAAWLHARSPDSPILVRSFARHMAFVARIDSLLSGDQRVTEDWLLGRLSVSDMRRHLQFMRYLDETHGITLSEAAKQEAAEDERIRECLMRARRQAFKDVAEAYASHLTGCELPVRTRRQYLSAAIAFCEQAKVVDQAWSVESTLKYLAKRPGQRANLGVFVTFCRQVMGWDVPHLPEPPAPKADSPSAKRLRQLMQNIDSAGELASSAQRERVIELAFALPRGCLSMASVEQSDRGVVHLVVNGARYRVPGSLRKTVEAWASARKTGISAG

SEQ ID NO: 3589 - protein, 201 aa, synthetic construct
  REGION 1..201: note = TnsF-Tn7 System Protein
MTGRVAVGGSQAVDFESSLERDWLEQLDFDPRVIELQVQPFSLEHEVEGRQRRYTPDVLAVWQHGSARETVVYEVKFRDDLRDNWVDYRPRFVAATRYCRERGWRFKIMTERRIRTPMLSTVKFLRPYRRIEDHAVFRERLVAGLRDMGPTTVAQLLEATFDSKQERLQALPSLWKLVANFHVEVDFGKPLSMRTQVRSAT

SEQ ID NO: 3590 - protein, 647 aa, synthetic construct
  REGION 1..647: note = TnsF-Tn7 System Protein
MSAPRRAVILLRPGDVVGSEGRTYRIKEQVSSDSVLATDVETNAPKVLKAETLTAAPTPEDAAPASDAPALEDYTDEEWAEARRRLSIITPLLMLGRRSRAAVGAAAKKHDVGITTLYRWINAYESSEQLTALIPGKRGRPAGLRLLAVEQEVIIEAAIRDRYLNKRRPTEQEVVDYVQQMCRKAGTRAPNHNTIRARIHAIPKNLALRRRGRADLARGRYEPLRGHFPGASYPLAVVQIDHTPGDVILVDERTRKPLGRPWLTLAIDVYTRMVVGLHVSFDNPSFKSVGACIAQAICTKSAYLKSLGVEGEWPVWGLMSSIHVDNGKDFRSKGLIRACENYCIDLQWRPVGKPEYGGHIERLMGTVAKELAKIPGKTFANTRDRKGYDPESEAVMTLREFEQYFVDYLVNVYHKRLHTQLNVPPLTQWQRGIEGFGETPGRGMPPLPADPERLRIDFLPYIERTVQRYGVQKDHIKYYDPVLDPYINAKDDSGLPRSHCFRYDPRDISVLYFMDPGTKAYVRIPYADLSHPPISEWERRAAVSDLQKQGRAEIEEDVLFATIERLRARIDEAAQTSKSARRALTKRPMSQPAPARPSSAHDGGDDLSRSPVSATKQPSVTRVPADTDELADLFNEPIQPFDVRLNR

SEQ ID NO: 3591 - protein, 230 aa, synthetic construct
  REGION 1..230: note = TnsF-Tn7 System Protein
MPVSSLFRYHSGSHPRPGEISLAHRGVLFLDELPEWDRRVLEVLREPLESGHITISRAARHAEFPARFQLVAAMNPCPCGWAGDPSGRCHCSAEQVGRYRGRISGPLLDRIDLQIEVPRVQAAELRPDAAPGETSSAVRARVAAARALQLARCGMLNSQLGQAELLAHCRLSGREQTLLESAVERLQLSARASQRILRVARTVADLAGAETISAAHLAEAIGYRRMDKRS

SEQ ID NO: 3592 - protein, 294 aa, synthetic construct
  REGION 1..294: note = TnsF-Tn7 System Protein
MNYSHLTPDTAELMQASPEERIEFCKQDRWVAYPKAREFVGMLDDLYNHPRTIRMPNYLLVARSGNGKSSILEHFARRYPSDVDAGGMPVLPVLHVEVPPDPTESSFYSAILWRMMRGHRERDSVTAKRQQTVAMLRQFQVRMLLLDEFNNIAEAGRSTRDLLATVRFLANDVKLGICAAGTATAINALNQDPQLKSRFQGYALPAWKLDRAYLQFLAAYEQVLPLALPSGLATREMATKLYALCGEAIGESVKLLKLAAAQSVRSGEERITVETLESVHWVAPTKWSDVAALI

SEQ ID NO: 3593 - protein, 294 aa, synthetic construct; identical to SEQ ID NO: 3592
  REGION 1..294: note = TnsF-Tn7 System Protein

SEQ ID NO: 3594 - protein, 351 aa, synthetic construct
  REGION 1..351: note = TnsF-Tn7 System Protein
MSRPSSEPWRWEFVLSRREDELLSAWLARSAAAHGLSFHRFGVDYLGQRALTYRDVDVFPSARLLKVIEAGSHLSSEAVLSMTLVPWLAQLSSGVGRPGHFDAVLPRAHVARSKFRHGQQACFACLRDGVSYQRRWRLPFVVACERHEVWLRDGCPYCDAPLDPKIDVAAQPMCPTCYRSSFGPLPAQAGPDEALMDLQRRLLVAITTGQGLVIDGQEVPLADALRGFNFLLRIDQRLGRSEALPSARSPLRLEGRRLRLQRVVDVLDSWPDAIAADGKRCGLSSNPFSGESCPLWVLRGLSGLRQAKPRVRGARGDEDPVLEMLRRRRPKNWRTRYAHRLMRLAGMTRGH

SEQ ID NO: 3595 - protein, 451 aa, synthetic construct
  REGION 1..451: note = TnsF-Tn7 System Protein
MHGWLTEQVAEPPTCGHSGRAVGVIDGNRYCDNCWRNAPETRRQCVRCDVLDHLNRAALCKACRATDAIHNLFTGPVLTRRPELVPIRDHFLAADPKYLLQLIKAKNAWRVLTTVVGLPHSARHEDLDSLGTARAVSQVRSLLIELGVLPQRDEYLAQLEAWTAQAIACLPNRSDQLAIRQFTRWRQQHRRQRKPMAHTDAANDRRELRLVLSLIAALNHAGGTMDTARQQHLDSWAANAPADAFRVRHFLRWRAQSGKNTSLIPPAYQRAEFRIGGNVGSNEHALRQLTTNASPDPRLSLAVLLTVVYGIRVHRIAALRVENFTIRDGTAQVRLGSVALELPNVAAPWIEAIQQGVPLKRRFGGSSERSEWVFPGYRHGNHVLASSLAVQLRDAGVSPALAHQVSAAVIITQVPPAVVARILGIHLTTAAQWHQLAGSIPLHHQRPRDFP

SEQ ID NO: 3596 - protein, 289 aa, synthetic construct
  REGION 1..289: note = TnsF-Tn7 System Protein
MTDLVSVRGIAASTLRGYQNTVQQFCDFLCSPHYGWVAECERRFGSHPVQVCHEWNTRPHLQEYEGDPRRRPLTRRELQLLFDRADAEVDTRLAVGRKGAAAAYRDATLLKVVYAWGLRAREAIMLDTTDFYRNPKVPELEDFGFVRVRFGKASRGSPPKPRTVASVMPWAVDALRDYVENVLPLMRTPESAALWFSERSRRLGVRSLSDRFALYRDDLGLDTALSPHCLRHSFATHLIEDGHDPVFVQRQLGHAYQSTTGIYTHVSEDFANALLQEALGRVPQFADLK

SEQ ID NO: 3597 - protein, 625 aa, synthetic construct
  REGION 1..625: note = TnsF-Tn7 System Protein
MSNTAPSDVGSDMLARLIAAAAITVLALVALPLAIPVVATRMAGDTVATKTSFWVVSKWHWVINAAGIIAVASLITVEVVLLARWISSGDAEAFSATDGWAPQLVPVFAPWAVINLLAGLLLLPVAWSLRRRRIATQVRTRQITDVIRQEKIENARKRAADLSTANHIGVTLDRNTGRITGTGAHPTTAPHPVGEGRQAFGVVNRSTVRTFADKFHDIRRVRDWINPTGTHLILPTNSSAVRALVIAESGAGKTVLLNDIALCATQYGWPVIVIDAKGDPADAEELITTAETLGHTATLGGAWDLFNGTADQVTAKLMRLMPIPDGANQYYLDEIRGVLQAVQHESPIRSVDDLRERIQHPAFHVRDQYDLSMVNQPIDRSGTTAGSRALQSLLVALRPLEKWIDDDGWSYTAPAADVTVVPLSPVNDAQAKLGDLLLLDLRNYLATRLEGRDKTPVLVIVDEFPQLVTGAQDPGDIAGSLFETARTAGVGLVLATQSVAGLSNDPLRRRRALSSGAALIFGRSKDPDEIVNYAGTIMRLESSSSGDELGAARAQHSYVIPPQDVREASDGAFWLVQSGALAPFRALPTGRPGLRSPRMTADECPHEEVGPAQGEPGLSDEHVQA

SEQ ID NO: 3598 - protein, 272 aa, synthetic construct
  REGION 1..272: note = TnsF-Tn7 System Protein
MNTSTTTATTTPASVYQQLRGHLAELKLADAADALPRVLDQAGAEGWSLTHTLERLLAIEVTATDARRLSGRFRFANLPTGATLDDFDLDAASGINRSLLAELGTCRYLETATNVLLIGPPGVGKTHIATGLGHAAVQAGYRTYFTSAADLAARCHRAAIEGKWGTMMRFFAGPTLLVIDELGYLPLPAEAASALFQVINQRYLKTSIVITTNRPVGAWGEILGDTTVAAAMLDRLLHRSVVVTLDGGSYRLRNHAAAADELRRVTTGTNFR

SEQ ID NO: 3599 - protein, 272 aa, synthetic construct; identical to SEQ ID NO: 3598
  REGION 1..272: note = TnsF-Tn7 System Protein

SEQ ID NO: 3600 - protein, 113 aa, synthetic construct
  REGION 1..113: note = TnsF-Tn7 System Protein
MTTLIGYEWRLREQMAVAGMFSTTKLIPLLEERGVHLSSSQVYRLVAERPERLNLQVLVVLMDILNCTADDLIVRADLGHARSTATAEAAGTDSASTVIRTRGLRPQRARLAD

SEQ ID NO: 3601 - protein, 251 aa, synthetic construct
  REGION 1..251: note = TnsF-Tn7 System Protein
MPRARRRATRSASTRGRARWAYTRINTAVALLEHLASLDLTLPEATQLEIERWLAAGPSTRYEVRDFLVWTARHGHSDDLLVPHRGKAEPEGIDEETHWDLLQQCLHDEDLPLDVRAAGSLLLLFGQHLTHIITLTTGHPPQPLATLLTRLVDQQPRQGWSGNTPSTWLFPGTRPGTHRSASSLARALTGHGIPIRASRVTALVQLAEEMPPAVLAPLLGLHVITALQWRRRAATDWTAYLQARQRGLGDR

SEQ ID NO: 3602 - protein, 232 aa, synthetic construct
  REGION 1..232: note = TnsF-Tn7 System Protein
MRRRLAVLLDDGTGRPAPRLGPLADALCSARNPMSTEAWLRSRPVRERLKSIARGDLARAHEALSALPPSGGVNHLRQLLMSVGLLPLQDTELLKFEQWTKHLLDRIEPAEDRRDLATYIAWHHRRRLRGKLADGSIKPKTWRTAQSQIRTAAKFLAWLRARDTALADCTQHDVDRWFAGGPSTRNYARRFINFAVQRRICGTLRVPYVKHGQPVGVHMYVPSHVRVNAASC

SEQ ID NO: 3603 - protein, 232 aa, synthetic construct; identical to SEQ ID NO: 3602
  REGION 1..232: note = TnsF-Tn7 System Protein

SEQ ID NO: 3604 - protein, 256 aa, synthetic construct
  REGION 1..256: note = TnsF-Tn7 System Protein
MSELTGSRIRSTARKLGLPHLAETVDEFAKRADEAKMGYLDFLDLVLSEECAVRDDRRFRQGLRLSKLPHHKTLDEYDVSFQPELDPRKVKDLATLSFVEAKANAALLGPPGVGKIHIAVALAVAACRAGYSIYITSLDDMVRNLTAAEAAGRLTSKLGTYLRPSVLVVDEVGYQPLERAEANLVFQVISKRYERGSIILTSNKTFSEWGQVFGDEVLATAILDRLLHHCDVISINGPSYRLKNRLKAIERDNEVA

SEQ ID NO: 3605 - protein, 256 aa, synthetic construct; identical to SEQ ID NO: 3604
  REGION 1..256: note = TnsF-Tn7 System Protein

SEQ ID NO: 3606 - protein, 114 aa, synthetic construct
  REGION 1..114: note = TnsF-Tn7 System Protein
MTRKTGYHWLLRERMAAQGMWKTTDIAPLLAERGIHLSAAQIYRLVSGTPERLSLPILVSICDILGCTPSDLISPHIEADSKPRKAVGADLSDDVLDLNRIGRPRRARITPDAR

SEQ ID NO: 3607 - protein, 189 aa, synthetic construct
  REGION 1..189: note = TnsF-Tn7 System Protein
MPRLTIPYRATTNPQPMGRHQRLTALRRVLDHDAAPLRSRAAAALVLLFAQPLTRIVCLTTDDILDDGQQVHLRLGAPPSPLPEPVADLVRDYLRSLPAHTPAVNLSAHWLFPGRRPGQPVNTSTLRDALRDLGIPNQRARTSAIRHLVLRAPAPVIAKALGYHDKTATRLVTEAGGTWSRYAPGDHTR

SEQ ID NO: 3608 - protein, 108 aa, synthetic construct
  REGION 1..108: note = TnsF-Tn7 System Protein
MSRQITYRWRLRELMAARGTFTVPELMPHLAEPGITLSASQVHRLVSGTPERLSLPVLAALCDLLDCTASDLIPTSAENVRLRRTAGQDAPINLAARRPTRVRLTDEG

SEQ ID NO: 3609 - protein, 436 aa, synthetic construct
  REGION 1..436: note = TnsF-Tn7 System Protein
MEGKPHSKTECQTCYWKKRAEIRFKDSVALLTNEWVRLAFEQFFNDLIKRQNPHAVATNRIEKYFLFFAKLDVTFSDPGKISAKLLLDAFGAEGLRRHAVPYGFLIKAKLINEVTQDALQDANELRKQGQILNNSKGKWYSDLLHRFYVYQEKIQERYADRGWKGKRRRFVPRTVTANLNAATVLFNYLTEQRGVKSVQQISKDEIEPFYADKPGYKVAVSSLLRYLDRKEKLFGKVSRKKSEDKDMPAASSLPENLFLSRSKYQELLRKWLNPDDTTIKECLCCALMLLYAQSPTDVVKLRLDDITYRENGLYKILLGQTEITLDPRVSELLNRYLEKRKALATMEDVENNDFLFTGRTYGGHITESALTYYLKKHNVSAKQLFSTALYNAYMGGLRHPKVLVKAFGITDHTAIKYLNIIDPQLIQEINSKVANA

SEQ ID NO: 3610 - protein, 377 aa, synthetic construct
  REGION 1..377: note = TnsF-Tn7 System Protein
MASNSEKFSATNALTLAHSGLPENDAALFENMLEAWSRRRVGNNHRKKSISGDITIVREFTAFTNKAPWYWDEDDFDAWCEELGVARGLAPSSQRKYQGAIRIFLEYISNNVKFKNEVRRLYNITLKQICNEENCIPHVSEKELSNERRAFSHQQISIFFDAIDRSISEAARFNSKDLRPLQRDKVIFYTLYIGGLRISEGQGLNLESFEPNPAIPQFNDYGFIRVWGKGSRGSGKKFGQVPITHDGLPPLIDWYVKSVRPHFMMNADANENALFLSERGNRIAISTIEARFQHILRLAGLEGLGFTPHSLRHSSVTHESLRFSIEAVRRKHRHVYASTTQGYMHVPDSMVNDELNATIKAQIDMALDNSDNLKDKK

SEQ ID NO: 3611 - protein, 1042 aa, synthetic construct
  REGION 1..1042: note = TnsF-Tn7 System Protein
MTENDLEQACIEWFKELGWEYAHGEAISPGGLHQERDHYTEVVLAPRFRSALERLNPDTPASALDEAEKKVRQFAGQSLMEGNRDLYVWLRDGIPVEVETDGHRRQIYLAAFDWSDTDRNDWLIVNQFTVKGSKTVRPDMVAFVNGLPLSVIELKNPADEKADVYAAFNQIGNYKNEIPQLFEPNVVCVISDGAVARIGSISADQERYMPWRIADGINEPARHLELEVLVRGLFERNTFLTYFRHFVAYQTNGAGTFKVVAGYHQYHGVLKGVERALGSIRNRRDGKGGVMWFTQGSGKSFLAVFYVGMLREHLDLENPTIVVVTDRKDLDGQLYETFSSCRIPLRTVPVQATDRADLKKALSEQVAGGIFFTTIQKFAPEKGLDTVEELSSRHNIIVICDEAHRTQYGFKSELDKKGEKYRYGLAKYMHDALPNALYLGLTGTPISENDRDTEAVFGTYVDIYDVLASQKDGTTVPIHYEQRIIDLKINRDELDSLDDELEKLLEDDPEEQSTKTISALSRLESIAMADGRLDKLADDLVSHWDERLEAIDGKGMIVAISRKAAVALYDEIIKRRPEWHSDDVDKGVIKVVMTSPASDSPNLRKHATSAQEKKMLEKRIKDPEDTLRLVIVRDMWLTGFDAPCLHTLYVDKPMRGQGLMQAVARVNRVWKDKPGGLVVDYIGIGEELKAAIAQYTRARGHGHGEPVEFIDEALSILKETIDIIRDMLHGIDLTGVATDAKRALAALPLAMNHLVKLNQKKNDSKEDAKPEGVKRFLDQVVKLTKAQALAGTHPEALLLRNEIAFYQAVRAGLVKFTSVGAGKNKVEKEAAMRQIVAKGVLVNGVTDLYKTLGVDKPDISVLDETFLNKLAEIPQKNLAAELLQRLIDDEIHARAQRNTTQAQKFSKKLADAINRYTNRGLTSAQVIEELIKLAKEIAQDQPPPDMGEDEFAFYEALRENESAVREMGDPILKALAHELTDKLRKSATIDWQKRETARARMRLLVKVLLTKYKYPPDKQPEAVDMVIEQAELYADQWAVEGA

SEQ ID NO: 3612 - protein, 90 aa, synthetic construct
  REGION 1..90: note = TnsF-Tn7 System Protein
MHKSWWLYMLECKGGEIYTGIAIDVDERYKAHKNGKGAKYTKMNPPVRILARKMFPDRRSAARAEYEMKQMTPLKKWQWIYAFGFERIET

SEQ ID NO: 3613 - protein, 246 aa, synthetic construct
  REGION 1..246: note = TnsF-Tn7 System Protein
MRRSSRDKVPCSVCGEPRLVFGRAAKGNPVCRPCIDHLNVEEAVACRKRAWFQQVQDLVQACCTQIDQGWVRLMFSHFVARELERQDARLVVRRLPRHLRFFQVLDTTFANCLDVTATGLLSRCDAQMLKHSRVYLEFLKEIGYTVPSREAIADLRVTRSADRLLAQRQDHRSYAVLLAYHAELNRRHLRSRTIHRLITIAFEFLQYLHDRDPCEELIDTYVRQMPTHRIGLGAFTEFLQGGRRAI

SEQ ID NO: 3614 - protein, 482 aa, synthetic construct
  REGION 1..482: note = TnsF-Tn7 System Protein
MVAKIRVRWPDGAICGICFTEALHTHGRCPGCGDERLLPGRHPDGTAICRDCAGITRPEMQCVRCETEAERFRGGACARCVVTEDLESLLKPTTPPDLRLVRLVQALASAERPESTYTWMRGKRARELLTAIGEREIELTHDGLDQLPSSPAVEHLRAILIHHRMITAPADHYLAIFERWLAKRLDELHDRPQIASIIERYATWHHLSRLRKRVGITNMDVAARDARQQITEAGKFLIWVEDHAHLTVETFSQLHIDEYLTDAVSTRYEIKNFISWLSRGRSGRRQLFVPKRRAVLPLPALTQQHRLQVIRNAIEFDQVALGTRVAALIHLLWATPLTRLAQLKMDCIELRPDGMHIALGPTPSAIPEFLAPLFWQHLEDRTNQQTTNVGTDWLFPGYRAGQHLSVPTLQQRFNVLGLDPQRTRNTTLKSLTGQIDVRSLAETLGYAPKTLSAHAERAGVYMGGYAASKRVNTPTTISLTKP

SEQ ID NO: 3615 - protein, 794 aa, synthetic construct
  REGION 1..794: note = TnsF-Tn7 System Protein
MTRTETDDDRSIGHPADSHDLIRVQGARENNLKDVSVEIPKRRLTVFTGVSGSGKSSLVFDTIAAESQRMINETYSAFVQGFMPTLARPDVDVLDGLTTAILVDQERMGANARSTVGTVTDANAMLRILFSRLGRPHIGSPQAFSFNIPTVHGSGAITIERGDETTLQRTFTQLGGMCPRCEGMGTVTDIDLTQLYDESRSLSEGAITVPGYTADGWSTRVFSESGFFDPGKPVREFSESELHDFLYREPAKVRINGINLTYEGLVPKLQKSMLSKDVDAMQPHIRAFVERAVTFAPCPECDGTRLNAGARSSKIDGISIADACAMQISDLAEWVGALDEPSLAPLLATLRQIFRSFVEIGLGYLSLDRSSGTLSGGEAQRTKMIRHLGSSLTDVTYVFDEPTVGLHPHDIQRMNRLLLQLRDKGNTVLVVEHKPEAIEIGDHVVDLGPGAGADGGEVVFEGTVDGLRASGTLTGRHLGDRASVKPSVRTPTGALEVRGADANNLRNVDVDIPLGVLVVVTGVAGSGKSSLIQGSVSGREGVVAIDQGAIKGSRRSNPATYTGLLEPIRKAFAKANGVKPALFSANSEGACPNCNGAGVIYTDLGPMASVATVCEVCEGKRFDASVLDYRLGGRDISEVLGMSVTEAEAFFGAGESRIPAAHAILHRLADVGLGYLTIGQPLTTLSGGERQRLKLATRMGEQGGVYVLDEPTTGLHLADVEQLLGLLDRLVESGKSVIVIEHHQAVMAHADWIIDLGPGAGHDGGRIVFEGTPADLVAARSTLTGEHLAAYVGA

SEQ ID NO: 3616 - protein, 794 aa, synthetic construct; identical to SEQ ID NO: 3615
  REGION 1..794: note = TnsF-Tn7 System Protein

SEQ ID NO: 3617 - protein, 398 aa, synthetic construct
  REGION 1..398: note = TnsF-Tn7 System Protein
MQTQEVLTMSRSGGTISYLLVPGGVPDPDAFLALVLDGWGSAMTARGLGRDYIRTSRAVVLQLCDSSGKYPWEWSPGDADEWLAHLRGVRGLAHSTTRRYQGAIEGFCEYATSPAYDWSEQSARLFGRVFAQVITEFNRVKHSQANEARPAKRPFTVRELQQLFDLADLEFERVLESGRKGALSVLRDSAVLKIAYAWGLRVNEVRHLQVVDFSPNARAPYFGDYGNLHVRYGKSKAGRAYKPRNVLTVFDWSAEVVHDWVHLGLPRYGEPITDLFPTSSGSIVTSNKLWLRLSEFVDELGFPPGLDFHSLRRAYATNLATVYGFDLRFVQYQLGHEHAATTSIYTLPAADFQVRELARVHAATLEQSGASQVRLNHRLKLPPLPAARRSRQPNRGQS

SEQ ID NO: 3618 - protein, 114 aa, synthetic construct
  REGION 1..114: note = TnsF-Tn7 System Protein
MKREIEYQWRVRELMARQRIKSSADLVEPLRERGITLSPSQIYRLVAQDPERIAFKVLVALCDILHCEVNDLVTFTATDARTMRRKTAANGGPDIPDLRNYRPVRARVIDEDDG

SEQ ID NO: 3619 - protein, 484 aa, synthetic construct
  REGION 1..484: note = TnsF-Tn7 System Protein
MTRTKHRECARCGHLTATVMLPTGPICYRRRRDIAYHPALCPECFELRPIAYPSTSSYGVLVCAGCAGEESVFSCAERGREDHPYSATRCARCILTERLTTLLTDPSTGHIHHQLRPLYDELAAAPRPQSVVTWLKKPPATGARLLAMMASGDMPVSHETFGSLPADRSHNYLRELLAASGVLPAYEAPIEHMTRWLDDTLAPLAADHAALIGRYARWHLIRHLRGLAARGELTKTATYGARSQVNGAIRLCQWATAHGTPLTCLTQGQLEAYLAEHPGAGNIQQRFVAWLRRTRTNTAVTIPWRETTLPEVITADDDRWAQIDLLLHDDTIPLYARIGGLFTLLFAQPLQTIVAMRADQITLDDDTGVLVTFDTLPIEMPPGLDTLIRRRLIRPGTPSIASTGHGWLFPGRHPGRHLVREVFRGKLVACGIRPGDSRHAAMFALASEVPAPVLAELIGIANKTATKWAALAARDWNGYIIDHS

SEQ ID NO: 3620 - protein, 484 aa, synthetic construct; identical to SEQ ID NO: 3619
  REGION 1..484: note = TnsF-Tn7 System Protein

SEQ ID NO: 3621 - protein, 1170 aa, synthetic construct
  REGION 1..1170: note = TnsF-Tn7 System Protein
MLPLVVHRGRVCDVRCGMKGGVILFRGNGTAARRYLESDRAQADEYYLEAGTALAEFSVLDHAGKVVGEGVLDPEQYAAWVDWINPLTGESMGTPREPGDGRQGSPRFAEMVINTPKSLSVAAALHPEVSEALDAAQKDAMDQMRAWLGRHSVTRVGPRGKQEVVPVEQLETVSVVHRTSRAGDPHRHIHFQIGTRVWAAGKWRGLDTAALFKQQGALRALGTAVLAAHPQLAETLNEHGLTLDPVTGEVIELVPFNDQMSKRAVQVRKNLARMEAEWEEGHPGQEPGPVVRSKLVAMAWDHERPAKKPSHLSTEAGWRTELRDAGYTPETPQAAQPPAVSLDDLRVQEVANRALDRCAASASTWTRHMVQEQATRIVTQAGVRAEPGAINEFVVSASRLATEDCLSVLPPDAPQVDHVAHLTSVQVVRVETELRDLLQSRATGRTHEAPDVSTLAEQHGLDAGQVEAAAAVASADPLVVVEGAAGAGKTTMLGVAIAAAQQDGRSTRVVAPTKKAADVAAKELGVPADSVAKLVHAHGWRWNRDGVWTRLTPGSVDPETGDTYTGPSENVRLQPGERVVVDEAGMLDQDTALALLTVTAETGATVALVGDRAQLPAVGRGGVLDMAAQITGATIDITGVHRFTDPDYADLTVQMRTGQNPALVFDRLYELGLIQLHDTDEAAHEHIATTIGESGAITVATNDEARQLNERIRETRVQSGDVDDARTVTGSDGLDIGAGDLIQTRKNNSTLQVANRQTWIVQHIEDDGTVWAKETGSGRKHQHTVTLPAEYVTQHAHLAYAATAYGVQGATVTEADTMLSDGLSGAGLYVGMTRGRKQNRLHIVAESPDQAHGQFTAAMERDRADRGLATATQTAGAAVAGLTEDGPVNLVNTERARLTKAIARAEGEVDKWQQAITAFAEQRQAHRAEGQEHETAVVTAETNADQTRAEVTEPLIEQATQDGNDYLTARSALREAETAHRSAGRLKKRTTARTLDEATTTHRAAEQATRERWGSLPQSTGSMEAWARGVAQQHADADPRLIVADQQAENARTAKRELGDRQKAERAGISRRYFTRDPIGTYPGQERAEAELDRWHQRADNLRRDLDSIERLPVNEAAELVSQRRAEAQARREVAERTRERRQSQLANTDLGPARRPPQRPGPSRDGIGR

SEQ ID NO: 3622 - protein, 1170 aa, synthetic construct; identical to SEQ ID NO: 3621
  REGION 1..1170: note = TnsF-Tn7 System Protein

SEQ ID NO: 3623 - protein, 612 aa, synthetic construct
  REGION 1..612: note = TnsF-Tn7 System Protein
MIALHDASVRLGKVQALSGFTGTFPAGVVTALIGGDGAGKSTLLRALAGRVRVTPAQSIAVNDRREIGYQPADAGVWRNLSVNENIEFVSRVYGLRGSRTRARADELLRRAGLDHARNRVAGRLSGGMRQKLGFVLATLHQPGLVLLDEPTTGVDPVSRGELWTLIAGAAADGAAVVFATTYLDEAERAAQLFLLGDGKLLASGAPDDVIAHAPGRIWRAPTRSESSVEERMLWQSPHAWRRGTTAYLWTPDPHLPAPAGFEPDTPDLENTSIALLLEEEDTHEKRQPTAKKSVDADHTDPRRDVTTETPARTSSAILVQASDVERRYGAFAALRGVSLDVAPGEIVGLLGGNGAGKTTLMRIILGLEKPSAGTCSLFGEEPSLETRRRIGYVAQGLGLYPSLSAIENLHFAASVQGVPVSARAAEFAHGLGDAPVAKLPLGAQRVLAYYAASQHDPDLLILDEPTSGMDALTRARLWKDLRETAERGIGILVTTHYMQEAAQCDRLVILTAGEVSASGTAQEITAKHTSLVIRTDHWDQAFRLLRNEGLPVLLDGRAVRLPGITRAEATAVLTPIAGKVHISESNSTLEEAMMLATVQEKAAPPEGASSLP

SEQ ID NO: 3624 - protein, 612 aa, synthetic construct; identical to SEQ ID NO: 3623
  REGION 1..612: note = TnsF-Tn7 System Protein

SEQ ID NO: 3625 - protein, 383 aa, synthetic construct
  REGION 1..383: note = TnsF-Tn7 System Protein
MFVIVKLELTGWGDVVAEVPGSARLVLASGVVHLDEQAAVFAAMLLGWERQQKSRLLAEATIEPRMALLRRFAEFAGSFPWRWGPGDVEDFTVSLMSGSSRLAPSTIRSCHLTLRMFCDYLLDVRYGWVGECEQRFGSIPSQVCHDFNTVAHLNDYEGRPGRRPFTYEELQHLFDFLDARVERITRSGRKGAWAALRDAQMVKTCYAYGLRRRELCNLDIADLRPNPHMRQWGSYGAVHVRYGKAVRGGTPRRRSVLTVPEFDWVVEGMRQWVEDARPLLVSADRDALWLTERRQRISVNTMDRRFSWLREQAGLGADLSLHCLRHSYVTHLVEFGYPERFVTEQVGHSYASTTAIYTSVSNDFKTKTLKAALARVYNSKKER

SEQ ID NO: 3626 - protein, 111 aa, synthetic construct
  REGION 1..111: note = TnsF-Tn7 System Protein
MTRKLTMRWHLRQLMAAKGMFATTDLVDPLHERGIEISRQMVHRIVTKPPQRINTDLLAALCDILDCTPSDLLELHVEQQRQAPAVNDGGPGIGDLRPVRARVRRPDGTTE

SEQ ID NO: 3627 - protein, 447 aa, synthetic construct
  REGION 1..447: note = TnsF-Tn7 System Protein
MLPGRNAAGTPICRDCAGITTALTCDRCGTEAERFRGGVCVRCVLRDDLGELLQPTTPPDLRLKRLIEVLAATERPESIYTWMRGADAHHLLALLGTRELALTHHAFDALPASRALTHLREMLVHHRILPERDGELAIFERWIEDRLATFAHRPQIRDPLGRFALWHHLGRLRQRSGPGVDLNYAIRSAKQEITETGRFLAWLADEHSSAATDIRQAQIDTWLADGPSTRQRIRTFIVWMIDGRQIRHVTAPHRMAKTSPMLDQPARMQHVRRCLEDTGMPVGDRLATLILLLYAHPVGDIAALRTQAIETKPDGLYLRLGTTPVRMPAPMATIAWEHLQARPNQQTTNSGTSWLFPGSLAGHHISPESMLKRLRGWGVDLGAARNAALRELVMQLTPAALVKQLGYSPQVISKHATDSAAPQANYPSLKQDQLETGPSNVVTAQHP

SEQ ID NO: 3628 - protein, 447 aa, synthetic construct; identical to SEQ ID NO: 3627
  REGION 1..447: note = TnsF-Tn7 System Protein

SEQ ID NO: 3629 - protein, 485 aa, synthetic construct
  REGION 1..485: note = TnsF-Tn7 System Protein
MTGPRTPGGRYCVRCAATGVKFATTWPEGSICRRCYQQATRRHGTCPLCLTPRLLPGRIGDTDVCTDCAGIPKDFHCSRCGREDEPARVGLCAHCALTDDLTALLDDGTGHIAPALLPIHTALTGQSHARSATIWLITNPDAAALLRDLAQGVRPLEHATFTSHPHPRRVAFLHELFIEHQLLDPMNLDIERFQTWLIAKLSPAAESDARIVTQYARWVHLNRMRHLAETGSLSKGTILSAKQSTTVALDFLAFLASRATTLDRCEQGDIDQWLADGPTTRSLARGFVRWAIEHHHAPQLEFPYRVAKTEPVLSQKQRLALIRLVVDEDTDLADSDRAAAVLFLVFGQPLTRISRMTPDQIKSQDQTIILRLTDDELLVPPPFDDILIRHLERLPHQTTAAHRGDARWLFPGARPGQPINQNTLMTRIRDAGIDLRAAHNATMRALVLDIPAAIVADSLGYSYQIADKHRRNSGATFIDYVNRRG

SEQ ID NO: 3630 - protein, 783 aa, synthetic construct
  REGION 1..783: note = TnsF-Tn7 System Protein
MTVAVSPFGVIRVQGARENNLKNISVEIPKRQLTVFTGVSGSGKSSLVFGTIAAESQRMINETYSAFVQGFMPTLGRPDVDVLEGLTTAIIVDQERMGANVRSTVGTATDANAMLRLLFSRLGSPHLGSPQAYSFNVASAKGAGAVTVDRANARAVRRSFEIVGGMCPRCEGMGSVNDIDFTALYDDSRSLDDGALTIPGYSIDGWYGRIFRGCGFFATDKPIRDFTAKESRALLYMEPTKIIVDGINLTYSGLIPQIQKSFLSKDVDTLQPHIRAFVERAVTFTSCPECHGTRLNEGARSSKVAGISIAEACAMQITDLAEWVNRLVEPSVAPLIAAVQHILEAFVGIGLGYLSLDRSAGTLSGGEAQRTKLIRHLGSSLTDVTYVFDEPTIGLHPHDIQRMNVLLLRLRDKGNTVLVVEHKPEMIAIADHVVDLGPGAGSSGGEVCFEGTLDDLRRSGTLTGKHLDDRASLKEAVRTPTGSLEIRGADTHNLRDVDVDVPLGVLVVLTGVAGSGKSSLVHGSIPAGHGVISVDQGAIRGSRRSNPATYTGLLEPIRKAFAKANGVKPALFSSNSEGACPNCNGAGVIFMDLGMMAGVSTTCEVCEGRRFDASVLDFTLGGRDISEVLAMPVTEAAEFFGSGEARIPAAAAILSRLVDVGLGYLSLGQPLTTLSGGERQRLKLATHLAEKGGVYVLDEPTTGLHLADVEQLLGLLDRLVDSGASVIVIEQHQAVMAHADWIIDLGPGAGHEGGRVVFEGTPAQLVAARSTLTGQHLAAYVGE

SEQ ID NO: 3631 - protein, 783 aa, synthetic construct; identical to SEQ ID NO: 3630
  REGION 1..783: note = TnsF-Tn7 System Protein

SEQ ID NO: 3632 - protein, 376 aa, synthetic construct
  REGION 1..376: note = TnsF-Tn7 System Protein
MRRVEEVVPGAVPVHLQGAVAVLNAEETVWEAMLGGWRAQQLARNLAPSTVDRRRELVSRFRRFVDAYPWSWTVGGVDEFFLELRAVGGLSQSTILGYQGALRMFLEYVCDPRYGWVEQCWQRFGDHPAQVFHEWNTARHAQNGIAQPGKRPYTRDELQDLFDCADERVLRIRKQGSKGWVAAFRTATMMKAAYAWGLRRNEVRSLDLVDCASNPAARQFGDFGIIYVRFGKAMRGSPPKRRSVLSLPEMDWSTEIMRQWIEEVRPLIARPKASCLWPSERGGMITADAVSRAFNEVKREAGLDDELDFHSLRRSYVTHLLEDGYDAFFIQQQVGHEHASTTSIYTGVSPDYRARVVGDAIARMAAAITSTTTAKD

SEQ ID NO: 3633 - protein, 371 aa, synthetic construct
  REGION 1..371: note = TnsF-Tn7 System Protein
MDSDLARVTHLPAPAIAPDPDAVFAQMLAGWRRQQLSRNFQPGTIRKHEQDVLRFADLSGHFPWEWSVGDVDEVFAHARSVKNLAQSTVRSYQGSVKLFCDFASDPTYDWNELCGRSFGSSVSQVVTEFNRARHAQRNEQQPAKRPFTRRELQDFFDLADLEVERVINSRRKGAVTAYRDAVAFKTAYAWGLRANETAHLQIVDFSRNPHSPQFGDFGVLQVRYGKSQPGSPPKRRSVLTVFEWSAQLIHEWMRSGLPRLNPNPSDLFPTGSGLVVPKSNLRRRFRSLIDELGFPVGLDLHSLRRSYATHLAEFYGFQQSFIQRQLGHEHASTTSIYTLVSDDYQVRELNRVLEQTLADATRPLNPWEKPA

SEQ ID NO: 3634 - protein, 110 aa, synthetic construct
  REGION 1..110: note = TnsF-Tn7 System Protein
MRRRIEYGWRLRELMAARGMNTISDLLPHLGDRGIELSASQIYRLVGSKPERMNLTLLGALLDTLDCSFEDLCPTTVEAESSRTPKKAVGDGTAPDGVVRPARARIRRPE

SEQ ID NO: 3635 - protein, 112 aa, synthetic construct
  REGION 1..112: note = TnsF-Tn7 System Protein
MKRQIEYQWRVRELMARHGMRNSRDLVGPLRERDITLSESQIYRLVGQDPERIAFKVLTALCDVFGVEANELITYTAANARTTARDRAVGEDAPPAPLSFRPVRARILDDDD

SEQ ID NO: 3636 - protein, 1108 aa, synthetic construct
  REGION 1..1108: note = TnsF-Tn7 System Protein
MDHLHSSLTAMQVPSTLSNHSPRAPDKRQRHAKQTATLVNDLALVQLDIERAEVEKTAVPPPMGSAPSQRPTFPLVRLPSHTHSPSSPPATFAPFKKFLPAVFDTEVLTSITSRLQQQLEAAASEEHPVAATKPKAAEQTIHLDERYTKVTGAQRKNHEAMLCTIADLPRRFELELAAVEVEQPTVDDLVLPARWCDATESYVAGAKYSVYSGLPLRERLNGWFRGWLAPLVAADDKVDADSPELRFYQRYANIVERVVQMQRLPDQRDKLPMEIQVLTRDSFKVNGKVVNGHIDGNVQATTWIFNWFKGQGLDEVARLRILAKHLHRAGRSTDAIAGILNRLAPLHAASHNGTCSAHLRQQWVDELAWYRAFVDGLPEGDDFLWSAPLPEPDIARLIQRYNAPKAEWMNWEPMCSHGCRSLTSWSAGGRSKSGLCGSGGCDGETEEETDTTRRRPEGPPLTRNKGGVPTFVFSDQTDTRTILELLARCIQRAEDDCDDVFPPPRPRHLREMGAALRLAQECLSQGYFRADGLVGIHGRADGLPFCFAGVPRHPLAPSLASHGRHHELFRSPSSVDELDDLSSFNLDIESWGTNMFRGSTRAGVLEHFIEQTRAGAHALLDKLAHRGVLEPFLLPRYTLGPQLERAWCRNGQSNLELILRNPNFVDELEFRRDAYIADHPVCQDDDSAEARRAERMSRRIELLRVVSRDADKISARYLQKASTSKPGPEAARPFPHVRVSTVQELLATGELRADHPAVADLAGYIRELPNYRQYIYRECGGTGGPSKFSGADADGQRSCWTCIERARIDERRALVDHWCEMCPEGEKEKATRSHDGAEVCDECYHSLNAFWCPDCQTGQWFREAGANGYTGQAKRCARCNKVPMLLGSNCCVCGRDPDDGPFVRRHQRCFNCYRRDTRQGLLLVLSMTKARFCGECGDQVAAGKFKRGMCESCYNRDRTSRIHPGDMRDRTCRKCHKVKSRFVWDWGLCGQCYHFRYMNNLLLEPLVPDPLPQDAPPEDPSVEHCRVCRVPRPEKLRGSGDSTAWYVRWQMCRRCYQASRKTGAIDEMKLADGVKSPELVPSDADDSFDANDEFFVLEAELAREVRHV

SEQ ID NO: 3637 - protein, 1067 aa, synthetic construct
  REGION 1..1067: note = TnsF-Tn7 System Protein
MLLSPNKPFQPEHTPGAASSSSAISFRSDQPRRPSQPARPLPPFSLVPSSSFVRPQDMQRTVTTQPGTATAADPIIHWDQFDGRPLAGYVKTAAGSKALSTLSVVVSGVYPIGSTDKEAGFFPAYRDFQELDEAENPPFYGSTVSRSLVPALKDSTYVLKHVRRAKVAASLPYIPCVLVVDGKPWVGSAFVYSEKNVPAIVRNAKANYRLEANTSFAHRSVSRLVVADPSPFALLNVCPAPDSVSGMDAIKYATSAQRYHSLGIDLLVDLLQCQTGWSRPVACYGLGMEQNDEEKQKDDDPLQAEVFNIRSPPVLFPPLKRARPAAHDQEDIELEDEDEDPLPVDPDAQSQINVADIRQRMLAGDCPWTGQPRSERYLSEIDKSLSLPLWSKVDKFAAARTNVVVVDSGTGSGKSTQLPLLLLHALHASGMSTAKIAMTQPRRIAATEVAKRTGTLLDSPLGSGELVSLMMRGKKVNVNAPLVLMADGLLLQLLKTNPNLEGYDVVIVDEVHEQSPNLCILLGHLHRVLGMRPDLKVVLMSATGRNDVFMAHFAGFSPELVDLPAQKKSISEHYLQCDAVDWVDTAAQVVCHILHDGDLLASIDSTDGDILVFCATEAHIHQLFDTLNDHLDVAMLNVNLHKLYRAQDMAEQERVMADEYVDPVDGKVTTEPTATNVRRRKVIISTNVAETSLTFPHLDFVVDCGEHNVSRYLAEDGSVEMLRVPCSKSSMTQRKGRVGRMRPGYYIGLFTEVYCNVNIPDHDEEAPITMCDLSPILLNFLNTLPGGLVRDFRSLMYRAAACLDVLGFVKDGPNGIALTEDGKLAAELGLSPPLARMFLDAATSDYPHAVLVLIAVIERNELIRPVVAEAKALLSHPASDHLTELNLWNMWDEYRRRRLDHAFAYKASIHWEACKSIQLRVAELLDLWKRVLKTEPPSPCAPRDGWTTAMTKALFQGYRGNLAVQVNVGTVHRPAFVYRNVNEAINSGAEGLDLHLGHTCVLKPMLPKYLVYSSLSYRPGERKTYIENATVTDASVAGWCIGTGMTPIPQARQHDPDPASTPTGAST

SEQ ID NO: 3638 - protein, 378 aa, synthetic construct
  REGION 1..378: note = TnsF-Tn7 System Protein
MTLERKPLCKVCCVHPAASHPCPDCGATVNGVGDTPCLECAIKRSNVAQQLGAQHLLTQESVRRLYADFIRWGNDTGRANKLALGAARYLQFLVRLDAALQQRAVPLDESVLVQVFTTEELRRMGLLSQHLAETGLLGDDALARRRRSDERLLAARREAIAGQPWAEDFDRFERALLARTPAISLRTHKAYTHAAMSLLTQASVARAAQVGQQAVDGLLAKKPGMKASLSIFIAHLNALHGLQLKLKSKSSKPVPLVRQAKYVKALLEAIESAPSRPARLALTAKLLSKLLNAPLERILLLRHSDLDFQGLRKLRLDGRWIELPERLQPILAALPSPKWQAGADADPLVFEGRMLLDSLSTAAVDYQVNRAVRTRLKA

SEQ ID NO: 3639 - protein, 306 aa, synthetic construct
  REGION 1..306: note = TnsF-Tn7 System Protein
MSFDHQTIGSLLVNLAWERGDSPATMTQRMGLGWSIWTRDMDRSLGDRAVQLISVATGLPCDQVRAMTLTRRLQDAGIPTQRNGFQRWLTPIGIYHRQRLRYGQLFCPVCLQTGPAQLRLAWRLASNWVCSTHTVLLRDGCAQCGTPFAPMRHDALMLARCDRCLAPLRTPVEPASQTECHLQIRVQSLWRQAMAGDGQQLASFHEALTAVVRRDPQFRLSGEPWNFWRVAERRELLVNVAQATLAGPASHSSLMRGVGLKKTSKPGRRRCTGLPADPSARAAKLMQLAARVRFARRPKARIARNA

SEQ ID NO: 3640 - protein, 230 aa, synthetic construct
  REGION 1..230: note = TnsF-Tn7 System Protein
MTEGEEGVRAIPRNYRSVTGRVETLRGDTVGYESTLERDFVHLLDFNARVGKIIGQPLRIQYKVDEGNARSYTPDVLVRFLPIGDSKPWRPTLFEVKYREELEDRRQELLPGFKAAQKVCRTRGWNFRVVTERYIRNTYLQNVQFLRDYRAYPDDGAKSLMLLRTMEKLRVATPAQLLAATFMDMTNRMEAVGVLWRLITTRAIGANLMNSLNMSSEIWHEEPVLYGSER

SEQ ID NO: 3641 - protein, 650 aa, synthetic construct
  REGION 1..650: note = TnsF-Tn7 System Protein
MEANAELGGFAVRPGVLIGFKGRLYKVRRLLTPERILLEDPANQQSEVALIDQLTHPSKVQVDLPTGNSDAEGAKRPELLAYSDEEIKQAEQRLELITPLLMLARRTRKDVGAAAQAAGKSVGTLYGWLRDYQASGMVGLIDEVRGPKGGVQLDPRVEEIIQDVIESLYLNSQQLIPKDIFEEVEQRCELENKPVPHINTVRNRIAAVPRDVQSRRRGHPEQADRNLPTPGTFPVPVNPLNPVQMDHVQLDMLAVYSDTRQPWGRPWLTLLICVKTRMIVGFYLSMLRPSSVAAGMALVMGMLPKKDYLGSLGVSGSWPVQGKIRKVHCDNAKEFRGEALRFGCREHGIDLELRPVKKPRYGAHIERMVGNINAMLRKKPGTTFSNPQQRGTYDSRKKSAYTLWEIEVEVADWVVNHYHVNKHRELKMPPRNAWEKEIMGTATAPGAGLPIQIADPQKLKLDFLPFVKRVVTPSGVRNGKQDYYHEAINRWVNAPDPDHPTEKRKFIIKYHPRYPRNVWFLDPELKQYQKLDCDPRTAGGDGTDWDRMSVEELMAIDARDHAQGDAMEDKQAKRAYRARSAERQAQAVAATKRARTKGKAPVPPSGGPNADHSRIETQMEPQTATAQDTGNPFSAFAGKTIRSFNVSGGQ

SEQ ID NO: 3642 - protein, 552 aa, synthetic construct
  REGION 1..552: note = TnsF-Tn7 System Protein
MTTARVRLWLVKVDESDPHHLKWACRPSGRPSTLVLEEAAGSLPKLVLGSFWRDRTLQVDHSMPQDIKVKNAAIAPQRWQIVYANDRMAGGAGGMLIPPTDYPLSGEDARGSPLHFQDAPLLRCFSESGLELLIPCYEIFRRFYGLTSELANAMLAGHWRRELAALVDLEQTGVSEDGRSFEVAPLVELRDIGCVGIALFMAVATARSCAADIFLALENARRSGVREPWILARPPWGDQTMSISFLGHQLSSGAVLVHWIYGSSFPHLPYNVVRIDQQIRIPVQSEDVPTRAARASLNDRMEELAQATIAPAVDARVSRSAIHFGLGEYWDRLIRVKRQARSRTYVPVNPQSEGDPPAIRRRRLTTGRRSRIGRSPTASLSSDSQNVIMNRFNALAECFSELLESGDIRAREDYALVNPVQIGAHAYCAFPTTIGGTPRPWTLVNPQDPRARLCWVSEIIAQDGSLYYWVEVEALPREAFKALVIKPNARGSRLSAVTLEAILKIGAIGKGQWKKAALFTVEEEVRWMSARHSFASGRLRSSVVLGKLRSLR

SEQ ID NO: 3643 - protein, 298 aa, synthetic construct
  REGION 1..298: note = TnsF-Tn7 System Protein
MNTRTHLSVKAADLLEASVPEKLEFIQRDHHIDYPASDYILRELQDLVDRPRSTKPECRAVISDSDNGKTTLTKHFLRLNPVVLDETDCPIAKVLWVETPPAADEGRLYSAILTGLGVNHRADAPAERLEALVHHETAVQQTSVLILDELHAMLNSPARQQKQFMASLKRLSNVRQLSIVACGTHDVVRALAIDPQFVSRFLRLSLPLWSANEDFLSLLAAFESLIPLPKPSNLAAPEMAFEIFKGSNGTIASIKKLILRAAQVALKTGQDRITFAALQSARNWRDAASLIPNRPREL

SEQ ID NO: 3644 - protein, 298 aa, synthetic construct; identical to SEQ ID NO: 3643
  REGION 1..298: note = TnsF-Tn7 System Protein

SEQ ID NO: 3645 - protein, 271 aa, synthetic construct
  REGION 1..271: note = TnsF-Tn7 System Protein
MHDLMDAFKTLGLHGMASAWPEVLGTARMKSLDHEAVLHQLIKAETAQREVRSMAYQMRVARFPSHRDLAGFDFAHTPIDEALVRQLHTLGFVDSAHNVVLVGGPGTGKTHLATSLGIEAIRLHGKRVRFFSTVELVNALELEKAQNKAGQLAHRLMYVDLVILDELGYLPFTQSGGAMLFHLLCKLYERTSVVITTNLTFSEWSSVFGDAKMTTALLDRLTHHCHIVETGNESWRFKHSSAAGAAPPKPRSKAQKGDRKTADPIDLSTTE

SEQ ID NO: 3646 - protein, 271 aa, synthetic construct; identical to SEQ ID NO: 3645
  REGION 1..271: note = TnsF-Tn7 System Protein

SEQ ID NO: 3647 - protein, 834 aa, synthetic construct
  REGION 1..834: note = TnsF-Tn7 System Protein
MTEPGTPPRYLTDPLGTIADLVRHIEPDLDGEQITAAILATASTRARLRKLAQALNDDPGLLTSTRPQGPRTIEQLIRALQDCGARHVELPRCARCARPRPLVSLDAKRQRICGSCFSSESTRVEVCSGCGKRLEVQTRDRAGAARCRNCPPEPDCDHLSVIVAHIRRVAGDHDSARLRQIAEQAVPQPFQRREVSWELDAHPELLTGDAASGSPRLIALVEQLVLALVPGVVAPRCPLCDREVALKFRRDGRRCCRRCYDAARLETCCRCGESRAVATRTSAGDPLCTACMRRDPAGHEHCTNCGQTRLIVHRDGDQRYCRQCRRAPTAVCSICGKTKPCHLAHTANSRCESCSRKLFGQACINCGRVRAVHRRTPEGPLCHTCGQRRAPCSRCGRTMRVQASLAVGPLCPTCFRNEPAYFQQCIECGVVEHLYHHGKCQHCACPPLLRAVLVGPDGVVRPDLEPMIGILLASPPRTVLSWINSPGSRAVMTALAAASGPVTHELLDTLTPEREVFRLRQILVAAEHLPARDEYLRRLEQWLDTTLTTISDSVERNLVRRYVTWNHLRKLRQSGPITNRQQTTVRSDVSNIISLLNWLRDNDRTLAICRQVDIDDWLNDGPEARCTIRKFLTWCAHRRAARKLTIPAHIRPELRTVFTETHHRWALARRLLHSDSIDDRDRVAGLLVLLYAQQLTRVVALTTNDVIADDHGVQLKLGSKPLQLHPPMSELLLRLVENRRGHAALGHTDDHPWLFPGGIPGRHLTASQQMQRLQQLGIPARIGRNTALMDLATELPSAVISDLLGLSIHTADHWTTAAGNTHHGYAAQLVQRQP

SEQ ID NO: 3648 - protein, 834 aa, synthetic construct; identical to SEQ ID NO: 3647
  REGION 1..834: note = TnsF-Tn7 System Protein

SEQ ID NO: 3649 - protein, 198 aa, synthetic construct
  REGION 1..198: note = TnsF-Tn7 System Protein
MSLDLGSTTQAALRQCAEYLDGSGAIVCCGFPASGKSTTARFLASLTDAVVLDKDRYAHDLEVSVMTVLTQPHDRDSDVYKSVVAPHIYAGLIRTGLTVAAKCPVVLDAPFLTTIQHAADHGTSLREHLLAIADLDEQVPVTTVWIDSTHADIRARMRERGLDRDAGKLADWDAYRTAVLDSGLRDLACSVVDLVIMN

SEQ ID NO: 3650 - protein, 198 aa, synthetic construct; identical to SEQ ID NO: 3649
  REGION 1..198: note = TnsF-Tn7 System Protein

SEQ ID NO: 3651 - protein, 340 aa, synthetic construct
  REGION 1..340: note = TnsF-Tn7 System Protein
MLCGWEKQQRGGRRLDPTTIKSRQGHVRALVGFTNEYPWRWTASLVEEWTTHLLSELHRAPSTIRGYQGSIRLFCDYLTSAHYEWPEECQTRFGTHPIQVCHEWNTAVHVEEDESRPSRRPLSRNEIQLFLDHADEQVDRAARSGRKGALAAYRDATVFKVLYGWGLRVNEACRLDRHDFYRNPEAPELGQFGVLHVRYGKASRGSGPRRRAVASVMPWAVEAVEDYLVNIRPRFGKIEHPALWLTERGGRLQGRDVDDRFARYRDDLGLDADLTPHCLRHSYVSHGVEDGMDPEFLRQQVGHRFRSTTGIYTTVSTDHMNTMMRKALNRAFAPIQEGDR

SEQ ID NO: 3652 - protein, 146 aa, synthetic construct
  REGION 1..146: note = TnsF-Tn7 System Protein
MAKALQLRFARAECLLIPQDVVRREFLRESDIPDGQNIELIRDIAELGLARGVTVIVEGILSARRYGAMLEQLAARAERAWFYAFDLSFTETLDRHARRPKASEFGAEEMHGWYHGWDPLGFVTEARIDAVPAVADIVETIYADIT

SEQ ID NO: 3653 - protein, 146 aa, synthetic construct; identical to SEQ ID NO: 3652
  REGION 1..146: note = TnsF-Tn7 System Protein

SEQ ID NO: 3654 - protein, 117 aa, synthetic construct
  REGION 1..117: note = TnsF-Tn7 System Protein
MTAKLDYRWHLRTVMAERGMFSTTKLRPLLLERGIELSDSQIYRLVTERPERLSMKVLMALLDILGCRMEDLIEPIPAATARRRIASGETASPTGKPDKGVGSFRPKQARIVPRTDD

SEQ ID NO: 3655 - protein, 551 aa, synthetic construct
  REGION 1..551: note = TnsF-Tn7 System Protein
MFMCWRCRAVPVPDVCTRCGTEAECRFQGTDRATCLACYAAARMDTCTRCGSRGECKFAATDKAICLPCDRRPEPCSLCARLTVPRARDADGAPICWACVPQNIERCINCALPKRVNARTTVGPLCLSCSTNSPLMHRDCKRCGTRARLHLRKWCSRCYADDKLYRLLPDELIAARPALARLRERCLAADARRTLRAFRRNTTTAKLALALSRTDTLSHELLDSLGSLDEVAPVRSLLVENELLPPRDEHLVRFERWCAETAAGITNAAHRRAFERFARWRPLRQLHEQDRPVTPGQTSGRRDELRQVLSLLAWLTDRSESITQLDQARLDLWLSTGTTRRVRTAAFLRWAARNQLCPRLRVPPQRKSTLTPTGSSVEERWELLERLLHERAIDPRTRLAGVLVLLYGTRVVQLRRLRVTDITGEAGRVAIRLGADPLDLHGAIGELAVEARGHREAPRLLSDAGEDDWLFPGQYHGTSISTDALTDRLNAVGVRVRAARTGAVVSLVQELPAPVVARLTGLSTATSWAQAVAVSDGRYAARTGLFDDGGP

SEQ ID NO: 3656 - protein, 551 aa, synthetic construct; identical to SEQ ID NO: 3655
  REGION 1..551: note = TnsF-Tn7 System Protein

SEQ ID NO: 3657 - protein, 1202 aa, synthetic construct
  REGION 1..1202: note = TnsF-Tn7 System Protein
MTVSMRVMSAGDGYKYLLKTVAAADGNRPLSTPLTRYYMKEDTPPGRWIGAGVAALGKGEIHVGDRVSEHQLQLLMGTGHDPITDEPLGRAFPNYKSPEERIEARIADLEPTTTPGAKGEAVAQIVAEETTRSTRRAVAGFDFTFSIPKSASVLWAVADAGVQALIAEAHHRAVAEVVAFMEREVAATRTGATAGDGAVAQVDVTGLIATAFDHFDSRAGDPHLHTHVVISNKAKTVLDGKWRSLDGRPMHAAVVALSELHEAVFADQMTRTFGVSWEAREMGRDRNPAWAITGVPEGLVTEFSTRARHIDAEKNRLIAEYVAQHGRQPSNATILKLRAQATLATRPEKQVRSLADLTAEWRTRASKTLGQDATLWAREVTDNDKPMLLRADDVPLDVISELGRTVVAVVGEKRSTWRRWNLMAEASRQTMGWRFATMQDREAIVAMIADAAELVSLRLTPPELATSPVVFRRPDGTSVFRPKSSTVFTSESQLAAEDRLLERAANLGGSTVTLATVEKITYRPDADGRMLGDDQADALTRIAVSGRMLDILVGPAGAGKTTAMNALRRAWEAEHGSGAVVGLAPSAVAAQVLADDLGIETENTAKWWQNHLVHGTTFEAGQLVIIDEASLAGTLSLDRITHIAQDAGAKVLLVGDYAQLQSVDAGGAFALIARDRADTPELVDVHRFTHTWEKTASLELRHGRTAAIDTYLAHERIAEGDGEAMADTAYNAWRADRDAGLVSVLIAETHEDVTTLNGRARADLILSKTLNPDREVELRDGTAAGVGDTIITRRNNGNLRTLAGRDWVRNGDIWTITAVGDDGTVAIARDYGAGTAVKEDGTITSRRRGRRFGGSIVLPASYVGEHVDLGYAVTAYRAQGITTDTAHVLVEPTSTRETFYVAMTRGRHANHAYVTLDRAEDHGQPHPGDDPHATARSVLYGVLQHSAAELSAHETIVTEQEQWGSIAQLAAEYETIVAAAQHDRWAALVRGSGLTAEQAESAVESDAFGPLAAELRRAEANHHNVEALLPRLVAARGFGDADDIAAVLHYRVDRATARPARSGRTRKPARLIAGLIPQAHGIIDAEMRAALDQREALIEARADAVLEAALTESAPWTNALGAPPADRRRATAWRKAARVIAAYRDRYRVTDDAPLGTPPESAAQKIDAARARTALDRVRGFIAEVSEVPQHSQGRYGAERSL

SEQ ID NO: 3658 - protein, 1202 aa, synthetic construct; identical to SEQ ID NO: 3657
  REGION 1..1202: note = TnsF-Tn7 System Protein

SEQ ID NO: 3659 - protein, 358 aa, synthetic construct
  REGION 1..358: note = TnsF-Tn7 System Protein
MVNVSLTDVTLTYPGASRPSIDGIDLEIEHGELLVLVGPSGCGKSTTLRALAGLEFPESGTIAFGDRDVTGVDGSQRDVAMVFQSYALYPHMTVAGNMEFSLKNTKVPAAERQRLVSEAAALLELDQLLDRKPRELSGGQRQRVAMGRAIVRRPSVFLMDEPLSNLDAKLRVQTRGQIAALQRTLDVTTVYVTHDQTEAMTMGDRVVVMHQGRIEQVGTPRELYDEPETLFVAGFIGSPQMNLVEGSWSDASGAHVEDLALPFRAAAPHAGTALTYGIRPEDLELVPHPGDDPALVRLVVDLVEEHGSDTYVYGTGHGARWTARLPKGARPAIGERLAFAVRTSSVLAFEPTTGHRIR

SEQ ID NO: 3660 - protein, 358 aa, synthetic construct; identical to SEQ ID NO: 3659
  REGION 1..358: note = TnsF-Tn7 System Protein

SEQ ID NO: 3661 - protein, 486 aa, synthetic construct
  REGION 1..486: note = TnsF-Tn7 System Protein
MARPIGRMLGGFVCSSCYGDIKRHARACPICGEHRILSELGDAGNAVCATCAGAPERYGCTRCGSERFYVGALCGACLLSDSLDAAFGQRESTPFATALHDHFNGRQDPRNARAWLLGDGFSSVLSDMAFGRLPVDHATVDSIPGGPRRQFVRELLIECDVLPSIDHQLHNLELWITEFCAKLPANHALIVHEYATWTILRRLRRSAEYEDTRKTQGRAARHTLRGIVKFLEWMDDNDVSLRTLPQPALETFLSSVPHESWMPAFIVWARRAHGTRASAQPARRTPPSLRISELQRLAVYRAIINDDRPPGHRLACALLVVFGISINRISQLRPSTFEVTNDQVRVTLSPGKSTPLPGPLATLFRLHVLNLPADNEWLFPGRRFNRHITPDAIGTWMKRYGIPSTHLRVAALYQLAGEMSSKLLSETTGLSASTAGQYVSASGSGWNEIPVLYDPDWASDLVDDAVGEMTSAVESEEHPLSFIEDE

SEQ ID NO: 3662 - protein, 486 aa, synthetic construct; identical to SEQ ID NO: 3661
  REGION 1..486: note = TnsF-Tn7 System Protein

SEQ ID NO: 3663 - protein, 389 aa, synthetic construct
  REGION 1..389: note = TnsF-Tn7 System Protein
MNKNWYERALKVDGLKFLREEEAFFVATLDAWGTQRRSAGRKLATIHQDRSAVENFAKFADRFPWQWTTADMSEYTTARIVGDVDTKAVVHSTIVGMHGAIRRYCNYLLSYGNDWASVCEERFGALPNQVCFDWNTRSHTSESEANPSVRGFSYDELATFWQASGEWVEEIDRSREKGWLAAMRDIALFKTAWAFGLRRNELRMLDISDLNYNPRIPKWGQYGKINVSYGKSSNGGQPKQRNVFLVPTHQDVIPELDRWVEKLRPQTEPGDLPALFVTERHSRVSLRLIDARFALLREFAGLPKVLTMHSLRRSYLTHIQESGLPALFAQYQAGHSHAATTARYTSPSNDYRSRVVATALSDYDRWDGQDGDHRVGVERPQGHGGPRHV

SEQ ID NO: 3664 - protein, 477 aa, synthetic construct
  REGION 1..477: note = TnsF-Tn7 System Protein
MFCARCHRTVRLGAHHWPEGYLCARCYDHALETYGTCTGCDTERLTPGLDAHGGKLCTDCAGGLGDFTCLLCGAEARRYRRGVCGRCVVAERLRPLLDDGTGHVNPQLVPLFVTLRQANRPKSILTWLGYSHVRRNLQILARGEAPLTHEGLSRLTPWRSVAYLRDLLVQADILPPADRQLLFFQRTLAEKLPAVSNPEHRRLLEIFATWHIQHRLNTLAGRGPLTGKQVQQARGELRLATAFLDHLNQRGRTLAECTQADVDAWYAGNYIARRLTHTFLCWAIRSKNMPKATVPHRSTSNPAPLAQHQRLALLRQLTNLDDVPLHDRVAAVLVLLYAQPLTRIVQLTTDDVEHKDGEIYVRLGDPPSPVLAPFAEMLLNYLGQRPNTMTATNPNARWLFPGRRAGQPMAPETLELRLRRLGFPTQRGRTAAIRHLVLQAPAPVIARMLGYHDDTTAQLAAEAGGTWQHYAPGDHSR

SEQ ID NO: 3665 - protein, 477 aa, synthetic construct; identical to SEQ ID NO: 3664
  REGION 1..477: note = TnsF-Tn7 System Protein

SEQ ID NO: 3666 - protein, 474 aa, synthetic construct
  REGION 1..474: note = TnsF-Tn7 System Protein
MAAKIRVRWPEGAICGICFTNALHITGTCTLCGHEGLLPGRHDGADVCRSCAGISTNMTCDGCGVEAERFRSGHCIRCVLHADLSSVLQPHTPPDLRLKRLINILVETDRPESIYTWKRSKAANGLLAGLGARDISLTHLAFDALPQSKGVEFVRELLVHHSILPERDRHLATFERWLDTRLENLSTTASVERPIGQFGRWHHLRRLRTMSQPGKNLSAATRSAKQEITEASKFVTWLHEEHRIGFPDCRQAHIEDYLSSGPSTRQLIRTFIVWHLKAGTVSRLAVPHRYSERKPLITQPRRLELINHCITATRVAKSPRVAGLILLLYAQPIIKIVGLKTTDLIARPDGLYLKLGTTPALIPEQVSELFWNYLRDRPNQQTGNKNSAWLFPSTIAGQHMHVDSLKDKLRTLGIDLAAARNATLRDLVSELPPTLVAQALGYSAKVIHLHAADAAVPMAGYISAKTHFSSEPRS

SEQ ID NO: 3667 - protein, 474 aa, synthetic construct; identical to SEQ ID NO: 3666
  REGION 1..474: note = TnsF-Tn7 System Protein

SEQ ID NO: 3668 - protein, 377 aa, synthetic construct
  REGION 1..377: note = TnsF-Tn7 System Protein
MICRGFGGFVSDDRGGELIRLPVREVAVSADAVFEEMLNGWGKQQLSRNFKVDTIRTRERLVRRFVDQSEHFPWEWDLADVDDFFAHARSISNLSFSTVRSYQTHLKLFCDYLTDPAYEWDRVCVKAFGRSPGQVITETNRARHVADDATGPVKRPFTRRELQDLFDLADLEIERVITSGRKGAVAAYRDAVLFKTAYAWGLRANEVTHLQTVDFSRNPRAPQFGDFGVLTVRYGKAQRGSPHKRRSVLTVFDWSPAVVQAWIRDGLPHLNPVPTDLFPTSEGLVVPKSNLRRRLRAYVDELGFPAGLDLHSLRRSYVTHLFEYHGFDHLFVQRQVGHMHASTTSLYTAVSSDYQTLELNRVLESTIAKASRNQEES

SEQ ID NO: 3669 - protein, 114 aa, synthetic construct
  REGION 1..114: note = TnsF-Tn7 System Protein
MKREIEYRWRVRELMARHGMRNTRELVGPLRERGITLSESQIYRLVSQNPERISFQLLAALCDVFGVEANELFTFTATDARSRRKEQAIASGENVVRFSDAYKPVRARILDDDD

SEQ ID NO: 3670 - protein, 247 aa, synthetic construct
  REGION 1..247: note = TnsF-Tn7 System Protein
MDATAADIDKYLTIRPEHRSIATFINWARRHGYPALPHVAPPLRSTPRDLIAEDERWRTVQRLLHDTDLHASNRLAGLLVLLYAQRPSRIVQLSTDDISVAETVTLKLGREPLHLPPQIGDLIVQLTTRRENWVQIAVDKEHPWLFPGALPGTHLSAAHLSERLNRLGIRTRLGRNSALINLAVELPSSVLAGLLGIDIATATTWRAVAGARRAMYASEITQRVPKSQKGPDIPSGSGTVHGPRAAF

SEQ ID NO: 3671 - protein, 247 aa, synthetic construct; identical to SEQ ID NO: 3670
  REGION 1..247: note = TnsF-Tn7 System Protein

SEQ ID NO: 3672 - protein, 343 aa, synthetic construct; identical to SEQ ID NO: 546
  REGION 1..343: note = TnsF-Tn7 System Protein

SEQ ID NO: 3673 - protein, 228 aa, synthetic construct
  REGION 1..228: note = TnsF-Tn7 System Protein
MDAWHTEQNEYTRNTMRAFLLWCSASKLTRPFRLPPVQIRRATPMPQPERLELIGHLLTDPDLPLRTRVAGVIVLLYAQPLSRVVRLTLDDIGHSNDQTLLRLGEPPSPVPEPLAELLHRWISNRDNMNTATNHASRWLFPGRRAGQPMHPDALAALINDIGIPTIAGRTAAIRQHVLEMPAPVVAEAPGYHRVTTAKLASEAGGTWSRYAAGDHWRSPPGWTPQSTT

SEQ ID NO: 3674 - protein, 187 aa, synthetic construct
  REGION 1..187: note = TnsF-Tn7 System Protein
MTTKRMPRLAFARPRYKVGEALTQDARLALLRDLRHADDKPLSDRVAGCLLLLYAQPIPRILALETSDVIHDGDDVLLRLGEPPSPVPEPFASLLLQHVTDRTATGGDQWLFTGRRPGRALNYKSMRDHLRALGIPLRLARVGAARDLVLDIPAPVMAAALGFHHTTANRQFRNVGGTWNRYVATRT

SEQ ID NO: 3675 - protein, 243 aa, synthetic construct
  REGION 1..243: note = TnsF-Tn7 System Protein
MHEWNTAVHVQDAEGDPRRRALTLDELEAFFDAADNRVARIRKLGRKGWLPAYRDAVLFKVAYGYGLRRNEARMLDTPDFGRNPHAPEFGGRGVCNVRFGKAMKGSPPKRRTVLTVWEWTPEVLAEWTEEVRPLLASPGNDALWPSERAARVGLAQIDARFAAVRDELGLDDAVDFHTLRRSYITHLIEDGWDPLFVQQQAGHEHASTTAIYTCVSSDFRTRTLRQALDKTMKTALAAGEGKR

SEQ ID NO: 3676 - protein, 110 aa, synthetic construct
  REGION 1..110: note = TnsF-Tn7 System Protein
MRRQVGYQWKLREVMALRGLFTTTQLSPLLAERGIELSASQVHRLVTGTPERLSLQLLAALCDILETTPSELIPVTAANAQQRKTAGSGIAAAPDEPNLRPKRVRLRPAP

SEQ ID NO: 3677 - protein, 355 aa, synthetic construct
  REGION 1..355: note = TnsF-Tn7 System Protein
MTGLDGRDRAVADPVGAIMDLLAQADPGFEPDTARRVVKDVAPGRAKARRLALALTDRPGLLVDGRSPAPLVVGELLVAIRAAGAEHVAAPRCTDCDRPIQGTLARMGENWYCHVCGRPRERCFSCGNMRPVARRDRHGEPHCLRCPVRDSRDPDSLLVEVITRIDPPLAPGAIIAAASLAAPRPTARRRLAWVIEDRPGLLTGDGHEAPIPAVLRLIDALCEAGATGIVRPACSGCGRVTPLTRLRDGLRICRRCSIAARSVPCSRCGRTREPGGRDGQGLPLCSRCVLNDPANHEHCTSCGHLKPVEARTDAGPFCWNCRPKQLLTCAICGRHGPAEISRVTGEPWCTACQQR

SEQ ID NO: 3678 - protein, 408 aa, synthetic construct
  REGION 1..408: note = TnsF-Tn7 System Protein
MGNHPCKRCVLDERLRALLADDSGNIRPELTELHRTLVDTDRPGTVLNWLTRSAAEAVLRDLGSGRRALSHDALDDLGPSKPIDHLRSVLVATGALPDRDEHLARLERWITDTVDTVTDPGHRKLARHYATWHLIRRLRARNRGRPVSYGQATGIRTRLRGAAVLLNWLTAHQLSLATCTQADIDRWLTDPDARYRNAGSGFLRWATANKLVDTSLEGIRRSWRGPAELIDGEQRWDIARRLLHDDAVKPEDRVAGLLVLLYAQRASTITHLITDDVTTGTNGVQLRLGSSPIVLPKPLSMLVSALVDARTGHATIGDQGSSPWLFPGGQPGRPLSAAQMGVRLRALGIRPNPARSAALFSLAAEVPAAILARTLGIHINVAVDWQQASAGDWTSYAADIGRRPSRDS

SEQ ID NO: 3679 - protein, 357 aa, synthetic construct
  REGION 1..357: note = TnsF-Tn7 System Protein
MDRPDLLRFRRPGASRELMIVVENLVKTFPGVGGAGTVEALRGIDLEIPTGEIFGIVGPSGSGKSTLLRCLNLLERPTSGRILLGGDDLSTLSGADLRSARRRIGTVFQQFNLLHSRTVLGNVEFPLEVAGVDRTQRRTRVRELLELVGLAGKESSYPSQLSGGQQQRVGIARALAAEPDVLLCDEATSALDPDTTDQVLDLVAEINRRLGVTVVVITHELGVLRRVCTSAARLESGHIVETGRISDLVADPGSMLGAAIVPVGDDPSAGPIADTALVTALGEDAHGPWLSDLIRTVDADVAVVGGRVERVGTTTVGRLRLRFGGAVDRDAVARFVGDRPHLTLSWGTDTDLEGLAG

SEQ ID NO: 3680 - protein, 357 aa, synthetic construct; identical to SEQ ID NO: 3679
  REGION 1..357: note = TnsF-Tn7 System Protein

SEQ ID NO: 3681 - protein, 348 aa, synthetic construct
  REGION 1..348: note = TnsF-Tn7 System Protein
MVEAMLRGFRAQQTARGLRDEGITKREQVVKRFMAFTNDYPWLWSAGQVDEWSLSLTAEHHLAPSTIRQYQGHLRLFTEYLTDPRYGWVRACEKEFGTGVHPVPVVHEWNTIAHLNDYEGNPEARPFTREELQRFFDYADDQVERAVRAGRKGALAAYRDATLFKVVYGWGLRRTEAAKLDVVDWGRNPAAPEFGRYGMLHVRYGKAKRGQTPRRRNVAATMGWAVEAVADYVENVRPRFGHAEHPALWVTERGGRIKSAEINARFAAYRDALGLPSVLVPHSLRHSYVTHLTENGVDRRFIQTQVGHECDSSTAIYTHVSDDFMNSALRRALAPAFDTYESSEEGSL

SEQ ID NO: 3682 - protein, 355 aa, synthetic construct; identical to SEQ ID NO: 3677
  REGION 1..355: note = TnsF-Tn7 System Protein

SEQ ID NO: 3683 - protein, 112 aa, synthetic construct
  REGION 1..112: note = TnsF-Tn7 System Protein
MAARLDYRWHLRQVMAGRGMFSTTDLIEPLAQRGIRLSSSQVYRLVVERPERLSLKVLMALLDVLDCTMADLIEPIESAAAKPTRAAAGGSAADGVGDLRPKRARIVGTDRP

SEQ ID NO: 3684 - protein, 369 aa, synthetic construct
  REGION 1..369: note = TnsF-Tn7 System Protein
MQLLFDHLLRQPRPEQIIKWLRMGPHTDLLHEIATGAKPLNEKTLATADGGKGLIYLQTLLAESGALPHEESELFRLRAWCDKQLTVLPPSDKIVLTQYLKWELLRRATRNETTGDITGGAAGHVKATIRGIGQFLAWLHEDHHTILSDITQSQIYEYTLRTNAGRWLPRFIRWAIAKGHIAHDVTPPPLQRTEPAVVITEEQTESVIRALLSDTSLRPGVQLAVLLVAIYGLPARRVVELARGQLRETSDNATFTLALGEHQLTLPDRLAEIAKAHTKALNGVDSPWLFPGRHLQRPISDQQLRRVLDPYGVSLHQLQVAARYRLAGAIPTKVLADSLDFHINTVAKYANLSNGRWADYPKLRQRPRA

SEQ ID NO: 3685 - protein, 369 aa, synthetic construct; identical to SEQ ID NO: 3684
  REGION 1..369: note = TnsF-Tn7 System Protein

SEQ ID NO: 3686 - protein, 341 aa, synthetic construct
  REGION 1..341: note = TnsF-Tn7 System Protein
MLEGFARQQASHALTRTTINLRRSQLIRFRRFTDSYPWQWLPGDLEDFTSSLLSGNAARSHSTLRGYHVTIRRFCEYLTDQRYEWVSECRHRFGEVPTQICFEWNTIAHLAAFEGRPGRRPFDYDEVEKFFDVVDARVDQIRADGRKGALAALRDAQLFKTTYAYGLRRAEVLGLDVADLRTNGKAPQFGRFGLAQVRFGKASRGTPPKRRTVLTLPEFDWVVEGLDHYLHQVRQKFHPGQSPALWPTERGTRVGAKYFDRRFAELRDAAGLDRHLTPHSLRHSYVTHLAEFGYSEQFIQIQVGHVFASTTALYTSVSDDYRSRVVSDAIDRFYFSPKDTR

SEQ ID NO: 3687 - protein, 686 aa, synthetic construct
  REGION 1..686: note = TnsF-Tn7 System Protein
MEMASIAIFGGLTVAAIVVAAVVPLATAVGLLAPVPLALVAARTRPRALIAASVAATGVSFAMAGTGAAATVLGSALVGGIVGDTKRRGRGIGTLALAGLVAAPVIGGISVLLLLILVPLRTLALEALGNTVGGLVKLLNQVPGLTGLADTVDSLGTSMVDHWWVWMWVSGALGTVVSLAVAWWLLGGVIARLADIPSEDTLDAGTADRESAQVGPLPLHLTDVGFRYRPDGPVVLDAVDVSVGSGEFVAVVGANGSGKSTLAKIFAGRAPTTGSVTRPGAAGLGRHGGTAMVLQRPETQMLGSRVADDVVWGLPVGAEVDVEGLLGEVGLAGLGDRETSDLSGGQQQRLAIAAALARDPALLVADEVTSMVDPEGRDELLALLADLPRRRDMTVVLITHRGAEAAAADRIIHLHNGRVIPHPPHWVPRPGMVEEPARPTPVAHAGAFGPRPAQPLLMLQGVGHTYLAGSPWAVRALHDVSITVHRGDGLLIVGGNGSGKTTLAWAMAGLIGPSEGTATLDGAPSTDKVGEVALAFQHARLQLQKQTVGDEIMAAGGIEVGSAEVARVLEAVGLPREMAARRTDSLSGGQMRRVVLAGLIARRPKVLILDEPLAGVDPYARAEIVEMLGRLRAEGMTIVIISHDLSDLDAVVSRRVRLTDGTLTVVDAPGISGQQSFQRATGEAAE

SEQ ID NO: 3688 - protein, 686 aa, synthetic construct; identical to SEQ ID NO: 3687
  REGION 1..686: note = TnsF-Tn7 System Protein

SEQ ID NO: 3689 - protein, 111 aa, synthetic construct
  REGION 1..111: note = TnsF-Tn7 System Protein
MSPTIDWRLRTLMAERGMFQTTDLVEPLRQAGVALSREQVFRLVTQTPQRLNMDVFAALCTILDCEPNDLIRVTAAHQDSPRKTGTGGPIDDIGDARPVRVRITRPTPRTR

SEQ ID NO: 3690 - protein, 409 aa, synthetic construct
  REGION 1..409: note = TnsF-Tn7 System Protein
MSRSYASDEQYERWYLVECCRCERRKNKAGSWPDGYVCRTCADRALRIRGRCPGCGADRVLPGRRAGDQAAICSDCAGFTTSFRCSRCTEEDKLHRGRLCTRCTLRDRLRELLGDASGEIRPELAPLANSLLNAERPLSILTWLYTRKGKTESPETLMRALGRGQIALTHEAFHTLQPWRAAAHLRELLMACGILPRVDKQICLLERWLIAHLNTITDPDRAQLIQRFATWEVLPRLRARAANKPITPFSRQFAGDQITQATAFLDWLAARQRSLRTCEQADIDTWHANHAEHWRRRLRGFLLWAMASKLTRGLRLPAPVTTHGAALPQPDRMALLGHLLTDHELPLRSRVAAVIVLLYAQPLSRIVRLTIDDIIYDGTRSCCASANHPHRSPPPSRSSSSPGSTSETT

SEQ ID NO: 3691 - protein, 409 aa, synthetic construct; identical to SEQ ID NO: 3690
  REGION 1..409: note = TnsF-Tn7 System Protein

SEQ ID NO: 3692 - protein, 381 aa, synthetic construct
  REGION 1..381: note = TnsF-Tn7 System Protein
MDPIGVVPGAARLHLVEGVSLLRPEDQVFAAMLAGFANQQLARNLARSTVEGRESTVRAFASYVNAFPWQWSPAMVDEWLGDLRSLRELKRSTIRSYSEAVRAFCHFVTDPAYEWAATCEKHFGSHPVQIVHEWNTARHVQDNEADPRKRAFTKKELHAFFAHCDEQVARIRAFGRKGWLPAFRDATLFKTAYAFGLRRNETRMLDAVDFGRNVHAAEFGAYGLCRVRFGKAKKGSPPKQRSVLTVWAWTPEVLEEWFTEVRPLFGTDGNPAAWPSERGMRVGCQRLDSRFVAYREALGLDGGLDFHSLRRSYVTHLIEDGYDPRFVQVLLSLQKGVHDVQHEVGTGGNLRGGGGYLRPSITRIPRRFDACAAGCDARFVG

SEQ ID NO: 3693 - protein, 110 aa, synthetic construct
  REGION 1..110: note = TnsF-Tn7 System Protein
MKRKIGYSWRLREMMATRGIFTATELVPLLRERGIELSASQVHRLVSGTPERLSLQVLSAFCDILDCTPADLVATTAENAGVRKTATDDRPAPASVAKLRPRPARILPDE

SEQ ID NO: 3694 - protein, 563 aa, synthetic construct
  REGION 1..563: note = TnsF-Tn7 System Protein
MGGGRRPRLRGERPATVRLRGLTEPAEINARFVAYRDALGLPPALVPHSIRHSYVSHLTEDGVAQRGETGAFLRWAKRNKRTRLDFPATRWDGPTRAIDTETQRGPRPPTPSDDTLKPADRVAGLLVRLHAQQPAATSRLTLDHIHSDGNEVHLVLGKEPIHLPEPLDALVLQPAATRRGHATIADQGTSPLLLPGGRPGHPISPDQLAGRLHGIGNRPGPARSTALFQLATELPAAILARMLGIHINVAIQWQRASSSDWMTYATDVGRRDPRPSLHGRPGKAKWSSVTKQIKIASAQSPVGRFPGVNGPQVRRLMRTAADAGTCLIHFPEGAVSGYPADPNTADPAALRHQLELITRLAGYLGIWVVVGSDHHLTPPHRPHNSLYVISAQGELVGRYDKRLCSHTEITKHYSPGFEPLVFDIDGFRFGCALCIEINFPEIFLDYRALDVDCVLFSTYSKDPIFEVLARAHAAANTSWISVSVPAHHSTTMPAGVIGPHGYRLASCPANGTPALTTVDLNRCDPALDIALNKARPWRAQARSGTPYRPRRVDDPRSSDRTRF

SEQ ID NO: 3695 - protein, 353 aa, synthetic construct
  REGION 1..353: note = TnsF-Tn7 System Protein
MGNDHRLCPSCATADHGTCSACRRHRLLVVASSGDALCKACYEQGEITCPSCGHPMPAGRGDVCEPCYWTRTCRKRVTIGQAGISAKALSEAFGEFGEWLIRTTGPHKAALKINTFLLFFLELDQAWSRIPSYLELLHHFGAEGLRRVRLPMRWLHEEKGVEPDHQAKRISSEKRRIQAYLSSMPSASLSESVLQTYWQQLEARIEAGRTSHTSARFALSAAAALLLNTDREGQRLPNQGDVDSYLSAVPGQAASVTGFTNFLNRQHATTLTPRVDEKRAGKRRKEKLARTMMQMAKSADQGEEWKERWVVTAMEYFHDKKVSKKVLRQQAVEHSGDGVRVSMEGVSYWLPIV

SEQ ID NO: 3696 - protein, 589 aa, synthetic construct
  REGION 1..589: note = TnsF-Tn7 System Protein
MTVSLKQCRTFSFSDGTLKDEAERLVVWWYGPIEKNTRSESVPKIYVFFRPIDKNNNLGNVIERTTVLTHVGLLRIGSVWEKGVSNSRIAFDERTFPVSFSPGGWRIVSLDDLRKAGRSLYTSFHDEYYLPLNREQRSYLIEFDLPDGKHLLIPCTEFFTRVYGRSSEIKRVLATYPWEAVKERLYRPLNAPASPGTWPVKFTYRVHKHDAILLAHMLYDPYAEQAARKIYSQIEARFPEDRILFEVTPWFQGSGELSVSGVPIDGGKTFLGLQILGCTQPDGATIHREREKSTTVPATDGDDAPTQFPYHQLPNIPDVIDLTDDEEPDHGSSWLDLTEDEFVILGKPRVVLDKRYTRKNVPDTRGVPVPGDETIFSTGEPYGSGKGVGQASIHAPITLESQGFLRDMWNALLYLKSAYPTAIHSVSWFTFEDGFSTSPDPRLISLEPLGIDDDVETSVANWVYMDTQTKVPRGVLVIKVHVLDQALYLMELQRRPPKPRNGGREEGSKPPSYKGLVFTLDHQGSFEHWLRQVLSNVRHVEGVVQKLVRHCPGFADTFKHPKAKNENVPCEASVMNAFSKVGITRGDLT

SEQ ID NO: 3697 - protein, 353 aa, synthetic construct; identical to SEQ ID NO: 3695
  REGION 1..353: note = TnsF-Tn7 System Protein

SEQ ID NO: 3698 - protein, 226 aa, synthetic construct
  REGION 1..226: note = TnsF-Tn7 System Protein
MPLPTSVRNIGPTRRSVSGYYAFRGEESIAFESTLERDFLIKADFDVSVLGVISQPCEIPFHHPVTGRCYTYTPDYLVYYRLGNRHYRDYPKPLLVEVKPREKWQAHWREWSPKWKAAMRHASNEGWSFSIHDESRIRDKTLDNITFLARYKRMVFPSVESQAVLNTVREMGVATLDYLLSRHFMGDIYRAEGIAHLWHLLATRQLDCDMAQSFSPLSEVWVPDYE

SEQ ID NO: 3699 - protein, 642 aa, synthetic construct
  REGION 1..642: note = TnsF-Tn7 System Protein
MNNHRDNTAEPSNGVAQTRQHLQITVGEQVQKDDTVYRISQVLDFETVIGIAVETGRSCPLRISELTPFHNGPTPLEQDMSEIGDADWREAEHRLSIIKPLVDRHTIGRDAAEERAKQTGVDTATIYRWLKRYKATGSVLALIPQKPGWKKGKSRIPAHAEAVIQEVIKDVYLTLQRPSAQKAVQEVMRRCHERRIDPPSPGTVRARLRDIPERDRLRGHGFRDKAINKFQPAAGKFPNADYPLAVMQIDHTPADIILVDDVHRKPIGRPWITLAMDVCTRVVTGYYLSFDPPSETSVGMCVAQSMLPKDEWLLLHNVKAEWPVWGTPATIHVDNGPDFRSETFRRSCLAHGINLEFRPVKQPRYGGHIERLLGSLLKEIHNLPGTTFSSIKEKEGYDPEKHAAMTKSEFEEWLVTLICKVYHQRLHSGIGMSPMRKWEIGVFGNADVQGVGLAPRPADRLSVLLDFLPSFQRTIQTFGVTIDGMNYYDEALRPWINAKDPDTPNKKRIFVFRRDPRDISVIWFKDPELGHYFRVPFANLALPSMSVWEHAQAKARLRQEGRSSVNESEILRAISELRTHVEESQARTKRSRRQAQRRKEHEKKVTPADPLLHAHSTAAPKESPTQGDGLLSGDIDVNWDIA

SEQ ID NO: 3700 - protein, 294 aa, synthetic construct
  REGION 1..294: note = TnsF-Tn7 System Protein
MSTHLHPDLRHVLGLSAKERMEFMDQPRWLGYPLANRVIEVMRGLMEKPSRPRMPNLLLVGDSNNGKTTIVQRFRKQYGEGYVNEDVEPVKSVIVTQAPPSADEKSLYIAVLESFWAPYRPTDPVPKLRYQVIHQLRACHTRLLIIDEFHSLLTGGAVKQRETMNAIKLLCNELMIPIVGVGTQDAVRVLHSDPQHASRFDVVALPKWELNQEFQKLLAGFEKILPLKHPSQLHEPQLATQLHAISGGNLGDLHRLLIECANAAILSGAERIDEKIIQSKSWVRPTRGIREVML

SEQ ID NO: 3701 - protein, 294 aa, synthetic construct; identical to SEQ ID NO: 3700
  REGION 1..294: note = TnsF-Tn7 System Protein

SEQ ID NO: 3702 - protein, 284 aa, synthetic construct
  REGION 1..284: note = TnsF-Tn7 System Protein
MLTSGSLCTECHCEIPGGRGKECENCYWSRTFQKRLLLDANALGAQVVVDDFLAFGAWLAAKGGNQRAALSIHRHFEFFAVIDAQWAGMPPAKQLLEHIGCEGLRRTRAPIRWYKLAKQFVINDELLELHVEHERVRKVLSGISFGADRALLDDYLTTLKHGKVETSFIAWQVERGSALATAGPIRGSECSRATSCGPPLEDQARYCRQPVGIRYLLQCPTSRQAVDHNRKAQSPSSQAPQAGGADDKTGYRCQPRTRCTAHMDFTLVGLLSSLELEPIKGRCT

SEQ ID NO: 3703 - protein, 230 aa, synthetic construct
  REGION 1..230: note = TnsF-Tn7 System Protein
MQTHSIPVVAHQQTRPIAPTRRSLSGTYPLRNGDGIPYESLLERDFLARMTFSSHVCDVIAQPVQIPFHGDGARIHTYTPDFLINYQLCDCQFGNYPVPLLVEVKPRDLWVKNWRKWLPKWKAAWRYAREQGWAFHIYDESRIRDTGFANIQFLDRYKAMDFSREESEWVVQTVREAGSVPVHYLLAIHFAGIYRGRGISHIWHLIATRQLDCDIRQPLNDFLDVWIPSP

SEQ ID NO: 3704 - protein, 640 aa, synthetic construct
  REGION 1..640: note = TnsF-Tn7 System Protein
MNKTNTHEEKPQAFVPDRARVSLERNAFVRYGEDVYRINQVLDFKTVVGIDVYSGRASALPVEGLKPVAQERLDGLYVNYDTESITDEQWAIARKRFEAIEPLLGDVVRTKAEIKTRALLYQVNSATIYRWMDRYKSWGELLALIPRKRGWQAGNVRIPAEADTLIDEVIHDYYLSKTRPTVSKAVSEFRIRAEARGVPMVAEWTIRQRISRITDKQFLRGRGFADKARNAYTPSPGAFPGADYPLAIVQIDHTPIDVMVVDDVHRKSIGRLWLTLAIDVHSRMITGYYLAIDAPSVISVAMCVAHSIIPKEEWLLAHGIEGDWPVWGFPRILHSDNGADFRSESLRRSCSNYGIENRFRPIKRPKYGGHIERLMGKFMQAVHGLPGTTFSNIQQREGIDSDAQAALTVSEFEVWLVREILKYNAKYHSKIFMSPLHKWNVGIFGGRDDTPAIGMPPRPADPFTIQRDFLPAYERTVQHYGVELDVTYYSEALRPWINAKDESGKTRKFIFRRDPRDISQLWFYDPHLKQYFKIPVANQSFPATSVWEFRAAKKQAVERGLANIDDDLIKRLIMENRELVESAKTHTKKTRRLAQRQKIHQTNKTPAAPAAPAPLEPKTIVPHGLLGLLDDMDEVFEEIL

SEQ ID NO: 3705 - protein, 606 aa, synthetic construct
  REGION 1..606: note = TnsF-Tn7 System Protein
MSHSVIRSPLPFAKPQVSLGGRFKDISGDLLVLWYGTFTPNSREKTVPLVNVHFRSVDLDGTLGAFYSVPIGLPYLSFFQIGTIWRAGSINSDTLSESLPELEVDFSPQSWTYVTASQLGLTNTSSPYKLPMSADTWLVGLRTGAKDQTILVPCVELLIRLYGRSSETSRILTTYPWQEVQARFFFDPEETWAKNVVKLQRSVRESEAVFLNHMRHDGYTKSLCRKLYADLESQFSSSPVSDVPFGNLQIAPWFQGPATIKGRGYWLNKKTFLCLRLTGASEPDGPELEIHRAEYHTENFQPGDEEDQGLFITRPTVTLPLNQKFELTNDSGSDPDLGRHILEHESFEVLGKRRATSRYVHHKPGERGKKVLPTGETEVLSGGDPGARGSGIGKAEIIDMEPWESSGVLVDVWVALNKLQTYFPTVIDRVEWMTLDGQRGTQAPAKLVPIKEFEEDETATPKQRSWVFLDPKHKIVRGVQILRIVCGQRHFYLFEIQRRPGSGKAEGKTTEQKAQGMLIELSIPFSQALVQLKIVLGLIRFFEGAFRDFVDNMDNPGVSFNHSKTKGDEVLHLTCMRNNLQRLGVNFPKRSPLAPRKDTAGQVPNR

SEQ ID NO: 3706 - protein, 295 aa, synthetic construct
  REGION 1..295: note = TnsF-Tn7 System Protein
MSDYPHIHPDFRAVMSLSDDERIRFIQEPRWIGYPAAHDIISAMRALLTIPSRPRMPNLLLVGDSNNGKTTIIRRFVELYGQGYVNAQSEPVKPVILVESPPAADEKGLYISILESFWAPYRASDATAKLRYQVVHMFRSCHVRLLVIDEFHSLLTGSAIKQREVMNALKLLCNTLAIPIVGVGTSDAVRVLHTDPQHASRFDVVALRRWEPSPEFQRLIRSFESILPLRQASVLSKPELALALHSISGGNTGDLHRLLMECAKDAIITGSEKITKSTIEKHAWLQPTRGIRERV

SEQ ID NO: 3707 - protein, 295 aa, synthetic construct; identical to SEQ ID NO: 3706
  REGION 1..295: note = TnsF-Tn7 System Protein

SEQ ID NO: 3708 - protein, 810 aa, synthetic construct
  REGION 1..810: note = TnsF-Tn7 System Protein
MTSVADEVIADPVGLVVRLVCGVDSHLDSAQVREVVGTVVRERAGRRRLAQALHDDPSLLRTGRPPAPYCVAKLLMALRAAGAQEIPRPRCSECGRECNWVGSRRGGQWACSPCSDKPAVCAGCGEECRVVSRDRRGEPRCAHCPDNAGDPLAELVDLVTGMDSALDAEAVLTALGRATVRPAGQRRLAGAVLERPELLTGAGYNAPAPAVLRFIDELVGAGAATIVRPACPVCGEVKALSKLLDNKRVCRNCFALQAAVACIRCGAVREPAARDDSGQPLCPNCLIKDPANLEECQGCGRRLPVAVRSSDGPRCMNCRPRTVTQCGVCGRSAVCDTSRATGRPWCLRCQQKWVTCSSCGDSGPLRGGSLDAPLCARCVNPDPQFWGRCPVCETTWQLGPQPCQRCALDQRARELLRGGCGAFRDGLAAFHQALVAVERPDSALAWLARPKVRGLLEQIGQGTRPVTHELLDELPAGKTLAHLRSVLVATGALPPRDERLVALERWIARTIQSRGDLSERQILHSYAVWHHLRRLRQRLGEQHTTRLQDLNVRCHITAAASFLDWLTAHDRTLADCTQADLDTWIVGGHRYRDETGHFVRWAVTQKRAHGLTFGATRWHGPAGPLDTEKRWADARRLLHDDTLTIADRVAGLLLLLYAQRIATITQLTVDDIHNNDNAVTITFGRVPVTLPEPLAALARELVATRKANSIIAAPAGSSPWLFPGRRPGHPIGDDALGNRLQRIGLNPRQDRSTALFALATELPAAILARILGIHIAVAVQWQQTSSGDWTAYAAEVSRRGAGASRDTKRH

SEQ ID NO: 3709 - protein, 810 aa, synthetic construct; identical to SEQ ID NO: 3708
  REGION 1..810: note = TnsF-Tn7 System Protein

SEQ ID NO: 3710 - protein, 378 aa, synthetic construct
  REGION 1..378: note = TnsF-Tn7 System Protein
MEGGLRRVDLAGAAHLELVSGVVQLHPEDAMAESMLRGWRAQQSARGLKEDTIIARERLVRNFLEFTNEYPWRWTASHVDEWSLWMTSERHLAPSTIRGYQTDLRLFTEFLADNARYGWVSACEQEFGPGVHPVPIVHEWNSIAHLQSYEGSPEARPFTREELQRFIDYADDQVDRAVRAKRKGALAAYRDATLFKVMYGWGLRRAETSKLDVTDWGRNPEAPKFGRYGTLHVRYGKAKRGQPPRRRNVLSMFDWAVDAVADYVENIRPRFGCPDQPALWVTERGGRVQPPEINARFESYRDALKLPKILVPHSLRHSYVTHNTENGVDRRFLQVQVGHENDSSTAIYTHVSDDFMNTALRKAIAPALGSKSRDRKDR

SEQ ID NO: 3711 - protein, 114 aa, synthetic construct
  REGION 1..114: note = TnsF-Tn7 System Protein
MAQKLDYRWHLRQVMASQEMFQTTDLIAPLAERGIILSSSQVYRLVTERPERLSMKVLMALLDILDCTMDDLIEPVADANAAAKPKKNAVGGGSGAEGLGSLRPKRARITPVDR

SEQ ID NO: 3712 - protein, 244 aa, synthetic construct
  REGION 1..244: note = TnsF-Tn7 System Protein
MQPVVASSKVVSYVSFFAMVDLNPSGWWTDCDVLATLGKGELRHDSLPRKFFRSLGIDISRSAITNATLKRCINNAVDALSELNGHYYEAFIGYTEYYDNKYSSGTITLQTLKQALSTAASFKTYITSANMPLTQRTLDSFLKNKPGHRAAISSLVSYLNRFYPEVRLAVPALRYKNPKHVVRNYIEYHRHKRPPNLTEIKAMLEYLHNVPRQLSKTITIKEVQFMSKDSLLVDTPRYQYIVSY

SEQ ID NO: 3713 - protein, 225 aa, synthetic construct
  REGION 1..225: note = TnsF-Tn7 System Protein
MYSQRRKIKPTRRSVSGQYPFRGESSIPYESTLERDFLIIQEADRFVTQIIPQPVQLSYVHANGNTYRYTPDYLVFRSGPNSFQKSHSGKPELVEVKPTSELKANLGKMRLKFKAATQFAKQEGFIFRIYDERRIRTPMLKNLEFLNRYRRFPFTEFDPVELKKIVEVVMTLEAPSIDELLAHERIQSQEFAAAKLWHLIATNTLSCDLCQPLTPHSRIWVDEYE

SEQ ID NO: 3714 - protein, 583 aa, synthetic construct
  REGION 1..583: note = TnsF-Tn7 System Protein
MSEIVSVHAANVQVSTAQKDFAAMNSLEYERAKWRYSVIEPLLELNPMTKEDVQARADEMNIGISTIYRWIRKFKSLGVISALMSEQRGRKQLDTRLDRRVNEVINDTIEKKYLTARRPSVMNAIREVAIECRKLNLPAPHPNTVRHRISKIDERLLVKRRGNRQKARNLYDPAAGQFPGADYPLSVIQIDHTPMDVIVVDDVHREPIGRPFLTLAIDVCTRCVTGYYIGLEAPNENSVAMCIAHSILPKEAWLEFKGVEAEWPVFGFPGKIHVDNGSDFRTKTLTHACREYDIQLEYRPVKQPQYGGHIERLLGTFMRQLHDVPGTTFSSIHEKQDYKSDKHAILTMSELEKWLLVLIAKTYHYSKHSSIGMPPMRKWELGVYGTDDTPGIGLPALANDPHTVQLDFMPLIERTIQKDGVEIDGIQYYDEVLRFYIGMKDEATKRGKRFIFRRDPRDISTIWFFDEREGGYHPISYADQRLPRMSLWELKRIKKHLADQSRDYRATEELISAHEELREIVKDAEKKTKKARKISQQQRRFAEGVSPAGVLTGKLNEPSAPDPMDSQVPDEDIFGDLKPFDEW

SEQ ID NO: 3715 - protein, 635 aa, synthetic construct
  REGION 1..635: note = TnsF-Tn7 System Protein
MFRWFEDRLAPFPTAEPSQPPKGFFAFCYHFTKGSEKYLITVAILMALVAITEVWLFGFLGSIVDWLSVQESDQFLANEWFKLVAMSAVVLIGLPLLVWFQSLILHQTLLGNYPMRIRWLVHRYLLKQSMSYYQDEFPGRVATKLMQTALSVRQVVISFIEVVNYIGVYFIAMFFIIGSADIRLVLPLAGWVIAYAALLYYFVPRLGRISQAQADARSIMTGRIVDSYTNIQTVKLFSHGDREIKFARDGMDDFLVTVHKQMRLVTLLYGFLYIINCLLLFASAALAISLWINDAVSLGAIAVVIGLVLRLFGMSQMVMWQLTQLFEAIGTVQDGINSIAVSRTVEDQPNAPVLEVKRGEIEFRNVSFYYGAVAGERSEANDSGAEEKPQGASFRPARVIENLNLTIAAGEKVGIVGRSGAGKSTLVNLLLRFYDIQEGEIRIDGQNIAAVQQDSLRAHIGMVTQDTSLLHRSVRDNILYGRPQATEAELKRAAERAHAADFIGDLNDHQGRTGYDAHVGERGVKLSGGQRQRIAIARVMLKDAPILILDEATSALDSEVETAIQENLYNLMEGKTVIAIAHRLSTIAEMDRLIVMDQGQVIEQGSHDELIALNGLYAKLWQRQSGGFLAHDIDE

SEQ ID NO: 3716 - protein, 635 aa, synthetic construct; identical to SEQ ID NO: 3715
  REGION 1..635: note = TnsF-Tn7 System Protein

SEQ ID NO: 3717 - protein, 226 aa, synthetic construct
  REGION 1..226: note = TnsF-Tn7 System Protein
MPKPGEVTRANHGILFLDELTETPRHVLDTLREPLESGTVCISRAQQQTTFPARFQLICALNPSPCGTFNGDIRSSRSTPDQILKYLSKVSGPFLDRIDLQVDVPRQPDALRDAHQQTKTAKMASQSLQEKVVAAQQRQLERQGCLNRNLSVRLLTEVAVLSDEDHEFLVSAMERLQLSHRAFHRTLRLARTIADLSGEERLRREHLLEALSYRALDNLLTQLRDL

SEQ ID NO: 3718 - protein, 374 aa, synthetic construct
  REGION 1..374: note = TnsF-Tn7 System Protein
MADSKGQLGYTSSGITKWPNPVHALPDELLSSLLIRAGFQNHIEPMPLAASIWGKWRAWVFDIDRALPKVPIQQLSYSTGMPVQQLKHLTLKPYIRYISSVKLNAKQRWFWVTSLAHRNAVRRSSIMFCPQCLLEDAIPYLRMQWRCSWITTCHEHHCVLLDRCPHCEYPIHPHRYSFNISSFNRCASCGDRLDELKAPTKTHTEIAQQQQHGFHLMRTFDDSADTWFAELKFLLGFVRKSYSSQLKCAQSLCNAFELAPRPQQGLSPFGSVNFPDLTLNDRHILLELAFRLKALSTTDLTSLLLSHGVTCSLFKSDSQHTPERFDAISQHLKRMDRSRKARSTTDAQWPPPKPDDQVQRKLDVLHREIRARGR

SEQ ID NO: 3719 - protein, 559 aa, synthetic construct
  REGION 1..559: note = TnsF-Tn7 System Protein
MKLESLPNDDKVYTVISYGRVTYNRAAPDSPIVEVGLSFKDKIKFVKVALTDLAFIPQGSCWLNQERVISNHPQNPAPALYKRRRLVLDFNQPNFVHGYAKDPKQPAHYYIPNFRHRIPKEHRNSKFLVVKATDGVELLIPTLTIFSRLYGVSSYFKTTFLNHEYAEAVQLLCYDVDLEKMENKPAPNQTVIGLHMNVYDSESIHVHHLKNCSYFRGVQKRIRHSLHKSRADGAFLDIPFWCKGTMELDVLLKPLLVDPDGRVVRAMVIDIVGISYPHVYDFFRDRANTASVSSESKDEERKPGWKKKPKKDENPQKKAALNSKKSSSKEVERTTLNAEPLVILGNVSTVEAAVRKERATSSGKVVPTDTPEKFSNAKESNRADPNVAGSHTNTPNVVEGDDELLRASWAALESQQQERKISELGAYELDDDVVQFINGAYGVLTFPSKRDWDYHNGSPAAARRLLMAEFTLGGKKTTLMEIEPRQSRGKSVIRHRGCIIRGGGIDISKMDDFLDAISSNRGNWDKIIPEYGWTFHTYKHVQADDLLKRLLTTLSKDKS

SEQ ID NO: 3720 - protein, 294 aa, synthetic construct
  REGION 1..294: note = TnsF-Tn7 System Protein
MTNDQMDLSHVSEKFHEIVHLPNEHRAGFINNHRWIAYPTAKRVIDELNALVSYPRQTRMPSMLIIGKPNNGKSSILEKFEELNPPSDENSAEDDLIIPVMKVEASRADAKFLYIEILSKLWAPFLPTQTLAVLRYQAVNIMRDKKLKVLMIDEFHSLISGTRAQQQEVLREIRYLSNTLHLSIVGAGTSSAVNVTKHDAQYTSRFTTIELPTWSLNQDYLRLLLSFEQGLPLRKPSNLATPEKAKAILSKSEGVLGNIHAIIKRSAIEAIRSGSESITMEIINKQPWQILRGN

SEQ ID NO: 3721 - protein, 294 aa, synthetic construct; identical to SEQ ID NO: 3720
  REGION 1..294: note = TnsF-Tn7 System Protein

SEQ ID NO: 3722 - protein, 436 aa, synthetic construct
  REGION 1..436: note = TnsF-Tn7 System Protein
MGTAQDGGRICGPCSGTDLDFACRQCGYPGDIHTDGYCTRCVATNRLHALLRGRSGALDPQLLPLAEQLAAAPRPQSLLAWLNAGEAAPLLADLARAQEPITHELLDTWPQNRGTRYIRELLVATGVLPTRNEAFARLALWSRHMTADLPDHQATVIGPFAEWGVLRDARRRMERGTYTYGAATHDRTELQTAVKFLSWLDIRNTTLDQLGQDDLDLWLTENPTRRRSLNSFIRWTVARRLTSKVTVPPTQRTQATRFLASEELDQQLRRCLTDDTLPLEVRIIGSLTCLYGLHMSRINTLTTDRFHHEDDGAYLTINAHPVLLPPTLAQLIERQIIRPNRNTSLLQPPRTTEPRFLFPGRPPSRPRSAATIRAMMKQHGLAGISARNAAMIEAVSSLPPIIVSDLFGVSTSTANNWAGLAQDSWTDYLAACATTP

SEQ ID NO: 3723 - protein, 342 aa, synthetic construct
  REGION 1..342: note = TnsF-Tn7 System Protein
MKEGWARQQSARFLRASTIDPRVRMIERFAEFSGQYPWQWTPADGEAFIAHLRSGTKPIRMSTARTYEVTIELFMEYVLDSRYAWVQTCVERFGEIPQPVFHEGNSVLHTVEYEGDPRRRPLTYDEIQALFDAADARPAKIRSQGRKGSLAALRDAAVIKTVYAYGTRRTETSRLDLTDLRRNRKAPRFRGYGSLMVRYGKASKGAPPKRRTVLTVPEMDWIVEVLEEWITEVRPHFSPGKHPAIWVTERVGRLSPRSINEAFVAAREAAGLDESLDLHCLRHSYITHLTEFGYPARFVQEQAGHSHAATTAIYMGVSNEYRNKLLEAALKGRLGDDWDVTA

SEQ ID NO: 3724 - protein, 108 aa, synthetic construct
  REGION 1..108: note = TnsF-Tn7 System Protein
MIKKMGYQWQLRQRMAERQLFQTSDLVPLLAERGVVLSREQVYRLVTQPPQRLSMDTLAALCDILSCTPNDLIKPEVVTTQLRKTAGGLDGPAPVTRRRTVIRRPGQP

SEQ ID NO: 3725 - protein, 487 aa, synthetic construct
  REGION 1..487: note = TnsF-Tn7 System Protein
MTPPGTTRGHQVGCDRCARHVAARYSILEQRICNACYSRLRRHPDICPGCAQIKVLAFYDSERRIVCATCAGVPSRFACITCGSEEQLTGSQCGTCRLTERLRDVLADKAGAIHPGLATLYDHLLTARDPRAVVRWLRREPVGATLRAMAAGELPIRHSTLDALPLSPRVRYLRRMLISAGTLPAIDVLLNDLENHAAAFIAGLPKEHGAITGQYYHWELLRKIRQRSANRAMTPSSYSTRSTELRQIADFFAWLDTNELSLPSLDQASIDRFFAHHHSQGAVGTFLNWAIRRGLTSSAEIPGRKLARPRPPVPDDVIWNKVDQLVDDESVPLGSRVIGLLVLVFAQRISDCVRLCRSDVTDGQTVRIALGRTPLTLPSPIAVLLRRHLEELGARRPYIGGGPEWLFPGASPHHHISEASVALHLVPHQIHAREIQQARIDYLVQQVPASIVADTLGININTAIRHAARMNSTWGSYPELRANRPDL

SEQ ID NO: 3726 - protein, 487 aa, synthetic construct; identical to SEQ ID NO: 3725
  REGION 1..487: note = TnsF-Tn7 System Protein

SEQ ID NO: 3727 - protein, 348 aa, synthetic construct
  REGION 1..348: note = TnsF-Tn7 System Protein
MFEAMLSGWGDQQSSRGLAERTIGSRELVVRRFEEFAGRYPWEWSPGDLEDFTTRAKSRQSPATPSTIRGYHSIIRLFCDYLTDPRYRWAVDCEERFGTAPQQICHEWNTLAHLVDYEGRPQRRALTYDELEQLFAVADRRVETILQHGRKGALAALRDSQIFKTIYAYGLRRAEAVGLDVADLRPNGAAPRFGRFGAVDVRWGKGSHGSGPRRRSVLTLPELDWITEGLAQWVDQARPRFTADLSGPLWPTERGTRVSLRYIDLRFAQLRDEAELPPELSVHTLRHTYVTNLIEWGYAEKFVQDQVGHAYASTTAIYTSVGDDFKNRMINQALSRIYGGPDAEHPQL

SEQ ID NO: 3728 - protein, 116 aa, synthetic construct
  REGION 1..116: note = TnsF-Tn7 System Protein
MPNTPNSDAPITWNLRPLMAAAGMFQTTDLIAPLRAQGVQLSREQVFRLVTKTPERLNVEVFAALCRILECTPNDLIEVPKIQSVRPRRAAGAPEASGPAIGELRPIPAKLRRPHE

SEQ ID NO: 3729 - protein, 608 aa, synthetic construct
  REGION 1..608: note = TnsF-Tn7 System Protein
MSGKGKPKPRKPCQVCGQRPPAMQGITVCFDCWPGGPIAAPPCRKCGSTENYWTSGLCQRCHAGAPGQLSSVFRYGGPFAEGKVIVEACIECGGWGATRTLRWLCYGCKAWREENHRNQGECLTCGHHRTLHRRTGSCRPCYKQRSYYARLTGRRHQDVSLAEANLSGQQIFIVNTFHANHGRGNRPYVKKTVPADMSLLRPVGWEQLTMFDSPRDLKAAMTKGFPQPPDPGLVAAFNQHVNDHAARYGWHKTKSDKVKRGIRILLGIQDTPGALLRRSDVALLSRIKHSAAVVAHVLETAGMLTEDRQPAVIRWYHATVVELPAQMQAELAVWFDVMRNGSTTPPRQQPRKDGTIGTKLRWAMPTLRQWAGEHDSLRAIGRDNVHAAIAGKTALYRATTLSGLRSIFSVLKARQLVFINPTARIKVNEPGGSIPPPVDLTRLRELLHCGDPAKELLSALLAFHAVRIWQLRMMKLTDYHDGRLHIGDQSIVLAPAVRQRLDTYLQHRYETWPASTNPHLFIHERSWSHHGYVWPSWIRCQLGMSPNLIRRDRILDEAHATSGDIKQLVSLFGLSVAGAMPYINAVSLASGEGERERRNARQHRNSAG

SEQ ID NO: 3730 - protein, 362 aa, synthetic construct
  REGION 1..362: note = TnsF-Tn7 System Protein
MALAVVRSIDAPRRLASARDEADYEQDLVDQYLLASMGAGCRDSTLANDRSVIFEFARFLGRPVWTACAPDADRYLTHQRKVLGRSYSTVHGKALALGNFFDFLVIRHQGDIHALTGRVVAQVIDEFNRPASPDYGSAPVPPGDDDVEALFSLWRQELPNARKYLVAVRDYVVASLWRRIGLRIMESYMLDIRDWRRDLGDYGNVHVRFGKGSRGRGYKTRLVPAINSVRELLDWWMVDIRHQFGDDYTRLDAPMFPSERRPDAVTGLCRRAGDQVLREGLNRAVSRWLPQWAGRLTPHVLRHFCASSLYRRGMDLKAIQELLGHSWLSTTTHYIHVPAEHIENAWEQTNSRTATRLGLTVR

SEQ ID NO: 3731 - protein, 590 aa, synthetic construct
  REGION 1..590: note = TnsF-Tn7 System Protein
MKPAPRLKTVAPPPLSAITGPPHLALTADHAQAGSGYSSTLIVTGYPETVGPAWLEPLLAWPGHMTVSVHVAPLPPADAAARLRTQRARLEASRRLADDHGRLGDPTVDAAAGDAADLADRIARGASRLFTVAVYLTIHARTQPQLTEAVTAVQTLAASMMLDTQPATWRQLHGWTSTLPLGADSLAAARIMDTDAIAAAFPFASPDLPGPLPGKPSLTGGILYGLNNTSTGLVWWDRWQQHNYNSIVLARSGAGKSYLIKLDILRSLIDGVHVAVIDPEDEYTALAEATGGTVIRLGHPGARLNPLDIPAGDIRSDALTRRALFVHTLITVLLGQTPPPAQRSALDKAVLAAYQLAGIYNDPATWNNPAPLLRDVCDALETQATPAATDLAARLHPWTDGSYSGLFNGPTTTVPAGQLIVWSARHLPDEMRPAGMLLALDAIWRTTDTPATTAQSARRLVVVDEAWTLLRDGEGARFLYRMSKAARKRHTGLTIITQDVADILGTELGQAVANNAATQILMRQSPQAIAAVASAFGLTRGEQQLLLAAERGQGLLIGGSHRAAFNAVASRGEHRLCTTGLEFNETYGDS

SEQ ID NO: 3732 - protein, 590 aa, synthetic construct; identical to SEQ ID NO: 3731
  REGION 1..590: note = TnsF-Tn7 System Protein

SEQ ID NO: 3733 - protein, 788 aa, synthetic construct
  REGION 1..788: note = TnsF-Tn7 System Protein
MPALARFSAYLLADVGRPMTEGAWVLSLVCSAAGLFVAVVAVALAIWCLWRVYEARMNAGAHLVQILAPVEVGADGAETLWRLLAPLCVRPSWWLPASHMGFEFQWASQQLTIRLWVPGPVAVAPVVAAVAAAWPGATCTVTAASGPLPDAVYQAGGHVVPVLPAWGGLNTAHDADPLRGLLSAASGLCEGQVACVQVLARPAGRRYRRAFAGDVARLRQAGLPRGEAAAWMGQILGLFTAGTGAAAPSVVAGGGGVLRDRDARSGVDKLAGPLWQTAIRYGITSSRRPVTVTGQAMQAGFGAWAARNQLRQIPMGDPARVLARRALRAGFLLSVAELASIAGLPLDEAVPGLARARAKAVAPPPHLPEGGRSTKVLGRAETSGRSIALTAADARHHVHIVGSTGSGKSTLMCNMVLDDVHAGRGVVVIDPRGDLVTDVLQRLPASAAGRLVLIDPDQDPSAALNPLDAGDADLAVDNVVSIFHKIFARHWGPRMDDVMRVACLTLMRHANASLTMVPPLLNDKRFRTNFTADLDDPEGLHGFWEWYETTPIPLRAQLTGAVLARLRNLMLRDFVRKTFGPLRSSFDMAKVLDGGILLARLPKGQIGEDTTRLMGSFVLASVWQAATARIRLPEAERRDAAVYIDEAHNFLNLPGSVADILAEARGYGLGMVLAHQHLGQMPGEALEAIAANARTKVFFTCSPKDARELARHTMPYLSEHDLAHLGKYVAAVRLLAHGTETPAFTMRTAPPKPVMGVQAVLRQAAAAATGRQAVPGLAKLLKTRAARP

SEQ ID NO: 3734 - protein, 788 aa, synthetic construct; identical to SEQ ID NO: 3733
  REGION 1..788: note = TnsF-Tn7 System Protein

SEQ ID NO: 3735 - protein, 105 aa, synthetic construct
  REGION 1..105: note = TnsF-Tn7 System Protein
MRWNLRMRAAQQGIWKSTEMRRRLADAGLDISHGKMSALWTGTPTTIRLDDLEVICIVLQCEPSDLLICEPDRVQAPAPQGLPKSDAAAGHLTPRLGRNRTVPPA

SEQ ID NO: 3736 - protein, 474 aa, synthetic construct
  REGION 1..474: note = TnsF-Tn7 System Protein
MSPAYTREQFERWHVRDCVRCGRRAAKAANWEGPICRTCFDHAVHTWGDCPDCGIHRLLPGRRNPGDADSVRRDCAGITRDFFCDRCGIEGCLLRGRLCERCTLADKLVHMLADGTGQVRPELVPVLEDVLATRRPKRELGWLARSRGPALLTALARGELPMTHEALAGLSDWRTASFVRELLTHHGVLPHADKQLMLFERWLTQRLADIERPEHAQLIHCFATWHELRRLRRTAGHQPLRPSATNESLQRINRAADFLTWLDEARTDLEHCTQADLDAWHSEHYATRRPAQPFLRWAMRAGHMPRLSWAWKSTTNPTPMAQHHRLARVRRLATDHTIPLRERVAGLLVLLYAQPVSRIARMTTHDVIIHHDDVLLHLGESPTPAPTPLADLLRDLLTARTTSTGANHESDWLFPGRQPGHPLHHRSLSDALRRHGIPIQTGRTSALRHLVLQAPAHPSSPPCSASTTNTPPAS

SEQ ID NO: 3737 - protein, 474 aa, synthetic construct; identical to SEQ ID NO: 3736
  REGION 1..474: note = TnsF-Tn7 System Protein

SEQ ID NO: 3738 - protein, 373 aa, synthetic construct
  REGION 1..373: note = TnsF-Tn7 System Protein
MTDGGRVPGLARLHLADGVSLLHPEEQVFSAMLQGWRNQQLARNLALSTIDGRQKVVRAFARHANAFPWQWSPQLADEWFGDLRAVRRLKHSTLRAYQEAVHGFCGYVTDPVYQWPVECEQRFGTHPVQVCHEWNTAVHVQDGEADPGKRAFTLDELERFFDYADEQVSRVRVAGRKGWLPAFRDATLFKVAYSFGLRRNEVRMLDLADLGRNPHAPEFGDHGVAYVRHGKAKKGSPPKRRSVLTVWDWTPEILDQWITQVRPAFGRADSPALWPSERAERIALSQLDARFALYRDALNLAPGLDFHSFRRSYVTHLIEAGWDPFFVQQQVGHEHASTTSSYTCVSSDFRTRTLRRALDDTLGAALDPTRRAR

SEQ ID NO: 3739 - protein, 107 aa, synthetic construct
  REGION 1..107: note = TnsF-Tn7 System Protein
MKRQVSYHWRLRELMAEHGMFSTTELVPLLRDRGIELSVSQVHRLATGNPERLSLAVLAAFCDIFECSPAELIATTAENASGRTTATDDAVIDPAAVTPKRARLRGQ

SEQ ID NO: 3740 - protein, 484 aa, synthetic construct
  REGION 1..484: note = TnsF-Tn7 System Protein
MRLAVSDCDCEYCHEKLTDFDYRYRGKHYCKKCYNYLFHFKECTVCKCKRKIYYALKIPICKFCQVKDKPCIRCNKSQYEFGKITEFGPTCKSCAKYFTISKKCLECGGSNHTVSNRSLPDGSTELLCQKCFKKKLPICSSCAYRRDAFSFSIETKKPLCEICTTEVSRFCKQCDSLFPAGVGRICSKCSSDNSLSKKVKFISASLSTYMSSYFTEFSIWFKKRRGAIYASYRIGHYHSYFLALDNLCEEFERIPTYEEVTDKLTVAETRKYLSVTIFLNEIGVIKIDKVIQDKYANLDMINKYLLSFKKGTYKHRLIHSYHSYLEEKLVSNKTTIRSMRLAITPAVKFLKYCNNFTEKKLNNFMLSGYLWLYPGQKAAITGFVNFLVKEFDLEFFLKEIKEITFTKPNLSKAQLKHRLISLLRKDKLISTQKRELLKTAVGYLHGISIPDNVFLTIDSSEDVLFFQLGREELYLPLEVKRRLW

SEQ ID NO: 3741 - protein, 229 aa, synthetic construct
  REGION 1..229: note = TnsF-Tn7 System Protein
MKKRKIGYTYGSVSGYFAFRKQKSIAFESTLERDLLTLLEFNDSVCDVIEQPITIEYINANGRNTTYTPDFLVYFNETETILLDVVRKPLLIEVKPRRIIQKKFKDLRPKFKIATKYASQNDMIFKIYDEEKIRGAYFQNITFLKRYKNLEYDLDEEQRILTYVDMLGSTTIDHILESLFITKIQKGLALGQIWHLLANKSLLCLYGEPLNYQTTVWLNDNYDEEKLNG

SEQ ID NO: 3742 - protein, 627 aa, synthetic construct
  REGION 1..627: note = TnsF-Tn7 System Protein
MDDIKSVKLDRSRIEIKQNEYVEYHNEIYKVSQLLDFSEIIGISIKDKRAKRLLIKDVKPVAPKDSSDNIAIYKDLSDISDYEYKEIEERYLAIKPLLSNNMSREDIEKHAKEIDVHYTTLYRWLKNYKSTGTLLGLASKPSGRIKGETRLLYSVEKIIQKVIDTYYLTKQKPSVQAVINRINIECKNQNYKAPGKNTIRNRIHQIAEYEKLKRQGNRSIARNKFEPVPGSFNADYPLQLIEIDHTPVDLIVVDDETRKPIGRPWLTIAIDIYSRMIVGYYLSLNAPSVTSVAMCITSSVLPKDELLLKLDIDSNWDVWGFPTTIHVDNGADFRAEAVQKAGLTHGINIEFRPVGKTNFGGHVERAIGTIMSAVHELPGTTFSNIQKRQEYNSDEHASLTFSEFEKWLVTYITKVYHKRKHHGIDISPEEQWEEGIFGEDSTVGLIPKPTDALTVMIDFLPIFERTIQKNGVNIDGLNYYDNLLRSRINKIDESTKRKKVFVFKRDPRDISYVWFYDDITLEYFKIPLADQSMPIMSLWEFESIKNRIKEKGSKTINNAQILEAHDELNQQINESAKKSKKARREQQRLKNRDIETASNDTPSKRRIQGTPSVDNSLIWDSDVPDFG

SEQ ID NO: 3743 - protein, 201 aa, synthetic construct
  REGION 1..201: note = TnsF-Tn7 System Protein
MAHNGILFFDELPHFSKGILEALREPMQDNRIRISRVNSKVEYPSDFLFIGAMNPCACGNLLDEHLECRCSDLEIQRYKNRLSEPFLDRLDLSVVMQNVKSDDKSSFTSKELHRKVVEAHIFRNKRGQERSNAKLKDSEIEIYCILNNEAKETLDMAIERFRLSFRSINKVLKVSRTIADLDKSKDIAKNHILEALSYRRR

SEQ ID NO: 3744 - protein, 360 aa, synthetic construct
  REGION 1..360: note = TnsF-Tn7 System Protein
MSDIKIPIEVKPYPDEILSSWIIRNSIANGSDPSSFVGGIWHEFRAWSRDIDRHLSSGKASKLSKITSLSKEQVKNLTLEPIIETITSRTSLNPKATWYFVIPTGTRGTTRINGAHFCSKCLALPNPYIKKQWKLAWNVACPIHKQLLISSCQNCNKVFSPHLIDYMNTKIYICTNCGFDLRKSSVIDSDKEALSLQESLNDAIFNGKISKSLPLAEHTIDELFITTRVLLSFFRNLYRLPRYKDIFEKLNLSNKEVFHTSSSRNSFEAIEVKDREILMIAVSRLFKINIDEIKNLFKNSKLRYKTLAEQLNISSKTIDYLAEGLIVSDSFSISANTCKEIKPRSKEEVETLMDEIRTFL

SEQ ID NO: 3745 - protein, 302 aa, synthetic construct
  REGION 1..302: note = TnsF-Tn7 System Protein
MTSLYEHLNEDCKRLIHSNKEDKIQFMHESVWIEYPKTKEILRLLKQLMDRPKKPRMPNLLIIGESNIGKTSIVTEFEKLHQGYTIEDENEMSVVIRPVLLALAPTKADEKSLYISILESFWTPFRTTDSLAKLRNQVYYLMRECNVKILVLDEMHHFLSGTPVQQRDVMNALKNIGTKLMIPIVGVGIKDAALILTSDPQLSSRFDLIKLSKWELDKNFRGLLKAFEKRLPLKNASNLDERDKATLLHSISQGNLGDLHRLLIECATFCIENNKEEITLDIIGKYKWLKPTSNLTPREIQL

SEQ ID NO: 3746 - protein, 302 aa, synthetic construct; identical to SEQ ID NO: 3745
  REGION 1..302: note = TnsF-Tn7 System Protein

SEQ ID NO: 3747 - protein, 337 aa, synthetic construct
  REGION 1..337: note = TnsF-Tn7 System Protein
MLCNACLSVGTVSCPACGELMPAGRGSKCEPCYWRGVHNKRVQLDQAAFVSPRFAELFASFGAWLQGHAGGQRAALRIQRYLPFFIEIEQRWGEIPTYQILLAHFGAEGLRRVRLPMKWFVESHLITVCTVAREADSESRRVSALVASIPDGTVGANALAAYRDQLQSKIKAGKLTIRSMRLALRPAASLLLAADASGHTLPDQITVDHLLREAPGQRSALSGFIHFLNHKYALDLLAIVDEKFAATRRRRHLEATLIALAKTGDGSDSFLREWIGIGLVYFHGLPNTVSRRISNDAITIDADGYRVYIDGQEYWLPTPESVTGAAVRDQSEMLVIY

SEQ ID NO: 3748 - protein, 596 aa, synthetic construct
  REGION 1..596: note = TnsF-Tn7 System Protein
MPIRLDRPIRRVSRVIRLKSNLGKNDTDMMAWWYCGIYKNPAADSQPHALVAFREIGMNGLGDEVILRRIPLTTLGQVRIGSIWKDQKCHSEAVFEVAKFDVMISNNTWRVVSFNDALQHSNAPPYPFEIHPLQFERDKNWMIEFDLQSGGKLLIPCLEFFARCYGRSAELKRVLATYPWNGPEDIHNSRLYAPLDDPEEPGRWKVKLRRRMTNGDIVFLAHAKYHRYTESAAKSIYAQIETQHDPMGRIPAFIKVAPWFQGPTQLKVSGISFDNGRSFLALQVIGCSNPQGVAILRDRENSNLVNEAADPGASEAWAGTPERRLAKPPEIVDLTSDEEPDHSTGPIEVQDPDFEELGEPRLIIDRRRQKAASTAGPKRPGAGAEQYSSGEPSGDGKGVGYASIHAKPVLESQGTLRDVWNAMLFLQKRHPEKIRKVQWFTWDTGFTGDPEPKLIGLTEFDKDEDIETGIRNWLYADPAIEAVRGILVARLMLEDRWVCILEIQRRPRMKKDKDGERKPAEESFKGLVCIPPNMGQFKDWLTNTLSSIRYVKGIVQRLEGEHIENCAAFSHSRTKDEQVAGEAAVLNALEKVNVRL

SEQ ID NO: 3749 - protein, 337 aa, synthetic construct; identical to SEQ ID NO: 3747
  REGION 1..337: note = TnsF-Tn7 System Protein

SEQ ID NO: 3750 - protein, 231 aa, synthetic construct
  REGION 1..231: note = TnsF-Tn7 System Protein
MDDNSCDQIVVRQTRRIGPTRRSVSGIYVFRRETPIPFESTLERDFLIRAEFMLDVLAVTAQPVGIPFIDAQGRANVYTPDFLVHYRLGNRSYDDYPRPLLVEVKPARAWRANWRAWSGKWKAARRFAHSQGWQFRIYDESRIRDQTLQNIRFLERYQRMEFAAEESRWIVDNLHQMGATPFHYLLSRHFMGAYRVNGVAHIWYLLASRQIECDMSRPLSDQTELWVPSYA

SEQ ID NO: 3751 - protein, 644 aa, synthetic construct
  REGION 1..644: note = TnsF-Tn7 System Protein
MHDIDDATFLNPAFEPRRQRVALEIGAFVQHGSIIYKIVQLLDFESAIGVDVETGRSMALRLGELRPVEPTFHSSTHNVDLIEIADGDWQIAEQRFAAIKPLLDSFSGGREAVVRRAGEVGVDAGTLYRWMQRYRAYEVISALIPRKRGWKQGKGRISAQAEGVIGEALSDFYLTNQRPSVQKTIVEIQRRCLERGIKAPGESAIRARIASLSERDRLRGRGYKEKAKNRFLPAAGSFPNADYPLAVVQIDHTPADIILVDDIYRKPIGRPWITLAMDIHSRMVTGYYLSFDPPSETSVAMCVAHSVLPKEDWLALHKVDAQWPVWGVPKTIHVDNGADFRSNNFQQSCLMYGVNLEFRPVKQPRYGGHIERMLGTLLREIHALPGTTFSSVKERDGYDAEKHAALTKSEFEEWLVTLICKVYHQRLHSALMMPPSRKWEIGIFGNAETPGVGIPPRPVARHSILLDFLPAFRRTVQTFGVTIDGMSYYAEALRPWINAVDRETGAKREFTFRRDPRDISTLWFFDPEIKQYFKIPFADQALPAMSIWEYRQAKEKLKQEGRAGVNHHQILRAVTELRTKVDEAQEKTKRARKQAQRRKDHANKVSPGAPLAGVPPQPSSPTPTPANPAVSGLLDDIDPYGDIA

SEQ ID NO: 3752 - protein, 497 aa, synthetic construct
  REGION 1..497: note = TnsF-Tn7 System Protein
MTQGTLVLLNDVQIAEVRRRWLRDPSFLGFPDAERDESLSEWYDQLLVRPEWFNPATASKATVIIGRKGAGKSAVKLAAMRQRQAGSDAVCIEASADELASVHASKLTEASSRGFGAVNDWMRIFADLIVRRVAQNLSGKLITSDDDIALRTWAKIEGISERDFGERLADVVKTLVPWAQKLASERQELKTVTDERIARITQATGFSLYIDDFDNLQENAGSANIRLIRDAVEAADRITHQNKSAEVHLLMRQDLWLRLRPGWHYADKVAGVVHLNWEQGDLRKWAERRLRRAVAIALGVEASKVRVRFDELWKIFFPEEVVLRNEKESSSFHYLVRRTMYTPRGLRQFIALAIEGGERFPITLADIENAEWTFSSDQLEFLKTEFGGLCEGLDICLQSFTGKPLEWIASDLYRHLRGLLGNGQVRLDKGVSDGEPDVALARFLYRIGFLEVRYPQEERFEVRDVMRYPDHWKSIRKDDAVRWAVRSAFFSALRSHR

SEQ ID NO: 3753 - protein, 296 aa, synthetic construct
  REGION 1..296: note = TnsF-Tn7 System Protein
MTKYEHIHPDFRHVMALSDKERIAFLDLPRWIGYAKAQQILETLQGLLHKPQRPRMPNILIVGEPNNGKTTIVRRFVDLCGKGYVNEASDPVKPVILAEAPPSADEKGLYISILEQFFTPYRATDPCAKLRYQVIHLFRACHVRMLVIDEFHSLLTGTPIKQREVMNAIKLLCNELAIPIVGVGTREAVRVLHTDPQHASRFDVFSLPTWGLDKEFQALLASFERILPLRQPSRLHQPEIALTLHSICDGNIGNLHRLLVACACEAIQNGRECIDRQVIEAKAWMRPTSGIREFIA

SEQ ID NO: 3754 - protein, 296 aa, synthetic construct; identical to SEQ ID NO: 3753
  REGION 1..296: note = TnsF-Tn7 System Protein

SEQ ID NO: 3755 - protein, 916 aa, synthetic construct
  REGION 1..916: note = TnsF-Tn7 System Protein
MTPKLDYRWNLRAVMAERGMFATTDLIEPLAAREIVLSSSQVYRLVVERPERLSLKVLMALLDILDCGMDDLIEPVAAASAATKQEGRWRRRRSWGPAPETSPGPRHRSPVSTVDPRRVISDPVGLISDLVAEADPGLDPGRARTVVVSTVGGRAKSRRIAAALVARPAVLADGRSPAPRAIGDLLLALRKAGATAIAAPCCADCGKQLRTLMRRGQHWYCSVCEQNTAACAGCGNLKQVRSHDRDGHPRCAQCPDPDDRDPIAVIHAAVAALDPAVPRDAIAGVLDRCCRQRGYQRRVAWALEADPALLTGEGHRAPLRVIPRLVEHLHASGVRGIVLPTCPGCGRQVRIDKPLDGQRVCRTCIAHSRIEECARCGARREPVSRDEHRRPICANCFCTDPANLEICLGCGRRRPVGRRTTDGPLCQTCHTLPIRTCSICGDTTPCGISRRTGRPWCPTCQRRAADCARCGRHTAIAAGTLTEPLCDNCAPPPAWRDCPTCSDPDHPTPGRCGKCLTNQRLYQVMGPVTADMPPGLLALRHDIATAEHSITAQRWLTKQPVTTVLSDLAAGRMPLTHAAFDTLPRRPATEYLRHTLVAVGALPERDEELVRLERTISEFLATQQNPEWKKLLHRYLVWHLLRRLRTRNNGRPTTRQQMLRIRSHARAAAGLLTWLDTRGLTLASCGRTDLDQWITDPAGGYRYETGTFLRWAYASKLTTAYLPARRWNGPANPIDDDNRWTTARTLLHDNTIDSVDRLAGLLVLLYAQGSSTIALLTVDQISITNDNVHISFGRTPIRLPEPVDDLARTVFATRKGHATIGATTPSRWLFPGGQPGRPISAQRLKLRLNQLGIRPNQARSTALFGLATQIPAAILARTLGISVSSAVRWQQISAGDWTTYAANIADRRGHSDSCDI

SEQ ID NO: 3756 - protein, 916 aa, synthetic construct; identical to SEQ ID NO: 3755
  REGION 1..916: note = TnsF-Tn7 System Protein

SEQ ID NO: 3757 - protein, 413 aa, synthetic construct
  REGION 1..413: note = TnsF-Tn7 System Protein
MHDSTQRDGGHPGVALTEKREQFARLIRQGVGNSEACRRVGINRRTGTRWRFGRTITNTAGEPVHYPPVTSDVRTRPRSPRYLSLDERIMIADLRRAGCGVRAIASELNRSPSTISRELRNNATDNEYRPHAAQRLAVHRIGRPRARLDTDAVLGAHVAQLLSDLKFSPEQVAHQLRVDFPGQRNRHLCPESIYQAIYDQRCGLTRPAKRSLRTGRYRRRRRLSGLERRGRLTNMTMIDQRPDEAADRSVPGHWEGDCIMGAGNKTAIGTLVERRSRYCMLIHLPGRNRAQELRDGIAAAMAALPPQLRKTLTWDQGKEMALHQQISAETGLDVFFCDAHSPWQRGSNENLNGLLRQYFPKSSDLGIYTPERLVEVASQLNSRPRKTLEWATPASLLTEIPSNHDRPNCCDVR

SEQ ID NO: 3758 - protein, 105 aa, synthetic construct
  REGION 1..105: note = TnsF-Tn7 System Protein
MQIRWKLRMAAAHREVWTGTQLQRLLAEKAGLELSSASVSALFTKQPSQLKLSTLIALCTALDCTPNDLFDIDTTPVAQPISSNPTKVAANDTQASRRGRSMPPI

SEQ ID NO: 3759 - protein, 271 aa, synthetic construct
  REGION 1..271: note = TnsF-Tn7 System Protein
MSIERLQSYYGFTRMPFGRGLAPSMLHRHPGHAEAVARISWCVDQHALGVITGEVGAGKTVAIRAATAALDPARHVIIYLPNPSVGVRGMLHHIVTALGRVPSFYTATLAPQAAEALAAEYAERGRTPVVVIDEAHLLDNAQMEAIRMLTNHDMDSGSPFAALLVGQPTLRHRLRLGVLAALDQRIAVRYALAGMSPTDSADYITHHCKIAGRTDPLFTDDAVTLIHNAARGYPRAVNNLAVQALTAAFATKVSIVDEKSARVAVTESGHD

SEQ ID NO: 3760 - protein, 271 aa, synthetic construct; identical to SEQ ID NO: 3759
  REGION 1..271: note = TnsF-Tn7 System Protein

SEQ ID NO: 3761 - protein, 348 aa, synthetic construct
  REGION 1..348: note = TnsF-Tn7 System Protein
MFEAMLRGWRAQQTARGLQEGTIAPRERLVRRFISFTNEYPWRWGPAHVDEWSLSMTGELQLAPSTIRGYQTDLRLFSEYLCDGRYGWIAACQREFGPQVHPVAIVHEWNTIAHLNSYEGRPEARPFTREELQRFFDYADDQVERAVRAKRKGALAAYRDATLFKAVYGWGLRRTETSKLDVVDFGRNPHAPRFGRYGMLNVRYGKAKKGQPPRRRNVLSVMDWAVEAVADYVENVRPRFGFDDHPALWLTERGGRIKPVEINARFVAYRDALKLPKALVPHSIRHSYVTHLTEDGVDRRFIQSQVGHECDGSTAIYTHVSDDFMNTALQKALSPLFGSTDPAHEDRT

SEQ ID NO: 3762 - protein, 837 aa, synthetic construct
  REGION 1..837: note = TnsF-Tn7 System Protein
MPRSATEPEAVISELVRSADAACEWIDVAGVLQAVFRQRPQLRTLAEILEARPDLLTSGRPEGPRAIERLIRALREAGAEHLVLPRCGDCGHERPLTGLGDGARICSACSNRRLWRANPCVICGSTTLAGRDRAGRPRCRAHPPWGATDPARELAKLIAAGPFGVSPGTAQQAIRSVEPTRPGQLRLLWALEDIPDLLAGRGAEGPRKISALVQALIDRGAHGVVVPLCPFCRRTTVLKQRRDGLRCCETCRNGSKIATCAVCRRVRPIGGRRYDGQPVCGTCRQHDPFNHRPCSVCGEMRFRQSRTGDGGVCAACREIPTALCATCGARRPCYFAATDAPKCLPCSAKEREEATCGGCGKHRRVNNRTATGEPLCANCGNRPKPCAGCGGIFRTSGRTPEGEPLCQTCWAKHPAAHRPCTQCGSVERLYRREQCAACARADDLRDVLSPPGGLIHPELEPVFQALLEPPPRTVLHWIHKIPARRAVLQALAMGHGPVTHEVLDRFATAPTIEYLRAALVATGTLPFRDEQLARLNSWLAKTIARVTSAEERRLLRNYTNWQPLRRLRCLPSGQLVTHGRAETVRTEIRNVVRLLEWLHDGDTTLAACTQDQLDAWLANGPTTRATVRGFLLWTSRRGHSRPLSAPVISTYFAARTIGKDRRWALVRHLGHDEQLHVVDRAAGLLLLLFAQPVGRISRLTTEHVVDRGDTLALKLGRVPVEIPTPLDDLIRQLVERRSGRAATVPIEEPKWLFHSIYPGQPIDPHTLGRRLKAIGIPPQLARHASLMDIASELPAVVISRLLGFHQSTGDNWTRESQGFGADYAAEVGRRLQQRSST

SEQ ID NO: 3763 - protein, 837 aa, synthetic construct; identical to SEQ ID NO: 3762
  REGION 1..837: note = TnsF-Tn7 System Protein

SEQ ID NO: 3764 - protein, 368 aa, synthetic construct
  REGION 1..368: note = TnsF-Tn7 System Protein
MPRADLREASAPLVLLQGVSLLHPEDAVFEAMLEGWGRQQRGGRRLQPDTISDRQSAVRRFTAYTNAYPWQWSASDLDEWMTHLIAGLKRAESTIRGYQGAIRMFCDYVISPHYQWPVECESRFGAHPVQICHEWNTVAHLVDYEGGAQRRPMTREEIQIFLDHADKQVDRAIRLGRKGALAAYRDATVFKLMYGWGTRCTETSRLDVTDFYRNPKAPELGNFGSLHVRYGKRTNGSPPRRRTTLSVMPWAVEAVEDYVINARSRYAAAVGQSALWLTERGGRLQPREIEDRFAAYRDALGLDRALVPHCLRHSHVTHQIEDGADAVFVQRQVGHRYASTTALYTGVSGDFMNTMMRKVLDQALQGEQ

SEQ ID NO: 3765 - protein, 150 aa, synthetic construct
  REGION 1..150: note = TnsF-Tn7 System Protein
MNRPRRPGTGATHLLIGLGTAIAEAGGRVRYTTAANLVNELAEAASDKQLARTIKKYGRVDLLCLDELGYVKLDRHGAELLFQIFTEREERHAIAVASNRPFTEWDQTFTDKRLCQAIVDRLTFEAHIIETGTQSFRLASTTAKRKAAAA

SEQ ID NO: 3766 - protein, 150 aa, synthetic construct; identical to SEQ ID NO: 3765
  REGION 1..150: note = TnsF-Tn7 System Protein

SEQ ID NO: 3767 - protein, 114 aa, synthetic construct
  REGION 1..114: note = TnsF-Tn7 System Protein
MTPKLDYRWHLREVMATRGMFSTTDLRPLLAERGIDLSPSQTYRLVVERPERLSLKTLMALLDVLGCSMDELVEPVAAAGSRRRHRAASGGGPLPEKDAGLGGLRPKRARIVPE

SEQ ID NO: 3768 - protein, 809 aa, synthetic construct
  REGION 1..809: note = TnsF-Tn7 System Protein
MTGTAAPDRAVTDPVGSIVDLLAGTDPGFDPDTARQVVTDVAPGRAKARRLALALEARPDLLVDGRSPAPLVVGELLVAARAAGAERIAAPHCSDCERPLNGTLARIGENWYCHTCGRPQEQCAACGNTRPVNRRDRHGRPHCLHCPVPDSRDPHTVLVDVITTCDPSLEATTIITAAALAAPRPTARRRLAWAIEDHPELLTGSGHLAPIPAVLRLIDALCAAGATGIVRPPCPGCGRVTPLNRLCDGQRICRRCSSVGRAVPCSRCGKPREPAGRDDQGLPLCSRCVLNDPANHEDCSGCGRRKPVEARTPEGPFCWNCRPRKHLTCSICGCHGAAEISQVTGEPWCKACQQRWVRCAGCGEVKPIRSGTLEAPLCAGCTESDSSRWQPCPRCGTAERLVGNHPCQRCVLDERLGTLLADDTGVIRPELTLLHRTLATIDLPRTVFKWLSRSSAAAVLNDLGSGRRALTHDALDDLGPSKPVEHLRSVLVATSVLPDRDEHLARLERWITDTVDTVTDPGHRKLARHYATWHLLRRLRARNRGRPVSYGQATGIRTRLRGAAVLLNWLTDRQLNLATCTQADVDRWLSDPDARYRHGGSGFLRWSSTNKLANTSLDGISRSWRGPTELIDGEQRWDIARRLLHDNTVKSEDRVAGLLVLLYARRASTITELTTDHVTTGSNGVHLRLGSSPVELPEPLSTLVKSLVDTRAGHAAIGERGTSPWLFSGGRPGRPISTAQMGVRLRALGIRPNPARSAALFALAAEVPAAILARTLGIHINVAVDWQQASAGDWTRYAADVGRRPIQRR

SEQ ID NO: 3769 - protein, 809 aa, synthetic construct; identical to SEQ ID NO: 3768
  REGION 1..809: note = TnsF-Tn7 System Protein

SEQ ID NO: 3770 - protein, 346 aa, synthetic construct
  REGION 1..346: note = TnsF-Tn7 System Protein
MVEAMLRGFRAQQTARGLRDEGITKREQVVKRFMTFTNDYPWSWSAGQVDEWSLPLTAEHHLAPSTIRQYQGHLRLFTEYLTDPRYGWVRACENELGPGMHPVPIVHEWNTIAHLNDYEGNPEARPFTRDELQQFFDYADDQVERSVRAGRKGALAAYRDATLFKVIYGWGLRRTEAAKLDLVDWGRNPAAPEFGRYGMLHVRYGKAKRGQTPRRRNVAAVMGWAVEAVADYVENVRPRFGHADHPALWVTERGGRIKSAEINARFSAYRDALGLPSVLVPPSLRHSYVTHLTEDGVDRRFIQSQVGHECDSSTAIYTHVSDDFMNSALRRALSPAFGALHGEGIL

SEQ ID NO: 3771 - protein, 105 aa, synthetic construct
  REGION 1..105: note = TnsF-Tn7 System Protein
MAAKLDYHWHLRQVLAARGMFSTTDLIEPLAQRGIRLSSSQVYRLVVERPERLSLKVLMALLDVLDCAMTDLIEPVAAASAKPTRTAAGGTATEGVGRDRHGGGR

SEQ ID NO: 3772 - protein, 497 aa, synthetic construct
  REGION 1..497: note = TnsF-Tn7 System Protein
MSIDAKGQRYCDECGRTIINAHRLHKGAEYCSSCYPRVFIPLPCARCARPTRTHRHATTEPICRQCERVSRKCLRCERPVQGKAARLVDGRPVCGSCAPYFLQPEPCGWCGVESVHLSRAPRLGIEDKICNACRNKLTHRSCGICRRYRSVAGLLPNGKPHCEACTPGAEQVHACRGCGLIQAGSGQGRCTACLNRERIERDAAVQVLALERDWSRAAYLAFGQWLLEAQPNKPHLAKVFAGHFSFFARLDASVADPYTLRGNGLLETFSVAELRKHLLPVHFLEAHLGASLDEAAKAEQVERSRITEKLLASRRAPYAAVLKRYVDWLDGQETPTRTIRLYLTAASQLCEIEGLGESGQCSEDQLQHFLRRHPGARASLFRWLTFGRTVLGWEVTMPQRSSGKDRPPRTVRDLSVLIGKIEQVGLENAPVTLLRRAIAKAFGFQEARMQFTHWFLRTEGREIYLCDATESLRVPEPMRDLVTTWMRRAPHAGYLAP

SEQ ID NO: 3773 - protein, 223 aa, synthetic construct
  REGION 1..223: note = TnsF-Tn7 System Protein
MARLSSDTSVRELRTSRRSLTGRVTLGDGGVAAFESSLERDWLLALDFDPRVQAIQVQPFSLHYEHRGTTRRYTPDVRAEYRLESGMATVVYEVKPSEELRLNWSAYRPRFKAAVRYCRDHGWRFKLVTERHIRTALLDNARFLRRYRALPEQDLYVQQLLYTLRALGTTTPQALLAAAYWAEESRMAALPMLWKLIATGRLGADLHVPLTMSAPIWLPGSSA

SEQ ID NO: 3774 - protein, 360 aa, synthetic construct
  REGION 1..360: note = TnsF-Tn7 System Protein
MDALGRLGRSGARGVSQMRWPLPVEPQEDELLSSFLVRAAQRHGLSPYRFCAFHFPGVPVWNRDIDRSASDALIAAVAVKAGLSPVRVAQMTLRGAEAKLSKGVVRGSDSWINRVGIYHRLRRGWGLQYCPDCLAERPVLCRAWRMSSMVVCSRHRRFLQDACPHCDAPLAIHRQMLSVQLCHHCSRMLGRIPQDPSVPIDTLLRAQSYFERALHGGIAEIGGQTVCCEDLFQGARVLASLLAPRSPSLRAPAGHHRRSLELARVQARADVVLRVAEVLASWPLGFKRIAKDQHLTQRSFVRNSLPDWLRSAVEELPAGRTRHAMPRKRHALRAKLEQDRRRNTDWRTTRAALLWQAAGK

SEQ ID NO: 3775 - protein, 636 aa, synthetic construct
  REGION 1..636: note = TnsF-Tn7 System Protein
MSGISKAFFRAEPGQLVGYGDRRFRITHLLSVDSVLAVDLESHESQRLRVESIMPLAPEAETQSRADIERDLAHYSKEEWAEAQRRFAAIKPLLEDPLRTRAMAEKLAEKERIHASTLYKWLNLYQAAGHVSALVPEKRGRKSGTLLLRDEQEKVIASAIEDVYLSKQRHNKQDVVDEVIRRCRLAKIDAPSANTIRNRIAALEPAHALRRRGFRDVARNRYEAIQGAFPGANHPLAVVQIDHTEADVILVDEVHRQPIGRPWVTLAIDVYSRMVAGIYVTFEKPAAISVGMCLAQAICPKREYLAELGVGGEWPVWGAMSVVHSDNGKEFRGQMLKRACEEYGMDLQWRPVTLPHFGGHIERLMGTMANQLRKLPGATFSNPQQRRGYDSEAMAALTLKEFENHLVDFIVNVYHQRVHSELGMSPKNKWSLGILGDANSTGTGMFPIPEDPLRIHLDFMPFFHRSVQQYGIQIDNISYYDPVLDPYVSAMDPDNAKAKREFLIRRDPRDISKVYFLDPKDGRYTPLPYRNIGYPAMSAWELREVQARLKAEGRRGVDENLIFEALERMRSKVAEAKQKSKAARRQATRNPAAAKHHVPKPAASPSVSQLPAPASTIEPDPFDEPIRPFDEVSLVR

SEQ ID NO: 3776 - protein, 211 aa, synthetic construct
  REGION 1..211: note = TnsF-Tn7 System Protein
MLFLDELPEWNRHALEVLREPLESGTVTVSRAARSAEFPARFQLVAAMNPCPCGWAGDASGRCRCSDDSIRRYRARISGPLLDRIDLHVDVPRLPPQALRADAAPGESSAAVRARVELARQRQLARAGCPNGQLGHSETLRDCRLQPRDEALLEHAIDRLRLSARSLHRILRVARTIADLAGSDAIATAHLTEAIGYRHLDRGEAPLARSA

SEQ ID NO: 3777 - protein, 295 aa, synthetic construct
  REGION 1..295: note = TnsF-Tn7 System Protein
MTRYSHLTPAVAQALELPKSERITFCQTDRWIGYTRATQILDQLDQLLTYPRSLRMPNLLVVGRSGNGKSSIIEHFTNRHPVQMTESGSPIAPILRIEMPETPDETEFWSTLLWVLAISHREKDPASIKKRQAKSVLQYANVRLLVIDEFNNLTNAGKAAGDLLAAIKGLSNELKISIVAAGTQAAINALSTDPQMKSRFEPTALDRWKLNSEYLRFLASYEQLLPLAEPSQLASRELAPKLYGMAGDTIGGTVKLLKAASAHAINTGVERITAPVLDDLGWTRLGDWDAVARVV

SEQ ID NO: 3778 - protein, 295 aa, synthetic construct; identical to SEQ ID NO: 3777
  REGION 1..295: note = TnsF-Tn7 System Protein

SEQ ID NO: 3779 - protein, 710 aa, synthetic construct
  REGION 1..710: note = TnsF-Tn7 System Protein
MAARDNKGQPRCQRHRPQETDNAALICALLQKLDTGLNETTLTEIVEQTAPKPFQLRALTAELTDRPDLLTGQGAYGSPRVLALIDALVAHGARTVIAPACPFCRRSTALNFRRDKARCCRRCYDGSRLQSCSACGQEQIVATRTPDGRPLCGSCMRGDPLNHESCAGCGRLALAVHHDEHGAALCGRCWRPPIATCSFCGKQKPCTNAGSDSPRCLTCQRTQNRAPCSHCGTVRIVWGRTSGKEPVCAPCGRPSEQCESCGRLRRVTGRTADGRALCRTCYRKHPASFRACTECGAIEYLHHRGLCTRCAAPGQLRAVLSGPDGSMRPELEPVIAALIGSDPYRLLVWIADPAPRRLLAELASGAGPVTHDALDQMTPSTALSHFRSILVANNALPERDEHLARFEQWLDRVLDGVDHAENKRLLRSFATWFHLRRLRRRSARRPLTINQIGGVRHEVRSSIRLLAWLCDHETDLSRCTQDDIDAWLSSDHAGKYVVRNFVTWAVENRHAHGIAIPTRSESRTRGQALLPEADQRWTLSKRLLHDTTLDTVDRVAGCLVVLYAQPCSRIVSLTVSHVTESDKGVHLHLGTRPLDIPEPLGDLVRELVRTRQGHAAVGHTDASPWLFPGGRPGRPMNPARLMSRLNAIGLPTRAGRGTALMDLAGQLPTTVLSRLLGIHIQTATAWSQEAGNTRPGYAAEVARRAHRRSE

SEQ ID NO: 3780 - protein, 710 aa, synthetic construct; identical to SEQ ID NO: 3779
  REGION 1..710: note = TnsF-Tn7 System Protein

SEQ ID NO: 3781 - protein, 340 aa, synthetic construct
  REGION 1..340: note = TnsF-Tn7 System Protein
MLDGWEKQQRGRRLESETIDDRRRIVRRFVDFSGEYPWNWTAAHMDEWSFSLTAELGRARSTIRAYQGAIRQFCELITSPHYRWAEECETRFGTHPVQICHEWNTAAHLEDYEGEAERRPLTREECQALFDYADDRVEEAIRLGRKGALAAYRDATVFKTIYGWGLRCREVSRLDLTDFYRNPKAPELGKYGMMHVRYGKATKGSGPRRRMVASVMPWAVESLEDYLVNLRPRFKHHPNHKAVWLTERGGRLQPREIEARFAAYRDALGLDKELVPHCLRHSHVTHQIEDGVDPKFVQEQVGHRFASTTAIYTGVSTDFMNTMMRNALDQAFTTEELETV

SEQ ID NO: 3782 - protein, 169 aa, synthetic construct
  REGION 1..169: note = TnsF-Tn7 System Protein
MRGPSASGKSSVAQGIRDRFGRGLALVGQDYLRRIVLRERDVKGGLNVGLIDQVARYTLDTAGYHTVIEGIFAADRYGDMLTQLLADHRGRSYAYYFDIPLAETLARHATKDREYLAHVTEEHLADWYRPRDLLPGRVETVIGPDSTLEDIVDQIMRDTGLDQLPALDP

SEQ ID NO: 3783 - protein, 169 aa, synthetic construct; identical to SEQ ID NO: 3782
  REGION 1..169: note = TnsF-Tn7 System Protein

SEQ ID NO: 3784 - protein, 113 aa, synthetic construct
  REGION 1..113: note = TnsF-Tn7 System Protein
MTAKLDYQWHLRELMAARGMFSTTDLRPLLIERGINLSASQVFRLVTEKPERLSMKVLMALLDILGCRMEELIEPVRATGRQRKTASGEIGGPATGPTENGVGPFRPKRARIL

SEQ ID NO: 3785 - protein, 812 aa, synthetic construct
  REGION 1..812: note = TnsF-Tn7 System Protein
MVAPLTVGDLRRRLSVLANALMEAGSGLPAAVVVRDILRITSPLQRARLFAELRRRPTLFRDEQQPGTAAAQRFTLALIARGHGLRPPRCSRCGREGLAKHHDGAGGKLCNPCVSLVRAPVCVMCGRRDHRYRTRDGAHYCASCWWTTPAGVSERAALNALEARALQTRRVVFITRTVAARCDAPLTSIVRAVLTPVTSGRVLAVMVRELEAYPDILTVNPGLAGRSLQQVIRFLVGQGFQGLILPRCPRCGRNDVVLPLRSAGVHLCGACHRREHSTACEQCGRVLALRPQSDGRRLCAACDQRNPANHRVCSGCGRFGRVAVNKDTGPLCGQCYVPPSHTCDRCGGSAPIASRIGGRSHCLRCYNQLRSRPAVCPGCGDLRLVAYWHVDRYVCAGCAEMPAHLACRRCRSESVRMNGVLCSDCAQSEYVDKLLSGVDGRVIPALEPLRTVLLDDTRASVSTITWALRGRGAKVIAAMARGDLPISAASLAAVTPEGVVTHLGSLFHAAGIIDASDLLIARYQLRVAAIMPEIPGSCRILTEQYVRWEILPRLRSFDTTRDSAPVLRRETRRLKTIRDLYSFIDASGHEFATVPQRVLDQFATRCSPADRGQLSPFLRWARGQGATRVRIQPHRTNGVAPATGDTDRWRHVRTLLADENLPLKVRVGGLLILLLGQQATRVVRLRLDDVRVHEDVVEITLGEDPVALPRVAGELISRLRAERMDSRNASEWLFVGASRGQHLYGSSLRSALRNAGVPVGAGRVSALLHLARTVPAPILADLLGLSATAAANWSEAAARSWSDYPRIRTTSQ

SEQ ID NO: 3786 - protein, 205 aa, synthetic construct
  REGION 1..205: note = TnsF-Tn7 System Protein
MVAAGSLSADAAALLGAAVRDGQSVIVSGATHAGKTTLLGALIAASPPEHRIVTVEETFELAVRAPDVVAMQGRQPSLEGTGEVSLRRLVKEALRMRPDRLVVGEVRDAEALDLILALNTGVPGAATVHANSATDALRKLSSLPLLAGRNIDRDFLLPALAASVDLVVHCVRDASGRRRVAEIMRTTGTVTGGMVDTEPVGVNLA

SEQ ID NO: 3787 - protein, 205 aa, synthetic construct; identical to SEQ ID NO: 3786
  REGION 1..205: note = TnsF-Tn7 System Protein

SEQ ID NO: 3788 - protein, 812 aa, synthetic construct; identical to SEQ ID NO: 3785
  REGION 1..812: note = TnsF-Tn7 System Protein

SEQ ID NO: 3789 - protein, 1162 aa, synthetic construct
  REGION 1..1162: note = TnsF-Tn7 System Protein
MSGLGTGPVVLDNRFVLPRDELNSGGHARLFRAYDNETGAHVAVKLFAPVTHVDPRTLELSWSNELDVYSRLDAHPNLLQVVGFGTPADGAPWIAFEWCGVDLGAVVTREALSWEQLRPIALEILTGLSVLHAKGWVHRDLKPGNVLVDGAQVKLADFGTMRYREVTSFGKTMSQLGTRPYCPPESGTENPLPAYDVYSFAVLVICCLLGDFELNGTTPAAALGRVVVPEPIRLLLARCLSEEEEQRPGSAGVVLAEIEQIAKGEAVAQDVPEIGIHLPVNVTQIFRDVTLAETAGFEEFRREFGPRVRLVRDPKAADKQGLLLVGQSLLAAVAPHESRTGSIFVKHVWRPPVAHLERLRKRGVGATIRWVATPIRPLEADAAISELLRTLAEREAANPEQHSRVEVHDRWERVLDAKFAIARERGKDVTYSALRVEGARVYLTTTDRSADPQLGELRVIRSTTGRFVRGEVEAIEGNAVVFYVNEGNPDDLPRRGVLAVDAERTVSKLRREQDAVRRVFEGRAVRADLKDILSNPAVNPLPVEHHVEKFVQDHLDGAKRNAVASVLGAQGISLVKGPPGTGKTTLIAELVAQQLRIKPDAQILLASQTHIALDHALSKVAKVTPAASVLRIGSPDQLSPSSEAWTVPSQLEAWRAETEATVAAFVQDHLHSAGVLDVQTRSTATRLRAQVERRTRTEAELVEVEVALGVARKEQETTRAAIEKLFAAVSRLDTTPADTADVVARDLAKLTDAVEQLGVNLEQRSPAIRQLEGLRERVVQLSERLTELREDTQRAVAELRAVGDLADAADEEDMLHRIDASMSTDDERVQALQLVAEEWLERFRPTGEFRVALLFRASVVASTCVALTGSKGAERVEFDLCIIDEASKATPTELMVPMANARQWVLVGDEKQLPPFLDSALVDADFLAERELTRAEVDERLFTELGAGLPTQSVAVLSHQHRMHPAIGKVVSDVFYGGELRSGAREVSPLVQRALGGAVTWRDTGRKESERRSGLSYENRAEARTVAELVGTIDNYAVLLGLDEVEVAVIAGYAAQVRTLQEVLSSTKSKLKVVRVKAATIDSYQGQEADICIVSLTRSNRRGDVGFLGSPERLNVAISRARDGLVIVGNRAMADGSSDRRRSRKLAEVARAIAAAGGRNGH

SEQ ID NO: 3790 - protein, 1162 aa, synthetic construct; identical to SEQ ID NO: 3789
  REGION 1..1162: note = TnsF-Tn7 System Protein

SEQ ID NO: 3791 - protein, 757 aa, synthetic construct
  REGION 1..757: note = TnsF-Tn7 System Protein
MNRTGHDVFDLPERLAAKGDPALIGADRDQFAAIAASLAGQRAQTTARLDELRRSPGGSGQAAMERDLEIHRLTAHLRMLRRFDIDLCLGRMSAADGGPPVYIGRTGLTDGYGRRLLTDWRAPAAEPFFAATLQNPMGLASRRRYRWTGGRVTDYWDEALTAAGLENDAALDDQSAFIATLGAHRSSRMRDVLATIQADQDAIIRTDSRGALVVDGGPGTGKTVVALHRAAHLLYSEPRLTQGGGGMLFVGPTPAYLAYVEDVLPSLGEENVRMCTLRDLVPEGAAACDEPDPRVARLKETLDAAALIEAVLRARVRPPRRAVQVETPWADLIIGRAQWDEAFDAADPGAPVNEARDEVWEEVLEILAAQLDNPEVPAHVVQRWLRQDDELTSVFVRAWPLLDPAGLVASLWSSPDLLRRCAPQLSADDVELLQRADPYAWTLADLPLLDAARRRIGDPEDVRSRHRREAVVAAAQDQMSHVIEDLVESDDSEMRIMSILRGQDAQNVLAGVDAPPVADPDLLAGPFAHIVVDEAQELTDAQWRMLLRRCPSRSFTIVGDRAQARHGFPGTWQERLERIGFRDVRQSSLNINYRTPEEIMAVAEPFIRAAIPEANVPTSVRSSGIPVAFAAATARDAILTEWLDDHADGVACVIGDPGFTGSGRVRSLNPEGAKGLEFDLVIIVDPEKFGDGITGAVDRYVAMTRSTERLAVLTTAPTDAGRNRAGDGRGDSITAQQAVPMRHDRPRREVSGSTPLP

SEQ ID NO: 3792 - protein, 757 aa, synthetic construct; identical to SEQ ID NO: 3791
  REGION 1..757: note = TnsF-Tn7 System Protein

SEQ ID NO: 3793 - protein, 368 aa, synthetic construct
  REGION 1..368: note = TnsF-Tn7 System Protein
MTHDGPSVSTRPVLLGDSNVAFINKPQAMWDAMLDGWVGQQASRGLARSTIDSRRAVLVRFQRFTELYPWEWTPQDLEDFTVDAGSRRRLALSTHRQNHDSIRLFCEYLTDSAYDWVALCEESFDAIPSQICLPWNSVRHRSEYEGQPGRRPLTYDEVERFFEVADSRVARLVSAGRKGALAALRDAQLFKTVYAFGLRRAEVRGLDLADLHFNAQAPQWGHYAALHVRHAKASNGGARRRRTVLLVPEMSWWVAGMQQWVEEARARFAPGELVAMWVTERRTRVSAAYIDTRFQVVRDEAALDSSLTLHSLRHSYVTHLIEHGYADRFVQEQVGHRHASTTSIYTSVSGDFKNRVLADALSRINTLE

SEQ ID NO: 3794 - protein, 110 aa, synthetic construct
  REGION 1..110: note = TnsF-Tn7 System Protein
MVRIETTWNLRRLMAERGMYQTSDLVPLLAEREIFMSREQVYRLVAHPPRRLNFDVIGAICDALECEVHDLITWRRAEQKKVVGLEPTRTGVGDLRPVPAKIRRPEQRNR

SEQ ID NO: 3795 - protein, 389 aa, synthetic construct
  REGION 1..389: note = TnsF-Tn7 System Protein
MNTLLDAGAGAAPAILKPLVDALCSAKNPLSAERWLHYPGVGDRLRAIATGDLALTHEAFSALPRSSSVTYLRELLMATGLLPQRNPELLKFDEWTTDLLSRIEASDDRQALATYIKWHHRHRILRQLDSGALRPSAWDAARQQTRTATDFLNWLRSRGSTLAECTQRDIDDWFATGPTTRLLARIFMTFAIRRRLCPSLRIPTPPKASPDAQPQAERLALLRRLFTDDTLPPINRVVGLLVLLYAQPATRIAHIKVNDVTVRDEQVFLQIAEEHLPLPEPLDRLITDLIAQRRNMGTAANPTSPWLFPGQRPGRPITVNRLRDRLRDLGITRSSRVAAFNELLREIPAPVLADLVGCNPGFAAARASTLANDWNTYAALRAARRTSQR

SEQ ID NO: 3796 - protein, 389 aa, synthetic construct; identical to SEQ ID NO: 3795
  REGION 1..389: note = TnsF-Tn7 System Protein

SEQ ID NO: 3797 - protein, 289 aa, synthetic construct
  REGION 1..289: note = TnsF-Tn7 System Protein
MRAVRGVALSTVRAYQLAVRSFLAYVCDPLYGWDAECERRFGTYPVQISHEWNSAKHVLDVEGRPQRRALTRPELQHLFDAADERVEEIRRRRRKGVLAAFRDAVMLKTAYAFGLRRRELVRLDVHDFGRNPKAAEFGDFGVCYVRFGKASHGSPPKRRSVLTVMPWSVDVLAEWVEDLWPYCRRQAAASLWPSERTERVNEARVNAVFAQLREKTGLPEELGPHCLRHSYITHLIEDGYDPLFVQQQVGHEHGSTLSVYTSVSSDYKTTVLRAALDKVIERARNEKDQ

SEQ ID NO: 3798 - protein, 109 aa, synthetic construct
  REGION 1..109: note = TnsF-Tn7 System Protein
MTKKMGYRWMLRERMAEQGLWKTTELAPLLADRGIDLSAAQIYRLVAGTPERLSLPILVALCDILSCTPNDLIVPHVETAKPRKAIGADLTDLNRIGRPRRARITEDPQ

SEQ ID NO: 3799 - protein, 350 aa, synthetic construct
  REGION 1..350: note = TnsF-Tn7 System Protein
MACTAKRRVTDTLTGPDGQIDDQLQGLWHYLVVDNTPEQTLEVIRGTEWMRILGELIAAQRPLSHEVLDKLPPGNPVSHLRVVLEHTGVIEPRDNDLDSLDAWLHTFLITVPREELQTLRTYAQWSVLPRTRRRAARHGATANTPKYVRTRIETAAHFLAWLRNNDRTLAEATQHDVETWIESGTSTRRRLRDFLKWTHARGLSAALHVHWLGREGLAEHVLGDDDRWTLLRRCLRDDNLALHLRVAGALVLLYGQIPTRIVELTVDRITTSDADTYLALRDQPVLLPPPLATLTLELANLSASRQPSARPEALAWLFPGARPGSHISAGRLATALTNKIGIYVRPGRGG

SEQ ID NO: 3800 - protein, 350 aa, synthetic construct; identical to SEQ ID NO: 3799
  REGION 1..350: note = TnsF-Tn7 System Protein

SEQ ID NO: 3801 - protein, 373 aa, synthetic construct
  REGION 1..373: note = TnsF-Tn7 System Protein
MVEGSDLAGAAHLVLVPGVTHLDPETAVFEAMLEGWALQQRTRFLKHSTIASRLQLARRVAEFVNEYPWQWQCSDVEAFIDSCRHRPVPIVVSTARLYETTLRMFLQYVTDPRYGWTAECVQRFGVAPTQLLHEWNTIVHVTDYEGDPRRRPLTYDEIQALFDAADGRVEQIRANGRKGGLAAMRDAALIKTIYAFGLRRREAWGLDLADMRHNPKVPSFGRHGAVFVRWGKSSRGSAPKRRTVLTVPEMDWIVPVLEQWRDEIRPAFGIGAHPALWVTERASRISLRRINEAFTTARDAAGLQPTLDLHCLRHSYITHLIEFDYPEKFVSTQVGHTFAATTAIYTGVSDEYRNRMLRRSLSRHSALWEGDDA

SEQ ID NO: 3802 - protein, 103 aa, synthetic construct
  REGION 1..103: note = TnsF-Tn7 System Protein
MTYQWKLRQLMATREMYATTDLVPLLAERGIHLSREQVFRLVTTVPQRLSLDTLAALCDILDVGVEELIEITAASTQVPKTVGETPVTAPPVRRTVIRRPPGS

SEQ ID NO: 3803 - protein, 367 aa, synthetic construct
  REGION 1..367: note = TnsF-Tn7 System Protein
MHKTPARRTAFRTLATATGPVTHASLDAFTDEAMAEHLRALLVAHGVLAVRDEHLARIEKWLPKVLGRLPEAGERRIVERWARWQPLRRLHRQPAHRPTTAGQACGIRQEIRAAVRLLEWLHEQDSSLTACTQDHIDAYLDTGPIERLRIRSFLHWTSRQKHTRSLTAPFYTSSLATDIVAADTRWELVHRLIHEPGIAVRDRAAGLLLLLFAQPPSRICALTRDDVLDDGQVLRLRLGTHPVEVPAPLDSLLRELLRNPVSKAHRLEPEPSRWLFPGSRTGRPMEPVSLSRRLKMLGIRSRPTRNASLLDLAAELPAYVFSRLLGFSEQTAANWMAESGGEDGPYAAHRSRTASAAQPSHDPAPPP

SEQ ID NO: 3804 - protein, 489 aa, synthetic construct
  REGION 1..489: note = TnsF-Tn7 System Protein
MARPRKPEDPQRWEVPCDRCGEHRECVVTWQGLGVCGYCYQAAKRTRGVCPCGHDGVLPGIINGQPACRKCTGIKLNVDCVECGAEEELYAQGRCWRCVLGATVDRLLTNPETGVITDELKPFATALKSMKRANSGLTWINQEHVTAFLTELARTPLVSHYVIDQLPRSRTREYVRELLVTHQILPPRDGLLHRYIDWSKDALDRLKSAEHRDIANRYIRWHHLRQMHSMESVSHGTFLRSKQTVTVTIEFLNWLTDRDISIGDLSQADLDSWQADGPSTRQFAIRFLAWAIKMKLVAADLTMTPHRRGTSPKMSFEDQQDAVDGITSNQLKLNPRDRAVAILVLVFGQQIDRVVKLTWDHVMVSDVLVTVTLGDIAIALPAPLDEPFRYLAGERDLANTAAHPATNWVFRGYVPGQHINPTHLRNRLKATFSTRAARLGTLHELTKLAPAAILADTLGYSPATIERHAVASAAIYAPYVSAIDGDTND

SEQ ID NO: 3805 - protein, 489 aa, synthetic construct; identical to SEQ ID NO: 3804
  REGION 1..489: note = TnsF-Tn7 System Protein

SEQ ID NO: 3806 - protein, 377 aa, synthetic construct
  REGION 1..377: note = TnsF-Tn7 System Protein
MQSVPGRLPEFLSNGVVGLLRPEDRVFEAMLDGWRAQMLARGLGVPFIQSSCSLVSRFQEHSNEYPWAWQPIHVDEFLADRRTGPKAVSVPTLRANAGTIRAFCYYVTDERYGWAAFCSKAFDDVPAQVVFEWNTPRHKTDDAIPADRRSFTQAELQTFFDACDDLIDQEFAKGSKRWLPLMRDSTAFKVCYAYGLRRRELSMLDYHDFGPNPHVDKYGRYGAVQVRYAKGMSGSGPRRRTVLTVPEFDWVVDLLDHWLSPQGREQFATADRSASLWPSERAGATGIRNFNRTFTTVRELTGLPTELKMHCLRHSYVTHLLEAGYDPMFVQQQVGHAYSSTTALYTSVSADFKQKTIQRMIQQRIVTRDEKDAGKDT

SEQ ID NO: 3807 - protein, 397 aa, synthetic construct
  REGION 1..397: note = TnsF-Tn7 System Protein
MLERHETARTMLTALQAGDPATVRAAFHRHRAVELLRTVLATPDLLDHEALDDLGPEYTTRAVRALLVEHGLLPARNLPLARFQAWIITTAQLIEDPGERQAFVQFATWKHLRDLRSRAEPLSGPLVTSRRHELRVVLDLLAWARDRGKTLASLDQADLDHWATTGAEKYLVASFLTWAHTNGRSQPLEITRPPRTYLLVGGLSDDQRRRVLDGVLNHDTITAGTKLAAALVLVFGFRPAQITRIRLDDIRSTGEALQVTVGKEPLLLPEPLADLATQTAADRSARRMFTPAQDHHWLYPGAQPGTPLSAAALVRRLAAVGVLVSPARTGALTSLSQQLPPPVLADLTGMHLATAVRWRSTVAASNAHYAGLLLASEESPTAVLRTVLSSASSTEPP

SEQ ID NO: 3808 - protein, 397 aa, synthetic construct; identical to SEQ ID NO: 3807
  REGION 1..397: note = TnsF-Tn7 System Protein

SEQ ID NO: 3809 - protein, 209 aa, synthetic construct
  REGION 1..209: note = TnsF-Tn7 System Protein
MSEHPGRPIAELISTVEAGVPADRLREIVAAIVVRPHSGARQLGQLHVDPGLLTSADNAMPTLLQRIIAALLEAGATSVRLPRCTGCGLERMLPERLDGHRVCSKCKKRAGTRAITCHCCRRERQLASFVGDADYCGACWRDMYGQASAIFVAAAHGLIPSLDPAVLGGLRPASRLARAPVALGPGHRRLRSGLVRSPCPGVGPLRCPL

SEQ ID NO: 3810 - protein, 110 aa, synthetic construct
  REGION 1..110: note = TnsF-Tn7 System Protein
MKSASSAASNALWLTERGTRLQARDVADRFGFYRDELGLDPALSPHCLRHSYVTHLIEDGVDPRFVQEQGGHVYQSTTGLYTAVSGDFKNKMLHDAIRAVLPTNPGGQRQ

SEQ ID NO: 3811 - protein, 118 aa, synthetic construct
  REGION 1..118: note = TnsF-Tn7 System Protein
MKVIGYEWKLRQVMAAAGMFSTTKLIPELEARGIHLSASQVYRLAAEKPERLSLHVLAALMDIFGCTANDLITRVDLGAATARTGTGTDAGSPEASADAPRASGARPKRARIVPPSDE

SEQ ID NO: 3812 - protein, 382 aa, synthetic construct
  REGION 1..382: note = TnsF-Tn7 System Protein
MDRLLANPTTGSISTELVPFADALKAMKRANSGLTWIRQKHVTQFLQELAMAPAVTHEAVDALPSSRTREFVRGLLIEHGVLPQRDLYRARYDLWSRDVLDRLTDPVNRDVVRRYIRWQHQRRMNQMDQVPQGTFLRSKQTVTVAIDLLNWLTDHGIELGELEQEHLDAWQATGPSTRLVADRFLGWAIKTRLVRPDLKIQRHRRGTSPRMSAVDQEQAVQRVVHTDELAPRDRAAAILVLVFGQQIEGVVGLTWDDVKVTKDLVTVRVGAIEIALPDPLDGPWRRLARNPGSERTAAHPNSNWVFRGYSPGRHIDASHLRNRLRQVFSTRAARLGTLHELTKLAPVAILAEALGYHPSTIERHAVDSAAAYSRYVAAVRGD

SEQ ID NO: 3813 - protein, 382 aa, synthetic construct; identical to SEQ ID NO: 3812
  REGION 1..382: note = TnsF-Tn7 System Protein

SEQ ID NO: 3814 - protein, 372 aa, synthetic construct
  REGION 1..372: note = TnsF-Tn7 System Protein
MDGSVPGFVPRLLSDPTVGLFRADERVFDAMLDGWRAQMLARGLTTSTIENRCGLVGRFQQFTGEFPWQWRPADIEDFLAERRSGEKPISLTTLRSDSNSVAMFCSYLTHPAYGWTEFCERTFGDIPSQICFDWNRPKHTTDDAVPVGRRAFTKRELQRFFDYLDDLVDREHAAGSKRWLPVYRDSIAFKLCYAYGLRRRELTMLDLHDFGPNPHVPEYSMFGAVTIRWAKGTAGSGPRRRTVLTVPEFDWVVPMLQTWTSPGRRDRFTTADRSAALWPSERRDRVTFGDSFAAARDAVGLPKDLGLHCLRHSYVTHLIEAGYDPTFVQAQVGHSYASTTSLYTSVSSDFKQKAVQQMIARRIATPEEATDG

SEQ ID NO: 3815 - protein, 385 aa, synthetic construct
  REGION 1..385: note = TnsF-Tn7 System Protein
MLLADASGAIHPGLVTLYELLLTARDPRTVVRWLRRTPIGTTLRAMATGEARISHSTLDTLPLSPRVQYLRHMLISAETLPAIDVRLNDLEILAAAVIDGLPAHHAGIISQYFRWGVLRKIRQRSASKPLTAGMFSARSSELRKIAAFLAWLDGQGVDLASLDQGTVDHFFAHHRSQVAVITFLKWAIQQQLTAPITPPRRQQARPAPSVQEDTIWHKVDELLDDESIPPGSRIIGLLVLVFAQRISDCVRLRRSAVSEDGATTSIIFGRTPLTLPDPIAGLLRRYIRELDRDRPFVRGGPDWLFPGTTPHLHVSEAIVALHLAPHKIHARRSQHARIDQLVQTVPASVVADTLGINVNTAIRHAARTNARWGDYPELRSSPPGE

SEQ ID NO: 3816 - protein, 385 aa, synthetic construct; identical to SEQ ID NO: 3815
  REGION 1..385: note = TnsF-Tn7 System Protein

SEQ ID NO: 3817 - protein, 174 aa, synthetic construct
  REGION 1..174: note = TnsF-Tn7 System Protein
MTMALMCGLSFAGKSTLAAQLAEGLPASLVSLDLINEERGLHGGQGIPLEEWAETNRIAHERGRDFLDAGHHVVVDDTGSPRFIRDEWRKIANRSGAPFLVVWVQISPELQQARVRANRQSRDRPDVTDAVLHDHRASFEPPTDEEVIVVDAQDTADPARVAALVQRLRSHRTP

SEQ ID NO: 3818 - protein, 382 aa, synthetic construct
  REGION 1..382: note = TnsF-Tn7 System Protein
MALEIEVQDAVWERWRAGEPIRVIARSVHCSREAVRRHLAKSGGIRPAQRRRAALRLSLAEREEISRGLAAGDSARTIAARLGRSDSSISREISRNGGRDQYRAAMADEHAWQLAQRPKLTKLDANEELRGVVREKLHEDWSPEQIAAWLRRAFLNDPKMRISHEAIYRSLYTATCPALPSEMSVHLRSGRRLRTSRQSRRTGHGRGRLRSMVSIHDRPARIETRVEIGHWEGDLVMGRRPSAVATLVERSTRAVRLVKLQGIKGTEVRDALIRNLRELPPWLLQSLTWDRGREMSEHESIAHELGIRVYFCDPRSPWQRGSNENTNRLLRQYLPKQADFSHLTQAELDVIAGKINGRPRRVLGWKTSQELLATAPSQSFLN

SEQ ID NO: 3819 - protein, 198 aa, synthetic construct
  REGION 1..198: note = TnsF-Tn7 System Protein
MSGRLIAIVGTSSIGKSSASARLQELLPDPYLTVGIDHFLNMFPQQWAGQPRGPGPGMWYEDSTDPDGAPRARIRYGQAGSRLLAGMQASVRAMLDCGNNIILDEMPLDETIVPQWKRTLASYRTYWVHLSADLEVVEAREAQRQQGQHVGNARGHFGISDRECYDLDLNVAAMTPVDVANSIKQASLQHFASTTTHQ

SEQ ID NO: 3820 - protein, 398 aa, synthetic construct
  REGION 1..398: note = TnsF-Tn7 System Protein
MEEVLDPLIRTTVMHQCCNKCNTWGMAQDPRGVSPLRQLRNVRALDDRRFVFEAMLSGWADQQSSRGLAERTIGSRELVIRRFEEFAGHYPWEWSPGDLEDYTTQAKSRQRPAAPSTIRGYHSIIRLFGDYLTDPRYRWTTDCEERFGTAPQQICHEWNTLAHLVDYEGRPQRRALTYDELEQLFAAADLRVETILQHGRKGALAALRDSQIFKTIYAYGLRRAEAVGLDVADLRPNGAAPSFGRFGAVDVRWGKGAHGSGPRRRSVLTIPELDWVTEGLAQWVDHARPRFTTNPAGALWLTERGTRVSLRYIDLRFAQLRDEAELPSELSVHALRHTYVTNLIEWGYAEKFVQDQVGHAYASTTAIYTSVGDDFKNRMINQALSRIYGGPNVEQPRS

SEQ ID NO: 3821 - protein, 116 aa, synthetic construct
  REGION 1..116: note = TnsF-Tn7 System Protein
MSNNPAPDAPITWNLRPMMAAAGMFQTTDLIAPLRAQGVQLSREQVFRLVTKTPERLNVEVFAALCRILDCTPNDLIEIPKVQSERPRRAAGAPETSGPAIGDLRPIHAKLHRPNE

SEQ ID NO: 3822 - protein, 386 aa, synthetic construct
  REGION 1..386: note = TnsF-Tn7 System Protein
MRHRLHEMLSVDGRMRPDLEPVFRALLQQQPVSLLAWLTRRPGRVTVLHALAAGQGPVTHDTLDQLRPTKVVENLRMHLVVGGALPPRDERLSTFERWLPGKIAQVDVPESRKVLHAYATWHLLRRLRTVSRRRRLTHGQVHGARAYVTQVIQLLNWLSSQNIPLSACSQDLIDAWLDENPARGPRVQGFLVWTSRKGHTRQLAVPLGTPAFTGQLIAQDARWSLVSRLIHDEEIPIVDKTTGLLALLFAQQPHRIAELTTDDVHVTADAVALRLGSFPAQMPPPLDELLLALHADAMAGSTAAERWLFPGRYPGRPLSRSQVMRRLHALGIRPRMARSTALVELASELPAVVVSRLLGVHQTTADTWKRIGGQDNTYAAEIAQRG

SEQ ID NO: 3823 - protein, 361 aa, synthetic construct
  REGION 1..361: note = TnsF-Tn7 System Protein
MRKGTKARELLEAIGDRTLSLTHENFDRLPNSTAKEHLRALLVHHRIMPDRGNETLVRFEQWLAAKITSLPDDGTSQLIERYAHWGHLKRIRERALDPTTNLETVIHAAKQDITEASKLLLWLREAHGLGAVDLQQIHLDEYLSTGPSTRKQIRNFARWLNHHEKPRGRQLDAPFRNAHSTPMITQVERLELVRNCLMNDQTIESTRLAGLILLLWAHPLNKIVMLRRENIYKKPEGMFLKLGSTSAVVPEGVAGMFWRQHEQTSNQNTTNTNTPWLFPGTRAGQHLHPGTLSQRLRTLGIDPLRARNATLRDLTQEVDARTLMDLLDYSPQVIALHASRSATRMADYIALKQRQRSRQEE

SEQ ID NO: 3824 - protein, 796 aa, synthetic construct
  REGION 1..796: note = TnsF-Tn7 System Protein
MSPEAASERHVRTPHIADSHEKIRVQGARVNNLKNISVEIPKRRLTVFTGVSGSGKSSLVFGTIAAESQRMINETYSAFVQGFMPTLARPDVDVLEGLTTAILVDQERIGANPRSTVGTVTDANAMLRIVFSRLAQPHIGSPQAYSFNVASISGAGAVTIEKGGEKIKERRSFSITGGMCPRCEGMGRVNDFNLEALFDGGKSLSEGAVLVPNYSMDGWYGRIFAGSGFFDMDKKLGKFTKKELNDLLHKEPTKIKVEGINLTYEGIIPKMQKSMLSKDVDALQPHIRAFVERAVVFTTCPECQGSRLAAHARNSRIDGVSIADACALQISDLAVWVRSLNEPSVAPLLGALGETLDSFVNIGLGYLSLERPSGTLSGGEAQRTKMIRHLGSSLTDVTYVFDEPTIGLHPHDIARMNELLLQLRDKGNTVLVVEHKPEAITIADHVVDLGPRAGAQGGQVVFEGTVEGLRASGTITGKHLDDRISLKTAPRAAAGTLEVRGATENNLQNVDVDIPLGVLAVITGVAGSGKSSLIHGSVSGRDGVVTVDQGAIRGSRRSNPATYTGLLEPIRKAFAKVNGVKPALFSANSEGACPTCNGAGVIYTDLGMMAGVSTVCEECEGRRFQAAVLDYHLGGRNISEVLTMSVDQAVEFFAAGEAKLPAAHTILARMADVGLGYLTLGQPLTTLSGGERQRIKLATHLGEKGGVYVLDEPTTGLHLADVQKLLGLLDRLIDSGKSVIVIEHHQAVMAHADWIIDIGPGAGHDGGTIVFEGTPAQLVASRETLTGQHLAAYVGT

SEQ ID NO: 3825 - protein, 796 aa, synthetic construct; identical to SEQ ID NO: 3824
  REGION 1..796: note = TnsF-Tn7 System Protein

SEQ ID NO: 3826 - protein, 370 aa, synthetic construct
  REGION 1..370: note = TnsF-Tn7 System Protein
MARDDENVLFLPFGVQAQDPEAFLAGVLDAWGRQQRAKDFGPSTIRSRRRVIVSLVDFSGRYPWDWTLGDADDYFSHARAVRNLSHGTVRAYQSAIKLFCDYACDPNYDWCEQSARLFGQVFAQVVTELNRVTHSQPTEARPAKRPFSQRELQDLFDLADLEVERILNSGRKGALSAWRDAIAFKTAYGWGLRSNELRHLQVPDFSRNGKAPYLGDHGVLRVRWGKPHRGSAKKVRSVLTVWQWSAEIAADWITHGLPHYGNPVTDIFPTSTGRIVGESHLIGRLHDLVNELGFPPGLDLHSFRRSYATHLITAESFDVTFVQLQLGHEHAATTSIYSLPSPDYQRLALERVHERTIKAALELPSERNHP

SEQ ID NO: 3827 - protein, 106 aa, synthetic construct
  REGION 1..106: note = TnsF-Tn7 System Protein
MSRREITYSWQVREVMARRGVHTAKELAGLLHERGITLTSNAIWRIVTQEPERISFQVLVALCDALDVTPNDLITYTASDARTLRDRRKAAGDDLPDLHTYRPIRA

SEQ ID NO: 3828 - protein, 478 aa, synthetic construct
  REGION 1..478: note = TnsF-Tn7 System Protein
MPSTAHTCTSCGQDAPGRYFLLGGQICNTCYSSLRRNPATCPSCSEIRVLAFINDHGDVGCAECAGHPRRFACRTCGSERFLTGTHCGQCRLDQRLQELLGSADSIPPPLANLRGYLTTAPMDPRSIVRWLRREEIDRTLRQMGTGNLPIAHATIDQLPPGPRTRYFRRLLIEAGTLPQIPVLLHELNIFVDTTAAQLPREHAPILRRFHRWVVLPHLHRRYRDNGSDITIGVFTNQRSATLARARFLSWLSEQGTTLADLNQSTLDYYLAHVNARVTVNQFVGWATRSRLADELETHPQPTRVAPSTYSENELWVHTHQLLEANAVELAVRIIGLFALIYAQPLDHSVRLRRNDVNVRSHRLTVAFGSTPVELAEPIADLLRQYLGAPARRGFATGTSRWLFEGIMPGEHISPAYARLRLSENGIRIRPARTTRLDLLAAQLPSSIVADTLGVTLHTAEQRRGRSGGIWSSYPALRN

SEQ ID NO: 3829 - protein, 478 aa, synthetic construct; identical to SEQ ID NO: 3828
  REGION 1..478: note = TnsF-Tn7 System Protein

SEQ ID NO: 3830 - protein, 371 aa, synthetic construct
  REGION 1..371: note = TnsF-Tn7 System Protein
MSFESGNPPLLIALAANVVALDEERFVFDAMMARWGDQQTSRGLQPTTIERRQQFIRRFQLFCEDYPWRWEPRDLEDFTTRARSGAAPLTRATLRSYQLTIRLFCDFISDIRYGWPAECANRFGAVPQQICHDWNTIAHLLDFEARPGRRALTTDELQRFFDAADDRVDTIVRTRRKGALNALRDSQIFKTIYAFGLRRAEAVGLDIADLRSNPAAPRYGSFGAVYVRHGKAARGTGPKRRTVLTVPEIGWVVDGLKQWVDLARPRLVSNWQTDVLWPTERNTRVSTRYLNMRFADLRDQVGLPSELTPHALRHTYVTNLIEWGYSEKFVQDQVGHAYASTTAIYTSVGDDFKNRALARALSQIYGDNDGN

SEQ ID NO: 3831 - protein, 116 aa, synthetic construct
  REGION 1..116: note = TnsF-Tn7 System Protein
MATDQNSPVEWNLRTLMADAGMFQTTDLIQPLREHGVQLSREQVFRLVTRTPERLNVEVLAALCKIFDCGPSELITVKPQRITPAADAAGQGRRDISIGDLRPVRARLHRPDPPRS

SEQ ID NO: 3832 - protein, 241 aa, synthetic construct
  REGION 1..241: note = TnsF-Tn7 System Protein
MTPSARPGKPAETPCGQADIDTYLAGQPPSRYRVRDFLQWAAATGHTDPVTIAAPGRNPGPATDHDQRWAQIARLLHDDTIDLTDRVAGALLLLYGQHLARIVAITHDQIKTQGPQVFLRLGTDDLHIPEPLAGLIGTLARDGRPYTGVGTPPTTRWLFPGLQPGRPLTAARLGERLRKLGIRAQPGRRAALTHLAAQLPAAVIADLLGIHPTTAVHWVHDAGGDWNRYAAQLTQNTSHQP

SEQ ID NO: 3833 - protein, 283 aa, synthetic construct
  REGION 1..283: note = TnsF-Tn7 System Protein
MSWEALAWAKDSDIAHPVAKFILVLLANKADENFSCYPSIRTLMAESGAGRSTILRALSYLETCGLMSRRPQFHDSGARRSTRYYLNHPRAPHVLPGPDPGSPRPAAGRGPSRIETGTVSKRHPPRVPQRDPLNPSTESPSEPGDAAVLVLESVTRAWKLGTHDARSLRPAIESALARGWLAADLTDLLIRNPNGARDPVRVLARRLTDLGQPPDPPITNVPWCGECEDARSRTITVTELDGTEAAKFCPQCSPQVHRIRSSEEQSVQHCGKVVNYLGEQRVQ

SEQ ID NO: 3834 - protein, 340 aa, synthetic construct
  REGION 1..340: note = TnsF-Tn7 System Protein
MNRRIVTLMVALVPIVVFGVLLAAVTVPFVSLGPGPTFDTLGEVDGKQVVQIQGAVTHPTTGHLNMTTVSQRDDLSLGEALTLWLSGQEQLVPRDVVYPPGKSREEVDKANNADFKQSEDSAEYAALGYLKYPSAVTVATVSDPGPSAGKLKSGDAIDAVDGVPVADVEAFTGFLKHTKPGQVLTIDFRRKNEPAGVAQITLGANKDRDYGFMGVAVLDAPWAPFEVTFNLANIGGPSAGLMFSLAVVDKLTTGELAGSKFIAGTGTISADGKVGQIGGITHKMAAAHAAGATVFLVPAKNCYEASSDNGTGMRLVKVDTLSEAVDALHKITSGGQPPTC

SEQ ID NO: 3835 - protein, 328 aa, synthetic construct
  REGION 1..328: note = TnsF-Tn7 System Protein
MTVRGAKQLLHHETWLHRQLAELDGQPHARLLRQFATWSQLPRLRRRAAARPLTTHIRRAAAEQFTQARLFLAWVDERGRTPEAVTQADVDDWHATHLDHAKRSLRAFLTWAMSSGQLPRRDLPHLRIPRAEPLTQRARLDLVKAVLTSVTGSAATRAAACLMLLYAQPASRIVRLTIDDITHDGDEVLLRLGDPPVPVPKPFAALLLAAAAQRSNMNTATNPDSRWLFPGRRAGQPIHPGSLLDHIRALGIPNQAARTAALRQLVLQAPAPVVAQALGYHPVTTALLHRRSPLSSGRRSVMIEGCVDVVAVRRFRCRSSRGSGSRRR

SEQ ID NO: 3836 - protein, 225 aa, synthetic construct
  REGION 1..225: note = TnsF-Tn7 System Protein
MSEFAGFRFPPEVIVLAVRWYLRFALSYRDVEELLAERGLEVDHVTVYRWVQRFVPLLAEAARPCRHRPDDRWFVDETYVKVAGRWTYLYRAVDQHGQVIDVFASERRDHTAARRFFTRALSHGPRPVEVTTDKAAVYPRVLDELLPKACHVDAARENNRIEADHGRLKARLRPRRGLKRLRSVQTVSAGHALIQNIRRGHYELAIDAHPPLRLAAAFTELAAAV

SEQ ID NO: 3837 - protein, 236 aa, synthetic construct
  REGION 1..236: note = TnsF-Tn7 System Protein
MRRRRVRPPAPTSEFVGFRFLPEVIVLAVRWYLRFALSYRDVEELLAERGLKVDHVTVYRWVQRFTPLLVDAARPCWHRPGDRWFVDETYVKVAGRWTYLYRAVDQHGQVIDVLASTRRDQAAARKFFTAALTHGRRPVEITTGKAPVHPRVLDELLPEACHVDAARENNRIEADHSRLKARLRPMRGLKRLRSVQRISAGHALVQNIRRGHDELAIDTDPHLRLAAAFTELTLTI

SEQ ID NO: 3838 - protein, 328 aa, synthetic construct; identical to SEQ ID NO: 3835
  REGION 1..328: note = TnsF-Tn7 System Protein

SEQ ID NO: 3839 - protein, 305 aa, synthetic construct
  REGION 1..305: note = TnsF-Tn7 System Protein
MHDRRRSHLRLPQPRRVEHANLVRPFLHWHLLRRARRRAGKRPFPTTVGRDLRHQVLVTLDLLTWIDAQETTLEDLHQDDLDLWLDEEHTQRRNRVRYFLGWTADRGLSRRLTVPAIPRQEPADLLDDDERWHLLQRCLIDETLPIEARAAGALNILFAFQAQRIRHLTADQLTEKGDDTYLTAGRHPILLPPRLGVLLRGLASRPPAPLMIPHGPNTPRWLFPGRVPGQPIDGHSLTNLLNRHGISTRPARNGALAALASDLPAAILADLLGLHVNTAVRWVTYARRDWTDYLAARATEPQRDQ

SEQ ID NO: 3840 - protein, 783 aa, synthetic construct
  REGION 1..783: note = TnsF-Tn7 System Protein
MTEETGSVVRRLRLRAGLTQEGLAERSGVSVRTIRRIETGGQRNPQFASLVQLADALELSADDRHDFLETLGGVATPSVTTRSMPRQLSAAPRGFAGRGRELAALEGAAAGDGRNAVITVIAGAGGIGKTWLALRWAHDHLDRFPDGQLFVDLRGFSPDGDPVDPLAVVRGFLAVLGVDPAEMTGGLDELAALYRSRVAGMRMLVVLDNAATAEQVTPLLPGTAECTVLITSRQVLSGLLHRYGAHHVRLEILDDDDAYTLLAHRLGPDRLMAEPDATAALIRSCGRYPLALSLVASRAQTNSDLPLGEFVTELREGGLDALDDADPTASLPEVLSWSLRALTVEQRRVFALLGIAPGADIALRAVTHLADLPRALARRVLRQLEDASLLTRHPRDRYLLHDLVRGYAAGAAEREIPQEARDAAMRRVLDFYLHTAHTAGRLLEPNLPLLQHNLPTAAAEAHPPLPDAATAMDWLKAEHRNLMAAQHTATVLGWHHTVWPLAAALSTFHLRSGDHQHELTAWRAALDAANQLDDPAVRTGVHWHLGRVYNQMKQHKEAVHHFHVALDLAEDDGNLTDQGHVHLLLSREWNGWGDSRRGLQHATKALALFHTIGPPLLEASAHITVCWCHLMLEDYDTAATHCRQALHLIENDHPELEGVAHDRLGYIAHHTGHHQQAIEHYQRALTLFRGLGHSYETANTLDNLGHPHTALRQHDQARAAWQQAIQLYQGQHRAPDVQRVQQQLDTLRPLAGEPASQPPALSAAPPPPLPANGHSRDRSYWRC

SEQ ID NO: 3841 - protein, 783 aa, synthetic construct; identical to SEQ ID NO: 3840
  REGION 1..783: note = TnsF-Tn7 System Protein

SEQ ID NO: 3842 - protein, 435 aa, synthetic construct
  REGION 1..435: note = TnsF-Tn7 System Protein
MIAHDKDDRLVCADCAGNAPLFTCNECGGERGARRTLCSGCDLVKQVEELFSEASDSDARAALEPLRHYLLSYKHDADRLLRWMSRSTSIAILRRILDGEIPISQRALEMPEHPHAALRVRALLEVTGCLTEERDPWASYEQWADQLIAICPKANREQFTIFTRWIVPATARVQIRRRGITDSTLSRAREMSRAALEFLQMLEARNLSLQSAPQSIFDEFAASRRSRAIAIRPFIRWAKQTGAMRRISAPVRPKSAPSLAYSEATHHSWVSRFLEDDQLNEGTRLVGLMVGLYAAPITRLVKLQDKNIVYRGETATLSLGNAPLHLAPRVTELLGMQLAQRAISPEGWLFPSPALPGRHIDPSTLTKRLRDLGCETILLRGAAMINLTATVPLGPLADLTGRSLSATGRWIKSSGSTYLVYPAIRDPSRPGVSSQ

SEQ ID NO: 3843 - protein, 850 aa, synthetic construct
  REGION 1..850: note = TnsF-Tn7 System Protein
MRFTLKDYQADAVGDTLRELTSARDFYRSASRRVSSVALTATTGAGKTVMAAAVIESLFWGSDDFSIAPDPGAVVLWFSDDPALNQQTKHRLEQASDRLRNRLVTVEHPFRYQKLQSGNVYFLNTSKLSKNSLLVRGRDDSNTLPGFDSHADTVPFTFWDTLRNTIEDNDLTLYMVLDEAHRGMGKRPSETPTIVKRLINGHNDVPPVPIVWGISATVQRFEAAMSEAEVQSNRVHLATVQVDPVRIQESGLLKDDIVLDFPAETGDFNTVLLRRGVRKVKGISAAWTAYANDQNEEPVRPLMVLQVPNKPSPTEVASAIDVIRDEWPELEADAIAHVFGEHTAQTFGSHSVPYISPERVQDASYVRVLLAKDAISTGWDCPRAEVMVSFRPARDETHITQLLGRMIRTPLARRIEGDDLLNSVECILPKFNKATASLVLERIMGNDLTTGGGTGQRVLVDPQVMTPNQAVPDEVWELFQALPAETLPRKHANPIKRLTSLAHALAADRLLADAGKLAHERLHGVLNGLSAQYANDLTKALKDVQTVAGGTVRGQARHGLRQDESWTEYADDRAIQDAYRTGARSITPDIARTYVEHLAADAEDEDAYRDANVRVAALAMLPQTRPALDTEADRIAHEWLGKYRVAIKDLSESRQSLYAEITAMSTDPQLISMALPKNRQEETKRVTGDSEQLLERRALHLLADDEGMFPVGKLNPDEIEVLDAEMSRGGALAWYRNPTGGRDSMSIAYQDRHGEWRTLRPDFLFFANGEDGVRASIVDPHGHWLPDAAWKLHGMARFAEAYGDQFHRIEAISRIDGKLRVLDLKLADVRAKVLNESDARFAYDRAAVDY

SEQ ID NO: 3844 - protein, 382 aa, synthetic construct
  REGION 1..382: note = TnsF-Tn7 System Protein
MQEKKSALEQHIAVFGESGSGKTVLVSSFYGAAQEASFLKQSLYRVVAEDIGQGARLNRNYLGMRDEARAPDLTRFAATSYAFSIKLKDPPNQKASKAQPFHALRLVWHDYPGDWFEQGASGEEARRRVDTFRSLLGSDVALLLVDGQRLLDHAGDEERYLKSLFSNYANGLLALKDDLLEEGTPLAQFPRIWIVALSKADLLPHMDVFKFRDLLDLNAADDLDELRKVLAGFVQNPSAMSVAEDFLLLSSAKFEPNKIEVDKRVGIDLVLPVAALLPLERHAKWARLGQLPTKVAQSIISGGSKLLAAALLGKQNKGKLGAVLAMLSPDVIDEAAQMAGDKLRELNAQALAKHNFVTATLTQFQMDLDKGEEDDVLLRSLT

SEQ ID NO: 3845 - protein, 382 aa, synthetic construct; identical to SEQ ID NO: 3844
  REGION 1..382: note = TnsF-Tn7 System Protein

SEQ ID NO: 3846 - protein, 287 aa, synthetic construct
  REGION 1..287: note = TnsF-Tn7 System Protein
MVQELAADGVPVAVACRFLRVSTSGYYEWASRPPSPRTIADRAPPATIRRVHRDSRGTYGAPRVLAELRLGLGVHVGKKRVARVMRLDGLTGVSHRRKRRGWKPDTATHEDLVKRQFRAHEPNRLWFCDITQHRAKDGWVYCAAVIDAFSRRVVGWSISDRITAEIVVDALEMARWRRRPEPGTVVHADRGAQHTSWLFGHRLRQAGLLGSMGRVASSVDNALIESFWSTMQRELLDRSTWTSRTELSSAIFEWIEGFYNPTRPHTALGNLSPVEFERLHNPAATAA

SEQ ID NO: 3847 - protein, 224 aa, synthetic construct
  REGION 1..224: note = TnsF-Tn7 System Protein
MDNATRCAKQAITEAGKFLTWLLTEHATTIDDLTQGHLDTYLSEGTTTRTAIRNFIEWRARAGIAPRFKVPYGVARSTPLASTHQHLDLIKHVVEADHVLLSTRIAALLLMLFGTPLDRICRLTIDDVVSTPTQTTIALGEVPAPIPPALLPLGIDITAARNAALDDLTKEIDAASLADLLGHSTQVMNIHAARAAVPMATYPAINCPTTRSRKLNVKAARVHR

SEQ ID NO: 3848 - protein, 224 aa, synthetic construct; identical to SEQ ID NO: 3847
  REGION 1..224: note = TnsF-Tn7 System Protein

SEQ ID NO: 3849 - protein, 263 aa, synthetic construct
  REGION 1..263: note = TnsF-Tn7 System Protein
MNAIRNKLKANKANLTYTKDLFKEFCFWLAEYRDPHFSSINLYRFLEHFTLIDKLYINQKKFPSYRDIIFEYIKQNKTYSNILFKFLLGKGLIIQNYLDKKDYQNIKTINKYINKHKDCSSELSSVFLDYYHYLLNKFKSITLSSIKLALTPANKLIETHIFFNLKEYNEKAISSFLLIYPGYKASITEFINYLFERKLVSHKMSKLPKALITKTTKSKTYLRIQLISLLRKDLLSSKQKLQLIILCLAYFHKIDLPKYSYIT

SEQ ID NO: 3850 - protein, 350 aa, synthetic construct
  REGION 1..350: note = TnsF-Tn7 System Protein
MITGYYLSLEPPSEASVALCLTNSILPKDKMLLEHDINAEWPVWGLMNTIHVDNGADFRSDSLRKSCLSYGINIEFRPVGRPNFGGHIERLIGTIVKKVHSLPGTTFSNIAERANYDSDKNACMTFAEFEKWLLLFITKVYHQKQHSSIDMTPIEKWEKGIFGDDQNPGCGYPMKPSDSETLLIDFLPIFNRTIQKNGVNIDGLNYYDNCLRPWINHINRNTKQKTKFILRRDPRNISYIWFYEPQLKYYFKIPLADQSIPPLSLFEYYAIKSDLKKKRTSITPANILMALEEMQHHVKSSISKSKKARRTIQRKTNRDKQLSSPKTLKITTENSNNENDFWDDNVESFD

SEQ ID NO: 3851 - protein, 265 aa, synthetic construct
  REGION 1..265: note = TnsF-Tn7 System Protein
MLFISTNSWIIDIFYGRLSLILGIVSNKIIALYRSILALILGIDSGSNPMPGEISLAHNGVLFLDELPEFDRKVLEVLREPFETGVVNISRAKCQVEYPANFQLIAAMNPCPCGYLGSQYKECSDSIQSIKRYQSKLSGPLLDRIDLQVEVLELAKEDLTNQELRGEKSSIIRERVKKARDIQITRQGKINSMLTSKELDEVCDLNEESKKMLALAIEKLGLSARGYYKILKVARTIADLSGCKKIEKLAIQEAIGYRKMDKFFK

SEQ ID NO: 3852 - protein, 348 aa, synthetic construct
  REGION 1..348: note = TnsF-Tn7 System Protein
MDLEEEIHRWPVVLSIKDNEILSSWLIRNSIANGSDPISFTGAIWNNWRGWSLDIDKSVSLSQILHLSKISGVDYKKLYNSTLKSFIPDSRHGYTPWIIPLGSRNRVKNNGFLYCNECIKDNDFYIRKSWRLAWSTACSKHKILLSNTCPICHFPFAPHLIRYYNPDIAKCQYCNGSLIGSKVYKINDDTLKLQEHLNNTEAPYLLETNSHDEQLEALRIIITLIQRAFNRPKAFNKLLKYFSISQSVVLTPTHFERKSIKERHVIFCALTKLAYSSLDDLILILRNSNITRTMFIQQITNSPSIKYISQLLDHSSKSRVSTSRSKSLLLPTPKHIVNQMMNEILRIL

SEQ ID NO: 3853 - protein, 298 aa, synthetic construct
  REGION 1..298: note = TnsF-Tn7 System Protein
MKYTHLNEETKSIVELDLDTRIEYLYQPIWINYPKTIDVIKILNSLLKRPKQPRMQNLLLIGESNIGKTSLINYFHSIHPNHTSEDEDGMSKVNKTLVIAQSPATADEKGLYVSILDTFWTPYRVTDSTVKLRYQVIHLMRLCNVKMLILDEIHNLLSGTASKQRTVMNAIKNLGNELLIPIIGVGTKDAALILHSDPQHASRFDIVNLPKWDLDKNFRSLLKSFEMRLPLKEASNLASKEKATLLYTISEGNLGDLHKLLIECCITTLETKSESISTDIIKQHKWVKKTHGLRRRNT

SEQ ID NO: 3854 - protein, 298 aa, synthetic construct; identical to SEQ ID NO: 3853
  REGION 1..298: note = TnsF-Tn7 System Protein

SEQ ID NO: 3855 - protein, 271 aa, synthetic construct
  REGION 1..271: note = TnsF-Tn7 System Protein
MAVTAFLVWLDENGAELDALEQATLDRWLDDVTSDQRSATGDFLRWAGRRRLAPRQLAVTYPEAREPTIVLTDDERWAELRRCLTDRTIPVDVATAGAMLLLYGLPLIRIAELTKSNLNSDPRTGSVDGFRQTAGGHLIEVPPRLGRMLAQLPADVASRGTPLIESRAGGPEWLFPGRGAGGHVTYTGLAERLRRHGISVRQSRNAALIGLAADLPAPVLHDLFGLSIAASVRWARRVGRDWTGYVGIVKKSQSQRGGPAVRSPFNASGGR

SEQ ID NO: 3856 - protein, 332 aa, synthetic construct
  REGION 1..332: note = TnsF-Tn7 System Protein
MSRPDDLAVSRHRDLVRELSRPGGPLAADGPNATVNNPAWFRTPNQPRGARGELHDRLVDAHRERFADVLADKQAIVLAGPPGAGKSTVQRAILGDRAGEWLVVDADEFKHALLRTALEDGSYRNFLVPDRVRELEADGERFAPLELASLVHEESSLLARQLRAEAIADGLNIVVDTVLSSERAALSLGADLEAAGYRVRVVDVETTYEISAARVEQRWRNVTREFLADERATGLGGRWVPSEYTRALFPPELAGTSVCEGVARTLAEQCPAVSRLEVYRVVDPTQAPYLEVALERGARRGALVDASAARAAAIADVSRARPGRRSDPAVER

SEQ ID NO: 3857 - protein, 332 aa, synthetic construct; identical to SEQ ID NO: 3856
  REGION 1..332: note = TnsF-Tn7 System Protein

SEQ ID NO: 3858 - protein, 251 aa, synthetic construct
  REGION 1..251: note = TnsF-Tn7 System Protein
MIEFAHQHDRRLDEVDQHLVDRWQERQPQAALCRDFLSWASAQRRCRSGLHATPKPHTRSSLRLRDDERFELSRRLLHDDNIDRGDRFAGLLILLFAQPASRIVRLRTDAITQRVDNQAVYLSLGSEPARLPAPLDQLALDLVVNRHRGRAALARVTDHDWLFPGVRAGTPMTSGHLSGRLKGLGVPPQAARQTTLMDLAGQLPAAVLSALLGIDVRTAQGWAIEAGHRSAYGAVVATRRVSERPAAEEMS

SEQ ID NO: 3859 - protein, 251 aa, synthetic construct; identical to SEQ ID NO: 3858
  REGION 1..251: note = TnsF-Tn7 System Protein

SEQ ID NO: 3860 - protein, 340 aa, synthetic construct
  REGION 1..340: note = TnsF-Tn7 System Protein
MFRGWAQQMSGGRRMAHRTIRARLGVVRRFSAFTGEYPWQWSAAHMDEWMAELVGAQQKKKSTLRNYQGAVRDFCTYLTSPHYGWADECETRFGTHPVQICHEWNTAGHLVDYEGDPARRPLSRDELQRLFDYADDRVERAVRLGRKGALAAYRDATVFKVVYGWGLRAREVSRLDVTDCYRNPSAPELGKFGQVHVRWGKASRGSPPKRRMVCSVMPWAVEALEDYVVNIRPRFTDHGDGALFLTERGGRLQPREIDARFAEYRDALGLPRALVPHCLRHSYVTHLIEDGVDPKFVQEQVGHRFASTTAIYTAVSGDFMNTMMQHALERAVTADEEWTG

SEQ ID NO: 3861 - protein, 284 aa, synthetic construct
  REGION 1..284: note = TnsF-Tn7 System Protein
MADPDAVISEAVRRAEPDLPESTCAGALTEVASSLATRRRIAQALFDDPELLTSGAPQGSPALDRLIAALQRRGSSRVVLPRCGRCDRQRRLTSRDGSIRVCGSCDGRRRKTNQRCSVCGQQRHTESTTWDGNPVCATCDRLAHNVDHLEHLVVHIRQISPAAEPNDVRRAVRSVLPSTRSQRRVADELSAHPQRLTGEAAHATAPTWSLLGAVVEAGISGFAIPQCPFCNRTVALTKVREEVRCCRRCYERHRKEVCVGCGADRPVTSRSLGGEPMCQVCHNR

SEQ ID NO: 3862 - protein, 111 aa, synthetic construct
  REGION 1..111: note = TnsF-Tn7 System Protein
MSSGNLDYTWHLRTLMAARGMFSTSDLRAPLAQRGVELSTSQVYRLVVERPERISIKTLVALMDILDCRMEELIEPVTSVRERRQRAAGGSDTGSVGDFRPKRARINRTDH

SEQ ID NO: 3863 - protein, 259 aa, synthetic construct
  REGION 1..259: note = TnsF-Tn7 System Protein
MLTERATALLTTADGTVNRALEPVLSALHAIDRPKSTLSWLQQSHGADLLRRRAIGDLAISHDALDALPRTRALDYLRDFLTALGGLPPQHVELERLTPWLRSILADLPAADARVVHPYAEWHVLRRTQARADRGQLTAAGARNGRALIRTAGHFLGWLTEHGTTLTTARQSNLDEYLVEHPGRVRFLDGFLTWAHDRRLIADLRTPVSSAASPMSRSPTIIAGRSSRNFSTTTPCPSIPVSRACSSCSSDSPSHESAA

SEQ ID NO: 3864 - protein, 259 aa, synthetic construct; identical to SEQ ID NO: 3863
  REGION 1..259: note = TnsF-Tn7 System Protein

SEQ ID NO: 3865 - protein, 895 aa, synthetic construct
  REGION 1..895: note = TnsF-Tn7 System Protein
MGTAEVGADVSATATEDDAGLVRILRVVAVVDPALDTGVVRAVVGRVVATRSARLRVARELEAQPGLLTSGRPGGCIATHQLVVALAAADSTSVRAPHCTLCRRVTDLPVGLDGGGRACSACHDRLLAQHCSGCGEARRVGWRRADGVRVCLPCHNRQRAIHAKVGCCPACGSTCLLSRTRTDGIRICRACDRRELAEWTRGWLAHFRRDRGSRVPGVAQANDKTRTALILTAVTAADPALPKQAARDALARVAPTPQARGWLARDLTRHPDVLSSGRPEGSGAMQRLISELLAAGSTGVRAPHCTLCRRIRPLPVSLSGGGRVCGPCRDRLTATLCPGCGHRRRAAVRSPDGATLCTVCARRDPSRWEPCVRCGRRRPVVRRTAAGPYCGPCRPEPTDLPCTECGRDDVTRRPHAGRVLCRRCAVAPARICDVCGLTRLRVKPDPGCPRCASHTTRSCPVCGDTWFAYGGITCYRCRLQQRLAHLTEGADPGRVEQLQPFLRGLERTDDPRRGLDWLYRSRTAQRLLDDLLHARQPVQHATLDAVNVGRQKRSTSVEHLRTLLVASTVLPKRDEPMHRLEHDIDQLLADSDPADRTVLQQWALWHVLPRARRRVETGQPSGSVLARARSTIITMCRLAAWLRQHDSSLAALAQAPLDEWAADHLDSVAELGSFLRWAARRGHVPRGLRPPEQRPRTVRLHSSQDELYAAARRCLTDQSIPPGHRLAAGLVILYGQPLTRICRLRTSDLHLDPDGTVTLRLGRTPVVLVPPLADAARSLVQTPAHGAARTGIGTGFATKTDWLFPGLPLTRHLGPTALAERIHPLLPGNLRGHRNTALLTLARDVPPVVLADLLGLHPGTVERWRALAGGNLAFYTAARLRNTARPMLPPAASPE

SEQ ID NO: 3866 - protein, 895 aa, synthetic construct; identical to SEQ ID NO: 3865
  REGION 1..895: note = TnsF-Tn7 System Protein

SEQ ID NO: 3867 - protein, 354 aa, synthetic construct
  REGION 1..354: note = TnsF-Tn7 System Protein
MALVPSSVRHLHPEEVVWEAMMTGWAAQMRSRALSVSTVEPRLSGVRRFMTFSGEYPWRWSPDDVDAWSAELLGRRVARSTLRGYQAGLRLFCDYLVDARYGWGERCLELFGTHPVQVCHEWNTMRHVVDVEARPAVRPLTREEVQRLFDHADDQVEAVRRLGRKGWQAAWRDAALFKVIYGFGLRRREAVMLDTVDFHRNAVAPEFGAFAICQVRYGKAMRGSPPRRRSVLGAWPWTTTVLAEYVEQIRPLYATARGPALWPTERGGRVSVDYVTRRFAEYRDAAGLPAELHPHCLRHSYVTHLIEDGWDPTFVQHQVGHIWGSTTALYSGVSGDFKNQTLRATLDRLTGGGS

SEQ ID NO: 3868 - protein, 441 aa, synthetic construct
  REGION 1..441: note = TnsF-Tn7 System Protein
MTSDQAPVLWPLLGTQAPPATGALMGWDLASGGLFHADPTGWVLDPHIPVANPNVFVFGKPGRGKSATIKALVLRLLDLGHRTLVLGDPKDEYAPLCRALDVEPVELGPGLPARLNPYDTLAHRPENHTDVDALLGRWVRLTAGLVGAARRSGGRAPVTPTDTTVIAHALRDLTGTDRAATRLAPVTVPALWQRLAQPTQQLVDACCYADARHFLDETRLLRDSLGQLVTGTLAGLFDAPSTVHLDPDTPIQSLSLARLSAAGDDAVGIALLCLNAWAAGTTPAAEAAGGRARLVVRDEAWKQLRLGVDAVAAFDADLRLSRSTGDIQIAVAHKPSDLLTAGDTGSQAAEIARDLLHLTDIRILHGQDPATADDLDHLLGLGPIARDAVTGWAMHGTGRALWCLGPQLHRVQTVLHPLEERLYDTNHQLRQNLQRNDRTYG

SEQ ID NO: 3869 - protein, 441 aa, synthetic construct; identical to SEQ ID NO: 3868
  REGION 1..441: note = TnsF-Tn7 System Protein

SEQ ID NO: 3870 - protein, 184 aa, synthetic construct
  REGION 1..184: note = TnsF-Tn7 System Protein
MTGGEGVEVLVLHGSPGSGKTTLSRSVSEILRRADVAHAVIDLDDLDRVYPHRGRAFVRDNLRGVWPNYTAKRPLKVIIPSLIANEQERDDLRAAVPAARFLVCELTAPEAVLRHRVTEREAAGGEYWQTRLLNFVDMYNRRTDLTQIRDFLVATNARSTEEAAKEIIDRAGWTLDSHSSSSQL

SEQ ID NO: 3871 - protein, 184 aa, synthetic construct; identical to SEQ ID NO: 3870
  REGION 1..184: note = TnsF-Tn7 System Protein

SEQ ID NO: 3872 - protein, 103 aa, synthetic construct
  REGION 1..103: note = TnsF-Tn7 System Protein
MAAHGLFSTTDLAPLLVERGVELSAAQVYRLVTAPPERLNMQVLAAVCDALGCTPNDLIEPTADDTTLTAPRRRRGQAAEDPAAAADEAPPQRPTRVRVVPPA

SEQ ID NO: 3873 - protein, 319 aa, synthetic construct
  REGION 1..319: note = TnsF-Tn7 System Protein
MLETQPARQLHTEFIRWGNETHRASKLAVNASHYLEFIIRIDIALQRGHSLGQELLLQTFSTEELRRMGLLSQFLAEQGIFQIDAIARRQRSDHNLIQEKLQASAEQNWGNDVRGFYDSLEARPKQLKLRSRKAYLHAAISLLAYAKVPRAAQLTQISVNGLIRKKPGLRASLAPFLTHLTQLHGMNLKVPTKKVALPPSLLPQARVVRAWMDALAGGISEPARLALTAALLAKLLNADLEKVLQLRHMDVSWPAGDSIRLEGRWLQLPNAVWSMVRALQSPQHAKGADLDPWLFPGRTFTDCLSTAAVAYHLRKHVTA

SEQ ID NO: 3874 - protein, 332 aa, synthetic construct
  REGION 1..332: note = TnsF-Tn7 System Protein
MSKLSAGPTSAGATTVRSVTMLPMPNETLGSYLTRWAWACGEEPASLSHRLGLGYFVWRQDLDRSLSQTMLCTIAQAVGVEVSVIQDMTYCAWLALAKVPVQRSGFQPWLTPVGLYHRRRLRFGQLFCPLCLKEDTHRHVHLEWRIASSWICTRHKVCLMDCCPNCGACFAPYRNDSLMLGRCERCAFPLYTAHPSSCSTHQVELQEYVNAIWHQAAEGNPLPLAWTYSEIKRVAKSSPEFIYAGEPWSFWRVLQRGQLLEIVLASEVLRKNFAACQSNFQRLYTRESARTRVRPRTCWVPPEDPQERAKKIMQIALRLHPKRSMASRVRKK

SEQ ID NO: 3875 - protein, 235 aa, synthetic construct
  REGION 1..235: note = TnsF-Tn7 System Protein
MEITLISVTEKEGGVRPIPMNYRSVTGRVEIPDEPTVGFESTLERDLALLLDFDMTVKRVISQPLRIEFRVGLGRKRAYTPDLLATFHPSISGETPSPILYEAKYADELRERASDLEPGFCAARMLCEQRGWSFRVVDERHIRTTYLQNVQKLRHFRTYPDDGRSAQMLTDTLRELGTSTPSELLAATFMERTNRAQAVGAMWRLVCEQVIGVNLMSAITMKSEIWLTEPSIYGE

SEQ ID NO: 3876 - protein, 642 aa, synthetic construct
  REGION 1..642: note = TnsF-Tn7 System Protein
MANDSHAAGFAVCPGAPVGFNQRLHIVRRVLASDRVIVEDPTSGHSEVAFLYQLTSVTKLPSLEVPTDELVPAHPELLSFAEHEIAQAEERLAIIAPLLAMHQRKRRDTEARAKEVGVSVVTLYKWIKNFNGSGLVGLIDSKRGAPSITKLNDRVEQIIRDTIDKIYLSSQQLGPIEVHHDVKERCELEKLPVPHINTVRNRVAMLPQNLTKRRRGHPDLADKNFPTPGEFPAPFAPLGPVQIDHVRLDITVVFSDTRQPWGRPWLTLIIDVMTRVIVGFYLSMRAPSSVAAGMALVMGMLPKNDYLASLGVPGHWPVHGKILKVVCDNAKEFRGNALKFGCKENLIDMDLRPVKTPRYGAHIERMIGNVNAMLRKKPGTTFSSPAQRGTYNSRKKSAYTLHELEIEVADWIVNHYHVSKHSFLKMPPITAWERAVFGDDHQIAAGLPIQISDPEKLKLDFLPMDTRVVSPTGVRMNKADYYHEALNRWINAPDPDHPSEKRQFVCKYHPSRKRELWFLDPELKQYIKLDRYPFHVPVEGEEDSFVGVDEYMAAEARKHKEGEQLEDSEAKAAYRRRSADRQANAVAETKRVRRKSKGAPRSQGQDRSVIESQMQPERVQEGFSSNPFLAFAGKKITPFEGA

SEQ ID NO: 3877 - protein, 230 aa, synthetic construct
  REGION 1..230: note = TnsF-Tn7 System Protein
MSKVKYFAVINSGSPPRPGEISYAHCGALFLDELPEFARSALEALREPLETGRITIVRAVQRAEFPARFQLVAAMNPCPCGFWGSRVRACRCSPDQVARYQARISGPLLDRIDLHVEVAALSPEELLAAPEGESSAAVQQRVSAARDKALQRQGLPNHQLQGVQLDTHLQLEPETLAFAHKAAARLGWSARGTHRALKVARTIADLADSDAITQTHLAEALQYRRALMQP

SEQ ID NO: 3878 - protein, 286 aa, synthetic construct
  REGION 1..286: note = TnsF-Tn7 System Protein
MLEASLPEKLAFIRTSHLFTYPAFDHILRDLQDLVRFPRTTKPECRAVIADSDNGKTTLTRRFLANNPVVLDEAGYPINKVLWVETPPSADERRLYSSILEALEITHRPDAPPARLDALVQQELAAQQTTVLILDELHAMLNSPARQQKQFMAALKRLSNVRSLSIVACGTVDIARALAIDSQFVSRFTRLALPRWQANETFLQLLTSFETKMPLPQPSKLNAPDKAMEIFMSSDGTIGSVQKITMRAAEAALKKNSPNITFKILQEVCQSYRRGQLVPGPPPSGV

SEQ ID NO: 3879 - protein, 286 aa, synthetic construct; identical to SEQ ID NO: 3878
  REGION 1..286: note = TnsF-Tn7 System Protein

SEQ ID NO: 3880 - protein, 416 aa, synthetic construct
  REGION 1..416: note = TnsF-Tn7 System Protein
MACYHHDLAQRKLAQSNPLFTHEWAREAFTQFFTELCARRGDLAAATAHDRHFAFFLKLDANFPEPKKINAESLVQAIDLQRLRLFDLPLNFLRREGLIAYMEYTDLQHAAYNAAQRRILHAAHGHWYADLLERYAMKLLQRQNRSRQRGWTGKRARFLPRTITNYLRTANSFLAWLARHDISSIQGIDPQKLDTFLLEYPGLRDGLRPLVQHLNQHEKLFSKLRIATRTKNLPQGALLPDHQYHALLAHWLSPGDDELQEAMIGLMMTLYCQSLKKTVSLEMSQFQQTSDGQIHVQLAKHAIPLLEPVANVLTRYLEQRKSPSSLLRDVTSPYLFPGRNVNAPLSPDTASARLHKKYGVSAEQLFSTGLFHAYRGGVQHPKVLVTRFGISMITAMKYLEILLPRLKAEYERLTGN

SEQ ID NO: 3881 - protein, 414 aa, synthetic construct
  REGION 1..414: note = TnsF-Tn7 System Protein
MNPAQPLPSGSRQSQEALACLRPSAAVLTRQMLDAWSEHRLGSLRHEHRSVSLGIYIVSDFIRHSGKPPWDWTEKAFDGWCYDLGVRRRVAQSTQRQYQHAIRQFLAYLCGNIALQNQVRHVFSRQVQQICSSANMLPHLVDRELATERAAISREHIDHFFAELDEQIRIAHRFGSKALHPLQRDKVLFAIMYYGGLRADEALRLNVSSFHENPQNPSMGKYASIMVWGKGANGSGKKPREVWFTTLTVPPLAQFYLDHVRPQFLKPDNANESALFLSQRGTRLGYAALHRSFTSVIRACGLHGMGYCPHSLRHSSVTHEASRFSLFYNRDKHGHVYASTTEHYYHGGNEANGDELNRALQAQIDAASRTAPPPLPGEPPSPSSRPSVNPGDESSCRTDNWSAPHGQSEPPETN

SEQ ID NO: 3882 - protein, 416 aa, synthetic construct; identical to SEQ ID NO: 3880
  REGION 1..416: note = TnsF-Tn7 System Protein

SEQ ID NO: 3883 - protein, 705 aa, synthetic construct
  REGION 1..705: note = TnsF-Tn7 System Protein
MEKVVSSARLKNDPIGRLLIDDLQAHAAELQLERAILYYDFPLFRDYEEELYQPAVFILHPEKGAIVVSMPDTAFDVDKSDAMLDEFHSLLYAKLLASKRLRSGRNALKLNITTVLYLPQGVNAGERESENVIVSSFEGIRAAIDQAQRDALSDAEFLEARSVIEGVKALSKSGGREAAIDESKPKAMVLRALEDEIANFDANQRRAALTVALGPQRIRGLAGSGKTIILAWKAAHILLTNPEKKILFTFYTRSLYETIRKQITRFYRHFRDSDPNWDNLHVLHAWGGKREAGVYYNTCVEHMIAPRTYSRSSPVTFDGICTELNQKARVEPKYDVVLVDEAQDLPESFFRLLYSLTKGARDEKTIIWAYDELQSIFSPQMRTPRELFGVDASGEAYVDLDRSAARLGLGEYVSNDLVLYKCYRNPREVLVCSHAVGLGIYGQQIVQMLQDRGHWEDVGYVVEQGDFTTGSPTVITRPAENSPLSIPALEPREELIKLYRADSFSEELDLIVTEVLRLLEQGLRPDDILIICLDDRNAKNYHEGLTQRLSERGIGTHDVLNNPFSASTFRFEGRITLSTVHRAKGNEAPAVFVAGIDAVAPGLSGRTARNRLFTAFTRTKCWLRISGLAKHAGTLFDEIETALAKAPTLEFAWPNLPDVEMLQRDLSQRQAQARRAREDYLRKMSDLGFSEDDAHAWTEGVSKSE

SEQ ID NO: 3884 - protein, 705 aa, synthetic construct; identical to SEQ ID NO: 3883
  REGION 1..705: note = TnsF-Tn7 System Protein

SEQ ID NO: 3885 - protein, 104 aa, synthetic construct
  REGION 1..104: note = TnsF-Tn7 System Protein
MNASPETETWWLYLLLCSDNSIYVGIAKDADARFEMHRHGRGARYTRIHPPVRLLARQPFPDYRSAAQAERATKRLTPVQKRELARSLGATERSLFVCQLESTG

SEQ ID NO: 3886 - protein, 484 aa, synthetic construct
  REGION 1..484: note = TnsF-Tn7 System Protein
MTVAQPTPMRCDECQRPMAKAKRTHGGRRFCGTCYPKLFKRLLCSGCGNFARLPVFHESAKCRQCELSVACVRCNRTGRPVGMITPDGPACNSCAHHFRAPEPCDQCGTLSTRLTRVLSIDASARCCPKCVRKSSATCPCCRRHRKLLCGPDGHMRCKACVEQGSISCASCGESMPAGRKKDCESCAWKAAFHRRARVCRELLDQAHTRNLFDKFCIWLDQHMGAHKAFLKLKSYLPFFRFLETQSTGIPPYVSLLGHFQADGLRRMQTPMLWLEERYGVVADDALREEHSEKRRIDELINSLPDGTASKMLLGYRSYLLSKQGEGSTTFRSIRLALRAAKGVLKTASATFDAVPTQKTFTRYMTLVPGQKAAAQGFVSYLNRTHNLGLELTVSDRAKAHARTQRLENELSAMIASGGDGKAFERTWIKTALMHFHGVRRVNKKKLVYVPFTVLGKEGFNVKLETVDYWVPGHSATHVRLDASD

SEQ ID NO: 3887 - protein, 484 aa, synthetic construct; identical to SEQ ID NO: 3886
  REGION 1..484: note = TnsF-Tn7 System Protein

SEQ ID NO: 3888 - protein, 222 aa, synthetic construct
  REGION 1..222: note = TnsF-Tn7 System Protein
MDTNSCKQPKFSVARRIKSTHRSLSGVYAFRGEGVAFESALERDFIARMDFSREVVSVVSQPVTLDFVARNGRSYTYTPDFLVRFKGRAEIPPMLVEVKPEENWRESWREYLPKWKAAWSYARAQGWRFHIYDESRIRGQSLKNIQFLERFKRADYAKEDLDAVIQTVEFMGAAPIHYLVALHFTGSEALGTSHIFHLIANRQLDCDISRKIDDFLEVSVTL

SEQ ID NO: 3889 - protein, 638 aa, synthetic construct
  REGION 1..638: note = TnsF-Tn7 System Protein
MDATDEIPKGIKVDRSFIRLAVGEMVCYQKEIYRITQVLDYQTVLGMNVESGRAKVLRIAELKPVLAEKVKGLYINHDLEDIGTEEWAEAQKRLSIISPLLTLNGQTKAAVEQRAREAGVNFVTVYRWLNRYKEYGEVTALIPFKRGWAKGRQRISDDVEEVMKEGIDTFYLTDQRYSVAATVKEIKRLCKAKKLAPPNSDTVRARIKKLPDREVLRARGYKELAGNKYDPRPGGLHTEYPLEIVQIDHTPADMIIVDDVHRRPIGRPWLTLAICVYSRMITGYFLSMSAPSAVSVAMCLVHSILPKENWLALHGVDTEWPVWGKPVTVHTDNGSDFKAHNLIQSCSNHDIKREFRPRKTPHWGAKIERLMGTFSGINKLDKGTTFSNTTERQGYDSEKKAIYTFDEYETRLVRNIIKYNNEYHQEIGMAPIRKWNVAFFGDRESTAILPLPPRVANPWTFQLDFLPVSRRTINPYGVEMDAMYFAEALRPWVGAKDQKTGKARTFLFRRDPRDINRIWFYDPSLKEYFEVPIIRAHYPGATVAEYVNAKRKARKEGLDAVNEAVIERLMDENRQQEIQAAASTKSARRSVQKRKNNSKQTTPARPEPRATPKPNSPAIPAPSGLLSIDDVGTFGDVW

SEQ ID NO: 3890 - protein, 201 aa, synthetic construct
  REGION 1..201: note = TnsF-Tn7 System Protein
MLFLDELPEFDRRVLEVLREPMESGHIVISRARDRVRFPARFQLVAAMNPCPCGYLGEPTGRCRCSTEQIQRYRNKLSGPLLDRIDLHLTVAREATALNPGTQTGDSTASAAVVVAQARDIQNQRQGCANAFLDLPALRKHCALSSADEAWLETACERLTLSLRSAHRLLKVARTLADLERAEAISRSHVAEALQYRPATA

SEQ ID NO: 3891 - protein, 372 aa, synthetic construct
  REGION 1..372: note = TnsF-Tn7 System Protein
MDAPNRHRWHPSASPLAPAWPIVPPLLQDEIISSWLVRSALVLGCDPTTLTNELWPGKRPWCRDLDRTLNNEELTLLAMSSGLAACQLEESTLGPIYSALSGAQGFPKAIAPWILCLGNRSRRRCGGLQYCPKCFSDSVPYYPIESRLAWHTACTIHHTTLVDRCECCDAPLCPHLIMPPEIDLARCHRCKFELKLASSEASVCDALVFQNAADGLFAGKPQYYGHDVLSISDWFHLSKWMLGALRSAARARSSGTKRFFNCLGINLDDFTAPATGLPFEYLTPKERAHLLSSVWLILQAGPERFVEAAAHNSVAPSLLLSPWEESPGPLEDLETALRSRQPVEKERHQDDAPRSHKNVMMRWHRLLRKLQR

SEQ ID NO: 3892 - protein, 242 aa, synthetic construct
  REGION 1..242: note = TnsF-Tn7 System Protein
MPNLMVVGASNSGKTTVISRFKDIAGESYVSDEGISIRPILCAEVHKPDERELYNAILTQFWAPHNPGAPLAKLRHQAMHLIRDARTRMLIIDEIHTVNNGSNARRMDLMNELKMLANTLRIPLVLVGTRNALSLLTLDPQYASRFEVVSLPNWTANAEFQGFLKSFESALPLKHPSKLYSPELTTLICAISDGITGNIEYLLRECAKEAIQSGSEVIDRRLLEKNQWMRPTGTDGTRVRVL

SEQ ID NO: 3893 - protein, 242 aa, synthetic construct; identical to SEQ ID NO: 3892
  REGION 1..242: note = TnsF-Tn7 System Protein

SEQ ID NO: 3894 - protein, 304 aa, synthetic construct
  REGION 1..304: note = TnsF-Tn7 System Protein
MPAGLGDTCTNCYWLQVFEQRLHFNQGVLHPPVQELYQAFSRWLLGHCGAHRASSLLARYLAFFESIQHMYISESMSYQQLVKQFGADMLRRHRLAVRWLIERHGWGEDGSSRLEDSEARGIERLLLGVSDPLANRLLVGYYQYLSTKHQQGGLSLRSVRLALTPAKKLLEQSLKVGRSIPDQKDLCAYISQYPGQKASVHGFITYLNREQHAALDVRQIHQKKHKSQIKAELEKRLTELVQMPRSDKAFQNMWAITALAYFHGLSNVSIRQQITKNGLEDDGDGLTFRHEGLIYWIPKCSIKL

SEQ ID NO: 3895 - protein, 304 aa, synthetic construct; identical to SEQ ID NO: 3894
  REGION 1..304: note = TnsF-Tn7 System Protein

SEQ ID NO: 3896 - protein, 195 aa, synthetic construct
  REGION 1..195: note = TnsF-Tn7 System Protein
MIQYESTLERDFLIRHEFFPNIVSITPQPVEIPFIGDNGRPYTYTPDFLMSLRHLNGEATQHVLVEVKPRDLWVENWRAWSSKWKAARRFARNQGWSFKIYDESRIRDRALENIKFLDRYQRFAQAPRHTDTLLHALYQIGPLSRDALFAHCGVIAGDERPWAVAIWYLLATRKIDCDITQQLDGATMLWTLQNG

SEQ ID NO: 3897 - protein, 642 aa, synthetic construct
  REGION 1..642: note = TnsF-Tn7 System Protein
MDNNKPTRTQGGIVPVRQRLALDVGQFVQHEGLTYRIVQQIDFNSLLGSDVITGRKKLLPINELSSPPNPQVAKLDTRIDLDGIEDKDWRAAYERFEAIKPLLDQAPSIGREEVNKRALEVGVSPSTLYRWLSRYQAVETLSALIPMSRGWRGGRARLTPQQEQLINETIESIYLTVQRSSIQKVVNEVFLQCEKRKIPPPGATAIRARVEQISEREQLRKRGFREKAKNKFTAAPGSFPGADYPLSVIQIDHTPADIILVDDLHRKPIGRPWITLAMDVYSRMVTGYYLSFDPPSETSVAMCVAHSILPKEEWMTLHRVDSSWPVWGIPKTIHVDNGADFRSINFSKSCQMYGINLSFRPVKQPRYGGHIERILGTLVKELHDLPGTTFSNIRERKDYDSDKRAVMTKDELEKWLVTFICNIYHRRYHNGIGMSPLAKWDIGINGNSEVDGIGYPPRPADRMTILLDFLPSFRRTVQVFGVTIEGLTYFADTLRFWLNATDPDTGTKRQFIFRRDPRDISYIWFFDPELEQYFKIPLADQSLPSMSMWEYQQARKRLKEQGYVSPTEPQILNTITQLREIVEESKSSTKKARRQSQRRREHEKGISPATPLPVPGTPIYPIPEPSALDFSEIEPYDDGDIA

SEQ ID NO: 3898 - protein, 364 aa, synthetic construct
  REGION 1..364: note = TnsF-Tn7 System Protein
MSLIWPVQISPLKDELLSSWLVRASLAHGCDPMSLTSAVWPTWRAWTVDIDRTLDDTRLQSLCGSSGLSIDELSNMTLFHHLDGKILLIGKRPSNLPWVIAMGSRNRQHKMGVPYCPGCLRMDDPYFRWQWRLAWHTYCPLHHHELIECCPSCNMPVQYHRVSAQTPHIGICFHCGYDLSSAVSARVEAMQPDFQKLASNVFGTGAADWGGRQISSLDWFVLAKLLLNLIRRSASREQKAPSHLGDFIQATGIDLHSLPLPPTQLPIELLPLEQRKPLLAAVAQMLSLERNLLLRLLKEYGVSRNTLMNELTWPSETVMDWIDELPANSVQRIRTNPIQIRRPKAKEVVRREWARLLRRHGLLR

SEQ ID NO: 3899 - protein, 296 aa, synthetic construct
  REGION 1..296: note = TnsF-Tn7 System Protein
MNDLAHLHPDFRHVMNLSDQERMAFINQPRWIGYTAANQILAALNELVEQPKKPRMLNLLLVGEPNNGKTTIVRHFHEQYYKATEDEHPEGFKPIILAESPPTADEKGLYVSILERFFTPYRISDPTVKLRYQVIHLCRVCKVKMLIIDEFHSLLAGSAIKQRELMNAIKLLCNELMIPIVAVGTTEAVRVLHTDPQHASRFDVKTLPAWKLDNEFAKLVLSFERILPLKRPSSLRTAECIQLLHAISGGNLGNLQRLLSTCAIAAIKDGSEQVSRDLIAQHMWLRPTNGLRETMR

SEQ ID NO: 3900 - protein, 296 aa, synthetic construct; identical to SEQ ID NO: 3899
  REGION 1..296: note = TnsF-Tn7 System Protein

SEQ ID NO: 3901 - protein, 312 aa, synthetic construct
  REGION 1..312: note = TnsF-Tn7 System Protein
MPGLGASRCRACTNENAVSLEVDLSQHVFEQEWTKQAWAEFGKWLHRRSPDRPRLLAVLRSHQPFFERLDAEFHSSSKLREDEILRILGSKMLRKHLLGMRFLEEHFGIVITGQTRTISADGDRIAAALAQGRHEPWYEQLLSYHKHLERANLIARTRRMYVSTAANFLRRSANDGQQWRPEELGRFLQSHRGARNNLGRFVSYCREQLGWNVAMPTDNAIEVLASPTQSAERLATLLAKVDDIGLETADTGLLIEILSTALGYSERRLLRLTAQDFSAPSKGAMVLSVGKERIVLPAGLMPVAARLRAVLK

SEQ ID NO: 3902 - protein, 344 aa, synthetic construct
  REGION 1..344: note = TnsF-Tn7 System Protein
MKEPLKMALRCIPLRVSWYKDEDGERCEIRKFLVTQIVGSNFPSHYPLIAVGRTNRNGEGFEQEYTDLPPPYVKRPTAKIESDETVITSAVDAQVNSGATVIKGETWQWDVRPPRITMPKALSKKYQDRQPVQEESDSDVVSTGELTHEEASRPKGEIKTITSPPNVYFAHLVGIFEELTRDGFFEGFEAVRARHRGQQTDRNGWPAWALIDEEVRQNIARPRRSWQVLDPGKKAVRGVVYRTVLILAIRFRGQQYYWLQIERKNPADGYTSPVLYNLGPDYHDILEYALEIIVDRKGRNLKATLSSRLKHYGIHVAAYRHDYNEERTAISMPSIIAFFENRLT

SEQ ID NO: 3903 - protein, 228 aa, synthetic construct
  REGION 1..228: note = TnsF-Tn7 System Protein
MEKHEITRLDALSPARLLSTSRRSLTGRVRVESGNAVGFESSLERDWLICLDFDPNVQLILEQPFSLTYAVDGGERRYTPDVLAQFREQNGVVPVVVYEVKPVEVLRLEWQKFQRRFREAVRFCRERDWRFKIVTEKHIRTPYLQNAKFLRKYRGNPVQQMYKDQLSYSLKGLGSTTPQALLALSYLEDEKKMAALTELWRMVATGEISTSLDKPLTMHSPIWKSSWA

SEQ ID NO: 3904 - protein, 635 aa, synthetic construct
  REGION 1..635: note = TnsF-Tn7 System Protein
MGVNIVHKAFFAAEPGQVVTSSGRQYRITHLVSIDSVFATDLLTGDSARLRVDTLQPVHPDEEAPSTIPSAKDIAQYSDKEWAEAQRRFQAIKPLLDNPVRSRTDAEMIAAQHGVHAATLYKWLKTYQEAGHVSALVPTKRGRRVGVKLLTSEQEKLIETVIEDEFLTKQRNKPQHIVEEVERRARLAKIAAPHPNTVRNRIKALCIRDTLRRRGHRETARNMYEPILGEFPGADFPLSVVQIDHTPADIILVDEAHRRPIGRPWLTLAIDTWSRMVVGLYITFEKPSSTSVGMCVSNAICSKREYLAGLGVSGEWPVWGVMNTIHVDNAKEFRGAVLERGCEEYGIDLQWRPVLRPHYGGHIERLMGTMANQIRKWPGATFSNTAERKGYNSEAEAALTLSEFEHLVVDFIVNVYHQRKHSELGMPPRRKWELGILGDATTPGVGIPPVPENPARLQLDFMPFFERSVQQYGIQIDLINYYDKVLNPYINTTDPDNDKKRRQFLIRRDPRDISKIYFFDPLSNAYVPIAYRDIGHPAMSAWELKEVQRVLREQGQKDVDENRIFEALGRMRTIVENALHKTKAARRQATRNPTKVRTADKPAMPAPVENVGQPSIEEDLFALPVVPFEDLAVSR

SEQ ID NO: 3905 - protein, 295 aa, synthetic construct
  REGION 1..295: note = TnsF-Tn7 System Protein
MSGRAHLAPEIVPILELTTDERIEACNLDRWIGYTRAQQIMQQLDQLLLYPRTLRMPNVLIVGQSGNGKSSILERFCHRHPVQVTSTGTPIAPVLHISMPETPDETELWSLILWSLGISHGERAPASIKKREAKSAMTYAGIRVLAIDEFNNLTYAGRRAADLLALIKGLSNDLKISIVAAGTQAAINALNSEPQMKSRFEPAALDRWRLDTDYLRFLASYERFLPLAQPSNLASRELAPVIYGMAGETIGGTVKLLKAAAVKAIQLGREHIDTGVLKSTDFVRKDGWDDVMRRI

SEQ ID NO: 3906 - protein, 295 aa, synthetic construct; identical to SEQ ID NO: 3905
  REGION 1..295: note = TnsF-Tn7 System Protein

SEQ ID NO: 3907 - protein, 842 aa, synthetic construct
  REGION 1..842: note = TnsF-Tn7 System Protein
MTARIPGSGPGFLDDPDAVVLALVAEVEPALDQAAVAEALVLAAPTRAQRRRLAAALLEDPDLLVSGRPHGPPQIERLIRALLPLGGRALALPRCGHCGRTQKLSQRDGALRICGTCDRRRRGRAEPCTCCGSTAQVAGRDRDGLARCRNCLSRPDEDPVAGITSVILRLSPVHDPQGLEDLVRAAVPQRFQLHRVLAELRERPALLTGEGAHGSPRVNALIRALVDGGVDGVLPPRCPGCARRTALTHRLDGLRCCRRCYDDRNTCTACVRCGQLRAVASRTASGEPVCGPCYRSDPANHEPCAGCGRVALVHRHDGGPPFCRACFRAPTATCSICRRDKPCHFADTDHPRCEHCTRMAHRLPCGRCARTLPIWARTEDGKPLCNSCSTVRAPCHDCGRTMTVKGRSAQGPLCATCYRRHPVSFRPCVDCGSTERLHHHGLCPGCAARQQLLALLTGPEATLPGHLEPVFHLLAASDPTALLPWLGKSAARAVLAAAASSDRPLTHDDLDRHLPSKAVDHLRKIMVAGKVLPGRDEYVVRFEQWTATVVTGVEDPHDRRVVRSFATWHVLRRLRARSETRHLLQGQVDQCRAEVRAAVALVVWLRANDSTLADCTQHHIDRWLTDEPSTTRHARAFLTWAHQHKHAGDVEIPAHSPDGRIGDRIADDHRWELVRQLLHDDTFALEDRVAGLMVLLFGQTLTRIARLRRDQITTDRTGTTRIRLGQSPLDLPSPLDDLALRLAGGHHGRYVLGHPPDHHWLFPGAPGRPLSTGRLRDRLAHIGVRARAGRNATLMDLAGQLPAAVLSKLLGIHISTAVHWTNHASARDAAYAAEVSRRNRTH

SEQ ID NO: 3908 - protein, 842 aa, synthetic construct; identical to SEQ ID NO: 3907
  REGION 1..842: note = TnsF-Tn7 System Protein

SEQ ID NO: 3909 - protein, 225 aa, synthetic construct
  REGION 1..225: note = TnsF-Tn7 System Protein
MALARAWSVALFGVDGVPVEIEADVGAGSVRTQLLGLPDAALHESKDRVRAAVRNSAHAWPTQRVTLGLSPATLPKGGSGYDLALACVVLAAAQAVPGERLGGTALLGELALDGRLRTVRGVLPALLAARRAGLARAVVPEASLPEAALVAGVEVRGAATLADVIAWLNGDDAALADAPATGPPPAPPGKELADVVGQPEARWALEVAAAGVGNPGYSTLRSSVL

SEQ ID NO: 3910 - protein, 225 aa, synthetic construct; identical to SEQ ID NO: 3909
  REGION 1..225: note = TnsF-Tn7 System Protein

SEQ ID NO: 3911 - protein, 340 aa, synthetic construct
  REGION 1..340: note = TnsF-Tn7 System Protein
MLTGWARQQVGGRGLADKTVKRRAGVVRRFMEFTNEYPWNWTAAHVDEWSADLVGVLRRSKSTIRNYHDALRSFEGYLIAPQYRWMQECEARFGTHPARICFESNTRAHLVDYEGRPERRPMTREELQRFFDYADDRVDRALRSGRKGALTAYRDATLFKVAYGWGLRCTETSKLDVTDWHRNPKAPELGKFGVLEVRYGKATRGSPPKRRTVHSVMPWAVEAVEDYVLNVRPRFGFPDQSALWVTERGGRVRPDGIEQRFAEYRDALKMPKELVPHCLRHSHVTHQIEDEADPGFVQRQVGHAYQSTTAIYTGVSDDWMNTMMRRTLDKALATDEERTR

SEQ ID NO: 3912 - protein, 112 aa, synthetic construct
  REGION 1..112: note = TnsF-Tn7 System Protein
MTAKLDYSWNLRKVMADRGMFSTTDLRPLLVERGIVLSASQVYRLVVDKPERLNLKVLVALMDILDCQMTDLVEPIAARAAKPRKAASGSGGDTVAGGLGTLRPKRARIVPE

SEQ ID NO: 3913 - protein, 576 aa, synthetic construct
  REGION 1..576: note = TnsF-Tn7 System Protein
MTPEEYERWMIRDCARCGRRASKSAEWSDGPICRTCYDRAMRVRGCCPGCRADRLLPGRDATGTPICRDCAGITRDFFCDRCGFEGLLLGGHLCERCTLTDTLGRLLDDGTGHVAAALQPLVTSLLEMDRPKSRLIWLRNPSVVRLLRGLAAGSIPLTHDGLHQETPWRTVVHLRDLLMDSGVLPRVDRQLLLYQRWLAERLATIEDPEHRRLLQHFASWHQMRRLRSKAEKGPLGRSQTNQTKQEITQAGAFLTRLADRGRTIEHCQQADLDAWHTEKLATRRPAQTFLRWCMKTGRMPRLALPPQVVNQDQTPLHQHHRLAILRRVLNDDSLPLRARVSAALVLLYAQPVTRIVRLTIDDVIDDGTTVTVRLGDPPSPLPEPVADLMRAYVQSCQHLPYASSRSSQWLFPGRQPGQPMNPVSLQVHLREIGVPPQRGRTSAIRQLVLQAPAPVIAKALGYHDKTATRLVTEAGGTWSRYAPGDHTRRTATTLPHSGNEKPSSRRRGKHAARHCSTDAASVRTRTSSRIGAPLATKVHGIRLSAIRSASALINTVMPCSANASMIATTSTGGLPL

SEQ ID NO: 3914 - protein, 576 aa, synthetic construct; identical to SEQ ID NO: 3913
  REGION 1..576: note = TnsF-Tn7 System Protein

SEQ ID NO: 3915 - protein, 179 aa, synthetic construct
  REGION 1..179: note = TnsF-Tn7 System Protein
MTLVWVTGNSGTGKSTVCGVLRARGYVALDADGDGFSRWIDRVKGEAVVDPPDPVPGGWLDRYGWAIVRERVETLVEESRFRIAFLCGSAENEADVRDLFDLIVCLVIDEDALRHRLATRTTNTFGQHPEELAAALKWNPRMRALYENHGATIIDASKPVTEVVDSVIDAVQGLTGSTQ

SEQ ID NO: 3916 - protein, 179 aa, synthetic construct; identical to SEQ ID NO: 3915
  REGION 1..179: note = TnsF-Tn7 System Protein

SEQ ID NO: 3917 - protein, 372 aa, synthetic construct
  REGION 1..372: note = TnsF-Tn7 System Protein
MGGDGLVPGSARLHLIEGLPLLRPEEQVFEAMIKGWRNQQLARNLSPGYVGDQERTVRAFTRHADAMPWQWTPQHVDEWSADLRAVHGCVRSTLRNYQGSVRQFCDFLTNPAYGWSDECLRHFGTHPVQVVYDWNAATHADEAEGEPERRAFTRPEMEAFFDHADEEVLRVRGKGRKGWLPAFRDAALFKTAYAYGLRRNETRMLDLTDFGRNPEGREFGEYGTLLVRYGKAKKGSPPKRRSVLTVWHWTPCTIEEWISEVRPGMRHSTGRALWPSERGPRVGLQRLDSRFAAYRDAVGLDPALEFHSLRRSYITHLIEDGHDPLFVQQQVGHDHASTTAIYTCVSSDFRTRSLRRVLDATVEAALRPGRTS

SEQ ID NO: 3918 - protein, 108 aa, synthetic construct
  REGION 1..108: note = TnsF-Tn7 System Protein
MPRQISYRWRLRELMAARGMFTVAELMPHLTERGITLSSSQVHRLVSGTPERLSLPVLATLCDILDCTPTDLITTSAQNLPARRAAGEEAPINLAARRPTRVRLTPEG

SEQ ID NO: 3919 - protein, 244 aa, synthetic construct
  REGION 1..244: note = TnsF-Tn7 System Protein
MDAAFESALDLTGSALLRVFGTAALRRHLLPVQFLAEQLDIHVHSEAKSDASEIDRINETLIAAKHSSWNELIHAYHQVLLDSPLAPRSIRMYLATAAAFCAHADVGMNAWSHGALERYLNDKPGAKNNLSRFVSFCKSSRGWDVQMPAKGAAVQPLPDPVRSARTLRELLQKVEATGLQNAPRDVLGAILSVSLGLPKSTVMSSTADFQVTPDTVTFCRGSEKILIPNELEPYARRFAEMTIK

SEQ ID NO: 3920 - protein, 638 aa, synthetic construct
  REGION 1..638: note = TnsF-Tn7 System Protein
MQSTQAKFSFPQDDQFWAVKYIDQFNLAHARTRTASVQVMLQRLPISAKNELSRLSPDATKQLLGTRPRGPKPEFDFVSILAGQLPAIRIGDVFHNREKVGELPSIVRRLTLGTGETDSTEVRAGETIEAVPGWAPSLPYRILNAFEYSGVTDHFQPNVRFSRSRLVFFKRFRKEGGSDTYVLPRMTIFKTFYAMHNLLANAFCSGPWSKEVEKVVSFNETYGGLQTGIADGGRQWNIVLQTLIPDEYAGLIAVLHFDDYARARAESIFAKALQDRGANPRAPWFASAEIPLQAKTGKLDLAVKCLELRGWTEKTADNRQLAHQKFLITDICGSTWPSHYPIIGHSRTNAGDGGAQSNPVAFPKPYGGTPPSKEANEDTVVRSDLDGHSGSSTTTVKGNQWSWLDAGPQYRRLEKEQSQRYQGGLPGIDNDGTDVSAGAHTFEKDALPKAEVKTVVRAPNACFDHMYQALCALAQRQVIADLTVIPARRPEQRSERSGYMCWTFIDDESLRRKLKPYGGFRTIYDIPHDRRSAHWRTALALRFEYRGRLHHWVEIERNRSNSFRSLLLTIDNQLDANDVIEAVLNVIAEARGVGIDKAARAIFQHVQMGIFAYTHFYNNDGTLREDLLESFLKRSVTL

SEQ ID NO: 3921 - protein, 229 aa, synthetic construct
  REGION 1..229: note = TnsF-Tn7 System Protein
MKICEKKRLDLMSPVRSIGMSYRSLTGKVVLNSGHSAGFESSLERDWLICLDFDPDVEAILEQPFSLNYQLDGRELRYTPDVLAQYRERDGRIPIVVFEVKPYDEVRLDFAKYRQRFKQMIRYCRERDWRFKIVTERDIRTPYLDNAKFLRKYRRLATQELYREQLLYSLRALGPTTPQALLAMAYLHVEKRMAALPELWRMVARREVSTELNKPLTMHSTIWLGIQHE

SEQ ID NO: 3922 - protein, 635 aa, synthetic construct
  REGION 1..635: note = TnsF-Tn7 System Protein
MSNRLPQAFFAAEPGQVVRSANRVYRITHLVSIDSVFAVDIQTNESTRLRIDSLEPVDEEAQATDQTSGMDRDLLLYSEKDWQEAQRRFQAIKLLLDNPLRTRADAEQIAQQYDVHTATLYKWLKAYQEAGHVSALVPTKRGRRAGTKMLQGEQEKLIATVIDDEFLTRQRMKPQDVIDEVMRRARLAKIEAPHPNTIRKRIKMLPAAETLRRRGHRELARNKYDPIRGEFPGADFPLAVVQIDHTPADIILVDDVHRQPIGRPWLTFAIDVYSRMIVGIHITFEKPSSTSVAMCISQAICPKREYLAELGVSGEWPVWGTMNVIHCDNAKEFRGIVLERACKEYAIDLQWRPPLRPHYGGHIERYMGTMANQIRKWPGTTFSNTTQRKGYDSEAESALTLREFEYLVVEFVVNVYHQRNHSELGMPPRKKWELGILGDATKPGVGIPPVPGDPARLQLDFMPFYERSVQQYGIQIECINYYDPVLDPYINSTDPDNPKMRRSFLIRRNPRDISKVYFFDPIAKSYYPIPYRDMGHPAMSAWELKEVQRKLKEEGRSNIDEHAIFDALGRMRSVVEQSVHKTKAARRQATRTPPKAMVKEKPLTDTDFVVRPVPVIEDDPFAQPIQPFDDVAVSR

SEQ ID NO: 3923 - protein, 246 aa, synthetic construct
  REGION 1..246: note = TnsF-Tn7 System Protein
MLTDSPALRIAALRKSFGRPAVDGLDLTVRRGELYALLGPNGAGKTTTLRMVTGLLAPDTGTVEVLGIDIARDPAGAKRGMAYLPDDPLLYGKLKPTEYLEFVAGLWGIRAEDAEPRARHLLDWLDLAPHAHELTEGFSRGMKQKLALAGALIHEPELLILDEPLTGLDAAAARQVKDLLVSHVEKGGTVILTTHILEVAERLAQRIGIIRQGRLIAEGTLAELRARTHGGSLEDVFLHLTEGQAG

SEQ ID NO: 3924 - protein, 246 aa, synthetic construct; identical to SEQ ID NO: 3923
  REGION 1..246: note = TnsF-Tn7 System Protein

SEQ ID NO: 3925 - protein, 296 aa, synthetic construct
  REGION 1..296: note = TnsF-Tn7 System Protein
MIDALSHLNSDVLPLLQLPADERIEHCKSDHWIGYTRAVQIMQQLDQLLVYPKSLRMPNLLIVGRSGNGKSSILERFAHRHPVQITSTGSPIAHVLLISMPETPDESEFWSEILWSMGISHGDRDSAAAKKRQAKSILSYAGIRVLVIDEFNNLTTAGKKAGDLLAAIKGLSNDLKISVIAAGTQAAINALNLEPQMKSRFEPAALDRWRLDTEYLRFLASYERLLPLAEPSNLASRELAPKLYSMAGETLGSTVKLLKGAASFAISSGKERIDEQVLTKMTWTRPDEWEDIAKRV

SEQ ID NO: 3926 - protein, 296 aa, synthetic construct; identical to SEQ ID NO: 3925
  REGION 1..296: note = TnsF-Tn7 System Protein

SEQ ID NO: 3927 - protein, 671 aa, synthetic construct
  REGION 1..671: note = TnsF-Tn7 System Protein
MKNIDNYKRLITCEFCGRMKFTYFKDRDICRQCYCNQPTNLCSRCGEMKRQVSLLGLCPRCTKIKERPIATCSRCSQTKPIYNQTDWLCQTCQQIARHASRKAKQNKIECSVCGCMKSSALLGEQICRACWRERRYGYQRCSQCGQFKVLYNKSHQLCQLCNQNRLARDSLLAYLTNFSTPYPYNKTLFDLIAKNINWDCVDNNKNRRFRIFGRFLQANQLTQPLTWSAIDNALPKLGATGRTNPMLIRSCLFELGHLLASLGQIESRELYLSRRRALMPIRNAPEHLQQLMNDYATWLGSRKTVFSNVRDHLETLSVFWLWSAQHSINLPHEVQPSLINNYLLTLNFQWQCSLCQMIIPFDPNHRLAPKVCNCCGAVGSYVQVKRLAQNTVRQHRGKLKVFFDWALMNKMVIINPVQRSIRADNPTIRHYPLEIIRQLCSYIISPDADPIEAIVLYLIIFHALSVWELRHVQIPCVIPMTLGILPLKLSAIDYFIVPKKEPSCGKHSPGRPSLKLNIPKNALPWLRPHLESIELIRQLKNTHQNNQYLLVSTSSAHHNKPVGKTFPSQIVRSASFKVNGTICNPNTLRKTVGVMMADIAGGGILRFLGWEDYQAFGYTWIPREIVYPQQPNNSQLSEPNTTLEIEFPSMKTLNLDCLNQLDNDSSNSTEI

SEQ ID NO: 3928 - protein, 92 aa, synthetic construct
  REGION 1..92: note = TnsF-Tn7 System Protein
MDAQTHEKYYVYLAQCASGVLYVGSTKNVSQRIAAHNAGRGGRYTRINRPLKLLRFWTFNTRTEARVAEYQMKRLSPSEKLAVFCEDQNHNK

SEQ ID NO: 3929 - protein, 494 aa, synthetic construct
  REGION 1..494: note = TnsF-Tn7 System Protein
MSSTRRLARERYERHHIRDCARCGRRAAKAANWSDGPICRTCLHRAENTYGTCPSCGTDRLLPGRDSHGAEIYRDCARITRDFFCSRCGFEGQLYSGRLCTRCTLTDLVHAVFDDGTGAITPALRILADRLIASPNPKSTWTWLRRSHVRGLISDLARGTTPLTHEALHQLPNWRTVAHLRDLLMASGALPMIDKQLLHHETWLAHRLAELHDDPHQRLLRAFATWHQLPRMRARAAIKPLTPGSRNFAGEQLKAAHGFLTWLDTSGQTLASCTQALLDAWHATHPQHQHNTLRVFLRWAMHDGHMPKLRVPTPTVAKAAPMSQRRRLQLLRRALTDERLALPTRVAACLTLLYAQPITRIVRLTLDDLTHQDGELHLRLGNPPTPVPEPFATLLLKLADDRPHLNTATNTGTRWLFPGRRAGQPANPSGIREHLRRAGFLTGAARPAALRQLVLQTPAPVIAKSLGCHHVTTTRVAADAGGTWNHYAPDDHSK

SEQ ID NO: 3930 - protein, 494 aa, synthetic construct; identical to SEQ ID NO: 3929
  REGION 1..494: note = TnsF-Tn7 System Protein

SEQ ID NO: 3931 - protein, 382 aa, synthetic construct
  REGION 1..382: note = TnsF-Tn7 System Protein
MSHDGTAPGAAGLHLVGGAVLLRPEEQVAAAMLEGWRNQQLARNLAFSTIEGRENAVKAFSRHADAFPWNWTPQMVDEWLGDLRAVRHLRHSTLRNYAEAVRSFCAFLTDPAYGWAGECQRRFGTHPIQVCHEWNTAVHLQENEADPAKRAFTRDELQAFFDHADDQIHRVSGAGRKGWLPAFRDATLFKTAYAYGLRRRETRMLDVVDFGPNPHAHVFGDFGVCYVRWGKAMKGSPPKRRSVLTVGPRDGIGGMDWIIDNLDQWVTEARPGFTHAATSTALWPSERSPRIGFSQINTRFAAYRDALGLDSGLDFHSFRRSYVTHLIEDGWDPRFVQEQVGHEHASTTSLYTCVSSDFRTRTLRQAMESTVNAALSTRRTNR

SEQ ID NO: 3932 - protein, 111 aa, synthetic construct
  REGION 1..111: note = TnsF-Tn7 System Protein
MKRQVSYQWRLRETMAAHGMFTATDLAQPLADRGITLSSVQTWRLVTHTPERLSLAILAALCDIFDCTPSDLIATKAENAAPRRTATGETSGTSAQIAPIRPKRARIRPDQ

SEQ ID NO: 3933 - protein, 541 aa, synthetic construct
  REGION 1..541: note = TnsF-Tn7 System Protein
MPVSAGPTFLRPISSGGDRSAFSTAPPSGVAPKSTTVTSSSRNGRTRPNRPTSIARHASSASESSGGVGSNSAATAAAGSCRGTTRSISARIASRLAPGDEAAICTTCAGFSQTFDCSRCGFEGKLLRGRLCERCTLTDRLTPLLDDGTGRVRPPPVPLLDLLVTMDKPGSGPAWLDMRRGRPGNASKPLRRLGLGEIPLTRDAFRELQPWRAASHPEELLMACGVLPAVDKHTCPFQRSRPPVRHRRSRAHQDDQALRDPARPPRTAAGPRRAEPHHPPHPPLRRRTDPVRNRLPAMAQPAEHHLASCGQIDIDAWSAENPEHARTRLGGFLDWAVQGRHRRRPLTIPAMKISRRPALGEDERLAALGGLPTGTEIPIRLRVAGVIVLLPAQPLSRVVRLTTADVNRDGDAVLRRLGEPPPPAPAPAAAPVPEHITNRGNVDTATHPASRWLFPGRRTGQPLGPNHLSALLDKAGTPIAAARGAAVRRQLLELPAPVVADAPGYHDKTTSRLRNETGGTWSRYAPGDHTRSPEGRTPPLR

SEQ ID NO: 3934 - protein, 541 aa, synthetic construct; identical to SEQ ID NO: 3933
  REGION 1..541: note = TnsF-Tn7 System Protein

SEQ ID NO: 3935 - protein, 1403 aa, synthetic construct
  REGION 1..1403: note = TnsF-Tn7 System Protein
MLSIASGSDPLYLTRQVGQGAEHHYLSSVAVAGEPPGRWWGAGAVALGLTGVVQPRVMDRVYGKLEHPATGAALGSRPAAMRPLGERLAAALARLPHGATDEERRAAEHTVRATHRRPVRYFDLTFSAPKSWSVFHAALQLKALQAHKRNDQAQAEHWQALADQVWDAWAEGACAALEFLQDTAGYSRAGRNGVTRVDAHQWTVALFRQHTSRNEDPQLHIHGALLNRVWTVDTEPATGRTRGKWRTLDGRFLYLHRAQAGAISERVAEEALYRRLGVRVALRPDGKAREILGITAALRDTHATRRTSITTHLAQAADAYEHAHGRPPTPYRLTCMAQEASLRTRRSKKTHAPTRQALLERWNARPAPQALLTVPQDVREAADRTARTPEPFDRNLVIARSLEAVGAAKATFTRSDIVREIDRQLPDCLGGLTPAQVSRLLDDLADDALTPWQSEQRPGRPAVARLTPPTAAAPPDELTRAETGGSRYQRPRRDLYTTDARLVTETDITEAAAAHDAPTIPAHIVQHVVDQSDLNTEQAAAARAIATSGRAIDILVGPAGTGKSHTIARLSQAWKAHGNTVLGLAVGQRQANVLTREGVPHAENIRMFLHANQHPATQPDGHDRYRLHRGQLVVVDEAGTCTTDDLHAIITLARQAGAKVLLTGDHAQTTAIGAGGLFGHLATTSPHAHTLRQVHRFHQPWERGASLRLRAGDPTILADYAARDRLHPGTTQSTRDQACRAWLTDHLAGLHTTLITTTNRDAAHLSARIRHDLVRHRRVEPDGVRLRDGNLAGVGDRLQLRHNDRTLTSRDGTRWAANRDTATVTTRTAAGDLTVSYPDGTTMDLPATYVQQHTELAYATTVHAVQATTLDTAHTLVDPRMSREKFYVAMSRGRRENHAYIPTDAGPTWTRTAKARTATTPKHRRTTHQAVLTRILRRTEHERTAVRVMQDEMDRTDAIDVLGPLWTGLVDEHYARLHGRALQNALGAHAYQSMATEDAYKALLGLARHAEERGMNAARLLQTAVALGPLDDAKSVSAVLHWRLKNRIAQAEHEQAQQHEARVQAEAATGRWGTEQQIRARHTAYLRTQERTRTTFTARTPPIPGTRGAYALRLATLLDHRVHTLGERAAAAPPPWLTARLGPVPTDLSARAAWIEAAAKAAAYREHTGYHADLDAIGPKPGTAAIDQRTAWTRAADALGIAPSDRRTEAASDAQLRAAVDTAQRERAWAPPYVAPQMRQAYRARSETRTREVSISIALAHTAGVERRAALRKALEAAQTSHRDLDRRIRHLEQIHSARTRWAAQTQDVREQARLAQQILHRRHPAMRASSQPNSTQEGETSALNLRQARRQAVRAAAGLDKLERPPTVGTSRTHPEQTTPGRLSPPGIDRDRRIERGLGLGQ

SEQ ID NO: 3936 - protein, 1403 aa, synthetic construct; identical to SEQ ID NO: 3935
  REGION 1..1403: note = TnsF-Tn7 System Protein

SEQ ID NO: 3937 - protein, 397 aa, synthetic construct
  REGION 1..397: note = TnsF-Tn7 System Protein
MQRDPSRPFIAGDHLADRLSDPPEWLPGFVVHLAGAYSPSRATTLLTELGRLLADEHSNHPQSVLQRARRSGRSMGALARTLQDFFTEHGLALPTDHAERLAAGRRERRIAAVPPTLQQAVRDYESHLLRCRSRARRAGTLPRSDHTIESALSTIRDLAVFINTVRSKEDWATIGISDVEAFLATSPTNQPRNLTVLRQFFRFARRRHTILIDPTNGLKRQQNKGFRGRTLTRQQQRELFKRWTIDPDVHPHEALVGFLALLHGASSQEVRLLQCDDIDDERRTIRLGARPHPVPLDPATWAAVQRCLTHRGLWLTANPHVLVTKGTKAGRAAASTAYLSHVLDPCGYSPRMIRNTRLVDLVNTMDAKLAAAALGLTPEATMIYLADSVDRSRLATE

SEQ ID NO: 3938 - protein, 309 aa, synthetic construct
  REGION 1..309: note = TnsF-Tn7 System Protein
MTIDNDVGLLERTLVALGRPAWEVTAEDIDRVVGDLAVAGRASSTRREYVQIFKGFHRFLQVRKAAEIETTFGVRLVCPVDEFNASRHVGDDSPALAPPPTPERVEAFFEFLKARIATARKYGPAARDYALFRTLYHAGLRSEESALLEIADLHFGRGPFGKIHVRFGKGAHTSGPRPRWVPMLDSVDLVLRWFLSDVRPKFPDSLVLFADESGGALHQGTIRNRLRYLMQLEGRPKVEWFSPHALRRACATHNYERGVDLVAIQQLLGHWTVSSTMRYVRPSATFIEDAYRRAVTSTLAELSQEDGTA

SEQ ID NO: 3939 - protein, 419 aa, synthetic construct
  REGION 1..419: note = TnsF-Tn7 System Protein
MLSVEDWAEIRRLHKTEGLPIKLIARTLGISRNTVRAAVASDGPPKYVRKPAGSAVDAFEDAIRAQLAAVPTMPATVIAERVGWTRGMTVFKERVRELRPAYLPPDPAGRTSYDAGDIAQCDLWFPPTVIPVGYGQTRTPTQLPVLTMVLGYSRWLSAILIPSRRAEDLFAGWWKLIAALGAVPRTLVWDGEGAIGRCRAGRTELTRDCQAFRGVLGTKVVVLKPREPEHKGIIERAHDYFERSFLPGRSFTGPGDFNHQLHTWLDVVNGRQRRALGCAPTDRIGADLAAMLALPPVAPEVGWRNSTRLARDHYIRLDSNDYSVHPAVIGRRIEVLAELDRVQVFCGGKTVAEHERVWAWHQTITDPEHRHAANLLQHNRISALRPNREHDGHLCIEQRSLTDYDTALGIDLGDGGFAS

SEQ ID NO: 3940 - protein, 104 aa, synthetic construct
  REGION 1..104: note = TnsF-Tn7 System Protein
MRIRWRLRMAAAQREVWTGTELRRLLAEKAGLEMSAASVSALLTKEPSQVKLSTLIALCTALECTPNDLFEVDTTPVEQPSADPAVTAKAVKAVNSRGRSLPPM

SEQ ID NO: 3941 - protein, 196 aa, synthetic construct
  REGION 1..196: note = TnsF-Tn7 System Protein
MPNWRTVAYLRDLLMSCGVLPIVDKQLLHFQTWLHHRLAERASSPHHRLLARFSRWHQIPRLTARAHARPLTCAARRYASEQFTYAERFLAWLDQRDHALAATTQDDIDTWHAQARNSHKHATRAFLTWAITTRLMPKLALPPLRTPNTGQRITQSRRLALLRRILTDDTPPLRSRVAGALMLLYAQPASCIVRLS

SEQ ID NO: 3942 - protein, 196 aa, synthetic construct; identical to SEQ ID NO: 3941
  REGION 1..196: note = TnsF-Tn7 System Protein

SEQ ID NO: 3943 - protein, 263 aa, synthetic construct
  REGION 1..263: note = TnsF-Tn7 System Protein
MDFTCRECGRPGRLHADGCCARCVVAHRVHDLLSDHDDVVAQQLQPLAQALTAASNEYSVLNWLYYHPAATLLADLAAAPVEITHALLDGLPPTRSTRYVRDALIATGALPPRAEHLNRLEAWADRTIDRLPKPQQRIIRPFAEWHVIRDARRRDACNRYTEAAAAHDRTDIRAAIRFLDWLDATATTLDTLAQEQLDHWLDTNPTQRRELASFLRWASQRRLTTGLEFPASKNSLPIHFQTEEQYRRQLRRCLNDDSLPREV

SEQ ID NO: 3944 - protein, 307 aa, synthetic construct
  REGION 1..307: note = TnsF-Tn7 System Protein
MIEVSGLRKAFGGREVLGGVDLAVERGSVVALLGPNGAGKSTTVRILTTLLAPDAGTVRVGGFDVVRQAREVRRLIGVTGQQTAVDRMLTGYENLVMMGRLFRLGTAAARRRADELLARFDLTGAAGRPVKTYSGGMERRLDLAISMITAPPVLFLDEPTTGLDPRSRAGVWDTVRDLLAGGVTVLLTTQYLEEADELAGRVAVIDGGRVVAEGTPASLKQRIGSERLDLTFATREALEVARLALGGTPAGEGLALSVPVDGARDVREVLDRLHQAEAEIADLALTRPTLDDVFLSLTGEPAIGALR

SEQ ID NO: 3945 - protein, 307 aa, synthetic construct; identical to SEQ ID NO: 3944
  REGION 1..307: note = TnsF-Tn7 System Protein

SEQ ID NO: 3946 - protein, 183 aa, synthetic construct
  REGION 1..183: note = TnsF-Tn7 System Protein
MRNRDGEKQRLDRIAAREGARARLITDVQNITEPAVTPPEAQEILEQAQAWTAWGALALHRYLDQHPDALHVPPSDCPLALARLLDLLAAAGHPVNAPACSICGRSDRLLECRSPDGRCCNWCKHKTKVHTCARCRQEAHVVTRRPEGPICRRCYATDEDLFEECVECGRRRRPTKRRADGGA

SEQ ID NO: 3947 - protein, 747 aa, synthetic construct
  REGION 1..747: note = TnsF-Tn7 System Protein
MKGSADFRPEAWTRVIERLMRDLPDITRATAERLLRDAGIHKPKTLNAVDTYLAAAPHGIQAPDASCPRAVMRLSHLLVAAGHTAVTPPACTQCHRRVTLSGTGPSGRICGQCARRNNPFTCVRCGRLSVSSRTHLHDGTVCSTCFSRDPLSHRQCSKCGRIRARARRLSDGGVLCPGCAPRPTHTCIGCGRERPAQCITDDGALCNGCYARIRMSWTCGLCGVVRRRQGGSVLGPHLCGACHGVRTGTYRGRRSSTPSSPCAFCHRERAVANHWPAGPICPPCSKKAKSYPQPCAECRDVAVLIGLDESGGRICGPCVGTTLDYRCRECAQPGVQVDGRCSRCVTADLLADALRGPSGSVPGSLQPLLEALRAAPDPRSVAVWLNGSTAADLLRDLASTGEPVTHAALDAQAPGRHVNYIREILVRTEILPPRNDELGRLGPWLERHLADQPHHHARVVRNYAEWCLLHRIRRARRPLTKSGAARFRFRVCVAMEFLAWIEDRGRTIDTVDQGDVDRWLAHGNWRQREIRPFLQWTAQRRLTRGISASAIRPRPPSIFIEESVNLEQLQRCLTDEAIDVDLRAAGALILLYGISTTRVLALRHNQFRVIDGATYLVLKDHELFLPTRLAELLAQLPRAGRRSTLPESLAPDRLLFPGRTPHRSVDAGGFGKRLKRSGLTIRGGRNTALVGLAAELPAVVVSDLLGIDIVTATRWAKYAKSDWAGYLAARHAEAWVGLTKTAARERR

SEQ ID NO: 3948 - protein, 747 aa, synthetic construct; identical to SEQ ID NO: 3947
  REGION 1..747: note = TnsF-Tn7 System Protein

SEQ ID NO: 3949 - protein, 370 aa, synthetic construct
  REGION 1..370: note = TnsF-Tn7 System Protein
MSSELPGSAGLSLVARVSPLDPEAAVFRAMLAGWADQQRARVCKAPTILARASVVRRFGDFTGTYPWQWAADDADAFFTHLLSGDSPKADSTIRGYQNALRLFCGFITDGRYGWATLCLERFGAVPAQILHEWNTVTHVTEFEGKPGRRPLSYDEVQQLFDAADGLVDQARRQHRKGALSALRDAAMLKTVYAFGLRRQEVVGLDVTDLRSNPKLPDFGKIGGVFVRHGKASRGNTPKRRTVLTVPEMDWIIEVLEHYLGEVRPCFQPARHPAMWITERVGRLSKRSANDAFTAARTAAELPRELDLHSLRHSYVTHLTEFDYPERFVQDQVGHAYASTTSIYSHVSDEYRNRLLRDALAKRGLTVEDES

SEQ ID NO: 3950 - protein, 109 aa, synthetic construct
  REGION 1..109: note = TnsF-Tn7 System Protein
MIKKMGHQWHLRTMMAQHGLFQTTELVPLLAERGIALSREQVFRLVTQPPQRLSMDVLAALCDILDCTPNDLIEIETVNQSVTRKTAGDAAPPAPTVRRTTVRRPKHTT

SEQ ID NO: 3951 - protein, 431 aa, synthetic construct
  REGION 1..431: note = TnsF-Tn7 System Protein
MLPGRSGHSSHPICVTCAGIPADFHCARCGTEAEHYRKDICARCALRDDLTSLLLDDASDRQSMHQLIEALCTADRAESIHTWLRSAQVRTLLGRLAAGHISLSHAGLDTEPANNRTEHLRSLLVHHGLLPHRDPSLALFERWLDTKLEQITTDDVRRQFARWHHLSRIRDRARSGRPTRGSVLHSKQGITEAIKFLTWLHDTHHRAITTCSQADVDSWLANGPTTRHIIRGFIVWAGKSRLCQDIVVEHYRARTVPLLTQDQRLDWLRELLTGNSTTLPYRIAGILVLLYAQPLVKVAALRTTDVTDSAGELMLTLGKEPAPVPNPFAALLKEHLANRPNLRTGNHGQSPWLFPSYRTGQHLHPTTLSDRLRSHGISLIGARNAALRDLVSDAPPPVVAELLGYSHSATHRHATAAATPYARYTTTRQPD

SEQ ID NO: 3952 - protein, 431 aa, synthetic construct; identical to SEQ ID NO: 3951
  REGION 1..431: note = TnsF-Tn7 System Protein

SEQ ID NO: 3953 - protein, 431 aa, synthetic construct; identical to SEQ ID NO: 3951
  REGION 1..431: note = TnsF-Tn7 System Protein

SEQ ID NO: 3954 - protein, 111 aa, synthetic construct
  REGION 1..111: note = TnsF-Tn7 System Protein
MTRDVDYTWRLAELMASRGWHNSTDLTPHLRERGIDLSASQVYRLVTQRPERVSLKMVSALCDIFACGPEDLITTTAADARRKKTAADPTNVTDLNKSIRPKRARVIADDN

SEQ ID NO: 3955 - protein, 111 aa, synthetic construct; identical to SEQ ID NO: 3954
  REGION 1..111: note = TnsF-Tn7 System Protein

SEQ ID NO: 3956 - protein, 375 aa, synthetic construct
  REGION 1..375: note = TnsF-Tn7 System Protein
MRQALCAADRPRSLFSWLDRSKAPRLLVELAASGEPITHERLDAFPVTHATHYARELLVTAGVLPLRDEYLERQPVWVEQLLATAPEHHRKTAAPFAHWFLLRRLRQVHHRRGGKRVQGGTESILRSRLRRTLELLTWLDQQGITLSEFRQPDLDRWLDEGTSTRQNIRAFIVWASKHNLIGDLKVPLPGRAHPVTFIEDAERVAQLRRCIDDEGLPLWVRVAGALMLLFGLQGSRVLQLTKDDIVDDGTSLQIDLSGRRLHLPPKLAHLVRRLRDQSATRWRLNQLADTRPWLMPGQSPTRPLRVEYLSLKFREYGFNGLGGRNTARLALAANLPASVLADLTGTSVDNAVRWSNFAKRDWTDYVAARKRDTRN

SEQ ID NO: 3957 - protein, 721 aa, synthetic construct
  REGION 1..721: note = TnsF-Tn7 System Protein
MEHTSNADLRVAADTVLARLVGDDTGAARLREDQWRAIEALVADRRRALVVQRTGWGKSAVYFVATSLLRARGSGPTVIVSPLLALMRNQVEAAARAGIHARTINSSNTEEWDTIQDEIAAGDVDVLLVSPERLNNPDFRDQVLPKLAAATGLLVVDEAHCISDWGHDFRPDYRRLRTMLADLPPGVPVLATTATANARVTADVAEQLGTGGTSDALVLRGPLDRDSLSLSVLRLPDAAHRMAWLADHLDDLPGSGIIYTLTVAAAEEVTAFLRHRGHTVASYTGKTENADRQQAEEDLLGNKVKALVATSALGMGFDKPDLGFVVHLGSPSSPIAYYQQVGRAGRGVEHAEVLLLPGQEDEAIWQYFASLAFPSEDLVRRALDVLARADRPLSLPALEPLVELRRSRLETMLKVLDVDGAVRRVKGGWIATGQPWTYEAERYDWVAQQRKAEQQAMREYASTTGCRMEFLQRQLDDEGAKACGRCDNCAGARFTADMSTVALDAARVDLGRAGVEVEPRRMWPTGLPAIGVDLKGRIPAGEQAAPGRALGRLSDIGWGNRLRPMLAPHAPDGPVPDDVAKAVVGVLVDWAKGPSGWASGAQDAPPRPVGVVTVASRTRPQLINSLGARISEVGRLPLLGSLQYTGEAPQASRSNSAQRLKALDGALTIPPTLASALAEVQGPVLLVDDFTETGWTLAVAARMLRRAGAQGVMPLVLAVQG

SEQ ID NO: 3958 - protein, 374 aa, synthetic construct
  REGION 1..374: note = TnsF-Tn7 System Protein
MSRAVDLPGAAHLVLADGVVHLDPEPAVFEAMLEGWARQQRTRFLDEKATIKPRVSLVRRFAEFSNQYPWQWAPVEVEAFFDHLRSRNPRLAVSTARNYQNALRLFCEYTTDARYGWPRTCTDRFGQVPVQILHEWNTVVHTSEYEGRSGRRRLTYDEVQALFDAADARVEEIRCRGRKGSLAALRDAMLLKTVYAYGLRRREACGLDLADLRRNPKAPDCGRFGALFVRHGKASKGGPPKRRNVLTVPEMDWVVDVLNQYIDEVRPAFESAKHPALWVTERRGRISPRRLDEAFDTARRSADLPDELDLHSLRHSYVTHLIEFDYPERFVQDQVGHAYASTTAIYTGVSDDYRNRLLQRVLKERHADLWEGSP

SEQ ID NO: 3959 - protein, 107 aa, synthetic construct
  REGION 1..107: note = TnsF-Tn7 System Protein
MIRKMGITWQLRMRMAEKRMFQTSDLVPLLAERGIHLSREQVFRLVTQTPQRLSMDTLAALCDILDCRPNDLIDIKVVNAEVRKAGGGDASVVPRVRRSTVRRPDLT

SEQ ID NO: 3960 - protein, 478 aa, synthetic construct
  REGION 1..478: note = TnsF-Tn7 System Protein
MFVAARKWPEGYLCSGCFSRACETYGRCAGCGVERLVPGIGKDGEVLCTTCAGGLGDFTCTRCGIEGWLHYAGICGRCVLAERLKVILDDGTGTVRPELVPFFDSVCAMSRPRSGILWLTKPHVPPILRALAGGQVPLTHDGLSTLQPWRCVIHIRDLLVGCGVLAPVDRYLLLFEQWLTGWMQSVEDTNHRKILQRFATWHVLRQLRTTAATGPIGHYRNQAARTYLRQARLFLTDLQGHGRELSECTQTDIDRWYAAASRSEEQGIRPFLMWAVRSRHAPKLHLPALVPTSPKPISQNQRIALIRRIHAGTDMDLTERVIALLILLYAQPLSRIIRLTIDDVLHDGDQVFVRLGDPPVPIPGPFAEIVTNYVANRSNLTTATNPTSRLLFPGQRAGQPLHPSSIWQRLHRLGIPNLNGRSRAIRELLLQAPAPVVAGMVGYHPGHAEQLAAQSGATWKRYAVGDHTKTRKPDPPLT

SEQ ID NO: 3961 - protein, 478 aa, synthetic construct; identical to SEQ ID NO: 3960
  REGION 1..478: note = TnsF-Tn7 System Protein

SEQ ID NO: 3962 - protein, 622 aa, synthetic construct
  REGION 1..622: note = TnsF-Tn7 System Protein
MNENSDATVTESRNFGYKIRLARTFQQVLDETTDGPCVDLTGFAQVVRHNACTLLQARGGAGKTRTATRLGRLLEEQGAPSVIVSALALAQEKSLARLGAEHWIRLSVNPDDETVMTNPSLIVIDGLNEVDRETGERILEAIGPYTATNPQTSVLVTDRLARRNGASPFWMYATLLPVPDDMIRAITGEEPTDAYGIPFYLDRHKKGRAAGEILYESIHRYVSAEQLPHLATAAYLSYEEHKKRTIDRDKVIEAVGTAVWEGMIDGKVVEQVGPTDFYFEHHLLHDYLAGHHLATRRDLWNPGGFDVVTFNASSFDALALSLAEIGSPEDVEELVQRVYNWNFYAAAYMLEEDRAGGRKIGNPMETALLGALAEKRFDYVRPTVTRVEDALRVQRSPLSRALLDAHDRDAVVAVLRSVAEPTDGPEWFTLWWDQYSRPDGTRATREDVEAVAADVPVVGWGAANALRRLRLTKPELSELRQLLKDRASATVRWRAAHALGTHPGGTNLDALRTALRDDEDRWVRYGALRAIFEQIREAKPSRRPDLVEQLKDDVSDELAKSGHLRTEAIRCLDVAPLPPGNWHADIESILAFLWETADAKGSAELANLAERLRRQKDDQHVA

SEQ ID NO: 3963 - protein, 622 aa, synthetic construct; identical to SEQ ID NO: 3962
  REGION 1..622: note = TnsF-Tn7 System Protein

SEQ ID NO: 3964 - protein, 374 aa, synthetic construct
  REGION 1..374: note = TnsF-Tn7 System Protein
MSRNGHVTGSAALSLVDGVSLLHPEDQVFEAMLTGWRNQQMARNLAPSTVDSREHQVRAFTRNAGGYPWQWSAHLADEWFSDLRGVRHCGRSTVRSYQTAIRGFCNFVTDPAYGWAAECEQRFGTHPIQVINEVNAAAHVSESESKPSKRAFTRLELQVLFDHADEQVARKRAMGRKGWLSAFRDATIFKVAYGYGTRRNETRMLDVADFGRNPDGKEFGDYGICYVRYGKARPGSEPKRRSVLTVRPWTSEVLEQWFTEVRPVFGLDDNPAAWPSERGLRVGPEQLNKRLSAYRDALGMDPALDFHSFRRSYVTHLIEDGWDPRFVQEQVGHDHASTTSIYTCVSSDYRTRTLRRALDDMVAEALDATKGGHQ

SEQ ID NO: 3965 - protein, 99 aa, synthetic construct
  REGION 1..99: note = TnsF-Tn7 System Protein
MAEHGMFATTELVPLLSARGIALSSSQVHRLVTGTPERLSLPVLAALCDIFATDPAELITTAASNVGLRKKVTASGESLSPATLAALRPKRARIIDPDQ

SEQ ID NO: 3966 - protein, 354 aa, synthetic construct
  REGION 1..354: note = TnsF-Tn7 System Protein
MSAFLRPRSLLLLRNVLAEPGPIAHTAIDALGPEQTTRHVRALLVQYGLLATVDYHLQRFERWISEAAQTISDPVARSAFTQYANWKHLRELRAKPGPISGSLAGSRRRELRIIKDLLEWAEREGTSLEQLTQGQVDHWSTTGTERHRVQGFLRWARRNRLARDLSVFRAHPPAPTIGGLSDERRQRLLADVLRNDDILAGTRLAAALVLLYGIHPHRIARITLDRVDSVNGLARIRIGSEHLYLPNELGIVAEAVIAARTARRLLHDVHDGVWLLPGTRPGYPLANTTLTRRLREIGVTVAPARRGALTSLAAQLHPVVLADLTGIHIRTAIVWRDAVAASRSRYVDELLQPE

SEQ ID NO: 3967 - protein, 354 aa, synthetic construct; identical to SEQ ID NO: 3966
  REGION 1..354: note = TnsF-Tn7 System Protein

SEQ ID NO: 3968 - protein, 372 aa, synthetic construct
  REGION 1..372: note = TnsF-Tn7 System Protein
MTREGVPFGSASLHLASGVRFLHEEETVFDGMIQGWSAQMKGGRGLKQSSVSGTVGRVRAFREFCGEWPWRWSAAMFDEWMVELVTRGLVLSTRRGYQQAIRSFCTYLCSPHYGWVAECEERFGEHPVQVSHEENTLRHLVDLEGSPGRRPLTRRELQMLLDRVDREVDLRLEQKRKGATLAYRDATMFKVLYGWGLRANEMCHLDTTDLLRTPHAPQFAGMGIVQVRMGKSSSGGAPKRRGVATVHQWAVDALQDYLDQVRPLMIKSTRPTNAIFVTERGTRMKPRDVSERFAYYRDELKLDDVLTPHALRHSYATHLAEDGVDPVFIKEQLGHAYQSTTAIYTGVSSDFKNKMMLDAVRRVVSGSREGES

SEQ ID NO: 3969 - protein, 98 aa, synthetic construct
  REGION 1..98: note = TnsF-Tn7 System Protein
MYKTTDMHRALTERGVKMSSSQVYRLVTEAPERLNLHAFVALMDILHCGADDLIRPVHLGAAVERTGTEHAAPERANDALRTTGARPKRARILPDGDA

SEQ ID NO: 3970 - protein, 245 aa, synthetic construct
  REGION 1..245: note = TnsF-Tn7 System Protein
MISDREHRKLIQRFATWEVLARLRSRAATKPITPASRYYAGDQVKQATAFLGWLAHRGRTLRSCDQADIDTWHAQHAEHDRRRLRGFLLCSMASKLTHPLRLPAPVIARNAPLAHSERMALLGYLLNSEELPLRPRIAGVIVLLYAQPLSQIVRLTIDDVLRNDDQILLRLGEPPSPVPTPFARLLLAWIDERDNMNTATNPNSRWLFPGRRAEQPMHPEASPSWSTSSAFPPAPVAPPPSASTS

SEQ ID NO: 3971 - protein, 487 aa, synthetic construct
  REGION 1..487: note = TnsF-Tn7 System Protein
MRPPAPRGTPRRRDPDGAVVAVRSWPEGPVCSGCFATACETYGTCPGCGTHRLLPGRDTRGRPVCTDCAGGLGDFTCSRCGKEGWNHYRKVCGRCVLTDRLTDALTDDTGQVSPPLVPLLTYLAAMPRPRTGILWLTKPHTRRLLDELAHGRVPLTHHGMDQLSPPRAVAHLRHLLIAAGVLTPVDATLNRTTVWAADYLADLTSEEERRVLQRYDRWVLHRRLEHTARAGPLLPGRDTNHRYQLRQAHEFLTWARARPGGLDGLAQADLDAWATTATSGQRTAVRAFLAWTARTGLSPQVEVPLPLHQQVPPIGQAERIRWIRRAVHDPQVDPVDAVVILLLLLYAQPVPTISRLKLTDLTLDHDGRLAINLGDPPAPVTAPFDRVFLDYLQHAVPVTTGNPHSLWLFPGRHATLPLHPNSLRLRLQHLGLAPAAARIGALRHLAAQAPPAIISQMLGYATTTTERRSKEAAATWARYAASRAQST

SEQ ID NO: 3972 - protein, 487 aa, synthetic construct; identical to SEQ ID NO: 3971
  REGION 1..487: note = TnsF-Tn7 System Protein

SEQ ID NO: 3973 - protein, 1910 aa, synthetic construct
  REGION 1..1910: note = TnsF-Tn7 System Protein
MAATIHKLTAGSGYDYLTRQVARQDATEVGHSGLGSYYTAKGEAPGVWVGSGMTGIAGLAVGDEVTAEHMTRLFGTGEHPLGDASGYSLGRPFRVYGGRDDVTPYRIEVARRCEKHNKALGLPADHPIPVDDRASIRTQVALEMFRTEHGREPFDDRELAGLIARQSRPRTTAVAGFDLTFSPVKSVSTLWAVADRPLGKQIEAAHQAAVRDALAYIEKHALFTRTGKDGVQQVDVRGMVATAFTHRDSRAGDPDLHTHVAVANKVQTVTDGRWLSIDGRVLFKAVVSASEVYNTALEKHLRPLGLAFAPRTQATGPEARKRPVREVVGVDDRLNQAWSTRRASIQARRSELARAFQDRHGRPPTPVESIQLAQQATLETREAKHEPRSEAQQRQTWRAEALSVLGDQDALDSMVDAALTGARTHGFGERVDGQWVERSAARVVGTVQGSRSTWQVWHVRAEAQRRVRAADVPAEQVEDLVEQLTQAALAGSRAMTSARADTISEPQPLRRTDGTSVYTVTGSQLFTSTAVVEAEERLVAAAGVMDGRRACEQDVDLALLESVANGVELNAGQAALVKGMATSGARVQLAIAPAGSGKTTALRALARAWESSGGTVVGLAPSAAAAAVLRENADTQADTLAKLVWHLEHDPEQLPAWAQGIDEATLVVIDEAGMVDTLSLDKAVAFITSRGASVRLVGDDQQLAAVGAGGVLRDIRATHGALHLTELMRFTGAAEGGASLELRDGRPSALGFYLDAGRVHVGDLATMTEEVFGAWSADRARGKDAIMLAPTRELVAELNQRARDHRLEGAPRPADEVALSDGNHASVGDTVITRRNDRRLQTAPTDWVKNGDRWTVLDTTGAGALVVAHTRTHRKIALPADYVLESVELGYASTVHTAQGVSVDVTHGLATGAESRQQLYTMMTRGRDANHVYLQVVGTGDEHDATKPGTVSPRTATDLLEAILARDEAPASASTLLREADDPALLLGQASARYVDALYTAAATTVGTQRLQRLDEAAEHLVPGMSDAPAWPTLRAHLTLMAAGGQNPIPVLRDAVTAREVDTAADPAAVLDWRLDDTGMRNTTPGPLPWIPGIPAPLTDDQTWGPYLAARAQRITDLAQDVAEHAVTAATPQWAAQGTARPADDVLAAVAVWRAANQVDPADLRPTGPAHASKAAATYQRQLASKIQGDRSPALAEWGPLLAQVAPGTVKDPFAAVLAERLAAATRAGIGAAALVRDAAGTKALPDDHAAAALWWRVAQHLTPAVDNTAGPDQLLSTAWVPTLTSKLGDDRARAMQNSPWWPALVTTVDRALQRGWALDDLAATAPAPGSDVDDAAAMTWTISTLLDDPTHLHQSVAPQQEDLDVAAAALDPDPVSVQATDAEYRQYLDIITAAVPSSGPVDQQDDLDAAGVDASLAWAGQYRRLMGPLDPTQADLDRAYDRAVQAQESPVPVKRLVQVNAMALRYYEEQLTAGGWARAYLADRFGQDVAGHPHVRPGYAPAGWTRLADHLRSQGVSDTELQTTGLATTTKDGRLIDRFRDRVVFPITDQDGDVLGFVGRRNPSVDEDAPHAGPKYLNTPTTPLYSKGHQLYGTDAGLMATGATPVLVEGPMDAHAITLATRGMYVGLAPLGTALTEDQAAQLAQLGGPVIMATDADLAGRMAAERAHWLLAQHNVPTFTAPLPQGTDPADMLHDQGADALTGAILGSSPLAEVLMEERLTHLPVDEALEPAARALATADPSSWDRACTQIAGRLGTDEDTARRALHHAVHTWHDDPHAVVTQQLDNTRELRARLEAAARPAPEQRWTSLADRLDPRLTAQEDWPALATTMQQLHDEGHDVETLARASITHEPLVSSRPAQALRARLAATSTSTVPDPRHVPANNWQPRRDEDDRILTHGPDRSGGVPR

SEQ ID NO: 3974 - protein, 1910 aa, synthetic construct; identical to SEQ ID NO: 3973
  REGION 1..1910: note = TnsF-Tn7 System Protein

SEQ ID NO: 3975 - protein, 395 aa, synthetic construct
  REGION 1..395: note = TnsF-Tn7 System Protein
MAAEDPPALTSARDFLIAGVGWVHPEERVLEAMLTGWRQQMLARNLSRGTVEPRLRQVRALVEHANEYPWAWSLATVDEWFADLRSVKGVARSTIRSLQVSIRQFCEYLTDPAYQWPAVCEQHFGSHPIQPITEANRAAHVADYEGSPVRRAFTRTELATLFEHVDAQACARQAEGVKGWATVFRDSVMFKVAYGFGTRRNETRMLDLVDLSPNPKASEFGDYGVLAVRHGKAQRGSAPKRRGVLAVRHGKAQRGSAPKRRGVLTVWPWTADVLAQWVEQVRPMMEHHDSPALFPSERGPRVSANALNRRLRGYCDELGLDPALGFHSFRRSYVTILFEQDWDPRFVQDQVGHEHASTTSLYTCVSSDFRTRTLRRVLDATAAQIRTPPTVQEHP

SEQ ID NO: 3976 - protein, 119 aa, synthetic construct
  REGION 1..119: note = TnsF-Tn7 System Protein
MTQLWNVTYTWRLRELMARDGMHATSDIIGPLAEHGITLSTSQAHRLVTGTPERLNLSVLAALCHILAVSPDELIDTDTQLIGSRLRAVGTTGEKPRRTPRTPVIRPVRAQVHRPDDQL

SEQ ID NO: 3977 - protein, 438 aa, synthetic construct
  REGION 1..438: note = TnsF-Tn7 System Protein
MGEDGDSVCGPCSGDGRNWVCDGCGQVDLLIGGTQCLACTTTTRVRVLLTGPDGQITTQLQGVATFLLQDNTAEQTHVVLNGAGWIHVLRDLVAAGDPITHGMLDALPHGNRVGHLRTILVHTGALDAQADGLESLSPWLRSFLAGLSPKTAQLLRPYASWSVLLRTRHRGARLGITANAPKYARTRIETAAHLLTFLQDNDRTLAEATQHDIDTWIGLGATTRRRVRDFLRWAHARGLSADLQVRWLGREGLAENVLGEDERWVLLRRCLRDDSLALRLRVAGALVLLYGQIPTRVVELTVDSLISSQTGTYLHLKDQPVLLPPPLAALALELAALSPRQQSAGTPAWLFPSTRPGAHLYPGRLSTALNQKLGIFIRPGRGAALAALAADLPAAVLADLLGLSVTTATRWSALVARDNAAYIAARIESPDALNPRTG

SEQ ID NO: 3978 - protein, 438 aa, synthetic construct; identical to SEQ ID NO: 3977
  REGION 1..438: note = TnsF-Tn7 System Protein

SEQ ID NO: 3979 - protein, 371 aa, synthetic construct
  REGION 1..371: note = TnsF-Tn7 System Protein
MADAGDLAGSSHLVLLPGVTHLDPASAVFEAMLAGWALQQRTRFLKAETISSRLRLARRVAEFVNEYPWQWQSADVEAFIDSCRNRREPIAVSTARLYETTLRMFLQYVSDPRYGWTVECLARFGVAPAQLLHEWNTIVHVTDYEGDPRRRPLTYGEVQALFDAADGHVEDIRARGCKGGLAAMRDAALLKTIYAFGLRRREACGLDLADLRHNPKVSAFGRYGGVFVRWGKSSRGSPPKRRTVLTVPEMDWIVAVLEQWLDDIRPAFGVGAHPALWVTERASRISMRRIDEAFTTARDAAGLEPTLSLHCLRHSYVTHLVEFDYPEKFVSTQVGHTYAATTAIYTGVSDEYRNRLLRRALSRHPELSESQ

SEQ ID NO: 3980 - protein, 108 aa, synthetic construct
  REGION 1..108: note = TnsF-Tn7 System Protein
MIQKMSCQWNLRKIMATRDMFATTDLVPLLAERGIHLSREQVFRLVTTTPQRLSLDTLAALCDILDVGVEDLIEITVTSTEVRKAAGQAKPATPPVVRRTTIRRPNGQ

SEQ ID NO: 3981 - protein, 496 aa, synthetic construct
  REGION 1..496: note = TnsF-Tn7 System Protein
MTESVKTPTAEIICDECGRRVRKIMRVHKGHKYCSTCYAREFKRRLCAKCGNYRRLPRRDFAAVCRHCEVDRPCLRCGKKDYRIGRVTPSGPVCNSCAKYFKEAEACELCGQLSKRLTRVSRFKHDLRLCPKCARADHGNCQACHHHRLLMVRGDGRRLCKTCFEGGLIPCQECGQPMPAGRIAECEACYWRGLLKKRIAMNQAAFSAQTMARHFEHYAAWLAATVGENKAAITLNKYLSFFLEMEKVWKDLPDYARLVAHFGAEGLRRVRLPMRWMQETGLVSKDDAVLRDDSEKRQIEQLLKTLEGNTKGSRILKEYHDALMLKANSGKLRLRSVRLALTPARALLLEAQKMGLNFPSQKAVERYLGRVPGQRAALTGFVRFLHEMHSANIAIPQPMDGAVQKARQIKLEKELMAMMRDGDESDEFIRRWVSVGLAYFHGLPKNIGRNVALNLLENEDEGIVIKFSGKSYWLPSVARKNHKINVSYDAVCCPKL

SEQ ID NO: 3982 - protein, 540 aa, synthetic construct
  REGION 1..540: note = TnsF-Tn7 System Protein
MSSSPEALVPSVDAFLEAIQRRRTFAIISHPDAGKTTLTEKLLLFGGAIQLAGTVKARKSSRHATSDWMAIEKNRGISVASSVMQFEYADHVINLLDTPGHQDFSEDTYRVLTAVDSALMVIDGGNGVEAQTIKLLEVCRLRDTPIITFMNKFDRESRDPTELMDEVESVLGIQCAPVTWPIGMGKRFRGVYHLLRDEVLVFAPGEETREHQLERIAGLDNPELDRRFPEEMPELREQVELLRAASNPFSLEDFLAGQQTPVFFGSAINNFGVRELLGALIDWAPSPRPRPTTGRAVQPDEQAFSGFVFKIQANMDPQHRDRVAFLRVCSGHFQRGMKIKHLRIGRDIQVHNPITFLAQERELVEDAYAGDIIGLHNHGSIQIGDSFSQGEALQFTGIPYFAPELFRRVRLRNPLKAKQLQKGLQQLAEEGATQVFKPLQGGDMILGAVGVLQFDVVAERLKTEYAVEAIFDPVTVQTARWIQCEDAKILAEFTRKHEDHLAEDAGGRLAYLAPSRVNLDLTMERWPQVIFHATREHADT

SEQ ID NO: 3983 - protein, 540 aa, synthetic construct; identical to SEQ ID NO: 3982
  REGION 1..540: note = TnsF-Tn7 System Protein

SEQ ID NO: 3984 - protein, 496 aa, synthetic construct; identical to SEQ ID NO: 3981
  REGION 1..496: note = TnsF-Tn7 System Protein

SEQ ID NO: 3985 - protein, 229 aa, synthetic construct
  REGION 1..229: note = TnsF-Tn7 System Protein
MNTNRRYKTDNSPRRKIGTTRRSVSGLYPFRGMGPVDFESTLERDFLIRLETERGVLDVVSQPLTIEFIGSNGQIYPYTPDYLVTYRAYPAPYRAPVLIEVKPVSELCKYLSEWKVKFRAAMAYCKAHGYLFHLRHEPRIRDQRWKNAMFLQRYRQMQFVPEESEWIIGNLNQMGTATFDHLLARHFFGEADRSRGISHLWYLLATSRIECDWSQPLSNNSELWIPEYA

SEQ ID NO: 3986 - protein, 624 aa, synthetic construct
  REGION 1..624: note = TnsF-Tn7 System Protein
MRDSGRQTFRPIPGSMAVSDGAVYRITEVIDFETIIGTDVESGRSASLRIADLAPVVDGSKKVQDIDSIADENWKIAQERHAAIQPLIGQFDVGRREVEARAQEVGVNFTTLYRWLKRYRDAGTLDSLMPEKRGVRKGARKISVHAEQIIQQVIDELYLTVQRPSVQKVVLEVRRRCKEAQLPEVPHPNTIRARVSEISERDSLRKRGYREKAKNKFTPVPGQFPNADYPLAVVQIDHTPADIILVDDIYRKPIGRPTVTMAIDVFSRMVVGYYLSFDAPSITSVGMCVAHAILPKEDWLVLHNVDATWPVSGLMTTIHVDNGSDFRSESFRNSCAMYNIRLEYRPVKQARFGGHIERLLGTFLKEFHGLPGTTFSSIKERDEYDSEKHATMTKSEFETWLVTLICKVYHKRIHSGIGMTPEKKWELGVFGDEDTPGRGLSSIPADREVLLLDFLPMFRRTIQADGVSIDGLTYYADVIRQWINADDPDKPGTKRQFIFRRDPRDISIIWFHDPDLGMYFRIPFADQSMPSMSIWEYTLAAKRARQNGMKSMNETMVLQALNDLRQQVDSSSEKTKKARRQQQRRKEHSKKMSPSRPLAAKTLEKAIPVPALLEGVVKPLDDIA

SEQ ID NO: 3987 - protein, 226 aa, synthetic construct
  REGION 1..226: note = TnsF-Tn7 System Protein
MKGNHRGSRPRPGEISLAHHGILFLDEMPEFSRSVLEVLREPLESGEIHISRAARQSTFPARFQLIAAMNPCPCGNLGNPHQACVCTPTQISQYRGRLSAPLLDRMDIQIEVPSLPVELLQKAPEGESSAYWRERISAAINRQWQRQSCRNAQLQGEALDQHCALQPEGARLLTRAADTLHLSARGYHRILRLARSIADLEESTTISLQHLSEAIQYRRLAQRFIH

SEQ ID NO: 3988 - protein, 353 aa, synthetic construct
  REGION 1..353: note = TnsF-Tn7 System Protein
MLPDEIISSWLVRAALAQGCDPMVLTGEIWPKWRIWTRDVDRFLDENPLTRLVVPSGIPLSFFREATLKNVAEKISGKTLPAKAVWPWILALGARNTKRRSGLQYCPACLRADSIPYYRLQWRFAWHAGCAQHHCVLLDRCPHCRAPLEPHRLQAEDGLVAVCASCKGDLRNVDDLTPCSDDALAFQNAGDGAVRDGKNLFMAQRTETDAWFAGSSFLISLLRRANRSNTEALHVFLGKIGVVIPELPLDPGTGVELLSASERQLLLDALWKLIKTDLADVSTHLEESGITRQGFVSKGEQMPDLFTEIYAQLPDNAKGPRKPFIRDPGQPRSRHEVMRMWRRLQRKMEMQLR

SEQ ID NO: 3989 - protein, 295 aa, synthetic construct
  REGION 1..295: note = TnsF-Tn7 System Protein
MIDLTHIHPEFRHVLGMSDKDRMAFLDEPRWIGYAQANRLLDNLRGLMEKPVRPRMPNLLIVGDSNNGKTTIIRRFQKLHGEGYVNENAEPVKPIIVSEAPPSADEKGLYIAILERFWTPYRATDPASKLRYQVVHLMRDCHVRILVIDEFHSLLTGTVTKQREVMNAIKLLCNELAIPIVGVGTREAVRVLHTDPQHASRFDVVTLPPWELNPEFQQLVASFEQVLPLKKPSLLHQSETVSLLFAISEGNLGNLHRLLVECAVEAIKTGAEKIDKSIIEKKQWLRPTRGIREQV

SEQ ID NO: 3990 - protein, 295 aa, synthetic construct; identical to SEQ ID NO: 3989
  REGION 1..295: note = TnsF-Tn7 System Protein

SEQ ID NO: 3991 - protein, 292 aa, synthetic construct
  REGION 1..292: note = TnsF-Tn7 System Protein
MRIDAQQLSPLVKQPAARQAFEDFSSWMVLNKDPKRAALSIARHVEFFVRLSALKDLPWEPDHLLKHFGTAELRKFELPVRWLRECRGLAITAGQKLEDAERRRLQAQLDSVTRSSPAYPVLEAFHARLCTRRDSGEMTTRSARMSLRPAVDFMRVNPSGRPSQRDLEQYLSGAPGQRACLSLFVRHLREVEGVDLEMPGRRVAKAPAPRRIRTEQDLRELLALPERPVDFEQRWLLLALVHFHRMSKRDAKKLLKEGQVVQEKAGYLVQLGASHYAIPDPTPGLLHQQRTN

SEQ ID NO: 3992 - protein, 182 aa, synthetic construct
  REGION 1..182: note = TnsF-Tn7 System Protein
MPNGSRVSRKSGAIQSQPCTIPFGAGYEYTPDFLVIYRTTLGPAHLQKPSLLVEVKPRSEWRANWRAWSTKWKAARRHAIEMDWRFTIMDEERIRGQALENIKFLRRYDDLVYDEGLSLEIIEDVEARGVVTFGDLLSRRYPEIHRAEGIGHLWHLLATRRLDCDINLRLSYNTELWIPGHE

SEQ ID NO: 3993 - protein, 658 aa, synthetic construct
  REGION 1..658: note = TnsF-Tn7 System Protein
MSKSGAHSTAGSNGVRPAGAFLSVAAGEVVKHPEGVFRIAEVLGFDTVLGHNIENGRARVLLIKELDRVDHAGPALPQGEVTQVEDGRWAQALERMKAIEPLVSGSCTRAEVVARAAEVGRDPATLYRWIARFRNWDTTNSLIPQKAGWREGRGRISAEAERVLDEVIQTFYLTNERPKITATYSEVKIRCDALKMPPPSKKALKARIDRIPEYERMKRRGQREKAKKRFLAVPGSTPDADYPLSRVEIDHTPVDIILVDDVNRLPLGRPYVTVAIECFSRMAMGYYLSFDPPSRTSVAMCMALAMCPKEEWLILHGVDAEWPIWGRPKLIVTDNGPEFQSRDFERAMQKFGIDMEFRPVGLAHFGGHVERVQGTLLREIHDLPGTTFANIAERKEYDSEGRAVMTLGEFERQLLKLICNEYHRRPHSSIGMPPLRKWELGIFGSADSGGIGMPPRPGDRTEILLNFLPSFERTIQNDGVSLENLRYYDDCLRPWIGMLDDETERGRRHLFRRDPRDVSKIWFFDPDLKVYFKVPLADASAPSFSVWEHRRAKEAVAELGYDPSDERVVIQSIRERREMVADSAKKTKKARREHQRNRDHQRALTVDKPLAKAPSPAGPESAPSPENAAQPALTVVSAPTAAAIAGLAAFVAPPEDIA

SEQ ID NO: 3994 - protein, 629 aa, synthetic construct
  REGION 1..629: note = TnsF-Tn7 System Protein
MKCNPDHDFVVWWYGQFVKNPFGHALPHVEALMRRLHSDHSWGGFHLQSFGVTSLPQLRIGSVWRDKRSSTQLAFDVREFSVDFSDGGYDFVSQREHFAKHGMPLLPEGAHPLQNHELDPSQILRLKVGPDRWLLVPCTEFLARCYGRSGKANRLLCQYHVDAARAMMVSASGAPRTEVWPIKIHPGLYKSDAVLLAHLLFDPVTELRARHIYAGIESVQHQHRGAGGAAVAGHDELANGSVLSYWRENGSAHPKVHPWFSGPARLRVEGVEVGDGAFLALRITGCSLPNGPEIEVEYDAALTKLDDGYDDAAEGSAVPAGSAAQGDKIAPLTDISSPGAPAQALEILDPAFEVLGDVREVKVRTVKSDHKSGPKIPATEAEKFSAAERGGGRAVEGARVGYASHHSPVSLERFGTLWAVWRGLKFLVSQLPDQLVSLGWYTTATGLMRDASAGTSAPDDAPLLEPLPITLLADAEASPATKATQRWASMHQGESVTPRGVLIACVETPTEAVFVLELQRRVTIDERGLQKELDRLCGLVVVTERDRNPGTWLPGLLTAIMSSEGIMKKVLPLCPTRNCSDFSHQPPRVGRSRAGDVWARNALDKAGLTLPKLEDLYRDLDGRTSRSSS

SEQ ID NO: 3995 - protein, 336 aa, synthetic construct
  REGION 1..336: note = TnsF-Tn7 System Protein
MRRALDSETPCKLPFRPLIQGEPLSSWLIRSALACGCDPLILCTSIWGAWRPWTRDIDRSLAQVRIQTLSEASGIDAQRLRASTLQQTLANLIPSDASFAGCWPWVVARGSRNRRSHGGFPFCPHCLAQDARPHLRLSWRLAWHVGCEHHGICLLDFCARCGAVVSPQMLTASSGDITACWRCGADLRESRGCTCDPKALAAQGLADAVLAGGPGSALPPEMSTSEWFSAVRSVISERWAAITATSGIEPASFASGLRFELQSVCERHLRMRYLQEVIEARNGDLRGVGVKYVSGVQRKRRARRGVKRGSPPRPRSKAAVMADWARLLRRMGQGYQ

SEQ ID NO: 3996 - protein, 296 aa, synthetic construct
  REGION 1..296: note = TnsF-Tn7 System Protein
MSSFTHIHPNYRHLVAMSDADRIAFLGVDRWIGYTRARDILDLFGRLMDSGPRIRPKNYLLVGEPNNGKSTIVHRFNVLRGEGYVDENVDPVKPVIVAQSPPSPDEKGLYASILERFWAPYKPSSSALALRYQVVHQLRTCKTRILFIDEIHSMLAGTALKQREVMNAIKLLSNETAIPIVAVGTAAAVRVLHTDPQHSSRFEVLPLPLWQLDAEFQSLLAGFETVLPLRKPSLLSSPEMALAIHTSTGGNLGNVQGLMAALAEDAIKRGTEQITLQMVKARGLFQPTSDAARARF

SEQ ID NO: 3997 - protein, 296 aa, synthetic construct; identical to SEQ ID NO: 3996
  REGION 1..296: note = TnsF-Tn7 System Protein

SEQ ID NO: 3998 - protein, 493 aa, synthetic construct
  REGION 1..493: note = TnsF-Tn7 System Protein
MKYRVPENTSCDYCSVLLTDWDYRYQGKHYCKKCYHYLFHYKICIKCNRRRKIYYSQRPPICKFCQVKDKPCIRCKKTKYTNGKITKYGPVCNSCAKYYTQYKKCSTCKQNNGPTSNRTLVDGSQKLLCQKCYDKTLPTCNSCGYRKKPFSYQLNRKPLCKTCSIEVTRDCKECGGKFPAGFGHVCSDCHYQNALVKKATFIEKAMSKHTAQHFIDFSKWLKLRRGVLFASTHIQNYQKYFFQIDKLSIQLDRLPDYEELLATFPHATQGKNLLVHLYFKSVGVLKIDEAIKDKYANLNLIQKYLNTFQKDDYRSNLLESYYEKLLHKFKAKRITFRSIRLALTPAVKFLQYCNNFKNETPNMYILEGYLWIYPGQRSSLAEFTNFLSKQFSYELKISMIPQAKLEKAHESQELLQQRLIKILRNPQYQREHQQYFFKITIGYLHNIHIPDNVYIDLKNVKKDTQDNSYIRLCREIFYLPSLYFKEKDVNLKY

SEQ ID NO: 3999 - protein, 233 aa, synthetic construct
  REGION 1..233: note = TnsF-Tn7 System Protein
MKISMKKRKIGYTYGSVSGHFAFRKQKSIAFESTLERDLLTLLEFNDSVDDVIEQPLTIEYVNHNGRNVTYTPDFLVDFKEAEASALKRLRKPLLIEVKPREKIQKHFSELKPRFKIAMRYARENDMVFKIYDESKIRTPYLKNILFLKRYKRLTYREEDESNILAYINSSGSLTIEAVIEYLFVSKEQKSLGLGQIWNLLANKKLLCDFSKILDKQTIVWVNDNLLFGGDDA

SEQ ID NO: 4000 - protein, 629 aa, synthetic construct
  REGION 1..629: note = TnsF-Tn7 System Protein
MMHKEEAMQSVKLNRSSIQIKENEYVEYKGEVYKISSIIDFNEVVGIDIKTKRAKRLRISDIKPISNDKDIKLPIFNDIGEYTDSEFQEIQKKYLAIEPLLSDHISRKEIEEHAKKIDIHYTTLYRWLRRYQSTGTLLGLLPKPSGRKKGETRLDYATEQLMQDIINTYYLSKQKPSIQAVIRKINIECKNRKIVAPGKNTIRNRIHKLSEYEVLKKQGNRSMARTKFEPVPGKFESDYPMQLIEIDHTPVDLILVDDEHREPIGRPWITVAIDIYSRMIVGYYLSLSAPSVTSVAMCITNVVLPKDKLLLELDIDSNWDVWGFPETIHVDNGADFRAEAIKVAGLAHGINIEFRPVGRSNFGGHIERVIGTLMNAVHEIPGTTFSNIQKRQEYDSDKHSSMTFSEFEKWLVTFITKIYHKRKHTGINLSPEQLWEDGVFGEDAPVGLMPKPTDPLSVTIDFLPIFKRTIQKNGVNIDGINYYDHLLRSKINMLDEDGKKKRFIFKRDPRNIKFIWFYDDETMEYFKIPAADQSMPDMTLWELESIKTHLRESGSRQINNAEILEAHEELNRQIEDASEKSKKARRAKQRLKNKDKEMVQQTPPKEILPKVQDDDDFWDEDVSDIAEDW

SEQ ID NO: 4001 - protein, 206 aa, synthetic construct
  REGION 1..206: note = TnsF-Tn7 System Protein
MGEVGLAHNGILFFDELPHFSKNILEALREPMQDNRIRISRVSSKVEYPCDFLFIGAMNPCPCGNLLNQHLECRCNELEIGRYKNRLSDPFLDRIDLNVIMQNVSADDKISVTSKQLHRQVVEAHIFAKNRKQSSFNAKLNDKEIEKFCTPNNEAQNTLDIAIDRFTLSFRSIKKIQKVGRTIADLDKSETIEKKHLLEALSYRRR

SEQ ID NO: 4002 - protein, 355 aa, synthetic construct
  REGION 1..355: note = TnsF-Tn7 System Protein
MKLAIEPKVFSDESLNSWLIRGSIANGSDPRSFYIALWEEYKAWNKDLDKHLPKQQAYSLAKMTALTPEEIKNLTLEPYLQKIINKPLNPLGLWYFLIPRGKRGLSQTNGMHFCSECLSDSTPYLKRQWRLAWNIGCPVHKIKLLNRCPNCKIIFSPQLLKYDTPKMYLCSSCGFDLRDSRTTPANGKALKFQEMLNNAIFNAQTTSFPALHTQSLQDLFMTIRSIIPFLLHTYKLKKYHLFFETLSLDISYMEENKIMNVFEKMSTDDREFLLKLIYQFLQSDLKIIKKLLQQLGTTNKAFLSKPASMSPTILYLSKYLKNTNGSKIENPKQYVIKPNTKDEVNRLYCELLELI

SEQ ID NO: 4003 - protein, 302 aa, synthetic construct
  REGION 1..302: note = TnsF-Tn7 System Protein
MEILYKHLNEQCQDIVLLDAKDRIRYMHKDILIEYPKIKEIHSLLNQLMDRPKKPRMQNLLIIGESNIGKTSIISSFEKKHHSYGIEDENEMSVIVRPVILALASDNADVKDLYTSILESFWSPFNPGDTLVKLRHQVFHQMQECNVKILIIDEIHHFLRGTSKQQRNVMDALKNIGTKLMIPIVGVGLREASLILTSDPQLSSRFDLIKLSKWELNKDFRVLLQAFEKRLPLKKPSNLASKEKATLLHMISQGNLGNLHRLLIECASYAIENEIEEITLNIINKFKWIKPTNSLTPREIPI

SEQ ID NO: 4004 - protein, 302 aa, synthetic construct; identical to SEQ ID NO: 4003
  REGION 1..302: note = TnsF-Tn7 System Protein

SEQ ID NO: 4005 - protein, 512 aa, synthetic construct
  REGION 1..512: note = TnsF-Tn7 System Protein
MAKSARSRVRGRPKVTDGCVCCTRCGRSANKLRVYWPGDSLCNSCFYTAMRTYGICPRCGHDGVLPGRANRIDERPVCLGCAGIPVDYQCRSCGIEGELMRAGQCARCVLRGDLDELLRGGGGDQGFIAQLIDILCGVDRPESIITWKRSEKVQQLFAGLRCGEITCSHESFDALEPGRHVSHLRSILVHHGLLPRRDERLKVFEGWIEMKLAAIRSKAVRGPVEQFARWHHLSRIRTNSTAEGNSDAPVRSAKQEITETIKFLTWLHKTHKRTASSCRQPDVDEYLASGPTTRHLIRTFFIWARKSGINRTVVIGHRVAKTTSTLTQEQRLHWLHELLTGASESLPYRVAGTLLLLYGQLPTRIAALPMESIVLTPDELRINLGTEPAPVPEPFASLIREHLANRPNLRTAAGTAETPWLFPSNRAGSHIDPQTIMHRLRDLGINLHGARNSALQHLVKEAPPPIVAELLGYSYQVAHLHAQKAAQTWSQYAAGSLGGKQAKPANLSPQRQ

SEQ ID NO: 4006 - protein, 512 aa, synthetic construct; identical to SEQ ID NO: 4005
  REGION 1..512: note = TnsF-Tn7 System Protein

SEQ ID NO: 4007 - protein, 500 aa, synthetic construct
  REGION 1..500: note = TnsF-Tn7 System Protein
MARPRKPEDRDKYPTACARCKGHYSLVKRWPDGTVCEYCYVAAKRVTGVCACGHKGILPGIIGGRPACRGCSGVDLNLDCVECGAEAELYSAGRCQRCVLIATAQRLLTNPETGVLSPELERIVVALGSMTRPNSGLTWIRQKHVDEALQHIAAHPELTHQVFDLLPKGRTTNYLRALLVEHDVLPARNERVIAFREWMDSALERVHTDEHRKLVSQYARWSLERHLRSKDAVSESSFMGAKQVATVTIEFCNWLTTEYDITIGEADQSHLDLWLSTGSVTRLRLERFVCWVVKSRLVDQTLEVPRHRRGTAPRLPAEEQDAVIDTVVHQSTLTPRDRLAAILVIVFGQRVETIAALTWDQIAIDDIVTIKIAELPIELPPPLDQPVRQLAADPSNSQTAAHRDSPWVFRGQKPGHHMGPTALRERLRPTLAAFDARLGTLNQLTQTTPIPILAETLGYSPATLEAHAQASGATYARYVAARTDSHAQSEDRDPAQGELW

SEQ ID NO: 4008 - protein, 850 aa, synthetic construct
  REGION 1..850: note = TnsF-Tn7 System Protein
MNPETKRTQFPAYLLIITNIKLTPADPGGTMQRLNIYIDSQLDHKYGIGKQAKTLRDRGLREIKVWHRNKLNSLLTNNSSIRQRFTPLISVGDIIERLQHLPGSIPVNKLAQVFVDHAQSALQTSRWIRFDDAGDDDSRHQIDRIVVNLPVDKQDGTRSTALSECVERSERLLRLSLCHAERSGAEPPPRHLVITGAPGNGKSTLTRYLAHAYRADFVSNEKNPTSSSSSIINETMTSFDRLGLIRPTIHRWPLRIELAHMAEAMGPTPDSGPSIQKYLCDLISQRSAVQIHPDTLNTWLATWPCVLLFDGLDEVTHRSLRERVINEITQLVASSDDSDCDLFIIVTTRPTGYTERLLPKHFDQLDLAYFTHDEANVYGQFVTSQRLAADEPEYRQSILNKFTKAVNSPGVQRLLKTPLQVLILTVIVASTGQLPTNRYRLFWTYFDTVFKREANKNTTQQTFLNTYRTEIEDIHLRVGLALHQRCETTQEIRARLPLAELRDIAYERIREDGHQIPQANELADKLVDVATRRLVLLVADEDQTVSFDVRSLQELMAGRALIARSEADHRHNLTIAARSPHWRNAWLFAAGEMFAGGSYDREIVVKVVEDCDAHGPWPGWLYPVGPELAAEILDDGLAANKPVFLQRLLTVALRCLDGPMPTEPKSLARGLTSAATDSQLRSTLRDALAQGLAGTPVQRAIASALIHYGDFGGYIPGEPQNPQRYADMWVYRGPKSQGSPIRLGSLIRNELERYAGKDAISEQLSAALTDCDTLRLQYNELGEMKPLSSSGSKEFDSPSTYAALSDTDDSELLQIALSELSPDDWPAKSLLARACWPALSRVPISGDLRI

SEQ ID NO: 4009 - protein, 850 aa, synthetic construct; identical to SEQ ID NO: 4008
  REGION 1..850: note = TnsF-Tn7 System Protein

SEQ ID NO: 4010 - protein, 362 aa, synthetic construct
  REGION 1..362: note = TnsF-Tn7 System Protein
MAVDNAGRVLELAGVRYLNPADQVFEEMLEGWRNQQLSRNLAFSTIEQRLALVRRFQASVNEFPWQWSAAHVDEFFGDQRAVRGSTHSTLRCYQNALRMFCSYICHPEYGWDGLCERLFNAFPAQVCFEWNTARHVQDSEHRPKKRAFTRRELQDFFDRADDEVTRVAESDRKGWHAALRDSVMFKTTYAWGLRMNETSHLQSVDFSRNPHAREFGRFGVAHVRFGKAMRGSPPKARSVLTVFDWSGDILEEWLDRGYDSDGLDLFTTERGTLVSEPTLLRRFRRYCQDLSLSEGLDLHSLRRSYATHLIEAGMDPLFVQHQLGHEYASTTALYTCVSSDFRTRTLRRALDSALHEALNCGV

SEQ ID NO: 4011 - protein, 375 aa, synthetic construct
  REGION 1..375: note = TnsF-Tn7 System Protein
MFDELPGAAARLLRIEPGVSFLRAEERVFEAMLDGWRAQMLARGLATDTIKARCRLVNQFGEFTNEYPWKWKPVDVDEFLAERRSGHRPIALTTLRTYSNSIAMFCSYVSDTRYGWVDFCEKQFGDFPAQICFEWNTPRHSTDDAVPPARRAFTKAELQHFFDVVDDFVDQQFSAGSKRWLPALRDSTAFKVGYAYGLRRRELTMLDLTDFGPNPHVLDYGNYGALTVRWAKGTNGSGPRRRTVLTTPEFDWVVGLLDFWCTDRGRGLFATSDRSAALWPSERSDRVTLSTLTRSFAHFREMAELPAELSLHALRHSFTTHLLEAGYDPLFVQKQLGHQYASTMSLYTSVTADFKQKVVQQMIARRLRTGLHGND

SEQ ID NO: 4012 - protein, 91 aa, synthetic construct
  REGION 1..91: note = TnsF-Tn7 System Protein
MHNSTDLIPYLREREIDLSASQVYRLVTSKPERVSLKLVSAICDIFGCGPEDLITVTATDAQRRKVASSPNVVEINKSTRPRRARVISDDG

SEQ ID NO: 4013 - protein, 120 aa, synthetic construct
  REGION 1..120: note = TnsF-Tn7 System Protein
MTEQRRIGFHWHLRRVMAAHNLWKSTELQPLLRSRGINLSEAQVYRLVTGEPQRIPSRTFAALCDIFGCSPSDLFEPYVELQAAKTAEAPRAKDLGVSPGNPVARRIRLIADEEPGGPSA

SEQ ID NO: 4014 - protein, 497 aa, synthetic construct
  REGION 1..497: note = TnsF-Tn7 System Protein
MTIEINPRSTTRGRPRTKGTLTCARCSRQAKKLRARWPEGAICGTCFHEAMRTYGHCPGCGFERLLPGRGDIGGQPVCVECAGISDDFHCDRCGVEAEFYRHGICARCALREDLTLLLLHCPADPQAMKTLVDAFCNVDRPESILTWKRPEQVRDLLRRLASGEIPLTHEGLDAEGAGKRVNHLRSVLEHHGLLPPRDGRLAHFESWISAKLDTIPEKSVRQPVEQFATWHHLNRVRRISADGHETRGPVHASKQDITETIKFLAWLHESYARTAETCTQQDVDEWLANGPTTRHFIRTFFVWARSARINRTISIDHRQPKSVRVFTQEQRLAWLRELLTGNSESLPYRVAAILLLLYAQPLVKIAGLRTTDVVVTPSEIRLALGSEPVPVPAPFDKLLADHLANRPNLRTTAGLESEWLFPGYRAGRHVLPDTIMQRVRNLGINLLGARNTALRTLVTQVPPPLAAEMLGYSTQVVHKHAELAAQPWARYSAGRQG

SEQ ID NO: 4015 - protein, 497 aa, synthetic construct; identical to SEQ ID NO: 4014
  REGION 1..497: note = TnsF-Tn7 System Protein

SEQ ID NO: 4016 - protein, 366 aa, synthetic construct
  REGION 1..366: note = TnsF-Tn7 System Protein
MAVDKSGRVRLVDSVPLLHPEQHTVDEMLSGWRNQQLCRNLQHSTIDQRARYVQRFLDYTNEFPWTWAPAMVEEFFGDLRSLHHAKQSTVRGYQVALRQFCSYVSNPDYGWDRVCEQRFGAHPAQVFFDWNTAQHVQDNESGPEKRAFTKQELQMFFDYADDQVALIAASGRKGYLPAYRDSVMFKVAYSYGLRFNEFRHLQTVDFAGNPHAKEFGRHGVVHVRYGKAKRGSPPKRRSVLTVFEWTPEIIVDWLTHGQPCLDDGIDLFPSERGALVAEATLIRRFRRYCDELDLPPGLDLHSLRRSYATHLIEDGWDPLFVQHQMGHEHASTTAIYTCVSSDFRTRTLRKALDATIAEALGEGGIG

SEQ ID NO: 4017 - protein, 110 aa, synthetic construct
  REGION 1..110: note = TnsF-Tn7 System Protein
MKRQVDYTWRLAELMARHGLHNSTALIPRLHERGITLSRPQVYRLVNQRPERVSLQMVAALCDIFGCGIEDLVTVTATDARRQKTGSTPNVVELNRAIRPKRARVISDDD

SEQ ID NO: 4018 - protein, 469 aa, synthetic construct
  REGION 1..469: note = TnsF-Tn7 System Protein
MTVTLPIGPICAKCRFAMAYHPGICPECAQRRPLGYHSTVSSGLAVCASCAGEESVFACTSCGREDQPYSNRRCAGCVLAKRLTTLLTDPTTSRIHDRLQPLYDELAGAKRPQSVISWLLKPPATGNRLLGLMARGEMPISHDAFRGFPSDRSHTYLRDLLAGTGILPAYDASLERIERWLDDKLAPLDAEHAALISRYARWHVLHLLRQQSGGGAHISKGQADAARYKVTLGIRLANWAIEHGTTIATLTQPQLDLYFSDHPGGRAGQYGFISWLRRTGANRALRLTAPPSSLPIVDVSDEERWQQVDILLHDDTIRPYARIGGLFTLLFAQNLMDVCAMTTDQITVTDDGKVLVAFDTTPMGMPPILDTLIREHATRRVPSIASTSHGWLFPGRNPGRHLERENFRKELVAHGIHPARSRHAALFSLAGLLPAPVLADLIGIADKTATKWAMLAARDWSDYIAARTR

SEQ ID NO: 4019 - protein, 469 aa, synthetic construct; identical to SEQ ID NO: 4018
  REGION 1..469: note = TnsF-Tn7 System Protein

SEQ ID NO: 4020 - protein, 1145 aa, synthetic construct
  REGION 1..1145: note = TnsF-Tn7 System Protein
MSAGDGYKYLLRTVAAGDGDRSLSTPLTRYYSAEGTPPGRWMGAGLGSLASSIREGDTVSEAQLQLLIGMGRHPVTGEPLGRAYPQYGREGQAGGPRQRAVAGYDFTFSIPKSASVLWAVANADTQALIAGAHHRAVAHVVAYIGREVAMTRTGARAGDGAVAQVRVHGLIATAFDHFDSRAGDPHLHTHVVVSNKVQTALDGKWRSLDGRPVHAAVVALSELHEAIFSDELTRSLGIDWEARDLGRDRNTTWAIVGVPEELVHEFSTRAHAIDGETDRLIAAYVASHGHRPTAATIMKLRAQATLSTRPEKQLHSLAELTGGWRNRASNALGREATSWAHALVADSAGPTLMRATDLSPQQLATLGNSVMVTVADKRTTWRRWNLVAEAARQTMPMRFATASDREAVVELVADAAESASLRLSPPEIAATPLEFQRADGSSVFRARRSAVFTAELLLEAEARLLDRSRDTLAPRMPTVQTRSAGRDRIALGSDQREALDRIVSSGRTVDLLVGAAGTGKTTAMRALRDAWEAFYGRGSVVGLAPSAGAAHVLAEELGIPTENTAKWWTNHLIHGDSFSAGQLVIVDEASLAGTLSLDRVSRLAADAGAKVLLVGDHAQLQAVDAGGAFALLVHDRDDVPELVDVHRFVHSWEKEASVQLRDGDVDVIDAYAEHGRLVEGDSDAMIDAAYAQWRDDVRRGKSSVLVADSNDAVAALNVRARAERILDGEVTGPDEVTLHAGTAAAVGDIVLTRRNDRTLRAGRTWVRNGDRWSVVALRRDGGILVRRTGRAWGATVALPAAYAAEHVDLGYAITAHRAQGITTDTAHVLVRSGMTRESLYVAMTRGREANTAYVAVDRPETAHGGPHPGDPIDVTARTVLYGVVQLVGAELSAHETIAAEQDRWESIAQLGAEYETIAAAAQRDRWVALIERAGLTSAEASGVFDSEAFGPLTAALRRAEADHHDVDLLFPAVVRSRGFDGAGDVAAVILSRLEKTIARGAAQRDIGRRAPRLIAGLIPEALGPMTTEMRVALDERKSLMEHRAQRLTESALAGRDSWVAALGVEPHGSARAAWIRQARVVAAYRDRYAITGHRPIGGVPTSSAQERDAVRARTAMEAARRLASAASDQASGARGSTHRMAAPSR

SEQ ID NO: 4021 - protein, 1145 aa, synthetic construct; identical to SEQ ID NO: 4020
  REGION 1..1145: note = TnsF-Tn7 System Protein

SEQ ID NO: 4022 - protein, 382 aa, synthetic construct
  REGION 1..382: note = TnsF-Tn7 System Protein
MQLKKAALEQHIAVFGESGSGKTVLVSSFYGATQEAQFLSQSLFHVVADDIGQGAKLHRNYLGMRDSARVPDPTQFAATSYAFSVKLKDTGEAKAKSAPFDALRLVWHDYPGEWFEQDVTGEESKRRVDTFRSLLGSDVAVLLVDGQKLLDNAGEEDRYLKSLFGNFRNGLLNLKDELLEDGRPLVEFPRIWILALSKADLLPETTVFNFRDLLIEKAADDLDELRKVLAGIVEDSDALSVGEDFLLLSSAKFEPGKIEVKKRVGLDLVLPLAAILPFERHVKWAQRKQLPAKVAENLLSGAGLLAAALIGKKAKKPGVAGMILGLINADVVNEAAKLAGDKLKAVNAEAFAKQNYVTATLTGFQMDLDQAGKEQFLLRSLK

SEQ ID NO: 4023 - protein, 382 aa, synthetic construct; identical to SEQ ID NO: 4022
  REGION 1..382: note = TnsF-Tn7 System Protein

SEQ ID NO: 4024 - protein, 369 aa, synthetic construct
  REGION 1..369: note = TnsF-Tn7 System Protein
MAGEFPGAAPLMLVPGVVHLNEPAAVFEAMVGGWGRQQRSRQLGSGTIADRERLIRRFQEFTESYPWEWTPADLEDFTVSLTSGPTRFAVSTVRGYHLTLRMFFDYLTDSRYEWPTQCHDRFGTVPAQICNEWNTVAHLNEYEGRPQRRPLTYRELEALFDWLDDRVETIARSGRKGALAALRDATMIKTTYAFGLRRNELVRLDVADLRPNPHVRIWGSYGSVHVRFGKAMRGSLPRRRTVLAVPEFDWAVAGLQQWVAQALPLYEAGGHPALWLTERRTRVSVRHVDEFFATARAEVGLDEHLSLHCLRHSYVTHLIEHGYPERFVTEQVGHTHASTTAIYTSVSNDFKNKALQAALARVYGTSETE

SEQ ID NO: 4025 - protein, 112 aa, synthetic construct
  REGION 1..112: note = TnsF-Tn7 System Protein
MRTIQVQWNLRQVMADRGMFQTSELVPLLEDRGIHLTREHVYRLVTKTPQRLNTEVLVALCDALGCTPTDLITPVVVATATARTGTAGEGGPKIGDLRPVRARIRRPDGVTE

SEQ ID NO: 4026 - protein, 434 aa, synthetic construct
  REGION 1..434: note = TnsF-Tn7 System Protein
MVPGRSRLGEAICRDCAGISTELSCARCGTEAERVRGGLCARCVLRDELEHLLQPAEDRRLQALITALVDAERPESLITYTRGAKARDLLTRIGSRELDLTHAAFDALPSSTAAEHLRALLTHHGVLPNRGSDPVAAFKTWLAGRLSTLPDDGTRSSIEQFATWRHLRRIREREHDDSRNLTTVTHAAKQEITEAGKFLTWLRDAHDVGPNGIQQAHVDEYLSTGTTTRRHIRNYLHWLDPSPTRRFRKIDAPHRVANSTPIVTQEQRLQMVRNCLELDQVVLSTRIAGLILLLWAQPLNRIVMLRRRDLSPRVDGLYLTFGTVPSIVPPELADTFGDYFAHPSNQQTGNTGTDWLFPGTRAGRHLHENTLGERLKVLGIDAQRARNATLQDLVRQVDARSLIDLLGYSGTIITLHAARAGTPMADYVDLRQPR

SEQ ID NO: 4027 - protein, 369 aa, synthetic construct
  REGION 1..369: note = TnsF-Tn7 System Protein
MEHDDNVILFAPFGGAAPDPELFLAGVLDGWERQQRSKDFSPGTIRTRRALVLKLVDFSGHYPWEWTFADVDDFFAHARGVRNLSHATVRSYQTSIKLFCDYACDPRYDWNEQSGRLFGQLFSQVVTEFNRVSHSLPSEARPVKRPFTPRELQELFDLADLEVTRILDSGRRSPVAAWRDAVAFKTAYGWGLRSNELRHLQLVDLSSNHRAPYFGEYGVLRVRWGKPHRGSAKKVRSVLTVWEWSAQVLRDWVENGLPIFGNPVNDLFPTSGGAVVSEPHLLGRLRGLIDELGFPPGLDLHSFRRAYATNLITGEGFDVSFVQMQLGHEHASTTSIYSIPSPDYQTRALQQAHERTLAAAKQLPRRREP

SEQ ID NO: 4028 - protein, 346 aa, synthetic construct
  REGION 1..346: note = TnsF-Tn7 System Protein
MRTSRSVVFRLCDSAGKFPWEWNVGDATDWFDHLRSVRGLAQSTLRAYQGMIEAFCDFATSPAYDWSVRSAQMFGQVFSQVVNEFNRITHSQTNEAKPEKRAFTEDELQQLFDLLDVEYVRVLESGRSGALTVLRDAAACKIAYGWGLRVTEVRRLQIVDFSANARTPYFGDFGNLHVRFGKAKAGQVFKPRNVLTVWQWAAEVAEDWTNNVLPRYGEPLTDLFPTNTGSVVSANHLWQRISDCVDELGFPPGLDFHSLRRSYATHLLTSYRYDIKFIQMQLGHEHAATTSIYTLPAADFQIAELARVHREMLEATGTAVALPKRKLRLPPRPPLPPNRKKNRGAS

SEQ ID NO: 4029 - protein, 113 aa, synthetic construct
  REGION 1..113: note = TnsF-Tn7 System Protein
MRREIEYQWRIRELMARQHITSSTQLVEPLRERGITLSASQVYRLVAQDPERIAFKVLVALCDILHCEVNDLVTFTAADARTIRQKRVANGDPGVPDLRNYRPVRARVTRDDG

SEQ ID NO: 4030 - protein, 99 aa, synthetic construct
  REGION 1..99: note = TnsF-Tn7 System Protein
MARHHIFLAKDLAPLLHERGITLTANAIWRIVKDDPERISLKLLVALADALDVGIDELVTFTAHDAKTIRTRRAAGDGLPDIRDYRPVRARIIDDDDDQ

SEQ ID NO: 4031 - protein, 316 aa, synthetic construct
  REGION 1..316: note = TnsF-Tn7 System Protein
MRRILVAAGVLPTHDEHLRRLEQWMNRAVAAIADPKQRTILYRYAVWYHLRKLRARTGLEKPATDGQAAPIRNHVRAAAAVLATLAESGHTLADLRQADIDEWLAGHRVARRAELGLFLRWARRERLTTVAIPVQQWAGPGSRIDHDHRWALARRLLHDDAVPTEDRLAGLLVVLYAQTAARIRLLRFDHLDSGSGGVRITFGTTPIDLPPAVADLFARLVAERAGTDRAATPWIFPGRPWNQPISAGMLRKRLAALSMSTHAARTAALFQLAVDLPAGLLARCLGIDISSAVDWQRAAAGDWHAYAARTAGIASP

SEQ ID NO: 4032 - protein, 472 aa, synthetic construct
  REGION 1..472: note = TnsF-Tn7 System Protein
MKTVLPLGPVCNACYRHSLTTLGTCVSCERRRLIVGRTVDGGDLCATCSTTGEPAQICSKCHQPGDLLPGGTCPRCTLENRVAELLHTGDTAGPRPLGPLEAVFAGADNPYQMLTWLRRSRAARLLGRLAAHPGDLTHEALDALPQGESTAYVRGLLVSAGILAARDENFALLTRWLARTLTKLPPAHVTLIRAFAGWHVLRDARRRSARGRYTYAAYRGDSVNIRAAARVLAWLDEQHLTLITLQQKHLDTWASGNPTLRAGSIPFIRWAVARGLTTALVIAHPPTRPPSHFQVDDIQQEELRQCLTDRSLPRDVRIAGALTRLYALALTRIVELTAGDLCRDADNAYLTISRRPVILPPSLAYLIEEQIDATTPQRVSADASGYLLPGRSPGRARNPAGLADTMRQHGLPVRAARNTAMMQSLADLPPIVIADLFGIAPGTAHRWAQFANNSWSDYLDDLPDTAPATRPS

SEQ ID NO: 4033 - protein, 363 aa, synthetic construct
  REGION 1..363: note = TnsF-Tn7 System Protein
MPGSARLELTAGVVHLRPEEAMVEAMLRGWRAQQAARGLHEDSILDRELLVRRFLAFTNEYPWQWTAAHVDEWSAWLLAERHLAPSTVRHYQSMLRLFTEFLTDGRYGWVAACEQRFRTFPSLICHEWNTIAHVNQYEGRPEARAFTRAELQKFLDYADDQVDRAIRNRRKGALVAYRDATMFKVIYGWGLRRTETSKLDVVDWARNPQAAQFGRFGSLSVRYGKAKRGRAPRRRTVLSMMGWAVEALADYVDNVRPRFRCADHPALWLTERGGRLQPAEINARFAEYRDALRLPAELRPHSLRHSYVTHLTEDGVDRRFIQVQVGHECDSSTAIYTHVSDAFMNSALRQALAPAFDPDCVTG

SEQ ID NO: 4034 - protein, 363 aa, synthetic construct; identical to SEQ ID NO: 4033
  REGION 1..363: note = TnsF-Tn7 System Protein

SEQ ID NO: 4035 - protein, 110 aa, synthetic construct
  REGION 1..110: note = TnsF-Tn7 System Protein
MDGKLDYRWHLRQLMAGRGMFSTTDLIAPLAARDITLSSSQVYRLVVERPERMSLRILMALLDVLDCRMEDLIEPVAAAQHTRVRKAAGAADDHLGDLRPRRARIMRPDS

SEQ ID NO: 4036 - protein, 110 aa, synthetic construct; identical to SEQ ID NO: 4035
  REGION 1..110: note = TnsF-Tn7 System Protein

SEQ ID NO: 4037 - protein, 360 aa, synthetic construct
  REGION 1..360: note = TnsF-Tn7 System Protein
MLRWAQRTALRNPLAAGIRDFGDVLDHEELDNLPPSKSVEWLRNVLVDAGALPPRDVCLRRTEQFIEARLVTIQNREDRTIVRAFMEWHHLRRLRDQAARGPLKRGSGSAARSEIVSISAFLADLHGHGCCLAACGQGQIDDWLVCNPTRPQIHQFLGWAVRRGHARNVKAPTPQDRRTRKTLASNDERWRLIQYLIEDPDLETRDRVAGLLVLLYSQQTTRLVTLKVADVTVAEDCSVTLKLGVVPLNVPEPVARFILELVEQRRGYAAVAATSNPWLFPGGRSGQHMSETRMGVRLRQIGVSPLIARNTALIELAGELPAAVIAKLLGFSIKRAVTWNIEAGNTYPRYAAAIARSGSR

SEQ ID NO: 4038 - protein, 360 aa, synthetic construct; identical to SEQ ID NO: 4037
  REGION 1..360: note = TnsF-Tn7 System Protein

SEQ ID NO: 4039 - protein, 356 aa, synthetic construct
  REGION 1..356: note = TnsF-Tn7 System Protein
MEAGVAHLHPEDTMVRAMLSGWSKQQLGGRLCGEKTVKSRAAEIRAFIEFSGAYPWNWTARMMDEWSAYLVGELRCAKSTIRHKQGAVRMFCDYITSLYYDWPAQCESWFGVHPVQICHEWNTVAHLVDYEGDPARRPFTRQELQAFLDCADAEVERASRSRRKGTLAAYRDTTMFKTMYGWGLRINELCRLEVADMYRNPHAPELGRCGLLHVRFGKASRGSPPKRRSVPTLMPWAAKALLDYVDNIRPMYEPGNKSALWLTERGSQVKVRTLAETFADIRDMAGLEPKLTPHCFRHTFISHMTEEGVDSKFLQEISGHRFASTTGIYTHLSGEFMNTMLADALGRVTTFGEVQG

SEQ ID NO: 4040 - protein, 103 aa, synthetic construct
  REGION 1..103: note = TnsF-Tn7 System Protein
MAERGLFNTTALRPLLAERGVHLSASQVYRLVTEKPERLSLTTLANLVEILGCTLDDLIEIVPAKSAVKKIAGETRSRKKPVRTSDIGVHRPVRAKIIDDGTE

SEQ ID NO: 4041 - protein, 439 aa, synthetic construct
  REGION 1..439: note = TnsF-Tn7 System Protein
MPFAVRNGSVICWPCHRAEHDTPARTPAPGFRSRPERVAGDLKRPAGWKRDYGCHDCRAQHPRYTYGRCDRCALAAVFDHLTPSPEARRVLAPLRDALLTGPRPASSLSWLRKNPGLLIAMGTGTIPVDHAALDALPRSRTTETIRGQLVATGCLPTRNTYAADFQCWLTDHLATAVAADHRLVLHEYGTWRLLPRIHRPRDSRPQTYSTLQYAKTRIRAAQSFLTWLAGHDTPLARATQADVDDFLTGNPQHVGALEPFLRWTTRTGKTSKLACRKPRSDQPKPALTAEQRWHLLRRVLHDDALEPADRLMGALILAYAAPLTKILLLRTDDLRATHSGPTRDVYLTLGETEIHLPPVLDQLAIQQLKRGRIPHSGNALATGRWLFPGMKAGQPLSHARATVRLRALGLPPGPGRARALLHLAARVEAPLLAQARRRD

SEQ ID NO: 4042 - protein, 439 aa, synthetic construct; identical to SEQ ID NO: 4041
  REGION 1..439: note = TnsF-Tn7 System Protein

SEQ ID NO: 4043 - protein, 746 aa, synthetic construct
  REGION 1..746: note = TnsF-Tn7 System Protein
MIPPRAGAFQNRAERSRLREAVAGGGTTVLCQVLTGMGGVGKTQLAADYARQAWTGGAGVELLVWVTAAGRDMVVAAFAQAGADVCGADLADPQAAADTFLAWLQTGRRRWLIVLDDVADPNDLTGLWPPAVAQGRTVVTTRRRDAALSRGGRQLVEVGVFAPDEAAAYLASVLAIDGRTEPAADLAGLAQDVGYLPLALSQAAAYIADADISVGTYRTLLARRARTLEEASPEVLPDDQRQTMAAAWELSVEYADRLRPQGLARPMLELVAFLAPNSTPAAVLTSPPALDHLASNRSTPPAGIETATHTEPVSPVTGDEAAGALRALHRLSLLTTSRSPDGQAGVGRAGSDANGSGRTVHVHQVIQRATRDTLTAGQYDRSARAAADALMAVWPDVERDTAFAHALRACTAALVSYTEEGNGHTQCLYGSDAHPVLYRAGRSLGESGQVTAAMVHFEQLATTARNHLGPDHPDCFTARDSFAHWRGEAGDAAGAAEALGELLDDRLRVLGPDHPGTLSTRGYLAWWQGETGDAARAVEAFAALLDDRRRVLGPDHPSTLATRGSLARWRGVSGDVAGAAEANAELLNDRVRVLGPDHPSTLATRNNLARWRGEAGDAAGAAEANAELLNDQLRVLGPDHPNTLTTRGYLARWQGETGDTAGAVEAFAELLDDMRRVLGPDHPNTLATRARLARWRGVSGDVAGAAEANAELLKDLVRVLGPDHPSTLTTRNDLAYWQNSNGEAQT

SEQ ID NO: 4044 - protein, 746 aa, synthetic construct; identical to SEQ ID NO: 4043
  REGION 1..746: note = TnsF-Tn7 System Protein

SEQ ID NO: 4045 - protein, 817 aa, synthetic construct
  REGION 1..817: note = TnsF-Tn7 System Protein
MLTTADQLDRAVSDPIGLITDLVTDVEKDLGAESIRAVVTAVAGGRAKSRQLAKALAMRSAVLTDGRSPAPRAIGDLLIELRKAGASAIAAPVCAECGKQLRTLQRKGQDWYCSVCGQERAECTACGNVRRVSFRDRKGLPRCSMCPDTDDRDPAAVAHELITAIAPGADRDAVAGALRQSAPHRPHYRQRVVWALEENPRLLTGEGYLAPHRAILRFVDLLHEAGVAGIVRPACPRCHRVVRIDKPLDGQRVCRNCIAKSRFEECVRCGARREPATRDAEGRPLCPSCLVRDPANLETCVVCGESRMVNSRTADGPICPNCRPLPILLCSICGRTAPCMLSKLTGLPRCGGCDRRQARCTVCGRMRGIHSGTADAPVCGPCTTPDAELWRPCPTCGQAERLHARGPCPRCTLKQRLHELFTDDTGSINPKLQSLHDALVDTERAGTAMRWLSKGIVSTVLSDLGSGRQPLTHEALDELPEGKVVEHIRSVLVATEVLPRRDEQMVRLERHMKDLVASHVTAEGRKILHRYATWHLLRRLRRRSRGKEITHYQLAGARQHLRAAVHLLDWLEEQNLTLSTCRQADLERWMTSDDVRHRREAGHFVRWALSQKIARDLSFPAVRWNGPTQAMDDEARWGTARRLLHDDTLKPEDRLAGLLLLLYAQWPAAISRLTIDHIEETDGAVRVRLGAVPVELPAPVADLARQQVAVRRSHAVLGRTESPWLFPGGQPGRPISAWAMGERLRKLGIRLAEARSTALFQLATELPAAVLARTLGIDITVAVKWQRAAAGDWAAYAAEISQRATRHLQGEDVHAPR

SEQ ID NO: 4046 - protein, 89 aa, synthetic construct
  REGION 1..89: note = TnsF-Tn7 System Protein
MQHTPLSSSRTRRRQRTCPMTTRLRPHTASADTSHTYVTHLTEDGVDRRFIQQQVGHECDSSLAIYTHVSDDFMNTSLHKALAPAFAGV

SEQ ID NO: 4047 - protein, 116 aa, synthetic construct
  REGION 1..116: note = TnsF-Tn7 System Protein
MAAKLDYHWHLRKVMADRGMFSTTDLLPPLAERGITLSTSQVYRLVVERPERLSLKILMALLDILDCTMDDLIEPIAAAGAVKKPKKAAAGGSAPEAEGLGGLRPKRARIRGVDRS

SEQ ID NO: 4048 - protein, 111 aa, synthetic construct
  REGION 1..111: note = TnsF-Tn7 System Protein
MEERGLRSTVELGPLLAERGVLLSDAQVYRLVQYIPERLSLKTLSALCDIFECTPNDLVIPYIEGAVQPVRAVPGAARRRHPAPESEPVVAELPEKFAPVKADLGPTRRRP

SEQ ID NO: 4049 - protein, 766 aa, synthetic construct
  REGION 1..766: note = TnsF-Tn7 System Protein
MTTTANLSLDEAREALVRKVVDAIDPQMPRDRAQQFLIEAKAWNSRGRVAELQRHLAENADAFTAPTHAGPASLPALLQLLAANGYADSVTLLGCARCGRTDVRLRRTSPEGRCCNWCAIKNDRRPCARCGEPGLLTARRKEGAICRRCYNNDPEFLQQCAGCGRTRPPNVRRADGTVLCQGCSLPPPRQCSQCGQTRQTHALTAEGPLCRACYSTPARRCGLCGEINEIQARATDTTPDICRRCYRNIGECVACGRTRAGGKYRGGPFHCISCWPMRPRHCHYCGEYGTACATWPLGTICRSCYQRRLHNPTTCATCQRTAVMVGLNTDGKEICTACSGADLDFACKTCGAEGMHYSAGKCARCVAASRVTDLLSDDTGQVPTQLQPLVDALATAHPNSILTWLRVGKSSRLLAGLVADQQPITHELLDDLNQDGATRYIRQLLVATGVLPSRPEQLTQLMLWATRTTAALPSHQARIIRPFAEWRVVRDARARSRRRNYTDGAAASDRAKILTAIDFLDWIDQKQYSLEAIGQPHLEEWLAANPTSQKHLVVFAKWLTKQRLAGAALTVPSRPTGPPSRLLPEDELHQQLRRCLTDETLPLEVRVAGALIRLYAPMTVRMIELTTDRYHADEHGSFITFDRNPVLLPPSLARLIEQLIERRSVSSMVHNASDEIPRYLFPGRPPSRPIHPRSLQQRLTRYGLPVIHARNAAMIASASTLPPPVMTDLFGIAPSTAYRWAEYAQNSWAAYLEATEHIRQSKAVQP

SEQ ID NO: 4050 - protein, 361 aa, synthetic construct
  REGION 1..361: note = TnsF-Tn7 System Protein
MLAQNVVPLDPPAAVFSAMLEGWRRQQSSRFLRAGTIGSRLALMRRLEEFTGLYPWQWTPAEGEAFIDHLRSTTVKAVSTARSYEIAITLFVEYLLDPRYDWVTVCLEQFGQAPQQIFHEGNSVQHRVENESDPGRRPLNYDEVQALFDAADGRVATIRERGVKGALGAARDAAVLKTLYAFGLRRTEASRLDIGDLHSNKLAPEFRGFGVVTVRHGKPSKGSATKRRSVLLVPEMDWIVDTLAQWVDEIRPRFGLPERYPALWVTERGGRLSPRSINEAFVAARNDAGLDPVLTPHCLRHSAVTHWTEFGYPPRFVQEQVGHAHASTTSIYTHVTNEYRNELLKASLLGRLGQHWDGVSQ

SEQ ID NO: 4051 - protein, 766 aa, synthetic construct; identical to SEQ ID NO: 4049
  REGION 1..766: note = TnsF-Tn7 System Protein

SEQ ID NO: 4052 - protein, 111 aa, synthetic construct
  REGION 1..111: note = TnsF-Tn7 System Protein
MTKKMTFQWRLRALMAEQDMFQTSDLIPHLVERGITLSREQVYRLVTQPPQRLSMDTLVALCDILGCTPNDLIVPEVVAGSARKTADGTGAAPSAPPVVPKRSIVRRPGRS

SEQ ID NO: 4053 - protein, 814 aa, synthetic construct
  REGION 1..814: note = TnsF-Tn7 System Protein
MTITPPTAEDASRVPPVLADPIGVTVALVAAIEPDLNPAVIAGIVAGVAGGRVKQRRLAQALTERPDLLRDGRSPAPRVVADLLIELRRAGAAAISDPACAGCDKPLRSLQRRGQDWYCAPCDRRPEPCGVCGQSRPVAFRDRHGRPQCVQCPVDERDPVDTVTAIVTGIEPGLTSEMVAGVVHAAATRRGQRHQLAWELQDRPDLLTGAGADAAAPCVLRLIDLLVAAGAQTITPPACPHCQRHIPLHRRIGGQWLCRNCVAKTRARPCAECGAVREPGSRDEHGRPLCPTCLLRQPANQETCTTCRRRRPVSVRTPEGPLCQTCRPWPTGTCAICGQTGPCLISKTTGQPWCRACKQRWARCAGCGQDRPIRGGTIEAPLCATCTRPDPGFWRTCPGCGEPGRIHVGANARCARCTIHRRLRHILGDDTGTIRTELQALHDALATTNRTVTVESWLNRSAAPNILQALAGQPLTHDTLDALPPSKPVEHLRSVLVALGTLPARDEQLVRLHRWITDTIAIRTSPDEQHLLRRYAIWHVLRRLRGRLNGADTTHHQFVAAKRNIQAAVTLLDRLADHGRTLAIARQADLDQWLAHDNNGREAGNFIRWARRNKLTTLELPATRWAGPATPIDTEARWERARLLLHDDTIDTELRVAGLLVLLYAQQPATISRLTLDHLQITPVSARLRLGREPIVLPEPLASLVRDLASTRRGHAVIGATSTSPWLFPGGQPGRPISAMQLAERLRDLGLSPAQSRSTALFQLATDLPAAVLARMLGIHISVAAAWQRASAGDWTSYAADVSRRPNGQGAPSR

SEQ ID NO: 4054 - protein, 814 aa, synthetic construct; identical to SEQ ID NO: 4053
  REGION 1..814: note = TnsF-Tn7 System Protein

SEQ ID NO: 4055 - protein, 371 aa, synthetic construct
  REGION 1..371: note = TnsF-Tn7 System Protein
MGRGDLAGAARLQLVSGVVQLRPEDAMVEAMFKGWRAQQVARGLQEDTIAPRERLVRRFQEFTNEYPWNWGPGDVDEWTQSLTSERQLAPSTIRGYQTDLRLFSEYLTDGRYGWAVECEKTFGTFPVPICHEWNTIAHLNDYEGRPEARPFTRQELQRFLDHADEQVERAVRAKRKGALAAYRDATLFKVVYAWGLRRTETSKLDVADWGRNPAAPEFGRYGMLHVRYGKAVRGQPPRRRNVPSVMGWAVEAVADYVDNIRPRFGCAEHPALWVTERGGRVNPAEINARFVAYRDALGLPKTLSPHSLRHSWVTHLTEDGVDRRFIQEAVGHRCDTSTAIYTHVSGDFMNTALRKALAPAFGTPGGQRKEW

SEQ ID NO: 4056 - protein, 113 aa, synthetic construct
  REGION 1..113: note = TnsF-Tn7 System Protein
MAARLDYRWNLRQVMASREMFQTTDLLEPLALREIRLSSSQVYRLVVDRPERLSLKILMALMDILDCSMEDLIEPVVAAQSARRRKVVGGSDGGVGELRPKRARITGADRLPR

SEQ ID NO: 4057 - protein, 110 aa, synthetic construct
  REGION 1..110: note = TnsF-Tn7 System Protein
MKRKVGYEWRLRAVMAQHKMFTATELVPLLHERGIDLSASQVHRLVSGTPERLSLQVLAAFCDILGCTPAELITTSAQNAGVRKTATDDLPAPPTGGRFRPRPARILPDE

SEQ ID NO: 4058 - protein, 805 aa, synthetic construct
  REGION 1..805: note = TnsF-Tn7 System Protein
MAASIDQAIDDDPLSVVVDQIAAVERGLSADRIREVTQTVLPGRTVQRRVAQELRDNAGVLRTGRSPSVWAVGKLLVALTKAGAVQVAVPRCCGCDREIRSLLSRKGGLWACGGCSRAKEECGACGTIGYVISRDRLGRPRCPRCPDDEDPTEELIEAVTGRHPGLERETVERALAGCSTRRAVRRRVAWAVLDQPELLTGVGAQAPTPSALAFINALVDAGATTVVRPGCALCGVADRLRAKRDGQRICWRCDDEARAETCASCGKLRKPGYRNDDGRAVCRDCRANDPISHEPCTGCGHRRRVKARTAQGPWCQQCSPREHRECSVCGQTRRCLTSRATGSPWCRNCRSRHIRCSSCGAVAPLRGGTLRAPLCAPCLNPDPDFWDRCPLCATSWQFGTEPCQRCLVGQRLSELLGHRDDEVPAELEPFRRALAGVERPDHAMGWLAKPKVATLLTALGGDPRSVTHDVLDELPAGKPLNHLRAVLVASGVLPARDERIAQLERWAADQIATRTDPHDRRILHGYAIWHHLRRLRRRLRGQPMTVAQGSNVRVHITAAIQLLEHASNRCGSLNAYTQGELDEFLAHHATYPSRAAHFVRWAVAHRHAHNMKAPATRWAGPSGPYDEDRRWEVARRLLHDDGPPVADRVAGLLLLLYAQTVNTIRHLTVGHVQRDGERLTILFGDRPIVLPAPLDALVEELITHRRGHTLLDVPGTWLFPGRLPGQPLSSSQVVKRLRGLGIKPRQDRGTALFTLAAEIPAVILARTLGIHRSVAVQWQRASGGDWAAYAADVAARPVRTSPPAG

SEQ ID NO: 4059 - protein, 805 aa, synthetic construct; identical to SEQ ID NO: 4058
  REGION 1..805: note = TnsF-Tn7 System Protein

SEQ ID NO: 4060 - protein, 360 aa, synthetic construct
  REGION 1..360: note = TnsF-Tn7 System Protein
MVDLAGAAHLELVSGVVQLRPEDAMFDAMLRGWRNQQLARNLKAKTIGDREKLIRRFLAFANQYPWAWTPVHMDEWSATMTGEKHFAPSTVRNYQGAVRMFSEFLIDQRYGWAPACEDAFGTYPVAICHEWNTIPHLQDYEGDPEARPFTREELQLFFDYADEQVERAVRAGRKGALAAYRDATLFKVIYGWGLRRTESSRLDLVDFGRNPKAPQFGRYGSLNVRYGKAKKGQPPRRRNVLSVMEWAVEAVEDYVANVRPRFGFPDHPALWITERGGRLQPGSINDRFETYRDALGLSEELVPHSLRHSYITHLTEDGVDRRFIQQQVGHENDSSTAIYTHVSDDFMNSALQRALAPAFA

SEQ ID NO: 4061 - protein, 115 aa, synthetic construct
  REGION 1..115: note = TnsF-Tn7 System Protein
MPAAKLDYRWHLRKVMAEQGMFNTSDLIPLLAQRGITLSSSQVYRLVVERPERLSMKVFMALLDILDCRMEDLIEPVATAGAATRPRKAAAAGESAPESGLGTLRPKRARITGVE

SEQ ID NO: 4062 - protein, 660 aa, synthetic construct
  REGION 1..660: note = TnsF-Tn7 System Protein
MTIRRGTPQPNGEFGPRVAAALAGRGIHAPEPLVIAAAERIIPAPRRNGALRFLTSDTFTPSRIPADTPTVVQQLLAHLDRHGVTGIGLPICPGCRTAKVVKMRDEQGRRICFRCTQLSAYGECPSCLRRKKLVATGIEGRPVCQRCGPDGAPTFECTACAKTVTVASRVDGRWHCLNCYPRPARRCVSCGHDKKIATTILTGPHCFACRNRVLRNPAPCPGCGWIRILAFLGDTATAICAGCAGQPARYACRRCGGEEHHYGRLCARCVLDDRCTELLTGPDGTISEPMRALRDHLCTRPRPAQIIKWLRRGPHIDLLCEIASGRTPLTAASFVRPCGDKGLDYLHALLVDAGVISRDRATADLLEAWTVRIIADAPVGHRRLLATYVRWVLLRRASYDSRAGDITPGAADHVKAATRGLIAFLTWLDEQNTPLDAVTQGQVEQFLTVRSAQRWLPQFLGWAHERGLAPQLEVPVLTPGLPNVTASERDHEHTIATLVRDETIALDVRLPSLLIAVYGLPASRILRLRREQLHDTGEAIDLNVSDRPLRLPEPLADLTRTYVARHPDVGPQDWLFPGRQPGRPRNTLYLTRQLRMLGTSISALQKTARFRLAGAVPAKVLADMLGFRVNTFETYAHLAAGTRGDYPGLRHHDVAPHSMS

SEQ ID NO: 4063 - protein, 660 aa, synthetic construct; identical to SEQ ID NO: 4062
  REGION 1..660: note = TnsF-Tn7 System Protein

SEQ ID NO: 4064 - protein, 110 aa, synthetic construct
  REGION 1..110: note = TnsF-Tn7 System Protein
MTTKTITWRLRTLMAERGMFKTTDLIEPLQSEGVALSREQVFRLVTQTPQRLNVEVLAALCTILGCTPNDLLVLEQAGQQPAEATGTGGPIDTIGDLRPVPARIHRPKHS

SEQ ID NO: 4065 - protein, 467 aa, synthetic construct
  REGION 1..467: note = TnsF-Tn7 System Protein
MPGFASSGDPFMPRLAQRLLTELQSSGIDGIVQPRCMACGEERLLVKTLPDGRRVCARCERRLIVHACGVCDKETIIIARPDGVAHCRPCWRKNPASFKQCSRCGAMGEIEKRTADGPLCYRCAPGTVLTCHSCGTFSRIAAHLLGGPQCRSCFRRIKSTAIRCPGCANMRIIAYLGPGNNPCCASCAGVRPRYACADCGGEENLHGKHCYTCVARRRTLELITDRHGVINTAFEPVRQNLLQRPKMTAVVQVAHNRPATELIRALVNNDVPLEHDTLDQWPRPKSAEYVRSLLTDTGLLPTRDENLHLFDTWARKFLESLPPATRNILEPYLRWNVGRNLRIKARRQPLTRNAQHYGRDKLTTAARYLEHLTASGLNLSEANQTHLETCIVQNPSQRLRTHLPAFLAWAHTNALIPKLTINRVRSDVSGHEKLPIGGHESARWRPAELPAGGHEICPLPYLFLPRL

SEQ ID NO: 4066 - protein, 509 aa, synthetic construct
  REGION 1..509: note = TnsF-Tn7 System Protein
MKSDGEIMEILAAYDLTGSLRATAELTGCSHHTVAKHVTARDAGRPIGEPAARGRVTDAFLPKIEEWIEASKGRIRADKAHEKLLALGYTGSERSTRRAIAQVKAAWRLGHTRVHRPWITEPGMWLQYDFGDGPRIGGVKTILFVAWLAFSRFRIVIPLRDRTAPSVFAALDRCFRILGGAPTYVLTDNEKTVTTAHVAGVPVRNQQTLDFARHYGVTVLTCQPADPATKGGVEASVKLAKADLVPKDTNLRDDYRTFAELEAACTAFMDEVNHREHRTTRRKPAAMLAEEAPRLHRIPDTAHTVAFGLARGVPENTPMVTFENAQYSVPAHLLGARVFVRTHGTGPGEQVIIVHHGTTGPVEVARHERARPGSPAINDEHFPGTRAKLPGDYEVRARSADEAAFLAIGEGARTWLVEAAAAGTARMNVKMAEAVTLAKIAGTDQVDRALGDAALHGRFAHPDLASILNANIRRTTTHAANEATSLTQGTGAWAAIGNPATITTPEEAR

SEQ ID NO: 4067 - protein, 509 aa, synthetic construct
  REGION 1..509: note = TnsF-Tn7 System Protein
MNVPILRMLDITKDFNGVKALDGVSLEVARGEVHAICGENGAGKSTLMKVLSGVYGHGTYGGVIEFEAEEAAFRSINDSEARGIVIIHQELALSPYLSIAENIFLGNECARNGIVDWNRTNLEAAALLARVGLRESPATPVLQLGVGKQQLVEIAKALSKRVKLLILDEPTAALNDEDSEHLLNLLEHLRQQGVTSIIISHKLKEIRSIADRVTIIRDGKSIETIDMHGPDGTEGRIIRSMVGRELTSMFPPRKPEISEEIFRVENWTVYHPVDHTRRVVDDASFYVRAGEIVGFAGLMGAGRTELAMSIFGRLYGRNISGTVFKHGKPIDVRTVEAAIANGLAYATEDRKRYGLNLIGNITVNVSAAALSKLARWGVIDRHREYQVAESYRERMNIKAPGVEAITGKLSGGNQQKVVLSKWIFSGPDILILDEPTRGIDVGAKYEIYGIINELAAQGKAVIVISSELPELLGLSDRIYAISEGRITGEVPREAADQEVLMHYMTAGKD

SEQ ID NO: 4068 - protein, 509 aa, synthetic construct; identical to SEQ ID NO: 4067
  REGION 1..509: note = TnsF-Tn7 System Protein

SEQ ID NO: 4069 - protein, 467 aa, synthetic construct; identical to SEQ ID NO: 4065
  REGION 1..467: note = TnsF-Tn7 System Protein

SEQ ID NO: 4070 - protein, 327 aa, synthetic construct
  REGION 1..327: note = TnsF-Tn7 System Protein
MATRSNVALVKRFARFTGEYPWTWQPGDVEDFTVSLLNRAEPASHSTLRGYHGVIRGFCAFITDARYDWPEVCQERFGAHPVQICHDWNTRHHVAEFEARPAKRALTFDEADAFFAHADLKVERILAAGKKGALGALRDAQFFKTVYAFGLRRREACMLDLADLRSNPNNPEWGSYGSLHVRHAKANKGGPPRRRTVLAVPEFAWAVEGLRQWIEEGRPKFRPGSASPVWMTERRSRLSVRHSDEKFALLRDEIGLDPKLTLHSLRHSYVTHLIEYGYPERFVQEQVGHSYASSTAVYTDVSDDYKNRILAKALARVRHPRQQGQQQ

SEQ ID NO: 4071 - protein, 262 aa, synthetic construct
  REGION 1..262: note = TnsF-Tn7 System Protein
MSPVTTTNTVAPPLPADLEALMRSLKMPHARALAPDLIATARAQRWEPAEVIKALFTEEAAGRARSMLASRRKAAGFPTGKTFEAWDPAASSIPGPTQQALRTLEWITRRENLVVCGPSGTGKTFFLEALGQQAVEAGMRVAWFRLEDLGVLIRAHRTDDSVTRAVARILRAELVVIDDIGLLPVATDAAEGLYRVVDAAYEKRSVAISSNLHPAGFDELMPKTLATATVDRLLHHAHVCQTSGDSVRLTQALAGKGVTRLN

SEQ ID NO: 4072 - protein, 262 aa, synthetic construct; identical to SEQ ID NO: 4071
  REGION 1..262: note = TnsF-Tn7 System Protein

SEQ ID NO: 4073 - protein, 116 aa, synthetic construct
  REGION 1..116: note = TnsF-Tn7 System Protein
MTNAYVISWNIRQLMAAKGLYQTTDLVPLMAEHGVSLSREQVYRLVTSTPSRLNLEVLAAFCDILGCTPNDLITFTRAAALSPTERTASGETAETSGLQPIGDLRPVPARIRRPGD

SEQ ID NO: 4074 - protein, 648 aa, synthetic construct
  REGION 1..648: note = TnsF-Tn7 System Protein
MAPINPKPRSRRRGRPPVTTGHYECSRCHRKANTLRVYWPGDQLCHSCFYTAMRTHGICPNCGHDGVLPGRLNRTDPRPVCLTCAAIPGDYACRTCGHEGEIHRRGECARCALRDDLCKILLHHPADPAAMETLLEVLCGVDRPESILTWKRNIQVLQLLGGITSGAIPLTHDGLDTAGPGRHIEHLRSMLVHHHLLPPRDEHLARFERWLATKLDAIDSPTVRGPVEQFATWHHLRRLRSESKPGQGTDGPKRAAQQEITETIKFLTWLEQTHDRTASTCSQQDVDEYLASGPTTRHSIRTFFVWAKRSKINTSITIEHRQARTSPTITQDQRLAWLKELLTGDSESLPYRIAGILLLLYAQPLTKIAGLQTTAVIRVGAETRIALGKEPTPVPEPFASQLHHHLYNRPNQRTTGGAIATPWLFPSSRAGRHLDPQSIMHRLRWLGIELLGSRNRALRELVSQIPPPVVAEMLGYSDQVTQKHAAEAGNTWAQYASATDRKHTPTTPPGRTMTTDSPQVCPTDDKDEPDTDTSEPTLFDLDPPVRPYDVHIESLGAAAAAFDDARGAVQVATNALGQARATAKAAKTQLTDVVLQAHLAGVSWAKIGEALGISQQSAYQRWARRLREDDNATIHDVEDGDESEIPIS

SEQ ID NO: 4075 - protein, 648 aa, synthetic construct; identical to SEQ ID NO: 4074
  REGION 1..648: note = TnsF-Tn7 System Protein

SEQ ID NO: 4076 - protein, 241 aa, synthetic construct
  REGION 1..241: note = TnsF-Tn7 System Protein
MSAGPVGAGVVDLEFDTRAGRLCLALDRCTTFSFEHDCLPVREFPSYRGQRNFPGLWWFSRTGVHVGHESWLERDQLMALDADPDVVGVVSQPFWFRWSDGVSHAPDYFVRRRDGSALVMDVRDDDRITAADQEKFDRSAAECAAVGWDYRRVGVLDPVLQANLRWLSGYRHPRVFRPGLADDLMSAFDPARPLITGVLAVGTPLVVLPVLFHLLWQRKLSADLAATTLTDDTIVSPSAGW

SEQ ID NO: 4077 - protein, 260 aa, synthetic construct
  REGION 1..260: note = TnsF-Tn7 System Protein
MAPTRAFPEGPQRPLPKTVAPFRNETVLSYVARLAHANHLATAQLRRYVAGTAHSHPRPEWLAVAAGYPEQVLRARLRDFPANERNYLNQTTSFRPLCRLCMARRGIHEPVYCTLGPHITVCQRHQLWIGPLAHSLNDQRSLRHQPRVLAAARVHTRLVHRNGDPDILFILRQARHFLSYWANAEQSATNPFEETTLSANIAVYPDLIAIGVTLATYRQQIREQITNRRLAWPLVLLEKINEHTEHTHTDITPIEHRRNA

SEQ ID NO: 4078 - protein, 220 aa, synthetic construct
  REGION 1..220: note = TnsF-Tn7 System Protein
MSAAFGRVDALDFVAARIPVFDGQRCPRIAIDGPDGAGKTHFADALAELLRDRQRPVVRVSLDDFHNTREVRYRLGRSSPEGFWSDSYNYRQFYTDVLVPFRPGGSRRYRTACHDVTTDTILMPEPQLAAPGTVLVVDGIFLHRNELATSWDLSVFLDVPFIETARRMALRDGSNPDPDHPTMRRYVEAQRRYFRECKPQDRATILIANSNHESPVVLRG

SEQ ID NO: 4079 - protein, 220 aa, synthetic construct; identical to SEQ ID NO: 4078
  REGION 1..220: note = TnsF-Tn7 System Protein

SEQ ID NO: 4080 - protein, 344 aa, synthetic construct
  REGION 1..344: note = TnsF-Tn7 System Protein
MAIVTEPGIAAVNQLEDRRQPTTTLEGWRRFIEADPPEFELLDDAFWDALADRERTAYNEARVAHHSELVVVTTSSIEAITNQGRLLTLLNQREIGARRGLIISGAAATGKTTAIKQLGRFHELRTRARFPGDDSRIPVVYVTAPPKGSPRKLAMEFARFLGLPTINPRMNVTDISDAVCQVMIDARTDIVVVDEIHNLNLDTRAGEELSDHLKYFTEHLPATFVYAGIEVEKSGLFTGTRGRQLAGRCGVIHTSAFPDAKEWRQLVAAMEGTLRLHRHKPGTLVAEARYLHLRTCGMIGSLAHLIRAAAIQSMLDGSEKVTRELMDTVLIDYAAHTAAARTAC

SEQ ID NO: 4081 - protein, 344 aa, synthetic construct; identical to SEQ ID NO: 4080
  REGION 1..344: note = TnsF-Tn7 System Protein

SEQ ID NO: 4082 - protein, 367 aa, synthetic construct
  REGION 1..367: note = TnsF-Tn7 System Protein
MPVDKSGRVVLVGSVPLLHPEAQTVEDMLDGWRNQQLCRNLDHETISKRIALVRRFIDHCNEYPWAWTPAMVEEFFADLRGIKGRAQSTVRGYQNGLRLFCSYIADPDYGWDRVCEQRFGTHPAQVFFEWNTAAHVQDNEQNPLKRPFTKKELQDFFDHADEQVSLIANARKKGWLPAYRDSVMFKVAYSYGLRFNELRHLQTVDFSRNPHAAEFGRYGAVLIRYGKAKKGSPPKRRTVFTVFDWTPEVIADWLTHGQPYIDDSIDLFPSERGSLIAETTLLRRFRRYCDELDLPAGLDLHSFRRSHITHLIEDGWDAKFVQDQAGHDVASTTSLYTGVSSDYRTRTLRRMLDQTVKDALSFGEESS

SEQ ID NO: 4083 - protein, 693 aa, synthetic construct
  REGION 1..693: note = TnsF-Tn7 System Protein
MRTGVVREGDEIRLSSGVFTVATLSGGGARLVDAVGQHVVMPLPELLADPALELVSGSRPSLCSEEALAGLPEAVVERARWWERHIVEILTGRPPASVPGTRPRPEFDPTKQSLRQRELAKLAELQALGHEVSRNTLQRRRFAYERDGLLGVVDGRHNRRQPVFGRVDERVVAAVREAIDGETDLSTGTVQRLQRKVAKALVAVYGRDDAPAMPSQPTFYRLVKRLAEGRHTFGSARTRRSLSKQPDGPFGTITVARPGEVVEIDSTPLDVRVVLDDGLVDRVELTAMVDNATRSIAAAVLRPTTKGADASLLLARALTPEPMRPGWADALRMSRSVLPHRSLTSIDVRLADAAARPVIAPETIVCDHGKAYLSQTFRQACCTLGSSLQPAHPDTPTDKPKVERTLQSVGTLFAQHVAGYVGSSVERRGRHAEQDAAWPMVELQALLDEWIVAVWQNRPHEGLRDPLTPGKALTPNEKYAALVEVAGYVPVPLGADDYIELLPARWRTINQYGIRVNHRTYDAKALNPYRRQHSGVDDRGGQWEVHYDPYDVSRIWVRDHHNEEGWIAATWTHLRTSPVPFGDTLWRHAHAQARKNGAHNAREAEIAAIADDLMDRAAQGPVDRPKAERRLTGRTMAALNNRDWPRPADEPEELVPAPRAEAAESEEDDNDDVADVIPLPVFDARKEAQSWRL

SEQ ID NO: 4084 - protein, 117 aa, synthetic construct
  REGION 1..117: note = TnsF-Tn7 System Protein
MKREVDYTWRLAELMAAHGMHNSTDLIPRLAERGIQLSRPQVYRVVHQRPERVSLQLMAALCDILGCGVEDLVTVTATDVRRRKTASGAAATPPPNVVELNKSVRPRRARVITDGPD

SEQ ID NO: 4085 - protein, 310 aa, synthetic construct
  REGION 1..310: note = TnsF-Tn7 System Protein
MGECVRCGRRASKAATWEGLICRTCCEKAARTYGICPGCGADRLLPGRRDGIPTCRDCSGITRDFRCARCGIEAHLLGGRLCERCTLHDRLDTLLEDGTGRVSPALIPLHHLLTDMPRAKSGLAWLRSTKVQNLLTALATGVMPLCHQAFHEHPDWRTAAHLRDLLMSCRLLPTVDKHLLHVESWLQRRLAELAGHEHLPILQRSATWHQLARLRERAARHPLTASTVPLATHEFNRAHEFLLWLARRQCPLDRLSQVDVDLWHATHKPHEHRSLRAFLTWAIRTGRAPRAGATGIRQKRASGLITGRRI

SEQ ID NO: 4086 - protein, 310 aa, synthetic construct; identical to SEQ ID NO: 4085
  REGION 1..310: note = TnsF-Tn7 System Protein

SEQ ID NO: 4087 - protein, 350 aa, synthetic construct
  REGION 1..350: note = TnsF-Tn7 System Protein
MLGGWRNQQLARNLAFSTIEGRLNAVRAFSRHADAHPWEWTPKMVDDWLGDLRAVRHLKQSTLRNYAEAIRSFCAFITDAAYGWAAECERRFGTHPIQVCHEWNTATHLQESEADPAKRAFTREELQVFFDHADEQVERISGAGRKGWLPAFRDATLFKTAYAYGLRRRETRMLDLVDFGPNPHARMFGDFGVCYVRFGKAMKGSPPKRRSVLTVGPRDGVGGLDWIVEILSQWIEEVRPAFAHAHGLALWPSERSLRIGFSQMNTRFATYRDALGLDQGLDFHSFRRSYVTHLIEDGWDPRFVQEQVGHEHASTTSIYTCVSSDFRTRTLRKAMESTVDAALRTGRKNR

SEQ ID NO: 4088 - protein, 572 aa, synthetic construct
  REGION 1..572: note = TnsF-Tn7 System Protein
MTSPSPLLAIRNLSVTFRAGGRDVAAVKDVSLDILPGQTVAVVGESGSGKSTTAAAVNRLLPDNGRITGGEVLFDGRDLVKAREREMLAIRGAGIGLVPQDPMSNLNPLMRIGDQIAEALEVHGRVTGKHARARVTELLEMVGIPDPARRAEQYPHEFSGGMRQRALIAMGLACRPKLLIADEPTSALDVTVQRRILDQLERLTTEMGTAVLLITHDLALAAERADTVVVMYRGEIVETGDAAELLTRPRHEYTRRLLDAVPSLTSSTLVAPPDPAPSPAGGTPEPATGPAGGPMSARDRTEPNPPATGRALVDVRDLRKVFTLRAARTGAATRFTAVDGIAFTIPRGRTVSIVGESGSGKSTTANLLLGLDDATSGHILFDGTDLASLGRRELFAFRRRVQPVFQNPYASLDPRYTVEESITEPLRVHRVGTKAERRQMCARLLDQVSLPSTTAGRLPHELSGGQRQRVAIARALALSPELVVLDEAVSALDVLVQAQILELLAELQRELGLSYLFISHDLAVVHMISHHVHVMRHGKIVESGTPRQIFDHPQDPYTRELLAAIPGARRAA

SEQ ID NO: 4089 - protein, 572 aa, synthetic construct; identical to SEQ ID NO: 4088
  REGION 1..572: note = TnsF-Tn7 System Protein

SEQ ID NO: 4090 - protein, 111 aa, synthetic construct
  REGION 1..111: note = TnsF-Tn7 System Protein
MKRQVSYQWRLREVMAAHGMFNATDLAQPLADRSITLSSVQIWRLVTQSPERLSLPVLAALCDIFDCTPADLIATRAEDARPRRTATGEGGGPVTDLAAIRPKRARIRPQE

SEQ ID NO: 4091 - protein, 503 aa, synthetic construct
  REGION 1..503: note = TnsF-Tn7 System Protein
MTISPNRRSTKRGRPPVTDGAFRCSRCQRMANQCRATWPGEQLCYSCFYAAMHTRGVCPQCGHDGVLAGLAGDASRRPICLSCARIPGDFTCRDCGNEGDFYRRGTCARCALRQDLTALMIDGAQHRDAIDPIVEALCRVDRPESILSWKRSPRVQQLLTGLSNGEIPLTHVGLDQAGSDKAVIHLRSLLEHAGVLAARDEPLARFERWLSVKLEVLTEPAVRGPVEQFATWHHLRRLRQASVPGHNSAAAVRYAKQEVTEAIKFLTWLHSTHHRTLATCLQPDVDEWLVSGPTTRSKIRNLLAWAKKARLNRSVHITHRQAPPSRSLTQQQRLAWLRELLTGDSETLPYRVAGTLLLLFAQPLTKIAALPTSAIATTDNDVQISLGREPIPVPEPFADMLIQHAGSRPNLRAAGGIATSPWLFPGVQAGRHVAPQVIRERLERLGIDLLGARNTTLQSLVGAAPPPVVAELLGYSYATTQLHAEIAAQPWARYITKPSPTTS

SEQ ID NO: 4092 - protein, 503 aa, synthetic construct; identical to SEQ ID NO: 4091
  REGION 1..503: note = TnsF-Tn7 System Protein

SEQ ID NO: 4093 - protein, 358 aa, synthetic construct
  REGION 1..358: note = TnsF-Tn7 System Protein
MALAVVRDLREHRVPTSEEELADFETDVLAGFVLARASAGLVDSTIRNDTNHLELIRDWFGRPLWEMQPADADVYFGTVLRDANPSTRTGRAAALAVYFQFLELRHKIDLHNMTGRVVECPLDEINRPRASVDPQLRIPPTADEVEQLFAGWREELVTCRKFAPAARNYAVARLAADLGLRINEARMLDLDDVRWELGRFGKLNVRHGKGSRRKGPKPRLVPLINGADRSLRWFIEDVLGLFDIDPNSHGAPLFPSERKNIDGTCMRATADVYRRSLAEAADRHLPAWSGKLTPHVLRHFCASELYLGGMNLFAIQELCGHAWTATTARYIHVHATHVEDAWVTGQRRVADRWKGLAQ

SEQ ID NO: 4094 - protein, 866 aa, synthetic construct
  REGION 1..866: note = TnsF-Tn7 System Protein
MTLPVSANCQNDRVSGWGNQSGIAYQQAHAVLICLGLLDGSFPAAAAVGVESKVDAFDLELLDGRGATLKALQIKNRQLDETWAPNDIYPLIMEWSSLPTHPPQGLELRLGGRLGPKGAELQLALRKAADGDPSQLGSFAASVLSTTELTAASAVHLVVDPTPTASLLTAGSQQAMSLLRVPRTGPDARAEADSVLGALYLLVTDRASRREAAERVVTQAEVARLFDLDVVELRQQWDATARRVYQEAALRFGIPKTVTEDFRRQPTPIERAAAVQDDDSKPLIDLLDESSHALISGQSGSGKTTAAIKLRNHFAEAGRALVIANAEAYIPGRLPALVSDSVAMLIDQPVGMSIGRAILGDPTATILFDGAAEMTVDQRQAFADELTPLVHSSNAPRTILVGRDPAVLNSLLPHDVLKNAYTLRGIRRDQREALVGDVLNQMGATDPSDTNRVSAQAMYALKEASCVPYLLSMATELICYGIDIKSRAQMYAVFTEEMARRRGVTDLQFCLLALGVAFGELLRRGRRQCDQFDWRQLLATSSALLHERGVDIDASAIERLARQGGFVAYENYDQTVRPVHDSLADYFAAMAVDKGLLALPESVTENDTLQLQFLAEMSSVSTELAELITNRLPFLSVPVASFDDGPLAPDAPAVAARLLSNVVRDTGLAAPSVQIAESDDHRIFVLTNASQESAFISTDDVASLLFQHGASESSGGPLRIAVTLWKKMLESQLEGGRVGWRIPETESQAAAAVASHAEATAECVGRLTTDLFPPHCRQRVLDLALPEPLDVAIQPGRRDGNPYWPILFRSSPTFRVRVIDFDSWHEDGPHTGWGSVDSIVRRSPEDTAKDYVLKAVNKVVEVPWLR

SEQ ID NO: 4095 - protein, 866 aa, synthetic construct; identical to SEQ ID NO: 4094
  REGION 1..866: note = TnsF-Tn7 System Protein

SEQ ID NO: 4096 - protein, 107 aa, synthetic construct
  REGION 1..107: note = TnsF-Tn7 System Protein
MKWNLRLTAANRGIWKASELQRMLAERGLVISAGKMSGLWSGNPNAIKLHDLDVFCAVLGCGIDELLIPEPETVAAPTPKGNESAAVGGEARPVTPRARTGRSLPPR

SEQ ID NO: 4097 - protein, 367 aa, synthetic construct
  REGION 1..367: note = TnsF-Tn7 System Protein
MPVDLSGRVYVVGSVPVLHPEAQTLNEMLEGWRNQQLCRNLDADTVAGRARLVERFIEATNEFPWTWTPSMVEEFFSDLRSVKRRKQSTVRGYQNALRMFCSYVSDPDYGWDRVCEQRFGTHPAQVFFEWNTASHVQDNEQSPAKRAFTKQELQDFFDHADDRVALVAASARKGWLPAYRDATMFKVAYSYGLRFNELRHLQTVDFSRNAHAGEFGRHGVVQVRYGKAKKGSPPKRRGVLTVFTWTPEIITDWLAHGQACMSAGLDLFPSERGALVAENTLLRRFRRYCRDLELPDGLDLHSLRRSYATHLIEDGWDAKFVQDQMGHDHASTTSLYTCVSSDYRVSTLRRALDSTITSALSFDQESS

SEQ ID NO: 4098 - protein, 116 aa, synthetic construct
  REGION 1..116: note = TnsF-Tn7 System Protein
MKRQVDYTWRLAELMAARGMHNSTQLIPLLLERGIQLSRPQVYRVVHQRPERISLQMMAALCDILGCGVEDLVTVTAADVRRRKASSGSQAVAKPNVVELNKAVRPRRARVLSDDD

(The sequence listing continues in the following parts.)
